(19) United States
(12) Patent Application Publication
(10) Pub. No.: US 2008/0072348 A1
(43) Pub. Date: Mar. 20, 2008

(54) Nucleic acid molecules and other molecules associated with plants

(76) Inventors: Joseph R. Byrum, Des Moines, IA (US); Thomas J. La Rosa, MaryLand Heights, MO (US); Michael D. Thompson, Ballwin, MO (US)

Correspondence Address: ARNOLD & PORTER, LLP, 555 TWELFTH STREET, N.W., ATTN: IP DOCKETING, WASHINGTON, DC, 20004, US

(21) Appl. No.: 11/978,199

(22) Filed: Oct. 29, 2007

Related U.S. Application Data
(63) Continuation of application No. 11/330,083, filed on Jan. 12, 2006.
Application No. 11/330,083 is a continuation of application No. 09/333,535, filed on Jun. 14, 1999, now abandoned.
Application No. 09/333,535 is a continuation-in-part of application No. 09/198,779, filed on Nov. 24, 1998, now abandoned.
Application No. 09/333,535 is a continuation-in-part of application No. 09/206,040, filed on Dec. 4, 1998, now abandoned.
Application No. 09/333,535 is a continuation-in-part of application No. 09/210,297, filed on Dec. 8, 1998, now abandoned.
Application No. 09/210,297 is a continuation-in-part of application No. 09/198,779, filed on Nov. 24, 1998, now abandoned.
Application No. 09/333,535 is a continuation-in-part of application No. 09/244,000, filed on Feb. 8, 1999, now abandoned.
Application No. 09/244,000 is a continuation-in-part of application No. 09/198,779, filed on Nov. 24, 1998, now abandoned.
Application No. 09/333,535 is a continuation-in-part of application No. 09/263,191, filed on Mar. 5, 1999, now abandoned.
Application No. 09/333,535 is a continuation-in-part of application No. 09/283,466, filed on Apr. 2, 1999, now abandoned.
Application No. 09/333,535 is a continuation-in-part of application No. 09/306,349, filed on May 10, 1999, now abandoned.
Application No. 09/333,535 is a continuation-in-part of application No. 09/199,129, filed on Nov. 24, 1998.
Application No. 09/199,129 is a continuation-in-part of application No. 09/198,779, filed on Nov. 24, 1998, now abandoned.
(60) Provisional application No. 60/067,000, filed on Nov. 24, 1997.
(60) Provisional application No. 60/066,873, filed on Nov. 25, 1997.
(60) Provisional application No. 60/069,472, filed on Dec. 9, 1997.
(60) Provisional application No. 60/074,201, filed on Feb. 10, 1998.
(60) Provisional application No. 60/074,280, filed on Feb. 10, 1998.
(60) Provisional application No. 60/074,281, filed on Feb. 10, 1998.
(60) Provisional application No. 60/074,282, filed on Feb. 10, 1998.
(60) Provisional application No. 60/074,565, filed on Feb. 12, 1998.
(60) Provisional application No. 60/074,566, filed on Feb. 12, 1998.
(60) Provisional application No. 60/074,567, filed on Feb. 12, 1998.
(60) Provisional application No. 60/074,789, filed on Feb. 19, 1998.
(60) Provisional application No. 60/075,459, filed on Feb. 19, 1998.
(60) Provisional application No. 60/075,460, filed on Feb. 19, 1998.
(60) Provisional application No. 60/075,461, filed on Feb. 19, 1998.
(60) Provisional application No. 60/075,462, filed on Feb. 19, 1998.
(60) Provisional application No. 60/075,463, filed on Feb. 19, 1998.
(60) Provisional application No. 60/075,464, filed on Feb. 19, 1998.
(60) Provisional application No. 60/077,229, filed on Mar. 9, 1998.
(60) Provisional application No. 60/077,230, filed on Mar. 9, 1998.
(60) Provisional application No. 60/077,231, filed on Mar. 9, 1998.
(60) Provisional application No. 60/078,031, filed on Mar. 16, 1998.
(60) Provisional application No. 60/078,368, filed on Mar. 18, 1998.
(60) Provisional application No. 60/080,844, filed on Apr. 7, 1998.
(60) Provisional application No. 60/083,067, filed on Apr. 27, 1998.
(60) Provisional application No. 60/083,386, filed on Apr. 29, 1998.
(60) Provisional application No. 60/083,387, filed on Apr. 29, 1998.
(60) Provisional application No. 60/083,388, filed on Apr. 29, 1998.
(60) Provisional application No. 60/083,389, filed on Apr. 29, 1998.
(60) Provisional application No. 60/084,684, filed on May 8, 1998.
(60) Provisional application No. 60/085,222, filed on May 13, 1998.
(60) Provisional application No. 60/085,223, filed on May 13, 1998.
(60) Provisional application No. 60/085,224, filed on May 13, 1998.
(60) Provisional application No. 60/085,245, filed on May 13, 1998.
(60) Provisional application No. 60/086,183, filed on May 21, 1998.
(60) Provisional application No. 60/086,184, filed on May 21, 1998.
(60) Provisional application No. 60/086,185, filed on May 21, 1998.
(60) Provisional application No. 60/086,186, filed on May 21, 1998.
(60) Provisional application No. 60/086,187, filed on May 21, 1998.
(60) Provisional application No. 60/086,188, filed on May 21, 1998.
(60) Provisional application No. 60/086,339, filed on May 21, 1998.
(60) Provisional application No. 60/089,524, filed on Jun. 16, 1998.
(60) Provisional application No. 60/089,810, filed on Jun. 18, 1998.
(60) Provisional application No. 60/089,814, filed on Jun. 18, 1998.
(60) Provisional application No. 60/091,247, filed on Jun. 30, 1998.
(60) Provisional application No. 60/092,036, filed on Jul. 8, 1998.
(60) Provisional application No. 60/099,667, filed on Sep. 9, 1998.
(60) Provisional application No. 60/099,668, filed on Sep. 9, 1998.
(60) Provisional application No. 60/099,670, filed on Sep. 9, 1998.
(60) Provisional application No. 60/099,697, filed on Sep. 9, 1998.
(60) Provisional application No. 60/100,672, filed on Sep. 16, 1998.
(60) Provisional application No. 60/100,673, filed on Sep. 16, 1998.
(60) Provisional application No. 60/100,674, filed on Sep. 16, 1998.
(60) Provisional application No. 60/101,130, filed on Sep. 21, 1998.
(60) Provisional application No. 60/101,132, filed on Sep. 21, 1998.
(60) Provisional application No. 60/108,996, filed on Nov. 18, 1998.
(60) Provisional application No. 60/109,018, filed on Nov. 19, 1998.
(60) Provisional application No. 60/100,674, filed on Sep. 16, 1998.
(60) Provisional application No. 60/074,201, filed on Feb. 10, 1998.
(60) Provisional application No. 60/074,280, filed on Feb. 10, 1998.
(60) Provisional application No. 60/074,281, filed on Feb. 10, 1998.
(60) Provisional application No. 60/074,565, filed on Feb. 12, 1998.
(60) Provisional application No. 60/074,566, filed on Feb. 12, 1998.
(60) Provisional application No. 60/074,567, filed on Feb. 12, 1998.
(60) Provisional application No. 60/074,789, filed on Feb. 19, 1998.
(60) Provisional application No. 60/075,459, filed on Feb. 19, 1998.
(60) Provisional application No. 60/075,460, filed on Feb. 19, 1998.
(60) Provisional application No. 60/075,461, filed on Feb. 19, 1998.
(60) Provisional application No. 60/075,463, filed on Feb. 19, 1998.
(60) Provisional application No. 60/075,464, filed on Feb. 19, 1998.
(60) Provisional application No. 60/086,183, filed on May 21, 1998.
(60) Provisional application No. 60/086,188, filed on May 21, 1998.
(60) Provisional application No. 60/067,000, filed on Nov. 24, 1997.
(60) Provisional application No. 60/069,472, filed on Dec. 9, 1997.
(60) Provisional application No. 60/074,201, filed on Feb. 10, 1998.
(60) Provisional application No. 60/074,280, filed on Feb. 10, 1998.
(60) Provisional application No. 60/074,281, filed on Feb. 10, 1998.
(60) Provisional application No. 60/074,282, filed on Feb. 10, 1998.
(60) Provisional application No. 60/074,565, filed on Feb. 12, 1998.
(60) Provisional application No. 60/074,566, filed on Feb. 12, 1998.
(60) Provisional application No. 60/074,567, filed on Feb. 12, 1998.
(60) Provisional application No. 60/074,789, filed on Feb. 19, 1998.
(60) Provisional application No. 60/075,459, filed on Feb. 19, 1998.
(60) Provisional application No. 60/075,460, filed on Feb. 19, 1998.
(60) Provisional application No. 60/075,461, filed on Feb. 19, 1998.
(60) Provisional application No. 60/075,462, filed on Feb. 19, 1998.
(60) Provisional application No. 60/075,463, filed on Feb. 19, 1998.
(60) Provisional application No. 60/075,464, filed on Feb. 19, 1998.
(60) Provisional application No. 60/077,229, filed on Mar. 9, 1998.
(60) Provisional application No. 60/077,230, filed on Mar. 9, 1998.
(60) Provisional application No. 60/077,231, filed on Mar. 9, 1998.
(60) Provisional application No. 60/078,368, filed on Mar. 18, 1998.
(60) Provisional application No. 60/080,844, filed on Apr. 7, 1998.
(60) Provisional application No. 60/083,067, filed on Apr. 27, 1998.
(60) Provisional application No. 60/083,386, filed on Apr. 29, 1998.
(60) Provisional application No. 60/083,387, filed on Apr. 29, 1998.
(60) Provisional application No. 60/083,388, filed on Apr. 29, 1998.
(60) Provisional application No. 60/083,389, filed on Apr. 29, 1998.
(60) Provisional application No. 60/085,222, filed on May 13, 1998.
(60) Provisional application No. 60/085,223, filed on May 13, 1998.
(60) Provisional application No. 60/085,224, filed on May 13, 1998.
(60) Provisional application No. 60/086,183, filed on May 21, 1998.
(60) Provisional application No. 60/086,184, filed on May 21, 1998.
(60) Provisional application No. 60/086,185, filed on May 21, 1998.
(60) Provisional application No. 60/086,186, filed on May 21, 1998.
(60) Provisional application No. 60/086,187, filed on May 21, 1998.
(60) Provisional application No. 60/086,188, filed on May 21, 1998.
(60) Provisional application No. 60/089,524, filed on Jun. 16, 1998.
(60) Provisional application No. 60/089,793, filed on Jun. 18, 1998.
(60) Provisional application No. 60/089,810, filed on Jun. 18, 1998.
(60) Provisional application No. 60/089,814, filed on Jun. 18, 1998.
(60) Provisional application No. 60/099,668, filed on Sep. 9, 1998.
(60) Provisional application No. 60/099,670, filed on Sep. 9, 1998.
(60) Provisional application No. 60/099,697, filed on Sep. 9, 1998.
(60) Provisional application No. 60/100,672, filed on Sep. 16, 1998.
(60) Provisional application No. 60/100,673, filed on Sep. 16, 1998.
(60) Provisional application No. 60/100,674, filed on Sep. 16, 1998.
(60) Provisional application No. 60/101,130, filed on Sep. 21, 1998.
(60) Provisional application No. 60/101,131, filed on Sep. 21, 1998.
(60) Provisional application No. 60/101,132, filed on Sep. 21, 1998.
(60) Provisional application No. 60/108,996, filed on Nov. 18, 1998.
(60) Provisional application No. 60/109,018, filed on Nov. 19, 1998.
(60) Provisional application No. 60/089,524, filed on Jun. 16, 1998.
(60) Provisional application No. 60/089,793, filed on Jun. 18, 1998.
(60) Provisional application No. 60/089,810, filed on Jun. 18, 1998.
(60) Provisional application No. 60/089,814, filed on Jun. 18, 1998.
(60) Provisional application No. 60/099,668, filed on Sep. 9, 1998.
(60) Provisional application No. 60/099,670, filed on Sep. 9, 1998.
(60) Provisional application No. 60/099,697, filed on Sep. 9, 1998.
(60) Provisional application No. 60/100,672, filed on Sep. 16, 1998.
(60) Provisional application No. 60/100,673, filed on Sep. 16, 1998.
(60) Provisional application No. 60/100,674, filed on Sep. 16, 1998.
(60) Provisional application No. 60/101,130, filed on Sep. 21, 1998.
(60) Provisional application No. 60/101,131, filed on Sep. 21, 1998.
(60) Provisional application No. 60/101,132, filed on Sep. 21, 1998.
(60) Provisional application No. 60/108,996, filed on Nov. 18, 1998.
(60) Provisional application No. 60/109,018, filed on Nov. 19, 1998.
(60) Provisional application No. 60/111,981, filed on Dec. 11, 1998.
(60) Provisional application No. 60/112,221, filed on Dec. 14, 1998.
(60) Provisional application No. 60/112,229, filed on Dec. 14, 1998.
(60) Provisional application No. 60/112,808, filed on Dec. 18, 1998.
(60) Provisional application No. 60/113,224, filed on Dec. 22, 1998.
(60) Provisional application No. 60/125,816, filed on Mar. 23, 1999.
(60) Provisional application No. 60/125,817, filed on Mar. 23, 1999.
(60) Provisional application No. 60/125,818, filed on Mar. 23, 1999.
(60) Provisional application No. 60/130,174, filed on Apr. 20, 1999.
(60) Provisional application No. 60/130,464, filed on Apr. 22, 1999.
(60) Provisional application No. 60/133,690, filed on May 10, 1999.
(60) Provisional application No. 60/133,691, filed on May 10, 1999.
(60) Provisional application No. 60/133,692, filed on May 10, 1999.

(51) Int. Cl. A01H 5/00; C07H 21/00; C12N 15/82

(52) U.S. Cl. 800/278; 536/23.6; 800/298; 800/312; 800/314; 800/320.1; 800/320.3

(57) ABSTRACT

Expressed Sequence Tags (ESTs) isolated from soybean are disclosed. The ESTs provide a unique molecular tool for the targeting and isolation of novel genes for plant protection and improvement. The disclosed ESTs have utility in the development of new strategies for understanding critical plant developmental and metabolic pathways. The disclosed ESTs have particular utility in isolating genes and promoters, identifying and mapping the genes involved in developmental and metabolic pathways, and determining gene function. Sequence homology analyses using the ESTs provided in the present invention, will result in more efficient gene screening for desirable agronomic traits. An expanding database of these select pieces of the plant genomics puzzle will quickly expand the knowledge necessary for subsequent functional validation, a key limitation in current plant biotechnology efforts.

### CROSS REFERENCE TO RELATED APPLICATIONS

[0001] This application is a continuation under 35 U.S.C. §120 of U.S. application Ser. No. 09/333,535 filed Jun. 14, 1999, herein incorporated by reference in its entirety. U.S. application Ser. No. 09/333,535 is a continuation-in-part of U.S. application Ser. No. 09/198,779, filed Nov. 24, 1998 (abandoned), which claims the benefit of U.S. Provisional Appln. Ser. No. 60/067,000, filed Nov. 24, 1997; and to U.S. Provisional Appln. Ser. No. 60/066,873, filed Nov. 25, 1997; and to U.S. Provisional Appln. Ser. No. 60/069,472, filed Dec. 9, 1997; and to U.S. Provisional Appln. Ser. No. 60/074,201, filed Feb. 10, 1998; and to U.S. Provisional Appln. Ser. No. 60/074,280, filed Feb. 10, 1998; and to U.S. Provisional Appln. Ser. No. 60/074,281, filed Feb. 10, 1998; and to U.S. Provisional Appln. Ser. No. 60/074,282, filed Feb. 10, 1998; and to U.S. Provisional Appln. Ser. No. 60/074,565, filed Feb. 12, 1998; and to U.S. Provisional Appln. Ser. No. 60/074,566, filed Feb. 12, 1998; and to U.S. Provisional Appln. Ser. No. 60/074,567, filed Feb. 12, 1998; and to U.S. Provisional Appln. Ser. No. 60/074,789, filed Feb. 19, 1998; and to U.S. Provisional Appln. Ser. No. 60/075,459, filed Feb. 19, 1998; and to U.S. Provisional Appln. Ser. No. 60/075,460, filed Feb. 19, 1998; and to U.S. Provisional Appln. Ser. No. 60/075,461, filed Feb. 19, 1998; and to U.S. Provisional Appln. Ser. No. 60/075,462, filed Feb. 19, 1998; and to U.S. Provisional Appln. Ser. No. 60/075,463, filed Feb. 19, 1998; and to U.S. Provisional Appln. Ser. No. 60/075,464, filed Feb. 19, 1998; and to U.S. Provisional Appln. Ser. No. 60/077,229, filed Mar. 9, 1998; and to U.S. Provisional Appln. Ser. No. 60/077,230, filed Mar. 9, 1998; and to U.S. Provisional Appln. Ser. No. 60/077,231, filed Mar. 9, 1998; and to U.S. Provisional Appln. Ser. No. 60/078,031, filed Mar. 16, 1998; and to U.S. Provisional Appln. Ser. No. 60/078,368, filed Mar. 18, 1998; and to U.S. Provisional Appln. Ser. No. 60/080,844, filed Apr. 7, 1998; and to U.S. Provisional Appln. Ser. No. 60/083,067, filed Apr. 27, 1998; and to U.S. Provisional Appln. Ser. No. 60/083,386, filed Apr. 29, 1998; and to U.S. Provisional Appln. Ser. No. 60/083,387, filed Apr. 29, 1998; and to U.S. Provisional Appln. Ser. No. 60/083,388, filed Apr. 29, 1998; and to U.S. Provisional Appln. Ser. No. 60/083,389, filed Apr. 29, 1998; and to U.S. Provisional Appln. Ser. No. 60/084,684, filed May 8, 1998; and to U.S. Provisional Appln. Ser. No. 60/085,222, filed May 13, 1998; and to U.S. Provisional Appln. Ser. No. 60/085,223, filed May 13, 1998; and to U.S. Provisional Appln. Ser. No. 60/085,224, filed May 13, 1998; and to U.S. Provisional Appln. Ser. No. 60/085,245, filed May 13, 1998; and to U.S. Provisional Appln. Ser. No. 60/086,183, filed May 21,1998; and to U.S. Provisional Appln. Ser. No. 60/086,184, filed May 21, 1998; and to U.S. Provisional Appln. Ser. No. 60/086,185, filed May 21, 1998; and to U.S. Provisional Appln. Ser. No. 60/086,186, filed May 21, 1998; and to U.S. Provisional Appln. Ser. No. 60/086,187, filed May 21, 1998; and to U.S. Provisional Appln. Ser. No. 60/086,188, filed May 21, 1998; and to U.S. Provisional Appln. Ser. No. 60/086,339, filed May 21, 1998; and to U.S. Provisional Appln. Ser. No. 60/089,524, filed Jun. 16, 1998; and to U.S. Provisional Appln. Ser. No. 60/089,810, filed Jun. 18, 1998; and to U.S. Provisional Appln. Ser. No. 60/089,814, filed Jun. 18, 1998; and to U.S. Provisional Appln. Ser. No. 60/091,247, filed Jun. 30, 1998; and to U.S. Provisional Appln. Ser. No. 60/092,036, filed Jul. 8, 1998; and to U.S. Provisional Appln. Ser. No. 60/099,667, filed Sep. 9, 1998; and to U.S. Provisional Appln. Ser. No. 60/099,668, filed Sep. 9, 1998; and to U.S. Provisional Appln. Ser. No. 60/099,670, filed Sep. 9, 1998; and to U.S. Provisional Appln. Ser. No. 60/099,697, filed Sep. 9, 1998; and to U.S. Provisional Appln. Ser. No. 60/100,672, filed Sep. 16, 1998; and to U.S. Provisional Appln. Ser. No. 60/100,673, filed Sep. 16, 1998; and to U.S. Provisional Appln. Ser. No. 60/100,674, filed Sep. 16, 1998; and to U.S. Provisional Appln. Ser. No. 60/101,130, filed Sep. 21, 1998; and to U.S. Provisional Appln. Ser. No. 60/101,132, filed Sep. 21, 1998; and to U.S. Provisional Appln. Ser. No. 60/108,996, filed Nov. 18, 1998; and to U.S. Provisional Appln. Ser. No. 60/109,018, filed Nov. 18, 1998. 09/333,535 is also a continuation-in-part of U.S. application Ser. No. 09/206,040, filed Dec. 4, 1998 (abandoned), which claims the benefit of U.S. Provisional Appln. Ser. No. 60/100,647, filed Sep. 16, 1998. Ser. No. 09/333,535 is also a continuation-in-part of U.S. application Ser. No. 09/210,297, filed Dec. 8, 1998 (abandoned), which is a continuation-in-part of U.S. application Ser. No. 09/198,779, filed Nov. 24, 1998 (abandoned), which claims the benefit of U.S. Provisional Appln. Ser. No. 60/067,000, filed Nov. 24, 1997; and to U.S. Provisional Appln. Ser. No. 60/066,873, filed Nov. 25, 1997; and to U.S. Provisional Appln. Ser. No. 60/069,472, filed Dec. 9, 1997; and to U.S. Provisional Appln. Ser. No. 60/074,201, filed Feb. 10, 1998; and to U.S. Provisional Appln. Ser. No. 60/074,280, filed Feb. 10, 1998; and to U.S. Provisional Appln. Ser. No. 60/074,281, filed Feb. 10, 1998; and to U.S. Provisional Appln. Ser. No. 60/074,282, filed Feb. 10, 1998; and to U.S. Provisional Appln. Ser. No. 60/074,565, filed Feb. 12, 1998; and to U.S. Provisional Appln. Ser. No. 60/074,566, filed Feb. 12, 1998; and to U.S. Provisional Appln. Ser. No. 60/074,567, filed Feb. 12, 1998; and to U.S. Provisional Appln. Ser. No. 60/074,789, filed Feb. 19, 1998; and to U.S. Provisional Appln. Ser. No. 60/075,459, filed Feb. 19, 1998; and to U.S. Provisional Appln. Ser. No. 60/075,460, filed Feb. 19, 1998; and to U.S. Provisional Appln. Ser. No. 60/075,461, filed Feb. 19, 1998; and to U.S. Provisional Appln. Ser. No. 60/075,462, filed Feb. 19, 1998; and to U.S. Provisional Appln. Ser. No. 60/075,463, filed Feb. 19, 1998; and to U.S. Provisional Appln. Ser. No. 60/075,464, filed Feb. 19, 1998; and to U.S. Provisional Appln. Ser. No. 60/077,229, filed Mar. 9, 1998; and to U.S. Provisional Appln. Serial No. 60/077,230, filed Mar. 9, 1998; and to U.S. Provisional Appln. Ser. No. 60/077,231, filed Mar. 9, 1998; and to U.S. Provisional Appln. Ser. No. 60/078,031, filed Mar. 16, 1998; and to U.S. Provisional Appln. Ser. No. 60/078,368, filed Mar. 18, 1998; and to U.S. Provisional Appln. Ser. No. 60/080,844, filed Apr. 7, 1998; and to U.S. Provisional Appln. Ser. No. 60/083,067, filed Apr. 27, 1998; and to U.S. Provisional Appln. Ser. No. 60/083,386, filed Apr. 29, 1998; and to U.S. Provisional Appln. Ser. No. 60/083,387, filed Apr. 29, 1998; and to U.S. Provisional Appln. Ser. No. 60/083,388, filed Apr. 29, 1998; and to U.S. Provisional Appln. Ser. No. 60/083,389, filed Apr. 29, 1998; and to U.S. Provisional Appln. Ser. No. 60/084,684, filed May 8, 1998; and to U.S. Provisional Appln. Ser. No. 60/085,222, filed May 13, 1998; and to U.S. Provisional Appln. Serial No. 60/085,223, filed May 13, 1998; and to U.S. Provisional Appln. Ser. No. 60/085,224, filed May 13, 1998; and to U.S. Provisional Appln. Ser. No. 60/085,245, filed May 13, 1998; and to U.S. Provisional Appln. Ser. No. 60/086,183, filed May 21,1998; and to U.S. Provisional Appln. Ser. No. 60/086,184, filed May 21, 1998; and to U.S. Provisional Appln. Ser. No. 60/086,185, filed May 21, 1998; and to U.S. Provisional Appln. Ser. No. 60/086,186, filed May 21, 1998; and to U.S. Provisional Appln. Ser. No. 60/086,187, filed May 21, 1998; and to U.S. Provisional Appln. Ser. No. 60/086,188, filed May 21, 1998; and to U.S. Provisional Appln. Ser. No. 60/086,339, filed May 21, 1998; and to U.S. Provisional Appln. Ser. No. 60/089,524, filed Jun. 16, 1998; and to U.S. Provisional Appln. Ser. No. 60/089,810, filed Jun. 18, 1998; and to U.S. Provisional Appln. Ser. No. 60/089,814, filed Jun. 18, 1998; and to U.S. Provisional Appln. Ser. No. 60/091,247, filed Jun. 30, 1998; and to U.S. Provisional Appln. Ser. No. 60/092,036, filed Jul. 8, 1998; and to U.S. Provisional Appln. Ser. No. 60/099,667, filed Sep. 9, 1998; and to U.S. Provisional Appln. Ser. No. 60/099,668, filed Sep. 9, 1998; and to U.S. Provisional Appln. Ser. No. 60/099,670, filed Sep. 9, 1998; and to U.S. Provisional Appln. Ser. No. 60/099,697, filed Sep. 9, 1998; and to U.S. Provisional Appln. Ser. No. 60/100,672, filed Sep. 16, 1998; and to U.S. Provisional Appln. Ser. No. 60/100,673, filed Sep. 16, 1998; and to U.S. Provisional Appln. Ser. No. 60/100,674, filed Sep. 16, 1998; and to U.S. Provisional Appln. Ser. No. 60/101,130, filed Sep. 21, 1998; and to U.S. Provisional Appln. Ser. No. 60/101,132, filed Sep. 21, 1998; and to U.S. Provisional Appln. Ser. No. 60/108,996, filed Nov. 18, 1998; and to U.S. Provisional Appln. Ser. No. 60/109,018, filed Nov. 18, 1998. 09/333,535 is also a continuation-in-part of U.S. Appln. Ser. No. 09/244,000, filed Feb. 8, 1999 (abandoned), which is a continuation-in-part of U.S. application Ser. No. 09/198,779, filed Nov. 24, 1998 (abandoned), which claims the benefit of U.S. Provisional Appln. Ser. No. 60/067,000, filed Nov. 24, 1997; and to U.S. Provisional Appln. Ser. No. 60/066,873, filed Nov. 25, 1997; and to U.S. Provisional Appln. Ser. No. 60/069,472, filed Dec. 9, 1997; and to U.S. Provisional Appln. Ser. No. 60/074,201, filed Feb. 10, 1998; and to U.S. Provisional Appln. Ser. No. 60/074,280, filed Feb. 10, 1998; and to U.S. Provisional Appln. Ser. No. 60/074,281, filed Feb. 10, 1998; and to U.S. Provisional Appln. Ser. No. 60/074,282, filed Feb. 10, 1998; and to U.S. Provisional Appln. Ser. No. 60/074,565, filed Feb. 12, 1998; and to U.S. Provisional Appln. Ser. No. 60/074,566, filed Feb. 12, 1998; and to U.S. Provisional Appln. Ser. No. 60/074,567, filed Feb. 12, 1998; and to U.S. Provisional Appln. Ser. No. 60/074,789, filed Feb. 19, 1998; and to U.S. Provisional Appln. Ser. No. 60/075,459, filed Feb. 19, 1998; and to U.S. Provisional Appln. Ser. No. 60/075,460, filed Feb. 19, 1998; and to U.S. Provisional Appln. Ser. No. 60/075,461, filed Feb. 19, 1998; and to U.S. Provisional Appln. Ser. No. 60/075,462, filed Feb. 19, 1998; and to U.S. Provisional Appln. Ser. No. 60/075,463, filed Feb. 19, 1998; and to U.S. Provisional Appln. Ser. No. 60/075,464, filed Feb. 19, 1998; and to U.S. Provisional Appln. Ser. No. 60/077,229, filed Mar. 9, 1998; and to U.S. Provisional Appln. Ser. No. 60/077,230, filed Mar. 9, 1998; and to U.S. Provisional Appln. Ser. No. 60/077,231, filed Mar. 9, 1998; and to U.S. Provisional Appln. Ser. No. 60/078,031, filed Mar. 16, 1998; and to U.S. Provisional Appln. Ser. No. 60/078,368, filed Mar. 18, 1998; and to U.S. Provisional Appln. Ser. No. 60/080,844, filed Apr. 7, 1998; and to U.S. Provisional Appln. Ser. No. 60/083,067, filed Apr. 27, 1998; and to U.S. Provisional Appln. Ser. No. 60/083,386, filed Apr. 29, 1998; and to U.S. Provisional Appln. Ser. No. 60/083,387, filed Apr. 29, 1998; and to U.S. Provisional Appln. Ser. No. 60/083,388, filed Apr. 29, 1998; and to U.S. Provisional Appln. Ser. No. 60/083,389, filed Apr. 29, 1998; and to U.S. Provisional Appln. Ser. No. 60/084,684, filed May 8, 1998; and to U.S. Provisional Appln. Ser. No. 60/085,222, filed May 13, 1998; and to U.S. Provisional Appln. Ser. No. 60/085,223, filed May 13, 1998; and to U.S. Provisional Appln. Ser. No. 60/085,224, filed May 13, 1998; and to U.S. Provisional Appln. Ser. No. 60/085,245, filed May 13, 1998; and to U.S. Provisional Appln. Ser. No. 60/086,183, filed May 21,1998; and to U.S. Provisional Appln. Ser. No. 60/086,184, filed May 21, 1998; and to U.S. Provisional Appln. Ser. No. 60/086,185, filed May 21, 1998; and to U.S. Provisional Appln. Ser. No. 60/086,186, filed May 21, 1998; and to U.S. Provisional Appln. Ser. No. 60/086,187, filed May 21, 1998; and to U.S. Provisional Appln. Ser. No. 60/086,188, filed May 21, 1998; and to U.S. Provisional Appln. Ser. No. 60/086,339, filed May 21, 1998; and to U.S. Provisional Appln. Ser. No. 60/089,524, filed Jun. 16, 1998; and to U.S. Provisional Appln. Ser. No. 60/089,810, filed Jun. 18, 1998; and to U.S. Provisional Appln. Ser. No. 60/089,814, filed Jun. 18, 1998; and to U.S. Provisional Appln. Ser. No. 60/091,247, filed Jun. 30, 1998; and to U.S. Provisional Appln. Ser. No. 60/092,036, filed Jul. 8, 1998; and to U.S. Provisional Appln. Ser. No. 60/099,667, filed Sep. 9, 1998; and to U.S. Provisional Appln. Ser. No. 60/099,668, filed Sep. 9, 1998; and to U.S. Provisional Appln. Ser. No. 60/099,670, filed Sep. 9, 1998; and to U.S. Provisional Appln. Ser. No. 60/099,697, filed Sep. 9, 1998; and to U.S. Provisional Appln. Ser. No. 60/100,672, filed Sep. 16, 1998; and to U.S. Provisional Appln. Ser. No. 60/100,673, filed Sep. 16, 1998; and to U.S. Provisional Appln. Ser. No. 60/100,674, filed Sep. 16, 1998; and to U.S. Provisional Appln. Ser. No. 60/101,130, filed Sep. 21, 1998; and to U.S. Provisional Appln. Ser. No. 60/101,132, filed Sep. 21, 1998; and to U.S. Provisional Appln. Ser. No. 60/108,996, filed Nov. 18, 1998; and to U.S. Provisional Appln. Ser. No. 60/109,018, filed Nov. 18, 1998. U.S. application Ser. No. 09/244,000 also claims the benefit of U.S. Provisional Appln. Ser. No. 60/074,201, filed Feb. 10, 1998; and to U.S. Provisional Appln. Ser. No. 60/074,280, filed Feb. 10, 1998; and to U.S. Provisional Appln. Ser. No. 60/074,281, filed Feb. 10, 1998; and to U.S. Provisional Appln. Ser. No. 60/074,565, filed Feb. 12, 1998; and to U.S. Provisional Appln. Ser. No. 60/074,566, filed Feb. 12, 1998; and to U.S. Provisional Appln. Ser. No. 60/074,567, filed Feb. 12, 1998; and to U.S. Provisional Appln. Ser. No. 60/074,789, filed Feb. 19, 1998; and to U.S. Provisional Appln. Ser. No. 60/075,459, filed Feb. 19, 1998; and to U.S. Provisional Appln. Ser. No. 60/075,460, filed Feb. 19, 1998; and to U.S. Provisional Appln. Ser. No. 60/075,461, filed Feb. 19, 1998; and to U.S. Provisional Appln. Ser. No. 60/075,463, filed Feb. 19, 1998; and to U.S. Provisional Appln. Ser. No. 60/075,464, filed Feb. 19, 1998; and to U.S. Provisional Appln. Ser. No. 60/086,183, filed May 21, 1998; and to U.S. Provisional Appln. Ser. No. 60/086,188, filed May 21, 1998. Ser. No. 09/333,535 is also a continuation-in-part of U.S. application Ser. No. 09/263,191, filed Mar. 5, 1999 (abandoned). Ser. No. 09/333,535 is also a continuation-in-part of U.S. application Ser. No. 09/283,466, filed Apr. 2, 1999 (abandoned). Ser. No. 09/333,535 is also a continuation-in-part of U.S. application Ser. No. 09/306,349, filed May 10, 1999 (abandoned). 09/333,535 is also a continuation-in-part of U.S. application Ser. No. 09/199,129, filed Nov. 24, 1998, which is a continuation-in-part of U.S. application Ser. No. 09/198,779, filed Nov. 24, 1998 (abandoned), which claims the benefit of U.S. Provisional Appln. Ser. No. 60/067,000, filed Nov. 24, 1997; and to U.S. Provisional Appln. Ser. No. 60/066,873, filed Nov. 25, 1997; and to U.S. Provisional Appln. Ser. No. 60/069,472, filed Dec. 9, 1997; and to U.S. Provisional Appln. Ser. No. 60/074,201, filed Feb. 10, 1998; and to U.S. Provisional Appln. Ser. No. 60/074,280, filed Feb. 10, 1998; and to U.S. Provisional Appln. Ser. No. 60/074,281, filed Feb. 10, 1998; and to U.S. Provisional Appln. Ser. No. 60/074,282, filed Feb. 10, 1998; and to U.S. Provisional Appln. Ser. No. 60/074,565, filed Feb. 12, 1998; and to U.S. Provisional Appln. Ser. No. 60/074,566, filed Feb. 12, 1998; and to U.S. Provisional Appln. Ser. No. 60/074,567, filed Feb. 12, 1998; and to U.S. Provisional Appln. Ser. No. 60/074,789, filed Feb. 19, 1998; and to U.S. Provisional Appln. Ser. No. 60/075,459, filed Feb. 19, 1998; and to U.S. Provisional Appln. Ser. No. 60/075,460, filed Feb. 19, 1998; and to U.S. Provisional Appln. Ser. No. 60/075,461, filed Feb. 19, 1998; and to U.S. Provisional Appln. Ser. No. 60/075,462, filed Feb. 19, 1998; and to U.S. Provisional Appln. Ser. No. 60/075,463, filed Feb. 19, 1998; and to U.S. Provisional Appln. Ser. No. 60/075,464, filed Feb. 19, 1998; and to U.S. Provisional Appln. Ser. No. 60/077,229, filed Mar. 9, 1998; and to U.S. Provisional Appln. Ser. No. 60/077,230, filed Mar. 9, 1998; and to U.S. Provisional Appln. Ser. No. 60/077,231, filed Mar. 9, 1998; and to U.S. Provisional Appln. Ser. No. 60/078,031, filed Mar. 16, 1998; and to U.S. Provisional Appln. Ser. No. 60/078,368, filed Mar. 18, 1998; and to U.S. Provisional Appln. Ser. No. 60/080,844, filed Apr. 7, 1998; and to U.S. Provisional Appln. Ser. No. 60/083,067, filed Apr. 27, 1998; and to U.S. Provisional Appln. Ser. No. 60/083,386, filed Apr. 29, 1998; and to U.S. Provisional Appln. Ser. No. 60/083,387, filed Apr. 29, 1998; and to U.S. Provisional Appln. Ser. No. 60/083,388, filed Apr. 29, 1998; and to U.S. Provisional Appln. Ser. No. 60/083,389, filed Apr. 29, 1998; and to U.S. Provisional Appln. Ser. No. 60/084,684, filed May 8, 1998; and to U.S. Provisional Appln. Ser. No. 60/085,222, filed May 13, 1998; and to U.S. Provisional Appln. Ser. No. 60/085,223, filed May 13, 1998; and to U.S. Provisional Appln. Ser. No. 60/085,224, filed May 13, 1998; and to U.S. Provisional Appln. Ser. No. 60/085,245, filed May 13, 1998; and to U.S. Provisional Appln. Ser. No. 60/086,183, filed May 21, 1998; and to U.S. Provisional Appln. Ser. No. 60/086,184, filed May 21, 1998; and to U.S. Provisional Appln. Ser. No. 60/086,185, filed May 21, 1998; and to U.S. Provisional Appln. Ser. No. 60/086,186, filed May 21, 1998; and to U.S. Provisional Appln. Ser. No. 60/086,187, filed May 21, 1998; and to U.S. Provisional Appln. Ser. No. 60/086,188, filed May 21, 1998; and to U.S. Provisional Appln. Ser. No. 60/086,339, filed May 21, 1998; and to U.S. Provisional Appln. Ser. No. 60/089,524, filed June 16, 1998; and to U.S. Provisional Appln. Ser. No. 60/089,810, filed June 18, 1998; and to U.S. Provisional Appln. Ser. No. 60/089,814, filed Jun. 18, 1998; and to U.S. Provisional Appln. Ser. No. 60/091,247, filed Jun. 30, 1998; and to U.S. Provisional Appln. Ser. No. 60/092,036, filed Jul. 8, 1998; and to U.S. Provisional Appln. Ser. No. 60/099,667, filed Sep. 9, 1998; and to U.S. Provisional Appln. Ser. No. 60/099,668, filed Sep. 9, 1998; and to U.S. Provisional Appln. Ser. No. 60/099,670, filed Sep. 9, 1998; and to U.S. Provisional Appln. Ser. No. 60/099,697, filed Sep. 9, 1998; and to U.S. Provisional Appln. Ser. No. 60/100,672, filed Sep. 16, 1998; and to U.S. Provisional Appln. Ser. No. 60/100,673, filed Sep. 16, 1998; and to U.S. Provisional Appln. Ser. No. 60/100,674, filed Sep. 16, 1998; and to U.S. Provisional Appln. Ser. No. 60/101,130, filed Sep. 21, 1998; and to U.S. Provisional Appln. Ser. No. 60/101,132, filed Sep. 21, 1998; and to U.S. Provisional Appln. Ser. No. 60/108,996, filed Nov. 18, 1998; and to U.S. Provisional Appln. Ser. No. 60/109,018, filed Nov. 18, 1998. U.S. application Ser. No, 09/199,129 also claims the benefit of U.S. Provisional Appln. Ser. No. 60/067,000, filed Nov. 24, 1997; and to U.S. Provisional Appln. Ser. No. 60/069,472, filed Dec. 9, 1997; and to U.S. Provisional Appln. Ser. No. 60/074,201, filed Feb. 10, 1998; and to U.S. Provisional Appln. Ser. No. 60/074,280, filed Feb. 10, 1998; and to U.S. Provisional Appln. Ser. No. 60/074,281, filed Feb. 10, 1998; and to U.S. Provisional Appln. Ser. No. 60/074,282, filed Feb. 10, 1998; and to U.S. Provisional Appln. Ser. No. 60/074,565, filed Feb. 12, 1998; and to U.S. Provisional Appln. Ser. No. 60/074,566, filed Feb. 12, 1998; and to U.S. Provisional Appln. Ser. No. 60/074,567, filed Feb. 12, 1998; and to U.S. Provisional Appln. Ser. No. 60/074,789, filed Feb. 19, 1998; and to U.S. Provisional Appln. Ser. No. 60/075,459, filed Feb. 19, 1998; and to U.S. Provisional Appln. Ser. No. 60/075,460, filed Feb. 19, 1998; and to U.S. Provisional Appln. Ser. No. 60/075,461, filed Feb. 19, 1998; and to U.S. Provisional Appln. Ser. No. 60/075,462, filed Feb. 19, 1998; and to U.S. Provisional Appln. Ser. No. 60/075,463, filed Feb. 19, 1998; and to U.S. Provisional Appln. Ser. No. 60/075,464, filed Feb. 19, 1998; and to U.S. Provisional Appln. Ser. No. 60/077,229, filed Mar. 9, 1998; and to U.S. Provisional Appln. Ser. No. 60/077,230, filed Mar. 9, 1998; and to U.S. Provisional Appln. Ser. No. 60/077,231, filed Mar. 9, 1998; and to U.S. Provisional Appln. Ser. No. 60/078,368, filed Mar. 18, 1998; and to U.S. Provisional Appln. Ser. No. 60/080,844, filed Apr. 7, 1998; and to U.S. Provisional Appln. Ser. No. 60/083,067, filed Apr. 27, 1998; and to U.S. Provisional Appln. Ser. No. 60/083,386, filed Apr. 29, 1998; and to U.S. Provisional Appln. Ser. No. 60/083,387, filed Apr. 29, 1998; and to U.S. Provisional Appln. Ser. No. 60/083,388, filed Apr. 29, 1998; and to U.S. Provisional Appln. Ser. No. 60/083,389, filed Apr. 29, 1998; and to U.S. Provisional Appln. Ser. No. 60/085,222, filed May 13, 1998; and to U.S. Provisional Appln. Ser. No. 60/085,223, filed May 13, 1998; and to U.S. Provisional Appln. Ser. No. 60/085,224, filed May 13, 1998; and to U.S. Provisional Appln. Ser. No. 60/086,183, filed May 21, 1998; and to U.S. Provisional Appln. Ser. No. 60/086,184, filed May 21, 1998; and to U.S. Provisional Appln. Ser. No. 60/086,185, filed May 21, 1998; and to U.S. Provisional Appln. Ser. No. 60/086,186, filed May 21, 1998; and to U.S. Provisional Appln. Ser. No. 60/086,187, filed May 21, 1998; and to U.S. Provisional Appln. Ser. No. 60/086,188, filed May 21, 1998; and to U.S. Provisional Appln. Ser. No. 60/089,524, filed Jun. 16, 1998; and to U.S. Provisional Appln. Ser. No. 60/089,793, filed Jun. 18, 1998; and to U.S. Provisional Appln. Ser. No. 60/089,810, filed Jun. 18, 1998; and to U.S. Provisional Appln. Ser. No. 60/089,814, filed Jun. 18, 1998; and to U.S. Provisional Appln. Ser. No. 60/099,668, filed Sep. 9, 1998; and to U.S. Provisional Appln. Ser. No. 60/099,670, filed Sep. 9, 1998; and to U.S. Provisional Appln. Ser. No. 60/099,697, filed Sep. 9, 1998; and to U.S. Provisional Appln. Ser. No. 60/100,672, filed Sep. 16, 1998; and to U.S. Provisional Appln. Ser. No. 60/100,673, filed Sep. 16, 1998; and to U.S. Provisional Appln. Ser. No. 60/100,674, filed Sep. 16, 1998; and to U.S. Provisional Appln. Ser. No. 60/101,130, filed Sep. 21, 1998; and to U.S. Provisional Appln. Ser. No. 60/101,131, filed Sep. 21, 1998; and to U.S. Provisional Appln. Ser. No. 60/101,132, filed Sep. 21, and to U.S. Provisional Appln. Ser. No. 60/108,996, filed Nov. 18, 1998; and to U.S. Provisional Appln. Ser. No. 60/109,018, filed Nov. 18, 1998. 09/333,535 also claims the benefit of U.S. Provisional Appln. Ser. No. 60/089,524, filed Jun. 16, 1998; and to U.S. Provisional Appln. Ser. No. 60/089,793, filed Jun. 18, 1998; and to U.S. Provisional Appln. Ser. No. 60/089,810, filed Jun. 18, 1998; and to U.S. Provisional Appln. Ser. No. 60/089,814, filed Jun. 18, 1998; and to U.S. Provisional Appln. Ser. No. 60/099,668, filed Sep. 9, 1998; and to U.S. Provisional Appln. Ser. No. 60/099,670, filed Sep. 9, 1998; and to U.S. Provisional Appln. Ser. No. 60/099,697, filed Sep. 9, 1998; and to U.S. Provisional Appln. Ser. No. 60/100,672, filed Sep. 16, 1998; and to U.S. Provisional Appln. Ser. No. 60/100,673, filed Sep. 16, 1998; and to U.S. Provisional Appln. Ser. No. 60/100,674, filed Sep. 16, 1998; and to U.S. Provisional Appln. Ser. No. 60/101,130, filed Sep. 21, 1998; and to U.S. Provisional Appln. Ser. No. 60/101,131, filed Sep. 21, 1998; and to U.S. Provisional Appln. Ser. No. 60/101,132, filed September 21, and to U.S. Provisional Appln. Ser. No. 60/108,996, filed Nov. 18, 1998; and to U.S. Provisional Appln. Ser. No. 60/109,018, filed Nov. 18, 1998; and to U.S. Provisional Appln. Ser. No. 60/111,981, filed Dec. 11, 1998; and to U.S. Provisional Appln. Ser. No. 60/112,221, filed Dec. 14, 1998; and to U.S. Provisional Appln. Ser. No. 60/112,229, filed Dec. 14, 1998; and to U.S. Provisional Appln. Ser. No. 60/112,808, filed Dec. 18, 1998; and to U.S. Provisional Appln. Ser. No. 60/113,224, filed Dec. 22, 1998; and to U.S. Provisional Appln. Ser. No. 60/125,816, filed Mar. 23, 1999; and to U.S. Provisional Appln. Ser. No. 60/125,817, filed Mar. 23, 1999; and to U.S. Provisional Appln. Ser. No. 60/125,818, filed Mar. 23, 1999; and to U.S. Provisional Appln. Ser. No. 60/130,174, filed Apr. 20, 1999; and to U.S. Provisional Appln. Ser. No. 60/130,464, filed Apr. 22, 1999; and to U.S. Provisional Appln. Ser. No. 60/133,690, filed May 10, 1999; and to U.S. Provisional Appln. Ser. No. 60/133,691, filed May 10, 1999; and to U.S. Provisional Appln. Ser. No. 60/133,692, filed May 10, 1999. Each of the above-listed applications is incorporated by reference in its entirety.

### INCORPORATION OF SEQUENCE LISTING

[0002] This application contains a sequence listing, which is contained on three identical CD-ROMs: two copies of the sequence listing (Copy 1 and Copy 2) and a sequence listing Computer Readable Form (CRF), all of which are herein incorporated by reference. All three CD-ROMs each contain one file called “15401C seq list.txt” which is 8,474,624 bytes in size (measured in Windows XP) and which was created on Jan. 12, 2006.

### FIELD OF THE INVENTION

[0003] The present invention is in the field of plant biochemistry. More specifically the invention relates to nucleic acid molecules that encode proteins and fragments of proteins produced in plant cells, in particular, soybean plants. The invention also relates to proteins and fragments of proteins so encoded and antibodies capable of binding the proteins. The invention also relates to methods of using the nucleic acid molecules, proteins and fragments of proteins.

### BACKGROUND OF THE INVENTION

I. Expressed Sequence Tag Nucleic Acid Molecules

[0004] Expressed sequence tags, or ESTs, are short sequences of randomly selected clones from a cDNA (or complementary DNA) library which are representative of the cDNA inserts of these randomly selected clones. McCombie, et al., Nature Genetics, 1:124-130 (1992); Kurata, et al., Nature Genetics, 8: 365-372 (1994); Okubo, et al., Nature Genetics, 2: 173-179 (1992), all of which references are incorporated herein in their entirety.

[0005] Using conventional methodologies, cDNA libraries can be constructed from the mRNA (messenger RNA) of a given tissue or organism using poly dT primers and reverse transcriptase (Efstratiadis, et al., Cell 7:279-288 (1976), the entirety of which is herein incorporated by reference; Higuchi, et al., Proc. Natl. Acad. Sci. (U.S.A.) 73:3146-3150 (1976), the entirety of which is herein incorporated by reference; Maniatis, et al., Cell 8:163 (1976) the entirety of which is herein incorporated by reference; Land, et al., Nucleic Acids Res. 9:2251-2266 (1981), the entirety of which is herein incorporated by reference; Okayama, et al., Mol. Cell. Biol. 2:161 -170 (1982), the entirety of which is herein incorporated by reference; Gubler, et al., Gene 25:263 (1983), the entirety of which is herein incorporated by reference).

[0006] Several methods may be employed to obtain full-length cDNA constructs. For example, terminal transferase can be used to add homopolymeric tails of dC residues to the free 3′ hydroxyl groups (Land, et al., Nucleic Acids Res. 9:2251-2266 (1981), the entirety of which is herein incorporated by reference). This tail can then be hybridized by a poly dG oligo which can act as a primer for the synthesis of full length second strand cDNA. Okayama and Berg, report a method for obtaining full length cDNA constructs. This method has been simplified by using synthetic primer-adapters that have both homopolymeric tails for priming the synthesis of the first and second strands and restriction sites for cloning into plasmids (Coleclough, et al., Gene 34:305-314 (1985), the entirety of which is herein incorporated by reference) and bacteriophage vectors (Krawinkel, et al., Nucleic Acids Res. 14:1913 (1986), the entirety of which is herein incorporated by reference; and Han, et al., Nucleic Acids Res. 15:6304 (1987), the entirety of which is herein incorporated by reference).

[0007] These strategies have been coupled with additional strategies for isolating rare mRNA populations. For example, a typical mammalian cell contains between 10,000 and 30,000 different mRNA sequences. Davidson, Gene Activity in Early Development, 2nd ed., Academic Press, New York (1976). The number of clones required to achieve a given probability that a low-abundance mRNA will be present in a cDNA library is N=(ln(1-P))/(ln(1-1/n)) where N is the number of clones required, P is the probability desired, and 1/n is the fractional proportion of the total mRNA that is represented by a single rare mRNA. (Sambrook, et al., Molecular Cloning: A Laboratory Manual, 2nd ed., Cold Spring Harbor Laboratory Press (1989), the entirety of which is herein incorporated by reference.).

[0008] A method to enrich preparations of mRNA for sequences of interest is to fractionate by size. One such method is to fractionate by electrophoresis through an agarose gel (Pennica, et al., Nature 301:214-221 (1983), the entirety of which is herein incorporated by reference). Another such method employs sucrose gradient centrifugation in the presence of an agent, such as methylmercuric hydroxide, that denatures secondary structure in RNA (Schweinfest, et al., Proc. Natl. Acad. Sci. (U.S.A.) 79:4997-5000 (1982), the entirety of which is herein incorporated by reference).

[0009] A frequently adopted method is to construct equalized or normalized cDNA libraries (Ko, Nucleic Acids Res. 18:5705-5711 (1990), the entirety of which is herein incorporated by reference; Patanjali, S. R. et al., Proc. Natl. Acad Sci. (U.S.A.) 88:1943-1947 (1991), the entirety of which is herein incorporated by reference). Typically, the cDNA population is normalized by subtractive hybridization. Schmid, et al., J. Neurochem. 48:307-312 (1987) the entirety of which is herein incorporated by reference; Fargnoli, et al., Anal. Biochem. 187:364-373 (1990) the entirety of which is herein incorporated by reference; Travis, et al., Proc. Natl. Acad. Sci (U.S.A.) 85:1696-1700 (1988) the entirety of which is herein incorporated by reference; Kato, Eur. J. Neurosci. 2:704 (1990); and Schweinfest, et al., Genet. Anal. Tech. Appl. 7:64 (1990), the entirety of which is herein incorporated by reference). Subtraction represents another method for reducing the population of certain sequences in the cDNA library. Swaroop, et al., Nucleic Acids Res. 19:1954 (1991), the entirety of which is herein incorporated by reference).

[0010] ESTs can be sequenced by a number of methods. Two basic methods may be used for DNA sequencing, the chain termination method of Sanger et al., Proc. Natl. Acad Sci. (U.S.A.) 74: 5463-5467 (1977), the entirety of which is herein incorporated by reference and the chemical degradation method of Maxam and Gilbert, Proc. Nat. Acad. Sci. (U.S.A.) 74: 560-564 (1977), the entirety of which is herein incorporated by reference. Automation and advances in technology such as the replacement of radioisotopes with fluorescence-based sequencing have reduced the effort required to sequence DNA (Craxton, Methods, 2: 20-26 (1991), the entirety of which is herein incorporated by reference; Ju et al., Proc. Natl. Acad. Sci. (U.S.A.) 92: 4347-4351 (1995), the entirety of which is herein incorporated by reference; Tabor and Richardson, Proc. Natl. Acad. Sci. (U.S.A.) 92: 6339-6343 (1995), the entirety of which is herein incorporated by reference). Automated sequencers are available from, for example, Pharmacia Biotech, Inc., Piscataway, N.J. (Pharmacia ALF), LI-COR, Inc., Lincoln, Nebr. (LI-COR 4,000) and Millipore, Bedford, Mass. (Millipore BaseStation).

[0011] In addition, advances in capillary gel electrophoresis have also reduced the effort required to sequence DNA and such advances provide a rapid high resolution approach for sequencing DNA samples (Swerdlow and Gesteland, Nucleic Acids Res. 18:1415-1419 (1990); Smith, Nature 349:812-813 (1991); Luckey et al., Methods Enzymol. 218:154-172 (1993); Lu et al., J. Chromatog. A. 680:497-501 (1994); Carson et al., Anal. Chem. 65:3219-3226 (1993); Huang et al., Anal. Chem. 64:2149-2154 (1992); Kheterpal et al., Electrophoresis 17:1852-1859 (1996); Quesada and Zhang, Electrophoresis 17:1841-1851 (1996); Baba, Yakugaku Zasshi 117:265-281 (1997), all of which are herein incorporated by reference in their entirety).

[0012] ESTs longer than 150 bases have been found to be useful for similarity searches and mapping. (Adams, et al., Science 252:1651-1656 (1991), herein incorporated by reference.) EST sequences normally range from 150-450 bases. This is the length of sequence information that is routinely and reliably generated using single run sequence data. Typically, only single run sequence data is obtained from the cDNA library, Adams, et al., Science 252:1651-1656 (1991). Automated single run sequencing typically results in an approximately 2-3% error or base ambiguity rate. (Boguski, et al., Nature Genetics, 4:332-333 (1993), the entirety of which is herein incorporated by reference).

[0013] EST databases have been constructed or partially constructed from, for example, C. elegans (McCombrie, et al., Nature Genetics 1:124-131 (1992), human liver cell line HepG2 (Okubo, et al., Nature Genetics 2:173-179 (1992)), human brain RNA (Adams, et al., Science 252:1651-1656 (1991); Adams, et al., Nature 355:632-635 (1992)), Arabidopsis, (Newman, et al., Plant Physiol. 106:1241-1255 (1994)); and rice (Kurata, et al., Nature Genetics 8:365-372 (1994).

II. Sequence Comparisons

[0014] A characteristic feature of a protein or DNA sequence is that it can be compared with other known protein or DNA sequences. Sequence comparisons can be undertaken by determining the similarity of the test or query sequence with sequences in publicly available or propriety databases (“similarity analysis”) or by searching for certain motifs (“intrinsic sequence analysis”)(e.g. cis elements)(Coulson, Trends in Biotechnology, 12: 76-80 (1994), the entirety of which is herein incorporated by reference; Birren, et al., Genome Analysis, 1: 543-559 (1997), the entirety of which is herein incorporated by reference).

[0015] Similarity analysis includes database search and alignment. Examples of public databases include the DNA Database of Japan (DDBJ)(http://available on the Worldwide Web at ddbj.nig.ac.jp/); Genebank (available on the Worldwide Web at ncbi.nlm.nih.gov/web/Genbank/Index.htlm); and the European Molecular Biology Laboratory Nucleic Acid Sequence Database (EMBL) (available on the Worldwide Web at ebi.ac.uk/ebi_docs/embl_db.html). A number of different search algorithms have been developed, one example of which are the suite of programs referred to as BLAST programs. There are five implementations of BLAST, three designed for nucleotide sequences queries (BLASTN, BLASTX, and TBLASTX) and two designed for protein sequence queries (BLASTP and TBLASTN) (Coulson, Trends in Biotechnology, 12: 76-80 (1994); Birren, et al., Genome Analysis, 1: 543-559 (1997)).

[0016] BLASTN takes a nucleotide sequence (the query sequence) and its reverse complement and searches them against a nucleotide sequence database. BLASTN was designed for speed, not maximum sensitivity, and may not find distantly related coding sequences. BLASTX takes a nucleotide sequence, translates it in three forward reading frames and three reverse complement reading frames, and then compares the six translations against a protein sequence database. BLASTX is useful for sensitive analysis of preliminary (single-pass) sequence data and is tolerant of sequencing errors (Gish and States, Nature Genetics, 3: 266-272 (1993), the entirety of which is herein incorporated by reference). BLASTN and BLASTX may be used in concert for analyzing EST data (Coulson, Trends in Biotechnology, 12: 76-80 (1994); Birren, et al., Genome Analysis, 1: 543-559 (1997).

[0017] Given a coding nucleotide sequence and the protein it encodes, it is often preferable to use the protein as the query sequence to search a database because of the greatly increased sensitivity to detect more subtle relationships. This is due to the larger alphabet of proteins (20 amino acids) compared with the alphabet of nucleic acid sequences (4 bases), where it is far easier to obtain a match by chance. In addition, with nucleotide alignments, only a match (positive score) or a mismatch (negative score) is obtained, but with proteins, the presence of conservative amino acid substitutions can be taken into account. Here, a mismatch may yield a positive score if the non-identical residue has physical/chemical properties similar to the one it replaced. Various scoring matrices are used to supply the substitution scores of all possible amino acid pairs. A general purpose scoring system is the BLOSUM62 matrix (Henikoff and Henikoff, Proteins, 17: 49-61 (1993), the entirety of which is herein incorporated by reference), which is currently the default choice for BLAST programs. BLOSUM62 is tailored for alignments of moderately diverged sequences and thus may not yield the best results under all conditions. Altschul, J. Mol. Biol. 36: 290-300 (1993), the entirety of which is herein incorporated by reference, uses a combination of three matrices to cover all contingencies. This may improve sensitivity, but at the expense of slower searches. In practice, a single BLOSUM62 matrix is often used but others (PAM40 and PAM250) may be attempted when additional analysis is necessary. Low PAM matrices are directed at detecting very strong but localized sequence similarities, whereas high PAM matrices are directed at detecting long but weak alignments between very distantly related sequences.

[0018] Homologues in other organisms are available that can be used for comparative sequence analysis. Multiple alignments are performed to study similarities and differences in a group of related sequences. CLUSTAL W is a multiple sequence alignment package available that performs progressive multiple sequence alignments based on the method of Feng and Doolittle, J. Mol. Evol. 25: 351-360 (1987), the entirety of which is herein incorporated by reference. Each pair of sequences is aligned and the distance between each pair is calculated; from this distance matrix, a guide tree is calculated, and all of the sequences are progressively aligned based on this tree. A feature of the program is its sensitivity to the effect of gaps on the alignment; gap penalties are varied to encourage the insertion of gaps in probable loop regions instead of in the middle of structured regions. Users can specify gap penalties, choose between a number of scoring matrices, or supply their own scoring matrix for both the pairwise alignments and the multiple alignments. CLUSTAL W for UNIX and VMS systems is available at: ftp.ebi.ac.uk. Another program is MACAW (Schuler et al., Proteins, Struct. Func. Genet, 9:180-190 (1991), the entirety of which is herein incorporated by reference, for which both Macintosh and Microsoft Windows versions are available. MACAW uses a graphical interface, provides a choice of several alignment algorithms, and is available by anonymous ftp at: ncbi.nlm.nih.gov (directory/pub/macaw).

[0019] Sequence motifs are derived from multiple alignments and can be used to examine individual sequences or an entire database for subtle patterns. With motifs, it is sometimes possible to detect distant relationships that may not be demonstrable based on comparisons of primary sequences alone. Currently, the largest collection of sequence motifs in the world is PROSITE (Bairoch and Bucher, Nucleic Acid Research, 22: 3583-3589 (1994), the entirety of which is herein incorporated by reference.) PROSITE may be accessed via either the ExPASy server on the World Wide Web or anonymous ftp site. Many commercial sequence analysis packages also provide search programs that use PROSITE data.

[0020] A resource for searching protein motifs is the BLOCKS E-mail server developed by S. Henikoff, Trends Biochem Sci., 18:267-268 (1993), the entirety of which is herein incorporated by reference; Henikoff and Henikoff, Nucleic Acid Research, 19:6565-6572 (1991), the entirety of which is herein incorporated by reference; Henikoff and Henikoff, Proteins, 17: 49-61 (1993). BLOCKS searches a protein or nucleotide sequence against a database of protein motifs or “blocks.” Blocks are defined as short, ungapped multiple alignments that represent highly conserved protein patterns. The blocks themselves are derived from entries in PROSITE as well as other sources. Either a protein or nucleotide query can be submitted to the BLOCKS server; if a nucleotide sequence is submitted, the sequence is translated in all six reading frames and motifs are sought in these conceptual translations. Once the search is completed, the server will return a ranked list of significant matches, along with an alignment of the query sequence to the matched BLOCKS entries.

[0021] Conserved protein domains can be represented by two-dimensional matrices, which measure either the frequency or probability of the occurrences of each amino acid residue and deletions or insertions in each position of the domain. This type of model, when used to search against protein databases, is sensitive and usually yields more accurate results than simple motif searches. Two popular implementations of this approach are profile searches (such as GCG program ProfileSearch) and Hidden Markov Models (HMMs)(Krough et al., J. Mol. Biol. 235:1501 1531 (1994); Eddy, Current Opinion in Structural Biology 6:361-365 (1996), both of which are herein incorporated by reference in their entirety). In both cases, a large number of common protein domains have been converted into profiles, as present in the PROSITE library, or HHM models, as in the Pfam protein domain library (Sonnhammer et al., Proteins 28:405-420 (1997), the entirety of which is herein incorporated by reference). Pfam contains more than 500 HMM models for enzymes, transcription factors, signal transduction molecules, and structural proteins. Protein databases can be queried with these profiles or HMM models, which will identify proteins containing the domain of interest. For example, HMMSW or HMMFS, two programs in a public domain package called HMMER (Sonnhammer et al., Proteins 28:405-420 (1997)) can be used.

[0022] PROSITE and BLOCKS represent collected families of protein motifs. Thus, searching these databases entails submitting a single sequence to determine whether or not that sequence is similar to the members of an established family. Programs working in the opposite direction compare a collection of sequences with individual entries in the protein databases. An example of such a program is the Motif Search Tool, or MoST (Tatusov et al. Proc. Natl. Acad. Sci. 91: 12091-12095 (1994), the entirety of which is herein incorporated by reference.) On the basis of an aligned set of input sequences, a weight matrix is calculated by using one of four methods (selected by the user); a weight matrix is simply a representation, position by position in an alignment, of how likely a particular amino acid will appear. The calculated weight matrix is then used to search the databases. To increase sensitivity, newly found sequences are added to the original data set, the weight matrix is recalculated, and the search is performed again. This procedure continues until no new sequences are found.

### SUMMARY OF THE INVENTION

[0023] The present invention provides a substantially purified nucleic acid molecule that encodes a soybean protein or fragment thereof comprising a nucleic acid sequence selected from the group consisting of SEQ ID NO: 1 through SEQ ID NO: 15775.

[0024] The present invention also provides one or more substantially purified nucleic acid molecules comprising a nucleic acid sequence selected from the group consisting of SEQ ID NO: 1 through SEQ ID NO:15775 or complements thereof.

[0025] The present invention also provides a substantially purified soybean protein or fragment thereof, wherein said soybean protein is encoded by a nucleic acid molecule that comprises a nucleic acid sequence selected from the group consisting of SEQ ID NO: 1 through SEQ ID NO: 15775.

[0026] The present invention further provides a substantially purified protein, peptide, or fragment thereof encoded by a nucleic acid sequence which specifically hybridizes to a nucleic acid molecule comprising a nucleic acid sequence selected from the group consisting of a complement of SEQ ID NO: 1 through SEQ ID NO:15775.

[0027] The present invention further provides a substantially purified antibody capable of specifically binding to a protein or fragment thereof encoded by a nucleic acid sequence which specifically hybridizes to a nucleic acid molecule having a nucleic acid sequence selected from the group consisting of a complement of SEQ ID NO: 1 through SEQ ID NO:15775.

[0028] The present invention also provides a transformed plant transformed to contain a nucleic acid molecule which comprises: (A) an exogenous promoter region which functions in plant cells to cause the production of an mRNA molecule; which is linked to (B) a structural nucleic acid molecule, wherein said structural nucleic acid molecule comprises a nucleic acid molecule that encodes a protein, peptide, or fragment thereof which hybridizes to a nucleic acid sequence selected from the group consisting of a complement of SEQ ID NO: 1 through SEQ ID NO:15775 expressed in an effective amount to produce a desirable agronomic effect; which is linked to (C) a 3′ non-translated sequence that functions in plant cells to cause the termination of transcription and the addition of polyadenylated ribonucleotides to the 3′ end of the mRNA sequence.

[0029] The present invention also provides a transformed plant cell containing a nucleic acid molecule whose non-transcribed strand encodes a protein or fragment thereof, wherein the transcribed strand of said nucleic acid is complementary to a nucleic acid molecule that encodes a protein or fragment thereof. The present invention also provides bacterial, viral, microbial, and plant cells comprising a nucleic acid molecule of the present invention

[0030] The present invention also provides a method of producing a plant containing one or more proteins encoded by sequences comprising SEQ ID NO: 1 or complement thereof through SEQ ID NO:15775 or complements thereof, expressed in a sufficient amount and/or fashion to produce a desirable agronomic effect.

[0031] In accomplishing the foregoing, there is provided, in accordance with one aspect of the present invention, methods of producing genetically transformed plants, comprising the steps of:
[0032] (a) inserting into the genome of a plant cell a recombinant, double-stranded DNA molecule comprising
   [0033] (i) a promoter which functions in plant cells to cause the production of an RNA sequence,
   [0034] (ii) a structural DNA sequence that causes the production of an RNA sequence which encodes a desired protein.
   [0035] (iii) a 3′ non-translated DNA sequence which functions in plant cells to cause the addition of polyadenylated nucleotides to the 3′ end of RNA sequence; where the promoter is homologous or heterologous with respect to the coding sequence and adapted to cause sufficient expression of a protein in desired plant tissues to enhance the agronomic utility of a plant transformed with said gene.
[0036] (b) obtaining a transformed plant cell with said nucleic acid molecule that encodes one or more proteins, wherein said nucleic acid molecule is transcribed and results in expression of said protein(s); and
[0037] (c) regenerating from the transformed plant cell a genetically transformed plant

[0038] The present invention also encompasses differentiated plants, seeds, and progeny comprising said transformed plant cells and which exhibit novel properties of agronomic significance.

[0039] The present invention also provides a method of producing a plant containing reduced levels of a protein comprising: (A) transforming a plant cell with a nucleic acid molecule that encodes a protein, wherein said nucleic acid molecule is transcribed and results in co-suppression of endogenous protein synthesis activity, and (B) regenerating plants and producing subsequent progeny from the transformed plant.

[0040] The present invention also provides a method of determining an association between a polymorphism and a plant trait comprising: (A) hybridizing a nucleic acid molecule specific for a polymorphism to genetic material of a plant, wherein said nucleic acid molecule comprising a nucleic acid sequence selected from the group consisting of SEQ ID NO: 1 through SEQ ID NO:15775 or complements thereof; and (B) calculating the degree of association between the polymorphism and the plant trait.

[0041] The present invention also provides a method of isolating a genetic region, or nucleic acid that encodes a protein or fragment thereof comprising: (A) incubating under conditions permitting nucleic acid hybridization: a marker nucleic acid molecule, preferably an EST, with a complementary nucleic acid molecule obtained from a plant cell or plant tissue; (B) permitting hybridization between said marker nucleic acid molecule, preferably an EST, and said complementary nucleic acid molecule obtained from said plant cell or plant tissue; and (C) isolating said complementary nucleic acid molecule.

[0042] The present invention also provides a method for determining a level or pattern in a plant cell of a protein in a plant comprising: (A) incubating, under conditions permitting nucleic acid hybridization, a marker nucleic acid molecule, the marker nucleic acid molecule selected from the group of marker nucleic acid molecules which specifically hybridize to a nucleic acid molecule having the nucleic acid sequence selected from the group consisting of SEQ ID NO: 1 through SEQ ID NO: 15775 or complements thereof or fragments of either, with a complementary nucleic acid molecule obtained from the plant cell or plant tissue, wherein nucleic acid hybridization between the marker nucleic acid molecule and the complementary nucleic acid molecule obtained from the plant cell or plant tissue permits the detection of an mRNA for the enzyme; (B) permitting hybridization between the marker nucleic acid molecule and the complementary nucleic acid molecule obtained from the plant cell or plant tissue; and (C) detecting the level or pattern of the complementary nucleic acid, wherein the detection of the complementary nucleic acid is predictive of the level or pattern of the protein.

[0043] The present invention also provides a method for determining the level or pattern of a protein in a plant cell or plant tissue comprising: (A) incubating under conditions permitting nucleic acid hybridization: a marker nucleic acid molecule, the marker nucleic acid molecule comprising a nucleotide sequence selected from the group consisting of SEQ ID NO: 1 through SEQ ID NO:15775 or complements thereof, with a complementary nucleic acid molecule obtained from a plant cell or plant tissue, wherein nucleic acid hybridization between the marker nucleic acid molecule, and the complementary nucleic acid molecule obtained from the plant cell or plant tissue permits the detection of said protein; (B) permitting hybridization between the marker nucleic acid molecule and the complementary nucleic acid molecule obtained from the plant cell or plant tissue; and (C) detecting the level or pattern of the complementary nucleic acid, wherein the detection of said complementary nucleic acid is predictive of the level or pattern of the protein synthesis.

[0044] The present invention also provides a method for determining a level or pattern of a protein in a plant cell or plant tissue which comprises assaying the concentration of a molecule, whose concentration is dependent upon the expression of a gene, the gene having a nucleic acid sequence which specifically hybridizes to a protein marker nucleic acid molecule, the molecule being present in a plant cell or plant tissue, in comparison to the concentration of that molecule present in a plant cell or plant tissue with a known level or pattern of said protein, wherein an assayed concentration of the molecule is compared to the assayed concentration of the molecule in a plant cell or plant tissue with a known level or pattern of said protein.

[0045] The present invention also provides a method of determining a mutation in a plant whose presence is predictive of a mutation affecting a level or pattern of a protein comprising the steps: (A) incubating, under conditions permitting nucleic acid hybridization, a marker nucleic acid, the marker nucleic acid selected from the group of marker nucleic acid molecules which specifically hybridize to a nucleic acid molecule consisting of the nucleic acid sequence selected from the group consisting of SEQ ID NO: 1 through SEQ ID NO: 15775 or complements thereof or fragments of either and a complementary nucleic acid molecule obtained from the plant, wherein nucleic acid hybridization between the marker nucleic acid molecule and the complementary nucleic acid molecule obtained from the plant permits the detection of a polymorphism whose presence is predictive of a mutation affecting the level or pattern of the protein in the plant; (B) permitting hybridization between the marker nucleic acid molecule and the complementary nucleic acid molecule obtained from the plant; and (C) detecting the presence of the polymorphism, wherein the detection of the polymorphism is predictive of the mutation.

[0046] The present invention also provides a method for determining a mutation in a plant whose presence is predictive of a mutation affecting the level or pattern of protein synthesis comprising the steps: (A) incubating under conditions permitting nucleic acid hybridization: a marker nucleic acid molecule, the marker nucleic acid molecule comprising a nucleic acid molecule that is linked to gene, the gene having a nucleic acid sequence which specifically hybridizes to a sequence selected from the group consisting of SEQ ID NO: 1 through SEQ ID NO:15775 and complements thereof, and a complementary nucleic acid molecule obtained from a plant tissue or plant cell of the plant, wherein nucleic acid hybridization between the marker nucleic acid molecule and the complementary nucleic acid molecule obtained from the plant permits the detection of a polymorphism whose presence is predictive of a mutation affecting said level or pattern of a protein synthesis in the plant; (B) permitting hybridization between said marker nucleic acid molecule and said complementary nucleic acid molecule obtained from said plant; and; (C) detecting the presence of the polymorphism, wherein the detection of the polymorphism is predictive of the mutation.

[0047] The present invention also provides a method for reducing expression of a protein in a plant cell, the method comprising: growing a transformed plant cell containing a nucleic acid molecule whose non-transcribed strand encodes a protein or fragment thereof, wherein the transcribed strand of said nucleic acid is complementary to a nucleic acid molecule that encodes the protein in said plant cell, and whereby the strand that is complementary to the nucleic acid molecule that encodes the protein reduces or depresses expression of the protein.

[0048] The present invention provides soybean nucleic acid molecules for use as molecular tags to isolate genetic regions (i.e. promoters and flanking sequences), isolate genes, map genes, and determine gene function. The present invention further provides soybean nucleic acid molecules for use in determining if genes are members of a particular gene family.

[0049] The present invention also provides a method of obtaining full length genes using soybean ESTs or complements thereof or fragments of either.

[0050] The present invention also provides a method of isolating promoters and flanking sequences using soybean ESTs or complements thereof or fragments of either.

[0051] The present invention also provides soybean ESTs or complements thereof or fragments of either for use in marker-assisted breeding programs.

[0052] The present invention also provides a method of identifying tissues comprising hybridizing nucleic acids from the tissue with soybean ESTs or complements thereof or fragments of either.

[0053] The present invention also provides a method for production of antibodies targeted against the proteins, peptides, or fragments produced by the disclosed or complements thereof or fragments of either.

[0054] The present invention also provides a method for the transformation and regeneration of plants comprising sequences hybridizable to the disclosed ESTs or complements thereof or fragments of either.

[0055] The present invention also provides a method of modifying plant protein expression by inserting in a chimeric gene sense or antisense constructs of the soybean ESTs.

### DETAILED DESCRIPTION OF THE INVENTION

Agents

[0056] (a) Nucleic Acid Molecules

[0057] Agents of the present invention include nucleic acid molecules and more specifically EST nucleic acid molecules or nucleic acid fragment molecules thereof. Fragment EST nucleic acid molecules may encode significant portion(s) of, or indeed most of, the EST nucleic acid molecule. Alternatively, the fragments may comprise smaller oligonucleotides (having from about 15 to about 250 nucleotide residues, and more preferably, about 15 to about 30 nucleotide residues).

[0058] A subset of the nucleic acid molecules of the present invention includes nucleic acid molecules that are marker molecules. Another subset of the nucleic acid molecules of the present invention include nucleic acid molecules that encode a protein or fragment thereof. Another subset of the nucleic acid molecules of the present invention are EST molecules.

[0059] As used herein, an agent, be it a naturally occurring molecule or otherwise may be “substantially purified,” if desired, such that one or more molecules that is or may be present in a naturally occurring preparation containing that molecule will have been removed or will be present at a lower concentration than that at which it would normally be found.

[0060] The agents of the present invention will preferably be “biologically active” with respect to either a structural attribute, such as the capacity of a nucleic acid to hybridize to another nucleic acid molecule, or the ability of a protein to be bound by antibody (or to compete with another molecule for such binding). Alternatively, such an attribute may be catalytic, and thus involve the capacity of the agent to mediate a chemical reaction or response.

[0061] The agents of the present invention may also be recombinant. As used herein, the term recombinant means any agent (e.g. DNA, peptide etc.), that is, or results, however indirect, from human manipulation of a nucleic acid molecule.

[0062] It is understood that the agents of the present invention may be labeled with reagents that facilitate detection of the agent (e.g. fluorescent labels (Prober, et al., Science 238:336-340 (1987); Albarella et al., EP 144914, chemical labels (Sheldon et al., U.S. Pat. No. 4,582,789; Albarella et al., U.S. Pat. No. 4,563,417, modified bases (Miyoshi et al., EP 119448, all of which are hereby incorporated by reference in their entirety).

[0063] It is further understood, that the present invention provides bacterial, viral, microbial, and plant cells comprising the agents of the present invention.

[0064] Nucleic acid molecules or fragment thereof of the present invention are capable of specifically hybridizing to other nucleic acid molecules under certain circumstances. As used herein, two nucleic acid molecules are said to be capable of specifically hybridizing to one another if the two molecules are capable of forming an anti-parallel, double-stranded nucleic acid structure. A nucleic acid molecule is said to be the “complement” of another nucleic acid molecule if they exhibit complete complementarity. As used herein, molecules are said to exhibit “complete complementarity” when every nucleotide of one of the molecules is complementary to a nucleotide of the other. Two molecules are said to be “minimally complementary” if they can hybridize to one another with sufficient stability to permit them to remain annealed to one another under at least conventional “low-stringency” conditions. Similarly, the molecules are said to be “complementary” if they can hybridize to one another with sufficient stability to permit them to remain annealed to one another under conventional “high-stringency” conditions. Conventional stringency conditions are described by Sambrook, et al., In: Molecular Cloning, A Laboratory Manual, 2nd Edition, Cold Spring Harbor Press, Cold Spring Harbor, N.Y. (1989), and by Haymes, et al. In: Nucleic Acid Hybridization, A Practical Approach, IRL Press, Wash., D.C. (1985), the entirety of which is herein incorporated by reference. Departures from complete complementarity are therefore permissible, as long as such departures do not completely preclude the capacity of the molecules to form a double-stranded structure. Thus, in order for an nucleic acid molecule or fragment of the present invention to serve as a primer or probe it need only be sufficiently complementary in sequence to be able to form a stable double-stranded structure under the particular solvent and salt concentrations employed.

[0065] Appropriate stringency conditions which promote DNA hybridization are, for example, 6.0 x sodium chloride/sodium citrate (SSC) at about 45° C., followed by a wash of 2.0×SSC at 50° C., are known to those skilled in the art or can be found in Current Protocols in Molecular Biology, John Wiley & Sons, N.Y. (1989), 6.3.1-6.3.6. For example, the salt concentration in the wash step can be selected from a low stringency of about 2.0×SSC at 50° C. to a high stringency of about 0.2×SSC at 50° C. In addition, the temperature in the wash step can be increased from low stringency conditions at room temperature, about 22° C., to high stringency conditions at about 65° C. Both temperature and salt may be varied, or either the temperature or the salt concentration may be held constant while the other variable is changed.

[0066] In a preferred embodiment, a nucleic acid of the present invention will specifically hybridize to one or more of the nucleic acid molecules set forth in SEQ ID NO: 1 through SEQ ID NO: 15775 or complements thereof under moderately stringent conditions, for example, at about 2.0×SSC and about 65° C.

[0067] In a particularly preferred embodiment, a nucleic acid of the present invention will include those nucleic acid molecules that specifically hybridize to one or more of the nucleic acid molecules set forth in SEQ ID NO: 1 through SEQ ID NO: 15775 or complements thereof under high stringency conditions.

[0068] In one aspect of the present invention, the nucleic acid molecules of the present invention have one or more of the nucleic acid sequences set forth in SEQ ID NO: 1 through SEQ ID NO:15775 or complements thereof. In another aspect of the present invention, one or more of the nucleic acid molecules of the present invention share between 100% and 90% sequence identity with one or more of the nucleic acid sequences set forth in SEQ ID NO: 1 through SEQ ID NO:15775 or complements thereof. In a further aspect of the present invention, one or more of the nucleic acid molecules of the present invention share between 100% and 95% sequence identity with one or more of the nucleic acid sequences set forth in SEQ ID NO: 1 through SEQ ID NO:15775 or complements thereof. In a more preferred aspect of the present invention, one or more of the nucleic acid molecules of the present invention share between 100% and 98% sequence identity with one or more of the nucleic acid sequences set forth in SEQ ID NO: 1 through SEQ ID NO:15775 or complements thereof. In an even more preferred aspect of the present invention, one or more of the nucleic acid molecules of the present invention share between 100% and 99% sequence identity with one or more of the sequences set forth in SEQ ID NO: 1 through SEQ ID NO:15775 or complements thereof. In a further, even more preferred aspect of the present invention, one or more of the nucleic acid molecules of the present invention exhibit 100% sequence identity with one or more nucleic acid molecules present within the cDNA libraries SOYMON028, SOYMON034 and LIB3028. (Monsanto Company, St. Louis, Mo., United States of America).

[0069] In a preferred embodiment of the present invention, a soybean protein or fragment thereof of the present invention is a homologue of another plant protein. In another preferred embodiment of the present invention, a soybean protein or fragment thereof of the present invention is a homologue of a fungal protein. In another preferred embodiment of the present invention, a soybean protein or fragment thereof of the present invention is a homologue of mammalian protein. In another preferred embodiment of the present invention, a soybean protein or fragment thereof of the present invention is a homologue of a bacterial protein. In another preferred embodiment of the present invention, a soybean protein or fragment thereof of the present invention is a homologue of a maize protein.

[0070] In a preferred embodiment of the present invention, the nucleic molecule of the present invention encodes a soybean protein or fragment thereof where a soybean protein or fragment thereof exhibits a BLAST probability score of greater than 1E-12, preferably a BLAST probability score of between about 1E-30 and about 1E-12, even more preferably a BLAST probability score of greater than 1E-30 with its homologue.

[0071] In another preferred embodiment of the present invention, the nucleic acid molecule encoding a soybean protein or fragment thereof exhibits a % identity with its homologue of between about 25% and about 40%, more preferably of between about 40 and about 70%, even more preferably of between about 70% and about 90% and even more preferably between about 90% and 99%. In another preferred embodiment, of the present invention, a soybean protein or fragment thereof exhibits a % identity with its homologue of 100%.

[0072] In a preferred embodiment of the present invention, the nucleic molecule of the present invention encodes a soybean protein or fragment thereof where the soybean protein exhibits a BLAST score of greater than 120, preferably a BLAST score of between about 1450 and about 120, even more preferably a BLAST score of greater than 1450 with its homologue.

[0073] Nucleic acid molecules of the present invention also include non-soybean homologues. Preferred non-homologues are selected from the group consisting of alfalfa, Arabidopsis, barley, Brassica, broccoli, cabbage, citrus, cotton, garlic, oat, oilseed rape, onion, canola, flax, an ornamental plant, maize, pea, peanut, pepper, potato, rice, rye, sorghum, strawberry, sugarcane, sugarbeet, tomato, wheat, poplar, pine, fir, eucalyptus, apple, lettuce, lentils, grape, banana, tea, turf grasses, sunflower, oil palm and Phaseolus.

[0074] The degeneracy of the genetic code, which allows different nucleic acid sequences to code for the same protein or peptide, is known in the literature. (U.S. Pat. No. 4,757,006, the entirety of which is herein incorporated by reference).

[0075] In an aspect of the present invention, one or more of the nucleic acid molecules of the present invention differ in nucleic acid sequence from those encoding a soybean protein or fragment thereof in SEQ ID NO: 1 through SEQ ID NO: 15775 due to the degeneracy in the genetic code in that they encode the same protein but differ in nucleic acid sequence.

[0076] In another further aspect of the present invention, one or more of the nucleic acid molecules of the present invention differ in nucleic acid sequence from those encoding a soybean protein or fragment thereof in SEQ ID NO: 1 through SEQ ID NO: 15775 due to fact that the different nucleic acid sequences encode a protein having one or more conservative amino acid residues. Examples of conservative substitutions are set forth in Table 1. It is understood that codons capable of coding for such conservative substitutions are known in the art.

TABLE 1

| Original Residue | Conservative Substitutions |
|---|---|
| Ala | Ser |
| Arg | Lys |
| Asn | Gln; His |
| Asp | Glu |
| Cys | Ser; Ala |
| Gln | Asn |
| Glu | Asp |
| Gly | Pro |
| His | Asn; Gln |
| Ile | Leu; Val |
| Leu | Ile; Val |
| Lys | Arg; Gln; Glu |
| Met | Leu; Ile |
| Phe | Met; Leu; Tyr |
| Ser | Thr |
| Thr | Ser |
| Trp | Tyr |
| Tyr | Trp; Phe |
| Val | Ile; Leu |

[0077] In a further aspect of the present invention, one or more of the nucleic acid molecules of the present invention differ in nucleic acid sequence from those encoding a soybean protein or fragment thereof set forth in SEQ ID NO: 1 through SEQ ID NO: 5 15775 or fragment thereof due to the fact that one or more codons encoding an amino acid has been substituted for a codon that encodes a nonessential substitution of the amino acid originally encoded.

[0078] One aspect of the present invention concerns markers that include nucleic acid molecules SEQ ID NO: 1 through SEQ ID NO: 15775 or complements thereof or fragments of either that can act as markers or other nucleic acid molecules of the present invention that can act as markers. Genetic markers of the present invention include “dominant” or “codominant” markers “Codominant markers” reveal the presence of two or more alleles (two per diploid individual) at a locus. “Dominant markers” reveal the presence of only a single allele per locus. The presence of the dominant marker phenotype (e.g., a band of DNA) is an indication that one allele is present in either the homozygous or heterozygous condition. The absence of the dominant marker phenotype (e.g. absence of a DNA band) is merely evidence that “some other” undefined allele is present. In the case of populations where individuals are predominantly homozygous and loci are predominately dimorphic, dominant and codominant markers can be equally valuable. As populations become more heterozygous and multi-allelic, codominant markers often become more informative of the genotype than dominant markers. Marker molecules can be, for example, capable of detecting polymorphisms such as single nucleotide polymorphisms (SNPs).

[0079] SNPs are single base changes in genomic DNA sequence. They occur at greater frequency and are spaced with a greater uniformity throughout a genome than other reported forms of polymorphism. The greater frequency and uniformity of SNPs means that there is greater probability that such a polymorphism will be found near or in a genetic locus of interest than would be the case for other polymorphisms. SNPs are located in protein-coding regions and noncoding regions of a genome. Some of these SNPs may result in defective or variant protein expression (e.g., as a results of mutations or defective splicing). Analysis (genotyping) of characterized SNPs can require only a plus/minus assay rather than a lengthy measurement, permitting easier automation.

[0080] SNPs can be characterized using any of a variety of methods. Such methods include the direct or indirect sequencing of the site, the use of restriction enzymes (Botstein et al., Am. J. Hum. Genet. 32:314-331 (1980), the entirety of which is herein incorporated reference; Konieczny and Ausubel, Plant J. 4:403-410 (1993), the entirety of which is herein incorporated by reference), enzymatic and chemical mismatch assays (Myers et al., Nature 313:495-498 (1985), the entirety of which is herein incorporated by reference), allele-specific PCR (Newton et al., Nucl. Acids Res. 17:2503-2516 (1989), the entirety of which is herein incorporated by reference; Wu et al., Proc. Natl. Acad. Sci. (U.S.A.) 86:2757-2760 (1989), the entirety of which is herein incorporated by reference), ligase chain reaction (Barany, Proc. Natl. Acad Sci. (U.S.A.) 88:189-193 (1991), the entirety of which is herein incorporated by reference), single-strand conformation polymorphism analysis (Labrune et al., Am. J. Hum. Genet. 48: 1115-1120 (1991), the entirety of which is herein incorporated by reference), primer-directed nucleotide incorporation assays (Kuppuswami et al., Proc. Natl. Acad Sci. USA 88:1143-1147 (1991), the entirety of which is herein incorporated by reference), dideoxy fingerprinting (Sarkar et al., Genomics 13:441-443 (1992), the entirety of which is herein incorporated by reference), solid-phase ELISA-based oligonucleotide ligation assays (Nikiforov et al., Nucl. Acids Res. 22:4167-4175 (1994), the entirety of which is herein incorporated by reference), oligonucleotide fluorescence-quenching assays (Livak et al., PCR Methods Appl. 4:357-362 (1995), the entirety of which is herein incorporated by reference), 5′-nuclease allele-specific hybridization TaqMan assay (Livak et al., Nature Genet. 9:341-342 (1995), the entirety of which is herein incorporated by reference), template-directed dye-terminator incorporation (TDI) assay (Chen and Kwok, Nucl. Acids Res. 25:347-353 (1997), the entirety of which is herein incorporated by reference), allele-specific molecular beacon assay (Tyagi et al., Nature Biotech. 16: 49-53 (1998), the entirety of which is herein incorporated by reference), PinPoint assay (Haff and Smirnov, Genome Res. 7: 378-388 (1997), the entirety of which is herein incorporated by reference) and dCAPS analysis (Neff et al., Plant J. 14:387-392 (1998), the entirety of which is herein incorporated by reference).

[0081] Additional markers, such as AFLP markers, RFLP markers and RAPD markers, can be utilized (Walton, Seed World 22-29 (July, 1993), the entirety of which is herein incorporated by reference; Burow and Blake, Molecular Dissection of Complex Traits, 13-29, Paterson (ed.), CRC Press, New York (1988), the entirety of which is herein incorporated by reference). DNA markers can be developed from nucleic acid molecules using restriction endonucleases, the PCR and/or DNA sequence information. RFLP markers result from single base changes or insertions/deletions. These codominant markers are highly abundant in plant genomes, have a medium level of polymorphism and are developed by a combination of restriction endonuclease digestion and Southern blotting hybridization. CAPS are similarly developed from restriction nuclease digestion but only of specific PCR products. These markers are also codominant, have a medium level of polymorphism and are highly abundant in the genome. The CAPS result from single base changes and insertions/deletions.

[0082] Another marker type, RAPDs, are developed from DNA amplification with random primers and result from single base changes and insertions/deletions in plant genomes. They are dominant markers with a medium level of polymorphisms and are highly abundant. AFLP markers require using the PCR on a subset of restriction fragments from extended adapter primers. These markers are both dominant and codominant are highly abundant in genomes and exhibit a medium level of polymorphism.

[0083] SSRs require DNA sequence information. These codominant markers result from repeat length changes, are highly polymorphic and do not exhibit as high a degree of abundance in the genome as CAPS, AFLPs and RAPDs, SNPs also require DNA sequence information. These codominant markers result from single base substitutions. They are highly abundant and exhibit a medium of polymorphism (Rafalski et al., In: Nonmammalian Genomic Analysis, Birren and Lai (ed.), Academic Press, San Diego, Calif., pp. 75-134 (1996), the entirety of which is herein incorporated by reference). It is understood that a nucleic acid molecule of the present invention may be used as a marker.

[0084] A PCR probe is a nucleic acid molecule capable of initiating a polymerase activity while in a double-stranded structure with another nucleic acid. Various methods for determining the structure of PCR probes and PCR techniques exist in the art. Computer generated searches using programs such as Primer3 (available on the Worldwide Web at genome.wi.mit.edu/cgi-bin/primer/primer3.cgi), STSPipeline (available on the Worldwide Web at genome.wi.mit.edu/cgi-bin/www-STS_Pipeline), or GeneUp (Pesole et al., BioTechniques 25:112-123 (1998) the entirety of which is herein incorporated by reference), for example, can be used to identify potential PCR primers.

[0085] It is understood that a fragment of one or more of the nucleic acid molecules of the present invention may be a probe and specifically a PCR probe.

[0086] (b) Protein and Peptide Molecules

[0087] A class of agents comprises one or more of the protein or peptide molecules encoded by SEQ ID NO: 1 through SEQ ID NO:15775 or one or more of the protein or fragment thereof or peptide molecules encoded by other nucleic acid agents of the present invention. As used herein, the term “protein molecule” or “peptide molecule” includes any molecule that comprises five or more amino acids. It is well know in the art that proteins may undergo modification, including post-translational modifications, such as, but not limited to, disulfide bond formation, glycosylation, phosphorylation, or oligomerization. Thus, as used herein, the term “protein molecule” or “peptide molecule” includes any protein molecule that is modified by any biological or non-biological process. The terms “amino acid” and “amino acids” refer to all naturally occurring L-amino acids. This definition is meant to include norleucine, ornithine, homocysteine, and homoserine.

[0088] One or more of the protein or fragment of peptide molecules may be produced via chemical synthesis, or more preferably, by expression in a suitable bacterial or eukaryotic host. Suitable methods for expression are described by Sambrook, et al., (In: Molecular Cloning, A Laboratory Manual, 2nd Edition, Cold Spring Harbor Press, Cold Spring Harbor, N.Y. (1989)), or similar texts.

[0089] A “protein fragment” is a peptide or polypeptide molecule whose amino acid sequence comprises a subset of the amino acid sequence of that protein. A protein or fragment thereof that comprises one or more additional peptide regions not derived from that protein is a “fusion” protein. Such molecules may be derivatized to contain carbohydrate or other moieties (such as keyhole limpet hemocyanin, etc.). Fusion protein or peptide molecule of the present invention are preferably produced via recombinant means.

[0090] Another class of agents comprise protein or peptide molecules encoded by SEQ ID NO: 1 through SEQ ID NO:15775 or complements thereof or, fragments or fusions thereof in which non-essential, or not relevant, amino acid residues have been added, replaced, or deleted. An example of such a homologue is the homologue protein of all non-soybean plant species, including but not limited to alfalfa, Arabidopsis, barley, Brassica, broccoli, cabbage, citrus, cotton, garlic, oat, oilseed rape, onion, canola, flax, maize, an ornamental plant, pea, peanut, pepper, potato, rice, rye, sorghum, strawberry, sugarcane, sugarbeet, tomato, wheat, poplar, pine, fir, eukalyptus, apple, lettuce, peas, lentils, grape, banana, tea, turf grasses, etc. Particularly preferred non-soybean plants to utilize for the isolation of homologues would include alfalfa, Arabidopsis, barley, cotton, corn, oat, oilseed rape, rice, corn, canola, ornamentals, sugarcane, sugarbeet, tomato, potato, wheat, and turf grasses. Such a homologue can be obtained by any of a variety of methods. Most preferably, as indicated above, one or more of the disclosed sequences (SEQ ID NO: 1 through SEQ ID NO:15775 or complements thereof) will be used to define a pair of primers that may be used to isolate the homologue-encoding nucleic acid molecules from any desired species. Such molecules can be expressed to yield homologues by recombinant means.

[0091] (c) Antibodies

[0092] One aspect of the present invention concerns antibodies, single-chain antigen binding molecules, or other proteins that specifically bind to one or more of the protein or peptide molecules of the present invention and their homologues, fusions or fragments. Such antibodies may be used to quantitatively or qualitatively detect the protein or peptide molecules of the present invention. As used herein, an antibody or peptide is said to “specifically bind” to a protein or peptide molecule of the present invention if such binding is not competitively inhibited by the presence of non-related molecules.

[0093] Nucleic acid molecules that encode all or part of the protein of the present invention can be expressed, via recombinant means, to yield protein or peptides that can in turn be used to elicit antibodies that are capable of binding the expressed protein or peptide. Such antibodies may be used in immunoassays for that protein. Such protein-encoding molecules, or their fragments may be a “fusion” molecule (i.e., a part of a larger nucleic acid molecule) such that, upon expression, a fusion protein is produced. It is understood that any of the nucleic acid molecules of the present invention may be expressed, via recombinant means, to yield proteins or peptides encoded by these nucleic acid molecules.

[0094] The antibodies that specifically bind proteins and protein fragments of the present invention may be polyclonal or monoclonal, and may comprise intact immunoglobulins, or antigen binding portions of immunoglobulins (such as (F(ab′), F(ab′)₂) fragments, or single-chain immunoglobulins producible, for example, via recombinant means). It is understood that practitioners are familiar with the standard resource materials which describe specific conditions and procedures for the construction, manipulation and isolation of antibodies (see, for example, Harlow and Lane, In Antibodies: A Laboratory Manual, Cold Spring Harbor Press, Cold Spring Harbor, N.Y. (1988), the entirety of which is herein incorporated by reference).

[0095] Murine monoclonal antibodies are particularly preferred. BALB/c mice are preferred for this purpose, however, equivalent strains may also be used. The animals are preferably immunized with approximately 25 μg of purified protein (or fragment thereof) that has been emulsified a suitable adjuvant (such as TiterMax adjuvant (Vaxcel, Norcross, Ga.)). Immunization is preferably conducted at two intramuscular sites, one intraperitoneal site, and one subcutaneous site at the base of the tail. An additional i.v. injection of approximately 25 μg of antigen is preferably given in normal saline three weeks later. After approximately 11 days following the second injection, the mice may be bled and the blood screened for the presence of anti-protein or peptide antibodies. Preferably, a direct binding Enzyme-Linked Immunoassay (ELISA) is employed for this purpose.

[0096] More preferably, the mouse having the highest antibody titer is given a third i.v. injection of approximately 25 μg of the same protein or fragment. The splenic leukocytes from this animal may be recovered 3 days later, and are then permitted to fuse, most preferably, using polyethylene glycol, with cells of a suitable myeloma cell line (such as, for example, the P3X63Ag8.653 myeloma cell line). Hybridoma cells are selected by culturing the cells under “HAT” (hypoxanthine-aminopterin-thymine) selection for about one week. The resulting clones may then be screened for their capacity to produce monoclonal antibodies (“mAbs), preferably by direct ELISA.

[0097] In one embodiment, anti-protein or peptide monoclonal antibodies are isolated using a fusion of a protein, protein fragment, or peptide of the present invention, or conjugate of a protein, protein fragment, or peptide of the present invention, as immunogens. Thus, for example, a group of mice can be immunized using a fusion protein emulsified in Freund's complete adjuvant (e.g. approximately 50 μg of antigen per immunization). At three week intervals, an identical amount of antigen is emulsified in Freund's incomplete adjuvant and used to immunize the animals. Ten days following the third immunization, serum samples are taken and evaluated for the presence of antibody. If antibody titers are too low, a fourth booster can be employed. Polysera capable of binding the protein or peptide can also be obtained using this method.

[0098] In a preferred procedure for obtaining monoclonal antibodies, the spleens of the above-described immunized mice are removed, disrupted, and immune splenocytes are isolated over a ficoll gradient. The isolated splenocytes are fused, using polyethylene glycol with BALB/c-derived HGPRT (hypoxanthine guanine phosphoribosyl transferase) deficient P3x63xAg8.653 plasmacytoma cells. The fused cells are plated into 96-well microtiter plates and screened for hybridoma fusion cells by their capacity to grow in culture medium supplemented with hypothanthine, aminopterin and thymidine for approximately 2-3 weeks.

[0099] Hybridoma cells that arise from such incubation are preferably screened for their capacity to produce an immunoglobulin that binds to a protein of interest. An indirect ELISA may be used for this purpose. In brief, the supernatants of hybridomas are incubated in microtiter wells that contain immobilized protein. After washing, the titer of bound immunoglobulin can be determined using, for example, a goat anti-mouse antibody conjugated to horseradish peroxidase. After additional washing, the amount of immobilized enzyme is determined (for example through the use of a chromogenic substrate). Such screening is performed as quickly as possible after the identification of the hybridoma in order to ensure that a desired clone is not overgrown by non-secreting neighbors. Desirably, the fusion plates are screened several times since the rates of hybridoma growth vary. In a preferred sub-embodiment, a different antigenic form of immunogen may be used to screen the hybridoma. Thus, for example, the splenocytes may be immunized with one immunogen, but the resulting hybridomas can be screened using a different immunogen. It is understood that any of the protein or peptide molecules of the present invention may be used to raise antibodies.

[0100] As discussed below, such antibody molecules or their fragments may be used for diagnostic purposes. Where the antibodies are intended for diagnostic purposes, it may be desirable to derivatize them, for example with a ligand group (such as biotin) or a detectable marker group (such as a fluorescent group, a radioisotope or an enzyme).

[0101] The ability to produce antibodies that bind the protein or peptide molecules of the present invention permits the identification of mimetic compounds of those molecules. A “mimetic compound” is a compound that is not that compound, or a fragment of that compound, but which nonetheless exhibits an ability to specifically bind to antibodies directed against that compound.

[0102] It is understood that any of the agents of the present invention can be substantially purified and/or be biologically active and/or recombinant.

[0103] Uses of the Agents of the Invention

[0104] The nucleic acid molecules and fragments thereof from library SOYMON028 are from drought stressed soybean root tissue at the R3 and R5 developmental stage. Roots play a role in major vegetative organs which supply water, minerals, and substances essential for plant growth and development, therefore, the ESTs of the present invention will find great use in the isolation of a variety of agronomically significant genes, including but not limited to genes that result from drought stress, genes for absorption, anchorage, storage, transport, propagation, and nitrogen fixation. Such genes are associated with plant growth, quality, and yield and could also serve as links in important plant developmental, metabolic and catabolic pathways.

[0105] The nucleic acid molecules and fragments thereof from SOYMON034 are from cold shocked seedlings without cotyledons. Seedlings are a developmental phase in the growth process therefore, the ESTs of the present invention will find great use in the isolation of a variety of agronomically significant genes, including but not limited to genes that regulate germination, developmental stress, protein, amino acids, sterols, oils, minerals, isoflavones, saponins, trypsin inhibitors, vitamins, tocopherols, antinutrient components, carbohydrates, starch metabolism, and seedling and vegetative regulatory elements. Such crucial genes are associated with plant growth, quality, yield, and could also serve as links in important metabolic, developmental and catabolic pathways.

[0106] The nucleic acid molecules and fragments thereof from LIB3028 are from partially to fully opened flowers. Flower libraries can enable the acquisition of, but are not limited to genes that are involved in floral development, reproduction and seed production, therefore, the ESTs of the present invention will find great use in the isolation of a variety of agronomically significant genes, including but not limited to, genes that regulate meiosis, cell division, carotenoids, floral biogenesis, embryogenesis, protein, amino acids, sterols, oils, minerals, isoflavones, saponins, vitamins, tocopherols, antinutrient components, carbohydrates, starch metabolism and seed regulatory elements. Such genes are associated with plant growth, quality and yield, and could also serve as links in important developmental, metabolic, and catabolic pathways.

[0107] The nucleic acid molecules and fragments thereof of the present invention from libraries SOYMON028, SOYMON034, and LIB3028, are from soybean genotype A3244. This genotype has disease resistance to brown stem rot (Phialophora gregata) and Phytophthora root rot (Phytophthora sojae). Libraries from this genotype are likely to find use in the isolation of genes involved in disease resistance against a number of agronomically important fungal pathogens.

[0108] Nucleic acid molecules and fragments thereof of the present invention may be employed to obtain other nucleic acid molecules. Such molecules include the nucleic acid molecules of other plants or other organisms (e.g., alfalfa, rice, potato, cotton, oat, rye, barley, maize, wheat, Arabidopsis, Brassica, etc.) including the nucleic acid molecules that encode, in whole or in part, protein homologues of other plant species or other organisms, and sequences of genetic elements such as promoters and transcriptional regulatory elements. Such molecules can be readily obtained by using the above-described nucleic acid molecules or fragments thereof to screen cDNA or genomic libraries obtained from such plant species. Methods for forming such libraries are well known in the art. Such homologue molecules may differ in their nucleotide sequences from those found in one or more of SEQ ID NO:1 through SEQ ID NO:15775 or complements thereof because complete complementarity is not needed for stable hybridization. The nucleic acid molecules of the present invention therefore also include molecules that, although capable of specifically hybridizing with the nucleic acid molecules may lack “complete complementarity.”

[0109] Any of a variety of methods may be used to obtain one or more of the above-described nucleic acid molecules (Zamechik et al., Proc. Natl. Acad Sci. (U.S.A.) 83:4143-4146 (1986), the entirety of which is herein incorporated by reference; Goodchild et al., Proc. Natl. Acad Sci. (U.S.A.) 85:5507-5511 (1988), the entirety of which is herein incorporated by reference; Wickstrom et al., Proc. Natl. Acad. Sci. (U.S.A.) 85:1028-1032 (1988), the entirety of which is herein incorporated by reference; Holt, et al., Molec. Cell. Biol. 8:963-973 (1988), the entirety of which is herein incorporated by reference; Gerwirtz, et al., Science 242:1303-1306 (1988), the entirety of which is herein incorporated by reference; Anfossi, et al., Proc. Natl. Acad. Sci. (U.S.A.) 86:3379-3383 (1989), the entirety of which is herein incorporated by reference; Becker, et al., EMBO J. 8:3685-3691 (1989); the entirety of which is herein incorporated by reference). Automated nucleic acid synthesizers may be employed for this purpose. In lieu of such synthesis, the disclosed nucleic acid molecules may be used to define a pair of primers that can be used with the polymerase chain reaction (Mullis, et al., Cold Spring Harbor Symp. Quant. Biol. 51:263-273 (1986); Erlich et al., EP 50,424; EP 84,796, EP 258,017, EP 237,362; Mullis, EP 201,184; Mullis et al., U.S. Pat. No. 4,683,202; Erlich, U.S. Pat. No. 4,582,788; and Saiki, R. et al., U.S. Pat. No. 4,683,194, all of which are hereby incorporated by reference in their entirety) to amplify and obtain any desired nucleic acid molecule or fragment.

[0110] Promoter sequence(s) and other genetic elements including but not limited to transcriptional regulatory elements associated with one or more of the disclosed nucleic acid sequences can also be obtained using the disclosed nucleic acid sequences provided herein.

[0111] In one embodiment, such sequences are obtained by incubating EST nucleic acid molecules or preferably fragments thereof with members of genomic libraries (e.g. maize and soybean) and recovering clones that hybridize to the EST nucleic acid molecule or fragment thereof. In a second embodiment, methods of “chromosome walking,” or inverse PCR may be used to obtain such sequences (Frohman, et al., Proc. Natl. Acad. Sci. (U.S.A.) 85:8998-9002 (1988); Ohara, et al., Proc. Natl. Acad. Sci. (U.S.A.) 86: 5673-5677 (1989); Pang et al., Biotechniques, 22(6); 1046-1048 (1977); Huang et al., Methods Mol. Biol. 69: 89-96 (1977); Hartl et al., Methods Mol. Biol. 58: 293-301 (1996), all of which are hereby incorporated by reference in their entirety). In one embodiment, the disclosed nucleic acid molecules are used to identify cDNAs whose analogous genes contain promoters with desirable expression patterns. The nucleic acid molecules isolated from the library of the present invention are used to isolate promoters of tissue-enhanced, tissue-specific, developmentally- or environmentally-regulated expression profiles. Isolation and functional analysis of the 5′ flanking promoter sequences of these genes from genomic libraries, for example, using genomic screening methods and PCR techniques would result in the isolation of useful promoters and transcriptional regulatory elements. These methods are known to those of skill in the art and have been described (See for example Birren et al., Genome Analysis:Analyzing DNA, 1, (1997), Cold Spring Harbor Laboratory Press, Cold Spring Harbor, N.Y., the entirety of which is herein incorporated by reference).

[0112] Promoters obtained utilizing the nucleic acid molecules of the present invention could also be modified to affect their control characteristics. Examples of such modifications would include but are not limited to enhancer sequences as reported by Kay et al., Science 236:1299 (1987), herein incorporated by reference in its entirety. Such genetic elements could be used to enhance gene expression of new and existing traits for crop improvements.

[0113] The nucleic acid molecules of the present invention may be used to isolate promoters of tissue enhanced tissue specific, cell-specific, cell -type, developmentally or environmentally regulated expression profiles. Isolation and functional analysis of the 5′ flanking promoter sequences of these genes from genomic libraries, for example, using genomic screening methods and PCR techniques would result in the isolation of useful promoters and transcriptional regulatory elements. These methods are known to those of skill in the art and have been described (See, for example, Birren et. al., Genome Analysis: Analyzing DNA, 1, Cold Spring Harbor Laboratory Press, Cold Spring Harbor, N.Y. (1997), the entirety of which is herein incorporated by reference). Promoters obtained utilizing the nucleic acid molecules of the present invention could also be modified to affect their control characteristics. Examples of such modifications would include but are not limited to enhancer sequences as reported by Kay, et al Science 236:1299 (1987), herein incorporated reference in its entirety. Such genetic elements could be used to enhance gene expression of new and existing traits for crop improvements.

[0114] In an aspect of the present invention, one or more of the nucleic molecules of the present invention are used to determine whether a plant (preferably soybean) has a mutation affecting the level (i.e., the concentration of mRNA in a sample, etc.) or pattern (i.e., the kinetics of expression, rate of decomposition, stability profile, etc.) of the expression encoded in part or whole by one or more of the nucleic acid molecules of the present invention (collectively, the “Expression Response” of a cell or tissue). As used herein, the Expression Response manifested by a cell or tissue is said to be “altered” if it differs from the Expression Response of cells or tissues of plants not exhibiting the phenotype. To determine whether a Expression Response is altered, the Expression Response manifested by the cell or tissue of the plant exhibiting the phenotype is compared with that of a similar cell or tissue sample of a plant not exhibiting the phenotype. As will be appreciated, it is not necessary to re-determine the Expression Response of the cell or tissue sample of plants not exhibiting the phenotype each time such a comparison is made; rather, the Expression Response of a particular plant may be compared with previously obtained values of normal plants. As used herein, the phenotype of the organism is any of one or more characteristics of an organism (e.g. disease resistance, pest tolerance, environmental tolerance, male sterility, yield, quality improvements, etc.). A change in genotype or phenotype may be transient or permanent. Also as used herein, a tissue sample is any sample that comprises more than one cell. In a preferred aspect, a tissue sample comprises cells that share a common characteristic (e.g. derived from leaf, root, or pollen etc).

[0115] In one sub-aspect, such an analysis is conducted by determining the presence and/or identity of polymorphism(s) by one or more of the nucleic acid molecules of the present invention and more specifically, one or more of the EST nucleic acid molecules or fragments thereof which are associated with phenotype, or a predisposition to phenotype.

[0116] Any of a variety of molecules can be used to identify such polymorphism(s). In one embodiment, one or more of the EST nucleic acid molecules (or a sub-fragment thereof) may be employed as a marker nucleic acid molecule to identify such polymorphism(s). Alternatively, such polymorphisms can be detected through the use of a marker nucleic acid molecule or a marker protein that is genetically linked to (i.e., a polynucleotide that co-segregates with) such polymorphism(s).

[0117] In an alternative embodiment, such polymorphisms can be detected through the use of a marker nucleic acid molecule that is physically linked to such polymorphism(s). For this purpose, marker nucleic acid molecules comprising a nucleotide sequence of a polynucleotide located within 1 mb of the polymorphism(s), and more preferably within 100 kb of the polymorphism(s), and most preferably within 10 kb of the polymorphism(s) can be employed.

[0118] The genomes of animals and plants naturally undergo spontaneous mutation in the course of their continuing evolution (Gusella, Ann. Rev. Biochem. 55:831-854 (1986)). A “polymorphism” is a variation or difference in the sequence of the gene or its flanking regions that arises in some of the members of a species. The variant sequence and the “original” sequence co-exist in the species' population. In some instances, such co-existence is in stable or quasi-stable equilibrium.

[0119] A polymorphism is thus said to be “allelic,” in that, due to the existence of the polymorphism, some members of a species may have the original sequence (i.e., the original “allele”) whereas other members may have the variant sequence (i.e., the variant “allele”). In the simplest case, only one variant sequence may exist, and the polymorphism is thus said to be di-allelic. In other cases, the species' population may contain multiple alleles, and the polymorphism is termed tri-allelic, etc. A single gene may have multiple different unrelated polymorphisms. For example, it may have a di-allelic polymorphism at one site, and a multi-allelic polymorphism at another site.

[0120] The variation that defines the polymorphism may range from a single nucleotide variation to the insertion or deletion of extended regions within a gene. In some cases, the DNA sequence variations are in regions of the genome that are characterized by short tandem repeats (STRs) that include tandem di- or tri-nucleotide repeated motifs of nucleotides. Polymorphisms characterized by such tandem repeats are referred to as “variable number tandem repeat” (“VNTR”) polymorphisms. VNTRs have been used in identity analysis (Weber, U.S. Pat. No. 5,075,217; Armour, et al., FEBS Lett. 307:113-115 (1992); Jones, et al., Eur. J. Haematol. 39:144-147 (1987); Horn, et al., PCT Application WO91/14003; Jeffreys, European Patent Application 370,719; Jeffreys, U.S. Pat. No. 5,699,082; Jeffreys. et al., Amer. J. Hum. Genet. 39:11-24 (1986); Jeffreys. et al., Nature 316:76-79 (1985); Gray, et al., Proc. R. Acad. Soc. Lond 243:241-253 (1991); Moore, et al., Genomics 10:654-660 (1991); Jeffreys, et al., Anim. Genet. 18:1-15 (1987); Hillel, et al., Anim. Genet. 20:145-155 (1989); Hillel, et al., Genet. 124:783-789 (1990), all of which are herein incorporated by reference in their entirety).

[0121] The detection of polymorphic sites in a sample of DNA may be facilitated through the use of nucleic acid amplification methods. Such methods specifically increase the concentration of polynucleotides that span the polymorphic site, or include that site and sequences located either distal or proximal to it. Such amplified molecules can be readily detected by gel electrophoresis or other means.

[0122] The most preferred method of achieving such amplification employs the polymerase chain reaction (“PCR”) (Mullis, et al., Cold Spring Harbor Symp. Quant. Biol. 51:263-273 (1986); Erlich, et al., European Patent Appln. 50,424; European Patent Appln. 84,796, European Patent Application 258,017, European Patent Appln. 237,362; Mullis, European Patent Appln. 201,184; Mullis, et al., U.S. Pat. No. 4,683,202; Erlich., U.S. Pat. No. 4,582,788; and Saiki, et al., U.S. Pat. No. 4,683,194, all of which are herein incorporated by reference), using primer pairs that are capable of hybridizing to the proximal sequences that define a polymorphism in its double-stranded form.

[0123] In lieu of PCR, alternative methods, such as the “Ligase Chain Reaction” (“LCR”) may be used (Barany, Proc. Natl. Acad. Sci. (U.S.A.) 88:189-193 (1991), the entirety of which is herein incorporated by reference). LCR uses two pairs of oligonucleotide probes to exponentially amplify a specific target. The sequences of each pair of oligonucleotides is selected to permit the pair to hybridize to abutting sequences of the same strand of the target. Such hybridization forms a substrate for a template-dependent ligase. As with PCR, the resulting products thus serve as a template in subsequent cycles and an exponential amplification of the desired sequence is obtained.

[0124] LCR can be performed with oligonucleotides having the proximal and distal sequences of the same strand of a polymorphic site. In one embodiment, either oligonucleotide will be designed to include the actual polymorphic site of the polymorphism. In such an embodiment, the reaction conditions are selected such that the oligonucleotides can be ligated together only if the target molecule either contains or lacks the specific nucleotide that is complementary to the polymorphic site present on the oligonucleotide. Alternatively, the oligonucleotides may be selected such that they do not include the polymorphic site (see, Segev, PCT Application WO 90/01069, the entirety of which is herein incorporated by reference).

[0125] The “Oligonucleotide Ligation Assay” (“OLA”) may alternatively be employed (Landegren, et al., Science 241:1077-1080 (1988), the entirety of which is herein incorporated by reference). The OLA protocol uses two oligonucleotides which are designed to be capable of hybridizing to abutting sequences of a single strand of a target. OLA, like LCR, is particularly suited for the detection of point mutations. Unlike LCR, however, OLA results in “linear” rather than exponential amplification of the target sequence.

[0126] Nickerson, et al. have described a nucleic acid detection assay that combines attributes of PCR and OLA (Nickerson, et al., Proc. Natl. Acad. Sci. (U.S.A.) 87:8923-8927 (1990), the entirety of which is herein incorporated by reference). In this method, PCR is used to achieve the exponential amplification of target DNA, which is then detected using OLA. In addition to requiring multiple, and separate, processing steps, one problem associated with such combinations is that they inherit all of the problems associated with PCR and OLA.

[0127] Schemes based on ligation of two (or more) oligonucleotides in the presence of nucleic acid having the sequence of the resulting “di-oligonucleotide”, thereby amplifying the di-oligonucleotide, are also known (Wu, et al., Genomics 4:560 (1989), the entirety of which is herein incorporated by reference), and may be readily adapted to the purposes of the present invention.

[0128] Other known nucleic acid amplification procedures, such as allele-specific oligomers, branched DNA technology, transcription-based amplification systems, or isothermal amplification methods may also be used to amplify and analyze such polymorphisms (Malek, et al., U.S. Pat. No. 5,130,238; Davey, et al., European Patent Application 329,822; Schuster et al., U.S. Pat. No. 5,169,766; Miller, et al., PCT Application WO 89/06700; Kwoh, et al., Proc. Natl. Acad. Sci. (U.S.A.) 86:1173-1177 (1989); Gingeras, et al., PCT Application WO 88/10315; Walker, et al., Proc. Natl. Acad. Sci. (U.S.A.) 89:392-396 (1992), all of which are herein incorporated by reference in their entirety).

[0129] The identification of a polymorphism can be determined in a variety of ways. By correlating the presence or absence of it in a plant with the presence or absence of a phenotype, it is possible to predict the phenotype of that plant. If a polymorphism creates or destroys a restriction endonuclease cleavage site, or if it results in the loss or insertion of DNA (e.g., a VNTR polymorphism), it will alter the size or profile of the DNA fragments that are generated by digestion with that restriction endonuclease. As such, individuals that possess a variant sequence can be distinguished from those having the original sequence by restriction fragment analysis. Polymorphisms that can be identified in this manner are termed “restriction fragment length polymorphisms” (“RFLPs”). RFLPs have been widely used in human and plant genetic analyses (Glassberg, UK Patent Application 2135774; Skolnick, et al., Cytogen. Cell Genet. 32:58-67 (1982); Botstein, et al., Ann. J. Hum. Genet. 32:314-331 (1980); Fischer, et al. (PCT Application WO90/13668); Uhlen, PCT Application WO90/11369).

[0130] Polymorphisms can also be identified by Single Strand Conformation Polymorphism (SSCP) analysis. The SSCP technique is a method capable of identifying most sequence variations in a single strand of DNA, typically between 150 and 250 nucleotides in length (Elles, Methods in Molecular Medicine: Molecular Diagnosis of Genetic Diseases, Humana Press (1996), the entirety of which is herein incorporated by reference); Orita et al., Genomics 5: 874-879 (1989), the entirety of which is herein incorporated by reference). Under denaturing conditions a single strand of DNA will adopt a conformation that is uniquely dependent on its sequence conformation. This conformation usually will be different, even if only a single base is changed. Most conformations have been reported to alter the physical configuration or size sufficiently to be detectable by electrophoresis. A number of protocols have been described for SSCP including, but not limited to Lee et al., Anal. Biochem. 205: 289-293 (1992), the entirety of which is herein incorporated by reference; Suzuki et al., Anal. Biochem. 192: 82-84 (1991), the entirety of which is herein incorporated by reference; Lo et al., Nucleic Acids Research 20: 1005-1009 (1992), the entirety of which is herein incorporated by reference; Sarkar et al., Genomics 13: 441-443 (1992), the entirety of which is herein incorporated by reference). It is understood that one or more of the nucleic acids of the present invention, may be utilized as markers or probes to detect polymorphisms by SSCP analysis.

[0131] Polymorphisms may also be found using a DNA fingerprinting technique called amplified fragment length polymorphism (AFLP), which is based on the selective PCR amplification of restriction fragments from a total digest of genomic DNA to profile that DNA. Vos, et al., Nucleic Acids Res. 23:4407-4414 (1995), the entirety of which is herein incorporated by reference. This method allows for the specific co-amplification of high numbers of restriction fragments, which can be visualized by PCR without knowledge of the nucleic acid sequence.

[0132] AFLP employs basically three steps. Initially, a sample of genomic DNA is cut with restriction enzymes and oligonucleotide adapters are ligated to the restriction fragments of the DNA. The restriction fragments are then amplified using PCR by using the adapter and restriction sequence as target sites for primer annealing. The selective amplification is achieved by the use of primers that extend into the restriction fragments, amplifying only those fragments in which the primer extensions match the nucleotide flanking the restriction sites. These amplified fragments are then visualized on a denaturing polyacrylamide gel.

[0133] AFLP analysis has been performed on Salix (Beismann, et al., Mol. Ecol. 6:989-993 (1997), the entirety of which is herein incorporated by reference); Acinetobacter (Janssen, et al., Int. J. Syst. Bacteriol 47:1179-1187 (1997), the entirety of which is herein incorporated by reference), Aeromonas popoffi (Huys, et al., Int. J. Syst. Bacteriol. 47:1165-1171 (1997), the entirety of which is herein incorporated by reference), rice (McCouch, et al., Plant Mol. Biol. 35:89-99 (1997), the entirety of which is herein incorporated by reference); Nandi, et al., Mol. Gen. Genet. 255:1-8 (1997); Cho, et al., Genome 39:373-318 (1996), herein incorporated by reference), barley (Hordeum vulgare)(Simons, et al., Genomics 44:61-70 (1997), the entirety of which is herein incorporated by reference; Waugh, et al., Mol. Gen. Genet. 255:311-321 (1997), the entirety of which is herein incorporated by reference; Qi, et al., Mol. Gen Genet. 254:330-336 (1997), the entirety of which is herein incorporated by reference; Becker, et al., Mol. Gen. Genet. 249:65-73 (1995), the entirety of which is herein incorporated by reference), potato (Van der Voort, et al., Mol. Gen. Genet. 255:438-447 (1997), the entirety of which is herein incorporated by reference; Meksem, et al., Mol. Gen. Genet. 249:74-81 (1995), the entirety of which is herein incorporated by reference), Phytophthora infestans (Van der Lee, et al., Fungal Genet. Biol. 21:278-291 (1997), the entirety of which is herein incorporated by reference), Bacillus anthracis (Keim, et al., J. Bacteriol. 1 79:818-824 (1997)), Astragalus cremnophylax (Travis, et al., Mol. Ecol. 5:735-745 (1996), the entirety of which is herein incorporated by reference), Arabidopsis (Cnops, et al., Mol. Gen. Genet. 253:32-41 (1996), the entirety of which is herein incorporated by reference), Escherichia coli (Lin, et al., Nucleic Acids Res. 24:3649-3650 (1996), the entirety of which is herein incorporated by reference), Aeromonas (Huys, et al., Int. J. Syst. Bacteriol. 46:572-580 (1996), the entirety of which is herein incorporated by reference), nematode (Folkertsma, et al., Mol. Plant Microbe Interact. 9:47-54 (1996), the entirety of which is herein incorporated by reference), tomato (Thomas, et al., Plant J. 8:785-794 (1995), the entirety of which is herein incorporated by reference), and human (Latorra, et al., PCR Methods Appl. 3:351-358 (1994)). AFLP analysis has also been used for fingerprinting mRNA (Money, et al., Nucleic Acids Res. 24:2616-2617 (1996), the entirety of which is herein incorporated by reference; Bachem, et al., Plant J. 9:745-753 (1996), the entirety of which is herein incorporated by reference). It is understood that one or more of the nucleic acids of the present invention, may be utilized as markers or probes to detect polymorphisms by AFLP analysis for fingerprinting mRNA.

[0134] Polymorphisms may also be found using random amplified polymorphic DNA (RAPD) (Williams et al., Nucl. Acids Res. 18: 6531-6535 (1990), the entirety of which is herein incorporated by reference) and cleaveable amplified polymorphic sequences (CAPS) (Lyamichev et al., Science 260: 778-783 (1993), the entirety of which is herein incorporated by reference). It is understood that one or more of the nucleic acids of the present invention, may be utilized as markers or probes to detect polymorphisms by RAPD or CAPS analysis.

[0135] Polymorphisms are useful, through linkage analysis, to define the genetic distances or physical distances between polymorphic traits. A physical map or ordered array of genomic DNA fragments in the desired region containing the gene may be used to characterize and isolate genes corresponding to desirable traits. For this purpose, yeast artificial chromosomes (YACs), bacterial artificial chromosomes (BACs), and cosmids are appropriate vectors for cloning large segments of DNA molecules. Although fewer clones are needed to make a contig for a specific genomic region by using YACs (Agyare et al., Genome Res. 7: 1-9 (1997), the entirety of which is herein incorporated by reference; James et al., Genomics 32: 425-430 (1996), the entirety of which is herein incorporated by reference), chimerism in the inserted DNA fragment can arise. Cosmids are convenient for handling smaller-size DNA molecules and may be used for transformation in developing transgenic plants. BACs also carry DNA fragments and are less prone to chimerism.

[0136] Through genetic mapping, a fine scale linkage map can be developed using DNA markers and, then, a genomic DNA library of large-sized fragments can be screened with molecular markers linked to the desired trait. Molecular markers are advantageous for agronomic traits that are otherwise difficult to tag, such as resistance to pathogens, insects and nematodes, tolerance to abiotic stress, quality parameters and quantitative traits such as high yield potential.

[0137] The essential requirements for marker-assisted selection in a plant breeding program are: (1) the marker(s) should co-segregate or be closely linked with the desired trait; (2) an efficient means of screening large populations for the molecular marker(s) should be available; and (3) the screening technique should have high reproducibility across laboratories and preferably be economical to use and be user-friendly.

[0138] The genetic linkage of marker molecules can be established by a gene mapping model such as, without limitation, the flanking marker model reported by Lander and Botstein, Genetics 121:185-199 (1989) and the interval mapping, based on maximum likelihood methods described by Lander and Botstein, Genetics 121:185-199 (1989) and implemented in the software package MAPMAKER/QTL (Lincoln and Lander, Mapping Genes Controlling Quantitative Traits Using MAPMAKER/QTL, Whitehead Institute for Biomedical Research, Massachusetts, (1990). Additional software includes Qgene, Version 2.23 (1996), Department of Plant Breeding and Biometry, 266 Emerson Hall, Cornell University, Ithaca, N.Y., the manual of which is herein incorporated by reference in its entirety). Use of Qgene software is a particularly preferred approach.

[0139] A maximum likelihood estimate (MLE) for the presence of a marker is calculated, together with an MLE assuming no QTL effect, to avoid false positives. A log₁₀ of an odds ratio (LOD) is then calculated as: LOD=log₁₀ (MLE for the presence of a QTL/MLE given no linked QTL).

[0140] The LOD score essentially indicates how much more likely the data are to have arisen assuming the presence of a QTL than in its absence. The LOD threshold value for avoiding a false positive with a given confidence, say 95%, depends on the number of markers and the length of the genome. Graphs indicating LOD thresholds are set forth in Lander and Botstein, Genetics 121:185-199 (1989) the entirety of which is herein incorporated by reference and further described by Arús and Moreno-González, Plant Breeding, Hayward et al., (eds.) Chapman & Hall, London, pp. 314-331 (1993), the entirety of which is herein incorporated by reference.

[0141] Additional models can be used. Many modifications and alternative approaches to interval mapping have been reported, including the use of non-parametric methods (Kruglyak and Lander, Genetics 139:1421-1428 (1995), the entirety of which is herein incorporated by reference). Multiple regression methods or models can be also be used, in which the trait is regressed on a large number of markers (Jansen, Biometrics in Plant Breeding, van Oijen and Jansen (eds.), Proceedings of the Ninth Meeting of the Eucarpia Section Biometrics in Plant Breeding, The Netherlands, pp. 116-124 (1994); Weber and Wricke, Advances in Plant Breeding, Blackwell, Berlin, 16 (1994), both of which is herein incorporated by reference in their entirety). Procedures combining interval mapping with regression analysis, whereby the phenotype is regressed onto a single putative QTL at a given marker interval and at the same time onto a number of markers that serve as ‘cofactors,’ have been reported by Jansen and Stam, Genetics 136:1447-1455 (1994), the entirety of which is herein incorporated by reference and Zeng, Genetics 136:1457-1468 (1994) the entirety of which is herein incorporated by reference. Generally, the use of cofactors reduces the bias and sampling error of the estimated QTL positions (Utz and Melchinger, Biometrics in Plant Breeding, van Oijen and Jansen (eds.) Proceedings of the Ninth Meeting of the Eucarpia Section Biometrics in Plant Breeding, The Netherlands, pp. 195-204 (1994), the entirety of which is herein incorporated by reference, thereby improving the precision and efficiency of QTL mapping (Zeng, Genetics 136:1457-1468 (1994)). These models can be extended to multi-environment experiments to analyze genotype-environment interactions (Jansen et al., Theo. Appl. Genet. 91:33-37 (1995), the entirety of which is herein incorporated by reference).

[0142] Selection of an appropriate mapping population is important to map construction. The choice of an appropriate mapping population depends on the type of marker systems employed (Tanksley et al., Molecular mapping plant chromosomes. Chromosome structure and function: Impact of new concepts, Gustafson and Appels (eds.), Plenum Press, New York, pp 157-173 (1988), the entirety of which is herein incorporated by reference). Consideration must be given to the source of parents (adapted vs. exotic) used in the mapping population. Chromosome pairing and recombination rates can be severely disturbed (suppressed) in wide crosses (adapted×exotic) and generally yield greatly reduced linkage distances. Wide crosses will usually provide segregating populations with a relatively large array of polymorphisms when compared to progeny in a narrow cross (adapted×adapted).

[0143] An F₂ population is the first generation of selfing after the hybrid seed is produced. Usually a single F₁ plant is selfed to generate a population segregating for all the genes in Mendelian (1:2:1) fashion. Maximum genetic information is obtained from a completely classified F₂ population using a codominant marker system (Mather, Measurement of Linkage in Heredity, Methuen and Co., (1938), the entirety of which is herein incorporated by reference). In the case of dominant markers, progeny tests (e.g. F₃, BCF₂) are required to identify the heterozygotes, thus making it equivalent to a completely classified F₂ population. However, this procedure is often prohibitive because of the cost and time involved in progeny testing. Progeny testing of F₂ individuals is often used in map construction where phenotypes do not consistently reflect genotype (e.g. disease resistance) or where trait expression is controlled by a QTL. Segregation data from progeny test populations (e.g. F₃ or BCF₂) can be used in map construction. Marker-assisted selection can then be applied to cross progeny based on marker-trait map associations (F₂, F₃), where linkage groups have not been completely disassociated by recombination events (i.e., maximum disequilibrium).

[0144] Recombinant inbred lines (RIL) (genetically related lines; usually >F₅, developed from continuously selfing F₂ lines towards homozygosity) can be used as a mapping population. Information obtained from dominant markers can be maximized by using RIL because all loci are homozygous or nearly so. Under conditions of tight linkage (i.e., about <10% recombination), dominant and co-dominant markers evaluated in RIL populations provide more information per individual than either marker type in backcross populations (Reiter et al., Proc. Natl. Acad. Sci. (U.S.A.) 89:1477-1481 (1992), the entirety of which is herein incorporated by reference). However, as the distance between markers becomes larger (i.e., loci become more independent), the information in RIL populations decreases dramatically when compared to codominant markers.

[0145] Backcross populations (e.g., generated from a cross between a successful variety (recurrent parent) and another variety (donor parent) carrying a trait not present in the former) can be utilized as a mapping population. A series of backcrosses to the recurrent parent can be made to recover most of its desirable traits. Thus a population is created consisting of individuals nearly like the recurrent parent but each individual carries varying amounts or mosaic of genomic regions from the donor parent. Backcross populations can be useful for mapping dominant markers if all loci in the recurrent parent are homozygous and the donor and recurrent parent have contrasting polymorphic marker alleles (Reiter et al., Proc. Natl. Acad. Sci. (U.S.A.) 89:1477-1481 (1992)). Information obtained from backcross populations using either codominant or dominant markers is less than that obtained from F₂ populations because one, rather than two, recombinant gametes are sampled per plant. Backcross populations, however, are more informative (at low marker saturation) when compared to RILs as the distance between linked loci increases in RIL populations (i.e. about 15% recombination). Increased recombination can be beneficial for resolution of tight linkages, but may be undesirable in the construction of maps with low marker saturation.

[0146] Near-isogenic lines (NIL) created by many backcrosses to produce an array of individuals that are nearly identical in genetic composition except for the trait or genomic region under interrogation can be used as a mapping population. In mapping with NILs, only a portion of the polymorphic loci are expected to map to a selected region.

[0147] Bulk segregant analysis (BSA) is a method developed for the rapid identification of linkage between markers and traits of interest (Michelmore et al., Proc. Natl. Acad. Sci. (U.S.A.) 88:9828-9832 (1991), the entirety of which is herein incorporated by reference). In BSA, two bulked DNA samples are drawn from a segregating population originating from a single cross. These bulks contain individuals that are identical for a particular trait (resistant or susceptible to particular disease) or genomic region but arbitrary at unlinked regions (i.e. heterozygous). Regions unlinked to the target region will not differ between the bulked samples of many individuals in BSA.

[0148] It is understood that one or more of the nucleic acid molecules of the present invention may be used as molecular markers. It is also understood that one or more of the protein molecules of the present invention may be used as molecular markers.

[0149] In accordance with this aspect of the present invention, a sample nucleic acid is obtained from plants cells or tissues. Any source of nucleic acid may be used. Preferably, the nucleic acid is genomic DNA. The nucleic acid is subjected to restriction endonuclease digestion. For example, one or more EST nucleic acid molecule or fragment thereof can be used as a probe in accordance with the above-described polymorphic methods. The polymorphism obtained in this approach can then be cloned to identify the mutation at the coding region which alters the protein's structure or regulatory region of the gene which affects its expression level.

[0150] In one aspect of the present invention, an evaluation can be conducted to determine whether a particular mRNA molecule is present. One or more of the nucleic acid molecules of the present invention, preferably one or more of the EST nucleic acid molecules of the present invention are utilized to detect the presence or quantity of the mRNA species. Such molecules are then incubated with cell or tissue extracts of a plant under conditions sufficient to permit nucleic acid hybridization. The detection of double-stranded probe-mRNA hybrid molecules is indicative of the presence of the mRNA; the amount of such hybrid formed is proportional to the amount of mRNA. Thus, such probes may be used to ascertain the level and extent of the mRNA production in a plant's cells or tissues. Such nucleic acid hybridization may be conducted under quantitative conditions (thereby providing a numerical value of the amount of the mRNA present). Alternatively, the assay may be conducted as a qualitative assay that indicates either that the mRNA is present, or that its level exceeds a user set, predefined value.

[0151] A principle of in situ hybridization is that a labeled, single-stranded nucleic acid probe will hybridize to a complementary strand of cellular DNA or RNA and, under the appropriate conditions, these molecules will form a stable hybrid. When nucleic acid hybridization is combined with histological techniques, specific DNA or RNA sequences can be identified within a single cell. An advantage of in situ hybridization over more conventional techniques for the detection of nucleic acids is that it allows an investigator to determine the precise spatial population (Angerer et al., Dev. Biol. 101: 477-484 (1984), the entirety of which is herein incorporated by reference; Angerer et al., Dev. Biol. 112: 157-166 (1985), the entirety of which is herein incorporated by reference; Dixon et al., EMBO J. 10: 1317-1324 (1991), the entirety of which is herein incorporated by reference). In situ hybridization may be used to measure the steady-state level of RNA accumulation. It is a sensitive technique and RNA sequences present in as few as 5-10 copies per cell can be detected (Hardin et al., J. Mol. Biol. 202: 417-431.(1989), the entirety of which is herein incorporated by reference). A number of protocols have been devised for in situ hybridization, each with tissue preparation, hybridization, and washing conditions (Meyerowitz, Plant Mol. Biol. Rep. 5: 242-250 (1987), the entirety of which is herein incorporated by reference; Cox and Goldberg, In: Plant Molecular Biology: A Practical Approach (ed. C. H. Shaw), pp. 1-35. IRL Press, Oxford (1988), the entirety of which is herein incorporated by reference; Raikhel et al., In situ RNA hybridization in plant tissues. In Plant Molecular Biology Manual, vol. B9:1-32. Kluwer Academic Publisher, Dordrecht, Belgium (1989), the entirety of which is herein incorporated by reference).

[0152] In situ hybridization also allows for the localization of proteins within a tissue or cell (Wilkinson, In Situ Hybridization, Oxford University Press, Oxford (1992), the entirety of which is herein incorporated by reference; Langdale, In Situ Hybridization 165-179 In: The Maize Handbook, eds. Freeling and Walbot, Springer-Verlag, New York (1994), the entirety of which is herein incorporated by reference). It is understood that one or more of the molecules of the present invention, preferably one or more of the EST nucleic acid molecules of the present invention or one or more of the antibodies of the present invention may be utilized to detect the level or pattern of a protein or fragment thereof by in situ hybridization.

[0153] Fluorescent in situ hybridization also enables the localization of a particular DNA sequence along a chromosome which is useful, among other uses, for gene mapping, following chromosomes in hybrid lines or detecting chromosomes with translocations, transversions or deletions. In situ hybridization has been used to identify chromosomes in several plant species (Griffor et al., Plant Mol. Biol. 17: 101-109 (1991), the entirety of which is herein incorporated by reference; Gustafson et al., Proc. Nat'l. Acad. Sci. (U.S.A). 87: 1899-1902 (1990), herein incorporated by reference; Mukai and Gill, Genome 34: 448-452. (1991); Schwarzacher and Heslop-Harrison, Genome 34: 317-323 (1991); Wang et al., Jpn. J. Genet. 66: 313-316 (1991), the entirety of which is herein incorporated by reference; Parra and Windle, Nature Genetics, 5: 17-21 (1993), the entirety of which is herein incorporated by reference). It is understood that the nucleic acid molecules of the present invention may be used as probes or markers to localize sequences along a chromosome.

[0154] It is also understood that one or more of the molecules of the present invention, preferably one or more of the EST nucleic acid molecules of the present invention or one or more of the antibodies of the present invention may be utilized to detect the expression level or pattern of a protein or mRNA thereof by in situ hybridization.

[0155] Another method to localize the expression of a molecule is tissue printing. Tissue printing provides a way to screen, at the same time on the same membrane many tissue sections from different plants or different developmental stages. Tissue-printing procedures utilize films designed to immobilize proteins and nucleic acids. In essence, a freshly cut section of an organ is pressed gently onto nitrocellulose paper, nylon membrane or polyvinylidene difluoride membrane. Such membranes are commercially available (e.g. Millipore, Bedford, Mass.). The contents of the cut cell transfer onto the membrane, and the molecules are immobilized to the membrane. The immobilized molecules form a latent print that can be visualized with appropriate probes. When a plant tissue print is made on nitrocellulose paper, the cell walls leave a physical print that makes the anatomy visible without further treatment (Varner and Taylor, Plant Physiol. 91: 31-33 (1989), the entirety of which is herein incorporated by reference).

[0156] Tissue printing on substrate films is described by Daoust, Exp. Cell Res. 12: 203-211 (1957), the entirety of which is herein incorporated by reference, who detected amylase, protease, ribonuclease, and deoxyribonuclease in animal tissues using starch, gelatin, and agar films. These techniques can be applied to plant tissues (Yomo and Taylor, Planta 112:35-43 (1973); Harris and Chrispeels, Plant Physiol. 56: 292-299 (1975). Advances in membrane technology have increased the range of applications of Daoust's tissue-printing techniques allowing (Cassab and Vamer, J. Cell. Biol. 105: 2581-2588 (1987), the entirety of which is herein incorporated by reference; the histochemical localization of various plant enzymes and deoxyribonuclease on nitrocellulose paper and nylon (Spruce et al., Phytochemistry, 26: 2901-2903 (1987), the entirety of which is herein incorporated by reference; Barres et al. Neuron 5: 527-544 (1990), the entirety of which is herein incorporated by reference; the entirety of which is herein incorporated by reference; Reid and Pont-Lezica, Tissue Printing: Tools for the Study of Anatomy, Histochemistry, and Gene Expression, Academic Press, New York, N.Y. (1992), the entirety of which is herein incorporated by reference; Reid et al. Plant Physiol. 93: 160-165 (1990), herein incorporate by reference; Ye et al. Plant J. 1: 175-183 (1991), the entirety of which is herein incorporated by reference).

[0157] It is understood that one or more of the molecules of the present invention, preferably one or more of the EST nucleic acid molecules of the present invention or one or more of the antibodies of the present invention may be utilized to detect the presence or quantity of a protein by tissue printing.

[0158] Further, it is also understood that any of the nucleic acid molecules of the present invention may be used as marker nucleic acids and or probes in connection with methods that require probes or marker nucleic acids. As used herein, a probe is an agent that is utilized to determine an attribute or feature (e.g. presence or absence, location, correlation, etc.) or a molecule, cell, tissue or plant. As used herein, a marker nucleic acid is a nucleic acid molecule that is utilized to determine an attribute or feature (e.g., presence or absence, location, correlation, etc.) or a molecule, cell, tissue or plant.

[0159] A microarray-based method for high-throughput monitoring of plant gene expression may be utilized to measure gene-specific hybridization targets. This ‘chip’-based approach involves using microarrays of nucleic acid molecules as gene-specific hybridization targets to quantitatively measure expression of the corresponding plant genes (Schena et al., Science 270: 467-470 (1995), the entirety of which is herein incorporated by reference; Shalon, Ph.D. Thesis. Stanford University (1996), the entirety of which is herein incorporated by reference). Every nucleotide in a large sequence can be queried at the same time. Hybridization can be used to efficiently analyze large amounts of nucleotide sequence.

[0160] Several microarray methods have been described. One method compares the sequences to be analyzed by hybridization to a set of oligonucleotides representing all possible subsequences (Bains and Smith, J. Theor. Biol. 135: 303 (1989), the entirety of which is herein incorporated by reference). A second method hybridizes the sample to an array of oligonucleotide probes. An array consisting of oligonucleotides complementary to subsequences of a target sequence can be used to determine the identity of a target sequence, measure its amount, and detect differences between the target and a reference sequence. Nucleic acid molecules microarrays may also be screened with protein molecules or fragments thereof to determine nucleic acid molecules that specifically bind protein molecules or fragments thereof.

[0161] The microarray approach may be used with polypeptide targets (U.S. Pat. No. 5,445,934; U.S. Pat. No: 5,143,854; U.S. Pat. No. 5,079,600; U.S. Pat. No. 4,923,901, all of which are herein incorporated by reference in their entirety). Essentially, polypeptides are synthesized on a substrate (microarray) and these polypeptides can be screened with either protein molecules or fragments thereof or nucleic acid molecules in order to screen for either protein molecules or fragments thereof or nucleic acid molecules that specifically bind the target polypeptides. Implementation of these techniques rely on recently developed combinatorial technologies to generate any ordered array of a large number of oligonucleotide probes (Fodor et al., Science 251:767-773 (1991), the entirety of which is herein incorporated by reference).

[0162] It is understood that one or more of the molecules of the present invention, preferably one or more of the nucleic acid molecules or protein molecules or fragments thereof of the present invention may be utilized in a microarray based method.

[0163] In a preferred embodiment of the present invention microarrays may be prepared that comprise nucleic acid molecules where preferably at least 10%, preferably at least 25%, more preferably at least 50% and even more preferably at least 75%, 80%, 85%, 90% or 95% of the nucleic acid molecules located on that array are selected from the group of nucleic acid molecules that specifically hybridize to one or more nucleic acid molecule having a nucleic acid sequence selected from the group of SEQ ID NO: 1 through SEQ ID NO: 15775 or complement thereof or fragments of either.

[0164] A particular preferred microarray embodiment of the present invention is a microarray comprising nucleic acid molecules encoding genes or fragments thereof that are homologues of known genes or nucleic acid molecules that comprise genes or fragment thereof that elicit only limited or no matches to known genes. A further preferred microarray embodiment of the present invention is a microarray comprising nucleic acid molecules having genes or fragments thereof that are homologues of known genes and nucleic acid molecules that comprise genes or fragment thereof that elicit only limited or no matches to known genes. Site-directed mutagenesis may be utilized to modify nucleic acid sequences, particularly as it is a technique that allows one or more of the amino acids encoded by a nucleic acid molecule to be altered (e.g. a threonine to be replaced by a methionine). Three basic methods for site-directed mutagenesis are often employed. These are cassette mutagenesis (Wells et al., Gene 34:315-23 (1985), the entirety of which is herein incorporated by reference), primer extension (Gilliam et al., Gene 12:129-137 (1980), the entirety of which is herein incorporated by reference); Zoller and Smith, Methods Enzymol. 100:468-500 (1983), the entirety of which is herein incorporated by reference; and Dalbadie-McFarland et al., Proc. Natl. Acad. Sci. (U.S.A.) 79:6409-6413 (1982), the entirety of which is herein incorporated by reference) and methods based upon PCR (Scharf et al., Science 233:1076-1078 (1986), the entirety of which is herein incorporated by reference; Higuchi et al., Nucleic Acids Res. 16:7351-7367 (1988), the entirety of which is herein incorporated by reference). Site-directed mutagenesis approaches are also described in European Patent 0 385 962, the entirety of which is herein incorporated by reference, European Patent 0 359 472, the entirety of which is herein incorporated by reference, and PCT Patent Application WO 93/07278, the entirety of which is herein incorporated by reference.

[0165] Site-directed mutagenesis strategies have been applied to plants for both in vitro as well as in vivo site-directed mutagenesis (Lanz et al., J. Biol. Chem. 266:9971-6 (1991), the entirety of which is herein incorporated by reference; Kovgan and Zhdanov, Biotekhnologiya 5:148-154; No. 207160n, Chemical Abstracts 110:225 (1989), the entirety of which is herein incorporated by reference; Ge et al., Proc. Natl. Acad. Sci. (U.S.A.) 86:4037-4041 (1989), the entirety of which is herein incorporated by reference, Zhu et al., J. Biol. Chem. 271:18494-18498 (1996), Chu et al., Biochemistry 33:6150-6157 (1994), the entirety of which is herein incorporated by reference, Small et al., EMBO J. 11:1291-1296 (1992), the entirety of which is herein incorporated by reference, Cho et al., Mol. Biotechnol. 8:13-16 (1997), Kita et al., J. Biol. Chem. 271:26529-26535 (1996), the entirety of which is herein incorporated by reference, Jin et al., Mol. Microbiol. 7:555-562 (1993), the entirety of which is herein incorporated by reference, Hatfield and Vierstra, J. Biol. Chem. 267:14799-14803 (1992), the entirety of which is herein incorporated by reference, Zhao et al., Biochemistry 31:5093-5099 (1992), the entirety of which is herein incorporated by reference).

[0166] Any of the nucleic acid molecules of the present invention may either be modified by site-directed mutagenesis or used as, for example, nucleic acid molecules that are used to target other nucleic acid molecules for modification. It is understood that mutants with more than one altered nucleotide can be constructed using techniques that practitioners skilled in the art are familiar with such as isolating restriction fragments and ligating such fragments into an expression vector (see, for example, Sambrook et al., Molecular Cloning: A Laboratory Manual, Cold Spring Harbor Press (1989)).

[0167] Sequence-specific DNA-binding proteins play a role in the regulation of transcription. The isolation of recombinant cDNAs encoding these proteins facilitates the biochemical analysis of their structural and functional properties. Genes encoding such DNA-binding proteins have been isolated using classical genetics (Vollbrecht et al., Nature 350: 241-243 (1991), the entirety of which is herein incorporated by reference) and molecular biochemical approaches, including the screening of recombinant cDNA libraries with antibodies (Landschulz et al., Genes Dev. 2: 786-800 (1988), the entirety of which is herein incorporated by reference) or DNA probes (Bodner et al., Cell 55: 505-518 (1988), the entirety of which is herein incorporated by reference). In addition, an in situ screening procedure has been used and has facilitated the isolation of sequence-specific DNA-binding proteins from various plant species (Gilmartin et al., Plant Cell 4: 839-849 (1992), the entirety of which is herein incorporated by reference; Schindler et al., EMBO J. 11: 1261-1273 (1992) the entirety of which is herein incorporated by reference). An in situ screening protocol does not require the purification of the protein of interest (Vinson et al., Genes Dev. 2: 801-806 (1988), the entirety of which is herein incorporated by reference; Singh et al., Cell 52: 415-423 (1988), the entirety of which is herein incorporated by reference).

[0168] Steps may be employed to characterize DNA-protein interactions. The first is to identify promoter fragments that interact with DNA-binding proteins, to titrate binding activity, to determine the specificity of binding, and to determine whether a given DNA-binding activity can interact with related DNA sequences (Sambrook et al., Molecular Cloning: A Laboratory Manual, 2nd edition. Cold Spring Harbor Laboratory Press, Cold Spring Harbor, N.Y. (1989). Electrophoretic mobility-shift assay is a widely used assay. The assay provides a simple, rapid, and sensitive method for detecting DNA-binding proteins based on the observation that the mobility of a DNA fragment through a nondenaturing, low-ionic strength polyacrylamide gel is retarded upon association with a DNA-binding protein (Fried and Crother, Nucleic Acids Res. 9: 6505-6525 (1981), the entirety of which is herein incorporated by reference). When one or more specific binding activities have been identified, the exact sequence of the DNA bound by the protein may be determined. Several procedures for characterizing protein/DNA-binding sites are used, including methylation and ethylation interference assays (Maxam and Gilbert, Methods Enzymol. 65: 499-560 (1980), the entirety of which is herein incorporated by reference; Wissman and Hillen, Methods Enzymol. 208: 365-379 (1991), the entirety of which is herein incorporated by reference) and footprinting techniques employing DNase I (Galas and Schmitz, Nucleic Acids Res. 5: 3157-3170 (1978), the entirety of which is herein incorporated by reference), 1,10-phenanthroline-copper ion methods (Sigman et al., Methods Enzymol. 208: 365-379 (1991), the entirety of which is herein incorporated by reference) or hydroxyl radical methods (Dixon et al., Methods Enzymol. 208: 380-413 (1991), the entirety of which is herein incorporated by reference). It is understood that one or more of the nucleic acid molecules of the present invention, preferably one or more of the EST nucleic acid molecules of the present invention may be utilized to identify a protein or fragment thereof that specifically binds to a nucleic acid molecule of the present invention. It is also understood that one or more of the protein molecules or fragments thereof of the present invention may be utilized to identify a nucleic acid molecule that specifically binds to it.

[0169] The two-hybrid system is based on the fact that many cellular functions are carried out by proteins that interact (physically) with one another. Two-hybrid systems have been used to probe the function of new proteins (Chien et al., Proc. Natl. Acad. Sci. (U.S.A.) 88: 9578-9582 (1991) the entirety of which is herein incorporated by reference; Durfee et al., Genes Dev. 7: 555-569 (1993) the entirety of which is herein incorporated by reference; Choi et al., Cell 78: 499-512 (1994), the entirety of which is herein incorporated by reference; Kranz et al., Genes Dev. 8: 313-327 (1994), the entirety of which is herein incorporated by reference).

[0170] Interaction mating techniques have facilitated a number of two-hybrid studies of protein-protein interaction. Interaction mating has been used to examine interactions between small sets of tens of proteins (Finley and Brent, Proc. Natl. Acad. Sci. (U.S.A.) 91: 12098-12984 (1994), the entirety of which is herein incorporated by reference), larger sets of hundreds of proteins, (Bendixen et al., Nucl. Acids Res. 22: 1778-1779 (1994), the entirety of which is herein incorporated by reference) and to comprehensively map proteins encoded by a small genome (Bartel et al., Nature Genetics 12: 72-77 (1996), the entirety of which is herein incorporated by reference). This technique utilizes proteins fused to the DNA-binding domain and proteins fused to the activation domain. They are expressed in two different haploid yeast strains of opposite mating type, and the strains are mated to determine if the two proteins interact. Mating occurs when haploid yeast strains come into contact and result in the fusion of the two haploids into a diploid yeast strain. An interaction can be determined by the activation of a two-hybrid reporter gene in the diploid strain. The primary advantage of this technique is that it reduces the number of yeast transformations needed to test individual interactions. It is understood that the protein-protein interactions of protein or fragments thereof of the present invention may be investigated using the two-hybrid system and that any of the nucleic acid molecules of the present invention that encode such proteins or fragments thereof may be used to transform yeast in the two-hybrid system.

[0171] Synechocystis 6803 is a photosynthetic Cyanobacterium capable of oxygenic photosynthesis as well as heterotrophic growth in the absence of light. The entire genome has been sequenced, and it is reported to have a circular genome size of 3.57 Mbp containing 3168 potential open reading frames. Open reading frames (ORFs) were identified based upon their homology to other reported ORFs and by using ORF identification computer programs. Sixteen hundred potential ORFs were assigned based on their homology to previously identified ORFs. Of these 1600 ORFs, 145 were identical to reported ORFs (Kaneko et al., DNA Research 3:109-36 (1996), herein incorporated by reference in its entirety).

[0172] Several prokaryote promoters have been used in Synechocystis to express heterologous genes including the tac, lac, and lambda phage promoters (Bryant (ed.), The Molecular Biology of Cyanobacteria, Kluwer Academic Publishers, (1994); Ferino and Chauvat, Gene 84:257-266 (1989), both of which are herein incorporated by reference in their entirety). Several bacterial origins of replication such as RSF1010 and ACYC are reported to replicate in Synechocystis (Mermet-Bouvier and Chauvat, Current Microbiology 28:145-148 (1994); Kuhlemeier et al., Mol. Gen. Genet. 184:249-254 (1981), both of which are herein incorporated by reference in their entirety).

[0173] Synechocystis has been used to study gene regulation by gene replacement through homologous recombination or by gene disruption using antibiotic resistance markers (Pakrasi et al., EMBO 7:325-332 (1988), herein incorporated by reference in its entirety). In such gene regulation studies, double reciprocal homologous regions of the host genome flanking the gene of interest recombine to stably integrate the gene of interest into the genome. The gene of interest can be expressed once that gene has been stably integrated into the genome. Biochemical analysis can be performed to study the effect of the replaced or deleted gene.

[0174] It is understood that the agents of the present invention may be employed in a Synechocystis system.

[0175] Exogenous genetic material may be transferred into a plant cell and the plant cell regenerated into a whole, fertile or sterile plant. Exogenous genetic material is any genetic material, whether naturally occurring or otherwise, from any source that is capable of being inserted into any organism. Such genetic material may be transferred into either monocotyledons and dicotyledons including but not limited to the crops, maize and soybean (See specifically, Chistou, Particle Bombardment for Genetic Engineering of Plants, pp 63-69 (maize), pp 50-60 (soybean), Biotechnology Intelligence Unit. Academic Press, San Diego, Calif. (1996), the entirety of which is herein incorporated by reference and generally Chistou, Particle Bombardmentfor Genetic Engineering of Plants, Biotechnology Intelligence Unit. Academic Press, San Diego, Calif. (1996), the entirety of which is herein incorporated by reference).

[0176] Transfer of a nucleic acid that encodes for a protein can result in overexpression of that protein in a transformed cell or transgenic plant. One or more of the proteins or fragments thereof encoded by nucleic acid molecules of the present invention may be overexpressed in a transformed cell or transformed plant. Such overexpression may be the result of transient or stable transfer of the exogenous material.

[0177] Exogenous genetic material may be transferred into a plant cell by the use of a DNA vector or construct designed for such a purpose. Design of such a vector is generally within the skill of the art (See, Plant Molecular Biology: A Laboratory Manual eds. Clark, Springer, N.Y. (1997), the entirety of which is herein incorporated by reference).

[0178] A construct or vector may include a plant promoter to express the protein or protein fragment of choice. A number of promoters which are active in plant cells have been described in the literature. These include the nopaline synthase (NOS) promoter (Ebert et al., Proc. Natl. Acad. Sci. (U.S.A.) 84:5745-5749 (1987), the entirety of which is herein incorporated by reference), the octopine synthase (OCS) promoter (which are carried on tumor-inducing plasmids of Agrobacterium tumefaciens), the caulimovirus promoters such as the cauliflower mosaic virus (CaMV) 19S promoter (Lawton et al., Plant Mol. Biol. 9:315-324 (1987), the entirety of which is herein incorporated by reference) and the CAMV 35S promoter (Odell et al., Nature 313:810-812 (1985), the entirety of which is herein incorporated by reference), the figwort mosaic virus 35S-promoter, the light-inducible promoter from the small subunit of ribulose-1,5-bis-phosphate carboxylase (ssRUBISCO), the Adh promoter (Walker et al., Proc. Natl. Acad. Sci. (U.S.A.) 84:6624-6628 (1987), the entirety of which is herein incorporated by reference), the sucrose synthase promoter (Yang et al., Proc. Natl. Acad. Sci. (U.S.A.) 87:4144-4148 (1990), the entirety of which is herein incorporated by reference), the R gene complex promoter (Chandler et al., The Plant Cell 1:1175-1183 (1989), the entirety of which is herein incorporated by reference), and the chlorophyll a/b binding protein gene promoter, etc. These promoters have been used to create DNA constructs which have been expressed in plants; see, e.g., PCT publication WO 84/02913, herein incorporated by reference in its entirety.

[0179] Promoters which are known or are found to cause transcription of DNA in plant cells can be used in the present invention. Such promoters may be obtained from a variety of sources such as plants and plant viruses. It is preferred that the particular promoter selected should be capable of causing sufficient expression to result in the production of an effective amount of a protein to cause the desired phenotype. In addition to promoters which are known to cause transcription of DNA in plant cells, other promoters may be identified for use in the current invention by screening a plant cDNA library for genes which are selectively or preferably expressed in the target tissues or cells.

[0180] For the purpose of expression in source tissues of the plant, such as the leaf, seed, root or stem, it is preferred that the promoters utilized in the present invention have relatively high expression in these specific tissues. For this purpose, one may choose from a number of promoters for genes with tissue- or cell-specific or -enhanced expression. Examples of such promoters reported in the literature include the chloroplast glutamine synthetase GS2 promoter from pea (Edwards et al., Proc. Natl. Acad. Sci. (U.S.A.) 87:3459-3463 (1990), herein incorporated by reference in its entirety), the chloroplast fructose-1,6-biphosphatase (FBPase) promoter from wheat (Lloyd et al., Mol. Gen. Genet. 225:209-216 (1991), herein incorporated by reference in its entirety), the nuclear photosynthetic ST-LS1 promoter from potato (Stockhaus et al., EMBO J. 8:2445-2451 (1989), herein incorporated by reference in its entirety), the phenylalanine ammonia-lyase (PAL) promoter and the chalcone synthase (CHS) promoter from Arabidopsis thaliana. Also reported to be active in photosynthetically active tissues are the ribulose-1,5-bisphosphate carboxylase (RbcS) promoter from eastern larch (Larix laricina), the promoter for the cab gene, cab6, from pine (Yamamoto et al., Plant Cell Physiol. 35:773-778 (1994), herein incorporated by reference in its entirety), the promoter for the Cab-1 gene from wheat (Fejes et al., Plant Mol. Biol. 15:921-932 (1990), herein incorporated by reference in its entirety), the promoter for the CAB-1 gene from spinach (Lubberstedt et al., Plant Physiol. 104:997-1006 (1994), herein incorporated by reference in its entirety), the promoter for the cab1R gene from rice (Luan et al., Plant Cell. 4:971-981 (1992), the entirety of which is herein incorporated by reference), the pyruvate, orthophosphate dikinase (PPDK) promoter from maize (Matsuoka et al., Proc. Natl. Acad. Sci. (U.S.A.) 90: 9586-9590 (1993), herein incorporated by reference in its entirety), the promoter for the tobacco Lhcb1*2 gene (Cerdan et al., Plant Mol. Biol. 33: 245-255. (1997), herein incorporated by reference in its entirety), the Arabidopsis thaliana SUC2 sucrose-H+ symporter promoter (Truernit et al., Planta. 196: 564-570 (1995), herein incorporated by reference in its entirety), and the. promoter for the thylacoid membrane proteins from spinach (psaD, psaF, psaE, PC, FNR, atpC, atpD, cab, rbcS). Other promoters for the chlorophyl a/b-binding proteins may also be utilized in the present invention, such as the promoters for LhcB gene and PsbP gene from white mustard (Sinapis alba; Kretsch et al., Plant Mol. Biol. 28: 219-229 (1995), the entirety of which is herein incorporated by reference).

[0181] For the purpose of expression in sink tissues of the plant, such as the tuber of the potato plant, the fruit of tomato, or the seed of maize, wheat, rice, and barley, it is preferred that the promoters utilized in the present invention have relatively high expression in these specific tissues. A number of promoters for genes with tuber-specific or -enhanced expression are known, including the class I patatin promoter (Bevan et al., EMBO J. 8: 1899-1906 (1986); Jefferson et al., Plant Mol. Biol. 14: 995-1006 (1990), both of which are herein incorporated by reference in its entirety), the promoter for the potato tuber ADPGPP genes, both the large and small subunits, the sucrose synthase promoter (Salanoubat and Belliard, Gene. 60: 47-56 (1987), Salanoubat and Belliard, Gene. 84: 181-185 (1989), both of which are incorporated by reference in their entirety), the promoter for the major tuber proteins including the 22 kd protein complexes and proteinase inhibitors (Hannapel, Plant Physiol. 101: 703-704 (1993), herein incorporated by reference in its entirety), the promoter for the granule bound starch synthase gene (GBSS) (Visser et al., Plant Mol. Biol. 17: 691-699 (1991), herein incorporated by reference in its entirety), and other class I and II patatins promoters (Koster-Topfer et al., Mol Gen Genet. 219: 390-396 (1989); Mignery et al., Gene. 62: 27-44 (1988), both of which are herein incorporated by reference in their entirety).

[0182] Other promoters can also be used to express a fructose 1,6 bisphosphate aldolase gene in specific tissues, such as seeds or fruits. The promoter for β-conglycinin (Chen et al., Dev. Genet. 10: 112-122 (1989), herein incorporated by reference in its entirety) or other seed-specific promoters such as the napin and phaseolin promoters, can be used. The zeins are a group of storage proteins found in maize endosperm. Genomic clones for zein genes have been isolated (Pedersen et al., Cell 29: 1015-1026 (1982), herein incorporated by reference in its entirety), and the promoters from these clones, including the 15 kD, 16 kD, 19 kD, 22 kD, 27 kD, and gamma genes, could also be used. Other promoters known to function, for example, in maize, include the promoters for the following genes: waxy, Brittle, Shrunken 2, Branching enzymes I and II, starch synthases, debranching enzymes, oleosins, glutelins, and sucrose synthases. A particularly preferred promoter for maize endosperm expression is the promoter for the glutelin gene from rice, more particularly the Osgt-1 promoter (Zheng et al., Mol. Cell Biol. 13: 5829-5842 (1993), herein incorporated by reference in its entirety). Examples of promoters suitable for expression in wheat include those promoters for the ADPglucose pyrophosphorylase (ADPGPP) subunits, the granule bound and other starch synthases, the branching and debranching enzymes, the embryogenesis-abundant proteins, the gliadins, and the glutenins. Examples of such promoters in rice include those promoters for the ADPGPP subunits, the granule bound and other starch synthases, the branching enzymes, the debranching enzymes, sucrose synthases, and the glutelins. A particularly preferred promoter is the promoter for rice glutelin, Osgt-1. Examples of such promoters for barley include those for the ADPGPP subunits, the granule bound and other starch synthases, the branching enzymes, the debranching enzymes, sucrose synthases, the hordeins, the embryo globulins, and the aleurone specific proteins.

[0183] Root specific promoters may also be used. An example of such a promoter is the promoter for the acid chitinase gene (Samac et al., Plant Mol. Biol. 25: 587-596 (1994), the entirety of which is herein incorporated by reference). Expression in root tissue could also be accomplished by utilizing the root specific subdomains of the CaMV35S promoter that have been identified (Lam et al., Proc. Natl. Acad. Sci. (U.S.A.) 86:7890-7894 (1989), herein incorporated by reference in its entirety). Other root cell specific promoters include those reported by Conkling et al. (Conkling et al., Plant Physiol. 93:1203-1211 (1990), the entirety of which is herein incorporated by reference).

[0184] Additional promoters that may be utilized are described, for example, in U.S. Pat. Nos. 5,378,619, 5,391,725, 5,428,147, 5,447,858, 5,608,144, 5,608,144, 5,614,399, 5,633,441, 5,633,435, and 4,633,436, all of which are herein incorporated in their entirety. In addition, a tissue specific enhancer may be used (Fromm et al., The Plant Cell 1:977-984 (1989), the entirety of which is herein incorporated by reference).

[0185] Constructs or vectors may also include, with the coding region of interest, a nucleic acid sequence that acts, in whole or in part, to terminate transcription of that region. For example, such sequences have been isolated including the Tr7T3′ sequence and the nos 3′ sequence (Ingelbrecht et al., The Plant Cell 1:671-680 (1989), the entirety of which is herein incorporated by reference; Bevan et al., Nucleic Acids Res. 11:369-385 (1983), the entirety of which is herein incorporated by reference), or the like.

[0186] A vector or construct may also include regulatory elements. Examples of such include the Adh intron 1 (Callis et al., Genes and Develop. 1:1183-1200 (1987), the entirety of which is herein incorporated by reference), the sucrose synthase intron (Vasil et al., Plant Physiol. 91:1575-1579 (1989), the entirety of which is herein incorporated by reference) and the TMV omega element (Gallie et al., The Plant Cell 1:301-311 (1989), the entirety of which is herein incorporated by reference). These and other regulatory elements may be included when appropriate.

[0187] A vector or construct may also include a selectable marker. Selectable markers may also be used to select for plants or plant cells that contain the exogenous genetic material. Examples of such include, but are not limited to, a neo gene (Potrykus et al., Mol. Gen. Genet. 199:183-188 (1985), the entirety of which is herein incorporated by reference) which codes for kanamycin resistance and can be selected for using kanamycin, G418, etc.; a bar gene which codes for bialaphos resistance; a mutant EPSP synthase gene (Hinchee et al., Bio/Technology 6:915-922 (1988), the entirety of which is herein incorporated by reference) which encodes glyphosate resistance; a nitrilase gene which confers resistance to bromoxynil (Stalker et al., J. Biol. Chem. 263:6310-6314 (1988), the entirety of which is herein incorporated by reference); a mutant acetolactate synthase gene (ALS) which confers imidazolinone or sulphonylurea resistance (European Patent Application 154,204 (Sep. 11, 1985), the entirety of which is herein incorporated by reference); and a methotrexate resistant DHFR gene (Thillet et al., J. Biol. Chem. 263:12500-12508 (1988), the entirety of which is herein incorporated by reference).

[0188] A vector or construct may also include a transit peptide. Incorporation of a suitable chloroplast transit peptide may also be employed (European Patent Application Publication Number 0218571, the entirety of which is herein incorporated by reference). Translational enhancers may also be incorporated as part of the vector DNA. DNA constructs could contain one or more 5′ non-translated leader sequences which may serve to enhance expression of the gene products from the resulting mRNA transcripts. Such sequences may be derived from the promoter selected to express the gene or can be specifically modified to increase translation of the mRNA. Such regions may also be obtained from viral RNAs, from suitable eukaryotic genes, or from a synthetic gene sequence. For a review of optimizing expression of transgenes, see Koziel et al., Plant Mol. Biol. 32:393-405 (1996), the entirety of which is herein incorporated by reference.

[0189] A vector or construct may also include a screenable marker. Screenable markers may be used to monitor expression. Exemplary screenable markers include a β-glucuronidase or uidA gene (GUS) which encodes an enzyme for which various chromogenic substrates are known (Jefferson, Plant Mol. Biol, Rep. 5: 387-405 (1987), the entirety of which is herein incorporated by reference; Jefferson et al., EMBO J. 6: 3901-3907 (1987), the entirety of which is herein incorporated by reference); an R-locus gene, which encodes a product that regulates the production of anthocyanin pigments (red color) in plant tissues ((Dellaporta et al., Stadler Symposium 11:263-282 (1988), the entirety of which is herein incorporated by reference); a β-lactamase gene (Sutcliffe et al., Proc. Natl. Acad. Sci. (U.S.A.) 75: 3737-3741 (1978), the entirety of which is herein incorporated by reference), a gene which encodes an enzyme for which various chromogenic substrates are known (e.g., PADAC, a chromogenic cephalosporin); a luciferase gene (Ow et al., Science 234: 856-859 (1986), the entirety of which is herein incorporated by reference) a xy1E gene (Zukowsky et al., Proc. Natl. Acad. Sci. (U.S.A.) 80:1101-1105 (1983), the entirety of which is herein incorporated by reference) which encodes a catechol diozygenase that can convert chromogenic catechols; an α-amylase gene (Ikatu et al., Bio/Technol. 8:241-242 (1990), the entirety of which is herein incorporated by reference); a tyrosinase gene (Katz et al., J. Gen. Microbiol. 129:2703-2714 (1983), the entirety of which is herein incorporated by reference) which encodes an enzyme capable of oxidizing tyrosine to DOPA and dopaquinone which in turn condenses to melanin; an α-galactosidase, which will turn a chromogenic α-galactose substrate.

[0190] Included within the terms “selectable or screenable marker genes” are also genes which encode a scriptable marker whose secretion can be detected as a means of identifying or selecting for transformed cells. Examples include markers which encode a secretable antigen that can be identified by antibody interaction, or even secretable enzymes which can be detected catalytically. Secretable proteins fall into a number of classes, including small, diffusible proteins detectable, e.g., by ELISA, small active enzymes detectable in extracellular solution (e.g., α-amylase, β-lactamase, phosphinothricin transferase), or proteins which are inserted or trapped in the cell wall (such as proteins which include a leader sequence such as that found in the expression unit of extension or tobacco PR-S). Other possible selectable and/or screenable marker genes will be apparent to those of skill in the art.

[0191] Methods and compositions for transforming a bacteria and other microorganisms are known in the art (see for example Sambrook et al., Molecular Cloning: A Laboratory Manual, Second Edition, Cold Spring Harbor Laboratory Press, Cold Spring Harbor, N.Y., (1989), the entirety of which is herein incorporated by reference).

[0192] There are many methods for introducing transforming nucleic acid molecules into plant cells. Suitable methods are believed to include virtually any method by which nucleic acid molecules may be introduced into a cell, such as by Agrobacterium infection or direct delivery of nucleic acid molecules such as, for example, by PEG-mediated transformation, by electroporation or by acceleration of DNA coated particles, etc. (Pottykus, Ann. Rev. Plant Physiol. Plant Mol. Biol. 42:205-225 (1991), the entirety of which is herein incorporated by reference; Vasil, Plant Mol. Biol. 25: 925-937 (1994), the entirety of which is herein incorporated by reference. For example, electroporation has been used to transform maize protoplasts (Fromm et al., Nature 312:791-793 (1986), the entirety of which is herein incorporated by reference).

[0193] Other vector systems suitable for introducing transforming DNA into a host plant cell includes but is not limited to binary artificial chromosome (BIBAC) vectors (Hamilton et al., Gene 200:107-116, (1997), the entirety of which is herein incorporated by reference, and transfection with RNA viral vectors (Della-Cioppa et al., Ann. N.Y Acad. Sci. (1996), 792 (Engineering Plants for Commercial Products and Applications), 57-61, the entirety of which is herein incorporated by reference.

[0194] Technology for introduction of DNA into cells is well known to those of skill in the art. Four general methods for delivering a gene into cells have been described: (1) chemical methods (Graham and van der Eb, Virology, 54:536-539 (1973), the entirety of which is herein incorporated by reference); (2) physical methods such as microinjection (Capecchi, Cell 22:479-488 (1980), electroporation (Wong and Neumann, Biochem. Biophys. Res. Commun., 107:584-587 (1982); Fromm et al., Proc. Natl. Acad. Sci. USA, 82:5824-5828 (1985); U.S. Pat. No. 5,384,253; and the gene gun (Johnston and Tang, Methods Cell Biol. 43:353-365 (1994), all of which the entirety is herein incorporated by reference; (3) viral vectors (Clapp, Clin. Perinatol., 20:155-168 (1993); Lu et al., J. Exp. Med., 178:2089-2096 (1993); Eglitis and Anderson, Biotechniques, 6:608-614 (1988), all of which the entirety is herein incorporated by reference); and (4) receptor-mediated mechanisms (Curiel et al., Hum. Gen. Ther., 3:147-154 (1992); Wagner et al., Proc. Natl. Acad. Sci. USA, 89:6099-6103 (1992), all of which the entirety is herein incorporated by reference).

[0195] Acceleration methods that may be used include, for example, microprojectile bombardment and the like. One example of a method for delivering transforming nucleic acid molecules to plant cells is microprojectile bombardment. This method has been reviewed by Yang and Christou, eds., Particle Bombardment Technology for Gene Transfer, Oxford Press, Oxford, England (1994), the entirety of which is herein incorporated by reference). Non-biological particles (microprojectiles) that may be coated with nucleic acids and delivered into cells by a propelling force. Exemplary particles include those comprised of tungsten, gold, platinum, and the like.

[0196] A particular advantage of microprojectile bombardment, in addition to it being an effective means of reproducibly, and stably transforming monocotyledons, is that neither the isolation of protoplasts (Cristou et al., Plant Physiol. 87:671-674 (1988), the entirety of which is herein incorporated by reference) nor the susceptibility of Agrobacterium infection is required. An illustrative embodiment of a method for delivering DNA into maize cells by acceleration is a biolistics g-particle delivery system, which can be used to propel particles coated with DNA through a screen, such as a stainless steel or Nytex screen, onto a filter surface covered with corn cells cultured in suspension. Gordon-Kamm et al., describes the basic procedure for coating tungsten particles with DNA (Gordon-Kamm et al., Plant Cell 2: 603-618 (1990), the entirety of which is herein incorporated by reference). The screen disperses the tungsten nucleic acid particles so that they are not delivered to the recipient cells in large aggregates. A particle delivery system suitable for use with the present invention is the helium acceleration PDS-1000/He gun which is available from Bio-Rad Laboratories (Bio-Rad, Hercules, Calif.)(Sanford et al., Technique 3:3-16 (1991), the entirety of which is herein incorporated by reference).

[0197] For the bombardment, cells in suspension may be concentrated on filters. Filters containing the cells to be bombarded are positioned at an appropriate distance below the microprojectile stopping plate. If desired, one or more screens are also positioned between the gun and the cells to be bombarded.

[0198] Alternatively, immature embryos or other target cells may be arranged on solid culture medium. The cells to be bombarded are positioned at an appropriate distance below the macroprojectile stopping plate. If desired, one or more screens are also positioned between the acceleration device and the cells to be bombarded. Through the use of techniques set forth herein one may obtain up to 1000 or more foci of cells transiently expressing a marker gene. The number of cells in a focus which express the exogenous gene product 48 hours post-bombardment often range from one to ten and average one to three.

[0199] In bombardment transformation, one may optimize the prebombardment culturing conditions and the bombardment parameters to yield the maximum numbers of stable transformants. Both the physical and biological parameters for bombardment are important in this technology. Physical factors are those that involve manipulating the DNA/microprojectile precipitate or those that affect the flight and velocity of either the macro- or microprojectiles. Biological factors include all steps involved in manipulation of cells before and immediately after bombardment, the osmotic adjustment of target cells to help alleviate the trauma associated with bombardment, and also the nature of the transforming DNA, such as linearized DNA or intact supercoiled plasmids. It is believed that pre-bombardment manipulations are especially important for successful transformation of immature embryos. In another alternative embodiment, plastids can be stably transformed. Methods disclosed for plastid transformation in higher plants include the particle gun delivery of DNA containing a selectable marker and targeting of the DNA to the plastid genome through homologous recombination (Svab et al., Proc. Natl. Acad. Sci. (U.S.A.) 87:8526-8530 (1990); Svab and Maliga, Proc. Natl. Acad Sci. (U.S.A.) 90.913-917 (1993); Staub and Maliga, EMBO J. 12:601-606 (1993); U.S. Pat. Nos. 5, 451,513 and 5,545,818, all of which are herein incorporated by reference in their entirety).

[0200] Accordingly, it is contemplated that one may wish to adjust various aspects of the bombardment parameters in small scale studies to fully optimize the conditions. One may particularly wish to adjust physical parameters such as gap distance, flight distance, tissue distance, and helium pressure. One may also minimize the trauma reduction factors by modifying conditions which influence the physiological state of the recipient cells and which may therefore influence transformation and integration efficiencies. For example, the osmotic state, tissue hydration and the subculture stage or cell cycle of the recipient cells may be adjusted for optimum transformation. The execution of other routine adjustments will be known to those of skill in the art in light of the present disclosure.

[0201] Agrobacterium-mediated transfer is a widely applicable system for introducing genes into plant cells because the DNA can be introduced into whole plant tissues, thereby bypassing the need for regeneration of an intact plant from a protoplast. The use of Agrobacterium-mediated plant integrating vectors to introduce DNA into plant cells is well known in the art. See, for example the methods described (Fraley et al., Biotechnology 3:629-635 (1985); Rogers et al., Meth. In Enzymol, 153:253-277 (1987), both of which are herein incorporated by reference in their entirety. Further, the integration of the Ti-DNA is a relatively precise process resulting in few rearrangements. The region of DNA to be transferred is defined by the border sequences, and intervening DNA is usually inserted into the plant genome as described (Spielmann et al., Mol. Gen. Genet., 205:34 (1986), the entirety of which is herein incorporated by reference).

[0202] Modem Agrobacterium transformation vectors are capable of replication in E. coli as well as Agrobacterium, allowing for convenient manipulations as described (Klee et al., In: Plant DNA Infectious Agents, T. Hohn and J. Schell, eds., Springer-Verlag, New York, pp. 179-203 (1985), the entirety of which is herein incorporated by reference. Moreover, recent technological advances in vectors for Agrobacterium-mediated gene transfer have improved the arrangement of genes and restriction sites in the vectors to facilitate construction of vectors capable of expressing various polypeptide coding genes. The vectors described have convenient multi-linker regions flanked by a promoter and a polyadenylation site for direct expression of inserted polypeptide coding genes and are suitable for present purposes (Rogers et al., Meth. In Enzymol., 153:253-277 (1987), the entirety of which is herein incorporated by reference). In addition, Agrobacterium containing both armed and disarmed Ti genes can be used for the transformations. In those plant strains where Agrobacterium-mediated transformation is efficient, it is the method of choice because of the facile and defined nature of the gene transfer.

[0203] A transgenic plant formed using Agrobacterium transformation methods typically contains a single gene on one chromosome. Such transgenic plants can be referred to as being heterozygous for the added gene. More preferred is a transgenic plant that is homozygous for the added structural gene; i.e., a transgenic plant that contains two added genes, one gene at the same locus on each chromosome of a chromosome pair. A homozygous transgenic plant can be obtained by sexually mating (selfing) an independent segregant transgenic plant that contains a single added gene, germinating some of the seed produced and analyzing the resulting plants produced for the gene of interest.

[0204] It is also to be understood that two different transgenic plants can also be mated to produce offspring that contain two independently segregating added, exogenous genes. Selfing of appropriateprogeny can produce plants that are homozygous for both added, exogenous genes that encode a polypeptide of interest. Back-crossing to a parental plant and out-crossing with a non-transgenic plant are also contemplated, as is vegetative propagation.

[0205] Transformation of plant protoplasts can be achieved using methods based on calcium phosphate precipitation, polyethylene glycol treatment, electroporation, and combinations of these treatments. See for example (Potrykus et al., Mol. Gen. Genet., 205:193-200 (1986); Lorz et al., Mol. Gen. Genet., 199:178, (1985); Fromm et al., Nature, 319:791,(1986); Uchimiya et al., Mol. Gen. Genet.:204:204, (1986); Callis et al., Genes and Development, 1183,(1987); Marcotte et al., Nature, 335:454, (1988), all of which the entirety is herein incorporated by reference).

[0206] Application of these systems to different plant strains depends upon the ability to regenerate that particular plant strain from protoplasts. Illustrative methods for the regeneration of cereals from protoplasts are described (Fujimura et al., Plant Tissue Culture Letters, 2:74,(1985); Toriyama et al., Theor Appl. Genet. 205:34. (1986); Yamada et al., Plant Cell Rep., 4:85, (1986); Abdullah et al., Biotechnology, 4:1087, (1986), all of which the entirety is herein incorporated by reference).

[0207] To transform plant strains that cannot be successfully regenerated from protoplasts, other ways to introduce DNA into intact cells or tissues can be utilized. For example, regeneration of cereals from immature embryos or explants can be effected as described (Vasil, Biotechnology, 6:397,(1988), the entirety of which is herein incorporated by reference). In addition, “particle gun” or high-velocity microprojectile technology can be utilized (Vasil et al., Bio/Technology 10:667, (1992), the entirety of which is herein incorporated by reference).

[0208] Using the latter technology, DNA is carried through the cell wall and into the cytoplasm on the surface of small metal particles as described (Klein et al., Nature, 328:70, (1987); Klein et al., Proc. Natl. Acad. Sci. USA, 85:8502-8505, (1988); McCabe et al., Biotechnology, 6:923, (1988), all of which the entirety is herein incorporated by reference). The metal particles penetrate through several layers of cells and thus allow the transformation of cells within tissue explants.

[0209] Other methods of cell transformation can also be used and include but are not limited to introduction of DNA into plants by direct DNA transfer into pollen (Zhou et al., Methods in Enzymology, 101:433, (1983); Hess et al., Intern Rev. Cytol., 107:367, (1987); Luo etal., Plant Mol Biol. Reporter, 6:165, (1988), all of which the entirety is herein incorporated by reference), by direct injection of DNA into reproductive organs of a plant (Pena et al., Nature, 325:274, (1987), the entirety of which is herein incorporated by reference), or by direct injection of DNA into the cells of immature embryos followed by the rehydration of desiccated embryos (Neuhaus et al., Theor. Appl. Genet., 75:30, (1987), the entirety of which is herein incorporated by reference).

[0210] The regeneration, development, and cultivation of plants from single plant protoplast transformants or from various transformed explants is well known in the art (Weissbach and Weissbach, In: Methods for Plant Molecular Biology, (Eds.), Academic Press, Inc. San Diego, Calif., (1988), the entirety of which is herein incorporated by reference). This regeneration and growth process typically includes the steps of selection of transformed cells, culturing those individualized cells through the usual stages of embryonic development through the rooted plantlet stage. Transgenic embryos and seeds are similarly regenerated. The resulting transgenic rooted shoots are thereafter planted in an appropriate plant growth medium such as soil.

[0211] The development or regeneration of plants containing the foreign, exogenous gene that encodes a protein of interest is well known in the art. Preferably, the regenerated plants are self-pollinated to provide homozygous transgenic plants, as discussed before. Otherwise, pollen obtained from the regenerated plants is crossed to seed-grown plants of agronomically important lines. Conversely, pollen from plants of these important lines is used to pollinate regenerated plants. A transgenic plant of the present invention containing a desired polypeptide is cultivated using methods well known to one skilled in the art.

[0212] There are a variety of methods for the regeneration of plants from plant tissue. The particular method of regeneration will depend on the starting plant tissue and the particular plant species to be regenerated.

[0213] Methods for transforming dicots, primarily by use of Agrobacterium tumefaciens, and obtaining transgenic plants have been published for cotton (U. S. Pat. No. 5,004,863, U.S. Pat. No. 5,159,135, U.S. Pat. No. 5,518,908, all of which the entirety is herein incorporated by reference); soybean (U.S. Pat. No. 5,569,834, U.S. Pat. No. 5,416,011, McCabe et al., Biotechnology 6:923, (1988), Christou et al., Plant Physiol., 87:671-674 (1988), all of which the entirety is herein incorporated by reference); Brassica (U.S. Pat. No. 5,463,174, the entirety of which is herein incorporated by reference); peanut (Cheng et al., Plant Cell Rep. 15: 653-657 (1996), McKently et al., Plant Cell Rep. 14:699-703 (1995), all of which the entirety is herein incorporated by reference); papaya (Yang et al., (1996), the entirety of which is herein incorporated by reference); pea (Grant et al., Plant Cell Rep. 15:254-258, (1995), the entirety of which is herein incorporated by reference).

[0214] Transformation of monocotyledons using electroporation, particle bombardment, and Agrobacterium have also been reported. Transformation and plant regeneration have been achieved in asparagus (Bytebier et al., Proc. Natl. Acad. Sci. USA 84:5345, (1987), the entirety of which is herein incorporated by reference); barley (Wan and Lemaux, Plant Physiol 104:37, (1994), the entirety of which is herein incorporated by reference); maize (Rhodes et al., Science 240: 204, (1988), Gordon-Kamm et al., Plant Cell, 2:603, (1990), Fromm et al., Bio/Technology 8:833, (1990), Koziel et al., Bio/Technology 11:194, (1993), Armstrong et al., Crop Science 35:550-557, (1995), all of which the entirety is herein incorporated by reference); oat (Somers et al., Bio/Technology, 10:1589, (1992), the entirety of which is herein incorporated by reference); orchardgrass (Horn et al., Plant Cell Rep. 7:469, (1988), the entirety of which is herein incorporated by reference); rice (Toriyama et al., Theor Appl. Genet. 205:34, (1986); Park et al., Plant Mol. Biol., 32: 1135-1148, (1996); Abedinia et al., Aust. J. Plant Physiol.24:133-141, (1997); Zhang and Wu, Theor. Appl. Genet. 76:835, (1988); Zhang et al. Plant Cell Rep. 7:379, (1988); Battraw and Hall, Plant Sci. 86:191-202, (1992); Christou et al., Bio/Technology 9:957, (1991), all of which the entirety is herein incorporated by reference); sugarcane (Bower and Birch, Plant J. 2:409, (1992), the entirety of which is herein incorporated by reference); tall fescue (Wang et al., Bio/Technology 10:691, (1992), the entirety of which is herein incorporated by reference), and wheat (Vasil et al., Bio/Technology 10:667, (1992), the entirety of which is herein incorporated by reference; U.S. Pat. No. 5,631,152, the entirety of which is herein incorporated by reference.

[0215] Assays for gene expression based on the transient expression of cloned nucleic acid constructs have been developed by introducing the nucleic acid molecules into plant cells by polyethylene glycol treatment, electroporation, or particle bombardment (Marcotte, et al., Nature, 335: 454-457 (1988), the entirety of which is herein incorporated by reference; Marcotte, et al., Plant Cell, 1: 523-532 (1989), the entirety of which is herein incorporated by reference; McCarty, et al., Cell 66: 895-905 (1991), the entirety of which is herein incorporated by reference; Hattori, et al., Genes Dev. 6: 609-618 (1992), the entirety of which is herein incorporated by reference; Goff, et al., EMBO J. 9: 2517-2522 (1990), the entirety of which is herein incorporated by reference). Transient expression systems may be used to functionally dissect gene constructs (See generally, Mailga et al., Methods in Plant Molecular Biology, Cold Spring Harbor Press (1995)).

[0216] Any of the nucleic acid molecules of the present invention may be introduced into a plant cell in a permanent or transient manner in combination with other genetic elements such as vectors, promoters enhancers etc. Further any of the nucleic acid molecules of the present invention may be introduced into a plant cell in a manner that allows for over expression of the protein or fragment thereof encoded by the nucleic acid molecule.

[0217] Cosuppression is the reduction in expression levels, usually at the level of RNA, of a particular endogenous gene or gene family by the expression of a homologous sense construct that is capable of transcribing mRNA of the same strandedness as the transcript of the endogenous gene (Napoli et al., Plant Cell 2: 279-289 (1990), the entirety of which is herein incorporated by reference; van der Krol et al., Plant Cell 2: 291-299 (1990), the entirety of which is herein incorporated by reference). Cosuppression may result from stable transformation with a single copy nucleic acid molecule that is homologous to a nucleic acid sequence found with the cell (Prolls and Meyer, Plant J. 2:465-475 (1992), the entirety of which is herein incorporated by reference) or with multiple copies of a nucleic acid molecule that is homologous to a nucleic acid sequence found with the cell (Mittlesten et al., Mol. Gen. Genet. 244: 325-330 (1994), the entirety of which is herein incorporated by reference). Genes, even though different, linked to homologous promoters may result in the cosuppression of the linked genes (Vaucheret, C. R. Acad Sci. III 316: 1471-1483 (1993), the entirety of which is herein incorporated by reference).

[0218] This technique has, for example been applied to generate white flowers from red petunia and tomatoes that do not ripen on the vine. Up to 50% of petunia transformants that contained a sense copy of the chalcone synthase (CHS) gene produced white flowers or floral sectors; this was as a result of the post-transcriptional loss of mRNA encoding CHS (Flavell, Proc. Natl. Acad. Sci. (U.S.A.) 91:3490-3496 (1994)), the entirety of which is herein incorporated by reference). Cosuppression may require the coordinate transcription of the transgene and the endogenous gene, and can be reset by a developmental control mechanism (Jorgensen, Trends Biotechnol, 8:340344 (1990), the entirety of which is herein incorporated by reference; Meins and Kunz, In: Gene Inactivation and Homologous Recombination in Plants (Paszkowski, J., ed.), pp. 335-348. Kluwer Academic, Netherlands (1994), the entirety of which is herein incorporated by reference).

[0219] It is understood that one or more of the nucleic acids of the present invention including those comprising SEQ ID NO:1 through SEQ ID NO:15775 or complement thereof or fragments of either or other nucleic acid molecules of the present invention may be introduced into a plant cell and transcribed using an appropriate promoter with such transcription resulting in the co-suppression of an endogenous protein.

[0220] Antisense approaches are a way of preventing or reducing gene function by targeting the genetic material (Mol et al., FEBS Lett. 268: 427-430 (1990), the entirety of which is herein incorporated by reference). The objective of the antisense approach is to use a sequence complementary to the target gene to block its expression and create a mutant cell line or organism in which the level of a single chosen protein is selectively reduced or abolished. Antisense techniques have several advantages over other ‘reverse genetic’ approaches. The site of inactivation and its developmental effect can be manipulated by the choice of promoter for antisense genes or by the timing of external application or microinjection. Antisense can manipulate its specificity by selecting either unique regions of the target gene or regions where it shares homology to other related genes (Hiatt et al., In Genetic Engineering, Setlow (ed.), Vol. 11, New York: Plenum 49-63 (1989), the entirety of which is herein incorporated by reference).

[0221] The principle of regulation by antisense RNA is that RNA that is complementary to the target mRNA is introduced into cells, resulting in specific RNA:RNA duplexes being formed by base pairing between the antisense substrate and the target mRNA (Green et al., Annu. Rev. Biochem. 55: 569-597 (1986), the entirety of which is herein incorporated by reference). Under one embodiment, the process involves the introduction and expression of an antisense gene sequence. Such a sequence is one in which part or all of the normal gene sequences are placed under a promoter in inverted orientation so that the ‘wrong’ or complementary strand is transcribed into a noncoding antisense RNA that hybridizes with the target mRNA and interferes with its expression (Takayama and Inouye, Crit. Rev. Biochem. Mol. Biol. 25: 155-184 (1990), the entirety of which is herein incorporated by reference). An antisense vector is constructed by standard procedures and introduced into cells by transformation, transfection, electroporation, microinjection, or by infection, etc. The type of transformation and choice of vector will determine whether expression is transient or stable. The promoter used for the antisense gene may influence the level, timing, tissue, specificity, or inducibility of the antisense inhibition.

[0222] It is understood that protein synthesis activity in a plant cell may be reduced or depressed by growing a transformed plant cell containing a nucleic acid molecule whose non-transcribed strand encodes a protein or fragment thereof.

[0223] Antibodies have been expressed in plants (Hiatt et al., Nature 342:76-78 (1989), the entirety of which is herein incorporated by reference; Conrad and Fielder, Plant Mol. Biol. 26: 1023-1030 (1994), the entirety of which is herein incorporated by reference). Cytoplamic expression of a scFv (single-chain Fv antibodies) has been reported to delay infection by artichoke mottled crinkle virus. Transgenic plants that express antibodies directed against endogenous proteins may exhibit a physiological effect (Philips et al., EMBO J. 16: 4489-4496 (1997), the entirety of which is herein incorporated by reference; Marion-Poll, Trends in Plant Science 2: 447-448 (1997), the entirety of which is herein incorporated by reference). For example, expressed anti-abscisic antibodies reportedly result in a general perturbation of seed development (Philips et al., EMBO J. 16: 4489-4496(1997)).

[0224] Antibodies that are catalytic may also be expressed in plants (abzymes). The principle behind abzymes is that since antibodies may be raised against many molecules, this recognition ability can be directed toward generating antibodies that bind transition states to force a chemical reaction forward (Persidas, Nature Biotechnology 15:1313-1315 (1997), the entirety of which is herein incorporated by reference; Baca et al., Ann. Rev. Biophys. Biomol. Struct. 26:461-493 (1997), the entirety of which is herein incorporated by reference). The catalytic abilities of abzymes may be enhanced by site directed mutagensis. Examples of abzymes are, for example, set forth in U.S. Pat. No: 5,658,753; U.S. Pat. No. 5,632,990; U.S. Pat. No. 5,631,137; U.S. Pat. No. 5,602,015; U.S. Pat. No. 5,559,538; U.S. Pat. No. 5,576,174; U.S. Pat. No. 5,500,358; U.S. Pat. No. 5,318,897; U.S. Pat. No. 5,298,409; U.S. Pat. No. 5,258,289 and U.S. Pat. No. 5,194,585, all of which are herein incorporated in their entirety.

[0225] It is understood that any of the antibodies of the present invention may be expressed in plants and that such expression can result in a physiological effect. It is also understood that any of the expressed antibodies may be catalytic.

[0226] In addition to the above discussed procedures, practitioners are familiar with the standard resource materials which describe specific conditions and procedures for the construction, manipulation and isolation of macromolecules (e.g., DNA molecules, plasmids, etc.), generation of recombinant organisms and the screening and isolating of clones, (see for example, Sambrook et al., Molecular Cloning: A Laboratory Manual, Cold Spring Harbor Press (1989); Mailga et al., Methods in Plant Molecular Biology, Cold Spring Harbor Press (1995), the entirety of which is herein incorporated by reference; Birren et al., Genome Analysis: Analyzing DNA, 1, Cold Spring Harbor, N.Y., the entirety of which is herein incorporated by reference).

[0227] The nucleotide sequence provided in SEQ ID NO:1, through SEQ ID NO:15775 or fragment thereof, or complement thereof, or a nucleotide sequence at least 90% identical, preferably 95%, identical even more preferably 99% or 100% identical to the sequence provided in SEQ ID NO:1 through SEQ ID NO:15775 or fragment thereof, or complement thereof, can be “provided” in a variety of mediums to facilitate use fragment thereof. Such a medium can also provide a subset thereof in a form that allows a skilled artisan to examine the sequences.

[0228] In one application of this embodiment, a nucleotide sequence of the present invention can be recorded on computer readable media. As used herein, “computer readable media” refers to any medium that can be read and accessed directly by a computer. Such media include, but are not limited to: magnetic storage media, such as floppy discs, hard disc, storage medium, and magnetic tape: optical storage media such as CD-ROM; electrical storage media such as RAM and ROM; and hybrids of these categories such as magnetic/optical storage media. A skilled artisan can readily appreciate how any of the presently known computer readable mediums can be used to create a manufacture comprising computer readable medium having recorded thereon a nucleotide sequence of the present invention.

[0229] As used herein, “recorded” refers to a process for storing information on computer readable medium. A skilled artisan can readily adopt any of the presently known methods for recording information on computer readable medium to generate media comprising the nucleotide sequence information of the present invention. A variety of data storage structures are available to a skilled artisan for creating a computer readable medium having recorded thereon a nucleotide sequence of the present invention. The choice of the data storage structure will generally be based on the means chosen to access the stored information. In addition, a variety of data processor programs and formats can be used to store the nucleotide sequence information of the present invention on computer readable medium. The sequence information can be represented in a word processing text file, formatted in commercially-available software such as WordPerfect and Microsoft Word, or represented in the form of an ASCII file, stored in a database application, such as DB2, Sybase, Oracle, or the like. A skilled artisan can readily adapt any number of data processor structuring formats (e.g. text file or database) in order to obtain computer readable medium having recorded thereon the nucleotide sequence information of the present invention.

[0230] By providing one or more of nucleotide sequences of the present invention, a skilled artisan can routinely access the sequence information for a variety of purposes. Computer software is publicly available which allows a skilled artisan to access sequence information provided in a computer readable medium. The examples which follow demonstrate how software which implements the BLAST (Altschul et al., J. Mol. Biol. 215:403-410 (1990)) and BLAZE (Brutlag et al., Comp. Chem. 17:203-207 (1993), the entirety of which is herein incorporated by reference) search algorithms on a Sybase system can be used to identify open reading frames (ORFs) within the genome that contain homology to ORFs or proteins from other organisms. Such ORFs are protein-encoding fragments within the sequences of the present invention and are useful in producing commercially important proteins such as enzymes used in amino acid biosynthesis, metabolism, transcription, translation, RNA processing, nucleic acid and a protein degradation, protein modification, and DNA replication, restriction, modification, recombination, and repair.

[0231] The present invention further provides systems, particularly computer-based systems, which contain the sequence information described herein. Such systems are designed to identify commercially important fragments of the nucleic acid molecule of the present invention. As used herein, “a computer-based system” refers to the hardware means, software means, and data storage means used to analyze the nucleotide sequence information of the present invention. The minimum hardware means of the computer-based systems of the present invention comprises a central processing unit (CPU), input means, output means, and data storage means. A skilled artisan can readily appreciate that any one of the currently available computer-based system are suitable for use in the present invention.

[0232] As indicated above, the computer-based systems of the present invention comprise a data storage means having stored therein a nucleotide sequence of the present invention and the necessary hardware means and software means for supporting and implementing a search means. As used herein, “data storage means” refers to memory that can store nucleotide sequence information of the present invention, or a memory access means which can access manufactures having recorded thereon the nucleotide sequence information of the present invention. As used herein, “search means” refers to one or more programs which are implemented on the computer-based system to compare a target sequence or target structural motif with the sequence information stored within the data storage means. Search means are used to identify fragments or regions of the sequence of the present invention that match a particular target sequence or target motif. A variety of known algorithms are disclosed publicly and a variety of commercially available software for conducting search means are available and can be used in the computer-based systems of the present invention. Examples of such software include, but are not limited to, MacPattern (EMBL), BLASTIN and BLASTIX (NCBIA). One of the available algorithms or implementing software packages for conducting homology searches can be adapted for use in the present computer-based systems.

[0233] The most preferred sequence length of a target sequence is from about 10 to 100 amino acids or from about 30 to 300 nucleotide residues. However, it is well recognized that during searches for commercially important fragments of the nucleic acid molecules of the present invention, such as sequence fragments involved in gene expression and protein processing, may be of shorter length.

[0234] As used herein, “a target structural motif,” or “target motif,” refers to any rationally selected sequence or combination of sequences in which the sequences or sequence(s) are chosen based on a three-dimensional configuration which is formed upon the folding of the target motif. There are a variety of target motifs known in the art. Protein target motifs include, but are not limited to, enzymatic active sites and signal sequences. Nucleic acid target motifs include, but are not limited to, promoter sequences, cis elements, hairpin structures and inducible expression elements (protein binding sequences).

[0235] Thus, the present invention further provides an input means for receiving a target sequence, a data storage means for storing the target sequences of the present invention sequence identified using a search means as described above, and an output means for outputting the identified homologous sequences. A variety of structural formats for the input and output means can be used to input and output information in the computer-based systems of the present invention. A preferred format for an output means ranks fragments of the sequence of the present invention by varying degrees of homology to the target sequence or target motif. Such presentation provides a skilled artisan with a ranking of sequences which contain various amounts of the target sequence or target motif and identifies the degree of homology contained in the identified fragment.

[0236] A variety of comparing means can be used to compare a target sequence or target motif with the data storage means to identify sequence fragments sequence of the present invention. For example, implementing software which implement the BLAST and BLAZE algorithms (Altschul et al., J. Mol. Biol. 215.403-410 (1990)) can be used to identify open frames within the nucleic acid molecules of the present invention. A skilled artisan can readily recognize that any one of the publicly available homology search programs can be used as the search means for the computer-based systems of the present invention. Having now generally described the invention, the same will be more readily understood through reference to the following examples which are provided by way of illustration, and are not intended to be limiting of the present invention, unless specified.

### EXAMPLE 1

[0237] The SOYMON028 cDNA library is generated from soybean cultivar Asgrow 3244 (Asgrow Seed Company, Des Moines, Iowa U.S.A.) drought-stressed root tissue. Seeds are planted in moist Metromix 350 medium at a depth of approximately 2 cm in trays. The trays are placed in an environmental chamber set to a 12 h day/12 h night cycle, 26° C. daytime temperature, 21° C. night temperature and 70% relative humidity. Daytime light levels are measured at 300 μ Einsteins/m². Soil is checked and watered daily to maintain even moisture conditions. At the R3 stage of development, water is withheld from half of the plant collection (drought stressed population). After 3 days, half of the plants from the drought stressed condition and half of the plants from the control population are harvested. After another 3 days (6 days post drought induction) the remaining plants are harvested. A total of 27 g and 40 g of root tissue is harvested from plants at two time points and immediately frozen in dry ice. The harvested tissue is then stored at −80° C. until RNA preparation. Total RNA is prepared from the combination of equal amounts of drought stressed root tissue from both time points and the cDNA library is constructed as described in Example 2. SEQ ID NO: 1 through SEQ ID NO: 5270 are from SOYMON028.

[0238] The SOYMON034 cDNA library is generated from soybean cultivar Asgrow 3244 (Asgrow Seed Company, Des Moines, Iowa U.S.A.) cold-shocked seedling tissue without cotyledons. Seeds are imbibed and germinated in vermiculite for 2 days under constant illumination (ca. 510 Lux). After 48 hours, the seedlings are transferred to a cold room set at 5° C. under constant illumination (ca. 560 Lux). After 30, 60 and 180 minutes seedlings are harvested and dissected. The seedlings after 2 days of imbibition are beginning to emerge from the vermiculite surface. The apical hooks are dark green in appearance. A portion of the seedling consisting of the root, hypocotyl and apical hook is frozen in liquid nitrogen and stored at −80° C. Total RNA is prepared from equal amounts of pooled tissue and the cDNA library is constructed as described in Example 2. SEQ ID NO: 5271 through SEQ ID NO: 10406 are from SOYMON034

[0239] The Soy52 (LIB3028) normalized cDNA library is generated from Soy35 (SOYMON022). The SOYMON022 cDNA library is generated from soybean cultivar Asgrow 3244 (Asgrow Seed Company, Des Moines, Iowa U.S.A.) partially to fully opened flower tissue, which is harvested from plants grown in an environmental chamber. Seeds are planted in moist Metromix 350 medium at a depth of approximately 2 cm. Trays are placed in an environmental chamber set to a 12 h day/12 h night cycle, 29° C. daytime temperature, 24° C. night temperature and 70% relative humidity. Daytime light levels are measured at 450 μ Einsteins/m². Soil is checked and watered daily to maintain even moisture conditions. Flowers are removed from the plant at the pedicel. Flower buds showing petal color to fully open flowers are selected for collection. A total of 3 g of flower tissue is harvested and immediately frozen in dry ice. The harvested tissue is then stored at −80° C. until RNA preparation. Total RNA is prepared from a mixture of opened and partially opened flowers and the cDNA library is constructed as described in Example 2. Single stranded DNA representing approximately 1×10⁶ colony forming units of Soy35 (SOYMON022) is used as the starting material for normalization. The normalized cDNA library is constructed as described in Example 2. SEQ ID NO: 10461 through SEQ ID NO: 15775 are from LIB3028.

### EXAMPLE 2

[0240] The stored RNA is purified using Trizol reagent from Life Technologies (Gibco BRL, Life Technologies, Gaithersburg, Md. U.S.A.), essentially as recommended by the manufacturer. Poly A+ RNA (mRNA) is purified using magnetic oligo dT beads essentially as recommended by the manufacturer (Dynabeads, Dynal Corporation, Lake Success, N.Y. U.S.A.).

[0241] Construction of plant cDNA libraries is well-known in the art and a number of cloning strategies exist. A number of cDNA library construction kits are commercially available. The Superscript™ Plasmid System for cDNA synthesis and Plasmid Cloning (Gibco BRL, Life Technologies, Gaithersburg, Md. U.S.A.) is used, following the conditions suggested by the manufacturer.

[0242] Normalized libraries are made using essentially the Soares procedure (Soares et al., Proc. Natl. Acad Sci. (U.S.A.) 91:9228-9232 (1994)). This approach is designed to reduce the initial 10,000-fold variation in individual cDNA frequencies to achieve abundances within one order of magnitude while maintaining the overall sequence complexity of the library. In the normalization process, the prevalence of high-abundance cDNA clones decreases dramatically, clones with mid-level abundance are relatively unaffected and clones for rare transcripts are effectively increased in abundance.

[0243] Normalized libraries are prepared from single-stranded and double-stranded DNA. Single-stranded and double-stranded DNA representing approximately 1×10⁶ colony forming units are isolated using standard protocols. RNA, complementary to the single-stranded DNA, is synthesized using the double stranded DNA as a template. Biotinylated dATP is incorporated into the RNA during the synthesis reaction. The single-stranded DNA is mixed with the biotinylated RNA in a 1:10 molar ratio) and allowed to hybridize. DNA-RNA hybrids are captured on Dynabeads M280 streptavidin (Dynabeads, Dynal Corporation, Lake Success, N.Y. U.S.A.). The dynabeads with captured hybrids are collected with a magnet. The non-hybridized single-stranded molecules remaining after hybrid capture are converted to double stranded form and represent the primary normalized library.

### EXAMPLE 3

[0244] The cDNA libraries are plated on LB agar containing the appropriate antibiotics for selection and incubated at 37° for a sufficient time to allow the growth of individual colonies. Single colonies are individually placed in each well of a 96-well microtiter plates containing LB liquid including the selective antibiotics. The plates are incubated overnight at approximately 37° C. with gentle shaking to promote growth of the cultures. The plasmid DNA is isolated from each clone using Qiaprep plasmid isolation kits, using the conditions recommended by the manufacturer (Qiagen Inc., Santa Clara, Calif. U.S.A.).

[0245] The template plasmid DNA clones are used for subsequent sequencing. For sequencing the cDNA libraries of SOYMON028, SOYMON034 and LIB3028, a commercially available sequencing kit, such as the ABI PRISM dRhodamine Terminator Cycle Sequencing Ready Reaction Kit with AmpliTaq® DNA Polymerase, FS, is used under the conditions recommended by the manufacturer (PE Applied Biosystems, Foster City, Calif.). The ESTs of the present invention are generated by sequencing initiated from the 5′ end of each cDNA clone.

[0246] A number of sequencing techniques are known in the art, including fluorescence-based sequencing methodologies. These methods have the detection, automation and instrumentation capability necessary for the analysis of large volumes of sequence data. Currently, the 377 DNA Sequencer (Perkin-Elmer Corp., Applied Biosystems Div., Foster City, Calif.) allows the most rapid electrophoresis and data collection. With these types of automated systems, fluorescent dye-labeled sequence reaction products are detected and data entered directly into the computer, producing a chromatogram that is subsequently viewed, stored, and analyzed using the corresponding software programs. These methods are known to those of skill in the art and have been described and reviewed (Birren et al., Genome Analysis: Analyzing DNA, 1, Cold Spring Harbor, N.Y., the entirety of which is herein incorporated by reference).

1-7. (canceled)

8. A substantially purified nucleic acid molecule comprising a nucleic acid sequence wherein said nucleic acid sequence:
(a) hybridizes under stringent conditions to a nucleic acid sequence selected from the group consisting of SEQ ID NO: 1 through SEQ ID NO: 15775, a complement thereof or a fragment of either, or
(b) exhibits an 90% or greater identity to a nucleic acid sequence selected from the group consisting of SEQ ID NO: 1 through SEQ ID NO: 15775, a complement thereof or a fragment of either.

9. The substantially purified nucleic acid molecule of claim 8, wherein said nucleic acid molecule encodes a soybean protein or fragment thereof.

10. A substantially purified nucleic acid molecule comprising a nucleic acid sequence that shares between 100% and 90% sequence identity with a nucleic acid sequence selected from the group consisting of SEQ ID NO: 1 through SEQ ID NO: 15775, a complement thereof or a fragment of either.

11. The substantially purified nucleic acid molecule of claim 10, wherein said nucleic acid sequence shares between 100% and 95% sequence identity with a nucleic acid sequence selected from the group consisting of SEQ ID NO:1 through SEQ ID NO: 15775, a complement thereof or a fragment of either.

12. The substantially purified nucleic acid molecule of claim 11, wherein said nucleic acid sequence shares between 100% and 98% sequence identity with a nucleic acid sequence selected from the group consisting of SEQ ID NO: 1 through SEQ ID NO: 15775, a complement thereof or a fragment of either.

13. The substantially purified nucleic acid molecule of claim 12, wherein said nucleic acid sequence shares between 100% and 99% sequence identity with a nucleic acid sequence selected from the group consisting of SEQ ID NO: 1 through SEQ ID NO: 15775, a complement thereof or a fragment of either.

14. The substantially purified nucleic acid molecule of claim 13, wherein said nucleic acid sequence shares 100% sequence identity with a nucleic acid sequence selected from the group consisting of SEQ ID NO: 1 through SEQ ID NO: 15775, a complement thereof or a fragment of either.

15. A substantially purified polypeptide, wherein said polypeptide is encoded by a nucleic acid molecule comprising a nucleic acid sequence, wherein said nucleic acid sequence:
(a) hybridizes under stringent conditions to a nucleic acid sequence selected from the group consisting of SEQ ID NO: 1 through SEQ ID NO: 15775, a complement thereof or a fragment of either, or
(b) exhibits an 90% or greater identity to a nucleic acid sequence selected from the group consisting of SEQ ID NO: 1 through SEQ ID NO: 15775, a complement thereof or a fragment of either.

16. A transformed plant having a nucleic acid molecule which comprises:
(a) an exogenous promoter region which functions in a plant cell to cause the production of an mRNA molecule; which is linked to;
(b) a structural nucleic acid molecule, wherein said structural nucleic acid molecule comprises a nucleic acid sequence, wherein said nucleic acid sequence
(i) hybridizes under stringent conditions to a nucleic acid sequence selected from the group consisting of SEQ ID NO:1 through SEQ ID NO:15775, a complement thereof or a fragment of either; or
(ii) exhibits an 90% or greater identity to a nucleic acid sequence selected from the group consisting of SEQ ID NO:1 through SEQ ID NO:15775, a complement thereof or a fragment of either, which is linked to
(c) a 3′ non-translated sequence that functions in said plant cell to cause the termination of transcription and the addition of polyadenylated ribonucleotides to said 3′ end of said mRNA molecule.

17. The transformed plant according to claim 16, wherein said nucleic acid sequence is a complement of a nucleic acid sequence selected from the group consisting of SEQ ID NO: 1 through SEQ ID NO: 15775 or a fragment thereof.

18. The transformed plant according to claim 16, wherein said plant is selected from the group consisting of soybean, maize, cotton and wheat.

19. A transformed seed comprising a transformed plant cell comprising a nucleic acid molecule which comprises:
(a) an exogenous promoter region which functions in said plant cell to cause the production of an mRNA molecule; which is linked to;
(b) a structural nucleic acid molecule, wherein said structural nucleic acid molecule comprises a nucleic acid sequence, wherein said nucleic acid sequence
(i) hybridizes under stringent conditions to a nucleic acid sequence selected from the group consisting of SEQ ID NO:1 through SEQ ID NO:15775, a complement thereof or a fragment of either; or
(ii) exhibits an 90% or greater identity to a nucleic acid sequence selected from the group consisting of SEQ ID NO:1 through SEQ ID NO:15775, a complement thereof or a fragment of either, which is linked to
(c) a 3′ non-translated sequence that functions in said plant cell to cause the termination of transcription and the addition of polyadenylated ribonucleotides to said 3′ end of said mRNA molecule.

20. The transformed seed according to claim 19, wherein said nucleic acid sequence is a complement of a nucleic acid sequence selected from the group consisting of SEQ ID NO: 1 through SEQ ID NO: 15775 or a fragment thereof.

21. The transformed seed according to claim 19, wherein said seed is selected from the group consisting of soybean, maize, cotton and wheat seed.

22. The transformed seed according to claim 19, wherein said exogenous promoter region functions in a seed cell.

23. The transformed seed according to claim 19, wherein said exogenous promoter region functions in a leaf cell.

24. A method of producing a genetically transformed plant, comprising the steps of:
(a) inserting into the genome of a plant cell a recombinant, double-stranded DNA molecule comprising
(i) a promoter which functions in plant cells to cause the production of an RNA sequence,
(ii) a structural nucleic acid molecule, wherein said structural nucleic acid molecule comprises a nucleic acid sequence, wherein said nucleic acid sequence
(A) hybridizes under stringent conditions to a nucleic acid sequence selected from the group consisting of SEQ ID NO:1 through SEQ ID NO:15775, a complement thereof or a fragment of either; or
(B) exhibits an 90% or greater identity to a nucleic acid sequence selected from the group consisting of SEQ ID NO:1 through SEQ ID NO:15775, a complement thereof or a fragment of either, which is linked to
(iii) a 3′ non-translated sequence which functions in plant cells to cause the addition of polyadenylated nucleotides to the 3′ end of RNA sequence,
(b) obtaining a transformed plant cell with said structural nucleic acid molecule that encodes one or more proteins, wherein said structural nucleic acid molecule is transcribed and results in expression of said protein(s); and
(c) regenerating from said transformed plant cell a genetically transformed plant.

25. A method for reducing expression of a protein in a plant cell comprising growing a transformed plant cell containing a nucleic acid molecule wherein the non-transcribed strand of said nucleic acid molecule encodes a protein or fragment thereof, and wherein the transcribed strand of said nucleic acid molecule is complementary to a nucleic acid molecule comprising a nucleic acid sequence selected from the group consisting of SEQ ID NO:1 through SEQ ID NO:15775, a complement thereof or a fragment of either, and whereby said transcribed strand reduces or depresses expression of said protein.

26. A method for increasing expression of a protein in a plant cell comprising growing a transformed plant cell containing a nucleic acid molecule that encodes a protein or fragment thereof, wherein said nucleic acid molecule comprises a nucleic acid sequence selected from the group consisting of SEQ ID NO:1 through SEQ ID NO:15775, a complement thereof or a fragment of either, and whereby said nucleic acid molecule increases expression of said protein.

27. A method of producing a plant containing reduced levels of a protein comprising:
(a) transforming a plant cell with a nucleic acid molecule comprising a nucleic acid sequence selected from the group consisting of SEQ ID NO:1 through SEQ ID NO:15775, a complement thereof or a fragment of either, wherein said nucleic acid molecule is transcribed and results in co-suppression of endogenous protein synthesis activity, and
(b) regenerating said plant comprising said plant cell and producing subsequent progeny from said plant.

28. A method of growing a transgenic plant comprising
(a) planting a transformed seed comprising a nucleic acid sequence selected from the group consisting of SEQ ID NO:1 through SEQ ID NO:15775, a complement thereof or a fragment of either, and
(b) growing a plant from said seed.

The application's sequence listing, which the Patent Office published only in electronic form, follows.

SEQUENCE LISTING (15775 sequences)

SEQ ID NO: 1 - DNA, 412 bp, Glycine max
  Clone ID: LIB3028-003-Q1-B1-B11
gaaccttccggatttcgttttgctttgttcaggtagccagccagtcatggtgctcttcaatgtttcacgcgtagagaccactcccttcgatggccagaagcctggaacctctggtctccgcaagaaggtgaaagtgttcgtgcaacctcattacctccataactttgttcagtcaacattcaatgcattaactgtggaaaaagttagaggtgcaacgctagttgtatctggtgatggtcgttatttttcaaaggaagctattcagattataactaaaatgtcagcagcaaatggagtaagacgtgtttggattggtcaaaatggattgctttcaactcctgcagtatctgctgttatacgtgaaagagttggagctgatggattcagggcaacaggtgcatttatactgaca

SEQ ID NO: 2 - DNA, 400 bp, Glycine max
  Clone ID: LIB3028-005-Q1-B1-A11
ctcttttgtcagacacgtataagtgtatgacattctctactacaactacttggtgtttcccataccgaacactcttcttcaatcaagcgaaggtggtctcgattgcaagtgatccacgatacactctacgcttcacaaaaccttcaaacccaattccacagaattcttctgcttcaccatgccaccaaagcctttagactatgggtcaataaatgaaaacgtgaaaaaaagtcaatatgctgtcagaggtgaattataccttcgagcttctgaaacttcagaaagagggcaaaaggattatctttactaatgttggcaacccgcatgcattgggacagaaaccaatgagcttccctccccaagttgttgctttgtgccaagctccattcctacttgatga

SEQ ID NO: 3 - DNA, 410 bp, Glycine max
  Clone ID: LIB3028-010-Q1-B1-C7
cttccttccgcaaatggcttctcacgacagcatctccgcttctccaacctccgcttctgattccgtcttcaatcacctcgttcgtgctcccgaagatcctatcctcggggtaactgtcgcttagaagaaagatccaagtccagttaagctcaacttgggagttggtgcttaccgaactgaggaaggaaaacctcttgttttgaatgtagtgaggcgagttgaacagcaactcataaatgacgtgtcacgcaacaaggaatatattccgatcgttgggcttgctgattttaataaattgagtgctaagcttatttttggggctgacagccctgctattcaagacaacagggttaccactgttcaatgcttgtctggaactggttctttaacactttgcggtgaatttttgg

SEQ ID NO: 4 - DNA, 339 bp, Glycine max
  Clone ID: LIB3028-012-Q1-B1-F10
cggctcgattgtcatatgcttggatgattaccaccctttggataaaactggcagaaaggagaagggtgtcactgcccttgatcctagagccaatgattttgatctcatgtatgaacaagttaaagctcttaaggatggaattgctgttgaaaaaccaatctacaaccatgtcactggtctcctggatccccctgagctcattaaaccccccaaaatcttagtcattgaaggcttgcacccaatgtatgattctcgggtcagagatctcttggactttagcatctacctagacattatcactgaggtcaaattcgctttggaaattcagagagacatggc

SEQ ID NO: 5 - DNA, 402 bp, Glycine max
  Clone ID: LIB3028-004-Q1-B1-C2
gcacttctgctccgcaattatcatgggcaaggtcaagatcggaatcaacggatttggaagaattggccgtttggtagccagagtggctctgcagagagacgatgttgaactcgttgccgttaacgaccctttcatcaccaccgattacatgacatacatgtttaaatacgacagtgttcatggacactggaagcatcacgatgtcaccgttaaggacgagaagacccttctcttcggtgacaagccagtcactatttttggacacagaaaccctgaagagatcccatgggggtcaactggagctgacatcattgttgagtccaccggagttttcaccgataaggacaaggccgccgcacatttgaagggtggtgcaaagaaggttattatttctgcccccag

SEQ ID NO: 6 - DNA, 344 bp, Glycine max
  Clone ID: LIB3028-009-Q1-B1-C6
aacaacttctgctacttcctactccaaccgcacttccggcccgccattaaccagggccaaggccagattcggatccaacggattgggaaaattttggccgttgggaacccaaattggctctgcaaagacacaatgttgaactcgtcgccgtaaacaaccctttcatcaccaccgattacatgacatacatgtttaaatacgacagtgttcatggacactggaagcatcacgatgtcaccgttaaggacgagaacactcttctcgtcggtgacacgccagtcactatttgtggacacaaaccccctgaaaatatcccaggggggtcaactggacctgacatcatt

SEQ ID NO: 7 - DNA, 402 bp, Glycine max
  Clone ID: LIB3028-008-Q1-B1-F6
ctatactgcttcaccttctgctctagaaaattcagtgctgaaacatggcttcggctactctctctgtagccaaaccagcccttcaggcaaatgggaaaggcttctctgaattctctggcctccgaagctcatcaggcttccttcccttttctagaaaatcttcagaggatttccattctgtcattgccttccagacctatgcagttggaagcagtggaggatacaagaagggtgtgacagaagcaaaactgaaggttgccataaacgggtttggaaggattggaaggaacttcttgaggtgctggcacggtcgcaaagactcccctcttgatgtcattgccatcaacgacaccggcggcgtgaaacaagcctctcaccttctcaaatacgattccatcctcc

SEQ ID NO: 8 - DNA, 393 bp, Glycine max
  Clone ID: LIB3028-003-Q1-B1-D12
gtttcttacaaggctctactctactgcttcaccttctgctctagaaaattcagtggtgatacatggcttcggctactctctctgtagccaaaccagcccttcaggcaaatgggaaaggcttctctgaattctctggcctccgcagctcatcaggcttccttcccttttctagaaaatcttcagaggatttccattctgtcattgccttccagacctatgcagttggaagcagtggaggatacaagaagggtgtgacagaagcaaaactgaaggttgccataaacggatttggaaggattggaaggaacttcttgaggtgctggcacggtcgcaaagactcccctcttgatgtcattgccatcaacgacaccggtggcgtgaaaaaagcctctc

SEQ ID NO: 9 - DNA, 410 bp, Glycine max
  Clone ID: LIB3028-007-Q1-B1-C11
agaagctggctgatctcagtggaaagggggtgaccacaattatcggaggaggagattctgttgcagctgtggagaaagtaggagttgctagtgtcatgagccacatatctactggtggtggtgccagtttggagttattggaaggcaaagagcttccaggagtccttgctctcgatgaagccgtcccagttgccgtgtaagacaattttcagcttggaaaatttttccatcctcagatttcggtgttgtcaatcttgtaaaagagcatatgttgtaggacccttcggagtctgttagtgtaaattttatcatgcttgagttattattggcttcacacataaattgcgtgtaactgtaaaccctggctgagagccataaattcgaataaatcttttagttgctgccaaaaa

SEQ ID NO: 10 - DNA, 404 bp, Glycine max
  Clone ID: LIB3028-006-Q1-B1-C12
ggaatggaccaatgggagtgtttgagtttgacaagtttgctgttggtacagaggctattgcaaagaagctggctgatctcagtggaaagggggtgaccacaattatcggaggaggagattctgttgcagctgtggagaaagtaggagttgctagtgtcatgagccacatatctactggtggtggtgccagtttggagttattggaaggcaaagagcttccaggagtccttgctctcgatgaagccgtcccagttgccgtgtaagacaattttcagcttggaaaatttttccatcctcagatttcggtgttgtcaatcttgtaaaagagcatatgttgtaggacccttcggagtctgttagtgtaaattttatcatgcttgagttattattggcttcacacataa

SEQ ID NO: 11 - DNA, 400 bp, Glycine max
  unsure at all n locations
  Clone ID: LIB3028-001-Q1-B1-A12
aaaaaaaccttgggggacctgagcgcggcggacctgaaggggaagaaggtcttcgtcagggccgacctcaacgtcccgctcgacgacaaccagaacatcaccgacgacaccagaatccgcgccgccattcccaccatcaaacatctcatccaaaacggcgccaaagtcattctctccagccacttggggcggccgaagggtgtcactcccaaatacagcttggcgcctcttgtaccccggctttctgagctcattggtatccagattgtcaaggccgaggacagtattggtccagaagtagaaaagttggtggcttctcttccagatggaggtgttctccttctagaaaatgtgaggttttacaangaggaagaaaagaatgaccccgagcatgcaaaaa

SEQ ID NO: 12 - DNA, 349 bp, Glycine max
  Clone ID: LIB3028-012-Q1-B1-B8
gttctgtgggtatccttgtttgtttgctcacaaccttatttgcaactgacttctttgagatcaaggctgtaaaggagattgagcctgcattgaagaaacaactcatcatttccactgccctgatgactattgggattgcaattgttagttggattgcactcccaacttccttcactatcttcaattttggagttcagaaagatgtcaagaattggcagctattcttgtgtgttgctgttggtctttgggcaggtcttattattggatttgtaactgagtactatactagcaatgcatatagtccggtgcaagatgttgcagactcctgcaggactggtgctgcaactaa

SEQ ID NO: 13 - DNA, 378 bp, Glycine max
  Clone ID: LIB3028-012-Q1-B1-A6
gttctgtgggtatccttgtttgtttgctcacaaccttatttgcaactgacttctttgagatcaaggctgtaaaggagattgagcctgcattgaagaaacaactcatcatttccactgccctgatgactattgggattgcaattgttagttggattgcactcccaacttccttcactatcttcaattttggagttcagaaagatgtcaagaattggcagctattcttgtgtgttgctgttggtctttgggcaggtcttattattggatttgtaactgagtactatactagcaatgcatatagtccggtgcaagatgttgcagactcctgcaggactggtgctgcaactaatgttatatttggccttgccttgggataca

SEQ ID NO: 14 - DNA, 368 bp, Glycine max
  Clone ID: LIB3028-009-Q1-B1-F3
atcctggaacaactattgtcacagacagtgtgacttctgatgggcttaccacgtttattgagaagaaacttggtggcagacaccatcggttcaaaagaggctacaaaaatgtgattgatgaagctattcgtttgaattctattggtgaggagtcacatttggcaattgaaactagtggacatggagctctcaaggaaaatcattggcttgatgatggcgcatacctaatggtcaagatcttaaataaacttgcttctgcaagagcttctggaaagggtggtggaagtaaggttttgactgatctaatagacggacttcaggaaccagattttgctgtagaactgagattaaagataaaccaaaaccat

SEQ ID NO: 15 - DNA, 410 bp, Glycine max
  Clone ID: LIB3028-002-Q1-B1-B2
gcctgaggacaatgtggcaacaaaggaagccttggtattggagttaagcagtcaacaagaatacttgaggctgaaagcacgttatgaagctctacaacgttctcaaaggaaccttatgggagaagatcttggccctctaagcagcaaagagcttgaatcacttgaaaggcagctagattcgtctttgaagcaaatcagatcaataaggacccaattcatgctggatcagctttctgatctacaacgtaaggaacactttctaggtgagtcaaacagagatctcagacaaaggttggaagagtttcaaataaatccactccaactgaatcccagtgctgaagatatggggtatggacgccatccaggtcagccccaaggccatgctctctttcaaccattggagtgtgagc

SEQ ID NO: 16 - DNA, 365 bp, Glycine max
  Clone ID: LIB3028-030-Q1-B1-G8
atagctaataagctaggttcagtagttagtgagtgatcgatatctggagatgggtcgaggcaagattgagataaagttgattgagaaccccaccaacaggcaagtcacttactccaagcgaaggaatggtatcttcaagaaagctcatgaactcagtgttctctgtgatgccaaggtttcacttatcatgttctctaaaaacaacaagatgcatgaatacattagccctggcctcacgacaaaaaggatcattgatcagtatcagaagactttgggggatattgatctgtggcgttctcactatgagaaaatgcttgaaaacttgaagaagctgatagatattaacaacaagctcagaagacaga

SEQ ID NO: 17 - DNA, 412 bp, Glycine max
  Clone ID: LIB3028-003-Q1-B1-G10
cggctcgagcttgatcctgcccttatgcgttctggtcgattggatcgaaaaattgagttcccacacccaactgaagaagcaagagcccgaattctacagatccattctcggaaaatgaatgttcaccccgatgtcaactttgaagaattagctcggtccacagatgatttcaatgcagcacaacttaaagctgtctgtgttgaggctggcatgttggcccttcgccgtgatgcaactgaggtgaaccatgaggactttaatgaaggcatcatccaagtccaagcaaagaagaaagcaagcttgaattattatgcataggcactcaacgcaaggaaaaacgagcattgaagtttgacttgtttgctagattgatcttactcgaatcatatgtaacatacagcttgctaattta

SEQ ID NO: 18 - DNA, 408 bp, Glycine max
  Clone ID: LIB3028-004-Q1-B1-A10
aaattgagtttccacacccaagtgaagaagcaagagctcgaattctacagatccattcgaggaagatgaatgttcacccagatgtcaactttgaagaacttgctcggtccacagatgatttcaatggagctcaactgaaggctgtttgtgttgaggctggcatgttggctctacgccgtgatgcaactgaggtgaaccatgaggactttaatgaaggtattattcatgtccaagcaaagaagaaagcaagcctcaattattatgcataggctggattttggaacaagctatttttcagtttacgaagatctattgagacatatcaagccaatggaaaacctaagtcgatgtttgacatttgttatctatttcttttcttttttttggcaatctaatggtatgataacc

SEQ ID NO: 19 - DNA, 407 bp, Glycine max
  Clone ID: LIB3028-004-Q1-B1-B1
gaagcattgaaggacgtagctgctatggctcgaggaaagatccagatcaagaggatagagaacaccaccaaccgccaggtcacttattctaaacgacggaatggccttttcaagaaggccaacgagctcaccgttctatgcgatgccaaggtttctattattatgttctccagcactgggaaactccacgagtacatcagcccctccacctcaacaaagcagttcttcgatcagtaccagatgactctaggagtcgatctctggaactctcattacgagaatatgcaagagaacttgaagaaactcaaagatgtgaataggaatcttcgtaaggagattaggcagaggatgggagattgtctgaacgatctgagcatggaagatctcaagctccttgaggaagaaat

SEQ ID NO: 20 - DNA, 406 bp, Glycine max
  Clone ID: LIB3028-011-Q1-B1-B6
tgggaaggtccccttgctgtgagaaagcacacacaaacaaaggtgcatggaccaaagaagaagatcatcgcctcatttcttacattagagctcacggtgaaggctgctggcgctctctccccaaagccgccggccttctccgttgcggcaagagctgtcgtctccgctggatcaactatctccgccctgacctcaagcgcggcaatttctccctcgaagaagaccaactcatcatcaaactccacagcctccttggcaacaagtggtctctaattgctggtagattgcccggtagaactgacaatgagatcaagaattactggaatactcacatacgcaggaagcttctgagcagaggtattgaccctgccactcacatgcctctcaacgactcttcccatcaaga

SEQ ID NO: 21 - DNA, 352 bp, Glycine max
  Clone ID: LIB3028-012-Q1-B1-D11
tgggaaggtccccttgctgtgagaaagcacacacaaacaaaggtgcatggaccaaagaagaagatcatcgcctcatttcttacattagagctcacggtgaaggctgctggcgctctctccccaaagccgccggccttctccgttgcggcaagagctgtcgtctccgctggatcaactatctccgccctgacctcaagcgcggcaatttctccctcgaagaagaccaactcatcatcaaactccacagcctccttggcaacaagtggtctctaattgctggtagattgcccggtagaactgacaatgagatcaagaattactggaatactcacatacgcaggaagcttctgag

SEQ ID NO: 22 - DNA, 345 bp, Glycine max
  unsure at all n locations
  Clone ID: LIB3028-028-Q1-B1-F3
caaagagagagagagagaagaccaaaggagggtaaggaaaaacttcagcagaggaattccttgcagaagggtgcaactttactccctctctttctctcttgctctttcttgtcanggtttggtcatataagaagccatggccagttttggaggaaccacacaaaagtgcatggcttgtgccaaaactgtgtatcttgttgataagttaactgcagatagccgtgtctatcataaggcttgcttccgatgccaccattgccgtaatacccttaagcttagcaactactgttcttttgagggggtgctctactgcagacctcactatgatcaactctacaagcgaac

SEQ ID NO: 23 - DNA, 354 bp, Glycine max
  Clone ID: LIB3028-025-Q1-B1-D1
ctcgagccgaatcggctcgagtgttgaacaagggtttctctgtctgcttcttcactttctctcgtttcaatcgaaaccaaaacaaaaacatgggcagaaaattcttcgtcggtggcaactggaaatgcaatgggaccactgaggaggtaaagaagattgttactactttgaatgaggctaaagtccctggagaagatgtcgtagaagttgttgtgagccctccttttgtgttccttcctgttgtaaaaagtttgctgcgccctgatttccatgtttcggcacaaaactgttgggttcgcaaaggtggtgcttataccggtgaggttagtgctgaaatgcttgttaatttgggaa

SEQ ID NO: 24 - DNA, 356 bp, Glycine max
  Clone ID: LIB3028-010-Q1-B1-G9
ctacctctttttcttctctctcaacaacttcaccttcttcctcctcgatcatgtctcacttcaagggcaagtaccatgatgagcttatcgccaatgctgcgtacattggcactcctggaaagggtattcttgctgctgatgagtcaacagggacaattggcaagcgtttggccagcatcagtgtagagaacattgaatccaacaggcgagctcttagggagctgcttttcactgctcctggtgttcttcaatatctcagtggtgtcatcctctttgaggaaaccctctaccagagcacagctgcaggcaagccctttgtgaatgtcttgaaggaagctggtgtgcttcctggcatc

SEQ ID NO: 25 - DNA, 405 bp, Glycine max
  Clone ID: LIB3028-030-Q1-B1-C9
ctcaagtccaacctacccctttttcttctcccaccaacttcaccgtcttcttcctcgatcatgtctcacttcaagggcaagtaccatgatgagcttattgccaatgctgcttacattggcactcctggaaagggtattcttgctgctgatgagtcaacagggacaattggcaagcgtttggccagcatcagtgtagagaatgttgaatccaacaggcgtgctcttagggagctgcttttcaccgctcccggtgctcttaaatatctcagtggtgtcatcctctttgaggaaactctctaccaaagcacagctgcaggcaaccccttgtggaagtcttgaaggaggctggtgtgcttcctggcatccaagttgacaagggcacagtttgagcttgctggcactaat

SEQ ID NO: 26 - DNA, 370 bp, Glycine max
  Clone ID: LIB3028-011-Q1-B1-B9
tacaaaggttgctgtaggagataagattgcagtagtgctaagtgctaacacctgcagtgaacaatggcctctgcatcagcatctctgctcaagtcttcacttgttcttgacaagtctgagtgggtgaagggacaaacccttcgccaaccttctgcatcagttgtgagatgcaaccccaccagcccatcaggcctcaccatcagagctggttcctatgctgatgagctcgttaagaccgcgaaaacagtggcttcaccagggaggggtattttggccatggatgagtccaatgctacctgtgggaagcgtttggcttcaattgggctagagaacactgaagctaaacgccaggcataccgttacctcctcg

SEQ ID NO: 27 - DNA, 418 bp, Glycine max
  Clone ID: LIB3028-011-Q1-B1-F2
agataagattgcagtactgctaagtgctaacacctgcaatgaacaatggcctctgcatcagcatctctgctcaagtcgtcacttgttcttgacaagtctgagtgggtgaagggacaaacccttcgccaaccttctgcatcagttgtgagatgcaaccccaccaccccatcaggcctcagcatcagagctggttcctatgctgatgagctcgttaagaccgcgaaaacagtggcttcaccagggaggggtattttggccatggatgactccaatgctacctgtgggaagcgtttggcttcaattgggctatagaacactgaagctaaccgccatgcatagcgtaccctcctcgtgacagttccaggccttggtcagtacatctctggtgccattctctttgaggaaacactctaacaat

SEQ ID NO: 28 - DNA, 396 bp, Glycine max
  Clone ID: LIB3028-026-Q1-B1-B7
gactctttctcttatctctaagtcaacatggctcaccttgaagattcaagtgcatggaattcgagtatacctcaccctaagctcaatgaaagaattctgtcttctctgtcacggagaactgttgctgctcacccctggcacgatttagagattgggccaggagctccagctgttttcaactgtgtggttgaaattggcaaaggcagtaaggttaagtatgagctggacaagacaagtggacttataaaggttgatcgtattctttactcatcagttgtctacccacacaactatggttttatcccaagaaccatttgtgaagacagtgatcctatggacgtgctggttctaatgcaggaacccgtgcttcctggttccttccctcgtgctcgtgct

SEQ ID NO: 29 - DNA, 403 bp, Glycine max
  Clone ID: LIB3028-026-Q1-B1-F6
gaaatatcatttctcatgccaatttactgctgatctttttgcaatgaaccacacagactttatcatcaccagcaccttccaagagattgctggaagcaaggacactgttggacagtatgagagtcacactgccttcacccttccaggactttaccgtgttgttcacggtattgatccatttgatccaaagttcaacattgtctctcccggtgcagacatgggtatatacttcccatacactgaaactgagcgtaggttaacagaattccactctgacattgaagagcttctttacagctcagtggagaatgaggaacacatatgcgtattgaaggaccgcaacaaaccaataatcttcaccatggcaaggcttgaccgtgtgaagaacaacacggggcttgtc

SEQ ID NO: 30 - DNA, 418 bp, Glycine max
  Clone ID: LIB3028-007-Q1-B1-D7
tctgtctcctcctcaatcttcattgtcctgttctttcccttggtgacaaaccaagactaacacacacagaacatagcttgtgttggtgaggtgagaagataaagaaagaatggcatttgcaggaacaacacagaagtgtatggcctgtgacaaaaccgtttatctggttgataagttgaccgcggataaccgagttttccacaaagcttgcttcagatgccatcactgcaaaggaaccctcaagctgagcaactacaactcttttgagggagttctttattgtaagccacactttgaccaactgttcaaaagaacagggagccttgacaaaagctttgaaggaacaccaaaaattgccaagccagagaaaaatttggaagagaaacctgcagcagccaaagtctcaagtatgtttgga

SEQ ID NO: 31 - DNA, 324 bp, Glycine max
  Clone ID: LIB3028-009-Q1-B1-G12
gaaaaataacacacatttgaaactcaaactgaaatgggtgcatagctttggggcaaaaactacacaaaactcctcattgcccccaagttttttctttcaaagcaattttgcacttttttgctttcattgtcttcaatttgtagtaagaggaaattgttgtttcctacttagcttgattattattatcaatggcttctttagtatcttcacaatttacactaccaagttctaaacctgaccagcttcattctcttgctcagaagcatctttttctccactctttccttcccaagaaggccaattacaatggtagcagctcaaaat

SEQ ID NO: 32 - DNA, 392 bp, Glycine max
  Clone ID: LIB3028-007-Q1-B1-A8
ggccgatacatcaagcccatgcttccaaagggccctgtaaagagattagctgtagatgcaacccttagagctgctgcaccttatcaaaaattgcgaagggcaaaagattctggaaacaatagaaaggtatttgtggagaaaacggacatgagggcaaagagaatggcacgtaaggcaggagcattggtgatatttgttgttgatgcaagtggaagcatggcattgaacaggatgcagaatgcaaaaggtgcagcacttaagcttctggctgaaagttatacaagcagggatcaggtatctataattccattccgtggagatgcagctgaagttctcctgccaccttctagatcaatttcaatggcaaggaaacgtcttgaaaggcttccatg

SEQ ID NO: 33 - DNA, 392 bp, Glycine max
  Clone ID: LIB3028-006-Q1-B1-A8
ctttctctttattctctcacacaaaataatggacaagaagcttggcaacacgtctcatgatcctgaagtgagaaaggggccatggacaatggaagaagacttaatcttgatcacctatattgccaatcacggggaaggggtttggaactctttggccaaggctgctggacttaaacgtaccggaaagagttgccggctccggtggctaaactacctccgtcctgatgttagaagagggaatattacacccgaggaacagcttttgatcatggaacttcatgcagagtggggaaacaggtggtccaaaattgccaagcatctacccggaaggactgatactgagattaagaactactggaggacaatgatccagatgcacctcaagcaagctt

SEQ ID NO: 34 - DNA, 361 bp, Glycine max
  unsure at all n locations
  Clone ID: LIB3028-007-Q1-B1-B1
ggttcgtggaggccgtggaggtggacgaggtgggggacgtggatttggacgtggtcgtgggtttagtcgtgactcctcgaatgatgagaactcattccctaccagcagagctccttataatcagggtccttttgaagaaggagatgctgggaagtcttctgaaagacgcagttatggtggaccacgagttccttaccgtggtggtcgtcgtggaggtttcagcaatggtgaaactggtgaaggtgaagacggacgacctcgaagagcatttgatcgtcgcagtgggactggacgaggaaatgaattcaaacgtgaaagttcaggacgangtaactggggaacccaaactgatgaacttgct

SEQ ID NO: 35 - DNA, 56 bp, Glycine max
  unsure at all n locations
  Clone ID: LIB3028-056-Q1-B1-H4
ttangtnncnctatngcnctanacatngagacatgacntagnatccantnaantcn

SEQ ID NO: 36 - DNA, 304 bp, Glycine max
  unsure at all n locations
  Clone ID: LIB3028-056-Q1-B1-A9
ggattcggcncgnggnnagatnngttcatttgngccacacctctcantcnatgannntttctcncattctcnacncgnaganatgnggagcatctcttgtccttcgccctggggntgggtttgtttaagtangcatttgctgnanaaaggttttgctctgctccttcnggnagcgaaatcanangctccttattggtaagtnggataacnccactctctcacctattcancttnnnagatngcctggnnttcaacacgcncgtgtttntaanagtaagcangcctttggntgtnancnngaaag

SEQ ID NO: 37 - DNA, 394 bp, Glycine max
  unsure at all n locations
  Clone ID: LIB3028-056-Q1-B1-B5
nattcggatagcntttncncganaacgggggacnaccctctgggccnaagtntncctcattgnncganatcntngaagtagnntgagggancggngaaaannaccctatttagggagtgcaatcnagaacctgacatccgatgcgaacactcatccgaaggatcttacaagcctttacntgngcatttantgcagngcactnactcgaanggngtaccttntgcangnagggtcatcgagannntgggaanagcngctgannccattatgtgtnngcgcctttcacaggtggaatcttctnnttcntcnnacttgacccnnnccngnttgatntaaccatgngcatgttgaatcanagctcnaanagggcttggnggancgaacccangtttnt

SEQ ID NO: 38 - DNA, 393 bp, Glycine max
  Clone ID: LIB3028-056-Q1-B1-H7
gctggacattacattccagctcttgcatccagggttcaccaaggaaacaaagcaaaagaaggaattcatataaatctaaagggatttgctattggtaatgggttaaccaatcctgaaattcagtaccaggcgtatacagactacgcattagacaggggactaattaaaaaggctgaatataacagtatcaacaagttgatcccaccatgcaagcaggccatagaagcttgcgggactgaaaggtggagaaacatgcgtatcttcattatatgtttgcaataagatattcaatcggatcatgaccattgctgatgatgttaattactatgacattagaaagaaatgtttgggagtctcgtgttatgacttctctgtgatggaggatttcttaaa

SEQ ID NO: 39 - DNA, 350 bp, Glycine max
  Clone ID: LIB3028-056-Q1-B1-H9
atcaatggcaccgaaacagaccaaggctgagaagaagatcgcttacgatgcgaagctgtgcgacctaatggaggagtacggccaaatcctcgttgtaaactccgacaacgtgggatcgaaccagctccagaacattcgcaagggtctccgcggcgactctgttgtcctcatggggaagaacaccatgatgaagcgctctgtcaggatgcacgctgagaaaaccggaaacaatgcctatctcaaccttatccccctccttgtcggcaatgtgggattgattttcaccaagggtgacctgaaggaggtcagtgaggaggttgctaagtacaaggttggagctcctgctcgtg

SEQ ID NO: 40 - DNA, 392 bp, Glycine max
  unsure at all n locations
  Clone ID: LIB3028-056-Q1-B1-H5
aaaagcatgcatatacggcatccagtacggtgacagttcgttctccgttggctacttcagccgcgagcggctctccgtgaccgccaccgacatcgtcgacaacttcctcttcggttgcggccaaaacaaccagggcctctttggtggctccgccggcctcatcggcctcggccgccaccccatctccttcgtccaacaaaccgccgccgtatatcgtaaaatcttctcctactgcctcnccgccacctccagctccaccggccgcctctccttcggcaccaccaccacttcctacgtcaagtacacccccttctccaccatctcccgcggctcctccttctacggcctcgacatcaccggcatctccgtgggcggcgccaaactcccagtct

SEQ ID NO: 41 - DNA, 379 bp, Glycine max
  Clone ID: LIB3028-056-Q1-B1-F3
caccgattcattaacttcacacacagacacggtgtttccaccacaccatagcatatagtactagtagattaaacgccaaagaaataaattactcactttcacgtaaaccataacgtgcttccaccgcaaccaaccacaatgggtgccgttaggtccataacggtgttgctactagtgttatttatggccatgagctccggcgtgcgctcgtgtccgccgtcggacagggcggcgctgctggcattcaaggcggcgctccacgaaccctacctgggaatcttcaactcgtggatcggcgccgactgctgccacaagtggtacggcgtgagctgcgaccaggagacccgccgcgtcgccgacatcaacctccgcggcgagt

SEQ ID NO: 42 - DNA, 376 bp, Glycine max
  Clone ID: LIB3028-056-Q1-B1-F6
gccctatctcatagggtttccaccctctctctcatgcatttttgctctcacgagttcttctttgccgttgccctcttattctttgctgtatttggagccttcttttgtgtggaacagagcagatttcacctccctgggttttttgaaccgtgcccatgtctaaagttttcagctttaccggaaatgatgatttctaccatgggggccctatttatcctaacccgaaggaaccatgtctcttcttgtctcttggccgtcaagttgatgtttaccttcctcttcagaagaggtctcgcttcagtgttccatttgatatcagcggagaatggtttgagcagaagcagaagccaaagacatctattgaatctttgccaga

SEQ ID NO: 43 - DNA, 393 bp, Glycine max
  Clone ID: LIB3028-056-Q1-B1-F7
acttgccttatttttggttttgagattgagctaaaggccaactcaaccatcgaatttgttggtgattgaaagagaaggaagaagaagcaggaaatggaagcagtgagagctggtcgagaaggagcaataggtctaggtcaaggtgatggcgtagccaaggacagcactgagactgaactcaccaaaatccgtctcctcagggcaattgttgaaacccgtgatccctcttccaaggaagaggatgattttatgattagaagattcctgcgtgctcgtgatttagatgtagagaaggcttcggcaatgctcctcaagtacttgaaatggagaaattcatttgttccaaatggctctgtatctgtgtcagatgttcctaacgaacttgcacaagat

SEQ ID NO: 44 - DNA, 395 bp, Glycine max
  Clone ID: LIB3028-056-Q1-B1-F8
aggtctactctaaaggatactctcggggaattccatgttccacattttcatgatataatgaggctaaaaggttcatctatgatttggattgatgtgttttcttattaagcgtatcctgaacccgaaggagatgagatgggaattcctcggggaattccaattcgacatgttcaagagatggcgatgccaaggtgttcatagatgaagtggacataattgtctgcctcgtcagggtatctggtgaccaccggaattgagattcgaatgcctcggggaattctaattccacattttccctgcgtgcagatgcattagtggtcatgtatgcttcggcaatacttctcatgttattacgctgaacatgatcccttgggcaatgaggatccgatatccgt

SEQ ID NO: 45 - DNA, 399 bp, Glycine max
  Clone ID: LIB3028-056-Q1-B1-F9
ctgcaattacgatggcgcccagggacaagactagtgccgttaagcctagcggtaacgccggggtgaaggacctgcattttcgtggagtcaggaagagaccgtgggggaggttcgccgccgagatcagagatcccgccaagaagacccgcgtctggctcggaaccttcgacaccgcggaggaggcggcccgtgcctacgacgccgccgcgcgggagtttcgcggccctaaggcgaagacaaacttccctctcccttcggaaaattttaagaacgcgagccctatccaaagcagcacggtggagtcctccagccgcgaccgcgacgtcgccgccgattcctctccgctcgacctcaacctcgcccccgtcgccgtctcctccgctcgattccccttccgga

SEQ ID NO: 46 - DNA, 397 bp, Glycine max
  Clone ID: LIB3028-056-Q1-B1-G1
gttgatttaattggaaagccaggaaacttatccgagcctgattccttgctcaatggtccatcttccatctcattttcttcacccttgcgctttccacgacttaaaccagctgaaactaccattgatttcaggtcactggccaaacagtatttctcggactgtgtgtctcttgagcttgtctttgacaacaattctgcagaacagtttgatgggaagtgtaaagacaggaataaccctaggccaattttgactgacagcaatagaagttctcaccttcctctgcatcctcaagattctcatccaagctcacgggaacaaggttccgaaacatatcaatcatgtaaccctcctcagaacattgtagactcgactgtgggaaagtatccaccaccaataa

SEQ ID NO: 47 - DNA, 380 bp, Glycine max
  Clone ID: LIB3028-056-Q1-B1-G10
aaaaaaaatatccatagtataaattaatgacaattatttagaacacatggcttaaggtcaaacagaatgatacaacttacagctgatctggaaagacaacaaagcaatgaatcgagagatccctaaaaacacagaaaaaacgtcttccctagtatataaagtgcctcaacatcaaacacgactctcgcctcgaaggcctcatcaagatggcagatctcactattaatctggctgcgatttgcactcccgcggattacaacactcgccctctcgacaccatttacagcaatttcatcgacgcgctccccgtggtgaaatactgttccgagaacaacaagcgccttatccatttctccacttgcgaagtgtacgggaaaacg

SEQ ID NO: 48 - DNA, 398 bp, Glycine max
  unsure at all n locations
  Clone ID: LIB3028-056-Q1-B1-G12
tcacctgaaccctgctcactacattagtgagattattagagaaggcactaaaaatggcactgctttctttaagtgccatggccatgagcaatttgagatgacaggtttggaccctgagtataatagattgttcaatgagggcatggtgtgcactgctagggttgtgtccaaggctgtgatcactgggtacaaagatgggttcaaccagattaagtccttggttgatgttggaggtggcattggagggtctctttctgagattgttagggcttatcctcacatcaatgccatcaactttgacttgcctcatgtggttgccactgctcctaagtatgatggaatcacncatgttggaggtgacatgttcgtgttcattccagatgctgatgctatttaca

SEQ ID NO: 49 - DNA, 396 bp, Glycine max
  Clone ID: LIB3028-056-Q1-B1-G3
attgcttccctctatcgtcttctccccccttccttcaatggtcctaagggttccggggtccaggcgtaacagctccgcactaatgcgcttttggaacccgtgttcatctgtatccaacgatttactagaaggaggtcgcaatttctccatcttcacatttcgctagcacgtgaaatcaaaagttatcgacactttcgcgcgacacgaaatattgggaaccaagcaaaatatctatggctgacgaaccattatatccaatagcggtgcttatagatgagttgaaaaatgatgacatccagctgcggttaaactcaattcgtaggctatcaacaattgcacgtgctcttggggaggagcgaacccgtcgagaattaattccatttttaagtgaaaata

SEQ ID NO: 50 - DNA, 350 bp, Glycine max
  unsure at all n locations
  Clone ID: LIB3028-056-Q1-B1-G4
ctctcacacaaaataatggacaagaagcttggcaacacgtctcatgatcctgaagtgagaaaggggccatggacaatggaagaagacttaatcttgatcacctatattgccaatcacggggaaggggtttggaactctttggccaaggctgctggacttaaacgtaccggaaagagttgccggctccggtggctaaactacctccgtcctgatgttagaagagggaatattacacccgaggaacagcttttgatcatggaacttcatgcaaagtggggaaacaggtggtccaaaattgccaagcatctacccggaaggactgataatgagattaagaactactggangac

SEQ ID NO: 51 - DNA, 116 bp, Glycine max
  Clone ID: LIB3028-056-Q1-B1-G5
atttcattatttatttcaatattagataatgcagaataattgtctatttttaaattttcttttcccctgtatcctaccattttttaaatagaaaatatcctaccaattttagattc

SEQ ID NO: 52 - DNA, 238 bp, Glycine max
  Clone ID: LIB3028-056-Q1-B1-G7
tcgcaatcaacgcgcatttcagacgcgtctacatccgtcacgagcaccttgatagcacggagtttccccctttcaccatcctcacagtgcgctcgcgttctgacactgacgtttaccggacattcgcccgacattatctcttcgggaagcgtcacgatttctatggctgacgaagcattagatccaagatcggtgcatgtcgatcacttgaagtttggccgtgtccatctgccgttcg

SEQ ID NO: 53 - DNA, 390 bp, Glycine max
  Clone ID: LIB3028-056-Q1-B1-G8
agaacttcaactgagggtgagagtgacacaaatctagggagcactactctaaaagttctattagattcttcaaaacatgaccatgcatcgcgagtcttgggcttttgtcttcggcgttatgggcaacatcatctcctttggagtgttccttgctccattgccaaccttttaccaaatctacaagaagaaatccactgaagggttccagtcacttccttatgttgttgcactgttcagtgcaatgctttggatttactatgctttcgtcaaaagggaagctgccctccttctcattaccattaacacatttggaattgttgtggagtcaatttaccttgcaatcttcctactttatgccccaaggaagcctaggcttacaaccatcaagct

SEQ ID NO: 54 - DNA, 387 bp, Glycine max
  Clone ID: LIB3028-056-Q1-B1-G9
cgttctttctctcgcaatcttcactacattcaccgagcatttgcattcacattgaatatggctgagactacacaatctaatgctgagttgttggagtggcctaagaaagataagcgccgcttcctgcatgttgtgtatcgtgttggtgatcttgatcgcaccattaagttttatactgaatgttttgggatgaagcttttgaggaaaagagatattccagaggagaaatatgccaatgcttttcttggatttggccctgaacaatcccattttgttgtggaattaacatacaattatggggtgacctcatatgatattggaactggatttggacattttgctatcgcaactccagatgtttacaaattggttgaagacatccgggct

SEQ ID NO: 55 - DNA, 397 bp, Glycine max
  Clone ID: LIB3028-056-Q1-B1-H11
aacgccgttgccaaaaaatagatacttgtttcttattcacgtagtattttaatacttagtcaaacacgatagcatgaacccaagatttttgacaattgtttctcaacaagagagattttgattttagcagacaagcaatggcaagtgcgttgggtagcagagttgaatctgttcgaaactctcacttactaagcttttcgctcaactccattagatccttgagttcatcttcgtcatccgccgtttcttctgctcagaaccctaagactaagaaatcgaagcgaagaaagaagaacttgttcgatgtggctcagttcttacctaactggggaatcggctaccacatggccaagactcactggaatgaagtttcttacgaaatcactagaatcaatct

SEQ ID NO: 56 - DNA, 349 bp, Glycine max
  unsure at all n locations
  Clone ID: LIB3028-056-Q1-B1-H12
aaatagcaagagagaaagggttggaattggaaatatcttaccggagaatgggcgacggcagcatcgtgggccacctgccggaggagattctgttgaacgtgttctccgccgtgtccgacacgcgcacgcggaacgcgttgtcgttggtgtcctggagcttctaccacttagagcgcaagacgcgcacctcgctcacgctccgcggcaacgcgcgtgaccttcatctcatcncgacctccttcaagcacgtcacgcacctcgacctctccttcctctcgccttgggggcacgcgctcttttgctcctcctctgccaacggtcggcaacagagcctcctcgcgcaacaact

SEQ ID NO: 57 - DNA, 396 bp, Glycine max
  Clone ID: LIB3028-056-Q1-B1-H3
tttgcaaccattaaccatctccactttcaggcatattacttggctctgccttttccaattgagaaggcccctactaagaaaattgccaagttaagcggtggagtgaaaatatctaaactgttaaactatcctgtcagaggccttgtctttgagggcggtcattctctagagggtttagcaaatgttgtttcagaagcctgcatctgccttcagcacaacaacataccttacaatatacttatttcagactgtggaaggcaaatctttctcttaccacagtgctatgcagagaaacaagcccttggagaagtgagtgccgagcttctggagacacaagtgaatcctgctgtgtgggaaatcagtggtcacttggtgctgaagaagaagaaggactat

SEQ ID NO: 58 - DNA, 393 bp, Glycine max
  unsure at all n locations
  Clone ID: LIB3028-056-Q1-B1-F12
tgaatttgttgttgaagatgtgtccactcagcacgtaactgttaaagtttatgattctgagggtttacagtcatctgaattgattggatgtgctcagctacagcttagtgaacttcaacctggtaaagtaaaggatgtttggttgaagttggtcaaggatttggagattcaaagggatacgaagaacagagggcaggtacatttggagctcttgtactgtccatttggcatggagaatagctttacaaacccatttgctcccaactactcaatgacatctttggaaaaggttcttaaaaatgcgaatggagtanagtctaatggaaatgaaaacgcagttacccaaaagaaaaaggaggttattattagaggagtcctttctgttactgtaat

SEQ ID NO: 59 - DNA, 385 bp, Glycine max
  Clone ID: LIB3028-056-Q1-B1-D8
tagcactcaccctcattaccaacacgaaagcatagccaaaaccttttttcgaagtctctgattttcctaatggctccggcaaaggcagagaagaagccggcggagaagaagccagcggcggagaaggcaccggcggagaagaagccgaaggcggagaagaagatctcgaaggaaggagggagcgagaagaagaagaagcgcacgaagaagagcgtggagacctacaagatctacatcttcaaggtcctcaagcaggttcaccccgacattggtatttccagcaaggccatgggcatcatgaacagcttcatcaacgacatcttcgagaagctcgcccaggaagcgtcgcgtttggctcgctacaacaagaagcccaacatcacct

SEQ ID NO: 60 - DNA, 383 bp, Glycine max
  Clone ID: LIB3028-056-Q1-B1-D9
ccgcatttccttcccgacgataaccttttcggctctaactcttggaatcagacttggcaatgttgggtggaaataaaagttgagaactcaacacaacaattacgagaaccaaaattgagctgggcaggaaaggttcaggactctaaccagtttttactataggggagcacaaggaatcattctagattggatgaccccaaattgaaatagagtctgttagtcaaggatctcaccatgcaaacgacatcgtatagtcatcctctattctgtttctcttgcagaaacatcagtacaaatgggaagagtaagggttctgtgaaattccgtgcaccatatccctctcaactgggtcggaaatgtggattcaatgggagacctcgtgt

SEQ ID NO: 61 - DNA, 397 bp, Glycine max
  unsure at all n locations
  Clone ID: LIB3028-056-Q1-B1-E1
gatttgaagtttaaaccttcaaattaatcaaaccattttaatttgcctatagattctgagtcactgctgctatggcgctacgcgtacttcttgtgttggggatgttgctgatgttgtgccttgttaaggtttcatctgatccaaagatagaagaagaaatactggaagcagaagaagaactgcagtttcccgataacgagccacttatcgtgagagacgcgaacagaaggctaatgcaagatatggattgtggtgggttgtgcaagacgaggtgcagtgcacattcgaggcccaacttgtgcactanggcgtgtggcacgtgctgtgtgaggtgcaagtgtgtcncacctggtacatctggaaatanggaactatgtggaacctgctacactgatat

SEQ ID NO: 62 - DNA, 391 bp, Glycine max
  unsure at all n locations
  Clone ID: LIB3028-056-Q1-B1-E10
ggtggttggtgcaaccctcctttgcaacactttgatatggctgaacctgccttccttcaaattgctgaatatagagctggaattgtgcctgtggccttcaggagggttccttgtgtgaaaaagggaggaataaggttcacaatcaatggccactcttacttcaacctagttttgatcaccaatgtggctggagctggtgatgtgaattcagtgtccattaaagggtccaaaactgggtggcagcccatgtcaagaaactgggggcaaaactggcagagcaactcatacctcaatggacaatcnctctcttttcaagtcaccaccagtgatggcagaactgtgacaagcttcaatgtggcaccagccaattggcaatttggccagaccttcc

SEQ ID NO: 63 - DNA, 400 bp, Glycine max
  Clone ID: LIB3028-056-Q1-B1-E11
gcccaaagctagccatgcacttcaaataaaaccccacctccctcccctcattccaacacaaggctacgtacgtcacctttctctctctccatttgtctctgatcttccaacaccttctccagagaagagacaaaatggatcatcattccacttccaaaacctctctcattcttttcatatccctctcctccctcctcttcctcgcaaccgccacgcgcaacatccacatcggccgtcccgacatccactccgacatcaccgaattctgcaagaaaaccaccaaccccgccgtctgcgcccagaccatccaaccccacttcctcaaaaacaacctcgaccccttaaaggcactcgacgtcgaagttgatgccacactggcctctgccaaaaaaaccctaat

SEQ ID NO: 64 - DNA, 402 bp, Glycine max
  Clone ID: LIB3028-056-Q1-B1-E12
ctaatcaataccgcaagggtccaagcccaacgctacacatacgcctatcaagagcccatgccagttgagcagttagttcagtctctctgcgataccaagcaaggttacacccaattcggtggtcttcggccatttggagtttcgttcctatttgcaggatgggacaaaaactttggctttcagctttacatgagcgaccctagtggaaattatggtggctggaaagctggagccattggggcaaataaccaggcagcacaatcaatactgaaacaggactacaaggatgacatcacaagagaagaagcagtacaacttgcattgaaggtgttaagtaaaaccatggacagcacaagtctaacctcagaaaagcttgaacttgcaaaggttttcctttcaccc

SEQ ID NO: 65 - DNA, 390 bp, Glycine max
  unsure at all n locations
  Clone ID: LIB3028-056-Q1-B1-E2
gcaatcttgcagctacatatgatgctatgggaagagtgggagatgcgattgaaatcttagaatatgtgctcaagttgagggaggaaaagcttggaatagcaaatcctgattttgaagatgagaagcgtcgtctggccgagcttctgaaagaagcaggcaagacacgggacagaaaagcaaaatctctggaaaaccttattgatcctggctcaaagaggacaaagaaggagggggcaaagaggtggcctggtttggggtttagaatttaaccatatttttgttcattaatatatatattgaatgcacattctgtaacatacgatatcttgtatagggttgaatttgggaaggagcttccctgtntcttgaaaattgttcatgcatttgttt

SEQ ID NO: 66 - DNA, 398 bp, Glycine max
  Clone ID: LIB3028-056-Q1-B1-E3
cgagaacaaaaaaaaaaaaaaaaaaaatccgcgattcgctcttctcttggaaaagtgaaaaccagaagtacgaacgaaagagaagagcgatttagaagtgagagaagatggggttgtcgttcacgaagctgttcagcaggttgtttgcgaagaaggaaatgaggattctgatggtaggtctcgatgctgctggtaagacaaccatcttgtacaagctcaagcttggagaaatcgtcaccactatccccaccatcggatttaatgttgagactgtggagtacaagaacatcagcttcactgtgtgggatgttggtggtcaggacaagatccgtccactgtggaggcattatttccagaacactcagggtctcatttttgtggttgatagcaatgataga

SEQ ID NO: 67 - DNA, 393 bp, Glycine max
  unsure at all n locations
  Clone ID: LIB3028-056-Q1-B1-E4
ctctanggaatcaagaaaattattataccctttaagatgaaaccgtacctacgtgcaatattcctattattccttatccttctcgaccaatccatttcggcgagtgcttttttaaatttaaatggattgctaaacattgaaaagtggccctctggcgagaaaagtttggaaatgggaaagatagggaaggagacgacagatcatatcaaagaccttttaaagaaactgattgagtcccctcccgaaccaccgaagcaaatcaatattgaagttgaaggcctgtctgtcgtcaaggattacttatctgactacggctacattgaatcctctgggccatnttacaatattttcgaccaggaaacaatgtcagccattaagacctaccagaaattt

SEQ ID NO: 68 - DNA, 375 bp, Glycine max
  Clone ID: LIB3028-056-Q1-B1-E5
cggttgagtcatacttggaacaaattttatcacatggtttcttccatgctgaccctcatcctggaaatattgcagttgatgatgtcaatggtggaagattgatcttctatgattttggaatgatggggagtatcagtccaaacattcgagaaggtttgctcgaaacattttatggggtttatgagaaagatccagacaaggttctacaagcaatgattcaaatgggagttcttgtccccactggagatatgactgctgttagaagaacagcacaattcttcctcaacagttttgaagagcgcctggctgcacaaaggagagagagagaggaagcaacaactgaacttggattcaaaaaaccattaagcaatgacg

SEQ ID NO: 69 - DNA, 384 bp, Glycine max
  Clone ID: LIB3028-056-Q1-B1-E6
gaaagataaagcattccatagcctcccataaaaatgaagaatactatcttctctgctctctttctactttgtgccttcaccacctcatacctaccttcaaccaccgcggtggtcgataccgacggtgatattcttcagaatcctggcacatactttatcttgtccgtttttcgacccggcggcggagtagaattcgccgccactggaaacgaaacttgccctctcactgtcgtgcagactctcttcgggaggggctttccagcaatattatcgtcccggttacgaatccctttcatcggcgaaggacaactcttcagcatcctgttccgtattgtgccatggtgcgccaccactccttctaagtggaccattgtggagggttta

SEQ ID NO: 70 - DNA, 392 bp, Glycine max
  Clone ID: LIB3028-056-Q1-B1-E7
cgactcgatattggggcagtgctgcgagatgccgatagggttcgtgcagatccccgtgggagtagcggggccattattgttggatggaaaagaattcaccgtgcccatggccaccactgaagggtgtctggttgcgagcaccaacagaggttgcaaagctatatacgtctccggtggggcctcctcggtgttgcttagggatggtatgaccagagcacccgttgttcggtttccctccgcccagcgcgccgcgcagttgaaattcttcttggaggatcctctcaacttcgattctcttgctgtcgttttcaataagtcaagcagatttgccaggttgcagaatattcagtgtgctattgcgggcaagaatttgtacatgagattccgatgca

SEQ ID NO: 71 - DNA, 394 bp, Glycine max
  unsure at all n locations
  Clone ID: LIB3028-056-Q1-B1-E9
gaggtgcctcatcgacccttcagatcctccatgtctcgtctgcactcaatctctctccctcccacctcacctaaaccctaactacaggtgcaatacctctctgttaatcgattattactctcaaagcgacgccactcacaaatatatattgatcgacgctggcaagaccttcagggagactgtacttaggtggtttgttttccatcacattccaagaatagattctattcttttgactcatgaacatgctgatgcagtccttggattggatgatatacgagctgtgcagccgtttagtcncactaatgatattgatcccacccccatttacttaactcggcattcaatggatagcatggaaaaggtgtttccttatttggttcaganaaaacac

SEQ ID NO: 72 - DNA, 397 bp, Glycine max
  Clone ID: LIB3028-056-Q1-B1-F1
ggtgaggtcagcggggttttccttgacactttgcttgaattcgctgaggatgagaccatggagatcaaaatcaccaaggaccacatcaagggtcttgttgtcgactttttctcggcaggaacagactccacagcggtggcaacagagtgggcattggcagaactcatcaacaatcctaaggtgttggaaaaggctcgtgaggaggtctacagtgttgtgggaaaggacagacttgtggacgaagttgacactcaaaaccttccttacattagagcaatcgtgaaggagacattccgcatgcacccgccactcccagtggtcaaaagaaagtgcacagaagagtgtgagattaatggatatgtgatcccagagggagcattgattctcttcaatgtat

SEQ ID NO: 73 - DNA, 399 bp, Glycine max
  unsure at all n locations
  Clone ID: LIB3028-056-Q1-B1-F10
tataccttcctctattggccgtctctcacatttgcaaattatgaacttgtctaccaatttcttctctggtgaaattcccgacattggagtattaagcacctttgacaagaactcgtttgttggcaatgtagatctttgtgggcgacaagtccaaaagccatgtcgaacatcacttggtttccctgtggtgctaccacatgctgaaagtgatgaagctgcagtccctaccaaaaggccttcacattacatgaagggggtcctaattggagcaatggcaattttgggtctcgcacttgtcataatcctttcattcctctggactcgtttgttatcaaagaaggaacgagcagcanagagatacactgaagtcaagaaacaagctgatccaaaagcaagcac

SEQ ID NO: 74 - DNA, 390 bp, Glycine max
  unsure at all n locations
  Clone ID: LIB3028-056-Q1-B1-F11
aaaggagaagatgaaatgggatatgcagatggaggaaatcgaagcgattatggagaaaatttgggacctccacgataagctcagcgacgccattcactccgtctccagatcccactttctcacttccgtcaaaaccctcaaactcaacaactctccaccgcaccttcccaacgccgccgtcgccgctgccgatgaccgctcctccggtttcgttttcgtcaaggactttagaccgctcgccgtcgccgataacgacaacgatgacgatgactccgccgtccgcgaagccaagagcctcaacgccatccggaccgccctcgagaacctcgaagaccagctcgagttcttccatactattcanacccagcagcgtgttgagagagatgccgc

SEQ ID NO: 75 - DNA, 385 bp, Glycine max
  Clone ID: LIB3028-056-Q1-B1-D7
tttctactcaaaacaaaacaaaacatcaatttctgtttcagttcgcggagatcaatatttgtcgctgaggtcgatcgtcgataaaaggcaatgtttttgtgggattggttttatgggattctaccgtcgcttggcctgtggcataaggaggccaagatcttattcttgggcctcgataacgctggcaaaaccagcttgcttcacatgcacaaagatgagagattagtccagcatcagcctactcaatatcctacatcagaggagttgagtattgggaagatcaagtttaaagcttttgatctcgggggtcatcagattgctcgaagagtttggaaagattactatgcccaggtggatgcaatggtgtacttggttgatgcttatg

SEQ ID NO: 76 - DNA, 376 bp, Glycine max
  Clone ID: LIB3028-056-Q1-B1-B9
cgcagccacgcgatcagctgctgaagatacttatcatattatccaaaagggtaagcaagcatttcacaaattctccaccccatttatttttcatgctattttccttttttctcggagcctaaagaggtaaaatttgattcttataacgttttttatttttactttccttgtttaaattcgggttatacaccaacgtgcaagtataaaataggttttattgtagtaccgtattttactttgcttctgtggtggcatcggttcaatgttcctggttgttttgatttgaattattgttattatctgcgaaggcctttgttgtcagactaattcaacatgtctgttccagggaatatctcaagtcatgatttcgagaaaa

SEQ ID NO: 77 - DNA, 396 bp, Glycine max
  Clone ID: LIB3028-056-Q1-B1-C1
ggatgatctatatcagatgctaccgatgagcttaaggttatctctcaaggccaaactgaagtcctatgtcaagagtttggccatatatgatgctcctcttgcccatgactggaaggagaatcttgatgggatactcaagtggctcgccccacttgggcataacatgatcagatggcaaagtgagcgtaattttgagcaacaccaaattgttagccggacaaatgttctgctacttcagactttatactttgctgacagggaaaagaccgaggaatcaatctgtgaacttcttgttgggttgaattacatatgccggtatgagcatcaacaaaatgctctactggattgtgcaagcagtttcgattttgaagattgtgtggagtggcaattgcaatg

SEQ ID NO: 78 - DNA, 399 bp, Glycine max
  Clone ID: LIB3028-056-Q1-B1-C10
gaacaactatactctctctatcgcactcactccctccgtcgcccgaacgcatctccgatcaaccaaccgccgcatttccagtgattagccactttgatcctcctgcagcgccgtcgtttcctcagatccgtggctgtaatgcgaaagttgttggaggcgaagcagcagcatccgcggattaggaagatccttcttcccaattcgttatcctagttagggttagggtttcaataatcattcccaagaaatgttcaagcgaatcatgaagggagggcagaagaagccctccaagacggacccgagcgatccgtcgcccttggctccggcggcggcgggtgcggcagccgctccggcgctggtggttcctccgccgtcgggcaccatagagcctctgcctct

SEQ ID NO: 79 - DNA, 379 bp, Glycine max
  Clone ID: LIB3028-056-Q1-B1-C11
actactttgactcctttaccataccattacaataattatcaaacctaaccagtaaaaatggtgaccgtggaggaaatccgcaacgctcagcgttcccatggacccgccaccatcttggccttcggcaccgccacgccgtccaactgcgtctcccaagccgattaccctgactactacttccgcattaccaacagcgaacacatgactgatctcaaagagaagttcaagcgcatgtgtgaaaagtccatgataaagaagcgatacatgcacctgacggaggagtttctgaaagagaacccgaacatgtgcgagtacatggcgccatcgctggacgtgagacaagacgtagtggtgatggacgtgccgaagctgggaaaac

SEQ ID NO: 80 - DNA, 172 bp, Glycine max
  Clone ID: LIB3028-056-Q1-B1-C12
gtttacttttgtctgttctacgaatgaacttggatggtttttcttatactgtaattgctggtagtctgcggcataggaatttgtttgtgactgagaggattgccttgtatgctggtaagttgttggcttttgcatgattcagtttgttaatgttagtctttaaatgtcttgt

SEQ ID NO: 81 - DNA, 398 bp, Glycine max
  Clone ID: LIB3028-056-Q1-B1-C3
cttcaatctcgatcagacatgttcatgggttttgatgaaaatgatggggacgatgatataagagaggagtttctctgcccattttgttctgagtattttgatatcgttggattatgctgccacattgatgaagagcatccaatggaggcaaaaaatggggtatgtccagtttgtgcattgagggtgggggttgatatggtagcacatataaccctacaacatgggagtatatttaagatgcagcgcaaaaggaaatcacggaaaggtggatcgtattcaacactatctttattgaggaaggaactacgagaaggaaatttgcaatccctttttggcggatcttcatgtatagtgtcctcatctaatgcagatccactgttgtcatcatttatattgcc

SEQ ID NO: 82 - DNA, 391 bp, Glycine max
  unsure at all n locations
  Clone ID: LIB3028-056-Q1-B1-C4
caaaggagatgattcaaacacattgccctgctccagcacaagatattaagatattgagatgtggccccccacctatgaacaaggccatggctgctcaccttgaagcccttggatatgctcctgagatgcagttccagttctgattctcttcattgggggtgcttaacattgcatggatttcatggcctaggccattgaaaaacatatagcaactttttgtttcttttttcctggctatgaatctgagaaacattggactgacagtgcattcagtttcacaaggttcttcanagttgaggcctgaataattgcttcttgtatgaaatgagattgataacaccatgtgctagagttgcaaactatgacttgttagtattgactaaaattgtca

SEQ ID NO: 83 - DNA, 395 bp, Glycine max
  Clone ID: LIB3028-056-Q1-B1-C5
gcaaaccaattcaacacagtgaccgcagatggaaccaagcagaagaacatggccacaggaattgtgctccagaactgcgagatcttgccggagcaggctctgttcccttcaaggttccaaacgaaatcgtacttggggaggccgtggaaggagttcgcgagaacagtggttatggaatcgaacattggcgacttcattcagccagaggggtggaccccttgggatgggaacctgtatcttgatacgttgtactatgctgagtatgctaacgttggacctggttctaacgttcaaggaagggtaaagtggaggggttaccatcccaatattaataagaacgaagctgcacaattcactgctgcccaattcctcagaggtggacctgctggagatgc

SEQ ID NO: 84 - DNA, 151 bp, Glycine max
  Clone ID: LIB3028-056-Q1-B1-C6
ctcgtatctaaactccgaattcagctcgacggttgttacgctgctgcacattctcacgaaatttgtcgaccctgaaaaaatttgccagaccttccaccctgaaattgttatgtcaaagttgccttacttgttgatcaacactcactaaaac

SEQ ID NO: 85 - DNA, 394 bp, Glycine max
  Clone ID: LIB3028-056-Q1-B1-C7
gttttattgaaagagttgaagacacaaatgaagtaatataagagtactgtgttgaagagaagaaagaagtaataaagagtgctctgttgaagaaaagaaagaagtaataagagttctgttcaaggtgatgttagtgtccttgaaggtttggaaggttgagtttgaattcattgtgaagaagttgaagtcttgaagagttcaatctcaattaatactttggcttctacgaggttagcaaatccatgtggtgtttataattgatttctatggagtgttgagaaagtgacttgtgatagtttgggagtcaggatcatatttgtggatatctgcaatcaagccaccttccgtatgcaggtgtgtttacttattaaaccatgcatatggtgtaacttaa

SEQ ID NO: 86 - DNA, 181 bp, Glycine max
  Clone ID: LIB3028-056-Q1-B1-C9
ggacaagtgaagaatgagcaaaccttgtgaatggtttttctaattacctctggcttaagtagctctagtatacaaacaaaatatagccttttttaggtcctaatttatataacacagtgcccagtgtacaattacacagttgctccactgcctttatattgaattatgcatcatcagtaat

SEQ ID NO: 87 - DNA, 370 bp, Glycine max
  Clone ID: LIB3028-056-Q1-B1-D11
cggatataaacaataaaataaaataaaacagaagagaaggaaacagaagtaaaaaaaaaataaaatgggttacacaagatcttctcttctgtccgtggctcttgtcttggcattctgttcaagcattcagggtttggacatcaccaaattgttgggcgaatatcccgaatatgcacagttcaacaaatacctaactgaaaccaagctggcggaccaaatcaacagccgtaacgccgttacagtccttgcccttgacgacgccgcaatggcttccctctccggcaagtcgcaagacgccgttaaggccatccttagcacccatgtgctcgtcaacttctacgacgagaagaagctgatggaagccgaaagt

SEQ ID NO: 88 - DNA, 400 bp, Glycine max
  Clone ID: LIB3028-056-Q1-B1-D12
gatcaagatgattatgaggttgtgcgcaaagtgggaaggggaaagtacagtgaggtttttgaaggcataaatgttaatagcaatgagcgttgtataatcaagattcttaagcctgtcaagaaaaagaagattaaaagagagataaaaatacttcagaacctttgtggtggcccaaatattgtcaagcttcttgatattgtcagagatcagcactctaaaactcctagcttaatatttgagtatgtcaacagtacagattttaaagttttgtatccaaccttgactgattatgacatacgctattacatatatgagcttcttaaggtaacgtgatccttcaatctctcatggtataccttgactggtgctctgtgtcctctccataatgtatatattggag

SEQ ID NO: 89 - DNA, 395 bp, Glycine max
  Clone ID: LIB3028-056-Q1-B1-D2
gctggtgcatgtttatttgaagagcttgggttattctacattggcccagtagatggccatgacatagaagaccttgtgcacatcctgaaaagtgtcaagggtatgccgacacttggacctgttctcattcatgtaatcactgagaaaggaaaaggttatcatccagctgaagttgctcctgacaagatgcacggtgttgtgaaatttgatcctaagtcagggaagcaattgaaatccaaagctagtacgcggtcttacacgcagtattttgcagaatctttgacagcagaagcagaagttgatgagaaaattgttgccatccatgctgcaatgggaaggggcacggggcttaacttgtttcaaaagcgcttccccgaacgatgttttgatgttgg

SEQ ID NO: 90 - DNA, 397 bp, Glycine max
  Clone ID: LIB3028-056-Q1-B1-D3
gaaaagatctcaccccggtttggtaaagttacatgtggagatattgtagtcttgcgcaatcctcaacaccctaggcactttatgaccaaacgtctggttggattggagggtgatagcgttacatacatttccaatcctgagaccaatgaatatgagggtgatagttttacacacatttcctctcctgataacggtgataagtctaagacgattgtggtgccaaagggtgccgtttgggttgagggagataacaagtataacagcaatgattcaagaaaatttggtcctgttccttatgaccttattgatggcaagatgttctggaggataacgccacttaaaaaatttggacctttctggaataaatgatctgaagcaaagcattctgtcatggaag

SEQ ID NO: 91 - DNA, 197 bp, Glycine max
  Clone ID: LIB3028-056-Q1-B1-D4
caatcttccagccgaggatgccaaatatgtgaggtgcattacttgcgattggtggttttgatggacttcaagggtgctgttgagtcataaatttgtaaatataacaagttaaattatcgtttgatgtttccctccacctggtttggccttattttactttgccattttgtggtttatgcaaattatattttgacttc

SEQ ID NO: 92 - DNA, 389 bp, Glycine max
  Clone ID: LIB3028-056-Q1-B1-D6
atcagaactaagaatttctcagagcctgaaaatctttctgcatatgatggtttggagttccgcctaaaaggtgatgggcgtagatataaaatcattgttcgcacaagcagtgattgggacactcttggttacactgcaggctttgacactgagaaaggaaaatggcaatcaattcaagtgccattttcttccctgagtcctgtatttcgagcaagaacagtgtccaatgctccaccatttgatccaagcattgttgtatcattacagctcatgttcagcaagtttgagtctgatggtaaattaaatgaaacttttgtggaaggtccatttgagcttccggtgtctagcatacgggcatatataaaggatccaataacacccaggtttgt

SEQ ID NO: 93 - DNA, 351 bp, Glycine max
  unsure at all n locations
  Clone ID: LIB3028-056-Q1-B1-B8
gcggcttttggggaactccggacagtagcaggtggtaagaagggacacaagactagcaattaaatcccaaacactagaatctggtgtgagatatttgtccatttagctttgattttcatcatggaattatgttcaaacaaatctattgatttttttttcatttacatgatatccagagtttagtattatatccaatactcagatgtccaatgattaattataccttcagctacaagaaagtacaaagccttttgtaccatatatatgtaattctaacttgcctgtttgcaaggattgggttcacagatacattcanagaaggggtttatattggaacatgaatttagacat

SEQ ID NO: 94 - DNA, 387 bp, Glycine max
  Clone ID: LIB3028-056-Q1-B1-A12
ctctctcctcctcgatcccaattccactagggattcaattccgatgcgattccgagcttgttagatccacgacaacgtttcgtttcccagattctcttgtaaaaaaaaataatcttcctttgcccaacaggtaagttggaaaaaaatggaccatgacaagactgggtgccaagctcctcctgaaggtcctatattgtgcatcaacaactgtggattttttggaagtgcagctaccatgaatatgtgttctaaatgccacaaagacatgttgctgaaacaggagcaggccaagcttgcagcatcatccattgggaatattatgaatgggtcttcaagcagcactgaaaaggaacctgttgttgccgctgctgctgctaatgttgatat

SEQ ID NO: 95 - DNA, 376 bp, Glycine max
  Clone ID: LIB3028-056-Q1-B1-A2
gttcggtggagggagggagccgtagcagcggaagctctagcttgggtagcgaatcacaatggcgagaggattaaagaagcatctgaagaggcttaatgccccaaagcattggatgcttgacaaactgggtggtgcatttgctcctaagccctcatctggaccacacaaatcgagggaatgcctgccactcatactcattttgcgaaaccggctgaagtatgctctaacataccgtgaagtcattgctattctgatgcagcgacatgtccttgttgatggcaaagtcaggactgacaaaacataccctgctggttttatggatgttgtatcaatccctaaaacaaatgagaacttccgcctgctgtatgacaccaaa

SEQ ID NO: 96 - DNA, 400 bp, Glycine max
  unsure at all n locations
  Clone ID: LIB3028-056-Q1-B1-A3
tggcaacaaccttcaagtactttacttccatcctcttcctcaccctcgtcatcaaagggtcatgtgatgactgttccttgaacaacatcaatattggcacatcaagaactgggagagaaatccagggccagcctgagtggaacgtgaccgtgatcaacaattgcaactgtgaacagagtcagataaagttgtcttgcaaaggttttcaaagtgcagaaagtgttgacccttcaattctttccatggaaggtgatagctgcttactcatcaatgggaatccaatgaagggttctgatactgttaacttctcctatgcctgggatcctccctttctgcttttgcctacaagctctgttttaggtccttgttcatanggatttgcttaacagaatatgaaaaa

SEQ ID NO: 97 - DNA, 314 bp, Glycine max
  Clone ID: LIB3028-056-Q1-B1-A4
tttctctcgcaagattctctttcttcctctcagaaagctggtctgcaatccatagagttttgccttttccccttttcagcattgatcatttgattacacagtgcatgcaattgagtatcagtgttttcaatttgatagaagatattgattcattgattctttaggtcgatcattcgccatgaatgaaagcaagacaaagaatctaaatttgatagaattgagtcaaaatttcgccatgagtttctctgaccatactccatccttcatgaggtcaccggcgtcattttccacagacaccgatgccattgacgtga

SEQ ID NO: 98 - DNA, 358 bp, Glycine max
  Clone ID: LIB3028-056-Q1-B1-A6
aagcaattaattaagcactctaaaacatatctttatttccttgtctacatatcttgaaaaactcaatcatggctagtgtttcttcggttttagctccatttagaaggcttgatgggaaggtggcgattatcactggtggtgcgagtggtctaggtgcagccactgcaagactcttctctaagcatggagcatatgtagtcatagctgatattcaagacgacttgggtctctctgttgccaaagagttagaatctgcttcctatgtccattgcgatgtgacaaaggaagaggacgttgaaaactgcgtgaacacaacggtttccaagtatggcaaattagatatcatgtttaacaatgc

SEQ ID NO: 99 - DNA, 395 bp, Glycine max
  Clone ID: LIB3028-056-Q1-B1-B1
caaccaccaaaccacaccgtcgcacccattccatcgctgattcctccaatggcttccactaccaccactttctctctttctctccgcaccaaccaacaaactccattccccaaaccctctttcttctccaataacaaccatctgcatttcaactctaataattgggcctggacctctgtttccactgctcgcaagtcaaggatatgcgtcacttcctctcaagttttggattccttagcagcaaaatccgaacccgctcttcccaccaccgtcgaagtcgatttgggtaatcggagctatcccatttacatcggatccgggttactaaaccaacccgactatctccagaggcacgtgcatggaaagaaggtcctaattgtaactaacaaaacggt

SEQ ID NO: 100 - DNA, 386 bp, Glycine max
  unsure at all n locations
  Clone ID: LIB3028-056-Q1-B1-B10
gaacatgcttagaaaactgccaagcccacccatattctctcaaaactttcaaccatgaactgaacaacaacaacaacaacaacagggccacccgtacagacccacctccaaagagatcatttttattaccaattttccgatttcacagagaaaattctttgtgggcatctcttcaaaaatgtcaagcttccccaacacggtggcggaaggccgcaggtccggcaaggcaccggaaaaatccaccttttctcagacttgcagcctcttgagccagttcttgaaggagaaacgtgcttctgctgattccacccttggaattggtggaaaaatggaacctaaagcgaataccaaggctttgttangaagcttgcaaaactctgatgggg

SEQ ID NO: 101 - DNA, 352 bp, Glycine max
  Clone ID: LIB3028-056-Q1-B1-B11
cccgattcatttccaccagcacaagaagcatggctgcaatatcaataccttctcacatgaaagcttggacatactctgagtatggaaaatccaaggaagttctcaagtttaatcagagtgtggctttgcctgaggtgaaggaagaccaggtcctcatcaaggtcgctgctgcttcccttaaccccattgatcataagagaatggaaggcttttcaagaacagcgactcccctttacctactgctccgggttatgatgttgctggagtggtggttaaagtgggaagtgaagtgaagaaatttaaggttggggatgaagtttatggtgatatcaatgtgaaagctttggaatat

SEQ ID NO: 102 - DNA, 393 bp, Glycine max
  Clone ID: LIB3028-056-Q1-B1-B12
attccaatatattccattctctctgtgtatttccctacctctcccttcaagatgcagatcttcgtcaagaccctcaccggcaagaccatcacccttgaggtggaaagctctgacaccatcgacaacgtcaaggccaagatccaggacaaggaaggaatccccccggaccagcaacgtctcattttcgccggaaagcaacttgaggacggccgtacccttgctgactacaacattcagaaggagagtactcttcacctcgtcctccgtctccgtggtggcatgcagatcttcgttaagacactcaccggcaagaccataaccctagaggttgaaagctccgacaccatcgataacgtcaaggccaagatccaggacaaggagggtatccccccg

SEQ ID NO: 103 - DNA, 383 bp, Glycine max
  Clone ID: LIB3028-056-Q1-B1-B2
gaaaaatcttccagaaccaaccttggccaccatcaagattttggcatggaggcttactccatagatggtgtttcttcacaaagtgagtccaaattctacgatgatgatggtcatgttaaacgaacagggaacgtttggactacaagctcgcacataataacagcagtggtgggttctggggtgctgtctttggcatgggccatggctcaaatgggttgggttgctgggcctgtagttatgatcttcttcagtgctgttacgttgtatacgacgtcgcttctggctgattgttatcggtgcggtgaccccgttacggggaagagaaactatactttcatggatgcaattcaatccattcttggcgggtattatgatacgttttg

SEQ ID NO: 104 - DNA, 392 bp, Glycine max
  Clone ID: LIB3028-056-Q1-B1-B3
gaaacatggctgaagagggtcaggttgtcggcgtccacaccgttgatgcgtggaaccagcaactgcagaatggaaaagactcccaaaaattgattgtggtggattttactgcttcctggtgtggtccatgccgttttattgccccagttctggcagagattgctaggcatactcctcaagtgatcttcctcaaggtggatgtggatgaagtgaggcctgttgctgaggaatattccattgaggccatgccaaccttcctcttcttgaaagatggcaagatcgtggataaggttgttggtgctaagaaggaggagctgcaactcaccatagccaagcatgtatctgctgctgctgcttcttcttgaagtgaagtatcatcatatgaaagaaga

SEQ ID NO: 105 - DNA, 392 bp, Glycine max
  Clone ID: LIB3028-056-Q1-B1-B4
tgtgcctctcctctcgctgcgttttccaatggcggccataacccgcctcctaaatcgcacctcttccctctcttccgtggcgcgtggattctcatctcacgcatcgccgccgcgcaaggaggagaggaatgtccagtgggtgttcctgggttgccccggcgtcggaaaaggcacctacgccagtcgcctctgcaacctccaacggcccccctttcttcccagctatcagaaattgttaatcaaggaaaattggtgtcagatgaaatcatcataagtttattgtcaaagaggctggctgatggggaagctaaaggagaatcgggatttattcttgatggttttccacgaacaataaagcaagcggaaatattggaaggggtaactgacattga

SEQ ID NO: 106 - DNA, 392 bp, Glycine max
  Clone ID: LIB3028-056-Q1-B1-B6
aatcactccccttgtcccctcgaactttctctcttcgggttctcgtcaaaacgcaaagatgcaagttccattgatcgacatcgacagaatcaacgatctccaagtgggtctgaactctctgcagaacccatccttcccaatcccttctcagatcacaacctccctcgcttacaatttctgcaaatggggcgcagtcattctcgcccttgtcgccaccttctgcagcatcatcaacagagtcactatcttcatcatccgcttccgcgccaaagccccttctctcccatccctaaccctaaacgacgacaatttttacacctcctcctcctctgacgacgacgacgacgacgataacgacgacgacctaacctactcctcttccgagcccgaag

SEQ ID NO: 107 - DNA, 383 bp, Glycine max
  Clone ID: LIB3028-056-Q1-B1-B7
gcaaaaaaaaaagtcagtgaagtaaataagctgaaacaagaaaaaacgttgggttcagtttgcatcaatggcggatctgaagaaccgtaatttcctcacctacgcgtacattcttctctacattactctctccagcggccaaatcttcttcaacaagtgggttttgtcttctaaggaaattaacttcccttatcctttggggttgactctacttcacatggtcttctcctctgttctgtgttttgtgttaaccaagattctgaaggttatgaaggttgaggagggaatgactcctgaaatatacgctacttcggtagtgccaattggggccatgtttgcaatgactctttggctgggaaatactgcctacctgtatatttctg

SEQ ID NO: 108 - DNA, 304 bp, Glycine max
  Clone ID: LIB3028-056-Q1-B1-A11
tcgtaatcgccgaaaaagacgggtttccggcaagctttacattccgaaaaccacttagccaccaacgcaaaagcttcctattttagtttacttccacggcggcgccttcataattggaacaccgttttctccgaagtaccacaagctactcaacaacgttgtttcaaaggcgaatgtgataggcgtttccgttgaccacatgacggcacccgagcagccggttcccattgcccccgaggattcatggagtgctctcaaatgggcctattcggaaatctttggaatcggtgttgaatagtggccg

SEQ ID NO: 109 - DNA, 366 bp, Glycine max
  Clone ID: LIB3028-054-Q1-B1-H8
caaattttctaaaggtgaaacacaaaaagttaaatctgttgattgaaacaaatataactatcttagctaaatttctaaagcagtaaatatgactttccataatcttttgagcgaaaataagttcttattatatggctttgaacagagctcaaaagaatacttggaaaaacagatggcagaggtggaagccaatttgagagaactgctacaacaagatcctggtcttgctaggcaaatcatgtctatgaatgtaatgtaaactttccgttagtgaaattaacttaaagtggcagggttttctggtgcatttgagcaaatagaaaattcaggacttggtgagatgtgaggaaggatgtgtactgcctg

SEQ ID NO: 110 - DNA, 367 bp, Glycine max
  Clone ID: LIB3028-054-Q1-B1-H9
tgatcacggtgtggatcaacaactcgtggccgagatgacccgtctcgccaaagagttctttgctttgccaccggacgagaagcttcgttttgatatgtccggcgccaaaaagggtggattcattgtctccagccatctccaaggggaatcggtgcaggactggagagaaatagtgacatacttttcgtacccaaaaagagagagggactattcaaggtggccagacacgccagaagggtggagatcggtgactgaggaatacagcgacaaagtaatgggtctagcttgcaagctcatggaggtgttgtccgaagcaatggggttagagaaagatggtttaagcaaagcatgtgttgacatgggacag

SEQ ID NO: 111 - DNA, 256 bp, Glycine max
  Clone ID: LIB3028-055-Q1-B1-A12
aaatctcgtcgagaagtttttgaaatgttgtcacaccttcttctagttctatgcccaactcttcccttgtgtttgttgtccttcttcagatatcgtacaacggtcaacaatccaccacttccaccacatctcataggccttcccataatacggaatcttcatcagctagacattccatcgcttcaataacagctatggcatctctcaaataaataaggtcctttactttcccttcaatttgaattaaggcccccca

SEQ ID NO: 112 - DNA, 213 bp, Glycine max
  Clone ID: LIB3028-055-Q1-B1-A5
aacattgcaactgaagtctccacctaatcgacgaaatcaagtaacaaatcagaagttactccgttggttggtatctcagctcttgcaggatctaccatgatatgttacagctacagatcctatgagggacttagtggaaggacttgctgacacccctgcacagagttgtgagctttgtatgtcatttgagtagtgtcactggatgaaacatcg

SEQ ID NO: 113 - DNA, 70 bp, Glycine max
  Clone ID: LIB3028-055-Q1-B1-A7
cgtatatgaaatgagtctttacaagtgatcgtccagcttgcgtaatagagtacaaactcagtggtaggat

SEQ ID NO: 114 - DNA, 115 bp, Glycine max
  Clone ID: LIB3028-055-Q1-B1-B2
aaatatttgacatgttgtcaccacgtcatctatttctatgccctcactcatcctttgccttcgctggcccacttcccaaaccgttcatccttaagctgtccgacacttccaccac

SEQ ID NO: 115 - DNA, 330 bp, Glycine max
  Clone ID: LIB3028-055-Q1-B1-B5
gagcaaccaaaagggaggaataataataagcctatattctaaggccggaaaaataaaaaaggaataacaaaaatgtctggaaaggtaattatctcggctgtttctctcatcctggtggttggagtggccataggtgtggtggtggccgtcaacaagaagggcgaggatcccacacttcaatctcaacaaaaatcagtaggggttatctgccaaaacactgatgaccagaagctctgccacgaaaccctaagctccgtgaagggcatggacaccgctgatccaaaggcttacatcgccaaggcggtgaaagccaccatggacagccttacc

SEQ ID NO: 116 - DNA, 267 bp, Glycine max
  Clone ID: LIB3028-055-Q1-B1-B6
gagcagtcaatggggatgaataataataacactatattctaaggccggtacaatagacaaggaataatcagagatgtctggaaaggtaagtatctcggttgtttctctcatcctactggttggagtggccataggtgtggtggtgtgtgtctacaagaagtgcaaagatcccacagttcaatgtcaacaaagatcactatgggttatctgccaaaacactgacgagcaaaagctctgccacgataccctaagctccgtgtacggcat

SEQ ID NO: 117 - DNA, 51 bp, Glycine max
  Clone ID: LIB3028-055-Q1-B1-B7
gttcttctagcgctaaaaacataacatcctaaaaaaatgtcaaagtaaggg

SEQ ID NO: 118 - DNA, 305 bp, Glycine max
  Clone ID: LIB3028-055-Q1-B1-D5
cacaacacgaactcttacaggtgatttgttcactttgtgggactgaacaagaggttcagcaaaactgtacaaattgtggtgtttgtatgggaaaatacttctgtggaacatgcaagctttttgatgatgatatatctaatcagcagtagcattgctgtggctgtggaatttgcagaactggaggaagcgaaaatttcttccattgctacaagtgtgggtgttgccactcaactcttctggaaaaacagtcacccttgtgtagaacgagcaatgcatcatgattgccgcgtttgttatgggtattt

SEQ ID NO: 119 - DNA, 129 bp, Glycine max
  Clone ID: LIB3028-055-Q1-B1-D6
cactacagtctctcttgccagtgatctcatcactgtctaggacagaaccacaggtcacactcacactgtacccagtgcggtgttggtgtgtgacacgagctctgtggaagatgccagctttttgatggc

SEQ ID NO: 120 - DNA, 317 bp, Glycine max
  Clone ID: LIB3028-055-Q1-B1-E2
caagaattttcttgaagaggaataaacgtagatatgctggtaatgatgaattttcaagccatgctatggaaggaggacaaattattaatggtctggagtgtaagatagcttgcagttcatctaaggtctcatatgttttagataccgaagactttttgtttcggataacaaggaaaagaagagttttgtatccaaagagttcaggcgccgatgaacaggcacagtcgccaaagagttcacgcagagttcaacgattcggcagtttgttttccattacatgagaatgtcgattttgagctgggcatgtaacatttgtc

SEQ ID NO: 121 - DNA, 78 bp, Glycine max
  Clone ID: LIB3028-055-Q1-B1-E4
gcaattttgatagagttgtgacggcacccattttgccaccgacgaatggaatagacactgtaactgctaagcggtact

SEQ ID NO: 122 - DNA, 185 bp, Glycine max
  Clone ID: LIB3028-055-Q1-B1-E5
gtttcatctagtgtggcgagatcattgccaagtacgccaacgtcaacggcggtgccaacttcggttgcggctcctcccgctagcactgcgcagtcgcgctgggcgcgtccggcgccgccgcagtggtcgcggattcgtacgctacgatcttctttcggaagtccgtggccaccggcgaggtgtat

SEQ ID NO: 123 - DNA, 218 bp, Glycine max
  Clone ID: LIB3028-055-Q1-B1-E6
gttacatcgaatccggcgagatcaaagtcaagtacgccatcgtcatcggcggtgccaccttcggttgcagctcctcccgcgagcacgcgcgcgtcgcgctgggcgcctcaggcgccgccgcagtggtcgcggattcgtgcgctacgatcttctttcgggactccgtggagaccggctaggtggtctccgcgagagtcggagggagcccgcctgcgagg

SEQ ID NO: 124 - DNA, 88 bp, Glycine max
  Clone ID: LIB3028-055-Q1-B1-F5
tgcaaaaatggcatcattcaccatgacagcttccatccttggcagcccagacgtcaccaaccggtcggcagtcgcaccgcacccggag

SEQ ID NO: 125 - DNA, 348 bp, Glycine max
  Clone ID: LIB3028-055-Q1-B1-G1
ggaggagactctttctctcagtctcatccacgtaaacaactcattggttttcaccaatagactacacatcatcctccatttcactgctctatgtttcttggtttactacaggctttgtttcttctttcagaatccacaaaccagacgaggaactactttgttcccttggcttcttgtttttgcctctgaaatcattctctccttcatttggattcttggtcaaggtttccgctggcaccccatttcaagaactgtgtttcctgaaaggttaccacaggatgacaagctccctctcattgatgttttcatatgcactgcagacccaactaaggaaccaactttgggtgt

SEQ ID NO: 126 - DNA, 358 bp, Glycine max
  Clone ID: LIB3028-054-Q1-B1-H7
gacgaacgcagcatcgaggatcttaggcggaaacggcgtcgtttaccgatccgtagcttcctctcttcgcctccgctccggcatgggcctccccgtcggcaaacactatgttcccgacaaaccccttcccatgaatgaggaactcctgtgggacaacggcactgcatttcccgaaccgtgtagagatcgtattgctgacactgtcggaaagtatgaagcattggcctggctgtgtgggggattgagttttttcgcgtcgctgggattgttggctgtgtggaatgacaaaacctccaagacaccgtttgcacccaaagtatatccatatgacaatctgcgagtggagcttggtggtgaa

SEQ ID NO: 127 - DNA, 324 bp, Glycine max
  Clone ID: LIB3028-055-Q1-B1-G5
agtagttgagaactaacaatgagaagcacatggcttcctcaatgatctcttccccagctgttaccactgtcaaccgtgccggtgccgggatggctgctccattcactggcctcaagtccatggctggcttccccagcagtaaagaccaacgatgacagtacctccattgctaccaacggtggataagtgcagtgcattcatgtgtggccaccaattggcaacaccaagtttgagactccttccgacctgccagaccttgatgatgcacaagtggcaaaggaaatctaataccttcttatgaatggacggataccactgcctgga

SEQ ID NO: 128 - DNA, 202 bp, Glycine max
  Clone ID: LIB3028-055-Q1-B1-H2
actgggtccagaaaactccatcaagaacagaggacagataagagtctactccatctggctgaagaagcaatcagcaatgtgcatcctagaacgcatcctcaaggtccatatcacagagaaaaccataaccaaattcgactagtgcagagactccagatgggccaaggccacgaagctctcagagaagcagccctcgttgcat

SEQ ID NO: 129 - DNA, 261 bp, Glycine max
  Clone ID: LIB3028-055-Q1-B1-H3
gctgggtcgagaaccctacatcaggaccataggagagataagagtccactccacctggcctgctcaagcattcatcagtgtgcacaatagaacgcatcctcaaggtccacgtcagagagaacagcataagcaaattcgagcagtccagagacaccataagagccaacgcaacgactctctcaatgaaccaccctcattgcagtagcaacagcagacgagcttctcacgttccactgcacctccttcaactgctccctgggt

SEQ ID NO: 130 - DNA, 393 bp, Glycine max
  Clone ID: LIB3028-056-Q1-B1-A1
cctcggggaattccaattccacattttcaagaaataaggaggcaaaaatgttcatatatgaattggaattatttgttttcttattaggcctatcctgaagccaaaggaaatgagatcggaattcctcggggaattccaattccacattttcaagaaataaggaggcaaaaatgttcatatatgaattggaattatttgttttcttattaggcctatcctgaagccaaaggaaatgagatcggaattcctcggggaattccaattccacattttcaagaaataaggaggcaaaaatgttcatatatgaattggaattatttgttttcttattaggcctatcctgaagccaaaggaaatgagatcggaattcctcgggggtaccgagctcgaatt

SEQ ID NO: 131 - DNA, 396 bp, Glycine max
  Clone ID: LIB3028-056-Q1-B1-A10
ggttcttccatttgactcttgttctgaacgacttttcaagagaatcaaaccatggcagtgaaagtatacggtccccactgtgcttccaccaagcgggtgctggtttgtctggttgagaaggaagtcgaatttgaggttgtccctgttgatgtcactaagggggagcagaaggatcctgagtacctcaaactacagccatttggagttgttcctgtcatcaagatggagattataccttatatgaatctcgtgctataatgaggtattatgcagaaaaatacagatctcaaggggttgagttgctgggaaaaacaatagaagagaggggtctagtggagcaatggctagaagttgaagcacacaactttcatccacaagcctacaacttgtgtcttc

SEQ ID NO: 132 - DNA, 369 bp, Glycine max
  Clone ID: LIB3028-054-Q1-B1-F9
gtaacacttgcaacacacatggctacaatcaccaacactttcatattcaaaccccccatctctcatcacccaaagcagcttctttattcccaccgctcttctctacgctttctcaccaaatttaaaaccccctccggagcgaattctcggcggctggttccgaaagccaaggcggccccggggccaagaagacagaaaagccgcacgagagagtccagcgagtccacagcgtggaggagttcgagtcggcgctcgaatccgccaaagacaggcttgtggtggtggaatacgctgccagcgacagcgaggagagcagccagatataccctttcatggtggagctgagccgcagctgcaacgacgtggagt

SEQ ID NO: 133 - DNA, 364 bp, Glycine max
  Clone ID: LIB3028-054-Q1-B1-G1
ctttttgagaacaatttagccaatgagcaagaattgaagaccatagagaagaaaatcgatgagatcctcgaggacgctgttgagtttgcagacaaaagccctcttccaccccgcagtcagcttctggagaatgtctttgctgatccaaaaggctttggaatcggaccagatggaagctatagatgtgaggatccaaagttcactcaaggcacagctcatgtctaatcttttcttgcttgcaagttggaactttcatttttgtatgactcttctttttcatatgccttatttagtgatcaaatgttacacaatgtctaatataaacaggatttgctctttaggttggtaatttggttttacgtgt

SEQ ID NO: 134 - DNA, 370 bp, Glycine max
  Clone ID: LIB3028-054-Q1-B1-G10
caatatattccattctctctgtgtatttccctacctctcccttcaagatgcagatcttcgtcaagaccctcaccggcaagaccatcacccttgaggtggaaagctctgacaccatcgacaacgtcaaggccaagatccaggacaaggaaggaatccccccggaccagcaacgtctcattttcgccggaaagcaacttgaggacggccgtacccttgctgactacaacattcagaaggagagtactcttcacctcgtcctccgtctccgtggtggcatgcagatcttcgttaagacaccaccggcaagaccataaccctagaggttgaaagctccgacaccatcgataacgtcaaggccaagatccaggac

SEQ ID NO: 135 - DNA, 378 bp, Glycine max
  unsure at all n locations
  Clone ID: LIB3028-054-Q1-B1-G12
ggaggagactctttctctcagtctcatccacgtaaacaactcattggttttcaccaatagactacacatcatcctccatttcactgctctatgtttcttggtttactacaggctttgtttcttctttcagaatccacaaaccagacgaggaactactttgttcccttggcttcttgtttttgcctctgaaatcattctctccttcatttggattcttggtcaaggtttccgctggcaccccatttcaagaactgtgtttcctgaaaggttaccacaggatgacangcttcctctcattgatgttttcatatgcactgcagacccaactaaggaancaactttggatgttatgaacactttgctatcagccatggcgct

SEQ ID NO: 136 - DNA, 373 bp, Glycine max
  Clone ID: LIB3028-054-Q1-B1-G2
ggaatagaaaaaccctaagcaaagcaaagcggtaaggatggggaacacggagaagctgatgaaccagatcatggaattgaaattcacttcgaaatcgctgcagcgtcaatcgcgtaagtgcgagaaggaggagaaatcggagaagctgaaggtgaagaaggcgatcgagaaaggcaacatggacggcgctcgaatctacgcggagaacgcgatccgtaagcgcacggagcagatgaactacctccgcctggcctcgcgcctcgacgccgtggtcgcccgcctcgacacgcaggcgaagatgacgacgatcagcaagtcgatgggcaacatcgtgaaatcgctggagtcatcgctggccacggggaacctccag

SEQ ID NO: 137 - DNA, 362 bp, Glycine max
  Clone ID: LIB3028-054-Q1-B1-G3
tttctcggttcattgtccccctttgacggtggtgctgtaagcattgacctcagcttgagcagtaaaacatcatcagcactactacggtaccatggctgtgctgcaatctttcgtttcggtccacccagattctcacttccccatacagaagctcccttagggagtcttcaagccccaatccgcttcgcctcctcgtcccggcgtcgccatctgcgacttcgtcctcgacctctccgaaatatcttccgctggtctcttcgacggtcctctcctcaaaaactccgatgcttttctccagcctaatctaaataagtttgtatcacttggaagaccagcctggaaggaagctcgtgctactcttc

SEQ ID NO: 138 - DNA, 360 bp, Glycine max
  Clone ID: LIB3028-054-Q1-B1-G7
aactgggttgtctgctccttataacaaccttgccataatctataagcagcaggggaattatgtagatgccatatcgtgctacaatgaggtcctccgcattgaccccttggcagctgatggactagtaaatagaggcaatacatataaggagattggtagagttagtgatgctatccaggattacatacgggcaattgttgtcaggcccaccatggcagaagcccatgctaatttggcttctgcttataaagatagtggacatgtagaggctgctgtgaagagctataaacaagcattgattcttcgtccagacttccctgaagcaacttgcaatctccttcatacacttcagtgtgtctg

SEQ ID NO: 139 - DNA, 372 bp, Glycine max
  Clone ID: LIB3028-054-Q1-B1-G8
agtagttgagaactaagaaggagaagcaaatggcttcctcaatgatctcttccccagctgttaccactgtcaaccgtgccggtgccggcatggttgctccattcactggcctcaagtccatggctggcttccccaccagaaagaccaacaatgacattacctccattgctagcaacggtggaagagtgcaatgcatgcaggtgtggccaccagttggcaagaagaagtttgagactctttcctacctgccagaccttgatgatgcacaattggcaaaggaagtagaataccttcttaggaagggatggattccttgcttggaattcgagttggagcacggtttcgtgtaccgtgagcacaacagggtcacag

SEQ ID NO: 140 - DNA, 385 bp, Glycine max
  unsure at all n locations
  Clone ID: LIB3028-054-Q1-B1-H10
caatacttgggaaccaagatcgatcccaaccggaggctcggaaagaccccgagcaaccgctacgcgccacgtgtcggcgacaaattgcctgattccgttgattggaggaaggaaggtgctgttcctcctgtcaaagaccaaggaggctgtgggagctgttgggcattctcagcaatcggtgcagtagaaggaataaataagatagtaacaggcgaactgatttcgttatcagaacaagaattggtggattgtgatactggatataaccaaggatgcaatggaggacttatggactatgcatttgagttcataatcaacaatggcggcattgattctgatgaggattacccnatacgtggtgttgatggtagatgcgacacatata

SEQ ID NO: 141 - DNA, 371 bp, Glycine max
  unsure at all n locations
  Clone ID: LIB3028-054-Q1-B1-H11
actgggtccagaagacaccagcaagaacatagtagagataatattccactccagctggctgaagaagcaatcaccagtgtgcaaaatagaccgcatcctcaaggtccacaacacacagaaaaccataaccaaattcgaagagtacagagactccataaaagccaaggccacgaagctctcaaagaagcaccctcgttgcatagcagacggcaacgagcttctcaggttccactgcacctccttcaattgctccctgggtctaaacggctcctccaacttgtgcaactcgataccacagtgcaacgtgtgcagcataatcaagcacgggttcaaggtcaccggaggangagccggcatcttgacgacggcga

SEQ ID NO: 142 - DNA, 72 bp, Glycine max
  Clone ID: LIB3028-054-Q1-B1-H12
aggaatgtgagatgtccatgaagatatatataatatattggctcctattataaataaataaatatatttttt

SEQ ID NO: 143 - DNA, 378 bp, Glycine max
  Clone ID: LIB3028-054-Q1-B1-H2
tgttcagccaactaaggttgattcccctcctagcagtgtgtcaacaaatggggtttcttccccttcagtgccagcaaactcagaatcatctgatgctgctgcttccaagtctcccattcaggagcaagtttcaggcaccaaagaggacaaaaatgtggataccaaagatagtgagagtgattcctcaagtggggttcctagtgaatcattccctaagcctgttgtgactgtgaacattgaacccgagccaaaggtcgtgcagcaggatatagtagacatgtacatgaaaagcatgcagcaattcactgagtcactagcaaaaatgaagctccctatggacttggaaagtgaaccaactagttcaggaaattcaaccac

SEQ ID NO: 144 - DNA, 380 bp, Glycine max
  Clone ID: LIB3028-054-Q1-B1-H3
taaccccgaattccggtccaaaaaaaggttaaaccaagacaatccccaaagggaatcaagaatttgggctcctccaactccaaaggaaatcaaagtctcctctacctccagacctcatctcttgcatcctttttctttctccagatgcttgtcctccgtcctggatggacttaagtatgcagattcacacgaatgggtcaagcaccaaggctcagtctccaccattggtatcactgaccatgcccaggaccatcttggagaggttgtgtacgtggacctgccacaagcaagtggcacagttacccagaagtccggcttccgatccgttgaaactgttaaagcaacaagtgacataaactctctaatctccggggagattg

SEQ ID NO: 145 - DNA, 366 bp, Glycine max; identical to SEQ ID NO: 109
  Clone ID: LIB3028-054-Q1-B1-H4

SEQ ID NO: 146 - DNA, 359 bp, Glycine max
  Clone ID: LIB3028-054-Q1-B1-H5
taacttttcaggctgaagaagttgatatgacagctctcaatcatatgactgatgaagatctcaaggctatgggcataccaatgggaccaagaaagaagatacttttagcactggagtcgaaagtctaacatttagttatggaattgattttctaagctggatggtggtgggaggagatcaggatctaaaaaccaagtgtaatagcatagttctttgattattttcgtttttaatattttcccttactttttagacattaatcaagttaattttggtgtttattttgctaaaccccgtcaatctcctgaaactctcttataatgcaattaatggatttgagagtttaccttttgaatcaa

SEQ ID NO: 147 - DNA, 372 bp, Glycine max
  Clone ID: LIB3028-054-Q1-B1-H6
gccaggaatagggcacaggatcaagaatagggacaacaaagataagagagttgagctgctacagaagtttgcacgcacacattttccttctgtgaaatacatggaatatgctgttcaagttgagacctacacgctcacaaaggcaaataatttagttcttaacgtagatggtgcaattggatctcttttcttggatcttcttgctggtagtggaatgttcaccaaacaagagattgatgaaattgtggagattggctatctgaatggcctctttgtgctggcacgctccattggtctgattgggcacacctttgaccaaaagcgattgaagcaaccactttaccgtcacccatgggaggatgttctctacac

SEQ ID NO: 148 - DNA, 368 bp, Glycine max
  Clone ID: LIB3028-054-Q1-B1-F8
agcaactccatcgatgttaaattatctaaaaataccattgaaactggagatgattgtgtttccatgattcaaggagtcaacaatattactatcaacaaactgaaatgtggccctggacacggtattagtattggaagtcttggaaagtatgcggatgagcaagaagtgaaagacattcgcgtcaagaactgcacgatggttggcacaaccaatggcctcagaatcaagacatggccagataagtatccaggttcagcatcagctatcaccttcagtgacattgtcatggaaaatgttaaaaatcctatcatcattgaccaagagtatgattgcgaaccagcaaactgccaaaagaagccttcacttgt

SEQ ID NO: 149 - DNA, 341 bp, Glycine max
  Clone ID: LIB3028-054-Q1-B1-E11
ctcgagccgattcggctcgagttcaattcaagcagctttggaaaacccaaccagccaacagttaagttctggagggaactgaaaagaaatctttatacaagattacaccttcagaagagtcttgccgaagtgtgtggaatctttgtgacagatgttggtttgattgtgtggacttaggagtgaatagtttgatatatgcgcatggaaggaagagaaggcttcagttctggggttacagtgataggggcagaagctccatcagcctatcatatggcaccaaggagtgaagctccaagtcaggttcctcctcctgttcctgaagcaacaactggagctattgg

SEQ ID NO: 150 - DNA, 368 bp, Glycine max
  Clone ID: LIB3028-054-Q1-B1-E12
cacgaattttcttgaagaggaataaacgtagatatgctggtaatgatgaattttcaagccaggctatggaaggactacaaattattaatggtctggagtgtaagatagcttgcagttcatctaaggtctcatatgttttagataccgaagactttttgtttcggataagaaggaaaaaaagagttttgcatccaaagagttcaggcgcccatgaacaggcacagttcctcaaagagttcaagcagagtacaacgattccgcaatttgttttccattacatgaaaatgtccattttgagctgggcatgtaacatttgtcaaatgtaaacattggcagaggcgctggatgaaaacagcatcctatccaag

SEQ ID NO: 151 - DNA, 371 bp, Glycine max
  Clone ID: LIB3028-054-Q1-B1-E2
gttgaaaacacaaaagaaaaaaaatgggttcttctctgtggacctgtctgattttgttatcacttgcttctgcttccttcgccgccaacccaagagcaccaattgatgtgccatttggcagaaactatgtgcctacctgggcctttgatcacatcaaatacctcaatggtggttctgagattcagcttcatcttgataaatacacaggtactggcttccaatcaaaagggtcctacttgtttggtcacttcagcatgtacataaaattggttgctggtgattcagctggcacagtcactgctttctatttatcatccacaaactcagaacatgatgaaatagactttgagttcttgggaaacagaaccggg

SEQ ID NO: 152 - DNA, 361 bp, Glycine max
  Clone ID: LIB3028-054-Q1-B1-E3
ggagacaccagccattgatgtgtgcaagggactactcggcgacaaggcgcgcctaagcatatatgatccacaggtcactgaggaccaaattcagagggatttatggatgaacaagtttgattgggaccaccctattcacttgcagccaactagtcctacaactgagaagaaagttagtgtggtttgggatgcttatgaggcaacaaaggatgcagatggtgtttgcattctaactgagtgggatgagttcaagagtcttgattatcagaaggtgtatgacaacatgagaaaaccagcatttgtttttgatggaaggaacattgtggatgtggagaagctacgtgagattggtttcattgtg

SEQ ID NO: 153 - DNA, 350 bp, Glycine max
  Clone ID: LIB3028-054-Q1-B1-E4
aagagatatgcgccagagttgaagcgagaaagaagggtccgcgcgccatggctggcatcaccacctcccccttcaaactctctcactttccgactctcttctcttcttctgattccaaactcttcggccttcccctctccaatccctattccctcaaattcgacccttcttctctctccactacctctctctcctacgtcaaagcccgctactacagcggctgcggcggccctctccgctcccccaacgactcccgcttccgcaagtcctccgattccgacgacgacgataaagctctcgagctctccactctcatgtcagataccgtgaggcttattgatcagagccag

SEQ ID NO: 154 - DNA, 318 bp, Glycine max
  Clone ID: LIB3028-054-Q1-B1-E5
gtttgtgaagagcgatggataacagttaccatcacaaccgtggcattggtgatagcttcctcagcaccattattattggcggcatgcccttacacctccatcttcagcttcggtgattcacttgcagacactggcaacttgtatttcagccactacccacccaccaatcactgccttttccctccctacggcgaaaccttctttcaccaagtcactgtacgctgctccgatggccgcctcatcatcgatttcatctctgagtcactggggattccacgggtgaagccgtacttgggattctggaatattgggagatgg

SEQ ID NO: 155 - DNA, 367 bp, Glycine max
  Clone ID: LIB3028-054-Q1-B1-E6
cataagcccaataataataatcttcagctcagctccacgaaaagcaaccttaataatcttaggaagtgataaatcaaaaatccaactaagaaccgagctagttttccttttacgtcctctgattccggctacgtactcgcatttcactttccttactcttatcgagagtgagcaattgtatcccgtgaggtgtgatttgtaagctgctacagtcagaaaacgaacagaagaaaccaaaactgttgcatttttttgccgaaggattaccaggaagcaaccatggatgttgatgcacagccaacgatggatgaaacaattctggttggtgatgatttaatgacaggtcctccatcacctgtagtaccac

SEQ ID NO: 156 - DNA, 354 bp, Glycine max
  Clone ID: LIB3028-054-Q1-B1-E7
ttcattctctttgcgcagttccctacctctcctttcaagatgcagatcttcgtcaagaccctcaccggaaagaccatcacccttgaggtggaaagctctgacaccatcgacaacgtcaaggccaagatccaggacaaggaaggaattcccccggatcagcaacgtctcatcttcgccggaaagcagctcgaggacggccgtacgctcgccgactacaacatccacaaggagtcaacccttcaccttgtccttcgtctccgtggtggcatgcagatcttcgtcaagactctcactggcaaaaccataaccctagaggtcgaaagctctgacaccattgacaacgtcaaggccaag

SEQ ID NO: 157 - DNA, 369 bp, Glycine max
  Clone ID: LIB3028-054-Q1-B1-E8
gtttcatcgaacccggcgagatcaaaaccaagtacgccatcgtcatcggcggtgccaacttcggttgcggctcctcccgcgagcacgcccccgtcgcgctgggcgcctccggcgccgccgcagtggtcgcggagtcgtacgctaggatcttctttcggaactccgtggccaccggcgaggtgtatccgctagagtcggagggacgcctctgcgaggagtgcaccaccggcgatgtggtgacgattgagctcggagagagccgcttgatcaatcacaccaccggaaaggagtatcgcttgaaaccgatcggcgacgcgggtccagtgatcgaggccggtggcatctttgcctatgccaggaaaaccggca

SEQ ID NO: 158 - DNA, 378 bp, Glycine max
  Clone ID: LIB3028-054-Q1-B1-E9
aaaaaaccctctctttctctctcttccaaaacctaattttcattttttctcttcaaacaaattttcaaaatgcgtgagatccttcacatccagggtggccaatgcggcaaccagatcggcgccaagttctgggaggtggtttgcgcggagcacgggatcgaccccactggaaggtacggtggggactcagagcttcagctcgagaggatcaatgtctactacaacgaagccagctgcggccggttcgtgccgcgcgcggttctcatggacctcgaaccgggcaccatggacagcgtccggtccgggccgtacgggcagatcttcaggcccgacaactttgtgttcgggcagtccggggcaggaaacaactgggccaag

SEQ ID NO: 159 - DNA, 357 bp, Glycine max
  Clone ID: LIB3028-054-Q1-B1-F1
ccagtctgccaaggaagaaagaatagcattgaggccaccaatgttgcaggtggttcggttggcttcatttcagcatgctccttcagttccacctttcatatcattaccaaaacaatctagagttgatagtgatgactcttggatggcaacagaagagagaaaggcaggtgaggtggcagttggtggtggtggggtgtctgtggcagttactcgttttccaatggagcagaagcgtcctgttgggcctcttgtggttgtaggtgtcagggatggagttctttggctaattgacaggtacatggttgctcatgccgtatccttgagtcatcctggtattcgttgccgatgtcttgctgc

SEQ ID NO: 160 - DNA, 353 bp, Glycine max
  Clone ID: LIB3028-054-Q1-B1-F11
ccaaaccaaagcaagaatagtgttctaagagtgagcaacaacttcaaacaccattgtgagaaatggcttccaagggtgcacttctcttgtgtctcaacattctcttcttcactgtggtaagctccacatatgtcccatgcaacccaccccctaaaactcctaaacacacacctgtcccaaagccaccttccccaaagcaaccaagttgccccaaagacaccattaagtttggtgtgtgtgctgatgtgttaggtttgattaacgtgcaacttgggaagccaccaaagaccccatgctgcaacctcattcagggtcttgctgatcttgaagcttccgtgtgcctttgcaccgct

SEQ ID NO: 161 - DNA, 379 bp, Glycine max
  Clone ID: LIB3028-054-Q1-B1-F12
ctcgagccgagaaatttaagtgaggagctagagaatgatgatgaagtctgctatgtgtgcagtggtggttgtagcacttcttcttctggcggaggtggggcccatggctgaggctgtgacatgcaccccaacagagttgagtccgtgtcttccagcaatcacttccggtgctaaaccttccaatgcttgttgcacgaagctgaagcagcaaaaaccatgcttatgtggctacctcaaaaacgctaagcttgaagcagtatgttaactctcctaaggccgaaaaaccgttgcttcttgtgggattccctttccaacttgttaattaattaagccttcttataattaaagtgtgggatatatatatatatatagataaaca

SEQ ID NO: 162 - DNA, 373 bp, Glycine max
  Clone ID: LIB3028-054-Q1-B1-F2
gttgcctataaaaataaaaactaagtcccccaaaacccaatcatatcatttcatttcttcctttgtcgtccatcccgtaaccatgtctcagactgttgtcctcaaagttggtatgtcatgtgaaggatgtgttggagcagtgaagagagttctaggaaaattggatggtgtggaatcatatgacattgatttgaaggaacaaaaggtggtagtgaaaggaaatgtccagccagacacagttctgcagaccgtttccaaaactgggaagaagactaccttctgggaaggtgaagcagcaacatctgaaactagcacagcaactgcctaaaacatttgcctctattctgtgcagaagaagtagctgtgtgaatca

SEQ ID NO: 163 - DNA, 358 bp, Glycine max
  Clone ID: LIB3028-054-Q1-B1-F3
cccgaaacctaagcacaagatgaagaagataagaggatatggagagaaatgagtgctcttgtggagaggatgtgttggaaaatagctgctaagaaggatcagactgttatttgggtcaagcctctcactaatagctgctacttaaagagattgcctggtactaagcctccactctgcagatctgatgatgatcctgatgctgttttgggagttaaaatgaaagcttgcatttcacgttattcagatcaaatgcacaaagcaaaaggaagtggtttggctccttggcctgctcgattgactactccacctcctcgtctggcagaaattcactattctactgaaatgtttgagaaggaca

SEQ ID NO: 164 - DNA, 57 bp, Glycine max
  Clone ID: LIB3028-054-Q1-B1-F4
aaataaatcacgtttccattactcaatggcaaaagtaatatttgttgttttattgcc

SEQ ID NO: 165 - DNA, 362 bp, Glycine max
  Clone ID: LIB3028-054-Q1-B1-F5
caattccattctctttgcctgcctagtttcaattctgtccaatttccaaaaccaaaacaagccacacaagttcatggcaactcccaataacagactctctcttgccatggagagaactgggcaatgggttttctctcaagacataccaactgatgttatagtggaagttggagaaacaactttctctctgcacaagttcatgctagtggcaaaaagcaactacataagaaaactgatattggaatcagatgagagcgaactcaccagaatcgacctctctgacataccaggaggcccttcaatcttcgagaaaaccgcgaaattctgttacggcgtcaacttcgagataacggtccacaacg

SEQ ID NO: 166 - DNA, 367 bp, Glycine max
  Clone ID: LIB3028-054-Q1-B1-F6
gctgaagacaaagaggacacaccgtttcatagtttttaagattgaggagcagcagaagcaggtcattgtggagaagcttggtgagccagcccaaggctatgaagatttcactgccagccttcctgctgatgagtgccgttatgctgtttatgattttgagtatctgactgaagggaatgtccctaaaagcagaatttttttcattgcatggtcccctgacacatcaagggtgaggagcaagatgatctatgcaagctccaaagacagattcaagagggagctggatggaattcaagtagagctgcaagcaactgatcctactgagatgggtcttgatgtgttcaaaagccgggccaactaaaatgat

SEQ ID NO: 167 - DNA, 126 bp, Glycine max
  Clone ID: LIB3028-054-Q1-B1-F7
atggaaatgaattgtagtggaaaatgtagtaagttttaatgaaattttgaattggtggatagattgtgctttgtttattattgactgagttatttagaatgtgaacatagtgctggactttattac

SEQ ID NO: 168 - DNA, 311 bp, Glycine max
  Clone ID: LIB3028-054-Q1-B1-E10
ggaacatgcttagaaaactgccaagcccacccatattctctcaaaactttcaaccatgaactgaacaacaacaacaacaacaacagggccacccgtacagacccacctccaaagagatcatttttattaccaattttccgatttcacagagaaaattctttgtgggcatctcttcaaaaatgtcaagcttccccaacacggtggcggaaggccgcaggtccggcaaggcaccggaaaaatccaccttttctcagacttgcagcctcttgagccagttcttgaaggagaaacgtgcttctgctgattccacc

SEQ ID NO: 169 - DNA, 374 bp, Glycine max
  unsure at all n locations
  Clone ID: LIB3028-054-Q1-B1-C10
ccctagtctccatacatcaacttgggaagttaaagagacggcaacgttgtgctgtccgccttgaccgagccagagcttcgtcttggccctcgattttgccctgtaaaactaatcccagtcacaacagaaataatcaatggcaccgaaacagaccaaggctgagaagaagatcgcttacgattgcgaagctgtgcgacctaatggaggagtacggccaaatcctcgttgtaaactccgacaacgtgggatcgaaccagctccagaacattcgcaagggtctccgcggcgactctgttgtcctcatggggaagaacaccatgatgaagcgctctgtcaggatgcacgctgagaanaccggaaacaatgcctatctc

SEQ ID NO: 170 - DNA, 360 bp, Glycine max
  Clone ID: LIB3028-054-Q1-B1-C2
ggagagagaaaaaaaaaaaaaaacagaacaacacagaaactcaaaaccaaaataaaattattatggatcacattcataggttacgttgttttgggacaatacccaaaattccttttctattgctactttccctgcttctcttcagtttcgttaacgcatccttcgacctcgctactatacccttcaacgacggctattctccgctcttcggagctagcaacgttgttcgctccgaggatggatacggcgtacaactccgcctcgatcgctacacaggttcgggtttcatttcctccagtatgtaccagtatggattcttcagcgcgagaatcaagttaccatcgaattatagtgctggta

SEQ ID NO: 171 - DNA, 363 bp, Glycine max
  unsure at all n locations
  Clone ID: LIB3028-054-Q1-B1-C4
ctaaagatgtacctctctacgaagtcaactaaatccattaaagttttggcaaagatagaaagcttagaatcccttcataaactggaggaaatagtgcaagcttctgatgggatcatggtggctcggggtgaccttggtgtcgaaataccacttgaacagattcctacagtccaagaggatataatttacgtatgcagacaattaaacaagccagtgattgtagcttctcagcttcttgagtcaatggtcgagtatccaacgccaacacgtgctgaggtancanatgtttctgaagcatttcgacagtatgctgatgctttgatgtggtctggagagtcagctattggatcatatggacgaaaa

SEQ ID NO: 172 - DNA, 349 bp, Glycine max
  Clone ID: LIB3028-054-Q1-B1-C5
gggaactgtgtcaagagtgactctaaacgtatcaacatggtggggattcacactccaaagaaagacaatgaaccattgctacagtgcactcatcatatgtgtccaataagggtgcactggcacgtgaagctcagctatactgactattggcgagtcaaggttgctgtgacgaatttcaactacaggatgaattactccctctggactcttgctgttcagcatccaaatcttaacaatgtcacccaagtttttagctttgattacaatcctttacttcgctatgagtccataaatgacactggtatgttctatggcatgaaatactttaatgatctcttaatggaaactg

SEQ ID NO: 173 - DNA, 361 bp, Glycine max
  Clone ID: LIB3028-054-Q1-B1-C6
atcataaaccccctccagagaacaagaatcaaagaatggcaactatgactggtgtgagcctttcaagccccagggttttcttcaacgcatcaccctcaccgcaaaacacgtacgccgtaaagttcgcagttccactcagccaagggatgcgacttggtagtgtcaggttgggtcgggtgatgaggatccgacccgttcgcgcagctccagagcgcatttcggagaaggtggaggagagcataaagaacgcgcaggaggcgtgcgccggcgacccgacgagcggcgagtgcgtggcggcgtgggacgaggtggaggagctgagcgcggcggcgagccacgccaaatacaagcaaaaggaaaa

SEQ ID NO: 174 - DNA, 327 bp, Glycine max
  Clone ID: LIB3028-054-Q1-B1-C7
ctctctttcgatctgggtactaaccctaacccgcttcgaaccgtggcttcctcaggctcgcagaacctctctcgaagaaaaccttcttcttcttcgtcttcgtcttctcaacaaacacccgggtcgacccggatcgtttaccgagaatctcggatcccatcggaatccgatttcccgatctggcagcagaactggttcatcgcattgctcttcgtcatggctctcggattcttcgccctcgccattttcctcttcctcactctcgactctgacatcgctccttcttccaacgcctccgcctccgcctccgccgctttctccgaaggc

SEQ ID NO: 175 - DNA, 322 bp, Glycine max
  unsure at all n locations
  Clone ID: LIB3028-054-Q1-B1-C9
ggctttttaactttaagaaggatanggatggctactggaaatggtttgctggcaacttggcctctggtggtgctgctggtgcttcatcccttttgtttgtttactctcttgactatgcccgtacccgtcttgccaatgatgctaaggctgcaaagaagggaggagagagacattcaatggccttgttgatgtctacaggaagacattggcatctgatggtgttgctgggctctaccgtggtttcaacatctcatgtgttggaatcattgtgtatcgtggtctgtactttggattgtatgattccgtgaaaccagttgtcctc

SEQ ID NO: 176 - DNA, 119 bp, Glycine max
  Clone ID: LIB3028-054-Q1-B1-D1
ccaccccccaagttgtcgtcacttactagcaggttgtaaattatccggtttatccgagaaaaactccacagaaaaatttccaaggatatattaatataatatatgaaaagtttcctttt

SEQ ID NO: 177 - DNA, 274 bp, Glycine max
  Clone ID: LIB3028-054-Q1-B1-D11
gtgactgtcagaaacaaacattatttggttttctgaattgtttggattgcgagaaaaaaaaagggggggaaatggcaaaggatattcgattcttcgacctcaacacgggcgccaagatcccttcagtcggcttgggaacttggcagtctgatcctggccttgttgctgaagccgtcgcggcggccatcaacgttggttaccgccacattgattgtgctcaaatctatggcaatgagaaggagattggctctttgttgaagaatctgtttgagga

SEQ ID NO: 178 - DNA, 362 bp, Glycine max
  Clone ID: LIB3028-054-Q1-B1-D12
ctctaacctacctctttttcttctctctcaacaacttcaccttcttcctcctcgatcatgtctcacttcaagggcaagtaccatgatgagcttatcgccaatgctgcgtacattggcactcctggaaagggtattcttgctgctgatgagtcaacagggacaattggcaagcgtttggccagcatcagtgtagagaacattgaatccaacaggcgagctcttagggagctgcttttcactgccctggtgttcttcaatatctcagtggtgtcatcctctttgaggaaaccctctaccagagcacagctgcaggcaagccctttgtgaatgtcttgaaggaagctggtgtgcttcctggcatc

SEQ ID NO: 179 - DNA, 368 bp, Glycine max
  Clone ID: LIB3028-054-Q1-B1-D2
gtgtgtttgttctctgagtagaagaagatcaagatcaaggaagaggatgtcgaaagaggatgtgtttgttggcgcgatcgaccaaggaacgagcagcagcaggttcataatatacgacgcgaagactggagtagtaggatgccaccacgtggagttcacccagttctacccgcaagccgggtgggtggagcatgaccccatggagatcttggagagtgtgaaagtgtgcgtggccaacgccgtcgacaaagccaccgctgatggcttcaacgtcgaagaaagcttgaaggccattggtctcaccaatcagagagagaccactctcctctggagcaaatccaacggcctccctcttcacaacgccattg

SEQ ID NO: 180 - DNA, 91 bp, Glycine max
  Clone ID: LIB3028-054-Q1-B1-D3
gttcaatgaaggcattgtgtccactgctaaggttgtgtccaaagctgtgattactgggtacaaagatgggttcaaccagattaagtccctg

SEQ ID NO: 181 - DNA, 144 bp, Glycine max
  Clone ID: LIB3028-054-Q1-B1-D5
tggaggaacccacttccattatggcgctggcaagtatattgcatcaattgccaatatgctcaactttccaaacaatgtgattaacattgaaggaaaacttcgcaatgtttttgatgttggctgtggtgttgcaagctttggagg

SEQ ID NO: 182 - DNA, 364 bp, Glycine max
  Clone ID: LIB3028-054-Q1-B1-D6
gaaaagagattctgagactgaaagtaaatcgaagcagagaagaagaaagaaagaaagatggtgaaagtggcgacgtacttcgcgatgacgctaggagccttcgtgttctggcagtccatggacaagctccatgtctggatcgctctccgtcaagacgaaaagaaagagaggttggagaaggaagccgagatcagaagggttagagaagaattattgcagcagcaggccagtcagaaggattctctttcttgaatttgaattatgttgtaattttgccttgtgctttgtaattttccttgtttttgtttttccaatgcaatgttcttgtgctcgaataaattctggtactcccgagcacttcaaa

SEQ ID NO: 183 - DNA, 147 bp, Glycine max
  unsure at all n locations
  Clone ID: LIB3028-054-Q1-B1-D7
canaatgactttcaattgccacaataacactgttgtcgccactagaatgctagttgtgatcactttagtccttgcactagtaagttgtgtcacatccgcgcaatcaccggcagcagcacaagccccggaaagcaacgggtgcttgat

SEQ ID NO: 184 - DNA, 363 bp, Glycine max
  Clone ID: LIB3028-054-Q1-B1-D8
cacgacacgaagtcaaacaggtgatttgttcactttgtgggactgaacaagaggttcagcaaaactgtacaaattgtggtgtttgtatgggaaaatacttctgtggaacatgcaagctttttgatgatgatatatctaatcagcagtaccattgctgtggctgtggaatttgcagaactggaggaagcgaaaatttcttccattgctacaagtgtggttgttgctactcaactcttctgaaaaacagtcacccttgtgtagaacgagcaatgcatcatgattgccctgtttgttttgagtatttgtttgaatcaagaaacgatgtcactgttatgccatgtggacatacgatccataagagct

SEQ ID NO: 185 - DNA, 352 bp, Glycine max
  Clone ID: LIB3028-054-Q1-B1-C1
tgtttccatatacctaatagctctaggaaatggaggataccatcctaacattgctacatttggggctgatcaatttgatgaaggagatcccagggaacaacattaaaaaattgtatttttcagctatttttatttggctttgaacattgggtcactcttctccaacaccatattgaattattttgaggatgatgatggactatggactttgtggttctgggcttcagctggctcgatctgctgctctggcattgattttgtttctttgtggcacacgaaagtatagatactttaagcctaatggaaaccctcttcctagattttgccaagtttttgtggctgctacaagaaa

SEQ ID NO: 186 - DNA, 353 bp, Glycine max
  Clone ID: LIB3028-054-Q1-B1-D9
gcagcagaacagagagagcaaaaccctagagcatccatcacaagcagaggaagaagatggtgaagttcctgaagcctaacaaggcagtgatcgtcctgcagggccgctacgccgggcgcaaggcggtgatcgtgaggaccttcgacgagggaaccagggagcgcccctacggccactgcctcgtcgccggaataaagaagtacccaagcaaggtcatcaagaaggactccgcgaagaagaccgcgaagaaatctagggttaaggccttcgtgaagctcgtgaactaccagcacctcatgcccacgcgctacacgctcgacgtggatctaaaggacgctgttaaccccgatgtt

SEQ ID NO: 187 - DNA, 359 bp, Glycine max
  Clone ID: LIB3028-054-Q1-B1-E1
gcgacacgtatcaacttcaataatcgcatcgcagaagcagtttccggtgcatctcatcgtctccgaaaatgaacgacgcagatgtctcgaagcaaatccagcagatggtgcggttcatccgccaggaagctgaggaaaaggccaacgagatctctgtctccgccgaagaggaattcaatatcgagaagctgcagttggtcgaagccgacaagaagaagatcaggcaagaatacgaacgcaaagagcgccaagttgaaattcgcaagaagattgagtactcaatgcagctgaatgcttctcggattaaagttcttcaagctcaagatgacgtgatcagttccatgaaagaagctgcatcc

SEQ ID NO: 188 - DNA, 365 bp, Glycine max
  Clone ID: LIB3028-054-Q1-B1-A2
gatagctcgttcaggttacctcgttctgcgttctccttcaacacaaccgcgaaaaccttaactcagagctcgttcaccataccacccaaatcaattgtccaaaatcgcggctcaaaccgaacattcgaacttgaatcaggaattttggggcaaggttgctagtgttggcaggattcaggagtaactatagttcaaacctaatagtagaagaaaaggaacttcagctggttttatttgatagagaaaccactgttacagaaatatggaagaggaagaggtgaatcgatgccagattcaggaatggtatccaaagttcaaatctgtatccttcaagaccttaattcatcaacttcctgaatcattta

SEQ ID NO: 189 - DNA, 177 bp, Glycine max
  Clone ID: LIB3028-054-Q1-B1-A3
ataaaagaaatatgacgtcgcacgtacgtaacccggaatcggtccaattaaaatccaagagaaaaacaatgaaggacctgacggaggaatttctgaaagaaaacccgaacatgtgcgagtacatggcgccatcgctggacgtgagacacgacgtactggtgatggaagtgccgaagc

SEQ ID NO: 190 - DNA, 367 bp, Glycine max
  Clone ID: LIB3028-054-Q1-B1-A4
ggacggaactctaaaatttctgatttagatagttctccaaaagatgagccccaagaggacattgtcatctcttcctcggtagccaggcctcggtcaaatttccaaagaatgtctcccgttccatcgtttaaaatatcagcatgtctctaacgatgagaatgaaatgactgtagtgccagtaggtactgaggatacagagaataatcacgatcagatatatttgaagcttgatgacgaagctgaatctgactttgaatcggatgttgattcaaaggatgagtttttcttctcaaacatatggatggctgaattgtctgaggatgatgattctgagcaaacctataatgatgagagtgtggaagagcag

SEQ ID NO: 191 - DNA, 362 bp, Glycine max
  Clone ID: LIB3028-054-Q1-B1-A7
agcagctcatctacagtagacatcttatcctccaattcgagtaacaaagcaccagtttcctcgttggatggtctctcatctctttcactttctacaaaaacaacttcaaatgctgctcctatgatggatttattggatggatttgcccccatcccgccaacaggttgtaaactttgtttagcatttgggcattgtcattgaatgaaatatagtcaaagtattgaattcttgtcctttcttatcttgagtagaaaacaatggaccggtttatccatctgtaactgcatttgagagcagctccttgaggttgacattcaatttctcaaaacaaccaggaaacccacaaacaacagttatccagg

SEQ ID NO: 192 - DNA, 361 bp, Glycine max
  Clone ID: LIB3028-054-Q1-B1-A8
gaaattgtgaaggaagtctcttcctacttgaagaaagtaggatacaaccctgacaagattccttttgttcctatctctggttttgagggagacaacatgattgagaggtccacaaaccttgactggtacaagggtccaactctgcttgatgcacttgaccagattagtgagcccaagaggccctctgacaagcccctcaggcttccccttcaggatgtgtacaagattggaggtattggaactgtgccagtgggacgtgttgagaccggtgtcttgaagcctggaatggtggtgacttttgcaccaactggactgacaactgaagtcaagtctgtggagatgcaccatgaatctcttacag

SEQ ID NO: 193 - DNA, 375 bp, Glycine max
  Clone ID: LIB3028-054-Q1-B1-A9
aatggcttccatgagctctctgaagatgatttcttccttcaagctctcccatttaagttgttctatctctcctctttcaacccaaaagcaagtaggttcaagtctctttcaatccttcccaaccaaaaccttaaaattctcagctactcctcaagtatctacatctagaagaagtaccaacaagactacaaccactgcattcttcttcaataaccaaaagcagcatcaagattcatcacagccaaccaaagttcaagagctctttgtctacgaaatcaacgaacgcgaccgaggaagtcctgcatacctcaagctaagccagaagcaagttaactctcttggagacttagtgccattcagcaacaagatatactc

SEQ ID NO: 194 - DNA, 365 bp, Glycine max
  Clone ID: LIB3028-054-Q1-B1-B1
ctcgagccgattcggctcgagctctcacacaaaataatggacaagaagcttggcaacacgtctcatgatcctgaagtgagaaaggggccatggacaatggaagaagacttaatcttgatcacctatattgccaatcacggggaaggggtttggaactctttggccaaggctgctggacttaaacgtaccggaaagagttgccggctccggtggctaaactacctccgtcctgatgttagaagagggaatattacacccgaggaacagcttttgatcatggaacttcatgcaaagtggggaaacaggtggtccaaaattgccaagcatctacccggaaggactgataatgagattaagaactactg

SEQ ID NO: 195 - DNA, 365 bp, Glycine max
  unsure at all n locations
  Clone ID: LIB3028-054-Q1-B1-B10
aagtttttgaaatgttgtcaccccttcttctatttctatgcctaactcttcctttgtttttgttgtccttcttcaaataccgtaaaaccttcaagaatccaccacttccaccaggtcctagaggccttcccataatagggaatcttcatcaactacgatagtcccttctcttcatgagcagctatggcatctctcaaagaaatatggtcctttattttcccttcaatttggattaaggccagccatagttgtttcctctccaaaattggccaaagaggtaatgaaagacaatgaccttgagtgctgtggacgacctaaattactaggccaacaganactaacctataatgggttagacatgggaa

SEQ ID NO: 196 - DNA, 275 bp, Glycine max
  Clone ID: LIB3028-054-Q1-B1-B11
agagaatacaccaaaacccaacatgaaaacccttaacaaagcctcacttattttattccctctcttgttcctttccctattcaagcattcccatgctgcaggaatcgctatctactggggccaaaacggtggagaaggcaccttagcagaagcttgcaacactagaaactaccaatatgtgaacatagccttcttgtccacttttggcaacggccaaactccacaactcaaccttgcaagtcattgtgaccccaacaacaatggctgcactgggt

SEQ ID NO: 197 - DNA, 352 bp, Glycine max
  Clone ID: LIB3028-054-Q1-B1-B12
caacagcaagcagccgttcttgtgggtgattcgacctgggctaatccatggttcagaatggtttgaaccattgccaagtgggttcctagagaatttgggaggaagaggctacattgtcaaatgggctcctcaagaacaagtgcttagccatcctgcagtgggagcattttgggatcataatggttggaactcaactctagagagcatatgtgaaggggttccaatgatttgtatgccatgttttgcagaccaaaaggtcaatgccaaatatgcaagcagtgtttggagggttggggtgcaattacaaaataagctagatagaggagaggtagagaagacattaaaacactca

SEQ ID NO: 198 - DNA, 367 bp, Glycine max
  Clone ID: LIB3028-054-Q1-B1-B2
ctctgcagcaactatgcctaaccctaaggtcttcttcgacatgaccatcggcggtcaatctgctggccgcatcgtgatggagctctacgccgacgtcactccccgcaccgccgagaacttccgcgcgctttgcaccggcgagaagggcgtagggcggagcggcaagcccctccactacaagggctcgtccttccaccgcgtgatcccgagtttcatgtgtcagggtggcgacttcaccgccggaaacggaaccggcggcgagtcgatttatggcgccaagttcgccgacgagaacttcgtgaagaagcacaccggtcccggcatcctctccatggcgaacgccggtcccggaaccaacggatctcag

SEQ ID NO: 199 - DNA, 341 bp, Glycine max
  Clone ID: LIB3028-054-Q1-B1-B4
catgaaccctaacctaaacccctgagaaatcattgaagttgatacatggcggaagttaacactctggtggtgcggaagccctgttttggtcttccaaacggttgccctcaatgcctatctgcttacatctatctcaaattcgctcaatttccattccaattggacatccatctcaacaaccctcagtctgatcaaatcccttactttgaaattggtgactatgtggcttattacaatgagaaataagggattaattaagtgtttgaagaaagatgttggggttgttgaattggatagtggggtttcttcactccctgagtggatttcaactaaagcaattc

SEQ ID NO: 200 - DNA, 363 bp, Glycine max
  Clone ID: LIB3028-054-Q1-B1-B5
ctgactcactcatcaatggctctgagactgaaccctatccccacccaaaccttctccctcccccaaatgcccagcctcagatctccccgcttccgcatggcttccaccctccgctccggttccaaagaggttgaaaatattaagaagccattcactcctcccagagaagtgcatgttcaagtaacccactctatgcctccccagaagattgagattttcaaatctttggaggattgggctgaccagaacatcttgactcatcttaaacctgtagaaaaatgttggcaaccacaggattttttacccgacccctcctcagatggatttgaagagcaagtgaaggaactgagagagagagcaaag

SEQ ID NO: 201 - DNA, 361 bp, Glycine max
  Clone ID: LIB3028-054-Q1-B1-B6
cggcgttttccactcgaagcacacaccagccataatcgattacacaccgtgataagataagattgaaaagatgtttagggacgtgtcaagctgcaacacgtacaactacggcgaggctgggtattgggacgcgcgctacatccaagagggtggttccttcgattggtaccagcgttactctgctctcaggccttttgttcgcaatttcatccctctttcttccaggattctcatggttggttgcggcaatgctgttatgtctgaggatatggtcaaagatggttacgaggacatcgtcaatattgatatttcttctgttgcaattgacatgatgagaacaaaatatgagtacatccctcag

SEQ ID NO: 202 - DNA, 361 bp, Glycine max
  Clone ID: LIB3028-054-Q1-B1-B7
ccaaaatcttttctaatttgttcataactcaataattctcatcatgggctccttgattgttccaggtgaacatgatcacaaactaaagcttgtttctcttccctttgtatcaaccagtcacctcattcccgtagtagacatagctaggctctttgccattcatggtgttgatgtcaccataatcaccaccacagccactgccgccattttccaaagctctatcgatcgcgaccgtgaccgcggccacgctattagaacccacgttgtcaagttcccatgtgaacaagttgggttgccagaaggagtagagagcttcaactccaacactcctcgggatttggtccacaaaatctaccaggga

SEQ ID NO: 203 - DNA, 321 bp, Glycine max
  unsure at all n locations
  Clone ID: LIB3028-054-Q1-B1-B8
gagcagccaaaggggaggaataataataagcctatattctaaggccggaaaaataaaaaaggaataacaaaaatgtctggaaaggtaattatctcggctgtttctctcatcctggtggttggagtggccataggtgtggtggtggccgtcaacaagaagggcgaggatcccacacttcaatctcaacaaaaatcagtangggttatctgccaaaacactgatgaccagaagctctgccacgaaaccctaagctccgtgaagggcatggacaccgctgatccaaaggcttacatcgccaaggcggtgaaagccaccatggac

SEQ ID NO: 204 - DNA, 361 bp, Glycine max
  Clone ID: LIB3028-054-Q1-B1-B9
ctcgagccgaatcggctcgagggagttgtaaattaagagcatggctgcacaagctcttgtatcatcatcatctcttaccttctcagccgaggctacaagacaaagtcttggaccaagatcactccaatctccatttggcttctcaagaaaagcctcctttcttgttaaggcagctgctactccccctgtcaagcaaggatcagacagacctttgtggtttgcatcaaagcaaagtctttcctacttggatggcagccttccgggtgactatggatttgaccctctgggactttcggaccctgaaggaacaggagggttcattgagccgaaatggctagcatatggtgagataatcaatggt

SEQ ID NO: 205 - DNA, 374 bp, Glycine max
  Clone ID: LIB3028-054-Q1-B1-A12
aaaactttctgactttggtcttgcgaagcttggtcctgttggtgacaaatcacatgtttctacccgtgtcatgggaacttatggttactgtgctcctgagtatgctatgactggacagctgactgtgaagtctgatgtatatagttttggggtggtcttcttagagctgattactggccgtacaagcaattgacagcacccagccgcagggagaacagaaccttgtcacatgggttttcctctattctttctcttgtcattttaattagtttggcaagcataaactaactgcagttttatatgtatgtttgtgcaggcacgtccactttttaatgaccgcaggaagttttcaaagttggctgatcccaggctgc

SEQ ID NO: 206 - DNA, 222 bp, Glycine max
  Clone ID: LIB3028-053-Q1-B1-G2
actcaactttgtaattcgtggagggaatacttttccattacgcacgcactttaattacagacgagaaaattataattaatagtaatacagacagcagcatgcgcccaccggttattctcaaaactaccacctctcttttggattcttcctcttcttcaacaccctgtgatcgcagactcaacactctcgctagacacttcctttccgcaaatggcttctcac

SEQ ID NO: 207 - DNA, 267 bp, Glycine max
  Clone ID: LIB3028-053-Q1-B1-G4
ggagggtgccaatctggtaaagttgtcgatcataattataaggttattggtgttgaagctttgagggtaattgatggatccacttttcatggctcaccgggtacaaatcctcaagctactgtaatgatgcttggaaggtatatgggagaaaagattataaaggaagattcttccataggcggaagtgaagggatcaattgagttcatactttccgttgttccatatttgtgttgttcttcgcaataattctctcacgaatcacaatt

SEQ ID NO: 208 - DNA, 331 bp, Glycine max
  Clone ID: LIB3028-053-Q1-B1-G5
gagttattgacagcatatgactcgcaacgtagggagttgccaccaccagtaattgtgtgggaatggggatggaccaaaagtgctgaaacttggaatggaagagcagctatgcttgctgtgcttcttctgttgtttttagaagtcaccactggtgaagggtttctgcaccagtggggaatattgcccttgtttaggtgagtgagtcctcagctaccctccatggcaatggaatttagttatgcttgtatatgtataccattagcatcatatgcgccttgacggaacgcattcaggagttctcacatgtagtttagacacagtaatttgtgga

SEQ ID NO: 209 - DNA, 157 bp, Glycine max
  Clone ID: LIB3028-053-Q1-B1-G6
tttcgagttgcgccattttcacctgtcctctctctctctctctcactctgtcaccgtgttgcaagtatgaaggactgttggttttttgacaacaatttcaatggtctgtcggatgagagtcttgatgagtgtgattgacaaggagcttttggatttg

SEQ ID NO: 210 - DNA, 253 bp, Glycine max
  Clone ID: LIB3028-053-Q1-B1-G7
caaattagttcattctctttgcgcagttccctacctctcctttcaagatgcagatcttcgtcaagaccctcaccggaaagaccatcacccttgaggtggaaagctctgacaccatcgacaacgtcaaggccaagatccacgacaaggactgaattcccccggagtagcaacgtcgcatcttccccggaaaccacctcaaggacggccgtaccctcgccgacagcagcgtcagaagggattcacccctgcacct

SEQ ID NO: 211 - DNA, 336 bp, Glycine max
  Clone ID: LIB3028-053-Q1-B1-G8
cgtgagtcaaacttgcagaaagagctgaaccgatacattcccacggccgcagcatttggaggcatctgtatcggtgctctgacagtgttggcagacttcatgggggccatcggttcaggaaccggaatattgcttgcagtaacaatcatctatcagtactttgagacatttgagaaggagagagctagtgagcttggcttcttcggtttctaagttctgccaagcaaataatgttggttggtgactccaacgagctctcccacaccccttgtttgagggatcgttatacttgtatgtcgtttaacatcgtccgggaggacattcctagttcgttgt

SEQ ID NO: 212 - DNA, 384 bp, Glycine max
  Clone ID: LIB3028-053-Q1-B1-G9
gttttctgtagcttcaggaattaccttcagtttttatcacttttcttgcatggagcatgggggaggtcattagatattcacattatgctttcggttgtttgggaaattgtccttcttggatgacctatctcaggtacactgcgtttattgtgctgtatcctttgggagtgggtcctggtgaaatatgggctctgtaccaggctcttccagttatactggagaagaatctctatgcagattccttttcaagcctcccatttagttattctgatttccttaaggtataagtaatcaataacccataatctctaacggatctggtacttgacatcacttatttatgggttttttgcttctcctaatgattcggccatttgattccgg

SEQ ID NO: 213 - DNA, 344 bp, Glycine max
  Clone ID: LIB3028-053-Q1-B1-H1
gcagatcttcgttaagaccctcaccggcaagactattaccctagaagtcgaaagctccgacaccatcgacaacgtcaaggctaagattcaggacaaggagggaatccccccagaccagcagaggctgatcttcgccgggaagcagctcgaggacggacgcacccttgctgactacaacatccagaaggagtcgactctccacttggtgttgcgtcttcgtggtggtatgcagattttcgtgaagactcttacgggtaagactattaccctcgaggtggagagctctgacaccatcgacaatgtgaaggccacgattcaggacaaggaaggcatcccaccggacc

SEQ ID NO: 214 - DNA, 295 bp, Glycine max
  Clone ID: LIB3028-053-Q1-B1-H10
catgaatacgtaagttcgggaaaggttttgcaccatacaatggagtgctcatccttgccttatcgcctgggagcagcatcttccatggctctctcatccccatccttggctggcaaggacatgaagctgggctcatcagccccagacgtgggaagggtgagcatgaggaagaccgtcactaagcaggtctcctcaagaagtccatggtacggcccagatcgagtcaagtacttgggcccaatctctggcgagcccccgtcctacctaaccggtgggtttccaccgcgaactatgg

SEQ ID NO: 215 - DNA, 346 bp, Glycine max
  Clone ID: LIB3028-053-Q1-B1-H11
ggaagctttacagaaacttggatccattccatcgagcagattattggcagttgaggtgttatggacaccacagaatgagaacgatactctctcagaacgtgagttacttgaagattacccacttttacggcctttgtaagttgtgaaggtatgcttgtcattctgcttctagccttctagagctatgaactgaaattgggttgtgattgcacaattaaggatcatctccagtagtactgaactaatatcgttaaaactgatgagattgtcctgctactcaatctgcaaggcaattttcagctgcggctaatgacgttgtatcacttatcaaggttcaatattaaat

SEQ ID NO: 216 - DNA, 59 bp, Glycine max
  Clone ID: LIB3028-053-Q1-B1-H12
ggtttcatgtttattgcattgatctagacatttgattttgcaaccttcatggtatgtat

SEQ ID NO: 217 - DNA, 393 bp, Glycine max
  Clone ID: LIB3028-053-Q1-B1-H3
aacatatcaatgggcagtatcatagcagtcttcatgcagcaagcactccagatctggggttcctaaacttgatgcagggttttcgaggagctcaatcatattaacatagtgaccatcttgataagtgcttatctagggcacggatttgaacaatggagcagtttggataaaatgattattcgtttatttgtcattgaaaactgacttggatatttatactcctggatgtttgagtgccatatgagaagcagccttctctgacacaagattcatctgcaaatttaaaatggctagaaacccgtccttctgatcatacgcaaaccatgttggttgttacaaacgtgtggcaatggagaccacataactcagtaagctgtatccatgattcaactc

SEQ ID NO: 218 - DNA, 94 bp, Glycine max
  Clone ID: LIB3028-053-Q1-B1-H4
tgattcggctcgagtaattttgcaagtggggtgttgtaaaatgtacctttgttgatgaatattgagatgtaaaaaaagtctcgacatataagag

SEQ ID NO: 219 - DNA, 382 bp, Glycine max
  Clone ID: LIB3028-053-Q1-B1-H5
ggcaagttatttctctgtctctctctatttgcttctccgttttgaatgaaggaacgtgctgcgtgttttgtttgctgagatgtcacgatttgctgcaactttagggctctgagctggaatttggacttacccttttttcttcttcgagattttctgcactgcttttcgtcccttgattcaggttaatttgcaatgaccgaaccttccaaggtcattcacgttcgaaatgtgggccacgaaatatctgaaaatgacttacttcagctgtttcagccttttggagtcataacaaagcttgtcatgctgcgtgcaaaaaatcaggctcttatccaaatgcaagatgttccttctgcagttaatgctttacaattttatgcaaatg

SEQ ID NO: 220 - DNA, 349 bp, Glycine max
  Clone ID: LIB3028-053-Q1-B1-H6
gcttctagggttttaggttccgtccaattagcggtttctctctctctctcttcagaaatggataacagtagctcagaacagaccgtgcaagatggcaaactctacagaaacctcaattctctcatcgtcgctcatcttcgcgacaacagtctcactcaggctgcaagtgctgttgcttcagcaaccatgactccactgaatgtagaagcccctcctaacaggcttctcgacctggtcgctaagggtcttgcagtggaaaagggcgacatcacaagaggcactggtttcactgctacactgcctctgcctcagacaacagctattgatttcagctctgtgcctgatgtga

SEQ ID NO: 221 - DNA, 385 bp, Glycine max
  Clone ID: LIB3028-053-Q1-B1-H7
gtcccaaagagctaacaagagattcaagaccggcatggctaatgaagaggaacagaaaaaccacctcttcggcatcaaagatctcggtcacaagactctccttcagagtgatgcactctatcagtatatacttgaaaccagtgtctatccaagagagcacgagtgcttgaaagagatacgcaagatgactgcaaaacacccactgaacatcatggcaacaccagcagacgaaggacaacttctgagcatgcttgttaagctcacgaattcaaagaacgccttggaaattggtgtattcactggttactctctgctctccactgccctggctcttccccctgatggaaagatcttggctttggatgtgaatcgcgaatactatgag

SEQ ID NO: 222 - DNA, 192 bp, Glycine max
  Clone ID: LIB3028-053-Q1-B1-H9
aaaaacctccaaaccaactctagttaactccatagacactctctctctctctctacaatggcctcagccgcagccctcagagctttctctctcctccactccatcaccccggcctcctcctcctcctccagctccgcctcccgctcgcacgtgcagctctcctcctcgctccgctcgcgcccgctcgtacgc

SEQ ID NO: 223 - DNA, 87 bp, Glycine max
  Clone ID: LIB3028-054-Q1-B1-A1
gattttcagaaatattagtatatatttatatgcatacaatgatgcaaacaaacaggaaccgtttggcagcttaatgcttcaagatct

SEQ ID NO: 224 - DNA, 378 bp, Glycine max
  unsure at all n locations
  Clone ID: LIB3028-054-Q1-B1-A10
caaaaataacccaaactctcttttaaaaaaaaacccgaacacatagaaacagagaaagtgtgagtatcgccgccgtagccctaccctctcttcatagtattctattgcctttctttaactccctcacttttttcaagtttttgaagcgcttccagtggcgtatttacggttatacccttcttgttatgatagcttccaatcggcgtcagccacagagccgaagctcttggcttccacacatattttcggtgctgtcgattgagatacaaagccgccaagccagccgagccaatcttcaaattcgaactttacccctaccggttaatattctcctcttttaacggctatttcgattcatgcanattcgaagaacaaccg

SEQ ID NO: 225 - DNA, 332 bp, Glycine max
  Clone ID: LIB3028-053-Q1-B1-G11
cgaaaatatttccatgggccggaacattccccctaccttcaagtctaaagagacttacagagttattgtgggagaaaattagtgatcctaaaagtattgctgaggtacttagtcaggtttatgcagatcattcaacaaacgtagataacgttttttcacgcatagttgaaaccacacggcatccagctgctgcagcgtcatttgcttcaatcatgtttgctcctcaaggagaactatcctttaatgacacattatccagatgtcgagcaaacactgtgccaatctgcctcatgtatggaaacgaagatctctgggttcgggccaacttgggg

SEQ ID NO: 226 - DNA, 152 bp, Glycine max
  unsure at all n locations
  Clone ID: LIB3028-054-Q1-B1-A11
agcaggctatccagagcaagaagttgttcatcttagatcacatgactatctcattccatatttgaggaaaatanatgcaactacaacaaggccttaggcaacaggaaccaaattttccttgaaaagtgatggaaccttgacgccatgggcca

SEQ ID NO: 227 - DNA, 383 bp, Glycine max
  Clone ID: LIB3028-053-Q1-B1-D7
gaagtctgaacccatcgccagagaagaaagtgtttagctttctcttacttacatcatcacttgctcgctgtgatattatctaacaaattattcatttcattgttcatactcactcgcacctaactccgccatggcttctcttcccaccactttcgctataaccatatctgcatcctccatacacaaggtggaccactctctggtcaagatcaaaccatacaacttctctctcaatctaaatcgtcaatgggaccatgcgtgcatctttaaccagaaggcctctaacaattcaggctacgtacagtgatggtggaaggcccatcagtgctagtgtatttgttggtgggtttcccttgggaggattaataactggtactcttggt

SEQ ID NO: 228 - DNA, 247 bp, Glycine max
  Clone ID: LIB3028-053-Q1-B1-D8
gttgaggaaatgggaacccttgggagagcgatctacagcgttggtaactggattcgagaaactggacaggccattgatcgtctcggttcccgtcttcagggcggttactacttccaagagcagctctctaggcatctaactctgatgaacatatttgataaggctcctgttgttgataaggatgtatttgttgcgccaagcgcctccgtcattggagacctgcaacttggaagaggatcagccagtt

SEQ ID NO: 229 - DNA, 298 bp, Glycine max
  Clone ID: LIB3028-053-Q1-B1-D9
aatcacagccaagcctcccatgggacttgctcacatagttaagaaggcaattgaaaagggtaggtttgaagagattcttgaccctgtggtcactgattggccagtggaagaggctctatcatttgccaaattaccattgaagtgctcagaactcagcacgaaggataggccaaaccttgcaacagttgtgttgccagagcttaataggttcagcgaacttgaattgacctttacacaatgatgaagttttttacagtagtgaaggtatgatcaatacctatgccgcttgccctcccac

SEQ ID NO: 230 - DNA, 105 bp, Glycine max
  Clone ID: LIB3028-053-Q1-B1-E1
tggatccagacgcgttggcaaaggcattcctggagcactactacagcaccttcgacaccaaccggaacggtttagcgaatccgtatcaggagggttccacgctca

SEQ ID NO: 231 - DNA, 214 bp, Glycine max
  Clone ID: LIB3028-053-Q1-B1-E12
gaagttgttctgcatagagtggaagaaccagcggaagctagctatattcagtccagaggacaattcatggaaaatggtaccagttccgttgacaggaagctcaagcattgattttcgaattgggatactagatgacaagttgttgctattccctctggaagctgaaactgcatttcaaacattgctgtacgatccaaatgcaactctggggtca

SEQ ID NO: 232 - DNA, 280 bp, Glycine max
  Clone ID: LIB3028-053-Q1-B1-E2
cagatatggaaaatatggatgctgatacaaaagaatcaggggatcggcaccttgacacagttgagaggttgaagaagcgaagtgagcggttcaagctcccaatgcctagtgaaaaagaggccctcgtcatcaagaagttagaaagtgaacctctgccttctgccaaaagtgaaaatccagtagtagattcagaagtcagacaagaacgacctgcccggaaaagaagatgggttactaactgaataagaaatctgggggcatcactaggttgccggagagt

SEQ ID NO: 233 - DNA, 221 bp, Glycine max
  Clone ID: LIB3028-053-Q1-B1-E3
atttggaaaaatgagttctggcaatgtgaagccagaagaagaagccctagaaaaggagaatgtaggtgttcctgtccctgaaatttcagaaccaaaagagcagaaggctggaagtaactgcaagggaattgagcagattcctttgtctggggaaaatgaagacgatgtgctagttaatacaaatgggagtgggtccactatttctggtggcaaggcagtcg

SEQ ID NO: 234 - DNA, 240 bp, Glycine max
  Clone ID: LIB3028-053-Q1-B1-E5
ttcagctccttatggagctctcactctctccaacttcacatcgtgttccttccacaattcccactttgaatttcgctaaactatcatccactaaggccacaacgtcccaacctttgttcttacgattttccaaacacttcatctcaactgggttgacccatcacagttacagatcctgctctcatgctgttcctaacacaccccggacacgcatttccatcccggcctgcccttgacttg

SEQ ID NO: 235 - DNA, 81 bp, Glycine max
  Clone ID: LIB3028-053-Q1-B1-E6
atcaaagtttcttcctttctctgccctttgccttctctaaaacatttggtgcctggtaaaccttgttttggcagaaaggtg

SEQ ID NO: 236 - DNA, 276 bp, Glycine max
  Clone ID: LIB3028-053-Q1-B1-E7
ggagtgggtgaggagaatcgagatgatgcagctgcggccgaagattttggcggcggtggagagtgcgtggcggcgggttccgccgtggagggaggcgttttacggcgccggaatgaggccggtgcagttaagccagtttgcggattttcaagcagagtgcctgttagcgaactcgcaaagcacagggagttcacgtggcacaacgccagaccgaactggtgcttttctggcatgatagggccattggttgccacgtcagcatggcgctgtgacaac

SEQ ID NO: 237 - DNA, 139 bp, Glycine max
  Clone ID: LIB3028-053-Q1-B1-E8
ctccccaaaaaaaacaagcagatatataaattaatcaaatactacttcgtgtgggggtgggaaaatgggccactctgaggaaaacagtgatgttgctgccacgcacaatgcaatcgatgattggcttcctgtcactggt

SEQ ID NO: 238 - DNA, 330 bp, Glycine max
  Clone ID: LIB3028-053-Q1-B1-E9
ttttcaacaccctctatgaacctttccgagaaggtgcagattttgttcgcggttaccccttcagtctccgggaaggtgtaccaactgcagtttctcatggtctttggctcaacatcccagattacgatgctcctactcagcttgtgaagccacttgagaggaacactaggtatgtggatgctattttgaccataccaaagggcactttgtttcccatgtgtggaatgaacttggcctttgatcgcgatctcataggagcagcactgtactttggtcccatgggtgatggtcagcctattggacgctacgacgacatgtgggcacgctggt

SEQ ID NO: 239 - DNA, 303 bp, Glycine max
  Clone ID: LIB3028-053-Q1-B1-F1
gtgagttcaaagcaaacaaatactaagaccatataaggaaggaggaaggaacgaagctgaatctgaatctgaatcggaatcgctttgtctttgaaattcgcactctctctctctctctctctctctctctctctctcgtgtctctatattgagccacttcgaatccgtcgcctcagctgcagatcacatcgagtttcacccgaatgctctttctggactcgagttagatcgagttcttcatacgctgatagtgtgggaggatatacatgaagaacgggatactggaatgcggtgtttggcatt

SEQ ID NO: 240 - DNA, 320 bp, Glycine max
  Clone ID: LIB3028-053-Q1-B1-F11
cttcgtctcaaatctcttcgttccttcgattcgttccatttcttccaaaatggccaaagacccagttcgcgttctcgtcactggagctgcagggcaaattgggtatgctcttgtccctatgattgctaggggagtgatgttgggtcctgaccagcccgtgatcctccacatgcttgacattcctccggcagcagagtcattgaatggggttaaaatggaattggtggatgctgcattccctcttcttaaaggtgttgttgccacaactgatgtggttgaggcatgcactggggtcaatagtgccgtgatggttggtggat

SEQ ID NO: 241 - DNA, 265 bp, Glycine max
  Clone ID: LIB3028-053-Q1-B1-F12
ctcttgtggaatgttctagttacatgccactttctggatttcatggagttgtatctggtttcttggttggcattaagcaaagtagaggagctgaagagcttcctttcaataagaggaccccaaagtggttcccatatacaaatgtctagcttgggactgccaggcacgtccggaaagtacaggtgatagcataacctctaaccacatattcaggcacgtaccatcaaccggaatgaggataacaacaggcacaggaaccaagacc

SEQ ID NO: 242 - DNA, 392 bp, Glycine max
  Clone ID: LIB3028-053-Q1-B1-F3
gctgcttctcctatggcaagccaactcaagtccaccttcactaaaactcttgtagctcccaagggcctctctgcctcttcaccactccacctcctgccttctaagaggcaatttagcttcactgttagggccatccaatcagaaaagccaacctatcaagtgattcaaccaatcaacggtgatcccttcattggaagccttgaaaccccagttacatccagccccttgattgcatggtacttatcgaacctccccgccatcaggaacgcaattaagcccactactaacagggatcgaggtgggcctggcccatggctaccttctggtggggccattcgtgaaggccgggcctctgaggaacacccagatcgccgggcaagcaggctctctcg

SEQ ID NO: 243 - DNA, 266 bp, Glycine max
  Clone ID: LIB3028-053-Q1-B1-F4
cgaggtagactatgaaaagattgtccgcgacacatgccgcgaaattggattcatctctgatgatgttggtcttgatgctgacaaatgcaaggtgttggtcaacattgagcaacagagcccggatatcgcccagggtgtgcacggccacttcaccaagcgcccagaggaggttggtgctggtgaccaaggtcaaatgtttgggtatgccagcgatgaaactctcgactacatgaccctcacccatgtccttgccaggaaacttggtg

SEQ ID NO: 244 - DNA, 233 bp, Glycine max
  Clone ID: LIB3028-053-Q1-B1-F5
ccggaagaggaagatttctagtgacgtcaacatcacgatggatcagaaaatatacacatgtgagcatcaccaatgctgttaaatcgaagttcgccttggtcacgatgataagtttgcaagggagaatcatcatatgaactgtgtatacacactcacttctggatatgatggtcgtggtctgaaattctgtgctagtgaagataagccagtgatagtccacgagtcccttgtgc

SEQ ID NO: 245 - DNA, 322 bp, Glycine max
  Clone ID: LIB3028-053-Q1-B1-F6
gaaattacctctaggttgttaggaaggaaaggaggttattctgggacgattgttcttctcacaaactcagccatcggatacattctacaggaacgttcttcatgactatttggtacaaatgatacctcaacataacacctgtgtgtagacactctctgtctgatgtggtgtgctgaatctgcgagactgttttgtgccaactaacatggggacgtgccaggatacgcgaatgttgctcatttatgaagaacggacatctgatggtttgttatacacacttctcgttgtcaatgatttgacattttcggttgttaagtttttg

SEQ ID NO: 246 - DNA, 280 bp, Glycine max
  Clone ID: LIB3028-053-Q1-B1-D5
ggaccagctgtgatcttcaacaccgacaaagcctgggacgaccaatggacttactgggttggaccgtgtgttggagctgcggtggctgcatgccatcatcattacattcttaaagctgctgcactcacagctctccaatcattcatgaccacggcttcattaagtgtctcgactaccgagactagtatctgatctcctgcgtatgacatgcgatgcgcacagtgtcagcacacgactcggaattcctgccgtgccagctgctctcaccactcgtccattc

SEQ ID NO: 247 - DNA, 168 bp, Glycine max
  Clone ID: LIB3028-053-Q1-B1-F8
tacagatgaagatcttgatagaattattgctaaaggagaggaggcaactgctgagctagatgccaagatgaagacatttactgaccatgccgtcagagttaacatggatgacactgtcgagttatatgagtttgacgatgatgttgatgcagccacatggcgattcgc

SEQ ID NO: 248 - DNA, 323 bp, Glycine max
  Clone ID: LIB3028-053-Q1-B1-F9
caagtagttgagaactaagaagaaggaaatggcttcctcaatgatctcctccccagctgttaccaccgtcaaccgtgccggtgccggcatggttgctccattcaccggcctcaaatccatggctggcttccccacgaggaagaccaacaatgacattacctccattgctagcaacggtggaagagtacaatgcatgcaggtgtggccaccacttggcaagaagaagttcgagactctttcctacttgccagacctcgatgatgcccacttggcaaaggaagtcgaataccttctaaggaaaggatggattccctgcttggaat

SEQ ID NO: 249 - DNA, 278 bp, Glycine max
  Clone ID: LIB3028-053-Q1-B1-G10
gggttcacgaatggaagcggatccacgaggaagagagtttacagaggtggaccctctcggatggacatgctacccataagaaggagaagctctacgtatacgagatcgagagtcgtggacctcgtaactggtccctcatcatcaggtccatcccgggccgctctggcaactcctgtaggctttactggtgcacgcagctgtccccttcaggctcgcgcactcggccttcaaccactaatccgacgacaccactatcccggccccatgcccccttcggc

SEQ ID NO: 250 - DNA, 189 bp, Glycine max
  Clone ID: LIB3028-053-Q1-B1-B1
attgtgccctccctctttctagctatttccctctcttaacacaattaacaaagatatatcatatcatatcaactccaaatgatgaaaaatattgggttgtttcttcttgtggtggtggctacttttgtggtggcacccacagctggtagcttttatcacgactttgatctgtcatggggtggtgagcgt

SEQ ID NO: 251 - DNA, 316 bp, Glycine max
  Clone ID: LIB3028-053-Q1-B1-B11
gaggctgcaacactctcaactacactacacgacgccggtttgcattttccaaaccagtcaagctatactattactatagtttcatttcatggagacgcaatcgcatgaagatttacagcaaccgccgccggttacttcaaatgaagctcacagtgatgatgcgtccgaccacagagacgctgagcaaaagcaagatattttgagtactgaagaagttgtgcagattctacaagttgttgcatctacggggaggttctggcatgactgggataagttgaagagtacgctatcggttcagctaccgcaggtacctgtc

SEQ ID NO: 252 - DNA, 287 bp, Glycine max
  Clone ID: LIB3028-053-Q1-B1-B12
caagggcaatggacagtggaggacactacaacccccgcaccgtcgaagaggttttccgggacttcaagggccgccgggctggcatgatcaaagccctcaccactgatgttgaggaattttaccagcagtgtgatcctgaaaaggagactttatgtctgtatggattccccactgaagaatgggaagtcaatttgcctgctgaagaagttcccccagaacttcccgagccagcagtgggcataaactttgctagggatgggatgccagacaaggactggcgatcttta

SEQ ID NO: 253 - DNA, 71 bp, Glycine max
  Clone ID: LIB3028-053-Q1-B1-B2
cgcaagcaaaaagacagaatcccaggcgaggagaaagatggaggggaaggagcacgatctgtcattgggag

SEQ ID NO: 254 - DNA, 87 bp, Glycine max
  Clone ID: LIB3028-053-Q1-B1-B3
caacaatacacacaactaacatataattaaatatcacatacttttgttgctttcattttaatcatcacgaacgaagagatgtatttg

SEQ ID NO: 255 - DNA, 240 bp, Glycine max
  Clone ID: LIB3028-053-Q1-B1-B5
gtttgaatcgctacctctccacacagctaatgcatgtccttataaaatggcggccgcagtgaaacacttccgtctgtttcttcaccagtggtctcactgtagctctcgtcaccgcatcatgtgaagtccgaatgagatgctacggatgctggcagtgattttcatcgacctcaaccaggggtacccagggaaccattgatcacgacacagaaatcgcagagtgtcaatgaagcacaggtt

SEQ ID NO: 256 - DNA, 241 bp, Glycine max
  Clone ID: LIB3028-053-Q1-B1-B6
gctgccaccacagccatgacaacaacggcatgaaaggcagtgacattggtattgtcatacttgatctttaccatacgattctcagactatcatggcagtggaccactcgtcatagctacggggatcatactgatgacgctacatgactgctggttgtgtttttctgcgacctcgacgtgctgtacccctggtaccatgaacctcgatgcagcaaccccagagtgtcaatggttcgctggtt

SEQ ID NO: 257 - DNA, 389 bp, Glycine max
  Clone ID: LIB3028-053-Q1-B1-B7
gagagagaacttcaagtgagggtgagagtgacacaaatctagagagagcactagtactctaaaagtctattatattcttcaaaatatgaccatgcatcgcgagtcttgggcttttgtcttcggcgttatgggcaacatcatctcctttggagtgttccttgctccattgccaaccttttaccaaatctacaagaagaaatccactgaaggtttccagtcacttccttatgttgttgcactgttcagtgcaatgctttggatttactatgctttcgtgaaaagggaaactgccctccttctcattaccattaacacatttggaattgttgtggagtcaatttacctttctatcttcctaatttatgccccaaggaagccaaggcttacaa

SEQ ID NO: 258 - DNA, 142 bp, Glycine max
  Clone ID: LIB3028-053-Q1-B1-B8
gaataaactctctgggcccattccggtgagtctgtttagttccggaatcagtgacttacacctgagccggaacgccttggagggaaacataccggacgcgttcggcgtgaggtcgtacttcagctgttctggatttgtcctc

SEQ ID NO: 259 - DNA, 360 bp, Glycine max
  Clone ID: LIB3028-053-Q1-B1-B9
caaatcttttcaaccaacgaaggagaaccggtctgccgctgaagcttgtaattgggggagtctttttcttgatgcctctaatccgtgtgcatgattatattattgttatagcttttgttacttgtgtttaatggaccggtgtagccaattatattcatataatgaggtattggaaactagtccaatcaggatttgagtctagagaataggggattattgtgtaccgatgttgcttaaatgtgaagcattgttcccccgtgtttaatcaggacgtagatggtcatagtaggtgtgttattattccagccatttaccataatgggtgtaccccgtggttatcattttgatcgacattatttc

SEQ ID NO: 260 - DNA, 230 bp, Glycine max
  Clone ID: LIB3028-053-Q1-B1-C1
gaacgaattctggtccagcaaggacatgagaccttcatatcaagttgttttcttgggcaacactccaccgttggcggagataaaggcgaaaaggacttctctggggttgccattgatcttgctagtaatgacaatgcagtcatagatgttgcaattttctcagtagcaattggtggtgtgccaatcgggtcaagtcaacattctcactggggtgcatcgttcttgacacg

SEQ ID NO: 261 - DNA, 114 bp, Glycine max
  Clone ID: LIB3028-053-Q1-B1-C10
cgaggagcgcttccgtagcttcaagaagaacttgctccgcgccaagtcagaccagaaattggatccctccgccgtccacggcgtcagcaggttctccgatcacaggccggcgga

SEQ ID NO: 262 - DNA, 268 bp, Glycine max
  Clone ID: LIB3028-053-Q1-B1-C12
ctcgagccgagaagaacaagtcgttgagaaggaagaaggagacgcaaatggcttcctcaatgatcgcttccccagctgtgaccagtgtcaagcgtgccggtgccggcatggttgctccattcagtggcctcaagtccatggctggcttccccaccagaaagaccacgactgacattagctccagtgccagcaacggtggaagagtgcaatgcatgcaagtgtggccgccagttggcaagacgaactttgagacgccgtcctacgctgc

SEQ ID NO: 263 - DNA, 345 bp, Glycine max
  Clone ID: LIB3028-053-Q1-B1-C2
aaaaacttgtcgtttaagttttaactctaaaccatggctcttcccctgttcctcctctgcttcatgctctgcatttcactcacacaccaaacgattatgttacccctaacacactcaatttcgaaaacccatttcaacagtacccatcagcttctcaaatctacctccactcgctcagcctcacgcttccaccgccaaactcatcataactccgtagtcgctctcccactttcttcaggaagcgactacaccctttccttcaacttaggctcacacccttctcagtccataaccctttacatggacacaggcaccgagcctcgtgtggttcccatgcgcttcctt

SEQ ID NO: 264 - DNA, 389 bp, Glycine max
  Clone ID: LIB3028-053-Q1-B1-C3
tcttcttctgctgcacccacaaatcaaaaccccccttttccaacccaatttttctccataaaccctagattcaacgaacccgccgaccaagctcgaacctcacgtcgcaaaaaaacacttcttttcccctctccgaggttgtcgtgtcggagcatagccatgttgttccctcgaggaaattgatgatttttcataacattggggtctcgttttgcttgtggggtcaccttgaaggagggaaaagtaacgagctttggggctgaatcgtggtgggtctgttgagtatgcatagatctggagctacgatggcgtggaacgtgttcaagttctgcactgctctgcgtggattgggctcgatcatgattctgttgggtcctggcgttggtggg

SEQ ID NO: 265 - DNA, 178 bp, Glycine max
  Clone ID: LIB3028-053-Q1-B1-C4
tgcgagcgtaaggttgaggagaagagatggtgggagcacggccacgggacatacatgacttgcccaagaacgccgccaactacacagcgcttacgccgttgtggtttctagagagagctgctacggtccatcccaccagtagagctccctcatgccacgatgtcgtcgctgctcgtgg

SEQ ID NO: 266 - DNA, 370 bp, Glycine max
  Clone ID: LIB3028-053-Q1-B1-C5
gaagcattgtgtcagaccccacgtactacccagttagattcgacaacaaagcttacttggcacgtccatggaagaatttctcaaggaccatcttcatggactcctacattggtgatttgatcacacctgatggttacatgccatggcaaacattggagggttttagtggaatggatacttgtttctacgctgagttcagtaaccgtggccctggttcagacaaatgcaagcgtgtgaagtgggaaggagttaagacccttgattcacatggaatcacatacttctggccacccatgtttctccatggagacgactggattagggtcaccaggattcattactagcctggccaggtcttgcactcgctctg

SEQ ID NO: 267 - DNA, 238 bp, Glycine max
  Clone ID: LIB3028-053-Q1-B1-C6
acctttcttcctactactcccattcccacatttcgacaacatggacgaggacttcgacatgccgacggcggaggcaatgggcgaggacttcgacttcgccggcgccaccggcggcgacctcgacggcagcagcagcaaccccatcttgaaggtcggcgaggagaaggagattggaaaagagggtttgaagaagatactacttcaagaaggtgaaggatgggacactcctgacgttggt

SEQ ID NO: 268 - DNA, 369 bp, Glycine max
  Clone ID: LIB3028-053-Q1-B1-C7
atcaaatcaaagtcattcacctaaaccctatggccgacgaagccaaagccaaaggcaacgcagccttctcctccggcgactaccccgccgcaattcaccacttctccgacgccatcgccttggcccccaccaaccacgtcctctattccaatcgatccgccgcatacgcttctctccaaaactacaccgatgccttagccgatgctaagaagaccgttgaactcaagcccgactggtccaagggctacagccgtctcggcgctgcgcatcttggcctttcccaatacggcgacgccgtttccgcttacgaaaagggactcaaaatcgaccctaataacgagcccctcaggctggtctggccgatgcgca

SEQ ID NO: 269 - DNA, 393 bp, Glycine max
  Clone ID: LIB3028-053-Q1-B1-A9
ctcaagggagcctgacaatccaactaagtcttgcaaggctagaggcgccgaccttagggttcatttgaagaacacaagggaaactgcctttgcaatcaggaagttgcccttggtcaaggctaaaaggtacttggaagatgttcttgcccacaagcaggcaattccattcagacgtttttgtcgaggtgttggaaggacagcccaggctaagaatagacactctaatggccaaggacggtggcctgtcaagtcagcaaaattcattcatgatttgctcaaaaatgctgagagcaatgctgaagtgaaaggtttggatgttgatgcactgtacatttcgcatatccaagtcaatcaagcagagaagcaaagacgccgaacataccgagcccatgg

SEQ ID NO: 270 - DNA, 317 bp, Glycine max
  Clone ID: LIB3028-053-Q1-B1-C8
ggcaaagcaatggcatcgtcactacaagcagcagctactttcatgcaacccaccaagtttttgcagctaaagtctactcaggccatatctaaggcttttggtttggaacctgctggagttaataaggtcacatgctcccttcaggctgatcttaaggacttggctcacaagtgtgttgatgctaccaaaattgcaggctttgcccttgccacctctgctctcgttgtttctggggcaagtgctgaatgagtaccaaagcggctaacctttgacgaaatccagagcaagacctacgtggaagttaaagggacaggaac

SEQ ID NO: 271 - DNA, 212 bp, Glycine max
  Clone ID: LIB3028-053-Q1-B1-D1
gtcggggatggtcatggaggaacacgactcggagaaggtggagatcgtcctcaaaaccattggtcctgcacgaccctctcgcctcctcgttccttcttctatcaaggtgtgtgatttgaggagattaattgctaggaatgacaatttgccaatttacacgttgagtcttatcttacgcggaagtccactgtgcgacaccaactatggagatg

SEQ ID NO: 272 - DNA, 183 bp, Glycine max
  Clone ID: LIB3028-053-Q1-B1-D11
ggctgttcaatacaaaatccctgattatgttcacatatctcaagattgtagacacctcctctctcgtatatttgttgcaaatccgttgaggagaattactattaaggaaattaagaatcacccatggtttttgaggaatcttccaagggagctaactgaatcagctcaagctgtctctctggt

SEQ ID NO: 273 - DNA, 232 bp, Glycine max
  Clone ID: LIB3028-053-Q1-B1-D12
gtttcttacaaggctctactctactgcttcaccttctgctctagaaaattcagtggtgatatatggcttcggcgactctctctgtagccagagcagcccttcaggcaaatgggaaaggcttctctgaattctctggcctccgcagctcaacaggcttccttcccttttccagaacatcttcagaggatttccattccgtcattgccttccagatgtatgcagttggaagcag

SEQ ID NO: 274 - DNA, 202 bp, Glycine max
  Clone ID: LIB3028-053-Q1-B1-D4
tcgagaacttattctctttctcactccaaccacagcattttcagcaccaccaataacaagaaaatcaatataataaattttcttctctgtttcttttttttttttcgcttccgacgacgttaagaacgaatccgtcgtgactaattctttcgatcttgaagatgaagcagctgatccgccggctgtcgcgcgtggccgaatc

SEQ ID NO: 275 - DNA, 392 bp, Glycine max
  Clone ID: LIB3028-052-Q1-B2-H1
aaaacacacaaacctcttcagttcacaaaccacacaacctcttctaatattcgttttctgatctacgcaaggttaaggttaatttgcttctatctacatggacattaacgagatcgatgttccttcattctttctctgccccatttcgttagaaatcatgaaggatccagtgacggtctcaacaggcatcacctacgaccgtgaaagcatcgaaacatggctgttctcgaagaaaaacacgacatgccccatgaccaaacagcccttgatagattacaccgatctcacaccaaactacacccttcggagactcatccaagcgtggtgtaccatgaacacttctcacggcatcgaaaggatcccaacccccaaaccccccattaacacaaatc

SEQ ID NO: 276 - DNA, 381 bp, Glycine max
  Clone ID: LIB3028-052-Q1-B2-H10
gaagggtcgtagaattgagctgaaaacaaggcctgatacccctgatattagtaacctgcaaaaatgtgctgattttgcccatgctttcatgctgggttttgatgtcatagatgccattgctcttttgcgtttggatgagctctacattgagtcctttgagatcaaggatgttaaaacacttcgaggcgatcacttgtctcgtgctattggaaggttatctggtaaaggtggtaaaacaaagttcgccattgagaatgcatcaaagacaaggattgtgattgctgacaccaaaattcacatattgggatctttttccaacataaagattgccagagactctctctgtagcctgatcctgggatctccggcaggaaaggtgta

SEQ ID NO: 277 - DNA, 376 bp, Glycine max
  Clone ID: LIB3028-052-Q1-B2-H12
cgagataactagaaacagtgtgatgaaaatgaaggtccttgttttcttcgttgctacaattttggtagcatggcaatgccatgcgtacgatatgttccctctccgaatgaacactggctatggtgcccgtactccggaggtgaaatgcgcaagttggaggcttgctgtggaagcacacaacatctttggctttgagaccattcctgaagagtgcgttgaagcaacaaaggaatacatccatggcgaacaatatagatcagactccaaaacagttaaccaacaagcttacttttatgccagagacctcgaagtccatcccaaggacacatttgtgttcagtatacatggcaccgtactctctaatattccatactac

SEQ ID NO: 278 - DNA, 364 bp, Glycine max
  Clone ID: LIB3028-052-Q1-B2-H3
gaaatttaagtgaggagctagagaatgatgatgaagtctgctatgtgtgcagtggtggttgtagcacttcttcttctggcggaggtggggcccatggctgaggctgtgacatgcaccccaacagagttgagtccgtgtcttccagcaatcacttccggtgctaaaccttccaatgcttgttgcacgaagctgaagcagcaaaaaccatgcttatgtggctacctcaaaaacgctagcttgaagcagtatgttaactctcctaatgcgcggaaaaaccgttgcttcttgtgggattccctttccaacttggtaattaattaagccttcttataaataaagtgtgggatataaatatatatataga

SEQ ID NO: 279 - DNA, 371 bp, Glycine max
  Clone ID: LIB3028-052-Q1-B2-H4
gtgactagtgccttaaatgggatgtgtgtgggcagtggttcagctctttatagattgttggcctgccacaaccaaaactgtacctcactcactcactcccctttccatcaccaccacacactttcatgtcttgctcttttgattcagtcagaatatgaatcctctgtgctgcattgctccggtttccatcgatcgggaccgccccaaccacgtgctggcaaaatcgcccgctcagtgtcagttaaggctcgatgcgtccatcaggacggtgaaccacgcctccaaatccagctcctccacgcaggattcctccgtcgccgtcgactctgtcaaggccacctccgccgtcccggatttcccggaggaggagg

SEQ ID NO: 280 - DNA, 270 bp, Glycine max
  Clone ID: LIB3028-052-Q1-B2-H5
agggtttgtaactttgtcttttgcttgcgaatctgaatcgaataataatcaatcaatcatcatgtcgtcggcgaagaagatcacactgaagagttcggacggcgaggctttcgaggtggacgaggcggtggcgctggagtctcagacgataaagcacatgatcgaggacgactgcgccgacagcggcatccctcggccgaacgtgacaagcaggatcctgccaaaggtgttcaattacggcaggaaccacttcaaggccgcaaatccgga

SEQ ID NO: 281 - DNA, 383 bp, Glycine max
  Clone ID: LIB3028-052-Q1-B2-H7
gattgaacagatgcagatcttcgtgaaaactttgaccggtaagaccatcacccttgaggtggagtcctccgacaccatcgataacgtgaaagctaagattcaagacaaggaagggatcccacctgaccagcagagacttatctttgcgggtaaacagcttgaggatggtcgaacccttgccgactacaacatccaaaaggaatccactctccacctcgtgcttcgcctcaggggtggcatgcaaatctttgtcaagactttgactggcaagaccatcaccctcgaagtcgaatcctccgacaccaatgataatgtcaagggcaagattcaagacaaggaaggtatccctccagattagcaccgggtgatactttgcgggaaac

SEQ ID NO: 282 - DNA, 297 bp, Glycine max
  Clone ID: LIB3028-052-Q1-B2-H8
gatttccttctctctttcatcaatcaacacaaactaagttcttccttctgttgaaagcgatagcaatggccacgaatccaatcgaagcggggaacggcgacgctgctcccaaccctaacgcgactaccaaatcctccgtgtacctgcaagactcggaggagctgaagcgagtcttcagccgcttcgacgccaacggcgacggcaagatctccgtctcggagttggacaacgtcctccgctccctcggatccggcgtcccgccggaagagctccaacgtgttatgggaagacctttga

SEQ ID NO: 283 - DNA, 387 bp, Glycine max
  Clone ID: LIB3028-052-Q1-B2-H9
caaagcacaaagcaaagctcatccttgagttaaaaaatggcagcagcttcttccatggctctctcatccccatccttggctggcaaggccgtgaagctgggcccatcagccccagaagtgggaagggtgagcatgaggaagaccgtcaccaagcaggtctcctcaggaagcccatggtacggcccagaccgagtcaagtacttgggcccattctctggcgagcccccgtcctacctaaccggtgagttcccaggcgactacggctgggacactgctgggctttccgcagacccagaaaccttcgccaagaaccgtgaactcgaagtgatccactccaggtgggccatgctcggagccttgggctgcgtcttcccggagttgctgtcc

SEQ ID NO: 284 - DNA, 180 bp, Glycine max
  Clone ID: LIB3028-053-Q1-B1-A10
gcaaagatggggaacacggagaagctgatgaaccagatcatggaattgaagttcacgtcgaaatcgctgcagcggcaatcgcgtaagtgcgagaaggaggagaaatcggagaagctgaaggtgaagaaggcgatcgagaacggctgcatggatggagggcggatctacgcggagaaggcg

SEQ ID NO: 285 - DNA, 368 bp, Glycine max
  Clone ID: LIB3028-053-Q1-B1-A11
atttgcagaactttgtttcccaacctccattgcctccgcttctacctcgctaccatgatcattcctgagaagaaccgcaaggagatctgcaaatacctcttccaagagggagtttgctttgcgaagaaggacttcactttggcgaagcaccctgagattgacgtgccgaatctgcaggtgattaagctgatgcagagtttcaagtctcgcgagtatgtgagggagacttttgcttggatgcactattactggttcctcaccaacgatggaatcgagtttctcagaacttaccttaaccttccttccgaaattgtccctgctactttgaagaaacaggccaagccacctggcacgccctttggcggccc

SEQ ID NO: 286 - DNA, 300 bp, Glycine max
  Clone ID: LIB3028-053-Q1-B1-A12
gaaatttaagtgaggagctagagaatgatgatgaagtccgctaagtgtgcagtggtggttgtaccacatcttcttctggcggaggtcgggcccatggctgaggctgtgacatgcagcccaacaaagttgagtctgtgtcttccaacactcacttccggtgctataccttccaatgcgtgtagcacgaagctgaagcatcacaaatcatgcgtatatggctacctcaaaaacgctagcttgaagcagtacgtcaactctcctaatgcccgaagcaccgttgcctcctctgggattcccttt

SEQ ID NO: 287 - DNA, 336 bp, Glycine max
  Clone ID: LIB3028-053-Q1-B1-A2
ctcgagccgaatcggctcgagaccaaatcaaagacacctgagccattcaattcccctcctttattgctttcaagtttcaacactaattttattatctgaaaaaatggctttcaaagtttcgtttttccttgcacttgttctagtttccaatatcctcctccttgatacaacagctgctggacgcagcattggcgaaaactccaactcagaggaaaagaaagagcctgagttcttgttcaagcatgaaggtggggtgtatattccagggattggacctgttggatttccacatagatgtcatctcagacctcaaaatcgattacctggtggcaatgg

SEQ ID NO: 288 - DNA, 385 bp, Glycine max
  Clone ID: LIB3028-053-Q1-B1-A4
tgcttcaccgtacccgaaccctcccctgcattaccctcagtaccattaccccggttactatccttcggtgccacctcccatgcctcatcatcctcatcatcaccatcatcaacatcatcatccacacatggacccggcgtggattcaggggcgttacccttgtgggcccatgatgcctaaccctgcacctttcgttgagcatcagaaagccgttaccataaagaacgatgtcaatatcaggaaagagacccttaggctcgaacccgatgaacaaaattctggccacctcctcgtttcgttttccttcgatgccaccgtttctgggagcattgccatatatttctttgcaaaatgaaagttgaaggtgcatcctcacaccaatgaa

SEQ ID NO: 289 - DNA, 366 bp, Glycine max
  Clone ID: LIB3028-053-Q1-B1-A5
gaggtttcaaactcaaccaatctgaaacccccccattacaaattgcagaggcagaatctaaagtgtatctcccagatcttggcaagggcttggggtgtgtggttcaaacaaaggatggaggctacttgacatctacgaatcctttacataatgctgtggctagaaatgagactccaaagctagccatgcagatgtcaaagccttatgtgttggcatcaaatcagtccccaaatgggttagagttgtttcagaaattggctggcattggtcttgatgaactcagctgtcaagttttctccatgatgcccctagattaactgataggtaaaactgctgaacagaatgcctttgaaggcattgcttctg

SEQ ID NO: 290 - DNA, 388 bp, Glycine max
  Clone ID: LIB3028-053-Q1-B1-A6
attcagcaagtgcgttttggaagcagagaccgaaatacttcgagatggcccgtacaaagcaaactgctcgtaagtcaactggaggaaaagctcccaggaagcagcttgcaaccaaggctgcacgtaagtctgcaccaacaactggtggtgtgaagaagcctcatcgttatcgccctggaactgttgctcttcgtgagattaggaaataccagaagagcactgagctcctaatcaggaagcttcctttccagaggttggttcgtgaaattgcccaggatttcaagactgatctgcgtttccagagccatgctgtgcttgcattgcaagaggcggctgaggcataccttggtgggctctttgaggacactaacttgtgtgccattcacgc

SEQ ID NO: 291 - DNA, 348 bp, Glycine max
  Clone ID: LIB3028-053-Q1-B1-A7
ataatgccccatttttctctctcccctctctcctgtgcaccttctcctctcccacctcgccgccgaatctttctcgctcctcaccgaaccgccgcatcttccgccaccgacgccgcttcctcttctacttcctcttccgcttcgaatttcgctcccaaagtcgtcgtcacgagagagcgcggcaagaacgccaagcttatcgccgctctggctaaacatgagatcaattgtttggagcttcctctcattgagcacattcaaggacctgatttaggcatgcgtccttctgtactaggtgacaatgcatttgattgggttgtgataacgtctccagacgcaggttctgtc

SEQ ID NO: 292 - DNA, 259 bp, Glycine max
  Clone ID: LIB3028-052-Q1-B2-G6
attttcctttgtaatggaaagttagaaaccctcatcgtcaaagcacgcgttttttttaatcgcgctctcccaacaaatatttgtgggtagattcaattcatcatgtcgagcttatcggggtacgctgaattttccgggcagaaaccggcgaagtcgccggagaaatcgagcttctctcagacttgcagtctgttgagtcaatacatcagggagaagggtagcttcggcgatcttaccctccgaaagagatcaggtgggt

SEQ ID NO: 293 - DNA, 326 bp, Glycine max
  Clone ID: LIB3028-053-Q1-B1-A8
gccaatttcaagatgaaaagcttgcagcgagaatttgtcagaatggttgaatctgggttccgtccggatattacgacctttaatattcgtgctctggccttctcaaggatggctttgttctgggacctccaccttagcattgaacatatggaacatgagaatgtcattcctgatctagtgacttttgggtgtgtagttgatgcatacttggatagaatgcttggaagaaacttggattttgctctaaacatcatgaacttggatgattctccgcgattattaacagattcttttgtgtatcaggccttatgtaaatgggactttca

SEQ ID NO: 294 - DNA, 389 bp, Glycine max
  Clone ID: LIB3028-052-Q1-B2-D9
aaaatcttcaggaaaaagtaaagacaaaaactgaaattcctgaacaactccacctttgtaggagttagttttatctttgttggcctatcctttctttccttcaaaaaaaaaaaaaaaaaacaccaaccctttaaactctccaatcaactactccaaaaatcaagagcaaaatcaatagaaagaaaaggaaacaaacaccaacaccaacacctcatacacttgtctgtcataaggtgatctcctttagtgagaattgagaagccaagccactcaattcatcaccttctccctctccttttcaaggaaaaaagaaaaaagaaatcatcaattccaatggaggtttcatgcaaaattttgagaagatcaattcacagttttcttcaaaacta

SEQ ID NO: 295 - DNA, 353 bp, Glycine max
  Clone ID: LIB3028-052-Q1-B2-E2
aacaactaatggaaacagcagatgcagaatggtagtcaaactatctgacaacatgcggaatgttaccacttccatgttttttgttcgcacaagaagttcatatggagtgcaaccactgattgtaagtaggcagcagattcaaaatcaggttgttaggccattccttgactgttgcagagtactgtcaatacgttgttgaggtgacttaccactgtgatgaaacacacatcctttctgaatagatttggttgtttccatgacactacaccatgccaatgagttcaggtggaaaaactgtagatacgattcatggacttcagaaatcagaacatagacttaccattttggcaaaa

SEQ ID NO: 296 - DNA, 331 bp, Glycine max
  Clone ID: LIB3028-052-Q1-B2-E5
ctaaatacaattaactaaaccaacaaacgcaaactcaattcctggtttattcgaaggcacgaaagcatacagaacagaatatgggggcttgctactcttccgtccagaagaaaatgccattcgcatgaagactggtgcccaacgaatgtgcatggcatcgccttccattgatcattttgttgatgctttcaagcaaactgtcgtggctaatatgcgttgggttcctccaccgggcaaaggactcttgtaccttaggcctctgctcctaggacctggtccggttttgggtttggctcctgcatctgaacacaccttcctcagagttgcttcc

SEQ ID NO: 297 - DNA, 380 bp, Glycine max
  Clone ID: LIB3028-052-Q1-B2-E7
cactctcattttccggtttcactcttctaaaatggcgaatctagcacgcttctccaagagagccctaagaagcgcacacgcgctagcaaggccccacgtgcagcctcagctgctgacagcagaacgcgctttttcgacggatgcgccgacatcgattaccccgtcggcggatcgcgtgaagtgggactaccgtgggcagaggaagataatcccgttggggcagtggctccccaaagttgccgtggatgcttacgtggcacccaacgtggtcctcgccggccaagtcaccgtctgggacggagcctccgtctggcccggttgcgtcctccgcggcgatctcaacaagatcagcatcggattcggctccaacgtccaggaac

SEQ ID NO: 298 - DNA, 383 bp, Glycine max
  Clone ID: LIB3028-052-Q1-B2-E9
gacagttgccatgccctatgtatttagatatttggctgccgagttagcagcaatgaatataaaaatgactcttaagctcagtgatggagctggagccggagcctgatatgttatacttaaattgattggatgtgttaagtttgtgatttgtatcacaacaggaatgttcaatggaggctcagatgcttgctcacatcatggggagttaaaaaatttccaggccatgcattcatatatgtgacatcacagactaatctgaattgctggctgcttttaacagatcctgatagtcgtgcaaggattgaagttagtcatgtgaaaatattgtttaatggattcaaatggtgggaggagataggtagattttataatgtcgtaaattg

SEQ ID NO: 299 - DNA, 339 bp, Glycine max
  Clone ID: LIB3028-052-Q1-B2-F10
gttgatccacaagtcgttacagcgctcgcaacttgtcatggacgcagcaacgggtgttggagtttgtgtcttcctattaatttcttacatggcgttcttaatcaaacgggctacagcaggttctgctcgcaagccaccggcagcatccggtggctggcctttgatcggtcatcttcacctcttgggtggctccggtcagcctctttacgaaaccctaggaacgttagcagacatgtatggcccaatattcatcatcctaattggtgttcaccctgccgttgtggtgagctcttgggagttatcaaaacagtgtttcaccactcctgacgtcaatgtctc

SEQ ID NO: 300 - DNA, 381 bp, Glycine max
  Clone ID: LIB3028-052-Q1-B2-F12
ggttatattccatggaacccaattgaaccaaacacacaggattgctacttcgctgagtttggcaacactggaccaggttccgttgctcaagcaagagccaagtttggcaaaggtctcattagcaagcaggaggctgcacaattcactgctgagccttggctccaagctagcacttggttgcctgctgctggcgttcctttcgatgctagcttcaccaaagcttaaggatccgagacaaaccagcatcttgagtgttataatctcttttttagcctacctaaattaataaaactataaacaggaaatcgattacctaatttcaatgcagtcacacatagccactccattgtctgaggagctgatttgtaatcattcaataag

SEQ ID NO: 301 - DNA, 305 bp, Glycine max
  Clone ID: LIB3028-052-Q1-B2-F2
gttgagataagtggtactgcttcacaaatacaggctgcccaacagctagtacagagctgcatataggagttcattccaagtatcaggtagtcctggtaggcaccaatggctgcaatcattaccggtgtgatccactccatagacagaaggatgtgcatcttttcttagttgtgacagaagtgttatgtcaagtagataaacttgattcttcatgttcttcaacactttgttcactatgtttgctgctggaggtagacctgctggatatgttgacccagctaatggttcaagttccccactacaac

SEQ ID NO: 302 - DNA, 383 bp, Glycine max
  Clone ID: LIB3028-052-Q1-B2-F5
ctcgagccgattcggctcgagcatctatctctcctctatccttcgtgcccacagtcaataatgtctcttccaactccatcgctcccccttctccgttgcatccattttcacgattccaatccattaaaaatagaaagccaaaaccccatcatattcctagaatcacatgcagtggaaaccaaaacaatccaacaccaaacgctaattcccagggagaacctccagatattgtcggacataggaggaacgttctacttggcctaggagggctttgtggtgctgttactcttaacaacaacaagccttttgcctttgcagctccaatatctcctcctgacctaaacacgtgcggtcgaccagacctacccgcacgtggtaaaccc

SEQ ID NO: 303 - DNA, 180 bp, Glycine max
  Clone ID: LIB3028-052-Q1-B2-F7
agaacactagggaaactgcctttgcaatcaggaagttgcccttggttaaagctaacaggtacttggaagatgttcttgcgcacaagcaggccattccgttcagacgtttctgtcgtggtgttggaaggacaactcaggcacagactcgcagctctactggccagcgacggtggcctgtcc

SEQ ID NO: 304 - DNA, 345 bp, Glycine max
  Clone ID: LIB3028-052-Q1-B2-F8
ggcactgctgcaagtgcaactccaagaagcggagtgcgaagccagcatgtttcaacattcaagagaagcctttttccttccacttttctctttggaattggttcttctgcttaccaggcagaaggagcagcaagtgtagatgggagaggaccaagcatatgggacacctacactagacagcatactgaaaagatttgggatcatagcaccggtgacatgggagctgatttttaacatcgatacaagggtgacataaagataacgaaagaaattgggccggactccttcagattctctatcccatggtcaagaatatttccaaagggcaagggagcagttaacccc

SEQ ID NO: 305 - DNA, 374 bp, Glycine max
  Clone ID: LIB3028-052-Q1-B2-G1
gcagatcaatctctctctctctctcaaccataatagtcatgggtttgaaggaggattttgagcagtatgctgagaaagcaaagactttgccaccgactcaatcaaacgaagacttgcttatcctttatggattgtacaaacaggccaccgttggacctgtcaacaccagccgtcctggaatgttcaacatgagggacagagctaaatgggatgcatggaaggctgttgaagggaaatccaaggacgaagcaatgggtgattacatcattaaggtgaaacagctgctggaagcagctggcttgcctgcttgataacattgtcatgccttgctttctgattctgtgctagaagttcacaacagtttgggaataaac

SEQ ID NO: 306 - DNA, 379 bp, Glycine max
  Clone ID: LIB3028-052-Q1-B2-G12
gattggtgaggtaaacttgaattgaagtgaagaaggagatggctgcaacctcttccttgtgctcatcgaccctccaatcccagatcaatggattcttccttcacaaaacctctctttcccatactccttccctcactttctccaggaggaaaatttcaaccacagtgaaggctacatctcgagtcgacaagttttcaaaaagcgatatcattgtctctccgtccattctttctgcaaacttttcaaaattgggagagcaggtgaaagcagtggaattggctggttgtgattggattcacgttgatgtaatggatggtcgctttgttccaaatattacaattggacctcttgtggttgatgcattgcgccctgtgacaga

SEQ ID NO: 307 - DNA, 219 bp, Glycine max
  Clone ID: LIB3028-052-Q1-B2-G2
ctttcacaccagcgtcgttcgagtacttcaccttctttctctctaagcgcaaaacctcgtactgtttttggccgttaaggatgtcagggaaaggagcgaacgggttgctcacaggcaaaacctccgccgccaacaaagacaaggacaagaagaaacccatctcgcgttcttctcgtgccggccttcacttcccacttggtcgtatccaccagcttttga

SEQ ID NO: 308 - DNA, 403 bp, Glycine max
  Clone ID: LIB3028-052-Q1-B2-G3
gccatgttgactctgggaagtcaaccaccactggccacttgatttacaagcttggaggtattgacaagcgtgttattgagaggtttgagaaagaagctgctgagatgaacaagaggtcattcaaatacgcctgggtgcttgacaagcttaaggctgagcgtgagagaggaattaccattgatattgcattatggaagtttgagaccaccaaatactactgcactgttattgatgctccaggacatcgtgatttcatcaagaacatgattactggaacttcccaggctgattgtgctgtccttatcattgattcgacaactggtggttttgaagctggtatttccaaagatggacagactcgcgagcatgctctacttgccttcacccttggtgtcaagcaaat

SEQ ID NO: 309 - DNA, 149 bp, Glycine max
  Clone ID: LIB3028-052-Q1-B2-G4
catgtcacagccatcccgtgcggttctcaaactttgcacagtgaatggacaacattttgaggagatcaaagtcgatttagccaaacgtgagcagttatctcgcgaagttcgaacggttaaccctttacggcaagtctctgccagtgttg

SEQ ID NO: 310 - DNA, 365 bp, Glycine max
  Clone ID: LIB3028-052-Q1-B2-D8
ggatgaagaagattcagagggaagaactgctttgcattttgcctgtggatatggcgaggtaaaatgtgctcaagttctcctcgaggctggagcaaaagtggatgctttggataagaataagaacactgctctccattatgcagctggttatggcagaaaggaatgtgtggcccttctccttgaaaatggtgctgcagttactctccagaatatggatggtaaaactccaatcgatgttgcgaagctaaacaatcaaaatgaagtcctaaagctacttgagaaagatgcttttctgtagttgtaatgcatgatgccatgctgttaccaacaagcaaagggggaaactgaagggaagaaggcatggt

SEQ ID NO: 311 - DNA, 392 bp, Glycine max
  Clone ID: LIB3028-052-Q1-B2-B3
ggttgatgtatgcaatcggtgggagctcagggccaacaattctgagccaaggaaaccgtttcattgctccgaacaacgacaacgccaaggagatcactcacagggactacgccggacccgatgtgtggaagaattggcagtggcaatcagaaatggaccttttcatgaatggtgcaaagttcgtcacttcaggctcacccatcaagatgacatacaaaaagggtctcatcatgaagccaagagatggaactcatgtcagcaggttgacacgacatgctggtgccctaaactgcttcgttggcaagccttgttagagaacaacaaacattaatgttgttgttgttgttcgctttttcctttttttttttggcaagaaaaagaaaaccacattg

SEQ ID NO: 312 - DNA, 354 bp, Glycine max
  Clone ID: LIB3028-052-Q1-B2-B4
aataatagcaaaatagacaccattaggttttcattctctttctctctctctctgattcgatcgatttcgattgttgaattcatcccatcgtggagccttcaaatttgtagttgaacaacgatggtgctgccgctatttgctgctttcattcgcctttttgcttttaatccgaatggattgttagcagttccttccaacgtccccgcattcctttggtcagcacattatgaactggcctctgaaaatggattgaaggaatctgtaaattaccaagtcagttctccaaaagatctaacagaatctgttttttctgaagcaggctggtcaaattttctggtgcaaatggaaagaaac

SEQ ID NO: 313 - DNA, 396 bp, Glycine max
  Clone ID: LIB3028-052-Q1-B2-B5
aaatgatcccaagtttgatcacattgacatcaatgagaaacaaaaggtcttaaatgaatgtgtggaagctgagaactggctcagggagaaaaaacagcatcaggactcgcttccaaaatatgccacccctgtacttttgtcagctgacgtaagaaagaaagctgaagctgtggacaggttttgtaagccaattatgacgaaaccaaagccactgccacccaagccagctacaccagaagcaccagcaaccccacctcctcagggtggtgagcagcagcaacaaccacctcaggagaatcctaatgccagtactaatgaaaatgctggggacaatgctaatccagccccgccaccagcatctgctgaagcaatggagactgacaaaccagagaacac

SEQ ID NO: 314 - DNA, 365 bp, Glycine max
  Clone ID: LIB3028-052-Q1-B2-B7
gtccattattggcacgaagctagcagcagaggagaagaatcagaatttagaaggcatggctgaaggaagaagcgaagaagacaaagacgacagaaccatgaagcgccttcttctcacgagaaactgtctcttactcaccatcggcacctccggtgggcccctcgtcatgcgtctctacttcctccacggcggccaccgcgtctggctctccagcttcctcgaaaccgctggcttccccctcatgctcctccccctcgccgtctcctacctccgccgacgtcgcaccgcctccgccgccggaatcgccaaaccgaaattaatctcaatgaagcctcctctcctcgccgcctccagcttcatcggaa

SEQ ID NO: 315 - DNA, 322 bp, Glycine max
  Clone ID: LIB3028-052-Q1-B2-B8
tcttaagaatcctgttgtcacagagattgcagagagattggggaagataccagcacaagttgcccttcgatggggcttgcaagcaggtcatagtgtgcttcctaagagcactaatgagtccagaatcaagggaaattttgatatctttgactggtctattcctcaagatttgatgaccacgatctctgaaattaagcaggaaaggctacttaaggccagtttttttgttcacgagacctatggtgcctataggagcattgaagacttctgggatggtgaactctgagcaatatgcatctttgagacgttgaaaaatacattg

SEQ ID NO: 316 - DNA, 263 bp, Glycine max
  Clone ID: LIB3028-052-Q1-B2-C1
gtgttgtacaaggggcaattttttcaaaacctttttctctctcgcaacctcacctcgtcctccttcaatctctttcggaatttcccaaaatccttagtgggaggaagagatggttctgactcagaagcttcacgaagccttcaaaggcaccgtcgagaggattattggcccgcgaaccgtttccgccatcagagaaaaaggagttctcactgtcgctgacttcatcaccgctggtgataattccggtgccacatgctcgccgt

SEQ ID NO: 317 - DNA, 251 bp, Glycine max
  Clone ID: LIB3028-052-Q1-B2-C10
gtcacacctcccagatctacgccatcaggcagagcatacccaaggctctcgtcgcttacgaccagaagtacgtcgacgagcagtccaagaaggagatcaaggacatcctcgtcaggtacgaccgcaccctcctcgtcgccgatccccgccgctgcgagcccaagaagttcggtggtcgcggtgctcgcgccaggttccagaagtcctaccgttgatttcagccgtttttcttaagcgattcatcagaagtt

SEQ ID NO: 318 - DNA, 176 bp, Glycine max
  Clone ID: LIB3028-052-Q1-B2-C11
gtgtctgcggacgacaaaaccactggacagaagaacaagattacgcttaccaaccacaatggcaggctttctaaggaggacattgagaacatggtgcacgaagctgagacatacaggtctgaggacgacgagcatacgaagaaagtggaagccaaaaatccattggaaaattatgc

SEQ ID NO: 319 - DNA, 383 bp, Glycine max
  Clone ID: LIB3028-052-Q1-B2-C12
ggcggctataggttctctcaatgttccacgttctgcttcttcccgttcatcctttgtgggaagaaaaagcgttccacgcagcctttccttctctgcatcacaactttgtggagacaagattcccacagattcagttttattggcaccaaaaataggtcgcagtccagttatcgttactcctaaagcagtttctgattcccaaaactcacaaacgtgccttgatcccgatgctagcagaagtgtgcttggcattatacttggaggtggtgctgggactcggctttatccactcaccaagaagagggcaaagccagctgttcctcttggagctaactataggcttattgatattcctgttagcaactgcttgaatagcaatgtct

SEQ ID NO: 320 - DNA, 389 bp, Glycine max
  Clone ID: LIB3028-052-Q1-B2-C2
ctcgagtccaaagtctcctcctacccaaaatggatgcaagggcatcatcttcttcagcttcctcgattcttttccttgcagcaattgtagctgcttatttctagtcatcagaagcagctgtgtccaaaggatcttttgaggacaatttcagcataatgtggtctgaggaccattttactacctctaaagatggacagatctggtatctctcactagacaaagacacaggatgtggatttcaaacaaaacaacgctacagatttgggtggttcagtatgaagctgaagttggtagcaggtgactctgctggtgttgtgacagcttattataggtgctcagaaaatggtgcggggacagaaagagatgagcttgattttgagtttttgggg

SEQ ID NO: 321 - DNA, 380 bp, Glycine max
  Clone ID: LIB3028-052-Q1-B2-C3
taatccctctttcttcctcttcctcagtagtgcgattttcgattcacttctctgcaactatgcctaaccctaaggtcttcttcgacatgaccatcggcggtcaacctgccggccgcatcgtgatggagctctacgccgacgtgactccgagcaccgccgagaacttccgcgcgctctgcaccggcgagaagggcgccgggcggagcggcaagcccctccactacaaaggctcgtccttccaccgcgtgatcccgaacttcatgtgccagggcggcgacttcagcgccggaaacggcaccggaggcgagtcgatctatggcgccaacttcgccgacgagaacttcgtgaagaagcacactggtcccggcattttctccaag

SEQ ID NO: 322 - DNA, 385 bp, Glycine max
  Clone ID: LIB3028-052-Q1-B2-C9
caaattagttcaatctctttgcgcagttccctacctctcctttcaagatgcagatcttcgtcaagaccctcaccggaaagaccatcacccttgaggtggaaagctctgacaccatcgacaacgtcaaggccaagatccaggacaaggaaggaattcccccggatcagcaacgtctcatcttcgccggaaagcagctcgaggaccggcgtaacctcgccgactacaacatccagaatgagtcaaaccttcaccgtgtccttcgtcaccgtggaggcatgcaaatcgtcgtcaagacgcccactggcaaaaccataaccctagacgtccaaagctctgacaccattgacaacgtcaaggccagaatcaggacaagagggaatccccc

SEQ ID NO: 323 - DNA, 383 bp, Glycine max
  Clone ID: LIB3028-052-Q1-B2-D10
caaaagctgaaatggagtccttactttggtgcattggccttaggcagaagacatgtatttctaatgaaggatccaagtttcatcgacgctgttgattgcacatttgacatgtggtggcagacttaacattggcataggtacagtgctcacaagaccaatgattatcatcagtcattctgcctaaggccaatgcaccaaaagctgaaatggagtccttactttggttatatcatatgctggctcctttttgtaatgctatttactgtgaaaggggcttaagtcgcttaagaagggttatcctgcttgcactcctattgaatacatcccagtttaatgtatataatgttttatcagtaagattttcgtatggggtttctgcaaca

SEQ ID NO: 324 - DNA, 387 bp, Glycine max
  Clone ID: LIB3028-052-Q1-B2-D11
cttgaatgaatatgcttattatgctcaggttgctggtttatattacagcataagtcacacagatggtggtttcgaggtgactctccgtggttacaatcacaaattaaggattctacttgaaactatagttgaaaagattgcgacatttgaagtgaaaactgacaggttttcagttatcaaggaaatggtaaccaaagaataccagaatttcaagtaccaacaaccttatcaacaggctatgtactattgttctttgatcttacaagatcaaacctggccttggatagaacagctagacgtacttcctgctcttcaagttgaagatcttgctaaatttgtaccagcaatgctctccaggacctttttagagttttacataccagggaa

SEQ ID NO: 325 - DNA, 382 bp, Glycine max
  Clone ID: LIB3028-052-Q1-B2-D12
gtttgttgatcgagataactagaaacagtgtgatgaaaatgaaggtccttgttttcttcgttgctacaattttggtagcatggcaatgccatgcgtacgatatgttccctctccgaatgaacactggctatggtgcccgtactccggaggtgaaatgcgcaagttggaggcttgctgtggaagcacacaacatctttggctttgagaccattcctgaagagtgcgttgaagcaacaaaggaatacatccatggcgaacaatatagatcagactccaaaacagttaaccaacaagcttacttttatgccagagacctcgaagtccatcccaaggacacatttgtgttcagtatagatggcaccgtactctctaatattccata

SEQ ID NO: 326 - DNA, 371 bp, Glycine max
  Clone ID: LIB3028-052-Q1-B2-D3
tcctgaacgacaccgagaccagacacggtttggggcacagttaaggtggtagcagtagcattgttaggccatatctcctttttttctctgccttgtattgaggtaaaactcacaaatattataactttgatctggggaagcaatggcatggagaggacatctttcgaaaaacataaaagaacttcggtttttgatgtgccagtcatctcctgcaagctcacctgcaagggcttttgtggagaggaattataaggaactaaagacattgaacccaaaattgccaatattaattcgtgagtgcagtggaattgaacctcaattatgggcaagatatgatttgggtgttgagaaaggcatcaaattggaaagct

SEQ ID NO: 327 - DNA, 375 bp, Glycine max
  Clone ID: LIB3028-052-Q1-B2-D5
ctcgagccgaatcggctcgagggaagaagacttgatcttgataaactatattgcaaatcacggtgaaggtgtttggaactccttagccaaagcttctggtctcaaacgaacgggaaagagttgtcgactccgttggctaaactaccttcgtcctgatgttagaagaggaaacattacacccgaggaagagcttttgatcatagaacttcatgcaaagtggggcaataggtggtccaaaattgcaaagcatcttccaggaagaactgacaatgagattaagaacttctggagaacaaggatccaacagcacattaagcaagctgagacttcacaagaacatggtaattcagagaataatgatcatcaagcaagcac

SEQ ID NO: 328 - DNA, 400 bp, Glycine max
  Clone ID: LIB3028-052-Q1-B2-B2
ctttcaactctctctctccccccctctttctctcacacacaaatgtctaaaataacaataacctctccaaaacactgtgctgacaaagaaggactaaaaatcaagaactacaagaagatctacttcactttctcagcatttttcatcacaatcctactactaatacttgttatatggctcatcctccaccctgcaaagcctcaattctccctcaaagaagtcgacatcttccaacttaacctttcaggcccaaacctcaactcctccatccaactcaccctcctctccaaaaacccaaaccagaaagttggcatttactacgacgagattcaactctatgcaacctacaagggccaacagattactggtgatacccctgtgccacccttttatcaaggcc

SEQ ID NO: 329 - DNA, 370 bp, Glycine max
  Clone ID: LIB3028-052-Q1-B1-G10
gcaattacgtactgtgtgggagagaaagagagatggctaagtggtgtatgttggtgttggttcttgctctagctctggctgtggccacaagtgccagagatgcactcgaagatgttggtctcaaggaccagaagaacttcatcagctatgctggagttggtggctattcaggaattggaagcaatggactaccttttggaggtgccggaataggtggtggcaccaccgggataggtggattgggaggattcggaggtcccattggcggtggtactggtggcagtgttggacgtggcgttggcggtggtagcatacctcatcgcaccccttgagtgaatgaacatgcatgcatgcatgcatatggaatttc

SEQ ID NO: 330 - DNA, 371 bp, Glycine max
  Clone ID: LIB3028-052-Q1-B1-G12
gattggtgaggtaaacttgaattgaagtgaagaaggagatggctgcaacctcttccttgtgctcatcgaccctccaatcccagatcaatggattcttccttcacaaaacctctctttcccatactccttccctcactttctccaggaggaaaatttcaaccacagtgaaggctacatctcgagtcgacaagttttcaaaaagcgatatcattgtctctccgtccattctttctgcaaacttttcagaattgggagagcaggtgaaagcagtggaattggctggttgtgattggattcacgttgatgtaatggatggtcgctttgttccaaatattacaattggacctcttgtggttgatgcattgcgccct

SEQ ID NO: 331 - DNA, 378 bp, Glycine max
  Clone ID: LIB3028-052-Q1-B1-G9
aaggacagcaccttttttgagagctgtggtgtagctgaccttatcacaacatgcttgggtggaagaaataggaaagttgctgaggcttatgcaaggaatggagggaagaggtcttttgatgagcttgaagcagaaatgctacaaggccagaaattgcagggtgtctcaactgcgagtgaggtttatgaggttctaagccatcgtgggtggctagagttgttccctctcttctcaacagtgcatgagataagcactggcctacttccaccatcggccatagttgaatacagtgagaagctacccaggtccttctaattcaaagcatatttgttgtataagaaaatataaattatagtgacagtatcaaggatatacaaa

SEQ ID NO: 332 - DNA, 357 bp, Glycine max
  Clone ID: LIB3028-052-Q1-B1-H10
gaagggtcgtagaattgagctgaaaacaaggcctgatacccctgatattagtaacctgcaaaaatgtgctgattttgcccatgctttcatgctgggttttgatgtcatagatgccattgctcttttgcgtttggatgagctctacattgagtcctttgagatcaaggatgttaaaacacttcgaggcgatcacttgtctcgtgctattggaaggttatctggtaaaggtggtaaaacaaagttcgccattgagaatgcatcaaagacaaggattgtgattgctgacaccaaaattcacatattgggatctttttccaacataaagattgccagagactctctctgtagcctgatcct

SEQ ID NO: 333 - DNA, 156 bp, Glycine max
  Clone ID: LIB3028-052-Q1-B1-H12
cgagataactagaaacagtgtgatgaaaatgaaggtccttgttttcgtcggtgctacaattttggtagcatggcaatgccatgcgtacgatatgttcgctctccgactgcacactggctatcgtgctcgtactccggaggtgaaatgcgcaagttg

SEQ ID NO: 334 - DNA, 378 bp, Glycine max
  Clone ID: LIB3028-052-Q1-B1-H9
caaagcagaaagcaaagctcatccttgagttaaaaaatggcagcagcttcttccatggctctctcatccccatccttggctggcaaggccgtgaagctgggcccatcagccccagaagtgggaagggtgagcatgaggaagaccgtcaccaagcaggtctcctcaggaagcccatggtacggcccagaccgagtcaagtacttgggcccattctctggcgagcccccgtcctacctaaccggtgagttcccaggcgactacggctgggacactgctgggctttccgcagacccagaaaccttcgccaagaaccgtgaactcgaagtgatccactccaggtgggccatgctcggagccttgggctgcgttctccccgaa

SEQ ID NO: 335 - DNA, 380 bp, Glycine max
  Clone ID: LIB3028-052-Q1-B2-A10
ctgagccccaatctcttgagcagcagaatcttcaggccaagccaggtaagcaagcacaacacaaccccgaaatggcttctgcttctgttcccatggctttctcgctgagctctgttatcaacaacaacaagccttcatccgaagccttcttcaggccactacccctacggcaaccaaagaggaccctcttcaccacaaaggcagtgtcaaactccaaggctcaaatcaatgcatctttgaaggagaaggcagttgcaggactcacagcagcttctgtgacagcatctatggtggttccggaggtggctcatgctgctggatatgagttctccccttccctcaagaactttctgctaagcatctttgctggtgggtttgtt

SEQ ID NO: 336 - DNA, 392 bp, Glycine max
  Clone ID: LIB3028-052-Q1-B2-A11
cagacatcgtaggaagaatactgtcttcgatacgagatcaacaaagttgtgaagatcataatggcaccgaggtaaaacctcaagaagaaaaccagtcaaaggcttcccacatagcccaattccttccaacttctcgacgtattgtccagttttcaaatggcaagggtcctggaccaaatgcaagtattgtatacattgatggggcatttgatctcttcgatgccggccatgttgagatacttaagagggctatggagcttggtgactttcctccagttggtatccactcaaatgagacagtgagtgagcatacaggaaatcactatccaagtaagcatctgcatgagcgtagccttagtgtgttagcctgccgttaagttgatgaagttatt

SEQ ID NO: 337 - DNA, 392 bp, Glycine max
  Clone ID: LIB3028-052-Q1-B2-A2
gtcaaatttgttggaggaatatctggatggacagctacgttactctttatgtggatgccagtttctcaaatgtggacaaattatctcaatcctgagaacatgaaaggcttgtcagctttttctatgctccttgccatgcttggaaatgggcttatgcttccacgtgctctcttgattcgcgatttcatgtggttcactggttcagtgtgggctactcttttttatggatatgggaatattgcttgcctatactatttaaacattatcagcaaggaattcttcttatcagcaaccgttggtctgatttcgtttataggaacagctttctggagagacagcgttgtccatggttacagctcaccttcggcttctttacgtgacctggtttttgg

SEQ ID NO: 338 - DNA, 374 bp, Glycine max
  Clone ID: LIB3028-052-Q1-B2-A3
aagaaaaaaaaaaacccttagccaacacaactatcatggccacctctgctattcagcaatcagcattcactggtcaaactgctctgaagcagctcaatgagttcgtccgcaagaccggtggcgccggcacaggtcgcactaacatgcgccgcaccgtcaagagtgctcctcagagcatttggtatggccctgaccgtcccaagtacttgggtccattctcggagcagattccatcatacctgaccggagaattccctggtgactacggctgggacactgctggattatcagctgacccggaaaccttcgccaggaaccgggaactggaggtgattcacaacagatgggcaaagcttggtgcccttggctgcacc

SEQ ID NO: 339 - DNA, 397 bp, Glycine max
  Clone ID: LIB3028-052-Q1-B2-A4
ccataagccccataggccataccactctcaattctgttctcacatttcctatatatatttgccactctttctgtgagcttctcaacagaaagacacaatgggcaaagaaagtagtacttgtgttcttctatcccttctcattctttcactctttgtggctgaaatatatggaaatagacaagttcaagctcttaacaaactgcacaagtccaccaagttcagaggaaattcacaaattgataggagtgagtttgaggtagaggagcttgcttatgatggcattgttcactctcaagagggtctcaaagagaaagatagaattgagagtcttccaggacaaccccctgtgagtttttctcactatggagggtatgtcactgtggataaagaagcaggt

SEQ ID NO: 340 - DNA, 375 bp, Glycine max
  Clone ID: LIB3028-052-Q1-B2-A5
aaaacactcataacacaaagcacaaagcaaagctcatccttgagttaaaaaatggcagcagcttcttccatggctctctcatccccatccttggctggcaaggccgtgaagctgggcccatcagccccagaagtgggaagggtgagcatgaggaagaccgtcaccaagcaggtctcctcaggaagcccatggtacggcccagaccgagtcaagtacttgggcccattctctggcgagcccccgtcctacctaaccggtgagttcccaggcgactacggctgggacactgctgggctttccgcagacccagaaaccttcgccaagaaccgtgaactcgaagtgatccactccaggtgggccatgctcggagccttg

SEQ ID NO: 341 - DNA, 391 bp, Glycine max
  Clone ID: LIB3028-052-Q1-B2-A6
gtcgaacccctaatggcttctcaagttcttcttcaacaggcactgtttgcccccaagctaagtttcccttcttcttctcgtaacgtcgcgttaatttctagggttccttccaccccaatttcatggcgttgcactcctctcattgctaagcctagtttcgctgtgagagctgactccaacgtcgaaggcgctggtgaagccaccgaggatgttccttcgtataatgttgatgaagtttcggaaggcgaacgagaacaagtttcggattctgaagctccaaaatctcgcagaaaagcccgagtcaagctcggagacgtcatggggatactgaatcagagggcaattgaggcatccgagaagcaaaggcgaactccagacattaggactgggg

SEQ ID NO: 342 - DNA, 124 bp, Glycine max
  Clone ID: LIB3028-052-Q1-B2-A8
gccccatcagagggtaactacaatttgacttgctattgtttgtgtgattcttggatttctgttcgtatcctagttcagctgatatcgtgattaaattgtcatatcatccgaaaatttttatggt

SEQ ID NO: 343 - DNA, 383 bp, Glycine max
  Clone ID: LIB3028-052-Q1-B2-A9
ctcgagccgattcggctcgagttcataacataaagagtatagagcagcaaacgtaaaagtggatccaagaaggctacatggcaagcttccactatcttcacaagcatcagaggagaaagaggacacagtagaagagtttgatgcttataataattatgcatcttggtcttcagaaactgacatgtctgaaatggtttctgctcttgctcaagttatgggaactaccaatcggaacccatacatgccacaatcaacctcctttcctttctcaacttccgtggtcaaagatcaacctcaaccgtacccatctcaacctcctccagatcaagaggtggcaaagaagccacactacagaggagtgaagcagagaccatggggaaatg

SEQ ID NO: 344 - DNA, 368 bp, Glycine max
  Clone ID: LIB3028-052-Q1-B2-B1
ctagtctaagcagaaatggcctcttcagtgatggcatctgtggccctcaaacctgcccctttcactgttgagaagtcctcagttagaggccttccctccctctcaaggaactcctcttcattcagagttgtggccactggtggcaagaagatcaagactgacaagccttatggaattaatggtggcatggctttgagggaaggagttgatgcatctggcaggaaaggaaagggaaaaggcgtttaccactttgtagacaaatacggtgctaatgtcgatggttacagtcctatctacgacaccaaggactggtctccaaccggtgatgtctacgctggcggtacgactggcttgggtatctgggctgt

SEQ ID NO: 345 - DNA, 381 bp, Glycine max
  Clone ID: LIB3028-052-Q1-B2-B12
aaaaaaactgattcatatttcactgtttggacactgcactgttgcaaaaccagtgaagaaaaagaaaaattcctggttttaattgtgtttggcactttggcttccatttagttgttgtagaaattttttaacactatttaactataaattgttacgaaatgttgttttctcatggaaatttactgtcatattgctttcatctttcaatttgttatctgggttgcaatcactgctaatttttattttacaggtatacttcaaggctacagatcctttcaatgagcgctggcaaagtgcttggatcatcactgcattctgggacattctagcatttgcattactctgtgttatatgctatctctgggccccatcccaaagctc

SEQ ID NO: 346 - DNA, 363 bp, Glycine max
  Clone ID: LIB3028-052-Q1-B1-F9
cacccgacaacattggttctctaatgggacttcttggctccatcccggacaatgcatttcaaaagaatccggcagggataaactggaatctcaatcataggattgcatcagttgtatttggtggtttaaaacttgctagtgtgggatttatttcaagcataggagctgtcgcttcatcaaattctctatatgcaattcgtaaagtctttaatccagcagttgtcactgaacaacggattatgaggtcaccaatactcaaaactgcagttatatatgcatgctttcttggaatatcagcaaatctccgttatcagataattgctggggtagtggagcatcggctttctgaacagtttgcttctc

SEQ ID NO: 347 - DNA, 362 bp, Glycine max
  Clone ID: LIB3028-052-Q1-B1-A11
cagacatcgtaggaagaatactgtcctcgataagagatcaaaacaattgtgaagatcataatggcaccgaggtaaaacctcaagaagaaaaccagtcaaaggcttcccacatagcccaattccttccaacttctcgacgtattgtccagttttcaaatggcaagggtcctggaccaaatgcacgtattgtatacattgatggggcatttgatctcttccatgccggccatgttgagatacttaagagggctagggagcttggtgactttcttctagttggtatccactcagatgagacagtgagtgagcatagaggaaatcactatccaattatgcatctgcatgagcgtacccttagtgtg

SEQ ID NO: 348 - DNA, 411 bp, Glycine max
  Clone ID: LIB3028-052-Q1-B1-A9
ctcgagccgattcggctcgagttcataacataaagagtatagagcagcaaacgtaaaagtggatccaagaaggctacatggcaagcttccactatcttcacaagcatcagaggagaaagaggacacagtagaagagtttgatgcttataataattatgcatcttggtcttcagaaactgacatgtctgaaatggtttctgctcttgctcaagttatgggaactaccaatcggaacccatacatgccacaatcaacctcctttcctttctcaacttccgtggtcaaagatcaacctcaaccgtacccatctcaacctcctccagatcaagaggtggcaaagaagccacactacagaggagtgaggcagagaccatggggggaaatgggcagcagaaatccgtgacccaaaaa

SEQ ID NO: 349 - DNA, 409 bp, Glycine max
  Clone ID: LIB3028-052-Q1-B1-B12
aaaaaaactgattcatatttcactgtttggacactgcactgttgcaaaaccagtgaagaaaaagaaaaattcctggttttaattgtgtttggcactttggcttccatttagttgttgtagaaattttttaacactatttaactataaattgttacgaaatgttgttttctcatggaaatttactgtcatattgctttcatctttcaatttgttatctgggttgcaatcactgctaatttttattttacaggtatacttcaaggctacagatcctttcaatgagcgctggcaaagtgcttggatcatcactgcattctgggacattctagcatttgcattactctgtgttatatgctatctctgggccccatcccaaagctctcaaaggtatgcatattcggaggaagtg

SEQ ID NO: 350 - DNA, 401 bp, Glycine max
  Clone ID: LIB3028-052-Q1-B1-B9
cagcacccaaaaggtaaagagcacctggatgctgtatatttgacaggcgactgtgtcaagaaagatattgcttctgcattgtggtgtttccacagagcatcggaaaagggccatgctggggctgctatagcatatggatctcttcttcttaaaggtgttgaggttccagaatcggtaataaagttcagtttgacgagaggtgctgcagctcatagacgggggaggaataagggagctcttgcaattgatccagtagagatggcaagagaaaagtttcagatagcggcaaaagcagggtgtgagcttggattcaaatggcttgcaaggttagaggaggaagagaaacgggcactcacggaggaacattgagatgaaattgagacctttagtgtgcctttttt

SEQ ID NO: 351 - DNA, 355 bp, Glycine max
  Clone ID: LIB3028-052-Q1-B1-C10
gtcacacctcccagatatacgccatcaggcagagcatagccaaggctctcgtcgcttactaccagaagtacgtcgacgagcagtccaagaaggagatcaaggacatcctcgtcaggtacgaccgcaccctcctcgtcgccgatccccgccgctgcgagcccaagaagttcggtggtcgcggtgctcgcgccaggtttcagaagtcctaccgttgatttcctcctttttttttaagctattcatcataagttgttaaagtactttctctgttttattggttctgcgctgagttaagactaatcgaattctgaatacagttatacaatggttaacgttaagttatgtcgttattaac

SEQ ID NO: 352 - DNA, 361 bp, Glycine max
  Clone ID: LIB3028-052-Q1-B1-C11
gtgtctgcggaggacaaaaccactggacagaagaacaagattacaattaccaacgacaagggcaggctttctaaggaggagattgagaagatggtgcaggaagctgagaaatacaagtctgaggacgaggagcataagaagaaagtggaggccaaaaatgcattggaaaattatgcctataacatgaggaacacaatcaaggatgacaagattgcttccaaactgtcttctgatgataagaagaaaattgaagatgcgattgagcaggctatccaatggctagatggaaaccaacttgctgaggctgacgaatttgaggataagatgaaggagttggagagcatttgtaatcccatcatag

SEQ ID NO: 353 - DNA, 355 bp, Glycine max
  Clone ID: LIB3028-052-Q1-B1-C12
ggcggctataggttctctcaatgttccacgttctgcttcttcccgttcatcctttgtgggaagaaaaagcgttccacgcagcctttccttctctgcatcacaactttgtggagacaagattcccacagattcagttttattggcaccaaaaataggtcgcagtccagttatcgttactcctaaagcagtttctgattcccaaaactcacaaacgtgccttgatcccgatgctagcagaagtgtgcttggcattatacttggaggtggtgctgggactcggctttatccactcaccaagaagagggcaaagccagctgttcctcttggagctaactataggcttagtgatattcct

SEQ ID NO: 354 - DNA, 413 bp, Glycine max
  Clone ID: LIB3028-052-Q1-B1-C9
caaattagttcattctctttgcgcagttccctacctctcctttcaagatgcagatcttcgtcaagaccctcaccggaaagaccatcacccttgaggtggaaagctctgacaccatcgacaacgtcaaggccaagatccaggacaaggaaggaattcccccggatcagcaacgtctcatcttcgccggaaagcagctcgaggacggccgtaccctcgccgactacaacatccagaaggagtcaacccttcaccttgtccttcgtctccgtggtggcatgcagatcttcgtcaagactctcactggcaaaaccataaccctagaggtcgaaagctctgacaccattgacaacgtcaaggccaagattcaggacaaggaaggaaatcccccaagacaagaaaggtctcatcttcgc

SEQ ID NO: 355 - DNA, 362 bp, Glycine max
  Clone ID: LIB3028-052-Q1-B1-D10
caaaagctgaaatggagtccttactttggtgcattggccttaggcagaagacatgtatttctaatgaaggatccaagtttcatcgacgctgttgattgcacatttgacatgtggtggcagacttaacattggcataggtacagtgctcacaagaccaatgattatcatcagtcattctgcctaaggccaatgcaccaaaagctgaaatggagtccttactttggttatatcatatgctggctcctttttgtaatgctatttactgtgaaaggggcttaagtcgcttaagaagggttatcctgcttgcactcctattgaatacatcccaatttaatgtatataatgttttatcattaaaattt

SEQ ID NO: 356 - DNA, 379 bp, Glycine max
  Clone ID: LIB3028-052-Q1-B1-D11
cttgaatgaatatgcttattatgctcaggttgctggtttatattacagcataagtcacacagatggtggtttcgaggtgactctccgtggttacaatcacaaattaaggattctacttgaaactatagttgaaaagattgcgacatttgaagtgaaaactgacaggttttcagttatcaaggaaatggtaaccaaagaataccagaatttcaagtaccaacaaccttatcaacaggctatgtactattgttctttgatcttacaagatcaaacctggccttggatagaacagctagacgtacttcctgctcttcaagttgaagatcttgctaaatttgtaccagcaatgctctccaggacctttttagagttttatata

SEQ ID NO: 357 - DNA, 414 bp, Glycine max
  unsure at all n locations
  Clone ID: LIB3028-052-Q1-B1-D12
gtttgttgatcgagataactagaaacagtgtgatgaaaatgaaggtccttgttttcttcgttgctacaattttggtagcatggcaatgccatgcgtacgatatgttccctctccgaatgaacactggctatggtgcccgtactccggaggtgaaatgcgcaagttggaggcttgctgtggaagcacacaacatctttggctttgagaccattcctgaagagtgcgttgaagcaacaaaggaatacatccatggcgaacaatatagatcagactccaaaacagttaaccaacaagcttacttttatgccagagacctcgaagtccatcccaaggacacatttgtgttcagtatagatggcaccgtactctctaatattcatactacanaaaacatggatatggggtggagaaatt

SEQ ID NO: 358 - DNA, 368 bp, Glycine max
  Clone ID: LIB3028-052-Q1-B1-D9
aaaatcttcaggaaaaagtaaagacaaaaactgaaattcctgaacaactccacctttgtaggagttagttttatctttgttggcctatcctttctttccttcaaaaaaaaaaaaaaaaaacaccaaccctttaaactctccaatcaactactccaaaaatcaagagcaaaatcaaaagaaagaaaaggaaacaaacaccaacaccaacacctcatacacttgtctgtcatagggtgatctcctttagtgagaattgagaagccaagccactcaattcatcaccttctccctctccttttccaaggaaaaaagaaaaaaaaaatcatcaattccaatggaggtttcatgcaaaattttgagaagatcaa

SEQ ID NO: 359 - DNA, 313 bp, Glycine max
  Clone ID: LIB3028-052-Q1-B1-E10
aaatgctcccacgtttgatcacattgacagcaatgcgacacacaaggtcttaaatgaatgtgtggaagctgagaactggctcagggagaaacaacagcatcaggactcgcttccaaaatatgccacccctgtacttttgtcagctgacgtatgaccgaacgctgaagctgtggacaggttttgtaagctacctatgacgacaccaagtgccactgcgatccaagccagctacaccagaagcaccagcaaccccagctcctcacggtggtgagcagtagcaccaactacctcaaggagaatcctaatgccagta

SEQ ID NO: 360 - DNA, 263 bp, Glycine max
  Clone ID: LIB3028-052-Q1-B1-E11
gttcccagcttcttccttctgttatcaattattttatttaactttattcgcaccttgctaaattcttaagcttaggctggtgaatttccttttgttcagttatagaaagagaaggaaaatatgatttgactcctgagaaacaggggttgtaccggatcaagaaaaatgttttgaaatcggatggttgttgtgtctaattgtctatagcagctgatattatttattaacataccatttctgctgttgagggtagttgatgaatg

SEQ ID NO: 361 - DNA, 356 bp, Glycine max
  Clone ID: LIB3028-052-Q1-B1-E9
gacagttgccatgccctatgtatttagatatttggctgccgagttagcagcaatgaatataaaaatgactcttaagctcagtgatggagctggagccggagcctgatatgttatacttaaattgattggatgtgttaagtttgtgatttgtatcacaacaggaatgttcaatggaggctcagatgcttgctcacatcatggggagttaaaaaatttccaggccatgcattcatataggtgacatcacagactaatctgaattgctggctgcttttaacagatcctgatagtcgtgcaaggattgaagttagtcatgtgaaaatattgtttaatggattcaaatggtgggaggagat

SEQ ID NO: 362 - DNA, 368 bp, Glycine max
  Clone ID: LIB3028-052-Q1-B1-F10
gttgatccacaagtcgttacagcgctcgcaacttgtcatggacgcagcaacgggtgttggagtttgtgtcttcctattaatttcttacatggcgttcttaatcaaacgggctacagcaggttctgctcgcaagccaccggcagcatccggtggctggcctttgatcggtcatcttcacctcttgggtggctccggtcagcctctttacgaaaccctaggaacgttagcagacatgtatggcccaatattcagcatccgaattggtgttcaccctgccgttgtggtgagctcttgggagttagcaaaagagtgtttcaccactcttgacgtcactgtctcctctcgtcccaaattcagcgccgcaaaaa

SEQ ID NO: 363 - DNA, 378 bp, Glycine max
  Clone ID: LIB3028-052-Q1-B1-F12
ggttatattccatggaacccaattgaaccaaacacacaggattgctacttcgctgagtttggcaacactggaccaggttccgttgctcaagcaagagccaagtttggcaaaggtctcattagcaagcaggaggctgcacaattcactgctgagccttggctccaagctagcacttggttgcctgctgctggcgttcctttcgatgctagcttcaccaaagcttaaggatccgagacaaaccagcatcttgagtgttataatctcttttttagcctacctaaattaataaaactataaacaggaaatcgattacctaatttcaatgcagtcacacatagccactccattgtctgaggagctgatttgtaatcattcaat

SEQ ID NO: 364 - DNA, 394 bp, Glycine max
  Clone ID: LIB3028-052-Q1-B1-A10
ctgagccccaatctcttgagcagcagaatcttcaggccaagccaggtaagcaagcacaacacaaccccgaaatggcttctgcttctgttcccatggctttctcgctgagctctgttatcaacaacaacaagccttcatccgaagccttcttcaggccactacccctacggcaaccaaagaggaccctcttcaccacaaaggcagtgtcaaactccaaggctcaaatcaatgcatctttgaaggagaaggcagttgcaggactcacagcagcttctgtgacagcatctatggtggttccggaggtggctcatgctgctggatatgagttctccccttccctcaagaactttctgctaagcatctttgctggtgggtttgttccaataaccaaaat

SEQ ID NO: 365 - DNA, 346 bp, Glycine max
  Clone ID: LIB3028-051-Q1-B1-G4
gtgatttcagtgagtgatcggtgttcacttgatctcatcataatcgtcagcgtcaattgaagaagatgccgatcagaaacatcgccgtcggaaggcctgaagaggcgactcaccccgacacgttgaaggcggctttggctgagttcatctcaaccttcatcttcgtgttcgccggctcaggctccggcatcgcctacaacaagctcaccgacaacggcgctgccacccctgccggcctcatctccgcctccatcgcccatgcattcgccctcttcgtcgccgtctccgtcggcgccaagatctccggcggccacgtcaaccccgccgtcaccttcggcgccttcgt

SEQ ID NO: 366 - DNA, 372 bp, Glycine max
  Clone ID: LIB3028-051-Q1-B1-G5
tctctctctctctctttgtttcagtgtttgacaaatcacaaacgcaagggcgatctgagtggatgagatgagcacttcggagctgattcgccatcgccttccaacaaaacttcaaattagtataaataaaactttatttccttccccttttatttttcgtttcactttttctatcctcttttttttttttcttttgagattttcaattttcgagattacgttctatttttgtcttgctacggattctccaatatttcagaagctagatctaattgatatgctgtttggttgctcaggaattcgtgatcaggtatatcactgttaaaaaaaatacatatgcttttgcctctcttttttttcgtctttggattt

SEQ ID NO: 367 - DNA, 364 bp, Glycine max
  Clone ID: LIB3028-051-Q1-B1-G6
gccagctttgccctcggatggctcatcaccaatggtgcaggtcttgcatcatacccaattgacactgttagaagaagaatgatgatgacctctggtgaagctgtcaagtacaagagttccttggacgcattcacacagatcctcaagaatgagggcgccaagtccttgttcaagggtgccggtgctaacatcctccgtgccgttgctggtgctggtgtgcttgctggttacgacaagttgcaggttcttgtgttcggcaagaagtatggttctggtggtgcttaatttcagtgctgagtcagtgttattattattgttttttagatggcgatgataaaaaccgttctgagtttcaagagttttt

SEQ ID NO: 368 - DNA, 379 bp, Glycine max
  Clone ID: LIB3028-051-Q1-B1-G7
tgcaaacacacaaccctctcctctcctaatccataaaaactatctttcatttggcctcgagtagaagagaaagatgagtgtagaaattttggatggtgccaccattgtcaacttccttcaggatgaagaagcattcagtgcctcagttcttaaccggttcgcctaccttgacacagacaatgatggccttctctcgtatgcggagatgttgaaggagctccaaagcttgagggtgttggaaacgcactttggtattgatgtggagccagacccagatgagcttgctcgtgtttatgaatccttgttcgtacaattcgatcacaacttgaatggcaccattgatctcgacgaattcaagaaggaaacgaagcagatgatg

SEQ ID NO: 369 - DNA, 359 bp, Glycine max
  Clone ID: LIB3028-051-Q1-B1-G8
ccgagattccgtgagttgcaaaaatgaagacgattctttccaccgagaccatgaacatcccggacggcgtgagcatcaaagttcatgccaaggtcatcgaagttgagggcccccgcggaaaattggtgcgagacttcaagcatttgaatctcgattttcagctcattactgacgaaaacggtaaaagaaagctgaaaatcgacgcgtggtttggttctcggaaaacatccgccgccattcgcaccgccttgagccacgtggagaatcttatcaccggcgtcaccaagggctaccgctacaaaatgaggttcgtttatgcccattttcccatcaacgcaagcatcggcaacagcaacaag

SEQ ID NO: 370 - DNA, 409 bp, Glycine max
  unsure at all n locations
  Clone ID: LIB3028-051-Q1-B1-G9
atttccaaactcggggttcttctttaacttctggctctactgtcgcaacaacaaatcttcaaggagttcactctaatgatagaaggtttgcctctcattcttttcctgcaagccaagacagagcacagccatcagaacaatcgttctctgattctctgcgttccagatttaatgcagtatccacgagatacaaagaatcaatttcgaagggcacaaggggatggaaagagaggctgttctctcccaattcttctatgtcagaacttggttcagaagttaagagagaattgaatgccaaaattgctagcgtgtcncgattgatggagcgccttgaaacaacaagagaaaataatagggctgcaggaacttctttatcaaatccaaatcatttggtgaactgttccattgc

SEQ ID NO: 371 - DNA, 119 bp, Glycine max
  Clone ID: LIB3028-051-Q1-B1-H1
tacaaagaaaattcaatggtatacgtactttagaacatcatatataatactcaaagtacgtataccattgaatattatatatgatgttctaaagtgattttttttgcatgtatattttt

SEQ ID NO: 372 - DNA, 371 bp, Glycine max
  Clone ID: LIB3028-051-Q1-B1-H10
ataagacaaagcacaaagcaaagctcatccttgagttaaaaaatggcagcagcttcttccatggctctctcatccccatccttggctggcaaggccgtgaagctgggcccatcagccccagaagtgggaagggtgagcatgaggaagaccgtcaccaagcaggtctcctcaggaagcccatggtacggcccagaccgagtcaagtacttgggcccattctctggcgagcccccgtcctacctaaccggtgagttcccaggcgactacggctgggacactgctgggctttccgcagacccagaaaccttcgccaagaaccgtgaactcgaagtgatccactccacgtgggccatgctcggagccttgggctg

SEQ ID NO: 373 - DNA, 197 bp, Glycine max
  Clone ID: LIB3028-051-Q1-B1-H12
cgcgaacattagtaatcagattgttatttacgatgtttttccttcccttacctttttctgaccgacatgtattacaagcacttcagatcttaaaaagtaacaaattggttacaacggtttttgcagaataggagcttgtaacgtaagccatcgaattgattgacttgcaatggatgactatttcatttaattttaca

SEQ ID NO: 374 - DNA, 344 bp, Glycine max
  Clone ID: LIB3028-051-Q1-B1-H2
gggaggagtgtgtaaacctgagagaagtcaagtcattacgaaaaatgaatcacccaaatattgtgaagctgaaagaagttattcgagaaagtgatatcttgtactttgtttttgagtacatggaatgcaacctataccaactcatgaaagacagggaaaaactattttctgaagctgaagttagaaattggtgttttcaagtttttcaacgtcttgcttacatggcacagcgtggatacttccatcgtgacctgaagctgaaaactttcgggttacagggattcatcaaaatcgctgatttggactaacccgagaaatagttcacaaccaccctacactgagta

SEQ ID NO: 375 - DNA, 367 bp, Glycine max
  Clone ID: LIB3028-051-Q1-B1-H3
gttctctcacacactcactctccttctctctcctattgcggctagggtttgggtttttcactttcagcctctccattccttcaaccttcttcttctctttgatctctgatggagacgttccgtgtttagtagcaagggttagttgaggccttgtgtttggaaacgtacggtgtcgttttggagttgggaaaacaaataattctgagagatggcaaccacgaacccttttgatttgttgggtgacgacgctgaggacccttctcagctcatcgccgccgagcaactcaaggcggcggctgctgctgcggctgccaccgccgctcccaagaaggcgccggctcagcagatcaagccggctcagctccct

SEQ ID NO: 376 - DNA, 376 bp, Glycine max
  Clone ID: LIB3028-051-Q1-B1-H4
ccctccaccaccaacgtcgcatcctccaccttaccaccatgtgagccctccaccaccttctccatctcctcctccaccataccattacacatcaccacctcctccttccccagctcccgctcccaagtacatttacaaatcacctccacctccagtttacatatatgcttccccacctccagctatctacaagtaagttcgaattgcggaagcaccattcacgataaatcatgttctagtttttatcgaggaataaaggcaagctctatttggagtcaagtgaaacatctatcttcctgtccaagttctttgaataaaagtctgaatgtgtcatctctgcactaaaataattgtgattctgaccaagttgggtcca

SEQ ID NO: 377 - DNA, 362 bp, Glycine max
  Clone ID: LIB3028-051-Q1-B1-H6
cttccaacaaattatatttttcttacaaaaaaaatggcaggtgaggtggtgaagaaggaagagtctctcaacctgaaagtcactaacaagagccatgttcaatcagaggagaaaattggaagaaaagagtaccaattggtcacttttgatcttccctacttggccttttactacaaccagaagctcttgttttacaagggtgaagatttcgagggcatggtccaaaaactcaaagttggacttggagtggtgctgaaggagttccaccaacttgctggcaagttagggaaagatgaagagggggtgttcagagtggagtatgatgatgacatgcttggtgtggaggttgttgaagctgttgt

SEQ ID NO: 378 - DNA, 371 bp, Glycine max
  Clone ID: LIB3028-051-Q1-B1-H7
caagctcctacattctctctccaggttgggaattagtgcctttggtgatcatcatgttccttcttagaaggcaaacccagaataaccaggagaatgattcctcatatcaagatacaaaggtggctgaactcaagacaggtcttgggcccctctctggtcgtcgattaaagtattgcacagatgcatgtctaaggagatatttagaagcaagaaactggaatgttgataaagctaagaaaatgctggaggaaacactcaagtggagggcaacttataagccagaggaaatccgttgggctgaaatagcacatgagggtgaaacaggcaaagtctccagagctaacttccatgatcgacttgggaagactgtg

SEQ ID NO: 379 - DNA, 348 bp, Glycine max
  Clone ID: LIB3028-051-Q1-B1-H8
ctcattgctgttcaccattttcaattcattcctgtgttagattccaagtggtttggtttggtttgacataaataaacctttcaagatctcagaggggcagaagatcaaagccaagacaacacactctcatatataaaagagtgtctctgataatttgatctttgtttcttctctttctctcctttgagatttttcagcaccccaccaaggttttgtccgaaaagcttgaatttttcgcctaccctttacaatgatctcttcattgagacaacctgttgtagggatcagtggttctgatcttcttttgaggcaaagacatgcaaccctaattaaaggaaagtccctttt

SEQ ID NO: 380 - DNA, 410 bp, Glycine max
  Clone ID: LIB3028-051-Q1-B1-H9
gcttgataggaagactggcagcaacttacttcagtggcctgttgctgagatcgagagtttgagattgagaagtgatgaatttaaaaatttgaaggctaaaccagggtcagtggtgtcagtagatattgaaacagccacgcagttggacattgttgccgagtttgagatagacaaggaaacccttgacaaaattcctcaatccaacgaggaatacacgtgcagcaccagtggtggatctaaacaacgtggtgccttaggaccttttggtcttttggctttggcagatgaggggctttctgagtatactcctcagtacttttatgtcattaaagggagcaatggaaatcttaagacttccttttgtgctgatcaatcaaggtcttctcaagcaaatgatgttcgcaagcaaa

SEQ ID NO: 381 - DNA, 312 bp, Glycine max
  Clone ID: LIB3028-051-Q1-B1-G2
gttgtggaaaatgtgcctacaaatagctccctgaaagcacatccacgctttcaagccgagaacttagacaagaacaagaatatatatgaacgaattgaaggccttgctaagaagcatcaggccactcctgcccagttggcattagcatgggtacttcagcaaggcgaggatgttgtacctatccctggaacaactaagattaagaacctggatcaaaacataggtgccttagcagtgaaactgtcagaaaaagacctgagagaaatttctgaggcggttcccattggtgatgtaccaggtggtagatactac

SEQ ID NO: 382 - DNA, 378 bp, Glycine max
  Clone ID: LIB3028-051-Q1-B1-E6
aagaaaagaaaacagaggacagcgaggagtgagagagaacaaaagacgaatccagagagagaggagaagaaaagaaagaaaaaggaagtggctgctaacaaggatatactgtgatgccgactctaagaattcatggatatgccttgcttgtttcatcttgtttcatcatcctcatagcagcctcacaaacagatccttcagaagtaaatgcactgatagacatcaagaaaagtttgattgatcccatgggcaatatgaggaactggaattcgggagatccgtgtatggcaaactgggcaggggtttggtgctctgatagggaggaggctaatggttacttccatgtccaaaagctctacttaatgactatgaatctct

SEQ ID NO: 383 - DNA, 376 bp, Glycine max
  Clone ID: LIB3028-051-Q1-B1-E7
gcctcgaatcattgtcaaggtaacttgtccaaatggtattgttatttactgtagtctttgtgatttgatatttggtttttgttatgggggtggacagagtatagtgttggagaacttgtatgttcagtcaggaaacgatggaactggggtaccaactgatatgttgtcgttgaactcaacggtcagaatattgtacagaaatcctgccactttcttcggcgttcatgtcacttctacccctcttctcattagctattaccagcttgcaattgcctctggccagatgcagaagttctatcaatcgaggaagagtcggcggagtttggctgtagtggtttcaggacaccagattcctctctatggtggcgtgtcagtt

SEQ ID NO: 384 - DNA, 377 bp, Glycine max
  Clone ID: LIB3028-051-Q1-B1-E8
gtgggaaaccaactaaggaataccctttcaaaatggcttcttctgtgtcatccatggtttctaccaccctcctcctaattaccatctgcacactgtcctcacttctgtcagttgcatctgcagcaacagaggagggacgaacaaggccattcaaaagggtctatgcctttggagactctttcacagacactggcaacacccaaaatgcagaaggtccaagtggctttggccatgtttcaaactctccctatggaaccactttctttaaccactccaccaataggtactcagatggtaggcttgtgattgattttgtggctgaagcactttcactgccttacttgcccccctaccgtcatagcaaaggcaatgacact

SEQ ID NO: 385 - DNA, 61 bp, Glycine max
  Clone ID: LIB3028-051-Q1-B1-E9
acttaatgtacaatacatatcactgagatattaaggcatttggctttgttccttggaactc

SEQ ID NO: 386 - DNA, 411 bp, Glycine max
  Clone ID: LIB3028-051-Q1-B1-F11
tcggaatattccctttcttcgttttgaatcactggacggcatggccacttccaatggcttcgtcgacggcacttctccggaatccgcattgatctttctcggcagcggttgttcgagcatggttcccaacgtcatgtgcctccttcagccttctgaccctccctgccccgtctgcgtccagtcattgtctatccctcccgaacgaaaccctaattacaggtcctcttttctcttctttcatttcttttctctttcaagaaatttcctcaagatctcgatttgcaggtgcaatacgtctctcttaattgattactgcggcgacgccaacgctggtgatcgtaagtatatattgatcgacgtcggcaagaccttcagggagaccgtgcttaggtggttcgttgcccatcggat

SEQ ID NO: 387 - DNA, 269 bp, Glycine max
  Clone ID: LIB3028-051-Q1-B1-F12
ctcggtcagagtcttctcacagagaaaacaggaaagcgagaaccttcttaccccttcacctcttctctctttcttgggcctctcttttcctatttctttctttctctcacgtttcgttccatcttccctcacgcctcaccccacgtcacccaccttcttctttctctctttctccccttttccctttagtcttcgtttgttcttcccttttgggttcacttgtttctctttgatctcatggagaagatgaaaggggttgtctccttgga

SEQ ID NO: 388 - DNA, 371 bp, Glycine max
  Clone ID: LIB3028-051-Q1-B1-F2
gtgtattcccagtcactattcacttccctccggattatcctttcaagcctcctaaggttgcctttaggactaaggtgtttcacccgaacatcaatagcaatggtagcatttgtcttgatatcctgaaggagcagtggagccctgcactcaccatctctaaggtactgctttctatctgctcattgctgactgatccaaatcctgatgatccacttgttccggaaatcgctcacatgtacaaaactgaccgggccaagtatgaggccactgcacgcagctggacccagaagtatgccatgggctgatttgtgtttggataatgtatattgaaatggattgcatctatgaaaacctttgtgggtttgcttttc

SEQ ID NO: 389 - DNA, 376 bp, Glycine max
  Clone ID: LIB3028-051-Q1-B1-F4
tggttcttcagaatgatattgatttgctgaatcctccagctgagttggagaagagaaagcacaaactcaagcgtcttgttcagtcaccaaactctttcttcatggatgttaagtgccatggatgcttcaacataacaactgtgtttagccactctcaaactgttgtggtgtgcggaaactgccagactgttttgtgccaaccaacagggggacgggcgaggttaaccgaaggttgctcatttaggaagaagggagattgaatggtttgttaaacatacttttctttgtcaatgatttgacattttcggttgttaggtttttgagatggaatcaatttcagttatggtatactaattttgttaaattgtaagacaat

SEQ ID NO: 390 - DNA, 372 bp, Glycine max
  Clone ID: LIB3028-051-Q1-B1-F5
tgtgaggcgagggtaaggtcgcgttgtgttgcgtcgtgtcgtgcgctgttcctctgtttctcgtttttgtgttcagaccgaaccctagctccgcatcgcaaccatgtcgaccaagcaaggtggaaaagctaagcctttgaagaaacccaagtctgataagaaggattacgacgagattgatgtggctaacattcagaagaaaaaggaagaggagaaggcgctaaaggagttgaaagccaaggcgcaacagaagggaagctttggaggttctgggctcaagaaaagtggaaagaaataagggctctttatcatgattgtatgcattcaatattgagccctgtaattacagttgctaccatgataacttctctt

SEQ ID NO: 391 - DNA, 363 bp, Glycine max
  Clone ID: LIB3028-051-Q1-B1-F6
ttccagagaatatcacacgaatcccaccctcccccagggtacggatctccttaccctccaccccaaccgggttacccatccgcaccgcctcatgaagggtaccctccgccgccgccgcctcacggatacggtgggtaccctccgccgcagccgccgcagcgtccgccgtacgactcctatcagggttacttcgataacgggcatccaccgccgcctccgccgccgcactaccactaccagcacgtggatcaccatcaccaccatgaggagcctgggtgcttttcgttcctccgaggctgcatcgcagcgctttgctgttgttgtgtgctagaggagtgttgcttctgataatcacatcgtaaa

SEQ ID NO: 392 - DNA, 373 bp, Glycine max
  Clone ID: LIB3028-051-Q1-B1-F7
gtgaaaacagctgaggcaattgagaggattctgactcacaataggaaaggcatcaatttcacaattctgtcaaaccctgagtttcttgctgagggtacagcaattgcagacctgtttaagccggatcgagtcctcatcggaggcagggaaaccccagagggtcaaaaggctattcattctctgaagagtgtttatgcccattgggttcctgaggacagaatcctttgcaccaatttgtggtctgctgaactctcaaagcttgcagccaatgctttcctggcccagaggatctcctctgtgaatgccatgtcggcgctttgcgaggcaactggtgctgatgtctcccaggtgtcacactcaatcgggacagact

SEQ ID NO: 393 - DNA, 299 bp, Glycine max
  Clone ID: LIB3028-051-Q1-B1-F8
gagagagaggagcggaggagagaaaatgacgacgaggttcaagaagaacaggaagaagagaggccacgtcagcgccggtcacggtcgtatcgggaagcaccgcaagcatcccggtggtcggggtaacgccggtggcatgcaccaacaaccgcatcctcttcgacagttacaatccgggttccttcgaaaaggtggttatccccaacttcaacaacttcggcacaaattctaatggcccaaccttcacaatgattagctaagggcccccctaacccaagaaggccaaggacaaggccacc

SEQ ID NO: 394 - DNA, 385 bp, Glycine max
  Clone ID: LIB3028-051-Q1-B1-F9
cttgcatcttcttttcaaaattcttccccaccccacaagcaaagcacccttaacttttccacttcatttttttttttttggttcctctttatttctttctctctaccccatttttctttttctgggtttctgtgctttttgttgggatctacttcacaatgggtttctcacaagacccctgcactgattccaatgccccaacctcaacctcttccaccttagttgtagatcactactgtgactacgacaagctcaaattcaaaacctttctcagaaaaatgttctgggaattcggtctcgcctgtgtggccaacccttcccagcgccggagaagctccggcgacggcaaaaagacgaacatggagaacaacaaggcgtggctgct

SEQ ID NO: 395 - DNA, 363 bp, Glycine max
  Clone ID: LIB3028-051-Q1-B1-G1
caccagatcaacaacagcaccaccctcgtctcctccatgttccaggccaccggctcagcctccggcaccgccggctacgtcaacatcaccaacctcaaggccggcaaggtcggcttcgccgccgaagacaacgacggctccctccactccttctacgtcaaatccgtccaggaaatgccctactacatctccgtcctccaaatcagcgccgccataagctccgccgacgccgaggcccccaccgccgcaccctccgccatcgatctgatctccattatgtccaaacaaggctgcaaggcattcgcggaccttttaagaggctccaaagcgcttccggctttcaaggaaaacgttgacgggggc

SEQ ID NO: 396 - DNA, 409 bp, Glycine max
  Clone ID: LIB3028-051-Q1-B1-G10
cctgtttccatttcctctcacaaaaatcacttattatgaacacacgaaaagacatggaccggctcaaaggcccatggagcccggaggaggacgaggctctgcagaagctggtggagaaacacgggcccaggaactggtccctcatcagcaagtccatcccgggccgctccggcaagtcctgcaggctccgctggtgcaaccagctgtccccccaggtggagcaccgggccttcacccacgaagaggacgacaccattatccgggcccatgcccgcttcggcaacaagtgggccaccatagcccgcctcctccacggcagaactgacaacgccatcaaaaaccactggaactctcacttgaaacgcacgtgcacttcaaccatgattgacgacgacaacactccccggct

SEQ ID NO: 397 - DNA, 412 bp, Glycine max
  unsure at all n locations
  Clone ID: LIB3028-051-Q1-B1-G11
aattacccttcccaattttcaccaaaacctaatactcccacaccaatcttcgatcatggacgccgattcacaacctcaacaactcgaagagagaacagaggagcaagaactgaagtacctggaattcgtgcaattcgcgaccatacaggctctgatgcgctgcgccatcctctactcatacgccaaggagcgcgcgggtcctctgaagcccggtgtcgacaccgtggaggaggccgtgaagaccgtcgtggctccggtctacgataggttccaccttgtccccggcgaggtcctcaaatacgcggatcggaaggttgccgagttagacagccacgttccctccaacgtgaagaacgtctcctcncaggcctgctccgtcgtctctgaagtccgccgcgatggcgtctccgcc

SEQ ID NO: 398 - DNA, 202 bp, Glycine max
  Clone ID: LIB3028-051-Q1-B1-G12
atttctgcgtcaccattttcagatggcctcagaagtttgcaacgctgcttccataaccgcgacgtcctctctctcggcttccagcgcctcgaaaggacctgcggatgcagttgctacggtagtgtccttgaacttcaccatgcctcatgtccacagtctcaacggttccggcaatggctccgcgtcagcatcagcagcacca

SEQ ID NO: 399 - DNA, 355 bp, Glycine max
  Clone ID: LIB3028-051-Q1-B1-E5
gaaattgtgaagatgtactgttatcattgtatcaactatattgtgcccttctttttttatttgatttggcaaacacggctacttttctccaaataagatggatcatttgtattgccggctttgtgcacaattatctacttgtaagaagtccaatttcgggcaacaacgtttgtaatgcagaaataggtcattagcattgtaaatctccaggcgataaatggaatatcaaatggaagacgccgcatagcttctggtgtgacaatatcattgtgttgggcaaagcattttcgaagaaattacgtggatttaggaagattctgattattcttctacatctacaattattaaggtgaag

SEQ ID NO: 400 - DNA, 365 bp, Glycine max
  unsure at all n locations
  Clone ID: LIB3028-051-Q1-B1-D1
aaattttcaaagtcgaagcgagaacttgccatttcgagggttttagggttagggttttctcaaattgcaagaacatgggtttcaacattcaaccctatgggattcagtccatgctcaaggaaggccataagcacctttctggcctcgatgaagcggttctcaagaacatcgacgcctgcaaacaactttccactatcactcgaacttccctcggtcccaatgggatgaataagatggttataaatcacttggacaagctttttgtcacgaacgatgctgggacgattgtgaatgaacttgaagttcagcatcctgctgccaaggttttggttttggctgggaaggctcaacaagangagattggg

SEQ ID NO: 401 - DNA, 403 bp, Glycine max
  Clone ID: LIB3028-051-Q1-B1-D10
ctcgagccgctcgagccgattcggctcgagctcgcgtccctcatcacttcttcaattcgtaactctttttttggttcgatatgagtcaactcggtgtggcgttgcaggaatcgctgcggactcagagggaggccaggagtaccattcttgggttgttgagggagcaaatggacggtgtagatggtgggacccgcaggaggcgaagcttgaaggagcggttcggattcatcggcatgggatgttgtggggcctcctggggattccgttctgacgcgttaagtgtcaaccagggagagcaagaacaacaacaggaaacggattccggtcgagtagcggcgccagaatgtgtgggccccgcgggttcgggttcgggtatgaatcttgcggcagcgctggcggcgga

SEQ ID NO: 402 - DNA, 401 bp, Glycine max
  Clone ID: LIB3028-051-Q1-B1-D11
cacaaccaggtccctgaatgctttttagagagagaaagagtaataataataaagtggaagaaaaagaattaggagagtgaaacaagaagaagaagaagaagaagaagaagaagaagaattgagaagatggtgtttgaggaaactgagctgaggctgggactgggactatgtctccctggaaatggaaccacggcaacaactgaagctgctgctgcggaattaggagtgaggaagagagggttctctgagactgaaactgatgaaacagccaccgttgatttgatgcttaacctctcacccaaggaagctgctgctgctgatggtgcagatccacgtgagaagccaaagacttcgccgaaagagaagaccttctgcttcccgattccgccaagcctcctgcc

SEQ ID NO: 403 - DNA, 392 bp, Glycine max
  Clone ID: LIB3028-051-Q1-B1-D2
accccggaattcggtccaagggcttcaaacccggtatccattccgacccgtccgggcctgctcagtaactggatatcgggtacggactgctgcacatggaccggagtagaatgccactataacagcacccgggtccaaagattattcttaacgggtcaaaaacccgaaaccatcttatcgggtaccatctcacccaccctctcaaaactcaaactcctcgatggactctacctcataaacctcatcaacatttcgggtcccttcccaaattttcttttccaacttccaaatctccaatttatctatctagaaaacaacaatctctcgggtcgaatacccgataacatcggtaaccttacccgattagatgtactcagtttaactggtaaccg

SEQ ID NO: 404 - DNA, 382 bp, Glycine max
  Clone ID: LIB3028-051-Q1-B1-D3
ataccgcacaccgtatttggtagacataattcgtgaaaatgtggggcgagtgcttacattggactccattgttgctggaaatgcgtggaaaggcatggacatgctgattttcaactcgtggcattggtggacccacactggaaaatctcaggggtgggattatattagagatggacccaatcttgtgaagaacatggaccgtttggaggcctacaataaaggattaaccacttgggctaattgggttgatcagaatgttgatccctccaaaactaaagtcttctttcaaggcatttctcctacacactatcagggcaaggattggaatcaaccaaaaagaagctgtagtggagagcttcaaccattgtctggatcaacatat

SEQ ID NO: 405 - DNA, 366 bp, Glycine max
  Clone ID: LIB3028-051-Q1-B1-D5
tcatcattgaagtctgggagatcctcatatctactcgacgtgcttgtggggcttctatatcctgtgatttgcttgcaggaaacatcaaataaggatttgtcaacattagccaaggtagcatttgaattgctcaagtggatgattgtttgggaacctcaccttcagaaggctgtatctgtgattctttctgctgccaatgattccaactggcgaactagatctgctacattgacttatctgcgcacattcatgtacaggcacacttttactgtctcaagttcaaagaagcaagagatttggagaactgttgagaagttactagtagacaatcaaattgaggtaagagaacatgctgcagcagtttta

SEQ ID NO: 406 - DNA, 376 bp, Glycine max
  Clone ID: LIB3028-051-Q1-B1-D7
ataacatcctcatcacactagaacgccccgcttggctcattgccgctgctaacctttttgtctttgtccacgttgttggaggctaccaggtgtttgccatgccagtgtttgatatgatcgaaacctgcatggttacaaaattaaattttccaccttctactgcactccgagtaacaactcgcactatttatgttgcggtgacaatgttaattggcatatgtgttccgttctttggctctcttcttggatttcttggaggctttgcgtttgccccgacatcatattttttgccctgtatcatatggcttaagcttaaaaagcccaagaaatttggcttgtcttggacaattaactggatctgcattattcttggggt

SEQ ID NO: 407 - DNA, 372 bp, Glycine max
  Clone ID: LIB3028-051-Q1-B1-D8
gaaactctaacgaaagagcgagaaagcgaagacagccatggcgtcgtttcttcaatcgtttctggatccgaagaagaactggttcgccgctcagcacatgaaatccctctccaaacgcctccgcaaatatgggctccgatacgacgatttgtacgatccttactacgatctggatgtgaaggaggcgctgaatcggcttccgaaagaggtggtggacgctcgccacgcgcgtcttaaacgcgccatcgatctttccatgaagcacgagtacctccctgacaatctgcagtcaatgcaaacaccattcaggggctaccttcaggatatgctgactcttgtgaagagagagagagcagaacgtgaagcattggg

SEQ ID NO: 408 - DNA, 376 bp, Glycine max
  Clone ID: LIB3028-051-Q1-B1-E1
aaaaaacaaaaagtttgaaaaaacgtcttatatctttctcttcttctccgtggagaatgcatctctgtggcctggtttcttgttaaccaggtcctcaccagcttttaaatacttaaatttcaatcaatcccaattttctcacattccctttttgccctttctatctctctcgtctttctcccacaatgaacgatcttctaacggaatcatttgaaattccacgtggccaaggtcacggaggtggtggtgacattgagttaggagaatatgcaaggaattcaggagacctgggcttggatagtttcttcaagaaggttcaagagcttgataaacaatatgctaagctggataagcttttgaaaaagctccaggatgc

SEQ ID NO: 409 - DNA, 401 bp, Glycine max
  Clone ID: LIB3028-051-Q1-B1-E10
ctcttttttcagtttctgctaaaagagtacatcagcttcaggactcgttgaacaggatgatatcttccatgtcaagtcaagttgccgagctgaaggcgatcttgagtacttcatcaagattgagttcaacttttcgacctattgctagggttgacattgcttccagtaactctgatacttcatctacagactctgatttcacatttccggctcctgtttcaaatactgaacttttatcttccccagagtcaaattctttccaactagtagttcaggatgtcactgcaggggatggatcgggatctgaaagtggaaaggagggttcatttgatgatttcttctagtaaaatttgtacttcttagcgggcttaaatttacgtgtcctctgtctctggggaaac

SEQ ID NO: 410 - DNA, 406 bp, Glycine max
  Clone ID: LIB3028-051-Q1-B1-E11
tgccaaaaggaatccatcgcttgtcaccacattttccctcctttcatgtggatatatccttagctcttatagagaggtaaaatctgtggttttgcacacacttaactgtggaagattcagtgtggcagtagagcattttctcatgacaggacaagttcctactttgcaggagggcaatatgaatgagaacatattcagttttccatggaaagataggcctgttgtccttggatcaagaatcaaggaagcattccaagaccctagtgcatatgttgccatagagcccttgtttgatagggagagatatattgtaacatataacccctcaaaacacaaggtttatgcggtgctcaaggatcaggcaaagtcagatgacattctgaaagcagcattccatgctcatgtg

SEQ ID NO: 411 - DNA, 272 bp, Glycine max
  Clone ID: LIB3028-051-Q1-B1-E12
gtcaatcatgcatctatggcatgacagtacattttcctcgttgcagttgagatatctctatcacctatatatatctaacttctgtggttatgcacactcttgactctcgtagaattactgtagcagtcgcggatgttgtcagctcaggacaaatttgtactttaccggatggcacacctaccgaaaaccagcttcagtgatcgataccactttaggcttaattccctagtgctgagacgcgtggtcccactccaaaagacgactgcaaatgt

SEQ ID NO: 412 - DNA, 370 bp, Glycine max
  unsure at all n locations
  Clone ID: LIB3028-051-Q1-B1-E2
aaagaaatcccatcttataaaagggttatgttattgaaggatanaatgggcgacgtaccaagacaaacagtggaagaaataaagaagcatgcggatgcagtgaatcttccaaaaacctcaattatcaaagtatctaattccatcttagtaggaatgacaaatgttgtcaaagagttgaaagatgcaaacctcacagtattcgtccataatctcaaaaacgaatacacaaccctggcattcgactattggtctgatcctaatgtcgagattgcaacttacgtccaaactgccaaggttgatggaatcgtgaccgattttccagccactgcaagtagattcatgaggagtccatgtagcgatccgacccatg

SEQ ID NO: 413 - DNA, 383 bp, Glycine max
  Clone ID: LIB3028-051-Q1-B1-E3
cacattttggtaatctcttaacatatagaacactaccctgaacatagtaaagaagccagtgctaagatttgttagtgaagcaatggctcaaaccatgttgctcatgtctagtgtctctagcagttattccgtggatttgaagaaagaccttttcctccaattgcagagtcaaagtttaaggcctaagttctctcagctctcattcaacccacttccatcatcaacttcttccttttcttcaccccgtacattcacaactctggacctcttcaaatctaagaccaaagccgctcctgctaagactaaggttacaaagccaaagcaaaaggttgaagatggtatctttggcacttctggaggatttggttttactaagcagaacg

SEQ ID NO: 414 - DNA, 353 bp, Glycine max
  Clone ID: LIB3028-051-Q1-B1-E4
cctcattctcattttccggtttctctctctctctctctctcatggcgaatctagcacacttctccaagagagccctaagaagcgcacacgcgctcgcaaggcaccacgtgcagccgcagctgctggcagcggaacgcgcttttgcgacggaggcggcgaaatcgatatccccgtcggcggatcgcgtgaagtgggactaccgagggcagaggaagataatcccgttagggcagtggctccccaaagtggccgtggatgcttacgtagcacccaacgtggtcctcgccggccaagtcaccgtctgggacggagcctccgtctggcccggttgcgtcctccgcggcgatctcaac

SEQ ID NO: 415 - DNA, 380 bp, Glycine max
  Clone ID: LIB3028-051-Q1-B1-C8
ggaagaaacgtcttctgatcttcgaaactcagcagaagagagcagcagagctgaagtgccagtaactgcaaatgcacaacaaaatgcaggagttgcattgaacgaacggatgttgcagaccactaataggaatacacaaacccaatacaatactacgatggacctgagaaatgtagctgatgattctgcagtagaatcttcaagtggtaccaggagagaaagggatggaggtttagttccagtatggtctccaccagcttccagttactcagaacaatttgtaggagatgaaaatggtataacaagcagttcatcttacttgcaaaggcatcctcaatctcaccaaatgctgaatttggagcagctacctcaaacggggt

SEQ ID NO: 416 - DNA, 381 bp, Glycine max
  Clone ID: LIB3028-051-Q1-B1-B2
agcagccactatagtaaacaatcttctctatctaaaatggagtttgttctaaattacctaaatgccactgccattggagttctttctataaccctcttctttttgtttttgtataatcccttcaaatttgcattaggtaaaaaagaggctcccaaagttgcaggtgcatggccaatacttggtcacctaccactattgagtggttcagagacacctgatagggttttgggtgctttggctgataagtatggacccatattcaccatcaactatggtgtcaaaaaggctttggtaatcagcaactgggaaattgctaaggaatgcttcaccaaaaacgacatcgtcgtttcgtctcgccccaagcttcttgccattgaactc

SEQ ID NO: 417 - DNA, 370 bp, Glycine max
  Clone ID: LIB3028-051-Q1-B1-B3
gttccagcaccttcttcttcgttcacctcctccccgtcgcaacacaaagctacgctgcagcaatccaccactgcagggttttccaagtccaatctcagttcacttctcgccagggtttaatctgaatttcttttgtgttgccactgaggttattattatttttcttccaaaatggcgacggtgatgcaaaaaatcaaagacatcgaagatgagatggcaaggacccaaaaaaacaaggctactgctcatcatttgggcttgctgaaggctaaactagcaaagctgcggagggaactccttacaccttcatcaaaaggagctggaggtgctggtgaaggttttgatgttactaaaagtggggattcaagag

SEQ ID NO: 418 - DNA, 382 bp, Glycine max
  Clone ID: LIB3028-051-Q1-B1-B4
gtctgaatgggcaaagccccaacaggctactgtaccagctgataaaaggtggccaagtgcagaatctaatccttccatttcttattcactggcatcaccgttgcaaatgtcaccccaacatgctaagtccgaagcacaatatatgcctgctggaggtgattttaagaaccttcaacctggagtagccagggaaccattaatcatgatgcagcagccccagactgtaaatgaagagcaagttccagccacaagcatgatctcatcacctcctcaaatagccgctggtcggtatccaactaacagttcagatgctgtcagatctaataatggctttatatctcatgctcctagcactagaagcctcagtccaaactatctcaat

SEQ ID NO: 419 - DNA, 379 bp, Glycine max
  Clone ID: LIB3028-051-Q1-B1-B5
caaaagacaaaaaaataaccaccaaataaacatctttctccacaaacctagcgggtctccacttatccaaaaaaagaattcactatccatcatggacattaggaaggttacctgtgccgttctcattgccgctgcctccatgagtgcagcattggctaccacagaggtctctgcacccgcccctggccctagcagcggtgcctccgccgccactgttggctccttggttggtgcctcagtcttgtccttctttgccttgttccactaaaatgtgcagggttatggggaaagaatgttgaaggaacatgcagctcaaggaagaaggctgcatatatttacttagatacacttatgtatggaataaagtgtgaacacaaga

SEQ ID NO: 420 - DNA, 381 bp, Glycine max
  Clone ID: LIB3028-051-Q1-B1-B6
caaagaaggcgtcttcataaacgcctttcttctccgtttccgtttcctcgttcgaattcgctttttgatctgcgaaaatgagagagtgcatctcgatccacattggtcaggctggtatccaggtcggaaatgcttgctgggagctctactgcctcgagcacggcatcgggcccgatgggcaaatgccaagtgacaagacagttggcggtggtgatgatgctttcaatactttcttcagcgagactggtgctggaaagcacgtgccacgtgcagtgtttgtagatcttgagcccactgttattgatgaggtgagaaccggaacttaccgccagcttttccacccagagcagctcatcagcggcaaagaagatgccgccaaca

SEQ ID NO: 421 - DNA, 359 bp, Glycine max
  Clone ID: LIB3028-051-Q1-B1-B7
gcttttctgagtcgcagcatcagcagtagcatggaatccgaatccaagaacgacacccaagtcgctccggccttaatcgccgttcaccccgaccaatcctccgtcgccgtcgcagtgggcccgcacctccgggtcttcgacctccttagcggttctgcagcttctttaaccgacgactctgatggcgccgtcccgttccacaaggacaacatcagagccattcgcttcggcgcaaaaggaaaactcttcgtgtccgcaggtgacgataaaaccctcaaggtctggtcaacacagtcctggcgttgcatcaccaccgtgtcctccgagaagagagtaactgcagtagcaatcagcgacga

SEQ ID NO: 422 - DNA, 376 bp, Glycine max
  Clone ID: LIB3028-051-Q1-B1-B8
aattcactttggttccctcgaagtttagcttgcgttacatcggtggatcacataggttttgtttaagtatgagtcaggagctgaaaaaagctgcctctaagggtcatgagaaaatggtaacatcacaagaagagcaggcaaagatcactgaggttagagggttgatagggccactatcagataaggaatctgtgtactgttctgatgcttccatctcaaggtatttaaggtcgcgaaattggaatgtcaagaaggcagctcaaatgttgaaacagagcctaaaatggagaaaagaatacaaacctgaagagattcgctgggaagaggttgctgaggaagcacagacagggatgatgtataaaccaaattatcatga

SEQ ID NO: 423 - DNA, 392 bp, Glycine max
  Clone ID: LIB3028-051-Q1-B1-B9
ctctaggagtatgtttacttagtcactgttacagatacaaacctgctttctcagtaacagtgactaaataaacatactcctagagctggatgggagaagcacgtttgtatctgtaaattagaagggggatggcggggggatcttggttacaacagcaattgttccatgcaagtgtaaagaaacatcaagagtaatgtacaacaaataccacaacagggagggagaattcacgggatgttctgcctgttatttagccaaagatatagttcattttttaccattgaatatgtcgagtcacaaaatattactagaaaattgtatcatgtctttatatgatttttcaattggcaatgccaaaggaatgagaagtgtccctttgagttcatgtttgc

SEQ ID NO: 424 - DNA, 381 bp, Glycine max
  Clone ID: LIB3028-051-Q1-B1-C1
agaagttctaaggaagagggaatatgcagaatacaaggtgctagttgtctatttgcaataacaacatcagcgatccaaccttagtattcttcaacccagagagatttgtaataataaattacaacaacttaaacgatggcaggaggagcttatgtagattcgggaaatgcaaagcaatttgatgggaaggtcacggcattcgtattggttacatgctttgtggcagccatgggaggcttactcttcggttatgatcttggaataaccggaggagtgacttctatggaaccatttctcatcaaattctttcccggtgtttataaacaaatgcaagatgatgttggccatagaagccaatattgcaaatttgacaacgagctc

SEQ ID NO: 425 - DNA, 363 bp, Glycine max
  Clone ID: LIB3028-051-Q1-B1-C11
ctctccgcagcaaccttcttcgccgtttcagctcaagagccaccagcaggtaagatatggttaagcataacaacgttatccccaatgggcacttcaggaaacactggcaaaactatgtgaagacttggtttaatcaaccagcacggaagaccagaaggcgtttagctcggcagaagaaggctgtcaagattttcccaaggcctactgctggacctctcaggccaattgttcatggccagactctgaaatacaacatgaaagtcagatctgggagaggattttctctcgaagagttgaaagctgtgggaattcccaagaaacttggtccaactattgggatttctgttgatcaccggaggaaag

SEQ ID NO: 426 - DNA, 284 bp, Glycine max
  Clone ID: LIB3028-051-Q1-B1-C12
aaccacttgtcgattttcttccacggaatagcggattaggttgaagatagaagatgttaatacggataaagttgcagcacctgtgagggacttcatggaacgggaacagggtaatgagatgaacgtaagagctttggcatggcagacattggcacacgatgctgcatcgagtccacatgggtcttcgtttgtcaacatggacaacgtggatcgtcacgttcttatgaacaaaattgcatacacagtagtgtttacattattacaattctcaatggcatgaattc

SEQ ID NO: 427 - DNA, 374 bp, Glycine max
  Clone ID: LIB3028-051-Q1-B1-C2
cagctaccatattaagatagacttgtgcatccataaatttcttcttgttaattgatcacaaattcagagggcgagccctggtgcagcggtaaagttgtgccttggtgacttgttggtcatgggttcgaatccggaaacagcctctttgcatatgcaagggtaaggctgcgtaccacatccctcccccataccttcgcatagcgaagagcctttgggcaatggggtacgaagtttttttttaattgatcacaaattcagtagagccacatggcatcaataatatgtttcccacagttattctttagaatagcctatgatgtttaggtgcaggtttgcaactttctcagacacgatcactacaataagaaactcct

SEQ ID NO: 428 - DNA, 126 bp, Glycine max
  Clone ID: LIB3028-051-Q1-B1-C3
cataaagtcttgcgtcttagatggcaagaatgctgcttattttaaccttcaacctttgaactttgtgatgtatttttcttgccataactgttgcccttttctcttgaactactatatgcgtaagtt

SEQ ID NO: 429 - DNA, 370 bp, Glycine max
  Clone ID: LIB3028-051-Q1-B1-C4
cgacaacatatgcaaattctcgttcggtctcgacccgggctgtctcctaccgaatctcccagtctcaaagctcgccgacgcgtttgacttggcctcgaagctttccgcggaacgcgccatgaacgcgtcgccgtttatttggaaactaagaacgactcctcaacgtaagttccgaaagataactgagagaagcaatcaacgttgtaaacgacgtcgctaatgagatgatcaaacagagaatagaaatggggttcaacacgcggaacgaccttctctcgcggttcacgggatccataaacgacgacgtttatttaagagacattgtggtgagttttctcttagcgggccgtgacaccaacgcctccgggtt

SEQ ID NO: 430 - DNA, 357 bp, Glycine max
  Clone ID: LIB3028-051-Q1-B1-C5
agacaacaaccatctggaatagtaatccaagggggatccattgtgtctgaccctgagttctactcagtgagatttgagaacaaggcttacctagctcgtccatggaagaattactctaggaccattatcatggacacgtacattgatgatttgattgacgctgatgggtatttgccatggcaaggactagagggtccttctggtatggatacttgcttctatgccgagtaccacaacattggccccggttcagacaaatccaagcgtgtgaaatgggctgggatttggaacctcaattcaaaagcagcacgttggttctcaccatctaagttttttcatggaactgattggattgag

SEQ ID NO: 431 - DNA, 367 bp, Glycine max
  Clone ID: LIB3028-051-Q1-B1-C6
aactcagtgaaagagaatccgaggcgaagagaagagaaaaattaagatggaggggaaggagcaggatgtgtcgctgggagcgaacaagttcccggagagacagccgattgggacggcggcgcagagccaagacgacggcaaggactaccaggagccggcgccggcgccactggttgacccgacggagtttacgtcatggtccttttacagagcagggatagcagagtttgtggccacttttctgtttctatacatcactgtcttaaccgtcatgggagtcgccggggctaagtctaagtgcagtaccgttgggattcaaggaatcgcttgggccttcggtggcatgatcttcgccctcgtttactgc

SEQ ID NO: 432 - DNA, 382 bp, Glycine max
  Clone ID: LIB3028-051-Q1-B1-C7
cacccatgcacaggctgttgatactgaagctgatgcaagtggtgtgaacttatctcctaaatctaacaatatacagtcgcctaattcctctaagaattcagagccaagctcacctttttcaccaaggaagtccttgcatcatgatgataagaagcaccatgatgatgaagataattggtctgttgcttcctctagcgttgcatctgcacgcactgccaaatctaaggtaactgtaggttcagcccctacttttagatgctcggatcgtgcagagaaacggagggagttttatctgaagttagaggagaaacatcgagctcttgaagaagaaaaaaaccagtatgaggcaaggaaaaaggaagaggaagatgcagccattaaa

SEQ ID NO: 433 - DNA, 409 bp, Glycine max
  Clone ID: LIB3028-051-Q1-B1-B10
ctcgagccgcaacaaacatatctcttcctcttctgtccctcaatggaaggatcaggatccggtgtggttacagtctacggcaacggcgccatcaccgagaccaagaagtcccccttctccgtcaaagtcggcctagcccagatgctccgcggcggcgtcatcatggacgtcgtcgacgccgagcaggcccgcatcgcggaggaggccggtgcctgcgcggtgatggccctggagcgtgtccccgccgacatccgggcccagggcggcgtggcccgcatgagcgatccgcagctcatcaaggatatcaagcgggccgtcaccatccccgtgatggccaaggcccgcatcggccacttcgtcgaagcccagattctcgaaaccatcggcatcgactacgtcgacgagagcg

SEQ ID NO: 434 - DNA, 182 bp, Glycine max
  Clone ID: LIB3028-050-Q1-B1-H3
gtgacattgtggggcatgtggtggttgtgactagaaaaacttttaagttagtaaagacttggcaagactgtgtaactaatccatgtagaaaatagggtttatgtaaatgaatggtgcggatgataatgcgcataaagggtgcttccgccgttgtatatgcatataatataataatagtgctc

SEQ ID NO: 435 - DNA, 301 bp, Glycine max
  Clone ID: LIB3028-050-Q1-B1-H5
tttgaaaccaaaaatcaactcttttcacaaactctagttatatttacatttagttttcttaatttatggttttgttatgaattggaatgaacttgatttcaggcttcacagaagaaactttcgaacccaatgagggagatagaggtgcagaaactcgtcctcaatatctctggttggcgagagtggagatcgtctcacgagagccgccaaggtgttggaacaagtgagtggccggagcccagtgttttccaaagaggggagagtgttcgtgcctttgggattagaagaaatggagaagatt

SEQ ID NO: 436 - DNA, 335 bp, Glycine max
  Clone ID: LIB3028-050-Q1-B1-H7
cctcgtgccagctggcctccgccggccccgttccggctccaccgccgaacgtgaccccggtgtctgagtacacccagaggaagatttttgtgagcaatgtgaatgctgagattgatcctcagaagctgcttgaagtcttcaagcagtgtggggaggttgaggatggtcctcttggtttggataagagcactgggaaagctaagggttttgcgctttttgtgtgcaagtctgtggagagtgccaggagggctttgggggagcctcagaggagctatgaggggcatactttgtattgtcagaaggctgttgatgggcctaaggggagcggggggtat

SEQ ID NO: 437 - DNA, 392 bp, Glycine max
  Clone ID: LIB3028-050-Q1-B1-H9
ggagatccggctgcgatggacgagagaaagaggaagcggatggagtcgaaccgcgagtccgcacggcgatcgcggatgaagaagcagaagctgctcgaagacctatccgacgtagcgagtcgccttcaaggcgagaacgtgcgcttagcgcagagcataaaggcgaaggaggaagcgtacgttgagatcgaagccgcgaacgacatcctcagagcacagaccatggaactcgccgaccggttaaggtttctgaactccattctcgagatcgccgatgaggtcggcggcggtggtgaatccttcgagattccgcagattccagaccctctcttcatgccctggcagatcccccaccctatgatggcgtcacctgacatgctcctccatggaaa

SEQ ID NO: 438 - DNA, 400 bp, Glycine max
  Clone ID: LIB3028-051-Q1-B1-A10
ctccaaaccacatttaactatatataaaaccatcattatgaacatggggtttactctcttctcattctgacccttcttcttcttcttcatctacattagtagttcttgttattcattattcttcatactcacacagcttcttctgggggcaaaaggggtcatttttcagatccgaggttgagctcctctacccatcatgatggagctcggatacctgaatcagggtcagccttctagaggaagaacaccacttgtcactcttccattgttgctttcaacacttgtgttcttctccactttcacacatgccttctcttcttctgtgtttccggaattgaatcctattaaagctaagcactcacgtcttctcaggagtgctgtgcaacgagaaactcctaca

SEQ ID NO: 439 - DNA, 408 bp, Glycine max
  Clone ID: LIB3028-051-Q1-B1-A11
gaaagactcttctgagttctgagctagcgaggttgcaatggcgattatctccgatttcaacgaagaggagcagaaacccactcactcttcaccagcgcaaccccaatcctcttcctcttcctcttcctcttcgttcagtgctgcttttgaccggtcaaaccctatcgcttttctggagagagtcttccagttcgtctccgaacacagcgactttctggcgacggagagcgccgagaaggagatagcgttgctggtgcgcgccgccgggaagaagaagagggagtttctcaagtcggagagagaaaaggccgagaagaagaagagagaggacctcaaggcctcggaggagagggaaaaatccgacaagaggttgaaggaagagaaggaacccaaaagccgaagacacca

SEQ ID NO: 440 - DNA, 387 bp, Glycine max
  Clone ID: LIB3028-051-Q1-B1-A12
agctgcccgaacgtgtgagcgggcacgtccaaactccaagaagagtccaatacttagcttctctatctatcaccctcagagtcgaaccagacacacttccacgtcactaccaccaccgtggccggtggcgcctgaggctgtttccggtaacctctcccggcggagctgagtggtgatcaaggaactgggtcagacgctgagttgcgtgcaacagtccgacgaccatggtgtgctcttccctgcacttgcaactggagcactcggcgttgttgacgccatggtggtggcagaccccactgtgttgggacacaccattggctgtgagaggctttctcctcggcatgtcgctgctgccaatggtcggatcgacgttctttccctgttgtt

SEQ ID NO: 441 - DNA, 376 bp, Glycine max
  Clone ID: LIB3028-051-Q1-B1-A2
atcgttttctacataatacaaacctctctaatttttgaagcttattatacccaatctcgatatgcagatcttcgtgaaaaccctaactggcaagacgatcaccttggaggtggagtcctctgacaccatcgacaacgtgaaggccaaaatccaagacaaggagggcattcctccggatcaacagcgtttaatcttcgccggaaaacagctcgaagacggcagaaccctcgccgactacaacatccaaaaggagtccacgctccacctcgtcctccgcctccgcggcggcatgcaaatcttcgtcaaaacccttactggcaaaacaatcacgctagaggtggagtcctccgacacaatcgataacgtgaaagccaag

SEQ ID NO: 442 - DNA, 384 bp, Glycine max
  Clone ID: LIB3028-051-Q1-B1-A4
gattgatggccttaaagctcatgctgagaaacatgtgactgatagaatgatgctcaatgctgctaacattttccccttcaacacaccaaccaccaaagaagcatactactatagaatgatatttgagaggttcttccctcagaactcagccaggctgagtgttcctggaggaccaagtgttgcatgtagcacagccaaagctgttgagtgggatgctgcttggtctaacaaccttgatccatctggtagagcagcacttggagtgcatgcatcagcttatggaaatcaggtcaaagctgtagaaccagagaagatcataccaaagatggaagtttctccactaggagttgccatatagagctagtatgagccatagcaaaaact

SEQ ID NO: 443 - DNA, 383 bp, Glycine max
  Clone ID: LIB3028-051-Q1-B1-A5
ccacaatgctgcgcaagaacaagcttggcaccgttcccgttcacctcaacgtctatgatctcaccccaattaatggctacgcctattggtttggccttggactctaccattctggggttcaagttcatgggctggaatatggatttggtgcgaacgagcacgacacaacggggattttccaagttcaaccgaaacactgccctgggttcaccttcagaaagtcaattttcatcggaacaacagatctgggtgccaaggatgttcgagcattcatggagaagctagctcaagattattctggcaatacctaccatctcatttccaagaattgcaaccatttctgtaacgatgtttgtctcaaattgaccggaaagtcaatccct

SEQ ID NO: 444 - DNA, 369 bp, Glycine max
  Clone ID: LIB3028-051-Q1-B1-A6
caaagtcttcggcatatttgccactgcaagaggcgtgcatccacagggttaagcatgttgaagaagcaggcttagttcctgggttcaaagaggagtttttgatcattggtgagaactcactagatgatagcttggtcttgagtttaaggtctcttcagtttgaccttgcatgggaacgttgtagacagcttcaagctgaagatgtcacagtcaagggtaagattgtgggggtgaacaaaggtggagtggtggctgagttggaacggcttagacggtttgttccattgtctcagagatcaacgaactcacatgtacaagagcttcgtgatacggagcttcctcctagatttgtggaagtggatgaggaac

SEQ ID NO: 445 - DNA, 382 bp, Glycine max
  Clone ID: LIB3028-051-Q1-B1-A7
ccagattgctggggcggaagcacaaccgttgactagtctcaagcttaactctcatattcttcaggagtctactgctaaagagattaatgaaaatcccgaggcaggatgggaggctgctataaatcctcgtttctccaattatacagttgaacaatttaagcgccttcttggagtcaaaccaatgcctaagaaggaacttagaagtacacctgctatatctcacccaaagacgttgaaattgccaaagaattttgatgcgaggacagcttggtcgcagtgtagcactattggaagaattctagatcagggtcactgtggttcttgttgggcatttggtgctgttgaatcattgtcagatcgcttttgcattcattttgatgtt

SEQ ID NO: 446 - DNA, 368 bp, Glycine max
  Clone ID: LIB3028-051-Q1-B1-A8
ctcatgttcttgagagagatctcaaaccccaagaaatctattattgaataattatattaagtttttgtttgttaatttatacatgtggtgtataaaagaaaataatagttgtagatattataattagatatagattggtttaggaggaaaagttagttctactagaacaaaaaagcaattaatttagaagaaagcaacgaataaagagggggtgttggggccttgagccgattaatcttaatttaggttatccagatatttgctggtgttgtttcttatcccatgcgtaattgagcagctgcagcccacagcgttcccctctgattgaaaactcagtctcctctgcctgcttcatccttccttccttt

SEQ ID NO: 447 - DNA, 390 bp, Glycine max
  Clone ID: LIB3028-051-Q1-B1-A9
ctcgagccgcgcaaagcgcaaagcgcagttgttgccccttgaactcgaacgaagttctccgaagtcgaaacacgcgttcgattcgctgaactctgaagttaagttttgttgcgaaaatgtcggtggcgaagaagttgattagatgcgtcatccttgacttggacggcacgctgctcaacacagatggcatcgtaggcaacgttttgaaggttatgttaggtaaatacggaaaggaatgggacggaagagaagctcagaagataattggaacgacgccgtttgaggccgctgctgcggttgtgcaagattatcaacttccctgctccgccagtgaattcctctccgaaatttcgccactcttctctgaccagtggtgcaacattaaagcac

SEQ ID NO: 448 - DNA, 380 bp, Glycine max
  Clone ID: LIB3028-051-Q1-B1-B1
gtcggagaacttgcttgcactatgccgcttattatggaaatatagactgccttaaggtcattctttctgctgctcattccacacctgttgcagattcttggggatttgcaagatttgtcaacataagagatggaaacggtgccacccctctgcatcttgcagctcgccatagatggccggaatgtcttcatgcccttctagacaatggtgctcttgtttgtgcttcaactggtggatatggttaccctggaagcacgccacttcatatggctgcccgtggtggttctttggactgtgtccggatgttgcttgcttggggagcagatagacttcaattagattcttctgggaaaataccattctcagttgccctgaagcac

SEQ ID NO: 449 - DNA, 388 bp, Glycine max
  Clone ID: LIB3028-050-Q1-B1-H11
aaagaagacatcatctaactggatgtcttatttggccttggcaccgaaggcaactgaatcccttgggcaaggtgcttccaagaatggacctggcattctgcagagcagtacaagtgatgaagccaagaagcttgctgctgctgctcttgcagcagtgaaagatgatgctgccatggctgcctcaagcagggggaaacttgtgattactgaggttcgggactttgctggtcaagaaattgaagttaaaaagcttgtagattctgactcaaaggaggcaatggaaagagccaaagctcctccaccttctgcagtggatactgtccttgaacaaatcaagaagaaacagaagctcagtgtactggataagaccaaaaaggactggggtgaa

SEQ ID NO: 450 - DNA, 234 bp, Glycine max
  Clone ID: LIB3028-050-Q1-B1-F3
ctcgagccgcttggctgctggagagggggtcaacaatgttggggcacttctggtaacatgcaggagagcaaagcttgccggtgaattgaggctcaaagaagttggaagtgatcacatggattgttgtgtggaagagaaagtcttacaagtcgagcaaaacctatgatggatacaacaatgggcaatctagggaagaggcccgtagcatataaaaatggagtgaacaaatttggc

SEQ ID NO: 451 - DNA, 325 bp, Glycine max
  Clone ID: LIB3028-050-Q1-B1-F4
tgaaaaggctggcttgatgccactcccattggtagatgtcacatgaatactcagtactatcagtgccaacatttccatctttcttcttccagcctttgctttgtcttggttggtagagaagtgacaatccagccgcactcttaacgtggataatgatttcatttttgaatattgataacctagtcccctggagtagtgttaatattctttttggcagtgaacacacagtccactgtcaagttacctaggtaatgaagtgaagggttataagttgatccaaaggaatctgccagggtggagatgagtgtgagtttttaagtgcttc

SEQ ID NO: 452 - DNA, 199 bp, Glycine max
  Clone ID: LIB3028-050-Q1-B1-F5
agattgtactcctgaccatttgaatcaaaggttagcagaactacgtattggagatagccatcaagtgaagtcaagccagaggcctgttgtttccagaacttctagcattgttaagactccagaagtcgcttccgcagaggtcgcagcgacgaggaggagatcaatgagatcgtcagggaattgtgagacgcttcggcgt

SEQ ID NO: 453 - DNA, 265 bp, Glycine max
  Clone ID: LIB3028-050-Q1-B1-F6
gttgttccttcacctttcttatattcaggaaagtaagatcatctgcatcgccgacgcttccaacaataacaatggccgacaatgcaacaacgcaaggaagcaacaccctattttcgccttacaggatggccaagttcaacctcgctcagagggtggtgttggctccgatgagaggatgcagagcgttggactggatgcgacaggcagcgcttgcggaagacgacgcgcagggatgagcacgaggtggggttcgcagcaggggggg

SEQ ID NO: 454 - DNA, 221 bp, Glycine max
  Clone ID: LIB3028-050-Q1-B1-F8
caaagaggaggcaccatgacaagcactcttctgtctttgctcttcttgctcttctctcttctcactccaactctaatttcctcttcaccagttctaaaccctcaagaggtcgtgagagaggtcaacaagaaaatcaatggctcgatggcaagacccagaaggaacttggggtagctctcatgtggtagtggcaacgccatcgatgattgttggaggtgtga

SEQ ID NO: 455 - DNA, 384 bp, Glycine max
  Clone ID: LIB3028-050-Q1-B1-F9
acaatgcaaatcttgaggctgttagacaggaacttaaagaattacacccacatgatccccaaattgttgtcctcaaacacggagtgtggagagtaaaaggcattattcaggtttctagatctataggtgacgtatatttgaaacatgcacagtttaaccgggaaccacttaatgcaaaattcagacttcctgaaccaatgaacatgcccatcttgagtgctaatcccactattctttctcatcctctccaaccaaatgattccttccttatattcgcatctgatggtttatgggagcacttgagtaatgagaaagccgtggatattgtaaacagcaatccacatgcgggtagtgccaagagacttatcaaggctgctctacacg

SEQ ID NO: 456 - DNA, 251 bp, Glycine max
  unsure at all n locations
  Clone ID: LIB3028-050-Q1-B1-G1
aaaataaaataaggattttttttgctgctaattttctcccatcagatcactgcataatcataatgctgttcctcttatatcatctttgttgatccatttttttttctctctctttctcaaangtcctgtgtcagggactctgaagagaggagtcacaaacatcaagtacttactagttagcacaaaattcacagaactcgtgccggggttcagagggactgaaactttctcctttagaagttgctggggta

SEQ ID NO: 457 - DNA, 394 bp, Glycine max
  unsure at all n locations
  Clone ID: LIB3028-050-Q1-B1-G10
ttttgttactaataatcccgaaaggcaatgagaacatcacaaattctgttggttttgctttggttcttctgcatttatgccccttcttcgtttggagcaaatgtcacgtatgaccacagagcattggtcattgatggcaagcgccgagtcttggtatctggttctattcattaccctcgtagcactccagagatgtggccagacctcattcagaaatccaaagatggaggacttgatgtgattgagacttatgttttttggaacttacacgaaccagttagaggccagtataactttgaaggtangggcgatttggtcaaatttgtgaaggtagtagcagcagcaggtctatatgtgcatctccggattggtccatacgcatgtgctgaatgga

SEQ ID NO: 458 - DNA, 391 bp, Glycine max
  Clone ID: LIB3028-050-Q1-B1-G11
gttcaattcccttttgtctgaggtgtgtgcattcttgtttaactcctctttgttcctcagacatcccagaagggaaccaaaaataaaaaataaaaaaataaacacaatcaataaaggggagaaaacaaacatgtcattcacaggaactcttgataaatgcacagcatgtgacaagactgtctatgtggttgacttgttaactcttgaaggaattccttaccataaaaactgcttcaagtgcagtcactgcaagggatgtcttacgatgtgcacatactcctcaatggatggaattctttattgcaagacacattttgaacagcttttcaaggaatctggcaatttcagcaagaacttcgcaaagtcttctgagaagcaaaatgagttgaat

SEQ ID NO: 459 - DNA, 395 bp, Glycine max
  unsure at all n locations
  Clone ID: LIB3028-050-Q1-B1-G12
ggtagctagtactgctccctctgcgacttcgtttcgtagagggattttggccgccaaataaacagtctcaccataaactccaaagtcccaacgctaaacgaaaccaaaccccaaacacaaataccgttgttgtctgttgtctctgtcgtgtctatattcgcagatctctcactcattctctgttgtttctctgcccaacttcgaattcgaaagcaaaaacatgtttttggcgagacccattttccgagcaccctccctttgggcgttgcactcttcctacgcgtattcctctgcctcagcagctgcaattcaagctgagagagccatcanagaaggacccagaaacgattggagccgagaccaagtcaaatccatctacgactctcccattctcg

SEQ ID NO: 460 - DNA, 139 bp, Glycine max
  Clone ID: LIB3028-050-Q1-B1-G2
ctcttacacacacaagcactacaacattttctttggtctctcattttctctatagctagatgggttctggtgctttacaacttcttctgatcttgggtcttctggctagctcatgcttagcacaagcgccaggtgctgc

SEQ ID NO: 461 - DNA, 228 bp, Glycine max
  Clone ID: LIB3028-050-Q1-B1-G3
ggctgatgcttgtagattcgtttgtaatgatgcaaagtttctctcacgtggcataatgaggttggatgctcgtgcacgtcaagatgttgcttttcttgggactgaatttctcaaacttgatgctcgggcaagagaggagactgggagaggtgagcgtgatgtcaaggaaaaagctagccgacttagtcatattgctacgatgttgaacgataaagctcagtccagagt

SEQ ID NO: 462 - DNA, 343 bp, Glycine max
  Clone ID: LIB3028-050-Q1-B1-G5
cctaaacaactctttctcttcttccttcgctcgttgttctccctcgcgtagatcgacaatggcggagacagagacgtttgctttccaggctgagatcaaccagctcctcagtctcagcatcaacaccttctactccaacagggagagtttccttcgtgaactcatcagcaacgcctccgatgctttggacaagattcgagttgagagtttgacagataagagcaagctcgatgctcagccagagttgttcattcatagtagtccagacgagactaagaatacactgaccattgttgacagtggtattgggatgagcaaagctgagttggtgaacaacttgggt

SEQ ID NO: 463 - DNA, 168 bp, Glycine max
  Clone ID: LIB3028-050-Q1-B1-G6
aagatctcgatgcttgttttctgacataccattctctttatatgcccatgggaggttcacaaagagtccaggctcccatgccacatcctactgagatggacaatgtccataggatgtctttacgtgtttttggtcgtgcgtcagatgggttcagaggatctctgtggg

SEQ ID NO: 464 - DNA, 336 bp, Glycine max
  Clone ID: LIB3028-050-Q1-B1-G8
ctctctctttctctctctagaaattccattttaaagagatgctcatgctcctctctttaccttgctcccgttaaagctacgcttccaactcggatagagctgtgttaactggtcctggttggtgagggtgctattggtgttgttctgttgatgtaagcagctgaatattgtttctatatcagaatggggtgctgtttgttgtgttgctgccaaagatagaactatacagagtgcatcagccagtgaaatcttgcatcgggatattcgacattctccaacatggaacttccgctgggatcatcgagggggtggtactggtgaagatactgctgtaac

SEQ ID NO: 465 - DNA, 390 bp, Glycine max
  Clone ID: LIB3028-050-Q1-B1-G9
tctaaaataaaaatgaagacattattcctatgctgtaaaactagattctaatcatattaaaatctagttttacagcataggaataatgtctctaaaataaaaatgaagacaaatattaaggagattgattgtgccttttttatatcatcaagaaatgtaatatattgtgggtggataaaaatctagcaaatgtagcacttctctttctagcgcccaaattgtgctgcctacaatgacaagaccaactcacctgcatagagtatagctgaactggtgaaggttcagtagaaaatagatacagatagctagtgagagtagaaccttagtgtcaatgtcattgatgcttaattggcaacgatgtaccatttatgacaatcataatgaaatcaa

SEQ ID NO: 466 - DNA, 232 bp, Glycine max
  Clone ID: LIB3028-050-Q1-B1-H1
ctttagatgaggctggcgatatagatcagttagaactactgagactgaaagctgtacttcaaattactcagcagcagcccaagcaagcaattgagacctacagaatcttgctagctgtaattgaagcaagaaaagagcattgggttcaagcgaagacattcaggcacgaggcattagcagagcagaagttggaaatggaagcctggcaagatttgggtaccatttatgcaga

SEQ ID NO: 467 - DNA, 391 bp, Glycine max
  unsure at all n locations
  Clone ID: LIB3028-050-Q1-B1-F11
catcaattataagcatgggtttgtggaacacaacgaatgcagtgtcttgccgctttcacaagtttggtgatgaccaaaagaatctggtcttccaaggtgatgccacgtcttcttccaggggcatagaactcacaaagttagacggtggaggaaaaccagtgggtggcagtgtggggagagtgttatactcttctccagtgcacctttgggaaagctctacagtggtcgcaagctttgaaaccgacttcaccttttccatctcatcagactctactactccaggtgatggccttgccttcttcattgcaccatttgacactaaaatccctccaaactctggtgggagcaaccttggactcttcncatcagacaatgttgttgctgtcgagtt

SEQ ID NO: 468 - DNA, 396 bp, Glycine max
  Clone ID: LIB3028-050-Q1-B1-H10
cacatcttaatccccaaactgaacccacccctcttcgtccggttcactagcgttcgattcgtttctatctctctctctctctgtcatgggttcgctcgaggcaccaaccgccgcgggagcccgacgcgtcgaagcggcgcagatcgtcggtgctcccgttggaggtgggtacgcgcgtcatgtgccgttggagggacaacaagtaccaccccgtcaaagtcatcgaacgccgcaaggttcccaacgccatccccaacgattacgagtattacgtccattacaccgagttcaataggaggcttgatgagtgggtgaagcttgaccagttggatcttaattcagtggaggctgttgttgatgagaaagtggaggacaagggtgcgacagggttgaaga

SEQ ID NO: 469 - DNA, 389 bp, Glycine max
  Clone ID: LIB3028-050-Q1-B1-D10
gttaacaagggcgacgcaccggcattgccagagactcttaaaaattacaacaagctgttgtctcttggcttcaagattgtattcttgtcaggaagatatcttgacaaaatggccgtaacagaagcaaacctaaagaaggctggcttccacacatgggagcagttaattctcaaggatccacatcttatcactccaaatgcactttcatacaaatcagcaatgagagagaatctgttgaggcagggatacagaattgttggaatcattggagaccaatggagcgatctgcttggagaccacagaggcgaaagcaggacctttaagcttcctaatcccatgtactacattgagtagtaccttcacctctctcaacaatctagctagagttt

SEQ ID NO: 470 - DNA, 390 bp, Glycine max
  unsure at all n locations
  Clone ID: LIB3028-050-Q1-B1-D11
gctacttaccaaggcacactcgaccgataccgtttctttcaccttcaacaagttcaacccagtccaaccaaacattatgctccaaaaagatgctagtatttcatcctctggggtgttacaactcaccaaagttggcagcaacggcgtgcccacctcgggatctctcggtcgtgccctttacgctgccccaatccagatttgggacagcgaaaccggcaaggtagccagctgggctacatcctttaaattcaacattttcgcacccaacaaatcaaactcagctgacgggcttgccttcttcttggcacccgtcgggtctcagccccaatccgacgatggatttcttcgtcttttcaacagtcncttaaaggacaagtctctccaaaccgt

SEQ ID NO: 471 - DNA, 389 bp, Glycine max
  Clone ID: LIB3028-050-Q1-B1-D12
aaggattccaagtggctcctgctgagcttgaagcattgttgattgcccacccaaacatttctgatgctgccgttgtaggcatgaaagatgaagctgcaggggaaattccagttgcatttgttgtaaggtcaaatggttctgagatcgccgaggatgaaatcaagaaatacatttcacaacaggtggttttttacaagagaataggtagagttttcttcacggactctattcctaaagcaccctcaggcaaaattctgcgaaaggtattaactgcaagacttaacgaaggtttggtggtggccaattaggtccataattgtgacagaggaaaatcgtggctgttttacttaccgtaccacaggcccttcctgttgtggtttttgttccaa

SEQ ID NO: 472 - DNA, 232 bp, Glycine max
  unsure at all n locations
  Clone ID: LIB3028-050-Q1-B1-D2
gtggcggtggtgccgggcttgaacaactgttgcagcctcatcacttcccatctccaatggaacaacaacaacaacgttccaggtggaaacccagcgtcgaggtggcacccaattgccctcgctgcgccgccaccaacaccaaattctgttactacaacaactacagcttgtcccagccgaagtacttctgcagaggctgcangcgatactggaccaaaggcggctctctccg

SEQ ID NO: 473 - DNA, 253 bp, Glycine max
  Clone ID: LIB3028-050-Q1-B1-D3
aaaaaaacccttagccaacacaaccatcatggccacctctgctattcagcaatcagcattcactggtcaaactgctctgaagcagctcaatgagttcgtccgcaagaccggtggcgccggcaaaggtcgcactaacatgcgccgcaccgtcaggaatgctcctcagagcatttggtatggccctgagcgtcccaagtacgtgggtccattctcggagcagattccatcatggctggccggggaagtccctggt

SEQ ID NO: 474 - DNA, 223 bp, Glycine max
  Clone ID: LIB3028-050-Q1-B1-D4
gtaaggcttgcatgcggggccatgtaaatacctttaatgataactatgagaagaatgtgactggtagtagagtttatcatggggttcattagctaggattttctctgtttctcttgtagagttgcgcgttctaatgtgggagaagagatgcgtttgggttgagattctcgaatattgagtctatgcagggtgtgtttgtatgaaggaggaagggagaaaaagg

SEQ ID NO: 475 - DNA, 195 bp, Glycine max
  Clone ID: LIB3028-050-Q1-B1-D5
cattaatggcttcatgggagggacagcagtaattctcatcctccaacaactaaagggtgtatttggcatgagacatttttcaaccagggcgaacttggtggcagtggtgaagagcagagtcaacaatagacacgagattaggtgggagcctaccattcttggcgtgatctttggtgggttcttgcgattgaccag

SEQ ID NO: 476 - DNA, 380 bp, Glycine max
  Clone ID: LIB3028-050-Q1-B1-D9
cataacttccttaacaacctagtatttcagaccattcttcttgatcagaatccttattaatcatcaatcatgcagacttcacttcttcaaattgttggaactccagtaatctcagcaacatatgatcagcttcaaaagtcagttaacagatacttacctggtcctgccactcaatgtcaatattcaaccacaacatcaaagcaaatgaggctgaggacaaatatatctgaaactgttaagagaaagataagtttaggggctcgcattcttcgagttggtggagtggaaaaagtgttcaagcagttttttagcatggaagaaggggagaggctgttgaaagtttcccaatgttatctttccaccacatctggtcctctagc

SEQ ID NO: 477 - DNA, 230 bp, Glycine max
  Clone ID: LIB3028-050-Q1-B1-E1
ctctggatctcgtctcgatcgatcgatctcgaacatgagcactggggagcttctcaacatcgaacctctcgaactcaagttcccctttgagctgaagaagcagatctcatgttctcttcaattgtcgaagaagaccgagagctatgtgggcgtcaaggtgaaaacaaccaatccggagaagtattgtgttcgtccgaagactgggagtgtcacgccacgatctacgtgtg

SEQ ID NO: 478 - DNA, 393 bp, Glycine max
  Clone ID: LIB3028-050-Q1-B1-E10
tgcagggcctgctgatgcccttccatattgctacatgccgcctcagcatgcgtcccaagttggagctgctggtgttataatgggtaagcctgtgatggacccaaacatgtatgctcagcagtctcacccctacatggcaccacaaatgtggccacagccaccagaccaacgacagtcgtccccagaacattagctgatgtgtcgtggaaattaagataaccaggcaccggaatcagttgtgaatgtcaaactgaatggttgggaagatccatactacattgcgagcagaagctgtagctgatagtttacatgcaatgcagactataaacatatgtagataatgtgctagggaaaacttaaccttatctttgatttagctggataaaatggtat

SEQ ID NO: 479 - DNA, 393 bp, Glycine max
  unsure at all n locations
  Clone ID: LIB3028-050-Q1-B1-E12
cttgtcttgaagaatacactgaagagaatccgaagatagtgacaaaatgctctcatcattttcatcttggttgcatttatgagtggatggaaagaagtgacagctgtcctgtttgtgggaaggtgatggtatttgatgaaacgactgattgaaaaggtttatgtcgtggatgataccaacaacagaggaaaggaaatatacagtatagacattgtgaatacttcagattaagcgcttatcatgtatagtaagtatataacatttttattaaccatcactgtaagttcaatctcatccaagttgtttctatatttatacttttctcccttgccaaaacatccaagattaanaaaaaaaaatgccattttagatggcgactttgtcatggtttca

SEQ ID NO: 480 - DNA, 240 bp, Glycine max
  Clone ID: LIB3028-050-Q1-B1-E2
gcactagctaagttcacaatttcaaaatggctaggggactaaagaagcatttgaaaaggctcaatgctcctaagcattggatgcttgacaaactgggtggtgcatttgcgcctaaaccctcatctggagcacacagatcgagggagtgccgccccctcattcttattctgcgaaaccggctgaagtatgctctgacatagcgtgaagtcattgcgattctgatgcagcgccatgttcgtg

SEQ ID NO: 481 - DNA, 238 bp, Glycine max
  Clone ID: LIB3028-050-Q1-B1-E3
gaatcatttggggattgctaggctggtggggaaccttaggccatgcatttggtgtctctagtatgccaggatttggtgccagtcgcagcttgccacaagcactttccaacactagaactgatgggctaggagcactctacagagaacggacagcttcctttcttaactccttggtgaacaacaggttcccttatacaacccagcaagtcagagacagatttatagcatctcttgcctc

SEQ ID NO: 482 - DNA, 303 bp, Glycine max
  Clone ID: LIB3028-050-Q1-B1-E4
gtatttgtaggggtatgatgacatcccaaaagagctcccagaccccgaagccaagaagcctgaagattgggatgatgaggaagatggtgagtggacaccccctaccattgccaaccctgagtacaagggcccatggaaggcagacaagatcaagaaccccaactataaaggaaaatggaaggcaccattgattgataacccaggtttcaaggatgaccccgacctctaggttttccccaacttgaagtacgtggggattgaattgtgggaggtggaatcgggtactttgtttggcaatgtctt

SEQ ID NO: 483 - DNA, 246 bp, Glycine max
  Clone ID: LIB3028-050-Q1-B1-E5
agaatttgctaggcaacagggtgtggaggttgtggacaacgagtactttatcacacctgacaacgttggcatgctcaagctggcaaaggaagcaaacacaatcctgtttgattaccgaatcccagcatcggggtacgagacgtgcggatccggtgtggagagtccactgcaaaggagtggactcccaggaagcatgtacgcgcccgaaaccgttgggtgcgtggtggttggacgggagggccggtg

SEQ ID NO: 484 - DNA, 106 bp, Glycine max
  Clone ID: LIB3028-050-Q1-B1-E7
cagatttaatttcagatagattagcccttggactgggtgcttctggccctctgaaacttgaagatgtgaaagagatatcggagatgtgccttaaagtggcatccag

SEQ ID NO: 485 - DNA, 174 bp, Glycine max
  Clone ID: LIB3028-050-Q1-B1-D1
atctagcctgtggtgtggccataacaagaagggagagaaaacaaaataatttaaggttgagatgaggaagtgtgagctctgtaacagtcccgcgaagttgttctgcgaatcagatcaagccagcctctgttggaaatgcgatgctaaggttcagaatgcgaacgtccacgtcac

SEQ ID NO: 486 - DNA, 216 bp, Glycine max
  Clone ID: LIB3028-050-Q1-B1-E8
caaactcacacactttgtactctccgtccttccttcttcgatccagatctctctccttctccctcaaatggcttcccttctgcagtgttccatgcccctcgtctctctttccaagcgagctctggtacccggtagcaggatcgccgaccgaggttcagtttccctttcaggtgagggaagaagtttcgcagccgtgacggtggaggccagagggcg

SEQ ID NO: 487 - DNA, 387 bp, Glycine max
  unsure at all n locations
  Clone ID: LIB3028-050-Q1-B1-E9
cgaattcttgaactccgacttcttcaagacctcgagaacaatgatgaatgtaggaaaaatgggagcctgaaaaggttaaatgaccagagtgatgtctgtggatttagaagttgcttcaaaaatcattatgattcgcttccgaatcagaggtgcttgaggaatcgagaagaagtgattcaggagacgatggaaatggagttggaaaatatgatggaactgggcaccctcaagggcaagaaaacatattcttttaagaatggtacaagaagtgcgttgaaccttgagaacaccacaagatcctttctagataacaataaatcaaatgataataactggaatggcgaaatgactttacccctgctagtanacaagtccaacgtctgtatg

SEQ ID NO: 488 - DNA, 225 bp, Glycine max
  Clone ID: LIB3028-050-Q1-B1-F1
gacctctgtccttaaagctttgtggcaatcacattccaagtggccttaccctacagtggctacgaagactgagtcagataaagttgcagggaatgccattttatatgaatgtgttcagacagtaatgacgattgaggagaatgggggcttagatgtacttgccattaatatcctgggaaggttcttgtcaggccagtgagaacaatatcaggtttagttctgctc

SEQ ID NO: 489 - DNA, 389 bp, Glycine max
  Clone ID: LIB3028-050-Q1-B1-F10
ctgacctggccagagaaagtcaaatttgcaattgggcttctaccagctatgcttggtggacagccatatgttgaggctcaagatggtctttcagttcaagaatggatgaaaaagcagggcgtacctgagcgagtaactgatgaggtgttcatagcaatgtcgaaggcactaaacttcatcaatcctgatgaactttcaatgcaatgtatattgattgctttaaaccgatttcttcaggagaaacatggttctaagatggcctttttggatggcaatccccctgaaagactttgtatgccgatagttgatcatattcagtccttgggtggtgaagttcatctaaattcgcgcattcaaaaaattgagctaaatgatgatggaacggtgaa

SEQ ID NO: 490 - DNA, 129 bp, Glycine max
  Clone ID: LIB3028-050-Q1-B1-A7
atttcccaccttctactgcactccgagtaacaactcgcactatatatgttgcattgacaatgttaattggcatatgtatcccgttctttggctctcttcttggatttcttggaggctttgcgtgtggcc

SEQ ID NO: 491 - DNA, 222 bp, Glycine max
  Clone ID: LIB3028-050-Q1-B1-A8
ctcaactaaactcatatttccaaaacgcagaaccaacaatgtcgttccccttcaaccactctcaccgcagggacgacgacgacgacgacaaacgacccgccgtttaccctcctccgggtaacaccttcaacagccctccaccacccttcgacggcgtccatcagccagaaacccacgtgtcccatgtcttcaacagcagcagctactccgctcccccgcctc

SEQ ID NO: 492 - DNA, 340 bp, Glycine max
  Clone ID: LIB3028-050-Q1-B1-A9
gatcgagataactagaaacagtgtgatgaaaatgaaggtccttgttttcttcgttgctacaattttggtagcatggcaatgccatgcgtacgatatgttccctctccgaatgaacactggctatggtgcccgtactccggaggtgaaatgcgcaagttggaggcttgctgtggaagcacacaacatctttggctttgagaccattcctgaagagtgcgttgaagcagcaaaggaatacatccatggcgaacaatatagatcagactccaatacagttaaccaacaagcttacttttatgccaaagacctcgaaatccatcccaaggacacatttgtgttc

SEQ ID NO: 493 - DNA, 308 bp, Glycine max
  Clone ID: LIB3028-050-Q1-B1-B1
ctcagagccagcgagtgatgatcgcttcgccgcagtaatcgccggaaacgaattcgccgtttccctgccgagatctctcaatctccgacgactcagatacctctattaattttcctccggttaggttgttagggtataaatagtacgtagtttttccttagttatggcttcggagaatgtgaagaccggggattccgccgtcaccaccatcgtcaatctcgccgaggaggccaagctcgccagagaaggcgtcgtcaaagctgcgaggtacgcgctcgccagcagctgcaagtcgctcgtcgccggtg

SEQ ID NO: 494 - DNA, 390 bp, Glycine max
  Clone ID: LIB3028-050-Q1-B1-B10
catacttagaaacagcaactatgtctctcatgcagcttactagctcccctgttggctcactggtccgtttcattgtaatatttgctttatggtacagaaccatggctttggccaagttgccaccaaacgcttcatcagttccagcagttttagcgtttggagattccatcgtggacccaggcaacaacaacaacataaaaacattgatcaagtgcaacttcccaccttatggaaaggattttcagggaggaaacccaacgggtcgattttgcaatggaaaaattccttctgacttaatagttgaacaattgggtattaaggagtatttgcctgcatatttggatccgaatctcaaatctagtgatcttgttaccggcgtctgctttgcct

SEQ ID NO: 495 - DNA, 386 bp, Glycine max
  Clone ID: LIB3028-050-Q1-B1-B11
attttcccttttcagctttcattggtgtggcctagctgttttctcaatgagaaagccttcatctctgcaaagcgcacttttgcgctttggggttcccttgttgcttgttatcaccttctgttatgctacttctactgctgcagcaacaactcaagtttcagggaatgaagagctgccaaagacaaacctaaatgggcatgatgaagaagcaaaattcggattttttcatcataaaccaatattcaagaaacatattccaattccagtatataaacctgtaccaaagccatttccagtgtataaacctataccaaagccagttccagttccagtgtacaagcctattccaaagccagtgtataagcctattccaaagccagttccag

SEQ ID NO: 496 - DNA, 392 bp, Glycine max
  Clone ID: LIB3028-050-Q1-B1-B12
cggcgacaatggaggtagctgcgaacgcgcggaaccccgccgctaagcgaaaattcgacgacgccgtttctaacggcgtcgccgcccccgccgacgtcgatctctccctcctcgaagccatcgagaagtcgcagaacgcggtcgaagccctcgatctccgagccctaaagaagcacgtgctctccttcgagcgtcgcctgaaggataacatcgaagcgcgccttaaataccctaaccaaccggaccgcttcgccgattccgaagtagaactccacgaagagcttcagaagctgaaggtcctcgccggcgcgccggagctctacccggacctcgtcaacctcaacgtggttccctccatcgtcgacctcctcaaccacgacaacaccgacatc

SEQ ID NO: 497 - DNA, 230 bp, Glycine max
  Clone ID: LIB3028-050-Q1-B1-B2
ttacatgcccatttttttttgtgtctaacttgttttcatgttttatatatggtttgcagggtgattatgagtgctttggatcgttgttgagaggggaaatgagatgttttggctttgaaatttggatagcattcggcagagacagaaggattacgtttaatttctgtacacacgggaacacagattccagattccaaaagggaatcatcaatcagatcataatatgtgtg

SEQ ID NO: 498 - DNA, 231 bp, Glycine max
  Clone ID: LIB3028-050-Q1-B1-B5
aacaaatcaaagccatggccacctccaacttctctattgttctctccgtctccctagccttctttttggtgctacttaccaaggcacactcgaccgataccgtttctttcaccttcaagaagttcagcccagtcgaaccaaacattatgctccaaagagatgctagtatttcagcctctagggtgttacacgtcagcagaagttggcagcaacggggtgcccacctcggga

SEQ ID NO: 499 - DNA, 254 bp, Glycine max
  Clone ID: LIB3028-050-Q1-B1-B7
gtgaagtgaaagcaaatttgaagaaaggtgttggagcaaatgaattgctgtcgcaacttgcagcacatcctgtacctgctcaagaaaagatgagtgctctggttgaagctttgttcgagggaactgagaaaggttttgctaaagaaggctgataaagagaagaactacttttctgttgctgttgcggatgagggatcgcagccgttgttgcttcatgcgattgaagagttttcttgcaagtcgaggtcaaaggc

SEQ ID NO: 500 - DNA, 240 bp, Glycine max
  Clone ID: LIB3028-050-Q1-B1-B8
gtcgatgataatcagctcagcaatacagcaaatgagtggcctgacaacagtttggcaaacgaggatggagaaaactctcgtctgcaagaatctcatgaagtgtggcaagaagatggtggcttccaagaggctgtgcaaaattgggtgggaggaccttctgatcatgaaagtgctccagttggtagaattcgtggatgttagtttcctgaagatgacaacgtgtacagtggtgaaggcagg

SEQ ID NO: 501 - DNA, 392 bp, Glycine max
  Clone ID: LIB3028-050-Q1-B1-C10
gaaaaatatcttcatgagcataaagaggcatgaaggattggattttgaatatccacctagggaccctggaatgcctcattaccaaatgcatgattgggacaacactggaggaagattttctgatgcatctacaaataactcacatggggaagccagattgcataacttgattcctgaggatggcaaaagagatcctcatgatactgtgcacaatgatcatcctgacatggaagcaaatgaaaagaaccaaagccctataagatggaaacagaagcctcttgtagaccagcaacaaaacaagagcatttctgaccttgcaatgaactatgaaaataggaaaacattagatgaacatattatagaatttttggagccagaaatccctatcaact

SEQ ID NO: 502 - DNA, 389 bp, Glycine max
  unsure at all n locations
  Clone ID: LIB3028-050-Q1-B1-C11
gagttctcagtgttagttgatcgtgccactggtggagccagcatcaaagatggtgaggtggaattgatgcttcacaggcgtattctccatgatgatagtcgaggagttggggaaccacttgatgaacaagtttgcgtgaacaataataatacttgcgaaggactaacagtcagaggaaattattatatcagcatccacaagcttggagttggttcacgctggcgtcgtacaactggtcaggaaatttattctccattcttagtggcttttacacatgagatctcggaaaattggaagtcctctcatttgacgaaaggaactatcatggatccaaattacagcttgcctcncaatattgctttgataactcttgaggagttggatggtgg

SEQ ID NO: 503 - DNA, 390 bp, Glycine max
  Clone ID: LIB3028-050-Q1-B1-C12
agcgtctccattttctttcgcgatggccgcgcgagccctgttgaccagaaaaaccctagccaccgttctccgcaacgacgcgaagcccataatcggagctggcatagctgcagctactcattctcgtgggttgcacgtgtacacgctccccgatctggattacgactatggcgctctggagccagccatcagcggcgaaatcatgcagctgcaccaccagaagcaccaccagacttacatcaccaacttcaacaaggccctcgagcagctccaagacgccgtcgccaagaaagattcctccgccgtcgttaagctccagggcgccatcaagttcaacggcggaggtcacgtcaaccattctattttctggaaaaatctagctcctgttcg

SEQ ID NO: 504 - DNA, 303 bp, Glycine max
  Clone ID: LIB3028-050-Q1-B1-C2
ctcttgtctcacgatctcaacggagcacctctcttcaggtcgccatctagactgcaatcatggctgatggaccacagcatccatcagttgttcagaagctagctggacagtcttacctgggtgtccaggctaagccccaactttaactctgggaattagtcctcgactggttcttacttcaatggaggactgcactcttctgggttggctgttgtgtcgcctggatctccagttactgtgcatgctccagcagacaggggagtgagtgggtgtcgagtggattttctgatgggtggagtgtct

SEQ ID NO: 505 - DNA, 310 bp, Glycine max
  Clone ID: LIB3028-050-Q1-B1-C3
attctctttgcctgcctagtttcaattctgtccaatttccaaaaccaaaacaagccacacaagttcatggcaactcccaataacaaactctctcttgccatggagagaactgggcaatgggttttctctcaagacataccaactgatgttatagtggaagttggagaaacaactttctctctgcacaagttcatgctagtggcaaaaagcaactacataagaaaactggtattgggatcagatgacagcgaactcaacagaatcgagctctctggacataccaggaggcccttcaatcttcgagaaaacc

SEQ ID NO: 506 - DNA, 217 bp, Glycine max
  Clone ID: LIB3028-050-Q1-B1-C4
attttgataagacgaccctttggtaattggatcttcaagaaagagagacccttgggatttcgtcaccatgagtctcttcggtcttgggaacagaaaccaaaaaacatttcgtccaaaaaagagcgctccatctggaagtaagggtgctcaacttcaaaaacacatagatgccacgttgggtagtgggaacttgagggaggctgttaaactgccccct

SEQ ID NO: 507 - DNA, 242 bp, Glycine max
  Clone ID: LIB3028-050-Q1-B1-A6
ctgaatttgcgggttttggatttggacttggtcgtcaacacagtctaattaatatctttttgctccttcgcttaggaatcttcttcttcttcttcttgttcctgcaacgcactgaattcgatcaatcaatcgagcttcaattgcgtggtttcgatcagaggaaaatggccggtcagttatcgaagggagaggaattcgagaaagaggctgagaagaagctcagcggttggggcttgtttggg

SEQ ID NO: 508 - DNA, 227 bp, Glycine max
  Clone ID: LIB3028-050-Q1-B1-C6
cttcaacttccaaagggagaacgtggcaaagcaagtgcctgagcagaacggcctcacacactttgaggctggtgatacacgtgccaaggagtatgtcagcctcctcaaatccaatgaccctgttggattcaacattgttgatgtcttggcttggggctccattggccatgttgttgcttactacatcttgggcagcactggcagtggctatgaccctgcattcgttg

SEQ ID NO: 509 - DNA, 224 bp, Glycine max
  Clone ID: LIB3028-050-Q1-B1-C7
gcaaaaagaaagaatcccaggcgaggagaaagatggaggggaaggagcaggatgtgtcgttgggagcgaacaagttccccgagagacagccgattgggacggcggcgcagagccaagacgacggcgaggactaccaggagccggcgccggcgccgctggttgacccgacggagtgtaggtcatggtcgtttgacagaggagggatagcagagtttgtggccacg

SEQ ID NO: 510 - DNA, 235 bp, Glycine max
  Clone ID: LIB3028-050-Q1-B1-C8
ttctctctctctctctctccatgagcacagtaccgtaacgtaacgtaaccacgagatgcctctattctagcacttgggaccccaaatccgtgccaattcctccgctccttttcgcagacgaaggcacattctgacgttcagaggagtggaacgcaagactaaagattccaccacctgatacaagctaggaaaacagaggtttgaaatggctgtgtcactgtggagaagtcgcact

SEQ ID NO: 511 - DNA, 376 bp, Glycine max
  Clone ID: LIB3028-049-Q1-B1-H12
acaagtttttgaaatgttgtcaccccttcttctatttctatgcctaactcttcctttgtttttgttgtccttcttcaaataccgtcaaaccttcacgaatcgagcacttccaccaggtcctagaggccttcccagaatagggaatcttcatcaactagatagtccttcacttcaggagcagctatggcatctcgcaaagacatatggtcctttattttcccgtcaatttggattaaggccagccatagttgtttcctctccaaaattggccaaagaggtaatgaaagacaatgaccttgagtgctgtggacgacctaaattactaggccaacagatactaacctatcatgggttagacatgggattttctcatacg

SEQ ID NO: 512 - DNA, 611 bp, Glycine max
  Clone ID: LIB3028-049-Q1-B1-H3
agcagattttacctccataaacccttcgttcttcttcgtctccctttgcttctctcacttcccatgtctgagtggcttcgacgccttccctcgccagaatgctaacacatctccgccgcgcggctgccgcatgcggtggtgctacctccgaccacttcctcgctctcaggcagttcagctccgccgtcgtcgccgtttcctccgtgtctgattccgatccaacacttccctcttcttccgattcacagagaaaagcatctagatggttgctatttctacctggggcaatcacatttggccttgggacttggcagattggtagaagagaagaaaagattaaaatgttggaatatcgagagaagaggttgcaaatggaaccattaaaattcagtagtgcttattcatcagatgaggaattagattctctggaatttaggaaggtggtgtgcaaaggatattttgatgataaaaaatcagtctatgtgggaccacgttcaagaagtatttcaggagtcactgaaaatggctactatattataacacctcttatgccagttcccaattgtcctgacagtgtaagcattccaattttagtcaacagagggtgggtt

SEQ ID NO: 513 - DNA, 591 bp, Glycine max
  Clone ID: LIB3028-049-Q1-B1-H6
gaggggtgtgaatgtgaatgctgttaggcccatcatgaataatcctcccagtgttgaagatgtggcagcagcagcaatggggaagaagaaagtgaagaaagagggtgagcagaaggtggggaagcgtgtggtggaggaagaggagagaaaggaaagtactagagacatggtgggtgtgggtgggtatttgcagcaacagcaacaaggtggtggcatgatgggttggaattgggaggagaatatgccattggtgggaggtgtggtggatgaacaaatgtcatggggctccacttggttccctggttgggacatggacttgttggggggtgatgctttcactgccttgtacaatgatgttctttgggatgatgatatctggaacctcaacaaccaaattccaattcccttagatactaagaggtttcatttcggctagagtagaggttgttctcaagcctccattcatgtctttatgtttcctttagcttaggaatggaattccagtgttttctcttcaatttatatagtatgttgaattcactattttttttttttaatgctaatttggctcgtcaagaatcccgtacatct

SEQ ID NO: 514 - DNA, 576 bp, Glycine max
  Clone ID: LIB3028-049-Q1-B1-H7
ggcatattgtgccctccctctttctagctatttccctctcttaacacaattaacaaagatatatcatatcatattaactccaaatgatgaaaaatattgggttgtttcttcttgtggtggtggctacttttgtggtggcagccacagctggtagcttttaccaagactttgatttaacatggggtggtgagcgtgccaaaatctatgaaaatggaaatcttctcaccctctccctagacagagcctctggctctggctttcgttccaaaaaagaatacttgttcggaaaaattgacatgcagctcaagctcgtgcctggtaactctgctggaacagtcactgcctattatttatcttctctggggcctactcatgacgaaatagacttcgagtttttgggtaacttgagtggtgatccttatactctccagatgaacgtattcagccaagggaaagggaacagagaacaacagttccatctatggttcgaccccaccaatgacttccacacatactccgtccaatggaatcctgcaagcatcatattctctgtggatgggacaccaataacggagt

SEQ ID NO: 515 - DNA, 360 bp, Glycine max
  Clone ID: LIB3028-049-Q1-B1-H9
gtttggatggcggcaacggtggcggtagcgcaaggccacaccgatcccggccacaagtgcaagacggcgctcaactccatccaccacaaccggagccgcctcttctccggcggagccctgtctgatctccggccgctgtccggcgtcgttggacctgacgtctctggcgcggcagcggggagctccgacgcgaagaatagggtgagccaagccgatgactctctgaggaaagtgatgtactttagttgctggggtcagggctgaaccacacgtgatgaacggtggagattaaagtagtcgccggagaaagtgaaccgggtctgttttcgggtcgggttcggatctgagttgacctggccg

SEQ ID NO: 516 - DNA, 394 bp, Glycine max
  Clone ID: LIB3028-050-Q1-B1-A10
ttcacttttcttcatagcactcaaaaaacaacaactcatctcatcattattccctttctcactcagcacattctaaacagtagcaccatcaccaataataatggcatcatcctcatcaaccgttgctttgagaaccatctcctctttctctctgaaacctgccaccacaacaagatcattactcaacactagtacttcatccaccataaccctcttaccctttacatcagcaaactcatttctctccaaaaccctcaaactcaacacctcttccccacactctcacctttcactacccctcaacaagtctttcacttgtagaagccaggctgaaccatcttctgactcagccaaagtccaagaactgagtgtgtatgagatcaatgagagagat

SEQ ID NO: 517 - DNA, 363 bp, Glycine max
  Clone ID: LIB3028-050-Q1-B1-A11
ctgaaagtcactaacaagagccatgttcaatcagaggagaaaattggaagaaaagagtaccaattggtcacttttgatcttccctacttggccttttactacaaccagaagctcttgttttacaagggtgaagatttcgagggcatggtccaaaaactcaaagttggacttggagtggtgctgaaggagttccaccaacttgctggcaagttagggaaagatgaagagggggtgttcagagtggagtatgatgatgacatgcttggtgtggaggttgttgaagctgttgtagctgatgatgaaattggtgtggatgatctaactgtggctgaaattagtaacactaatttgaaggagctgata

SEQ ID NO: 518 - DNA, 390 bp, Glycine max
  Clone ID: LIB3028-050-Q1-B1-A12
ccttcatatgcatttgatatgtaaattgtttcattgtttatgattttgatgaggtatgtcaatttgcagaaacaatatcaaagtttggctcgggcatgtttcttcttgttcaagtcatgctcttgttggattttgttcatggatggaatgacaaatgggttggatatgatgaacaattctggtacattgctctatttgttgtttcccttgtttgttatgtggcaacatttgcattctcaggagttctctttcacttcttcacgccatctggacaagactgtggactcaatgtctttttcattactatgaccatgattcttgcatttgtttttgccatagtggcattgcatcctgcagtaagtttgttatttgattttcattgtagctaac

SEQ ID NO: 519 - DNA, 306 bp, Glycine max
  Clone ID: LIB3028-050-Q1-B1-A2
caaatgtgatggaagacttgcaggctttgaaagctgcaagggagatttggctgttatccaactttgactctcaagaggacattgcctacccaaacgatcctaaagtgcccattaaggtggatgatgaccgaaagcagctttttcgggggattgaattgcctcgtgatatgattgacatagagagggatctacaggaagatggaatgaagcctgctaccaacactgcagagaggaggagtgcagcgcagatgggaggcatttcatccaggcctagacctaaggagaagagaaatgaaatcactaaga

SEQ ID NO: 520 - DNA, 254 bp, Glycine max
  Clone ID: LIB3028-050-Q1-B1-A3
ctctgaattcctcttattcaggaatttggagagtattgatatatcaaggtaggataaaccagtagccaaggaagatatggagttttcgatgattttcattgttagcaacattatgctgcgtttcagttcagcatttgccagaactgctagtcctccctctctgagcccaactccagcaccagccccgggagcagacttcgtgaacctcactgagttacgcagtgttgctggtccgtttcacaccttccttggga

SEQ ID NO: 521 - DNA, 324 bp, Glycine max
  Clone ID: LIB3028-050-Q1-B1-A4
ctttagtcttgttcttagagatggcttgtgaaaccaagtcatggttggttatgtttcttgttttcttggttgctaattgcatgcaacattgtgtccacggggtgtctcaagtgccttgcctttttatctttggggactctatgtctgagagtggaaacaacaatgaacttccaaccacttcaaaatctaatttcagaccagatgggatcgactttccattaggacgaactgggagatataccagtgggcgaacaggaattgagataatcacgcaatttcgtgggatttgggaaatttatcccaccctttgcaaacacgagtggt

SEQ ID NO: 522 - DNA, 212 bp, Glycine max
  Clone ID: LIB3028-050-Q1-B1-A5
acaatgcaactcttggggctgttagacaggaacttaaagaattacacccacatgatccccaaattgttgtcctcaagcactgggtgtggtgagtaaaaggcattattcaggtttcaagatctataggtgacgtagatttgaaacatgcacagtttaaccggtaaccacttaatgcatgagtcaggacttcctgaggcaatggacatgcccat

SEQ ID NO: 523 - DNA, 324 bp, Glycine max
  Clone ID: LIB3028-049-Q1-B1-H11
cccaaatgctacttgcagctctgaaaagaacattcctttcatcacgctgctatatcgtcctggtcactatgatatcctctatacaaaatgatgacctttttggggggaaaagacctttgtttgttacctttttggtggtagtgggagccgcaacagctctgcactcagagctgttgctgtacgacatatgtggtctgtatcttgttaatgttgaatggtcacttttcttgaacgttacctgtttagaagagattgatcaacaaagtacgtcaacattaacgcactaataatttaaaactcagtttgattttgctgcgttacatg

SEQ ID NO: 524 - DNA, 558 bp, Glycine max
  Clone ID: LIB3028-049-Q1-B1-F5
agtagaagtgcttttcaaagatcagcactacaccaagactcctgaagaagctgcagccgaaaccattctggcagggttggatttgaactgtggaaattatcttggccaatacacagaaggggcagtgaagcaagggctattggatgaagcatccattaacaatgctgtctcaaacaattttgccacattgatgcgtcttggtttctttgatggcgatccaagcaagcaaacttatggtaaccttggtccaaatgatgtatgcacttcagagaaccgggagctcgcccgtgaagcagcaagacaagggattgtgttgcttaaaaatagtctgggatcattgcctctcaatgccaaagccattaaatcattggcagttatagggcccaatgctaatgctaccagggtcatgattggaaactacgaaggcattccttgcaactatatatcacccttgcaagcactaacagccttagttcctacgagctatgctgccggctgccccaatgtgcaatgtgcgaatgcagagttagatgatgccacacagatagcagcatctgc

SEQ ID NO: 525 - DNA, 616 bp, Glycine max
  Clone ID: LIB3028-049-Q1-B1-F6
gggtttggccaaggcgcaacccgcgtggctcagagccatggaacaggcaccacctggaacgtttcctcggtctgccgggaaaattccgaccattactcttcccgaggatgtttatgtgaagaagttttataagaaatatccggaatcgaaatcacatgacgcgataaagtttcatgcgtttgatccccctccgtctcgtgtatttgccttgagggttcttgaattgaaggagcagggcattagtgaggagcaagctatggctatagctgatatggaatatctgacagagaagaggacaaagaagaaagcatatacccgtttgaaggaaattgcacgtcttcaacggaagagacttccgcaaaatccatatcctatctgccatcaaggagatacatgctgatgagaggaaatatgttcgtgatcgtttcttcagtcccaagatgcttgaaattgtggagaaacagaaagccgatgcagcagcggagagattgagtcgacgtggtgattggtgacttttacggcggctaagttacaatacattgagtgtttagctcttgaaaacatggctctgacaataacatttaccattcaggcactgacaagtgcgttcttcttc

SEQ ID NO: 526 - DNA, 620 bp, Glycine max
  Clone ID: LIB3028-049-Q1-B1-F8
ttgaattcgctggcagcttacagctatgatcatcaacaacgccccttttcctctatgattgattcgattcgattgaagtcgattccgtagagagtgagaaatcagatcacaataatcatcgatgggtaatttgttcgtgaagaagcccaaggtaacagacgttgataaagcaatcctcgcactcaagacccagagacgcaaactcgcccaatatcaacaaaagctagatgctgttattgaagcagaaaagcaagctgcacgagacttgattcgtgaaaagaagaaggacagggccttgttagcactaaagaaaaaaaagacacaagaagaattgttgaagcaagttgatgcttggcttataaatgttgagcagcaattagcagatattgaactggctagcaagcagaaggctgtgtttgaaagtttgaaggctggtaatgatgcaatgaaagccatacaaagtgagataaacattgaagatgttcagaaacttatggatgacactgctgaagctaaagcttatcaagatgaaattaatgaaataatgggggagaagttatcagcagaagacgaagaggagattttagcagaatttgaggactttggaaatcagcttacag

SEQ ID NO: 527 - DNA, 350 bp, Glycine max
  Clone ID: LIB3028-049-Q1-B1-F9
gtgggcctggcccatggctaccttctggtgggcccattcgtgaaggccgggcctctgaggaacaccgagatcgccgggcaagcaggctctctcgccgctggtgggcttgtggtgatcctcagcctttgcctcacaatctatgggatttcatcttttaacgaaggagacccatccactgccccgtcactgaccttgacgggccgcaagaaggagcccgatcagctccaaactgctgatgggtgggccaagttcaccggaggcttcttcttcggaggcatttcgggtgttacttgggcctacttcctcctctacgtcttggaccttccttactacatcaagtgaagaaagtg

SEQ ID NO: 528 - DNA, 388 bp, Glycine max
  Clone ID: LIB3028-049-Q1-B1-G1
ccaatccagagccgaggaagagaaggaagcgacaaggaccgtcttgagttaatttgattcagtgtagcagccagcagcgataagcatcgcaccaattccacttccagtttctgattcgtcacgtcagacaacggaatgggttagggtgtgacatgagatccacatgttgcggaggcttctctcttctcacctcaaaaccctaggctcctccgccgccgccgccgccacgcgcatctccccgatctgcttccgcctccgccagattcgccgctctctctcgctcctgcctctacttctcaacacattccgaggatgcaactgcgatcaataagaacgttgaggacataatgccgatcgctactggccatgagcgcaacgagcttcaggc

SEQ ID NO: 529 - DNA, 351 bp, Glycine max
  Clone ID: LIB3028-049-Q1-B1-G10
ggaggttttacctgcagaggcataggtttgccggttaccagtcagagattgcacgttcggtgttttgtttatgtcctctggggtgggccccatggagtccgaggctggtcgagtccgtcgccttgggttgcgtgccagttgtcatagcggacggtattcggttgccgtttgtctccgcggtgaagtggtcggagatatcggtgacggtggcggagaaagacgtggggaggctggctgagatactggagcgcgtggcggcgagaaacctgagcacaattcaaaggaacctgtgggacccagcaacgaggagggccctacttttcaacagccaggttcaggtaggggatgcca

SEQ ID NO: 530 - DNA, 365 bp, Glycine max
  Clone ID: LIB3028-049-Q1-B1-G11
aaacaaagaaaaaaaaaaacccttagccaacacaaccatcatgggcacctctgctattcagcaatcagcattcactggtcaaactgctctgaagcagctcaatgagttcgtccgcaagaccggtggcgccggcaaaggtcgcactaacatgcgccgcaccgtcaagagtgctcctcagagcatttggtatggccctgaccgtcccaagtacttgggtccattctcggagcagattccatcatacctgaccggagaattccctggtgactacggatgggacactgctggattatcagctgacccggaaaccttcgccaggaaccgggagctggaggtgattcacagcagatgggcaatgcttggtg

SEQ ID NO: 531 - DNA, 608 bp, Glycine max
  unsure at all n locations
  Clone ID: LIB3028-049-Q1-B1-G2
cgatgntttcctcctctaagggtccaattttttcttaaaccctagaacacacactctctctcacagaagaagaagctgctgcagaagagaatttccaaaatgtcgatgtcgaagagttccaagatgcttcagtacatcaactaccgtatgcgtgtcaccattcaggacggtcgccagctcgtcggaaaattcatggccttcgaccgccacatgaacctcgtcctcggcgactgtgaggagttccgcaagcttcctccggccaagggcaagaagccagccgaaggcgccgaccgcgaggaccgccgcacgctcggcctcgtcctcctccgcggcgaggaggtcatctccatgaccgtcgagggccctcctccgccggaagagtcncgctccaaggccgtcggtgccgccgctctggcaggccccggcatcggacgtgctgccggtagaggtatcccgcccgcccccgtcgtccaggcccagcccggactcgccggccctgtccgcggagtcggggggccccgccccggcatgattcaacggcagatctcggccggcctcagctcaacgcaccaccggtgtcttaacccggcggtggaccgcctgttgat

SEQ ID NO: 532 - DNA, 598 bp, Glycine max
  Clone ID: LIB3028-049-Q1-B1-G3
ctcgagccgattatcataccctttaagatgaaaccgtacctacgtccaatattcctattattccttatccttctcgaccaatccacttcggcgagtgcttctaatagtaggtttatagaattcttttcaaaattaaagaattcttttaatcctaagtctgaagaactaaaatcaaaagatataaagaagctcccgagcgtcgaatttttgaagaagaaacatgacggagttaaggacttctctcaagaagctatcctgaaactaccaattatacactggccgttcccgataccaaaaataccaaaaaacttctggaaaccaaagtcccagaaaccaaagcaccctcccccaccgccagactaccgtgtacaactaaagtccgatcccccagcgccaaacgcaccaccgaagcaaatcaatattaagggcctgtccgtcgtcaaaaattacttatctgactacggctacattgaatcctctgggccatttaacgattctttcgaccaggaaataatatcagccattaagacctaccagaatttttccaatcttaatgttaccggcgacctgaacaaacagcttaatcagcaaatgttgt

SEQ ID NO: 533 - DNA, 419 bp, Glycine max
  Clone ID: LIB3028-049-Q1-B1-G5
accaagtgaaaaagcaactaagcatagtgtgtaagaaagggagaaaaacaagtgctgtgtagagagaaaaatggctaggtggtgcatgatcttggtggttcttgctcttgccgtggttgcaagtgccagaaacatgcccaatgacgctggtttggaggaccagaagaacttccttgggtatgggttttcgggagttggcaacaatggccttccctttggtggagtgggttctgggtttgatggtaatatgggtgggccttctgggctcggaagacttggaggattcggtgggcctggtgggcttggcggactcggaggtcctggtaacggtgaaggacccagtcttcatctcccttgagacttgagaccacacaccttcgtgtctctttcggtcgctactttgctattatagcctatat

SEQ ID NO: 534 - DNA, 150 bp, Glycine max
  Clone ID: LIB3028-049-Q1-B1-G6
gtcttgttgctatctgaagctcttgctagcacacacccatttaaagtacaggttcataatgaaatgcaactctgattcttttgaagggagctcaaattgtaaaatagtctacagatctggtttaagaattaatatatgaattgtagattt

SEQ ID NO: 535 - DNA, 592 bp, Glycine max
  Clone ID: LIB3028-049-Q1-B1-G8
ctctctaaatatttttctctctcttcagcgaattcgtttttctcttcaagcttcggctatggcgtctggatcctcgggtcgcggaaactctgcctccaaaggcttcgatttcgcttccgatgacatcctctgctcctacgacgactacgccaaccgcgattccacttccaacggcaatcacaccgatccggattttcacaaatcaaggatggcaagaacatcaatgtttcctactactgcttataatccacctgaagattctttaagtcaagatgtgattgcgactgtagagaagagtatgaaaaaatatgctgacaacctaatgcggtttctagagggaattagttcaaggctatcacaattggaattatactgttacaatcttgacaaatctattggagaaatgaaatctgatataaatcgtgaccatgtggagcaagattcaaggctgaaatctcttgaaaaacatgttcaagaagttcacaggtctgtacaaattttaagagacaagcaagagctagctgagacacagaaagaattagccaagcttcaacttgctcagaaagaatcatcttcctccagccattcacag

SEQ ID NO: 536 - DNA, 366 bp, Glycine max
  Clone ID: LIB3028-049-Q1-B1-G9
ggcaacagcagatgtgttcaatgccattggattgctagaattcttctatgatcaatcccctgaagacatgcaaagtcttggaactacattcttcactagtgggatcggtgttgggaacttcttgaacagctttttggtgacaatggttgataaaataacaggaaggggtgacaaaaagagctggataggggacaacttgaatgattgtcacttggactactattatgggtttttgttggtcatgtcaagtgtcaatatggtggtttttctttgggtttcaagtagatacatttataagagggaatcaataagggtcaaggacggtctttgtgttcaaatggagggaggaaacccaactttggacgc

SEQ ID NO: 537 - DNA, 602 bp, Glycine max
  Clone ID: LIB3028-049-Q1-B1-F4
gcagcaatggggctctccatgtggaagccaatgcaccaataaatacgctgccctcggcaaaatcccatggcgaatattctgcaaaaagggttgcgactcagatggagagacatgggaagaatgtttggaggactgcaatcaaatatgctacaaggatcccgtactaaaggaccagcagtggagtgcttatattgatcgttcccctggagctgccagttattcggaggaatgctttcatgcgtgtgtatctggctgcggttacaagtttgaggttaaatcagaggaagctgataaagtctgtcctaacaggcaaccaaagcctgaaaccaagcctactaagaagccaaagccacaacctgtacgccccatcgatctgcctggtgatatacctgacacttctgcatagtgaaaaacatcagcatatttgacaaaaatccagcatgtatgtatacttgatactttgttggttatattctctcaagaatttttttttctttcgttttctttttttttttctttttaccttgagacatgctaattgttatcagcatgagttacttacattttgtggacaacaccatgagtggttgtgcctatttttg

SEQ ID NO: 538 - DNA, 614 bp, Glycine max
  unsure at all n locations
  Clone ID: LIB3028-049-Q1-B1-E3
cttcaacttgtaatcaagggagagagaaaatttcaagcacaaaaaatggcggagaagaaagtggtgatcctaggaggtggtgttgccggtgccaaccttgcaaaaactatacaacgtcaagccaacgtcacccttattgatccgaaggaatattttgagattccatgggcaagtttgaggggattggttgagccaacttttgctgaaaggatagtgatcaaccatagagagtacttcaaaaagggtaaccttgttgtatccagtgctgtcaacataactgaaactgcagtggtgactgaagatggccagcagattgcctatgactatcttgttattgccactggacacacagaaccaatccccaaaaccaggagtgaaagacttgaccaatacaaaggagaaaatgcaaagatcaaatctgcaagttcagttttgattgttgggggaggtccaactggtgttgagcttgcagcagagattgctgttgattttcctgataagaaggtcaccatagtgcataaaggaacgaagttgcttgaatacattgggacaaaagcttcaagcaagactttaaagtggctcaaatcaaagaanattgatgtgaaactagaaca

SEQ ID NO: 539 - DNA, 567 bp, Glycine max
  unsure at all n locations
  Clone ID: LIB3028-049-Q1-B1-E5
aaacatcttctctctttaccttccttgtctcaagtgaaccttttttctcaaaagcttcccttttgagttatatgttcaccaccaccattttgaattgaaactcgagaatgggagacaaagaggtaaaggaagaagaacaaaaaggtggattcagggcttccatgtttatttttgtgttatcagcattggacaacatgggttttgtggcaaacatggtgagcttggttctatacttttatggggtgatgcactttgatctgtccaactctgccaacaccctgacaaactttatgggctcaactttcttgctctcactcgttggtggcttcatctcggacacttacttcaacagactaaccacatgtttgctttttggatcactcgaagttctggctttggtaatgctgacggttcaagctggtctggaccatttacacccagattattgtggcaagtcaagctgtgtcaaaggtggcatagctgtcatgtnttactcatcattgtaattgttggctttgggcatgggaagagtgagaggctccttgactgcatttggtgctgaccaat

SEQ ID NO: 540 - DNA, 292 bp, Glycine max
  Clone ID: LIB3028-049-Q1-B1-E7
tgaaggtgaatgaacccaccatattgcaaatcaacttattgctagagcgtcaaaacggattgcacatgtcacttccgaaacactttcaatagtttcacgttcaacttggtctacgaaacggttttgtccatgttattgatgatgatgagcagttaatcatcagacttggattgattgtcataacaggcatgctacatttggcataggaggacatgtttaggcaacgacactactacgctgtggacgtacatgaactagcaagtgaaagcttttcgaccgagtgtgaacattt

SEQ ID NO: 541 - DNA, 592 bp, Glycine max
  unsure at all n locations
  Clone ID: LIB3028-049-Q1-B1-E8
gaaaaacaaaaaatcaacgaatggcacttacggggggtaagcaacgaacgccaagagacttgggtggaggagtaatctcgaccactttgtagggaaggatgctacctcgttctctgtctctgtctctcttcctactgcacgaaacctcaaacgacatcgtctgctaaaagagagcgaaaacgagattaactaatgaagaatcatggaaaagatagaaaagtgggtgagtgcggtaccttctggcatgaagcgagacccatgttccacgacgccattacaattagcttctcttctcttcaattctcgtcacgcaaaatggcaacagcaaagccagaaaaaactccggattttttttgtggtgggacacgagtcacagggcgaggcctaagccaaaaaaggagactacacagataatcctgggagtagcanactcccaaactatgagcaagaagcagtagcctaagagaggctggcctctgctaagatcctccaccattctgcaggcttgatgagcaagcacatccacacaatgattagcttctctataaatgtgagagatgcttatattgtcatgttgaataattaaattcct

SEQ ID NO: 542 - DNA, 350 bp, Glycine max
  Clone ID: LIB3028-049-Q1-B1-E9
attttaaacctctgggcgtggctagcttcaacctttaacattaacatggccattccctacccccatttcatcgccaccgagaaagccgccatggacgccggcctcctccacccctcctccccctccgtcatcctcacccaagacgatttgaagaaaatcgccgcctacaaggccgtcgagtacgtggagtccggcatggtcctcggcctaggcaccggctccaccgccaagcatgccgtcgaccgcatcggcgagctcctccgccagggcaagctcaaggacatcgtcggaatccccacctccacaaaaacccacgaacaagccctctccctcgggatccccctctccga

SEQ ID NO: 543 - DNA, 476 bp, Glycine max
  unsure at all n locations
  Clone ID: LIB3028-049-Q1-B1-F1
tttgatttaatttcatcacgcgaccctcaatggacgaagaagcagagaccgagagagttccccatccacactctccaaaactagggtttcccctcccctccgccgccggtgacgcaaacctcctcacagccctcagcaccatcctcgtcgcgtcgattcaggacgccaaagaccgcatctcgcagatcgagtacgtcttctgctcccagctctaccctcacttaaaatccgacgacgcatcaaaacgctgctgcatcgaacagctcaaacgtgacgccgacgagaacgccaagcttctactacacgccgaggagaggcgaaacgccgcgtttttgaaatcggagagctgcgagggcgacaaggcgacgctgctggcgagaatcgccgagttggacgagacattgagattgaagacgcgggagattgaggaggcggagacgaagcggatcgangangaagggaagctactcgagcgc

SEQ ID NO: 544 - DNA, 412 bp, Glycine max
  Clone ID: LIB3028-049-Q1-B1-F10
attctcttctgcgttcttcccaccaacatcgaaaccatgtccaccgacttgcacctccacaacgacctgccccagctccgaatcgcctccgccgccgccgccgatgccgtcgtcaaaaccgacgacctcccctccgacgatgacgaccgcaacgccgtctcttccgtcatcactcaaaccgagaccgaaactgacggagccaccatcgtcgacgtcgccgtcgccgtcaacgtcaacgtcaacgtcaacgacgagaattaccgtactccgacttcgaaggagagcaaaattccagcgacgatgacgtgtccgccggcgccgaggaagccgaagctcgcctcctgcaaaagaaaacttcctgatgagtttcagtttctcgatgtcacgaataaggaggacatggacgccttct

SEQ ID NO: 545 - DNA, 356 bp, Glycine max
  Clone ID: LIB3028-049-Q1-B1-F11
gctaaataaaaggagaaaggaaaatgccataaattaaagagaatcctaaattctgtaggcgtgttgtgattatcagaagaccaaatcgaggaatccggaaagggaagaagaagaagaagaagagagtgggttgggttgcgtgccccgttccgttcgttcttcccctttcctttcaattctttcttttcaattctttttcttctgaacacagaaaaaacagaagatgggaatgaaacaagtcattaaaaacctcgacgcctttcctcgcgccgaggatcacttgttgcagaaaacccaatctggggctctcgtatccgtaattggtctcattataatggccacattgttcgttcacg

SEQ ID NO: 546 - DNA, 387 bp, Glycine max
  Clone ID: LIB3028-049-Q1-B1-F12
ggctcgaggatggcttctcctcttcttactccttacaagatgggcaaattcaatctgtcccatagagttgttttggcaccgctgaccagacagaggtcttacgacaacgtcccacaaccccatgccatcctctactactcccagagaacttccaacggaggccttctcattactgaagccactggcgtctctgacacggctcaaggctatccgcaaacccctggcatatggactaaagaccatgttcaagcttggaaacccattgtcgatgccgtccacgccaaaggcggtgttttcttctgtcagatttggcacgttggaagagtttcagattcagtttatcagccaaatggacaagcacccatatcttctacggacaagcaactc

SEQ ID NO: 547 - DNA, 601 bp, Glycine max
  Clone ID: LIB3028-049-Q1-B1-F2
cgctacgaagatatccctctttctttctcatagttttctgcgaaatcgccgatgctagaatcggagctccacgatttatccgacgacgccgattacgccgcgtctcaacaacaaggatctgctagcgtgatgctgcgtagtgacagtgccaaacagagctcccctcgggaaggtgctgaaattgtatttttgaaggacaatgtcgcaattcatccgactcagtttgcgtctgaaagaatcagtggaagactgaaattgattaagcaaagctcgtccttgtctatgacttggataccttacaaagtgcatagttcagaggccaggctgtctgataaagacagaaacctttatatcataagggcggtgcccttcacagacatcaggtccatccggaggcataatcctgcttttgggtggcaatatgtcattgttgttctatcatcaggacttgctcatcctccattatatttttatagtggaggagtcaaagaattccttgctacaataaagcaacatgttcttcttgtgagatctgaagaagatgccaacgtattccttgtgaatgattttcagaatacactgcagaggactttgtcttcct

SEQ ID NO: 548 - DNA, 562 bp, Glycine max
  Clone ID: LIB3028-049-Q1-B1-F3
ctcaatcgttttctacataatacaaacctctctaatttttgaagcttattatacccaatctcgatatgcagatcttcgtgaaaaccctaactggcaagacgatcaccttggaggtggagtcctctgacaccatcgacaacgtgaaggccaaaatccaagacaaggagggcattcctccggatcaacagcgtttaatcttcgccggaaaacagctcgaagacggcagaaccctcgccgactacaacatccaaaaggagtccacgctccacctcgtcctccgcctccgcggcggcatgcaaatcttcgtcaaaacccttactggcaaaacaatcacgctagaggtggagtcctccgacacaatcgataacgtgaaagccaagattcaagataaggaagggattcctccggattaacaacgtttgatcttcgccggaaaacaactcgaagacggcagaaccctcgccgattacaatatccagaaagaatcgactctgcatttggtgcttcgtctccgcggagggatgcagatcttcgtgaaaaacctaaccgggaaaacgattac

SEQ ID NO: 549 - DNA, 366 bp, Glycine max
  Clone ID: LIB3028-049-Q1-B1-C9
gatagataggcctcagaagcagaacaacaatggccactgccactgtttcaatttcaacactatgcgctaccttcggaacccattgcgccatttcccacgaccctaaacctcttttttctcaacctttcagtctcaatcgctttccttctacctcttacaagctcactttatcgcctcgctcacctatttcaacccttcctaaggtctctgaatccgcggttgccgaaaccgaaaccggttcgtccgagcccgaaccggaccaaattgtcccggctcagcctccctcctgggaacccggtctcttcgctgtcgtaatgattggtggacgccaatatattgttcacccggggcgacatcttactgttc

SEQ ID NO: 550 - DNA, 540 bp, Glycine max
  unsure at all n locations
  Clone ID: LIB3028-049-Q1-B1-D1
gagctattggtcaactactaatcccttgttgattcattcggttggtcatggcttcttcatcgattagcggattgacgttcaagctgcaccctctggtgatcgtaaacatctcggaccactacaccagggtcaagtcgcatatgaatccaaccgatcagccaccgcacaaggacgatgattcaactcgaggcgatggcgtcgtttcgccgctctccccgcgggtctatggctgcgtcataggggtccagaagggccgcaccgtggagatcttcaacagcttcgaactcctctacgatccttcctcccactccctcgatcgcaccttcctcgagaagaagcaagaactctataagaaggtgttcccgcacttctatatactggggtggtattcgactgggagtgatgcagaggaatcagacatgcatattcacaaagctttgatggatatcaatgaaagtccagtttatgttcttctcaatccttctatcaatcattctcagaaggatcntactgtcagtatttttgaaagtgaactgcatg

SEQ ID NO: 551 - DNA, 375 bp, Glycine max
  Clone ID: LIB3028-049-Q1-B1-D10
gtgagtattcatccaggtgcttccttagatcatcagattcaaggtctgaaaacttgtgagcctgagtttcttgtttctactcctgagaggctattggagcttgtttctacgaaggcaattgatatttctggggtatccatgctggttattgatgggcttaatactatctgtagtgctggccacgctgatacagtaaaatccatcaagaattgtatttctggcaatccccgtgttgtgattttcaatgattgtgtcagccacatgtcgatcccaatggttcgatatcttctgacaggattaatttgtagagtctctctcaataattcaattaacagcctaagttcgtacattatccaatctgttgacgtgtgtacg

SEQ ID NO: 552 - DNA, 340 bp, Glycine max
  Clone ID: LIB3028-049-Q1-B1-D11
ctccttcacattctccattccacaacatcaaggttctgctcatgtcggggaagaggccccggccaatgatcggaaagttgtcggagttgttggtctcgagaggccgcacggtggcacttttggacaccactggaagcccaagaggcccattagacatgaagatgatgcaatcaccaagaggcttaaaaaattatgatcttggtggcgttggtcttggaattgtggtggctcatgatcaatccaataacgaggttgctgcacgtgaagttttgcccaaacacaccgtttgcacctccaatttgaaccggtccggcccaattccggttcacgacaccaaaaa

SEQ ID NO: 553 - DNA, 349 bp, Glycine max
  Clone ID: LIB3028-049-Q1-B1-D12
ctagaggaaagatccagatcaagaggatagagaataacagcaatcgccaggtcacttactctaaacgacggaatggccttttcaagaaggccaacgagcttaccgttctctgcgatgccaaggtttctattactaagttctccagcactggaaaactccaccagtacatcagcccctctacctcaacagagcagttcttcgatcactaccagatgactctgggagttgatctctggaactctcattatgagaatatgcaggagaacttgaagaaactgaacgaggtgaataggaatcttcgtaaggagattacgcagacaatgggagattgtctgaacgagctgggcat

SEQ ID NO: 554 - DNA, 116 bp, Glycine max
  Clone ID: LIB3028-049-Q1-B1-D2
tggggaatttgctatacctatggtacattgttttctgtaaaagggttaacagactgtggaaaaaactaccgtaatagtcctgccttgcgtaaagcttgcaatttttgttgtcaaag

SEQ ID NO: 555 - DNA, 475 bp, Glycine max
  Clone ID: LIB3028-049-Q1-B1-D3
caattcccaagaagctgagaggctgaggaggtttgatcccgtcacgttcggtggtggccgccgtcaccatggaaaacgacaccgtcgcagcagaggaagccagacagaaacttctgcttcatcattttaagagggttccataacttccattcatccttgatttagtttcactacctggggtttatattttctaattttaactttggtgtatagagaggaggagcatacaattctattcttgaatatgatgatagttttgatatggtggttattgctggtggtggggtatgtgtatagttcatacctgtaggttctcccaggtaatttgtttttgttattcatgtcttatggtttacaaattgaatccgttgatttttgtagttagaccacacctcagtgtttcaataaattatttagcatcagttatctatggaaaataaaaatcccatacttaactccaactaagtccaatcca

SEQ ID NO: 556 - DNA, 452 bp, Glycine max
  Clone ID: LIB3028-049-Q1-B1-D4
catggctcaccctcgactcactaactcgctctgttcttctccccttcgcaatctcaatcccaatcccaaactcattcctctctgcacttgctcatgccgtcccttctcttcgcaatccctaattctccattctcaccctcttttcctcgccaaacccaaacctctcctccggttcgcccgccgaaccggaccgcccctcgtcctcgccgccgtcggccaggccgaacccgaacttcctcaaaccagtgcccccacggtcattcccgaagacgaggaggatttgccctcaaaatctcaacagcagcttaggaaccgggtggtttttggacttggcattgggattagtgtaggtggcattgttttggctggtggatgggtcttcgcggttgccctagctgctgctgtctttactggtgctcgagaatattttgaattggttcggattcatggaa

SEQ ID NO: 557 - DNA, 600 bp, Glycine max
  Clone ID: LIB3028-049-Q1-B1-D5
attctcctctctgaattcctcttattcaggaatttggagagtattgatatatcaaggtaggataaaccagtagccaaggaagatatggagttttctatgattttcattgttagcaacattatgctgcttttcagttcagcatttgccaaaactgctagtcctccctctctgagcccaactccagcagcagccccggcaccagacttcgtgaacctcactgagttactcagtgttgctggtccgtttcacaccttccttggataccttgagtccactaaagtgattgacactttccataaccaagccaacatagactgaggaaggaattaccatctttgttcctaaggacagtgccttcaatgctataaataaaactaccctatccaacctcacctctaaccagctaaagcaagtgatcctcttccatgccttgccacatccctattctcgggctgaggttaggagccttagccaaaccagctctactcgcacattcgccggaggagattacactttgaatttcactgatgattctgggacagtgcacattaattcaggatggtcaaagaccagggtgagcagtgctgttcattccacaga

SEQ ID NO: 558 - DNA, 333 bp, Glycine max
  Clone ID: LIB3028-049-Q1-B1-D6
gcagattttcgtcaagactttgacgggaaagaccatcaccttggaggtggagagttcagagaccatagacaatgtgaaagccaagattcaagatcaggagggtatccccccagaccagcagaggcttatctttgctggtaaacagcttgaagatggacgaacccctggatattacaacatccagaaggaatctaccctgcacttggttttgaggcttcgtggtggcatgcaaatcgttgttaagactttgaccggaaaaacaataactttagaagttgaaagttctgataccatcgataacctgaaggcaaagattcaggactaagaagggat

SEQ ID NO: 559 - DNA, 554 bp, Glycine max
  Clone ID: LIB3028-049-Q1-B1-D7
gaaggtttcgggggctgttttttgtattttgccccgattctcttctctctccctctggtgttgtgttttctcctttccctttctctcttctctgtcctttgagtttttctatactctagttcgcgtcgcccaaggctcaacagcatgacaaacgattgacaactcggcaaggtacatagtgctgaacgcacgctttaatttattttaatttcgttgtttatacttaccgtattcaattttacaatatataaattaacatgatgactcgcatgtaataagtttatagtctggtaattaaagcaaaaggcaatcgatacaatttacttcatatttaggtatttgttcatagtatatttttattttatggttttagtaaacaaatggtttatttgctcgtatgtatattgtcatgttgtttaatatttttgtgattagaattgaattgaaagtcttacaattaattgactatacaatcaatttccttcagaagagattaatgtagattactactagctgtataatatatataaactatgacgtgtttattttcatga

SEQ ID NO: 560 - DNA, 506 bp, Glycine max
  unsure at all n locations
  Clone ID: LIB3028-049-Q1-B1-D8
aagatactgtaattcttactcttattcaccgatttcccccaaatcttccatccaagaattttagggttttctcttccagatttcccccaatcttctccgcctctcttccttttcctttacatttctctctgattgaaacgccacacccatttgagaggatcttttttctagaggttcgttttttcgcgctaattttttccacttcttgtctaattattattgtttgtaattagtaagccccgctttatcattgagggaatgttgttagttctcgcgcggaaccaaaaagtttctggtttttctcttcctgattctggtggcgggggaacgagggttttccctttttcccccttccatttctgcgttgccctataatgatggcggtgtacttttgaaattggatgtggataatatttatatattggatgggttttcgatgattattgatgttctccatattgattgtanaagccaacccaaagtgtgttttcatggggttgttgtga

SEQ ID NO: 561 - DNA, 407 bp, Glycine max
  Clone ID: LIB3028-049-Q1-B1-D9
tccaagggaaaaccatcgacgtgtaccagatgcaggaggggaagcaggtggcccgtgacttcacctacatcgacgacatcgttaaaggctgcctgggagccctggacaccgcccagaagagcaccgggagcggcggcaagaagaagggccccgcccagctcagagtatacaatctggggaacacttcaccggtgccggttgggaccttggtgtccattctggaaggtctgctaagcaccaaggccaagaagcacgtcattaagatgccatcaaacggcgacgttcccttcacacacgccaatgtcagcttggcctacagggatttctcttacaatcccaccaccgatctcgccaccggtctcaggaacgttcgtcaagtgctaaccccggtaataacggcctccagc

SEQ ID NO: 562 - DNA, 104 bp, Glycine max
  Clone ID: LIB3028-049-Q1-B1-E10
gcataattattaggctctactgaagttttgttgcctatgttcaaagactgggtagctgaaacaccgttaatctttttattttgtaatattaattttctaatatt

SEQ ID NO: 563 - DNA, 346 bp, Glycine max
  Clone ID: LIB3028-049-Q1-B1-E11
ctacactatacttgtcaaccctttgagagttagaatggctgctgctattgaaatccccacaatagtgtttccaaactcctctgcccaacagaggatgccagtggttggaatgggatctgcccctgacttcacatgcaagaaagacacaaaggaggctatcattgaggccgtgaaacagggttacagacacttcgacactgctgctgcttatggctctgaacaggctctcggtgaagctctcaaggaagctatccatcttggcctcgtctcccgccaagacctctttgtcacttccaagctttgggtcaccgaaaatcatcctcatcttgtccttcctgctttgcgc

SEQ ID NO: 564 - DNA, 365 bp, Glycine max
  Clone ID: LIB3028-049-Q1-B1-E12
ctcgagccggtcttcctcctcatctctacactactccacatagagcccagcctctcaagcccaagcccaagcccaagcccaagcccgttcataaaatcctcctgcagcagcacccagtacccagccctctgcgtctcatccctctccgtctacgcctccagcatccaacaggaccctcaccaactggttcagacagcactctccctctccctgaaccgcacccaagccaccaaaaccttcgtggctaactgcaacaaattcagaggcctgaaacccagagagcacgctgcactcaaggactgcgccgaggaaatcagcgacagcgttgaccgcctcagccggtcgctgaaggagctcaagctatg

SEQ ID NO: 565 - DNA, 518 bp, Glycine max
  Clone ID: LIB3028-049-Q1-B1-C8
caatgctgatgcagtggatcacacatttaccatgccacaaagttccttcgagcattatccggcagaggaggtagttgacaaggtggtgaaagaggcaataagcaaaccatggctacccttgcccttgggtttgaaacctccttccccagatagtgtgttggctgagctatccaggcaaggcatttccaacatccctccaaagggttcaaattcatgctgacctggatgcatgcaccaaagagagtggttctgatggtgaccaactacaaaagggttccacctgatcaaacaccctgttgcaattatttttgttttctctaagtgtatgaggttccaacttgtagtttgagtgggaataggagttgttggagttgggaccattttgttttgtttatttggtcccaccaaaccaattttaaggtctctcctatgctgttgtcagctcgtacgtacaatactcacttaccatgatgcaacaaccaaagtattagtagacattgttcctatccgaagccaca

SEQ ID NO: 566 - DNA, 607 bp, Glycine max
  unsure at all n locations
  Clone ID: LIB3028-049-Q1-B1-B4
ctcgagccgcagtcttcctttcctctctctcttgtttgcattcatgtgagggtgattttgcagagagttaacagcacaaaccactcactctcttaacttgagattattttttttctttccccaaacccaaagaggcatgagttgcaacgggtgccgcgtccttcgaaagggttgcagcgagtcttgtatcctgcggccgtgtctacagtggatcgatacgcccgaagcacaaggccatgccactgtcttcgttgccaaattctttggccgtgccgacctcatgtccttcatttccaacgtccctgaaccccaaaggcccgctctgtttcaatctctgttgttcgaagcgtgtggaagaacggtgaaccctgtcaacggtgctgttgggcttttatggaccggaaactggcacgtgtgccaggcggcggttgagacggtgctccgcggcggcaccgtcaggcccatgccggagcttctcggcctagacgctcncactcccactgccgatgacgcttccgaaggggaagttacctgtaccgacaagtggagagtccgagatccgaacccgaatttcccgggaaaccggttcccgggtttgaggtccgat

SEQ ID NO: 567 - DNA, 589 bp, Glycine max
  Clone ID: LIB3028-049-Q1-B1-B5
ggaagaggtggatgcacttccggctatatatgctactgaaagtattagattcaaatatcatgttgtttgagatttgaatctaatactttcaatcgcatgttgggaaaagataaaactgccacgtccttggaagaggtggatgcacttccggctatatatgctactgtgttaaaattctcgtcatctgcgccatatgggtcaattccatcctatcgtataccttttcttcttggtgaaccttacaataaagattctgcatctcaagatgcctccctaagtattgttcctgttgatgttggaaatgattcccaggaagaggaaaaatatagagctattgttgagattgatttggagcccagggaacccacaccaggtatagttgatgttcacattgaaacaaatgcagaaaatagtcaaatcatccaaggtcaacttcaaggaatcacagtaggcatagaagacatgtttctcaaggctattgtcccaacagacatcccagaagatgaaatacctcgatacaactttgacttgttcaatactttatgggaagcatgtggctcatcctccagcactggccgggagacatttc

SEQ ID NO: 568 - DNA, 587 bp, Glycine max
  Clone ID: LIB3028-049-Q1-B1-B6
gatagagggatcttttggggaggagcggtgcaacaacacgactgatttaattggttgagcaagatgtcgacctcgacgaacgtggtagtcctggacaacggcggcgggctgatcaaggcgggcatcggcggcgagcgcgacccctccgccatagtcccgaactgcctctaccgccccccgtcgtcgaagaagtggctccacctccactccggcgacgaggacctcacctccgccgccgtgcgccgccccatggaccgcggctacctcataaaccccgacctccagcgcgaaatctggtcccacctcttctcttccgtcctccacataaacccttcccagtcctcgctcctcctcacggagcctctcttcactcacccctccatccagcgctcggtggacgagctcgtcttcgaggacttcaacttccgggccctgtacgtggcccactccccctccctcgtccacctccacgaggccagccgcaacaacgccaacgggctcctctcaaggcccagtgcagcctcgtcctcgacgccgggttctccttcaaccaggcctcccccgtcttccacaacttcgccctcaac

SEQ ID NO: 569 - DNA, 611 bp, Glycine max
  Clone ID: LIB3028-049-Q1-B1-B8
ctacaatctatccctgaagaacgtccttctatgaaagatgtagttgaggcattggaagccattgaagctatccaaaattagggatggaaatgagtcaagtcgcttgtcaagggcctatggctcggcctatttaaggctcggctcggcttggcttgtttactataaatgtcaagctcaagctttttaaaaagtttttttagataaaaaggccaaagccaaactataaaaaaagcttgttaagtttctttttttagttagtattttactaggttttaaaataattaattggttaaagaggtttttaagcagacttttaaataggcttgtaggccaagccagacttttatgtaagccaagccgagcctttaaaaaaagcttatgacaggtaatgagccaagctcaagctttgcgtattcaactcaagccaagctcaagcctagtaaaacttggcatggcttgactcatttctacccctatccaaacccacaattcgcagtgtacatctcatccaccccctcgacagggtcgtaagagtatacacaaatttatatggacaaaattactagaaatcgagattgattatccatagtaatgtgctcaatttaatgggt

SEQ ID NO: 570 - DNA, 366 bp, Glycine max
  Clone ID: LIB3028-049-Q1-B1-C10
tgaggtcagtgtttgatctccttgaccgcagaactgaaattgagcctgatgatcaagatgctactcctgttcctgatcgtcttcgtggtgaagttgaacttaagcatgtagacttctcttatccaactcgcccggatatgccagtttttcgtgacctcagtcttcgtgcgaaggctggtaaaactcttgcccttgtacgacctactggctgtggtaagagctcagttattgcacttatacaaagattctatgattcaacatctggtcgggtcatgattgatggcaaggacattaggaaatacaagctcaagtccttaagaaggcacatttctgtggtaccacaggagccttgtttgtttgccacta

SEQ ID NO: 571 - DNA, 364 bp, Glycine max
  Clone ID: LIB3028-049-Q1-B1-C11
gttgcacacggtgcaagtcggctggctttaaattgcaatgggtggcttcctcttgatattgctacgatgtgggggcgtcattggcttgaacaattgctggcacccagttctgatgccacaatgcctacattctctcattcaaattacttgtccttgccccttatgagtgtgctcaacatagctagagagtatggattgcaatcatctacagcctcctctgatgagattgacttttgtgctgtatgcctggagaggccatgttcagtggctgcagaaggatgtgggcatgagctttgtgtaagatgtgcactctatctttgctcaacaaacaatgtttcttctgaaatggttggccctcctggct

SEQ ID NO: 572 - DNA, 418 bp, Glycine max
  Clone ID: LIB3028-049-Q1-B1-C12
cagcgcaagggttgttttcttgaatgagaggcctcagccaaggcctggtaaaggtgtcaccaacacttgtgaagtctgcgagcgcagccttcttgattccttccgattctgttctcttggttgcaagattgttgggacttcaaggaacttccagaagaagaaaaagtcagcggcaatgggatcagacacagaggattcttcgtacagcagcaacagcagccatgggaagaagaacagcttcacaccgtccacaccgcctccaacttctgttaattacagaacggccaagagaagaaagggaattccacaccgtgccccaatgggtgggctagtcatagaatactagaaattaagttagtagtaactttacggtacttggcaataaggccccctgataaattttacctcaaaacgcaac

SEQ ID NO: 573 - DNA, 347 bp, Glycine max
  Clone ID: LIB3028-049-Q1-B1-C2
agcgaatccctctctctatctctcacacacactttctctctctctctctctcacccagatcttgtagcaatggcgagcgctcccactccacgcgaagagttcgtgtacatggcgaagctggcggagcaggccgagcgctacgaggagatggtggagttcatggagaaggtctccgcctccgccgagagcgaggagctgaccgtggaggagcgtaacctcctcgccgtcgcctacaagaacgtgatcggcgctcgccgcgcctcctggtgcatcatctcctcaatcgagcagaaggaggagagtcgcggcaacgaggaccacgtcgccgtcatccgcgactaccgccc

SEQ ID NO: 574 - DNA, 98 bp, Glycine max
  Clone ID: LIB3028-049-Q1-B1-C5
gtggtatttaaaatgtatatatggcatcttacaagaaccattaggttctatcatttgtaaacattgatagaatagcattatcaccgttttttatgtgc

SEQ ID NO: 575 - DNA, 581 bp, Glycine max
  Clone ID: LIB3028-049-Q1-B1-C7
gagctattggacaactagtaatgaagttgttaagactgaatctgatgcaaagacaaaactagggttcagtccagctgagatagtaattgtgaaccctaataagaagacttccactggaaatgaagtagggtaccgtttggtttcaaatgcagcggttcatcctcttctcacagatgatgattaccctcaaacacgtggtgctttcaccagttacaatgtttgggttacaccttacaacaagactgagaaatgggctggtggactttatgttgatcagagccgtggagatgatactttggctgtttggactaagcagaatagggggattgagaacaaggatattgtgatgtggtacgtggtgggaatccaccatgttccgtgccaggaagattttccaataatgcccttgttgagcaccggatttgaattgaggccaactaatttctttgagagaaatccagtccttaagaccctttctcctggcattgttaaatttccaggttgtgagaaaccctagatttgcttttgagctttgtcactttaagtacaatattgttgatcgatagattcggagaaacatt

SEQ ID NO: 576 - DNA, 493 bp, Glycine max
  unsure at all n locations
  Clone ID: LIB3028-049-Q1-B1-B3
cacgttccagttaccttatcttccacctcagatacctctcttcactcttccatcatcttcctctccctccagacaaaacatcaccaccaccttcaacttaatttcccagttacactgccaccactttgattccaaataaccaccatcaccatgttcacggctagtaagctagccttcacattaacaccacctcgtccatgcactgcacctttgacaccaatctcttccttgtcctcttcttcttcttcttcttctgcttcagcttctggtatcaacttcattcagttcaatggacgccacttatgcctccgacgcaggctgtttctactctctcctaaggccactgcagatcaacaagggaaggttgaagaatttgaagatgattcaaatgttgttgatagtaaaatcctcccatattgtagcatagataaaanagagaagaaatcaattggtgaacttgaacaggaatttcttcaagcactgcaagcattct

SEQ ID NO: 577 - DNA, 376 bp, Glycine max
  Clone ID: LIB3028-048-Q1-B1-H8
aatttcctaagcccaatgagtcaaacgctgctccctgcacctgcaacctgttcctcctgcacgcgctgcacctgcactcccgtagcctgcaacctgttcctcctgcacgcgcctgcaactgcaaagtcgccagtcaaaccagcggtttgtgaaaccactgcttgaatcgccagtacacgtggcgagatccaccttacgcgaagtgcatgccatagcaatgcctaaagcacaaaggaagaagaaagcctcggtttgtggaattgagacatggagagcagcagtgggagagagagcacggggcgtgtgccactgtcacgggtggtcagatgtactgtcatggctatggtgttcccagagatgggaagaatttggctga

SEQ ID NO: 578 - DNA, 365 bp, Glycine max
  Clone ID: LIB3028-049-Q1-B1-A10
aaacttttctcaattgggttgaggagagtttgactcaaatttttatttttctaacgaagcagtagcgattagaagtgcaaaaattaaatgtccaacatcttcttgttgatgtttgagattcatgtatccgattctcagtgaaatcgtcttttccgggtgtatgatcaattccactgttaggcgcaggacccatttagttcaatccttctcagttgctttcctcgattggttgtactacgtttcatgatttctaaagcttccttagtcgaataatcatctactactagctattattattagtagtattattatcatcatcatcatatataataaaatctatctgcaatattatttttctgactttg

SEQ ID NO: 579 - DNA, 450 bp, Glycine max
  Clone ID: LIB3028-049-Q1-B1-A4
ttttacttcccctatggctcgtcactccttgctcttagccctcctcctcttcgccgccgtggccaccgccgcgatggcggtggccgcgtccgacgccgacgacatcctgatccgtcaggtggtgccagatgttggcgaagccgaagaggaggacaagctgctgaacgccgagcatcacatcgcgagcttcaaggcgaagttcgccaagacctacgccaccaaggaggagcacgatcatcgcttcggcgtcgtcaagtccaatctccgcagagccaggctgcatgccaagcacagatacaccggagtgtaagatgtcggttgttcctacgatccaaggccggccgagttccgccgccagttcctcggcctcaaacagtacagcatcccggtgcacgctaagaaagcgcccatcctccccaccaaggatctccccaaggatttcgattggag

SEQ ID NO: 580 - DNA, 559 bp, Glycine max
  unsure at all n locations
  Clone ID: LIB3028-049-Q1-B1-A6
ggcgagcaccgtctcaacccaacactcctcgattccatccaatcctccctccgccgcgtccgccaagaagccaccgcctcctccgccctcgtcaccaccgcgcacggcaaattcttctccaacggctacgacatcgcctgggcccgatcctccgatgaggtcaaagagcgcatgatcctcatggactccctcctccgctccgtcgtctccgatctcctcaccctcccgatgccgaccatcgccgccgtcaccggccacgcctccgccgccggctacaccctcgccctcgcccacgaccacgttctcatgcgcagcgacaggggattcctctacatgagcgagcttgacatcaacctcgttattcccgcgtggttcgtggctctcctcgaagccaaaatcggctcgcccgcggctcggcgccacgttgtcctgaacgcggctaagctcactgccaaggangcgctgcggctcggcgccatcgactcggctcacgacagcgccgctgagaccgttgaagctgcgctcgctttaccgcggatttggtgaagagaggatgggt

SEQ ID NO: 581 - DNA, 536 bp, Glycine max
  unsure at all n locations
  Clone ID: LIB3028-049-Q1-B1-A7
gagagaacttcaactgagggtgagagtgacacaaatctagggagcactactctaaaagttctattagattcttcaaaacatgaccatgcatcgcgagtcttgggcttttgtcttcggcgttatgggcaacatcatctcctttggagtgttccttgctccattgccaaccttttatcaaatctacaagaagaaatccactgaagggttccagtcacttccttatgttgttgcactgttcagtgcaatgctttggatttactatgctttcgtcaaaagggaagctgccctccttctcattaccattaacacatttggaattgttgtggagtcaatttaccttgcaatcttcctactttatgctccaaggaagcctatgcttacaatcatcaagcttcttctcttactgaatgtgtttgggtttggagccatgcttctatcaactctctagctgtcaaagggagcanagcgtcttgctatcatacgatggatttgccttgttttcaacatcagtgtctttgctgcgcctctcttcatta

SEQ ID NO: 582 - DNA, 562 bp, Glycine max
  Clone ID: LIB3028-049-Q1-B1-A8
gcaaggaggagagtactctgccaaagactaccatgaccctcctccagcacctttgttcgacccagaggagctcacacagtggtccttctatagagccctcatcgctgagttcatagcaacccttctcttcctttatgtcactgtgctcaccattattggctacaaaaggcagactgatacaacggtaggtggcaccgactgtgatggggttggcattttgggcatcgcttgggcctttggtggcatgatcttcatccttgtttactgcaccgccggtatttcaggaggacacataaacccggcggtgacattcgggttgttcctaggacgcaaggtgtcgttgataagggcgttgttgtacatggtggcacagtgtgccggtgctatctgtggtactggattggccaaggggttccaaaaagcatactacaacaggtatggacgtggtgccaactctgttgctgatggctacaacaatggtactgctttgggtgctgagaatattggtaccttcgttcttgtctacactgtcttccctgccactgaccctaagaggaacgct

SEQ ID NO: 583 - DNA, 367 bp, Glycine max
  Clone ID: LIB3028-049-Q1-B1-A9
caatcggacaactgagccgattcattttacaccgccaatgccacatcggtcgaatactatgcctttgctgccaatgatgacgtcggtttcagcgacggtgatggcgccgtttaattttagcgcagagtttcggtcggtgatgcaggaaatgataaggaaggaggtgaggagttatatagagttgcacaatcagaatgggatgtgttttcaggctgcggtgaatgatgggtttaggaacgcttccgtcaagcgtattggaattagcagggttgattcgtaaatagtatcatcggagaaaagaatgttcatttgctcctcctaatgggaaaaaaataagaagaatctgtttttttccctgttccttttt

SEQ ID NO: 584 - DNA, 180 bp, Glycine max
  Clone ID: LIB3028-049-Q1-B1-B1
aaacaggcaactatgatccttttgtttaatatctagtctttaacctttaagctgttgtatgttgcacttcctcaatgtagtcttaagaacctctgaaaagaggtaaaatgacgagctaaaatttaacttttgtagcacaagatattctgatcctctaatgtatgaactctgttctcgttt

SEQ ID NO: 585 - DNA, 322 bp, Glycine max
  Clone ID: LIB3028-049-Q1-B1-B10
aggaacatgatttaggcaactgcgaagcccaccgatattgattctctcaaaacttccaaccatgaactgaagcatcacacatgatgacttcctcgaaagacatcatgtttattaccaatcgtccaatttcagagaaaattccttgtgggcatcccctaattaaaaaaatgtcaagcgtccccaacacggtggcggaaggtcgcaagtccagcaaggcaccggacaaatccactttttctcagacatgcagcctcttgagccagttcttgaaggagaaacgtgcttctgctgattccacctttcgaattggtgggaaaatgga

SEQ ID NO: 586 - DNA, 300 bp, Glycine max
  Clone ID: LIB3028-049-Q1-B1-B11
gtgacagacagacagtcagatcatccggctcacagaatcgtgtgatctgcaatatctccgaaggaggggaaatggtaaaggacatgcgctccatccagatcacgacaggcgcgctaatgatttgagtctgcttgagaaccatacagaccaatactgcaccagcagcatgaactcatcgcagtggacaggctagtatagtatcaggaaacagaatgtgtgacacagttactggctgtaataaagagataggttcattattgaagaatcactatgaagatggtattttataccgcgacgaat

SEQ ID NO: 587 - DNA, 301 bp, Glycine max
  unsure at all n locations
  Clone ID: LIB3028-048-Q1-B1-H7
gttgaaataaatggagtggatcaatccaggttgagtgagtgtagtggggagtccaatgctctagttaagggtattcaaattgatactaaagaaaactgctgtcaatatgatgtagaagttgaagatagcattaacaaaaaggactgtggaaatgttggtgaanacattcagcaacatcaagacataggtttagatgcttatactgaatcagtatatggaaaattggatctgaattctgtacaaaagatgtttcttaagggaatgtgtaattttggcagtactgattctgacatagttgaga

SEQ ID NO: 588 - DNA, 383 bp, Glycine max
  Clone ID: LIB3028-048-Q1-B1-G10
ggagtctcccttttggttgcactggctggtttagttgtagcagttatattgaccaaactgtctttaccggacatatttgcttctatgttggctttcattcctactggttggggaattctgtcaattgctgctgcctggaagccggtgatgaagaggctcggactatggaaatccgttcgatcaattgctcgcctctatgatgctggtatgggaatgctcatctttgtacccattgccttcttttcgtggttcccatttgtatcaacattccaaactcgcctaatgtttaaccaggcttttagccgagggttagaaatttctcttattctagctgggaacagtcccaatactgggatatagttgtatttggctcaggccttgtt

SEQ ID NO: 589 - DNA, 378 bp, Glycine max
  Clone ID: LIB3028-048-Q1-B1-G11
ggctgaaaaagatgactcctgtaaacagtgcatttgcttggaagtcatacaatgaaaaacttgcttcatcaattcaacctgattcaattgcagcatatgcactttgggagcaggtcaacgtgacccgcgattcttcagattatttgtggtatatgacagatgtcaacgttaatgctaatgaaggatttctaaagaatggacaatctcctcttctaactgtaatgtcagctggccatgttctccatgtgttcattaacggtcaacttgcaggaactgtgtgggggggattgggaaatcctaaattgacatttagtgacaatgtgaacctgagggctggcaataacaagctttctttacttagcgttgcagttggtctcc

SEQ ID NO: 590 - DNA, 378 bp, Glycine max
  Clone ID: LIB3028-048-Q1-B1-G12
ctcgagccgaatcggctcgagcacccttctttgactgttctcccacaccacacccatgacactccttctgctccttattctcctctttcacgcggcggaagccaagggacagtggcagctcctccacaaaaacatcggcattgtcgccatgcacatgcagcttctccacaacgaccgcgtcatcatcttcgaccgcaccgacttcggactctccaacctaaccctccccgacggaagatgccgcaacaacccaaacgagttggtcgtcaaacgcgactgcaccgcgcactccatcgaatacgacgtcgcagccaacacattccgcgctctctttgtccaaaccaatgtctggtgctcctccggttcggtctctcccga

SEQ ID NO: 591 - DNA, 359 bp, Glycine max
  unsure at all n locations
  Clone ID: LIB3028-048-Q1-B1-G3
aagctgcaaaagttgcgcgttcagttgcatcatcttcacttgtaaaggctgctatatatggtagagaccccaattggggacgcattgctgctgcagctggttactcgggggtttcattccatcaagatttacttagggtagagctgggggatattttactaatggatggacgggaaccacaattatttgaccggcacgcggctagtagttatcttagaaaggctggggagactcacgacacggttaaaattcagatatcagttggcaatggaccaggacgtggacaagcatggggatgtgatttaagctacgattatgttaanataaatgctgagtacacaacataggcaaaaggaaac

SEQ ID NO: 592 - DNA, 317 bp, Glycine max
  Clone ID: LIB3028-048-Q1-B1-G4
cttaacatattcaggtatggaaggcagataggactgctgcaaggcaatacacaagtcattgacagtgtctagtagagtttctgctaatccagcttttgcaggaatagctgcaaaggttagataccagacctttctgccatatcatagttttgaaaaccagaccggtgaataatccggtcaaggcattgacgaattgacccacatgatcccgtccctgttaagaaaattgaaaattttagtatatatatatatatatacaaaattataaataaaatttagtgtaaacaagggttttaatcgtcgaaattttcaacatt

SEQ ID NO: 593 - DNA, 357 bp, Glycine max
  Clone ID: LIB3028-048-Q1-B1-G5
gaagaagaagatgtcgtacctgttgcctcacttgcactctggatgggccgtcgatcaagcaatcctcgccgaagaggagcgtctcgtcgtcatccgtttcggccacgactgggacgaaacctgcatgcagatggacgaggtgttggcgtcagtggcggagacgatgaagaactttgcggtgatatacctggtggacataacggaggtgccggatttcaacaccatgtacgagctctacgacccttccacggtgatgttcttcttcaggaacaagcacatcatgattgatctcggaaccggtaacaacaacaagatcaactgggctctcaaggacaagcaggagttcatcgacattgt

SEQ ID NO: 594 - DNA, 310 bp, Glycine max
  Clone ID: LIB3028-048-Q1-B1-G6
ctaacccttccatcgtagtttccacatttctcctaccgaaaagtcaaaactacccactcacccaggtaggcacaggcagcgatggacgtaggagccggcgacgatcattccccggaagccgtcatatcgcggtggaaattcgcggtgtcgcagcagtaccagcacatgctggacaaaacgacgccgcacgttctccggcggtggatcgggtggctggtggttgccgccgtgtacgtgctccgcgtgtacttggtccaaggcttctacatcgtctcctacgccctcggcatttacatcctcaacctcctca

SEQ ID NO: 595 - DNA, 352 bp, Glycine max
  Clone ID: LIB3028-048-Q1-B1-G7
aaagagaatcgatcgacgctgctagagaagtagaagaagatggcgggtggtgctcccaaacaattgttcggattcggagttgtggcgttgcttgccactctcattcttcctctctttatgctcgccgctgttcaggctcaatccgcagcccctgcatctgcccctgctagcgacgggtcctcccttgatcaagggatagcttatgtgttgatgttgctggctctggtactcacatacatcatccactcggcctaaattgcctccaccttctgaacttatagagcagaatatggttatgggtgtttgaaggcggtgttgtgtctgttatgatgaatcactttcgtacattgtg

SEQ ID NO: 596 - DNA, 322 bp, Glycine max
  Clone ID: LIB3028-048-Q1-B1-G8
cataaatattccgttttgcgtttctctgcctaaaaggattgaaagatgggtcaagcactaggttgctatcaagttgatcagtcaaatgtggctatcaaggagcattttggaaaatttgatgatgtcctagaacctggatgtcattgcctgccttggtgtcttgggtaccagattgctggtagtttgtcactgcgtgtgcagcaacttgatgttcgatgtgagacgaaaaccaaggacaatgtctttgtcactgtggttgcatctgtgcaataccgagctgtgtctgagaaagcatctgatgcattctataggcttaccaaca

SEQ ID NO: 597 - DNA, 376 bp, Glycine max
  Clone ID: LIB3028-048-Q1-B1-G9
gcattctgctatttaattccactacgtacacgcacattctcctcaaagacaacaatggcaccaacagccaagactctgacttacctggcccaggagaaaaccctagaatcgagcttcgttcgggacgaggaggagcgtcccaaggttgcctacaacgaattcagcgacgagatcccagtgatttctcttgccggaatcgacgaggtggatggacgcagaagagagatttgtgagaagatcgtggaggcttgcgagaattggggtaaattccaggttgttgatcacggtgtggatcaacaactcgtggccgagatgacccgtctcgccaaagagttctttgctttgccaccggacgagaagcttcgttttgatatgt

SEQ ID NO: 598 - DNA, 322 bp, Glycine max
  Clone ID: LIB3028-048-Q1-B1-H1
aaatgaatcaagtgtggaccgtcttatgaagcaggttacaaatttcatgtctgatattgctgatgagttcaaaattgttgttgttgaagcaataagatcactatgcttgaaattccctttaagagagagatctctgaggaatttccgaagtaacagtcttagggaagaacgtggctttgattacaagagaacaattgtagattcaattgtgagtcgtagtagagatatccctgatgctaaggaaagtgggttgcttcatctttgtgagtttattgaagattgtgggttcacttatttgtccacacagatactgcacgtcctg

SEQ ID NO: 599 - DNA, 338 bp, Glycine max
  Clone ID: LIB3028-048-Q1-B1-H10
gttcgtcgaagtactgatggccatataattcatgccaatattgacacagatgtcattatcgctgaagaacctccttatggttccacacaaaagcctgaagatatgtacaggattattgagcactttgcccttggaaggaggagactataactatttggtgaagaccacaatatccgagccggttggctgactgttggtaaagaattatcatcttcaaattttaataaagaggcatatgtgaaaagttttgccgacaaagatgggaaagtttggcaacgacgtgggggaagaaatccaccgccagaggcacctcatctggtggtgactactcctgatat

SEQ ID NO: 600 - DNA, 353 bp, Glycine max
  Clone ID: LIB3028-048-Q1-B1-H11
accgcctcacgcgacaaatccatcatcctctggcatcttaccaaggaggacatgacttacggtgtcccccgccgccgcctcatcggccattctcattttgtccaggacgtcgtcctctcttctgacggccagtttgccctatccggctcctgagacggcgagctccgcctctgggaccttgctgctggcacctccgctcgccgctttgtgggccacaccattgacgtgctctccgtggccttttccattgacaaccgtcagatcgtgtctgcctctcgtgaccgcacgatcaagctgtggaacaccctgggacagtgtaagtacacaatccaagacggcgatgcgcattctga

SEQ ID NO: 601 - DNA, 246 bp, Glycine max
  Clone ID: LIB3028-048-Q1-B1-H2
gtgtatttccctacctctcccttcaagatgcagatcttcgtcaagaccctcaccggcaagaccatcacccttgaggtggaaagctctgacaccatcgacaacgtcaaggccaagatccaggacatcgaaggaatccccccggaccagcaacgtctcattttcgccggaaagcaacttgaggacggccgtacccttgctgactacaacattcagaacgagagtagtcttcacctcgtcctccgtctc

SEQ ID NO: 602 - DNA, 341 bp, Glycine max
  Clone ID: LIB3028-048-Q1-B1-G1
tgaacaccttcatatccctttttatgtaaataaagctacaagaattgtgatcgtgatgttggtgatggaatccacagcaagaaaaccaacctgcttaaagcatatgtggagtttatttatcttgtagctaatgcagtataggactatatataggtttttatagggtatcctttgtgtgaaactcaagagacctcgttttcaggggattttctgtttgatgtccataaggattatcaattatgttatatatggtctgggatacagtcttgacttacagtttttaacttggttgttttcattgttatggcaatttgattatgatttgagaccagccagttttc

SEQ ID NO: 603 - DNA, 360 bp, Glycine max
  Clone ID: LIB3028-048-Q1-B1-H3
aaaatgctctagataccaaggataaagagatacaggttttacatcagaagctggacaatccagatgcaaatccttatgaaagtccctgcaccatcaccacagaatacagatatacaccacatgaagcacttctccgaaaagcaggtcaaggtgctgatgtgtcggactcagaaatttggccttcaaatttagatgcaaatgcagccacaacgcctttcacagaacaagttgaaactgaaagaacaggaaaaaatgccttctcatctgtgagaatgacactagagaagctcatggcacatcaagataagcgccaagacctttctaacttggaacagaagttccgttcagacatcaacgact

SEQ ID NO: 604 - DNA, 368 bp, Glycine max
  Clone ID: LIB3028-048-Q1-B1-H6
gcctgctgggccatctccaacgtctcggtttgagtatgtagaaaatgtccaatcatctgagttgaacactggaggttcacatttgcttagtcatgtgtctccaccaaagtcatcaagcttctttgcagactttggaatggatagtggctttccaaagaaatctgggccaagctcctcgaaagtgcaaattcaggaaactgatgaagcaagaaggaagttctcaaatgctaaatctatttcttcatcccaatattttggagatcagaacaaggctgcagatgtggattctcaagctacattgtctaagttttcgggttcaagtgccatctccagtgctgatggttttggtgactcaagagacaacaaca

SEQ ID NO: 605 - DNA, 236 bp, Glycine max
  Clone ID: LIB3028-048-Q1-B1-E10
cgagagtggtttttgttagtgcagaaacagagaaagatggatgaggagaatggttacagtgggagtatcagctctaacttggagactacaaaagcagagagatctgtgtggctgatgaagtgccctttggtggtggctaagtcatggcagacccatcctccttctcaacctctcgccaaggttgtgccctcccttgatcctctcaaccctgaggaagacattcctccggcggccaa

SEQ ID NO: 606 - DNA, 370 bp, Glycine max
  Clone ID: LIB3028-048-Q1-B1-E11
ccaagatttgttcattgttgggtcaattgaagtctaagaaagaaaacagagagcgaagaaggagaagagatcagaaaaatggcgtccaaagctccaaagaaggccaatctcctcgatcaccactccatcaagcacatcctcgacgagtcagtctccgaggtggtaacgagtcgtgggtttgtggaagacgtgagattgagcaatgtgaggcttctcattggggcaatcatcatcgtcattgctctcttcgcccaattctacaagaagaagttccctgaaaatagggattttctcatcgcctgcatcgccttgtatgtgatcttcaatgggttgttgcagctgatcatatacactagggagaaaaatgcca

SEQ ID NO: 607 - DNA, 329 bp, Glycine max
  Clone ID: LIB3028-048-Q1-B1-E2
gtgaaccgacagtctgtgttgggagccattacttctgctcagcagaggttgaaactatataacaaggtccctccaaatggtttggttctttacactggaaccattgtcactgaagatggcaaggaaaagaaggtgacaattgattttgagcctttcaagcctatcaatgcatcactgtacctctgtgataacaagtttcacacagaagctctaaatgaacttttagaatctgatgacaagtttggtttcattgtgatggatggaaatggcaccctttttgggactttaagtggaaacactcgtgaggtacttcacaaatttactgttga

SEQ ID NO: 608 - DNA, 383 bp, Glycine max
  Clone ID: LIB3028-048-Q1-B1-E3
cagacacaagcacagtcacaggcacaaactcaaagacttgctcctcaatttcaacagaagtcaactggtggtggcgccgttgttgatttgccttctcctgattcagtttcaagtgatagtagtcttgcgaatgcaatctcgcgttcgaaacctgctgtttatcaagaacaagttcagattcaatccgggactacaagggttcccagtaaccctgtggatcgaaagcttaatgtgtctgatccgcacggtcggatccagatgcagcaacatgtacaggaccctggatatttgttgcaacaacaatttggacagcaccagcagttgcagtcacaacaaacggaagagcaattttgacagcaacatcaccagcaacagcagacact

SEQ ID NO: 609 - DNA, 363 bp, Glycine max
  Clone ID: LIB3028-048-Q1-B1-E6
caaattaaccaccaacaacagcagaagaaaataaaggagcaaactaaaatggcagcaaataaatacgttgcattgttgttggtggtgttccttatcgctggaagtgctaatgccagaccaaaagaagtcagctgcgcaagtatttgcatcgacagagaatgcaaaagtgactttaacagttggtgtgcaatattcaattgtggtatcaaatgtgcactcataggaccacaaaagaaaactgaaacagttcaacgacaaatggtaaaagagcaaggactaacatcatcaaggaagattcaacaataaatgatgaaagaagacgcgaagcacaattggaaaaatacacctactcaagttttttaa

SEQ ID NO: 610 - DNA, 362 bp, Glycine max
  Clone ID: LIB3028-048-Q1-B1-E7
ggatattggaaatcagaggttctctgacatcaacagccaaacaagttcagggcaaacaaaatctaaggataagggtgttgatcccttttcattcaatagtcaaggggtttatccccaacccacgactgcaacatatcctattgggaaagaagatgtcacagtcatttttacaagaagaggaggagatgatttggaacataaccacagtaaatggttatcaactatcaagtcctccccagatatcattgagatgactttctgtcctataactgatctccttgatgagatacctgccaaggagcatttgactcgtgccattggtctttatcttgaatataaacctcctattgaagaacttagat

SEQ ID NO: 611 - DNA, 261 bp, Glycine max
  Clone ID: LIB3028-048-Q1-B1-E8
accggatgataaacagtgtcccgccaagaatctggtggtgctcatgtgcaggctctacttggtggaattcttcctgcgttacgacacgtttacgttcgattttaaaccagttgttctgggtcccgatgttaccatcaagtcactcgccaaggcttcttccttctgatcctcctcatcacctactctacctcaaacttaaaatcaatcttctttttagggtgtattagttaattaataattaattaaaacaaattaattata

SEQ ID NO: 612 - DNA, 384 bp, Glycine max
  Clone ID: LIB3028-048-Q1-B1-E9
ccttagccgaggtcacgaggagcactagctagtttcacaatttccaaatggctaggggattgaagaagcatctcaagaggctcaatgctcctaagcattggatgcttgacaaactgggtggtgcatttgcgcccaaaccctcatctggaccacacaaatctagggagtgccttcccctcatactcatcctacgaaaccggctaaagtatgctctgacttaccgtgaagtcatcgctattctgatgcagagacatgttcttgttgatggaaaagtcaggaatgacaagacttaccctgctggtttcatggatgttgtttcaatcccaaaaaccaatgagaacttccgcctgctctatgacactaaaggccgattccgtctccatt

SEQ ID NO: 613 - DNA, 370 bp, Glycine max
  Clone ID: LIB3028-048-Q1-B1-F1
gggtggcactaacgtctgccaaagaagtctcaccgctgaagggatatttcacaatatttttaggcacaaggttactcacatggggggtgcaccgacagttttaaacatgataatcaattcaccacccaaagtccggaagccgcttccgggaaaggtctaagtgatgacaggtggtgcaccaccgcctccggatgtgattatcaggatggaagaactaggatttaatgtgactcattcatatggtttgacagaaacctatggtccaggatcaatttgcacatggaaaccagaatgggacaatctgtctcgagatgcacaagcaaaactcaaggcacgtcgagggggtggcccatgttgggaatgaagacct

SEQ ID NO: 614 - DNA, 289 bp, Glycine max
  unsure at all n locations
  Clone ID: LIB3028-048-Q1-B1-F2
ctgaattggagcagcagagaaacaatgaagaatcaagtgtgtacaggacttcacatttgatagacaaatgccgtagttcactagagcttttctttgccatatggttcgtgatgggcaatgtatgggcctttgactcacgttttggatccttcccacaagccccaaaactccaagtgctctgcatcatcttgctttcttggaatgcaatatgctactcgttccctttccaantgtttttgcttttgtgttgttgtgtgccactaatgaacaccctccttggatacaacat

SEQ ID NO: 615 - DNA, 330 bp, Glycine max
  Clone ID: LIB3028-048-Q1-B1-F3
atttctaaggaagaggaagcagaaatcatagatcggacagagcaattaaaagtaggaaaaggtcctgcaaagaataagaatgcaaagccaccaagccccagaggcagtcatgcaagttcagttaaaaagaacaaagatggaaaagatgaagaggtagcatcttctgtttcaaatgggacttttgcttcagactctcacccaagacagcctattaaaaacagatcattgagtgacaagcaggctcgattgtccaagcaccctggaaagtctaacgcagcacattctgaagaatcaatggagaagactagaccacaattatcgaagaaagat

SEQ ID NO: 616 - DNA, 313 bp, Glycine max
  Clone ID: LIB3028-048-Q1-B1-F4
cccttctctaacatgccatacgacagcgttctgagtcttttcttcttcgttaccctcttcacatgccttctctctgctaattcccacgatgaccatattttcctaccgagtcaactccatgacgatgactcagtgagttgcactgctaccgacccaaaccttaactacaagccggtgatcggaatcctgacccaccccggcgacggtgcctctggccggctcagcaacgccaccggggtttcttacatcgccgcctcctacgttaaattcgtggagtccggtggtgctagagttattccccttatccacaatg

SEQ ID NO: 617 - DNA, 387 bp, Glycine max
  Clone ID: LIB3028-048-Q1-B1-F6
tgtacttggaagtaagggagaagcaatacgacaagaaggaataccttgatttttatactgaccttaccgctacatctccagccgtttctggagtgatggtatatatagcaactcccgacaagaaatctaatgtaaattatttgggccctgcatcgattgaagacattgcaaggcaaataattcaagctaaaggtcccgcaggacctaacagagattatcttttcaaccttgaaaaggctcttcatgaaataggatgcaaagacaaacatgtcattgatcttgcaaatgaagtcaggcgtattcttgcagaggaacactgaatgcatctgtgtgttatgtagttatttatgctgatcagtatgttagtaagcacaacattctgagaca

SEQ ID NO: 618 - DNA, 318 bp, Glycine max
  Clone ID: LIB3028-048-Q1-B1-F7
taatgttctaaaaacgaacctcaaaaagaaatttcctttcttcttcttctgtcaactcggtctcatggctcaccctcgactcactaactcgctctcttcttcatcccttcgcaatctcaatcccaaacccaaactcattcctctctgcacttgctcatgccgtcccttctcttcgcaatccctaattctccattctcaccctcttttcctcgccagacccaaaccactcctccggttcgcccgccgaaccggaccgcctctcgtcctcgccgctgtcggccaagccgaaccggaactttctcaaaacagcaaccccac

SEQ ID NO: 619 - DNA, 379 bp, Glycine max
  Clone ID: LIB3028-048-Q1-B1-F9
ccgaaatcgccgaatacgactaaaatcaaaatcacaacactgatcctttcatttgcaaattgcaaatgcagaaaggaaaagcggattctatctccatcatcagctcccttcctgaagatgttgccctcaaaattgcttcgctacttcaggtgcgggatttgtgtgccttaggttgttgttcgatgttctggaaggaactctgcttctcagattgcatttgggagtctcttgtcagaaacagatggccctcactctcttccttccatttcccttcttcttcttccactcattctcccagtttcgaggtatccactgattctcctcttttggaggaacgccctatttgtttttcaaccttgtttaaacaaagtttggtact

SEQ ID NO: 620 - DNA, 311 bp, Glycine max
  Clone ID: LIB3028-048-Q1-B1-D9
gtgggatcggtttcatccaacttatgcagtgaatgccattctgacagacaatatatggaatggctggcacacttaaatgtgctatcctatgagcttggaggacatggtaaataggatgccaaaatgatattgtgatgttagattactccactttttgcacataagtgtttgatactcaatggctctacttataagtaggttttttttttttttttttgcacatgttgctgaagagagttagtgtatatacatataacgttgtaaatttacaatgtaatcaaatattaatactaccaaaaacttctccgtgc

SEQ ID NO: 621 - DNA, 303 bp, Glycine max
  Clone ID: LIB3028-048-Q1-B1-C2
gaagagaatggctcccaagggtttaacctttctggctgtgttaatatgcgtttcagcactgtcactgagtccttctgttgcgggggaagggcaaaataatggccttgttatgaacttctacaaggaatcatgccctcaggctgaagacatcatcacagaacaagtcaagcttctctacaagcgccacaagaacactgctttctcctggctcatgaacatcttccatgactgtgctgttcagagttgtgatgcttcactgttgctggactccacaagaaagagcttgtctgagaaggaaacaga

SEQ ID NO: 622 - DNA, 331 bp, Glycine max
  Clone ID: LIB3028-048-Q1-B1-C3
cttaactcaacttctgctagccactctctgcttcgaagtccaaccacgcttttctctacagtcatgggcaaggtcaagatcggaatcaacggatttggaagaattggccgtttggttgccagagtcgctctgcaaacagacgatgtggagctcgttgccgttagcgaccctttcagtaccaccgattacatgacatacatgtttaaatacgacagtgttcacggacactggaagcatcacgatgtcaccgttaaggacgagaagacccttctcttcggtgacaagccagtcactgtttttggacacaggaaccctgaagagatcccatggg

SEQ ID NO: 623 - DNA, 329 bp, Glycine max
  Clone ID: LIB3028-048-Q1-B1-C4
cggctttctgagctcattggtatccaggttgtcaaggctgaagacagtattggtccagaagtagaaaagttggtggcttctcttccagatggaggtgttcttcttctagaaaatgtgaggttttacaaggaggaagaaaagaatgatcccgagcatgcaaaaaggcttgcctctctggcagatctgtttgtggatgatgcatttggtactgctcaaaggggacatgcatcaacagagggtgttactaaatacctgaagccatctgttgctgggttttcttttgcaaaaggagactgattaccttgttggggcggtaacaaggcccaaaa

SEQ ID NO: 624 - DNA, 323 bp, Glycine max
  Clone ID: LIB3028-048-Q1-B1-C5
ctgacctatcttggtagagatttgaagtttaaaccttcaaattaatcaaaccattttaatttgcctatagattctgagtcactgctgctatggcgctacgcgtacttcttgtgttggggatgttgctgatgttgtgccttgttaaggtttcatctgatccaaagatagaggaagaaatactggaagcagaagaagaactgcagtttcccgataacgagccacttatcgtgagagacgcgaacagaaggctaatgcaagatatggattgtggtgggttgtgcaagacgaggtgcagtgcacattcgaggcccaacttgtgcact

SEQ ID NO: 625 - DNA, 350 bp, Glycine max
  Clone ID: LIB3028-048-Q1-B1-C6
tgagaagatggtgtttgaggaaactgagctgaggctgggactgggactatgtctccctggaaatggaaccacggcaacaactgaagctgctgctgcggaattaggagtgaggaagagagggttctctgagactgaaactgatgaaacagccaccgttgatttgatgcttaacctctcacccaaggaagctgctgctgctgatggtgcagatccacgtgagaagccaaagacttcgccgaaggagaagacccttctgcttcccgattccgccaagcctcctgccaaggcgcaagtggtgggatggccacccgtgaggtctttccggaagaacatgttcgcagcccaaaaga

SEQ ID NO: 626 - DNA, 338 bp, Glycine max
  Clone ID: LIB3028-048-Q1-B1-C7
aaagaacattgttcaaaggagtaagaacaatgagggcgaaaaagccgccacaagtagtagcaacaatgtgaacacgggagcagctttcgtgaaggtgagcatggatggtgctccttatttacgcaaggtggatttggagttgtacaagagctaccaagagttgttggatgcgctggctaaaatgttcagttcattcaccattgacaagtgtggatcgcaaggcatgaaagacttcatgaacgagagcaaattgattgatcttctcaacggctctgattacgtagcaacctatgaagacaaagatgctgactggatgctcgttggtgacgtaacgtggg

SEQ ID NO: 627 - DNA, 327 bp, Glycine max
  Clone ID: LIB3028-048-Q1-B1-C8
gtctgggtgtgacaaccttaggaagctggagatcagggactgcccctttggtgacaaagcccttttggccaatgctgcaaagctggagacaatgcgatccctttggatgtcctcttgcttggtgagttatggagcatgtaaattgctgggtcagaaaatgccaagacttaatgttgaagtcattgatgaaagaggacctccagattcaaggccggagagtagtcctgttgagaagttatacatatacaggactgtttctgggccaagattggacatgccaggctatgtatggagaatgcaagatgattctgcattaaggatttcttg

SEQ ID NO: 628 - DNA, 385 bp, Glycine max
  unsure at all n locations
  Clone ID: LIB3028-048-Q1-B1-C9
attctccctttcctctccgaaccctcgatcactctcacgcgctcctatattcgctcctccaccgtcgctctctcgaacaaccacaacaccatcttcatcacatggcaaacgcagcatctggtatggcagtccatgatgactgcaagttgaggtttttggagctgaaggcaaaaaggacacaccgtttcatagtttttaagattgaggagcagcagaagcaggtcattgtggagaagcttggtgagcctgcccagggctatgaagatttcactgccagccttcctgctgacgagtgccgttatgctgtttatgattttgagtatctgactgaagggaatgtcnctaaaagcagaatttttttcattgcgtggtcccctgacacatc

SEQ ID NO: 629 - DNA, 338 bp, Glycine max
  Clone ID: LIB3028-048-Q1-B1-D1
aactactccaagactttcagttagtaaggaggtgttagactcaccaagcagttatcaagtgactgtggaatcaaaaccattgactgagattacaactaaagataaaaacattcatgtttctgatgaagtaaagaacgagcccatagatttaccagagcctatttgtaaagatgaagattctcacttaacaaatggagatttgagtcacaaggaagatcaagtaggcagtgaaaaccagaaaccaaacggaaaagcctcaattgtagcaaagcaggaacgtgcagagaatggtatacagaatagtccagcactaccaagttacatggcagcaactgaat

SEQ ID NO: 630 - DNA, 356 bp, Glycine max
  Clone ID: LIB3028-048-Q1-B1-D10
ctttgggagatcaaatcatatctatctatcagcggcaaggcaattcaagttgtgaaatggagaccctctgctctgcattggtgttcccatctttcagaatcagaacttcagctttctccaaatgtggcatcagggcttccattgccgttgagcaacaaacttcccagactaaggttgctctcctcagaattggtaccagaggaagtccactagctctggctcaggcatatgagaccagagacaagctcatggcatcacatgcagagctagcacaagaaagggctattcagattgtaataataaaaacaactggtgacaaaatactatcacagccacatgtacacattggtgggaaa

SEQ ID NO: 631 - DNA, 378 bp, Glycine max
  Clone ID: LIB3028-048-Q1-B1-D11
ttttgctacattctgaatggagctttctgcaccttcttcaccctctcttctaagatgtccttcatccctgcttctgaattctagggttagggttttccatacaatactcaaccccacacgcccacctttccaagcttcaatcttttcactcaaccaacgcattctcactccaatggatcttcccagaaacgtctcctccgctgccttggtgggagacaacgcttcggccacgaccactttgccaattgactcagatgctagaatcggagaggttaaaagggtcaccaaggagaccaatgtatcagtcaaaataaacttggatggttctggggtggctgatagtagtactggaattcccttcctcgatcatatgcttga

SEQ ID NO: 632 - DNA, 366 bp, Glycine max
  Clone ID: LIB3028-048-Q1-B1-D12
ggaggagatatagaaagggaaatggaagcggaaaccttcatttgagttgccattgccaccaccgtttcccatggcgtctgtttggacactgcacttccgctctctttctcttcgcccatgcctctacattagtagcaattgcagtagcgctgccactagaaatcgcattagcatcagaaatcgaatctccaattggcgctcttgcgcccaacaactcaaacacgattccatcaattccattaccaaatttcaccatcaacttgttcattccgttaccattcctccattcctgttcgaggcctctcaagtatgaagaccccttcaataatccctttgtcaaggttggcaaaagccactcaactgttg

SEQ ID NO: 633 - DNA, 332 bp, Glycine max
  Clone ID: LIB3028-048-Q1-B1-D2
ggctcttcaaccactacattcactttattggcctagacccaaccaccaaagcaccaagagaccttaggtgaaccttttctctctagctctgtttgcagaaattcaagcgcaagaatggaggttgcaacaaacacaaccgcgaccacgtcaaattcattcgatgctctaactgtggaaaatgctgccctaaggtttttttattttactttcttatacctttaaagttttgtgcaaggcatttcagttaaagtttttgcgctttgtggattttttttttcttcaaattaataacaggacaaagctattaagaggtttctggtgaggaacattgt

SEQ ID NO: 634 - DNA, 333 bp, Glycine max
  Clone ID: LIB3028-048-Q1-B1-D3
agacgacgacgcggggaatctccggtctcgaccgagatctcttgtattctcttcacaatcccgtgatgccatttcgttccgttcacttcaatctcaatggccgataataagcaacccaatcacgagggaggcaagtcctcttctcgagcagtcccaacgcaaatccgaaccaccaaggccacctgagactcccgagtttcatctcggatggaccgctgatgggctcccgctgggccacggcagcgtcgtgggccagcccatgggccgcgccccttggaactcctccatctgcgcctgtctcggccaaaccgatgacttctgcagcagcgatct

SEQ ID NO: 635 - DNA, 140 bp, Glycine max
  Clone ID: LIB3028-048-Q1-B1-D4
gtatttcacccaaatataaatagcaatgggagcatttgccttgacatattgaaggagcagtggagccctgcgctaactatttcaaaggtgttgctctcgatttgttccctgttgacggaccctaatcctgatgatccttt

SEQ ID NO: 636 - DNA, 305 bp, Glycine max
  Clone ID: LIB3028-048-Q1-B1-D6
gccgcaccgacaacgccatcaagagccattggaattccaccctcaagaggaagtgctccgagcctctctccgagcctcggcctctgaagagatccgccaccgtttcgggtagtcaatccggatcggatttgagcgatgcgggtttacccattattcgtgcaagaagcgtgagcgtgacggtagctcgctctaaccaccttgcggaaaccgcgtcggcgtcagtaagtgatcctgccacgttattgagtttgtctctaccggggagtcgattcgtgcgatggggctgataatggggctgggccgaa

SEQ ID NO: 637 - DNA, 359 bp, Glycine max
  Clone ID: LIB3028-048-Q1-B1-D7
catttctccatttccattttctctctcacttttcaagaatcgtaagctatgggaaagtcttacccaactgtgagtgctgattaccagaaggccgttgagaaggcgaagaagaagctcagaggcttcatcgctgagaagagatgcgctcctctaatgctccgtttggcatggcactctgctggaacctttgacaagggcacgaagaccggtggacccttcggaaccatcaagcaccctgccgaactggctcacagcgctaacaacggtcttgacatcgctgttaggcttttggagccactcaaggcggagttccctattttgagctacgccgatttctaccagttggctggcgttgttgc

SEQ ID NO: 638 - DNA, 332 bp, Glycine max
  Clone ID: LIB3028-048-Q1-B1-D8
gattgctcttttctccttcgctcttccctttcccattcccattcctattcctcctttccctctcctctccgctcctccaattccccccaaactttctccctccgccgcttcgccgccgcctcgctcgcttgccctcgaccggcgccgccgcccctcgacgccataggccagaaaatcggaaagtcgaggcgccgccccgggtgcccttcaagggccgggttaaggcgaagtgtaagtctttcggcccaagggatattgggacaatgaatctctcaacgtccagttgggggagcaagatgattatgaggtggtgagaaaggtgggtacgggga

SEQ ID NO: 639 - DNA, 370 bp, Glycine max
  unsure at all n locations
  Clone ID: LIB3028-048-Q1-B1-C11
cttggtatctggggaggcaagaatgagaggaaccttgatgttgggcagggtcatgaagttcttggtatctggggaggcaagggacaaggaaaatctttccaatgtgagcttgtctttgccaagatgggaatcaaccccatcatgatgagtgctggagagttggaaagtggaaatgcaggagagccagcaaaactgatcaggcagagataccgtgaagctgcagacatgatcaagaagggaaagatgtgcgctctcttcatcaacgatcttgatgcangagctggtcgtcttggtggaaccacacaatacactgtgaacaaccagatggtgaatgccactctcatgaacattgctgataaccccaccaatg

SEQ ID NO: 640 - DNA, 287 bp, Glycine max
  Clone ID: LIB3028-048-Q1-B1-A3
ctctgtttctgggactactgatggaataagaagtctgggaaggttgggggactctagtaattcacaagaaaatgatataaaaatgttggaagtgaaacaaggtgagaagtatgcccctggaaatcaaatattggagaactcctctaacactgggcttgataaggaggagaatgtagaagatatattagaagaaagctccaatcattctacccgcaaagaacattttgatcatcatgaatttgaagatcgcactgattctcaagttagaacatctcatcaaaatacca

SEQ ID NO: 641 - DNA, 282 bp, Glycine max
  Clone ID: LIB3028-048-Q1-B1-A4
gaaccatgcagagataattaaactataagctacctagcttcgaatcatcatcactcataattttaattaattttttcctaccatacagtactattagtattaattagttctttgtcttatgtatttttttttttttagatggaagaggatatcgagggatttatagtaggttagatacattgagctagatcgtttgacaccttattttgttaggtagttactttgaatttttttccttagttactttgatgattcctttgcagatggtcaagaattgctcgc

SEQ ID NO: 642 - DNA, 353 bp, Glycine max
  Clone ID: LIB3028-048-Q1-B1-A5
gtacattgagaccatcaaagaagctttggaaagagaatgccctggagttgtttcatgtgctgatatcctcgttctctctgccagagatggcattgtttcgctaggaggtccccatatccctcttaagactggaagaagggatggtagaaggagcagagctgatgtggttgagcagttcctcccagaccacaatgagtccatttctgcagttcttgacaagtttggtgccatgggaattgacacccctggcgtcgttgcactgcttggagcacacagtgttggtcgaacccattgtgtgaagttggtgcaccgtttgtacccagagattgattcagctctgaaccctgaacacg

SEQ ID NO: 643 - DNA, 326 bp, Glycine max
  Clone ID: LIB3028-048-Q1-B1-A7
ctcaaaacctaaggctgaatctgaattcagtgtgcagaagctggttgacatgttcacaaagttgaatcctttggcgaaggagtttttcccttcatcatattctcccaatcatgataatcgctttcagggctttaatcagctctcaccaacccactttctggtcagcactaagccctctgctgatgagaatttcccgaacaatcgaaggagaagaaatagttttaaccaaggaaggagaaaggtgagtggaagatcactaaaggctcagagagaagatagcattagaagaacagtatatgtttctgagattgatcagcatgttactg

SEQ ID NO: 644 - DNA, 360 bp, Glycine max
  Clone ID: LIB3028-048-Q1-B1-A8
cttggttcacaaaattgtcaaaggcgtttctgtttctgcaattaatccttgactccggggaaagggaataaggataaaatggcgaagatatcatttgttttggtatttgcatttgtgttgttggctctgccattatgttcagttttgggccaagaagattggaaggatctcctggaccaaggagggttctctcaagattctttgaaaaaggcccagatggcttttggtgctgcttctgcccaagcagctgtcaatgattattttggaggtgacgactctcctcaggaagccgatgatggagaagcttcatccttggctgactttttagacgctgacgaaataacaaacaacaacccccat

SEQ ID NO: 645 - DNA, 383 bp, Glycine max
  Clone ID: LIB3028-048-Q1-B1-A9
cacgaatcacactctccacagtgcgattcattcaccaatggatcgcaacggcgttctctctctcgcattcatctgcattgtagtcgccggcgtcggaggacagtctcccgccgcagcgccgtcaaacactccggcaactcccgccgccgccactcccgcccaagcaccttccacagtaccgaaatcaccagctcccgttgcttctcccaaatcatctccaccagctgcaacccctgcatctactccggcggcatctcccaccaccacccccgccgcgcctgctccggtgaccaagccacctgcagcctctcctcctccggcgactcctccaccggcaactcctcctccggcgccggttcccgtgagctctccccccgctcccg

SEQ ID NO: 646 - DNA, 383 bp, Glycine max
  Clone ID: LIB3028-048-Q1-B1-B10
ctcgagccgattcggctcgaggaacgacaattcccacgggcatttatgctccccctaaccgtgatcacattgctctggcgttggcaatggcttaccaagaggtcaccaatcaccataaacagcgccctcctatcaacgatctcgggccaaatgataagcttcctagctgattcacttactgctacttaccctctcagggttttgggcttgggtccttaagcaacttgttagaacagcttcagcatgcatattgcatatatggatgtaatcattttcacatggagttaaaaagaggtagaggagatcgagttgtaggaaataaactacttttgcaaataataacataccacattaatcttcaaatctattcttatatcacaccc

SEQ ID NO: 647 - DNA, 381 bp, Glycine max
  Clone ID: LIB3028-048-Q1-B1-B11
gacagcttgtggaagacttagtgattaatcgctctcacgagcttctcttcacttgctcacccactcttctcttgaacggtttagctaccggtgccaaaggcatggtaagtcttgatcgatctcgcacttctttttcgtctcaggtttttcactcacttggaactcacagaacaatcactctttgtcactcttcctcgtctgggattgttcaacttgggaatgtggcgcatgaatcccaaaccgggtctgaaattttcagatctcttacttttacaacccttgtcgcgaaccaagaccaagcacagacacatccttccatcaacgttaactccgtcaaaatcaacggcacataggtttctttcgacacccccttgggtgggg

SEQ ID NO: 648 - DNA, 362 bp, Glycine max
  Clone ID: LIB3028-048-Q1-B1-B12
agatgaaagattcaacagaaacagatgctatcagcggttccctgaacctcctgagtactcttctcgactcggagctcccgagcgtgagaaacttcaaaggaaaatggtcactcgcccgagtcaaactcacccaactccaaacccacctcaccgatttctccgccgagttcccaaacgcctccacatcgaaccccctctccctccacctcctccactcaatctcccaaaccctcaacgacgccgtttcgctctccaaaacatgccaacccgaaaccctcccaaacggaaaactcaaaacccaaagcgacctggattccctcctcgccaccctcgaccgccacgtcagcgactgcgacatcctc

SEQ ID NO: 649 - DNA, 363 bp, Glycine max
  Clone ID: LIB3028-048-Q1-B1-B2
cttcatgctggtttagatccagcaacttcatctagtgagttctgttgcacgacagctggtattatgcactgtattttacacctcaccaacaatttttaaattgattgatcagagaagctagttgaagaaggaagaacattcgatgcagttatggccttggacgtgattgagcacgtggcagatcctgctgagttctgcaaatctctgtcagcaggaagagttccagatggagccactgtgatatccacaatcaatccattcatgagagcctacacaactgccattgttgctgcagaatacattctccgctggcttccgagaagcacacatcaatgggccagttttctcactccagaggaactc

SEQ ID NO: 650 - DNA, 378 bp, Glycine max
  Clone ID: LIB3028-048-Q1-B1-B3
tactctccccacaagtatcactgatgcttgccctgctccaaaggaaactaaatgctcttatgagcatgtcaaagattgtgtttcaagtcattcctctactgacttggatcaacgccggtttgacacatcatcgtaccagcaacgtgcggaggcattggaggggttgctggagttcagtgctaggctcctacaacaacagaggtttgatgagcttggggtgttgctaaagccattcgggcttgagaaggtttctccaagagaaacagctatttggttgaccaagagctttaaacaaactgcagtctaaggttttctttttcatgcatgcatatgattatttgcaaactgatagtgtacataacgttgtacatttgacga

SEQ ID NO: 651 - DNA, 286 bp, Glycine max
  Clone ID: LIB3028-048-Q1-B1-B4
gataactagaaacagtgtgatgaaaatgaaggtccttgttttcttcgttgctacaattttggtagcatggcaatgccatgcgtacgatatgttccctctccgaatgaacactggctatggtgcccgtactccggaggtgaaatgcgcaagttggaggcttgctgtggaagcacacaacatctttggctttgagaccattcctgaagagtgcgttaaagcaacaaaggaatacatccatggcgaacaatatagatcagactccagaacagttaaccaacaggcttac

SEQ ID NO: 652 - DNA, 398 bp, Glycine max
  unsure at all n locations
  Clone ID: LIB3028-048-Q1-B1-B5
gtctgatgaagcaagagcaatgtacaacggtggacaggctggtttgacgtattggagtcctaatgtgaacattttccgtgacccacggtggggccgtggccaagagactcccggcgaggacccgacattggccgcagaatacgccgccagctatgtcaaaggactccaaggcgatggtgccggaaatcgcctcaaggttgctgcttgttggtaacactacactgcctatgatcttgataattggaatggtgtggacaggtttcatttcaacgccaaggtgagtaaacaggatttggaggacacttatgatggtacatttanagcgtgcgtgttggaagggcaagtggcaagtgtgatgtgctcctacaatcaggtgaatggcaggcccacgtttgctg

SEQ ID NO: 653 - DNA, 339 bp, Glycine max
  Clone ID: LIB3028-048-Q1-B1-B6
gggtcacataaacccagcagtgacatttgggctcttcttggctcgcaaggtgtctttgattagagcaataatgtacatggtggctcagtgcttgggagccatatgtggagttgggttggttaaggccttccaaaaggcttactacaacaggtatggtggtggggccaatgagctcagtgaggggtacagcacgggtgttggattgggtgctgagatcattggaacctttgttttggtctacactgtgttctctgcaactgaccccaagaggaatgctagagattctcatgtgccggttttggctccacttccaattggctttgctgtgttcatgggtca

SEQ ID NO: 654 - DNA, 334 bp, Glycine max
  Clone ID: LIB3028-048-Q1-B1-B7
ccaaatcatattaagccatggccacctccaacttctcaattgttctctctctctccctagccttctttctagtgctactcaccaaggcaaactcaaccaacaccgtttctttcaccgtcagcaagttttccccacgccaacaaaaccttatcttccaaggagatgctgctatctcaccctccggggtgttacgactcaccaaggttgacagcaacgacgtgccaacgacgggatccctaggacgtgccctttatgctgccccaatccagatttgggacagtgaaacaggcaaggtagctagctgggctacatcgtttaaattcaaagttttctc

SEQ ID NO: 655 - DNA, 359 bp, Glycine max
  Clone ID: LIB3028-048-Q1-B1-B8
gtttgggtggcttttttcattgttcagattgttaaggaatacaccaagccctgttccatccagttctggcttcttaattttttgcaggttcctgtcgcagtctctgttacactttttgaagccataggcttatacaaaggaactagagtgattgcatcaaagggaaaggaagtcaccaattggaagattcatcagatttgtctctactgttccactggaataatggctggtatggttggtggactgcttggtctaggaggtggtttcattttggggccattgtttctagaattgggaattcctcctcaggtagcaagtgccacatcaacttttgccatggttttttcatcctcaatgtc

SEQ ID NO: 656 - DNA, 297 bp, Glycine max
  Clone ID: LIB3028-048-Q1-B1-C1
aaaacactcataacacaaagcacagagcaaggctcatccttgagttaaaaaatggcagcagcttcttccatggctctctcatccccatccttggctggcaaggccgtgaagctgggcccatcagccccagaagtgggaagggtgagcatgaggaagagcgtcagcaagcaagtctcctcaggaagcccatggtacggcccagaccgagtcaagtacgtgggcccattctctggcgagcccccgtcctacctaaccggtgagttcccaggggactacggctgggacactgcggggctt

SEQ ID NO: 657 - DNA, 367 bp, Glycine max
  Clone ID: LIB3028-048-Q1-B1-A12
aaaaaatacaaaaacaactttgcaatttcgtaggagatgctcaggagcagcacgctaacacagagtgttacagtcacctgtgttcgtcacagtcacagacaatggttccaatcaattcccgtaaattatagattctttgacgctgctcggaactctctatcatcacccaactccgcgatcttcaaatggaaaagaaaggccaattataaccgtcatagttctggaatggggaccttcaccactcgcgcgttggcgcagccgcttcagaacgccgacgaactcatcgactccgtcgagacatttatcttcgattgtgacggagttatatggaaatgtgataaattaatagacggagtgcctgaaacgc

SEQ ID NO: 658 - DNA, 356 bp, Glycine max
  Clone ID: LIB3028-048-Q1-B1-C10
agagataccacttctcttgccaattcacagctgatctatttgccatgaaccacacagatttcattatcaccagtaccttccaggagattgctggaagcaaggacactgttggacagtatgagtctcaaacagcctttaaccctcctggaacccaacgtggtgtgcaaggcattgatgtctttgatccaaaattcaacattgtctcccctggagctgatcaaaccatttacttcccccccaacgaaactagccgtagggtggactccttccaacccgaaatcgaagaacttctttacagctctgtggagaatgaagaacacatatgcgtgctgaaggaccgcagcaagccgattatc

SEQ ID NO: 659 - DNA, 360 bp, Glycine max
  Clone ID: LIB3028-047-Q1-B1-G6
accaaacgaaccgtagataacgccgcgtttggttgttaagttgttccgtttcagccatggtggagaacaatctcttcgaggatatctttagggtcgaaaaattaaaccccgatgacaaaaaattattcgataaagtcactcgcattgaagcaagaagtgaaaagtttgacatgtttatgcacctggacattaattctgaggtatatccattaaaggtgggtcagaagtttgctcttgtgcttgtttcatcgcttaatcctgatggaacaccagacactggctattatacccagattagtcgacaatcactggccaacaattttgaatatgtcatgtatgggaagctctacaggataacag

SEQ ID NO: 660 - DNA, 379 bp, Glycine max
  Clone ID: LIB3028-047-Q1-B1-G7
ttgagtttgggcatgtgtgagctgtggctttgcagggaagaagagtgtcagtagaaaataaatgtcctcttcccagggacactctctatttcacagatctatatctaagtgtcggtgatcccctttctccttccttctctgagagacaatgacaatgacgtgggcgcgattcgattcgtggaagcagcaatactacaccacaagcggcgtggtggtaggttacgcagtatgctccagcctcctggccatcatcaacaaatacgccatcaccaaattcaactacccaggcctcttaaccgcgctccagtacctcacctccgcactcggcgtctacgtctttgggaaattaaggtttctccaccacgaccccttcaccctc

SEQ ID NO: 661 - DNA, 377 bp, Glycine max
  Clone ID: LIB3028-047-Q1-B1-G8
ctcatcaacgcagatggcgttatcgagcgatcatttttgcccggcaaatactctctggagatgtcttcggcagtttacaagagttgggttttcactgatcaagcccttcctgcagatcttatcaagagaggaatggcaattgaggatccctgtgccccccacggccttcgccttgtgatagaggactacccttatgctgttgatggactagaaatatgggatgctattcagacatgggttaagaactatgtctccttgtattacccaacagatgatgcaattaagaaagactctgagctccaagcttggtggaaggaagctgttgagacgggtcacggtgacttgaaagacaagccatggtggcctaagttgaacac

SEQ ID NO: 662 - DNA, 386 bp, Glycine max
  Clone ID: LIB3028-047-Q1-B1-G9
cgcaaaataacatttccctcttttgtctctctcattttcaactctcaacaatgccgccggcgaagcgcaaagcggagggaactgctgcagctgccgcttcttctgcggcggctccgatgagagtcactcgtgctgcggcgaagcgcgccgccgcgagctccgaccctccgccggtgccggtggttaagaaggcggcgaagaaaggcaaagttgctgctgctgctaagaagcagaaaaggaacgaaaaggaaaatgaagatgttccggttgagagcgagaacaaagcgggagaaaaagaagaaggaggagacgcctccgagaagaacgttctagacgcttcccaacaagacatcgtcgtcgaacactgcaagcaatgtaactccttc

SEQ ID NO: 663 - DNA, 341 bp, Glycine max
  Clone ID: LIB3028-047-Q1-B1-H1
ctcgagccgaatcggctcgagaaaacccaaataaaatctaaaaccctacccatcgttagggttctacctcatgtggcgcggagccagagtcgtttccggctacctccgccgtttctcgacggcggtgcggcggcgcatggaagacgaaggtgactggctctactcctccgagtggtggggctccgactccgacgatggtcactctgttctccgattaacttccggcaagggaaacggcgtcgttgccgtcgttgcatatccctcctccagacccagcaaaatgcattggtcacgaatggaaagatggctgcagcaaatgtgtgaggaggtgcatcctggat

SEQ ID NO: 664 - DNA, 314 bp, Glycine max
  unsure at all n locations
  Clone ID: LIB3028-047-Q1-B1-H10
gcaatttanaacaggaatcccacgccacttgcaattccatctcggtgtttgattctctgcttcgtcctttcattcctcttccgaatcgttaatcgttcgatcgatccatctcccgcttccaatgacaacccctaccgacaacaataacaaccctgcacaggaaaaccctaacaaaaccctagaacccaccgaaccagattcaatccctgccaccgaagacgacgccgccgccgacactaaagactccgacgccaaaaattccccgccgcccgattctggaaacgacgctccgctctccgatattcagaagaaaa

SEQ ID NO: 665 - DNA, 310 bp, Glycine max
  Clone ID: LIB3028-047-Q1-B1-H11
caatttcaacaacagcctcagcctcaagggcagagttttggagcttcggctccggctaacggtggcggttcgggtcagccgaagcacatggttagagccatgagaggacaagccacggacccacacagcatcgccgaaaggttacggagggagagaatcgcagagcgaatgaaggccctacaagaactagttcctaatgccaacaagactgacaaggcctccatgctggatgagatcatcgagtatgtgaagttcctacagctccaagtcaaggttttaagcatgagcatattgggcggtgcagcagctg

SEQ ID NO: 666 - DNA, 295 bp, Glycine max
  Clone ID: LIB3028-047-Q1-B1-H12
gtgagtgtttgtgtttgttgggttgtgccggggagatggaagtgtctttgctggaggaagtagagaatattctaaggtacagatttcgaaacaagaagcttttagaagaagccttgactcactcctccttccttgacggtgtctcctacgagcgtctcgagttcgtgggagaccccgttctgagtctcgccatcagtaactacttgtttctcgcgtaccctgatctagattccgtgcagctctccggcctccgcgccggcaacgtcagcaccgagaagctcgcccgtgtcgctgt

SEQ ID NO: 667 - DNA, 282 bp, Glycine max
  unsure at all n locations
  Clone ID: LIB3028-047-Q1-B1-H2
cccgtggcttcaagaagagaatctcaatggaggcccaggagctgaagcgcgtgttccagatgttcgaccgcaacggcgacgggagaataacgaagaaggagctgaacgactcgctggagaacctgtgcatcttcatctctgacaaggacctgagccaaatgatccagaggatcgacgtcaacggcgacggttgcgtggacatggacgagtttggggagctgtatcagaccataatggacgagcgcgacaatgaggaggacatganggaagccttcaacgtct

SEQ ID NO: 668 - DNA, 348 bp, Glycine max
  Clone ID: LIB3028-047-Q1-B1-H3
agaaaacattcttgtggggtacgtactctttggaaatgtctgctgttatttacaaggactgggttttcactgatcaagcattgcctaatgatcttgtcaagagaggagttgcggttaaagatccatctgctccccatggagttcggcttttgattgaggactatccttatgcttctgatgggctagagatatgggatgccatcaagtcctgggtgcatgaatatgtctcattctactacaagtcagatgcagcaattcatcaagataccgagctccaagcttggtggaaagaacttgtccaactgggtcatggtgatttgaaagataatccatggtggcaacagatgc

SEQ ID NO: 669 - DNA, 381 bp, Glycine max
  Clone ID: LIB3028-047-Q1-B1-H5
gacgtgtcctaactctgaaactctactattctttctcctccgcagaaccttaacaaccaaaaccaagcattacagttcccaatttcacagaaacaccagaattgatcaaaacacataacaaaaaaaaagtgaaaatggcgagcgctgtagagaaagagggtggcgcgagagaggaaactttctctttggagcttcctgctccacctggttggaagaagcagttcatcccaaagaaagctggcacccccaagaaaaatgagattgtgttcactgcagcaacaggagatgagatccataacaggaagcagctggaaaaatatttgaaagcacaccctggtggtccagctgtatcagaatttgactggggcactggtgagaccc

SEQ ID NO: 670 - DNA, 376 bp, Glycine max
  Clone ID: LIB3028-047-Q1-B1-H6
ctcgagccgcaaagagcatggtggtatcctgagatttattcaagtttcttgtttaggtgcatctccttcatctccatctaggatgctcagaactaaatcagctgctgaggaaatgattttaagggaactacctgaggccacaatcttgaaacctgctgtaatgattggtacagaggatcggattttgaatccatgggctcattttgctaaaaagtatggctttcttccgttgtttggagatgggagcacaaagatccaacctgtttatgttattgatgttgctgctgcactcacttcactcttgaaggatgatggcactagcatgggaaaaatttatgaactgggtggtccagagatctttactgtgcatgaattg

SEQ ID NO: 671 - DNA, 373 bp, Glycine max
  Clone ID: LIB3028-047-Q1-B1-H7
atcctgtctaacttggaaccttgcctgtgagaacaacataacaagtaagacaggatataactggagacaggagacaccattacaaatgtacatgggatgctattattaagatgatccgctatgagggggttaatgggttttacaaaggcatgggcacaaaaatcgtacaaagtgtgctggctgctgctgttttgttcatgatgaaggaagaattagttaggggggttcgtttcttgcttgccaaggatgctgtaaagccaaagaatctgtgaatggaggccactagcttgatcaagatttcatgtaccatcttcagttagcaaattagttcaaatggtatgggaattatagtgaatcaaacaacatattgaaa

SEQ ID NO: 672 - DNA, 379 bp, Glycine max
  Clone ID: LIB3028-047-Q1-B1-H8
caagaagggttcttcaattttgtagtttttttctttgtggtggccgggttaaacttcaattaataattatttggagtccaaaccttggcagctggcatcaataccggccaccaacaaagaaaaaaactaaacaatattatggcgaactgtcagcaatattattttcttttgctttctctggcaatttttattcctaccctgaatgccaattccttagagaaagatgagtattggcagagccatgtctatgagtttgatagttattggcaggaaagggcaaaagccgctaaagtggacagtcaggcagcttattttgaagacccatattcagtctccagcaacttcacttccagtgttagcgaactcacaattggcaaga

SEQ ID NO: 673 - DNA, 199 bp, Glycine max
  Clone ID: LIB3028-048-Q1-B1-A1
aaaacaaggtgccatctttgtttgttatacatgaccatgggcatgcccctgtttctgatgttccttcttctgcacatagcttgggtggcatcgtcggatctccgacctgggttttactcaaaaacatgtcgagaagcgggggtcatgggccgagatgtgatgaagaaaggccgtaggagggaacccagaagtgttgcct

SEQ ID NO: 674 - DNA, 343 bp, Glycine max
  Clone ID: LIB3028-048-Q1-B1-A10
gctaaagggagggccaagccattcaatccaaattcatgctttgttccaaatggatacccatctgcgtattattatggaggttatgatgggcaaggtgattggaatgcttattccagatatatgaaccttgatggagggatggctcaaggtgtttatggggatagctgctcttacatgtaccatcaaggttatggttatacaccatatggaacatatgcaccgcccaattcgtcttctccaatgattcaacaagatggccagcattatgggctgcaacagtaccacttgccagcttatgcttctttgtcaggctatcaggggtcaagaaggcaccatggtacac

SEQ ID NO: 675 - DNA, 379 bp, Glycine max
  Clone ID: LIB3028-047-Q1-B1-G5
gagaaacaaagttagaagtaaagaagatcatggcttctctagcaaccttggctgctgttcaaccagctacgatcaatggccttgctggaagttccctctctggaactaagctctctttcaagccctctcgccacagtgtcaaatccaagaactttaggagtggtgccgtggtagcaaagtatggtgacaagagtgtgtactttgatttggaggatctgggcaacactacagggcagtgggacttgtatggctcagatgcaccttcaccctacaaccctcttcagagcaagttcttcgagacatttgctgctccattcacaaagaggggattgttactcaagtttctgatattgggaggtggttccacccttgcatactt

SEQ ID NO: 676 - DNA, 377 bp, Glycine max
  Clone ID: LIB3028-048-Q1-B1-A11
gcaaaaagaaagaatcccaggcgaggagaaagatggaggggaaggagcaggatgtgtcgttgggagcgaacaagttccccgagagacagccgattgggacggcggcgcagagccaagacgacggcaaggactaccaggagccggcgccggcgccgctggttgacccgacggagtttacgtcatggtcgttttacagagcacggatagcagagtttgtggccacttttctgtttctctacatcaccgtcttaaccgttatgggagtcgccggggctaagtcgaagtgtagtaccgttgggattcaaggaatcgcttgggccttcggtggcatgatcttcgccctcgtttactgcaccgctggcatctcagggggacac

SEQ ID NO: 677 - DNA, 279 bp, Glycine max
  Clone ID: LIB3028-047-Q1-B1-E9
gtgcacaccacactatcgaagatgaagtttgttcgatgcaagctaaatgcctatggcattggttgtctttcgggaccacacatcataactgttattgtaagttcacatgtactgtggaattagtgtgaaagcagcgtctacatgtctaagtacacggttctgacttgcacagctactattattgaggtattcagtaacacctggcagtgtcatggatgcatttttggctaattaattacccaaatcctgcaccaggtatagtatcctaattgccatggt

SEQ ID NO: 678 - DNA, 383 bp, Glycine max
  unsure at all n locations
  Clone ID: LIB3028-047-Q1-B1-F1
atggcactgatgtggatgaggatgaagatgatgatgatgatgaagatgatgatgatgaggaggatgaggatgaagatgcatttgatgtccatgctcatgctagtgctggagaacatgataatcccactattgaatttgacccagatgtattttcaagtgatgaagcatatgcaagagcattacaagaagctgaagagagggaaatggcagctagactattggcttttgctgggataaatgatcgggaagaagaggacatanaggagcatggtgctaattctcaagatgcttgggaggatgttgatccagatgaactttcatatgaggaattactggccttgggtgaagcagttggaactganagcagaggtctttcaactgat

SEQ ID NO: 679 - DNA, 358 bp, Glycine max
  Clone ID: LIB3028-047-Q1-B1-F11
gttggtacgaaaaatgtcgaagctgatcttcgtgttcctttcgcttattcctcttctctgcacctccttctccccagagagaccctcagatcgacgcgtcctcgttttgctcgatgacttcgccatcaaatcctctcattctctcttcttcaactccctcaaatctcgcggcttcgatctccaattccacctcgcagacgacccccaaattgcgctccagagatacggccagtacctctacgacgccctaattctcttttcccccaccattgaacgttttggaggatccattgacgcggctgcaattttggattttgttgattcgggtcatgatttgatcgttgctgctgatagcaat

SEQ ID NO: 680 - DNA, 377 bp, Glycine max
  unsure at all n locations
  Clone ID: LIB3028-047-Q1-B1-F12
ggacaaaggtggagtatgaactgcgagtcatatataattccaggcaccagcttctttaaggggaaacaattgctgttgccagactcaagtctcccaacaattgaggtctacattgcgggctccttcttgagtactccaattatcttgacaaaaaccttgcagctttctcagaaaaagcatgcaaagaagggggtgttggatgcaattccagagcatgaggccagtgaaaatgggaaagatacttcttcaaccctttctttgcangccccagattacctttacgacaaacatgaagatgaagattataacagcgtctacccaggaacagcatatgctgatggagaagatggagaactctcatggttcaatgctggtgt

SEQ ID NO: 681 - DNA, 266 bp, Glycine max
  unsure at all n locations
  Clone ID: LIB3028-047-Q1-B1-F2
gaaaaaaaggataaattcatctggtcganaaaaatgaagttggaaatggcgagagggaaagtttgtctaagggtctcagcaatactggttttggtattaacagcatgtttggttgctttagatacccaaaccaaggttgtgttcgtatctattgagaagaaggctacatacaaagacttgaacgctctcaagatcttggtgtatgttacatgtgcggctgctggttataatctgcttctattgtgcaaacactccatttggtctag

SEQ ID NO: 682 - DNA, 221 bp, Glycine max
  Clone ID: LIB3028-047-Q1-B1-F3
cttttctctctctagaattctcagatttgcggggcgagatgatgcagcagccaggacccggcatggcacctcccaccatgggccagcagccgcagcaacagtaccagcagcagcctccgccgcagcagcaacaaccctacgtcatgatgccgccgcagcatcaggcgccgcagcctatgtgggccccatccgcccagcctccgctgccgcaacagcctgct

SEQ ID NO: 683 - DNA, 379 bp, Glycine max
  Clone ID: LIB3028-047-Q1-B1-F4
ggattctattaattcagcatcatcaattactcaaaccttgagtagagaagtgcttgagggccagagaaagctagtgacgctcgcagctacaagaacaaactctggcacattaaatactctgcctgtccagctaaacaatggtcctttacttcatgaaaaggtcgaggtgcctctagatcccacacaagagctagctaggttgatttctgaacggaaatatgaggaggctttcattggagctctacatagaagtgatgtatccattgtatcttggttatgtactcaggttgatttacacggacttttgtcaatggttcctcttcctttaagccaaggtgtactgctttcacttctgcagcaattggcctgtgatattaac

SEQ ID NO: 684 - DNA, 366 bp, Glycine max
  Clone ID: LIB3028-047-Q1-B1-F5
ctcgctcacaacgccggtggcaaagagaggaccgaagagaactggaagtggctgttcaaggaaaccggtttcgcgcgttacaacatcatcaagatcaacgctctcccttccatcattgaggcgtttccaatctgaagaagatgccactaccacaactgcatgtggtttttatgttgcatgtgttgttgttattattaacagctatatgatcttcgttttaattttgtggttttccttcctgcccttgttatgtttgtgcattaaataaaagtaagaaatgccccaccactaagtaatgctatatggattatgtatgtgttccatatatgtcaagtgagtggtgtgtggttgtgaagaatctattgc

SEQ ID NO: 685 - DNA, 376 bp, Glycine max
  Clone ID: LIB3028-047-Q1-B1-F6
aaggcagcagtgcgaagagaaagaaagagaagaagcgcttatcgaactcggacggaagcactgagttaactcagagcgagtgaaagtgttgctgcgtgatgtctggtggtatcgcccgtggacgcctcaccgaggagcgcaagtcgtggcggaagaaccatccccatggttttgttgcgaagccggagacgctgcccgatggaaccgtgaacttgatggtgtggcattgcactattcccgggaagactgggactgattgggagggtggctacttcccgcttacgctgcactttagtgaagactacccaagcaagcctccaaagtgtaaattcccacaaggtttcttctcacctaaaggtttatccctctgggactg

SEQ ID NO: 686 - DNA, 289 bp, Glycine max
  Clone ID: LIB3028-047-Q1-B1-F7
attttgctagcgcaatcatcttgttccccaattaattaggttttttcagagtatcacattttgcatcgattcctctacgcacgccaccgtcaatcatctcagcacaacgttgcgattcggacaatcgcattacggtcggacctgtaccacagatagtttcacaattcaagtctttctgtgtggcatatcaaatttcattgggactacccagagtgcaaaacagggcatacttagtgactccatttggctaaagtgacagatctccttagctacaccgtttccagacagt

SEQ ID NO: 687 - DNA, 377 bp, Glycine max
  Clone ID: LIB3028-047-Q1-B1-F8
gctgcaagagtcttccttgaaactactaccattgccccctccaactaccacacactgttcttctaaaaagcactctcatgaagaaacaaggattaggaaaaagaattcaatacaaagtgttttccaaagggatcctttctttgctgcacttgttgaatgctcaaaggatgataatgaagaaattacaagtagaaatttgtggaatggagctaaggtgccaataaggagtattagtgatcgttttgggtttattagcctttatgcctcttgcaagagaacttgtgctgtttctgaatctttagtctaccttccaagctcaagaagaagcacctgtgagcatgttagtcccaggtccctctaagcttgtgatgatgcat

SEQ ID NO: 688 - DNA, 334 bp, Glycine max
  Clone ID: LIB3028-047-Q1-B1-F9
gtgatttcagtgagtgatcggtgttcacttgatctcatcataatcgtcagcgtcaattgaagaagatgccgatcagaaacatcgccgtcggaaggcctgaagaggcgactcaccccgacacgttgaaggcggctttggctgagttcatctcaaccttcatcttcgtgttcgccggctcaggctccggcatcgcctacaacaagctcaccgacaacggcgctgccacccctgccggcctcatctccgcctccatcgcccatgcattcgccctcttcgtcgccgtctccgtcggcgccaacatctccgggcgggcacgtcaaccccgccgtcacct

SEQ ID NO: 689 - DNA, 371 bp, Glycine max
  Clone ID: LIB3028-047-Q1-B1-G1
ggctaattgccaaggcatatgttgttgtcaatgactcctgctatcatcaactcatgagccactggttaaatactcatgctgtgattgaaccatttgtcatatcaacaaacaggcatcttagtgtgctccaccctatttataaacttttgttgcctcactatcgtgacaccatgaacatcaatggactcgcaagacaatcactcatcaatgcaggtggcattattgagcaatcatttctgcctgggccatttgctgtggagatgtcttcggcagtttacaaggggtgggttttcactgatcaagcccttcctgcggatcttatcaagagaggaatggcagtggaggattcatcctctccctatggccttcgc

SEQ ID NO: 690 - DNA, 382 bp, Glycine max
  unsure at all n locations
  Clone ID: LIB3028-047-Q1-B1-G11
ggcgcaatcggcttctgcttcaaggaaggagcttgttattctctatcaacaagtaaaatgtcaggtgaagagggtgtcattgcagttgagccagctgctgctgctgctgccatcccaggcgagccaatggatatcatgactgccttacaacttgtgctcagaaaatctctggcttatggtggtttgtcgcgtggccttcatgaaggtgcaaaagtgattgagaagcatgctgcacaactctgtgttcttgcagaagactgtgaccagcctgactatgttaaactggttaaggccctttgtgcagagcacaatgttagcctgctgacagttccgagtgcanagacccttggagaatgggctggtttgtgcaagattgattccg

SEQ ID NO: 691 - DNA, 371 bp, Glycine max
  Clone ID: LIB3028-047-Q1-B1-G12
gtccagtatttgaatgaaatcaaggattctgtggttgctggattccagtgggcatcaaaagaaggtgctttggctgaagaaaacatgagagccatctgctttgaagtatgtgatgttgtgctgcacgctgatgctatccacagaggaggtggtcaaatcattcctactgccaggagagtcttctatgcttcccagattactgccaaacccaggcttcttgagcctgtctacctggttgaaatacaggctcctgaacaagctcttggtggaatctacagtgttcttaaccagaagcgtggacacgtgttcgaggaaatgcagaggccaaggtacccactatacaacatcaaaggcaatactccctgtcatcg

SEQ ID NO: 692 - DNA, 379 bp, Glycine max
  Clone ID: LIB3028-047-Q1-B1-G3
ggagcagctgatcagcggcaaggaagacgccgccaacaacttcgcgcgtggccactacaccatcgggaaggagatcgtcgatctctgcctcgacaggatccgaaagctcgccgacaactgcaccggtctccagggtttcctcgtcttcaacgccgtcggtggcggcaccggttctggcttgggctcgcttctcttggagcgtctctccgttgactatggaaaaaagtcaaagctcggtttcaccgtttatccatcccctcaagtttcgacctcggtcctggaaccctacaacagcgtcctttcaacgcattctctcctcgaacacaccgatgttgctgtgcttctcgacaacgaggcaatctacgacatttgcaggaga

SEQ ID NO: 693 - DNA, 376 bp, Glycine max
  Clone ID: LIB3028-047-Q1-B1-E8
gtctacaactgagttattctttcatcttttcccgagaccatagtagctttatctttattttcccctgaaaattgaagggcatgcgattctttctatttaactcctgtttgaatgcatctttgtctgtagcaaacgtttccttcatgttacatccaaaattgagagcaaaaccttcttttagccttttgaagaatatacttgttatcaatggtagttgttcgttattggggaaaaactatcctcgtattgtcatttgcatggagaaattgattaggatggatataaggaaaattgatttaagttgttagatgaaaatggttattgtgaaaataagaacaatataaattactagatgttatttgaatataaaaagatg

SEQ ID NO: 694 - DNA, 381 bp, Glycine max
  Clone ID: LIB3028-047-Q1-B1-G4
cagaaacaccagaggccgctaaaaggttctacttctacaagccatggacatcaaaatagaaagtgatgattctcagaatgaggagaatgaagaaaggctaccactcctgagaaatagtgaggtgccagaagcagagaggaatctgattcagaaagccattagccagacatttcagagcaccgcacatttgggcaaccttttaccaactggcacagtccttgctttccaacttctgtccccaatcttcacaaatgttggcaactgtgactctgtcagcaaggccatgactgctgcacttgtatctctctgtggtgcctcatgcttcatgtcatgtttaactgatagcttccgagacagaaaagggagcatctgttatgggtt

SEQ ID NO: 695 - DNA, 252 bp, Glycine max
  Clone ID: LIB3028-047-Q1-B1-D12
aaaactggcagaagggaattgcagagttctacgacgagtcgtctggcatatgggagaacatttggggcgatcacatgcaccacggcttttatgacccggattccaccgtttctgtttctgatcatcgcgctgctcagatccgaatgatccaagaatctcttcgttttgcctctttgctttctgagaacccttctaaatggcccaagagtatagttgatgttgggtgtggcataaggggcagctccagatacc

SEQ ID NO: 696 - DNA, 377 bp, Glycine max
  unsure at all n locations
  Clone ID: LIB3028-047-Q1-B1-D2
ctctcctctatccttcgtgcccacagtcaataatgtctcttccaactccatcgctcccccttctccgttgcatccattttcacgattccaatccattaaaaatagaaagccaaaaccccatcatattcctagaatcacatgcagtggaaaccaaaacaatccaacaccaaaccctaattcccagggagaacctccacatattgtaggacataggaggaacgttctacttggcctaagagggctttgtggtgctgttactcttaacaacaacaacccttttgcctttgcagctccaatatctcctcctgacctaaacacgtgcggtccaacagacctacccgcaggtgtaaaacccaccaattgttgcnccccatctt

SEQ ID NO: 697 - DNA, 375 bp, Glycine max
  unsure at all n locations
  Clone ID: LIB3028-047-Q1-B1-D3
ccccaaaaccctaggtagagagctcttcctcactctcattcgcaatggccgcagcagcacgtcctctcgtcaccgtgcaggccctcgacagtgacatggccaccgacgcctccgccaccgtccctatccctgacgtcatgaagtcctccatccgcccggacatcgtcaacttcgtacactccaacatctccaagaacagccgacaaccctatgcagtcagccgccgcgctggccaccagacttccgccgagtcctgnggaaccggtcgtgccgtctcccgtatcccccgtgttcccggcggcggaacccatcgcgccggccacggagccttcggaaacatgtgtcgtggaggacgcatgtttgccccgaccaaga

SEQ ID NO: 698 - DNA, 341 bp, Glycine max
  Clone ID: LIB3028-047-Q1-B1-D4
attgaacgtttcatggaggaggcacctgaaagactgaaaaggaaagatttagatatgtttggaaggcgatggttcaaacctcaagaggcgtccaatttgagagtgaaaatccttaaattgcttttagaaaaattacagaattcaataacggataattgtaactcggaatcttctccttcgtcatctgctggccctgcaactgattgtgttgagactgccagggattctgttactggccctgtgactgattgtgtagagaccgcccaggattctgtgacgtaacatggcagcatgaattgcaattctcatttccttgaacaaacaatctgttgatattcata

SEQ ID NO: 699 - DNA, 382 bp, Glycine max
  Clone ID: LIB3028-047-Q1-B1-D5
tgtcaaacgaaaagagaagtgtgaggtattaggcgcacagttgctttttgggtatgcagcgctataaggctacaagtgaagttgtgctgctaaaagacaggggaaggggagcccacaaattgtaacatctaaatggttcttctttctgcatttgaaaatagaaatgaaggagaaggacggactttcgggtatagaacccctgcaactggcaagtcatgtgatagaaggctcaaattgaatcagtaaaattggagtaacgcacgccactgaatgcatgggtgttattggttcctgtataaaaacattcgtttttaagttaaattattgtacagattacctattaacactgagcaggcttgatgaaaaagcatttagaataatt

SEQ ID NO: 700 - DNA, 379 bp, Glycine max
  Clone ID: LIB3028-047-Q1-B1-D6
atcacacacacatactaagaagcaacaattcttctacaatggatctcctccttctggaaaagaccctcataggtctcttcctcgctgcggtggtcgccatcgccgtctccaccctccgcggccggaaattcaagctcccaccgggcccactccccgtcccaatcttcggcaactggctccaagtcggcgacgacctcaaccaccgcaacctcaccgatttggccaaaaaattcggtgacatcttcctcctccgcatggggcagcgcaacctcgtcgtggtttcttcacctgagctcgccaaagaggttctccacacgcagggcgtggagttcggctcccgcacccgcaacgtcgtcttcgacatcttcaccggaaaggg

SEQ ID NO: 701 - DNA, 376 bp, Glycine max
  Clone ID: LIB3028-047-Q1-B1-D7
aaatgtatttggtggagagcaaaggaggtgccataacatgcatgttcttggctcttttcttcttggggacatggcctgctcttttgactatgttagaaaggcgtggtcgtcttcctcagcatacctaccttgattactcaatcaccaatttcttgtctgctttactcattgcttttacacttggtgggataggcaagggcactcatgatcagccaaatttcttagttcaacttgctcaggataattggccctccgttctttttgcaatggggggtggtctgttccttagccttgggaatctgtcaagccaatatgcatttgcttttgttgggctatctgttactgaagtgatcacggcaagcataactgttgttat

SEQ ID NO: 702 - DNA, 379 bp, Glycine max
  Clone ID: LIB3028-047-Q1-B1-D8
cagaaacaaacccacccgggacaacctcctcctatcattacactaccgccatggtcgaaccaaagtcccgaaccgtgggcaacaccgagcgaagctggtgccaagccgtccgcggtggcaccggcatcgccgtcctcgccctcctaacctcaaaaccccccgatatccccaagctccaaacctccctccgcaccctccaaacctcccacccaatcctcagttcccgactccaaaccaacgcaaccacattctccttcctcacctccccaaccccctccatcaaaatcttaacactcacgctccctactaacctcaccgaccccctgacccagatcctcgaactcgagctcaaccgtaactcgtggcaagattctaccac

SEQ ID NO: 703 - DNA, 399 bp, Glycine max
  Clone ID: LIB3028-047-Q1-B1-D9
caaacctaacgcagcatcgctattctcttcattccatggctttgcccaaccagcaaaccgtggattaccctagtttcaaactcgttatcgtcggcgatggtggcacaggaaagacaacctttgtgaaaaggcatctcaccggagaattcgagaagaaatatgagccaaccatcggtgtggaggttcacccattggattttttcacaaactgtggaaagattcgattttactgctgggatactgctggacaggagaaatttggtggcctcagagatggatactatatccatggacaatgtgctattatcatgtttgatgttactgcccggctaacatacaaaaatgttcccacctggcaccgtgatctttgcagggtctgtgagaacatcccaattgttc

SEQ ID NO: 704 - DNA, 385 bp, Glycine max
  Clone ID: LIB3028-047-Q1-B1-E1
cgcgcagttgataaaaccataaccggaatggagcagaatctggtggactgggcaaaaccatatttgagcgataaacgaagactgttcaggattatggataccaagttggagggccagtacccacaaaagggggccttcacggctgccacacttgctctacaatgcctaaacagtgaggccaaggcaaggcctccaatgacagaggttttagcaactctggaacagatagaggcccccaagacagcaggcagaaactcgcattcagaacaccatagacttcagactcctgtgagaaagtctcctgcgcgaaaccggtcatcgttaaatctaactcctactgcgtttcctcctcccagctcaccggcaatcgcctcgtgtgcactaa

SEQ ID NO: 705 - DNA, 330 bp, Glycine max
  Clone ID: LIB3028-047-Q1-B1-E11
cacattttaaatgtagccactactaactttatcataccactcactcttacatcattgtccctaaatggcggaaaccctgatccaaatcggcgtggttgggtgcgccgacatagcccggaaggtctcccgcgccatcacgctcgcccccaacgccgccctctgcgccgtggcgagccgctctcacgacaaggcagccgcattcgccgccgccaacggcttccctctctcagccaaagtgtacggctcctacgagtctcttctggaggaccccgacgtggacgccgtctacatgccactccccaacaggctccatcttcactgggccgtgct

SEQ ID NO: 706 - DNA, 378 bp, Glycine max
  Clone ID: LIB3028-047-Q1-B1-E2
gcgcaatctgcttctgcttcaaggaaggagagcttgttactctctatcagcacgtaaaatgtcatgtgaagagggtgtcattgcagttgggccagctgctgctgctgctgcgatcacaggcgagccaatggggatcatgactgccttacaacttgtgctcagagaatctctggcttagggtggtttgtcgcgtggccttcatgagtgtgcaaaagtgattgagaagcatgctgcacaactctgtgttcatgcagaagaatgtgaccaacctgactattgttaactggttaaggccctttgtgcagagcacaatgttagcctgctgacagttccgagtgcaaagacccttggagaataggctggtttgtgcaatattga

SEQ ID NO: 707 - DNA, 365 bp, Glycine max
  Clone ID: LIB3028-047-Q1-B1-E4
caattggtggctctcaaattgtgaaccgcacatatacccaccctgcttcccacgccacatcgatctcacgttctctctctttcttttttcttgttgaaactgtgagtctatgttatttgtggcggagcatgaactcctccaccaacacctcgaattctcagtcaatggctgcagcagccagtgatgggtctgggaagaaggtaagaaaaccttagaccataaccaagtccagggagagttggactgaggaagagcacgacaagtttctcgaagctcttcaattatttgacagggactggaagaaaattgaagattttgtaggttcaaaaacagttattcagatttcaagccatgctcagaagtac

SEQ ID NO: 708 - DNA, 381 bp, Glycine max
  Clone ID: LIB3028-047-Q1-B1-E5
cgaattgtgaaagtaagcaaagatggctttcacggaatcgtctctcctccttccttcggtttcaggaaccaacaagaacaagaacaaggttccagaagacaaatggtatttagcctacattgtgtattttaccctgggtctcggttaccttctcccatggaacgctttcatcaccgccgttgattacttctcctttctctaccctgacgccagcgttgaccgcatcgtcgccgtggtttacatgatagtcgggctggtggggatctccctcataatcctctacagccacaagtctgacgcctatgtgaggatcaacgttggattggccctattcgtcgtttcgcttctcgtcgttcccctccttgatgccttttacataaa

SEQ ID NO: 709 - DNA, 330 bp, Glycine max
  Clone ID: LIB3028-047-Q1-B1-E6
caattataagcatgggtttgtggaacacaacgaatgcactgtcttgccgctttcacaagtttggtgatgaccaaaagaatctggtcttccaaagtgatgccacgtcttcttccaggggcatagaactcacaaagttagacggtggaggaaaaccattgggtggcattgtggggagagtgttatactcttctcaagtgcacctttgggaaagctctacagtggtcgcaggctttgaaaccgacttcaccttttccatctcatcagactctactactcaagttgatggccttgccttcttcattgccacatttgacacgataatccctccaa

SEQ ID NO: 710 - DNA, 373 bp, Glycine max
  Clone ID: LIB3028-047-Q1-B1-E7
gtggattcgaggttattgacaacattaaatcagccgtggagaaagtgtgtccaggagttgtttcctgcgcagatatctttgccatcgctgccagagactctgttcagattcttggaggccctacatggaatgttaaacttggaagaagagacgctagaactgctagccaatctgctgctaacaatggcatccctgcacccacttcaaaccttaaccaattcatctcaagatttaccgcccttggactttcaacaaaggacttggcccccttgtccggtggccaaacatttggcaagccaaggtgacaaactttaaaacccggatccacaacgagaccaacattgaaaccggaattgccagggctaaggaacaa

SEQ ID NO: 711 - DNA, 308 bp, Glycine max
  Clone ID: LIB3028-047-Q1-B1-D11
cccgattcaagaagaaccgcaagaagcgcggccacgtgagcgccggtcatggccgtatcggaaagcaccgtaagcaccccggcggccggggaaacgccggtggcatgcatcaccacaggatcctgttcgacaagtaccatccgggcttcttcggtaaggtgggaatgaggtacttccataagcttcgcaataaattctactcccccatcgtcaacgtcgaaaagctatggtctctcataccccaagacgcgaaggaaaaagccctaaaatcgaaggacactgcccctctaatcgacgtcacacagcac

SEQ ID NO: 712 - DNA, 370 bp, Glycine max
  Clone ID: LIB3028-047-Q1-B1-B2
cagaatagatttctactctatgattggctgctgcgactctatgaagattttttatgcatattacttgttttacatagtgggacagtttctagcctctaatctaaacgttggataactctgcaccaacgcgttctaccaagggggatatacgaaaactcaaaagagtcagttttcttttttcctatttctgataaatgttttttgagctgacattatgatttacatttttgtttcttgtataaaattcccacgcttggaaaaggattgtaatctgtttggtcagtatttttttgttatttgatccagtgtcatggagagatcatgttggtccgttggactagtggctgtgtttttcctcacttccacattt

SEQ ID NO: 713 - DNA, 380 bp, Glycine max
  unsure at all n locations
  Clone ID: LIB3028-047-Q1-B1-B4
ctgaaagaaagataacaatgtggactttttgatggttgtggtggtgaggggtttttggttgtaagtgaccagcttcggggtccatgtaaaaatagcatgacagggactggaagtgtcttggttctgttggtgttgttggggatggggtctagttgaggtctaataatggaaaaaaacgatagttaggatagtgttgtgaataaaaaatgagtccaggctttggtttatgctaacttgttcttttcccaattcaatttgttcactcagctattttagcttaagttcagcattgagaacaacactttgtgcatgttcagttgtttttgctcactttatctttttaacgtnttgaaaataattctaagctatgatcattactt

SEQ ID NO: 714 - DNA, 376 bp, Glycine max
  Clone ID: LIB3028-047-Q1-B1-B5
gggaggcgtaaattcagtgcaaattttcaacttgtcttccgactaatcaagggaatgatattcctcacttttgtctcgattcttgtcattttgattgctcttccgcatatgacagtgcaggacattgttgtttgcattcttgctttcatgccaactggttggggaatgctgcagattgctcaagcattaaaacctgtagtacgccgggctgggttttggggatcagtgaaaactcttgctcgaggttatgagattgtcatgggtttgctattgttcactcctgttgcttttctggcttggtttccatttgtttcagaatttcaaacccgtatgctgttcaaccaagcattcagcagaggtttgcaaatttctcgta

SEQ ID NO: 715 - DNA, 350 bp, Glycine max
  Clone ID: LIB3028-047-Q1-B1-B6
catacattgtagtatcacttttgtctcggaatttgttcttttgagttatggcaagcttaaacgttgcatgtgtggttttgactgtgcatggctgtgatgagtgcaccaatgatggtgcaagccgtgtcatgcaatgatgtttctgtgaacctagcaccgtgcctatcttacctgatgcacggtggagatgttccataatcgtgctgtagcggagtgatgaacattctgggttctgccagcaccacctttgacaaacaaaccgtgtgcaaatgtcttcagcaagctgctaataactatggcatcaacgacgaatacgctcaggcactccccgcccgctgcaatgtcagcgt

SEQ ID NO: 716 - DNA, 373 bp, Glycine max
  Clone ID: LIB3028-047-Q1-B1-B8
ctcactcacaaacacacactgaactaaaaaacatcaaaagagacatggctgagcaaaccttcatcatgatcaagcctgatggcgtccaaagaggccttattggcgagatcattagcagatttgagaagaaaggtttctacttgaaaggtttgaaacttgttactgtggaccgtccttttgctgagaagcactatgctgatttgtctgccaagcctttctttagtggtttggtggattacattatctctggccctgttgttgccatgatctgggagggcaagaatgttgttacaactggccgaaagattatcggagccacaaacccagctcaatctgagcctggaactatccgtggtgactttgccattgacat

SEQ ID NO: 717 - DNA, 368 bp, Glycine max
  Clone ID: LIB3028-047-Q1-B1-C1
caataaacgaagtgtattattagtattgagtttgttcctccatcgcgaaattagggttcgctcacttgtcttcaatttcccaaattcaccctgcaccatccttgaatcctccaattgacacgccttttggatccatttttctccgtgaggccgtgacgcatcgcgattttgttttgggaacccgcgaaactgaatcagatagtgcggcacggaaactaggaattagagcaatggcagaagatctggtgctggatactgcaatcagagactgggtgctgattcctctctctgtgggtatgggtctcattggggtgctccgttattttgtttctaagcttatgcactcttctcaaacccctgacgccaaa

SEQ ID NO: 718 - DNA, 276 bp, Glycine max
  Clone ID: LIB3028-047-Q1-B1-C12
cgtacttaaacccgaaatccggtccaaaatggaacttgtaagggtgcttccaattgaaaaaaacaaggtcaatgtggcatgctttcacccttttgctggggaaggacaattttatggaacaaaggaaggaaagcttagggcccccaattatgacggtgcccatgcattgaatggaactggaccaagttactttcctgaggaaacaaccgttggggtcattcattgaccaaggtttaaacaaatgattggccatgtaattcaaacatcggcttcaaa

SEQ ID NO: 719 - DNA, 373 bp, Glycine max
  unsure at all n locations
  Clone ID: LIB3028-047-Q1-B1-C2
tatgatgctggtaatatacctctcgtctctcattagaagtgtaatagcactccacaacttgattaacaacaagatgcttaacaaggaacatgaacgggcagaagactcgaaaacagttacagtgccaagtgcagctgcataagttttgaggggtttgtgatggccggagctctaaatgtcatttgaatacatggatttgagattattacaccttttttctatttctgctangagtagagaacttacacctaacatggcataacgatccttttatgctgttccggtgcttaatgtattttactcttcaatactttgctcattttccttgtttggtagctttggtgacagccgttaaaagaattcaatattagat

SEQ ID NO: 720 - DNA, 179 bp, Glycine max
  Clone ID: LIB3028-047-Q1-B1-C3
gtccgtgattttagttttgtgattaagctttcgataagaggagagaaagagaaggaaaaaaaaagttgctttttttttgttgttgcatgatttggatcttgattggaaaagcttcgaattggggtagttttacccatcaattcaattttaagccgtgccttcttcactttgccgtgtct

SEQ ID NO: 721 - DNA, 374 bp, Glycine max
  unsure at all n locations
  Clone ID: LIB3028-047-Q1-B1-C5
ctcaaaacctgtcacagaatttctcaccagctctggcacatcagggggtgagagaaagttgatgccaacaattgaagaggagctaggaaggaggtgtatgttgtacagcctcttgatgccaataatgaatcaatttgtccccgacctagaaaagggcaaaggaatgtacctaatgttcataaaatgcgagtccaaaacacccggaggcatagtggctcgcccagtcctcacaagctattacaaaagcccttactttagggacagatcctacgacccatatacaaactacacaagcccaaatgagaccgtcctatgtcttgattcctaccanagcatgtactcccaacttctatgtgacctttgccaacacaaag

SEQ ID NO: 722 - DNA, 382 bp, Glycine max
  Clone ID: LIB3028-047-Q1-B1-C6
gtgagggcaagaactttgcagcataccagcatgagcatgaagctcttccagctcttctccctactcccattcttcctctacttctacacaatagaagcagccgttggcccattgcaactgacacacccactggaccccttaactcagcaagaaatcaccctcgtcaaaaccatagtcctaaaaaagtaccccaagccagccaaccgcgtcttcttccactacgtcggcctcgacgatcctgacaaggccgccgtcctcaaatggctctcctccggcgcccggacgccgcgcaacgccttttccatcgccctcatcaatggccaaatccacgagctcaccgtcaaccttctctccccgcgaaacgttgtcttggacaaaatcc

SEQ ID NO: 723 - DNA, 377 bp, Glycine max
  unsure at all n locations
  Clone ID: LIB3028-047-Q1-B1-C7
gatgtgttagagctgcatccgatactgcattacaggctattggacaatactgcaatcagctacaatctttgaaccttggatggtgtgataatgttggcgatgttggagtgactactttagcatatgggtgtcctgatcttaggatagttgacttgtgtggctgtgtccgtataacagatgacagtgtgattgctttggcgactagatgcccccatctgaggtccctaggactgtactactgcaagaacatcacagatagagcaatgtattccttggcacacagcaaggtgaacaacaggatgtggggaactgtgaaaggangaggaaatgatgaagatggtttaaggactttgaacattagccaatgcactgcactc

SEQ ID NO: 724 - DNA, 371 bp, Glycine max
  Clone ID: LIB3028-047-Q1-B1-C8
gaaacattgggggaacagcagagaaaatggtattttctttctagcaagtatcccagatgatttgagtgcaccggtaaccttcgttgttttgtatcaactgaaagatcaaggtaattttgcagaaaaaaagctttgagaaatagaagaaatggagcttggcctactgaatatagctgcctggggccaatgatcgactcaagatttagcattaagaattgataaagtggtacttgagagtgtgtctctttaaatttttgtgatacacatatagtatatatgtatctaaatcaaatcttgtattctttaaacatgaaaaactgaacagcttgtaattgtttgacagtttcatctaatgccttcacagttttact

SEQ ID NO: 725 - DNA, 365 bp, Glycine max
  unsure at all n locations
  Clone ID: LIB3028-047-Q1-B1-C9
gagccattcgtcatagcaacaaacaggcatctgagcgtggttcaccctatttacaaacttttgtttcctcactatcgtgacaccatgaacattaattcacttgcccgcaaatccttggtcaatgcagacggtattatagagaaaacattcttgtggggtaggtactctttggaaatgtctgctgttatttacaaggactgggttttcactgatcaagcattgcctaatgatcttgtcaagagaggagttgcggttaaggatccatctgctcnccatggagttcggcttttgattgaggactatccttatgcttctgatgggctanagatatgggatgccatcaagtcctgggtgcatgaatatgt

SEQ ID NO: 726 - DNA, 400 bp, Glycine max
  Clone ID: LIB3028-047-Q1-B1-D10
ggcggacacggcagtatgattattaccagagggttttgaacgggatattgtgaaatagtttgtcgatggtgatcgtttgcttgttcccttttgactaagcttgcacggtgattgttcatcaattagtatttgcattttcaagtcattggaggatggttggttcactgtgttatggctttggagtactttgtgagacgtaggaataaaaaggtgggagtgttcaccgtctattctcctgtagtagtgagagattctgactcgcaaaagtacttcaacagtctgaggctaaattttgagccgagtccttttgattttcccatcccggtttcttgtgaatgaagctctgctacctggagaaattgcatcagcctcctaaatgctgattttgtacagtgatttt

SEQ ID NO: 727 - DNA, 372 bp, Glycine max
  unsure at all n locations
  Clone ID: LIB3028-046-Q1-B1-H4
caaacatggcaatgaagaagctcttgtgggttgtcctgtctctatctttggttcttggagtggccaatagctttgattttcacgacaaggatttggcgtccgaggaaagcttttgggacttgtacgagagatggaggagtcaccacacggtttcgcgaagcctcggtgacaagcacaagcggtttaacgtgtttaaagcaaatgtgatgcatgtccataacactaacaagatggataagccttacaagctgaaactaaacaagtttgctgacatgaccaaccatgaatttaggagtacctatgctggctcanaggttaatcaccacagaatgttcccaggcacgccacgtgggaacgggaccttcatgtatg

SEQ ID NO: 728 - DNA, 389 bp, Glycine max
  Clone ID: LIB3028-046-Q1-B1-H5
ccttctcacacttcccccaattcccacaccaaactctgtcttttcttctctgtacggcactctctcttccggcgttctgggggtcgcatcgccggcgattccccactctgcttctctcttcacccttcagttcaaccctctcgtcttcgcttcactgattccctcttcgaaaatgcttccgatagcttgctatggttctccttctcctaaatctccgtctcctaaagaaccctgtaccttttcttcctccgattaatcaacttcctaattatggctattcgtgtaactttttccttttcgggctacgtcgcccagagcctcgcctcctccgcctgagtacgcgtcgccaattcgcgatgtgtccaggaatgctggatccgcacgcgcct

SEQ ID NO: 729 - DNA, 296 bp, Glycine max
  Clone ID: LIB3028-046-Q1-B1-H6
cgagtttccttatcactcaatctttgaacagccttcatactgtactctgatattaagtgtgctggcagcatggatgcaatatcacagtttggcagtgatatgcatcttcgatctacgcagaaaggattatctgtaaaacgtagacgacgagaggagttaccttgagtttgtgattattcagtttttttgatatgcttgacgcttcacacaaatacaggcctttgcagctttgtgaacgaatgcaagtttttattaaaattcaattttgaagatgcattgtgtactaataatatact

SEQ ID NO: 730 - DNA, 387 bp, Glycine max
  Clone ID: LIB3028-046-Q1-B1-H7
ggaggtttatgcaatagaaattcaaatgtacacagagatgaagaacaacaaaaaactcaagcaactttaccagaaagcactcactattaagtcagcaattccccatccgcggataatgggaataatccatgaatgtggagggaaaatgcatatggcagagcgccagtgggctgaagcagctacagatttttttgaagcttttaagaattatgatgaagctgggaatcataggcgtatccaatgcttgaagtaagcaacaaagtgttataatttttaatttagctattagttttaaacaattttcctaacaatatatgtctgcatttcataattgttaattacaaaaagatacagttaactataaatcattaattttggcagtaactt

SEQ ID NO: 731 - DNA, 388 bp, Glycine max
  Clone ID: LIB3028-046-Q1-B1-H8
tactgttgttgttgttgttggagaagaatgaattctgagaacaagagactcacaagaagaagcatttagaatcgaaattggaagagaagagggtatgaatgattacaaaggaagagaaggagaaagtagcgttgttgttgttcggaagcgattcaaggaaaagcaacaaccctgtccttccacaaggcccatcatcaaccaacaacaccgtcgctctgcttccctccctaacactcaatacgaggaatctgaaacagatgtcgaagtatctgatgttagtgtttcagaaggggatgacacatcttggatctcatggttttgcaatttgagaagaaatgaattcttttgcgaagttgatgatgatttcgtgcaagatgatttcaacctc

SEQ ID NO: 732 - DNA, 367 bp, Glycine max
  unsure at all n locations
  Clone ID: LIB3028-047-Q1-B1-A2
gcanaactcattgttgtactgacacgtggcgggtctacagctaagttggttgctaagtatacgccagcggttccaatattatcggtggtggttccagtgttgagcacagactcatttgattggacatgcagtgatgagacgccagcaaggcacagcttgatatataggggcttgattccaatattgggggagggatccgccaaggctactgatgcagaatctacagaggtcattctcgaagctgctcttaagtccgcaacacanaggagcctttgtaagcctggtgatgcagttgttgccctgcatcgtattggcactgcctctgtcatanagatctgcatagtcaaataatatttcatgctcaact

SEQ ID NO: 733 - DNA, 328 bp, Glycine max
  Clone ID: LIB3028-047-Q1-B1-A3
agaagaggcaatttagcttgcacatactcaagcattccaccattgtggcatagccaaggtcattttacactccaccaaatgatcatgatcatacgatcaatccccttaattttatcttttttcttatcccttttcgttactctgtaatggatcaatgcttgataatggggttgttctacaaatgtcatagatatatggcctgctgatgggtattgataatctctgaagttgaactgatgcacggttttgagatggctttctaatagagctacacttttgtcgctaatacagttgatgccctgcattcttcttggactagcgctgtcat

SEQ ID NO: 734 - DNA, 156 bp, Glycine max
  Clone ID: LIB3028-047-Q1-B1-A4
taactttcaattcggctaatggacaaccattggtgttaaccttaaggaggcttaaaccaaagctgatagctccggcaagaccaacccctcgcgaagtgaagctactatccgacatagatgaccaagatgggttacggttccaaattccggtgatac

SEQ ID NO: 735 - DNA, 297 bp, Glycine max
  Clone ID: LIB3028-047-Q1-B1-A5
acttgttctcgttcattactactaaaaaatgacttccaagatacaaatattaccaatcctaggcgtgttggccatgttacttctgatctcctcggaggtgttagccactggattacatggtgttggtgttggtattggtggtggattacctggtgttggtgttagcgctggattacctggtgttggtgctggattacatggtgttggtggcgctggattacctggtgttggtgctggattacatggtgttggtggcgctggattacctggtgttggcgctggattatctgccaacgc

SEQ ID NO: 736 - DNA, 373 bp, Glycine max
  Clone ID: LIB3028-047-Q1-B1-A7
cacactttctctctctctctctctcacccagatcttgtagcaatggcgagcgctcccactccacgcgaagagttcgtgtacatggcgaagctggcggagcatgccgagcgctacgaggagatggtggagttcatggagaaggtctccgcctccgccgagagcgaggagctgaccgtggaggagcgtaacctcctctccgtcgcctacaagaacgtgatcggcgctcgccgcgcctcctggggcatcatctcctcaatcgaccagaaggaggagagccgcggcaacgaggaccacgtcgccgtcatccgcgactaccgctccaggatcgaggccgagctctccaacatctgcgacggaatcctcaaactcctcg

SEQ ID NO: 737 - DNA, 336 bp, Glycine max
  Clone ID: LIB3028-047-Q1-B1-A8
aaaccctacgtagagagctcttcctcactctcattcgcaatggccgcagcagcacgtcctctcgtcaccgtgcaggccctcgacagtgacatggcaacggaggcctcggcaaccgtcccaatcccggacttcatgaattcttcaatcggcccggccatcgtcaacttcgtaaactcaaacatctccaagaccagccgacatccctatgcattcagccgccgcgctggccaccagacttcggccaattcctggggaaccggtcatgccgtctcccgtatcccccgtgttcccggcggcggaaccaatcgcgccggccagggagccttcggaaacatg

SEQ ID NO: 738 - DNA, 382 bp, Glycine max
  Clone ID: LIB3028-046-Q1-B1-H3
gcggctatggttttagcgcagcttcttctagatttaatgaacatgggtaacgaaaaagttcacatcagtattgtggtcattggccatgtcgactctgggaaatccactaccactggtcacctgatttacaagcttggaggcattgacaagcgtgttattgagaggtttgagaatgaagctgctgagatgaacaagatgtcattcaagtatgcctgggtgctggacacacttaaggctgagcgtgaaagaagaatcaccattgatattgctttgtggaagtttgatacaacaaagtattactgcacagttattgatgcgcctggacatacggatttcattaggaatatgattactgggacatcccaagctgactgtgctgttc

SEQ ID NO: 739 - DNA, 190 bp, Glycine max
  Clone ID: LIB3028-047-Q1-B1-B1
tcacagcgtaactcaggtcccattgtttggattgcccacccactaaactgaggaatcacactcaggaacggaatcacatcgcatctccaactgcttcgaactcagtttataggagtggatttgggcacagtcatcaatcttaggatctcgcggtgactgacttgtcttctacattggataacttggagga

SEQ ID NO: 740 - DNA, 264 bp, Glycine max
  Clone ID: LIB3028-047-Q1-B1-B11
acgcctacgtagactcgaaatccggtccaaaacaaacccaaaaattggttggggggctaaaaggtgattgttacaaaaggcaatatacctttgccggttggaatccccaggataaggaaaattaaaacaaaggccaaataatgggggacaaaatgggaattccacaaggcccctggcaagaaaaatttccaatttagccaacaatgaattgccggttttaacttaaggcaaccaaattcctccagaacaaacctgtcccttaaa

SEQ ID NO: 741 - DNA, 382 bp, Glycine max
  Clone ID: LIB3028-046-Q1-B1-G10
cgaatcagaacacgggcatttcgatccacaattgtaggatcatggccacgccggatcttgaagcatccaagggtagctaccccacttatctgggacgtccttggaaactttacgctagaaccgtcttcatgctgtcctacataggggaccacgtgcatccacgtggctggctcgagtggaacacttcctcctttgctttagacacgtgttattatggtgaatacatgaattatgggccgggttcagctctgggccaacgggttaattgggccggctatcgggccatcaattcgacggtggaagcgtctagattcacggtgggccagtttatatcgggctcgtcctggttgccctctaccggagtggcgttcattgctgggtt

SEQ ID NO: 742 - DNA, 384 bp, Glycine max
  Clone ID: LIB3028-046-Q1-B1-G11
agacacaccaataatttgccaagaaaccgaacccaacccaaccgcaacaacaatggcgttccaggatttcgacatgatcaccgagaggcggagaaacgagcagaggctcaagatgaagaagaagatcctcatcagcgtcgtctccgccgtcctcctcgcgtgcgtcgtaggcgccgcggcattcgtcgttgtccaaagaacaggcactaatgcaaagcacgctaccccaatgccacagaacaccgccacgccgcacgtggatcagaactccaggatggtgaaaatgatctgtggatccgcagaatacaaagaaaaatgcgaaagcacgctcgaagaagccctaaagaaggaccccaaattggctcaacccaaggatcttatcat

SEQ ID NO: 743 - DNA, 384 bp, Glycine max
  Clone ID: LIB3028-046-Q1-B1-G12
ggacatacagatggtcatatggcactgcttcatgcaaatactcattccttgatagtaggtgatcactgtgtgggtcagggaagtgccaccttggacataaaagctggtggaaatatgtctgaatacttccaaaccacgtacaaatttttggagctttcaccacatgctttaataccaatgcatgggagagttaatgtctggccaaagcagatgctgtgtggatacctaaagaatcgtaggagtagagaagctaatattgtgaaggcaattgaaggtggagcaaaatctttgtttgacattatagtatatgtatattctgatgttgaccgccgtgcctggattgctgcatcatcaaatgtgaggctccatgtggatcatctagcc

SEQ ID NO: 744 - DNA, 334 bp, Glycine max
  Clone ID: LIB3028-046-Q1-B1-G2
gcaaaacaatgatggctggtgttagtggcagtagcactactcccttattgtgctctttgttctttatttcttccttactttttgcttcctgcacccatgcctcctcccaggcacctcctccaattgtggatggactttcatgggatttctataggacgagctgtcccatgcttgaagggatagtgagcaagcatctccagaaggtgttcaagaaggacaatggtcaagctcctgccttactcaggatcttcttccatgactgctttgttcagggttgcgatgggtcgatattgttggatggaagtccaaatgaaaaggatcaaccggcaaacat

SEQ ID NO: 745 - DNA, 403 bp, Glycine max
  Clone ID: LIB3028-046-Q1-B1-G3
aatcattgtacccggatcgggcctgctctcacgtcagaggaacttgtgttgatcccgcgagttctcggttcgtgagaacatgctaactgagtcgacaatcacgattgattccatcatgtcaaatgacatgagtagtctgccgaccctctttctatgatagcgttcacggaatcctaatctgatgaaatcgcgacagcgccttgacacgtatggaggagttgtgacaacctgtggagaatcatggtgaggttcacgttgtagaaggtgttgatcattggatcaagatactagacgaatcaaggtaatatgttgattacaagtcatccatatcaacactacatatcacttctcttaagtcccacaatacgatggaggctaccttgggcaaaaaactctccacaaa

SEQ ID NO: 746 - DNA, 337 bp, Glycine max
  Clone ID: LIB3028-046-Q1-B1-G4
gtgcaccttaaccacaacaaacacaattcgtgtcttattacttattttcctctaaatctaacccaactcaacccgtgctcatccctaattatgggaaactgcgtgttcaaaggtttacaccacggcgtttctgaaaacatgatggtgaaagtggttacctcacactgaggcatcatggaactcctctctctcataaccgtggagtgcataaacagcgaattccccggccacggcatcgtccgaagccgccgcgacatgttttccgaaccgctccccaaaaaccgagcaactcccccgcggagaagtctactacttcctccctctaaacccttcttct

SEQ ID NO: 747 - DNA, 388 bp, Glycine max
  Clone ID: LIB3028-046-Q1-B1-G5
tgatagttgtgtgcaattatttgaattcaagaatgtctcaacccgactcgttggtggctgagattgaggtgaaaacctctgctgatcacttttacgacaccttgaagggtaagaaacagcatcgtattcatgatgttgcccctcatcatatccataaggtggaagttcatgaaggtgagtgggataaatctggcaatatcaaggtgcttacattcgctgatggggacactgttgagaccttaaaggagagagttgattttgatgatgaaaacaagaagataacctacaccatattggagggtgtcatgttgaagtactataagagctacaaggttatcgttcatgttttaccaaaaggtgatgagcacagccttgtgaagtggacttt

SEQ ID NO: 748 - DNA, 388 bp, Glycine max
  Clone ID: LIB3028-046-Q1-B1-G6
acacattcaagtcatttaacttccagcggagcagttgggcatatgttttcatcttctcctggatattcaactgatcttcatcactcatccttttcatctcatgaaaaacaacctagaaatactcattttatttcacagtcattaagtaacatggcttcattgccattatcttattcttcaaatagtgaaccgataccttctacaacatcaaccccttattccaatggaaacagtgtttcctggcatacagattccttgcctagctttctcgatttccctgccaatacctccattggtaatagtcaagtagaaagcagtgactgcaatatcatggcaactgaagagtattctaagcgaaatgattggcaagagtgggctgaccaattaa

SEQ ID NO: 749 - DNA, 392 bp, Glycine max
  Clone ID: LIB3028-046-Q1-B1-G7
gtgatacagaagtggaatctagccctatgaagccaaggagatcacggaaatcaaatttcagtgaagggagcagcagcttcaagagcttgtcggccatgggctcatttggaaggattgccggccgcaattcagggaaaattacagatgaaaagcaatgataaagtggtggtgattattttgattccaagccggcaggaaattatataaatggtggttttaatttctgtttgataactgcctatattggtatcttatttgtattcattttctcacaattgtccaaagatcactacggtcatgagagacagctgcttgtagtcggtttgagttttttacttctgtaatctgattctcagttggaattggagaatcagaacagttatgtattcccc

SEQ ID NO: 750 - DNA, 384 bp, Glycine max
  Clone ID: LIB3028-046-Q1-B1-G8
tttgcaacaaaaactaggcttctcatatctactaatcctttgcttagccactcttgtttcttcacacaggccttatacaactccaagtgtcacacgcttgactgattcttttcctcgtgtccaagttgatagtgctttttctaagacctttggggccaaaaatatccagtttcttagtaatgggtccacggtcacactggctcttgacaaaatctcaggctcaggcttggtatcacaaagcagatactcctatggattcttcagtgctgcaatcaaactaccttctggtttgtcacctggagttgttgttgcattttatttgtctaattcagataaatttcctcacaaccatgatgagatagacattgaactgcttggtcatga

SEQ ID NO: 751 - DNA, 381 bp, Glycine max
  unsure at all n locations
  Clone ID: LIB3028-046-Q1-B1-G9
gttatccattcacatttcacagttagcacttagcagactctgctgcagtgaggtgaggggaggtttgtttgttgtttcgtttttcctttcctttccgccagaatccgttgagaatggcgttgccggtagtcgtcgatgcagagtacctcaaggaggtcgacaaggctcgccgcgatctccgcgcactcatcgctaacaggaactgcgctcctctcatgctccgattagcctggcacgatgccggaacttacgatgctaagaccaagaccggtggacctaacggttcgatccggaacgaggaagagtattctcacggagccaataatggcttgaagaaagctattgatttctgcaaggaagtgaaggcanaatatcctaaaa

SEQ ID NO: 752 - DNA, 385 bp, Glycine max
  Clone ID: LIB3028-046-Q1-B1-H10
tttgagtcttcttgatccttctttttctccttgaactcaaacatggcagatgaggtggttctgctagatttctggccaagtccatttgggatgagggtcaggattgcacttgctgaaaagggtatcaaatatgagtacaaagaagaggacttgaggaacaagagtcctcttctcctccaaatgaacccggttcacaagaagattccggttctcatccacaatggcaaacccatttgtgaatccctcattgctgttcagtacattgaggacgtttggaatgacagaaatcccttgttgccttctgacccttaccagagagctcaagctagattctgggctgattatgttgataagaagatatatgatcttggaaggaagatttggg

SEQ ID NO: 753 - DNA, 384 bp, Glycine max
  unsure at all n locations
  Clone ID: LIB3028-046-Q1-B1-H11
agaagattaagatagtgcatctcccgaaacagttgaccttgtgagatacagacacagcaccttcaattcttcatttctcaaatcgcaattcgtaaaaccataacaacacaaagtgtctcaaattcacattaaattctccctccccgaaaaggatgtcgttcgaggtggaggaggaggaggaggcgttcgagcacacgctcttggtggtgcgcgaggtgtcggtgtacaagatcccgccgcgcagcacctccggcggctacaagtgcggcgagtggctccagtccgacaagatctggtcgggccggatccgcgtcgtgtcncgccgcgaccgctgcgagatccgcctcgaggatccgagctccggcgagctcttcgccgcgtgct

SEQ ID NO: 754 - DNA, 382 bp, Glycine max
  Clone ID: LIB3028-046-Q1-B1-H12
tgttcccagagagagacattattttccaccatttgggtcgctacctgtttcacccttccaacgatgcatgggaactaatcagcagttactatcaggcacacttggccagtgcaagtgaacggataggcttacagataagagtatttaatgctgctactactccaaagcaagcaatcatgaatctagttttaagctgcacattacagcaaaagatactgccagaagtggatttgaaaacttcagtgtcttctgctggaaaaaacatgactactgtaaaagcagttcttgtggcatctttacataaagagtacggggataatttacggagtatgtatctgaagaaaccaacagttagtggggaagtcatagaagtttatcagcc

SEQ ID NO: 755 - DNA, 356 bp, Glycine max
  Clone ID: LIB3028-046-Q1-B1-H2
gaacaaatggctgaggcttcagcacaagcttgtgtcagtattccttccaatccctggagttctctgcaaaggggtttcagtgcataataactccctgtaatgtgcactagtaaagaccaaagtatgattattgttacattatgttacatggttgtacttgtatatacatatcttgtcccacctttgtaaatacaattgggacactactaggattgggaagaatggtctttacatttataatttggcaaatagatattgcaactacctttgtataattctatttctgaagaagcaattacaatttacaagggatggtgccatttacggcataccgattaacgacggataaagggacc

SEQ ID NO: 756 - DNA, 389 bp, Glycine max
  unsure at all n locations
  Clone ID: LIB3028-046-Q1-B1-G1
aaacaaccgcgctaaggttggaacttggaggaacttgtgtctgtgtgtccttttttccagagtcatggctatggctttgagtctctcccaattccctgttcgtgggtctgtttctttgcccaaaagaagactacccagaagaagcttttgcattangggcatgtcagaaacctcttccacttcttctgtgagcacccaacaagaacaaccaacttctgataatgcttcttcagtgacaattgctcctccccctaacttcaagccccctgagcctaaacgctttgcaattaggcctgataagaccagtgaagtgtttggagctttgcttcctttgatctttcgttttgccactggagttttcgtttctgggtattcnttttcaattgttt

SEQ ID NO: 757 - DNA, 396 bp, Glycine max
  Clone ID: LIB3028-046-Q1-B1-E3
aggagctggtgcaaggctcaaacattgtatcatccttgatgacgttgaaatcaaggaaaatgctcttgttggtcatgcaattgttggatggaaatcatctattggtcgatgggcctgtgttgaggctagtggagattacaatgcaaagctcggggtcacaatacttggtgaatctgtgactgttgaggatgaggtagtggtttttaatagcattattttgccacataagaccctaaatgtgggtgttcaggatgagattcttttatagaacctccacagctcccattgttggctttctaatttccttttgattgtatttgcagtgacttatgttttaatatctagtttggaggccccaaaacagtggatataatcgatttttgtctcaaaattgaa

SEQ ID NO: 758 - DNA, 381 bp, Glycine max
  Clone ID: LIB3028-046-Q1-B1-E4
ctcaagtgcctaaccgcttcggcggcgccacctcagctccgccgtcaactccggcggcgcagcacgagaacatcatgtcctcatccgacgccgccgatgcactctcgcacctcctcgatcgcctcgcgcctacacactccctcgccacgcgcctcgtctcgccttcttccgcagccgccacgtgtcctcgactgcctctcccttaacgacgtcctctcctgcgtttccaaactcggttactctcagttcaccggtcactcagtctcctccgaactcgccaactcggccgagtcagaagcgctggcactattcgacctttcgcaagactacaatcagtccttgttccccaaaaactggcctcttggctactgaaacgatcaa

SEQ ID NO: 759 - DNA, 305 bp, Glycine max
  unsure at all n locations
  Clone ID: LIB3028-046-Q1-B1-E5
agaagcatcagtagaagcccagtaagaggcaggaatgggagaagtgtcaatagaagtccagtgagaggcaggaatgggagaagtgtcagtagaagcccagtgagaggcaggaatgggagaagtgtccgtagaagcccagtgagaggcaggaatgggagaagtgtccgtagaagcccagtgagaggcaggaatgggagaagtgtcagtagaagcccagtgagaggcaggaatgggagaaatgtcaatagaacccctgtgagaggcgggaatggganaagtgtcagtagaagccctgtgagaactcg

SEQ ID NO: 760 - DNA, 385 bp, Glycine max
  Clone ID: LIB3028-046-Q1-B1-E6
agtggcttcgtcgccttccctcgcaagaatgctaactcatctccgccgcacccccgtcgcatgcggtggtgccacctccaaacatttcctcgtcctcaagcaattcagctccgccgccgccgtcgccgtttcctctgtgtctgattccgacccaacacttccctcttcttccgaatcacagaattaagatgttggaatatcgagagaacaggttgcaaatggaaccattaaaattcagtagtgcttattcatcaaatgaggaattagattctctggaatttaggaaagtggtgtgcaaaggatattttgatgatatatcatcaatctatgtgggaccacgttcaagaagtatttcaggaatcactgaaaatggttactacatcat

SEQ ID NO: 761 - DNA, 365 bp, Glycine max
  Clone ID: LIB3028-046-Q1-B1-E7
gaagaatcagaagatgagtcaaccaataagaaagataagcttctcatgggaaaagaagcctggtgtctccaaagtaacaactactactcatggtgaaaatccgattccaaaagaaggagaatttttgggcaagttgccaacaacaacttggacaacaaaagaatcaagtggtactcaacaacaaaaaaaaccaccaccctcttcttgattttcaaattcaacttcctccttgtgcttttcagcctcccttttatagaacttcctccaaaaggggcctttgggttcaagacaaagacccttcccataacagcttctaagagagtgcaccagggactcatcagaaacctagtgctaaggtgaacaaa

SEQ ID NO: 762 - DNA, 330 bp, Glycine max
  Clone ID: LIB3028-046-Q1-B1-E8
cccacgggcatttatgctccccctaaccgtgatcacattgctctggcgttggcaatggcttaccaagaggtcaccaatcaccataaacagcgccctcctatcaacgatctcgggccaaatgataagcttcctagctgattcacttactgctacttaccctctcagggttttgggcttgggtccttaagcaacttgttagaacagcttcagcatgcatattgcatatatggatgtaatcattttcacatggagttaaaaagaggtagaggagatcgagttgtaggaaataaactacttttgcaaataataacataccacattaatcttcac

SEQ ID NO: 763 - DNA, 381 bp, Glycine max
  Clone ID: LIB3028-046-Q1-B1-E9
acacggtatcttatcccataggtcaccatgatccttccattacaagttgcaataacgtgatagaaatggctttgagatacactttcttttatggttagctatatattctgaacccgatcccccctcaccagacttttaaatcacataattcttttttttatttcttggtggaaaacagattgtgcatctaattccaaattcacccataaaaatacttccttttgctcaccagccatatattatgatggagggagatgagaatattcaggcatcatcaaagggaaaatatgttgaaagcttcaactgctcggaggcaccaaggaagaaaagcaagaagatagaagacaagaggaggtttagtgatgaacagataagatcact

SEQ ID NO: 764 - DNA, 373 bp, Glycine max
  unsure at all n locations
  Clone ID: LIB3028-046-Q1-B1-F1
agaaagcacttccgacatacactccagagagcccagcggatgccaccagaaacctgtctcaaacaaaccttaatgcccttgcaaaggttcttcccggtctgcttggtggcagtgcagatcttgcttcttccaacatgaccttgctcaaaatgttcggggacttccaaaaggatactccagcagagcgtaatgttagattcggtgttagagaacacggaatgggagctatctgcaatggcattgctcttcacagccctggactgattccatattgtgcaaccttctttgtattcactgactacatgagaagtgccataaggctttctgcgctgtctgaagctggggttatttatgtcatgacncatgattcaat

SEQ ID NO: 765 - DNA, 380 bp, Glycine max
  Clone ID: LIB3028-046-Q1-B1-F10
aaacggtacaagggcttcaaagaagggaagcaaaggattctcgtggcaacagatttagttggaagggggattgacatagaacgtgttaatatagttattaactatgacatgcctgattctgctgatacttacttgcacagggtgggaagagctggcagatttggcacgaagggacttgcaattactttcgtgtcctctactgctgactctgaggttcttaatcaggtgcaatctaggtttgaggttgacataaaggagcttcctgaacaaattgacacttcaacatatatgccaaactgatgacgctttggaactattaggaggcagatctcgaaggatctttgcggattggggaatggtgtggttggcaactcatcaat

SEQ ID NO: 766 - DNA, 368 bp, Glycine max
  Clone ID: LIB3028-046-Q1-B1-F4
cagcaacaaacaaacatcttttaccttaaacaacaatggccgatgccgaggatattcaacccctcgtttgcgataatggaaccggaatggtcaaggctggttttgctggagatgatgcaccgagggctgtgttccctagcattgtggggcgtccacgtcacactggggtgatggttgggatggggcagaaggatgcgtatgttggggacgaggctcaatccaagatgggtattttgactctcaaatacccaattgagcatggaattgtgagcaattgggacgacatggagaagatctggcatcacactttctacaacgagcttcgtgtggctcctgaggaacaccctgtgcttctcaccgaggcacct

SEQ ID NO: 767 - DNA, 386 bp, Glycine max
  Clone ID: LIB3028-046-Q1-B1-F5
ctcgagccgcacagctaagcttttggaacttagagttaagcagttaccttcctccaactataatatctcatccaatcaaaacccttttctcaattgtctctctctctgactcactccacaataagtgtcgattttttcctaaataagtgaaagtgtagttacacctttttttgtgtgtttaccacttttgagtgccacagagttctgagtttcataggagaaaaaaaatgacagaagaacaaaccaaaacggttgagtcagaatcagtaacaccaccacctgctgctgctgctccttcacaggttcctcctgctgctgaggctgaacatgttcctgaggctccaaaggatgtgactgaggagaaatctgtaattccagtgccttct

SEQ ID NO: 768 - DNA, 388 bp, Glycine max
  Clone ID: LIB3028-046-Q1-B1-F6
ggtttctcaattaagaggtgaaaattctaccttgttaaagcgccttactgatgttagtcagaaatacagcgactctgctgttgacaacagagttttaaaagctgatgttgaaacattaagaacaaaggtgaagatggccgaagagaccgtcaaaagaattactggattgaacccattgcttcatgccatgtctgatatatcatcactgggcctgccatcatttgatggaagaagcccttcagacacttcagctgatgcagctgttcctgtgcaagatgatccacatcatcacttctatcaacccacatctactaatcctattcgcagtcatgattcgatagtcaacaatggattggggggcatttcttcaattgaaaatgtgcagcag

SEQ ID NO: 769 - DNA, 388 bp, Glycine max
  Clone ID: LIB3028-046-Q1-B1-F7
cagacctaaacagagggtaacaaaacaagcaaacaccatggtgattaagtctgtgttgttcagcttcattttccccccgccaccttctctggtggtttgggggttgactgtgacaagcttcctgatactggctaatgctttcttgtcagaaattagagggaagcatttgaactattcaaagttttggaatgctaatccctctgcagaaaagcaggtcaagttgtctagcaaagctggcatgcttttgctgtacactcctgcttttcttgctggccttgcatccttctgggtctttcctcatcaagggctcagattcaccatccttcaatctgctgttactctgcactacttcaagagggtctttgaggttctgtttattcacaaatat

SEQ ID NO: 770 - DNA, 372 bp, Glycine max
  Clone ID: LIB3028-046-Q1-B1-F8
atttcacccaaatataaatagcaatggaagcatttgccttgacatattgaaggagcagtggagccctgcgctaactatttcaaaggtgttgctctcaatttgttccctgttgacggaccctaatcctgacgatcctttggtccctgaaattgcccacatgtacaagacagacaggaacaagtacgagtcaactgccagaagctggacccagaaatatgccatgggttaagtgaccttgtggtatgtttgagggagagcctttctactctcagtgtttaggtctctcagcccttgtaggaatatttgtcgttttaaatcatgattaaggcccctccagttgaagatgaatgggggaaaacgtttctcctgctg

SEQ ID NO: 771 - DNA, 338 bp, Glycine max
  Clone ID: LIB3028-046-Q1-B1-F9
ggacactatcaaatttattttaaaatatagatttctggtgaactgtttttgaataacctttttcccccagattttgggtaatatattttagggtttctaatggaaggttcgttttctttttttatttatttgcaatgttaagactcaggcctgatggtagggttgtaattgtagtttgagttctgtattatttgttaactgcaataattaagtgtgaacctgttcttgtgattaaaatcacaatatggcgggcttaatgaaagcattaaaatgtcaaattttcttcagaaacttgattcagaggttcaaaagatggaaagtgtatggcttttttctgc

SEQ ID NO: 772 - DNA, 381 bp, Glycine max
  Clone ID: LIB3028-046-Q1-B1-E12
aaacaataccaactggaaaaagaagggatttcaaaaaccgtgattggttggaaaccacctttttcttctacgatgagaacaagaaccttgtgagtgtgaaagtgaaagattcccttgactcgaaaaagatggggtatgtttaccaagatgttgacattccatggctccagaaaaggactaaacccaaaagaactagaaaagctaagcaggtggcgttcacacaacagtttggcggcattggtgcagcaatcgctgctgagactgggccaagttccaagtttcctctcactttattggactcaaaggtaactctacttgttaaaaggccaaagcagttgaggagcaagaaggacaaggaggaagacgaagaagtgttggtga

SEQ ID NO: 773 - DNA, 372 bp, Glycine max
  unsure at all n locations
  Clone ID: LIB3028-046-Q1-B1-C3
aaatacgggtaccgtacttcaagtaggcgacggtattgctcgtatttatggtcttgatgaagtaatggcgggtgaattagtggaatttgaagagggtactataggcattgctttgaatttggaatccaaaaatgttggtgttgtattaatgggtgatggtttgatgatacaagagggaagttcagtaaaagcaacaggaagaattgctcagatacctgtaagtgaggcttatttgggtcgtgttattaaatgccctggctaaacaattgatggtcgaggagaaatttcagcttcggaatctcgattaatcgaatctcctgctcncggtattatttcgagacgttccgtatatgagcctctccaaacaagact

SEQ ID NO: 774 - DNA, 124 bp, Glycine max
  Clone ID: LIB3028-046-Q1-B1-C4
gtactgttagagagtgtgatgatgagggtcatagtccgtagacaatttgttattctttgtatttatctttggaggtctaccggaaatatttttaatgaaaatttttaaaattgctttgattaac

SEQ ID NO: 775 - DNA, 304 bp, Glycine max
  unsure at all n locations
  Clone ID: LIB3028-046-Q1-B1-C6
tctcaaccggcccaatttagcataagcccagcatggccaccgcaacagcagcagccacctcgtccttcatggggacgcgcctcctggaggcccactccggggcggggcgggtgcaggcccggttcgggtttggcaagaagaaagccgccgccccgaagaaagttttccagggggtcgggctctagctccgataggcccctgtggtatccgggcgccaaggcgcccgagtacctggatgggagccttgtcggagactacggattcgacccatttgggctanggaaagcccgccgagtacctgcag

SEQ ID NO: 776 - DNA, 111 bp, Glycine max
  Clone ID: LIB3028-046-Q1-B1-C7
gagagaataaggaataattttctattgatgatttagtgggttggttttgtaatgtatgtaatgaggaaaatgtagtggtattccatttatgtgttgttgtagttgttttgt

SEQ ID NO: 777 - DNA, 365 bp, Glycine max
  Clone ID: LIB3028-046-Q1-B1-C8
gtttctctctcttagttcaaatttcgaattcggaagcagcaaaactaaagcccaaaaacccataccaagatgctcctccgaagccactgttgctacctcggcataatcgccgggctagcagtgttcctcgcaacgacgtcgttcgccgacgcgcaatcctgcaacggcatcctcgtctcatacgcctacaccggcggcctgcggttgccgcccaacgtctccgactcggctaagcagccgtaccggttcgagtcgacggtgacggttctcaacaacggcctcgacgagctcaagtcgtggaaggtcttcgttgggttcgaccacgacgagttgttggtctccgcctccaatgctgtgctcgccga

SEQ ID NO: 778 - DNA, 352 bp, Glycine max
  Clone ID: LIB3028-046-Q1-B1-C9
gtaactgaaaagtttgagactgtcaagaatgaagatagggaaaacacacaaacattcaatggtcgttaagcaaataacgtaccacttgttcatggatgccttcacccatatatccggcaatatacatcaaatttacaaacaacgtacaaagagcaacacacatccactgggtggaacagcatacctaaacttgataaatgatgatgatccctttctacatggcatcaactacactgctatgcgcccatcatagcgcttccgtgatatggatcatctatctggtggggaaaagacagttgctgcacttgcattgctattctccatccatacttcatagccttcaccattcttt

SEQ ID NO: 779 - DNA, 287 bp, Glycine max
  Clone ID: LIB3028-046-Q1-B1-D1
cttcagcttccattctacgctctcccaaccgccagtctctgaccagaagagcgaaccacaacggaagagtaaattaccgtcaaccgaatagccgtttctccgtcaaagcctccgccaaagagattgcctttgaccagcattcccgctctgctatgcaggccggcattgacaagctcgccgacgccgtcgggctcactcttgggcccacggggaggaatgttgtgttggatgagtttggaagtcctaaagtggttaacgaaggggtcacaattgctcgcgccatcgag

SEQ ID NO: 780 - DNA, 382 bp, Glycine max
  Clone ID: LIB3028-046-Q1-B1-D10
cgaagcaggaaccacaatctgggttgatctatgagtaccggcaccactagaatgctagtgaaggagatgttgcaactctcttcttccacacttcacttctcttctgcgtttcgcgccctttctcctcctttgccattctcgattcaattgcgacgctcgcgccgccctgcaattcgatgcgcttcctcagactccgacaaagtatcgtctcggctgtcgcaggttcagcaccttcttcaacaggccgaacaccgtgctctctccgccgaccagggcccacctcctaaaatcaccttagatcatgttacggtgagctttgccagaagtggaggacctgggggtcagaatgtcaataaagtgaacactaaggtggacatgcgct

SEQ ID NO: 781 - DNA, 384 bp, Glycine max
  unsure at all n locations
  Clone ID: LIB3028-046-Q1-B1-D11
gtcccaaagagctaacaagagattcaagaccggcatggctaatgaagaggaacagaaaaaccacctcttcggcatcaaagatctcggtcacaagactctccttcagagtgatgcactctatcagtatatacttgaaaccagtgtctatccaagagagcacgagtgcttgaaagagatacgcaagatgactgcaaaacacccactgaacatcatggcaacaccagcagacgaaggacaacttctgagcatgcttgttaagctcacgaattcaaagaacgccttggaaattggtgtattcactggttactctctgctctccactgccctggctcttcnccctgatggaaagatcttggctttggatgtgaatcgcgaatactatga

SEQ ID NO: 782 - DNA, 378 bp, Glycine max
  Clone ID: LIB3028-046-Q1-B1-D3
cgctcgagcgccgcccgataaaccacctctccgttctcctctcccccaaaattcaaattccaaatacctaagattcgctaaaatcccttccccgtcgccacatcgcatgaacccttgaattccgattcggataggcatgtccggagcggccttgtcgccgccgacgaattcgaagtcgctgacgcagacggtgagcgggtcgcacaagttcgtgatcgagggctattcgctggcgaaggggatgggagtggggaagcacattgcaagcgacgtgttcaccgtcggaggttaccactgggcgatctacttctaccccgacggcaagaatcccgaggacaattccgcctacgtctccgtcttcatcgccttggccagcga

SEQ ID NO: 783 - DNA, 381 bp, Glycine max
  Clone ID: LIB3028-046-Q1-B1-D4
caaggtttctgattttggcctggccaaattattgggtgctgggaagagttatgtcacaacaagagttatgggaacttttggatatgtggctcctgaatatgcaaatactggccttctaaatgagaagagtgatgtttatagctttggtgttttgctattggaaggaattactggtagagatccagttgactatggtcgaccagcaaatgaagtgaaccttgttgattggctgaaaatgatggttggaaacaggagatcagaagaagtggtggaccccaacattgaggtgaagccatccaccagagctttaaaacgggctctcttaactgctttaagatgtgtagatccagattctgagaaaaggcccaagatgggccaagt

SEQ ID NO: 784 - DNA, 295 bp, Glycine max
  Clone ID: LIB3028-046-Q1-B1-D6
atggaattgggaagttggtcaatctggaatcacaaaggcttagttcatgtactagattagtggagttaacatatgcaatcacaagtcttattatactgaacttccttgtcatctctgagagcgtaagccttagtaagttaccagagatcatgggagagttgcgtactttagaaaatctcaattgcagaagttgcataagatgtgagtgatttgccatactcactcaaggagcttgagagcttatccactgtggtgtatgacgaagagagtgctgcattatggtaaccttgcaaaa

SEQ ID NO: 785 - DNA, 378 bp, Glycine max
  Clone ID: LIB3028-046-Q1-B1-D7
ttcagttccaaacaaaacccatcaaagtctttctccctcagtgatcatatattcattcagttctatacaaaatcctcaaaaactcttcctctctgccatgaccatggaatacagaaccttagaactcaacatcatatccgcaaaggacatcaagaatgttaatctcttctccaagatggacgtatacgccgccgtttcgctctccggtgaccctctccaccctcagggcgccaccacccacgtccacaaagacgccggcagcaaccccacgtggaactaccccgtgaaattctctgtcaacgaatcgctggcgaaggaaaatcgtttatctcttgagatcaagctcatctccgaccgcaccctcggcgacaccgtcat

SEQ ID NO: 786 - DNA, 391 bp, Glycine max
  Clone ID: LIB3028-046-Q1-B1-D8
ctctctctatctctcacacacactttctctctctctctctctcacccagatcttgtagcaatggcgagcgctcccactccacgcgaagagttcgtgtacatggcgaagctggcggagcaggccgagcgctacgaggagatggtggagttcatggagaaggtctccgcctccgccgagagcgaggagctgaccgtggaggagcgtaacctcctctccgtcgcctacaagaacgtgatcggcgctcgccgcgcctcctggcgcatcatctcctcaatcgagcagaaggaggagagccgcggcaacgaggaccacgtcgccgtcatccgcgactaccgctccaagatcgaggccgagctctccaacatctgcgacggaatcctcaaactcctcg

SEQ ID NO: 787 - DNA, 305 bp, Glycine max
  Clone ID: LIB3028-046-Q1-B1-D9
ggaaacccacgcggaccccagcaacaacaacaacatataaacactggtcaaatgcaacatctcacccctatgggaagaggttcacggaggagaaccaccaggggcgactttgtgccagggaaaaacttcctgacgcactagttgttcaccagtgtggtaatagtaattgcctgcatatttggatccgaatctcaactctagtgatcttgttaccggcgtctgctttgcctccggtgcttcaagatacgatcctttgacacccaaaataacgtcagttctatcgttatctactcaactagacatgt

SEQ ID NO: 788 - DNA, 300 bp, Glycine max
  Clone ID: LIB3028-046-Q1-B1-E10
aaaaaagggaagtcctcagcacttcaactctgctgatctctctgctcgaaactacatcgttttacacatctcgtcaagtcaaggttacactcattgagggtcgtgcttcaatagaactgcatttcacgtttgcgcctctatgtgtcacaaacactgaatgcctctcattagctcatatgtgaaggtctgcacaggacagtcgtgatgccgatcttcaatctcctaatggtcaattttaagttagagattaggatgtccccagatgacataggggctctgatattgagtcgtgtcatttga

SEQ ID NO: 789 - DNA, 378 bp, Glycine max
  Clone ID: LIB3028-046-Q1-B1-E11
gaattctccaaacactctagaatttgcatgcactgttcttcatacaatggcattacgcgagcttcttatgatggggatattgctgctggtatgtcttgctaaggtttcatctgatgttaacatgcaaaaggaagaagatgaagaacttcgctttcctaatcaccctcttatcgtgagagacgggaacagaaggctaatgcaagacataggtaagcaaaacaaagtattttggatgctttattaggttaactttgatcctgtgcttccggttttaacttttagattcttactaactagtctccttagtgacattttttaaaaaaaaatttaaaaattatcataaaaatcacatgaaagcctaaaaaaacacaagcaatg

SEQ ID NO: 790 - DNA, 396 bp, Glycine max
  Clone ID: LIB3028-046-Q1-B1-C2
tggggatcgaagccggggagcggaggtgcggcgtcggcgcagaacgaagccatagaccggcgagagcgtctccggcgactggctctggagaccatagacttggcgaaggatccctatttcatgcgcaaccacctcggaagctacgaatgcaaactctgtctcactctccacaacaacgagggtaactacttggcccacactcagggcaagcgccaccaaaccaacttggccaaacgtgccgctcgcgaggccaaggacgcccccgcccagccccaaccccacaagcgcaaagtcactcttcgaaaaacagtgaagattggacgccctgggtatcgtgtgaccaagcagtatgacccggagacaaaacaaagatctctcctattccagattgaatat

SEQ ID NO: 791 - DNA, 389 bp, Glycine max
  Clone ID: LIB3028-046-Q1-B1-A6
gtcgagggactcagcttcttcttcttcttcttcttcttcttcttcttcttcttcttcctcttctcgttcttctctcatccattccatggagcttcagaggcgtccagatcagtgcctcccggtgaggaaagggctgaagaggaagctagaggaggagttcgatgacgacccacagatctccgctcctcccaccggtgacgctcgcgacgccctcctctctgacgttaaggaacaggtttccctcctcgattccaatttctcctggaacgaacacgatcgtgccgccgccaagcgcgccacgcacgccctcgccgatctcgccaaaaacgaggaagtcgtgaacgtgattgttgaaggaggcgccattccggcgttggttaagcatctcc

SEQ ID NO: 792 - DNA, 391 bp, Glycine max
  Clone ID: LIB3028-046-Q1-B1-A7
cgtgacttgcagcaattcccaatggcttccgtttccaagctctcaacgccaaatccacttgcttccttatcagaagcgcttcgcccccgagattctcgcttcctcaccttcaaaccttcttccatcgcttttaatcacaaaactaacctatccgcttccctccgatccattcactcgctccctcttaaaacctccttacggatcaaatgctcccaaacagatgggaatggaagtcctgcaaagaggacagtgcttcatgatctttatgagaaagaagggcagagtccatggtatgataatctctgcagacctgttacagacctgcttcctcttatagcaagtggtgtcagaggcgtcactagcaaccctgcgatctttcagaaagctatct

SEQ ID NO: 793 - DNA, 391 bp, Glycine max
  Clone ID: LIB3028-046-Q1-B1-A8
cttgttccttctccttgtgatcttcttcaaccttcagagtgagaaaacacattcagaaaccacgtttctctcttcttcttcttcttcttctttttcttctctcgaggtcattattaagtattcaccatggaggcaccatctcccaccaaacccaacgacccaacaaaaccttccaacacttccaccacccttagtctggaggccggcccggcccaagcgagcccactccgaaaaatgtttgccgtggcgtccatcgccgccggcatacagttcgggtgggctctccagctctctcttctaaccccctacgttcagcttttaggagtcccccacgcggcggcctccttcatctggctctgcgggcccatctccgggctcgtggtacaggcca

SEQ ID NO: 794 - DNA, 292 bp, Glycine max
  Clone ID: LIB3028-046-Q1-B1-A9
ttaagaatggcactttctcctattcgttcttctactttctcttcatcatcagctattggtacattacctgtgtaattcctcctaacagggactccttaactatcctcccaaaggacttctaatccaagacatgtccaaacgttttcaacacggtgaaatctgtattaaaatctgctgtggccaaagaacctcgcattggagcttctattgttcgcctcttcttccatgactgcgttgttcaaagttgtgatgggtcaatactacatgatgacactccaaacttccacggggg

SEQ ID NO: 795 - DNA, 370 bp, Glycine max
  Clone ID: LIB3028-046-Q1-B1-B1
tggagacttgcagatagacttcatgtattatgtgaattccgaactcctggtggcatttcagtgtgatcatcaagcttctttcaagtacaaatataagttcctcagagcaacaacttctaatatgcctagcagtgttattaaagaaaatagaggaagtaagttaagcattgggagaggtggaatgttaaaagtccagcatctggtttcaattgccaaaccatctgtgtcacacccatatgctgattcggttggctatcagcaaccaagtagaatagctcatattgaattctttgtgaaaccagatgaaagtgaggactgagtgaatgattattagttactataaagactccgtcaagttttgctatgcaaa

SEQ ID NO: 796 - DNA, 380 bp, Glycine max
  Clone ID: LIB3028-046-Q1-B1-B10
ctccaaacccaccacaccaccattattcatatctcattctctaacctttcactctgccttactcactctctactttgctcatcatcgtagatgaaccaacacttctagtctctcttactttataaccatgtaaaaatgagtcacctaatgaaaaattagtagcttcttgttgtgctttttattttgtttgtgttgagataaatttgtttgtttgtttggtattgttttgtgttttatgaattatttgatgggtgaagaaggagaagtggtgagaaagcaaggacaaaggggtgttggtggagataagtggtacttgtatagctgcttacaagactgtaaatattggtgctgtttaatacacgagactagttctctttcga

SEQ ID NO: 797 - DNA, 384 bp, Glycine max
  Clone ID: LIB3028-046-Q1-B1-B11
agaagagggggtggaaggtgctggatttgatgatgagaaatcactacttatgtcacaaatgagcctcgagaaaaggtttggtcagtctgctgtctttgttgcctctacactcatggagaatggtggcgttcctcagtctgcaactccagaaactcttcttaaggaagctattcatgttatcagttgtggttacgaggataaatcagaatggggaagtgagataggatggatctatggttctgtcacagaagatattcttactggattcaagatgcatgcccgaagttggaggtctaattactgcatgcccaagctcccagcgtttaaaggttctgctcctatcaatctttcagatcgtctgaaccaagtgcttcgatgggcttt

SEQ ID NO: 798 - DNA, 383 bp, Glycine max
  Clone ID: LIB3028-046-Q1-B1-B12
ggcggggctacccgctgagtttaagcatatcaataagcggaggaaaagaaaaaaaaaaaaaaaagaagggaacttattgcaagcgagggaaagaaaagaaaaagaagcaaagtcaacttttgctatgtttggtttggctgggacctttgtggaccaaaagaatcgtctactagatggatagggaccttttctgtaaatttgacacaaaaaaaaaaaactatgaaatagtagtactatacttactttttttttattcttgtttttccaacttaatttactagacattcatttactctcagcaatcaaaaaataatttaaatttttataaaattggataaatggcatgaaattggttggactttaggccacccacctatttattg

SEQ ID NO: 799 - DNA, 374 bp, Glycine max
  Clone ID: LIB3028-046-Q1-B1-B2
tgaggagatgatgataacgtgacgaattatgtgaagtccgaactcgtggtggtatttcaatgtgaatatcatgcttcgttcaagtataggtatgagttcctcagagcatcaacttctcatatgcctagcagtgttattaaacatgatagaggaagtaagttaagcattgggacaggtggaatgtgaacagtccagcatctggtttcagttgccaaaccatctgtgtcacagccatatgctgattcggttggctatcagcaaccaagtagaatagctcatattgaagtctttgtgaaaccagaggaaagtgaggactgagtgaatgattagtaattactataaagagtccgtcaagttttgcgatgcaaaccatt

SEQ ID NO: 800 - DNA, 278 bp, Glycine max
  Clone ID: LIB3028-046-Q1-B1-B4
aaaggaaggggctttttggttaagtcatgggctccgcagccacaggttctggcccatcaatcaacgggaggattcttgagccattgcggctggaactctatactggagagcgtggtgaacggcgtgcctttaatagcctggcctctgttcgcggagcagaggaccaacgcgtttatgctcatgcatgaagtcaaggtggcgctgaggcccaaagttgccgaggacactggacttgtccagagccaggaaatagccagcgttgtcaagtgcctcatgga

SEQ ID NO: 801 - DNA, 379 bp, Glycine max
  Clone ID: LIB3028-046-Q1-B1-B5
atcttgtcaactgaattgacaaatttggccttttcaaaaactgataaaaaaaaaacttatatttatatattcaacttctcttttattcgatttttcttcctgtctctttctttattttccattgatcataactattaatttcacctatataccctaaaaaggatgtgtatggttaatattttcatatgttataacttttttaaacacaattaataatcagtcacttaaaacttcttcatttgatattatatgcattcatcccaacagaatgtgcatttcttaattctaggatgctaatttattgaaaaggtcattcttaaataaataaatgtattaaaagttttacataaccagtaatcaaaaataaactaaagacatg

SEQ ID NO: 802 - DNA, 383 bp, Glycine max
  Clone ID: LIB3028-046-Q1-B1-B8
tgaaaatttacacacatgcacacacacacacagaaattgagcgtgaaaaccactagcattttacagggctatatacttaaatagtgttgaattttacacttgtgttgttccctttagtactcgagacatttttcgttctgtcgtatccctttctacggctctatagtttcctctgaaccttttcttacttgccttcctaaagcttccttccaagcccttggcacatgatggaatgttcactattgaatcgagattctctgcatcgcaaaatatttagtttctattttagatcaccaaatttaattttagcttaccctacactttatattggatctgttggtgtcctatcatttgcagtatatctggattgtatcgataaacag

SEQ ID NO: 803 - DNA, 381 bp, Glycine max
  Clone ID: LIB3028-046-Q1-B1-B9
gtgttgtgtccctcttttaagctatttccttctcttaacacaattggttgtgccaattgccatagtcaccaaccaattaacaaaggtatatatatcatcatatcatcaccaaatgaaaaatattgggttgttttttcttgtggtggtggctacttttgtggtggcagccacagctggtagcttttaccaagactttgaaataacgtggggtggtgagcgtgccaaaatctatgagaatggaaaccttctcacactctcccttgacagagcctctggctctggctttcgttccaaaaaagagtacttgttcggaaaaattgacatgcagctcaagcttgtgcctggtaactctgctggaacagtaactgcctattatttatc

SEQ ID NO: 804 - DNA, 289 bp, Glycine max
  Clone ID: LIB3028-046-Q1-B1-C1
ctctgctgagacaacaatggcgatggctttcaaaatggccactactgggatgtgggtgacggatgagtgcaagaactctttcatggaaatgaagtggaagaaggttcatagatacatagtcttcaagatcgatgagaagtcaaggcttgtcaccgttgataaggtgggtggtcccggcgagagctatggtgatctcgccgcctccttgcccgacgatgattgtagatatgccgtattcgactttgatttcgtcaccgtcgataactgccgcaagagcaagattttcttc

SEQ ID NO: 805 - DNA, 309 bp, Glycine max
  unsure at all n locations
  Clone ID: LIB3028-046-Q1-B1-C10
gcctctctgttccaaaaccctaatccttcgtcttccaaggagatggctgattctcccctcgcaaggaactcaaggtcaccttccccatggaaagctcagtcgagatcgagatctaggtcaaggtcgagatctaggtcgaggtctaggcctagacaaaggccaagatcgcgttctagaagtcgtggcaagtcaaggtcaccaattcgtggnaggtcaaggtcaccaattcatggaatgtctgaacctacaaatcctggtgacacactttatgtaactggtctatcctcgagggtcaccgaaagagaccta

SEQ ID NO: 806 - DNA, 385 bp, Glycine max
  unsure at all n locations
  Clone ID: LIB3028-046-Q1-B1-C11
ctttggtacatgaaaagcctgatgctgctcctacaatggacaggatccaaccaggtttggatgattctgaacgggatttgcaggccactagacatgcaagactgagtaaacatggtcatgaaaaagcactctctgttcaggaagatgctacagaagccgttgtattaaaacaaaagtctacaagacggaagcactcaaaatcaagatctactcaagatgatgccagtaatgaagatgctgaagttgtgagaaaaccaaggagtaggagacgagatgaacaaaaacgtggcctgcaaattttgtttgatgatgagcggcacaaaaacgatgaagaggaaagggtaatagatagattactgatccattatagcanaaaaccatccat

SEQ ID NO: 807 - DNA, 168 bp, Glycine max
  Clone ID: LIB3028-046-Q1-B1-C12
cacgattatgtttatcatggtgcttttgagagggagtggaatacggtgaaacatatcaggatttcctcttttctaacatgttgccaacaaagaaaaaaaggaatgggcaaacattacaaactattttctagaaagcacatgaatgccatgcgacaataatactgactc

SEQ ID NO: 808 - DNA, 377 bp, Glycine max
  Clone ID: LIB3028-046-Q1-B1-A5
catcaacttgttcggtggcagcagctgatcatgcaggaaactacagcacttggcaaagtactactgatttcgttgatttgaagggaacaaggtcttgtgctgagctggagactgataataacttgagttttcttgatgctgagaagccacagcagagtgaaagtggtagcatcttgatcaattccaccttacaaatgatgggttttggcaagtcatcttcaacttcatcgaattggaatcaatctttattagggagcggttttgattctgtgcttcaagaagaaacaggcataggtggtggcagccaagtttccaccgttgatgctttgaagccaatgaaccaagaattttccttggatcagcagagtctgaattct

SEQ ID NO: 809 - DNA, 274 bp, Glycine max
  unsure at all n locations
  Clone ID: LIB3028-045-Q1-B1-H1
gtgctttaactaaccagctgtgaaggcttgtcggttgtgtagtagtagtttacaactttacatacataagtgataagtccttcactgaaagaaagcactgcattaaggccaagtcaccactctcctcttccattggtggatcnttttttttctctcttttaatagggaaaccattggtgtgtgtttcagctttgctgatccttctgttgtttctgccaatctctgttagtantttagaccttttgatatacgaagccttcaattacaatgcttt

SEQ ID NO: 810 - DNA, 368 bp, Glycine max
  unsure at all n locations
  Clone ID: LIB3028-045-Q1-B1-H10
ctccgccctagacatgtcgataatctcgtacgacagcgcccacgcggacaaggccgccacgttgcgcaccgangangagctgatgtccatgtacgagcagtggctcgtgaagcacgggaaggtgtacaacgcgctcggcgagaaggagaagcgcttccagatcttcaaggacaacctgcgattcatcgacgaccacaactccgcggaggaccgaacctacaagctcggactgaaccggttcgctgatctcaccaacgaggaatacagggccaagtacttgggaaccaagatcgattccaaccggaggctcggaaagaccccgagcaaccgctacgcgccacgtgtcggcgacaaattgcctgattccg

SEQ ID NO: 811 - DNA, 418 bp, Glycine max
  unsure at all n locations
  Clone ID: LIB3028-045-Q1-B1-H12
tacgcattaactcaactctgaattcggctctagaaaatggcggtgcctctactctcgaagaagatcgtgaagaaaagggtgaagaagttcaagaggcctcagagtgacaggaaaatttctgtcaagacaaactggcgcagaccaaagggtatcgattcccgtgttaggagaaagttcaagggatgcactttgatgccaaacattggttatggttcagacaagaagacccgccactatctccctaatggttttaagaaatttgttgttcacaatgtgaaggacttggaactgctcatgatgcacaacaggacttactgtgctgagattgcccacaatatatccacaagaaagaggaaagatatagttgagagagccgcgcagcttgatgttgttgtgacanacaaaacagccagattac

SEQ ID NO: 812 - DNA, 406 bp, Glycine max
  unsure at all n locations
  Clone ID: LIB3028-045-Q1-B1-H2
gggatgtgtcttcacatatgatgctgttggttcctatgagagggttggatatagctctcagggttctggatccacacttattatgccatttcttgataaccagctgaagtctcctagcccactcctgttacctgcgcaggatgctgttactccattgtctgaagcagaagcagttgatctggtcaaaactgtttttgcatctgcaactgagagagatatatacactggagataaggttgaaatcgtcgtcctaaatgccagtggtattcgtcgtgaatacatggacctaaggaaagattaatgctttacagaaatttactgttggagatnacagacttggattgagaatgtttgaaatgcttctagaattttaaatgacatagtgggtttttcacatgaggtgaaa

SEQ ID NO: 813 - DNA, 305 bp, Glycine max
  Clone ID: LIB3028-045-Q1-B1-H4
agagtcttcagtttctcctcgttgttcttcgctttcctgttttcaatttcgattctttcgttaatttaataagatgtttgggagggcaccgaagaagagcgataatacgaggtactacgaaatcctcggcgtctccaagaacgcttcgcaggatgatctgaagaaggcttacaagaaagccgccattaagaatcaccccgacaagggcggtgatcccgagaagtttaaagagctggcgcaagcttataaggttctgagtgaccctgagaagcgtgagatatatgatcagtatggtgaagatgcgc

SEQ ID NO: 814 - DNA, 390 bp, Glycine max
  Clone ID: LIB3028-045-Q1-B1-H5
attgaaatctagttatatggatgataaggacaaccttgcaatatactatgtggtaataccttgtgctgtgctgtccttgttaattcatccaacaacccggcatcatccacttaataggattctctgggcattttgtgtttatcttgaagctgtttctgttctccctcagctgcgggtcatgcagaacactaagattgttgaaccattcacagcacactatgtttttgctcttggagttgcaaggttcttgagttgtgcacattgggtcctccaggtattagatactcgtggacgtctactgactgcattgggttatggattgtggccttctatggttcttctatcagaaattgtccaaactttcattctggcagatttttgctactacta

SEQ ID NO: 815 - DNA, 403 bp, Glycine max
  Clone ID: LIB3028-045-Q1-B1-H6
ggaaacgttatcacaaattggattgttcctccgaacagtgaaccctcacctaacaatcagaacccaggatttggtgaaacgatgaacagtgataggaaaattggggttgccttggacttttccaaaggaagcaaaatcgctctgaaatgggctattgacaatcttatcagcaacggtgacactctctacatcgtccacaccaagccttccggaggaagtgaatcaggaaatcttctctggtccaccactggttcacctctgattccattgtcggagtttcgtgaaaaggaggtgatgcgtcactatgaggtggatactgatgctgaggtgttggacttgcttgacaccgcttctaggcagaaacaggtgaatgtggtggcaaagctatactggggggatgcaa

SEQ ID NO: 816 - DNA, 357 bp, Glycine max
  Clone ID: LIB3028-045-Q1-B1-H7
cgaccttattttggagccgcggtggcggtagcggtggccggcgattgtagcggcgtaggagcaagaaatggttttatgttgtgaggaagattgttaagctgtgggaatatgtcattgagaagcatagtccgtgaactcaaggagatgagagatggaataggaagcacatcaaagcggggtgcagaaagcaagcatcggctcagtcggacaaagtcacatgtagctccagatgttcttgcaactccatttgaacctattcaacagggacaatgggcaaatctaccatcagaattgcttttggacataatccagagggtcgaagagagtgagacatcttggcctgcccgtgctgttgtt

SEQ ID NO: 817 - DNA, 396 bp, Glycine max
  Clone ID: LIB3028-045-Q1-B1-H8
gccttgtgtcaaggcaactaaagcttctctcgctttgcaagagagggaggagtgagtgagatggaaggagtgatacacagaacagtggaagtgaatggcataaaaatgcacatagcagagaaaggagagggtccagtggtgttgttcctccacggcttccctgagctctggtactcatggcgccaccagattctctctctcagctccctcggctaccgcgccgtcgctcccgatctccgtggctacggtgacaccgaggcaccaccttcaatagacagctacacttgctttcacatagtgggtgatctcgttgcgcttatagactctctgggtgtccaacaagtgttccttgtggctcatgactggggagccctcatgggttggtatctgtgcatg

SEQ ID NO: 818 - DNA, 384 bp, Glycine max
  unsure at all n locations
  Clone ID: LIB3028-045-Q1-B1-H9
ctcgagccgaatcggctcgagcaggtgatgcgaggaacatacaagggtcgcgaggggaaggtgactcaggtctaccgtcgaaagtgggtgattcacattgagcgcataacccgcgagaaggtgaatggttccaccgtcaacgttgggattcacccctccaaggttgtgctgaccaagctcaaattggacaaggaccgtaaggccattctcgatcgcaaggccaagggtcgcgccgccgccgataaggagaagggtaccaagttcgctcccgaagatatcatgcaaaccgttgattagtctcttttgcccccttatcatacaaacaaattttctctatgggttttgctaccctttttctattgcangattttggtttttcttgtg

SEQ ID NO: 819 - DNA, 251 bp, Glycine max
  Clone ID: LIB3028-046-Q1-B1-A10
gcatgaaacatgaagctttttttgttgacttttgtgaagtttgtgttttgaacctatgtagtctgctgttgtcctcacacaagaaggcataacatattttagcttggcatgcagatttatcaatcttgtgtgaattttttgccgtagcttttaaagttctaaccatccttgatgatgtagcatattgcttaagtgtgtattatgtgtcttaaggtagttgcgtaatgaagtagtgatttatttcgctccgc

SEQ ID NO: 820 - DNA, 375 bp, Glycine max
  Clone ID: LIB3028-046-Q1-B1-A11
ctcgagccgctcgaactgcagggaaattccatcaacggtacgattccttgggacgttggacactgccagaagttgattttactgaatctgagtcgaaactcactcaccggtatcattccctgggaaatctcagctctcccttccatcaccgacgttgatctctctcacaattcactcaccggaaccattccttcgaacttcaacaactgctcaacgctcgagaatttcaacgtcagcttcaactccctcaccggtccaattccgtcgaccggcattttcccgaacctacatccttcctcctactccggcaaccagggcctatgcggcggcgtgttggccaaaccctgcgcagccgacgccctctccgccgccgac

SEQ ID NO: 821 - DNA, 380 bp, Glycine max
  Clone ID: LIB3028-046-Q1-B1-A12
ggacgagatccctctctctcccattccagatctcgccatcagattcaccctttcattttaagcaaagtcataacttgaagaaggttcatggctgctccaccggcaagggctcgtgccgattacgattatctcataaagcttctcttgatcggtgacagcggtgttggaaaaagttgcctcctcctgcgtttctccgatgggtctttcaccactagtttcatcacaactataggcattgattttaagataagaaccattgagcttgatggaaaacggatcaagctccaaatttgggatactgcggggcaagagcggtttcggacaattacaactgcttactatcgcggtgctatgggcatattgctagtctatgatgttac

SEQ ID NO: 822 - DNA, 393 bp, Glycine max
  unsure at all n locations
  Clone ID: LIB3028-046-Q1-B1-A2
ctcgttcgctatggccactgttctcagaacccccaccttccggccaccgcctccgccgcgcgccgcatagtcgccgaaaccatcgcgcttcgccgtcgtgtccttcagacagagcaccacctgcgggagaaaaccctcctcgcttctctcctccctgccgttccctaatgttccctctctacggttcgtcaggttcgttcccttcgctttcgacggcgacaccgaggccccgcaagttcaggagccggaggttcaggttctggacccttcagatggtgctgttggtgtaaacgacagtgcaagtgataatgaggttagtgatgctgatgaaacatttgcttcanctttcttactgttacttcaatcctacaaagaagcattagctaataacga

SEQ ID NO: 823 - DNA, 357 bp, Glycine max
  Clone ID: LIB3028-046-Q1-B1-A3
gaaaaatgtcgaagctgatcttcgtgttcctttcgctcattcctcttctctgcacctccttctccccagagagaccctcagatcgacgcgtcctcgttttgctcgatgacttcgccatcaaatcctctcattctctcttcttcaactccctcaaatctcgcggcttcgatctccaattccacctcgcagacgaccccaaaattgcgctccagagatacggccagtacctctacgacgccctaattctcttttcccccaccattgaacgttttggaggatccattgacgcggctgcaattttggattttgttgattcgggtcatgatttgatcgttgctgctgatagcaatgcatctg

SEQ ID NO: 824 - DNA, 395 bp, Glycine max
  unsure at all n locations
  Clone ID: LIB3028-046-Q1-B1-A4
agttcattctctttgcgcagttccctacctctcctttcaagatgcagatcttcgtcaagaccctcaccggaaagaccatcacccttgaggtggaaagctctgacaccatcgacaacgtcaaggccaagatccaggacaacgaaggaattcccccggatcagcaacgtctcatcttcgccggaaagcagctcgaggacggccgtaccctcgccgactacaacatccagaaggagtcaacccttcaacttgtccttcgtctccgtggtggcatgcagatcttcgtcaagactctcactggcanaaccataaccctagaggtcgaaagctctgacaccattgacaacgtcaagggccaagattcangacaacgacggaatccccccagaacagcaacg

SEQ ID NO: 825 - DNA, 404 bp, Glycine max
  Clone ID: LIB3028-045-Q1-B1-G8
cgaagaagacagtgaggatgaaagtgaggaggaaccctccaaaactcctcagaaaagagacagggatgtggagatggttgatgctgcctcgtctggaaagaaagcgcctaagaccccagttacacccaaagaagaaactggcgcttcaaagacactatttgttgggaacttgccatttagtgttgaacgagctgacgtggaagatttcttcaaggatgctggagaagttgttgatgttcgatttgctacagatgatactgggaagtttaaaggatttggacatgttgagtttgcaacagcagcggctgctcaaaaggcccttggattgaatggacaacaattgtttaatcgtgaactccgacttgatttagctcgggaaaggggtgcatatacccccaacagca

SEQ ID NO: 826 - DNA, 368 bp, Glycine max
  Clone ID: LIB3028-045-Q1-B1-F11
gagactgaagattgaagaacagtcgtcggctcctcgctcgcccttcgctgctgcgccatcaccgtgcccttctcaaagcgattttaacctaaccgcgttctttttttcttcagaaatcgagcataaggatttgaggattgaagtattgaacaccaaatcctttatacttgttgggcaagaagggagggaaaaaggagaaacacaaaaatgtttttccacatagtgctggagcgaaatatgcagctgcatccacgctactttggtcgcaaccttcgtgataatctcgtttccaagctaatgaaagatgtggaaggcacttgcagcggccgacatggatttgtggtggcagttacagggatagaaaacat

SEQ ID NO: 827 - DNA, 385 bp, Glycine max
  unsure at all n locations
  Clone ID: LIB3028-045-Q1-B1-F12
aaaagaagatgacaatttatgtgttagcattatggctgcaattgtagctatatttactgagacaaatgcaggcgcttggaaaataggagtggatacagcattggcttccatagtttgctctggaatttttggttcattcgtgaacaatgtagttcacacatgggtactgcgtataaaggggcctgtctatgtagcaatgttcaagccactctcaattgccatagctgttgccttgggagtcatgttcctgggtgatacactccaccttgggagtatagttggagccacaattaaaaccaatgggttttatactgtaatgtggggaaaaacaaccganagagaatgtgggggaagatgtcnctggccagcaatcaccaaccacaga

SEQ ID NO: 828 - DNA, 344 bp, Glycine max
  Clone ID: LIB3028-045-Q1-B1-F2
ctcctattgctgctgttatagtttttcatgataagatgaatggggtgaagataatttctatgcttttggctctatggggttttgcctcttatatttatcagaattatcttgatgattcaaagacaagacatgcacaagctgctactaagtcccaaaatgattcttcatgttgagaatattcaatttggtcatacctttgtcgaagtttccttttttctttttagatttaaatccttcagtacaccatttggcagctttagattttaattttccttcagtctcactgaacttgtgaggtagtatagttatgaagttattggtcattctagattattgttctctca

SEQ ID NO: 829 - DNA, 380 bp, Glycine max
  Clone ID: LIB3028-045-Q1-B1-F3
gcgttggttgcgattgaaacggtacgatgggaagaggaaaattcaagagcaagcccaccggtcgccgccagttctccaccccggaagatatgcttgctggaacctctaaccgtcctcgaacttttagacagaaagaagctgagcatgaagaggagcctgaggaagtatctggggatgaatctggagaagaatcagaagaggaaacttctaagaaaaaaggaacacaaggagttattgagattgaaaatcctaacttggtaaagccaaagagcttgaaagctagagatgttgatgttggaaaaacaacagaactttcaaggcgtgaaagagaggagatagagaaacagagagcccatgagcgctatatgaggctgcaagag

SEQ ID NO: 830 - DNA, 395 bp, Glycine max
  Clone ID: LIB3028-045-Q1-B1-F7
caaaaccctgaagaaagacacagccattgtttacttttcattgattgagccaaagctttgtattttctgcgataattttccattgggtggaagaaagtctcaacctttattcgaaagagcaaggatctgagttgagttgagtgatcatgtgtggtggtgcgattatctccgacttcataccggcaggtcccgccagcggggcgcggcgcgtgaccgccgacatcctgtggccgagtttgaggaagcgcttctcgaagccgctgctggacgatgatttcgaggctgggttcagagaattcaaggatgattcggaaatcgaggatgttgatgacgaggacgatgaagacgaagaggagttgaagaagaagccctttgggttctctcgctccagcaac

SEQ ID NO: 831 - DNA, 257 bp, Glycine max
  Clone ID: LIB3028-045-Q1-B1-F8
aaggactaaagataacaatttgttgggcaaatttggactttcctgcattccccctggccccaaggggggtccccaaaataacgggtgccttgacaatgatgccaatgggaatttggacgtccccggcgaagattagaccaatgggcaaaaaaattagattaccaaccacaattgcaagggttaaccggccaagggaaaattccgaaaaaagggttaaaagggctgaaatttaaaactcaggggttaaagcacacaaa

SEQ ID NO: 832 - DNA, 372 bp, Glycine max
  Clone ID: LIB3028-045-Q1-B1-F9
cgttcctcgtggttccttcctttgtgtctctctctcttcggacacaaagcaacgctttccatttccatgtctctgtctcttcttcgtatctactcttccccccaccttctttcctcctctctcttctttccaaccccacctctctcttctttccttcccaaattaccaaatgccccccgcactccccacattgttttatgccaccgtagggacgcctcctcagcttcgaagcagcgagtcccagaagatacagaatacgaacaacccatgaggaccagttacgacgacgacgaagaagaagaagaggaatttcttggctccttagttttgcctgaaagatgggatgtactgggtctcggtcaagccatggta

SEQ ID NO: 833 - DNA, 381 bp, Glycine max
  Clone ID: LIB3028-045-Q1-B1-G10
cgtaacagcaatggagctgtcttcaagtgcatttgtggtaatattgttggcagtcgcagctacagcagtactctcaaatgggttggatctatctttcttgcccagcgatttcctctttggcattgcttcttcctcttaccagtatgaaggagcttacaagagtgacggcaaaggactgagcaactgggataactacactcacggaccaggtagaagtgtaataatggatggaagcaatggggatatcgcgattgatcattatcatcgctacctggaggatatagatttaatggaaactttgggagtaaacagctaccggctatccctgtcatgggcaagaattctaccaaagggtagattcggagaagccaacatgctggt

SEQ ID NO: 834 - DNA, 307 bp, Glycine max
  Clone ID: LIB3028-045-Q1-B1-G11
ctgaatctgagtcgaaactcactcaccggtatcattccctgggaaatctcagctctcccttccatcaccgacgttgatctctctcacaattcactcaccggaaccattccttcgaacttcaacaactgctcaacgctcgagaatttcaacgtcagcttcaactccctcaccggtccaattccgtcgaccggcattttcccgaacctacatccttcctcctactccggcaaccagggcctatgcggcggcgtgttggccaaaccctgcgcagccgaaggccctctccgccgccgacaaccaggtcgac

SEQ ID NO: 835 - DNA, 381 bp, Glycine max
  Clone ID: LIB3028-045-Q1-B1-G12
tctctctctgtctctgcgatggagtttcgcgtttccgtcatttggagccttctcctcattgtctctttattctctcctgaaatcaatggtgaggcttctggttccgtcttcttcgtcgatagctccagtaatcaattccttcgcgctagatcatccaacgatgagcaaccttcaatgttgcttcaagaagttggtgctgctgtgtcagtcttgcttggttttgcacctccttccaccttttctgctgccagctcatccaagttgaatgaggttctaattcctaacccattcaagaggccccgtgctgtgtttttgctggaagtaaatggaatcaatgctcttggaaaaattgtccaggataatccaatgttcagcaattca

SEQ ID NO: 836 - DNA, 378 bp, Glycine max
  unsure at all n locations
  Clone ID: LIB3028-045-Q1-B1-G2
tgttctcagaacccccaccttccggccaccgcctccgccgcgcgccgcaaagtcgccgaaaccatcgcgcttcgccgtcgtgtccttcagacagagcaccacctgcgggagaaaaccctcctcgcttctctcctccctgccgttccctaatgttccctctctacggttcgtcaggttcgttcccttcgctttcgacggcgacaccgaggccccgcaagttcaggagccggaggttcaggttcntggaccttcagatggtgctgttggtgtaaacgacagtgcaagtgataatgaggttagtgatgctgatgaaacatttgcttcanctttcttactggtacttcaatcctacaaagaagcattagctaataacgacga

SEQ ID NO: 837 - DNA, 294 bp, Glycine max
  Clone ID: LIB3028-045-Q1-B1-G3
gaaggccccccgcacggggcccaactttggtccaaacggaaggccaagttcggttgcgggcaattcaagaagacaaagggtggtccgggtggcctgtccgaatcaggggtcctggggcgccggaatccgcccagttccagtggatgaatgggtatgaagttgaactccattccgatgacgaagacatacacattttgctacatagattggttctcaataccaactcagtgcatgcatcctttgtccctctggaaatgacatcaagtttcataagatcgcatccccaataacaat

SEQ ID NO: 838 - DNA, 399 bp, Glycine max
  unsure at all n locations
  Clone ID: LIB3028-045-Q1-B1-G4
cggcggcggccccgacctcatcgtcgacgacggaggcgacgccaccctcctcatccacgagggcgtcaaggccgaggagctctatgagaagaccggggaactccccgaccctaactccactgacaacgccgagttccagatcgtgcttaccatcatcagagatgggttgaagaccgatcccaccaggtaccgcaagatgaaggagcgtctcgttggggtttctgaggaaaccaccactggtgttaagaggctatatcagatgcaggcgaatgggactctactcttccctgctattaatgtcaatgactctgttaccaagagcaagtttgacaacttgtacgggtgccgtcactctctcnctgatggtctgatganggctactgatgtgatgattgctgg

SEQ ID NO: 839 - DNA, 397 bp, Glycine max
  Clone ID: LIB3028-045-Q1-B1-G5
gccacgctgaggcctaagatctccgaattccaagcgcctcttgatagggtctcccaccctaaccaagccagatcccgttttcaattccttctcagtttccttttctctgaaaaaacatgttgagggttgcagctagaaggctctcttcttctctctcatcttcttctccgttgcggcccaatcacgccgcttccgcttttctctctcgaaacgacgtcgtcgtcgatgaccgcagatctgctccttcctcccatccccttcttcccttcagaggttatgctactgaatccctgatccacacaaaagaaaacagcattactcctgagattccgccaactgttactgctgttaagaaccctacttctaagattgtctatgatgatcacaaccatgaaag

SEQ ID NO: 840 - DNA, 398 bp, Glycine max
  Clone ID: LIB3028-045-Q1-B1-G6
gttttcacatgagcagcagcaagttgaatatactcaacagccagggaattctctatcacagcagcaacaagatgcagcaatgtcgttacatgagtatttcaagtctccagaggcaattcagtctttattgagtgatcgggacaaactttgccaacttttggagcagcatccgaaattaatgcagatgcttcaggaaaaattgggccaactgtagccgcatgatgatgaccaagtagaactgtttcatgtctgtaaatgtccattcattatccaaatgatgagttgcgctgatgcttatgcctcagggcattgaaattttgttaatatgtactttctgggttcatttttttatttttatttttaaatttcaatgagcacaatattgatgcccaatatat

SEQ ID NO: 841 - DNA, 328 bp, Glycine max
  Clone ID: LIB3028-045-Q1-B1-G7
gagaacgagaggaggggttcgggtgtgagagcgagaatcagaagatgaagaaggaagacacattgaacctgataattgccaaaggttttgaatttgtggccaacaaagaacctgcaatggttccacagcccatacataacaggctaatttctccagagatttcctcagagaggcaacacggcgaatttacctttcctgatatcagcaccaccattctcgagaagatttgccagtacttttagtggcatctccaattcgccagtgaaaaggacacggaatttcccattgaacctgaattaactctggagctaatgatggctgccaatta

SEQ ID NO: 842 - DNA, 303 bp, Glycine max
  Clone ID: LIB3028-045-Q1-B1-F10
taattttttttctccattagattaccaagctctgcaactttgcttctcaacatggagtatcgtctcctacccatttttactttactcaatattgcactggtggcaacccatgctgctttaccccctgaagtttactggaagtcggtgcttcctactacgccaatgccaaaagccatcactgatatcctttactctgattgggtggaagagaaaagcagctcagtgcatgttggaggtggaggcgtgaacgtgcatacaggaaaaggaggtggcagtggcaccactgtcaacgttggtggaaaa

SEQ ID NO: 843 - DNA, 396 bp, Glycine max
  unsure at all n locations
  Clone ID: LIB3028-045-Q1-B1-D3
tttttattctacctaacaccacatggatacgttgccggaggattgtgtttccaaaattctgtcttacacatctccaccagacgcatgtagattctctatggtctcttcaaccctacgctcttccgctgactctgaccttctctggcgaactttctttccttctgattactctgacattgtctcaaaggctctcaaacccctcccccttaattcctcttcttcatacaaacaccttttctatgctctttgtcatccactcctcctagatggaggcaacatgagcttcanattagacaagtcttcgggtaagaaatcttatatcctatctgcaaggcagctttctataacgtggagcaatgaccctttgtattggagctggagaacagttcctgaatc

SEQ ID NO: 844 - DNA, 399 bp, Glycine max
  Clone ID: LIB3028-045-Q1-B1-D4
aaaaaaatttacgctgataatataaaaccattaaacaatttggtttaagtggtactcaaaaccttattttgaatcaagaaatataccaaatataataatgaaatcatcaaaacttatttttaaccaaggtattataatgataataacttgagactaaatatgtattataatgatcgtcagtatttacgggaccaaaactaaaacttcaagggcgttgtttatagatatagacatacagcccatgagtaaacggggatccaaaatattaaaaatatagcttaatagtttttttttctatattatttccacaaatagtttgaaattttatcttgttttatgtcctttttatccaaataaatgtaataattagaaaaatctcttgggtattttttttgttac

SEQ ID NO: 845 - DNA, 392 bp, Glycine max
  Clone ID: LIB3028-045-Q1-B1-D6
ctcatttcttgttctcctttgctagcaaacgctagaggccaccatcatgcaggtggccatcatctagggttggtagggcaaatctgcacggaactcatccaaaaccagacgacttgcacggaccttgtaaaggcagcagatcctaaaattgcacaggcaaagacattccaagagcttgcacaggcagtgctagaatttgccgtgaacaagggaatagagggccaaaccttcctcaagggcttggcactgattgagcaatcaccagccattaaggaatgtgcaaactttttctatgatggggtggttggatccttccgtagtgccttacgtgagttgaaagaagatgctcagaccgctagctatgatgccaaagccgcttatgatggccctga

SEQ ID NO: 846 - DNA, 387 bp, Glycine max
  Clone ID: LIB3028-045-Q1-B1-D7
gacaggtttggcattgttgagggtttgatgaccactgttcattccatcactggtgagcctattgctcgcaatttgattggttgcatgccttttactgtgttacctattatgatatgtcttgcatatccggtttatgtttttgttttgtaaaccagctacccagaagactgttgatgggccatcagccaaggactggagaggtggaagagctgcttcatttaacatcattcctagcagcactggagctgccaaggctgttgggaaagtccttcctgctttgaatggaaaattgactggtatggcattccgtgttcccaccgtggatgtctctgttgttgacctcacggtgaggctggagaaggaagcctcatatgatgaaattaaaaa

SEQ ID NO: 847 - DNA, 398 bp, Glycine max
  Clone ID: LIB3028-045-Q1-B1-D8
attggtcttgaattcagtgatgtatatacagcacttggaagtgaggttacttttatagaagctttagatcaacttatgcctggatttgatcctgaaattagcaagttggctcagagggtccttataaatccccggaatattgactatcatactggagtttttgcaaccaagatcacgcctgcaagggatggaaaacctgtcttgattgaacttattgatgcgaaaaccaaggagccgaaagacacgctggaggtggatgctgcactaatagcaactggaagggctccgttcacacaaggtcttggattggagaatattgatgtggtaacacagcgtggttttgttccagtggatgagcacatgcgagtaattgatgcgaatggcaagctggtgcctca

SEQ ID NO: 848 - DNA, 381 bp, Glycine max
  unsure at all n locations
  Clone ID: LIB3028-045-Q1-B1-D9
gggtctgtctctttcatccttcaattgtggttagtttattcttaattgcagagttgaatcaagtttttattttttttatatgggtttgtgttattttattgggaaaggaagacttattctggtattgacttggcctttgggattcccactactgtggttgttangtgcttgttttgtgttgtgttgtgtgtgttgtttcctcctctgtaccatcttgatttcattggtaacagtaaaaggaaaaggttctttcttgtggaaattagaaaagggtcccttgctttangacagtgagagagaaaagtatttcttcctggtgatgtcttttgattcgtctctggaatcttatgcaaacccttccttcccttttgcttgcttgct

SEQ ID NO: 849 - DNA, 239 bp, Glycine max
  Clone ID: LIB3028-045-Q1-B1-E1
ctccagagagaagaagaaacttaatcgatcatcacttcacttcactaatacatcatggcagacgagacccagaacaagtatgagagctctgaggttgaggtccaggatcgtggtgtttttgactttctcggtaagaaaaaggatgaagaagacaagcctcatcctcaagaggagggcatcgccaccgagtttcaaagagtcactgtctcagaccaatgagagaattagcacaacctctt

SEQ ID NO: 850 - DNA, 357 bp, Glycine max
  Clone ID: LIB3028-045-Q1-B1-E11
ctgagaacatcaatgcatacaaagtgcgaatcagcatttgcagatgctgctcttacagcaattgaaattcagtaccggatcagtcaacatctacatctcgcgaatgaaactccatcaggtcatcaacatcgaacgcctcggcctccgcacaaagaagttatagatcgtgccaatgcactcctagctgttccacatgtgccagattttgaatcagttgagccatcagctccatctgcagtagcatcagtcaggccgatttgcctaacagatccaaaggacatggcttttggatgtggacatataactctgcaacgagtgtggcgtggtattagcgccatgccctatgtgccggaagga

SEQ ID NO: 851 - DNA, 375 bp, Glycine max
  unsure at all n locations
  Clone ID: LIB3028-045-Q1-B1-E12
cgacgacctcgttggttttcctttgtaagttgtaagcatttggcaccagcaagccctgtcttcttcttcgatcagattanggcatttcatttctgcgatggccgcagcacccgctagagctcgtgccgattacgattacctcatcaagcttcttcttatcggcgacagcggtgtcgggaagagttgtctgcttttgagattttctgatggctcattcacaaccagttttatcaccaccattggtatcgattttaagataagaaccattgaactagacggcaaacggattaagttacaaatctgggatactgctggtcaggaacggtttcngaactattacacagctttattacgtggagccatgggtatcttgct

SEQ ID NO: 852 - DNA, 404 bp, Glycine max
  Clone ID: LIB3028-045-Q1-B1-E2
ctcgagccgttcagttagaatcgacacaaaatatgaaccgctgattcctaaagaagagaagtcaactatagtatgaaaatttctcttatacatttgacaattttttcattttgctcatttgaaatgagtgtgtaaattttgctgacttaaacctgtttctcacctcaaaacttttcagcaaattttatgtctcaaccttaggtggaagaggattctggtactgattgtggtgtgggttgctttccttctagttcaagtcatcaagaatgatgtagaggcatgcagtccatggtattgggtgctttttggcttgcagtttccaattgcacttttggtgtttgggtatgaagcagtgaagttgtacaaggagcacaaaaggagaatgagcacaaggaacctagaat

SEQ ID NO: 853 - DNA, 381 bp, Glycine max
  Clone ID: LIB3028-045-Q1-B1-E3
tgggaaggcacacgcttgtttacgcaacgcaagcgattgttagttgtattcgatggactacgatttcagaagcaggtcgggcccacaacctccgatgtaccgtccgccaccgccaccgtcaccgatgtaccgtccatcaccgtatcaacagaatcctactccttcttcaggacttggcgttagggttggtataaagccggaatataggatcacaccgccgcctcatttatcatcacttgctggagataatccacggagcaacttccaatttgattttggattggagagaaaaattttagctgaagcagagaaggataacccaaattggagcaaatttggatcagaaaatattccaactaaagtttctgattcatcaacagc

SEQ ID NO: 854 - DNA, 383 bp, Glycine max
  Clone ID: LIB3028-045-Q1-B1-E5
aaacgctggagaggtaccagaaatgcaactatggagcgcctgaggacaatgtggcaacaaaggaagccttggagttaagcagtcaacaagaatacttgaggctgaaagcacgttatgaagctctacaacgttctcaaaggaaccttatgggagaagatcttggccctctaagcagcaaagagcttgaatcacttgaaaggcagctagattcgtctttgaagcaaatcagatcaataaggacccaattcatgctggatcagctttctgatctacaacgtaaggtatgaggtcaattatcctttttctttaattaatttgtcaatgtttaactgctattcttcttcttccgcatatttcccttgctcaccggttcaattatgcat

SEQ ID NO: 855 - DNA, 364 bp, Glycine max
  Clone ID: LIB3028-045-Q1-B1-E6
ttacactttcagccccacacacttgcaaataataattcttttttttttcttcgtccttccatgatccatcatcgtattttctcactatccgttacggtgttaccttacactgctgtatacattttcccggacagttcataattttcctggaaaaaatattctgatttaattcgggcccagttttccttccccttatacgagaatactcatttcatattttctgcgaaatctataaataaacaaacaatgcagaaatacctaatttgcttctgaattccgatggggcaagggcaatccaaagacgagttgctctaccagcaagtcagttatgggaacgccgaaggaatcaaaacccttcacagag

SEQ ID NO: 856 - DNA, 367 bp, Glycine max
  Clone ID: LIB3028-045-Q1-B1-E7
cttcaggagagttcctagaattcttaccagaggaagaatcctcagaacctgaaaatccatcaaaggacaacatggatgattacacacttctgctttcttcaattgaatctgaggagaatgtgaagttaccagtctcagctaaaatcaaacaccaaattggaaagcttttagtcaactccaatttcagagccatattttcaccagcaactcttggagcgattgttggctttattgttggagtagttccccagatacgtaaattgatgattggcggcgatgcttcacttcatgtgattcaagactcagttaccatggttggtgaagcagccgtcccagttataacccttataatgggagcaaacctcct

SEQ ID NO: 857 - DNA, 382 bp, Glycine max
  Clone ID: LIB3028-045-Q1-B1-E8
cttttgcgaacagctgttagacttgagttgagtcacagtcatcgtctgttcaggatcatattcacgccccctctctctctctctctctctctctctctcttactttgtgtctttctatctctctcttcaattccaaaaccctacccccatccaattccaattcaccctcaatcatgggttctgaaggttccactgtcgtcgttcctatgaacttcagattattggaagagcttgagagatgtgagaagggaattggagatggaactgttagctatggaatggatgatgctgatgatatctacatgcagtcctggactgggactattattggcccccctggtactgttcatgaagggcgtatataccagctgaaattattttg

SEQ ID NO: 858 - DNA, 365 bp, Glycine max
  Clone ID: LIB3028-045-Q1-B1-F1
caacaactatctctcatccttcttctttctgtatccgtaacacttgcaacacacatggctacaatcaccaacactttcatattcaaaccccccatctctcatcacccaaagcagcttctttattcccaccgctcttctctacgctttctcaccaaatttaaaaccccctccggagcgaattctcggcggctggttccgaaagccacggcggctcccggggccaagaagacagaaaagccgcacgagagagtccagcgagtccacagcgtggaggagttcgagtcggcgctcgaatccgccaaagacaggcttgtggtggtggaatacgctgccagcgacagcgaggagagcagccagatataccc

SEQ ID NO: 859 - DNA, 399 bp, Glycine max
  unsure at all n locations
  Clone ID: LIB3028-045-Q1-B1-B7
ataacacaaggcagaaagcaagctcatcctagagttttaaaaatggcagcagcctcctccatggctctctcttccccatccttggctggcaaggccgtgaagctgggcccatcagcccccgaagtcgggagggtcagcatgaggaagaccgtcaccaagcaggcctcctccggaagcccatggtacggcccagaccgcgtcaagtacttgggcccattctctggcgagcccccgtcctacctcactggcgagttcccaggtgactacggctgggacactgctgggctttcggccgacccagaaaccttcgccagaaaccgtgagctcgaagtgatccactccaagtgggccatgctcggggccttgggctgcgtcttcnccgaactgttgtcncgcaac

SEQ ID NO: 860 - DNA, 384 bp, Glycine max
  Clone ID: LIB3028-045-Q1-B1-B8
gttttggtcattgtgaaattattattatttactattctgggcctacttgtaccaccgtgtaggtgtgtaaccccaaaaggagagaaaaattgggggaaacagaaagagtgagggagcggtcgaaacagcgtgctgtggaattgtgcggtctaaggatatggtcattagaagaagggatttggtgggtctccaatgttttgtaccagtttgacctatcatcttttgttttgttgggtatgacctatatattagttactagttaggtgtttttttttattcagtttatagtattacttaacttttccccctctaaacagagactttgtgtaaagtgcaattatctagttaaattatatagggtttggttcccgtggcctatttcac

SEQ ID NO: 861 - DNA, 368 bp, Glycine max
  unsure at all n locations
  Clone ID: LIB3028-045-Q1-B1-B9
caattgtttgattcagacagaaaaaaaatgttatcgtaacttatcttaattatctctcgattcatttcctctctctttggagagtttgctacttccccttccgaagctgcatggctttttctcatcccgctcatagctaatgccctcttctattatttcagtgtaacaatggatagcgatggaggctccaaattgactgggattaggcagattgtgaagataaaggaaatgctccagaagtggcaaagtgtgacattaggcccaaaaccttgcaattccctttctgatcatgtggctaatgatgatggaagcatatcaccattgatcaacanaagggtagtgaatgtgatatcggacaacgaagacag

SEQ ID NO: 862 - DNA, 337 bp, Glycine max
  Clone ID: LIB3028-045-Q1-B1-C1
cacaaatcaattaactgaatgcttagagagagaaagaggagaaggagtagtgataaggtgatcatagagcatattataagagagtgaaaactaatggaggttggcctcaagaaggagaacatggggtttgaggaaactgagttaaggcttggactgcctggaaacggaggcactgaagaagtgctcatcaggaagaggggtttctctgagactgaaactggtcatgaagatgagtctgccaccactgtggatttgatgcttaatctttcttctaaggaggccgcaaccactgctgctgctgctgcagattcaactgataagcacaagactttgccta

SEQ ID NO: 863 - DNA, 345 bp, Glycine max
  Clone ID: LIB3028-045-Q1-B1-C10
attcattttccgatggcttctgcagatgttgagtaccgttgctttgtcggtgggctcgcttgggccactgacgaccatgccctcgagagagccttctctcagtacggcgaaatcgttgaaacgaagattatcaacgatcgtgagactggcagatccaggggttttggatttgtgaccttcgcctcggagcagtccatgaaagatgcgatcggagcgatgaatggacagaacttggacggccgtaatatcactgtcaatgaagctcagtcccgcggtggcggcggcggcggcggcggaggaggaggaggatacaatcgtggtggcggtggatatggtggtcgtaat

SEQ ID NO: 864 - DNA, 387 bp, Glycine max
  unsure at all n locations
  Clone ID: LIB3028-045-Q1-B1-C11
cttcaatgtagaaacttgatttggacaagctcaagagcattccatcagtgtcttgagctccaaatggagaacacctggatcctgacttttcaccttctcctcctcctgctccatccaaatgcagcaaaaggggccattggtgttggtgttggtgttggtggcagaggtggcatangtgttggcattggcattgggggcagtgttaacaccccagggccctctggatcaaacctcaagagtgccttcacagcactccaggcatggaaatctgccatgaccgatgacccattgaagattctggatacttgggttggtcccaatgtgtgttcctacagaggtgtcttctgtgcaaactctcaagatgataatggaattgtcacaacagca

SEQ ID NO: 865 - DNA, 387 bp, Glycine max
  Clone ID: LIB3028-045-Q1-B1-C12
tgaacaacagcaacaacatcacaatcttcgctcccagaaacgaagccctcgaacgcgatctcgaccccgatttcaagcgtttcctcctcgaaccccgcaatctccattccctccaaaccctcctgttgtcccacatcgtccccaaaagaatcaccaaacccgaattcaaaaccgggtcgacccgacacagaactttagcgtctcaccaccacctcactctccaagccctgaatttgactcactggaatgttgagtcttcccgggttattaacccgaattcggtaacccgacccgacggagtgatccacggcatcgacactctcctcatccctcgctcagtccaagacgaattcaaacgtcgccggaatctgatctccatcgccgcgg

SEQ ID NO: 866 - DNA, 394 bp, Glycine max
  Clone ID: LIB3028-045-Q1-B1-C5
gcaaggtgaacaacaggatgtggggaactgtgaaaggaggaggaaatgatgaagatggtttaaggactttgaacattagccaatgcactgcactcaccccatctgctgttcaagctgtttgtgactcattcccttctctccacacatgctcagggaggcactcactcatcatgagtggctgcctcaacttgacatcagtgcattgtgcctgtgctgtccatgcgcaccgtgcattcaccactttcccttatcctgcccattaagaagctcatgcttttgatgttgaacacacttcgaggatgtgccccttgaaagggctcagagaagtgaaagaagtgaaatccaccccccttgtagatgtatgcctgcataagagagacttgaatctagctga

SEQ ID NO: 867 - DNA, 403 bp, Glycine max
  Clone ID: LIB3028-045-Q1-B1-C6
gtctcaagcaaccatggcaatggcaacccaagcctctctcttaaccccacccctctccggtctcaaagccagcgaccgcgcctccgtgccatggaagcaaaactccagcctctccttctccagcccgaagcccctcaagttctccagaacaatcagagcagcagccgccgacgagaccacagaggcaccagcaaaagtagaggctgcaccggtcgggttcaccccaccagaacttgacccaaacaccccttccccgatcttcgggggcagcaccggcgggctcctgcgcaaggcacaagtggaggagttttatgtcattacgtgggactcacccaaagaacagatctttgaaatgcccactggcggcgccgctatcatgagggaaggtcctaaccttctcaag

SEQ ID NO: 868 - DNA, 380 bp, Glycine max
  Clone ID: LIB3028-045-Q1-B1-C7
gcgtcttccctatcgcgcaggagaatgtgttggcttcttctccccgacgaactgtggaggcgaattctggagatcggaatcgagagcaacggtttcagttacaaggatctctgctgcgtctcaatctcatgccgccgccttcatcgcctctcctcggaagaacctctttggaaccgtcttctcttctctgactatccccaatcccaatctcacccttcttcttcttcttcttcttcttcttctaaatctctttacagattaaggtaccaattcattcgattctgcattttcaaattaaagttttttgtgtgattttcttgttcagatttttatcatttattggcttaattatatatttggtcacttgattataattaaag

SEQ ID NO: 869 - DNA, 394 bp, Glycine max
  Clone ID: LIB3028-045-Q1-B1-C8
cagagtgagaaagagaaagagagaattcgtaaaccctaatttcggaaagatcggcgatgactgcctccaaggatcgcgagaacttcgtctacatcgccaaactcgccgagcaggccgagcgttacgaagagatggtggaatcaatgaagaacgttgcgaatctcgacgttgaactgacggtggaggagcggaatttgctttctgttgggtacaagaatgtgattggtgctcgcagagcgtcctggaggatcctgtcttccattgagcagaaggaagaaacaaaagggaacgagttgaatgcgaagcggattaaggagtacagacagaaggttgaattggagctatcgaacatctgtaatgatgttatgagagtgattgatgagcaccttatccc

SEQ ID NO: 870 - DNA, 386 bp, Glycine max
  Clone ID: LIB3028-045-Q1-B1-C9
gagctctctctcactgacagagtgcaaggaaagggaaataagagagagagagaaacagaaaacttcagaagaagagcatcaattgctagctccaatatattaccacaccactgcaaaattttctgaagcagagatcattgtccattatcacagaaatgggtgaagtaagagttctctcttacacaaaaaattcttgtctatatttattcttaatcaatctgtctctttccttttttcgacaacttttgctttgaaaactaactacaccacgggactaggatcgtgttttttaaacttttatgatcttttgtatataatgtctgttttatgatgtatatggggggatcaatatcaagtaatgcatgccacacacacacacacacaca

SEQ ID NO: 871 - DNA, 303 bp, Glycine max
  Clone ID: LIB3028-045-Q1-B1-D10
agcggttccagaattggttcaactgtgtgagaatgaaaacctaaacctacgagcaagtgctgtaaagttgttttcttgcttggtagagagttgtgacgaaggcatcatacaggagcatgtgaatcagaaatgcattaatactctactccagatcataaaatctccatctgatgaagaggaaatactttctgccatgggaataatatgctatcttcccgaagttgaccagataactcaatggcttttggatgctggtgcactgccaatcattaaaacttacgtccaaaatggggaaaacagaga

SEQ ID NO: 872 - DNA, 379 bp, Glycine max
  Clone ID: LIB3028-045-Q1-B1-D11
caccattataactctttccttctttggcccatttgcttctagttctagccccttcctttgttaactcttttgtttattcagaagaatggcatcctggttattgggaaggtcgagtaggatcttgattcatcaacatcaccaccttcacaaaaagtacttgcctttcttgttaggaccatttcttaaccataataatagctcttgttcctcttttccatcaactgaaccatttaggtgccgtgatgcatttccgggtaagaactcatcacccaccctcttccgattctcgcgtcatgaatcaaccaaagctgaggcacaattggaattggagcaagatgttgccaccgaggatgagcctaatcaggtcattgattttcct

SEQ ID NO: 873 - DNA, 331 bp, Glycine max
  Clone ID: LIB3028-045-Q1-B1-D12
ctggccttgtttacgaggttgtctttatcagccacacccacgagcagcttcccaccactgactactagagggggggaaatgaaaataaaaaaaaaaaaattgtgtattattgaatttctctggaatcttcttctgtgtatggttttccttccttgtgttttcttcctaattcactttcgagggttgtacttgttcctttcgtcttaaatccttggatggttgatgatcatgaagttctctttaaagttaaattattatcattttgtgcatgctctctctctctcacttggtccacaacaattgaattgaatgtagtatcattattcgggtc

SEQ ID NO: 874 - DNA, 358 bp, Glycine max
  Clone ID: LIB3028-045-Q1-B1-B5
gcaatgtagggataaagaatgagcaaatggctgaggcctctgcacaagcttgtgtctctattccttccaatccttggagttctctgcaaaggggtttcagtgcataataattcctgtaatgtgcaccagtaaagaccaaagtatgattattgttacattatgctatatgattgtacttgtatatacatattttgtcccgcctttgtaaatacaattgggacactactaggattgggaagaagggtctttacatttttagtttggcaaatagatattgcaactacctttgtataaatctatttctgaagaagcaattacaactttcaagggatgatagcattttgtggcataaagatta

SEQ ID NO: 875 - DNA, 387 bp, Glycine max
  Clone ID: LIB3028-045-Q1-B1-A11
aatatccaccaggagttggatactggtcgtgctagctagcgggccaaagtagtgcctaagtcttcctcatatcttccaccctttggcttattagtgggagcaatacatatcattcattcagaggcaacaaaggagttgtaaattaagagcatggctgcacaagctcttgtatcatcatcatctcttaccttctcagccgaggctacaagacaaagtcttggaccaagatcactccaatctccatttggcttctcaagaaaagcctcctttcttgttaagggagctgctactccccctgttaagcaaaggatcagacagacctttgtggtttgcatcaaagcatagtccttcctacttggatggcagccttccgggtgactatggatt

SEQ ID NO: 876 - DNA, 343 bp, Glycine max
  unsure at all n locations
  Clone ID: LIB3028-045-Q1-B1-A12
ctctggaactctcattacngagaatatgcaagagaacttgaagaaactgaaagaggtgaatacgaatcttcgtaaggagattatgcagagaatgggagattgtctgaacgagctgggcatggaagatctcaagctccttgaggaagaaatggacaaggccgccaaggttgttcgtgagcgtaagtataaggtgataacaaatcagattgacacccagaggaaaaagtttaataacgagaaagaagtgcacaacacgctcctgcatgacttggatgcaaaagcagaagattcacgttttgcattgatagataatggangggagtatgagtctgtgatcggattc

SEQ ID NO: 877 - DNA, 273 bp, Glycine max
  Clone ID: LIB3028-045-Q1-B1-A2
gtcaacctcaacgccattaaccaggtcaatgggaagaagccatggtcactctctttctcctttggaagggcacttcaacagagcacccttaaggcatggggcggaaaagaagagaatgtgaagaatgctcatgaagcccttttggtaagagccacagctaactcaaaggcaactctgggaacctacaagggtaactcacaccttgctgatggtgcctcaaaaagcctccatgtttcgaactacagctactgatcaatcaagtttggtgttgtt

SEQ ID NO: 878 - DNA, 402 bp, Glycine max
  Clone ID: LIB3028-045-Q1-B1-A5
ccaaacccttataatttacagcctcgagcttcctgataaatgcaagcctttgaaaaaggatacaatttgcagccaaaggcgtcatgatgcggaggttctggcaagttctacaggttcaaaggtagcaagtaatacatggattctgaattcaattgcagcctgcaaactgaaatgccttgctcaatgaaatgtgaaaattgagatcatttacatgcatatgatctcaaactgatgtttttcccttttcatcattaattatcatgttaaaaataatattggcaatattatgcaacaaaaaatttaggagtcataatatatactgtgaatgtatccccgatggagcgagaattgtgtttgaaaccgtcttatatcaatggtaaaatctcaatccttggcaatttt

SEQ ID NO: 879 - DNA, 406 bp, Glycine max
  Clone ID: LIB3028-045-Q1-B1-A6
caacaatccaccctgtacgtatcccctccacttcatccaggtgctcggcccaatgtgtcaggaaaacaagagtccaagagcaagtcatccagggagagcatggctgaaaagaatgaggaatctaatgatgtcactacagaccttgagttgaagactcctgggtcttctgcagatcaggatttatcatctggacaaagaaaatctagcaagttgtcaaggagggaaagcagctgcactgaatggagttcattaggtatgtgttcttcttgtagcgttcaggacagctcatcaagcagtgtggtggcgagcagaaaggataacgaatgataaagtagacaagttagtcaagttcttgtgccttgaagctgctgaagtttttcattgtgcatctgctgcaactctggag

SEQ ID NO: 880 - DNA, 397 bp, Glycine max
  Clone ID: LIB3028-045-Q1-B1-A7
gaaccaagacaaagaaagggttaagtacattaactcaaggatctcaaagaacttgggccaagatagtagtgtgagtgaattggactcagttacactaccagccaagtctggtagccttattgggtctgggaattactttgtggttgttggtcttggaacacccaagagggacttgtcactcatctttgacactggcagtgatctcacttggactcagtgtgaaccatgtgctcgttcttgctacaagcaacaagatgctatctttgatccatcaaagtctacatcatattccaatattacatgcacatctacgctttgcacccagctctctactgctacagggaatgagccgggatgttcagcctccacaaaagcatgcatatacggcatccagtac

SEQ ID NO: 881 - DNA, 376 bp, Glycine max
  Clone ID: LIB3028-045-Q1-B1-A8
cgaggccgggctcatcgccggtggcatcggcgccgccgtgggaaaccccgccgacgtggagatggtccgaatgcatgccgtcggccgcctcactccggcacaacggtgcagctacaagtctgttgcggacgccatcattctaatggctaatcatgagggcgtcactaggcagtggagaggctcatcgcttacggtgaaccgctccatgctcgtgacagtgtcgcagatggcttcctacgagcaattcacagaaatgagtcaccagaactgcatgatgctcgacagcctcgggacccacgtcacggagagcttcgcggtggagttcgtggtcgaggtcgcgtcgaaccgcatcgacatgatcaagaccacagtgatg

SEQ ID NO: 882 - DNA, 246 bp, Glycine max
  Clone ID: LIB3028-045-Q1-B1-A9
aaacactcataacacaaagcacaaagcaaagctcatccttgagttaaaaaatggcagcagcttcttccatggctctctcatccccatccttggctggcaaggccgtgaagctgggcccatcagccccagaagtgggaagggtgagcatgaggaagaccgtcaccaagcaggtctcctcaggaagcccatggtacgggccagaccgagtcaagtacttggggccattctctggcgaacccccgttct

SEQ ID NO: 883 - DNA, 386 bp, Glycine max
  Clone ID: LIB3028-045-Q1-B1-B1
ggaactgggcttgcacttgttggagttttcttgtactcaagggcaaagaggatcaagtcagtccaaaagacaaattgaggctgcataacccttcaaaaaagaaaggaaacaggcagagggaaaagtaaatattgtagacacataacagccattgattttttttttctttctttttacattttgtgagggtatcactactccttgttaattggccatcctatgcgactaaatcttagtaaataatataggagtttaatagacatgtactgtaagtttaattttttttacaaatattcagaaatctttattgacatgactatagttattataaaatttaattaacttaatatatatatatatatatatatatatatatatatatatat

SEQ ID NO: 884 - DNA, 383 bp, Glycine max
  Clone ID: LIB3028-045-Q1-B1-B10
aaaacatggcacttttgcaacaaaaactaggcttctcatatctactaatcctttgcttagccactcttgtttcttcacacaggccttatacaactccaagtgtcacacgcttgactgattcttttcctcgtgtccaagttgatagtgctttttctaagacctttggggccaaaaatatccagtttcttagtaatgggtccacggtcacactggctcttgacaaaatctcaggctcaggcttggtatcacaaagcagatactcctatggattcttcagtgctgcaatcaaactaccttctggtttgtcacctggagttgttgttgcattttatttgtctaattcagataaatttcctcacaaccatgatgagatagacattgaa

SEQ ID NO: 885 - DNA, 359 bp, Glycine max
  Clone ID: LIB3028-045-Q1-B1-B11
caagattttccttggttctcttctctcgatcgggtgtgtacgtaattaacataacatgtttcgataagcacacaccccttgtgtcatggcatgatgatgatgatgatgagaccagtaacgtggccctgataaagttttcaaagtctaagcatcttcttccttgttgtcatgcatgcctgatggaatcgacgacgcagaagaacaaaagcaaaaagtcatcgctgttgatgcgtctcaaacccgttatgggcttcgacgactctattatgcccaatcgcaatggggatgacccagttttgtcgtatctcgcgatcgctaacaagaacggcgctgttttgccggccatgttgtcgtcgatg

SEQ ID NO: 886 - DNA, 376 bp, Glycine max
  Clone ID: LIB3028-045-Q1-B1-B12
ctcatgacacggtacttaccccctatcaatttgttgaatgtatgattaacataggaattcgcgtggcacgcacacggcatatgatcaagaataaggacaacaatgataagacaattgagctgctacatgagtttgcacgcacacactttccatccgcgacctacatggcatatgctgttcaagttgacacctacacactcacacaggcacataatttaattcctaacgtagattgtgcaattggatctcgtctcctggatctccatgctggtagttcgctgttcaccagacacaatattgacgaaactctcgatattggctatctgaatggcctctttgtgctggaactctccattggtctcattggacacacctt

SEQ ID NO: 887 - DNA, 306 bp, Glycine max
  unsure at all n locations
  Clone ID: LIB3028-045-Q1-B1-B2
acccaatctatctgaaaattccaacaaaggatcgatggcaactcctagagccagtaaagctagcaaagtggtgatggnggctgaaaatccgttctggatacaaatgtgacaggtatagggagtagtaaatattgtagacacataacagccagtgattttttttttctttctttttacattttgtgagggtatcactactccttgttaattgggcatcctatgcgactaaatcttaataaataatatacgagtttaataggcatgtactgtgagtttaattttttttatcagtattcagagatcttt

SEQ ID NO: 888 - DNA, 390 bp, Glycine max
  Clone ID: LIB3028-045-Q1-B1-B3
acaagagcgagtcatcatcacagctcaacgtcaagtgaccaaaaaagcttcaattttcgcatccaattcgcatacccatttgacttttcttctttccctcttctccattcttcgcattttcaagatccattcagaaatagcacaattgttaaagttggttgaagttcaatataattgtagctttattagcaatggaagaagaaaatgccatagagcttctccagagataccggagggaccggagagtgcttcttgattttatactctcagggagcttaatcaagaaagttgtaatgccacctggtgcagttacactggatgatgtggatctagatcaagtcagtgttgattatgtcctcaactgtgccaaaaagagcacattgcttgagc

SEQ ID NO: 889 - DNA, 396 bp, Glycine max
  Clone ID: LIB3028-045-Q1-B1-B4
tggttggtaaacacttgcaaggggaatggctgtcaacaaggtcagtggagatgttgaatgcaatccaactcttaaatatagcagtgaaaggaaagtacgttggcatggttgatttgctcatccactattctataccaagcaacaatggtacatccaggaaatacgtatttccaccgaatcttgagggtcctggtggtattacacccttgcacttggcagcatgcacatctggttctgagagtgtcgttgactcgttaacaagtgatccacaagagattgggttgaagtgttgggaatcacttgtggatgcaaacggacagactccacatgcctatgccatgatgatgaataatgactcatataatgcgctggttgcccataaacttgctgatagac

SEQ ID NO: 890 - DNA, 368 bp, Glycine max
  Clone ID: LIB3028-045-Q1-B1-A10
tatctacacacttctcaaccaacaatggcaatggaaactcaagcctctctcttcaccccacttctctccggtctcaaacccagcgaccgagcatcgcgcgatggtaacaatcctccaacctctccttctccacctcgaggcccctcaagttctcgcgatcaatcagagcatcagccaccgaccagaccacagaggcaccggttgggttcactccatcggaactggacccaaacaccccttctccgatcttcggaggcagcaccggcgggctcctgcgcaaggcccaagtggacgagttttatgtcatcacatgggactccccgaaagaacagatctttgaaatgcccactggcggcgctgccatcatg

SEQ ID NO: 891 - DNA, 377 bp, Glycine max
  Clone ID: LIB3028-044-Q1-B1-G11
gtaaagagaagggcgtggagagatagagagggaagaaaaatgagtgtatcattgactgtgatgaccttcaatctccatgatgatgagccacaagacagtcctaattcgtgggagaagagaagggatatgtgcataagcgttattaccagttactcacccatcatcctctgtacccaacaaggagtgaaagcacaattggattttctccagcatggtttgctaggttatgatcaatttgggatatcacggatagggccccaagacactactgatcagcattgcactatcttctatgataaggaaaaggtcgagcttctagaaggtggaaccttttggttgtctgagtctccctctgtacctggaagcaggtcaggggg

SEQ ID NO: 892 - DNA, 141 bp, Glycine max
  Clone ID: LIB3028-044-Q1-B1-G12
aaaacgtaaccatcgccggaacgatcccatttcccttgacttctcgacgtgaagatccttgtgtcacacagacccacttatcatgtcagagggaaatgtccggaaacgatagataatcgccatcatctgcgtttcaacctt

SEQ ID NO: 893 - DNA, 313 bp, Glycine max
  Clone ID: LIB3028-044-Q1-B1-G2
atttttgaggagttaggagaccttaacagcttggttggattgggtgaaggcagtttttcctgtggccagaaaaatgaatatactacaagcgaaatgctttatactgttgatatattcgggtcttgtgaccatgacttcttggagttgcttgacctagagacaccgcagctctggctgaataaacatggaagtggtagccaagataagtaaggctaaaaaattgagggaagtatcacagcagattgattgaactatagccccaactacctaaccttgaagagagtaaacaaaggattctcttccggttcttcat

SEQ ID NO: 894 - DNA, 370 bp, Glycine max
  Clone ID: LIB3028-044-Q1-B1-G3
attcatattctggaaaaaggttaaatctgttttaaactcagcttatcttgaagcaattcatgttgaattcttgaacttcactgtttttttattgccttttcttactagtaataatttgatttttaaggaggctccaaaattactagtcattattcactaccattcaactacattttcctatcttctagaattgagcttgtatttcagagagagtaaatataatgattactgaattaacgatttcttgtttctgtttttctcttttagtaactaagagtcttaaatgttcattgtaatggaataatgtacggatatatgaagcaacttcattggagcacaatagaaagaaatctatccgaaattcagattt

SEQ ID NO: 895 - DNA, 225 bp, Glycine max
  Clone ID: LIB3028-044-Q1-B1-G4
cttacctcattggcactcttcctggtgacaatggatttgaccctctgggactagctgaggacccagagaacttgaggtggtacgttcaagccgagcttgtaatgggacgttgggccatgttgggtgttgcacgaatgctacttcctgaggttttcaccacgattggaatcatcagggcccctcaatggtatgatgctgggaaatcggagtactttgcatcaacgt

SEQ ID NO: 896 - DNA, 353 bp, Glycine max
  Clone ID: LIB3028-044-Q1-B1-G6
atcgtagccgtcgcactctgtgttttcagcgccgtctccgatctccgacaatggcgacccaaatgagcaggaagagaaagttcgtagctgatggagtgttcttcgctgaactgaacgaggttctgacaagagagttggccgaggacggttactccggcgtggaagttagggttacgccgatgcgcaccgaaatcataattagagccaccagaacccaagctgttctcggtgagaagggaaggagaataagggaacttacctctgtggttcagaagaggttcaagtttcccgagaacagtgtcgaactttatgctgaaaacgtcaacaataggggtctttgcgctattgctcag

SEQ ID NO: 897 - DNA, 356 bp, Glycine max
  Clone ID: LIB3028-044-Q1-B1-G7
ggatgaaacaattaaaaatcccaagtctgagagtgcacaaggagatgctgctgcaagtgccatgggcagaggtcgtggaggtggattccgtggtcgtggacgaggaatgcgaagatgatgatgagaagtgtattctacgggttgagtgtctgttcattgtctgtctaattcgtgaggccaatgcatgcttgtgtcttctacttggtgttgctggaagcatgccgatttttggacctacaaatcatgaaatgaaaatgtaatggagattctggcaacatcatctgatcaacctaggatagcaattttcaagcattgtctttctgacgatcgtttcgacttgagcttcgtgtgaaatt

SEQ ID NO: 898 - DNA, 377 bp, Glycine max
  Clone ID: LIB3028-044-Q1-B1-G8
ctccactaaaaataccttgattaaatatttatatagtgaatagcagcaaagtggcaggagcttgcgtctgcaaattctatgttgtttgatttgcgtgagtgaattgggaagatgctgtgtctgggtcgattcggcggggtctcttacggttggagttggaatcggaggagggacaacaccattaacaggcccagatggcgtttgatggcccaggaatcaccctctctcgactcagacaaaaccgccactgctggattctgcatcattgaacgcccccaaactgtacaggattttgccaagatggagcttcaagaaattcaggacaacattcgaagtcggaggaacaaaatcttcttacacatggaagaggttcgcag

SEQ ID NO: 899 - DNA, 378 bp, Glycine max
  Clone ID: LIB3028-044-Q1-B1-G9
cttctcttttctctttctgttttttcctggttactttctatgcctgctgtacgtcagggaaacgtgttatccattctgagttaactgaaagaaaattcattgaagtccagaaagctctaagtgctactgaagctatggatgttgatcactgtgaaccaaacagcaagttcaaaaaaactggtttccatttaaatggaagcaactatgacgtgtctacatgtggggttctccactccattggatcagatttaacaagaatgaaagtgacatctgagacaaactatagtgactccgggagtggacagaaaactataaaggcaaaagagcccgggaacactcccataagcatgccagttatctcaagagagagttttgcgc

SEQ ID NO: 900 - DNA, 240 bp, Glycine max
  Clone ID: LIB3028-044-Q1-B1-H1
agctactactcctcctccaccaccacctgttgcatcattggagcatggtgaaggtgctcatcatgaaggagaggccaaggagaagaaaggtatattagaagagatgaaagagaagcttcctggttatcactccaagacataggaagagaaggaaaatgaaaaagaaagtggtgctcattgatatttaagattgagacaaggcttttttgtttggttggagatccatgattgtggtgtgct

SEQ ID NO: 901 - DNA, 381 bp, Glycine max
  Clone ID: LIB3028-044-Q1-B1-H11
aagaattccagactatgtacgaatcagtaaagagtgtaggcaccttttgtctagaatatttgtggccaacccggaaaagagaattaccataccagagattaaaatgcacccttggttcctaaagaatttgccactagaatttatggacgagggcgaatgggtgttgcagaatgatgatcatgtgaatgaagagtcatctgaaatcactcaaagcattgaagaaatactggccatagttcaagaggctaggaaaccgggtgagggcccaaaagttggtgagcaatttgttgggggcagcatggacctcgatgatattgatgcggatgctgacatcgatgacattgagacaagcggtgattttgtctgtgcattgtgaatgat

SEQ ID NO: 902 - DNA, 168 bp, Glycine max
  Clone ID: LIB3028-044-Q1-B1-H2
atttggaaattctcacaggcatacactgcgaccccactctccctgtcgaccctatctcccactctcttgcccgcgacgctagctctcccattctcgctcgacgctggttccgcatgctccccttgctcgcggtggttcagatcaatctgtctcgcatgcactgtggtc

SEQ ID NO: 903 - DNA, 320 bp, Glycine max
  Clone ID: LIB3028-044-Q1-B1-H3
gaaactgtatgacatatagattgagtgttgctgatgtatattggtaacattgaagttgggaatgcgtttgagggcgtttctgaatgaaattcgtattgtgcattcaattagcacttttccctagttattttaactgcctgtagttggcctctttaacttataatttcctttgtgttatcttgcagcttcttgggtgccatggaccattgggcaatcgtgaacctgggaagagcctttttggatactgcaactacttcgtagtcggtcttttaagcgcgacggactagacctttggataacattagttttgcaagagtgaa

SEQ ID NO: 904 - DNA, 368 bp, Glycine max
  Clone ID: LIB3028-044-Q1-B1-H4
gaatgattgatcgaatgatattgggtatacaacacctgtacaagagaccaatatatgcgcggatgcctgaatgcagtggtaattctcccaactatggaccattacctcctgatgctcctgcttggtgtcaggccccttttgatcctgaaggactcctaagttcagtgatggctattgtcacctgcttgattgggttgcactatggacatattattgtccattttaaggaccacagactcagaatcatatactggatgatcccaacctcttgtcgtttagtttgtggccttgcgttggacttatttggaatgcatataaataaggttctctactcgctcagttacacaggtgtcactgctggtgctgca

SEQ ID NO: 905 - DNA, 351 bp, Glycine max
  Clone ID: LIB3028-044-Q1-B1-H5
ctgataagatggaggtgatgattaaagattttctcaaggagaactcaatggacattacagaataaagtcttttaaagctcaagtatgacccaaagtctagttggggttatgttgaggttcacattgagcagggtcctgtgctagaatacgttggtttcccacattgagtgtggttaaaggcatatctgggcagacacgattgaaggttacagttagaggttcacaaggtgatgctggaactgttccactgtccatgcgccatgatcttatggcgtgtgctgcggaataaattgtagtcttggaaagcctctgtaaacaccctgaagtataacgttctgtatgatggtcatt

SEQ ID NO: 906 - DNA, 343 bp, Glycine max
  Clone ID: LIB3028-044-Q1-B1-H6
cgcattttccggctgcgttcactctcacgttttccgcttcagtttgcacgggaaaatcatggtgaaaggtcgaggcctctactctgacattggcacgagagctcgcgatcttctgtgcaaggattatcagaatgacgacacgtgcaccatcaggacttacacttccagcggagtggaaatcacttcagctggagtcaggaaaggtgagatatatttggccgatgtcagcactagggtgaagaacaagagcatcacaactgatgtcgaagtggacactaagtgacatctgcgtagaatcattactgtggatgaacctgcccctggactcaagacagtttttagc

SEQ ID NO: 907 - DNA, 354 bp, Glycine max
  unsure at all n locations
  Clone ID: LIB3028-044-Q1-B1-H8
attcatctgaagcttctatcaaagattccaagcttgtgatatctgcaaaaagcattaattatgggcttaacattctacagggcattcaaaatgagaacaaaaacttaaaaaaatcactgaaggatgtggttactgagaatgaatttgagaaaaaacttcttgctgatgttattccgccaaccgatattggggtcacatttgatgatattggagctttagaaaatgtgaaggacaccttgaaggaattggttatgcttcctcttcagaggcctgagttgttttgcaaaggacagctgaccaagccttgcaagggaatattgctttttgggccccctggcacagganaaacaatgc

SEQ ID NO: 908 - DNA, 382 bp, Glycine max
  Clone ID: LIB3028-044-Q1-B1-H9
gatcgagataactagaaacagtgtgatgaaaatgaaggtccttgttttcttcgttgctacaattttggtagcatggcaatgccatgcgtacgatatgttccctctccgaatgaacactggctatggtgcccgtactccggaggtgaaatgcgcaagttggaggcttgctgtggaagcacacaacatctttggctttgagaccattcctgaagagtgcgttgaagcaacaaaggaatacatccatggcgaacaatatagatcagactccaaaacagttaaccaacaagcttacttttatgccagagacctcgaagtccatcccaaggacacatttgtgttcagtatagatggcaccgtactctctaatattccatactacaaa

SEQ ID NO: 909 - DNA, 387 bp, Glycine max
  Clone ID: LIB3028-045-Q1-B1-A1
gttcttaaagcagctatggccataaatgctcaaactctatcagaaatggagatccctgaaagctatattgaatccctacccaagaatggaagatcaagtcttggggacttgatctacaggagcattacagatgattttttcgatcctgatcagctcctatcagccatggacatgtcatcagaacataaaatcgtagatctcaaggacagaattgaggcatccattgtgatttggagacggaagatgaaccaaaaagatagcagcaaatcagcttggggttctgctgtgagtatggagaaaagagaaatctttgaagacagggccgaaaccatcttacttctcctaaagcatcgttttcccgggactccccaatctgcattggatata

SEQ ID NO: 910 - DNA, 377 bp, Glycine max
  Clone ID: LIB3028-044-Q1-B1-G10
atgatatttgagaggttcttccctcagaactcagccaggctgagtgttcctggaggaccaagtgttgcatgtagcacagccaaagctgtagagtgggatgctgcttggtctaacaaccttgatccatctggtagggcagcacttggagtgcatgcatcagcttatggaaatcaggtcaaagctgtagaaccagagaagatcataccaaagatggaagtttccccactaggagttgccatatagagctagtatgagccatagcaaaaactagtagttgccctagaaccaaaatatattattatactagtcatcaatcactcattaatcatcataaatgaaaatttggcctgctgtgtagtttattcaggcaaggctat

SEQ ID NO: 911 - DNA, 376 bp, Glycine max
  Clone ID: LIB3028-044-Q1-B1-E12
aggaaagaaatggtcatccttggcacacaatatgctggggaaatgaagaaaggtctctttggtttaatgcactacctcatgcccaagcgcaatattctctccctacattctgggtgcaatatgggcaaagatggcgatgttgcactcttttttggattatcaggtactggaaagacaactctgtctaccgatcataaccggtacttaattggagatgatgagcattgctggagtgaaaatggagtggcaaatattgaaggaggttgctatgcaaagtgtgtcgatctttcaaaggataaagaaccagacatctggaatgccatcaaatttgggacagtactcgaaaatgttgtttttgatgagcatactcgagagg

SEQ ID NO: 912 - DNA, 304 bp, Glycine max
  Clone ID: LIB3028-044-Q1-B1-E3
atcagagcctcttagattatctcccacttcagagcgactcacacataaaatctctccaagtgctgcatttgcgagttgaacctcaaaatcagtctctaatatttttctcactgtcttgtctctccagagaactgtatagagagagatagcagctgcaacatctggtgctgtgttaaatgggttgggatcttccgtcttgagtggaggaaacaggagccaaacccttctgggcactgctattggacgcaaggttggtgcggctgccgttacggtgagcgctagaagactcattgtggtagctgct

SEQ ID NO: 913 - DNA, 86 bp, Glycine max
  Clone ID: LIB3028-044-Q1-B1-E4
aaacccataaatcctctcaccacataaacctcagttgagttgcactgcacgagaccaggtccatgaaattgtaagggtccctcacc

SEQ ID NO: 914 - DNA, 201 bp, Glycine max
  Clone ID: LIB3028-044-Q1-B1-E5
tcttaacatatagaacactaccctgaagatagtaaagaagccagtgctaggatttgttagtgaagcgggtggctcaaaccatgttgctcatgtctagtgtctctagcagttattccgtggatttgactaaagaccttttcctcgaagtgcagagtcaaagtgtaagggctaagttctctcaactctcaggcaacctatttc

SEQ ID NO: 915 - DNA, 239 bp, Glycine max
  Clone ID: LIB3028-044-Q1-B1-E8
ctttccacttgtctccgaattagttatcttgagaaacattattcccattgctatatattatggctagcatgaaggttacatgggtggttgtgatcatgtgcatggccgtggtgggtgcaccgatgatggcgcaagccatgacatgcaatgatgtgacggtgaacatgggacagtgcctatcctacctgatgcagggaggaacaccttcaacactttgctgcagcggactcaagaacatt

SEQ ID NO: 916 - DNA, 341 bp, Glycine max
  Clone ID: LIB3028-044-Q1-B1-E9
ccaaatctacgttgcactgctttggctgcatgtgctcatcccttctttgacgatctgcgggacccaaatgcatgcttgccgaacggccgaccactacctcctttgttcaacttcacatctcaagaactggcgaatgcacctgaagagttgcggcaacgcctcattcctgagtatgcaaggagttgaatcaattccaaagttgaaacatctctagggcattgtaaatgggttttgaattattggacaccctcttggtcatcgcccctgaccagcctgttctgttctgttcctcagcctcttctctgcacaagtcacatctgtgactatacaacgtgagaaac

SEQ ID NO: 917 - DNA, 319 bp, Glycine max
  Clone ID: LIB3028-044-Q1-B1-F1
gccatttccatttttttctggttttctttcaccatggcctccgccgccgccgtcgccgccgaagacgacgctgtcaacggcttcactcggtcggagatgtactcggaaaatctcgccggcacagtcgacacctacgaccgacacgtgttcctctgctacaagagctacgtgtcatgaccggcactcatcgaggcatccgatgccgatttcttgcgtaagcgcgtcggtgccacctgtcaagcccgcaagaacgacttgcggcgcatgacgaatatcgggtgtgcgaggcgcgcgaggaagctggcttctccgacggtga

SEQ ID NO: 918 - DNA, 364 bp, Glycine max
  Clone ID: LIB3028-044-Q1-B1-F10
ggagtctcttagtttcctttgtaatggaaagttagaaaccctcatcgtcaaagcacgcgttttttttaatcgctctctctcaacaaatatttgtgggtagattcaattcaccatgtcgagctcatcggagtactctgaattttccggccagaaaccggcgaggtcgccggagaaatcgagcttctctcagacttgcagtctgttgagtcaatacatcaaggagaagggtagcttcggagatcttaccctcggaatgatatcatgtgggtcacctgagacatcttgtcaatctggcagaagcatgaacttgtttccttccaaggaaaacaacgtggcagcaaagaacctgacagctaaggatttg

SEQ ID NO: 919 - DNA, 372 bp, Glycine max
  Clone ID: LIB3028-044-Q1-B1-F11
gtacaactcaacatgcaaagatgtaatcttagcacaaaccaaggctaaggagattaaccaatggaaggaggaacgtatagctgaggaagctactaagttgcctaaagaggcagctctagaactggcagaaaaggagaaagttaaagctcaagctgccttggaagcatatgaggaagccattaagatggttgaaaaggaagcacaaagaagaattcaggcagaggtgaaggctaggagagaggcgcaagaaaaggatcgagcattaaatctgttgattatcaacgatactcggtacagaaaatacagtataaaggatattgaagaggccactcagaagttttccccatcattgacagtaagtgaaggtggata

SEQ ID NO: 920 - DNA, 95 bp, Glycine max
  Clone ID: LIB3028-044-Q1-B1-F12
aacctgacagcctccaaatccaatggcttcagagaagaaactttcgaacccaatgagggagataaaagtgcagaagctcgtcctcaatatctctg

SEQ ID NO: 921 - DNA, 360 bp, Glycine max
  Clone ID: LIB3028-044-Q1-B1-F2
gtttcgtgcacggaaggctaccttacgactccatcgacactgatcatcagttacggaacctcctcttgagcatcaaacaaagaaaaattgtatgttactactctataatggatattttctttattattattgtattctaatcatcctaatatttttgcttttatcaggtttttactaattctgacaggattcacgcgatgagggcgctggataggcttggggtcaaggactgtttcgagcaaatcatatgcttcgagactataaacccgaaccttccgtattcaacccgacccgacgaattccccatcctccttaaaccttcgctcgacgccttcaaaatcgcgcttgacgctgccaacg

SEQ ID NO: 922 - DNA, 340 bp, Glycine max
  Clone ID: LIB3028-044-Q1-B1-F3
ttcaaattctcatcacacaatggcttgcaaaccttcgtcgttccttgcacttcttctcatcgccactatccttcgtgccactacatggcaagcggtcgctagacgccacattattccaaaacactcaagcaaaggggacaagaaagagcctcaatttttgttccctccggaaggtaaattccacttgcctggctttgggggagtatgactgcgatcattcctttgggtttacacctcaaagcccaaagactggtggtagtggactagggtcaggacagcgaggtcgtggttatgttccaggtggtgatgacaccctttgtcccaaaccctggttttgagt

SEQ ID NO: 923 - DNA, 189 bp, Glycine max
  Clone ID: LIB3028-044-Q1-B1-F4
ggaaagacaagctttttgggcacattgctcttttccaggggcatgcaccagccattcctttggatgacactaaaggggcaggggtacctgaggcacccattcatgatagcaaacagaacaacaattaggttcagagcatgaacttcacttttggatcaaatccttcaaatgcagagtaagttccaaatg

SEQ ID NO: 924 - DNA, 335 bp, Glycine max
  Clone ID: LIB3028-044-Q1-B1-F5
caacggcacagcaggtggtggaagcatcattgccaatgacaagaaagcagtgtacaggcacattgtgaagtcagaagtgaatctcaatgctattattaatgggaaagcaggcttttcttccaacacgccttcttcaattaatccagacatatcatgtgaaagtaagactccacaagtagaggatatacacgatggttctagtgtgcttcacctggcatgcataattagtgattctgcaatggtagagctgcaccgacagtagggtgcagacgtgaatgctattgattctagagggaggacacctctacattacagcactatgagagggaagaatg

SEQ ID NO: 925 - DNA, 313 bp, Glycine max
  Clone ID: LIB3028-044-Q1-B1-F6
ggaaagggaacaattggagtgcacgaaaatcattaaccacagccctaagccccccgacgccttccatcggatcgcctcctaaaacaccacacatcacaacgaccgtgtttcggagcaatcaatgtaaaatctatggacaataacgacgaatctttattctctctccgtcgttgtttgttgcatcattaagagtagatgccaatggatccgaatccgcaagcctccgtggagtccgacccggacccgcttcgcgtgaagacgaagacccttgagggggtgctcttgcagtgtcagagagctctcgaagtgatta

SEQ ID NO: 926 - DNA, 359 bp, Glycine max
  Clone ID: LIB3028-044-Q1-B1-F7
ggcaaagattttgagcacaatggcctccacacaatgctttttgcaccaccacgccctcaccactccagcgagagcttcaacacagcgcctagttgtgagcaccaaaccataccacattgtttgcaaggcagcacagaagcaggttactgtccaagagggtgaggacactactactggccttgtctctcgcaggttggccctcactgtgctcattggtgctgctgctgttggctctaatgtggcacctgctgatgcagcctatggagaagctgtgaatgtgtttggaaaaccaaagacaaacacagacttcctttcatacaatgggaatggattcaagctctcaattccctcaaagtgga

SEQ ID NO: 927 - DNA, 374 bp, Glycine max
  Clone ID: LIB3028-044-Q1-B1-E10
ctcgagccgaatcggctcgagtgacgttgaagccacagtcgctcttttaggagctcactcagtgggaagagttcactgcaagaatctggtgcacagattataccccaccatagattcaacactggaccctgcacatgctgagtacctaagacgtcggtgcccaacacccaatcccgatccaaaagctgttctgtattcaaggaatgaccttaaaacgccaatgatcattgacaacaactactacaagaacatcttgcaacacaagggtcttctcactgtggatgaagagcttgccactgacccaagaaccgcatcttatgtccaaaagatggccaatgacaatgaatatttcaaccaacagttctcaagggcca

SEQ ID NO: 928 - DNA, 332 bp, Glycine max
  Clone ID: LIB3028-044-Q1-B1-F8
atccccaggaagcttgaatttaactatgtaataatgcattgaattagacatttaatgtattttagcccttaacatgtgttcattctacatttgtgatgaatattattgtagaatgaacacatgttaaaggccaaaatactattcatcacaaatgtagattttaagagtaggtaagtaattatatgtactaagaaaggaaaagtgtccaagcacttggaattcatagtcctacttacaaaatgccatcagtaagtttcactggtttactcccaagggtggtatcaaaatcttagaatagagtagaatagaccaatcgaattcacttttaaagt

SEQ ID NO: 929 - DNA, 351 bp, Glycine max
  Clone ID: LIB3028-044-Q1-B1-F9
tgagaaacatggcttccttaagctccttagtgctgctccttgcagctctaattctatcccctcaagttcttgcaaactatgagaatcccccagtgtacaagcctcccactgagaaaccaccagtttataagcccccagttgagaagcctcctgtttacaaacctccagttgaaaaccccccaatttataagcctccagtagagaagccaccagtgtacaagcccccagttgagaaacccccagtgtacaagcccccagttgacaaaccaccagtgtaaaagcccccagttgagacagcagcagtgtacaagcccccagttgatcaagccccagtttacacgcccccagttg

SEQ ID NO: 930 - DNA, 206 bp, Glycine max
  Clone ID: LIB3028-044-Q1-B1-G1
agaacttggtgataggcccgcctttgttgaatcttcatttatggtctttctttctattagttgttcttgtttgcgatatctttaaagctcttgcttttgttttgcttcaaggtgtggtgtgtttcacatttgaagtaacactgagacgagaggaaagtgaagttgagagttgaagaagatcatgaaatgggggttggttcccagga

SEQ ID NO: 931 - DNA, 317 bp, Glycine max
  Clone ID: LIB3028-044-Q1-B1-B7
cacatattctttgttgcaatatcacaaagaccgcgtccgtcacaatgcagctagctgtggcggccaacgctgtcgtttcagcgtcgccgttccgacctcatccccttctccggtcatccttctccggcgtctccgttaagctcactccgcaatccataacgttgtcacgcttgaagcccctcaccgtcgtcgccgccatcaagaaggccgtcgctgtcctcaaggggacctccgccgtcgaaggcgtcgccacgctcagccaacgagacgagcgggcgaccacagtttctgttaccatcactgggccttagccgggg

SEQ ID NO: 932 - DNA, 379 bp, Glycine max
  unsure at all n locations
  Clone ID: LIB3028-044-Q1-B1-B9
cttgtctccgaattagttatcttgagaaacattattcccattgctatatattatggctagcatgaaggttacatgggtggttgtgatcatgtgcatggccgtggtgggtgcaccgatgatggcgcaagccatgacatgcaatgatgtgacggtgaacatggcacagtgcctatcctacctgatgcagggaggaacaccttcaacactttgctgcagcggagtcaagaacattcttggctctgctgtcaccaccgttgacaaacaaactgtgtgcaactgtctcaaggcggatgctgctangtacaacatcaatgaccagtatgctcaggcactccctggtttctgcaaggtcaatgtcccttacaagatcagccgctca

SEQ ID NO: 933 - DNA, 218 bp, Glycine max
  Clone ID: LIB3028-044-Q1-B1-C1
gttgtcactcggtggtatagggcaccagagctcctaggctgctgtgacgactatgggacatctattgatgtttggtcagttggatgcagctttgcagagcttcttggccgaagaccgattttccctggttcagagtgtcgcatgcatctgaagttgagtatcaatatccgtgggagtcagagggaggaggaggttcaattcattgataagccataggc

SEQ ID NO: 934 - DNA, 370 bp, Glycine max
  Clone ID: LIB3028-044-Q1-B1-C10
taaagatgaaattcgaacaatgattttttcatattctttttaatacttttttggtttagactccctaagaatctgtcgatatttccaattaaatcatcttgttcctgtgaaagtcctataaaaaaaagggctatgccctttctttactcagaagggccttaatccaagttccaccaaacaagtttttattcatttgaaacatcattttttccgaatacaagaaaaaattcatttcaatttcaattatttctataagataaaatcgatatagatagattttatcttatagaaataattgagaaatacattcagttatgtcttcgcgtatcaaatattttcttttcatatcgatgcgtacgatatttttcca

SEQ ID NO: 935 - DNA, 377 bp, Glycine max
  Clone ID: LIB3028-044-Q1-B1-C11
ggtagggttcaggacaatgcttttgatgctgaggttgaaactttgggtaaaatcaggcacaagaatattgttaagctgtggtgttgctgcaccactatggattgcaagctcttggtttatgaatatatgcctaatggaagtcttggtgatttgcttcatagcagtaagggagggtcgttggattggccaacaaggtacaagatagctgtggatgctgcagaaggcctctcttatctgcatcatgactgtgttcccgcaattgttcatagagatgtgaaatctaacaatattttgttggatggggacttcggtgcgagggtggctgattttggagtagctaaggcggttgatacacaccgataggaactaaatccatg

SEQ ID NO: 936 - DNA, 370 bp, Glycine max
  Clone ID: LIB3028-044-Q1-B1-C12
ctccctctcgattttaacaaccaactgccaaataattaataatacaataacctaaataaaccgaactctggttaatcattgtgacacgttattttaatttttggtagaaagtaaacaacaaaaaattaaatttgattgttgcttattaaagagagggggagggagacaagatacaccaaagtcgtcgctcatggaagacttactcggccttttaaggattcacatcaagcgcggtgtcaacctcgccgttcgtgatgtcaatactagcgatccatacgtcgtcgttaagatgggcaagcagaagctgaagactcgtgtgattaaaaaggatgttaatcctgagtggaaggaagatcttacgctttctgtt

SEQ ID NO: 937 - DNA, 332 bp, Glycine max
  Clone ID: LIB3028-044-Q1-B1-C2
aagctttcttcaaggactttgctgatgccatggagaaactttctgtgtttagagtcaaaactggcgacaaaggagaggtgaggaacaggtgtgaccaattcaacagtattcctgcctaaatgaccgaagttactgaggttgaaattactagataattcgaaactatttcctatgcttgcatttatatatgacacgtgcatacttaaaagtattgacaattgatgatatatatatacatgtcatatatcaagattaattaagatcgtatagtctcggaggatctgataatttctagagattttgtgtacctagagagtcactatggatataca

SEQ ID NO: 938 - DNA, 266 bp, Glycine max
  Clone ID: LIB3028-044-Q1-B1-C3
ggtggagtggcggacatgtgtttcgatgggaatgcggtggagatcggacggctgttaggggacgtggccttcgagttcgagaaaggcgtggagatcgtggttccgaaggagagggtgctcgctgacgtgggcggtggggtccactgcgtgggaatcgggaggtccgagagattgggtgcggccagcaacatcgtaggcaacttccaccagcagaatccatgggtggagtttgatctcgcgaatcgaagaatcggattccgtgtggc

SEQ ID NO: 939 - DNA, 113 bp, Glycine max
  Clone ID: LIB3028-044-Q1-B1-C4
ggaaacttcacctctccacaccacaccttactatcaacttacctctcgccctgattttcccagactctctttctcggtgagtagcacccatgaatatctttgtacctacatat

SEQ ID NO: 940 - DNA, 194 bp, Glycine max
  Clone ID: LIB3028-044-Q1-B1-C5
agcaattctctattctgaagatggatttgacagcaagtggcaggggaatttcatttatgaccttttgggtctttcgtcctcgcgattccgctatccctgttttgtcccatccttgctctattgcgtttcaaatgaacggatgggtgtatcccgatgggtaccagacggtgaacctctccagtggcaggctccct

SEQ ID NO: 941 - DNA, 182 bp, Glycine max
  Clone ID: LIB3028-044-Q1-B1-C6
ggccagtagaacccccttgtttattctgcatacagatcgtcaggggctagccaccgagtgcagtgcagggatcggagaataatggtagagacagattcgtcgtcctcttcagatggagaaccctcgcaatcgctggcgtcgatggcggagaagctgcagcgttctggcattcactctgctcg

SEQ ID NO: 942 - DNA, 197 bp, Glycine max
  Clone ID: LIB3028-044-Q1-B1-C7
gagattaaaaagcaatatgtcgtgtttgagtgctaaggtcgtgagtaatatgccattgggtccattgagcgccaagttatgcttagttgttaatctttgtaatagctaaaacaatcacctacagttgtttgctcatcgaagtggctagggacagtgtgttttagtgaatgtctatctttgctatgtctgggttggtt

SEQ ID NO: 943 - DNA, 381 bp, Glycine max
  Clone ID: LIB3028-044-Q1-B1-C9
gagaggtccaccaaccttgactggtacaagggaccaactctccttgaggctcttgaccaaatcaatgagcccaagaggccctcagacaagccactcaggcttccattgcaggatgtctacaaaattggtggtattggtaccgtgccagtgggacgtgttgagactggtgtcgtgaagcccggtatggtggtgacttttggtcccactgggctgacaactgaggttaagtctgttgagatgcaccatgaggctctcacagaggctcttccaggtgacaatgttggctttaatgtgaagaatgttgcagtcaaggatctcaagcgtggttttgttgcatccaactccaaggatgaccctgccaaggaagctgccaacttcaca

SEQ ID NO: 944 - DNA, 336 bp, Glycine max
  Clone ID: LIB3028-044-Q1-B1-D1
gagaaaaatgaagtctttccatctcacagtgacagctttgtgctgtgtagtggttgtgcttggagtgcttccactctccctagatgcacaactagatccctccttttacagagacacttgtcccagggttcactccattgttcgtgaagtcgtcaggaacgtttcaaagaaagatccccgtatgcttgctagtctcattagacttcactttcatgactgctttgttcaaggatgtgatgcatcagttttgttgaacaacactgccaccatagagagcgagcaacaagctctgccaaacaacaactcactaagaaggtttggatgttgtgaacgaca

SEQ ID NO: 945 - DNA, 364 bp, Glycine max
  Clone ID: LIB3028-044-Q1-B1-D11
ggaacatcgggacaaggaagaacatttactacagaggtgattgaggcaatggcttctattaacgagagacctattattctttctctttccaaccctacgtcacagtcagaatgcactgctgaagaagcttacaagtggagccagggacgtgccatttttgcaagtgggagcccatttcctcccgttgagtatgaggggaaagtgtttgtgcctggccaggccaatagtgcatacatatttcctggatttggtcttggtttactaatgtctgggaccattcgagtgcatgatgacctgcttctggctgcctctgacgctttggctgcacaagtgagccaagagaactttgataaggggaccatat

SEQ ID NO: 946 - DNA, 373 bp, Glycine max
  unsure at all n locations
  Clone ID: LIB3028-044-Q1-B1-D12
cttgctccctcagaagcgaagaagaagccacagagaactagtctcctactctcacccgcaagaaaaaatggcatctcacatcgttggatacccccgtatgggtcccaagagagagctcaagttcgctctcgagtctttctgggatggcaagagcagcgccgaggatttgcagaaggtgtcttctgatctcagggcatccatctggaagcagatggctgatgctgggatcaagtacatccccagcaacactttctctcactatgaccaggttctcgacgccaccgccaacctcggtgccgttccancaaggtacggctggaccggcggcgagattgggtttgatacctaagtctccatggccagaggtaatact

SEQ ID NO: 947 - DNA, 323 bp, Glycine max
  Clone ID: LIB3028-044-Q1-B1-D3
gatctgtccatcgccgttgatttcgtccgagttgagtcctacggtttcggaaccgtttccaatggcgcacccagcatttccttcgatttgaaggtcgacgtcaacgcccgtcacgtcatcgtggttgaagacattgtagatactggacataccttatctaaagtcattgggcacttgaaatcaaagggagtagcctctgtttctgtatgcactttccttgataaacctgcaaggagaaaagttcattttcagttgctgggtgaagggaaatactacgcgggatttgagtgtccagaccagttcgttgtaggtaatggacggga

SEQ ID NO: 948 - DNA, 332 bp, Glycine max
  Clone ID: LIB3028-044-Q1-B1-B6
ttcagtttgtggcgaaaggagagaacgtgtgtgcctcgccgtgtaagagtttatgggtgctgcgaaaggagagaacgtgtgtgcctcgccgtcgccggaaatctcgaaggaagtggaccccagccatgcctccgagaccttgcgcatcgttaacgttatgggggctgccacccccattcccgctaactgcaacgcgcgtggcttctacgacgctttcctccgaagcttcatcaaggtcgatcacatccaacgtggaagaatttcatgcactgtgagtgccaaaccacccatctgtaatcgctatggaactctgcatggaggttctgttgggt

SEQ ID NO: 949 - DNA, 313 bp, Glycine max
  Clone ID: LIB3028-044-Q1-B1-D7
ccaggttgtgcctggatatggacatggggttttacgccagacagatccaagatacacatgtcagagggagtttgctttgaagcatttgcctaatgatccatatttccagctggtgtctaaaataaaagaggttgtgccgcccattcttaccaagttaggcaaggttagaaatccatggccgaatgttgatgcgcacagtggagtgctactgaactactatggtctaactgaggaaaactattatacggttctctttggtgtagcagcgagcgcgggagttggccctcagttgatatgggatagggctcttgga

SEQ ID NO: 950 - DNA, 141 bp, Glycine max
  Clone ID: LIB3028-044-Q1-B1-D8
cactattgtgtttagttttgtttcctttgtagtttttatttttccgttttattgttttgccccccgtttgtaattgcatgcttggaaccggatagagattgtgttgaaattttatcgcttacaattcgtttgagtttcctc

SEQ ID NO: 951 - DNA, 334 bp, Glycine max
  Clone ID: LIB3028-044-Q1-B1-D9
gaaaaactttctataattagagtctcactctcagactcgttgtatgtatggctacgctctcgctcactctcaactgttggagtaacgtggaacttgctcacagaagatttccgtcaaccttaacttccctcggccgaaggaattgtatagtcaaacgttcttttgccaggaggtcattgacaaatccaggaaaaatgttatacaaggaacttgacatttcttacctgataagtttgtgttcagaatgaaaacttggacacttctctaactcgagctgccgcgatttctaaccctttacctcccatgagtgctgtgcttcacgcttccagaaaac

SEQ ID NO: 952 - DNA, 379 bp, Glycine max
  Clone ID: LIB3028-043-Q1-B1-H6
ctcgtttgttaccttgtgggcttcatattattggtgagcctccctcagccttggaagcagttgctacactggtcaacattgctgcacttgatcgtcctgaagatggtatttcttctcttccatcaatattagctgacactgtaggaagagatatagaagatgtgtatagaggaagtaacaaaggaatattgaaggatgtagagcttcttagacaaataaccgaggcatcacgtggagcaatcactgcctttgtggagcgcactactaataataagggtcaagttgttgatgtagctgataagcttagttcaatccttggatttggcataaatgagccatggatacagtacttatcaaacaccaaatttttacgaactga

SEQ ID NO: 953 - DNA, 387 bp, Glycine max
  Clone ID: LIB3028-043-Q1-B1-H8
gtgccaaagttcatattaagagagaaagagagagagagatagaagggaaaaaagcatcaaagatcatgaaacccaacttttcctttttatctaagcttttgatactgcaatatctatcagttttatgcatttctcaggaatttgatttcttctactttgttcagcagtggccaggagcatactgtgacacaaagcagagctgctgctatcctaagactgggaaacctgctgctgatttcagcattcatggactctggcctaacttcaaggatggctcatggccctcaaactgtgaccctgacagtgtctttgataaatctcagatctcagacctcattagcaacatggagaaggattggccatccctgagctgcccaagtagcaatg

SEQ ID NO: 954 - DNA, 393 bp, Glycine max
  Clone ID: LIB3028-043-Q1-B1-H9
tctcttggttgatgacaccaagagacagcacaaagacccttcgtttcaatcccacaacacactcattcctcattcttccactcccgcacaagaatggcgtctttgcagcaccccacagcttccctccaatccaaacacgtcctaatcccccgaaacactcttacgcagaaactcatcctcaacctctcctccctcgcgggcagcaccttcaccgtcctcaagctcaaattcttcagcggcggcgccgtctgccgctccaccggcgcctcgggagccagaatgtcagccaacgcagcctccagttacgcggctgccctgaacgacgtggctgccgcgaacaacacgctcgacgcgacaaccgcgggcatccagaacatcgaccagatattctcg

SEQ ID NO: 955 - DNA, 357 bp, Glycine max
  Clone ID: LIB3028-044-Q1-B1-A10
caccctccctcaagaggaggtgggtactatcactcaccaccaacttatggaggtggtaaccccccaaaatcaatcactgtgaacccaacttcaaccccaatttaccccggtacccccaatatcccctcaacacccccttaccatccttccctaactcccttcactggtacatgcaactactggaacacatacacactaatcatttcgggattgctatgctggtggggaaccttaggccatgcatttggtgtctctagtatgccaggatttggtaccagtctcagcttgccacaatcactttccaacactagaactgatggcctatgagcactctacagagaacggacagcttccttt

SEQ ID NO: 956 - DNA, 383 bp, Glycine max
  Clone ID: LIB3028-044-Q1-B1-A12
atttctttctattcatttcttcattccaccatcaccatggtcaaggagaagaagaacgtggtggtcaagaacaagaagccaaacagcaatgccgacgagcttcactttcgcggcgtccggaagcgaccatggggccgctacgccgccgagatccgtgaccccggcaagaagacccgcgtctggctcggcaccttcgacaccgccgaggacgccgcccgcgcctatgacgccgccgcccgcaacttccgcggccccaaagccaaaaccaacttccccgtgccccccgacgacaacaacatcaacaacgttaacgtgaacaacaacaagagtgttaacgttaaatctcacagtcacagccagagcatcaccgtggagtccgccac

SEQ ID NO: 957 - DNA, 385 bp, Glycine max
  Clone ID: LIB3028-044-Q1-B1-A2
cttcgacccgtcggattcaatcccgaagctgcacacggactcgagctgttcggagcaggtggtatcgccggaattcgcgagcgaggtgcaaagcgagcccaagtggaacgagtgggagaaaagcctcgaatttccatttaattacgtggatgccactctcaacaacagcttcatggcccaattccagggcaataatcagatgttgtcgccgctgcaggacatgttcatgtactggcccaacaagtccttttgagcacatcatgatggttttaaattagcatccgcaattgctcttaagattttctgactcaccatgcgaccacaatcgtaatttaaaaccatgtcacataaaatccacgcgcgccgcccattcgcatttgcacgg

SEQ ID NO: 958 - DNA, 332 bp, Glycine max
  Clone ID: LIB3028-044-Q1-B1-A5
caagctgcagctaccttcatgcaacccaccaaggttggcatagcctctcgcaacctcaaatctacacaatgcatttctaaggcttttggcttggaacctgctgcagctaaactcacttgctcccttcagcctgatctcaaagaatttgctcaaaaatgtgtcgacgctaccaaaattgcaggattcgcccttgccacctctgctctcgttgtttctggagcaagtgcagaatgtgttccaaaaaggctaaccttcgacgaaatccagagcaggacgtacttggaagtgaagggaactggaactgctaaccagtgcccaaccattgaaggtgg

SEQ ID NO: 959 - DNA, 367 bp, Glycine max
  unsure at all n locations
  Clone ID: LIB3028-044-Q1-B1-A6
cagagaacatttagaacaaagaagagagtttgagaaatggggaggggtaagattgagatcaagaggatagagaactcaagcaacaggcaagttacatactcaaagagaaagaatgggatcctaaagaaggccaaggaaatcactgttctatgtgatgctcaagtttcgcttatcatctttgctgcatctggaaagatgcatgactacatcagcccttctaccacgttgattgacatattggagaggtaccacaagacctcacggaagaggctttnggacgccaagcatgagaacctaaacggcgaaattgagagactcaagaaagagaatgacagcatgcaaatttagctcaggcactttaagggtg

SEQ ID NO: 960 - DNA, 102 bp, Glycine max
  Clone ID: LIB3028-044-Q1-B1-A7
gagaaatcatggaaaactggtgtcgctgaagctggactgggggcacgccgcaatcgtgttcaaatgcgggagaagacaagtttggactgagcccaatgaagt

SEQ ID NO: 961 - DNA, 338 bp, Glycine max
  Clone ID: LIB3028-044-Q1-B1-A8
gagctcctcgctgatataccttatgggtataaatctgatatgtggtctcttggttgctgcatgtttgagattgctgcacatcaaccagcttttcgtgctccagacatggctggacttatcaataaaataaacagatcctccatttctccactgccaattgtttattcttccacactgaaacaacttatcaagagcatgcttaggaaaaacccagaacataggccaaccgcagctgaattgttaaggcatccgcttttacaaccttaggttctgcgctgtcataatgcatcatctaatgttcttcctgtatatcccctagttaatccagaggattaagc

SEQ ID NO: 962 - DNA, 384 bp, Glycine max
  unsure at all n locations
  Clone ID: LIB3028-044-Q1-B1-A9
cttctaacacatacactactctctctctctctcttattgtatggccgccaattccagtagccgagggatcaccgccttagggaagcgagtcgccaaccggatctggacttccaacgcacctcctctcacttcaaggaggggagcatacagtagcggctcagtgtacgacaagaaccctgatgatgagatccagtctgggcaggtcccagacgatgtgatccaggcggcaacacaatccggcaaatactgggccccacatccacagactggggtatttgggccccccggaggaggtgaccaaactgcttctgccattcactctgatgcgctggaagagaanggctggtttccgcccaacagtctcgaggatttcgagaagcctca

SEQ ID NO: 963 - DNA, 169 bp, Glycine max
  Clone ID: LIB3028-044-Q1-B1-B1
agcaaggcaactggacagctctggcatttatgtggaaggagagcccgattgcagttttcttcccccgggcattgggtccgtggacagattcatcaggagtcctaaccttcaagtgggatgtggacaacgcaactgcagtttttgtatcggcgctccttggttttctctt

SEQ ID NO: 964 - DNA, 373 bp, Glycine max
  unsure at all n locations
  Clone ID: LIB3028-044-Q1-B1-B10
cttagctcaaacctcacctcaataatctttcgtgctagctagcttaatcatattccaattccaacagaaccaaattctgctagctagctagtacgtcaaaggaaataaaataatatggcattcagcgggacccaacagaaatgcaaggcttgcgacaaaactgttcacttggtcgaaggtttatctgtcgatggggctgcttatcacaagaattgcttcagatgcagccattgcaatggccttcttgcgataagcaactactcatccaccgaaggggttttgtactgcaaggtgcactttgagcagcttttcaaggaaactggcgcctaccccaagaaatcccagtcgtctggaaaagcctcnactcgagctg

SEQ ID NO: 965 - DNA, 378 bp, Glycine max
  Clone ID: LIB3028-044-Q1-B1-B11
ggcatctatggattctgcttcattttttcgggacaaaagccttggtgcagactcccctatttctggtttaattgcattactagcagctgttgatgcactttctcatttggatggtcttggtgaccttagtaaacagcttgtttttgcagttttcactggagaggcatggggttaccttggaagtaggagatttttggtagaacttgacatgcactcagatgctgttcatggccttaatcagacattaattgaaacggtcattgaaattggttctgttggaaagggtctcagtcaaggtgttaaaaacttttttgctcatacaaaaggggattcttctgccacaaatcagacagtggctgccttgaaacgtgcacagga

SEQ ID NO: 966 - DNA, 401 bp, Glycine max
  unsure at all n locations
  Clone ID: LIB3028-043-Q1-B1-H5
aaagaacataaatagtatatacgagtcctagtttcatataatagttccatataacaaacattatggaagaagattatccacccgggtttcgtttcttcccaacagaagaagagcttgttggcttctacctacacaacaagctagaaggccaaagaaatgccatagccatagccatagacagagttatcccagttattgacatcaatggagttgagccttggaaccttccaacacttgctggggagctttgtcgtggggacacggagcaatggtttttcttttcgcccggtcaagagagggaaaccaggggaggcagacccagcaaaaccacagcttgtgggtaatggaaagctacaggttccccttgctatgtttactcttctcacaacanagtcattggg

SEQ ID NO: 967 - DNA, 274 bp, Glycine max
  Clone ID: LIB3028-044-Q1-B1-B12
cgtatctcgggattctgcatcattatttccggacatctccattggatcaatcacccctattactggtgtaaatgcattactagcaattgtgtacgtggtttcacagtttgatggtcttggtgagcttagtataaaacgtgttgatgtaattgtcactgtagaggaatggggttactttctgatgtaggaaagatttggtataacatgatatctaatcagaatctgtacaaggccttactcagccatcaactgagtcggtcactgaactgggttc

SEQ ID NO: 968 - DNA, 195 bp, Glycine max
  Clone ID: LIB3028-044-Q1-B1-B5
caaaggttaagctttttacatatatttcttcttttcactttgtagatataaaggaaagaatgattcatgtgtcaacttactggtttggtggtcgccatccaaatatacttgtcagataatgcttttcattgtttcaaaattgttacactggcatttgtctaccactgcaatgagaacatacggaaacttggcctc

SEQ ID NO: 969 - DNA, 398 bp, Glycine max
  unsure at all n locations
  Clone ID: LIB3028-043-Q1-B1-G10
gccgtatttatcacttactgcccgaagaaagctaggatgtcgacattgaggatgattgttttgttaaattttgggggattttgcacaattgtcctcttaacccacctactagcaaaaggagaagaagcccgtgtcaagcttctaggatggatttgcgtagtctttgccactagtgtttttgcagcacctttaagcattattagggtggtaattcggacgaaaagcgtagagttccttcctttccctctttcacttctccttctgataagcgcaattatgtggctcttatacggtatttccctgaaggatatctatgttacactcccgaacgttgttgggttaacatttggagtcattcanatcggtctctatgcaatgtacagaaacaacaaacccat

SEQ ID NO: 970 - DNA, 395 bp, Glycine max
  Clone ID: LIB3028-043-Q1-B1-G11
ctggcctttgttacggatatcaatgtccaggttcaagaggctataaactactactcaattgagtcatcagttgcacttttagtaacattggtgatcaatctgtttgtgataaccgttttcgctagggtgttctacggtacagaacaggcgaaaggcataggattggtaaatgcagggcagtatcttcaggagaggtatggaggagggttgtttccaattctctatatatggggtattggtttgttagcagctggacaaagtagtaccatcacaggcacatatgcagggcagtttataactgagggctttcttaagctcaatataaagaagtggttgagggcattgatcactagaagttgtgcaattgttccaactatgatttgtgcaattgtttt

SEQ ID NO: 971 - DNA, 312 bp, Glycine max
  Clone ID: LIB3028-043-Q1-B1-G12
tgaatatgaatatgaatatggtgggtggtaatattgaccgatattaccctgctggtttccctttcattgctgagaatatggatggccagaatgctaaggctggttctgggactggccaggtttcagaatctgttgttttctctgccagcaatcctctcatggtgtcatcatctgtttcccctggtgtgttcacttctcagcagcagcatcaacagtttggactggtggatgagaaacctcacgttattaatccacagtttatgttgaaccagaaccaagttcagttctcagataatccctctttccttttgc

SEQ ID NO: 972 - DNA, 328 bp, Glycine max
  unsure at all n locations
  Clone ID: LIB3028-043-Q1-B1-G3
ggtccaacaaaacctcaaataaaccaagaatccccccaaacctaaaagtggcttccctcctggcntcgcttctcctcctcaaccttgttaaggcggttcaaccggaacatgtacaaacgcaggggtcccttctgcaaaaaataaattgtaatggaccatgtgctgcaaggtgtcgtttatcacctcggccacgtctctgcaaaagagcctgtggaacttgttgtagacgctgcaactgcgtgccacctggcactgctggaaaccaagaagtgtgtccctgctatgctagtttgactactcatggtggcaaaggcaagtgcccttagac

SEQ ID NO: 973 - DNA, 408 bp, Glycine max
  unsure at all n locations
  Clone ID: LIB3028-043-Q1-B1-G4
cgcgtgtatgttggtaacttggattcacgagtcactgagagagatctcgaagacgaattccgcgttttcggagttattcggagtgtttgggttgcacgtagaccacctggttatgcttttattgactttgatgaccgcagagacgcacaggatgctatccgtgaattggatggcaagaatggttggagggttgagctttctcacaactctagaggtggaggtggtggtcgtggtggtcgctctggtggttctgatttgaaatgttacgagtgtggtgaacctggtcattttgctcgtgaatgccgcatgcgtggtggttcaggaagacgccgtagccgtagtccgcccagattccgtanggagccaagttatgggcgaaagagttacagtcctcgtgggcggtcccct

SEQ ID NO: 974 - DNA, 411 bp, Glycine max
  unsure at all n locations
  Clone ID: LIB3028-043-Q1-B1-G5
gaaaaacactgcaactgatagaacactaagcagttgctaccatggtcaccttcaggtttcaccagtaccaggttgttgggagggctcttcccactgaaactgatgtgcatcctaagatctacaggatgaagctgtgggccaccaatgaggtccgtgccaaatccaagttctggtatttcttgagaaagctaaagaaggtcaagaaaagcaatggccaaatgctagccatcaatgagatttttgagaaaaatcctaccaagatcaagaattatggaatttggctgcgatatcagagccgaactggttatcacaacatgtacaaggaatatcgcgatactactctaaacggcgctgttgaacacatgtacaacgaaatggcatctcgtcatanagtcaggtctccatgcatcc

SEQ ID NO: 975 - DNA, 403 bp, Glycine max
  Clone ID: LIB3028-043-Q1-B1-G6
ctcacctaacaatcaaccctaccattccaaagctcgaaggtgaacagtgagtgagtgagttattcagaacccaggatttggcgaaagtgaagcgatgagcagtgataggaatattggggttgccttggacttttccaaaggaagcaaaatcgctctcaaatgggctattgacaatcttctccgcaacggtgacatactctacatcgtccacatcaagccttccggaggaagtgaattccgaaatcttctctggtccaccactggttcacctctgattccgttgtcggagtttcgtgagaaggaggtgatgcatcactatgaggtggatactgatgctgaggtgttggacttgcttgacaccgcttctagggagaaacaggtgactgtggtggcaaagctatac

SEQ ID NO: 976 - DNA, 395 bp, Glycine max
  Clone ID: LIB3028-043-Q1-B1-G7
atttgatgaatctgaaaggtactagctagctagctagtagttctacactgttaggtagcatcatgaggaagcgccaagtagttgtgatgaagagaggagcctcaaatgagcgctatgacggtgaaatacagctagtgccagaagaatcacgccgcgaatgtgggacggtatgctgttgacggctgcagggagttcatggcgagtggcgccaccggagaacgaacaagtgctgctctcacttgtgccgcctgtggttgccacatgaacttccacaggagacatgaaaccgatgtggtgagtgagtgctcctcgcctacctccaatggaacttaatcagagctagcttcgtcataatgtgtatacctcaacaagtatgctgctacactcgatatcat

SEQ ID NO: 977 - DNA, 412 bp, Glycine max
  Clone ID: LIB3028-043-Q1-B1-G8
ctcaaatcatggatttcttgcaagcacaagaaaatcagatacttgtgggtgtggccgtggccgttgtagccattgggcttggtgcagtatatctctattcatccaagaagaccaaaggttgcttggacccagagaactttaaggcattcaaacttgttaagcgtgcacagctgagccataatgttgcaaagttcacatttgcactcccaacacctacatctgttttgggtcttccaattgggcaacacataagttgcaggggtaaagatgctcaaggtgaagaggttatcaaaccatatactcctactactttggattccgatgttggacattttgaactagttattaagatgtacccacaaggaaggatgtcacaccatttccgtgagatgcgtgttggtgactaactttc

SEQ ID NO: 978 - DNA, 395 bp, Glycine max
  Clone ID: LIB3028-043-Q1-B1-G9
ggcttcatcgctgagaagagatgcgctcctctaatgctccgtttggcatggcactctgctggaacttacgacgtgagctcgaagaccggtggtcccttcggaaccataaagcacccctccgaactcgctcacggcgctaacaacggtcttgacatcgctgttaggcttttggagccactcaaagcggagtttcctattttgagctacgccgatttctaccagttggctggcgttgttgccgttgaggtcaccggtggacctgaagttcccttccatcctggaagagaggacaaacctgagccaccaccagagggtcgcttgcccgatgccactaagggttctgaccatttgagagatgtgtttggcaaagctatggggcttagtgaccgagatat

SEQ ID NO: 979 - DNA, 332 bp, Glycine max
  Clone ID: LIB3028-043-Q1-B1-H1
cacacatgccacgtcactagactcacaccagaaactctcaatggctgaaactcccacaatccgtttcggcgtcatcggctgcgccgacatcgcgcgcaaggtctcgcgcgccatctccctcgcccccaacgccgccctttacgccgtcggcagccgctccctcgacaaggcgcgtgccttcgccgccgccaacggcttccccgccgccgccaaggtgcacggctcctacgaggcggtcctcgacgattccgacgtcgacgccgtgtacgtaccgctccccaataacctccacgttcgctgggccgtgctcgccgcgcagaagaagaagcacg

SEQ ID NO: 980 - DNA, 359 bp, Glycine max
  Clone ID: LIB3028-043-Q1-B1-H10
attaaaaaagaccatgaactccaagcatggtggaaagaagttgttgagaagggacatggtgacttgaaagacaagccttggtggcctaaaatgcagactcttcaagagcttattcaatcatgttctactatcatatggattgcttcagctctccatgcagctgttaattttggacaatacccttatggtggttttatcctaaaccgtccaactcttagcaggagatggattccagaagaaggaactccagaatatgacgagatgacaaagaatcctcaaaaggcttatttgagaacaatcaagccaaagtttcaggctcttgttgatccttcagtgatagagatattgtcaggacatgc

SEQ ID NO: 981 - DNA, 399 bp, Glycine max
  unsure at all n locations
  Clone ID: LIB3028-043-Q1-B1-H11
gagcgagtgggagaggcagaaagaagagaaaaaaggggaatggcatggttgcagttgcagagaatcgtgaccaagggaggtgctaatttgatctcaccactcccactttcacgattcttctcgaaatcttcttccccctatgttgtgaaagttggaattccagagtttctaaacgggattgggaagggggttgagtcccacgttcctaagcttgaatccgaaatcggtgatttccagaagcttctcctcactcgcaccctcaaactcaagaagcttggcattccttgcaaacacaggaagttaatattganatacacacacaagtacaggctgggattatgganggcacgtgttgagtccatcaatgcctgattggtttctaattagtaagtagtcgct

SEQ ID NO: 982 - DNA, 324 bp, Glycine max
  Clone ID: LIB3028-043-Q1-B1-H12
gtcctcctcagaaacgcagataaagagaagggatagggtgtgaggtcgtaccttccccgttaccacccaactcatacatgccttccttgtctatcactcctgagctgttccagtttaatttggcctaccaccatgcaccaatttaatgtattagtatgccacactatgttatcagatatatggtatggcttcaaataaactaactcaggaccttatcttaataccttgaccttagaacctctctcaatggggcttgttcaaatgtgcaagcactttggagaccatggcttccaagagagtacaacaattggggtatattatttt

SEQ ID NO: 983 - DNA, 298 bp, Glycine max
  Clone ID: LIB3028-043-Q1-B1-H2
ggaatatctggatggacagctacgttactctttatgtggatgccagtttctcaaatgtggacaaattatctcaatcctgagaacatgaaaggcttgtcagctttttctatgctccttgccatgcttggaaatgggcttatgcttccacgtgctctcttgattcgcgatttcatgtggttcactggttcagtgtgggctactcttttttatggatatgggattattgcttgcctatactatttaaacattagcagcaaggaattcttcttatcagcaaccggttggtctgatttcgttt

SEQ ID NO: 984 - DNA, 388 bp, Glycine max
  unsure at all n locations
  Clone ID: LIB3028-043-Q1-B1-G1
gtggttcttcctggtctccatgacgcagtccttcgtcaacggcggaggacttcccggacaggccttcttcaactccgctccggtgtgggtcaccgggggcgaccgtctctctgcctcggcctgcgagagggcgaggcagggacacgtgttcgggctgcaaaccctggtttgcataccgtccgcgaacggcgtcgttgagctggggtccaccgagttaattttccagaacccggatctgatgaacaaggtgaaggttctgttcaatttcagcaacaacaacttcgacatgggttcttcttggcccgccaccagcgccgattagggcgaaaacgacccttcctcgctctggctcagcgattccgaagttangggattcattaacactgtt

SEQ ID NO: 985 - DNA, 322 bp, Glycine max
  Clone ID: LIB3028-043-Q1-B1-E3
acgcctacttaacatcggaatccggtccaattccgggtcccaaggaaaacaaaaccggacctccagaagccaaggaaaagggggccttgctaaccttccattctccggaatacaaccaaaattcgaacggtccacccaaaaccaatcaaagcaattaatccctcctccgtccaacacgacatcatgggacgcgtggctccattctacgaccggtggtctcgcgcgtatgggaaaactttcttgtactggttcggttcgacgccgcggttggcggtaaccgaaccggacatgattaaggaggtgctcatgaacacgcgcgggg

SEQ ID NO: 986 - DNA, 353 bp, Glycine max
  Clone ID: LIB3028-043-Q1-B1-E4
ggctttcggaccacgaaagtgcaattttgaaaaacagctagtgcattaccgaacacaaagtagaaaagagatacaacaaccatctggaatagtaatccaagggggatccattgtgtctgatcctgaattctactcagtgagatttgagaacaaggcttacctagctcgtccatggaagaattactctaggaccattatcatggacacatacattgatgatttgattgacgcggatgggtatttgccatggcaaggactagagggtccttctggtatggatacatgcttctatgccgagtaccacaacattggccctggttcagacaaatccaagcgtgtgaaatgggctggga

SEQ ID NO: 987 - DNA, 396 bp, Glycine max
  Clone ID: LIB3028-043-Q1-B1-E6
ctccaagatgcttgtttggctcagcaagccttggtgagattgcaatattagctggtgggtgtgattcagagggacacatccttgactctgctgagttatataattccgagactcaaacgtgggaaacactcccaagaatgaaaaaacccaggaagatgtcctctggggtatttatggatggaaagttttatgttataggggggattggggggagtgactctaagctcctcacatgtggagaggagtacaatttacagactaggacatggactgagattcctaacatgtcccccggacgtagtagtacgggtcctgagatgcctgcaacagctgaggcaccacctctggttgccgttgtaaatgatgaattgtaggctgctgaatatgctgacatgg

SEQ ID NO: 988 - DNA, 406 bp, Glycine max
  Clone ID: LIB3028-043-Q1-B1-E7
acttaaaacccgctcttttgatgcaataagggctgagctgagggcattctttgatgtgcatgatcaagaaggaagctacccaggaggggttcatttagagatgacagggcagaacgtgacagaatgtgttggaggctcaaggactattacttatgatgacttgagctcacgctaccacacacattgtgatccaaggcttaatgcttctcaatctctcgagcttgcatttaatattgcggacaggttgcgcaagagaaggctcaattcaactcgatcacttggaatttagacaagacggggtctgtcttcctttgtacctggatcacaatactggtcaaacatgtgttgagttttcttgagcacagtgaacaaatactctactgtgagccactctaccgagtttcat

SEQ ID NO: 989 - DNA, 404 bp, Glycine max
  unsure at all n locations
  Clone ID: LIB3028-043-Q1-B1-E8
gcaggttgtggggtcgcctgaggaaactagtagactcttgctatgtgaagcgacggtgactgtgatgagacactgcttttatctccttggaattgaacctgtatacaggctatgacatataagagcttcatatgcaaattatttatcagatttttttgggatatacaagtataggaaacttcacaatgaaaattgttcaggcaaattcgatcacctcttcccctcttccattttgttaattgtatttgagttgtaacttttacgaaggaaagtaaataatttatagcaatattgttgacaaggtcncatgaaatttatttagatgagttatattttgctttacttgtgttccaagagaaattactagaaaatggacgttatggagtccattgtacatttgtact

SEQ ID NO: 990 - DNA, 392 bp, Glycine max
  Clone ID: LIB3028-043-Q1-B1-E9
gccagcgagtgagcgagcgagcgaggtagggttttcgttgttcccccgtctttgaattcagttcgcgacgatggggtccatccccgatccaggcgagttgagcgagttgactcagccgagcttcgacgagttccagcgccaaacttccctcatgaccagctgcaccctcctctggaaggagctctccgaccacttctcctccctcgagcaagacctcaaccacaaatccgaagccctcaaacgcaagattcgcaccctcgacaacactacttccgactccctccgcctcctcgatcgccgcgaaacctccctcgacgccacgctccagatcgccctccgcacgctcgacacgcgccgcaccgctgccctctccggcctcctcaacgacgccg

SEQ ID NO: 991 - DNA, 403 bp, Glycine max
  Clone ID: LIB3028-043-Q1-B1-F1
attcactgctatgttcaggaggaaggccttcttgcattggtataccggggaaggcatggacgagatggagttcactgaggctgagagcaacatgaacgatcttgtgtcagagtatcaacagtaccaggatgccactgctgatgaggatgagtatgaggaggaagaggaggaggaggagtatggccaacatgatatgtgattttgaacttggtaatgtattgcggtggcttgaagatgtataacatgccgcaacttcctgttgccggttgattgtctcttttgaggggatggttctgttccggctagatctagtttccattactgttctataaaactggttctgtttgtttccgtttttatgtaacctgttgtttgtatggaagacaatatgaaactgctatta

SEQ ID NO: 992 - DNA, 387 bp, Glycine max
  Clone ID: LIB3028-043-Q1-B1-F10
agaagattgagaaaggtaaaggtccttgttgttccggtgtgctgctagagaatctggtgaaggatgtcaattgttccaatcaaccaaggtcactcccaggactcttgggatcaattcatcgattttcctctccctccttccatctccagcttcttccccggcttcgaattcggattcggctcatcggtggttaacacacgtgtggactggagggagactcccagagcccacgtgtggaaggtcgtgcttcctggcttcacaaacgaggacgtgctggttgagctacaagaccagagggtgctccaggtcagcgtggagagtggtaacttcctgacgacgtttaagatccccgacaacggttacctcgaacaactcaaaaccaacatg

SEQ ID NO: 993 - DNA, 95 bp, Glycine max
  Clone ID: LIB3028-043-Q1-B1-F11
gaatcactgaaaagaggtaaaatgtcaatctaaaatatatcttgtgctacaaaagttaaattctgatcctctaatgtatgaactctgttctcgtt

SEQ ID NO: 994 - DNA, 401 bp, Glycine max
  Clone ID: LIB3028-043-Q1-B1-F12
caagaaaccaagcaaatcattgttctctctgtcctgtgttttgtgatttcccccttcaagccaccaccaatggccaacaacgagatgcaagttgagaggggtttggacttggaaaggtacatggggcgttggtatgagatagcctctttcccttcaaggaaccagcccaaggatggcgtgaacaccagagccacatacactcttaggaatgatggcactgtgcaagtgctcaacgagacttggagtaatggcaagagagggcacatagagggaactgcttttaagtctaaccgcacaagtgatgaggccaagttcaaggtcaagtttttatgtcctccctttttgcctatcattcctgtaacaggggactactgggttttgttcattgatggtgattacca

SEQ ID NO: 995 - DNA, 392 bp, Glycine max
  unsure at all n locations
  Clone ID: LIB3028-043-Q1-B1-F2
gaaactaataacctcttcgaatcaattgatacgcattcaagccctaaatttcaatctagggtttctttgcacgctaattccatcttcaaattctgccttcattcgattcaggggggaattaaattgtttctattttttttcgaatttaccacaaattagaaatcgataaagaaaaatggtgagggtgttgagaagctgcattcaatcgattttgaagctggtgaactcggtgattgggatggcggggctagccatgattctgtactccgcatggatgattaaggtttggcagaggaagatgggcgaacttccctttggtcacgattctgattacccacctccgtggttcatttacatgtntcttggccttggaattgctttctgtgtaatca

SEQ ID NO: 996 - DNA, 381 bp, Glycine max
  Clone ID: LIB3028-043-Q1-B1-F4
aaggaaatttggcttgcaaatcaataaaccctttccttttttcaaaaaaggtttcaaaggatttgttccccaagcagttggagaacatgatgtctctggtctctcctcgtactggcaggcatttgcagcgctatgacaaaggctgtcgccaagttgtgggatgcattccttacagatacaagaacaatggaacacaggataaggaattagaggttcttgtgattagtgctcagaagggtcatggaatgcagttcccaaagggtggttgggaaactgatgaatccatggaacaagctgctttaagggaaaccatagaagaagctggggttgttggcagtgttgaacgtaaattgggaaaatggtattacaagagcaaacgcc

SEQ ID NO: 997 - DNA, 385 bp, Glycine max
  Clone ID: LIB3028-043-Q1-B1-F5
cacacgctgcttccgattgaaggcatctaaggagagaaaaatgcacgatttctgcttcacgatcccctacggattgatgttagtgggtggtggactgttcgcctacataagcaaagggagcatcgcttctctcgccggaggcgccggctccggtttgcttctcatcgtcgccggctatctcagtctcaatgctttcggcaaacgaaaaaactcttacctcgctctctttctcgagaccgtttgtgcagccatactaacttgggtcatggggcagcgatatttggaaacatccaagattatgcctgctggtcttgttgctggaatcagtgctctcatgactctgttttatctctacaaattagcaactggtggcaaccatctcccc

SEQ ID NO: 998 - DNA, 411 bp, Glycine max
  Clone ID: LIB3028-043-Q1-B1-F7
ggcatacatgcaagggtatgacaaagaaggccaccctgtgtgctacaatgcctatggggtgttcaaggacaaggaaatgtatgaaagggtctttggtgatgaggagaagctgaagaagttcctaaggtggagggttcaggttcttgagagaggcatcaaggtgcttcatttcaagcctggtggggtcaattccctcattcaggtcacagacctcaaggacatgccaaagagagagcttagggtggcgtccaaccagatcctctccttgttccaagacaactacccggaaatggtggctcgcaagattttcatcaacgtgccatggtacttcagcatgttgtattcaatgttcagcccgtttctgactcagagaaccaagagcaagtttgtgatctctaaggaaggaaatgc

SEQ ID NO: 999 - DNA, 409 bp, Glycine max
  Clone ID: LIB3028-043-Q1-B1-F8
caacaacgacaccgtatcataccgtaacatgttcacagcaccttttcctacatccactgttactctctccggtgaaagcgtaacctcaccgccgcgccacgtcagattccggtcagtagtatcgttcgccaccgccactttcacggaggagcaacaacataaggcagctccgtatctgagacctcatcacgggatggctttgagcgcgacgctgtacgacattctggggatccgcgccacggcgtccggcgaggaaatcagggcggcgtaccggcgactggcgagggtgtgccaccctgacgtggcgccggtggagcgaaaggaatcctctgcgggcgagttcatgaagatccatgctgcgtactgcacgctctcggattccgataagcgccacagctacgatagaagc

SEQ ID NO: 1000 - DNA, 395 bp, Glycine max
  Clone ID: LIB3028-043-Q1-B1-F9
ggatttggtgttgcgcagccgcaggcagatatggccatggctttggtgagcctcagcaccattctcacaccgccttcttcttcttcttcttcgttttcttctccaaaaccttcttcttcctccatcgttcggtttcgccctctcactccccttcctcgctttcggaggcacctcgttcgtatggctcccgatgaggagaagatgactcgtcgctcccctctcgatttccccatcgagtgggaaaggcctaaacctggacgaaggccggatatattccctcaatttagtcctatgaagacacctttgccgcctccgttgcccgcagatcctccagaagaggatgaagaggaggaagaaaagaaagaggaagaggaagaacctgaaaaggaggagcc

SEQ ID NO: 1001 - DNA, 407 bp, Glycine max
  unsure at all n locations
  Clone ID: LIB3028-043-Q1-B1-E2
agcaaacactcttctgagttctgagctagcgaggttgcaatggcgattatctccgatttcaacgaagaggagcagaaacccactcactcttcaccaccgcaaccccaatcctcttcctcttcctcttcctcttcgttcagtgctgcttttgaccggtcaaaccctatcgcttttctggagagagtcttccagttcgtctccgaacacagcgactttctggcgacggagagcgccgagaaggagatagcgttgctggtgcgcgccgccgggaagaagaagagggagtttctcaagtcggagagagaaaaggccgagaagaagaagagagaggacctcaaggcctcngaagagagggaanaatccgacaagaggttgaanggaagagaaggaacccaaagccgaagaca

SEQ ID NO: 1002 - DNA, 409 bp, Glycine max
  Clone ID: LIB3028-043-Q1-B1-C8
gaaacgtgaaccagaaccagaatggatcttcaacaacgaccactgaaacttcactttattccttacctgtcaccggggcatgtgatccctctctgcggcattgcaacactcttcgcctcacgcgggcagcacgtgacggtgatcaccactccctactacgcccaaatcctccgcaagtcaagcccctccctccaactccacgtcgttgactttcccgccaaagatgtgggccttcccgacggcgtcgaaatcaagtccgctgtcaccgacctcgctgacactgcaaagttctaccaagccgccatgctcctccgcagacccatctcccatttcatggaccagcacccacctgattgcatcgtcgccgacaccatgtattcctgggcggatgacgtggccaacaacctcc

SEQ ID NO: 1003 - DNA, 378 bp, Glycine max
  Clone ID: LIB3028-043-Q1-B1-C9
gagaaatagagagagaacttcaagtgagggtgagagtgacacaaatctagagagagcactagtactctaaaagtctattatattcttcaaaatatgaccatgcatcgcgagtcttgggcttttgtcttcggcgttatgggcaacatcatctcctttggagtgttccttgctccattgccaaccttttaccaaatctacaagaagaaatccactgaaggtttccagtcacttccttatgttgttgcactgttcagtgcaatgctttggatttactatgctttcgtgaaaagggaaactgccctccttctcattaccattaacacatttggaattgttgtggagtcaatttacctttctatcttcctaatttatgcccca

SEQ ID NO: 1004 - DNA, 396 bp, Glycine max
  Clone ID: LIB3028-043-Q1-B1-D1
cgcaagcaaaaagaaagaatcccaggcgaggagaaagatggaggggaaggagcaggatgtgtccgttgggagccaacaagttccccgagagacagccgattgggacggccgcgcagagccaagacgacggcaaggactaccaggagccggcgccggcgccgctggttgacccgacggagtttacgtcatggtcgttttacagaccacggataccagagtttgtggccactttcctgtttccctacatcaccgtcttaaccgttatgggagtccccgggggcaattcgaattgtagtaccgttgggattcacggaatcccttgggccttcggtggcacaatcttcgacctcgtttaactgcccgctggcctctcagggggacacataaccccggcgg

SEQ ID NO: 1005 - DNA, 352 bp, Glycine max
  Clone ID: LIB3028-043-Q1-B1-D10
gcagagcagtacctggctgcaaaaaccaaagtggttctgatgaggaaagtggatggacatcttacttagaagatttctcaaaaggcatagagccaagttattgttccagtttggatggctcctctttgctctcagatgctgcttcttgtgctgcatggaaattttctcatcagaattttaaggtcagcactgcaccaaatctacccaaaaaactaagcttcaagaaagcaagagccaaacagatatcagaggatgaccctttggaagacactgctagctctccagtcaatagccccaaggttagagacttgaatccagctgaaatgagttctaggaaggttgatgatcaact

SEQ ID NO: 1006 - DNA, 371 bp, Glycine max
  Clone ID: LIB3028-043-Q1-B1-D12
cggttaaaaaccttcgggtgggtggcacacttcttccctacaggcagcgtcagctaagaattaagccaaaataattaattaattcttggcaaaatcacatggccgccgccgcagatgggctcttccggccgatctacgagggctgcatctccgcctacgacaacgacgtcgagcgccgcccctaccacaagaactgcggctgcgctctgcacagcaagtcgaggaggaacagcagagcgtgcacgcacaagttgccgaaatgcaacaacgtgtcctaccccatgaggagggcttggagtgaagggagcttgtcaatggcttcggcaacaacttccgcgcattcctctccttcttcttctcccgccgctggg

SEQ ID NO: 1007 - DNA, 410 bp, Glycine max
  Clone ID: LIB3028-043-Q1-B1-D3
ccccagttgtgacaaatgctgaagccagtactcctcaaaatgataatcaaagtagtaaacaagtggcaaccactgaagctacccctctaaatgatcaacactccaaacaagtggaacccattgaagccactccgcctctcaatgctcaaagcaacaaacatttgcctgctactgaagctggttctcctctgaatgatcaaaacagcaaagaagtggcatctactataggtgataacgctcaagatgataaccagaaaaaataaaaaactgcctaagagtgtgctcttgtttgttcctaatttgtttttgcaattgaggacaaaaatctttaccagtttaagtggtcgaaacatacatcagtggcttaaagtcatggtgctgtgcagtatacacattctcatttcaattgc

SEQ ID NO: 1008 - DNA, 84 bp, Glycine max
  Clone ID: LIB3028-043-Q1-B1-D5
tatgagcagcactccattgaggagttcccagtatacttgtcagggatccgtgccctcgacatcgccagcgacttgccctccaca

SEQ ID NO: 1009 - DNA, 385 bp, Glycine max
  Clone ID: LIB3028-043-Q1-B1-D6
ctcaatttttctctcaaccggcccaatttagcataagcccagcatggccaccgcaacagcagcagccacctcgtccttcatggggacgcgcctcgtggaggcccactccggggcggggcgggtgcatgcccggttcgggtttggcaagacgaaagccgccgccccgatgaaagtttccagggggtcgggctctagctccgataggcccctgtggtatccgggcgccaaggcgcccgagtacctggatcggagccttgtccgagactacggattcgacccatttgggctatggaagcccgccgagtacctgcagttccagttggactccctggaccagagccttgcgaagaacctggctggggacatcattgggaccaggatccga

SEQ ID NO: 1010 - DNA, 383 bp, Glycine max
  Clone ID: LIB3028-043-Q1-B1-D7
ttttcacccccagcacctaaaacagtgatatgtacgacctaacagctagctagctgcatgaactgaagaaactgagaagttaccccagagtgccataactcaaactgatacagagaaaggctgaacaagaagggttagtttcagagtcatcatcaaagaaaaaagagggaaagaagagtttctgattaactttcagtaacatggaatggattattggactttggactctaatgggttttcttttatgttggtggtttctgtgtgtgagaaaggagaatcagaatagtaaggtgaagaagaagaagggtacagttccaaaaggaaacactggttggcctctactttgagagacccttgagttcattggctgtggctacacctcc

SEQ ID NO: 1011 - DNA, 409 bp, Glycine max
  Clone ID: LIB3028-043-Q1-B1-D8
ctcaaaccatgttgctcatgtctagtgtctctagcagttattccgtggatttgaagaaagaccttttcctccaattgcagagtcaaagtttaaggcctaagttctctcaactctcattcaacccacttccaccatcaacttcttccttttcttcaccccgtacattcacaaccctggctctcttcaaatctaagacaaaagccgctcctgctaagactaaggttacaaagccaaagcaaaaggttgaagatggtatctttggcacttctggaggatttggttttactaagcagaacgagctctttgtgggtcgtgttgctatgcttggttttgcagcatcattgttgggtgaaggaataactgggataggaatcctagcacaattaaaacctggaaactggaaatccca

SEQ ID NO: 1012 - DNA, 380 bp, Glycine max
  Clone ID: LIB3028-043-Q1-B1-D9
gtagccttggtgaagggcttgcaatttgtcttcggacagattcagattcttaagaaagagataagcaaagcacgaataagattaatggagtctttggtgaaggggtctgctggtctggactaccttaggaatgcctttgctaacaaatatggatctccatctgatgccaatacctctctgccttcaacattgagatggatttcatctgtttggaattgcaaagatcaggaatgggaagaacatgtgagttcctcatcagcattggcttctaattcatcccaagaatggcttccttcaactactctcagaactgggggaagtattctgctcaaaacaactggcagtccgatggccttttctcctgatagtgcaaatgctaa

SEQ ID NO: 1013 - DNA, 369 bp, Glycine max
  unsure at all n locations
  Clone ID: LIB3028-043-Q1-B1-E1
tggctatcaggtttatgttccaagactggatgatcctggttcaggtacattcgagcggtgctctacggatacatttgagatatacggtccatgtacgtaccagacatgttatctgtatctataccggagtggatacgacggttggatgccagagaaagtgaccgtatacagctattactaccaacctgttacattttactacaacacttacatacctaatgatatttggtatggctttgactattgtcgcggttatttaccctccggtactgccgcacagtanaggctagagtagtgtgtacccttctcagttctcatcacanattactacaataaaacaagtacaagtccaaatatgaaccctgctat

SEQ ID NO: 1014 - DNA, 385 bp, Glycine max
  Clone ID: LIB3028-043-Q1-B1-E10
caaagtcccttcatttattgatttcacaaaatcaaatctcgcagtaccaacaatactgccacccctaaagcactgacaactcttcttcttcacacttctctttcagatctacacaacacacaccaaaaaataaataaaatgcaactccaactcacactctccagtctcttcctctcccttttgttaacaataacattaacatctccaaccttggcagcacaaagcaagccgcaggatctggtccggtcctcgtgcgtgcacgcgcggtacccgcgtctgtgcctgcacaccctctccaactatccgggctccgccaacacgccattagacttggcccggacagcgctgaaggtgagcctagcgcacacacgccgggcctcaaagt

SEQ ID NO: 1015 - DNA, 381 bp, Glycine max
  Clone ID: LIB3028-043-Q1-B1-E11
gggaattcttgaacaggagtgtggcccttgtcatcaggatactcttggggtgtacagcaatcttgcagctacatatgatgctatgggaagagtgggagatgcgattgaaatcttagaatatgtgctcaagttgagggaggaaaagcttggaatagcaaatcctgattttgaagatgagaagcgtcgtctggccgagcttctgaaagaagcaggcaagacacgggacagaaaagcataatctctggaaaaccttattgatcctggctcaaagaggacaaagaaggagggggcaaagaggtggcctggtttggggtttagaatttaaccatatttttgttcattaatatatatattgaatgcacattctgtaacataggatat

SEQ ID NO: 1016 - DNA, 379 bp, Glycine max
  Clone ID: LIB3028-043-Q1-B1-E12
taaacacaatgaagaaaagagttttgctccatccatcttgagcttatcctgtgcctgacagtgctgctttgactcaataacctcatgaggaacttcaaggctgttggtcaagccatcactgctctcttcatcatctctctgagtgcatggtgttatggacaagtagaacttgacatggctccaatggagaaggcagagcgggatgctctatactccaccattcaaggctttgttggtgattggtggaatggctcagatctctatccagatccttgtggctggactcctattcagggggtctcttgtgatctgtttaatggattttggtatgttactgtcttgaacattggactaatccacgataattctctaagttgtg

SEQ ID NO: 1017 - DNA, 385 bp, Glycine max
  Clone ID: LIB3028-043-Q1-B1-C7
ctatatttcttcaatcttctctcccttctacttctagggtttcgcttctgcaacggacgaccttcttcaactcatcaaagttgactttgtgagccaattcaatcaggcttgagaaggtatcctagtgttgtttgttcaccttcatctccatgatggaatactgtaaagatgtcctcagctgtcttgattcggatacgtctcttaagatattcatgtgtctggatgatctggctgatcttgttcgggttacttgtgtctcgcgatcttggagacactttgtgatagcaaatggtctttgcaagcagctatgcttgagaatgtttcctcagttatctagagttgcttttgttgttgaactgaatcaaaatggagcgaaggaacatgc

SEQ ID NO: 1018 - DNA, 346 bp, Glycine max
  Clone ID: LIB3028-043-Q1-B1-A9
gattcctaatacaaacatggcaatgaagaagctcttgtgggttgtcctgtctctatctttggttcttggagtggccaatagctttgattttcacgacaaggatttggcgtccgaggaaagcttttgggacttgtacgagagatggaggagtcaccacacggtttcgcgaagcctcggtgacaagcacaagcggtttaacgtgtttaaagcaaatgtgatgcatgtccataacactaacaagatggataagccttacaagctgaaactaaacaagtttgctgacatgaccaaccatgaatttaggagtacctatgctggctcaaaggttaatcaccacagaatgttc

SEQ ID NO: 1019 - DNA, 375 bp, Glycine max
  Clone ID: LIB3028-043-Q1-B1-B11
cactgacagagtcagtgtttctggttgtttgcactttagattcaaacctgataggcgtcgttgtaaaaggaaaaaaaaagttcagtgtttttgtggtctcgtatcagaactcagaagttatcatccttaatatcttcaaacaaggtttttcacagcacatcgatacgaggatgttgcggctgtcgattcaacgagtgaggaagttgaactttctcagtccccagatctctgctttgggaaggtcccatttgtcaactgctgctgaaccatcttccagtaagagcaatccaccgagggttccaaatcttattggaggcagttttgttgactcaaaagcatcaactgtcattgatgttaaaaacccagcaacccaag

SEQ ID NO: 1020 - DNA, 397 bp, Glycine max
  Clone ID: LIB3028-043-Q1-B1-B12
tgagaagcagagaaagaaggctgctttgcaagctattcaagcacagaaagagaaagccaatgaagctgctgagctgaataaggtcgttgagagtaatacgagcagcgtggagaatactaatactaataatactcaaaataggtctatggtgtcttcttctactgtgaatccggcggtgtttcagggtgttttctgccgcgatcttacggtggtggggaacttgctttctcaggcggggtttaaccggtccatgccggtgaagtatgaagcgttgagctgttgattgaatcgaaattggtcggaaatggaaatgtttggttggggggctgttggagatggtaccggcagagggaatctctggttcgttcgttcacttttgtttgtacaaaattatgca

SEQ ID NO: 1021 - DNA, 395 bp, Glycine max
  Clone ID: LIB3028-043-Q1-B1-B2
gtagcattcctatggctaattcctagggtatactactcaacagtgcacagcacccttttagtacgagccaccaattcaactttctctcttccgagactcccttcactttttacaccttcctttcttactctgctcatcgtcttggccatcctaggtagttagtagtttttggaggatgaggttgttgtgtttgtgtttaacgttgttgctgtttctggctagtgtggcaatggcagaagaagattcagatcataataagcactcgctagaagcgacgtcagacgcgcagatccagtgcacaatgtgttcctcttgtaacaacccttgcaaccaagttccatctgcgccagcaccttcaccaccaccaggatctccttccacaaacaactgtcctc

SEQ ID NO: 1022 - DNA, 223 bp, Glycine max
  Clone ID: LIB3028-043-Q1-B1-B3
actcacattctcatcaccacgatttgttcaaactcactgccctgagatctgatcgcactttcaatcacaaaggaaactcgtgtgactgatttatgcgcgaattgcaattgcactgcgagcgtcactctgccgaatcgggagatgggaatagtgttcaacacattgttttcctctcgtttcggtaacaaaggagatcgaatcctcggtctccgggctcgacaat

SEQ ID NO: 1023 - DNA, 364 bp, Glycine max
  Clone ID: LIB3028-043-Q1-B1-B4
tggtaatgtaaaatactgctaatgttaatatgaagtttggatggtcttattggcagaagatgctaggtggtgttcatcaatattctgaaaggtaaaacgattttggtttttaatgataatataaccatgaatctaacatcagatattgaacgctacacatcaaaaataaatcgagccaacgcatttaattgtaagtgtcttcatattacctgtgttctgtcacatctttttgcataatattggcactaagtcttttttgatagaaattgttaagatgtactgttatcattgtatcaactatattgtgcccttctttttttacttgatttggcaaacactgctacttttctccatataagatgga

SEQ ID NO: 1024 - DNA, 369 bp, Glycine max
  Clone ID: LIB3028-043-Q1-B1-B5
aaggtataccatttgaaaatggcttcttgtgtgtcatccatgtcttctaccatcctcatcctaattgccatctgcacactgtcctcacttctgtcagctgcatctgcagcaacagaggagggacgaacaaggcccttcaaaagggtctatgcctttggagactctttcacagacactggcaacaccaaaaatgccgaaggtccaagtggctttggtcatgtttcaaactctccctacggcaccactttcttcaaccactccacaaacaggtactcagatggtatgcctgtgattgattttgtagctgaagcactttcactgccttacttgcccccctagcgtcacatcaaaggcaatgacacttttggt

SEQ ID NO: 1025 - DNA, 321 bp, Glycine max
  Clone ID: LIB3028-043-Q1-B1-B6
gggagatcgagaccatgcggatggagatggaaatgaagcgcactgagatgattctagaatcgcaacagcggattgtcgaggcatttgccaaggccgtttcggaaaagaacaggaagaagaagcccaagactgtgccatcagcctctggttgaggttcagtggtcctttggcccagctgcacttcaacttctatcagtttccatgtacaattggctaaatctctttaatatgtaacgtttatcattatctattacttcatcagcttcgtactttctttgctcttttaaatctaacgctgttgtgacttcattttttctaccc

SEQ ID NO: 1026 - DNA, 407 bp, Glycine max
  Clone ID: LIB3028-043-Q1-B1-B7
ccaccgtcagagctccgataacttcatgttcgacgctcacggaaggtggttacactcttcggcttacgcgcaggagctcgggactcgatcttcgagcttgaggagaaacgacgatgatcgcgttttaaccagtggcttgcttgatctgcattctttcgataccgagcttttacctgagggacaaagttttgatggctacgagtcgattctctctggcaacaaacttgtaccaaggtctcggggcttgcctgagagccatctccttaaaagtgtctcagcagataaagagagagcaaacaatgttgccaagatcaaagttgtggttcggaagagaccactaaataagaaggaaatagcacagaaagaggaagacattatttacatagattcaaattttctcacagtgc

SEQ ID NO: 1027 - DNA, 397 bp, Glycine max
  unsure at all n locations
  Clone ID: LIB3028-043-Q1-B1-B8
cagcgtgcatcattgcacttactgatcagggccttaatgctatcaatttgggagacagtgggtttatggtggtccgggatgggtgcaccatattccggtccccagtgcagcaacatgatttcaatttcacttatcagctggaatgtggtagtaatggtgatttacctagttctggtcaggtttttaccattcccgttgcacccggtgatgtcatagttgctggtacagatgggctatttgataacttgtacaataatgagattacagcagtggtggttcatgccatgagaaccggattaagccctcaggtgacagcccagaagatagctgcattggcacgtcaacgggcactggatanagacaggcagactcctttttcaaccgctgctcaagatgc

SEQ ID NO: 1028 - DNA, 379 bp, Glycine max
  unsure at all n locations
  Clone ID: LIB3028-043-Q1-B1-B9
cctctctctctatctttttcttttccttctcctagccctcttccctataggagaaggaataacaaaaacaaaaatacacaatggctttcactttcaccagaatcctaattctctttgtctccctctcctctctcatcctcgacacccacgcagcccgtgcgccccgcaccatccagacccgcctctacagcctctgcaagcccaccaccaacatggacctgtgctacaagaccatccttccggaggtggtgggcctgtcncgcttcagcaactacaaggccctcgaggtggagatccttgccacccagaaacaggtggagacaacctcgaagctcataacctcgctcctggcgangcctgacaactcgaaagacctgac

SEQ ID NO: 1029 - DNA, 371 bp, Glycine max
  Clone ID: LIB3028-043-Q1-B1-C1
ctccgcagcagccacacttcttcgccgtttcagctgaagagccatccgcaggtaagcaatggttaagcataataatgttatccccaatgggcacttccggaaacactggcaaaactatgtgaagacttggtttaatcaaccagcccgaaagaccagaagacggttggctcggcagaagaaggctgtcaagattttccccaggcctactgctggatctctcaggcctattgttcatggccagactctgaaatacaacatgaaagtcagagccgggagaggattttcactggaagaattgaaggctgcaggaattcccaagaaacttgctccaactattgggatttctgttgatcacgcagaaagaatcgttc

SEQ ID NO: 1030 - DNA, 361 bp, Glycine max
  unsure at all n locations
  Clone ID: LIB3028-043-Q1-B1-C10
ttcggatataaacaataaaataaaataaaacagaagagaaggaaacagaagtaaaaaaaataaaatgggttacacaagatcttctcttctgtccgtggctcttgtcttggcattctgttcaagcattcagggtttggacatcaccaaattgttgggcgaatatcccgaatatgcacagttcaacaaatacctaactgaaaccaagctggcggaccaaatcaacagccgtaacgccgttacagtccttgcccttgacgacgccgcaatggcttcnctctccggcaagtcgcaagacgccgttaaggccatccttagcaaccatgtgctcgtcaacttctacgacgagaagaagctgatggaa

SEQ ID NO: 1031 - DNA, 83 bp, Glycine max
  Clone ID: LIB3028-043-Q1-B1-C11
tgagaatatggctatcgattttaattaggagcaaaatgtatgttcttactccatttttaatgcaatttctttattttcttgcc

SEQ ID NO: 1032 - DNA, 409 bp, Glycine max
  Clone ID: LIB3028-043-Q1-B1-C6
cggctcgagcggctcgagctacgttaaggctggtatctacgacgagtacatcaccgttgacaagaagaagcccaatcttttcatctacggtgatggccccacaaataccatcatcactggccgcaagaactttcacgagggtaccaagacaatgagaaccgccaccttctctactgttgccgaggatttcatggcgaagtcaattgcatttgagaacaccgctggtgcagaaggacaccaagcagtggcacttcgcgtgcaaggtgatcgttcagtgttctttgattgtgctatgcgcggttaccaagacacattgtatgcccacgcccatcgtcagttctaccgcaattgcgaaatctctggaacaattgatttcattttcggatactccaccaccttgattcaaaac

SEQ ID NO: 1033 - DNA, 412 bp, Glycine max
  Clone ID: LIB3028-043-Q1-B1-A8
gagaagagagtttcaagaatggggagcgaagaggagaagggtgaattctacttgcgatactacgtgggccacaagggcaagttcgggcacgagtttctggagttcgagttcagacccgatggcaagctccgctacgcgaacaactccaactacaaaaacgacaccatcatccgcaaggaggtttacctcaaccctgccgttttgcgtgagtgccgccgtatcatcgccgagagcgaaatcatgaaggaagacgacaacaactggcccgaaccggaccgagttggacggcaggagctggagattgtgatggggaacgagcacatttccttcaccacttccaagattggatctctcgtcgatgttcagagcagtgcagattccgacgggctacgcatattttactatcttgttc

SEQ ID NO: 1034 - DNA, 382 bp, Glycine max
  Clone ID: LIB3028-042-Q1-B1-H11
gttagggttcacaacttttccttttccttttgcttgcgaatctgaatcaaataatcaatcatccattcattattcatcatgtcgtcggcgaagaaaatcacgctgaagagttcggacggcgaggctttcgaggtggaggaggcggtggcgctggagtcgcagacgataaagcacatgatcgaggacgactgcgccgacagcggcatccctctgccgaacgtgacgagcaagatcctggcgaaggttatcgagtactgcaagaagcacgtcgaggccgcgaatcccgaagacaaaccctccgaggacgatctcaaggcctgggacgctgaattcgtcaaggtcgaccaggccacgctcttcgatctcatcctggctgctaact

SEQ ID NO: 1035 - DNA, 382 bp, Glycine max
  Clone ID: LIB3028-042-Q1-B1-H3
gttttcccagtgccaggaggacccttctggccaaggcactttgcaactgaaagcttgtgcaaaatttatcagcataactggttcgacccttacttcaaagtggttcggagatgccgaaaaactaaccaaagctcttttctcatttgccagcaagcttgctcctgtcattgtaattgtcgatgaggttgacaattttgcttggtgctcgaggtggtgcttttgagcattagggcactagaagaaatgagaacgagtttatggcagcttgggatggattgaggtcaaaagaaaaccaaagaatccttattctaggtgcaacaaaccggccatttgaccttgatgatgctgttattcgtcgcttaccaagaaggatatatgttga

SEQ ID NO: 1036 - DNA, 356 bp, Glycine max
  unsure at all n locations
  Clone ID: LIB3028-042-Q1-B1-H4
cctgttcatggtggcggctaccctggccgtggtggtggatactgtangcatggctgttgcggtggccggacatacaacggaggttgcagaaggtgctgctataacgctggcgaagctgttgctgcacaaactcaagataagactcacgattaagacgatgcagttctacttaattagtacttttgatattttaatttcatgaaataaaacagcttgtgactggagaggcatggattctcatcatgcatgagtccatgatctttcataccactagagatatttcgcaagtagaaattaagagtgttgttgaatgtataataatacacgtcttcgtgcctgtgtgatgagtttaagag

SEQ ID NO: 1037 - DNA, 380 bp, Glycine max
  Clone ID: LIB3028-042-Q1-B1-H5
cggctcgagaacaaactcattaattagcggggataataagggtgcagctgcacgatttatggaagactggtttgagcgaaaggggtctgtaagaatggatttggttagatttgaaaatgatggagtcccccgaagaatttcaaacataattcccagtcttcatgataattaccatgaattactggaacttgctgcctcattccgatctcctcttggtaaacctgcaaccaaaacttcaagcattgctagacgtgttagaggtgtccttaggcaggttgacaagcctagatttgtttctgcattttgtcaaacaaattgtggtgatgttagtccaaatgtactcggaactttttgtatagacactggactaccttgtgact

SEQ ID NO: 1038 - DNA, 386 bp, Glycine max
  unsure at all n locations
  Clone ID: LIB3028-042-Q1-B1-H7
cacaacagtgggagggagatccaaaaagagagagtggaaaagatggcgcggttgatcacagtggtgtggtgcgcggtggcggtgctattatgcgccgcggccggtgcgtcgtgggtggaggaggcggcgaacccgatacgaatggtgtctggcgtggaggcggaggtggttcgggtgatcggggagtgccggcgtgcgttgaagtttgctaggttcgtgagcaggttcgggaagagttaccaaagcgaggaagagatgaaggagaggtacgagatattctcgcagaatctcaggttcatccgctcccacaacaagaagcgtttgccctatactctctctgttaatcattttgctgattggacttgggaagagttcanaagacacag

SEQ ID NO: 1039 - DNA, 330 bp, Glycine max
  Clone ID: LIB3028-042-Q1-B1-H9
caagcattggcagagagggaaggtctctcgtttcttgagacatctgcactggaagcaaccaacattgagaaggcattccaaaccattttgacagagatttatcatattgttagcaaaaaggcgctcgctgctcaggaagcagctgttggtaccatacttcctggtcaaggtaccaccatcaatgttggggatgcatctgggaatacaacgagaggctgctgctccgcttaatgtgacatgtgaggaaaaagcgatggtagcagatagtattttttccccccaattctgttttgcccctttctcttttcatcttttttttttcctcctttc

SEQ ID NO: 1040 - DNA, 141 bp, Glycine max
  Clone ID: LIB3028-043-Q1-B1-A1
ctataatgatgcttattttaaaatcctttgacagagaagattagcataatctatcgatgactatgtttgttttaaaactatgtgataaaatcaggaaatcgttgtggtttgagtgatagtaaactcaagtttaagtcttat

SEQ ID NO: 1041 - DNA, 318 bp, Glycine max
  unsure at all n locations
  Clone ID: LIB3028-043-Q1-B1-A10
caaaatcagcctctaatatttttctcactgtctctccagagaacttgatacagagatggcagctgcaacatctggtgctgtgttaaatgggttgggatcttccttcttgagtggaggaaacaggagccaaacccttctggcctctgctattggaggcaaagttggtgctgctgttactgttaatcccagaagactcattgtggtagctgctgctgcaccacagaagtcatggctccctggtgttagaggtggtggcaatctcgtcgacccagaatggcttgatggatcgctaccangtgactatggttttgatccact

SEQ ID NO: 1042 - DNA, 340 bp, Glycine max
  Clone ID: LIB3028-043-Q1-B1-A11
cactctttacatctctctctctctctctctctccaaagcagacagaaacagcgacaatcacatgactcgtgccttgagatatttaggcgagcgaaactcggccatggactccgccgtcgtcgattccgacttcgtcgtcatcttcgccgctctcctctgcgctctcatctgcatcctcggcctcgtcaccgtcaccagctgcggctgtcgccgccgcctccgcctctcctcgtccaacgctagtccccagcctcctcacgcctctgcaaacaaaggcgtcaagaagaatgtcatccgctcgctccccaatgtcatcgactccgccgaatccgctgtcaag

SEQ ID NO: 1043 - DNA, 319 bp, Glycine max
  Clone ID: LIB3028-043-Q1-B1-A12
caatcttctctatctaaaatggagtttgttctaaattacctaaatgccactgccattggagttctttctataaccctcatctttttgtatttgtataatcccttcaaatttgcattacgtaaaaaagaggctcccaaagttgcaggtgcatggccaatacttggtcacctaccactattgagtggttcagagacacctgatagggttttgggtgctttggctgataagtatggacccatattcaccatcaactatggtgtcaaaaaggctttggtaatcagcaactgggacattgctaacgaatgcttcaccaaaaacg

SEQ ID NO: 1044 - DNA, 355 bp, Glycine max
  unsure at all n locations
  Clone ID: LIB3028-043-Q1-B1-A2
gtatggtaacatctagctagtcttaggctttagtgttaggatcagtcatgtcttcataaatatgtttttatttttattttttattttatcaattttcacaaaaaggggtttaaccagccaaccaattaacaatcttccctttgggtaaggggaggcaatatctaactactgtttttttatcctgtaaattcaaagaggctaaactatgggagtttaagcccaatccactaatctttaggagggatagtgttttaatttcccgcttagcataagtagtacatttcatcatcatcttgaggactacgtcaatggatgtggaactcaaaacacttgcatggaaccctgngagatattt

SEQ ID NO: 1045 - DNA, 407 bp, Glycine max
  Clone ID: LIB3028-043-Q1-B1-A5
taacttcacacctacaaagctgaattcaaccacactttccattagcccttccaatgatatcatcaagtctctatcagctagtgagattgaactatctgaggactacacttgtgtgatttcccatggccccaatcccaaaacaactcacatttttggggattgcattttggagactcattctaatgcatttaaaacccatttcaagaatgaagagaaggagcatggagtgaagccattgggtagcaacaagttagggagtcctaagccatatccctctagtgacttcttaagtttctgccaccattgcaacaagaaacttgaagaggggaaagacatttatatttatgggggtgaaaaggcattttgcagtttaacttgccgtgccatggagatcatgattgatgagg

SEQ ID NO: 1046 - DNA, 408 bp, Glycine max
  Clone ID: LIB3028-043-Q1-B1-A6
caaagagccattgaactttgactataatattcagagttcagattactcactctaatcttctaagttttcattttggggtttaagtttctgaaggaaaaaaaaaaatgataaagtttgttctatttttgttctgctttgcctctgcactgaccctttcagtatcggagtccaaatcagcttcagtgcaacctcatgctgctgaatctttctctgttggatatattcagatgaagactgcagcgaactgttcttacctggtagttatatctacgagttgttcatcgcctaagttcacaacggataagatcggtatcacgtttggggatgctaatggcaaccaggtatatgaaccaagactggatgatccaatttcaaggacatttgagcagtgttcttcagatacatttc

SEQ ID NO: 1047 - DNA, 407 bp, Glycine max
  Clone ID: LIB3028-043-Q1-B1-A7
ctactatactctctctctcgcactcagtctctctccctcggtcgccggaacgtatctccgatcagacagccgccgccattccggtgattcgccacttcgatcctcccgcagcgccgtcgtttcttcagatctgtggctgtgatgcgaaagtcgttggaggcgaagcagcagcagcatccgcggattaagaagacccttcttcccaattcgttatcctagttagggttagggtttcaagaatcgttcccccaagaaatgttcaagcgcatcatgaacggagggcagaagaagccctccaagacggacccgagcgatccgtcgcccttcgctccggcggcggcagccgctccggcgctggtagttcctcagccgtcgggcaccatatagcccctctcgctcttccgcga

SEQ ID NO: 1048 - DNA, 383 bp, Glycine max
  Clone ID: LIB3028-042-Q1-B1-H10
ggcgacgccgagctccacgatgctttcaacctgtacgatcatgacaagaacggccatatctccgccacggagctctgccaggtgctgaaccgcctcggaatgaagtgctccgtcgaggaatgccacaacatgatcaaatccgtggattccgacggcgacggcaacgtcaacttccccgagttcaagcggatgatgagcaacaatcgtgaaaatgctagcagtggcgaagaaaaaaccgattaggcgctttggatttgatgtttatagctaggctgggcaaaggcaattccctcctgaatactaaatctatgcctgtttgttatgatcgatttgttattacttttacccctcgtttcctcttttttttttctataaatataaat

SEQ ID NO: 1049 - DNA, 383 bp, Glycine max
  Clone ID: LIB3028-042-Q1-B1-F12
caccattcaccaacctgcttctctgttctcttctttcccttcccaagaagaagaagaagaagatgccttcttcagaatcatcaacaggcttctccgaaaccatttgtgtgaccggcgctggtggcttcatcgcctcttggatggtcaaactcctcttggagaaaggctacactgtccgaggaaccctcagaaacccagatgatcccaagaacgggcacttaaaagagtttgaaggagcttcccagagactaactctgcataaggttgacctccttcatcttgactccgttagatctgttattaacggctgtcatggtgtctttcacactgcttctcccgtcaccgataaccccgaagaaatggtggagcctgcggtgaatgga

SEQ ID NO: 1050 - DNA, 346 bp, Glycine max
  Clone ID: LIB3028-042-Q1-B1-F2
agtcatctttgtcataatccaggattaagcctgcattaatcaccagaatggctaattcatatgaaaacaacttcccccctcagaagcaagacactcagcctggcaaagagtacctcatgaatccaccaccccaatacaacagctcccaatacaagccatcaaataaacttcagggaaagatagctgtagtaaccgggggtgattctggaattggacgagccgtgtgcaacttgttttcattagaaggtgctactgtgatcttcacctacgtgaaggggcaagaggacagggacgcgagtgacacgcttgagattataagaaaagctaagactgaagatgctaaaga

SEQ ID NO: 1051 - DNA, 387 bp, Glycine max
  Clone ID: LIB3028-042-Q1-B1-F3
tatcatcttcgacataaaatagaagcaagacagatgaaggagataggaaagggttaattgaatccaaaaaaaatgaagagaaaaacacaatgggcacggtttggacttcgatgatagcattgttgctttgcctgatgacatcatcggttcggggcgaggacccttacatttactacacatggaacgtgacctacggcaccattgccccattgggtgtcccccaacagggtatcctcatcaatggtcagtttcccggccccgaaatcaactccaccagcaacaacaacgtggtcatcaatgtcttcaacaacctcgatgagcctctcttgttcacatggcatggtgtccaacaagagaagaactcttggcaagatggcacattgggtg

SEQ ID NO: 1052 - DNA, 374 bp, Glycine max
  Clone ID: LIB3028-042-Q1-B1-F6
ctcgagccgattcggctcgaggagaaagagatcacatagcagaatggcttctactcaatgtttcttgcaccaccatgctcttaccacccctgccagatccccatcacaacgcatcatggttagcaccaagcctaaccagcttgtttgcaaggcacagaagcaagaggatattgatgtcagcccaatctctcgccggttagctctaaccgtgctcattggtgctgctgctgttggctccaaagtccaacctgctgatgcagcttatggggaagctgccaatgtgtttggaaagccaaagacagacacagatttcctgccatacaatggagatggattcaaactatcgattccctcaaagtggaacccaagcaaag

SEQ ID NO: 1053 - DNA, 341 bp, Glycine max
  Clone ID: LIB3028-042-Q1-B1-F7
gtctcttcgttggtggcattcctctgcttacttgcagcatcttacataataggacaaaccatttgtgttgatggcggcctcaccgtgaacggtctctacataagctaggcctactgtgacagtttcaatgttttgtttagtctgttacacgctacttgtaataatttcactttaagttgtggacagtgcacaccccatatctgtttttaatgacctgataagaatgagtactcagtgataagtttgtttttcgtgtcatgatttagtcacatgtcccatgagtctaggagcactataatcgtgggcagtttatcctacttcccgttggttgtaacgctttc

SEQ ID NO: 1054 - DNA, 346 bp, Glycine max
  Clone ID: LIB3028-042-Q1-B1-F9
attttgctcttctctctaggcctgccctctctccctagggtttgtttcacttatgccttcccaactcctcagcctcagtctttcagaagttgaatgtagatgatacggaaggagagaagttgccctgtcctgtcggtggctctgatctctgtaaatgctcaatgctctccatcttgcatttttgtttggtagtaaggtgataaagcatggagtttttgaaaatcaaaaagttcagaaaatctcagaaagcaaatggagaaaaggatttggcagacaaggcagtgcctgagcctgaggaaccaaagctgaacaccgatggtcctgatcagtgtaaatcagaaaacgc

SEQ ID NO: 1055 - DNA, 386 bp, Glycine max
  Clone ID: LIB3028-042-Q1-B1-G1
aagaaaggtaataagaaaggtcctccagctgcatcagtgacagaaaacaaggtgacaggcttgatatatgtaaatgaacagtttgatggtttggaagccgattgcctgagtatccttcagaacaaatttaacagagatacgcgaacttttgctccagactcagagatattgcaggctttacaacagagttctgtaggtcaatcttctaattataaacaaatccaaaagcgttgtatgcctttcttgaggtttaagaaagaggaagcaattgcacttgggcctcaagccctggatttgagattgccgtttggtgaaattgaggttcttaaggaaaacttggacttgatcaagagacagataggtctagaagatgtggaaattttatc

SEQ ID NO: 1056 - DNA, 384 bp, Glycine max
  Clone ID: LIB3028-042-Q1-B1-G10
tttgctcctaagccctcatctggaccacacaaatcgagggaatgcctgccactcatactcattttgcgaaaccggctgaagtatgctctaacataccgtgaagtcattgctattctgatgcagcgacatgtccttgttgatggcaaagtcaggactgacaaaacataccctgctggttttatggatgttgtatcaatccctaaaacaaatgagaacttccgcctgctgtatgacaccaaaggtcgattccgtctccactcagtcagggatgacgaggctaagttcaagctttgcaaagttcgctcagtgcagtttgggcaaaagggtatcccatacttaaatacctacgacggtcacactatccgctacccagaccctctcatc

SEQ ID NO: 1057 - DNA, 343 bp, Glycine max
  Clone ID: LIB3028-042-Q1-B1-G12
gtgacaatgaaaatgttgcaggtggcagtagtgcaattggctgcgttgcaggtttttgttatttttttgagtggcggtgctgattacataccgccttcaaggttggatcggttcgtctaccaaaatgggtacttagatttggatactgttttgatagaagcgttttatgatccggtgtgcccatacagcaaggattcatggactccactcaaacacgctcttcatcactattcatctcgggtttcgttcctccttcatctcctccctttaccttagcatgacagtgccttcgtcgcgaaccgtgccttgcacattgcgaataccatcgaacgcatctgcaaag

SEQ ID NO: 1058 - DNA, 356 bp, Glycine max
  Clone ID: LIB3028-042-Q1-B1-G4
gcacaacgaaccactctgaaaccgctcacgttatccacaacactctcaaacctccttaaaccctaaccaatccaaccatggcttcttcttccaacttcactgcaatgtccgcctgcaagctctcctcctccgccgccatctcctccttcacctcccgccgccgctccaacgccgtcgttctgtcgaggcgcagccgcgccgccagggtctccgccatggccaatgagttgcacttcaacatagaccgcaccgcaattaagaagctccagagcggtgtgaacaagctcgcggatctggttggggtcacgcttggtcccaagggaagaaatgttgttctcgagagcaagtatggctcg

SEQ ID NO: 1059 - DNA, 195 bp, Glycine max
  Clone ID: LIB3028-042-Q1-B1-G5
caaaagagatgaattacgcccgtctgacttccggcggaggatggcgtctccggcgactgtacacggcggttgagactctcgcgggttgggggccgctcgaccgaatgtccttcacgctggatttcacaggcgagtcccgtgcttttgctccatggctcagtggggcagcatgctttacgtcaccgttctgtaggt

SEQ ID NO: 1060 - DNA, 373 bp, Glycine max
  Clone ID: LIB3028-042-Q1-B1-G6
ggctcgagatcgacgcttcactcaggtcgcaaccagcgaagatgaggacgaagcaccgccgcctcctcctcctcccaagcagcaatcgtcggtcagtgcccccgaagagaaccgttcgaagcagcagcagcgcaagaggaagagaatgaagcttcaagaagaagaggaagaggaagaggagaaagaggaagagaagaagaagaagaagagaaagatcaaagacaagcaagaagagagatcgaacgaagaagaggaaccgccgcaggaagacgcaaagcccattggcgaaccggttaggttatccggaaagggaaggggccgcaaaaagcattacgaatccttcgagtacgacggaaaccaatacatgctggag

SEQ ID NO: 1061 - DNA, 330 bp, Glycine max
  unsure at all n locations
  Clone ID: LIB3028-042-Q1-B1-G7
ggctcgacatctacgcttcacgcaagtctcaataatttcagataacgattacacaccacattgtcctctggcctccgctaaacaatcgatctgtcaatttactggagtggaatcgttcggatcagcaccacttcatgcaggttatgttgcatcttcagtgatcatgatgacacgattaagttatagacggagtgttttgggatgagacttttgaataaaagacatattccagaagagatctatgcaagtgcatgtcttggatatggagatgcacagtccaatgttgatgtggttatgttatcaggttatggaangggcctcatatgacat

SEQ ID NO: 1062 - DNA, 356 bp, Glycine max
  Clone ID: LIB3028-042-Q1-B1-G8
ggtgccttatcgctgtggttatcatcttcttcttcctctttcttagatctcttctttctctacgccgcacgccgaaaccatggccggaaaaggagagggtcctgctatcggaatcgatctcggaaccacctactcttgcgtcggtgtgtggcaacatgaccgcgttgaaatcatcgccaacgaccaagggaacagaaccacgccgtcttacgtcggattcactgacaccgagcgtctcatcggtgatgcggccaagaatcaagtcgccatgaaccccatcaacaccgtcttcgatgccaagaggttgattgggcgtagattcagtgattcctctgttcagagtgatatcaaattgt

SEQ ID NO: 1063 - DNA, 386 bp, Glycine max
  unsure at all n locations
  Clone ID: LIB3028-042-Q1-B1-H1
ataagcttgttgtgtccacctcctcctcccttcttcacactgctgttgatcttgttaacgagaccaagttggatgacgagatcaagtcatggctagcatttgctgcacaaaaaattgttgaagttaacgcattggctaaggcattgtctggcaacaaggatgtggccttcttctctgctaatgctgcagctcaggcttcaaggaagtcctctccaagagtgaccaacgaggctgttcagaaggctgctgctgcattgaagggttcagatcatcgccgtgcaacaaatgtcagtgccagactggatgctcaacanaagaagctcaaccttccaatccttccaaccaccactattggatccttccctcagactgtagaactgaggagg

SEQ ID NO: 1064 - DNA, 361 bp, Glycine max
  Clone ID: LIB3028-042-Q1-B1-F10
gatcagtggcttccctcactgtcgcaaaccattgtgttcgcacgttgcatcgcactcactctctcacctaagcatcatcccatcacctcccacttccttccgcgccatcaaagtcacaattttttgggctcagtctatcgcactcatccctgtccatacttcccgcttcctcttcttcactcatgtgcgccattttcgccatcgtgcctaaaggttcagagccaccgaattttacgctaatcgcatagaacgggaagagtgttagcctcgccaacttcagcagtacaccagtctgtgtgtatttctaccctgctgatgagacccctggctgttccatacaggcttgcgctttcagggattc

SEQ ID NO: 1065 - DNA, 387 bp, Glycine max
  unsure at all n locations
  Clone ID: LIB3028-042-Q1-B1-D5
aacattctgagctacaacctcggcggaatggggtgcagcgcggggatcattggtgtggacttggccaaggatattctccaggcgaaccctaataactacgcggtggtggtgagcacggagatggtggggtacaactggtaccaggggaaggacaggtctatgcttatcccgaatagcttcttccgcatggggtgttctgctgttctgctttccaaccgtcgaagggactatagccgcgaaaagtaccgtcttgaacacattgttcgcacgcataagggtgccgatgaccgcagcttcaggtgtgtttaccaagaggaagatgagcaaaaactcaagggactaaagatcagcanagacttgattgagattggtggtgatgctctaaaa

SEQ ID NO: 1066 - DNA, 357 bp, Glycine max
  Clone ID: LIB3028-042-Q1-B1-D6
attatctccaaatacatggatttctctgaagtctttccaatttagtccctgcacgagcttctttatatagtaagactgtgtcttccttcatcacactaaacaagttaaaagaacagcatcactgaactaacaaagcaaccctatgtcaaaggtggtttgtgtcaccggagccagcggcgccatcggatcatgggtggtcctactcctcctccagcgtggttacaccgtccatgccaccgtccaagatatcaaggatgaaaatgagacgaaacatttggaggaaatggaaggagcatagagtcatctccatttttttgaaatggatcttcttgacatcgactccattgtcgctgccat

SEQ ID NO: 1067 - DNA, 385 bp, Glycine max
  Clone ID: LIB3028-042-Q1-B1-D7
actactttcatatttcgtgtaacgagataaccaccaaaactcgattttttttagtttttaatcaacgaacacatagcctattgttggttgcttctgtttttaattttcatttcagaataggaaccaatggctcatttgctgacaccaactcctaccactgctgcaacagctctctccgccagagcccggaagagccccctctattcgttgaaaaatgtttactttccaacttcaagagtgtgctgcgttggtcaccaatatcaacaatctcacccctcttccctctctgatcttgatcaagtccctcctcccggtggcaatcactctctgcgtcgcatgacattgatggggttgagtggtgcggcaacgttggggttgagtttga

SEQ ID NO: 1068 - DNA, 385 bp, Glycine max
  Clone ID: LIB3028-042-Q1-B1-D8
gaactgtgactaccatgtcatgtcagcagcactctcccgagagattattcatatgaccaaactgccctcgttcccctaatccgttttcgagagttacaaccaccatggacggcgggaaccgaccggaggcggagcgctggctatacaccgccaacaagctcctgagcgcgcgtgacctgcacggtgcgcgctccttcgccatccgcgcgcgtgagtcggacccgacctacgatgcctcggagcacctcctgacggtcatcgacacgctcctcgccggcgagtcgcggatcaacgaccaccaccgcgactggtacgggatcctccagattctccgctacgccaccaacatggaccacatcgccgcccagtatcgccgcctcgcgct

SEQ ID NO: 1069 - DNA, 371 bp, Glycine max
  Clone ID: LIB3028-042-Q1-B1-D9
cattttcaagctctcaacgccatctccagctgcttccttatcagaagcgcttcgccccagagattctcgcttcctctccttcaatccttcttccaacgctattaattacaaaattaacctctccgcttccctccgatccattcactccctccctcttaaaacctccttgcggatcaaatgctcccaaacagatgggaatggaagtcctgcaaagaggacagtgcttcatgatctttatgagaaagaagggcagagtccatggtatgataatctctgcagacctgttacagaccttcttcctcttatagcaagtggtgtcagaggcgtcactagcaaccctgcgatttttcagaaagctatctcatcatcga

SEQ ID NO: 1070 - DNA, 382 bp, Glycine max
  Clone ID: LIB3028-042-Q1-B1-E1
atttcctagcctcccaacaaggaggccccctatgctcaacagcagaaaataaataaagggcattggggtgcaatggccattgcaaagagtgcttccattcttattattttgtgctttgcattggcctgcaatgcggataatgctggaaaaccagacccagttgctggtcctgacatgttcagcaataaaaatgtggctaaggatgtgctccttcccggggagcaaatagttaacgtccaggattttggagccaaaggtgatggcaagttcgactgcaccgagtctttcatgcaagcatgggcaaagacctgccatcaatcctctgggccagccaggctttacgttcctgctggcagattcgtggtttcatcaatgtatttta

SEQ ID NO: 1071 - DNA, 381 bp, Glycine max
  Clone ID: LIB3028-042-Q1-B1-E10
gagcagccaaaggggaggaataataataagcctatattctaaggccggaaaaataaaaaaggaataacaaaaatgtctggaaaggtaattatctcggctgtttctctcatcctggtggttggagtggccataggtgtggtggtggccgtcaacaagaagggcgaggatcccacacttcaatctcaacaaaaatcagtaggggttatctgccaaaacactgatgaccagaagctctgccacgaaaccctaagctccgtgaagggcatggacaccgctgatccaaaggcttacatcgccaaggcggtgaaagccaccatggacagcgtgaccagggccttcaacatgagtgataggctcagtaccgagtacggaagcaacgat

SEQ ID NO: 1072 - DNA, 333 bp, Glycine max
  Clone ID: LIB3028-042-Q1-B1-E11
tcccacacatctcattagaccaatttcagctcttaattcaggtttggaagcatcaattacagattcgaacgatatttcagccatcttagcaaatgccagaatagtagtagattctgaagatgaaaataagatagagctaagagtggacttgactggcgatcagacacagaaggtattcgacaggatcctaacagacttaggccgtactgccccaccaggttcctggatttcgcatgctaaaaggaggaaaatcactcatggatggcaatggacatccttgtacagatgcttggggaagaacgtgtcaccaagttttcaatacaagaatatact

SEQ ID NO: 1073 - DNA, 159 bp, Glycine max
  Clone ID: LIB3028-042-Q1-B1-E12
taacgtttgacgaagtgaacacattgcatggctaactcaaaggcaggccattactataaatgatattcgagtgtgatcaggaagcaaatctgcaggcttctgacaatcatgtcctacaagcggtttttcctaagagagatatatgccatcaactgaagg

SEQ ID NO: 1074 - DNA, 387 bp, Glycine max
  Clone ID: LIB3028-042-Q1-B1-E3
agagaatcagaatcagaagatgaagaaagaagacacagtgaagctgatcagttccgaaggtttcgaatttgtggtcgacaaagaagctgcaatagtttcacagaccatacataacatgcttacttctccagggagtttcgctgagaggcagcacggcgaagttacctttcctgagatcagcaccaccattctcgagaagatttgccagtacttttattggcatctccaattcgccagtgggaaggagacggaattttccattgaacctgaattaactctggagctaatgatggccgccaattacctccatacataagcattttgacttccccaagggtgatagttcttcgtcctcataatggaactattgcttagttgtgcattcaa

SEQ ID NO: 1075 - DNA, 208 bp, Glycine max
  Clone ID: LIB3028-042-Q1-B1-E4
tgtcatgacataatgtaacagtggaaatagaaaagggaaaacaataatgtgggggaaattaaatagtgattaattgttggaaaacatataatataatgttgtaaaagaatggaggaggtgaaatatgtatgactctcaagctgtgcgattgcttgcaattgtacatatgtaagatgaaaaaacataacacgaacaagtttacattatt

SEQ ID NO: 1076 - DNA, 359 bp, Glycine max
  Clone ID: LIB3028-042-Q1-B1-E5
gaaacagctccacaagcaaacgagtctgaatcaccggagggaggaagagatgctggggagcagcgagacctcaccatactcccccaaatccatcaagcacaccagatccctccccagatccatcaactacctcctccgcgagcagcgcctcttgttcatcctcgtcggcatcctcatcggctccaccttcttcatcagccagcccactctctcccgcttgggcccacccgagccggtccacaccttccttccccgaaccgggcttgcccggttcgccggccccgggccccgcacgggccgcgttcctgtcgggatcggcgggagaaggcagaggatcgtcgtcaccggcggcgcgggct

SEQ ID NO: 1077 - DNA, 359 bp, Glycine max
  Clone ID: LIB3028-042-Q1-B1-E6
ctgacatggcttcttcactcagaatttcaagactcatctctcgctccttttcttctacctccttcttttcacgaggtgggaatggtttccttggttcaagacactgcaaatacagcacttcttctgccattgaagaagaacccgttaaaccatcagtgcaagtagaacacacccaactcttaattgatggaaaatttgtagatgctgcttctggtaaaacttttccaactttagatcctaggacaggtgaagtaattgctcatgttgctgagggtcactctgaggatgttgatcgagcagttgcagctgcactaaaagcatttgatcatggaccatggcctaagatgacggcttatgaa

SEQ ID NO: 1078 - DNA, 360 bp, Glycine max
  Clone ID: LIB3028-042-Q1-B1-E7
agccaccaaatgtctgtgacaactactacagctgtgctgatagtgctacttgttgctgtattttcgagttcggaaatgcttgctttgagtggggttgctgtcctcttgagggtgctacctgctgtgatgaccactacagttgctgccctaacgactatcccatctgcaacacttatgctggaacttgtctcaagagcaagaacaacccattcggagtgaaggcattgaggcgtactccggctaaaccccattggacctttgggcgtaagaacaaggtcagcagtgcttaagcagataaaggaaatgtgaacgtgcaggaaggagccaatgatgaagtaaatgaaagacgaagaattaaaa

SEQ ID NO: 1079 - DNA, 372 bp, Glycine max
  Clone ID: LIB3028-042-Q1-B1-E8
gtactagtgttgggaaggaggaaaggaaacaagaagaggaggggtttttgttttggtgattgaattggggatttagggattgtgtacggtaacaatgaatttcaagatggattccgatagagcgaagctgttcgtaggaggcatttctcgcgacaccaccgaagacgttctcaaactccacttcgccaagtacggcgtcgtttccgactccacaatatccgtagaccgcaccacccgaagccctagaggttttggctttgtcactttctccgacctctccgcagctgataaagccctccaagacacccacgtcatcctcggaagaacggtagaagtgaaaaaagcgattcccaggagtgaacaacatcaaca

SEQ ID NO: 1080 - DNA, 380 bp, Glycine max
  Clone ID: LIB3028-042-Q1-B1-E9
gatggaatcaacatttgcaccctgggccttcatgatgtgaggtctagatttggaattattcctcaagagcctgtcctctttcaaggaacagtacgaagcaacattgacccccttggactgtattcagaggaagaaatttggaagagtcttgagcgctgccaactgaaagatgtggtggctgcaaagccagagaaacttgaggctccagtggttgatggtggagacaattggagtgtggggcaaagacagcttctttgcttgggaaggatcatgctaaaaagcagcaaaatattgttcatggatgaggcaacagcatccgttgattcgcaaactgacgctgtgatacaaaagatcatccgtgaggactttgcggatcgtac

SEQ ID NO: 1081 - DNA, 387 bp, Glycine max
  Clone ID: LIB3028-042-Q1-B1-F1
gctggatatggacttcagattggagcaattccgtgatcacgaacaccagtgcagtccttgatggatatggacttcagattggactgcactggtgttagtgatcacggaattgctggattgctttcttcaacttctttggttctatcaaaggtgaagctccaggcattgactgtttcagatctctctctagctgttattggtcattatggcaagtcagttactgatcttgtccttaattgcctcccaaatgtcagcgagagggggttctgggtcatgggtaatggtaatggattgcagaagctaaaatcacttacagttgcatcttgcaaaggagtaacagatattgggcttgaagctgtaggaaacggttgtccaaatctgaaaatt

SEQ ID NO: 1082 - DNA, 370 bp, Glycine max
  Clone ID: LIB3028-042-Q1-B1-B6
atcttcttcttttgttgtttgtgtgtttgttttttctctcacctgaaaatgtcttgctgctgtggtaactgtggttgcggaagcgcctgcaagtgcggcaacggctgcggaggctgcaagatgtacccagacttgagctacaccgagtcaaccaccaccgagaccttggtcatgggagtggcaccagttaaggctcaattcgagagtgctgaaatgggtgttcccgctgagaacgatggctgcaaatgtggagctaactgcacctgcaacccctgcacttgcaagtgaggtgttggagagctaaagcttcaagcagaaatggcccttagaaataatgataaaaactatatgtagtttcaaaacttcaaaa

SEQ ID NO: 1083 - DNA, 381 bp, Glycine max
  Clone ID: LIB3028-042-Q1-B1-B7
tcatgtcaagaactatgaaactgcaatcaagggcattgagggtttgcaattataaaatgatgagaaggcacattattgattcctcaccttttcatgttgtaaatataagctttggttgacgggcactacaatagttgcatgttgccaatgtgagtcgcgaagggacgtgaatttgaactcagaagtctgggcttgtgttgtttaacccttgtgctcatgctgatcaagcatggaagctgaaaaaatttgagctaaatcagggattgttcttgcttcgaagctcagggtttacgctggcactagtcttctggcgggaaccctaaattttgtaaccttttcctgtgagttattattgatttaccagatgtctaaagtgtcatg

SEQ ID NO: 1084 - DNA, 381 bp, Glycine max
  Clone ID: LIB3028-042-Q1-B1-B8
gggatctgtagtcctgtgactccgaacaccctcctccctcgatatatctatatccaaatctcccttcaattctcaatctctgaaaacacaattcagaagcgaaacagtttccagctctctcacaaaatgacaacaatatcaaattgctcgcttctcttcctcgtcctcgtcctctccaccctccacatagcttccaccctctcaacccccagcaacttcatcaagtcctcctgcagcacgacccagtacccagccctctgcatccagtccctctccgtctacgcctcgaccatccagcaagacccccacgagctcgtccagacagccctctccctctcgctcaaccacaccgatgccaccaaaaccttcgtcgcaaaatgc

SEQ ID NO: 1085 - DNA, 361 bp, Glycine max
  Clone ID: LIB3028-042-Q1-B1-C1
ctgaggatataaaggaaactggatacacctatattatgccaaagagttcacatatatatggttcacacgaaggtataaatttgaactctgaggatataaaggaaactggatacacctatattatgccaaagaacattttgaaaaagtttatatgcatagcagatcttcgaacacaaatttctgggtacatgtatggcgtaagtcctccagataatcctcaggttaaagaaattcgctgcattgtgatgccaccacaatgggggacacatcaacaagttcatctgccatcagctcttccagagcatgatttcttgaatgatttggagcctttaggatggatgcatactcaaccaaatgaact

SEQ ID NO: 1086 - DNA, 379 bp, Glycine max
  Clone ID: LIB3028-042-Q1-B1-C10
cggctcgagcattctccctttcctctccgaaccctcgatcactctcacgcgctcctatattcgctcctccaccgtcgctctctcgaacaaccacaacaccatcttcatcacatggcaaacgcagcatctggtatggcagtccatgatgactgcaagttgaggtttttggagctgaaggcaaaaaggacacaccgtttcatagtttttaagattgaggagcagcagaagcaggtcattgtggagaagcttggtgagcctgcccagggctatgaagatttcactgccagccttcctgctgacgagtgccgttatgctgtttatgattttgagtatctgactgaagggaatgtccctaaaagcagaatttttttcattgcgt

SEQ ID NO: 1087 - DNA, 249 bp, Glycine max
  Clone ID: LIB3028-042-Q1-B1-C11
ccaccctgtcactgtccatatctgcttctcatccaccctcagactcacacaccgttaaagtcacgcctcttgagactatctcacggaggccttgtggttggtatcagtatatttgaaagcaacatctggtaggccgctgcatactaatgagctcttcaagtctgtaattctgtccggaccggtgacagacacgtgtcatagctttcactattgtggatcatcataaacacgtcagtatgcataatcata

SEQ ID NO: 1088 - DNA, 381 bp, Glycine max
  Clone ID: LIB3028-042-Q1-B1-C2
gtgagtcagaaaaccaagcgctctgagtttgtacagcgtcgaaccaggagaccattctctgtgactgaggtagaagcacttgttcacgcagttgaggaacttggaactgggaggtggcgtgatgttaagttgcgagcttttgagaatgcagaccataggacttatgtagacttaaaggataaatggaaaacattagtgcacactgcaacaatctccccccaacagaggaggggagaaccagtacctcaggagctcttggacagagttttggctgctcatgccttctggtctcagcaccaagccaagcaacatggcaagcatcaagctggaccaggaaccttgaagattacagaagcctcagctgaaagaccttgtgtgtgt

SEQ ID NO: 1089 - DNA, 362 bp, Glycine max
  Clone ID: LIB3028-042-Q1-B1-C3
ctaaatttcagaaatgttactgcagacattatctaaccccacaatactccatgagacactcatatgggtgtggcaaccaatgcaccgtcatgggaagattgcaccaggtcccaatgcgttgccaattagtggcaacctccacatgctacggaaactcccgcaacgcacccttcaaacctttgcaagaaaatatggaccccaaatgtccttgaaactacggcaagtccagaccatagatggattcctccccctgaaacgctgaacgattcctcaagactcatgacactgtttttgcaagcatgccaaagattcaagcctctgaatatctctctcatggcaccaaaggcttggagttttccgag

SEQ ID NO: 1090 - DNA, 218 bp, Glycine max
  Clone ID: LIB3028-042-Q1-B1-C5
ggagaagggaaaaatgtcccaccaacaacatcatgaaaggtccttttataggaccagcactataaattttcctattagcttaactagattgaggtcaagaaagattttgtgcattgggaaaatctttatctgcctcactggtttcattttcattgcgcctttctagaaagtataatgtcagtcaatcaaataatgcaataattaatgccattgtctct

SEQ ID NO: 1091 - DNA, 387 bp, Glycine max
  Clone ID: LIB3028-042-Q1-B1-C7
aaaacaccttcttctgcagttccgcactgcatttcattccaattccaatcaataatcataatcatcatcagcacaatacccattttccatggcaaaccctaaaacgaaaagtcaccattcgctaggcggcgaggacgatctcgactcgaccgaatcgcggtgggtcttccaggaggacgaggaggatccctccgagatcgaggatttcgacgccgccgatttgcgccaccaggccatgtttgattccgacgacgaggacaatgctgaacagagactcgtccgcaccggtccccgtatcgattccttcgacgtcgaagccctcgaggttcccggcgctcacagaaacgactacgaagatgttagtgtgggaaaaggaattgtcttagc

SEQ ID NO: 1092 - DNA, 61 bp, Glycine max
  Clone ID: LIB3028-042-Q1-B1-C8
ctaaaaggttcatgacatgttcttgaaaaaccttggttggaattaaatgtagcactagctt

SEQ ID NO: 1093 - DNA, 326 bp, Glycine max
  Clone ID: LIB3028-042-Q1-B1-C9
aaaaacttgataagaaagcaacacttgaggccatgcctttgaatgagattcttgcttaattaataatagttacatatgtaccatttgcatgcccccttggagtttttagtattttttaatggccatgaattaatagtagtccttacctttgtgcttttgtacatcatatgatttatcctttgtggggacatcatgtgttgtgttcagttgcctatgtcttaatatctagctggatcatctatgtataccttagatttgcctctattacaaatgaaaatacgtggcaatgtcattaatattggctgcatccaaaaaatttttaaatg

SEQ ID NO: 1094 - DNA, 385 bp, Glycine max
  Clone ID: LIB3028-042-Q1-B1-D1
ggctgttataaaggaattatatagcgactctcctccagccatcattcttgttggtcacagcatgggaggatcaattgctgtgcatgttgctgcaaggagatcattgtctgccttggcggggttggttgttgtggatgttgtagagggaacagcaatggcttcactaattcatatgcagaaaatcctatcaagcaggatgcaacatttttcaagcattgaaaaagctattgaatggagtgtcaggggtggctctttaagaaatattgattctgctcgtgtatcaatccctgccacattaaagtatgaccattcaaagaaatgttatctttaccgaactgagctggaaaagactgaacaatattgggaaggctggtatgaaggcctc

SEQ ID NO: 1095 - DNA, 384 bp, Glycine max
  Clone ID: LIB3028-042-Q1-B1-D10
caaggattcacccaattccaagaaggttatactcggtggctctttcgttctcacaaggcaaccgtgtccttctattggtccccttttcttgtagatggtgttccaagaaaaaatccgggactcccttataacaaaattcatttggatcgtgctaatatgaagtgggaaaaggatttggatcaaatagacatcatagtgttgtccttagggcattggtttttagttccttcggtattctattggcgtgacaaagttataggatgtgtgagccatcctgtttctaattgcaccaaagacattggtgtttatgttccaataagaagggccttaaggactgctcttaatagcataattaagaggaaggtgaaaagaggaaatggaatt

SEQ ID NO: 1096 - DNA, 379 bp, Glycine max
  Clone ID: LIB3028-042-Q1-B1-D11
atgacttgcaattgaagggacacacaccaaagtttgtttactacacccttcaaggtgttggagatgaaggggttgttttggtgtatccattgcccaaaggttctatggagaatggtgttgatgggaagtttctgaccatgatttttccggaggatgaaatggtgaagcttaaatctgagctcaagataattggtcttttgcttgagaataattaagttttaatgagattaaaagcatgtttgactttccgttcatcttgttagcacgaatttcaattttaaattcaatggtcaaccgtatattaacgcagaaggaatgatggacatgcttttgcaaacttcatttttcaccaatgttggttcgtcgaatacccaaacac

SEQ ID NO: 1097 - DNA, 379 bp, Glycine max
  Clone ID: LIB3028-042-Q1-B1-D12
ctcgagccgaatcggctcgaggtggcatctatctaagacaggcaccatgtcacttcttaaccagctctttaacagaggcgttttcggcactcgatgcaaaacatgcctgaacctggcaatttcacgcattaagctgctgcaaaacaagagagatatgcaactgaaacaaatgtgcaaggagattagccaattcttgcaggctggccaagaggcaattgctagaatcagggtggagcatatcatacgggaacaaaatacatgggctgcatatgaaattttggagttgttctgtgaatttgttcttgcacgtgtacctataattgagaatcagagggagtgccccacgggattgcgagaagcattgcaagtataatttttg

SEQ ID NO: 1098 - DNA, 380 bp, Glycine max
  Clone ID: LIB3028-042-Q1-B1-D2
gcaataaagacagggtgggttcatcccaatatcaatttagaaaacccagatgaaggagtggataccaatgttcttgtcggctctaagaaagagacactagatatcaaggcggccatgtctaattcattcggctttggtggccaaaattcctctatcatatttgcccctttcaaatgcaatagattttagaaaatattacttgtttattactttaaagaagaataaccagacaatgtattggatactcacactactcctttggttgaacaaaaatgattataggggggattgctttcttggatgatcacttatgttcaaaaacattgaagtaatcctctagaatcaatatttctagacttgtttgttcaaggttttagtgt

SEQ ID NO: 1099 - DNA, 390 bp, Glycine max
  Clone ID: LIB3028-042-Q1-B1-B5
gttcaaagacacagactaggagctgcccaaaattgctctgccactcttaacggcaaccacaagctcaccgatgctgttcttcctccaacgaaagactggagaaaagaaggtatagtgagttcagttaaagatcaaggcagctgcggatcatgctggacattcagcacaactggggctttagaagcagcctatgcacaagcatttgggaagagtatctctctttctgagcagcagctagtggactgtgctggccctttcaacaactttggctgccatggtgggttgccatcacaagcctttgagtacattaaatacaatggtggactagagacagaggaagcatatccctacacaggaaaagatggtgtctgcaaattctcagctgaaaat

SEQ ID NO: 1100 - DNA, 382 bp, Glycine max
  Clone ID: LIB3028-042-Q1-B1-A11
gctacgattaccattaccagaccctaaaggacaacgtcgacatgctcaaactcatccaattgggcctcactttctccgacgagcacggcaaccttcccacgtgcggcgacgaatccggcacgtgctgcatctggcaattcaactttcgcgaattcaacgttaacgaggacgtcttcgccaacgactccatcgagctcttgcggcagagcgggattgatttcaagaggaacaacgaatacggcatcgacgctcaccgtttcggggagcttctcatgtcctccgggatcgtcttgaatgacaacgttcattgggttactttccacagcggttacgatttcgggtacgtgttgaagctcttgacgtgtcaagatttgcccgatac

SEQ ID NO: 1101 - DNA, 376 bp, Glycine max
  Clone ID: LIB3028-042-Q1-B1-A12
tggagttgcaggaaatgtgtttgcttttgggttgtttgtgtctcccatacccacatttaggaggattatcagaaatgggtcaacagagatgttctcagggttgccatatatttattcccttctgaactgcttgatctgcatgtggtatggcacacctctgatatctgctgataatttgttggttacaactgttaattcaattggagcagtctttcagtttgtgtacacaatcatcttcctgatgtatgctgagaaagcagagaacgtgagaatggttggattattgctggcagttcttggcatgtttgcaatcctattggttgggagcttgcagatagatgacgttataatgcgtcggttctttgtggggttcttg

SEQ ID NO: 1102 - DNA, 363 bp, Glycine max
  Clone ID: LIB3028-042-Q1-B1-A2
ccaaatcatcgacacctgagccattcaattcccctccgttattgcattcaagtttcaacactacatttattatctgaaagaatggctttgaaagtttcgcttttccgtggacctgatcaagtgtctaataacctccgccctgagacaagagctgctggatccagcattggcgaaaactcgaactcagaggagaagaaagagcctgagttcttgttcaagcatgaaggtggggtgtataatccacggactggacatgttggctttccacataaatttcatcacatacctcagaatccattacctggtggcaatggaaatggaggagcaggaaccggagcaggatcatgatcaccagtaggtagc

SEQ ID NO: 1103 - DNA, 327 bp, Glycine max
  Clone ID: LIB3028-042-Q1-B1-A3
ggagtcaatttacatttcaatcaatcctaattgattccctaatggatgctaagcttacacacactcaatcatcctctcataatgtgtctatgtggattccgggacatgctgcgattgatccactacctgataaacggagcactgagacctgctatcataggttgggtatgccttgttttcagcatcaatgtctttgctgaaagcccccatactgatatgttacatcacagatacgaggatcgtccactacatgaccatgaacttgtccacgataattttcaacaatgcagtcatgtcgatcatctagtgccttctccacagggatta

SEQ ID NO: 1104 - DNA, 387 bp, Glycine max
  Clone ID: LIB3028-042-Q1-B1-A4
aaaaaatttaagtgaggagctagagaatgatgatgaagtctgctatgtgtggagtggtggttgtagcacttcttcttctggcggaggtggggcccatggctgaagctgtgacatgcaccccaacagagttgagtccgtgtcttccagcaatcacttccggtgctaaaccttccaatgcttgttgcacgaagctgaagcagcacacaccatgcttatgtggctacctcaaaaacgctagcttgaagcagtatgttaactctcctaatgcccgaaaaaccgttgcttcttgtgggattccctttccaacttgttaattaattaagccttcttataattaaagtgtgggatatatatatatatatagataaacagtttagtttatacaca

SEQ ID NO: 1105 - DNA, 376 bp, Glycine max
  Clone ID: LIB3028-042-Q1-B1-A5
gctttattatataattaatttgatggctcgacaaccttgtgatgacaaatcatcatctggattctgctactctgatgtgtcatcgggaaatccaacgatgttggtgaatcagatccaaggctttgtgtcagacccggagatgtacaacctaaccacaggcatggaaatgatagggtttccaaagagtgacaccaacgctgtcatgtggagaagtttcatccccaaaccgggtccttcctcttccaaaaccatcaacgataattccacaactttctaccaccacgactacaacaacaagcatgcagatttcacaccagctgggaatatttctcaaacaagtgccgataatctaatcgtgggaagtcatgattcagcc

SEQ ID NO: 1106 - DNA, 386 bp, Glycine max
  Clone ID: LIB3028-042-Q1-B1-A6
gccagactgagaggaagagagagggagattctttgtttgctaccttctctcggaaaaatggttacgttcaggtttcaccagtaccaggtggttgggagggctcttcccacggaatcagatcagcaccccaagatctaccgaatgaagctctgggccaccaacgaggttcgcgccaagtccaagttctggtattttctgaggaaactgaaaaaggtgacgaagagcaatggccaagtgcttgccatcaacgagatttttgagaagaacccaaccacaattaagaactatggtatatggttgcggtatcagagtacgactggttaccacaacatgtacaaggagtaccgtgacaccactctaaacggtgcagttgaggcaatgtacaa

SEQ ID NO: 1107 - DNA, 361 bp, Glycine max
  Clone ID: LIB3028-042-Q1-B1-A7
gcctgatagccctcatattttttatacctgtggtgaatatggattactgcagcgttttgatctgagaactggggctgcaacagaactttttacatgccagccaatcaaggataggtggagttacatgccagtcatccatcttaatgcaattgcaattgatccaaggaaccctaatctctttgcggttgctggctctgatgagtatgctcgacgttatgatattcgcaagtataaatgggacggatcaactgattttggtcaaccaaccaacttcttttgccctccacacttgattggcgatcagcaagttggaataacatgcttggccttttctgaactaagagagctgcttgtgtcatac

SEQ ID NO: 1108 - DNA, 382 bp, Glycine max
  unsure at all n locations
  Clone ID: LIB3028-042-Q1-B1-A8
gcctgttccactgcaaacggcttgaacacgttattgttcttgcatagggcaatgtggtgatcatgaacaatgagtgcagcattgcaagtttttacacagccagcgccacagagacatgtggattgacatgccactggaccacacaagcacaatcgcagatggtgcacggcatttcaatgtcgatgcaggtagaggtacagaacgtctccgtgcgatgtcaggangattcacagcttcatattggacagcttgtctgagtgtagacgttggttgaacatcatatgcacacaacatctgatggcggataagtagcttgagacattcgaccaggtgtcatggatctcctactttcagcgagtgtcacactcttgtcagctaaata

SEQ ID NO: 1109 - DNA, 329 bp, Glycine max
  Clone ID: LIB3028-042-Q1-B1-A9
catatattgatgtttcaacgttgtacatgctaactcatctccttccccttttcccttcgtataatgtatatcatggtaatatgatttcagatttggtttgtttttacctgtatacctggttgatatgcaggaccccatagatgaaggatcaccagtggatgtggctaagttgtagatgcgcacacgccctccatgggcatcatcttcgatataccagactaaacctcactcaccatctggaattcagctatttagtgaagaaacaccatatctatttggcaacaattctacaccagcctccaaattgacaagggattctgctgctactg

SEQ ID NO: 1110 - DNA, 391 bp, Glycine max
  Clone ID: LIB3028-042-Q1-B1-B1
cccctttctctgcaactccctccaatttagttagagttatagaggcattgttgctgtttggaaacagatctctgatctgaaaatgagtgcatcgaggttcattaagtgcgtcaccgtcggcgacggcgctgtcggcaaaacctgcttgttgatttcctacaccagcaacacttttcccacggactacgtgcccacggtttttgacaatttcagtgctaatgttgtggtggatggaagcaccgtaaacctggggttgtgggatactgctggtcaggaggattataataggcttagacccttgagttatcgaggagctgatgtatttatacttgccttttctctcataagcaaggctagctatgaaaatattgcaaaggagtggatccctgaa

SEQ ID NO: 1111 - DNA, 378 bp, Glycine max
  Clone ID: LIB3028-042-Q1-B1-B10
tgaaggcagaaaagtctgcacttattacagactggattcaattcctgttgtacttgttattgatcccatcactggccaaaagatgcgctcttggattggaatggttcaacctgaaagcttattggaaggtctactagcattccttgatgcagggcctaaggatcatcatattaccatgtctcacaagcgtcctagaggaagttctagcccaccaaaatctaaagccttggtagaatcagatgagaataaagaggagtatgaggaagttcaaagagctctggcagcttctatggagagcatgaaagaatcaactgctatggctggaagagacaataaagatgcagatgttgcagtcaatgggcaagaaacaccatggct

SEQ ID NO: 1112 - DNA, 375 bp, Glycine max
  Clone ID: LIB3028-042-Q1-B1-B11
attgcagtgagtatgatgttgatggggctgaagaagagccgaacttcgatgttgaggaccggaagcccgaccatcttcatccatcaaaccttgggatggagagaatgatgggaaggatgccaattcagcaaccttctcatcccatgaagggagatgttgtcacaaacctagatttcatccggaagaggaagatttctagtgacttcaacatgatgatggatcagaaaatctacacatgcgagcatccccaatgcccttacagcgaagttcgccttggtttccatgataggtctgctagggacaatcatcaattgaattgtgcatatagaaacagttctgcagattatggtggtggtcccaatttccatgctactg

SEQ ID NO: 1113 - DNA, 383 bp, Glycine max
  Clone ID: LIB3028-042-Q1-B1-B12
gattgggccacaaggggtgggcttgtgaaaacggattggagcaaggccccattcacagcctcatacagaaacttcaattcccaaacttcttcctccactggccaatcactggacgccacggggcaggcaaagatccgttgggtgcaaaagaattacatgatttacaattattgcactgatatcagacgtttccctcaaggccttcctccagaatgctccattgcatgagaatatttaattcaatgttgcatatcattataaaatgatcctcatgaacgtgacacacatgtgttgcctattacgttaatttactttcttgtgtaaattaatgcaactaaaactgttattattgttggtttgtgctttgttgagcactactccat

SEQ ID NO: 1114 - DNA, 388 bp, Glycine max
  Clone ID: LIB3028-042-Q1-B1-B2
ttcagcttttccctcgttgaaatgaaaatgggttcttctttgtggactttgtgtcgaattttggcttcactagcctcttctgcattctgtgcctttccacggaggccagtggatgttccattcggcagaaactacgttcccacttgggcttttgatcacatcaaatacttcaatggaggttctgagattcaacttcatcttgacaagtacactggtactggcttccagtccaaagggtcatacttgtttggtcacttcagcatgaacataaaaatggttcctggcgattcagctggcacagtcactgctttttatttatcttctcaaaatgcggagcacgatgagatagattttgagttcttggggaacagaacaggacaaccttaca

SEQ ID NO: 1115 - DNA, 206 bp, Glycine max
  Clone ID: LIB3028-042-Q1-B1-B3
ggccattcgcagcactgccctcgagctaagcgcggcgtagatatgcattgttgcagtctcggagaatgtcgcggatcaggctcaggatgaatcggaggtcaatacgctcgtgaacgacatgcacgggaataactactgcgacagctgattggaatcttacggcaggacaacttatcgcagtgaccacacgactactgattatgtcc

SEQ ID NO: 1116 - DNA, 334 bp, Glycine max
  Clone ID: LIB3028-042-Q1-B1-B4
gacagtactaaacactatattgacacgaagaataggattcttgtagttgggggaactggttacattgggaagtatttggtgacggcaaatgtctctttaggccatccaactttggtatatacacgccctcttattgcacaaactccgccctcaaaggcacaactttgcaatgaattgaactccatacgggtcaaacgtgtccatggagaacttgaacatcagcagattctggctgtgattaaacacgtagacattgtgatatgtcctctggcatcaccaccacgtgattgatccacctcaaaattatatatgctatcacagttgctgggtaata

SEQ ID NO: 1117 - DNA, 352 bp, Glycine max
  Clone ID: LIB3028-042-Q1-B1-A10
gaacttttgatgatgcactgttctgcatgatttccaagccacgcaacaatgaccatactccgatcgttgggcatgctgatttgaatacattgattgctagtcttaatttgggggccgacatcccagccatgcaccacaacatggttgctaatgatcagtgcttgtcaggtactggatcctcacaagttggcgatgaacattaggttccacacaacaaacaacggcacatacacatgccagcattcacctggggcaatcacccgcaccgttttcaacttagcagcgcttgcctgtcaccctataccgcgactatgcactatgcagacgatgacttaactttcattgacgtctg

SEQ ID NO: 1118 - DNA, 186 bp, Glycine max
  Clone ID: LIB3028-041-Q1-B1-G2
cgatcaccttgctgaccctgtcaacaacaacgcctgggcctatgccaccaacttcgtccccggaaagtgagcgtcaaagaacgaaatgacttttgagagtttttagatttgtgtttggtgaagtacttcagataatgtgaattatcttgtgtatccgaatccaacttaatgttacttgctttttac

SEQ ID NO: 1119 - DNA, 390 bp, Glycine max
  Clone ID: LIB3028-041-Q1-B1-G4
tgctcctcaaagttttcataataatctgactcaaactgcaagaggagttcacagtaactactctcaaagatccactccaacttttagggcttcttctagcttacgtttgggacgtgtggcaccttctgatgatggattgcatatggtgtccgaaagttactcttctagacagccaaggccattgaccaccgttggctggcagaacaataatagaaatggaagatcaagaatacctagtgacagatatcggtcattggatgatgagggtttcatgattgttgatcgcacttcactgtatggacctaggaatatgcttgatcgacatagagacatgaggatggacatagacaacatgagttatgaagaactacttgcacttggagagagaat

SEQ ID NO: 1120 - DNA, 383 bp, Glycine max
  Clone ID: LIB3028-041-Q1-B1-G5
agagaagaagttgttgggttgagttggattggatttctaatctaatctatacctttcttttttcctatgcttttaaggcacaaacccttctttcttccctcttctttcttcttcttattgttattccttgcctttaccctttagggaaggaagaaggaacaactatactactattatccttattattgttattattgtaattaatctttttattatagttattgttgttgttattattcctcaaatatggattcgttgtgcctctccaacgactcagttgtttctggattcaaagacaaggagtcaatggttgacccctttttggtcgaggctctccagaaccctcgtcaccgcctcaccattttgaggatggagctggacat

SEQ ID NO: 1121 - DNA, 344 bp, Glycine max
  Clone ID: LIB3028-041-Q1-B1-G7
caaaaccaaaaccaaacaactgaagctggaaggcaccaagaggttggtcacaagagccttctccagagtgatgctctttaccagtatattctggagacaagtgtctacccaagagaacctgaatccatgaaagaactgagagagttgacagcaaaacacccatggaacatcatgacaacctctgcagacgaagggcagttcttgaacatgctccttaagctcatcaatgccaagaacaccatggaaattggtgtctacactgggtattcacttcttgccaccgctctcgctcttcctgaagatggaaagatcttggccatggacattaacagggagaattatga

SEQ ID NO: 1122 - DNA, 384 bp, Glycine max
  unsure at all n locations
  Clone ID: LIB3028-041-Q1-B1-G8
aaccctagattcgtaactgtaccacgtcctcgtcccaatcaagtgaaagctcgatggctgaaatggaccagaacacgggcggtgagcatgaggcggaggaaacgattgagattgaggcggaagtgcacggtggtgaagaggcggttgttgcggagaagaagtggccggggtggcccggggagagtgtgtttcggatgttagttcctgcgcagaaggttgggggtatcattggacgcanaggagagttcatcaagaaaattgtcgaggagacacgagctcgagttaaaattcttgatggtcctccgggaactgtgcaaanggctgtantgatatcagctaaagaggaacctggttcctctgttcctcctgctgtggatggcttat

SEQ ID NO: 1123 - DNA, 380 bp, Glycine max
  Clone ID: LIB3028-041-Q1-B1-G9
ctttctctcgttttttctcagaaccttctgaggttaaagcaaaaaccaaagagagagagagagagaaaatgatgaagccatcgatgctcagatctctccactccgccgccacccgcggcgcctctcatctcttccgccgtgggtacgcctccgagccggtgccggagcgcaaggtacccgttctcggcgccgccggcgggatcgggcagcctctctcccttctcatgaagctcaatcccctcgtttcgagcctctccctttacgatatcgccggaactcccggcgtcgccgccgatatcagccacataaacaccagatctgaggtagtggggtaccaaggtgatgaagagcttggaaaagctttggagggtgccgatgtt

SEQ ID NO: 1124 - DNA, 373 bp, Glycine max
  Clone ID: LIB3028-041-Q1-B1-H1
gagctagacagggtaattgggcttgaaagggtgatgactgaagcagacttctcaaatctcccttacctacaatgtgtgaccaaagaagcaatgaggcttcacccaccaaccccactaatgctcccacaccgtgccaatgccaatgtcaaagttggaggctatgacattcccaaagggtccaatgtgcatgtgaatgtgtgggcggtggcccgcgacccggccgtgtggaaggatccattggagttccgacccgaaaggttccttgaggaggatgtagacatgaagggccatgactttaggctacttccattcgggtcgggtcgacgagtatgcccgggtgcccaacttggtatcaacttggcagcatccatgt

SEQ ID NO: 1125 - DNA, 54 bp, Glycine max
  Clone ID: LIB3028-041-Q1-B1-H10
gtggttgcaagggatattatataatatataaatatgttttgccgtatctattcc

SEQ ID NO: 1126 - DNA, 360 bp, Glycine max
  unsure at all n locations
  Clone ID: LIB3028-041-Q1-B1-H2
tggatccaccaccctctaagttcgtaatcgaagcatcggaagcccttgccctggcggagtccgccgccgtgaccctcccggaactcctccccaccctggtccccgccgcccagcccctcgcccgaccccccatctccaagttctccgtggccgccgtgggcctggccccctccggccgcatcttcgtcggcgtcaacctggagttccctgggctccccctccaccactccgtccacgccgaacagttcctcatcaccaacctctccctgaatgcggagccccacctggtgtcnctggccgtctccgccgccccctgcgggcactgccgccaattcctccaagaactccgcgccgccgccg

SEQ ID NO: 1127 - DNA, 339 bp, Glycine max
  Clone ID: LIB3028-041-Q1-B1-H3
tgcgattgcaatattacaacttttccattgcatggtccctcaagttcgaaagccagaattctggggtgtcccattcatgccgtggataccctctatatcaatctttctgaatgtgtttctgttgggatcactggatgggccatcctatgttcgatttggattcttttcggctgttgcggtgcttttctatgtcttctacagtgttcatgccagctttgatgctgaaggagatgattctttgactgcaaataagaatggggaaatccacgtggaatcaaaagaaattgaagaccaaagtttcgaagtgtagatagtcctttatttgtgttctttttctat

SEQ ID NO: 1128 - DNA, 340 bp, Glycine max
  Clone ID: LIB3028-041-Q1-B1-H6
ctgaagcccgcttcctccttaattactctattattctttctcctcctcagaacctcaaacacggaaaccaagcattacaattcccagtttcatagaaagaccagagtcaatacaaacacataacagcacaagcagtgaaaaatggcgagctcggtggagaaggagagtggcgcgagcgaggaaacttgcgctttggagctgcctgctccaccaggttggaagaagcagttcatcccaatgaaagctgggaccccaaagagaaatgagatggggttcactgcaccagcaggagaggagatcaataacaggaaacagctggaaaaatatttgaaagcacacc

SEQ ID NO: 1129 - DNA, 359 bp, Glycine max
  Clone ID: LIB3028-041-Q1-B1-H7
caagcaaagaaaaacgaggctgctgtgagaccaaataaatcagtaatcgctgattctggccctagcagaccacctaaatcaaccatgcagaagaaaggcaacattgaaccaaagatgcaacaaaatatcgtgaagagtgctatcccaagaaatcctcacattcatcagctagataaacccaagtgttcagacgatgctgctgtgcacgtaaagttagaagccactaagagaaaacttcaggagcgttatcaacaagctgaaaaggctaagaggcagcggacggtacaggttatggagttgcatgacctcccaaagcaagggattggccatcgaaatccacatgtgaaacccggaaatca

SEQ ID NO: 1130 - DNA, 389 bp, Glycine max
  Clone ID: LIB3028-041-Q1-B1-H8
cactttcaacccaatccaatcctcgcacacatgcatgctgtctctgccaaagttggggccaagtcataactacatttccattgttacgattctttctttccatcccaaccacttattaagcgtctgatccaatttctttctctcaccatggatcatcgcaaaccattgttacccacttcctctgacgatgctccaaatccacgcactcggaaggaccttgttctaatgatttgcggtttgtttttgctctcttcccttgttgcctttggagggtacagggcctccaacgcgccacatgctgacgtgtcatcgccagcatcgaacgatgaacaacctagtcccacatcggtgccttctccgaaatgggtaccggttttcacggggtgttc

SEQ ID NO: 1131 - DNA, 370 bp, Glycine max
  Clone ID: LIB3028-041-Q1-B1-G11
tacgtaaaccggaatcggcccaaggcaaggtaggccttaaagcaatccattgtgtggtgggttttggcggttgggtttgggtttggaggatgggcaaccatgaccaacttcattaggcaaattgacacatttgggccctttgccaattgctacaaatgcaaggcccaaactcaacaacccatggaagcagcacaacccccgcatgctcaacatcatcactgagtagtacaacccactcatgactcacaacttcaccaaaatattaatgaaactatgattcaattaaaattttgtatcaaacatgggcatccttagtaacaccccccttaaatttaaggtgtgccggttgtgttttgctgcaattttcttt

SEQ ID NO: 1132 - DNA, 308 bp, Glycine max
  unsure at all n locations
  Clone ID: LIB3028-041-Q1-B1-H9
ctggaaaaggcatggggaacaatgaagaaggtaaaaaaaatggtaccaacttgaatgaaggcaaagtccccggaaaaaaagtcctaaaaattggtgggaaccccccctttgggttccctcccgttggtaaaaatttggcgcgccctgaattccaaggttccggaaaaaactgttgggttcgcaaaggtggtgcttataccggttaagttagtgctgaaatgcttgttaatttgggaatttcttgggttantattggtcactctgaaacgaagcagcttttaaatgaatcaaacgaatttgtgggaaat

SEQ ID NO: 1133 - DNA, 356 bp, Glycine max
  unsure at all n locations
  Clone ID: LIB3028-042-Q1-B1-A1
aagagatgtcggcaaggcaatgtaatctttataatgtgtagtgttaaatcagcggcccggatgcatttatacttacaccgaatcacgaggcgacaacatcgacatggagggtctcatcaacggcttcatcaacgttgctctcggagctgatggtggcgatcgggaagaacaacaacacgggagagacgaccgtagtagaagctcctgggctgaagtcgtctcccaggatcaacaagatcaccctcttcctcatcancaacacaaggaacaatatcgtcctcagtacgaggagccccaatctcaaagttcctacaaaccccagaaggtggatgaaggtgaagatggatggcaaactg

SEQ ID NO: 1134 - DNA, 387 bp, Glycine max
  Clone ID: LIB3028-041-Q1-B1-E3
tgcactgcttgtgtatgatgttaccagacatgtgacttttgaaaacgtggagagatggttaaaggagcttcgtgatcacacagatgccaacattgtaatcatgcttgtggggaacaaggcggatcttcgtcacttgcgtgctgtctccacagacgatgccaaggcatttgccgagagagaaaatacgtttttcatggaaacatctgctcttgagtccttgaatgtcgataatgccttcaccgaagtgctcactcagatatactgcgttgttagtaggaagactcttgagattggggatgaccctgcagccttgcccaaggggcagaccatcaatgttggcagtagggatgatgtctcagctgttaaaaagtctggatgctgctctgc

SEQ ID NO: 1135 - DNA, 383 bp, Glycine max
  unsure at all n locations
  Clone ID: LIB3028-041-Q1-B1-E4
atggcaatgctgactcagctgaagatttcttcgacaagtctctccgcgagaagtattgtgatggtactgctggtctatcatatgcggaattcctacataagatagggaactatccaatggcaaaggaggtttaccgaaatgtcgtacaaggggctattgaagtaaaaaatgctggcagaccatacttaggagctggtaacatgagcgtggacgaattaattgtagggtccatgtttgctttaggacagctggaattacttatgggtaactactctaatgcagagtgccatttgacacaggcattaagtanggcagaggaagcctatggagactctaaacatcctacggtgggggttgccttaacaagcattgctcttttgtat

SEQ ID NO: 1136 - DNA, 382 bp, Glycine max
  Clone ID: LIB3028-041-Q1-B1-E7
gggtaaaagtgttgtcccaaagaaagagcatctttctcctttctttcatcaccgttggaagagactgagatgggttcaaaaaccaagacttttacctttgaggaggtggctaagcacaatcacaggaaggattgctggattatagtcaaagggaaggtgtatgatgtcaccccatttttggatgatcatccaggaggtgatgaagttttagtgactgcaacagagaaggatgccaccactgattttgaagatattgggcacagtgattcagcaacagagatgatggaaaaatactttgttggtgaggttgacaccaacactcttccagcacaagttaccagcagcagcagtgtacgcccaccaacacaagcacctgtctata

SEQ ID NO: 1137 - DNA, 381 bp, Glycine max
  Clone ID: LIB3028-041-Q1-B1-E9
ctcgagccgaaatacaattatacaaacacatattcattctcctcacataccaaaaataaattatttttcttgttattttccctttgctaacgaaaagccatgaaattcgggaagagcctgagcagccagatcgagaaaaccctgccagagtggcgcgacaagttcctctcctacaaggagctcaagaagaagctcaagcaattcgaccctcccgcccccgcctccgccgccgatgaacgccccggcaagcgcctcaagaccgacgccggcaacgccgacgccgacgccgtttccgacgcctccgacatgtcgaaggaggagagcgacttccggaacctgctggagaatgaactcgacaaattcaacaccttcttcgttgag

SEQ ID NO: 1138 - DNA, 394 bp, Glycine max
  Clone ID: LIB3028-041-Q1-B1-F1
catcaacttcgacgtgaagttgaaatacaaagtcatctccgacatccccacatcttgcgcctctatggatacttttatgaccagaaacgagtttatttgattttagagtatgcacccaaaggtgaactttacaaggaattgcaaaaatgcaaatatttcagtgaaaggcgtgcagctacttatgttgcatcattggcccgagcccttatatattgccatggaaagcatgtaatacatagggacattaaaccagagaacctgcttattggtgcacagggtgagttgaaaatagcagactttgggtggtcagtgcacacattcaatcgcaggcggaccatgtgtggcacactggattaccttcctcctgagatggtggagagtgtggaacatgatg

SEQ ID NO: 1139 - DNA, 361 bp, Glycine max
  Clone ID: LIB3028-041-Q1-B1-F10
ttcagtctttcttggaactttgttactctcacacatgtctcgctccgtgcctttggtttcaaccatttttgtcttgcttctgcttctggtggccactgagatgatggggccaacaatggtggcagaagcaagaacttgtgagtctcagagccaccgtttcaaggggccatgtttgagtgacaccaactgtggctctgtttgccgaaccgaacgtttcactggaggacactgccgtggcttccgtcgcagatgcttctgcaccaaacattgttaattttaaaaaattaattaagagtgctttgatagaagatgatagatctatcatctttctactcgtgttgttaattaaccactttgtgtt

SEQ ID NO: 1140 - DNA, 370 bp, Glycine max
  Clone ID: LIB3028-041-Q1-B1-F11
gacatgttgacgctgatccaagtacgtctcaccttctccgacgaaaacgggaaccttcccacctgcggcacggatagcccctgcatctggcaattcaacttccgcgagttcaacgtcagcgaagacatcttcgcgagcgactcgatcgagctgttgcgccagtgcggaatcgacttcatgaagaacagcgagaatggaatcgacgtgaaccggttcggggagctcctcatgtcctccgggatcgtgttgaacgactccgtgcgctgggttaccttccacagcggctacgatttcggctacctcctgaagctgttgacatgccggagcttgccggacacgcaggccgggttcttcgatctgatcaagatgt

SEQ ID NO: 1141 - DNA, 396 bp, Glycine max
  Clone ID: LIB3028-041-Q1-B1-F2
gggataactacactcacggaccaggtagaagtgtaataatggatggaagcaatggggatatcgcgattgatcattatcatcgctacctggaggatatagatttaatggaaactttgggagtaaacagctaccggctatccctgtcatgggcaagaattctaccaaagggtagattcggagagcccaaccatgctggtatcgagttctataacagactaattgatgttctactactcaaagggatccaaccctttgtaactcttagtcactatgacattccccaagagcttgaagacagatacgggagttggctaagtccccagttacagtaagcaaccagttttctagtttacatgaagaggtttcaataccacattgatcatacgagctcctaaa

SEQ ID NO: 1142 - DNA, 399 bp, Glycine max
  unsure at all n locations
  Clone ID: LIB3028-041-Q1-B1-F3
tccataattaaggatcaaccatactaatgtgaattgggtcaaagtaatttaccattttcttttgccacttatattgaatggatgctgtagctctgatgccataggaaagggtaagtttagggaagggatgaagaagaactccaagcttgtggcttatgctaaaaagcatggccatggaaactggcgcacagttcctgccaaagctcttcttcgaaacaagatgcttcaagtctagtgcaacaagttacgtatatatgagtgccatatatataggaaagaataagtttagggaaggatgaagatgaactcaaagctcgtggcttatgttgaaaattaaagcatggccatggaaactctggcgttcagttcatgcttaaganggtcttcaaagatgtagaa

SEQ ID NO: 1143 - DNA, 385 bp, Glycine max
  Clone ID: LIB3028-041-Q1-B1-F5
cgtttccgttccgttcaaacagttccttttttctcacacacttcctttgttcgtcaccgcagtttcaatctcagatccaacattgttcaatccaaattcaacgcattccatggcgaatcctgcatccgcaagattctccgctcttcttcttctcgtttctttgctagtcaacatcgccgccgaatcgccggctccggctccgactccgaagccggatttgcctccgtcgtcttctcctacttctgctcctgcttcgaacccttccccggccaattcgccgccatctccaactccggcgccttctcatcactcgccgccggctccttcgcccggtaccaatccttctccgtctccggctcctgctccggcggatgacgcacatgac

SEQ ID NO: 1144 - DNA, 376 bp, Glycine max
  Clone ID: LIB3028-041-Q1-B1-F6
ataagagctctgcaattgaatgaaatcagtaactggagggcaatctcagggaggtgatatgaatgtagttgaagctacaaaggatgtgtctccatctgttgaacatcttgttgctgctaaaggaagccctctcaagagtgatagaagaagtgaaggccatgttatatcccaagatgaagggaagcaatctcttgttaggcccgctaatgagtctgatagagctgaatctagtgatgatggtggtggtcaggatgactccccaatgttggaaggtactagtggggaaccttctagcaaaggactaaacacaaagaaaaggaaaagaagtggacaggatggtgataatgataaagccaatggagctcaagaactacct

SEQ ID NO: 1145 - DNA, 397 bp, Glycine max
  unsure at all n locations
  Clone ID: LIB3028-041-Q1-B1-F7
gggaagatgaacttgagatggatggaagcggtgctgccgctgggaatcataacgggaatgctctgcgtcatggaaacgctcagtattacattcacaaatccgcgcatggcagacctaagcacatcgggaacgatatgtgggacgtggccatggaacgaagggacaagaagcttgtcgagcaagcctctccctccaattaacatcgttgttttgccaatgacattgtgaagaaaataaactgctcacctggatttacgactgtgttctagggaagcagggttaatcacaagaatcaaattccgtctgttttcttgtatgcaattcaacataagatttataaatatatctatgttccaatcgcaattacttccgctaaaaaaaaaggtnaaaaagaaaa

SEQ ID NO: 1146 - DNA, 388 bp, Glycine max
  Clone ID: LIB3028-041-Q1-B1-F8
gatgtctttctctctctcttttcctctcacactcttcccatctattccctcatggtttcttctctcttccttcccaataaaaattacccacttctaatcagacaaaaagtagagtggttataagtccatttgtttcttcagtttccacacaactttcaccagaagaaactaacaccttccgttactggctttttctgtgtccttggcaaccctttgctgattttcactgccacaatcacaaccaattgaagaagaagtttctgggttatggttcacgggtgccgtatagttatataatctgagctgggccccattccatacgcaacttttcctccttcattctcctttttttttttattgtcttaagaagtgatggacatggaagaaa

SEQ ID NO: 1147 - DNA, 367 bp, Glycine max
  unsure at all n locations
  Clone ID: LIB3028-041-Q1-B1-F9
gcgacacatactccctgctgattgttctccctttctctcgctcacacatggcttgtttaaagcctccatggttctcttcattgcgcgtcgtgtccccggcanaactcgcagcaggcccgccgccttcaacaacgtacaagcccgccaagctgctcttttgggccgtgggcccagacaatgctgaatcttctgagcccgcctcccccgacgctccagagcccgccgcacccgttgattccgtggagttggcgtttagcaaggccaacgtgtataaagctgattataataataatgaaaattcggctgaagaaagaaacgttggtgatgaaaccccaaatgatttgccagattctgtgaagattgcaat

SEQ ID NO: 1148 - DNA, 315 bp, Glycine max
  Clone ID: LIB3028-041-Q1-B1-G10
ctctcattctctagcttactgtgaatttctgttgcaataaatttcgctacagaaagataccctaagagagcttccacaatggtaagcgcagcaactgctcatagcttcgtcagcgtaagatgcactatgaacgccattggcttattcgtttcaccagcgcgaacattctatggaatcgtcacatagaaatcagtgtaagagttcaagacatatccttaaagatcaacggtgttgaaatgtgcatgttgggtattccatggaaagccttttgtgcacgcacagagtattttaattgtcattatcaacagcgttggg

SEQ ID NO: 1149 - DNA, 388 bp, Glycine max
  unsure at all n locations
  Clone ID: LIB3028-041-Q1-B1-E2
tttggttccaagttttccatgttttgccaatatttacatgtctctcatggagaagccgcatgttgattttggactaaaactgcttggagctgatgcaatgtctatttctggcctttataggattgtccaggaaatcattaaagaccaagtcgcaaacatgtatctgtggccaaaggccttagaggtgcaaataatggatccaacaaaggccatgaaagttccagttggaatccttcatgtgaaagttgtgagggcagagaagcttaaaaagaaagatctactgggggcgtcagacccttatgtgaaactcaaactcacagaagagaaacttccttcanagaaaacaactgtganatacaagaatttgaatccggaatggaatgaagaa

SEQ ID NO: 1150 - DNA, 363 bp, Glycine max
  Clone ID: LIB3028-041-Q1-B1-C7
ctatgatgagtacatcaccgttgacaagaagaagcccaatcttctcatctacggtgatggcccctcaaagaccatcatcactggccgcaagaactttcacgatggtaccaagacaatgagaaccgccaccttctctactgttgctgaagatttcatggccaagtcaattgcattcgagaacaccgctggtgcagaatgacaccaagcagtggcactccgcgtgcaaggtgatcgttcagtgttctttgattgcgctatgcgtggttaccaagacacattgtatgcccacgctcatcgtcagttctaccgcaactgcgaaatctctggaacaattgacttcatcttcggctactccaccacctt

SEQ ID NO: 1151 - DNA, 398 bp, Glycine max
  Clone ID: LIB3028-041-Q1-B1-C8
gtgatttgtatggtcaggaaagtaactattctgaaagagtgatgctgatttatgatggtctccactacgatgcattagtgatgtctccctttgaggaagctcctgaggagtttgatcagaccatatttgctgtacagagaaacagaagcattggacctgttgaggggcttgctctaacttttgtgaaggaccagcagaggaaacggagttacactgacacatccaacttcactctccgctgtggggtatgccaaattggagtaattggtgagaaggaggcagtggagcatgcacaagcaactggtcatgttaacttccaagagtacagataatgcactccgttgatttgaatgggatacaaattcatgtgtaatctccgttgatttgaatgagcatca

SEQ ID NO: 1152 - DNA, 355 bp, Glycine max
  unsure at all n locations
  Clone ID: LIB3028-041-Q1-B1-C9
ttcatggctccccaaaccatttccattcactaccacaccacccgcttcttacctcaacccgatgtcttcattcgcacttcccacggaacacgcattccagcccacgccggcattctggcttccatgtcccctgtttttgacaactttatagatcgcccacgtaagcatcggagctccgagagaattatccaaatccacggcgtcncctgcgacgccgtcaccgccttcgtcggattcctctactcctccaggtgcacggaggaggagatggacaagtacgggatgcaccttcttgcattgtcgcacgtgtacatggtgccgcagctgaagcagaggtgcatcaaggggtttgacc

SEQ ID NO: 1153 - DNA, 396 bp, Glycine max
  Clone ID: LIB3028-041-Q1-B1-D1
gactggggttgtgaagcctggtatggtggtgacttttggtcccactgggctgacaactgaggttaagtctgttgagatgcaccatgaggctctcacagaggctcttccaggtgacaatgttggatttaatgtgaagaatgttgcagtcaaggatctcaagcgtggttttgttgcatccaactccaaggacgaccctgccaaggaagctgccaacttcacatcccaagtcattatcatgaaccatcctggccagattggtaatggatacgcaccagtccttgactgccacacttctcacattgctgtgaagttttctgaaatcttgaccaagattgacaggcgatctggtaaggagcttgagaaggagcccaaatttttgaagaatggtgatgctgg

SEQ ID NO: 1154 - DNA, 395 bp, Glycine max
  Clone ID: LIB3028-041-Q1-B1-D2
atcagtacaacaactcactcactaagctaaacaatttcatcaagcctgccatggcttcctcgtgtgcttcctctgccattgcagctgttgccatctccacaccaagttcccagaagaatggatcactcttgggaagcacaaaagcttcttttcttagtgggaggaaactgaaggtgaacagttttacagcaccagttggagcacgatccagcactacagtgtgtgcagttgctgagcctgataggcctctgtggttcccaggcagcacccctcctccatggctagatggcagtttgccaggagattttggctttgatcccctaggtcttggatctgatcctgagagcctgagatggaatgtccaagcagagcttgtgcactgcagatgggccatg

SEQ ID NO: 1155 - DNA, 194 bp, Glycine max
  Clone ID: LIB3028-041-Q1-B1-D3
atttaacttctgttaaactttgcaaaaaaaaataaattattaaaagaagaatatagtagctatggaattgcactgctgctaaatattcacctgcacaagacaaaccagctgaattttttgtgttcatgtaatatctttatgcgtatttatcattttgtgacgatatcaattgaggaaattcagttgttgctatt

SEQ ID NO: 1156 - DNA, 354 bp, Glycine max
  Clone ID: LIB3028-041-Q1-B1-D4
ctcgagccgagaagacaggcaaagggctttgttgcagttgcagtggaaagtgatgagtgacaagcctaaagaggaccaagaagtgaattcaaaacaggttgacttgtgtttgaatctatttgtctgtgtctgtcttcaaatggatgccatatttgctcattttcatgttgggttacctttggtagtttggtttgacatattacatttatcatttggtaggcacagttggggaaatgagaagacatttgttgtatacctaaatgtgcttctttaatattctttcaacacaagcctgagaattgtgaacttaaatacatagaagggtgatgcaaataaaggcccactggttcacat

SEQ ID NO: 1157 - DNA, 368 bp, Glycine max
  Clone ID: LIB3028-041-Q1-B1-D7
ggcgaagacacgttcttctctcaagtgctgaaaaaaaggaaatagcagaaagttatatggataacaaatcaccgagcaataaggcatctgaggagctggcacgtgagttgcttattgctatctctgattctttaccagataaaactctggattccgattttgtgcccgaaagcaaggacgcagacagctttgcaagaccaaacggtgattgggatgacaagtttaggtctgaattgatttcaatctcctatgttgaatctcccgatgtcaaaatctgatatattacgagtctagactgttagtaacttatgctacccttctggtttgttatgtggatgaatttccgctgtgccaattgttgtgaattg

SEQ ID NO: 1158 - DNA, 337 bp, Glycine max
  Clone ID: LIB3028-041-Q1-B1-D9
ctcaggcaaaagggcaccgagttccctggaacaggagagtatgacaagttctttgatgagggagtttacaactgtgctggttgtgggacacctctctacaggtccttaacaaaattcaattctggttgtggctggccagccttctatgaggggattcctggagccataaatcgcaatccggaccctgatgggatgaggacagaaataacgtgtgctgcttgtgggggacatctatgtcacgtctttaaaggagaaggatttccaacgcccactaacgaacgccattgtgtcaatagcatttcactgaaatttgcgccagccaattcctaataaaaat

SEQ ID NO: 1159 - DNA, 371 bp, Glycine max
  unsure at all n locations
  Clone ID: LIB3028-041-Q1-B1-E10
tgaattctccagagagaagaagaaacttaatcgatcatcacttcacttcactaatacatcatggcagacgagacccagaacaagtatgagagctctgaggttgaggtccaggatcgtggtgtttttgactttctcggtaagaaaaaggatgaagaagacaagcctcatcctcaggaggaggtcatcgccaccgagtttcaaaaagtcactgtctcagaccaaggagagaacaagcacagcctcttagaaaagcttcaccgatctgacagcagctctagctcttcangtgaggangaaggagaagatggagagaanaggaagaagaagaagaaagaaaagaaagggctgaaagagaagatcgaggagaaaat

SEQ ID NO: 1160 - DNA, 379 bp, Glycine max
  unsure at all n locations
  Clone ID: LIB3028-041-Q1-B1-E11
ctcattacattttaactgttcanaatattattagggacgagtatgtgggtaaaccagctactatggaagttttgtatgcttaaaaatgttggacctgtttttgcanggtttgaatgtctatagcattttaccgcttgacacaagtgatggtccccgagatgctatgaacataattgtttggcacaatgcttttgaggctgaaactatttttggtgttccctttcatttacaccaactaggataatgttttgtatgtcatgtcgatttcggtttaagggattggtttctcatggtttttaatgataacatcttggccctgaatctggtcttaacagttctttcaaaaacattggatctgaatatctgataagctagcatg

SEQ ID NO: 1161 - DNA, 398 bp, Glycine max
  Clone ID: LIB3028-041-Q1-B1-C6
atcattttccaaacgaacatcatcgtaatttcctaagtcaagacaagaactgaagtgctgcttcaatggcttcaagtcaggaaaaggtgatacttttgggggttattggaatcccatttctgcacatggtgcagattgctctcaaattgaagggagttgaatacaaatatttggaagatgatttgaacaacaacagtgatttgctcctcaagtataacccagtttataaaatgattccagtgtttgttcacaatgaaaagcccatatccgagtcccttgtgattgttgagtacatcgatgacacatggaaaaacaagcccatcttgccttctgatccttaccatacaaccttggctcgtttctgggccaagttcattgatgacaagtgcgtggctcta

SEQ ID NO: 1162 - DNA, 376 bp, Glycine max
  Clone ID: LIB3028-041-Q1-B1-B11
aaatgagtgatttggagtttggagcgactgaactaatcattaatttgcactcgctgtttcagcttcatcaaccttcttttgcatcatttatatctcttgagaaatggcacaagaaacctttctattcacatctgaatctgtaaacgagggtcaccccgacaagctgtgcgaccagatctctgatgcagtacttgatgcgtgacttgaacaggaccctgacagcaacgttgcctgtgagacatgcaccaagaccaacatggtcatggtcttcggagagatcacaatcaaggccaacgtagactatgagaagattgtccgcgacacatgccgcgaaattggattcatctctgatgatgttggtcctgatgctgacaaa

SEQ ID NO: 1163 - DNA, 341 bp, Glycine max
  Clone ID: LIB3028-041-Q1-B1-B2
gtttgttgttgtaactcgttcttcttcttttgttgttctgtgtttgtgtttgttttttctctcacctgaaaatgtcttgctgcggtggtaactgtggttgccgaagctcctgcaattgcggcaacggttgcggaggctgcaaaatgtacccaaacttgagctacactgattcaaccaccaccgaaaccttggccatggaattggcacctgttagggctcaatttgagggtgctgaaatgggtgtgcccgctgagaacgatggctgcaaatgtggaccaaagtgctcctgcaacccgtgcatttgcatgtgatgtgttgagagagcaagcttcacgcagata

SEQ ID NO: 1164 - DNA, 401 bp, Glycine max
  unsure at all n locations
  Clone ID: LIB3028-041-Q1-B1-B3
attccattctctctgtgtatttccctacctctcccttcaagatgcagatcttcgtcaagaccctcaccggcaagaccatcacccttgaggtggaaagctctgacaccatcgacaacgtcaaggccaagatccaggacaaggaaggaatccccccggaccagcaacgtctcattttcgccggaaagcaacttgaggacggccgtacccttgctgactacaacattcagaaggagagtactcttcacctcgtcctccgtctccgtggtggcatgcagatcttcgttaagacactcaccggcaagaccataaccctagaggttgaaagctccgacaccatcgataacgtcaaggccaagatccaggacaagganggtatccccccggaccagcaacgtctcatc

SEQ ID NO: 1165 - DNA, 359 bp, Glycine max
  Clone ID: LIB3028-041-Q1-B1-B4
aacaacacaaggccatcatcatggcagctgcttctcctatggcaagccaactcaagtccaccttcactaaaactcttgtagctcccaagggcctctctgcctcttcaccactccacctcctgccttctaagaggcaatttagcttcactgttagggccatccaatcagaaaagccaacctatcaagtgattcaaccaatcaacggtgatcccttcattggaagccttgaaaccccagttacatccagccccttgattgcatggtacttatcgaacctccccgcatacaggaccgcagtgagcccactactaagagggatcgaggtgggcctggcccatggctaccttctggtgggccca

SEQ ID NO: 1166 - DNA, 398 bp, Glycine max
  unsure at all n locations
  Clone ID: LIB3028-041-Q1-B1-B5
agcagagcagagatctagcgtattctctcgctctttctttcactgtcacagagccacatccatgggcttcccagccaacggcgcctctgcggcccagcccctaaacttcctcatctacggccgcacgggctggattggcggcctcctcggctccctctgccgggcccagggcatctccttccattacggctcgggccgcctcgagaaccgggcctccctcgaaaccgacatagccctcctcaagccctcccacgtcttcaacgccgccggcgtcacgggccgccccaacgtcgactggtgcgagtcncacaaagtcgagaacatccgaaccaacgtcgtcggaaccctcactctcgccgacgtctgccgcgaacacggcctcattctcatcaactacg

SEQ ID NO: 1167 - DNA, 399 bp, Glycine max
  Clone ID: LIB3028-041-Q1-B1-B6
caacacctgtcactgtgagcccaccaactactccagttgaccctggaacccctagtatcccctcaccaccactcattccttccccatctcccttcactggcacatgcaactattggaggaatcatccagcaatcatctggggaatccttggctggtggggaaccctaggaagtgcatttggtgtgacaggtactactgttccagggttcagtcctggccttagcttgccacaagcactttccaacacaagaactgatgggctaggagcactctacagagaaggcacagcttccttcctcaactccatggtgaacaacaagttcccttacacaaccaaccaagtcagggacaggtttgtggcctcactcaactccaacaaggcagcagaagcacaagccc

SEQ ID NO: 1168 - DNA, 375 bp, Glycine max
  Clone ID: LIB3028-041-Q1-B1-B7
gtggtacacaatatggttccatcatataccctgtcaagaggactatcctgtcatgcctactgtatcatcaagttttgatttgaagcctgctaatttctttgagagaaatccaatccttggagtccctcccaatttcgaagatgatttacctgtttgcaaggctcgtgattcagcttgagatcccatcagttggtttttagtctaattagatacatgctttatttatgcatgtagcaaatgatgatgcccaaactgaactttaaacctaacttaaagtaaagagggtctagttctgttgattaaacagaatgtataaatattgtaaaaccttttgataccatgtttaattcctatgtataagaaaaaatatgatgt

SEQ ID NO: 1169 - DNA, 397 bp, Glycine max
  Clone ID: LIB3028-041-Q1-B1-B8
tggaaagctctgacaccatcaacaacgtcaatgccaagatgcatgacatggaatgaatccccccggaccagcaacgtctcattttcgccggaaagcaacttgaggacggtcgtacccttgctgactataacattcacaaggagagtacacttcacctcgtcgtccgtctccgtggtggcatgcacatcatcgggaagacactcaccggcaagaccataaccctagaggttgaaagctccgacaccatcgataacgtcaaggccaagatccacgacaaggagggtatccccccggaccatcaacgtctcatcttcgccggaaagcagctcgacgactgccgcaccctcgccgactacaacatccagaaggaatcaacccttcacctcgtcatccgtct

SEQ ID NO: 1170 - DNA, 366 bp, Glycine max
  unsure at all n locations
  Clone ID: LIB3028-041-Q1-B1-B9
aaattctctttagagagatagagagaggaagaaagaatggcagcttgcactgtctactcaacacaatctctgagcacaaattgctccatctcaaccccatcaaagacgcaactcagttttttccaccaaaagcaggtagttttctggaggaacagcaagaagggcagctgcagcagcagaagaagctatgtgataacatgtgcagcaggtgactcacagacagtggtgattggcctggctgcagactcanggtgtgggaagagcaccttcatgaggaggctgaccagtgtgtttggacgagcagcagagccaccaaagggtggcaaccctgactccaacactctcatcagtgacaccaccactgtc

SEQ ID NO: 1171 - DNA, 357 bp, Glycine max
  Clone ID: LIB3028-041-Q1-B1-C10
ctcagttccagattgggtactgccaacagtgccctgataaggttcaatggccctctcactttggtaccaaacctcctctatatttcaatgctggcatgtttgtttatgagcctaatctcaacacctaccgtcatcttctccaaactgtccatgtcatcaagcccacgtcctttgctgagcaggactttctgaacatgtacttcaaggacaagtacaagccaataccgaacgtgtacaaccttgtgctggccatgttgtggcgtcaccctgagaatgttgaacttgatcaagttcaagtggttcattactgtgctgctgggtctaagccttggaggttcactgggaatgaagagaaca

SEQ ID NO: 1172 - DNA, 382 bp, Glycine max
  Clone ID: LIB3028-041-Q1-B1-C2
cacaatttttttgcttatagaggagccttaaacacaagttttctgaggctaaggtacataaccagaatgaagtcactgattgtagtaacttttctttatttcctaaatttttgcatgtagtcctgctacctaccttctcacgagtttagagaatggatttaactgaagctcaaaatttttgttagctttgaacagatgatgtctcaccatttgcattaaattcccttcagagttgtggggttctaggggacttaactgcggattttgttgttcattattgttgtacttttctttatggacagaatattgttgtactgttgttcatatgtgtattttttctttaattctataaattctggggcttttgtacccttgttggatt

SEQ ID NO: 1173 - DNA, 388 bp, Glycine max
  Clone ID: LIB3028-041-Q1-B1-C4
cttattctcttcctctctctctactctgagacacaaaggaaaattataagaaattatggctggttattcaaaagcttcagctctttggatcctttttcttctctttggcttctctgtagctaaggaaattttggttggaggtaagactgatgcatggaaggtttcagcctctgaatcagattcactcaaccaatgggcagaaaagtctcgtttccaagttggagactatcttgtttggaaatatgatggtggaaaagactcagtgttgcaagtgagcaaagagaactatgtgaattgcagcatctcaaaccccataaaggagtacaatgatgataccacaaaggttcagcttgagcatccagggccattctacttcatcagtggtgca

SEQ ID NO: 1174 - DNA, 368 bp, Glycine max
  Clone ID: LIB3028-041-Q1-B1-C5
ctctttaccagttgccacactacaccgagattccccctaaacccgtttgcgttgttgtttgcgaagaaatggcgactaagaggagcgtgggaacgttgaaggagggtgatttgaaagggaagagggtgttcgtgagggtcgatctgaacgtgcctttggatgacaaccttaacatcaccgatgacactagagtccgtgctgctgttcccaccatcaagtacttaactggtcatggagccaaagtgatcctttctagccacttgggacgtcctaaaggtgtaacacctaaatacagtttgaagcctcttgtgccaaggctgtctcaacttctcggaattgaggttacgatggcaaatgactctattggg

SEQ ID NO: 1175 - DNA, 404 bp, Glycine max
  unsure at all n locations
  Clone ID: LIB3028-041-Q1-B1-B1
gtgagtgctgaatcgaatcgaatcgattctccgaacatggcggcgagcgatcgcacagtgttgcaattctcttcatcatcttcttcttcttcgcagatcttgtccgcgaaggtccaccctctggtcatcttcaacatctgcgattgctatgttcgacgccctgaccaagccgaccgcgtcatcggaaccctactcggctccgtccttcccgacggaaccgtcgatatccgaaattcctatgctgttcctcacaacgagtctatcgaacaggttgcattggatatagagtaccaccacaatatgttaatatcccaccanaaagtgaatccanaggaaatcatagtaggatggtattcaaccggtcttggagtaactggtggtagtgcattaatccacgagtttta

SEQ ID NO: 1176 - DNA, 357 bp, Glycine max
  Clone ID: LIB3028-040-Q1-B1-H12
gtggggttggttgcctctgccaagtttgatgaactcttccagcccagttgggctatggaccatttcatccatgaaggagaacttctcaaactcaaacttgataactattctggtgctggatttggatctaagagcaaatatatgtttgggaaagtgaccatccagctcaagcttgtggagggtgactctgctggaactgtcactgctttctatatgtcatcagacggcccaactcacaacgaatttgatttcgagtttttgggcaacaccactggtgaaccttactcagtccaaaccaacgtgtatgtgaatggcgttggcaacagggagcaaagactcaacctctggttcgacccc

SEQ ID NO: 1177 - DNA, 374 bp, Glycine max
  Clone ID: LIB3028-040-Q1-B1-H2
aagaattatttgattttatagcatctaaactagcaaaattcgttagttctgagcctgaagagttacaccctccccctggcatgcaaagggaattgggttttaccatctcaattccagtgaggcaaacatcaattgcatctgggaatacaataaagtggactaaaggtttcaatattgaggatgcggttggagaagatgtggtgggtgaactgaccacgtccttagaacaaattggtctggatatgcatgttgcagctctagttaatgacacagttggaacagtggctacagcaagattcaccagtcaagatgtcattgctggagtgactcctggcactgggacaaatgcagcttatgtagagtgtgcacatgca

SEQ ID NO: 1178 - DNA, 365 bp, Glycine max
  Clone ID: LIB3028-040-Q1-B1-H3
cgaggatataaacacacttaccgagcctcattcaatcttgtgtccggatgttgcgtgtttatctgtttagaattttggttgttttgctaactggagacatatgatttgtatccctagagtcaaggaaataatcttcaagccaggttgtagatttatagaatcagtttttgccggggtcttaccaactctggcagcaaactttgctcgggcatgcaatagctttatatgacagtttaagctgtgaggtgagtagatttcttagcaaggtatcaaagcctgtttgaactataactagtggtcaagttttcaactcttccactgcattcttcatacttgaatgaaagttgagtatttaactttgtcct

SEQ ID NO: 1179 - DNA, 234 bp, Glycine max
  Clone ID: LIB3028-040-Q1-B1-H5
aatcaattaatcaagccaattctctttcatgaatcctaggagttcataatatcaagagaagatagaaagaaattaaacaaactcctttgtatatattttggtggtggtggtgtctcctttagttttgttttgggacattagcaatgtgtagagagaaggaataaaattttgggggatttgttttgacaatgatcacaaatgtaatcatatactattatgttaatttcccttttt

SEQ ID NO: 1180 - DNA, 288 bp, Glycine max
  Clone ID: LIB3028-040-Q1-B1-H7
cattctcctctctgaattcctcttattcaggaatttggagagtattgatatatcaaggtaggataaaccagtagccaaggaagatatggagttttctatgattttcaattgttagcaacattatgcggcttttcatttaagcatttgcaaaaactgctattcttccctctctgagccaaattcaagaacaagccccggaacaagacttcgtgaacctcactgatttacccattgttgctggccggtttaaaactttccttggtaaccttgattcaactaaattgattg

SEQ ID NO: 1181 - DNA, 392 bp, Glycine max
  Clone ID: LIB3028-040-Q1-B1-H8
tgacattcgggttgttcctacgacgcaaggtgtcgttgataagggcgttgttgtacatggtggcacagtgtgccggtgctatctgtggtactggattggccaaggggttccaaaaagcatactacaacatgtaaggacgtggtgccaactctgttgctgatggctacaacaatggtactgctttgggtgctgagattattggtaccttcgttcttgtctacactgtcttctctgccactgaccctaagaggaacgctagggattcccatgttcctgtactggcgccacttcctattggatttgccgtgttcatggttcacttggctacaatcccaattactggtactggcattaacccagcaaggagtttcggagcagctgtaatctacaac

SEQ ID NO: 1182 - DNA, 324 bp, Glycine max
  Clone ID: LIB3028-040-Q1-B1-H9
gaaaaacaaaaaacacagaacaacacagaaactcaataccaaggtaaaattattatggatcacattcataggttacgttgttttgggacaatacccaaaattccttttctattgctactttccctgcttctcttcagtttcgttaatccatccttcgacctcgctactatacccttcaaagacggctattctccgctcttctgacctagaaacgttgttcgcgccgatgatggctacggtgtacacctccgcctcgatcgctacacaggttcgggtttcatttcctccactatgtaccaatatggattcttcaacgccagaatc

SEQ ID NO: 1183 - DNA, 317 bp, Glycine max
  unsure at all n locations
  Clone ID: LIB3028-041-Q1-B1-A1
aaagcattcttgccatctgggccacccaagttatcttgatgggtgccgttgagggttaccgtattgctggtgggcctcttggtgaggtgactgacccaatctatccaggtggcagctttgacccattgggccttgctgatgacccagaggcttttgctgagttgaaggtgaaagagctcaagaatggtaggttggccatgttctccatgtttggtttctttgttcangcaattgtgacaggaaagggacccttggaaaaccttgctgattaccttgctgacccagtcaacaacaatgcttgggcttatgccacaaac

SEQ ID NO: 1184 - DNA, 371 bp, Glycine max
  Clone ID: LIB3028-041-Q1-B1-A10
ctcgagccgattcggctcgagagcgagtgtgttcgaggccatcgaagaggaagatcatgtgattgagaaggaacaagccctacctcctgcattgcttggtagctgcaacgatcgagctaaacagcttcacgcttctcctccagggagacttctttcggcgatgatatgtgaataccttgactgggcgcagctcagtcatacgctaaaagtttatcttccggaatgtaatttggagaaagatttttggaagacagagcttaaggagtttagtaccaaaaatggatatgatctcaacagaaacagagatagtcctctactcttggatgtgcttgaaggattcttgaagctcgagaatttatcccaagcaagag

SEQ ID NO: 1185 - DNA, 335 bp, Glycine max
  unsure at all n locations
  Clone ID: LIB3028-041-Q1-B1-A11
caacgtcatcgcacgctcacgtggagctcatcaacaagngattacccgccggtcttctccccgccacaaccgtcttgggctacgccgtgaaccgtacctccggtgactttatcgtcaagctcggcggcacgtgcaagatcacgcgcccgctggacaactacgtcgccacctattccgacaccatcacacggaagatcgtgaacgggaaaatcgctgaactcgatgtgattagggttcgcgcgttcttcaagtggtggtccatcaccggaatccgctcctccggcgatgatatcgtcttcgaggtcggtatggtcacagcgaagtatccatcgaag

SEQ ID NO: 1186 - DNA, 339 bp, Glycine max
  Clone ID: LIB3028-041-Q1-B1-A12
caagcgcacagctagcacctacattgatgatcaaggcaactggcacagaagcaccacgggtgcccctgagcatcttagtgaactttgtgaactcaagggacaggttttgaaacatgcccacaaggtcattgatgagtatgctactcgtggtttacattcattgggtgtttcacgccaaactgtttcaaaggagaataatgagagtgcaagggaatcatggcaattcgaggaacgcttgcgcctccttgatctgccaatgcacgacagtgctgagaccattcggcgagcacatgatcttggagtcaactttaagatgatcactgtatgaccaccttgcca

SEQ ID NO: 1187 - DNA, 82 bp, Glycine max
  Clone ID: LIB3028-041-Q1-B1-A2
tcttgccattgatgatgtgccatctgagccttcaaaacccactacttgtattgaaaaatccgaaattgttgatcctcctgtg

SEQ ID NO: 1188 - DNA, 364 bp, Glycine max
  Clone ID: LIB3028-041-Q1-B1-A4
gttcacaaaccaccattaccatgtccaccacccacgtcatctccaactccaccccatgtacaccctccctatgtcccaaaaccgcctgttgtgccagttacaccaccttatatccctaaaccaccaattgtgacaccaccatatgtccctaaaccaccagtggtgccagttacaccacgatatgtccctaaaccacgactggtgccagttacaccaccttatgtgccaaaaccatccattgtgacaccaccatctgtttacccatcagttgtgccaaaaccaccaattgttacaccaccttatgtgccaacaccatccattgtgaaaccaccaattgtttatccaccagttgtgccataaccac

SEQ ID NO: 1189 - DNA, 385 bp, Glycine max
  unsure at all n locations
  Clone ID: LIB3028-041-Q1-B1-A5
cattaattgcaagaatggcacttcgttgcttggtgatgtccctttctgttctcttcactcttggtcttgcgagagaaagccatgccagagacgaagatttttggcatgctgtttggccaaacactcccattccaagttcattgcgagatcttctaaagcctggccctgcaagtgttgaaatcgatgatcaccctatgcaaattgaagaaacacagtacccgaaaaccttcttctataaagaagaccttcatccaggcaaaacaatgaaagtacaattcagcaagcctccctttcaacaaccatggggtgttggtacatggttaaaggaaattaaagacactactanagaaggatatagttttgaagagctatgcatcaagaaaga

SEQ ID NO: 1190 - DNA, 312 bp, Glycine max
  Clone ID: LIB3028-041-Q1-B1-A6
tattggcgcgagcaaagaaagattacaacgttagagatccttacatctcgcagagtggagcaactacagcatgttcgtgtctccgaagttcaaagttcgatcaaagagctcttcaatgtttggtcaagcaacaagaataatgagtctggctatgcgttgctggagctgaagcaatggttttctcaattgacatacaacatggttcttcgaatggtcgtcggaaagcgacttttcggtgctagaactatggatgatgagaaggctcagagatgtgtggaggctgtgaaggagttcatgcgtctgatgggggtg

SEQ ID NO: 1191 - DNA, 320 bp, Glycine max
  Clone ID: LIB3028-041-Q1-B1-A7
gaccattccaaccctaatttctctgctaaatcctagatgtttggcacttccactcttctccctcgtaaatcttctcccattccctccggtagctttccatatccaaatacatcatggttttctgggtttttggctacggttcattggtgtagaagtctgtattcgattacgactagaagactattggattcatcaacgactacagacgcgtgtttgatttagcgtgcattgatcatccgagaacgactgataacccaacgggaacttgcacattggaggagataaaaggggctatttgctggagagctgcgtaatgtgtt

SEQ ID NO: 1192 - DNA, 339 bp, Glycine max
  Clone ID: LIB3028-041-Q1-B1-A8
cgcaattcccaaattcatttcaatcctaattctgcacttcttgataattcgacttttctcctcaagatgcagacactcgtacaaactttgaccggcaagactatcacccttgaggtggaatccgccgacacgattgacaacgtaaaagctaagattcaggacaaggaagggatcccacctgacaagcagagacttatctttgcgggtaaacaacttgaggatggtcgcactcttcccgtgcaaaatctcaaaagggactcagctctatatcgtgtgttgcgacacaggggggacatgcatctctgtgtcaacattgtgagcgggaagaccatcaccctt

SEQ ID NO: 1193 - DNA, 346 bp, Glycine max
  Clone ID: LIB3028-040-Q1-B1-H11
aatgtttcaacactggtcaaatcatcattaatgttgcttgagattatagaccttggtatcacataataattacatacactaatctttctccaatttcctgactattttggctgggaaatcatatacatgatgttgaatggttatggtgataggattagagatatgcatttggaaatgtaaattttgagatattgatttatctgatccatgtacattctacggattacgtcatgtcctgtatcttcatgtgcgacttggtgtaacatagtcatgatatgatactttagaaattattagcttttttttcgtcatcacagtttaatttttacgactttacttgaaattt

SEQ ID NO: 1194 - DNA, 355 bp, Glycine max
  Clone ID: LIB3028-040-Q1-B1-F6
atctcatctgtgaaagaagctgaaaaacacatgccagatgaatgcattgaacctgatgcagattttcatcccaacctggtgaatactgtttcctatatggtgagcatgatgcttcaggtggccacatttgctgtgaactatatgggtcatcccttcaaccagagtatttctgaaaacaggccgttccggtatgcacttgttgctgctgttgttttctttactgtgatcacatcagatctattcagggacttgaatgactggttgaagttagtgccattgcctgtgggattaagggataaactattactttgggcgtttccaatgtttttggtttgctattcgtgggagagactgt

SEQ ID NO: 1195 - DNA, 366 bp, Glycine max
  Clone ID: LIB3028-040-Q1-B1-F7
caagaacaagaacaacaaagtaacgtgaaagagagagagatggaggcgattgttccagtggtggatttccagaggctttcagaggaagaggagcgcaagaagctgagaaaaacatgtgagaaaccagggtgtttcagaatcatcaaccactcaattccactaacactcatggctgacatgaagtcagtggttaaatacttgcatgaccttcccacggaaatcaaaatgcgcaacaaaccctccgtccctgagagtggctatagggcggcaatgccaacaagtcctctatacgagggcatgggaatatatgacatgcatgcctcaccacaagcatttgaagatttctgctccaacttgaatgtgtca

SEQ ID NO: 1196 - DNA, 372 bp, Glycine max
  Clone ID: LIB3028-040-Q1-B1-F8
ctgaaatgcttgttaatttgggaattccttgggttattattggtcactctgaacggaggcagcttttgaatgaatcaaatgagtttgtgggagataaagttgcctatgcacttcaacaaggtctgaaagttatagcatgcattggggaaactcttgaacagcgtgaagctggtacaacaacggctgttgttgctgagcaaacaaaagcaattgcagctaaaatatcaaattgggacaatgtcgttttggcctatgagccagtttgggccattggaacaggaaaggttgcaactcctgctcaggctcaagaggttcatgctgatttaaggaaatgggttcatgacaatgtgagtgctgaagttgctgcatctg

SEQ ID NO: 1197 - DNA, 407 bp, Glycine max
  unsure at all n locations
  Clone ID: LIB3028-040-Q1-B1-F9
aggaacccttacttaaccccggaattcggtccaagcacacagacacacacatttcgtcggaatgggaagggtgattcgcgcacagcgtaagggtgcggggtcngtgttcaagtcccacacccaccaccgcaagggtccggcgaggttccgcagcctcgacttcggcgagcgcaacggctacctcaaaggggtcgtcaccgatatcatccacgaccctggtcgcggtgctcctctagccaaggtggcgttccgccaccccttccgctacaagaagcagatggagctcttcgtcgccgccgagggcctctacaccggccagttcatctactgcggcaagaaggccaccctcgtcgtcggcaacgtcttgcccctccgatccatccccgaaggtgccgttatctgcaacg

SEQ ID NO: 1198 - DNA, 400 bp, Glycine max
  Clone ID: LIB3028-040-Q1-B1-G1
cgaacgtggttgatgatctaaggttgagtcatcccaccaaagtatcaagattcacttctgctgcggataaaaaaaaaaaagggattcacttcctagttttcagccctttaaatacctctttgcaatacaaggaactcatcaacccaagttagcataacttccttaacaacctagtatttcagaccattcttcttgatcagaatccttattaatcatcaatcatgcagacttcacttcttcaaattgttggaactccagtaatctcagcaacatatgatcagcttcaaaagtcagttaacagatacttacctggtcctgccactcaatgtcaatattcaaccacaacatcaaagcaaatgaggctgaggacaaatatatctgaaactgttaagagaaagat

SEQ ID NO: 1199 - DNA, 364 bp, Glycine max
  unsure at all n locations
  Clone ID: LIB3028-040-Q1-B1-G10
ggatcttgcagtggggtctcagatcctgtggctgcaatcaaaatgcattattccaattctgacaagtatggtggtcagactgggagtattgcaagagaggatgaatcatggggagggaaaggggattgactgagacaggtagtagattgtgctgagcggcaaacacctctttttgccgcactcctgtattatagtttctgttatttgctcaatacagtgtagggtgatttaatggttctcaagcccgtctttttggtaaaatatttaggtgcttgtaatatggcagcagctttgtatttgttgtatttgatgaaaatacagaaataatctctgaaaaaattangaggggcgattgccattgcca

SEQ ID NO: 1200 - DNA, 395 bp, Glycine max
  Clone ID: LIB3028-040-Q1-B1-G11
gttcctcaacacacacacaaaaaaaactcccttgtatattgttgcagctctagctagggttttgcaagtgcgatcgaagaagaacaacgacgatggcgatggctgcagctctgcgtcgcgaaggaaggcgtttgacccaaccaatcaacgccctccactcttctctcaattcctccctcatctctcaagaccaagcccctcatggcgcgcgctccatttccactcaagttgtgaggaaccgaatgaagagtgtgaggaatatccagaagatcaccaaggccatgaagatggttgccgcgtccaagctgcgggccgttcagaccagaactgaaaattcccgcggcctctggcaaccgttcaccgctcttctcggtgacgattccagtgttgacgtt

SEQ ID NO: 1201 - DNA, 283 bp, Glycine max
  Clone ID: LIB3028-040-Q1-B1-G12
gcagattaagttcatccttatatgcatgggaagctttgaaggcatgaatttggttgcagtgatggcaactataagaatgattgtgcaaactcatcacatttatattctctgctgatatgaatgatagcatcatcttatctttaatttattatagcttctgcattgcatatgtcagctaatgtaaaatagaattatgcgtgtcaatttactttcgattgttgtcagacattcaacatgaaaattatagtttgctgaactggttatgatttcatcaaggtttttg

SEQ ID NO: 1202 - DNA, 370 bp, Glycine max
  Clone ID: LIB3028-040-Q1-B1-G2
gcatgtcatccaggacatgcttgttcctttgtacaaggtgggagaggctttagaatgggttcaccgtgagatggaggtataccccatttggctctgcccacacaaattgttcaagctgcctgtcaaaactatgatttacccagagccagggttcgaactacatcgcaggcaaggagacacccaaactgctcaaatgtacacagatgttggagtttactatgcaccaggtcctgtttttaggggtgaggtatttgatggggcagaagcagtgcgtaaaatggagaactggttgattgaaaatcatggttttcagccacagtatgctgtgtctgagctgtctgaaaaaaactttcggaggatgtttgatgct

SEQ ID NO: 1203 - DNA, 349 bp, Glycine max
  Clone ID: LIB3028-040-Q1-B1-G3
aataattcctgtaatgtgcaccagtaaagaccaaagtatgattattgttacattatgctatatgattgtacttgtatatacatattttgtcccgcctttgtaaatacaattgggacactactaggattgggaagaagggtctttacatttttagtttggcaaatagatattgcaactacctttgtataaatctatttctgaagaagcaattacaactttcaagggatgatagcattttgtggcataaggattaaggaggcataaaggaccaattgctttggaatattcactcatgacaaggcacaaggtcatgcgtgtatgccaacacatagtaatgatgtgtgttttt

SEQ ID NO: 1204 - DNA, 400 bp, Glycine max
  Clone ID: LIB3028-040-Q1-B1-G4
cgcacgaatatcttgttgtttggagcgatccgagaaaaactctgtaaacatgttggtttaccaggacctccttacaggtgatgagcttctctctgactccttccgttacaaggaaattgagaatggaatgctgtgggaagttgaggggaagtgggttgttaaaggagcagttgatgtagacattggtgcaaacccttctgctgagggtggaggagaagatgagggagttgatgatgcagctgttaaggttgttgacattgttgacacattcagacttcaggagcaacccgcattcgataagaagcagtttgttaccttcatgaagaggtttatcaagaatttgactcccaagctcgatgcagagcaacaggagttgtttaagaagcacatcgagggagca

SEQ ID NO: 1205 - DNA, 370 bp, Glycine max
  Clone ID: LIB3028-040-Q1-B1-G5
ggccaattcggccactctcctctgagaaagcctccagcctctcctccaaagtcccctgcggttcgttcggttattcttcgaaccgttgtctgaagtttacaactcaaaacttcaccgaacgcatttcattcaccaattcgtccaagtctcgtatcaatcaatcagcctatccgtcttgcggttggagagatcggaggggagagcagccatggcgcatcgagtagaccacgagtatgactatctgttcaagatcgttttgatcggagactcaggtgtaggcaaatccaacatcctctccaggttcactcgaaacgagttctgtttggagtccaaatccactatcggagttgagttcgcaacagaactcttc

SEQ ID NO: 1206 - DNA, 391 bp, Glycine max
  Clone ID: LIB3028-040-Q1-B1-G6
aaaagaaagaaagaaagaaagtgcaacttcctctgttttgctcccctgtttaagccttatcataagcttagaatggcacacaaggaattttccattgccctagtgactctcattgttctctttgtcaacacgaacctccaaggtgccacggctgactatggtggtggttggcagagtgctcatgccactttctatggtgggggtgatgcttctggcacaatgggtggagcatgtgggtatggaaatttgtatagccagggatatggaactgacactgtggctctaagcactgctttgttcaacaatggcttaagctgtggatcttgctatgaaatgagatgtgatgatgacccaagatggtgcaaacctggctctattaccgtcactgcta

SEQ ID NO: 1207 - DNA, 396 bp, Glycine max
  Clone ID: LIB3028-040-Q1-B1-G9
cggctcgagcggctcgagggaaaccaagaagtgtgtccctgctatgcaagtttgactactcatggtggcaaacgcaagtgcccttagacttaattggaccactatcctatgcatgcctttgatttatattataaaataaaaataatactatatataacatgttaattgcttaatatgtgctttaagagtaaagaataacatcgtgaaatcaaattacccctttttcaatacgtgttgaatcatcgatcttggtttgtaatttggttgtatattcacaaaattaataagtatattgtgatgtgattaattcccttctctgttatggtgtacttgccttccctgtattgtccatctccatcgtctgtctattaataagaattcttatgtgatattttc

SEQ ID NO: 1208 - DNA, 327 bp, Glycine max
  Clone ID: LIB3028-040-Q1-B1-H1
aaggaccacaccatgttgcagcgagttatctgagaaatacacatctatgatgttcttgttagttgatgtggatgatctaactgtaagtactgaatctacagattactactatttcacatagttatttttgtatcaactagtattccccttcaatacaaacataaaacaattcaaatgtcaaacatattcaattcaacatgaactagaggacactatcacatattaaacattgtctgatgaccatgtagtttattgaacatgggtggtttcattgcatatgttccaggacttcagcacttcatgggacatcaaagccacaccaacttt

SEQ ID NO: 1209 - DNA, 373 bp, Glycine max
  Clone ID: LIB3028-040-Q1-B1-F5
gttttcccgttgggcatttctcccacatggtactggaaatgcaacgatcaaatcctttgtcagttcttcagtttacttgtaggtttctggaaaactggagcttgaacacgctctcattgagctcttcaccaatgcaacacttcaaaggaatccaagagtccaagactatgagaaatgaagtttaatattgtcacaacaaattttcattcagactcgatccatttattggattcatttaccctgcgatataagcacacccatatttacaaccccatttcacagtaatggtggtttgatatattattttaacagcattctgttatgatcaagcacaaagttcctagaattcgaggtctaaggcctccagagcaac

SEQ ID NO: 1210 - DNA, 397 bp, Glycine max
  Clone ID: LIB3028-040-Q1-B1-D6
cgacaaattgggccgcatcgccgactggactcgcaacttcaacaacccgacccgctccaagaacccggcggacgccgtctttgacttcacgaacgacgactccttccccgcatccgccgacgacgacgcccccttccgcctcgtcgaccccaagcccccgccgcgccccaaatttggtcccaagtggcgcttccagcagccgcgccagctccctcagcgccgcgacgaagaagtcgaggcgaagaagcgcgagcaggagaaggaacgcgcccgccgagatcgtctctaccacatgaaccgctcaaaccctaatcagcagcgccgtgaagccgctgttttcaaatcctccgtcgatatccaacccgaatggaacatgcacgaccaagatcccttcagc

SEQ ID NO: 1211 - DNA, 395 bp, Glycine max
  Clone ID: LIB3028-040-Q1-B1-D7
cttttctctcccgttatatatatagtatttgcttatatatatatatactactcattaggaactgtgattgcagttcctaatgcagattttaacgcggcgccaaggagcatttttgtgcttctggttgtctgtgctttttgtggtagtagacttttgctatggtgaccatagtacagtcgaggtagtagggttgggagaatgcgcagattgcaaggagaaaaacattcaaactagccaggctttctcaggtttacgtgtgacagtagactgcaaggcagcaagtggaaactttgaaaggagaggggtcggtgagcttgatgaatatggaaacttcaaagtttcccttcctcatgacactgtaaaagacgataaactgatagaagaatgctatgctc

SEQ ID NO: 1212 - DNA, 403 bp, Glycine max
  unsure at all n locations
  Clone ID: LIB3028-040-Q1-B1-E1
attttcctttgtaatggaaagttagaaaccctcatcgtcaaagcacgcgttttttttaatctctctctctcaacaaatatttgtgggtagattcaattcaccatgtcgagctcatcggagtactctgaattttccggccagaaaccggcgaggtcgccggagaaatcgagcttctctcagacttgcagtctgttgagtcaatacatcaaggagaagggtagcttcggagatcttaccctcggaatgacatcatgtgggtcacctgagacatcttgtcaatctgctacaaccatgaacttgtttcctcccaaggaaaacaacgtggcaccaaagaacctgacagctatggatttgctctcntcacaagcttcctcctatggaccttcagaggagattccaacct

SEQ ID NO: 1213 - DNA, 358 bp, Glycine max
  Clone ID: LIB3028-040-Q1-B1-E11
cgtggcttatgatagggtgcgggaagaaataattagagtgctgggacccagggttaagaaggggtacgtgtacggtggagtggcggacatgtgtttcgatgggaatgcaatggagatcggacggctgttaagggacgtggccttcgagttcgagaaaggcgtggagatcgtggttccgaaggagagggtgctcgctgacgtgggcggtggggtccactgcgtgggaatcgggaggtccgagagattgggtgcggccagcaacatcataggcaacttccaccaacagaatctatgggtggagtttgatctcgcgaatcgaagaatcggattcggtgtggccgattgtagcagattaagt

SEQ ID NO: 1214 - DNA, 300 bp, Glycine max
  Clone ID: LIB3028-040-Q1-B1-E12
cgcgtgttacaatatggtgcgcggatacaccattatcgtgctgggactcagggataccaacgggtacttgtacggagcactggccaacatctgtttcgctgggactgcaatggagatccgctcgcagtctcccggtacgtcgtgcatcatagtctcgaggaagatgcgcgagatcatcgtaggttccaaacggatagggtgctcactgacataggcggtacagtccactgaatcagaatcagtaggtcccaaacaatgggtaccgtgaccaccatcatctgaagctttcagtagcagcag

SEQ ID NO: 1215 - DNA, 89 bp, Glycine max
  Clone ID: LIB3028-040-Q1-B1-E2
agtgaatagaaggaatatgattccttcatctacctatgtatggttaagttatgtatttggggtgattgaatgttctcgtgtttgctgtt

SEQ ID NO: 1216 - DNA, 343 bp, Glycine max
  Clone ID: LIB3028-040-Q1-B1-E4
caaatatccaatttttacaaaattggatcgttttacgaataattgggttctcaaatatccatttttttgtgccagctctagtttatcactagcttttaaggaaggattctccaagtatctaggtgtttatcaattggtatttgtgtttattgttgtatctaaaaaattatatattttaaataattttgtgacgctaaaaaaaaaaaaaaaaaaaaataaaaaaaaaaaaaaaaaaaaaaaaaaaagaaaaaaaaaaaaacaaaggaaaaatcacaagaaaaaattaaaaaccgaaaaaaaataaaggggcgggccccaaaaaggggccctctcaacccgggaa

SEQ ID NO: 1217 - DNA, 388 bp, Glycine max
  Clone ID: LIB3028-040-Q1-B1-E5
tagctatttcgcatcccaaagcttttgaagattccagaacaaaagcacatatagtgtctgaaagagtttttattattagctttgcggttctgcttttcaaggttcgtcctttctgcatcaatgctcgaatttctcgccgcaatttgcgtgctgtagtttctgcttgagtctgctttagaatcacgaggtttatttggagaggaaaatattggtggagatttgaagaggagcatttacaactctggccaactctatagagatatcttcccaaaccggaagaggcttaggtctttatatttccggttttcagatttgttcagaaagtatcttgtctcttgttctgcgccttcctattgattatggctaacatttgattcaatgtgatagc

SEQ ID NO: 1218 - DNA, 371 bp, Glycine max
  Clone ID: LIB3028-040-Q1-B1-E6
aatttccgtgttgaagtgcgattagaacttagaagcatcaattcaagctccaatcttcgacactgtcacttaatacattgaaagcagagtatgccgagtaggaatagtgccaaaactccaaagaaggatggaaacaactcaaattccagtctttcttctctagaaaataatttctatgaaggagaacgtctcaccaatttgctccaatcaatccgtagggggatccaatctgcaagacatttggatggaagttccttgccagagaagatatggttaaagcaacaattttctattggggtcaatgatgtaactcgtgtccttgagcgcatgaaaccttgcacggagttagaaagctctactgaactcatctc

SEQ ID NO: 1219 - DNA, 357 bp, Glycine max
  Clone ID: LIB3028-040-Q1-B1-E7
gttcaagacgctctcaacaaccaccacttctcttccaaagaagataataagaacccaccaccacaaactgctgctcacaaggaagaagttgtaactgaaactaaaactgatgctgccccagcaaaaaccgaagaggagcaagctgaaacaaaggaggaagaggaaaagaaggaggaagtgaaagaaacgaatgaagaagctgcggtggatgatgatggagcaaaaactgtggaggccattgaagagaccgttgttgctgtctcttctaccgttcagcctcaagctgaagagaaagcttcatcgccacttccacctgaagaggtttccatttgggggataccgctgcttgcagatgag

SEQ ID NO: 1220 - DNA, 375 bp, Glycine max
  Clone ID: LIB3028-040-Q1-B1-E9
agggccttaaacagttctggagtctcagataggaaccaaagggttcattgtcctcaaacgaaccccttcttgggtgaggcatcccaagattcggggttcagaaaggaaagggataagtttctgttggctcaaggtggtcagcctaagaacttgggcggtggtttttcagggttgtgtgaagacgaggtggaggttgacccctttttctgtgctgtacaatggggtgatattaacttgaggcaatggttgtataaacctgaacgataggtgggtgccttcgaatgcttgcacatatttaggcaaatagtacacattgtcagtgtaccgcattctcaaagagttgtaattcacaatgtgaggccttcctgctttgtc

SEQ ID NO: 1221 - DNA, 307 bp, Glycine max
  unsure at all n locations
  Clone ID: LIB3028-040-Q1-B1-F1
aaaggtgttccgccagaaatttcatcttcaatggtttcacagacatttgaagtccctgatatgagcttcaattcaattgattctacaatagatggtagtggcttcttgaataggggtccatgggatctgccaccaccacctccaccacaacaacaacaggttcaacggattagaacatacaccaaggtatataaacgtggagctgtgggaaggtccatagacataacacgatattcaggttacgaggaccttaaacaggatctggctcttaggtttggtattganggacagctggaggatctacaaa

SEQ ID NO: 1222 - DNA, 289 bp, Glycine max
  Clone ID: LIB3028-040-Q1-B1-F10
gtcacacctcccagatatacgccatcaggcagagcatagccaaggctctcgtcgcttactaccagaagtacgtcgacgagcagtccaagaaggagatcaaggacatcctcgtcaggtacgaccgcaccctcctcgtcgccgatccccgccgctgcgagcccaagaagttcggtggtcgcggtgctcgcgccaggtttcagaattccaaccgttgatttccccctttttttttaagctatccaccataatttgttaaagtacttccccggtttaatgggtccggccctga

SEQ ID NO: 1223 - DNA, 393 bp, Glycine max
  Clone ID: LIB3028-040-Q1-B1-F11
cagaaagcaagctcatcctagagttttaaaaatggcagcagcctcctccatggctctctcttccccatccttggctggcaaggccgtgaagctgggcccatcagcccccgaagtcgggagggtcagcatgaggaagaccgtcaccaagcaggcctcctccggaagcccatggtacggcccagaccgcgtcaagtacttgggcccattctctggcgagcccccgtcctacctcactggcgagttcccaggtgactacggctgggacactgctgggctttcggccgacccagaaaccttcgccagaaaccgtgagctcgaagtgatccactccaggtgggccatgctcggggccttgggctgcgtcttccccgaactgttgtcccgcaaccgggt

SEQ ID NO: 1224 - DNA, 432 bp, Glycine max
  Clone ID: LIB3028-040-Q1-B1-F12
aggaagccttagttaaccccggaatccggtccaaattcaaatgggaaaacaaaatggcaataacccgacaagggaaaaatttggaaccaacggtacaaatggaaagaaacgaaaactaattcttcatgggcttacaggttatgcccagccagggagacttttggctataattggtccttctggcagtggcaaatccacacttcttgatgctttagcaggaagattgacatcaaacataaagcaaacagggaagattctaatcaatggccacaaacaagaactggcttatggaacatcaggctatgtaacacaagatgatgctatgctgtcatgtttaaccgctggggaaactttatactactcagctatgctccaatttccaaacaccatgtctgtagaagagaagaaagaacgagcagatatgacactgag

SEQ ID NO: 1225 - DNA, 390 bp, Glycine max
  Clone ID: LIB3028-040-Q1-B1-D5
gttttgttctcattctgtgactctgtgcttagttaacgttaacagtgacttaagatggcggattctgcagatgtcacccacgatgttgtgtccctcctctcttctcctcaaagggactttcttcttcgaaacaacggcgatcaggttaaaattgacagcttgaagggtaagaaacttggtttgtatttttcggcatcctggtgtggtccatgtcaaacatttacgccaactttggtggatgtgtacaatgaggttgcaaaaaaaggtgacttccagatcgttttcattacggctgatgaagatgatgagtcctttaacggttacttttccaagatgccatggcttgcaatcccattttctgattcagacacacgcagccgccttgattaa

SEQ ID NO: 1226 - DNA, 387 bp, Glycine max
  Clone ID: LIB3028-040-Q1-B1-F3
gtataatcctgctgtacctgtgcctccaaatgcttggatggttccacctcgacctcagccatggttttcacagcctccagctgtttcagttcctcctgctgccccatacacacagcagccattatttcctgtgcagaacgtgaggcctccactgccagctactgctcctgcgctccaaactcagattactcctcctggattgcctacatctgcacctgtcccagtttcacaacctttatttcctgttgttggaaataaccatacaactactcaaagttcaacattttctgctccacctctgccctcaagtgttccatcagttacttcagtgatgtctgcaaatgttcctgttgatacacatttgagcagcaattcttctgtaacaag

SEQ ID NO: 1227 - DNA, 402 bp, Glycine max
  unsure at all n locations
  Clone ID: LIB3028-040-Q1-B1-F4
tctgaatcagagaatagataataatggctacaccggaccacctgttcaacctccgcaacaacttgtatctcggggcgtaccaagccgccatcaacagcggcgacgtcaccaacctctcccaagaagactccctcgagcgcgacaccctcgtccaccgctgctacatcgccctcggccagcttcagttcgtcatctccgagatccatgacgacgctcccacacctctccaagccgtcaaactcctcgctctctatttctcctcccccgacaccaaggattccgccatcgcgagtctcaaggagtggcttgccgatccgccatttcanacaacgccacgctgaggctcgtcgccggtctcgtcttcctccatgaaaatgatttcaacgaagccctcaaacacac

SEQ ID NO: 1228 - DNA, 305 bp, Glycine max
  Clone ID: LIB3028-040-Q1-B1-B9
tataataattgcttataaggttgtatttgggggctgaaaaggagtgttatcattttttgtcttttgggtactgccacaagtgtgataagatggtgaattactctgcttccgtacattttgtgcatagttcacttgatttgttgcgtgagatgtttagtcttcaaagcaaatgtatgtctgctagtagaatctccgtttattggagcattgattttttgaaccacgtgtacaagtttttgtgattatatgtaaacacgggatttggtgtgtaatactctaccatcaaatttcaaacattattttgt

SEQ ID NO: 1229 - DNA, 215 bp, Glycine max
  Clone ID: LIB3028-040-Q1-B1-C1
gtacgttaactcgagatctcgattcggggccatcaaatccttcatgttcagggagatagcatcaacacataaacttcccgttcaagactttgtggtgcgcaatgacatgtcatgtggttcaagcattggtcgtattcttgctagtggagtaggtattcgcaatgttgatgtaggtgcagcgcagttgtcactggatagcataccagaaatttgtg

SEQ ID NO: 1230 - DNA, 374 bp, Glycine max
  Clone ID: LIB3028-040-Q1-B1-C11
ctcgagccgaatcggctcgagcttggctttgcatctgagcttggaaactatgctgaatacagcggtgcacccaaagaagaggaggtcttgcagtatgccagagttgtaattgattgtgcaactgcaaaccctgatggccagaagagagctcttgtgataggaggaggcatagccaactttactgatgttgctgccacatttagtggtataattcgggcattgaaggagaaggagtcgaaattgaaagcagcaaggatgcacatctttgtgaggagagggggtcccaactaccagaagggtctagctttgatgcgagcacttggagaggagattggcatccccattgaggtttatggacccgaagccacaatgac

SEQ ID NO: 1231 - DNA, 357 bp, Glycine max
  Clone ID: LIB3028-040-Q1-B1-C2
cagaatctgagaaccagaccctctcaaaccggaaccgcaaatgaagcccaagagcattcgcatccgtaacttaccaacgcacctgctgctaatcgctgtttgtctgttcacctcttcgtccgcttccaagatcggagaaaattgtgggtcagacaacaaatgcgacgctggactcagctgccaaacatgtcctgccaatggaaatacccgaccaagatgttcgcggacacaacctttgagccccacctccaaggtgaaaggcttagcgtttaaccggtattcatgggtgacgactcataactcttatgctctggcggaggcgagatctgtcaccgggtctgtcaatgtggcccctat

SEQ ID NO: 1232 - DNA, 400 bp, Glycine max
  Clone ID: LIB3028-040-Q1-B1-C3
atgacactcctcctgctccttattctcctctttcacgcggcggaagccaagggacagtggcagctcctccacaaaaacatcggcattgtcgccatgcacatgcagcttctccacaacgaccgcgtcatcatcttcgaccgcaccgacttcggactctccaacctaaccctccccgacggaagatgccgcaacaacccaaacgagttggtcgtcaaacgcgactgcaccgcgcactccatcgaatacgacgtcgcagccaacacattccgcgctctctttgtccaaaccaatgtctggtgctcctccggttcggtctctcccgacggaacattagtccaaaccggtggcttcaacgacggctaccgtgcggtcagaaacttcaacccgtgccgctcgtgcg

SEQ ID NO: 1233 - DNA, 383 bp, Glycine max
  Clone ID: LIB3028-040-Q1-B1-C5
cacatccttcatattcagggagatagcatcaaaacataaacttcccgttcaggactttgtggtgcgcaatgacatgtcatgtggttcaaccattggtcctattcttgctagtggcgtaggtattcgcactgttgatgtaggtgcaccgcagttgtcaatgcatagcatacgagaaatttgtgctgttgatgatgtgaagtattcatatgagcacttcaaggcattttaccaagaattctctcatgttgatggtaagatggtcgtggatatataggaatatctctaatcacgaaatcctcattaatcctttgctctagaagctgttgctgaaatggtcgtgtttcgtaatttagtaccattataatgccgacgttattatgatg

SEQ ID NO: 1234 - DNA, 398 bp, Glycine max
  Clone ID: LIB3028-040-Q1-B1-C6
gttctgcactcacagtagttaatgcctcattgtgtgtttcattattattccctaaccaactctcttgaccctgacttcttcacttgtgctttttttttttagatcaacaaattaaagtattaaactttgagcatcagattttggttcttgtaattataatgatggggggtgggaagtttagtagtttttttgttgtttttgtgttgttggtggggtcagggagtgggattggtgtgaattgggggacacagtcaacacaccctttgtcaccgtcgaaggtggtgaagatgctgaaggacaatggcattcagaaggtgaagctttttgatgctgatgctggtatcttggatgctctcaagaagtcggaatacaggttatggttgggattccaaatgaca

SEQ ID NO: 1235 - DNA, 393 bp, Glycine max
  Clone ID: LIB3028-040-Q1-B1-C7
cagaaactcaatcaaaataaaaatttattatggatcataggttacgttgttttgtgacaatacccaaaattccttttctattgctactttctctgattctcgtcttcagttacgttaacgcagccttcgacctcgctactatacccttcaacgatggctattctccgctcttcggagatagcaacgttgttcgctccgaggatggcaacggcgtacaactccgcctcgatcgctacacaggttcgggtttcatttcctccagtatgtaccagtatggattcttcagcgcgagaatcaagttgccatcgaattatactgctggtatttgcgtggccttttatacatcaaacggtgatgtgttcgagaagtcccatgacgagttggactttgaat

SEQ ID NO: 1236 - DNA, 394 bp, Glycine max
  Clone ID: LIB3028-040-Q1-B1-C8
gccaaaagaacaacatggacattgatctttctcctcagttgcccaagaaagtttacggtgccaatggtggctcctactacgcatggtccccctccgaccttcccatgctccaccaaggcaacattggtgccgctaagcttgctctcaacaaaaacgcctttgctcttcctcgttactctgactcttccaaagtcgcttatgttcttcaaggtagtggagtggctggaatagtgttgcctgaatcagaagagaaggttgttgcaataaagaagggtgatgccttggcactcccctttggtgttgtgacctggtggtataacaaggaagaaactgagttggttgttctgttccttggggacacttccaaggctcacaaggctggtgaattcactga

SEQ ID NO: 1237 - DNA, 373 bp, Glycine max
  Clone ID: LIB3028-040-Q1-B1-C9
ctcgagccgaatcggctcgagtctcatggcatcttcttctggtagtttagacacctctgcaagtgcaaactccttcaccaacttcaccttctccacacaccctttcatgaccacttctttctctgacctccttgcttctcccttggacaacaacaagccaccacagggtggtttgtctgagagaactggctctggtgttcccaaattcaagtccacaccaccaccttctctgcctctctctccccctcccatttctccttcttcttactttgctattcctcctggtttgagccctgctgagcttcttgactcgccggttctccttaattcttccaacattctgccatctccaacaactggagcatttgttgct

SEQ ID NO: 1238 - DNA, 319 bp, Glycine max
  Clone ID: LIB3028-040-Q1-B1-D1
cggatcaacagcgtttaatcttcgccggaaaacagctcgaagacggcagaaccctcgccgactacaacatccaaaaggagtccacgctccacctcgtcctccgcctccgcggcggcatgcaaatcttcgtcaaaacccttactggcaaaacaatcacgctagaggtggagtcctccgacacaatcgataacgtgaaagccaagattcaagataaggaagggattcctccggatcaacaacgtttgatcttcgccggaaaacaactcgaagacgggagaaccctcgccgattacaatatccagaaagaatcgactctgca

SEQ ID NO: 1239 - DNA, 309 bp, Glycine max
  Clone ID: LIB3028-040-Q1-B1-D10
cgtagcgtatgatcaggtccagtaacgtacaaatcacatacggttccacacagtcataaaggcgttgatgttaggggacatcattttgatctattaccaattgatggcggtggaaatctgtctcctgtaaaaggacttagccttcaaatggttcaattgcgtcttgctagtcgttctcaatcatatgcagtcctaaaaccatcacagtgagctatacggaggactgatcccgttgtcttacagcaatgcgtacagccactccacatttagagtttactttcaccaacgagttaccaatcgatgtggtat

SEQ ID NO: 1240 - DNA, 338 bp, Glycine max
  unsure at all n locations
  Clone ID: LIB3028-040-Q1-B1-D11
gtttaggatgtatacattcaaagtgaagccttgttcgagggcgtattctcatgattggacagagtgcccctttgttcatccaggggaaaatgcaaggcggcgtgatccaaggaagtatcattacagctgcgtcccttgtcccgagtttaggaagggatcttgcagcaagggcgatgcctgtgagtatgcacatggcatttttgagtgctggcttcaccctgcccagtaccggactcggctttgcaaggatganggtggatgcacaaggagggtatgcttctttgctcacaagcttgaggagcttcgccccttgtatgcttctactggttctgctattc

SEQ ID NO: 1241 - DNA, 301 bp, Glycine max
  Clone ID: LIB3028-040-Q1-B1-D12
aaagattttccttcacctggacttggctcaagatattgagttgggtttgcttgatcatttctattatctcacttgtgggttccatccaaggcctttcggttagtatcaagaaatacaagcccttccaagcagaacaatagaactttcatacttagtattccaacttgagccaagagtttctattgagggcgacaaaatttgtattactatgttttgaaatagttgttatattttcaattctcgaaatcgagacaacttgttatactaaagtaatataataaaatgtttagtttgctatgtt

SEQ ID NO: 1242 - DNA, 399 bp, Glycine max
  Clone ID: LIB3028-040-Q1-B1-B8
gtagcacttcttcttctggcggaggtggggcccatggctgaggctgtgacatgcaccccaacagagttgagtccgtgtcttccagcaatcacttccggtgctaaaccttccaatgcttgttgcacgaagctgaagcagcaaaaaccatgcttatgtggctacctcaaaaacgctagcttgaagcagtatgttaactctcctaatgcccgaaaaaccgttgcttcttgtgggattccctttccaacttgttaattaattaagccttcttataattaaagtgtgggatatatatatatatatagataaacagtttaatttaaacacactttgattctacaaagcatcctggcacaagcattcaatacgatttcaacactttaacgcaacattttaacatga

SEQ ID NO: 1243 - DNA, 251 bp, Glycine max
  Clone ID: LIB3028-040-Q1-B1-D2
taaggcactagtattatgaatctatcagtgaggtcatgtgaaagctatggttaggatcaataagggtagttctaagttggtctttaaaatgttacagctgctttctgtttctttctcattttattattcctggcttgaaattctatacttttaattcctcattaggcatatggttgcctccttgtttaatttctctgtctcttcataggatgattgatatcaaagttgatggatggctattacctatagtc

SEQ ID NO: 1244 - DNA, 393 bp, Glycine max
  Clone ID: LIB3028-040-Q1-B1-D3
tggtaagatggtggtggttagagtagtagtatagtggagtagaagcatagggaagccaaatcagagatgctctgggcatatattgacgtctataatataatgagccaagaattcgtcaagttcaactttgtcaaaagaacaagtggtaacccacttaatctctgattttgttaatttatagagaaaaaaaaaattcatataatacataattatagatcgcattcccatgagttgcttccatttgaaggacagtgatatttttgtacagaattgttttacgggcacttgtattattgctgagcatgatacagtaatactctgctctttattgtcaagtttcaatgattgtttttattgaattgggaaatgaccttttggtaaagtggagaattt

SEQ ID NO: 1245 - DNA, 365 bp, Glycine max
  Clone ID: LIB3028-040-Q1-B1-A11
cttacattttttcttcaaaccccatgaagggttcttcaattttgtagtttgtgtcattgtggtggccgggttaaacttcatttaataattatttggagtccaaaccttggcagctggcatcaataccggccagcaacaacgatgatgactagacaatagtatggcgaactgtcagcaatattattttcctttgctttctctggcaatttttattcccaccctgattgccaattccttatagaaagatgagtattggcagagccatgtctatgagtttgatacttattggcaggaaagggcaaaagccgctaaagtggacagtcaggcagcttattttgaagacccatattcagtctccagcaact

SEQ ID NO: 1246 - DNA, 310 bp, Glycine max
  Clone ID: LIB3028-040-Q1-B1-A2
ccgagaacgtggttgtgacaggatcattgagctcggcaagaatggaagaacacaggttgagcttgagaatgagcacgcttgtcttcactctttccattatcatcatcgtactctcttacccagcacaaccacttgcgttgaaccattcgccgaaattcctaggaaaattcgcagcaacagcacgagcccattcaaattcggagccaccgcggcaattccactacgaaaaaggatacttccaacagcgcctcgacaacttcagcttctcggagctacccacgtttcctcaacgctaccttatcagcaccga

SEQ ID NO: 1247 - DNA, 345 bp, Glycine max
  Clone ID: LIB3028-040-Q1-B1-A5
ctaattctcatttcttcatcgttcgattcttctcctcctaaagatgcagatcttcgtgaaaactttgaccggtaagaccatcacccttgaggtggagtcctccgacaccatcgataacgtgaaagctaagattcaagacaaggaagggatcccacctgaccagcagagacttatctttgcgggtaaacagcttgaggatggtcgaacccttgccgactacaacatccaaaaggaatccactctccacctcgtgcttcgcctcaggggtggcatgcaaatctttgtcaagactttgactggcaagaccaatcacctcgaggtcgaatcctcggacaccattgataa

SEQ ID NO: 1248 - DNA, 398 bp, Glycine max
  Clone ID: LIB3028-040-Q1-B1-A7
cgtgttcgttctttagtctttacccaaaaaggcaatgagagggacacagatactgttcgttggtttgctttggttcttctgcgtttatgcaccttcttcgttttgcgcaaatgtcacgtatgaccacagagcattggtcatcgatggcaagcgccgtgtcttggtctctggttctattcattaccctcgtagcactccagagatgtggccagacctcattcagaaatccaaagatggaggacttgatgtgattgagacttatgttttctggaacttacatgagccagttcaaggccagtataattttgaaggaagggcagatttggttaaatttgtgaacgcagtagcagcagcaggtctatatgtgcatctccggattggtccatacgcatgtgctg

SEQ ID NO: 1249 - DNA, 396 bp, Glycine max
  Clone ID: LIB3028-040-Q1-B1-A8
ggggggaagtggtcaagggtgcacctttggttgagccaggagatgaattgttctggttcaatcgaccccgcctcatcctctttttgattcatcttgttctctttcagaatgcatttcaactagcgttttttgcttggagcacatatgacaatgggttcaaaataaactcttgtttccacaaaactactgcagatattgtcattagacttacaatgggggttctcacacaagttctatgcagttatgtgactttgcctctttaggctctagtcacccagatgggttctaccatgaaacctactattttcaatgaaaatgttgcagtagccctgaagaactggcatcacactgctaaaaagcacatcaaacacaacaaggattctacttccaatacac

SEQ ID NO: 1250 - DNA, 349 bp, Glycine max
  Clone ID: LIB3028-040-Q1-B1-A9
tggttatgcagggtaaatccagtgattttgctaagcatgctcttccttccacacgcaaacaacgcatactggttaccttcacaaagtcccaaccaagaaagtcactatcaagtgatgctcaacagcttgcctcggcagtagcatcttctcattggggtccaccgccaagccgatctcccaatcatgttcgtcatcacgtaggccccaagcattacgctacacttccaacaactggggtactgccagctccacccattcgaccacaaatggcagctcccgttggcatgcaaccattgtttgttgctgctccagttgtacctcccatgccattttctgcacctgtgccaat

SEQ ID NO: 1251 - DNA, 291 bp, Glycine max
  Clone ID: LIB3028-040-Q1-B1-B1
aaaaaattgtagctgatgcatcggttgctttgtctcgagcagtttgcattgctacaagatatagtgctgttagaagacagtttggatcacataatggaggtctagaaacacaggtgattgattacaaaacacagcaggctaggctcttcccattgctggcttctgcttatgctttcagatttgtgggcgagtggctgaaatggctttatatggatgtgacgaaaagattgcaagctaatgatttttcaacattacctgaggctcatgcatgcactgctgggttgaaatcct

SEQ ID NO: 1252 - DNA, 389 bp, Glycine max
  Clone ID: LIB3028-040-Q1-B1-B10
aggaacccttacttaaccccggaattcggtccaaaattttccggtttccctctctctctctctctcatggcgaatctagcacacttctccaagagagccctaagaagcgcacacgcgctcgcaaggcaccacgtgcagccgcagctgctggcagcggaacgcgcttttgcgacggaggcggcgaaatcgatatccccgtcggcggatcgcgtgaagtgggactaccgagggcagaggaagataatcccgttagggcagtggctccccaaagtggccgtggatgcttacgtagcacccaacgtggtcctcgccggccaagtcaccgtctgggacggagcctccgtctggcccggttgcgtcctccgcggcgatctcaacaagatcagcgt

SEQ ID NO: 1253 - DNA, 355 bp, Glycine max
  Clone ID: LIB3028-040-Q1-B1-B11
gacgatttaaccgatcctgcgcctgctacgacatttgcacatttagatgctactactgtactatcaagaggattagcggccaaaggtatctatccagcagtagatcctttagattcaacctcaactatgctccaacctcgaatcgttggtgaagaacattatgagactgcgcaaagagttaaacaaactttacaacgttacaaagaacttcaagacattatagctatccttggcttggacgaattatccgaagaagatcgcttaaccgtagcaagagcacgaaaaattgagcgtttcttatcacaaccttttttcgtagcagaagtttttaccggttcgccggggaaatatgtta

SEQ ID NO: 1254 - DNA, 358 bp, Glycine max
  Clone ID: LIB3028-040-Q1-B1-B2
gtgcttgggactgaacttgaggccaccaaatcggggacgttcactgggtttgttaagaagcctggtgtgcttgttggggagcataagaaagtggctctggtgaaggagtttcagggtaatttacctgacttgggtctaggtgatagtaaaagtgattatgacttcatgtcaatttgcaaggaagggtacatggtgccaagaactaagtgtgaaccactaccaagaaacaagcttttaagtccaattatttttcatgagggtaggtttgctcaaaggccaactcctctagctgccctcttgaccttcctatggctgccaattggcatcatactctccatcttaagggtctaccttaaca

SEQ ID NO: 1255 - DNA, 374 bp, Glycine max
  Clone ID: LIB3028-040-Q1-B1-B4
ctattgctgagttggatacactgggagaggagtcatacaaggatagcactctgatcatgcaactccttcgtgataacctcaccctttggacctctgacatgcaggatgatggagcagatgaaattaaagaagcagcaccgaaacaggatgaccagtaaaaatattttactgctaattagaattgaacttctcctccatatctttttgaagggagaaggtgtttgttgctaatatctctttggtactgagattttaggcattcatgtttgttatgattgtggatgtactgggccgtttttagtttgtccttccattttcaagtgttttccaaattgcctattttattaaggacgctgaagtttttactacatgga

SEQ ID NO: 1256 - DNA, 313 bp, Glycine max
  Clone ID: LIB3028-040-Q1-B1-B5
aaggaactcaagaacggtcgcttggctatgttctccatgtttggtttctttgttcaggctattgtcactggcaagggccctattcagaacctttacgaccacgttgctgatcctgttgccaacaatgcttgggcttatgccactaactttgtccctggacaatgaggatgcctacatgcaatgcaatcttctgctcccttttgcagttcccttgtgtttaactccattttcactaatgtaactacacctgtgtagcagaaatatctgtatgagaaccattatatttttatatattagaaatttgggtccccag

SEQ ID NO: 1257 - DNA, 390 bp, Glycine max
  Clone ID: LIB3028-040-Q1-B1-B6
gttgggcttgacacaatacactgtcatccacaatcatcttctgaggtcaacttcacaagactaactttccggcaagtgcatttgttggaaaagattgactctgtgggtctccgtcgctaccctgcaagatctcacaattgcactaagcattgatgtcgacgatttcacgatgattaacatccctttacagcgagctttcacagtaagtatgtcagtgagtacgtagattgtcaatctaacgttcatgctggaatagacatatgtacataatcatagtaggtcgaaagggtacaagaattgagaggattagctcgtcttgcgcaagactcacgaagatagcaactacaagcttgctttggatggacttcccccaaaggtgccaattccccc

SEQ ID NO: 1258 - DNA, 344 bp, Glycine max
  Clone ID: LIB3028-040-Q1-B1-B7
agaacatagcttttaaatcgcagtacgcggcaataacagcataatatcaagccacaagctgtgatttaaaactttaacatttcgtgttgttgaggttaaagttggtaatcaccatggctacggcgagggccctttttctcttaggggctgctctcctctcttgcaccttgataggtgcatcttcgcgtggcgttgagaatcgccgtagcctcctccttccagttccaaataatggtcctgcaatttttgatgtgacgaaattcggtgctgtggcagatgaccagactgacaatattgatgcatttaaggctgcatggggagaagcatgcaaaaacagtactact

SEQ ID NO: 1259 - DNA, 336 bp, Glycine max
  Clone ID: LIB3028-040-Q1-B1-A1
atctattcctgcacctctctacacacaaatacacaaatgttggacatatttaatgagagcgtgagagcgtgagaggtgagacaaaggattgccaacctgaatgtgaataattttgcatgaaatgggttggtttaccaagttgcttaagggctctgatcataaaattttacgaggacaataccatggcaaatatggagaggacagaatttgggataatcatcatagttcaatggatgatttgactgatattgagaaagaagacattgaccgtgcaattgcactttctctgtcagaggaggatcataaagggaaaaaagttgttgatgaagaactttg

SEQ ID NO: 1260 - DNA, 290 bp, Glycine max
  Clone ID: LIB3028-039-Q1-B2-F7
gaactttcgaccatggctactgccgaacattttaaggaaagacacattgcatgggatacaactgcaagatatgttgcatctgctgtgacttcagttcatgatctggtgaatggattcaatatatggtctttcaatggcaagcatctatatcggattctgaatgatcacttctatcagttcttacgggaaccatagccaccatctttcttgactcaggataaagaggaagatattgcaaagaacttgaagaaatacagcaagaaatacgaagcagaagataaagatgtttc

SEQ ID NO: 1261 - DNA, 483 bp, Glycine max
  Clone ID: LIB3028-039-Q1-B2-F8
aatttctcttgccaaggagccaaaagcagaacgtttgtttcacatgtaacgcacatgctacggtggtcaagtgtgtaaacttgtgtatggtatacaaatttttttaaccctcagattactcttttggtacatcatactatcttgaacttctcacacaatatccttcctctatacaaaggaaaacgttcatgaacccatttagagaccttggattgcgggaaagccttcgtcggactcggaaagaactaccctctccctttcgtccacaatctcaattctccgtcgcggaaaccaccgttaccgccatcaccggcgtcaacaccaccgaccttgaccgcgccatcatcggatttatgccaccatcgccgcctcattcctccgccaatatcttcttcgcctcccactcctgctccggcgtggcgccgacgccgtcgtgtctactgctcttctgtgacttgaacattgaccagaacgacctcgccg

SEQ ID NO: 1262 - DNA, 105 bp, Glycine max
  Clone ID: LIB3028-039-Q1-B2-G11
aacagagtcatgcctatgattcatactttgatgatggtatggctttctgctatgacatattcaacactcccaatcaatcggggggactgtcatagttccgagttt

SEQ ID NO: 1263 - DNA, 265 bp, Glycine max
  Clone ID: LIB3028-039-Q1-B2-G5
cactataatcaatttgcaccctcttcatcgatctcgtttattctcatcatacttctgctaaggcgtctggatactctggtctcagggattccacaaccacaagcatctactcctcttccgacaacatacactgcccatacgactactactacaactacgattctatgttctacccgtagtcatatcgatacggattttcacataacatagatggtcggttcagtaacgtctcctactattgcttacaagcaactcgaacattctc

SEQ ID NO: 1264 - DNA, 399 bp, Glycine max
  Clone ID: LIB3028-039-Q1-B2-G6
ctctcgatatattcttctctctcttcagcgacatcggttttcgccacaagcatcgggtatggcgtcaggatcctcgggtcgctgaacctccgccaccaaatgctgcgaattcgcttccgataagatacgctgcgcctacaacaaccacgctcagcgctaatccacgtcgaactgcaggcagaacgatccggacttgcacacatgaatgacagaaagaacattcatgtttcatagtatagcttattatccactcgaaaaatcttgaattccagatgtgattgcgactgtggagaagactgtcaaatgatatcctgaaaaccgaaagcagttcctaaacggaatcagttcaaggataagacttctggaaatagagtgttactaacgcgatgggtcaacagg

SEQ ID NO: 1265 - DNA, 481 bp, Glycine max
  Clone ID: LIB3028-039-Q1-B2-G7
gttctcacacactatactcacgacacacctcctgctccttactctcctctttcacgcggcggcatccagggtacactggtagctcctccacagcctcatcgggattgtcgccatgcacatgcaacttctccagaacgaacgagtcatcatcttcgagcgcaccgacttcggactctccaacctaagcctcgccgacggaagatgccgcagcaacccagacgagttggtcgtcaaacgcgactgcatcgtgcactcgatcgaactagacgtcgcaatcattatattccgcgctctcgttgtccaaaccaatgtctggtgctcctccggttcggtctatccggacggaacattaggccaaaccggtgggttcaacgacggctaccgtgcggtcagaaccttcaacccgtgccgctcgagcgactgggtagaagttcagcatggagtcccggggcagagattggtcgccaccaagcacatcttg

SEQ ID NO: 1266 - DNA, 128 bp, Glycine max
  Clone ID: LIB3028-039-Q1-B2-G9
atctcatgatccagaaatgagatatgcaccatggatcatggcacaagacttgatcttgatcaactatattgcaaatcacgggggaagtgtttgaaattctttaaccaatgcttccggtcttaatccac

SEQ ID NO: 1267 - DNA, 323 bp, Glycine max
  Clone ID: LIB3028-039-Q1-B2-H10
ctcgagccgaatcggctcgagcggctcgagcgttcacataccacgtagaaacagttcaatcattcttagccctaagcagagttcacatactcatccacttagtggcagtgttgtctctctgttactaccgcatcacccacttcttcctccaacctccaacagcgccatggcttctcatgactgctgcggagcttcttctctcgctgctctggttcttcaaccaagccttccggtggcgaccggtgtcgcggagcgtcatgactgagaagcttccgactgaggagaagctgccggggcttgacatcttcgtgtggacgctcgat

SEQ ID NO: 1268 - DNA, 157 bp, Glycine max
  Clone ID: LIB3028-039-Q1-B2-H11
cgacacagtcgcaagatggataacgatgagccctacggcgatgcaatgatgataaaggcataacctactgcgtttcatcagggaagggactatttgggtatcaatacgtctggttcatctacctgtcctagaatattggacccttttctcccttgtc

SEQ ID NO: 1269 - DNA, 377 bp, Glycine max
  Clone ID: LIB3028-039-Q1-B2-H2
ccctctttcctatcacactttctagatagctagccaaccagagtaagatctaaagatatttcttatatatcctatggtccgagagtgcccttgttctgcgccaaccctttcttccacatcttgcgtttcaacctcttcctctcttgagtccccttatcatcaaatacccttcttcttcaacctccaccaaattcaacccccacataacaaatctcctcccatcccatttttcagcaccaaagtttgaaacttttctcaattgggttgtatagagtttgactcatcaatttttagttttttatttttattttctctaaccaggtagaagtgcaataattaaatgtccaacatcttcatgttgttgatgtttgagattc

SEQ ID NO: 1270 - DNA, 395 bp, Glycine max
  Clone ID: LIB3028-039-Q1-B2-H3
gtcatattcattatctgaatcaggtccatggagatcatttacagggctaggtgcttctgaaatttgcaaggttgaagaacttgagtatgcagagctaccaggctctggggatagctgttgtaaacttaaacttagatttccagatccttcttcgtgtgtgcatggcaaatcgtttaaattaactctacctgaattgattaacttcactgattttgttattgagaaaacatggtatgatactgccatgaagagaaattggtcttcaagagataaatgcatggtctggtggagaaatgaagatgggaaaggtatcgggtccagtacaagactgatcccaccgagaatcatctgcaaaggccgtgggaactatatggttctgagatgctatgggagca

SEQ ID NO: 1271 - DNA, 401 bp, Glycine max
  Clone ID: LIB3028-039-Q1-B2-H4
ctatttttcaagtaacttaacgtttcaaacctaagaagttggaagtcatggcagcaacattgatggcagcaacaacaagttctggtactcttaaagcaactcctttccttggccaaggcaatggtgccaatgccaatgctcttatggatgttgtctccatgggaactgggaagtacaccatgggcaatgatttgtggtatggaccaaacagagtgaaatacttgggacccttctcagctcagaccccttcatacttgaaaggagaattccctgaggattatggatgggacactgctggcttatctgctgacccagaagcatttgccaagaacagggctcttgaagtgatccatgggcgatgggccatgcttggagcactaggatgcatcaccccagaggtg

SEQ ID NO: 1272 - DNA, 432 bp, Glycine max
  Clone ID: LIB3028-039-Q1-B2-H7
ggaaagggaagccaaagcgaaaccctaaccctaacggagagatggcggagcacttggcatcgatattcgggacggagaaggacagggtgaactgtccgttctacttcaagatcggcgcgtgcaggcacggcgaccggtgctcccggcttcacacgaagcccacaattagcccaacgttggttctgtcgaacatgtaccagaggcccgacatgaacatgaacatcatcaccaaccccgatcagccccagccccaatctctcgaccccgataaggtccaggatcacttcgacgacttctacgaagatctctttgaggagcttatcaagtacggccccagtcagagcttgaatatttgcgacaacctcgccgatcatatggttggaaatgtgtacgttcagtttagggaagaagaccatgcagccaaagccctca

SEQ ID NO: 1273 - DNA, 477 bp, Glycine max
  Clone ID: LIB3028-039-Q1-B2-H8
caaaaacgtcatctgcagcaccaatgttcctgcaattcaaggtatagatgctctcataatcctcacaagtgctgttccacagataaaacctgggtttgatcctaccaaaggacaaagaccagagttctattttgatgatggtgcatatcctgagcaggttgactggattgggcagaaaaatcaaatagatgccgctaaggctgctggagtgaagcacattgtgttagtagggtctatgggtggaacagatcttaaccatcctttgaacagcttgggtaatgggaatataccggtttggaaaaggaaggctgagcaatatctggctgattccggcatcccatatacaattataagggctggtggcttgcaagacaaagatggaggtcttcgggaaccacttgtagggaaagatgattaccttctccaaactgaaaccagaaccagaactagatctgatgtttgcaaaagtctgcattc

SEQ ID NO: 1274 - DNA, 320 bp, Glycine max
  Clone ID: LIB3028-039-Q1-B2-H9
gtgcgcagaataaaatttctcatcgacgatggcgaataccttacaacgcgcccttcgcgccaccatggcccggccgttctccaccggcgcattggccgaaattaagcgaggcgagatcggaatggtttctggaattcctgaagaacaccttcgtaggagggttctaatttactctcctgctagaactgcatctcaacaaggatctggaaaggttggaagatggaagatcaacttcttatcaacccaaaagtgggaaaatccactgatgggctggacatccactggggacccctactctcaggttggtgattcagccttga

SEQ ID NO: 1275 - DNA, 560 bp, Glycine max
  Clone ID: LIB3028-039-Q1-B2-D5
gagatactgtaattcttactcttattcatcgatgtcctgcatgtcgtccaaccattagtttcagggttttctcatcgagaattctaccaatcgtctccgcttcacatccttatcgggtatagttcgcactgaatcaatcacgtgacatatttcagatgatcgcttgtcgagaggtccgtcatctcactcaatggtattcagttcctggaccatgctagagagacagtactgactacgttctacgttaccaatgtaggtaagattgccagttcagttagcggacacgcttagttccaggctaaacccctcaagatcatcagtagcggaggtatttatcgttggccgttgactacactattcatctccagtctcgactaattttgctaagcagttgatttggtgtggtatcacacagtacgacggcatttaataaatgggttcttgatgacgaggcattctcactgacaaagactcttaaaatgtacaaaaaatcgtttgctctcgggatcaggattgtattcttatcagaagaaccactgagtcctagggatgtaacagcc

SEQ ID NO: 1276 - DNA, 457 bp, Glycine max
  Clone ID: LIB3028-039-Q1-B2-D6
caatatagcccaagccctatacaaccaaaccctaacacacacccatttgattcagtttccatggctagcctcaaggttgcatttttggctgcagtgctctgcatggttgtggtgagtgcacccatggcacatgcagctatcacgtgcgggcaggtgacgaatagcctgatcaattgcatcggttacctccagaacggaggaacgccgccgtcgagatgctgcaacggagtgaagagcctcaatgccgccgccaagaccaccgccgaccgccagacggcgtgcaactgcctcaagtcggccgccagccaaatctccggcttcaaagccaacaacgccgcctcgctccccggcaaatgcggagtctccatcccctacaagatcagcacctcgaccagctgcgctaccatcaaggtttgaagaaaaagtcatggtcgcaggaaaccggaaactactcact

SEQ ID NO: 1277 - DNA, 411 bp, Glycine max
  unsure at all n locations
  Clone ID: LIB3028-039-Q1-B2-E1
actttccacttgtctccgaattagttatcttgagaaacattattcccattgctatatattatggctagcatgaaggttacatgggtggttgtgatcatgtgcatggccgtggtgggtgcaccgatgatggcgcaagccatgacatgcaatgatgtgacggtgaacatggcacagtgcctatcctacctgatgcagggaggaacaccttcaacactttgctgcagcggagtcaagaacattcttggctctgctgtcaccaccgttgacaaacaaactgtgtgcaactgtcccaaagcggatgctgctangtacaacatcaatgaccagtatgctcaaggaatcccctggtttctgcaaagtcaatgtcccttacaagatcagccgctccactaactgtgcaagcatcaaggt

SEQ ID NO: 1278 - DNA, 374 bp, Glycine max
  Clone ID: LIB3028-039-Q1-B2-E10
tgttggattacaagagcaggtttttgttcggaacgtgattgaactgcatgacaagtacctggcatatgtgaatgattgtttccaaaatcatacacttttccacaaggctcttaatgaggcttttgagatcatttgcaacaatggtgttgctggaagctcaagtgcagaaatgcttgccactttctgtgacaatattcttaagaaaggaggaagtgaaaaattgagtgatgaagcaattgaagaaactcttgaaaaggttgtcaagttgcttgcctatattagcgacaaagatttgtttgctgaattttataggaagaagcttgctcgaaagctcctttttgacaagagtgccaatgatgatcatgacagaagta

SEQ ID NO: 1279 - DNA, 384 bp, Glycine max
  Clone ID: LIB3028-039-Q1-B2-E2
gccgcacatcacttcgttgtgtcatcttctttcaacaatcaatcaccgcttcctctctcactttccctaacttcgaagtcaccaacttcttatatttcaagacaaaaggaatggtgggtttatctcttggagaaacacatttcatccaaggtggcattgctcaagatcttcgttgtgatggtagaaagagattgacatatcgaccaatctctgttgaaactggagtgattccccagaccaatggttcagcaagagtcagaatgggtgccacagatgtcattgccagcgttaaggctgaacttgggaagccaagcttgttgcaacctgacaaaggaaaagtctctatatatgttgattgcagttcaacagcagagccagcttttg

SEQ ID NO: 1280 - DNA, 376 bp, Glycine max
  Clone ID: LIB3028-039-Q1-B2-E4
cgcacacgtcgtttttttctttttgttgcttcggagccaactcaacaacaacgccgtgcctaatccttaagaataacgaattacaacaaccaaccatgttgcattgtctcaacacttcctgttcggacatcacagtcttggaaagacaacgggaagcaaccatcaagtgccagaaccaccaaccaccctacttaacggactttaacgccgtcttcgcttcttcatcttcttcttcgtcttcttcctcttcttcttctcatagtcagggcttgctcatgatgtgctcggattcctcgctcggccaggtcctaactcactccgtcaaaaccgattcgggcgtctggcccgaattcggttttccacccgcaatttcgag

SEQ ID NO: 1281 - DNA, 574 bp, Glycine max
  Clone ID: LIB3028-039-Q1-B2-E5
gaaaaacaaaaaatcaacgaatggcacttacggggggtaagcaacgaacgccaagagacttgggtggaggagtaatctcgaccactttgtagggaaggatgctacctcgttctctgtctctgtctctcttcctactgcacgaaacctcaaacgacatcgtctgctaaaagagagcgaaaacgagattaactaatgaagaatcatggaaaagatagaaaagtgggtgagtgcggtaccttctggcatgaagcgagacccatgttccacgacgccattacaattagcttctcttctcttcaattctcgtcacgcaaaatggcaacagcaaagccagaaaaaactccggattttttttgtggtgggacacgagtcacatggctaggcctaagccaaagtaggagactacacagataatcctgggagttgcagactcccaaactattagcaagaaacattagcctaagagaggctggcctctgctaagaatctccaccattctgcaggctttatgagcaagcacatccacacattgattagcttcgctataaatgtgataaatccttatattgtcatg

SEQ ID NO: 1282 - DNA, 458 bp, Glycine max
  Clone ID: LIB3028-039-Q1-B2-E6
aaggtgagaagaagatcaaggagcagtttcataccgataccttggacaatgttcagaaactcactggcatcatccttgacattgtgagtggtttgtcgaacatcctcgagaagttcgggttgaagtttaatcttaagcccgcgtctcgccgtcttctcggcaacgatgggttgcccacttggttctctgctgctgatcgtaagcttttgggtcgtggatggagatcacgtgtcaagcccaatgttgtggttgcccaggatggcactggtcagttcaaaaccgttgccgatgctattgcttcctacccaaaggataacaaaggtagatacattacctacgttaaggctggtgtccatgacgagtacatcaccgtttccaaaagttcaaagaacattctcatgttaggtgatggccctgctaataccaacatcaccggtcgcaagaaattcgtcgatggt

SEQ ID NO: 1283 - DNA, 286 bp, Glycine max
  Clone ID: LIB3028-039-Q1-B2-E7
gttggcttctgttttctctctggtttgggtcaagattaacccttttatcagcagacctgacagtgcaagcatttcccagacctgcatttctatagattgctaagtcatctgcctatataaaaagttttgaccatatgttaaaaatatggatgatgatgatgattgattgtgatttgagccgcagttgaaatgtgtaagcactttaaatgtaaggttgcaaacatggttgttacttcttttccatgcattggatgaaatttcctgtgtaaagatcaaccgttgactc

SEQ ID NO: 1284 - DNA, 368 bp, Glycine max
  Clone ID: LIB3028-039-Q1-B2-E9
ggctgctgctgcattgaagggttcagatcatcgccgtgcaacaaatgtcagtgccagactggattctcaacaaaagaagctcaaccttccaatcctgccaaccaccactattggatccttccctcagactgtagaactgaggagggtacaccgtgaattcaaggctaacaagatctccgaggaagagtatgtaaagtcaattaaggaggaaattcgcagagttgttgagcttcaagaagagcttgatattgatgttcttgttcatggagaaccagagagaaatgatatggttgagtacttcggtgaacaattgtcaggctttgccttcaccgttaatggggtggtgcaatcctaagggtcccgttgcg

SEQ ID NO: 1285 - DNA, 373 bp, Glycine max
  Clone ID: LIB3028-039-Q1-B2-F1
agaagccagagtatcacttttgggcacagagtttatcaaagttgcaacgaacattgatcctgactgttaaatgataatcaacgaaaaagggcgaaatgcaaaatgcgcaatgaggaaggcctttgtggatgaataaaatccttaactgccaaagcatattttatataaggaacatcaacaaatcactgatagagatggctaaggttgagactgatagccttaaagctcatgctgagaaaccttgacctgacagaatgattgcacaatgctgccaacattttccccttcaatactccaaccagcaagagaaacataccactatacaatgatcattgataggttcttccctcagaaatcaccaaggctcactgtt

SEQ ID NO: 1286 - DNA, 207 bp, Glycine max
  Clone ID: LIB3028-039-Q1-B2-F10
aaagctccttggaaagtacctgattatttgtcatttccatttggagacatcgttcccatgtttgctggtgaaacccttgaatgggaggcattgccttgttgatttgctgtgtctatttgaaagtttggtatccttcagcttaaattattgattgctgagatgagaatttatgcagcgttcaagaactagagtcaagcaattttgttc

SEQ ID NO: 1287 - DNA, 568 bp, Glycine max
  unsure at all n locations
  Clone ID: LIB3028-039-Q1-B2-F3
aatgcatgctgtcgagcttttgttactttgtgacaaatggagggtccttagttctgtttctctttcttctctctgtgctttcaaccaagttctcaaatcactcttcttcttcaaccttctgatctgctaattctcaaggtattcaaaattgggtggttttcgattgaactgtgatgtccaagccactgctatgcatancggaagaggaaagtcaaagcaatgtcactttgttggtttcttcctcaaccaccaaggaaagtgtgtgcctgaatagctcaaaactgaaagagcgcaactacatggggttatctgattgttcatctgttgacagctccgcgccgtccttctcagattagactaagaacaatcctaacctcaaagctactgaactcagactgggggcttcgggggtcgcaatctcccgaacgagattcagatcttttgcttagaagttccatttcagtttgatgaaaagccactgtttcctttgcatcctgcaactgatgaacaccattcctcatcaaagcctgctgttttgggaaacaaaatagggttctcaaatgtcatg

SEQ ID NO: 1288 - DNA, 547 bp, Glycine max
  Clone ID: LIB3028-039-Q1-B2-D4
ctttgttattacctctttccaaagtccaaattttctagttccaccaaaccaaaccagaccaaaatggcagcagcctcagcctcatccatgatatcaacaccagccttatctccaaccatccaaaagcaccatcatttgaagccatccaacgtgtgcttccaaggtcttagacccctcgcaaggttcaccaaagcctcatcaaccaaagtgagcaccaccaccaaaagggttattccaaagggtggtgttagagctgaactcaactcagcccttgtgataagcctcagcactggcctctccctcttcttgggaaggtttgtgttcttcaacttccaaagggagaacgtggcaaagcaagtgcctgagcagaacgggctcacacagtttgaggctggtgatacacgtgccaaggagtatgtcagcctcctcaaattccaatgaccctgttggattcaacattgttgatgtcctggcttggggctccatttggcaggttgttgcttaatacatcttggccaccactaacaaggggtatgaccctgcattc

SEQ ID NO: 1289 - DNA, 510 bp, Glycine max
  Clone ID: LIB3028-039-Q1-B2-B2
caagtattgtattttgtccagcagattctatgacttgacaggactgcagaatggaattctgaagcgagggagagagattttcctcactggttgctacctccgaactcccactggaggttctggacattcacgtcttttgccaacagagtatcttgtgattctattggatgaagtaatggtcaaagattttttaattttaaatttgtccactgtgaagtttaattgggctaacaagaggagtgagtgagtaggctcaacatacataaatgcctgttaggaagtcaagcccaatgattcaatttaatgagagggacctctgagtatcttttttcttatcacgtcaatcatcttgttttatattctctcttttcatctttctttattgcataacatttatcacgaaatttttgtaccaatacaatttctcttccaagtttttttaattaaataacttttatacttttgatacaatattttttaaaaataaaaacttgataattttgtattttt

SEQ ID NO: 1290 - DNA, 402 bp, Glycine max
  Clone ID: LIB3028-039-Q1-B2-B4
tacgttaccttacatattccatttgtctctgatcttccaacaccttattcctcagagaagagacaaaatggatcaccatttcacttcagaaacctctctcattattcttctcctcatcacatccctctcctcccttgccaccgccaccaacatcaatatcctccaccacgacctccaatccgacatcaccgaattctgcaagaaaaccaccaaccccgccctctgtgccgagaccatccatccccacttcctcaagaacagaatcgagcccttcaaggcgctcgacatagaagtggacgccaccctggcgaaggcaaaataaaccctaagcaacattcaagcccgtagaatccagaacgggtaccaccaaatcgtccagggagtcgttcgacatttgcaagg

SEQ ID NO: 1291 - DNA, 288 bp, Glycine max
  Clone ID: LIB3028-039-Q1-B2-B5
caacaatctatcactaacgaacgtccctccattcaatatgtttgtgcagcaatgaaacccagtgttactatccattcatacgcattatcatcagtcaagtcgcttgacaaaggcctatggttctgcctatgtaacgcaccgctcagtttggcatgtttaactatcctgtcaagctcatgcttgtttaaacattggtttatttcacaaacggtggaccaattcatttttacagcttgtaaactgtcctttatgagatactagtttaccacgtttatggataattaattg

SEQ ID NO: 1292 - DNA, 304 bp, Glycine max
  Clone ID: LIB3028-039-Q1-B2-B6
cagaaggccgttgagaggctcgacgggagaatggttgatggtcgcgaaataacggtccagtttgcgaaatatgggcctaatgctgaaaggattcacaaaggaaggattattgaaacatccccaagatcaaggcgatcaaggagccgtatcccaaggaaaaggcatcgtgatgattacagagacagagattatatgagaagaagtcgcagcagaagttatgataggtatgaacgtgacaggcatcgcgggagagacaaagattatcgtcacagaagtaggagccgtagtgccaatcttgattaca

SEQ ID NO: 1293 - DNA, 324 bp, Glycine max
  Clone ID: LIB3028-039-Q1-B2-B9
gctagtttatcgtgaggagaatatgaagttgtttgttttctttgttgctgcagtagttttggtagcatggccatgccatggcgcaggctaccaaaggttccctctccgaatgaaaactggctatggtgagcgttcttcggaggtaaaatgctcaagttttaggcttgctgtggaagcacacaacatcgcagcctttaaaaccattcctgaagagtgcgttgtcccaacagcggactacattaatggcgaacaacttagatcaaaccctaatacagttagccaacaagcgttcttttatgctagtgaacgcgaaatccatcacaa

SEQ ID NO: 1294 - DNA, 227 bp, Glycine max
  Clone ID: LIB3028-039-Q1-B2-C2
agaaaatagctgttgattatatatatgcatttcttaggaagatatgcagggaaaattgtgtaatcttcaatgtccctcatgagagtctcttaaatgttggtcagattttctatgtatagcatagccccatatccttgtgattgccattttttttgcaaaatgagctgagtgtagcatatgaacaacactttgcttatggtaatcaagatacaattcggaattgactt

SEQ ID NO: 1295 - DNA, 330 bp, Glycine max
  Clone ID: LIB3028-039-Q1-B2-C4
ctcaaagaaaagttcaagcgcatgtgtgaaaagtccatgataaagaagcgatacatgcacctgacggaggagtttctgaaagagaacccgaacatgtgcgagtacatggcgccatcgctggacgtgagacaagacgtagtggtgatggaggtgccgaagctgggaaaacaagccgcaacgaaagcgattaatgagtggggtcaaccaaagtcaaagatcacacaccttgtgttctgcaccacttcaggcgtggacatgcccggagcagattaccagctcacgaagcttctcggcctgaggccctccgtgaagcgcctcatgatgtatcag

SEQ ID NO: 1296 - DNA, 437 bp, Glycine max
  Clone ID: LIB3028-039-Q1-B2-C6
ttcagactgttttggacgttattaactcataccgcaagcatcatcagtgtagcaatgtcatctacatgaaggctgttaactagtgagtgagtacatgcaccgttgacaacatgaatcccaatcttctcagctacggtgatggcctctcaaagaccagcatcactgtgacgcatcaactttcacgatggtaccaataccatgagaagggccaccttcacgactgttgctgaacatttcatggccaaatcagttgcattcgagaacaccgctggtgcggttcgacaccgatcaatgacactccgcatgcaaggtgatcgttcactgttctttgattgccctatgcgtggttatgagtacacattggaatcccacgcctatcgtcaattctaccgcaactgcgaaatctctggaacaattgtcttcagcctcggctactc

SEQ ID NO: 1297 - DNA, 295 bp, Glycine max
  Clone ID: LIB3028-039-Q1-B2-C8
aaattaagcaccacaccactctccaatatccccaacatggctcaagtgggttctctatcttccgaaatggggacactgaatcatgtcctagccctagtggaggcattccgagcatttgacgcggacaacgatggccgaatcacgcaggcagagctaggaggaatcttggggtcactcgggtacaaccctagcgagcaagaagttatggcaatgattgagcacggcgacaagaacagagacgggttggtgagcatcgacgacttcttggagatgattaccaaggatttgggaggtg

SEQ ID NO: 1298 - DNA, 548 bp, Glycine max
  Clone ID: LIB3028-039-Q1-B2-C9
cgacctcgcatcgcaccttcaacttaacctattccacttgtaatcgtaaacgctttgctagaagaagagacaaagtgtgtctgtgtgtgtgagagagagagcaatggctggctcgtgggcacgccgttctctgattgttctagccatcatttccttcggatgtctatttgcgatttccattgctaaggaggaagccaccaagttagggacggtcatcggcattgatcttggaacaacctattcatgtgtcggtgtttacaagaatggccatgttgaaatcatagccaacgaccaaggtaaccgtatcaccccatcgtgggttgctttcaccgacagtgagagactcattggggatgctgccaagaatcatgcagctgtcaacccagaaatgaccatctttgatgtcaagagacttatcggaagaaagttcgaagataaggaagttcaaaaagacatgaaacttgttccttataagattgtcaacaaggatggaaaaacctacattcaggtgaaaattaaggatggtgagaccaaggtgttcaaccctg

SEQ ID NO: 1299 - DNA, 114 bp, Glycine max
  Clone ID: LIB3028-039-Q1-B2-D10
atcttccttgtcactgcccgtgtgtcgccgccatggccaccgtcaccacccaagcctccgccgcaattttccggccatgtacctcgaaagcgatgttttttaacgggtcttccg

SEQ ID NO: 1300 - DNA, 447 bp, Glycine max
  Clone ID: LIB3028-039-Q1-B2-D2
ctcacttcaccgtccgcacgcacgcgcgttctcttcgttcgtgagccaaatttatgagaagtgcttcactcgtaccacgtccatatcccaaccaaacgctcccataaaggacccgaagaaaaaaaatacttataatactattcataataattattattaatttttaacataaaaacaaaacaaactaggcggccatccagccacaggattgaagagtagtaccacattagtgaagaccatttttcaattagtctcctctctctctctctctctctctctctctctctctctcactttggccttaacagaaccgaacacaacacaagagagataaagatacaatacaagaacaaactccgacatctctcgctttctccacgttcccctgtttttaatcggaaccaagcaaggcttatttatatagatccctcttttccgtgcttcact

SEQ ID NO: 1301 - DNA, 387 bp, Glycine max
  Clone ID: LIB3028-039-Q1-B2-D3
gtggtgccttagcgctgtggttatcatcttcttcttcctcgttcttagatctcttctttctctaagccgcacgccgaaaccatggccggaaaaagagagggtcctgctatccggatcgatctcggtaccaactactcttgcgtcggtgtgtggcaacatgaccgcgttgaaatcatcgccaacgaccacaggaacacaaacacgccgtcttacgtccgattcactgagaccgagcgtctcatcggtgatgcggccaagatatcagtcgccaagaatcccatcaacaacgttcttcgatgccaaaaaggtgaattggtcctagattcagtgattcctctgttcagaatgatatcaaattgtggcctttcaaggtcattcctggtgctg

SEQ ID NO: 1302 - DNA, 201 bp, Glycine max
  Clone ID: LIB3028-039-Q1-B1-G6
cgacgggagaatggttgatggtcgcgaaataacggtccagtttgcgaaatatgggcctaatgctgaaacgattcacaaaggaaggattattgaaacatccccaagatcaaggcgatcaaggagccgtagcccaaggaaaagggatcgtgatgattacagagacagagattataggagaagaagtcgcagcagaagttatga

SEQ ID NO: 1303 - DNA, 204 bp, Glycine max
  Clone ID: LIB3028-039-Q1-B1-G7
acctgcggccaggtagtcctattattccttatccttctcgaccaatccacttcggcgagtgcttctaatagtaggtttatagaagtcttttcaaaattaaagaattcttttaatcctaagtctgaagaactaaaatcagaagatataaaggagctcccgagcgtcgaatttttgaagaagaaacatgacggagttaaggacttc

SEQ ID NO: 1304 - DNA, 51 bp, Glycine max
  Clone ID: LIB3028-039-Q1-B1-G8
gattttcctgttaagttttgactcaagaataataaagactcttcgctatgg

SEQ ID NO: 1305 - DNA, 382 bp, Glycine max
  Clone ID: LIB3028-039-Q1-B1-G9
atctcatgatccagaagtgagaaagggaccatggatcatggaagaagacttgatcttgataaactatattgcaaatcacggtgaaggtgtttggaattctttagccaaagcttctggtcttaaacgaacgggaaagagttgtcgactccgttggctaaactaccttcgtcctgatgttagaagaggaaacattacacccgaagaacagcttttgatcatagaacttcatgcaaagtggggcaataggtggtccaaaattgcaaagcatcttccaggaagaactgacaatgagattaagaacttctggagaactaggattcagaagcacattaagcaagctgagacttcacaacaacatggtaattcatccagagaatagtaa

SEQ ID NO: 1306 - DNA, 461 bp, Glycine max
  Clone ID: LIB3028-039-Q1-B1-H1
aaagatgaagctcgagttcgcaaatgtgctacttctgtgccttgtccttagctcttctttcttgggaatctcaatggctggttctcctttctgtgactcaaagtgcgcgcagaggtgtgccaaagctggggttcaggacagatgcttgaggttttgcgggatctgctgcgagaagtgcaactgtgtcccatctgggacttacgggaacaaggacgagtgcccttgctacagggacatgaagaactccaagggcaagggcaaatggccttgaagaatatctaagttcatcatcacactccattccaatagactaacttgtagtgtatcgtcagccttccgtttcagagtattgcattatgccacggatctatgtacctacccttcaacttaagtattccgtctagttaattagcatagctacccttcaacttatggtgttcgacctagtttattagcttaat

SEQ ID NO: 1307 - DNA, 490 bp, Glycine max
  Clone ID: LIB3028-039-Q1-B1-H10
ctcgagccgaatcggctcgagcggctcgagcgttcacataccacgtagaaacagttcaatcattcttagccctaagcagacttcacatactcatccacttagtggcagtgttgtctctctgttactaccgcatcacccacttcttcctccaacctccaacagcgccatggcttctcatgactgctgcggagcttcttctctcgctgctctggttcttcaaccaagccttccggtggcgaccggtgtcgcggagcgtcatgactgagaagcttccgagtgaggagaagctgccggggcttgacatcttcgtgtgcacgctcgatcccgagaaggagcccaccgtggaggtcattggcaccatcatctccgccgtgtccaaggattaaccctccgacaagctttccgtctatctctccgacgacggcgggtgcgacgtgactctctatgggatccgagaggctgctgagttcgccaaaggattgggttccgt

SEQ ID NO: 1308 - DNA, 511 bp, Glycine max
  Clone ID: LIB3028-039-Q1-B1-H2
tagctagccaaccagagtaagatctaaagatatttcttatatatcctatggtccgagagtgcccttgttctgcgccaaccctttcttccacatcttgcgtttcaacctcttcctctcttgagtccccttatcatcaaatacccttcttcttcaacctccaccaaattcaacccccacataacaaatctcctcccatcccatttttcagcaccaaagtttgaaacttttctcaattgggttgtagagagtttgactcagcaatttttagttttttagtttgagtttctctaaccaagtagaagtgcagtaagtaaatgtccaacatcgtcgtggtgttgatgtttgagattcatgtatccgattctcagtgaaatcttcttttccgggtgtatgatcaattccactgttaggcgcaggacccatttagttcaatccttctcagttgccttcctcgattggttgtactacgtttcatgaattctaacccttccttaacttaataatcatctat

SEQ ID NO: 1309 - DNA, 463 bp, Glycine max
  Clone ID: LIB3028-039-Q1-B1-H3
atggagatcatttacagggctaggtgcttctgaaatttgcaaggttgaagaacttgagtatgcagagctaccaggctctggggatagctgttgtaaacttaaacttagatttctagatccttcttcgtgtgtgcatggcaaatcgtttaaattaactctacctgaattgattaacttcactgattttgttattgagaaaacatggtatgatactgccatgaagagaaattggtcgtcaagagataaatgcatgggctggtggggaaatgaagatgggaaaggtatcgggtccagtacaagactgatcccaccgagaatcatctgcaaaatccgtgggaactatatgattctgagatgctatgggagcatccccacattgatcatgagatcagagataagctgctttcctaattcaccaaattagaccgcagggagaggtttgatatccaagcactggaccaag

SEQ ID NO: 1310 - DNA, 379 bp, Glycine max
  Clone ID: LIB3028-039-Q1-B1-H4
aacctaggaagttggaagtcatggcagcaacattgatggcagcaacaacaagttctggtactcttaaagcaactcctttccttggccaaggcaagggtgccaatgccaatgctcttagggatgttgtctccatgggaactgggaagtacaccatgggcaatgatttgtggtatggaccagacagagtgaaatacttgggacccttctcagctcagacgccttcatacttgaaaggagaattccctggggattatggatgggacactgctggcttatctggtgacccaagaacatttgccaaagaacaggggtcttgaggtgatccatggggcgatgggccaagcttggagcactaggatgcatcaccccagaggtgcta

SEQ ID NO: 1311 - DNA, 395 bp, Glycine max
  Clone ID: LIB3028-039-Q1-B1-H5
tctcagagaaaaagaaacatcgacaaggatgtctggaagaggaaagggaggcaagggtctcggaaagggaggagccaaacgacaccgtaaggttctgagggataacattcagggaatcaccaagcccgcgattcgccgtctggccagacgtggtggcgtcaagcgtatcagtggtcttatctatgaagaaactcgcagtgttctcaagatctttctagagaacgtcattcgcgacggctgtcacctacactgaacaggctcgccgcaagaccgtcactgccatggacgttggttacgccctcagggaggaggggaggaccctctacgggattggcggttagacaattggggatttcagcactgcgtcctcgattagggtttcttatagtgtcaat

SEQ ID NO: 1312 - DNA, 191 bp, Glycine max
  Clone ID: LIB3028-039-Q1-B1-H6
ctcttcagccttttcatagttcataacacccctttgctaccaaaccaattcagtgatcgttttgctttgctctttcctgagtttgaagaccttagaaccatttcagtacacaacactttctgttccttaatgagatccagttcaatctcagcctctggctcatggagtgttaaggacaacaaggcctttga

SEQ ID NO: 1313 - DNA, 455 bp, Glycine max
  Clone ID: LIB3028-039-Q1-B1-H9
gtgcgcagaataaaatttctcatcgacgatggcgaataccttacaacgcgcccttcgcgccaccatggcccggccgttctccaccggcgcattggccgaaattaagcgaggcgagatcggaatggtttctggaattcctgaagaacaccttcgtaggagggttctaatttactctcctgctagaactgcatctcaacaaggatctggaaaggttggaagatggaagatcaacttcttatcaacccaaaagtgggaaaatccactgatgggctggacatccactggggacccctactctcatgttggtgattctgccttgacttttgatagcgaacaagcagcaaaagcatttgcagagaaacatggttgggagtaatcggtcaagaagccccacacaccattgctgaaggttaaatcatacgcggacaattttaaatgggaagggccccccaaat

SEQ ID NO: 1314 - DNA, 529 bp, Glycine max
  Clone ID: LIB3028-039-Q1-B2-A2
cgaagtgctaacaaaactccaccctttctcctcctgtcactgtttcttcgtctctacttcttctcaaaccagaacagacagcaccctcccaaccacctttgatctaggttgttatttttttctctctgaatttaaatgaaatggctcagaaaagacccccaaatagcagggggtactacgttaagatgaaactccttcacaaacatggcagacctcatcatcatcatcagcagcagcaagaaaaaaactgcctctacagatactacaaatgggttctctggctttctctttccctctatttcttcacctcctacctcatcagcaacaacaacaacaacaaccaccactccaaacaaccatctcacgtctcgagagccctcatggaatcaaaccacaccacacctcctcaacaacaagctcttaactctctagggtctttgaagaacttgaaggggtttgtatatgatcttcctcagaagtacaacacggattggttatcgaacgagaggtggagcaaacatttgttcgc

SEQ ID NO: 1315 - DNA, 429 bp, Glycine max
  Clone ID: LIB3028-039-Q1-B2-A5
gttcagttgagcatcaacgttgaatctcaaacatgaagcaccatcaacaaccatgtccggaacaggaaagggaagcaagggtcccgtcaagggaggagccaacccacaccgtaaagttctgatggacaacattcagggaatcaccaatcacacgaatcgccgtctggccacacgtggaggcgtcaatcgtatcaatggtctgatctatgaataaactcgcggtgttctcaagatccttcgatagaacgtcattcacgactctgtcacctacactgaacacgctcaccaggaaaccgtcactgccatggaacatgcttactcccccaagaagcaagggaggaccctctacggatttggcggttaaacatgtgacgatgtcaccactgcatcctcgattatggattcgtaaaggggcaccttcgatcttta

SEQ ID NO: 1316 - DNA, 292 bp, Glycine max
  Clone ID: LIB3028-039-Q1-B2-A6
tgatcactatatacacactactcttcagccttttcatatttcacaacaaccctttgccaccaaaccagatcactgatctttttgctttgctcattcctgagtttgaaaaccatagaaccacttcactacacaacacttactgtgccctacaggaatcgagttcaatcgcagactcaggctcatggagtgtgaacgacctgagagcctgtgagaatgctggacatgtctaggacaatgagacgcatgatcgtcggcacatgtgtagcgcacgctgttggtggcaagacgacac

SEQ ID NO: 1317 - DNA, 211 bp, Glycine max
  Clone ID: LIB3028-039-Q1-B1-G5
attctcttcattccatgggtttgcccaaccagcagaccgtggattaccctagtttcaagctcggtatcgtcggcgatggtggcacaggaaagacaacctttgtgaaaaggcatctcaccggagaattcgagaagaaatatgagccaaccatcggtgtggaggttcacccattggattttttcacaaactgtggagagattcgagtttactg

SEQ ID NO: 1318 - DNA, 486 bp, Glycine max
  Clone ID: LIB3028-039-Q1-B1-E4
tgcttcggagccaactcaacaacaacgccgtgcctaatccttaagaataacgaattacaacaaccaaccatgttgcattgtctcaacacttcctgttcggacatcacagtcttggaaagacaacgggaagcaaccatcaagtgccagaaccaccaaccaccctacttaacggactttaacgccgtcttcccttcgtcttcttcgtcttcttcttcttcctcgtcttcttctcatagtcagggcttgctcatgatgtgctcggattcctcgctcggccaggtcctaactcactccgtcaaacccgatccgggcgtctggcccgaattcgggttttctacccgccatttcgagaacttgtagcagagacggagacttggtttcgcccaaggaaaacatggccagtgggaaagaaaatgctaagaagagaaagcctcagaactccaaggttgttgcggagattgataataacaaggacaaggacaagag

SEQ ID NO: 1319 - DNA, 521 bp, Glycine max
  Clone ID: LIB3028-039-Q1-B1-E5
aagatgaaaatgaaagtgcttgttttgtttgttgctacagttttggtagcatatgaatgccatggctcagactaccagaagttccctctccaaatgaaaactgggtttggtgggcaatacagcaatgaggtggcatgtgccagttggaggcttggcgtggaagcaaacaacgtagtcaagtggcaaactgttcctgcagcttgcggagagtacatagctgactacgttctaggagaccaatatagatcagattccaaaacagttaaccaacaagcttatttctatgctaaatccctcaaactcaccaacaaagatgtcgttgtcttggacgttgacgacactactctctctaatctccagtattttgctaaccatggatttggtgtggaaccacacaatacgacggcgtttaagaactgggttcttgatggcgaggcattcgcactgccagagactcttaaaatgtacaacaaactgttggctctcgggatcaagattgtattcttatcagaaagacactg

SEQ ID NO: 1320 - DNA, 420 bp, Glycine max
  Clone ID: LIB3028-039-Q1-B1-E7
tgttcaagattaggttgccctgtctgttctctcacacactcactctccttctctctcctattgcggctaaggtttgggtttttcactttcagcctctccattccttcaaccttcttcttctctttgatctctgatggagacgttccgtgtttagtagcaagggttagttgaggccttgtgtttggaaacgtacggtgtcgttttggagttgggaaaacagataattctgagagatgggaaccaggaacccttttgatttggtgggtgacgacgctgaggacgcttctcagctcatcgccgccgaacagctcagagcggcggctgctgctgcgggtgccaccgccgctcccaagaaggcgccggctcagcagattaagccggctcagctccctagcaagcctcttcctccggctcaagctg

SEQ ID NO: 1321 - DNA, 427 bp, Glycine max
  Clone ID: LIB3028-039-Q1-B1-E8
gcaggtcacctatgatttttgtccttcgtagaaggacactttctcatagccacgatcgctctctctctctctctctctctcgcttgcgttgcatttccatttccagtttccacccatggctgctctcacttctctctctttctcagcagtgactcattgctcagaaagaaaagtaaccctttcctccactcgttttctcgcgtcctcttcagagggctttgggttccggagggaggtcgcggtagcagtaggttggggttcggggcttggaattcggcggcgaggagggatggtcaatgcatgtgtggtgcgacgggggtgcgtcccggggggtctgaagaagagttaaatttcctcaaggcatataagcgaccaatccctagtatctagagtacgggtacggggagggctaatagtggagcaacat

SEQ ID NO: 1322 - DNA, 477 bp, Glycine max
  Clone ID: LIB3028-039-Q1-B1-F1
ttttgggacaagagtttatcagagttgcaatgaacattgatcctgagtgtaaaatgataaaaaaggaagaagggcgaattgagaaatgggcactgaagagggcctttgatgatgaagaacatccttatctgccaaagcacattttatataggcagaaagaacaattcagtgatggagttggctatggttggattgatggccttaaagctcatgctgagaaacatgtaactgacagaatgatgctcaatgctgccaacattttccccttcaacactccaaccaccagagaggcaataacactatagaatgatatttgagagggtcttccctcagaactcaagcaaggctcactgttcctggaggaccaagtgttgcatgtagcacagcaaaagctgttgagtgggatgctgcttgggctaacaaccttgatccatcaggtagagcagcacttggagtgcatgcatcagcttaaggaaa

SEQ ID NO: 1323 - DNA, 366 bp, Glycine max
  Clone ID: LIB3028-039-Q1-B1-F10
aaagctccttggaaagtacctgattatttgtcatttccatttggagacatcgttcccatgtttgctggtgaaacccttgaatgggaggcattgccttgttgatttgctgtgtctatttgaaagtttggtatccttcagcttaaattattgattgctgagatgagaatttatgcagcgttcaagaactagagtcaagcaattttgttctaattttatcagtcagttctgcatttattttgcagattgttctcatttctatttcctaggtcaggtgaatttaagtatgaaccagaacacccactgtgactaataaattatgggaatttatatagtattcagagctaaggtaattttgtaattcaaaat

SEQ ID NO: 1324 - DNA, 512 bp, Glycine max
  unsure at all n locations
  Clone ID: LIB3028-039-Q1-B1-F2
gaatatcctatcgagggaatcatatttgcttcggaagatatgctcttcaagcacttgagccagcttggataacatctagacaaatagaagcgggacggcgggcaatgtcacgaaatgttcgccgaggtggacaaatatgggtacgcatatttccagacaaaccggttacagtaagacctactgaaacacgtatgggttcaggaaaaggttctcccgaatattgggtagctgtcgttaaacctgggaaaatactttatgaaatgggtggggtaccagaagatatagcaagaaaggctatttcaatagcatcatccaaaatgcctatacgaactcaattcattatttcagggtaataaattagaaccaaaggaaagaggtctttaagatgaaaacaaaaaatgcaaatgtaggttcctttttttgaacacanaatatttttacttccattttttgactgaaagaataaaagaatgatatgattcaacctcaaactcatttgaatgtagctgata

SEQ ID NO: 1325 - DNA, 461 bp, Glycine max
  Clone ID: LIB3028-039-Q1-B1-F3
agcttttgttactttgtgacaaatggagggtccttagttctgtttctctttcttctctctgtgctttcaagcaagttctcaaatcactcgtcgtcgtcaggcttctgatctgctaattctcaaggtattcaaaattgggtggttttcgattgaactgtgatgtccaagccactgctaggcatagcggaagaggaaggtcaaagcaatgtcactttgttggtttcgtcgtcaggcagcatggaaagtgtgtgcctgaatagctcaagggtgaaaggagggaactacatggggttatctgattggtcatctgtagagaaggtccgcggcgtccttctcaggtggggactaagagcaatctgaacctcaaggctactgagctcagactggggcttccggggtcgcaatctcccgaacgagattcagatctttgcttgagaagttcgattcagtttgatgaaaag

SEQ ID NO: 1326 - DNA, 426 bp, Glycine max
  Clone ID: LIB3028-039-Q1-B1-F6
tattaactcctaccccaagcatcaccagggtagatatgttatctacgttaaggctggtagctatgatgagtacatcaccgttgacaacaagaagcccaatcttctcatctacggtgatggcccctcaaagaccatcatcactggccgcaagaactttcacgagggtaccaagacaatgagaaccgccaccttctcgactgttgctgaagatttcatgggcaagtcaattgcattcgagaacaccgctggtgcagaagggcaccaggcagtggcactccgcagtgaaggtgatggttcagtgttctttgatgtgccgatgcgtggttaccaggaggcattgtatgcccacgcccatcgtcagttctaccgcaactgcgaaatctctggaacaattgacttcagcttcggctactccaccaccttgat

SEQ ID NO: 1327 - DNA, 465 bp, Glycine max
  Clone ID: LIB3028-039-Q1-B1-F7
aaaagcgtgaaaacgcagcatctcaaacacgcgattccgaagcttttctgcgatcaatggagttcgacccgatcccaatcggttcgtgctccaaagaacaccagatgatctataaggagtggttcaattacgctgattcagataacgatggccgcattacggggagtgatgccaccaagtttttcgccatgtccaatttgtcccgcgaagatcttaggcaggtgtgggctagtgcagattcagggcgacggagataacgtgggttcagtgaattgagcagtgctaggcggggagtgtcggtggggcaatctgggcagtggagagcagcggaatgggctgacggagggatgttaattttacaaatgggaaacctccctcaatggagggtttggacgtattactagttaagagggagcaggggcaaaaagaggttgatgcaaatgggagttctcaattgcagccatc

SEQ ID NO: 1328 - DNA, 186 bp, Glycine max
  Clone ID: LIB3028-039-Q1-B1-F8
atccccaacatggctcaagtgggttctctatcttccgaaatggagacactgaatcatgtcctagccctagtggaggcattccgagcatttgacgcggacaacgatggccgaatcacgcaggcagagctaggaggaatcttggggtcactcgggtacaaccctagcgagcaagaagttagggcaatg

SEQ ID NO: 1329 - DNA, 383 bp, Glycine max
  Clone ID: LIB3028-039-Q1-B1-G1
tttctaaattagttcggatacatctccggaggcagggcaatcgactccgccaccgcatatagcagaaagtcgagaactagcgaccagccggtgcgaacgcatcttgggaacctatgcttacaggcaatgctccgccgccatgaacccgtcggagcttccggaagaggatgtatggggcgccggagatgacgccggtcaacgcgagtgggatccacacgtcgccgccatgagcaacgggaggggaagtccggagccggattccgcgtgagacggatgtgcaccagcgcgtgggttcggctgtctctggcttttgaagcgtccgagagtggggcctcgccggagatcgtgcaccagtttcgcgcgcgtgaagagatggcgtcgac

SEQ ID NO: 1330 - DNA, 280 bp, Glycine max
  Clone ID: LIB3028-039-Q1-B1-G11
aacagagtcatgcttatgattcaaactttgatgatggcatggatttctggtatgacatattcaccaggaccaatgattcaatagaattgtgagagttctgaatttttcatgtgacacgttgaatgagggtattattaaatttggcagatagagtagtttaaatgaaatggtatagcttgaatttgaccgttacaactaaagggtacgataatttctggtgtggggacagcattatcaccagctggacagatctagagggatcgattgacaaagaaaccag

SEQ ID NO: 1331 - DNA, 375 bp, Glycine max
  Clone ID: LIB3028-039-Q1-B1-G12
agcagaacttggacataaccttgaggctctcgacgacgcctggaacgacctcgtgctcgagaccggagtactctccctcggtgttctcgcgaatgacgacgatgtcgacgttgtggtggcgggtgggcaagccgggcaagttgaagcaattgacgagggaagcgtagagatcgaggtcctttctgagctgaacgttgagggagctcacacccccacccaccggagtcctcaaaccacccttcaagcacaccttgttcttccgtatcgaatccagcacctcctccggcacacgcctcatgtccccgtgcacatcgtacttctcgaagtatatgggggcgtgcatcgcctccatcacctgctccaccgcatgagtca

SEQ ID NO: 1332 - DNA, 205 bp, Glycine max
  Clone ID: LIB3028-039-Q1-B1-G3
cactcatcaaacttcggcgctctctctttccgaccagaatgtcgatcaacagcgaatctacgccgccagcggtggtcggaagaatcgggccttacaccgtcttcatgacgccgccgtctacacccaaacccgccggacgacaacgccgttaccaccaccaagatcgcacctccgccgcctcagattcccaaagccgttccttccc

SEQ ID NO: 1333 - DNA, 360 bp, Glycine max
  Clone ID: LIB3028-039-Q1-B1-E3
tctgcgcaaacttaaaaagctgtttctttttctcgatcctactgcttctctttttagcaactgttgctctgctctacgttaaggacaagcaagttgaagcaattcctctggatgatgccactcaaccctcttgtttctttcagcttttcggtgctctgaaagagctcaagagaccgatgtggatgctgatgctggtcacagctgtgaactgggtggggtggtttccttacttccttttcgacactgactggatgggtcgtgaggtctacggtggaactgctggggaagacgcgtaagcgaagggagtgcgcgtgggatcattagggctgatggtaaacgccgtcgtgttgggcttcatgt

SEQ ID NO: 1334 - DNA, 251 bp, Glycine max
  unsure at all n locations
  Clone ID: LIB3028-039-Q1-B1-C4
aagtccatgataaagaancgatacatgcacctgacggaggagtttctgaaagagaacccgaacatgtgcgagtacatggcgccatcgctggacgtgagacaagacgtagtggtgatggaggtgccgaagctgggaaaacaagccgcaacgaaagcgattaaggagtggggtcaaccaaagtcaaagatcacacaccttgtgttctgcaccagttcaggcgtgggcatggcccgggcaggttaccagctcac

SEQ ID NO: 1335 - DNA, 433 bp, Glycine max
  Clone ID: LIB3028-039-Q1-B1-C8
aaagcagaacgtttgtttcacatgtaaggcacatgctacggtggtcaagtgtgtaaacttgtgtatggtatacaaatttttttaaccctcagattactcttttggtacatcatactatcttgaacttctcacacaatatccttcctctatacaaaggaaaacgttcatgaacccatttagagaccttggattgcgggaaagccttcgtcggagtcgggagaaactaccctctcgctttcgtccacaatctcaagtctccgtcgcggaaaccaccgttgacgccatcagcggcgtcaccagcacggagcgtgagcgcgccatcatcgggtttatgccaccatcgccgcctcattcctccgccaatatcttcttcgcctcgcactcctgctccggcgtggcgccgacgccgtcgtgtctactgctcctctgtgac

SEQ ID NO: 1336 - DNA, 506 bp, Glycine max
  Clone ID: LIB3028-039-Q1-B1-C9
cgacctcgcatcgcaccttcaacttaacctattccacttgtaatcgtaaacgctttgctagaagaagagacaaagtgtgtctgtgtgtgtgagagagagagcaatggctggctcgtgggcacgccgttctctgattgttctagccatcatttccttcggatgtctatttgcgatttccattgctaaggaggaagccaccaagttagggacggtcatcggcattgatcttggaacaacctattcatgtgtcggtgtttacaagaatggccatgttgaaatcatagccaacgaccaaggtaaccgtatcaccccatcgtgggttgctttcaccgacagtgagagactcattggggaagctgccaagaatcaggcagctgtcaacccagaaaggaccatctttgatgtcaagagacttatcggaagaaagttcgaagataaggaagttcaaaaagacatgaagcttgttccttataagattgtcaacaaggatggaaaaacttacattc

SEQ ID NO: 1337 - DNA, 340 bp, Glycine max
  Clone ID: LIB3028-039-Q1-B1-D10
atcttccttgtcactgcccgtgtgtcgccgccatggccaccgtcaccacccaagcctccgccgcaattttccggccatgtacctcgaaatcgaggtttttgaccggctcttccggtaaacttaaccgggaagtgactatgcggccaatggggtgccctccttctgcctctttcaaggttgaagccaagaagggagagtggttacctggcttgggctccccaacttacctcaatgggactcttcctggtgacaatgggttttaccctccgggggtatacgacggaccccagagaacttgaggtggtacgttcaaacccgagcttgttaaagggaccttggg

SEQ ID NO: 1338 - DNA, 212 bp, Glycine max
  Clone ID: LIB3028-039-Q1-B1-D2
gtcgcttcgatcgggagccagatttatgagaagtgcttcactcgtaccacgtcgcatagtcccaggcaggagcgctcccatagaggacccggagaaaaaaaatacttataatactattcagaataagtattagtaatttttaacatggaaacagaacaaactaggcggccatccagccacaggattgaacagtagtgccacattagggaaga

SEQ ID NO: 1339 - DNA, 169 bp, Glycine max
  Clone ID: LIB3028-039-Q1-B1-D3
gtggttatcatcttcgtcgtcctctttcagagatctcttcgttctctacgccgcacgccgaaaccatgggcgggaaaagagagggtcctgcgatcagaatcgatctcggaaccacctactcttgcgtcggtgtgtggcaacatgaccgcgttgaaatcatcgccaagga

SEQ ID NO: 1340 - DNA, 412 bp, Glycine max
  Clone ID: LIB3028-039-Q1-B1-D4
ttttctagttccaccaaaccagagcaaaccaaaatggcagcagcctcagcctcatgcatgatatcaacaccagccttatctccaaccatccaaaagcaccatcatttgaagccatccaacgtgtgcttccaaggtcttagacccctcgcaaggttcaccaaagcctcatcaaccaaagtgagcaccaccaccaaaagggttattccaaagggtggtgttagagctgaactcaactcaggccttgtgataagcctcagcactgggctctcgctcttctggggaaggtttgtgttcttcagcttccagagggagaacgtggcaaagcaagtgcctgagcagaacggcctcacacactttgaggctggtgatacacgtgccaaggagtatgtcagcctcgtcaaatccaatgacc

SEQ ID NO: 1341 - DNA, 525 bp, Glycine max
  Clone ID: LIB3028-039-Q1-B1-D6
ggagcagtttcataccgagaccttggacaatgttcagaaactcactggcatcacccttgacattgtgagtggtttgtccaacatcctcgagaagttcgggttgaagtttaatcttaaacccgcgtctcgccgtcttctcggcaaggatgggttgcccacttggttctctgctgctgatcgtaagcttttgggtcgtggatggagatcacgtgtcaagcccaatgttgtggttgcccaggatggcactggtcagttcaaaaccgttgccgatgctattgcgtcctacccaaaggataacaaacgtagatacattatctacgttaaggctggtgtctatgacgagtacatcaccgttcccaagagttcaaagaacattctcatgtacggtgatggccctgctaagaccatcatcaccggtcgcaagaacttcgtcgatggtgtcaagaacatgcaaactggcactttcggcaacactgcagaaaggttcattgccaaggcaatgacattccagaacactgccggtgc

SEQ ID NO: 1342 - DNA, 513 bp, Glycine max
  Clone ID: LIB3028-039-Q1-B1-D8
gaatatctatatccatatttaccatagtatttgcagcccttgttgagatgaaaagattgaaaacagctcaagagtctggtgttgttgatgaacctaatgcaactgttccaatgagtatatggtggttgattccccaatatttcttgttcggagtctctgaagtttttaccatggttggtctgcaggaatttttctatgaccaggtcccaaatgaactaagaagcatggggtcgtgctctctacttgagcatctttggagttgggagctttataagtggcgttctcagttctgtgatagagaaactgtctggcaaagatggacaagacagttggtttgccaataatctgaataaggcgcatgttgattacttttattggctacttgctggactcaatgtaataggattggccttgttcatttgctctgctaaatcctacatttacaatcaccagggaatcagacgagaattgtgaattgtgcggttctgtcaattttagctttactgtatggga

SEQ ID NO: 1343 - DNA, 432 bp, Glycine max
  Clone ID: LIB3028-039-Q1-B1-E1
cttgagaaacattattcccattgctatatattatggctagcatgaaggttacatgggtggttgtgatcatgtgcatggccgtggtgggtgcaccgatgatggcgcaagccatgacatgcaatgatgtgacagtgaacatggcacagtgcctatcctacctgatgcagggaggaacaccttcaacactttgctgcagcggagtcaagaacattcttggctctgctgtcaccaccgttgacaaacaggctgtgtgcagctgtctcaaggcggatgctggcagggtaaaacatcaatgaccagtgatgctcacgcactccctggtttctgcaaggtcaatgtcccttacaagatcagccgctccactaactgtgcaagcatcaggttctgaacaagccatggacagatttgctcatttctgcagcgggatactga

SEQ ID NO: 1344 - DNA, 481 bp, Glycine max
  Clone ID: LIB3028-039-Q1-B1-E10
tgttggtttacaagagcaggtttttgttcggaaggtgattgagctgcatgacaagtacctggcatatgtgaatgattgtttccaaaatcatacacttttccacaaggctcttaaggaggcttttgagatcttttgcaacaagggtgttgctggaagctcaagtgcagaactgcttgccactttctgtgacaatattcttaagaaaggaggaagtgaaaaattgagtgatgaagcaattgaagaaactcttgaaaaggttgtcaagttgcttgcctatattagcgacaaagatttgtttgctgaattttataggaagaagcttgctcgaaggctcctttttgacaagagtgccaatgatgatcatgagagaagtattttgacaaaactgaagcaacaatgtggtggtcaatttacctcgaagatggaaggaatggttacagatttgacattgggaaaggagaatcaaacaagctttgaggag

SEQ ID NO: 1345 - DNA, 460 bp, Glycine max
  Clone ID: LIB3028-039-Q1-B1-E12
attttcctcatttccctccgaacatatcatatcacacacccatatagcccaaaagccacaacctgcgaaatcaaaaaagaaaaagaaagagaaaacaacaacaacaacaacaatatcgtattccattccataatgttgtgtaaactggttccggtgccgcgcaagaaaaaacccggtttgaacccggtttaccttaacgtctacgacctaaccccaattaacggttacgcttattggcttggcctcggagtttaccattctggtgttcaagttcatggggttgaatatggatttggagcaaacgaacgcgacacgactgggatttttgaagtggagcctagacactgccctggattcaccttcaggaaatcaattttcattggggtcaacggataatggggccgaaaggatgttcgcgcgttcaaggcgaagatgggtgaaaaagattcggggaaaacct

SEQ ID NO: 1346 - DNA, 517 bp, Glycine max
  Clone ID: LIB3028-039-Q1-B1-C3
cgctatcctattccgcgttctctcatccatcatgaaatgaggaaagtccaagaccgaatctaagagagccgatgccaaacttgctgtgaataagaacggcgccgccaccaagactaggaaacccgccggaaaggggaaggcagcgaaagatcctaacaagccaaagaggcctccaagtgctttcttcgttttcatggaggaattcaggaaggtgttcaacaaggaacgtcccgacaacaaagcagtgtctgctgtgggcaaaggtggctgggcaagatgggagacgatgtctggaggctggaaaagcgccttatgtgggaaagtctgagaggagggaagtggagtgcgagaagaacatgagagcttataacaagaaacaggcggaaggtcctactggtggggatgaagaaaaatcggagaagtctgtatctgaggtgaatggataggatggttacgaggaagggcattgggaggaggaggatgacgaataaagaatgggctgatgataatagcattt

SEQ ID NO: 1347 - DNA, 412 bp, Glycine max
  Clone ID: LIB3028-039-Q1-B1-E2
acaatcaatcaccgcttcctctctcactttccctaacttcgaagtcaccaagttcttatatttcaagacaaaaggaatggtgggtttatctcttggagaaacacatttcatccaaggtggcattgctcaagatcttcgttgtgatggtagaaagagattgacatatcgaccaatctctgttgaaactggggtgattccccagaccaatggttcagcaagagtcaggagggggtggcacagatgtcagtgggagcgtgtaagggtgaacttgggagggcgcaagcttggtgcaacctgagaaaggagaagtcgctagatatgtggagtgcagttcaacagcagagccagcttttgagggtagagggggtgatgagttggaagcagaactgtcaaatggtcgtcaacgctgtct

SEQ ID NO: 1348 - DNA, 319 bp, Glycine max
  Clone ID: LIB3028-039-Q1-B1-A10
cgtttttacatcatcactgtgtgaagataatatagatatggaaatctcccatgacatcaagatcaaggatgacaagctaggtggtgtgaaggaagagaagattaaggtagaagttgaactgaagaataaatcagttgagaaagagcatacaaaaagtaaagaagagaagaaacataaagatgaagataaatcaaagaaaaaaaagaaagagaaaggggaagaggaagatgaagagggagagaagaaagaaaaagatgtaaaagataaaggggaggatggtgaagagaaagagaaaaaggagaaggataagaaggagagg

SEQ ID NO: 1349 - DNA, 444 bp, Glycine max
  Clone ID: LIB3028-039-Q1-B1-A12
atgagatgtatttttggcgatccacgggaagcaccacctcctcttgagaagctcagtcctgaagcaactgtttcctttctctggaaaggagatggttcatttgttgaggagcttgttcagtgcataactcctcatgttgaagaaagcatcttgaatgatctcaagtttaaaattcatgctcacgatccttcaaattctggagatattcataaagagcttcgtaaatctctgttatggttgagggatgaagtccgaaatcttccttgtacatataaatgtcggcatgatgctgctgctgacttaatccaaatttacgcttataccaagtacttctttataatacgggattttcaaaccattacatcaacacctgtctatattagtccaacttgacttaagtcccaagtacactaacaagctgggagcagaaattcaagagtatcc

SEQ ID NO: 1350 - DNA, 376 bp, Glycine max
  Clone ID: LIB3028-039-Q1-B1-A2
gtcactgtttcgtcgtctctacttcttctcaaaccagaacagacagcaccgtcccaagcacctttgatctaggttgttagttttttctctctgaatttaaatgaaatggctcagaaaagacccccaaatagcagggggtactacgttaagatgaaactccttcacaaacatggcagacctcatcagcatcatcaggagcagcaagagaggaactgcctctagagatacgacaagtgggttctctgggattctcgttcggtctatttctgtacgtcggagctcaagagcaacacgagggaggagaaggggcacgcgaaagaaggagctcacgtctcgagagccctcatggaatcaaaccacaccacacctcctcaac

SEQ ID NO: 1351 - DNA, 201 bp, Glycine max
  Clone ID: LIB3028-039-Q1-B1-A3
tatgttgcagagacccccgtttgacagacgagcccagcctcggcatgctgccacaattactcttcaagctgtggcgtgcccatgagtttttcactgagatattgaaacggcatggaccaacaggtgagttcactggaccttggtttaccagcatggacgatttggtcacttgtgaccccatcaacgtccaccacatgctga

SEQ ID NO: 1352 - DNA, 448 bp, Glycine max
  Clone ID: LIB3028-039-Q1-B1-A6
ggtagtaagtgagtttcccttataaaattcaatccccaaaacaagtctcacaaaattgagaaaaatttagagagatcaacacacacaaacacaacaacatatggaggtgctaagggtgcaaaccatagcttccaaatccaaagatgctgccatcccagccatgtttgttagggcagagacagagcaaccaggcatcacaaccgttcagggggtgaaccttgaggtgccaattagtgatttgacggacccagatgaagggagagtggtgcatgagattttggaggcaagtagggacgggggcatgttccagagtgtaagccatgagataccaagtgatgttatgagaaagttgcaaagtgttgggaaaatgttctttgagttgccacaagaggaaaaagagttgaatgcgaagcctgctgggtctgattccattgaagggtatggcaca

SEQ ID NO: 1353 - DNA, 197 bp, Glycine max
  Clone ID: LIB3028-039-Q1-B1-A8
tgctgtgaaccaatgttcctgcaattcaaggtatagatgctctcataatcctcacaagtgctgttccagagataaaacctgggtttgatcctaccaaaggacaaagaccagagttctattttgatgatggtgcatatcctgagcaggttgactggattgggcagaaaaatcaaatagatgccgctaaggctgctgga

SEQ ID NO: 1354 - DNA, 425 bp, Glycine max
  unsure at all n locations
  Clone ID: LIB3028-039-Q1-B1-B1
aacaangatgagacgttgagaaaccgcactgggccaactaaaatgccttacactctgctctatccttctagtgaggagggattgactttcagaggaattcccaacagtatctctatctaagggctctctcattgaggttgctgtactactctgcctgtttttcaataatgtgaaataggaggaatatgattccttcatctacctacgtatggtcaagttacatttagggtggttgaatgttctcgtgtttgctgtagtctgtttttagaacagattgaggagaaagcaatagaggggatcacgcatgtttcaacgagtgatagctggcatgacaaagtgcaaactagaataaattatcatcctatctaaacgatttccattacaaaagaagagaaggaaggggggaggggggaggagggggagcg

SEQ ID NO: 1355 - DNA, 502 bp, Glycine max
  Clone ID: LIB3028-039-Q1-B1-B10
caccaaatcaaagacacctgagccattcaattcccctcctttattgctttcaagtttcaacactaattttattatctgaaaaaatggctttcaaagtttcgtttttccttgcacttgttctagtttccaatatcctcctccttgatacaacagctgctggacgcagcattggcgaaaactccaactcagaggaaaagaaagagcctgagttcttgttcaagcatgaaggtggggtgtatattccagggattggacctgttggatttccacataaatttcatctcacacctcaaaatccattacctggtggcaatggaaatggaggagcaggaaccgcaacaggatcaggatcaccaccaggtagcagttatgttcctggtggtgatgacacttttgtcccaaaccctggttatgaggttcccattcccggcagtggtggaagtgttccagcaccagctgcaccatgagttaactcaagcatgattaatgtgatgcatggtag

SEQ ID NO: 1356 - DNA, 379 bp, Glycine max
  Clone ID: LIB3028-039-Q1-B1-B2
tgacttgacaggactgcagaatggaattctgaagcgagggagagagattttcctcactgggtgcgacctccgaactcccactggaggttctggacattcacgtcttttgccaacagagtatcttgtgattctattggatgaagtaatggtcaaagattttttaattttaaatttgtccactgtgaagtttaattgggctaacaagaggagtgggtgagtaggctcaacaaacagagatgcctgttaggaagtgaagcccaatgagtcaatttaagtagagggacctcggagtatctgtttgcggagcacggcgatcagcgtgtggtagattctctcgtttcatctttctttattgcataacatttatcacgaaattttt

SEQ ID NO: 1357 - DNA, 210 bp, Glycine max
  Clone ID: LIB3028-039-Q1-B1-B3
atctgttccgtgttgtagctagctcctcgaaaatgctggcacgcctcgccgcgagtcgcttcaacgagatccgtcagattttccgtcagccttctagggctttctcaaccgctctgaactaccaccttgacacaccggacaacaaccctaaacttccatgggaattcaccgaggccaatcaagcaaaggttaaggagattttgtctcact

SEQ ID NO: 1358 - DNA, 192 bp, Glycine max
  Clone ID: LIB3028-039-Q1-B1-B4
ctctgatcttccaacaccttattcctcagagaagagacaaaatggatcaccatttcactgcagagaccgctcgcattattcgtcgcctcatcacatccctctcctcccttgccaccgccaccaacatcaatatcctccagcaagacctccaatccgacatcaccgaattctgcaagaaaaccaccaacgccc

SEQ ID NO: 1359 - DNA, 429 bp, Glycine max
  Clone ID: LIB3028-039-Q1-B1-B9
gctagtttatcgtgaggagaatatgaagttgtttgttttctttgttgctgcagtagttttggtagcatggccatgccatggcgcaggctaccaaaggttccctctccgaatgaaaactggctatggtgagcgttcttcggaggtaaaatgcgcaagttttaggcttgctgtggaagcacacaacatccgagcctttaaaaccattcctgaagagtgcgttgaaccaacaaaggactacattaatggcgaacaatttagatcagactctaaaacagttaaccaacaagctttcttttatgctagtgaacgcgaagtccatcacaacgacatatttatattcggcatagataacaccgtactctctaatatcccatactatgaaaaacatggatatggggtggaggaatttaatggaaccttatatgatga

SEQ ID NO: 1360 - DNA, 102 bp, Glycine max
  Clone ID: LIB3028-039-Q1-B1-A1
gaagatcgaggagaaaatagagggtgatcatcagcatcacaaggatgaggacacaagtgtccctgttgagaaagttgaggttgttgaaacagcacatgctga

SEQ ID NO: 1361 - DNA, 392 bp, Glycine max
  Clone ID: LIB3028-038-Q1-B1-F7
cagcggaataacgaagcctcctcgttcttcttcttccgccctttctctctctagaaccgtacggtcgtttctttctctctcctcaaccggagacagcgtcgccttcttttctgaatctcgcggtgttgttagttctgcggcggttgtagttccggcggcgatgggacagcaatcgttgatctacagcttcgtcgctcgcggcaccgtgatcctagcggagtacaccgagttcaccggaaacttcaccagcgtggcggcgcagtgcctccagaaactcccttcctccaacaacaagttcacttacaactgcgatggccacaccttcaactacctcgttgataacggattcacttactgtgtggttgctgttgagtctgctggacggcagattc

SEQ ID NO: 1362 - DNA, 390 bp, Glycine max
  Clone ID: LIB3028-038-Q1-B1-F8
aagacaaccatgcctcagtgagtctcttcatggacaagtttggctacaccaagttcaggactccagctattcttgtcaaccctgtgaaccatcattgctttcaaatatcacccaacattgagatagcaaggttgaagattgaccaagctgagtacctcgatagaagattcatggggtccagagagttcttccctaatgacatagggaatatacttaggaacaagctaagtttggggacatgggtggcatatttcaaaggagatattgcttggggtgattttgggtcagatggacaagtaccaaatagttgggctatgcttagtgtatggaatactggggagatattcacgttaaggctatggaaagcacctttttcttgcttggtatgca

SEQ ID NO: 1363 - DNA, 379 bp, Glycine max
  Clone ID: LIB3028-038-Q1-B1-F9
aagcactatagtaaaaaaaggacattcattcatctatggctacccttattgctcccagcaaccactctccccaagaagatgctgaagctctcagaaaggcttttgaaggatggggaactgatgagaacactgtcatagtaattttgggtcatagaactgtgtatcagaggcagcaaatcagaagagtttatgaggaaatttaccaggaggatcttgtgaagcgcctagagtctgagatcaaaggagactttgagaaagccgtgtaccgatggatactggaacctgcagatcgtgatgctgttttggccaatgttgccatcaagagtggcaaaaactacaatgtcattgtggaaattgccactatcctctccccggaaga

SEQ ID NO: 1364 - DNA, 387 bp, Glycine max
  Clone ID: LIB3028-038-Q1-B1-G10
gcaaagatggggaacacggagaagctgatgaaccagatcatggaattgaagttcacgtcgaaatcgctgcagcggcaatcgcgtaagtgcgagaaggaggagaaatcggagaagctgaaggtgaagaaggcgatcgagaaaggcaacatggacggagcgcggatctacgcggagaacgcgatccgtaagcgcacggagcagatgaactacctccggcttgcctcgcgcctggacgccgtcgtggcccgcctcgacacgcaggcgaagatgacgacgatcagcaagtcgatgggcaacatcgtcaaatcgctggagtcgtcgctggccacggggaacctccagaagatgtcggagaacatggactcgttcgagaacagttcgtgaaca

SEQ ID NO: 1365 - DNA, 381 bp, Glycine max
  Clone ID: LIB3028-038-Q1-B1-G11
ctcacgcatttcctcgtttttttcttcccttttctctttctccggcgacgatctcagattccggccactcctctcgccggcgagcccttactcttccctcctccgtcgagccctctccgattcgaatcgttcccagcctcgcaccaccatgaatcccgaatatgattatttgttcaagcttttgctgattggagattctggtgtaggcaagtcatgtcttctcctgaggtttgctgatgattcataccttgacagctatatcagtaccattggagtggactttaaaatccgcactgtggagcaggatgggaagactattaaacttcagatttgggacactgcgggtcaggaacgtttccgaacaatcactagcagctatta

SEQ ID NO: 1366 - DNA, 402 bp, Glycine max
  Clone ID: LIB3028-038-Q1-B1-G3
gagagagaaagagagggagtaagtgggtaaaggaaagaaaactaaagaaacaaacctaacacaacacaaatccttgaaacgacgacggaaatggccgtttcgagctcgcacatgcgtttcacctttgagtgccgctccgatcccgatttttcgccccccccgccgtccttcgacaacctccgccgccgaaacttccgctcctccgcaggatccggcgcggcgtttcacggcatctcctccctcatcctccgcttccctcccaacttccagcgccagctaagcaccaaggcgcgccgcaactgcagcaacatcggcgtcgcgcaaatcgtcgccgcttcgtggtcgaacaacagcgacaactctccggccgccggggctccggcgccgcccgcggccaccgcc

SEQ ID NO: 1367 - DNA, 396 bp, Glycine max
  Clone ID: LIB3028-038-Q1-B1-G4
tgacaattctatacaagcgtaacgtttgcttaggatgagaaaaagcaaccacttgatcggtctcttaaacttcctaacattcctgctgtcgattccgatcctacgaggcgggatatggctgagcagcatggcgaacaacaccgactgcctcaagttcctgcagtggccgctcatcatcatcggcgtcagcatcatggtcgtgtccctgatggggttcgccggcgcgtgttaccgcaacaccttcctcatgcggctctacctcgtcgtcatgttcctggtcattgccgttctgatcgggttcatcatattcgcctacgttgtcaccgacaaggcgtccggtccgaaggtgatgaaccacgcttacctggcgtattatcttgaggactattcggggtg

SEQ ID NO: 1368 - DNA, 391 bp, Glycine max
  Clone ID: LIB3028-038-Q1-B1-G5
tgaaatttccccaaatctgaatgggaacatttgccctaacccatttccctctattcggctcctccagttacgacgaccacggttcccggatcctgcgctcatcggttctccggggaagcgtatgatggattgcggtgttggctccatcgtgtgggtgcgtcggagaaacgggtcgtggtggccgggtcaaatcctcggccccgacgacctctccgcctctcacctcacctcgccccgatccggaacccccgtcaagctcctcggcagagaagacgccagcgtggattggtacaatttggcgaaatccaagcgtgtgaaggcattccggtgtggcgagtttgatgattgtattgaaaacgctgaatccgctcagggagggccgttgaagaaa

SEQ ID NO: 1369 - DNA, 395 bp, Glycine max
  Clone ID: LIB3028-038-Q1-B1-G8
aggacacattctacatatctcatggatcaccaactttgtccatagatgaatccattcaggccaggaagttccttcagtcatggaagaaggacgtgtttcctcaaagaccctcttcaattcttgtcatctctggtcattgggaaaccgcagttcccacggtcaacgtcgttgactccatcaacgagaccatctacgatttctatggcttccccaaacaaatgtaccagcttaaatatcctgcacctggagctccacaattggcaaggagggtgaaggaactactcaagaaatctggtttcagccatgttgatgaagatagaaagcgaggacttgaccatggtgcttgggttcctctctttttgatgtatccagaaactgacatccctgtttgtcag

SEQ ID NO: 1370 - DNA, 303 bp, Glycine max
  Clone ID: LIB3028-038-Q1-B1-G9
gttttctttccttctttggggatcaagctgccaccatgggttgctggtgcatgcatggctctgtcatctgtaagtgtcgtatgctcttctttgcttttgagaagatatagaaaacccaaacttactacaatacttgaaatagttgtaaattaacgagaattgaaacagaataacttgagggtgcaaatgaatttgacccttgtaattccaattttgtgcattttcctttagatccgctgcacccattggggtgcaattgtaattgtagctgccaattcattgtaaatgctcttgtaatttcat

SEQ ID NO: 1371 - DNA, 374 bp, Glycine max
  Clone ID: LIB3028-038-Q1-B1-H10
ctatgatgatcacaaccatgaaagatttcccccaggtgacccaagcaagagggcatttgcctacttcgtacttacaggtggtaggtttgcttatgcctctgtggtccgtctccttgtcctcaagtttgtgctaagcatgtctgccagtaaggatgttcttgctctggcttcacttgaggttgacctctccagcattgagcctggcactacagtgactgttaagtggcgtggaaagcctgtgttcatcaggcgccgaactgaggacgatatcaagcttgcaaatagtgttgatgttggatctcttcgcgatccccagccggatgcagatagagtcaaggacccataatggctcattgttattggggtttgtacac

SEQ ID NO: 1372 - DNA, 216 bp, Glycine max
  Clone ID: LIB3028-038-Q1-B1-H12
gtttgttgtgagctataagctattttatcgtgaggagaatatgaagttgtttgttttctttgttgctgcagtagttttggtagcatggccatgccatggcgcaggctaccaaaggttccctctccgaatgaaaactggctatggtgagcgttcttcggaggtaaaatgcgcaagttttaggcttgctgtggaagcacacaacatccgaccctttaa

SEQ ID NO: 1373 - DNA, 396 bp, Glycine max
  Clone ID: LIB3028-038-Q1-B1-H3
tgctaggcctaatccacaagggtcattccattatgggaagattactcctacaaaagtaattaagttggccaattcagcacctttgatcaatggaaagctccgttatgctgttaacagtgtctcatatgttaaccctgacacccctctcaagcttgctgattacttcaacattcccggagtcttcagtgtgaatttactccaaaactctccctcaaacggtccaggatacataggcacctcagtgttgcaaacttctctccatgattttattgaggttattttccagaacaacgagaacaccatgcaatcttggcatcttgatggttatgatttttgggtcattggtcatggtttcggccagtggacagatgctagcagaaaaacatataatctagt

SEQ ID NO: 1374 - DNA, 393 bp, Glycine max
  Clone ID: LIB3028-038-Q1-B1-H5
tagtacttgacgaagcaaccgcagcagttgatgttagaacagatgcactcatacagaaaacaattcgagaggaattcaaatcttgtacaatgctcattatagctcatcgccttaacaccattattgattgtgatcggattcttttgcttgatggtggtaaggttcttgaatatgatacccctgaggagctgttgtcaaatgaaggtagtgctttctctaagatggtccaaagtacaggagcggcaaatgcccaatatttacgcagcttagcccttggaggggataagtcagaaagagaagagaacgagcatctagatggcaagagaaaatggcttgcttcttctcggtgggctgctgcagcgcaatttgctctcgctgttagtctcacctcat

SEQ ID NO: 1375 - DNA, 378 bp, Glycine max
  Clone ID: LIB3028-038-Q1-B1-H6
gatgtttttagatctaaagaaatcaaactagcattcctcgtcggagctgggctgcaggctttccagcagttcacaggaataaacacagtgatgtactacagccctaccattgtccaaatggctggtttcaactctaatgagttggctcttcttctgtctctcatagttgccgccatgaatgctactggaacaattcttggcatttacctaattgaccatgccggccgcagaatgttagcactttgtagcttacgaggagtgtttgcatctttgatcgtcttgtctgtctcatttttacacgaatcatcatcttcgactggatggcttgcagtgctgggtttagtcatatacattgcatttttctcgccggggatgggg

SEQ ID NO: 1376 - DNA, 388 bp, Glycine max
  Clone ID: LIB3028-038-Q1-B1-H7
gttttctaaatctcattcgtcacctgcaactatttggattgctgatttttgttaataccatatttactgatattggcgcatttctttgagaaagttactaattcctagatagaggcaaaaatgttgggaattttcaaggagaagttggttaaagcacccaaagagctgaacagtcgagcttcgttgaattcatgcactaagcctaagctaagtcacgaaatccttcaggatttcatgtcctgcaattcctccaatgctttctcaatgtgctttgggaatgaagctttgctagcctattccccttcaaacaagccctccattcagcaaaggttgtttagtggtttggataacatatactgtgtcgtcctgggtggcctgcacaacctta

SEQ ID NO: 1377 - DNA, 168 bp, Glycine max
  Clone ID: LIB3028-038-Q1-B1-H8
cccaccttttttttccaatccagctgtatataactgttccgtttgctggtatggaacacgttaacggagtttggaactgttcaaacgggaaaccaaacactcacatgtattgttgattatggatgacatctcttggtaataatgatattccgttgatgttgccgtgcc

SEQ ID NO: 1378 - DNA, 297 bp, Glycine max
  Clone ID: LIB3028-038-Q1-B1-H9
ctttcactcttcttcgtctcaaacctcttcgttccttcgattcattccatttcttccaaaatggccaaagacccagttcgcgttctcgtcactggagccgcagggcaaattggatatgctcttgtccctatgattgctaggggagtgaagctgggtcctgaccaacccgtgattctcacatgctgaaattctcaacacaaatcgttatggggtaaaaggaattggtgagcgcatcctctctaaggtgtgtgctaaacgattggttaggcagatgggtatatgcttatggtgtgattc

SEQ ID NO: 1379 - DNA, 379 bp, Glycine max
  Clone ID: LIB3028-038-Q1-B1-D9
ctcgagccgaatcggctcgagtctttatagaaatctaatcgtttttagttcatacagttatcaaaagtgaccccacatcagaactaaaaacatgtgcttctgttagtcattaaaaatctattaagtttgtagggttaattaatagggagtgaaaccaaattttgagagtcaacattatctcttgtctctctctctctctctgttctgttgtgcatgatttgctattcctactgatttttctcattgagctccccgttggcccatataacctgcaaattttttactactttacaatgtgcagagctaccaggtgttcttcaagttgttcctagcaggacatatcagctccatggaccaaataacctgcagtagagaatgt

SEQ ID NO: 1380 - DNA, 383 bp, Glycine max
  Clone ID: LIB3028-038-Q1-B1-E10
cattgttgatgaaaaaattaaagagattgaacctctgcagcaggcactgggcaagctgcgtactgcaaataatgctggtcggggtgttggattatgctcatctgaggaggagcttaacaatcttattaatagcttgcactaccgcatacaacatgaaagcattccgtttgctgaagaaaaacaaatccttcgagaaattaaacagctagaggggacaagggagaaggttattgctaatgctgccatgagagccaaagtacaagattctatggggcagaaagaagccattcaagatcaggttaagcttataggtggtgatttggatggagtcaaaaaggagaggcaagcaatccggtccaaaatcaagcaacttgaagatacag

SEQ ID NO: 1381 - DNA, 131 bp, Glycine max
  Clone ID: LIB3028-038-Q1-B1-E11
ttttgagttaagtttatgtcacttgaacaatcttgtgtcaagcaatcaatatttgctattatcttcatcagcaactgtattcaatgaacttaagaaaagtataatattttgataatataattatccttatc

SEQ ID NO: 1382 - DNA, 160 bp, Glycine max
  Clone ID: LIB3028-038-Q1-B1-E3
gtcatgtcatatcccttaacacctgttgagttagattcaccgtgggtatccaatttatatactgcataaaacatcgagtgaatgtgtagatagtttactttcaagcaagtgaagtgggtggacgtttgactattcaacacactaatttcggaattacatc

SEQ ID NO: 1383 - DNA, 379 bp, Glycine max
  unsure at all n locations
  Clone ID: LIB3028-038-Q1-B1-E4
ttgtgtttgggccttccagcgaccatgaaaggatcaatttcttcccagggatttctgattctaccattacgtcagcaggtgtaagtgaaagagaaaggctagcatcaattcaacacgaaatctggagggttgccagagccattcgaagagctgcttctgcactcagaggagaattcacctaaaaaactaaatgtgaaaaaaaaagttaagttagaggagaatggagatggatgaaatcatctccgtttgagttacctgtaaatatagtagtgtttctttttaacacgagcagagttacctgcattttgaggtatataactgtacattaagttgtaaaaaaggagatgaatgaacatgccagcagtttgaagacacanna

SEQ ID NO: 1384 - DNA, 391 bp, Glycine max
  Clone ID: LIB3028-038-Q1-B1-E5
ctgcatcctttgggatctcttgcatagaccaaccccagaagaagaaggaaaaaaataaaaaaaaataaaaatcaaccctttttattttggggcttgttggtgattctgttgtacagaagtgttcgttagttatacatttgttcaagattgttgtatagattgattcattattttaacgtactttggagcattgcatgagtgattgccctctgattcttttgtgaagtcaactaaagtccctataattacaaactgagattcagaagcctccggtaggggtatagctagagcttattgccttgttaacacagtgtgaagaagatggctggtattaagagaagattatgtagtgattcagatattcatgctcttcacaaagaattggatgaag

SEQ ID NO: 1385 - DNA, 390 bp, Glycine max
  Clone ID: LIB3028-038-Q1-B1-E6
ggagtaccttgaacaggttcgaaccattgtgaagccaggatgcccccaggaggttttgaaagctgctctaagtgtcatggcgtcggttactgaagttctagctgcaatgtcaacatcttctactaacaccctgtcagccatgtgagagtaacaaatggatgttgtattctttccaaaattttctggcacgaggttttagtttctacattttattgccatggaagtagttgttgattggcaataagagttatagctgacatggtgcatgtcaacgtgagatgagatttactgtaatcaaagttttggctctctatgttccctactgggtcatttttttttttacaaaacatgagggttccgtgtgacactgataatttagcttggtgcttg

SEQ ID NO: 1386 - DNA, 389 bp, Glycine max
  Clone ID: LIB3028-038-Q1-B1-E7
atcaaagtttcttcctttctctgctctttgccttctctgacacatttggtgccttgtagagcgtgttttggcaggaaggtggtatggcgaaggacgttgaggttgctgagcgtggctccttctctgggaaggactaccaggaccctccaccagcaccactcattgatgctgaggagctcacaaagtggtccttttacagggctctcattgctgaattcattgccactttgctcttcctctacattactgtgctcacagtcatagggtacaagcaccagactgacctcaaggaaaatggtgaaatctgtggtggggttggcattcttggcattgcatgggcctttggtggcatgatcttcatccttgtctactgcactgctgggatctca

SEQ ID NO: 1387 - DNA, 369 bp, Glycine max
  Clone ID: LIB3028-038-Q1-B1-E8
gtagagtttgttgagcaaaagagccattttcttctgattctaccaaatctagggttagggattcgatttcccaacttcctctttctcacccgattctttttcctttttctttttcttcctgacaaattttccgtctatttttctctctcttgcaaattacgataaccactcttcctcgatctaccctgtttccgatagaaacatggcatttattttcccgggaaaatactcctcatagttttcagggccaacctttcgtccattagatcattccatcatcaatttgttgtagaattccaatttcctaggttgtcgatcgatctactgatccgccaattgtactttggggcaattagattttactttttt

SEQ ID NO: 1388 - DNA, 380 bp, Glycine max
  Clone ID: LIB3028-038-Q1-B1-E9
gagaataatggcattcttccaagtgagtgtcaggcgttggattttaacctttgctatcctttacgtttgtgtatttgggaaaaactttggaaatgctgatgaggatgagtccgaggcacagacaggtggtggtgggtacggtggtgtgggaggtggttttggtggtgctggggccggagttgttggtggtggtggtggatttggagccggtggtggtggttttggagccggtggtggtggggttggtagtggtgaccctgctcaaattgtctccaaagccttgctctgtttcaatgataagaatatttatcgcagctgcgaagagacgtgtagattgaacgagaatggaaacctgaatgtgcctgtagagaaaactgata

SEQ ID NO: 1389 - DNA, 388 bp, Glycine max
  Clone ID: LIB3028-038-Q1-B1-F10
gtttaaagttacatagtttttcattgttttacttaatctacaatggctgcttcaacaatggctctctcttcatcatcattggctggccaagctatcaagcttgccccctccacccctgagcttggtgttggaagggttagcatgaggaaaacagcctccaaaactgtttcctcaggaagcccatggtacggcccagaccgtgtcaagtacttgggcccattctcaggtgagcccccatcctatctcactggtgaattcccaggtgactatggttgggacactgctgggctttctgctgacccagagacttttgccaaaaaccgtgaactggaagtcatccactccagatgggccatgttgggaaccttgggctgtgttttccctgaac

SEQ ID NO: 1390 - DNA, 381 bp, Glycine max
  Clone ID: LIB3028-038-Q1-B1-F11
gtgccaaagttcatattaagagagaaagagagagagagatagaagggaaaaaagcatcaaagatcatgaaacccaacttttcctttttatctaagcttttgatactgcaatatctatcagttttatgcatttctcaggaatttgatttcttctactttgttcagcagtggccaggagcatactgtgacacaaagcagagctgctgctatcctaagactgggaaacctgctgctgatttcagcattcatggactctggcctaacttcaaggatggctcatggccctcaaactgtgaccctgacagtgtctttgataaatctcagatctcagacctcattagcaacatggagaaggattggccatccctgagctgcccaagta

SEQ ID NO: 1391 - DNA, 380 bp, Glycine max
  Clone ID: LIB3028-038-Q1-B1-F12
gttcatttctacacatccctagctctgtcgttccgtcgttgacgatggcgtttcgggtgcgatgccctgacctccgctctctctttcttctctctctcttgtccatcgcttccgccaatgtcttcttcgaagagcgtttcgatgacgggtgggaaaatcgatgggttaaatcagattggaaaaaagatgagaacgtggctggggagtggaaccacacctctggtcaatggaatggagacgctaatgacaaaggtattcaaaccagtgaggattacagattctatgctatttcagctgagtaccctgaattcagcaacaagggtaagacactagtctttcaattttctgttaagcacgaacagaagcttgactgtggtggt

SEQ ID NO: 1392 - DNA, 397 bp, Glycine max
  Clone ID: LIB3028-038-Q1-B1-F2
ctctctccagtggccacggacctcgaaacggcgattcacagtgggttgcctcacaaggacgaccacgacccaccccccgccccattctacgaccccgccgagctccgaaagtggtccttcttccgagccctcatcgccgagttcgtcgccaccctcctcttcctctacgtcaccatcctcaccgtcatcggctacaaccaccagacagccaccgccgccgagccctgcagcggcgtcggcgtcctcggcatcgcttgggcctttggcggcatgatttttgtcctcgtctattgcaccgccggcatatcagggggacacataaacccggcggtgacgttcgggttgtttttggcgaggaaggtgtcgctgacaagagctgttgggtacatggtggctc

SEQ ID NO: 1393 - DNA, 396 bp, Glycine max
  Clone ID: LIB3028-038-Q1-B1-F3
gttgaaacacaaagaagaaaaaatgggttcctctttgtggacttgtctgattttgttatcacttgcttctgcttccttcgccgccaacccaagaacaccaattgatgtgccatttggcagaaactatgtgcctacttgggcctttgatcacatcaaatacctcaatggtggttctgagattcagcttcatcttgataagtacactggtactggcttccaatccaaaggatcctacctgtttggtcacttcagcatgtacataaaattggttcctggtgattcagctggcacagtcactgctttctatttatcatccacaaactcagaacatgatgaaatagactttgagttcttgggaaacagaaccgggcaaccttacattttgcaaactaatgt

SEQ ID NO: 1394 - DNA, 398 bp, Glycine max
  Clone ID: LIB3028-038-Q1-B1-F4
gtaaaactcgactttgatttaaatgaaggctttcctgttgatgatgtaagccaaggggagattgctaggcaggaagatcctatcacatcatctgcagttcatgttccttgcctattgccttttcctatttcgtccatctctgggggcttccatgcttcaattacagtggcatctgctgcaaaggggcctgttgttccacctgaaaacccattgcggattaagggggagcttggttggaaagggtcagccgctaccagtgcatttcggccagctgaacctaggaaaaatgctgagacagcatccactactaatgatattgcttctgttgacggcacttctatcaaacaaggtcgccctcccttagattttgacttacatgtggcagatgaaagatgttt

SEQ ID NO: 1395 - DNA, 393 bp, Glycine max
  Clone ID: LIB3028-038-Q1-B1-D8
agttccggttcttgggagttggtactgtacgcacattggcagtttcagttcttggtattgtgtggctgatttgattctttaacttccattgccacaagtaaataatattttacagcacttaattgatctgtgattctaatagtaactcaaaagatgagaattttggttgctttctctgctcaaactgcgaaacagtagcattaattactgaaatgagatagttgtgttcaatctagagtgaaatccagtgcttagcagatgtttgtggtgctctgcactgtgaccatgagatgaattctggatctaacacatcaacgtgtaatcctgctgctgctgcaaaacatacacatctatgtgaggtatgctttgttctgtctattcatttgctataat

SEQ ID NO: 1396 - DNA, 376 bp, Glycine max
  Clone ID: LIB3028-038-Q1-B1-C10
cttttctggacaagactttcgatgaggaaaacaaccttgacacggcaagaaacaccaagcttgacacaaaccttggattgcggccaatgtaagttgctatttggttccacaaccgtcgaactcgctggaagaccacgacgctggataaggattacgaggctctgcatgcaagttttgagaatcttaagtccaactatgacatcctcctcatggagaaagacagcttatgaactgaggtggcaagcctcagtgagaacgtgcttgacaaagggaaataacaggggcacatcgaccagcacgctgaaagtgcatactaaacacaaagattattgcacttgcaagaacatgatacaccccagaggcttttactggaatc

SEQ ID NO: 1397 - DNA, 372 bp, Glycine max
  Clone ID: LIB3028-038-Q1-B1-C12
ggagcacgcgaactgatgtgtattcgaatcctaggagctagtaatcgacgatatgcttatattggtgacattgttgttgctgtaatcaaacaagcagtaccaaatacgaacttagaaagatcagaagtgatcagagctgtaattgtacgtacttgtaaagaactcaaacgtagcaacggtataataattcagtatgatgataatgctgcagttgtcattgatcaagaaggaaatccaaaaggaactcgaatcttttgtgcaatcgcccgggaattgagacagttaaatttcactaaaatagtttcattagcacccgaggtattataagacgaaactgtgctatggatacattatttttttgtgaaatagatt

SEQ ID NO: 1398 - DNA, 395 bp, Glycine max
  Clone ID: LIB3028-038-Q1-B1-C3
gcgtggccttttatacatcaaacggtgatgtgttcgagaagtcccatgatgagttggactttgaattcctaggtaacgttgccggaaaaccatggcggtttcagacgaacttgtacggcaacggcagcacaaatcgtggccgtgaggagcggtaccgtctgtggttcgatccaaccaaagaattccacagatacagcatcctttggaccgcaaagaatgtcatattttacattgatgaagttccaattagagaagtgctacaaagtgaagaaatgggaggtgactacccatcaaagccaatgtcattatacgccaccatatgggatgcatcaaattgggccacatccggtggaaaatacaaagtgaactataagtatgcaccttttgtgaccgaa

SEQ ID NO: 1399 - DNA, 394 bp, Glycine max
  Clone ID: LIB3028-038-Q1-B1-C5
cacatattctttgttgcaatatcacaaacacctcgtccgtcacaatgcagctagctgtggcggccaacgctgtcgtttcaccgtcgccgttccgacctcatccccttctccggtcatccttctccggcgtctccgttaagctcactccccaatccataacgttttcacgcttgaagcccctcaccgtcgtcgccgccacgaagaaggccgtcgctgtcctcaaggggacctccgccgtcgaaggcgtcgccactctcatccaagaagacgatggcccgacgacagtttctgttagcatcactggccttactccggggcttcatggttttcacctacatgagtatggtgataccacaaatgggtgtatatcaacaggagcacattttaatcctaa

SEQ ID NO: 1400 - DNA, 392 bp, Glycine max
  Clone ID: LIB3028-038-Q1-B1-C6
ctttatatgacagtttaagctgtgaggtgagtacatttcttagcaaggtatcaaagcctgtttgaactataactagtggtcaagttttcaactcttccactgcattcttcatacttgaatgaaagttgagtatttaactttgtcctatattttcaactctgatggcaccaaataccggaggggactactttatccaaagcttaattcttcccaggcgacttcggctgcacttttacctaacttcttcccaaacagattttagaccgccttcttcttaacaaaatcatttttttttttacaaaataaggtgagcttattatttacctttacttcaaggacaaaaggctttgctctagtgccgtgtttgcgatatatatcaaaataaattttgg

SEQ ID NO: 1401 - DNA, 393 bp, Glycine max
  Clone ID: LIB3028-038-Q1-B1-C7
ctcgagccgattcggctcgagaaaaaaccccaagctcgacaccttctactacctcgagctcctcgggatcagcgtcggcggctcgccggtgcgcggcctctccgcctcgctcttccgcctcgacgcagcgggaaacggcggcgtcatcatcgactcgggcacctccgtgacccggctcacccgacccgcctacattgccctccgagacgccttccgcgtcggggcctcgcatctgaagcgtgcagcggagttctcgctcttcgacacgtgtttcgacctgtccgggctcacggaggtgaaggtgcccacggtggtgctgcatttccgaggtgccgacgtgtcattgccggcgacgaattacttgattccggtggataacagtgggagcttctg

SEQ ID NO: 1402 - DNA, 392 bp, Glycine max
  Clone ID: LIB3028-038-Q1-B1-C8
gaacgatatcaggaactggatccaacattttcaggaacacgtgaatatagattgttggcggacattgctgctgcaattgatgaagaagatgttgcaaagtttactgatgttgtcaaggaatttgatagtatgacccctctggattcttggaagaccacacttctcttaagggtgaaggaaaagctgaaagccaaagaacttgaggaggatgatcttacttgaattgtacctttaatattcctggtggttggacctattgtttgatgatttacattgtactactatgtgtgtctgtccagttgttcgtcttacacatccacttacagagtgtacctgctttggttttaattgaattggtctgactgaattcaaaaaatgagtttttactgaaa

SEQ ID NO: 1403 - DNA, 386 bp, Glycine max
  Clone ID: LIB3028-038-Q1-B1-C9
cttggttttaattggtataggcttgccaaggtcttgttgattgagcgttaagtgctttaactaatcaatcccaagaccttggtttaccttgccacacaaaaaaatatataaaaaggcaaaataataataaaaaaaagagaaggcttggagccaagaaaataaacacaaagcacaagtcatggaaagaataatggttggaagtgcaacaaaggttgctttcaacctcttggtcactttcgccattgtcattccatgccttgaggctggcattgctgagtttgatgactttctcaaagcccaagctgatgaagcacaaaaaattgctcttgaggcctatgtcccagtgccagaagatgtcaccgacgaactcaatttccatgttcatt

SEQ ID NO: 1404 - DNA, 387 bp, Glycine max
  Clone ID: LIB3028-038-Q1-B1-D1
ttcgaaaaccaaaagcatgggtcagggaacaccgggcggtctgaaccggcagggtcttccgggggaccggaagccggacggcggcgacaagaaggagaagaagttcgagccggcggcgccgccggcccgcgtgggccgtaagcagcgtaagcagaagggcccggaggcggcggcgcggctgccgacggtgacgccgctgtcgaagtgcaagctaaggctgctgaagctggagcgcataaaggactacctcttgatggaggaggagttcgtggcgaaccaggagaggctgaagccgcaggaggagaaggccgaggaagacagatccaaggtcgatgatctccgaggttctcctatgagcgttggtaacctagaggaactcattgacga

SEQ ID NO: 1405 - DNA, 381 bp, Glycine max
  Clone ID: LIB3028-038-Q1-B1-D11
ataactccctgtaatgtgcactagtaaagaccaaagtatgattattgttacattatgttacatggttgtacttgtatatacatatcttgtcccacctttgtaaatacaattgggacactactaggattgggaagaagggtctttacatttatagtttggcaaatagatattgcaactacctttgtataattctatttctgaagaagcaattacaatttacaagggatggtgccatttacggcataaggattaaggagggataaagggaccaattgctttggaatatccactcattacaatgcatgtatgacaacacatagtaatatgatgtgtgtttttattcagtgggcaactggcagatcgggttttccctggtcactt

SEQ ID NO: 1406 - DNA, 369 bp, Glycine max
  Clone ID: LIB3028-038-Q1-B1-D12
agctgttgtaagaaggtgaaacaatggaccccctattaagttcctccttcctctcagatatgccgctgttctcgctctaattcgtctagcgctgcgggataaacccgtcttgagagatcgcttgtttactgctgtgttggctggggcctttgctcatggcttctatttggtaccagatctgtaggatattgagagcacgtgattaagcatagcatgtttcagacatttcttcggcatcatttacatcacaacctcaggtcttcagtaaatttcttcgacgactatttacagctaaacattctggtaatgccttaaatagcattggtcaattttcaagatgtacaaatatttttttcaattatattgaca

SEQ ID NO: 1407 - DNA, 308 bp, Glycine max
  Clone ID: LIB3028-038-Q1-B1-D2
tgaaaattgctaactactacaagttttgtcgagaagtcagtgaaacaatgatggtatctttttgaggcatttaactttcattatagttgtttgatgaagaacttgaggaatgaccaaaggtagtcaatgacaattgacaccacacctgtggtggcaacctgaaattataaatggcccagaccaacctcaggtctgaattattaccttgtccaaaggatataatttggcgcacaaaaattgagacaccggtaaaaaaacctaaaacgctatacaaagatttctctaggacacatttacagtgttttcac

SEQ ID NO: 1408 - DNA, 117 bp, Glycine max
  Clone ID: LIB3028-038-Q1-B1-D3
gttcaattgcctcaataatcttctcagcattgccgttgtaaattgatttgtatgtattattccaagaatagaactaattctctatttttggtttaaataatatttgtatttcctttc

SEQ ID NO: 1409 - DNA, 401 bp, Glycine max
  Clone ID: LIB3028-038-Q1-B1-D4
ttcgaaatccaccgatctctctcattcttcaatggccaccctttccgcatgcgcttcccctccatggccaaaccctaattctcccaattcaaatccagaccctaatttcctccccgatcaatcccaaaccctcgacttcgactccctcatgcctccgcaacccgaatctccaccgccccaccagcaccactcccccgacgcatcgccgccggaatcctccccatcgctcccgccgccgtcgctcctctacctctccttcaaccaggaccaggcctgcttcgccgccgccgccgacagcggcttccgcatctacaactgcgaccccttccgcgagctcttccggcgcgatttcgacggcggcggaatcggccacgtggagatgctcttcctctgcaacatct

SEQ ID NO: 1410 - DNA, 391 bp, Glycine max
  Clone ID: LIB3028-038-Q1-B1-D6
ctcacttgaagatagattgcagaggcaagtgagcactattagtcaagccctaatatttgtgactcggtcacggggttggtcttatgttgaacgtcctggtattttgcttgtgacagctttcgtgattgctcagctaattgccactttgattgcggtatatgccaactggagctttgctgccatcgaaggcataggttggggatgggctggagtgatatggttatacaacataatattctatatcccacttgaccccatcaagtttttaattcgatatgctttgagtgggagggcttgggagcttgtcattgagcaaaggattgcattcacaaggcaaaaggactttggaaaggaacaaagggaacttcaatgggcacatgcacaaagaaca

SEQ ID NO: 1411 - DNA, 391 bp, Glycine max
  Clone ID: LIB3028-038-Q1-B1-D7
tatttgggttcgattgccactgcagctaacaagcctgctttgaaagactgtaatattactcacattttgactgtggctggtagaataccacctgcacatcctaacgattttgtctataaaattatagacgttgttgacagagatgatgaagacttaaaacaatacttcaatgagtgttttgattttattgatgaagccaaaagactcggtggaggtgttttggttcattgttttgctggaagatcaaggagtgtgactatagttgtggcatatctgatgaagactcgaggaatgagtttttttgaagctctgaaacatgtgaagagtatacgaccagcagcaggtcccaatcagggtttcatttgtcagctggaggactttgaaaagtctc

SEQ ID NO: 1412 - DNA, 385 bp, Glycine max
  Clone ID: LIB3028-038-Q1-B1-C1
ctgcaacgatgtcggttaaggagtgccaccaccaccacaagggaaagaagcacaagctctggagacgcatcttctggggaatagtgatcttcgccttcatcgtgttactgacagttcttataatctgggcaatcctaaagccttcaaaaccaaccttcatcctccaagacgtcaccgtttacggcttcaatgccaccatccccaacttcctcacctcaagttttcaggtcacgctttcctcgcgcaaccccaacgacaaaatcggaatctactacgaccgtctcaacacctacgtaacttaccggaaccagcaggtcacgtaccgaacctcaatcccaccctcgtaccaaggtcacaaggaagaggatgtgttggtcccgtttgt

SEQ ID NO: 1413 - DNA, 400 bp, Glycine max
  Clone ID: LIB3028-038-Q1-B1-A2
ccaatatattccattctctctgtgtatttccctacctctcccttcacaatgcagatcatcgtcaagaccctcatcggtaagaccatcacccttgaggtggaaagctctgacaccatcgacaacgtcaaggccaacattcaggacaaggaaagaatccccccggaccagcaacgtctcattttcgccggaaagcaacttgaggacggccgtacccttgctgactacaacattcagaaggagagtactcttcacctcgtcctccgtctccgtggtggcatgcagatcctcattaagacactcatcgggaagaccatcaccctagaggttgaaagctccgacaccatcgataacgtcgaggctaagatccaggacaaggatggtatccccccggaccagcaac

SEQ ID NO: 1414 - DNA, 401 bp, Glycine max
  Clone ID: LIB3028-038-Q1-B1-A4
gtgctaagaaggaatgagaatgctctagtacggaactacaaacatggtttctcagggttcgcagctcgtctatcaaaaaaggaggcaacctcaattgctcagaaacctggtgtggtgtctgttttccctgacccagttctgaaactccacactacacggtcatgggatttcctcaaataccaaactcaagtcaaaattgacaccaaaccaaatgcggtctccaaatcttcttccgtcattggtatcttagacacaggtatatggccagaggcggcgagttttagcgacaagggtatgggtcctgttccatctcgttggaaaggcacctgcatgaaatcacaagacttctattcctccaattgtaacaggaagctaattggcgcaaggtattatgctgaccc

SEQ ID NO: 1415 - DNA, 375 bp, Glycine max
  Clone ID: LIB3028-038-Q1-B1-A5
cggctcgagaacacacttggttttaattggtagacgcgtgccaaggtcttgttaattttgagcgttaagtgctgcaactaatcagatcccaagaccttggcctaccttgccatacagaagaaaatggaagcaaaaaaaaagccaaggtttggagccaacaagaataaagacaaagcacaagtcatggaaagaataatggttggaagtgcaacaaaggttgctttcaccctcttggccactttcgccattgtcattccatgccttgaggctggcattgctgagtttgacgattttctcaaagcccaagctgatgaagcccataaaattgctcttgattcctatgtcccagagcctcacgatgtcgcccatgaactc

SEQ ID NO: 1416 - DNA, 391 bp, Glycine max
  Clone ID: LIB3028-038-Q1-B1-A6
aaccattcaatcctgacatggtagctgatttaattcatctaaggaaagcttctatattacatgattcacaagttgctgagattctgaatgatatttcacgacgaattgtgcgagacacaggccctattgtgatggataaatcaggttatactgaaaaaggttttaagagaaaaatagctgttcaggccctttttggaaaggtcttctatctgtccgagctgccagagttttgttcaagagatacctccttagttgtcaaggaaatcttcggagttacagatgaagatgctgacaaactcagaatccacacaatctctgaagctggcagtctagatgcacttgagaagatggttgatagttcagattcagacgatgctagcgaggattcatt

SEQ ID NO: 1417 - DNA, 395 bp, Glycine max
  Clone ID: LIB3028-038-Q1-B1-A8
ccataacacaaggcagaaagcaagctcatcctagagttttaaaaatggcagcagcctcctccatggctctctcttccccatccttggctggcaaggccgtgaagctgggcccatcagcccccgaagtcgggagggtcagcatgaggaagaccgtcaccaagcaggcctcctccggaagcccatggtacggcccagaccgcgtcaagtacttgggcccattctctggcgagcccccgtcctacctcactggcgagttcccaggtgactacggctgggacactgctgggctttcggctgacccagaaaccttcgccagaaaccgtgagctcgaagtgatccactccaggtgggccatgctcggggccttgggctgcgtcttccccgaactgttgtcc

SEQ ID NO: 1418 - DNA, 391 bp, Glycine max
  Clone ID: LIB3028-038-Q1-B1-B1
caacaagaagtggtagaggaagatggttttttcttgctgcagctccaattgttagtctagtgggcattgttcttgtcttgtggttaggtaataacaactctcagattgaaggaagtagacatctgggcggtcactacttatccgggcaaaatcagcacaccattcatgcttattcctctccaaaccagagggagggtagaagcagagggtggtggtgcccattctaagtgcttcttgatttgtttatcaatatgcctcatgatggccacttgggatgaaatttttaactgactcatggcgtgccttttgtccttagtcctctctaattcaagaagacatgtacagattttagtttgtaatatggtatctgcttttgtttcctgtttccttt

SEQ ID NO: 1419 - DNA, 383 bp, Glycine max
  Clone ID: LIB3028-038-Q1-B1-B11
gatatttccaccaaacccgtttgcgttgttgtttgcgaataaatggcaactaagaggagcgtgggaacgttgaaggagggtgatttgaaggggaagagggtattcgtgagggtcgatctgaacgtgcctttggatgacaaccttaacatcaccgatgacactagagtccgtgctgctgttcccaccatcaagtacttgactggttatggtgctaaagtgatcctttctagccatttgggacgtccaaaaggtgtaacacctaaatacagtttgaagcctcttgtgccaaggctgtctcaacttcttggaattgaggttacgatggccaatgactctattggggaggaagttgaaaagttggttacacaacttccagaaggtgg

SEQ ID NO: 1420 - DNA, 396 bp, Glycine max
  Clone ID: LIB3028-038-Q1-B1-B2
caaagaaaaaaaaagcttcttccattttccgaaatcgaagcattagggttagggttttttccgatctgagaaattcgcggcccaatggcggaggaaccggagagcaccgtcaccaccggcgccgccgacgaatcgctgctcgataagatcaccgagaagcttcacgggcacgattcttcgtcctcttcatctcccgactccgactccgactccgaaaaaaccgttacttcctccgttaaggataaggtttttcgcctcttcggaagggagagacccgttcactccgttttcggcgccggaaaacctgctgatgtgttattgtggaggaacaagaaaatttctgctggcatgcttggcggagccactgctgtttgggttctttttgacttgcttgag

SEQ ID NO: 1421 - DNA, 399 bp, Glycine max
  Clone ID: LIB3028-038-Q1-B1-B4
aaaagatttccttgttctttttactgcttaaccgttcggctatctcatatatgaacaacaacatgttaggaatgaagagacggagagatgataatgaagggtccttggatttggcaaaatgtcttatgctgttttcttgtccaatagaaagcaacaagacacaacagaaaagttttggttctgtggaatttgagtgcaagacgtgcaaccgcaagttctcttcttttcaagcactgggagggcacagggcaagccacaagaggcagaagctggagggggaagaactgaaagaacaggccaaaagtcttagcttgtggaacaaacccaaaatgcacgagtgctccatttgtggccttgaattctctctgggccaggctctgggtggccacatgagaaaac

SEQ ID NO: 1422 - DNA, 386 bp, Glycine max
  Clone ID: LIB3028-038-Q1-B1-B5
aaagagacatgttggaaattttactgtattagactcataatataatacaaataatttatacttgtgccgctccctctgccgtcgcagggcgccggcggcgtggttccgatgtccgtcgtctccgaggagtctggcggacggccgaggccgtccggggcttccgccggcgggcacctgcggagtctgtcggtggattctgacttcttcgatgggctcgggtccggcgtcggcggcgatgagagaggtgccgggaatggcggcggcgagcggcacagcaactcgatggaggggtcgtcgacgacgtcgtttgaggcggactcggcgacgatgatggatggcatgaagaaagctacggcccctgataaacttgctgagcttgctcttac

SEQ ID NO: 1423 - DNA, 394 bp, Glycine max
  Clone ID: LIB3028-038-Q1-B1-B6
cgaaaaaccaaactctgcagagaagaatggtatctgaaacatcatcaggaagtcttgtattcaacgatgcaattctacaatacgtagcggataccctaccatttggaggagttggtgaatgtgggtttggcaagtaccatggaaagttctcctttgatgcgttcagtcaccataaggctgtggctagaagaagttacttgactgatttttggtttaggttccctccatggactcttgataagctccaactacttgaggtgtcttacaatttagactaccttggaatacttctagttctgctcggcttaaagaaatcaaaacggtcactatttcaggcttgtaactgatgtgcattatgttccttcacttatctatttcaagtgagcccctaata

SEQ ID NO: 1424 - DNA, 390 bp, Glycine max
  Clone ID: LIB3028-038-Q1-B1-B7
caacgatggtgcagaggctcacttatcgcaagcgccatagctatgctaccaaatccaaccagcaccgggttgttaagacccctggtgggaagttggtgtaccagaccactaagaagagagcaagtggacctaagtgccctgtcactggcaagaggatccaagggattccacacttaagacctgctgaatacaagaggtctagattgcctaggaaccgcaggaccgtaaaccgagcctatggaggtgttttatccgggggagctgttagagaaaggattattcgcgctttccttgttgaagagcaaaaaattgtgaccaaggtattgacgatccagaaggcaaaagaaaagcaggcatcaaagagttaagctgttgagttattcgtgagtg

SEQ ID NO: 1425 - DNA, 394 bp, Glycine max
  Clone ID: LIB3028-038-Q1-B1-B8
atcttcttatagcttcatcccaaaaagctcttttccttctaaatttgattccttagttcagcattctattattatatatggcttcttcaccttcctcagaaaacaaaaacctagagggagtagctggtggtgccggagagaaacccattccacttggtgagaacgttctgcagaagcatgctgcattctttgacttgaataaagatggtgtcatctacccatgggagagttttaaagggttgcgtgaaatcgggactggggttttgctgtccgttggaggtgctattttcatcaatgtgtttctcagtcagagtactcgtcccggaaagtttccatctatactttttccaattgaaattaaaaatatccaacgcggcaaacacggcagtgacac

SEQ ID NO: 1426 - DNA, 383 bp, Glycine max
  Clone ID: LIB3028-038-Q1-B1-B9
ctcgagccgaatcggctcgagggatcactatgaaactgctcgtggtgtacagaaagtacttcagaactacaagaatcttcaagatatcattgctattttgggaatggatgagctcagtgaagatgataaattgactgttgcccgtgcccgtaagattcagcgattcttaagccagcctttccatgttgcagaagtcttcactggtgccccaggaaaatatgttgagttgaaggagaacatcaccagtttccagggtgtgttggatggcaaatacgatgacctcccagagcagtcgttttacatggttggcggtattgaagaggtcattgctaaggctgagaaaattgctaaggaatctgcagcgtcttaattacatacaacag

SEQ ID NO: 1427 - DNA, 381 bp, Glycine max
  Clone ID: LIB3028-038-Q1-B1-A12
tctcatcgtattctctacgctattccgattaatcaatcatacatagatccattattcatagttaagcataataactgttgtgttacatctcgtgaattgttacaactgcttagccattttctattgcatatggcttcgtcggttctctccgcagcttcgcactctgtctcaccctcatgttctctgtccaccacgcacaagggaaagcccatgattatagacaacactttgggattccacagaggacacatttccttctctagttcaaggtctagaggtcggatctctatggctgttgcagttatcgtttctcggtttgaaggcatacctatggcgcctcctgatccaattctaagagtttctgacgcatttaaagtggac

SEQ ID NO: 1428 - DNA, 382 bp, Glycine max
  Clone ID: LIB3028-037-Q1-B1-G6
attacctctttccaaagtccaaattttctagttccaccaaaccaaaccaaaccaaaatggcagcagcctcagcctcatccatgatatcaacaccagccttatctccaaccatccaaaagcaccatcatttgaagccatccaacgtgtgcttccaaggtcttagacccctcgcaaggttcaccaaagcctcatcaaccaaagtgagcaccaccaccaaaagggttattccaaagggtggtgttagagctgaactcaactcagcccttgtgataagcctcagcactggcctctccctcttcttgggaaggtttgtgttcttcaacttccaaagggagaacgtggcaaagcaagtgcctgagcagaacggcctcacacactttga

SEQ ID NO: 1429 - DNA, 378 bp, Glycine max
  Clone ID: LIB3028-037-Q1-B1-G7
ctgaggtgcaataaggttatgagtgctgttttctcttcttgaacttctctttaatcctcagatcctggattaaaggaaaaacataaacatcagccagaaaattcctgagccttgttttacatctttcttcaggaaggaaaagaagaagcacaatgtcattcacaggaactacaggtaaatgcaaggcttgtgataagactgtttatgtggatgacatgtgaactcttgaaggtataccttaccatagaaactgcttcagatgcagtcactgcaagggataccgaacgatgaatacctacgccacagtggatggtgtcctctattgcaagccacactttgaacagcttttcaaggaatctggcaatttcagcacgaact

SEQ ID NO: 1430 - DNA, 386 bp, Glycine max
  Clone ID: LIB3028-037-Q1-B1-G8
agaagataaaaaaatacgagattgtatcaaaaattatatacaaaaaaatataagaattccctcaacaccagaggatattggacagataaagattcaaaaaagaattgatcttattcaagttataatatatatgggatttccaaagtttttaatagagggtaagtctcaaaaaatcgaagaattacagacgaatatgcaaaaaaaactgaattgtgtgaatcgaaaactaaacattgctattgtaaaagttgcaaatgcttataaacaccctaatattattgcagaatttatagctggacaattaaagaatagagtttcgtttcgtaaagcaatgaaaaaagctattgaattaactgaacaggcgggtacaaaaggagttcaagtac

SEQ ID NO: 1431 - DNA, 389 bp, Glycine max
  Clone ID: LIB3028-037-Q1-B1-G9
caagcaaatgaagcaaaggtagaagggaataagctttttgtagaagggaagtatgaagaggcattattacaatatgaacttgctttacaagcagcaccagacatgccttcatctgtggaaatacggtcaatatgccattcaaaccgtggtgtgtgctttctgaaactgggaaaatatgataacacaattaaagaatgcacaaaagcattagaattgaatcctgtgtacattaaagctttggtaagaagaggagaagctcatgaaaagcttgagcattttgaagaggctattgctgatatgaaaaagatcttagaaattgatctctcaaatgatcaagctaggaaaaccattaggcagctagagccccttgctgcagaaaaacgggaaaa

SEQ ID NO: 1432 - DNA, 384 bp, Glycine max
  Clone ID: LIB3028-037-Q1-B1-H1
agcaacagagccagcgagagcaaaaccctagttcatccatcaccagtcgaggaagaagatggtgaagttccttaagcccaacaaggctgtcatcgtcctgcagggccgctacgccgggcgcaaggcggtgatcgtgaggaccttcgacgagggaaccagggagcgcccctacggccactgcctcgtcgccggaatcaagaagtaccccagcaaggtcatcaagaaggactccgccaagaagacggccaagaaatctaaggttaaggcgttcgtgaagctcgtgaactaccagcacctcatgcccacgcgttacacgttcgacgtggatctcaaagatgctgttacccctgatgttctcggcaccaaggacaagaaggtcactgc

SEQ ID NO: 1433 - DNA, 291 bp, Glycine max
  Clone ID: LIB3028-037-Q1-B1-H10
ctcgagccgagaaaccccttctttcgctccacatttcttcgctctcaaccgttcgactcgttcgatgccaccgagttgactcagatccctaagtaaaattttctgttggaatcctccgtgctgagtgcctatataatatggatcaagaagacaacaagatgggcactgtgaatcctcctgaaatgtcttctaatcctctgtcattaggaaaagatgagacaatgggcactgagaatcctctgtcatcaggaaaagatgatgtggtgggtaccgagaatcctccagaagtgt

SEQ ID NO: 1434 - DNA, 386 bp, Glycine max
  Clone ID: LIB3028-037-Q1-B1-H11
cacactgtgtgtttgtaaaaatggccatcacaggcaaccttaacttcaacctcaacctagtacttcctgtggcacgccatatggcgtgccctccacgcgtcccgtcgtttctcttcactcgcggtcgaggcgcgtggtccccctcgcttctggtcacgcgcgccatcgacgctaacgagtttctgggggatttcggggcgcgggaccctttccccgccgagcttgaaagctcgttcggggacaaagtgctgggatacggcaacactgagcacaagattcttattcccaccattactgctctcggtctctcgcagcaggagtgtgctcccgtttcttctgcgcagccccccatctcgctggatgacgcccagactctcattagaaag

SEQ ID NO: 1435 - DNA, 383 bp, Glycine max
  Clone ID: LIB3028-037-Q1-B1-H2
ccgagccttgcgttgaggggtactcaactcctgggggttattctgcaagggcagtccatcccatagcacttgggaaggtgatgagcattgcaaagatgatgaagtcagagtttgatagtgagaactatacactttctgccattggtggtgttgagacaggcggtgatgctgctgagtttatccttctcggggcaaacactgttcaggtgtgcactggggttatgatgcatggctatggacttgtgaagaaactatgtcttgagcttcaagacttcatgaaaaagcacaatttcacatccatagaagatttcagaggggtttctcttgagtattttactactcacactgacttggtaagaaggcagaaggaagcagttcagaag

SEQ ID NO: 1436 - DNA, 390 bp, Glycine max
  Clone ID: LIB3028-037-Q1-B1-H3
gcggggataagattaaagattcaacaatggcctctgcttctgctactcttctcaagtcatctcctgttcttgacaagtgcgagtgggtcaaaggccagacccttcgccaacctctcgtgagatgtaacccttcctcagcatcagctctcaccatcaaagctgcttcctatgctgacgagctcgtcaaaaccgccaaaacagtggcctcaccggggcgtggtattttggcgatggatgagtcaaatgcaacctgcgggaagcgtttggcatctattgggttagagaacacagaagctaatcggcaggcataccgtaccctacttgtgacagtacctggtcttggtgaatacatctctggtgccattctctttgaggaaactctcctacaat

SEQ ID NO: 1437 - DNA, 389 bp, Glycine max
  Clone ID: LIB3028-037-Q1-B1-H4
ctctctcttaaaattaaaactaagcatgtgctctgccatatcccaagtggaacaagaagagttgctcgaaaaattagaggtgttcaagatcaaaggcagggacaagcatggccgcaagatccttcgcattatcgccaaactcttcccagcgcggttggtgagtgttgatgttctgaagaagtacctggaggataaggttttcccgaagctggggaaaaggaaattcgtggtgctgtacgtgcacaccggacgtccagaggagcgagaattttcccggaatctccggtctccggtggatccacgactcgattccgggcgaacgttaaagggaacctccaagccgtttaatttaatcaacccggccttcaaggccgccttttcctcgccaa

SEQ ID NO: 1438 - DNA, 385 bp, Glycine max
  Clone ID: LIB3028-037-Q1-B1-H5
aaaacactcataacacaaagcacaaagcaaagctcatccttgagttaaaaaatggcagcagcttcttccatggctctctcatccccatccttggctggcaaggccgtgaagctgggcccatcagccccagaagtgggaagggtgagcatgaggaagaccgtcaccaagcaggtctcctcaggaagcccatggtacggcccagaccgagtcaagtacttgggcccattctctggcgagcccccgtcctacctaaccggtgagttcccaggcgactacggctgggacactgctgggctttccgcagacccagaaaccttcgccaagaaccgtgaactcgaagtgatccactccaggtgggccatgctcggagccttgggctgcgtct

SEQ ID NO: 1439 - DNA, 384 bp, Glycine max
  Clone ID: LIB3028-037-Q1-B1-H6
aaagcatttatggtgctttcagcggcttggagtatcttaaagctcagaaaatgaggaatcgccaattgcaatttcacaagaaaatatttgctgaggcagatgtcattgtctcaccaacaacgggtgtgactgcatatcaaattcaagatgatgccctgcagaccggtgaacttgactacgtgaatggagctgcacttgttcgttattccatagcaggaaactttcttggacttcctgctgtcactgttccggttggattcgatagattgggtttgcctattgggcttcagtttattggaaggccttggtctgaggccacactaatccatttggcatttgcaatgcaggctatctgcatgtcagagtacagaaagcccgagcttt

SEQ ID NO: 1440 - DNA, 383 bp, Glycine max
  Clone ID: LIB3028-037-Q1-B1-H7
gggaaaaagagctgcaatccgatttgcagatctcaagaggaaaagatattggttcccgttaatggtataatatgatgctgtataagttctgattttctaaaccctctcttcccaagcatgacttattgtcatttatccaaaaggtcaagcattatttgctaactgagctcctgcaggttggtattggattacttgttcttcagcaattatctggtatcaatggaattttgttctattcaactaccatctttgcaaatgcaggaatttcatccagcgaagctgctacagttggacttggagccgttcaggtcatagcaactggaatttccacatggttggtggacaaaagtggccggaggctgcttctaataatatcctcatct

SEQ ID NO: 1441 - DNA, 372 bp, Glycine max
  Clone ID: LIB3028-037-Q1-B1-H8
ggcctctatagcgagcttgaaccatcttcagcttcagctactttgcactaacaaagcgccccacgttctgagacaaacccagtatgctatctgccatgggggatcagaaagtttcgatttttcattgattgtgtataactgcacaaagaaggtagtgaagcaatgcgtacagcgatcgcgtttctcgttcacccacgattcctccttctcttccttgttctctcaattttcctcattttcacattttctggttctaccaccaccaatggttttactaatcccaaacaagttgttgagatcattgaggagaaaccagaagaggagccagaaattacacacagagtatttttggatattgatattgataaacag

SEQ ID NO: 1442 - DNA, 92 bp, Glycine max
  Clone ID: LIB3028-037-Q1-B1-H9
gggaagatggtgataattgtgattaggcaaaggatctgctgtaagcgttgagaagactgaaagtattgaaaaagaaagaattggtattgaag

SEQ ID NO: 1443 - DNA, 391 bp, Glycine max
  Clone ID: LIB3028-038-Q1-B1-A1
atcatctacctgataaaactgcatccggaggagctagagaaatggacaaggatgctcagaatgttgaaacaagtggttcagatagtagttctgcaaaaggaaagaatgttgttgataatatggataatggagagctttcaaaatcaaatgagcgtcttaaaagaactgcagttgaggaaaatccagaggatgaaaagattgaactttcacaaaggagaaaacgagaacgaacaataatgaatgataaacaggtgatgctgattgagagggcactcaaagatgagcctgatatgcagcgaaatgcagcttcacttcaatcatgggctgataaattaagtgggcatggttccgaggttacatcttcacagcttaaaaattgggtgaacaatcg

SEQ ID NO: 1444 - DNA, 383 bp, Glycine max
  Clone ID: LIB3028-038-Q1-B1-A10
gtgacacaccaaatcaaagacacctgagccattcaattcccctcctttattgctttcaagtttcaacactaattttattatctgaaaaaatggctttcaaagtttcgtttttccttgcacttgttctagtttccaatatcctcctccttgatacaacagctgctggacgcagcattggcgaaaactccaactcagaggaaaagaaagagcctgagttcttgttcaagcatgaaggtggggtgtatattccagggattggacctgttggatttccacataaatttcatctcacacctcaaaatccattacctggtggcaatggaaatggaggagcaggaaccgcaacaggatcaggatcaccaccaggtagcagttatgttcct

SEQ ID NO: 1445 - DNA, 380 bp, Glycine max
  Clone ID: LIB3028-037-Q1-B1-G5
tcataatacaacactggagagagtagctaacgtgttggtgatgttgagcatggtggtgttggtgcttgcatcaaatgctgaagggggacgattacttgaggaagagaatgtggatcagccccagaccttccttggatcaggtggaggccttggtgggatatttccaagcccaagcccaggcttcagcttcaccggcgtgggctttggcccatctgggttttgcactttccctggtggttgcaccggtactccttctttgcccactattcccggtgctggtgggtcactaccagtaccaacacatgcataaggaaatggctttggtagaagacctatattattacttaatgctaaagtaccctaaaaattgtttaagcttt

SEQ ID NO: 1446 - DNA, 385 bp, Glycine max
  Clone ID: LIB3028-037-Q1-B1-F12
gaaaatttaacaattagggttgcttctcctttgccgacccatggctcccaaagctgatagttcaaagaaggctgatccaaaggcacaggccttgaaaactgccaaggcagttaagtccggtgctaactttaagaagaagaccaagaagatccgaacatctgttaccttccatcgaccaaggactttgaaaaaggataggaaccccaaatatccacgcattagtgctccacccaggaacaagcttgatcactatcagatattgaagtttcctctcacgactgagtctgcaatgaagaagattgaagacaacaacactttggttttcattgttgacttgcgggccgacaagaagaagatcaaggatgcagtcaagaagatgtatgat

SEQ ID NO: 1447 - DNA, 389 bp, Glycine max
  Clone ID: LIB3028-037-Q1-B1-F2
gcagacttaacaacagcacaaagcgggttactgtctgttcaagctaccatctctctctctctttcttagtgcctccttgccagaagttaaaatggcccaagaaactttcctattcacatctgaatcagtgaacgaggggcaccctgacaagctctgtgaccagatctccgatgctgtgctcgatgcatgcttggagcaggaccctgacagcaaggttgcctgtgaaacctgcaccaagaccaacatggtgatggttttcggagagatcacaaccaaggccaacgtggactatgagaagattgtgcgtgacacatgcaggaacattggttttgtctctgatgatgttggtcttgatgctgacaactgcaaggtcctcgtcaacattgagc

SEQ ID NO: 1448 - DNA, 388 bp, Glycine max
  Clone ID: LIB3028-037-Q1-B1-F3
ctcaaagctcacggacttgcgcctgaaattccagaggacctgtaccatttgattaagaaggcagtttcaattaggaagcatcttgagaggaacaggaaggacaaggaccccaatttcaggttgatccttgttgaaagcagaatccaccgacttctccccaataacagaagaactagaaacctcccaccatctcggaaattacaatctcaaaacgtgcaacacactggttgcctagagaatgtatcaactttcatgggttttgcttccttgcagtcaccgttgagccagcaatttgccatatcattttgatgtttatttgaaggctggataggttatgtggcttagttttgttcagaacctatggttagactgacaaagataattttac

SEQ ID NO: 1449 - DNA, 389 bp, Glycine max
  Clone ID: LIB3028-037-Q1-B1-F4
ataaccatgggtatctccaccatcgcttctccttttgactccatcatcttcggtttgtacttcatactctttctttctttcttttcctttacaactctttcttaattatcttctccattaatcagatttggacgacaccttgtacccctccagcaccggaattgacaagtgcgtcaagaaaaacatccaactctttctcatccagaaatgcggattctcagaatccaaagccttgacccaacgagttgagctcttcaaaacctacggaagcacccttgccggcttaagagcacaaggcctcgatatcactgcagaggactaccacggtttcgtgcacggaaggctaccttacgactccatcgacactgatcatcagttacggaacctcc

SEQ ID NO: 1450 - DNA, 352 bp, Glycine max
  Clone ID: LIB3028-037-Q1-B1-F5
ctgcgacttccaaacggaacgtcacatcttcaagcgccgcaacgacgggatttacattatctaacgttgggaagacatgggagaagcttcagttagcaactaaggttattgttgcagttgagaaccctcaggacatcattgttcaatccgcaatgccttatggtcaatgagcggttctgaagtttgcacactacactggtgcacatgctattgctggtaggcacactcccggtaccttcaccattcagcttcacacctcattcagtgagcctcgtctccttatcctcactgatccaagaacagatcaccagcctattaaggaagctgctcatgagaatattcccacattgct

SEQ ID NO: 1451 - DNA, 384 bp, Glycine max
  Clone ID: LIB3028-037-Q1-B1-F6
attatggagcccagattcgtaatctccgcatcggaggccgaatcccaatcaatctccaaactcctcccttccctcgtttcctcttctcagtccctcgcccgtccttccatctccaactttcccgtcgccgccgtcggactcgccgcctccggccgcatcttcgtgggcgtgaacgtggagttccccggcctccccttccaccacaccatccacgccgaacagttcctcctcaccaacatggccaacaacgccgagacccgcctcgactccttcgccgtctccgccgccccctgcggccattgccgccagttccttcaagaactccgcgacgcccccgacatccaaatcctcatcacctcccacaaaaaccctcacttcagccct

SEQ ID NO: 1452 - DNA, 372 bp, Glycine max
  unsure at all n locations
  Clone ID: LIB3028-037-Q1-B1-F7
tgctggtgatcgatggagtatcatcacgggacttgttggagacacccattgttaaacacctgagttttgccaaccaacattgtttgttttggtgggttctaccaagacttttcctttatgtatatttttgtagtgaagggagaaaaaaaaccgtttacatttgaagtaacttactaccttctcattggttatatatttatagtattgtaaatgtctttccttttttatttatgatgttgtgataattaacacctttgttccccccaagtcgctggcagaatcattaggggtataagcaaacatggattattttggccagttgactatagtttgttcatttgtangggtgcacgcaatggtatatattcttta

SEQ ID NO: 1453 - DNA, 385 bp, Glycine max
  Clone ID: LIB3028-037-Q1-B1-F8
aacactcataacacaaagcacaaagcaaagctcatccttgagttaaaaaatggcagcagcttcttccatggctctctcatccccatccttggctggcaaggccgtgaagctgggcccatcagccccagaagtgggaagggtgagcatgaggaagaccgtcaccaagcaggtctcctcaggaagcccatggtacggcccagaccgagtcaagtacttgggcccattctctggcgagcccccgtcctacctaaccggtgagttcccaggcgactacggctgggacactgctgggctttccgcagacccagaaaccttcgccaagaaccgtgaactcgaagtgatccactccaggtgggccatgctcggagccttgggctgcgtcttc

SEQ ID NO: 1454 - DNA, 388 bp, Glycine max
  Clone ID: LIB3028-037-Q1-B1-F9
ctcttttggattcttcttcttcttcaccaccctgtgatcgcagactcaacactctcgctagacacttccttccgcaaatggcttctcacgacagcatctccgcttctccaacctccgcttctgattccgtcttcaatcacctcgttcgtgctcccgaagatcctatcctcggggtaactgtcgcttataacaaagatccaagtccagttaagctcaacttgggagttggtgcttaccgaactgaggaaggaaaacctcttgttttgaatgtagtgaggcgagttgaacagcaactcataaatgacgtgtcacgcaacaaggaatatattccgatcgttgggcttgctgattttaataaattgagtgctaagcttatttttggggctga

SEQ ID NO: 1455 - DNA, 354 bp, Glycine max
  Clone ID: LIB3028-037-Q1-B1-G1
ctttctctctcatcatccctctcgaatagaaaaacagaacagaagaaagaagaagaaaagaaaacccaaacaaactctaaaagaaagaaagaaagaaagcacgattacctgcacttgttcttcttcctcctctgcagtaaaaccctagccatcttaatcgatccgaatcccgagatccgattgcaaggctggcgggtattcgggtcaagtaaatgacggatctcccccgccgcgccttattgataatagggttaccgcgctgctgtgacgattgttgttttcaagaagaagaagaagaagaagaagaagagtgaagcatgctgagcgtggtgcgcgtgcaactgccctcggaaa

SEQ ID NO: 1456 - DNA, 389 bp, Glycine max
  Clone ID: LIB3028-037-Q1-B1-G10
cagcgtctcatctcgtgttcgaagacaactccagcgtccccttggttccggaagagaactggtacatcgaagagaactctgtgacccatcactaagccctgtcgtcgaagagaactctgtgacccatcactaagccctgttcaaggtgtgtcgtgccgcgatggtatcgtacgaattgacggacgaagggcagcttgcttgtggcttcaacatctgccaaccaaacccttagtcatctgggatttaaagggagggaccgttgttggttgtcgcatgtggaagagataccatttctactgcaagttccacaaaacgtttagcatctgaaaatgtttttgttgttcaggttctcgtatccttggtctgccgcttcctagttgcttaacctc

SEQ ID NO: 1457 - DNA, 386 bp, Glycine max
  Clone ID: LIB3028-037-Q1-B1-G11
gggtctgtctctttcatccttcaattgtggttagtttattcttaattgcagagttgaatcaagtttttattttttttatatgggtttgtgttattttattgggaaaggaagacttattctggtattgacttggcctttgggattcccactactgtggttgttaggtgcttgttttgtgttgtgttgtgtgtgttgtttcctcctctgtaccatcttgatttcattggtaacagtataaggaaaaggttctttcttgtggaaattagaaaagggtcccttgctttaggacagtgagagagaaaagtatttcttcctggtgatgtcttttgattcgtctctggaatcttatgcaaacccttccttcccttttgcttgcttgcatggga

SEQ ID NO: 1458 - DNA, 397 bp, Glycine max
  Clone ID: LIB3028-037-Q1-B1-G12
acttgaagaacctctgaaaatcctttctttctttcatcgatcactctctctctctagatctgttcaaatctccgaacatttccgctccaattttcatttccctgaacaaaaccaaaccctaaccctttctttctgtatgatacctgattcccccccagaggcgtagtttttgtgtcgatttgtaaattctttcggtagtttaggttagaattttttgtgaagtttttagggttttgaatcggtgagatgaatcacaacaacaacaatagagcgaggtaccctcccgggatggggattggtcgcggaggtttcaatcccaacctgggccagaacccgagcctgaaccagaacccgaacctgaaacagaatcatcacgcgttcaaggctcggccgccgt

SEQ ID NO: 1459 - DNA, 392 bp, Glycine max
  Clone ID: LIB3028-037-Q1-B1-G2
aaccggttcgagccaatacgcgattgcgaagttcatcgaggagaagcacaagcagcttccaccgaacttcaagaagcttcttctctaccatttgaagaagctcgtcgccgccggaaaactcgtcaaagtcaaaggctcgttcaagctcccacctaccagacctgctgcatcttcttcttcttcttcttcgccggcaaagaagaaaaagcccgcagctgccaagtccaagcctaagcctaagcccaagcccgctgcgaaagccaaggatactaaggcaactaaatcgaaggcaccagctaagcccaagccagctgctaagcctaaagccaaagctccagccaaggccaaacccgctgctaaaccaaatgcttctgctgctgccaagcccaagc

SEQ ID NO: 1460 - DNA, 326 bp, Glycine max
  Clone ID: LIB3028-037-Q1-B1-G3
tccatctcgtcttcaacattccactccaatccgcagcgctgcgttttagtttgcattcaattctaccaatcccaaaattcctcgccggggatagagaatcttaacaattccaccactttccggcgagacatggccgtcgccgtctccgtcaccgcgcgacagaagccgagctccgacgcgagcctcttgacactctgccgcttctggagttcgcgcagcgccaatcaaggctcctctaaaacggtgtcgtccgtctcaagatcactgctccctcccagccgcagattccgcgtcgatacttccaattagctcaattttccatatga

SEQ ID NO: 1461 - DNA, 388 bp, Glycine max
  Clone ID: LIB3028-037-Q1-B1-G4
gcttgctggtgctcaggttcttctgagtcgtttgaggttgttcttgagtcctgggtatccatatgaagaaattttgaggacctttcacaatcagacaagcataatcatgtgctcctatctaccagttttcacaagctttaacagaaccaaaggtggcttgattcaattaaaccatggtaggcctcagcctctccaatatgtggtcaatgcggcctttttggctgccctatatagtgattatcttgatgctgctgatacacctggatggtattgtggacctaatttcttttcaaccgacgtgctccgtagctttgccaagtcccagattgattacatccttggaaataacccaaggaaaatgagttatgtcgtaggttttggtaatcat

SEQ ID NO: 1462 - DNA, 390 bp, Glycine max
  Clone ID: LIB3028-037-Q1-B1-F11
acaatttcaatctctctctctctctgtctctctctctctagacttagattttgtgaatggctgaagtggaagagggacaggtcatcggcgtccacaccgttgatgagtggaagctgcaactccagaatgcaaaagactccaaaaaactgattgtggtggattttactgcttcctggtgtggtccatgccgttttatggccccagttcttgcagagattgcaaagaaaactcctgaattgatcttcctcaaagtggatgtggatgaagtgaggcctgttgctgaggaatattccattgaggccatgccaaccttcctcttcttgaaagatggcgagatcgtggacaaggtggttggtgctagtaaggatgaccttcaagccaccatagcca

SEQ ID NO: 1463 - DNA, 375 bp, Glycine max
  Clone ID: LIB3028-037-Q1-B1-D7
tacatgttcccctgttaaatagattgttctccctcatgtgaacgaaacgagacattatgtcactgtgccaattctttgggttttttcatattatcagggcatttcatacatatatagtatttattataatttcagcaagtagaaatggatcattgaaatatacatgtgttacaattctaaatttccactgtaattcaattatcttgagccattataggatatcagactattcccggattaattttatttatttattttccctttccaggatattgattttgagttcaagatattatcacttattgcaggacaggaggaggtcaacagaaggcataattttatttttgtgtacataacccgtttttgttcctgctt

SEQ ID NO: 1464 - DNA, 381 bp, Glycine max
  Clone ID: LIB3028-037-Q1-B1-D8
cggtgacagagtgagagtgagagtgagaaatgggtctgctttctaacagagtggagagacatgagatcaagcctggtgatcacatctacacttacagagccgttttcacctattcccatcatggcatttttgttgggggaagcaaggttgtacatttcagacctgaaaggaacttaaagtcaatgactgagacatcatcaaactgggatgatccaacatcaaacccatgtccaacctttcctgattgtggattcagacagccaaactgtggtgtagtcctttcctgcttagactgtttccttcgaaatgggtctttttactgttttgagtatgaggtttcaccatctgttttcctcagcagaataaggggtggcacatgca

SEQ ID NO: 1465 - DNA, 320 bp, Glycine max
  Clone ID: LIB3028-037-Q1-B1-D9
ctcatattcattaaaaaaacatgacgatgactcatcgtcatttaagcctcatgatgaatagcaggaagattttgaccaaaaccaagagtagttggatgtagattatagatcgagttcctcatctcataatgagcacacgaaatgcaggtgcctaatagcttcagaaagaggaaatgaggaccccacactaccgatgaaggcaccgtttttaactgtatatctgtataaagtaaaatctggtctttgaaaatgaatgtaatctattgtgtatttttgtgttttaatttgatataattaagagaataaaattacctattctt

SEQ ID NO: 1466 - DNA, 352 bp, Glycine max
  Clone ID: LIB3028-037-Q1-B1-E1
tggttatgcagggtaaatccagtgattttgctaagcatgctcttccttccacacgcaaacaacgcatactggttaccttcacaaagtcccaaccaagaaagtcactatcaagtgatgctcaacagcttgcctcggcagtagcatcttctcattggggtccaccgccaagccgatctcccaatcatgttcgtcatcacgtaggccccaagcattacgctacacttccaacaactggggtactgccagctccacccattcgaccacaaatggcagctcccgttggcatgcaaccattgtttgttgctgctccagttgtacctcccatgccattttctgcacctgtgccaatccc

SEQ ID NO: 1467 - DNA, 381 bp, Glycine max
  Clone ID: LIB3028-037-Q1-B1-E10
ctcccacaccacacccatgacactcctcctgctccttattctcctctttcacgcggcggaagccaagggacagtggcagctcctccacaaaaacatcggcattgtcgccatgcacatgcagcttctccacaacgaccgcgtcatcatcttcgaccgcaccgacttcggactctccaacctaaccctccccgacggaagatgccgcaacaacccaaacgagttggtcgtcaaacgcgactgcaccgcgcactccatcgaatacgacgtcgcagccaacacattccgcgctctctttgtccaaaccaatgtctggtgctcctccggttcggtctctcccgacggaacattagtccaaaccggtggcttcaacgacggctaccg

SEQ ID NO: 1468 - DNA, 386 bp, Glycine max
  Clone ID: LIB3028-037-Q1-B1-E11
cgtgaacaaacacacgagagaaagcaaattaagctgagtgcaagtgcttcattgagaaaatgaagatggaaattgaggaagttggcaactgcgaagcacttcccctgctttcactcaaccacgtgtccctcttgtgcagatcggtgtgggtgtctatgaggttttatgaggatgtcttggggtttgttcccatcaaacgcccttcttctttcaagttcactggagcctggttttacaattatggtattggaatacacttgatcgagaatcccaacattgatgaatttgatacctgcgtgaatgaagaaaggcctataaatcccaaggacaaccatatctcattccagtgtactgatgttgaacttgttaagaagaggttggaagag

SEQ ID NO: 1469 - DNA, 388 bp, Glycine max
  Clone ID: LIB3028-037-Q1-B1-E12
ggaacaccccccacgaagcaccaattatggctctgaatctttgtatctcacctaagtttaaatgggttccttccttagatagtgcttcctattctttgagaccttcacttgggtcttgttttggtaacataaacattgctagtgtgagtctaagtactactagaagtttgagtttgaggaggagtgggagtgttagtgtaagatctagtttagaaactgcggggcccacagtcacagtgggacaggtcactgaggttaacaaggacaccttctggccgatcgttaaggctgccggggataaaaccgttgtccttgacatgtacacacaatggtgtggcccttgcaaagtgatggctccaaagtttcaagaattatctgaaaagtatct

SEQ ID NO: 1470 - DNA, 389 bp, Glycine max
  Clone ID: LIB3028-037-Q1-B1-E2
gtggcaaatccacacttcttgatgctttagcaggaagattgacatcaaacataaagcaaacagggaagattctaatcaatggccacaaacaagaactggcttatggaacatcaggctatgtaacacaagatgatgctatgctgtcatgtttaaccgctggggaaactttatactactcagctatgctccaatttccaaacaccatgtctgtagaagagaagaaggaacgagcagatatgacactgagagaaatgggtctacaagatgccatcaacacaagggttggagggtggaattgtaaaggcctcagtgggggacaaaggaggagacttagcatttgcattgagattctaacacacccaaaactcctcttccttgatgaaccaact

SEQ ID NO: 1471 - DNA, 385 bp, Glycine max
  Clone ID: LIB3028-037-Q1-B1-E3
accgtaacgtaacgtaaccacgagatgcctctattctagcacttggaaccccaaatccgtgccaattcctccgctccttttcgcagacgaaggcacattctgacgttcacaagattggaaggcaagactaaagattccaccacctgatacaagctagaaaacagaggtttgaaatggctgtgtcactgtggagaagtcgcactgcttcatcagcactgaacttgttcaacaatactcttcgctgtttctcttccgaggcaacaaactccagtcctcatagtacacgagagagtatgatgtattctgacataaactcacgaattgggagttgcatgccactgtctgcaatgcgcattggaacaatcattcacaacattgagttgaa

SEQ ID NO: 1472 - DNA, 389 bp, Glycine max
  Clone ID: LIB3028-037-Q1-B1-E4
ctcgagccgaatcggctcgagagaaaatgtttatgttcctgagaagaaatttcactctttcaagaaggtgtctcggtccatgggatatggtgagaatgatatcaccttagtatcttttcaatcagtctccaaaggctatcacggggagtgtgggaaacgaggaggttatatggaggtgactgggttttctgcagaagtgagggaacaaatatataaagtggcatctgtcaacctttgctctaatatctctggtcaaattcttgcaagcttggtcatgagtccacccaaggttggagatgagtcctatgactcattcatggctgagaaggagaatattttggcgtcccttgccaggcgtgcaaagacactagaagatgcattcaacaaat

SEQ ID NO: 1473 - DNA, 381 bp, Glycine max
  Clone ID: LIB3028-037-Q1-B1-E6
tcccaggcgaggagaaagatggaggggaaggagcaggatgtgtcgttgggagcgaacaagttccccgagagacagccgattgggacggcggcgcagagccaagacgacggcaaggactaccaggagccggcgccggcgccgctggttgacccgacggagtttacgtcatggtcgttttacagagcagggatagcagagtttgtggccacttttctgtttctctacatcaccgtcttaaccgttatgggagtcgccggggctaagtctaagtgtagtaccgttgggattcaaggaatcgcttgggccttcggtggcatgatcttcgccctcgtttactgcaccgctggcatctcagggggacacataaacccggcggtgaca

SEQ ID NO: 1474 - DNA, 382 bp, Glycine max
  Clone ID: LIB3028-037-Q1-B1-E7
gatttcttcattgttttgctctaaaaatggagagagattttctgggtctgagctcaaaagaaccattggctatgatgaaggaagagatgaatattgatattggaagcaaagacacaggtttcacaaatggagcagtggtaaaatggcccttcatgaacaaagtatatgtccatcctcttttgatgtcattcaatcctcctcaggtgaattctgtgaaccatcctcatggtatgaagatgttttcagttcccaatcaagcaatttcagtttccatgggacatccatccctaaagaatcattttgcaactgttggtcagaatatgaatgttgctactgtgaagcaaccactactcggaggaatacctgttacggtgcctcattc

SEQ ID NO: 1475 - DNA, 385 bp, Glycine max
  Clone ID: LIB3028-037-Q1-B1-E8
agaaggtataagcagccgttttttctgttggtatatgaaggtggtgaaggaagaagaagaagaatggtgacggaccaagatatagcgaaaggggtggagtccctactgcgtcactctgacccaaactccataactacggtaaacggcgtcgttcagcagctggaggccaaactagggttagacctctctcacaaggccagtttcatcagagaccagatcgatcatcttctccggtcacagccacagacatttgctcctcaccctcctccacttcacaaagactattttgcccctcacacccaactgcacttcccaaccacccactttgctccccattttgccctccatgacgagatcaacttcctgcagcacccccaccctcctc

SEQ ID NO: 1476 - DNA, 361 bp, Glycine max
  Clone ID: LIB3028-037-Q1-B1-E9
tgcttgctggcatactctatgatatggaggcaactacaacagagggaggaggcaacacatgtgttggaggtcattgttacaggctagtctttattgtcatgactggagcatgcattgttggattcttcttagacattctgttgtcaatcagaaccaagaatatttacaccaagatttccacgagcaagaagcccaagaaatccttaggaacatcaaataggcagtgattcagaatggtatgacattcctgggattgatgaactttatgctcaagtgatatctcagtatccgtcagcaaggtgacttgtcctatctgatagttaaaactcatttttccaataaaggagggccatttgttttt

SEQ ID NO: 1477 - DNA, 386 bp, Glycine max
  Clone ID: LIB3028-037-Q1-B1-F1
gcagaagcctcctctgcctcgcaatcatcggcattgtcgtcgccgccgtcggaggtcagtctccagcggcggctcccaccacttcctcggcatccccagccacagccccttctaaacctaaaccaaaaccacctgcgccagttgcttctcccacttcatctcctccagcttcatcccccaatgctgcaaccgcaacccctcccgtttcgtctcccacggtagcatctcctccgtctaaagctgctgctccagctccagcaaccactcctccggtggccacacctcccgcggccactcctcctgcggctacacctcctgctgtgacaccagtgagctcgccgccagcgccagttccggtgagttctccaccagcgcctgttccggtg

SEQ ID NO: 1478 - DNA, 382 bp, Glycine max
  Clone ID: LIB3028-037-Q1-B1-F10
ctccatttccatttcctctctctcagtttccaagaatcttaagctatgggaaagtcttacccaaccgtgagcgctgattaccagaaggccgttgagaaggcgaagaagaagctcagaggcttcatcgctgagaagagatgcgctcctctaatgctccgtttggcatggcactctgctggaacttacgacgtgagctcgaagaccggtggtcccttcggaaccataaagcacccctccgaactcgctcacggcgctaacaacggtcttgacatcgctgttaggcttttggagccactcaaagcggagtttcctattttgagctacgccgatttctaccagttggctggcgttgttgccgttgaggtcaccggtggacctgaag

SEQ ID NO: 1479 - DNA, 376 bp, Glycine max
  Clone ID: LIB3028-037-Q1-B1-D6
ctgaaattgaagatttaagaacagctctagatccaccaactgagcaagatgattctaataaaatgtgccatagaaatccatagtcaactctgtgatggggctgatcctgaaattgaagatttaagaacagctctagatccaccaactgagcaagatgattctaatacaatgtctctggcaattgatgatcattttgttgaagacaccatactgtacatgcttcaggatgctatatcaaagttagatgtcaaaataagactatgcattagagatagcttgttccggttggctcaaagtgcaatgcaaaggaattatgctaatgatacaagcagtacaaacaacactagcagagaagaacttaaagttgctgcaagag

SEQ ID NO: 1480 - DNA, 387 bp, Glycine max
  Clone ID: LIB3028-037-Q1-B1-C1
caccattcctaagctcactctttctaagtttcttctatcctctctccgccatggttctctccaaaaccgcctccgaatccgacgtctctgtccactcaaccttcgcttctcgctatgtcagaacttcgcttcccaggttcaagatggcggaggagtcgataccgaaggaggcagcataccagatcataaacgacgagttgatgttggatgggaacccaaggttgaatttggcatcatttgtgacgacttggatggagccagagtgtgataaactcatcatggctgccattaataagaactatgttgacatggacgagtaccctgtcaccactgagctacagaatcgatgtgttaacatgatagctcatcttttcaatgcaccactag

SEQ ID NO: 1481 - DNA, 329 bp, Glycine max
  Clone ID: LIB3028-037-Q1-B1-C10
aaagaatattgccaatattgattttgatgttgctgggcttgcaacgttgtctcccagacagaggctttctgatgtttcagatgttcattgtagcgagtcacctcttatgacttgttagggatcacgttctgttgttaattcaattagcaacttgttaaaactgtttttggtcacagtaattcctgtttcatgtgtgaattgaccgcgatattcataatgattaagggtttttagggagactattctgttataaagtatcagtatcagcccagaaaaatgtaaccagatatgttttgcctttatagaatttgctgctagtgctttgattt

SEQ ID NO: 1482 - DNA, 389 bp, Glycine max
  Clone ID: LIB3028-037-Q1-B1-C11
gtcaaagcttctcgagagcaatcttctgctccatcttcttcagtaaccgaaccccagaccccagtttcagatactgttgcttttggaaatactagagctacatttaatggtgttgctacagctgcagagttttctctttccaggagtccttactttcttcctagtgaaccagcttggaatcaagaaccggtttggaatcaagagtttgggtataatgaacctttaggagaggacaatgttggtcaaaccataatcacttcaccttctgagctttcaatttgttcatttgctgctgctggaaactgtccacgaggggaaaaatgccctcatattcatggggatctatgtcccacctgtggaaagcattgcttgcatcctttccgacctga

SEQ ID NO: 1483 - DNA, 390 bp, Glycine max
  Clone ID: LIB3028-037-Q1-B1-C12
ctcgagccgcttgaatcccttagcagtaatcatcgtcagggtcctgtacgactggatagccgtgtaggttctatgttcatcaaaccctcacctcttggttctccgcaaccctttcttcctctcgcaccttcacctttggctccattcactaataccactatcccaaagttatcaggactttgcactttgaactttactactgctgaaagtttgataagtgtgacagcaattgattgctgggaagtttttgcaccatttctggctaatgtaatatgttgtccccaattggaagccactctcacaattcttattggtcaatccagtaaacttaacaatgtacttgccttaaacgggaccgttgctaaacattgccttgcagatgtggaacaa

SEQ ID NO: 1484 - DNA, 310 bp, Glycine max
  Clone ID: LIB3028-037-Q1-B1-C2
gcgggctggttcatcaggggatgttggttacaataaatgttggtttcttttctgtactcttgtgtcttcttttctaggtagcttgtttttcggacaaagtttgaagtctccaccatcatctcgcaactgttgttcccagaactgggttcttgatcgacggtggcaaaattgcttttatttatctgtgttttaatgtgttgtgtttgtcggaacccctgattacatttttgttaagcgcagcgagtttcaggactttgctgcgttgtgttgctttggtttattaaatgtcaactttctatttgtagtgttc

SEQ ID NO: 1485 - DNA, 257 bp, Glycine max
  Clone ID: LIB3028-037-Q1-B1-C3
gaaacgatgaatggacttaggaaggaagtgaattgaaggtgcagtgagggcaaaatggaagggattattcagatccgatcagtgctgctactactatccataaccatggcatctctcactctggctgtggccgatggcgtttctcgagaagaagctaaagaacttcgagatgaggttaaggatatgttttatcacgcctttaatggatacatggaccacgctttccccctcgatgaattgagacctctctcctgcgc

SEQ ID NO: 1486 - DNA, 386 bp, Glycine max
  Clone ID: LIB3028-037-Q1-B1-C4
cggcacccacacacacagttcgtcggaatgggaagggtgattcgcgctcagcgtaagggtgctgggtcggtgttcaagtctcacactcaccaccgcaagggtccggcgaggttccgcagcctcgacttcggcgagcgcaacggctacctcaagggcgtcgtcaccgacatcatccacgaccccggtcgcggcgcccctctcgccaaggtggcattccgccaccccttccgctacaagaagcaaacggagctcttcgtcgccgccgagggcctctacaccgggcagttcgtctactgcggcaagaaggccaccctcgtggtcggcaacgtgttgcccatccgatccatccccgaaggtgccgtcatctgcaacgtcgagcaccacgt

SEQ ID NO: 1487 - DNA, 382 bp, Glycine max
  Clone ID: LIB3028-037-Q1-B1-C6
ctctttctttctcccctacacaaaacatggctttgcccaatcagcaaaccgtcgattaccccagcttcaagcttgtcatcgtcggcgacggtggcacaggaaagacaaccttcgtgaagaggcatctcactggtgaattcgagaagaaatatgaaccgaccattggtgtggaggttcatccgttggattttttcacgaactgtggaaagattcgcttctattgttgggatactgctgggcaagagaagtttggtggcctcagagatggatattatatccatgggcaatgtgcgattatcatgtttgatgttactgcccgtctaacatacaaaaatgtccctacctggcaccgtgatctttgccgggtctgtgaaaacatccc

SEQ ID NO: 1488 - DNA, 382 bp, Glycine max
  Clone ID: LIB3028-037-Q1-B1-C7
ctttgcgatatatgaactcttttacaaaggcaacgccattgtctaacacagttaccattagtctttcaaatgagttgccagttgttgttgagtacaagattgctgagatgggttatgtgcggttctatttggctcccaagatagaagaggatgaagaagatacgaaacctcaagtttaatctacctattagatggttgggttaggatattaggattttaatgtctttgaacttgtagctttcgtcatacatcttctgttgaagatattttaaccgtgtgagcaatgaattcacattttgtggatttcttagatgtgtattggttacctaccaccttattttccctcgatttgattgttaagaacaattcgaaacaattggtg

SEQ ID NO: 1489 - DNA, 389 bp, Glycine max
  Clone ID: LIB3028-037-Q1-B1-C9
accgactccaacgccatctcccgcgctgctcggtccagtgatagggctgaggagagggagcaggacactgttacacaggctgatttggaacattttcttcatcttcttgaagggaaggatggagtgatggactggcagagttttatggaaaggtcaacaccaaacatgcaatacaaagcttggcgttacgatcctgagacaggtcctacagtttaccgtagtagaactgtctttgatgatgcaactccagagttggtgagggatttcttctgggatgatgactttcgtcctaaatgggatgctatgcttgcatactgcaaagtattggaggaatgccctcataatgggacaatgatttctcactggattaaaaagttcccctttttctg

SEQ ID NO: 1490 - DNA, 381 bp, Glycine max
  unsure at all n locations
  Clone ID: LIB3028-037-Q1-B1-D1
caggatcatttcgttcggagctgaggaggcagaaacacaacaacatatgagatggaagctgcaaagggaaccgtcaaaggtgtggctatcatcatcggagacaacaacattagaggctctcttcagtttcttcagcaccccaatgggaccacccatgtgacagggagagtgacagggttgtcccaaggctttcatgggttccatattcatgcttttggtgacaccaccaatggctgcaactccactggtcctcacttcaatccgttcaagaaggatcatggggctccttcagatgataagcgccatgctggtgatttgggcaacattgctgcangccctgatggagttgctgagatttctaatagagatagacagattcct

SEQ ID NO: 1491 - DNA, 390 bp, Glycine max
  Clone ID: LIB3028-037-Q1-B1-D10
acaacatttacattactctctcactttctccaatatggcttcttctcgaaatgagttttatgcacttatgctagtggtggtggttggctccatagtggcttcctgtggtgctaacttcaaccaagactttgatctaacttggggtgatcagcgtgctaagatattcaatggtggtcagcttctatctctttccctggacaaagtctctggctctggcttccaatccaagaaagagtacttatttggaaggatcgatatgcagctcaagctcgttgctggcaactctgccggcactgtcactgcttactacttgtcgtctcaagggccaactcatgacgagattgattttgaattcttgggaaacgtgagcggtgacccttacattctcca

SEQ ID NO: 1492 - DNA, 384 bp, Glycine max
  Clone ID: LIB3028-037-Q1-B1-D11
gttaaagccgtaacctatggactatcacacaacagttctgctactgattacctttgtgagtgcaaccattattctcatattcattcggagattattcaaccaaacctcagaatcagaatatgcaaagcttccaccagggcctcgtccatttcctatcataggaaacatcttggaacttggcacaaatccacacatagcactcaccaaattctcaaagatttatggacctcttatgacttttaaacttggcagaataaccaccatagttatctcctctcctcaagtagccaaagaagtactacttgaaaatggtcaagtcctttctagcagaacaattccacattcagtccatgcacttgaccatcacatatactctactgtgtg

SEQ ID NO: 1493 - DNA, 392 bp, Glycine max
  Clone ID: LIB3028-037-Q1-B1-D12
cccgaggcatgcattgagaaatctgaatttctgatcttgtagcccacgctacaatgcaaaggcatcaattccatacaccaaaggaaattcagcattgtgggtacctcaacattggtctttttataagtgagttaaacataatgccacattgattctcaaccatggaacatggcctccttcagacacacaaccctatttaatataggagttgtcactttttaactaaccaaaatgaaatatgtcaacaataataggcaacttttaattagatttcaacaaattaataccttctttttcatgagatcgattacacaaatattttagcttactttttctcacgcaccctcgtgtacactctgtccaaccacaccaatattctactggatttctgc

SEQ ID NO: 1494 - DNA, 117 bp, Glycine max
  Clone ID: LIB3028-037-Q1-B1-D2
ctctttcttcttttttagctatccctctcttgaaaaatctagatctcgttcttccttgatctacgttacgcttttagtgaccggatctgtatggatctgaaccagatctacacgccg

SEQ ID NO: 1495 - DNA, 387 bp, Glycine max
  Clone ID: LIB3028-037-Q1-B1-D4
ttttgaagcacatgttgctgattttgggctcgctaaattcctgcaagattctggagcatctgaatgcatgtctgctattgctggttcttacggatacatagctccagagtatgcctacactttgaaagttgatgagaaaagcgacgtgtacagctttggagtggttcttttggagcttgtaacaggcaggaaaccggttggcgagtttggcgatggtgtggacattgtacaatgggtgagaaaaatgacagactcaaacaaggaaggagttctaaaagttcttgatcctagacttccctcggttccacttcatgaggtgatgcatgttttctatgtagccatgctgtgtgttgaggaacaagcggtggagaggccaactatgcgcga

SEQ ID NO: 1496 - DNA, 392 bp, Glycine max
  Clone ID: LIB3028-037-Q1-B1-B9
aagctgtgctcagggctcgctatgaagatgctaagttcttttatgagatggacactcgtaaaaggttttcagaattccgaaagcaactgaaaaacattctctttcatgagaagcttggaaccatgctggataagatgactcgtgttgaaaacatggttactaaactaagttgcctcctagatatcaatgaagatgtgcaacaaattatccgggatgcttcctcacttgctatgtctgatcttgccactgcagttgtcactgaatttacatcactttcaggaattatggggcgtcattatgcccttagagatggatactcagagcagattgcagaggccttgctggagatcacacttcctagattttctggggacatacttcccaaaagtgat

SEQ ID NO: 1497 - DNA, 359 bp, Glycine max
  unsure at all n locations
  Clone ID: LIB3028-037-Q1-B1-D5
gctagaacgaggtttgggttatccaaacctggtgacaatttttttgacatttttttaaaaaaataggatgcgtcttcctcaccttcattttcattgatctcttttagtttaacctatatcttctttcacctattcgaccctcttcaacctctttgacgttattcttcatcttttctctcgtaaaccttcacctttcatctccgaactatgacatgatacaattgcacaatagaatatagaacacagagcggttctttattgtgctcaatacaatacaaaaaaagttgtaagatcataanggatcacaaaaagggaacatggagaacataaaaatgcagcaattaaagcacttaaggtca

SEQ ID NO: 1498 - DNA, 386 bp, Glycine max
  Clone ID: LIB3028-037-Q1-B1-A12
gcagacttaacaacagcacaaagcgggttactgtctgttcaagctaccatctctctctctctttcttagtgcctccttgccagaagttaaaatggcccaagaaactttcctattcacatctgaatcagtgaacgaggggcaccctgacaagctctgtgaccagatctccgatgctgtgctcgatgcatgcttggagcaggaccctgacagcaaggttgcctgtgaaacctgcaccaagaccaacatggtgatggttttcggagagatcacaaccaaggccaacgtggactatgagaagattgtgcgtgacacatgcaggaacattggttttgtctctgatgatgttggtcttgatgctgacaactgcaaggtcctcgtcaacattg

SEQ ID NO: 1499 - DNA, 376 bp, Glycine max
  Clone ID: LIB3028-037-Q1-B1-A2
gctgtatttaatctcataggtactttctccaagttgttagctgtaggcattgctgctttccttgtgcacataatagttttcatggagtgccaatttttgtaaaccactaccacgagtcaaagatcactctttgaaacttaaaagggttggctgatgtcttatttattatcggcatacccttgtattgaaacgggaggtggttgcagttttctgagctgtatttaatctcataggtatctttagcacgctgaaaatgaggatctcattgtaaagggtatctcttgttgggaacttgcataattgtatacagtattagtttatctctggatggaaattgtatcatttataaactgctctgactacataaaacagtgta

SEQ ID NO: 1500 - DNA, 373 bp, Glycine max
  Clone ID: LIB3028-037-Q1-B1-A3
cagcgattgatggttggtcacaccaccgaagaaggcttcaggaatctacatagctttttcctcagagcgttgaaaattcccacactcgctcgcttccccaaaatttcacccctttcattcaattcttccctcttctctgctactgatccatccctcgttttctccgaacaatggctgctggtgtcactgtcaagtccgaggttctagaatcttctcctcctgaaggagtttgttccaacacggtggaaaaacacctggtccagaccaatttgtctgatgggtcacccaacaagtctgtgccagcatctggacttgatgcagtgattcccagtgcaaatcagcttaccatcttctataatgggagtgtttgtgt

SEQ ID NO: 1501 - DNA, 385 bp, Glycine max
  Clone ID: LIB3028-037-Q1-B1-A4
ccacaataagtgtcgattttttcctaaataagtgaaagtgtagttacacctttttttgtgtgtttaccacttttgagtgccacagagttctgagtttcataggagaaaaaaaatgacagaagaacaaaccaaaacggttgagtcagaatcagtaacaccaccacctgctgctgctgctccttcacaggttcctcctgctgctgaggctgaacatgttcctgaggctccaaaagatgtgactgaggagaaatctgtaattccagtgccttcttctgatgaaaagcctgatgaatccaaggctcttgtcttggttgagagtaagatatttatatgttgattctggttggttatgttgtcatgttcccaaagctgggaatatatatat

SEQ ID NO: 1502 - DNA, 367 bp, Glycine max
  Clone ID: LIB3028-037-Q1-B1-A5
caactgtatccatctatagagtctagacatcacccaagcttgtgcttattcactgccctgtgtcccccatacactcgcacaccatatgtttgattatttgcgtcagccaacactgaataaaaattgttccttggcagtgttgaatgtggatgcacttgaggccgttctttcgcgaggctaacctgttaaacgggttaacctcgcgagtgcaagcccgttcctatgctcgtcgtcgcgaaccgtttcccaccaaagtttctcactacctccaccgtgcaaaactcattgactccattagacttactctacgctccaacacccccaacccctcccttccctctctcataaaccaccgtcttatggactc

SEQ ID NO: 1503 - DNA, 208 bp, Glycine max
  Clone ID: LIB3028-037-Q1-B1-A6
ctcttgtcgtcggtgttccaattggcaatgctcatgataaattcattatccatccacagacctcattacatggacatagtccatatccacggaagaccacaattggtagcacatcattacatagtgcagctctcgatggatggctcatggttagtttaatcttcacatgtaaagcaagcactcactttggtggttgacacacttcaag

SEQ ID NO: 1504 - DNA, 311 bp, Glycine max
  Clone ID: LIB3028-037-Q1-B1-A7
tgagggaaggtgtacacaatttctttgtaacattcattgaggtgctacgtgatagacctcctggtcatgattgggaacttgaacctggtgtcacatgcggtgactacttgtttggtatgctacagggaacaagatcagctctgtatgccaataaccgagagtccatcacagttactgtacaagaagtgacacctagaacagttggtgctcttattgcactctatgaacgagcagtaggaatttatgcctcccttgtcaacataaatgcttatcatcaaccaggtgtggaagctggtaaaaaagcagcaagt

SEQ ID NO: 1505 - DNA, 374 bp, Glycine max
  Clone ID: LIB3028-037-Q1-B1-A8
gtagtgcagccctctttgattatgcacgtgggggcccacaatttggagcagatgggcttctcattgggcccccattggccccagttatgggtggctttgctgggcctgataccaattctggcattggtgatttaagacaagccaagtctagattgggattgtcttatgccaaaagagaggatgggaaagagtccatttttggtgatgagtcaagggctacccttgaagaagtggaagtcttttgtagtcctcaaattgcaagcttatattagaattgcatattgaatagtgtgtgtgagttataaatctctaatattaatgtttgatttctacgaataaaaaatattagaattgcataaaaggggtaaccgggg

SEQ ID NO: 1506 - DNA, 392 bp, Glycine max
  Clone ID: LIB3028-037-Q1-B1-B1
tcacaatctaagcatcccaaaactaactattgtgctagctacttagttgtgtaagatggcttccaagggaaatgttgcatccacttatgttgcactactcatgtgtctctatttgctttcattcaccatggtgagctctcaaatctcaaccccaccaccaatgccttctcaaaacggtacatgtcctataaatgtacttcgattgggtgtgtgtgccaatgtgttgaacctggtcaatgttacactaggatcaccaccaaccctcccctgttgcaccctcattcagggtttggctgatgttgatgttggtgtttgcctttgcactgccctcagagctaaccttcttggcatcaacttaaacttgccaatttccttgacattgcttctcaata

SEQ ID NO: 1507 - DNA, 384 bp, Glycine max
  Clone ID: LIB3028-037-Q1-B1-B11
cacacatgtatagatatatatatatatatatatatatttaactacttcaattcacttcatcatagttacgtatatgagcatctctatttctctcaattaccttaactagcattgtttcaattcacatataaaatcgtttcgtgctcaacctttgtttgtgtgagatatagagatggaagggttggattcgaataattctacccacaacagcatagccaagggcaaacgcactaagaggatgaggcttttgtccccttgcggtgtcatcgttgctgccatcaccaccaccaccaccgtcacctcgagcacttcgagtgctaattcgggtgcctcgtccaccacatcctacgagagcgatgaggaggacatggcgaattgtttgat

SEQ ID NO: 1508 - DNA, 276 bp, Glycine max
  Clone ID: LIB3028-037-Q1-B1-B12
atccccaatacccatttcggtaaataatataatcgcaatccttcttcactcgcttcgatggcgacagggttactgaagagggcggcgcagaggctcccctcctcgccggggttcaagctggccctcctccgggcccacgcgtcggaggcccaggcccagcaggtggagcccaaggcccgcggcaccccgaccctcaaaaccttccaaatctaccgctggaccccggagaacccctcaaagcccgagctcaaggactaccagttcaacctaaaggat

SEQ ID NO: 1509 - DNA, 389 bp, Glycine max
  Clone ID: LIB3028-037-Q1-B1-B2
gagaggtgaggtgaactcgtgtggggtgtggtagtgtggcagcgacacgtatcaacttcaataatcgcatcgcagaagcagtttccggtgcatctcatcgtctccgaaaatgaacgacgcagatgtctcgaagcaaatccagcagatggtgcggttcatccgccaggaagctgaggaaaaggccaacgagatctctgtctccgccgaagaggaattcaatatcgagaagctgcagttggtcgaagccgacaagaagaagatcaggcaagaatacgaacgcaaagagcgccaagttgaaattcgcaagaagattgagtactcaatgcagctgaatgcttctcggattaaagttcttcaagctcaagatgacgtgatcagtttcatgaaag

SEQ ID NO: 1510 - DNA, 387 bp, Glycine max
  Clone ID: LIB3028-037-Q1-B1-B3
aaaataccaacgcgaacgatttggattcggaggattttcaggagatttctctgtcgtcgttgaatttcgctgaggagttcgagccgccggaggagatttttccggcaaacatcgaacggaaagcgaacagcgttgagcttccgttttcgctgaggataatcaagaagaagctgcagtggaaggaagggttcagagaggcaggggaatccgcgtattgctctgtcaagaaagcgttctcttccatggtttttatcatcagggagcttcacagtttcactatgcagatgagggagtttttgttctacgaagatctgcaagggattctcgaaagggtgcagaacgaaatgcacgcgtccttcgtgtggctgttccagcaagttttctctc

SEQ ID NO: 1511 - DNA, 358 bp, Glycine max
  Clone ID: LIB3028-037-Q1-B1-B5
cgttctttctctcgcaatcttcactacattcaccgagcatttgcattcacattgaatatggctgagactacacaatctaatgctgagttgttggagtggcctaagaaagataagcgccgcttcctgcatgttgtgtatcgtgttggtgatcttgatcgcaccattaagttttatactgaatgttttgggatgaagcttttgaggaaaagagatattccagaggagaaatatgccaatgcttttcttggatttggccctgaacaatcccattttgttgtggaattaacatacaattatggggtgacctcatatgatattggaactggatttggacattttgctaacgcaactcaagatg

SEQ ID NO: 1512 - DNA, 385 bp, Glycine max
  Clone ID: LIB3028-037-Q1-B1-B6
tggaaaagctcaaaagaaatctgaaagggagaatgaattgaaacaatgatttgagcagagcatgaaagaagctgctgataaatatcaaggggcaaacttgtatgtcaaaaatttagatgatagcctcggtgatgataaacttaaggagctgttctccccttttggtaccataacttcttgcaaggttatgagagacccaaatggcataagtcgtggatcaggatttgttgcattctcaactcctgatgaggcatctagagcactcttggagatgaatggcaaaatggtggtaagcaaacctctgtatgtgactctagcccaacggaaagaagataggagagctagactgcaggctcagtttgctcaaatgcgacctgttggaatg

SEQ ID NO: 1513 - DNA, 387 bp, Glycine max
  Clone ID: LIB3028-037-Q1-B1-B7
gcgctatcaacttcagttcagaggacattccaaatggcattggctttgggggacgagtgaatcacttgggtttgtttatatcagcaaactttgatcaaggacatacattttcgtgtaccacgtttggtagcccttgtctctccaagactaaccgtatattgcctgaagtaatagaatgctggggagtcacacaagatgcgacacaagacaagaatgatgctgtcaagggcactattctggagaggttcaaggaagatcgcaacatgctcaaaatggtaggcctagcaaattccagcgagtaaagtgttgcttgcatgcgtttgatataatccacccattggacttttaatatcattgttcatatgccatgagaaatacaactttatg

SEQ ID NO: 1514 - DNA, 351 bp, Glycine max
  Clone ID: LIB3028-037-Q1-B1-B8
cagaagccaaacccaatcacaacaacacatcagaaaaaaagagcacattcagagcaattccaacggttgaattttgtggctgacgacaccccatcgacgttagtcaaataaaacatgtcttgctccgtcgcggttcctaactcgccggtgttctccccatcttcttccctcttctgctctaatcccgacaccatctcttcgtcaccggaaacactctcgctctcgctctcgcaactcatatcttcaagctcatcgacgatgtcgtcatgtccttcagcctctgctgctgcatcctcatcagcatcgccttcctcgcagtctcggcatcgccttcacacactgcccatcgtg

SEQ ID NO: 1515 - DNA, 406 bp, Glycine max
  Clone ID: LIB3028-036-Q1-B1-G4
ggaggttttccgccaaattcgaaaatggtgaaagaaatcgaaactctgacagaagatgaaagacgcgcacttcgtggaagcaaattcgcccctcttccccgcccttccaattccaaacctaggttggctcatccaggtggacccttggcgacgaataaagcagcggctttggccaagtttctggagagaaagctgaaagacccaaatggattggcgtctattaaccctgatatccttgaacttgctgtcaataatgccaaagaaactgtctatgcaagtggtacttctaattcacgaagaaatgttcggcatgtggactcctttggtgactctgattctaatgattctagtgatgaagagcagaatgaactatcctgatgtaaaggaatgcacgaagaagaagaag

SEQ ID NO: 1516 - DNA, 398 bp, Glycine max
  Clone ID: LIB3028-036-Q1-B1-G5
gaatttgtcctccaattcatatacagattttgttttcaagcagcagttcctaagtttcttcaattgcacttagatccagctagcagcaatactcttcccgcaaatgggtccataacccaaagtttgaaaattactaatagccaacatgggaagaaatctcttgtcatgcgtataaggatagcatacaagataaatggcaaggatacactggaggaaggacaagtcaataactttcctcatggtttatgaagcccaatgatcaggggtcattaaggtgatgcacaaaacccatcgttttccccagcactccataattattggtgcggttttcatgtttcattccttcaattgaggaaggtatggttcgaccatctggaccactttttggcttaaatttg

SEQ ID NO: 1517 - DNA, 368 bp, Glycine max
  Clone ID: LIB3028-036-Q1-B1-G6
atgattgtcaacgtccttgtattcatcgttgctacacatttggtagcacggcaatgccatgcgtaggacatgtatccaccccgaatgaacactggtcatggtgcccgtactccggaggtgaaatgcgcaagttggaggcttgctgtggaagccacaccatctttggctttgagacgattcctgaagagtgcgttgaagcagaaaaggaatacgtccgtggcgaacaatatatatcagacgccaaaacagttaaccaacaagcgtacctttatggcagagacctcgaagtccatctcaaggacacatttgtgttcagtagagatggcaccgtactctctaacattccatactacaaagtacatggatat

SEQ ID NO: 1518 - DNA, 392 bp, Glycine max
  Clone ID: LIB3028-036-Q1-B1-G7
gcgttcactggacattgagaggccaacctacaccaaccttaatcgtttagtttctcacgtgatatcatcactgactgcttccctgaggtttgatggagccttgaatgttgatgtcaatgaattccagaccatccttgtgccataccccaggattcattttatgctttcatcttatgcacctgtaatttcagcctagaaggctcaccatgagcagctatcagttggtgaaatcactaacagtgcattcgagccatcatctatgatggccaagtgtgatccccgccatggtaaatacatgggatgcagtcacatgtacaaaggtgacgtagtgcctaaagatgttactgcagctgttggaattatcataaccaatcgcactattcaatttgttg

SEQ ID NO: 1519 - DNA, 412 bp, Glycine max
  Clone ID: LIB3028-036-Q1-B1-G8
tagattttccttttcccgaattcacagttccgtgcgacgaaaacaaaaaaatccaaaacattttccatggcccttctaatccactccctggaaatgtccgttactccccaaattaccccaaaccctaaccttaagctgcgcaaattcaacagcttcaaaccccacacaaagggcaaagcgattgggtcaacgcgtggtgtgagaattttctgcaaggtgaaggactgtgcggttttggatgagaacgtgaattcgtacggtcaattttcggttccggtgaagcaagggtcgaagcagagcaaagaggatgaggaagagaagcagaattactatgtgaatgtgggatatgctatccgaactctgagggaggaaatccctgatctcttctacagggaacttagctttgacatct

SEQ ID NO: 1520 - DNA, 397 bp, Glycine max
  Clone ID: LIB3028-036-Q1-B1-H1
ttccttcatttccatccccttctctcttttaaacctcacgcacaacgaaatcgtgattctgttgttcttttgaaatggaaaacgctccggtggtgtgtaaggaagatgatcagatggatttgcctcccggatttcggttccacccgactgatgaagagcttataagccattacctctacaagaaggtcattgacaccaagttctgcgccagggctattggagaagtggacctcaacaagtctgagccttgggatttgccatggaaagccaaaatgggagaaaaggagtggtactttttctgtgttagagacagaaaataccccactggcttgagaaccaacagggccaccgaagctgggtactggaaaggcacaggaaaagacaaagagattttcag

SEQ ID NO: 1521 - DNA, 325 bp, Glycine max
  Clone ID: LIB3028-036-Q1-B1-H11
atctaggcctctttgtttggtcaagcaccaaaggcgggggggaaccactatgggcgagaccccccggcctccattcttttgcatagtccgggggccggacgctgcatagctgcagggcataacggcgccctcgcctgacaccattcccggatctagcatcacacgggcgggccgggcctgaattcacaccagactcttctttatttgagctgctcccacgcacgcagaccggaagatctcagttgtcctggactggacaactacgtacagatcttcgtgggaccggggagggagtcgcaatcgatcatttctaggattccttatc

SEQ ID NO: 1522 - DNA, 375 bp, Glycine max
  Clone ID: LIB3028-036-Q1-B1-H12
cgccgagacggtctttgccttcttcgactctgcattcgtcttcctcagattcgaacaatggcaacgttcaataaaaccctgttttatgaatgaaagtgcttttaaatttggatggtttttcctgttttatctgcttcacataagattctgcatcttagctgcagttgctcctcctatagttatcaaaggcaaatccctgacgtacgtctatttcatatatgttctctatttaacatgctaatattgctcatatggctttatttttgtcacaagaagactaagcattcaaattcattttccttgcacaagatagttttttttttcattcccttctcaaaaatagaagtaaatgacaaatctattggtcattgatat

SEQ ID NO: 1523 - DNA, 325 bp, Glycine max
  Clone ID: LIB3028-036-Q1-B1-H2
aattgccattaacgtataagttgaaagacttgggagtaacaaaagacgatgatagtatttctgtcacactggctcccatatatggggacaagcctgttacaattaaggacgtaaggataaagcgtgtttatcctgaggtggacgatgaataaatctaaattatgtgtgtgctactgctagggtttgttcctccaagggatactctatctgtcatttgttgtttcttaattagtgtgttgtagttattttccttggaacttaatagatccctttcatctgtgagggatactatgttattgttataataaatgtttgttttattgtt

SEQ ID NO: 1524 - DNA, 382 bp, Glycine max
  Clone ID: LIB3028-036-Q1-B1-H3
ctagctttgagcaacatcatgaagatctccattctctttatcacaatcttttcttgtggttttcttggaaatgttgtttcaaatgctagtcctcttccatatgaagctatttttaactttggtgactctataagtgatactggaaatgctgctcataaccacccacctatgcctggcaatagtccttatggttcaacatactttaaacatccttctggacgtatgtcaaatggacgactaatcatagattttatagccgaggcatatgggatgccaatgttgccagcctatttgaatctcaccaaaggacaagacattaagaaaggagtgaattttgcatacgctggttcaactgcacttgataaggattttttagtacaaa

SEQ ID NO: 1525 - DNA, 408 bp, Glycine max
  Clone ID: LIB3028-036-Q1-B1-H4
ctcagaaccctcgatcactcccacgcgctcctatatcctctccttcaccgtcgctctctccaacgatcacaacaacatcgtcatcccatggcaaacgccgcatctggtatggcagtccatgatgactgcaagttaaggtttttggagctgaagacaaagaggacacaccgtttcatagtttttaagattgaggagcagcagaagcaggtcattgtggagaagcttggtgagccagcccaaggctatgaagatttcactgccagccttcctgctgatgagtgccgttatgctgtttatgattttgagtatctgactgaagggaatgtccctaaaagcagaatttttttcattgcatggtcccctgacacatcaagggtgaggagcacgataatctatgcaagctccaaa

SEQ ID NO: 1526 - DNA, 355 bp, Glycine max
  Clone ID: LIB3028-036-Q1-B1-H5
cgtcatcggaaaatcgacgttgttggttacccctaccgtgaacgaccatgccacggagatcgcggagacttggaagagcagcctggaggatcgtggcggcgtggaaaacctgaagacacctgacgtccacactttcttgcagcacgttgttaccttcgggattgtcaagaacgatgactccgatttgtaccggaagcttgttattgcgtccgcttggaggaaacagatgccgaagctcgcgctttcgcatggtctcgctcagcaaatgcctgatatgattgaagagttgatcagcaaagggcagcaacttgatgcggttcactttacctatgaagtgggtctggtggaaaagttc

SEQ ID NO: 1527 - DNA, 405 bp, Glycine max
  Clone ID: LIB3028-036-Q1-B1-H6
ggcgcacgttagcacaaactatcatggccacggcaacagcagctgccacctcgtcctttatggggacgcgtctcctggaggctcactccggagcggggcgagtgcacgcccgattcggcttcggcaagaaaaaggctcccgccccaaagaaagcctccaggggatcgggccgagacaccgacagacccctttggtatccgggcgccaaagcgcccgaatacctcgatgggagtcttgtcggagactacgggttcgatccgtttgggctacggaagcccgcggagtacctgcagttcgagctggactcgctggaccagaaccttgcgaagaacgtggctggggacatcattggaaccaagaccgagctcgcggacgtgaagtccacgccgtttcagccctacagcg

SEQ ID NO: 1528 - DNA, 398 bp, Glycine max
  Clone ID: LIB3028-036-Q1-B1-H7
attgctttggcgactagatgcccccatctgaggtccctaggactgtactactgcaagaacatcacagatagagcaatgtattccttggcacacagcaaggtgaacaacaggatgtggggaactgtgaaaggaggaggaaatgatgaagatggtttaaggactttgaacattagccaatgcactgcactcaccccatctgctgttcaagctgtttgtgactcattcccttctctccacacatgctcagggaggcactcactcatcatgagtggctgcctcaacttgacatcagtgcattgtgcctgtgctgtccatgcgcaccgtgcattcaccactttcccttatcctgcccattaagaagctcatgcttttgatgttgaacacacttcgaggatgtg

SEQ ID NO: 1529 - DNA, 358 bp, Glycine max
  Clone ID: LIB3028-036-Q1-B1-H8
gggcactagcaaggttgccagtggtgatacccatatggtttttggccataatcttccctttctttgggcccataaactctgcagttggggctcttctcgttagtttcacagtctacatcatccccgccacagctcatatgctcacttacagaaaagcctcagcaagacagaatgctgctgagaagcctcctttctttatgccaagctggactgcaatgtatgtctttaatgcattcattgtggtgtgggttttggtggttgggtttgggtttggaggatgggccagcatgaccaacttcattaggcaaattgacacatttgggctctttgccaagtgctaccaatggaaggccccaac

SEQ ID NO: 1530 - DNA, 355 bp, Glycine max
  Clone ID: LIB3028-036-Q1-B1-H9
aaacctttcgttcttgtaaactttattgattgattctgagaatagaactacgagggtatagacatggctatcgcaattgcagcttcttttttggttctgcttctggctttccccactgtatttggagctgaccatgaaattggtgacactagtggatgggccctcggagttaattacaacacctgcgcctctgggacaactttcacagttggtgacactttggtgttcaagtatgactccactcatcaagttgatgaggttgatgagagtggatacaacagcatgcagctcaagcaacagcatcaagaactaccaatatggaaactccaagactgaattgacttcaccaggcaaa

SEQ ID NO: 1531 - DNA, 392 bp, Glycine max
  Clone ID: LIB3028-036-Q1-B1-G3
gggaagctggtgatcaaagtatgccatatggtggtggtggtccagagaattctcactctcagggcttcttccaaccattggaatgcaaccctacactacatattggtcctgattacaggtacaatgctgtagcttcagatcagataactgccacaactcaacctcaacaagtgagtggctttattccagggtggatgctttgaactaattaggctcagtgcattcaggtggagacataaaaaagcaaacaccttacaaaagggcaaaagccaaaaatgcatcttggtgttggcaaggtgtaaatgcaaccctgcttctacagttattttggtgtataagaaactgatgttgtgacttgttcaaacttttgaacttttagccatagacatata

SEQ ID NO: 1532 - DNA, 393 bp, Glycine max
  Clone ID: LIB3028-036-Q1-B1-F1
aattagtactctcgttaatttttttgctaattgctaattgggcacaatggaaaagcttcatgctgtgtgcatcccatacccagcacaaggccacataaacccaatgctcaagctagcaaaactccttcatgttagaggcttccacatcacctttgttaacacagaatacaaccacaaacgccttctcaaatcaagaggttctgattccctcaatagtgtcccatcatttcaatttgaaaccatccctgatggtctctctgataaccctgatgttgatgccacacaagacgtagtttctttaagtgagtctactacaaggacttgtttaactcccttcaaaaatctcctttcaaaacttaatagtgcctcggatactcctcctgtgacttgcat

SEQ ID NO: 1533 - DNA, 377 bp, Glycine max
  Clone ID: LIB3028-036-Q1-B1-F10
atgcaaatgtaatagacctcggaattggtgatacgacacaacccttaccaacaattgtaacatctagcatggttgattttgtgcatggcctttcaacagcaacaggctataaaggatatggaccaaagcaaggtgaaaaggccttgaggaaagcaatttctgttacattctacaatgatctggggataaaaccttctgatgtttttgtttcagatggtgcacactgtgatattactcgtcctcagctgcttatgggtcccaatctgaacatagctgtgcatgatccatcctttccggcctacatagattcgagtgtcataattggtcaagctggcaagtttgtacataaagctgggaagtacaaagacatataatac

SEQ ID NO: 1534 - DNA, 368 bp, Glycine max
  Clone ID: LIB3028-036-Q1-B1-F11
gtgagtgatcggtgttcacctgatccgtcataagtcgtcatcatcaacatcagcatcaccgttgattgaagaagatgccgatcagaaacatcgccatcggaaggcctgaagaggctactcaccccgacacgttgaaggcggggttggctgagttcatctccaccttgatcttcgtgttcgccggttcaggttccggcatcgcctacaacacgctcagcgacaacggcgccgccactcgcgccggcctcatctccgcttccatcgcccatgctttcgcccacttcgtcgccgtctccgtcggcgccaacatctccagcggccacgtcaaccgcgccgtcatcttcggcgccttcgtgggcggcaacatc

SEQ ID NO: 1535 - DNA, 424 bp, Glycine max
  Clone ID: LIB3028-036-Q1-B1-F12
ggagagacaagcattgctgcatgcacgtctactctagctgatcccctccggggaattccaattcgcacattttcaagaaataaggaggcaaaaatgttcatatatgaattggcattatttgttttcttattaggcctatcctgaagccaaaggaaatgagatcggaattcctcggggaattccaattccacattttcaagaaataaggaggcacaaatgttcatatatgaattggcattatttgttttcctattaggcctatcctgaagccaaaggaaatgagatcggaattcctcggggaattccaattccacattttcaagaaataaggaggcaattatgttcatatatgaattggaattatttgttttcttattaagcctaccctgaagccaatggaaatgacattcgaattcctcagggg

SEQ ID NO: 1536 - DNA, 321 bp, Glycine max
  Clone ID: LIB3028-036-Q1-B1-F2
ggctgcaagagaggaagcatatttgtggaatgacaggtgatggtgtcaacgatgctcctgcattaaagaaagcagacattggaattgctgttgctgatgctacagatgctgcaagaagtgcttctgacattgtcctcactgaaactggtctgagtgtcattaatagtgcagtgctaaccagcatggcaattttccaagggatgaagaattatactatctatgcaatgtcaatcatcattcgtatagtatttggtttcatgtttattgcattgatttggaaatttgaatttgcacccttcatggtgttgattaatgccgtac

SEQ ID NO: 1537 - DNA, 398 bp, Glycine max
  Clone ID: LIB3028-036-Q1-B1-F3
gagaaagggtgggtattgcttcacacagacacaacagtgtctgctgcaccttgcaatggtttcgctatcaacatggtttcgctacattgcccacaagctcgaatactccttctccctcagctggaagaactacaaaggaggtcaaattacagacagagaggtacgtgatgttgtttggaaaaacttctttcaaggaaagctgacgtacttgcactggaataaaggagaggagatggcccctactattgatggaaaagcagtaactcttgttcggaaattaccagttgtagacccaacgcgtgtttttgtaggagatgttgtggttgtgaaggaccctgagaagccagataactacctactcagaagattaactgcagttgaaggctatgaaatggttt

SEQ ID NO: 1538 - DNA, 381 bp, Glycine max
  Clone ID: LIB3028-036-Q1-B1-F4
ggaactcgacctgagaagaaagatacccttaattcgcatgcgcgtcttgtgttggacaacaaccacaagatgattaacttcgaagaaaccgagttgcgactcggcctccctggtaacgactcagcactcaagggaagtgctgccaagagaggcttctctgaaactgcttctgttgatttgaagcttaatctttcttcttgcattaacgactctgcctcggattcaccctcatctatgtctacagagaagcccaaagagaacaagaccaccactgctgaacctcctccagctaatgatccagcataaccacctgcaaaggcacaagtggtaggttggccaccagttaagtcatttagaaagaacatagttcaaaggaacagc

SEQ ID NO: 1539 - DNA, 376 bp, Glycine max
  Clone ID: LIB3028-036-Q1-B1-F5
gtaactagccgcagcacgaggagcagcctcaggaggagaaggatgtctcacaggaagttcgagcacccaaggcacggttcactgggatttcttcccaagaagcgtgctgctcgtcacaggggaaaagtgaaggcattccccaaggatgaccgcatccaaggcacccaagctcactgcattcttgggttacaaggccggtatgactcacattgttagagaggtcgagaagccaggatcaaagcttcacaagaaggaaacttgtgagcctgttacaattattgagacccctccaatggttattgttggtgttgtgggttatgtgaaaactccacgtggtctccgaacattgaacactgtctggggctcagcatttgag

SEQ ID NO: 1540 - DNA, 413 bp, Glycine max
  Clone ID: LIB3028-036-Q1-B1-F6
agaagatgtcgggtatgggagacgggtacgtgggcaccgcccaagacgcggtgaggattcgacggttggagaagcagagagaagcggagcgtcgcaaaatccaagagctcaaaaccaagtcgacctccgccaagggccaacccggtctcctccaattcggttccagcacttccgagattcttgagactgcctttaagaaggaaactgtgggtttggtcactagagagcagtatgtagaaaagagggttaacattcagagcaaaattgaggaggaagagaaggagaaacttcagaagcaacagcaagaagaggaggagcttcaattagaaaagcgtaaaaagaggaagatcaggggcaactctcgattgtcctttgctgaggatgttgacaatgatccccaagacgacgaacca

SEQ ID NO: 1541 - DNA, 264 bp, Glycine max
  Clone ID: LIB3028-036-Q1-B1-F7
cctaatttttcgatttcagttagcgtatcatcatcacttaaggagataatggtgtcaaacgtgggagaggcaatgaagaggaacaggcacatgcaaccatatgcacagaatcagcagcagcagctgcagaaacagcttcagtgcaacacacgaaaagctggcaagttcattacgagcagctccaatctggaagaggatggggcttcgtctgccagtctcttactaacttgcatatcttgttcaccttccgatgcttaacgcgca

SEQ ID NO: 1542 - DNA, 375 bp, Glycine max
  Clone ID: LIB3028-036-Q1-B1-F9
gtgaagtttctggctttcataactggctgcagttttaccttgaagaagcaaaggggagagttgattatcaaggatatatttttccccgtcgacggggagaaactcctgactctgaagctcagcttctgactattcagtttgaatggaatggtgtcctaaaatctgtatccagcactttggttggagtgagccctgaatttgaaattgctttgtataccctgtgtttctatgttggtagggaggataaccacattcagcttggtccatatggggttaatatcaagtgctatcgattgggtgatcgaattggatctgttttccccattgcagattcttgaattttcagtttccagcattggtaatagttgttcccca

SEQ ID NO: 1543 - DNA, 405 bp, Glycine max
  Clone ID: LIB3028-036-Q1-B1-G1
atttgttctaagttcagatgctagtttacattctactgaagatacaagagggaaaccttactcaacatttgaggctgctgatgctgaaaaagaactagatatgcttttagattcatttggtgagaccaacattctagattcttcgggctttaagtccaacacctcgattccagtttcatcgggagtagcttctgtgtatcctcctcacatttcaaataaagatccagttccatccaaaactgcaccaattactgctagtctagatgatgtacttgatgacttgctggaaggaacatccacgttgacgaatccaaatgttttattacgaccgcaggaagaaaaacccgtccatcacagcatgcaatcttcttcaaattctggtagcaagtccaaagtggctgatga

SEQ ID NO: 1544 - DNA, 317 bp, Glycine max
  Clone ID: LIB3028-036-Q1-B1-G11
agaagttgagttgagttgaagttgcgcctgaaataaaattgagtgagaatacacagacacaaaacctgaagcaaaccgtggatttggaaggcagtgagaaaaacacgccatccaagatatcacaaatcaagtatccgcatgccagtgacattgacgatcaagaccacagaatgagccatccacctaggaacgggactcaacgcgacttggtcgcagtccagtatattgggacacgcttctccggatcacagacacaactcagtgtccgtagcgacctcggtgcgcgtgaggaaaccttatccaactgtgctggtcaa

SEQ ID NO: 1545 - DNA, 346 bp, Glycine max
  Clone ID: LIB3028-036-Q1-B1-G12
cacgcacacataaatgtttgtttggattggtcagtgtgtggacccaaaagaaaagcacacagcttttgaaattgcccataaatacatagataaggctgcatctctggaaggactatctcctcatgtaccactatacaaagtaacagaatggaatgaaccttgctttttcacaacatacttttcttgggatcatgcaaaagctatggtgccatggaactcattccagaaaaaggtgacattactctttggaactggccatcctgtacaggaaaagtctaatgggtcaagtcaaagagggggaccaagacaaagagcagaaactttggctgccttaaataatgcattc

SEQ ID NO: 1546 - DNA, 348 bp, Glycine max
  unsure at all n locations
  Clone ID: LIB3028-036-Q1-B1-G2
aattatgctggtttcaggtgcaattatgtgatcgacagtagatccttacagcaaacgcaacacaacatttgttgccgcagatgcttaaaaagtacaagactcagctttgtatattcatttggatgagactatgtagtcaatcactcatcgaggcattaaatcgtacatcctcaaccaccatgntttcaatcgcgagagctactcattcatgttgtagaccatcctgcacactatcagccttccgatgtacttccaccgtacatgcaccaatgttcgctagtctagatgatgtacattctgacatgctggaaagaacatgttcgtcaatgactacagatcttttaccat

SEQ ID NO: 1547 - DNA, 336 bp, Glycine max
  Clone ID: LIB3028-036-Q1-B1-E9
cgccagggtttcctccatctgaacgaacatgccctcctccacgttctagaaggagattgacaacaaccacactgttgtgcgacgcgatggcccactgcatcgaccttctcagtaacgctggcgatgacatgcatcaatcctttcgcaacttggaccactctgaactagacaagtcgagcaattacgcctatgatctcaacgtcaggatcgcaggtactctcgctcacgaaaagacatgtttggatgagttcgagaacatcaacaccgaggctggcagcgacaaggtcagggttcgcaacacttctttggatctcacatgatcccattggtcatagt

SEQ ID NO: 1548 - DNA, 263 bp, Glycine max; identical to SEQ ID NO: 360
  Clone ID: LIB3028-036-Q1-B1-D10

SEQ ID NO: 1549 - DNA, 368 bp, Glycine max
  Clone ID: LIB3028-036-Q1-B1-D11
cttgctcttagccctcctcctcttcgccgccgtggccaccgccgcgatggcggtggccgcgtccgacgccgacgagatcctgatccgtcaggtggtgccagatgttggcgaaaccgaagaggaggacaacctgctgaacgccgagcaccacttcgcgagcttcaaggcgaagttcgccaagaccgacgccaccaaggaggagcacgatcatcgcttcggcgtcttcaagtccaacctccgcagagccaggctgcacgccaagctcgacccctccgccgtccacggcgtcaccaaattctccgatctaactccggccgagttccgccgccagttcctcggcctcaagccgctccgcttcccggcgcacg

SEQ ID NO: 1550 - DNA, 362 bp, Glycine max
  Clone ID: LIB3028-036-Q1-B1-D12
cgacaacgaatggggatacagctcacgtgtcattgatcttcttgtattcgttgccaagaagtctctttaaggtgttacttcaaagtagcttgtcttcacattattaccgtatgtttatgtttagctgcgatttagtgtcttgctcgagcaaaaaatgagaggtctgaataaatcggtttctgaaaccagtggtgttacttgttggaggagcattagctcttttttggacttttgatgttttctcttgtggagggggatcgagtttttggatttttatatactcgctgatgtacttggcttgaatacttgctaatgtacttgttattgattgttagagtagatatttgtccgtcctttttttc

SEQ ID NO: 1551 - DNA, 300 bp, Glycine max
  Clone ID: LIB3028-036-Q1-B1-D2
ctcgagccgattcggctcgacggaagcagacctcagtacacacctcagtcacgaatatgtccacattacctgaatctctgtctatgggcgacgtcttcgacggcagtagtgcaccaacaccttcttccactggccgctcattttggtcccttgaaatttcactctccttttgcaaagatggtgtgaaattgagggagacatttaccattattattattgttactgtgtcactatattagaaaatggagagtatattgcgtcatttttatgggttgagttccgattaatgtaacggtaatc

SEQ ID NO: 1552 - DNA, 375 bp, Glycine max
  unsure at all n locations
  Clone ID: LIB3028-036-Q1-B1-D3
cttcatcaagctccgctccaacacaggggaaaatgagggagatccttcacgtgcagggagggcaatgcgggaaccagatcggttccaagttctgggaagtggtgtgcgacgagcacggcatagatccgacggggaagtacgtcggaaactcagatctgcaactcgagcgcgtgaacgtctactacaatgaagcctcgtgcgggcgcttcgtgccacgcgcggtgctgatggacctggagcccggaaccatggacagcgtgcggaccgggccgtacgggcagatcttccgccccgacaacttcgtgttcgggcagtccggcgccgggaacaactgggctaaggggcactacaccganggcgccgagctcatcgact

SEQ ID NO: 1553 - DNA, 392 bp, Glycine max
  Clone ID: LIB3028-036-Q1-B1-D4
cggctcgagatttggttttactaagcagaacgagctctttgtgggtcgtgttgctatacttggttttgcaacatcactgttgggtgaatgaataactgggaaatgaattctagcacaattgaatctggaaactggaattctcctttatgaagctgagcctcttcttctgtttttcatcctcttcaccctgctacgagccattggaggtttaggtgaccgtggaaaatttgttgatgacgaacctactactggaggtgttattcctccacgcaaaggcttcatggaagctcttggtcctggttcaggtcccttatttggattcacgaaagcaaacgaactattttgtggaagattggctcaattgggtttcgttttctcattgattggagaaa

SEQ ID NO: 1554 - DNA, 381 bp, Glycine max
  Clone ID: LIB3028-036-Q1-B1-D5
ctcaaacacaactcaccaacacagttgttgcattatttcttttttccagatccaacttcaaaattgcaatgggagtggaagatacagatatttgtatcatcaaggagccagatcatgttgtagtctattcagatggcatttctcatgattcgggtcatgaagctggaagtggtcatcacaatattacagagtcgtatgaacaaatcaatgagactactgaacatcatagttcagaggatagtgcaaaggaatatgaggtgaaggaatgcacaacagaagtttctgttaaggtctctgatgtctctaatgttaaaaaatgtgaggataagttaacctcagattctgagggtgtcgtcagtgagaaaagttttaaatctaaca

SEQ ID NO: 1555 - DNA, 392 bp, Glycine max
  Clone ID: LIB3028-036-Q1-B1-D6
ggagaagctgttttcgttcgtcgccactaacactaatcgtttcttcaatgccttacgagaaggaactcgccgctgcaaagaaagcagtcactctcgctgctcgtctctgccataaagttcagaaggctcttctgcaatccgatgtgcactcaaagtcagacaaaagtcctgtcacagtggctgattatggttcacaagcattggtcagctttatacttgagagagaacttccttctgaatcattttcattagtagctgaggaggattcaggtgatcttcgtaaggaaagtggccaggatactctgaatcgcattacagaacttgtcaatgatactcttgctactgaaggatcaaatagcttttctactttaacaacagatgacgtgcttgtg

SEQ ID NO: 1556 - DNA, 383 bp, Glycine max
  Clone ID: LIB3028-036-Q1-B1-D7
ctctctcacgcataactcaaacacaaaaaaatagagcttttgatgagaaaatacaccatccaaaatccatgatccaacaccatctactattattgttgttttgaggttgaaaaaacacaattgggtatatatagaactccaaaacctacgagaagaaaagaagacagtgatcaaaaaataaagtgaagcatggaaaaggacaacgagacgtatctgaagctcttttgggggcgttctaatcatgagaagtcatgtttgctgtcaaagaagggcaaaagcacggcacttagcaccaccgtgattttgctcgtttgctttgtaaccactttccttgttttgactatctggaatacgtccacatttgcagctctttccattccaat

SEQ ID NO: 1557 - DNA, 357 bp, Glycine max
  Clone ID: LIB3028-036-Q1-B1-E10
aaagcattccatagcctcccataaaaatgaagaatactatcttctctgctctctttctactttgtgccttcaccacctcatacctaccttcaaccaccgcggtggtcgataccgacggtgatattcttcagaatcctggtacatactttatcttgtccgtttttcgacccggcggcggagtagaattcgccgccactggaaacgaaacttgccctctcactgtcgtgcagactctcttcgggaggggctttccagcaatattatcgtcccggttacgaatccctttcatcggcgaaggacaactcttcagcatcctgttccgtattgtgccatggtgcgccaccaacccttctaagt

SEQ ID NO: 1558 - DNA, 367 bp, Glycine max
  Clone ID: LIB3028-036-Q1-B1-E11
cttgggtggtgccttttttctttttctttctctctatcgattctcgtaacaaaccctacccttttgagtcttccaagttttcaccatcgtaatgggttccgaaggatccagcgtcgtggttcctaggaatttcagattattggaagagcttgagagaggtgagaagggaattggggatggaactgttagctatggaatggatgatgctgatgacatatacatgcaatcttggactgggactatcatcggtccccctagtactgttcatgaagggcgtatctaccagttgaaattgttttgcagcagggattatccagacaatcctccatctgttaaatttcaaacaatgattaacatgacatgtgtc

SEQ ID NO: 1559 - DNA, 338 bp, Glycine max
  Clone ID: LIB3028-036-Q1-B1-E12
gtttcatttgtgaaactaacaacaacacaaggccatcatcatggcagctgcttccccaatggcaagccaactcaagtccaccttcactaggactcttgtagctcccaagggcctctctgcctcttcaccacttcacctcgtgccttctagaaggcaatttagcttcactgttaaggccatccaatcagagaagccaacctatcaagtgattcagccaatcaacggtgacccattcattggaagcctggaaaccccagttacatccagccctttgatcgcatggtacttgtccaacctgcccgcatacagaaccgcagtgagcccactactaagaggga

SEQ ID NO: 1560 - DNA, 351 bp, Glycine max
  Clone ID: LIB3028-036-Q1-B1-E2
ctctagccgctcgagccgattcggctctagtccaatatattccattctctctgtgtatttcccgacgtctcccttcaagatgcacatcttcgtcaaaaccctcaccggcaagaccatcacccttgaggtggcaagctctgacaccatccacaacgtcaagggcaagatccaggacaaggaatgaatccccccggaccatcaacgtctcattttcgccggaaagcaacttgaggacgggcgtacccttgctgactacaacattcagaaggagagtactcttcacctcgtcctccgtctccgtggtgggatgcagatcttcgctaagacactcatctgcaagaccatatccct

SEQ ID NO: 1561 - DNA, 377 bp, Glycine max
  Clone ID: LIB3028-036-Q1-B1-E3
ctttttcagttctctctctctctctctaagatggccgacgatccaatgcccacgcgctggtctttccaggacttcaaattgtgttatgatgctaagtttggtagaaagaaagtcgcggagaacggagatgatgctgccggtaaagcggtcagcaatggaaatggaaattcagtgacagtggccattgtgtccaatggcaacaaaagggcatcggaaatggctgtttatgagcagtttcgaagcgaggggcagaatcagattcacacaaatggctttgtgccgacccttacagagtgaaaggccgcagaagtctttgcttccagcctttgaatctggggaaatgcgagctttagcagagagcttaagttgggatatca

SEQ ID NO: 1562 - DNA, 329 bp, Glycine max
  Clone ID: LIB3028-036-Q1-B1-E4
ctcaatttttctctcaaccggcccaatttagcataagcccagcatggccaccgcaacagcagcagccacctcgtccttcatggggacgcgcctcctggaggcccactccggggcggggcgggtgcaggcccggttcgggtttggcaagaagaaagccgccgccccgaagaaagtttccagggggtcgggctctagctccgataggcccctgtggtatccgggcgccaaggcgcccgagtacctggatgggagccttgtccgagactacggattcgacccatttgggctagggaagccccccgagtacctgcagttcgagttggactcgc

SEQ ID NO: 1563 - DNA, 255 bp, Glycine max
  Clone ID: LIB3028-036-Q1-B1-E5
cttccgaggtaaaatgcgcaagttttaggcttgcagtggcagcacacaagatccgagccttgaaaaccattcctgatgaatgcgtagaacgaatcaaggactacattaagggcgaacagtttagatcagactctaaaacagttaaccaacaaggtttcttttatgcaagggaacggcaagtccatcacaacgacatatttatattctgcatagataacaccgtactctccaatatcccatactatgagaaacatg

SEQ ID NO: 1564 - DNA, 398 bp, Glycine max
  Clone ID: LIB3028-036-Q1-B1-E7
gacaagaagagatgggtacaggagaagatcgagaaggggtcgcagtaaccgggggcttcttctggtcctacacagacgaaccccatgccacacgacgtcgtcagatcctctccaaataccctcaaatcaaacaactctttggccccgaccactctgctttcttcaggattagtggagttgttctgcttcagcttggtacgggtgctttacttcatgatgctggctggctgaagatatttttagtagcatacttttttggttcttttctcaaccacaatctctttttggctagccacgagttgagtcacaacctggccttctcaaccccagtctacaaccgttggtttgggatttttgccaaccgccctataggtgtggccaaggtccgttaccgtcca

SEQ ID NO: 1565 - DNA, 392 bp, Glycine max
  Clone ID: LIB3028-036-Q1-B1-D1
gccagaactgtgtgaaaagcacaagaccaaccctcgtcgtgccatggttgaacttgtgagctcaggagctgcccctggccctgtttctgacgtgtcagaggccattattgcatcagcacctgccccttctgccctgtaattttggtcccttgaaatttcactctccttttgcagagatggtgtgaaattgagggagacatttaccattattattattgttattgtgtcactatattagaaaatggagagtatattgcttcatttttatgggttgagttccgattaatgtaacggtaatcaagagttgcgcgtggtgttgataggtttatgttatgttgttgttttccaagtttctcaaattttgggaaaaaaaaggggggaggggagggggg

SEQ ID NO: 1566 - DNA, 366 bp, Glycine max
  Clone ID: LIB3028-036-Q1-B1-B12
gttgtgcttccaccaatagtgaagcccccgggttttctccctccaattcttaacccaccaagtacaccaacaccgtcgccggggaagggagggaacactccatgtccaccaccaaagtctcctgcacaggctacatgccccattgacacgctcaaactaggtgcttgtgtggatcttcttggtggcttggttcacattggcttgggagaccctgttgcgaaccagtgctgccccgtgcttcaaggcctggttgagcttgaagctgcggtgtgtctttgcaccactcttaagctgaagcttctcaacctcaacatttatgtcccacttgcccttcagcttcgtgtggcttgtggcaagtctcctcct

SEQ ID NO: 1567 - DNA, 408 bp, Glycine max
  Clone ID: LIB3028-036-Q1-B1-B2
aacagctaagctttatctctatggatcatgtgctaattcgtttggtgtttctaaaagtgacattgatgtttgccttgctattgaggaagcagacatggaaaaatctaagattataatgaaattggcggatattttgcaatcagataatctgcagaatgtgcaggcattgacgcgtgcacgtgttcccatagtaaagctcatggatccagtgacaggaatatcttgtgacatatgcattaacaatctcctagctgttgtgaataccaagcttcttcgggattatgcacacatagatccaaggttgcgtcagctggctttcattattaaacattgggctaagtcaagaagagtcaatgaaacttaccatgggaccttgtctagctatgcgtatgttttgatgtgcattca

SEQ ID NO: 1568 - DNA, 237 bp, Glycine max
  Clone ID: LIB3028-036-Q1-B1-B3
ctcatattttggagaatccgaaaaacacgttaaagaaagtcccattcccactaccgaagcaaattaagaagatgaagatgaagatgggcatgggcatgggcctgggccttttggtggtgatgatggcatgtgggtcggcgagtggtgcggatgatttggcaaccaagtgttcaacggtgattcagaaggtaataccgtgtttggatttcgccaaggggaaaggagtaacgcccaaaa

SEQ ID NO: 1569 - DNA, 375 bp, Glycine max
  Clone ID: LIB3028-036-Q1-B1-B4
taaacctacaattcacccgtttgtgattcctggaccacctccctccctaccaaaggacccgaggtgtagtgtcaacaagaaaaagaagagaagatcacacaagttcaatcggggtcttccagattttgctggaaacagcacggatttgcacagaagccaccatgttgataaccgtgcttcaagctcacacccattgagcccatcattgcctctactttcacatacaggagctctaggaactcagcagattgaatctgaccttaacttgcctcctctaaatttgaaagtggcaagcatcgtcacactcttcaaaaaaagcaagatcatgactgtctccatctcctgaagtgctccagttggatgcatcaagtgttg

SEQ ID NO: 1570 - DNA, 380 bp, Glycine max
  Clone ID: LIB3028-036-Q1-B1-B6
tgaccgtgaccatggcggctgcgtttacaagtacaagtgcaacactgagactgtcaaatgttggagagagcagaggtttgcagctgcgtaagtgtaaccctaatcctaataagctgaaggttatgggggggtttggaggttgttctggagtggcagtgggtgtgagagaaagaaaacgaattggaatggttatggttcgggttcgagagagttcttcgacggacgatgcagttagtgcgcagtcataattgaataagaaagtatactgtgacagttgtaatggcaatcaacttgggaatcttgtgggacctaacgtgattggactgtactgtgacaatgttgaccaatagggaagagaacttctgtgccctttgaactgg

SEQ ID NO: 1571 - DNA, 121 bp, Glycine max
  Clone ID: LIB3028-036-Q1-B1-B7
tggccctaaaatatttgaacctagagcttggtatgatcttgacaaatgtcccaacttcattggaaagttcttacatgaaaaacccctcaagaaattaaagaaaccccaatggattaaacaa

SEQ ID NO: 1572 - DNA, 89 bp, Glycine max
  Clone ID: LIB3028-036-Q1-B1-B8
aaaaaaattagaccacagtttgtacagctaagagaaaaaaaaagataaaaatatttgagatttaataaataatgtaatggagagacatc

SEQ ID NO: 1573 - DNA, 377 bp, Glycine max
  Clone ID: LIB3028-036-Q1-B1-B9
ttggacatgtgtgagctgtggctttgcagggaagaagagtgtcagtagaaaataaatgtcctcttcccagggacactctctatttcacagatctatatctaagtgtcggtgatcccctttctccttccttctctgagagacaatgacaatgacgtgggcgcgattcgattcgtggaagcagcaatactacaccacaagcggcgtggtggtaggttacgcagtatgctccagcctcctggccatcatcaacaaatacgccatcaccaaattcaactacccaggcctcttaaccgcgctccagtacctcacctccgcactcggcgtctacgtctttgggaaattagggtttctccaccacgaaccctttaaccctccca

SEQ ID NO: 1574 - DNA, 283 bp, Glycine max
  Clone ID: LIB3028-036-Q1-B1-C1
aaagcaagctcatcctagagttttaaaaatggcagcagcctcctccatggctctctcttccccatccttggctggcaaggccgtgaagctgggcccatcagcccccgaagtcgggagggtcagcatgaggaagaccgtcaccaagcaggcctcctccggaagcccatggtacggcccagaccgcttcaagtacttgggcccattctctggcgagcccccgtcctacctcactggcgagttcccaggtgactacggctgggacactgctggggcttcggccgac

SEQ ID NO: 1575 - DNA, 353 bp, Glycine max
  Clone ID: LIB3028-036-Q1-B1-C10
gtccgaacttcttgaaggttaacacgtataggctactcaggcagcagagtgctatatataactacgttgaatacggagacattgacccaacgcctttgggctgttttcaagaaaaagtgattagatatctcaggtcttgataccacaacggaaaaacggtccttctcccatcacactctcgctaggacacacacaagtgaagccaggatcatcccactgactacttttggcaaggctagtccaagtgccgcacacatcaccaacgttctgcaacactcaggatcgcgcatcattcctgattggacaaaatctaatgtgtacagcccagacaacaccagcacgtcgagtgtttc

SEQ ID NO: 1576 - DNA, 407 bp, Glycine max
  Clone ID: LIB3028-036-Q1-B1-C2
cttttcatcattctcatatcctcaatcaccccccctcgcactcgctcttcccttcctctggtggcgacaatgtcgactcctgctaggaagaggctgatgagagacttcaagaggctgcaacaagacccgcctgcagggatcagtggtgccccccaggataacaacataatgctgtggaatgctgtcatatttggtcctgatgatactccatgggatggaggcacgttcaagttgacactccaatttactgaggactatccaaataaaccaccgactgtacgatttgtgtctcgcatgtttcatccaaatatttatgctgatggaagtatttgtttggatatattacaaaatcagtggagtcctatttatgatgtggctgctatactcacatctatccagtcattgct

SEQ ID NO: 1577 - DNA, 296 bp, Glycine max
  Clone ID: LIB3028-036-Q1-B1-C4
cgcagccacttttgaacataggtggtaattaccatgatgaagcaccagaagtatggaggcatgaacttgacctgacgctggaaccattatattccctgtcaccttggatgcttttgaatactttcttacaagtggatgatattatataactatatatgtggtatggcaattgacaacatatttgatggcttatatatgccgccaagttttgtgggtttccctaatctgaagacgcgtatgtctattgtgtgttgtaagttcataatttggttacgctttcctaagtggaagctttg

SEQ ID NO: 1578 - DNA, 395 bp, Glycine max
  Clone ID: LIB3028-036-Q1-B1-C6
ctcttctctcttcactcttcactcttgtcgtcatttcctcacaaaaccagtgtccgtaacatctccaccttaacgatgtcggtaaaggagtgtcaccaccacaagggaaagaagcacaaactctggagacgcatcttctggggcatagtgatcttcgccttcatcgtgttgctaacagttcttataatctgggcaatcctaaagccttcaaagccaaccttcatcctccaagacgtgaccgtctacggcttcaacgccaccatccccaacttcctcacctcaagctttcaggtcacgctttcctcgcgcaaccccaacgacaaaatcggagtctactacgaccgtctcgacacctacgtcacttaccggaaccagcaggtcacgtaccgaacctc

SEQ ID NO: 1579 - DNA, 244 bp, Glycine max
  Clone ID: LIB3028-036-Q1-B1-C7
gttcccagtaccaccttcttcctctcatccttaggctttatatattaatattgcagaggtagatgattactcttgttgggtctgcaagatatgcatgcattttttctgtcttcttttttgtgctttccgtatgatcaagtatattgaggaagtctatttgttgctaataaagccttggaaggatagggcatgtgatgagcctggggtgagaatatacatcaaatttaaactaatatagagcgat

SEQ ID NO: 1580 - DNA, 302 bp, Glycine max
  Clone ID: LIB3028-036-Q1-B1-C8
gtgtgcaatgcaatcatattcctcacatctacaaggattatgtagacccaacccataagtagatgaatattccagttgagtctgaagcacatgcacccactccatccatcaacgagatggagccatcaatactgataaatgaatttcctgaagccgatgcctgtcaaagactcactgagtcaaggatatggtatgtccagaacctaaggtcatggggttttgaatatcataactaaccatatacaaatgtatacatatctgtctcgagcagttaagtatcactgtgatggatattgtggttc

SEQ ID NO: 1581 - DNA, 372 bp, Glycine max
  Clone ID: LIB3028-036-Q1-B1-B10
gtatgaatacatgccgaacaaaagcttagaatttcatcttttcaataaagcatatgatcctcttccttggaaaacaagacttgaaataattcttgaagcagctcaagggttatcttatctgcatgaagaattagaaattcaggtgatatatcgagattttaaagcttcaaatgtactactggatgaaaactttaagccaaagttttctgatttcggacttgcaagggagggaccagtagctggtgatactcatgtttcaacagctgtgatggggacatatggttatgctgcccctgattacattgagacaggccatctcactgccaagagtgatgtgtggagttttggggtggtgctatatgaaatacttac

SEQ ID NO: 1582 - DNA, 328 bp, Glycine max
  Clone ID: LIB3028-036-Q1-B1-C9
gtcgaagcttcttaaaatttgctggataaacgagactgagaatgcattgcactggatatgaccatggtgaatgctaagggcaataactccaacgccaagactaatggtcttaaacaaaatgccaagaagatagtccgaattcatgtttctaaaaccaataaatctttcttcttctacctcaatcacgcatataaatacttagtccagggcaatgacgtctagctctctgcattgggcatggctagtccaacggttgtaatcatctctgacattttgaaaagcaacggctgggcatttgggaataatattacaacatccactgttgctg

SEQ ID NO: 1583 - DNA, 388 bp, Glycine max
  Clone ID: LIB3028-035-Q1-B1-H3
ccttgatctcaaaccacacatcgttttgttcgatttttccacatattggctaccaaacttggctcgtagaataggaataaagtctcttcagtactggattattagccctgcaacagtagggtacatggcatccccagctagacaaagagaagatgacatgagaaaaccaccttcagggttccctgattgttccatcaagctgcatgcacatgaagttcggttccttgctgcagcaaggaaactagagtttggcaatggtgttcttttctatgatcgtatctcagttggtgcagatttgtctgatgctattggattcaaaggttgtagagaaattgaagggccttatgtggactatctagagacacaatttggtaagcccgttttgcct

SEQ ID NO: 1584 - DNA, 358 bp, Glycine max
  Clone ID: LIB3028-035-Q1-B1-H4
gccagtggcagtggcgtggctataatcccctgcggcaacaccggcaccgccgcactcttccctcaccgaacgagaagaaacctccacgtggcgcgcgcgaagaagcccctcaacggcgacgacgtttccgtttacgctgagctcctcaaagccgaagtttccgttttggaaaataataagcctctcgacgacaacgatgccgctttgaagttcctagagaagatagaccgtcagtttcaacagcccgatttatgggaaggaccccagtgggactggctcggcatcttcatcaagttttcccccatcattggcatcgctgttgcggcaagtcttgctatctacggttgctttacatttc

SEQ ID NO: 1585 - DNA, 354 bp, Glycine max
  unsure at all n locations
  Clone ID: LIB3028-035-Q1-B1-H5
atcgaataaccgggtttagttgagctccatgtacattggcagattgtctacacgttgtagtcctcgggtcgttgaaaaggttgacatgcatttcaggaaatatcaccaatggtggtttgataatttgcatattgacctgcaggcaaggcctgagttaggaatcgtgttgtttgaaactggtagatagttatcatgccattttgtttttacagcagttatgacattgcaatattgtaatcgtgtatatgtatgttatattttatgtattttacctcgtgggatttgtaataaattttgtttaagttaaagaacttttganatataatttaattaagtacttttgaaacatggtac

SEQ ID NO: 1586 - DNA, 372 bp, Glycine max
  Clone ID: LIB3028-035-Q1-B1-H6
tgttgagcttttttgcgagtccatttggcaaaagggttgaatgggcattgaaactgaagggtgtggagtatgagtacatagaacaagatatcttcaacaagactagtctccttctccagttgaacccggttcacaagaaggttccggttcttgttcatgcccacaaacccatcgctgagtcattcgtcatcgttgaatacgttgatgaaacatggaagcagtatccactgttgcctcgagacccttatcaaagagcacttgctcgattttgggctaatttcgctgagcaaaaggtaatttctaaatccccttttagtttttgttttccgcacctggatttgggagatggatatttttttagtttttcataaa

SEQ ID NO: 1587 - DNA, 366 bp, Glycine max
  Clone ID: LIB3028-035-Q1-B1-H7
ctttcattttccctcacactcatcattctcaaaaaacacgcccaaattctaatcaaattagggttagggttttcaactcccctcgaattatccctgtaatgcagtgcgattcccgggtcctaccatggagccatcagcaatgtacggaccctcccagcccctgaacatcccctcgcggatcggcgctggcgaaagagacgacggctccggcaacgagcccgccgtcgacggccaccaccaccacattcagtacgaaacgcacgcgctcgatgacggtgccgccggtggcgccgtggttgtcgaggatgttacgtcggacgcggtctatgtctccggcggtggaggccccgaggagtccagccagct

SEQ ID NO: 1588 - DNA, 400 bp, Glycine max
  unsure at all n locations
  Clone ID: LIB3028-035-Q1-B1-H9
aaggctactagtgacgagtgagtgagagaaagacagagacattactttttggtagtagcaacaagcaaagggaggaaagaaggaaagaaagagagagaatcttcattcatttttttctgctcattttctgtgtacacctttatcgtttctctcactaactttggagtctgctttactccacactccacaacaaagatcgtctgcattccctttcccttctcttttcacccccctttttttttctctcttcttcttttttctttttctggtgggggcacctcatttgtttttgacttcataatactactacttcttcactcaaaaaagagatagaaagagaaggaaaaaaaaggctattatggcaagaggangagctccagctaaagcagatgagccacag

SEQ ID NO: 1589 - DNA, 393 bp, Glycine max
  Clone ID: LIB3028-036-Q1-B1-A1
caaacatgtcgaacacatgcggcaactgcgactgcgctgacaagactagctgcaccaagggaaacagctatggtgttattgtagagactgagaagagttacatcgagactgttgtcatggatgttccagcagctgagcatgatgggaagtgcaagtgtggcactaactgcacttgcacggactgcacctgtggccattaaggaatatgtatgaaaatgtaattgccatgtgtttggcaatacaaatatccaaataatgtaatcttcgtatgaataaatgtgtgtgctgttatcctacttcaggtctgtgtagtcatgcagtctgaatcatttcaagttcctgtcttagttaatataacagccatggttgtgggcatctatggtttattagact

SEQ ID NO: 1590 - DNA, 355 bp, Glycine max
  Clone ID: LIB3028-036-Q1-B1-A10
agctgatgtgcctaccatagcacagattgaagagttccattcgatgcagaggatgatgaatgctcctgattcaaatgataatattgatctactgttgaacattgatttgttgggtttacaaggagcaagtcaagcttttccaaacaagattgtttttgatgataagcttgtgttggctaacacacatgaattctttgatggaaattttccagtggattcttggttgccaatttttgtgaattgtctttatcctgtaagtcaattaccttcagaagctgtcgttgtaaatgtcacatgtggtactggacctggtggtttacccaccactgcttggattagttctgcagttaacaat

SEQ ID NO: 1591 - DNA, 367 bp, Glycine max
  Clone ID: LIB3028-036-Q1-B1-A11
tgcttattgcggccaattcaagtgggtgtgtaaaagtgttacagatggtttaaaggaaaggttccctgtggcggcaactttcttgcagttttgcgagttcctggagttttgcacttgtcgcccttgcactcaggctaaatcccatcaacctgctgggagcatataaaaaaatattttgacatcttgagctctggcttataatttgaagtagaagggcttcttcaatttcggccataattggatggagaaatagatctgcaatctaaatcctggtctttttaaatcctgatgtgcaactcggatttcaaaccagaatttcacattgtcatatgtagaaaaggcttgttatacttaaatatcactggga

SEQ ID NO: 1592 - DNA, 361 bp, Glycine max
  Clone ID: LIB3028-036-Q1-B1-A12
gaaatggcaacagaaacaaaagtggcagtattaggtggcatcaccgaagtgcagggagctgccaacagcgtcgagatcaacaatctcgctcgctttgctgtagaggaacaaaacaaaagagagaattcagttctggagtttgtgagggtgattagtgcaaagcagcaagtggttgctggagtgaattactacataacattggaagcaaaagatggtgagattaaaaatgagtataaagcgaaggtttgggagagggaatcccaagagttgctagaattcaagccaacattaggtgcaggaggcatcatcgatgtgcctggagctgccaacagcatcgagatcgaccatctcgctcgctttg

SEQ ID NO: 1593 - DNA, 391 bp, Glycine max
  Clone ID: LIB3028-036-Q1-B1-A2
atccgcgacggcgccgtttccgtcctcttctgcgtcctcatcgtcgccttgggtcccattcaattcggcttcacgtgtgggtattcttctccaacccaaggggctatagttcgcgatctaaacctctctatttcggagttttctttctttggatctttgtctaatgtgggagcaatggtgggagctatagctagtggtcagatagctgaatacatcgggcgcaaagggtcattgatgattgctgcgatccccaatataatagggtggcttgctatttcttttgccaaagattcctcgtttttgtatatggggaggttgttggaaggttttggcgttggggatatctcttatgtggtgcctgtttatatagctgagattgcaccccaaaaac

SEQ ID NO: 1594 - DNA, 335 bp, Glycine max
  Clone ID: LIB3028-036-Q1-B1-A4
tggaaagggatacaagccgtccacgtggctttgggtttagcacatttgcagaccgtatgggaatggttgatgcaatcaacgaaatgcattgcccggaaattggtgatcatttcatctcagtcaacaaagcacagcccacaatcgggggtgatgatacagaccaatgttacagatgtggctactcatcacgtggtacgggaagctatagtgctggatatagggtatgacatgatgactgcttcatatgtgggcgtctagtgcattgtgcccaatattgtcctttggcaagatgtggtcgttgtcacagtggtagttcatatccttcacgtcctaag

SEQ ID NO: 1595 - DNA, 239 bp, Glycine max
  Clone ID: LIB3028-036-Q1-B1-A5
caaatcttgctgtttgtcctgcaggaacctttatgttatacctttccactatgtggaatgatgccgatgacggaatgaagctactaacagcagccatgaatgctcttcttacactgcctgtaactggaaacccggaatgtattccaagtgttcatagtgatcatgaagatattgcacccattgtgcactggagtgcattttatactcagaaatgagttatgtgtaatcattaatttatc

SEQ ID NO: 1596 - DNA, 391 bp, Glycine max
  Clone ID: LIB3028-036-Q1-B1-A6
gatgtcgacagtgatgtacgtctagaagtcttttcatggaacatgcaacttgatagaggaggaaagcataacacggtaacaccacctaaatctgcctccaaagagaatcctgaaaaggttactagcatgaaattgcagaatgtatgagaagtctacccccagtgacaatcatttgcgtgatgctatatgtcaaattcttaatgaagttaacttcaatacggacacatttaccgacattctgaagagacttgccatacagtttgatatggatctcactccgataaacgcatctatgatatccatgattcatgaagagctgacaaaactagctgatgatgcagatgacgatgacagataacaggatcctgagaaagatgaagccccatctaca

SEQ ID NO: 1597 - DNA, 395 bp, Glycine max
  Clone ID: LIB3028-035-Q1-B1-H2
gcactggcaaatacttaaggactattcataaatgccagacctgatgaagttggagttaataacctaattaattgactgaaggaaaatgaaaattggagaaaagatgtttagcactgtccttggtaattttctgcactgtttccttccgtaagaagtgaaagaatcagaaaagtaatggtaataaagcagtaaagctttggacaagcggcagtgttgaggcttaatgtgttcatggaggatgtacagattaacaagcagcttctcaagtgctagctgatctgtttatttgctaacatcaatgagtcctacatcagttgcgtatctgttggtatggttttgttaaaagagaacaggctacattttttctgtcctggtgatggtccaaaattaggact

SEQ ID NO: 1598 - DNA, 401 bp, Glycine max
  Clone ID: LIB3028-036-Q1-B1-A8
gtccgccaatttgttgataacttcagaagatcggcaatgccgttagatgtgctggtttgcaatgctgctgtttacttgccaactgctaaggaacctaccttcactgctgagggctttgaacttagtgttgggacaaatcatctggggcatttcctcctctcgcgcctgttgcttgaggacttggcaaaatccgattacccttcaaagcgcttgatcatcgttggttcaataacagggaacacaaacacattggctggtaatgtacctcccaaggctaaccttggtgacttgaggggacttcacggtggtttgaatgggctaaacagctcagccatgattgatggtggagacttcgatggtgccaatgcgtacaaggacagcatagtctgcaatatgctcac

SEQ ID NO: 1599 - DNA, 349 bp, Glycine max
  Clone ID: LIB3028-036-Q1-B1-B1
gaaagaaaaaaacttagatcaaaatacttaatagcatggcgatacatttatacaaaacttctaccccaagcacacgcaatggagccgtagacagtcaagtaaaatccaatccacgaaatcatttgatctatggacagcatcgttgtggtaaaggccgtaatgccagaggaatcattaccgcagggcatagagggggaggtcataagcgtctataccgtaaaattgattttcgacggaatgaaaaaaacatatatggtagaatcgtaaccatagaatatgaccctaatcgaaatgcatacatttgtctcatacactatggggatggtgagaaaaaatatattttacaccc

SEQ ID NO: 1600 - DNA, 397 bp, Glycine max
  Clone ID: LIB3028-035-Q1-B1-F7
tggttatgcagggtaaatccagtgattttgctaagcatgctcttccttccacacgcaaacaacgcatactggttaccttcacaaagtcccaaccaagaaagtcactatcaagtgatgctcaacagcttgcctcggcagtagcatcttctcattggggtccaccgccaagccgatctcccaatcatgttcgtcatcacgtaggccccaagcattacgctacacttccaacaactggggtactgccagctccacccattcgaccacaaatggcagctcccgttggcatgcaaccattgtttgttgctgctccagttgtacctcccatgccattttctgcacctgtgccaatcccagctggttctaccggatggacagctgcacctcctccaaggcatcc

SEQ ID NO: 1601 - DNA, 353 bp, Glycine max
  Clone ID: LIB3028-035-Q1-B1-F8
ggaatcaatggattcttcacaagggtctaccattgctggtttcgtggacaatgcatccattaagagaaatgagtctagttttgatggcgttcccgtgtatgttaaggaactaattgccggaggctttgctggtgcgctttctaagacctctgttgcacccctcgaacgggttaagatactttggcagacaaggacaccaggatttcattctcttggggtgtatcaatctatgaataagttactaaagcatgaaggttttctaggattatataagggaaatggagctagtgttatccgcattgttccgtatgcagccttgcattttatgacatatgagcgctacaaaagttgga

SEQ ID NO: 1602 - DNA, 401 bp, Glycine max
  Clone ID: LIB3028-035-Q1-B1-F9
tgcatatttgccgaacttgtaaccaaacaagcactctttcctggtgattccgagctgcaacaactcctgcatatattcaggctattgggtactcccaatgaagatgtgtggccaggcgtgagtaaactaataaactggcacgaatatcctcaatggaaccctcaaagtctatcaacggctgttccaagtttagatgagcttggactggatttgctatctcaaatgttgaaatatgaaccttccaagaggatttctgccaagaaagcaatggaacatgtatactttgatgacctggacaagaggcacctttagaaagaacaaattgatccaatatttggacgtagaattttatgactaccaatttactctatgcttctctcgagcgtgtattctaatccgtt

SEQ ID NO: 1603 - DNA, 365 bp, Glycine max
  Clone ID: LIB3028-035-Q1-B1-G1
accacaataagatttatgggagccttcctgtggggttgaccaaagtcgaacattttcagctattcgacgtcagctataatcagttatgcggtctcataccgaagggtggagaattgcaaaagatcgataagtctttgtactctcacaacaagtgtttgtgtggctctccactatcaccttgcaaccataagcagatgactgtctaagtcgatttcatactttgataagtattcgtattttcatgtgtgtttgtgtgactttccaatttcacctttcaaccattataagcatatgcctatcaaagttggtttcatcagattaattattctgatttcaataaaatcgattacttgtttttctgtatt

SEQ ID NO: 1604 - DNA, 105 bp, Glycine max
  Clone ID: LIB3028-035-Q1-B1-G10
ttaaacttgtatttggacaactcatttaaacttgtatttggataactctatgcttaatttctaagcattaatatgatgatacttctgtggctactctgctgctgc

SEQ ID NO: 1605 - DNA, 397 bp, Glycine max
  Clone ID: LIB3028-035-Q1-B1-G12
gcttgatcaggtccaacaccctacaatcatggacaaggttgctggccagctccatctccgttctggtgtttctggtattaggagttatgaaggagcctactgccaccccacaatgtaccaaagaccctcttttgggaattactcgaatgctgcattgcagtatcctgtgatgccctcatgcaaagctactatggatttgtctgctgctgcaacaactgcctcccccgtctttgttgctgctccagcagagaaaggccattttcttatagactttctcatgggaggtgtttcagcagctgtctcaaaaactgctgctgctcccattgaacgtgttaagcttttgatccagaaccaggatgagatgatcaaaactggtagactttctgagccctacaag

SEQ ID NO: 1606 - DNA, 338 bp, Glycine max
  Clone ID: LIB3028-035-Q1-B1-G2
caactacaacattttagttgttgtaggtgatcgtgaagagttctgtgctaaagtatgagcgaatcagcagctactacactcagttacggtgacgcaaacccaatggtggggaattgcataagctcgataactctttgtactctcacaacaagtgtttgagtggctcaccactatcaccttgcaaccataagcagataactgtctaagtcgaattcatactttgataagtattcctattttcatgtgtgtttgtgtgacattccaatttcacctttcaaccattataaacatatgcctatcaaagttggtttcatcacattaattattcagatttcaat

SEQ ID NO: 1607 - DNA, 371 bp, Glycine max
  Clone ID: LIB3028-035-Q1-B1-G3
gagactttggagaccaactgagtaatggaaagtggagggaactcccttccatcagggtcagatggtgtgaagagaaaggtttcatatttctatgatccagaggttggaaactattattatgggcagggacacccaatgaaacctcataggattcgaatgacacatgctcttttagcccactatggattgcttcaacacatgcaggtcctgaagcctacggctgctaaagatagggacctttgcaagttccatgctgatgattatgtggcctttttgagaggcatcacccctgaaacgcagcaagatcaattgagacagctgaagaggtttaatgttggcgaagactgccctgtatttgatggtctttactc

SEQ ID NO: 1608 - DNA, 395 bp, Glycine max
  unsure at all n locations
  Clone ID: LIB3028-035-Q1-B1-G5
gctatctccaaattctcagcacacgcatttccgttctttgtccttgatgggtttagtgtttggaaagattagcgttgagacagcaaaatatgaagtgatcaaatccacaagcgagtacgaaattcgcaagtatgcaccctcagtagtggctgaagtcacatatgacccatcacagttcaaggggaacaaagatggtggctttatgattttggccaattacattggtgctgtggggaagccccagaacaccaagcctgaaaagattgccatgactgcaccggttataacaaaggacagtgttggtggggatggtgagacgattgctatgacggcccccgttgtgacgaagganggtggccgtgaaggcgaagaagggaatacagaatacaagatgg

SEQ ID NO: 1609 - DNA, 390 bp, Glycine max
  Clone ID: LIB3028-035-Q1-B1-G6
caaaccaagatcttaaaatatctcttccatacaagtttgttttcaaagtgtttttgtctcccaaatcctactcttgtgaccacaagccttcacttcactctctctctctctctctctctctctctctctctctctctctctcttttttgaaacccttttttctcttctcaaaccaaaccaagcaagcaattatattacactactcactcactgagaccatggctcctaatatcaccaccgtcaccgacgctcaagccaaggccgccggcgggcgtggccgtgcctacgtcaccttcctcgccggaaacggtgactatgtgaaaggtgtcgttggcttggccaaaggtctgaggaaggtgaaaagcatgttaccctcgggtggttgcattg

SEQ ID NO: 1610 - DNA, 392 bp, Glycine max
  Clone ID: LIB3028-035-Q1-B1-G7
tcctatctaatttttttcgttccgtcgtttcatcctcgcgagcgtgcatttgcattgcattgctctctctctctcacaaaacgacgacgacgtcgccaccgcgcaccgttttggttttcctttctcttccgtcgtttgcttccgcaaatagcctttcgcatgggaaacgctaacggcagagaagacggatccattccccccgccgccgccgatccctccgccgccgcacgtggaactcacgcgccgccggtctctctccctccggttcgcgccttctcctccgattcaatggccaatagcccgccgcacagccctcgccgctccagatcgccgatcctcttcggtcctcaggttcctctagctccattacaacgaggtaatggccctccttt

SEQ ID NO: 1611 - DNA, 397 bp, Glycine max
  Clone ID: LIB3028-035-Q1-B1-G8
ttttcattgttagcaacattatgctgcttttcagttcagcatttgccaaaactgctagtcctccctctctgagcccaactccagcaccagccccggcacccgactacgtgaacctcaccgagttgctcagtgttgctggtccatttcacaccttccttggataccttgagtccaccaaagtgattgacactttccaaaaccaagccaacaacactgaagaaggaattaccatctttgttcctaaggacagtgccttcaatgctgtaaagaaaactgtcctatccaacctcacctctgaccagctaaagcaagtgatcctcttccatgccttgccacatttctattctcttgctgagttcacaagcctttagcaaaaccagctctactcccacatttg

SEQ ID NO: 1612 - DNA, 403 bp, Glycine max
  Clone ID: LIB3028-035-Q1-B1-G9
attgagaagagtcttgttgaagcttttgagcccatcgggatcagcgactggaactctatcttctggatcgcacatcccggtggtcccgcgatcctcgatcaagtcgaggagaagctccggctcaagccggagaaactccagtccacccggcatgtgctgagtgagtacggaaacatgtcaagcgcgtgtgttttgttcattctggatgaaatgaggaagaagtctaaggaggaagggaagagtaccactggagaagggttagagtggggggtgctattcggattcgggccgggtctaaccgttgagaccgttgttcttcacagtgttcccttggagggataaatcatgctgatgcggtgactagtgatttaagagtgatcaataaggaaccctcggaaataca

SEQ ID NO: 1613 - DNA, 371 bp, Glycine max
  Clone ID: LIB3028-035-Q1-B1-H1
catacattaacaccaacactcaacctcactcagtcgctcgctcgctctcttcacaatttcgagatctgaaatcgaaatcgaaaccgaaactgaagagagagacaaaaaaatgagggagccatcgtcggtgggattcgaaggcaacggcgccgtttcttcgccgccgcaagctctcctcgagagactgaaagactacggtcaagaagacgctttcgccctctggtacgagctctcttacgaggaacgcgagtttctcatcaaggacattgagagtttagatctttcgagaattgaccggattattcggtgctcgctgcgatctcaaggactgccggcggcggccattgagcctgtgccggagagcagtgtgt

SEQ ID NO: 1614 - DNA, 391 bp, Glycine max
  Clone ID: LIB3028-035-Q1-B1-H10
aacttattttttgattgttgacttcaggtaaaacaatgtagtccttgttttcagtaaatatagaggtttcatttcatctgtcccactagtactgctctagctgtgttagtgctaatctcttgggttgatcttcttttcactgggcatatcataaaccattgttatttaaccttcttgatttattaactttgtatgaatatttttgctgtgtaatcagatcatatggtatggagcatggcagaggcggtcgagtaaggaaaaagaggagctgacctcaacccttaaatcaatgttaagcaacatatcaagcatggctgtgttaattgaacacagtttccttgaagcatacggtggagaatcaagagatggctcttcaactgcaaaattctcc

SEQ ID NO: 1615 - DNA, 401 bp, Glycine max
  Clone ID: LIB3028-035-Q1-B1-H11
gatgtttgctttgttctctttctctctcctcaaattttttcctctcgctctagggttccaagagtgtcttgaactactccagaaccctctcttgtttttcacaaatttgggtttagtacagtactgacccagaaaagaacgttcaacaggtacctaagataggggatagaaagaacaaaatagaaactgtacgtataaaagaagagcgatacacacatataaggaaaaagggaaaatattttgaagaaggaacatataaggcaatatatacaaatattagtatttgataataattacgtgtagaactattatggggaggggaagagtggaactcagaaggatagagaacaagagaaacatgcacgtaacgtctgcacacaggagaaatgggcttctcaaga

SEQ ID NO: 1616 - DNA, 403 bp, Glycine max
  Clone ID: LIB3028-035-Q1-B1-E11
gtaccatcttataactaggtatttattttctcatatgctcttcttaaacttctctttggtagtgtgttcacatacatatctacttattgttattattattgtcaccacatacaataatgggttccattagtaacaccgaggttcataatcatcacaatgatgatgacgacgatgatcatcgtcatcgggtgaatttctcgatccagagaggatttgggacaaaattgaaggaggcattgaaggaaacattgtttccggatgatcccttcaggcagttcaagaacgaggagaagccaatggggagggtgatgaaaggggtgcaatacttcatcccaatctttgagtggctccccacttacaattttcgcctcttttgctctgacttgatcgctggactaaccat

SEQ ID NO: 1617 - DNA, 387 bp, Glycine max
  Clone ID: LIB3028-035-Q1-B1-E2
tgaaggttgtggcgttcctggatcgttcttctctgtggcggagacatgttggacggtcgttcctgcgttgttccgaagatgttttccggcacttgccaggcagagaacgattggtcttacatgaagtgcttgctggagttggacatcaagaatggcaagcgccctatggagattgatgatgttgaggaggatgaaccccaccagccaaggaagtgtactaagaagttggattcttgccatagagttgaaatggctcgaatttcgtttcaacgtcaatctattgaggccaaggattctgttgttccccctatggatcaggagaccattgagccactgagtgtttgtcaaggagttgttgaagaagatggagctttgaccgaccagcta

SEQ ID NO: 1618 - DNA, 372 bp, Glycine max
  Clone ID: LIB3028-035-Q1-B1-E3
cttgggtttaattggtataggcttgccaaggtcttgttgattgagcgttaagtgctttaactaatcaatcccaagaccttggtttaccttgccacacaaaaaaatatataaaaaggcaaaataataataaaaaaaagagaaggcttggagccaagaaaataaacacaaagcacaagtcatggaaagaataatggttggaagtgcaacaaaggttgctttcaacctcttggtcactttcgccattgtcaatccatgccttgaggctggcattgctgagtttgatgactttctcaaagcccaagctgatgaagcacaaaaaattgctcttgaggcctatgtcccagtgccagaagatgtcaccgaccaactcaa

SEQ ID NO: 1619 - DNA, 358 bp, Glycine max
  Clone ID: LIB3028-035-Q1-B1-E4
gtgggtttggcgaaaccttctagaattttcttccatggaggttatcagagttctaacggcggcgatcacggtggcggttctcgcggcggcgcttccggcagacgccggcgacgacaaccgagtattcgcgccgtgttcggacacgcgagtgcagagatccgacggattcacgttcggaatcgcgttcgctccgaaggacaagttcttctacaacaacaacaacagcgttcagttgtcgccgtgcgatacgaggctctcgctctccaatgcgaattctcagatctccgtgttcagacccaaggtcgacgagatctcgctcctcaccgttaactcctcctcgttcgtggcggactcgtat

SEQ ID NO: 1620 - DNA, 392 bp, Glycine max
  Clone ID: LIB3028-035-Q1-B1-E5
ctgagctttgctgaggctgctagccttcctttaacacttgagactgcttatgaaggccttgaacgaaccgggttttctgctgggaaatctatccttgtgcttggaggtgctggtggagttggaacccatgttattcagcttgccaagcatgtttatggagcatccaaggtagcagctactgctagcactaggaaactggaactattaaggaatttgggagctgactggcctattgattatacaaaggagaattttgaagacctgtctgaaaagtttgatgtggtgtatgatacagtaaggcaaactgaacaggcattcaaggttttgaaagaacgacgaaaagttgtgacaatagtaccacctggatttcatccagctatccttttcatact

SEQ ID NO: 1621 - DNA, 369 bp, Glycine max
  Clone ID: LIB3028-035-Q1-B1-E6
caagtgccaaaatgaaagcccatttggtccttttcttgctcatgattcttgtcaccttcactagcaatgttaacactctctcgattaatcccaaatctaactcttcaattcctcaattgacccaacagaaaaggcctgacaatgagaccatatatagggtgtcaaagcagctatgttggggttgcattgcggagtcactagagtttttgttcaggcacaacttggtgagagcagccaagtgggaacttccactgatgtgggacttccagctggagcaatacgcgaggtggtggactggtgaaaggaaagcagattgcaagctcgaacattctttcccagaagatggtttcaagcttggagagaacattt

SEQ ID NO: 1622 - DNA, 382 bp, Glycine max
  Clone ID: LIB3028-035-Q1-B1-E8
aagacactagtcttccaattttctgtcaagcatgaacagaagcttgactgcggtggtggctacatgaagttgctcagtggtgatgttgatcagaagaaatttggtggggatactccttacagtattatgtttggcccagatatctgtggttacagtacaaagaaagtacacgctattcttacctacaatgacacaaaccacttgataaagaaggatgttccttgtgagactgaccaacttactcatgtttacacatttatcctccgtccggatgcaacctacagcatcctgattgataatgtggagaagcaaactggtagtctctactctgattgggatcttctccctccaaagacaatcaaagatcccgaggcctaaaaac

SEQ ID NO: 1623 - DNA, 406 bp, Glycine max
  Clone ID: LIB3028-035-Q1-B1-E9
attgacaacaaaatcacacaactattttgcagatgctatttttatttgatggatctaactaaactagtaagcaaaaaaattaatggcaaaaccaaagttgaggtgcgccaaagacgaaagatggtcgctccatgacagccagctctagtgacaggaggcactcgaagcataggtgagagcgcttctccatccagagatagaaaggttttttctacatcatcaaccccaaagagtccagtattggcctctgaaacggtattcttctgctacccagttcttttttccttaattattttcttggttttgttctttttcagtgaaagtgaaaagatattctttacacatagacggtattattctgcttcccacttttttcccaagacataggatggagagaagagaatat

SEQ ID NO: 1624 - DNA, 378 bp, Glycine max
  Clone ID: LIB3028-035-Q1-B1-F1
gaagtgttggatgcatttctatttctaactaattattgtgcttattattattgttgagaaagaaaagaatggcaaagttaataaaattctttgagttgaacacaggggccaagattccttctgttgggttaggcacttggcaagctgagcctggtgttgtagccaaagctgtcaccacagccattctggttggatacaggcatattgattgtgctcaagcgtataacaatcaagcagagattggttctgctcttaagaagctttttgatgatggtgtggtgaagcgtgaggacttatggatcacctccaaactctggtgttcagatcatgcttcagaagatgtgcccaaagcattggataaaacattgcaagatttgc

SEQ ID NO: 1625 - DNA, 388 bp, Glycine max
  Clone ID: LIB3028-035-Q1-B1-F10
ctttgattagtgtggcctagttgttgttttctcgatgagaaaggcttcttccactatgcattgcgcacttctgcgcttttgggttcccttgttgctgcttgctagcttcagctatgctccttctgtttcggccacaactgaaatttcagggaatgaagtgaacacagatgggaaggtgataaatgaagagttagcaaaaccaagtctaaaaggacatgatgaagaagcaaagttcaaaggattttttccaaaaccaattcctatagttaaaccaattccaaagccaattcctattattaaacctattccaattccagtttataagcctattccaaaaccaattcctattgttaagcctattccaaagtcaattccagttgctaagcca

SEQ ID NO: 1626 - DNA, 403 bp, Glycine max
  Clone ID: LIB3028-035-Q1-B1-F11
gccaagtgaaagtgagaaaaaataaaaatcaaagagcataatgtcagggatcattcacaagattggggagacccttcatgtgggagggcacaagaaggaggaggagcataagggtgagcaccatgctggagaatacaaaggggagcaccatggtgaacacagtagtgagtacaaaggagagcatcatggtgaacacaaagctggagagtaccatggtgagcacaagccagagcacaaagaggggttcctagacaaagtcaaggacaagatccatggtgagggcggcgccgccgagggcgagaagaagaagaaggagaagaagaagaaggagcatggccatgagcatggccatgacagcagcagcagcagtgacagtgattaaactgctgcatcacctatatat

SEQ ID NO: 1627 - DNA, 366 bp, Glycine max
  Clone ID: LIB3028-035-Q1-B1-F3
gcctctcgcaacctcaaatctacacaatgcatttctaaggcttttggcttggaacctgctgcagctaaactcacttgctcccttcagcctgatctcaaagaatttgctcaaaaatgtgtcgacgctaccaaaattgcaggattcgcccttgccacctctgctctcgttgtttctggagcaagtgcagaaggtgttccaaaaaggctaaccttcgacgaaatccagagcaagacatacttggaagtgaagggaactggaactgctaaccagtgcccaaccattgaaggtggagtggactcattcgccttcaagccaaggaaatacaacgcccagaagttgtgcctggaaccaacttccttcacggtg

SEQ ID NO: 1628 - DNA, 398 bp, Glycine max
  Clone ID: LIB3028-035-Q1-B1-F4
ggacaaccagttcaacacgatcaccgccgacggaacatccatgaagaacatggatacaggaatcgtgatccagggttgcaacatcatcccagaagccgaactcttccctacaagattccaggtgaagtcataccttggaaggccatggaagcaattctcaaggacaattgtgatggaatccaccgtgggtgacttccttcacccggaaggatggtgcccatgggccggtgaacacttcgaagacaccctgtactatgctgaatacaacaacgatggacctggtgccaacgttaacggaaggatcaagtggaagggttaccgcggtctcattagccagcaagaagctgctcagttcacccctgcccaattccctcaaggctggttccaacggtggaact

SEQ ID NO: 1629 - DNA, 395 bp, Glycine max
  unsure at all n locations
  Clone ID: LIB3028-035-Q1-B1-E10
ggctgatggccttgggatacacaattgcagctattctgaaaagaagcagccatgtctttcatgatgataaagtgaccataaaaactgattggctagaacaacttaatcgcacatatgttcaggtgcaagggaaagacagaaactattgcaaatttttttgcagagaaactggggttggatggttcctatgttcctcgcacttacattgaacaaattcagctagaaaagcttgttaaacaatttaatggcattgccagatgatcttaagacanaactcagcatagatgatgacttggtttcaagccccaaagaagccctttccagagcttctgcagataggagaatgaagtatcttaatcgcggtatttcacaatcctattcaactcanagggaca

SEQ ID NO: 1630 - DNA, 377 bp, Glycine max
  Clone ID: LIB3028-035-Q1-B1-C5
ctattgtctggacagactctcagatcatattttatgtggacaatgttcctattagagaagtgacgcgaacagaatctatgggaggagatttcccttctaagccaatgactttgtatgcaacaatatgggatgcatctgattgggctaccaatggaggcaaatacagggttaactacaagtatgcaccctatgttgctgaattctctgaccttgtcctgcacggttgtgcagtggatccaattgagcagcacgtggccacgtgtgacaatgctcaaagctctgaggcaacaattcctccttctggtgttacaccagcacaaagaatcaaaatggagaatttcaggaagaagcacatgacatactcctactgctatgac

SEQ ID NO: 1631 - DNA, 395 bp, Glycine max
  Clone ID: LIB3028-035-Q1-B1-C6
aaagcacaaagcaaagctcatccttgagttaaaaaatggcagcagcttcttccatggctctctcatccccatccttggctggcaaggccgtgaagctgggcccatcagccccagaagtgggaagggtgagcatgaggaagaccgtcaccaagcaggtctcctcaggaagcccatggtacggcccagaccgagtcaagtacttgggcccattctctggcgagcccccgtcctacctaaccggtgagttcccaggcgactacggctgggacactgctgggctttccgcagacccagaaaccttcgccaagaaccgtgaactcgaagtgatccactccaggtgggccatgctcggagccttgggctgcgtcttcccggagttgctggtccgcaacggg

SEQ ID NO: 1632 - DNA, 373 bp, Glycine max
  Clone ID: LIB3028-035-Q1-B1-C7
cactactgcagatgctgttaaatttgtagagtcttgcaaagaaggttatgtagcagcaactgttacaccacagcatcttcttctgaatcgtaatgctttgttccaaggtggcttacagcctcacaattactgtcttccagtgctcaaaagagagatccatagacaggctattgtttcggctgtcactagtggaagtaaacgatttttccttggaactgatagtgctccacatgataggcgtaaaaaggaatgttcctgtggatgtgctggcatatacaactcaccggttgctctatcactatatgccaaagtttttgaagaggctggtgcacttgataagctagaggcttttacaagctttaacggacctgac

SEQ ID NO: 1633 - DNA, 396 bp, Glycine max
  Clone ID: LIB3028-035-Q1-B1-C8
actcacactcactgcagatctcaatccatggctaccattgttagcatcaaggcccgccagatctttgacagtcgtggcaatccaaccgtcgaggtggatttgacatgctccgatggtacttttgctagagctgctgttccaagtggtgcatccactgggatttatgaggcccttgaattgagagatggaggatctgactaccttggaaagggtgtatcaaaggctgttgacaatgtgaacaccattattgcccctgctttggttggcaaggacccaactcagcagactgctattgacaacttaatggttcaacaacttgatggaactgttaacgaatggggttggtgcaagcaaaagcttggagcaaatgccatattggcagtgtctcttgcagtc

SEQ ID NO: 1634 - DNA, 407 bp, Glycine max
  Clone ID: LIB3028-035-Q1-B1-C9
ccgaagttgggaacatgagttggcggtcggtgaggggaagccgtaagaggaagatggatttcgaactggacctcaaccgtgatccgccgctggttcgagaagaggaggaggaggaggaggagggggggccctcaaggcatcagcagcaccaccaccaccaacaagaacctcaaactcccattgtcgatgtcgacgccattgacgacgatgttgttgaaagctcgcctaggtctttcgctcaggctaagagcaatgctgatgagaggaggagagttcgcaggaggacgactattgttgatttggactcagaagatgggaccggaggagttcctcaaaaccaaacaatcatcaatggcgatctttatgtaaatttggccaacaacagcagttctgcgagtgaaaatgct

SEQ ID NO: 1635 - DNA, 323 bp, Glycine max
  Clone ID: LIB3028-035-Q1-B1-D1
gctgcagcaacagctaaatgtgctaatgtcaagcccacaataacaggaaaagctcctacttgtgcagcctagaatgagcaacaacaataatgcccatttttttttaacaattttcttttactatttttcctatgtagagaagcaagccatccccattaaaagaggaggtgtctagtaattgtattctcttgtgaataaatacttcaatgtggctatggtaaaataatgatcatatatgtaatgtttcttcaataccaaaagaagtcttctttattcatcttattaattagcttgtaatatgttccaaattcatacccaagttt

SEQ ID NO: 1636 - DNA, 392 bp, Glycine max
  Clone ID: LIB3028-035-Q1-B1-D10
aagagaagaaaaaaaaaaagagagaaaagaaaaaatttgttttataactttttaacttattgttcacttcttcttcttcttcttcttcaatatcttggttctttgatattattctattgagcaaaaaatgggagttccagagagagaccctcttgcacaattgagtttgcctcctgggtttaggttttaccccacagatgaggagcttttggttcagtacctttgccgcaaggttgctggccatcatttctctcttccaatcattgctgaagttgatttgtacaagtttgatccatgggttcttccaggtaaggcagtgtttggagagaaggagtggtacttttttagcccaagagacaggaagtacccgaatggttcacgaccaaacagag

SEQ ID NO: 1637 - DNA, 373 bp, Glycine max
  Clone ID: LIB3028-035-Q1-B1-D2
caagacttggtgagtgtcactgctgaagagaagaaccacgcagaactgacgcaatgggaagcacaagtttgcttcatctaatacttggtgttgttttggctctgctgaatgtgtctcttgtggaaggagaagatgcatacaaatactacacgtggactgtgacatatggcattctttctccactaggtagtcctcagcaggtggttcttatcgatggtcagtttcctgggcctcaactagacttggtaactaatgaaaatgttgttctcaaccttgtaaacaagttagatgagccatttcttcttacttggaatggcatcaaacaaatgaaaaactcatggcaagatggggtattgggaaccaattgccccat

SEQ ID NO: 1638 - DNA, 364 bp, Glycine max
  Clone ID: LIB3028-035-Q1-B1-D4
atgcaatctatgtccctgacgctgagcaagaggctctccaattcaaagcctctcttcagaatctcttccagcctcgtcgctcacgcatcctccgccacaacctctccgccgccaccttcgccgccagtcccctctccctccgccctcaacagcctcctcaccgctccgtggtccgccactcagtcacgcggaatcacgctttccggatctgatattagagtcgggaatctcattggaaaccgaggacgcgctcacgaggttctcaaactgtatcgccctcttgaaggaacgggcaaagccactcttgaggttccgcctcaaagtgtagctggttatgccacagttgctactacagaggatggtg

SEQ ID NO: 1639 - DNA, 370 bp, Glycine max
  Clone ID: LIB3028-035-Q1-B1-D5
agcttcccaaaaaagagtgccaatggcatcttcttcagactcatgggtgaaggaatataatgaagcactgaaacttgctgatgatatcagtggcatgatttctgagcagagttcatttcctgcatctggaccagaaacccagcatcattcatctgctataaggagaaagattacaatattggggaccaggcttgatagcttgcagtcccttttgtcaaagcttcccggcaagcagcccatatctgagaaggagatgaatcggcgcaaggacatgctttcaaatttgagatcaaaagttaatcagatggcttccacgttgaacatgtcaaactttgcaaatagggatagtttgcttgggccagaaagaaaa

SEQ ID NO: 1640 - DNA, 383 bp, Glycine max
  Clone ID: LIB3028-035-Q1-B1-D6
tggagaggtggaagagctgcttcatttaacatcattcctagcagcactggagctgccaaggctgttgggaaagtcctccctgctttgaatggaaaattgactggtatggcattccgtgttcccaccgtggatgtctctgttgttgacctcacagtgaggctggagaaagaagcttcctacgatgaaattaaaaatgctatcaaggaggaatcagagggcaagttgaagggaattcttggttacactgaagatgatgtggtctccactgactttatcggcgatagcagatcaagtatttttgatgcaaaggctggaattgcattgaataagaactttgtgaagcttgtttcttggtacgacaacgagtggggatacagctcacg

SEQ ID NO: 1641 - DNA, 370 bp, Glycine max
  Clone ID: LIB3028-035-Q1-B1-D7
ccaatcagtgcaagagaatcgccctccatcttctttcttcttcaattcattccgatggcgattccgttgccctctctcgatctcactcaccactccgatttcgaacccttagtctccccagacggttacatctccatttgcggctacggttccctcctctccgagacaagtgccagaaccactttccccgacctcgtcaacttccgaatcgcccggttaactggtttccgccgtctcttcaactccgtcggacgcatctttttcactcaccgtgttgccaatatcaaaactcaggaaattgctggcctttctgttgaaccatgtgatggtgaattcgttgttgtagctgtttttgagataaagaacacag

SEQ ID NO: 1642 - DNA, 365 bp, Glycine max
  Clone ID: LIB3028-035-Q1-B1-D8
ctgcttttgactgctggcattggttctgatcatgttgatctcaaagctgcagctgctgctggtttaactgtggcagaggtcacaggaagcaacgttgtgtcggttgcggaggacgaactcatgagaatcctcattctaatgaggaatttcttgccagggtaccatcaggctgttaatggggaatggaatgttgctggcattgcacatagagcttatgatcttgaaggaaagacagtaggaaccgttggcgcgggtcgaattgggaagcttttgctccagaggttgaaaccttttagctgtaatcttctttattttgatcgacttaggatagatcctgaattggagaaagagattggagcaaaatt

SEQ ID NO: 1643 - DNA, 407 bp, Glycine max
  unsure at all n locations
  Clone ID: LIB3028-035-Q1-B1-D9
ctcttcagcatgggaggtcatggctccatgagtgctgaggatggcttttcattcccatcattcatgccatctcccagtataccgaactatgatgaggatcgctctcgcccaggcagagctgttgtgggatggctgaagatcaaggcagcaatgaggtggggcttctttatcaggaagatagccgctgagaagcgggcacagatagaggagttagatgaataagttgtatggacaatggttgcaggcttaacagttagccataagataatactgatattctgcagatttagttgtctttatcagtgccaaccaaattgtgcagtccatggtgttaatattcttgatctatgtatctgtgtatctgatttgacagcagcacgtttgtcncagtattctgtacagtttgt

SEQ ID NO: 1644 - DNA, 353 bp, Glycine max
  Clone ID: LIB3028-035-Q1-B1-E1
gattgacaggcgatctggtaaggagcttgagaaggagcccaaatttttgaagaatggtgatgctggtatggttaagatggttccaaccaagcccatggtggttgaaactttctctgagtatcctccccttggtcgttttgctgtgagggacatgcgtcagaccgtagctgttggagtcatcaagagtgttgagaagaaagaccccaccggagccaaggtcacaaaggctgccgccaagaagaagtgattgcattttggcaattttgctagcacatgtgatcatcaacgtggtttcaaaaaaacttgttcctttacagtagtttatctttgcagagtcttatgtgtttgtttta

SEQ ID NO: 1645 - DNA, 386 bp, Glycine max
  Clone ID: LIB3028-035-Q1-B1-C4
atggcctcagcatcaggggaggcaccaccaccccaacccacttcaacagaagcagctccagcatcaggctcttcagctccagccatatcagcagcagcaccacaacccggaggatcatcgccggcgcctccgagccgctacgaatcgcaaaagcgtcgagactggaacacgtttctgcagtacctacagaaccacaagcccccattaacgctggcgcggtgcagtggcgcacacgtcattgagttcttgaagtacttggaccaattcgggaaaaccaagggttaaatcacggggtgcccgtactacgggtaccccaaccctcctgcgccctgcgcttgcccactgaaacaagcgtggggaagccttgacgccctgatcgggcgact

SEQ ID NO: 1646 - DNA, 250 bp, Glycine max
  Clone ID: LIB3028-035-Q1-B1-B1
atgtgctgctgctgctgctgctgatgggtgagactgagactactctgctattgtttaggtctcagttgagtgtatcatgaataaaggatgatactggttagtatatgtttatttatttctttgttcatttaattcagacattcatcgtttttaagtatgtgatcttatggaagatttttgaagtttttgtgattagctgtattttcgtttcgaaatatattacatctcaaaagagttatgagacttgtgg

SEQ ID NO: 1647 - DNA, 169 bp, Glycine max
  Clone ID: LIB3028-035-Q1-B1-B11
ggcttttgggcaagatatcgttaagatttagttccatttgctgtaagagtcaatcattctctaattatagttgtaataacaccatcaatttagaatgaatattttctatgtagcctaactttactgataactttgaatgctttaaaataattaatttttacttttgacc

SEQ ID NO: 1648 - DNA, 400 bp, Glycine max
  Clone ID: LIB3028-035-Q1-B1-B12
gctttgattagtgtggcctagttgttgttttctcgatgagaaaggcttcttccactatgcattgcgcacttctgcgcttttgggttcccttgttgctgcttgctagcttcagctatgctccttctgtttcggccacaactgaaatttcagggaatgaagtgaacacagatgggaaggtgataaatgaagagttagcaaaaccaagtctaaaaggacatgatgaagaagcaaagttcaaaggattttttccaaaaccaattcctatagttaaaccaattccaaagccaattcctattattaaacctattccaattccagtttataagcctattccaaaaccaattcctattgttaagcctattccaaagtcaattccagttgctaagccaattcctaatga

SEQ ID NO: 1649 - DNA, 381 bp, Glycine max
  Clone ID: LIB3028-035-Q1-B1-B2
cgctctctcagtttcttttccccaaattgtttttcatctaacaatttactttgcagaaccctaaccctagccccttcgcctaccttgtaaccttcctttcgattcttcatctcgcagacaatgggtgaaactaaggacgaagcatacgaggaagagcttctcgattacgaggaggaagacgacaaggcccccgactccgccggagctaaagtcaacggcgaagctaccaagaaaggctatgttggcattcacagttcgggatttagggacttccttctgaagccagagcttcttcgggctattgtggactcgggatttgagcatccatctgaaggcaaactatctatttatctgaatcttttatttaatttgcagttgttg

SEQ ID NO: 1650 - DNA, 399 bp, Glycine max
  Clone ID: LIB3028-035-Q1-B1-B3
gcgaatccctctctctatctctcacacacactttctctctctctctctctcacccagatcttgtagcaatggcgagcgctcccactccacgcgaagagttcgtgtacatggcgaagctggcggagcaggccgagcgctacgaggagatggtggagttcatggagaaggtctccgcctccgccgagagcgaggagctgaccgtggaggagcgtaacctcctctccgtcgcctacaagaacgtgatcggcgctcgccgcgcctcctggcgcatcatctcctcaatcgagcagaaggaggagagccgcggcaaccaggaccacgtcgccgtcatccgcgactaccgctccaagatcgaggccgagctctccaacaaccggcacggaatcctcaaactcctcg

SEQ ID NO: 1651 - DNA, 393 bp, Glycine max
  Clone ID: LIB3028-035-Q1-B1-B4
caaggtgataactccagagaaagtagacaaggatctatctaatgtgattgagaagataattgaggacgaagacggagacgaagacgaagatgaagagatggaaaatgatgcagaaagtctagaactggaagagattaagtctgagactgaccaggagggagatgatgagattgaaataaatgctggtctgggaacttttgaacgtgaagaccagaatgagtttgctgtcaaaattgccattggtggtcttgttcagaaactttctggtaatctatcctctagagatttgcttcgagtccctgctatgctggagatgaaagggcgtggttcattttcctttactgttgaaaaagaagtcaatcagcaggttggtcttgacaaaggaaaatcttc

SEQ ID NO: 1652 - DNA, 376 bp, Glycine max
  Clone ID: LIB3028-035-Q1-B1-B6
agttgatggtggtttcaatcagaatctgaattcaaagactttgtctgctcccaatctcagtgcaatggactaccctgcacttacttcaccagatggccagactgcttcagtagaatatgtggttgataatgtgcaacaaagtggcaatccttaccgatcatatgacagtgatgtgctgcttttcaaatctgtctcttcagtttcatctaggggtggtgctattgactttgcttcagctgttaggaagttggcttctcgggattctggtggtatttggaagtatgataaaaatggctctggtgatgctgctatcggctcaagtaggaattcgaatgttctggctagtggttacaatggtggacaggggagagcacac

SEQ ID NO: 1653 - DNA, 363 bp, Glycine max
  Clone ID: LIB3028-035-Q1-B1-B7
gagagagatggggctaagaagtaaattaagaatgtcagcgtcagtggtgcagcaggggatgaaggaaataagaaggagcgtgacgtacatgcctcgaccgggggacggtgcgccgcggggggtgacgctgataccgggggacggaattgggcctctggtgactcatgcggtggagcaggtgatggaggcgatgcacgcccccatatacttcgagaagtacgatgtgcacggggacatgaggcgtgtgccggaggaggtgctggattcgatacggaagaacaaggtgtgcttgaagggtggtttgaggactccggtgggtgggggtgtgagctccctcaacgttcagctcagaaaggacctcga

SEQ ID NO: 1654 - DNA, 394 bp, Glycine max
  Clone ID: LIB3028-035-Q1-B1-B8
gcagacttaacaacagcacaaagcgggttactgtctgttcaagctaccatctctctctctctttcttagtgcctccttgccagaagttaaaatggcccaagaaactttcctattcacatctgaatcagtgaacgaggggcaccctgacaagctctgtgaccagatctccgatgctgtgctcgatgcatgcttggagcaggaccctgacagcaaggttgcctgtgaaacctgcaccaagaccaacatggtgatggttttcggagagatcacaaccaaggccaacgtggactatgagaagattgtgcgtgacacatgcaggaacattggttttgtctctgatgatgttggtcttgatgctgacaactgcaaggtcctcgtcaacattgagcaacag

SEQ ID NO: 1655 - DNA, 398 bp, Glycine max
  Clone ID: LIB3028-035-Q1-B1-B9
gtgaaagtgagaaaaaataaaaatcaaagagcataatgtcagggatcattcacaagattggggagacccttcatgtgggagggcacaagaaggaggaggagcataagggtgagcaccatgctggagaatacaaaggggagcaccatggtgaacacagtagtgagttacaagggaaagcatcatggtgaacacaaagctggagagtaccatggtgagcacaagccagagcacaaagaggggttcctagacaaagtcaaggacaagatccatggtgagggcggcgccgccgagggcgagaagaagaagaaggagaagaagaagaaggagcatggccatgagcatggccatgacagcagcagcagcagtgacagtgattaaactgctgcatcacctatata

SEQ ID NO: 1656 - DNA, 364 bp, Glycine max
  Clone ID: LIB3028-035-Q1-B1-C1
ggatttggtgttgcgcagccgcaggcagatatggccatggctttggtgagcctcagcaccattctcacaccgccttcttcttcttcttcttcgttttcttctccaaaaccttcttcttcctccatcgttcggtttcgccctctcactccccttcctcgctttcggaggcacctcgttcgtatggctcccgatgaggagaagatgactcgtcgctcccctctcgatttccccatcgagtgggaaaggcctaaacctggacgaaggccggatatattccctcaatttagtcctatgaagacacctttgccgcctccgttgcccgcagatcctccagaagaggatgaagaggaggaagaaaagaaag

SEQ ID NO: 1657 - DNA, 86 bp, Glycine max
  Clone ID: LIB3028-035-Q1-B1-C10
gttttttgagaaaacaattccattcagacatgttgatatgttgtatattcaattattcatacttcactaagaacaacaattttcac

SEQ ID NO: 1658 - DNA, 410 bp, Glycine max
  Clone ID: LIB3028-035-Q1-B1-C11
gcccaagaagaagaactcaccccacccagtgaaggtagtctacatatccaaccccatgaagatcaagaccagcgcctccgagtttagggctttggtgcaagagctcaccggccaggacgccgagtccccaccagatccctctcgcttccacggccatcaccccgattcctcctcctccgtcgagaatatcgaagaggaggaggaagaggataatattcaccgtgtgaattgtgttgtccctcctatgacagcaaccgatgagatcagtcttctcatcggctgctgcaaccagaacggacaacatcagccttcctcaatggagagtaataatttccagctgctggacgacgatgacgttttcacgccccagatgattgagaacatctctgccctgctcccagcaagtgtat

SEQ ID NO: 1659 - DNA, 392 bp, Glycine max
  unsure at all n locations
  Clone ID: LIB3028-035-Q1-B1-C12
gaagaagatgacggtaaagatggcgaggatggttcagaagaacaagctgtgattggattatggagtggcattgcttggttggttggaatgactgtattcattgctgtgttgtctgaatatgtggtggatacaattgaggatgcatcagattcatggggtttgtctgtgagcttcctaagcataatcttgctgccgatagttggcaatgcagctgaacatgcaggagcaattatatttgccttcaagaacaagctggacatctcattgggtgttgcattaggttcagcaactcagattgccatgtttgtggtcncattatgtgtaatcgttgcttggataatgggtatcaatatggacatgaacttcaacctcttagagacaggttcccttgc

SEQ ID NO: 1660 - DNA, 372 bp, Glycine max
  Clone ID: LIB3028-035-Q1-B1-C2
ggtttatgtgaactttgggagcattatggtcatgactagtgaccaattgacagagttagcttggggacttgcaaatagtaacaaaaactttttgtgggtcattaggcccgatcttgtggcagggggaattaattgtgcgttacccaatgaatttgtgaaagagaccaaagatagaggcatgttggcaagttggtgtccccaagaggaggttttggctcacccagcggttgggggattcttgacacattgtggttggaattcaacgttggagagtgtgtgtgaaggggttccaatgttgtgttggcctttctttgcggagcaacaaaccaattgtcgattttgttgcaaggagtgggggattgggttggagat

SEQ ID NO: 1661 - DNA, 413 bp, Glycine max
  Clone ID: LIB3028-035-Q1-B1-A9
caaaaatgcacaatagcaataacaacttggggaacacagacccgcacccagcgaaggagagagaaccaaaagaggagctagaaccaccagcaacttcagcaatgcagatggttgcttgcaggagattgttcgtgagaaggaagatgcatttttttgtggaatgctgtttgcaagccctattggtgatgggggctcccttttgcaacatgatttggaacaacttacatgccaagaagtacccatcaaggcagcgcttgacacttccagtccaacctggatcaaaggaaaggcctgttgtccttaattacaaaaagagtctgaaagactatacaagtggaaattcagaaaccttaactgttgtattcaaggatttgggcccacaagtttcttaccggacacttttcttctgcgag

SEQ ID NO: 1662 - DNA, 383 bp, Glycine max
  Clone ID: LIB3028-034-Q1-B1-H3
aaacacttgcaaactagttttgtttttggcacatatcgcattacattacattagattggtggcaaagcaatggcatcgtcactacaagcagcagctactttcatgcaacccaccaagtttttgcagctaaagtctactcaggccatatctaaggcttttggtttggaacctgctggagttaataaggtcacatgctcccttcaggctgatcttaaggacttggctcacaagtgtgttgatgctaccaaaattgcaggctttgcccttgccacctctgctctcgttgtttctggggcaagtgctgaaggagtaccaaagcggctaacctttgacgaaatccagagcaagacctacttggaagtgaacgggacacgaacagcaaa

SEQ ID NO: 1663 - DNA, 405 bp, Glycine max
  unsure at all n locations
  Clone ID: LIB3028-034-Q1-B1-H4
gttggaaatgtgatagttgagaaggttccgaggttatttgatcattagctctagaaaagaaaaaggaaattctttccatgttttgaaattctcagctcatgcttcatagattgaacaatttataccatgtttggttgagaagttgtaaaagatgaacatttcattagcgatggcaacacttgttgtctggcttttttcatgggtgaagttatgtctctggaactgcatctgccatgtggttatgcagattttgttgaatctgccatcagttctgtaacagggattggggacccatgagatantcaacagatgatatggagttttttttactctgtaaccttttccaatgtgtacttctgatgcccaattttaccaaataatactttactttgggctgacacnaac

SEQ ID NO: 1664 - DNA, 369 bp, Glycine max
  Clone ID: LIB3028-034-Q1-B1-H6
tttcaaagacactcttcctgatgatctactggctcctgttttgaaggctgtaattgagaaaaccaatgtgaacccaagtgaagttggggatattgttgtaggtagtgtattggctcctggagctcaaagagctagtgaatgccgaatggctgcattttatgctggttttcccgaaactgtgcctgttaggaccgttaataggcaatgttcatctgggctccaggctgtcgctgatgtagctgctgctataagggctgggttctatgacattggtattggtgccggtttggaatctatgaccactaatccagtgggatgggatggatcagtgaatcctaaggtaaaaatgtttgaacaagcacaaaactg

SEQ ID NO: 1665 - DNA, 368 bp, Glycine max
  Clone ID: LIB3028-034-Q1-B1-H7
tcgaaaaccaaaagcatgggtcagggaacaccgggcggtctgaaccggcagggtcttccgggggaccggaagccggacggcggcgacaagaaggagaagaagttcgagccggcggcgccgccggcccgcgtgggccgtaagcagcgtaagcagaagggcccggaggcggcggcgcggctgccgacggtgacgccgctgtcgaagtgcaagctaaggctgctgaagctggagcgcataaaggactacctcttgatggaggaggagttcgtggcgaaccaggagaggctgaagccgcaggaggagaaggccgaggaagacagatccaaggtcgatgatctccgaggttctcctatgagcgttggtaacct

SEQ ID NO: 1666 - DNA, 393 bp, Glycine max
  Clone ID: LIB3028-034-Q1-B1-H8
ttcagcttttccctcgttgaaatgaaaatgggttcttctttgtggactttgtgtctaattttggcttcactagcctcctctgcattctgtgcctttccacggaggccactggatgttccattcggcagaaactacgttcccacttgggcttttgatcacatcaaatacttcaatggaggttctgagattcaacttcatcttgacaagtacactggtactggcttccagtccaaagggtcatacttgtttggtcacttcagcatgaacataaagatggttcctggcgattcagctggcacagtcactgctttttatttatcttctcaaaatgcggagcacgatgagatagattttgagttcttggggaacagaacaggacaaccttacattttg

SEQ ID NO: 1667 - DNA, 341 bp, Glycine max
  Clone ID: LIB3028-034-Q1-B1-H9
catccacgtagctggggtttgagtaagctcttgaaagagtttgtgactgttggtggaaagttgttgcgtggtatgcttgtttgctacgactatggtccttaaatttcatctgcataaatgtcttgtcctcttcatttgctgtgttttggctcaatcaaatttactatttttattgatatgctcaaatgggttctggtagaatctttaggaggaattagtgatgacactttgctaaattcacttgggctagtgaatgatttgagttcagttgatatcgtcaacttttcccttccgaatttgccagcacctccaaatgccttcaggggaattcgcaggaagag

SEQ ID NO: 1668 - DNA, 363 bp, Glycine max
  Clone ID: LIB3028-035-Q1-B1-A1
gcgcgtggtggcctgcaagagcgcttgctccgctttcaactcccccaggtactgctgcacgggctcctatggaagcccacaggcctgcaagcccaccgtctattccaagatcttcaagaccgcatgccccaaggcctactcctatgcctatgatgaccccaccagcatcgctacttgcaccaaagctaactatttggtcaccttctgcccccatcgccgctagctcatccatccatcactttctactctctctacttaccttagctagccttattttattgtcatacctcctttatgttgatgggtactactactatatatgccagtccccattcatattatatggttcttcaactttaatag

SEQ ID NO: 1669 - DNA, 388 bp, Glycine max
  Clone ID: LIB3028-035-Q1-B1-A10
gtggatgaacatgaactgacactaaagaatgatgaaattgcattgttgaaaaccggtttggaagagaaaggtaaggagttagagtccatgagtaatgaaaaggagaatctgaagaaccaactgaatgaagcagtttcaaaagtgtctgctgctcaaaccaaggaagaaggaatgactttgcagttgaaccaactgagagaagagttggaaaccagtaaagccaatgcagacaagttggatgagaagttgaaatctgtggaagcagaaaaggaggggttggagtcagagatgaagaagctaagggtgcaaactgagcaatggagaaaagcagcagatgctgcagctgcagtgcttgctgggggtgtggatatgagtgcaaggattcctg

SEQ ID NO: 1670 - DNA, 412 bp, Glycine max
  Clone ID: LIB3028-035-Q1-B1-A11
ggagggttttgtgattttttgaagaatcgcgttttggagttagtcggagatggagctgtcgactccgaattcttcctcgaagcacttgtccattacgccgggttctagggttttgagaaaccctctctccgacgaacagatctggaagcgcctccgtgacgctggcttcgatgaggaatcgattaagcacaaagataaggctgcgcttattgcttacatcgccaagctcgaagctgagatatatgatcaccagcaccacatgggccttctcatattggagaaaaaggatttggcttcgaagtatgagcaagtaaaggccttggctgaatcatccgagttaatgcataaacatgattcaaccatgaataaatctgcgttaactgaatcaaagaaacgtgaagaaagtttgaag

SEQ ID NO: 1671 - DNA, 401 bp, Glycine max
  Clone ID: LIB3028-035-Q1-B1-A12
tgaagccaagagatggaactcatgtcagcaggttgacacgacatgctggtgccctaaactgcttcgttggcaagccttgttagagaacaacaaacattaatgttgttgttgttgttcgctttttctttttttttttggaaagaaaaaaaaaaccacattgcacagaagatttaagctactcctcttgctaggatgagtttgcgtcttctgcaaaacaagcttgttgttggccttgtaagagctagaaaaagagagaatttgttgcttgggttcaaatgagaagaaataaagttccaacttgtttgtaactttttttttgggggggtttaagttgtttgtaactttgtccccttttgtttttctttaatataatttgtgcctgttgaaaggcatgtttcgaa

SEQ ID NO: 1672 - DNA, 375 bp, Glycine max
  Clone ID: LIB3028-035-Q1-B1-A2
ttattttcttctgtttagaatagagaatcagtgatcagtccccacagtaatggaaggttaatgtcagttaagactgcattaggtacaaaggaaaagtgtaaggtcagagacaatagaacaatagaacaggagtgcataaaaaggccatgaataaaacgacatttcactaaatggaaggtgtagtgtccaaaatgaatgggttagactaatttaagcttaatgtccatatctcttttgaaggtaaccttagagcttaagattttagaattgaacatccgttatgtaactaggattgccagttgcaacaatttcactgaggtaataacattgtaaactatacttatacttgttcgtaactcattcctaatagcaaaa

SEQ ID NO: 1673 - DNA, 345 bp, Glycine max
  Clone ID: LIB3028-035-Q1-B1-A3
atagaacatacttgcctgcacgtctactctagatgatcccctcggggaattccaattccacattttcaagaaataaggaggcaaaaatgttcatatatgaattggaattatttgttttcttattaggcctatcctgaagccaaaggaaatgagatcggaattcctcggggaattccaattccacattttcaagaaataaggaggcaaaaatgttcatatatgaattggaattatttgttttcttattaggcctatcctgaagccaaaggaaatgagatcggaattcctcggggaattccaattccacattttcaagaaataacgaggcaaaaatgttcatatatg

SEQ ID NO: 1674 - DNA, 382 bp, Glycine max
  Clone ID: LIB3028-035-Q1-B1-A4
gaatattgaaggtgaatatggacggattgttcaaaatccaactgaagaaatcaaggtgctttgtgttaacactttggaggccggagtttttagcagtggatttccgacagtttctgatcctgtggaggcatacacttaccctgaatatttgaaatctggatggaacttgaataatatactttcactctcaggatcccttctttgttttgaaagctctgaagcttcacgtaattttgcccccaagattcacatgggaatgtgcttctctccactcaactggaaagttgaagagcaccacttatactcattatattacgtgcatttgggtgaaccaaaagtgtggtatggcatcccaggaaaatttgctattaactttgaaaca

SEQ ID NO: 1675 - DNA, 335 bp, Glycine max
  Clone ID: LIB3028-035-Q1-B1-A5
tttctctttctctctgtgaacacaaaccctaacaagaagaagaaagagcgatgatgcgttggtagatcgtgatctggtgcgggcgcgatcattgtaggatcggtgcgttcgaatttcgcaatgacgtttgggagttgagtgaaggaatcgctattatgtctgaattggtggcccgtacgggccggcatcagcagcggtacgagaacggttaccgtcttgtttccgggtgtgttccatttagatataaaagttctaatgattgtggagaccctagttctgagaaaattgttgaagtgcttatgattaattcaccaaacggacctggtcttttgttt

SEQ ID NO: 1676 - DNA, 394 bp, Glycine max
  Clone ID: LIB3028-035-Q1-B1-A6
cttggacgaattatccgaagaagatcgcttaaccgtagcaagagcacgaaaaattgagcgtttcttatcacaaccttttttcgtagcagaagtttttaccggttcgccggggaaatatgttagtctagcagaaacaattagagggtttaaattgattctttctggagaattagatggtcttcctgaacaagccttttatttggtaggtaatatcgatgaagctactgcgaaagctacgaacttagaaatggagagcaatttgaagaaatgactttaaatctttgtgtactgacccccaatcgaattgtttgggattcggaagtgaaggaaatcattttatctactaatagcggacaaattggagtattaccaaatcatgcgcctattgccacag

SEQ ID NO: 1677 - DNA, 360 bp, Glycine max
  Clone ID: LIB3028-035-Q1-B1-A7
gatacaccttccaagaaacccatgtggagaggagttattttggcatacataggagttgcattctgctacttacctgttgccttcattggatactatatgtttggaaactcagttgatgataacatcctcatcacactagaacgccccgcttggctcattgccgctgctaacctctttgtctttgtccacgttgttggaggctaccaggtgtttgccatgccagtgtttgatatgatcgaaacctacatggttacgaaattaaatttcccaccttctactgcactccgagtaacaactcgcactatatatgttgcattgacaatgttaattggcatatgtatcccgttctttggctctctt

SEQ ID NO: 1678 - DNA, 370 bp, Glycine max
  Clone ID: LIB3028-035-Q1-B1-A8
gtgatttcagtgagtgatcggtgttcacttgatctcatcataatcgtcagcgtcaattgaagaagatgccgatcagaaacatcgccgtcggaaggcctgaagaggcgactcaccccgacacgttgaaggcggctttggctgagttcatctcaaccttcatcttcgtgttcgccggctcaggctccggcatcgcctacaacaagctcaccgacaacggcgctgccacccctgccggcctcatctccgcctccatcgcccatgcattcgccctcttcgtcgccgtctccgtcggcgccaacatctccggcggccacgtcaaccccgccgtcaccttcggcgccttcgtcggcggcaacatcaccttcctccg

SEQ ID NO: 1679 - DNA, 327 bp, Glycine max
  Clone ID: LIB3028-034-Q1-B1-H2
ctttggcacggcaaaatgtatctcaacagcaaaaactcacgcatcaacttatagcctatagttccaaggacataagttgatgcgtgagtttgcccgaacatctaggctgaatgaaaaatcagatgtgtatagttttggaatacttctgctggagctacttactgggaagaaggccgtggacaatgagtccaatttgcatcaattgatattgtccaaggcagataacaacactgtaatggaagctgtggattcagaggtctctattacctgcactgatctggctcatgtcaagaagacctttcagcttgctttgctttgcacgaaaaa

SEQ ID NO: 1680 - DNA, 327 bp, Glycine max
  Clone ID: LIB3028-034-Q1-B1-F8
gaacagttgcagcgtccgaagtatgaggaagaggggtgtgtggcacgtggttctttactctttatcatcaccaccgtcccttactagtttgcgaaattagcaaatatggcggaagtgagagggagggacacgtggacggaggagctggcgagtctgatagaggattcgggagtgcgctacggtcgagagtcacctccgacgtcgtttgaggtgcacgcgccgcagatcgagtcgggggagagcttgaaggaacaggccttggagttcgtaatcgcgtggtgcaagatactcatggagcttgggagagggttcagggacattctgcga

SEQ ID NO: 1681 - DNA, 355 bp, Glycine max
  Clone ID: LIB3028-034-Q1-B1-F9
cccaagcgccacttacttaccactgggtggagtgtctttgtcagttccaaaaaattagctgctggtgatgcctttatattcttaaggggtgaaaatggagagctgcgagttggggttaggagggtcatgagacagcaaagcaatgtgccttcttctgttatatctagtcacagtatgcatcttggtgttctggccactgcatctcatgccattgccactggaacactgttttctgtgttttacaagcccagaacaagccggtcagagtttattgtgagtgtcaacaagtatctggaaattcagagtcataaactctctgttgggatgagattcaaaatgcgatttgagggtgatg

SEQ ID NO: 1682 - DNA, 337 bp, Glycine max
  Clone ID: LIB3028-034-Q1-B1-G10
gaccgttattaccatcctcagcgctgggatgtcagctacggtgctgaatttgttcccggcgctgaggatggttacactgtcatagttcagatgaacaggaaaattggtcccgctgatgagaccgttattaccaacgctttcaaaattggtgaacctggcaagattgtactcaccatagataaccatacatccaagaagaagaaactcctctacaggtccaagaccaagcccatcccagagtaacttgaagctcaagaataaggattttactgttactgttatatgttcatcattattacaaccacaagaacaagaacattgtgctgttcaacttaat

SEQ ID NO: 1683 - DNA, 357 bp, Glycine max
  Clone ID: LIB3028-034-Q1-B1-G11
gtcactaactctgtgcattcttctcgcgctctcagccttcgagcacactcggcatttcctttcccaggatagtagaatatggcagacactgaggatattcaacctcttgtttgtgacaatggaacaggaatggttaaggctggatttgctggagatgatgccccacgtgctgtgtttcccagcattgtacgtcgtcctcgtcacactggtgtgatggttggcatgggccaaacagatgcatatgttggtgatgaggcacaatctaagaggggtattttgactcgcacgtaccccattgaacatggaattgtgagcaattgggatgatatggaaaagacttggcatcatagcttcgat

SEQ ID NO: 1684 - DNA, 375 bp, Glycine max
  Clone ID: LIB3028-034-Q1-B1-G2
ttctctctctctcctcctcgatcccaattccactagggattcaattccgatgcgattccgagcttgttagatccacgacaacgtttcgtttcccagattcttttgtaaaaaaaaataatcttcctttgcccaacaggtaagttggaaaaaaatggaccatgacaagactgggtgccaagctcctcctgaaggtcctatattgtgcatcaacaactgtggattttttggaagtgcagctaccatgaatatgtgttcgaaatgccacaaagacatgttgctgaaacaggagcatgccaagcttgcagcatcatccattgggaatattatgaatgggtcttcaagcagcactgaaaaggaacctgttgttgccgctgc

SEQ ID NO: 1685 - DNA, 370 bp, Glycine max
  Clone ID: LIB3028-034-Q1-B1-G3
cattttacaatgagctacgtgttgcccctgaagaacaccccgtacttcttaccgaggcaccactcaatcccaaggccaacagagagaagatgacccaaattatgtttgagactttcaatgtgcctgccatgtatgttgcaattcaagctgtcttgtctctgtatgccagtggacgtactacaggtattgtgcttgattctggtgatggtgtgagccacacggtgcccatatatgaagggtatgctcttcctcatgcaattcttcggttggaccttgctggccgtgatttaacagagtacttggtgaaaatccttaccgagagaggatactccttcagcacctctgccgaaaaggaaattgtccgtgatgt

SEQ ID NO: 1686 - DNA, 353 bp, Glycine max
  Clone ID: LIB3028-034-Q1-B1-G4
ccaagatcttcacaccatgaaatgagctgggattgttgcacagtaggtctaggcattgtggagtcattggcaaactgttccaattctaggttttctgggaaaattctccaatctacagagagcaagagagttagtctcagtctccagatgatgatgatcaaagccccaaattgccaaatccacagggattcttcgcttgagggatctaagtctttgcccaaagatttttgtaaggctcctccttactatgcccagcaaaatggctctgttgttatccacaacggtgaatgtgaatctgagtccactgttctttttgcgattggggaaagtggccttaaacttgagccgtttgg

SEQ ID NO: 1687 - DNA, 378 bp, Glycine max
  Clone ID: LIB3028-034-Q1-B1-G5
caaagtttcttcctttctctgctctttgccttctctgacacatttggtgccttgtagagcgtgttttggcaggaaggtggtatggcgaaggacgttgaggttgctgagcgtggctccttctctgggaaggactaccaggaccctccaccagcaccactcattgatgctgaggagctcacaaagtggtccttttacagggctctcattgctgaattcattgccactttgctcttcctctacattactgtgctcacagtcatagggtacaagcaccagactgacctcaaggaaaatggtgaaatctgtggtggggttggcattcttggcattgcatgggcctttggtggcatgatcttcatccttgtctactgcactgct

SEQ ID NO: 1688 - DNA, 380 bp, Glycine max
  Clone ID: LIB3028-034-Q1-B1-G6
ctgaatctgttacaatcagagatctaaaattgaattgaccagcttgaccatgaattatggaatcacgggttttgaggtagccaccatgattttaaaggtatccaaaaatgctccaggtagatcataactggtggaagtaaaatttggtcgagtactatagtctaattggtctaaagctgataaaatcagtagctgtaaaatagttgagctttttttttaaaaaaaaatgatcttttgatttattcaaaaatatttttaaataaatagatgtttatgcgtgaaatttaagcatggttttttattgtttgactattaattatggatttttcagtttgttagacatgtaagttttttaataattttatattacgtttgtcact

SEQ ID NO: 1689 - DNA, 382 bp, Glycine max
  Clone ID: LIB3028-034-Q1-B1-G7
tgcaaactcacgcgtgcagagtgatgataataaatctgctgcacctgatcagaaccctttaccagacgcatcagcggtgaaggaaaatggtgggaggaagagtttgatttctagaagcaagtaatcacttggtaaggctattcgcagacttggtggatttcgccatcaggatcgcagggataatgttgaaatgaaattggatgatgggcatggttctaaggtttctggtggtgttgagatgaggagaattgaacctgtgactgtgcctttggttgatcttccagaaatttctgaaccttcagttctcctttcagatagtatacggaacgttctcgatgtttctcttccgcctcttattcacggaaggaaatggctgttgttg

SEQ ID NO: 1690 - DNA, 372 bp, Glycine max
  Clone ID: LIB3028-034-Q1-B1-G9
gcagaaaccaaagaaccatgaagtctctgaggtccatcttagcaacttttgtggttctattatcaatttcactcactatctcacttccaattgaagaagctttcaaccattgtctaacacatcactctcagactccaaaccaatttccctcatcaatctacacttacaccaatggttccttcacttcaatccttgagtccacagctcaaaatctaaggtacttgttgccctcagtgccaaaacctgatttcatattcaccccactggatgactctcaagtccaagcagcagtggtttgtgcaaaaaagcttggtattcacatgagagtgcgaagtggagggcatgactatgaagggctctcgtatgtttccc

SEQ ID NO: 1691 - DNA, 406 bp, Glycine max
  Clone ID: LIB3028-034-Q1-B1-H1
aggaagcctaacttaactccggaattcggtccaacctttcaatggactccatttcccccttcttggcaaggaactctggtcccggtaaccggtgattttggttcgggacaatgtctcgtgtttatgttgggaatttagaccctcgagtcagtgagagggacctcgaagatgaatttcgtatatatggtgttcttaggagtgtctgggttgctcgaagaccaccgggatatgcatttattgagtttgatgataggagggatgcacttgatgcaattcaggccttggatggaaaaaatggttggcgtgtagagctttctcataattccaagggtggtggccgaggagggcgtgggcgtggaggtgaagacacaaaatgctatgaatgtggtgaacctggacactttgc

SEQ ID NO: 1692 - DNA, 344 bp, Glycine max
  Clone ID: LIB3028-034-Q1-B1-H10
atggtttcttgccattatctatttcatagcaggggttcctggaacatctgaattggggtcccgcaaatctctccatgtctctacctctccaactcacgcatcgtggggatggaaatttaagcaatagtgtggcttacattgctataaagaaatcgaggtttcagcatttcaagtcatgacatgcttcacgagaatgaatgcacagatgatgatgtggccctggatgatcatgtggaatctaagatattggcttgtagataaatcgaccatcttttctctaacaagaaattcaggacaagacacctaattgaggcaattaatggagcatgggcaattcttggtcc

SEQ ID NO: 1693 - DNA, 353 bp, Glycine max
  Clone ID: LIB3028-034-Q1-B1-H11
cgctgcaactctctaccttccctctttttccgaatctgaatagaaatggcttcggagactgagacgttcgcttttcaggccgagatcaaccagctcctcagtctaataatcaacaccttcgacagcaacaaggagatctttcttcgtgagctcatcagcaatgcctctgacgctttggacaagattcgatttgagagtcttacagacaagagcaagcttgatgctcagccagagttgttcattcacattattcctgacaagaccaacaacacattgtctatcattgacagtggtattggcatgactaaggctgatttggtgaataacctcggtactattgcaaggtctgggac

SEQ ID NO: 1694 - DNA, 367 bp, Glycine max
  Clone ID: LIB3028-034-Q1-B1-H12
cacaatttgccttcgtttgttgttgttgttgtttccgttccatctcttgttccttaaactctttgtttcaaacatccttagaaaaggtaaaaatttaaaatcaaagaaaagaaaatggtggctgtggtttcccaaaaaaatgttgcggcattggtttctcgtaccggtacggagttgcaacgttatagaaaaggtcgtcgccaagttgtgggatgcataccgtacaaatttaagattggggagaagacttccttggatgttgtttctgatgaattggcagttctggttattagttcccagaaaggaaaagggatgctatttccaaagggaggctgggaattagactaatcaaaaaaggaagcaactt

SEQ ID NO: 1695 - DNA, 380 bp, Glycine max
  Clone ID: LIB3028-034-Q1-B1-F7
cttcttccacaggagactatgttgcagacacccccttttgacagactaccccatcctcggcatgctgcgacaattactcttcaacctgtggcgtgcccatgattttttcactgagatcttgaaacggcatggagcaacaggtgagttcactggaccttggtttaccagcatggactatttggtcacttgtgacgccatcaacgtccaccacatgctgagcaagaatttccacaactacgtcaagggacgcgagtttcgtcacatttttcaggccttcggagatgggattttcaccgctgattttgaagcatggaagtacaacagggatctcttccattctctctttaaacagaaaagcttcgaggtgtttttactgaaaa

SEQ ID NO: 1696 - DNA, 372 bp, Glycine max
  Clone ID: LIB3028-034-Q1-B1-E11
ggaacacaacgaatgcagtgtcttgccgctttcacaagtttggtgatgaccaaaagaatctggtcttccaaggtgatgccacatcttcttccaagggcatagaactcacaaagttacacggtggaggaaagccagtgggtggcagtgtggggagagtgttatactcttctccagtgcacctttgggaaagctctacagtggtcgcaagctttgaaaccgacttcaccttttccatctcatcagactctactactccaggtgatggccttgccttcttcattgcaccatttgacactaaagtccctccaaactctggtgggagcaaccttggactcttcccatcagacaatgttgttgctgtcgagtttgaca

SEQ ID NO: 1697 - DNA, 333 bp, Glycine max
  Clone ID: LIB3028-034-Q1-B1-E12
gtaagatgattaattcaatgtcatgacacattctcatgttaggaaaatttggacatcatctggacatcaaagagaatctgacatcatcgactacagacatacccttcacttgttgaaagaatagctgagagacaatacttattatggtggagacagtctaagtttcgtcgatatagcacttgtgccaatccacacttggttcaacacccattaaacttttggtaacctcaacaaacacagtgagtgccacaactctattgcatgggctaacatgcgccatcacaccaattgcgttgccaattcccttcctgattagcaggaggtttattagtt

SEQ ID NO: 1698 - DNA, 351 bp, Glycine max
  Clone ID: LIB3028-034-Q1-B1-E3
ctcgagccgaatcggctcgagatttttcttgcgtacacccgcattgttttttccccacaagcaagtttgcaaaggcaataatctctattaccctcagtatccacaatcataacaaatggccactagaggcctcaaaatttgcttggccgtgtcctctcttttcctgatcattcttgccatcgttattgtgaccttaattttgaccatctttaaacccaagaagccagatatatttctccacccagttgacctagacaactttcaattgctttcacctaatacaactagtgcatccttaggcatagtgatcacaattgtgaaccctaattatggcaacttcacgtacgtgaa

SEQ ID NO: 1699 - DNA, 358 bp, Glycine max
  Clone ID: LIB3028-034-Q1-B1-E4
cgccacggccgaagagatcgcaaagcacataaaaaactcgacgctctaccacgaacttgccaccgacgacatgaacaaacaggccatggacatctgcaaggaagttctaggttacgctgtcgatgacatgcaccaatccgttcgcaagttggaagagtttgaactaaacaagttgaacgattacgcctatgatctcaaggtctggatcgccggtactctcgctcaccaacagacatgtttggatgggttcgagaacacgaccaacgaggctggcaagaccatggctagggttctcaacacttctttggagctcagcaacaacgcattggacatagtgaacggtgtatcgaatctcttc

SEQ ID NO: 1700 - DNA, 362 bp, Glycine max
  Clone ID: LIB3028-034-Q1-B1-E5
gtcaaacttgagttcaaacactctcatcttcttattcttctgctttcactctctgactcaatcgttctaatccacaaaaaatgaccttaaattacaacattgccctcgccttctctgcggtgctcacgctgctcctctttcccctactgaccgtaggggagctcgtggaggagcagccactagtcctcaagtaccacaacggccagctcctgaagggccgcatcaccgtcaatctcatctggtacggcaccttcaccccgatccaacggtccataatcgtggacttcataaactcgttaagcagcgcgccaaacgcgcctctcccctcgaccgccacgtggtggaaaaccacggagaagtac

SEQ ID NO: 1701 - DNA, 373 bp, Glycine max
  Clone ID: LIB3028-034-Q1-B1-E6
gttctctgctaccgcaaccgttcttcctcggaacctcgcattcgcttcctccacgaaactctccctctctcacagtcactctcttctacatcacttcctttcattccccagtcccaaatcagcaaaccctcgcaaccgggtcgcaatctctctcgaaaccccacgcgctcaatccggcgcgtccgcctccgcctccttccatggcctctgctacgtcgtcggcgacaacatcgagaccgatcagatgattcccgcggagtagctcaccctcgtcccttcgaagcccgacgagtacgagaagctcggctcctacgccctcgtcggcctccccgccacctaggccgcgcgcttcgtcgaccccggcgagacgaag

SEQ ID NO: 1702 - DNA, 371 bp, Glycine max
  Clone ID: LIB3028-034-Q1-B1-E7
tgttgttgtggctggtggtatggaaagcatgtctaatgtacccaagtacctggctgaagcaaggaaaggatcacgccttggacatgattcacttgttgatgggatgttgaaagatggtttgtgggatgtctataaggatgttggcatgggagtctgtgctgagctatgtgcagataaccatgcattaacaagagatgaccaggataactatgcagttcagagttttgaacgcggaattgctgcccaagaaagtggtgctttttcatgggaaattgctccagttgaagtctctggtggaaggggaagaccatcaacagttgttgataaggacgaaggcctaagaaagtttgatgctgccaagttacgcaaac

SEQ ID NO: 1703 - DNA, 390 bp, Glycine max
  Clone ID: LIB3028-034-Q1-B1-E8
gttcttcttcgtcgttatcttcttcttttgttgtttgtgtgtttgttttttctctcacctgaaaatgtcttgctgcggtggtaactgtggttgcggaagcgcctgcaagtgcggcaacggctgcagaggctgcaagatgtacccagacttgagctacaccgagtcaaccaccaccgagaccttggtcatgggagtggcaccagttaaggctcaattcgagagtgctgaaatgggtgttcccgctgagaacgatggctgcaaatgtggagctaactgcacctgcaacccctgcacttgcaagtgaggtgttggagagctaaagcttcaagcagaaatggcccttagaaataatgataaaaactatatgtactttcaaaactttaaaattaa

SEQ ID NO: 1704 - DNA, 367 bp, Glycine max
  Clone ID: LIB3028-034-Q1-B1-E9
cttttacttggcattgaaaagggtccagaagtactcaacgctgttagaccggctggatcggcacttgttgatgactggcactgcctgaaaaccatggtgaggacttttgagacacattgtggatccttgtctcaatacgggatgaaacacatgaggtcctttgcaaacatctgcaatgtagggataaagaatgaacaaatggctgaggcttcagcacaagcttgtgtcagtattccttccaatccctggagttctctgcaaaggggtttcagtgcataataactccctgtaatgtgcactagtaaagaccaaagtatgattattgttacattatgttacatggttgtacttgtatatacatatcttg

SEQ ID NO: 1705 - DNA, 368 bp, Glycine max
  Clone ID: LIB3028-034-Q1-B1-F1
tgataatgatataaagaaggaaatgcaagaagctgattacaccactaaggatgataatgatatagagaaggaaaaggatgttgtaatggaaaatcaagatgtcaagagtgtggaagatacagatgtcaacaaatccactcattctggagaagctaaagctggagaaaatgttgaggtacctattgaaaaggacaaaggaattgaggtctctgaagtttttctgagaaaggatgaagaaaagattgagcaaccacaggaagagacaaaagaatatcgtggatctggggagccagagaaattggaaacatgcactattgctgacaaaaaggttgaagtggaaggagtgaataaagaggaaaacatcaaaa

SEQ ID NO: 1706 - DNA, 372 bp, Glycine max
  Clone ID: LIB3028-034-Q1-B1-F10
gaatagtgctgcaatggcttcaagtcatgaggaggtgacccttttgggagctactggaagcccatttgtgtgcagggttcatattgccctcaagttgaagggagttcaatacaagtatgtcgaataaaatttgaggaacaagagtgaactgcttctcaaatccaacccagttcacaagaaggttccagtgtttattcacaatgagaagcccatagcagagtctcttgtgattgttgaatacattgatgagacatggaagaacaaccccatcttgccttctgatccttaccaaagagccttggctcgtttctggtccaaattcattgatgataacgtttttggtgctgcatggaaatccgttttcacagctga

SEQ ID NO: 1707 - DNA, 350 bp, Glycine max
  Clone ID: LIB3028-034-Q1-B1-F11
atgtattacgctgtcaggaacacattgaggtgatggcacacatatcagatatgaagaagattcatttgcgggtagaattgaaattgacggaacattttcagaatgccaatacaagtgagtcttaccggaaacgagggtcatgtttgccctacttctaaattggaaaacaggactacttaacggccattgttcaagtaatgtgcaatgctgcaaacaaatcaacgaatgaatagagaatgcacgtgggtccatggaggaagagcagcttcactgcacatgaagtggtcaagattcaatcaaagatgcaattctaatacatccttgggtacaattgcgacatagccccatgc

SEQ ID NO: 1708 - DNA, 354 bp, Glycine max
  Clone ID: LIB3028-034-Q1-B1-F12
cgcctctaagctcgcagttccatgatctcgcgactcaagatgcatatattcgtgagaactttgactggcaggaccatcacccttgaggtgaaaacttccgacacgattgaccacgtaaaagctaacattcacgacaatgaagggatcccacctgaccagcagagacttagctttgcgggtaggccacttgacgatggtcgcacccttgccgattacaacatccagaaggaatcaaccctccatctcgtgctgtcgcctcaggggtagcatgcacatctttgtctagacttgaaccgggaagaccatcacccttgaggtgcaatcctctgacattactgataacgtcaaggccaa

SEQ ID NO: 1709 - DNA, 391 bp, Glycine max
  Clone ID: LIB3028-034-Q1-B1-F3
gaagaaggtgtgttggagaatgaaaactgaaacagagccaaatgaaaccgagtcagattggagcgagttgactcgcgagtgcctcatcaacatcctctctcgactcagcgtcgaggatcgatggcgcggcaccatgctcgtttgcaagtcatggttcagcgtcttcaaggaaccctctcttcacttcgtcttcaacctcgaccctcaattcgactcgcccagcgaatcaactcgctggtggacccccgagttcgaggccaagatcgataacatgcttcgatctgtcgtcgaatgggcccaatcctctctcacccatatacgcattcgccactgttctgatcgttctctcgccctcgtcgcccaaagttgcccaaaccttgacggtgtgttt

SEQ ID NO: 1710 - DNA, 362 bp, Glycine max
  Clone ID: LIB3028-034-Q1-B1-F4
cagggctgaagaggaaagaaaaagaagagcttcatttgaattgatgagaaaggaacaacataaagctttccaagaaaagcataagttgaacccggacaagaataacgacgattttgacataacttcacttgctgacaacgatgagaaaagggtagttaataggagcaacgagtatgtggagcctaatgtgactctatcagtgttaagcaatgatgagaaatcttcttccctttcacagactccttcagcagcaagacgacttgtaccccctggttttgcaagtgcacagttggaacgcaatttggcaaccaagacatcgcttaacactcattcaacagaagttggacaacctgcgcctggtg

SEQ ID NO: 1711 - DNA, 374 bp, Glycine max
  Clone ID: LIB3028-034-Q1-B1-F5
cttatcttctttcccactgaggaaacagaggatagcgtcatagcagcaatggcttctgcaagagaacaaatttattttctggcaatcgtccttctattctctcattcgaaactaatgttatcaaatgctgctataacaggggaaccaattcccgctgaatggccccatcagttccacgcgttgatgttcatgaaccaaagcggaactcttcagaaactggacttgtggtacgactggcccaacggccgcaacttcaacataattcagaatcagctcgactacctcgtaacatacgacctcgaatggaacaacggcacctccttcgtctacactctcgacgcctccgaacccacgtgccaagtcctgcacgtgga

SEQ ID NO: 1712 - DNA, 361 bp, Glycine max
  Clone ID: LIB3028-034-Q1-B1-F6
ctcttcttcaattcatatcatatcacttagatttagagctaaacataaaattgttttcacataccatggacaacaacaatgacttttggaaattcagtgaccagttgaggcttgaatctggtttggccaatctgtctctgaatgattattccatttggagcaacagctacagctccaagaggcctgatcagaggaggaactttgatgtcaagggcagtgatttcaacaacaacaacaactcatcaaaggcttttgatgatgatttcaatgatgggtggaagatcaccaattccaatggaccccttttctctatgcctcacaacaacaacaacaacactcttgaagttggaggcttcaacaa

SEQ ID NO: 1713 - DNA, 376 bp, Glycine max
  Clone ID: LIB3028-034-Q1-B1-E10
gcaaaattcaccattctgtggttgggctgcgatcttgcatatcagaaggtgcaattattgaagacacgttattaatgggggcagattattacgagacggaggctgataagaggtttctggctgccaaaggcagtgttccaattggtataggcaggaactctcatatcaaaagggcaattattgacaagaatgctcgaattggggaaaatgtcaagattattaacagtgacaatgtccaagaagctgcaagggaaacagatgggtatttcataaaaagtgggattgtcacagtaatcaaggatgctttaattcctagtggaacagtcatctaaacacaaccacctccccaaaaaatttcttgtaccccaaatcctaa

SEQ ID NO: 1714 - DNA, 387 bp, Glycine max
  Clone ID: LIB3028-034-Q1-B1-C4
cagcagctttgaacgacgcagaaggttcatccaatctccgaatcctttaatcgcattgcaaccatgtcgaggagaaaggtcagagagccaaaggaggaaaacgtgactcttggcccagctgttagagatggcgaacatgtcgttggcgtcgctcgcatatttgcctcctttaatgataccttcattcatgtcactgatctgtctgggagggaaacgcttgtccgcatcactggtggaatgaaggttaaggctgacagagatgaatcatctccttatgctgctatgcttgcagctcaggatgttgctgccagatgcaaggaacttggcattactgctcttcatatcaagctccgtgccacgggtgggaacaagacaaaaactccgggt

SEQ ID NO: 1715 - DNA, 328 bp, Glycine max
  Clone ID: LIB3028-034-Q1-B1-C5
gggtgatgcttgaatctgagtgccgattcaagaagatacggaagcctccttacttcaaccgctggatcaacttgaggattcctttccgtgaggtatttggtgctgtgaggtgcaatctaaaggaagctgttgagatagccggcttggcctggcagggacgtgcacattgcggccttgatgatgccaaaaatactgctcacctattggcacttctcatgcaccggggttttacatttttcattaacaatttcaataatgtggcagacagctgatcgaacactgatgtggaaaaattcacaagacaaacaaatggttttccgcaattccc

SEQ ID NO: 1716 - DNA, 364 bp, Glycine max
  Clone ID: LIB3028-034-Q1-B1-C6
cgaagttcctgactcaatgagaagcatacgaatggccttgtatcttactgtacttggagtacgatttttcttaagtaactttttactcagcagtgtggaacatgtcacggggaaaactggcagaagttggattggaaaggagataaattcaagccgtatggatacgttttagtggatgcgagctgtcataaatgcttttgttctgtgtgtctttctcttggtgtcgaaaaggtacacctataagactgtacagagaagagctatggaaactgattcatgtaagagtgatggggttgagatggtggcatgatgagagcttcacagctgtacctctcactgcgatattttcagctgaatcaaatgt

SEQ ID NO: 1717 - DNA, 372 bp, Glycine max
  Clone ID: LIB3028-034-Q1-B1-C7
aaatatatcttatttgagtggattttgttcaagtttactactgaaagatgggtttgaagacgaagataacattacttactattccattagccatgctccattttgtttcctcagaggtgtcagccattgattttcaagagggaaacgttgttcacgaggctaatactgggggtgatgccaaactatttggcggtggtagcttcttccctgctggtggcattggtggtggtgctggatacatccctggtggtggcattggtggtggtggtggtggtggattcttccctggtggtggcattggtggtggtggaatcctccctgatcgtggattcttcatgccaaggttttgcttcagaggatgttgttttggga

SEQ ID NO: 1718 - DNA, 386 bp, Glycine max
  Clone ID: LIB3028-034-Q1-B1-C8
gcgcgttgctgctctagttaatgatagcattggaacattagctggaggcagattcgacaatcaggatgtcattgctgctgtgattcttggtactgggacaaatgcagcatatgtagaacgagcacatgctattccaaaatggcatgggcttatacgaagctcaggagatatggttatcaacatggagtggggtaatttccgatcatcacatcttcctctaacagaatatgatctagctctggatgctcagagcttaaaccctggagaacagatttttgagacattgctttctggcatgtatttgggggaagttgtaacgagagctttattgacgatggccgaagaagctgacttttttggcgatactgttccccccaaattgaaag

SEQ ID NO: 1719 - DNA, 359 bp, Glycine max
  Clone ID: LIB3028-034-Q1-B1-C9
gttttgcactagtcaatttgagttaatgtcagaacatttccaattacgtaaattttgtttgcaagcctcctcaatttggttatttcaatgttatattttgttatgatgcacaatttatcctttatacgatttgatattcgattttccgtcagttaatactggatcacgaacggtatctactattgtgttttcattgttaaatagagtttgatggcactcgcagagtgtgaaatttcattaaccggacaaaatatcatgttttggtagccatttgcaaactgctttggcgatatctttgatattttgattgatagctgcgtaacatgcctgaacactttccttggagaacatgtcctgat

SEQ ID NO: 1720 - DNA, 364 bp, Glycine max
  Clone ID: LIB3028-034-Q1-B1-D10
ggcgaacaatatagatcagactccaaaacagttaaccaacaagcttacttttatgccagagacctcgaagtccatcccaaggacacatttgtgttcagtatagatggcaccgtactctctaatattccatactacaaaaaacatggatatggggtggagaaatttaactcgaccttgtatgatgaatgggttaacaagggcaatgcaccggcactgcccgagactcttaagaattacaacaagctggtgtctcttggcttcaagattatattcttgtcaggaagaacactggacaaacaggccgtaacagaagcaaacttaaagaaggctggctaccacacatgggaaaaaattaattctcaag

SEQ ID NO: 1721 - DNA, 340 bp, Glycine max
  Clone ID: LIB3028-034-Q1-B1-D11
cagcctcactgttccaaaaccctaatccttcgtcttccaaggagatggctgaatctcccctcgcacggaattcaacgtcacgttccccatggaaagctcagtcaagatagagatctaggtcaaggtcgagatcaaagtcgaggtcgatgcctagacaaaagccatgatcccgttctataagtcgtggcaggttactgagacatgttgtttactttgagagtaatgctgcaggtgactatgccactcaaggctctagattgtgcactaagattactgacatgatgaacactgttacggccagatgtagatagtacataccatttttttgatgacaaatata

SEQ ID NO: 1722 - DNA, 358 bp, Glycine max
  Clone ID: LIB3028-034-Q1-B1-D12
catgataatatgtataattagcataagattataatgcacgagtgtgtcaaaataaagagggtgtggaacgtactgggcctgggttaccatacatattcagtgcaaaaagctattgggcctagccttatatatacccttgtgtttgctttgttcatagatgtgaatgttacttgacttcagctgacaaagcctcaaacatcttaaaggtttatgaagtactttgttcttcgctgtcgatctataatggaaaatgtttgatcaacatttcatatgttatcctacattcctacctctagagagaaagaaaaaagaaaagaaaaagtataataggatttataatgtaaaagaaagagagata

SEQ ID NO: 1723 - DNA, 384 bp, Glycine max
  Clone ID: LIB3028-034-Q1-B1-D2
gctttgagggactacaaggcacagttggcggaagacccaattgtacacaggcacctttcagccttgtacgatacccttatggagcagaatctctgcaggttgatcgagcctttctcaagggttgagattgcacatattgctgaacttagtgaacttcccacggatcatgtggagcggcagttgtctcagatgattttggacaagaagtttgctggaacattggatcaaggtgctggatgccttgtcatatttgacgatcctaagactgatgctatatatcctgctactctagagaccatttccaatgttgggaaagtcgtggacagtctttacgttacgtctgccaagataatggcatgagctctctggttattttactccgat

SEQ ID NO: 1724 - DNA, 357 bp, Glycine max
  Clone ID: LIB3028-034-Q1-B1-D3
ggctggccttcaacaatagaacttcttcccgaacgatctcttgtacccacgtccataaccccaataagcttcacctaaacggagcatgcttcccctccaaagctctaatgttcacgatcaggactcagcatgaacatccagcagggattaatgccactccttcaacttcttctgccgttgtttagacccaaaagggtcagtctattgctgccgttgacgacatgaactaaggctccaaattctcatcagatcctcgttcatggttgcattggatgcccgaagatgacgatgataattgttcggactcttcttgagatgtccttcaattctcctcatcgaaagactgcgtcaatgact

SEQ ID NO: 1725 - DNA, 377 bp, Glycine max
  unsure at all n locations
  Clone ID: LIB3028-034-Q1-B1-D5
tctccgtctacgcctccagcatccaacaggaccctcaccaactggttcagacagcactctccctctccctgaaccgcacccaagccagcaaaaccttcgtggctaactgcaacaaattcagaggcctgaaacccagagagcacgctgcactcaaggactgcgccgaggaaatcagcgacagcgttgaccgcctcagccggtcgctgaaggagctcaagctatgtaaggttaagggtgaggacttcacgtggcacattagcaacgtggagacatgggtcagttctgctttgaccgatgagagcacttgcggcgatggattctccgggaaggcgctgaatgggaagatcaaggactctattanggctatgatgctcaat

SEQ ID NO: 1726 - DNA, 381 bp, Glycine max
  Clone ID: LIB3028-034-Q1-B1-D6
agcaaatataatttgcagtaatggcttcaatgaataaccaaaaagaaattgagctctttgagggccaatctcttctgtacatgcagctatatgggcacctaagacctatgtgtcttaagtgggctgttcaactaggtattccagacataatacagaaccatgccaaacccatttctctttctgacttggtctctactcttcaaattccaccagctaacgctgcttttgtgcagcggttcatgcgcttcttggcacacaatggaatctttgagatccatgagagccaagaagatcatgaactaacatatgctctaacccctgcatcaaagcttcttgtcaatagtagtgatcattgtctatctccaatggttctagcgttta

SEQ ID NO: 1727 - DNA, 341 bp, Glycine max
  Clone ID: LIB3028-034-Q1-B1-D7
gtcagataatacccacatccgagaccaaatgggtttgctctgagaaccgaaatgggtgacgaggaaccgtccatcagcgccgtcaccggtctccgtcgagtcaacacacgcatctcatccgtgctctccctctccgtctcgatcagagtctacgccggaaagtggcaacttatccggagccggctggaggcactccactcggccctcgtcgccggagatccgacgtcacgcaccggcgaactcccggcgagaacaggcacggcagcggagtgcctcgagctggcgcggcagttcatggatcagtcctagagcggaaagcttcatacgcacatcgatgtgga

SEQ ID NO: 1728 - DNA, 385 bp, Glycine max
  Clone ID: LIB3028-034-Q1-B1-D8
atacattgtagtatcacttttgtctcggaatttgttcttttgagttatggcaagcttaaaggttgcatgtgtggttttgatgtgcatggctgtgatgagtgcaccaatgatggtgcaagccgtgtcatgcaatgatgtttctgtgaacctagcaccgtgcctatcttacctgatgcagggtggagatgttccagaatcgtgctgtagcggagtgaggaacattctgggttctgccagcaccacctttgacaaacaaaccgtgtgcaaatgtcttcagcaagctgctaataactatggcatcaacgacgaatacgctcaggcactccccgcccgctgcaatgtcagcgtcccttacaagatcagccgattcaacaactgcgactcc

SEQ ID NO: 1729 - DNA, 375 bp, Glycine max
  Clone ID: LIB3028-034-Q1-B1-D9
catcactctccctctctcccctctcctcaccaaacctcattcctcagactcagatccattccactctgtcaaactcgccgcttcctcttccctaacccgggcccaccacctcaaacaccgcaacaacaactccccctccgtcgccacaaccccagcataccccaaatcctacggtggatactccatagatctcaacctcggaaccccaccccaaacctcccctttcgttctggacacaggtagcagcctcgtatggttcccctgcacctcccactacctctgctcccattgcaacttccccaatatcgaccccaccaaaatccccaccttcattccgaaaaactcctccaccgccaaactcctcggttgcagaaa

SEQ ID NO: 1730 - DNA, 368 bp, Glycine max
  Clone ID: LIB3028-034-Q1-B1-A5
ttattttttgggatataggtggtggttttgatatcttcaataaaaaagggaaaaaggtacgttttgttcgttggggatttcctggaaaaaatcgtcgtattattctcgaaatacctatgaacgagcttcactccatcagaataataacagaagttaaagaagagggtatttttactcgtaccagtacttttgagagtatcgtttatctggaaaccatagaacaggggtttattcccttgactcgtattgaagataatttgaatgggacacaaattgcacataaagctggcgaattatctgtatttttgggtgtaccacttttttactgatgagaattgaacttaattagaaattaaattgcacaaaaa

SEQ ID NO: 1731 - DNA, 257 bp, Glycine max
  Clone ID: LIB3028-034-Q1-B1-A6
gaaggagactcgcttctccaaatctccattccaagagtacacagatctactggcaaaaccaacaggaaagactctaatcttggaggaggaaagggtggatgcttgatttgctagttttgctttatggatgttttaggaactttattactttacatactttgttggttctgtgctttacttttggttttgatagacggtatgtctctgtatgcattttgattgtttccaagttttacttgactgcagttgagtaccat

SEQ ID NO: 1732 - DNA, 380 bp, Glycine max
  Clone ID: LIB3028-034-Q1-B1-A7
gctagaaacactcatctgaaaatgaccatgcttgttttgtttgttgctacagttttggtagcatatgaatgccatggctcagactaccagaagttccctctccaaatgaaaactgggtttggtgggcaatacagcagtgaggtggcatgtgccagttggaggcttggcgttgcagcacataacgtagtcaagtggcaaactgttcctgcagcttgcggagagtacatagctgactacgttctaggagatgaatatagatcagattccaaaacagttaaccaagaagcttatttctatgcgaaatcgctcaaactcaccaatcaaagatgtctttgtcttggacgttgacgacactactctctctaatctccagtattttg

SEQ ID NO: 1733 - DNA, 363 bp, Glycine max
  Clone ID: LIB3028-034-Q1-B1-B1
ttcagtttgtggcgaaaggagagaacgtgtgtgcctcgccgtgtaagagtttatgggtgctgcgaaaggagagaacgtgtgtgcctcgccgtcgccggaaatctcgaaggaagtggaccccagccatgcctccgagaccttgcgcatcgttaacgttatgggggctgccacccccattcccgctaactgcaacgcgcgtggcttctacgacgctttcctccgaagcttcatcaaggtcgatcacatccaacgtggaagaatttcatgcactgttgttgccaaaccacccatctgtaatcgctatggaactctgcatggaggttctgttgggtccttggttgagattttatcgaatgcttgtgc

SEQ ID NO: 1734 - DNA, 367 bp, Glycine max
  Clone ID: LIB3028-034-Q1-B1-B10
agcccagcttgatggaacggaacagaagtgctcgtacctttgagtgggaggattcaatagacaactcacaacaagcaagacagccaaggaggaggaaaaggaaatggagttcgttggaagaagagacactaagggctggtgtaaaaatgtttggagaaggaaactgggcaacaatccgaagtttttacagtaacatatttgaaaatagaagtggagttgatctgaaggacaagtggagaaacatgatacggtgacactaacgcgctactttcatgtgtatatcttggtaatgacaattttgacagcagcttctctctatgcaatcaagctttgttaaaacaccatccaaatcgtacagttagtgaag

SEQ ID NO: 1735 - DNA, 368 bp, Glycine max
  Clone ID: LIB3028-034-Q1-B1-B11
gcccaaagctgctgcacctaagaagaaggctgttgccaaacccaaggccaaggctgcggccaccaagcccaaggccaagcccgctaaggccgcaccaaagaaggtcgccgctaagcctgcgaagaagactcccgtaaaggccgtgaagaatcccaagagcgtcgtgaagaaacctacaagcgtgaaatctccagcgaataaggccatggctaagaagtgagggattggaatgggttttaatttggcgttatagtgtttatgtatttcgggttgaatcgtagtacatgtggatatatttttagaagagtattgatgtaaattcctttgctagaaattttaacaagtgttcttcttttgcattgatgaag

SEQ ID NO: 1736 - DNA, 365 bp, Glycine max
  Clone ID: LIB3028-034-Q1-B1-B12
gcccgaacttggggaaccattgcccctggcctaccttatgttgaacaaactataaccaatgctggaaattggttgattgggggtgacgtagaggtcattgaaccaattcagtacaatgatggacttgatcattttcgtctatctccgacacaactccgtgcagagttcacaaggcgcaatgcggatgctgtgtttgccttccagctccggaatcctgttcacaatggccatgctttgctaatgactgacacccgaaagcgccttcttgagatgggctataagaatcctgtcctcttgcttcatccacttggaggctacaccaaagctgatgatgtcccacttgattggcgaatgaagcaacatga

SEQ ID NO: 1737 - DNA, 346 bp, Glycine max
  Clone ID: LIB3028-034-Q1-B1-B2
gttagtaaggagttcgttgagaaaaccgtagtgctacaccgtcaggatattaaaggatgctgcgacatgagagtacgactctgcatcaccgataccttgtatcggttgggacatgggcattatacaagtgactactaacagtacacatcatagtagtaatagaagacgtgaagttgactgccaagagaagaaagcattagctagcatagatatgccatgctgcctgatgttgatccagggacgtcacccattgctagaactgtggcccagttacgttttcataagcctatggagttgacccaacactagtctgacacactggagtcacctagttctaccaaatgtg

SEQ ID NO: 1738 - DNA, 328 bp, Glycine max
  Clone ID: LIB3028-034-Q1-B1-B3
gtgtgttatgtccaagaaaattcctcacaggagtagtttgataaggatgtaatggagtaattgcctgtggatgtcccaaaccccccttcgagggccatggattgcttctccaactcctgtaactgacaatagcccccagatttctgcatcacctgcctcagatacaattaagctaggatcagtcaaaggatctctgcctccttcctctggcataaagaatgttacttctggtgtctctacttccagtacaggtttgcaaagtatctttacaggaactgcctctcagcttgatgcaaacaacgtgacagtatcacctgctcaacacaat

SEQ ID NO: 1739 - DNA, 355 bp, Glycine max
  Clone ID: LIB3028-034-Q1-B1-B4
caaaagcaatggctaatagaccttcgaattcttcaattctcctctccctttttctattggccatcgccctctccctcgctgagtcccaatctttcatcggagtaaactacggccaggtcgccgacaaccttccggcgccggaggacacggccagcctcctcaaatccagcagcatcggcaaagtccgtctctacggcgccgatcccgccatcatcaaggccctcgctaactccggcatcggaatcgtcatcggcgcctccaacggcgacattgcgagtctcgccggcgatcccaacgcggccatccactgggttaacgcgaacgtcttgccctactacccggcgagcaacatcac

SEQ ID NO: 1740 - DNA, 388 bp, Glycine max
  Clone ID: LIB3028-034-Q1-B1-B7
aatcttcttctatgggttggcttagtcggttcataactgccgtggctttcttagccatcggagtgatattctcaccggagacactggggtcaaaatcaaccacactttccacctacctcaaactcgctcacctcctctgcttctccaccgccttcggcgccgctctgtgggtaacattcatcggcggcatcatcatgtttaaaaatctgccgcggcatcagtttgggaacctgcaaagcaagatgtttccggcgtatttctcgatggtgggtgtctgctgcgccgtatcggtggcttcctttggctaccttcacccgtggaaaacttcctccagcactgagagataccaacttgggtttttgctctcttcctttgcgttcaatcctac

SEQ ID NO: 1741 - DNA, 401 bp, Glycine max
  Clone ID: LIB3028-034-Q1-B1-B8
catggctatgctgcagcaccaacaattgcagcacttttctgctttctatacttcttccacaggagactatgttgcagacacccccttttgacagactaccccatcctcggcatgctgccacaattactcttcaacctgtggcgtgcccatgattttttcactgagatattgaaacggcatggaccaacaggtgagttcactggaccttggtttaccagcatggactatttggtcacttgtgaccccatcaacgtccaccacatgctgagcaagactttccacaactacgtcaagggacccgagtttcgtcacatttttcaggccttcggagacgggattttcaccgctgattttgaagcatggaagtacaacagggatctcttcacatctctctttaaaca

SEQ ID NO: 1742 - DNA, 370 bp, Glycine max
  Clone ID: LIB3028-034-Q1-B1-B9
gcttttccctcgttgaaatgaaaatgggttcttctttgtggactttgtgtctaattttggcttcactagcctcttctgcattctgtgcctttccacggaggccagtggatgttccattcggcagaaactacgttcccacttgggcttttgatcacatcaaatacttcaatggaggttctgagattcaacttcatcttgacaagtacactggtactggcttccagtccaaagggtcatacttgtttggtcacttcagcatgaacataaagatggttcctggcgattcagctggcacagtcactgctttttatttatcttctcaaaatgcggagcacgatgagatagattttgagttcctggggaacagaac

SEQ ID NO: 1743 - DNA, 358 bp, Glycine max
  Clone ID: LIB3028-034-Q1-B1-C10
tgtttctagagatagggaaaatgtccaaatacagtggtgctgaaacaatggctagctttgcttttattctatttgttttatcttggatcatattgcgcctcatttactacccattctggattctttggagtacaagctatgaagttctgctcactttggataaggaaaagcaccgagtggatggtccaatatattattatgtgttcaatagtcttctgtactgcttgcttgttatgcatatttattggtgggtgttgatatatcggatgcttgttaaacaaatccaagcaagaggaaaagttagtgaagatgttcgatctgattcagaagatgaagatgcacatgaacatgaagattg

SEQ ID NO: 1744 - DNA, 362 bp, Glycine max
  Clone ID: LIB3028-034-Q1-B1-C11
tgttgacatgattgggaagaagcttgtgaactccaaggaaggacctccaacctttgaccaaccgaagatgactttgagcaagctcttggagtatggtaacatgcttgtccaagaacaagagaatgtgaagagagtacaactggcagacaagtacttgaacgaggctgctcttggtgatgctaatcaggatgccatcaaaagaggaactttctatggcaaagcagcccagcaagtaaaaattcccgttcctgaaggttgtactgatccaaatgcctcaaacttcgacccaactgcaagaagtgatgatggaacctgcttatacacaccctgagaacctaagcattctccacttgaagagaagc

SEQ ID NO: 1745 - DNA, 370 bp, Glycine max
  Clone ID: LIB3028-034-Q1-B1-C2
cgttgtatttggccatatcattgatggaatggatgttgtgaagacacttgactcccaggagacgagtaggttagatgtccctcgaaagccttgcagagattgttaattgccgagaactgcctatagagggttgatctttacgtggaagtacaacacttttcgtcagattttcagttcagtttccaatgttctgattgtcccttattaatcacgttaatgtgtctggattatcagtagtggctgccaaattggttgacttccggagacagagtggagatagcacatcgatattttgtatgactagactcatgcttaattcttagaacaatagtattcacttttccaaaaagtgcctttgtgttccacaagg

SEQ ID NO: 1746 - DNA, 355 bp, Glycine max
  Clone ID: LIB3028-034-Q1-B1-A4
atctacttcagaatgggtttctcacaagacccctgcactgattccaatgccccaacctcaacctcttccaccttagctgtagatcactactgtgactacgacaagctcaaattcacaacctttctcagaaaaatgttctgggaattcggtctcgcctgtgtggccaacccttcccagcgccggagaagctccggcgacggcaaagagacgaacatggagaagaacaaggcgtggctgcttgcggagtctggtgggtgtggagcagaattgaccaatgctgaccctcaatcggttcactcctctttcaggttcagcttctgttctcaagttgagttggcgtccctgaacatgagtt

SEQ ID NO: 1747 - DNA, 369 bp, Glycine max
  Clone ID: LIB3028-033-Q1-B1-F12
ctttgtttgggctgcccaaccggtttataaacacgaggaagttttagaagaacaatggaaagagatgcttaatcttactaatcgtctatgctggaagttattgaaaaaagatgggtatgtcgcaatatggcagaaaccttctgacaatagctgctatctaaaccgtgaggcaggaactcaaccaccactgtgtgacccaagtgatgacctcgacaatgtttggtatgttaatctaaaatcatgcatctctcaattgcctgagaatggatatggagcaaatgttgctcgatggccggcacgcttgcatacaccacctgataggcttcaaagcataaaatttgatgctttcatatccagaaatgagctttt

SEQ ID NO: 1748 - DNA, 130 bp, Glycine max
  Clone ID: LIB3028-033-Q1-B1-F2
gcaggacagtaaagtgattatatggaccgtggcaaaagatggggatcagtgggaaggcagggttttgagggatttcaagacacctgtttggagggtctgaggggcgttgagaggaaacatactggctgtg

SEQ ID NO: 1749 - DNA, 171 bp, Glycine max
  unsure at all n locations
  Clone ID: LIB3028-033-Q1-B1-F5
ctcgagccgaatctgctcgaggcacctcgctcattcaatcaaggcagggcgggggaggaggagcggttgacgtgagaggaagggtgaggagaggtggggaggcgggcagagaaatggaaatgggtgggatggtgggggagggggtggggagcgnatgatctgtcacaagtt

SEQ ID NO: 1750 - DNA, 171 bp, Glycine max
  unsure at all n locations
  Clone ID: LIB3028-033-Q1-B1-F7
gttgtgtttgcacccatggcactgcaaattccttgcaagtcaggagggaggagataggcggagaatctgcagtgtagcgttgcatgtgagttgcatggatgcggagctggaattataatgaaagagggccttcaggagagaggagatggngagaagttgttttggttctca

SEQ ID NO: 1751 - DNA, 341 bp, Glycine max
  Clone ID: LIB3028-033-Q1-B1-F9
cgccgaagaaaaataaaataatgatcgacggaggaagcacgtcggtcgccgtcgtgtactccgacggcagccgcgagatcaacgtcggcaccgttgcggtggaccccacgctcaatttcaagagcctcctcacgctcctcagccagcggatcgggatctcgccgcaccagttctccgtctacctcgccgccgtcggtaccgaccgcaagattccggtcacggcgaagctcaatctcgccactgtgcgccgcgacggcgccgctcactacttcttcgtgaagcgctccaagcgcaacaagaaggcgaacggaaacggaaaggacgccgcaaagaagaatcat

SEQ ID NO: 1752 - DNA, 179 bp, Glycine max
  Clone ID: LIB3028-033-Q1-B1-G1
gtttgattgtcctagctttgagcaacatcatgaagatctccattctctttatcacaatcgtttcttgtggttttcttggaaatgtggtttcagatgctagtccgcgtccagaggaagctatttttaactttggggactctaggagtggtagggggaatggtgctcataagcagccacct

SEQ ID NO: 1753 - DNA, 366 bp, Glycine max
  Clone ID: LIB3028-033-Q1-B1-G10
cgctctgtttctgtctctgtgtttgcggctgaggattccgaacgagcgaccttcttcgtttctcgcaaagtttaagtcatcatgggtaaggaaaagactcacatcaacattgtcgtcattggacatgtcgactctgggaagtcaactaccactggtcatttgatctacaagcttggaggtattgacaagcgtgtgattgagaggttcgagaaggaggctgctgagatgaacaagaggtcattcaagtatgcctgggtgcttgacaagctcaaggctgagcgcgaaagaggaattaccattgatattgctttgtggaagtttgaaaccaccaagtactactgcacagtcatcgatgcccccggacat

SEQ ID NO: 1754 - DNA, 347 bp, Glycine max
  Clone ID: LIB3028-033-Q1-B1-G11
cttgttgatgatgtcattgagcattactcaaaaatcaaagaaaatccagagttccattctcttcccagcttcctatttggacagtccatgggtggagctgttgcattaaagatacacctgaaacagcctaaggcatgggatggtgccattcttgttgcgcctatgtgtaaaattgcagatgacatggttccaccaaaattcctcactcatatcctgattgggttagccaatgttttaccgaagcataagttacttccaaacaaggatttagcaaaagcagcattcagagatttgaagaagagggaacagactgcttacaatgttgttgcttacaagggataaccacg

SEQ ID NO: 1755 - DNA, 189 bp, Glycine max
  Clone ID: LIB3028-033-Q1-B1-G12
ctcgatgcgtgattattcgtttgatccgcgaaatcatactggtctcagagaataaaatctatcgcaaattcttggtgcgtgtcaagatggtgcagcggatttcagcatggcgagagaatgcagtgcagtgatgcttcggattcaggtctacttgtttggagagcttcttcagttgggtggttggttgtg

SEQ ID NO: 1756 - DNA, 55 bp, Glycine max
  Clone ID: LIB3028-033-Q1-B1-G4
ctcgctcttcgcttcctctggtggcgagagtgtcgactcctgctaagaagagggg

SEQ ID NO: 1757 - DNA, 53 bp, Glycine max
  Clone ID: LIB3028-033-Q1-B1-G6
ctacattattagtgtctgtgaggggtgttagtaataagggcgtcggggggggg

SEQ ID NO: 1758 - DNA, 204 bp, Glycine max
  Clone ID: LIB3028-033-Q1-B1-G9
aactatcaacgctgactcgaagatctttcgtgaacatgtctagagatgtgggatactactggataaggattactaacctagttgccttaaccctgtccggtgggaaaatcctttaagaaatttggttcaattaaaaaaccaattttggaaaaaggacaagttgcccctttaaaacaaggttcacaggattcaagtccaaaaggg

SEQ ID NO: 1759 - DNA, 270 bp, Glycine max
  Clone ID: LIB3028-033-Q1-B1-H10
tgcccttgttgactcaaggcataagaaggtttttaaggtgaaaaactgcataactgacattgatcctgagagggaaaaagaggaaaaagagaaggctgaaagccaaaatatccgcgcaaatgtgcttcttaaccgaaagcgtgagaaggtgaatcggaagtatactccagctgtggagaggaggcgtcaactttctcctgggtttttagaggatgctttggatgaggaggatgaagcggattattatgataatcgtcgttctcagcatcg

SEQ ID NO: 1760 - DNA, 350 bp, Glycine max
  Clone ID: LIB3028-033-Q1-B1-H11
cgaggatgttgtacctatccctggaacaactaagattaagaacctggatcaaaacataggtgccttagcagtgaaactgtcagaaaaagacctgagagaaatttctgaggcggttcccattggtgatgtagcaggtggtagatactacaatggattggatcacttttcatggaagtatgctaacacacctccaaaagattcaaaaatctcaacctgacgcacccaaccaaccctttggttagggaatctaccaagtcatcatgaattgagggtaacaaggctggcaaaggctaatatcaggatgctatttaaatatcaataatgtagcccttcttgatgttggacttcct

SEQ ID NO: 1761 - DNA, 283 bp, Glycine max
  Clone ID: LIB3028-033-Q1-B1-H12
ggcttctgcagaagtagagttccgatgctttgttggtgggcttgcttgggccaccgaccacgatgctctcgagaaagccttctctcaatttggcgaaatcgtcgaatccaagggcatcaaccgattgtgaaactggaaaattcaaaaggtttggaattgggaccttcgccaaaaagcaagcgattagagacgcaattgaaggaatgaacgggcaaaacctccaccgtcgtaatataaccgtgaacgaggctcaaatcccgtggaaaaggttgcgggcggggcc

SEQ ID NO: 1762 - DNA, 357 bp, Glycine max
  Clone ID: LIB3028-033-Q1-B1-H9
aagaaaatcctcacccattttcttcgtagccaaacactctgaaattcccagttatgtcgtggcaagcgtatgtggatgatcacctactgtgtgaaatcgaaggtaaccacctcactcacgccgctatcatcggccaagacggaagcgtttgggctcagagcaccaacttccctcagttcaaacctgaggaaataactgccatcaataatgactttaatgagcctggatcacttgctccaactggattgtatatcggtggcaccaaatacatggtcatccagggtgagcctggtgctgtcattcgagggaagaagggtcctggtggtgttactgtgaagaagaccggtgcggccttga

SEQ ID NO: 1763 - DNA, 270 bp, Glycine max
  Clone ID: LIB3028-033-Q1-B1-F11
tccatcaccaaagcagtgtagttttccgttgtcactgccatggctttcaaaaaagtactattccaatatttcactctggctttgtgtcttgtcttcgcattttgtgcttttgagggcaatgctcgcactctcgaagatgctccaatgcgtgagaggcatgagcagtggatggctatacatggaaaagtctacacgcactcttatgagaaagagcagaaataccagacattcaaagaaaatgtgcagcgtatataagcctttaaccatgcg

SEQ ID NO: 1764 - DNA, 362 bp, Glycine max
  Clone ID: LIB3028-034-Q1-B1-A10
gcaaaaaatggcttctagttcagaatctcaatctcagtctaaaccgctccaagaccgagttgcaatcgtcaccggctcgtcccgcggaatcggccgagaaatcgcgcttcacctcgcctcactcggcgcgcgactcgtcgtcaactacacctccaactcggcccaagccgactcagtcgcggcgcagatcaacgccggttccgccaccacgacaccgcgcgccgtcgtggtccaagccgacgtgtccgatccggctcaggtgaagtcgctcttcgactcggccgagcgcgccttcgactcgccgatccacatccttgtcaactcggcgggcgtgatcgacggcacgtatccctccgtcgccg

SEQ ID NO: 1765 - DNA, 362 bp, Glycine max
  Clone ID: LIB3028-034-Q1-B1-A11
atttgactctcacaaaccttgcatccatccacacatggctggcatgaactctagcgtattggcctgtagctatgccatatctggtgcagcatgctccgagctcaatgggaaggtcacttccgtggcctctgttgcatcctctggctacaagttgccattgatcaaatgtgaggccagagttcccaaatccaaagaatctgaaggaaggagaggtgcccttgttctcttggcagctacccttttcatctctgcagcctccaattcttctgccaatgctgggatcattgatgattaccttgagaggagcaaggctaacaaggaattgaatgacaagaagaggttagctactactggagcaaact

SEQ ID NO: 1766 - DNA, 376 bp, Glycine max
  Clone ID: LIB3028-034-Q1-B1-A12
caaagctcctcaaggagatgttttcttggctgagctgtgggccatatggacaggccttgttctttccttgggtcttgggattaaagcaatatgggtggaatcaaactccatgattgttgtgatgacggttaatacaaagcaactttgtccattagctgttggctatttgaacgagatatggaaactgttaaagaagtttgatagatatcaaatttctcacgcgtggttgcgaaactaatatggcagcagatcatcttgctaagatggatcttttggcaaatgaagtggttttgtcgccagttgattttccacctagcctttccagaatcattgaagatgatgccataggaacgagatatcgtatacgatgatatct

SEQ ID NO: 1767 - DNA, 348 bp, Glycine max
  Clone ID: LIB3028-034-Q1-B1-A2
ttctgacccagcttggctttcatacttgttttgtgtggcagagcaagagagagcgcactggaaggtatctcagtgggtttgaagaagtactggagaagaagcattaggggataccaaagattacacgtctcggatcggcgaaagaaggaaacggttcagcttggaggcagccagagaaggaggagatggcgcatacagttagctcgtaagatcagaattcccaaaatctcttctccaaagaaattggtgctgtgggtcagagacgcctacgtcaggatgatgctgggtatggctaactccatgggtgcctccgccgtcggctacggcggagacgccgcgttcaccgcc

SEQ ID NO: 1768 - DNA, 373 bp, Glycine max
  Clone ID: LIB3028-034-Q1-B1-A3
agttccatcaatgaagaccggtgaagcaccggctctgaaggcagagcaagaaaagactactctagaaaatcctcctcttcaagatcagatgcgggctccagaatactcgggagctcaacaagctcaacattcagcttcaaagtcaccagctgccattttaccagattctgagagtggagatgcgaaattacatacttcatcaacggttactgttcatgagacgaacacaacactttctgagcaccttgattccaagataacagagggaagaaaaccggttgaccgttcctcatgtggttccaacacggcctctagcagcgatgtggaaactgatgcactagagaagggtgagaaagggaacggaagagcctga

SEQ ID NO: 1769 - DNA, 55 bp, Glycine max
  Clone ID: LIB3028-033-Q1-B1-B5
gagtgctcagctcacatggtatgggttggggaacgtacccgccaagttggggggg

SEQ ID NO: 1770 - DNA, 366 bp, Glycine max
  Clone ID: LIB3028-033-Q1-B1-B9
aatttttgctgtatggaatatagatgttcaaattagggttttaaagattgaacaccagtttcttaaagattggcccttgtttccgtgtcttttttaaacagatgaaatcaacattctacttaaattgtgcaaatcatgatggatacaaattagcataggtgctgttgcactaagtgtttttcattccaaattcttaaatttgactgtaggaatgaagcacaagataaattatacataaaaaccgctatattttgttggattgtggacacctgtcttttgaatggtgtattgtcaataaattttccaattttatttgagctatcttttgcagttattcgtggttggttggtcagaagatgctcaaga

SEQ ID NO: 1771 - DNA, 363 bp, Glycine max
  Clone ID: LIB3028-033-Q1-B1-C10
ttcagtggtgacacagatggaagggtgcctattacatcaaccaagtattcagttaagaagatgaaccttcccattaaatctgtttggcacccttggttttcctatggagaggttggtggctatgtagaagtatacaagggaggcctaacattagctacggtgagggaagcagggcatcaagtgccaagttaccaaccagccagagccctaactttgatcaaatatttcttagacggcactcctcttcccggtcctcccaaaagaaaggactaggactagtttcttcaaatccacttttcaataattgttgtggtaattattaatttaaggaaaataaatacaattatattatagtggggtttc

SEQ ID NO: 1772 - DNA, 373 bp, Glycine max
  Clone ID: LIB3028-033-Q1-B1-C11
cttggtgtgtgttctggtttttgattttcaaccaaaagatcctgaagatatatatgtggcactagcggctctatatggtagagcagtgccaggaactgttctggtgaggcagttaaaaaagttgccaagaaacaaatgctggcttgttggatattcaaaggcagaggcggatgctatggaaatagcaagggaattcaacaaagaatgggaaacaaatttgaggattggccttcatgattgtcgcgattataccaatagtttggttaggcaactcactggcgaaaaagatgtgctgaaacgtttgagaaacgttggtagttagagggaatccgttgtctggttagaagatcactttagtgaattactttatctt

SEQ ID NO: 1773 - DNA, 361 bp, Glycine max
  Clone ID: LIB3028-033-Q1-B1-C12
gggcaaagagaaggtggtgaaggtaggcatgatggagcagatcaagagagagatctcagccatgaacatggtgaagcacccaaacatcgtgcagcttcacgaggtcatggcgagcaagtccaagatctacatcgccatggagctcgtccgcggcggcgagctcttcaacaagatcgccagaggccgtctccgggaggagatggccagactttacttccaacaactcatctctgctgtggacttctgccacagccgcggcgtctaccaccgtgacctcaagccagagaaccttctcctcgacgacgacggcaacctcaaggtcaccgacttcggcctcagcactttctccgagcacctccgg

SEQ ID NO: 1774 - DNA, 170 bp, Glycine max
  unsure at all n locations
  Clone ID: LIB3028-033-Q1-B1-C6
gtaagtcctatcagtttcgacgtaagtctccaaaatcagagggaggcggagggggtgcagggcggatagatgggatgggtcgcgcgggcaggtcgctggtgggggtcggtgtgcagcacatgtggggggntggtggggagggcggggagcagcgctggccaaccgcgccg

SEQ ID NO: 1775 - DNA, 53 bp, Glycine max
  Clone ID: LIB3028-033-Q1-B1-C7
ctggagccgaattcgggggggggtcgaagggaaatgcgtaggggggggggggg

SEQ ID NO: 1776 - DNA, 59 bp, Glycine max
  Clone ID: LIB3028-033-Q1-B1-C8
aggcagtagatgtaagatgcagttgtcctagtaacaagtgggtgggggggggggcaggg

SEQ ID NO: 1777 - DNA, 372 bp, Glycine max
  Clone ID: LIB3028-033-Q1-B1-C9
ctagggttatcatttctccatttccattttctctctcacttttcaagaatcgtaagctatgggaaagtcttacccaactgtgagtgctgattaccacaaggccgttgagaaggcgaagaagaagctcacaggcttcatcgctgagaagagatgcgctcctctaatgctccgtttggcatggcactctgctggaacctttgacaagggcacgaagaccggtggacccttcggaaccatcaagcaccctgccgaactggctcacagcgctaacaacggtcttgacatcgctgttaggcttttggagccactcaaggcggagttccctattttgagctacgccgacttctacgagttggctggcgttgttgccgg

SEQ ID NO: 1778 - DNA, 355 bp, Glycine max
  Clone ID: LIB3028-033-Q1-B1-D10
ctggcgttcccatacccagcacagggccacatcctcccactcctcgacctcatccaccacttagccctacgaggcctaaccgtcacaatcataatcacaccaaaaaacgttcctatcttaaaccctctcttatcctcgcatccaaacacggtccaaactttagttctcccattccctccccaccctaacatccccgctggcgcagagaacgtccgtgaggtcggcaacagaggaaactaccccttcatcaacgccctctccaaactccaaccagaaattatccactggttcgcaacccacagtaaccctcctgtagcactcgtctccgatttcttcctcggttggactcagcaac

SEQ ID NO: 1779 - DNA, 376 bp, Glycine max
  Clone ID: LIB3028-033-Q1-B1-D11
aattgctcaaggagacgggtagtcatgggattcagatgaagcacaaggactctagagctacaaatcctagcccaaattccaaaaccgaattcggttccattaaggtcgaacaggagattcaacgaatggggaaccatggcagcagcagcagcaacaacaacaataacaaaggtgttggaaggcatttcgttggtagtggtgggcaatggaggccagccttacagagcattgcagaaattggaacttgaacacactattattatagcccccactcccatgaataaaccatgcagagcaacaaccgaccctagcttcctttcatttcacactttccaatgcattcacattgcccttctccttaatttaatagtagttt

SEQ ID NO: 1780 - DNA, 382 bp, Glycine max
  Clone ID: LIB3028-033-Q1-B1-D12
gaagattcctattatttagtgtaacccaactgtacaaaacagacaagaagaggccttcactctgaaccaaataccatagtcttctctttgtctgagaaaatagttccccccaaaaataaaatgaacaagggtctctcctttgtgctgctgattcttctgatccactacaacaacgttgtcaacgccaacaacaaaaactgtgtcacagaggattgcctcatcggcaacaatgatttggaatcagaattctacttcggttcccatgtggccagaatgctctacgatgtgagccaatctgtgtctggccaaacaggcaattcaaacaacaaagctgttaattgtccacaaagcaatggctaccgaacctgcttgccttccaaaa

SEQ ID NO: 1781 - DNA, 74 bp, Glycine max
  Clone ID: LIB3028-033-Q1-B1-D5
cgagaggctgctcgtaagaggcgattgaggaaaaaggcctatgtgggggaggggagaggcgggtcggtttgaag

SEQ ID NO: 1782 - DNA, 369 bp, Glycine max
  unsure at all n locations
  Clone ID: LIB3028-033-Q1-B1-B11
caacactgagcttaaccgagcttcgcaaagatgaatcgggaaaagttaatgaagatggccggttcggttagaactggaggaaagggtactgtgagaagaaagaagaaggctgtccacaagacaacaaccacagatgacaaaaggcttcagagcaccctgaagagaataggggtgaatgccatccctgctattgaagaggtcaatatctttaaggatgacgtagttatccagtttctaaatcccaaagttcaagcatccattgctgctaatacttgggttgtcagtggttcaccgcaaacaaagaagttgcaggatatactccctagcattatccaccaattangaccagataacttggaaaacctgaag

SEQ ID NO: 1783 - DNA, 51 bp, Glycine max
  Clone ID: LIB3028-033-Q1-B1-D8
gggaaaactctactggaaggaccaccatgtccaattgatcagggggaaggg

SEQ ID NO: 1784 - DNA, 361 bp, Glycine max
  Clone ID: LIB3028-033-Q1-B1-D9
ccgagcacgaaaagcagttaattgtggccaaaccgaaccctaacaccaaaagccctcgccgatcctccacctcttcctcgctcgccatcatcgacggcattttcgcgagaaaaagcttcttctacgacaggcttccctcccaaccactcagactcaccgttctcaaactcgacggttcctgcttccatattcaagtttcgaagaccgccaccgttgcggaactgaaggacgcagtggaggccgtgttcagtcacgtgcctcacaaggggcctgccaaaatttcatgggcacatgtctgggggcagttttgcttatgctatgatggacagaagctagttacagaaaaggataatcttcgaaa

SEQ ID NO: 1785 - DNA, 54 bp, Glycine max
  Clone ID: LIB3028-033-Q1-B1-E1
gtgaaagagaatcgcgaggcgaagagaagggaggaattaagatggaggggaagg

SEQ ID NO: 1786 - DNA, 376 bp, Glycine max
  Clone ID: LIB3028-033-Q1-B1-E10
agagaaacaaacaaacaaaacaaagccaagcatctcccaacacaccatcatcatcatcatcatcaaagccaagcacaacaatggcactcaaaagggcatcgtggttgctgctgctgccactgttatctgcagttgctgctgctgccaccaacaccaacagtgtgtaccatccttgttctgatgccaggattcagagatctgatggcttcacttttggcattgccttcagttccagggactctttcttctacaaccacaaccagtccctccagctctctccctgtgaccgacgcctctctctctcttcctccaacgctcagcttgctctcttccgtcccagagttgatgaaatctctctcctcaccatcaacaactc

SEQ ID NO: 1787 - DNA, 382 bp, Glycine max
  Clone ID: LIB3028-033-Q1-B1-E12
gaagcttctgagctatgacaaacagggtggatggattgttctggcaagagggtctcacattgtggtcaatggacatgccacaaccgggttgcaaaccttggtggagtatgatgctgtgtggaaagaacttgctgacagagatgggtttgaaccagcatttaagaatcactacgacaaggttcattcaattgttagtccttgctgcaggtttgagttctctcattcaatggggagaatcccagagaggctcacgtgccccgagtgtcgccgcaacatgcacgtgctcaccaccttccagtgctgccacgatgaaaaaattgatgaggacttttttgtcagcactgttactcctcctaccatttgataattcaatggtcactcc

SEQ ID NO: 1788 - DNA, 54 bp, Glycine max
  Clone ID: LIB3028-033-Q1-B1-E2
cggcaagaaagtcatcatctttggggttcagggtgccttcactcctacttggag

SEQ ID NO: 1789 - DNA, 64 bp, Glycine max
  Clone ID: LIB3028-033-Q1-B1-E3
agtgaaagagaatccgaggcgaagagaagggaaaaattaagatggaggggagggaggggggggg

SEQ ID NO: 1790 - DNA, 53 bp, Glycine max
  Clone ID: LIB3028-033-Q1-B1-E8
cgctctttaacctgtctgacgaactcgcatctagaagcaaggggggggggggg

SEQ ID NO: 1791 - DNA, 380 bp, Glycine max
  Clone ID: LIB3028-033-Q1-B1-E9
tttctttcttagttgcagcgcgattgctgcatcgtcctccaataagagctcgctgctagtgaaccctaacacggcggcaacgagaggtgttcggttgaagctcagatcagcgatggcagcagcaacccgcacttctctgcggttcctcctctcagtctccgtaaccctaactctcgctcacctcgccgcctcaaattccgaaggcgacgctctctacacgctgaaacggagcctctcggaccctgacaacgttctccagagctgggatcccactctcgttagcccctgtacttggttccacgtcacctgcaaccaggacaaccgagtcactcgagtggatcttggtaactctaacctatctggacatttggtacctgaac

SEQ ID NO: 1792 - DNA, 368 bp, Glycine max
  Clone ID: LIB3028-033-Q1-B1-F10
ctctcccatcctttcgcattctcaatacccttttgatttgtgaaaggaaagcaaacatggttgatcaggtccaacaccctacaatcatggacaaggttgctggtcagctccatctccgttctggtctttcatctggtattagaagttatgatggagcctaccgccacccagctatgtaccaaagaccctcttttgggaattactcgaatgctgcattgcagtttcctgtgatgcccacatgcaaagctaccatggatttgtctgctactgcaacatctgcctcacccgtctttgttgctgctccagcagagaaaggccattttcttttagactttctcatgggaggtgtttcagcagctgtctccaaa

SEQ ID NO: 1793 - DNA, 383 bp, Glycine max
  Clone ID: LIB3028-032-Q1-B1-G7
tggggacactgcgagttcaggtccatgcaaactgtcgcctgagaaggatttacttctctgaccgcctctactctgaagaggaagtccctccagagttcaaattgtaccttccaatgcagattagactttagagatgccctcatttggatgactagttctttttatgtttatcttttattgtaaagtgtatgttatgagtctctctctgtttttttttttttggtaaaatctcaccttgtgcttgtcatcatgcagaaatcatgaaaaaatgggagtttggagttgtagcctggagaaattgatgtgattttatatgcttactacatatagttctactagttgactttattctaaactttgtatctatgttgtgctagattaaa

SEQ ID NO: 1794 - DNA, 383 bp, Glycine max
  Clone ID: LIB3028-032-Q1-B1-G8
gaaaccggtgccgaggaagcttgctgccgaaaaggtggatttggaggaggagaagattgagagccagctggagaccatcaatgctttccacataatttccttgtcggaggggttcaatttgtcgcccttgttcgaggacaagaggagggaggagatgaggttcgccaccgcggggacgcccagcaccgtcatttcgcggctggaggaggtggccaaggccgggaagttcgacgtcaggagtagcgagaccaaggtgaggcttcagggtcaggagcgtgggaggaaggggaagctggcgattgccgcggatatctacgccgtgacgccgtcgtttatggtggtggaggtcaagaaggacaatggggataccttggagtataacc

SEQ ID NO: 1795 - DNA, 212 bp, Glycine max
  Clone ID: LIB3028-032-Q1-B1-G9
tgacaacccgatttatgaagaaccgcaagaagcgcggtcacgtcagcgccggccacggtcgtattggtaagcaccgcaagcaccccggctgccggggaaatgcccggcgcattgcacacaacaggattctcctccgacaattccaacccggggtcctccggaaaggaaggaataagtaccttcaaaagctccgccacaaattccaatccccc

SEQ ID NO: 1796 - DNA, 358 bp, Glycine max
  Clone ID: LIB3028-032-Q1-B1-H10
caagcccctcaacagcctccttattacattccacccacccctatgccgaattcagccttgccccagcacccccagaatcagtacttaccatccgatcaacaatatcgaacaccccaacttgtggctccacaaccaacaccgtctcaagtaaccccatccccacctgtgcaacaattttctcactatcagcagccacaacaacagcagcagccgccgcagcagcagcaacagcaatggtcacagcaggtgcagccttcacagccacccccaatgcaatctcaagtaagaccctcctctccaaatgtgtaccctccgtaccagccaaatcaagcaacaaacccatcacctgcagaaacac

SEQ ID NO: 1797 - DNA, 353 bp, Glycine max
  unsure at all n locations
  Clone ID: LIB3028-032-Q1-B1-H12
acgtcagaccaagcttacatgaactctgcattaggtccgagatcggttcaagtgcttcgcctttgccacaccgtgtgtattgttgttggtcaaccttaggtgctcgacttgctccagctgaaacaagcaatgcaattgtaggagcaggtgcagaagcgccatccattgttttcttccctttttcattcttactctttttttttttgcctttttcttcctttggtccttcccatctcatcccccccccccacaccaattcatatgcatatttttctcatgtctccttacatactgttcaatcantttcagttttaaaggatttgaattaatgaatccaatatgatttttccttt

SEQ ID NO: 1798 - DNA, 379 bp, Glycine max
  Clone ID: LIB3028-032-Q1-B1-H3
aagcgaccatggcggatggaagcaacgggggagttctaatgctggaagccccaccgtcttacggtaggcctaccggttctaacgcggaaataatcgacgcattgccttacattgatgacgactacgcagaccccagagtcaaacttgaggttgaccgtctcgtggaggatgagatgcgtcgcagcaccaagaagcccaccgatttcctcaaagatttccctcctcttcccaactccaatttccagaactacccaatgattgcgagagagtacgaacgtgtgagagccggaagacctcccgttgctcttgatagatcgcgctacgaatttggaatgccgccggcgaataaaaggaacgacgaaactgcttggaagcaagc

SEQ ID NO: 1799 - DNA, 405 bp, Glycine max
  Clone ID: LIB3028-032-Q1-B1-H4
tccgtaatctgctcgagctcatgatcaagaagtgtttagctttcacagtgatcattcaccttgccatggttttgaggaagttttggcttgctatcaaaaagttgttccaaatttgagactgtctggaccaacatcttatgctcctgtgattgaggctgcaatagacatagttgagaaaagtcatggccaattccatgtgttagttattgttgcagatggccaggttacaacaagtgctgcatctgaacatggagaactcagtccacaagaagcaaggacaatcaaagcaatagttgatgcaagttcatatcccctttctattattctggttggagttggtgatggaccctgggaagacatgaagaagtttgatgacaagatacccgctcgcgactttgacaattt

SEQ ID NO: 1800 - DNA, 358 bp, Glycine max
  Clone ID: LIB3028-032-Q1-B1-H6
aacctttctcattccccatctcctcaccttattcagccactgctaatttctagggttccgaaatggacgctggcggaaagatcaagaagggcgccggaggaagaaagggcggcggccctaagaagaagccggtttcaaggtccgtcaaggccggtctccaattccccgtcggaagaattggccgttatttgaagaaaggaaggtacgcccagcgtgtcggtaccggtgctcccgtttacttggccgcagttctcgagtacctagctgctgaggtgcttgagttggctgggaatgctgcacgtgacaacaagaagaacaggattattccgagacatgtgctattggctgtgaggaacga

SEQ ID NO: 1801 - DNA, 385 bp, Glycine max
  Clone ID: LIB3028-032-Q1-B1-H7
tctctctagagtaattgcggaatcagctagaattttctaataatggccaaagacgttgagcaggttacagagcaaggtgaatactccgcgaaggattaccatgacccacctccggcgccgttgatcgacccagatgagctcactaagtggtccttgtacagagccgccatagctgagttcatagcaacactccttttcctttacatcaccgtgttgaccattattggctacaagagacagagtgacaccaaaatccccggtaacaccgagtgcgacggcgttggcattttgggcatcgcttgggccttcggtggcatgatcttcatccttgtttactgcaccgccggcatctctgggggacacatcaaccctgcggtgacattcg

SEQ ID NO: 1802 - DNA, 380 bp, Glycine max
  Clone ID: LIB3028-032-Q1-B1-H8
ctttttgctataggaggagtcttcaatcttcatctacatcagttctagctataccgttccttctgctactactcaactgcaaaggatggtgctgcccaagttctctctgtgcttctggcttctcctttcttcacttgtgattctcttaataaattgtccagttaaatgtgacgatgatgaggaagacaatctctatcaaggtatcaacaagtatcgagcatcgttaaacttgaaagctctaacaaggaatgataatgcaaattgccttgccgaaaaactagctaaccaattcaagaaacaaccctgcacaaataccacaggtgctaacactgtacctggcacagaacctcagttttccaactatccagaccttttatcca

SEQ ID NO: 1803 - DNA, 379 bp, Glycine max
  Clone ID: LIB3028-033-Q1-B1-A10
gttttctcgaattctcgtcctctcactcgactctgatacacattagaaatgtataggaaattacggctggtgattcacaagcttcatctctttggatcgatgctcatctctatggcctcgcggtatctaaagagatttagggtgcatgtaatactgattcatgcaaagattcatcggctgaatcacattcaggcaatcaatgagcagaagtttctcgtttccaaattgtggactatcttgttaggaaatacgatggtggtaaagactcagtgttgcgagttagcacaggtatctatgtgaattgcagcatcgcaaactgcaaataggagtacaatgacgataccagacatgatcatcttgagcatccaaggccattcta

SEQ ID NO: 1804 - DNA, 383 bp, Glycine max
  Clone ID: LIB3028-033-Q1-B1-A11
ccgaatattacccttggacgtgggcagtgtctctttcagtttcttggtgaagttattaagggtagctattcagttggaacgtgaagagttggagagatctgaactgattaggagaataggtatgtgccttgaggaggctaaggtgtctgatttattaatttgcgccccagttggtgacacagtttttgatgttgacattgtgcaaaggctagtagaagagtttgtagcatgtgatcaacatgttcagacggatactctgttggaagatgactttcaggaggagatcagaagccccgggatggtttcagaatcttcaaaggcaaaagtggcaaaattggtggatggataccttgctgagattgcacgtgatccaaatttacctt

SEQ ID NO: 1805 - DNA, 129 bp, Glycine max
  Clone ID: LIB3028-033-Q1-B1-A4
agttgctccagtggccggcactaagcagcatggcggacaaggcagtcaccagcgggggcggggagtgtgggaggggcaggcttctgtccagggagcgcttcgtcggggagggccttcagccagggaggg

SEQ ID NO: 1806 - DNA, 178 bp, Glycine max
  Clone ID: LIB3028-033-Q1-B1-A5
ggggatttgaaggataagccagggtggcaaaagatgcaaactcggggagaggtggggtgaggcttcggctagcctcatagtggagtgcgtcagctcttcaggctgggggttaactttggacagtatccagagggaggtgtaagcgtgaagagggcggctattagcaggagattcatgc

SEQ ID NO: 1807 - DNA, 159 bp, Glycine max
  unsure at all n locations
  Clone ID: LIB3028-033-Q1-B1-A6
agcgaatgagagcatcagacttttcttcttcgatttccattgcggggcggggggtgggggtcggctttctcgtcagtttcggcgcggttggatgttcgtggggggactgctccgaatagcagcggggccactcggggggngggaggatcggaggcttac

SEQ ID NO: 1808 - DNA, 177 bp, Glycine max
  Clone ID: LIB3028-033-Q1-B1-A7
gagcacttgactgcaataagtgagcgtgactgagttcttgagagggggggggggggggagaggtttgtgagggtagacgtgaggggagggtgcgtgtgtcgggggggagcgaattgatttccttgggtggggttgatgggggggttagggagggagggatgttgaagatggtatttg

SEQ ID NO: 1809 - DNA, 379 bp, Glycine max
  Clone ID: LIB3028-032-Q1-B1-G6
gtcaagacatgcttctgatgagatctaccttgggaagagggacagtgacgattggactgatgaccaaaaggcaattcaagcctttgaaaagtttggaaccaagctgaaggaaattgaggccaaaatcaattcgaggaacaaagattcaagccttagaaaccgtaatggaccggttcagatgccttatactgtgcttcttcctaccagtgaggaaggccttactttcagaggaattcccaacagcatctctatctaaggccagagtgcgtttatgtgtggttctctttccaaacctacgttacctttctcgttgacgagtaaatatgcaagcttatgcatgcatataataattgtcttatgcattcttaagtgttgtatg

SEQ ID NO: 1810 - DNA, 160 bp, Glycine max
  Clone ID: LIB3028-033-Q1-B1-A8
attctcccttcataatagagccactgatcgcttctctttcgggggcgcggggggagtggggaggctagaaccgtcgtttaggggcggttcgagcgctgtcgggggcgatgagtgctagacaaggggtggtaaggggggggtcggggaaggggacattaat

SEQ ID NO: 1811 - DNA, 385 bp, Glycine max
  Clone ID: LIB3028-033-Q1-B1-A9
aaagcagagcagagagggaggtggaaaaagaaaaaggaagaaggaatgagtgcaacagtgactctaactctaaacctatgccgttcttccatcgtcgcttcttgtccacattatagccacaaaccaaaccctaatttcaatgccttttttagcttctctttgtctctgtctctgtctcaccacagacgcatcgttatctacaagaaaccattcccctctagacggacgtggctttatggatatatgaatagagatcgagattatgaattggagaatgggttagccttattcggttctgatgaagaactagcaacacaaattccaactcaggcccagtcacttgttgaaggatcaggctccattcgcatagcggagttcaagcctg

SEQ ID NO: 1812 - DNA, 57 bp, Glycine max
  Clone ID: LIB3028-033-Q1-B1-B1
ctcgagccgaatcggctcgagggaagatttgttcaattaatgcaaccggaagttaag

SEQ ID NO: 1813 - DNA, 355 bp, Glycine max
  Clone ID: LIB3028-032-Q1-B1-F11
ggctgggattggttcttccaataataaccatgcctcctcttttccgaatttttcagatacccacatcacttatggacatcatcactgacctcgccatgttcattactccgctttggattgcggttatcgtcggcgtcgtcgtgggctgggcctggaagcccaaatgggcctttcaccccaaagacgctcttctcaagtttcgctcccctcgcccttccaatccccaaaacgacaccgctttcaccttctccaccaccagttcctccgcgcgtgaaaaagacgcgagtgcgagtgcgagtcatttagtgacggaatacgatttgctgcatctgtggaagttggttgaggaaaaaga

SEQ ID NO: 1814 - DNA, 369 bp, Glycine max
  Clone ID: LIB3028-032-Q1-B1-F12
cggctcgagcgaggaagctccaaaccagacaaccacaccaccacctcctcaagagtcagtggcgcaagtggaggaagtggtagtaaccgatgttccacagccaccagaaaaaacaacaaccactgttccagttgaagaaaccgtcactctcgagactcacctctccaaacccaataatgctgacgacaacgacaacatcatccctgaattcaaggaagaaagcaccaaactctctgaactcccagaaaacgaaaacaaggcactccaagacctcaagaagctcgttcaagacgctctcaacaaccaccacttctcttccaaagaagataataagaacccaccaccacaaactgctgctcacaaggaaaa

SEQ ID NO: 1815 - DNA, 388 bp, Glycine max
  Clone ID: LIB3028-032-Q1-B1-F2
ggacacctgcagctagctgatcaagataagatcatttctgcaattaaagaagcaggaaatgttaagaagttctatccatctgagtttggaaatgatgtggaccggactcatgcagttgaaccagccaagtctgcatttgcaacaaaggccaaagttcgccgagctattgaggctgaaggaattcccttcacttatgtgtcaagcaacttctttgctggttacttcctgcccaacttgtcacagcctggagccacagctgcccccagagacagagttattatcctaggagatggaaaccccaaagctgtttttaacaaggaagaggatattggaacttatacaatcaattctgtggatgatccaagaaccttgaacaaaattctctaca

SEQ ID NO: 1816 - DNA, 356 bp, Glycine max
  Clone ID: LIB3028-032-Q1-B1-F4
tgcatattgatgatctccggaaattcgctatgctatggctgcataaaactgaggaggtccgagctgatagagctcattatgcaagaaatataacaggagacatatatgaatctgggtggattagtgagatgtatggttactcatttggtgcagctgagttgaaattaaggcataccataaacaatgagatactgatatacccgggttatgttcctgtaccgagtgtcaactatagagtctttcattacggattgcgattcagtgttggcaattggagctttgacaaagcagactggcgcaacgttgacatggtcaacaaatgctgggccaagttcccagacccaacagattcctca

SEQ ID NO: 1817 - DNA, 382 bp, Glycine max
  Clone ID: LIB3028-032-Q1-B1-F5
tttctttcttcttctacatccactgcacaattgccacatgaatcattagttagggtttattctccaagaaaagcaatgagtgcgtccaggttcatcaagtgtgtcactgtgggtgacggtgccgttggcaagacttgcatgctcatctcctacaccagcaacacttttcctacggactacgtgccaactgtctttgacaatttcagtgcaaatgtagttgtggatggaagcactgtgaatcttgggttgtgggatactgctggccaagaagattacaatagattaagacccttaagctatcgtggagcagatgtattcctgcttgctttctctctcataagcaaggctagctatgaaaatgtttccaagaaatggattcctg

SEQ ID NO: 1818 - DNA, 384 bp, Glycine max
  Clone ID: LIB3028-032-Q1-B1-F6
gtcacagtgcttgaccttgcagcttctggagccaacatgaagaaaattgaagatgttgacactttttcacagtatactgagcctttgttgtttctattggacacaattccctcaaatgaaaaggtagttctagttggtcacagctttggagggctgaacatagcacttgccatggagaaatttccagaaaaggtagcagttggtgtttttctaacagcttttgctccagacgttgaacaccacccatcttatgtcttggaaaagtacagcgagaggaccccgttagctgcatggttagacactgaatttgctccaagtggaaacaaaacaacaatgttctttggccccaacttcttgtccgacaagctctaccaactatcccca

SEQ ID NO: 1819 - DNA, 366 bp, Glycine max
  Clone ID: LIB3028-032-Q1-B1-F7
gtctctgcctctctgcaatccacagccgaaaatgcctttcaagaggtacgttgagatcgggagggttgctcaaatcaactacggcaaggaatatggcaggctcgtcgtcatcgtcgacgtcattgaccagaacagagcacttgtcgatgcccctgatatggtgaggtcccaagtcaatttcaaaaggctttcccttaccgacatcaagattgacatcaagagggtccctaagaagaaagatcttgtcaaagccatggaggatgctgatgttaagaacaagtgggagaagagttcatggggtagaaaactcattgttagaaagagaagggcatccctcaatgattttgataggttcaagataatgtt

SEQ ID NO: 1820 - DNA, 377 bp, Glycine max
  Clone ID: LIB3028-032-Q1-B1-F8
atggcttcttctcttcctcttctcaaccttcttaccctcgctctgtcactactcttctgcattgccttaacttccgaggttggcgtgcaggcgcagatggaggagacaggcttgaacctcatgtcggaggcgttggagtggccaaccgcaatgtcgctctacgacgaagacagcgaagaagaggatgtccagaacggttacagtcggagatcgttgttctggcggaggatgaagtactacatctcctacggcgctctttccgcgaaccgaatcccgtgcccacctcgttctggtagatcttactacacccacaactgctacagggcccgaggccccgttcacccttactccagaggctgctctgtcatcacgcgctg

SEQ ID NO: 1821 - DNA, 355 bp, Glycine max
  Clone ID: LIB3028-032-Q1-B1-F9
gtgcggtctctcaccgcacgcactagcactgtctctcactgaaacttgttcgcacattttcacggatctaactaagttatcgccatgaatcgccaccacgatcccaatcccttcgaagaagaagaagtcaatcctttttcgaatggcactactgctcctgcatcaaagtcacgtattccaccattagcatctgagtcactgggctttggtcaaaggcatgatgctacagttgatattcctttggatactacaaatggctcccaggaaaaaagtcaaagagctagcagcttgggaagcagatttaaaacggagagagaaggaaataaaaagaagagaagaggctgtttctagagct

SEQ ID NO: 1822 - DNA, 372 bp, Glycine max
  Clone ID: LIB3028-032-Q1-B1-G1
ggcttccctccctcctttgaagaaacaaattagaagagtgtgttgtgttgtgttgaagtagcaagctagcaaagatgtttggcatcttaggaggcaataaggggcacaagatcaagggtactgtggtgttgatgagcaagaatgtgttggacttcaacgaaatagtgtccactactcagggtggtttggttggtgctgccaccggcatcttcggtgctgccaccggtattgttggtggagttgtcgatggtgctactgccatcttcagtcgcaacattgccatccagttgatcagtgccaccaagactgatggacttggaaatgggaaagttggaaagcaaacctatttggggaaacatcttccttcgttac

SEQ ID NO: 1823 - DNA, 369 bp, Glycine max
  Clone ID: LIB3028-032-Q1-B1-G10
gactcatataatgagtttttgaaaatcaaatgggttttgcacaggtctaaactcacaacttattggaaggatgttacagaatcctggtttttctattcacacgccaatttttcctgagaattgccatcttgcacaattggccaatctcactgttcctttacaaatggaggttgttttggtccggaggggaaaattgcttcaggacctaaaatggcattcctaacactaattaaaaaaatggttttattatccaggcctaacatgctgatcacagctagctttataacccaatcaagtcatctgtgttggttacggcatatgttgacttcttgatgaagtaggttgctatttatttcatgagtttatatc

SEQ ID NO: 1824 - DNA, 355 bp, Glycine max
  Clone ID: LIB3028-032-Q1-B1-G11
cgctctctcactcacaaacacacactgaactaaaaaacatcaaaagagacatggctgagcaaaccttcatcatgatcaagcctgatggcgtccaaagaggccttattggcgagatcattagcagatttgagaagaaaggtttctacttgaaaggtttgaaacttgttactgtggaccgtccttttgctgagaagcactatgctgatttgtctgccaagcctttctttagtggtttggtggattacattatctctggccctgttgttgccatgatctgggagggcaagaatgttgttacaactggccgaaagattatcggagccacaaacccagctcaatctgagcctggaactat

SEQ ID NO: 1825 - DNA, 357 bp, Glycine max
  Clone ID: LIB3028-032-Q1-B1-G12
attttcaagggatcaatacaatataatggttcaaacatgctaacggtgtatgctcccagagcagttctaaagtgccatttacaccaggattcagcttcttctcaacaaccatattcatatccatgcaagatcaataataatgttcatttggtgaattgtaatcctaaaccttttggcactccttgtactaatatatcgtttcatagttcctccttctctgggaaatgtgataagctacaaaagagccttcatctattccatcatgttgccacacataaatggctgtgtggattacaggattccatttcatctgatgatgagtatcgttcttcacgcaacatagccatcagcttgttc

SEQ ID NO: 1826 - DNA, 391 bp, Glycine max
  Clone ID: LIB3028-032-Q1-B1-G2
gttgaaatcgatgaactccctaagcaaattgatgatacacagtacccaaaaacattcttctataaagaagaccttcatccaggcaaaacaatgaaagtacaattcaccaagcgtccctatgcacaaccttatggtgtatatacatggttaacggatattaaagacacctctaaagaaggatatagttttgaagagatatgcatcaagaaagaagcgtttgagggagaagagaagttttgtgcaaaatccttgggaacagtaattggttttgccatttcaaagctgggaaagaacattcaagtactttcaagttcctttgtcaataagcaagagcaatacactgtggaaggagtgcagaatcttggagacaaagcagtgatgtgtcatgggc

SEQ ID NO: 1827 - DNA, 376 bp, Glycine max
  Clone ID: LIB3028-032-Q1-B1-G3
gtgattgtctttgtatcacgaaaactatacgattcgattccttgttttcaatggacaccttcttcaattctcaatcttcttcttcttcgagaagccgctggagttacgatactctcaagaatttccgtgagatctctccgctggttcagaatcacatcaaacgggtttattttacgttatgttgcgctgtggtggctgctgctgttggagcttttcttcatgttctgtggaacattgggggttttctcaccacgttggcttccattggaagcatggtttggttgctatctacaccccctgttgaagagcaaaagaggttgtctctgttgatggcttcggccttgtttcagggcgcttccattggacctctgattga

SEQ ID NO: 1828 - DNA, 386 bp, Glycine max
  Clone ID: LIB3028-032-Q1-B1-G4
gatgaacagcttcttgctctggatagcctgctcaacagtgagcccacccaagttaggttcatcttagatcaccatgactatctcattccatatttgaggaaaataaatgcaactaccacaaagacttatgctaccagaaccatatttttcttgaaaagtgatggaactttgacgccattggccattgagttaagtaagccgcatcctcaaggtgaagaatatggtcctgttagcgaagtctacgtgccttcgagcgaaggagttgaagcttatatttggttattggcaaaggcttatgttgttgtaaatgactcgtgctaccatcaactcgttagccattggctaaacactcatgcggttgttgagccattcgtcataacaacaaa

SEQ ID NO: 1829 - DNA, 367 bp, Glycine max
  Clone ID: LIB3028-032-Q1-B1-F10
gtgcaacaacaaacgcaccagatggataggtatcagagggtagagaagcccaaggcagagactcctataaacgagaatgagatacgcgtcactactcaaggaaggatgaggaattacatcacctacgccaccactctcctccaggagaaaggatctagtgaaattgttctcaaagcaatgggacgtgcaataaataagaccgtaatgattgctgaactgatcaagagaaggattgttggtctgcatcaaaacacccaaattggatcaactgatataactgacacatgggaaccactagaagaaggccttcttcctttggagactactcgccatgtttcaatgatcacaattaccttgtcaaagaaag

SEQ ID NO: 1830 - DNA, 372 bp, Glycine max
  Clone ID: LIB3028-032-Q1-B1-D5
atggggtttgaggaaactgagttaaggcttggactgcctggaaacggaggcactgaagaagtgctcatcaggaagaggggtttctctgagactgaaactggtcatgaagatgagtctgccaccactgtggatttgatgcttaatctttcttctaaggaggccgcaaccactgctgctgctgctgcagatccaactgataagcacaagactttgcctaaggagaagacccttctgccagcagatcctgctaagcctccagccaagacgcaggtggtgggttggccacctgtgcggtccttccggaagaacatgttggctgtgcaaaagagcgttggagaagagagcgagaagaacagcagccctaatgcaagc

SEQ ID NO: 1831 - DNA, 385 bp, Glycine max
  Clone ID: LIB3028-032-Q1-B1-D6
agggatcccaccagaccagcaacgtctcatttttgctggcaagcagcttgaggatggacgtacacttgctgattacaacattcaaaaggagtccactctacacttggtgctccgtctccgtggtggaatgcaaatctttgttaagaccttgaccggaaagacaatcacccttgaggtcgagagctctgacaccattgacaatgttaaggctaagattcaggacaaagagggtatcccaccagaccaacaaaggcttatctttgcaggaaagcagctagaagatggcagaaccttggctgattacaatatccagaaggaatctaccctccacttggtgctccgtcttcgtggtgggatgcaaatctttgtcaagaccttgactggg

SEQ ID NO: 1832 - DNA, 385 bp, Glycine max
  Clone ID: LIB3028-032-Q1-B1-D7
tctagaaccaccataacatcattctgcccttccctcgcgtttcaacaccgataacccgcaaaaatctccattgatctgcgcctcctgttccatggcaaagctgcctgtggaatacaacggcgactgcgccaccaccgcctcagcatccgcctccgcagccgcggagtctcagagatccattcccacgccgtttctcaccaaaacctttcaactcgtcgacgaccaatccatcgacgatgttatttcctggaacgacgacggatcaacgtttatcgtctggaaccctaccgtcttcgccagagacttgcttcctaaatatttcaaacacaacaatttctctagcttcgttcgccagctcaacacttacggattcagaaaaattgta

SEQ ID NO: 1833 - DNA, 361 bp, Glycine max
  Clone ID: LIB3028-032-Q1-B1-D9
ctcaaatcatggatttcttgcaagcacaagaaaatcagatacttgtgggtgtggccgtggccgttgtagccattgggcttggtgcagtatatctctattcatccaagaagaccaaaggttgcttggacccagagaactttaaggcattcaaacttgttaagcgtgcacagctgagccataatgttgcaaagttcacatttgcactcccaacacctacatctgttttgggtcttccaattgggcaacacataagttgcaggggtaaagatgctcaaggtgaagaggttatcaaaccatatactcctactactttggattccgatgttggacattttgaactagttattaagatgtacccaca

SEQ ID NO: 1834 - DNA, 380 bp, Glycine max
  Clone ID: LIB3028-032-Q1-B1-E1
gcttattgcagattaattctatgttgcaatagttcttctagagttacagaagcaatccgctctcgatgtctcaatgtgcgaataaatgcaccaagtgaagaacagattgttgaagttttagaattcattggtaagaaggaaaggctgcaacttcctcctggttttgctgctcgcattgtggagaaatcaaatcgaaatttaaggagggccatattgtcatttgagacttgtcgtgtccaacagtatcctttcactaacaaacagacaattcctccaatggactgggaagagtatatttctgaaattgcatctgacataatgaaggaacagagcccaaaaaggttgtttcaagttcgaggaaagctctatgagctgctaat

SEQ ID NO: 1835 - DNA, 388 bp, Glycine max
  Clone ID: LIB3028-032-Q1-B1-E11
cagaaacaaaagtgcaagaattaggtggcatcaccgatgtgcatggagctgccaacagcgtcgagatcaacaatctcgctcgctttgctgtagaggaacaaaacaaaagagagaattcagttctggagtttgtgagggtgattagtgcaaagcagcaagtggttgctggagtgaattactacataacattggaagcaaaagatggtttgattaaaaatgagtatgaagcgaaggtttgggtgagggaatggttgaactccaaagagttgctagaattcaagccagtcaatgtttctagcacaccaataggtggcattaccgatgtgactgcgaatagcctcgagatcgacattctcgctcgttttgcggttgatcaacacaacaaaaa

SEQ ID NO: 1836 - DNA, 338 bp, Glycine max
  Clone ID: LIB3028-032-Q1-B1-E12
ttggtactcttggttgcgtgtatgcacctcagatcagcaaggccctagctggagctgacaggaaggagttaatgagaaaattgccaaagtttatatatgatgaagaaaaggctttagagaaaacccggaaagtactggctgagaagattgaacaactgaatgctgccatagatgatgtttctgctcagctaaggtcagaggaggcctcaaatggagtagctgtgaactctgatgaaattgaagctgccacatgagactgctgcagtgatgtcatggtacacaatcggctattactctgtccagtaaaaatcttgttggtacaaaatgtatttgaattt

SEQ ID NO: 1837 - DNA, 387 bp, Glycine max
  Clone ID: LIB3028-032-Q1-B1-E2
acgccccgcttggttcattgccgctgctaacctttttgcctttgtccacgttgatggaggctaccacgtgtttgccatgccagtgtttgatatgatcgaaacctgcatggttacaaaattaaattttccaccttctactgcactccgagtaacaactcgcactatttatgttgcggtgacaatgttaattggcatatgtgttccgttctttggctctcttcttggatttcttggaggctttgcgtttgccccgacatcatattttttgccctgtatcatatggcttaagcttaaaaagcccaagaaatttggcttgtcttggacaattaactggatctgcattattcttggggtagtgttgatgatattatctccaattggtgctct

SEQ ID NO: 1838 - DNA, 386 bp, Glycine max
  unsure at all n locations
  Clone ID: LIB3028-032-Q1-B1-E3
gcatctctctgctcttctctgttctgttctgttctgttctgtttctctctcctcnccatatattcctcttcttcttcagaactcagaactcagaagggccacttcacttttagaaacccagttttgcatctgggtttttgcctgttgaagtgccaattttgaagataataataaaaacaattatgacttggaaaagcagaggagaattgccttctagaagcgtcatctcgcagagatgggtactgtttctctgcttaggaagtttctgtgctggaatgctcttcactaccaggatatggaccatacctgaaaacaacaaaggactagcacgaccaacagcctcagaagctgaaaaattgagtttagtttctgaacgttgcaattcg

SEQ ID NO: 1839 - DNA, 366 bp, Glycine max
  Clone ID: LIB3028-032-Q1-B1-E4
gtgagttcacgaacacaaatgttgtccttaacactacctattcctctgctgaaaaccctaactcctccttctccaaacattaacaacccctctctctctccctattctcattatcaacctcgttcccgttccctaacacggggacttatagtccccaaacacagctccgccactgctcctccgagcgcgacgcttcgggacgacggaacctcactcgctggagattcaccggagccgcttccggaggagttagtggcggagctgatgccaaagcacgtggcggtgattatcgacggacatggtaggtgggccaagttgagagggctgccggcgtccgcggggcaccaagcgggtgtgcagccactg

SEQ ID NO: 1840 - DNA, 377 bp, Glycine max
  Clone ID: LIB3028-032-Q1-B1-E5
tttgatttggaacaaacaacaatagaggggttgtggtgctctgtgtgctgcaatttccttttgagcttgtgtttgattcatcaaatcatcaaagatgactgtaggggcaggaatatctgttgcagatgggaacttgatggtgttggggaacaaagtgctgagccatgtccatgacaaggttcttgttacccctgcatgtggtggtgctttgctcaatggggcattcattggggttcaatcccatcacaagggtagccgcacagtcttcccaattggcaagcttcaggggttgcgatttatgtgtgttttccggttcaagatgtggtggatgacgcagagaatgggcacttgtggacaagatatccccattgagacgc

SEQ ID NO: 1841 - DNA, 369 bp, Glycine max
  Clone ID: LIB3028-032-Q1-B1-E6
cttcttccaaaatgggtatctctcgtgattccatgcacaagaggcgcgccaccggcggcaagaagaaagcttggaggaagaagagaaagtatgagcttgggaggcagccagcaaacacaaagctatcaagcaacaagacggttaggaggattagggttcgcggtgggaacgtgaagtggcgcgctttgaggcttgatactgggaactactcttgggggagtgaggctgcaacccgcaagacaaggattcttgatgtggtgtacaatgcatccaacaatgagcttgttcggactcagacattggtcaagagtgccattgttcaagtcgatgcagcacccttcaagcagtggtatctgcagcattatggcg

SEQ ID NO: 1842 - DNA, 384 bp, Glycine max
  Clone ID: LIB3028-032-Q1-B1-E7
agaaatttaagtgaggagctagagaatgatgatgaagtctgctatgtgtgcagtggtggttgtagcacttcttcttctggcggaggtggggcccatggctgaggctgtgacatgcaccccaacagagttgagtccgtgtcttccagcaatcacttccggtgctaaaccttccaatgcttgttgcacgaagctgaagcagcaaaaaccatgcttatgtggctacctcaaaaacgctagcttgaagcagtatgttaactctcctaatgcccgaaaaaccgttgcttcttgtgggattccctttccaacttgttaattaattaagccttcttataattaaagtgtgggatatatatatatatatagataaacagtttaatttataca

SEQ ID NO: 1843 - DNA, 380 bp, Glycine max
  Clone ID: LIB3028-032-Q1-B1-E8
atcaaaatgaatctgtaccactcctccaccaccaccaccaccaccaccatcttcaccgtcatattcctcctccttgcaatattattcactctcacaccccacaaggccaacggtgccacgtgtcaccctgaggaagaagcgggcctgttgggcttcaaatccggtatccgatccgacccgtccggcctgctcagtaactggatatcgggtacggactgctgcacatggaccggagtagaatgccactataacagcacccgggtccaaagattattcttaacgggtcaaaaacccgaaaccatcttatcgggtaccatctcaaccaccctctcaaaactcaaactcctcgatggactccacctcataaacctcatcaacat

SEQ ID NO: 1844 - DNA, 381 bp, Glycine max
  Clone ID: LIB3028-032-Q1-B1-E9
gagaagaggagtgagagaagatggggttgtcgttcacgaagctgttcagcaggttgtttgcgaagaaggaaatgaggattctgatggtaggtctcgatgctgctggtaagacaaccatcttgtacaagctcaagcttggagaaatcgtcaccaccatccccaccatcggatttaatgttgagactgtggagtacaagaacatcagcttcactgtgtgggatgttggtggtcaggacaagatccgtcctctgtggaggcattatttccagaacactcagggtctcatttttgtggttgatagcaatgatagggatcgagtggttgaggcaagggatgagttgcacaggatgttgaatgaggatgaacttaaagatgctgttt

SEQ ID NO: 1845 - DNA, 386 bp, Glycine max
  Clone ID: LIB3028-032-Q1-B1-F1
aatttcctagatctcccaaacaaattgtagcataagtcccatggccaaagagactagtgttgtttatctatatcccagcaaatcacaagtttggggtgagaattttgatcataaaaaacttgtaataacaacactagctgctaatggaaagaaggaggagagtaatggagcacctaatgacacatatcctgcgtttcccgggtggtatgctgatgtttcctggccaggagaagcacacacatataaaatagaaaagattctattccacgggaaatcagaattccaagagcttcttgtatttgagtcttctagacaaggcaaggttgcaattcttgatgggcatatccagctgacagaaaacgatgaatttgctttacaagagatgc

SEQ ID NO: 1846 - DNA, 361 bp, Glycine max
  Clone ID: LIB3028-032-Q1-B1-D4
acgaatacctcttcatcttgttctatctgtgacgagcatcatggccacaagagcagtgttattgttggctatgtgtgtgcttccggcgatggttgtggccattcgcccagcaaagaaccctttttgcgtgaagggtcgtgtctactgtgacccttgccgtgctggttttgagacctcagctaccacctacattgctggtgctgagattatgttgcaatgcaagagcagggttagcaacgaggttgtgtacacgaagaacgggtacaccgactcaaccggagcatacacaatgtacgtggatgaggatcacgcagatcagatctgcagtgccaagcttgtaaacagccctcaccctcaatgc

SEQ ID NO: 1847 - DNA, 112 bp, Glycine max
  Clone ID: LIB3028-032-Q1-B1-B7
ggtatcaccattactttgtttttactatcatgttcacccgtagtatgtaagattgatatcccaaactatgattatgaaatcaaatttctctatggcaccagttgggattttc

SEQ ID NO: 1848 - DNA, 358 bp, Glycine max
  Clone ID: LIB3028-032-Q1-B1-B9
cccttctttaccttctactttccgaatccagaaaacaccacaacaccacccagaattgttgggttccattctcaaaacagagaacaagaagaagaagaaagagagagagtgaaaacgggaaaagcaaaaagttgtttctgtgattgattctctgcaaccgaatcatcatcagccacttcttcccgtttcatctctcccatttcttcttttcttccgctctggttcagtaaggcgaagagggttaacgttattcataatggttgcaacagccgctacggcgtcgtttcttcccgtgcctttgccagacgctggaaaagggaaacccaagaaactgggtggtggtggcggtggcggtggc

SEQ ID NO: 1849 - DNA, 302 bp, Glycine max
  Clone ID: LIB3028-032-Q1-B1-C1
attttgatgttgaaaactatagataccagcccttctggctgaagtggcagttttggaagaagaaattgtaagacttgaagagcaggttgtgcatttcagacaggatttgtaccaggaagctgtctacatgtcatcttctatgaggaaattggaaaattcagtttccgctcctcctaacaagtcaaatccaacaatggatagtcccaagttggataaattgaagtctcttacccaaacaactggtaattcaacagcaacatctgcaactaagcctaacacaacactccctgatgataatagac

SEQ ID NO: 1850 - DNA, 292 bp, Glycine max
  Clone ID: LIB3028-032-Q1-B1-C10
gtcagcctggtcaagctcctcgtcctgctggcacaggagcacctgttcgaacctaaaagcaaatcctaagaaaaagccttgatgttatgctctgaccaaatcctaagaacaaatttgttgcttaattttgaacatatcagttttgtgaaggggtattttgttctgattatctgctctagtcgttggatagtatcttgctggttataattttggtggctattattatgaaagtggaacttgatataagttttcattgaaattggttatttatttatttatttcagatcttatt

SEQ ID NO: 1851 - DNA, 372 bp, Glycine max
  Clone ID: LIB3028-032-Q1-B1-C11
gttgaattgagttgagaagagaagaggtcatagacacaacacaagacatgtctgttgtcgagtcaggtgaacacaacaacatcagaggagtaccaactcatggtggacgctatgttcagtacaatatctatggcaatctctttgaagtttccagaaagtatgtccctcctattcgtcctgtgggtagaggcgcttatggtattgtttgcgctgctgtaaatgcagagacaggtgaggaagttgccattaagaagattggcaatgcatttgataacagaatagatgccaaaaggaccttacgagaaattaaacttcttcggcacatggatcatgcaaatattatgtccattaaagatattatacgtcctccac

SEQ ID NO: 1852 - DNA, 356 bp, Glycine max
  Clone ID: LIB3028-032-Q1-B1-C12
accaatatagcccaagccctatacaaccaaaccctaacacacacccatttgattcagtttccatggctagcctcaaggttgcatttttggctgcagtgctctgcatggttgtggtgagtgcacccatggcacatgcagctatcacgtgcgggcaggtgacgaatagcctgatcaattgcatcggttacctccagaacggaggaacgccgccgtcgggatgctgcaacggagtgaagagcctcaatgccgccgccaagaccaccgccgaccgccagacggcgtgcaactgcctcaagtcggccgccagccaaatctccggcttcaaagccaacaacgccgcctcgctccccggcaaa

SEQ ID NO: 1853 - DNA, 386 bp, Glycine max
  Clone ID: LIB3028-032-Q1-B1-C2
cgatcacaaaaatggcggcgaaacttcaaatatttacgggattgccccccgcgccatttcaatcttcttcttcctccactctctgcgtactcaagaagcctctcactacctccttcttcggcaccgcgcgagtggaagttctgaaacttagagtgatgaggattgtgaagcctacgcgtggcggaggtgctctcggtgctcgcatgaacctctttgacaggttcgccagagttgtgaagtcgtacgcaaacgctgtcttaagttcgtttgaagatccggagaaaatattggagcaagctgtgcttgaaatgaacgacgacttgaccaaaatgcgtcaagctactgcacaagtattggcatctcaaaagcgattggaaaataaatac

SEQ ID NO: 1854 - DNA, 370 bp, Glycine max
  Clone ID: LIB3028-032-Q1-B1-C4
aagcaacattttgttgatgccctcctcacattgcaagacaaatatgaccttagtgaagacaccatcattggtctcctttgggatatgatcacagcagggatggacacaactgcaatttcagttgagtgggccatggctgagttgataagaaacccaagggtgcaacaaaaggtccaagaggagctagacagggtaattgggcttgaaagggtgatgactgaagcagacttctcaaatctcccttacctacaatgtgtgaccaaagaagcaatgaagcttcacccaccaaccccactaatgctcccacaccgtgccaatgccaatgtcaaagttggaggctatgacattcccaaagggtccaatgtgcatg

SEQ ID NO: 1855 - DNA, 384 bp, Glycine max
  Clone ID: LIB3028-032-Q1-B1-C5
ccaattcatacatgcatgcatagcatctaagagagagaagctaagcaagtacaaaaaatgaaatgggtgaagctcatcatgttgactttttaacagctttgatgagagaagaaacagcacatgacgataaatttctaagggatgctgtgttcaatctatttgtggctggaagagataccataacttcagctctcacgtggttcttttggcttgttgccacaaacccctcagttgaagccaagattcttgaagagatgaaagaaaaacttgggaccaaagaaaagacgctgggggttttaagcgtggaggaagtgaaaaggctggtttatctgcatggtgctatatgtgaagcattgaggctatttcctcctatacctttcgaga

SEQ ID NO: 1856 - DNA, 384 bp, Glycine max
  Clone ID: LIB3028-032-Q1-B1-C6
caattcacaaccgaaacagtttccatctctctcacaaaatgacaacaatatcaaattgctcccttctcttcctcttcctcttcctctccaccctccacatagcttccaccctctcaacccccaccaacttcatcaagtcctcctgcagcaccacccagtacccagccctctgcatccagtccctctccgtctacgcctccaccatccagcaagacccccacgagctcgtccagacagccctctccctctccctcaaccacaccgaggccaccaaaaccttcgtcgcaaaatgcaacaaattcagaggcctcaaaccgagagaatacgctgccttgaaggactgcgctgaagaaatcagtgacagcgtcgaccggctcagccggt

SEQ ID NO: 1857 - DNA, 383 bp, Glycine max
  Clone ID: LIB3028-032-Q1-B1-C7
atccccttcaaaatctggttttgtggaggcaaacagaggatgctgtggtaccgggactgtagagacaacatccttgttgtgtaatccaaaatcaccaggaacttgttctaatgccacacagtatgtgttttgggacagtgtccatccttcacaagctgctaaccaagttctagctgatgcattaattctacaaggcatatctcttgtcacataaagactcgtcattatttatgttgttagaaattattattgtgtacaagtacaactacacatcgtgaaagtgattcaaaagtttgctgtttttctttagtttggaaaaaaaaaactgtgctctatgtattttagatcttgagaaatttcagataaactcgtttgtaaaccat

SEQ ID NO: 1858 - DNA, 381 bp, Glycine max
  Clone ID: LIB3028-032-Q1-B1-C8
ggagaaatgagtttgttatacgcctgcaaccttcagaagctatgtacatgaagcttacagtcaagaaacctggactggagatggaaacagttcaaagtgaactagatttgtcttataggcaacgctatcaagcagtaaccattccagaggcttatgagcgtctgattcttgactcaattagaggtgatcaacaacattttgttcgcagagatgagttgaaggcatcatgggagatcttcaccccacttttgcaccgcattgataagggggagttcaagtcaaccccttaccaacctggaacaagaggtcctgtagaagcagataaattactgctggaaaaagctggttatgttcaaacacatggttatagatggatcccct

SEQ ID NO: 1859 - DNA, 368 bp, Glycine max
  Clone ID: LIB3028-032-Q1-B1-C9
tgcacattcttctttctatatattccaaatcccttttccgatttccaccaaaatctaaaccgaaattcccaattacccttcccaattttcaccaaaacctaatactcccacaccaatcttcgatcatggacgccgattcacaacctcaacaactcgaagagagaacagaggagcaagaactgaagtacctggaattcgtgcaattcgcgaccatacaggctctgatgcgctgcgccatcctctactcatacgccaaggagcgcgcgggtcctctgaagcccggtgtcgacaccgtggaggaggccgtgaagaccgtcgtggctccggtctacgataggttccaccttgtccccggcgaggtcctcaaa

SEQ ID NO: 1860 - DNA, 365 bp, Glycine max
  Clone ID: LIB3028-032-Q1-B1-D1
ctctctctctgcgatggagtttcgcgtttccgtcatttggagccttctcctcattgtctctttcttctctcctcaaatcaagggtgaggcttctggttccgtcttcttcgtcgatagctccagtaatcaattcattcgcgccagatcatccaactatgagcaaccttcactgttgctagaagaagctggtgctgttgtgtcagtcttgcttggttttgctcctccttccacccttccagctgccagctcatccaagttgaatgatgttctgattcctaacccattcaagaggcctcgtgctgtgtttttgctggaagtgaatggaatcaatggtcttgggaatattgtccaggataatccaatgt

SEQ ID NO: 1861 - DNA, 367 bp, Glycine max
  Clone ID: LIB3028-032-Q1-B1-D11
atcccagtagaaggccaaaggggcgagaaaccctactttttcccattcttatacgaaacttcagacatagatgagaacaatctctacccttttgtgcacctttccacagatggaaacctcttcatcttctctaacaatcgttcccttcttctgaaccccaccacccacaaaattgttcgcacctttcccgtcttacccggtggctcccgcaactaccctgcctctggcatgtctgcccttctccccatcaaccttaacgaccccgccaccgccaccaaggctgaggtcatggtttgtggcggcaaccttcccgatgccttccatattgccgagactaacaaaatcttcctcccagctcttcgagact

SEQ ID NO: 1862 - DNA, 377 bp, Glycine max
  Clone ID: LIB3028-032-Q1-B1-D3
aacaatcacaacattcaagcgctgcatgaccaatctcctgacttcaggaactggttgagtgcaattatctcgtaccagcaatcatgcatggacggcttcaacaacgagaccaacggtgagcaggaaattaaggaacaactgcacacaggaagtttggaccaaatggggaagctcactggcatagtcctagacattgtcaccaacttatccaaaatccttcagagttttgacctcaagttggatttgaacccggcttctcgtcgtcttctcgagcttgatgctgaagggtaccctacgtggttctctgctgcagatcgcaggctacttgctaagatgaaccaaggaggtgcacccccacccaatgcaatggttgccct

SEQ ID NO: 1863 - DNA, 331 bp, Glycine max
  Clone ID: LIB3028-032-Q1-B1-B6
cttacatcgccatgtctactactgtagtaattttcttgaccttaggaaccggggtttgcgcggaatctgaaattgaaattgttacttggtcttggtttggatgtgcgtatatatgaggaaaaacccagccgaggaacagtcgttggatcacggcgtcataattttgcccttttatttttacattgttctgtttgtatgtaactatttgggggtattagctgatttaaggaaagatcccctaatcctgttatggctatactcagcccgaaaggctattgatttattagctattgccttttagtataaataaatgacgagaggatttcttacc

SEQ ID NO: 1864 - DNA, 338 bp, Glycine max
  unsure at all n locations
  Clone ID: LIB3028-031-Q1-B1-H7
tgtgaatcagcaccacattcacctgagctttttgtgaggattccaaagcatggcttcccttgcagcatccactgctgctgcttcccttggcatgtcagaaatgcttggaaaccccatcaacctcagtggtgccacaaggccagctccatctgcctctagccctgcctccttcaagactgtggctcttttctccaaaaagaaggctgcacctccaaaaaaagctgcagctgctgctcctgccaatgatgagcttgccaagtggtatggtcctgacagaaagatcttcttgcctganggtctcttggaccgatctgagatcgcagagtacttgaccggga

SEQ ID NO: 1865 - DNA, 188 bp, Glycine max
  Clone ID: LIB3028-031-Q1-B1-H9
gggtctccaactcattctcacatcactggatgcaggaacacgctgtctctgcagggagcaagaccggcaaacgagaaatggcacacagagattttggcgacgatttaacctcctgcacgtcagtgaaagcatcaaatcagtgcgttgtcggaatctactgacactcgactcatctgaataaacatcag

SEQ ID NO: 1866 - DNA, 354 bp, Glycine max
  Clone ID: LIB3028-032-Q1-B1-A1
cacaaccaggtccctgaatgctttttagagagagaaagagtaataataataaagtggaagaaaaagaattaggagagtgaaacaagaagaagaagaagaagaagaagaagaagaagaattgagaagatggtgtttgaggaaactgagctgaggctgggactgggactatgtctccctggaaatggaaccacggcaacaactgaagctgctgctgcggaattaggagtgaggaagagagggttctctgagactgaaactgatgaaacagccaccgttgatttgatgcttaacctctcacccaaggaagctgctgctgctgatggtgcagatccacgtgagaagccaaagacttcg

SEQ ID NO: 1867 - DNA, 411 bp, Glycine max
  Clone ID: LIB3028-032-Q1-B1-A11
acgtctcattcaaacctgaattcagctcaagattcaacctttctcttcctcctcactcaaacttcccctctctacgccgttcctcccaaatggatgcaccaatggagttttggggtgttgaggttaaggttggtcagaccgtgacagttgacccaatggatcctgtggattcatacatacacatatctcaggttgcgctcggagaggcgaaaaaggagaaacctaatgagtctgtggttttgtatttgaaagttggtgaacagaagattgtcttgggaaccctttctagggatggcattcctcatctatcgttggatttggttctggactccgattccgagctttcccacacttcaaaaagtgccagtgtctttttctgtgggtacagagtactaactggcggcaacaatg

SEQ ID NO: 1868 - DNA, 364 bp, Glycine max
  Clone ID: LIB3028-032-Q1-B1-A12
gccgaagaaggtattgacgtcgatgatgaaaatgaaattggtgaaaacattactgcttctcctttgtgtgaaactcttctgttatgcagtgattggtgctcctcaaacttgtcctgctaacaatgaggataaatgcggcgattcagatgaatggaaaggggagtttttccctgacattcccaaaattaaatatgagggtccgtcaagtaagaatgtgctttcatttaaatggtataatgcagaggaggaaattcttgggaagaagatgaaggattggttaagatttagtgttgcattttggcatacattccgtggaacaagtgctgacccatttggtgcacctaccaaatactggctatgggaa

SEQ ID NO: 1869 - DNA, 386 bp, Glycine max
  Clone ID: LIB3028-032-Q1-B1-A2
aaaataccctgttcagtgtgttacatacactttgacggaaagggttagctagcgtgacagtgcattcacctagtggaccaaacaagccactgcactatcttgtttttatatttattttcttttgcatcatttgaccggggtaataccctatgaccctcctctttattttctttaacacctcctcctctttcttttctcagcaagtatggccgtggaattcatgatggggtacaggaacgacactttcgcggaggataatgcggttcgtgaagctgcgtcagggctagagagcgtctagaaactcatcaagttgctgtcgcatactcaacaacaataccagacaacctcaaagtcttccatggaaaacatcgacaccgactacacag

SEQ ID NO: 1870 - DNA, 386 bp, Glycine max
  unsure at all n locations
  Clone ID: LIB3028-032-Q1-B1-A4
tccctctctaactctcttctaaaacttaccaacacaacaaaatccagtttcccaataanagagtttttgttgaaatggaaaacgttccggcggtgtgtaaggaagatgatcagatggatttgcctcccggatttcgattccacccgacggatgaagagctcataagccattacctctacaagaaggtcattgacaccaagttctgcgccagggcaattggagaagtggacctcaacaagtccgagctttgggatttgccatggaaagccaaaatgggagaaaaagagtggtactttttctgtgtgagagacagaaaataccccactggcttgagaaccaacaaggccacagaagctgggtactggaaggccacaaggaaagacaaa

SEQ ID NO: 1871 - DNA, 388 bp, Glycine max
  Clone ID: LIB3028-032-Q1-B1-A5
ccggaatcagaggctccccctaacttctggggccacaccccggaagaagaatactacacctcccaaggcgttcgcaacaccaagtcccacttcgaaacccccaacggcaaaatcttcacccagtccttcctccctctcaacctccaaccccaccaagtcaaagccaccgtctttatgacccacggctacggctccgacaccggctggctcttccagaaaatctgcatcaacttcgccacctggggctacgccgtcttcgccgccgacctcctcggccacggccgctccgacggtctccagtgctacctcggcgacatggacaaaatcgccgccacctccctctccttcttcctcaacgtccgcaatagccacccctacaaaaacctcc

SEQ ID NO: 1872 - DNA, 348 bp, Glycine max
  Clone ID: LIB3028-032-Q1-B1-A6
ttcttattggggatgcagcccacacattccaacgcctagcaggtcgcagaccttaattacgtttgggacactaaccttccacatccaaaccttgtgactttgggaggaatttcaggcaattcaataggtgatgttgttacatccgttttataccaagcgaacacatctccagttcctgaaaagcttaatgtatgattaagtccatgtccataatctaatccatagatcacatgcactttaaacatgtggctctcatcagggatgcatcccacacactcaaacctactactcgtcaaagatttcatttcggattcgtcaatggaatttcacttacccaaattcttgcaa

SEQ ID NO: 1873 - DNA, 387 bp, Glycine max
  Clone ID: LIB3028-032-Q1-B1-A7
acttctaacacatacactactctctctctctctcttattgtatggccgccaattccagtagccgagggatcaccgccttagggaagcgagtcgccaaccggatctggacttccaacgcacctcctctcacttcaaggaggggagcatacagtagcggctcagtgtacgacaagaaccctgatgatgagatccagtctgggcaggtcccagacgatgtgatccaggcggcaacacaatccggcaaatactgggccccacatccacagactggggtatttgggccccccggaggaggtgaccaaactgcttctgccattcactctgatgcgctggaggagaaggcctggtttcgccccaccagtctcgaggatttcgagaagcctcaca

SEQ ID NO: 1874 - DNA, 158 bp, Glycine max
  Clone ID: LIB3028-032-Q1-B1-A8
ctctgggactagctgagggtcaaatccattgtcaccaggaagagtgccattgatgtaagttggggaggctaacccagttaagcactctcccttcttggtgactatggatttgaaacacagctactatcagatgacggacggaatcttacgatgtaggt

SEQ ID NO: 1875 - DNA, 362 bp, Glycine max
  Clone ID: LIB3028-032-Q1-B1-A9
cagcgttctgagtcttttcttcttcgttaccctcttcacatgccttctctctgctaattcccacgatgaccatattttcctaccgagtcaactccatgacgatgactcagtgagttgcactgctaccgacccaaaccttaactacaagccggtgatcggaatcctgacccaccccggcgacggtgcctctggccggctcagcaacgccaccggggtttcttacatcgccgcctcctacgttaaattcgtggagtccggtggtgctagagttattccccttatctacaatgagtcacctgagaaccttaacaagaagctcgatttggtcaatggagtgctcttcactggtgggtgggctgttt

SEQ ID NO: 1876 - DNA, 365 bp, Glycine max
  Clone ID: LIB3028-032-Q1-B1-B1
ctcgagccgaatcggctcgagcggaaagacaatcacccttgaggtcgagagctctgacaccattgacaatgttaaggctaagattcaggacaaagaaggtatcccaccagaccaacaaaagcttatctttgcaggaaagcagctagaagatggcagaaccttggctgattacaatatccagaaggaatctaccctccacttggtgctccgtcttcgtggtgggatgcaaatctttgtcaagaccttgactggaaagacaattacccttgaggtggagagttctgacaccattgacaatgtcaaggctaagattcaagacaaagagggtatcccacccgaccaacagagactgatctttgctggaa

SEQ ID NO: 1877 - DNA, 384 bp, Glycine max
  Clone ID: LIB3028-032-Q1-B1-B10
atcaaagtttcttcctttctctgctctttgccttctctgacacatttggtgccttgtagagcgtgttttggcaggaaggtggtatggcgaaggacgttgaggttgctgagcgtggctccttctctgggaaggactaccaggaccctccaccagcaccactcattgatgctgaggagctcacaaagtggtccttttacagggctctcattgctgaattcattgccactttgctcttcctctacattactgtgctcacagtcatagggtacaagcaccagactgacctcaaggaaaatggtgaaatctgtggtggggttggcattcttggcattgcatgggcctttggtggcatgatcttcatccttgtctactgcactgctggga

SEQ ID NO: 1878 - DNA, 372 bp, Glycine max
  Clone ID: LIB3028-032-Q1-B1-B11
gaagtcttctgaaagacgcagttatggtggaccacgagttccttaccgtggtggtcgtcgtggaggtttcagcaatggtgaaactggtgaaggtgaagacggacgacctcgaagagcatttgatcgtcgcagtgggactggacgaggaaatgaattcaaacgtgaaggttcaggacgaggtaactggggaacccaaactgatgaacttgctcaggtaactgatgaggttgtgaatgaaacggaaaagaatttgggtgatgagaagcctgcagttgaagaagatgtagctgatggaaacaaggacagccctactaatgaaaccgaagaaaaagagcctgaagataaggaaatgactctggaggaatatgaaaa

SEQ ID NO: 1879 - DNA, 382 bp, Glycine max
  Clone ID: LIB3028-032-Q1-B1-B2
cttttaatacctttgctcccaataaggcagcaggagatcacagaactccaattaaactaaaagaaatttctccagatcaatcaaatcaaactgcagcagatacgtggaatccatggcagcaaccagaccagacaggaggaggaggagcctctcaaactatccatgaaacacaactcaaggcatctcgcgacgtggcaatggcaacagctgccaaagcaaaattacttcttcgggagctaaaaaccgttaaagcggatttggctttttctaaagcacgctctgctcaactagaagaggaaaacaaaatgctccgggaccgcgagggtaccgacaagggacaaaacgttacccgtgcagatgatgatttgatccggcttcaact

SEQ ID NO: 1880 - DNA, 390 bp, Glycine max
  Clone ID: LIB3028-032-Q1-B1-B3
cggatctcttcttcagtggtggaagctactagaacactagtttgttgagcactgcgatgaggaagtggacggttgcttccgctctccttcttctctctctcctctttctctttgcagatcaaggtcgaaagtttcaggcgaatgccgagggagattccgacgagcttgtagatcctccgaaggtggaggacaagatcggtgctgtgcctcatggcctttccaccgattcagatgtcgtcaagagggagtcggagtcgatctcgaagagatctctccggagcaatgcggagaagtttgagttccaagcggtagtgtcacggcttatggatattatcatcaattctctctacagtaacaaggatatcttcctcagagagttgatttccaatg

SEQ ID NO: 1881 - DNA, 384 bp, Glycine max
  Clone ID: LIB3028-032-Q1-B1-B5
ggaaggaagagaagagaagagagatagggagagcgagcgtgagaggaagatcttcgatttagggttttcaatttcgtattcagcaaggcggcgagtgtgagatttttagagagagagaggtgaggacgctgagtgctctgctgagagattccataaccccaagaggaagaggaggaggagaaggtggatagattttttttcctttttttttgtgctgtttatttatcctcagagcggtggatagggatttttcactctgcagcgttccgttccattgtgatttgttgaagtttctgatggagcagcgaaagcttgtggttttggggattccgtgggatatcgatactgagggattgagggaatatatgagcaagtttggtgagc

SEQ ID NO: 1882 - DNA, 242 bp, Glycine max
  Clone ID: LIB3028-031-Q1-B1-H6
caacccccagttcttccgcctccacccacccagcatatctctctattcctatttattagcacccctcacattaccttgtgtcaccaactactttgactcctttagcgtaccattacactaattatcagacctagccagtaaaaatggtgagcgtggatgaaatcgggagcgctcagcgttcccatggggccgccaccatcttgcgcttcggcaccgccacgccgtcgaactgcgtctcccag

SEQ ID NO: 1883 - DNA, 379 bp, Glycine max
  Clone ID: LIB3028-031-Q1-B1-G10
accaaccttgtgccctaccctaggatccacttcatgctttcgtcctatgctccggttatctctgccgccaaggcctaccacgagcagttgtcggtgccggagatcaccaatgccgtgttcgagcccgccagcatgatggccaagtgtgatccaaggcacggcaagtacatggcttgctgcttgatgtaccgtggtgatgttgtccctaaggatgtcaatgctgctgttgccaccatcaagactaagaggactgttcagtttgttgattggtgtccaactggattcaagtgtggtatcaactaccagccaccttctgttgttcctggtggtgaccttgctaaggttcagcgtgctgtatgcatgatcagcaacaacaccg

SEQ ID NO: 1884 - DNA, 344 bp, Glycine max
  Clone ID: LIB3028-031-Q1-B1-G11
gaatatatcaggacctaaattaaaccctttagcatatattggagttgactttgatgccattaataggagggaaaagaggatggagaagcccaccacgacaacggtaacgtcaactgtaaccatgggtaaagctatgggatctggttccggtatgggccgggctggcgtgggtgctctcagacctccatcaaacccgatgatgggtatgggcatgggaagctatggaggcgtgaacgcaccaatgggtatggggcagatgccaccaccacctagtcgatttcctcctggaaattataactccatgatgggaagaagtggttatcctcaacatccttatgggggct

SEQ ID NO: 1885 - DNA, 404 bp, Glycine max
  Clone ID: LIB3028-031-Q1-B1-G12
gaagtatggtgctggaattggccctggtgtctatgacatccactccccaagaataccaccaactgaagaaatcgctgacagaatcaataagatgcttgcagtgctcgagaagaacatcttgtgggtcaaccctgactgtggtcttaagacccgcaagtacactgaagtgaagccagccctcacaaacatggttgccgcagcaaaactcatccgtaacgaacttgccaagtgaatggtataagaaagtagaatctacaagttcattggttctgcttttataatacaccaaagaaaaattttctatattgggttgtttcaataaccgtgtgtggaatatttagatgttttagcatgctctgtgagcaattgaatcctcctcaaaccctctccccttaattttccca

SEQ ID NO: 1886 - DNA, 354 bp, Glycine max
  unsure at all n locations
  Clone ID: LIB3028-031-Q1-B1-G2
gaaaggtcggaacataacgcggggaagagttagtttcttctctcttcgatggaaggcggggaagaggttctcccttcggccactgccacctccgccgccaccggcaatcccaccgcttcgcctcctccgctcgctgatcttgtcggtgctcccgatctcgctgctgcctcggacgacgtcgttacccaacctgaaattcacgcgctgatttcagacgaagagcacgatcacgagcatnagcatgacgatgacctccagcacgagcacgatcagcatgatcatgaccaccaccacgaggaccgcgatgatcacgccgctgtggccgctgtctccttggaagatctcaaactcaag

SEQ ID NO: 1887 - DNA, 279 bp, Glycine max
  unsure at all n locations
  Clone ID: LIB3028-031-Q1-B1-G3
atatcgtggaagcatccaacggttttgttggaggtgcgtctcacgtcccacatctacagatgccctctatttcttttcagagtcgtatgccatggaggaatcgatctggtggtctctacccttggtgatggaggcaatgatcaatattaccacagtacaccttgcgaaactctaacggggcaagtgagaagacagatttgagcgtgtaagtcactcatggagtaataatactaggtagganaatgtgagacgtttgaacagttgttgcgggtgttatgt

SEQ ID NO: 1888 - DNA, 373 bp, Glycine max
  Clone ID: LIB3028-031-Q1-B1-G4
ctcttccatccctgtgatcttttcgcctctctgttcagggctcaaatataacaaaacattaaggttcaataccttaactttccttcatatcctcaaactgatgcacacatatgtgcctactctatagtattcacaatatcataataatttgcttctatctgcagtgaaaatgacgcagaatgcaatagtgtccaagacaaaatccgggatcaagggggacatagccgtggcacagaagccactggcggcgcctccgccgccggggtacattcccattccgaggaggacggttttgaagaacctcgaaatcaatggatgacaaagaattaatgcatgggttgattcgatgagagcctcctctccaaccaattcc

SEQ ID NO: 1889 - DNA, 344 bp, Glycine max
  Clone ID: LIB3028-031-Q1-B1-G5
cctcattctccgtcatgttcatcatcttcagttcaattctctctcgctgtctctgtcacggttcctcattcgcatggtgaatgacaccgccgccgccgcgcacatcacttccaccgccaccgcggctgctatcgtcagttccggtcgagtgctctctattctccatgatctagaagatgcgcattccaatttctctggcgacgagcagatggcagaacacgtgaacgcagaactcacagcagaagaggtcgttgatcgactatccgatgactgtgaaggataagaatctgtatcggccgcactcagcccgcgctgttcgtccatatcccctttcactaatctca

SEQ ID NO: 1890 - DNA, 363 bp, Glycine max
  Clone ID: LIB3028-031-Q1-B1-G6
caacaatggcaatggcaacccaagcctctctcttcatcccacccctctccggtctcaaacccagcgaccgagccaccgcgccatggaaacaatcctccaccctctccgtctccacctcgaagcccctcaagttctcgcgaacaatcagagcagcagccaccgaccagaccacagaggcaccggttgggttcaccccaccggaactggacccagacaccccttcgccgatcttcggaggcagcaccggcgggctcctgcgcagggcccaagtggaggagttttatgtcatcacatgggactcgccgaaagaacagatctttgaaatgcccactggcggcgctgccatcatgagggagggtccca

SEQ ID NO: 1891 - DNA, 311 bp, Glycine max
  Clone ID: LIB3028-031-Q1-B1-G7
gccaaggagtcgattctccgttactcactcgcgcaacaccaacttgaggcacacgtgcagctagactacaccgttgggttttacgatggtttcattcaggttcgtgcacgtgtcgataatatacgcctccacctcgcgaggttaggtttcagccacgacgacgacgtggatgatttcgttgatgagaagcactttccgtcacgggttcgggtttgggtgggcccggtgataggatccacttattgcgctgggctgagcttgggccggtccacggagaacaaagagtgcgaagtggaaacacagaggattgt

SEQ ID NO: 1892 - DNA, 375 bp, Glycine max
  Clone ID: LIB3028-031-Q1-B1-G8
aaacactcataacacaaagcacaaagcaaagctcatccttgagttaaaaaatggcagcagcttcttccatggctctctcatccccatccttggctggcaaggccgtgaagctgggcccatcagccccagaagtgggaagggtgagcatgaggaagaccgtcaccaagcaggtctcctcaggaagcccatggtacggcccagaccgagtcaagtacttgggcccattctctggggagcccccgtcgtacctaaccggtgagttcccaggcgactacggctgggacactgctgggctttccgcagacccagaaaccttgcgcaagaaccgtgaactcgaagtgattcactccaggtggggcatgctcggagccttgg

SEQ ID NO: 1893 - DNA, 249 bp, Glycine max
  unsure at all n locations
  Clone ID: LIB3028-031-Q1-B1-G9
ggcgaacagttcctcaagtatccaccacctaaagtgatgcacgtcgacaagtctgcatggatgactgatgaagaatttgcaagagaaacaattgctggtttgaatccaaatgtcatcacgattattgaggagttcncactaagtaacaagctaaatactcaagcctatggtgatcagacctgtataataacacatgagcatttggagcctaacttaggtggtctcactgttgatcatgctatccaaaac

SEQ ID NO: 1894 - DNA, 93 bp, Glycine max
  unsure at all n locations
  Clone ID: LIB3028-031-Q1-B1-H1
gtcatgacacacctgtgatgtanttaacgttaacattttgtgcgtgttacttgtttaaaatttagctaataggaggaaaataaaattgttgat

SEQ ID NO: 1895 - DNA, 380 bp, Glycine max
  Clone ID: LIB3028-031-Q1-B1-H10
gtttgaaggcatgccagcagtgttcacaggaatgttaggaggggaagaactatctcaagcctatgcaagtggagatgtctttgtgatgccgtcagagtcagagacacttggccttgttgttctggaggccatgtcatcaggaatccctgtggtgggagcgcgtgccggtggcgttccagacataattccagaagaccaagatggcaaaattggttacctctatacaccaggtgatcttgaagattgcctgagcaaactaaagccgcttttggatgacaaagagttgagagaaaccatgggagaagctgcacgtttggagatggagaagtatgattggagagcagccactcagaagattcgcaatgaaaactacaatgctg

SEQ ID NO: 1896 - DNA, 366 bp, Glycine max
  Clone ID: LIB3028-031-Q1-B1-H11
tctgtgacctgtttggagctggctgaaatatgcagagaagttggccttcctccaggggtattaaacattgttactggattaggcaatgaagctggtgctcctttgtcatctcatcctgacgtagacaagatttcctttactggaagctctgcaactggaagcaggattatgacagctgcagcacagctaacgaagcctgtttctctagagcttggtggaaaaagcccaatcattgtttttgaggatgttgaccttgataagactgctgaatggaccatctttggctgcttctttacaaatggtcagatatgcagtgcaacatctcgccttattgtgcatgaaagtatagcaacagaatttgtgaat

SEQ ID NO: 1897 - DNA, 421 bp, Glycine max
  Clone ID: LIB3028-031-Q1-B1-H12
catgcacgtctacactagatgatcacctcggtgaattccaattccacattttcaagaaataaggaggcacaaatgttcatatatgaattggaattaattgttttcttattaggcctatcctgaagccacaggaaatgagatcggaattcctcggggaattccaattccacattttcaagaaataacgaggcaaaaatgttcatatatgaattggaattatttgttttcttattatgcctatcctgaagccaaaggaaatgagatcggaattcctcggggaattccaattccacattttcaagaaataaggacgcacaaatgttcatatatgaattggaattatttgttttcttactaagcctatcctgaagccaaaggaaatgagatcggaattcctcgggggtaccgagctcgaattccc

SEQ ID NO: 1898 - DNA, 356 bp, Glycine max
  Clone ID: LIB3028-031-Q1-B1-H2
gggatataatgcacttgccttctccattccttcagggaaggaacttctgacgatatttgggcttgctgctcctgtttttataacattgatgtcaaaggttgtctcaagtagtatactagatctgtggctttgtctagagtggtataaccttttaatataatctgaagttctgatgtttaggtggctttttacgcactacttatatattttgctacatcaatgggtacacatacaatggctgctcatcaagtcatggtccagacctatttaatgtgtaccgtatggggtgaacctctctcgcaaacctctcaatcatttaggcctgaattgatatatggagtaaatcggagtttgtc

SEQ ID NO: 1899 - DNA, 374 bp, Glycine max
  unsure at all n locations
  Clone ID: LIB3028-031-Q1-B1-H3
caataataagttaatagctcgcgtagcgcaaggaacagcataaacgacgctgcgctgaacaacgccggtgtcagacaaacggtgccggttggtggggccgccacgctattacgcctaatcgtatccatcaccctcatcaaaacccctcctttctcttaatttagaaaccctaattcagaagataaaagttactttctccagaattagcgcgctaatggcatcttcagactcatggatgaangaatatagtgaagctgtgaaacttgctgatgatatcaatggcatgagttctgaacgtagttcgtttcctgcatctggaccagagacccagcgacatgcatctgctataagaaggaggatcacgatattaggga

SEQ ID NO: 1900 - DNA, 335 bp, Glycine max
  unsure at all n locations
  Clone ID: LIB3028-031-Q1-B1-H4
ctcaaaactataataaggggttcttcttctcctcgggacactagcaagagcatanacctagagcgatacaacagctacatcaggagactcaacagcaccaaactcctcaacgcctcctccaaactcctcttccgtgccactatcttagtcgcactcatcctcgtcttcctcttcagcttcaactaccctcgcctcgccccagaacttagctctcagcgccacctccactcccactcgcacttcctctcctcctcctcctccttcgcctcctggggagaagcaggtccggcactcctccagccctcgccgccccaacaggctcagcgtcctcgtca

SEQ ID NO: 1901 - DNA, 358 bp, Glycine max
  Clone ID: LIB3028-031-Q1-B1-G1
atttcctagcctcccaacaaggaggccccctatgctcaacagcagaaaataaataaagggcattggggtgcaatggccattgcaaagagtgcttccattcttattattttgtgctttgcattggcctgcaatgcggataatgctggaaaaccagacccagttgctggtcctgacatgttcagcaataaaaatgtggctaaggatgtgctccttcccggggagcaaatagttaacgtccaggattttggagccaaaggtgatggcaagttcgactgcaccgagtctttcatgcaagcatgggcaaagacctgccatcaatcctctgggccagccaggctttacgttcctgctggcagat

SEQ ID NO: 1902 - DNA, 370 bp, Glycine max
  Clone ID: LIB3028-031-Q1-B1-E2
ctccacaagcttccccgcgactccactctcctccaatctcctcttcttcaagctcaatcacacttcttcttcttcttccaaacgaacctcaaccttccatggcttcaagcgcttttcacccgtcatggagtggcaggattgcacggttaacatggagattgatgtgcccatctctgtagcctacacttgttattctgatcgcgaagccatcccaaactggatgccctttatttcttctgttaagatattgccaggcaaacctgacctgtcacggtggtccttgaagtataaagcatttggtcgtgatattgaattctcgtggcttgctcgtaatatgcagcccattccagatcagaaaattcactggcga

SEQ ID NO: 1903 - DNA, 360 bp, Glycine max
  Clone ID: LIB3028-031-Q1-B1-E5
ctttccgattggacctttccagcttctaaacttggctggctatggagttgccgttgctacttcaaaagtatttgctgatgcattttctgatcgcatatttaaatcgccactgcttgatcttctgatcaaatctgggcgaaatggcaaaaacaatgggaaagggtactacatttatgaaaagggtggcaagccaaaacctgatccttcaatactaccaatcatcgacgagtctagaagactttgcaatattatgcccaatggaaagcctatatctattactgaccaagagattgtggagatgatactattcccagtagttaatgaggcatgccgtgttctagaagatggagttgttatacg

SEQ ID NO: 1904 - DNA, 355 bp, Glycine max
  unsure at all n locations
  Clone ID: LIB3028-031-Q1-B1-E6
cgccacggccgaagagatcgcaaagcaaataaaaaactcgacgctctaccacgaacttgccaccgacgacatgaacaaacaggccatggacatctgcaaggaagttctaggttacgctgtcgatgacatgcaccaatccgttcgcaagttggaagagtttgaactaaacaagttgaacgattacgcctatgatctcaaggtctggatcgccggtactctcgctcaccaacagacatgtttggatgggttcganaacacgaccaacgaggctggcaagaccatggctagggttctcaacacttctttggagctcagcgacaacgcattggacatagtggacggtgtaaccaatctc

SEQ ID NO: 1905 - DNA, 267 bp, Glycine max
  Clone ID: LIB3028-031-Q1-B1-E7
caagacggacgcaaccatcacacctcacctcgttcacgcgacgcctttctgctcttcttctacctttcacgttttaaaagtagacagatggaagagacattcctatgtacgtcagagtcggtgaacgagggacactctgacaagctctgcgaccaaatctccgatgctgtcctcgacgcttgcgtcgagcatgacccagacaggatagttgcctgccacacatgcaagagagacaagttggtcatggtcgtcggagacgatcaggag

SEQ ID NO: 1906 - DNA, 358 bp, Glycine max
  Clone ID: LIB3028-031-Q1-B1-E8
atccatttccacaccacaccatggcctcaaccaacgctctctcttcagcctccattctacgctctcccaaccgccagtctctgacccgaagagcgaaccataatggaagagtaaattaccggaaaccgaataaccgtttctccgtgaaagcctccgccaaagagattgcctttgaccagcattcccgctctgctatgcaggccggcattgacaagctcgccgacgctgttgggctcactcttgggcccagagggaggaatgttgtgttggatgagtttggaagtcctaaagtggtcaacgatggtgtcaccattgctcgcgcaatcgagcttcccgattctatggagaatgctggtgc

SEQ ID NO: 1907 - DNA, 380 bp, Glycine max
  Clone ID: LIB3028-031-Q1-B1-E9
gtttttagggtttacaccgagcagcgacacctccctcccgcagtagccatggttctcaaaactgaactatgccgattcagtggtgccaagatctaccccggaaagggcatcagatttgttcgtggtgattctcaggttttcctgtttgccaactcaaaatgtaagcggtatttccacaaccgcctgaagccctcaaagctcacctggactgctatgtacagaaagcaacacaaaacggacattgctcaagaagctgtgaagaagaggagacgcgctgccaaaaagccttactctaggtccattgttggtgccactctggaagttatccagaacaagagagctgataagccagaagttcgagatgcagctatggaagctgc

SEQ ID NO: 1908 - DNA, 374 bp, Glycine max
  Clone ID: LIB3028-031-Q1-B1-F1
cggaggatccgatttctagcttctgcaacgcattggcagctttctgcggccacctccactcctcttccgatgccctcaaacaatccatcgatcgccgacctattcctcgcgattccgcctcgtcgaccttcttgcaatgcctcaatcgccgcgtatcgaccgcgagcgccgacctccacatgctcgattccatgtccttcggtacagtctctttcgaagagctcctaggtcactgcaacgaattgtagaagaagaaccacgccgatctccttcaacttcaagatcgcctccagagctacggttatagtgctgttcctgatattgaggaggcggatgaagatgaggatatacaacgtcaagatccggaagacaaa

SEQ ID NO: 1909 - DNA, 381 bp, Glycine max
  Clone ID: LIB3028-031-Q1-B1-F10
gtggaagttacaatccaactccatcaagtcctccagttggtggaagccatgatccaactccttcaccaccctcaggtggtggtggaagttacaatccaactccatcaactcccccaggtggtggaagctatgatccaaccccatcaccacccacagatggtggaagttacaatccaaccccatcaccaccctcaggcagcaactgtggcacaccaccacatgacccctctactccaacaccctcagtcccaacaacaccatcaaccccatcaacaccatcacaacctccctcaagaagaagtgggtactataactcaccaacaacttatggaagttggtagcccccaacaacaatcactgtgaggccaccttcaaacccaa

SEQ ID NO: 1910 - DNA, 391 bp, Glycine max
  Clone ID: LIB3028-031-Q1-B1-F11
ctcgagccgctcgagccgattcggctcgagcttctagcctaaagccttgctaataaacactaacatggcctcccaatttgctagggatgtaaaatgcaagagactaatgcactgtgcagcctcttatggagaaagaggaagccattgttcactgtctcgtcgccaaaactatggataccatccaatccaacccgaagaagagaacttcaatgaacatcataatcataataataataacttgggatgtgaaaatggtgcaaaacgtggcacaaaccgaggtagacaacaagcacaaaagcttcacaggttgggcttctcgtaccttgcatcatcttttctttacttagtcataaaggttaaagctttctacaatgggttccttggagatgtt

SEQ ID NO: 1911 - DNA, 385 bp, Glycine max
  Clone ID: LIB3028-031-Q1-B1-F12
caagaaagagaagctcaaaaaggaacgactcgtcaagcagatcaagcgcgaggtgtcggtgatgaaactcgtccgccacccccacatcgttgaactcaaggaagtcatggccaccaaaggaaaaatcttcctcgtcatggaatacgtcaatggcggtgaactcttcgccaaagtcaacaatggaaaactcaccgaagatctcgccagaaagtacttccaacaactcatcagcgccgtcgatttctgtcacagccgcggcgtcacccaccgcgacctcaagccggagaatctcctcctagaccaaaacgaagaccttaaagtctccgacttcggactctccgctctgccggagcagcgccgcgccgacggcatgctcttaaccccg

SEQ ID NO: 1912 - DNA, 379 bp, Glycine max
  Clone ID: LIB3028-031-Q1-B1-F2
ggaattattaattggtgtttactgggattaatgaaacctagctagaaaggaaaatgatgggagaacaagggagtgtattttatatatatatatgtaaaaatttgtgtattgtttgtagtggttaaatttgtgaaaaaggtaaaaggttttttctttctttctgggtatacatactaaagggtttttgagagttcagtctgctttgagatttgtgttttggatgatggaggaagctcagggcagttctagttccctgccacctttcctcaccaagatttatgagatggtggatgatccttcaactaattccattgtttcatggagttccaccaataggagtttcattgtttggaacccaccagagttttcaagggatttg

SEQ ID NO: 1913 - DNA, 357 bp, Glycine max
  Clone ID: LIB3028-031-Q1-B1-F3
attttcagtttcttccgcgcttttctgcaaaatcatctaaatccgtgagtttcttctttcgctttatccgtttccaattacccgtaactgtccaatcgttcagtggaatatgttttctaccttcttgatctgcatatgaatttcttccttttttacttttgaagaaaaccattgatttttttcttcttcgtaaatgtatgtaccagaccagtatgttgtatttatgtgttacatttctgttgattcatagaccaaccaatgttgctttactatagtttagaattcaatttaataacttcgagatgcttaggttagatgatatgggttctcctgaaatacatcacctatgtgttcgca

SEQ ID NO: 1914 - DNA, 353 bp, Glycine max
  Clone ID: LIB3028-031-Q1-B1-F4
ctttctcacaacacaaaactcgatttgtaactctcacaccatttctactcatatcccataagcaccaccatgactccatctaaagaaattgtgaccatcatttaccacaatggtcacattgtatatgatccagttcaaggatagatgtacacgtctatgaccccaatatttttttacgccagttgttctactacgtttatacaattcattcgataaattaacaatcgcctccctactcaagcaactgaacaagttgctcaattgttatttcgtgtccctaattcagttcatctcggtcagacacgtgttatttcagctcaactattcgacaatgatgatcttataggtgcgat

SEQ ID NO: 1915 - DNA, 239 bp, Glycine max
  Clone ID: LIB3028-031-Q1-B1-F5
aatctgtcttctcttacattcctttctccaccacacattcaattttcaacctctgggcgtggctagcttcaacctttaacattaacatggccattccctacccccatttcatcgccaccgagaaagccgccatggacgccggcctcctccacccctcctccccctccgtcatcctcacccaagacgatttgaacgaaatcggcgcctacaaggccgtcgagtacgtggagtccggcatg

SEQ ID NO: 1916 - DNA, 353 bp, Glycine max
  Clone ID: LIB3028-031-Q1-B1-F7
gttcaccaattaggctttcaagagacaaactgttttgaaaaatgggatccaaggttgttgcatccgttgcccttctcctctccatcaacatccttttcatttccatggttagctccagcagccactacgatccaccgcccccaccttgttacgtccctgctcctttaacagcaccaccatcattgtcaccaccagcgtcattgtcaccaccaccaccgtcaggacctagttgtccggatctgagtgtttgcctcagtgttttagacgggtctcccgcggagggttgttgtgccctcatcgctgatcttgttgagcttgaagcctctgtgtgcctttgcatccaactcagggtc

SEQ ID NO: 1917 - DNA, 206 bp, Glycine max
  Clone ID: LIB3028-031-Q1-B1-F8
aaaaaaaaaaaaagaaaaaaaaaaaaaaaaaaaaaaaaaaaaaagaaaaaaaaaaaaaaaaaaaacaaaaaaaaaaaaaaagaaaaaaaaaaaaaaaaaaaaaaaaaaagagaaaaataaaaaaaaagggggtgccccccaaaaattagcctcgtcaaccggggatttatttcgggtgggaaactgtaaggggtggaaattttccc

SEQ ID NO: 1918 - DNA, 404 bp, Glycine max
  Clone ID: LIB3028-031-Q1-B1-F9
ttcaacttaagagatcaatatggccaccaccactacccagcctccctctaatatctgttttttccttctgttgttgcttctagcacactttcatttgggcataagccaacttgagctgaattactactctaaaagctgcccaaaagctgaagagatcatcaaggaacaagtcacacaactatataacaagcatggaaacactgccgtttcgtgggtcagaaatctcttccacgattgcgtggttaagtcatgcgatgcatcattactgttagcgacggtgagcgatgtagtgtcggagcagacatcggatagaagttttgggatgagaaacttcaagtacgtaaacactatcaaagcagcggttgagaaagaatgccccttcacagtgtcatgcgctgacattg

SEQ ID NO: 1919 - DNA, 392 bp, Glycine max
  Clone ID: LIB3028-031-Q1-B1-E12
ggtttctgtgcctaaattcctcttcatatgtggatcaaatgttgtccaaaaaggccttgctagtggtgtcacaggtatggctggtcttggcagaactaaagtttctcttccttctcaatttgcctcagctttcagctttcatagaaaatttgccatttgcttgagttcttctactatgacaaatggtgtaatgttctttggtgatggcccttacaattttggttatttgaactcggatctctccaaggttctaactttcacccctctcatttcaaaccctgttagcactgctccaagttatttccaaggggagccctcagtggaatactttattggggtgaaatctattaaagtctcagacaaaaatgtaacattgaacacaaccctgttgt

SEQ ID NO: 1920 - DNA, 366 bp, Glycine max
  Clone ID: LIB3028-031-Q1-B1-C5
ctttcaattccaaattcagtctcacaaattagaatggctagccaatcaaacactaaatcagttcacgatttcacagttaaagatgccaggggaaatgatgttaaactcgccgattacaaaggaaatgtccttctccttgtcaatgttgcctcacaatgcggcttgactaagtcaaactacacagagcttaatcaattgtatgagaaatacatagggaaaggacttgagattctggcattcccgtgcaatcagtttggggctcaggagccaggaactaatggacagattgtggagtttgcatgtactcgcttcagaactgagtttcccattttcgacaacgtggatgtgaatggtgacaatgctggt

SEQ ID NO: 1921 - DNA, 363 bp, Glycine max
  Clone ID: LIB3028-031-Q1-B1-C6
gcatcttcttctggtagtttagacacctctgcaagtgcaaactccttcaccaacttcaccttctccacacaccctttcatgaccacttctttctctgaccttcttgcttctcccacagacaacaacaaaccaccacatggtggtggtggtggtttgtctgagagaactggctctggtgtccccaaattcaagtccacaccaccaccttctctgcctctctctccccctcccatttctccttcttcctacttttctattcctcctggtttgagccctgctgagcttcttgactcacctgttctccttaactcctccaagattctgccatctccaacaactggagcatttgttgctcggagcttc

SEQ ID NO: 1922 - DNA, 377 bp, Glycine max
  Clone ID: LIB3028-031-Q1-B1-C7
ggcaaagctatttttgaaacaggcaaagcaatacgcagatgcaagaccaagctatcctccacaactcttccaattcattgcttccaagactccctctcactacctcgcttgggacgtcggcactgggagcggccaagctgccaaatctttagctgcaatatacaggaatgtgatagccacagatgctagtgacaaacaacttgaatttgcagccaagctcccaaatgtgagataccaacacaccccttcaaccatgtcgacggccgagcttgaacaaatggtggcatctgagggaaccatagaccttgtgaccatagcacaagccctgcattggtttgaccgcccaaccttctacgaacaagtgaagtgggttctca

SEQ ID NO: 1923 - DNA, 344 bp, Glycine max
  Clone ID: LIB3028-031-Q1-B1-C9
ggaaaaacacacctaggcgctgttcaaacctggccgaacccgaaacatcactctatataaataatgcaaacctaaaacagaggttcgtccctcttactaacactacggtttacagagaagcgaagaggcgcagccgtagcagtaactcgtggaattgctagcaatggcgaggatcaatgtttacgagctgaggcagaatacgaaggctgatctgttgaatcagctgaaggacctcaatgccgaacttgccatgcttcgtgttgctaaggtcaccggcggtgcacctaacaagctctctaagatcaacgtggtgaggttgaacattgcccaggttttgacggtga

SEQ ID NO: 1924 - DNA, 379 bp, Glycine max
  Clone ID: LIB3028-031-Q1-B1-D1
taaacacacccccgcctggagctactgatttgtatttccccaccaagtattctcaatccacattggggcaatttaaatcctgtttttggaagcagtggctgacatactggaggagtccagattataatctcgtcagatattttttcaccttggcttgtgccctcatgatagggacagtattttggagaattggcaaaaacagggagagctcagctgatctgacaatgattataggagcaatgtatgctgctgttatttttgttgggattaacaattgtcaaactgttcaaccaattgtagccgttgaaagaacagtgttctatcgagaaagagctgctggaatgtatgctcctttgccttatgccttagcacaggtctt

SEQ ID NO: 1925 - DNA, 412 bp, Glycine max
  Clone ID: LIB3028-031-Q1-B1-D10
gtagaacccaagccacagccagtctctgctccttcaccaaaggtgagcactaagttttctgatgtgttggcattcagtgggccagcacctgagaggatcaatggaaggttggccatgattgggtttgtggctgcaatggcagtggaagtagccaaagggcaaggtgtgttagaacaaatatccaatggtggcatcccatggttcttggggacaagtgtggtccttacccttgcttccttgattccactcttccaaggtgtcagcgtggagtctaagtccaaagggttcatgtcctcagatgcagaactgtggaatgggagatttgctatgttgggtttgattgctctggcttttactgagtatgttaagggtagtactttggtataattcagtcatgaaagcacaccacaat

SEQ ID NO: 1926 - DNA, 409 bp, Glycine max
  Clone ID: LIB3028-031-Q1-B1-D11
ggactgcacaaacttgcttactgcaataactggtgataactgctgcctcaattcttcagtttttgatcaattcattacgaatgaacctcagccaacagcaacaaagaacatgatgcacttggctcagattgttagaagtggggttctggcaaaattcaattacggaggaaaatctcctcaaatctataacctttccaatatcccccacgacctccctctcttcataagctatggtggcgaagatgcactcgctgatgtaattgatgttaggaatatgctagctgacttgaagttccacgatgaagacaaactaagtgttcagtacatcaaggaatatgctcatgtagactacattatgggagtcaatgccaaggacttagtgtacaatggtattacttcatttttcaag

SEQ ID NO: 1927 - DNA, 370 bp, Glycine max
  Clone ID: LIB3028-031-Q1-B1-D12
gcaaaaatggcacctgcaacactgtctctgtctctcctcctcctgttctcactcagcatcgccgtaaccgttagatcgagcgactacgactacgattgtgtgtacactgcatacgttagaaccggttcggtgttgaagggcggaacggactctaagatcgggctgaagctgtacgacaagtacggctactacatctacattaaaaacctcgaagcatggggcggcttgatgggcaagggctacgactacttcgagcgcggcaacctcgacatcttcagcggaaggtgaccctgtcttgacggacccgtctgtgccgttaacgttacttctgacggatcggggttctcacacggctggtaccttaactacg

SEQ ID NO: 1928 - DNA, 379 bp, Glycine max
  Clone ID: LIB3028-031-Q1-B1-D2
cacaacttattaatataatcgtggctaaaatggtgataactatatatattacttttatttatacatttaataatagaataagtatattgataaaaaataatatatatatatagatatatatatatatatatatatacatatatttataattatgtattaaataatataaacatattaaagtttagagaaatagacataatatttacaagttgaatttaattacaaaatattaacagtgtaaagaaactttacattcatctcattagtcatttttcgtgtactataatattcacatatgaaagacatgaatatagcataatattaagatattgtctaatccttttggctaattatgtgtgcgtcatttaaaatattttct

SEQ ID NO: 1929 - DNA, 369 bp, Glycine max
  Clone ID: LIB3028-031-Q1-B1-D3
attgaagcagacaccttaacaaggaaggaagacacagtagtagaaaagttaagcggtgcactggatttgttttaagagaagactgatggaagaagaagaagaaaattgagggaggatgtggctcgagattatcttcggtttggtcatttacagattgttccggcgcttcttctacgacgacgacgttttggacatcgaaggatcggattcttctgctcttttctccgtctcggataggtctctttctttcacctacttttcctttccgattatggcactaatcgatttcaatttcttttcaggcttaaaaaactttgacgagcaaatgtgtatgtgggtcttcggattcccgatgccgatactgcttct

SEQ ID NO: 1930 - DNA, 358 bp, Glycine max
  Clone ID: LIB3028-031-Q1-B1-D4
aagaacttggctttgcttccttcaaagtgaggtctctaagtttcactttctttgcataaggcaatctcctttctctgtgactctgagtatcgtatcgttttattattatttctaattctctcttatcatgtccactgaatatgtctccgtcgttggatcttcctctcaacggtggcttcaattttgatctaagccgaagatacgcaatgcttcaacacaatggcctcaaagcctcagtctttctcaatactgggaccactagtgtcagtttagttttccatgatggtgtcattcttggtgctgatactagggcatctgaaggacctatagtggctgataataactgtcagaaaattca

SEQ ID NO: 1931 - DNA, 379 bp, Glycine max
  Clone ID: LIB3028-031-Q1-B1-D6
aactcagagcacaacaagggtgatcatcaacatcatcatcaatgcgctcctccaatgagcccaagaatctctttctcaaatgatttcgtggatgtgaaacaagccatgaagcaagaacaaagaggctcatccagatcagacgcgccagtatcttcagatttcgagttttcagtggcaaactactccatgatgagtgctgatgaacttttcttcaagggcaggttgatgtccacgtataacaaggacaattgcaacaacaacaacagaaacaaccacatgatgatgatgcagcagcagagggccaccagcaccaccacgaccactctcaaggaagagctccttataaatgacgatgatcatgatcatgatttttctctca

SEQ ID NO: 1932 - DNA, 275 bp, Glycine max
  Clone ID: LIB3028-031-Q1-B1-D7
ggactccatgaggaagagggtgagtatgaacaacctcacgcagtacgagctccctcgcgacgccgccaatgccacggacgacgtcgctgccggctacgcctccgctgacgatgccgctccgatagattccggcaataaccgcgaccgcaagcgacggattccatgggctgaggaagagcacaagctattcttggtggggttgcacaaagtggggaaaggtggttggtgagggatctcaaggaacgatgtcacgacgaggacgccaacacaggttg

SEQ ID NO: 1933 - DNA, 357 bp, Glycine max
  Clone ID: LIB3028-031-Q1-B1-D8
cttgttttttgcaaattcgcaacccacacagcaagggaaggtgcgagtgagtgagtatggcgtctccattatcagctcaattggttcaatgtcagaactcacttccacctcttcagggtaattttagccaagatgtgtctaaggttcaaaggtcgcgtgtggtatgttacggtaccagatcaccgcttggttattatggtaaagcattgacatcaagatcacataacgccctgaggttttctgtcacgcgacaatctgaagcacggtcaattggatataggagaatgacatgtgtcaatgctgcagacaatgttgtagagcttcaagccaaggtgacaaccaagtgtttctttgatg

SEQ ID NO: 1934 - DNA, 352 bp, Glycine max
  Clone ID: LIB3028-031-Q1-B1-E1
attcaggtctgtcttagtcatgccccttggggccttgctgttgttgtgaagctcttgtggggttcccttccgcttcataaaatctgtcataagatagacttcgtcatgcacatagatggaataagaaggaagaacgatacgaactgtgagcttctgattctaagaaaggaactgattgatggaggacaagtatagtctaaacaggcaaaggagtggaatatggaattgcttgagagatggagactttgaagaggaataagtttgggctgttttcaaggaaaagcccgattacatttctggaattcacaagccaaggggaaaaggatcatcttctcctcttgactgtcctagg

SEQ ID NO: 1935 - DNA, 351 bp, Glycine max
  Clone ID: LIB3028-031-Q1-B1-E10
ataatttctattacttctgctgaaatcattagtaaataaacagcaagcaatcttctctaaaatttgagctaaagggttaacaccatagacgaaacttattgcgctgaatctggaattctggattctgttcccccattcaaaatattgctattcgaaatctgaatatatgagtgtgctagggatcatcttctatgcttgctgtcacaagtattctgctaattatttttgtttaaaaaacccatgcatggaggacctgggctgggattacatacttgaaatagaatgaagcatattgcttgtagttcacaattcaaattaagtttcaaatttttgtttaattcaaatactaat

SEQ ID NO: 1936 - DNA, 397 bp, Glycine max
  Clone ID: LIB3028-031-Q1-B1-E11
gatagagagagacgcttcgcaaatctcaatcgaatctcagaaaaatgagagaaatcatcagcattcacataggtcaggccgggatccaggtcggaaactcctgctgggaactctactgcctcgaacatggcatccagcccgacggcatgatgccttctgactccaccttcggtgtagcccacgacgccttcaacaccttcttcagcgaaaccggatctggcaagcacgtcccccgtgctgtcttcgtcgacctcgaacccaccgtcatcgacgaggtccgctgcggcacctaccgtcaactcttccaccccgaacaactcatctccggcaaggaagacgccgccaacaacttcgcccgcggccactacaccgttggcaaagagatcgtagatctgtg

SEQ ID NO: 1937 - DNA, 292 bp, Glycine max
  Clone ID: LIB3028-031-Q1-B1-C3
caatatcttactagaaatgtcccggcgagtaattatgaagtcgtgctgctccaccagtgacatcctggcagtgatcctccaagtgactgagcatatgttgcaccacatgaactcgaccatctcgtaacaccatcataatgagaacatcgatgtgagggaatcttaatctcatgaagtactgccagctccttgcttcttaccaacactctgtggtatccttcatccaacttatgtattcttctaactatgatgttgacatgtacatagacactgtacatacaccatgcaaatt

SEQ ID NO: 1938 - DNA, 390 bp, Glycine max
  Clone ID: LIB3028-031-Q1-B1-A8
gcaaacctcatactactgctagatatgctacaaagaaattgctggaacgtagagagcagaaaccatcaagcctatcagatgctattgttgaacacacacagatattgaaaactaggtccaagtgcttgaaagaggttcttcaaaaaagtgggtgggatgtgcttgaatcgtgtgcgggtgtgtctgttgtggccaagccctctgcctatctcaacaagactattaagctgaaaatttcacttgaaggtgaagcaagccacggaagtgccactaaggaaataaagctcgatgactctaatatcaggactgtcattcgcaaagccactggattatgcatcaatagtgggtcatggactggaattcctggatactgtcggttcaagattgcac

SEQ ID NO: 1939 - DNA, 360 bp, Glycine max
  unsure at all n locations
  Clone ID: LIB3028-031-Q1-B1-A9
atttcaacgcaaaagtctccgattttgggttggtaaaacttgctcctgaaggggaaaaagcatctgtaatgacccggcttgcacggacgtttggatatttggcgccagaatatgcagtgacaggaaaaatcactaccaaagcagatgttttcagttttggggttgtgctaatggagttgttgactggattaatggcacttgatgaggatagacctgaggaaagccaatacttggcagcatggttctggcatataaaatcagataagaagaaactaatggctgctatcgatcctgcccttgatgtanaagaagaaacatctgagagcgtctccatcattgctgagctagcaaggcactgca

SEQ ID NO: 1940 - DNA, 379 bp, Glycine max
  Clone ID: LIB3028-031-Q1-B1-B1
agaaaaccaaagttgatagagtgctgatgtgctggtgggccttcacaggtctcacacacattattcttgagggttattttgttttctctcctgagtttttcaaggataaaactggcttctacctggctgaagtttggaaggaatatagcaaaggggattcaaggtatgcaggaagggatgcaggggtagttactgttgaaggaataacagcggttttggagggtccagctagccttctagcagtatacgctatagctactgggaagtcatatagctacatacttcagtttgccatttctttgggacagctatacggaactgctgtttattatataacagcaatcttggaaagtgataatttttctacaaactcgtttta

SEQ ID NO: 1941 - DNA, 320 bp, Glycine max
  Clone ID: LIB3028-031-Q1-B1-B11
agccaggaaaggacagcccaacttctatgaacaaagggaggtctgtacgtggggtttcagaaacagctgaaaagttgggcaatttgtctgtttccagtcgaagacaatcaatggggcaacctcgtcctcctccaccaatgaaggctggaggcaattggatttctgaatctggaaacttcatccttgggcccgcacagcagattccgactggaagaacttttgcaagaaaagttgcctgatgacaagtatgaatgagtaaaatgtgagtgatgatgattctataatgctcaatgatgtgattgtgaatgtatcctaatatc

SEQ ID NO: 1942 - DNA, 399 bp, Glycine max
  Clone ID: LIB3028-031-Q1-B1-B12
tccatggctagcctcaaggttgcatttttggctgcagtgctctgcatggttgtggtgagtgcacccatggcacatgcagctatcacgtgcgggcaggtgacgaatagcctgatcaattgcatcggttacctccagaacggaggaacgccgccgtcgggatgctgcaacggagtgaagagcctcaatgccgccgccaagaccaccgccgaccgccagacggcgtgcaactgcctcaagtcggccgccagccaaatctccggcttcaaagccaacaacgccgcctcgctccccggcaaatgccgagtctccatcccctacaagatcaagcactccaccaactgcgctaccatcaaggtttgaagagaaagtcatggacgcaggaaaccgggaactactcac

SEQ ID NO: 1943 - DNA, 369 bp, Glycine max
  unsure at all n locations
  Clone ID: LIB3028-031-Q1-B1-B2
ctcacanacacacactgaactaaaaaacatcaaaagagacatggctgagcaaaccttcatcatgatcaagcctgatggcgtccaaagaggccttattggcgagatcattagcagatttgagaagaaaggtttctacttgaaaggtttgaaacttgttactgtggaccgtccttttgctgagaagcactatgctgatttgtctgccaagcctttctttagtggtttggtggattacattatctctggccctgttgttgccatgatctgggagggcaagaatgttgttacaactggccgaaagattatcggagccacaaacccagctcaatctgagcctggaactatccgtggtgactttgccattgacat

SEQ ID NO: 1944 - DNA, 400 bp, Glycine max
  Clone ID: LIB3028-031-Q1-B1-B4
gcgccgtttctgtgcttttactctgctaccttgtgacaatggtgagggttagtgtgttgaatgatgctcttaagagcatgtacaatgctgagaaacggtggaagcgccaggtcatgattacgccatcctcaaaagtgattataaaattccttttggtgatgcaaaagcatgggtacattggagagtttgagtacgttgatgatcacagagctgggaaaattgttgttgaattgaatggtagactgaacaaatgtggggttattagtccgcgttttgatgttggtgtcaaagagattgaatgttggactgctaagctgctcgcctcaagacagtttgggtatattgtgttgactagctcagctggcatcatggattatgaataagctaggagaaagaatgt

SEQ ID NO: 1945 - DNA, 379 bp, Glycine max
  Clone ID: LIB3028-031-Q1-B1-B5
ccctcatcttgcaaaattctctcagctaattcgctattttcttgtagtaaacaaagcatgcaagcatatccatttcaacatggccctcaaaactggttcagttgagatgttcttcttccccttcgtaggaggaggacatcagattccaatgatagacacagcaagagtgttcgcatctcacggagccaaatcaaccattctagtcacaccctccaacgctctaaacttccaaaactcaatcaagcgcgaccaacaatccggtcttcccatcgccattcacaccttctccgccgacatacccgacacagacatgtctgccggtcccttcatcgacacctcggccctcctcgaagctcttcggcagctcctcatccaacgg

SEQ ID NO: 1946 - DNA, 370 bp, Glycine max
  Clone ID: LIB3028-031-Q1-B1-B6
aaattacatagcctcagtaatctgagagagaaacaaaaacaatgaaggtttccattgccaagttccactcccttcccctatgttttttccttctcttggacttcagcacaaaacccctcctagcagcagaaccagagccagtggttgataagcaagggaaccctttggagccaggagtagggtactacgtgtggccactttgggctgatgaaggaggcctcagactatgccaggcactgaacagtgcatgccctctttaggttatccgtgacccttcattcattggcaggccagtttcattcttagcaccaggccgtgacgaggttccaacactcactgatctaaccattgagttcgctgtagtgacagt

SEQ ID NO: 1947 - DNA, 368 bp, Glycine max
  Clone ID: LIB3028-031-Q1-B1-B7
cgggaagcttcattgggagcatgaaggagacagaggagatgttggagttctggaaagagaagggtctgagttcgatgattgaaatggtaaacatggattacattaacaaagcctttgaaaggttggagaagaatgacgtgagatacaggtttgttgtggatgtcaaaggcagcaaacttgtcgatcagtaaaagaaagaaagtatactactagcacgacacacgcaacatccatccttccatcatgaagagtctggaaaagttattaattaattgagaactaaagctgtatttgttgttcactctaaaaaagaagctgtgttttgtttattaaaaagagtgctctgttttctctgttttggttacacg

SEQ ID NO: 1948 - DNA, 277 bp, Glycine max
  Clone ID: LIB3028-031-Q1-B1-B8
tttgagtgcaatgagtttctcaactgtaatatataagactcaaaatgcatgctttgtagaacaaagacgatagtctgttgtataatgtcctgtaagtgtcaaaatggactggttgtcctgtaaaggctattaggagtacaagcaaaaatgatgggggtatacggttaaatctgattgagttattcctttgccaatccatcttttttgtccctcttgtggctacccacaatgttgaagtaacacacaaaatgacaaattcatgtaaaaaaaaaaaaga

SEQ ID NO: 1949 - DNA, 393 bp, Glycine max
  Clone ID: LIB3028-031-Q1-B1-B9
aaagaaacaggtttcgcccgttacaacatcatcaagatcaacgctcttccgtcctctcttcaccgacgttggcattgcatttgacatgatgcttctcgctcacaacgccggcggcaaagagaggacggaagagaactggaagtggctgttcaaagaaacaggtttcgcccgttacaacatcatcaagatcaacgctcgtccttccatcattgaggcgtttccaatctaacgaagaggaagccactacacttcatgtgcgtggttttatgttgcatgtgttgttattattactaacagctatgtgatcttcgtgtgatgtggttttcatccctacccgtgttatgtttgtgtattaaataaaagtatgaaacgccccaccaccaagtaatatgg

SEQ ID NO: 1950 - DNA, 369 bp, Glycine max
  unsure at all n locations
  Clone ID: LIB3028-031-Q1-B1-C1
ctaacactcattaattgcaagaatggcacttcgttgcttggtgatgtccctttctgttctcttcactcttggtcttgcgagagaaagccatgccagagacgaagatttttggcatgctgtttggccaaacactcccattccaagttcattgcgagatcttctaaagcctggccctgcaagtgttgaaatcgatgatcaccctatgcaaattgaagaaacacagtacccgaaaaccttcttctataaagaagaccttcatcgaggcaaaacaatgaaagtacaattcagcaagcctccctttcaacaaccatggggtgttggtacatggttaaaggaaattaaagacactactaganaaggatatagttt

SEQ ID NO: 1951 - DNA, 389 bp, Glycine max
  Clone ID: LIB3028-031-Q1-B1-C10
agcaccggtgacatgggagctgatttttatcatcgatacaagggtgacataaaaatagcgaaagaaattgggctggactctttcagattctctatctcatggtcaagaatattcccaaagggcaagggagcagttaacccccttggggttaaattctacaacaatgtcatcgatgagatcctagcaaatggtttaaaaccttttgtcactctttttcattgggactttccacaagctcttgaagatgagtatggaggattccgtagtcctaaagtagtggcggattttcgtggctacgcaaacttctgcttcaagacctttggagacagagtcaaatattgggtcactttgaatgaacccttatcatttagtctcaatggctacaatgg

SEQ ID NO: 1952 - DNA, 322 bp, Glycine max
  Clone ID: LIB3028-031-Q1-B1-C11
cgaagattaaaaaaaaaaaaaacaagcctgttcaactcaaagacctgataattgttccttttgtctgagctgaaagacttgaggacttctaaagatgttggcccttcatcctgcaaaaaagttatcatttaatcgaccaattaataatggggatttggttattgtttatgaaaggcatgacattatgaaggctgtaacagtgtctgagggatcagtcctgcaaaatcgttttggtgtttttaaacattcggaatggataggaaagccgtttgggtctaaagtagtcagcagtaagggtggctttgtgtacttgttagctccc

SEQ ID NO: 1953 - DNA, 358 bp, Glycine max
  Clone ID: LIB3028-031-Q1-B1-C12
ctttagatgctttgatgatggacaaatcacatcaaatcgcatcttctacacgctcagactaatgtctgcatcatggacttgttgacactgatacttccatggtcttggcagcttatgagtactacaggcatgacggtgttgtacggaatgtgattgacatgtatgttggagaactataaatgattagattcaagcacgttctcaaagttgatcaagcctagcttgacactgtgactccagatattatagggcgtgtcaaaatagtcatttcagcatatccatgatcatttgctacactgttgcgggtggatacattcactttttgtgctaatgtgcagattgacaatcgagcttatga

SEQ ID NO: 1954 - DNA, 349 bp, Glycine max
  unsure at all n locations
  Clone ID: LIB3028-031-Q1-B1-C2
ctatggcttattacagatttcttgatgtgttttcatggattcaaaatcttccaccaatcccagcatggaagacatcgtccatgtccctgagcatatgttccacaaactcagctcaaccatctcttaatctcaccatagcanaaatatcatcaccaatcctcaagaatctccttatccattgtggcagacttcaatattcccatctctctttggacctctaaacctttcaaacctagcacgacaaccatgaggttaacagatgatgaaactctttccaatctccttgtgaatttcatacaagagatccttcattatggcagcaacaggcacagtagtccctatatcaagt

SEQ ID NO: 1955 - DNA, 299 bp, Glycine max
  Clone ID: LIB3028-031-Q1-B1-A7
aataaaggattgaaataagaacaaaaacaagttaaacataagttgataaacatgatgaaagactcggaagagaaagagctatggatcgctagttgaatactttttatggagcttgaaggaaattagggcggcccattacaagaaggccattggaccgggaagttggtttggtggaggagtttccatgtgggtgattttccatactttggataatgccgagacttggcatgccaaggtccagcatgggtaccgagaagaatggttgctcacatcgcttttctccaaaacagagaactcgg

SEQ ID NO: 1956 - DNA, 330 bp, Glycine max
  Clone ID: LIB3028-030-Q1-B1-H1
tcgtcccatcctgccggtttgccgtagctggaacccggaaaacacacccggagccaccgtgaatgacgaccgttttgaggccaccgattgggttgcgcttcctccaaccaccacagctttccccttctcccacatcgtgtgtttctttctccctctcactcaagcttcccagaatcaactctaattactcctctttcgaagttagagacgttacctatcaacccccggggactcagcttagacttctgaattcagttagtttttcacttccagagaagagttttggtttaattttcgggcagagtggaagcggaaaaacaactctgttgc

SEQ ID NO: 1957 - DNA, 289 bp, Glycine max
  Clone ID: LIB3028-030-Q1-B1-H12
caattctgtaggaaactacatctggaaggttaatcgcaacggagatgcttcgactttatcaaattcgccgaagttcaccgtacacgccgtggtacgcgacacaatgtagatcttctgccgcctaaacggcatcgtttacaacatcaagggctaactattggaggtgcaatccaatacgggaaacatgtttaaaatcgataaggacgatgggactgtgagacaagtgcttctcaacgaggatctaatgggcgctgacggagttgccttgaggggagacggagtcgttttg

SEQ ID NO: 1958 - DNA, 406 bp, Glycine max
  Clone ID: LIB3028-030-Q1-B1-H2
ccttggtcctgttgtttggaagattgctgcaagtaaaatcagcagtgttttgccagcaggacatgattttggtcctggatgggtaagtgaagatgatggttcgtcacagaggcgacacttcccagtttgtgatgagggtagaacttcagaccctcctgtaccagaggattatagaagtagattttcttctccatctggatcgctcccccttgcaaatagaccattctatcaaagtggagacatggctatagataattaccaaaatgagttgaatccagtaatcaacattcctggtgggtctgaatccataactcctatgaggattcagcaggaatccatggtgcactctgatgattttggttcatgtgatcggttaggttctaatttcccatctcaaatgaagatg

SEQ ID NO: 1959 - DNA, 322 bp, Glycine max
  Clone ID: LIB3028-030-Q1-B1-H3
cgcacctcgactcgctcgtgggacaggcactgttcggagatggcgccgcagcgttgatcatcggatcagaccccgacccagcagtggagcggccgatattcgagatgatatcggccgcccagacaatcctgcccgactctgacggtgctatagatgggcaccttcgggaggtgggactcacgttccacctcttgaaagatgtgcccgggatcatctcgaagaacattgagaagagtcttgttgaagcttttgagcccatcgggatcagcgactggaactctatcttctggatcgcacatcccggtggtcccgcgatcctcga

SEQ ID NO: 1960 - DNA, 351 bp, Glycine max
  unsure at all n locations
  Clone ID: LIB3028-030-Q1-B1-H4
gacgtcacatcgcaccttaatccgaattccgctccagcaagtatcaagggaacaatgatggggcttaccttgggactacatttccacaactcatcttgatgacttaaggacaactgattccacataaaccagcacacgctatgttccatgagtttttgggttcacagttcacaagccatatagctgaagttgaagctttcatgaaagtaaaaatctgcccgtgtcacatttaactcttccttatggttctctttgcaacatccggcaaatcatatgctttccaanacagtacaatctaggcatctgttttaattgttatacgagcttgttgtaaagaaatatgcagacatg

SEQ ID NO: 1961 - DNA, 381 bp, Glycine max
  Clone ID: LIB3028-030-Q1-B1-H5
aagggcttgacaattttgatgagtggacaattgatttgaggaaactgaatatgggtgagccttttgctcaaggagcttttgggaaactttaccgaggtacttacaatggtgaagatgttgcaatcaaaatcttggagaggcctgaaaatgatccagcaaaggctcaattgatggaacaacagttccagcaggaggtcacaatgttggccacactaaagcattctaacatagttcgtttcattggtgcatgccgcaagccaatggtatggtgcattgtaactgagtatgccaaaggtggttcagttcgacaatttttaatgaagcgtcaaaaccgctcagttcccctcaaattggctgtcaaacaagctttggatgttgcaa

SEQ ID NO: 1962 - DNA, 348 bp, Glycine max
  Clone ID: LIB3028-030-Q1-B1-H6
gttggcaaaaaaaatctagacaaggccatagctgcctccaaggataaatacaactttgagataatatggcatccctttcaacttagccctgatgcccctaaagaaggcattgacaagagggagtattacagaagaaaatttggatctcaatcagaacggatggaagctcggatgtcagaggtgttcaagaatgttggcttggaatatagcttgtctggactcacgagaaacactattgacagccacaggcttatatattttgctaggcagcaaggtcttgacaagcaacatgatcgagttgaagaacttaacattggctaattcacacagggaaaatacattggtgac

SEQ ID NO: 1963 - DNA, 210 bp, Glycine max
  Clone ID: LIB3028-030-Q1-B1-H7
cttgcaattcccaatggactccattttcaagctctcaacgccatctccagctgcttccttatcagaagcgcttcgccccagagattctcgcttcctctccttcaatccatcgtccaacgcgattaattacaaaattaacctcgctgcctctctccgatgcattcactcccgccctcttaagagctccttgcggattaaatgctcccaaac

SEQ ID NO: 1964 - DNA, 312 bp, Glycine max
  unsure at all n locations
  Clone ID: LIB3028-030-Q1-B1-H8
tcagcttttcccatcgtgaaatgagtatgggttcttcattgaggcacttgtgtctaactttggattcactagtctcttcagcattctgtgcctttccacggcagtcagtcgatgttccattctgcatanactacgttcctacctgggcctctgatcacatcacatacttcagtgcaggttctgacaatcaagttcatctgtgacagtacactggtaatggcttctagtgcaaagggtcatacgtgtatggtcacttcagcatgagcatgaagatggttcctggcgattcagctgtgcaagtcactgcatttt

SEQ ID NO: 1965 - DNA, 372 bp, Glycine max
  Clone ID: LIB3028-030-Q1-B1-H9
gacaggcaccatgtcacttcttaaccagctctttaacagaggcgttttcggcactcgatgcaaaacatgcctgaacctggcaatttcacgcattaagctgctgcaaaacaagagagatatgcaactgaaacaaatgtgcaaggagattagccaattcttgcacgctggccaagaggcaattgctagaatcagggtggagcatatcatacgggaacagaatacatgggctgcatatgaaattttggagttgttctgtgaatttgttcttgcacgtgtacctataattgagaatcagagggagtgccccacggaattgcgagaagccattgcaagtataatttttgctgctcctagatgttcagatgtaccaga

SEQ ID NO: 1966 - DNA, 375 bp, Glycine max
  Clone ID: LIB3028-031-Q1-B1-A1
gcctggttgctcccactgaatccagtgctaatcctgctgagactactactgaggtaaaatcagctggggaaaacaccgttgcagatgaatcaaaaagtaatgatacagctaaggattctgagaaagcaagagatggggaagctaagcagcctgagagcaaaactaatgaggcagaggataaacttactgaaagtaaggatgctgctgaagaaagcaatgcagacaaggagcatactgcagaaaaggaaagtactgatgatgaatcgaaggtagataaggaacagaataaggatgtcactgaaagtggaaatgaggataagaaggatgctacacacaacgaaagtgccagcaagttagataaagagaaaacttggg

SEQ ID NO: 1967 - DNA, 403 bp, Glycine max
  Clone ID: LIB3028-031-Q1-B1-A10
ataacttaggaaaagcaacccctgcttccatcttgaaaggtgctaatggaaccaatagtcctggttctatcattgttgctgccaaggaagctgttaaaaggagagtggaagctgcttcagctgccaccaaaagagctgaaaatatggatgccattgtgaaggctgctgagctggcagcagaagctgtatctcaagcaggaaaaattgtaactatgggtgatcctttgccaataagtcagttggtagaagctggcccagagggatgtttgaaagcaacccgagagtcttctcagcaagttggattattcaaagacattaccagagatatggtgaacattaatgtgagagatattcctgaaacttcttatacacataacagagacattttatctggtggcatttc

SEQ ID NO: 1968 - DNA, 392 bp, Glycine max
  Clone ID: LIB3028-031-Q1-B1-A11
agagaagctctgggatgacgttgttgctggccctcaacctgagcgtggccttggcaagctcagaaaactcaccaccctcaaaactattgatgaaggagacagtagcaagctgcagaagacgttgtcgatgccgtcgacaccgacaaccccgatgactcccacgactccaacgacaccgggatccgcgcgtaaagctgacaacgtttggaggagcgtcttccatcctgggagcaactccgccacaaagaccatcggtgctcagatgtttgacaaaccacttcccaacactcccactgtctacgactggctgtacagtggggagaccagaagcaggcaccgctgaaaggataagctaagaaaaccgtgggttgcatgtaaatattgtcgttttt

SEQ ID NO: 1969 - DNA, 358 bp, Glycine max
  Clone ID: LIB3028-031-Q1-B1-A2
gaggacatgtgccagttgtgcgaccatattgcttccaatttggtcttcttcaccctcttacggtttgcatcagattcccctaattcttgcttgattttgcgctttcgctatattttcttcaaaatgactcaagatctagagatgaaggatcgctcaacgccttcgaactccgtttcttcgcctgctccatctactctgcagcatttgatggagatagcgtctcttatcgagaccggttcgtactcgaaggaagttcgtaggattgctcgcgctgttcgccttagaattgcgttgaggcggaaattgacagcatccgctatctcttcttttctcgatcatgttctcactcctggctctg

SEQ ID NO: 1970 - DNA, 203 bp, Glycine max
  Clone ID: LIB3028-031-Q1-B1-A3
gaatacacgcaatcaggacacatccatgaagtgcaggcacatgccatgtagcagcgttggtgggctaatatgcatcacgagcttcgcagatatgtcctcgtacgtactgtgtcgtctgcatctacgtgttcgctgtggatgatcgtccggtgttgtagcatcatgtggcacagctgctggagggtcatcgtcaaatcgattgt

SEQ ID NO: 1971 - DNA, 375 bp, Glycine max
  unsure at all n locations
  Clone ID: LIB3028-031-Q1-B1-A4
cttcacaccattctcacacaacaactttcaaactctgagaaagaatggctgccaacacattgatgagtactgctatctcagccttcccatctctcctttcttcctcaaaatccagatttgccaccgcagttcctctttctagctttggtgtcaccaatgcctcttcttctcgcttttctatgagtgctgactggatgccaggccagcctagacctccttaccttgatggttcagcacctggtgactttggattcgaccctcttcgtcttggtgaagtaccagagaatcttgagaggttcaaagagtcagaactcattcactgcanatgggccatgcttgctgttccagggattttggttccagaggcattgggct

SEQ ID NO: 1972 - DNA, 394 bp, Glycine max
  Clone ID: LIB3028-030-Q1-B1-G7
gtcaaagccttctgctcttgcaaagaagaaggttgacagctctgattctgatgatagcagctctgatgaagataaggggaagatggatattgatgatgatagttctgatgaaagtgaagagccacaaaagaaaaagactgtgaaaaatccaaaagaaagcagtgatagttccgaagaagacagtgaggatgaaagtgaggaggaaccctccaaaactcctcagaaaagagacagggatgtggagatggttgatgctgcctcgtctggaaatgaagccgcctaagacccaagtttacaccaaagaagaaactggcgcttcaaagacacaatttgttgggaacttgcaatttagtgttgaacgagctgacgtggaagatttcttcaaggatgctgg

SEQ ID NO: 1973 - DNA, 397 bp, Glycine max
  Clone ID: LIB3028-031-Q1-B1-A6
gttaccggattggcttagagcaccgacaggttatacttatttgatgaacatgatgaaagactcggagagaaagagctatggatcgctgttgaatactttttatgagcttgagggagattatgaggagcattacaagaaggccatgggaactaaaagttggagtgttggaccagtttccttttgggtgaaccaagatgctttggataaggccgatagagggcatgccaaagaagagcaaggggaaggagaagaagggtggctcacatggcttgattccaagacagagaactctgttctctatttgagttttgggagcatgaacaagttcgctactcgtcaacttgttgaaatagctcatgcccttgaggattcagaccaagggttcatttgggtgggt

SEQ ID NO: 1974 - DNA, 374 bp, Glycine max
  Clone ID: LIB3028-030-Q1-B1-F10
cgggagagatggcacctgcaaatttgacaaaaccaaagttgcggctactgtatctaattacagtgtggtttcccttgatgaagaacaaattgctgcaaacctagtaaagaatggccctcttgcagttgctatcaatgcagtttttatgcagacatatgttggtggcgtctcatgcccatacatctgtgggaagcatttggatcatggggttcttctagttggttatggtgaaggtgcatatgctcccattcgttttaagaacaaaccttactggatcattaagaattcatggggcgagagctggggagagaatggatattacaagatctgcagaggtcgaaatgtgtgtggagtagattccatggtctcaactg

SEQ ID NO: 1975 - DNA, 400 bp, Glycine max
  Clone ID: LIB3028-030-Q1-B1-F11
gaggtactgttccatccagacctcataacatcggtgttgagggggctgctgatctctcttcacatggcactacaaggaagctacataaagtggaagatgtagacacgagtgaaggcaactttggcactgttataatccatggagatgaattacataagaccacacaagatgcagattctgcagcttctgtatctgctctgaccagtggctcaggagacagattggctgactctgggattgagagtcagaaagttggtattatgaacactgcctcttttagaggatatagtgctactaccaatactgttcaatcgtctttaccttatgttagtaattcaactgagcagagcctcaaaactagaggtactcatcgagcacaagctggaattggtggtgatat

SEQ ID NO: 1976 - DNA, 306 bp, Glycine max
  Clone ID: LIB3028-030-Q1-B1-F12
cttctgcttcggatcagaagaaaagggacaaagatgagagggaggccatggatgcaggaattggaaatattgttatcaattcagattcaaaaccactaatgcattctccatcaaagaaagtcttccaaggcagcagcctgaagtagttcatctggcaggagctctttcccgtgtgacagttagtatgttcttagcgtgcccctgtacatttccctcattcattgatgttcttgggaattgttttgggagcatgttcgtttagcctttggttggtttccagaactgctggtttggatggggtaggac

SEQ ID NO: 1977 - DNA, 307 bp, Glycine max
  Clone ID: LIB3028-030-Q1-B1-F3
ctcttacatggatgctgttagagtttatcttggttataaaaggacatgtgtagctggcttccttcaatttttgactttgtatggtactagtattgcttatgtactaaccacagcaactagtctgagtgcaattctgagatcaaattgttatcacaagaaagggcatgaagctccttgtaaatatggtggcaatctgtatatggcactgtttggacttgttcagattgtaatgtcattcataccggatctccataacatggcatgggtttcagttgttgcagcacttatgtcctttacatactcagtc

SEQ ID NO: 1978 - DNA, 302 bp, Glycine max
  Clone ID: LIB3028-030-Q1-B1-F5
ctcgagccgctaaaatcaaacagaatacaataccctctctctctctctcttcctctttgtcatggcatttctcttctctttcctttcgttaaaacttggaactttgtgatttttgaatgacccaacaactaaggttatgatcagttggaagcgttggcaaaaaagaatacgcaatagtggtgttgtttgttcattttggtcaaagaaatagtatctgggtacccaggatattgtagttttaagatgggttatctcaattcagttttgtcatcttcaagcgatgttcaagctgcaggtgatgc

SEQ ID NO: 1979 - DNA, 311 bp, Glycine max
  Clone ID: LIB3028-030-Q1-B1-F6
gaccgtcaaaagtcgaacggcgacacgactctttctttcaccctaacacaacaccggcaatgcagaagctacttccgccggcaacacgcgccggcagcttcacggcagttcctctgtcagcctccgccgtcacctcaccgctactcgctcaaccatttctcagcccgaattccttcccctcactccttctcaatcgtggctcgttcatcttcctcttttagttcctccatcgctcgtcaaccatggaagaagcttcgcttcaccgcaagcgcgtcttcgcatgtgtctcccgcattcactccctccaacga

SEQ ID NO: 1980 - DNA, 383 bp, Glycine max
  Clone ID: LIB3028-030-Q1-B1-F8
agaccaagccccactcaaccaccacaccactctctctgctcttcttctacctttcaagtttttaaagtattaagatggcagagacattcctatttacctcagagtcagtgaacgagggacaccctgacaagctctgcgaccaaatctccgatgctgtcctcgacgcttgccttgaacaggacccagacagcaaggttgcctgcgaaacatgcaccaagaccaacttggtcatggtcttcggagagatcaccaccaaggccaacgttgactacgagaagatcgtgcgtgacacctgcaggaacatcggcttcgtctcagacgatgtgggacttgatgctgacaactgcaaagtccttgttaacattgagcagcagagccctgat

SEQ ID NO: 1981 - DNA, 324 bp, Glycine max
  Clone ID: LIB3028-030-Q1-B1-F9
aatggcatttccgtccgtaacctctgtaactgtggataacgtgacattccctcccaacgtgaaacctcgctgctcccccaacaccttcttcctcgccggcgccggcgtcaggggcctccaaattcatcacgctttcgttaaattcactgccatctgcatttaactccaatacgacgccctttccttccactccgttaagtggaaaaccaaatctgctcaccagttaacggaatccgaccaattcttctcagatatcgttacaggtccaatcgagaaatttatgcacgtgacaatgatcaaacccttgacggggcagcaatactc

SEQ ID NO: 1982 - DNA, 355 bp, Glycine max
  Clone ID: LIB3028-030-Q1-B1-G10
tggaaacataatactacaataatatatagggatcaaccacgattccataaagaagctcaaggttgtgttcttatctattgagaagaaggctacatgcagagacttgaacgctctcaagatcttggtgtatgttacatctgcgtctgctggttataatctgcttctattgtgcaaacactccatttggtctagaaaaaacttcaaagggtcttatctatgcatggcttggatttgtttcttgttggatcagatcgccgtgtacatgacatttgctgcaaacactgcagcaatgggagccgcgatgctagcaataactggatcagatgcctttcagtggctaaaggtatgtgacaaa

SEQ ID NO: 1983 - DNA, 354 bp, Glycine max
  Clone ID: LIB3028-030-Q1-B1-G11
gggaaaattaacaagtgcataacttttcctgatatgctggatatgattcctttcatgaccgggacgggtgatattccaccactttacatgctttatgctgttgttgtgcacctggacacactaaatgcatctttctctggacactatgtttcatatgtgaaagatctgcaaggcaattggttcagaatagatgatgctgacgtacagccagtgctaattaatcaggtcatgtcagaaggagcatatatcctattctacatgaggtcctgtcgccgtcctccggtagaacatactatgaatgccatgcagcaatctgtttatgattcttcaaagcacaatccaatggaaatgcag

SEQ ID NO: 1984 - DNA, 275 bp, Glycine max
  Clone ID: LIB3028-030-Q1-B1-G2
gggcgttaaggatggtgatgaattgcacaagcattcgcatcctccttttaggtctgttacacatagcagtagacagtggatggtcatcaaaagaagtaagcagcatcatatcacgattccagcggtatcagattctcaacactgcccatgccatcccgcgttaccaagaatccgcacgatttcatgatgttttaaggtaaagccctctctctggaatcccaaagcattgagtttgtgggaggcatgccacttgtccatctgagatgggaacgctc

SEQ ID NO: 1985 - DNA, 401 bp, Glycine max
  Clone ID: LIB3028-030-Q1-B1-G3
ataaaatggaagaatccaagggttttgttggtggtgagtctcaaaaaccacatccagaaatgccctctatttcttttcaaattcctatgccagggaggaatcgatctggtggtctctacccttggggatggaggcacagagcaataataccacagcacaccgtgcgaaactctaacggggcaagtgagaacacagatttgaaggtgtaagtcactcatggagtaataatactatgtatgaaaatgtgaaacgtttgaacagttgttgcggttgttatgttgtcctcctcattatcgtatattatcgtgcatgggtgtacgtagctcagttactgctttgaggataaaagctttactaggcttgaatatgaatatcttcagcagtttgtactgataaatgac

SEQ ID NO: 1986 - DNA, 378 bp, Glycine max
  unsure at all n locations
  Clone ID: LIB3028-030-Q1-B1-G4
atttttctttgacccttttgctccctgtatctaaaattcccctctccacccactttccctttaagtcaatttcatgcttctctgtctcagatcctagatcttgctgtcggtgggttgatcggagtagatgtcgccgtcaaacgggttgcagaacggcggcggcggcggcggtaatggggtgagttatatagagcaccaggtttcaaaacttgacactcttgctggtgtggcaatcaagtacggtgttgaggtagctgacatcaaaaggatgaatgggttagccacagatcttcaaatgtttgcactgaagacattganaattccattaccaggacgtcaaccggcatctccttctcctggtccacatgaagaacctac

SEQ ID NO: 1987 - DNA, 421 bp, Glycine max
  Clone ID: LIB3028-030-Q1-B1-G5
cactccattccagaatgcttcgttacctgttggtgttcttcttattgggcttgggaacccgggtggagtcacacgaggaatcgggtcattggagctgcgagtccgagtcggagatccgagtcgagactgagttcaaacccggtgtaatcacactggatggtcacgctgatgattggaaggacattgatgggtcctactttcccctccttcccgcccttgacccagatgctgaaaatgaattcaaagggggaaagatgagcgttaaaagtgtccatgatggccgcgatatcctctttctgctgcaggtagatggtgactatgcctactctaaaggtgaaagcaataaatgtccatctgttgctctcatgtttcaaattggagatagtgcctcttatcatgatatgggtggctgtaaagaaca

SEQ ID NO: 1988 - DNA, 379 bp, Glycine max
  Clone ID: LIB3028-030-Q1-B1-F1
ctctgattgtgtatatgatttgcatccgggcgatcacatagagattcagtggagaagaaacaaagaatttccttatggttggtggtatggtgttgtaggccacttggagttatgcgatgggaatgaaaattactgccgttgtcatagtagtgacacagtggtgctagagttcaatcagtacactcctgactcgcgttggaggaagacaactataagtagaaaagatcatagagaggaaggaaatgaagcagatggtttttatggaggaatcagaaagattaagagtgagactgagatttccatttggaaaagcatttggccttctgaagtcttggactaatcagatttaattttccacttagcattatgtcaagactag

SEQ ID NO: 1989 - DNA, 200 bp, Glycine max
  unsure at all n locations
  Clone ID: LIB3028-030-Q1-B1-D2
cacacactgctttgcagaaaagattacagccgtgaggatactctctgggaagatgttgctgctgtcacagatccctggatattgtctagacctccatattgtgacgtgtatgggagactagtgcctgtcatangatcttgcaagggtcctgcagaccatgtcacgacatgatgcagtaatttggttacggccaggagaat

SEQ ID NO: 1990 - DNA, 388 bp, Glycine max
  unsure at all n locations
  Clone ID: LIB3028-030-Q1-B1-D4
attcggcccaagggaatttggaacaaattgtacccatgaaatacaacccaaggaataaaatttcattaaaacctgtaatggctaaggccaatgttgtaatcaaccttattggaagggattataaaacaaaaaactacaccttttaaaaaattgcactatcacatggctaagcaactagcaaagattccagagcatngtggtatcctgagatttattcaagtttcttgtttaagtgcatctccttcatctccatctangatgctcagaactaaatcagctgctgaggaaatgattttaagggaactacctgaggccacaatcttgaaacctgctgtaatgattggtacagaggatcggattttgaatccatgggctcattttgctaaaa

SEQ ID NO: 1991 - DNA, 357 bp, Glycine max
  unsure at all n locations
  Clone ID: LIB3028-030-Q1-B1-D5
tttatacacgactaataatccacgagtgaatatattactgccttcaagtaatgatagttttcaaccaactcttttggagggcattcatacagttgataacgttgttgatactaggccaattgattatgaggtcatttcacagcccacgtttgattgggatacccctcaaatgtgactcacgctttgatatgcatagcttgctatcctataacgatgtaactgttcccaatcacgtatgtaacagaaaaaaaaattagtggtgagggatatggatggggacaggggtcacgctgggccagggaagatggttcctcttgtaactgatgttcanaatttgttatacacgcatttatgaca

SEQ ID NO: 1992 - DNA, 404 bp, Glycine max
  unsure at all n locations
  Clone ID: LIB3028-030-Q1-B1-D6
gctgttgagtggaaccatatcgagcacctgagttgacttgttttgtcccttgtccatctccatggccactccacagtcccacttccgttttctcgctttctcactctctatcatccatatctctctcttcctctccacaaccgcaacccatcaatcgctcctcgaagaacaagacactcccatcacgcacttccagcgctacctccgcattaacacagcccagccaacccctgactacacctccgcggtctccttcctcaaagcccacgcccaaagcctgggcctcagaatccaacacctcgatttcgtctaaggaaggcccgtcctcttcttcacttggccgggctcaaacccttccttcncatccctccttctcaattcccacctcgactccgtccccgccg

SEQ ID NO: 1993 - DNA, 398 bp, Glycine max
  Clone ID: LIB3028-030-Q1-B1-D7
tcggcggcaattgccagattgccatcattattcatagacaatacaggaggcaatgatgtgcatagatgaattggcattacttgttttcttaataggcctatcctgaatccaaacgaaatgagatcggaattcctcggggaattccacttccacattttcaagaaataaggaggcacaaatgtccatatatgaattggcattatttgttttcttattacgcctatcctgaagccaaaggaaatgagatcggtattcatcggggaattccaattccacattttcaagaaatacggaggcaaaaatgttcatatatgaattggaattacttgtattcatattaggcctatcctgaagccaaaggaaatgagatcggaattcctcgggggtaccgagctcga

SEQ ID NO: 1994 - DNA, 338 bp, Glycine max
  Clone ID: LIB3028-030-Q1-B1-D9
tacgacgtggcgtccaaactaagccacacggctaataaatacggccggcacactttcactgcatcaagaaaggaagaaacataccgaatgagagcatcaaactcttcttcttcgatttccattgcgaagcgttactttttcttcttctttctcttcattttcttcgctcttcgatcttcgtccggggactgctccgaataccaccaccaccactcgccgatggccacgatcggaggcttacacgactcccaaggctctcaaaacagcgtcgaaaccgaagccctcgctcgattcgccgtagacgaacacaacaagaagcagaattcgcttctggagtt

SEQ ID NO: 1995 - DNA, 414 bp, Glycine max
  Clone ID: LIB3028-030-Q1-B1-E10
ggtagatgatgggaacgctatctacgcaatttcgttccatcaaacgcccaaattcaaaccctaaactatccaaatcgtcatctcctacaaaatcagaaattaaattcaacgctaaaccaaaaccaaaatcagagtcagagtcagagtcatggtctgtttatctcatcctctccaccaaccatcctatcaaaacctacgttggaattacaaacaatttccctcgccgtttgaagcagcataacggtgaacttaaaggtggtgcaaaggcatcccgtgctggaagaccttggatttgtgcatgcataatttgtggttttacagaccgaagtgaagctagtgtatttgaatcaaaatggaaaactttctcaaggagagctccccgcaaaaatcaaaatgacaatctctccaagcaaa

SEQ ID NO: 1996 - DNA, 374 bp, Glycine max
  Clone ID: LIB3028-030-Q1-B1-E12
caaacactctcatcttcttattcttctgctttcactctctgactcaatcgttctaatccacaaagaatgaccttaaattacaacattgccctcgccttctctgcggtgctcacgctgctcctctttcccctactgaccgtaagggagctcgtggaggagcagccactagtcctcaagtaccacaacggccagctcctgaagggccgcatcaccgtcaatctcatctggtacggcaccttcagcccgattcaacggtccataatcgtggacttcataaactcgttaagcagcgcgccaaacgcgcctctcccctcgaccgccacgtggtggaaaaccacggagaagtacaaagttggaagaagatttcctgcgct

SEQ ID NO: 1997 - DNA, 307 bp, Glycine max
  Clone ID: LIB3028-030-Q1-B1-E2
gtccaagccctatacaaccaatccctaacacacactcatttgattcaatttctatggctagcctcatcgttgcatttttggctgcagtgctctgcatggttgtggtgagtgcacccatggcacatgcaactatcacgtgcgggcaagtgaccaatagcctgatcaattgcatctgttacctccagaacggaggaacgccgcacgtcaggatgctgcaacggactgaacagcctcaatgccgcagccactgacatcgcagatcgacaaacggcgtgcaaatgcctcaagtcggccgccattcaaatct

SEQ ID NO: 1998 - DNA, 141 bp, Glycine max
  Clone ID: LIB3028-030-Q1-B1-E3
gcagacttaacaacagcacaaaacggggttactgtctgttcaagctaccatctctctctctctttcttagtgcctccttgccagaagttaaaatgggccaagaaactttccaattcaaatccgaatcattgaacaagggga

SEQ ID NO: 1999 - DNA, 344 bp, Glycine max
  Clone ID: LIB3028-030-Q1-B1-E4
aaggaaaatggtaggttggtccaataaaaccccaaggaattcaacccggcaaaaacccccttcaaaaaaggatttggcaaaaaatttgccaaccctcaaggacaaggaattgaccaaggctcctttgatttggagatttttcaaacccccaacggaaaaaagtcttccccaataatatgtgctgaaacaagtttgaaaactaccccagaagatgaaactcctggtgattccttgccagacgcaacccctcacatgcaaataactcaaggtgtcttagagaaaagtaatggtgctggtccattcctaataaaagtagttaagcaaaatttgtggattgatggtgt

SEQ ID NO: 2000 - DNA, 423 bp, Glycine max
  Clone ID: LIB3028-030-Q1-B1-E5
acagttagtacaaaaaagggttacttcagcttccacatatcttgaagaattgatcaatgggcaagtctgtagttgagaagctactttggatggcaattgtgtgcttggtgctgggtgtaatttccattactcccaaggcccaagcagcagtgacatgcaaccaggtggtgagcaacctcaccccatgcatttcttatgtgctcaatggtggcaaaaccgtgcctggcccttgctgcaatgggatcaagaccctctttaacctcgctcactccacaccagaccgccaaaccgtttgcaagtgcataaagaacgctgttagtgcgttccattatggcaagtccaatgtggaccgtgctgctgctcttcctaagcagtgtggggttaacattccttaccagatcagcccttccaacgactgtacca

SEQ ID NO: 2001 - DNA, 365 bp, Glycine max
  Clone ID: LIB3028-030-Q1-B1-E6
ttgtacaatttcacccaagcggtatatatggagcaggttgccttatcacataatgatctcgtggtgaaggtggaattcttaggaatagtgagggtgagcgatttatggaacgatatgcccctactgcaaaggatcttgcatcaagagatgtagtttcaagagcaatgacgatggagattcgggaaggtcgtggtgtaggacccctgaaagatcacatctatctccacttgaatcacttgcccctagatgtgctcaaagagagacttcctggcatctctgaaactgctgctatttttgctggtgtggatgttacaaaggaaaccattcctgattttgcaaactgtacattataacatgggcggtat

SEQ ID NO: 2002 - DNA, 222 bp, Glycine max
  Clone ID: LIB3028-030-Q1-B1-E7
actaaatcagccaaagtttgtacctttcttacaagatgtggtcaaacttgaatggctttatttgggagtccttgacctactatatttttaaacgtgttggatcaatgctagaaccatattctgttaaatggtgtgaagttatattggtcactggccattaaatctatttatacgcttagaagaccttataacctttataataaatttttcttcattaaaaca

SEQ ID NO: 2003 - DNA, 380 bp, Glycine max
  unsure at all n locations
  Clone ID: LIB3028-030-Q1-B1-D12
cagcaagagacccttcagggattctctccccatacacctacaatctaagaaacacaggccctgatgatgtttacataaaagttcactactgtggaatttgccattctgatctccaccagattaaaaatgatcttggcatgtccaactatcccatggtcccaggacatgaagtggttggtgaggtactggaggtggggtcagacgttagcaggttcagagtgggagagttggtgggagttggactcctcgtaggttgctgcaaaaactgccagccatgccaacaagacattgagaattactgcagcaangaagatctggtcttacaatgatgtttatgtccattggaaaaccaagcaaggttggctttgctgaaaacatgg

SEQ ID NO: 2004 - DNA, 183 bp, Glycine max
  Clone ID: LIB3028-030-Q1-B1-E8
atcattcctcctcttcctcagtactgtcattttcgattcgcttcactgtaactaggtttaattctaaggccttcatcgacaatgaccatcggacgtcatcgttcaaggcgcatcgtaatggctgtctaatcggatgtgactccgatcagcgccgagaacttccgcgcgctctgcacctgcgag

SEQ ID NO: 2005 - DNA, 361 bp, Glycine max
  Clone ID: LIB3028-030-Q1-B1-E9
cgagcatcctctatggataagattatgaacaagcttagattggcccagaaaaaagctcaggaaatgagaagttcagttccacacaaccaaaccgatcgggttgtaagaacttcacacaaggcttcatcatttcttagaaccagccagatgcgttctttgagtggttgtttcacttgccatgtcttttaagcattctttcatgtttgagtgatggtgggtttccgaaggattcaaatgggccacatgttaatgattgaaaggggcacaacagttgacaaaattggtgttgttgcgttttgctatccatggcaccttctttgaaagtctcagatatcataaaatctaagcccatgttccggaa

SEQ ID NO: 2006 - DNA, 365 bp, Glycine max
  unsure at all n locations
  Clone ID: LIB3028-030-Q1-B1-B4
tctgctgctacaaaagtctcccttccaatgatcatctgaaattacataggatttatagggtcatcaagaactcttcagcatcacaaaaggtgatttataatcaataagcaagggacagacacacagaagttgttatcttgaatcagaaaacatgatgctaagaagctcttcaacaccagttcttggatccctcctctcttccttcacagatagccctaacaacaatattcactcagaaacctgtcatgcactgaaacactttccaccaaccactgtcccacaacattatcacaaacttactttccaccatactgggtcctctgcatgtggttcttctncaatctcttcctcaattggtgagcttg

SEQ ID NO: 2007 - DNA, 404 bp, Glycine max
  unsure at all n locations
  Clone ID: LIB3028-030-Q1-B1-B5
ctctcttctcgctcttggcttttcgctcttcactcactctcattcagtcatttccaccgttcatggatccagtaagcgtgtggggtaacacgcccttggcgacggtggatcccgagatccatgacctcatcgagaaggagaagcgccgtcaatgccgcggaatcgagctcatcgcctccgagaacttcacctccgtcgccgtcatcgaggccctcggcagcgctctcacgatcanatactccgagggcatgccgggcaaccgctactacggcggcaatgaatacatcgaccagatcgaaaagctctgccgctcacgcgcnctccacgccttccacctcgacgcccagtcctgcggcgtcaacgtccagccctactctggctcccgggcaacttcgcagcctaca

SEQ ID NO: 2008 - DNA, 374 bp, Glycine max
  Clone ID: LIB3028-030-Q1-B1-B6
ctcgagcagcatcttgcggctgatgatcccatggagatcccaaggaaaccatctgcgggttctttattacgaatcagacattgggggagaatcattacatttccgtgaggttattcatcaaagtcatgcattggtgggtataacgttatccatgattattcatgctcagaatgaggaataggtttcctttcccctgcagatgtttggactttgtcatactgaatgactcaaagttcatatctgccatagtgagcattctgcaagatttatgaacagctttttcatgctatgaatatgttctactggtgaagctacacgaaatacgtcactttgcgcaacgtgccatcaattggtttacattcaattcagatgct

SEQ ID NO: 2009 - DNA, 328 bp, Glycine max
  Clone ID: LIB3028-030-Q1-B1-B7
gtctgtgtgtcctttgcacactgttcaaatagagagagaaaatcaaatctattatgtttaatcatattgtttcttgctattattctttttaccatttttctcaaaggtaaaccaagacagtgtagaagaataggaaaagggaaagttattgtaagagattattttattcaaacttgtatcgtaaattgaagttcatgtgattatgatgttcatttttcttatcttttttatttgttgttggcatctttgcttcagaggcgtccgcaaaaggccacatgcaaagttatgtcactgcttccgcgcctctaatccaatacattgacaaact

SEQ ID NO: 2010 - DNA, 348 bp, Glycine max
  Clone ID: LIB3028-030-Q1-B1-B9
ggacgaagtagacgacctgaaaatggtgggaaccaaattgatagtaagaagctgtaccagcttgatcttgacaaaatcgtctgtggtgaagatacaaggactactttaatgattaaaaacattcctaacaagtatacgtcgaagatgctgcttgctgcaattgatgagaatcaccagggtacttatgacttcctctacttgccaattgacttcaagaataagtgtaatgtgggttatgcttttatcaatatggtgtctccttcacacatcatcgccttctacaaggcctttaatgggaaaaagtgggagaagttcaacagtgaaaaagttgcttcactggcatatgca

SEQ ID NO: 2011 - DNA, 366 bp, Glycine max
  Clone ID: LIB3028-030-Q1-B1-C1
tgttactagcaatataaaaatctcgagtcggagatttgagtcttcttcgattcacgctgtaaccatcatctgtgatcgattctaaaatcttcatcaagaagatgcagctacaagatggttctgttggtaaagtcattaataacctctcacaagttctggcaagggtggtgggagaccagagcatctttccccacctacacaaaaaagatcactctgcccatgttattgagaagttctctcactatgttggtaggcaaatgggattcttagagagcgaggttccagcagagctgtgtagattggcaaatgagtatttgataaaacccaaggagtgtgtggaaagcatccttgaatatcttgctcatc

SEQ ID NO: 2012 - DNA, 398 bp, Glycine max
  unsure at all n locations
  Clone ID: LIB3028-030-Q1-B1-C10
ggtgactgcgcgatgggtgcctacaagtatgtttcagagctatggcgcaagaagcagtctgatgtcatgcgcttcttgcagcgggtgaggtgctgggagtataggcagcaaccttccattgttcgcttgacaaggtcgacccgccctgacaaggctcgtcgcttgggcttcaaggctaagcagggctatgtgatataccgtgttcgtgttangaggggtggccgaaagaggccagttcccaaaggtattgtttatgggaagcccacaaaccagggtgttacccaactgaaatttcagcgtagcaagaggtcagttgctgaggagcgagctggacggaagctgggtggacttanggtcctcaattcttactgggtgaatgaggactctacttataaata

SEQ ID NO: 2013 - DNA, 386 bp, Glycine max
  Clone ID: LIB3028-030-Q1-B1-C11
agaaagcacatagaagagaaagaaagaaaacaaagaggagaaagaaagtagttgaggaagatacaaacaatttttgcagattgttgagaatgcctttcaagaagcctcatcacacctcagacaagaactacataacaggggacgacggaggcaagttcgagatacaacctagaggactcaacattgtgtggggaaatgattctcgatactggaaaattccagaacaaggtcctgcggagctgatccaagtttcatggttggaggtatccggcgtggtaaacttaccaggtgtcaagaaatatagggttgaattcgaagtgagagttaaagacgatgggttcggttggagtggcacggacgtgctagtgatggctaagattgggaaa

SEQ ID NO: 2014 - DNA, 306 bp, Glycine max
  Clone ID: LIB3028-030-Q1-B1-C12
gcatttaccttcttgacaaagttatgacagacgatgactttgcttgggaagatataatgagtttgaggttctacatccctgtaagccttcaaatgtcagtgcagctattacaacctatgttctgcaatgctctttttgaactttcggaaatgagtcagaagaaattaaaaactggtgaggagccaatcttcaacatagttcctgtcataggttctgggaggtctgcttcatccatggacgatgtagtaacctgtgaattaatggctcagaaatcctgagtaaatatatgctttctgaaaacactct

SEQ ID NO: 2015 - DNA, 360 bp, Glycine max
  Clone ID: LIB3028-030-Q1-B1-C2
cttgtgttgtgtgctactagtaatgaaatgaaattccacgcaaaactccacaaaagccaccttctttgattcaagaaatcaacaccgagttttcaaaatcccattttgttttcccttccttttttcctatataaaccaaccttttaatttccttctgaattaatactccttgatctggtgtgaagatggacactactgactgggaagtcctttcttatgatggcctttctgattttgatgactatgacttgtgcacctcaccaaaattcaagaaagcctctgaagcatcaaggaattttcatccaagggtgcctaaacagattcttcatattccaattcaattggaaccgagaattggga

SEQ ID NO: 2016 - DNA, 394 bp, Glycine max
  unsure at all n locations
  Clone ID: LIB3028-030-Q1-B1-C3
ggaangggcaatgtaatagcagagccagaagttatcatccgcagctgcctctgtcaacaactctaaactggccaagaaccacatctaagtcaaggaatgataaacgatggactggattgaccacaacacatgatacctctagacggggaaatactgtgacaaatgatacagaggatatatcatcaacactgtctgatccaggtcctatctgggatgctgaaccaaaatgggatgctgaacctagtaattgggatgtggaaaatccaattgagttgccaggaccatcagatgacacagaaataggatctgcataggangttgtgccccgttttggagataaatgggttgcgtcaaatggacaatttcttgggattctgggtttgcaacatgcatg

SEQ ID NO: 2017 - DNA, 387 bp, Glycine max
  Clone ID: LIB3028-030-Q1-B1-C4
tgataaggttattgttgaagcctttaagatggtgaatgcagatgacaccatgacagttaaagaatacgaattcaagagattgataaggttattggtgaagcctttaagatggtgaatgcagatgacaccaagacagttaaagaagacgaattcaagaaaattttaagtgaaatacgggtagtatcacgttacagttagaggcaaatcccatatctgtttcttccaattcagttgtgcatgagcctttaggctcatcttctacactcttgcagccatctagtgaaacagcataattgtctcaagtttgtgacgggtcaaaaactaagtacaataagattttttattcatggaaattgttactgacatagtttatcttttaagaaatca

SEQ ID NO: 2018 - DNA, 211 bp, Glycine max
  Clone ID: LIB3028-030-Q1-B1-C6
gtctttaaatacgtttgtggatattgaactcaatctgtatactagatttcagactggacagtgagatgacatcaataatggcggaacacagatcaatcaagttacaagtatagaatggcaaagcttactggcatcataacatgatatgatactttacctgcgtgagaaggtttttgagcattaatagtcagtcttcacttacacttctcgc

SEQ ID NO: 2019 - DNA, 261 bp, Glycine max
  Clone ID: LIB3028-030-Q1-B1-C7
gtcttaatttctctctgccttgctcatttacacacctcaccaacctttcactttcagctttagttgaatccctctctctcgtttccaaatggtcagcgttgagattgtgctagtgttgattatgtgatgtgtcacatgtgtgtctctcgcgtcaagttagctgcatctcgtgtttacacatccagctttcttaagcttggcacgatactttgttaagtgaaattaggagtctcacatgttgcacatcatacaccaatcaca

SEQ ID NO: 2020 - DNA, 426 bp, Glycine max
  Clone ID: LIB3028-030-Q1-B1-C8
ttcatgattacagtcagtgaagtgtgcatattacactctgcagatggtgacattcatcttcaattcaggctctctctctcctttccaaatggccagcgttgagattgtgctagtgttgattatgtgatgtttcacttgtgtgtctctcccgtcaagttatttgcttctcatgtttacaaatccagctttcttaagcttggcacgagactttgttagatgaaattagaaatctcccaggttgcacatcatacaccaacaacagttccagaacatgaaacatccgatgtaatcaagacacaggaaacaaccccgggaccagtaccagccactgaggctcctgcaacagatcaggcagcagctgaggttcctgctcatgaagaacaacaagcaactgaggttcctgccgcagaatcaaccaccgaagca

SEQ ID NO: 2021 - DNA, 235 bp, Glycine max
  Clone ID: LIB3028-030-Q1-B1-D1
agctcactgcttgtcatgaaggttacaagctgcatggttgcggtgttgatggttagttttggacacataattcccttggcagaagctgaaattccatgtggcagggtgcaaatcacagtggctccatgcatagggtacctaaggggtcctggtggaggtgtccctgcagcatgctgcaatggggttaggagcataaacaaggaagccaaaaccaccccagatcgtcaaggggtgt

SEQ ID NO: 2022 - DNA, 324 bp, Glycine max
  Clone ID: LIB3028-030-Q1-B1-B3
atctgggattgtggagagtgtaggggaaggagtgagtgaagttgaggaaggggacatagtagtgccaatattcaatggggagtgtggagagtgttcgatgtgcaagtgtgagaagaccaacttgtgtgagaggtttggggtggatgccacgaagaaggtgatggaaggagatggcacaacaagattctccactgttaatgggaaacccattttccatttcttgaacacttcaactttctcggagtacacggtggtggattcggcctgtgtggtgaagtttctggactccgatcacagtctcagccacaggaacctcaccttgct

SEQ ID NO: 2023 - DNA, 379 bp, Glycine max
  unsure at all n locations
  Clone ID: LIB3028-030-Q1-B1-D10
gagcaagagagacataccagttgaagcattcaggggagggttcatattgtcaaaagttgcgaacccttggtcaacaggtgagctcaagttgaaaaacaccaacgtggaggacaaccctgctgttaccttcaactacttcagccacccttatgatcttaggcgctgtgtggagggtattcgcttggcgataaaggttgtccagtcagaacacgtcacaaactacactttgtgtgagagagaaactgcagagaaaatgcttaacctcagtgtgaaggccaatatcaacctcattcccaagcgccccaatgacacaaagtcagtagaacagttttgtanagactccgtgatcactatttggcactaccatggtgggtgccat

SEQ ID NO: 2024 - DNA, 149 bp, Glycine max
  Clone ID: LIB3028-030-Q1-B1-D11
aaaatattcaatacaactgtttgtgctggtttcaacctggctggatatttaagaaacgcctattactgtaatttgtactgtataacttgtatgtacgtttgttgcatggtaatgcttggtaacttaaatgttcatttgatttgatgtgg

SEQ ID NO: 2025 - DNA, 416 bp, Glycine max
  Clone ID: LIB3028-030-Q1-B1-A1
caattaaggaaacatttgataaattggttgaagatgggaagatcacaccaatcaaggaaatcacacctccaccaatccctgaggaccttagtactgcaattaagagtggaaaagtccgtgctccaactcatattatttccaccatttctgatgacagaggagaggagccatgctatgctggtgtacccatgtcttccattattgaaaaaggttatggtgttggtgatgttatctctcttttgtggtttaaacgaagccttccccgttactgtactcaatttattgaggtaggctattcaacagcagagatttcattgaatactttcctttcacagtgtttgtctggagtatgtgaaaatattctacactctacagacaaacttttatgttgtcagttttccttttagatttttttt

SEQ ID NO: 2026 - DNA, 383 bp, Glycine max
  Clone ID: LIB3028-030-Q1-B1-A10
caaatgctcctgttatctctcttctgggtgccaaggtagaagttggtaaaaaagaatgtgttcctcaaaggttgtctttgcagaatggcaaggctactgaacctgcaatagaactaacaatgtcaagagcaggtagcgttttagggatgaccccaacagtacccttcaatcattcatctgtttttggctataatggagtggcgtcagcatcagtgacacccgcaatgtctttttcatcagccatgtacggatcaggtggcacaattccatacatggtggactcaagaggagctccagttgtccctcaagtgggtggatcttcatcaactgtcctttcatcttactctcagccaccaatctttatgaacatggctggtacacaa

SEQ ID NO: 2027 - DNA, 382 bp, Glycine max
  Clone ID: LIB3028-030-Q1-B1-A11
gttttcttaaaatttcttccttgccactgccagtgtgtcaccaccatggccaccgtcacaacccaagcctccgccgcgattttccggccatgtgcctcgaaatcgaggtttctgaccggctcttccggtaaactcaaccgggaagtgactatgaggccaatggggtgccctccttctgcctctttcaaggttgaagccaagaagggagagtggttacctggcttggcctccccaacttacctcaatggcactcttcctggtgacaatggatttgaccctctgggactagctgaggacccagagaacttgaggtggtacgttcaagccgagcttgtgaatggacgttgggccatgttgggtgttgcaagaatgctacttcctg

SEQ ID NO: 2028 - DNA, 306 bp, Glycine max
  Clone ID: LIB3028-030-Q1-B1-A12
gccaaggctaagattaccaaggaacccaaagctaaaaaggtttccagaccacgcaaccctcccactcatccttcctaggaagagatgattaaagacgcaattacctcgctgaaggagaaagacggttcgagccaacacgcgattgcgaagttcagcgaggataagcacaagcagcttccaccgaacttcaggaagcttcttctctaccatttgacgaaagttgtagccgctggaaaactcgtcaaagtcaaaggctccatcaagctcccacctacgcgaccttctgcatcatcttcatcttcgccg

SEQ ID NO: 2029 - DNA, 348 bp, Glycine max
  unsure at all n locations
  Clone ID: LIB3028-030-Q1-B1-A4
gaacatcataatcatgaccaactcgatcaacgtgaacatcatggacatagtcaacatgatcaacatcatcagaagtgtgcctcacaaacatgttcctcaacatgtccaccctgctcttcanattcaagttttggtggaattgttaaccattgtaacaccatgaaggctcatgatcaatgtaaaggaagtgatgaattccatgaacatgatcactgtcatcatggaagatgtgacaagaatcacgatgaagtccacaagcatgacaccgaagataatcatgcagttgcagaaaaaaggcatggtagttgtttgggacataagaaccatgggaaanagcactgccacaac

SEQ ID NO: 2030 - DNA, 365 bp, Glycine max
  Clone ID: LIB3028-030-Q1-B1-A5
attcaccacaatcttattagttaaactttgtccacggacatcattaggacgtttgcgcaatgttggtgtctagctatactgtcctactaatatcacggtttctcgtcactggcgtgtgtgtttggggaagatccgccatctttctgcggtaccttgaaagtcactggtcacagactcacaacaagtaaattgatcaaggcagagccatccaactcattctagactaaaactctggttgtggctttgcctccaagagtaagtacatgtttggccgtgttagcatgaagatcaagctcattccgggagactctgctgacacagtcactgcattttatatgaattctgacaccgacactgtacgtgat

SEQ ID NO: 2031 - DNA, 365 bp, Glycine max
  unsure at all n locations
  Clone ID: LIB3028-030-Q1-B1-A6
gtgaatcagcaccacattcacctgagctttttgtgaggattccaaagcatggcttcccttgcagcatccactgctgctgcttcccttggcatgtcagaaatgcttggaaaccccatcaacctcagtggtgccacaaggccagctccatctgcctctagccctgcctccttcaagactgtggctcttttctccaaaaagaaggctgcacctccaaaaaaagctgcagctgctgctcctgccaatgatgagcttgccaagtggtatggtcctgacagaatgatcttcttgcctgagggtctcttggaccgatctgagattccanagtacttgaccggagaatccccggagactatggttatgaccca

SEQ ID NO: 2032 - DNA, 291 bp, Glycine max
  Clone ID: LIB3028-030-Q1-B1-A7
gagcatggataccgtacacgccagtacattcagtgcggcatcaacacctcagcatcacatgcttggtccagtgagtctgagactcgaggcatgtcatacattcgatctgaacacatctgactgagtgatacaagcacgggaactcaatctgtgctctaggaataggcactgcaagtactgtggctcagcactcgcagttgcatgctacagctccaaacgccagctacattagcggagcacgtcattgctttgcttgacaagtcatatcgtcatgagcactagataaacatg

SEQ ID NO: 2033 - DNA, 394 bp, Glycine max
  Clone ID: LIB3028-030-Q1-B1-A8
aaagaagaaataatatgcgcttaagggaggagcaagatgctgcatacagggctgcacttgaagctgatcaagctagggaacgacagagaagagaagaagaagaacatcttgcatgggaagctgctgaagccgagagaaagcacaaggaagaggaggcggctcgtgaaagagcagcacaagaagctgcagagaaacaagctgcattggctaaaatacgtcaagagaaagcccaatctcttggtgaagaacctgaaaaaggacctaatgttacacaggttttggtacggtttccaactggtgaacgcaaggaaaggaggttctacagcacagcgacaattcagtctttgtatgactatgttgactcacttggatgtttaaaagccgagagttacag

SEQ ID NO: 2034 - DNA, 368 bp, Glycine max
  Clone ID: LIB3028-030-Q1-B1-A9
gggaggtactacaaacttctattctaatctcgcagttttagcaattatcacttggcaaatcttgcttgtctgtgtaccaatggtttacattacaatacgcttgcagaggtactatttttccactgcaaaagaagtgatgcgcatgaatggcacaacaaaatccatcgtagctaatcatgtagctgaaactactgctggagttgtgacaataagagcctttgaagaagaagatcgtttctttgagaagaatcttgatctaattgacatcaatgctagtcctttcttccatagttttgcctcaaatgagtggctgatccaaagattagaaataattagtgcaatacttctttccttcacagcactatgca

SEQ ID NO: 2035 - DNA, 352 bp, Glycine max
  Clone ID: LIB3028-030-Q1-B1-B1
ctgtctcgtttacacatctctccaacctttcactttcgtttctcagttttattcgaatccctctctcaatctcctttccaaatggccagcgttgaggttgcacagcaaacaccaacaacagttccagaaaatgaaacaaccgaggtaagcaagacccaggaaacaaccccagtcactgaggctcctgcaacagaacaaccagcagctgaggttcctgcaacagaacaaccagccgctgaggctcctgccccagaatcaaccaccgaagcaccaaaggaagaaaccaccgaggcaccaacagaaacagtagaaaaaacaactacagaagtagccccagaggagcctaaagaag

SEQ ID NO: 2036 - DNA, 399 bp, Glycine max
  Clone ID: LIB3028-030-Q1-B1-B10
gaagccgagaggagaaagggcatagcttcacaccaagatggtttgatttaactgaagaagtgacatcaactccttggggtgatttggaaatctatcaatataatggtaaatacagtgaacatcgagctgctgcagataactcaggaagcattgatgatgttgatgctaaatcaattgaattcaatccatggcagtatggtaatttggccacggaatgaactagtttcaattttcttttggtttttggatgctacagttagttcatgtaacttttttttattgatacatagaataaatcttttttttttctttttgtggttttgttggcttgtgtacgttgtaatatctgcagttctctttcttttctgactacgttagtattttgattccatcacacag

SEQ ID NO: 2037 - DNA, 391 bp, Glycine max
  unsure at all n locations
  Clone ID: LIB3028-030-Q1-B1-B11
aagccttctcatgattccttgccagcatctattgctaaagaagttgcaaaggcattgtcatagaaaggcagcatcaaactccattaggagtgagaaaacttcctcattcagtttcagaagcaatgccaatgttccttttcatgaattgcctgnggcttcctttgatcaatacatggatgacaagcacagagtgctaagagctgtgttttctgatgacaaaggaacaactaaacagctcaatgaggaagagtggaggatcaaaatgcctcccatacaatgcttatttttgagtgtcaatccaacagcagatgtcaggttaacattcaggtctaatggagaagattatccacctgaaattcctcatcatgtccccaaagttcttgagcttcac

SEQ ID NO: 2038 - DNA, 415 bp, Glycine max
  Clone ID: LIB3028-030-Q1-B1-B12
cttggatccctttcgatccgacgacttcgttcgttccttctccttccaagttctaaccatttcccactgtcttcgattttagggcattaaatctgccatggcagcagcacccgctagagctcgtgccgattacgattacctcatcaagcttcttcttatcggcgacagcggtgtggggaagagttgtctacttttgaggttttctgatggctcattcacaaccagttttatcaccaccattggtatcgattttaagataagaaccattgaactagacagcaaacggattaagttacaaatctgggatactgctggtcaggagcggttccgaactattaccacagcttattaccgtggagccatgggtaccttgctggtttatgatgttactgatgaagcatctttcaataatatt

SEQ ID NO: 2039 - DNA, 336 bp, Glycine max
  Clone ID: LIB3028-030-Q1-B1-B2
ctttttcctgtcgacagtcaatgcatagagctcgtgcagatctagagcagatgcaaactgtgtcatactgagaagcttagtgacatacagtgtcagcctgagtcacagctttagttcataactgatgcctggcgacaaataattgaatgtacaacagtgctgaaatggtcatatgcatatgggttctatttgccggatcatgagcatgcaatcaagcagttctttgagtacttaccaagtgactcagaatctggtctggcgagacttcatcaatgcgcagaagaggaactacagccattcttaactgctgatgattcatctagagaatttaatgac

SEQ ID NO: 2040 - DNA, 402 bp, Glycine max
  Clone ID: LIB3028-029-Q1-B1-H9
tgatatagttgttgatgaccaggacagaccattacggacttctcagctgcatactaaagatgttcaagctaaacctctcagtggttctgctaggagttgcactaaagtaagatccttcactatttgattgaaaaatgagagctagaagtttactgggaaaattaaccacatggtatttgttttaggttcacaagaagggcattgcacttggtagatcagtggaccttacaaagtacagtggctatgatgaattagttgctgaattggatcagctgtttgaatttgggggtgaattattgtcaactaaaaaagattggcttatcgtctttactgataatgagggtgatatgatgcttgtatgcgatgatccatggcagtaaggatctgtattttaattataca

SEQ ID NO: 2041 - DNA, 303 bp, Glycine max
  Clone ID: LIB3028-029-Q1-B1-G1
cattattgatggggtcttgcagcggcgatcttgcggcaacgacggcggtgtggtatggaggggaagatgacgcggtcgagatcagatgggacgaggaaatcatcctatatgttgtcgtaatttgaaatggtggttttgttttcttcaatgtttgtgctgcttatttctgtttgaggtttgggagtggatttgccaatttgtaacttggacttggaacaatgtcctaatggccaccgaatgtggaaagctaagaaggctcttgttcaacagttttacaaacttgtttaattggatccttatctg

SEQ ID NO: 2042 - DNA, 271 bp, Glycine max
  Clone ID: LIB3028-029-Q1-B1-G12
gcgaatccggagacgctgcccgatggaaccgtgaatttgatggtgtggcattgcactattcccgggaagactgggactgattgggagggtggctacttcccacttacgctgcactttagtgatgactaccctagcaagcctccagagtgtaaattcccacaaggtttcttccaccctaatgtttatccttctgggactgtttgcttgtctatacttaacgaggatagtgtgtggaggccacccataacagttaagcaaattctcgtgggca

SEQ ID NO: 2043 - DNA, 357 bp, Glycine max
  Clone ID: LIB3028-029-Q1-B1-G2
ctttcaccctaggtgtgaagcagatgatctgttgctgtaacaagatggatgccactacccccaagtactctaaggctaggtatgatgaaatcgtgaaggaagtctcttcttacttgaagaaggttggttacaacccagacaagattccctttgttcccatctctggttttgagggtgacaacatgattgagaggtccaccaaccttgactggtacaagggaccaactctccttgaggctcttgaccaaatcaatgagcccaagaggccctccgacaagcctctaaggcttccattgcaggatgtctacaagattggtggtattggtactgtgccagtgggacgtttagagactgggg

SEQ ID NO: 2044 - DNA, 361 bp, Glycine max
  Clone ID: LIB3028-029-Q1-B1-G4
gttccccacagatcttaacacttcaaagttcaatctccccattttcatttttccatagcataagctaacagaataagaaaaatgaagttgaggtcttcaatcgcatttatttgcattctggcgagtgcgagtgtgacaatttcagaatcattaagccaacaagagcaattgtcagcatatgaagttcttgagaaatacgatctcccagtggggcttcttccaaaaggtgccacagggtatgagctaaacgaaaaaaacgggcacttcacagcgtatttgaatggaacatgctacttcagcatagagtcgtatgagctaaagtacaagtccacaatcaagggcgtgatctccaagggcaagt

SEQ ID NO: 2045 - DNA, 274 bp, Glycine max
  Clone ID: LIB3028-029-Q1-B1-G5
taacaatggagtatgaaagatggaccagggaaattactatttatacgaacactacaaaaataccatcaagtggttgaggaactttcattttcctaccctttaccattccttttatctatcttgtttttgtgttttcctttctttgatatgttgagataagagcatgaaggctagcaagatatgtaagattcatttttttttatcccgttttgttgtagaagagatgtgaattgttaccgatttggtttggttgaatcaacaaattcttttcctg

SEQ ID NO: 2046 - DNA, 355 bp, Glycine max
  Clone ID: LIB3028-029-Q1-B1-G6
gtcttgttgagtcattctcacaaagacaatctgcagttatatatgcaactccaattactataaatgatctgtcgaacagtagaaaaaaaatcagccagagggctgtagtaaagaagaaaggagtttggtggaagcaatttttggttgctccttaaaagagcatggatgcaggcttcccgtgatgcaccaacaaacaaagttcgggcaaggatgtcaattgcgtcggcaattatctttgggtcagtattttggagaatgggaaattctcagacttcaatacaagacagaatgggattacttcaggttactgcaataaacacagctatggctgctctcacaaagactgttggtgtgt

SEQ ID NO: 2047 - DNA, 360 bp, Glycine max
  Clone ID: LIB3028-029-Q1-B1-G7
gtgcaaactaaagaacctgccctatcttttaaattccttgtgggacaggtaaaccattaacgtaggcaagtcttgttcattcattgacaattcaatggcctgaggtgaaccttatcttcttgtgtattcaccaaatgagtgaatgaacgggtcgtcgacatgttgttactcttactcaactaccttttctttctgttcaatttttctataacaaaaaccgaagccattgataaccttcagtatctgaatcacagctgttcaagcaacaaaaccttcactccaaacagcacctaccaatccaacctccaaaccctcctcacctccctatcttcccatgccaacactgcacaattcttcaac

SEQ ID NO: 2048 - DNA, 349 bp, Glycine max
  Clone ID: LIB3028-029-Q1-B1-G8
gctagaaaccgttagtgggtatcctcaaaatactagattttcgattcgtttggtgaacggatttttaggtgtgattattacgttttttttttgttcaacaagctatggaggtttcggtgattggaagctcacaagcgaagctgggcgcgtctgaattggcttctagggaagttggattttgtaatctgaagaacaatttaagggttttgaatgatagagttagttttggtaggaataatatacggtgggagaaggctgggattagtttcactttgagggctcttcagactgaacctgttagagaggagaagaagccttctgggattggaacaagatccaaaacggtaga

SEQ ID NO: 2049 - DNA, 400 bp, Glycine max
  Clone ID: LIB3028-029-Q1-B1-H10
gggctgaacaatggccggaaaacatgtcggcggcgagggcttagcggggaacctcgccggaatgtcgaagaatcagctctacgatatcatgtcgcagatgaagaatctaatcgaacagaaccagcaacaggccaggcagatcctcatacaaaatcctaaattaaccaaagcgcttttccaggcacagattatgcttgggatggtgcaagcacctcatgtgggttcaaaagttcggccaatgggttcacagagcaatcagcagtcagtacatctaatacatgaaccaaatagtcagcctgctccattattgcctgagcacggtggtgcacatgattaagcaggtgtatctcaaacccaaattcctctgaggaaacaccagaaccagccttcagtgccaatt

SEQ ID NO: 2050 - DNA, 405 bp, Glycine max
  Clone ID: LIB3028-029-Q1-B1-H11
gccatcggagtgatattctcaccggagacactggggtcaaaatcaaccacactttccacctacctcaaactcgctcacctcctctgcttctccaccggcttcggcgccgctctgtgggtaacattcatcggcggcatcatcatgtttaaaaatctgccgcggcatcagtttgggaacctgcaaagcaagatgtttccggcgtatttctcgatggtgggtgtctgctgcgccgtatcggtggcttcctttggctaccttcacccgtggaaaacttcctccaccactgagagataccaacttgggtttttgctctcttcctttgcgttcaatcttaccaacttgtttgtctttacacccatgaccattgagatgatgaagcagaggcataaagtggagagagaaaat

SEQ ID NO: 2051 - DNA, 387 bp, Glycine max
  unsure at all n locations
  Clone ID: LIB3028-029-Q1-B1-H12
ctgacaatgtggataagaaggacagcaaagctgaaagtgcagagccaagtgctgaaggtggccatttgaagtcatttcaactgctctcaagtagccaaaatgcctttacaggtcttgctggtactggattttctaattcctcattttcctttggttccatttcaaatgaagggtctggttctatttttggactgaaaagtgataagccttttggtcttggtttatctaacaatggaagttctcttttgggggcatctggggcctctgctatttctaagaatgagggaagtggtttagcaatgcangaggttatagttgaaaccggggaagaaaatganaanagtgtttttaatgcagactcagtattgtttgagtttgctgatggaa

SEQ ID NO: 2052 - DNA, 183 bp, Glycine max
  Clone ID: LIB3028-029-Q1-B1-H2
gttgtttatgatttgcaactcaagtacgtttagcatgtctcagttatgatggttgggtaaccgtcgtgctggttatctatacctgagttttaggggaagcttgtggccctttttgttttagaatatgttatgctgaagtttgtaatagttggttgattataagattcctgatatttttatttt

SEQ ID NO: 2053 - DNA, 303 bp, Glycine max
  Clone ID: LIB3028-029-Q1-B1-H3
cgaacatgtgcgagtacatggcgccatcgctggacgtgagacaagacgtagtggtgatggaggtgccgaagctgggaaaacaagccgcaacgaaagcgattaaggagtggggtcaaccaaagtcaaagatcacacaccttgtgttctgcaccacttcaggcgtggacatgcccggagcagattaccagctcacgaagcttctcggcctgaggccctccgtgaagcgcctcatgatgtatcagcaaggctgcttcgccggcggcaccgtactccgcctcgcgaaggacctcgccgaggaacaac

SEQ ID NO: 2054 - DNA, 128 bp, Glycine max
  Clone ID: LIB3028-029-Q1-B1-H4
tcgatttatttgcttagcattcatgtaattgggaaaaagaggataaaaaaattgttgtatattgtatatacatattgtaaatttttgcttgcataattgaaatttaaaaggagaagaaaattcgatct

SEQ ID NO: 2055 - DNA, 326 bp, Glycine max
  Clone ID: LIB3028-029-Q1-B1-H5
aaagcttcctttgccatttccatgaatagaatagagaattcttaggcatatgaacatttagcccatctctgccactgactctgctccacagcattcaattataacaaagaccattttttttttttggttttggaaaataggcagagtcatagagagataaaggggctgcttaaattttcagccttttggagaaagagacattactcacatactcactcaccaccgagatccatttttttgcgaagaaagttgaagaaaaaaatggaaacaatgttgcctccgaaccaagcagaggaagcaatagtcacaacaagccttaacgagac

SEQ ID NO: 2056 - DNA, 338 bp, Glycine max
  Clone ID: LIB3028-029-Q1-B1-H6
aactgctccactacttgcacgctctgtgagtgcaactggtcggttaggtcctgatccctcacctgctactcatagttatgttccccagtcctatagaaatgcaataatggggaatcctgtggtgtcaactgctgccagtcttcctcattccagctccagttcaggagtaaacccatctcctggctattcacatccacccatggtatcatccccactatttatctcccggagctccgacaaaatggattcaaatacttcccagtctggtgttccctttggtatgatttcacgggatgttttacagaacggacctaattggattgatagttctcaaaggg

SEQ ID NO: 2057 - DNA, 405 bp, Glycine max
  Clone ID: LIB3028-029-Q1-B1-F9
ggaataacagacaaaggagattcagaactcatcgcgcacaatcaagtcgacaccaccaccaacaactcttactagaggacgattctcaaagctctcttccagcagaaaatggtgagggcgaggaagaggaggaggaactcacggaacctaaaataaagcttgctatgtgggattttgggcaatgcgatgccaaaaagtgcactggacgcaagctttcaagattgggcatgctaaaagagttacgtgtgagtaatggttttgggggcattgttttaagtccggctggaaatcaatgtgtctcaagagaagattactctttaatccagaagaaaggattggctgttgtggattgttcatgggcacgcttagatgacgtgcctttcgtaaggctgcgctgtactgctc

SEQ ID NO: 2058 - DNA, 368 bp, Glycine max
  Clone ID: LIB3028-029-Q1-B1-E3
gtctcaagcaaccatggcaatggcaacccaagcctctctcttaaccccacccctctccggtctcaaagccagcgaccgcgcctccgtgccatggaagcaaaactccagcctctccttctccagcccgaagcccctcaagttctccagaacaatcagagcagcagccgccgacgagaccacagaggcaccagcaaaagtagaggctgcaccggtcgggttcaccccaccagaacttgacccaaacaccccttccccgatcttcgggggcagcaccggcgggctcctgcgcaaggcacaggtggaggagttttatgtcattacgtgggacccaccagtcgagtttgtctttgaaaagaaaagggcggccg

SEQ ID NO: 2059 - DNA, 357 bp, Glycine max
  Clone ID: LIB3028-029-Q1-B1-E4
gtgattgtttgttgttgtaactcgttcttcttcttttgttgttctgtgtttgtgtttgttttttctctcacctgaaaatgtcttgctgcggtggtaactgtggttgcggaagctcctgcaagtgcggcaacggctgcggaggctgcaagatgtacccagacttgagctacactgagtcaaccaccaccgagaccttggtcatgggagtggcacctgttaaggctcaatttgagggtgctgaaatgggtgtgcccgctgagaacgatggctgcaaatgtggaccaaactgctcctgcaacccctgcacttgcaagtgaagtgttgggagagcaagcttcaagcagagataccccttaa

SEQ ID NO: 2060 - DNA, 354 bp, Glycine max
  Clone ID: LIB3028-029-Q1-B1-E8
agcaaattgaggaagcagttgagagagaccaaggtgtgagtgatttcttcgtctatggtgtcaacttgacatttctagacttacaagaaaccaatgtgtatgacttgcaattgaagggacacacaccaaagtttgtttactacacccttcaaggtgttggagatgaaggggttgttttggtgtatccattgcccaaaggttctatggagaatggtgttgatgggaagtttctgaccatgatttttccggaggatgaaatggtgaagcttaaatctgagctcaagataattggtcttttgcttgagaataattaagttttaatgagattaaaagcatgtttgactttccgttcat

SEQ ID NO: 2061 - DNA, 411 bp, Glycine max
  Clone ID: LIB3028-029-Q1-B1-E9
gcactatgctacaagcccaacaaacttgggtttaattggtataggcgtgccaaggtcttgttaattttgagcgttaagtgctgcaactaatcaaaatcccaagaccttggcctaccttgccatacagaaaaaaaaaaagcaaaaaaaaagccaaggtttggagccaacaaaaataaacacaaagcacaagtcatggaaagaataatggttggaagtgcaacaaaggttgctttcaccctcttggccactttcgccattgtcattccatgccttgaggctggcattgctgagtttgacgattttctcaaagcccaagctgatgaagcccataaaattgctcttgattcctatgtcccagagccccacgatgtcgcccatgaactcaatttccatgttcatatggcactggaa

SEQ ID NO: 2062 - DNA, 350 bp, Glycine max
  Clone ID: LIB3028-029-Q1-B1-F1
ttcaatttcaatcaacggttatacccttttctatttgagcatcatcatgtccaccgcagcgcagcccaaggccaagaaaacggcgtcgtccaagaagcccctctcccatcctaccttcgccgcgatgatagcggaggcgatagcgagtctgaaggagagaaccggttcgagccaatacgcgataaccaaattcatcgaaggcaagcacaaggagttgcctccaacctacaagaagcttgttctcgttcatctcaagaagtctgttgctgctggcaagctcgttaaggtcaaaaactctttcaagctcgcaccgactaagtctgctcctggtaaagccgctgctgctccca

SEQ ID NO: 2063 - DNA, 261 bp, Glycine max
  Clone ID: LIB3028-029-Q1-B1-F10
atcatcatgggcacctctgctattcagcaatcagcattcgcaggtcaaactgctctgaagcagctcactgagttggtccgcaagaccggtggcgccggcaaaagtcgcaccaacatgcgccgtaccgtcaagagtgctcctcagagcatttggtatggccctgatcgtcccaagtacctgggtccattctaagagcagattccgtcatacctgaccggagaaattccccggtgacaacggatgggacactgctgggctatc

SEQ ID NO: 2064 - DNA, 397 bp, Glycine max
  unsure at all n locations
  Clone ID: LIB3028-029-Q1-B1-F11
cttaaacgtctctctctttctttgaggcttctttccctctcttcgtcccttgctctgtgtcgccgtaacacaaaaagggaagagagagaaagaaccaccccacccaacaacagcttttgttcttcacaagacatagcttcgtgtgtgtgtttcttttcttccttccagcttggaaagactgaagtctctgtctttttcaggttttgggggtgttgttgaagatgttggtagcaaatagctttgatctatggcgaaaggacggttttttctctgcggcggaagaggtgcaggaatcagctgatataatggaatctgcatacanggcatggttgagagagaagagagaaaggtcaactcctgaggaattaaatgaactatgcagagagctgcaaactgc

SEQ ID NO: 2065 - DNA, 391 bp, Glycine max
  unsure at all n locations
  Clone ID: LIB3028-029-Q1-B1-F12
ttcgaaaccaaagcttctgcttttgtgatggaactagagagctgagaggcctaaacctctgtttgctctctcaccctttttggtgcagatcttgaacttgagctgcattttcatagaaaaccagcaccaagaaatggaacataccatgttacctgccattggatctgttttccctcgtggtgtctttgccgcactcttgctcatgttactgttttctttctccacattcacttctatagaagcctatgatccacttgatcctaccggaaatataacaatcaagtgggatgtcattagctggactccagatggctatgttgctgttgtcacaatgtacaactttcaacaatatcgccacattcaggcccccggatggtcattanggtggaca

SEQ ID NO: 2066 - DNA, 358 bp, Glycine max
  Clone ID: LIB3028-029-Q1-B1-F2
ccgcaaagaagacgtggaaagggtcctccgcggttccgactgcgtattccaccttgcggccttcggaatgtcaggcaaagagatgctccaatttggtcgcattgatgaagtcaacataaatgggacttgccatgttatcgatgcttgcctccacctcggcatcaaaaggcttgtctactgtagcacaaacaatgttgtctttggcggtcaacagatcatcaacgggaatgagacattgccctatttcccaattgatcaccatgtcgatccatatggccgcagtaaatcaattgctgaacagttggttcttaagaacaatgcccgtactctcaagaacgactccgggaatcgtctttac

SEQ ID NO: 2067 - DNA, 338 bp, Glycine max
  Clone ID: LIB3028-029-Q1-B1-F3
gtagggagcatgctgaagccaaacaccctaaatctgatgtttatgcttgttttcctcatctgaaaaagtgaacatattggagactgcaaatggagaaaactttatatcattatggcctcttccttaaaacctattgacagagatcttccccattttctatctatataaaaatgtgtttttctgtgtttgtgccttgggaattaagagggacaaggagaggaaaactattttattatgatttccctgataacagggcaagaaactgtgtgatgctttctctttctgtctaggtgtaactgtttaatgatggttcgtgttaataataaagtgtgtcacag

SEQ ID NO: 2068 - DNA, 354 bp, Glycine max
  Clone ID: LIB3028-029-Q1-B1-F4
cattttcattggcacaatgcctgatgccaatgtgataatcaagaagcttagagaagctgaaggattaacttttggcaacagagtctattgggtgcgttttgatgaagaattttctgataagaaatttaaatcttccagcccttttggaataaagtacacgttccatttggaggacgctgttgattgtcctgaatggattgtccccttccatgtagtcaagtcattagctgaagagaatgactttgagcttgttttcgcaaagaactcacatgaatttgtgcatgagtatatgaaaaaaccggaatttgtggagctcatgcgaagacttggtgcattgggagatggcaaccaaga

SEQ ID NO: 2069 - DNA, 353 bp, Glycine max
  Clone ID: LIB3028-029-Q1-B1-F5
gaaaatgggacagtatactcctttggatcaggtgctaatttctgtcttggccatggtgagcagcatgatgagttgcagccacgtcctatacagaaattcagaaggaaaggtattcatattgttcgtgtatctgcaggggatgagcatgcagtggcacttgactcaaatggatttgtatatacatggggcaagggatactgtggtgctttaggccatggggatgagattgagaagacaactccagagttgttgactagtctcaagaatcaattggctgttcaggtctgtgcaaggaagaggaaaacatttgttctagttaattctggttcagtctatggctttggctccatggg

SEQ ID NO: 2070 - DNA, 352 bp, Glycine max
  Clone ID: LIB3028-029-Q1-B1-F6
ggctatgtgagggagcaacacaaggccataatggcttggaaacacaactctaggcatgttggactggatagaatttcgtactaaagctgccttgttgatcatgatattatttactatcagtgtgttctgttgtcatgatgttttatattcagtaagcttttttcatgattgtcacaacttataaaaccccaaaaaacctgtctgtgggaggttcttatattttatgtgctgtcatgttcatgttgtggtgaaggatttgtagtttgtaaattgcatcatctcttatatgtttgcaactttgtgtgataaaaaacaccaagttgttatatatgtaatgcaccttcaactgttt

SEQ ID NO: 2071 - DNA, 358 bp, Glycine max
  Clone ID: LIB3028-029-Q1-B1-F7
attggaactgtgccagtgggacgtgttgagaccggtgtcttgaagcctggaatggtggtgacttttgcaccaactggactgacaactgaagtcaagtctgtggagatgcaccatgaatctcttacagaggcacatcctggtgacaatgtgggattcaatgttaagaatgttgctgttaaggatttgaagcgtggttatgttgcctcaaactcaaaggatgaccctgcaaaggaggctgctaacttcacagcccaagtcatcatcatgaaccaccctggtcagattggaaatggctatgcccctgtcctcgactgccacacttctcacattgctgtcaagtttgctgaactcatgaaca

SEQ ID NO: 2072 - DNA, 357 bp, Glycine max
  Clone ID: LIB3028-029-Q1-B1-F8
aaaaaccttcccttctcttctcacccccacactcccatctcacacacccctcgcatccaacaatgtctctcaccattccctccaacctctccaagcccgccgccctccgccccaaactaagcccaaagctaaggtccgccgccacaaccaccatcgtctgcagcaccaccaacaacaacaacaacaacaacgtgtcctccgacctgaaggcgttctccgccgcgctggccctctcctccatcctcctctccgcccctctccccgccggcgccgacatctcggggctcaccccatgcaaggagtcgaagcagttcgcgaagcgtgagaagcagtcgataaagaagctggagtcgtcgc

SEQ ID NO: 2073 - DNA, 318 bp, Glycine max
  Clone ID: LIB3028-029-Q1-B1-E2
cactagtattatgaatctatcagtgaggtcatgtgaaagctatggttaggatcaataagggtagttctaagttggtctttaaaatgttacagctgctttctgtttctttctcattttattattcctggcttgaaattctatacttttaattcctcattaggcatatggttgcctccttgtttaatttctctgtctcttcataggatgattgatatcaaagttgatggatggctattacctatagtcaatgctacactacatgtctcataatttatttagtttagttgctctgcctcaactgcttaagtgggcttatat

SEQ ID NO: 2074 - DNA, 349 bp, Glycine max
  Clone ID: LIB3028-029-Q1-B1-C5
tagcagagcagcgactcacactggtcttcgcttctcattcatcatttctcagctaaccttctcttcctctcagtctcagatcagaaacctcaggcagccatggcagcgttccagaagatcaaggtcgtcaaccccatcgtcgatatggacggagatgaaatgactagggttatctggaagtcaatcaaggacaagctcattttgcccttcttggagttggacatcaagtattatgacttaggccttccttaccgtgatgagaccgatgatgaagttacaattgaaagtgcagaagcaactctcaagtacaatgtagcaatcaagtgtgcaactatcactccagatgaag

SEQ ID NO: 2075 - DNA, 352 bp, Glycine max
  Clone ID: LIB3028-029-Q1-B1-C6
cacacacccctcgcatccaacaatgtctctcaccattccctccaacctctccaagcccgccgccctccgccccaaactaagcccaaagctaaggtccgccgccacaaccaccatcgtctgcagcaccaccaacaacaacaacaacaacaacgtgtcctccgacctgaaggcgttctccgccgcgctggccctctcctccatcctcctctccgcccctctccccgccggcgccgacatctcggggctcaccccatgcaaggagtcgaagcagttcgcgaagcgtgagaagcagtcgataaagaagctggagtcgtcgctgaagctctacgaggcgggcagcgcccccgcactg

SEQ ID NO: 2076 - DNA, 367 bp, Glycine max
  Clone ID: LIB3028-029-Q1-B1-C7
aaactcaagtcactgccatctcgcacgtttgaatccccagaaagaaaaaaaaaatgcacgaaattagagaccctgcaattaggcttttcggtcagaagatccctttccctgaagatgttgttgttgacaaagaagaaaaagaaatagaaagtggcgaggaaagagaacaagagatggaaaaatatgaagaccaaggacacaaggatgctggagttgaaaatgttactgaggaagagctagaagttgatcctcctccaaatgctgaagagactaagaattcaggctcatcccctgaggctattgtgaaccccaaaacaccttccatagaagaagaaacagaaaaatcaaaaggtgacaaaacagagaa

SEQ ID NO: 2077 - DNA, 351 bp, Glycine max
  Clone ID: LIB3028-029-Q1-B1-C8
gttgaagaggtggagatttactatgacccggcagagcttcttggaggccttctttcagggaaccacataaatcacccaattgaagaggatggcaccaaaacttcagcaccttcccaaggatgtcccttctccaaataattacaatgatgtttttaagtgaatggtgtcttgggatccagctatatttcttgaattaattaatgtggcagctgagatttgaaggcaaatatagtatttgtgtgaaattgggtccattgaataaaattggaaacatgtcaaaatgaattatttttccccccgctttatatggaaaattatggcaaataaatgtgatgtgttggaaagcaatgt

SEQ ID NO: 2078 - DNA, 360 bp, Glycine max
  Clone ID: LIB3028-029-Q1-B1-D1
ggattcttcaaactccaatggagcatcacagaggctcctggacttggctcaacggctccgcctgtacaaacccccaccattccctgaagacatcttggatcagatcatggaagagaagggagataaggttgtctcagaagtgagttacacgaaatcagccaccccaattgctcaaaacacagcaaaaatcggatacaagagagctgctgttttgatctgcatctttgaaggggatgctggggatctgagagtgatactcactaagcgctcttccaagctttccacttactctggtcaagtggccttgcctggtgggaaagccgaggaaggggataaggatgatggggacactgcaaaaag

SEQ ID NO: 2079 - DNA, 397 bp, Glycine max
  Clone ID: LIB3028-029-Q1-B1-D10
aacactcataacacaaagcacaaagcaaagctcatccttgagttaaaaaatggcagcagcttcttccatggctctctcatccccatccttggctggcaaggccgtgaagctgggcccatcagccccagaagtgggaagggtgagcatgaggaagaccgtcaccaagcaggtctcctcaggaagcccatggtacggcccagaccgagtcaagtacttgggcccattctctggcgagcccccgtcctacctaaccggtgagttcccaggcgactacggctgggacactgctgggctttccgcagacccagaaaccttcgccaagaaccgtgaactcgaagtgatccactccaggtgggccatgctcggagccttgggctgcgtcttcccggagttgctg

SEQ ID NO: 2080 - DNA, 408 bp, Glycine max
  Clone ID: LIB3028-029-Q1-B1-D11
agaataattatcttcttcaaaataaaataaaaaaaaataaaaaaaggaagcagataggaaagggttgaatccaaaaaaaaataaaaaatggcatttcttgacgtacggaaaaaaataatgggtagggtttggacttggacgatggcactgatgctttgcctgatggcagcatcggttaggagcgaggacccttatatttactacacatggaaagtgacatatggtaccattgcccctatgggtgttccccagcagggtatcctgatcaatggccagttccccggccctgaaatcaactccaccagcaacaacaatgttgtcatcaatgtcttcaacaacctcgacgagcccctcttgttcacatggcatggtgtccaacacaggaagaactcctggcaagatggtaca

SEQ ID NO: 2081 - DNA, 395 bp, Glycine max
  Clone ID: LIB3028-029-Q1-B1-D12
ctggtactggcttccagtccaaagggtcttacttgtttggtcacttcagcatgtacataaagatggttcctggagattctgctggcacagtcactgctttctatttatcttcccaaaacgcggagcatgatgagatagactttgagttcttggggaacagaacaggacaaccttacattctgcaaacaaatgtgttcaccggaggcaagggtgatagagagcaaagaatctatctctggtttgatcccacgaaagaataccacagatactccattctctggaacttgtatcagattgtgttctttgtggacgaggtgccaatcagggtgttcaagaacagcaaggacttgggagtgaaattcccattcgaccagccaatgaagatctacaacagt

SEQ ID NO: 2082 - DNA, 354 bp, Glycine max
  Clone ID: LIB3028-029-Q1-B1-D2
ggactatgcatttgagttcattatcaacaatggcggcattgattctgaagaggattacccttaccgtggtgttgatggtagatgtgacacatataggaaaaatgctaaggttgtttctattgatgactacgaagatgttcctgcctatgatgagttagctttgaaaaaggctgttgcaaatcagcccgtcagtgtagctattgaaggagggggcagggaatttcaattatatgtatctggtgtattcactgggagatgtggcacagcactagatcatggtgtcgtggctgttgggtatggtacagctaatggtcatgattattggatcgtaaggaattcatggggtcctagctg

SEQ ID NO: 2083 - DNA, 358 bp, Glycine max
  unsure at all n locations
  Clone ID: LIB3028-029-Q1-B1-D3
caaaagttgaaagaatgagccttgcttaagtaagggtgtcgcgataggcccaagtccatatcagtttataaaaattgttgtgctaatgagagaggatctcaacacgaattagagcaattgttcttcgagagagagtagatcattcttaggcttttagctcgctattcttatgctttgtataaattcttccaaggattgtaatcatgctatgagcaattaatctcctcatctgttgggattagaatgcctgacctaatttcatgtaattctcccttttaatataattgtttatgtgtttattaaaaaaaannnnnaaaaaaaaaaaaataataaagaaataaaaaagggcgggccccga

SEQ ID NO: 2084 - DNA, 357 bp, Glycine max
  Clone ID: LIB3028-029-Q1-B1-D4
attcttcgaaggaatttgtcaaagagtagccatcgccccaacgatcccgtttcccttcacttctctacgcaaagccccttgttttgcatagagctacttaaaatgtcggagggaaatgcggagagaggaaagagaattgccattattggtgtctcaaccttattgttggtggcgatggttgtggctgtcacagttggtgtcaatgttagtgagaatggttccaacaatgaggacacaaaaattgcttcttctgtaaaagccgtccaaaccctttgccatcccacaaattataagaaagaatgtgaggaaagcctcatagccagggctggaaataccactgatccaaaagaacttatc

SEQ ID NO: 2085 - DNA, 61 bp, Glycine max
  Clone ID: LIB3028-029-Q1-B1-D6
gttgattgtgtcgtttggatgatgattgctcccaacaaatattctaatatttttaactttc

SEQ ID NO: 2086 - DNA, 325 bp, Glycine max
  Clone ID: LIB3028-029-Q1-B1-D7
gctttgagagagagagagggaggagggagagtgttgacgctccatcaagatgggtatttctagggattccatgcacaagaggcgtgccactggtggcaagaagaaggcatggagaaagaagagaaagtatgagcttgggcgtcaggccgcaaacaccaagttatcaagcaacaaaactatccggaggattcgtgttcgaggtggcaatgttaaatggacggcattgaggttggataccggcaattactcatggggtagtgaagcagttactcgcaagactcgtattctagatgttgtttacaatgcctcaaacaatgagcttgtg

SEQ ID NO: 2087 - DNA, 352 bp, Glycine max
  Clone ID: LIB3028-029-Q1-B1-D8
gataggtggagttacatgccagtcatccatcttaatgcaattgcaattgatccaaggaacccaaatctctttgcggttgctggctctgatgagtatgctcgactttatgatattcgcaggtataaatgggatggatcaactgattttggccaaccaaccgacttcttttgccctccacacttgattggtgatcagcaagttggaataacaggcttggccttttctgaacaaagagagctgcttgtgtcatacaatgatgagcttatttacctttttacccaagatatgggtttgggaccaaatccccctgatcctgggtcccctaaatctatgaacagtgatgcaagtgaaa

SEQ ID NO: 2088 - DNA, 284 bp, Glycine max
  Clone ID: LIB3028-029-Q1-B1-D9
cttcatacattttacccgttactctctctctctccatcttcattctcttcttcttcttcactattttctcacttatcgtgaccttatcccaacccgtttctgttgctaaagtgcttctgggctgttgtcaaatcaatccacaaccctcaaatgttggtcagcttcttctccccaaaaaagcgttctttctttcttttcccttcccatttaatatttttcccactataaatttcgtgccctctttcccttcactttcatcctctatacatggatgttttgtgttt

SEQ ID NO: 2089 - DNA, 375 bp, Glycine max
  Clone ID: LIB3028-029-Q1-B1-E10
ctcttcgctcctccgtcactccaccgccgcgtcgctccgccgttggtcgcgtgtttgcggcgagatctacatccttagtgtgaatctgcgattcttcgaatcgaatcaggtgagagcgtggtgtgtgtttgagttttgagtatggcagcggcggaagataagtggtgcgtggtgaccggaggtcgtggtttcgcagctcggcatttagtggaaatgctaatccgtcacaacgagtactgcgttcgcatcgccgatttggagggcaacattgttctcgagctcgccgagcagttagggcttcccgggcaggcccctgaactcgggccggggccaatatgtctcccttgatcttcgcaacaaggcccaacttctaaa

SEQ ID NO: 2090 - DNA, 406 bp, Glycine max
  Clone ID: LIB3028-029-Q1-B1-E11
gctcctttatatattgtttccgtgtttttctctctttgtgattttgtgaggcccaaactaactttataagcaatttacgtgtttgaaattaatattttgtgagctagctagcttcttcatcatggcaaagtcttctactgaaaagaatggactgaagaagggtccatggactccagaggaagatcagaaactcatcgattacattcagaaacatggacatgggaagtggagaacccttcccaaaaatgcaggactaaaaagatgtggaaagagttgtcggcttcgctgggctaactacttgaggcccgatataaagagagggagattctcattcgaagaagaagaagccatcattcagttacacagtgttttgggaaacaagtggtctacaattgctgctaacttg

SEQ ID NO: 2091 - DNA, 354 bp, Glycine max
  Clone ID: LIB3028-029-Q1-B1-C4
ccctcttcttccccaccatcacaccaaccaaacctcactctccctgccatggtcatgggagcctttcgccacttcgaaccggtttccaaatgcagcaccgaaaaccggtttaaccaaaccgtggcctcggacttggacggcaccctcctggtgtcccctagcgcctttccttactacatgctcgtcgccatcgaagccggcagcttcctccgtggccttgtcctccttggatccgtccctttcgtgtacttcacgtacatattcttctccgagaccgcggccatcaagtccctgattttcattgccttcgcgggcctgaaggttaaggacattgagatggtcgcgtcctcggtg

SEQ ID NO: 2092 - DNA, 373 bp, Glycine max
  Clone ID: LIB3028-029-Q1-B1-B1
tgaagacacaaaagaaaaaaaatgggttcttctctgtggacctgtctgattttgttatcacttgcttctgcttccttcgccgccaacccaagagcaccaattgatgtgccatttggcagaaactatgtgcctacctgggcctttgatcacatcaaatacctcaatggtggttctgagattcagcttcatcttgataaatacacaggtactggcttccaatcaaaagggtcctacttgtttggtcacttcagcatgtacataaaattggttgctggtgattcagctggcacagtcactgctttctatttatcatccacaagctcagaacatgatgaaatagactttgagttcctgggaaacacaaccgggcaac

SEQ ID NO: 2093 - DNA, 405 bp, Glycine max
  unsure at all n locations
  Clone ID: LIB3028-029-Q1-B1-B10
aaaccctattgcacgttttgcaatcgaactcgacaatgggcaatagcaacctccctcgaagaatcatcaaggaaacgcagcgtttgctcagtgagccagcacctggtattagtgcctccccctctgaagagaatatgcgatatttcaatgtgatgatccttgggcctacccagtcgccttatgaaggaggcgttttcaagttagaactatttttgccagaagaatatccaatggctgctccaaaggttaggtttctaacaaaagtatatcatccgaacattgataagcttggcaggatatgtcttgatattctgaaagataagtggagtcctgcacttcagatacgcactgttctattaagcattcaagctctattgagtgcaccagnaccagatgatccacttt

SEQ ID NO: 2094 - DNA, 380 bp, Glycine max
  unsure at all n locations
  Clone ID: LIB3028-029-Q1-B1-B11
tagagaactggtactacaagatattgctacttatgactggccagttggagaatgccactatcgctgtcgatgccttgtctgtatgtatgaccatcaaacgggtgggaaatgatgattcccctggctttcttcgcgggtactggggtaagggtggcgaacgagttaggcgcangaaatggcaaagcagcaaaatttgcaacgcaagtatcagtggcacaatcaacaatcattgggcttatattttgcgttctgataatgatattccatgagcatatagcatacatattcaccaccagcactttcgttctacaagccgttgacaacatgtcattactcttagctatcaccattcttctcaacagtgtacaacccgttttgtc

SEQ ID NO: 2095 - DNA, 390 bp, Glycine max
  Clone ID: LIB3028-029-Q1-B1-B12
cagacttgcttcacccatagggaataccaaacttagcgaggctagctcaggtagctcagttttagaagtgtctttcaagggcagagaaattgttgcttatgatgatatcctctgactatgaaaatctgtattgttagagggtagtcttattctgtatcaatgatttgaatttgggctttagatctctttgtagttcttttttcccttttgttaagtatgtgctcaatgagatactgggaagtaacttatggagttggttgtgatgtttaatacctacatcgtagatgtaatgtaaatagttggatttacattttgttgtctcgtcaattctttggatttgaaagtgtaagatgttcttccatgattgttcacatcacaaaaccttttttt

SEQ ID NO: 2096 - DNA, 355 bp, Glycine max
  Clone ID: LIB3028-029-Q1-B1-B2
gtaacattgggttgtgatttgtgagggaagaacgggtagaaagaatcaggagaaggaaataatcatcaaccatggcagggagattgacgaacgcagcatcgaggatcttaggcggaaacggcgtcgtttaccgatccgttgcttcctctcttcgcctccgctccggcatgggcctccccgtcggcaaacactatgttcccgacaaaccccttcccatgaatgaggaactcctgtgggacaacggcactgcatttcccgaaccgtgtatagatcgtattgctgacactgtcgggaagtatgaagcattggcctggctgtgtgggggattgagttttttcgcgtcgctgggattgtt

SEQ ID NO: 2097 - DNA, 373 bp, Glycine max
  Clone ID: LIB3028-029-Q1-B1-B3
tactctccccacaagtatcactgatgcttgccctgctccaaaggaaactaaatgctcttatgagcatgtcaaagattgtgtttcaagtcattcctctactgacttggatcaacgccggtttgacacatcatcgtaccagcaacgtgcggaggcattggaggggttgctggagttcagtgctaggctcctacaacaacagaggtttgatgagcttggggtgttgctaaagccattcgggcttgagaaggtttctccaagagaaacagctatttggttgaccaagagctttaaacaaactgcagtctaaggttttctttttcatgcatgcatatgattatttgctaactgataatgtacataacgttgtacattt

SEQ ID NO: 2098 - DNA, 357 bp, Glycine max
  Clone ID: LIB3028-029-Q1-B1-B4
gtcttgccccatcaatacaggctccaggatcttggtcttcacctctggacctgctactctgggacccggaatcgttgtcgattctgatcgccgccaacccatcataactcaccatcacatcttcaacgcccaagcaacacactatgctaagtcttccgctttctagaatcaactctccaagaggctatccggtgcatctgttgttctcgatctctttgcctgttcccttgatcaagttggggcaaccgagctccgaggacccgttgagcactccggtggattcatcgttctctctgagtcttttgattccgatcagttcaagaattgtctgaggcagatgttcagatgtgatgacca

SEQ ID NO: 2099 - DNA, 314 bp, Glycine max
  Clone ID: LIB3028-029-Q1-B1-B5
aattatttgaacgacctcaatcggcacaagcaattactcatggagtgatgcattgcgtgggctatatgtgctgatgttgcctttaggggttgcatgttttccctctatatctattaaaacttatggaataatacttgtaacggtgtgtgttagtgtccacctgtgggtgaagttgacaatgtcacaagctggggtcctttattaggcatggcaaaatatcgtagggttgtaaattggcatgaacttgtactgagcataatttctcaagaagcaatcatagtttgtatggttgactaacattaaggactaaaggc

SEQ ID NO: 2100 - DNA, 348 bp, Glycine max
  Clone ID: LIB3028-029-Q1-B1-B6
gtccattgtctctactcttagaacgcgcgcttctaaagagaagagacaatggatcacttgagattcaacaaaaccacccttgtcctcatcggaaccctctcttgcctcctcctgtccatcactgccgtcccctcaactcgcgtcttggaactcgctcccagcgaagcccccaccgcggagcctatagcctccggcatcagcctcttcgacaatcttcttgccaaggaatcaagccccatgattctgaaattctgcaccggcaccgagaaccccaccctctgcgccgaaaccattgcaccatacctaaccggcacattcgacccgatccaagcgctagagaccgagatc

SEQ ID NO: 2101 - DNA, 324 bp, Glycine max
  Clone ID: LIB3028-029-Q1-B1-B7
ctctacaatctataatcctatcagaaatagtcatgcatcttaatttgcagataagatccgtgacataagttgtataattttgaagttgttatgattatccttccactttgtgctactcggtacactttttgtaattgatggatgtgttgtagaggtaggtgtcaagttaacattgtagttattttgagatttagtataacatttaatctttcagttttggagcaagcaaataaggtttatgtatgaaattctgctttgtactgattcatcaacacaaattgactatgcaattgtgaaaagaaaaatgttgatggtagacgtttt

SEQ ID NO: 2102 - DNA, 338 bp, Glycine max
  Clone ID: LIB3028-029-Q1-B1-B8
gaaatttctcctgttgttttaactgtaatttcatgcctggtcccaattcttcagcatgcggagggactcaacaagtcgcttatagaaaatagtgcaataacactggggaggcttgcatgggtctgtccggagcttgtatcaccacatatggagcatttcatgcaatcttggtgcactgctttgtcaatgatacgagatgatgttgagaaagaggatgcttttagaggtctatgtgctatggttaaagctaatccttctggagctctaagttcgctagtttgcatgtgcaaagccattgcaagttggcatgaaataaggagtgaagatttacacaatga

SEQ ID NO: 2103 - DNA, 406 bp, Glycine max
  Clone ID: LIB3028-029-Q1-B1-B9
ccgcaccagtttcaccgcacgaatatcttgttgtttggagcgatccgagaaaaactctgtaaacatgttggtttaccaggacctccttacaggtgatgagcttctctctgactccttccgttacaaggaaattgagaatggaatgctgtgggaagttgaggggaagtgggttgttaaaggagcagttgatgtagacattggtgcaaacccttctgctgagggtggaggagaagatgagggagttgatgatgcagctgttaaggttgttgacattgttgacacattcagacttcaggagcaacccgcattccataagaagcagtttgttaccttcatgaagaggtttatcaagaatttgactcccaagctcgatgcagagcaacaggagttgtttaagaagcacatc

SEQ ID NO: 2104 - DNA, 367 bp, Glycine max
  Clone ID: LIB3028-029-Q1-B1-C1
cgttaaacaaggcatttcaattatcgtgtcttcttggctctctgtttaggatcgacatggatttcttttttccattggcaatacttgtgatgatattaggcacaccatactctagtgcttctggaaagagtgaaagtaatgtgaaaacagctgtttttctgtctcctaagtttgaacttggaccgggatcggttgcaaataaatatgattatgatattgattttccaagaggtcatatagcacttaagagtttcaatgcagaggtagttgatgaagcatggaaccctgtgcctcttcatgaaacttatctccaccactgggttgtttggagatactatcaacctaaatatgtgacgacacacacaaa

SEQ ID NO: 2105 - DNA, 403 bp, Glycine max
  Clone ID: LIB3028-029-Q1-B1-C10
ccttctccttctcttctctgcttctctttgcatctccgaaaacaatgaagctcattagcagcattaaccccaaaaatctcaaactcagtcccaaacgcttctttcgcaaaaaggaacgatctttaatctcacgctccgacccaccttcattcggatccggatcttcctccgacgactccaccacaaatcacaagccttccgccggtaaccaaactccgaccagcgtcctcccgggcgtctccggagactggtccgacgtcgccgccgtcgacgtgcggtgggacctcgcccaggccttccgcctcatcgaccgcgacaacgacggcgtcgtcacacgccaggacctcgaggccctcctcacgtgcctcggcgcgtcgccgtgccccgacgacatggcggtcat

SEQ ID NO: 2106 - DNA, 399 bp, Glycine max
  Clone ID: LIB3028-029-Q1-B1-C12
cacacaaacaccgaaaagttgattgaaaaggacatgatgatgtggcaaccataccaaactatgtttggttgactgaagaggatatggtagtattatattcaggcaaacaaccttctttgggggatatgagatttaataaatcaagctgttccttttgtgataattttttatattcaacaaagaacacgagtcatatttgatttttatttataaaaccaaatggccttaacatttctatttgccattgatttcagcacaaaatggaatctgaatcactgatatggggtgacaaactcacacagacgggattgtcaatcgttggttttcatggagcactacctgaagaaaggaatctacgccagaaattcatggtagatgtagatgcatggatggatctca

SEQ ID NO: 2107 - DNA, 353 bp, Glycine max
  Clone ID: LIB3028-029-Q1-B1-C2
caatttccaacgcaaaccgccaccacccttttccttcctcctcacgcctcctctattctttgtcaacccaaccaaaacgaccgtcgttattttcctctttctttcaccaaatgatgatgggttcaaccccgcctcgatcataagaaacaccaaactaacaaagaagcagaataagccaagaaggcgatggttcatcaaaacgacaacgacaacgacggcagcagcaccgccaccttcctccatctcgcgtagtgatcgacgacgacgacgacgacgacgatcggcgattgaattcttcttccgcggggatgatgtcgaacctgtacggcgaatacaaccaacagatcgactac

SEQ ID NO: 2108 - DNA, 340 bp, Glycine max
  Clone ID: LIB3028-029-Q1-B1-C3
gttgatcaagagtcgaacaatttgaagctggaacttgaacaagtagaagaggagctccaaagacttaatgagcaagttttgtcagccagggttcttaaatcaaaattggaatcagcttcctccttactgcatggtttgaaagctgaattagcagcatatatggaatcaaaagtaaatgaggaattttataaagaacaaaaagaggaagttgaggaactaaaactgaacatagaaaaagcaacttctgatgttaacagattgagggtggcttctgtgtcactaaaatcaaaactagaagaagagaagtcggttctcgcatcccttaagcaaagtgaggaaa

SEQ ID NO: 2109 - DNA, 409 bp, Glycine max
  Clone ID: LIB3028-029-Q1-B1-A9
tgattgcaagcccacggggaataccaatattagagactctccacatcactctgggttttggactcaatcagacggtgatggtgtgtccatctttaattcgaagcatatttgggttgatcattgctctttgtctaattgtcgtgatggtctcattgatgccattcatggatccacggccatcaccatctccaacaattacatgacccatcatgacaaggttatgcttttggggcacaatgattcgtacactcaagacaaggacatgcaggtcactatagcattcaatcattttggagaaggccttgtccaaagaatgccaatgtgtagacacgggtatttccatgtggtgaacaacgactacacccactgggaaatgtacgccattggtgggagtgcaaaccctaccatc

SEQ ID NO: 2110 - DNA, 352 bp, Glycine max
  Clone ID: LIB3028-028-Q1-B1-H4
cacatgaaaagcctccaaaaccaacccaacgttggcgcgatggctttcccctccaaaggcgatgacgagcaagttctggtgcagcgtaaatcgaatgcgagagttttgacactaaacaggactaaacagttgaatgccctctctttttatatggtttctcggctacttgaaattttttctgaagatgagaaagattctgatattaaattggttgtcgtgaagggaaatggaagggctttttgtgctggtggtgatgttgcagctgttgctcgtgatggaagtaaaggtgactggaagtttggtgcaaatttttttcaaagtgaatttaaattgaattacttgatggcaacat

SEQ ID NO: 2111 - DNA, 364 bp, Glycine max
  Clone ID: LIB3028-028-Q1-B1-H5
agaaattgctttgctgtaagtttctgattcctttcttcagaattccaagttttcatttcgttagggacaaaagattgtgagatagagtatggctggaaaaggcgagggtcctgctatcggaatcgatttgggaacgacgtactcttgcgtcggcgtgtggcaacacgatcgtgttgaaatcatagccaacgatcagggtaatagaactaccccatcctacgtggctttcaccgatacagaacggttgatcggcgatgcggcgaagaaccaggtcgctatgaacccaatcaacactgtttttgatgctaagcgtttgattggaagacgtttttctgatgcatcggtacaaagtgacatgaaactg

SEQ ID NO: 2112 - DNA, 412 bp, Glycine max
  Clone ID: LIB3028-028-Q1-B1-H6
aaaaattgatctgcagatcgtctctgatccgttgcttcaaaaatcgacgttttcactacatttgggacaaacaattgtgatgctacagtaacgctggaacaagggatggtcctgctatcggaaacgactagtcaactacataatcctgctacagcgtgtgtgatcaatactcgtggttgaatatcaatagccaaacgactctacaggtaagtaacatactgaccaccaatcggtactgtggcgtttcacctgaaatagaaccgttgataggttatacggtcacaaaccaggtcgctatgaacccaatcattactgtattagatgcaacacctatgattggtatacgtatttctgaagcatccgtacaaagtgacatgactcagtcgccgttcaaggttaatcctggacctgc

SEQ ID NO: 2113 - DNA, 393 bp, Glycine max
  Clone ID: LIB3028-028-Q1-B1-H7
ggccatttgccttttcaattttcatattaattcgatatttgtaatggctagcgagagaattctcaagccatcaaagtggttctcaaacaaaactctaagaattagtcttcatcgccgaagatcaagatcctcctccaataactcattatctagtaattctccaagtccaagatcccccatgtcaaacaatggagagatcactgggctaatggaggcttttcgtcactttgataatgatggagatgggaaaatctcggcctatgagctaaggtcataatttggggccaatgggggattaaaggttcaagaagaaggctgaaggggtcatcaaggaccaaaattccgatgggggaacatgtgtgggatttcagggatttcaccaagctcatgaag

SEQ ID NO: 2114 - DNA, 320 bp, Glycine max
  Clone ID: LIB3028-028-Q1-B1-H8
gtgtatctaacttaacttttcttctcaaaatccaagtattccttggctttgtggccatcatcacggtacacaagaagagatcacagaaattttgcggaggatttaccctcaccaggatgtataagaataaatcaatgctttgacggaatcaattgaaacggaactcaatgaataagcatcagcttcaaacagagtcatcatagtgaagctgctgaaaaccaaaactgtgagaagaggtttatatgctggaatgggccttcaaatcttccaagaatttgtggggattaacactgataagtactacaaccccagaagtgtgc

SEQ ID NO: 2115 - DNA, 336 bp, Glycine max
  Clone ID: LIB3028-028-Q1-B1-H9
tgaaaatcgccatcatgataaagcttgacactgtccacattgctgtcattaggggtaatgtcgtagacgttatctggctcagagggggaaatgatcctctctcagttggtaaaatactgacccgcatccatcacgccagaggtagtcacatttgccatgactatcggtacatatagatgctagacaattattgtgtcttctaagaggacatatacgggtgtcatcagtagtactcactcaacgaagatgtttgctcggtatgacatgaatactgaaagactgtattgatggcagctatgttccaattagcattattattggtctcctggatggtgt

SEQ ID NO: 2116 - DNA, 374 bp, Glycine max
  Clone ID: LIB3028-029-Q1-B1-A1
gaaagagatacatagttagagagagagcagagacaccgttcggtgctccgctgaattcggttgtggcccctgcgctccgctgcaattttacactcaaaaggacctcatgtctaacatagaggagaacaaagatctgggacagatggacgtggatgcatctgatgagtcagctaacatgccatcaccccaaaagcaggaggagtctgtaaagaaaaagtatggaggaatgctgcccaaaaagccaccactcatatctaaggaccatgaacgtgcttacttcgattctgcggattgggcacttggaaagcaaggcggagagaagcctaagggaccacttgaggctcttcggcctaaattacagccaacgcagcagc

SEQ ID NO: 2117 - DNA, 404 bp, Glycine max
  Clone ID: LIB3028-029-Q1-B1-A10
cagaacaatcgtatgcagttttaagccacctgcatcttttggtcatgcgtgcaccttatatattttcctcagactacaaacacttctattgccagtataatgagccatcatatgtcaaaaagttgaagcttgaaatgctgactgcagttgcaaatgaaagtaacacctatgagatagtgacagaattatgtgaatatgctgcaaatgttgacattcccattgcaaaggaatcaattcgagctgttgggaagatagcattgcagcagtatgatgtcaatgctattgttgatcgacttctccagtttcttgagatggaaaaggactatgttacttctgaagctctggtgcttgtgaaagatctgctaagaaaatatccacaatggagtcaggattgtattgctgtt

SEQ ID NO: 2118 - DNA, 414 bp, Glycine max
  unsure at all n locations
  Clone ID: LIB3028-029-Q1-B1-A11
gtggtaacaaaaggcaacctacttcgccgaagcgctcgcgaggcgaatctacagagtcttccctcagcagcactccctctcggattctctacagattcacttctacgaaacttgtccttaccttaagttcgcgcacttcaccgcaaaccaggcgattctcgaagcgtttcaagggaaaaatcgcgttcacgtgattgatttcggaatcaaccaggggatgcagtggccggcactgatgcaagcccttgcgcttcgcaacgacggccctccggttttccggctaaccggaatcggaccgccggcggcggacaactccgaccacctccaggaggtanggtggaagctcgcgcagctggcggagaggatccacgtgcagttcgagtaccgcggcttcgtcgcaaacagcctcgccga

SEQ ID NO: 2119 - DNA, 400 bp, Glycine max
  Clone ID: LIB3028-029-Q1-B1-A12
attgattgatactatactagtgagaaaagaaagggaagtcctccgcgccgccactcctctcatctctctgctctaaacgacaccgttttaagtcttctcctcaagtcatggccacactcaagagcctctgcttcagaggaactgcctttcccgtttgcccctccaatgtcaccaacaatagaaactccaagagctcatattggaggcctgcacaagcaaccgtgaagcccaatttccatctcccaatgcgcagttttgagttaagaaatacgacttctccagaggacataaatgctctgagattgataactgccattaaaactccatacctacctgatggtcgatttgatcttgaagcatatgatgacttggtgaatatgcagattggacaatgggccga

SEQ ID NO: 2120 - DNA, 331 bp, Glycine max
  Clone ID: LIB3028-029-Q1-B1-A2
gtgcattttgatagcagccatatcctagcccacttcgtcgattttacgttagaaaagaagtgacttggaatctgaatccaaatttgatgggttatcttcaatttggcagacatggtgttaagcagatcattagatttagagatgccagttatgataatgttgtggtaaacccactcctatatgcttcccaaggacttcgttacaagaggaagctccaagtcatccttacaactgacatagataagctgggaaaggcaggtgatactgtcaaagttgcccctggatattttcgcaaccacctaatggccaagctccttgccttccctaacat

SEQ ID NO: 2121 - DNA, 317 bp, Glycine max
  Clone ID: LIB3028-029-Q1-B1-A3
gggagcatgaaggagacagaggagatgttggagttctggaaagagaagggtctgagttcgatgattgaaatggtaaacatggattacattaacaaagcctttgaaaggttggagaagaatgacgtgagatacaggtttgttgtggatgtcaaaggcagcaaacttgtcgatcagtaaaagaaagaaagtatactactagcacgacacacgcaacatccatccttccatcatgaagagtctggaaaagttattaattaattgagaactaaagctgtatttgttgttcactctaaaaaagaagctgtgttttgtttatt

SEQ ID NO: 2122 - DNA, 364 bp, Glycine max
  Clone ID: LIB3028-029-Q1-B1-A4
cgttaccttacatattccatttgtctctgatcttccaacaccttattcctcagagaagagacaatttggatcaccatttcacttcagaaacctctctcattattcttctcctcatcacatccctctcctcccttgccaccgccaccaacatcaatatcctccaccatgacctccaatccgacatcaccgaattctgcaagaaaaccaccaaccccgccctctgtgccgagaccatccatccccacttcctcaagaacagaatcgagcccttcaatgcgctcgacatacaagtggacgccaccctggcgaaggcaaaaaaaaccctagccaacattcaaaccctagaatccaaaacgggcaccac

SEQ ID NO: 2123 - DNA, 364 bp, Glycine max
  Clone ID: LIB3028-029-Q1-B1-A5
cacgtctactctaaaggatcccctcggggaattccaattccacattttcaagaaataaggaggcaaaaatgttcatatatgaattggaattatttgttttcttattaggcctatcctgaagccaaaggaaatgagatcggaattcctcggggaattccaattccacattttcaagaaataaggaggcaaaaatgttcatatatgaattggaattatttgttttcttattaggcctatcctgaagccaaaggaaatgagatcggaattcctcagggaattccaattccacattttcaacaaataaggaggcaaaaatgttcatatatgaattggaattatttgttttcttaataggcctatcctg

SEQ ID NO: 2124 - DNA, 357 bp, Glycine max
  Clone ID: LIB3028-029-Q1-B1-A6
cttccaaaacccctccattatgaagaacgctaacagcaacacaaaactaatccttctccacccttatatccaaaaacaaggaagctccaatcgcctatggcttttagccttcatatccttctttacattagccttccttgccacccttatttacacaagagacacaacctcatcttcctctaccactacctcttccaccccattatctagtttcgctaacacccctttaccatccactgtaatcaacaccctcctccactatgcctccaaatccaacgacaccttccacatgccccactcagacctaaaaaccatctctgaactgctcccaaaggtgtccctcaacatgcaacttcc

SEQ ID NO: 2125 - DNA, 342 bp, Glycine max
  Clone ID: LIB3028-029-Q1-B1-A7
gatcggtgttcacttgatctcatcataatcgtcagcgtcaattgaagaagatgccgatcagaaacatcgccgtcggaaggcctgaagaggcgactcaccccgacacgttgaaggcggctttggctgagttcatctcaaccttcatcttcgtgttcgccggctcaggctccggcatcgcctacaacaagctcaccgacaacggcgctgccacccctgccggcctcatctccgcctccatcgcccatgcattcgccctcttcgtcgccgtctccgtcggcgccaacatctccggcggccacgtcaaccccgccgtcaccttcggcgccttcggcgggcgccaaa

SEQ ID NO: 2126 - DNA, 218 bp, Glycine max
  Clone ID: LIB3028-029-Q1-B1-A8
gcaagagaaggcaaactctcttaagttggtcagccattgaagtgtgaacgtcatagttagtaatgcagtgctatgtatgaagtgatttatggattaataaaaggcagtggctgtgcattttgtgctgctgtaaatgtgctttatggagtcatttatttagacgatagtgatacaatataaatgggaaattgtccgcttcaagtaaagcgttttgttac

SEQ ID NO: 2127 - DNA, 383 bp, Glycine max
  Clone ID: LIB3028-028-Q1-B1-H12
accacatcttcttcccaaccactactactcactcactgcagatctcaattgcatcgctgtccatggctaccatcgttagcatcaaggtccgccagatcttcgacagtcgtggcaatccaactgtcgaggtggatttgacttgctccgatggtacttttgccagagctgctgttccaagtggtgcatccactgggatttatgaggcccttgaattgagagatggaggatctgactaccttgggaagggtgtatcaaaggctgttgacaatgtgaacaccgtcattggccctgctttgattggcaaggagccaactgagcagactgctattgacaacttaatggttcaacagcttgatggaactgttaacgaatggggttggtgc

SEQ ID NO: 2128 - DNA, 392 bp, Glycine max
  Clone ID: LIB3028-028-Q1-B1-F9
ctcctttcttccatcttcttctcttttcacgtcattatcctaaacttgcagattttcacatcccaagcaacatgaaggggaggttcatgtttctgtcggtgctcctttgtgccacctttcatgtctccttctccattactgacggcttagtagcaaacggcaacttcgagctgggtccgaagccctccgccctgaaaggaactgtggtgattggtggcagccactcgatcccagaatgggagatctctggcttcgtggagtacataaagtccggccagaagcagggcgacatgctgctcgtggtccccgagggggcctacgcggtgcgcctcgggaacgaggcctccatcaagcagaggatcaaggtgatcaagggcatgtactactccatc

SEQ ID NO: 2129 - DNA, 416 bp, Glycine max
  Clone ID: LIB3028-028-Q1-B1-G1
caaaagcaaaagatgaagatccagtgtgatgtgtgtgacaaagtggaagcctccgtcttctgtcctgcagatgaagctgctctttgccatagctgtgatcgcaccattcaccgcgccaacaagcttgcaaccaaacacgcccgtttctctctccactaccccacctccaaagacttccctctttgtgatatatgccaagagaggcgtgcatatctattttgccaagaagacagggcgttgttatgcagggaatgcgacgttcctatccacagagccaatgagcatacccaaaagcataacaggtttcttctcacgggtgtgaagctctctggtacttgtttagattctgcttcgtcctcaacaatttacacaataataatagagtcactggctctgaaggaagaaacgacgctcga

SEQ ID NO: 2130 - DNA, 372 bp, Glycine max
  Clone ID: LIB3028-028-Q1-B1-G10
cttctggccatctgttctacagcagcctgattgtgacttgttaagtaaagagtattgttgagcttggtatctactatctaagttgataatctataatttatagttgaattgcatgtgagcaagaattatccagttaaaattatgtgactgaagggagcccacatagaataatagttttaatttgtatggatatgctagttgacttgaagcaaaatccatgttgtatgtgtttccatattttcgagctggcctaaaaacttgtatgttctttacttttctctttgctgcttaactttttctggttttgacgctatctgtaagctgtatttactattttgtaataaaatgtcatttaatgtaatagaaaaagag

SEQ ID NO: 2131 - DNA, 405 bp, Glycine max
  Clone ID: LIB3028-028-Q1-B1-G11
aggagatagtgaaagagcttcttcctctaattcgagtgtacaaggatggcagcgtggagcgtcttctaagctctgaaaacgtggcagcctcccctgaagatccccaaactggagtctcatccaaagacatagtcatcgcagacaacccctacgtctccgctcgcattttccttcccaaatcccaccacactaacaacaaactccccatcttcctctacttccacggtggcgccttttgcgtcgaatccgccttctcctttttcgtccaccgctatctcaacatcttggcctcagaagccaacataatagccatctccgtcgacttcagactcctcccacaccaccctatccctgctgcctacgaagacggttggaccaccctcaaatggattgctttccacgcca

SEQ ID NO: 2132 - DNA, 403 bp, Glycine max
  Clone ID: LIB3028-028-Q1-B1-G12
caccagtttcaccgcacgaatatcttgttgtttggagcgatccgagaaaaactctgtaaacatgttggtttaccaggacctccttacaggtgatgagcttctctctgactccttccgttacaaggaaattgagaatggaatgctgtgggaagttgaggggaagtgggttgttaaaggagcagttgatgtagacattggtgcaaacccttctgctgagggtggaggagaagatgagggagttgatgatgcagctgttaaggttgttgacattgttgactcattcagacttcaagagcaacccgcattcgataagaagcagtttgttaccttcatgaagaggtttatcaagaatttgactcccaagctcgatgcagagcaacaggagttgtttaagaagcacatc

SEQ ID NO: 2133 - DNA, 346 bp, Glycine max
  Clone ID: LIB3028-028-Q1-B1-G2
ctctctctgagtcggtcgagttgaatcggtgtgagtcagtgaccgagtcgaaccatgtcggacgaagaacaccatttcgaatccaaggccgatgctggagcctccaagacctatcctcaacaagccggaaccatccgcaaaaacggttacatcgtcatcaagggtcgtccctgcaaggttgttgaagtttctacttccaagactggtaagcacggtcatgccaagtgtcactttgttgggattgatattttcactgccaagaagcttgaagatattgtgccctcttctcacaactgtgatgttccccatgttaatcctactgaataccagttgattgacattgctg

SEQ ID NO: 2134 - DNA, 353 bp, Glycine max
  Clone ID: LIB3028-028-Q1-B1-G4
gtttcaatcccctgttattttttcagagtgatcagaagagtaaaactagtaaaaaatttgctgctgaagctgggctccctgtgctgacaaatgtattacttccgaaaacaaaggggtttcatgcttgcttggaagctctgcgaggctcattggatgcagtatacgatgtgacaattgcatacaagaatcagtgtccttcctttctggacaatgtttttggtgttgacccttcagaagtgcacctgcatgtgcggcgtattccggtggaggagattccagcttctgaaaccaaagctgcttcttggttaatcgacacattccagattaaggaccaattgctttcggatttcaag

SEQ ID NO: 2135 - DNA, 383 bp, Glycine max
  Clone ID: LIB3028-028-Q1-B1-G5
ctcgagccgaatcggctcgagaccttacctctgttactacaactcttcaatggcttctagctttcaaagttcaccaatggcttccaactacagaagccataataagaaaagccacgacaatgacatgttccatccaacccaagtggtggtggttgtggtgcctttcccagcacaagggcacctcaaccagcttctcaacctctctcgcctcatcttggcacacaacatacccgtccattttgtaggttcgcccaaccacaatcgccaagtcatagttcgttgccaaaggttggaaccaaaccttaattaacacaattcaagatcacacaactccaaggttccccctttggtttcccctgcccccaacccaaatgctgaaacaa

SEQ ID NO: 2136 - DNA, 406 bp, Glycine max
  Clone ID: LIB3028-028-Q1-B1-G6
aaaatccttgggaacagtaattggttttgccatttcaaagctgggaaagaacattcaagtactttcaagttcctttgtcaataagcaagaccaatacactgtggaaggagtgcagaatcttggagacaaagcagtgatgtgtcataggctaaatttcagaactgcagtattttactgccatgaagtccgtgaaacaacagctttcatggttccattggtggctggtgatggaaccaaaactcaggcacttgctatttgccactcaaatacttctggaatgaatcatcaaatgcttcatcaacttatgggagttgatcctggaactaaccctgtttgccatttccttggaagcaaggccattttatgggtacccaatttatctgtggacactgcctatcagaccaac

SEQ ID NO: 2137 - DNA, 383 bp, Glycine max
  Clone ID: LIB3028-028-Q1-B1-G7
atctgcttctcactgatctccattcccattccatggcttccactgaatcatcccctttcaagaaaattcagattcaaagggatgacactacatttgacgcatatgtggttggaaaagaggatgctcctggaattgttgtgattcaggagtggtggggtgtggattacgaaattaagaaccatgccgtgaagatttctcagcttggtagtgggtttaaagctcttattccagatttatacagaggaaaggttggtctggatgttgctgaagctcagcatttgatggatggtcttgattggcaaggtgctgtgaaggatattgctgcttcggttaactggcttaaagcaaatggctcaaagaaggctggtgtaactggattttgt

SEQ ID NO: 2138 - DNA, 385 bp, Glycine max
  Clone ID: LIB3028-028-Q1-B1-G8
ggctcgagctttgcacgtctcaatctgagtcttcacttcatcgtttttgggattctctctctcaataatggcagcacgctttcaatctgcagctatctgaagctgtgaggccagactctctcatttcatttccatcccgtgtttaaattggaagctggaacctagtttatgccctgcttgatttggttgctcttaacccttttcagaaatcaaaagcacttgcaagttccattctttcagttttatcatcaggtactatgctggtgttccctatagggaaagatgaaattgaagtctaagaaatgatggaaatctattgtaccacttcatttgaaaggaaaatccgcaagccgtttttctttatttcgcaaagtcaattctgctg

SEQ ID NO: 2139 - DNA, 398 bp, Glycine max
  Clone ID: LIB3028-028-Q1-B1-G9
atattgtgccctccctctttctaactatttccctctcttaacacaattaacaaagatatatcatatcatatcaactccaaatgatgaaaaatattgggttgtttcttcttgtggtggtggctacttttgtggtggcagccacagctggtagcttttaccaagactttgaaataacatggggtggtgagcgtgccaaaatctatgaaaatggaaatcttctcaccctctccctagacagagcctctggctctggctttcgttccaaaaaagaatacttgttcggaaaaattgacatgcagctcaagctcgtgcctggtaactctgctggaacagtcactgcctattatttatcttctctggggcctactcatgacgaaatagacttcgagtttttgggt

SEQ ID NO: 2140 - DNA, 389 bp, Glycine max
  Clone ID: LIB3028-028-Q1-B1-H1
gcctcgctctgtttctgtctctgtgtttgcggctgaggattccgaacgagcgaccttcttcgtttctcgcaaagtttaagtcatcatgggtaaggaaaagactcacatcaacattgtcgtcattggacatgtcgactctgggaagtcaactaccactggtcatttgatctacaagcttggaggtattgacaagcgtgtgattgagaggttcgagaaggaggctgctgagatgaacaagaggtcattcaagtatgcctgggtgcttgacaagctcaaggctgagcgcgaaagaggaattaccattgatattgctttgtggaagtttgaaaccaccaagtactactgcacagtcatcgatgcccccggacatcgtgactttatcaagaaca

SEQ ID NO: 2141 - DNA, 365 bp, Glycine max
  unsure at all n locations
  Clone ID: LIB3028-028-Q1-B1-H11
ctcgagccggtcttcctcctcatctctacactactccacatagagcccagcctctcaagcccaagcccaagcccaagcccaagcccgttcataaaatcctcctgcagcagcacccagtacccagccctctgcgtctcatccctctccgtctacgcctccagcatccaacaggaccctcaccaactggttcagacagcactctccctctccctgaaccgcacccaagccaccaaaaccttcgtggctaactgcaacaaattcagaggcctgaaacccagagagcacgctgcactcaaggactgcgccgaggaaatcagcgacagcgttgaccgcctcagccggtcgctgaaggagctcangctatg

SEQ ID NO: 2142 - DNA, 417 bp, Glycine max
  Clone ID: LIB3028-028-Q1-B1-F7
tggacgtatcacatattttttaggttctgcaaaaagcaaagactcagatagatgctatccaaccagtatcttgggcggacatgattgctgtggctggagctgaagcagttgaagtatgtggaggtccacctattcaagtttcactgggcagattatatacactggtgcctgatccagaagggagacttcctgaggaatctctcaatgcttctggtttgaagaaatgtttccagagcaaaggcttttcaacacaagaacttgtggctttgtctggagcccacactattggcagtaaaggttttggaagcccaatttcttttgacaattcatattataatgttcttttggagaagccgtggacgtcttcatgtggtatgccgagtatgattgggcttccttcagatcacgctcttgttg

SEQ ID NO: 2143 - DNA, 273 bp, Glycine max
  Clone ID: LIB3028-028-Q1-B1-E11
cctactcgcatgccttgtactcctaaatccaacaatagagttagacattgaattgctttctatcaaacaaagtccattcgggactcccgtaaagatagttgaaggttaatgcaatgatttaatattcagagtgctattttgacattttaagagaagaaaatgatgtcgtcccacctaaaggcccttactttttcccatgatgttaatgaaccgaaaatttaacctgtttctagactgattccaacctattattagaaaaaaagaataagtttg

SEQ ID NO: 2144 - DNA, 325 bp, Glycine max
  Clone ID: LIB3028-028-Q1-B1-E2
atctttgtcatattccaaaattaagcttgcattattcaccagaatggctaattcatatgaaaacaacttcccccctcagaagcaagacactcagcctggcaaagagtacctcatgaatccaccaccccaatacaacagctcccaatacaagccatcaaataaacttcagggaaagatagctgtagtaaccgggggtgattctggaattggacgagccgtgtgcaacttgttttcattagaaggtgctactgtgatcttcacctacgtgaaggggcaagaggacagggacgcgagtgacacgcttgagatttataaaaaagctaag

SEQ ID NO: 2145 - DNA, 345 bp, Glycine max
  Clone ID: LIB3028-028-Q1-B1-E3
gtcagatcccgctgtctagcggaaacaaacaaaggcagaaaaccatttcctccttaaatctgttcctattttcattttcatttcaacttaacgttttcatgggtattcgcttttcgtcctcccaggcggcgccgtcggaatcgtcgccggcgtcgagtttgggcgaattgcccgagagttgtgtcgctcagatcatgacctacatggatccgccccagatttgcaagctcgcaaccctcaatcgcgcttttcgcggcgcttcctccgccgatttcgtctgggagtccaagctgccgcccaattacgacgtccttctccgccgcatcttcgccgatttcccctccc

SEQ ID NO: 2146 - DNA, 340 bp, Glycine max
  unsure at all n locations
  Clone ID: LIB3028-028-Q1-B1-E4
ctttgttcgacccagaggagctcacacagtggtccttctatagagccctcatcgctgagttcatagcaacccttctcttcctttatgtcactgtgctcaccattattggctacaaaaggcagactgatacaacggtaggtggcaccgactgtgatggggttggcattttgggcatcgcttgggcctttggtggcatgatcttcatccttgtttactgcaccgccggtatttcaggaggacacataaacccggcggtgacattcgggttgttcctangacgcaaggtgtcgttgataagggcgttgttgtacatggtggcacagtgtgccggtgctatctg

SEQ ID NO: 2147 - DNA, 380 bp, Glycine max
  Clone ID: LIB3028-028-Q1-B1-E5
gaaaaaaaacacacacacacgcactctgagcgaaagaaaaacgaacaagaaaaaatcggatgagctatacatttcttagcagaaacttcaccggacctgagaattgagaaagtgtagtttgagtttcacatcaaaagattgtgtgtaagaagcgttttcttcagatcgatggaatatcttgggattgatctaagctgcgccgttggatctctccgccacggccagttaccggagaaggactgcttgctccctctcatttccaaactcctcggctacgccatcgtcgcggcttccaccaccgtcaaactcccccagattatgaaaattctgaagcatcagagtgtgagaggacttagcatgatatccttcgagcttgaagt

SEQ ID NO: 2148 - DNA, 420 bp, Glycine max
  Clone ID: LIB3028-028-Q1-B1-E6
aaaagaaaaaaaatgggttcttctctgtggacctgtctgattttgttatcacttgcttctgcttccttcgccgccaacccaagagcaccaattgatgtgccatttggcagaaactatgtgcctacctgggcctttgatcacatcaaatacctcaatggtggttctgagattcagcttcatcttgataaatacacaggtactggcttccaatcaaaagggtcctacttgtttggtcacttcagcatgtacataaaattggttgctggtgattcagctggcacagtcactgctttctatttatcatccacaaactcagaacatgatgaaatagaccttgagttcctgggaaaacagacccgggcacctttaaattttgcaaacaaatgtgttcaccggtggcaagggtgacagagaacaaag

SEQ ID NO: 2149 - DNA, 348 bp, Glycine max
  Clone ID: LIB3028-028-Q1-B1-E8
agatgactggggggggtatcactatgcaatcgacgccgggaagctcaggatacttggatttgtatccagagcggaagatgtcctttttcaaaaatccttacattctcggactggctgctgtcgccggcatcggtggtctcctcttcggctacgacactggtgtgatatcaggggctcttttatacattaaggatgattttgaggaggttagaaacagcaatcttctccaggaaacaatagtcagcatggctattgccggggcaatcctgggaacagcattgggtggttggattaatgatgcctaaggtccaaagaaaggcaacctccttggcgaagttaaccttaacg

SEQ ID NO: 2150 - DNA, 391 bp, Glycine max
  Clone ID: LIB3028-028-Q1-B1-E9
agaaaatacaagccgtagaagagggctcgctctttcgtgtttttgttcgcgaaggaaactctatccttagctatcgcgatggatcggtaccagaaggtggagaagccaagagctgaaactccaatcgatgaaaacgagatccggattactagtcagggaaggatgcgcaactacattacttatgccatgagcttgcttcaggagaaaggttctaatgaaattgttttcaaagcaatggggagagctatcaacaaaaccgtgacaattgtggagttgatcaagaggagaattgtgggcctccaccagaatacagcaattggatccactgatatcactgatacttgggagcccctagaggaaggcctccttcctttggagacgacaaggcacg

SEQ ID NO: 2151 - DNA, 410 bp, Glycine max
  Clone ID: LIB3028-028-Q1-B1-F1
gcaatggcttctctggcaagcttagctgttgttcaaccatctactgtcaagggccttgctggaactaagctctctttcaagccctctcgccagagcttcagacccaagaatttcaggagtggtgccgttgtagcaaagtacggtgacaagagtgtgtactttgatttggaggatctaggcaacactactggtcagtgggacttgtacggctccgatgcaccttcaccctacaaccctcttcagagcaagttcttcgagacattcgccgctccattcacaaagaggggattgttactaaagtttttgatcctgggaggtggttccaccctggcatacttgagtgccacagcgtcaggtgacatttctacaatcaagaaggggccacaacttccaccaaagcaaggtccccg

SEQ ID NO: 2152 - DNA, 346 bp, Glycine max
  Clone ID: LIB3028-028-Q1-B1-F10
ggtcgactctagatgataccctcggggaattccaattccacattttcaagaactaatgaggcaaaaatgttcatatatgaattggtaatatttgttttcttattaaggctatcctgaagccacaggaaatgagatcggtattcctcggggaattccatttcacaatttcagaaagtatagaggcaaaaatgttcatatatcaattggcattaattgttttcctattaggcctagccggaagccatgggaaacgatatttgaaatcctcggagatttccaattccacattttcaagaaataaggaggcaaaaatgttcaaatatgaattcgaagtatttgttttcgt

SEQ ID NO: 2153 - DNA, 387 bp, Glycine max
  Clone ID: LIB3028-028-Q1-B1-F11
cacattctcatggcccaaacccttcagcaagtgatcttgagtctgcaacgaattcccattacaaattattaggctcacacttggggaaggagtggaatgcttcggggcctatgcacgtggatttgctagagggtgccttgcaacgccaaacatcagttgaactccaaactaatctctggtctccctggctttccaaggatggaagtcttgtactgagcgtccaaaaccaccttgtgagttcaaattgaatattgaatttcattttcttttacacattggacatttatttctcaagaaaacgagggctctgttatctgttggtagtgtctggtattttacatgtttctttttacttataatttcttgcagcactacctgaaaagtcat

SEQ ID NO: 2154 - DNA, 401 bp, Glycine max
  unsure at all n locations
  Clone ID: LIB3028-028-Q1-B1-F12
aaaagtgacacaccaaatcaaagacacctgagccattcaattcccctcctttattgctttcaagtttcaacactaattttattatctgaaaaaatggctttcaaagtttcgtttttccttgcacttgttctagtttccaatatcctcctccttgatacaacagctgctggacgcagcattggcgaaaactccaactcagaggaaaagaaagagcctgagttcttgttcaagcatgaaggtggggtgtatattccagggattggacctgttggatttccacataaatttcatctcacacctcaaaatccattacctggtggcaatggaaatggaagagcaagaaccgcaacaggatcaggatcaccaccaggtancagttatgttcctggtggtgatgacac

SEQ ID NO: 2155 - DNA, 338 bp, Glycine max
  Clone ID: LIB3028-028-Q1-B1-F2
gaagagctctcaaagattgcgaaggaaaagaagttgaaaggttttgagtttataaaagcagttcaccttgactcaattccatttgacatggaacgtgaccttatcactccaacatacaagaagaagaggccacagttgcttaaatactatcagaatgccattgacaacatgtataagagtggaagtaaacccagtgcctgagacctgatttgggagataatttattttctgtatgtgatggtgtttgtctccgttcaattgtttccttttggtgactgtatatacgctgagtagttatatatggatacgtcatttaatttgagtttttttttcacgtc

SEQ ID NO: 2156 - DNA, 368 bp, Glycine max
  Clone ID: LIB3028-028-Q1-B1-F4
ggcactcaacattttacactcttttcttcttctcgttgttgcttcgctgttgaatcatggatcagaaggtcgatttcagcgctccccattccatgggaaccactatcatcggcgttacttacaacggcggtgtcgttctcggagccgactctcgaaccagcaccggagtgtatgttgccaaccgagcatcggacaaaatcactcagctcactgataatgtatacgtgtgtcgctctggatcggctgctgattctcagattgtctctgattatgtgcgttacttcctccatcaacacacaatacaacttggacaacctgcaacagttaaagttgctgcaaaccttgtccgacttctctcatataacaat

SEQ ID NO: 2157 - DNA, 393 bp, Glycine max
  Clone ID: LIB3028-028-Q1-B1-F5
gcaacacaacaaaaaaagacaacacagagagaagcgtcttaataaacgctcttctctgaaaaacctgatttcttctcttcttctcttctctttcgtttcgatcttcgatctctgaaaatgagagagtgcatttcaatccacatcggtcaggccggtattcaggtcggaaacgcctgctgggagctctactgcctcgaacacggcattcagcctgatgggcagatgccaagtgataagactgttggtggaggtgatgatgctttcaacaccttcttcagtgaaactggggctggaaagcacgtgcctcgtgcgatttttgtagatctcgagcctactgtgattgatgaagttaggactgggacataccgccaactatttcatcctgagcagctc

SEQ ID NO: 2158 - DNA, 401 bp, Glycine max
  Clone ID: LIB3028-028-Q1-B1-F6
cactcataacacaaagcacaaagcaaagctcatccttgagttaaaaaatggcagcagcttcttccatggctctctcatccccatccttggctggcaaggccgtgaagctgggcccatcagccccagaagtgggaagggtgagcatgaggaagaccgtcaccaagcaggtctcctcaggaagcccatggtacggcccagaccgagtcaagtacttgggcccattctctggcgagcccccgtcctacctaaccggtgagttcccatgcgactacggctgggacactgctgggctttccgcagacccagaaaccttcgccaagaaccgtgaactcgaagtgatccactccaggtgggccatgctcggagccttgggctgcgtcttcccggagttgctgtcccgc

SEQ ID NO: 2159 - DNA, 401 bp, Glycine max
  Clone ID: LIB3028-028-Q1-B1-E10
gaaattttaaccaggttaaataaaatggctggttatgatcctgatgaagagattggactatacgaggaaattaagtttgagccaaatgttatgtgtgaacctattgataagaaagtaacatttcgagcaagccagttagaagatggagatattatatgctttcagaaagctcctgctatagacaatgaacacgtccgctatccagatgtgccttcataccttgaatatgtgcacaatcgccaggttgttcactttcgatctctagaaaaaccaaaggaagatgacttctgcctggagatgtcaaggctctatacatatgatgatgtggtggagaaagtggctcaacaacttggtttggatgatccatccataattaggcttaaccctcacaattgctactc

SEQ ID NO: 2160 - DNA, 426 bp, Glycine max
  Clone ID: LIB3028-028-Q1-B1-C4
aaacattataatttctattacatacattttgtagctaggatgagcaagttactactcattcgtgttgctgggttcgtggcaacctttgtcaccatggtgatgatgatggtgcccaaaaacgtgagtgcccaaaacataggtgatgacatcgtcacacaagacttcttcaacagcataatcagtcaggctgatgatggttgtgcagggaagaacttctactcacgagatgctttccttaatgctcacaattcctacaatgagtttggtaggcttggtaatcaggatgactccaagcgtgaggttgcagctgctttcgcccatttcacccatgaaacaggacatttttgctacatagaacagattaacggtgcatcaggggactactgtgacgagagcaacaccgagtacccatgtgcccctaacaaa

SEQ ID NO: 2161 - DNA, 342 bp, Glycine max
  Clone ID: LIB3028-028-Q1-B1-C5
gtgggtttggcgaaaccttctagaattttcttccatggaggttatcagagttctaacggcggcgatcacggtggcggttctcgcggcggcgcttccggcagacgccggcgacgacaaccgagtattcgcgccgtgttcggacacgcgagtgcagagatccgacggattcacgttcggaatcgcgttcgctccgaaggacaagttcttctacaacaacaacaacagcgttcagttgtcgccgtgcgatacgaggctctcgctctccaatgcgaattctcagatctccgtgttcagacccaaggtcgacgagatctcgctcctcaacgttaactcctcctcgtt

SEQ ID NO: 2162 - DNA, 402 bp, Glycine max
  unsure at all n locations
  Clone ID: LIB3028-028-Q1-B1-C6
agttgatctcagtttaagtggttggtaatgtggaataaggttaaacggctagatattgtagaaaatattcaatgttccatctgttatgatcatagtcaacaaatcatgtagagaaaatatacttttatccccaggatcagtttattttgtcaaaataattcttttttctttttgtaagcttcccaagacaagtaatgccaaatggagtatttccttaaaattgattgttacccaacatgtataaagtattgagttgctactattgctgtttatttagggctaataatttcttttttatgttgtatggtggcagatgccattttcggatcntgtaggtgccatgaacttaattttcacatgatggtggtcacggtttttccttttgatgcatttcccaccctg

SEQ ID NO: 2163 - DNA, 377 bp, Glycine max
  Clone ID: LIB3028-028-Q1-B1-C7
agatgactacccttatgctgttgatggactagagatatggagtgctatccagacatgggttaaggactacgtctccttgtactatgccacggatgatgcagttaagaaagactcagaactccaagcttggtggaaggaagctgttgagaagggtcacggtgacttgaaagacaagccatggtggcctaagttgaacactcttcaagatctgattcacatttgctgcattattatatggactgcttcagcactccatgcagctgtgaatttcggacaatacccttatggcggtttcatcctaaatcgtccaactctaaccagaagattgctcccagagccaagaaccaaagaatatggtgaactttacagtaatcatc

SEQ ID NO: 2164 - DNA, 363 bp, Glycine max
  Clone ID: LIB3028-028-Q1-B1-C8
tgaatctctcttgcaccataattcaacagaaaagagtgttgaagaataaagtattcattgcatgtgctacatttctctgacttaaatgtggaagttcaatggtgctctcggatgaaagatttgaatatgaaaatcaatttggctaaaccaacatttgatggaagatgcctttcatgtaaaagtacacttaggcaatgtaagatgtaacacactgttcaattcgctgattttttgtgtttcccagtgcaaattttctgtgatttgcacaattttgtgcaacattatgtaatatgttctagtggaactattttccgaaaaaaaaaaattgctcacaaagccagaaaacaaaaaataatgaaaaag

SEQ ID NO: 2165 - DNA, 375 bp, Glycine max
  Clone ID: LIB3028-028-Q1-B1-D1
gaagattatgttcagagagtgaggcaagttcatgaatctggtggttatgggtctagagggtatgcatatgactggaagagagaggaagcaaataaaaaccttctgcgaacccatacaactgctgtttcctccaggatgctttaccaattagcacagaaaccatttgcccccaaaaaatatttctctatagatcgtgtattcagaaatgaagcagttgatcgtacacatcttgctgagttccaccaaatagaaggccttgtatgcgatctaggactcactctctgtgacttaataggagtcctacatgatttcttctcacgcttaggcatgaccaagctgaagttcaaaccagcttacaatccatacaccgaacct

SEQ ID NO: 2166 - DNA, 388 bp, Glycine max
  Clone ID: LIB3028-028-Q1-B1-D10
tcttacttcaactgaaagagaacaacacgtttcccatagatctcaccaatgataacatcaaagcagtgctcttgaacttacttgtaggagctacaggtacaactgaagtcacaacaatctgggccatgactgaactaataaaaaatccaagcattatgaagaaagtgcaagaagaaattagaggcttaagtggtaagaaagatttcttggatgaagatgatattcaaaagttttcctacttaagggcagtgataaaagagacacttagattgcacttaccagcaccactacttataccaagagaaacaaataaaaaatgcatgttagatggctacgaaattccagccaagacattattatatgtgaatgcttgggcaattcatagaga

SEQ ID NO: 2167 - DNA, 378 bp, Glycine max
  Clone ID: LIB3028-028-Q1-B1-D11
caaacccatttatagcaccaaccctttgatcattcccacgtgtaaagtgaggccaagagtgcaatactgtggcaccatgatcaagagttctttgatagagcctgatgggggggcattggtggatcttgtggtgcctgagggtgagaggggtgctaagatcaccttggctgagtcactgcctaaggtgcagctcacaaggattgatcttgagtgggtgcatgtggtgggggaagggtgggctagtcccttgaaagggttcatgagggaggatgagtatcttcagagtttgcatttcaattcccttaaggtcaaggatggttctgtggtgaacatgtcccttcccattgttttggccattgatgatgagaccaaagagag

SEQ ID NO: 2168 - DNA, 401 bp, Glycine max
  unsure at all n locations
  Clone ID: LIB3028-028-Q1-B1-D12
gtgcgatcccagtgttagtgtgtatttcctctcttctcactccgggatcgatattttcaagaacagatcgaaaagccgttcatcgatttgttggatctgtgagtgagaagatggttactaagacagaggagactcaattgaacaggctcgaaaaccaggtcgataacggcggcggcggcgcgtgggagtacctctgcctcgtgcggaagctcaaagttcggcggtcggagaaagttctgaagcacggtctctccatcttgaacgacctcaaacaacgatcctctctcggctccgatgaatggaccttgtatgagcaggttgctgttgctgctatggactgccaatgtctcgacgttgccaaggactgtacaaaggttcttcggaagagattcctanagagt

SEQ ID NO: 2169 - DNA, 374 bp, Glycine max
  Clone ID: LIB3028-028-Q1-B1-D2
cataaccatcaagtttcagttccaaacataacccatcaaagtctttctccctcagtgatcatatattcattcagttctatacaaaatcctcaaaaactcttcctctctgccatgaccatggaatacagaaccttagaactcaacatcatatccgcaaaggacatcaagaatgttaatctcttctccaagatggacgtatacgccgccgtttcgctctccggtgaccctctcgaccctcagggcgccaccacccacgtccacaaagactccggcagcaaccccacgtggaactaccccgtgaaattctctgtcaacgaatcgctggcgaatgaaaatcgtttatctcatgagatcaagctcatctccgaccgcac

SEQ ID NO: 2170 - DNA, 362 bp, Glycine max
  Clone ID: LIB3028-028-Q1-B1-D3
gcaagcgcttctcctctttgtgttctggctatgcttcttggcaagagttagatcggacgaggattgcgtgtacacggtgtacgttcggacgggttcgatcatcaagggaggcaccgattcagtaattggtctgaagctatacgacaagtccggctacggcatatacatcaccaacctcgaggcatggggcgggttaatggatccgggtcacaactactacgagcggggcaacctcgacatattcagtggtagaggcccttgcttggaagcacccgtttgcgaggccaacctaacttctgacgggtcggggccccatcacggctggtacgttaattacgtcgaggtcaccaccactggggtcc

SEQ ID NO: 2171 - DNA, 406 bp, Glycine max
  Clone ID: LIB3028-028-Q1-B1-D4
ctttaagattctctaccgttcaacgcaacactctcaattccatctactcttcgttcccaatatgacggagtgcatgacggacttggctcaagctgccgcatgccgaaacggcacgacggcggcacacttaaaagtgatttccatctttatgatttttgtgaccagcgtgacaggcgtatgtgcgcctgtcacactggcacgatactttcagggaaagtccctctacaacatagccatcttgttaatcaaatgctttgctgccggcgtaattcttgcaacctcattggtccacgtgttgccagacgcctttgctgcactctccgattgccaagtggcatcccagcatccctggaaggactttccctttgctggcctggtgacccttaatggggtgctaatggccctg

SEQ ID NO: 2172 - DNA, 366 bp, Glycine max
  Clone ID: LIB3028-028-Q1-B1-D5
gcataaaatgtcaaatacaagtttgcttgatttccaatacagcctctcaaggaaaaaatacctgaggaagccatcacgtctgttctcctgggaccggcagaactcggggtcgaagaatgtatttcctcagcctaaggctgatgagatgaagcaggtgtttgacaagtttgattccaataaagatgggaaaatttctcaacaggagtacaaagccaccatgaaggctctaggcatgggggactcggttcatgaagtgccgaatattttcagggtggttgatttgaatggagatggattcatcaacttcaaggaatttatggaagctcagagtaagggtggcggggttaggatgatggatatacagag

SEQ ID NO: 2173 - DNA, 54 bp, Glycine max
  Clone ID: LIB3028-028-Q1-B1-D6
gtggttgcaagggatattatataatatatatatatgttttgccgtatctattcc

SEQ ID NO: 2174 - DNA, 297 bp, Glycine max
  Clone ID: LIB3028-028-Q1-B1-D7
cataattccctaaccggtggaccgaaaaattaagcaccgaaacgtgacccttccaatctcgcaacgcaagcgacaacactcgtcacagctcagcacagcaaaatcacaactcccctgtgggacatttttacaaacaccttctgcctacaaataaaagtgatttcagttttcaagtactcgtagtggttgggtttgaggatgagtttcagggaagagagtggcgatgcgagggatcttcagaaaccgttcctccacacggggagttggtacaagatgggttccaggcagttcagcatc

SEQ ID NO: 2175 - DNA, 304 bp, Glycine max
  Clone ID: LIB3028-028-Q1-B1-D8
caagcaaatgaagcaaaggtagaagggaataagctttttgtagaagggaagtatgaagaggcattattacaatatgaacttgctttacaagcagcaccagacatgccttcatctgtggaaatacggtcaatatgccattcaaaccgtggtgtgtgctttctgaaactgggaaaatatgataacacaattaaagaatgcacaaaagcattagaattgaatcctgtgtacattaaagctttggtaagaagacgagaagctcatgaaaagcttgagcattttgaagaggctattgctgatatgaaaa

SEQ ID NO: 2176 - DNA, 362 bp, Glycine max
  Clone ID: LIB3028-028-Q1-B1-E1
gtttctcgcaaagtttaagtcatcatgggtaaggaaaagactcacatcaacattgtcgtcattggacatgtcgactctgggaagtcaactaccactggtcatttgatctacaagcttggaggtattgacaagcgtgtgattgagaggttcgagaaggaggctgctgagatgaacaagaggtcattcaagtatgcctgggtgcttgacaagctcaaggctgagcgcgaaagaggaattaccattgatattgctttgtggaagtttgaaaccaccaagtactactgcacagtcatcgatgcccccggacatcgtgactttatcaagaacatgattactggtacctcccaagctgattgtgctgt

SEQ ID NO: 2177 - DNA, 389 bp, Glycine max
  Clone ID: LIB3028-028-Q1-B1-C3
atttctaaaacagcgtttgcttttgtgtttggtcttagacgcagcacgcccccaccactgtttcaaccctcaaattgtgtcttcttcgctttctggttttgattaagttttgttccatttgaaacaatattcatcgatccatcgccaaacatgccttctagtcacttgcttcttgaggaacctattaggatggtctccatccttgaaccatccaagcctagttttttctctgcaatgacaaagattgttggtaccctggggcctaaatctagatccgtcgaaactatttctggttgtctcaaggctggcaagtccgttgctcgttttgacttttcatggcatgaccctgagttacacaggagactttggagaatttgaaggctgctatc

SEQ ID NO: 2178 - DNA, 376 bp, Glycine max
  Clone ID: LIB3028-028-Q1-B1-B1
cgacgatgaagacaaccttctgatccgtcaagtggtgccggacgcggaggaccaccacctgctcaacgcggagcaccacttctccgccttcaagacaaagttcgccaagacctacgccacgcaggaggagcacgaccaccgcttccgtatcttcaagaacaacttgctccgcgccaagtcgcaccagaaattggacccctccgccgtccacggcgtcaccaggttctccgatctcactccgtctgagtttcgcggccagttcctcggcctgaagccgctccgccttccctccgacgctcagaaggctccgatccttccgaccagcgaccttcctaccgatttcgattggcgcgaccatggagctgttaccggcgtc

SEQ ID NO: 2179 - DNA, 394 bp, Glycine max
  unsure at all n locations
  Clone ID: LIB3028-028-Q1-B1-B10
gacgcggatgaggaggagacggagtcgtcgaggcggatggttgttaatggggagggccaccgggagaacggttttcgggttgcgcccgtcgagggtgacgacgtggaggacgaggatgacgaggatgattccggggaggagattgatgaggaggagggggatgacgatgatgtggtggaggttcatgagattgaagatagtgatgatgaggatggagtggaggagtacgatgacgaggacgatgacgaggatgatgatgaggaggaggaagaggtggataacgacgagggtgattttgcggaacccgagagtaccgggaggctgacgagtactgatggggagattgatgggcatgagcaaggggaggangatggggatgacgatgataatgggg

SEQ ID NO: 2180 - DNA, 388 bp, Glycine max
  Clone ID: LIB3028-028-Q1-B1-B11
gagttatagaggcattgttgctgtttggaaacagatctctgatctgaaaatgagtgcatcgaggttcattaagtgcgtcaccgtcggcgacggcgctgtcggcaaaacctgcttgttgatttcctacaccagcaacacttttcccacggactacgtgcccacggtttttgacaatttcagtgctaatgttgtggtggatggaagcaccgtaaacctggggttgtgggatactgctggtcaggaggattataataggcttagacccttgagttatcgaggagctgatgtatttatacttgccttttctctcataagcaaggctagctatgaaaatattgcaaagaagtggatccctgaactaaggcattatgcccctggtgttccaata

SEQ ID NO: 2181 - DNA, 386 bp, Glycine max
  unsure at all n locations
  Clone ID: LIB3028-028-Q1-B1-B12
gtggtgagtatcatacctgtgctttgacagattctggcgaagtatatacttgggggaatgatgtttgttgtgcacatttattgattgaacggagaactacaagtcagtggataccacaaaaacttggtggatccttagatggtattagtatctcaagtgttgcctgtggggaatggcatactgcaattgtctctagttgtgggaagttatttacttatggagatggtacatttggggttcttggccatggcgatcttcggagctattcaagtccaaaagaagttgaatctcttagtggtctacgggtgaagtctgctgcttgtggatcatggcatacggctgctattgttgaagtcatgtntgaccgtttcaagtacaatactgct

SEQ ID NO: 2182 - DNA, 319 bp, Glycine max
  unsure at all n locations
  Clone ID: LIB3028-028-Q1-B1-B2
cctgcactaaggggcattgagttccctacacgttcggatgttgatgtatgaaagctgggtagcttataggtttgaacatttttttcattaaatgatgtcatttatgcttacttcatgacagtgcagcgtanggcatgaaagtaatactctacttgattgctgatgttttaaattatagaattgtccagtagatgtatatatgtaatgttcgattcagattgttttgattattcttataatctaagaacctgtgatcttaangggactaaatgtagatttgctttcgaagaacaaaattcattccaagtgtttgacctgt

SEQ ID NO: 2183 - DNA, 390 bp, Glycine max
  Clone ID: LIB3028-028-Q1-B1-B3
gaagaaacagaacgatcaatggacataatgtggcgagtgattaatcccaaattaggttctaatgtagttgctgtcaaacctcctgcttcattaattgccaatgtggtgtctgcatggtcttttctcctctctactgtgagcaatttgaagctaaattcaaaaaactggcagaattcaatatcctatttatctagtcttctagacaaggaagataggtctgtacgaattgctgctggtgaagcactagctctaatttttgaaattggagttatagataaattttctgctgagttagacagtgcaagtgatacaacgcaagggagtaaaccacttgaaagctacatatttttacaaggattgaaaggaaaggtgataaatcaatgcaaaaat

SEQ ID NO: 2184 - DNA, 383 bp, Glycine max
  Clone ID: LIB3028-028-Q1-B1-B4
aaatgaatcaagtgtggaccgtcttatgaagcagattacaaatttcatgtctgatattgctgatgagttcaaaattgttgttgttgaagcaataagatcactatgcttgaaattccctttaaaatatagatctctgatgaatttcctaagtaacattcttagggaagaaggtggctttgattacaagaaagcaattgtagattcaattgtgattcttattagagatatccctgatgctaaggaaagtgggttgcttcatctttgtgagtttattgaagattgtgaattcacttatttgtccacacagatactgcacttcctgggagttgaaggaccaaaaacttctgaccccagcaaatatattcgttatatttataacagag

SEQ ID NO: 2185 - DNA, 360 bp, Glycine max
  Clone ID: LIB3028-028-Q1-B1-B5
cgcacgaatatcttgttgtttggagcgatccgagaaaaactctgtaaacatgttggtttaccaggacctccttacaggtgatgagcttctctctgactccttccgttacaaggaaattgagaatggaatgctgtgggaagttgaggggaagtgggttgttaaaggagcagttgatgtagacattggtgcaaacccttctgctgagggtggaggagaagatgagggagttgatgatgcagctgttaaggttgttgacattgttgacacattcagacttcaggagcaacccgcattcgataagaagcagtttgttaccttcatgaagaggtttatcaagaatttgactcccaagctcgatgc

SEQ ID NO: 2186 - DNA, 343 bp, Glycine max
  unsure at all n locations
  Clone ID: LIB3028-028-Q1-B1-B6
ctccaggatcatattggtggcctgcagaagcactgtgaggaaacaattatcagaatgcttctccaggatcatattggtggcctgcaggttctttaccagaacatgtggattgatataaccccagaacctggggctcttgttgttaacattggtgatcttctacagcttataacaaatgacagattcaagagcgtagaacatagagtacaggcaaatctcataggtccaagaatatctgttgcatgctttttcagcgaaggtcttaaatcatcaccaaaaccctatggacctataaaagaattattgacagaagacaatcctcgcanatacagagaaaccacag

SEQ ID NO: 2187 - DNA, 344 bp, Glycine max
  Clone ID: LIB3028-028-Q1-B1-B7
gctaatcctagttccttcaactcctcgctggcaacaacagcaatactaccaataatggcgctccacaatcatgatgttcgacaacaagctctgtgacataacatgtgaagtgatagatccccatgccctggggctcatgttggtaacattggtgatcgtctacagcttataccaaatgacaaattcaagagcgtataccatagagtacacgcaaatctcataggtccaagaatatccgtcgcatgctttttcaccgaacgtcttaaatcatcaccaataccctatgggcctataaaagaattactgacagaagacagtcatcccacatacagataatccacagt

SEQ ID NO: 2188 - DNA, 359 bp, Glycine max
  Clone ID: LIB3028-028-Q1-B1-B8
ggagtttgtaaccatgcttttcacttccattgcataagccgatggctcaagacccgtcaagtatgtcctctagataatagcgagtgggagtttcagaaatacggtcactagaactttgatgcggctgagctacttccatcttggacatttggattgtagcatttctatcaactttatagctctacatgttgtctttgcttgcctattggagttttattcaaaagagtcacttctaaatgctttcgcatatagttacgcccccagttcctaattcgatcatatccttctctaacaatgtggcaaaacggtggtgttaattcactcaatgacaagatttatggaatattatagcatgcaaa

SEQ ID NO: 2189 - DNA, 242 bp, Glycine max
  Clone ID: LIB3028-028-Q1-B1-B9
ggaagatatagacaccgctcctggcttcagtagattcaattcattcatcgagagcaaacgtatgcggtccagtcgtgtagcattgcttacatgtcattaactgcatcttctaactggtggagggagataaaacagtcttcgttcaggcaggatccgattttcgacttacttacaatcatctatggcattctctgcacggtctcgcacgctcactcactgtggatatggtgatcagtgacggc

SEQ ID NO: 2190 - DNA, 395 bp, Glycine max
  unsure at all n locations
  Clone ID: LIB3028-028-Q1-B1-C1
agcaaagtaatcgcaaaatctagggtttgttcgttcgctcgttcgcaacaatggcgctgaggagattctacaacgagatcaaggggaagagggtgagcgaggtccctgagcacgtgaagccgatgctgtccctgagctacatcaagaaagcgattcagagaggcttcgacaattaccatgccaagtacattgaaaccagttcccctgatcccatcttccatgtctgctacggcggcatgatcttctcctacctcgtcgctctcccccacgagcgccgccacctcctccacgcccaggagcacgctcagcagcatcactgattccatccaccttcaggatcctggttgaattggaggtggttggcttgcttgatncttgttttaaaatctgaaaaa

SEQ ID NO: 2191 - DNA, 401 bp, Glycine max
  unsure at all n locations
  Clone ID: LIB3028-028-Q1-B1-C10
aggggcttcaacagccacaaccttgatcttgcattgagccatgaaactacttagccacttgggttcctcactagagacacttgtctattaactcttttttgttgttgtggtgtttcatttgtgaaactaacaacaacacaaggccatcatcatggcagctgcttccccaatggcaagccaactcaagtccaccttcactaggactcttgtagctcccaagggcctctctgcctcttcaccacttcacctcgtgccttctagaaggcaatttagcttcactgttaaggccatccaatcagagaagccaacctatcaagtgattcagccaatcaacggtgacccattcattggaagcctggaaacnccagttacatccagccctttgatcgcatggtacttgt

SEQ ID NO: 2192 - DNA, 368 bp, Glycine max
  Clone ID: LIB3028-028-Q1-B1-C12
atctgtcttccgaagcaggaactaaatatggctgacttgttggaatggtcaaagcaagataagaaacgaatgcttcatgtcgtctaccgtgttggtgaccttgatcgcaccatcaaattttacacagaatgtttaagaatgaagcttttgaggcaaagagatatcccagaggagaaatatgctaatgcttttcttggatttggccctgaagaatcccattttgttgttgaattaacatataattatggggttacctcgtatgacattggcgatggctttggacattttgcaattgcaactcaagacatttataaattggttgagcacatcaaggccaagggtggaaacatcacaagggaacctggtcc

SEQ ID NO: 2193 - DNA, 347 bp, Glycine max
  Clone ID: LIB3028-028-Q1-B1-C2
agcaataacagcaacaacattaatgatcagaataataagcagcagtccaacaacatggccttgttgagggttcaagagcaagcaagggagcacttgaggatagccatggcagagaaagcatatgctgaggaagcaaggaagcaagcaaagaggcagattgagcttgcggagcaagagttcacaaacgccaagaggataagacaacaagcacaagtggaactagacaaggcctacgctttgaaagaacatgcaatgaagcaaatcaactccaccatgctccaaatcacttgccacttttgcaaacaacagttccaagctcgaaatgcaaccaccaccagccccgacga

SEQ ID NO: 2194 - DNA, 373 bp, Glycine max
  Clone ID: LIB3028-028-Q1-B1-A8
cccaactcaatttttctctcaaccggcccaatttagcataagcccagcatggccaccgcaacagcagcagccacctcgtccttcatggggacgcgcctcctggaggcccactccggggcggggcgggtgcaggcccggttcgggtttggcaagaagaaagccgccgccccgaagaaagtttccagggggtcgggctctagctccgataggcccctgtggtatccgggcgccaaggcgcccgagtacctggatgggagccttgtcggagactacggattcgacccatttgggctaaggaagcccgccgagtacctgcagttcgagttggactcgctggaccataatcttgcgaagaacgtggctggggacatca

SEQ ID NO: 2195 - DNA, 373 bp, Glycine max
  Clone ID: LIB3028-027-Q1-B2-H1
gaatgagataatattttttgtggatgatgtccccataaggaggtatcctaggaaaagtgatgccacatacccctcaaggccaatgtatgtgtatgggtcaatatgggatgcatcttcttgggcaacagaggatggaaaatacaaagctaattataattaccaacccttcgttggtaggtataaaaacttcaaacttcaaggttgcactagtgaaagctctgcctcatgcaagccaccttctttctcgccatctggctttggtagtctaagccctcagcagtttagggcaatgcaatgggtccaaaacaactacatggtctacaattattgccatgaccctaggagagaccacacatttatcccagagtgttaa

SEQ ID NO: 2196 - DNA, 392 bp, Glycine max
  Clone ID: LIB3028-027-Q1-B2-H10
aatgacttgggagtgaagttcccatttaaccaaccaatgaagatatacaacagtttgtggaatgctgatgactgggccacaaggggtggtttggagaaaacagattggtccaaagcccccttcatagcctcctacaagggcttccacattgatggttgtgaggcctcagtgaatgccaagttctgtgacacacaaggcaagaggtggtgggatcaacctgagtttcgtgatcttgatgctgctcagtggcaaaaactctcctgagttcgccagaaatacaccatctacaactactgtgctgaccgcagacgctaccctcaagtctctccagagtgtgctagagaccgtgatatttaatttgaataacgtgatattaatgcaaagtatctatc

SEQ ID NO: 2197 - DNA, 390 bp, Glycine max
  Clone ID: LIB3028-027-Q1-B2-H11
cctatgtgctatatggtggagccacggttcctgcacagtgctgcaatgggatcaggaacctctatggcatggctcagaccaaaccagatcgccaagctgtttgcaactgcatcaagaacgctgttaggaacagtggcttcacctactctcacttcaatctcaaccttgctgctaaccttcccaagaactgtggggttaacattccctaccagatcagccccgacacagactgcaccagggtgcagtgaggttggtgcatgatgtttatgttagcagtgttagaataagaggccacgtgacacgaaaagggaatggctagaaattgcttttttaaggctcttgtactagtgctcttgtattatgtctgtggttatatatatatattatata

SEQ ID NO: 2198 - DNA, 384 bp, Glycine max
  Clone ID: LIB3028-027-Q1-B2-H12
aaaaatattaagatgataaacattggagcacttgttgtactctttgcatttctcttcctcagttgtgcctatgcacaagacacaacaacccttgtgcctgcaatcataacttttggtgactcagccgtggatgtagggaataatgactatcttcccacccttttcaaggctgattaccctccttatgggagggactttgctaaccaccaacctactgggaggttctgcaatggcaaattagctactgattttactgctgacactttgggttttaagacctatgctccagcatatcttagcccacatgcatcatggaaaaacctccttattggagcaaactttgcttctgctgcatctggttatgatgaaaatgctgccactttg

SEQ ID NO: 2199 - DNA, 334 bp, Glycine max
  Clone ID: LIB3028-027-Q1-B2-H2
gatatttcccttctgagctttgattagtgtggcctagttgttgttttctcgatgagaaaggcttcttccactatgcattgcgcacttctgcgcttttgggttcccttgttgctgcttgctagcatcagctatgctccttctgtttcggccacaactgaaatttcagggaatgaagtgaacacagatcggaaggtgataaattaagagttagcaaaaccaagtctaaaaggacatgatgaagaagcagagttcaaaagattttttccaaaaccagatccgatagttaaagcaattccaaagccaattcgtactactaaacctagttcaattccag

SEQ ID NO: 2200 - DNA, 400 bp, Glycine max
  Clone ID: LIB3028-027-Q1-B2-H4
catcaatctaaacaaaattgggttccaaaggaacagacggacaatcaaaggaataggatttgcaacgatgcatgtactctagtacagaaattgtatatatatattgttgtcagtgtcaccaacaccaaactctctctctctctctctacgctaattaacgttcattgggcattggcggattctatttccttttctcaaaacccaatttgcttcttcttcatggaagcactctccttcatcatccccaaagactcttgttctcctctccttcgcactccctcttcatataccacttcgtctgtcacaaatccgcacgctgcacttgctttcttcaaaacgaccgacacgctcaaacgcctcacagtttcccgtcgtcgcagtttttgccctcccaaaggcc

SEQ ID NO: 2201 - DNA, 358 bp, Glycine max
  Clone ID: LIB3028-027-Q1-B2-H5
cctcttcttagcaaatgtttcaatattccaaggccatgttgcttaatttagttcttgtttcctttgtcctcttgagttctatcagagatgggagtgcagggatcaccagctctttcgttcggccacagtggccaggagttgacattcccgtggatcatgaagtatttgcagttccaaagggttataatgcacctcaacaagtgcacatcacgcaaggtgactatgatggaaaagcagtaatagtctcatgggtgaccccagatgaaccagggactcgccatgtgcaatatggcacatcaaaggataagtttaaaactagtgcagaaggcacagttgcaaactacactttctataacta

SEQ ID NO: 2202 - DNA, 360 bp, Glycine max
  Clone ID: LIB3028-027-Q1-B2-H6
gccccactcaaccaccacacctctcctcgttcacgctacccctttctgctcttcttctacctttcaagttttaaaagtataaagatggcagagacattccgaattacctcagagtcggtgaacgagggacaccctgacaagctctgcgacgaaatctccgatgctgtcctcgacgcttgcgtcgagcaggacccagacagcaaagttgcctgcgaaagatgcaccaaaagcaacttggtcatggtcttcggagaaatcacgaccaaggccaacgttgactacgagaagatagtgcgtgacaccggcaggaacatcggcttcgtctcaagtgatgtgggactggatgccgacaactgcaag

SEQ ID NO: 2203 - DNA, 387 bp, Glycine max
  unsure at all n locations
  Clone ID: LIB3028-028-Q1-B1-A1
aaaagccttagccttccctacaactccaaacacaaagacatcatcatccatggctgcctccgtctccactgtcggagctgtcaacagagctcttttgaacctgaatggttctggagctggagcttcagctcccagttcagccttctttgggaccagcttgaagaaggttattgcctcaagggtccccaacagcaaggtttccggtggaagcttcaagattgttgctgtagaagagaagaaagagattgaagagacccagcagaccgacaaggacagatggaagggtcttgcctatgatatctcagacgaacaacangacatcacaagaggaaagggttgggttgactcccttttccaggctccacaggatgctggaactcactatgc

SEQ ID NO: 2204 - DNA, 374 bp, Glycine max
  Clone ID: LIB3028-028-Q1-B1-A10
ctcgagccgcttcttcgtcgttatcttcttcttttgttgtttgtgtgtttgttttttctctcacctgaaaatgtcttgctgcggtggtaactgtggttgcggaagcgcctgcaagtgcggcaacggctgcggaggctgcaagatgtacccagacttgagctacaccgagtcaaccaccaccgagaccttggtcatgggagtggcaccagttaaggctcaattcgagagtgctgaaatgggtgttcccgctgagaacgatggctgcaaatgtggagctaactgcacctgcaacccctgcacttgcaagtgaggtgttggagagctaaagcttcaagcagaaatgggccttagaaataatgataaaaactatatgt

SEQ ID NO: 2205 - DNA, 297 bp, Glycine max
  Clone ID: LIB3028-028-Q1-B1-A11
aacaaatctataaagatcgccatgtcttgtgtttgtgtctatccattccatttctttccaacacacactttctctctctatctttgggtgtctttctttttgttcattgttgatgatgtcacgcgccgccgtgctattacacgcgccggaggaagatgcggcggcggaggagtgctgtacctcgacttcgtcgtcgtcgatcgggaggaacagcgacgtgtcgtcggagagatcaatggaggaaggagaaaacgacgtggaaagtgcttaccatggacctttgcatgccatggaaac

SEQ ID NO: 2206 - DNA, 380 bp, Glycine max
  Clone ID: LIB3028-028-Q1-B1-A2
cttttgcataagaatatgatgttgtgaaggtgaatagggacttcaaggtgacattctcagctgcctcaatatgtgtgcagggcacaaattggaatttggctgagaaggatagtgagagtggaaggaggctcattgctgcatcatgcatggatgattactttagaattactgagacaccaatcaaaggttcatattagatacgttggtgtcctacagatgtatgccccttttgtaggtttgactgtggcattgttggtggtttgcgtgagaatgggaagattttgttggccttggatggtaatgtgctcccagttgtgtttgagaaagcatactaatatgtgtagcttcaattctgtgtttgacatttctgttcttggtat

SEQ ID NO: 2207 - DNA, 368 bp, Glycine max
  Clone ID: LIB3028-028-Q1-B1-A3
aataatcacaactcaaaccctctctctctctctctctctctctctcatataacaatatttccacgtacaattaagacacgatcactattgcatctacaatggaattagcaccctcaaactccaaccaacaacatgagaacaacaacagcaacaaggttcaggggctccattgctctgtgaagaactatgagtggggcaaaccgtgccgtgactccctcgttgccaagctattttccatgaattctgggtcgttacaatcatcacagcttgatgaggatcagccatatgcggagctttggatgggcagccacgtgtctggaccctctttcattgtttttgatggctcacaacaaagagtgaccctcaag

SEQ ID NO: 2208 - DNA, 388 bp, Glycine max
  Clone ID: LIB3028-027-Q1-B2-G9
caggccccttttgatcctgaaggactcctaagttcagtgatggctattgtcacctgcttgattgggttgcactatggacatattattgtccattttaaggaccacagagtgagaatcatatactggatgatcccaacctcttgtcttttagtttttggccttgcgttggacttatttggaatgcatataaataaggttctctactcgctcagttacacatgtgtcactgctggtgctgcaggcgtcctctttgtcggaatatacttgatggttgatgtctgtggatgtcgtcgcatgactttggttatggaatggatgggcatgcatgcattaatgatttatatccttgctgcttgcaatgttttcccaattttccttcaaggatttt

SEQ ID NO: 2209 - DNA, 337 bp, Glycine max
  Clone ID: LIB3028-028-Q1-B1-A4
gtggtgtgaatcactgtccaatcccgttcgcgtgacccggccagccctataaactatatatcgtgaatcggattcagagagactgagagaaacgatgagggcagtgagtgcgttaatggtggctcggatgttgacgcgggaccactctctccctgtcctttgcagcgaaagcatacccttccgatcggtctggtggttcgtctatgccggcatctcatgtttcctcgtcctcttcgccggcatcatgtccggtctcaccctcggactcatgtctctgggtctcgtcgacctcgagattctcgagcggagtggttctcctgttgagaaaatgcaagct

SEQ ID NO: 2210 - DNA, 364 bp, Glycine max
  Clone ID: LIB3028-028-Q1-B1-A5
tgattttctttgtagaagttttttagtagcatgttttccagattttgtctcaacaagcagagcaggtttgcttgtgtaaattaatacatggagtaagaaccgcttccttgttgtgtattgggacaggttatgttcagtttagggctgaatttgacctggttctgtatgttcttgtactagaccattctaaccatgacaaattggaatgggctaaaggtgtggccccctcttcaaatttcagtcaagtgctgtgaaatcgatgaattcctgcggaatggggagatcgatttagcttagcctgacacatagatgctttctatgtatcttcagtatgatcaaaatttgaatggttcagaaatttatc

SEQ ID NO: 2211 - DNA, 345 bp, Glycine max
  Clone ID: LIB3028-028-Q1-B1-A7
gaacattctcatgtacggtgatggccctgctaagaccatcatcaccggtcgcaagaacttcgtcgatggtgtcaagaccatgcaaactgccactttcgccaacactgcagaagggttcattgccaaggcaatgacattccagaacactgccggtgctgagggacaccaagccgttgcattcaggaaccaaggagacatgtccgctctcgttggttgccacatcttgggttaccaagacaccttgtacgtccagaccaacaggcaattctaccgcaactgcgtcatctccggcacagtcgacttcatcttcggcacctcctccaccgtgattcagcactccgttat

SEQ ID NO: 2212 - DNA, 320 bp, Glycine max
  Clone ID: LIB3028-027-Q1-B2-E3
catttgtcatagcaacaaacaggcatcttagtgtgctccaccctatttataaacttttgttgcctcactatcgtgacaccatgaacatcaatggactcgcaagacaatcactcatcaatgcaggtggcattattgagcaatcatttctgcctaggccatttgctgtggagatgtcttcggcagtttacaaggggtgggttttcactgatcaagcccttcctgcggatcttatcaagagaggaatggcagtggaggattcatcctctccctatggccttcgccttgtgatagaggactagccttatgctgttgatggacta

SEQ ID NO: 2213 - DNA, 334 bp, Glycine max
  Clone ID: LIB3028-027-Q1-B2-E9
ctcgaatcgagtttaaagctgaacatgagggaaaattccactcattctacccagttgcgaccatccttagttacctgaccaaggcgcctctggttccaccgggtacaccagtggtgaacgcgttgtcaaagcaccgagctatgctggaaaacatcctgagggcttgtgttggattagctcctgagaacaacatgatcctacagtaccagtgaagttcacagtcttaagagtaacggttcgggatagtgtacttgaatctgatcaaaacttaactcacatcgcataacccgcttttctgttatatacctcaggcaactgtgaactttgacgatcg

SEQ ID NO: 2214 - DNA, 370 bp, Glycine max
  unsure at all n locations
  Clone ID: LIB3028-027-Q1-B2-F1
cacaacanaaaaagacaacccagagagcgcgtcttaataaacgctcttctctgaaaacccccatttcttttcttctttcttcttctctttcgcttcttcgatcttcgatcttcgtcgctgaaaatgagagagtgcatttcaatccacatcggccaggccgggattcaggttggaaacgcctgctgggagctttactgcctcgaacacggcattcagcctgatgggcagatgccaagtgacaagaccgttggtggaggtgatgatgctttcaacaccttcttcagtgaaactggggcaggaaagcacgtgccccgtgcgatttttgtagatcttgagcccactgtgattgatgaggttaggactgggacat

SEQ ID NO: 2215 - DNA, 391 bp, Glycine max
  Clone ID: LIB3028-027-Q1-B2-F10
aactcaaacgaatacgttttctctttctcttcaatttcacccttattagcatagcatattcatttccctttcttgaatcgttcttaactgcgagaggggatatcagagaagttgattggcctcccattaataacagatctgaatgatctgatggagtctaaaggtgggaagaagaagtcgtctagtagtaagtcgtttttgtacgaagctcctctcgattacatcattgacgacgttcgaccacaccgtggaatcaagaagttcagatctgctgcttactccaactgcatccgcaagccatcctgagattccctacgtcgtgtgaggacgtatcccccttagtcctgcatctgctatatttttctagtctcttctcttcccctttttcttg

SEQ ID NO: 2216 - DNA, 388 bp, Glycine max
  Clone ID: LIB3028-027-Q1-B2-F12
gtttattggacaaatagcaaaattatgtggtggtggaggaggtggaaggccaaattttgctcaggctggtgggaggaagcgtgagcatttggcaagtgcccttgataaggctcggtcagagcttatagccactctatgtgaaaaacggaattgaatttaagtacacttagcagatagatctttttatgctaaagcagcacaaaatattgattctctgttgtcgaagaattcatcacaaagacagttcacaagcaaaatgggcggaagctgctgaagttttaacgagttttcttgcaattccagggggcatgtactttaactttatgatagtatagaccatttgttcgtgtgactttattctcctgacaatctggcctgcattcacaca

SEQ ID NO: 2217 - DNA, 356 bp, Glycine max
  Clone ID: LIB3028-027-Q1-B2-F2
gcaaagctcatccttgagttaaaaaatggcagcagcttcttccatggctctctcatccccatccttggctggcaaggccgtgaagctgggcccatcagccccagaagtgggaagggtgagcatgaggaagaccgtcaccaagcaggtctcctcaggaagcccatggtacggcccagaccgagtcaagtacttgggcccattctctggcgagcccccgtcctacctaaccggtgagttcccaggcgactacggctgggacactgctgggctttccgcagacccagaaaccttcgccaagaaccgtgaactcgaagtgatccactccaggtgggccatgctcggagccttgggctgcg

SEQ ID NO: 2218 - DNA, 372 bp, Glycine max
  Clone ID: LIB3028-027-Q1-B2-F3
cagaaagtcattccctagcaaatctcctggggaagcatctacagagacacctgccaagaagcaaaaacaaacttcccaatctgggaaaaagcaaaagcagtcttctgatgatgatgaggatgataaagctgaactttcagatgcaaaaggtgtttctcaggaagatgaagatgttgcagtaccgaacaatgaaagtgatgatgaggaaagtagatcagaggaagaggaagagaaatcaaagtctcgcaagcgtacttccaaaaaagctgttaaagagagttcagttagcaaagctgatagaacctcatctgtcaagaagacccctgtgaaagatgccaagagcattgaaaaaactaaaaagaaaccaacttt

SEQ ID NO: 2219 - DNA, 362 bp, Glycine max
  Clone ID: LIB3028-027-Q1-B2-F5
gctagcaccacattcacctgaggcttccaaagcaatggcttcccttgcagcatccactgctgctgcttcccttggcatgtcacaaatgcttggaaaccccatcaacttcagtggtgccacaaggccagctccatctgcttctagtcctgcctccttcaagactgtggctcttttctccaaaaagaacgctacaccaacacctccaaaaaaagctgctgctgctgctcctgccaatgatgagcttgccaagtggtatggtcctgacagaaggatcttcttgcctgagggtctcttggaccgatccgaaatcccagagtacttgaccggagaaatccctggagactatggttatgaaccatttg

SEQ ID NO: 2220 - DNA, 392 bp, Glycine max
  Clone ID: LIB3028-027-Q1-B2-G1
cttccaacaaattatatttttcttacaaaaaaaatggcaggtgaggtggtgaagaaggaagagtctctcaacctgaaagtcactaacaagagccatgttcaatcagaggagaaaattggaagaaaagagtaccaattggtcacttttgatcttccctacttggccttttactacaaccagaagctcttgttttacaagggtgaagatttcgagggcatggtccaaaaactcaaagttggacttggagtggtgctgaaggagttccaccaacttgctggcaagttagggaaagatgaagagggggtgttcagagtggagtatgatgatgacatgcttggtgtggaggttgttgaagctgttgtagctgatgatgaaaatggggtggaagattc

SEQ ID NO: 2221 - DNA, 395 bp, Glycine max
  Clone ID: LIB3028-027-Q1-B2-G10
ctttagtgtggtctaaagaagtggaactctattcaactaatcagaattgcgtgaagatgctagttggaaataaagttgatagagattctgaaagggttgtgagcaaagaagagggtttagcacttgccgaggagttgggatgtctgttttttgaatgtagtgccaaaactcgagaaaatgtggagcggtgcttcgaggaacttgcactaaagataatggaagttcctagtcttttggaagaaggatctacagcagttaaaaggaatattctaaagcaacaacaacaaccccaagcatccgaatttggtggttgttgctcttaattgctgcaatgtgaacattgagtcataactagcgcatattggaatgttccctctgattcctgtatatgtaag

SEQ ID NO: 2222 - DNA, 390 bp, Glycine max
  Clone ID: LIB3028-027-Q1-B2-G11
gtggagagagacaattcaatggtctcgttgatgtctacaggaagacattggcatctgatggtgttgccgggctctaccgtggtttcaacatctcatgtgttggaatcatcgtgtatcgtggtctgtactttggattgtatgattctgttaaaccagttgtcctcacagggtcattgcaggatagcttttttgccagctttgccctatggatggctcatcaccaatggtgcaggtcgtgcatcatatccaatacacactgttagaataataatgatgatgacctctggtgaagctgtccagtacaagagctccttggatgcattcacacagatgctcaagaatgatggtgccaagtccatgttcaagggtgccggtgccatcatcctccgt

SEQ ID NO: 2223 - DNA, 393 bp, Glycine max
  Clone ID: LIB3028-027-Q1-B2-G12
cttcccccaaattattcattcctctttttttccccattaacaatattagtcaatccaattaatttccatgaccatgtccataacactcttactccaagccaagccctcccacttgaaatggaaccagttaccttcccttccacgtcgcacaaggcccgaccgtttcactccaatacccgactcgaaacgccgcgtttcaagcgtcaaatgtatctcctcgtcgcggaagccggataacacgtttagtttgcagtccccgtgggaggttctggcgagcacggtgtcgaacacgctgaacgcgctgaagacaccggccatagctgcggtgttggtggggctgttatcaatgtacgatccaacttgcgccttcgcggcatctggagggagaatggg

SEQ ID NO: 2224 - DNA, 356 bp, Glycine max
  Clone ID: LIB3028-027-Q1-B2-G2
tggcttgtctaggtcttcaatcgaactcgccaggaacggaactttctcagattgacacacaccatgaaggaaagtggtttcgagaataatgatacaaagcaagctgctgctgatgtgttgtttctatattcaaaatttgcaatggcatgcattggatgtaaggctcgtccatgtgatttgaggtttcatttgatgaaggagatttcaggtatgccctcttctctaaatagggagtcaccacagaatgcagcatctcctgatgcaatgggtgagtcatccagcacaggaacagcaagacttgatagaacagacagttttcgtgcactctagttgagagtggactgtgaccatgtttt

SEQ ID NO: 2225 - DNA, 374 bp, Glycine max
  Clone ID: LIB3028-027-Q1-B2-G3
agaaaatggcaagaatatcaaattggtctcttgtcttcctcctcatctctacactactccacatagagcccagcctctcaagcccaagcccaagcccaagcccaagcccgttcataaaatcctcctgcagcagcacccagtacccagccctctgcgtctcatccctctccgtctacgcctccagcatccaacaggaccctcaccaactggttcagacagcactctccctctccctgaaccgcacccaagccaccaaaaccttcgtggctaactgcaacaaattcagaggcctgaaacccagagagcacgctgcactcaaggactgcgccgaggaaatcagcgacagcgttgaccgcctcagccggtcgctgaaa

SEQ ID NO: 2226 - DNA, 362 bp, Glycine max
  Clone ID: LIB3028-027-Q1-B2-E2
attgaagttaaaagccttagccttccctacaactccaaacacaaagacatcatcatccatggctgcctccgtctccactgtcggagctgtcaacagagctcttttgaacctgaatggttctggagctggagcttcagctcccagttcagccttctttgggaccagcttgaagaaggttattgcctcaagggtccccaacagcaaggtttccggtggaagcttcaagattgttgctgtagaagagaagaaagagattgaagagacccatcagaccgacaaggacagatggaagggtcttgcctatgatatctcagacgatcaacaagacattacaagaggaaaaggtttgggttaaccccctt

SEQ ID NO: 2227 - DNA, 388 bp, Glycine max
  Clone ID: LIB3028-027-Q1-B2-G8
ctgttgtacagaaaaatcttgagatcggtgaagttctagctgttgatgtttcttccattgttgctgtgacaagtgcagtcaatatccaaataaaatataatggtcctgcaagaaggacaatgtttgggggtgacaatgctgtcacagccgttctaacaggaccaggcattgtgttcatacaaagtttaccttttcatcgattctctcaacgaattgctagggcggtgacatcacccaacatgagggaaaatcccaagtttttcatacagattgcagttttcttttttctggcgtatgttgtcattgtatcttcgttaatattaacagatgtatgaaattcagtttggtttttctttagtagtttttacttttctcttatcctaacata

SEQ ID NO: 2228 - DNA, 388 bp, Glycine max
  Clone ID: LIB3028-027-Q1-B2-C11
ctcgagccgattcggctcgaggggagttgttgaatcgggaagcaaaaaaaatgagaatccatcacatagcatgcctccaagacaattattcctatctgatcgtagacgagagcacgaaggaagccgcggcggtggacccggtcgaaccggagaaggttcttgaagttgccagctcgcacggcctcactctcaaattcgtcctcaccacccaccatcactgggatcatgctggtggaaacgacaagataaagcagctggtgccaggaatcaaagtctatggtggttccattgaaaacgtcaagggttgcactgacaaagttgaaaacggtgataaggtctctcttggagctgaaatcactatattggcccttcacactccttgccacac

SEQ ID NO: 2229 - DNA, 372 bp, Glycine max
  Clone ID: LIB3028-027-Q1-B2-C3
ctcgagccgattcggctcgaggctgaatcgttcggtgcccgttgatgcactgcaaaggataatgatgcgagcacctcaactatcggatttgggtattggatcacttgtccatgatccagaatcggaggcctacataaagcttaagaataccattctcaagtgcaagtccataaccagtttgtctgggtttttggaagttgctcctcattgtcttgcagctatatatcctatttgcccgaacttaacatctttgaacttgagctatgcagcaggcattcagggaagtgctctggtaaaactaattcatcactgtgttaaacttcagcgcttatggataatggattgcattggagacaaaggactaggtgttgt

SEQ ID NO: 2230 - DNA, 367 bp, Glycine max
  Clone ID: LIB3028-027-Q1-B2-C5
tgcaattcttggaagaggtgaggcttggtatagcaaaaagctttagaaggctaaagagaagatcactaaactgaaggagagggtacaagaactggagacattaactgaagcaaaagagaacgaatatctgaggtctgtgaaactttctaaaataacaaagacttcaaagaatctcgaagaaagcatcaaatctgattctgatacattgacagcttgcaaactttcatcaaaagaacaaagcaaccgaattttgacacccaaatctggaattgacctgactgcaaacgacaacagtaaatattttcaatctttgaagatatagaactccaatgttactaaaaataaggctgtgaatgtcagtaatgga

SEQ ID NO: 2231 - DNA, 372 bp, Glycine max
  Clone ID: LIB3028-027-Q1-B2-C7
agaaagataaagcattccatagcctcccataaaaatgaagaatactatcttctctgctctctttctactttgtgccttcaccacctcatacctaccttcaaccaccgcggtggtcgataccgacggtgatattcttcagaatcctggcacatactttatcttgtccgtttttcgacccggcggcggagtagaattcgccgccactggaaacgaaacttgccctctcactgtcgtgcatactctcttcgggaggggctttccagcaatattatcgtcccggttacgaatccctttcatcggcgaacgacaactcttcagcatcctgttccgtattgtgccatggtgcgccaccactccttctaagtggaccat

SEQ ID NO: 2232 - DNA, 340 bp, Glycine max
  Clone ID: LIB3028-027-Q1-B2-C8
aaaacatctcaatgggttcttcttctattacaacatcgcccgcaaccatgaccatggctgcgatcgtgctcctgttcacggtctttgccgtttcctccgccctagacatgtcgataatctcgtacgacagcgcccacgcggacaaggccgccacgttgcgcaccgaggaggagctgatgtccatgtacgagcagtggctcgtgaagcacgggaaggtgtacaacgcgctcggcgagaaggagaagcgcttccagatcttcaaggacaacctgcgattcatctacgaccacaactccgcggaggaccgaacctacaagctcggactgaaccggttcgctga

SEQ ID NO: 2233 - DNA, 376 bp, Glycine max
  Clone ID: LIB3028-027-Q1-B2-D1
caggaagaaaggtccttgtttggccacttgagtcgtcgcagtcgtcttccactggcaattaacaaattttctctgaactttcctctctctctttcccgtgctttctttcctagcaactactccaggataacctatgaccatgataaataataagtcttcatactttcactgactattagagttgtagtttttcaccataagccatgaggctccttagcatcatcaccacctccttaacactattcttccttcttctctttctctccatatagctccaagcgtacaccccagaagacaacttcaccatcagttgtggcaccaccgggatagtcttcgacggccaaaggacatggacgggggacgcagacacaaagta

SEQ ID NO: 2234 - DNA, 390 bp, Glycine max
  Clone ID: LIB3028-027-Q1-B2-D10
cagtggtactgtgggtaatgagagaattaccacctgaagaagctgctagcatacccgaagaatcaagtacaatagcttttgttgctgatagttcaattgcaatccatcatcctcaacgctgggctacagcaacaagcatgcagaatcagacatcaagagcgagtcctatatgattatgcattaacctttgcaaatatatcttggtctgctggagtttggacagcttaatggaatttcctcaggatgtttaaccctagagcgcagaagagagaaaatgataatgatggatgcaagttctcaagggacttgaggtttcccttcccactgtatttacaatctaaatctaaatgtatatagcagcaatttgatatatgaaaagttcttttcctt

SEQ ID NO: 2235 - DNA, 370 bp, Glycine max
  Clone ID: LIB3028-027-Q1-B2-D11
gtaagtttgtgctgcgagagagaggggttccgttctgggatatggtgtagactaaaattctgaatgtgtagacttgtaaggtgtgccagcttgcagaacttggcatctgcctttttgagtgtacctagtcgcatcttcacctgatctgctcttagcaccttgtgttatcgtctcctcgtatctaggcttaggcctaggcatgcaccccagcctcagtcaccatcctgacacttaccaatagtcagcatggagtcgtcaaagatctacgcttacctcttcctctgcaagatcattctctcttccgccactcgcatccacggttgtggctgctgtggcaaaacccccttaaagcagaagcctggtaaaacac

SEQ ID NO: 2236 - DNA, 387 bp, Glycine max
  Clone ID: LIB3028-027-Q1-B2-D12
ggaggcgactatctgtttgcttttcgaatgataatggttctatttcgacgagaattctctttttgtgattcattgtacctttgggaggatgttgatgacaaatcagaggaatctaaaggaagattaaagtcattgcgccactatggaaagtacgagagagaaaatatgaaaaatggaggaaagaatggtgaagatcctccccttcccatatctgtttttcttgttgctagtgtgcttaaagacaaaagcacaatgttactccagcaagcgcgaggcttggatgatgttgtcaagatattgaatgatgtaaatggaaatcttgatgccaaaaaagcttgtgtggctgcattaaaacttcacaagaaatatttgaaaaaggccaagaat

SEQ ID NO: 2237 - DNA, 368 bp, Glycine max
  Clone ID: LIB3028-027-Q1-B2-D2
agaaaaactactcgtcgtggttcctcaaaatacatggaaaagcaactagcattcacagggttgttgagcaataaagctgaagaaaaccctgatttctttaactggaacagagttaaagtacggtactgtgatggagcatctttcagtggagatagtcaaaacgaggttgcacagcttcaatttcgaggacaaaaaatatggcaagctgcaatgcaggaattattgttcaagggaatgcagaaggccaaccaggcccttttgtctggatgctctgcaggtggtctggcatctataatacattgtgatgagttccggagcttgtttcctacatctaccaaagtgaaatgtttgagtgacgccgggttttt

SEQ ID NO: 2238 - DNA, 357 bp, Glycine max
  Clone ID: LIB3028-027-Q1-B2-D5
gcgtctggtgcactgcgagctgcgctcggcgaggcccgcggttcggccgacggaaccggccggtccggttcaggttacgatccccacacccaaacccaaagccgcggaggcggaaggcgcgaacatcgttttgcagccgcggttgtgcactctcagatcctacggttcggatcgagccggggtgcttatcaagactcgcaaggagggtgaccatgatgacgtgtcacccttcttcgccgcgctttccgactacattgagagctctaagaacagtcaagattttgagatcatcgctggtcgtcaaactatcatggtgtatgcagcgacggtgacaatggaagtggtgacagggaactc

SEQ ID NO: 2239 - DNA, 342 bp, Glycine max
  Clone ID: LIB3028-027-Q1-B2-D9
attgattccaagtggctcccgccgagcttgaagcaatgttaagtgctcaacaaggcatatccgatgctgctgttgttcgcatgagagagtaatctgcacgggaaagtcaagtttcatttgatgtaatagtcaaatggctctgatatagccgacgatcatatcatgaactacatttcacaaccaggtggttttttacgagtagaatatgtaaagttttcttcacggactctattccttagacaccctcaggtacggattcgagtatcaggtattatctgcgagacttaaggaatgtttagtagtgggtatttacgtccaagtatgatacacacgaacatcgtg

SEQ ID NO: 2240 - DNA, 379 bp, Glycine max
  Clone ID: LIB3028-027-Q1-B2-E1
cccccaccgagtcaccaaccatggacgttaagtttggcaccacattaatagttattttctccgtaatgtggctcatgagggtgaatgccattgacccttgtgcctctcaaccggataattcggacctcaacgtgattcccatctacagcaaatgctcaccgttcaaaccacccaaggcagacacatgggacaacagaattataaacatggcctcaaaagacccagtccgagtgaaatacttgtccaccttagtgagtcaaaagacagtctccacggccccaatcgcttcgggccaggccttcaacatcggcaactatgtggtgagggtcaaattgggaacacccggtcaacttttgttcatggtcctcgacaccagcac

SEQ ID NO: 2241 - DNA, 147 bp, Glycine max
  Clone ID: LIB3028-027-Q1-B2-E10
gcatgggcgatgccacgtttataggggttataaaagcaaaaactgctctcaatagctccttccagtgaacagatcatcaatgagggggagtgcgatcgctaactcatatgtctaggacgctgacagccacagagaaactgcctgtta

SEQ ID NO: 2242 - DNA, 388 bp, Glycine max
  Clone ID: LIB3028-027-Q1-B2-E11
caatatattccattctctctgtgtatttccctacctctcccttcaagatgcagatcttcgtcaagaccctcaccggcaagaccatcacccttgaggtggaaagctctgacaccatcgacaacgtcaaggccaagatccaggacaaggaaggaatccccccggaccagcaacgtctcattttcgccggaaagcaacttgaggacggccgtacccttgctgactacaacattcagaaggagagtactcttcacctcgtcctccgtctccgtggtggcatgcagatcttcgttaagacactcaccggcaagaccataaccctagaggttgaaagctccgacaccatcgataacgtcaaggccaagatccaggacaaggagggtatcccccc

SEQ ID NO: 2243 - DNA, 369 bp, Glycine max
  Clone ID: LIB3028-027-Q1-B2-C1
ctcgagccgattcggctcgaggtctgctgttagatctgtacccgcctagccattgatttggaaaagtccaacttcaaggatgagtaagcttcagagtgatgctctaagagaagctatctcaggaatcatggctgattccaaggaaaagaacaggaaatttgtggagaccattgaactccaaattgggttgaaaaattatgatccccagaaggacaagcgtttcagtggctctgttaagttgcctcatattcctcgccccaagatgaagatttgtatgcttggagatgcccagcacgttgaggaggctgagaagataggattggactacatggatgttgaggccttgaagaagcttaacacaaacaaaaa

SEQ ID NO: 2244 - DNA, 383 bp, Glycine max
  Clone ID: LIB3028-027-Q1-B2-E12
gctctgcgagatcttcattcgccgattttaaaagatgagtaagcttcagagtgatgctttgcgtgaagccatttcaggaagcatggccgattccaaggagaagaatcgcaaatttgtggagaccatcgaactccaaatcgggttgaaaaactacgatccacagaaggacaagcgtttcagtggcactgtcaagctgccccacatccctcgccccaagatgaaaatttgcatgcttggtgatgctcagcatgttgaagaggcggagaagataggactggactggatggatgtggaagccctgaagaagctaaacaaatctaagaagttggtgaagaaactagctacaaagtaccatgcctttttagcttctgaagcagtcatta

SEQ ID NO: 2245 - DNA, 360 bp, Glycine max
  Clone ID: LIB3028-027-Q1-B2-A3
tatggtcttgtcttcccccaacaaccgtttccttctcttttattcatgacacaccacactctctctcacatcttccatctcctccatctttctcacacttttctcccacatcacaatcacatcattacgttgcattaatacaatggaccaaacaaccgccgctgccaacgaggttgtccgcgagttccccggcctcctccgcgtctacaaagacggccgcgtcgagcgcctcctcggcaccgaaaccacccctcccggcaccgaccccggcaccgccgtccaatccaaagacgtcaccatcaacgccgaaaccggtgccggcgtccgcctctaactccctcgcaccgccgccgcccaaaa

SEQ ID NO: 2246 - DNA, 373 bp, Glycine max
  Clone ID: LIB3028-027-Q1-B2-A4
taataacatagacaagaacacaattaatggctggaatgcttcctggagttgaatgtgctagaaggagaaggtttcgtcgatgttcggattcaaattcaacttctttgggatcacatgcatccacaaggcgttcttctttctgtttgtatgctagtaaccatgatcaatgtcgccttttctcatcctcttccctggtttttacccaatacccctaaattgaatgcctttttgatttctatacatgtttttcatctccactgttgatgggtgtgtgctaattttcttcctggatttgaatggaaatagcaaagaagcatgttataccaggcacaccctgatgagaatatgggaggagtggccagagaagccaaac

SEQ ID NO: 2247 - DNA, 370 bp, Glycine max
  Clone ID: LIB3028-027-Q1-B2-A5
gctgagtttggaattgtgactcagcaagattcttcttcttcgatggaccataaagatcagaatttttcctcgcaggaagcagacaaagaagaaactgaggagccccaggaagaagaagaatcttgctgagtttggaattgtgactcagtgtatagctccgacaagggtcaatgaccaatatttgactaatgttctgttgaaaatcaatgctaagcttggtggtctgaactcaatgttaggcgttgagcattcgccttctattcctattgtgtctagagcgcgaaccatcattattggcatggatgtgtctcatggttcgccagggcaaacagatattccttcaattgctgcggtggtcagctctagagaa

SEQ ID NO: 2248 - DNA, 357 bp, Glycine max
  Clone ID: LIB3028-027-Q1-B2-A6
ggaaaatgtttcttattcaaaggaaaggaaaacacctaacaagcttggttggtaagttatctacaatctgcatcatggaaggtgttattctgagaagggtcattccttcggataacagttgcctcttcaatgctgttggctatgttatggatcatgacaaaaagaaagctgctgagttgagacaggttatagcagcatcagtagcaagtgatccacagaaatattgtgaagcatttcttgggaagccaaacacagagtattgtaactggattcttgactcatagaagtggggaggtgcaattgaactttcaatattagcagattattatggacgttaaattgcagcatatgatattc

SEQ ID NO: 2249 - DNA, 361 bp, Glycine max
  Clone ID: LIB3028-027-Q1-B2-A7
tgcaacatgtactgcttggattgtatgaacggtgctctctgctctctctgcctcgcttaccataaagatcatcgtgctattcagataaggaggtcctcataccatgatgtgattagggtgaatgagattcagaaggtgttggacatcacaggggtccaaacctacattatcaacagcgcgagggttgttttcttgaatgagaggccgcagccaaggcctggtaaaggtgtcaccaacacttgtgaagtctgcgagcgtagccttcttgattcctaccgattctgttctctaggttgtaagattgttgggacttcaaggaacttcctgaagaaaaagtcagcggcaatggtatcagactcag

SEQ ID NO: 2250 - DNA, 376 bp, Glycine max
  Clone ID: LIB3028-027-Q1-B2-A8
gtcttttcatatagatatcccttcaacacaacataggtcatcgaaaggatctcgaagacccaccaacgcacgaaagccgggatctttcagaaaatggattcctattcgaagggtgcataaccgcatggataagctcacactaacccgtcaatttgggatccaattcggttccttaggaggtatcgggaaggaattttggaatgtaataatatcgattcatacagatacagaagaaagggttctctattgattcaaacgctctacctacgagatagggatagagaaagaggaaaaaaccgaggatttcacatagtacttttggtcgaaaaatcgatctgatttttttcgtacttttcgctcaatgatgaaatgggtc

SEQ ID NO: 2251 - DNA, 391 bp, Glycine max
  Clone ID: LIB3028-027-Q1-B2-B10
ttttgataggacgaccctttggtgtttggatcttcaagaaagagagacccttgggatttcgtcaccatgagtctcttcggtcttggaaacagaaaccaaaaaacatttcgtccaaaaaagagtgctccatctggaagtaagggtgctcaacttcaaaaacacatcgatgccacgttgggtagtgggaacttgagggaggctgttaaactgcctcccggtgaagatattaatgaatggctagctgtaaacaccgtggacttctttaatcaagtgaatatcctgtttggtactcttacagaattctgcacgccaagtaactgcccttcaatgactgcaggaccaaagtatgagtatcgatgggctgatggtgttactataaagaaaccaatag

SEQ ID NO: 2252 - DNA, 387 bp, Glycine max
  Clone ID: LIB3028-027-Q1-B2-B11
gtaaaatctacaaacatcttgttggatgaaaagttacaagcaaagttatctgattttggtctatccaaaattatcccaattgatgggggaactcatgtgtcaactgttgttgctggtactccaggttatctagatcctgagtactacatatccaatagattaacacagaaaagtgacatttatggctttggagttgttcttctagaaataatcacttgtcaaccagtaatagcatggaatgaagaaaggactcacataattcaatgggttagatccctgattgggataggggatatcaagggcattgttgactcaaggttagaaggagattttgacattaactcagcttggaaagccgtagaaatagcaatggcgtgtgtttcccta

SEQ ID NO: 2253 - DNA, 386 bp, Glycine max
  Clone ID: LIB3028-027-Q1-B2-B12
cttggtttcagtgaaccatgacactcaatcctgcatggaccccaatgtgatggaggctaaggtggtggtgagttcttgtggccatgatggaccctttggcgccactggggtgaagatgctcaagagcattgggttgattgatactgtgccagggatgaaagcccttgacatgatcatggcagaggatgccattgtgaagctcactagggaggttgtgcctggcatgattgttactgggatggaagttgctgacattgattgtgctccaacgatgggtccaacatttggagcgatgacgatgtcagggcagacatcagcccatctggctttgagatcattgtgacttccccatgctttggattctgtacgataccttcatcttgagc

SEQ ID NO: 2254 - DNA, 340 bp, Glycine max
  Clone ID: LIB3028-027-Q1-B2-B2
ggcgatttgcgtaattgtccaccacctcaccaaccaagccgtcgttctgtttagtcactgaaaaaaaaaaaaaacttccaccgtcggcggccatggcagcgctgtcctccgccgtcactcttgccgccaaaccgctctcactaccccaaaatcaccgcgccagagtagcggcggcgttgcactctcccaagcgccacctcaagagaacggaattcaagttcttcgccaatggctcatctgcctctctccgctcccttccccgcctctacgtttcatccaacgacgcccgcttcaattccggtcccgaggagagccagcaacaacagtcgtcgagttttgc

SEQ ID NO: 2255 - DNA, 360 bp, Glycine max
  Clone ID: LIB3028-027-Q1-B2-B5
aatcaatccttgttcactctatttcttagctccaacaacatcactaaaaaaaatggcctctctccgttttctcttctttgtttctttcttcattgttttgtcactttccatcaacattggtgaggtccaaggtgcaaatagaaaacttttggcaccaacatttcctgatataggcaacattcctggcgtgcaatatcctcctttccccccagtaaccgattggccagagtacaggttgccatcattcttaagacctaattaccccgcaattcctgcaaattattaccgctacactccccctgccaaaacaaccacaaccacagcttccaagccttgatatgagcacgatatgcatgcaac

SEQ ID NO: 2256 - DNA, 375 bp, Glycine max
  Clone ID: LIB3028-027-Q1-B2-B6
ctcatcctcttctttctctctctaccattgccatggatccctacaagcaccggccatccagcgccttcaattctcccttctggactacaaattctggtgctcctatttggaacaacaactcctctttaaccgttggagctagaggtccaattctgctggaggattatcatcttgtggagaagcttgcaaattttgatagggaacgtatcccagaacgtgttgtccatgccaggggcgctagtgcaaagggtttctttgaggtcacccatgacatttctcacctgacatgtgcagatttccttcgagcccctggagttcagacgcctgtaattgttcgtttctcaactgtcattcatgagcgtggtagccctgaaa

SEQ ID NO: 2257 - DNA, 365 bp, Glycine max
  Clone ID: LIB3028-027-Q1-B2-B7
tactggtactgttgtcggatcgaaaaccctaaattgaattcgaatacacaacatgcagcaggggggaggatctgagacggaagtaacatgggaagaccagcagaacatcaacaaattcggaaggttgaataatcgctttcacgagcttgaggatgagatcaaaatcgcaaaggaaacaaatgataatttggaggatgcaagcaacgagttgattctcacagatgaagaggtcattcggtttcaaatacgagaggtttttgctcatgtgccaaacgatgaagttgagaacaggatagaacagataaaagaggtgacaagccagaaattagcaaaacttgaagaggagaaagaatctattcttgctc

SEQ ID NO: 2258 - DNA, 365 bp, Glycine max
  Clone ID: LIB3028-027-Q1-B2-B8
ctcgagccgattcggctcgagctagaaaggagtgcatctgctcaacaacctggatttggtgaacaagtgatgcatcaactttaccatgtaaaaaatgctactcagttgcgcatggatgatattccaaaacttttggcagagtacaaacagctacctatatgaatgcttgtttgatgaaaatgatccccccctcgcccctcccccaaaaaaaaacccataagaattccatggtgagttgtctcaaaaacatggttccccaacaatacatgattcacagtgcatcgaccttgtttaatatcctgaaatgtagcttttctattttcaacattttttatgccatgtttgaacctacgatttcatgattt

SEQ ID NO: 2259 - DNA, 390 bp, Glycine max
  unsure at all n locations
  Clone ID: LIB3028-027-Q1-B2-A12
gagatttgaagtttaaaccttcaaattaatcaaaccattttaatttgcctatagattctgagtcactgctgctatggcgctacgcgtacttcttgtgttggggatgttgctgatgttgtgccttgttaaggtttcatctgatccaaagatagaagaagaaatactggaagcagaagaagaactgcagtttcccgataacgagccacttatcgtgagagacgcgaacagaaggctaatgcaagatatggattgtggtgggttgtgcaagacgaggtgcagtgcacattcgaggcccaacttgtgcactanggcgtgtggcacgtgctgtgtgaggtgcaagtgtgtcncacctggtacatctggaaatagggaactatgtggaacctgcta

SEQ ID NO: 2260 - DNA, 318 bp, Glycine max
  Clone ID: LIB3028-027-Q1-B2-B9
actctctctcgctcgcttatggtatggccgccaattccactacccgacggatcaccgccttagggaagcgagtcgccatccggatctggacttccaacgctcctcctcccacttcaacgacgggagcacacagtagcggctcaatgtacgacatgaaccctgatgatgagatccagtccgggcatgtcccagacgatgtgatcgaggcggcaacacactccggcaaatactgggccacacatacacactactggggtacttgggctccccggaagaagtgacttcactgcctcagccgactcactctgatccgctgga

SEQ ID NO: 2261 - DNA, 355 bp, Glycine max
  Clone ID: LIB3028-027-Q1-B1-D12
ggaggcgactatctgtttgcttttcgaatgataatggttctatttcgacgagaattctctttttgtgattcattgtacctttgggaggatgttgatgacaaatcagaggaatctaaaggaagattaaagtcattgcgccactatggaaagtacgagagagaaaatatgaaaaatggaggaaagaatggtgaagatcctccccttcccatatctgtttttcttgttgctagtgtgcttaaagacaaaagcacaatgttactccagcaagcgcgaggcttggatgatgttgtcaagatattgaatgatgtaaatggaaatcttgatgccaaaaaagcttgtgtggctgcattaaaac

SEQ ID NO: 2262 - DNA, 370 bp, Glycine max
  Clone ID: LIB3028-027-Q1-B1-D9
cttccatcagatatattttcttcaaaaacaatggcaggcgaggtggtgaagaaggaagactctctcaacctgaaagtcactaacaagagtcatgttcaacctgaggagaaaattggaaggaaagagtaccagctggtcacttttgatcttccctacttggccttctactacaaccagaagctgctgttttacaagggtgaagattttgagggtatggtccaaaaactcaaagttggacttggtgtggtgctgaaggagtttcaccaacttgctggtaagttagggaaagatgaagagggggtgttcagagtggagtatgatgatgacatgcttggtgtggaagttgttgaaaccggttgttgttgatgat

SEQ ID NO: 2263 - DNA, 305 bp, Glycine max
  Clone ID: LIB3028-027-Q1-B1-E10
gtatgggcgagtccaagtttttaggggttataaaagcaaagatttctctcaattgctcttttcagtgaagagatcatcaatgagaccgagtgggatggttaacttacaggtcttcctcgctatcaaccaaagagaaagtgcctgtgactttagagtcaacgtctaatgtgtggagatctcagatcatgcacagtttatgccggtgaatctccaatacttgttgctacgatggagaatatgtggcggcttcaatgttttggtctattcctaggtggacgatccattcatagtggcactacttatga

SEQ ID NO: 2264 - DNA, 379 bp, Glycine max
  Clone ID: LIB3028-027-Q1-B1-E11
caatatattccattctctctgtgtatttccctacctctcccttcaagatgcagatcttcgtcaagaccctcaccggcaagaccatcacccttgaggtggaaagctctgacaccatcgacaacgtcaaggccaagatccaggacaaggaaggaatccccccggaccagcaacgtctcattttcgccggaaagcaacttgaggacggccgtacccttgctgactacaacattcagaaggagagtactcttcacctcgtcctccgtctccgtggtggcatgcagatcttcgttaagacactcaccggcaagaccataaccctagaggttgaaagctccgacaacaaccaataacttcaaggccaagatccaggacaaggagg

SEQ ID NO: 2265 - DNA, 362 bp, Glycine max
  Clone ID: LIB3028-027-Q1-B1-E12
gctctgcgagatcttcattcgccgattttacaagatgagtaagcttcagagtgatgctttgcgtgaagccatttcaggaagcatggccgattccagtgagaagaatcgcaaatttgtggagaccatcgaactccatatcgggttgagaaactacgatccacagaaggacaagcgtttcagtggctctgtcaagctgccccacatgcctcgccccaagatgaaaatttgcatgcttggtgatgctcagcatgttgaagaggcggataagatatgactggactggatggatgtggaagccctgaagaagctaaacaaaactaagaagttggtgaagaaactagctaaaaaataccatgcccttt

SEQ ID NO: 2266 - DNA, 343 bp, Glycine max
  Clone ID: LIB3028-027-Q1-B1-E9
ctcgaatcgagtttaaagctgaaaatgagggaaaattccactcattccacccagttgcgaccatccttagttacctgaccaaggcccctctggttccaccgggtacaccagtggtgaatgcgttgtcaaagcagcgagctatgctggaaaacatcctgagggcttgtgttggattagctcctgagaacaacatgatcctagagtacaagtgaagttcaaagtcttaagagtaacggtttgggatagtgtagttgaatgtgatcaaaacttaactcatatcccatacccctcttttctgttatatatttctggcaaatgtgaaatttgaagatcgttgaatctc

SEQ ID NO: 2267 - DNA, 363 bp, Glycine max
  Clone ID: LIB3028-027-Q1-B1-F10
aactcaaacgaatacgttttctctttctcttcaatttcacccttattagcatagcatattcatttccctttcttgaatcgttcttaactgcgagaggggatatcagagaagttgattggcctcccattaataacagatctgaatgatctgatggagtctaaaggtgggaagaagaagtcgtctagtagtaagtcctttttgtacgaagctcctctcgattacatcattgaagacgttcgaccacacggtggaatcaagaagttcagatctgctgcttactccaactgcatccgcaagccatcctgagattccctaggtcgtgtgaggacgtagcccccttagtcctgcatctgctatattttt

SEQ ID NO: 2268 - DNA, 346 bp, Glycine max
  Clone ID: LIB3028-027-Q1-B1-F12
gtttattggacaaatatcaaaattatgtcgtggtggaggacgtggaaagccaaattttgctcatgctggtgcgaggaaccctgaaaatttggcaagtgcgacttcataaagctcggtcagagcttatagccactctatgtgaaaaagggaattgacattaagtacacttaacaaatagatcttcttatgctaaatcagcagagtatattgattctctgttgtcgaacaattcatcactaaacaattcacaagcaatcggggcggaaactgctgaagttttaacgagttttcttgcaattccagggggcatgtacttgaattttcaaaatactatagagcatttgtt

SEQ ID NO: 2269 - DNA, 340 bp, Glycine max
  Clone ID: LIB3028-027-Q1-B1-G10
ctttagtgtggtctaaagaagtggaactctattcaactaatcagaattgcgtgaagatgctagttggaaataaagttgatagagattctgaaagggttgtgagcaaagaagagggtttagcacttgccgaggagttgggatgtctgttttttgaatgtagtgccaaaactcgagaaaatgtggagcggtgcttcgaggaacttgcactaaagataatggaagttcctagtcttttggaagaaggatctacagcagttaaaaggaatattctaaagcaacaacaacaaccccaagcatccgaatttggtggttgttgctcttaattgctgcaatgtgaaca

SEQ ID NO: 2270 - DNA, 322 bp, Glycine max
  Clone ID: LIB3028-027-Q1-B1-G11
gtggagagagataattcaatggtctcgttgatgtctataagaagacattggtatctgatggtgttgccgggctctaccgtggttacaatatctcaggtgttggaatcatcgtgtatcgtggtctgtactttggattgtacgattctgttaaaccagttgtcctcacagggtcattgcaggatagcttttctgccagctttgcccatggatggttcatcacctatcgtgcaggtcgtgcatcagatccactacacactgttagaagatgattgatgatgacctctggtgaagctgtccagtacaagatctccttggatgcatt

SEQ ID NO: 2271 - DNA, 343 bp, Glycine max
  Clone ID: LIB3028-027-Q1-B1-G12
cttcacccaaattattcattccgcattttttccccagtaacaatattagtcaatcgaattaatttccatgaccatgtccataacactcttactcgaagccaagccctcccacttgaaatggaaccagttaccatcccttccacgtcgcacaaggcccgaccgtttcactccaatacccgactcgaatctccgcgttgcaagcgtcaaatgtatctcctcgtcgtcggaagccggatgacacgtgtattctgcagtctccgtgggaggttccggcgagcacggtgtcgaacacgctgaacgcgcttaagaaatcggtgatagctgctgtgttggtggggccgtt

SEQ ID NO: 2272 - DNA, 344 bp, Glycine max
  Clone ID: LIB3028-027-Q1-B1-G9
caggccccttttgatcctgaaggactcctaagttcagtgatggctattgtcacctgcttgattgggttgcactatggacatattattgtccattttaaggaccacagagtgagaatcatatactggatgatcccaacctcttgtcttttagtttttggccttgcgttggacttatttggaatgcatataaataaggttctctactcgctcagttacacatgtgtcactgctggtgctgcaggcgtcctctttgtcggaatatacttgatggttgatgtctgtggatgtcgtcgcatgactttggttatggaatggatgggcatgcatgcattaatgatttatat

SEQ ID NO: 2273 - DNA, 352 bp, Glycine max
  Clone ID: LIB3028-027-Q1-B1-H10
aatgacttgggagtgaagttcccatttaaccaaccaatggaagatatacaacagtttgtggaatgctgatgactgggccacaaggggtggtttggagaaaacagattggtccaaagcccccttcatagcctcctacaagggcttccacattgatggttgtgaggcctcagtcaatgccaagttctgtgacacacaaggcaagacgtggtgggatcaacctgagtttcgtgatcatgatgctgctcagtggcaaaaactctcctgggttcgccagaaatacaccatctacaactactgtgctgaccgcaaacgctaccctcaagtctctccagagtgtgctagagaccgttat

SEQ ID NO: 2274 - DNA, 333 bp, Glycine max
  Clone ID: LIB3028-027-Q1-B1-H11
cctatgtgctatatggtggagccacggttcctgcacagtgctgcaatgggatcaggaacctctatggcatggctcagaccaaagcatatcgccaagctgtttgcaactgcatcaagaacgctgttaggaacagtggcttcacctactctcacttcaatctcaaccttgctgctaaccttcccaagaactgtggggttaacattccctaccagatcagccccgacacagactgcaccagggtgcagtgaggttggtgcatgatgtgtatgttagcagtgttagaataagaggccacgtgacacgaacagggaatggctagaaattgctttttta

SEQ ID NO: 2275 - DNA, 348 bp, Glycine max
  Clone ID: LIB3028-027-Q1-B1-H12
aaaaatatgaaaatgatgtacattggagcacttgttgtactcattgcattacgcttcctcaattgcgacgaggcagaagacacgggaagccttgtgcctgcaatcataacttttggtgactcagccgtggatgtagggaataatgactatcttcccacccttttcaaggctgattaccctccttatgggagggactttgctaaccaccaacctactgggaggttctgcaatggcaaactagctactgattttactgctgacactttgggtattaagacctatgctccagcatatcttatgccacaggcatcagggaaaaacctccttattggagcacactttgcttct

SEQ ID NO: 2276 - DNA, 354 bp, Glycine max
  Clone ID: LIB3028-027-Q1-B2-A1
aactccgaaatccggtccaaggcgaaaaccggttgaataagctcaagaattgagatttgtgggtggtacttgacatggattgaggaatgaagcgactttgtcatgttatttggttggcgattgtgttgttgctaggaaattttcgaaaatgtgtttctcagttgccccaagtcctgattagtctttccccccaagtgtttggatatgttctatgttgtggagtatcggtgttagtcgaggctgggcacttcatggacgatttaagggatctgggacagtttgaactcctaggtgaagaaaatgattctcacaaagcagtaccgatgcatacactcagctagctgtcaatgtact

SEQ ID NO: 2277 - DNA, 389 bp, Glycine max
  Clone ID: LIB3028-027-Q1-B2-A10
ccaacaacagggtttgtcctgttttctcataagtcataatgcctttctttctttggattggtagcaattttttcttaggtaataacacattgcctaatatttgtaacagtgtgactgcatactcgattcaagatgatgcactgaagactggtgaacttgactacgtaaatggagctgcacttgttcggtattccatatcaggaaacttcctaggacttcctgctgtaactgtaccggtatgattatgttttccttttacttagttactcctttaatgttacttacttacacttacaccccaatagttagcttgtgtttggtctacctatcaaatactacattattttttgagtttaacagagtcagtacataagtttgtatgctatcaa

SEQ ID NO: 2278 - DNA, 285 bp, Glycine max
  Clone ID: LIB3028-027-Q1-B1-D11
gtaagtttgtgctgctagagagaggggttccgttctgggatactgtgtacataacaattctgactgtttcaacatgtaatgtgtccgagcttgcaaatgttggcaatcacccttattgagtgtacctagccacatctccacatgatctagacttaacacctattcttatcttctcatcctttctactctgaatccaaaacatgcactgcagcagcagtcacaactcacagacataccagtaggatgcatagactcatcacgcatctaagagaacctcatcctcag

SEQ ID NO: 2279 - DNA, 272 bp, Glycine max
  Clone ID: LIB3028-027-Q1-B2-A11
cttgaagatcgagattttgcatcaaggaagggtgatcccatgccattccctcctggggttggtggaggacgcatagttggagatgccaaccttgatacttttgaggtgattacggccgaaaaaccaattgacgaaaacaatgttggtaatcggatccctcacaatatgcgctgacaagagagatgggtactgttgtgcccccccacatcatcagattttacacattacacatttttgtgatacaacttgttttgtggagcatcataaaatat

SEQ ID NO: 2280 - DNA, 353 bp, Glycine max
  Clone ID: LIB3028-026-Q1-B1-H12
gtgaacaagggaagaagcttcgttaccgaatcaaggatatcaaggaggctgcggctaaagctctcgctcaacatggttcctccaccaccaacatctccaatttggctctcaagtggacccacaaattcaactagtagcttcttcctttcaattatctgcacttaacttatcaaatgtcacttggcatacatgacattaataaaataattgggtaagtgtacgtaaatttcaaatccacatcccgacgatgttcaatggctagacctctaacttgtagtatatgtttcaaaatgcctttcaaccttaaattactaagttctatggctgcctggctaattaattaacgtcaattt

SEQ ID NO: 2281 - DNA, 354 bp, Glycine max
  Clone ID: LIB3028-026-Q1-B1-H2
tggcaacaggtgcggctgtggttcaaaaataatcagatattttcagcaggtcagaagatgagatatctttacccagtcaattataagcatgggtttgtggaacacaacgaatgcagtgtcttgccgctttcacaagtttggtgatgaccaaaagaatctggtcttccaaggtgatgccacgtcttcttccaggggcatagaactcacaaagttagacggtggaggaaaaccagtgggtggcagtgtggggagagtgttatactcttctccagtgcacctttgggaaagctctacagtggtcgcaagctttgaaaccgacttcaccttttccatctcatcagactctactactcc

SEQ ID NO: 2282 - DNA, 395 bp, Glycine max
  Clone ID: LIB3028-026-Q1-B1-H3
caagtagtttcagaaagatgctagagaatcttcaggctcctccgtcaacaacggaatcggccccagtggtgaagcgctatgctccacccaaccagaggaaccgttctgctaacaggcgcaaatcatctgatcggcttgatcggacaaacagtgtcgggaatgacttagaaaagaatcaagttgcttcttcaagaagtgttcacattccagatcatgaagatgctggtagcagtaatcttcttaatgagaatcactattcaagattcatagctttagaagggtgtagttgcagtgcagctgcccagcttcttaatgatcgttggacagctgcaatacaatcctacaataatcccaaagattcatctgaaaagccagttatgtattcgagtgggact

SEQ ID NO: 2283 - DNA, 367 bp, Glycine max
  Clone ID: LIB3028-026-Q1-B1-H4
ggaggcaatggctcgcctaagctccgatcaggtcttgaaggacaacaatgccgccgacccaacttccgttaccactcttcacctcactcacaaagctctttccgacataacgtgtttggccaatttcgtaaacttggaaaagcttgacctcaagctcaacaatctcacttctcttgagggattgagatcatgtgttaatttaaagtggctatccgttgtagaaaacaaattagaaagcttggaaggaattcaaggacttacgaagctcactgtaaaaataagcttaaatctattgatcaggtcatgtcagttgttagtctccgagcactgattttgaatgaaaatgagatttcctctatttgcaaac

SEQ ID NO: 2284 - DNA, 381 bp, Glycine max
  Clone ID: LIB3028-026-Q1-B1-H5
ggtgtttcatttgtgaaactaacaacaacacaaggccatcatcatggcagctgcttccccaatggcaagccaactcaagtccaccttcactaggactcttgtagctcccaagggcctctctgcctcttcaccacttcacctcgtgccttctagaaggcaatttagcttcactgttaaggccatccaatcagagaagccaacctatcaagtgattcagccaatcaacggtgacccattcattggaagcctggaaaccccagttacatccagccctttgatcgcatggtacttgtccaacctgcccgcatacagaaccgcagtgagcccactactaagagggatcgaggtgggcctggcccacggataccttctggtgggccc

SEQ ID NO: 2285 - DNA, 65 bp, Glycine max
  Clone ID: LIB3028-026-Q1-B1-H7
aagcattgatggatacatctgcatgtgttctgcaaactaattaaaaatgctcgtacaattggttt

SEQ ID NO: 2286 - DNA, 373 bp, Glycine max
  Clone ID: LIB3028-026-Q1-B1-H9
gcaaatgcgggtctttgcaccatctccatctgggtttcggaaggtgatattggcaactaatattgctgagacatcagtaacaattcccggaatcaagtatgtaattgatcctggatttgttaaagcacgttcttatgaccctggaaaaggcatggaatccttgattataatacctacatccaagtcccaagctctgcaaagaagtgggcgtgcagggcgtgaaggacctggaaaatgcttccgtctatatcctgaaagagaatttgagaaacttgaggactcaacaatgccagagattaagcgttgcaacctttctaatgtcattttgcagcttaaggctttgggtgttgatgacatactaaggtttgatttc

SEQ ID NO: 2287 - DNA, 354 bp, Glycine max
  Clone ID: LIB3028-027-Q1-B1-A10
ccaacaacagggtttgtcctgttttctcataagtcataatgcctttctttctttggattggtagcaattttttcttacgtaataacacattgcctaatatttgtaacagtgtgactgcatactcgattcaagatgatgcactgaagactggtgaacttgactacgtaaatggagctgcacttgttcggtattccatatcaggaaacttcctaggacttcctgctgtaactgtaccggtatgattatgttttccttttacttagttactcctttaatgttacttacttacacttacaccccaatagttagcttgtgtttggtctacctatcaaatactacattactttttgagtt

SEQ ID NO: 2288 - DNA, 336 bp, Glycine max
  Clone ID: LIB3028-027-Q1-B1-A11
cttgaagatcgagattttgcatcaaggaagggtgatcccatgccattccctcctggggttggtggaggacgcatagttggagatgccaaccttgatacttttgaggtgattacggccgaaaaagcaattgacgaaaacaatgttggtaatcggatgcttcgcaacatgggctggcatgaaggattggtaccgttttgttcctcctcattacatgagtgtttacgtattacatttttttgttaatcacgttgtttggtagagcttgatatattattccaaatttcctcttttcatggatatgctagtactttgatcctagacctacataatagtttc

SEQ ID NO: 2289 - DNA, 369 bp, Glycine max
  unsure at all n locations
  Clone ID: LIB3028-027-Q1-B1-A12
gagatttgaagtttaaaccttcaaattaatcaaaccattttaatttgcctatagattctgagtcactgctgctatggcgctacgcgtacttcttgtgttggggatgttgctgatgttgtgccttgttaaggtttcatctgatccaaagatagaagaagaaatactggaagcagaagaagaactgcagtttcccgataacgagccacttatcgtgagagacgcgaacagaaggctaatgcaagatatggattgtggtgggttgtgcaagacgaggtgcagtgcacattcgaggcccaacttgtgcactanggcgtgtggcacgtgctgtgtgaggtgcaagtgtgtcccaacttggtacatctggaaata

SEQ ID NO: 2290 - DNA, 378 bp, Glycine max
  Clone ID: LIB3028-027-Q1-B1-B10
ttttgataggacgaccctttggtgtttggatcttcaagaaagagagacccttgggatttcgtcaccatgagtctcttcggtcttggaaacagaaaccaaaaaacatttcgtccaaaaaagagtgctccatctggaagtaagggtgctcaacttcaaaaacacatcgatgccacgttgggtagtgggaacttgagggaggctgttaaactgcctcccggtgaagatattaatgaatggctagctgtaaacaccgtggacttctttaatcaagtgaatatcctgtttggtactcttacagaattctgcacgccaagtaactgcccttcaatgactgcaagaccaaagtaatgaattaccaatgggctgatggtgttacaa

SEQ ID NO: 2291 - DNA, 342 bp, Glycine max
  Clone ID: LIB3028-027-Q1-B1-B11
gtaaaatctacaaacatcttgttggatgaaaagttacaagcaaagttatctgattttggtctatccaaaattatcccaattgatgggggaactcatgtgtcaactgttgttgctggtactccaggttatctagatcctgagtactacatatccaatagattaacacagaaaagtgacatttatggctttggagttgttcttctagaaataatcacttgtcaaccagtaatagcatggaatgaagaaaggactcacataattcaatgggttagatccctgattgggataggggatatcaagggcattgttgactcaaggttagaaggagattttgacattaac

SEQ ID NO: 2292 - DNA, 324 bp, Glycine max
  Clone ID: LIB3028-027-Q1-B1-B12
cttggtttcaatgaaccatgacactcaatcctgcatggaccccaatgtgatggaggcgaacgtggtggtgagttcttgtggccatgatggactcattggcgccacgtgggtgaagaggctcaagatcattgggttgattgatagtgtgccagggatgaaagcccttgacatgatcacggcagaggatgccattgtgaagctcactagggaggttgtgcctggcatgattgtgactgggatggatgttgctgacattgatggtgctccatcgattggtccaacatgtggagcgatgatgatgtcagggcagacatcaggccatct

SEQ ID NO: 2293 - DNA, 376 bp, Glycine max
  Clone ID: LIB3028-027-Q1-B1-B9
actctctctctctctcttattgtatggccgccaattccagtagccgagggatcaccgccttagggaagcgagtcgccaaccggatctggacttccaacgcacctcctctcacttcaaggaggggagcatacagtagcggctcagtgtacgacgagaaccctgatgatgagatccagtctgggcaggtcccagacgatgtgatccaggcggcaacacaatccggcaaatactgggccccacatccacagactggggtatttgggccccccggaggaggtgaccaaactgcttctgccattcactctgatgcgctggaggagaatgcccggtttcgccccgacagtccccgaggattccgagaagcctcacacccttc

SEQ ID NO: 2294 - DNA, 376 bp, Glycine max
  Clone ID: LIB3028-027-Q1-B1-C11
ctcgagccgattcggctcgaggggagttgttgaatcgggaagcaaaaaaaatgagaatccatcacatagcatgcctccaagacaattattcctatctgatcgtagacgagagcacgaaggaagccgcggcggtggacccggtcgaaccggagaaggttcttgaagttgccagctcgcacggcctcactctcaaattcgtcctcaccacccaccatcactgggatcatgctggtggaaacgacaagataaagcagctggtgccaggaatcaaagtctatggtggttccattgaaaacgtcaagggttgcactgacaaagttgaaaacgggtgataagtctctcttggagctgaaatcactatattggcccttcacac

SEQ ID NO: 2295 - DNA, 378 bp, Glycine max
  Clone ID: LIB3028-026-Q1-B1-H11
aaaggagagtgcaataactcgttgtacattcctagtgtgtgggagagacatggctaagatgtgtgttttggtgttggttcttgctctggctgtggccacaagtgccagaaacgttcccaaccccaaggatgctggtcttaaggaccagaagaacttcatcagctatggtggagttggtggttattccgggattgggaacaatggactgccttttggaggagctggtgccggaataggtggtggttttggcggaggtggtggacttggtggtggcctcggcggtcctaccggtgggatcggagggtttggcggtaccggtagcggtgtccgtggcggtattggtggtggcgttggaactggcgttggtggtggcaaccg

SEQ ID NO: 2296 - DNA, 299 bp, Glycine max
  Clone ID: LIB3028-027-Q1-B1-C9
atccccccctatctacagagcagccaaaggggaggaataataataaccctatattctaaggccggaaaaataaaaaaggaataacaaacatgtctggaaaggtaattatctcggctgtttctctcatcctggtggttggagtggccataggtgtggtggtggccgtctacaataatgtctaggatgttacacttcaatctcatcaaaaatcagtaagggtcatctgccatcaacagtgatgtacagacgctctgccactaaactctaacccccgtgaacggcatggacaccccttatcc

SEQ ID NO: 2297 - DNA, 350 bp, Glycine max
  Clone ID: LIB3028-027-Q1-B1-D10
cagtggtactgtgggtaatgagagaattaccacctgaagaagctgctagcatacccgaagaatcaagtacaatagcttttgttgctgatagttcaattgcaatccatcatcctcaacgctgggctacagcaacaagcatgcagaatcagacatcaagagcgagtcctatatgattatgcattaacctttgcaaatatatcttggtctgctggagtttggacagcttaatggaatttcctcaggatgtttaaccctagagcgcagaagagagaaaatgataatgatggatgcaagttctcaagggacttgaggtttcccttcccactgtatttacaatctaaatctaaatg

SEQ ID NO: 2298 - DNA, 375 bp, Glycine max
  Clone ID: LIB3028-026-Q1-B1-F8
gcaccacgtatccctgagaaaagagaggaaccacactctctaagccaaagcaaaagcagcagcagcagcaatggttaaagacacaaagcctttagcctatgctgccaataatggataccaacaaaagggttcttcttttgattttgatcctagcgctcctccaccgtttaagattgcagaaatcagagcttcaataccaaaacattgctgggtcaagaatccatggagatccctcagttatgttctcagggatgtgcttgtaattgctgcattggtggctgcagcaattcacttcgacaactggcttctctggctaatctattgccccattcaaggcacaatgttctgggctctctttgttcttggacatgattg

SEQ ID NO: 2299 - DNA, 373 bp, Glycine max
  Clone ID: LIB3028-026-Q1-B1-F9
gttcattgctcaattgtttccctcacaactcataacctctttcccatttaacctttgaaaaaattccatactgtaacaacagatcaccatggctctatcacgtttgtcccaccgcagcatcggatccactctcacaaaacccttctccgccgccgccgcctcctcccgttcgatctccacctcggacacccccttaacaatcgagacctctgtccccttcaccgcgcacaactgcgaccccccgtcacgcgcggtcgcgacctcctcctcggagctcctcaccttcttccgcgacatggccctgatgcggcgcatggagatcgccgctgactccctctacaaggccaagctcatccgcggcttctgccaactc

SEQ ID NO: 2300 - DNA, 374 bp, Glycine max
  Clone ID: LIB3028-026-Q1-B1-G1
gccggtgatcggaatcctgacccaccccggcgacggtgcctctggccggctcagcaacgccaccggggtttcttacatcgccgcctcctacgttaaattcgtggagtccggtggtgctagagttattccccttatctacaatgagtcacctgagaaccttaacaagaagctcgatttggtcaatggagtgctcttcactggtgggtgggctgtttctggtccatatttggatactcttggaaacatttttaagaaagctttagagaaaaatgatgctggagaccatttcccagtaattgccttcaacttaggtggaaacctcgtaataaggatcgtaagcgagcaaactgatattcttgaaccatttactgcgt

SEQ ID NO: 2301 - DNA, 371 bp, Glycine max
  Clone ID: LIB3028-026-Q1-B1-G10
aatatatcatcaattataagcatgggtttgtggaacacaacgaatgcagtgtcttgccgctttcacaagtttggtgatgaccaaaagaatctggtcttccaaggtgatgccacgtcttcttccaggggcatagaactcacaaagttagacggtggaggaaaaccagtgggtggcagtgtggggagagtgttatactcttctccagtgcacctttgggaaagctctacagtggtcgcaagctttgaaaccgacttcaccttttccatctcatcagactctactactccaggtgatggccttgccttcttcattgcaccatttgacactaaaatccctccaaactctggtgggagcaaccttggactcttccc

SEQ ID NO: 2302 - DNA, 377 bp, Glycine max
  Clone ID: LIB3028-026-Q1-B1-G11
caggcatcatgcaataacaaacatgttacgtgaagatactgcttggcaccctgtttggaaggacgagtttgaatctactccacttttgaggaaagcaataatagacggatatggtccacttcgatgttggatgtctatagctcactggttgatgtggcactttgatttgaagaagttcagaccaaatgaagtaccaagggtgaagataagtttggcttgtgtttttgcctttatagcaattggatggccattaaatatttacaagactggaatcatgggatggataaaattctggttgatgccatggctgggctaacacttctggatgagtacgtttaccatggtacatcatactgcatcgcatataccattcaaat

SEQ ID NO: 2303 - DNA, 364 bp, Glycine max
  Clone ID: LIB3028-026-Q1-B1-G12
attaatgtgtgtttgtcacgagacccatagtgctgccaaattatagtaactctctttctctatctgaagaagaagaagttctgaagaagcatgtgtggaggtgctatcatctcagacttcattggtgtgaagcgtggccgcaacctcgccgcgcaggaactgtggtccgagcttgaccctttctctgacctccttggcttcgataccaccaccagcaccagcaaccaaccaccccttccagacaaaaaagtggtgtcatcatgtgagaagaagaagaagaaaagtgtgagtgcagaaaagaagagtggtgggcgagctcggaagaacgtgtatagatgaatcatgcaaaagccgtggggcaagt

SEQ ID NO: 2304 - DNA, 374 bp, Glycine max
  Clone ID: LIB3028-026-Q1-B1-G2
ctcgagccgcctttccattcctttcttccttcgtcccattctcgaattggcgtgtgcctcttgcaatcccccaaaggttttttgaagcagaagaatggacttctttactagagacataaatgaggattctatgcttagatgcccattcttgaggaacatcaatgagcctactaacttctcattctcttcacctttggctttaccaatgcctgttcgtggagctaaaggtccaatttttgaagatggtcccaattttgatttggcatttaggcttttccacgggagtgatggtgtagtacccttatctgacagatcttttcggccttcagagaagaaagtacaggcagaacctcccaaatcccaattcaatcctt

SEQ ID NO: 2305 - DNA, 391 bp, Glycine max
  Clone ID: LIB3028-026-Q1-B1-G3
agcactcaccctcattaccaacacgaaagcatagccaaaaccttttttcgaagtctctgattttcctaatggctccggcaaaggcagagaagaagccggcggagaagaagccagcggcggagaaggcaccggcggagaagaagccgaaggcggagaagaagatctcgaaggaaggagggagcgagaagaagaagaagcgcacgaagaagagcgtggagacctacaagatctacatcttcaaggtcctcaagcaggttcaccccgacattggtatttccagcaaggccatgggcatcatgaacagcttcatcaacgacatcttcgagaagctcgcccaggaagcgtcgcgtttggctcgctacaacaagaagcccaccatcacctcgaggga

SEQ ID NO: 2306 - DNA, 368 bp, Glycine max
  Clone ID: LIB3028-026-Q1-B1-G4
ggaaagcataatcaaatcaaccatggctaccctcattgctcccatcaccttttcgcctggtttagatgcagaagctcttagaaaagctttccaaggatgggggactgatgagaagaccgttatagcaatattgggtcacagaaatgttcatcagaggcaacaaatcagaaagatttatgaggaaatttaccaagaggacctcatcaaacgcctagagtctgagctctctggtgactttgagagagctgtgtaccgttggatgctggaacctgcagatcgtgatgctgttttggccaatgttgccatcaagaatggcagcaaaggttaccacgtgattgtggaaattgcttgtgtgctttcagctgaag

SEQ ID NO: 2307 - DNA, 404 bp, Glycine max
  unsure at all n locations
  Clone ID: LIB3028-026-Q1-B1-G5
attcttctctatgtcactcaatgaaaaggaaaaagtaggacctcccaatccatttgggtatggtagcaagaaaattggacacaatggggacgttggttggattgagtaccttcttctcaacaccaatcaagaacacaacttctctgtttatggcaaaaaccctgagaaattcaggtgtctgttgaacagttacatgtcttctgtgaggaagatggcatgtgagattcttgagttgatggcagaagggttgaagattcagcaaaaggatgtgtttagcaagcttctaatggataaacaaagtgactctattttcagggtgaatcattacgctgcttgtcctgaaatgactctgaatgatcagaacttgattgggtttggagaacacacaganccacaaatcatct

SEQ ID NO: 2308 - DNA, 373 bp, Glycine max
  Clone ID: LIB3028-026-Q1-B1-G6
aagaaaaaaggctccaccgaaatcaatttcccacagaatcaaacaaatcgttggagttggaaaacaaaacaagagaaaatgggtggacgcaagtgtttgttaacgttggtgttgagtttggtgttgatgatgagtatggcagaggcgcaatctggtactagcgcagactgcgcccaggagctaattccatgcctggactaccttaatggcacgatcaacccaccaagctcctgctgcgaccctctgaaacgaacagtccaaaacgaactcgcctgcctctgtaacatctacttctcccctggccttcttcaaagcgtcaatgtcactgtcgatgaggctctcggcctcagtcgccgctgcggcgtcactagcg

SEQ ID NO: 2309 - DNA, 387 bp, Glycine max
  Clone ID: LIB3028-026-Q1-B1-G7
gggagagggagagagaaagaaaggtgaattggattgcatctctctctgtgtgttggaagaggggaatcgtagatctgatttctttctttctttttaataattttgtgatcagaattattgagctgaacaaaagacaatgggattgtgggaagcttttctcaattggcttcgcagcctttttttcaagcaggaaatggagttatctctaataggacttcagaatgctgggaagacttcccttgtaaatgtagttgctaccggtggatatagtgaggacatgattccaactgtgggattcaatatgaggaaagtgacaaaagggaatgttacaataaagttatgggatcttggagggcaacctaagttccgcagcatgtgggaacgtta

SEQ ID NO: 2310 - DNA, 355 bp, Glycine max
  Clone ID: LIB3028-026-Q1-B1-G8
gttactgttagatgtcacagggaagaaagagcgtcgagaaggttcagttcagatcctccgtctccaccatggcaactcccaaggcatcgtcgaaatggaccgagaacatttcctcaatagcagctcgcatcttcttccttctcatcatctttcagatccctcttttcagggtgacttgcagatctggcatgtgtacaacccctttgcatgtcacgtcgtcacaattaattgcaagtgagatctttcctgttgttgttgtgaagggccttctgtacccaggggctgcagtgaacggcctcatccacaacatgactgttccaagttgggataatttgttggacttgtataacttgac

SEQ ID NO: 2311 - DNA, 365 bp, Glycine max
  Clone ID: LIB3028-026-Q1-B1-G9
ctcgagccgctcgagccgattcggctcgagatttacagcaagtctttcaaagccgattatgcattccccgaatggatttcccctgcggccaaaaacttgatctccaatttactcgttgtggacccgcaaaagaggtattccattccagacatcatgaaggacccttggtttcaaattggcttcttgaggcccattgcgttttccatgaaggagtctgcgcttgaagataacattgatttcagcggggatgatgttcctagtcctggtagtgatgatggtaatagcagcagcaacaacgaggatggggagttgacgggggctaagcctgctcgtccgtcttacaacgcttttgagataatctcgtc

SEQ ID NO: 2312 - DNA, 398 bp, Glycine max
  Clone ID: LIB3028-026-Q1-B1-H1
gaaaaaatcaggtctcaaatggatgttattgacaatggtgtccctgctccattatcaatgttcagtgagagtgattcagacatgaaatctgttaatatagatgacttgctgcccaaagaaaagctgcagaggaagttgccaaagccatcagcgggaaggcgaaaaaatggttacctacaaaatggtggttctgtgcatccttatgctgatccagagcaatgtgcagatacaaagcaatcctttggagcctcttccagtggggttacttctcttgatagcatccagaaacataagttgaacatagattctgattctttaggctgtatacagacacaaattcctatgacacgccctgactatagtcatgctccaaatcacacttccctctttccgacttt

SEQ ID NO: 2313 - DNA, 368 bp, Glycine max
  Clone ID: LIB3028-026-Q1-B1-H10
attctttctcaaaacacttgctccattattattttctcattcattcgttcatcatggttcggttcagcaacaacgtgatcggactcctgaacttcctgaccttcctcctctccatcccgatcctggtggccggagtgtggctgagcaagcagggcgccaccgagtgcgagcggtggctggagaagccggtgatcgcactcggcgtcttcctcatgctcgtctcactcgccggcctcgtcggcgcgtgctgtcgcgtgtcgtggctcctctggctctacctcctcgtcatgttcgtcctcatcgttcttctcttcgccttcaccatcttcgccttcgttgtcaccaacaagggcgctggcgaagttgtg

SEQ ID NO: 2314 - DNA, 396 bp, Glycine max
  Clone ID: LIB3028-026-Q1-B1-F5
atactctacgtggccagtgccaagcaagtttgcttggcttttgctgcaaatggtgacgatagtgatgttactatatatgggaacgtgcagcagaaaacaatagaggttgtgtatgatgttggtggtggaagaattgggtttggtgctggtggctgcaagtgattaagattaaacatatgctttgggctagttagagaaaaatcaatcttaattggctctaggctttcataattattgttgttccttttattgcaaagtgtacgtaacagtggcaatagaaaaaaaaggaaaacaaaaatgtgggaattaaatataatatagtttgtagcatgaagaagaatggaggggtgaatatatgactctcaagccgtgcgattgcttgcaattgtacatatg

SEQ ID NO: 2315 - DNA, 341 bp, Glycine max
  Clone ID: LIB3028-026-Q1-B1-E11
cctcccttccctttgtctcctctgggtaaaaaatcttctaaaaatgaaaatttgggagaatgcagaaatattgatgttatcttggatgatggcaattttacttttaatagtgtggaacagtcacttgatagaacttgtcaaggcattttatcagctcaggagataccaggtaaatcacagctcaatttgaacaatatgcagcaaaagtctgacctgtttactcctgacaacatgattgatatgaaagaatactggactcattctggtagctttcctcctcgggatgccaagttatgtggaactatgagtagactgccaattagaaggtccttggttggttc

SEQ ID NO: 2316 - DNA, 341 bp, Glycine max
  Clone ID: LIB3028-026-Q1-B1-E12
gcagtgcaaacctggcattgaaacatttaaggcatcatcatctgtcatcgagagtcaatctggagtgtcttctgatgccatcaaagattctccagccaaaactgaatcagaaaccatcaaggtggaccactgcaagtcaggagctgatctggctaatggcagtaccacagttgaggaaagctcattggaagtggctgagaagcaggatgctcctgaaattcaagcttccgacaatcctgagcaacatgctagtgaagatagtggtaatgcctcaaagcgtccaaggacagaggagtaagccatatgatctactgaatcagcattgaactgacaagacgata

SEQ ID NO: 2317 - DNA, 384 bp, Glycine max
  Clone ID: LIB3028-026-Q1-B1-E2
gtagcttatcctcataatagtagctctgcgggtaagaatccttcagtagaaggtttgtgtgatatataggtataggtgagttgtggatccaaaagatgctgagacttggtaaaaatcggtttatagttgggttcctgataagcaatctagtagttgtgttgtactacgtcatgcaagaatttatggtcctcttgcataaaactattcattatttgttagctaggaaatgtatgtaaggagtgtgaccagagttctcattgcacctgctctgcatgtaaacatggttcttttattagtccatttaatttccttagggttattagtttattcagtactatttgtctattgtgaattgtggcttgtattaagagtaatatataaata

SEQ ID NO: 2318 - DNA, 379 bp, Glycine max
  Clone ID: LIB3028-026-Q1-B1-E3
aaagcattgaattcaaaaacttaagttcattccttgtgttttgctttcttcctcaaaaccaaacatgtcgaacacatgcggcaactgcgactgcgctgacaagactagctgcaccaagggaaacagctatggtgttattgtagagactgagaagagttacatcgagactgttgtcatggatgttccagcagctgagcatgatgggaagtgcaagtgtggcactaactgcacttgcacggactgcacctgtggccattaaggaatatgtatgaaaatgtaattgccatgtgtttggcaatacaaatatccaaataatgtaatcttcgtatgaataaatgtgtgtgctgttatcctacttcaggtctgtgtaatcatgcag

SEQ ID NO: 2319 - DNA, 399 bp, Glycine max
  Clone ID: LIB3028-026-Q1-B1-E4
taagaattaagccaaaataattaattaattcttggcaaaatcacatggccgccgccgcagatgggctcttccggccgatctacgagggctgcatctccgcctacgacaacgacgtcgagcgccgcccctaccacaagaactgcggctgcgctctgcacagcaagtcgaggaggaacagcagagcgtgcacgcacaagttgccgaaatgcaacaacgtgtcctaccccatgaggagggcttggagtgaagggagcttgtcaatggcttcggcaacaacttccgcgcattcctctccttcttcttctcccgccgctgggttcaggcctcaacacgacgaagagggaaatagtaacacattaggagttttatttgagatgtgatcaggaaattgagaataat

SEQ ID NO: 2320 - DNA, 360 bp, Glycine max
  Clone ID: LIB3028-026-Q1-B1-E5
attaaggaatccacacgtgaacagtgtgtggatgatcatttggtgctgagaaagaatggatatatagcagatgaacactagagtccattcgatttttgaggaataaataattagttattgataacaggttctgttagacggttacaagaagttattattccgttaacagttaatcagttatgtcgaaataggtaattcttccgacagtggagtctcaccggcgacagccactgctgctgcaacatagcgagagctaccggcatgcggggacacggctcatggtggaggcggtgggcggcatctccaccgtgtgctgctgcatctcgttcggtctggacaacattatttacctggcgattt

SEQ ID NO: 2321 - DNA, 379 bp, Glycine max
  Clone ID: LIB3028-026-Q1-B1-E6
aatccatttactttgtgttgaattcaatatgagtcttaagggatttttcgagggtggtgtcgcttccatcgtcgcaggctgcaccactcacccactcgacctcatcaaagttcgaatgcaacttcaagaaacccacactctccgcccagcctttgcctttcacgctcccactccaatgcctcctccgccgccctccggccccatctccgtcggcctccgcatcgttcagtcggagggactcgccgctcttttctccggcgtctccgccaccgtcctccgccagacgctctactccaccacccgcatgggcctctacgacgtcctcaagcgccactggaccgaccccgaccgcggaaccatgcccctcacaagaaaaatc

SEQ ID NO: 2322 - DNA, 403 bp, Glycine max
  Clone ID: LIB3028-026-Q1-B1-E7
cttaaaatatagaacacactaccctcaacatagtaaagcagctggtgcaagtgaagcaatggctcaaaccatgttgctcatgtctagtgtctctagcagttattccgtggatttgaagaaagaccttttcctccaattgcagagtcaaagtttaaggcctaagttctctcaactctcattcaacccacttccaccatcaacttcttccttttcttcaccccgtacattcacaaccctggctctcttcaaatctaagacaaaagccgctcctgctaagactaaggttacaaagccaaagcaaaaggttgaagatggtatctttggcacttctggaggatttggttttactaagcagaacgagctctttgtgggtcgtgttgctatgcttggttttgcagcatca

SEQ ID NO: 2323 - DNA, 382 bp, Glycine max
  Clone ID: LIB3028-026-Q1-B1-E8
atcctctcgttttaagacacacctttgagcaggcagtcataaaaagattgatgactgatgtgccttttggtgttctactctctggaggtttggactcttcattggttgcatccgtcacttctcgctacttggccaacacaaaggctgctgagcagtggggatcaaagttacattcattctgtgtaggccttgagggctcaccagatttgaaggctgcaaaagaagttgctgactatctaggcactgtccaccatgagtttaccttcactgttcaggatggaatagatgccattgaagatgttatctaccatgttgaaacatatgatgtgactacaattagagctagcacacccatgtttctcatgtctcggaagattaaatc

SEQ ID NO: 2324 - DNA, 368 bp, Glycine max
  Clone ID: LIB3028-026-Q1-B1-E9
gccagactgagaggaagagagagggagattctttgtttgctaccttctctcggaaaaatggttacgttcaggtttcaccagtaccaggtggttgggagggctcttcccacggaagcagatcagcaccccaagatctaccgaatgaagctctgggccaccaacgaggttcgcgccaagtccaagttctggtattttctgaggaaactgaaaaaggtgaagaagagcaatggccaagtgcttgccatcaacgagatttttgagaagaacccaaccaaaattaagaactatggtatatggttgcggtatcagagtaggactggttaccacaacatgtacaaggagtaccgtgacaccactctaaacggtgc

SEQ ID NO: 2325 - DNA, 378 bp, Glycine max
  Clone ID: LIB3028-026-Q1-B1-F1
ctaatttcaaatggaaattgctctctcataacagaattcaagaggaggaagaacaagtatataaaaactatatctacatagttatatctctctcttgagatttcaaacgtagagatatggaatggaggaagtgctacttggatgtgatattggtgcccttgggatttctaacaagcattgggtaccatttctggctatggcacaaggttcgaactcagccacacacaaccatcattggcatcaatgctagtggccgtagaaattgggttaatggcatgatgaaggacaatgacaagaaaaacattctggctgttcaatcactaaggaacacaataatgggtgctactctaatggccacagcctccatcctactctgct

SEQ ID NO: 2326 - DNA, 352 bp, Glycine max
  Clone ID: LIB3028-026-Q1-B1-F10
agtttaccgtatgttattatagtttccaaaggcacgcagcgagtttaggcgcggcgggatcatcacgagattgcaaaatgaagttcaacattgcaaatcccaccactgggtgccagaagaagctggaaatcgatgacgacctgaagcttcgggcattttgggacaagaggatctcccaggaggtccttggtgacgccctgggtgaggagtttaaaggatatgttttcaaaatcactggtgggtgtgacaaacaaggattcccaatgaagcagggagtgttgacccctggtcgtgttcgactcttgctccatagaggaactccttgtttccgtggatatggaaggcgcaatgg

SEQ ID NO: 2327 - DNA, 359 bp, Glycine max
  Clone ID: LIB3028-026-Q1-B1-F11
ctcgagccgaatcggctcgaggccggaactctgttccgctctctgaacgtggaaaggtgagagtcgttcgctcgctcgctcttgcttgcatcatcggcgcatggattcactcattgcgtagtgattcggtttcggaattagggttccgatttcggatttaggtcggttttttgttccgaaggtcgtgctctccaagccttaagggttttagtgacgagcttcgttcagtttgctgctcgatccgttgctttatccctttcgattcggttttgccgttgcttttcggagattaacttgtttttgatatgatgctgatggttttgtgcattgcacggtgttgaaattcgattttggcgaaa

SEQ ID NO: 2328 - DNA, 373 bp, Glycine max
  Clone ID: LIB3028-026-Q1-B1-F12
tggtatcccccttaatgcaaccgattacaaggtggcctttctatgccttcttaggtggggccatgttctgcttgctagccagcagcacatgccacctccttacttgccactcacagcgcctttcctacatcatgctcagaattgactatgctgggattgctgcattgattgcaacttcattttaccctcctgtgtattactcatttatgtgcaacccctttttttgctacctctacttaggcttcataacattaatggggattgctactattgtcttctctcttctcccatttttccaaaagtccgagttcaggaagtaccgcgcttccctcttctttttaatgggattttctggtgtggcgcccataataca

SEQ ID NO: 2329 - DNA, 360 bp, Glycine max
  Clone ID: LIB3028-026-Q1-B1-F2
agacattgttgaaagaatatctgattaagttctagactttggtgtaaggtgcatggtttttgggtattctagctgagcatcaagtgtttttgaccttgcaaattttttcatgatgtttcattatgccaatttctatagagatgatataattatagtttgatcacacgcttgctgttaacagcaagcccgtgttatccaaaaaaaaaaaaaaaaaaaaaaaaaaaaaaaaaaaaaaaaaaaaagggaagaaaaaaaaaaaaaaaaaacatcaaaaaggaaattaattcaggaaaggaaaaattgcaagaatacaaactttggggaggcccgaatcatattacaccttggactgggaattgt

SEQ ID NO: 2330 - DNA, 398 bp, Glycine max
  Clone ID: LIB3028-026-Q1-B1-F3
cttcacttgttaatgcttcctcctgaaagttctaaactcaacgcaatggagcttagcaaagtcacgttagagatcttttcaaaattggagcagcaatggctctcgcactacgaagcatcaaccaaaacgcgcattctcagcattgacggcggaggaaccaccgccattgtcgccggcgcctccctcgtccacctcgaagaccagatccgcgcccaaacctccgatcctcacacgcaaatcgccgattacttcgacattatcgccggaaccggcattggcgcaatcctcgcctccatgatcaccgccgacgacggtttcggccggcctctgtactccgccagagacgccgtcaacttcctcgccgaaaacaaccgcgaactctaacagccgaagcgcgc

SEQ ID NO: 2331 - DNA, 403 bp, Glycine max
  unsure at all n locations
  Clone ID: LIB3028-026-Q1-B1-F4
cggagcttaggcccacagtatcattgtcgtcttcaagcgttcatacttcatactatcctctctctctctctctgcaactgcaagagatgatggagatggaggaagcagagacgatagatctatacgagcttcaatattcagacttatcttcaccttcaacttcatccatagtcgattccattatggaagccctaggacccactggcccaggcctcctcgccgtcaccaacgtccccaacgcttccaacctccgctcacaccttctccccctcgctcggaacctcgcccttctcgaccgcgaatcccggaaactcgttctcaaggagcataacttgggtagtgacgtcnctttaagaaatcctgataggacggtgtcctcctttgctatgcacctcaaatatgc

SEQ ID NO: 2332 - DNA, 362 bp, Glycine max
  Clone ID: LIB3028-026-Q1-B1-E10
gagaaagatcatggtggctgtggatgagagccaagagagcatgcatgcactctcctggtgcatcaccaatcttatttccgaaaccaacaagcttgttctgctttatgtcaggccaccttctgctttctactccttggatgccgcagggtataacttttcctccgatgttgttgatgctatggaaaagtacagtatgcacttggctaattcagtcatggaaagagctgaagctgtttgcagagacttgaacgctactaatatcaatatggagagagtggttggtgtaggacatgccaagaatgtaatatgcagtgctgtcaagaaactagaggctgacaccttggtcatgggaactcatggct

SEQ ID NO: 2333 - DNA, 396 bp, Glycine max
  Clone ID: LIB3028-026-Q1-B1-C5
cttaattttgcttcctttggtattgtaccgtcgcgttgagtccttgaaattcagttctgcagtatcaactcttcttgctgtggcatttgttacaatatgtaccgtgttggcaatagtggctattgtagaaggaagaacacaatcccctagactggttcctcgtttggaccaacatacctctttctttgatctgtttactgcagttccagtcatagtaacagcctacacatttcatttcaatgtacatccaattgggtttgagcttgccaagccatcagaaatggcaacagcagttcgaatagcattgctgctttgtggtgtcatttacttttcaataggcctatctgggtacctcttgtttggggattcaacacagtctgacattctggtcaattt

SEQ ID NO: 2334 - DNA, 383 bp, Glycine max
  Clone ID: LIB3028-026-Q1-B1-C6
cagcacttgacactggttgtggggttgccagttggggtgcatatctttggagcagaaatgttgttgccatgtcatttgcaccaagggacaatcatgaagcacaagtacagtttgctcttgaaaggggtgtccctgctattattggtgttttggggtccataaagttgccttatccttctagagcctttgatatggctcattgttctcgctgtttgattccttggggagcaaataatggaatttatatgatggaagttgatcgagttctaaggcctggtggttattgggtgctttcgggtcctccaatcaattggaaggctaactacaaatcctggctgagacctaaggaagaacttgaggaagagcaaagaaagattgaagag

SEQ ID NO: 2335 - DNA, 398 bp, Glycine max
  Clone ID: LIB3028-026-Q1-B1-C7
aacagcctgtcaaactatgaagagggtgatattgatatggatcagcgactagacaaagcatgtaatttcatcacaagggctgaatgttcagattatgttccaaattgcaactcccaaaaccctaaattccaagaaggataattttgggttaatcaccagataattgggaaggtgattgcttgaatttccggtcaagccggcaacctgggccaagttgttgccggtgccgttccgaaatatcgggtattggaatcaaggtataaatttacaattaagacgctgacacaatgtgagggcagtaaaagagattggggtttgtggtatggatttgcaatggatggtcgtatgtgtacaatagatgaacaacattatgtgggaaacatgggctcaaatcatct

SEQ ID NO: 2336 - DNA, 381 bp, Glycine max
  Clone ID: LIB3028-026-Q1-B1-C8
ggttatttgaggttaagaaaattggagatgagtactttgcatttattgttgattgcaaagaacccaaggcttgtactgttctactaaggggtgctagtaaggatctattaaatgaagttgaaagaaacctacaggatgccatgtctgttgcaaggaacattataaaaaatccaaaacttgttcctggaggtggtgctacagagttgacagtgtcagctgccttgaaacagaagagttcatctattgagggcatagagaagtggccttatgaagctgctgccctagcttttgaagccataccacgaactttggcacaaaattgtggagtaaatgtgatccggactatgactgctctacaaggaaaacatgcaaatggggaaa

SEQ ID NO: 2337 - DNA, 363 bp, Glycine max
  Clone ID: LIB3028-026-Q1-B1-C9
gattgaagtcactatttcagtaattcatgttaccccttataccaagatatttctttggttggtaagacaaggaagattcccttctggaatatggcttgaaattattggttgtcagagtaatagtactgcctctccaagtgctgatattactgatgaaatgacctcatacaaggagtcattgcatctaaaggatttcaatagagaaaaatctagtagtctagtttcagctctccacagcaactacttgagcataggaaaaattatctcacctcactacatacatgtttttttgggagtttctgggtcatccatctccacagtggctcatggaatactcattggacaaagaatgccatctatgcg

SEQ ID NO: 2338 - DNA, 376 bp, Glycine max
  Clone ID: LIB3028-026-Q1-B1-D10
attttaattacacgtaaaacaaaaacaaaactacaacgaattcttggattcagagtcaagcgaggcaacgcatcgcaacgagattctccaagctctgcatccctcggcgatgccgtccacaacctactgtcttgaaggagaacaaattaaatctccttcaattatgaaacaggatgttgcacaagataacaccaactcatattcaaagaattcaatcccaccctacatgaaggctatctctggctcacttggagggattatggaggcttcttgcctgcagcccattgatgtgatcaagaccagattgcagcttgataggtcagggaattacaagggaatactgcattgtggtgccacgatttcacgaacagaaagg

SEQ ID NO: 2339 - DNA, 159 bp, Glycine max
  Clone ID: LIB3028-026-Q1-B1-D11
agagagagaggaagagagagcactacattttgtgagccaaggaattagatatataatataaactggcctgagtgctacgctacattgttttgtttgtagcatggcactataactcaaaaaaaaaaaagtacataaaagaaaacaaattaaatcaccatc

SEQ ID NO: 2340 - DNA, 361 bp, Glycine max
  Clone ID: LIB3028-026-Q1-B1-D12
cgaccctgcatttgggttatatcatcttatggaactgaaagctctcaagcctctcctatccatacaccatatagtgaatgagattagtcctctgaatttcttcaaagataatagacatgccagaagactcttctttcttcacttatgttagtttcagggctagtgtattagttgcagtcattgaaactctacaaggatacgttaacgtctatgaaggcttaagttcatttcctgaaatattcctaccaattttgaaattattaaatgaaatagcagaacagaaaaatatgtcaaatgcattatgagataaaattaaagatgtggctgagctcattaagttgaaagtggacaagcatcacac

SEQ ID NO: 2341 - DNA, 377 bp, Glycine max
  Clone ID: LIB3028-026-Q1-B1-D2
cttttctcccttctccccatttgctcattctcctccccattctgctcagacaccgcacagcgaacaaatccaccattcattttcctttttcgcaacagcgcaatggctcgaagatccctcccgctcctgaagcacctcctctcgcggcggatcccggcccgatccgtgacgtacatgcaccggccgggcgatgggtcgccgcggccggtgacactgatcccgggcgacgggatcgggccgatggtgactggcgcggtggagcaggtcatggaggccatgcacgcgcccgtctacttcgagaagttcgaggtccacggcaacatgaaggccgtgccgccggaggtcctcgattcgattcggaagaacaaagtctgtct

SEQ ID NO: 2342 - DNA, 377 bp, Glycine max
  Clone ID: LIB3028-026-Q1-B1-D3
ctcgagtgagggacgaagtgaaagctgggaaattgcgtccgaggtcctttccaattcaaatgtaactgaaagcagaagctatgctgcatcaaaggaggtgcgccaaaaacttgggggttctttttgagatgtggggttacttagatattaaagatggaaaaggaaatggtgtttgatcagattataggaatgggaattgaattgattgaggcattaagtacaaaaacttatttgatcttttttgtggtaagcttagctcttttggaaagaatagaaatgtgtgtaattttcgagagacaaagcaatagtgtcttttttctcgtctttgtcaattttttttcctacaatcaaatatgtgcattgcatctttatgtggc

SEQ ID NO: 2343 - DNA, 377 bp, Glycine max
  Clone ID: LIB3028-026-Q1-B1-D4
gcattggcacccagcagcatgaagatcaaggttgtagcaccacctgagagaaaatacagtgtctggatcggtggttctatcttggcatctcttagcaccttccagcagatgtggattgcaaaggcagaatatgacgaatctggtccatcaattgtgcacagaaagtgcttctaaactgtttcgatagatagggttattgaagggaaagactactatcatcacgatttgtctggaagcaatgcattgcagattgtaaccctttgattctagcttttgttatcctttcattttattctcttgttggagtgatcatttatttgcagaaggtgaggagagttgttttttaaaatggtccagttcttttcttatactttgat

SEQ ID NO: 2344 - DNA, 63 bp, Glycine max
  Clone ID: LIB3028-026-Q1-B1-D5
ttttttttttttttttttttttttttttttttttttttttttttttttttttttttttttttt

SEQ ID NO: 2345 - DNA, 394 bp, Glycine max
  Clone ID: LIB3028-026-Q1-B1-D6
ccaattcttctcttttgctttctctctccaaattcatcacaacttctctcgtacctctgcagagaagtaaacatataggagtgagagggagggagagagaaggaaagcttggtagcgatggggaaggagcaagttcaggtgctgaatgccctggacgtggcaaagacacaatggtatcatttcacagcaatcatcattgctggaatgggcttcttcactgatgcttatgatctgttctgtatatcactagtcacaaagctacttggtcgcatttactaccacgttgatggggctgcaaagcctggttcattgcctcccaatgtgtcagctgcagttaatggtgtagcttttgttggaacactttcagggcaactcttctttggctggctcggcg

SEQ ID NO: 2346 - DNA, 395 bp, Glycine max
  Clone ID: LIB3028-026-Q1-B1-D7
gccaaagaagagatcagctctcttgagaaggaattttcttcatacaaagttcgtgcacatgcacttcttcaaaagaaggatgctgagctggctgctgctaaagattctgaacaactcaaagctctagaggaaactctgagagtatatttgatcagtattttgtagaagacgttgtttgagtagtgtatataaattaatcaccaattgcatccttaattttctccaggaggtggaaaatgaagtattatcaataacagaagaaagggatagagttcttcaagatcttcaatctgctatggctaatcatgagaaagagattgcagaaagagacacagcccttgaaaatgtcaagcaacagataaggagctttgaaataaagcttgactcagctaatg

SEQ ID NO: 2347 - DNA, 399 bp, Glycine max
  Clone ID: LIB3028-026-Q1-B1-D8
gtgaaagtgagaaaaaataaaaatcaaagagcataatgtcagggatcattcacaagattggggagacccttcatgtgggagggcacaagaaggaggaggagcataagggtgagcaccatgctggagaatacaaaggggagcaccatggtgaacacagtagtgagtacaaaggagagcatcatggtgaacacaaagctggagagtaccatggtgagcacaagccagagcacaaagaggggttcctagacaaagtcaaggacaagatccatggtgagggcggcgccgccgagggcgagaagaagaagaaggagaagaagaagaaggagcatggccatgagcatggccatgacagcagcagcagcagtgacagtgatttaactgctgcatcacctatatatt

SEQ ID NO: 2348 - DNA, 377 bp, Glycine max
  Clone ID: LIB3028-026-Q1-B1-D9
cggctcgagccagagccaaggtaggttaaacactcttcttcatcgtcgtcgcaatgggacgtgtgatccgtgcgcagcgtaagggagcaggctcggtcttcaagtcccacacgcaccaccgcaagggccctgcccgcttccggagcctggatttcggagagcgcaacggctacctgaagggtgtcgtcactgacgtcatccacgatcctggccgtggcgcgcctctcgctaaggtcgccttccgccacccgttccgctacaagaagcagaacgagctcttcatcgccgccgagggtctctacaccggccagttcatctactgcggcaagaaggccaccctcgttgtcggcaatgtgttgcctcctcgattcaatcct

SEQ ID NO: 2349 - DNA, 324 bp, Glycine max
  Clone ID: LIB3028-026-Q1-B1-C4
gttctacatagcatctcctttaccaccattctagatatcagagaactttgcagctctcttaagtttttaaaaaacaccacgcaaacagcaagatggccacttccgacagtaacatgctactaaattaagttccagtttaagtgatgctcccaatccgagttgtcaatgttgacaatggtttttgagacccaaatgggcttaaagaacagctcctgcaacttcgaactgccggtgttgacggggttaagggtgaagttttgtgggggattatagaactgaaaggggctaagcactaagaatggagaacctacaagaatttggttc

SEQ ID NO: 2350 - DNA, 373 bp, Glycine max
  Clone ID: LIB3028-026-Q1-B1-A9
tgataataaggcattagaagctttcaaaaggtttggaaacaaactgactggaattgaaggaaaaatcaatgcaaggaacagtgatccaagtctgagaaaccggactgggccagttcagctgccatacactttgctccatcgttcaagtgaggaagggttgactttcaaaggaattcccaacagtatctctatctaattaaaaagagtttgtggtttccctatctatgttgtacttctgaataacatagactttatgcatgtctatgcgtaattattgcctgaacttctgcactattgtatttggatgctctcggttttcatataataaagtgtgttctcactttcactttggaattagctcaacctaagttta

SEQ ID NO: 2351 - DNA, 387 bp, Glycine max
  Clone ID: LIB3028-026-Q1-B1-B1
cgaggattgaaatccaatccgtgcctcctttttatctgataacacaaaaatggcaaatgctttgagagttggtagtgttatctcactctgctcccttcggaacacgagaccccatcttccccttctctccaacgccacgcgcttccgttccaagttcccatttttcaccctctcatcgtcgccaaatccatctgggtatccaccatttcgcacactctcttcttcttctgcttccacagatgaggcagtgaccaccgaagccatcactagcaataatgcaagtggtgaagctgagaacagtattaaggatgcggcggggttgcttgacatgagggttgggtgcattctgagagcatggaaacatgatgaagctgattccccctatgt

SEQ ID NO: 2352 - DNA, 374 bp, Glycine max
  Clone ID: LIB3028-026-Q1-B1-B10
ggagtttttcaataatatctatgaactagttggagttcctgtagtcacagtgcaactcagatacaatggttgggttacagagttgcaggatctagaaaagtcaaggcgactggggaaagctgttgggttggataaccttctctatacacccgatgcagatttttcttgctttgcagaccttgcactttcatctccagaggattattacattgagggacaaggatcattgctccaatgtgttctgacgccaggagatccatacatgcccttaccaaatgacgaaattattgcaagggtagcaaaacaggttttggcactgttcccatcatctcaaggtttggaagtgacttggtcttctgttgttaaaattgggc

SEQ ID NO: 2353 - DNA, 368 bp, Glycine max
  Clone ID: LIB3028-026-Q1-B1-B11
gttctttctctcgcaatcttcactacattcaccgagcatttgcattcacattgaatatggctgagactacacaatctaatgctgagttgttggagtggcctaagaaagataagcgccgcttcctgcatgttgtgtatcgtgttggtgatcttgatcgcaccattaagttttatactgaatgttttgggatgaagcttttgaggaaaagagatattccagaggagaaatatgccaatgcttttcttggatttggccctgaacaatcccattttgttgtggaattaacatacaattatggggtgacctcatatgatattggaactggatttggacattttgctatcgcaactccagatgtttacaaattg

SEQ ID NO: 2354 - DNA, 381 bp, Glycine max
  Clone ID: LIB3028-026-Q1-B1-B12
cacagttagtacaaaaaagggttacttcagcttccacatatcttgaagaattgatcaatgggcaagtctgtagttgagaagctactttggatggcaattgtgtgcttggtgctgggtgtaatttccattactcccaaggcccaagcagcagtgacatgcaaccaggtggtgagcaacctcaccccatgcatttcttatgtgctcaatggtggcaaaaccgtgcctggcccttgctgcaatgggatcaagaccctctttaacctcgctcactccacaccagaccgccaaaccgtttgcaagtgcataaagaacgctgttagtgcgttccattatggcaagtccaatgtggaccgtgctgctgctcctcctaagcaatgtggg

SEQ ID NO: 2355 - DNA, 385 bp, Glycine max
  Clone ID: LIB3028-026-Q1-B1-B2
cagaacttttgaagtagcaaaaaaggtctgggcagaggttttcttctaccttgctgagaacaatgtcctttttgagggtattcttcttaagcctagcatggttacacctggagctgagtccaaggacaaggccagtcctcagacagttgctgattacaccctcaagctccttcacaggagaattccccctgctgtccctggaattatgtttttgtctggtggacagtctgaggttgaagctaccctcaacttgaatgccatgaaccaatctccaaacccgtggcacgtgtcgttctcgtatgccagagccctccaaaacactgccttgaagacatggggaggccgcccagagaatgtgaaggcggcacaagatgcacttcttttc

SEQ ID NO: 2356 - DNA, 396 bp, Glycine max
  Clone ID: LIB3028-026-Q1-B1-B3
gtggaagccctgcttatcttagattgagccagaaaactgtcaattcccttggtgatctagtccccttcagcaacaagttgtattctggatgtttgcaaaagagggtggggataacagctggaatctgtgtcttgatccaaaacaaagccgagaagaagggagataggtatgaggcaatctacagcttctactttggggactacggtcacatttcagtgcagggttcatacctgacctatgaggacacttatcttgctgtgactggtggatctggcatctttgaaggggcttatggtcaggtcaagctgcatcaaattgtgttcccctttaaactattctacacattttatcttaagggcatcaaggacttgcctcaagagcttctttcccagcctg

SEQ ID NO: 2357 - DNA, 379 bp, Glycine max
  Clone ID: LIB3028-026-Q1-B1-B5
ccaacgccaacgccaattccattcagatcacagtcccttcgattcctgctgcaacatactttcaaagccctaaaatggaggggactgtcttcactcctgcactgcaagaaattgagcatgtaaagtctgatcaaggagaaattctgagcaagcctttcttggatgcgtgcaaacacatattgcctgtaatagataagtttggagctgctatggcccttgttaaatctgacataggtggtaacatatcgagattggaaactatgtattcttccaatccaaccagatttaactacctgtacagtttggtacaggtagaggttgaaactaaaacagctaaatcatcatccagttgtaccaatggacttctttggctcacaag

SEQ ID NO: 2358 - DNA, 384 bp, Glycine max
  Clone ID: LIB3028-026-Q1-B1-B8
tgataataagtctgaggcgcatttgacttctgccgctgcttttgtggagggtggaattcaggatgcttgtgatgatgcttgcagcatatgccttgaagctttctgtgatagtgatccctccacggtgacaagttgcaagcatgagtttcatcttcagtgcattctggaatggtgtcaaagaagctcccagtgccccatgtgttggcaacctatcagtctcaaagatccaacaagccaagaattacttgaggcagtggaaagagagcggaactttaggttcaatccatctagaaatgccaccatatttcatcatccaacactgggggattttgagttacaacatttgccagttggagctagtgatgctgatcttgaagagcgcat

SEQ ID NO: 2359 - DNA, 367 bp, Glycine max
  Clone ID: LIB3028-026-Q1-B1-B9
ggatgagtacacttctgagatattcatgggtggaaagaacacaattgtgttgcacaacacatgtgaggattcactgttagctgctcctattatcttggacttggtccttcttgctgagctcagcactcgaatcgagtttaaagctgaaaatgagggaaaattccactcattccacccagttgcgaccatccttagttacctgaccaaggcccctctggttccaccgggtacaccagtggtgaatgcgttgtcaaagcagcgagctatgctggaaaacatcctgagggcttgtgttggattagctcctgagaacaacatgatcctagagtacaagtgaagttcaaagtcttaagagtaacggtttggg

SEQ ID NO: 2360 - DNA, 398 bp, Glycine max
  Clone ID: LIB3028-026-Q1-B1-C1
atcagattgatgaaaaggtgaagctggtggacagaaggatggggtcattgatcaacttggagcaggcaattcgcgttctcgaaattgggttgctttgcactctaaatgagaacaaaggaaggccctcaatggaacaagtggtggagtttcttctcaacatggataagcctattcctgagctgccaagaactcgccctgttgccttgttcccctataatagcgccaacacaggactttgtaatgcatattcttgcactttttaagtggagccatgcatgacgttgctgaatgattatgtgggaggtgtatgaataaatgtgaaaaaagactattcttaggcctgcaacaacggattgattttccaaatgctgcaagtgcttaaagtgctgtgtatctgt

SEQ ID NO: 2361 - DNA, 375 bp, Glycine max
  Clone ID: LIB3028-026-Q1-B1-C11
ggctctcacgtgatgcagtatggtgatgtacggcttagcagtgatgttctcttccattatttgggtacagatcctgctaatgataatttcacttttgtggacgaaaactccttatggtcaccttcaaaaccagtcaaccaacgtgatgctgatctcatccatttttgggataagttccgcaaagctcctgagggttctctcaggaaaaatgcagctcagaaacaagttttggaagcaatgtctcatagaatgcatgtagacaacagtgtaaaacttattgggaagcttttatttggtattgaaaagggtccagaagtactcaacgctgttagaccggcaggatcggcacttgttgatgattggcactgccttaaa

SEQ ID NO: 2362 - DNA, 358 bp, Glycine max
  Clone ID: LIB3028-026-Q1-B1-C12
ctcattaattgcaagaatggcacttcgttgcttggtgatgtccctttctgttctcttcactcttggtcttgcgagagaaagccatgccagagacgaagatttttggcatgctgtttggccaaacactcccattccaagttcattgcgagatcttctaaagcctggacctgcaagtgttgaaatcgatgatcaccctatgcaaattgaagaaacacagtacccgaaaaccttcttctataaagaagaccttcatccaggcaaaacaatgaaagtacaattcagcaagcctccctttcaacaaccatggggtgttggtacatggttaaaggaaattaaagacactactaaagaaagatat

SEQ ID NO: 2363 - DNA, 390 bp, Glycine max
  Clone ID: LIB3028-026-Q1-B1-C2
ccctaatccaccctttctgaacaaaaataaaaaaataaaaaaaaacccatcgatttcttggacctccatgacttctttgtctacccatcacacctatagccgaaagcaaaaatctctcggcctcctctgcaccaattttctgagtttgtacaacaaagaaggtgtgcgcctggtcggtctcgatgacgcagcttcgcggttaggtgtagaaagacgtcggatctacgacatcgttaatgttttagagagtgtcggtgtgctaaccagaaaagctaagaatcagtatacttggaaaggattttgtgcaattcctgctgccttacaagaacttaaggatgaaggtttgaaggagaatcctggatcatttgatgactccaatgacaatgcaaa

SEQ ID NO: 2364 - DNA, 373 bp, Glycine max
  unsure at all n locations
  Clone ID: LIB3028-026-Q1-B1-C3
aagaaacttaatcgatcatcacttcacttcactaatacatcatggcagacgagacccagaacaagtatgagagctctgaggttgaggtccaggatcgtggtgtttttgactttctcggtaagaaaaaggatgaagaagacaagcctcatcctcaggaggaggtcatcgccaccgagtttcaaaaagtcactgtctcagaccaaggagagaacaagcacagcctcttagaaaagcttcaccgatctgacagcagctctagctcttcaagtgaggaggaaggagaagatggagagaaaaggaagaagaagaagaaggaaaagaaagggctgaaagagaagatcgaggagaaaatanagggtgatcatcatcatca

SEQ ID NO: 2365 - DNA, 403 bp, Glycine max
  Clone ID: LIB3028-026-Q1-B1-A8
ggcactcaaagtaacatgaatgctaacgaggttattgcaaaccgagcagcagagattcttggccataagcgtggtgagaagtttgtgcacccaaatgaccatgtcaatagatcacagtcttctaatgatacattcccaactgtaatgcacattgcagccgcaacggaaataaactcaagactgatccccagccttaaaacgttacacgatactctaaactcaaagtcagttgaatttaaagatattgtcaagattggacgcactcatactcaagatgcaacacctttgactcttggacaagagtttagtggatatactacacaagtgaagtacggtattgatagagtaattgacactttgccacgcatgtatcagcttgcccacggtggtacacctgtatgga

SEQ ID NO: 2366 - DNA, 347 bp, Glycine max
  Clone ID: LIB3028-025-Q1-B1-H12
tgatgttaccatggtctatccggagccttggtgtatgccacgactttttacggctggtataactgaattctatgagggatattacgcaaataagggtgtaaatatcattaaaggaactgttgctgttggattcacttctaagtctgatggagaggtaaaagaagtcaaactaaaggatggcagggtcctggaagctgatattgttgttgttggtgttggaggaaggcctcaaacagtcttagtcaaagggcaggttgaagaagagaagggtggaatcaagaccgatgctttcttcaaaactaatctctccgatgtatatgctgttggtgatgttgctactttcccct

SEQ ID NO: 2367 - DNA, 203 bp, Glycine max
  Clone ID: LIB3028-025-Q1-B1-H2
agctcagtagttatctcaggagtaagccaatatacagatattagtagtagcagacttgcaggtatgtttctcacgttcactaggctctgtttgaatctttgggtgtctggatcagaaagacacgcatgtctctatggctcacaataatcatgaaagagcagttcccattgacgtattcgtgatacattattcacatgagcata

SEQ ID NO: 2368 - DNA, 355 bp, Glycine max
  unsure at all n locations
  Clone ID: LIB3028-025-Q1-B1-H4
tccttctcttctgaataatccagatctctttctgcccttttctccgtcacgcttttcgtgaccggatctgtatggatttgatccagatctacacgccgatggtggttttggccgggtctttcatagatctggtgcgtagaggctcagatctacggtaccgaggtacaacagagaatcgatgacaagaacgcagatccgacggtagatccagccgattccgcttgttcgatcgctacagacccctgtatcggatcattaagcagcgtgtctcgcgcgttctacacgtgttgccgatctcggatgttgtaaaattagtttatgatgtgaagctatggagtgngaaatatgtggatgt

SEQ ID NO: 2369 - DNA, 394 bp, Glycine max
  Clone ID: LIB3028-025-Q1-B1-H5
gatgatttgctgctgtaacaaaatggatgctactacacccaagtattccaaggccaggtatgatgaaattgtgaaggaagtctcttcctacttgaagaaagtaggatacaaccctgacaagattccttttgttcctatctctggttttgagggagacaacatgattgagaggtccacaaaccttgactggtacaagggtccaactctgcttgatgcacttgaccagattagtgagcccaagaggccctctgacaagcccctcaggcttccccttcaggatgtgtacaagattggaggtattggaactgtgccagtgggacgtgttgagaccggtgtcttgaagcctggaatggtggtgacttttgcaccaactggactgacaactgaagtcaag

SEQ ID NO: 2370 - DNA, 388 bp, Glycine max
  Clone ID: LIB3028-025-Q1-B1-H6
atcaattataagcatgggtttgtggaacacaacgaatgcagtgtcttgccgctttcacaagtttggtgatgaccaaaagaatctggtcttccaaggtgatgccacgtcttcttccaggggcatagaactcacaaagttagacggtggaggaaaaccagtgggtggcagtgtggggagagtgttatactcttctccagtgcacctttgggaaagctctacagtggtcgcaagctttgaaaccgacttcaccttttccatctcatcagactctactactccaggtgatggccttgccttcttcattgcaccatttgacactaaaatccctccaaactctggtgggagcaaccttggactcctcccatcaaacaatggtgttgctgtccaa

SEQ ID NO: 2371 - DNA, 374 bp, Glycine max
  unsure at all n locations
  Clone ID: LIB3028-025-Q1-B1-H8
cagaagtctgagcattctaggggttcaaaaccagctgatggtctgctgattgatgaccacgaaaaggtgttacaaacttctcagccacatctgaaagatgtacaagcaaaatctcatagtggttctgctagaagttgcactaaagttcacaagaagggtattgcacttggtaggtcagtggacctcacaaaattcagtgattatggggaattaattactgaattggatcaactattcgaatttggaggtgaattaacttctccacaaaaggattggcttattgtctacactgataatgagggagatatgatgcttgttggtgatgattcgtggcaagaatttgttgcaatggttcgcanaatttatatctaacc

SEQ ID NO: 2372 - DNA, 380 bp, Glycine max
  Clone ID: LIB3028-025-Q1-B1-H9
ctttgctattacctctttttccaaactctaaaaatttttagttccacaaaaccaaaccaaaatggcagcagcctcggcctcatccaccatgatatcaacaccagccttatctccaagcacaagcatccaaaagcaccatcatttgaagccatccaacgtgtgctttcaaggccttagacccctcacaaggttcacaaccaaagtgagcagcaccaccaaaagggttattccaaagggtggtgtcggtgttagagctgaactcaactcagcacttgtcataagcctcagcactgggctctccctcttcttggggaggtttgtgttcttcaactttcaaaagggaaaccttggcaaaccaggtgcctgagcagaacggactc

SEQ ID NO: 2373 - DNA, 384 bp, Glycine max
  Clone ID: LIB3028-026-Q1-B1-A10
atactcacactctggttcatcactcataaaccgtgccaacattgaaaccgcgattgaacagcttccggttctcggcgaacgggagagtagctgcctagctgcaggaatcgattagtgattgtgaagatgcggagagacaacggtgatagctaagaagaggacatgcttaataggttaaacagacgcttcttttgcaccgttgctccacgcccttggctttttgtggggctgggcaaccctggcgagaagttcaaaggaaccagacacaatgttggctttgagatgattgatgcatttgctgagtcacaggggattcctatggacactgtccattccaaagccatttctggaaaaggttttgttggtgaagttcctggttttcct

SEQ ID NO: 2374 - DNA, 362 bp, Glycine max
  Clone ID: LIB3028-026-Q1-B1-A11
caattactctgccctatcatcttatacattactactattttttactataacttcaataaattcaaagaagatatttttcttcctaataatataccaattcatttcaaagagtgatggattctccacaaaaaaaataatcaagttttgaagaaagaaatcttcactcactatgctcctctgctgcaatagtacggtaaaatgaatcactgtgttccagatttcgaaacccaaatggacgacgacttagaattctcaattcccgtctcaaagaaaccctccacgtaactctctcttcactattattttcaatttttttgtttttcctgaaagcgacgacaattaaaacaggcaaaacgacgaga

SEQ ID NO: 2375 - DNA, 368 bp, Glycine max
  Clone ID: LIB3028-026-Q1-B1-A12
gctcttcctccctttctcacagcaatggccgccgcagcacgccctctcgtcaccgtgcaggccctcgacggtgacatggcaaccgatgcctccgccaccgttcccatccctgacgtcatgaaggcctctatccgccccgacatcgtcaatttcgtacactcgaacatctccaagaacagccgccagccatacgccgtcagtcgtcgcgctggtcaccagacctccgccgaatcctggggtaccggccgagccgtctcccgtatcccccgtgttcccggcggcggaacccaccgcgccggccaaggagcctttggaaacatgtgccgcggcggacgcatgttcgccccgaccaagatctggcgccgctg

SEQ ID NO: 2376 - DNA, 403 bp, Glycine max
  Clone ID: LIB3028-026-Q1-B1-A2
gaactgactatggtgcatacacttatgagaatcttgagagagagccttactggccatcagagaagcttaagatttccatcactggtgctgggggttttatcgcgtcacacatagctcggcgcctcaagacagaggggcattacattattgcttctgattggaagaaaaatgagcacatgactgaggacatgttctgtgatgaattccatcttgttgatctcagggtcatgaataactgcctcaaggttacagagggggttgatcatgttttcaatcttgccgcagacatgggtgggatgggttttattcagtctaaccactctgtcattatgtacaacaacacaatgattagcttcaacatgattgaggctgccaggattaacggccattaagaggttttttt

SEQ ID NO: 2377 - DNA, 373 bp, Glycine max
  Clone ID: LIB3028-026-Q1-B1-A3
atcaactctttcaaaagggagaagaaaaggaaaggaaacaaaacgcacaaaggattattatagcaatggcagaacaaaaccaaaaccagacaactgaagctggaaggcaccaagaggttggccacaagagccttctccagagtgatgctctttaccagtatattctggagaccagtgtctacccaagagaacctgaatccatgaaagaactgagagagttgacagcaaaacacccatggaacatcatgacaacctctgcagacgaagggcaattcttgaacatgctccttaagctcatcaatgccaagaacaccatggaaattggtgtctacactggatattcacttcttgccaccgctctcgctcttcctga

SEQ ID NO: 2378 - DNA, 379 bp, Glycine max
  Clone ID: LIB3028-026-Q1-B1-A4
ggtctccagcctcagctggaatgaagttcaatattatatcaggaacttctatgtcttgtcctcacataactggaattgcaaccttggtcaaagctgtgcatccttcatggtctccgtctgctatcaaatctgccatcatgacaactggtattacatgagtgtttggtttcacatcttgctctgaatgtattacatgagaaattaataactatagcttctacatccaaacatgatttcttattttttgacaaatttccaaacatgttttacatatatatagaggcatatattacccaatgcagtttgtctgagattcttcttaacagacattaaattttatgtcacttattgcctagatatacatactgaacaccaccac

SEQ ID NO: 2379 - DNA, 364 bp, Glycine max
  Clone ID: LIB3028-026-Q1-B1-A5
tgttggtgagggtatggaagaaggagagttctctgaagctcgtgaggatcttgctgctcttgagaaggactatgaggaggttggggctgaaggagcggaagatgatgaggaaggagaggactattcataaatgaaggttttattatcaatgtaattgtttcgagtaaaaagggtatatgcttcgttacattaccctgaaccagtattgttcgttcctttttgtttttactcctgtgtgatatagttctccattattcaaactgtgaagtgatatcatcattatgcttctattttggtggtttaaaaaaaaaatttttttttttttttttttttttttgtatataagaattttgttttttttttt

SEQ ID NO: 2380 - DNA, 402 bp, Glycine max
  Clone ID: LIB3028-026-Q1-B1-A6
ctagaagcaataagatgaaaatgaaagtgcttgttttgtttgttgctacagttttggtagcatatgaatgccatggctcagactaccagaagttccctctccaaatgaaaactgggtttggtgggcaatacagcaatgaggtggcatgtgccagttggaggcttggcgtggaagcaaacaacgtagtcaagtggcaaactgttcctgcagcttgcggagagtacatagctgactacgttctaggagaccaatatagatcagattccaaaacagttaaccaacaagcttatttctatgctaaatccctcaaactcaccaacaaagatgtctttgtcttggacgttgacgacactactctctctaatctccagtattttgctaaccatgggatttggtgtggaa

SEQ ID NO: 2381 - DNA, 376 bp, Glycine max
  Clone ID: LIB3028-026-Q1-B1-A7
ccaaaccaaacctttatcatcatcccagataaaataaatacataaagcgacattttataagtgcagataataaaattacaggaagaagaagaagaaaaataaaagctagccactagtagagatggtggttttgttggtccacttgagaaccaaattggagatatggtcggtggaggaaccatttggagagagagagcacaaagaggggttcctagacaagatcaaggacaagatccacggcgaggagggtggcgccaccgccgagggcgagaagaagaagaagaagaaggagaagaagaagcatgaacatggccatgacagcagcagcagcagtgacagtgattagattatctcccactgctgcattcactatata

SEQ ID NO: 2382 - DNA, 358 bp, Glycine max
  Clone ID: LIB3028-025-Q1-B1-H11
ccaatgtcaaatttattttcatgtctttggttcaacgaagttgatcgatttacatctcgtgatcaactaagctttgcttatacctatttgaaacttaggagaatgaatccagagagaccaattcagctatatatgttcaaggattgtgaacgtagagcattactgaagctattccggcatagggaacttccatctccacgagagactgcttgatcagttccagatatataagggatgcacactacactaatggcacaggtcatcatatttgacatcccttccagcttgattagcctgacaagacatgcatgatatgttttaagctggaccaaacagagggaaactcaatccctggttc

SEQ ID NO: 2383 - DNA, 360 bp, Glycine max
  Clone ID: LIB3028-025-Q1-B1-F5
gttaggtttttgagtttctattgacaatgggataagtaaatcttgtaaaggttagtatgttacaactttgtctctgtaacatttccctttctatttggctcctcctgctagaagtgaggtttgaagggattagaaaattttcaccttactatatatgcattcaagacaggtgatgcttgatagaatcgtattctgtgaagtatagtttttggctcataaatatggactaatatctatcttattcttaacacgtgcctattcttcattaatggcttccatttatttctgtatttttataccacaggctcctctgaagcttatacctgccataaaaggtagccgtgagaaacatgggggttc

SEQ ID NO: 2384 - DNA, 384 bp, Glycine max
  unsure at all n locations
  Clone ID: LIB3028-025-Q1-B1-F6
ggaatcagaggctccccctaacttctggggccacaccccggcagaagaatactacacctcccaaggcgttcgcaacaccaagtcccacttcgaaacccccaacggcagaatcttcacccagtccttcctccctctcaacctccaaccccaccaagtcaaagccaccgtctttatgacccacggctacggctccgacaccggctggctcttccagaaaatctgcatcaacttcgccacctgcggctacgccgtcttcgccgccgacctcctcggccacggccgctccgacggtctccagtgctacctcggcgacatggacaaaatcgccgccacctcnctctccttcttcctccaagtccgcaatagccacccctactaaaacct

SEQ ID NO: 2385 - DNA, 401 bp, Glycine max
  Clone ID: LIB3028-025-Q1-B1-F7
caaaagtcctaggagtgtaaaacacagacgcaaaatgaagacgatcttgtcgtctgagaccatgagtattcccgacggcgtgagcatcatggttcacgctaaggttatcgaggttgagggccctcgtggaaaactcgtgcgagacttccaccatctgaacttggacttccaacttattaccgacgatggcggtaaaaggaagctcacgattgattcttggtttggttctcgtaaaacctccgccgccatctgcaccgccctcagccacgttgagaatttgatcaccggcgtcaccaatggataccgatacaaaatgagattcgtgtacgcacattttccgatcaacgctagcattggcaacaacagcaagtccatcgagattagaaatttcctcggcgaga

SEQ ID NO: 2386 - DNA, 378 bp, Glycine max
  unsure at all n locations
  Clone ID: LIB3028-025-Q1-B1-F9
atcacagtcacgcagcaaagcaacgctctctttttctccgtcactgccacttctcttctctagggtttatcgtcatttgatctcaacctctcttcctcccaaaatgccgtctccaccgcttccacaatcggaccgctagtgcccctgctttttccgatgtgcaatgtatattttgttcgctgctgcggttctggaaatgttgaattctgaactgagataagatgagtaggattgaattatcgagggcgaagtcagcgccggttccattggggactctgattggccgtgagcttcgaaatggaaaagttgaaaaaccttttgtgaagtatggacaatctggatttggcaangaaaggagaagattactttctgatcaag

SEQ ID NO: 2387 - DNA, 343 bp, Glycine max
  Clone ID: LIB3028-025-Q1-B1-G1
tgctttcagataactgatagttgtgtgcaattatttgaattcaagaatgtctcaacccgactcgttggtggctgagattgaggtgaaaacctctgctgatcacttttacgacaccttgaagggtaagaaacagcatcgtattcatgatgttgcccctcatcatatccataaggtggaagttcatgaaggtgagtgggataaatctggcaatatcaaggtgcttacattcgctgatggggacactgttgagaccttaaaggagagagttgattttgatgatgaaaacaagaagataacctacaccatattggagggtgtcatgttgaagtactataagagctac

SEQ ID NO: 2388 - DNA, 342 bp, Glycine max
  Clone ID: LIB3028-025-Q1-B1-G11
cttccataatattacagacactcatgtagctcatcacttgttctccacaatgccacattatcatgcaatggaggcgacaaaggcaataaagcccatcttgggagagtattatcggtttgatgggactccatttgtcaaggcaatgtggagagaggcaagagagtgtatttatgtggagccagatcaaagtactcagagcaaaggtgtattttggtacaacaataagttgtgatgattaatgtagccgggggcttcttgtccgtcaggtgggatggtttgaactttcctttgtgactgtttagtatcatgcgtgcttattgggaataattttgttgaaccctg

SEQ ID NO: 2389 - DNA, 362 bp, Glycine max
  unsure at all n locations
  Clone ID: LIB3028-025-Q1-B1-G3
ttaanatatctcttccatacaagtttgttttcaaagtgtttttgtctcccaaatcctactcttgtgaccacaagccttcacttcactctctctctctctctctctctctctctctctctctctctctcttttttgaaacccttttttctcttctcaaaccaaaccaagcaagcaattatattacactactcactcactgagaccatggctcctaatatcaccaccgtcaccgacgctcaagccaaggccgccggcgggcgtggccgtgcctacgtcaccttcctcgccggaaacggtgactatgtgaaacgtgtctttggctttggcaaaagtctgatgaaggtgaaaagcatgtaccctct

SEQ ID NO: 2390 - DNA, 352 bp, Glycine max
  unsure at all n locations
  Clone ID: LIB3028-025-Q1-B1-G4
gaagaagacttgatcttgataaactagattgcaaatcacggtgaacgtgtttggcattctttagccaaagcttctggtcataaacgacagggaaagagttgtcgactccgttggctaaactaccttcgtcctgatgttagaagaggaaacattacacccgaagaacagcttttgatcatagaacttcatgcaaagtggggcaatatgtggtccaaaattgcaaagcatcttccaggaagaactgacaatgacattaagaacttctggagaactatgatccanaagcacattaagcaagctgagacttcacagcatcatggtaattcatcagagaatactaataatgatcatc

SEQ ID NO: 2391 - DNA, 398 bp, Glycine max
  Clone ID: LIB3028-025-Q1-B1-G5
cggctcgagctactgtaaaaccttgggcaacaggattaagtggacagcttcagaaggcatttgtaacaggtgtgccaaagctaaagagatcagagcttgaagcagcatgtgaagattttagtaatgtaattggcacttcatccattggtacagtttacaaagggactttatctagtggtgtcgaaattgctgtggcatctgttgcagcgacatcatccaaagattggtcaaagactctagaagcccaatttaggaacaagatagatacattatcaaaagtgaaccacaggaattttgtaaatcttcttggacattgtgaagaagatgagcctttcacaagaatggtggtttttgagtatgccccagatggaacactctttgagcatttacacataaaa

SEQ ID NO: 2392 - DNA, 357 bp, Glycine max
  unsure at all n locations
  Clone ID: LIB3028-025-Q1-B1-G6
gtttaaacctaattctcatttcttcatcgttcgattcttctcctcctaaagatgcagatcttcgtgaaaactttgaccggtaagaccatcacccttgaggtggagtcctccgacaccatcgataacgtgaaagctaagattcaagacaaggaagggatcccacctgaccagcagagacttatctttgcgggtaaacagcttgaggatggtcgaacccttgccgactacaacatccaaaaggaatccactctccacctcgtgcttcgcctcaggggtggcatgcanatctttgtcaagactttgactggcaagnacatcaccctcgaggtcgaatcctcggacaacattgataatgtc

SEQ ID NO: 2393 - DNA, 378 bp, Glycine max
  Clone ID: LIB3028-025-Q1-B1-G7
aatttttaattttgtttatataattcacagcattttaattccaataataataataataataagtaaggtttaatcattcgagttggtcagattttacttatgttttgattaaattgaattttaaattagtcaaaatctttttttaagaggattaagaaaaaaaaattctaaaaatgtgtcccttaaacatcaagccatcttgattttgcctacttttaatacatttgtcttcttgctcacataaactttttttttatgcgttttttctcataaactcaagaaattaaactggcataagaagatatagatgctaataaaacaaactagagatccccgaacgtactccagctattcaagattcatgtgtgtcaggtttat

SEQ ID NO: 2394 - DNA, 376 bp, Glycine max
  unsure at all n locations
  Clone ID: LIB3028-025-Q1-B1-G8
gctatactttatctcggctattccctgctcatggcaattgcaatcatgttgtcaactggaaccgttggcttccttatgtcattttactttgtgcactacttgttctcatcagtaaagatagattgaagtttgctttgctatctctcaccagctaaagcaaaaggcatgctggaagaagaatttttcttaaatagtgtaacttttgcttaattctttttgtagcttgatttgcagcatgttgagtggtgaaatagatgccttgctgattgcagtaaatagttgccactcaattttatgttgctatgcgaactacagtttgttcncctttctacctgtctctcncgtaagtttactcattcaactagtgtttggtatc

SEQ ID NO: 2395 - DNA, 379 bp, Glycine max
  Clone ID: LIB3028-025-Q1-B1-H1
gtttgctctgttgttttctcagcagttaccctagaagacactattagtattggaagtcttgcaggcatgtttctcatgttcactgggctctacttggttctttgggccaaaggaaaagaaggacacgcaggtggagatggcttagagtaatcttgaaacagctgttccctttgacgtattggtgacacagaattcccaagagcacattgtagaaagacagaggtctcttgggtttgaagcaatgactcatgagtcatgacaccgttgttgtttttctttcttctttataaaatctctaggtcatatatatataggtgcgacattttaagatgcaagtgaagcaaaatttaacccctggctaggtacaagcaaaaaaata

SEQ ID NO: 2396 - DNA, 325 bp, Glycine max
  Clone ID: LIB3028-025-Q1-B1-F4
ctcaaaaactcgttctccttcttctataaactgtaactgttttcatctctcacagatcttcggagcagaatgaaggttctcgaatttcatcgcttcctcctttcgcgatgatgctatagtagaataagaagacaaagagagagaagtatatggacgatataggtagctcattcatcaatgttaggagaattctccacggggaaatctgccattcaaattcagctgatgttgtggtaaggtcagccgcatggcttgggcgaagtctgtcctgtgtctgtgatcaaagtatagatagtgatgcttctaacactttcgatttaaacct

SEQ ID NO: 2397 - DNA, 373 bp, Glycine max
  unsure at all n locations
  Clone ID: LIB3028-025-Q1-B1-E1
atctcgtgggaatgaatgggaggttgtatctctcacagcatcaacatatgcagctgctcctggtcctgatgaagttgagatgaaggatgatgggaaagaagatgtatatgggcaggatgaaggagaaacgtcacatgctttattcatgtctagacactttgtctttccacccagtcagcatgaaaacttgcccgtggaacctgactatggtgagattcatgatgattttggagacaaagatgttgcctctgaagagactcctgaagaagtgaccatacctagtggaaaggatgaagaaaacttgacattaccaggattagaagttgcagangagtttganggcatgcggtattttgacgagaaaatcaacaga

SEQ ID NO: 2398 - DNA, 360 bp, Glycine max
  Clone ID: LIB3028-025-Q1-B1-E10
gatgtccctagaaaggcttctgcttatcctagaccttctgcttctctcctccgcggttgagagaattttgtgacgcagcaagtggtaaagcagataacaaacgattcacaggtttaggtggggctggcatgaaccatgtttatgtaagcagtgtatagtttgctttatttccatgttacattttgtgctatatataattttttttttcgtgttgtggtcctgattgttagacattcaagagtctaatgtgggtccttaaggtgttcattaattttgaaccctgtaaacaactgcaacactacccatgtggttgatgctctacatttttatcttttgctttttaatatgtaagaaagtcct

SEQ ID NO: 2399 - DNA, 379 bp, Glycine max
  Clone ID: LIB3028-025-Q1-B1-E12
ctcaatttttctctcaaccggcccaatttagcataagcccagcatggccaccgcaacagcagcagccacctcgtccttcatggggacgcgcctcctggaggcccactccggggcggggcgggtgcaggcccggttcgggtttggcaagaagaaagccgccgccccgaagaaagtttccagggggtcgggctctagctccgataggcccctgtggtatccgggcgccaaggcgcccgagtacctggatgggagccttgtcggagactacggattcgacccatttgggctagggaagcccgccgagtacctgcagttcgagttggactcgctggaccagaacctttccaagaaccttgcctggggacatcattgggaccag

SEQ ID NO: 2400 - DNA, 402 bp, Glycine max
  Clone ID: LIB3028-025-Q1-B1-E2
gcacaaagggcgtaggagaagagggtttcgttccgtttcaatggggagcgaagagcagaacggcgaattctacctgcgttactacgtcggtcacaagggcaagtttggtcacgagttcctggagttcgagttccgcccagacggcaagctccgctacgccaacaactccaactacaaaaacgacaccatcatccgcaaggaggtttacctaacccccgccgttctccgcgagtgccgtcgcatcatcgccgagagcgagattatgaaggaagatgataacaactggcccgaaccggatcgggtggggcggcaggagctcgagattgttatggggaacgagcacatttcgttcaacacgtcgaagattgggtctcctgttgatgttcagagcaatgctgaccc

SEQ ID NO: 2401 - DNA, 364 bp, Glycine max
  Clone ID: LIB3028-025-Q1-B1-E3
agaagccatcagtcatggataggcgtctatcatcgtcttcacgcccttcgtttacatttctcactcgattcgaatctgcaactgcaagattcaatttctctccgtcaacacgttctcactctcacttgaagcggctctcctcagtttgttgccagcatgcaaatccatctcctttttcctcttccactcactttctcgcttcttccaatcaccccattaattttccatccttttcctcttcttcagatcactccacactcgaatcgcattctctcaatcaaatcaaaaccgggggctttccaaaaccaaaggtaataccagctcggacgcttgtaatacatcctgctcttgctatgatcttaat

SEQ ID NO: 2402 - DNA, 402 bp, Glycine max
  Clone ID: LIB3028-025-Q1-B1-E4
ataggctactaaattgctgatgttgattttgtttgtttaatgcagtttcaacgacgaaaccggatttacaaggaggagcagcgcaaactaagggctgctaccaggaaaggccacgaggatggggttaatgaacatcatcattagaacctggagttaattttcaatctaagcttctgaacaattattttgataaaatgtttgtgatttgcttggatcggtattcctgcatgttctgtgagcccatattttatacttttgatgttgcgggcttcttttccctgtgcaataaattcagaagtcaacttaggactgcaaatttcactataagtttgctgagtgaatttggaaaatgtctttgagatgtaaacatgggttaaaaggattgaaattccctaaatgaaa

SEQ ID NO: 2403 - DNA, 384 bp, Glycine max
  unsure at all n locations
  Clone ID: LIB3028-025-Q1-B1-E5
cttttcttcaagcttggtttcggaaaaaaaaaacgtaaaagaaacaaaaaaaaaaacccctagaagcgaagaagctgaaaaaaggctccaaagatggatttcaaaaactcttctcttctatgcctagctcttttccttgcatgctcttcggctattcgtgcatttgacatcacacaattgctaggtcaatatccagagttttccacattcaacanatacctaaccgaaaccaagcttgcagaccaaataaacagccgcaacaccatcactgtcctcgccgttgaagactcagccatgcattccattgctgccaagtccccagaagccattaaggccatcattggcacccatgtcatccttgacttccttgatgagaagaaactc

SEQ ID NO: 2404 - DNA, 359 bp, Glycine max
  Clone ID: LIB3028-025-Q1-B1-E6
catacaaaccctgcagcgatttgtttttatctccgccgtaccatgtcggaagcaccaccgtctcagccatcgcctccaaccgccaacgcgtcaccaccgccgtactggcgctaccactgcgagaagcgcgtctccatcgaaacgctcgcgaatctccccgacgtcgtctgcggtgagtgcaagaacggcttcgtggaatccatccacacgccgtcgcgctctcgctccccctccgcctcctccgacgacccctacttcggctcgcagttcctccacgtccttcgcctaatcgctcagtcggcgcgtgacgacgactcgtcgcctccgccgccgccaagccgctctccggagaacgattt

SEQ ID NO: 2405 - DNA, 401 bp, Glycine max
  Clone ID: LIB3028-025-Q1-B1-E7
aaactttctctgagtatcctccccttggtcgttttgctgtgagggacatgcgtcagaccgtagctgttggagtcatcaagagtgttgagaagaaagaccccaccggagccaaggtcacaaaggctgccgccaagaagaagtgattgcattttggcaattttgctagcacatgtgatcatcaacgtggtttcaaaaaaacttgttcctttacagtagtttatctttgcagagtcttaggtgtttgttttaccagttatattttgaagtgtccgccgatttcatgtagcccgtagcttcaaaacggggttcttgatcggcggtaacattttcgttgctgtttgtttttgatgagtactgttttttgttttgatggtaaaagtctgagatttcaaattcacaag

SEQ ID NO: 2406 - DNA, 375 bp, Glycine max
  Clone ID: LIB3028-025-Q1-B1-E8
gcagtgcaacatctcgccttattgtgcatgaaagtatagcaacagaatttgtgaatagacttgtgcaatgggccaaaaacatcaaaatttcagatccctttgaagaaggttgtaggctaggtcctattgttagtgaaggacagtataaaaaagtgttgaattgtatctcaactgctaagagtgagggtgcaacaattttgattggagggtctcgcccagagcatttgaaaaaggggtactttgttgaaccaaccatcataactgatgtgactacctcgatgcaaatttggagagaagaagtttgtggacctgtgctatgtgtgaaaacattcagtaccgaagaagaagctattgaactagcaaatgacacacact

SEQ ID NO: 2407 - DNA, 378 bp, Glycine max
  Clone ID: LIB3028-025-Q1-B1-E9
gtcaaatatcccagttttggcttccattccagttccaaaattcggcagagacatacctgaagttgcaaggttgcggaatcatgcaggggcaacttgttttacattgagcgttagtaacagagatgctgttagagaacagatacgctcacaattggaagatatgctgacaaaacactagtcattgcaagtttgtggtctgaattcataccgtgtaatgtagaataaattatgaatttatgatgggctaatactatttagtgagagaaaaaaaagtgcaaatcttaatcgagccttaaataagttgataagctagttgagctttgaataccattagtaatatacatgactttaccgcatgatagtccttttgtaatgact

SEQ ID NO: 2408 - DNA, 376 bp, Glycine max
  Clone ID: LIB3028-025-Q1-B1-F1
attgaatttgtctacgaatcggttgacaggaaacatgcctgattctatgatgaactgcaccaagctcttggctcttgacataagccacaatcacttggcaggccatgttccttcatggatttttaagatgggtgtgcaaagtatctctctttctggggatggcttcagcaagggcaattatccttcactgaagcccacacctgcatcttatcatggtcttgaggttttggatttgtcatccaatgcattttctggtgtgcttccatctggcattgggggacttggtagcctccaagtcttgaatttttccaccaacaatatctctggttctattcctgtgggtataggagaactcaagtctttgtacattgttgac

SEQ ID NO: 2409 - DNA, 348 bp, Glycine max
  Clone ID: LIB3028-025-Q1-B1-F10
cctcacgcatttcctcgtttttttcttcccttttctctttctccggcgacgatctcagattccggccactcctctcgccggcgagcccttactcttccctcctccgtcgagccctctccgattcgaatcgttcccagcctcgcaccaccatgaatcccgaatacgattatttgttcaagcttttgctgattggagattctggtgtacgcaagtcatgtcttctcctgaggtttgctgatgattcataccttgacagctatatcagtaccattggagtggactttaaaatccgcactgtggagcaggatgggaagactattaaacttcaaatttgggacactgcgggtc

SEQ ID NO: 2410 - DNA, 332 bp, Glycine max
  Clone ID: LIB3028-025-Q1-B1-F12
ctctggggctgatttcatcaaggaaaactcatgaggctattgagatcctcaagctcatgtcctccactttcctggtcgccctttgccaagccattgacttgaggcatttggaggagaatttgaagaacacggtcaagaacgttgtgagtcaagttgctaagaggactctcaccacaggtgtcaatggagagcttcacccttcaaggttttgtgagaaggacttgctcaaggttgttgatacggagtacacatttgcatacattgatgacccctgcagtggaacataccctttgatgcaaaagctaaggcaagtgcttgtggactatgcattg

SEQ ID NO: 2411 - DNA, 342 bp, Glycine max
  Clone ID: LIB3028-025-Q1-B1-F2
gattcaattttggatttggtgctagcatcccttcccgaagaaacacgaagcaacgggacagacacacaactgcagttaaagcagaagtttgatgccttaaaaggtagtgtaagacacttcagcttcttcccaccatgagggggaggtatgttggcacattctttggcacatctagcatcctggttgaaggttagggaagacgatcaatcaagtgatgggatcgaatctgtgatcaataaagttgaagtttatttggcataaggaaaacttgctgaagcagcagattgtctacaagaaagtgtgagatgcacacaagctgcagaaattgttgcaagttgggtg

SEQ ID NO: 2412 - DNA, 347 bp, Glycine max
  Clone ID: LIB3028-025-Q1-B1-F3
gagaaagaaacatttgagcaaaaatggttcaagcacagcctctacaacatgttggtaatggtgcagggaaagaagatcaagcttattttgatccaagtgctccaccacccttcaagattgcaaatatcagagcagcaattccaaaacattgctgggagaagaacacattgagatctctgagttatgttctgagggatgtgttggtagtgactgcattggtagctgcagcaatcggcttcaatagctggttcttctggccactctattggcctgcacaaggcacaatgttttgggcactttttgttcttggacatgattgtggtcatggaagtttttcaaacagtcct

SEQ ID NO: 2413 - DNA, 353 bp, Glycine max
  Clone ID: LIB3028-025-Q1-B1-D8
taagagttgctgcatcttcaaccactccgcacctcgcagcctctgtgccctcaacaaccatggatgatatcgaaactaccgttccagatcccacccaaatcgacgtcaaactcttcaatcgctggtgcttcaatgatgttgaggttaatgatatgtctctggctgattacattggtgtgtccccatcaaagcatgctacatatgttcctcacactgctggcaggtactcagtgaacaggttcatgaaagcgcagtggcccattgatgagaggctcatcaactctctgatgatgcacgggaggaacaatggcaagaagctcatggctgtcatgattatcaagcatgccatggag

SEQ ID NO: 2414 - DNA, 326 bp, Glycine max
  Clone ID: LIB3028-025-Q1-B1-C10
agaaagagcagcttcaacaaaacgcgtttgtggttggatcctatttgaaagaaaggctcactgccctcaaggacaaatatgaattaattggtgatgtgaggggaagaggcctaatgctaggagttgaacttgtcactgatcgtgaacttaaaactccagcaaaaggtgaaacgctgcatgtaatggaccaaatgaaagaattaggagtacttattggtaagggtggttactatggaaatgtcttcagaattacacccccgttgtgtttcaccaaagaagatgcagactttgtagcagacgcaatggacttgaccttgtctagaatg

SEQ ID NO: 2415 - DNA, 337 bp, Glycine max
  Clone ID: LIB3028-025-Q1-B1-C2
gaaaatcctcaattttctgagcagccaaacactctctctctgtctctcgaaaattctcagtttgcagagaaaatctgaatcatgtcgtggcaagcgtatgtcgacgatcaccttctgtgtgacatcgaaggtaaccacctcactcacgctgctatcatcggccaagacggcagcgtttgggctcagagtaccgacttccctcagttcaaacctgaggagataactgccatcatgaatgactttaatgagcctggatcacttgctccaactggattgtatctcggtggcaccaaatatatggtcatccagggtgaacccggtgctgtcaatccaaggg

SEQ ID NO: 2416 - DNA, 409 bp, Glycine max
  Clone ID: LIB3028-025-Q1-B1-C4
gccatctcctccgtcatgaggcgtttcagaggaactttaggatgcgccgtggatggatttggggaggatcgatgattgaaagtacggtttgggtgcgaaggtgctcgagtgccgcggcggcggtcaagcatcttatcttcctggtgcctcgcaagttctgtagcttgcacgagggaaagaggacggagagcttggacctcacggaggagctccggactcaaccctgatataaagcagctcagcaaacacgaaggggaaagacctaatgttcggttcgcgatatgctcaaaatctgtgacgtaatcactcacagtgccggtctgctggagcttacacaatgctccttgcggatcttcgtaaaatgaacgcgcgaatcatgattcgaatgcctgcaacatccacagacacg

SEQ ID NO: 2417 - DNA, 382 bp, Glycine max
  unsure at all n locations
  Clone ID: LIB3028-025-Q1-B1-C5
aactaactaaattaaggagagtccaagtgtgtgggagacaaagagagacatggctaagtggtgtatgttggtgttggttcttgctctggctgtggctacaagtgccagagatgttcccaatcccaaggatgctggtctcaatgaccagaagaacttcatcagctatggtggagttggtggctattctggaattggaagcaatggactaccttttggaggtgtcggaataggtggtggtattggcggtggtggacttggtggcggcctcggcggcaccaccgggataggtgggttgggaggattcggaggtcncattggtggcggtggtgttggtggtggtagcatacctcatcctaccccttgatatgaacatgcatgcata

SEQ ID NO: 2418 - DNA, 350 bp, Glycine max
  Clone ID: LIB3028-025-Q1-B1-C6
attcaacttaagagatgaatatggacatcaccactacacagcctcactctaatatctgttttttccttctgttgttgcttctaccacacttgcagttgggcataagccaacttgagctgaactactagtcgaaaagctgaccaaaagctgaagagatcatcactgaacaggtcacacagctatatcacaagcatggaaacactgccgtttcgtgggtcagaactctcttcgacgattgcgtggttaagtcatgcgatgcatcattactgttagcgacggtgagcaatgtagtgttcggacaaacatcgggtcacagttttgggatgagaaacttcaagtacatcaacact

SEQ ID NO: 2419 - DNA, 368 bp, Glycine max
  Clone ID: LIB3028-025-Q1-B1-C7
ggaactctatcttcaggatcgcacatcccggtggtcccgcgatcctcgatcaagtcgatgagaagctccggctcaagccggagaaactccagtccacccggcatgtgctgagtgagtacggcaacatgtcaagcgcgtgtgttttgttcattctggatgaaatgaggaagaagtctaaggaggaagggaagagtaccactggagaagggttatagtggggggtgctattcggattcgggccgggtctaaccgttgagaccgttgttctgcacagtgttcccttggagggataaatcatgctgatgcggtgactagtgatttaagagtgatcaataaggaaccctcggaaataccagggaaagtttgtt

SEQ ID NO: 2420 - DNA, 385 bp, Glycine max
  Clone ID: LIB3028-025-Q1-B1-C8
ctcgagccgactcgggtctagcctcagtagtgtcatttacgcttctcttctctgtagcagctatgcctaagcctaaggtcttcttcgacatgaccatcggcggtcaatctgctggccgcatcgtgatggagctctacgccgacgtcactccccgcaccgccgagaagttccgcgcgctttgcaccggcgagaagggcgtacggcggagcggcaagcccctcgagtacaacggctcgtccttcgatcgcgtgatcccgagtttcatgtgtcagggtggcgacttcaccgccggaaacggaaccagcggcgagtcgatttatggcgccaagttcgccgacgagaacttcgtgaagaagcagacgtgtccgagcatcctctccatggc

SEQ ID NO: 2421 - DNA, 313 bp, Glycine max
  Clone ID: LIB3028-025-Q1-B1-C9
aaggaactcaagaacggtcgcttggctatgttctccatgtttggtttctttgttcaggctattgtcactggcaagggccctattcagaacctttacgaccacgttgctgatcctgttgccaacaatgcttgggcttatgccactaactttgtccctggacaatgaggatgcctacatgcaatgcaatcttctgctcccttttgcagttcccttgtgtttaactccattttcactaatgtaactacacctgtgtagcagaaaaatctgtatgagaaccattatatttttatatattagaaatttgggtccccag

SEQ ID NO: 2422 - DNA, 323 bp, Glycine max
  Clone ID: LIB3028-025-Q1-B1-D10
cgcgcgcttcactcctcttataaaaaaccccaagctcgacaccttctactacctcgagctcctcgggatcagcgtcggcggctcgccggtgcgcggcctctccgcctcgctcttccgcctcgacgcagcgggaaacggcggcgtcatcatcgactcgggcacctccgtgacccggctcacccgacccgcctacattgccctccgagacgccttccgcgtcggggcctcgcatctgaagcgtgcagcggagttctcgctcttcgacacgtgtttcgacctgtccgggctcacggaggtgaaggtgcccacggtggtgctgcatt

SEQ ID NO: 2423 - DNA, 381 bp, Glycine max
  Clone ID: LIB3028-025-Q1-B1-D11
ttgggccacaaggggtgggcttgtgaaaacggattggagcaaggccccattcacagcctcatacagaaacttcaatgccctaacctcttcctccactggccaatcactggacgccacggggctggccaagatccattgggtgcaaaagaattacatgatttacaactattgcactgatattagacgtttcccacaaggcctccctccagaatgttccattgcttgagaatgttcattattcaattcaatgttgcatattattatatatataaaaaaaatggtccccatatacgtgacacgtgtatgcctattacgttgatttactttcttgtataaactaatggtactaaaacctatgattattgttggttggtttgtgct

SEQ ID NO: 2424 - DNA, 352 bp, Glycine max
  Clone ID: LIB3028-025-Q1-B1-D12
gccacatcaatattatgacagtgatgatgaatatgctcctgacagggtgccactcttgaagaatgctccacctcattatgttgttgatccaggatatgcacatggaaatgatacatggaggagacaaggtataaaagattggcattctttaattgatcatagttttcttattctagctatcttggatttcctttatcatttattttcactagtctgtttcaaatacctattatcatgcatcagccttattcttaaatggtttgaagaggcaagtagaccgtacttcgatttatactacaatttatgaatttgaaaatggttatgtattagataaatctatatcatttttttt

SEQ ID NO: 2425 - DNA, 379 bp, Glycine max
  Clone ID: LIB3028-025-Q1-B1-D2
ggcactcaaagtaacatgaatgctaacgaggttattgcaaaccgagcagcagagattcttggccataagcgtggtgagaagtttgtgcacccaaatgaccatgtcaatagatcacagtcttctaatgatacattcccaactgtaatgcacattgcagccgcaacggaaataaactcaagactgatccccagccttaaaacgttacacgatactctaaactcaaagtcagttgaatttaaagatattgtcaagattggacgcactcatactcaagatgcaacacctttgactcttggacaagagtttagtggatatactacacaagtgaagtacggtattgatagagtaattgacactttgccacgcatgtatcagcttg

SEQ ID NO: 2426 - DNA, 353 bp, Glycine max
  Clone ID: LIB3028-025-Q1-B1-D3
cttgttttctaaagatgtttgcttcctgcggacttcattaacctcggacctcaaaacagcattgtccctgagtagatgatccaactgcatggaagcaaacatctttagaaaacaagggtgtgctagtgttcttagtgtgttgtattttttcattgttagttatattacggctgtctctagatatggctacgagcgtctatagagtagtactgagtgttaatagaacagattgctccaggaaattttgtgccgttagctcatcctggtttctcctactattgaattgtatcattgttatttttatattaactttgtgatagtccattttttaaatatgttgttaacttgtgtga

SEQ ID NO: 2427 - DNA, 351 bp, Glycine max
  unsure at all n locations
  Clone ID: LIB3028-025-Q1-B1-D5
ctcgagccgattcggctcgaggaacagttgaagtgaatggcataaaaatgcatgttgcagagaaaggagagggtccagtggtgttgttcctccacggcttccctgagctctggtactcatggcgccatcagattctctctctcagctccctcggctaccgcgccgtcgctcccgatctccgtggctacggtgacaccgaagcaccaccttcaatcagcagctacaactgcttccacatagtgggtgatctcgttgcgcttattgactctctgggtgtccaacaagtgttccttgtggctcatgactggggagccatcatangttggtatctatgcatgtttcgccctgaca

SEQ ID NO: 2428 - DNA, 392 bp, Glycine max
  Clone ID: LIB3028-025-Q1-B1-D6
ttcaactcaaggagatggctctgggaataggcattgcagtggttctactactttgcttcttgctgcgtcactctcaaatggctcgtgctgccaactacatagttggagattctgggggttggacctttaacactgttgcctgacccaaatgaaagctctttcgggctggtgacatacttgctttcaattatagccctgggactcacaatgtggtggccgtgaacaatgctggatatgatagctgcatgactccacgaggagccaaagtgtataagtcagggacggatcagattagacttgccaatggacagaactacttcatctgcaattaagttggtcactgcgagtctgggatgaaaattgccatcaacgctgcctgagtttaataatat

SEQ ID NO: 2429 - DNA, 362 bp, Glycine max
  Clone ID: LIB3028-025-Q1-B1-B8
gttgtgaaagcagagaagtgagatacactaagttatcctcataaatacactctaattaggtggcaagataagtgtctaaccttagtaacattgccacatattgtgttcattttggaattgtgccactaaaattctattcaattcatctatggctgcctcttcttatgctatgcaatcaatcctggcaaaccctttgatccgcatttccagcgggtctagggtgaaccaatttggcgttcctgctttgcacatgagaaggaatgttggcctgagagttaggtccatggctaaggaagaacaaccaagtgagcctgcaaccccagttacaccgccaccatcagtagaacccaagccacagccag

SEQ ID NO: 2430 - DNA, 367 bp, Glycine max
  unsure at all n locations
  Clone ID: LIB3028-025-Q1-B1-D7
ggcctcaaaggggaagacttaggtctgtctagtggaagttctggacagtggaattcacaatctaccttccctaagaaccaaccattgatttggtacaagacaacctttgctgctccatccggcagtgatccagttgcaattgacttcacggggatgggaaaaggtgaggcttgggtgaatgggcaaagcatcggacgatactggcctacatatgtggcttcagatgctggttgcacggactcatgcaattatagaggaccttacagtgcatccaaatgtcgcaggaattgtggaaagccatcacagacactataccatgtaccgcgatcgtggttaaaaccaagtggcaacattcttgtantgtttg

SEQ ID NO: 2431 - DNA, 227 bp, Glycine max
  Clone ID: LIB3028-025-Q1-B1-A12
gctttgggttgtaattaaacattttctacatagctggattagtagtacttgtgaaaaacttgtaacgtgaaattggagaggctaagcagaaatgcttctgcttgatgttaagtgttctcctgtgaatgttaattatgcacgaaatcgagagggaaggacgacggtaaaaaatactgatgaggttaagatcactatgaaaggtaatggcaggaaattggattgaggcc

SEQ ID NO: 2432 - DNA, 386 bp, Glycine max
  Clone ID: LIB3028-025-Q1-B1-A2
ttccaattcatcctctctctcccatagataacaacaaaaaagtcccagtcacgaattagtcaccaccatcagtacatacacttcctcaaaaaatggaaatggaagcaagcccaagcccaagcccaagcccgaagcaagtagtggcaaggaagctatggaacatagtacgcatcgtgttcctgatgttgagaaagggcatatcaaagagcaaactcgccgctgacttcaacttgaacttgtcgttcaaacgtggcaagctggcagccacaaaggccatagccaacactatcctccaccgctcccaaaacgacgacgccgtttacccgcgcgactacgagttcagctgcagcaacagccccgggctcttcacgtcatcaagcgcagca

SEQ ID NO: 2433 - DNA, 365 bp, Glycine max
  unsure at all n locations
  Clone ID: LIB3028-025-Q1-B1-A3
atcacaacgcgccgccgcagcattcacctccccggagatccaccctttgcatggcagtgagctttctggcgcgcgatgtatcggacctctgccttgggaagccaccgctgaggtcgctctccgctgccgccaccgtcgccgacgccttagacgcgctcaagagctccgacggcgagatccacgtcagcgtgtggagcttcgagaatgaagtgggtcgatgcgtanggaaactgtgcatggtcgatgttatttgctacctttgcagagaggacaatctcttgtctccttctaaatctctcaaagaaccactttcctcaattctccctaaggatcataatctcgttgtgcatcttcaaccttcttct

SEQ ID NO: 2434 - DNA, 218 bp, Glycine max
  Clone ID: LIB3028-025-Q1-B1-A4
ggcccagtatctaattactaggcaacaatatatctctggtttaaagtacatctaaaccatcatatatactgtacgatatgtttgtcaatttacgtattcatgcacgtgcttgtcttcctaaatttgtatgaggaatatgtgaatgcatttttgttattacctataacccattcggataaatttaaatcaatctttcttgatgagttaatggtttggct

SEQ ID NO: 2435 - DNA, 390 bp, Glycine max
  unsure at all n locations
  Clone ID: LIB3028-025-Q1-B1-A5
gttagcggcggcgggaagatcaccgatgagttcaccgggaagggctcgatcgggcaggtctgccaggtcatcggtgccgtcgtcgatgtcagattcgacgagggtttgcctccgatcatgaccgcgctggaggttctggatcactcctcgaggctcgtgttggaggtggctcagcatttgggtgagggcgttgtccgaaccattgccatggatgccaccgaaggggtcgttagagggtggcgcgtcctcaacactggctcccctattaccgttccagttggtanggctacccttggccgtatcataaatgtcattggagagcctattgatgacaagggagaaatcaataccgagcattatttgcccattcatagagaagctcctgctttt

SEQ ID NO: 2436 - DNA, 380 bp, Glycine max
  Clone ID: LIB3028-025-Q1-B1-A6
ctataaagtagcaaaaataattagtaaccttgaacattacaagtaataagtgtgaagagattgataatcaacggttctggattaaagtctccatcatgctctctcctttctttgtattggtggatgaagttgtctcaaacttaattttgttctcactgggggattttgtttctccgttaagaatatggtcaacagattgtaacctcgtagtatatttggtgttcactgttaagggaatcagcggagcacaattgatagcgctctcctccttatcacttgagccaaagacgagaattttttgcaacgtattgtcatctatatctatatgttacatagtttttgccatcaacgaacaatatttaaaaaaggcagccgccgac

SEQ ID NO: 2437 - DNA, 345 bp, Glycine max
  Clone ID: LIB3028-025-Q1-B1-A7
atggaaagatattgctttttgtttttctctctgccttctttctactttttgtgttcgtcctcatgattccatggctgaagaatcatgcaaggggttctcatgattcatgaacagaataagattcgattgagttccagaataacactgcgtcacaaaactggttcagaagaagaaggaaagaagatgatgccaacaccatgcaacaacagtagcaaattctattctccttttatagtgtgaggaattgcatatttttggagcaagaagttaagtgcatgaatttccgtgtgaatatgatgtagctacagtttaattacatatctgattctgtgtgcagaaacttgt

SEQ ID NO: 2438 - DNA, 238 bp, Glycine max
  Clone ID: LIB3028-025-Q1-B1-A8
caatgtcaatgataccatcaggaggagacactacattcggtggtcttgattggtcaccacacgatggctatcaccctaggcataggaaggatagcattgactatactcagttaacatagcaagtcacaggtcatccagatgttgtcatcgatggaacaatgagatcatttggcagagatgtgaccgaggcacactcctctaaaattgagatagctgactttcgtggacccatcaaagg

SEQ ID NO: 2439 - DNA, 220 bp, Glycine max
  Clone ID: LIB3028-025-Q1-B1-A9
attgaagtctaaagaaaacatagaacgaagaagaagaacagatcagaaaaatggcgtccaaagttccaaagaaggccaatctcctggatcaccactccatcaagcacatccttgacgagtctgtctccgaggtcgtaacgagtcgtgggtatttggaagacgtgagattgagcattgcaaggcttttcattggggcattcatcatcgtcattgctttatt

SEQ ID NO: 2440 - DNA, 379 bp, Glycine max
  Clone ID: LIB3028-025-Q1-B1-B10
cacacaccttgtgttctgcaccacttcaggcgtggacatgcccggagcagattaccagctcacgaagcttctcggcctgaggccctccgtgaagcgcctcatgatgtatcagcagggctgcttcgccggcggcaccgtactccgcctcgcgaaggacctcgccgagaacaacaagggtgcgagggtgctcgttgtctgctccgagataaccgccgtgacgttccgcggcccctcggacacgcacctcgactcgctcgtgggacaggcactgttcggagatggcgccgcagcgttgatcatcggatcagaccccgacccagacaatcctgcccgactctgacggtggtattagatgggcaccttcgggaggtgggactca

SEQ ID NO: 2441 - DNA, 343 bp, Glycine max
  Clone ID: LIB3028-025-Q1-B1-B12
ctcgagccgctcgagccgcaggtatttcatctaaagaaatcgatgattctattgataggattgtggctggaatggaaggaacagttatgacagatgggaagagcaaaagcttagtggcatatcatgaagttgggcatgctatttgtggaactttgactcctggtcatgatgctgtgcaaaaggtaacactagttcctcgtggtcaagctcggggtcttacatggttcattcctaatgatgatccaactctgatctccaaacaacaactctttgcaagaattgttggaggactacgtggaagggctgcagaagaaattatttttggtgagcctgaagttacaac

SEQ ID NO: 2442 - DNA, 362 bp, Glycine max
  Clone ID: LIB3028-025-Q1-B1-B2
cagacttaacaacagcacaaagcgggttactgtctgttcaagctaccatctctctctctctttcttagtgcctccttgccagaagttaaaatggcccaagaaactttcctattcacatctgaatcagtgaacgaggggcaccctgacaagctctgtgaccagatctccgatgctgtgctcgatgcatgcttggagcaggaccctgacagcaaggttgcctgtgaaacctgcaccaagaccaacatggtgatggttttcggagagatcacaaccaaggccaacgtggactatgagaagattgtgcgtgacacatgcaggaacattggttttgtctctgatgatgttggtcttgatgctgacaa

SEQ ID NO: 2443 - DNA, 347 bp, Glycine max
  Clone ID: LIB3028-025-Q1-B1-B3
gttcttttggagtgtgtgtgcacccattgatgacaagcaaacccattgcatggaagcctaagaagaagaaaaaaacaaacaggacaagggtaactgaatcgccgcttctgaagcatcgttcttccgtttttgttcaagctttttgccttcagagggtaaataaaaaatggaggttttggtgggtcccgctttcaccatcgacgttccctcgtctccgccgcatcatgccggttccgatgatcggatctttcttaacgtgtcacccgaagaaagtgatgggtcgaactttcgtatttcgggcccacccaagttcttcgccggcggcgagtcggagagttcgtcgtcga

SEQ ID NO: 2444 - DNA, 392 bp, Glycine max
  Clone ID: LIB3028-025-Q1-B1-B5
tttaacttcctcatgagttggagttcagcaggaactttcttaatgttctctagcatatgtggcttcactgtgctattcgtagcaaaactagtaccagagaccaaggggcgtacactagaagaaattcaagcttctttgaactcattttcttctaagagatagagattctgaatcaagaaaattacattcagcaatcatcacacaagtttttatcgagactcgtgatgtacacatattcttacaattaattgtctatattatagatagatacttaatatgtagatttactttgtatatttttttgagtgtcattatgtagagttgaatatttgattttaaactcaaatgtcataaccatgggacatgtttcgctccgtaaatgaaattgcaag

SEQ ID NO: 2445 - DNA, 391 bp, Glycine max
  unsure at all n locations
  Clone ID: LIB3028-025-Q1-B1-B6
cagcaccttagtaccttgaatcattatcattcgggtaatggacacatcactagtgtttactgtgaggaggagtgaggcagagctgatagctccggcgaagcccacccctcgtgaagtgaagctactctcagacatagatgaccaagatgggttacgtttccaaattccggtgatacagttctatcgccacgacccatcaatggcagggaaagaccctgtcgatgtgataagaaaggctgtggccaaaacgcttgtgttttactatccttttgcaggtaggcttanggaaggacttggtcggaaactgatggtggattgtactggggaaggtgttttgttcattgaggctgatgcagatgtcactcttaagcaatttggtgatgctcttcaa

SEQ ID NO: 2446 - DNA, 386 bp, Glycine max
  Clone ID: LIB3028-025-Q1-B1-B7
gtcggaggattcttacgcctgaacgagtcctctccttgcgtagttggtgctcaattaaaaagaatggggggagatgcacagaataagagaattgccataattggcgtgtctaccttcttgctggtggccatggtggtggcagtgacagttagcatcaacctcaataacaagggatcaagctatgattcaaaggaagaaagcaaatccagtgtagcttcctcgatcaaggccgtgaaaaccctttgcgcacccaccgattacaagaaggaatgcgaggacagtcttattgaacatagcaacaacatcaccgacccacgagaactcataaaaatcgcgttccacgttaccatctcaaaaatcggagaacgacttgagaaaacagaact

SEQ ID NO: 2447 - DNA, 325 bp, Glycine max
  Clone ID: LIB3028-025-Q1-B1-A10
ccaagttcactttggtggcagttgaacgagtttgcaaccccacacacaaaaaccaaacccttaaaaatgtcatccccctcgccggtggccacggtggtctccgccgccgcgctgtacgaccgcgccaaagccgtgaaagaattcgacgaaaccaaggtcggagtcaaaggtttgatcgattcgggaatcagaaccatcccccctttcttcgtccacccgcccgaaaccctagcggacctcaagcgcggaaccaaacccgggtccgcgccggagatccccacggtggacctcgccgccgaggagagctcccgcgccgccgtggtgg

SEQ ID NO: 2448 - DNA, 395 bp, Glycine max
  Clone ID: LIB3028-024-Q1-B1-F9
tgcttcctacccaaaggataacaaaggtagatacattatctacgttaaggctggtgtctatgacgagtacatcaccgttcccaagagttcaaagaacattctcatgtacggtgatggccctgctaagaccatcatcaccggtcgcaagaacttcgtcgatggtgtcaagaccatgcaaactgccactttcgccaacactgcagaagggttcattgccaaggcaatgacattccagaacactgccggtgctgagggacaccaagccgttgcattcaggaaccaaggagacatgtccgctctcgttggttgccacatcttgggttaccaagacaccttgtacgtccagaccaacaggcaattctaccgcaactgcgtcatctccggcacagtcgact

SEQ ID NO: 2449 - DNA, 253 bp, Glycine max
  Clone ID: LIB3028-024-Q1-B1-G1
atttgctttgcgagatgatagtattgttgaaatacaaggggaatctgctggtgttcacaaggcagttgaacttattgcagttcatttacgcaagttcttggttgaccgcagcatatttggagtttttgaaacacagatgcaaaggccaaatgttagagttaaccagaatgtgccaccacatcaaaattggggtcctcctcctcaagggtttcctgctcctgctggtggtggtggtggaggacctgcttttgca

SEQ ID NO: 2450 - DNA, 323 bp, Glycine max
  Clone ID: LIB3028-024-Q1-B1-G10
cagtgcttttccgccgccgtcgcggttcaaacttgaatagttcaaaaggtgtgaaagcaaataagatgcagcatagaaatttgacttctggaaggccttctggaactgatggctccgattactcctactgtatggtagtcgattcacggtagcaactggttgcaaaggggaagaaacgcctgtctctctacgttatcactgaggctgtgttgctgtgattacgagtgacacgtacatatttaccacgaagagaagcagacgctccaaatacagttgcctattcatctgttattgtaagtgttgtctcactaataattgggaat

SEQ ID NO: 2451 - DNA, 395 bp, Glycine max
  Clone ID: LIB3028-024-Q1-B1-G11
ctcaatcatagtttatggaagctgtagaggcaaaagcttcatctgggtatggcaagcctccatgggtatttaaaaggaattcctggtaacaactccaacctgttaaaggaaaaaaagctccaacctaaaatccaaaagaatttcaattgggttaaacctttgggtaaaatccttgggggttcctttcaaccaatttataaggacattcaatttggtgtctttgatgaccttgttgtaattgcaggatgtgtatgaacgcgcacaatatcgtgcatatggacagagagtgtgtatgtgaacagctatgaggcctgttatcacggaagaagagatgtgagatttccatctcagatggctatgttttccaagacatttacagcaatctcaagacaaca

SEQ ID NO: 2452 - DNA, 390 bp, Glycine max
  Clone ID: LIB3028-024-Q1-B1-G12
acttcgttttggagtgaaaccaagtgttgctatcaacggaggagcgcccacactggaaaaaaaaatctccggcgattgttccaccgaacctcttccgttctccgccccgatcctggattcaatcgtcgattccagtttctcattctagttgatcgagttcgtaggtttttatggtgcttcgttggacacacggtggcgatttgcattactcagtgggtggtggtggcaccgtgaattattgagtctgattacactcgctttgaaaaatcgaagagagaaatgtcttatcagcataaaagcttttggatgccacgagatgctggctgcatggctgaagaaaatgtgggatatgaaaattcttccagagtagaatccaagcgcagtcataag

SEQ ID NO: 2453 - DNA, 65 bp, Glycine max
  Clone ID: LIB3028-024-Q1-B1-G4
gttgcatgctacccctgaaagggtcacaactgttcatggttctagtactagtactttcagtcatg

SEQ ID NO: 2454 - DNA, 390 bp, Glycine max
  unsure at all n locations
  Clone ID: LIB3028-024-Q1-B1-G6
cttaagagtttgagaactgagaagagatgggtggtgttgcatggacagaagaagaagatcacttgctcaagaaatgcatacaacaatatggagaaggaaagtggcatcgtgttcctttactggctggtttaaacaggtgccggaagagttgtaggctaagatggctgaactatctccgtcctaacatcaagagaggaaattttgcggaggaagaagtggaaatgataatcaaactccataaattactaggcaacagatggtcgttgattgcacgaaggctaccaggaaggactgccaatgatgtgaaaaactattggaactgtcatctgagcanaaaactaaatgtaatagaagctgaagatagaccaataacaagagatgttcaagtca

SEQ ID NO: 2455 - DNA, 268 bp, Glycine max
  Clone ID: LIB3028-024-Q1-B1-G8
attctctctgtgtatttccctacctctcccttcaagatgcagatcttcgtcaagaccctcaccggcaagaccatcacccttgaagtggaaagctctgacaccatcgacaacgtcaaggccaagatccaggacaaggaaggaatccccccggaccagcaacgtctcattttcgccggaaagcaacttgaggacggccgtacccttgctgactacaacattcagaaggagagtactcttcaactcgtcctccgtctccgtggtggcatgc

SEQ ID NO: 2456 - DNA, 403 bp, Glycine max
  Clone ID: LIB3028-024-Q1-B1-G9
cctacctctttttcttctctctcaacaacttcaccttcttcctcctcgatcatgtctcacttcaagggcaagtaccatgatgagcttatcgccaatgctgcgtacattggcactcctggaaagggtattcttgctgctgatgagtcaacagggacaattggcaagcgtttggccagcatcagtgtagagaacattgaatccaacaggcgagctcttagggagctgcttttcactgctcctggtgttcttcaatatctcagtggtgtcatcctctttgaggaaaccctctaccagagcacagctgcaggcaagccctttgtgaatgtcttgaaggaagctggtgtgcttcctggcatcaaggttgacaagggcacagtcgagcttgctggaactaatggagaaa

SEQ ID NO: 2457 - DNA, 337 bp, Glycine max
  Clone ID: LIB3028-024-Q1-B1-H10
gcttgggataatcttttggagaacaagactgccttcactacaaagaaagactatggcaaagaagagagagaagcacagtgggcaactgctcagaggactcttcatggtcttcagccacctgaaacaaccaaccttttcaatgacaagaacagttacagggagctttcagagattgctgagcaagctaagagacgtgccgaggttgcaaggctcaaggagcttcatactctgaaaggacatgttgaatcagtagtgaagctgaagggacttgacattgatacaatccaacagcattatacagtttaaggaatttggacaaacttcaagcagaacacac

SEQ ID NO: 2458 - DNA, 366 bp, Glycine max
  Clone ID: LIB3028-024-Q1-B1-H11
ggcactaatgctttgcaaggatgttcaaaagacaactacaaagatcaagactgggatgatattgcttttaacaaaccttctcttgtgaagctagagcctgtgtctggcataaaggctgatacatcattgcaaggaaaatgtactttggctgagtctcccagagttgatattgacattgacatggctaacatttcagctagtgctatggatgaagatataaccttacacgccaacattatacaacccatggtgaacattaggaaggagtcaccattaacactttcaaattcagctccagggagcatctgcttttctggtggattgcttggtcctgatggaactcatcgatacttgggtaaatggtgc

SEQ ID NO: 2459 - DNA, 406 bp, Glycine max
  Clone ID: LIB3028-024-Q1-B1-H12
cacaccctcaccctccctacgtttacccctccccaccacctcctcctaagaagccatacaagtacccatctccgccacctcctgtccatcactaccctcagcctcaccctcccttcgtccattactctcctccaccatctcctaagaagccatacaagtacccatcacctccaccaccagtacaccctccttacactccccacccagtttatcactctcctccaccacctcctaccaacaagccttacatctatgcgtcacctccccctccttaccactattagctagcatagctctatggatatgaagaatatgtgcaacgaataaaagaaagcgatagaaaaggaagaagaagcgcttcgcgatgcacgatagagaagaattggaagcaaagtttcggcgtttt

SEQ ID NO: 2460 - DNA, 145 bp, Glycine max
  Clone ID: LIB3028-024-Q1-B1-H2
tttcaacccttgtattttatgacacctaaactagtttttgtattatgagtagttttgtaatttcacatgcattaagtgaatatttgatgtgtgtgttgtgaaataaatttaattgaattgggagaagcccaatccaattaaattt

SEQ ID NO: 2461 - DNA, 112 bp, Glycine max
  Clone ID: LIB3028-024-Q1-B1-H3
cttagccgctaaaggcagaaaatatcaaagagaaacactattctcccttgaaaaatgtcagacattctcaacaaaaatgaagccccagaaaaccagaaatttgaagtcacat

SEQ ID NO: 2462 - DNA, 290 bp, Glycine max
  Clone ID: LIB3028-024-Q1-B1-H4
attcagctcgagggatattcggcaagacgaccctttggtgtttggatcttcaaaaaaaaatacccttgggatttcgtcacaagaagtctcatcggcactgtggaagcaggtgaccgactaatcatttcggtcaaagcaagaattggccctccaggaattaagggtgctcaacttcaaaaacacatcgatgccacgttgggtactgggaacttgagggaggctgttaaactgcctcccggtgagaatattaatgaatggctaccggtaaaaacgttggactccttaaacca

SEQ ID NO: 2463 - DNA, 375 bp, Glycine max
  Clone ID: LIB3028-024-Q1-B1-H5
ccacaagttgctttcacagtagttccagggtttaagaatggtaaaactggtttacaatgccaagtgtacctcacaacacagcacaaacaacaaagcaagggtaaattttttttcacttcaacaaagcaaaagtgactcatgactgaccccacacaactcaagtgattgaactgggaaggaattccttaattttcctaatggaaaaaaaaccttttggaaggaaattgaaggcctgttggttttgggaacggaccccgggcttggttaacccaccggggaacctttgcccatttgaattttggccattttgaaaagaaaaaccattggaccgcgttgcattggaaacaagccttttttttaaaaaccttttttttt

SEQ ID NO: 2464 - DNA, 367 bp, Glycine max
  Clone ID: LIB3028-024-Q1-B1-H6
tttgatcgaaacatgaacattaaacttcacgcggagctcatgctaacggataataagaccatagatgcacgtggtgccaatgtgcacattagtgagggtgcccaaataacgttgcaatatgtgaaaaacatcatcattcacggtctgcacattcatgacattaagaaatgtagtggtggcctcatcagagactccatggatcactatggattccgtgccatgagtgatggggatgccatttcggtgtttggatccacatatgtttggatagatcatgtttcctttaccaactgcgatgacggcctcatcgatgtcgttagcgcttcaactgctgttaccatctccaactgccatcttaccaaacata

SEQ ID NO: 2465 - DNA, 399 bp, Glycine max
  Clone ID: LIB3028-024-Q1-B1-F8
caattttcaaccttaacctctaagaatgtcttacgcttatctcttcaaatacatcatcatcggtgacaccggagttggaaagtcttgtcttctacttcaattcacggacaagcgctttcagcccgtccatgacttgaccatcggtgttgaatttggtgccaggatgatcacaattgataacaagccaatcaagttgcaaatatgggatacggctggtcaagaatcattcagatctattacaaggtcttattacagaggggctgcaggtgcattgcttgtttatgatataaccaggagggagacatttaatcatttggctagctggttggaagatgcaagacagcatgcaaatgcaaatatgactattatgctgattggcaacaagtgtgatcttgctca

SEQ ID NO: 2466 - DNA, 317 bp, Glycine max
  Clone ID: LIB3028-024-Q1-B1-H8
tttttgtgatattgagaggacgaccctttggcgtatggatcatcaagaaagagagacccttgggatttcggcgcatgaatcgcttcgttcatggccacaaggtgaggactacattacatctcaagccctatgcaccatctagatgtaacggtgatccatctcaggcacacatcgagtctagggtaaggtaatgcgaacttgaaggacgtggtcagattggtacatcgctagggtaccccaaggctagcataagcacgtttgtgtcgttagtgagcaattggaattacctgggacgggttctttcagggtttgtatct

SEQ ID NO: 2467 - DNA, 398 bp, Glycine max
  Clone ID: LIB3028-024-Q1-B1-H9
atttctcacctaaccttctcttcctctcagtctcagatcagaaacctcagccagccatggcagcgttccagaagatcaaggtcgtcaaccccatcgtcgagatggacggagatgaaatgactagggttatctggaagtcaatcaaggacaagctcattttgcccttcttggagttggacatcaagtattatgacttaggccttccttaccgtgatgagaccgatgataaagttacaattgaaagtgcagaagcaactctcaagtacaatgtagcaatcaagtgtgcaactatcactccagatgaagctcgtgtgaaggagtttggcctgaagtcaatgtggaagagtccaaatgggactattaggaacattttgaatggaactgtcttcagagaacca

SEQ ID NO: 2468 - DNA, 387 bp, Glycine max
  Clone ID: LIB3028-024-Q1-B1-E10
gggcaatctcagagctattgagaaggccagagattttcaagaaggcaacagaggagctagacagggtgataggtagagagagatgggttgaagagaaggacattgtgaatttgccttatgttaatgccattgtcaaggaagcaatgaggctgcacccagtggcaccaatgttggttccaacactatccatagaggactgcaatcttggagggtatgacatccccaaagggacacatgtgcttgtgaatgtgtggactattgggagagacccttcagtttgggacaaccctaatgagttccaaccagagaggtttcttaataatgagattgatgtgaatgggcatgactatgagctagtgccatttggtgctgggagaaggatgtgcc

SEQ ID NO: 2469 - DNA, 363 bp, Glycine max
  Clone ID: LIB3028-024-Q1-B1-E11
ctcccggattaaacatccttgcagcatggtctccagcctcagctggaatgaagttcaatattatatcaagaacttcgatgtcttgtcctcacataactggaattgcaaccttggtcaaagctgtgcatccttcatggtctccgtctgctatcaaatctgccatcatgacaactgcaacacttttggataagcaccaccaacccattagagcggatcctgatagaagacgggctaatgcttttgcttatggatcagggtttgtgaacccttcaagagttctggatcctggtcccgtctacgaatcacatccagactattttgttgcattcctaagttcacttggctatgactagaggtcactcc

SEQ ID NO: 2470 - DNA, 389 bp, Glycine max
  Clone ID: LIB3028-024-Q1-B1-E12
atcgccgaagaaggtattgacgtcgatgatgaaaatgaaattggtgaaaacattactgcttctcctttgtgtgaaactcttctgttatgcagtgattggtgctcctcaaacttgtcctgctaacaatgaggataaatgcggcgattcagatgaatggaaaggggagtttttccctgacattcccaaaattaaatatgagggtccgtcaagtaagaatgtgctttcatttaaatggtataatgcagaggaggaaattcttgggaagaagatgaaggattggttaagatttagtgttgcattttggcatacattccgtggaacaggtgctgacccatttggtgcacctaccaaatactggctatgggaagatggtaccaattcattaaaca

SEQ ID NO: 2471 - DNA, 367 bp, Glycine max
  unsure at all n locations
  Clone ID: LIB3028-024-Q1-B1-E2
atcagttgaagaaaccttctcatcctattcgtggagtcccgactgctatcaattgcctagcaacactacttaaggaacctgtggttaggtcttcctttgttcgggctgatggggtcaagttacttgtacccttgatttcgccagcatccactcaacagtctattcagcttctttatgaaacatgtctctgcatatggctcttatcctattatgagccagcaattgaatatttggctacttctagaacccttccgcgacttattgatgttgtcaagagttctacaaaagataaggtggttagagtanttgtcttgactcttaagaacttgatgtcaaaagggacattgggtgctcagatggttgacct

SEQ ID NO: 2472 - DNA, 364 bp, Glycine max
  Clone ID: LIB3028-024-Q1-B1-E4
aacaacgttgatgatttaccagttcttggccacgactttgaccttcccgaatgggttgatgatcgcgttggtgttcgcaaactcctacgtatgactggacggaaacgcatggcgcatgtggttgttgcaaaggatggcagtggaaatttctcgaccatcaatgaagctttgaaatatgtgcccaagaaaaacctaaggccattcgttatctatgtcaaggaaggagtttacaacgagtacgtcgaggtttccaaaaatatgacccatgttgttatgattggtgatggtggtaagaagtcaaggatcactggtagcaaaaacttcatcgatggggttgggacctacagaaccgccagtgctgcca

SEQ ID NO: 2473 - DNA, 398 bp, Glycine max
  unsure at all n locations
  Clone ID: LIB3028-024-Q1-B1-E5
ctatactctatttttcgcgtcacataaacaaataaaataaactggggagaagcatgttgttgatgttgggactatgcttcctattgttctctgcatttccacttgcgttctctgagagatgccacccacaagacaagaaagcgttgctccaactccagaaggacctcggcaacccttatcacatcatatcctggaacgcaaaggaggattgctgcgagtggttctgctgcgttaagtgtgacgagaaaacaaaccgcgtcattagcgttgccttatcatccccttttccagacaccaatctctcggcccaaatacctccctctgtgggtgacctcccttacctcgagtcnctcgtcttccacaaattccccaaactcgtgggcccaatccagcccgca

SEQ ID NO: 2474 - DNA, 372 bp, Glycine max
  Clone ID: LIB3028-024-Q1-B1-E6
gtggtcaatgtctcagcatatcagtgttacagttgtggattttgcatctcactgaaacatgtatgcgagtggggaattccaatatctatggagtccttgagccacagtccattcagaggtttgggcaatcgcagtttgagtctgaaagttacataaagagttggatgcaaagttcacaacgcgatgtctatcttggagcctagctaaatggcggacactggcacatggtggtcatcttgccgaatgaacacctagttgtctggttttgttcattgcataacatgttatacaactacccttacggggattattaatagtgctttaaaaggtcttgatgatactccatatcctaaatcaaaggcttctgctacg

SEQ ID NO: 2475 - DNA, 244 bp, Glycine max
  Clone ID: LIB3028-024-Q1-B1-E7
ggttgatataactatactgtctgtaattggcacgagctcatttcctaatcctgcatcacactgcatgactgcatccccttcccatatagtgtaacgaagtctaagttaattcctgttaagtctggatagtgaatagctagctattggcgttgctgcaccctattgtgcttattgatgccaatagtgttagtgttcgaggcattagttggtgacactttaacaaagctaaatgacgttgtaccgt

SEQ ID NO: 2476 - DNA, 175 bp, Glycine max
  unsure at all n locations
  Clone ID: LIB3028-024-Q1-B1-F1
gctcatgttattgtgaatgactctggttatcatcagctcgtgagccattggttaaatactcatgcagtgatggaaccatttgccatagcaaccaataggcatctcagtgtgctccaccctatttataaacttctttatcctcactaccgcgacaccatanatatcaatggacttg

SEQ ID NO: 2477 - DNA, 398 bp, Glycine max
  Clone ID: LIB3028-024-Q1-B1-F10
gttcgggctcgctacctccgcgccatcgctgccaagatcaccgagaaaaagcctgaactagcaaaactcgaagctattgactgtggaaaaccgctcgatgaagccgcctgggacatcgacgatgttgctggttgctttgagttctatgctgaccttgctgaaaaattggacgcacagcaaaaggctcatgtgtctcttcccatggacacattcaagagttatgttcttaaggagccgattggagtcgttgctttaataactccttggaattatcctctgttgatggctacgtggaaggttgctcctgctctggcggccggctgtgctgcaatattgaagccctctgagttggcatctgtgacatgtttggagctcgctgaaatttgcaaagaagtcgg

SEQ ID NO: 2478 - DNA, 402 bp, Glycine max
  Clone ID: LIB3028-024-Q1-B1-F11
gatcaggcactcaaacaccgcgacatcggagagtagttaaacaagaaaaaacgagaacaagatggtgttctgaggaaactgaccgttaggcttgcgactcgaaacaagcgactctgctgaaactggaaccgttccaggatgcgatgctgccgcggcattacgagtgaggaagatagggttctctgaaactgatcacgtttcaccacccaccgttgatttcatgcttaacctccctcccgaggaaacttctgccgctgctacaactgatcgatcagatccacctcagaatccagctacttcgacggttgacaatactcttcctcttctcgattgctcaaagcctcatgccatcgcacttgtcatctgatagacatctgtaacgtccttccggatgaacatgtt

SEQ ID NO: 2479 - DNA, 357 bp, Glycine max
  Clone ID: LIB3028-024-Q1-B1-F2
atcagcctggcggaacatcttggtacccgaatatctgatcatattccagatacaccaaataggctttctgaggatatggtcaaatgtatatcagctatatattgcaaactcgcggatccatctatgacaaatccaggcctttcatctcccagttcatccttgtcttcaactagtgccttttctattggagatcaaggagacatgtggagtccaggtttgaggaataattcctcattcgatgtacggttagacaatcctttccatgtggaaggactcaaggagtttagtggaccatacagcaccatggttgaggtatcatggatttacagagaaaatcagaaattgggtgatactgag

SEQ ID NO: 2480 - DNA, 340 bp, Glycine max
  Clone ID: LIB3028-024-Q1-B1-F3
ggagattcatatatcatcaatgggacaaaatggtggacaagtggtgctatggatccaagatgtagaattctgatagtcatggggaaaactgacttcaatgcagtgaagcataaacagcaatctatgatcttagtggatgtccagactcctggcgttcacataaagagaccattgacagtgtttggctttgatgatgcaccgcatgggcatgcagaagtaacatttgaaaatgtttgtgtgcccgcaaaaaacatcatacttggcgaaggaagtggatttgagattgcccattgtatgcttgggcctggaaagctccaccattgttatagactgataagtg

SEQ ID NO: 2481 - DNA, 295 bp, Glycine max
  Clone ID: LIB3028-024-Q1-B1-F4
attcactgtctccctcttcctcctccgacggcgtcggcttcgagacggaggagccgcggacgccgttggccgtgcgccgcgcgctgcagctcctcaactccggcgatcccgacctgcgcctccaagctgctcgcgacatccggcgcctcacgaagacgtcacaacgttgtcggcgccagttatcccaggctgtcggtccactcgtttccatgctccgagtcgactcgcccgagtcacacgaacccgctctcctcgccttgctcaacctcgccgtcaaagacgaaaagaataaaat

SEQ ID NO: 2482 - DNA, 393 bp, Glycine max
  Clone ID: LIB3028-024-Q1-B1-F5
gatggatctaagtccctcgccgatacactggcgaaatggaaagaatataatgcttggctggagtctaacaatgaagctgagaagccggctaggaaggtccctgccaagggatcaaagaaagggtgtatgaaaggaaaaggagggcccgagaactcacgctgtaactacagaggagttaggcaaaggacttggggaaaatgggttgctgaaatccgagagccaaacagaggaagtaggctctggttgggtacttttcccactgccattagcgctgctctcgcttatgatgaagcagcaagggcaatgtatggttcctgtgcgcgcctcaactttcccaacgttcaagtttcaactttgtctgaggaaacgtcgagagattctccagctgctgct

SEQ ID NO: 2483 - DNA, 392 bp, Glycine max
  Clone ID: LIB3028-024-Q1-B1-F6
cactcgaagacgatggtgagttcgatccgcgatggaaccaagccagattctatcattgcggaccaccacaactgatcctgatcatgtgaaggtcattcagtgggacgacttccagcacgatcttgcaaggttggccagtctctcttccgcgctccacgaagccaacgagaagaagcggaatcttcagtacaagctcgagcccctaattcaggtcaatgctgaatcattgggtcggttgaatgaacttgaggagatgcgtcaaaaattggaatcaaagaaaatggtgatggagaatatgtctatacgttctaggctggctaaggaggaagctagcaagcaggaggagcagcttagtggtgcagtgcaatcacttttggtggcaaggggtgctc

SEQ ID NO: 2484 - DNA, 374 bp, Glycine max
  Clone ID: LIB3028-024-Q1-B1-F7
cgaggttctgtcatcttcgaacagcacagacccaaaggagtacatcgcaaccgtggtgagaacctcgatggacagcgtgatcaaagcgttcaacatgagcgacaggctgacggtggaacacggcaacagcagcgccggaatgaagatggctctggaggattgttaggacttgttgcaatccgccatccaacgactaaaaggctcaggcctgttgggcaaagagaacaacctacaagacgtgcaacaacgcaacggcgagctcaagaactggttgggaaccgttgttgcctaccaacaatcctgcctggaccgcttcgacaccgacggcgagaagaaggttcaggaacaactgcaatctgggaacctggacaacg

SEQ ID NO: 2485 - DNA, 385 bp, Glycine max
  unsure at all n locations
  Clone ID: LIB3028-024-Q1-B1-E1
ggctctctcacgcagtcgcagtgagtgaaaaggaaaaccctaattgcggtattctcagtgccttcgagagaaagaaaaaatggcagataatcttgttctccgtggcaccatgcgcgcccacaccgacgttgtgacggcgattgccactcccatcgacaactccgacatgatcgtcaccgcctcacgcgacaaatccatcatcctctggcatcttaccaaggaggacaagacttacggtgtctcccgccgccgcctcaccggccattctcattttgtccaggacgtcgtcctctcttctgacggccagtttgccctatccggctcctgggacngcgagctccgcctctgggaacttgctgctggcacctccgctcgccgcttttgt

SEQ ID NO: 2486 - DNA, 392 bp, Glycine max
  Clone ID: LIB3028-024-Q1-B1-C4
tagtaacccttcttttctctctctctctctcgtgttctgagctgctagaagcaatggagaggaaaagaagccatgcttctttcaccatgtttgcaatgcttgttggattgctctctcagagccttgtcattcctgtaatatccaccactgttgcagatcagaagaactactacaccccagatccacatgctggaagtccccccacaggctcacacaatagtaatcctccatctcatggccatgggagctctccaccctcacatcacaatagtccaagtactccatcaacaccctcaggtggaaactgtggatcatcacccccacaacatcatgatccaacaccctcaactccatcaacaccatcaaaccctccctcacgtggatactatgga

SEQ ID NO: 2487 - DNA, 396 bp, Glycine max
  Clone ID: LIB3028-024-Q1-B1-C5
gggggttccaagtttcagtgttcaattttaaatgcctgacagaaagatcactggtctagatacactaacaaacaataaatagtggaacataattttgtaaattgaaatccgtaacacagggctgtttcaactgccaaaagggaagctttatatgtacagataaaagtgcagccttattgagtttgatattttttcctaacaagtaaacaccttactctatttctctaaatttatttttacattaccaattaaattcattacttttagattcataaaaaaaattgtcatactttaaaaatttaaatgttgtttttgtacctgcattgcgggtgcctcttctagtctagttaaaaggaaaaagattgatctatttttcaaagtgatgcacaaaattta

SEQ ID NO: 2488 - DNA, 385 bp, Glycine max
  Clone ID: LIB3028-024-Q1-B1-C6
ctcgagtgcacagaagacggcgcaaaacggcgtggttccgagcaacgagcacactcaatacagcaacggttcctcttcttcttcttcgtcccagctggaggacgttctggaatctctgccatcgattgatgaaaggtgtttcgcgatgccacgcgtcaacacgctgcaacaacaacagcaccacgaggagaaggtcaatgttcagaacttgggtgcagggggtttaatggattggaccaacccttcggttctgaattcggtcgccgatttcgcttcggggaataatcaagtggtacaggaccagactcaggggatggtgaactacaactgcaatgacctttatgtccctacgttatgccacttggactcatcggttccgttaaag

SEQ ID NO: 2489 - DNA, 376 bp, Glycine max
  Clone ID: LIB3028-024-Q1-B1-C7
acagtacactagcctctgcgcacaaccctccactctccaaggagattacaatccattctttctttctcccttcttccattctctttctcattcagagactgcacacaaatttctattattccgagaacgacaaatggatccggcggcgataatgaacggcgctgccaacacgacgtcgtttcacctgtcagagatctggcagttcccgcctcccaactcgccagatgcactggggctcaggaggccccacttcgcccacggcagctttgcggactttgccccgggtccgacccgagacgctgacccggccagcattgcccacaagaagccccgccacgctgccggggaggatgaggaatccgctaagggcgcctcc

SEQ ID NO: 2490 - DNA, 395 bp, Glycine max
  Clone ID: LIB3028-024-Q1-B1-C8
cccagttcaaaggtaaggtaggttaacactcttcttcatcgtcgtcgcaatgggacgtgtgatccgtgcgcagcgtaagggagcaggctcggtcttcaagtcccacacgcaccaccgcaagggccctgcacgcttccggagcctggacttcggggagcgcaacggctacctcaagggcgtggtcaccgacgtcatccatgaccctggccgcggcgcgccgctcgccaaggtcgccttccgccaccctttcagatacaagaagcagaacgagctcttcattgccgccgagggcctctacaccggtcagttcatctactgcggcaagaaggccacccttgttgtcgggaacgttctacccctgaggtccatcccccaaggagccgtcatctgcaacg

SEQ ID NO: 2491 - DNA, 404 bp, Glycine max
  unsure at all n locations
  Clone ID: LIB3028-024-Q1-B1-D1
gaatttcttaacatgcgtcgtcaggctgttaaaattcaagctgcattccggtgctttcaagttcggaagcattatcgcaaaattctttggtctgttggtgtggttgagaaagcagtgctgcgttggcgtttgaagagaaggggcttccgtggtctccaggtcaaaactgtcgatgcgggaaccggagatcaggatcagcaaagtgatgtagaggaggaattcttccggactggtangaagcaagccgaagaacgtgttgagagatctgtagtacgtgtgcaggctatgttccgttcgaagaaagcacaagaagagtacaagaggatgaaattggcccttaatcaagcaaagctggagcgggaatacgaacaacttcttagtactgaagtggacatgcaactgta

SEQ ID NO: 2492 - DNA, 377 bp, Glycine max
  Clone ID: LIB3028-024-Q1-B1-D10
tccaaaaccccttcttcagggtcaccgctgtcagggttagggtttttccaccttctttatttaccaatcttcttctactaccacttttccctcgttccctctcttagtctcttcaattgtaagctttttgcgctagggtttcctctgcaatctcttgtacttgaagctcgttccttcttccggatctcgatctatggatacccgcaagaggggaagacccgaacccggcttcagcttaaatggcggattcaagaaatccaagcaagaaatggagtccttatcaactggtgtaggaagcaaatcgaagccatgtaccaagtttttcagcactgctggttgcccatttggtgagggctgccacttcttgcactatgttc

SEQ ID NO: 2493 - DNA, 217 bp, Glycine max
  Clone ID: LIB3028-024-Q1-B1-D11
ctcgagccgttcgttttcttttccctcctactcgttagcagttttcgtttcccaaacacgttccttcgccatgtccgatcttggctccgatcttcccgctgccgccgccgctctcagtgctgaggatcgtgctggtctcgtgaatgcactcaaggacaagctccagctcttggctgggcaacatgtggacatcctggagacactgccaaccaaagtc

SEQ ID NO: 2494 - DNA, 396 bp, Glycine max
  Clone ID: LIB3028-024-Q1-B1-D12
ctaagagcacttatggcacaggtgctttcatactactaaatactggtgaagggataattcaatcgaagcacggtcttttatccactatagctttcaggcttggcccaaaagctccaaccaattatgcattggaaggatcagttgctattgctggagctgcagtgcagtggcttagagacggtcttggcatcatttctagtgctgcagagatagaggagatggcattacaggttgaatccactggtggggtttactttgttcctgcttttaatggattgtttgccccatggtggcgtgaagatgctcgccgcgtttgtattgggataacaaggtttacaagcacaggtcacattggccgagctgtgcctgagaacatgtgtttccacgtgaaagatg

SEQ ID NO: 2495 - DNA, 294 bp, Glycine max
  Clone ID: LIB3028-024-Q1-B1-D2
gaagccagtgctaggatttgttagtgaagcaatggctcaaaccatgttgctcatgtctagtgtctctagcagttattccgtggatttgaagaaagaccttttcctccaattgcagagtcaaagtttaaggcctaagttctctcagctctcattcaacccacttccatcatcaacttcttccttttcttcaccccgtacattcacaactctggccctcttcaaatctaagaccaaagccgctcctgctaagactaaggttacaaagccaaagcaaaaggttgaaaatggtatctt

SEQ ID NO: 2496 - DNA, 375 bp, Glycine max
  Clone ID: LIB3028-024-Q1-B1-D3
tggatggtgatgaaccaccatcaagatatgtagttaatggaaatagctttggatctaaagattcttctgtacagtttccaatacccatcattgatgtgcgtctcctctcatcagaagatgagctagagaagcttagatctgctctaagttcagctggatgcttccaggcaattggtcatggaatgtcaagttcatatcttgacaatatacgagaaactgcaaaacaattttttgcactcccagaagaggaaaagcagaagtatgctcgagctgttaatgaatctgaaaggtatggaaatgacagagtagtttcagacaaacaggtccttgactggtcctatcgccctaaacttcgagttttttcagaaacaaaac

SEQ ID NO: 2497 - DNA, 398 bp, Glycine max
  Clone ID: LIB3028-024-Q1-B1-D4
gccgtcgtcgtcgatttcgcacgccccgaggacttttataaatcagttacctgactggagcatgcttctggccgccatcaccaccgtgttcctcgcggcggagaagcagtggatgatgctggattggaagccgcgccgccccgacatgctcattgacccctttgggattgggaagatcgtgcatgacgggctcgtgttcaggcagaacttccccataaggtcttacgaaattggcgcagacaaaactgcgtcaatagagaccttaatgaatcatttgcaggagactgctcttaatcatgttaagaccgctgggcttctacgtgatggatttggttccacgcctgaaatgtgtaagaagaacctgatatgggtggtgacaaagatccccgttgtgggtg

SEQ ID NO: 2498 - DNA, 389 bp, Glycine max
  Clone ID: LIB3028-024-Q1-B1-D5
gccaaaaccctagcagccggcgagaatggcagacgttgaggttgatgcggcggcagcggcaggggcagcgcagccgaagaagagaacgttcaagaaattcagcttcaggggcgtggatctggacgcgcttctggacatgtccaccgacgaactggtgaagatgttcagtgcgcgtgcacgtagaaggttccagagaggtctgacgaggaagcccatggccttgattaagaagctccgcaaagctaaaagggaagcaccagcaggtgagaagccagaaccagtgcgcacccatctccgcaacatgattattgtgcctgagatgattggtagcatcattggagtctacaacggcaagactttcaatcaggttgaaatcaaacccgagatga

SEQ ID NO: 2499 - DNA, 391 bp, Glycine max
  Clone ID: LIB3028-024-Q1-B1-D6
gcacaattctctcttatcatctttgttattacctctttccaaagtccaaattttctagttccaccaaaccaaaccaaaccaaaatggcagcagcctcagcctcatccatgatatcaacaccagccttatctccaaccatccaaaagcaccatcatttgaagccatccaacgtgtgcttccaaggtcttagacccctcgcaaggttcaccagagcctcatcaaccaaagtgagcaccaccaccaaaagggttattccaaagggtggtgttagagctgaactcaactcattctttgtgataagcctcagcactggcctctcgctcttcttgggaaggtttgtgttcttcaacttccagaaggagaacgtggcagagcaagtgcctgagcagaa

SEQ ID NO: 2500 - DNA, 134 bp, Glycine max
  Clone ID: LIB3028-024-Q1-B1-D7
gtttctcctgttttgttctcaatgtttgttgtctatgtgcaaaaattagtccaaataaaacataattttttaattgtctcttgttttgatcatcttgcttgggtgaaatgttctatgcaatggtggtttttccc

SEQ ID NO: 2501 - DNA, 331 bp, Glycine max
  Clone ID: LIB3028-024-Q1-B1-D8
caactgatccaccatgtctttacataactttaacttatatttaaaaggatacaaagtacagagggaaagatagaggaacaagggttttacggcagggtctagtgcttatacataccctgcattagccactacatttcacaaactgaggcacacacaaaacatgggttcttcttcttctatgtggacggtgtgtgtgattttggcatcactggcctctgcagcactctgtgccaacccacgcaggccagtggatgtacaatttggccgtaactacgtggccacatgggcctttgatcacatcaaatatttcaatggtggttccgacattcag

SEQ ID NO: 2502 - DNA, 376 bp, Glycine max
  Clone ID: LIB3028-024-Q1-B1-C3
ggcttctccctatccttcaggcaaataacgttcacttttacatgaacgggcatgattattgccttgagcacaatagtgacaccgagagcccattcagttcctggactaccggggcagggtcaaaaggctggagaggagacatttgaaggaatgaaccgaagaagggtaaatttcttctatgatggacaaggcttcatgtcagtgaaattgactcagacggatgccaccattgagttctatgatgtttttggcaacgttttgcacagattgacttcttcaaaacagctacattcttccatgtaaagtttagagctagatactagacattgagattaaatagaccaatccaaattggttgaataaatttcaaaccaat

SEQ ID NO: 2503 - DNA, 389 bp, Glycine max
  Clone ID: LIB3028-024-Q1-B1-A8
ctatcttttgttctgctcagctcgatctacctaccttggttcttctctgttctgttatttcagtgcagcagcagagaatgaccatcctcattgagcaacctgcccttgagttacaagttgaaggcaacaatgtgcatgctgaagaagccaatgagcttgtattggatggtggatttccattgccaaaggatggatatatggccccagaaatcaattcatttggccactccttcagagaatatgatgctgaaagtgagaggcaaaaaggtgtggcggaattttataggttgcaacacatcaaccagacatatgactttgtgaagagaatgcgggaggaatatgggaaattggacaaagctgaaatgggcatttgggaatgttgtgagctg

SEQ ID NO: 2504 - DNA, 373 bp, Glycine max
  Clone ID: LIB3028-024-Q1-B1-A9
cttcttcctcctgagaattgtatatcaaagctcattactcgatcagatgatactgaagcagtggtcaaagaaaggcttcgaatatacaatgaaatgactcagcctgtggaggaattttaccgttcaagaggaaaattattggagtttaacctgcctggaggaatcccggagtcttggcctaagttgctacatgctcttaatcttgatgattatgaggacaaacgatctgctgcagcataacgatataataatgtatcataacagtaagtatttcattctttgcgtgcatatattgcatgcttggcaattttgcaggacagagagccaaagaaagggaacttccctgctagtattaatttggaccaataatgat

SEQ ID NO: 2505 - DNA, 375 bp, Glycine max
  unsure at all n locations
  Clone ID: LIB3028-024-Q1-B1-B1
gctttcttcaagattagtggagttgttctgcttcagcttggtacgggtgctttacttcatgatgctggctggctgaagatatttttagtagcatacttttttggttcttttctcaaccacaatctctttttggctatccacgagttgagtcacaacctggccttctcaaccccagtctacaaccgttggttggggatttttgctaacctccctatangtgtgcccatgtctgttaccttccaaaagtatcacttggagcaccaccgcttccaaggtgtaaatggcattgatatggatgtccctagcctcactgaagtccgtcttgtgaaaaatattattgcaaaaaccatttgggtccttttacagctccttttt

SEQ ID NO: 2506 - DNA, 323 bp, Glycine max
  Clone ID: LIB3028-024-Q1-B1-B10
ctcgcgctgcatataacatgtccaagatcgatcaaataatgttacgctttcgccttatcgcccccaaacccctcccctccgccgccgccctttccgacgctttctcctcggaaaacaccggggtctccatgcggaaggataacactggcaacaagcggtgcagtcgagggatgcgcaggaggagaaactctgctcatccacgtcctcctccgcttcaggcggtgacactcccgctgctaccgaagactccacatctgatgaaaaccaccttcgtcctaatgacccgtcaagtaccggtgtgcctgagcttacgattaagcttc

SEQ ID NO: 2507 - DNA, 385 bp, Glycine max
  Clone ID: LIB3028-024-Q1-B1-B11
aaatgcatgaatgatggcctctgggaatacatctgtgggactgatattgtcagaggcgctttcttattcgttttatgatactgatgcattggtggtgaacgacgttggtggaatatctgtaattgatatattcaagcactatggagagcctttttttcgtaataaagagattgacgtgttgcaaaacgtgtcaataatgcatagacatcttatttctactggtggaggtgctgtcgtgaggcccatcaatttgaaatatatgcagcatgggattagtgtttggttggatgtacctgtagaagtcttgactcagagaataacagctgaaggaactgattctcgcccacttcgatattatgaacgaggagatgcatacaccaagact

SEQ ID NO: 2508 - DNA, 380 bp, Glycine max
  unsure at all n locations
  Clone ID: LIB3028-024-Q1-B1-B12
aaaggatctcaatcgaccttgggaagaccctatgccagagtcaggtgaaaggcatcttgcccaggagcttaggggtgttggtttatcagcctatgatatgccggaatggaagaaggatgcctatgggaaaaccattacctttgggcaaaggtcaaagctttctattcaggagcagaggcagagtttgccaatttacaagttaaaaaaggaattgattcaggctgtgcatgataatcaggtcttggtggttattggagaaactggttcaggtaagactactcaagtcacacagtatcttgctgaagcgggctacaccacaagaggcaaaattggatgtactcaaccccgtanggtggctgcaatgtcagttgcaaagagag

SEQ ID NO: 2509 - DNA, 395 bp, Glycine max
  Clone ID: LIB3028-024-Q1-B1-B2
tttacagagaggaatcactgccttaaggtggaggaaggtatccatgcgatcatcaactcatttgtcaccagcattttgcctgtacatacagaacttttttttatagaaggaaacactggcaaataaagaacagctttaaccttgaagcatcttgttggaaaatcaagggcctcacttgaatggatgttcatagagtagagacatgtaaggcaactcatctgcattttcataaatatcagttacttacattaaattgcaatactttctgaattttgatactaatttactactacaggacagaggtttctttaagaagctgtcattcaattgctgtgatgtacttgacgaatggtctgtactatatttggtttgcacgattttctcttgggtaattt

SEQ ID NO: 2510 - DNA, 393 bp, Glycine max
  Clone ID: LIB3028-024-Q1-B1-B3
ctcgttacaagataagcatggtgaagatgtatcaaatatcaatattcaagcagaaaaaagcctggttaaagattacttggttgaccagaatgcaagatctcagaaaagaattataccagttcccagcccagcatccattgaggatatgaggacactgatcacagaaaataataagtccacagaaaacccattgaaattgatccaaacagagagcaaaatcccacgtctggctgcatctccaaatagaactcctttcgcggacgtgaattcagtcaattgactattacatcagtttgggtatgagtatgaaactacacaaagctgctcatcacttgatgagcaaaccttacgttttccttcctagtgtaaaataactactatatgagttttcca

SEQ ID NO: 2511 - DNA, 388 bp, Glycine max
  Clone ID: LIB3028-024-Q1-B1-B4
gctcaacttcttaaatatggtcgtaaaggaaagcccaagttttgtccatttagactttcccatgatgaatcatccttaatctggattacaagtagtggagaaagaaatctgaagctatcttctgtctctagaattattcctggacaaagaactgctgttttccaacgttacttgcgtcctgagaaggactatttgtcgttttcacttatttacagtaacggaaagcgatcgcttgatttgatttgcagagataaagttgaggcagaagtgtggattgctggcctcaaagcactgatagcttctggtcaaggtggtcggtccaaaattgatggatggagtgatgggggtctcattcttaatgatagcagagacttaacatcaaataatc

SEQ ID NO: 2512 - DNA, 391 bp, Glycine max
  Clone ID: LIB3028-024-Q1-B1-B5
caaaaccctcttttttctctctcttgcaaaacctaattttcatttcttccctcaaatttcaaaatgcgtgagatccttcacatccagggtggccaatgcggcaaccagatcggcgccaagttctgggaggtggtttgcgcggagcacgggatcgaccctaccggaaggtacggtggggactcggagttgcagctcgagaggatcaatgtctactacaacgaggccagttgcggtcggttcgtgccgcgcgcggttctcatggacctcgaaccgggcaccatggacagcgtccggtccgggccgtacgggcagatcttcaggcccgacaactttgtgtttgggcagtccggggcaaggaacaactgggccaaggggcattacactgaaggtg

SEQ ID NO: 2513 - DNA, 243 bp, Glycine max
  Clone ID: LIB3028-024-Q1-B1-B7
aaagaaagcactttgactcacgctgagaacggtgtgattgctaatggcgttgctaatggccactgatgttgagcatgtacaatcagcagtcagcttcgcctatactgaggaatggtattgttatttgcgaagttctgttggtaaactgcttctggggtggcaagtgttatcgatgcacacaattcactgtattcttttaagatgtagctacttactctagtctaagtcttgtacacacaattt

SEQ ID NO: 2514 - DNA, 360 bp, Glycine max
  Clone ID: LIB3028-024-Q1-B1-B8
atttcagtgagtgatcggtgttcacttgatctcatcataatcgtcagcgtcaattgaagaagatgccgatcagaaacatcgccgtcggaaggcctgaagaggcgactcaccccgacacgttgaaggcggctttggctgagttcatctcaaccttcatcttcgtgttcgccggctcaggctccggcatcgcctacaacaagctcaccgacaacggcgctgccacccctgccggcctcatctccgcctccatcgcccatgcattcgccctcttcgtcgccgtctccgtcggcgccaacatctccggcggccacgtcaaccccgccgtcaccttcggcgccttcgtcggcggcaacatcacct

SEQ ID NO: 2515 - DNA, 406 bp, Glycine max
  Clone ID: LIB3028-024-Q1-B1-B9
gccgcaaggggattacatagagcgtcacagaagagactatggctaccgtctcgatcacttcgagcggaagcgcaagaaagaggcgcgtcaagttcacaaacgctctgcaattgcccagaaggctctgggtattaagggcaaaatgattgccaagaaaaattatgctgaaaaggcacagatgaagaagactttggctatgcatgaagaatcaacttctaggcgcaagactgatgataatgttcaggatggagctgttcctgcttatctccttgatcgtgataacacgaccagagcaaaggttcttagcaacaccattaagcaaaagaggaaggagaaggcgggaaaatgggatgttcctctacctaaggtacgtccggtggctgaagatgaaatgttcaaaatgggc

SEQ ID NO: 2516 - DNA, 356 bp, Glycine max
  Clone ID: LIB3028-024-Q1-B1-C1
attgaacattggctttcaattgtcaatcacagttggtatcctcgtggccaatgtgttgaactacttctttgctaaaatccatggtggctggggatggagattgagtttgggaggtgctatggtccctgcccttataatcacaataggatcactagtccttccggacactcccaattccatgattgaaaggggtgatcgtgaaaaggccaaggctcagcttcggagagttcgcggcatcgacgatgtggaagaagagttcaatgaccttgttgcagctagtgaatcctccataaaagtggagcacccgtggaggaacttgttgcaaagaaagtacagaccccacctcaccatggctg

SEQ ID NO: 2517 - DNA, 400 bp, Glycine max
  Clone ID: LIB3028-024-Q1-B1-C10
ctcgaaacccggccacttcgccatgtccgagcaaccatgcttgccatcgggaaggccacctccgtcgacatctgccgcttcttctccaaacctggcccctacgtgtcctgcgacacgatggagtttctattagcgcgctacgacggcgagctagacgtggatgcggtggactccgaggggaggacgacgatccacgtggtggtgagggaggggcacacgagggttatccggttctgcgtcacgatggggggaaaccctaatcgcgtggattcgaatgggtggaccccactctactacgcagcgtggaatgggcacgtgaaggctgcggagtgtttgttggaatgctccaacgtgaagtgcgtgagggacagggaatggataagaacattttctgttgtcc

SEQ ID NO: 2518 - DNA, 381 bp, Glycine max
  Clone ID: LIB3028-024-Q1-B1-A7
ggaggttttgatgatgacatggactccttagttcatgatgatgagaataatcatgcagcgcctgtaagcaagaatgatggtcaagctggttctggaaatttaaaaaaccaaagcagctctcaccgtaaacggaaacataatttgaaggatattatgcatgaaacaaagaaggaaagaagcttgtcagaactaatgggtgggactccagactctcctgatggtgattattggtctgaggagaaggtaattgataatctggtttcacctggccgttccaagaaaaggaggactgttgatcactatgctgatgactttgggaagccagatggaagaaaaacaatttctgttgcaaaagtttctaattacacaaagccgtcattt

SEQ ID NO: 2519 - DNA, 386 bp, Glycine max
  Clone ID: LIB3028-023-Q1-B1-H10
tctcgatacaaaaatacatagaaatggcctcttctcttgcatcctcatcaactgttctctggatcctttttctaaccattgcaactcttcatttgagttcagccaggaagttgtccgggtcagacccgcagttgcagtttcaataccacagaggccctctcctcacaggcaaaatctcagtaaacctcatttggtacggtaaattcaagccttctcaaaaagccatcgttgctgatttcatcacctcgctctcctctcccaaagccgtcaccgcccaaccatccgttgccacgtggtggaaagccagcgataaatactacaacaactcgtcacccaaactcgctctttccctcggcaccatccaaatcctggacgagaattactcc

SEQ ID NO: 2520 - DNA, 398 bp, Glycine max
  unsure at all n locations
  Clone ID: LIB3028-023-Q1-B1-H12
ctttcttcctcttcctcagtagtgcgattttcgattctcttctctgcaactatgcctaaccctaaggtcttcttcgacatgaccatcggcggtcaacctgccggccgcatcgtgatggagctctacgccgacgtgactccgagcaccgccgagaacttccgcgcgctctgcaccggcgagaagggcgccgggcggagcggcaagcccctccactacaaaggctcgtccttccaccgcgtgatcccgaacttcatgtgccagggcggcgacttcaccgccggaaacggcaccggaggcgagtcgatctacggcgccaagttcgccgacgagaacttcgtgaagaagcacactggtcncggcatcctctccatggcgaacgccggtcccggaaccaacgg

SEQ ID NO: 2521 - DNA, 125 bp, Glycine max
  Clone ID: LIB3028-023-Q1-B1-H2
tctagccgctcttcctcagtcacagtcgtccaaacaacacacaaccttggaaccacagaacctcatgcaagcctacaattgagcagtcctcctcatgggaattacaaatgtcacccacttatggt

SEQ ID NO: 2522 - DNA, 360 bp, Glycine max
  unsure at all n locations
  Clone ID: LIB3028-023-Q1-B1-H3
caaaaacacaaacaatatgaagttcactataatcacaatatttttttctttatttcaagtcgactttggttttgcacaacaaggggatcttgacatatcaagatttggaggaaaaccgaattcagatataagccaggctttcttaagtgcctggactcaagcatgtgcatcaacaactgctgtcaaaattgtgattccagctggcacatatcaaatgggtgcagttgatgtaaaaggtccttgcaaggctcctattgaggttcaagttgatggaacaattcaagcacctacanacgtagttaaccttaagggggcagaccaatggttaaaggttcaacatgttaactctttcaccctgtc

SEQ ID NO: 2523 - DNA, 363 bp, Glycine max
  Clone ID: LIB3028-023-Q1-B1-H5
ggaggaggaaaacacagatgcttcagctgctgccggtctcctcaagaaactaactgttggcgaggataactcggaggacatagagccgccggaaaaggccacggataccaatgtgaaacgtgagcaggatgtatagacaagaagccaagcctgaggatcataagatgaatcagctccaccagcatagaatatgatgtggctggtgaatgatttattctctcataggttgctggcatgtttataaaagattggtaacctagattggtacctcaggatatagaatggctggcatgaagtgatatgaagatgtgatggtctgtgtatctgttgagtcctgtttttgtactggtttttgcaagtatg

SEQ ID NO: 2524 - DNA, 365 bp, Glycine max
  Clone ID: LIB3028-023-Q1-B1-H6
gaaaaagagagaggtagagaaaagcgaagagtctctctcttcctatctctctctttcaatgtcagggcacaaatcttccacctctacttcttcttcttcttccttctaacctatatcagaaggaaacgcgaaaaaagaaaaaaaaaaaagaggcagaaggttctagaagccgccaatttttatttcttttaatttgtctgagtcagagacgttcgtgattgtaaccatggattcttcgtgtgtcccaaacggcgacgtttctgggttcaaagataaggagtcaatggttgaccctttcttggtcgaggctcttgagaaccctcggcaccgtgtcaccattttgcggatggagctggatatccaga

SEQ ID NO: 2525 - DNA, 279 bp, Glycine max
  Clone ID: LIB3028-023-Q1-B1-H7
aaaaaaaaaaacccttagccaacacaaccatcatggccacctctgctattcagcaatcagcattcactggtcaaactgctctgaagcagctcaatgagttcgtccgcaagaccggtggcgccggcaaaggtcgcactaacatgcgccgcaccgtcaagagtgctcctcagagcatttggtatggccctgaccgtcccaagtacttgggtccattctcggagcagattccatcatacctgaccggagaattcactgctgaccaaggatgggacactgctg

SEQ ID NO: 2526 - DNA, 365 bp, Glycine max
  Clone ID: LIB3028-023-Q1-B1-H8
gcacattgcacagaaacaggtaaaaagactatcattgaagtggtgttgtcttcaaatattgagcttctcatgcttcctagttacagtttccgcggcagttggttccattcgtggaattagcaagaatataaaaaaatacaaacttttcatgtataaacaatagggcatttggttgcacattcttgtgtctcacatttgagatatgtgaatatagctatagctaggcagaaaaataagtgagacaagttaatttcaacaaggcagtgagaattatctgaaagtaaaattatttgtcagctacattattccaacttacagtgtgagcaaacattatttcaactagtcaaaacatttctgcctcagtt

SEQ ID NO: 2527 - DNA, 307 bp, Glycine max
  Clone ID: LIB3028-023-Q1-B1-H9
ttccaaccccacattgtacctacctcagcaatgtcacctccaccattttccccccctctctctatttcccttctctttgtcttcctgttagcaccattactcttagctcaatctccaccttcaccgtctccttcttcttcttcttcgtcttctgtagcctgcacttgtacactatagccatcaactctgccgttccattctctcagtcattcgttcatcaccttcagacccttatggctatggcaggttctccatatctcaaagcctcagtcaggcacgagtgttaaccaaagtctttgaggacttt

SEQ ID NO: 2528 - DNA, 338 bp, Glycine max
  Clone ID: LIB3028-024-Q1-B1-A1
aattagttcattctctttgcgcagttccctacctctcctttcaagatgcagatcttcgtcaagaccctcaccggaaagaccatcacccttgaggtggaaagctctgacaccatcgacaacgtcaaggccaggatccaggacaaggaaggaattcccccggatcagcaacgtctcatcttcgccggaaagcagctcgaagacggccgtaccctcgccgactacaacatccagaaggagtcaacccttcaccttgtccttcgtctccgtggtggcatgcagatcttcgtcaagactctcactggaaaaaccataaccctagaagtcgaaagctctgacac

SEQ ID NO: 2529 - DNA, 401 bp, Glycine max
  Clone ID: LIB3028-024-Q1-B1-A10
cttccatcagattcaccctttcgtttaacgcaaactcataacttgaaggttaatggctgctccaccggcaagggctcgtgccgattacgattatctcataaagcttctcttgatcggtgacagcggtgttgggaaaagttgcctccttctgcgtttctccgatggttctttcaccactagtttcatcacaactataggcattgattttaagataagaaccattgatcttgatggcaaacggatcaagctccaaatttgggatactgcatggcaagagcggtttcggacaattacaactgcttactaccgtggtgctatgggcatattgctagtctatgatgttacagatgaagcatcatttaacaatatcaggaattggattcgcaatattgagcaacatg

SEQ ID NO: 2530 - DNA, 400 bp, Glycine max
  Clone ID: LIB3028-024-Q1-B1-A11
ttcacattttagaagaataccccctcttttgctgcatcagaggagttgtaaattaagagcatggctgcacaagctcttgtatcatcatcttctcttaacttctcagcggaggctgcaagacaaagtcttggaccaagatcactccaatctccatttggcttctccataaaagcctcctttcttgttaaggcagctgctaacccccctgtcaagcaaggatcagacagacctttgtggtttgcatcaaagcaaagtctttcttacttggatggcagccttccgggtgactatggatttgaccctctgggactttcagaccctgaatgaacatgatggttcattgagccgatatggcataccatatggtgagataagcaatggtcgttatgcaatgttgggt

SEQ ID NO: 2531 - DNA, 387 bp, Glycine max
  Clone ID: LIB3028-024-Q1-B1-A12
gccttttaagcagcaagaaaggaggacacagaaagcaacaatcttcatcaatatactcatcttgttcacctcagctcactccttccttcatcttcttgcagctcttctaccagaggtcccaaaacatcagcatcattagtagtggtacacacacatgggccatgctcccaactaaatgatcatgatggcagagctaagtctacaacatgacacagtgagattctgaaccaagacatagaaagggtgaagtacattaactcaaggctctctaagaacttgggccaagatagtagtgttgaggaattggactcagctaccctaccagccaaatctggtagccttattgggtctggaaattactttgtggttgttggtcctgggacaccc

SEQ ID NO: 2532 - DNA, 281 bp, Glycine max
  Clone ID: LIB3028-024-Q1-B1-A3
ggttgcagcaacaatggcagccatggctgcgcttcagagctcaatggtcggtctctccctctcctccaactctttcttaggccaacgcctttctcccatcaccctcccctctcttcttccgggtaagtcaacagagaagcaatgtcctattgtaatgaggcttaaacgatgggaacggaaggagtgtaaaccaaacagccttcctatcttgcacaaaatgcatgttaaacttggagatacggtgcaagtcataactgggacttaaaagggttaaatttggg

SEQ ID NO: 2533 - DNA, 318 bp, Glycine max
  Clone ID: LIB3028-024-Q1-B1-A4
ataaaactactcctgtgtagatgttctacttcctcatcaacgttaatttttctctcattctctggattcgtttgaagaattatattttatttttttaaaaagactgaattggtacgaagatattttgctacaactaccttttagtgtgctatagcttagtaaatataccttataaaacccattattccatcaactggcattttcaaaagctgataaaaattttggttaacctagtttgaaaaaaagggtgataaattaaaattggttaaaacaagtttagaaaactataaggtttacaaacctaaatttaaaaatttg

SEQ ID NO: 2534 - DNA, 388 bp, Glycine max
  Clone ID: LIB3028-023-Q1-B1-G9
aatttttcttgcgtacacccgcattgttttttccccacaagcaagtttgcaaaggcaataatctctattaccctcattatccaaaatcagaaaaaatggccactagaggcctcaaaatttgcttggccgtgtcctctcttttcttgatcattcttgccatcgttattgtgaccttaattttgaccatctttaaacccaagaacccagatatatttctccacccagttgacctagaaaactttcaattgctttcacctaatacaactagtgcacccttaggcatagtgatcacaattgtgaaccctaattatggaaacttcaagtacgtgaattccagtggctatcttaaatatcgtgacaccattatagccgaagttccattggggat

SEQ ID NO: 2535 - DNA, 383 bp, Glycine max
  unsure at all n locations
  Clone ID: LIB3028-024-Q1-B1-A6
aagctgttcaagctacactctcttctctgccagacgaggttgtagatactgtgggggtgacaactttgccatctgaagattctgtttcagaaaggaagaggaagttggaatatcttgaaatgcaagaggagctgatcaaggaggaggaaaagaaagaggaggcagagcaggccaaaatggtagaatctgttggtagtgaaggggatttgggtattatgaaagagagggcttctgtggcgccgtttgaggtgtgcttcagtanggagaacgtgctcgccacgcggttgggggcggcggtgccaactattgagcttgtgctgcagaaccagaagacggtttggaggatttttggagcgaactcgatggttagtgtgagcgatgat

SEQ ID NO: 2536 - DNA, 391 bp, Glycine max
  Clone ID: LIB3028-023-Q1-B1-F12
gttggtgcaaagcatccttcgtttcaatttctctctctcagcgctttctgcaatcgaacctttcatctccacagggatccacaggccgaaggagaaatggggctgacattcacaaagcttttcagtcggcttttcgcgaagaatgaaatgcgaattctgatggttggtcttgatgctgctggtaagaccactatcctgtacaagctcaagctcggagagatcgttaccacaattcctaccatcgggttcaatgttgagactgtggcatacaagaacattatcttcactgtttgggatgttggtggccaggacaagattcgtcccttgtggaggcactacttccagaacacccagtgtcctatttctgttgtagacagcaatgatagggaca

SEQ ID NO: 2537 - DNA, 361 bp, Glycine max
  Clone ID: LIB3028-023-Q1-B1-F2
gcagcaatggtgaacgttccgaagacaaagaagacctactgcaagagcaaggagtgcacgaagcacacgctccacaaggtcacccaatacaagaagggcaaggacagcatcgccgctcagggaaaacgccgttatgaccgcaaacagtccggttacggtggccagactaagcctgttttccacaaaaaggccaaaaccaccaagaaaattgtgttgaggctccagtgtcatggatgcaagcatgtctcgcagcacactatcaataggtgcaaacattttcagatccgtggtgacaacaatggaaaatgaaactctctgttctagatggaatattagaatttgccatttcacacactctctc

SEQ ID NO: 2538 - DNA, 223 bp, Glycine max
  unsure at all n locations
  Clone ID: LIB3028-023-Q1-B1-F3
actactaattcactcactgaatatatagtactttaactaaggtcatgttttgatggtagcagaaacttccaaagcagttacttactgttttgcatctttctggtatctttagtcttttgtggtattattaaggccattaagcgtgtagtgttactgttgcatcatctgtgcaaggtantgatgtgaactttttgaaagatggattatatatttcacttctcct

SEQ ID NO: 2539 - DNA, 369 bp, Glycine max
  unsure at all n locations
  Clone ID: LIB3028-023-Q1-B1-F7
cttgtgcaatttggccactatgaacacagggcttgctgcaggtgcagccttgcttgcactcttggctatcaccttctccttgttgagccctcaaaccctgttttctccgcctgagattccgggctcgaaggaccaccttcacgctgctcggttactccatgtcaccggagccgtcgggccggagagtcttgtcttcgacgctgacggcggagggccctacaccggcgtcgccgatggccggattctcaagtgggaaggggaagagcgaggttggactgaatttgctgtcaccagttccaataggtcggactgtgtacgcccatttgcaccagagttggagcacatttgtgggaggccattangactaag

SEQ ID NO: 2540 - DNA, 364 bp, Glycine max
  Clone ID: LIB3028-023-Q1-B1-F8
taattttgcacttatattcctgcctttacttggattctgtcgcaaaaggcaaatacatagcatcttgagcagttgagcaattgagctatcatacaaaagcaagcgaaggtacgtaagattttatcatcctaatggattatgtgttgtgtgcaaaaatattctgtaaaactaaattttcaatctaaattttaatgtgcacacatactttttgaaagtaatcaaatgttatcacaaaatcaagtagacttataaattgagtttgaaagttgaaacagctttgagcccatcaacctaaataattcaacccacttatctaatggatcaataacgggttgggttggattaatcaactagattgagtttt

SEQ ID NO: 2541 - DNA, 379 bp, Glycine max
  Clone ID: LIB3028-023-Q1-B1-F9
agaccagcgagcaccaccaccgcgaccggcgagcccagccaccgtgttcgacttcgaattgagtccgagaaggctgttagataggcttttatattgaaaactgagacttgaagggaagcggttataattggtctggctttggacgtttaaacaattccgatcaagatccaattttgccttcccattttctcgtcgtttttttgtaacggtctttccatggcatatcccttctctgatttcaagtactcagatggcctcagtgtagtgggtatctccttctgcacagctattgtctgtgaggctatctcatgggttcttatctatcggaccaattcttacaaaaaccttaagtcctccattgacaaagcctccaagaaac

SEQ ID NO: 2542 - DNA, 365 bp, Glycine max
  Clone ID: LIB3028-023-Q1-B1-G1
aaaacactcataacacaaagcacaaagcaaagctcatccttgagttaaaaaatggcagcagcttcttccatggctctctcatccccatccttggctggcaaggccgtgaagctgggcccatcagccccagaagtgggaagggtgagcatgaggaagaccgtcaccaagcaggtctcctcaggaagcccatggtacggcccagaccgagtcaagtacttgggcccattctctggcgagcccccgtcctacctaaccggtgagttcccaggcgactacggctgggacactgctgggctttccgcagacccagaaaccttcgccaagaaccgtgaactcgaagtgatccactccaggtgggccatgct

SEQ ID NO: 2543 - DNA, 393 bp, Glycine max
  Clone ID: LIB3028-023-Q1-B1-G10
gcccgaggacgagaggaagtcgccggacatagaaattccccttgacgcgccgacgatgacgcacgacttcgcgatcacggagaatttcgtggtgatcccggaccagcaggtggtgttcaagctcggcgaaatgatcaaaggaggatcgccggtgatctacgacggcgagaagaaatcgcggttcggaatactgccaaagtacgcttccgacgcgtccagcatcgtgtgggtggactcgccagacacgttcttcttccacttctggaacgcgtgggaggaacgcgacaaagacgaagtggtggtaataggttcgtgcatgacaccaccagattcaatattcaatgacagagaagagagactgaagagcgttttaacagaagtaaggctgaacat

SEQ ID NO: 2544 - DNA, 387 bp, Glycine max
  Clone ID: LIB3028-023-Q1-B1-G11
agaacttatcaaaattttcttcaacatcaccattacaaaaattggtgataaactcaaagaaactaatattttgcatgaggttgaggaggaacccagagccaagatggcacttgaaacatgcaagcaactcatggatctttctattggggaattaacaaggtcacttgatggaataggtgagtttaacctcataaatgttgacaaaatcctcatgaatttaaaagtttggcttagtggcgcggttacataccaagatacttgcttggatgggtttgagaacaccactagtgatgctggcaaaaagatgaaggatttgttgacgataggcatgcatatgagcagcaacgcccttgccattgtaacagatttagctgacactgttaatga

SEQ ID NO: 2545 - DNA, 392 bp, Glycine max
  Clone ID: LIB3028-023-Q1-B1-G12
atcaccttgcgaactccgccttctacaactctctcttctgctgcatcttccattcacagaacaagatccaccaccttctccttctcgctttgttccccaccaactcttcgcttcaattcccacagctccctctctcttactcgcgcttccgcttcctctatcactaccgcttcgaccactgagctggacgctgtgtcctccttcagcgagatcgttcccgacaccgtcgttttcgatgatttcgaaaagtttcctccaactgctgctactgtcagttcctcgctcctcttgggaatatgtggccttccagacaccatttttaggaatgccgtggaaatggctttagctgattctgagtgttatggacttgaaaatcctaacgcgcgattgtc

SEQ ID NO: 2546 - DNA, 370 bp, Glycine max
  Clone ID: LIB3028-023-Q1-B1-G3
gaaggaatttgtcaaagagtagccatcgccccaacgatcccgtttcccttcacttctctacgcaaagccccttgttttgcatagagctacttaaaatgtcggagggaaatgcggagagaggaaagagaattgccattattggtgtctcaaccttattgttggtggcgatggttgtggctgtcacagttggtgtcaatgttagtgagaatggttccaacaatgaggacacaaaaattgcttcttctgtaaaagccgtccaaaccctttgccatcccacaaattattagaaagaatgtgaggaaagcctcatagccaaggctgggaataccactggatcaaaagaacttatcaaaattgtcttcaacatcaa

SEQ ID NO: 2547 - DNA, 362 bp, Glycine max
  Clone ID: LIB3028-023-Q1-B1-G4
atctattcaagtgagtcacttgagcatgaccttcctggtcacctgctccgatatcctattggggtttccaacgaaggagttgtcactgagcttccaggatttgaattcttccctgacaccaaggctcgtgttcttggcgacaaagttgattaccttccaccgatccttactacttaagtttcattttataagcttgttaataaaatatagtacttatgttgttagagtgagcaacaattgtaatggttctgtagagatggtttcattctgaagattgccttccagattttaacaatctgatgatgagaaggcaatcagcttgtatgactctatctgcattatgatacatgtttatcgggttt

SEQ ID NO: 2548 - DNA, 359 bp, Glycine max
  Clone ID: LIB3028-023-Q1-B1-G5
ccaagatattggatctcagagggggaagctatcagttgaggatttcctctatttgattcgcaaggtactcttttgttaaaaaattgcaaataattattatgaaggttaaaagttattggggaaccttgaaatattttagcaaatttttatcttagtctccctaaatccttttgttaattgtttaaatctattagaagggtaatgcaaaactgaacaaatgaattaaacaggaatccagcagaaactaaaggaaaaatcctctataacacccttctatatattgataacaccctatttaattgacccatctttttataagtttttgtttcctaatttattcggaatcaaaactttacaac

SEQ ID NO: 2549 - DNA, 368 bp, Glycine max
  Clone ID: LIB3028-023-Q1-B1-G6
ctcgagccgaatcggctcgagcgaccatctattccctatatccgcttccaatttgttaattttcattctgatacgattctgggtatcgccaaatttctcgattttccgcatattttggatttggaggggtttgaagaaataaccgaactttggaaggaaaaacacaaccccatatgatgcaacgcttggttgatcatgttcttgctgttactaaagagtcattgaaggcaattacttatgagtccttaaataatattgtgaggctaatcaacggagtatcagcccttttgttggcactactacctgggaaagctaatatactagaaggtatccatggttgggaactcaagccaactttcaggggaccg

SEQ ID NO: 2550 - DNA, 331 bp, Glycine max
  Clone ID: LIB3028-023-Q1-B1-G7
gtgagtgggatcaagaagaagcaagcccctggagctgctccttcaaaacccaatgttgagaccgaggcagatgctgacagtgagcaaatccttcctgactgagaatctcggttcaacagacattgttttttggtagagttgatgatgtgcaaggttctttatcttccttaaatcttatcactattcttaggagttttgagtcctttattgggatgctgttttttgtgccttctctactgtttgcaagagcagattgtgtactttgttgatgttaaagacttaattaactggcgtatgctttaaaacaaagtacactccctcaatgcctcag

SEQ ID NO: 2551 - DNA, 283 bp, Glycine max
  Clone ID: LIB3028-023-Q1-B1-G8
attctctctatgtatttccctaagtctcccttcactattcatttcttcctcaagattctcaccggtacataccactcaaccttgatgtggtcatctctgacagcatcctcaacgtaaaagccaatagtcatgtcaaagaatgaatcaccccggacgatcattgtctcattttcgccttaacgcaacttgttagacggtcgttcttcttgctagttacaagattcataatgtgagtactcttcagctcgtcctccgtctccgtggagtgattcacatcttcgtt

SEQ ID NO: 2552 - DNA, 394 bp, Glycine max
  Clone ID: LIB3028-023-Q1-B1-F10
caccctgaagatgatgaaggagaaatggttgttccccaggctcgttatccttgggaagggagtgatcgtaattatgaatatgaggagctgcttggcagggtgtttaacattctacgtgaaaataatcctgaacttgctggagatcggcgaaggacagttatgaggcctcctcaagttcttcgtgagggcacaaagaaaactgtgtttgtcaattttatggatctatgcaaaacgatgcatcggcagccagaccatgtcatggccttcttgcttgctgaattgggtacaagtggctcccttgatggacagcagagattggttgtaaagggaaggtttgcaccaaagaactttgaaggaattctgcgacgatatgtcaatgaatatgttatttgcc

SEQ ID NO: 2553 - DNA, 341 bp, Glycine max
  Clone ID: LIB3028-023-Q1-B1-D3
cgagaggtacttgctcacagatatatttttttttttgtctccatcattttctcgagagctttcagtttctgtggttcatctttcttcttcttaatctttccccccctctctgtaacatcccgcttctctgaatccctttctgctaatcatctgtctttcaagctaagattttctggtttgtcttttaattcaccaaaaagcaaacttataaggatttttcgaaagccaggtgttttcagaaacgagattcatgttttattgtcgaatttcgctagtcatatttattttttatcagttttttttcctttgcaaccaacccataagggtaattttggttcctc

SEQ ID NO: 2554 - DNA, 368 bp, Glycine max
  Clone ID: LIB3028-023-Q1-B1-D4
aaacgagtagcaggatctgttgtttttgttctttttcgttttctacgaggaaggaaaataacaataacagaggaagaaagaaaattacacagtttcaatttcagtatcagctacactttttagaaatggctactctatcaagcttcatcgctacgccgaagaatcccaatacccactttctctcaggttcctcattgacgatggacaaatgcttcttgaaaatcagctccagtgaacactttccaggttcctctttaaagactaaagcaacacgtaaccagccacttgttattcgagcacgtggtgatggtggaagaccaagtaatgggaaatgggtttgttggtggggtttgtattgggaagacaaa

SEQ ID NO: 2555 - DNA, 368 bp, Glycine max
  Clone ID: LIB3028-023-Q1-B1-D5
gacgtccatggccactttcttcgcccaaacctccttcccctcccactctctctccaaaaccttcgatacccatttcgcccctgccccgaaagtcaacgtctttgtgaacttcagggcgaggaggcacgttggggtgcgagtttcgaacgcgctgatcgaaccagatggagggaagctcgtggagcttgtggtgacggattttgagagggatttgaagaagggtgaggctctttcgttgccgaggatcaagctctcaaggattgaccttgagtgggtccatgtcctcagcgaaggatgggccacacccctgaaaggcttcatgagagaagccgagttcctccaaacgcttcatttcaactcgctccgac

SEQ ID NO: 2556 - DNA, 360 bp, Glycine max
  Clone ID: LIB3028-023-Q1-B1-D6
gcattgcagaagcgtctccattttctttcgcgatggccgcgcgagccctgttgaccagaaaaaccctagccaccgttctccgcaacgacgcgaagcccataatcggagctggcatagctgcagctactcattctcgtgggttgcacgtgtacacgctccccgatctggattacgactatggcgctctggagccagccatcagcggcgaaatcatgcagctgcaccaccagaagcaccaccagacttacatcaccaacttcaacaaggccctcgagcagctccaagactccgtcgccaagaaagattcctccgccgtcgttaagctccagggcgccatcaagttcaacggcggaagtcacg

SEQ ID NO: 2557 - DNA, 366 bp, Glycine max
  Clone ID: LIB3028-023-Q1-B1-D7
gtttactgctaactctgatcggaagaaactcgcgccaaatgcttttgttcttgttcctactcgcgaactaagtcaacaggtatatgcggaagtgaagtctctggttgaattatgcagagttcagctgaaagttgtgcagttgaatagtaacatgcttgctaatgacttgcgggcagcattggctggacctcctgatattttgatctccactcctgcttgtgttgcgaagtgtttgtcctgtggcgtacttcaggcggcatccattaatgcatcgcttgaaactcttgttcttgatgaggcagatcttctattatcatatgggtatgaaaatgatattaaagctttaacacctcacgtacccagaag

SEQ ID NO: 2558 - DNA, 382 bp, Glycine max
  Clone ID: LIB3028-023-Q1-B1-D9
attccgaattcagagatagcacgcaccaggagaagccatggctactcaatccccttcacctcagaacctaggtggtgaaattgagcaaacagaaaatgtagatcagcataataggggagaagagcttggtaaacagagttcagacacatcggtgtttgtgaactcagagccattgcgtgaggaacaaattcagaatgctgtgaaatttctgtcgcacccgaaagttagaggttctcctgtcatccacagacgatcgtttctggagaagaagggccttacgaatgatgagattgatgaagcctttcggcgtgtgcctgattcacctccaagtgtgcagacagctggcataaatcaagatggacaattgaagccatcatcaaac

SEQ ID NO: 2559 - DNA, 343 bp, Glycine max
  Clone ID: LIB3028-023-Q1-B1-E1
gaagattccacaacagtgggagggagatccaaaaagagagagtggaaaagatggcgcggttgatcacagtggtgtggtgcgcggtggcggtgctattatgcgccgcggccggtgcgtcgtgggtggaggaggcggcgaacccgatacgaatggtgtctggcgtggaggcggaggtggttcgggtgatcggggattgccggcgtgcgttgaagtttgctaggttcgtgagcaggttcgggaagagttaccaaagcgaggaagagatgaaggagaggtacgagatattctcgcagaatctcaggttcatccgctcccacaacaagaagcgtttgccctatactct

SEQ ID NO: 2560 - DNA, 285 bp, Glycine max
  Clone ID: LIB3028-023-Q1-B1-E11
taaaaaatgaaattaacatttgcttgtttagggcttgaataacacataaattagagacaattaactattagaactgtcacgggaagccagtgcctatgtattttgattctcacaccactcggcatcaattattcgaatgtaaagtaggttgtctgttttatgtacccaaaagaaaaagtagcctcgaggtttagctgatggtgcatcacaatcttttttcctggtttaatatagtttcagctaatttatggcaaaaagaacaaatcacactacaagatttttttt

SEQ ID NO: 2561 - DNA, 240 bp, Glycine max
  Clone ID: LIB3028-023-Q1-B1-E12
ggaaggggagtagtagtaagaaaatagtaaaaaaatattatattgagaagtttggattcatatattgaggtgcacaaatatacagcaaaccaaagtatatagttttcttttttctttcttttttggaaaattaatggttgaacaggcaaggagaatttttgtcgttactttctgtcggcatgtatgtaatgtaatagaccatgaattctaagaactataatccgagtgcattgatttatt

SEQ ID NO: 2562 - DNA, 377 bp, Glycine max
  Clone ID: LIB3028-023-Q1-B1-E2
cattcggctcgagaatcagtgcaagagaatcgccctccatcttctttcttcttcaattcattccgatggcgattccgttgccctctctcgatctcactcaccactccgatttcgaacccttagtctccccagacggttacatctccatttgcggctacggttccctcctctccgagacaagtgccagaaccactttccccgacctcgtcaacttccgaatcgcccggttaactggtttccgccgtctcttcaactccgtcggacgcatctttttcactcaccgtgttgccaatatcttttctcaggagattgctggcctttctgttgaaacatgtgatggtgaattcattgttgtaactgtttttgagataaagaac

SEQ ID NO: 2563 - DNA, 284 bp, Glycine max
  Clone ID: LIB3028-023-Q1-B1-E3
ctctcatcagattcgggtcgggttagcgttatcggataacttcgcccataaattctctgtttacggggcgaaaatgacagtattcttagccacgaggctcgtgttgcggagatccccgccgcgtctctggcggcgcagcttttctcgggcggccgtacacgccgaaaatgacactgttgccgtgccgtcgcttccgttgttcgattactctccgcctccgtatttcgggcgtatcgctgacgagattctggccaacctcatggagtatcgtagtccctccatct

SEQ ID NO: 2564 - DNA, 307 bp, Glycine max
  Clone ID: LIB3028-023-Q1-B1-E4
cgcaagagccttttgttgctcttacaagtgaggaggaagatgaggttgaatgtgccttttcttccaactggaggaaaatgttcatatgtataagaagttgcttgaggatgttgggaggagaagtggcacgcttcacaggctgaattttgagattgatttgaatgagaagcgcacggaacattataatttgttgcgggcgaagaaggaattggttgaggaacaggaaatgccgcaagagccttttgttgcgcttacaagtgaggaggaacataaggttgaaagtgtcttttcttccaaatgggggagg

SEQ ID NO: 2565 - DNA, 180 bp, Glycine max
  Clone ID: LIB3028-023-Q1-B1-E5
attgtctgtgtgatggattcccgccttcatatcgttacatggccatttctagaacactcggctatgcagattctgatttgtcggaatcatttacgcagaaatggtgaaagctcaaggaaattggtcagtcgtgggtgataaagtatgcctacaatccaactgcatgagattggatcacaa

SEQ ID NO: 2566 - DNA, 61 bp, Glycine max
  Clone ID: LIB3028-023-Q1-B1-E6
tgctgcgcttgcaggggttgtaaaactaatcaatataattaaataaattacattctgtctc

SEQ ID NO: 2567 - DNA, 363 bp, Glycine max
  Clone ID: LIB3028-023-Q1-B1-E7
aatggttttgggtatggtgcccactggtcaattgctttagcagcagcttcagagctatttggcctaaaaaactttggaactctctacaattttctcaccatggctagcccagcaggctctctctttctatctggatttgtagcaagcacaatatacgactattacgcggagcagcaagtgaaacaccgaatgctcactggaaattacaatgacttgcttctttgtgagggaaacatttgcttctccatcacatttgggattttagctgtaatttgcttatgtgcagcatctttgagcttgatcgttgctcacagaacaaagaaattctatgcacagctttatgaacagtctcaaacttaaaaa

SEQ ID NO: 2568 - DNA, 364 bp, Glycine max
  Clone ID: LIB3028-023-Q1-B1-D2
ctttggcctggggtctttgttacaatcatgaaatgagtcctatgcagtcatactgtgatgactacttcaaactcacatacccctgtactcctggtgctgactactatggacgtggagccattcccattttttggaactacaactatggtgctgtcggagaagctttgaagattgacctactaagccatccagaatacatagagcagaatgccacccttgctttccaggctgcaatttggagatggatgacaccaatgaaaaagtcacagccctctgctcatgatgcttttgtcggcagctggaagcctaccaagaatgacactatggagaatcgggttcctggatttggcactacaatgaacat

SEQ ID NO: 2569 - DNA, 363 bp, Glycine max
  Clone ID: LIB3028-023-Q1-B1-F1
caagttattgtgagcaaagaaagatagtgagtgaagtaactgaagagaagaaaaaatgccgtgcctcaacctcagcaccaacgtgtccctcgaaggcgtcgacacctcttccatcctcgccgaagccacctcctccgtcgccagcataatcggcaaacccgaagcctatgtgatgattgtactgaaaggatcagtacccatagcttttggtgggaatgagcagccagcagcttatggagaattgggttccattggtggtcttaaacctagtgtaaacaaggaacttagtgctgcaattgcttcaattctggaaaccaaattgtcagtgccaaagtcgcggttcttcttgaaattctatgacac

SEQ ID NO: 2570 - DNA, 371 bp, Glycine max
  Clone ID: LIB3028-023-Q1-B1-B5
actcataacacaaagcacaaagcaaagctcatccttgagttaaaaaatggcagcagcttcttccatggctctctcatccccatccttggctggcaaggccgtgaagctgggcccatcagccccagaagtgggaagggtgagcatgaggaagaccgtcaccaagcaggtctcctcaggaagcccatggtacggcccagaccgagtcaagtacttgggcccattctctggcgagcccccgtcctacctaaccggtgagttcccaggcgactacggctgggacactgctgggctttccgcagacccagaaaccttcgccaagaaccgtgaactcgaagtgatccactccaggtgggccatgctcggagccttgg

SEQ ID NO: 2571 - DNA, 360 bp, Glycine max
  Clone ID: LIB3028-023-Q1-B1-B6
aaagcaactagaaaaaaaaaaaaagagaagaaaaaaaaacttggttttatcttctttgttattattatattcacttcttcaatatcttggttctttgatattattattcgattgagcaaaaaatgggagttccagagagagaccctcttgcacaattgagcttgcctcctggatttagattttatcccactgatgaggagcttttggttcagtacctttgccgcaaggttgctggccatcatttctctcttccaatcattgctgaagttgatttgtacaagtttgatccatgggttcttccaggtaaggcagcgtttggagagaaggagtggtacttcttcagtccaagagacaggaagt

SEQ ID NO: 2572 - DNA, 364 bp, Glycine max
  Clone ID: LIB3028-023-Q1-B1-B7
ttggaaaagaagaagaaagatatgagttcaatggagaatgctgtacatgagttggagaagaaatgggcacaagttcaggaaaatgcacttaaacagccttcccctgggcaaagggagaagacattggataaacacctgcatggtctaattgagcaactagcagttaaacaggcacaagctgagggcttacttggtgaaattcatctgaaagaaatggagctcgaaagattgaatgggctatggcgacgaacggagagtagcaattcagaggcgaacactgctgctaggaatcgtttcagtaaaggctcctctgataagttacatagtttgtcagattacgaaggtcatcagaggcttccttatc

SEQ ID NO: 2573 - DNA, 367 bp, Glycine max
  Clone ID: LIB3028-023-Q1-B1-B9
ctatttgagttttgggagcatgaacaagttccctactcctcaacttgttgaaatagctcatgcccttgaggattcagaccatgatttcatttgggtggttaggaaaaagggtgaaagtgaagacggggaaggcaatgactttctccaagagtttgataagagagtgaaagcaagcaacaaggggtatctaatatggggttgggcaccacaacttctcatactagagcatcatgccattggagctgtggtgacacactgtggatggaacacaataatcgaaagtgttaatgctggtttgccaatggctacttggcctctgtttgctgagcagttttacaatgagaagttgctggctgaggtgctgaga

SEQ ID NO: 2574 - DNA, 365 bp, Glycine max
  Clone ID: LIB3028-023-Q1-B1-C11
attttcagttcagtgttggctcacttcatattaaaagagaaattgcacatttttggcgtgcttgggtgtgctctgtgtgtggtgggatctacgtctattgttttgcatgcaccgaaagagaaagacattcattctgtcaaggaagtgtgggaacttgctacaggaccaggttttattgtctacatttgcgctatagtgatattagtttgcgtccttcatttccgttttgtgcgaagccatgggcagactcatatgatggtgtatctcggaatatgttctcccaccggctccattacggttatgggtgtcaaagcagtgggaatcgctttgaagcttacatttgaagggacgaatcaatttgttta

SEQ ID NO: 2575 - DNA, 390 bp, Glycine max
  Clone ID: LIB3028-023-Q1-B1-C12
cacagttagtacaaaaaagggttacttcagcttccacatatcttgaagaattgatcaatgggcaagtctgtagttgagaagctactttggatggcaattgtgtgcttggtgctgggtgtaatttccattactcccaaggcccaagcagcagtgacatgcaaccaggtggtgagcaacctcaccccatgcatttcttatgtgctcaatggtggcaaaaccgtgcctggcccttgctgcaatgggattaagaacctccttaaactcgctcactccacaccagtattgttaaacccgtttgcaagtgcataaagaacgctgttagtgcgttccattatggcaagtccaatgtggaccgtgctgctgctcttcccaagcaatgtggggttaaca

SEQ ID NO: 2576 - DNA, 283 bp, Glycine max
  Clone ID: LIB3028-023-Q1-B1-C2
agaacacaagaaattatatcacaatcagatccatataactatgacattgctgctgtacactctaccatcgctcatacctaactatgaatagtccacacctcaaactggaacagtccctggtcaagattaccactaagtgcgtcccccagaatcttcaccatctacggatgaaggatacaactttacatacaaagctcctaatacttcaagtcacatacacagatggatttaagcctaacattgacatcgattttagatgagggtttctcatgggaagataact

SEQ ID NO: 2577 - DNA, 342 bp, Glycine max
  Clone ID: LIB3028-023-Q1-B1-C3
cacaaatggagaattccccatctcatccttcttctcttcaatgtcctccttcaaccctttctcccctccaccacccaccccttacctcaccaacctcggcttcggctactccatcgccatcgccctcggcgtcctcttcctcctctccaccctcatcctctcctcctaactctgctgccgcaccctccgccaccgcaacaacaaccgccacaccccccgtaacaacacctccgatggcatcgtcctcccgcgcgtgatcttcgtcgccgaggaccacgacgatgactttattcgccagaacgacgccgtcaccgggctcgaacaggccgtaataaactccta

SEQ ID NO: 2578 - DNA, 367 bp, Glycine max
  Clone ID: LIB3028-023-Q1-B1-C4
ctctacaatggcctcagccgcatcccccaccactttctctctcctccactccgccaccccttcctcctcctccaccgccacctccgcctccccctccccctcgcgcgtgcagctcacctcctccctccgcgcccgcccgctgcgccgcctgggcttcgccgcggcggacccgctgctcgcggcgagtgtagcggcgcgcgtggcggcggtgagaggaggaggaaagggcgcgaggggggtggtgtccatggcgaagaagagcgtgggggacctgagcgcggcggatctgaatgggaagaaggtcttcgtcagggccgacctcaaagtcccgctcgacgacaaccagaacatcaccggcgacaccaga

SEQ ID NO: 2579 - DNA, 364 bp, Glycine max
  Clone ID: LIB3028-023-Q1-B1-C5
aattcatatcatatcatatcttgttcgctatattctctctgacaccccccggaggattgtgttgaggacaaacacaacaacaaacatataacattccgacaggatggtctttcggagctccacctccctaattggcctcctgtccctcctcttcctcctctccgtctcctccgccattcgcctcggccttgtccgccgtccttccccggagctccctctcttccgggaggcccctgccttccgcaacggcgaggactgcggctcctcgccttccgccaccattaacgtagccatgaccctggatactaactatcttcgtggcaccatggccgcggtgctctccatgcttcaacattcaacgtgt

SEQ ID NO: 2580 - DNA, 367 bp, Glycine max
  Clone ID: LIB3028-023-Q1-B1-C6
attaacttcacacttcactctctagtcatggcttcttctcttcctcttctcaaccttcttaccctcgctctgtcactactcttctgcattgccttaacttccgaggttggcgtgcaggcgcagatggaggagacaggcttgaacctcatgtcggaggcgttggagtggccaaccgcaatgtcgctctacgacgaagacagcgaagaagaggatgtccagaacggttacagtcggagatcgttgttctggcggaggatgaagtactacatctcctacggcgctctttccgcgaaccgaatcccgtgcccacctcgttctggtagatcttactacacccacaactgctacagggcccgaggccccgttc

SEQ ID NO: 2581 - DNA, 364 bp, Glycine max
  Clone ID: LIB3028-023-Q1-B1-C8
gcgagtgagtgagtcgtttctctgcagcaacaaggtttagccactccaaacagacgagaaatgggtcgtggggtcagtgctggtggtggtcagagttccttaggttatctctttggcagtggggtgcctgccagcagtgcaaacagtcagcctgcaaatggtgctcgcactcaaaatgctagtgctccttcaccaccagtcgataagcaaagtccagcaccagcaccagcaccagcaccagcacctgcatcatcaccaattgataagcaaattccagctggaattcctggaagtctcaaaaacaattaccatcgtgctgatgggcaaaactgtggcaactttcttactgatcggccatctacca

SEQ ID NO: 2582 - DNA, 364 bp, Glycine max
  Clone ID: LIB3028-023-Q1-B1-C9
ggcgtcttcataaacgccgcccaaaacttctcatacccttttattcattccattcgtttctagggttttcttttctttgccgagaaaatgagagagtgcatttcgatccacattggccaggccggtatccaggttggaaacgcctgctgggaactctattgccttgaacacggcattcagcccgatggacagatgccgagtgacaagaccgttggcggaggagacgacgccttcaacacatttttcagcgagaccggcgccggaaagcacgtgccccgcgccgtcttcgtggatcttgaacccaccgtgatcgacgaagtccgaaccggtgcgtaccggcagctcttccacccggagcagctga

SEQ ID NO: 2583 - DNA, 387 bp, Glycine max
  Clone ID: LIB3028-023-Q1-B1-D10
agactggagaggtggaagagctgcttcatttaacatcattcctagcagcactggagctgccaaggctgttggaaaagtcctccctgctttgaatggaaaattgactggtatggcattccgtgttcccactgtggatgtctctgttgttgacctcacagtgaggctggagaaggaagcctcctacgatgaaattaaaaatgctatcaaggatgaatcagagggcaagttgaatggaattcttggttacactgaagatgatgtggtctccaccgactttgtgggcgatagcagatcaagtatttttgatgcaaaggctggaattgcattgaataagaactttgtgaagcttgtttcttggtacgacaactaatggggatacagctcacg

SEQ ID NO: 2584 - DNA, 188 bp, Glycine max
  Clone ID: LIB3028-023-Q1-B1-D11
acacaacaaagttgcaaagtgaacaacgattaagccatgacagctctaattttaatcctcacgctatgcatcattgctgtcaccttcgcatgacaagcagcatgctccaatagtcacgcaagtgcaaaccaacgaggttttcaagctcaaccaatccaagccatagggtacaaagtttctttactttt

SEQ ID NO: 2585 - DNA, 386 bp, Glycine max
  Clone ID: LIB3028-023-Q1-B1-D12
gcaaacgatccaaactcttttttcatttgcagcatcaaaatgagtggtagcaacgatggtagcggcagctggagctctaggtttttgaaggtggctagtgcagctgccgctacagccgccgttgccggcggtttatatgccattctttcatcctcaacctctgctagctctgagatggaagtgccgtttggcagcgcacggcgtgagagcaaagaacgtgacgatggtggctccgggtctcatcctcgcgagggtgccaccacggtcagtcgttggaagaaacctgagattggttgggtgaagctgaacgtggatggttcacgccacccatacaaaagttcctccgctggttgtggtggtgttctgagggacgcatcaacaaagtg

SEQ ID NO: 2586 - DNA, 358 bp, Glycine max
  Clone ID: LIB3028-023-Q1-B1-B4
aaacactctgttctcgtcgcatgcacataaacaataacaaatggcttccacaactatgttgttgctggtcgtgttcatgattctatgtatatcacacccctcatttcaaatggttcttgtgcctttaacacacacactttccaaagcccaattcaacagcacccaccaccttctcaaatccacttccacccgttccgcaaaacgcttccgccgccaactctccctcccactctccccgggcagcgactacactctctccttcaacctgggcccgcaggcccaggcccatcccattacgctctacatggacactggcagcgacttagtctggttcccctgcgccccttttaaatgcata

SEQ ID NO: 2587 - DNA, 131 bp, Glycine max
  Clone ID: LIB3028-022-Q1-B1-H8
tttaaatggaaaagctccatacttccgtcctcgcccttgtaatccttcgtgccatactatctcaagaatgattactcacaagtatgaacactaatcacggatcacataaatgttgaaatttcctagttaca

SEQ ID NO: 2588 - DNA, 396 bp, Glycine max
  Clone ID: LIB3028-022-Q1-B1-H9
gcatggaggtggttttacaatgtagttggagattcaaggtgccctatctctgacacttggtggcaaacagaaacgggtggcttcatgataactccactaccaggtgcttggccccagaaacctggttctgcaactctccctttctttggagttcagccagtcattgtggatgagaaaggtgttgaaatagaaggagagtgcaatggatatttgtgtgtgaagaaatcatggcccggggcattcagaactctgtatggtgatcatgaaagatatgaaacaacatatttcaagccattttccggatactatttcagtggtgatggttgcagcagggataaagatggataccattggctcactggaagagttgatgatgttatcaatgttagtgggcat

SEQ ID NO: 2589 - DNA, 275 bp, Glycine max
  Clone ID: LIB3028-023-Q1-B1-A1
gttccattaacagcaacagtaaggagataaccatggagattccaagcttggttcgactttacaaggatggcaccattgaacgcctccaaaactcaccaattgtgccacccacgcttcaagatccaacttcttccaaagacgtcgtcatctctggtgaccccctcatctccgctcgtcttttccttccaaaccggattcgatcgcagcaggagggtcatttcctccccatcgtggtctactttcacggtggaggtttcgtcactgaagctgccttc

SEQ ID NO: 2590 - DNA, 409 bp, Glycine max
  Clone ID: LIB3028-023-Q1-B1-A10
acgtctactctaaatgatgactctcggggcaattccaattccacattttcaagaaataaggaggcaaaaatgttcatatatgaattggaattatttgttttcttagtaggcctatcctgatgccaaaggaaatgagatcggaattcctcggggaattccaattccacattttcaagaaataaggaggcaaaaatgttcatatatgaattggaattatttgttttcttattaggcctatcctgaagccaaaggaaatgagatcggaattcctcggggaattccaattccacattttcaagaaataaggaggcacaaatgttcatatatgaattggaattatttgttttcttattaggcctatcctgaagccaaaggaaatgagatcggaattcctcgggggtaccgagct

SEQ ID NO: 2591 - DNA, 370 bp, Glycine max
  Clone ID: LIB3028-023-Q1-B1-A11
cttgcaacggatggccctgggggtgtggtagcaatgaactccatgttagttgacatgcaaggttcaacaggtggatattcctccatgatgggggtttcttcaatgtcaatggctcgtcaaatatccatcgacaacgtgccggggagggaggttggagatcaacaaaggaagttgtcgtccactcttgctcaggcttggaaggatgacattgatacaggaaatttggtgtcatcagtggttgaattatttggcgaaagtgtgttgccgtttgttgtttcaaaccctgaagcatgtatgtttttgtagcactagttgcactgtgtaggtatttgttttttgcatgtgaaagtgcatgcaataaggtggcatg

SEQ ID NO: 2592 - DNA, 369 bp, Glycine max
  Clone ID: LIB3028-023-Q1-B1-A2
cataatttcgcatgttattcgacatagtttgggtggatgaggtattgtaaatgtaaataaagtccactcgatgaaagcaacattaaaataaaatctatgaaatgctcgagaaaagaagcaaaaaagagaagaagagaagagagcaaaaaagatgtggtcttgcccaaaacacgcgacgccgtttaacaaggctcttgtagttattccctccgtctcagccaccacatggcgacagcgccacggcgtctccgccaacgctaagcaacaaggtgagaaattgggttacacccttttggccactctcgaatccaattcgactccaattccgaaagcagcgcaagaagaaggcgagattagtgggtctgatgt

SEQ ID NO: 2593 - DNA, 339 bp, Glycine max
  Clone ID: LIB3028-023-Q1-B1-A3
agttagtacacaaaagggttacttcagcttccacatatcttgaagaattgatcaatgggcaagtctgtcgttgagaagctactttggatggcaactgtgtgcttggcgctgggtgtaatttccattactcccaaagcccaagcagcagtgacatgcacccacgtggtgagcaacctcaccccatgcatttctcatgtgctcaatggtggcataaccgtgcctggcccttgctgcaatgggatcaagaccctctttaaactcgctcacgccacaccataccgccaaaccgtttgcaaatgcacaaagaacgctgttagcgcgttccattatggcaagtcc

SEQ ID NO: 2594 - DNA, 398 bp, Glycine max
  Clone ID: LIB3028-023-Q1-B1-A4
atgcgtccacgtctactctagatgatcccctcggggaattccaattccacattttcaagaaataaggaggcaaaaatgttcatatatgaattggaattatttgttttcttattaggcctatcctgaatccaaaggaaatgagatcggaattcctcggggaattccaattccacattttcaagaaataaggaggcaaaaatgttcatatatgaattggaattatttgttttcttagtaggcctatcctgaagccaaaggaaatgagatcggaattcctcggggaattccaattccacattttcacgaaataaggaggcaaaaatgttcatatatgaattggaattatttgttttcttagtaagcctatcctgaagccaaaagaaatgagatctgaattc

SEQ ID NO: 2595 - DNA, 110 bp, Glycine max
  Clone ID: LIB3028-023-Q1-B1-A5
tgcagatgtttttttcgtttctactgccaactcatatgggagactcttatatgaggctgttgcacttgtattttattttatataaataaatataaatataattatattat

SEQ ID NO: 2596 - DNA, 366 bp, Glycine max
  Clone ID: LIB3028-023-Q1-B1-A6
ctcgagccgaatcggctcgagcggctcgagcagccacttcttctcccagtttcagctctcccctctctcttcttttcctcggctctggttcggtaaggcgtagggggttgttattattcttcataatggttgcaacagctgctacggcgtcgtttctccctgtgccttcgccggacgctggaaaagggaaacccaagggtggtggtggcggcggcgtttctgtgaacctcggaggactcaaagagaagcaaggtttgtgcggttgcttgcaggtcaaggcaaatgcacaagcccctccgaagaccatggagaaggttgagaatgatttgccatggttgccgtcgtcgtcgatttcgcacgccccga

SEQ ID NO: 2597 - DNA, 371 bp, Glycine max
  Clone ID: LIB3028-023-Q1-B1-A7
ccactcttaatttctctctgccttgcccatttacacacctctccaacctttcactttcagctttatttgaatccctctctctcctttccaaatggccaacgttgaggttgcacatcaaacaccaacaacagttccagaaaatgaaacaaccgaggtaatcaagacccatgaaacaaccccgggaccagtaacaaccactgaaggtcctgcaacagaacaagcagcaactgaaggtcctgctcaagaagaacaacaagcaactgaagttcctgccccagaatcaatcaccgaagcaccaaaggaagaaaccaccgaagcaccaacaacagaaacagtagaaacaacaactacagaagaagccaagccagagg

SEQ ID NO: 2598 - DNA, 384 bp, Glycine max
  Clone ID: LIB3028-023-Q1-B1-A9
gaattctccaaacactctagaatttgcatgcactgttcttcatacaatggcattacgcgagcttcttatgatggggatattgctgctggtatgtcttgctaaggtttcatctgatgttaacatgcaaaaggaagaagatgaagaacttcgctttcctaatcaccctcttatcgtgagagacgggaacagaaggctaatgcaagacataggtaagcaaaacaaagtattttggatgctttattaggttaactttgatcctgtgcttccggttttaacttttagattcttactaactagtctccttagtgacattttttaaaaaaaaatttaaaaattatcataaaaatcacatgaaagcctaaaaaaacacaagcaatgttattt

SEQ ID NO: 2599 - DNA, 348 bp, Glycine max
  Clone ID: LIB3028-023-Q1-B1-B1
aattgaagaaactcttgaaaaggttgtcaagttgcttgcctatattagtgacaaagatttgtttgctgaattttataggaagaagcttgctcgaaagctcctttttgacaagagtgccaatgatgatcatgagagaagtattttgacaaaactgaagcaacaatgtggtggtcaatttacctcaaagatggaaggaatggttacagatttgacattggcaaaggagaaccaaacaagctttgaggagtatttaaccaataatcctaatgcagaccctggaatagacttgacggttacagttttgactactggcttctggcccagttacaaatcttttgatctcaatct

SEQ ID NO: 2600 - DNA, 394 bp, Glycine max
  Clone ID: LIB3028-023-Q1-B1-B10
gttcgagaacacgagcagcgaggctggaaagaccatggctaaggttctgaacgcgtctttggagctcagcaacaacgcgttggacatagtcaacggtgtttcgagtctcttcaagggtcttaacttgagttccttcagcgtcaacagcaacaggaagcttctctcggaggaaacggctttggtggatgggttccctacgtgggtgagtgaaggacagaggaggcttcttcaggctgtggaccccaaacccgacgtggttgtggctcaggatgggagtggacaggtgaagacaatccacgaggctcttaaattggttcctaagaagaacaagaagccttttgtgatttacatcaaggccggtatctacaatgagtatattatcatgaacaagcac

SEQ ID NO: 2601 - DNA, 382 bp, Glycine max
  Clone ID: LIB3028-023-Q1-B1-B12
gacgagtgcaaagttaaggacaacgcttttatgattgcttttgcctgcatccaaattcttctaagccaaataccaaacttccataagctctcttggctctctatcgtagcagctgttatgtcttttgcttattcttccattgggcttggcctttccataggcaaaatcataggtgggggacacgtgcgaacaaccttaacaggggtggaagtttcgggaacggaaaaggtttggaaaatgtttcaagctatcggtgacattgcctttgcttatgctttttctaatgtcctaattgagatccaggacacactgaaatcaagcccacctgagaacaaagtcatgaagagagcaagtttgattggcattatgactacaacattgt

SEQ ID NO: 2602 - DNA, 350 bp, Glycine max
  Clone ID: LIB3028-023-Q1-B1-B2
cgcaatttgcgcgcactccgtcgccgttgccgacacctcctccgcgtatccttccatccccggcacggaaaccggtgagtgctccctccgcggcgtgggcgtgggcgacggtgttctggttcctccacggcgagaagtatacgaggaggggcgaatcttcgacatcactcacagatatgtccccgagatgccggtgtgggactcgacggaggggctcgggcaacacttcctgtggctcgataagagcatgaagaatggctcgctcgctaacagctctaacatgaagctcggtgttcacaccggcacccatgtcgacgcgcccggtcacttttacgacaattactacgacg

SEQ ID NO: 2603 - DNA, 363 bp, Glycine max
  Clone ID: LIB3028-023-Q1-B1-B3
gcagcagtatgtcacatactcacagattcaccatccttctcagtccatggctcccaattctgctgcccctggccaattatgcctttggctatgccggttctgctcatgctcgtgtatagtactctcaacctatggcacccacaatgccttcacagtaccacactatgatgaatgcacgaagggtcagcgcagcatccctcagacaccgttgagcagcaccaggtacgaacctcacaaccattataagccagtccttaagggtcgcagagccaattttgctaaaaatgggtttgtttccctttaagtttttatatgcaattcttgtggtcatgtttgataaaactgtttgtgggaagtatttgg

SEQ ID NO: 2604 - DNA, 343 bp, Glycine max
  unsure at all n locations
  Clone ID: LIB3028-022-Q1-B1-H7
cgagaacaccgcaacgatgaaagagggtcgggccgaggcctccatgggaaggttcggagccctcgacgagctcttcgagaagacccgcgtccgacgaaaggacgtgggtgtcctagtagtaaactgcagcatcttcaacgcgagaggatcgctctcagcaatgatcagaagccactgcaagatgagagggaagagtcggggggacagcctcggaggaatcggttgcagcgcggggatgattggtgtggagctggccaatgagattcgtcaggcgaacccaaataactacgcggtggtggggaggagggggatgggggngtggaactggtaccaggggaaggat

SEQ ID NO: 2605 - DNA, 343 bp, Glycine max
  Clone ID: LIB3028-022-Q1-B1-F8
cgcgttggtgcaaagcatccttcgtttcaatttctctctctcagcgctttctgcaatcgaacctttcatctccaaagggatccacaggccgaaggagaaatggggctgacattcacaaagcttttcagtcggcttttcgcgaagaaggaaatgcgaattctgatgggtggtcttgatgctgctggtaagacgactagcctgtagaagctcaagctcggagagatcgttaccagaattcctaccatcgggttcaatgttgagactgtggaatacaagaacattagcttcactgtttgggatgttggtggccaggacaagggtcgtcccttgtggaggcactact

SEQ ID NO: 2606 - DNA, 378 bp, Glycine max
  Clone ID: LIB3028-022-Q1-B1-F9
tacaccggttagcaactgaggcgggatttgaactgaatttcttgtcccattttggtgggaaggtctttcccaatgagaaaactgaggacctagagtttttgattggtttggcccataagaaattattgaaagctttctgtgaagaaagcatcacttcaaagaagcaaaattttcagcaaaagatagcttggccacattgggactttttacatatcttggaagaaggactagaatatttttgtcagcaatgggcattaaggatcttgacggagtaattatgaacttcctcaggttgatctctttgcttgtttgttacattttaaccattccaattttcaagataccgatcctgaagattcaatgctttgattttagtta

SEQ ID NO: 2607 - DNA, 348 bp, Glycine max
  Clone ID: LIB3028-022-Q1-B1-G1
attttcctttcgtttcctttcattttccctcactttctcgctccccaaacggcccctctctctcctccaatggccgaccagctcagcgacgaccagatcgccgggttcaaggaggccttcagcctcttcgacaaggacggcgatggttgcattactaccaaggaacttgggactgttatgaggtcacgtggtcaagacccaagtgaggcagaactgcaggatatgataaacgaggttgatgctgatggcagcgggaccatcggtttcccagagttcctcaacctgatggctcgcaagatgagagacagcgactcagagggtgagcttaaggaggctttccgtgtgttt

SEQ ID NO: 2608 - DNA, 343 bp, Glycine max
  unsure at all n locations
  Clone ID: LIB3028-022-Q1-B1-G10
gcanaatgcaatatagaaccaattccagcacttctccaaggtgtcattgatcatcttattcagtggcaattacttcccgagtacaaaagaccaaatggttgtatcatcaacttctttgaagagggggagttttctcagccatttctgaaaccaccacatttggatcaacctgtgtcgactcttcttctctctgaatcaactatggcttttgggcgtatacttatgagtgaaaatgatgggaactacaaggggccactcacgctctcattgaagcaggggtctcttttagtgatgagaggaaacagtgccgacatggcgaggcacgtaatgtgtccatccccta

SEQ ID NO: 2609 - DNA, 402 bp, Glycine max
  Clone ID: LIB3028-022-Q1-B1-G12
caagccaaaagaacaacatggacattgatctttctcctcagttgcccaagaaagtttacggtgccaatggtggctcctactacgcatggtccccctccgaccttcccatgctccaccaaggcaacattggtgccgctaagcttgctctcaacaaaaacgcctttgctcttcctcgttactctgactcttccaaagtcgcttatgttcttcaaggtagtggagtggctggaatagtgttgcctgaatcagaagagaaggttgttgcaataaagaagggtgatgccttggcactcccctttggtgttgtgacctggtggtataacaaggaagaaactgagttggttgttctgttccttggggacacttccaaggctcacaaagctggtgaattcactgactttt

SEQ ID NO: 2610 - DNA, 215 bp, Glycine max
  Clone ID: LIB3028-022-Q1-B1-G5
ggactctgctgattcttctgaagtaccaggcactattcaaatgcatcttttcatttgtaattttagttactatttgggtagttaagaaccagatgctgaaacttgtattttttcccttatcttagtagatttcccccctgagagatttttaaaatcttgtgatggcgcgtattgctttatgagggattggcgagggggggaagtttggggaagag

SEQ ID NO: 2611 - DNA, 333 bp, Glycine max
  Clone ID: LIB3028-022-Q1-B1-G6
tcttcctctcaccgagtcacgcactcggcttgactcgtacgaactccgatcgccccccgagtcacactcaaccagcacgaccgcccgatccgacgatgtctcgcgcctcctccgccgcagattccgccgcctccggtgagatcagactgttcggagtcagagtcgtcgtcgattccatgaggaagggcgtcagcatgagcaggctctcacagtacgagcatcctcaagacgggagcaacagcagggacgctctcgccgcgggttacgcctccgccgacgacgccgctcctcagaactccggccggctccgggagcggcagcgaaagcgaggag

SEQ ID NO: 2612 - DNA, 271 bp, Glycine max
  Clone ID: LIB3028-022-Q1-B1-G8
cggctcgagcttaaaaatccgttttttatttcccgtgcatggctttttctgaaattaattcttacccagatgaataagtgctttggaatttgtttctaagaaccccttgttttgtgggtaacttcctactttgtggtggaattggggtaatcgatctggggaagtgaagatgtcgactccggcgtaggagggacggaggagggattttaaaagattgcaacaagatcctccggctggcatcagtggggctccccaagagaagaagattatg

SEQ ID NO: 2613 - DNA, 157 bp, Glycine max
  Clone ID: LIB3028-022-Q1-B1-H1
tgtctaacatctctccgtatccagtctattatcaaacatactcacaaatgaccattattatctctatttcagttcttacatggcaccagagtgtacttttatttatttatttttagatcaagagaagtcaacttccagtgaggagggggggggcgag

SEQ ID NO: 2614 - DNA, 402 bp, Glycine max
  Clone ID: LIB3028-022-Q1-B1-H10
tagtagagtaaccaaaaggagagtgcaataactcgttgtacattcctagtgtgtgggagagacatggctaagatgtgtgttttggtgttggttcttgctctggctgtggccacaagtgccagaaacgttcccaaccccaaggatgctggtcttaaggaccagaagaacttcatcagctatggtggagttggtggttattccgggattgggaacaatggactgccttttggaggagctggtgccggaatacgtggtggttttggcggaggtggtggacttggtggtggcctcggcggtcctaccggtgggatcggagggtttggcggtaccggtagcggtgtcggtggcggtattggtggtggcgttggaactggcgttggtggtggcagcggtgttcttcct

SEQ ID NO: 2615 - DNA, 399 bp, Glycine max
  Clone ID: LIB3028-022-Q1-B1-H11
cgcagaagcctcctctgcctcgcaatcatcggcattgtcgtcgccgccgtcggaggtcagtctccagcggcggctcccaccacttcctcggcatccccagccacagccccttctaaacctaaaccaaaatcacctgcgccagttgcttctcccacttcatctcctccagcttcatcccccaatgctgcaaccgcaacccctcccgtttcgtctcccacggtagcatctcctccgtctaaagctgctgctccagctccagcaaccactcctccggtggccacacctcccgcggccactcctcctgcggctacacctcctgctgtgacaccagtgagctcgccgccagcgccagttccggtgagttctccaccagcgcctgttccggtgagctctccccct

SEQ ID NO: 2616 - DNA, 388 bp, Glycine max
  Clone ID: LIB3028-022-Q1-B1-H12
ctatactggaataaggaaacatatctttaggaaagctgtctatgttgcatagaatactcccaatttttaatcttaggtaaaaattgatctttaaaggaggcattctatcggaagaaagcttaggtctattattgtgcagattgataccaagcgaatgtaaacttcttttgattttttgtttttgcaatctttgaaatttattctctgccaatgtgttagggtctgggacacgctgttctggcttcaattctctggtttcatgccaaatctgtagatttgaaaagcaaagcttcgataacatccttctatatgtttatttggaagctattttatgcagaatacttactcattccttttgttagatgaggatgcagcggcaatattgact

SEQ ID NO: 2617 - DNA, 352 bp, Glycine max
  unsure at all n locations
  Clone ID: LIB3028-022-Q1-B1-H3
tccatgtacctggactatggtcacatgnttcttctgagaaacttggtcattgggcggggcactcctagtcaaagtttatctggggactctatctccaagcatggggaacttaaccaacctccagattgtgcttctacagaataacancataagtggaccaatcccttcagagctaggcaaacttcctaagcttcaaacgcttggtgtcgctgacaacttcttcaaaggggagattcctccctctcttgggcacctggagaagcctcgaagacctgaggctcaataataacagtcttgttggtgaatgcccagagtcactgggtggcatgacccagcttaagtttcgtgattt

SEQ ID NO: 2618 - DNA, 127 bp, Glycine max
  Clone ID: LIB3028-022-Q1-B1-H4
atccggtccaaaaggccaatttaaaatggaggataaccaaggacaatttctgcacctgtgttgcaaaaaagacatgatgacaaaggttgatgtagcaaggggacctaatatgtttcactagtacttc

SEQ ID NO: 2619 - DNA, 345 bp, Glycine max
  Clone ID: LIB3028-022-Q1-B1-H5
attgatttctttggtgcactcagggctagagtatatgacgatgaagtgaggaagtggatttctggtgttggtgttgacttgattgggaagaagcttgtgaactccaaggaaggacctccaacctttgaccaaccgaagatgactttgagcaagctcttggagtagggtagcatgcttgtccaagaacaagagaatgtgaagagagtacaactggcagacaagtacttgaacgaggctgctcttggtgatgctaatcaagatgccatcaaaagaggaactttctatggcaaagcatcccagcaagtaagaattcccgttcctgaaggttgtactggtccaaatgcc

SEQ ID NO: 2620 - DNA, 313 bp, Glycine max
  unsure at all n locations
  Clone ID: LIB3028-022-Q1-B1-H6
atttaaccgaacaatccgatatttgcttcctaatggaatcaagtattaacccttttccctccgaatactccccaaacacanggaatgggctccaatcgtcgtttcaaatttaattttaaggttcttcgttacgcgttgtgtggcgttgtgcgtgagaaagtgcgcgtggtgaaaaggcatggcttcgcagctcctgagaggagccttcggaagtcgtttccttgcaaaccctagggccttctcctccggtgcttccagtcggatccgcgccactctcttccccggcgacggcatcggccccgagatcnccgat

SEQ ID NO: 2621 - DNA, 343 bp, Glycine max
  Clone ID: LIB3028-022-Q1-B1-F7
agaggttttgacgcaacacactttcactgagaaaggatctctatcgaccaaggagcagaataaaacccttctctctggtaagtgaataagagaagggcgtcagatcggaaacttcacactttcgaggaggtggcaaaggaggaggagaccaaggattgctgggtcagcagttctggcaaggtgtagggtgtgacgggagtgatgggagatcatcccggaggtgatgagggtgtgtgatctgcaacagggaaagatggagcgagtgattttgaagatgttggagacagtgattctgctagagagagggtggaaagagaggacattggtgagattgagggagcaa

SEQ ID NO: 2622 - DNA, 136 bp, Glycine max
  Clone ID: LIB3028-022-Q1-B1-D6
tttatattcacgacaacagagtttcgacagagatcataatgaattcgtagtgcatgatcaattgccaccttttaattgtgaggaacttgtaaatcgtagaaacaattttcactcatccatcgaactatgcaaggga

SEQ ID NO: 2623 - DNA, 293 bp, Glycine max
  Clone ID: LIB3028-022-Q1-B1-D7
ctcctcttcttactccttacaagatgggcaaattcaatctgtcccagggagttgttttggcaccgctgaccagacagaggtcttacgacaacgtcgcagaaccccatgccatcctctactactcccagagaacttccaagggaggcgttctcattactgaatgcactggcgtctcggacacggcgcaaggctaggcggagggcccggggatatggactacggagcatgttcaagcttggaaacccattgtcgatgccgtcgacgccaaaggcggtgttttcgtctgtcagatt

SEQ ID NO: 2624 - DNA, 292 bp, Glycine max
  Clone ID: LIB3028-022-Q1-B1-D8
ctacacgcaagtttcatttgaaggtgtactcactgagacatgtggcacagcacgatatcatggtgtcgtggatgttggggacggtacagctaatggtcatgattattggatcctcaagaattcatggggtcctacctggggagaacatcgctacatcaaggtagaaggaaatcctgctaacagcagatcaggcaggtgtggaattgcaattgagccatcttagcaccttaagaatggtccagatcgagctaatcctggagcatcaaccccttcacctgtgaagccaccaaat

SEQ ID NO: 2625 - DNA, 427 bp, Glycine max
  Clone ID: LIB3028-022-Q1-B1-E10
cccttacttaaacccggaattcggtccaagggctcaaggcgcttttataccaggtttcatgacattcatgtccatagggggcttcccgtctttcatagaagaaatgaaggttttctacaaagaaagactgaacgggtattatggcgttggagtctacattctttcaaattttctgtcttcatttccctttgtggcagtgatgtccattgctacggggacaataacctattatatggttaggtttcgcacagaattttcacattatgtgtatatctgtctggatcttattggctgcattgcggttgtggagagctccatgatgattatagcttcactggttcccaacttcctcatgggattgataattggagcgggatatattggtgttatgatgatgactgctggctatttccgtcagatccctgat

SEQ ID NO: 2626 - DNA, 401 bp, Glycine max
  Clone ID: LIB3028-022-Q1-B1-E11
caaaacactcataacacaaagcacaaagcaaagctcatccttgagttaaaaaatggcagcagcttcttccatggctctctcatccccatccttggctggcaaggccgtgaagctgggcccatcagccccagaagtgggaagggtgagcatgaggaagaccgtcaccaagcaggtctcctcaggaagcccatggtacggcccagaccgagtcaagtacttgggcccattctctggcgagcccccgtcctacctaaccggtgagttcccaggcgactacggctgggacactgctgggctttccgcagacccagaaaccttcgccaagaaccgtgaactcgaagtgatccactccaggtgggccatgctcggagccttgggctgcgtcttcccggagttgctgt

SEQ ID NO: 2627 - DNA, 280 bp, Glycine max
  Clone ID: LIB3028-022-Q1-B1-E3
caacaagccccaatgcttggggcaaaggactactacagtggttggaattttccaagttagggggaattaccatccaagggggtggcagcattgatggaggaggctcagtgtggtggcaagacaatccatatgatgatcctagtgaggagcaagaaaagctcattggcccgttgaaccacacagtatggaggcccggccggcgagggcgcgattcaaagtgagatgggaggaaagatgccagccgtcaagccaactgcattgcgggtctatgggagtttta

SEQ ID NO: 2628 - DNA, 287 bp, Glycine max
  Clone ID: LIB3028-022-Q1-B1-E4
gccctctcttcaggtcaccatctagactggaatcatggctgatggaccacggcatccatcagttgttcagaagctagctggagaggcgtacctggtgtcgacgcttagccccaactttaactctacgaattattctgcaactggggcgtgcgtcaatggcggaaggcaggcgcctggggtgggtgttggggcacgtgtggcgcgagttgcggtgcatgctcgaggagagaaaggggggagtggatgtcgagggggttttcggaggggtggagtatccgctgcggtgt

SEQ ID NO: 2629 - DNA, 180 bp, Glycine max
  Clone ID: LIB3028-022-Q1-B1-E5
cacaaatagccctcttggccttcaatttcgtccaattccaaatcatgggtagctcgtcagttttcacgtcttacattgtgttgagtctagtgagggcactagcaattagcggtttcaatttcaaaggggcagaggcagcacgtggcttctttgtgtttggtgagtctgtcgtggacaatg

SEQ ID NO: 2630 - DNA, 294 bp, Glycine max
  Clone ID: LIB3028-022-Q1-B1-E6
cccaattcttccccctccacccacccagcatagctctctattcctaggtagtagcacgcctcacattaccttgtgtcagcagctactttgactccgttaccataccattacaataattatcaaacctaaccagtaaaaatcgtgaccgtggaggaaatccggaacgcgcagcgttgccatggacgcgccacgagcgggggcggtcggcaccgccacgccgtcgaactgcgtgtgggaagccgattacgcggactactagtgtgggcagtaccaacagcgagcacatgactgatc

SEQ ID NO: 2631 - DNA, 179 bp, Glycine max
  Clone ID: LIB3028-022-Q1-B1-E7
tagaggactcatttggaatttcggatggtctcaaggaaaacgggtcgagagaacgtgtgaggtcatcggattccagggcaggtggagagaaaatgcgaagggatcgactcaatgacaggtttatggaactgtggtctagcgggggccctggaatgcctctggaagggggcaaggctgtg

SEQ ID NO: 2632 - DNA, 399 bp, Glycine max
  Clone ID: LIB3028-022-Q1-B1-E9
tctggaagtaattattggaactaaggatctatagctttagtttttacttggttctgtatgtttgtttaacaatgcaagctagattctgtcaataaaaaggtacatttcagtccacaaatacagattgatgcaagacagaatccatttcaaaccagaacccgttttcaatcttcaggtacccctgcagcgaaaactctttcatggcatttagcatcagagacaaagtctaccttaaaagggtcttcgcatgcttccccttccccaaagtaagtttaggaatttaatagtctgtgaccgtaccaaaactgctgcattttgtgtttttgatactcagcatagagggtattatatcagcatagatggtattatattacactttcacattgacttttgcagcac

SEQ ID NO: 2633 - DNA, 280 bp, Glycine max
  Clone ID: LIB3028-022-Q1-B1-F1
gtcctcccacctcagtgattcatgtagccagcgattcctctccaattatttcttcgatataggttcatgaatgcaggcatttagggcaacagaagtgagtcagatcctaaagcatttgaagttcaaaagcttgcatcttattgagaagtgtttccttacaatattcgcgtgcgaagtcgcgacgcatgggggaacggtggggtgtgcgcgtagctggcatcaagaagacatcaattgctggaaagcaggcagcgtccaaagcggtggaggttccaaaggg

SEQ ID NO: 2634 - DNA, 431 bp, Glycine max
  Clone ID: LIB3028-022-Q1-B1-F10
cccttagttaaatccggaattcggtccaaaaaaaaactgttttaagccgtaaaacttttgatcaaaggttgtaagtaatttttttttaaaagtaaaaacataacggtttagttccttttaacattaaaaacataaaaaatgatgaattcttagaaatgaactaaatttacacaatttttaaaaaattgcgttcaactttatcaatatgaaagtataacaactttgactgcgtttgaccaaaggtacagaaactaaaacaacatttttaatattaaaaaaaaatgattacatttcacataatttgaatagttttatctcattattttccgttgagtcatgctcgagtcacttgacattctttttaataattgaatttcaatactacgaaagtatgctttgtttgtgttttgatatatcaattcatcactact

SEQ ID NO: 2635 - DNA, 395 bp, Glycine max
  Clone ID: LIB3028-022-Q1-B1-F11
cggctcgagcaacagtcctccatctacaatcatacaaacctttattctaagttctgatggctctgcgatcattctcttacgatgtgttcctcagcttccgaggggaagatactcgttatggtttcactggctatctctacaatgtccttcgggaaaggggaattcacaccttcattgatgacgacgagccccaggaaggggacgaaatcacgacagcacttgaggcggctattgagaagtccaagattttcatcatcgtgctctctgaaaactacgcatcttcctccttttgtttaaactcactcactcacatccttaactttactaaggagaataatgatgtgttggttttgcccgttttttatagagtgaatccttcagatgtcccgacacac

SEQ ID NO: 2636 - DNA, 311 bp, Glycine max
  unsure at all n locations
  Clone ID: LIB3028-022-Q1-B1-F2
aattcggtccaaggttctaaccattattggttattgcaaaaatgaactttcttgtaagttgtatgacaaatatagacaaatctggcagcattccacggggaaggatgaanggaacagtgatttagaatatcttgtgaatagtttctcagcgcttgaagcgaaggtccttgaacaatatacgtttgcaaaggcaaacttgatcagatctgctggcatgaattatctgctgcattctggcattcagtgtggagcagcacctgcagttaaaggtgttccggatgcagcagtagagttgctgcacacattggtag

SEQ ID NO: 2637 - DNA, 291 bp, Glycine max
  Clone ID: LIB3028-022-Q1-B1-F5
aaaggaaggggctttttggttaagtcatgggctccgcagccacaggttctggcccagcaatcaacgggaggattcttgaggcagtgcggctggagctctatactggagagcgtggtgaacggggtgcctttaatagcctggcctctgttcgcggagcagaggacgaacgcgttgatgctcatgcgtgaagtcaaggtggggctgaagcccaaagttgccgaggacactggacttgtccagagccagggagtagccgcggtggtcaagtgcctcatggaaggcgatgaaggg

SEQ ID NO: 2638 - DNA, 328 bp, Glycine max
  Clone ID: LIB3028-022-Q1-B1-D5
gtcgtttgattgtgaagtgagttcccattgagcagatgttggaggcaacaacgtcgacggcagctcctcgaggagtccggcaacctcaccaaagcccccaaaaagcccttgtcagtttttcccctaatactaataattagtgagtaacgattaacgatttagaagagcaacaacgacgacgacactttgagacaggtaagcctccaaattcctatctcgcttcgaatggaatccacagctctgtcgcgcataggcctggcgggcctggccgtgatgggccaaaacctagccctgaggatcgcggggaaggggttgccgatctccgtct

SEQ ID NO: 2639 - DNA, 345 bp, Glycine max
  Clone ID: LIB3028-022-Q1-B1-F6
gtgaatgcaagcttgatatcacgccattggccacggggatcagcagcacctggtgccaatggcgtgaatgcaagcttgatatcaaaaactgctcacctaatcaactcagtgtaatgcaaggattcaggacagatttcttaagggcatttagtgtggttggcaacgccgcatctaaagggcattttatagatggttgctatgcacactgccaaactggaatacaagagacatggctgagaaatgactccccagtggtggccaagacatcaattgcaaaggcagtgggtgattggttttatgatcgaaggcccttccgtgagatagattgtgcctacccttgcaacc

SEQ ID NO: 2640 - DNA, 294 bp, Glycine max
  unsure at all n locations
  Clone ID: LIB3028-022-Q1-B1-B2
gggattatactggtttggggtatgctagatatcatgcaagagatgtaaatggagactttcganggtgcgtggcagagaatggagtgctccataatgccgtaaggtcatgtgtaaaggattctgatttcaagacaacaatctagcggtgggngttaagttcaatgaggttgagagcaaagtctaagtcgagggctgaggagaggcggagagcgagagaaccatcagctgctcaagggcatggtgcgagaggggagcttaggggtggcagtagcatatatgcagagttggtggttg

SEQ ID NO: 2641 - DNA, 162 bp, Glycine max
  unsure at all n locations
  Clone ID: LIB3028-022-Q1-B1-B3
ggaagttcatgaataagccagtgagaatcctggtagagcgtgatgaactgagcctgnagggtataaagcagttttatgtcagtggtggcaangaagacggggagctggagacattatgtgacctttgtgagactctggctagcacgcagagtgtcatttttg

SEQ ID NO: 2642 - DNA, 218 bp, Glycine max
  Clone ID: LIB3028-022-Q1-B1-B5
atcggcttaatgcgtagtttccctcgccggggatcggtcgaggacggggcggcttcgcggcggcgacgctccatcggcgcgcgaggcgggcatttggggatctgtggacgccgacgactttgcggacgtctttggtgggcggggggcaactctccttgcgtggagggggcgcgagtccggggcggggggcaggggggtgtggggggggcgcggagttt

SEQ ID NO: 2643 - DNA, 294 bp, Glycine max
  unsure at all n locations
  Clone ID: LIB3028-022-Q1-B1-B6
gtcgtgtctactgtgacccttgccgtgctgggtttgagacctcagcggcgagctacattgctggtgctgagattagggtgcgatgcaagagcagggttggcaacgaggttgtgtacacgaagaaggggtacaccgactcaagcgggncatacacaatgtacgtgcgaggaggatcacgcagatcaggtgtgcgcggggaggcgtgggggcagccctcacccggaatgcagggaggtcagcccacgccgcggaggagccgtggggattctcacccgctacaacggaattgcctcc

SEQ ID NO: 2644 - DNA, 160 bp, Glycine max
  Clone ID: LIB3028-022-Q1-B1-B7
gtcgaagttctctgtttcctttcggtctcaggtcaatgggaaggtgggggggcagggtcccatcatggggtttgtgggtgtggacgagagatcacagtacgggtttgccagtctaatgaaaaaagttggagtttttgattggggggggtacctggttcca

SEQ ID NO: 2645 - DNA, 361 bp, Glycine max
  Clone ID: LIB3028-022-Q1-B1-B9
catcaagctccgctccaacacaggggaaaatgagggagatccttcacgtgcagggagggcaatgcgggaaccagatcggttccaagttctgggaagtggtgtgcgacgagcacggcatagatccgacggggaagtacgtcggaaactcagatctgcaactcgagcgcgtgaacgtctactacaatgaagcctcgtgcgggcgcttcgtgccacgcgcggtgctgatggacctggagcccggaaccatggacagcgtgcggaccgggccgtacgggcagatcttccgccccgacaacttcgtgttcgggcagtccggcgccggcaacaactgggctaaggggcactacaccgggggcgccga

SEQ ID NO: 2646 - DNA, 229 bp, Glycine max
  Clone ID: LIB3028-022-Q1-B1-C1
tgggaagaagattttgattcagaagtatcgtctgcatggcggagttgagtgatggactgtgagaagagactgttttattggagcggagtgtagtaatgattgaatgggctcccgtatattcaagagagacatttcctgcaagtgtggggaatttttagttttaaggtggaagatttcgtaaggtaggaggtttggagggagcggcgggcggtttgaaaacgggtgtcac

SEQ ID NO: 2647 - DNA, 391 bp, Glycine max
  Clone ID: LIB3028-022-Q1-B1-C10
gaactcatgaccaagattgacaggcgatacggcaaagagcttgagaaagagcccaagtttttgaagaacggtgatgctggttttgttaagatgattccaagcaaacccatggttgttgaaactttctccgagtatcctccacttggtaagtttgctgttacggacatgcgtcaaactgttgctgtgggagtcatcaagaacgttgagaagaaggatcctaccggagccaaagtcaccaaggctgcccagaagaagaagtgaatcgtgcgggctggttcatcaagggatgttggttacaataaatgttggtttcttttctgtactcttgtgtcgtcttttctaggtagcttgtttttcggacaaagtttgaagtctccagcatcatctcgca

SEQ ID NO: 2648 - DNA, 394 bp, Glycine max
  Clone ID: LIB3028-022-Q1-B1-C11
ctgagagggtcagccatgacccaaaccctctcattctctctctcaccttcccagaaaaccctagaaattaattaaaaccatccaatcttcttttctccatttccccgatttttttttttcatttctatttcaatcgcaacctcctcctccttccaagtcaacgcggatttcagaattctcgatccatgtcgtccgagatcgaggttgtcgaggaggtgcagtcccgcgacgagcaatcgggggcggaggagagcctccgtaatgacgtgtacacggcggcggcttacggggatttggagaggctgcagagattggtggagcaagagggttgccccgtctccgagcccgacggtttgggctactacgcgcttcagtgggccgcacttaacaaccg

SEQ ID NO: 2649 - DNA, 373 bp, Glycine max
  Clone ID: LIB3028-022-Q1-B1-C12
gcttgatgctgcaaacaaagctgtgtccaagattggagagcacatgtcaggtggttctagtggcggttcctcagctggtggttctcagggtggggatcaggctcctgaggcagaatatgaggaggtgaagaagtaagtcggggaggagtttgtatccactttttactgatttatttgtctagatcacaagttagagatgaatcatcttttttcatttagcatataatataaggttttttgtactaaaagatggagttcattttttaccttaaggccttttaaacttgtagtacttctggagaaccaaattatgcctgtttgaataacgatattcaaaattttgcctagtgactagtgacacattttttactct

SEQ ID NO: 2650 - DNA, 161 bp, Glycine max
  Clone ID: LIB3028-022-Q1-B1-C3
cccaattcacctgaaccctgcgcactacggcagtgggattattagagatggcagagaaaagggcacggcttgctttaagtggcgggggcatgagcaatgtgagatgacgggtttggatcctgagtagaatacgttgttcaaggggggcgtggtgtgcactg

SEQ ID NO: 2651 - DNA, 161 bp, Glycine max
  Clone ID: LIB3028-022-Q1-B1-C4
agagaaagctatggtcgagtctagattcagggaacgtctcctccactccaggtgggttttgaaaaagaagtgggtgtttgggaggctggatgattttagcaagaagcaacttccacataatgtgacgtggggcttgagcttgagaggggccatggaacaca

SEQ ID NO: 2652 - DNA, 159 bp, Glycine max
  Clone ID: LIB3028-022-Q1-B1-C5
gagagttgtgaagaaggcacagaagaatgtttgataagaaggactggagctgcacaggtcgattatatctacactcagcagcagaaacccaaacgttagtggcatcatcgcaggaccttcttcggggaccaaatataagtggagagtatataaatcaat

SEQ ID NO: 2653 - DNA, 300 bp, Glycine max
  Clone ID: LIB3028-022-Q1-B1-C6
tgacggaggagcagtttgccaaatagtttcagacgtgtgacactacaagattggagtaggtgctgcagcttgaccagtgtggaaggtgtataccggatgatgcattacttggtactttgagacagtcaccaaggtggttgcgagagttaattacactgtccgcgcagtggtgcgtgccgtctgtcagggaaggggggggatgtgcgagcttcttctgccccagcactgaggtgcaggaatctaggccagtgctcccttcgcgcatctgccagtattaatattttggctgattcagtggga

SEQ ID NO: 2654 - DNA, 135 bp, Glycine max
  Clone ID: LIB3028-022-Q1-B1-C7
ctcgagccgaagcggctcgagaaggaacaaagcttctagttcattggcgtgcgcaccgtttcgccctcggccgtttgggcggtcgcatgccgactgttcggtaaccccccaacaaaactcaaagccttttttgtt

SEQ ID NO: 2655 - DNA, 362 bp, Glycine max
  Clone ID: LIB3028-022-Q1-B1-C9
tgctgccataacagtgggtgattttgacaccatggattgcacacagcacttactctttcctagtgagtgatgcaaaggagagggaccttggttacttcctcatcttcccttatatgatggtgaggatgctgcatgaccaagttcggatcacactctctcgccatcgaactgccaaaggcaaaaacagaattgttgacaagggcattgagtttgaacaagttgatcgagaaagcaattgggatgaccagatcttgttcaatgggatcatattttatataggttatatgttagttccagagagttctcacatgcccttgtggagaacagatggtgtacttatcactgctcttttacatgctgga

SEQ ID NO: 2656 - DNA, 280 bp, Glycine max
  Clone ID: LIB3028-022-Q1-B1-D1
gaaatattctacaacttataacgaatgaggattttgtcagcgtttatcagccggggtttaaggaatcatggagggccaagagttagaagagcaagcttctttgcgaattcgcatgatccagcaaaaggtgcatcaatggtttacaggccgattaatgagttattagcaggaggaaacccaacaatcgagagggagacggagatgggagaaatcatggcacaggattttgctaagggggttgaagagaagtcgggcttgagagcgttcaggttgtgaaatg

SEQ ID NO: 2657 - DNA, 393 bp, Glycine max
  Clone ID: LIB3028-022-Q1-B1-D10
ggataactgaaggtgatcatcattttagatattattataagaagttcatcaaataattgatcagaaatattcgatggggagctttgaaactgagctgaatcttaaggccacagagttgaggttgggattacccggctgtgatgaaactcatgacaaaagttcatccagtagtggatctgttgttagaagcaacaagagatcttcaccagaacccagtgtggaagagtccaggtgcaactctaatggttcttcagattctaccaccacaagtgatcatgatgaagacagtgtccaacctgcaaaggtacaagtagtggggtggccaccaattagatcttttaggaagaacagtctgcaacaacagaagaaggtggagcagcagggtgatggaag

SEQ ID NO: 2658 - DNA, 398 bp, Glycine max
  Clone ID: LIB3028-022-Q1-B1-B11
gagagattgagaagagaaagcgttccaaaatgttcacgctatctcgcgtgttcgctctcacttccccttccaggcataagctcttggaagtgctgtcctctacgaaagttgaagtcggagaccgtctgcgccaagaggggcgcgattttacctattcagctgccatttctacggctacatataactatgctgccaaaggacacgcttccgatcgaatatttgcgccctatactgtttacaatggcaaagctgcagtctcgttgattccttgtcctcaaactttcactaagttggattctgggaaggttgtagttgatcgacgcggttcaatcatgaagtctttcatgcattccattggagagcgcagatatgactgggatacaagacacaaatttgct

SEQ ID NO: 2659 - DNA, 395 bp, Glycine max
  Clone ID: LIB3028-022-Q1-B1-D12
aatatgaaaaacgccaagaaatggctgcagctgctttggcatataaatgcttggaggtggtatacatgagactggtttactgtaaacattctagcataaacagggatcggcatgagttgcaatcaactctacaaatggtttctcaaggtgaatctccttcgtcttctgcatctgatattgataatttaaataacctggcggtagcggacaaggctactttgacaaggggttctaatactcatgttcctagcaatcaagtcatatctgctcggaatcgcccaaatattgtcaggcttcttgattttactcaagacataaatcttgcaatggaggcttctagaaaatgcaagaccacttacatggctgctagtttgaacatggaagattcatggaat

SEQ ID NO: 2660 - DNA, 163 bp, Glycine max
  Clone ID: LIB3028-022-Q1-B1-D3
tggtgttgctctcacgactaatggaagtgctcaagagaagcctgggagggctctgtctaggaggaaactgggaattcagggagggggagcagtaccagcccgctgaactctttgaagcaacaatggggcaagtgagagaaggcgcagggtctttcacatctct

SEQ ID NO: 2661 - DNA, 161 bp, Glycine max
  Clone ID: LIB3028-022-Q1-B1-D4
gggaatttggccaaggggatgtcaattgttgcatcacgagctacaagattgccgagatatgcttcagttgcgagagaaggggatctaagtgacctattggctggaggggaggctatttcaactctcgttaatgttgttggtgttgggagtggaattcaatt

SEQ ID NO: 2662 - DNA, 340 bp, Glycine max
  Clone ID: LIB3028-021-Q1-B1-H1
aagaaatccaatgggtcctctgaatccgaatcacgtatttcgaatgccatgtctcctcctcaaatagataaggaaacttcaacccatcctcagatcagtagtaacttggagcagaatgagtcacctcggtttaataagctggaccaggaatccgcctcacctcctcggtgtgatgtgcaagagcttaaaactacgttacctcctcaacttgataagccggattctactagtttggtttgctttgaggacaagctacctgaatcgaagttacaagccgcaaaaagaaactcttccagaaaatattctccaattcactatagggatgcttcagttgaagatg

SEQ ID NO: 2663 - DNA, 398 bp, Glycine max
  Clone ID: LIB3028-021-Q1-B1-H10
gtcaagtttttatgacttgcctgtctttaaggatttagttcaggactgtgttgctttgctggcatatgaacgggctctggaatcctccgtaagttatcttctaaaagactcgcagcgtgaagttgtagctgacacagtaaatgccatgatattgtccgcaaatcctaatatgaaagattcaaaacattgcttgcactcctatcttgagaggttacttagacagcttactgcttgctgcttagagaggcgatccctgaatggagagcagggagaagctttccaacttcagagagtgcttagcagtagtagaagaggctagtgctaggtgatatgtctattgatcttcttacgccgctgtttatattgccccaggatttgtaacattgccaagtgcaaaa

SEQ ID NO: 2664 - DNA, 320 bp, Glycine max
  Clone ID: LIB3028-021-Q1-B1-H11
ctctgttccaaaaccctaatccttcgtcatcgaatgagatggctgattctcccctcgcaaggaactcaaagtcaccttccccatggaaagctcagtccagatcgagatctacgtcaaggtcgatatctacgtcgaagtctaagcctagacaaatgtcaagatcgcgttctataagtcatggcaagtcaaggtcaccaactcatcgaaagtcaatgtcaacaattcatagaacgtctgaacctacagatccttgtgacacactttaagtaactggtctatcttcgacggtcaccaatagagacctataggagcatttctcc

SEQ ID NO: 2665 - DNA, 357 bp, Glycine max
  Clone ID: LIB3028-021-Q1-B1-H12
ggttagggttttctctcttcatcactctctgtgtcgctccgtttcaatggctcagcaagacgctcaaaacggcgggtcggagaatgccgctgctgctgctacggtgtcgtttgtcgctgtgaagccgcagctcctcgtcgaagctcccaaagccaacgacgccattctgttcttcaaggctgcgtttggcgctgaggaagttggccgtacgctcaaccctaagcgcaaagctgagcacgagctccctctcatactctccgcagaactcaaaatcgctggctccaccattctcgtcgccgacctcgttgatgacacttcttcgccagcgaaaacggggggaaacggtgtcgttttgtg

SEQ ID NO: 2666 - DNA, 367 bp, Glycine max
  Clone ID: LIB3028-021-Q1-B1-H3
tgtcacttttctttcttacctcttgggcatcactgtgactctgtgcatgcttgctgtgcttgaaattaaatggtctggcattgagctggaagaatggtggagaaatgagcagttttggctgattggagggaccagtgcccatctagctgcggtgcttcaaggtttgctcaaagtcatagcagggattgaaatatcattcaccttgacttcagaatctggtggtgatgatgtagatgatgagtttgctgatctctatattgtgaaatggacatcccttatgataccacctatcacaattatgatggttaacttaatagctatagcagttggagttagcagaaccatatacagtgtcatagcacagtgg

SEQ ID NO: 2667 - DNA, 361 bp, Glycine max
  Clone ID: LIB3028-021-Q1-B1-H5
gaagagtgccaccgaattacccaacttgggttttttggtgtcctttttaactgtggtgcaaaattgaaggctatctctttggtgagctgctacgggatcaaagatctgaacttggtgttgccaacagtatctccatgtgaatcacttcggtctttatctatcagtaattgccctggatttggcaatgcctcactctctgtattgggaaagctgtgccctcagcttcagcatgttgaattgagtggactcgatggagtgacagatgcagggcttcttccactccttgagagttccgaggctggtttggataaagtgaaccttaatggttgcacaaacgttaccaataaagtagtttcgtcct

SEQ ID NO: 2668 - DNA, 367 bp, Glycine max
  Clone ID: LIB3028-021-Q1-B1-H6
gcatcacataggataaacaatctgtgggctgaagtacagaagcagaaggaacttgagaaaactttgcaaaataggtatgggagtctaattgaagagctggaaaagatgcaaaatgtcatggaccaatgcagattacaagcacaacagcaagaagaaattaaagccaaccatgctcgtgagtcaactgagacccctgagaccaaggctgatggaattgatgtacagggtacagcaaattgtgaagctgtacctcactcggtagagcatggacgagctctagcagttgagtcatctgctgatggaactgctgaccagcaagtagatattgtgcatgaccaggctacttctagtgtcagtcatgacatgg

SEQ ID NO: 2669 - DNA, 385 bp, Glycine max
  Clone ID: LIB3028-021-Q1-B1-H7
aaaaataaaaataaaattacactgaactgagtagaggaatggtgtagtagtggagagaaatcgcgatctggaatagggtttagctgaaagatcgagttgaaatgggtttctttggtaccattttggggtttttgggatttggggttgggatttcgattggtctcgtgtctgggtactttctcttcatctacttccaacccaccaatgttgaggatcctgaaatcaagccattgtcggagcaagagcaagagactctgcaacgaatgtttccagagattcctctttggataaaaaatccggattttgatcggcttgattggctgaacaagtttgtagaatatatgtggccgtatcttgataaggcaatttgtaagactgcgaaaaa

SEQ ID NO: 2670 - DNA, 333 bp, Glycine max
  Clone ID: LIB3028-021-Q1-B1-H8
atcttgtcattcaccgagaaagtcgtactgattcctcttcatctttcgttaaagcgagtacttttcgttcttgatctgttggttacgatgtcgtattcaaggagatctaggtattctccttctccttctccttctccatacaagcgatacggtaggtctgtgtccaggtctctctcaatatcaagatccagaagccgttcaaggagtttatcaagagatgcagaaaatccatgaaacaatttgtatgtgacaggattgtctcctaggattaccaagagagaactggagaaacaatttgctggctaaagaaaagtgataaaagtccaaccggga

SEQ ID NO: 2671 - DNA, 396 bp, Glycine max
  Clone ID: LIB3028-021-Q1-B1-H9
tgaaatatctaacaaccttaaagatctgatacataaccttagttataaaaggttaaatattctccttttaaaaggtaatcactttatgggggatataccaaagcaactatgccagttgatagatttaaacatgctagacctttctcataacaatttctctggtgttatccccaaatgcttaggtaaaatgccttttgagaataagaacccgaaggacttgttagcaagattttctatctttgatccagatctccatatccatgccgctgctctgtcgccatcaaatgtgcaagagaaagtgaatttcactacaaaggaaagaactgacacttacatcgggagagtccttgtttatatgtctggaattgacttatctcacaataaactgaagggaaa

SEQ ID NO: 2672 - DNA, 362 bp, Glycine max
  Clone ID: LIB3028-022-Q1-B1-A11
cacttatccacctactttcatttgagccactcttctcagtccaaaacagtttctcgttttctcatctgaaaaatgaggagcatctttgtccttctccttgttctgggtttgtttaagtatgcatttgctgaagaagggttttgctctgctccttcggaatcgaaatcaaagcctctttattggaaagtggataaccccactctctcacctatccaccttcaagatttgcctggattcacacgcagtgtttataagagtaatcatgctttggtatcaccagaaagtcatgtatatggcccattgcctgattggatcgacacgtcaggcgcatatttaatttcaacagaaatgggttcacactt

SEQ ID NO: 2673 - DNA, 162 bp, Glycine max
  Clone ID: LIB3028-022-Q1-B1-A2
ctctgttccaaaaccctaatccttcgtcttccaaggagatggctgattctcgccgcgcaaggaactcaaggtcaccttccccatggaaagctcagtcgagatcgagatctaggtcaaggtcgagatcgaggtcgaggtctaggccgagacgaaggccaagat

SEQ ID NO: 2674 - DNA, 75 bp, Glycine max
  Clone ID: LIB3028-022-Q1-B1-A5
gtttgattgtcctagctttgaccacggtcatggtgatctccattcccgttgtgacacgcttttcttgtggttttc

SEQ ID NO: 2675 - DNA, 293 bp, Glycine max
  Clone ID: LIB3028-022-Q1-B1-A6
ctagcgtgcacacaaaataatggacaaaaaaccatgcgactcatctcatgatccagaggtgagaaagggaccatgggtgatggaagaagacttgatcttgataaactatattgcaaatcacggtgaaggtgtttggaattcgttaggcaaagcttctggtcttaagcgaaggggaaagaattgtcggctccgttggcgacagtaccttcgtcctgacgtgaggagaggaagcattacacccgaggaacagcttttgatcagagaacttcatgcaaagtggggcaatacgtggt

SEQ ID NO: 2676 - DNA, 137 bp, Glycine max
  Clone ID: LIB3028-022-Q1-B1-A7
cgaggttgcgttcaatgttcagggggtttctgtcgactgcttcattggggtggctgagttgcgaacagggtcagtgtgtggagcgtgcgaatgtgcttgagatgaaagagtagcagatctcactggcagtgcatcgg

SEQ ID NO: 2677 - DNA, 294 bp, Glycine max
  Clone ID: LIB3028-022-Q1-B1-A8
ggaggctctgaagatccacaatccaggcattgaatctttgttcaagaggcgcatggcagatgctggtgaagggtgcaggtccgtgcacctttctgacacacagtggtagtaagcgaagagggtttggcaaagtaagagttgcggcgggagactcagtttctcgctcggagaccattgcagatgacgaggatggagtggggggagggcgtccagatgcgacagcagagcagatcgggagggcatactagagggtgcatgagagcgtgccacccggatttgagtggaaatgatcct

SEQ ID NO: 2678 - DNA, 203 bp, Glycine max
  Clone ID: LIB3028-022-Q1-B1-A9
gcaagtggctcacacacgcacagatctgatctatctgaagctgaaaacgccgacgcccgacggtgatgatgaagatggggtcctcaccttcacgttgctccttcttcctattcctcctcctcctagtggcgctcttcccctcgtcgctctccgatatccggttctccgatatccgaaacgactatcgctctatcgttcccttc

SEQ ID NO: 2679 - DNA, 163 bp, Glycine max
  Clone ID: LIB3028-022-Q1-B1-B1
tccaagcttcctggcacactttgataagttttttgtgcagctccaatggcagcctctcaaatcacttcatcattgaggaacgtggctgcatttgaaaggtttgaaccttcaacgcttcgatttccttctgctgggcacgtcagtagtgggacactgacacaaa

SEQ ID NO: 2680 - DNA, 398 bp, Glycine max
  Clone ID: LIB3028-022-Q1-B1-B10
caacgaagtctcacagcacactcagatctctcttctctttcttcaattccattgttgtttggttcccttcactctcacaatgcgaatcctcgtcctgctctctctcgccacccttctcctcttctcctccttctctcccaccttctgcgaccacctcgccgacgacgaggacctcagcttcctcgacgagccctccgccgcgccggagcacgaccaccactacggcgccgatgactccaatttcggcgactttgaggacttcgaggaggacgacgcggaggcgtacaagcagcccgaggtggacgagaaggacgtcgtcgttttgaaggagaagaacttcaccgacgccgtcaagaacaaccgcttcgtcatggtcgagttctacgcgccctggtgcg

SEQ ID NO: 2681 - DNA, 394 bp, Glycine max
  unsure at all n locations
  Clone ID: LIB3028-021-Q1-B1-G9
tccctctaaattaggttttccctttcttcttcttcttcttcttattaccctaaccctaaccttagctattcgaattccactcctcttcgcgaaatcatggcgacgactttggtgagctccgcgggtgggatgcttgcgatgctggacacgctctctccaacctcaacaacttagttttttattatggtctattgtcgattctaaaatcctagctgatgaaactgatgacaacaattgatgtatattgtttcaggctacaccaaaactcagtgaggataaagtcaggcagtgtgttgatacaagactaggaggagaatacccacccaaagctgttgctaagtataaggtcagtctggccccgggggagcgggtgtattgaggtanatttacagct

SEQ ID NO: 2682 - DNA, 352 bp, Glycine max
  Clone ID: LIB3028-021-Q1-B1-F3
tcacttcctaaatagcgagcggacgctctctctctattattttacaacctttttcgcacctttgcgctcaattcaattgaattagtctaattgtaacaagtatggattcacaagtttgtgagacattgaccttcaaatagagtgatcaagggttgaaaatcataggcggtccacggatgacatcatttatcgataagccatcaccatctgatcaaagtggaaaggattgaattggacacaatgtttaagtcccttcaggcagaaattagaggaaccgagatgggtgattatccaggatcatgccccatatggtccgcaatattgatcagtgttccaattatggaagactgtg

SEQ ID NO: 2683 - DNA, 370 bp, Glycine max
  Clone ID: LIB3028-021-Q1-B1-F5
tcttactgcaagagaaagagaagagacaaggtctatggaaataatgttgagatccaagccatgtgtgaaatgtataatcgtccaattcacatatactcctacaccacagaacctatcaatatctttcatggaagctacaacactgacatgccaccaatacgattgagttatcatcatgggaatcattacaactcccttgttgatccacggcgcttgacaattggtgctgggcttgggttcagcagtcttcgtggaacaaatgttgacaaagatcaagtcaaggctgctattaaagctcaacaagacaaacagatcaataatgcactgttagccgagggtcggttttactctgatctcgagctcacagaaa

SEQ ID NO: 2684 - DNA, 370 bp, Glycine max
  Clone ID: LIB3028-021-Q1-B1-F6
caaacatttttccatgaaacttgcatctaccattattattctatcacatccatggccatagttgtgaagctacatgttgtcccagaatgtttgaaccaacagaaaacgaggtcgctcaggaggggatttggctcatgcccttcccctggggtgcttggttttggccattattgtgatcggttctctgtgaaagtgtgcagggcttttaggactgaggatggtggggatgtaaaggagaaaaagttacgaaatttgaagaaaaatgaagagaaaaccaaaagggaaagtgggttttggagttccctcaagtctatcttgttgaggaatttcatggtgggttcaaaatcagatgatgagtatcgccaagctg

SEQ ID NO: 2685 - DNA, 374 bp, Glycine max
  Clone ID: LIB3028-021-Q1-B1-F7
gttgtcttgtttatatggtgatggtaagccatacatggagctgagaaaaattgctggagggtttgatggtggttctctagttgccacgcttgattccaaaatcggtgaacagttgatgaagcaaaggccaatcttcagtgagatcaaagaggtaaacaatgctgtttctaaccttcttgttgcttctgatgaagtgagacatgatgcagccaaggaattgcagacaaagctgagtgtgttggagaagctatctgatgatataaggaaggaggtggataatctgtttgccaatgtaatgactcagagattcgaattaattgatggctttcggctacagaaacagccacaaaaataaagtgtctgaccatatatat

SEQ ID NO: 2686 - DNA, 395 bp, Glycine max
  Clone ID: LIB3028-021-Q1-B1-F8
ctgttcttgcgcgtgaacaagcctcaggtaagccaaaaccatggttaagcataacaatgttatcccaaacggacacttccgtaagcactggcagaactatgtgaagacttggttcaatcagccagcacggaagacaaggagacgattggctcgtcagaagaaagctgtgaagatattccccagacctacggctggacctctcaggcccattgtacatggtcaaactttgaaatacaacatgaaagtgagaggtggaaggggattttctcttgaagaactcaaggcagcagggattcccaaaaagcttgcaccaaccataggtattgctgttgatcatcgtcgcaagaaccgttctttggaaagtctgcaagctaatgtgcagaggctgaaaacat

SEQ ID NO: 2687 - DNA, 392 bp, Glycine max
  Clone ID: LIB3028-021-Q1-B1-F9
tctatctcttgtttcaatttcaacaacggttactcctttttcgttttgagtttcaatcaagccatcatcatgtctaccgcatcgcaacccaaggccaagaaaacggcgtcgtccaagaagcccctctcccaccctcccttcgccgtgatgatagcagaggcgattgcgagtctgaaagagagaaccggttcgagccaatacgcgataaccaaatacatcgaagggaagcacaaggagttgcctgcaacctacaagaagcttgtcctcgttcatctcaagaaatctgttgctgctggcaagcttgttaaggtgaaaaactcctttaagctcgcaccgactaagcctgctccggttaaggccgctgctcccaaaaagccaaccaaagctgccac

SEQ ID NO: 2688 - DNA, 390 bp, Glycine max
  Clone ID: LIB3028-021-Q1-B1-G10
gcaaaactcaaacgaatacgttttctctttctcttcaatttcacccttattagcatagcatattcatttccctttcttgaatcgttcttaactgcgagaggggatatcagagaagttgattgggctcccattaataacagatctgaatgatctgatggagtctaaaggtgggaagaagaagtcgtctagtagtaagtcctttttgtacgaagctcctctcgattacatcattgaagacgttcgaccacacggtggaatcaagaagttcagatctgctgcttactccaactgcatccgcaagccatcctgagattccctaggtcctgttaagacctaccccccttagtcctgcatctgctatatttttctagtctcttctcgtctcctttt

SEQ ID NO: 2689 - DNA, 383 bp, Glycine max
  Clone ID: LIB3028-021-Q1-B1-G11
gtttagtttcgaaccctttccttttccttccttctccgcctcaccaccctaacccaaccctctctctttctctctccaaaatctctctccctcccaccgttatttagggtttggcagatctcgatccgtcacaatggacgttcgcaagcgcggaaggcccgacgtcaaccttaacggcgccgttaagaagaccaagcaagaattggagtccttatcaagtggtgtaggaagcaaatcgaagccatgtaccaagtttttcagtactgctggctgcccatttggtgagggctgccacttcttacattatgttccaggtggttacaatgttgttgcccatatgatgaatttaaaacccgcggctcctctaccaagaaccgttgctg

SEQ ID NO: 2690 - DNA, 398 bp, Glycine max
  Clone ID: LIB3028-021-Q1-B1-G12
attgtggcgtcgtgggctgatggccggcacgagcctctctcacgtgatccaatcgacggtcctagaattgcccagaaccacccgccacgtcagaatctccgccaagagccaccgcgtctccgccacctctgaccaacgccccgcgggaccctgctgcatctacgttggccccctcgaaaccgctaacaaagagaacctcgaagccctttattgccaagcacgggatgcttattatagtggtcaacctctgatagtggatgacatgtttgatagagtagagttaaggctaagatggtttggttcaaagtcagttgtaaagtatcctcggtgcagtattaggaggcaatccacatttgctgatgctgaggaagatctgtctatggtttttgcattagcaa

SEQ ID NO: 2691 - DNA, 366 bp, Glycine max
  Clone ID: LIB3028-021-Q1-B1-G3
acgagaaaggagagcgatggagcggagcgatgacaaatctgacggagatggcctccaatctcgactctctccagaagcttctcctcaccaaagccgtcttcgtcgacgacgacaccttctccaaagcctccctcgccgccgaccaggcccgcaccatcaagctcctccagcaacgagtccagaccttggagagagaggtcgacgccgccatcaccaccgccgcccgcgctcgctccgagaagcgccaggccgaggctgctcagaaatccgccgaatcgcgcgctcatcagctcaccgccgaactcgaaaacaccacaaaggtgtttgagctgcacatggaagagctgcgagcgaaacaagaagaga

SEQ ID NO: 2692 - DNA, 381 bp, Glycine max
  Clone ID: LIB3028-021-Q1-B1-G4
gcagatcaggatgcaatgagcacaactttgctagcagaatggaatgttttaaatgcagtgctcccagggacacgtactagaaaaaatgagtttatcctagcaagaaaggctacattaattaatggagatgctgcaagatttctttattaatttctttgggatgttgaagacagtgtgaattctgaaaaggtggtttaaaatcccatgttacagagaagctagccagctgcatcccttaaggtctttctcagatttacctcaagagctacaacaatgttgttttggtgctttaaactactttctttagttttggcgttagagagttcatttattgtatggtgcgtggttttcttaaatgaatatgaatctcttttcttgtcg

SEQ ID NO: 2693 - DNA, 348 bp, Glycine max
  Clone ID: LIB3028-021-Q1-B1-G5
ggccaacgttgactacgagaagatagtgcgtgacacctgcaggaacatcggcttcgtctcaaatgatgtgggactggatgccgacaactgcaaggtcctcgtcaacattgagcagcagagccctgatattgctcagggtgtacacggccaccttaccaaaaaacctgaagaaattggtgctggtgaccagggtcacatgtttggctatgccactgatgaaacccctgaattgatgccattgagccatgttcttgcaacaaaactcggtgctcgtctcaccgacgttcgcacgaacggtacctgcccctggctgaggcctgatgggaagaccgatgttaccgttgagta

SEQ ID NO: 2694 - DNA, 391 bp, Glycine max
  Clone ID: LIB3028-021-Q1-B1-G6
ctccttcccttttttcatttccttttcgatttcaccatttgtttctgagacaccctttcttgaatcactgcaccctttttccctctctctcagaaaataaagtttttttttccaagtgaggatgttaaaatgaaaggaataatagcattgcacacgcttttgccatttcttctattttctgccattttaccactctctttctcagctcaaccccgcaacgccaagaagcccaaaaccccatattctgataataatcatcatcgcctttcctcctctgctgttttcaaacttcaaggaaatgtgtaccctcttgggcattacacagtgtctctcaacattggctatccccccaagctttatgaccttgacattgactcgggtagtgacctta

SEQ ID NO: 2695 - DNA, 324 bp, Glycine max
  Clone ID: LIB3028-021-Q1-B1-G7
atgggattcagttacatgcaagcgattgaggcttacagcatatttggggacgatgttgattcaatggtttgttacctgttagaaaccggcagtagcagcagacgtaaaggcaaggccactgaatgacatgccatcaagttaaataaatatctatatctatagtttttgaattgcaaccaaatcagttaaataaataaccctgtatcaagctacttactctgtagtttaatttggtatctggcatatttatgacggatatagaaagaaaaaactgagcaatgatacaattttatttggctaatgattgcaggtcattttatattc

SEQ ID NO: 2696 - DNA, 366 bp, Glycine max
  Clone ID: LIB3028-021-Q1-B1-G8
caaagcttccatcttaagtgaactgaaaaatgaggctgattttcatttgggggccttattaaggaaaggtggacttgaaagtttggagagcattgtgaggataaaggaggcagaagccagaatgtttcaaaccaaggcagatgaagcaagaagagaggcagaagggttccagaggatgatcaggacgaagactgcgcagatggaagaagagtacgccgaaaagctttccaaactctgtttgcatgagaccgaggaaacgcagaggaagaaattggatgaactgaaagtcttggaaaattcttattttgattactataagatgaaaaagagaatgcaagatgagattgatggtttgttgcggagaat

SEQ ID NO: 2697 - DNA, 386 bp, Glycine max
  Clone ID: LIB3028-021-Q1-B1-F2
attcttttatttcttgtctcacccgcaccatgcaagtgtgccaactactgtgattggtatggcgacacgtgtcccttttgttttgtgcgcagccaccacttctcccaaccactgccttaaatactgcgtggtggcaccgtcacttcctctaccggtttcttcctcctcattaagccgccactttctctctctttccttttcgtcttctttttcttcttcgttgggtttgttgccacttagtaagaaagagggtgtgaagagagtggggagaagatttggtgttgtggccatggcggagtctaagagtactgtgcttgttacgggagcgggtggtcgcacaggacaaatagtttacaaaaaattaagagagaggccaaaccaatatg

SEQ ID NO: 2698 - DNA, 347 bp, Glycine max
  Clone ID: LIB3028-021-Q1-B1-D7
attcaggattaaacaggagaagctcttctaggaatgggtgtggtaggggtaggcggcgatcacaggcacaggttaccccaactcctccccctcctcctgtggcaactgttgaaacaagcaccccacttattcagcagcttagtaacattgaagtggtgggattggaggatagaagcctagcaggttggggcaagacaaccagaaggccccgtaggcaaaggttcccggcaggtaatcctccgtcaatccggttaatctgatcactgtaagaggcttaaatttgtagatgagaatttatagagggtaagcacaaagtgggtccatttcaatattgatggaaaacacga

SEQ ID NO: 2699 - DNA, 352 bp, Glycine max
  Clone ID: LIB3028-021-Q1-B1-D8
cggctcgagaaagaagggtggcttaagtggctcaactccaaagcagagagctctgttttgtatgtgagttttgggagcatgaacaagttcccttactctcagctcgttgaaatagcacgtgcgcttgaagattcggggcatgattttatctgggtggtgaggaaaaacgatgggggtgaaggagataactttttggaggagtttgagaagagaatgaaggaaagtaacaaaggatatttaatatggggttgggccccacagttgttgatactggagaatcctgcgattggagggttggttactcactgtggttggaacacggtggtggaaagcgtgaacgcggggttgccga

SEQ ID NO: 2700 - DNA, 323 bp, Glycine max
  Clone ID: LIB3028-021-Q1-B1-D9
gaaagacacagccattgtttgtttactttccattgattgagcgaaagctttgttttttctgcgatcattttccattgggtggaagaaagtctcaacctttagtcgaaagagcaaggatctgagtgagtgagcgatcatgtgtggtggtgcgattatctccgacttcattccagcgggtcccgccggcggggcgcagcgcgtgaccgccgacatcctgtggccgaatttgaggaagcggttctcgaagtcgctgctggacgatgatttcgaggcagggttcagagaattcgaggatgactcggaaatcgaggatgtcgatgatg

SEQ ID NO: 2701 - DNA, 387 bp, Glycine max
  Clone ID: LIB3028-021-Q1-B1-E1
cacgttagcacaaactatcatggccacggcaacagcagctgccacctcgtcctttatggggacgcgtctcctggaggctcactccggagcggggcgagtgcacgcccgattcggcttcggcaagaaaaaggctcccgccccaaagaaagcctccaggggattgggccgagacaccgacagacccctttggtatccgggcgccaaagcgcccgaatacctcgatgggagtcctgtcggagactactggttcgatccgtttgggctaaggaagcccgcggactatctgcacttcgagctggactcgctggaccagaaccttgccaagaacgttgccggggacatcactggaaccaggacccaactccccgaactttagttccagccctt

SEQ ID NO: 2702 - DNA, 342 bp, Glycine max
  Clone ID: LIB3028-021-Q1-B1-E10
attctgaggcctgtgcggtgctctgagacgaggggccatagtttgggaccctttgaaccctaatctccacccaaacccattttcccgggaagttccctctgaaacgaagacgaaaatgcacaatcacaggctgaagcagcagcaacaagctctgatgcagcaagctcttctccaacaacagtctctctatcaccctggtctccttgctcctcctcagattgaaccaattccaagtggaaatctgcctcctggttctgatccaagtacatgccgcagtgtgtatgtccggaacatccatacgcatgtaactgagccgcttttgcaagaagtttttgcgggtac

SEQ ID NO: 2703 - DNA, 388 bp, Glycine max
  Clone ID: LIB3028-021-Q1-B1-E11
ggaggagtgacagtgtggaaggtcttctcttgtcttgctcgcgatcggagactttgaaaccctcccttccttctcctttcacctattcatcccaagcattcgacaatgtctccgttctcgaagctcttgtttctgatactgatggtgttcgtctcatccgcgatcgcctccgacgacgaaagagtgagcgaattggtgtccctgcaatcgagatccaaatcgggcctaatccggctgaacgaccaatccctggcccgcttcctcaccgccgtgaaaacccctcgcccttactccatcctcctcttcttcgacgcggcgcagctccacgacaagccggagctccgcctcacggagctccgcaacgaaatctccatcggctcctcctcct

SEQ ID NO: 2704 - DNA, 398 bp, Glycine max
  Clone ID: LIB3028-021-Q1-B1-E12
attgttgtttaggtacagaaaaatggcatcatctcagtcgaagaagagagttgacgctgtcgattctcgcgctgcttccgttctctttcgcgccaaagatggaagtgcttttgctcgatgcgacgactgcaagaagaatgtgccggttgcactcatcgacatgcacagttgcagccttgaagctaaaattaaaatgaacctagatgctcaagttgtggaacaggctgctgaagctaagaagccagagaggaagaagcccaaatccaaagagcctatggcaaaaaaggctaaagttgagaaggtgaagaaagtcaaggatcctaacatgcctaagcgtcctcccacagccttctttgccttcttggatgattttagaaaatctttcaaggaagctaatc

SEQ ID NO: 2705 - DNA, 165 bp, Glycine max
  Clone ID: LIB3028-021-Q1-B1-E2
caaattcactcagattctcccttcccctttttgatttttcttagaaaactcccaaattcgaatcaatatgaagaaagtggtgctaaacgtggaactccatgatgacctcatcaggaattagggcatgaaggcagtatccggtatttcacgggtagagtcagtccc

SEQ ID NO: 2706 - DNA, 365 bp, Glycine max
  Clone ID: LIB3028-021-Q1-B1-E3
gtgggtacccttgccttcataggaagtgagaaactaggctagttagtcccattggaatttttttttttgtggctgaagaaggtgaaaagggggcaagtttcactcttcaaggagtttgaagggtgtcaacttgtgttttgagactctgaggttgaagctgcattttttttaagggtggggatgggttctagttgtggttgtggtgtgacacttgttcttgttttctgcttatggggtgtgttgatctccctatcttctgctgctaagctcagtgcttcaaggcagaagcttgaggttgctaagcatttgaatcgcttgaacaagcctcctgttaagaccattcagagtccagatggggatacaat

SEQ ID NO: 2707 - DNA, 371 bp, Glycine max
  Clone ID: LIB3028-021-Q1-B1-E4
gcttctctaaattctctgtctacttcaccaagcacttttggttgcagctttgggtaatttccaatatggtgtttcctctccgatctatcgttgctttactcaatcttgcagtggtgtgaacgcatgcagaaaccttgctccctgaagtttactggaactcgaagcttcttaccactccagtgccgatagccattacagatatccttcacccatatttgggagaacacaaatagcacctctgtggacgtacgaaaggggggcgtaaaagttaaagcacggaaaagaaagccagtagggatatcagtgaacgtaggacaatgaggagtgaacgtgatcacaaggaatggaaatcccaacagaggcacatcaat

SEQ ID NO: 2708 - DNA, 360 bp, Glycine max
  Clone ID: LIB3028-021-Q1-B1-E5
gttcttcttctccttgtggccttcttccctctaacattccctgtggtttctctgaacatatttatataaaggttgtgctatagccttagaggctcatttggtttaatttgcctatgtcatatcatatgtactccttttttcatttcctctctcatttttggagtatttgatttgatgtgcatatatatacacacacattacaggtatatatatgcttagataatcaaaaaatatataccaagttttgtgtttggtttatatatatagttctctctttctctctctttcattcgtattcgtcttcttcatcttcatcgtttcatcttcttgtcacagtgtgttgattaattggtgtgactc

SEQ ID NO: 2709 - DNA, 384 bp, Glycine max
  Clone ID: LIB3028-021-Q1-B1-E6
ctccttcaccaccctcaggtggtggtggaagttacaatccaactccatcaactcccccaggtggtggaagctatgatccaaccccatcaccacccacagatggtggaagttacaatccaaccccatcaccaccctcaggcagcaactgtggcacaccaccacatgacccctctactccaacaccctcagtcccaacaacaccatcaaccccaacaacaccatcaaccccatcaacaccatcacaccctccctcaggaggaggtgggtactataactcaccaccaacttatggaggtggtagccccccaacaccaatcactgtgagcccaccttcaaccccaattgaccccggcacccccactatcccctccacaccccccttac

SEQ ID NO: 2710 - DNA, 304 bp, Glycine max
  Clone ID: LIB3028-021-Q1-B1-E7
aaagaacctgtgccgctgactcacccgattcgaagcaactcgtcaggtttaggagtcagaaattattttcatgcctcgctggttaatttacgtacaaggtgcatcctctgtacgtatgactgtgatatatatatatatatatcgtgtatgttgcaattgtaattaaagacactggtgtggcaacaattcagctaaatttgtgctcgatgtacgtttcatgtgttgattagatattaattaatgaaaaataatgttatttttgtgtgtttaaaacaatattttcttttggaagtggtagcccccc

SEQ ID NO: 2711 - DNA, 193 bp, Glycine max
  Clone ID: LIB3028-021-Q1-B1-E9
ttttccttcaagtaatgttgggcttgctctgcctagcatatgcataactgagtgagattgttattgaccttaccttagatttcttacttaagtaggaaaaggaagggaagagaaggctcccttgtttcacatgttagaagttcgacatgttgtaattggaacatctggcttatgaccatgttgtaccttcttg

SEQ ID NO: 2712 - DNA, 100 bp, Glycine max
  Clone ID: LIB3028-021-Q1-B1-F10
aaaaaacttatcttcattggtttgtgtttatgtagatttttgtatgcaagactagagcatataatcgtgtgatcaagctattttgtctctcttatgtatc

SEQ ID NO: 2713 - DNA, 314 bp, Glycine max
  Clone ID: LIB3028-021-Q1-B1-F11
agaatggattggatacttctattaatggggctgaggtgaagcatgtgatgaaagtgagcctggatgatgatagacatgattactattcaattgggacttatgatgagaagaatgttctgttcacaccagatgatgctaagaatgatgttggcgttggattgaggtatgactatgggatattctatgcatccaagacgttttatgatcagaataaggagaggagagttttgtggggttggattggggagtctgacagtgaatatgctgatgtggccaaaagttgggcttcaattcaaagtattcctaaaactgtg

SEQ ID NO: 2714 - DNA, 401 bp, Glycine max
  Clone ID: LIB3028-021-Q1-B1-F12
aaaaagggttgccttggacacttctcaccttgttttctgagttatgttaatttgaaagaagctacgtggcatcaagaatgggttcaggtgattggtttaagacaataattagctcaagaaaatcaaaagaaggaagatcaaagaaattaaagactaagatttatacaagaaaaaagtccaatggtttagcaaatggaatgaaaagcgaaaatctagagtcagatggggtatcagttgaaactattgctgcaacaaggatccaaacagcattccgagcttataaggctagaaaatatttacaccgcttgagaggattcacaaaactgaagatccagactcaaggttcctctgctaaaaaacaagccgttaccactataacttatcttcattcatggagcaag

SEQ ID NO: 2715 - DNA, 389 bp, Glycine max
  Clone ID: LIB3028-021-Q1-B1-D6
ggccaggcaagccccactcaaccaccacacctctcctcgttcacgctacccctttctgctcttcttctacctttcaagttttaaaagtataaagatggcagagacattcctatttacctcagagtcggtgaacgagggacaccctgacaagctctgcgaccaaatctccgatgctgtcctcgacgcttgcctcgagcaggacccagacagcacagttgcctgcgaaacatgcagcaaaaccaacttggtcatggtcttcggagaaatcacgaaccaagccaacgttgactacgacaagatagtgcgtgacacctgcaggaacatcggcttcgtctcagatgatgtgggactggatgccgacaactgcaaggtcctcgtcaacattgagc

SEQ ID NO: 2716 - DNA, 354 bp, Glycine max
  Clone ID: LIB3028-021-Q1-B1-B7
gagagagacaaaagcgtgaatcatgtcggacgaagagcatcacttcgattctcaggcggatgcgggagcgtccaagacgtatcctcagcaggctggtaccattcgcaagactggctacatcgtcatcaaatccaggccttgcaaggttgtagaggtctctacgtcaaagacaggcaagcatggacatgcaaagtgtcactttgttgcaattgatatttttaatgggaaaaagcttgaagatattgttccatcatcccacaactgtgatgttccacatgtgaatcgcactgactatcagcttattgatatctctgaagacggctttgtgagtctgttgactgataatggaaatac

SEQ ID NO: 2717 - DNA, 373 bp, Glycine max
  Clone ID: LIB3028-021-Q1-B1-B9
ataatgttggagcattaattatggaaccagttatccaaagtgctggtggaatgcatatggttgatccactttttcagcgtgtgcttgttaaagaatgtcggagtagaaaaattccagtaatctttgatgaggtttttactggcttttggcgtttgggagtagagactgcagtggagctaatccattgtgtaccagatatagcttgctttggtaagctgttgactggcggaattataccattggctgtcaccttggcaacaaatgctgtttttgattcaattattggagactcaaagctcacaacccttttgcatggacattcttactctgcacatgctatgggctgcgctgctgctgttaaatcaatccaatg

SEQ ID NO: 2718 - DNA, 333 bp, Glycine max
  Clone ID: LIB3028-021-Q1-B1-C1
gcagtgtgacatgttgaagacattttcacatgtagaaccaaatactaaaaatcaaatctgtattgaaaagcttacacccaatttgcagcacctgacactcggtgaaaatgaactgaagatgattccgcatggagaatttccaggaaacgtcttgcacaatttaaaagctcttattttgctgaacttcagcgttgagtcctatgaatttgcatatggatttctacaacaggtgcccaatattgagaagcttgaggtgtaatgtacttccttcaaggagattttctgcgttcaaagtcctaatgtggatgatactggactcctatcacagctgaa

SEQ ID NO: 2719 - DNA, 396 bp, Glycine max
  Clone ID: LIB3028-021-Q1-B1-C10
gtgatttttgcttaattactaaaccaaaccatttcttattccctcatcgaaaccttttctttctatatatttcccttttcaatatcatggcacctaacatcaccaccgttgttgccaatgccaccactgagcaattacccaaagctcatggaggaagtagtgggcgtgcctttgtgacttttcttgctggaaacggtgattatgtaaagggtgttgtgggtttggccaaaggactgagaaaggccaaaagcatgtaccctttggtggttgctgtgttaccagatgttcctgaagaacatcgtgcgattctcaaatcccaaggttgcattgtcagggagattgaacctgtgtaccctcctaagaaccagacccagttcgccatggcctattatgtca

SEQ ID NO: 2720 - DNA, 341 bp, Glycine max
  Clone ID: LIB3028-021-Q1-B1-C11
tgaggcaccgggtggaaaggggaatgattttcctggtcaaacagagagaaggaaagtgcagtggacagatacttgtggtagtgagcttgttgaaatacgggaatttgagcccagcgaagtggatgatgagtcagttgatgaatttgacaatgggaatctcaaaacttgttcctgtgctattatgtaaattggcattccaaaggatgacacagatccatttatgaggcgccaagttgttgattgctaacatattccatcactcagcttgaggaaaaggagcagatatttttcagtctagtggagatttatacaccatttcttgcctgagcgataatttgtgt

SEQ ID NO: 2721 - DNA, 363 bp, Glycine max
  Clone ID: LIB3028-021-Q1-B1-C12
cagacatacctacgtgggttcggtcagtgcgcgaagaagagaccgagtccggggatgatcctgcctcaggcaatgaagtatctgaagagaagcttcaggctcttttgaacattgcaatggcatgtgtttcactagtaccagagaacaggcctacaatgagagaggttttaaagatgattagagatgcaagaggggaggctcatgtctcatctaacagtagtgatcactcccctggtagatggtcagatactgttcaaagctttccaagggaagaacaccagagcatatgattggtaactttttttgacagcgtaatagttgaaactatgcattctgatttttcctgaattggttattgatatg

SEQ ID NO: 2722 - DNA, 360 bp, Glycine max
  Clone ID: LIB3028-021-Q1-B1-C2
gtttttcaccgattgggtcaacccgacggatcttgattcagtttccgaatttgggtcgggttgccaaacccaagggatggtgaattatgattgtaatgacttatttgtcccttctgtgccgcccttcggccacagccatgtaaactacatggtgggggcaccaccgtccgaggaggaggttcaaagcggtgtgaggactcaacaggccgatggggccgcatgttttcagcagaacccaaatgcccgattgttaccgggctcgggcgacccatttgggtttgggttcatcatgggtcagcaagttgagttcgggtttagggactgaacgatctgatagtgttgttctgtaaataattgggg

SEQ ID NO: 2723 - DNA, 351 bp, Glycine max
  Clone ID: LIB3028-021-Q1-B1-C3
caaaaaccatggtgtcaccaatctcacttattgtcctcttgttatcagtttcttgagcagattcagcttcagttcaagaaagttttgtccaatgtctcaacttgaattcggacaaaacatttccattttactcatcaatctacactgcaagcaacccttcattcaccagcatccttgactcctccgcacagaacctaaggcttttggtgccttcagtgccaaaacccgagttcatattcacaccctctcgtgattcccatgttcaagcagcagtaatctgctccaagaaacttgggattcacattagagtgcgaagtggcggccatgactatgagggaatttcgtacgtct

SEQ ID NO: 2724 - DNA, 371 bp, Glycine max
  unsure at all n locations
  Clone ID: LIB3028-021-Q1-B1-C5
gaacaagtcctcaagtttccaccacctcatgtcatcaaagttagtaagtctgcatggatgactgatgaagaatttggaagagagatgcttgctggtgttaatccatgcctaattgagtgccttcaagtgttccctccaaagagcaagctagatcccacagtgtatggtgatcaaactagtacaataaccaaagaacacttagagatcaaccttggtggactctctgtggaacaggcactgagtggtaacagattgttcatattagatcaccatgatgcattcatcgcatatctgaggaagatcaatgaccttcccactgcanagttctatgccacaaggaccatccttttcttgaaagatgatggcacctt

SEQ ID NO: 2725 - DNA, 364 bp, Glycine max
  Clone ID: LIB3028-021-Q1-B1-C7
gttcttcaattcattctagttctggattccgactagccgcgttgactcggttccgtttttcattctcgcggatctaatattaaggaatagcttaagggcacattacaatgaaggcattgattctggttgggggatttggaacaaggctgaggccactgacactcagtttccctaagcctcttgttgattttgctaacaagcctatgattttgcatcagatagaagcccttaaggccattggagtgactgaggtagtgctagccatcaattaccaaccagaggttatgttgaatttcttgaaggattttgaatcaaagctcggcatcaagatcacatgttctcaggaaactgaaccactgggaac

SEQ ID NO: 2726 - DNA, 222 bp, Glycine max
  Clone ID: LIB3028-021-Q1-B1-C9
gtaatatgatcgtgtttacgtgtaagttgcaacatgatatgaaattgtaaatatattaagaaaatattagaaccttgatctccttttgctcggtataattattcaaatgttgttattgtatgattcatagttgcatacaagattctggatcattgataggatctctttaccattaaaaattgaaatattgtttgtcaagatctagttaatgccttaatggtc

SEQ ID NO: 2727 - DNA, 294 bp, Glycine max
  Clone ID: LIB3028-021-Q1-B1-D1
aatctcttctcttcgctcctgcacttgttgtttctttgcccttcatggcatctcaggctagccttctccttcaaaagcagctcaaagatctttgcaaaaaccccgtcgacggcttctctgccggtttggtcgatgaaaccaacatttttgaatggagtgtcaccataattgggccgcccgatactctctacgaggggggatttttcaatgctattatgagtttcccatccaattacccaaatagtccaccttcagtgaagttcaactcagagatatgggaccccaatgtatatc

SEQ ID NO: 2728 - DNA, 394 bp, Glycine max
  Clone ID: LIB3028-021-Q1-B1-D10
ccttatttaaacacatagcttctgtacttcggaaatgacaataattgcaaacacaaattctagtcatatcatatatccttcaacctctcatcattaggcattcagcaagcaagaggaaaaaatgggcaaaatgggcaaaattatgcttgttttgggtagcctcattggattatgctgtttttcaatcaatacctatgccttctcaccttctggatggaccaatgcccatgccactttttacgggggtagtgatgcttcaggaactatggggggagcttgtgggtatgggaatctgtatgcaactgggtatggaactagaactgcagctttaagcactgccttatttaatgatggagcttcctgtggtcagtgctacaaaattatatgtgattac

SEQ ID NO: 2729 - DNA, 375 bp, Glycine max
  Clone ID: LIB3028-021-Q1-B1-D11
gttgagaactaagaaggagaagcaaatggcttcctcaatgatctcttccccagctgttaccactgtcaaccgtgccggtgccggcatggttgctccattcactggcctcaagtccatggctggcttccccaccaggaagaccaacaatgacattacctccattgctagcaacggtggaagagtgcaatgcatgcaggtgtggccaccagttggcaagaagaagtttgagactctttcctacctgccagaccttgatgatgcacaattggcaaaggaagtagaataccttcttacgaagggatggattccttgcttggaattcgagttggagcacggtttcgtgtaacgtgagcacaacaggtcaccaagatacta

SEQ ID NO: 2730 - DNA, 387 bp, Glycine max
  Clone ID: LIB3028-021-Q1-B1-D12
tttggtaatgtgattgaagggtagttcaagtctgttacgctgtgagacccttaaccattactcgcacagtcacaaatgttggaccaccagccacatacactgcaaatgtccactcgcctgctggatataccattgtcgttgtgccaagatccttgactttcacgaaaattggggaaaagaagaaattccaagttattgtgcaggcaagcagtgtaactacgcggagaaagtatcaattcggggatttgcgttggacagatggaaagcatatagtaaggagtcctattacagttaagcgcagatgaaaattccccaatggatttggtttttttgtattgtgtggatgcatgtttagatataagctagttagactctatatatatacct

SEQ ID NO: 2731 - DNA, 152 bp, Glycine max
  Clone ID: LIB3028-021-Q1-B1-D3
gttttcttcagaaatttgccatcgttgagagaagcgtgagagccttagtcgttcaagatgagagctaagtggaagaagaagcgcatgaggaggttgaccaggaagcgccgaaagatgacaccgagatctaagtaggtgcttgagcaggagtt

SEQ ID NO: 2732 - DNA, 343 bp, Glycine max
  Clone ID: LIB3028-021-Q1-B1-D4
ctcaatttgtatgccaatgtccgaccttgcaacagtcttcgacgctacatgactcgaaatgataatgtcaatcgaaatacaattcgtgaaaatagggaatgcgagtacagtgggcttgaacatcacgttgtgaaaggtgttgtataaagtctcaaaatcattacacgtcaagcaagtttaaaggtatctgagtaagcctttcactatgccaaggctcatggcaaagagagggtttctgccatacacatagccaatattatgcaaaagactgatggccatttccacaagtgttgccgttaggttgcagagaaatatcctgacattacttatgaagaagttgtca

SEQ ID NO: 2733 - DNA, 395 bp, Glycine max
  Clone ID: LIB3028-021-Q1-B1-B6
ctgccattccagctgccatcattgccgagtgctatggctttggaagaccttggatttttatattgagcttacttggacttacaccacttgctgaacgtgtgagcttcatcacagaacaagttgccttttacactggtcccacagtcggaggacttctgaatgctacatgtgggaatgttactgagctcataatagcaatatttgcccttagcagtaacaaaattgctgtggtcaagtattctctgttgggttctattctttcaaaccttcttctggttcttgggacctctctattatgtggtggcattgcaaaccttaaagtggaacagaaatatgacagaagacaagcagatgtgaactcacttatgctgttggtgggattgttgtgctacctg

SEQ ID NO: 2734 - DNA, 391 bp, Glycine max
  Clone ID: LIB3028-020-Q1-B1-H6
aaaaaaactatggctagattctgctggagaccagctgcggtgggtgatgatggagatgtgaatggtccacttgaacggctgctatggtacaaggatttggggaaccatccttatggggatttctcaatggctgtgattcaagctaatagttcattggatgatcgtagacaacttgaatctggaccattgacttcggactatttgggtcctcaaggaaccttcataggtgtatatgatggtcatggtggcaccgcagcctcgcaatttgtcagtgacaatcgtttctgcaatttcaagaattttgcaggtgaacatcaaagcatatcggagaatgttatacaaaaagccttttcagcaacagaagagggttttctgtccgttgtgaagaaac

SEQ ID NO: 2735 - DNA, 375 bp, Glycine max
  Clone ID: LIB3028-020-Q1-B1-H8
caccaagcggtggctgtccgttccggcgccgaccagtcggtgttctaccggtgcagctttaagggttaccaagacaccttatacgtttacgccaaccgtcaattctaccgtgactgtgacatatacggaaccatagacttcattttcggtgacgcagtgacggtgcttcaaaactgcaacatctatgtgaggaaaccgatgagcaaccagctgaacacggtgacggcacaaggaagaaccgaccctaacgagaacacagggataatcatccataactgtcgtataactgcagctggggatttgaaagcagtgcagggctctttcagaacctttctaggtcgcccatggcaaaagtactcaaagactgttttcatg

SEQ ID NO: 2736 - DNA, 401 bp, Glycine max
  Clone ID: LIB3028-020-Q1-B1-H9
ctcagagaaccaaaagcaagtttgtctttgctggaccttctaaatcagctgagacccttttgagatacattgctgcggagcaacttccggtcaagtatgggggactaagcaaagatggcgagttcggaatttccgatgctgttacagaaattacagtgaggccagcagcaaaacatacggtagagtttccagttactgaggtgggtttggtcttttcctttgtgtttttttgtcggaattgattgatctcgattgaggtagaattcaatgaatgcagcatagaaatgcggagtctttcctaggattcctctgtcctcaagattttaatattatccttttcgttctttacttatttctcccgtttcatgcgacaaattagggcaaacccatgccccgagatg

SEQ ID NO: 2737 - DNA, 333 bp, Glycine max
  Clone ID: LIB3028-021-Q1-B1-A2
aaaatactgcaggagttctccaagctctttggcgcgtttaatactgcggattttataccctatctcgggtgcgtggatccacaaggtttgaactcgagactcgctagggcacgtggcgcgctcgatagcttcactgatcagatcatcgatgagcacgtgcataagatgaagaatgatcagagcagtgaaattgtcgatggagaaactgacatggtcgatgagttgctggcgtcctacagcgaggaggcgaacttgcacaattcatcggacgatttgcacaactctctcagactcactaacgataagatcaaggctatcaatatggacctgatg

SEQ ID NO: 2738 - DNA, 358 bp, Glycine max
  unsure at all n locations
  Clone ID: LIB3028-021-Q1-B1-A5
atgcgatgtggtgagtgaattgcagagtcggcaatggtatgtgtatgagcgtagtcacacttgaattgaattgaagctctgttccttcatgtgacgacaatctccaacgtcatctgagctctcgtatattccccagccatggccgaaaaggtcaccataatgaggctcaaggttgatcttcagtgccacaaatgctacaagaaggtcaagaagattctctgcaaattccctcaaatccgagaccaggtgtacgacgagaagaataacatcgtgaccatcgcggtggtttgctgtaaccctgagaagctcagggacaaaatttgctgcanaggttgtggtacgatcannagcattgaaa

SEQ ID NO: 2739 - DNA, 394 bp, Glycine max
  unsure at all n locations
  Clone ID: LIB3028-021-Q1-B1-A6
ctttagagtaatgggttctttccagacaggatttggagggggagtgggatcagcttttccttcagcagcaaccttccctcattacgccatccagcaagggataccttataatgtttatgggtactctccttactcgccggattacacttaccctacgagctactatggtgtgtatggaggagcaacagcacagtacccagtttatggaagtggacctgctgcagctgcaggagggatgatgagcggtggtgcagcgttctacccatatctgcagtacggaggagaagggagtggcggcggcggtacttccggacagggttatggtgtgaactaccctcctcaggctcatctttttcagtattctcncattgcttccaccgctggctatgcccag

SEQ ID NO: 2740 - DNA, 385 bp, Glycine max
  Clone ID: LIB3028-021-Q1-B1-A8
cacggttggattgttagttgctaaggctctcacttcctcggcaaacccgtattatcagggaatttctcccggtagcaccccagtgctcgcattggatgtatttttggtgcaggcttcagcgaacactattctttctcatttccttgggcttgttttctcactggagttgctgcgatcagtcacattaccaccttcagatgcaactccatttcccaaatttgcgtaatatgtgcctcgagactagataatgaaatcacacacccaaaaattgtccctcgtctcttgtggttatttgcttaattaattgtgttcagctttttgatacagcgttttgaggccctcttcctaggcaattgacctcatcgtgtaattccaatttttaaag

SEQ ID NO: 2741 - DNA, 357 bp, Glycine max
  Clone ID: LIB3028-021-Q1-B1-B1
ctgagacctgataaagattccatcttgccacttgggtatgtcccattctgaaattttcccccaatccccaatagcatgtgctttgttacattagtatcaatcaagtacaggaccaaaccaatttagttgaagcatattgataaatatagctctagccctcaaaagcaactgggcaagcctgttttggacgttgaggcatatgacttcgtcagcaccacctataagttgttgtccaatgaacactgctggtacagttgggcggcaaccaacctgaatcagtgccctctctatttgctgaccatttgtcattttgtcaatctcgataaccgtatggttggcaccaaagctgcatatgag

SEQ ID NO: 2742 - DNA, 135 bp, Glycine max
  Clone ID: LIB3028-021-Q1-B1-B12
agaatttgttataatactagctagtactggtattttagcatgttcctgcaaaacagcgacagagattgcaaaattggtaattacaagtccaagccaattagtattcaaaagagtttggtatactcatttctaact

SEQ ID NO: 2743 - DNA, 369 bp, Glycine max
  Clone ID: LIB3028-021-Q1-B1-B2
ggcttcttcaccttcctcagaaaacaaaaacctagagggagtagctggtggtgccggagagaaacccattccacttggtgagaacgttctgcagaagcatgctgcattctttgacttgaataaagatggtgtcatctacccatgggagacttttaaagggttgcgtgaaatcgggactggggttttgctgtccgttggaggtgctattttcatcaatgtgtttctcagtcagagtactcgtcccggaaagtttccatctatactttttccaattgaaattaaaaatatccaacgcggcaaacacggcagtgacactggagtctacgatactgaatgaaggtttgtaccttcaaaatttgaagaaatttt

SEQ ID NO: 2744 - DNA, 99 bp, Glycine max
  Clone ID: LIB3028-021-Q1-B1-B4
gaacattgttttaggggagggtattgatgttccaactaacacaaagacatgcgcaatgtaccaaaacaaaaaaagagaaacaagagtttttttttgtcc

SEQ ID NO: 2745 - DNA, 395 bp, Glycine max
  Clone ID: LIB3028-021-Q1-B1-B5
ctccggaatccccgccgtctcccttggtccctctcccggcccttctctctccgccaccggcaaccgcctctctgacttcgccaggctcctcgacttgaacttcgtgttcacgcccattctcactcccattcaccagctcgaccacaacagcttctgcattgacccaaacgaggtcttggccgttaacttcatgcttcagttgtataacctcttggacgagcctccctccgcggttgacactgcgctcaggttggccaagtctctcaaccctagaattgtcacccttggcgagtatgaagcaagtgtcacacgtgtcggggtttgtcaaccggttcaggactgcgttcaagtacttctctgcggtgtttgagtctctggagcctaatttggccgcg

SEQ ID NO: 2746 - DNA, 376 bp, Glycine max
  Clone ID: LIB3028-020-Q1-B1-H5
cttcgtctcaaatctcttcgttccttcgattcgttccatttcttccaaaatggccaaagacccagttcgcgttctcgtcactggagctgcagggcaaattgggtatgctcttgtccctatgattgctatgggagtgatgttgggtcctgaccagcccgtgatcctccacatgcttgacattcctccggcagcagagtcattgaatggggttaaaatggaattggtggatgctgcattccctcttcttaaaggtgttgttgccacaactgatgtggttgaggcatgcactggggtcaatattgccgtgatggttggtggattcccaagaaaagaaggtatggagaggaacgatgtgatgactaagaacgtctccatt

SEQ ID NO: 2747 - DNA, 403 bp, Glycine max
  unsure at all n locations
  Clone ID: LIB3028-020-Q1-B1-F5
gtatttatttaattggcaaaagacggtgtttgggtttcacagacagacacacactcggttctgccttcacaaaaaaattatcgagatcccctttttctcctaagaaaagccatggctaagggtcccggtctctactctgacatcggcaagaaagccagggatctgctgttcaaggactaccacagtgaccagaagttcaccatcaccacctactcacccactggagttgctataacagcatcaggaaccaggaaaagtgaactgtttgtggctgatgtcaacacccagttgaagaacanaaacatcactactgatatcaaagttgatacagattctaatctcttcacaactatcactgttaatgaacctgctcctggtctgaaggctatttttaacttcaaag

SEQ ID NO: 2748 - DNA, 270 bp, Glycine max
  Clone ID: LIB3028-020-Q1-B1-F7
ggagacaacagatacatccttggttggctctgggtttaaggagggaaattgattcttgttctttgggaaggataaggaatcaatctgatcgctggaagagaggaagtatcaatagtaatggaaatggggatttccaagacgacaacataaacaagcactgaggttaccgagaacaattccaattccagtaggactagcagcatcagcactcagactgaaactgacagccatagctccgttgctgctccctaatccgtaagagaaaaaggc

SEQ ID NO: 2749 - DNA, 402 bp, Glycine max
  Clone ID: LIB3028-020-Q1-B1-F8
cacgttccgagttttctgatcgctcatagagagttcgacgcggcggttgcagaagaagattgcaagatgaagttcaacatcgcgagtcccaccactggatgccagaagaagctcgagatcgacgacgatcagaaactacgagcattttgggacaagaggatctcacaggaggtcagcggagatgcacttggtgaggaatttaagggctatgtcttcaaaattactggaggttgtgacaaacaaggattcccgatgaaacagggagtgcttactcctggtcgtgttcgacttttgcttcacaggggaactccttgcttccgtggatatggaaggcgtaatggagaacgtaggagaaagtctgttcgtgggtgcattgtcagcccagacctctctgttttgaac

SEQ ID NO: 2750 - DNA, 364 bp, Glycine max
  Clone ID: LIB3028-020-Q1-B1-G1
ggagacaacagatacatccttggttggctctgggtttaaggagggaaattgattcttgttctttgggaaggataaggaatcaatctgatcgctggaagagaggaagtagcaatagtaatggaaatggggatttccaagacgacaacaaaaacaagcactgaggttaccgacaacaattccaattccaatagcaatagcagcagcaccactcagactgaaactgacaaccatatctccgttgctgctccctacgccgtatgagaaaaggtcttagtctatcactctgattgtctttacgaagccaagctgaggcaagctgagtatcacaacactaaaggctggcacttcctcgttcattatcttg

SEQ ID NO: 2751 - DNA, 393 bp, Glycine max
  unsure at all n locations
  Clone ID: LIB3028-020-Q1-B1-G10
ggctaacagacggagtggctgtggaattgttcagttaccatgtagcttagccatgatgcccgaactgtcttcattctacactgattattgcaacaggtggcaatggatagaattggaagaaggtgaagaaaaattgggctcaataatatcttcaaaggcacaattgttttgtgccacgaattgcaatctatgtgatgattttttcttagcaggtttcaagaggtttgctcatgtangatatttaaatctatcggggaataatttcacaatccttcctgaattcttcaaagaactgcaatttttaagaactcttgacgtgagtgattgcgagcatcttcaagaaattagagggcttccaccaatcttagagtantttggtgcaagaaactgtgt

SEQ ID NO: 2752 - DNA, 400 bp, Glycine max
  Clone ID: LIB3028-020-Q1-B1-G12
gtccgtcgttttgctcaatacaaatggcttgcaacaagaggagtcaatgaagaagccatacttctttcactacctttggatcttcgtcgagaaattcaacatcacttgtgtctttctcttgtgcgccgtgtacccttcttctcacaaatggatgatcaacttcttgatgctatatgtgaacggcttgcgtcatcactgagcaccgaaggaacctacctatttcgagagggtgatccagtggatgaaatgttgtttatcattagaagtcaattggaaagctccacaaccaacggaaggaaggtctggattcttcaattccatctcactccggcctggtgacttttgtggggaagaattgttgacatggggcttaatgccaaactcaaacctcaacctacct

SEQ ID NO: 2753 - DNA, 93 bp, Glycine max
  Clone ID: LIB3028-020-Q1-B1-G2
ctttctccttactcctcgtccgaacctctcactacttcttcagtcctttaattcaaccctctcaccgacaccaacatcaacctcggttccttc

SEQ ID NO: 2754 - DNA, 316 bp, Glycine max
  Clone ID: LIB3028-020-Q1-B1-G8
atttgaaattgatacagagctgagagcatcaaggaatcgaagaatagaagattcatttttttttctttttgatatggaagctgatgtttctattatttttgttgcgttttcaaaaccctaaattggagaaatcccaatttccccttctgtctttctgctttggatgtttttcaaccaaaaaattgtgcttttcaaatcttttgctctgatgggtacttcaaatcttctcttgtttttccctctgatgaacctgtgtgctaaggcgggttccaaggtggtgcttaatgggaataatatcaatctcccctttgaagaa

SEQ ID NO: 2755 - DNA, 395 bp, Glycine max
  Clone ID: LIB3028-020-Q1-B1-G9
gctctagcttttctcgaaagcttcctttttgggctatatgttcacaaacaccatttcccctgaacacccaattcctgtctaaaacacacttctcaatatctatctctagaatggctaaccatgatgcaaaagaagaacaaaggccactcaaccaatggagaagaagcaaagggggattcatggcttccatgttcatttttgtcttgtcagcattggacaacatgggttttgtggcaaacatggtgagcatagtcctatacttttatggagtgatgcactttgatttggccagttcagccaacaccctcacaaacttcatggcttcaacctacctgctttcccttgttggaggcttcatctcagatacttacttgaacagatttacacatgcttgc

SEQ ID NO: 2756 - DNA, 318 bp, Glycine max
  Clone ID: LIB3028-020-Q1-B1-H1
aaaaagaggaagatactgctttggtcaacccattgctttgtatagtttccacactttttttcacctggttcaagtcaaagaaattattgtggtttgtgatccttcatacaaggacatttttgaagatgcaaagggagattaccaagcagaactcaaatttgcactgcctggaaaagaaagacaggattctgtttataatggctttcaggctgttgatcctaactctgaacttgtttgcattcatgattctgcaagacctttggtattatcagcagatgtgaaaaaggtccttaaagatggtttattgaatggagctgc

SEQ ID NO: 2757 - DNA, 361 bp, Glycine max
  Clone ID: LIB3028-020-Q1-B1-H12
tcgagcatatccaaatggccctttacattacactaataattggcctcctagtaaacaccctagtactctataaatagcatttgcatgcaccttagtcttcaccaaaatactcctcttggcatcttgtgttgtgtccctcttttaagctatttccttctcttaacacaattggttgtgccaattgccatagtcaccaaccaattaacaaaggtatatatatcatcatatcatcaccaaatgaaaaatattgggttgttttttcttgtggtggtggctacttttgtggtggcagccacagctggtagcttttaccaagactttgaaataacgtggggtggtgagcgtgccaaaatctatgaga

SEQ ID NO: 2758 - DNA, 407 bp, Glycine max
  unsure at all n locations
  Clone ID: LIB3028-020-Q1-B1-H3
ggtccaaggtgggaaattaaaattgtaaaatgagccaaagaaatttatttaagggtccaaaatcccaattaccaaggttccggaaattttttggcaaaccgatccaccccttgtttggattgatttaaccaaaccaattttaacaaagatttggaaaaagcagaagaacaaaacaagatgtggaagaaagacagaggaaggtgttgagagacagagccatgaaaggagaaacttggtttcctaagaattttagggtgtcctacggtaaagacacgtgggaatgggactgttcaccaactcataaatgggtccctgaggccccatcatagctcaataatttaatgttatgtactatgtactatgatgtccttaaatacagccaanacacagttaggctgttcaaaaat

SEQ ID NO: 2759 - DNA, 372 bp, Glycine max
  Clone ID: LIB3028-020-Q1-B1-H4
acgcttaactcgaaattcggttccgagaagcattctcaaaccttcttttgctcctcctctggtttgtgacttcatgttggtatcattggtttggccatagttgttccctggcctggccaggccactgactcttgagtcttgagccagttcctttttcgggttgttgaacattccggattttaaagcattgccttctaccagtcatattcttgtcacttctaaaaaatggaaaactcagatacaacactgacaagttcatccctgcctccaccacctccagtatctgcggaggagccagagcccaagaagttgaagatgttcaacacaacttctgatgatgaagaaacaggcaccaagaaaagatacaagcgc

SEQ ID NO: 2760 - DNA, 333 bp, Glycine max
  Clone ID: LIB3028-020-Q1-B1-D7
ggtcttgcggctctggccaaccacctatcagatttcccttcaaactcatcaagggaattaaagatgaatgtggttatccggggttttgtctatattgtactcaaaaacatgagactatgcttgctctctcctccgtaaaactccaagtcagttacataaactacgaaaatcatgaaattgtgttgaatgacccggaaaattgccttccgcacaagtttctgcaaatcaacgattctcttattcatccttacaaatttgacgatgaagctaaaacaagttagttgagcttcttcaactgttcttcagttgagcatcaacacctgagaaacttac

SEQ ID NO: 2761 - DNA, 368 bp, Glycine max
  Clone ID: LIB3028-020-Q1-B1-D8
gcaatttcgtcacatcaaaaatatccaatatgagtacggcaccggcagattggagaaccgctcgtcgttggaggcggacatagcggctgtgaagcccagccacgtgttcaacgccgcgggtgtcacgggtagacccaatgtggactggtgcgaatctcacaaagttgaaaccatccgaaccaacgtcgtcggcactctcaccctcgccgacgtctgccatcataaaggcctcatcctcatcaactacgccaccggctgcatcttcgagtacgattcttcccacactctcggatccggcatcgccttcaaggaacacgacactcccaatttcaccggatccttctactccaagaccaaagccatggtgg

SEQ ID NO: 2762 - DNA, 317 bp, Glycine max
  Clone ID: LIB3028-020-Q1-B1-E1
tgtaaatgttggaaatcgcttctgatatgtgtaactctgttgctatcttggcagatctagtcactttttaagagatcttttactaatgttggttctttgtgcgtaatttttataatcccagttattagttatacacacacacacacaacacaacagaacagtgtcatagtttgttgttgtaagctatatatgcattcatggcttctgctaattgtcctgctgctctgtttatcgcctttgcattgtcctgtcctgtgatcttgcaactggctatcaggcaatatttaacaacattactggagtgtgactcatgccac

SEQ ID NO: 2763 - DNA, 184 bp, Glycine max
  Clone ID: LIB3028-020-Q1-B1-E10
gagccaaattccattttccaattcaaaaccctaactccgttcgaagcaccaaatcgtgatggcaccaaaggcagataagaagccaccagagaagaagcctgtggaggagaagaaatcgacggtgggagacaaggctccggcggataagaagccaaaaggcggaaagaagcttccgaaagaagga

SEQ ID NO: 2764 - DNA, 299 bp, Glycine max
  Clone ID: LIB3028-020-Q1-B1-E11
aaacccgaaattcggcccaagcaaaatccctatccagtaaattaactataaagccaacccaacaattatccctttccttccggccccgctttgctttcctggccctttcaaaaaatgttgaacaatttgtggacaaaattggaaacccaattttcccaggtggcacatattacattaggccacaaccttggggggctgccggtgttgaattgaaactaggccggaaaggaaaaccaaatggcccatttaaggttttgcaaaataagccacaaacttcccttggaaaacaattcaaatca

SEQ ID NO: 2765 - DNA, 401 bp, Glycine max
  unsure at all n locations
  Clone ID: LIB3028-020-Q1-B1-E12
gttgaaacacaaagaagaaaaaatgggttcctctttgtggacttgtctgattttgttatcacttgcttctgcttccttcgccgccaacccaagaacaccaattgatgtgccatttggcagaaactatgtgcctacttgggcctttgatcacatcaaatacctcaatggtggttctgagattcagcttcatcttgataagtacactggtactggcttccaatccaaaggatcctacctgtttggtcacttcagcatgtacataaaattggttcctggtgattcagctggcacagtcactgctttctatttatcatccacanactcagaacatgatgaaatagactttgagttcttgggaaacagaaccgggcaaccttacattttgcaaactaatgtgttca

SEQ ID NO: 2766 - DNA, 145 bp, Glycine max
  Clone ID: LIB3028-020-Q1-B1-E3
ggtccaagggccttgaatccaggtcccaacgggttggaaattttttgggaaccttatggttgctgggaatttgtccgtttccggggaacacaattttggaagaggttctgataacatccgtgacaaacatggcatctgggcggtc

SEQ ID NO: 2767 - DNA, 375 bp, Glycine max
  Clone ID: LIB3028-020-Q1-B1-E4
tttccctctctagaaccttcctttttcctctttccgtgtctgtctgtctgtctctctctcccccatggcttccgatctcgaagcaaaagccaaagaggccttcgtcgaagaccacttcgaactcgccgtggaccttctttctcaggccattcacctcgaacccaacaaagccgaactctacgccgaccgagcccaagccaacatcaaactcaacaacttcactgaggctgttgctgatgctaacagagcaattgaattgaattcttctctaccaaaagcatatttgcggaaaggtactgcgtgcatgaagcttgaggaatatgagactgctaaggctgctctagaggtgggtgcatcaatgtctccagacaactc

SEQ ID NO: 2768 - DNA, 395 bp, Glycine max
  Clone ID: LIB3028-020-Q1-B1-E5
tgacaaccttagcttgaaggatgcttccattgctaagcagaagctgtggagagcgtgttaaaggatctaattcaaatatgtttgggttacaccgaacgaagctcttgcttttctctacatgtgttgcacgaggcttcacaaattttccaaatggtcatgaatttggcagtgagtttgctatgatgagcagagatcaagtccaactcggaagaatcccagtgtctgacaagctcgtttattggtttgtcacaaggccacggacttctaaagattcaacaatttggaaagacccagttcttattagacagtcattaatagaatcaatgaaaggtttcccagaaggggcggtggagataatacgaaattgcaagttgagcttcttgcatctgactgag

SEQ ID NO: 2769 - DNA, 358 bp, Glycine max
  Clone ID: LIB3028-020-Q1-B1-E6
ctcgaaccgttcttgtcaggaagatatcatgacaaaatggccgtaacagaaacagtcctaaaggatgctggcttccacacatgggagcagttaattctcaacgatccacatcttatcactccaaatgcactttcatacaaatcagcaatgagagagaatctgttgaggcatggatacacaattgttggcatcattggagaccaatggagcgatctgcttggagaccacagaggcgaaaacaggacctttaaacttcctaatcccatgtactacattgagtagtaccttcacctctctcaacagtctaactagagtttgctcctatctatatgtaacaaggtatgctgatatgcactat

SEQ ID NO: 2770 - DNA, 387 bp, Glycine max
  Clone ID: LIB3028-020-Q1-B1-E7
gaagaatttcaagcttcgtgtggttttatgccatgttgatgtggaagatgtaataaagcctcttcttgaagttacaaaaacagctatgcttcatgactgtacactcctttgtggatggagcctggaggaatgtggccgttacttggagaccataaaagtctatgaaaacaagcctgcagacattattcaaggccaaatggatacagattatctatcacggcttactcattcccttacaactgtccgacatgttaacaagactgatgtagtcacccttggtaccacatttgggtctctttctaacattatgggtgcatctatggaagatcttgctcgttgccctggcataggagagcgcaaggtcaagcgcttgtttgacacttttca

SEQ ID NO: 2771 - DNA, 402 bp, Glycine max
  Clone ID: LIB3028-020-Q1-B1-E8
cataaatgctcaaactctatcagaaatggagatccctgaaagctatattgaatccctacccaagaatggaagatcaagtcttggggacttgatctacaggagcattacagatgattttttcgatcctgatcagctcctatcagccatggacatgtcatcagaacataaaatcgtagatctcaaggacagaattgaggcatccattgtgatttggagacggaagatgaaccaaaaagatagcagcaaatcagcttggggttctgctgtgagtatggagaaaagagaaatctttgaagacagggccgaaaccatcttacttctcctaaagcatcgttttcccgggactccccaatctgcattggatataagtaaaatccaattcaatcgggatgttgggcacgc

SEQ ID NO: 2772 - DNA, 385 bp, Glycine max
  Clone ID: LIB3028-020-Q1-B1-F1
tgaatatgctctttacagtacagccaagtcatcataacgattaataattagctcatagtttttttggaagagttgtgaaaatgggacttgtggagctttttggggtggcatctatgcccgtgatcaaagtactactaatcactgctgttggcttgcttcttgcactggacaacgtaaatttgttgggaaaagatgcaaggatacaagtgaatcatcttgtgcattatgtgttcaatcctgcactggtgggtggcaatttggccgacacgattacttttgagaatgttgttttattgtggttcatgccggtcaatatcctcttgacgtttataataggctctgccttaggatggatccttatcaaattaacaacggctcccaaaca

SEQ ID NO: 2773 - DNA, 390 bp, Glycine max
  unsure at all n locations
  Clone ID: LIB3028-020-Q1-B1-F10
aatggcatgacagcagggcacaccattgctgtgtttgaatgtgttggtaggagcccatatgattattgttcgagatacttcacagttgagaattatcgattaacatatgcagaatctattcaccctgtgccaaatgttgacaaaccaccagtccagggtgaatctacttctttagttatggtaacccctccaccaacaaagcgccctccaggtcggccaaaaatgaagcaagttgaatcaatagacataattaaacgtcagcttcagtgcagtaagtgcaagggacttggccacaataggaagacatgcanactatcatagtatcacaattaacaacataggaatcgttttttaatcaaaatgcacatctctgagctatttccaacaaca

SEQ ID NO: 2774 - DNA, 321 bp, Glycine max
  Clone ID: LIB3028-020-Q1-B1-D6
gggatggagaaagtgaaggtgcttcggcgactcctcgagacaccaggggttcaccaggggccagcctgtttcgacgctctgggtgcgaagctcatagaatccgctggcttcccctactgcatcaccagtggcttctccatcgccgcttccaggttggctctgcccgacaccggcttcatctcctacggcaaaatgctggaccagggccaactcatcacccaagccgtttccattcccgtcattggcgaccccgacaacggctacggcaatgccatgaacctcatgtgaaccgtcaagggtttcattgccgccggtttcgca

SEQ ID NO: 2775 - DNA, 403 bp, Glycine max
  Clone ID: LIB3028-020-Q1-B1-F11
gttcttcttttgtggcacaagaagaagcatgcatcaacagggtgataagtgatgaatctcgtattgctctctcttctgacagtacacaaaagggagataaagatgagttcctcctacctgaatttaatgatcttgttaaggacatggactttggagccatcattgtcagaaattcttttaaagaagatatggaagcaccatggttaaaagtaggatcttctatagcatatgctagtcccgagaaggacgactatgagcaagagataagtcaactcaggagcatgattagaatgcttcaagacagggggcgaagtcttgaggttcaactgcttgagtactgtcgtcttagagagcaagaaacagcagtgatagagctccaaaatagattgaaagcaagtaccat

SEQ ID NO: 2776 - DNA, 382 bp, Glycine max
  unsure at all n locations
  Clone ID: LIB3028-020-Q1-B1-F12
atcatttctcaatcactgccacactgatactactgacacgcccacctaccaccttaatgctcttcaactcccactactgcctcactctctctcaggcccttcaaggttttctttaggataaagaatttatgggtggatcaatttcaaaacggaggcgttctaagcaacattcgtcaaatttttttcctcggtatcagcaacctcatttcccacaaagccaagataatgggtctgtggggcattatgggtattcacctcagagctatggtggtggtcgtgctccagaacaaggaaagagctttgataggaagtattcnaagatangtgatgattataagagcttggaccaggtaactgatgctctggcaaaagctggcttaga

SEQ ID NO: 2777 - DNA, 384 bp, Glycine max
  Clone ID: LIB3028-020-Q1-B1-F2
cttcacttgagtccatggttgatttcgccactaccaagctcgggagcaacgatgttgatgctgtttccacagaagtgacaaaaaaagataatgagttacaacagtatacaatggcaccaggggttaagaggttgggtgaggacaaggctagtgttgtgtgtcacaaggagaattacccttatgcagtgttttattgccacaaatcagaaaccacaaaagcctattctgtcccattggagggtgctgatggaagcagggtcaaagcagttgcagtgtgccatactgacacatcaaagtggaatcccaagcatttggcgtttcaagtgcttaaggttcatccaggaactgttcctatctgccacttcctgcctcaagatcatgttg

SEQ ID NO: 2778 - DNA, 301 bp, Glycine max
  Clone ID: LIB3028-020-Q1-B1-C1
ccttcacagttcaactcttgctcgacaactactgcagaaaggaggggtgactggatgtacatcgaacccgaatataccttgctatccgccaccaaaacgagcatgtcctatatatattcgtaattgctgacgaaaattagatgtttctggactctaaagtttcactcaaatcgacgggagaagcaattaatgtcatgctgctatatatatatatatagtagttgttattggggcctcagctttttaaaactactcctgtgttaaaacccggggtgtaaaatcttgccttaaaattccgtgt

SEQ ID NO: 2779 - DNA, 403 bp, Glycine max
  Clone ID: LIB3028-020-Q1-B1-C10
cctcaggatatctacactactactgcatctaactgaaatcaaagtttcaattaactgaagcagacatggcctctcagagttgcatcattttggctttgttcatcgctattttttccttctcaagcatggacacagcatttgcagcacgccatctcttgcagaatattccagggctaccagatttctctacaccccccaccttgccacctttaacaatcccaaatgtactatgcaatggatccatattcacattcttacccatcttatgtccaccatcttcaagcaccagtactactatcccttaaggcttcacttggagtttgatacataatttatgcactaatctctacgtactcgatctgcatttcggttcaattctcattgcatgccttcctcgatctcg

SEQ ID NO: 2780 - DNA, 230 bp, Glycine max
  Clone ID: LIB3028-020-Q1-B1-C11
gaggccaactaatttctttgagagaaatccagtccttaagaccctttctcctggcattgttaaatttctagggtttctcacaacctggatttgcttttgagctttgtcactttaagtacaatattgttgatcgatagatccggagaaacattatctttttactaatatcggtcatatgtgctaaggtgagaaaataataattttgaataatgattcctctatatcattgt

SEQ ID NO: 2781 - DNA, 393 bp, Glycine max
  unsure at all n locations
  Clone ID: LIB3028-020-Q1-B1-C12
ctctagcacacaaaacttgctatagcagtaagctataactcatttgaggctctgtgagaattgagaaatggctaaagatgttgaggttcaagagcaaggaggagagtactctgccaaagactaccatgaccctcctccagcacctttgttcgacccagaggagctcacacagtggtccttctatagagccctcatcgctgagttcatagcaacccttctcttcctttatgtcactgtgctcaccattattggctacaaaaggcagactgatacaacggtaggtggcaccgactgtgatggggttggcattttgggcatcgcttgggcctttggtggcatgatcttcatccttgtttactgcaccgccggtatttcaggangacacataaaccc

SEQ ID NO: 2782 - DNA, 405 bp, Glycine max
  Clone ID: LIB3028-020-Q1-B1-C2
gaaattcggtccaaccaattttccagttaccttaaggttcaaacccaaggaatttggaagccagggaacaacaatggaggcaagcaacaacaagttccggtactcttaaagcaactcctttccttggccaatgcaagggtgccaatgccaatgctcttagggatgttgtctccatgggaactgggaagtacaccatgggcaatgatttgtggtatggaccagacagagtgaaatacttgggacccttctcagctcagaccccttcatacttgaaaggagaattccctgaggattatggatgggacactgctggcttatctgctgacccagaagcatttgccaagaacaaggctcttgaagtgaatcatgggcgatgggccatgcttggagcactaagatgcatca

SEQ ID NO: 2783 - DNA, 325 bp, Glycine max
  Clone ID: LIB3028-020-Q1-B1-C3
cttacttaaactcagaattcggtccaaggaaagaccactgattctaggggatgtaacagccaagaacttaaaggaggttggattcaacacatgggagaagttaattctcagggatccatctgagtactctggtaagttatcatttgaatacaaatcagctgaaagagacaagctggataaggagggatacagaatcattggaaacgttggggaccaatggagtgacctcctgggaaccaccaaagggactaggaattttaagctgcctaaacccttgtacaatgattaagctctcaaatcaagcctcaaagttgcgccttaattt

SEQ ID NO: 2784 - DNA, 317 bp, Glycine max
  Clone ID: LIB3028-020-Q1-B1-C4
caaacatccatcatcattattattttactccgaacgagttgacaccgattccactcactcaaccatgagccgattcaggcgttttgagctcatagaacaaccacctttcttccactcctgctactctttcccctccttcgtcctccaagaatcactctctctcgagctcgaactcctggcaacttccaagcaacttcgaggctttccaaaatatggtgcacgcgccgtcgttcgcttaccggggcgtggaaaggcatctcgagaatgagttgcgtttgcagagcctctctgaccgtgtgggggagctggattcccgg

SEQ ID NO: 2785 - DNA, 243 bp, Glycine max
  Clone ID: LIB3028-020-Q1-B1-C5
gacaatcggttccttttgccttttgtcaccttcagtttcctccctgttagtcaaattgatcataatccatagcaggacgaggacagagacaattcaaatgtgaaaatgaacagaaagcataaagcattgtgttacatcaaaacatctgtgccctttctgttactactttgaccaacaacacaaaagataaacccaagaggaagacaaaaaaaaagttagtcaatggtcatccaaatggaccaa

SEQ ID NO: 2786 - DNA, 400 bp, Glycine max
  Clone ID: LIB3028-020-Q1-B1-C6
acaaggcagaaagcaagctcatcctagagttttaaaaatggcagcagcctcctccatggctctctcttccccatccttggctggcaaggccgtgaagctgggcccatcagcccccgaagtcgggagggtcagcatgaggaagaccgtcaccaagcaggcctcctccggaagcccatggtacggcccagaccgcgtcaagtacttgggcccattctctggcgagcccccgtcctacctcactggcgagttcccaagtgactacggctgggacactgctgggctttcggccgacccagaaaccttcgccagaaaccgtgagctcgaagtgatccactccaggtgggccatgctcggggccttgggctgcgtcttccccgaactgttgtcccgcaacggggtc

SEQ ID NO: 2787 - DNA, 213 bp, Glycine max
  Clone ID: LIB3028-020-Q1-B1-C7
caaacatggtcacccccggatccaattctgctaaggtttcccctcaggtggttgcggagcacactgttagagcccttcagagaaccgtgcctgctgcagttcctgctatcgttttcttgtctggtgggcagagtgaggaggaggcatccgttaacctcaatgccattaaccaggtcaatggaaagaagccatggtcactctctttctcctttg

SEQ ID NO: 2788 - DNA, 321 bp, Glycine max
  Clone ID: LIB3028-020-Q1-B1-C8
ctcatcttggttcttcttgtgttaaccctaaaagatagtgtcacttgtcaggcgcggcagccttgctctccaccacgattccacgacctccacgccaccacggtcccagtcggcgccggtgcattgcggagtcgcgacttcgctcccgtcgtcactcacattcgctggcgatttgggttgggttgggttgtgagaaggggtaaagtgggggcaggtgtggtgggcgcagctcttgtgtcgcaactataccacatttacaagagttttcatgtgtgagagatttccccaaggggaacccccaggagcaggtattggaaacat

SEQ ID NO: 2789 - DNA, 395 bp, Glycine max
  Clone ID: LIB3028-020-Q1-B1-C9
attgacttgaccggaggcaaaaataccagagcactctttggtatatgcttgtgcacctctgctgttacacagcttacgaaagggaaaagcaaggaggacaaagaagggtcccagttacaatctctagcagccaaagtattagagaaagattacaagcagagagctcccgacaagcttcctcaacttacaactgccttgaagagtttaacattgtcatcatgatgcagcatctcttaaagattattatttagttacttttgacattttctcagattgttgcgagctttaatcaacatatttagatttcctcaatcattttttccccaatattagaatgaaaattcatattggtctgcattttagcttcgataatggatatttaatgaaagacaata

SEQ ID NO: 2790 - DNA, 381 bp, Glycine max
  unsure at all n locations
  Clone ID: LIB3028-020-Q1-B1-D1
aaaaaaaataaacaatggggatangggtactatttgttgggtttttcttgctatcttgtgttgtgtgtgtgaagggtgtggagccaaaagcctcacccacttgtacatttccggcagtttacaactttggggactcaaactcagacactggaggcatatcagcttcatttgtgccaattcctgcaccttatggcgagggcttctttcacaagccttctggaagggactgtgatggccgtctcattgtagatttcatagctgagaagctaaacttgccatacttaagtgcttatctgaattcccttgggaccaattaccggcatggggcaaattttgccactgggggatccaccatttagaagcaaaatgaaaccatatttc

SEQ ID NO: 2791 - DNA, 391 bp, Glycine max
  unsure at all n locations
  Clone ID: LIB3028-020-Q1-B1-D11
aattaacactgctagtgttgctggaacctttagtggaggggcttcacatgcctacacaagttcaaagcacgcactaattggactgatgaaaaacactgcggtggagcttggacagtttggtattagggtaaattgcttgtccccttatgtggttgccacaccattgactaagaaatgtttcaatcttgatgaagaccgaaatggtgagatttattccaacctaaaaggtgttcatcttgtgccaaacgatgtggccgaagctgctctatatttggcaggtgatgagtcaaagtatgttagtggtcacaatcttgtgttagatggagggttcaccaatctaaatgtaggattttctgtgtttgggcagtctgagtaaaanatgtcttttaat

SEQ ID NO: 2792 - DNA, 381 bp, Glycine max
  Clone ID: LIB3028-020-Q1-B1-D12
ctcgagccgaatcggctcgagcaaagagagagagtaatcaagatagctcctttgaattttctatcagaatctgagggcccaaaatctagggttttctgtgcttctctggggatctgaagacatgcagtccaagtctgaaactgcaaatcgactgagatcagatcctcattcctttcaacctggcagtgtttattctgagccttggtggcgtggtattgggtacaatcctgtggcccagacaatggctggggcaaatgcatccaattcatcgtctcttgaatgccctaatggtgattctgaatccaatggagaaggtcagtctttgtccaatagcgggatgaatgaggaagatgatgatgccactaaggaatcacaacctgc

SEQ ID NO: 2793 - DNA, 414 bp, Glycine max
  Clone ID: LIB3028-020-Q1-B1-D2
ttcatggctgatcggtggaatcctgccaacttaagagactcgagatatgtatggttgcctttgatagtggcaggacctgttgatcagcctcttgagtacagttttgaattcccattgtggtcaagagtgtctatctattggcacagaaaatggagactgcctcaaggctggaacggcttcaaataatgtagcttctctttgtacattgtaatatacaaagatttggtatacggttatatagaaacccgagtctcaataatatgctcactttaatttagggtaagctgagaatagtttgagggagcgcatgtatacgagaaagattatccacttgattgggattttgctaaaaatccagcattgtttatgaattgtgtcatgacatcatgttatgaaatggtagttatgtaaaaa

SEQ ID NO: 2794 - DNA, 394 bp, Glycine max
  unsure at all n locations
  Clone ID: LIB3028-020-Q1-B1-D4
gtnacaagagaaagctaaaatgggacttgggactctgccactgaccccttcttacagcagtttctcttcaaagtcaggagggcttttacatgacatcaccaatcacagcagggttaatagaagcatgaaattcagagtttcagccaaacaagagaagcaagaagagaagaaaaagcaatctttgttcagcagtgtgactgaagctcttgatttttctcaagtgagatctgctgaggatgctcagcttatagaagaggctannagaaccacaagatcgggagaaacgattagtatggaacactatggagctcctagaaagaaaattggtgggacatacaacgattttttcaaatcttacgttgaagttgaccgggcatatgtaaaagaaggatgg

SEQ ID NO: 2795 - DNA, 376 bp, Glycine max
  Clone ID: LIB3028-020-Q1-B1-B9
cagacagatgcggcagcaaataataatggcttcaaatcccaaacctttgacttttgaggaggtggctaatcacaacaacacaaaggattgctggattattatcaatggcaaggtgtatgatatcacgccatttctggatgagcatcctggaggagatgaagttttggtaacgtcaacacggaaggatgccaccattgattttgaagatgtgggccacagtgattctgccatacatatgatggaaaaatacttcgtcgggaaggttgacacttccactcttccagcgaaagttaaccatagtctgccacaacctacacaagcaggtggcgctgggaatcaatcttctggatttgttgttaaaatcttgcaattcctg

SEQ ID NO: 2796 - DNA, 407 bp, Glycine max
  unsure at all n locations
  Clone ID: LIB3028-020-Q1-B1-A4
cacaagccaagtgaaagtgagaaaaaataaaaatcaaagagcataatgtcagggatcattcacaagattggggagacccttcatgtgggagggcacaagaaggaggaggagcataagggtgagcaccatgctggagaatacaaaggggagcaccatggtgaacacagtagtgagtacaaaggagagcatcatggtgaacacaaagctggagagtaccatggtgagcacaagccagagcacaaagaggggttcctagacaaagtcaaggacaagatccatggtganggctgcgccgccgaaggcgagaagaagaagaaagagaagaagaagaaagagcatggccatgagcatggccatgacagcagcagcagcagtgacagtgattaaactgctgcatcacctatata

SEQ ID NO: 2797 - DNA, 301 bp, Glycine max
  unsure at all n locations
  Clone ID: LIB3028-020-Q1-B1-A5
gcttttgatccggaagctccccttccagaggctggttcgtgaaattgctcaggacttcaagactgatctgcgtttccagagccacgccgtgcttgcattgcaagaagctgctgaggcataccttgttgggctctttgaggacactaacctgtgtgccattcacgccaagcgtgtaaccattatgcccaaggatattcagctggcaagaaggattcgtggtgagcgtgcttgagttggtggttggaaagatgaagatgattggtggctgcggttggtgtttttgtttttcagantccttttt

SEQ ID NO: 2798 - DNA, 409 bp, Glycine max
  Clone ID: LIB3028-020-Q1-B1-A6
cgaaaagagaagaggtgtgggaaaggaggaggaagaagagcgagatggcgtcagtggtgaagaacgtactcaaatcggtcagagaaaagggtttcggcgctttcctcagggagctcaaggatgaaggctacctgagatgccttccggatggaaatctcttgcaaaccaagatccacaatattggggcaacacttgttggtgttgataaatttggtaacaagtattatgagaagcttggagacacacagtttggaaggcacaggtgggttgaatatgcagagaagactagatataatgcctctcaagttccagctgaatggcatggttggctccacttcatcactgatcacacaggagatgagcttcttttactgaaaccgaaaaggtatggtattgaacacaaagaaaa

SEQ ID NO: 2799 - DNA, 355 bp, Glycine max
  Clone ID: LIB3028-020-Q1-B1-A7
actcattgctgaattcattcaagagggtgtgcaaataaatcttgatgccaaaagtttggtctcaggaacgaagctccacaattttttggagtttgtaacatcctccgaatttcccttgggagagagcgtatcaaaattgcgtacgaaagttgatccccttactactcagtatcaaataaccggagtctaagtgtatccgcataatgaatacgtaaaactatgacgctgttaacatattttgtccaataatcatgcgtcgatgtgtgttgctaatactatgttgtcacattttatggcatctcaagttccaactgaatggcatggatggctccacttcaatcactgatcacacagg

SEQ ID NO: 2800 - DNA, 414 bp, Glycine max
  Clone ID: LIB3028-020-Q1-B1-A8
ccaaccttcaacgtctcttcactctcttccttttttccctaattgcaccctctttggctcaacaatccttcagacccagagccctcgttgtcccagttaaaaaagacgcttccaccctccagtatattactcaaatcaaacaaagaacaccactcgtcccagaaaacctagtacttgacatcggtggccaattcctgtgggtcgattgcgacaacaactacgtctcctccacttaccgccccgcacggtgtggctccgcccagtgctccctcgccagatccgacagctgcggaaactgcttctccgccccaaaacccggctgcaacaacaacacgtgcggcgtcacgccagacaacaccgtcaccggcaccgccaccagcggcgagctcgcgcaggacgtcgtctccctccaat

SEQ ID NO: 2801 - DNA, 339 bp, Glycine max
  Clone ID: LIB3028-020-Q1-B1-A9
ctctgcttcaacttgctccctcagaagcgaagaagaagccacagagaaccagtctcctactctctctcacccacaagaaaaatggcatctcacatcgttggatacccccgcatgggtcccaagagagagctcaagttcgctctcgagtctttctgggatggcaagagcagcgccgaggatttgcagaaagtggctgctgatctcaggtcatccatctggaagcagatggctggtgctgggatcaagtacatccccagcaacactttctcgttctatgaccagctgctcgacgccaccgccaccctcggtgccgtcccccccaggtacggctggaccggc

SEQ ID NO: 2802 - DNA, 331 bp, Glycine max
  Clone ID: LIB3028-020-Q1-B1-B1
gcatgagactcgcatgttcccgtgttgggaccacttccaattgggtttgcggtgttcatggctcacttggacaccatccctatcagcggcactggcatcattccagctagaagccttgggcctgctgtcatattcatcaacgaaaaggcttgggatgaccagtggatcttctgggttgggcccttcatcggtgctgctcatgctgcattctaccaccagtccgtgttgacggcccaagcatcaaaagctctacggtctttcaggagctcctcaaacctgtgattctggccgagctaattgagctaacagagacatgcttcatttaattgtg

SEQ ID NO: 2803 - DNA, 356 bp, Glycine max
  Clone ID: LIB3028-020-Q1-B1-B11
caacactgatggattatacagcgcaaagcgttcagctgttattagggcatcagatgatttctggccaagagaccctgcatcccacacgattcacattgcatcagtggcttacaatactattttccttggtgaatttatgcagccagactgggatatgtttcataacctacatccgatggctgaatatcatggtgcagcacgagctgtatggggatgtccaatttatgtcagtgacaagcccggacaccatgactttgatcttttgaagaagcttgcactacctgatggttctatattaagggctaaacttccaggacgaccaacaaaggattgcttatttactgatcctgccagag

SEQ ID NO: 2804 - DNA, 381 bp, Glycine max
  unsure at all n locations
  Clone ID: LIB3028-020-Q1-B1-B12
tgcaaactagttttgttttgggaacatcatcacattacattagattggtggtaatggcagcgtcactacaagcagcagctactttcatgcaacccaccaagttgagcaggagcaacactttgcagcaaaagtctactcagtccatttccaaggcttttggtttggcacctgttggagctaaaaaggtcacatgctcccttcaggctgatcttaaggacttggctcacaagtgtgttgatgctaccaaaattgcaggattcgcccttgccacctctgccctcgttgtctctggggcaagtgctgaaggtgttccaagaggctaaccttcgacganatccagagcaagacctacttggaagtgaaggggacacgaacagcaaa

SEQ ID NO: 2805 - DNA, 357 bp, Glycine max
  Clone ID: LIB3028-020-Q1-B1-B2
taaaaccgccacaaatttctccatagttatgggcacttccattctcgacgccctgaacgttcgcgtggaaggttccggcgacaagtaccttgtcctggcccacggcttcggcacggaccaatccgcgtggcagcgcgtgctcccttacttcacccgcaactacagcgtcattctctacgacctcgtctgcgccggcagcgtcaaccccgaccacttcgactaccgccgttataccaccctcgacgcctacgtcgacgacctcctcaacatcctcgacgccctccgcgtcccccgctgcgcctacgtcggccactccatctccgccatgatcggcatgctcgcctccatccgccgccc

SEQ ID NO: 2806 - DNA, 389 bp, Glycine max
  Clone ID: LIB3028-020-Q1-B1-B5
caagaagaagaacaccaccaacaacaccaacaacaagaagcatggggacaacactaataataatgatggcacaaagactggtgctgagaagaaattcaaaacacttccaccatcagagtctctgcctaagaatgaaaccattggaggctacatctttgtttgcaacaatgataccatggcagagaatctccaaagacagctctttggtctgcctccacgatacagagattcagtaagaacaataactccagggttgcccatttttctgtacaactactccactcaccaactccatggtatctttgaggctgcaagttttggaggatccaatattgatccaacggcttgggaggacaagaagtgccctggtgaatctcgtttccctgctc

SEQ ID NO: 2807 - DNA, 370 bp, Glycine max
  Clone ID: LIB3028-020-Q1-B1-B6
ctcctctgtctctctctctccaccattgccatggatccttacaagctccggccatccagcgccttcaattctcccttctggactacaaattctggtgctcctgtttggaacaacaactcctctttaaccgttggagctagaggtccaattctgcttgaggattatcatcttgtggagaagcttgcaaactttgacagggaacgtatcccagaacgtgttgtccatgccaggggagctagtgcaaacggtttctttgaagtcacacatgacatttctcacctgacatgtgcagatttccttcgagcgcctgaagttcagacgcctgtaattgttcgtttctcaactgtcattcatgaacgtggtagccctg

SEQ ID NO: 2808 - DNA, 357 bp, Glycine max
  Clone ID: LIB3028-020-Q1-B1-B7
atccattgcacctttctcttcctccgatggctaatctctcactcttgttcttcggtctcctcctattctccgctgccgtagccaccgtcgaacgaatcgacgatgaagacaaccttctgatccgtcaagtggtgccggacgcggaggaccaccacctgctcaacgcggagcaccacttctccgccttcaagacaaagttcgccaagacctacgccacgcaggaggagcacgaccaccgcttccgtatcttcaagaacaacttgctccgcgccaagtcgcaccagaaattggacccctccgccgtccacggcgtcaccaggttctccgatctcactccgtccgagtttcgccggcagt

SEQ ID NO: 2809 - DNA, 387 bp, Glycine max
  Clone ID: LIB3028-020-Q1-B1-A2
gtgaaggggggttactggattggaccaacccttcggttctgaattcggtcgttgatttcgtaccggggaataataatcataatcaattggtgcaggaccagacgcaaggcatggtgaactacaacgcgtgcaatgacctctatgtccctacgttatgccatgtgggcacgtcagttccgcaaaagatggaggaagatgtgcaaagcggcgtgagaaaccaacgggtccagaacaattcctggtttcttcagaatgatttcacacatgggtttcagaattcggttgacacgtctgggtttaagtacccggttcaaccggtggggttcgggttcacgaattgaaccctgttatcgattaataatagtagtaatcctttaaatcggtaaa

SEQ ID NO: 2810 - DNA, 239 bp, Glycine max
  Clone ID: LIB3028-019-Q1-B1-G7
cctgtttcgtctgttaatgcatctctacccgatccgatgcaacctgttattccacaggttattgcaccttttgttgcaccttctttagctccaattcctgcaattcctccgcctcgcccactgggaccgcttccagttcggtcacctgctcattacgccatctgtgccacagaatcgcgaagttggctcaggtgactctgagtcagacactgaccactcagctccacgaattaggcagg

SEQ ID NO: 2811 - DNA, 381 bp, Glycine max
  Clone ID: LIB3028-019-Q1-B1-G8
agaaaaatgaagtctttccatctcacagtgacagctttgtgctgtgtagtggttgtgcttggagtgcttccactctccctagatgcacaactagatccctccttttacagagacacttgtcccagggttcactccattgttcgtgaagtcgtcaggaacgtttcaaagaaagatccccgtatgcttgctagtctcattagacttcactttcatgactgctttgttcaaggatgtgatgcatcagttttgttgaacaacactgccaccatagagagcgagcaacaagctctgccaaacaacaactcactaagaggtttggatgttgtgaacgacattaagacagcagtggaaaaggcttgtcccgggcgtgggttcttgtgc

SEQ ID NO: 2812 - DNA, 373 bp, Glycine max
  Clone ID: LIB3028-019-Q1-B1-H10
gctttggatgatgagagggtcaaggttgctaatcaggtgggaagtattccgcttgattgggctttgggagcttttattctgcaaacagcagctgatgcagatataccgaaccataactggattggcaccattttcagcgatgaatcacataccctcctctcaattattggaatttttataatattgttaacggcatggtctatatctaggtggaggaaacctcagttgaagacataatacattctaaaaaagggccaattaataacacgccagttgggaaattatacctgatgggagaaggaattatgggtcctgggttaatcatgtggaagcactgctgtgattaagatgaaaatatttaacccttaaaact

SEQ ID NO: 2813 - DNA, 337 bp, Glycine max
  Clone ID: LIB3028-019-Q1-B1-H11
ataagctttacttaattagcaaatccaaatatggcactttcttcttcatcatcttcaacatccatatttgctttagctttgttcactcttttgcttataggaagttcttcagctcaactctctgagaacttctatgatagtaaatgtcccaaggttttctatgccgtaaaatccgttcttcaatctgctttgggtaaagaacctcgccagggaacatctaacgttcggctcctccttcaagactggtttggccatgggtgttatggattaattataactgatgggccttcctcaaaaaagaatggaacttccaacaattactccttgagaaggtaag

SEQ ID NO: 2814 - DNA, 360 bp, Glycine max
  Clone ID: LIB3028-019-Q1-B1-H12
gggattcaaacaaaccgcattcgcactgtgcatccctttcttccttcctcgtcttattctccaaccctctccaaaacctccttctcactcttcttctttctgctactctccctctaaacaacgtcgtttctcgtcgtacagccatgtcatacgactacctcttcaagtacatcatcatcggcgacacaggtgtagggaaatcgtgcctgctcctgcaattcaccgataagaggttccaaccggttcatgatctcaccattggtgtcgagttcggcgctcgcatggtctccatcgattctcgacccattaagcttcagatatgggataccgctgggcaagagtcttttagatccatcacta

SEQ ID NO: 2815 - DNA, 375 bp, Glycine max
  Clone ID: LIB3028-019-Q1-B1-H2
gcggaatcagctagaattttctaataatggccaaagacgttgagcaggttacagagcacggtgaatactccgcgaaggattaccatgacccacctccggcgccgttgatcgacccagatgagctcactaagtggtccttgtacagagccgccatagctgagttcatagcaacactccttttcctttacatcaccgtgttgaccattattggctacaagagacagagtgacaccaaaatccccggtaacaccgagtgcgacggcgttggcattttgggcatcgcttgggccttcggtggcatgatcttcatccttgtttactgcaccgccggcatctctgggggacacatcaaccctgcggtgacattcgggttgt

SEQ ID NO: 2816 - DNA, 388 bp, Glycine max
  Clone ID: LIB3028-019-Q1-B1-H5
ctcgagccgattcggctcgagaagtttttacagctgatcaaatatgtaagtggctcttatgattctgaggatggatttcgcttgttggataaagagatttcagagcatgaatatttgaaaaagagtgttgagggtttatctcggaggcttttctatcttgctcttccaccttcagtatatccatctgtttgcaagatgatcaagacttgttgcatgaataaatctgatcttggtggatggacacgtgttgttgtcgagaagccttttggtaaggatctagaatctgcagaggaactcagtactgagattggaaagttgtttgaggaagcacagatttatcgtagtgattactacttgggaaaggaactagtgcagaacttgttggtac

SEQ ID NO: 2817 - DNA, 390 bp, Glycine max
  Clone ID: LIB3028-019-Q1-B1-H6
cagcagtactaccattagccgcgtttttcaaaagtgattttcgagaattagcgatgggaattgaaagaggaggcttcaagggattcaggagcgcctggagcgtgccgcccaagccgtgcgattcctgcaagctggcctcggcggcgcttttctgccgccccgattccgcgtttctctgcatcgcctgcgattccaacattcactgctcgaacaaactcgcgtcgcgccacgagcgcgtgtggatgtgtgaggtgtgcgagcaggcacccgctgctgtcacgtgcaaggccgacgccgccgccctctgcgtcacgtgtgactccgacatccactccgcgacaccccctcgcgcaacgccacgagcgcgtcaccgtggaacctttccttgac

SEQ ID NO: 2818 - DNA, 396 bp, Glycine max
  Clone ID: LIB3028-019-Q1-B1-H8
attaagtcaattgtttcagaagaacaaacaagtctacaacttgctctagtggggactttttttcctatccccccttttttaatgaattcgtaaataccattgttaatagttcttcgtaggagtattagcatacaactggttaagttatatgctgtatcaaattaataagaaccttggaagaatcacaccagaaaagctagcagttgtagttggaggagccaaagttcttataaatccctcactagaatcgcatacttcctatatgggattcaagtctcataccttgctattggattctagcacacatattatgtcaatgattgtattggattttgatgctgtcttcttttgctatctaaatttggtagtgttgctaattctatctgcaacattttt

SEQ ID NO: 2819 - DNA, 361 bp, Glycine max
  Clone ID: LIB3028-019-Q1-B1-H9
gaagaaaagagaagagaagaagaagatggaggtgagtttatcctcaacatcatgtatacccttaagctcgaagttgaagcataagcatggccttttccactctcaaattcccattcacacagcttcaaccaataccagaagaaccaaacctttgtccgttgttaacgcctccagacaaaccttgtcttccaattggctcgtttctccacacgatttttctgcatccaccgcttcgccatggcttcccatattcgaagagctcgacgccaccaacatgcttctccgtcaaagaattatctttttgggttctcaagtggatgatatgactgcagattttatcattagtcagcttttgtttttg

SEQ ID NO: 2820 - DNA, 278 bp, Glycine max
  Clone ID: LIB3028-020-Q1-B1-A1
cggcccgagggctgagcgatgttttccctcctctaaggtcccaattttttcttaaaccctagaacacacactctctctcacagaagaagaagctgctgcagaagagaatttccaaaatgtcgatgtccaagagttccaagatgcttcagtacatcaactaccgtatgcgtgtcaccattcaggacggtcgccagctcgtcggaaaattcatgggcttcgaccgccacatgaacctcgtcctcggcgactgtgaggagttccgcaagcttcctccgggc

SEQ ID NO: 2821 - DNA, 397 bp, Glycine max
  Clone ID: LIB3028-020-Q1-B1-A10
caaagtttcagtttctctctaacgttgttgttaaatgacagtagatctggtacgtgctgccaagatggggatggaggagaatatagcgatacaagaagctgcttccgctgggttgaagagtatggagcatctgattcgtgtgctttcttctcaaatcccttcttctgcttcgtcttcttctaacgcacaccaccaccgtcttaatctcaaccaccttgactgcaccgaaatcaccgacttcactgtctccaagttcaaacaagtcatcaacttgttgaatcgcacgggacacgctcgctttcgtagcgcaccttctcatccttctccttctacttctcttccttctcaacctcaacctcaaccacaaccacaaccatatgcactgaatcctgatttc

SEQ ID NO: 2822 - DNA, 191 bp, Glycine max
  Clone ID: LIB3028-019-Q1-B1-G6
caacaaaggaagctttatcagctttgaaaagttcatgaaaccttgtcaaagtaaatcagccaaacttgatttcttccccctttttgtcgtaaatgttactgtaaatcaatcaactatctatgatgggaagaacgcatattgtaatagccaaaaacaattttgactcataccgatgctaacaaaccagtagc

SEQ ID NO: 2823 - DNA, 404 bp, Glycine max
  Clone ID: LIB3028-020-Q1-B1-A12
gaacgattcaactagactaacacggaaacaaggtgcatcatgccttgacaatgggaatggtggcggtatcaccggaatctgacagtgacaacaactcctcaaataccaacaatcctcaaaacctcaatgaaacggagccgtttcttgactacgctcttgcgcaagccgagctttaccacaaggccttcaacgacaccctcgattcgacaaacgatactgcataatcccgtttctcccaaatcagcacaacttcttccgcccactttcaccagaccttggattctttgggtgatctcaaatctcagtacactgcttatgatggtcttttgtttggaacgcataaagaaggtgtaattgttgcaacttcgcatcctgtgattacatgtggggctactgcttccctg

SEQ ID NO: 2824 - DNA, 371 bp, Glycine max
  Clone ID: LIB3028-019-Q1-B1-F1
ctccctgcccctgcctagattattactaccgagaaagaaagagaataaagaaaagagagaaagagagagagtgatcttgcaagttctgttccagcaagccatggcaatttcagggtcagagactcagagtcctttagtgaaaagcgtttttcaggtggaagttgagtgtgtgaaatgcgacttgtgcgggttcacagaggaatgcacccctgcgtacatcacgagggtgcgtcagaggtaccagggtcgctggctttgtgggctgtgcgtggaggctgtgaagcacgacgtggtgagatcagacagtgtcatcaccacggaagaagcgctggaccgtcacatcagcttctgcagagagttcagatcatcga

SEQ ID NO: 2825 - DNA, 377 bp, Glycine max
  Clone ID: LIB3028-019-Q1-B1-F10
gtttactcagaatagagattatattctatttctctctccttaattcccttcgtttctctctcttcgccattcattttcctccaacttgttggtctctctgtctctctctctctaggatcccttccttaccattctttacttctccccttttacttgaccccttcaagttgaagtgatcacatagttatcctctaaagcagtattttgctggtgattttcatctgcaatggagttctgaatctatgatgatgggatttctcatttgaacccccagagatggacaagaaagagcatattgcaatttttactagtgctagccttccatggttgacaggaaccgctgtgaaccctttgtttcgtgccgcgtttctcgccaa

SEQ ID NO: 2826 - DNA, 378 bp, Glycine max
  Clone ID: LIB3028-019-Q1-B1-F12
ctcgagccgaatcggctcgagggaacactcacccaggaatcatttggggattgctaggctggtggggaaccttaggccatgcatttggtgtctctagtatgccaggatttggtgccagtctcagcttgccacaagcactttccaacactagaactgatgggctaggagcactctacagagaagggacagcttcctttcttaactccttggtgaacaacaggttcccttatacaacccagcaagtcagagacagatttatagcatctcttgcctcaaataaggcagcagaagcgcaagccaacctcttcaagatggccaatgaggggcgaatgaagccttgagcatgatatagttaatttggtttgtggtgtcagttta

SEQ ID NO: 2827 - DNA, 398 bp, Glycine max
  Clone ID: LIB3028-019-Q1-B1-F2
gacagagcctgttcccgcggaatcagcgacgaggaagacgctgaaaccgcaaggaaaaaacttagactctccaaagacgaatccgctatactcgaagaaagcttcaaagaacacaacaccctcaaccccaagcaaaaattggcactggcgaaacagctaggacttcgacctagacaagtggaggtgtggttccagaacagaagagcaaggacgaagctgaagcaaaccgaggtggactgcgaagtattgaaaaggtgctgcgagaatctgacggaggaaaatagaaggttgcagaaggaggttcaggagcttagagcactgaaactttccccacagttttacatgcaaatgagcccacccacgacgctcaccatgtgcccctcttgcgagcgtgtggc

SEQ ID NO: 2828 - DNA, 395 bp, Glycine max
  Clone ID: LIB3028-019-Q1-B1-F4
gaaactgtatgacatatagattgagtgttgctgatgtatattggtaacattgaagttgggaatgcgtttgaggacgtttctgaatgaaattcgtattgtgcattcaattagcacttttctttagttattttaagtgcttgtagttggcctctttaacttataatttcctttttgttatcttgcagcttcttgggtgccatggaccattggccaatcgtgaacctggaagagcctttttggatactgctactagttcttagtctgtcttttaatttggaaatactagacttttggataacattagttttgcaagagtgaatttgagttattttgtcagcacattccatttacttaaattttgtttgcgaacctcttcgatttggttactttaatgg

SEQ ID NO: 2829 - DNA, 230 bp, Glycine max
  Clone ID: LIB3028-019-Q1-B1-F5
gcagatatcactaaaacctctacaagaactaactgatatatgatcattatgtggctctttcacttgttgttttagcaaggtatatacagtgcttgagtttgttacttttaacagcactaacaggcaactgcctgatattgtatttgttaccaccaacaacgtcactttaccctgcgtcatacaaccttttcgactggaaacatgcccctccaattttgacgggcaatttc

SEQ ID NO: 2830 - DNA, 391 bp, Glycine max
  Clone ID: LIB3028-019-Q1-B1-F6
agcccaagccctatacaaccaaaccctaacacacacccatttgattcactttccatggctagcctcaaggttgcatttttggctgcagtgctctgcatggttgtggtgagtgcacccatggcacatgcagctatcacgtgcgggcaggtgacgaatagcctgatcaattgcatcggttacctccagaacggaggaacgccgccgtcgggatgctgcaacggagtgaagagcctcaatgccgccgccaagaccaccgccgaccgccagacggcgtgcaactgcctcaagtcggccgccagccagatctccggcttcaaagccaataacgccgcctcgctccccggcagatgccgaatctccatcccctacaagatcagcatctccaccaact

SEQ ID NO: 2831 - DNA, 192 bp, Glycine max
  Clone ID: LIB3028-019-Q1-B1-F7
ctttggaccccgagatatgtcattgccagaactaataccatcgaatccattgctaccgggaacaactgaggtacatcaacgcaggaaatgtgttactgtgttggggaacatgaatcacgagacctggcctgtatgatctacgcttccgtagtagggatcaagctcaatggggcccgtggcatctcgaactgg

SEQ ID NO: 2832 - DNA, 393 bp, Glycine max
  Clone ID: LIB3028-019-Q1-B1-F8
ttgcaattcgcaatctttgcgagttgcgagactgagaattcagaaatttctcttttgttttgcatttttcatggcaaacgttgtattttgttgcaaatgaattggattatgaaatctagaaaggatggaggggattttgctttgttttaaataaaagaagagtgaatcgaattttgaggagtagctggtgatgaatgaattattggcatgagctgcgacaacgtttctgcgcaccgtgtattgtcacacgggttgttgttgcgatgaataatgtgccaaaatgctaatctgaggctctctctctcttttcattttaggtttttgttctctcttttatcgtttcacaagctcttcttacgattttctttctttccccaaattattgattcggat

SEQ ID NO: 2833 - DNA, 389 bp, Glycine max
  Clone ID: LIB3028-019-Q1-B1-G1
atgtgttttatgtattgcaaagttgcctgcggagggctatatccacttccaatatcagttctgttgtcgcagttttgagtggtgctagtagtttgcttggtactgaatatcatgaagccttgcagcacaaaactagagagccaaaccttggtgcaaagttgttctttggtggtgttggcgtgcaaaagacggggacagaaattgcaacagctttgaataatatggatgttagcagtgaagatgttctgaagctaaaacatgaaattgaagaacagtgtgctgaggtatttcctgcaccggctgatcgagaaaaggtaaaatcttgtttgactgagttggcagatagcagcaatgctttcaagcaagctttgaatgctggcatagaacaa

SEQ ID NO: 2834 - DNA, 377 bp, Glycine max
  Clone ID: LIB3028-019-Q1-B1-G10
aaataaactagtattaaggagctagaggcaatgggaaagagcaaggttcttgttgtgggtggaactgggtatgttgggaggagaatagtgaaggcaagtttagaacaaggccatgaaacctatgttcttcaacgtccagagattggtcttgacattgagaaggtgcagatgctgctttcattcaagaagcaaggtgctcaccttgtggaggcttctgtttctgatcaccagagcttagtggaagcagtgaagcttgtggatgttgtgatttgcaccatgtctggtgttcattttcgctctcacaacttgttggtgcagctcaaacttgtggaggccatcaaagctgcaagaaacgttaagcctttcctgccttcaaa

SEQ ID NO: 2835 - DNA, 371 bp, Glycine max
  Clone ID: LIB3028-019-Q1-B1-G11
agccaagtgaatgtgagagaacataaagctcaaagagcataatgtcgatggatcattcacatgattggggatacccttcatgtaggagggcacaagaaggatgaggagcatgacggtgagcaccatgctggagaatacaaaggggagcaccatggtgaacacagtagtgagtacaacggagagcatcatggtgaagacaacactggatagtagcatggtgagcataatccagagcacatagaggggttcctagaccatgtcaatgacaagatccatggtgagggcggcgccgccgatggcgagaagaagaatattgagaagaagaagaatgagcatggccatgagcatggccatgacagcttcagcatcac

SEQ ID NO: 2836 - DNA, 384 bp, Glycine max
  Clone ID: LIB3028-019-Q1-B1-G12
gagcatattccgttatgagggggatgaggtgaacatgacattggcaaaatctgaggctaaactgcttcacgagaagattgcagagaaggcctacaatgatgaggagctgatcaggattttgtcaacaaggagtaaagcacagttaacagcaacactaaatcagtacaacaatgagttcgggaatgccataaacaaggatctgaaaaccgatccaaaagatgaatatctgcaattattgagggcagccattaagtgcttgacttaccctgagaaatattttgcgaaagtcttgaggatggctataaacaagctgggaactgatgaaggggcccttactagagtggtgaccaccagagctgaagttgatttgcagcgaaatgctga

SEQ ID NO: 2837 - DNA, 302 bp, Glycine max
  Clone ID: LIB3028-019-Q1-B1-G2
cttcaattcagcaacatgtcctgacactgacggcattggctgggtagaggaaccatacatatgcacagccccaataaagtacaagtatgccaactactctaaccgaaactatgcaaagaccgggaaagctattttgaagttccagttgatcaatcaacgtgcagatttctcagttgcactattttcaggtggattacccgatcctagacctgtggcaatttcgaattccatatcatttgcaaatcctaaagcacctgtgtatccgcgccttgctctatgacaatcttgggatgaaatgacag

SEQ ID NO: 2838 - DNA, 395 bp, Glycine max
  Clone ID: LIB3028-019-Q1-B1-G3
ggatagatagagtgatacacatcacattttctcaaagtaatttattaattaataaataaatggcggcggcggcggcagtgacggtgctactcccacctaggattccgaccgccaccaacgttacccgctgctctgctttgccttctctgcctcctcgcggcaccaacactaaaaccactttgctcttatcttccctcaagcacttctcagtgtcccgaaaatcttctctgcttcagaccagagcttcttcagaggaatcatcctcagtagatgccaatgaggtgttcacacatttgaaggaaaagtgggatgctcttgaaaacaagtccacagtacctttttatcgtggtggggccttacttgctgtttggctatcgtcgattcgtgtgagcgcc

SEQ ID NO: 2839 - DNA, 378 bp, Glycine max
  Clone ID: LIB3028-019-Q1-B1-E9
cctggaaagccgcctgttgattaccaaggagcaagagatgtcaaaccaattgctgaatttgcacttcaacaggtaaaggctcttttgaaggatcggttaagtggaaaagcaacaggaggatctagtgaaaagacagaaaccagttcttcagtagaattaaactctggcaactttgatgaattggtgatcaaaagcaaagaactctggattgtggaatttttcgcaccttggtgtggacattgtaaaaaattagctccagagtggaagaaagcatccaataatttgaaagggaaggttaaactgggccatgttgactgtgatgctgaaaagtctctaatgagcaggttcaaagttcaaggattccctacaatcttggta

SEQ ID NO: 2840 - DNA, 393 bp, Glycine max
  Clone ID: LIB3028-019-Q1-B1-G4
gttgaaaacacataagaaaaaaaatgggttcttctctgtggacctgtctgattttgttatcacttgcttctgcttccttcgccgcgaaaccaagagcaccaattgatgtggcatttggcagaaactatgtgcctacctgggcctttgatcacatcaaatacctcaatggtggttctgagattcagcttcatcttgataaatacatcaggtactggcttccaatcaaaagggtcctacttgtttggtcacttcagcatgtacataaaattggttgctggtgattcagctggcacagtcactgctttctagttatcatcgacaaactcagaacatgatgaaatagacgttgagttcttgggaaacagaatcgggcaaccttatattttgcaaaca

SEQ ID NO: 2841 - DNA, 391 bp, Glycine max
  Clone ID: LIB3028-019-Q1-B1-G5
atttcaatcaacggttatacccttttctatttgagcatcatcatgtccaccgcagcgcagcccaaggccaagaaaacggcgtcgtccaagaagcccctctcccatcctaccttcgccgcgatgatagcggaggcgatagcgagtctgaaggagagaaccggttcgagccaatacgcgataagcaaattcatcgaaggcaagcacaaggagttgcctccaacctacaagaagcttgttctcgttcatctcaagaagtctgttgctgctggcaagctcgttaaggtcaaaaactctttcaagctcgcagcgactaagtctgctcctgttaaagccgctgctgctcccaagaagcccaccaaagctgcggctaagcccgccgccaagccgcctt

SEQ ID NO: 2842 - DNA, 385 bp, Glycine max
  Clone ID: LIB3028-019-Q1-B1-D1
ggtaaagattcatgggaatacgcccagaattgcgagtcagccaatgacggttcatgcgccaggaatccaagcaacctttatttcagcggaaacagcaacttggctgtacagactatcagatcagtgaatcccaaaggcgttcacatattcgttacaaaatgtataaacgtcaggttgagaaaacttaagctggttgcaccgggaaccagccccaatactgatggcattcatgtcagccactctgacactgtgataatgtccagaaataccattgcaactggggatgactgtgtctctctgataccaggactcagaaacattttcatcaacaaactcacgtgtggccctggagatggtatcagtatccgtagccttgggaagtatg

SEQ ID NO: 2843 - DNA, 365 bp, Glycine max
  Clone ID: LIB3028-019-Q1-B1-D11
aaagagcacaagagttagcaaaagagaaagccgatcttgcaattcaaagtctccaatgcctacctcagagtgtatttcgtttagcccttgaagatatggtggcatataaccttcaacggattgcataagcttgtgcatgctgatgacacattgttaaagaaaaaacacaaaaagattcttttggtcctaatatagggatgagagagccttgaactttttgtcatttcaagaatttcaagcaaatctacacttgtgctacttttggggtacttttatagtcattgaagggcaaagcaagcgcgcattctcatcatttaatatatttgcagcttcctgcaaagtacaagaacataatatattccatt

SEQ ID NO: 2844 - DNA, 360 bp, Glycine max
  Clone ID: LIB3028-019-Q1-B1-D12
acctcttcctccactccctaagttgccaccacttcatccagttccaatctacaagaagccacttccacctcttcctccactccctaagtttccaccacttcatccagttccaatctacaagaagccacttccacctcttcctccactccctaagtttccaccacttcatccagttccaatctagaagaagccacttccacctcttcctccactccctaagttgcctccactcaagccacttccacctcttcccaaacttcctcgaaagcactttttccatcaccccaaatggttcccagtacgaccttcttcctctcatccttaggctttatatattaatattgcagaagtagatgatta

SEQ ID NO: 2845 - DNA, 398 bp, Glycine max
  Clone ID: LIB3028-019-Q1-B1-D2
cactaaccaacttcgttctttgttccgttctactttcacttcccaacaacaacaagaagatgccttctgcagaagcttcctctgaaaccatttgtgtcaccggcgctggtggcttcatcgcctcttggatggtcaaactcctcttggaaaaaggctacactgtccgaggaaccctcagaaatccagatgatcccaagaacgggcacttgaacgagtttgaaggaacctccgagaggttaactctgcataaggttgacctccttcatcttgactccgttagatcagttattaacggttgccatggtgtctttcacactgcttctcccgtcaccgataaccccgaagaaatggtggagccagcggtgagtggagctaagaatgtgatcatagctgctgca

SEQ ID NO: 2846 - DNA, 387 bp, Glycine max
  Clone ID: LIB3028-019-Q1-B1-D5
gacgccaacacctggcatgccagtaagtcatatatggactcagaaatcatctcttgcagctgatcatgcagctgctggaaattttgagactgcactgaggttgctgaaccggcaacttgggataacaaattttgcccccctgaaaaccatgtgtctggatcttcatactggcagtcattcctaactccgggcattttcttctgctccgatcatatcacttgcagttgaaagaggttggactgagtcatctagtgcaaatgtgagaggcgcaccggcacttcctttcaaattgtctcaattggatgaaaagcgtaaagctggttataagtgtactactgctgggaaattcactgaggctcttaagacatttgttactactcttcatac

SEQ ID NO: 2847 - DNA, 347 bp, Glycine max
  Clone ID: LIB3028-019-Q1-B1-D6
gaccccaacacctggcatgccagtaagtcatatatggactcagaaatcatctcttgcggctgatcatgcaactgctggaaattttgatactgcaatgaggttgcggaagcggtaccttgggataacaacttttgcccccctgaaaaccatgtttctggatcttcatactggcagtcattcctaactccgggcattttcttctgctccgatcagatcacttgcagttgaaagaggttggactgagtcatctagtgcacatctgagacgggcaatggtacttccattcaaattgtctcaattggacaaaaaccgtaaagctgggtagaagtttagtactgctgggaaat

SEQ ID NO: 2848 - DNA, 177 bp, Glycine max
  Clone ID: LIB3028-019-Q1-B1-D8
ggcacatgtaacttgtctacttagccttgtgtgtgttttgctcatgtctcagactattttgcgaagatgcgttggcgttttctttttcaaaagccacatacatacttgatttgcgagggatagaatattacatggttgacaatctaggcaaagactggccaccgaggtctatttttg

SEQ ID NO: 2849 - DNA, 378 bp, Glycine max
  Clone ID: LIB3028-019-Q1-B1-D9
aacagtcataacttgcatacgaatctgcaacatatattcatggcagctcttggggaccaatcagaagaacaggccatggctgcccaacctaaacctcagaaccgacccatttctaacatcgtcatcgtccttggtagcttatgattgtgacggtttcgacaacgggttccttgggtccgttatcacgggacatacatagatcttaatataagcttggtttggccgggaaaagatacaactttgggggttgatatttgtaagcacaatatcatctgctcttgtagcgtatgctgctattcatgcactataaccagacttgagtttcagtgcaggcactgctagtggcttcattgccatctgagctaatattggtaatgt

SEQ ID NO: 2850 - DNA, 397 bp, Glycine max
  Clone ID: LIB3028-019-Q1-B1-E1
ttttcaaatggttattgcttgcagagaaagacttcaaaactactgcttttgaaagttctcaatcacatagtgggtcctattatggtgccgataattccaattataatagtaattattatcaggagccagtaaccactcaagtgcagcatggtgtttctggaattcaatatcctgatagctatcaacagccatttgatcctagatatggaagaggctatggtgctcctactccaccccagcaacctcaacagcctaatttgtttgttccaccacagactactcaggttgtgcaaactccccagccgactttctcaaatactgctgttgcaccaccacctttgagaacttttgatcctcaaactcctcccatgcttagaaatgtggagcactatcagca

SEQ ID NO: 2851 - DNA, 377 bp, Glycine max
  Clone ID: LIB3028-019-Q1-B1-E10
ggtagctagtactgctccctctgcgacttcgtttcgtatagggattttggccgccaaataaacagtctcaccataaactccaaagtcccaacgctaaacgaaaccaaaccccaaacacaaataccgttgttgtctgttgtctctgtcgtgtctatattcgcagatctctcactcattctctgttgtttctctgcccaacttcgaattcgaaagcataaacatgtttttggcgagacgcattttccgagcaccctccctttgggcgttgcactcttcctacgcgtattcgtctgcctcagcagctgcaagtcaagccgagagaagcatcatcgaaggacccagaatcgatttggtccggcaccaagtcaaatccatct

SEQ ID NO: 2852 - DNA, 377 bp, Glycine max
  Clone ID: LIB3028-019-Q1-B1-E11
ttaaactcatatactaataataaagtcttattgcatattttatatataaaaatatgcaataagactttattattagtatatgagtttaatcatcaagtactaacaataaagtcttattgcatatttttatatataaaatattttactctatgaaagaaattaaagtatgaataatggagacatgctccctatgacttaatgagttatttttggattgggcttgttttgcaggaggaaggttacccatgacatggtacccacaagggtatttggctaaagtgccgatgacaaacatggacatgcgtccaaacccagcaacaggatacccaggaagaacctacagattctacaaaggaccagtggtgttcccatttgga

SEQ ID NO: 2853 - DNA, 266 bp, Glycine max
  Clone ID: LIB3028-019-Q1-B1-E3
tagaaatagaaatactgaaatactagagctgaaacaagcttagccctaatccgatcgaattgagatttcaatttgtcaacagaaaaacctaatgtctcatcgagactctgattccaagcgtcgccactccaagttcgatcgagaaccaagtcccaagagatatagaagggatggtaaacaagacagagaaagggacaggaacagagtaacctcagatggaggagatcagagaaacccagcagatcattttacgcgtgaacccgtcg

SEQ ID NO: 2854 - DNA, 386 bp, Glycine max
  Clone ID: LIB3028-019-Q1-B1-E4
cttcttcttcccccagaccggaggagagaaaaccaaaatcactcttcactgttagggttagggtttcgattttccccttatccaatctcgcagcagcgagatgggcgccaattcgttgccatcggcggaatcaaacttcgatctcgacgagcagatctcgcagctcatgcaatgcaagccactttccgagcaccaggttagagttttatgtgagaaggctaaggagattttgatggaagaaagtaatgtccagcctgtgaaaagccctgtgacaatttgtggtgatattcatgggcagtttcatgaccttgctgaactatttcgaattggagggaactgtccagatacgaattacttgtttatgggtgattatgtggaccggggtt

SEQ ID NO: 2855 - DNA, 372 bp, Glycine max
  Clone ID: LIB3028-019-Q1-B1-C9
ggcttctttgaagtgagttgatcatttcatcagagcgaggcttccatgttcaccacagccatgccagaatccaatgattccgtttccgttgacatggagaagatctacctcggtggaaaggagcatcatattcgaactggctgtggtactgtgtctgtcatagtctatggcgatcctgacaagccagctctgatcacttatccagatttggctctaaactatatgtcatgcttccaaagactatttttctgtccagaagcagcttctttactgcttcacaacttttgcagatatcatatcagtcctcctggacatgagagttcttgcagttgggagcagctgcaatttgtgtcaaagaatctgttccttctg

SEQ ID NO: 2856 - DNA, 393 bp, Glycine max
  Clone ID: LIB3028-019-Q1-B1-E5
atgctacagatgctgctagaagcgcttctgatattgtcctcactgaacctggtctgagtgtcattattagtgcagtgctcaccagcagggcaattttccagaggatgaagaactatactatctatgctgtgtcaatcaccattcgtattgtgtttggtttcttgtttattgcgttgatctggaagtttgattttgcacccttcatggttttgattattgccatactcaatgatggtaccattatgactatatccaaggatagagtgaaaccatcagcacttcctgatagctggaaactgagggagatatttgctactggcgttgtgctaggaagttacatggcactaatgacagtagtagttttctgggcaatgaaggataccaacttcttcg

SEQ ID NO: 2857 - DNA, 299 bp, Glycine max
  Clone ID: LIB3028-019-Q1-B1-E6
ctacaacagatccggaaatgagtccttctgaaaatggcgtcactcaacctagtctaacatgacttgtgatcacaatacctgtgcctgggactcaataccacatgatcactgcgccaacgccagatcctgtgacacctaaccttgttaccgggcttgatgatctacctcagccgtggactcgataactacgataatccacactggaacgtgttgtggctgaccggcattacagatcttcagattctgcccagcctgatagctcaatccgagacttctctcagtacgcaaccacagatcct

SEQ ID NO: 2858 - DNA, 370 bp, Glycine max
  Clone ID: LIB3028-019-Q1-B1-B12
gcacatttgaacatacgtaatgatgagaaagagagacagaaagagaaagagaaagataatcgttaatctgaatgggttacatccaccatggaagaaccggtctcaggtacatacacagattcagatccgataccggtgtagactcaaactctggcagatcgcattcgcgcgctgcattcgcctcccattccactatccacggcaacatgctttttttctcaaaaagcgagttctatctcaaccaaattatcgtacaggtggtacgcgacatgcgcagggagcaaaacgagcgtttgcgcctctgtctcgacaccgccaacatctacaaggagtcggtgcaggactacattggcgttgggtccctcatcgc

SEQ ID NO: 2859 - DNA, 399 bp, Glycine max
  Clone ID: LIB3028-019-Q1-B1-B2
caatcctcagtttctttcttcaacgtttccatcatacacagatcccaatcctctctcaagccctaatttcccctcatttccatggccacagaagagcccactgtcgcggtggaacccgctcccgaacctgcctccgccgatcctcccccggaggagaaggaggagaccaaacctgaagccaaggctaagaaaaccaaggagcccaaacctaaaaaggtttccagacctcgcaaccctcccactcatccttcctacgaagagatggttaaagatgcaattacctcgctgaaggagaaaaccggttcgagccaatacgcgattgcgaagttcatcgaggagaagcacaagcagcttccaccgaacttcaagaagcttcttctctaccatttgaagaagctc

SEQ ID NO: 2860 - DNA, 394 bp, Glycine max
  Clone ID: LIB3028-019-Q1-B1-B3
agcaaatattgcctattcggcaatatggcggaaaatggttcaattgagctgaacaagtttgtgttgttttgtttgttgttgctaatacaagtggcagtttctgaaatcatttttgaagagcgatttgatgatggatggcgaagtaggtgggtgaaatcagactggaaaagcagtgagggcaaagcaggttcattcaagcacacagctggaaaatgggctggtgatccagatgacaaaggtattcaaacatccagtgatgccaaacactttgccatctctgcaaaaataccagaattcacaaacaagaacagaacattggtccttcagtattctgtaaaatttgagcaagagattgaatgtggtggagggtacatcaagcttctctctggatttg

SEQ ID NO: 2861 - DNA, 397 bp, Glycine max
  Clone ID: LIB3028-019-Q1-B1-B4
atttttcctctgcgcctttgcatttcagcagcacaccacaatggccaccaatgcattcactggcacatctctctccatgcgatctgtcattcctcaaacacaggcatttgcctcaatttctggcccgacatctgcttcaatttccagctttgggagaaagaatgtttcttttagcttgcagccacgcttaattcgccttaaaatttcctgtgctgccgctaaaccagagacagtagagaaggtgtgcaaaatagtaaagaagcagctggctatgcctgaaactgatgtggtgactggggagtcaaaatttgcaactcttggtgctgattcccttgacacggttgagatcgtgatggcacttgaggaagcatttggtattgccattgaagaggacagt

SEQ ID NO: 2862 - DNA, 392 bp, Glycine max
  Clone ID: LIB3028-019-Q1-B1-B5
cagtgttgcctcaaagaacaatgatgtgcaattggcagattttattgaaagcgagtttttgggtgaacaggtggaagccataaaaaaaatctctgaatacgttgctcaactcagaagagttggcaaaggacatggtgtgtggcactttgatcagatgctactccatgaggaaggagttgctgcttgattaacattttttttctacctctcgttcgtgcatctagttagttattcggattagtattttcaggtcttttaatgctagagatgaacaaagtggatatggagtaatattggtcatttgtatgtcgtgttttttttagtaatattggagtaatatggaatttgcgtattggactaatatggaattgacgtattgttggagtaatatg

SEQ ID NO: 2863 - DNA, 266 bp, Glycine max
  Clone ID: LIB3028-019-Q1-B1-B6
ggagttgtccactaagagcatggctgtacaagctcttgtatcatcagcatctctgaccttcgcagccgaggttacaagacaaagtcttggctcaacatcactcgaatctcccattggcgtctcaagatgagccacctttcgtgtcatcgcagctgggccacgccatgtcaaacaaggatcagctagacccttgtggtttgcctcaatctcgagtctgtctcacgtgcatgggagccttccgggtgcctacggctttgagcctccgg

SEQ ID NO: 2864 - DNA, 241 bp, Glycine max
  Clone ID: LIB3028-019-Q1-B1-B7
gctagcaaaaggacacatcgcacatgctctgttttgatgcatacatttccatttctctatttaacacttgttaccaaattctcgctacatccgccttcttttttctctctccatccaacatcgaaacgaggtcgttttgtgttccgccgaaggcaccggaggttgtagcaggctagcagcgatggctttggcatccaatctcggtggcaagattgacaccgccgaagttctctctgccgtt

SEQ ID NO: 2865 - DNA, 394 bp, Glycine max
  Clone ID: LIB3028-019-Q1-B1-B8
agagcatcactgaactaacaaagcaaccctatgtcgaaggtggtttgtgtcaccggagccagcggcgccatcggatcatgggtggtcctactcctcctccagcgtggttacaccgtccatgccaccgtccaagatatcaaggatgaaaatgagacgaaacatttggaggaaatggaaggagcaaagagtcatctccatttttttgaaatggatcttcttgacatcgactccattgccgctgccataaagggttgttccggcgtaatccaccttgcatgtcctaacatcattggtcaagtcgaagatcccgagaaacagatattggaaccggcgataaaaggaacggttaatgtgttgaaggcggcgaaggaagcacgggtggagcgcgtggtgg

SEQ ID NO: 2866 - DNA, 381 bp, Glycine max
  Clone ID: LIB3028-019-Q1-B1-B9
agaaaatggaaagtggggttgtggctgtgaacaacaacatcaacaactatgaatccaaggcaacttccaccatcaccattaagggcattctcagccttctaatggaaagcattgatgatgagaattgtgatggtggtggaagcaagaagagagttatttctcttggtatgggtgacccaactctcaccacattgttccacacaccaaaggttgttgaagaggctgtcgctgatgctcttcaatctcgcaagtttcatggctatgctcccactgctggacttctccaggctagaattgcaattgctgaatatctatctcgtgaccttccttatcaattatcacgagatgatgtcttcatcacttgtggatgcacacaagcca

SEQ ID NO: 2867 - DNA, 386 bp, Glycine max
  Clone ID: LIB3028-019-Q1-B1-C1
gggttttagcgcagcttcttctagatttaaggaagatgggtaaggaaaaggttcacatcagtattgtggtcattggccatgtcgactctgggaaatccactaccactggtcacctgatttacaagcttggaggcattgacaagcgtgttattgagaggtttgagaaggaagctgctgagatgaacaagaggtcgttcaagtatgcctgggtgctggacaaacttaaggctgagcgtgaaagaggaatcaccattgatattgctttgtgggagtttggaacaacacagtattattgcacagttattgatgcgcctggacatagggatttcattacgaatatgattactgggacatctcaagctgactgtgctgttcttatcattgat

SEQ ID NO: 2868 - DNA, 322 bp, Glycine max
  Clone ID: LIB3028-019-Q1-B1-C10
taagaagtcaaatatgcaaagattttccttcacctggacttggctcaagatattgagttgggtttgcttgatcatttctattatctcacttgtgggttccatccaaggcctttcggttagtatcaagaaatacaagcccttccaagcagaacaatagaactttcatacttagtattccaacttgagccaagagtttctattgagggcgacaaaatttgtattactatgttttgaaatagttgttatattttcaattctcgaaatcgagacaacttgttatactaaagtaatataataaaatgtttactttgctatgttaaaa

SEQ ID NO: 2869 - DNA, 378 bp, Glycine max
  Clone ID: LIB3028-019-Q1-B1-C12
agcaagcacagcaacaacaacagtgatgaaggagccaagagcttctcttcttcatctgattgtgacaatgacggtgaattggttccggaaataaaccagaaccaccaccactccaccactggtaagccgccaataatccacaacacccggcacaaggggttggttcaagtgagaaccagtctccaacaacaattgggggtgcacaggaaagggtgaaatttaaaagggcacacaaagaaactgcaaagataaaagagtcaaaggagaaagcaagagcaagagcaagggaaaggactacgtacaagattattatgtgcaatgttaacaccaacaacaacaacacaggaaggaaggtgcaacaacaagacttgaagaaaa

SEQ ID NO: 2870 - DNA, 396 bp, Glycine max
  Clone ID: LIB3028-019-Q1-B1-C2
gtaatgcagcaaagagggaaaggtaacaaccgtagatccaggagtttctcaaggtcccgtctcgctgttgaaggcacttagccacacacacacacccaccgctttcagctatggatgagcgtcacattcagaaatcttactggcttcagcattccgccgatctctccgtcgaggcaatgatgctcgattccaaagccgctcatctcgacaaagaagagagacccgaggtgctttccctattacctccattcgaaggcaagtccgttattgagcttggtgctggtattggtcgatttactggtgaattggctctgaaagctggtcaattgcttgctgtggacttcattgacactgctatcaagaagaatgaaaccatcaatggacaccacaaccatg

SEQ ID NO: 2871 - DNA, 302 bp, Glycine max
  Clone ID: LIB3028-019-Q1-B1-C5
gttgaaaagagaaaagaaagagaatgggttctgctctgtggacctgtctgagtttgttaacacttgcgtctgcatccttcgccgccaaaccaataacatgaattaaggtaccaattgccagaaacaagatgccgacctgtgcctttgattacatcaggaaccggaatggtggtacggaaatgcagcgtcagctggacacatagccacgtactggcatccagtcatcacggtcctacctagtaggtcagctcagcatgtacatacaataggtagctggagaatcagctggcacagtcatcgcc

SEQ ID NO: 2872 - DNA, 320 bp, Glycine max
  unsure at all n locations
  Clone ID: LIB3028-019-Q1-B1-B11
gagcgttttaacagaagtaaggctgaacatgagaagcgggaaggcgaggaggagggtgctggtggaggaaatgaacctggaggcagggatggtgaacaggaaaaggttggggagaaaaacacggttcgcatatttgtgcatagcggaaccgtggccgaaggtgtcgggggtggcgaaggtggacctggagagtggggaagtgaagaggcacgagtacggagagagaaggttcggtggagagccattcttcttgccaacacgtggagggaatgggaatgaggatgaanggtacgtgatggcttttgtgcatgacgagatga

SEQ ID NO: 2873 - DNA, 251 bp, Glycine max
  Clone ID: LIB3028-019-Q1-B1-C6
gtacactcaaaacagaaagcagaaagcatagctcatccttgagttaacagatggcatcagcttcttccatggccctcccatccccatccttggctggcaaagccgtgatgctgggcccatcagccccagaagtgcgaagggtgagcatgaggaagaccgtcacggaacaggtctccgcaggaagcgcatcgtatggactagatcgagtcacgtacctgggcccaatctctggccagcctacgtccgtacct

SEQ ID NO: 2874 - DNA, 394 bp, Glycine max
  Clone ID: LIB3028-019-Q1-B1-C8
tgccatttcaatccccagtttcttcttcaacgtcctcttacgagcagatcccaattctccttcccagtttcaaaccctaattccctcattcccatggcctcagaagagcccactgtcgcggtggaacccgctcccgaacctgccaccgccgagcctcccccggaggagaaggaggagcccaaacctgaagccaaggctaagaaaaccaaggaacccaaacctaaaaaggtttccagacgacgcaaccctcccactcatccttcctacgaggagatgattaaagacgcaattacctcgctgaaggagaaaaccggttcgagccaacacgcgattgcgaagttcatcgaggagaagcacaagcagcttcgaccgaacttcaggaagcttcttctct

SEQ ID NO: 2875 - DNA, 367 bp, Glycine max
  Clone ID: LIB3028-018-Q1-B1-H5
cataacgcacaaagcaagctcatcctacagttttaaaaatggcatcatcctcctccatggctctctctgctccatccttggctggcaatggcgtcaatctgagcccatcagcccacgaactctggagggtcagcattgagaacaacgtcatcaagcaggcctcctaccggatacccatggaagcgcccaaaccgcgtcaagtacatgggcccaatctctggcaagcccccgtactacctcataggctagttcccatgtgactactgctgagacactgctgggctttcggtagaaccagaaaccttcgccataaactctgagctcgagctgatccactccacttgggccatgcacggggtcttgggct

SEQ ID NO: 2876 - DNA, 358 bp, Glycine max
  unsure at all n locations
  Clone ID: LIB3028-018-Q1-B1-H6
ggtggtaatggcagcgtcactacaagcagcagctactttcatgcaacccaccaagttgagcaggagcaacactttgcagcaaaagtctactcagtccatttccaaggcttttggtttggaacctgttggagctaaaaaggtcacatgctcccttcaggctgatcttaaggacttggctcacaagtgtgttgatgctaccaaaattgcaggattcgcccttgccacctctgccctcgttgtctctggggcaagtgctgaaggtgttccaaagaggctaaccttcgacgaaatccagagcaagacctacttggaagtgaaggggacaggaacagcanaccagtgcccaacaattgatggt

SEQ ID NO: 2877 - DNA, 361 bp, Glycine max
  Clone ID: LIB3028-018-Q1-B1-H8
ccaaaatctgacatttatgcttttggaatggtgatcttacagttattgacagcaaaaccagcaatagcacttgctcataaggttgaaacagctattgatagcgggaatttaacagacatactggatccagaggctggagcttggccatatcaagagacactagacttggctttgctaggattgagctgtgcagaacttcggcgaagagaccggcctgatttacaagatcatgtccttccaacactagagagattgaaagaagttgttgatagggcccaatgctcagcttcaattgttactattaaatccaaacctcctaatcactttatctgtccaatacttcaggatgtgatggatgacc

SEQ ID NO: 2878 - DNA, 357 bp, Glycine max
  Clone ID: LIB3028-018-Q1-B1-H9
agtttccatcctctatatttcttcaatcttctctcccttctacttctagggtttcgcttctgcaacggacgaccttcttcaactcatcaaagttgactttgtgagccaattcaatcaggcttgagaaggtatcctagtgttgtttgttcaccttcatctccatgatggaatactgtaaagatgtcctcagctgtcttgattcggatacgtctcttaagatattcatgtgtctggatgatctggctgatcttgttcgggttacttgtgtctcgcgatcttggagacactttggtgagttatactagttcaaacaaagcatttgtttctcaaccgatgcctcagtttcatgaaaattca

SEQ ID NO: 2879 - DNA, 401 bp, Glycine max
  Clone ID: LIB3028-019-Q1-B1-A1
actacctaagcgcaccggcgagtccatctaggatgtctgaattatacaccgaatttgaatattattcttcggcttcaccctcttcattcgaagcaggcaacaaaattgatgatgacgatgaagacgaaaacaacaacgattacagctttgcgttttacgtgaatcgcgatcaatcagacaagtcgtctcgctccgccgaagagctcttcgacggtggcaaaatcaagcccttgaacgagtcatcacgtgcgacttctgttgctgaacaaaaaagaggcagagaaagagagagaagttcttcttcaacaagaacaacaaagttgtcgtcctcgaactcgggtgttcgtacggtggcacgatcactttctccttatagaaaatcatgggaagttgaacaacag

SEQ ID NO: 2880 - DNA, 379 bp, Glycine max
  Clone ID: LIB3028-019-Q1-B1-A11
ctgcttaaaagtattgagcggtttcatgttttagaaatcaaagattatgcatttttgttgcgggctacatagatcactctttatttcattgttatttcgttgggttttgataagaaccttactagaaaagctagccatgtagttcttgttctcatagctacaagtgattccagtttcagcatagttccatcatgttactgtgtttagagggtgacaagtataataattgggccagatatggttcctaagttaacatttctgtagctttattcgagtttgtagcgtcctctgttaagagcagccttagaaaatagggtcttgttacctaaaagcttttgcatcctggaaggcatgtattctttttattgctcatatatta

SEQ ID NO: 2881 - DNA, 380 bp, Glycine max
  Clone ID: LIB3028-019-Q1-B1-A12
ctctctcgacctcctttaaattacatatataattatgactcataggttctggatgaatttgctttgcgttgcattattaacattgatcctattacatggggcatcaagaggacatgatgatgtcgtcaaaatcggtgccatattcacattaaaaaccataaacggacgagtttccaaaattgccatccaagctgctgagaaagatgtgaattccgatcctcgcatccttgggggtcgtaaattgtccataaccatccatgattccaacttcagtggttttcttggctttattggggccctcaagttcttggtgaccgacacagtagctataattggtccacaaagttcagtaatggcccatgtgctttcgcatcttgcaa

SEQ ID NO: 2882 - DNA, 393 bp, Glycine max
  Clone ID: LIB3028-019-Q1-B1-A2
atcactctagctgttgcaaatttctactagttttcaatggcttctgcagatgttgagttccgttgcattgttggtgggcttgcttgggtcaccgggaacgatgccctcgagaaagccttttcaatctacggcgacatcgttgaatcgaaggttatcaacgaccgtgagattggcaggtccagaggattcggctttgtgaccttcgcctcagagcagtcaatgcaagatgcgatcgcaggaatgaacggccaggaccttgacggtcgtaacatcactgtcaacgaagctcagagccgcgccagccgtggtggtggtggaggcggtggtttcggaagtggtggtggatacaaccgcggtagcagtggatatggtggtggtggtggcggcggcgga

SEQ ID NO: 2883 - DNA, 400 bp, Glycine max
  Clone ID: LIB3028-019-Q1-B1-A3
caaaagacaactgaataaccactcaaataaacatctttctccacaaacctagcgggtctccacttatccaaaaaaagaattcactatccatcatggacattaggaaggttacctgtgccgttctcattgccgctgcctccatgagtgcagcattggctaccacagaggtctctgcacccgcccctggccctagcagcggtgcctccgccgccactgttggctccttggttggtgcctcagtcttgtccttctttgccttgttccactaaaatgtgcacggttatggggaaagaatgttgaaggaacatgcagctcaaggaagaaggctgcatatatttacttagatacacttatgtatggaataaagtgtgaacacaagagttatgtgcattgatatgta

SEQ ID NO: 2884 - DNA, 377 bp, Glycine max
  Clone ID: LIB3028-019-Q1-B1-A5
aagaaagggagcaattaaaaaaatcagaaaacaatcaagttggtttttatggaagctcttgtcgtttttatggttaccttttgactaagtgcagggttgcgtgaaatcgggactggggttttgctgtccgttggaggtgctattttcatcaatgtgtttctcagtcagagtactcgtcccgtaactctctttatccccataaaaactctcttttttttttttttttacattagtaatttgtctgttttaatatgagtgatttctcctcttttttttcaattaatctaacttttattggtttctggcgtacatagtagcatataatatatttttaacaaatggaaatagtatgttctttagattttcctttaaaaata

SEQ ID NO: 2885 - DNA, 393 bp, Glycine max
  Clone ID: LIB3028-019-Q1-B1-A8
aagctagccaatcctaattcctattcctatccttattactacataactctaaagtaagtaagaaaaatagagcaatttcacaacacaagacaactcttataattgtgtgagttattaattgagtatgggaaggtccccttgctgtgagaaagctcagacaaacaaaggtgcatggactaaagaagaagatgacagactcatatcttatattcgagctcacggcgaaggctgctggcgttcactccccaaagccgccggtcttctccggtgcggcaaaagctgccgtctccggtggatcaactacctccgccccgaccttaaaagaggtaactttaccgaagaagaagacgagctcatcatcaaactccacagtctcctcggtaacaagtggtc

SEQ ID NO: 2886 - DNA, 366 bp, Glycine max
  Clone ID: LIB3028-019-Q1-B1-A9
gaacgccgttgtgtcggagcttctctgccaccagacacctcggtcaaccacaggcacggccgtccagatcctgcatcaagatagcgtcaacgagacctgtggagcacattgtcctgatcaatgtgaaggaagaaacggaaccgtcacaggtgagtgacatggtgaacggacacggctctctggtgtcgctggatcaggttctccacctcagcgtgcgcccactcacacggcaaccgatgatacgccctaaccttcactcacatgctccatacccgctacattgccaatgaggatctctacacgtactcagcacagccaagccacgtcagcgtcttcatggcatacgtgctctgcatcaccgacgac

SEQ ID NO: 2887 - DNA, 378 bp, Glycine max
  Clone ID: LIB3028-018-Q1-B1-H12
gattgaaatacattggctatcaaattttgcctagagagagcactttgtatgagaaatatgataaaaatgatcctattctgagagaccctacaagcattaacaagaaggggtgggaatacacaaagaagatctatcttgacagccaaaatgtcatgttagacctcagaagattcagaaaaaggttgcatcgagcgtatgagtatacactctccaaatcaaaactgagtctccaacatcaaccaatgtgaatttcaatggtttcttttggttctccgtattcattgatgtgaaaaaaaattaaaattttcttaaaatctagaacattcttatatgcatataaaggcgcacctgaaaagttcttagtgcgatatgttgttg

SEQ ID NO: 2888 - DNA, 390 bp, Glycine max
  Clone ID: LIB3028-019-Q1-B1-B1
gtgcgagagagacagtggaaagaaaggaaagggatgacgctgggtctgatcaatgcgaatcctgtggttcacgccaagaaagagcgaatcgctcgttctgatgatcctcacgccgatgacgccgttgatcctctcgacatctatgatatccttttttttttttcagtttctcttctcccactcccaactcaactaactgttgagatccttgacttggctttgacaaatttcgtgagggatattcgggattccgaacatccttagtccctggaacagctcagtgttctctccgaggaatctatctccgttgacgacaaattaggccgaattctgataacttttacgccgaccgtacagcactgtagcatggccacggttattggactttgt

SEQ ID NO: 2889 - DNA, 317 bp, Glycine max
  Clone ID: LIB3028-018-Q1-B1-F4
aaacaccttagataatttgattcccgagtctacaacttcaactaatccaatcaccactaaagcggtccaaaggacatacttgcacgttcatacgtctcatgatatctgggatattttctcgatacgacattttaactcactgttacgcatcatacatcagatctaacatgaccaatgtccatcagtctccccagttggatcaacgccgattttccagttggatttattgattgcatcagtcttgtcaggttcatcataatttctgggagagccatgtcaagctctcacgtcggtggggggaatcgcaattctaacag

SEQ ID NO: 2890 - DNA, 366 bp, Glycine max
  Clone ID: LIB3028-018-Q1-B1-F5
ctttcttatttacaagttcctctcttctcttctcccttcacacacccattttccctttcactcacccctcattcaaatcatggatttcttgcaagcaccagaaaatcagatacttgtgggtgtggccgtggccgttgtagccattgggcttggtgctgtctatctctattcatctaagaagcgcaaaggttgcttggacccattgaactttaaggtgttcaaacttgttaagcgtgcacagctgagccataatgttgctaagttcacatttgcacttccaacacctacatctgttttgggtcttccaattgggcaacacataagttgcaggggtaaagatgctcaaggtgaagaacttatcaaacc

SEQ ID NO: 2891 - DNA, 368 bp, Glycine max
  Clone ID: LIB3028-018-Q1-B1-F6
atttttcttgcgtacacccgcattgttttttccccacaagcaagtttgcaaaggcaataatctctattaccctcattatccaaaatcagaaaaaatggccactagaggcctcaaaatttgcttggccgtgtcctctcttttcttgatcattcttgccatcgttattgtgaccttaattttgaccatctttaaacccaagaacccagatatatttctccacccagttgacctagaaaactttcaattgctttcacctaatacaactagtgcacccttaggcatagtgatcacaattgtgaaccctaattatggaaacttcaagtacgtgaattccagtggctatcttaaatatcgtgacaccattatag

SEQ ID NO: 2892 - DNA, 375 bp, Glycine max
  Clone ID: LIB3028-018-Q1-B1-F7
cgtgttctctgctgcgcgagctatctagggtttagaacctcgcatttacagaagacatggcgactgtggtgccaacctccgaagaagacgctgcactctccgtcgttcgattcgcctctgaacttgcctgggccgatgccggtcccgaggttgctgagccccaagttagcagactctgcgtggaggctgaagaattcattgttatgggaaagtggttggagctagcatcattgatgattacctctgctgaactgattttctcgaaggtttctgaaaaagatatagagtccatcttcactatcatctgcaatcttgttacaaagaccgaaaatccagatgaaatgatggagattggtgaagttataacgaccaaaa

SEQ ID NO: 2893 - DNA, 349 bp, Glycine max
  Clone ID: LIB3028-018-Q1-B1-F8
atggccaccaccactacccagcctccctcgaatatctgttttttccttctgttgttgcttctagcacactttcatttgggcataagccaacttgagctgaattactactctaaaagctgcccaaaagctgaagagatcatcaaggaacaagtcacacaactatataacaagcatggaaacactgccgtttcgtgggtcagaaatctcttccacgattgcgtggttaagtcatgcgatgcatcattactgttagcgacggtgagcgatgtagtgtcggagcagacatcggatagaagttttgggatgagaaacttcaagtacgtaaacactaatcaaagcaacggttgag

SEQ ID NO: 2894 - DNA, 377 bp, Glycine max
  Clone ID: LIB3028-018-Q1-B1-F9
attaattgcacgaatggcacttcgttgcttggtgatgtccctttctgttctcttcacacttggtcttgcgagagaaagccatgccagagacgaagatttttggcatgctgtttggccaaacactcccattccaagttcaatgcgagatcttctaaagcctggccctgcaagtgttgaaatcgatgatcaccctatgcaaattgaagaaacacagtacccgaaaaccttcttctataaagaagaccttcatccaggcaaaacaatgaaagtacaattcagcaagcctccctttcaacaaccatggggtgttggtacatgggtaaaggaaattaaagacactactatagaatgatataattttgaagagctatgcatca

SEQ ID NO: 2895 - DNA, 367 bp, Glycine max
  Clone ID: LIB3028-018-Q1-B1-G1
gaaggaaccctggctttcatcttctaaattggttgttaaacctgacatgttatttggaaagcgtggcaaaagtggtttggttgccttgaatttggattttgcacaagttgtttcatttgtgaaggagcgtcttggaaaagaggttgagatgagtggatgcaaaggacccataacaactttcattgttgaacctttcatcccacacaatgaagagttttaccttaacattgtctccgagagacttgggaacagtataagcttttcagaatgtggaggaattgaaattgaagacaactgggataaggttaagactgcatttgttccaactggaatgtctcttacgtcagaaatcgttgccccacttgtt

SEQ ID NO: 2896 - DNA, 366 bp, Glycine max
  Clone ID: LIB3028-018-Q1-B1-G10
tggcggtattaacattgatggcatttccactaagccttcttggaggaacttcagttacgctgaccttgccgttgccacggacgatttcagccctgagaacttgcttggaaaaggtggtcatgctgaagtctacaaaggatacttagcagatggtcaagttgtagcagtaaagaggataatgaggaatgaaaaagaagccgaggacagagctggtgatttcttgacagaacttggaatcattgctcacattaaccaccccaatgcaacacgcttgattgggtttgggatcgacaatggtctctactttgttctacaattggccccacatggcagcctttcctctttgctctttggttctgaatgttt

SEQ ID NO: 2897 - DNA, 346 bp, Glycine max
  Clone ID: LIB3028-018-Q1-B1-G12
gtaacagtgagaggcatctgagggggaataaaacatggtttcaacagcaagagatacagagcatgattacaaagcgccagggtgcgcacgttagcaccgaaccccgtgggttcctctcccctaactcgcttcgcccccacggcattcctacgctgatccacactcaaaacgcatcacacaaaacaccgtttcgcagccctaacggacgaggggggtaaaacaaaaaactgatgcaaatgtttcggataacgagattctcggggtttttctccgccgcaatgtttgtgactggtcgtgttactctctccccttccgtccaatccgaagccattcgatcctccaccga

SEQ ID NO: 2898 - DNA, 344 bp, Glycine max
  Clone ID: LIB3028-018-Q1-B1-G2
gaaaacacagttctcaccatttccctctcgattgtgaaacctgttgttgttaactgaacttttctgaacaagaatgtctgggcctggaaagggaggcaagggtttgggaaatggatgagcgaaacgacaccgtaaggtgctgcgccataacattcagggaatcaacagtcccacgattctccctttggccctcacgggtggcgttaaccgtcacagtggtctcatctacgaagagacacgtggcgtgctcaagatctttttggagaacgtgattcgtgacaccgttacctacactgagcatgctaggacaaataccgttaccgcaatggacgtggtttatgctc

SEQ ID NO: 2899 - DNA, 334 bp, Glycine max
  Clone ID: LIB3028-018-Q1-B1-G5
gtaacagtgagaggcatcggagggggaataaaacatagtttcaatagcaacagaagcagagcaagattagaaagcgccagggtgcgcacgttagcaccgaaccccgtgggttcctctcccctaactcgcttcgcccccacggcattcctacgctgatccacactcaaaacgcatcacaaaaaacaccgtttcgcaaccctaacggaggaggggggtaaaagacacaactgaaaaagatgtttcggataacgagattctcggggtttttctccgccgcagtgtttgtgattgttcatgttactctctcaccttccttcgaatccgaagccattcg

SEQ ID NO: 2900 - DNA, 365 bp, Glycine max
  Clone ID: LIB3028-018-Q1-B1-G6
tgggaagggaaggaggagagggagagggagagagaaagaaaggtgaattggattgcatctctctctgtgtgttggaagaggggaatcgtagatctgatttctttctttctttttaataattttgtgatcagaattattgagctgaacaaaagacaatgggattgtgggaagcttttctcaattggcttcgcagccttttttttcaagcaggaaatggagttatctctaataggacttcagaatgctgggaagacttcccttgtaaatgtagttgctaccggtggatatagtgaggacatgattccaactgtgggattcaatatgaggaaagtgacaaaagggaatgttacaatagagttatggga

SEQ ID NO: 2901 - DNA, 386 bp, Glycine max
  Clone ID: LIB3028-018-Q1-B1-G7
aagagagagggagagagatggagttgagcatgaaagtgttggtgaaagttgcttcgttgcttttcctattggaattcactgcaacagttgttgatgctcgcttcgatccaagttcattcatcactcagtttctccccaatgctgaagccaacaattactatgttaaatccacaacaaaagcgtgctgtaacagctgtccttgcacaaaatcaatccctccacagtgtcgttgttcagatattggagaaacatgtcactctgcatgcaaaacttgtatttgcactcgctcaattcctccacagtgtcattgcagtgacataaccaacttctgttatgaaccttgcaactcctctgaaaccgaagctcactaggaatattgagcatgt

SEQ ID NO: 2902 - DNA, 381 bp, Glycine max
  Clone ID: LIB3028-018-Q1-B1-H1
gaactttgcagcataccagcatgagcatgaagctcttccagctcttctccctactcccattcttcctctacttctacacaatagaagcagccgttggcccattgcaactgacacacccactggaccccttaactcagcaagaaatcaccctcgtcaaaaccatagtcctaaaaaaagtaccccaagccagccaaccgcgtcttcttccactacgtcggcctcgacgatcctgacaaggccgccgtcctcaaatggctctcctccggcgcccggacgccgcgcaacgccttttccatcgccctcatcaatggccaaatccacgagctcaccgtcaaccttctctccccgcgaaacgttgtcttgggacaaatccacacaagg

SEQ ID NO: 2903 - DNA, 381 bp, Glycine max
  Clone ID: LIB3028-018-Q1-B1-H10
ttttgctttcaaaagatgagatagtacaaaagtgcttgtgagtatcgtatctatccagtgtgtttcttcttcttctctttcaagggtagatttctgaagaagaagaaaacccttacaaatctaactccgattgaaatttgaaagcgttaaaccctaaacccccaaattgattcattccgctcgttggtgtcatggcttcttcatcgagtagcggattgacgttcaagctgcaccctctggtgatcgtgaacatctccgaccactacaccagggtcaagtctcagatgaacccaacccacgcgccaccgcacaccaccaccaacaacaacaacgccaacggcggcgacggcgtcgtttcgccgccgctccacccgcgggtct

SEQ ID NO: 2904 - DNA, 382 bp, Glycine max
  Clone ID: LIB3028-018-Q1-B1-H11
tataacaaaaaaagtatgaaaggaaaagtactaggttccgcagtttctctcatcctagtggtgggtgtggtaattggcgtggttgctgtagttcaaagcccaaagggcgtgaacaacaacaacaatggaggagaattgaaaaccagcaacagggccgtgacagcgttgtgccaaggctcagacgaccagaaactgtgccacgaggttctgtcatcttcgaacagcacagacccaaaggagtacatcgcaaccgtggtgagaacctcgatggacagcgtgatcaaagcgttcaacatgagcgacaggctgacggtggaacacggcaacagcagcgccggaatgaagatggctctggaggattgtaaggacttgttgcagtccg

SEQ ID NO: 2905 - DNA, 269 bp, Glycine max
  Clone ID: LIB3028-018-Q1-B1-F3
attagattcatacatttaactaagaactttattatccttatctagctttatctatgatatgaagcattcgcgctatacactgtattttcggaagtgagactgcacgattgtttttgtgaatactccatttgccatcgtagtctggattcacgtttgtttgatcactcagtctcacaactcgaatatgaggactctctcaagttcgtatcgcagtggcagcgatgtcgcatcatctgccggtgacattcactgggtttcaacttaagcag

SEQ ID NO: 2906 - DNA, 364 bp, Glycine max
  Clone ID: LIB3028-018-Q1-B1-D7
aaggtaaaggtccttgttgttccggtgtgctgctagagaatctggtgaaggatgtcaattgttccaatcaaccaaggtcactcccaggactcttgggatcaattcatcgattttcctctccctccttccatctccagcttcttccccggcttcgaattcggattcggctcatcggtggttaacacacgtgtggactggagggagactcccagagcccacgtgtggaaggtcgtgcttcctggcttcacaatcgaggacgtgctggttgagctacaagaccatagggtgctccatgtcaacgtggagagtggtaacttcctgacgaggtttaagattcccgacaacgggtacctcgaacaactca

SEQ ID NO: 2907 - DNA, 367 bp, Glycine max
  Clone ID: LIB3028-018-Q1-B1-D9
caccaataagggagttcaagaatttggagacaaaaggggttcctttcccaaagaaccaacccatgagaatatactctagcctttggaacgctgaggattgggccacaaggggtgggcttgtgaaaacggattggagcaaggccccattcacagcctcatacagaaacttcaatgccctaacctcttcctccactggccaatcactggacgccacggggctggccaagatccattgggtgcaaaagaattacatgatttacaactattgcactgatattagacgtttcccacaaggcctccctccagaatgttccattgcttgagaatgttcattattcaattcaatgttgcatattattatatatat

SEQ ID NO: 2908 - DNA, 78 bp, Glycine max
  Clone ID: LIB3028-018-Q1-B1-E10
aaaaaaagaattttgaacctgcctctgttaaagtttgcattttttttgggtgggttgcaagtactgtgcaagctttgg

SEQ ID NO: 2909 - DNA, 378 bp, Glycine max
  Clone ID: LIB3028-018-Q1-B1-E11
tagttagcctcttcttgtttctcctgcaatcaacgacacccccccaaaaatgacaggagagacagtgaacccaaaagcttaccctttggccgatgcgcaactcgcaataacaatactggatcttgtgcaacaagctgccaactacaagcaactcaaaaagggtgctaatgaagcgaccaagacactgaacagaggcatctctgagttcgttgtgatggccgcggacactgagcctcttgagattcttctccatcttcctcgcctagctgaggataagaatgttccctatgtattcgtcccatcaaagcaagcccttgggcgagcatgtggagtcacacggccagtgattgcatgttctgtaacaactaatgaaggaag

SEQ ID NO: 2910 - DNA, 355 bp, Glycine max
  Clone ID: LIB3028-018-Q1-B1-E12
tggacatggttctcggttagcttttccgtccttaattcaggaaaatcgtgtaatatatgttctccatgtaaatgaggatggaagccttttaaacacaatttctgatgaagagtgctctctagttgattgggtccttgtagatagtgcaaagggtggcagtggtaaagcattcaattgggaccagttgaaactgccaaacattaaaagcaagtatggttggctcttagcaggagggatccatcctgagaatgtttctgaggctctatctactctcaggcctgaaggggtggatgtcagcagtggcatttgtgcatcagatggtatccgtaaggatcaatcaagaatagcttctttc

SEQ ID NO: 2911 - DNA, 375 bp, Glycine max
  Clone ID: LIB3028-018-Q1-B1-E2
gtccctcacagaagctatagggacagcatggacattcatgctgtttggaattgtggccattgtggcaatcttcgttgtcaatgtttttgtgcctgagaccaaaggggtttctatggaggaagtggagaagatgctggaacaaagatctgtgcagttcaagttttgggagaagagagattctggctctgagaagcactgactcaaagaacaataaaaagaaaaaagcaaaattgtttgagtcatgttttagtttttatagcttaaaatgttgaaattaagtggcttgtgaagttatgggtatttgatgacaatggttgttctctttgggtaagatttggtgatagttagcattttaactctaatgagtatgtaact

SEQ ID NO: 2912 - DNA, 349 bp, Glycine max
  Clone ID: LIB3028-018-Q1-B1-E3
gttctatgctttcaagtactaccaattgggcactttgtttactgtcatcattattttttcagcatcacaagattgtccccttattcaacagttagctggctaaccaaattatctattaattaggcaaattatgggaaattcagaatccaagttgccaaccggttttaggttccaaccaaccgattaggagctcattcttcactaccttagtaaaaaggtatcatccatacccttgtccgtttccatcattgcagaggttgatatctacaacttagatccatgggacttaccagctgaggcaatctttggtgagaaagaatggtactcttttagtctcagagaccgaaag

SEQ ID NO: 2913 - DNA, 379 bp, Glycine max
  Clone ID: LIB3028-018-Q1-B1-E4
catcaattgtattgctagaggtcaaaagatccctctattctcagcagctggtctcccccataatgaaattgctgcacagatctgtcgtcaggctggcttagtcaagcgactagagaaatctgataatcttcttgagggtggagaagaggacaattttgctattgtgtttgcagctatgggagttaacatggagactgcacagtttttcaagcgtgactttgaggagaatggatcaatggagagagtgactcttttccttaatttggcaaatgatcctacaattgagcgtattatcactcctcgtattgctcttactactgctgaatatttggcttatgaatgtggcaagcacgttcttgtgatactcacagacatgagt

SEQ ID NO: 2914 - DNA, 202 bp, Glycine max
  Clone ID: LIB3028-018-Q1-B1-E5
tgcacatggatctcggttatcttcaccgtccataattcatcacaatcgagtgagatatgttctccatatgaatgatgatagaagcctattactgagagtttccgaataacagtgctctctaattcattggctcattgtaactagtgcccatgatgacagtgtgacaacattcacatgggaccagttccaactgccaatcatt

SEQ ID NO: 2915 - DNA, 372 bp, Glycine max
  Clone ID: LIB3028-018-Q1-B1-E6
tggaacttgacatagtaccatttgattcatgttccaaagagtaccaaaatctttatgaagagtggttcaattatgcagatgcagatggggatggtcgttttacgggaaatgaagccatcaaattctttgccatgtcaaacttatctcgacaagaacttaagcaggtatgggccattgcagattcaaaacgagaaggatatcttggtttcaaagaatttgtcattgctatgcagcttgtttctttaggacaatgtggatactcaataacacacgatttgctaactagtgatgctatgagacatgcaaaaccacccacaatggatggtttggatgtattgcttacaaagaaaaaacgtaaacaaaaagataaag

SEQ ID NO: 2916 - DNA, 359 bp, Glycine max
  Clone ID: LIB3028-018-Q1-B1-E7
gttcgagatgttgcttgggcacccaatttagggctccctaaatctaccattgctagtgcatcgcaggacggtaaagtgattatatggaccgtggcaaaagatggggatcagtgggaaggcaaggttttgaatgatttcaagacacctgtttggagggtctcatggtctttgacaggaaacatactggctgtggctgatgggaacaacaatgtgacattgtggaaggaagcagtagacggggaatggcaacaggtgacaacagtggagccttagaatgtgatttgaaaatggttagaattttcgttttgaaatatagttgatatcttgttctttgcatattatacagttgattaattgtg

SEQ ID NO: 2917 - DNA, 342 bp, Glycine max
  Clone ID: LIB3028-018-Q1-B1-E8
acctactctccgctcccaagagcacgcaccaccactattgcacttcttcctcgttctccctctttttcttcttcttcgctaaacccttttttcgatctcactaacacaacaatgggagacgagaagaagggcaagcctgctgcttccggcgtgtggtccaccatcaagcctttcgtcaatggtggagcctccggcatgctcgccacctgcgtcattcaacccatcgatatgatcaaggtgaggattcaacttgggcaaggatcagctgcgcaggtcacttccaccatgcttaagaatgagggttttgctgccttctataagggtctatctgctggattactc

SEQ ID NO: 2918 - DNA, 376 bp, Glycine max
  Clone ID: LIB3028-018-Q1-B1-F1
atcaaattcaaacagaaccttctgcagagccaaagacattttcagttaaatgtggagtaaggggtaacactggtccagcctgcaatgtggttggaatgattgatcgaatgatattgggtatacaacacctgtacaagagaccaatatatgcgcggatgcctgaatgcagtattaattctcccaactatggaccattacctcctgatgctcctgcttggtgtcaggccccttttgatcctgaaggactcctaagttcagtgatggctattgtcacctgcttgattgggttgcactatggacatattattgtccattttaaggaccacagagtgagaatcatatactggatgatcccaacctcctgtcgtttagtttt

SEQ ID NO: 2919 - DNA, 233 bp, Glycine max
  Clone ID: LIB3028-018-Q1-B1-F10
gaaatcattattccactcacttattggagaccatcagttgtattagatgtccaacatctaggacagctctgaggctagttgtggcactgtgaatcccatggacaatttttgctgtttcagtcacggtactatctaaagcatgttgatgtgactgtgtctcacactatcatttcatatctgaagcacatgctcctctttgcgacattttgtttctgttcctgactaggttttgc

SEQ ID NO: 2920 - DNA, 380 bp, Glycine max
  Clone ID: LIB3028-018-Q1-B1-F11
tttcgagttgcgccattttcacctgtcctctctctctctctctctctctgtcaccgtgttgcaagtatgaaggactgttggttttttgacaacaatttcaatggtctgtcggatgagagtcttgatgatgtgatggacatggagcttttggatttgccccttgactttgaggatgtggaaactgatgctgtggaagaacaagattgggatgctcagctcaaactccttgaagacccaccaccaccacttggagttttcccactacaacaatcctctgcattctgtggacaaactcggaatgagaatgcgaaactcggcagcaagagtttctctgcttctctagcgaagactgtcagacctgcatatggcaaaactattcc

SEQ ID NO: 2921 - DNA, 370 bp, Glycine max
  Clone ID: LIB3028-018-Q1-B1-F12
cgacgtgaaagcgaagaaaaatgaagaattctaagaaaacttgcgcgcggaagtaccacaaatcgggaaatccacgcttgcggtggacacctgaactccatgaatactttgttgaaattgtggaaggtcttggcggaaaaaacaaggcaaccccaaagagcattctgcatatgatgcatgtgaaaggactgaggatctctcacattaaaagccatcttcaaatgtacaggaacatgaagggaggtacgattctcacatcaatgcaacaggaaatgggagaaaatgtgcatgttaaggatcatcaaccaatctgctccaactgttcatcccaaagcataatcttcagattacaaggggacaaatttaaatt

SEQ ID NO: 2922 - DNA, 370 bp, Glycine max
  Clone ID: LIB3028-018-Q1-B1-F2
aatagatatttacaacacactcacttttcactctcccttcatttagtttatatatagtttcatttcctcttctaaaacaacaatagttcatatagtccatttcacttcactaaggttatttcttagattgcttccatgggagacaatgttgtagtgtccaatatggagctagagaggttgcttagcatgaaaggaggcaaaggtgagggaagctatgccaacaattcccaagcacaggccatacatgccaagtccatgcatcaccttctcaaagaagccctagatggagttcaacttcaggcccctaacataccttttgtggttgtggatttggggtgttcatgtggcaacaacaccatcaatgtggtgg

SEQ ID NO: 2923 - DNA, 291 bp, Glycine max
  Clone ID: LIB3028-018-Q1-B1-D6
atttgatgctctactggaattcttaactgtccgcaaacatcttgaactttatgcatagaataaaaggtgttccacatttagcaatagacagtgtcgttatgggaaagttgacatcatttgacatattgaagcatgctaataaaccagcattttcacttaatggagggaatagacgatgactgtcagttgcaattgcaatgagtggagatccacctattgtcaatcttgatcatccatccacatgtatggatcacattgccaaaaggttcatgtgggaagtttgatctacga

SEQ ID NO: 2924 - DNA, 175 bp, Glycine max
  Clone ID: LIB3028-018-Q1-B1-B9
aattatggatgagaaatattggtattgatattttcccaaatttaggaccttgatacttagaacccatagtcttgcgatcaagaattttcatttttgttgtttcatgccatcagcttataatcctggagtttgagccccccccttttggttgaaataattaagactcgtttggatt

SEQ ID NO: 2925 - DNA, 347 bp, Glycine max
  Clone ID: LIB3028-018-Q1-B1-C1
gatggaatgtccaagcagagcttgtgcactgcagatgggccatgttgggagctgctggcattttcatcccagaattcctcacaaagattggtatcctgaacatcccttcatggtacactgctggagagttggagtacttcacagacactaccacactcttcgtagttgagctctttttcattggttgggccgagggtagaaggtgggctgatatcatcaagccaggctgtgtcaacactgaccctatctttcccaacaacaagctcacaggaactgatgttgggtacccaggtgggctttggtttgatccacttggctgggggaagtggttctcctgagaagatcaa

SEQ ID NO: 2926 - DNA, 260 bp, Glycine max
  Clone ID: LIB3028-018-Q1-B1-C12
gtttcctgcatctggaccagaaacccagcgacatgcatctgctataagaaggaagatcacgatattagggaccagacttgatagcttgcaatctctgttgtcaaaggtccctgcaaaaactgagaaggagatgaatcgtcgaaaggacatgcttgcaaatttgaggacaaaagttaaccaaatggcttcaacattgaacatgtctaactttgcaaatagggatagtttgctacggccacaaataaaatcagatgcaatga

SEQ ID NO: 2927 - DNA, 347 bp, Glycine max
  Clone ID: LIB3028-018-Q1-B1-C2
gatgaaatatccatgaatcccatgtcaaatgggttctgcacatgttgagacctgcaggcactttcatcggaaatgtcctcaaaagcagtggcctccttctggaccgctgatgatgtagagctggcgcatgagcttagttcataggcaatactacactcttgggagctccgctccttttcaatggttgggccgatcggtaccaggtgggctggtatcatcagagcaggctgtgtcagcagtgtccctatctttctcaacatcacgctcgcaggaactgatgttgggtacccaggtggggtttggtttgatccacttagctggggaagtggctctcctgagacgatcac

SEQ ID NO: 2928 - DNA, 380 bp, Glycine max
  Clone ID: LIB3028-018-Q1-B1-C3
gtgatattggggcagcgcagcaatacgtaacaagttctatcattgaggaagtttccggtctccgaaaatgaacgacgcagatgtctcgaagcaaatccagcagatggtgcggttcatccgccaggaagctgaggaaaaggccaacgagatctctgtctccgccgaagaggaattcaatatcgagaagctgcagttggtcgaagccgacaagaagaagatcaggcaagaatacgaacgcaaagagcgccaagtcgaaattcgcaagaagattgggtactcgatgcagctgaatgcttctcggatcaaagttcttcaagctcaagatgacgtgatcagttccatgaaagaagctgcatccaaggaactgttgaatgtgagtc

SEQ ID NO: 2929 - DNA, 363 bp, Glycine max
  Clone ID: LIB3028-018-Q1-B1-C4
atggtgggtcttagtgtagtcctggaagcccagaagagttgcatcaacaaaaagacacctcaagtcattaacaaatccaccatgctgatgcttagcagcatccacaacaaaccctcccctcaaccttcttctctttttcagccacccacttttcttgaccaatgctttctttgtgggaagagactcttgccagggaaagacatctacatgtacaaaggggacagggcattttgtaacgtggattgcaggtgcaagcagattttcagcgacgaggaagaagctattcagaaagagaagtgttctttggctgccatgatgcccacatcgtcgagttcttccatctcaacggcacctcatcaccgg

SEQ ID NO: 2930 - DNA, 326 bp, Glycine max
  Clone ID: LIB3028-018-Q1-B1-C5
atcacatacagcagaaaacagttgacatgaatggcatacagctgcatgttgcagagtaaggagatggtccaatggtgttgttcctctacggcctctctgatctctggtactcagggcgccatcaaattctcatctctcagctccctcggataccgcgccgtctctcgcgatctccgtggctactgtgataccgattcaccacgttcaatcttcagctacaggagcttccacatagtggatgatcacgttgagcttaatgactcactggtggtcgactaaatgttccttgaggatcaggactgcagaagcatcataggttggtatct

SEQ ID NO: 2931 - DNA, 344 bp, Glycine max
  unsure at all n locations
  Clone ID: LIB3028-018-Q1-B1-C6
ccggttcacggagtcactgcactattattcaaccctattcgactcgctggagggttcgcctgtgaaccctaacgataaggccatgtcggaggtttacttagggaagcaaatctgcaacgtggtggcgtgcgagggaatggaccgcgtggaaaggcacgagacgctgaaccagtggcggaaccggttcgtttcgaccggattttcttcggttcacttgggttcgaacgcgtacaagcaggccagcatgttgctcgcgctttttgcgggtggggatgggtatagggtggaagagaacaatggttgtctcatgttgggatggcacactangcccttgattgccacct

SEQ ID NO: 2932 - DNA, 332 bp, Glycine max
  Clone ID: LIB3028-018-Q1-B1-C8
ggaataatgattatggtttgtggagatgcaacggcaaggcgttgaggaagtgagcatacaagagttggcgtcgaatccttccctcgagaaagatcaactgaaccatctgagataacacgtaaacgatgaccctgcaaattctgactatgttgacatggatagggaactttccgaggtcattgccttgaccgatgaactccttgcaactgcaaaccagaatgaaatcgctgcacctcctaataatgctgctgcatctccagtcttagccatacataacgagaatcaattgcgagatactacttctgatcatcacgagaaacttcctgttggca

SEQ ID NO: 2933 - DNA, 383 bp, Glycine max
  Clone ID: LIB3028-018-Q1-B1-C9
ctccaaatggaatagaaaaacgcactaaagattccatccatttggaacttgggagagtagagtaccattgctccactgtcgccggccaccatgtctttctcggagttccgaccactcgacgacacgtccctcatcgaatacataaagtccgtccccgccctctcctccaaactcgccgacaacctcgacgacttatcagtcaaagaagtcggagatggcaatcttaacttcgtcttcattgtttccaaccccgcaggttcttttgtcatcaaacaggctctgccgtacgttcgttgcataggggaatcgtggcctatgacgaaggagagagcgtattttgagtcgctggcactgaaagaagagggtcgtttaatccccgaaca

SEQ ID NO: 2934 - DNA, 344 bp, Glycine max
  Clone ID: LIB3028-018-Q1-B1-D1
ccaatatattccattctctctgtgtatttccctacctctcccttcaagatgcagatcttcgtcaagaccctcaccggcaagaccatcacccttgaggtggaaagctctgacaccatcgacaacgtcaaggccaagatccaggacaaggaaggaatccccccggaccagcaacgtctcattttcgccggaaagcaacttgaggacggccgtacccttgctgactacaacattcagaaggagagtactcttcacctcgtcctccgtctccgtggtggcatgcagatcttcgttaagacactcaccggcaagaccataaccctagaggttgaaaactccgacaccat

SEQ ID NO: 2935 - DNA, 370 bp, Glycine max
  Clone ID: LIB3028-018-Q1-B1-D11
gtttttggctctattgttcctgttctgactcttggctcattttctaagagatggatagttcctggatggaggcttggttggtttgtgacaaatgatccatctggcacttttagaaatccaaaggtagatgagcgctttaaaaagtactttgatcgtttgggaggtccagccaccttcatccaggcagctgtacctcagataattgagcatactgaaaaggttttcttcaagaaaaccattgataatttgaggcatgttgcacatatatgttgtaaagagttgaaggatattccatacattatatgcccttataaaccagaaaggtccatggctatgatggtgaaactaaacctttcacttctggaggata

SEQ ID NO: 2936 - DNA, 370 bp, Glycine max
  Clone ID: LIB3028-018-Q1-B1-D12
ctgacctttgacaggtaaaaggcgaaccaaatatatcatacatatgttctagatactatagagcacctgagctcatatttggcgcaactgaatatacttcagccattgacatctggtctgttggatgtgttttagctgagctgctgcttggacagcctctgttccctggtgagagtggagttgatcaacttgttgagatcatcaaggttctgggcactccaacaagggaagagattaagtgcatgaaccctaattatacagaatttaaattcccacagattaaagcacatccatggcacaagatcttccataagcgcatgcctccagaggctgttgatttggtatcaagactactacaatactcccctaa

SEQ ID NO: 2937 - DNA, 376 bp, Glycine max
  Clone ID: LIB3028-018-Q1-B1-D4
gtgatttcagtgagtgatcggtgttcacttgatctcatcataatcgtcagcgtcaattgaagaagatgccgatcagaaacatcgccgtcggaaggcgtgaagaggcgactcaccccgacacgttgaaggcggctttggctgagttcatctcaaccttcatcttcgtgttcgccggctcaggctccggcatcgcctacaacaagctcaccgacaacggcgctgccacccctgccggcctcatctccgcctccatcgcccatgcattcgccctcttcgtcgccgtctccgtcggcgccaacatctccggcggccacgtcaaccccgccgtcaccttcggcgccttcgtcggcggcaacatcaccttcctccgcggcat

SEQ ID NO: 2938 - DNA, 350 bp, Glycine max
  Clone ID: LIB3028-018-Q1-B1-D5
atttgatgctctattggaattcttaactgtccgagaacatcttgagctttatgctagaataaaaggtgttccagattttgcaatagacaatgttgttatggaaaagttgacagaatttgacttattgaagcatgctaataaaccatcattttcacttagtggagggaataaacgaaaactgtctgttgcaattgcaatgattggagatcctcctattgtcattcttgatgagccatccacaggtatggatcccattgccaaaaggttcatgtgggatgtaatatctacgatctcaacaaggcgacgaaagactgcagtaattcttactactcacagcatgaatgaaactc

SEQ ID NO: 2939 - DNA, 344 bp, Glycine max
  Clone ID: LIB3028-018-Q1-B1-B7
ctcgagccaaaacaatctccgttgcttaccgtttcttgaaagcgaagacacctgaacaaagggctgctgttgacttggacacccattactctcaagaatatcttgaagaatatgttggaacagataagaggagagccatcttatatcagcaatatgttaaaggtatatcaacaactgggatgcaatctaactatggtttcgatggtcaactcaatgcatgttggacacataaaatgactgaaacagagattgaggtgatcaaatctgcaggttttcttgtttcagtcatccatggcaggcatgatataattgctcagatatattatgcaaaaagacttgctgaa

SEQ ID NO: 2940 - DNA, 376 bp, Glycine max
  Clone ID: LIB3028-018-Q1-B1-A10
cgccggatctgctaaaatacgcttgatccatatgggcctcctcgaccacttgtgggacgacaccgtcgccggcccaaggccggaaaacggtctcggcaagctccgaaaacaccacaccttcactttccgacctagctccggcaaggaaacggagggcgggagcgtgagatcgtacggagacgaatcgtcggaggaagcgacgagagtgacgcgtagtatcatgatcgtgaaaccgcccgggtaccagagtggatcgcctccggtttctcccgccggttctactactccgatttctccgttttccggaggaaaagattcgtttcggtttcgaagaaggtcggcatcagatgcgtacgagaagagagggcagaacaga

SEQ ID NO: 2941 - DNA, 374 bp, Glycine max
  Clone ID: LIB3028-018-Q1-B1-A12
gttgtaactccgttcttcttcttttgttgttctgtgtctgtgtttgttttttctctcacctgaaaatgtcttgctgcggtggtaactgtggttgcggaagctcctgcaagtgcggcaacggctgctgaggctgcaagatgtacccagacttgagctacactgagtcaaccagcaccgagaccttggtcatgggagtggcacctgttaacgctcaatttgagggtgctgaaatgggtgtgcccgctgagaacgatggctgcaaatgtggaccaaactgctcctgcaacccctgcacttgcaagtgatgtgttgggagagcaagcttcaagcatagatagcccttaattatgaataatgataaactattaatgtgt

SEQ ID NO: 2942 - DNA, 351 bp, Glycine max
  Clone ID: LIB3028-018-Q1-B1-A2
tcttctcctccaaatgaacccggttcacaagaagattccggttctcatccacaatggcaaacccatttgtgaatccctcattgctgttcagtacattgaggaggtttggaatgacagaaatcccttggtgccttctgacccttaccagagagctcaggctagattctgggctgattatgttgataagacgatatatgatcttggaaggaagatttggacatcaacaggagaagaaaaagaatctgccaagaaggagttcatagaagcccttaaattgttggaggaacagctgggagacaagacttattttggaggagacaatctacgttttgtggatatagcgcttgttcc

SEQ ID NO: 2943 - DNA, 289 bp, Glycine max
  Clone ID: LIB3028-018-Q1-B1-A4
gcaaaggcatatgaaaaatcttcaatcaatgagtccatgcagcttggaaaatgggtagcaagtggcgacaacactcttgttaaagatagtatcatctcccttgaagaggggaaggtcaaacaggagatctcagtgagacttcaacatgttgaaagaggagtgttagagattgaactcgaatgtgttcctctaactcaatagttgagatagatgttaagggtcaaaacttagcataacacaatttggagcattatcactatagatgtcctttctctgttctcctttgtac

SEQ ID NO: 2944 - DNA, 373 bp, Glycine max
  Clone ID: LIB3028-018-Q1-B1-A5
gactaaactccgacgacgcctcccgtcgctcctcgatccggtgatgccatattcgccaacgtcgaacgcgtcaatgcggagctgtttactttggcgtatggcgcaattgtgcgtcaattgctcacggatgtggaagaggctgacgaggttaacacgcagcttgatcaaatgggttacaatattgggatccgtttgattgatgagtttttggccaagtcgaaggtctccagatgcatctacttcagagagacgactgatgttattgcaaacgatggttttaagatgttcctcggtgttactgcatctgtgaccaattgggatgctgatggaacatgttgtagtaatgttttggaggataaacctttggtagatt

SEQ ID NO: 2945 - DNA, 337 bp, Glycine max
  Clone ID: LIB3028-018-Q1-B1-A6
aaaaactatccaagaatcaaaactattgttaataaagttggaaccattacaaatgaatttcgtgtgccagagtttgaaattttagcaggagagcataatatgattacagaagtgaagcaatatggtgccacttttaggcttgattacagattggtttattggaactcgagattggaacatgaacacaaaaggttagtctcaatgttccaagctggacagaccatttgtgacatgtttactggtataggcccttttgccattcctgctgcacaaaaaggatgcatagtctatgcaaatgatttaaatccggatagcattcactatctgaggattaatg

SEQ ID NO: 2946 - DNA, 326 bp, Glycine max
  Clone ID: LIB3028-018-Q1-B1-A7
gggtgattaccacaagtaccttgccgagttcatgactgtggcacataggaaagaggcattagagagtactttgcttgcttacaaatctgctcaggatattgctcttgctgacttggcccccactcaccccattatgctggtacttgctctcaacttttctgtcatccaatattagatccttaactcgccaggttaggcttgttatcctgccatacaggaatttgttgaggcatgttcagagcttgacacattgttgtgattagtcatagaacgatagtacgttgatcactgcaacttctccgtgacaatctgactttgtggacatc

SEQ ID NO: 2947 - DNA, 254 bp, Glycine max
  Clone ID: LIB3028-018-Q1-B1-A8
agattattggagcagtgggaattccagtggaacatttatgtagtggaacaagagttgagggctttttccccatccttggtgctaatgggaaaccatgtaagggtggatcagtgttgagtttatccattcagtaaacccctgttgaaaaggtgcctctttatagccatggagtaggtgctggccctgattatgaaggggtccctggaaccaactttcgccttagaaaaggtggaaaagttacactttatcaggat

SEQ ID NO: 2948 - DNA, 290 bp, Glycine max
  Clone ID: LIB3028-018-Q1-B1-B1
cccaattcgaaacccttaatcctctcacactcacatgttgattgatcttttgggtaccatttggacacaatctgccaccgttcaagattcccgcgggggacacattttcgacggcgggagacaaagttccttcggccattttcccaaaggcccgtttgaagcttccgaatgatggatcgcttcggcggtcatcggacaacaaccacaagttccctcatcaccgttgagacatacaggatctatatcttcaaggttctgaagtatgtccatcctgatattggtatctcaag

SEQ ID NO: 2949 - DNA, 384 bp, Glycine max
  Clone ID: LIB3028-018-Q1-B1-B10
cctctgcccctaacaccaataaagatggaaaagccatcgataaggctagtgcgataagatcgaaacattctgtgactgagcagcggagaaggagcaagataaatgagagattccagatattgagggatctcatacctcatagtgatcaaaagagggacacggcatcatttttattagaggtgataaagtatgttcagtacttacaggagaaggtacaaaagtatgaaggttcatatcaaggttggggtcaagaaccctcgaagttgatgccatggagaaatagtcattggcgtgtccagagctttgccggtcaacccacggctgtaaagaatggtttgggtccagtatcaccttttcctggaaagtttgatgaaagcaatgtta

SEQ ID NO: 2950 - DNA, 381 bp, Glycine max
  Clone ID: LIB3028-018-Q1-B1-B11
ggcacacattcacctgaagcttccaaagcaatggcttcccttgcagcatccactgctgctgcttcccttggcatgtcagaaatgcttggaaaccccatcaacttcagtggtgccacaaggccagctccatctgcttctagtcctgcctccttcaagactgtggctcttttctccaaaaagaaggctacaccaacacctccaaaaaaagctgctgctgctgctcctgccaatgatgagcttgccaagtggtatggtcctgacagaaggatcttcttgcctgagggtctcttggaccgatccgaaatcccagagtacttgaccggagaagtccctggagactatggttatgacccatttggtcttagcaagaagccagaagac

SEQ ID NO: 2951 - DNA, 224 bp, Glycine max
  Clone ID: LIB3028-018-Q1-B1-B12
actcataatgtagtttgtatatctctatatgcgaatgctcgcagagcgattggataattaggtggtaatgccatccattcgattctgcagctttgatcttcgttttccttgtgaccgtgtaaccctctgtgacagtatagagttgtgccctagttaagtcgtttttttttttcgaattttggggattcacgttgtaagggaatgcattgttgaaaggaattctt

SEQ ID NO: 2952 - DNA, 378 bp, Glycine max
  unsure at all n locations
  Clone ID: LIB3028-018-Q1-B1-B2
agcattttcagaggaacaatggcgggtagggtttcgacgtgcttcttcttcgtgtttgctctttctctccttcttccttttcagatctccgctgaggaatcatcggagaaagagttcgtactcacattggatcactctaactttcacgacactgtcagcaagcacgatttcatcgtcgtcgagttctacgctccatggtgtggccactgtaagaagcttgctcccgagtatgagaaagctgcttctatcttgagtagtcatgatcctccggttgttttggctaaaattgatgccaatgaggagaagaacanagaccttgcatctcaatatgatgttaggggatacccancaattaagattctgagaaatgggggaaag

SEQ ID NO: 2953 - DNA, 369 bp, Glycine max
  Clone ID: LIB3028-018-Q1-B1-B3
gagaagttgtgggatggaactcagaagccgtcaaatatttcagttaatttggcactccagcacctgtatgattggaaacaaattcattgtaaagaatcatcttcatctgcgcagacaatacatggactccaccagcagcttcttttatgaagtgtagtattgaagcagtcttattccaagacaccggctctttggtgtttcagcttgcatcaggcactctcgtgggaattttattgctgccagaacacaatgctatcagggagatctttcacctcaggaagcagaggaaatagcattgcttacagtggtgagttggtatcatttctgcatttggatatataatgtcatttttgaaattgattgttaatc

SEQ ID NO: 2954 - DNA, 393 bp, Glycine max
  Clone ID: LIB3028-018-Q1-B1-A1
ctgaaagaaagttgctaacacttggcaccacttatcaacttatcatagttgataacatcaaaggcacaacattgagggaatgagggttgttatatcagcagtatgtgctattgtgctattctcttatgctgctgcgtacgatcctttggatccaaacggaaacataacgatcaaatgggatgttgtgtcatggacaccagatggctatgtagctgtggtaacaatgagcaatttccaaatgtttcggcacatcatgaatcctggatggaccttgggatggacatgggcaaagaaggaagttatatggtccatggtacgagctcaaaccacagaacaatgagactgttctaagttcaaagggaatgtacctcactgctgcaagaaaactcccac

SEQ ID NO: 2955 - DNA, 320 bp, Glycine max
  Clone ID: LIB3028-018-Q1-B1-B5
tatgaagaatatgtgcaacgaataaaagaaagcgatggaaagcgcttcgcgatgcacgaaagagaagaaatggaagcaaagtttccgcgttttgtctttcataaaaaaaatgttaaattattattttctatgataggattggtttcttgtcttttttctcttgtttaagaatttcggtgtattttaacagttgtaaagcactctgcgctctctctgcatgatcatgtacaactacaagcatgctctctgtagttttcaacctgctgcgcttgcaggggttgtaaaactaatcaatataattaaataaattacattctgtc

SEQ ID NO: 2956 - DNA, 381 bp, Glycine max
  Clone ID: LIB3028-018-Q1-B1-B6
cgccaatgctgcgtacattggcactcctggaaagggtattcttgctgctgatgagtcaacagggacaattggcaagcgtttggccagcatcagtgtagagaacattgaatccaacaggcgagctcttagggagctgcttttcactgctcctggtgttcttcaatatctcagtggtgtcatcctctttgaggaaaccctctaccagagcacagctgcaggcaagccctttgtgaatgtcttgaaggaagctggtgtgcttcctggcatcaaggttgacaagggcacagtcgagcttgctggaactaatggagaaaccaccactcagggtctagatggccttggtcagcgttgtgccaagtactacgaagctggtgcacgttt

SEQ ID NO: 2957 - DNA, 366 bp, Glycine max
  Clone ID: LIB3028-017-Q1-B1-G2
atcatatctccatttccatttcctctctctcagtttccaagaatcttaagctatgggaaagtcttacccaaccgtgagcgctgattaccagaaggccgttgagaaggcgaagaagaagctcagaggcttcatcgctgagaagagatgcgctcctctaatgctccgtttggcatggcactctgctggaacttacgacgtgagctcgaagaccggtggtcccttcggaaccataaagcacccctccgaactcgctcacggcgctaacaacggtcttgacatcgctgttaggcttttggagccactcaaagcggagtttcctattttgagctacgccgatttctaccagttggctggcgttgttgccgt

SEQ ID NO: 2958 - DNA, 361 bp, Glycine max
  unsure at all n locations
  Clone ID: LIB3028-017-Q1-B1-G3
ggagttcaacgagatggagcanataaagcacagaatagttgaagtgaatggcataaaaatgcatgttgcagagaaaggagagggtccagtggtgttgttcctccacggcttccctgagctctggtactcatggcgccaccagattctctctctcagctccctcggctaccgcgccgtcgctcccgatctccgtggctacggtgacaccgaggcaccaccttcaatcagcagctacaactgcttccacatagtgggtgatctcgttgcgcttattgactctctgggtgtccaacaagtgttccttgtggctcatgactggggagccatcataggttggtatctctgcatgtttcgccctgac

SEQ ID NO: 2959 - DNA, 376 bp, Glycine max
  Clone ID: LIB3028-017-Q1-B1-G4
atttagtggaaaagaagatgcagatgttgtcacaaaacagaggaaatcagggtatcttacaacattcttgctgtgtaagagaacattttttgggccaaaagggtaggaaatcatgatagatggtaacatgtgaatcatactgccgaccaattagatgggtgcttggttgaattcattgaattttattctgtagaaatagtcgtttgagaaagtgattattttgcataattaatttgatacgcaagacccacggaaatatgaacggattgttcaacactccaacctggtagaaaatgaatccttgtaagtccaaaatgtgtgtttgacttttgtaaactcccaacctaaaattggtgattgttaattgtgtttgttt

SEQ ID NO: 2960 - DNA, 373 bp, Glycine max
  Clone ID: LIB3028-017-Q1-B1-G6
cgaaaatgtggaagagaacgggttttgaagaagaagcagttcaattgatcaactcagatttcagggacctaagtctagctgctaatagactcgcccatcatgccatcaaacttggtggcattggctttggagcctcttttttcggattgtttgctgccattgctgctatttatctgttgattttggatcgtacaaactggaaaacaaatattctcacagcactactcattccatacattttcttcagcttgccttcattaattttcgacgtcttcaggggagagcttggaaaatggattgctgcagttgctgttgtattacgccttttccttccaagacacttccctgattggctggaattgcctggtgctct

SEQ ID NO: 2961 - DNA, 358 bp, Glycine max
  Clone ID: LIB3028-017-Q1-B1-G7
gataactgtctccatgcactttctttcatggccgttcttttctccaatctcatcagcatcaccaacaacaccaaaccctgcttctctttcacctcaaaacccataatttgtggggccaagaacctcacttccaaacggagcctcatccttcaaactcctctggtctgcattggcattggcctaactcctcaagtctcagttgcgcaagaatcgccgtccaaatcgcttctttctagcattgaaaacacgacatcttggtttcagttctacggtgatgggtttgccattcgagtctcaccggagtttaaggatatcacggaacctgaggatttggatgctggacagtccctttatgggg

SEQ ID NO: 2962 - DNA, 358 bp, Glycine max
  Clone ID: LIB3028-017-Q1-B1-G8
ttgaaatctttcactctcagccgccattctcccacttccaactccttcttccccccctttctttgtccatcccacccccgccaccgccgaatccaccactctcgaaatccaatcatgtctgccacatccgtcaactccgaacgagcacgcgcccctcccgccattcccttgccccctccccctctctccaacttcaaaattggcctctgtcaactctccgtcagccccgacaaagacagcaacatcgcccacgctcgcaccgccattcaggatgctgcatcaaagggcgcccagcttgttcttttgcccgaaatttggaacagtccttattccaaacgaatagttttcctgtccacgc

SEQ ID NO: 2963 - DNA, 263 bp, Glycine max
  Clone ID: LIB3028-017-Q1-B1-G9
ctggtgctggggcagccgaggatgattatgctgctccttctggtggaagtggtgctggccccaagattgaggaagtggactaaatgtgtagttgctttcatccatttatctgtttaaaacttatttgatgcttttttattgaattttaacttttatgatttttgttggatgggatactaattgttttgcccgtgtgatatgaacgttgctttacgcattatgtcatttgctttatttcattagatgagaatactcattgtttt

SEQ ID NO: 2964 - DNA, 368 bp, Glycine max
  Clone ID: LIB3028-017-Q1-B1-H1
gttttctcaacatactctgacaaccagcctggtgtgcttatccaggtctttgagggtgaaagagcaaggaccagagataacaatttgttgggcaaatttgagctatctggcattcctcctgcacccaggggtgttcctcagattacagtgtgctttgacattgatgccaatggtatcttgaatgtctctgccgaagataaaaccactggccagaaaaataagatcactatcaccaatgacaagggtagattgtcaaaggaagatattgagaagatggttcaagaggctgagaagtacaagtctgaggatgaagagcacaagaagaaggttgaggccaaaaacgctttggaaaactatgcatacaacat

SEQ ID NO: 2965 - DNA, 396 bp, Glycine max
  Clone ID: LIB3028-017-Q1-B1-H10
aaaaccaagtactacaagggaagaagaacttagctacaagctaaggaaggatcaaagagaatggctcaagcaatggcatcaatgactagcttacgtggttcctctcaggctgtgttggaaggtagccttggctccacacgcttgaatgtggggagtggaagcagggtggcctcagtcacacgtgcagggttcacagttagagcacagcaacaacaagtgaatggtggtgaggtacaaagtagccgtagggcagtgctttcacttgttgctgctggtttgaccactggctcttttgttcaagctgtgcttgctgatgccaaacctatcaaagttggaccacctcccccaccttctggcggattacctggaacattgaactcagatgaaccaagagac

SEQ ID NO: 2966 - DNA, 398 bp, Glycine max
  Clone ID: LIB3028-017-Q1-B1-H11
gggatgtgtcttcacatatgatgctgttggttcctatgagagggttggatatagctctcagggttctggatccacacttattatgccatttcttgataaccagctgaagtctcctagcccactcctgttacctgcgcaggatgctgttactccattgtctgaagcagaagcagttgatctggtcaaaactgtttttgcatctgcaactgagagagatatatacactggagataaggttgaaatcgtcgtcctaaatgccagtggtattcgtcgtgaatacatggacctaaggaaagattaatgctttacagaaatttactgttggagataccagacttggattgagaatgtttgaaatgcttctagaattttaaatgacatagtgggtttttcacatg

SEQ ID NO: 2967 - DNA, 409 bp, Glycine max
  Clone ID: LIB3028-017-Q1-B1-H12
ggaatggtgaatcatcccgaggtagcacaattaaattgagcatagagatttgtttctattccacgacccatcccttctaagatgacaagatctgcatcgctggcaaggtaagcaagctcctgtgacactcttgtaagatcaatgacaggtaaatcattgccagagttcgcaattaagagatttgaagtactgacacccacaagctgtccatcttcatcctaatgctgcagacctgcaatttttctactgttaatccttcatcttgatacaccattacatgcctgtagtttggatactctttaaaatgtcattttagtattataaaggtgataaaaccaaaacatcttacttgtaataagaagttattctacatacatgacttggtctcactctaacgaaaaggtaatat

SEQ ID NO: 2968 - DNA, 367 bp, Glycine max
  Clone ID: LIB3028-017-Q1-B1-H2
ggaagaagaagaaaatggaggaggaacaaaacggcggtcgtttcgacctcataatcctgggcgcctcaggcttcacaggcaaatacgtcctccgcgaagccctcaaattcctcaacaccccatcctcccccctcaaatccatagccatagcgggccgaagcccacaaaaactaacccaggcccttcagtgggcctccaggcccaaccctcccccctccctccccatcctcaccgcggacaccgccgacccctcctccctccgttccctctgcgcccgcacgggcctcctcctcaactgcgtgggccccttccgcctccacggcgagcccgtcgtggccgcctgcgccgcagcgggctgcgactacct

SEQ ID NO: 2969 - DNA, 344 bp, Glycine max
  Clone ID: LIB3028-017-Q1-B1-H4
aaattcttcattctcttctcatcgatggggcagaagtctctgatctacgcgttcgtgtcgcggggaacagtgattctcgcggagtacaccgaattcagcggaaacttcaactccatcgccttccagtgccttcagaagctccctgccaccaacaacaagttcacctacaattgcgacgcacacaccttcaattacctcgtcgacaatggctacacatattgtgttgttgcagatgaatcaattggaagacagttacccatggcttttctagagcgtgtcaaagatgaatttgtgtcaaaatatggtggtggaaaggctgccacagctcctgcaaacagccttaa

SEQ ID NO: 2970 - DNA, 375 bp, Glycine max
  Clone ID: LIB3028-017-Q1-B1-H6
aaaacatgcagttgcatttgttcggccagttagtgtggcctgtcaggtggtgaatgggttccatttctacgagaatggagttttcactagtgacacttgtggtagcacttcccaggatgtgaaccatgccgttcttgctgttggatatggagttgaaaatggtgtcccatattggctcataaaaaattcatggggagaaagctggggtgaaaatggctacttcaagatggaattggggaagaacatgtgtggtgttgcaacttgtgcatcttatccaattgtggcataaattgcataacaatatggtccctggtgactaccaccttgtcatgcttcagagtttagagcgtattgctgatgccagtattgatgaat

SEQ ID NO: 2971 - DNA, 375 bp, Glycine max
  Clone ID: LIB3028-017-Q1-B1-H7
gaaacagtgtgatgaaaatgaaggtccttgttttcttcgttgctacaattttggtagcatggcaatgccatgcgtacgatatgttccctctccgaatgaacactggctatggtgcccgtactccggaggtgaaatgcgcaagttggaggcttgctgtggaagcacacaacatctttggctttgagaccattcctgaagagtgcgttgaagcaacaaaggaatacatccatggcgaacaatatagatcagactccaaaacagttaaccaacaagcttacttttatgccagagacctcgaagtccatcccaaggacacatttgtgttcagtatagatggcaccgtactctctaatattccatactacaaaaaacatg

SEQ ID NO: 2972 - DNA, 392 bp, Glycine max
  Clone ID: LIB3028-017-Q1-B1-H9
ctcctctgattcattcacccaatttttttctgtcctcttttcctctcagaggagcctctgagtctgctcaggtgttccttgtcaagagatccttttgtttttgaggtgtgaagggaaagagaaaaaagatgaatcagtgtggttatcagcagaagaaggccttgacaagctgtgaggagatgaggatggaatctgtggtgtgccctaaacctcgaagattgggcctgttgaaccactcaacctttgataaccacatcagacccttgaggccaccctttatcaactaccaatcagaaattgaagattcaggagttggggctgagcttatggacattattctccccaagagatctggggggcaagtggcttcatcaccgccatttttctgtgga

SEQ ID NO: 2973 - DNA, 394 bp, Glycine max
  Clone ID: LIB3028-017-Q1-B1-G11
tggctaaccaaccctgacactccttcttctccgcttcctcttcgatcatcgcttcagaatgccgccgaagttcgacccctcccagatcgtcgacgtcttcgtacgcgtcaccggcggtgaggtcggcgcggcgagttccctcgccccgaagatcggtcccctcggtctctcccccaagaagatcggagaagatatcgccaaggaaaccgccaaggactggaagggcctccgcgtcaccgtcaagctcaccgtgcagaaccgtcaggccaaggtcacggtggtcccatccgccgccgcgctcgtcatcaaggccctcaaggagcccgagcgtgaccgcaagaaaacgaagaacatcaagcacaacggcaacatctcgctagacgacgtcatcgag

SEQ ID NO: 2974 - DNA, 360 bp, Glycine max
  Clone ID: LIB3028-017-Q1-B1-E5
gaatactcttcttcaatcaagcgaaggtggtctcacttgactcgattgcaagtgatccacgacacactgttcgcttcacaaaagcttcgaatccaattcctcagtaacatctgcaagaagtcttctccttcaccatgccaccaaagcctttagactatgggtcaataaatgaaaacgtgaagaagagtcaatatgctgtcagaggtgaattataccttcgagcttctgagcttcagaaagagggcaaaaagattatatttactaatgttggcaacccacatgcattgggacagaaaccactgagcttccctcgtcaggttgttgctttgtgccaagctccattcctacttgatgatccta

SEQ ID NO: 2975 - DNA, 361 bp, Glycine max
  Clone ID: LIB3028-017-Q1-B1-E6
ctctttcttcctcttcctcagtagtgcgattttcgattctcttctctgcaactatgcctaaccctaaggtcttcttcgacatgaccatcggcggtcaacctgccggccgcatcgtgatggagctctacgccgacgtgactccgagcaccgccgagaacttccgcgcgctctgcaccggcgagaagggcgccgggcggagcggcaagcccctccactacaaaggctcgtccttccaccgcgtgatcccgaacttcatgtgccagggcggcgacttcaccgccggaaacggcaccggaggcgagtcgatctacggcgccaagttcgccgacgagaacttcgtgaagaagcacactggtcccgg

SEQ ID NO: 2976 - DNA, 344 bp, Glycine max
  Clone ID: LIB3028-017-Q1-B1-E8
agacagagcagcactcacattcacaacgaaggtttcctattcatcagacatggtgaaggcaatcagagttcacgaactcggtggccctcaagttctgaagtgggaggatgtggaaattggagatccaaaagaaggcgaggtccgtgtgaggaacaaagccattggggttaatttcattgatgtctactttcgcaaaggagtttacaaagccccttcttttcccttcactccaggtatggaagctgttggggttgtgacagctgtgggtgctggactcactggtaggcaggttggagatcttgtagcttatgcaggtcaaccaatgggttcatatgcctaagagc

SEQ ID NO: 2977 - DNA, 363 bp, Glycine max
  Clone ID: LIB3028-017-Q1-B1-E9
ctccgatggctaatccctcactcttgttcttcagtctcctcctattatccgccaccgtagccgccgccgaacggatcgacgatgaacacgaccttctgatccgtcaagtggtgccggatgcggaggaccaccacctgctcaacgcggagcaccacttctccgccttcaagacaaagttcggcaagacctacgccacgcaggaggagcacgaccaccgcttccgtatcttcaagaacaacttgctccgcgccaagtcacaccagaaattggatccctccgccgtccacggcgtcaccaggttctccgatctcactccggcggagtttcgccgccagttcctcggcctgaagccgctccgccttc

SEQ ID NO: 2978 - DNA, 343 bp, Glycine max
  Clone ID: LIB3028-017-Q1-B1-F1
tccatatgttatattttattttatgatatacatagaagcttgttcttctgatctaattttatgagatcaagtgttggttctttctccatctagtactattatttttcccctgtaatatatatatatatatagtattctaattaaactaattcacaggctacttgatccgtttgttttgaagaagatcatcgcctgtttttggttaactgtttaatccacatccagtttcattttacgtgatccgttaaatctgaatggaagctgttttgacgcctcacgcgacggcacataaacaaccgtttgctcctaacaagaacatcagaatgaaaaccccgaagaaaaa

SEQ ID NO: 2979 - DNA, 98 bp, Glycine max
  Clone ID: LIB3028-017-Q1-B1-F10
cagtagtagtacattatacacaggttctcactcgttatagcactacaaaattgaattgctataacgagtgagaacctgtgtataatgtactactactg

SEQ ID NO: 2980 - DNA, 394 bp, Glycine max
  Clone ID: LIB3028-017-Q1-B1-F11
ctcgtggggtttcagaaacagctgagaagttggctaatatgtcgattggtactcgaagacaatccttaggacaaacccgtccgcctcccatgaaggctggagtcaattggatttctgaatctggaaatttcatgctcaggtccggacaataaattccatctgaaagaagtttgacaagaaaagttgccgggtgagatgatgagaagtatttgctgacttggagattctttgatgatcaatatttttaagtcttctaatgatgatattgggtttgcacctctgcccctgatgcgtttggtgatgatttttgtttctattacgggtttgatatgttttttttggggagatactgtcagttttacatttggctaaagttgtgcggatgcgtctgtct

SEQ ID NO: 2981 - DNA, 392 bp, Glycine max
  Clone ID: LIB3028-017-Q1-B1-F12
attagtactagcactgtacctttgcccgaaacttttcttgactcttcctgtttcgctcaaattctaccctcctcaaattgggaaggtggtgatttccaaagcctttacaacgttgcttttgatcaagggcgaacagcatcttttccccctcagccatttacaggtctagttgaagctagcaatctaaaaatggagatgtaaaccagataatccattattacaatatgttggattaggtcactcggaatgcctttgtcaagatttttttctattagagtacatcgcatatattggttgtatactgctccgtagaataaataagatcatattaatacctgttaacttgagacacgtgcatgtgcacgtttaaagtactatatagctgataatat

SEQ ID NO: 2982 - DNA, 361 bp, Glycine max
  Clone ID: LIB3028-017-Q1-B1-F2
gttttcttcagaaatttgccatcgttgagagaagcgtgagagccttagtcgttcaagatgagagctaagtggaagaagaagcgcatgaggaggttgaagaggaagcgccgaaagatgagacaaagatctaagtaggtgcttgagcaggagttgagatgagctttccatctgctaccagcctcatgacattttaggctgttatggctcttatgatcttgaggtctagtcgctaggggagcttcactcttgacttagtttgctttactggtcctggtcctggtccaagactattgagtgtgggttaagttgtgatgtttagtgttttgtggtatctaattaagtaccgggttttaaacctttt

SEQ ID NO: 2983 - DNA, 356 bp, Glycine max
  Clone ID: LIB3028-017-Q1-B1-F3
ctctttcttcctcttcctcagtagtgcgattttcgattctcttctctgcaactatgcctaaccctaaggtcttcttcgacatgaccatcggcggtcaacctgccggccgcatcgtgatggagctctacgccgacgtgactccgagcaccgccgagaacttccgcgcgctctgcaccggcgagaagggcgccgggcggagcggcaagcccctccactacaaaggctcgtccttccaccgcgtgatcccgaacttcatgtgccagggcggcgacttcaccgccggaaacggcaccggaggcgagtcgatctacggcgccaagttcgccgacgagaacttcgtgaagaagcacactggt

SEQ ID NO: 2984 - DNA, 356 bp, Glycine max
  Clone ID: LIB3028-017-Q1-B1-F5
gctggcttttccattcctgaaccggcagtgcagccagacaccaagtcagagaagtctgttcctatgaataacagcactattgatccctttgctgctgttcctcttaataattttgatggatctgatatttttggtgactttacttctcaatctgattctgtgtcttcccagccctccaataatgttttcagtgatggcaagcatgataatgtgactggtaaatctttagcagactctaaagtttcacctaaaaaggataatttccaggtgaagtctggcgtctgggctgactcactaagccgtggattgattgatctcaatataactgctcctaaaaaagtatccctttgcgacgt

SEQ ID NO: 2985 - DNA, 348 bp, Glycine max
  Clone ID: LIB3028-017-Q1-B1-F6
ggctgaatattgcctcgagcttagacatctatgttccaagggatgaaagatttggtcacttgaaaatggcggattttcttgcctatgcactgaaatccatagttcaagttctcaaaccggagtttgaatctctattcgacagcacccctaatgagtttgacaaatttgaagatgtacttaaactctatgaaggtgggattgaggtgcctgagggtatacttacggaagttagggataacatccctgcagagatgcttaaggaaattttccgatctgacgggcaaaggcttctcaaatttccggtgcctcaagtgattgcagtggataaatcggcatggcaaactgatg

SEQ ID NO: 2986 - DNA, 362 bp, Glycine max
  Clone ID: LIB3028-017-Q1-B1-F7
cttcaaaacactcataacacaaagcacaaagcaaagctcatccttgagttaaaaaatggcagcagcttcttccatggctctctcatccccatccttggctggcaaggccgtgaagctgggcccatcagccccagaagtgggaagggtgagcatgaggaagaccgtcaccaagcaggtctcctcaggaagcccatggtacggcccagaccgagtcaagtacttgggcccattctctggcgagcccccgtcctacctaaccggtgagttcccaggcgactacggctgggacactgctgggctttccgcagacccagaaaccttcgccaagaaccgtgaactcgaagtgatccactccaagtggg

SEQ ID NO: 2987 - DNA, 354 bp, Glycine max
  Clone ID: LIB3028-017-Q1-B1-F8
ggcgcttaatctttacaggaagaagactggcagtgacaagtacttttggattcatcttgataaacgggtgcctactggggcagggcttggcggtggaagtagcaacgctgcaactacactatgggcagccaatcaatttagtggctgtcctgcctctgagaaagaactccaagaatggtcaagtgagattggatcagatattcccttctttttctctcagggagcagcctattgcactggtcgaggagaggttgttcagaatattcctccaccagtatctctagatgttccaatggttctcataaagcccccagaagcatgttcaactgccgaagtctacaagcgtctatgttt

SEQ ID NO: 2988 - DNA, 395 bp, Glycine max
  Clone ID: LIB3028-017-Q1-B1-F9
ttttgcttcctttctgtccaagcaaattttccctcattcattctcctctcctttccccttcctcacaaatcacttcccttcttcaataccaaatcaaattccttctcaatttgattctcttcggccatgtttgcttacagggttttgtcccgttcctctgccatcctttctcgaagcttcacccttttctctgtttcacgaaattcccaacctttctccaccaccctgtccaataacttccattccctccttcacccatctcccaacaagctgattccggttcaaaccaattttctgaattcatcattgacttcgagattcgggttttcttcaacggcctcgcatgagcatgcaagtgaagaagcaaaggtatctgatcagtctgaacaagctga

SEQ ID NO: 2989 - DNA, 375 bp, Glycine max
  Clone ID: LIB3028-017-Q1-B1-G1
ctatgatctaaggcttcttccacattttgtttgagagaaagagagaatcagaggccatccttcctgaggattaaaccacattgctttctaaagtataaaatctcaactcgttaatattccttaggaattgggtttggaggcaccccaattccaacgccaaaaggtttgaactttgggcgcctctgaatctctcaatcgtgggactcacaatctaagttgtaagttcatttggtccttgttaaacagcagagtttccacggtttgtgttggtgggggttcaaaatgttgggggttttcattaatcgaatccttattctcgttctggggtatgcataccctggattcgaatgctataaaacagttgggaaaaataag

SEQ ID NO: 2990 - DNA, 404 bp, Glycine max
  Clone ID: LIB3028-017-Q1-B1-G10
gggaatcttttgctgtgtttgtcaaggaggaagaaatccctaatttgaggaacatactgctgtccatctcagaagaaagatacttagagatgcataagagggcgaaaaaggtgcaagagcattttctctggcatgctgaacctgtaaagtatgatttgtttcatatgcttcttcattcaatttggtacaatagacttttccatataagccggacatgacgatatgaattttggagacaagtcactgtgattgatagcttgatgatgtatagattgtttgagttaacaaatgaagcaagaacaatatggttagagaaaaagttcattgattctagagaaaatgttattgtttgattcatatccctagagaataattgattcataataatgttagtgtttgatcat

SEQ ID NO: 2991 - DNA, 369 bp, Glycine max
  Clone ID: LIB3028-017-Q1-B1-E4
gtggaagggaagaatatgcaggattgtgtaagagttgtcaaatctgtttcaatactgttatagtcgttttctttgaataagagacacatcaaaggatgcttcactatcattatggcaattgaaacattatttttaaagttttacatataatcacaaggttgaggcctaacaaggagcagcagaagtcagcagcaagcttctttggctatagaacatagctactatccccagtatatagtgaagagattcattaactttcctgacctggatatacattgtattctattttatcggctggatattcattgtattgtcgcaaccaatactaaagcattctgtttcactgcttcatttttcatgatgaagtgt

SEQ ID NO: 2992 - DNA, 363 bp, Glycine max
  Clone ID: LIB3028-017-Q1-B1-C7
atttaccagctatacttgttccttttgaaggttagaagtgctacaatacaaacaatggcagctactcaggaagatgtgaagcttttgggtattgtgggaagcccatttgtgtgcagggtccagattgcccttaagttgaagggagttgaatacaaatttttggaagaaaatttgggcaacaagagtgatttgcttctcaaatacaaccctgttcacaagaaggttccagtgtttgttcacaatgagcagcccatagcagagtctcttgtgattgttgaatacattgatgagacatggaagaacaaccccatcttaccttcggatccttaccaaagagccttgggtcgtttccgggccaaattc

SEQ ID NO: 2993 - DNA, 391 bp, Glycine max
  Clone ID: LIB3028-017-Q1-B1-C9
ggctgggcctggtctcttaaccagttccgctccttccgttggaaccttaccgccagcgctgcaaggcccaaccctcagggctcataccactacggtcagattaacatcacccgcaccatcaagttggtcggcacccgaagcaagatcggcggcaagctccgttacgcactcaacggtgtctcccacgtcgaccccgaaacccctctcaagctcgccgagtactacggtgtcgccgacaaggtcttcaagtacaacctcatctctgacgccccagacgccgccatcgcctcccgcgaccccatcatcgcccccaacgtcatcaacgccaccttccgcaacttcatcgaagtcatcctcgagaaccccaccaaggtcacccagtcctacaacc

SEQ ID NO: 2994 - DNA, 376 bp, Glycine max
  Clone ID: LIB3028-017-Q1-B1-D1
gaaaaagaggcaaaagtgtaacatctcaaccattatgcttgagatggatcggatgctaagaccgggaggacgagtgtatatacgcgacaccacacttgttataggtgagcttcaagaaattgcaactgcattgggatggtcaactaccataaatgatgtacgagagggtcgctattcaagctggaagatattaacgtctgataaacggttctgaattgctcaattgcgtcagtaacttatggaacaccatatatggtactcccaactgaaatctcattttgtgccagaaatgttggccaaaactaacccataatttgccagaaacggtagtcgtaattacaatgttcaatcccaactaacaagttttcctctaaaa

SEQ ID NO: 2995 - DNA, 404 bp, Glycine max
  Clone ID: LIB3028-017-Q1-B1-D10
caggcagccaaggaagcagctgcagcagctaataagaaagcttttgaggcaaattttgaaaactgttcggaggatttactagcagcaagagagcttgctgcatcttctgctgaagccgtggcaaaatccagaaaggaaatgagacagaaacgagcctatgaggcaaaaaatacaaggccagctcaatctgctgcagaggcctttggccaaatgtctaataaaaaaaggaatttgcagggtctcaaatctaaagtcaattttgaactcctgaatgaattgtttgatgaaatggaaaataccgatgatctcaagaaaccgaagaaagtacggtttgatctgcccctagataatgatgacaatataccgtccaaggttgaggacaaaaatgaagatgagatgggatt

SEQ ID NO: 2996 - DNA, 401 bp, Glycine max
  Clone ID: LIB3028-017-Q1-B1-D11
gcttctcactgatctccattcccattccatggcttccactgaatcatcccctttcaagaaaattcagattcaaagggatgacactacatttgacgcatatgtggttggaaaagaggatgctcctggaattgttgtgattcaggagtggtggggtgtggattacgaaattaagaaccatgccgtgaagatttctcagcttggtagtgggtttaaagctcttattccagatttatacagaggaaaggttggtctggatgttgctgaagctcagcatttgatggatggtcttgattggcaaggtgctgtgaaggatattgctgcttcggttaactggcttaaagcaaatggctcaaagaatgctggtgtaactggattttgtatgggaggtgctctctctattg

SEQ ID NO: 2997 - DNA, 367 bp, Glycine max
  Clone ID: LIB3028-017-Q1-B1-D2
acattacaggcatggttaacttatttctggagaagagctttgtttcatggtgtggaagaagatattgcagaagaacgccttcagttttggattgcccgcagtggacagtcaccaagttcacatgatgctgttgatgttgagcgaggcttgttggagttgaggaagctgagtatagaacagcaactttgggaagcatcacggaagggaattgatcagcttcaggggtcagcagatgctaatcataagcatgcctctgactctgatgcctcatcctgattgtctgagcccccattagttcttaatcgattctttgtcctatatgtatacttttgtttttgttttgttttccacacaagttttccaaacc

SEQ ID NO: 2998 - DNA, 358 bp, Glycine max
  Clone ID: LIB3028-017-Q1-B1-D3
ggacactggtggaaagatcaagaagggcgccggaggaagaaagggcggcggcccaaagaagaagccggtttcaaggtccgtcaaggccggtctccaattccccgtcggaagaattggccgttatttgaagaaaggaaggtacgcccagcgtgtcggtaccggtgctcccgtttacttggccgcagttctcgagtacctagctgctgaggtgcttgagttggctgggaatgctgcacgtgacaacaagaagaacaggattattccgagacatgtgctattggctgtgaggaacgatgaggagttggggaaattgcttgctggtgtcaccattgctcatggtggtgttcttccgaacatt

SEQ ID NO: 2999 - DNA, 350 bp, Glycine max
  Clone ID: LIB3028-017-Q1-B1-D4
ttcaagggttcatttaccaagggaagggttttgtgatgattgatgagtcagtttatgaataaaggctgttggagtgaggatgtagtcattcattgtgggaagggagtgacaaccatcattggaggaggtgactccgttgccgctgtggagaaggttggacttgcagacaagatgagccacatctccactggtggtggtgccagcttagagcttcttgagggaaagcaactccctggtgtccttgctcttgatgatgcttgagcaaaaatcattcgttcctttgaagtttgtgctttatattattattatggttgggtttcagccaacagtggattaaggtacaatgagag

SEQ ID NO: 3000 - DNA, 98 bp, Glycine max
  Clone ID: LIB3028-017-Q1-B1-D5
cagtagtagtacattatacacaggttctcactcgttatagcactacaaaattgaattcctataacgagtgagaacctgtgtataatgaactactactg

SEQ ID NO: 3001 - DNA, 348 bp, Glycine max
  Clone ID: LIB3028-017-Q1-B1-D6
atgaagacgagttgagtcacttcgttaatactggcgcacttgatgagctcattcttgccttctctcgagagggacccaccaaggagtatgtacaacataaaatgatggagaaggcttcagaaatttggagcatgatatcacaaggagcttacatttatgtgtgtggtgatgccaagggcatggccagggatgtacaccgcgccctgcacacaattttgcaagagcagggttctctcgatagttccaaggctgagagcatggtaaagaatctacaaactactggcagatatttgcgcgatgtatggtgatgatatctgaatgcaagccgtggggggtgacaagatatta

SEQ ID NO: 3002 - DNA, 346 bp, Glycine max
  Clone ID: LIB3028-017-Q1-B1-D7
attttactgtttatagaaattgtgaagctatactgttgtaattgtcatgtaaattgttccctttttcatcttacttgatttggtaaactccggttacttgtatccaaataagatgggccatttgtattgcgggggctttgtataattgtacaattatctacttgtaagaagttcagattcgggcgacaacatttgtaatgcagaattaggtcattaacattgtaaatcttctggcgatgattggaatatcaatgtgaagacgctatatgacttctgctatgacaatatcattgtggttgtcaaggtatttttgaagaaatatcgtggatttacaaagaatctggtt

SEQ ID NO: 3003 - DNA, 373 bp, Glycine max
  Clone ID: LIB3028-017-Q1-B1-D8
cttcttcttctcttaaaagttattaagagcttttgcttttctttctgcgcgcttttcccaattaagtagttcttccttttctcaaagcaaaaaaaatgttcatcgagagtttcaaggttgagagtcctaacgtgaagtacacagagactgagattcagtccgtgtacaactatgaaaccactgaacttgttcacgagaacaataatggcacttatcagtgggttgtcaagcccaaaactgtcaaatatgaatttaaaaccaacacccatgtccctaaactaggggtaatgcttgtggggtgggggggaaacaatggctcaaccctcactggtggtgttattgctaaccgagagggtagttcatggggaagaaa

SEQ ID NO: 3004 - DNA, 342 bp, Glycine max
  Clone ID: LIB3028-017-Q1-B1-E1
ttaagactggagctccatgcaggtcagagcgtcttgctaaatataaccagctcttgagaattgaggaggagcttggtgcggaagcagtgtatgctggagctaacttccgtacccctgttgagccctactaaagttttcaagtggaaaaaacctggagatccccacgagtttgagcaatgagatttggatgcgcggttttagttgtgatcaataagtcgatagttagaacaatagtcttggtataaggaccttgccaataattttttagttctgattcacagagctaagacagttccgtcttagactttaaaagttttgatatttagctttaatacttgaagt

SEQ ID NO: 3005 - DNA, 399 bp, Glycine max
  Clone ID: LIB3028-017-Q1-B1-E10
gtgaattttgcatacgctggttcaactgcacttgataaggattttttagtacaaaaaagaatcaatatagaggaagctactttttcattgagtgctcaatttgattggtttaaaggactcaaatcctccctttgtacaagcaaagaagagtgcgataattacttcaaaaactcattgtttctagtaggagagattggtgggaatgacatcaatgcactcatcccatataaaaatattacagaacttcgagaaatggttccatcaattgttgaaacaattgccaataccacctctaaattaatagaagaaggagcggtagaactagtggtaccagggaacttcccaattgggtgtaattctgctgttttggcaatagtgaatagcgaaaagaaagaagac

SEQ ID NO: 3006 - DNA, 400 bp, Glycine max
  Clone ID: LIB3028-017-Q1-B1-E11
attattagtgcagtgctcaccagcagggcaattttccaaaggatgaagaattatactatctatgctgtgtcaatcaccattcgtatagtgtttggtttcatgtttattgcattgatttggaaatttgattttgcacccttcatggtgttgattattgccatactaaacgatggtaccatcatgacaatatccaaggatcgagtgaaaccatctccaatgccagacagctggaagctgagggagatatttgccactggtgttgtgctaggagcttacatggcactaatgacagtagtatttttctggctcatgaaggataccgacttcttctcggacaagttcggtgtgaggtctataaggaacagccccggagaaatgatggcagccctgtacctacaag

SEQ ID NO: 3007 - DNA, 400 bp, Glycine max
  Clone ID: LIB3028-017-Q1-B1-E12
tttcaagtgcctaacaaaattgtattgtggaacctaactaccggggatttcaaggtcattcctccaacctagttgaatttgtaccacctaacgaggaccctcacattgttcttgatggatttggttatatgcgtggtagagatgactataaggtgattattaggcaagtacattttatccaaaatgagatcggtaccctgcaatgactccttatgggagatatatataacctaagaaataactcttgaaagaaacttgatgtccatatgctatatcattgtgttgataatgactgattatacttggatggaatgtgtcattggttgggtgaaaataatgaagataaggatgaagaatgcttggtgtcgtttgacttgagcaatgaggtgttctttccaac

SEQ ID NO: 3008 - DNA, 350 bp, Glycine max
  Clone ID: LIB3028-017-Q1-B1-E2
atatactagggtttcaagaaatagtgcctctaaaagcatcaaatgtattggggtccgaaaacaatgagatttctatgaaatggaattccataatcagggaagccttgaacaagaaaataacacatcaaagggacaaagatgctaaaaaacaggagctaaagaataattttcccaataagaaagaaaatccagctaagtgctgtgatgccccacatgatttccaatgtatcattagcaagcaaatggttggattattcatatctgtgtggattagaagagatctttgtccattcattcggcatccaagcgtgtcatgtgtaggttgtgggataatgggctgcttaagaaac

SEQ ID NO: 3009 - DNA, 339 bp, Glycine max
  Clone ID: LIB3028-017-Q1-B1-C6
ggaacactcacccaggaatcatttggggattgctaggctggtggggaaccttaggccatgcatttggtgtctctagtatgccaggatttggtgccagtctcagcttgccacaagcactttccaacactagaactgatgggctaggagcactctacagagaagggacagcttcctttcttaactccttggtgaacaacaggttcccttatacaacccagcaagtcagagacagatttatagcatctcttgcctcaaataaggcagcagaagcgcaagccaacctcttcaagatggccaatgaggggcgaatgaagccttgagcatgatatagttaatttg

SEQ ID NO: 3010 - DNA, 402 bp, Glycine max
  Clone ID: LIB3028-017-Q1-B1-B10
ctacttctttgctaaaatccatggtggctggggatggagattgagtttgggaggtgctatggtccctgcccttataatcacaataggatcactagtccttccggacactcccaattccatgattgaaaggggtgatcgtgaaaaggccaaggctcagcttcggagagttcgcggcatcgacgatgtggaagaagagttcaatgaccttgttgcagctagtgaatcctccagaaaagtggagcacccgtggaggaacttgttgcaaagaaagtacagaccccacctcaccatggctgtgctgattccattcttccagcaactcactggaatcaatgtcatcatgttttacgcgccggtgttgttcagctccatcgggtttaaggatgattctgctctaatgtc

SEQ ID NO: 3011 - DNA, 392 bp, Glycine max
  Clone ID: LIB3028-017-Q1-B1-B11
ggggtgcaaggattggtaccatcctgcttgcgtgggcatgactattgaagaagcaaagaaattggaacattttgtttgttcagaatgttcatctgatgatgacatgaagaaaccccatgctacattttctgtatcaccaggatctgatgtcaaggttgagccaaagcggcggaagagatgaccatcacgaagaattaactcatcttgcgaatgcaactcttgctgaatttcgcgggctatgtggtagctgttgtgtgtgtattgtacagcttctaccagaggctataaaaacatcattttatgtatttgactcaggctatgtatgtattggtcttagatttatgacagacattgatctgtttcccttgtgtccagaaagagtaactcctgtc

SEQ ID NO: 3012 - DNA, 399 bp, Glycine max
  Clone ID: LIB3028-017-Q1-B1-B12
ctccggctaacgcattcatggctggtagtggtacgcaattcttccctcacacaagatcttgaaaaaggaaaaaaaaaaacaaagaaaacggggattgcgtgttggttgtgtctcactctctcacagttcttctctttcacaccaactttgtgtttctagtagcatttgatgatgatattgttgttgttgatgagaatgaggccttgtggtaaatttgacactcatattttgaagtgggagaggaaaaagaaaagacaggagagaaaaatatatatatatggatggatgtttatttttattttttttgtgcaaattattaatgcttagttcaaagatagatcattcttctccatgttgaaaaactagctctaaagtttacttgtttcttagctttgtacg

SEQ ID NO: 3013 - DNA, 352 bp, Glycine max
  Clone ID: LIB3028-017-Q1-B1-B2
ctctaccattgagcaaacaaaaagaatctttgggagatcggagaggtcatcgtcgtcatttctgcgctcgagattaacataaggaacaacagtgagcagggtattgtagctgaacgatatggagagaagcactccggtgaggaagccacacacttcaactgcagatctgcttacgtggcctgaaacaccaatttctcattccccaactcatccttcctccgccgttcgttctcaccagccgtcggatgggatcaggaaggtggtatttgggggtcaggtcaccgatgaagaggtcgagagcttaaataaacgaaagccttgttcggattataagatgaaggagataactggt

SEQ ID NO: 3014 - DNA, 374 bp, Glycine max
  Clone ID: LIB3028-017-Q1-B1-B4
aggagctagagaatgatgatgaagtctgctatgtgtgcagtggtggttgtagcacttcttcttctggcggaggtggggcccatggctgaggctgtgacatgcaccccaacagagttaagtccgtgtcttccagcaatcacttccggtgctaaaccttccaatgcttgttgcacgaagctgaagcagcaaaaaccatgcttatgtggctacctcaaaaacgctagcttgaagcagtatgttaactctcctaatgcccgaaaaaccgttgcttcttgtgggattccctttccaacttgttaattaattaagccttcttataattaaagtgtgggatatatatatatatatagataaacagtttaatttatacacac

SEQ ID NO: 3015 - DNA, 339 bp, Glycine max
  Clone ID: LIB3028-017-Q1-B1-B6
ctcaactccacgatatcgatgccctggctaaaatggttgatcctacattggaaggattataccctgtgaagtccctttctcgatttgcggatgttattgctctgtgtgttcagccggagccggaattccgaccacctatgtcagaagtggttcaagcgctggttcggttagtgcagcgtactaacatgagcaagaggacgtttggaactgatcaaggaggatccaacagagggggtgatgaccaagatacacaagacatgtaaatgggaacaaaaaaggcttgtgttgatagaatggcagaaaaggaaatgatagtcttcagatttttatcacttcttt

SEQ ID NO: 3016 - DNA, 370 bp, Glycine max
  Clone ID: LIB3028-017-Q1-B1-B8
ttgggagttaggttctgcacgctctgcttccagcgagtgttctttcttcgtttcaacaccttaatttgcacacgctgcttcttcagcttgagaaatggcacaagaaacctttctattcacatctgaatctgtaaacgagggtcaccccgacaagctgtgcgaccagatctctgatgcagtgctcgatgcgtgccttgaacaggaccctgacagcaaggttgcctgtgagacatgcaccaagaccaacatggtcatggtctttggagagatcacaaccaaggccaacgtagactatgagaagattgtccgtgacacatgccgcgaaattggattcatctctgatgatgttggtcttgatgctgacaaatgc

SEQ ID NO: 3017 - DNA, 365 bp, Glycine max
  Clone ID: LIB3028-017-Q1-B1-B9
ggctaatcctgaagaatatccaaatttgtttgaagattggcaagttgcactagctgtcgaatctaaagctgtggaaacaaggaatgtgtaccctcctgcggagcagtacgtcaaccatgctgacaaatcacacattacccttgttgaagcttttagaagcatgcagattgaggaaggagaggagcatctggagaatggggactctactcatgagttgactgaacgaaatggagaagagcactacacagaggagcaggaggaacagaatggagaggaaggaagccaagatgaggcagttgtagtggatgcagattctacagatggtgcagtactcgttaatggtaacgacgctgacgaagagtggg

SEQ ID NO: 3018 - DNA, 402 bp, Glycine max
  Clone ID: LIB3028-017-Q1-B1-C10
gatagctagaagcaataagatgaaaatgaaagtgcttgttttgtttgttgctacagttttggtagcatatgaatgccatggctcagactaccagaagttccctctccaaatgaaaactgggtttggtgggcaatacagcaatgaggtggcatgtgccagttggaggcttggcgtggaagcaaacaacgtagtcaagtggcaaactgttcctgcagcttgcggagagtacatagctgactacgttctaggagaccaatatagatcagattccaaaacagttaaccaacaagcttatttctatgctaaatccctcaaactcaccaacaaagatgtctttgtcttggacgttgacgacactactctctctaatctccagtattttgctaaccatggatttggtgt

SEQ ID NO: 3019 - DNA, 396 bp, Glycine max
  Clone ID: LIB3028-017-Q1-B1-C11
ctcaatcttcattgtcctgttcttcccctaggtgacacacacacgcagagatcatagcttgtgttagtgaggttagaagataaagaaagaatggcatttgcaggaacaacccagaagtgtatggcctgcgacaaaacggtttatctggttgataagttgaccgcggataaccgagtgttccacaaagcttgcttcagatgccatcactgcaaaggaaccctcaagctgagcaactacaactcttttgagggagttctttactgcaagccacattttgaccaactgttcaaaagaactgggagccttgacaaaagctttgaagggacaccaaaaattgccaagccagagaaaaatttggaagagaaacctgcagcagccaaagtctcaagtatgttt

SEQ ID NO: 3020 - DNA, 401 bp, Glycine max
  Clone ID: LIB3028-017-Q1-B1-C12
gtctgaagtaaatccttttgatgggcaggaggctaagccatacaagaatgaccctgaaattttggcaatgacaaacttgatagcagcctatcagcggaatgaaatattggaatttgagaaaatcttgaagagtaacagaagaaccatcatggatgatccatttatcagaaactacattgaggatctgctaaagaatatcagaactcaagtcttgctgaagctcatcaaaccatatacaaggatcaggattccgtttatatccaaggaacttaatgtgcctgagcatgatgttgagcaattactggtatcacttattttggataacagaattcaaggacacattgatcaagtcaaccggctcttagaacgatctgataggtcgaaaggaatgaaaaagtaca

SEQ ID NO: 3021 - DNA, 339 bp, Glycine max
  Clone ID: LIB3028-017-Q1-B1-C2
gaggaaatgcagaggccaggtaccccactatacaacatcaaggcatacctccctgtcatcgagtcctttggtttctcgagcacattgagggctgcaacatcaggccaggccttcccacaatgtgtgtttgatcactgggacatgatgtcttctgacccattggaggctggatcacaagctgcacagcttgtcactgacattcgcaagaggaagggcttgaaggaacagatgactcctctctccgagtttgaagacaagctttaaatttgtttcatgaattattttactttgaacttagtcgaatttattttctcttgtgaacaatgctactttagattt

SEQ ID NO: 3022 - DNA, 353 bp, Glycine max
  Clone ID: LIB3028-017-Q1-B1-C3
cttagtctccccagacggttacatctccatttgcggctacggttccctcctctccgagacaagtgccagaaccactttccccgacctcgtcaacttccgaatcgcccggttaactggtttccgccgtctcttcaactccgtcggacgcatctttttcactcaccgtgttgccaatatcaaaactcaggaaattgctggcctttctgttgaaccatgtgatggtgaattcgttgttgtagctgtttttgagataaagaacacagagattccagcatttattgaaagggagcgcgaatatcgttttttagctgttgtccctgaaacactagatgggaagccctttatcaatccag

SEQ ID NO: 3023 - DNA, 377 bp, Glycine max
  Clone ID: LIB3028-017-Q1-B1-C4
gaccgtctgaaccaagtgcttcgatgggctttaggttcggtggaaattctttttagtcgacactgtcccatctggtatggttatagtggaaggctaaagtggctcgagaggttcgcatatgtgaacaccacaatctatccagtcacttccattccccttctcatgtattgtaccttacctgctgtctgtctcctgactaacaagttcattattccacagattagtaacattgcaagtatatggtttatctctctctttctttccatctttgcaaccggtatccttgagatgaggtggagtggtgttggaattgatgagtggtggagaaatgaacaattttgggttaatggtggtgtttcgggccatccttttgccgg

SEQ ID NO: 3024 - DNA, 281 bp, Glycine max
  Clone ID: LIB3028-017-Q1-B1-C5
gatggaagcacttgcaattccacaatcaaagtgttttcaaagcgctatccagtttgccatgtctaaaaggttgatagcagctcctgaaccaattcatgctatagctacactcatttgggaacctattcattgattagaggctggagaagccaaagttattctgacagcaatgtgtgaacatggacattttgatctgccagcttacgaaaagtccttgcagagtaactcgtttgacctctcattcacaaacgaccaaatgaagccttcattggccattattc

SEQ ID NO: 3025 - DNA, 358 bp, Glycine max
  Clone ID: LIB3028-016-Q1-B1-H12
acgcgtacatcaaatctcggctcaagattgaattgacaatgaggcctgatcttgctttgcttcctcttctatttgctttcttgttagctgccactacagaatcaagaaaagatacaggggaatattggaaaatgatcatgaaagatcaggaaatgccagaaggacttcaaggtcttgtttcatttcaatctgaaaataaccctaagactcaagagcagcttggtaaaggttccaaaaaccattgtgaagagtctctagttacaaatacacaagttaatagtgacttcgaacccataccaagtgttaccaaatatgatgatttggaattcaagtcaagcattatcaagaacgaagattt

SEQ ID NO: 3026 - DNA, 329 bp, Glycine max
  Clone ID: LIB3028-016-Q1-B1-H2
tacttgatcacttttttaccgagctaagcaaaatggagatcaagcgtctgtcctcgttactgaatgaggatcctgcaattatggaacgacgtagtgcgctcgcaaagagactagagttataccggagtgcacaagctgaaatagatgcagttgcttggtctaagtagagatatgtatgtcaaatcacgtttatacgagagccagcagtgtcattatcattgttcactattttcttattcagactcatttttcagtgtcatcgtattctgttgcattgtcctcttgaatagatgagacgattctgaaaaaggaaaaaaaatgattttttg

SEQ ID NO: 3027 - DNA, 361 bp, Glycine max
  Clone ID: LIB3028-016-Q1-B1-H5
gccaaagttcatattaagagagaaagagagagagagatagaagggaaaaaagcatcaaagatcatgaaacccaacttttcctttttatctaagcttttgatactgcaatatctatcagttttatgcatttctcaggaatttgatttcttctactttgttcagcagtggccaggagcatactgtgacacaaagcagagctgctgctatcctaagactgggaaacctgctgctgatttcagcattcatggactctggcctaacttcaaggatggctcatggccctcaaactgtgaccctgacagtgtctttgataaatctcagatctcagacctcattagcaacatggagaaggattggccat

SEQ ID NO: 3028 - DNA, 357 bp, Glycine max
  Clone ID: LIB3028-016-Q1-B1-H7
ctggaagatggaattcgtgagattttttgattgctggaatgattttcaagaaaaggccacaacccaagtcttgattgttttggacaagcatgagaaccgcgatacttatgtggtagctttccgaggaacggaaccctttgatgcagatgcatggtgcactgaccttgacatctcatggtacgggattcccggcattggaaaaatgcatggtggcttcatgaaagccttagggctacagaaaaatgtggggtggcctaaggagattcaaagggatgaaaatcttcccccgttggcctactatgttattagggacattctaaggaaaggtttgagtgaaaatcctaatgcaaagtttat

SEQ ID NO: 3029 - DNA, 383 bp, Glycine max
  Clone ID: LIB3028-017-Q1-B1-A11
gccgaagaggaggacaacctgctgaacgccgagcaccacttcgcgagcttcaaggccaagttcgccaagacctacgccaccaaggaggagcacgatcatcgcttcggcgtcttcaagtccaacctccgcagagccaggctgcacgccaagctcgacccctccgccgtccacggcgtcaccaaattctccgatctaactccggccgagttccgccgccagttcctcggcctcaagccgctccgcttcccggcgcacgcccagaaggcgcccatcctccccaccaaggatctccccaaggatttcgattggcgagacaaaggagccgtcactaacgtcaaggaccaaggggcgtgtggttcgtgttggtctttcagtacgaccgg

SEQ ID NO: 3030 - DNA, 396 bp, Glycine max
  Clone ID: LIB3028-017-Q1-B1-A12
gtgtggtgtaggtgaagtgcaatctgtgttgatgcgttccacgttttgctgtcacttgaacctttcacccgtcatgattatgaagggcttctctgctcccatttcatcatatgtttcgcctcgagctcaagccgtcactgagccaccggcgcggattggctttttgggcctcggaatcatgggctccccaatggcccacaatctccttaaagctggtgttgatctcactgtttggaataggaccaagagcaagtgtgaccctctaatcagcctcggagcaaaatataaaccatctcctgaggaagtagcagcatcttgtgatgtcacctttgccatgctcgctgatcctcaaagtgcagtggatgtcgcttgcgggaagcatggggctgcaaatgg

SEQ ID NO: 3031 - DNA, 321 bp, Glycine max
  Clone ID: LIB3028-017-Q1-B1-A2
gacaactgtggttgagaaaactgggaagagtgatgacaaagtgaagaagatcatcactattatcatttcaatggctacccaaacccaatcacagtcacatccaaacaccagcactatcgagccaaacagcggcttctgttctcagtccagaaccttccattcactccgtccaaacgttcctctccctccggcctcccgatccctctccctcaccgactacgtcttctccctcgtaccctcagccgccaccgccacagcctcctcatccatcacctccgccatcatcgactccgtcaccgtccgccacctgtcctactccct

SEQ ID NO: 3032 - DNA, 307 bp, Glycine max
  Clone ID: LIB3028-017-Q1-B1-A3
ggctaatctctcactcttgttcttcggtctcctcctattctccgctgccgtagccaccgtcgaacgaatcgacgatgaagacaaccttctgatccgtcaagtggtgccggacgcggaggaccaccacctgctcaacgcggagcaccacttctccgccttcaagacaaagttcgccaagacctacgccacgcaggaggagcacgagcaccgcttccgtatcttcaagaacaacttgctccgcgccaagtcgcaccagaaattggacccctccgccgtccacggcgtcaccaggttctccgatttcact

SEQ ID NO: 3033 - DNA, 355 bp, Glycine max
  Clone ID: LIB3028-017-Q1-B1-A4
cagtgattaagaatacaatggatcccaaacacttgtaccaggttgctgctgtggctgtgctgtgcgtgcaaccagaacctagttaccgtccactgataacagatgttcttcattcactcatccctcttgttccgattgagcttggaggaacactaagagtttcacaagtaaagtgatacacgctaaactgtgttaaacaaggatatgatttgagattatgatgctctgccaaaacagattggttttgccaaatactcgaaattgcaaatagacccacgtcaaacgtactataaggagattcattcgggaaggatgtttagcttaaatagagaagagcattagattgttaataaca

SEQ ID NO: 3034 - DNA, 348 bp, Glycine max
  Clone ID: LIB3028-017-Q1-B1-A6
gtgccaatgtgcacattagtgagggtgcccaaataacgttgcaatatgtgaaaaacatcatcattcacggtctgcacattcatgacattaagaaatgtagtggtggcctcatcagagactccatggatcactatggagtccgtgccatgagtgatggggatgccatttcggtgtttggatccacatatgtttggatagatcatgtttcctttaccaactgcgatgacggcctcatcgatgtcgttagcgcttcaactgctgttaccatctccaactgccatcttaccaaacataacgatgtattattatttggtgcgagtgatagctactcgggggataaaatcatgc

SEQ ID NO: 3035 - DNA, 340 bp, Glycine max
  Clone ID: LIB3028-017-Q1-B1-A7
gcagatacggcctgatgtgtatatcgtattagatgttcctgatgaaattctgatcgacagatgtgttggtagaaggctagacccagtgacagggaagatatatcatctaaagttttttccaccggatacagaagaaattaaagcaaggctgataactcggcctgatgacactgaggagaaggtcaaatctcgcctaaacatatacaagcaaaatgcagaagcagcatcttcctcttactccagcataacacataagattgatggaagtcattcaaaagaagcagttttcaaagaaattgaatctttattatctcaattgcaacaggataaagtgaaaata

SEQ ID NO: 3036 - DNA, 352 bp, Glycine max
  Clone ID: LIB3028-017-Q1-B1-A8
ggttgatgaatccaccccagagtttctctctctcaatcatattcctcttagtcctgatacccttttagaggtgaacggtgttaggagaagcatttactctgatggagaagagtcttcagttctgagaagggatagagtggataagaaatccgaggaagctacctttgtgaacactgatagtatacgttttaccgggagcatgaaatttgaggtttatgataaagagcattgcattctctctggggttctggagatgtctaatagcaatggttttgttggtggatcaagaagttgtgtgaagagatggagtatgatttgtcaaacagaaatgtcacctggttgtggctttttc

SEQ ID NO: 3037 - DNA, 392 bp, Glycine max
  Clone ID: LIB3028-016-Q1-B1-H11
tttggacagtatccatatggaggtttaatcctaaacaggccaaccattagcaggagattcatgcctgagaaagggtctgctgagtatgcagctttggctaagaaccctgagaaggagtttttgaagactattactggcaagaaggagaccctcattgaccttacaattatagaaatcttgtcaaggcacacatctgatgagttctaccttggggagagagatggtggtgactattggacttctgatgctggtccactagaggccttcaagaggtttggaaagaagcttcaagagattgaacaaaagcttatacagaagaacaaggacgagacgttgagaaaccgcagtgggccggctaaaatgccttacactttgctctatccttctagtga

SEQ ID NO: 3038 - DNA, 363 bp, Glycine max
  Clone ID: LIB3028-016-Q1-B1-E9
gtttctgatggtatcaaagaactttttaatgcgtattctatctgttcaactatgattgatcaaggctcagccttgcctggcagcagtttacctagtacttgtggttccagagatatgctaaaaggctttgacagattccttcatgagacatcacagagtcagtctatcatatcagacttagacaagtacttagaagaaccaatctttccacgcaattccgattttaacatactgaactggtggaaagtccacatgccaaggtacccaattttgtccatgatggcacgtgatgttcttgggactccagtgtcaagtctggcgccagaattggcacttagccctgggggcatagtgctagattcg

SEQ ID NO: 3039 - DNA, 323 bp, Glycine max
  Clone ID: LIB3028-016-Q1-B1-F10
gatctatcgtttcaatgggtatgatggataagcttggaaagaaggttcgacttttctggagtttctttggcatggcaataacattgatccttcaagcgacatgagcaacttcacttgtatcaaacatgggagctcagtacttttctgttggtggcatgttcctgtttgtcttaacatttgctctcggagctggcacagttccaggtctccttctaccagaaatctttccgagtcgaataagagccaaagccatgggcagtctgtatgtcagtgcattgggtgataaatttcgttgttggaggactgttcctgcgtttgctgga

SEQ ID NO: 3040 - DNA, 352 bp, Glycine max
  unsure at all n locations
  Clone ID: LIB3028-016-Q1-B1-F12
atttgttttggtgcattcaaatggctgggattgtagtgatatttgactttgactcaacaatcattgagtgtgatagtgataattgggtgcttgatgagaccggtttaactgaaaagttctatcagcttcttcctagcatggcttggaaccctctaatggataagatgatgaatgaacttcattcacaagggaaaaccattcaagacattgtagaaattctgaataggacaccaatgcatcctaggactgtccctgctattgaggcagcttattctcttgggtgtcacctgaagattgtgagtgacgcanacattttctttagtgaaacaatcctgaagcatcatggagtgtg

SEQ ID NO: 3041 - DNA, 219 bp, Glycine max
  Clone ID: LIB3028-016-Q1-B1-F2
ttcatgcatggttggggcttgctttgtaacatggaataagatgatcgccctttacaggaaagaaaacatgggcgtctgaattgatttcaataatgttgaataacagttttgagaatgaggcagtaggcgtttgcttgcttagaaaagtgtaaccctttcttgggatgaaacaatttaacgggagaattcattttttcaaggaatttaaaatgattcatg

SEQ ID NO: 3042 - DNA, 308 bp, Glycine max
  Clone ID: LIB3028-016-Q1-B1-F3
gaaaagtacgacgtgagtggatttcctaccttgaagttcttcccaaagggcaacaaagctggtgaagactacggaggtggaagagacttggatgactttgtggcttttatcaatgagaaatctggagcgggtcgagatggaaaaggacaacttacttcccaagctggtatagtagaaagcttggatgtcttggtaaaggagtttgtagctgccagctatgaagagaagaaatccgtgtttaccccattggaagaggaagttgtgaagcttaggggttccgcctcaaggtacgggaagatttacttgaa

SEQ ID NO: 3043 - DNA, 305 bp, Glycine max
  Clone ID: LIB3028-016-Q1-B1-F4
gccgtggtagcaaagtatggtgacaagagtgtgtactttgatttggaggatctgggcaacactacagggcagtgggacttgtatggctcagatgcaccttcaccctacaaccctcttcagagcaagttcgtcgagacatttgctgctccattcacaaagaggggattgttactcaagtttctgatattgggaggtggttccacccttgcatacttcagtgcaactgcctcacgtgacattctacgaatcaggaggggaccagaactcccaccgaagctcggtcctcgtggcgagatctaatttga

SEQ ID NO: 3044 - DNA, 201 bp, Glycine max
  Clone ID: LIB3028-016-Q1-B1-F5
gttggtacaaataggtatgatgctcactcaggtggagaacgtgagattcaagggaccatgttagagttgctgaaccagttagagggttttgattctagaggagatgtagaggtgattctggcaagggggacaagtgaaagtcttgatcgagctttgctacgggggggtcgaagtgagaggaagatagaagttccgcttcct

SEQ ID NO: 3045 - DNA, 360 bp, Glycine max
  Clone ID: LIB3028-016-Q1-B1-F6
ctgaaccaaatcatcacacacacatactaagaagcaacaattcttctacaatggatctcctccttctggaaaagaccctcataggtctcttcctcgctgcggtggtcgccatcgccgtctccaccctccgcggccggaaattcaagctcccaccgggcccactccccgtcccaatcttcggcaactggctccaagtcggcgacgacctcaaccaccgcaacctcaccgatttggccaaaaaattcggtgacatcttcctcctccgcatggggcagcgcaacctcgtcgtggtttcttcccctgagctcgccaaagaggttctccacacgcagggcgtggagttcggctcccgcacccgca

SEQ ID NO: 3046 - DNA, 353 bp, Glycine max
  Clone ID: LIB3028-016-Q1-B1-F7
gtagaactgaacaagggtttctctttctctttctctgtctgcttcttcactttctctcgtttcaatcgaaaaaaatcatgggcagaaaattcttcgtcggtggcaactggaaatgcaatgggacgactgaggaggtgaagaagattgttactactttaaatgaagctaaagtccctggagaagatgttgtagaagttgttgtgagccctccttttgtgttccttccttttgtaaaaagtttgctgcgccctgatttccatgtctcgggggagaattgttgggttcgcagaggtggtgcttatactggagaggttagtgctgaaatgcttgttaatttaggaattccttgggtt

SEQ ID NO: 3047 - DNA, 342 bp, Glycine max
  Clone ID: LIB3028-016-Q1-B1-F8
ctcctcatgtgattaatgcagtgatggaagcaattgaagggatgagggtagcgttgggagccgctgttgttcttaattattgtctacaaggactgttccaccctgcacgaaaagttagggaggtatattggaagatctacaactctctctatattggagcccaggatgctcttgtagcagcataccctgccttggaggatgagcatagcaatgtttacagtaggccagagttaatgatgttcatctagtgtggattttgattacttagtttatttctatctccagtgtatttggcagtattctgtacttcctcgcatcaatgtaaagctcagttgttggaac

SEQ ID NO: 3048 - DNA, 391 bp, Glycine max
  Clone ID: LIB3028-016-Q1-B1-F9
cagacattgcaaatgtctgcatatgaattgccaatttggcaggatctatcgtttcaatgggtttgatggataagcttggaaggaaggttctacttttctggagtttctttggcatggcaatagcaatgatccttcaagccacaggagcaacttcacttgtatcaaacatgggagctcagtacttttctgttggtggcatgttcctgtttgtcttaacatttgctctcggagctggcccagttccaggtctccttctaccagaaatctttcctagtcgaataagagccaaagccatggcagtctgtatgtcagtgcattgggtgataaatttctttgttggactactgttcttgcgtttgctggagaaacttggtccacagctgctttactc

SEQ ID NO: 3049 - DNA, 235 bp, Glycine max
  Clone ID: LIB3028-016-Q1-B1-G12
gaaatccggttcaaaattaattggaacttttgggaacttggttcaagaatatgctaaaaccggcaaataagctgaaaaggttgtggttaatccttccggtctgcaattggtgaaactttttacaggatcaaaggccttggttcacaatcaacagctgggacaaaagtgtctaaatggttagccacagcaacaagggataacatatgcaattgcggatctgcttgatgcaaggttg

SEQ ID NO: 3050 - DNA, 208 bp, Glycine max
  Clone ID: LIB3028-016-Q1-B1-G3
tgactcgctaacttttcattctccaagtcaccacgcgcttcatatgcaggcacagttgttaagacaaacttgacacaagcgcaccatataatcaacatcttgaagagcttgctgtgtggttcctgtgggcccccttcaacgaaactgtactaattagataagatttgtgagttgctgttcagattaaaatctccatggaaggtcgaca

SEQ ID NO: 3051 - DNA, 98 bp, Glycine max
  Clone ID: LIB3028-016-Q1-B1-G4
cttctgcatgatgttaagttttattgttgttaagaagttgttgtagtgctgcttcttcttgttatgttcaaattaaatacacataatgaatgtttttg

SEQ ID NO: 3052 - DNA, 348 bp, Glycine max
  Clone ID: LIB3028-016-Q1-B1-G5
atcacaaccctcaatgtgttgcaagcctacacattgaagcggatccgtgatcctgactaccatgtgaagttgaggccacacttgtcaaaggactacatggaatcaagcaagccagcagcagagcttgttaaacttaaccccaaaagcgagtatgctcctggtcttgaggacacccttattttgacaatgaagggtattgctgctggcatgcaaaatacaggttaagatgccatagcagtggtgtttttcttgttatacgatgtgtgttgtgattgtgacatggatgtataagcattataacctattatgtctactagagagatttccaacaatatcaaataactgttc

SEQ ID NO: 3053 - DNA, 246 bp, Glycine max
  Clone ID: LIB3028-016-Q1-B1-G6
gttgaagatcgtgcagtaaacaggacgttggcaaaggacaagttgcgtaagcataacagattagagaatttaacgccatgtattgctggcgtaataatatttgaagggctttcaccacgcagaacaggagaatcataacatcggcagcgagaatgctccaggacctgatgacagccttaacatgtcaatcactggtattgccgcaggcattcagcatacacgttagtatgctcacgtgttggtgta

SEQ ID NO: 3054 - DNA, 330 bp, Glycine max
  Clone ID: LIB3028-016-Q1-B1-G7
cctcacttgaattgaaggaccatcctgcctttaatttctcatcagcacttcagtcaacaaaagatggtgatgatgaaatctctcgcacttcttctagatagtagctcttttcccaggctaccaccagcgtagcccagtccccggccgcggcaccgactgccccggcgacgccctcgaccgcagccgccccggccccagcaccctccgcagccccgacagacatcataagaatcctgaggagggcaggagggtggacaaggctgatccgcctcggggaggccacacaagtcgcgaaccaaatcaactcccagcgcgggaggacaagcggcg

SEQ ID NO: 3055 - DNA, 325 bp, Glycine max
  Clone ID: LIB3028-016-Q1-B1-E8
ttcttcgtctcaaacctcttcgtttcttcgattcattccatttcgtccaaaatggccaaagacccagttcgcgttctcgtcactggagccgcagggcaaattggatatgctcttgtccctatgagtgctaggggagtgatgctgggtcctgaccagcccgtgatcctccacatgcttgacattcctccagcagcagagtcgttgaatggggttaaaatggaattggtggatgctggattccctcttcttaaaggtgttgttgctacaagcgaggtggttgaggcatgcactggggtcaatattgcagtgatggttggtggattcc

SEQ ID NO: 3056 - DNA, 150 bp, Glycine max
  Clone ID: LIB3028-016-Q1-B1-G8
caacattaacaagtcctcaattttgttaacacactatgaaccccagatcctaaggttcatttcaaggtggcaatcggtgtcaagttttgctccttgtgaccattctgactttagtcgtgtgaggcgtgggaaccactgtgtctggggttg

SEQ ID NO: 3057 - DNA, 389 bp, Glycine max
  Clone ID: LIB3028-016-Q1-B1-G9
ctgatattttctgggatgctctcggtggaaaggcagagtatccaaagggcaaagaaattcaaggattcatagatgatccacatttgtttgcattaaaaatagcgagagggaaaccatgtctaattgatgattctgtttctcacgctcatttgttggagttttaactcaggagacttcaaggtgaaagagatatacaattatacacaggatgacttaataactgaagacatcttattgcttgattgccaaagagagatttatgtttgggttggcttacattcggctatcaaatcaaaacaagaagttcttcatcttggcctgaaatttctggaaatggatgtccttgttgaaggcctatcaatgaacatccctatttatattgtaacgga

SEQ ID NO: 3058 - DNA, 138 bp, Glycine max
  Clone ID: LIB3028-016-Q1-B1-H10
cacgcgtaaatcgaaatccggtccaaggggaaaccataattacaacggcaatggtgccgggaaccttaattggaggggcttcaaatgccaaaacaagttcaaagcacgcacaaattggccggatgaaaacaactgcgg

SEQ ID NO: 3059 - DNA, 358 bp, Glycine max
  Clone ID: LIB3028-016-Q1-B1-C6
acattactagaaagttagaaaacatggtagcggtggccggagcatcctcgtccgtgattaaggtggctgcactttccggatctttaaggaaaggctcttacaacagagccctcattcgttctgcgattgagctaagccaaggtagagttgaaggccttcaaatcgagtacgttgatatttcgcctttgccccttctcaacaccgatcttgaggtgaatgggacctaccccccacaagttgaagcctttcgccagaacattctcgcagctggagagtatcctctttggcttcgcctgagtacaattactctgtcgcaagtcctttaaagaatgcacttgactgggcatcaagggcacca

SEQ ID NO: 3060 - DNA, 232 bp, Glycine max
  Clone ID: LIB3028-016-Q1-B1-C8
acactttccacttgtctccgaattagttatcttgagaaacattagtcccattgctatatattatggctagcatgaaggttacatgggtggttgtgatcatgtgcatggccgtggtgggtgcagcgatgatggcgcaagccatgacatgcaatgatgtcacggtgggtatggcacagtggcgatcctacctgatgcagggaggaacagcttcggcagtttgctgcagcggagt

SEQ ID NO: 3061 - DNA, 396 bp, Glycine max
  Clone ID: LIB3028-016-Q1-B1-D11
cataagtggcaaccccattttcccaggtggcacatattacattatgccatcaacttggggcgctgccggtggtggattgaaactaggccggacaggaaactcaaactgcccagttactgttttgcaagattactcagaaatcttccgtggcacaccagtcaaattcagcatacctgggataagccctggaatcatctttacaggtactccacttgaaatcgagttcgcagagaaaccttattgtgctgaatcctccaaatgggtggcgtttgtggacaatgaaatccaaaaggcatgtgtgggtattggtggtcctgaaggtcatcctggtcaacaaacatttagtggcacatttagcattcagaaatataaatttggatacaaacttgtgttctg

SEQ ID NO: 3062 - DNA, 391 bp, Glycine max
  Clone ID: LIB3028-016-Q1-B1-D12
gcgtgataccatccgtacctgctcctatacttacaatcttctatgcgggcactgtgaatgtctttgaagatatctcccctgagaaggcacaagctatcatgttgttggctgggaatggcttatcagctggttctaatgaggcatcactcaatgttcaggcgccctgcttgaagttggcagtacgtgatggtgtgcctgttagtcaacccatatcaccctgctccggtctttcaagtccttcatctgtttcttcacatactggttcaccgtcagggagtggttcacgtagcagtgattagtttctcgcagctaaaacatctggaggtagcacttcctctgtttacaaagtggagactccgacagtagtcaacacaactgacatgctaacatc

SEQ ID NO: 3063 - DNA, 232 bp, Glycine max
  Clone ID: LIB3028-016-Q1-B1-D5
cagaagtacttgcacgagctacttgaggaggatcaagaaccgtgctttctaaacaagtatatttccgataggcgaacccagatgaagaggccttccccgaagacgagtctgcgagtgaggaggggcaaagtcaaccagtccaaacacaaacttcccgagagatcggggcggaagcgcttgtcgtctctctctcacagacaccccagacctcagacgggcaccactcttcgaa

SEQ ID NO: 3064 - DNA, 286 bp, Glycine max
  Clone ID: LIB3028-016-Q1-B1-D6
atttaagaacccgagaccaagagtactagagaaataaaataaaagactacatataaaattagagagaaggagagcgtgagtgtgtctgtgtctgcgcttcagaaatgtggcggtgcgtggcgcgtgcgattcgcgtaccagcttcggagagatccatacctaatcggcaaccgcgtagatctcacatttcaagatttttctctggtggtggtggtggtgggagctcctcgtacaacgtcggggatcagaagtaggaggcggtcgttgtgggcgggggcggcgcagg

SEQ ID NO: 3065 - DNA, 189 bp, Glycine max
  Clone ID: LIB3028-016-Q1-B1-D7
ctcgagccgattcggctcgagtgaacatgatgttggaggtttggctggggacgcggattctccagcggacgagcatgtttaggacgttgatggtgctggagatgtgccgcaggattttgagtgtgggccgaaccagggatccgagattcattccacgggaaatgggctgggagggtggtcgggatggcc

SEQ ID NO: 3066 - DNA, 231 bp, Glycine max
  Clone ID: LIB3028-016-Q1-B1-D8
ggttactggaattccttgctttcctggcgtgccgaaacaccataggcacaaaaagacaatacttagttggcaataaaagtaatgagttgcaaaatcaagcaatataaatgaatgaaaaagtaatgggtgtgcttctttattctttaattattttcatttcatgtaaggaactctagagttaactatatttttttatctcaagcaattaaattttgtccatagtgaagcttc

SEQ ID NO: 3067 - DNA, 120 bp, Glycine max
  Clone ID: LIB3028-016-Q1-B1-D9
gttaattgagttgcgacggtgacggctcgttgtgtagcgtcctgtcgagcgccgctcctctgttacccgtctgtgagagtagatggtgcgctgaatgcgctacgtaaccatgtcaagtaa

SEQ ID NO: 3068 - DNA, 357 bp, Glycine max
  Clone ID: LIB3028-016-Q1-B1-E10
caaaactggaaacactctctcctctacatcactttcctcctcgcaattctccacctcacgcagaaccatttctgccacaagctcttcttcgccaacgaaacggtgcgcgtcaagaagaaccccgacctccccctccggttccgttccgacggtaccttcaagatcctccaggtggctgatatgcactacggcactggaactagcgtgacacggtgcatggacgtgttggcctccgagttcgagttttgttccgatcttaacaccactcgttttttaaagcgtatcattctagcagagaatcctgaatttcctgcctttactggagataatattttcggatcaagttcacccgatgct

SEQ ID NO: 3069 - DNA, 394 bp, Glycine max
  Clone ID: LIB3028-016-Q1-B1-E11
ctagtttattggcattgggatcagtaactgcaattcccaatgcaaattttcatcgggcgccaaggagcactagtgtgcttctggttgttgtctgtgttttttgtggtaacaggattcaacaatgaagagcacaggacagtggaggtagttggcctatgagaatgcgcagactgcaggcagaacaatattaagaataaccacgctttctcagggttacgtgtgacggtagattgcaagtcacgacatggacacttcagaacgagaggggcaggtgcgcttgatgaatatggaaacttcaaagtatcacttccacaggacatggttgaagatggtgagctaaaagaagattgctatgcccagttgcatattgcatctgctgaaccttgcccttccc

SEQ ID NO: 3070 - DNA, 380 bp, Glycine max
  Clone ID: LIB3028-016-Q1-B1-E12
caaccgctaaactatcatcaactatggcaacaacgtcctaacctttgttcttaggattttccaaacacttcaactcaattgggttgaaccatcacagttacagatgctgctcaaatgctgttcctaagagaccccaaagacccagttccataagggcctgcactggagttggagctgctggttctgatcgtccattagctgaaagacttttagatttgaaagatgcatgctggagatttttaaggccacatactatacgtggtacagcactacgttcatttgctttggtggcaagagcattgattgagaacacgaatttgataaagtggtctcttttgttcaaagctttctctggtctttttgccctgatttgtgggaat

SEQ ID NO: 3071 - DNA, 343 bp, Glycine max
  Clone ID: LIB3028-016-Q1-B1-E2
gtaaagaaagaaagagaagagaagaatccaagacgaagatggaggacgcatcagcatcaaagttcattccacaccaaatcggaggggtccaaaacgacgcgcttcgattcggtctccagggagtcaagagggacatcgttggttctcaccctcttcaatcttcactccaggctacaaggagaatggatgaagcgatgaagaggcaatgcaaagttaacctgtacggaactgcttttcccatgaaggaggagcttgacaggcagatcctgtccaggttcccgcggcctcctggaccaattccttcttcaatgctgggtttggagactgttacaggaagtgttga

SEQ ID NO: 3072 - DNA, 320 bp, Glycine max
  Clone ID: LIB3028-016-Q1-B1-E3
gagtcattgaactttgactatatttttcagagttcagattattcttctcttttgaattttgattttgggggtttaagtttctgagagaaaaaaaaaaatgataaaggtcgttctttttttgttctgcgttgcctctgcactgaccctttcagtatcggagtccaaatctgcttctgtgcaacctcatgcagctgaatctttctctgttggatatattcagatgaagactgcagcgaactgttcttacctggtagttatatctacgagttgttcatcgcctaagttcactacggataagattggtattacgtttggcgatg

SEQ ID NO: 3073 - DNA, 235 bp, Glycine max
  Clone ID: LIB3028-016-Q1-B1-C4
gctagagctgccggagccttttagtttcagtttcacttggtgtgctgctgttcccctcattgtgtggatagctctgtcactgacaaatgccattgtaaaagactttgtgattttaaagggtccttgtcggaactgcggtactgaaaacacctctttctttgggactatggtttcaagttcaaatggtggttccaccaacactgtcaaatgctccaactgtggcactgcaatggaa

SEQ ID NO: 3074 - DNA, 360 bp, Glycine max
  Clone ID: LIB3028-016-Q1-B1-E4
ttgatgtttggttccccttgtgatttggcatcctttgatttcaaggaggatatgcaaggaggagtagtagggatggatgctcttcagaaacagcctgatatctctatttggtaccagtgaaaatgacagcttaaagcttgaaacctcctcatcatcttcatctatcatggactcttttattttccttctaaaagggttggcacccccctaatcatgtgaagttcctttggccgaaaaaaggtttcactgcaattttcttcacatgtaatcctgtaggcccagtagaactaaataatattttaagcttggcaggtccactatgtgttatatacataataatgataatatataataaaaact

SEQ ID NO: 3075 - DNA, 330 bp, Glycine max
  Clone ID: LIB3028-016-Q1-B1-E5
gagtgtacatgataatatttttaattccacgaaggatgtgttcatctacaagagaaagataaaaatagtgaacacacaaaaaatgaataataaaattattgaaactcacacttttacatttaacagtaattcaaaacatagatttcaatttattttcttttcatttttctcatgaataattttaatctgttatctttctcaaaagaataaaaaatgacactagacatgaagaatcaaaatcctgttaaaaaattcacgaatttgttagcggtctctcctccaaatggaatacaaaaacgcactaaagattccatccatttggaacttggg

SEQ ID NO: 3076 - DNA, 350 bp, Glycine max
  Clone ID: LIB3028-016-Q1-B1-E6
cacctttctttttcctttccacccatggctgacccctactccaagttcttctcttcctcttcacccttgttccgtttcaaccacaaccaatatttcccttcttcaaacccttcgccacaacaccagaaccacaacttcatcaaccacacaaaaaccaacgacaccaccaccaccaccgcctttttccactaccaccaacaccaaactactactgctttttcttcttttccaccctcagcgcctttgagagaagaactagccctcttgaagctgagtccaacaaagcaagatgaggaggaagtagaggacttggtgtctaattgcactggtgcagccatggacgtggaaga

SEQ ID NO: 3077 - DNA, 362 bp, Glycine max
  Clone ID: LIB3028-016-Q1-B1-E7
gttgagttgtttggtgtggggggaagcccttttgccagaagggtgcagattgccctggaactgaagggagtccaatacacttactttgaagaagatcttaggaacaagagtgatcttcttatcagatacaaccctattcacaagaaggtacctgtgcttgtccacaatggaagaccattggctgagtcccttgtgatccttgaatacattgatgagacatgggagaaccaccaccccatcttgcctcaacaaccttatgatagagccttggctcgattctggtcaaggttcattgatgacaaatgcatgccgtgcaatatcaaaggcagcatttactgcagacaaggaggaacgttgacaag

SEQ ID NO: 3078 - DNA, 228 bp, Glycine max
  Clone ID: LIB3028-016-Q1-B1-A4
caacatgattctctttactttgctgatgggtcagtattagtcttagagatgctataaggactatcattgtatcaagttatactctttgcgttttagtttactttcttagtttgttatgactcttttgtgaatgttcatgggtttatgggaaatggaactatcaaagaggttggtaagagcaagtcaaattaaagaccttttttttagtaagtaatgaaaagaaaaggg

SEQ ID NO: 3079 - DNA, 355 bp, Glycine max
  Clone ID: LIB3028-016-Q1-B1-A6
cgtcaacaactgctcttggaaactaaactttctgccgtttgcgaaagagtactagatcaatgtttggcaccaacaattactgttggtgatggatgtgataacatgaccatgattttggtgcagttcaaaaaactggcccaatcaagtgcaccggcataacataagagctatcatcttcaaatgaaataagctacatctgaactaagactagagagcagtgaaagttagtaaattttgagcagcaacactacacacatgtagacacatgagtctagatgatcattttcacttcaactagcatttgtttccaaatttctgtgtttattttcacacctagaatctgttttgcttgttc

SEQ ID NO: 3080 - DNA, 304 bp, Glycine max
  unsure at all n locations
  Clone ID: LIB3028-016-Q1-B1-A7
aaacaacacactgaactctcttcactgaaacgacacacacaaaaaaaagctttagtttaggatgacccaagtgaggaacaagcaagtggttctaagagattatgtcaccggattccctaaagaatccgacatgaacattgttgaaggcaccataatattgaaggttccagaaagttccaatgatgtccttctaaaaaatctctacttgtcatgtgatccatacatgcgactcctcatggccaaggaccgttctttcagggatggggccttcacccttgcctctccattgaaaagatatngtgtg

SEQ ID NO: 3081 - DNA, 356 bp, Glycine max
  Clone ID: LIB3028-016-Q1-B1-A8
agcaaatattgcctattcggcaatatggcggaaaatggttcaattgagctgaacaagtttgtgttgttttgtttgttgttgctaatacaagtggcagtttctgaaatcatttttgaagagcgatttgatgatggatggcgaagtaggtgggtgaaatcagactggaaaagcagtgagggcaaagcaggttcattcaagcacacagctggaaaatgggctggtgatccagatgacagaggtattcaaacatccagtgatgccaaacactttgccatctctgcaaaaataccagaattcacaaacaagaacagaacattggtccttcagtaatctgtaaaatttgagcaagagattga

SEQ ID NO: 3082 - DNA, 338 bp, Glycine max
  Clone ID: LIB3028-016-Q1-B1-A9
gtatgcgcgatatctatcacagctacttatataaattcggcatagataacaccgtactctctaatatcccataccatgaaatacatggatatggggtggacgaacttaatggcagcttatctgaagagagggttagtcatggcgacgcagcagcattgccaaagacacttaaaagttacaacacgctgttgtcacatggcatcaacattgtgaacttagtcagaagatatcttgacagataggtcgttccatagatcaatctacataaggctggcatccacacatcggagcagttaattctcaaagatccacatcttatcactccaaatgcactttca

SEQ ID NO: 3083 - DNA, 386 bp, Glycine max
  unsure at all n locations
  Clone ID: LIB3028-016-Q1-B1-B11
cacaattcacacccaccattggattcaccaatctccaaccttcttctccactgttccgtttctctctccaacggagagtcttttgttttttgtggcgagtttgttgcacgtttaagaagcaatggcacgcaagaagatcagagagtatgactccaagaggttgttgaaggagcactttaagagaatctctggccaggagttgcccatcaagtctgcacaggttacagaatccaccaatttcagtgagctagcagagaaggaaccctggcttttatcttcaaaattggttgtgaaaccagacatgttatttggaaagcgtggcanaagtggtttggttgccttgaatctagatttggcagaagttgattcttttgtgaaagggcgtc

SEQ ID NO: 3084 - DNA, 392 bp, Glycine max
  Clone ID: LIB3028-016-Q1-B1-B12
atagtctgcaaatcaatgaaagtggttttcttttctttgtaacatcaatttaatcgttgtttgttttgttaattaaggccttaatgctgctgagaaacagatcaagagctgtgacgaagccaagtttgatgggtgatcacagctcctcccagccatgtccaaatcagagttacaaaagaaccatcattccttctctattttcaccaaaattccgagacttcactgccaagtgtctctcagctggagctgaggctttgagaagtcccacatcgattcttgacaccagagccttatcatccccatttgggagtcctttgtcacatgaagcagcagcctcagaaaacacaacctcttgggactccaaatgcattggccttgctcctgttggtgca

SEQ ID NO: 3085 - DNA, 355 bp, Glycine max
  Clone ID: LIB3028-016-Q1-B1-B2
gcaaacctcatactactgctagatatgctacaaagaaattgctggaacgtagagagcagaaaccatcaagcctatcagatgctattgttgaacacacacagatattgaaaactaggtccaagtgcttgagagaggttcttcaaaaaagtgggtgggatgtgcttgaatcgtgtgcgggtgtgtctgttgtggccaagccctctgcctatctcaacaagactattaagctgaaaatttcacttgagggtgaagcaagccacaggagtgccactaaggaaataaagctcgatgactctaatatcaggactgtcattctcaaaaccactggattatgcatcaataatgggtcatggac

SEQ ID NO: 3086 - DNA, 345 bp, Glycine max
  unsure at all n locations
  Clone ID: LIB3028-016-Q1-B1-B3
gttcctggttgaaaaaactgaagcttaaacttatggacattgtgagttagaaaaacaagtttaaaaatggtcctagttgtggggatcattangtctaccattttgcatgtcatgttgaaaagctttgttttttatttatttctttagtttactttattattaatatattattagtatatgatggttaagtctttggttgtattatggagggtatacctacgtgtgagcacaacacttgggtccacatcagcgtgctgaccacgtggtaacatgagaaattctaagagttgtgtattgaagtgagcaagctgctgctggtgctggagtttagggatgagggtttat

SEQ ID NO: 3087 - DNA, 357 bp, Glycine max
  Clone ID: LIB3028-016-Q1-B1-B4
ctgcaagagtgagaatcatcttctgattaacctccataatatcctcaggtaacaaaaatatagaacaaccgactgaagacacggattcatttccttcacctgtcaacactgctactaccaccacgcccgaggcatccccggcaccttcggtgtgtggtgaagatgaaagttcctccattggcggtgaattctccaacttgagtgttgacgatgccacctctgacaccacagccacttcttcacagcccgagtctgacagtgtttctgctggagatgagctgttatgagtcatctagttggcataagatgagtgctaaatgttttttgttaaagggagaatataatgagtaatgacat

SEQ ID NO: 3088 - DNA, 265 bp, Glycine max
  Clone ID: LIB3028-016-Q1-B1-B5
cagatctctcttgtccatccttcagtggtgggcgttcaatgtcaccgtcatcatcgtcaacaagtggatcttccagaaattggatttcaagtttcccctatcagtttcctgtgtccactttatctgttcatccattggagcttatgtggtaattaagttgctgaagcttaaaccactgataactgttgaccctgaagatcgctggagaagaatctttccaatgtcatttgtgttcggtgagaacatggtgctggggagtgtgagc

SEQ ID NO: 3089 - DNA, 339 bp, Glycine max
  Clone ID: LIB3028-016-Q1-B1-B6
aaaacaacagggaaagaaatttctgaccctaaccgcgtgtcgttgaaatcctcaaacgcagagtagacatagaattatcaaaaagcggggaaagggagattgaattcgatcctgggacgttaacgtggtttcaattcaattgtggtcctgtcggtgccctatctgcgacgacgatgtcatctttatatagaggggaatccaggaggtacaacaataaaccaagaggacgtcagaagttgacaacgcagaggaagcacgagattaaggaggccgttgagttatttgatacggatggctcaggtacaagtgaggccaaggagctgaatgttgcaatgaggg

SEQ ID NO: 3090 - DNA, 234 bp, Glycine max
  Clone ID: LIB3028-016-Q1-B1-B8
tatcccttgacatgtcttctgccggcggcgacagcggcggcagcgctacttccggcgagcctcgccaatacttctgccaccagtgcaaccgcaccgtctcaatttccccttctggctcctggggtggtcgtctgccccacttgcaacggcggcttcctcgaggaaggcgaggtggcaatccccgacgctaaccctcctaatccttttttctccgacttccccctcggcggcgcc

SEQ ID NO: 3091 - DNA, 138 bp, Glycine max
  Clone ID: LIB3028-016-Q1-B1-B9
cggctcgaggcgatcggccgctcacgatggagaggctctctctgataccgaactgtgtctcttcattagttatcgtctgccttcacacccgatgatgaaggacgtgacggttgagacagaaggaggagcatcaccatt

SEQ ID NO: 3092 - DNA, 389 bp, Glycine max
  Clone ID: LIB3028-016-Q1-B1-C10
atttgatttgttgaacaagcttctaacttatgaccctgaaaagcggatcacagctgaagaagctctaaaccatgagtggtttcgtgaagttccccttccgaagtcgaaagaatttatgcctacattccctgctcaaaatgctcaagacaggcgaatgaggagaatattaaagagtccagatccattagctgagcagcattggaaggagatgcagcagggtgaatcatggactggtggtacttttggttaagaatggtgcaatttaattttttgttcacaataatcattctaacatgctcagctgaatggttgcacacttgaggtgagagtaagcgctggatggatgctgctaattttgattgttagagaatcacctatgtggttttttt

SEQ ID NO: 3093 - DNA, 315 bp, Glycine max
  Clone ID: LIB3028-016-Q1-B1-A3
caggaccaagtgggtggacttcaagccaccagggacaatggcaaaacatggatcaccgttcagcctgtggaggctgccttcgtcgtcaatcttggagatcatgctcattatctgagcaatggaaggttcaagaatgctgatcaccaagcggtggtgaactcaaaccatagccgtttgtccatagccacttttcaaaacccagcaccaaatgcaactgtttaccctctgaagataagagaaggagagaagcctgtgatggaggaaacaatcacttttgctgaaatgtacaggaggaagatgagcaaggacattgag

SEQ ID NO: 3094 - DNA, 385 bp, Glycine max
  Clone ID: LIB3028-016-Q1-B1-C11
gctagagaatgatgatgaagtctgctatgtgtgcagtggtggttgtagcacttcttcttctggcggaggtggggcccatggctgaggctgtgacatgcaccccaacagagttgagtccgtgtcttccagcaatcacttccggtgctaaaccttccaatgcttgttgcacgaagctgaagcagcaaaaaccatgcttatgtggctacctcaaaaacgctagcttgaagcagtatgttaactctcctaatgcccgaaaaaccgttgcttcttgtgggattccctttccaacttgttaattaattaagccttcttaaaattaaagtgtgggatatatatatatatatagataaacagtttaatttatacacactttgatcctacaaag

SEQ ID NO: 3095 - DNA, 356 bp, Glycine max
  Clone ID: LIB3028-016-Q1-B1-C12
gcaacgcgtgtgatgacgcattcagcaagatgtgcagtggaggctgtaccacttcttcggcaggaggaggtcgagcacaggcgtgaagctgtgaaatgcacccccacagcattgggtcagtttcttccaggactcatttacagtgctgagacttccaacgcctgatgcacggtcctgatgtatcacatatcatgcctgtgtggctacctcaaagaggctagcgtgacgcagtatgttaactctccgaacgcccgattcaccgttgcttcttgtgggattcccattccaacgtgttacttcattaagccttcgtacaattaacgtgtgcgagatatctagatctatagatccacagt

SEQ ID NO: 3096 - DNA, 314 bp, Glycine max
  Clone ID: LIB3028-016-Q1-B1-C3
tactactactgcacacactctctcgctctctctcaatgcatggccgccaattcgagtagccgagggatcaccgccttggggaaccgagtcgccaatcagatctggacttcgaatcccgcctcagctccgcggagttccaggaggggagcaataacagctgcatacagtagcagcggcgggtcagtgtatgacaacaaccctgatgatcagattcacactggggcggtcccagacgatgtgattcaggcaacacatgccggcgtgtactgggccccagagggacagactggggtatatgggccccccggaggagc

SEQ ID NO: 3097 - DNA, 127 bp, Glycine max
  Clone ID: LIB3028-015-Q1-B1-G6
gggcgaactaagaagcctttgtggattatgtcggagcacatgcattgtgttaaagtgacagtgctgaagcattttatttctcagctggcttttctttccctaaacaaataccctgttattctagcag

SEQ ID NO: 3098 - DNA, 410 bp, Glycine max
  Clone ID: LIB3028-015-Q1-B1-G7
caattataagcatgggtttgtggaacacaacgaatgcagtgtcatgccgctttcacaagtttggtgatgaccaaaagaatctggtcgtccaaggtgatgccacgtcttcttccaggggcatagaactcacaaagttagacggtggaggaaaaccagtgggtggcagtgtggggagagtgttatactcttctccagtgcacctttgggaaaactctacactggtcgcaagctttgaaaccgacttcaccttttccatctcatcagactctactactccaggtgatggccttgccttcttcattgcaccatttgacactaagatccctccaaactctggtgggagcaaccttggactcttaccatcagacaatgttgttgctgtcgagtttgacacttaccctaatcgtgat

SEQ ID NO: 3099 - DNA, 62 bp, Glycine max
  Clone ID: LIB3028-015-Q1-B1-G8
ctactagaagcaagggtttgtggaacattagcaatgcagtttcattgtgctttcaccaattt

SEQ ID NO: 3100 - DNA, 386 bp, Glycine max
  Clone ID: LIB3028-015-Q1-B1-G9
ccgtaatctccaaaccccacttcgtcagatactaaaaagaaaccaacagtttccatacttagtatttcttctctgactgactgatcaggttgacatcttgacattgcaatcctgccttttggttccccatttccatgtttgtggattcttcctgattcaaaggcaatatattgtgtcttcatagctcagtttttgagcctcatcagttgcaacttgcaacacaaactttatctataacttggtatctctaaaggactctcagcattgatcaaaatgggcctctctagtctcccagcaccatctgaaggagtattatgtgtccttctggtgaacactgtattgtcaatttccatattcaaaggcattgtaaggacaatcctgcacat

SEQ ID NO: 3101 - DNA, 385 bp, Glycine max
  Clone ID: LIB3028-015-Q1-B1-H1
cttggtttgatccagaaaggcttatttttctttgttctgaggaaaaaaattctgcttttcaatttctgggttttcaagcttcgtgtagaaggaaatggcacaacgttctcatgtacccaaatttggcaattgggatagtggagagaatgttccttatacagcatattttgacaaggcacggaaaggtcgaactggcacaaggataataaatccaaatgaccccgaggaaaatgctgatttaagttttgataatccatcatctgataacctacctcctaccagacctagaactaattcagaggatcaatccggaaaaggatcactgcatttggaagatgatcccaagaattttatcgaatctccagctcgtcatgacaatgtaagc

SEQ ID NO: 3102 - DNA, 375 bp, Glycine max
  Clone ID: LIB3028-015-Q1-B1-H10
gaagaaagaaagaaagccatgcaagcatgttcctcctcagacgctccactctccaagaggttagatggcaaagtagcactcataaccggcggagccagtggcatcggtgaagccaccgccaagcttttccttcgccacggtgccaaggtcgtcatcgccgacatccaagataacctcggacactccctatgccaaagtctcaattcctccgacaaaaacaacaacgacgacatttcctatgttcactgcgacgtcaccaacgacaaagacgtcgaaaccgccgtcaacgctgccgtctcgcgacacggcaagctcgacatcctcttcagcaacgccggcatcacgggccgttccgactgttctaactccatcacg

SEQ ID NO: 3103 - DNA, 388 bp, Glycine max
  Clone ID: LIB3028-015-Q1-B1-H11
ctctgatccaaacgaagtaacgaaccaaccaatcaccctgtctttctgacccaaaaacatagtcccaaatcgaacaaaatcaatcaactaactcctccaacgttgttgttattatgcagacaacaagttccaacacctccggcgccacctcgatccgttccggcatggagctcttccaccgcgcgaaggcggtgcgcctccgcagccaccacgacaagtacctcctggccgacgaggacgaggagtccgtcacgcaagaccgcaacggatcctcccgcaacgccaagtggacggtggagctcatcccggagttcgacaacatcatcagactcaagagctgttacggaaaatacttgacggcgtccaaccagccgttactgctcggcgt

SEQ ID NO: 3104 - DNA, 174 bp, Glycine max
  Clone ID: LIB3028-015-Q1-B1-H12
ctgcaatggatttctagcattcaacccttccttttctccttgcctctgtcctgacccgttcttttcttctccatgcattcccagaaagttgtagagatggaagacaagacagaaagtcatatgagttcagctgcggcctttggtgaaggggggattcaagaatcctgtgatgat

SEQ ID NO: 3105 - DNA, 324 bp, Glycine max
  Clone ID: LIB3028-015-Q1-B1-H2
ctctcggcatcaagattgtattcttatcagaaagaccactgagtctaggggatgtaacagccaagaacttaaaggaggttggattcaacacatgggagaagttaattctcaaggatccatctgagtactctggtaagttatcatttgaatacaaatcagctgagagagagaagctggagaaggagggatacagaatcattggaaacgttggagaccaatggagtgacctcctgggaagcaacaaagggactaggacttttaagctgcctaatcccttgtaccatgattaagctctcaaatcaaacctctaagttgcccctaaat

SEQ ID NO: 3106 - DNA, 191 bp, Glycine max
  Clone ID: LIB3028-015-Q1-B1-H3
ggaaatgaagtagggtaccgtttggttccaaatgcagcatctcatccccttctcagagaggatgattaccctcaaagacgtggtgctttcaccaattacaatgtttgggttacaccttacaataagactgagaaatgggctggtggactttttgttgatcaaagtcatggaaatgaaactttggctgtttg

SEQ ID NO: 3107 - DNA, 394 bp, Glycine max
  Clone ID: LIB3028-015-Q1-B1-H4
ggagcatacaacggaagaaactccatggtgcaggttaacgacgaatgttaagttgcctaagggtttgttgatggaggtgagaatccgaggaaccctattgtgattggagggtatcaattggaggatgtgttggtgcagattgattttgatacttccatggtgggattcagtccttcgcttctgacgaagcatgctacttgctctcatttcaaaccctagttttcggtgaatcgtgatgattatagtttattattatccataccacatagtttttctttagattaagaagagttttgaggagtttaacacgttctgtaataacccttttattttttttttctttcttttttgctctcctgcggtattatctgtataaactgcttaagtggcctat

SEQ ID NO: 3108 - DNA, 320 bp, Glycine max
  unsure at all n locations
  Clone ID: LIB3028-015-Q1-B1-H6
gaagcgtcttaataaacgctaacctctgtacccttcgctaaaatgagagagtgcatttccatccacattggccaggccggaattcaggtcggaaatgcttgctgggagctctattgcctcgagcatggcattcaggctgatgggcaaatgccaggtgataagacaattgttggaggtgcgatgctttcaacaccttcttcagcgagaacggtgcagganagcacgtgcctcgtgcaattttcgtagatcntgagcccactgtcaatgatgaagtcagaactggcacataccgccaactcttccatcctgagcagctcatc

SEQ ID NO: 3109 - DNA, 405 bp, Glycine max
  Clone ID: LIB3028-015-Q1-B1-H7
ggaaaattaatctccctttcattttctctgcatctgtactctccaaaatgccgtccttagaggaggagctcttcccttcaaccccaggcaagttcaagatcgagcgggcccaccacatgaaccgccagctctaccgctgcttcgcctccaccagcaccatgttcctgtgggccctctttttaatcgccctcaccgcttcatatctcagcttccaaggcttcgtcggctcccacgtctccctctcgttaaaacgacgcggagacggcgtcgtcggactcgacaacttcaacgactactacgatccgtctctgaaaaaagcccgcaagtccctcctcgccaagcatgacgtcttcatcgtccatggcgacctcaacgacgccaagctcttgggaaagctcttcgatg

SEQ ID NO: 3110 - DNA, 366 bp, Glycine max
  Clone ID: LIB3028-015-Q1-B1-H8
ctttaccagttgccacactagaccgagattccccctaaacccgtttgcgttgttgtttgcgaagaaatggcgactaagaggagcgtgggaacgttgaaggagggtgatttgaaagggaagagggtgttcgtgagggtcgatctgaacgtgcctttggatgacaaccttaacatcaccgatgacactagagtccgtgctgctgttcccaccatcaagtacttaactggtcatggagccaaagtgatcctttctagccacttgggacgttctaaaggtgtaacacctaaatacagtttgaagcctcttgtgccaaggctgtctcaacttctcggaattgaagttacgatggcaaatgactctattggg

SEQ ID NO: 3111 - DNA, 393 bp, Glycine max
  Clone ID: LIB3028-015-Q1-B1-H9
gtcatttctctctccggcgagaaagaaaaatgcagcatttcatggatttgcaagcgaattcggagttgggtgagtcgaattcatggctttcagtgaaagagcagtccggtgcggcacccaacaccaatttggatcgcgtcctcttcaacgacctcgtcgagattgtccctctcgttcagtcactcatcgatcgtaaagcaagccgttcattcacgcggcgtggttccatgatctacaccaagacacccaccagagaatcattgtccaaaagagtaacagattcaaaaagtaggaatgttgccccatctattcctgccaaaaagaaaagggaccacggagaaaaagaacaaggaaaaaatggcagcaatgatgctgataactattccatgtttt

SEQ ID NO: 3112 - DNA, 371 bp, Glycine max
  Clone ID: LIB3028-016-Q1-B1-A10
cgttgaggacattaccgacacgcacgccatacaaagtcgtcacgtcttaaacagtcacacggaatgtacggtttctcataccacacaacacttcacggttcaactcgctcgagtcaaaactacagtcagtttcgttagtccggttcaggaggaatttagcaagtgtgcactaggaaccaatcataagatagaagaaatagctgccgtcaaagcggttagtactcgtgggaaacggttcacagttcatcccgatcaacgcaagagtggcgtacatacagaatgtaatagagaagagattgcaatccaacaggaatgcacaatacatgaggctgtggtcgaaccggtttcggttcacaacgaagtcaatggtg

SEQ ID NO: 3113 - DNA, 402 bp, Glycine max
  Clone ID: LIB3028-015-Q1-B1-G5
ctctgcgtcaaaagcgtgcaggttttttgtgttcttatttgttagtccttcctgagagctgaatttcccggcaaacacaaacaggtttttgtggtgttgaagatgttcaagaacacattccaatctggatttctttccattttatacagccttgggagtaaacctttgcagatatgggacaaagaagttgttgatggccacattaaacgactacaggatgaagacatacagtccaatgtactagaaataattggatcaaatattcagtccacatacattacttgcccagctgacccagcgacaacgcttggtataaagcttccattcttggttattattgtcaagaatctaaagaagtatttcacatttgagattcaagttttggatgataagaatgtcaga

SEQ ID NO: 3114 - DNA, 306 bp, Glycine max
  Clone ID: LIB3028-016-Q1-B1-A11
tcgagatgagagccagggttgctgattttggactttcaagacatgacatggtggatagacatgcagctattccgggtacctttggctatcatgaccccgagtataaaccctccggaacattcactaagataagtgacgtatacagttttgaggtgttgctcgtcgaaattacagctggcacgaatcatcagcaaggtcatatggaagacgttgagcttgcagcaatgaacacagacggaaaacttgggtgcgaggaaaacgtggaatctcgctatcaacgaaacgttgatgtcaaggaattgcatt

SEQ ID NO: 3115 - DNA, 386 bp, Glycine max
  Clone ID: LIB3028-016-Q1-B1-A12
ctcattaattgcaagaatggcacttcgttgcttggtgatgtccctttctgttctcttcactcttggtcttgcgagagaaagccatgccagagacgaagatttttggcatgctgtttggccaaacactcccattccaagttcattgcgagatcttctaaagcctggccctgcaagtgttgaaatcgatgatcaccctatgcaaattgaagaaacacagtacccgaaaaccttcttctataaagaagaccttcatccaggcaaaacaatgaaagtacaattcagcaagcctccctttcaacaaccatggggtgttggtacatggttaaaggaaattaaagacactactaaagaacgatatagttttgaagagctatgcatcaagaaag

SEQ ID NO: 3116 - DNA, 354 bp, Glycine max
  Clone ID: LIB3028-016-Q1-B1-A2
attcttcaagattcaggtactgcgtttcggaagcagacacagatggctcgtacgaagcaaaccgctcgtaagtccacaggaggaaaggctcctaggaagcagcttgcaaccaaggctgcacgtaagtctgcaccaactactggtggtgtgaagaagccccaccgttatcgtcctggtaccgttgctcttcgtgagattaggaaataccagaagagtaccgagcttttgatccggaagctccccttccagaggctggttcgtgaaattgctcaggacttcaagactgatctgcgtttccagagccacgccgtgcttgcattgcaagaagctgctgaggcataccttgttgggctc

SEQ ID NO: 3117 - DNA, 254 bp, Glycine max
  Clone ID: LIB3028-015-Q1-B1-F10
caaaggcagggcaggttggtttccgtttagttacattgaacggagggagcgggttcttgcgagcaaggtgactgaagttttttaacttttaagtttttcctgttgggttggtttcttaacctgcgaattttgtatgtatgttttgattttgtaaaacagattgatttgagatatagatggcaattttcccttgtgattatcttgtagaatttataaatcatttttttgttatccatttttattttattgcactc

SEQ ID NO: 3118 - DNA, 388 bp, Glycine max
  Clone ID: LIB3028-015-Q1-B1-F11
ctcggggctggcacatttccatctctccatctaccataaatcgttccaactcgaacatgagacaaaggcatgggagtctgtatgtcattgcattgggtgatgaatttctttgttggactactgttcttgcgtttgctggataaacttggtccacagctgctttactcgatgtatgcaaccttttgcatcatggcaataatttttgtaaaaagaaatgtggtggaaaccatagggaagtcacttcatgaaatcgacatcgcacttctaccccaagagtagagcatcatatgaagctctattcattgaatgctctaattctgcatacttccagctgagcaaattgtgtctcatctaatacggatgaccttaacagtacaacgggaagctc

SEQ ID NO: 3119 - DNA, 388 bp, Glycine max
  Clone ID: LIB3028-015-Q1-B1-F12
ctcggggctggcccagttccaggtctccttctaccataaatctttcctactcgaataagagccaaaggcatgggagtctgtatgtcagtgcattgggtgatgaatttctttgttggactactgttcttgcgtttgctggagaaacttggtccacagctgctttactctatgtttgctaccttttgcatcatggcagtaatttttgtaaaaagaaatgtggtggaaaccaaagggaagtcacttcatgatatcgagatcgcacttctaccccaggactagagcatcttatgaagctctattcattgattgctctaattctgcatacttccagctgagcagattgtgtttcatctaatatggttgaccttaacagtacaacgggaagctc

SEQ ID NO: 3120 - DNA, 384 bp, Glycine max
  Clone ID: LIB3028-015-Q1-B1-F2
tttctctttctctccttcaaaatcgttgtcaatttcgcctctttctttctcaactcccttagattctctccatcgggtcttcaaaaatgcggatgagctgcaatggatgtcgagttctcagaaaaggttgcagtgaaaattgcagcatcagaccctgtttacaatggatcaaaagcccagaatctcaagccaatgctactgtgtttcttgccaagttctacggccgtgctggtctaatgaacctggttaacgcaggccccgaacatcttcgtccagcgatctttcgttcgttgttgtacgaggcatgcggtcggatattgaacccgatttacgggtctgtcgggttgttatggtccgggagctggcagctatgtcaagccgccg

SEQ ID NO: 3121 - DNA, 359 bp, Glycine max
  Clone ID: LIB3028-015-Q1-B1-F3
gatacagggacctatacagcctaaatattgctcaagacggaatggtaacgtggctgaatggcaaactctctacaaacctgctacagattcaagtcgactatcgccgaacgaagtaaaccgaggtgtttacgagggacgtgagttgaccaactcgacagacaccacgcgtcacgcattcagaactagtagtatttttcagacacgtacgtgaaaagaagaagttacttgtcgatctcatcaaacttgagaacttttatgaatctacatgcgagaaagtcatgcacgatatgcaaaatgtccgtcaagttcaatgtccaacacaaaggtacatgtcaagtctgacataggtgtcatctatc

SEQ ID NO: 3122 - DNA, 383 bp, Glycine max
  Clone ID: LIB3028-015-Q1-B1-F4
gacttccttgctcccacttacagtctcatcatcatcttcatcttccaaagtcgcagcatttcatgctatcagagcctcagcagattctgagtatgttgcctcccgacacacccttataagggaattcttgaagggtgttgctttgatgcctctgccacttgttgtgatgagagaatcaagaccttcacatgctagacaagttgatgttggctccgtccttgtaacctctcgctctgagccttcttgcgtactcttcagagtcactcccaaggacactccagcccttcgagcagttctttgcaggaaatgtgcagccatacaagtttatcatctccccgacttggaaacaggctcgtgtaacatatatattaactggaaattac

SEQ ID NO: 3123 - DNA, 402 bp, Glycine max
  Clone ID: LIB3028-015-Q1-B1-F6
ctcgagccgactctctctctctcttcttcttcttcttcttcttgcacgtattgttctaatccacaaaaataatggccttaaattacaacattgccctcgccttctctacggttctcacgctgcttctccttcccttaccaacccttggggagctcgtgcaggagcagccactagtcctcaagtaccacaacggccaactcctgaaggggcgcatcaccgtcaatctcatctggtacggcaccttcaccccgatccaacggtccataatcgtggacttcataaactcactaagcagcgcgccaaacgcgccgcttccatcgactgccacgtggtggaaaaccacggagaagtacaaggggggaggatcctctgcgctcgtcgtagggaagcagttcctacact

SEQ ID NO: 3124 - DNA, 399 bp, Glycine max
  Clone ID: LIB3028-015-Q1-B1-F7
ggctttcaagctgatgtcaaagctttgcagaaggttttgtctgctacgcatttgacttatcaacatcaacacaacaagcaaatgagttgccctgcgatggctcagttgctctcaaacactctttatctacaaacggttctttccttagtatgctttcaatgttttgggtggccttgacaatgatggaaagggatgtgtcttcagatatgatgctgttggttcttacgagacggttggatatagctctcagggttctggatccacacattagtatgccatttcttgataaccagctgaagtctcctagcgcagtcttgttacatgcccaggatgctgttactccattgtctgaagcagaagcaatggatctggtcaaaactgtttttgcatcagcaactg

SEQ ID NO: 3125 - DNA, 412 bp, Glycine max
  Clone ID: LIB3028-015-Q1-B1-F8
attgaattctccagagagaagaagaaacttaatcgatcatcacttcacttcactaatacatcatggcagacgagacccagaacaagtatgagagctctgaggttgaggtccaggatcgtggtgtttttgactttctcggtaagaaaaaggatgaagaagacaagcctcatcctcaggaggaggtcatcgccaccgagtttcaaaaagtcactgtctcagaccaaggagagaacaagcacagcctcttagaaaagcttcaccgatctgacagcagctctagctcttcaagtgaggaggaaggagaagatggagagaaaaggaagaagaagaagaaggaaaagaaagggctgaaagagaagatcgaggagaaaatagagggtgatcatcatcatcacaaggatgaagacacaag

SEQ ID NO: 3126 - DNA, 412 bp, Glycine max
  Clone ID: LIB3028-015-Q1-B1-G1
gcactgtggcagaagtcttaggagtgtaaaacagagacgcaaaatgaagacgattctatcgtccgagaccatgaatattcccgacggcgtgagcatcaaggttcacgctaaggttatcgaggttgagggccctcgtggaaaactcgtgcgagacttccaccatctgaacttggacttccaacttattaccgacgatggcggtaaaaggaagctcaagattgattcttggtttggttctcgtaaaacctccgccgccatccgcaccgccctcagccacgttgagaatttgatcaccggcgtcaccaagggataccgatacaaaatgagattcgtgtacgctcattttccgattaacgctagcattggcaacaacagcaagtccatcgagatcagaaatttcctcggcgagaag

SEQ ID NO: 3127 - DNA, 393 bp, Glycine max
  Clone ID: LIB3028-015-Q1-B1-G10
attggaaggaacaccaaaataaggaactgcataattgacaagaatgcaaagatcgggaaagatgtcatcatcatgaacaaagatggcgttcaagaagcagatagaccagaagatggattttacattcgatcaggaatcacagtcatattggcgaaggcaacaagagaagatggcactgtcatataaaggggtgaaagtacttatttcatggactggtgaggtggccagcagtagctcgaagaagcattccaaggaactttggggacagaaggttacaattgaaaaatcagcacccccttttgctatatatgcaaaatagaaggctctcccactgcatataaaaatatagaatgaatagtgtatgaaatcaaaatgcataaacgtaaataaaat

SEQ ID NO: 3128 - DNA, 375 bp, Glycine max
  Clone ID: LIB3028-015-Q1-B1-G11
cgtcgatgtacacgtggagacgcaaagcttgtctgagccattcaaagtcatcatggagcaaagtacaagatctcattgaagacacagactgtaaggacaaatactacaccttatccgatagagctgagtccatattgctttgcctgaagcaaagatgtcctgaactttcacagacttctttggacacatgcaagatctaatacaatcgggatgtggggaaggcagtactagagagttattcaagagttttgggaggcctagcattcaacatggttgcatggattgaagatgttctttatgtagataaatcaatgatgaaccgagatgtctagacacctcaacttggtaatcgcatcctaacagtgttgctttcca

SEQ ID NO: 3129 - DNA, 336 bp, Glycine max
  unsure at all n locations
  Clone ID: LIB3028-015-Q1-B1-G12
ctcttctctatcgctttctcttcttccttcttacttaattctatcaccaacatagccacagacacagacatacgcactacttatttctcttcttaggccttattatcatcatataccacatcatcaaagcacttgccatcatagagtaccatgttagccaataacttatctccatcgtcagttcccacttctgagccttttccctgcactgaaaatggcactgccaccattaagaggaagagaaggcccgcaagaacaccagatccggatgcagaagtggtgtcnctctcgccgaaaacgttgctggaatcggatcgttatgtgtgtgagatctgc

SEQ ID NO: 3130 - DNA, 418 bp, Glycine max
  Clone ID: LIB3028-015-Q1-B1-F1
gactcagtgtccaattccgacaaattgaggctctactcgacagaacaactacccatgatttcattcgaccttcgattcctcttccgcttcaactcttcgttcctcgttcgctgtccatttcgttgcaatcttggttcttgcgttttctttttctcctgaatctgggtgcttcaatttcggtgcaaactggctatggactacgaaccctactatagtagcggaactgatgatgatcttccaccaacacatccaaatagaatccccagaggggaacgtcttgcaggaaatggaagattgccagcaggttcaattccatacccaaggatgcatggtgaaattgatatggaaactcaaattcaccaacttgagaaggaagcatacagttcaattctacgggcatttaaagctcaagctgatg

SEQ ID NO: 3131 - DNA, 386 bp, Glycine max
  Clone ID: LIB3028-015-Q1-B1-G2
tttgagagtaaaaaggactacaagtctgctctaaaggcatttgaagaagtcctactatttgatcctaacaacaaggttgcccggcctaggagagattctttgaagggacttgttgatgcaaccaaaggagttactgtcatcaagtcaacagagaagaagtgagtgtcattgtatcaactcactatgaatatggcattgttaaatacatagttttcaataacttggttgtgttggaaggaattttggctctattggtgtagttactgcttactagctgaggcatactagtgctgcgaaatgtagttgaaattgaaacttgaaagtgctcgattctccaatgggttaccaaagctttgctctggtgctgatggtgtattcacttgtga

SEQ ID NO: 3132 - DNA, 251 bp, Glycine max
  Clone ID: LIB3028-015-Q1-B1-G3
gatcatgggtcgtccacccagtactgggggcccagcccttcgcttcaaccagccagaggtatcagaagtggcagctattcgtcacgagcataggaacgctatgccgtcacgtgatgttcttaaaggtcttgcagagaaattcagtgaagcacaagatcgtaaaggcaggatttcagtgcaaatgaagcaagtttggcactggtttcacaataagcgatatgcgagacgagcacaatcaagtaagactcctg

SEQ ID NO: 3133 - DNA, 348 bp, Glycine max
  unsure at all n locations
  Clone ID: LIB3028-015-Q1-B1-D2
ctcgttctctgaaattttaattgacctttcccccctcattgcgaatctctatcaattgctcacgcatccgctcattattcaccctctgataagaaaccggcatcaaacggcccaacttgagaagaagccggcttgtcgangtgaaggtatcgatggaacgaggatcccagaagatgaagcagataataaaggacaacgtgtgagacctacaagattcacatcgtcaaagtgttgaagcaagttcatcccgacatctggatcttcatcaaggctatagggatcatgaacaatttcataaacgacatcttcgagaaactctctcaagagtcatcacgtctcgctaggtac

SEQ ID NO: 3134 - DNA, 178 bp, Glycine max
  Clone ID: LIB3028-015-Q1-B1-D3
tatacatggactacagtttattatccaatccacagtagagtctcctggaaacattgagcaaacggtcaaggcatttctccaaatgtttgagaacaaactcctcgagatgacagttgatgaattcaagagtaatgtaaatgctttgatagatgtgaagctagagaaacacaaaaatttg

SEQ ID NO: 3135 - DNA, 345 bp, Glycine max
  Clone ID: LIB3028-015-Q1-B1-D4
aataattgtgaggcgacggtaaggtcgcgttgtgttgcgtcgtgtcgtgcgctgttccactgtttcacgtttttgtgttcagaccgaaacctaactccgcatcgtaaccatgtcgaccaagcaacgtggaaaagctaagcccttgaacagaaataagtctgacaacaaggattacgacgagattgaagtggctagcattcataagataaacgaagacgagaatgcgctaaacgagttgaaagccaaggcccatcaaaacggagactttggaggttctgggctcaagaaaagtggagagacctaacggctctttatcatgattgtatgcattcaatattgagccct

SEQ ID NO: 3136 - DNA, 351 bp, Glycine max
  Clone ID: LIB3028-015-Q1-B1-D5
cttggcggctgcgagacccgttgtgttctctcttctctctcttttttttcactttcactctcttcttcgacgctctttttaaggttttctcaactcttcgatttggggcttaaaccctcgcttccgagtcacattcggatttacggcttccgtttctggattctgcctcacatgagaaatcagatatcgtgattgagtaatcatcatggccactgttgctactcgcgcggatcatgcaactgatttgctgcacaaactatcgtaggaatctcagatcaagcccttggagattcatgagtcatccaagaaggcaactgggaatcattatggatcagttgattcaggaaatgc

SEQ ID NO: 3137 - DNA, 400 bp, Glycine max
  Clone ID: LIB3028-015-Q1-B1-D6
aacttctggtctctactatgactgttcagcccatatgctctgggttggggaacgaaccaggcagcttgatggtgcccatgtcgagtttctaagaggagttgctaatcccttgggaattaaggtaagtgacaagatggatccaaatgagcttgttagactcattgagatcttgaatccccaaaacataccagggagaataactgtgattacgaggatgggagctgaaaatatgagggtgaagcttccacatctcatcagggcagtgcgcagagcagggcaaattgtcacctgagtcagtgatcctatgcatggaaacaccattaaggctccatgtggtcttaaaactcgccccttcgatttcatcagggctgaagtgagagcattctttgatgtgcacgag

SEQ ID NO: 3138 - DNA, 371 bp, Glycine max
  Clone ID: LIB3028-015-Q1-B1-D7
gcatttcggactctaatacgactgttcagcccatatgctccgggttggggaacgaaccaggcatcttgatggtgcccatgtcgaatttctaagatgagttgctaatcccttgggaattaatgtaagtgacaagatggatccaaatgagcttgttagacgcattgagatcttgaatccccataacataccatggataataactgtgattacgaagatgggagctgaaaatatgacggtgaagcttccacatctcatcagggcagtgcgcatagcagggcaaattgtcacctgagtcagtgatcctatgcatggaaacagcattaaggctccatgtggtctgaaaactcgccccttcgatttcatcaggtctg

SEQ ID NO: 3139 - DNA, 407 bp, Glycine max
  Clone ID: LIB3028-015-Q1-B1-E1
cactcgagctcgaggcttactcagatggatgaaactgaattggacaagagaaagcaacacggcacatatacatgatgatttagggggcactcacactttttctgctatgaagggagatgtggcttgccaacgaattttgagtctacttactgctaagcattgggttatggtgctgcagtcctccttcaaagtgggaagactggattaatatcatcggttggtaatttatgtgctcctgttgaagaatggactgttggcggaactgcactcacgtcattgatggacgtggagaggagacatggtaaattcaagcctgtgatcaagcaggcaatggtggagcttgaaggggcacccttcaaaaagtttgcctccttgagggatgattgggcccctaaaaattgctacat

SEQ ID NO: 3140 - DNA, 386 bp, Glycine max
  Clone ID: LIB3028-015-Q1-B1-E10
ggcagtggtgattccacagttcgattgtggaatattgactctggagcacttctagagagaagaaggccttgagggcattcctgagcctgaatgaaggcaaggccggctcgagattgtttgttgttgtaactcgttcttcttcttttgttgttttgtgtttgtgtttgttttttctctcacctgaaaatgtcttgctgcggtggtaactgtggttgcggaagctcctgcaagtgcggcaacggctgcggaggctgcaagatgtacccagacttgagctacactgagtcaaccaccaccgagaccttggtcatgggagtggcacctgttaaggctcaatttgagggtgctgaaatgggtgtgcccgctgagaacgatggctgcaaatg

SEQ ID NO: 3141 - DNA, 392 bp, Glycine max
  Clone ID: LIB3028-015-Q1-B1-E11
ggattcatgaatgggatgtatccaagcaacaggatgtacagccaatatggaaacacatttaggcctgattctcgttttggatctgctgggtatggatctagaatgggttctttcgatagcaaatttaatggcacagggtatggctgcggtttaaaaaaaagcatggatggtttcagcgagctaaataagggacccagagctgccaagagttctgataataaaaatatcaaaagtcttggacctgtcacattattactcaaaggacagaaccttccagtgaagagtgataacaaagaagttcctccagttcctgacaaggaacagtacaatgggaaagattttgctgagaattattctgatgcaaagttttttgtcatcaaatcctatagtga

SEQ ID NO: 3142 - DNA, 390 bp, Glycine max
  Clone ID: LIB3028-015-Q1-B1-E12
ggattcatgaatgggatgtatccaagcaacaggatgtacagccaatatggaaacacatttaggcctgattctcgttttggatctgctgggtatggatctagaatgggttctttcgatagcaaatttaatggcacagggtatggctgcggtttaaaaaaaagcatggatggtttcagcgagctaaataagggacccagagctgccaagagttctgataataaaaatatcaaaagtcttggacctgtcacattattactcaaaggacagaaccttccagtgaagagtgataacaaagaagttcctccagttcctgacaaggaacagtacaatgggaaagattttgctgagaagtagtccgatgccaagtttttttgtaacaaaaccgaaagt

SEQ ID NO: 3143 - DNA, 376 bp, Glycine max
  unsure at all n locations
  Clone ID: LIB3028-015-Q1-B1-E2
gagagtgcagcggagcagaaagaagcaaagggggaagaaaggtggtgtgtgttgtcgcaatggacatcactgccttcaaatccctcaacattccatttccaacctttccatcaaaattttctccttttcgtccattcagtttctttcacttcaaaccttttcgcactccttcctcacctcgcttcatctcccattgctctctcaatgggtcagcagagataacaagcaaggaaggtactttgcctcgtggcgttggagaggcagtgaatgaagcgtcaagttccaagattcttcaggttgtgctcgtgtcncctcagattccaggaaacactgggtgcattgctagaacttgcgcagcatcagctgttggattaca

SEQ ID NO: 3144 - DNA, 270 bp, Glycine max
  Clone ID: LIB3028-015-Q1-B1-E4
gtcgagctgagaataccagtatgctccagtagccggcacgaatcaacatggcggataaggcagtcagcatccgaaacatgaagtttatgacacacatgcgtctcgccagagagcaattcgtcgttgatgtccatcatccaaggagggcgaatgtttccaaggctgaactgaaggataagctgggaataatgtatgacgtgaaagacatcagcaccgtatgtgtcctcaagttccgaactcattttggtcgtggcaagtccactgggtttg

SEQ ID NO: 3145 - DNA, 232 bp, Glycine max
  Clone ID: LIB3028-015-Q1-B1-E5
cttggactgagcattgatgaatatgctggtgaagcaaatgctgaaatgcctcctcttgaggacgctgatgcacatgcttatggtagcatgatggaagaagttgattacatctgacttaagtgcctgtttcctgtttagaattggtgaatggagaaacagtccttttacaatgttggaagtcttttgaaatttcgaaattttggaacgtatgtgacctaggtgccgtatgtac

SEQ ID NO: 3146 - DNA, 407 bp, Glycine max
  Clone ID: LIB3028-015-Q1-B1-E6
cgttgagttcttcatcaacctccttgtcctcaacggtggcttcatcatgatcgttattaacttcctcacaggtcacctggtcgtccccgatcgtaatgcaccaaattatttgtcttgcatcggaaatttggacgcgagagtaaagttggatgccatcacgcgtgatgactgcaggtactatgtttcattagctatgatggcttcaaaggcatcctatgagaatgcagcttaccttaaatctctaataaaaaaccactggaagatggaattcgtgagattttttgattgctggaatgattttcaagaaaaggccacaacccaagtcttgattgttttggacaagcatgagaaccgcgatacttatgtggtagctttccgaggaacggaaccctttgatgcagatgcat

SEQ ID NO: 3147 - DNA, 379 bp, Glycine max
  Clone ID: LIB3028-015-Q1-B1-E7
ctttaatctctcacacaaaatcatggacaagaagcttggcaacacgtctcatgatcctgaagtgagaaaggggccatggacaatggaagatgacttaatcttgatcacctatattgccaatcacggggaaggggtttggaactctttggccaacgctgctggacttaaacgtaccggaaagagttgccggctccggtggctaaactacctccgtcctgatgttagaagagggaatattacacccgaggaacagcttttgatcatggaacttcatgcaaagtggggaaacaggtggtccaaaattgccaagcatctacccggaaggactgataatgagagttagacctactggacgacaaggatccataagcacctcaag

SEQ ID NO: 3148 - DNA, 361 bp, Glycine max
  Clone ID: LIB3028-015-Q1-B1-D12
ggcagagaggaggggttgtggttgctgtgcatgaggatttggggttgcttagtcagaggttgaagaatcatgtctttgctcagagtgttagcattcgaggaaccgccgatgaagagcatcgtacagggtatacgcgtgtctctagtcgccatcttggtgtgagagacggtatcaggcatttcacgtcggcgtaccacatcatcactcaagcactcgatggcactcaaattcctgagcgagacttctgaagagcatatgcatgtcaatgtggatctacatcgggcacctacagttcagcgcttatcctcgcacaccttggacttcatcactctacccgttgtgtcaggcgccccttgcctgg

SEQ ID NO: 3149 - DNA, 387 bp, Glycine max
  Clone ID: LIB3028-015-Q1-B1-E9
aaattcattttaatcctaattctgcacttcttgatcattcgatttttctcctcaaggttcgtctctgtttcatctcttttcatcatcgcagcctaattagccttagtttattgatttagctttggtctttcaccatggttacatttttacgtttctatctttcgatttgtgattttttacgttaatatgtgtataccggttttgtcgttgttgaatccgaaactttccattcgactttctgattccgtatctcgtttgtcacatgcaaaatctttcccgatttttaatctggctatctgatttgatttgattttgaggaattagggttcgtggtttgatttgattctgtgattcgcttgtgatatgtaaaatattcccggttcctaa

SEQ ID NO: 3150 - DNA, 414 bp, Glycine max
  Clone ID: LIB3028-015-Q1-B1-B7
ggaggaagaagagaggagaaggagaatgaaagatgcgcaagtctttcaaggattcactcaaagctcttgaagctgacatccagtttgccaacacactagcttctgagtatccaagtgctggtgcttgcttccaaatgagattgtcctacagcccagctgctcaattcttcctttttctggttaagtggactgactgtcaccttgctggagctttaggattgctcagaattcttatatacaaggcatatgaagatgggaagacaaccatatccatttatgaaaaaaaagccagtctgaaggaattctatggtgtggtgtttccctctttattgcaacttcacagaggaatcactgatgttgatgaccggaaacaagaacatctatgtgctactaagtataagcattaagattgac

SEQ ID NO: 3151 - DNA, 412 bp, Glycine max
  Clone ID: LIB3028-015-Q1-B1-B8
gtgagggccttccatggcttccgcttgtgcttcctctgcaattacagctgttgccatctctacgccgagttccgggcagaagaatggatcaggaggttgttttcttagtggaaggaaattgagggtgaaaaaggagagagcagcaattggaggacgatcgatgggcactacagtgtgcgcagttgctgagcctgacagacctctatggttcccaggcagcacccctcctccatggcttgatggcactctacctggagacttcggctttgaccctcttggtcttggatctgacccggagagtctgagatggaatgttcatgcagagctagtgcactgcagatgggcaatgttgggtgctgctggcattttcattccagaattcctaacaaagattggtgtcttgaacactcct

SEQ ID NO: 3152 - DNA, 340 bp, Glycine max
  Clone ID: LIB3028-015-Q1-B1-B9
aatgtagcctactcagaagggccctcacagatgaacgaggatctaaaaggtataaacaacggattccttatccttcctagttttgaacattttgccgccgtgagagcatgaggcagattacctttgtaaattgagatttttggtcattttatgcaaaccgtgagttatggcgtcgaagttttgtgactggaaggcaaaagccttctgatgaggaaggaatcaagggccctaagctgatcaatatttacgtcattgctgattgcgtagaaagatgctaatcctcactttgtataattgtctgtgtatatgtaatccttgcactaagattttgcatgcaatt

SEQ ID NO: 3153 - DNA, 398 bp, Glycine max
  Clone ID: LIB3028-015-Q1-B1-C1
gtcttctgcttggtcaaagcccggcgcgtgggccctagattccgaggaacacgaagccgagctccttcaacagaacaacaacaaccccaacgacaagccactcgccgacttcccctcccttgccgccgccgccgccaccaagcccaagaagaagaaggcccagacctactccctcgccgaattcaccgccaagcccgactccgccttcgccgaccaagatcccgtcgtcctccccaccggcccccgccagcgcaccgccgaggagctcgaccgcacccgtctcggtggcggcttccgcaactatggcgaccgccccaacaggaataactcctccggcggcgacgagtcttccaattcccgctggggttcatctagggtttctgacgagcccaggagaa

SEQ ID NO: 3154 - DNA, 385 bp, Glycine max
  Clone ID: LIB3028-015-Q1-B1-C10
ggagaagatccagcacagtgaggtggaagtgaagggactgaagcttcacgtggcagagattggaagtggctccaaaacagtggtattcttgcatggattcccagagatctggtacacatggaggcaccaaatgatttctgtggcaaacgctggttatagggctattgcctttgatttcagaggctatggactttctcagcaaccagcagagcctgaaaaggaaaccatgtttgatctggttcatgaaattgtaggccttttggatgctttgaacatctccaaggccttccttgttggaaaggattttggtgccattccaggacatcttactactgcagtgcacccagaaagagtagctggtatcataactttaggcattcctttc

SEQ ID NO: 3155 - DNA, 259 bp, Glycine max
  Clone ID: LIB3028-015-Q1-B1-C11
ggcaaaagaagcatgtcaagattcttaccttggcagggcacattgcataaatgagaaaaagggctgtccttgagttttgttatgaattcaaatgtcacatctaccatttttatatttggatattttgatgtgatgtgcaagtttgagttctttatcaatttatgaggagtaaaacaggtgtagaaggcttctacttaaataactagtatatgatttggtttcttgcctaaaaaataggaaaaaaaaaaatataagacat

SEQ ID NO: 3156 - DNA, 298 bp, Glycine max
  Clone ID: LIB3028-015-Q1-B1-C3
caatttctctctcgtctgctcacactctctcacttgggggttgaagatgagaatttgtggagcaccaatcatcagcagctacaccaccacgtccaactcgcttttagtgtttgcttcctcttcactctctaatcctgccaaacccaagttcctgccctcactttctggattttctgtgaaacgtctctgcttcctttcccaaactcgtccgcacatttccgtgaagaagccctccatgaacctgttgaacacactccggttttgcaacgcaagaacaccagacaagatggattcaacc

SEQ ID NO: 3157 - DNA, 296 bp, Glycine max
  Clone ID: LIB3028-015-Q1-B1-C4
ggatacggagacatactgacagtgacttggattgcatcgctctctgtgtgttggaataggggaatcgtcaatatgagctccttcattcgttctaatacgcttgtgatgtgagctacttcgccgaacccaaacatggggattgtgggaagcgtttccacattggctacgcacccttttttttcacgcatgaaattgacttatccctcagaagacttcagtatgctgggaatacatgacttggtaatgtagttgctactggtggatatcatgaggacatgattccatctgttggattc

SEQ ID NO: 3158 - DNA, 357 bp, Glycine max
  Clone ID: LIB3028-015-Q1-B1-C5
gtcaaagcacttcgcgaagcgtgacaagcagtcaataaagaacctggcgtcgtcgccgaagctctaggaggctggcaacgccccctcactggccattaaagccagcgtggataagaccaatatgaggttcgacagttatgcgaagcaggggttgctgtgcagcggtgcatggttgccgcacctgatcgtgaacggataccagacgcactcaggtgagttcatcacacccggtatactaatcctgtacatctccggatggatctgcagggttggtcggacccacttgattgctatcagggaccataagaatcacaccatgaatgagatcatcatcgatgttcctctggcttctcgctt

SEQ ID NO: 3159 - DNA, 404 bp, Glycine max
  Clone ID: LIB3028-015-Q1-B1-C6
cttcgtcctctcgctcgctcttctcactcgtcatcttcgaattcgtctgcgctctaagaaaattcatttcacttccaactcctctgatcaggatcctaggctcgttcttgaatccctaattcgatgtcctcctcctcctccgaacaatagtaggaggatcgatgtgagcagcatcttgcctggagtcttactgcgcagcctgcgcattcgagtcatgtaagaccgtcgtttcgggaatcagccgtcgttccgcgaggattgcgtactgcggcttcgtcgccttcgaccttgacgacgcatgaatcgtccgcgaggtcgccgctcatcacaaggaatcacttccctggatcactcatgttattcacacgtttaacctagaatggttttacacagatgcaattctg

SEQ ID NO: 3160 - DNA, 420 bp, Glycine max
  Clone ID: LIB3028-015-Q1-B1-C7
aagtgatcatgaagatggtataaaggattctgaactaacggacaagataaaatcctcagagatgattgatgctttggaggaggcgcgaatggctatagagcatacagtgattctaaagggagaacctgtggatctactcccaagatcatcacacataatatctctgcagctggaacttgttcgcaaataccaactagaaacaaggagaatcagtggagattcaggtgtacatttgcgcatacttccatcccattatgaaacggatgaagtaaaaactagtgaaacttctgagtttgatagtgaattattagatgactttgcctccaatggcagtgtgaatggctcattcaacagcttggatagattgcccctgctacccgagtaataactacgttcacttaattgtatactcataatgga

SEQ ID NO: 3161 - DNA, 404 bp, Glycine max
  Clone ID: LIB3028-015-Q1-B1-C8
gttggtgcaatagcacctgaaattcgaggcaaggctggtctgatccctcaggacacagcactcccatggttcataacgggtgtgttcccacctgcaggaacctacaactactgggcagactcctacacactgttcgtgtttgagatggcactgatgggatttgcagagcacagaacattccaacactgggccacaccaggctctatgggccaacaatacttcctatgactagagaagggtcttggaagttctggtgagccagcttatccaggaggacctttcttcatcccactatgctttggtaaggatgagaagtccttgaacgatttgaagctcaaggaactgaataatggactgttggctatgttggcaatcttgggtgactttgttcaagctcttgtcac

SEQ ID NO: 3162 - DNA, 327 bp, Glycine max
  Clone ID: LIB3028-015-Q1-B1-C9
gtgtgtacaccacaagtgccatctctacgcagcgctcgcataattgttgttgatacagaatttgtatcattgataattcgagtgttcgcctcttcaagaacttaggtaactgtacatcatcatacatctgtacgttgttatgatggtctcctaggtgaattctgatcacacaacatactaagactggcacaccatagtcgctacgctcacacacctggtcctacgactatatattagtcctacaggttcttgttagccatgttacctacttacgacatttcatcaacacacttcgacaagagtaggatcaaacgtgcttaaaggact

SEQ ID NO: 3163 - DNA, 342 bp, Glycine max
  unsure at all n locations
  Clone ID: LIB3028-015-Q1-B1-D1
gaaaagttagggttcacaacttttccttttccttttgcttgcgaatctgaatcaaataatcaatcatccattcattattcatcatgtcgtcggcgaagaaaatcacgctgaagagttcggacggcgaggctttcgaggtggaggaggcggtggcgctggagtcgcagacgataaagcacatgatcgaggacgactgcgccgacagcggcatccctctgccgaacgtgacgagcaagatcctggcgaaggttatcgagtactgcaagaagcacgtcgaggccgcgaatcncgaagacaaaccctccgaggacgatctcaaggcctgggacgctgaattcgtca

SEQ ID NO: 3164 - DNA, 391 bp, Glycine max
  Clone ID: LIB3028-015-Q1-B1-D10
tatagcttcatcccaaaaagctcttttccttctaaatttgattccttagttcagcattctattattatatatggcttcttcaccttcctcagaaaacaaaaacctagagggagtagctggtggtgccggagagaaacccattccacttggtgagaacgttctgcagaagcatgctgcattctttgacttgaataaagatggtgtcatctacccatgggagacttttaaagggttgcgtgaaatcgggactggggttttgctgtccgttggaggtgctattttcatcaatgtgtttctcagtcagaggaaagtttccatctatactttttccaattgaaattaaaaatatccaacgcggcaaacacggcagtgacactggagtctacgatac

SEQ ID NO: 3165 - DNA, 384 bp, Glycine max
  Clone ID: LIB3028-015-Q1-B1-D11
caaaaacaaaaggttgaagaatttgacagagtgagagtgtaaggtagagtcagtcagagatatagaaatggcttcgtggtgcagtgttcgaagcttccaggttccggcgatggaaggcagcgcactgcgcaaccgtgcttcattggccgccagagtggggtgtttgtccgtggccggcacctccttctggcgttcctcatcgtcaccgaagcactctttgtcattcacatgcgtgagcatttcttccgaaactcgtattaaggaaaatgttcagacagaaggggcacctgcggctctgggatcatattctcaagcaatcaaatccaacaaccttctttttgtgtctggtgttcttgggcttgttcccgaaatcgggaagttcgt

SEQ ID NO: 3166 - DNA, 407 bp, Glycine max
  Clone ID: LIB3028-015-Q1-B1-B6
aaagaaaaaaaatgggttcttctctgtggacctgtctgattttgttatcacttgcttctgcttccttcgccgccaacccaagagcaccaattgatgtgccatttggcagaaactatgtgcctacctgggcctttgatcacatcaaatacctcaatggtggttctgagattcagcttcatcttgataaatacacaggtactggcttccaatcaaaagggtcctacgtgtttggtcacttcagcatgtacatagaattggttgctggtgattcagctggcacagtcactgctttctatttatcatccacaaactcagaacatgatgaaatagactttgagttcttgggaaacagaagcgggcaaccttatattttgcaaacaaatgtgttcaccggtggcaagggtgac

SEQ ID NO: 3167 - DNA, 309 bp, Glycine max
  unsure at all n locations
  Clone ID: LIB3028-015-Q1-B1-A1
gtaatttcagccgagaaggctcaccatgagcagctatcagttggtgaaatcaccaacagtgcattcgagccatcatctatgatggccaagtgtgatccccgccatggcaaatacatggcgtgctgtctcatgtacagaggtgacgtagtgcctaaagatgttaatgcagctgttggaattatcaagaccaagcgcactattcaatttgttgactggtgccccaccgggttcaagtgtggaatcaattaccagcctccgactgttgtccaggtggtgatcntgccaaggttcagagggccgtgtgcatga

SEQ ID NO: 3168 - DNA, 369 bp, Glycine max
  Clone ID: LIB3028-015-Q1-B1-A10
tgacgctggaagcgtgcacgcacgctgcgcacaatgagaagcttccgctgcgcacggtggttcaggttcagtgcttcgagcagcttcagctacgacacgccatcgccggaacgctgatggcggctgacgcagccgcagaacctgcgcggcagtctgcggcactggaacgggaaacggagggcggccgacgagaaggattagggttatgacttacagcacgtgtaggaatagaacggcatgtggaacgtgccagtaagggagaatcacgtactgcccttggagattgatcgcatgatgacgcgagtacatctcatggaacacgaatgttcatctatggttagattcatcggcaagtttgataagtccgac

SEQ ID NO: 3169 - DNA, 370 bp, Glycine max
  Clone ID: LIB3028-015-Q1-B1-A11
gcgaacaaagagtctaaacgaacacagaacgcgttgtgaagaatcgccgaagagggacaagtcatctgtgtccacagccgtacacgactggaaggaacatctcacgaagggagaagagtccacgacattgactgtggtggattttactgcgtcttggtgcggtccatgccgtttcactgccccaattcgtgcagagtgtgcaaggtagttgccaaatgtcatcttcgacaaggtcgatgtgtgatgaattggagactgtgtacaacgagtgcggaactgaggctatgccaaccttcctgttcgtgtacaacggcaagctggtgaataatgttctaggtgccaagtcagaggagcttcaattgactctaac

SEQ ID NO: 3170 - DNA, 372 bp, Glycine max
  Clone ID: LIB3028-015-Q1-B1-A12
agaaatttaaattcggaactaaaaaataatgcgttgttctgcattgtgtgcaatggatagttgtatcagttctacatcttgcaggagtggggcgaatagctgaagctgggacatgcatccaagcaatttagtgtcgttgactttaatgattcatgtcgcgggctataccgtctcattgctgtatgctcgagcactaattcgctaaaaagtagccgaatgtcaccatcttcaaagtgcaagtttgtgacattaagacagttcccatagagtgcggaattgagtggcttcttgtctgattgtccttgaaacatggcaagcaggtaaacattgttataagtaccgtgtgagatgaacatctattgacagttaccc

SEQ ID NO: 3171 - DNA, 211 bp, Glycine max
  Clone ID: LIB3028-015-Q1-B1-A2
ctacaagttcattggttctgcttttataatacaccaaagaaaaattttctatattgggttgtttcaataaccgtgtgtggaatatttagatgttttagcatgctctgtgagcaattgattcttcctcaacccctctccccttatttttcccaactcctgttttccctaatgaatgttgtatctttgcggctttgccgcaatccttattgat

SEQ ID NO: 3172 - DNA, 410 bp, Glycine max
  Clone ID: LIB3028-015-Q1-B1-A4
gattgattactatgtttataggtatatattataacttatgttggatttataatccttagaatagctgctgtcccaatatttgctatagtgcttttgggactagcttctctgctgctatccaagattgataactgtggtaatagaaaagggaatttgcattatttcacctacaggtgcataatcagccaactgatatgacattttctgtggaatggacagaatcattattatcatggtgatgttaatcagtagatcattttccatgtggcttccagatgttaatctcttaatagaatttttcattgcctagtattgagaataaaacagagtagagatttaaggttctgtatgcaatacaatgaattgtttattagcattgtctatttcttgatgccgatggttgtcattcc

SEQ ID NO: 3173 - DNA, 361 bp, Glycine max
  Clone ID: LIB3028-015-Q1-B1-A5
ggtgttttggctttgtcaattttgaaaacccatatgatgctgccaaagctgttgaaggacttaatgggaagaaagttgatgataaggagtggtatgttggaaaagcccagaagaaatctgagcgtgaacaagaactgaaaggacggtttgatgcacagtataaaggaatctgctgacaaatatcaaggtgtgaacctgtatctcaagaacttggatgatactatcagtgatgacaaacttaaggaaatgtttgctgaatatggtacaataacttcatgcaacgttatgcgaaaacccactggaatcggtagaagattaagatttgttgcagtttcaaatcctgaagaagcatctcgttctc

SEQ ID NO: 3174 - DNA, 405 bp, Glycine max
  Clone ID: LIB3028-015-Q1-B1-A6
ctcgagccgaatcggctcgaggacaagcctctaaggcttccattgcaggatgtctacaacattggtggtattggtactgtgccagtgggacgtgtatagactggggttgtgaagcctggtatggtggtgacttttggtcccactgggctgacaactgaggttaagtctgttgagatgcaccatgaggctctcacagaggctcttccaggtgacaatgttggatttaatgtgaagaatgttgcagtcaaggatctcaagcgtggttttgttgcatccaactccaatgacgaccctgccaaggaagctgccaacttcacatcccaagtcattatcatgaaccatcctggccagattggtaatggatacgcaccagtccttgactgccacacttctcacattgctgtg

SEQ ID NO: 3175 - DNA, 350 bp, Glycine max
  Clone ID: LIB3028-015-Q1-B1-A7
gcgttccgcggaacagacaaagagaaagtaccaatttctttagatagtcatggcttccaccttcgacgccttcaccgtctacgacgaccacttcgccgcccccgccgccgccgacaccttcactggctaccccgacgtctcctccgtcccctccgacgacgtccccgtcgattacaccgacaccgcggcgtcgccggagatcctcggattcagcgatcccggtccagtttactcccagtctcccttcgagcaatgtgcaccataatgggaatggaaatggaaccgaagacggctactgcgacggcgttttcgtcttcaacggaccggtgcttccgccgccgggagaaatg

SEQ ID NO: 3176 - DNA, 371 bp, Glycine max
  Clone ID: LIB3028-015-Q1-B1-A9
atgaagtaccacgtactatgcctggttatttcagttgagatgcttcttctagcatgaatattcaggatcacggtaaatactacactgaatcatcctttaccattgatcaaatatctgcctggaatgcacatgcagaatcagattccgtctgtctacaatcacaccacatacttattaggcaagatcagggctaaagaaacataattgagtacatgaactgtacattgatgtctacatgtagaactcgggagcatgtctagagggcagagttgctggcttgcctagtcggaaagttcacggcagagatttcactaatgaagcatggggatatcatgttgggttgctaggagaaatattgcaaatctacacag

SEQ ID NO: 3177 - DNA, 279 bp, Glycine max
  Clone ID: LIB3028-015-Q1-B1-B1
gaagaataatcgagacacagatcatagtgatcattttttaatttctcagatttatccgacgtcgctgcagatccaccaaccgttatggctgccttcagcggtgatgaaacggcaccgtttttcggcttccttggcgccgcagctgccctcgtcttctcctgtatgggagctgcctatggcacagcgaagagtggcgtgggcgtggcttccatgggtgtaatgagacctgagctggtgatgaagtcgattgttcctgttgtcatggctggagttttgggc

SEQ ID NO: 3178 - DNA, 354 bp, Glycine max
  Clone ID: LIB3028-015-Q1-B1-B10
taagattaatggacaagagtgttcgacggaccttgagaagatcaagcaagtggggttgtatgatcccatatccttcactctatcagacatatgccgtcggtactatcataaggaaacaggtcttgatgtagtcatgattatggccattacatcatagcgctcactgcttccttcaagattcagtgcatgcatggctgtggctgtcagagtacgaaggagtcgcagacagaccgatgatgacttctttattgcaaccgcacacctcaaagacgaaccaatggcacatattgtagcactttatatctagatgtcatcatgacagtactagtgtgtagacactaatcctcatatcag

SEQ ID NO: 3179 - DNA, 378 bp, Glycine max
  Clone ID: LIB3028-015-Q1-B1-B11
gaattttatagagagagagagtttttagagagagaaaggatgaagatcacggcattgttggtgcttaaatgcacaggtgagggttccgatcccgttattctggcgaacgcttccgacgtcagccacttcggttacttccagcgttccagcgtcaaggagttcatcgtcttcgtcggtcgcaccgtcgcccgtcgcacccctcatggccaacgccaatccgtacaacacgaagagtacaaagtgcacacatacaacagaaatggtctttgcgcgttgggatttatggatgatcattacccgattcggagtgcgttttctcttctcaaccaggtaatagatgaatatcaaaaaaactttggcgagtcatggagaaatgct

SEQ ID NO: 3180 - DNA, 376 bp, Glycine max
  Clone ID: LIB3028-015-Q1-B1-B12
gaattttatagagagagagagtttttagagagagaaaggatgaagatcacggcattgttggtgcttaaatgcacaggtgagggttccgatcccgttattctggcgaacgcttccgacgtcagccacttcggttacttccagcgttccagcgtcaaggagttcatcgtcttcgtcggtcgcaccgtcgcccgtcgcacccctcatggccaacgccaatccgtacaacacgaagagtacaaggtgcacacatacaacagaaatggtctttgcgcgttgggatttatggatgatcattacccgattcggagtgcgttttctcttctcaaccaggtaatagatgaatatcaaaaaaactttggcgagtcatggagaaatg

SEQ ID NO: 3181 - DNA, 409 bp, Glycine max
  Clone ID: LIB3028-015-Q1-B1-B2
atgatatctcaccctagatgtctggttcaccagtaagattgcaggtaagctatggattccatattttgaatataagctgggcaaagcagaagattgctcaagtgctacatgttgtacttgaggaaacatggaactaagaatctcaactcccttgtagaattttatgagagaaacacaggattagaagccaaggacaatgctgttgttggtcaaccgagcaactttttgagtgatgaacattcaactatgaagggcttctccctcaaagaaatatttaacagggaaccttacttggcattatctatattgtttctctgtttaaggattattctctttgtatttcccacgattatgccacgcctcaaagcattctggacttcctatgcttctcatttgaacttgcaaatat

SEQ ID NO: 3182 - DNA, 392 bp, Glycine max
  Clone ID: LIB3028-015-Q1-B1-B3
gcccctcctcttcttctaagatctgaaactacttgttttaactttttctattcaacgactccgttccgttctctttcttcctcttcgaaaccctaataagcttctgcacttccttctgattccacttttgcttcaactgggaagatactgtagggcctgggccacctaatgatgagatatccaatttctacataagttgccattgatacttttttaatcaaatggattcagtgcctgctgatgtgtctaattcacatactattaatgacccgtcgaagtcacctccggctaaagagactgacagacaagcttctgcttctgtagcctccgggcaagataattctccacatgaggcatcacctaggctatctcccacgggcatatcatcctgg

SEQ ID NO: 3183 - DNA, 389 bp, Glycine max
  Clone ID: LIB3028-014-Q1-B1-H9
aaacgaagaagcgaaatctcctagaaagcgagtttctctcttctctctctcaattttcacatagtcagcgaaaacaaacaagactattggaacacgaaacacaaacatcataacataagcagcagcagcagcaccacccaccttgttcagtgttttgaattcaactgagaaaaacgacaaacgaggatgtttcaagagagcagcgcgacacggtggccgactcagccgactcagtggactcgctaccacgacaagctcttcgaacgggctctgctggtcgtgccggaggacctgccggaccggtgggagaagatcgccgaccaggttcccggcaagtcggcggtggaggtcagggaacactacgacgccctcgttcacgacgtcttcga

SEQ ID NO: 3184 - DNA, 361 bp, Glycine max
  Clone ID: LIB3028-014-Q1-B1-F4
taactcaggattccggtccaaaaaataatttccattaattgaccgaaaacaaaagttttccccaaaggctttctccaaaatggtccaatgcatgagaataatttaatcaacgtttcagaacactataaaattattctcatgaaagtgacacacaagtgttgcctaataccttaagttaccttcctgtgtaaattaatgcaactaaaactgttaatactgttggtttgtgctttgttgaagaacagctctaatgtttcttgtgaaagatcaatctttcgttaaatcatttgcaactggcagtgtatatgttctgaaattggtaagtattttcattaataaaattgttggaattttattaaaa

SEQ ID NO: 3185 - DNA, 382 bp, Glycine max
  Clone ID: LIB3028-014-Q1-B1-F5
gtaagctagctttggcatctttttcccctttttcctccaagcctataactatattcaacccaatctgcactggaccaagtgtaaaaagacattttcctgatcttctgctgtgccaagaaagcagtaatctccatgagcttctattgaattgatactttgatcaagatggatgggaaaaactctcttcaaataactagaagtggtattggtgcttatgatgatgatggacatgccaaaaggactgggaatttgcagagtgctgtagctcatatcattactgctgttattggttctggtgttctttctcttgcatggagcacttcccaattaggatggattggagggccattttccttgctttgttgtgcaattgtcacctata

SEQ ID NO: 3186 - DNA, 375 bp, Glycine max
  Clone ID: LIB3028-014-Q1-B1-F6
catttgggtgggtaattcagagacacagtgcccgggtcaatgcgcgtggccgttccaccaacccatttacggtccccagaatccacctttggttgcacccaacaacgatgtgggacttgacggcatgctgatcaatgtggctagtctccttgctggcactgtcactaacccttttggaaatggttactttcaaggacccaaagaggctccgttggaagcaggttcggcttgcactggggtgtatggtaagggcgcgtaccctggctatgcagggaacctcttgcttgaccccaccactggtgccagctacaacgctaatggagtcaacggaaggaagtatctgttgccagctcttgttgaccctgaaacctcagc

SEQ ID NO: 3187 - DNA, 162 bp, Glycine max
  Clone ID: LIB3028-014-Q1-B1-F7
catttgggtgggtaattcagatacacagtgcccgggtcaatgcgcgtggccgttccacgagcccatttacggtccccagaagcgagcggtggttgcagccagcacctatgtgggacgtgacggcatgccgatcagtgtggctagtctccttgccggcactgt

SEQ ID NO: 3188 - DNA, 352 bp, Glycine max
  Clone ID: LIB3028-014-Q1-B1-F8
gttaacactaaggacactgacaaggttctgaacgggatgccaagctacgctcctccattgccttcttcttccaattccatggccatggaagcaactaatgctcatccttcccgtatttctgaatttggaaccctggagcaatctcttggatttcgtgttgaagataccattaatcttagcagaaatccgatgtttaaatcaaatgaaatcaaataaccaacctcaggtgctgataattcaatttggtgcttttaaataagtcaattgcaaaatcggatataaacctctctgctgcaattgctgcatctcaggcactggtattccaaaaagattcgcaaccaattctggcttc

SEQ ID NO: 3189 - DNA, 265 bp, Glycine max
  Clone ID: LIB3028-014-Q1-B1-G10
tttgccttctgctctccctgcccccgcggttccccgtcttggtgtgtcgctctccgcggagctgtgtttgccttgccctcgtcttgttcggtgggtccgtttttggcgactcccgtgactcgccgggtgctctccccggcgcgtcgcttgctcggtgtgggctctctggggctgatttcatcgctgaccattccccgccgctattgcgattctcaatcgcatgtcctccactttcttgctcgtcccttgcccctcccgtgacttg

SEQ ID NO: 3190 - DNA, 295 bp, Glycine max
  Clone ID: LIB3028-014-Q1-B1-G12
gccggtgcttatcttagctattctagcttctgttgtgggaagccaagcaatcatcagtggaacattttctatcataaaccagagccaatctctgggttgcttcccaagagttaaggttgttcatacatctgacaagatacatggtcaggtctacatccctgaaattaactggttacccacgatcctctgcattgctgtgaccattggatttagggacacaaaacacatgggaaatgcttcagggttagcagtgatgaccgtgatgctggtgacaacattctttacttccttagta

SEQ ID NO: 3191 - DNA, 384 bp, Glycine max
  Clone ID: LIB3028-014-Q1-B1-G2
gaatccggtccaatcccccccaacctttcccaatcccaaaaaccctttgaatttttaaaaggaaaccaacatggttattaaggccaacaacccaaaatccatggcaaaggttctggtcaacccaaccccttcctggccttcaccggtattaaaagttatatggagcctaccgccacccacctatgtaccaaagacccccttttggaaattacccaaaggcggcattgcatttcccggtaatgcccaaattcaaagctaccatggatttgtccgcaactgcaaaatctgccacaccgtctttgttgctgctccagcagaaaaaggccattttcttttaaactttctcatgggaagtgtttcagcagctgtctccaaaactgctgc

SEQ ID NO: 3192 - DNA, 392 bp, Glycine max
  Clone ID: LIB3028-014-Q1-B1-G3
gaattcggtccaagcaacctcaaaccttcggtttcccaacaacaattcacatccttcaaaatctcaaactctccatggctcccagcacagaacataacccttctctctccaaacaaaaacttcactgcacgcttctttcccctgccaaactcttcaaatgtcttcactttctccatttggtactccaaagtgcctccaagtgcaaacccttttgtttggaatgccacagtccaagtcacaatcattgccagaatgcaccacctcaacttggtgaggctgtggggattctgtgctgagaaaggccaaaggatacttgtctatgaacacatccctggtggatcattggacaagtacctcttcagggtcaataagtctcataacaataaccatct

SEQ ID NO: 3193 - DNA, 372 bp, Glycine max
  Clone ID: LIB3028-014-Q1-B1-G6
ttcattttaacgtcagcattccaaacaatctgacagagagacagcgggaattgattgaagagtttgccaaggaagagcaaggagattttgataaacagagagttgcatctgcttctggttgaaaacattgcaagagttattatcaaaatcatatgctcaactaggcggttgttgaagttttgtaggattaaggattggtaattcttttcttaattccttccactttttccagtgtatgtaatatttatttctcgtcccaagggatgatcacaattcaaaatttttttgttagaacttagaaggcaatcccctcatgctcctctaggctagaattctagtcagtgctgtatatagtttccttataacataaga

SEQ ID NO: 3194 - DNA, 186 bp, Glycine max
  Clone ID: LIB3028-014-Q1-B1-G7
ttcatttcaacatcaccattcgacacagtctgacagacacatcgagggaattgattgatcagtatgcctacgaacagcaatgagatcttgacagacagagagttcctactgcttctggttgtaatcattgcaagagttattatcggtctcatattctcaactacgcagttgtcgacgttttgtacg

SEQ ID NO: 3195 - DNA, 387 bp, Glycine max
  Clone ID: LIB3028-014-Q1-B1-G9
ggatgcagagccatggttcagcaagccgttcagggtgctcctgctgcgtatgccaaagaaatggaacgactttccgccaaagaatcgcttcttctcgcttttaaagatgcagggggtttcgaggccttggtctctgggaagactactgaatggcaaaagattgatgtgaatgaaaggataactggtcttgagcggctcaatccaacacctcgccccacaacgtcacccttcttggaggggcgatggaactttgagtggtttggttctggaagtccaggcttgtttgctgctaggtttatatttgaaatctttccttcaactttggctaatttgtcaaaaatggattttgttattaaggatggaaatgcgaagattactgcgaacatg

SEQ ID NO: 3196 - DNA, 105 bp, Glycine max
  Clone ID: LIB3028-014-Q1-B1-H10
attcggctcgtgcttctatctggcggcgtctcctctttcgctagtttctctcttctctctctcttttttctcttgttgtgcgcgctctttcctgtttttggttgt

SEQ ID NO: 3197 - DNA, 386 bp, Glycine max
  Clone ID: LIB3028-014-Q1-B1-H12
attctcccatttcctctcagaaccctcgatcactcccacgcgctcctatatcctctccttcaccgtcgctctctccaacgatcacaacaacatcgtcatcccatggcaaacgccgcatctggtatggcagtccatgatgactgcaagttaaggtttttggagctgaagacaaagaggacacaccgtttcatagtttttaagattgaggagcagcagaagcaggtcattgtggagaagcttggtgagccagcccaaggctatgaagatttcactgccagccttcctgctgatgagtgccgttatgctgtttatgattttgagtatctgactgaagggaatgtccctaaaagcagaatttttttcattgcatggtcccctgacacatc

SEQ ID NO: 3198 - DNA, 292 bp, Glycine max
  Clone ID: LIB3028-014-Q1-B1-H2
ctcgagccgattcggctcgagttggcatcttgtgttgtgtccctcttttaagctatttccttctcttaacacaattggttgtgccaattgccatagtcaccaaccaattaacaaaggtatatatatcatcatatcatcaccaaatgaaaaatattgggttgttttttcttgtggtggtggctacttttgtggtggcagccacagctggtagcttttaccaagactttgaaataacgtggggtggtgagcgtgccaaaatctatgagaatggaaaccttctcacactctccct

SEQ ID NO: 3199 - DNA, 205 bp, Glycine max
  unsure at all n locations
  Clone ID: LIB3028-014-Q1-B1-H3
aaatattacttgcttgcaaaaatatatttgctttaataaagattgatgaacaactgatgtggcatgtgatgtatcttagtgagcaaataagacaaatgacaattaaatgctcacatgaaagttgcaattgtattagatttattgggaaattttactttgggagtaaatagtataaatcgcaaaacnggatgtatagctgcatatt

SEQ ID NO: 3200 - DNA, 389 bp, Glycine max
  Clone ID: LIB3028-014-Q1-B1-H5
ctctgagagagatgtgtggaggcgctatcatctctgacttcattctcctttttgagacttctaatatcctcagggttttttgggagaattggctaaaaaatggttatatgatccgtgtttgtgctatgatgttatttttattttttctttgtttaatggttctgaatgtctctgttcttactgcgatttttacacttttccaattatattaaagggtctaccacagcgaaatctgtggcattccaagttcgagctgagaaatttgcaaataggaagaggaaaaatcagtatatgggaatccgtcaacgcccttggggaaaatgggcagctgagattcgggatcctagaaagggggttcgtgtctggcttggaaacctcaacactgctga

SEQ ID NO: 3201 - DNA, 354 bp, Glycine max
  Clone ID: LIB3028-014-Q1-B1-H7
gtagtttcgttttcatcatccattgaagagaagctgaatgcatttagagaaccatgtctgcaactagcacatcgactactttgtcaccgtcattctcttgcagtaaaacatcagcactctctctgccgtcgaaatacagattctggaatttggttccaatgacacaagcttcatctccggagcacttggccttagcctgacacgatccatgtagaggacttgacgtgtcctgtggcccaacagcaccacatgcttcacaaacatcatcaattcaggggggtgaatctatgttcaggggtgtgttggaaagtatgcaatccgtttacttgcacagaaatcgtactgccaaggcca

SEQ ID NO: 3202 - DNA, 372 bp, Glycine max
  Clone ID: LIB3028-014-Q1-B1-F3
cactcggttgcagaacagaacaaacttctttcactctttcgcttctgaatcttcaacaatggtgctcgaggcgacgatgatctgtatcgacaattctgaatggatgcgtaacggagattactctccttctcgatttcaagctcaagcagacgctgtcaatctcatatgcggtgctaaaacgcagtctaatccggaaaatacagtgggagttctcacaatggctgggaaaggcgttcgtgttttggttacccctaccagtgatctgggcaagatcttagcctgcatgcatggactagatataggtggtgagatgaacctagctgctggcattcaggtggcacaattggctcttaagcatcggcaaaataaaaa

SEQ ID NO: 3203 - DNA, 269 bp, Glycine max
  Clone ID: LIB3028-014-Q1-B1-H8
cttgtttgaagcttcaaacaagatcaaggttttgatggccacaaatcggattgatatcctggatcaagccctccttagacctggacggattgaccggaagattgaatttccaaaccctaatgaagagtctcggctggatattttgaaaatccattcaagaagaatgaatttaatgcgtggcattgatctgaagaagattgccgagaagatgaatggagcatctggtgctgaacttaaggctgtttgcaccgaagctggaatgtttgcat

SEQ ID NO: 3204 - DNA, 324 bp, Glycine max
  Clone ID: LIB3028-014-Q1-B1-D5
gcctacaggacgtgcaccagcgcaccgccgagctcaagaactggttgggagccgttgttgcctaccagcaatcgtgcctggacggcttcgacaccgacggcgagaagaaggtgcaggagcagctgcaatctgggagcctggacaacgttggaaaactcactggcttggcactcgatgtcgtgtcagggaatttcacacattctccaatccttggacttgaaccttgctctcaagcccgcctctcgccgccttctggaggtggaccaggaaggctaccccacttgggtctccgctgctgatctcaggctcttggctcagctcaac

SEQ ID NO: 3205 - DNA, 399 bp, Glycine max
  Clone ID: LIB3028-014-Q1-B1-D6
gaaagatccttcgtcctcactcatactcaagtgacaatgtaaaaatgaaggcacaaatagatttggaagcccctgctcttcccgagacagaagaggatgctgttcttgaagaaaagctgcttgaaacttctctagcatcactgcaagtcccacaagacacagttgaactagcaaaggatgaacttatgacaaatgcagcagaggcaattgttgtcctgtcatctcttacctgtgatcaaggggatgattgtgtgatcagcaaaagtccatcagaaagtccaaaggtggacctgctaaattggtttgcagatgttgtttcctcatgcaaagataatgtagaaggaaactgtgatgtttcaagggaaaaagatggcgaagacaacgaagggcattcctctg

SEQ ID NO: 3206 - DNA, 182 bp, Glycine max
  Clone ID: LIB3028-014-Q1-B1-D7
cacagtactgtcatatgcgcttcgcttctcgggagcacttatgcctaatcgcacagtcatcctctacactaggatctgcggtcactctgatcgctacaacctcattgagctctagtccgacgtctctccccgcaacgccgagatcttccgcgcgctttgctctggccaaaagggcgtagggc

SEQ ID NO: 3207 - DNA, 267 bp, Glycine max
  Clone ID: LIB3028-014-Q1-B1-D8
ggaagtttgaaattttgcattctgtctggtttgtcaggtgtgtaaagattttttttttctttcttgaatgtgtgtatagatctatactatcagaaagttgataccgcatttgcatttgtgtaataccacatgaaaaattttgatgacctgaacatgtgctgccaaagatagagtacatttacattttagcaggaacaacataatttatatctatataaaaattatctagccgtcaaaaacccgaaacagaccaccagagcggggatc

SEQ ID NO: 3208 - DNA, 384 bp, Glycine max
  Clone ID: LIB3028-014-Q1-B1-D9
agaaattgagggcttatgctgaaagaatcaggcttgctgagcttgagaagtgcttaggtaagatgggtgatgatataccaaagaaaacgcggagagctgtggatgaccttagtcggggtatagtgaataagttgcttcatggtccaatgcaacatttaaggtgtgatgggaacgacagccggactcttagtgagacactggagaacatgaatgctttgaataggatgttcaaccttgagacagaaatatctgttttggaggagaagattcgagcaaaggtcgaacaaaaccagaaatgaaatctaacaccaatcagactgatttattttctcctttagaataagaggaaacatcctcaccttttagtattaatcatcctgcaat

SEQ ID NO: 3209 - DNA, 374 bp, Glycine max
  unsure at all n locations
  Clone ID: LIB3028-014-Q1-B1-E1
cccccaactccaacctctgttcatcgtctaccgcgctttcttttcaaccagaactatgattaagctttttaaagtaaaggaaaagcagagagaacttgcagaaaatgcaagtggcggaccacctgttaagaagcaaagtgctggagagttgcgtcttcacaaagatataagtgagctgaatctaccaaaatcatgtaccatgcaattccccaatggcaaagatgatctgatgaactttgaagtttcaattcgacctgatgatggatattacttaggtggcacatttttgttttcctttcaagtgtctcccatctatccacacgaagcaccaaaggttaagtgtaagacaaaggtctatcatccanatattgact

SEQ ID NO: 3210 - DNA, 277 bp, Glycine max
  Clone ID: LIB3028-014-Q1-B1-E12
aagaatatgaaattggtctcttgtcttcctcctcatctctacagtactccacatagagcccagcctctcaagcccaagcgcaagcccgggcgcaagcccgttcatagaatcctcctgcagcagcagccagtagccagccctctgcgtctcatcgctctgcgtctacgcctccagcatttaagaggagcctcagtaactggttcagacagcagtctccctctccctgaattgcagccaagccacgagagccttcgtggctaagtgctacagattcaga

SEQ ID NO: 3211 - DNA, 400 bp, Glycine max
  Clone ID: LIB3028-014-Q1-B1-E3
gagaagaacagaacaaaatcgcgatgaaccctaattgatttattgattcattttcattcccatggcgtctcgaataggtggagtctcactcccagacagacctagcaacaactcaagctccgtcctcgcgaagatctcgcgctcctccatcgtcactcgcggcaaggaagccgccggcgacgccgcattcgtcgccaagaagctcctccgcagcaccggcaatgccgcgtggatcgccggcaccaccttcctcgtcctcgttgttcctctcatcgtcgagatggaccgcgagcagcagctcaacgacctcgagctccagcaggccagcctcctcggcacccccgcccccaaataaaatttgaggttttctctctgatctgatttaccctgtttggacact

SEQ ID NO: 3212 - DNA, 403 bp, Glycine max
  Clone ID: LIB3028-014-Q1-B1-E5
aggtcgacactagaggatcccctcggggaattccaattccacattttcaagaaataaggaggcaaaaatgttcatatatgaattggaattatttgttttcttattaggcctatcctgaagccaaaggaaatgagatcggaattcctcggggaattccaattccacattttcaagaaataaggaggcaaaaatgttcatatatgaattggaattatttgttttcttattaggcctatcctgaagccaaaggaaatgagatcggaattcctcggggaattccaattccacattttcaagaaataaggaggcaaaaatgttcatatatgaattggaattatttgttttcttattaggcctatcctgaagccaaaggaaatgagatcggaattcgtcgggggtaccg

SEQ ID NO: 3213 - DNA, 340 bp, Glycine max
  Clone ID: LIB3028-014-Q1-B1-E6
gagctttcttcaattggtttaatgccagaagactggggcggtgacatcccaatggttccgataagtgctctcaaaggaaagaacataaattattttttggaaactgttatgcctgttgcccaatttccaaaactgaaagctaatcctgataaaaattccaaaggaaactgtgttgaggcggggctagataaatcaaagggaccattcgcttcatttattgtgcagaatggcaccctcagacggggagatatagtagtttgtggagaagcttttggaaaggtgcgggctttatttgatgatggtggaaagcgggttgatgaagctacaccctctatacctg

SEQ ID NO: 3214 - DNA, 329 bp, Glycine max
  Clone ID: LIB3028-014-Q1-B1-E7
atcactgcgtctgatgagagagagcggaagagataggaaggaagagcacagcagtgatcagctccgtcatacgagggggagaaattttgtaggtcttggagttcgtgtatcgcatgttgccacattgctatcactcaaagcttgtcccgagtgcaatttgaatggatcggtagtcaatgcgtcgcggtctgcatctagaggatgattcccttcaattagattgtggcattggacgcacaggtcgtgacatctactcgattctcaccacacttctgcgtttatggtggactcattagatgcatgagcacttcgtgtatactatggctcac

SEQ ID NO: 3215 - DNA, 398 bp, Glycine max
  Clone ID: LIB3028-014-Q1-B1-F1
ataaaaataaaaacttttctttgtttctcttttctttgtattagccttttgttgtagatggcattggggagaaggagtggactctttgctcttgaaaagcattttgctttctatggagcataccacagcaacaaaattaacatagcaatccacgtgttgtttgtttggccaatttttttctcggcccttcttattctctattttgtccctctccctcccttattcaaccttcaaaacttggagttttccatgtgggagaactatgtgatattggtttggaatgttgggtttttggttgctttgctctactcagttttctatgtttctttggatctgaaagctggctctttggctgctttgctttgtgctctttgttggattggtagtagctttgttgc

SEQ ID NO: 3216 - DNA, 192 bp, Glycine max
  Clone ID: LIB3028-014-Q1-B1-F11
tggttttttttttgttgtttttgttttttgtttttgttgtttttttgtgttttttgttgtttttgttgtttgttttgttttttttgtttttttttttttttttttgggggtgttttttttttgttttgttttgttttttgtgttgtttttgttttttttttttttgttttttttttgtttttttgttttttt

SEQ ID NO: 3217 - DNA, 390 bp, Glycine max
  Clone ID: LIB3028-014-Q1-B1-D4
atcctctctttgcgattgtgttttgatctgcttcctactgcgatagtttctctactgttacatggccatggcggtttccgcaattggttttgaaggtttcgagaaaaggttggaaatatcctttttccagccgggactttttgctgaccctgaaggaaggggtctaagggctcttacaaaatcccagttgggtgagattctaacaccagctgcttgcaccattgtttcttcgctcaaaaacgataatgtcgactcctatgttctatctgagtccagcctctttgtttatgcctacaagatcatcatcaaaacctgtggtactactaagctattgcttgcaatcccacccataattaagttcgctgaaatggcttcccttaaatgttaagt

SEQ ID NO: 3218 - DNA, 397 bp, Glycine max
  Clone ID: LIB3028-014-Q1-B1-F2
gaggtttaactgccaaagtgattgaccgaacatagactatggctgatgtctacggtgctttttttgattttgcttctatgttggagcccaacgttgacaaaaacgatcccaatgcaacacaaacattgagcacgctggaagctatacagaaaacttgcagagaatctggtctcttaagtaaaaggaaatcttacattgtgaatgatgaaagtggatatggctcaaccatgattgtcatattggtcatcatggtttccatcatttttgcttatctgtctgctaaccaccataatagctagttgaaacactgatagcacgcctcgttcatggaatgcgaatttgcatgcatgcaagcaatagtatgatggctgcagttgactatcgtgtattttaaatg

SEQ ID NO: 3219 - DNA, 356 bp, Glycine max
  Clone ID: LIB3028-014-Q1-B1-B7
cgatcatttccagactcaaaccttaagagtctcatgcaccaaactatgcaagcgtctctcatccgaaccggctccgtgccggtccagaacacggttctccccggttcaccgcgagtctcactcacgcgccaagcctccttctccggcgacaagagccacgcgcattcgcccaggttttcaatccattcttcccagtccaacaaccgcagatcctcgtcggagcgcgacgacgagaatttcggcgttcgccgggatctgaaccgaaccggatcgccctcgttttcaccaatcgtagctcacgaagaagacttcctctccgaggccgttccgcgcatgctcggaaaccggccggaaga

SEQ ID NO: 3220 - DNA, 318 bp, Glycine max
  Clone ID: LIB3028-014-Q1-B1-B8
gagcagtggagccctgcgctaactatttcaaaggtgttgctctcgatttgttccctgttgacggaccctaatcctgatgatcctttggtccccgaaatagcccacatgtacaagacagacagaaacacgtacgagtcaactgccagaagctggacccagaaatatgccatgggttaagtgacctgtggtatgtgtgaggaagagcctttctactcgcagtgtttaggcctctcagcccttgtatgaatatttgtcgttcttaagaaggcccctccagttgaagattaatggagcaaaacgtctctcctgtcgtttgta

SEQ ID NO: 3221 - DNA, 362 bp, Glycine max
  Clone ID: LIB3028-014-Q1-B1-C1
ggaaccaaagtcagcttcacctaataagaagacttccaaaccagcaaaaaaagtcaagaaggagagcgaagacttgaacaaggttatgtttggcaagtcacatgagtggaagagtggtcaggaaatggtcaatggaggtgatgatcttaacaagcagttaactgtgtcaaaggctgattggaaaggacaggacttggggttaaaccaagtggcgtatgacgagtcaaccatgccagctcctgtgtgctcttgtactggtgtcctgaggcagtgttacaaatggggtaatgggggttggcagtctgcctgttgcacaactactctgtcaatgtatccacttcctgcagtgcccaacaagagac

SEQ ID NO: 3222 - DNA, 384 bp, Glycine max
  Clone ID: LIB3028-014-Q1-B1-C12
attttcttgccccaatcccaatcccaattccaaaccctaaccaatttccatggcttcctcggagatcgaggtggtttcatcatcatcatcggtctccaaacccaacaacgaccagcctccaatcctcgacgttttcaccgcctctgctcacggcgacttcaacaaattgagaaccttcgtcgaacaagacggtgcctccgtctctcttcccgattttagcggctattacgctcttcagtgggcctcgctcaacaactttcacgacattgcgcactatctcattcagcatggggcggatgtcaatgctaaagacaacatgcaacaaacggcattgcactgggcagcggttcacggttcaactctagctgctgatgtgcttgtgga

SEQ ID NO: 3223 - DNA, 380 bp, Glycine max
  Clone ID: LIB3028-014-Q1-B1-C2
ttcactctcaaactcttccacaagaacatcaccttcctcattggccctgaggtttctgcacacttcttcaaggcctcagagactgatctcagccagcaagaggtgtatcagttcaatgtgccaacttttggacctggggtggtctttgatgttgattactctgtgaggcaagaacagttcaggttcttcactgaggctcttagggccaacaagctcaagggttatgtcaatcagatggttgcagaagctgaggactatttctcaaagtggggaccaagtggtgaggttgatttgaagtatgagcttgagcatctgatcatcttgacagccagtagatgtctcttggggcgtgaagttcgtgacaagctctttgatgatgt

SEQ ID NO: 3224 - DNA, 363 bp, Glycine max
  Clone ID: LIB3028-014-Q1-B1-C5
agcaagagtaattctgtttgacattccagcacctgaggctgatgctgctcttgttagaaggtcaagttcactgttatcacatgccggggatcatcctcatagatctttccgtcgaaaacatagtggtcttatgagttggcctgaacatttctacaaacaagaccataagcagagatctgaaggagctgggcgacaaaccaatagtttatctgcaagggcaatgcagctgagcatttatgggagcatggtggacatccctccccggagtagaagtttgttaaccaatgatggtagaccacctcatagcttgtcctatccaaccattgtgtcacatcaaggtcgtcctcttgtttcagtcaaatc

SEQ ID NO: 3225 - DNA, 378 bp, Glycine max
  Clone ID: LIB3028-014-Q1-B1-C6
agagaatggctcccaagggtttaacctttctggctgtgttaatatgcgtttcagcactgtcactgagtccttctgttgcgggggaagggcaaaataatggccttgttatgaacttctacaaggaatcatgccctcaggctgaagacatcatcacagaacaagtcaagcttctctacaagcgccacaagaacactgctttctcctggctcaggaacatcttccatgactgtgctgttcagagttgtgatgcttcactgttgctggactccacaagaaggagcttgtctgagaaggaaacagatagaagctttgggttgagaaatttcaggtacattgagaccatcaaagaagctttggaaagagaatgccctggagttg

SEQ ID NO: 3226 - DNA, 363 bp, Glycine max
  Clone ID: LIB3028-014-Q1-B1-C7
atttatattgggtgctagtgagtgatggcgatgagggtgtgaattctaaaaggaaagaacagctgagctggtcagaaaatcaatggcatcatccttgggttttgagttcctgacgaagaagccttacagtcctccatcctgggcatcccatctccaccctttaccttcccacttcttctctcttgcccatcttcccactccaattcacagatggaaccttcccaatctgcccaccaataccgagctgtggatcaagcgagacgacctttccggaatgcagctgagtggtaacaaagtgaggaaattggagttcctgatggccgatgccattgcgcaaggcgccgactctatcatcacaatccg

SEQ ID NO: 3227 - DNA, 68 bp, Glycine max
  Clone ID: LIB3028-014-Q1-B1-C8
gtcgactcgctctcagcgggacacctatgctgggtgtgtttgtgtgcctctgatctcggtgtcccctt

SEQ ID NO: 3228 - DNA, 400 bp, Glycine max
  Clone ID: LIB3028-014-Q1-B1-C9
attcggcccaagctcttcttcccttgcggctagggttttagcgcagcttcttctaaatttaaggaagatgggtaaggaaaaggttcacatcagtattgtggttattggccatgttgactctgggaagtccactaccactggccacctgatctacaagcttggaggcattgacaagcgtgttattgagagatttgagaaggaagctgctgagatgaacaagaggtctttcaagtatgcctgggtgcttgataagcttaaggctgagcgtgaaagaggaatcacaattgatattgccttgtggaagtttgaaaccaccaagtactattgcacagtcattgatgcccctggacacagggatttcatcaagaacatgatcactgggacatcccaagctgactgt

SEQ ID NO: 3229 - DNA, 364 bp, Glycine max
  Clone ID: LIB3028-014-Q1-B1-D1
agaaaatgtccaatcatctgacttgaacactggaggttctcatgttcttagtcatgtgtctccaccaaagtcatcaagcttctttgcagactttggaatggatggtggctttccaaagaaatctgggccaagttcctccaaagtgcaagtaagccatatgcttgcaactttggtctctgcaatgttatctcttatgcatccagttagcatacaggattaagttatatataaatatctagtctacattcacttcaacatttttttacatcatacagatccatggaacaaaacatggtcaacattgggagaaagtgttttcaagtgttttgtaaaaaataaatgctagcatacacatagaatgata

SEQ ID NO: 3230 - DNA, 384 bp, Glycine max
  Clone ID: LIB3028-014-Q1-B1-D2
ctcgagccgaatcggctcgagcccaaaccctagttttgtcagtagcacacttcacccatggcagtagcagcagctcgccctatcgtctccgtccaaaccctatagggcgatgcaacccccaccgttcctcttcccgacgtcatgaaagcctccattcggcctgacatcgtcaatttcgtccactccaacatttctcgcggccaccgcatcgagtccgtcccggaactccccctcgtcgtcagcgacaccgtcgaaagcgtcgagaaatccaaagaagccgtcaaaattctccagaaaatcggcgcattcacagacgcggagaaagctaaactcagtcacggaattcgtcccgggaagggaaaaatgaggaatcgcaagtatatc

SEQ ID NO: 3231 - DNA, 376 bp, Glycine max
  Clone ID: LIB3028-014-Q1-B1-D3
gaaaacgaaaaggagaagatgaaatgggatatgcagatggaggaaatcgaagcgattatggagaaaatttgggacctccacgataagctcagcgacgccattcactccgtctccagatcccactttctcacttccgtcaaaaccctcaaactcaacaactctccaccgcaccttcccaacgccgccgtcgccgctgccgatgaccgctcctccggtttcgttttcgtcaaggactttagaccgctcgccgtcgccgataacgacaacgatgacgatgactccgccgtccgcgaagccaagagcctcaacgccatccggaccgccctcgagaacctcgaagaccagctcgagttcttccatactattcaaacccagc

SEQ ID NO: 3232 - DNA, 365 bp, Glycine max
  unsure at all n locations
  Clone ID: LIB3028-014-Q1-B1-B6
cggagagctcccgctgactgcgatcggatttcatggctcctaagaaagacaaggctcccccaccttcatccaagcccgccaagtctggtggtgggaagcagaagaagaagaagtggagcaagggaaagcaaaaggagaaggtgaataaccaggtgctgttcgatcaggctacctatgacaagctcctctccgaggcacccaaatacaaactcattactccttccattctctctgaccgtttgaggattaatggatcacttgcaaggaaggctattanggaattgatggccagaggttcaataaggatggtgtctgcccatgctagtcagcagatttacactagagcgacaaacacctagatgtac

SEQ ID NO: 3233 - DNA, 311 bp, Glycine max
  Clone ID: LIB3028-014-Q1-B1-A1
cactcgcaagcaaaaagaaagaatcccaggcgaggagaaagatggaggggaaggagcaggatgtgtcgttgggagcgaacaagttccccgagagacagccgattgggacggcggcgcagagccaagacgacggcaaggactaccaggagccggcgccggcgccgctggttgacccgacggagtttacgtcatggtcgttttacagagcagggatagcagagtttgtggccacttttctgtttctctacatcaccgtcttaaccgttatgggagtcgccggggctaagtctaagtgtagtaccgttgggatt

SEQ ID NO: 3234 - DNA, 359 bp, Glycine max
  Clone ID: LIB3028-014-Q1-B1-A10
acccagcatatctctctattcctatttattagcacccctcacattaccttgtgtcaccatctactttgactcctttaccataccattagagggggtatcaaacctaaccagtaaaaatggtgaccgtggaggaaatccgcaacgctcagcgttcccatggacccgccaccagcttggccttcggcaccgccacgccgtccaactgcgtctcccaagccgattaccctgactactacttctgcattaccaacagcgaacacatgactgatctcaactaaaagttcaagcgcatgtgtgagaagtccatgataaagaaccgatacatgcacctgactcgacgactttctgaacgagaaccc

SEQ ID NO: 3235 - DNA, 385 bp, Glycine max
  Clone ID: LIB3028-014-Q1-B1-A2
cttggatagaaaaaattacttgtatcgtaacctggacttggagaactcaatggcctgcatctctctcccaagagaatcctctttttgcatagttctctgtcttcatcttcagctctctgttcaaactgctttggcgctttctttataatcaggcactttatcatcttcaacttgaggcgaaggaccagtattttagagggaaccctaaccaagcggcgtaaacttgccttcctcttcacttgtccgaacttggtaacaacattactgccatcaccatgcacaccactactaaatctagccctcatgaaattgttccatcctctcttctttttcagaaagctcatcaaaggaagattcattttcacacgttgcctatcctttctgt

SEQ ID NO: 3236 - DNA, 362 bp, Glycine max
  Clone ID: LIB3028-014-Q1-B1-A3
gacgggaaacatatcatctcagttagcgaggattcaaatgtatgtatatggaattacactggccaagatagaaatacctccaaagcaaagaaaatttggtcttcagagagttttctctcccacaacgcagccatcgctgtaccttggtgtggcattgaatcaatgccaggaacactcttatccccatcgctaggagaggatgtaaatcagaggtgttctctgccttctcctgattgcttcttcttgagtcgcggatttctgtctgagttgatcccaaaggtttctgcaacatggcccgaggagactcttgtggactcatcgtgtcaaactcaaactgttgtttctcctacaatgtgtaaatc

SEQ ID NO: 3237 - DNA, 335 bp, Glycine max
  Clone ID: LIB3028-014-Q1-B1-A5
gcactatgctacaagcccaacaaacttggctttaattggtataggcgtgccaacgtcttgttaattttgagcgttaagtgctgcaactaatcagatcccaagaccttggcctaccttgccatacagaaaaacagaaagcaaatcaaaaaagccaaggtttggagccaacacaaataatcacaaagcacaagtcatggaaagaataatggttggaactgcaacaaaggttgctttcaccctcttggccactttcgccattgtcattccatgccttgaggctggcattgctgagtttgacgattttctcaaagcccaagctgatgaagcccataaaa

SEQ ID NO: 3238 - DNA, 383 bp, Glycine max
  Clone ID: LIB3028-014-Q1-B1-A6
gccactttctgagtacaatacaacactgccatggctgcctcagtctccactattggagctgtcaacagagctccactgagcttgaacagctctgaagctggagattcggttcccagttcagccttctttggcacaagcttgaagaaggttactgcctcaagggtccctaacgtcaagatttcttctggaagtttcaaaatcgttgcggcggagaaagagattgatgagcaacaacagacaaacaaggacagatggaaaggtcttgcctatgatatttcagatgaccagcaagacatcacaagaggaaagggtatggttgattccctcttccaagctccacaggagactggaactcactatgcagtcatgagctcttttgagta

SEQ ID NO: 3239 - DNA, 332 bp, Glycine max
  Clone ID: LIB3028-014-Q1-B1-A7
aatgaaatgactatgctaccattttttatgtcattataattcttgtttccaaaaggcaacatagagtagcacaattttcctcctcaacacctcaatgctaagctgaagacaaaaatacctataaggtttgtacaggacagctttccccttattgggtcattcaccttaaataatccacaatcacatgtttgatcccaaaggagttaattctaagtaaaattgattgactttaaaacaattatcaagtaacttgtgtgttagataaacaaatttattccgaattttacttcctttaaaataaaggaaatctaaattccaatcacttcaaattc

SEQ ID NO: 3240 - DNA, 375 bp, Glycine max
  Clone ID: LIB3028-014-Q1-B1-A8
tctcactaggaggtagtagaggtaacaccaatccccaagaggaaatccctcctccggataccttattctggtgtaacaagaatgatgacgtttcctcttaccaccgaggtagtagcggctttgagctatggaaccagcaacagcttcaacatcagcaacaacagctcatgggccatgaccctcctccgcagccgcgccctctctttcaccaagatctctactccgcgttgggcgttgggcccagcaggcccatctctgacgatcagtcgtcttcgagatccagtttccttcttggagcaagcggtggcggtagcgcatgatgagggattagctgtcaggactgcgggaaccatgctaagaaagactgccctcaca

SEQ ID NO: 3241 - DNA, 362 bp, Glycine max
  Clone ID: LIB3028-014-Q1-B1-B1
tctgcccaaagctaaggagatcgtgtcgtccaattccgtcgtcgttttcagcaaaacctattgccctttctgcgtcgatgtgaagaagctcttcggtgacctcggtgccaattacaaggccatcgaactcgacactgaatccgatggaaaagagctccaagcagcattagttgagtggacggaccagcgaaccgtgcctaatgtgtttattggtggaaaccacattggtggctgtgactcaacaactgccctgcacactcaggggaagctggttcctctgctgatatctgctggagctgttgccaaatcaactgcttaaaggatctcccatttctaggttatgcagttaaataaaaataaaa

SEQ ID NO: 3242 - DNA, 384 bp, Glycine max
  Clone ID: LIB3028-014-Q1-B1-B10
ctcttggcatcttgtgttgtgtccctcttttaagctaattccttctcttaacacaattggttgtgccaattgccatagtcaccaaccaattaacaaaggtatatatatcatcatatcatcaccaaatgaaaaatattgggttgttttttcttgtggtggtggctacttttgtggtggcagccacagctggtagcttttaccaagactttgaaataacgtggggtggtgagcgtgccaaaatctatgagaatggaaaccttctcacactctcccttgacagagcctctggctctggctttcgttccaaaaaagagtacttgttcggaaaaattgacatgcagctcaagcttgtgcctggtaactctgctggaacagtaactgcct

SEQ ID NO: 3243 - DNA, 317 bp, Glycine max
  Clone ID: LIB3028-014-Q1-B1-B11
ttcggctcgtgctcttggcatcttgtgttgtgtccctctttttttctacttccttctcttatcacatttggttgtgccatttgccatagtcaccaaccagttagcaaaggtatatatatcatcatatcatgaccaaattaaaaatattgggttgttttttcttgtggtggtggctacttttgtggtggcatccacatctggtagcttttactaatactttgaaataacgtggggtggttagtgtgccataatctatgataatggaaaccttctcacactctcccttgacagatcctctggttctggctttcgttcca

SEQ ID NO: 3244 - DNA, 395 bp, Glycine max
  unsure at all n locations
  Clone ID: LIB3028-014-Q1-B1-B2
gtgccaatggtgggttcagatatatgtggcttctatccacagcccactgaagagctatgcaatagatggattgaactatgggctttctaccccttttcaagggaccatgcaaactactactcccctagacaggagctttaccaatggcagtcagtagccgagtctgcgagaaatgctttgggtataacgtataatctactcccattccattacaccctgaactatgaagctcatgtcagtggagccccaattgccagacctcttttcttcgcatttccaacttacaccgaatgctatggccttagcacccagttcttgctaggaggcagtctcatgggttctccagtgcttgagcanggaaaaacacaattgaaatcactctttccccctggtag

SEQ ID NO: 3245 - DNA, 308 bp, Glycine max
  Clone ID: LIB3028-014-Q1-B1-B3
gtcctctcgacatgagtcacatttggctaccttcagatactgggatactaagcagtcatgtccagtgcagacacagctactcgcatagcgctgctatgctatgacagtgagacatcctctgatggctgttggcactgctgatagatatcatactgtttacaacttgcagaaacctcaggttgatttcaagagaaatgtttcacccttgaagtatcaaataaagtgccatgctgcattccctgaacaacaaagtttcatggctcgattcatagcatgtacagttggggtggatcacttgggccatagtc

SEQ ID NO: 3246 - DNA, 429 bp, Glycine max
  Clone ID: LIB3028-014-Q1-B1-B4
cccttacttaaaccccggaatccggcccaaggaatcccccttattcacgattttggaaaaactgttgatatagaaaggtaggatataccactggccacagaatatatggcgcttttctatggtttcattgttagcaacattatgctgcttttcagttcagcatttgccaaaactgctactcctccctctctgagcccaactccatcaccagccccggcacccgactacgtgaacctcaccgagttgctcagtgttgctggtccatttcacaccttccttggataccttgagtccatcaaagtgattgacactttccaaaaccaagccaacaacactgaagaatgaattaccatctttgttcctaaggacagtgccttcaatgctgtaaagaaaactgtcctatccaacctcacctccgaccaaccaaag

SEQ ID NO: 3247 - DNA, 382 bp, Glycine max
  Clone ID: LIB3028-013-Q1-B1-H9
gttttctctctctacactcctttcagcacagcacaacacaacacaaaaccctttcccaaaaaaataaaaaataaaaaatggaggaatccaaattcggccaaaccgacaagcgaaagcgagtgcgcgacgagtcggactcggccctcaactcgcccgactcgttaaagcatccccgagccgagtctaactcgttcgagtctctccgagttgactcggacgagtttgaactcgcccggctcgacccggttcttctcaacatgctgaatgacgcggagaatgtggcggagcgtgaacccaccgtgcttgactctgttattaagagtttcgaagaagaaatactttctccggttccgaacccgaacctaacatccgaggcagatgt

SEQ ID NO: 3248 - DNA, 278 bp, Glycine max
  Clone ID: LIB3028-014-Q1-B1-B5
gaagccacatagagacacaatacagagtgagttgttgctccttcgccacaactctctgccaacatgggtatctccagagattctatgcacaagaggcgtgccactggtggcaagaagaaggcctggaggaaaaagagaaagtatgagcttggtcgccagcctgctaacactaagctgtcaggcaacaagacagtcaggaggatccgtgttagaggtggaaatgtgaaatggagggcattgagattggatactgggaaattactctgggggaagtgaac

SEQ ID NO: 3249 - DNA, 388 bp, Glycine max
  Clone ID: LIB3028-013-Q1-B1-G11
gcagagtagagcagcacagaagagggaaaacggcaccgccgccgtagaagaaaacaaccatggtgcacgtctccttttacaggaactatgggaagacattcaagaagccgcgtcgtccgtacgagaaggagcgtctcgacgcggagttgaagctggttggtgagtacgggcttcggtgcaagagagagctgtggagggtgcagtacgcgctcagccgcatccgcaacaacgcgcggaacctcctcaccctcgacgagaagaacccgcgccggatcttcgagggagaggcgctgctccgaaggatgttccgttacggtctcctcgatgagacacagaacaagcttgattacgtcctcgccctcaccgtcgagaactttctcgagcgccg

SEQ ID NO: 3250 - DNA, 381 bp, Glycine max
  Clone ID: LIB3028-013-Q1-B1-G12
agctgctgttcttgcgcgtgaacaagcctcaggtaagccaaaaccatggttaagcataacaatgttatcccaaacggacacttccgtaagcactggcagaactatgtgaagacttggttcaatcagccagcacggaagacaaggagacgattggctcgtcagaagaaagctgtgaagatattccccagacctacggctggacctctcaggcccattgtacatggtcaaactttgaaatacaacatgaaagtgagaggtggaaggggattttctcttgaagaactcaaggcagcagggattcccaaaaagcttgcaccaaccataggtattgctgttgatcatcgtcgcaagaaccgttctttggaaagtctgcaagctaat

SEQ ID NO: 3251 - DNA, 391 bp, Glycine max
  Clone ID: LIB3028-013-Q1-B1-G2
atccggcccaaaatcaatcctggtccaacctttttttttccttttaaattttccttaaaaattcccaaccgaacaaagatcttcaacaaaccggttaagtttgtgtagtttggtaagatgggtggtggatttagagtgcttcacttagttagaccatttctctcgtttcttcctgaagttcagactgctgacaggaaagtgccatttagagagaacgtcatatatactgtgatctctctgttcattttccttgtttgcagtcagcttcctctgtatggcatacactcaacaacaggtgctgatccattctattggatgcgtgttatccttgcttcaaaaccgtggaactgttatggagctgggaatcacccccattgtgacttctgggctg

SEQ ID NO: 3252 - DNA, 363 bp, Glycine max
  Clone ID: LIB3028-013-Q1-B1-G3
tttgccttcaaatctcactgccagcagaaaccccagcttggattatggattcaagggagctgaaattgccatggcatcttattgttctgaacttcaatatttggcgaatccggtgacaagccacgtgcaaagcgcggagcaacacaaccaagatgtgaactctctggggctgatttcatcaaggaagactcatgaggctattgagatcctcaagctcatgtcctccactttcctggtcgccctttgccaagccattgacttgaggcatttggaggagaatttgaagaacacggtcaagaacgttgtgagtcaagttgctaagaggactctcaccacaggtgtcaatggagagcttcacccttc

SEQ ID NO: 3253 - DNA, 357 bp, Glycine max
  Clone ID: LIB3028-013-Q1-B1-G4
tccaaccccaatcttaagaagaatttcaagccaattccttgaaccaactttaaccacaaaaggttaaaaaatacgaaaattccaacccaacttcttcttcctcttccggaaaaattccatcacaaccctcctaaaccccttcaagttcctccaaccctccattgcctcactctccggtgcgcacgccatcaccaatgctaactcctcctgtgaagcctttgaagcaaccaaagcctaaggccaaggaccctaacaagagggacatgagtcttgaatagaaacacaagttggggttagggttgcagagtttgccgcctgagaaaatggaacatgtgctgcacattattatgatgagaa

SEQ ID NO: 3254 - DNA, 391 bp, Glycine max
  Clone ID: LIB3028-013-Q1-B1-G6
gtgccgcagaagttcgcatttacggggatcctgattttacttttccgtatgttccagctcacttgcatcttatggtatttgagttggttaagaactcgctgcgtgctgtccaagagcgttttatggactctgacgaagttgctcctcccattagaataataatagcagatggaatagaggatgttaccataaaggtctcagatgagggaggtggaataccaaggagtggtcttccaagaatttttacatatctctacagtacagccaaaaactcatcgtcagttgaacatgaaccttctgatattggaacaatggaaaatgtaactatggctggatatggttatggacttcctatttgccgcttgtatgctaggtattttggtggtgatct

SEQ ID NO: 3255 - DNA, 346 bp, Glycine max
  unsure at all n locations
  Clone ID: LIB3028-013-Q1-B1-G7
cacaacccatggccaccacctccgcattcctcctccttcccctcctcctgctgctccacctcgccatcgccgctcacggcatcggcatcaactacggcacgctcggcgacaaccttccaccgcccgcggcggtggcgaacttcctgaagacgaagacgaccatcgaccgcgtgaagatctacgacgtgaacccggacatcctgcgggccttcgccggcagcggcatctccgtgacggtgaccgcccccaacggcgacatcgccgccttaaccaaaatcgactcggcgaggcagtgggtggcgacgcacatcannacctttcnaccctcagacannattaattacat

SEQ ID NO: 3256 - DNA, 374 bp, Glycine max
  Clone ID: LIB3028-013-Q1-B1-H10
tagttagcctcttcttgtttctcctgcaatcaacgacacccccccaaaaatgacaggagagacagtgaacccaaaagcttaccctttggccgatgcgcaactcgcaataacaatactggatcttgtgcaacaagctgccaactacaagcaactcaaaaagggtgctaatgaagcgaccaagacactgaacagaggcatctctgagttcgttgtgatggccgcggacactgagcctcttgagattcttctccatcttcctctcctagctgaggataagaatgttccctatgtattcgtcccatcaaagcaagcccttgggcgagcatgtggagtcacacggccagtgattgcatgttctgtaacaactaatgaag

SEQ ID NO: 3257 - DNA, 383 bp, Glycine max
  Clone ID: LIB3028-013-Q1-B1-H11
gttgtgggtacttatacatctcttgtagatatagttcataatttgtaagtgttagtggattggatagtgcatttggaagaagctgctataacctgaaatcttcaagtagcacactgatggcattactaagtgtctcaacttcaattttaatgccatcagtgtgctacttgaagatttcaggagcttacaagagatttgggtctgaaatgatcatcaattattcaataataataatgggggttactattgctgttgtgggtacttatacatctcttgtagatatagttcataatttgtaagtgttagtggattggatagtgcatttggaagaagctgctataacctgaaacttttgaacatgcatgtacttaaatgtgcaaaga

SEQ ID NO: 3258 - DNA, 385 bp, Glycine max
  unsure at all n locations
  Clone ID: LIB3028-013-Q1-B1-H12
agaaaatgaaagtcattgttttcttcgttgctataataattttaggtgcagaatggcaatgcaatgggtcagagcatgagcatgagcatggccacagctaccaaattttccctttgcgaatgaaaaccggccccggtggccactacattccggaggtatcgtgcaaaagttggaggcttggtgtggaagcacacaacgtcattgactggagaaccattcctcaagattgcgagggatatataggaaactacatgcttggccaccaatatagatcagactccaaaacagtttgccgtgaagcttatttttatgctaaaaccatcaacatcactgccaaaaccacatgggtgtntgatgtagatgagactacactctctaatctccc

SEQ ID NO: 3259 - DNA, 417 bp, Glycine max
  unsure at all n locations
  Clone ID: LIB3028-013-Q1-B1-H5
agaaaactagtaatatggcttcaagaactatatgttttaccattcaagtgactcttgtagtagcttttctaacaacaaaggttgttttatctgatgacactgtgccaattcccgcgaacaaagcacaattaggtgaatggtataatactaatgtggggcctttagatcaaagaaagagcaccatggacccagcattggtgactgctgaagaaggcgctaaggttgtaaaggtgatgcaagatggcagtggggaattcaagaccatcactgatgccattaaaagtatacctagtgggaacactaagcgtgtaattatttacattggagctggaaattataatgagaaaatcaaaattgagaagacaaagccttntgtcaccttgtatggggttacagagaaaatgcaaaacttgactt

SEQ ID NO: 3260 - DNA, 287 bp, Glycine max
  unsure at all n locations
  Clone ID: LIB3028-013-Q1-B1-H6
gttttggatttggttccctctattgatctcatccctgccaaattggggagaaagggtcatgtttgttttggccagttttgctgtttgctccatccaacaccttcaattttgtttgaaccatttcgcagcagatgtgtatgagggcccaccaaatggcaatgactggtttgagaagcaaactggtggcacattggacatctcttgctctacatggatggattggttctttggcggcttgcaattccaacttgagcaccatttgttccctangctcccaaaggcacaat

SEQ ID NO: 3261 - DNA, 307 bp, Glycine max
  unsure at all n locations
  Clone ID: LIB3028-013-Q1-B1-H8
gttttctctctctacactcctttcagcacagcacaacacaacacaaaaccctttcccaaaaaaataaaaaataaaaaatggaggaatccaaattcggccaaaccgacaagcgaaagcgagttcgcgacgagtcggactcggccctcaactcgcccgactcgttaaagcatccccgagccgagtctaactcgttcgagtctctccgagttgactcggacgagtttgaactcgcccggctcgaaccggttcntctcaacatgctgaatgacgcggaaaatgtggcggagcgtgaacccaccgtgcttga

SEQ ID NO: 3262 - DNA, 387 bp, Glycine max
  Clone ID: LIB3028-013-Q1-B1-F7
tccagcagcaatggtgtacgtcaaggctcagaaatcaaaagcctacttcaagagatatcaagtcaagttcaagagaagaagagagggaaaaaccgattaccgtgccaggattcggttgattaatcaggacaagaacaaatataacactccgaaataccgatttgtggttcgctttagcaacaaggacattgttgcacaaataatatctgctagcattgccggcgatttagttcttgctacagcatattcacatgagctgccacgatatggtcttgaagtaggacttacaaattatgcagcagcttattgcactggtctcctgttggcccgaagagtcctcaaaacacttgaaatggatgaggagtatgaaggaaatgttgaggctac

SEQ ID NO: 3263 - DNA, 376 bp, Glycine max
  Clone ID: LIB3028-013-Q1-B1-E11
ctgttcgccttttcgtgactttctcaaactccatacaacacactgcttctgcttttattttcctttctttctcctttcctttcctttcctttctctccattttccccgtaccaccattaaaaccactcccaaacacactcacacagacactcaaacgaaaccctcgtcgcaatggcggaggaggaaaaacacgagcagctccaagaagagcaagaccctcacaagctcttccgctcctacataggcctgagcttctccatgttcctcgcaatgctggccaacaactccgtcccggcgctgcagggcaaggtacgctcactctccctgcgcgcggcggatgcggccgaggagctccggcagatgaagtcgcggcggc

SEQ ID NO: 3264 - DNA, 337 bp, Glycine max
  Clone ID: LIB3028-013-Q1-B1-E5
cagagaggcatgatgtacaaccaaaactaccccacctaccctcagttcaagaacttgcacatagataacaccaaagggggtagcaaggacaataagtctcagaatcacaagggtggtgctcagaaaggtggtggtcaactagcacacttccaaagtgctaatggagggtcaaaagtaccccccaagaatcagaaatctgtcgacttcaacttatctgaagatgaacttgatgagagtgattttgatgaatttgatgatgactatgatgagtttgaagatgattttgatgaagaggatgaagaggaagagtatggtcaaggtcatggtcatggccatg

SEQ ID NO: 3265 - DNA, 397 bp, Glycine max
  Clone ID: LIB3028-013-Q1-B1-E6
taaccattgaagaagtgcaatttcgtcctctaacactcttccaaatcatggctagctcactgcttgtgagggttgccagctgcatggttgtggtgtggatgtttagttttgggcacataattcccttggcagaagctgaaattccatgtggcagggtgcaaatcactgtggctccatgcatagggtacctaaggggtcctggtggaggtgtccctgcaccatgctgcaatggggttaagagcataaacaaccaagccaaaaccaccccagatcgtcaaggggtgtgtaggtgcctcaaaagcactgttttgagcttggctggactcaatcttgcaaccctttcagccctccctagcaagtgtgggatcaacttgccctacaggatcacccccaccat

SEQ ID NO: 3266 - DNA, 343 bp, Glycine max
  Clone ID: LIB3028-013-Q1-B1-E7
ccctgttgacggaccctaatcctgacgatcctttggtccctgaaattgcccacatgtacaagacagacaggaacaagtacgagtcaactgccagaagctggacccagaaatatgccatgggttaagtgaccttgtggtatgtttgagggagagcctttctactctcagtgtttaggtctctcagcccttgtaggaatatttgtcgttttaaatcatgattaaggcccctccagttgaagatgaatgggggaaaacgtttctcctgctgtttgtattgcaaatgttcatggtaatttagaacagtgaaatgttgccccaattaaatgttatgcccaagttttta

SEQ ID NO: 3267 - DNA, 422 bp, Glycine max
  Clone ID: LIB3028-013-Q1-B1-E8
cgaggagttagagcatcagattttggtcccaaagcaagcttttggatggattttcctaaagaaggttctcaattaacacctactcatcagtcagatgattttaaatggaaagattattgtcccatggtgtttaagaatttgagaaaactggtcaagattgatgctgccgattacatgatgtccatttgtggaaacgatactctgagggaactatcttctccggggaaaagtggtagtgtcttcctcctgtctcaagatgatcgtttcatgatcaagacactgcgaagatttgaagtcaaagtcctttcaagaatgcttccagactatcatcatcatgtgaagtcatatgaaaatacacttatcacaaaaattttttggtctgcacaggattaaaacttcaagtggtcaaaagtttcgctttg

SEQ ID NO: 3268 - DNA, 337 bp, Glycine max
  Clone ID: LIB3028-013-Q1-B1-E9
cgaggagttagagcatcagattttggtcccaaagcaagcttttggatggattttcctaaagaaggttctcaattaacacctactcatgagtcagatgattttaaatggaaagattattgtctcatggtgtttagaaatttgagagagctgttcaagattgatgctgccgattacatgatgtccatttgtggaaacgatactctgagggaactatcttctccggggaaaagtggtagtgtcttcttcctgtctcaggatgatcgtttcatgatcaatacattgcgaagatctgaattcaaggtccttctattaatgcgtccagactatcatcatcatg

SEQ ID NO: 3269 - DNA, 173 bp, Glycine max
  Clone ID: LIB3028-013-Q1-B1-F1
aggtttaactgccaaagtgattgaccccacaatgattatggatgatgtttatggtgatttttttgattttgcatctatgttggtatccaacgttgacaataactatcccaatgcatcaaatagatttatcaagctgctagctattgagaaaacttgcagacaatctggtctct

SEQ ID NO: 3270 - DNA, 375 bp, Glycine max
  Clone ID: LIB3028-013-Q1-B1-F10
cttccatttctctcgcggtctctcttgtcttccatgccgtgacttgcttcaacgtctatatgctgtgactgtcactgctatagcgacaaatttcacacaaatggcgtgttgctataagtaccagtttttgtttcttcactctcattccttctggaggaagcttccgttcccgcgccacgttaccgcctcgggtttcacttgcaatcttcaaaccccgtcgctgcttctttcttcgcgctcgcgcgcgctactctctaagagctacttcagaatcgccgggagccgttcccgcaactccgcgaagtgccgccgcgtcggggacgttgattcccgaagccggaatcggaatcggaaccggaaccgctcaagcgctgc

SEQ ID NO: 3271 - DNA, 383 bp, Glycine max
  unsure at all n locations
  Clone ID: LIB3028-013-Q1-B1-F11
cgggccgtgctcgacgatggcggccccggcccagcctccaacggggacgcggcggtggctgcaaggcccaagaccaagccgaaggacggggaaagcggtggcggtggtgacggcgaggaccccgagcaggccaagctccgggccgggctcaactcggccatcataagggaaaagcccaacgtgaagtggaacgacgtcgcagggttggagagcgccaaacaggccttgcaggaggctgtgattttgcctgtgaagttccctcagttctttactgggaaaagacgaccctggagagctttcttgttgtatggacctcctggaacgggaaaatcatatttagccaaggcagttgcaacagaagctgagtccacgtntttcagtgt

SEQ ID NO: 3272 - DNA, 380 bp, Glycine max
  Clone ID: LIB3028-013-Q1-B1-F12
aaacaagctgtggctgtaaaaagtcagttgcagctgattgctagacccatgtacagtaacccacctctccatggagcacttatagtttctactgtccttggtgatccagatttgaagaagttatggcttaaagaagtcaaggttatggcagaccgcatcatcggaatgaggactacactacgagaaaacttagaaaagaaggggtctactttgccatggcagcatataactaatcagattggtatgttctgctacagtggattgacacctgaacaggttgatcgtatgacaaacgagtttcatatttacatgacccgtaacggtcgtatcagtatggctggtcttaatacgggcaacgttggatatgttgctgacgctat

SEQ ID NO: 3273 - DNA, 417 bp, Glycine max
  Clone ID: LIB3028-013-Q1-B1-F2
ttatcatttctccatttccattttctctctcacttttcaagaatcgtaagctatgggaaagtcttacccaactgtgagtgctgattaccagaaggccgttgagaaggcgaagaagaagctcagaggcttcatcgctgagaagagatgcgctcctctaatgctccgtttggcatggcactctgctggaacctttgacaagggcacgaagaccggtggacccttcggaaccatcaagcaccctgccgaactggctcacagcgctaacaacggtcttgacatcgctgttaggcttttggagccactcaaggcggagttccctattttgagctacgccgatttctaccagttggctggcgttgttgccgttgaggtcaccggtggacctgaagttcattccaccctggaagagaggacaag

SEQ ID NO: 3274 - DNA, 383 bp, Glycine max
  Clone ID: LIB3028-013-Q1-B1-F4
cttacttaaactcaggaattcggcccaaaaaataaggcaatgaacctgatccaggcggttccctacaacccctacgggggaggtcctgccggcctcaagcacgttgaagttgccgttcccagtccaaaggcaaatgaggttttaatcaaactggaagcagttagcattaaccctattgattggaagattcagaagggtcttctccgtcctttatttctccccagaacctttccccacataccttgcactgatgtggctggagaaatagttgagatcggaactcaagtcaaagatttcaaagttggcgaccaagtccttgctaaactcactcatcaatatggaggtgggtttgccgagtttgctgtggctagtgagagcttaac

SEQ ID NO: 3275 - DNA, 388 bp, Glycine max
  Clone ID: LIB3028-013-Q1-B1-F5
aattctttcatcatcaatgatataaactccttgctcctcttgactcattcattcactcccaatatgatggaattggaagccaccgccgctacttccccaccttctcgcgttctcctcatctccgccggtgccagccacaccgttgcccttctctctgggaatgttgtgtgttcgtggggtcgcggagaggacggacagttaggccatggtgacaccgatgataggcccttacccacgcagctcagtgcattggatgcccaacacattgattctattgcctgtggagctgatcatacccttgcgtattccgaatcacgcaatgaactctatagttggggatggggtgattttggaaggttgggtcatggcaattctagtgatttgctca

SEQ ID NO: 3276 - DNA, 379 bp, Glycine max
  Clone ID: LIB3028-013-Q1-B1-E10
ctcaaggagcatgtgatcaagccggtgatcccggagaagtaccttgatgagaagaccattttccacttgaacccctctggccgttttgtcattggaggtcctcacggtgatgctggtctcaccggccgcaagatcatcatcgatacttacggaggatggggtgctcatggtggtggtgccttctccgggaaggatcccaccaaggttgataggagtggtgcttacattgtgagacaggctgctaagagcattgtggcaagtggactagccagaaggtgcattgtgcaagtgtcttatgccattggtgtgcccgagcctttgtctgtctttgttgacacctatggcaccgggaagatccatgataaggagattctcaaca

SEQ ID NO: 3277 - DNA, 397 bp, Glycine max
  Clone ID: LIB3028-013-Q1-B1-C2
attccagtctccactggactctacatgaaccctcccactcctggtagcccctctggatcagatgtgagtgagtccagcgtactggttgcatcctcctcacatgttttccgacccgtgcctagaacaggcgcggttctaccacccgtagaaacaacaacgactttgtcttccaatgaccctccaacctcactttccctatccctccccggtgttgactcatccgaagtttccaatcgaacaactgagccgattcatgccgcacctcctccgccgccacagccacagccacagccacagccgttgaatactatccctttgctcccaatgatgacggtgccctcggtttctccgacggggatggcgccgtttaattttagcgcagagtttctggcggtga

SEQ ID NO: 3278 - DNA, 325 bp, Glycine max
  Clone ID: LIB3028-013-Q1-B1-C3
ataagcttatttatattatttaaaaatcctaaaaaaatattacaagaaattcttttataaaaaaattcttttaaaatccttctaaaattctaatccagtacatcccattaaacttttattgctttcacagatatgtcaagacatcctaataatggagtggaaactaaggaaaccgctgctccgatctgaggccatggctgggtctgggagttccatgctgtattcctttcttctcttcacagtcattctctcacttcaagaaatgtaccgagggaaactagcatcatcagaattatacactatacttggagggtttgttagctct

SEQ ID NO: 3279 - DNA, 360 bp, Glycine max
  unsure at all n locations
  Clone ID: LIB3028-013-Q1-B1-C4
atcggagacatgcaacggccatttgcatcctccgaagaagaccgcatccaaactctgagattttgaattaaaggtgccgccgggatggaacagttccggcatataggagaggtggttgggagtctgaaagcgcttatggttttgcgcgatgaaatccaaataaaccaacgacaatgctgtttgatcctggacatcttcggtttggcgatggagacgatcgcggaggagataaggcagaacctgaagctggaggagcgtaacacgaaatggaaggctctggaatttccgctgcgtgagctatgcanggttttgaagganggagagctttacataaggcagtgtttggattccaaagactgg

SEQ ID NO: 3280 - DNA, 336 bp, Glycine max
  Clone ID: LIB3028-013-Q1-B1-C7
atgagaaccagttatgcagtgatgatcctgaaagtgatgatgaagccaaagatagtgatgttatatcagacgatgacgacgagagaagttctgatgacgaagctgatgttagtgatgctgatgaagttaagggggatgacattgaagacaatgaacaagctgatggagaggatagtgatgtttcagaacatgaagaagatggtgatctgcattctttaagtgatgatggacttgtgacaaaaagtacaatgaaagactcagcaaaaaagaggaagtttactgattttaatggtcaactgatagctgctgatacaagtctccgggctctgaagaaat

SEQ ID NO: 3281 - DNA, 419 bp, Glycine max
  Clone ID: LIB3028-013-Q1-B1-C8
cccagatgaagatgactcgtgttcctattcatggcggattctcttggctatcattcaatgaagaaacgaccactactgatgatagttccttcaccatgactggcctgttggagcagttaaatactacaagagatttatctgactacttgtggtactccacagatgttgtgcttgatcccaatgaaggatttctgagaaacggaaaggatcctgttcttactgtgttttctgctgggcatgctttgcatgtttttataaatggtcagctatcaggaactgcatatggaagcttagaattccctaaactgacatttaacgagggagtgaagcttagagccggtgttaacaagatctctctactgagtgttgcagttggactcccgaatgtgggtcctcaatttgaaacatggaatgctggt

SEQ ID NO: 3282 - DNA, 240 bp, Glycine max
  Clone ID: LIB3028-013-Q1-B1-D10
gcaagtgacagtgatcaagtgcattttttgtctggtcaattactgataatctttcagtaaattatatatttggggatatagggtaacgacgatcattttgataacgaacccttgcatctgtaacaaatttaattgatgctgaattgaggcaaattcaatgcataatctatcctgtagaattttttgctgcaatttttgtatgacattattatcattaataaaatgttggtattgtctgtt

SEQ ID NO: 3283 - DNA, 384 bp, Glycine max
  Clone ID: LIB3028-013-Q1-B1-D11
tccaaaaccagacgacttgcacggaccttgtaaaggcagcagatcctaaaattgcacaggcaaagacattccaagagcttgcacaggcagtgctagaatttgccgtgaacaagggaatagagggccaaaccttcctcaagggcttggcactgattgagcaatcaccagccattaaggaatgtgcaaactttttctatgatggggtggttggatccttccgtagtgccttacgtgagttgaaagaagatgctcagaccgctagctatgatgccaaagcggcttatgatggccctgacggttgcaatagagccttggccgctgaaaatatcaataaccctgctattactgctcttaacagcgaaatagcgttgcttagccaaattg

SEQ ID NO: 3284 - DNA, 382 bp, Glycine max
  Clone ID: LIB3028-013-Q1-B1-D12
gctggtggacattctcgacgacgttggaatcggcgagcgcgtgagccgcacgctctcgctgaagcgtccctcggggaggccgcacgggaaggttgaggttagcgtgacaatcagggagcccagctaccgtgcgcagggtgggtacaacgcgcctccttacggcgtgagggattattcccctgcgccgcaggggtatggtgggtatcctccatatggggccccaccacaacaggcgtattattccgctccaccaagtgggtatccttataatgcgccaccgcagccttataatgcgccgcctcagagtggctacggctataatgcgctgccgcaaacggcgtcgtatgggcaggggagcggttacgggtacgcgccacaagag

SEQ ID NO: 3285 - DNA, 375 bp, Glycine max
  Clone ID: LIB3028-013-Q1-B1-D2
aggatatgctacaagaaaggagatggaagagcacactgaacgacaaaaggtagcattgagtcaaatgcttcaggcattgagggaagatctaactcttccaccgaagaccgagaaagatgggagcaatcagaagccgttcgtagcacagaggaagaaatttggattcattcaaatatcactccccttggcaaagccaaataagaaaaggggatgagatttcaatccttaatccctatgcatggatgaatagccactactcatgcatcttcatgtcttcccatgccattctttattggttcatgtgttcactttcatttatatatgtagatgtttgtgagtgtctgattccgtaaaatatgttgtgtttgaatgatt

SEQ ID NO: 3286 - DNA, 359 bp, Glycine max
  Clone ID: LIB3028-013-Q1-B1-D3
cgcaccgtcgattgcttccgtaagtagcctttcgcatgggaaacgctaacggcagagaagatggatccattcccggccccgccgatccctccgtcgccgaccccgccgcacgtggaactcacgcgccggactcccgccccccggttcgcgccttctcctccgattcaatggccaatagcccgccgcagagccctcgccgctccagatcgccgatcctcttcggtcctcaggttcctctagctccattacaaagaggtaatggccctccttttctcaatcaaatgtggcagaatgagtctcatggtattgttaatcaacttcctgagcaagggatccctgtcatgattacatggaactat

SEQ ID NO: 3287 - DNA, 396 bp, Glycine max
  Clone ID: LIB3028-013-Q1-B1-D4
acaaaatgtgtcttgttgtaaaggagaaatccatagtaatttggagcaatcagatcagaaattatgcttggtatcacttttaaggtattagttattataaacaccaccaacaaagggctacataattatcatccacgacaatttttaattggttgcacatgtgaaaatccttgagactgtttgtacgtatgtagtatttgcttaataatattacatttctactcagataaatttcttaccatcatgtaatgttgttgttgagacatttttgaatgaataaatgcaggcagttacacctgcaagacctacacctacaagacctgcagctcctacaaaacctgcacctgcagtacgacgtcaaaaatggtgtgtgccaaaggcagattgcaaccatcc

SEQ ID NO: 3288 - DNA, 341 bp, Glycine max
  Clone ID: LIB3028-013-Q1-B1-D5
gtgagctataagctagtttatcgtgaggagaatatgaagttgtttgttttctttgttgctgcagtagttttggtagcatggccatgccatggcgcaggctaccaaaggttccctctccgaatgaaaactggctatggtgagcgttcttcggaggtaaaatgcgcaagttttaggcttgctgtggaagcacacaacatccgagcctttaaaaccattcctgaagagtgcgttgaaccaacaaaggactacattaatggcgaacaatttagatcagactctaaaacagttaaccaacaagctttcttttatgccagtgaacgcgaagtccatcacaacgacat

SEQ ID NO: 3289 - DNA, 415 bp, Glycine max
  Clone ID: LIB3028-013-Q1-B1-D6
gtttgttgttgtaactcgttcttcttcttttgttgttctgtgtttgtgtttgttttttctctcacctgaaaatgtcttgctgcggtggtaactgtggttgcggaagctcctgcaagtgcggcaacggctgcggaggctgcaagatgtacccagacttgagctacactgagtcaaccaccaccgagaccttggtcatgggagtggcacctgttaaggctcaatttgagggtgctgaaatgggtgtgcccgctgagaacgatggctgcaaatgtggaccaaactgctcctgcaacccctgcacttgcaagtgaggtgttgggagagcaagcttcaagcagagatagcccttaattaggaataatgataaactattaatgtgtacctaaaaacttaggttttaggtctgtgatggttt

SEQ ID NO: 3290 - DNA, 399 bp, Glycine max
  Clone ID: LIB3028-013-Q1-B1-D7
ttaatactcactaataaaaagcgaaggggtttccgagttttgaaggagagagagagagacatttgtaacgacaagaagcagaaggtatagagggagtggtcaaattacggatcaggattcaggaatttccattctgagacacacagaagcacagaaagaaactccttttaatttttcaattttcaagtcaagatctgacatcatagaaaaatgaccatggatgtcgttcagctgcagaggaagctgcgcgaacaccaagccgctatgtttcaacagggttttttggatgatcagttcagccagcttcagaaactgcaagatgagagcactccagattttgtgattgaggttatcactatgttctttgatgaatctgagaatctcctcaaaaacatggca

SEQ ID NO: 3291 - DNA, 418 bp, Glycine max
  unsure at all n locations
  Clone ID: LIB3028-013-Q1-B1-D8
ggagtctaaaggtgggaaaaagaagtctagtagtagtagtagtaaatcattgttctacgaagctcccctcggatacagcattgaagacgttagaccaaacggtggaatcaagaaattcagatctgctgcttactccaactgcgctcgcaaaccttcctgatatccatccagattgatagttcattgcatgcaaccatagttttattaggttttttcttctttgttttcaattaggtttttgctgctctccttcaaactccgtctttccgaatcctctctttgtgattgtgttctgttctgcttcctaccgcgatagtttctcttctgaagcatggccatggcggtttctgcaattggttctgaaggtttcgagaagaggctggaaatatcctttttnangccgggactttttgctgac

SEQ ID NO: 3292 - DNA, 199 bp, Glycine max
  Clone ID: LIB3028-013-Q1-B1-D9
agaatttgacattttatctttcgcatgggttacctagtttagtcgggcaatgactgagacatttgtcaccacatgaagcatctcgttgggatgggagttgttatcttactgttcaggatgcagggtgttccgttctgagacccacagaatctcagagcgaatctccttttagtttttcacttttcatgtcactatcaga

SEQ ID NO: 3293 - DNA, 339 bp, Glycine max
  Clone ID: LIB3028-013-Q1-B1-E1
attccgctcgagctgctttgtgcacttcctgtcagatgcttgtggtttggattcagaatcaactataacacaagaacaccatcgagatagtattcacctgggtggatcagctgtcacaaagcttgccatgtcgatctttgatagtcattattagattgtacatagcatttatggattgccaaacatcacgtttactgttggtcacaaacctttcaccctcacccctgagcagtatattctgaaaactggacaaggcattgctcaactttgccttagtgggtttattgcttttgacattcctcctcctcaaggtcctctctggattcctggagatgtttt

SEQ ID NO: 3294 - DNA, 381 bp, Glycine max
  Clone ID: LIB3028-013-Q1-B1-C12
gagaggagctgtactacacttcaatggaaactccaaaccatggttgaagattgggattgagaagtacaagcccctatgggaaaaatatgttgaatactctcatcctttgttgcaaaaatgtaacttccattgattttgaattgcatttaaattgatacttcaaaccttggtggaagattaagattcacagttagcctctgttggtggggtcggcaaatatatcattgtttgtttggggaactggcaggcttggtgatccttaccagaccagcgaattgaggtcttgatttgtagtcagaaaatgctggtacaattttaaaaggccaagcatgtgtggtggctttaacttggtgccttattgaatccggctcttctattgta

SEQ ID NO: 3295 - DNA, 371 bp, Glycine max
  Clone ID: LIB3028-013-Q1-B1-A3
ccccggagactctgctggcacggtcactgcattttatttgaactctgacacgaactacgttcgcgacgagcttgatttcgagttcttgggcaaccgtactgggcaaccttacacagttcaaacaaacatctacgctcatggaaagggtgacagagaacagagggtcaacctctggtttgaccctgctgcagacttccacacctattcaattctctggaaccatcaccatattgtattctacgtggatgattttccaatcagagtatacaaaaacaacgaggctcgggggattccatacccaaagatgcaggcaatgggagtgtattcgacattgttggaagcaaattactgggccaaaaagggttgaattg

SEQ ID NO: 3296 - DNA, 361 bp, Glycine max
  Clone ID: LIB3028-013-Q1-B1-A4
gcactaccactgtacttgatcatgaagtctagacttccgactcagagaaaatgttcagatctctggtttaattgcattactagcagctgttgatgcactttctcatttggatggtcttggtgaccttagtaaacagcttgtttttgcagttttcactggagaggcatggggttaccttggaagtaggagatttttggtagaacttgacatgcactcagatgctgttcatggccttaatcagacattaattgaaacggtcattgaaattggttctgttggaaacggtctcagtcaatgtgttaaaaacttttttgctcatacaaaatgggattcttctgccacatatcagacagttgctgcc

SEQ ID NO: 3297 - DNA, 371 bp, Glycine max; identical to SEQ ID NO: 3295
  Clone ID: LIB3028-013-Q1-B1-A5

SEQ ID NO: 3298 - DNA, 384 bp, Glycine max
  Clone ID: LIB3028-013-Q1-B1-A6
ctcttttatccctcaaaaaccaaaaccctaatggcagagcgcggaggtggcgaccgtggcagcgaccgtggcggtttcggacgcggctttggtgggcgagggcgcggaggtgacaggggccgaggccggcgccgaggtccccgccgcgaggaagaggagaaatgagtcccagtgaccaaactgggccgcctggtgaaggagggaagaatccgaagccttgaacagatctacctccactcgctcccgatcaaggagcaccagatcatcgacacgctcgtgggtcccaccctcaaggacgaggtgatgaagatcacgccggtccagaagcagacccgggccgggcagaggacccggttcaaggccttcgtcgtcgtcggagacaac

SEQ ID NO: 3299 - DNA, 348 bp, Glycine max
  Clone ID: LIB3028-013-Q1-B1-A7
caaactcgtccccggagactctgctggcacggtcactgcattttatttgaactctgacacgaactacgttcgcgacgagcttgatttcgagttcttgggcaaccgtactgggcaaccttacacagttcaaacaaacatctacgctcatggaaagggtgacagagaacagagggtcaacctctggtttgaccctgctgcagacttccacacctattcaattctctggaaccatcaccatattgtattctacgtggatgattttccaatcagagtatacaaaaacaacgaggctcgggggattccatacccaaagatgcaggcaatgggagtgtattccacattgtggga

SEQ ID NO: 3300 - DNA, 345 bp, Glycine max
  Clone ID: LIB3028-013-Q1-B1-A8
ttttcttttttcttttaattttcctctcaagtggagcattcaggttgttagagcgtccattgagctttcaatctgtggctggattttgatctctctgagtttaaaatggatccaaaaggaagcttatgtgctacaaggtcctcttccttaacctctcctgggaatggactacaaacaaatttgtcgtcagatcctccctctttctatggggtcaggattgaatcacctttcgaagaattcatccaaccctctcctccaacccaatctgtacttccaggtgaatctaacacagatattgatatccctgaccaggaaaattgtccactgagtgactcctcacatacc

SEQ ID NO: 3301 - DNA, 383 bp, Glycine max
  unsure at all n locations
  Clone ID: LIB3028-013-Q1-B1-A9
atcttgtcattcaccgagaaagtcgtactgattcctcttcatctttcgttaaagcgagtacttttcgttcttgatctgttggttacgatgtcgtattcaaggagatctaggtattctccttctccttctccttctccatacaagcgatacggtaggtctgtgtccaggtctctctcaatatcaagatccagaagccgttcaaggagtttatcaagagatgcagaaaatccaggaaacaatttgtatgtgacaggattgtctcctaggattaccaagagagaactggagaaacattttgctgctgaaggaaaagtgatagatgtccatctgatagttgatccttggacaagggaatcncgtgggtttggctttgtgacaatgga

SEQ ID NO: 3302 - DNA, 303 bp, Glycine max
  Clone ID: LIB3028-013-Q1-B1-B1
tcggctcgaggaaatcctcttattcatgaatttggatacactgttgatatagaaaagtaagatataccattggccaaggaatatacggcgttttctatggtgttcattgttagcaacattatactgcctgtcagttcatcatttgccaaaactgctactcatcgctcactgattccaaatccatcacgttcccctgaagtcgactatttcaacctcaccgtagttgctcaatgttgctgggtcattttcatccttccttgggtatcttgagtcgatcaatctgatttacactttccataaccc

SEQ ID NO: 3303 - DNA, 367 bp, Glycine max
  Clone ID: LIB3028-013-Q1-B1-B10
ttgtttgttgttgtaacacgttcttcttcttttgttgttctgtgtttgtgtttgttttttctctcacctgaaaatgtcttgctgcggtggtaactgtggttgcggaagctcctgcaagtgcggcaacggctgcggaggctgcaagatgtacccagacttgagctacactgagtcaaccaccaccgagaccttggtcatgggagtggcacctgttaaggctcaatttgagggtgctgaaatgggtatgcccgctgagaacgatggctgcaaatgtggaccaaactgctcctgcaacccctgcacttgcaagtgaggtgttgggagagcaagcttcaagcagagatagcgcttaattaggaatcatgat

SEQ ID NO: 3304 - DNA, 385 bp, Glycine max
  Clone ID: LIB3028-013-Q1-B1-B12
tgatgatgaagtctgctatgtgtgcagtggtggttgtagcacttcttcttctggcggaggtggggcccatggctgaggctgtgacatgcaccccaacagagttgagtccgtgtcttccagcaatcacttccggtgctaaaccttccaatgcttgttgcacgaagctgaagcagcaaaaaccatgcttatgtggctacctcaaaaacgctagcttgaagcagtatgttaactctcctaatgcccgaaaaaccgttgcttcttgtgggattccctttccaacttgttaattaattaagccttcttataattaaagtgtgggatatatatatatatatagataaacagtttaatttatacacactttgatcctacaaagcatcttgaa

SEQ ID NO: 3305 - DNA, 269 bp, Glycine max
  Clone ID: LIB3028-013-Q1-B1-B3
ggggagaagagagaaacgttgtattcagagatatggggaggggtaagattgagatcaaaacgattgagaactcaagcaacaggcaagttacctactcaaagaggaagaatgggatccttaagaacgcaaacgaaattagtgttctatgtgatgctcaagtttcccttatcatccttggtgtctctgggaagatgcatgagtacatcagcccctccactacgttgattgacctcctggacagataccacagagcctctgggaagaccctg

SEQ ID NO: 3306 - DNA, 330 bp, Glycine max
  Clone ID: LIB3028-013-Q1-B1-B5
ctcgagccgtgctttcattgccgctgctggctctttcaatggctttggcacaaccggtgatgacaacactcgcaagaaggagattgctgctttcttggctcaaacttctcatgaaaccacaggtgggtgggcaagtgcaccagatggtccatatgcgtgggggtattgttttatcaacgaacaaaaccaggcaacttattgtgatggtgggaattggccatgtgctgctggtaaaaaatattatggccgaggaccaatccaacttacacacaactacaattacgggcaagctggcaaagcacttggtctggatttgataaacaatccgga

SEQ ID NO: 3307 - DNA, 392 bp, Glycine max
  Clone ID: LIB3028-013-Q1-B1-B6
cgaagagcagtagaaagaaactagaatggccactttagacgaacgcccttctgcgaaaaggtggcttcctcttgaagctaaccctgaagtcatgaaccagttcctttggggtcttggccttccactggacgaggcagagtgctgtgatgtgtttggcttagatgaagagcttctggaaatggttccgaagcccgtcctcgccgtgctttttctttatccaattaccgcagagtccgaagaagaaaggttgcaacaggaaaacgataaacaggattatagcagcagagtgtattttatgaagcataccgtgggtaatgcttgtggtacaatatggttgcttcatgcacttgggatcataacctccgaagtcaagcttgtttagggggtcattc

SEQ ID NO: 3308 - DNA, 406 bp, Glycine max
  Clone ID: LIB3028-013-Q1-B1-B8
ctcatccttccttcgagacatgagatgaggccgatgcaactgccaccgccttccgcttccggggccaaccctgcccctgcaaccaccagcaacaacaacaaggagcagcgtccccagcgccgccgcaaggacctcacgctgccgctgccgcagcgagacaccaacttggcggtgccgcttcctctgccgccatcgacggcgcctgctgcggcggcgagcggcggagctagccagcaggcggcgcagcaggtgatccctttctcggagctggagagactgaaccgcatcgggagcgggagcggcgggacagtgtacaatgtggtccaccgcacgagcgggcgcgtgtacgcactgaaggtgatatacggtcaccaccaggagtcggttcagtggcagatccaccggg

SEQ ID NO: 3309 - DNA, 385 bp, Glycine max
  Clone ID: LIB3028-013-Q1-B1-A12
tattggagctgctaggggattggcttttcttcaccacaattgtatcccccacatcattcatagagatatgaagtcgagcaatgtgttacttgatgaaaacctggaagccagagtctctgattttggaatggctaggcttatgagtgctatggatacacatttgagtgtgagcacattggctggcacaccggggtatgttcctcccgagtactatcagagcttcagatgctccacaaaaggtgatgtctacagttatggtgtggttttgttggagctgctaactgggaaaaggccaacggactcggctgattttggagataataatcttgttggatgggttaaacaacatgccaagctgaaaatcagtgatatttttgacccggag

SEQ ID NO: 3310 - DNA, 382 bp, Glycine max
  Clone ID: LIB3028-013-Q1-B1-B9
gtcggcgacagcgaactacttccgtgtaatggcgacctccgtcgcagtcgccggcgctttgacggcgcatgatcgccggattctgacagcggtgaacgtcggagcgtcgagcctgtcgttggccggttccagcttcattgtagtgtgctacctcctcttcaaggagctccgcaagttctccttcaagctcgtcttcgacctcgctctctctgatatgctttgcagtttcttcggcataatacgggacgcgtccaaaggtttcttttgttatgctcagggctatagcacacatttcatttgtgtggcatcgtttctatggactacaacaattgcttttacccttcaccgcactgttgtaaaacataaaacagatgttgaagat

SEQ ID NO: 3311 - DNA, 192 bp, Glycine max
  Clone ID: LIB3028-013-Q1-B1-C10
gagagatttgaaatgtaaatgccaagtgaaagtgaaaagtacagtccagttttagtgatctctttaatttatttgttcatagattaatatgatggtgtatgattgcttttctatttattgtggcatttttgtgttgtaccctgttgttgtgtttgcaataagtattagtaataaagcagcaaattcaatttc

SEQ ID NO: 3312 - DNA, 398 bp, Glycine max
  Clone ID: LIB3028-012-Q1-B1-G6
caaccatgggtcaatactcaattcatcatcagcttgtggccatagtctcattatttatccttttgcttccaaatatccatgggtggggagacgatgggcatgtcattgtttgcaagattgcacaggctcgcctcagtgaagcagctgcagaggctgtgaagaaactgctgccaatatccgcaggaaatgatttgtccacaaagtgttcttgggcagatcatgttcatcatatctatccttgggcctctgctttgcactacgcaaataccccagaggccctctgcagttacaaaaacagcagggattgtgtagattacaaaaaaggaattaaggggcgatgtgttgtggctgcgattaacaattacacaacgcagctccttgaatatggcagtgacact

SEQ ID NO: 3313 - DNA, 326 bp, Glycine max
  Clone ID: LIB3028-012-Q1-B1-G7
gccaaactgttctgtctcaacctgatgtgatatcaatgtcatttgtaccaattacatctctacttggtggaataaatgggagtggataattaactcatgccatgaatctctatttacgcgataaagcacgaattgatgaactgcatcaatttttggagttccagcttccaaggcaatgggcccctgtatttggtgagcttgcccttggtcctgaaatgaagccacaaaatactgcttctttacagttcagtttcatgggtcccaagctctatgtagacacaacaccggttgatgtgggaaagaacccgtgacatgccttcgattgt

SEQ ID NO: 3314 - DNA, 374 bp, Glycine max
  Clone ID: LIB3028-012-Q1-B1-G8
aatttggcgttcctgctttgcacatgagaaggaatgttggcctgagagttaggtccatggctaaggaagaacaaccaagtgagcctgcaaccccagttacaccgccaccatcagtagaacccaagccacagccagtctctgctccttcaccaaaggtgagcactaagttttctgatgtgttggcattcagtgggccagcacctgagaggatcaatggaaggttggccatgattgggtttgtggctgcaatggcagtggaagtagccaaagggcaaggtgtgttagaacaaatatccaatggtggcatcccatggttcttggggacaagtgtggtccttacccttgcttccttgattccactcttccaaggtgtc

SEQ ID NO: 3315 - DNA, 327 bp, Glycine max
  Clone ID: LIB3028-012-Q1-B1-H1
aaaattgagtgagtctaagattggagaatgtcaaagagacatatcagaggcaaaagccttggtggaggaagcagaacgctctctgttggtaaatgtgggaggtcctgaaaatggcagtacatccatggggatgaaaagtgaagacatcgatagagatgaagagagatgggagtcagtaaaagcagcatcaatttctgcccttgttggtactttttcagggctccccatatgcttcactcaggtcaccaacacaactcagctgcttctccctttagcaatcaacttcatttgctgtgcattgtttggagtgacttttcggtacactat

SEQ ID NO: 3316 - DNA, 192 bp, Glycine max
  Clone ID: LIB3028-012-Q1-B1-H10
tccaacgattaacctgccgaacccggtaaaaaaaaagcctggggccaaggcaacaaacttcgtccccggaaagtgaccgtcaaagaacgaaatgacttttgaaagttttaagatttgtgtttggtgaagtacttcagataatgtgaattatcttgtgtatccgaatccaacttaatgttacttgctttttac

SEQ ID NO: 3317 - DNA, 369 bp, Glycine max
  Clone ID: LIB3028-012-Q1-B1-H11
acgagtggggtttcttccaagtaacaaaccatggagtgcccctcactctaaggcaaaacattgagaaagcctcaaaattgttctttgcacagagtgcggaggaaaagagaaaggttagcagaaatgagagctctccagcgggttattatgacacagaacacaccaaaaacgttagggactggaaagaagtctttgattttctagccaaagaacccactttcattcctgtcacttctgatgaacatgatgatcgagtcaatcagtggactaatcaatcccctgaataccctctaaactttagggttgtaacacaagagtatattcaagagatggaaaagctgtcctttaagattttagagcttatagctt

SEQ ID NO: 3318 - DNA, 319 bp, Glycine max
  Clone ID: LIB3028-012-Q1-B1-H12
taagccggaaggaaaaaaacccgtttcaaaacttggacgaacaaaccccttccgtccaaaccaaaaacgaagccccccttaaacccttttccgtttccgggaaccaaaaccaagaaaccaaggaaaaccaaaccgcaagccaattgcacttctcctcctcctcctcctcctcctccttgggaaacccaaaaccccttaaacaatgacaaaggataccaccgtaagggttccttcttcaaacgaaacctccgcggccaacaaggcttccaaaacccggcagaaaaggaagaaaaagtgggatcaaccggcggagtcattg

SEQ ID NO: 3319 - DNA, 348 bp, Glycine max
  Clone ID: LIB3028-012-Q1-B1-H2
gtagcattcagtgaaacactagctagggtattgggagctctcgttgtttcggagttagggaccttacgcagccatggccactgctacgaatgccgccgccgccccaccacgccagctctcccagaaggaagctgacatccagatgatgttggccgccgacgtccacctcggcaccaagaactgcgacttccaaatggaacgttacatcttcaagcgccgcaacgacgggatttacattattaaccttgggaagacgtgggagaagcttcagctagcagctagggttatagttgcaattgagaacccccaggatatcattgttcaatctgcaaggccttatgggcaaag

SEQ ID NO: 3320 - DNA, 362 bp, Glycine max
  Clone ID: LIB3028-012-Q1-B1-H3
cagcattgcaattattttttattcaaataatgtgtaaccggcctctaaaacatatgaatatgaatatctaacaccagctgttgtataagtaatgctatttatggatttatctcttttagttatgatgtggtttagttaagaagcgcagatatggggtcatgtacgaatttgtgtttaactgtattaactagaacaaatgtgtaaatgtcattcttcatgttgtatattctagtgctttctagtttagtctttcttatataattattttagcatgttgatcatcaaaaagagtaaattacacttttaaaatacatgagtggtatatttatttatcttgccatgcatcataacagtcctagagc

SEQ ID NO: 3321 - DNA, 359 bp, Glycine max
  unsure at all n locations
  Clone ID: LIB3028-012-Q1-B1-H5
tgcatcgccgacgcttccaacaataacaatggccgataatgcaacaacgcaaggaagcaacaccctattttctccttacaagatggccaaattcaacctctctcatagggtggtgttggctcctatgacaagatgcagagcgttgaactggattccacaggcagcgcttgctgaatactacgctcaaagatcaacaccaggtggatttctcatcagcgaaggcaccttgatctcccccactgctcctgggtttccccatgttcccgggatatattcagatgaacaagtggaggcgtggcgaaacatagtggatgccgtgcatgccanaggcagcattatcttctgtcaactttggcatg

SEQ ID NO: 3322 - DNA, 378 bp, Glycine max
  Clone ID: LIB3028-012-Q1-B1-H6
caagctcagaaaactcaccaccctcaaaactattgatgaaggagaaagtagcaagctgcagaagacgttgtcgatgccgtcgacaccaacaaccccgatgactccgacgactccaacgacaccgggatcggcccgtaaagctgacaacgtttggaggagcgtcttccatcctgggagcaactccgccacaaagaccatcggtgctcagatgtttgacaaaccacttcccaacactcccactgtctatgactggctgtacagtggggagaccagaagcaggcaccgctgaagctgaagtctttagctaagatgaccgtgggttgcatgtaaatattgtcgtttttcgttaagcatctgccacgtttgcagctactaata

SEQ ID NO: 3323 - DNA, 358 bp, Glycine max
  unsure at all n locations
  Clone ID: LIB3028-012-Q1-B1-H7
aaaaatgaaaacccaaagtgcttctctcctctgtctttttctctctcttgctatccttttggctagtggcactgctgcaagtgcaactccaagaagcgcagtgccaagccaccatgtttcaacattcaacagaagcctttttccttccacttttctctttggaattggttcttctgcttaccaggcagaaggagcagcaagtgtagatgggagaggaccaagcatatgggacacctacactagacagcatactgaaaagatttgggatcatagcaccggtgacatgggagctgatttntatcatcgatacaagggtgacatanaaatagcgaaagaaattgggctggactccttcaga

SEQ ID NO: 3324 - DNA, 396 bp, Glycine max
  Clone ID: LIB3028-012-Q1-B1-H8
gaaccctcgccgactacaacatccaaaaggagtccacgctccacctcgtcctccgcctccgcggcggcatgcaaatcttcgtcaaaacccttactggcaaaacaatcacgctagaggtggagtcctccgacacaatcgataacgtgaaagccaagattcaagataaggaagggattcctccggatcaacaacgtttgatcttcgccggaaaacaactcgaagacggcagaaccctcgccgattacaatatccagaaagaatcgactctgcatttggtgcttcgtctccgcggaaggatgcagatcttcgtgaaaaccctaaccggcaaaacgattacgctagaggtagagtcctctgacacaatccataccgtgaaagcgaggatccaggataagg

SEQ ID NO: 3325 - DNA, 365 bp, Glycine max
  Clone ID: LIB3028-012-Q1-B1-H9
agcagcaatggtgtacgtcaaggctcagaaatcaaaagcctacttcaagagatatcaagtcaagttcaagagaagaagagagggaaaaaccgattaccgtgccaggattcggttgattaatcaggacaagaacaaatataacactccgaaataccgatttgtggttcgctttagcaacaaggacattgttgcacaaataatatctgctagcattgccggcgatttagttcttgctacagcatattcacatgagctgccacgatatggtcttgaagtaggacttacaaattatgcagcagcttattgcactggtctcctgttggcccgaagagtcctcaaaacacttgaaatggatgacgagtatg

SEQ ID NO: 3326 - DNA, 371 bp, Glycine max; identical to SEQ ID NO: 3295
  Clone ID: LIB3028-013-Q1-B1-A1

SEQ ID NO: 3327 - DNA, 368 bp, Glycine max
  Clone ID: LIB3028-012-Q1-B1-G5
gaaatttggaaaaagggttctgaaatcttagctactgagtgcgtaatcactgagatctgccttcatcctgggttggttttgttgatgggtgcttgctggagtaataggattaagtctgtgagtccttccaatacagggatcacttctagaagtgtcagcaggagtggccatgacgtcagctcaaatagcaggagctcatcagcctccatatccgtcgcttctcggagtgagggtgagatcttgcaatcttccaacttgaaaagcttcagctataatgagctaagagcagccacaagaaatttccgcccggatagcgtcttgggggagggtgggtttggttcagtttttaatgggcggattgatgagca

SEQ ID NO: 3328 - DNA, 383 bp, Glycine max
  Clone ID: LIB3028-013-Q1-B1-A10
ggagattcatgcctgagaaagggtctcctgaatatgatgcgtcagctaagaaccctgataaggagtttttgaagactattactggcaagaaagagaccctcattgaccttacaattatagaaattttatcaaggcacgcatctgatgagttcgaccttgggcagagagatggcggtgactactggacttctgatgccgggccattagaggcctttaagatgtttggaaagaatcttgaagagattgaatagaagcttatagagaagaacaatactgagacattgagaaaccgctatgggccggctaaaatgccttacactttgctctatccttctagtgacgagggattgactttcagaggaattcccaacagtatctctatc

SEQ ID NO: 3329 - DNA, 364 bp, Glycine max
  Clone ID: LIB3028-013-Q1-B1-A11
ccaagccccagtcaaccaacacaccactctcactgctcttgatcgatctttcaagtcttcagggtattatgatggcaaatacattcatacttacctcagactcagtcaccgaaggacaggctgacaagctctgcgacgaaatctccgacgctgtcctcaatcgcttggcgtgaacaggacccagacagcaaggttgccagcgagacatgcaccaagaccaacttggtcatggacatcggagagatcatgaccaaggccaacgttgactacgagaagatcgtgcgtgacacctgcaggatcatcggcttcatcacaaacgatgtgggacttgatgctgacaactgcaaggtccctgtgtacattg

SEQ ID NO: 3330 - DNA, 321 bp, Glycine max
  Clone ID: LIB3028-012-Q1-B1-E8
cacgcatctcggaatcccctttcttcatcgcatagatactttcgctagcccaccaagtaacccttattccaattcaccctcgccactccttagatcgaaatcattttttttcgcccggcacaagttgggtttttttttatataactgataatgggtgatagcagtgttcaatctgggtctccaaatgcataaccagatcttgttgacggagactcggcggtttccaataacgcgacatgggacaccactgttcacagtttccaagattcattgtctcctggtaagagactcaatttctgggaaattcagcctgtggggcat

SEQ ID NO: 3331 - DNA, 298 bp, Glycine max
  Clone ID: LIB3028-012-Q1-B1-F1
tttctcccctgaatctcaccactctccgatctttcattctcccctcttttctagctcccgtggagtctggaagcgttctcgagccttctcgctttccacgtgttttgctttgttcaagttcgctctcggcagtggggtttagaactgtgcgttcagggacattatcgcgttccacttctctgtcaaagtgtggcttgcgacagatggtgcgctgggaggtcttcatagacatcggctgcgctgcaaaagcgcgcatcgttgtagaggctggtacctgggcagtcatggcccttgagcg

SEQ ID NO: 3332 - DNA, 126 bp, Glycine max
  Clone ID: LIB3028-012-Q1-B1-F11
ctctaagttgctccttaatttctatgaaataagatcctgagtattattacttagtcatgtaggggcactgaacaatgttgttttcccttttcgaggctttcatgaattatgagctcttgttccatt

SEQ ID NO: 3333 - DNA, 296 bp, Glycine max
  Clone ID: LIB3028-012-Q1-B1-F12
acaccttcaattacctcgtcgacaatggctacacatattgtgttgttgcagatgaatcaattggaagacagttacccatggcttttctagagcgtgtcaaagatgaatttgtgtcaaaatatggtggtggaaaggctgccacagctcctgcaaacagccttaacaaggaatttgggccaaagttgagggaacatatgcagtactgtgttgatcatcctgaagagataagcaagcttgcaaaggtgaaagctcaggtttctgaagttaagggtgtcatgatggagaatattgaaaag

SEQ ID NO: 3334 - DNA, 180 bp, Glycine max
  Clone ID: LIB3028-012-Q1-B1-F2
aaagacttgggtcaacgtgtaaattcttgttttctacatagtcaatgttttagcatattgatatcaataaattgtggaaatagaatattattacttttatttataacttttgagaacaagaatgtttgacctgtacatgtattattatttttgattaagagttgttcgttttgagggttt

SEQ ID NO: 3335 - DNA, 335 bp, Glycine max
  Clone ID: LIB3028-012-Q1-B1-F4
catctctcttcccagttctcacctcaccgctgcatcttcacgtcgtctctaacgagggaaaatgagtcgaggaggtgcagcagcagcgaagggaaagaagaagggtgctacattcaccattgactgtgcaaagccagtagaagacaagatcatggacattgcttctctcgagaagtttcttcaagagaggatcaaggttggtggcaaagctggtgctcttggtgactctgttaccgttacacgtgagaagactaagattattctcacctctgactgtaacttttccaaacggtatttgaagtacttgacgaagaagtacttgaagaaacacaatg

SEQ ID NO: 3336 - DNA, 359 bp, Glycine max
  Clone ID: LIB3028-012-Q1-B1-F6
aatgaaacaaaagtacacaaccctagtactaaatgtgagtgagtaaatcccaatcttaatggttgttgtccaaggctccaaggtccatctcccacacccttcctccctctctccctctccccaccctctcccaacaacctccatcctctttgaaccctcctccctttctcttgccctcacccactctgactcctccctctctctctacccttccttctccccccaaaccctaaccctagccctaaccatcccctcctcttccaaaaccacccataccctacctgctcttcctcctctgtgggtcccaccgtcatatttatagtctcctccccacatagagccggcatcctccttcgcct

SEQ ID NO: 3337 - DNA, 391 bp, Glycine max
  unsure at all n locations
  Clone ID: LIB3028-012-Q1-B1-F7
tacgttgttgaatcttctagctggtgatttggttccttctgagggtgaagttcgaaggagtcagaagttgaggataggaagatattcccaacactttgtggaccttctaacaatggatgaaacagctgtgcagtatcttctgcgtctccatccagatcaggagggacttagcaagcaggaggctgtccgtgcaaaacttggtaagtttgggctaccaagtcataaccatcttactcctattgccaaactatcaggagggcagaaagctcgggtggtcttcacatctatctccatgtcaaatccacacattttattgttagatgaacccaccaatcatctggacatgcanagtattgatgcattggccgatgcactggatgaaatcaccggt

SEQ ID NO: 3338 - DNA, 342 bp, Glycine max
  Clone ID: LIB3028-012-Q1-B1-F8
attcatccaaatttctcaaactcaagctagcctttgggggatatgatagagaagaagacacagtgtgagaaaaaggaaaaaatggaaggtgaagaaactgagatgaaacaacaatccaggttcaaaaggatttgtgtgttctgtggcagcagccctgggaacaagagtagctataaggacgctgctattgagcttgggaaagagttggtgtcaagaaatattgatctggtttatggaggaggaagcattggtttgatggggttggtttcccaggctgtttatgaaggaggtcgccatgtaattggagttattcccaagacactgatgccaagagagattact

SEQ ID NO: 3339 - DNA, 359 bp, Glycine max
  Clone ID: LIB3028-012-Q1-B1-F9
gaaataagagagagagagaaacagaaaacttcagaagaagagcatcaattgctagctccaatatattaccacaccactgcaaaattttctgaagcagagatcattgtccattatcacagaaatgggtgaagaagaagaaaagaaagaagagaccacagaggaaaagaaggaaaaagagcctccagagatagtgctcaaggttgatatgcactgtgaagcttgtgcaaggaaagttgcaaaagcattgaaaggatttgaaggagtggaggaggtgactgcagatagcaaggcaagcaaagtggtagtgaaaggaaaggcagcagaccccataaaggtgtgtgagagactacaaaagaaaa

SEQ ID NO: 3340 - DNA, 348 bp, Glycine max
  Clone ID: LIB3028-012-Q1-B1-G1
tggctgcgcttggggaacaatcagaagaacaagccatggctgcccaacctaaacctcagaaccgacgacccatttctaacatcgtcatcgtcgttgctatgcagacggaggcacttcccattgtcaacagatttcagctcaccgaggaccctcactctccgtttccgcgaggggttccttgggttcgttatcaggggacatacaaagatcttaatataagcttgatttggcctggaaaagatccaactttgggggttgatagtgtaggcacgatatcatctgctcttgtaacgtatgctgctattcaagcattacaaccagacttgatcatcaatgcaggcactgctg

SEQ ID NO: 3341 - DNA, 296 bp, Glycine max
  Clone ID: LIB3028-012-Q1-B1-G10
aataaagcacagaacagttgaagtgaatggcataaaaatgcatgttgcagagaaaggagatggtccagtggtgttgttcctccacggcttccctgagctctggtactcatggcgccatcagattctctctctcagctccctcggctaccgcgccgtcgctcccgatctccgtggctacggtgacaccgaagcaccaccttcaatcagcagctacaactgcttccacatagtgggtgatctcgttgcgcttattgactctctgggtgtccaacaagtgttccttgtggctcatgact

SEQ ID NO: 3342 - DNA, 375 bp, Glycine max
  Clone ID: LIB3028-012-Q1-B1-G11
caattcaaaaaaaataaaaaaaaataaagtgtttggtaccggcaactaacccaggaatagttgtttttcaattagaattagagtttccttacctccgtaaaattccaattctaattagagaaagcaccgacaatactgcgtttgtacaatatgacaatgacaattaattcaaattgccacagatctcgttttgggtctgtcctaataaaatagtagacacttgtagtttgcactttgcactcactatatatagtccagcaacatcgtcaatttcgactttgcacattttaatcttaatcaatccagcatggcctgattataacctagggctgccaatggagccgctaagatctctatttgtctactgcactacag

SEQ ID NO: 3343 - DNA, 359 bp, Glycine max
  Clone ID: LIB3028-012-Q1-B1-G12
gaaatttggaaaaagggttctgaaatcttagctactgactgcgtaatcactgagatctgccgtcatcctgggttggttttgttgacgggtgcttgctggagtaataggattaagtctgtgagtccttccaatacagggatcacttctagaagtgtcagcaggagtggccatgacgtcagcttaaatagcaggagctcatcagcctccatatccgtcgcttctcggagtgagggtgagatcttgcaatcttccaacttgaaaagcttcagctataatgagctaagagcagccacaagaaatttccgcacggatagcgtcttgggggagggtgcgtttggttcagtttttaagggctggat

SEQ ID NO: 3344 - DNA, 392 bp, Glycine max
  Clone ID: LIB3028-012-Q1-B1-E7
ggcgactgctgctagaaccttcttttgttatctcgcaatggctgacttaagccccaagccattaccaaacctataaatacacgccttctttttattcttcttcttcaattcatattcataatccacatttattcatcagtttttcgttcccttcacaaaactcagaaccctaactatatccatggcatcgggtggaacagaagcttttccagatttgggtaaacactgccagcaccgcgattgcaaccagctcgattttcttcctttcacctgcgacggttgccaacagatcttttgtttggaacacagattctacaagtcccacgcgtgcctgaaatccgaccacaacagcagaaaggttgttgtttgccaaacatgttccatgtccatcg

SEQ ID NO: 3345 - DNA, 359 bp, Glycine max
  Clone ID: LIB3028-012-Q1-B1-G2
ctccggtttccatcgatcgggaccgccccaaccacgtgctggcaaaatcgcccgctcagtgtcagttagggctcgatgcgtccatcaggacggtgaaccacgcctccaaatccagctcctccacgcaggattcctccgtcgccgtcgactctgtcaaggccacctccgccgtcgcggatctcccggaggaggaggagccacgcgattccaaggccttctccggcgggaacggcggcggagtggctgggagtgtcgccgggatcctgtacaagtgggtgaattacgggaaggggtggagatcgaggtggttcgtgttggaagatggagtgctttcgtattacaagattcacggaccggac

SEQ ID NO: 3346 - DNA, 177 bp, Glycine max
  Clone ID: LIB3028-012-Q1-B1-G3
cgattatgtatactataggtttaatttgtcctgtgttgtatcatgtatgtacagattgggttttaggaacggggagttcaattcatcaaatgtgtaattattgattctttcttcacccactggtcactggaggtgaataatgcatgtgaagaatcgagtttgtcatgttgatatgtc

SEQ ID NO: 3347 - DNA, 339 bp, Glycine max
  Clone ID: LIB3028-012-Q1-B1-G4
gtggtaacaccgaagaatactgttccccttctaagaactgccatatcaactgctggggaggctgcggcagtggcagttgcagctcgccgcggtgaaagtgcttcgaatgtctccgccacatatcatcactatgagccagagcaacacgggtgggacctgaacgccgtgagtgcttattgctcaacttgggacgctggcagaccttactcatggcgcactacatatggctggaccgctttctgtggtcacgttggtcctcgtggccgttattcttgtggaaagtgcttgcaggtgacaaatacaggaacatgagcaaacacaagtgtgagaatcgtacat

SEQ ID NO: 3348 - DNA, 288 bp, Glycine max
  Clone ID: LIB3028-012-Q1-B1-C8
acctgatcaagcgcttcacttatgatgagtacattggagcctccgtcactctttatcttgacatactcaacctcttcctttccatcttgaggatcctccgggaagcaaataattagtcatcttgaggttgagaggttgagttatgaatcaaattcaaaagactatgttgcttctttatagtataccgtaggggaagtattgtgaaatatctgtgcttctcttgtactcctttacagcttatgatgatacttttaatgacatgaaatttaaagctttacaattgtatgt

SEQ ID NO: 3349 - DNA, 363 bp, Glycine max
  Clone ID: LIB3028-012-Q1-B1-D1
tctctctctctctctctctgaagatggcttcacgcaggctcgtatcttctctgattcgatcctcccttcgtagatctcaatcgaagccctcaatttccgcatcgacatcgaggctcacgtcatccaaccgtgcctcaccgcacggatacttgctgaaccgcgtcgccgagtacgccaccgccgcggctgctgctaccactcctccctctcctcctcctccggggaagaaggagctcggcggcggcgggaagatcaccgatgaattcaccgggaagggcgcgatcgggcaggtctgccaggtcattggtgccgtcgtcgatgtcagattcgacgagggtttgcctccgatcatgaccgcgctgg

SEQ ID NO: 3350 - DNA, 384 bp, Glycine max
  Clone ID: LIB3028-012-Q1-B1-D3
ggagctggaaaaggtataaatctagatttggacgagatgtggatcaaaggattcagtttttggattaaaggtttctcattgctggcctaaatatctgtaatttccgctctggaacccgaactgggatcgacccgcgtcgtctttcagacaaagtatggagatattgaatttggtttctatccaactgttgcacctaaaactgtggaccacatttataagcttgtgcgacttggaggctataacactaaccatttctttcgggtggataaaggattcgtggcccaagtagcagatgttacaaatggaagatcagctccaatgaacgaggaacaaagaatggaagctgtaaagactgttgttggtgaatttactgaagtcaaacat

SEQ ID NO: 3351 - DNA, 385 bp, Glycine max
  Clone ID: LIB3028-012-Q1-B1-D4
atttggccagaaagcttgcaggtgatcctaacttgcactttgtggagtctccagcattggctccatcagaagttctaattgatttagctgcacagcagcaacatgaggccgagcttcttgcagctgctagtcagccccttcctgacgatgatgatgaatcttttgagtaaaattatgccttttgagtcgtgctactgcttatgctacagtatgtaatttggggggtgtaatgttgagagttttggatgccggatttgagtgtcagaaatttaatcattttgctttaatcttaaaagaatctcccaatagtttgacatatccttgtagccaacggctgtagtacgtgcttttgtgttagttggctctcttgaagagacagcggggc

SEQ ID NO: 3352 - DNA, 388 bp, Glycine max
  Clone ID: LIB3028-012-Q1-B1-D5
gaggagtgcaacagagaagaatcacattcgcattctcaatcacatccattcattcactcatccatatcccttctttccagtaacttctctctctagttgatacaaataaaaaacagagtttcatactttacgacacccttttctgcaactgatgatggaaggaagctgaaacagtgaaaaacagcaggaacgaccaccctgtctttgttttttgtatgttgagttgaaactttagagaaagtgaatagtgatatggaggcaaagggtgtgcggttcttagcgtatcaatcaatattttcgagcgttggatctggggacttcgatggggtgaagaaactggtggaggaagtgaataaggaagaaaggtcatcgctctctgatgttatgt

SEQ ID NO: 3353 - DNA, 393 bp, Glycine max
  Clone ID: LIB3028-012-Q1-B1-D6
aattacatagcctcagtaatctgagagagaaacaaaaacaatgaaggtttccattgccaagttccactcccttcccctatgttttttccttctcttggccttcaacacaaaacccctcctagcagcagaaccagagccagtggttgataagcaagggaaccctttggagccaggagtagggtactacgtgtggccactttgggctgatgaaggaggcctcacactaggccatacaaggaacaagacatgccctctttatgttatccgtgacccttcattcattggcaccccagtttcattcttagcaccatgccttgaccatgttccaacactcactgatctaaccattgatttccctgtggtgacagtgtgtaaccagccaacagtgtggag

SEQ ID NO: 3354 - DNA, 392 bp, Glycine max
  Clone ID: LIB3028-012-Q1-B1-D7
cagaaatgttactgcaaacattagctatccctacaatagtccttgtgatattcatatgggtggtacaaccaaagcaacgtcatgggaagattgcaccaggtcccaaggcgttgccaattattggtaacctccacatgctagggaaactcccgcaccgcacccttcaaacctttgcaagaaaatatggacccataatgtccttgaagctagggcaagtccaagccatagtggtttcctcccctgaaaccgctgaactattcctcaagacccatgacactgtttttgcaagcaggccaaagattcaagcctctgaatatctctctcatggcaccaagggcttggtgttttccgagtatagcgcctactggcgcaaagtgaggaaagtgtgcacc

SEQ ID NO: 3355 - DNA, 397 bp, Glycine max
  Clone ID: LIB3028-012-Q1-B1-D8
gccaaacacacatgggattgatccagattcttctgacaatgtatgcactgacgactgttacataagcactggtgatgatctgattgccatcaagagcgggtgggatgactatggcattgcatatggtcgcccaagcacaaacattatcatccacaggctacttggtagaactcaaacaagtgggattgctattggaagtgagatgtctggtggtgtatctgaagttcatgcagaagatattcaattctatgattcatatcatgcaatcacaatacagacttctcctggcaggggtggttacgttagaaacatctatgtctctaacgtgaccttggctaatgtatatattgctattacgttcactggtttatatggggagcatccagatgatgcttat

SEQ ID NO: 3356 - DNA, 381 bp, Glycine max
  unsure at all n locations
  Clone ID: LIB3028-012-Q1-B1-E1
cctcccaccgattcattaacttcacacacagacacggtgtttccaccacaccatagcacatagtactagtagattaaacgccaaagaaataaattactcactttcacgtaaaccataacgtgcttccaccgcaaccaaccacaatgggtgccgttaggtccataacggtgttgctactagtgttatttatggccatgagctccggcgtgcgctcgtgtccgccgtcggacagggcggcgctgctggcattcaaggcggcgctccacgaaccctacctgggaatcttcaactcgtggaccggcgccgactgctgccacaagtggtacggcgtgagctgcgnacaggagaaccgccgcgtcgccgacatcaaccttccgcgcg

SEQ ID NO: 3357 - DNA, 361 bp, Glycine max
  unsure at all n locations
  Clone ID: LIB3028-012-Q1-B1-E10
tgagaatcgttcgagactgcaaaatccaaaaccaaaaccaaacacaacacagcattcgtcattcaccgccttgtctcgtcttcttctgtctccgaacacggaatctctctgaatcgcgggattaagagaggaatatgcaacagaggcttaagttgcagcaacaacaacaagccctcatgcagcaagctttgcttcaacagcagcagatgtaccaccctggcatgctcgccgctgctatgtctcagatggagcctgttccaagtggaaatttgcctcctggttttgatacgtctgcatgccgtantgtttatgtaggaaatattcatgtaaatgttcacgataaacttcttgcagaagtttt

SEQ ID NO: 3358 - DNA, 381 bp, Glycine max
  Clone ID: LIB3028-012-Q1-B1-E11
ctcgagccgcggctctttcaacaatccaaacactagcacgcggcagccgttcgttgctgtctgagaacagcaactccccagttgcttctctagacaaagctgatggccttccttcttggatgaaccatgaggaccgaagggtattgaaggctatggataacaaacctgcacctaatgtcaccgtggctaaagatggcagcggagacttcaaaaccatctctgaatgtttaaatgctgtccctcaaaattttgaaggacgttatgtgatttttgttaaagaaggagtatacgatgagactgtgaccataacaaagaaaatgcaaaatataaccatgtatggtgatggatcccaaaagagcatcatcactggcaacaaaaact

SEQ ID NO: 3359 - DNA, 340 bp, Glycine max
  unsure at all n locations
  Clone ID: LIB3028-012-Q1-B1-E12
gcanaattccctataacgttgttttggttgaaacaacagaacttgtttgttgggggcagggaaggcatttatgtacatggggcagttggactttttccttagagagtgtcccaaagggatgaaaacaatgagcacgggattgttcttgagcacactctctttggggtttttctttagcaccttgttagtgtctatagtgaacaaaatgacagcacatggtaggccatggctcgcagataatcttaaccaagggaggctctatgacttttactggctcttggctatattgagtgctataaatgtggtcttatacttggtttgtgctaagtggtacgtctac

SEQ ID NO: 3360 - DNA, 387 bp, Glycine max
  Clone ID: LIB3028-012-Q1-B1-E2
ctgcacttccttctgattccacttttggtaatataagcccctcctcttcttctcagatctgaaactacttgttttaactttttctattcaacgactccgttccgttctctttcttcttcttcgaaaccctaataagcttctgcacttccttctgattccacttttgcttcaactgggaagatactgtagggcctgggccacctaatgatgagatatccaatttctacataagttgccattgatacttttttaatcaaatggattcagtgcctgctgatgtgtctaattcacatactattaatgacccgtcgaagtcacctccggctaaagagactgacagacaagcttctgcttctgtagcctcggggcaggataattctccacatg

SEQ ID NO: 3361 - DNA, 386 bp, Glycine max
  unsure at all n locations
  Clone ID: LIB3028-012-Q1-B1-C6
ttccctcttgttctatgctttcaagtagtaccaattgggcactttgtttagtgtcttcattttttttttcatcctcatcaaattaaccccctaaacatcatttagctagctagccaaattaattattaattaggcaaataatgggaaacccagaatccaatttgccacccggttttaggttccacccaaccgatgaggagctcattcttcactaccttagtaaaaaggtagcatccatacccttgcccgtttccatcattgcagaggttgatatctacaagttagatccatgggacttaccagctaaggcaacctttggggaganagaatggtattttttttagtcctagagacggaaagtaccctaatggtgcaaggccaaacag

SEQ ID NO: 3362 - DNA, 385 bp, Glycine max
  Clone ID: LIB3028-012-Q1-B1-E3
ttccttttctcttctctgtctaatgggtgccctgagatcacattgaacaatggtgaatgctgtggccgttcttggcagcagtgagggtgtcactggaactattcacttcgttcaggagggaagtggtccaaccaccgtaactggatctcttgctggtcttaagcctggtctccatggtttccatgtccatgccttgggggacactaccaatggttgcctctcaactggatcacatttcaatcctaataacaaggagcatggtgcccctgaggatgagaatcgtcatgctggtgatcttgggaatgttaatgtcggtgatgatggtactgtcagcttcactattactgacagccatattcctctcacggggacaaacaacatcata

SEQ ID NO: 3363 - DNA, 398 bp, Glycine max
  unsure at all n locations
  Clone ID: LIB3028-012-Q1-B1-E6
gcaggaggctcatcccgccttggacaagctcacctccaagatcagtactctcaatttggaacgcgttcgtcaaattaagagccgattagtcgccatcaccggtcgtgttcagaaggtcagggatgaattggagcacctgctcgatgacgacgaagatatggctgagatgtatctctctgaaaagctagccgaacaacaggtcttggatggcgacgtcgtcgtcgtcgacgacgacgatgacgacgacgatacctcttctgccgacaacggcgatcttcttcaacctcacaggaccgctcctgaattatcgttcgacaatgttctcggtagggacagcgcctccttcagtgccgtcnacaagcaacttgatgtcgaggagcttgagatgctcttggagg

SEQ ID NO: 3364 - DNA, 348 bp, Glycine max
  Clone ID: LIB3028-012-Q1-B1-A4
cggctcgaggccgaaccttggcagattacaacatccagaaagaatctaccctccacttggtgctccgtcttcgcggtggtatgcaaatctttgtgaagacccttactgggaagaccattactttggaggtagagagctctgacacaattgacaatgtgaaggcaaagatccaagacaaggagggtattcctccagaccagcacaggttgatttttgcgggaaagcagcttgaagatggacgtacgctggcagactacaacattcaaaaggagtctacccttcaccttgtccttcgtctgatgggaagtatgcagatctttgtgaagaacttgacagggaaaactatca

SEQ ID NO: 3365 - DNA, 378 bp, Glycine max
  Clone ID: LIB3028-012-Q1-B1-A5
gtttaccgcagcaaacactcttctgagttctgagctagcgaggttgcaatggcgattatctccgatttcaacgaagaggagcagaaacccactcactcttcaccaccgcaaccccaatcctcttcctcttcctcttcctcttcgttcagtgctgcttttgaccggtcaaaccctatcgcttttctggagagagtcttccagttcgtctccgaacacagcgactttctggcgacggagagcgccgagaaggagatagcgttgctggtgcgcgccgccgggaagaagaagagggagtttctcaagtcggagagagaaaaggccgagaagaagaagagagaggacctcaaggcctcggaggagagggaaaaatccgacaag

SEQ ID NO: 3366 - DNA, 350 bp, Glycine max
  Clone ID: LIB3028-012-Q1-B1-A7
ttcagggtcagctccagctccgggttcagggccaccaccaggtaagacgcctctcaacatccccaaatttaatcaagcttcatttatgcagtgatagatcatagtaacagagatttcatttgatagactttcatcacctgtccaaaatctcatgaataacatttccaataatctgactaaagaatgttttattattttttcagataagtttatttaatttcttttaataatttttcgaagaattttagtctattacaaaaaaaataaaaaattcaaggttaaatttcagaacaaaattttcatatcatatgcttccattaaattaaaagtatctctattttattgaaaat

SEQ ID NO: 3367 - DNA, 361 bp, Glycine max
  Clone ID: LIB3028-012-Q1-B1-A8
atccgcagctgctgttattcgcaccgcaaacaaacagtgagccatggccgtcggaaagaacaagcgcatctccaaagggaaaaagggtggcaagaagaaggcagctgatccctttgccaagaaggattggtatgacattaaggccccttctctttttcaagtgaaaaatgttggcaaaaccctcgtctctcgtacgcagggtaccaagattgcttctgaaggacttaaacatagagtgtttgaggtctccttggctgatcttcaaggggatgaggatcatgcattcaagaagattaggttgagagctgaagatgtgcaagggaagaatgtcctgacaaatttccctgggaaatggattcac

SEQ ID NO: 3368 - DNA, 349 bp, Glycine max
  Clone ID: LIB3028-012-Q1-B1-B1
attcgttccaagtatgtggagaaaagatgggcttcaaaaggtggactacagccagcttcaaagtcagctgaaataatctttaactcgaatgaatcaccagctgctagggccaagagtgccactcagaggaataggagattgtctcttgaggaaagcattcttgtgaaacatgtggcacaaattcggcctccagtcacgagatatcatgagggctcctcagattttcaaaagaattcaccaccaccaccattaaggaagccatctgcatcatttgattttgactacactaggggaaagaacaatggtattgttgatcattttgacttgttttccatccatgatgataaac

SEQ ID NO: 3369 - DNA, 392 bp, Glycine max
  Clone ID: LIB3028-012-Q1-B1-B10
gtgaaacagctggacaatctaatttgtttggaactattacgaaaggcctggtcgactcttctaagaatgcagtgaaagctgtgcaggttaaggcacggcatgttgtttcacagaataaacgcagataccaggaaggaggttttgatttagatatgacatatatcactgaaaacattattgcaatgggattccctgctggcgacatgagctctgggtttttcggctatgttgaaggattttacagaaatcacatggaagaagtgattaagttttttgaaactcaccataaggataaatacaaagtttataatctttgttctgagcggttgtatgatgcatcattgtttgaggggaaggtggctagcttcccatttgatgcacacaattgccca

SEQ ID NO: 3370 - DNA, 356 bp, Glycine max
  Clone ID: LIB3028-012-Q1-B1-B11
ctctctcatcactacctctgcatttttctctcgctctctgccttccatcaccctcgccatttcccttcccaagatagtagaagatggcagacgctgaggatattcaacctcttgtttgtgacaatggaacaggaatggttaaggctggttttgctggagatgatgccccacgtgctgtgtttcccagcattgtaggtcgtcctcgtcacactggtgtgatggttggcatgggccaaaaagatgcatatgttggtgatgaggcacagtctaagaggggtattttgactctcaagtaccccattgaacacggaattgtgagcaattgggatgatatggaaaagatttgggatcataac

SEQ ID NO: 3371 - DNA, 373 bp, Glycine max
  Clone ID: LIB3028-012-Q1-B1-B12
aataaatgctcacaaatcaatcaaagactgtccttattagttattacctttttctctctgtccatgtccttccctcaaaactcaaatgcagtccatgcgaaaccttcgtgcaactcatggccttccactttgtctctctggaattactcaccctcgtgctctccctaaagagatggcagatcatgagcgtaggaggaaggccatgaagaggcaaagaggtgctatgcacacaaatcaacaaaagggtatccacagaaacaactttgaaagtgattttgtggaatatggagatcttgatgacgtcatcctgcatgatctgtttcatacttacctggatttaactgcaaaagctgcatagcgccataacctgtta

SEQ ID NO: 3372 - DNA, 351 bp, Glycine max
  Clone ID: LIB3028-012-Q1-B1-B2
gcgcccagatcaacgaactggctctcgggttggaaaatagccagcaacggttcttgtgggtggtgaagagcccaaacgatgcaatagccaacgcgacttacttcaacgcggagagccacgaggatcccttgcagttcttaccagaagggttcgtggagagaacaaaaggaaggggctttttggttaagtcatgggctccgcagccacaggttctggcccatcaatcaacgggaggattcttgagccattgcggctggaactctatactggagagcgtggtgaacggcgtgcctttaatagcctggcctctgttcgcggagcagatgaccaacgcgtttatgctcatgcatg

SEQ ID NO: 3373 - DNA, 382 bp, Glycine max
  unsure at all n locations
  Clone ID: LIB3028-012-Q1-B1-B5
cgctaaattactttctttccattttccttcgttttctctctctttctcagtttctcagtttctcagtcatcaccatcgcagcagcaagatgtggaaccaaccattcggaaaaaccgatttggaaagcggttctcggcctctgtatccgatgatgctcgagagccctgaactgcggtggtcgttcatcagaaaagtgtacgccataatcgccatccagttgctcgtaaccatcgtcgtcggcgccgtcgtcgtcaccgtccgcccaatcagtgtcttcttcgccaccaccggcgccggactggctctctacatcgtcctcatttttgttccctttataacgttgtgtccactttactactattcccagaagcatcncgtcaat

SEQ ID NO: 3374 - DNA, 356 bp, Glycine max
  Clone ID: LIB3028-012-Q1-B1-B7
caaatataaagacagaggtcttgagatactggcatttccatgcaaccagtttctgaaacaagagcccgggagtagccaggaggcagaggaatttgcctgtacaaggtacaaggctgagtatcccatttttggaaaggtacgtgtcaatggacctgatacagcacctgtctacaaattccttaaagcatataaaacaggatttctgggtagtaggataaagtggaatttcactaagtttttggttgacaaggaagggcatgtcctcgctcgttatggtccaaccacctcaccgttgtccattgaaaatgacatcaagacagcattgggggaggcttgaaagactctacaatcacttc

SEQ ID NO: 3375 - DNA, 363 bp, Glycine max
  Clone ID: LIB3028-012-Q1-B1-C1
gagaaggcaagatgtcgaagagaggacgcggtggttcggcggggaacaagttccggatgtcgctgggtctgccggtggcggcgacggtgaactgcgccgacaatacgggggcgaagaacctctacatcatatcggtgaaagggatcaaagggcgtttgaaccgtctcccctcggcttgcgttggcgacatggtgatggccaccgtgaagaaggggaaacccgatctgaggaagaaggttttgccagctgtcattgttcgccagcgcaagccatggcgccgaaaggacggcgtctacatgtatttcgaagataatgctggtgttattgtcaatcccaaaggagaaatgaaaggttctgctatca

SEQ ID NO: 3376 - DNA, 358 bp, Glycine max
  unsure at all n locations
  Clone ID: LIB3028-012-Q1-B1-C10
acttganataatgccaagtatactaaatgtcttagtcttaagaagggggaaaaactggaattccaatgattcttaatttcttacaatccaatctgcaaactgagtgagatatataacttgtttttgatttcttcctcatcattttgcatatacaaagattaaaatggaagggttttttggaaattgcttcaatatgattttgctgatgttgtgcttcaccaacttgagcatagcttttgctcaaagtcatatgaatggatttggagagcagccactggccaagattgccattcacaagaccgttttggcgctacacagttctgcttccattatagcagtcccttttgtgctangaact

SEQ ID NO: 3377 - DNA, 313 bp, Glycine max
  Clone ID: LIB3028-012-Q1-B1-A3
gtgatggcgcagagagctcaaccagtattggccacagatgttttcaagatgggaaacatccaatggaagcaattcaatgtggatacaatcattgcttcattctcacctcaaaaaccattgctaatttttacaccaactgttcctgtcgcataccctgtaatattgttcgtccatggctttttcattcgcaatttctactactcaaagctcctagcccacatagtctcacatggattcataatcgttgctcctcaactgttttccaatgggcttcctatgtatggacccactgaagtggaatatgcaggaaaag

SEQ ID NO: 3378 - DNA, 274 bp, Glycine max
  Clone ID: LIB3028-012-Q1-B1-C4
attgaaaagaagaagaacctgttttcggaactaaccgacgacatcgttctgaacatcttctacaaactcgaagacgatcctcgccactgggctcgcttagcctgtgtctgcaccaaagtctcttccctcgttagggatttctgttggaagatcaaatgctccctcaccatccctcaagatctcctctccgccgccgcctctgagccccctctcgcgctccacaaactctccttctgctgccccggcctcggccatgccgggcctcctgttcgac

SEQ ID NO: 3379 - DNA, 412 bp, Glycine max
  unsure at all n locations
  Clone ID: LIB3028-011-Q1-B1-G6
atccataatttaggtgccacactttggtgttcttctttgcaattccccatcctgtgcctcatgactctgactactcaatcaccatggtggtccaaactttgtcccttcccctctagtaaattttttagctggaccctcctccctcgctttgtcgcatcgcatcgggatatggtctctttaacatgtatgtatgttaatgttaatgtcatcactaaaagtaaaaacagaggcttcgagccattttatatatagtgtgagatcatgaaagtaagccttagttattattctctattctatgatctattcaagccaagagttagacaacttctgttcccaagataagggggaaaagatagagaaaaaaaaatgcaagtgagtctcaaagggttntggtttcttcttcattttgtga

SEQ ID NO: 3380 - DNA, 411 bp, Glycine max
  Clone ID: LIB3028-011-Q1-B1-G7
gtccgaagatcaaaaccctctgatggggcatcgtatttgattggtcggtcatagcaattagcaactccacccttcaaacttgaaaggaaaaaaggactttggttatccacgccacaccacgctgtaattaactaaactttctagaatcttcttctctcgccatggccgcgccgtcgtcctccgccgcggcaaacatcatgctggcgatctccgagaagaagacgaacagtgtagatctgtatcgccctctccgcaactacgtggccttccactactcggagcgagaggcgcagaacctcgaggatgatctccaaaccctgaagcaactccgctccgatgtggagcgccactccgattcatcgctcccggcgcgccgtgatcccctccaatcctactacaaatctctctgcc

SEQ ID NO: 3381 - DNA, 296 bp, Glycine max
  Clone ID: LIB3028-011-Q1-B1-G8
agcaggtgtttgaaggaaccaacattcaagattctggaacagaggcagctgttgttgctgctgctgtggctgcggctgcccgtttgactgatgcagacttagtaagatgaatttagatctaaaagccatagcaatgtcttttaacggtacccagcacaagtgcaaggcttgtgacaaaacggtttatcccgttgatcagctttctgctgatggtactgcttatcacaaagcttgcttcagatgctctcactgcaaaggaatattaatgctgaataactattcctcaatggaaggtg

SEQ ID NO: 3382 - DNA, 371 bp, Glycine max
  Clone ID: LIB3028-011-Q1-B1-G9
tggggtttgaggaaactgagctaaggcttggactgcctggaaacgtaggaggcactggcactgaagaagtgctcatcaggaagagaggtttctctgagactgaaactgaaactgaggaggatgagtctgctaccactgtggatttgatgcttaatctttcttctaaggaagctgctgctgctgcagatccaactgataagcacaagactttgcctaaggagaagactcttctgcctgcagatcctgctaagcctccagccaaggcacaggtggtaggttggccacctgtgcggtccttccggaagaacatgttagctgtacaaaagagcgtcggagaagagaacgagaagaacagcagcagccctaatgca

SEQ ID NO: 3383 - DNA, 424 bp, Glycine max
  Clone ID: LIB3028-011-Q1-B1-H1
gctcaaatttctcaaacaaatgggccactaacacaacaactttcacttaccccctggattcaaattcaatccaacagatgaagaactcgtcatccactacctttgtcgcaaatgcgcttcgcaacatatcgcggttcccataatcgccgaaattgatctgtacaagtacgacccttgggaccttccaggaatggctttgtacggagagaaagagtggtattttttcacgccgagggaccgcaagtacccgaacggttcgcggccgaaccggtccgcgggaaccgggtactggaaggcaaccggagcggataaaccagttggtaaaccgaaaccggttgggatcaagaaagcgttggttttttacgctggaaaagcgcccaagggagagaaaactaactggatcatgcacgagtatcgtcttgca

SEQ ID NO: 3384 - DNA, 313 bp, Glycine max
  Clone ID: LIB3028-011-Q1-B1-H11
aagaaatggaagcaaagtttccgcgttttgtctttcataaaaaaaatgttaaattattattttctatgataggattggtttcttgtcttttttctcttgtttaagaatttcggtgtattttaacagttgtaaagcactctgcgctctctctgcatgatcatgtacaactacaagcatgctctctgtagttttcaacctgctgcgcttgcaggggttgtaaaactaatcaatataattaaataaattacattctgtctctctaaaacaaaaaaaaaaaaaaaaaaaaaaaaaaaaaaaaaaaaaaatagggaag

SEQ ID NO: 3385 - DNA, 385 bp, Glycine max
  Clone ID: LIB3028-011-Q1-B1-H12
ctcaaattgaattcctatctagtacttaacataatgcagtgagattcacactcccaacgcttccactttctcccttaaatatcttcattcatctcaacaccaccaccacttccccacttttgttactcagtatgcttggagcccttctcctcaacgctaacttcaagattcatttctcactcatatcatgctaagcccgtgtccccttacccgtcatgcccgcatcgctcagaatgccctctccccaatactcccactgggcctccttgcaggccgacattgaagcccacctcaaacaaaccattcccctcaaagaacccctcgaggtcttcgagcccatgctccacctcgccttctccggcccccggaccaccgttccgggcct

SEQ ID NO: 3386 - DNA, 211 bp, Glycine max
  Clone ID: LIB3028-011-Q1-B1-H2
attctcccatttcctctcagaaccctcgatcactcccacgcgctcctatatcctctccttcaccgtcgctctctccaacgatcacaacaacatcgtcatcccatggcaaacgccgcatctggtatggcagtccatgatgactgcaagttaaggtttttggagctgaagacaaagatgacacaccgtttcatagtttttacgattgaggagc

SEQ ID NO: 3387 - DNA, 412 bp, Glycine max
  Clone ID: LIB3028-011-Q1-B1-H5
aaggatttcaactttaggctccatctaaaaaaaatggctggtttggctagcaatcttcctctaattgttatgataggtctgcaaattcattatgcagcacttgccatattcacaagagccgctctcttagatgggttgagtacaacggtgtttgtagtatacaggcaaggcatagccactttggctttggcgcctatatttttctctcctaagaggagacaatcagtgaaagattctttgggattcaggagcttctttttgatgtttgtgaccgctcttgttggagtcacggcaaatcagaatgcatacttcaaaggattattttatgcatcttctactgcagctaccgctatgagtaatctgataccggcattaacgtttgtaattgcagcaattgcgggatttgagaaag

SEQ ID NO: 3388 - DNA, 347 bp, Glycine max
  Clone ID: LIB3028-011-Q1-B1-H6
ctcgcactttttctcattcacaccgacacacgcattccccccatacgccgtcgttttccaaagcttcgcgccttcagatcgaatccacattcccatcaatcagcactggagtcgctccaagtgctgaagcctccctccccctccgccgccggccagattcgcttcggctcgccttcctccgccgaactcctcgccaccgccgagctggatctcgaaaccaccaaaatgctgaaacgctccggccggcccccgccgccgacgccggagtcgctcaccgacaagatctaccacctccggggtgcgtttctgatggtggcggtgccgctcctcctcgtcacgctcgtgct

SEQ ID NO: 3389 - DNA, 407 bp, Glycine max
  unsure at all n locations
  Clone ID: LIB3028-011-Q1-B1-H7
aaacgacattcattcatctatggctacccttattgctcccagcaaccactctccccaagaagacgctgaggctctcagaaaggcttttgaaggatgggggactgatgagaaaactgtcatagtaatattgggtcatagaactgtttatcagaggcagcaaatcagaagagtctatgaggaaattttccaggaggatcttgtgaaacgcctagagtctgagatcaaaggagactttgagaaagccgtgtaccgatggatactagaacctgcagatcgtgatgctgttttggccaatgttgccatcaagaatggcaaaaactacaatgtcattgtggaaatcgccactatcctctcnccggaagagcttttggccgtgagacgtgcttatctcaaccgctacaagcact

SEQ ID NO: 3390 - DNA, 339 bp, Glycine max
  Clone ID: LIB3028-011-Q1-B1-H8
gcctcatgtttccgtttccgtttcaatttccactcacaggctttaaccttaccagctcgagataagacatggaccggatcaagcgcccaaggagtccgggagaggacgaagctctgcagaagctggtggagaaacacgggcccaggaactgggcactgatcagcaagtccatcccgggccggtccggcaagtcgagcatgctccggtggtgcaaccagctgtccccccagatggagcaccgggccttcacggccgaagaggacgacaccataatccgggcccaggcccgcttcggcaacacgtgggccaccatagcccgcctcctcaacggcagaaccg

SEQ ID NO: 3391 - DNA, 407 bp, Glycine max
  unsure at all n locations
  Clone ID: LIB3028-011-Q1-B1-G5
ctcctacccactgaagtcgaacccctatttttcctctccctaatggcttctcaagttcttcttcaggcactgtttgcccccaagctaagtttcccttcttcttctcgtaacgtggcgttaatttctagggttccttccaccccaatttcatggcgttgcactcccctcattgctaagcctagtttcgtagtgagagctgacaccaacctcgatggcggtggtgaagccaccgaggatgttccttcggataatgctgaaaaagtttcggaaggcgaagcagaacaagtttcggattctgaagctccgaaatcgcctagaaaaccccgagtcaaactcggagacattatggggatattgaatcagagggcaattgaggcatccgagaagcanagaccaactccagacat

SEQ ID NO: 3392 - DNA, 353 bp, Glycine max
  Clone ID: LIB3028-012-Q1-B1-A10
cttcagcaactgcgattttggatcggaacctcttctgcggcgtagcaatgggacactccaacgtttggaattctcacccaaaaaactacggtcctggttctcgcacttgccgagtgtgtgggaatccacatggattgatcaggaagtatggccttatgtgctgcaggcagtgcttccgtagcaatgccaaggaaattggcttcatcaagtatcgctaaaagagctgttgtcacctacggaccaatattatgttctggcactaggatgttttgaagatgttatgtttgaagaaacttgagacttgtttttttcatctattttattatcagacataatgtgtggaacgaagaata

SEQ ID NO: 3393 - DNA, 330 bp, Glycine max
  unsure at all n locations
  Clone ID: LIB3028-012-Q1-B1-A11
cagactgcaattgacaacttaatggttcaacaccttgatggaactgttaacaaatggggttggtgcaagcaaaagctaggagcaaatgccatattggcagtgtctcttgcagtctgcaaagctggtgctagcgtcctgaaaattcctctttacaagcatattgctaatatcgcgggtaacaaaaagttggttttgcctgttcctgctttcaatgtcattaatggtggatcacatgctggaaacaaacttgctatgcangagtttatggttcttcctgtgggagcttcctcgttcaaggaagccatgaagatgggtgtagaagtgtatcac

SEQ ID NO: 3394 - DNA, 342 bp, Glycine max
  unsure at all n locations
  Clone ID: LIB3028-012-Q1-B1-A2
atttgtttttctatagagaaccagaggaggctaagcaacaagaggaggaggaagctccggcaggtgattatgccatcacagatttcaatgcaggtgctattgctgctgatggccagtggcctggtacaattgatcaatcatggagtgatgcagttccacaacctattccagcagcacctggtgtcaactggggggcacctgcagaagcacctgctgctgttgcagaaggagattggggtgaagctgttccaccaccacaacaaatccctgttcctcnctctggaattgactctgtccaaccaactggctgggaataaactagtgttttttgatgctatgatt

SEQ ID NO: 3395 - DNA, 359 bp, Glycine max
  Clone ID: LIB3028-011-Q1-B1-F10
catcaatgcccctcaatggtatgatgctgggaaatcggagtactttgcttcatcgtcgaccctctttgtgatcgagttcatcttgttccactacgtcgagatccggagatggcaggacatcaagaaccctggctctgtcaaccaagaccccatcttcaagcaatacagcttgccccaacatgagtgtggataccctggtagtgtgtttaaccccttgaactttgcacctactttggaggccaaggagaaggaacttgccaatgggagattggctatgttggcattcttgggattcatagttcaacacaacgtgacaggcaaaggaccatttgagaacctattgcagcacctctctgacc

SEQ ID NO: 3396 - DNA, 331 bp, Glycine max
  Clone ID: LIB3028-011-Q1-B1-F12
tcccctcggggaattccaattccacattttcaagaaataaggacgcaaaaatgttcatatatgaattggaattatttgttttcttattaagccgatcctgaagccaaaggaaatgagatcggaattcctcggggaattccaattccacattttcaagaaataaggaggcaaaaatgttcatagatgaattggaattatttgttttcatactaggcctatcctgaaaccaaaggaaatgagatcggaattcctcggggaattccaattccacattttcaagaaataaggaggcaaaaatgttcatatatgaattggaattacttgttttctt

SEQ ID NO: 3397 - DNA, 410 bp, Glycine max
  Clone ID: LIB3028-011-Q1-B1-F3
acattctccattccacaacatcaatgttctgatcatgtcggggaagaggccccggccaatgatcggaaagttgtcggagttgttggtctcgagaggccgcacggtggcacttttggacaccactggaagcccaagaggcccattagacatgaagatgatgcaatcaccaagaggcttaaaaaattatgatcttggtggcgttggtcttggaattgtggtggctcttgataaatccaataacgaggttgctgcacgtgaagttttgcccaaacacaccgtttgcacctccaatttgaaccggtccggcccaattccggttcactacaccaaaaacccagatgaatttgatgtcgaggaatacacctatgtgacatgccgcgtacctaacaaaacgttcactaaggtatact

SEQ ID NO: 3398 - DNA, 82 bp, Glycine max
  Clone ID: LIB3028-011-Q1-B1-F4
attacatttttgttaagcgcagcgagtttcaggactttgctgcgttgtgttgctttggtttattaaatgtcaactttctatt

SEQ ID NO: 3399 - DNA, 412 bp, Glycine max
  Clone ID: LIB3028-011-Q1-B1-F5
cggctcgagcggctcgagcggctcgagagggaatcgaaggatctctctctctcatcacatgatcattcagcgagcaatagcatagtgtgaaatttgagtgagcgagcgaggaatcggaagaaaacgaaaccctaagaagaagatgccgaagaagatgggggtgaacacgaaggcggatgcggcaagggcacgtaagagcgcggtggatacggagcgcaaggagaaggagactcgagagaaggaggaccagtactggcgagaggcggagggttcaaagtcacgcgccgcgaagaagaaggaggaagaggccgaaaagagggcggaggcagccgcgcggaaagcggaggcgcgtcggttggcggagcaggaggagaaggagctggagaagtcgatgaagaaagtggacaagaag

SEQ ID NO: 3400 - DNA, 412 bp, Glycine max
  Clone ID: LIB3028-011-Q1-B1-F6
tgaaaaggaaaaccctaagagatgaagagaactcctatcttgttccctctcttctttcttctttgtgccttcacctcatatctaccttcagccaccgctgatgatgatcatgtgtacgacactgacggcgataagcttcaatacggtgtcaattatttcgtgttgccagtgataagaggaaatggcggtggaatacaagtagcaaaagcaggaaacgaaacttgccctctgactgtggtgcaatctggcaacgagctctctgaggggttaccgataaagattgcatctcgatcagcaggagtcgctttcatcacccaaggccagcttttcaagagcattcagttcggtgtgtttccatccacactcagaccaggggtgtccccaggtccaattccttctaagtgggacccac

SEQ ID NO: 3401 - DNA, 361 bp, Glycine max
  Clone ID: LIB3028-011-Q1-B1-F7
gagctgagagcatcaaggaatcgaagaatagaagattcatttttttttctttttgatatggaagctgatgtttctattatttttgttgcgttttcaaaaccctaaattggagaaatcccaatttctccttctgtctttctgctttggatgtttttcaaccaaaaaattgtgcttttcaaatcttttgctctgatgggtacttcaaatcttctcttgtttttctctctgatgagcctgtgtgctatggcggcttccaaggtggtgcttattgggaataatatcactctctcctttgatgatattgaagctaattttgccccagcagtcaaaggttctggaaaatatggggtcttatatttgg

SEQ ID NO: 3402 - DNA, 411 bp, Glycine max
  Clone ID: LIB3028-011-Q1-B1-F8
aaggacctttctctttattgcagctgtataagtgggatgcatttggatattttcctccagatctcagaatatggagtgtagatgagacacaggataactctatattcttaactgatgtgctgagtgggaagtgtacaaataatgtgtcgctgccaaacaacagccaacagctgtctttgggaaccaatagtacattggaaaataaagataatggtcaggatggtggtgagaatgagaacaatctgtctaggaatgaaaattctgcaaaccatcaaattgttgagcgctgtgaggagcaaaaagtgtctgatacttgtacacaatctaatggtaaagatgaatctgttaggagcaatggttggaactctcagtctccaggtttgactatacaagcagatgggaataacaatg

SEQ ID NO: 3403 - DNA, 368 bp, Glycine max
  Clone ID: LIB3028-011-Q1-B1-F9
tggtggttgtagcacttcttcttctggcggaggtggggcccatggctgaggctgtgacatgcaccccaacagagttgagtccgtgtcttccagcaatcacttccggtgctaaaccttccaatgcttgttgcacgaagctgaagcagcaaaaaccatgcttatgtggctacctcaaaaacgctagcttgaagcagtatgttaactctcctaatgcccgaaaaaccgttgcttcttgtgggattccctttccaacttgttaattaattaagccttcttataattaaagtgtgggatatatatatatatatagataaacagttaatttatacacactttgatcctacaaagcatcttgacacaagcattca

SEQ ID NO: 3404 - DNA, 409 bp, Glycine max
  Clone ID: LIB3028-011-Q1-B1-G1
attagtttcaattatacaggcaagaaataatgcccggatattgatctctggctcattgagcttgttcagcaaccgatttttcaggtcaggtgtgcagaaggctgggagtccaaccaaacatgagaagtcaggtaatgagcagttcttgaatgaacttagcacatggattttccatgaacgaggtcacctcaaggcggtgaatgtgcaacaccacaaagttggggaagctaatgaaccagccatctatcggatcaatgataatttggaatactctgttgaagtttatgagtggtctgggacagcatgggaaccttacgtagctgatgatgttcaagtgcaattttacatgatgagcccctatgtcctgaagactttatcaactgatggcaagggccgttatttcacatca

SEQ ID NO: 3405 - DNA, 358 bp, Glycine max
  Clone ID: LIB3028-011-Q1-B1-G10
gttcttcttctttgtcttccatttccaattctctgtgtagaagccatgtctaagggtcctggtctctactctgacattggcaagaaagccagagatctcctgttcaaggactaccacagtgaccagaagtttaccatcactacctactcacccactggagttgctataacatcctcggggaccaagaaaggtgacctttttgtggcggatgttaacacccagttgaagaacaagaacatcaccactgatatcaaagtggacaccggttccaatcttttcacaactatcactgtcaatgagcctgctcctggtctcaagactatttttagctttagagttcctgatcaaaggtctggaa

SEQ ID NO: 3406 - DNA, 388 bp, Glycine max
  Clone ID: LIB3028-011-Q1-B1-G11
cggctcgagccaattatgacagacaaacatttcatgttgatgctggttttattgatcttacaatgggaagtggacaagggcatcacaagcgtaagagccctggaattccttcagtctacgagggaggcagtactagtagatactttaatgctgggagttcaactgatcttcctatatcttcagaattgtggcaggagaagccaaatattgattctcaatatatgccctgggatcattttactatgacacccacattcagaggtactggcctttcaattaagggtgagggttctttgcggaatgtgaggagccgttctacacttgatttggattccaatctgtctaggacccatttatcaagtaatcattcacacaattcctaccctac

SEQ ID NO: 3407 - DNA, 392 bp, Glycine max
  Clone ID: LIB3028-011-Q1-B1-G12
aaaatgcccactttttttcttccaacgctcctcctccttctcatagccttcgccacctctgtctccggccgccgtgacctcgtcggagactttctccggctgccctccgaaactgataacgacgacaacttcaagggcacccggtgggccgtcctcctcgccggttccaatggttactggaattacagacatcaggctgatgtttgtcacgcctatcaaatattgaggaaaggtggtctgaaagaagaaaatattattgtttttatgtatgatgacattgcattcaatggggaaaacccaaggcctggagtcatcattaacaaaccagatggaggtgatgtttataaaggagttccaaaggattacaccggcgaagatgttactgttgataa

SEQ ID NO: 3408 - DNA, 303 bp, Glycine max
  Clone ID: LIB3028-011-Q1-B1-G2
cttttcagctttcattggtgtggcctagctgttttctcaatgagaaagccttcatctctgcaaagcgcacttttgcgctttggggttcccttgttgcttgttatcaccttctgttatgctacttctactgctgcagcaacaactcaagtttcacggaatgaatagctgccaaagacaaacctacatgggcatgatgaagaagcacaattcggattttttcatcataaaccagtattcaagaaacatattctaattccagtatataaacctgtaccaaagccatttccagtgtctaaacctata

SEQ ID NO: 3409 - DNA, 406 bp, Glycine max
  Clone ID: LIB3028-011-Q1-B1-G3
atagaaagcacatagaagagaaagaaagaaaacaaagaggagaaagaaagtagttgaggaagatacaaacaatttttgcagattgttgagaatgcctttcaagaagcctcatcacacctcagacaagaactacataacaggggacgacggaggcaagttcgagatacaacctagaggactcaacattgtgtggggaaatgattctcgatactggaaaattccagaacaaggtcctgcggagctgatccaagtttcatggttggaggtatccggcgtggtaaacttaccaggtgtcaagaaatatagggttgaattcgaagtgagagttaaagacgatgggttcggttggagtggcacggacgtgctagtgatggctaagattgggaaaacgggaaaatatacgtat

SEQ ID NO: 3410 - DNA, 386 bp, Glycine max
  Clone ID: LIB3028-011-Q1-B1-E9
gtctaacttttgaagaattctttaaccaccctttccttgctcagaagcaaacagaacgggatgagtcattgaggaataaaagttcttcaaggatggatggtgggttttgttctacagtgtctgatttgagaagaaccgaggaaaattatcaagaagattgtttgcctttcatgttagatgacgactctagtggccccgaggggagttcatccttttcaaggaagaagtcctcaatgaagtcgacctatggatttgatctaaatgctaaactagataaagcagagtcatcatctcctatttcaggatttggtagtatgacacaaagatctgaaaacactactaaaagattggacaaccatacaatttcaagaaatctcactgaatct

SEQ ID NO: 3411 - DNA, 384 bp, Glycine max
  Clone ID: LIB3028-011-Q1-B1-D10
catcgtgctagtccttacactccaatatcaccagcagctgctgaacaacctccttgtttcgattgtgaagtaccctcacctgcaccttctatggtgcctgcgcatcctccagatccctgtctatatagtggcttccttcatcatccaatcccttcgccaaaatcttattctaaaccatcctttccccctgattattcacctgctgctgcccctacctcaaattctgctagccacaccagtgaggaagcttctgatccgtctcgtgaagccgaggtgtcccatggatccaagcttcggcagggtgaagagacgtctaataaactggtgtctcatctacttgctccatcctctttatcttcagcgagtggtgatttccgtggggaa

SEQ ID NO: 3412 - DNA, 378 bp, Glycine max
  Clone ID: LIB3028-011-Q1-B1-D11
ctcattttcattatcttaccactttcaattccaaattcactctcagaaattagaatggctagccaatcaaacactaaatcagttcacgatttcacagttaaagatgccaggggaaatgatgttaatctcgccgattacaaaggaaaggtccttctccttgtcaatgttgcctcacaatgcggcttgactaattcaaactacacagagcttaatcaattgtatgagaaatacaaagggaaaggacttgaaattctggcattcccgtgcaatcagtttggggctcaggagccaggaactaatgaagagattgtggagtttgcttgtactcgcttcaaagctgagtttcccattttcgacaaggtggatgtgaatggtgac

SEQ ID NO: 3413 - DNA, 382 bp, Glycine max
  Clone ID: LIB3028-011-Q1-B1-D5
gagcttgctgtgccacctctgtgttcataccttcttttcacaattaccgtatttggtcttttctgggacttggaatgaccacttacactgcttggtacttggcaatagcagcccttattcatggccaggcagaaaatgtgacacacacgggtccaacgaagctagtgctgtacttcacaggagccaccaacatactgtacacgtttggtggacatgcagttactgtagagattatgcacgccatgtggaagccacagaagttcaagtacatatacttgctggccactttgtacgttttcacactaacgattccttctgctgctgccgtttactgggcttttggtgatgaacttctcaatcattccaatgcattctctctcct

SEQ ID NO: 3414 - DNA, 408 bp, Glycine max
  Clone ID: LIB3028-011-Q1-B1-D6
gaaaaaaaatgggttcttctctgtggacctgtctgattttgttatcacttgcttctgcttccttcgccgccaacccaagagcaccaattgatgtgccatttggcagaaactatgtgcctacctgggcctttgatcacatcaaatacctcaatggtggttctgagattcagcttcatcttgataaatacacaggtactggcttccaatcaaaagggtcctacttgtttggtcacttcagcatgtacataaaattggttgctggtgattcagctggcacagtcactgctttctatttatcatccacaaactcagaacatgatgaaatagactttgagttcttgggaaacagaaccgggcaaccttatattttgcaaacaaatgtgttcaccggtggcaagggtgacagag

SEQ ID NO: 3415 - DNA, 235 bp, Glycine max
  Clone ID: LIB3028-011-Q1-B1-D7
cctctacattgcttccatttgctacggacgcacagtttcttgaccccgtaaacgtggctgctgagaagcacgatccgccgaaatatttcaagtccaggccccaagaaattttgatgacaaaagttttaatattttgtatgtagcagaatgaatgtctatactgaaacaaactaaaataaccgaagtgccattcgtgtgcaatttgttttatgttaatgattagtttaagttatac

SEQ ID NO: 3416 - DNA, 386 bp, Glycine max
  Clone ID: LIB3028-011-Q1-B1-E11
gatcgagataactagaaacagtgtgatgaaaatgaaggtccttgttttcttcgttgctacaattttggtagcatggcaatgccatgcgtacgatatgttccctctccgaatgaacactggctatggtgcccgtactccggaggtgaaatgcgcaagttggaggcttgctgtggaagcacacaacatctttggctttgagaccattcctgaagagtgcgttgaagcaacaaaggaatacatccatggcgaacaatatagatcagactccaaaacagttaaccaacaagcttacttttatgccagagacctcgaagtccatcccaaggacacatttgtgttcagtatagatggcaccgtactctctaatattccatactaacaaaaac

SEQ ID NO: 3417 - DNA, 220 bp, Glycine max
  Clone ID: LIB3028-011-Q1-B1-E12
cattcctttactgaagtcttacttgaaggatgggtgagaccttgttttcctcgtcactagaattttcgtagcatggaaaggccatgcgtacgatatgtgccctctccggatgaacactggctatggtgccagtactcctgaggtgaaatgcgcaggttggtagcgtgctgtggatgcacacaagatctttggctttcagatcaatcctgaccattgcgtt

SEQ ID NO: 3418 - DNA, 378 bp, Glycine max
  Clone ID: LIB3028-011-Q1-B1-E5
cacagttagtacaaaaaagggttacttcagcttccacatatcttgaagaattgatcaatgggcaagtctgtagttgagaagctactttggatggcaattgtgtgcttggtgctgggtgtaatttccattactcccaaggcccaagcagcagtgacatgcaaccaggtggtgagcaacctcaccccatgcatttcttatgtgctcaatggtggcaaaaccgtgcctggcccttgctgcaatgggatcaagaccctctttaacctcgctcactccacaccagaccgccaaaccgtttgcaagtgcataaagaacgctgttagtgcgttccattatggcaagtccaatgtggaccgtgctgctgctcttcccaagcagtgt

SEQ ID NO: 3419 - DNA, 407 bp, Glycine max
  Clone ID: LIB3028-011-Q1-B1-E6
ctcgagccgcggatcttgcccctctcttctctgtgccctctgtgtttctgtctctctgttcctttctttcttttcttattttccatacacatattatatataatatatcctctctgcttatactcctagtattatataaggcctagagacaacattcattgcaattggcagcacataattcaaagggcaatggcctcttggaagaagaccatcacaactccattcaaaaaggcttgcactgtatttaaacagcagcaaccaccaagggattaaaagaagtctcaaacagagcaagagaggcaagtaatggatctgcagggtgaagtgatggcatgtgggtatgaagatgttcaagtgatgtggtctattctggataagtccaaatccacaaactgcaatataacctc

SEQ ID NO: 3420 - DNA, 406 bp, Glycine max
  Clone ID: LIB3028-011-Q1-B1-E7
caccgttcctcattcgcatggagaacgacactgccgccgccgttaacaataacaccaccgccaccgccaccgctaaagcaggttctggaggagtgaaatcgaacaaccataacctagaagaggagcattccaatttgaatggcgaggagcacatggcagaacaagtggaggcagaagaagaggaagatcgagaagccgatgatggtgaaggagaacaaactggatctcgtcaaccttccagaacccctttcactaatctcagccaggtcgatgctgacctcgctctcgctcgaacccttcaggaacaggaaagggcatatatgatgctgagaatgaataatgaacgaagtgattatgggagttgggaaagcggaagctaattgcatgataaaggagatgattttga

SEQ ID NO: 3421 - DNA, 415 bp, Glycine max
  Clone ID: LIB3028-011-Q1-B1-E8
gagagtgatttcagtgagtgatcggtgttcacttgatctcatcataatcgtcagcgtcaattgaagaagatgccgatcagaaacatcgccgtcggaaggcctgaagaggcgactcaccccgacacgttgaaggcggctttggctgagttcatctcaaccttcatcttcgtgttcgccggctcaggctccggcatcgcctacaacaagctcaccgacaacggcgctgccacccctgccggcctcatctccgcctccatcgcccatgcattcgccctcttcgtcgccgtctccgtcggcgccaacatctccggcggccacgtcaaccccgccgtcaccttcggcgccttcgtcggcggcaacatcaccttcctccgcggcatcgtctacgtcatcggccacctcctcggctcaatcg

SEQ ID NO: 3422 - DNA, 355 bp, Glycine max
  Clone ID: LIB3028-011-Q1-B1-B10
aaagaaagaaaaaaacccttagccaacacaaccatcatggccatctctgctattcagcaatcagcattcactggtcaaactgctctgaagcagctcaatgagttcgtccgcaagaccggtggcgccggcaaaggtcgcactaacatgcgccgcaccgtcaagagtgctcctcagagcatttggtatggccctgaccgtcccaagtacttgggtccattctcggagcagattccatcatacctgaccggagaattccctggtgactacggatgggacactgctggattatcagctgacccggaaaccttcgccaggaaccgggagctggaggtgattcacagcagatgggcaatgc

SEQ ID NO: 3423 - DNA, 389 bp, Glycine max
  Clone ID: LIB3028-011-Q1-B1-B11
attgcggccttgatgatgccaaaaatactgctcgcctgttggcgcttctcatgcaccggggttttaaattttccattaccaattccataatgtggcagacagctgatcgaccactgatgtggaaacagtcaccagaacaaccaatcgttttccctcattgcccctacaaagcaaaggatatcactacccccgttgttcagtatcaccctttctgcttctgtggggtgaaaagcagcaggggcatggtgaggaagccgggtcccaagcaagggagcctcttctttggatgtggaaattggactgcgactagaggtgctcgctgccattacttcgaatgggcttctaactgaatgcaccttttgatctactatgattaaaatcctaaattt

SEQ ID NO: 3424 - DNA, 386 bp, Glycine max
  Clone ID: LIB3028-011-Q1-B1-B12
gcctcacgtcaacgctgttgggtctgggcctggacacgggcccgggccaggacccgggccaggcggacttctccttgtccccaagtctgaagaagtcggtcggcccatggactttgtcggctcacgaattggactcaatctcggaggacgaacttacttctcgtcctctgaggatgacttcgtgagccggctctaccgtcggtctacgcccgtggaaccgggttcgactatctcgtcgaactcgccgcgatgccaggccgacggttgcaatgctgatctgtcgcaagccaagcactatcaccgccgccacaaggtgtgcgagtttcactccaaagccgccatcgtcatcgccgccggcttgactcagcgattctgccagcaatgca

SEQ ID NO: 3425 - DNA, 414 bp, Glycine max
  Clone ID: LIB3028-011-Q1-B1-B2
aagacacagtgttggaggtgcagactatggttctgttagaattggcgcctttatgggtatgaagatgataaaggccaaggcatctgaggaattgtctgagagttgggctgctaatgggttgaactatgatgaagtggaacaagatgacatagaactacttaaacaagaaacctccttagattacttatgtaatttgccacctcatagatttgtgactctttacgctaagacaattcctgagtccattgtcggtgagacatttttggagcaatatcaaaatcataatgatcctgtcactactattgatccgaagcgtacttacggagttagagctcccacaatgcatcgcatatttgaaaatttccgagtcgtgaccttgaaagcacttttaacatctgcagcttcaacctatca

SEQ ID NO: 3426 - DNA, 325 bp, Glycine max
  Clone ID: LIB3028-011-Q1-B1-B3
gtcatcttcgtctttacgcttttcttcaccgaagcgaaaaagaaaacgcttgacttgagagaaatagagcttcgaatcgaaactcagaattataacaaaacacaaatcataatcacaatggcaaggtacgaccgatcaatcaccgttttctcccccgacggccacctcttccaggtcgagtatgccctcgaagccgtccgcaagggcaacgccgccgtcggcgtccgcggcaccgacaacgtcgtcctcggcgtcgagaagaaatccaccgccaagctccaagactccaagtcggtgatgaagattgtgaatctggacaaccaca

SEQ ID NO: 3427 - DNA, 216 bp, Glycine max
  Clone ID: LIB3028-011-Q1-B1-B4
agcagacgagcttctcgagaatccagccttccaattcttaaacgagtagacacgggaagcttagtagtatgcttctatatttgtcttctcaaggctgacaacaaaattagttattggtccttgccattggtggttgtaattgtaaatgcagtcttatatttattttctgtacatctttaaaggggggaagaaaaaaaaacttagatattttttgcc

SEQ ID NO: 3428 - DNA, 358 bp, Glycine max
  Clone ID: LIB3028-011-Q1-B1-B5
gatcactgccccgtttcatgagttttccccttgccatattacctgatttctgagttcactatcaagcaagctaggttggtttacaatggaacaaaaaccattactagcctgcgtttgttttgaaagatttttctgaagttcacgaaattaagccaagtcactgatttgctgtcgccaacggctgaagttgtttccatctgaaggaataattatagatgatctgcacggttgaagatgtacggcatagaactgatctaatgaagtttacagtgttcgtcctgtaaagcagtgttaccttgaattgtactggttatatagcaccatctcgtatcaaagtcacatcaaatgtaatgatatt

SEQ ID NO: 3429 - DNA, 407 bp, Glycine max
  Clone ID: LIB3028-011-Q1-B1-B7
cttcgtggcgggagatcctctcgcagcttctggtgtactttctcgtagaggattacaccaattactggatccacaggtttctgcacaacgattgggggtacgagaagattcaccgcgtccaccacgagtaccatgcgcccattggattcgccgcgccctatgcccactgggccgagatcttgatcctcgggattccctcctttcttgggcctgccatggttcctggccacattatcaccttctggctctggatagccttgcgccagattgaagccattgacacgcacagcgggtatgactttcctaggagtatcacaaaatatattccattttatggtggtgctgagtatcatgattaccatcattacgttggaagacacagccaaagcaattttgcttcagttttc

SEQ ID NO: 3430 - DNA, 408 bp, Glycine max
  unsure at all n locations
  Clone ID: LIB3028-011-Q1-B1-C1
atcaattataagcatgggtttgtggaacacaacgaatgcagtgtcttgccgctttcacaagtttggtgatgaccaaaagaatctggtcttccaaggtgatgccacgtcttcttccaggggcatagaactcacaaagttagacggtggaggaaaaccagtgggtggcagtgtggggagagtgttatactcttctccagtgcacctttgggaaagctctacagtggtcgcaagctttgaaaccgacttcaccttttccatctcatcagactctactactccaggtgatggccttgccttcttcattgcaccatttgacactaaaatccctccaaactctggtgggagcaaccttggactcttcncatcagacaatgttgttgctgtcgagtttgacacctaccctaatcg

SEQ ID NO: 3431 - DNA, 382 bp, Glycine max
  Clone ID: LIB3028-011-Q1-B1-C10
ttagtttgttccatttcttgcttcttaatttcttgatcatgtcacttgctggtaaaatcagcattgaaattggggtgcatgcaagcgctgcaaagtggttcaacctctttgcaacgcaactccatcatgttcaaaaccttaccgaaagagtgcatgaaaccaagctacatcatggtgatgactggcatcacaacgaatcgatcaaacactggacttgtaccatagatggtaaggttacaacatatcacgagagtattgaatccgttgatgaacctaacaaaacaatcacttacaagatcttcggtgaagatatcgatcaccagtataaggtctttaaggtcatctttcaagcaattcataaggatcatgggggtgcattcat

SEQ ID NO: 3432 - DNA, 368 bp, Glycine max
  Clone ID: LIB3028-011-Q1-B1-C11
caaagagacaattcaacttaagagatcaatatggccaccaccactacccagcctccctctaatatctgttttttccttctgttgttgcttctagcacactttcatttgggcataagccaacttgagctgaattactactctaaaagctgcccaaaagctgaagagatcatcaaggaacaagtcacacaactatataacaagcatggaaacactgccgtttcgtgggtcagaaatctcttccacgattgcgtggttaagtcatgcgatgcatcattactgttagcgacggtgagcgatgtagtgtcggagcagacatcggatagaagttttgggatgagaaacttcaagtacgtaaacactatcaaagc

SEQ ID NO: 3433 - DNA, 379 bp, Glycine max
  Clone ID: LIB3028-011-Q1-B1-C12
agagaaaaaaaaaaaaaaaacagaacaacacagaaactcaaaaccaaaataaaattattatggatcacattcataggttacgttgttttgggacaatacccaaaattccttttctattgctactttccctgcttctcttcagtttcgttaacgcatccttcgacctcgctactatacccttcaacgacggctattctccgctcttcggagctagcaacgttgttcgctccgaggatggatacggcgtacaactccgcctcgatcgctacacaggttcgggtttcatttcctccagtatgtaccagtatggattcttcagcgcgagaatcaagttaccatcgaattatagtgctggtaattgcgtggcctttttaacatc

SEQ ID NO: 3434 - DNA, 333 bp, Glycine max
  Clone ID: LIB3028-011-Q1-B1-C2
gtaacccttcttttctctctctctctctcgtgttctgagctgctagaagcaatggagaggaaaagaagccatgcttctttcaccatgtttgcaatgcttgttggattgctctctcagagccttgtcattcctgtaatatccaccactgttgcagatcagaagaactactacaccccagatccacatgctggaagtccccccacaggctcacacaatagtagtcctccatctcatggtcatgggagctctccagcctcacatcacaatagtccaagtactccatcaacaccctcaggtggaaactgtggatcatcacccccacaacatcatgat

SEQ ID NO: 3435 - DNA, 411 bp, Glycine max
  Clone ID: LIB3028-011-Q1-B1-C4
gctccgtaccagtttcactgcataaatttgagagaaaactctgcaaacatgttggtttatcaggacctccttacaggtgatgagcttctctcggactccttccgttacaatgaaattgagaatggaatgctgtgggaagttgaggggaagtgggttgttaagggagcagttgatgttgacattggtgcaaacccttctgctgagggtggagaagatgagggagtcgatgacgcagctgttaaggttgttgacattgttgatacattcagacttcaggagcaacccgcttttgataagaaacagtttgttaccttcatgaagaggtttatcaagaatttgactcccaagctcgatgcagacaaacaagagttgtttaagaagcacattgatggagcaactaaatacctggct

SEQ ID NO: 3436 - DNA, 391 bp, Glycine max
  unsure at all n locations
  Clone ID: LIB3028-011-Q1-B1-C5
cgtttcccagatctgctccttccgttccccctcagaaatcagttgaagagcatgggtcgtggagttagcagtggtggtggtcaaagttcattgggttatctttttggcagtggagaggcccctgccccaaaaccagcaacaaataatgccccagcccaacctgaagtgcaggctgtaaataatgtgcctcctccaaaagcatctcctcctactaaaacaatagaccctaacaaggctgctggtatcaacagtcattctactgatggccagaacaccggcaacttcatcacggaccgaccctcaaccaaggtccatgctgcccctggtggtggttcttccctaggttatctctttggtgaacctgnggaggggaaatgataccttgtttgca

SEQ ID NO: 3437 - DNA, 412 bp, Glycine max
  Clone ID: LIB3028-011-Q1-B1-C6
cctagctagtagtctcagttcgtttgagagagaaaaaatggcagagggtctcgttctccgcggaaccatgcgcgcccacaccgacgtcgtgacggcgattgccactcccatcgacaactccgacatgatcgtgacggcgtcgcgcgacaaatccatcattctctggcacctcaccaaggaggacaagacctacggtgtcccccgccgccgcctcaccggacattctcacttcgtccaggacgtcgtcctctcatccgacggtcagttcgccctctccggctcctgggacggcgagctccgcctctgggacctcgcggctggcacctctgcccgccgcttcgttggccacaccaaggacgtgctctccgtggcgttctccatcgacaacggtcagatcgtgtcggcctctcgt

SEQ ID NO: 3438 - DNA, 366 bp, Glycine max
  Clone ID: LIB3028-011-Q1-B1-C9
caagctgggaagcaaggaattatggtggcgtctcagagtcaaaaccccattgagcaaatccaagcgcgcttcaaggacttggaaactggattccgcctctggctctccaagcagtccctccccgtcgaggccgccgtcgtcaccaccaccagcgccgcccagggcgccgccatcggcgccttcatgggcaccctcaccgccgacgcctcctccaccttccccacccctcctcccaacgcctctctcaatccccaagccatggcgtctcttaaacaagcgcaggctctagctggaggtcctttaattcaggcgcgaaactttgctgtgatgacgggagttaacgctgggaattcctgtgtcttgaaa

SEQ ID NO: 3439 - DNA, 399 bp, Glycine max
  Clone ID: LIB3028-010-Q1-B1-H5
acaacgcgcactctctcttttctctcttaacacaaaaaccctatcgttcttcgcggtttcgccgattctcgccatgccgaaagccaaatccgacgccaaagccgccgatagccggttgaagcgcaagggcgctggtgctggaaggaagcaatcgaagaaagctgctaaggatcctaacaagccaaagagacctccaagcgctttcttcgttttcatgtccgagttcagagagcagtttaagaaggagcatcctaacaacaaatccgtcgctgttgtcggtaaagctggtggtgacaaatggaaatcgctgtctgatgctgaaaaggcccccttcgttgccacggccgaaaagaagaaacaagagtatgagaaaactattttggcttacaataagaaatt

SEQ ID NO: 3440 - DNA, 394 bp, Glycine max
  Clone ID: LIB3028-010-Q1-B1-H6
gcctcagctcactttttgcaccttgattccatttttccaacaactcactggcattaacgttgtcatgttctatgcccctgtccttttcaagactttgggctttggcaacgatgcttcccttatgtcttcagttatcaccggaggtgtaaatgtggttgccactcttgtttccatcttgactgtggacaaggttggaagaaaagttttattccttgaaggtggtgttcaaatgttgatttgccagattgctactggagtcatgattgctatgaagttcggggtgagtggctaaggctcgttttcctccggagaagccaaccttactttgttctttatatgtgcatttgttgctgcatttgcatggtcttggggtccactaaggtggttggtgcct

SEQ ID NO: 3441 - DNA, 420 bp, Glycine max
  Clone ID: LIB3028-010-Q1-B1-H8
ggaaagagcaccattgttttgcacaacacatgcgaggattccctcttagctgctcctattatcttggacttggtccttcttgctgagctcagcactagaatcgagtttaaagctgaaaatgagggaaaattccactcattccacccagttgctaccatcctcagctacctcaccaaggctcctctggttccaccgggtacaccagtggtgaatgcattgtcaaagcagcgtgcaatgctggaaaacataatgagggcttgtgttggattggccccagagaataacatgattctcgagtacaagtgaagcatgggaccgaagaataatatagttggggtagcctagctgaatgttttatgttaataatatgtttgcttataattttgcaagtgtaattgaatgcatcagcttcattaatgc

SEQ ID NO: 3442 - DNA, 330 bp, Glycine max
  Clone ID: LIB3028-010-Q1-B1-H9
ctcactcacttccattgtcactgctcctttctcggatctctctcttcttcttcttcgttttctcttcgcgagtgagagatggcgcaaattctgcttcatgggactctccatgccaccatcttcgaggttgataggctcaatgctggtggtggtggcggcaattttttcagcaagctcaagcaaaactttgaggagactgttggtattggaaagggagttactaaactctatgcaaccattgatctggagaaagcaagagtaggaaggactagaatcatagaaaatgaacatactaatcccagatggtatgagtcttttcacatttactgt

SEQ ID NO: 3443 - DNA, 364 bp, Glycine max
  Clone ID: LIB3028-011-Q1-B1-A10
ccataacacaaggcagaaagcaagctcatcctagagttttaaaaatggcagcagcctcctccatggctctctcttccccatccttggctggcaaggccgtgaagctgggcccatcagcccccgaagtcgggagggtcagcatgaggaagaccgtcaccaagcaggcctcctccggaagcccatggtacggcccagaccgcgtcaagtacttgggcccattctctggcgagcccccgtcctacctcactggcgagttcccaggtgactacggctgggacactgctgggctttcggccgacccagaaaccttcgccagaaaccgtgagctcgaagtgatccactccaggtgggccatgctcggggc

SEQ ID NO: 3444 - DNA, 355 bp, Glycine max
  Clone ID: LIB3028-011-Q1-B1-A11
ggatgatactgttcttcaaacccgcaagcctaatgctcccattgagcctttgaatcaaatggttgatgaggaaccaaggttggagctggaaaacgaattccctataaatgaagctacatttgttgcccctgttgcctcagccccagctgcaacctctgtggcatcttcatcagtgccttgtcctataattgatctgtctgaaacaaccccagctgttccatctaatcagcaatccccaaccgtggatgtgccatcgtcatctatgggtactggtggaggaattaattctgtggaggagaatctacttaaagagcttgaggagatgggttttaaacaggttgatttgaacaaggag

SEQ ID NO: 3445 - DNA, 386 bp, Glycine max
  Clone ID: LIB3028-011-Q1-B1-A12
atgatgatgaagtctgctatgtgtgcagtggtggttgtagcacttcttcttctggcggaggtggggcccatggctgaggctgtgacatgcaccccaacagagttgagtccgtgtcttccagcaatcacttccggtgctaaaccttccaatgcttgttgcacgaagctgaagcagcacataccatgcttatgtggctacctcaaaaacgctagcttgaagcagtatgttaactctcctaatgcccgaaaaaccgttgcttcttgtgggattccctttccaacttgttaattaattaagccttcttataattaaagtgtgggatatatatatatatatagataaacagtttaatttatacacactttgatcctacaaagcatcttgac

SEQ ID NO: 3446 - DNA, 228 bp, Glycine max
  Clone ID: LIB3028-011-Q1-B1-A3
cttctcttgaggtaaattgcatgctgcttcaccttgctattttgtttacattcgctgcagtgttttatcttggaatctccagtgaaacgtcgtgcggttcatgtgcgctactattattagacgtgcaatgaatcactaagtgcggtgctccttctgccgaggttcgcaatatcacatttcagtgtttgaatattgttgacagtgctggatttggtactgcaggaattg

SEQ ID NO: 3447 - DNA, 397 bp, Glycine max
  Clone ID: LIB3028-011-Q1-B1-A5
ctcgagccgattcggctcgaggattatactctgaaagctgttggtggaagtttaacggctattcctggaatctcagatatgattgatgatactgtgaactcaattgttactgacatgctccaatggcctcataggattgtggttccacttggtggcattcctgttgataccagtgaactggagcttaaaccccagggaaaacttgcactgactgttgtcaaagcaactgctttaaagaatatggaaatgattggaaagtcagatccttatgtaattgtgcatattcgaccattatttaagtataaaaccaaggttattgataacaacctgaatcctatttggaatgagaaattcgagttgattgcagaagacaatgataaccaatcactcattcttg

SEQ ID NO: 3448 - DNA, 411 bp, Glycine max
  Clone ID: LIB3028-011-Q1-B1-A6
ctcagtctcagaccctttctcaccaccatcttctttctcacactcacagtgctcaaggtttcagcatcatcctcagtgattttctacaacaagtgccagcacccagtgtggcccgggatccagcccagcgcaggaaagcccgttctggcccgcggaggcttcaagctcgccccaaaccgggcctactccctccagctccccgctctatggtccgggcgcttctggggccgccacggctgttccttcgacgccggcggccgggggcgctgcgccaccggggactgcggcgggtccctgttctgcaacggcatcggcggaagcccaccggcgaccctggcggagttcaccctgggcaacgagcaggacttctacgacgtgaccctggtggacgggtacaacctacccatctcc

SEQ ID NO: 3449 - DNA, 404 bp, Glycine max
  Clone ID: LIB3028-011-Q1-B1-A7
gtgtttctttctctctcatgttgtagtatctcactagtgtttttcattcgtttctgaaccacacaaacatcaccaccgaacaatgccgacggggttaccggcggcgaattccttagtggcgccggacgaagaggggtgggtgtgggggcagatcaaggcggaggcgcgccgcgacgccgagtcggagcctgctttggcgagctacctctactcgacgatcctctcgcactcgtcgctcgagcgttctctgtcttttcacctcggaaataagctctgttcctccacgcttctctcgacgctcctttacgacctgttcctcaacgccttctcctccgacccctccctccgctccgccgccgtcgccgatctccgcccctgccgcgaacgcgaccccgcctgcgtct

SEQ ID NO: 3450 - DNA, 410 bp, Glycine max
  unsure at all n locations
  Clone ID: LIB3028-011-Q1-B1-A8
cgctctttcgtgtttttgttcgcgaaggaaactctatccttagctatcgcgatggatcggtaccagaaggtggagaagccaagagctgaaactccaatcgatgaaaacgagatccggattactagtcagggaaggatgcgcaactacattacttatgccatgagcttgcttcaggagaaaggttctaatgaaattgttttcaaagcaatggggagagctatcaacaaaaccgtgacaattgtggagttgatcaagaggagaattgtgggcctccaccagaatacagcaattggatccactgatatcactgatacttgggagcccctagaggaaggcctccttcctttggagacgacanagcacgtgtcaatgataacaataaccctttcaaagaaggaactcgatacatc

SEQ ID NO: 3451 - DNA, 358 bp, Glycine max
  Clone ID: LIB3028-011-Q1-B1-A9
attcatccaaatttctcaaactcaagctagcctttgggggatatgatagagaagaagacacagtgtgagaaaaaggaaaaaatggaaggtgaagaaactgagatgaaacaacaatccaggttcaaaaggatttgtgtgttctgtggcagcagccctgggaacaagagtagctataaggacgctgctattgagcttgggaaagagttggtgtcaagaaatattgatctggtttatggaggaggaagcattggtttgatggggttggtttcccaggctgtttatgaaggaggtcgccatgtaattggagttattcccaagacactgatgccaagagagattactggagagacagtggggg

SEQ ID NO: 3452 - DNA, 409 bp, Glycine max
  Clone ID: LIB3028-010-Q1-B1-F7
gacagaagttgaaaattttggttgagtgagaggcttgtctttgttccgctaccatgtctcatgagacatgcccttctgtaaagaatgtccttcttttggattccgatgggaaacgtgttgcggtcaaatacttctctgaagactggccgacaaatagtgccaaggaaaattttgagaaagttgtattcaacaagactcagaaaaccaatgcccgcacggaagcagaaatagcaatgtttgagaataacattgttctttacaagtttgtccaagatcttcacttctttgttaccggtggtgattatgaaaatgagcttatcttagccacagttctgcaggcattttttgattctgtgggccttctgctcataggcaatgtagacaagaaaggagcactagagaaactgga

SEQ ID NO: 3453 - DNA, 404 bp, Glycine max
  Clone ID: LIB3028-010-Q1-B1-F8
atacgatccaatggctgcgacccttttccagggattgggagttgtgaccccatcattctcttcttcccactccaacaagttcatgctttcttccctctcagagaggaaagatggcatatttgtggtcagatctgatgctgatgcaaggattctgaagactggagctcgtaagcatgaattgttggttactaatgcagttgcaacaaagggagccagttctgcggcctctacatcaaaatctggatctgggcatgaacttctcctttttgaggccctacgcgaaggtttggaggaagaaatggagagggatccttgtgtatgtgtcatgggtgaagatgtaggtcattatggaggatcttataaggtgactaaaggccttgccccaaagtttggggaccttagag

SEQ ID NO: 3454 - DNA, 343 bp, Glycine max
  Clone ID: LIB3028-010-Q1-B1-F9
ggtaatatgggcagttggaatcttggacaaggttgtcttacgatggaggagaaaaggagctggtttacgaggtttccgacaagagatggacatcaacgaaaatgaaaatgaagatgaagatattctcaaggtgttccgaaaacagaaagttgatgtagaaattgaagaggctgtttcaagggtgctgtccatggtcgactcaccagatgctcgtgagcaatatcatcgcatgcttgagaaatatcgtcaagctaaggctgaacttgcgggtacgagtgacgaggcatcattatcaacttctgtaggagatgacttatttattgatgatttttatccatttccc

SEQ ID NO: 3455 - DNA, 343 bp, Glycine max
  Clone ID: LIB3028-010-Q1-B1-G10
atcaaaaggtaacaaacaaattaaaagaaaaagggaaaagtatactacgcagaataggtggttcaaagttcaatggctgagaagaaggaaatgattccgcaacaatttgacatcgatgccaaatgggacgcctgcattgatctcaccgtccgtcgcttcgtctactccgcaaccgccggtgcatttggcggtctcctatttttcaggagtcctgtgactcgatgggcatctattgcttttggtgctggagttggaattggatctgcatatgcacaatgttctcgtctgttcgatggacctccaacaaatttacccttacctaaggtccccgaaactgctactc

SEQ ID NO: 3456 - DNA, 350 bp, Glycine max
  Clone ID: LIB3028-010-Q1-B1-G11
tctgatttggaaataacagatgacggggaagagattctaagtacttgtcaagccaatgtggtactgttacacaggataaaaacaaaggattagatattcattgaatagtcagaaatactaactgcgattcctgcatcaatcgcaacgtcagtctcgtctggctaatcttttgaaccggtaaattcatccagtcaccattttaacgtgattctaagtcatgctagcaagctacaaaggtcatatggtcctccagtttataatcaattcgtgcattcataacctgaacctctcttcgattgctctctaacatgatgacccataggtatagtctccgaaaatgctcctcaggg

SEQ ID NO: 3457 - DNA, 359 bp, Glycine max
  Clone ID: LIB3028-010-Q1-B1-G12
gttgtgaaagcagagaagtgagatacactaagttatcctcataaatacactctaattaggtggcaagataagtgtctaaccttagtaacattgccacatattgtgttcattttggaattgtgccactaaaattctattcaattcatctatggctgcctcttcttatgctatgcaatcaatcctggcaaaccctttgatccgcatttccagcgggtctagggtgaaccaatttggcgttcctgctttgcacatgagaaggaatgttggcctgagagttaggtccatggctaaggaagaacaaccaagtgagcctgcaaccccagttacaccgccaccatcagtagaacccaagccaaaac

SEQ ID NO: 3458 - DNA, 373 bp, Glycine max
  Clone ID: LIB3028-010-Q1-B1-G5
gcgagtctcagtccagttagcacaccaaccccaaatccaaaggttcatttcaatatgaccatcatgtcaagttttggacctttgaccattcttagtatagtcttgttagtggttggtgtcattgtctctggggctgaagctaggccaagggctttctttgtgtttggagattcacttgttgataatggaaataacaattacttggctaccaccgcacgtgctgatgcccctccttatgggattgattaccctccaagtcatagaccaactggtcgtttctccaatggctacaacattcctgatcttatcattcagcgacttggtgctgagtctacattgccatatgtgagtccagaattaagaggaaataagc

SEQ ID NO: 3459 - DNA, 432 bp, Glycine max
  Clone ID: LIB3028-010-Q1-B1-G6
gggaaggaaaagtggtgttggtggttgtcctcctcattggtatggcaaccctttcctccatcctctcctcctctcttcctcttttccatcgctaccctaaccctaacccttcgctctttcgcccctccctttctctctctttctctcgcactaaaccccgttcccccttcctcgttctcgctgcctcttcccatgatttcgcctccaactccaagaaatcagtgctcaccgagttgatacaagagatagaacctctggatgttagccacattcagaaggatgttccaccaactacagcagatgccatgaagaggactatatctggtatgctgggcttgcttccgtctgatcaatttaatgttgtcattgaggccttgtgggaaactctctccaagttacggatttcctcaatgatgaacgggtatacactac

SEQ ID NO: 3460 - DNA, 359 bp, Glycine max
  Clone ID: LIB3028-010-Q1-B1-G8
ctcgagccgaatcggctcgaggccggttgttgttacttctgtggagaagaatgagaagaagatgaagaggaagtatcagaagaagagggttttggccgaggatgagcctaagcccgatccttattggctggatacgttttttgggtttgcacccgaagaggcggagagggtacccaattgggggcattgtggggtgcttagtccgcttttggccaatgtttgcttggatgagttggataggtggatggaggggaagattaacgagttttatgttccttccaagagtgatgttatatggaatagtcccgacgaggatcaagggaacacgtcgtgggcggagttcgtgcccaagagtgggc

SEQ ID NO: 3461 - DNA, 348 bp, Glycine max
  unsure at all n locations
  Clone ID: LIB3028-010-Q1-B1-H10
caccattccaatttccatggcactctcctttcgccccgtcatccacccccgcgtcaccgaccggtcactctttcagttcctcccacccaagcctccccctcttccaacttcgccacctccctccgttctcctccccctcacgcgtcgccgcggcggcttccttccctcctgcctctccgacgacgccgtctccacccgcaacttcgaccgcggcttcaccgtgatcgccgccatgctccgccgcatcgagcccctcgacaactccgccatctccaaaggcgtgtcncccgccgccagagactccatgaagcagaccatctccaccatgctcggattgccaccctccga

SEQ ID NO: 3462 - DNA, 363 bp, Glycine max
  Clone ID: LIB3028-010-Q1-B1-H11
cagtttcgggggaagagatccagcagcaatggtgtacgtcaaggctcagaaatcaaaagcctacttcaagagatatcaagtcaagttcaagagaagaagagagggaaaaaccgattaccgtgccaggattcggttgattaatcaggacaagaacaaatataacactccgaaataccgatttgtggttcgctttagcaacaaggacattgttgcacaaataatatctgctagcattgccggcgatttagttcttgctacagcatattcacatgagctgccacgatatggtcttgaagtaggacttacaaattatgcagcagcttattgcactggtctcctgttggcccgaagagtcctcaaaac

SEQ ID NO: 3463 - DNA, 350 bp, Glycine max
  Clone ID: LIB3028-010-Q1-B1-H12
cgcaagcagaaagaaagaatcccaggcgaggagaaagatggaggggaaggagcaggatgtgtcgttgggagcgaacaagttccccgagagacagccgattgggacggcggcgcagagccaagacgacggcaaggactaccaggagccggcgccggcgccgctggttgacccgacggagtttacgtcatggtcgttttacagagcagggatagcagagtttgtggccacttttctgtttcgctacatcaccgtcgtaaccgttatgggagtcgccggggctaagtctaagtgtagtaccgttgggattcaaggaatcgcttgggccttcggtggcatgatcttcgccctcg

SEQ ID NO: 3464 - DNA, 373 bp, Glycine max
  Clone ID: LIB3028-010-Q1-B1-E10
gaaagagtgacgtctgcttctttagctgctatacctttcctcagttatctttaaaatgctcttatctgttgagatagtgtggttttattgggtatataccatagtttgggttcttatcatagcgttttgctttcggcctatataatgggcgtagctgtggttagtgtccaagtttgaatgtgacgccgcatgcatggagagtgttttttagtttctccttttagattttgctgttgcctcttgcaatgtttgcatattgtagcaatgaagacactagacagtgggcaggtccaattctttcattttatcaagtttgtattttatatctgtggcttttttttctctctcttttttaatgttattggttaaaaag

SEQ ID NO: 3465 - DNA, 413 bp, Glycine max
  Clone ID: LIB3028-010-Q1-B1-E6
gtgttacccctccaaatgcaaggagttgaggagtttccaccaagcaatttctcaggttatacttctggaaacgtctcacaatggcccattgaagaatttctcggattaaatgaactcagtcagtattataattacatggatggatcatctaaggctgacagtggtaaacttggggattctgattcttctgttttgaggtctggtgaagaggatatggatgatgacggcttcttgggacgtgttccagattcatcctggacagttcctcagatcccttcacctcctacagcttcgggtttatattggccgaaagtccctcaatatacatctgacagtgccatgtctgttcctgacatatgcttttctcatgtgcgacagccccaccatgcccagcataaatctaatgtttcaaa

SEQ ID NO: 3466 - DNA, 403 bp, Glycine max
  Clone ID: LIB3028-010-Q1-B1-E7
caactatggacagccacaaggccaggattatggtcatcagacaacttattctcaggcaggacttccccaacaaggttatggacagggatatgatgagtcaaagtatgaaaatcgtgctcctactcaacattcttatggaggacatgtaaattctcaatcgacctaccctcaggctggtgctcagcctaattaccctgcaccgcagcagtttggcaagccaccattatatggcatgccatcgggacagcctccacaatcttatggtccccctagagctactcaaccaggggatatgccatatcaaggttccactcctgcccagtcatatggcacgaatatgccaacacaacaaccatacccatatgcactatctgggccatcacaaacagcatatccaagttat

SEQ ID NO: 3467 - DNA, 426 bp, Glycine max
  Clone ID: LIB3028-010-Q1-B1-E8
gtgacggtagattgcaagtcacgacatggacacttcagaacgagaggggcaggtgcgcttgatgaatatggaaacttcaaagtatcacttccacaggacatggttgaagatggtgagctaaaagaagattgctatgcccagttgcatagtgcatctgctgaaccttgcccttcccacggaaactccaaaattgtgaccaggtcagtctctgaagacacacacacccttgcacctgctgctggaaaactcagattctcatcagcattgtgcacttcagccttcttttggcatttcttcaaacaccacccagaattcccttaccctcctaaagatgactactctctccctccccctgtgccagtctataaggaacctcttcctccagtgccagtgtataagacacccccagcaccatattagaaacct

SEQ ID NO: 3468 - DNA, 373 bp, Glycine max
  Clone ID: LIB3028-010-Q1-B1-E9
ggaaaatggctcttcttggatttcttctgggacttttctacatgatctcacatgtcaaggggtatggttttggaggttggaccaatgcacatgccaccttctatggagggggtgatgcttctgggacaatgggtggggcttgtggttatggaaatctgtatagccaaggttatggaactgatacaacagcactgagcactgcactgttcaacaatggcttaagctgtggtgcatgctttcaaattaaatgtgcgaatgacccacaatggtgccttcctggctccatcatagtcactgccacaaatttctgtccacctggtggttggtgtgaccctcccaatcaccactttgatccttcccaacctggtttcca

SEQ ID NO: 3469 - DNA, 352 bp, Glycine max
  Clone ID: LIB3028-010-Q1-B1-F10
ccaatatattccattctctctgtgtatttccctacctctcccttcaagatgcagatcttcgtcaagaccctcaccggcaagaccatcacccttgaggtggaaagctctgacaccatcgacaacgtcaaggccaagatccaggacaaggaaggaatccccccggaccagcaacgtctcattttcgccggaaagcaacttgaggacggccgtacccttgctgactacaacattcagaaggagagtactcttcacctcgtcctccgtctccgtggtggcatgcagatcttcgttaagacactcaccggcaagaccataaccctagaggttgaaagctccgacaccatcgataacg

SEQ ID NO: 3470 - DNA, 352 bp, Glycine max
  Clone ID: LIB3028-010-Q1-B1-F11
cttgttttctaaagatgtttgcttcctgcggacttcattaacctcggacctcaaaacagcattgtccctgagtagatgatccaactgcatggaagcaaacatctttagaaaacaagggtgtgctagtgttcttagtgtgttgtattttttcattgttagttatattacggctgtctctagatatggctacgagcgtctatagagtagtactgagtgttaatagaacagattgctccaggaaattttgtgccgttagctcatcctggtttctcctattattgaattgtatcattgttatttttatattaactttgtgatagtccattttttaaatatgttgttaacttgtgtt

SEQ ID NO: 3471 - DNA, 363 bp, Glycine max
  Clone ID: LIB3028-010-Q1-B1-F12
caacaatccaccaaccatcaagcagactcttccacaaatttgacaagttgatccttcttggaaaagggagccttctttactttggaaaagcctcagaagcaatgacttacttccagtccataggatgttcaccacttatttccatgaacccggcagagtttttgctagaccttgctaatggaaacataaatgatgtttccctaccttcagagttggaagataaagtgcagatgggaaatgcagaagctgaaacacaaaatgggaagccatcaccagctgttgtacatgagtatctggtggaggcatatgaaactcgagtagcagaaacagaaaagaaaagactaatggttcctaaaactcctg

SEQ ID NO: 3472 - DNA, 374 bp, Glycine max
  Clone ID: LIB3028-010-Q1-B1-D9
caacccccaattcttccccctccacccacccagcatatctctctattcctatttattagcacccctcacattaccttgtgtcaccaactactttgactcctttaccataccattacaataattatcaaacctaaccagtaaaaatggtgaccgtggaggaaatccgcaacgctcagcgttcccatggacccgccaccatcttggccttcggcaccgccacgccgtccaactgcgtctcccaagccgattaccctgactactacttccgcattaccaacagcgaacacatgactgatctcaaagaaaagttcaagcgcatgtgtgaaaagtccatgataaagaagcgatacatgcacctgaacgaagaatttccg

SEQ ID NO: 3473 - DNA, 375 bp, Glycine max
  Clone ID: LIB3028-010-Q1-B1-C10
caagaagatctgacccaactctacgatggaatccggtcgaattacaaagcatggtgttcggggttcgctccgctggtgatcggcggcgacatggactcggtggcggtgcaggagttcagccgaacgctcttcaacatgcggccagacatagccttgagtttggcgcagaccatattccagttcgacatgaggccaatcctatgccacgtcacggtgccgtgccacatcattcagagcaccaaggacctggctgcgccggttgtggtggcggagtatctgcagcagaatttgggagggaagaccatcgtggaggtcatgcccaccgagggccacttgccgcagctgagctcgccggatattgtggttccgggtttg

SEQ ID NO: 3474 - DNA, 337 bp, Glycine max
  Clone ID: LIB3028-010-Q1-B1-C11
aaaaaaaaacccttagccaacacaaccatcatggccacctctgctattcagcaatcagcattcactggtcaaactgctctgaagcagctcaatgagttcgtccgcaagaccggtggcgccggcaaaggtcgcactaacatgcgccgcaccgtcaagagtgctcctcagagcatttggtatggccctgaccgtcccaagtacttgggtccattctcggagcagattccatcatacctgaccggagaattccctggtgactacggatgggacactgctggattatcagctgacccggaaaccttcgccaggaaccgggagctggaggtgattcacagca

SEQ ID NO: 3475 - DNA, 341 bp, Glycine max
  Clone ID: LIB3028-010-Q1-B1-C12
aattgcagccgcaaaaaacctaacaccctattcaccaacctctaccttctcacctttgctacctttctttgtacccttttcaacttcctcggcctctggcgccactaccccagcagcaccgccgctgctatcgccgctgtcgcagaatcctcctccctatgcttccaccccaacaccaccgccacacccgattcatccaccaatcgcgacttcgccgcccagcatctcctctcggagctgcctcccacggtggctcgtgggccctatctcactccttgcgcgtcacccttcaccgagcacaccccctgcgacgatcaacaacgattcctttcattcccgag

SEQ ID NO: 3476 - DNA, 412 bp, Glycine max
  Clone ID: LIB3028-010-Q1-B1-C5
aaagaaaacaattatcagcaataataaaattataggcacgattctggcatgtccaattctcaacagaatgagcttcattattcaaccgccaacggggacgagaggtcaaacccttgtttagccaacacgcgctgcagcttctgctttccctgttgcttcggttcccgtcgcgactcggccaccctcgggttcgggtggtgggagcgcgtgcgagccacgtcgtcatggtccgagtcgcgctccgaggcgcaaccggtgaccgggagtcccggtgggcggtggtggtctggcggcgtgagggcctttatgaaggtgcgcgagtggtcggagctcgcggcggggcctcggtggaagactttcatccggcggttcagccggagcccgagtggcgggtcgcggcacgccgcgggga

SEQ ID NO: 3477 - DNA, 415 bp, Glycine max
  Clone ID: LIB3028-010-Q1-B1-C8
gaaaaaaaatgggttcttctctgtggacctgtctgattttgttatcacttgcttctgcttccttcgccgccaacccaagagcaccaattgatgtgccatttggcagaaactatgtgcctacctgggcctttgatcacatcaaatacctcaatggtggttctgagattcagcttcatcttgataaatacacaggtactggcttccaatcaaaagggtcctacttgtttggtcacttcagcatgtacataaaattggttgctggtgattcagctggcacagtcactgctttcgatttatcatccacaaactcagaacatgatgaaatagactttgagttcttgggaaacagaaccgggcaaccttatattttgcaaacaaatgtgttcaccggtggcaacggtgacagagaacaaag

SEQ ID NO: 3478 - DNA, 294 bp, Glycine max
  unsure at all n locations
  Clone ID: LIB3028-010-Q1-B1-C9
cacggttcctcccccgctgccgctgactctcacatccatattcatcccgccngtcaatcataagactcaacgaaggtgatcccattctgattcatctgaagcacagatcacctagtggaactggaatcctttcagctgctggcctaaccaggtgggcatgctgcaacaccaaacccaaggaccgtgagtcatgctcccgcagcaattggcgctgggaaaatcaggtctcctcgtcaacccccaccaaatgctaccattgctgctccgactgcttccaccggttgcgctacaggt

SEQ ID NO: 3479 - DNA, 375 bp, Glycine max
  Clone ID: LIB3028-010-Q1-B1-D10
ctacaacgtgttgcttcaggccttcatcatcaacaacatcatcatcatcatcatcatcccaatgaagctttctatgattcaagttcttcaactttgttctcatcatcgtccactacttcttctatggctgtgtctgatcaacagcagattggagatgagacgagtactgctcccaaaaggggagaatattatgactcttgcttttttagagggaatgattttcatgacaagaattgaacattatgttaagtgtaagtatgatgttttctgttcaaaacctactttttttctgtctatggttttcataattcacataatacttcttaaacttcaggtaaactcacatttcttcacatcagaagtgatatgtttccg

SEQ ID NO: 3480 - DNA, 352 bp, Glycine max
  Clone ID: LIB3028-010-Q1-B1-D11
ctttacttaattagcacatccaaatatggcactttcttcttcatcatcttcaacatccatatttgctttagctttgttcactcttttgcttataggaagttcttcagctcaactctctgagaacttctatgatagtaaatgtcccaaggttttctatgccgtaaaatccgttcatcaatctgctttggctaaagaacctcgccagggagcatctatcgttcgcctcttctttcatgactgctttgtcaatggttgtgatggatcagtagtacttgatggcccttcctcagagatgactgcacctctcatcaataactctttgagaggttatgaagtcattgatgccatcaag

SEQ ID NO: 3481 - DNA, 70 bp, Glycine max
  Clone ID: LIB3028-010-Q1-B1-D12
gcaaccataggaaatgtttttccttttttgttttttctttcccttatctaaggaattctcacataatgtg

SEQ ID NO: 3482 - DNA, 243 bp, Glycine max
  unsure at all n locations
  Clone ID: LIB3028-010-Q1-B1-D4
tggagactgttcttttcaatcactccccacctttggaattcaagggtttgagcaaggaggacgaagactcattgctagggcaagtggaaatatggacgtacatgacatgcttcacggactccgtggccttganagctgtcatagagcttcgtatagcggacatactagaccgttatggtaaaccactatccttgtcgcaaattgtggagaacatagaagacgcaccctccccagatgcctctc

SEQ ID NO: 3483 - DNA, 370 bp, Glycine max
  Clone ID: LIB3028-010-Q1-B1-D7
cttccaggaaccaccacaaaacattctcatcattcacccaacaaaatggctctgcttctgatagtacccatttcactggtaaccctctggctcggttacaccctataccagcggctacgcttcaagctccctcctggcccacggccctggccggtagtcggtaacctctacgacataaaacccgttcggttccggtgcttcgctgagtgggcgcagtcttacggccctatcatatcggtctggttcggttcgaccctaaacgtcatcgtttcaaactcggagttggccaatgaggttctgaacgagcacgatcagcagctggcggaccggcaccggagccggtcggcggcgaagttcagccgcgacggga

SEQ ID NO: 3484 - DNA, 357 bp, Glycine max
  Clone ID: LIB3028-010-Q1-B1-B9
ttgatgttgaagctgggatctttgctctccatgcatggatgttaccaacatcttaaaaaagctagtggtgataaggttggaaatgtagatggagatgcagaacaaggaatttatgatgcttctacacccccacagggttctaatccatcaaaccatgagaaaggtttaggagctccacaagaacatcttgttcgccaacctgcaagcacctggggttatatctttcaaatattattccagatgattgcaggcgctgtaatgctcacagattgtgtgttttggttcataattgttccgttcctaagcatcaaggattacaacataaatttgctaataatcagtatgcacaccatcaat

SEQ ID NO: 3485 - DNA, 389 bp, Glycine max
  Clone ID: LIB3028-010-Q1-B1-D8
aattagttcattctctttgcgcagttccctacctctcctttcaagatgcagatcttcgtcaagaccctcaccggaaagaccatcacccttgaggtggaaagctctgacaccatcgacaacgtcaaggccaagatccaggacaaggaaggaattcccccggatcagcaacgtctcatcttcgccggaaagcagctcgaggacggccgtaccctcgccgactacaacatccagaaggagtcaacccttcaccttgtccttcgtctccgtggtggcatgcagatcttcgtcaagactctcactggcaaaaccataaccctagaggtcgaaagctctgacaccattgacaacgtcaaggccaagatccaggaccaagagggaatccccccaga

SEQ ID NO: 3486 - DNA, 265 bp, Glycine max
  unsure at all n locations
  Clone ID: LIB3028-010-Q1-B1-A3
attcagctcgagaaaattcagcanaaaatcccaaaaaaactgcaaatggtttttaacaactaacacaggtcaaacattgctggcccagagcaaaatgtacattgcaagtgctagatagatttatttacacatccattgtgcttggacccttgtctcaattggtaagggtaggtttctaaggactgtaattgtttcacttatgttaaagctgtacagttttgacatgctatggtcacctcacatctcaaacttgcctattttattt

SEQ ID NO: 3487 - DNA, 430 bp, Glycine max
  unsure at all n locations
  Clone ID: LIB3028-010-Q1-B1-A5
atcttatccttagcagttagggaagctattgatctggttggatgaccttcttggcctgttgcattaggccgaagagatgcaacaaaagccaatcggatggaagctaatcaagaaattccttcaccgttcgagcctctagataacatcattgcaaagtttacttcaaagggtcttaacttgagagatgttgtagccctttcaggggcacatacaattggttatgcccgatgcttgaccttcaaaaggagactttttgattttcaaggctctggcagacctgatcctgtgcttgcctcttcacttctctcaaaattgcaaagcacgtgtccaaatggagacacttcanacagctacattgcacctcttgattctaatactactttgaccttcgacaatgagtattatagaaatcccttatacaacaaagggc

SEQ ID NO: 3488 - DNA, 185 bp, Glycine max
  Clone ID: LIB3028-010-Q1-B1-A8
attaaattccgatacagagatgcattgtaatcaatcccatttccaggcttataatattattatgaagtgcctatataagggtctacaaccaatgaaataaaatcagacatatccccaaattacaagaattagcaccaacctaacggtgagtttggccaaaaccagattggaaaggacccatttcc

SEQ ID NO: 3489 - DNA, 349 bp, Glycine max
  Clone ID: LIB3028-010-Q1-B1-A9
gtaaattaatttctcgtatcgaaaatcatttccaccaccacaatttttttttatttccgtttactaaagattagtaattgtttggtttgtgtgtagattttgattcgattcgattcgattcagtcgaggttttaagcagcagcaagatgtctgggcgtggaaagggaggaaagggattgggaaaaggaggagcaaaacgacatcgtaaggtgctccgcgacaacattcagggaattacgaagccagcgattcgtcgtttggctcgcaggggtggcgtgaagcgtatcagcggtttgatctacgaggagactcgcggtgttcccaagatcttcctggagaatgtcaaccg

SEQ ID NO: 3490 - DNA, 326 bp, Glycine max
  Clone ID: LIB3028-010-Q1-B1-B10
ctctttcttaacttctacgtcagaatgcacgtggttcacaagaggaggaaagttagggatgttgtcgttgctcctgcactgtcttaagaagcgcgtgagtgcaaaaatgttcaagttcaattgtaaaaatataatagaagacacgaggtggttgctgcaatttggggtcgcaagtgtgttccctttttaatgttcatcatttttagcatggaacatgtgaatagatattatagtataggattgctggaaagcaataattatagactgattctgattttgttgtaatatatgattagttaattagttcatttctatactacataaaa

SEQ ID NO: 3491 - DNA, 330 bp, Glycine max
  Clone ID: LIB3028-010-Q1-B1-B11
tgtgtttgttattcactatcgtcattcctgttcctcaagctttgtagtgagcagatataatggctgttgaaaggtctggaattgccaaagatgttacggaattgattggtaaaacccccttagtatatctaaataaacttgcggatggttgtgttgcccgagttgctgctaaactggagttgatggagccatgctctagtgtgaaggacaggattgggtatagtatgattgctgatgcagaagagaagggacttatcacacctggaaagagtgtcctcattgaaccgacaagtggtaatactggcattggattagcctttatggcagcag

SEQ ID NO: 3492 - DNA, 352 bp, Glycine max
  unsure at all n locations
  Clone ID: LIB3028-010-Q1-B1-B12
atccagggttggtgttgagcggtgagacgatgggggagaacgagaaaggagagcgatggagcggagcgatgacaaatctgacggagatggcctccaatctcgactctctccagaagcttctcctcaccaaagccgtcttcgtcgacgacgacaccttctccaaagcctccctcgccgccgaccaggcccgcaccatcaagctcctccagcaacgagtccagaccttggagagagaggtcgacgccgccatcaccaccgccgcccgcgctcgctccgagaagcgccaggccgaggctgctcagaaatccgccgaatcgcgcgctcatcagctcancgccgaactcgaaaacac

SEQ ID NO: 3493 - DNA, 400 bp, Glycine max
  Clone ID: LIB3028-010-Q1-B1-B5
ctttcaccgaagaataacttgactttcccgaactccacctgagaaaaagatacccttaattcgcaggcgcgtcttgtgttggacaacaaccacaagatgattaacttcgaagaaaccgagttgcgactcggcctccctggcaacgactcagcactcaagggaagtgctgccaagagaggcttctctgaaactgcttctgttgatttgaagcttaatctttcttcttgcattaacgactctgcctcggattcaccctcatctatgtctacagagaagcccaaagagaacaagactaccactgctgaacctcctccagctaatgatccagcaaaaccacctgcaaaggcacaagtggtgggttggccaccagttaggtcatttagaaagaacatagttcaaa

SEQ ID NO: 3494 - DNA, 425 bp, Glycine max
  unsure at all n locations
  Clone ID: LIB3028-010-Q1-B1-B6
cagaaacaaaagtggcagtattaggtggcatcaccgaagtgcagggagctgccaacagcgtcgagatcaacaatctcgctcgctttgctgtagaggaacaaaacaaaagagagaattcagttctggagtttgtgagggtgattagtgcaaagcagcaagtggttgctggagtgaattactacataacattggaagcaaaagatggtgagattaaaaatgagtataaagcgaaggtttgggagagggaatcccaagagttgctagaattcaagccaacattaggtgcaggaggcatcatcgatgtgcctggagctgccaacagcatcgagatcgaccatctcgctcgctttgctgtagaggaacanaacaaaagagagaattcggttctggaattggtgagggtgattagtgcaaagaaacaagtg

SEQ ID NO: 3495 - DNA, 310 bp, Glycine max
  Clone ID: LIB3028-010-Q1-B1-A12
atatgtcctaaactttctgcagcatcgttctccatttttggctttacagaatgactgtgtctgattaagggttctttagtatttccaatatttcttgtagtgaataagttgttagctaaatcaagatcaagtttttggtgttgtagaaggaagagaagaattaacatgagtattcactgtgaagtgtgtgagacagctccaggagcagtgatttgttgcgcggatgaagctgctttgtgtgccaagtgtgacgttgaagttcatggctcaaacaagcttgatcgcaagcatgaaacacctcttcttcaat

SEQ ID NO: 3496 - DNA, 409 bp, Glycine max
  Clone ID: LIB3028-010-Q1-B1-B7
ctaactttcacacgcagcggcttcttcttccgttttcctgaatcggtgtgaacaatggcgacgtacgctgcgatgaaacccaccaagccagggttggaggagtcccaggaacagatccataagataaggatcaccctttcttccaagcacgtcaaaaacctcgagaaggtttgtgcggacttggttcgtggtgcaaaggacaagcgcctcagggttaagggacctgttaggatgcccactaaggttcttcacatcactaccaggaagtccccctgtggtgaaggtaccaacacatgggatagatttgaacttcgtgtccacaagagagtgattgacctctacagttccccagatgtggttaagcagattacctctatcacaatcgaacctggtgtggaagttgacgtga

SEQ ID NO: 3497 - DNA, 425 bp, Glycine max
  Clone ID: LIB3028-010-Q1-B1-B8
gagagaatggggaaaagacaaatcccagaccctccgaactttaagaaatacggcgttcctttctactccgttgcgtggattccccaacacgttgtcaaatcgcgccaaatcgaaaccgccgatgagtcctcggactccgatcacagcacttcgccggcgaccgaggcggagaaggaacccgcgacggtcgccggtaactacctgctgttcgccggcggcggcggagcaggccacagcggtatccccaatgctttggttattgcgcacttcgatgtcgcgtcgaattctctctctgatcaaccggtgtgtaagctaggaactgattctgaattgccttataggatggcacttaactctaatggtgatggccttatttgtgcaatggaaacgcccatggtttgcagatgggttgacggggataaaac

SEQ ID NO: 3498 - DNA, 431 bp, Glycine max
  Clone ID: LIB3028-009-Q1-B1-G7
ctgggatatgcgatatggttgcagtggcaaaaataatgaatgccacccttgtccttccttctctagaccatgattcattttggactgatccaagtgactttaaagatatctttgactggagacacttcgtgaaagttttgaaagacgacattgagatagttgagtacttaccggtccagtatgcgtcgctgaaacctcttgtgaaggcccctgtttcctggtcaaaggctagttactacagaggtgagattcttccattgttgaagcaacatactgttgtacagtttactcacacagattcgcggctcgccaacaatggccttgcttcctcattgcagaagctgaggtgccgtgccaattaccatgctctcaagtacacggcagaaattgaagagcttggaaaggtcttggtgaataggctaagaaacaat

SEQ ID NO: 3499 - DNA, 422 bp, Glycine max
  Clone ID: LIB3028-009-Q1-B1-G8
gctttagccatcactaacactcagtctctgaattggggctgagggtttcgagtaacgtttatttttcacgagtttaagatatcatgggtaaagagaaggttcacattaacattgtggtcattggccatgttgactctgggaagtcaaccaccactggccacttgatttacaagcttggaggtattgacaagcgtgttattgagaggtttgagaaagaagctgctgagatgaacaagaggtcattcaaatacgcctgggtgcttgacaagcttaaggctgagcgtgagagaggaattaccattgatattgcattatggaagtttgagaccaccaaatactactgcactgttattgatgctccaggacatcgtgatttcatcaagaacatgattactggaacttcccaagctgattgtgctgtc

SEQ ID NO: 3500 - DNA, 338 bp, Glycine max
  Clone ID: LIB3028-009-Q1-B1-G9
caacaactcaattcctaacttgcctccatagcaatctttgcttaattcttctgttcaattaccacattcattatagctctctcattcacaaactttcaatttctgcttccaaatctgaattcaacccatttggcattattgttacatataattaattaaggaagatcgaatggagagggtgacaaagatggtatcagaaaggccagtggtgatcttcagcaagagctcgtgctgcatgagccacaccatcaagaccctcttctgtgactttggggtgaatccagcggttcatgagctcgatgagatcccaagaggcagagacattgagcaagctcttt

SEQ ID NO: 3501 - DNA, 368 bp, Glycine max
  Clone ID: LIB3028-009-Q1-B1-H10
gtttatggcatattcaatgggaggccaaatgcagggttcaggcaaatgatggttcagcttcttggcattgtgtttgtgatacttctcaatgtcaccacaactagcattgtgtgcttgttggttaggatcatagttccacttaggctgagtgaagatgacttgcaagttggggatgaagcagtccatggcgaagttgcatatgcattgtggggtgatggagagaagcttgagactgctactgagcctttgacatctgaaaagaatcttgaatggccaactgtggaactaagaacttaattcgagtgatgctcaattaatggaatgaactcaatgaaggataaaatattctagctcttttgttggttttg

SEQ ID NO: 3502 - DNA, 377 bp, Glycine max
  Clone ID: LIB3028-009-Q1-B1-H12
ggaacggatccaaggtttaacaaggttttcaacaaggggatggctgatcactctaccattacaatgaagaaaattcttgagacctacacaggctttgagggacttaaatccctggttgatgttggtggaggaactggagctgtagtcaacatgattgtctcaaagtatcccactattaagggcattaattttgatttgccccatgtcattgaagatgccccatcttatccaggagtggaacatgttggtggagatatgtttgtcagtgttccaaaagctgatgctatttttatgaagtggatttgccacgattggagtgatgagcactgcttgaagtttttgaagaactgctatgaggcactaccagataatgggaa

SEQ ID NO: 3503 - DNA, 408 bp, Glycine max
  Clone ID: LIB3028-009-Q1-B1-H3
cgtaggccagctaggaattcaactcgagaacattttccccttcaacactccaaccaccaaagaagcataccactatagaatgatatttgagaggttcttccctcagaactcagcaaggctcactgttcctggaggaccaagtgttgcatgtagcacagcaaaagctgttgagtgggatgctgcttggtctaacaaccttgatccatcaggtagagcagcacttggagtgcatgcatcagcttatggaaaccaggtcaaagctgtagaaccagagaagatcataccaaagatggaattttctcaactaggagttgcaatataaaccttgtatgacccataccagggataattatttgcccaaaaaccaccatatattattattatcctatccaccataaattgaaaatt

SEQ ID NO: 3504 - DNA, 399 bp, Glycine max
  Clone ID: LIB3028-009-Q1-B1-H4
tattcaactcgaggctctttctgatctctctccccctctctctaacaataaccctcgctgtcgctggttccaattcaccatgaccgtgatgatgcccgctcccattgatcagcaagaggacgaggacgtgctcgtgccggacgcggatttgcctgagaacaatcaccaacccatggaagttgtagctcaacctgaaaatgccaatactgtggagagtcagcccgttgaagatcctccgtcatctagatttacatggagaattgataacttttcaaggctgaatacaaagaagctctattcggaaatatttgttgttggtggctataaatggcgtgtgcttattttcccaaaaggaaacaatgtggactatttgtccatgtatttggatgttgctgattc

SEQ ID NO: 3505 - DNA, 436 bp, Glycine max
  Clone ID: LIB3028-009-Q1-B1-H5
ctttcaaaagggagaagaaaaggaaaggaaacaaaacgcacaaaggattattatagcaatggcagaacaaaaccaaaaccagacaactgaagctggaaggcaccaagaggttggccacaagagccttctccagagtgatgctctttaccagtatattctggagaccagtgtctacccaagagaacctgaatccatgaaagaactgagagagttgacagcaaaacacccatggaacatcatgacaacctctgcagacgaagggcaattcttgaacatgctccttaagctcatcaatgccaagaacaccatggaaattggtgtctacactggatattcacttcttgccaccgctctcgctcttcctgaagatggaaagatcttggccatggatattaacagggagaattatgaattgggtttgccagtaattaagaaa

SEQ ID NO: 3506 - DNA, 428 bp, Glycine max
  Clone ID: LIB3028-009-Q1-B1-H6
ctgttctcccacaccacacccatgacactcctcctgctccttattctcctctttcacgcggcggaagccaagggacagtggcagctcctccacaaaaacatcggcattgtcgccatgcacatgcagcttctccacaacgaccgcgtcatcatcttcgaccgcaccgacttcggactctccaacctaaccctccccgacggaagatgccgcaacaacccaaacgagttggtcgtcaaacgcgactgcaccgcgcactccatcgaatacgacgtcgcagccaacacattccgcgctctctttgtccaaaccaatgtctggtgctcctccggttcggtctctcccgacggaacattagtccaaaccggtggcttcaacgacggctaacgtgcggtcagaaccttcaccccgtgccgctcgtgcgactgggc

SEQ ID NO: 3507 - DNA, 432 bp, Glycine max
  Clone ID: LIB3028-009-Q1-B1-H7
gcaatgtgattgaggcagatagtgaaatcctaagattgtttagttggaagatggaggcagtggaatcaatagcggttccggaaccggacgaagacgatccttcatcgacgcttctggatctctcgagttaccagctccacgaccttgactcggtcgagttgccacccagcctcaccgagttggacctcaccgcgaatcgcttgtccacgctggacccgcgcatagggaacctctcccatctcaagaagctctccctccgccaaaacctcatcaccgacgccgccgttctccctctctcttcctggaacgccatttcctctctcgaggagcttgtgctgcgcgataatcaattgaagaacattcctgatgtcaccgtatttaagaaacttctggttttcgatgttgcgttcaacgagattagttcgctacatg

SEQ ID NO: 3508 - DNA, 374 bp, Glycine max
  Clone ID: LIB3028-009-Q1-B1-H9
ctcctctattctcaccactcaatttctcactccctcttcattttcttctctctttctcaaaaccctcactttaaggtcctccacgccgtttcagcgtctttcttttgcgtcacaaccactgcgcaggctcatggctcgcgccaccctcggcctcactctcccagccaacaccgaatcccttaaggtttctttcgcggcaaaggagcttgacgtggcggaatggaaaggggaccttctcgccgttggcgtaacggagaaggacgtcgcgagaaacgtggaatcgagattcgagaacgcgattctgagcgcgttggactccaagctgggcgggttgttgggccaagtctcgtccgaagaggacttcagcggcaaac

SEQ ID NO: 3509 - DNA, 327 bp, Glycine max
  Clone ID: LIB3028-010-Q1-B1-A10
aaactcaaaatcttctagctgtgtgcaagagggaaagcatggctgagtatccatcacctgaaaaggatgataataattgtaagcacatggatgactacccttcacctcaaacagataatccaaagcctttctctcaaatatacaaacgaaggcgtcataacttgaactccaacaactctaatgtttctggagattcagtccgaaccagccagtatccgtgctcctctacaagaactatcgctgcaactgcactcccaaccgcaactgttgctggcacggccaccaacactgcaccgaaaaaacattttctgtctgcactggtggagt

SEQ ID NO: 3510 - DNA, 421 bp, Glycine max
  Clone ID: LIB3028-009-Q1-B1-G6
tggagcttcaaagccagaacaaccctttctctattcacttgattaccttctttttgtttctcttgttcctgttattcaaattagttaagaaatcgagttccaacaacaccagcaaattacctccaggaccaaagacactacctctcatagggaacctacaccagcttgttggttcaaagagtcatcactgctttaaaaaattggcagacaagtatggtcctctaatgcacctaaaactgggagaggtatccaacatcatagtcacttcaaaagaattggcacaagagattatgagaactcaggatctcaactttgcagatagaccaaaccttgtatccacaaaaatagtttcctacaacgccaccagcatttccttcgccccacatggagactattggaggcaactgcgaaagttgtgcac

SEQ ID NO: 3511 - DNA, 368 bp, Glycine max
  Clone ID: LIB3028-010-Q1-B1-A11
atcttatccttagcagttagggaagctattgatctggttggaggaccttcttggcctgttgcattaggccgaagagatgcaacaaaagccaatcggatggaagctaatcaacaaattccttcaccgttcgagcctctagataacatcattgcaaagtttacttcaaagggtcttaacttgagagatgttgtagccctttcaggggcacatacaattggttatgcccgatgcttgaccttcaaaaggagactttttgattttcaaggctctggcagacctgatcctgtgcttgcctcttcacttctctcaaaattgcaaagcacgtgtccaaatggagacacttcaaacagctacattgcacctcttga

SEQ ID NO: 3512 - DNA, 400 bp, Glycine max
  Clone ID: LIB3028-009-Q1-B1-E9
caaacctaacgcagcatcgctattctcttcattccatggctttgcccaaccagcaaaccgtggattaccctagtttcaaactcgttatcgtcggcgatggtggcacaggaaagacaacctttgtgaaaaggcatctcaccggagaattcgagaagaaatatgagccaaccatcggtgtggaggttcacccattggattttttcacaaactgtggaaagattcgattttactgctgggatactgctggacaggagaaatttggtggcctcagagatggatactatatccatggacaatgtgctattatcatgtttgatgttactgcccggctaacatacaaaaatgttcccacctggcaccgtgatctttgcagggtctgtgagaacatcccaattgttct

SEQ ID NO: 3513 - DNA, 336 bp, Glycine max
  Clone ID: LIB3028-009-Q1-B1-F10
gttcatggtttttacggcctagccaacagtggcaatttagcttgatgctacagagatataatcaacagcagtatcagtaggagtagcagcagcagcttataaatcggaattcaagcaattatcagtcacagcagcgtcggttatattgtagttaaagagtcaggatataagtctgctgtggtactgttgacctaatcgggataattacgacttgagtatatggtaaggctaatatgtctgcatcgaagatagctgtgttgaatagatttgttattagtctttcaagtgcaagtgacttaccctaggttggttgcatttgagtgtgcataatttccc

SEQ ID NO: 3514 - DNA, 349 bp, Glycine max
  Clone ID: LIB3028-009-Q1-B1-F11
aaaatttgggaaggatggaagatatatacttagtcgtgattacatgaccttaaagttatgggacatcaatatggattctggtccagttgcaacgttccaggttcatgagtatttaaggccaaaggttagattcccatgtttggatgagcaatgaatttctgctgctttatcaagttatagtaactggctcttttttttttggccagctttgtgatttatatgaaaatgattcaatttttgataagtttgagtgttgtctaagtggtgatggattgcgtgtttcaactggctcttacagcaatctattccgtgtgtttggttgtgttcctggaagtactgaagctacaac

SEQ ID NO: 3515 - DNA, 365 bp, Glycine max
  Clone ID: LIB3028-009-Q1-B1-F12
ccgaaattaaaaaattaactcttttcacaaactctaattatctttacattttgttttcttaatttattgttttgttatgaattggattgaacttgatttcaggcttcagagaagaaactttcgaacccaatgagggagataaaagtgcagaagctcgttctcaatatctctgttggcgagagtggagatcgtctcaccagagccgccaaggtgttggaacaacttagtggccaaaccccagtgttttccaaaggttagttctcaataattttctaaatgggtagttcagtgatgctggtaatggccatagatctcacatctgtgttcattggttttgttgatcatttttgtgattctatcacttt

SEQ ID NO: 3516 - DNA, 426 bp, Glycine max
  Clone ID: LIB3028-009-Q1-B1-F5
atcgaaagccttaaacttgctcgcagggtctggaaagactattatgccaaggtggatgctgtcgtgtacctggttgacgccttcgataaagagaggttcgcggaatctaagaaggagctcgatgccttgctttctgatgaatccttggcaaatgttccatttcttgtgctaggcaacaagattgacatcccttacgcagcttcagaagacgagctacgatatcatctaggcctgaccaatttcaccacaggcaaaggaaagattaacctcacagactccaaccttcgaccccttgaagtgttcatgtgcagcattgtgcgcaagatggggtatggtgaaggcttccagtggctttcccaatacatcaagtagagagtccttattcattcttagttcccctttctcttgtcaactagcactgtctgc

SEQ ID NO: 3517 - DNA, 348 bp, Glycine max
  Clone ID: LIB3028-009-Q1-B1-F6
aaagaaaaactcagcacagcacccctcgcaagcctctttttctcttaatttctcatcatatcatatctattaatcttacacatatattaagacatagatataatttttttcgtttgatttttccttgcatgggctgttaagataagatgtctcgcacgtgctcacagtgcgggaacaacggccacaactcgcggacatgcaccgacggtggcgccgccgcttcctgcggggggtctcccagggagaacgggatcatgctgttcggcgtaagagttatgaccgaagctaactcctccttccggaagagcgccagcatgaacaacctctcagagtacgacgcggaatcca

SEQ ID NO: 3518 - DNA, 434 bp, Glycine max
  Clone ID: LIB3028-009-Q1-B1-F7
ctgaggatgactatgatagtcagcaagaaatggataccagtggtgaattgagagagaccaagtcagatgatgatcatgatcatgatgttaactacagtcatgccagtgaagaagaaggggaagctgatgcatcagtaagcgatatagtggaatgcttcttgaagcgtttggatgagaaaacaaaaagattctcagaagaacctgcagggtatttgcaagagaagttagagagccccaagagttgctccggctacaacttggaatctgctttaacatttactgatatcaaaactgtggattcgtgctcgagtccctcctatgaaaatgactcaagaacaactttgactgctgaggaatcaaatgctgacacaagtagtccatcaatagaaagtacaagcaccaatgatgtggagatgattgataagtttacagat

SEQ ID NO: 3519 - DNA, 174 bp, Glycine max
  Clone ID: LIB3028-009-Q1-B1-F8
aaaaaaagtcctttccaaaatttcattgtcatccatcttcatagctgcccttaagcctgtgtaatgcagttctagtagtaacagcactttgcctgtgatgatttgtatcttcttgatgatggatgacacaggcttaagggcagctatgaagatgttccaaaaaaaatgttgatg

SEQ ID NO: 3520 - DNA, 353 bp, Glycine max
  Clone ID: LIB3028-009-Q1-B1-F9
gaatgggttccctagaagctatgactaaagggagtgatgcaaggtacttgggtgatacagcaaaactaaaaattgctcagggggttgttggagctgttaaagataagggttctgtcttgaatttcataccatacaccttgcaagcagtcaggcaagggtttcaggatatcggtgcctcctctctacagtctgctcatgaccttctaagatccagggagttaagactggaggtccggagtggagcagcacaggttgaaggtggagttcatgggctggtttcttatgaaaagaaatacttttgaagtatgaaaccatccaaaatcataagcggtgctataatcccttgctgcaat

SEQ ID NO: 3521 - DNA, 366 bp, Glycine max
  Clone ID: LIB3028-009-Q1-B1-G1
attgatatgagtgagcttgatgaggattctgatggtttccttcagccacatgaaatggaggcctatatacgaggtctgatacccaacttggcacagttacgtgacatgccagctgcctttgttcaaatgtattgtcgtattgctgcacacaaattcttcttcttttgcgatcctcatagacgaggaaaagcttgcatcaagaaagttttgcttagtaattgtctccaggaactcatggagcttcaccaggaaagtgaagaagaagtcacggacacagagcaagccgaaaactggttctctttgacttctgctcaacgcatatgtgacatgtttcttgctcttgataaagatacaaatgggacatta

SEQ ID NO: 3522 - DNA, 374 bp, Glycine max
  Clone ID: LIB3028-009-Q1-B1-G10
cccggttcatccgaagcccttcaccgaaccatgtcgaggagaaaggttagagagccaaaggaggaaaatgtgactctgggtccagctgttagagatggtgaacacgtttttggcgttgctcgcatctttgcctccttcaacgacaccttcatccatgtcactgatttgtctggcagggaaacccttgtccgaatcactggtggtatgaaagttaaagctgacagagatgaatcatctccttatgctgctatgcttgcagctcaggatgttgctgccagatgcaaggaactgggcataactgctcttcatatcaagctccgtgctactggtggaaacaagaccaaaacacctggtcctggtgctcaatcagctct

SEQ ID NO: 3523 - DNA, 409 bp, Glycine max
  Clone ID: LIB3028-009-Q1-B1-E8
gtgcggtgcggcgatcctagcactctcttctgcagctttcgccgacagcttcattcaccatggctgagcaaaccgagaaggcttttttgaaacaaccaaaagtgtttctcagctcgaagaaaactgggaagggaaagagacccggaaagggtgggaaccgcttttggaaatccattgggcttggatttaagactcccagggaagccatcgaaggaacctacattgacaagaagtgccccttcactggcaatgtttccatccgtggccgtatcttggctggaacatgtcacagtgctaagatgaacaggactattattgttaggaggaattatctccattttatcaagaagtaccagaggtacgagaaaaggcactccaacattcctgctcatatatcacctgctttccg

SEQ ID NO: 3524 - DNA, 303 bp, Glycine max
  Clone ID: LIB3028-009-Q1-B1-D1
gcatgtcatccaggacatgcttgtccctttgtaaaaggtgggacaggctttagaatgggttcaccgtgagatggaggtataccccatttggctctgcccacacaaattgttcaagctgcctgtcaaaactatgatttacccagagccagggttcgaactacatcgcaggcaaggagacacccaaactgctcaaatgtacacagatgttggagtttactatgcaccacgtcctgtttttaggggtgaggtatttgatggggcagaagcagtgcgtaaaatggagaactggttgattgaaaatca

SEQ ID NO: 3525 - DNA, 389 bp, Glycine max
  Clone ID: LIB3028-009-Q1-B1-D11
gcaagcaaaaagaaagaatcccaggcgaggagaaagatggaggggaaggagcaggatgtgtcgttgggagcgaacaagttccccgagagacagccgattgggacggcggcgcagagccaagacgacggcaaggactaccaggagccggcgccggcgccgctggttgacccgacggagtttacgtcatggtcgttttacagagcagggatagcagagtttgtggccacttttctgtttctctacatcaccgtcttaaccgttatgggagtcgccggggctaagtctaagtgtagtaccgttgggattcaaggaatcgcttgggccttcggtggcatgatcttcgccctcgtttactgcaccgctggcatctcagggggacacataaaccc

SEQ ID NO: 3526 - DNA, 373 bp, Glycine max
  Clone ID: LIB3028-009-Q1-B1-D12
tcccttttcagctttcattggtgtggcctagctgttttctcaatgagaaagccttcatctctgcaaagcgcacttttgcgctttggggttcccttgttgcttgttatcaccttctgttatgctacttctactgctgcagcaacaactcaagtttcagggaatgaagagctgccaaagacaaacctaaatgggcatgatgaagaagcaaaattcggattttttcatcataaaccaatattcaagaaacatattccaattccagtatataaacctgtaccaaatgccatttccagtgtataaacctataccagagccagttccagttccagtgtacaagcctattccaaagccagtgtataagcctattccaaag

SEQ ID NO: 3527 - DNA, 398 bp, Glycine max
  Clone ID: LIB3028-009-Q1-B1-D6
aagaaatagagttagaaatgaagataaatatgtatccaccatgtccacagccacatctagctttgggagttgaacctcacactgacatgagtgcccttaccatactcgtcccaaacgaagttccaggcctccaagtttggaaggagaatagttgggttgcggtcaattacttgcaaaatgcactcatggtacatgttggtgatcaacttgaggtgttgagtaacggaaagtacaagagtgttctgcatagaagcttggtgaataaggaacgaaatcgcatgtcatgggcagtgtttgttgcgcctccacatcaggcagtgatagggcctcttccttctctcatcaatgatcagaacccacccaagttttcaacaaaaacctatgctgagtatcgttat

SEQ ID NO: 3528 - DNA, 371 bp, Glycine max
  Clone ID: LIB3028-009-Q1-B1-D7
cttggttgagagtgagtttggaacttgaaagaaactagaatggccactttagacgaacgcccttctgcgaaaaggtggcttcctctcgaagctaaccctgacgtcatgaaccagttcctttggggtcttggccttccagtggatgaggcagagtgcggtgatgtgtttggcttagatgaagagcttctgaaaatggttcccaagccagttctcgccgtgctttttctttatccaattaccgcgaagtctgaagaagaaaggttgcaacaggaaaacgtaaaaaaggattatagcagtaaagtatatttcatgaagcaaaccgtgggtaatgcttgtggtacaatagggctgcttcatgcacttgggaacat

SEQ ID NO: 3529 - DNA, 396 bp, Glycine max
  unsure at all n locations
  Clone ID: LIB3028-009-Q1-B1-D8
cacaaagcaaagctcatccttgagttaaaaaatggcagcagcttcttccatggctctctcatccccatccttggctggcaaggccgtgaagctgggcccatcagccccagaagtgggaagggtgagcatgaggaagaccgtcaccaagcaggtctcctcaggaagcccatggtacggcccagaccgagtcaagtacttgggcccattctctggcgagcccccgtcctacctaaccggtgagttcccaggcgactacggctgggacactgctgggctttccgcagacccagaaaccttcgccaagaaccgtgaactcgaagtgatccactccaggtgggccatgctcggagccttgggctgcgtcttcccggagttgctgtcncgcaacggggtgaa

SEQ ID NO: 3530 - DNA, 391 bp, Glycine max
  Clone ID: LIB3028-009-Q1-B1-D9
ctgatattttgtttcatatttcctcaaaccactgcattgggcttcttggatttctcttacaagagtgatgataacttggttcacaccaccttaaaaagtgctgagaaaacccctatgctacatcatgaccagggaaagagtaagctctctatatctagtgagatgaatcatctaatggaggcctctagtggcaaatattcctatggtcaaggcaatccatctgaacgggaaatatctcagcatttgacacaaaaatctgaaaatcatgaacagactaatcatgcatgggatattcaaagtgaaagaaaattgtcatcctcagcagttcagtgctctgacccaatgaaagcatctcagttgggttatctcacggtcaaaactggtaaagaaa

SEQ ID NO: 3531 - DNA, 376 bp, Glycine max
  Clone ID: LIB3028-009-Q1-B1-E10
ggtttctgcgtttatgcgaagatgactaagttcaggaaattgggtcgacccaccggtcaccgaatgtccatgctcagaaccatggtctcgcagttggtgaagcacgagcgcatcgaaactactgtcgccaaggcgaaagagatcagaagactcgcggataatatggtgcagcttggaaaggagggatcccaacatgctgcgagacgtgctgctagttttgtgcgaggagatgatgtccttcacaagctgtttacagaactggcttatcggtacaaggatagagctggaggatacaccagattgcttcggacccgtattcgagtgggtgatgctgcaccgatggcctatattgagtttattgacagagaaaatgagc

SEQ ID NO: 3532 - DNA, 363 bp, Glycine max
  Clone ID: LIB3028-009-Q1-B1-E12
gctgttgaaaagagctatgagctacctgatgggcaggtgatcacgattggcgctgaacgattccgatgccctgaagttctgttccagccatccatgattgggatggaatctcctggtatccatgagacaacatataactctatcatgaagtgtgatgtcgacattaggaaggatctctatggtaacattgtcttgagtggtggttccacaatgttccctggcattgctgataggatgagcaaggagattacagcattggcaccaagtagcatgaaaattaaggttgtagcaccaccagagaggaagtacagtgtctggattggaggctccatcttggcttccctcagcaccttccaacagatg

SEQ ID NO: 3533 - DNA, 419 bp, Glycine max
  Clone ID: LIB3028-009-Q1-B1-E7
ctagtagtaatccaagagaaaggcttggtggaactccaactagtactgattcaaagaggagactctcattccctttgtcacaaggaattgggtctttcaagtggtctaaagggttctcaaacaaggatcaaagagtcccagataaatttcagtcacttgaatctataggaaacgtgagtgtggattcaacggtgtctttgcccgcaagggtggtgggaagaaagccttttacaagatttgtgtgatttattttgttttattcttttttttaaccattttattttgtcaatgctggtggtgttatcagttacattatgattatgatttcagtgtattggtgatagtttgatgacaggtatacccgttgtaaactaataaaaacaaaataagaaatgatggtttggtaacttccattggac

SEQ ID NO: 3534 - DNA, 349 bp, Glycine max
  Clone ID: LIB3028-009-Q1-B1-C9
gtgtagtggaagaatcactcccttatccatttccacaccacaccatggcctcaaccaacgctctctcttcagcctccattctacgctctcccaaccgccagtctctgacccgaagagcgaaccataatggaagagtaaattaccggaaaccgaataaccgtttctccgtgaaagcctccgccaaagagattgcctttgaccagcattcccgctctgctatgcaggccggcattgacaagctcgccgacgctgttgggctcactcttgggcccagagggaggaatgttgtgttggatgagtttggaagtcctaaagtggtcaacgatcgtgtcaccattgctcgcgcaat

SEQ ID NO: 3535 - DNA, 361 bp, Glycine max
  Clone ID: LIB3028-009-Q1-B1-B11
gagagagtcctgaaacttgggtgcgattccttcactcacaacaacaacacatcactatggctcttctgagtcgagcctcttcacgcttccctcagctggtttcccctcaaagggtagtttcactccacacaacgctcccatctctgaacgcatccccatccacagccacgcctacaccatatgccccgccaccgcctccgtccgcttcctctcccgccggcgtttctaaggcggcggagttcgtgatctcgaaggtggacgatctgatgaactgggcccgccgcggctccatctggcccatgaccttcggcctcgcctgctgcgccgtcgaaatgatgcacaccggcgccgcccgctacga

SEQ ID NO: 3536 - DNA, 369 bp, Glycine max
  Clone ID: LIB3028-009-Q1-B1-B12
gccatcctgaagttctgtgggcacaacgttctgatacggtttacctcactgttgctctagctcatgccaatgatgtttttgtgaactgtgagcctcagggtttgtttgctttctctgcttctggggttcaagatacagcctacagctttagcttggaactttatggatccattgaacctgacggttgtaaaactaaatctggcttaagaaacatactatgctcaattcagaaaggagaacatggttggtggaataggctattgaagtctgaagagaaacctgctccatacttgaacgttgattggaacaaatggtgtgatgacgatgatgaatagtcaacctctgatttcgtatctaaatatcatgctc

SEQ ID NO: 3537 - DNA, 397 bp, Glycine max
  unsure at all n locations
  Clone ID: LIB3028-009-Q1-B1-B5
cttatgctttcgtttttaaatcatgagtggtgtggattggactgttgttgattctgaaaacacataaggaaatcctgttgtaactctggagctgaaggatggtccttatagttgtactgtgtgggatttcagcttccatgctttattcaaggtcacactaaatgctaaaagtctagcgactgagttaacagttaaaaatacagacaataaagcattctcatttagtaccaccttgcacacatattttcaagcttctgtgagtaatgcatcagtaaaggggttgaaaggttgcaaaactctgaacaaagatccagatcctaaaaatccagtgtanggtaaggaagaaagggaagttgtcactttccctggatttgtagattgtgcttatcttgatgct

SEQ ID NO: 3538 - DNA, 224 bp, Glycine max
  Clone ID: LIB3028-009-Q1-B1-B6
gtattccattcgctcccaaaatcttttcgaagttgttcataactcaagagttctcagcatgggctccttgattgttgtaggtgaacatgatcataaacgatggcttgtattctcttccctttgtatgatttagtcatctcattctcgtactaggacatactaggctctttgcgactcatggtgttgatgtcactataatctacaccacatccactgtcgcaatt

SEQ ID NO: 3539 - DNA, 327 bp, Glycine max
  Clone ID: LIB3028-009-Q1-B1-B8
aataattattcgcaaaaaagaagaaaacacgttgaacagataccatcatcattcatcttcagccccacatcagcaggatttcaagactcagtttttgactcactaagtaagtagcgaaacaatttctcgggttcctgttcaagttgattcctttgataagttaccaacttcactcgatgaaaagccattaacataccaaacagagtgacagagtttgcaattacaagaggttcaattatcaaatctggtcagtggtgatacggaacaccagggagagtctgccatggttgacgccagtcctagaactgatatttctacagatgttga

SEQ ID NO: 3540 - DNA, 363 bp, Glycine max
  Clone ID: LIB3028-009-Q1-B1-B9
tgggaatcacggttgttacttcctcacaacgtcctgctttaataccatttcattccatggaactgcggctgattgatggtgaaggtaattggaagcttcgattgatcaagcagtgagttcactaaaacagtgttgctgcatggacttggtataccatttgagatgttgtcgagtctatcacaagctggctgtttgcgagcataaattaggtttgccaacaaaggtcaatcctatatgcttttattttaagttttccatattctccaagattcaatgtttactacgggactaacaaacagctgaaacagccaaaattgttgataataagttcgagcacacaaccattgcataatctctgcagtg

SEQ ID NO: 3541 - DNA, 365 bp, Glycine max
  unsure at all n locations
  Clone ID: LIB3028-009-Q1-B1-C10
tagcaactagctagctagagtccctctgatctgataatacaaatttcttggagggatatggacaataacgaggaaataccctcaacacccgcaacaccaggcactcctggtgcacctctttttggtggcttcagtaatggtaggaacaataatagcaagaagtccctcctgaagagttgtaggtgcttcagtgtggaggagtggagcttagaagatggagggctaccggcagtgtcatgctcattgccactgccatcgcctccaccggtagtccctcttgcaagaaagattggagcggagttcatagggaccttcatcctcatgttcgcangcactgccgctgccattgtcaaccaaaagacaaa

SEQ ID NO: 3542 - DNA, 360 bp, Glycine max
  Clone ID: LIB3028-009-Q1-B1-C12
gtgatggacacgcttaacatgcttggccttgcgaaaagaattggggctaggtttctgcttactagtactagttaggtttacggtgatccgttggagcatcctcagaaagagacttactggggaaatgtgaatccaattggtgagaggagttgttacgatgaagggaaaaggattgtggagacgttggccatggattatcatcggggtgctggtgttgaggtcaaacatatgagaggcaatccatccaaaagtggcttgatcatgggttgaatgtttgtccaaaaactcatcagagacttactcttacaaatgtcattcctaattacactgtcaaatctcatgttattagattgattgaag

SEQ ID NO: 3543 - DNA, 309 bp, Glycine max
  Clone ID: LIB3028-009-Q1-B1-C2
ggcagcgacgatccggctcacggtgccggccggaggagctcggccggcgccaccggttggaccggcgctgggtcagtaccggctgaacctgatggcgttctgcaaggacttcaacgcccgcacccagaagtacaaggcggagacacccatggccgttacgataacggcgtacaaggacaacaccttcgagttcaccgttaagtcgccgccggtgtcgtggtacctgaagaaagccgccggcgtggaatccggtagcagccggcccggtcacgtgaccgcgtcctcgttgtccgtgcggcacgtgcacga

SEQ ID NO: 3544 - DNA, 364 bp, Glycine max
  unsure at all n locations
  Clone ID: LIB3028-009-Q1-B1-C3
gctaaggattcaactccaggagaagaagaaacttaatcgattatcacttcacttcaccaatacatcatgggacacttacaccaaaacaagtttgaaaactctgacgtttaaggccaaggatcgtggtgttttttgactttcccgcgggtaaaaaaacgatgaacaagacattcctcatcctcangaggatgtcatcaccaccgagttttataaagtcactgtctcagaccatggagagaactatcacacccgcttaaattagcctcaccgttttgacatcagctcaaactcttcaagtgaggatgaatgagaagatggagagaaaaggaagaacaacaagaaggaaaagaaatggctgaaagac

SEQ ID NO: 3545 - DNA, 349 bp, Glycine max
  unsure at all n locations
  Clone ID: LIB3028-009-Q1-B1-C4
ttttgcactactgatgcctttttgggcacccagatttccaccattctgagtaacttcacacactatataacagaaaatgagggggggcttatggcaactcgggcaatcaatcactcgccgtcttgcccagggtgataagaaggctgttgctcgtaggtattttgcctcagatgctgagctgaaaaagacagtcgtttatgacttccatgttgctaatggagggaagatggtgccatttgctggatggagcatgccaattcaatataaggactcaattatggactcaacccttaactgtanggagaatggtagcctttttgatgtttcccatatgtgcgggctaagcctc

SEQ ID NO: 3546 - DNA, 385 bp, Glycine max
  Clone ID: LIB3028-009-Q1-B1-C7
aaagaaccagtttggaatatatttttattccttctttgtttcttcactttcttccatacacataaccatgtcttctcagaccgttgtcctcaaagttggtatgtcatgtcaagggtgtgctggagctgtaaacagggttttggaaaaaatggaaggtgttgagtcatttgacattgatctgaaggagcagaaggtgacagtgaaaggaaatgtgcagccggacgaagttctgcaagccgtttccaaatccggaaagaagacggcattctgggtggatgaagcacaaccacctgaaaacaagccttctgaaactgcacctgttacctcagctgagaatgataacaggacttcagaaagtggacctgttgcctcagaaaacaagcct

SEQ ID NO: 3547 - DNA, 416 bp, Glycine max
  Clone ID: LIB3028-009-Q1-B1-C8
tgggtctccaaagagagtttgagcaaagccattaagttagtgatggatggagacagtgaggttggtgctagagtgaagaagaatcacatggagtggaagaaaactgggggcagtcctaatttaatgaatggttacatggataggtttgtccaaaatcttcaagattttcctctccatgggtgattgaaggatttttttcagagggatggaattcatcgtttgcccaccaaatgaaaatgaaattgtttagaaaataagttaagagataaaatatctagagtttaatgctcagtctactttatgaatggtgcagtttgactcttatttagtagttgaattcagtagttcatgtgatactttatatttaaatatattttttagttttaataaatatttaatgttatgtttggtttttt

SEQ ID NO: 3548 - DNA, 393 bp, Glycine max
  unsure at all n locations
  Clone ID: LIB3028-009-Q1-B1-B10
actgaaaaaggttactggcagattgaaatgggagattttttcgttggaggtgtttcaacaggtgtttgtgagggtggctgtgctgctattgtggattcaggaacatctttgcttgctggtccaactcctgttgtggctgaaatcaaccatgccattggagctgaaggagttctcagtgtagaatgtaaggaagtcgtttctcaatatggagagttgatatgggatctcttggtatcaggggtgaaaccagatgacatatgttcacaagttggtttatgttcttccaaaaggcatcaatctaagagtgctggaattgaaatggtgactgaaaaaggacaggaagagttggcagcgagagatactcctttgtgttcntcttgtcagatgcttgtt

SEQ ID NO: 3549 - DNA, 169 bp, Glycine max
  Clone ID: LIB3028-008-Q1-B1-H2
ggcgaccttccacacagaaaccgtgcaatcagggttggccttgagcagactccacatcctattccactcggtggcactcttgtttctctattactaccgcataagccacatcttactggaaccaagctttgtatggattttcatgaccataccggagcttatcttcggc

SEQ ID NO: 3550 - DNA, 166 bp, Glycine max
  unsure at all n locations
  Clone ID: LIB3028-008-Q1-B1-H4
actcgtacctaaactcggttccacgctcaatcaccctcgcaactccataatcgggacgggcttcatttgtacatgaaacaattaaggtcggtttgcatggccaaaaaacttttaggccggtaaagttggttaaaatgtgatcatcaatcccttagtcccccntaat

SEQ ID NO: 3551 - DNA, 362 bp, Glycine max
  unsure at all n locations
  Clone ID: LIB3028-008-Q1-B1-H5
tccaagactaagattaactaaaagccactcaggcacccttgcaatagaaaggccaatccacacgttgcctttcgttggttctttcagtgcattcatgcggaggaaactaaaaaatttgatcagaggctgtctcctcttattcaagccccttgtaaaaatagcacccactgtacacttagcttttattatttctgtgtacaggatcaagttcattttttaccccacttttgccatctcaactggtggcttaacctcgcgccataaaactggcgtntcttgtattatgacattnacatcttagctcaatgaanatttgataattcagaattcgtgattaananaaaaaaaaaaaaggggcggcg

SEQ ID NO: 3552 - DNA, 412 bp, Glycine max
  Clone ID: LIB3028-008-Q1-B1-H7
gcagaagaaggcaaagatagtggcagagctccaagctgtgaagcacaacagtggcaagtcctacaatcagttagcggaggagactggactcaccaacgtctatgttgctcagcttctcaggagacaggctcagctcaatccccaaactgcccctctacttcgggcagcgctgcccgacctgccccaagaccttgtttctgagatgatgagaccccctttgaggtcttatgaccctaatctcatccaaaaccccactgtctataggttgaatgaagctgttatgcattttggggagagcatcaaagaaataatcaatgaggagtttggtgatgggatcatgtcagcaatagatttctactgctcggttgataaaattaaaggagtagatgggaaggatcgtgtggtattgaca

SEQ ID NO: 3553 - DNA, 404 bp, Glycine max
  Clone ID: LIB3028-008-Q1-B1-H9
caattcaggaaaccctagtgattaatttcgttgcgaaacggcgattcaagattatcgtgagccagaagatggtagcggaagcggaaattatctgtcagcagaacattccgatgttggacgtgaagtatcatatttgcgtggctcaagaacacaacgtgaaggttgaggtttcacccaaatcaccttcacctcctgttccgatctttggccaagcagtgagttgctctgagatcattaaagattccattttggaggcccctgcgatgaattttttcccaaatgtgcgttctggtagctatgccgagattggaccgcgcgtttctatggatgatgaacacatttgtattgatgatctgggagctcatcttggatttgtgttcaagtgtccgataccgagtgcattt

SEQ ID NO: 3554 - DNA, 229 bp, Glycine max
  unsure at all n locations
  Clone ID: LIB3028-009-Q1-B1-A1
ttggattaccgtgaagcctgcacgccatgcttttatcgtcaatatcggagaccaaattcaggttctaagcaatgcaatttacaagagtgtggagcacagagtgatagtaaattcagataaagagagagtttctctggcatttttctacaaccccaaaagtgatatacccattgagccaatanaagagctggtaacacgggaaaagccctcactctacccagcaatgacc

SEQ ID NO: 3555 - DNA, 289 bp, Glycine max
  Clone ID: LIB3028-009-Q1-B1-A10
ggagaaggtacagccatggattccaggtgtccgtgtccgtcactagctagataaacggcgactagatgatgattatgatctatgaccacaccatgtcattgcgagcttcgattatcacgacgcactcagatatgtgcacccacctgcatgcatcactgatctggtggatactacacctggagattggagagagaggaaatagagcctcgcttctcttgacatcaattaatagggtgtgtctgaagtgtgtgttttagcgtaatgtccttatggagcttctaaggttgtt

SEQ ID NO: 3556 - DNA, 353 bp, Glycine max
  Clone ID: LIB3028-009-Q1-B1-A12
ctttcaattgcttaccagaccaagcatggaagctaccggggaaaaagcatggcattttctgcatgtggttcggaatatggaagcaaattctatgctatttaattacggcataacaaccaccttgtgtcttcattaattcctatgcaaatctccaacctagaagattaagcatgtccctttgtaagtaccctgaggctgaaatagtaaccctttatatacctttcagatctattgacatattcaccctccaagcaaaacatttttattcgtattttgctccatctctttagatcatcacaacttcagacgcttggttttaggattcaactttcaaaggcttactccaacatatc

SEQ ID NO: 3557 - DNA, 343 bp, Glycine max
  Clone ID: LIB3028-009-Q1-B1-A3
gtattcaagtcgatgtactagtgggataatcaaaggataaggtcagaattgctccttcaattccttttaatttgatggtttaagctcatatgacttttcaatttcgttcattagaattaattggtgaaagaaaagtaaaaaaaaatgaaaaaataatgaagtgttgaatcatgtgatttgtatcaatgatatgaaattgtacctattcattcatgtattgtaagattcaaagtcatttgagatttgttttatgatacaaaccaatgtagccgaatcataggattcaaatcatgaataagattttaataattgtgtgtcagcatgttacgcctgaaatgctttt

SEQ ID NO: 3558 - DNA, 150 bp, Glycine max
  Clone ID: LIB3028-009-Q1-B1-A5
ggctggcaaggccgtgaagctgggcccatcagccccagatgtgggaagggtgagcatgaggaagaccgtcaccaagcaggtctcctcaggaagcccatggtacggcccagaccgagtcaagtacttgggcccattctctggcgagccccc

SEQ ID NO: 3559 - DNA, 373 bp, Glycine max
  Clone ID: LIB3028-009-Q1-B1-A7
cttcagatcaacgatgatgaggtggaactatgggtggttagaggattaactgctaagttaattgactgtaagatggaccaaatgaatcaagttgtagttgtcagtcatcctactgagcgtgtgtttggtcagcaccaatggcaagcactgagaacaaagctagtgacatggaggggaaatattgtaaatgttatcagtaccattcaggccaacaaaataacggaagatgggtcccaggcagcccaaggtttggttgttcgttgaggacaattgagtgaagcaattatctgagtatctagattttaatcaggtggaattttttgatcttaaacagaggataagagtgtaaattgttttgttaagaattaatttt

SEQ ID NO: 3560 - DNA, 397 bp, Glycine max
  Clone ID: LIB3028-009-Q1-B1-A8
caacaagttaacctgaatagaacacattcgtcttgtttcaaaacggtgcgcttttgaaagaatcgttgttcttctctctttctcctcttcagtgaaaaagtggattcatttgatcatttaaagggttgcaataccctagatcaaatgatggagactggagacattaatcagcctgaaccactgaaacaggtgtggtgtgagaaaaaacaggctgccgttcatgaagaaatgaatagaatgaaccaactgcctgcaaacagtgcatatgctacacatcgtatgaaggttctaaataaaattttgcaactcatgtcagttcagagaactgtatcacaagagcaggaattggagttgctttttgctggcctttctttgtgaaagtattattactggcgat

SEQ ID NO: 3561 - DNA, 325 bp, Glycine max
  Clone ID: LIB3028-009-Q1-B1-A9
aaagaaggatgttccttgtgagactgaccaacttactcatgtttacacatttatcctccgtccggatgcaacctacagcatcctgattgataatgtggagaagcaaactggtagtctctactctgattgggatcttctccctccaaagacaatcaaggatcctgaggctaaaaaaccagaagattgggatgacaaagaatatattcctgatcctgaggataagaaaccagaggggtatgatgacatcccaaaagagctcccagaccccgaagccaagaagcctgaagattgggatgatgaggaagatggtgagtggacaccccct

SEQ ID NO: 3562 - DNA, 314 bp, Glycine max
  Clone ID: LIB3028-009-Q1-B1-B1
ccctacctctcctttcaagatgcagatcttcgtcaagactctcaccgggaagaccatcacccttgaagtggaaagctctgacaccatcgacaacgtcaaggccaagatccacgacaatgaaggaattcccccggatcagcagcgtctcatcttcgccggaaagcagctcgaggactgccgtaccctcgccgacgacaacatccataaggagtcaatccttcaacttgtccttcgtctccgtggtcggcatgcacatcatcgtcaagacgctcactggcaagaccataatcctagaagtcgaaagctctgagacc

SEQ ID NO: 3563 - DNA, 396 bp, Glycine max
  Clone ID: LIB3028-008-Q1-B1-H12
ccaaaattttctctgaagaagaagcaacaatgtctggtcgcggaaagggaggcaagggtttgggaaagggtggagcgaagaggcatcgcaaggtgctccgcgacaacatccagggaatcacgaaacccgcgattcggaggctagccagaagaggcggcgtgaaaagaatcagcggcttgatctacgaggaaaccaggggtgtgctcaagatcttcctcgagaacgtcattcgcgacgccgtcacctacaccgagcacgctaggagaaagaccgtcacggccatggacgtcgtttacgcgctcaagaggcagggaagaaccctctacggtttcggaggctgagggcttgggctttttctgggcctggatttgttcttcgctgggctttaaaatgttg

SEQ ID NO: 3564 - DNA, 410 bp, Glycine max
  unsure at all n locations
  Clone ID: LIB3028-008-Q1-B1-F7
aattttacactccctccctcctcccatacccatcatcttataatacacaaaggttttgaatatcaaaatacatgacaattcacaacaacaaaatgacttcaattgccaccaatagcactgttgtcgccactagaatgctagttgtgatcactttagtccttgcactagtatgttgtgtcacatccgcgcaatcaccggcagcagcaccagccccggagagcaacgggtgcttgatggcactaacaaacatgtcagattgcctgacatatgtggaggatgggagtaagttggcaaagcctgacaaagggtgttgccctgagttggcagggttgattgatagcaaccccatttgcttgtgtgagttgctangaaaacctgactctattggcatcaagattgatttgaacaaa

SEQ ID NO: 3565 - DNA, 410 bp, Glycine max
  unsure at all n locations
  Clone ID: LIB3028-008-Q1-B1-F8
ctcataacacaaagcacaaagcaaagctcatccttgagttaaaaaatggcagcagcttcttccatggctctctcatccccatccttggctggcaaggccgtgaagctgggcccatcagccccagaagtgggaagggtgagcatgaggaagaccgtcaccaagcaggtctcctcaggaagcccatggtacggcccagaccgagtcaagtacttgggcccattctctggcgagcccccgtcctacctaaccggtgagttcccaggcgactacggctgggacactgctggggctttccgcanngaccagaaactttcgcaaagaaacgtgaactcgaagttattcaatccaaggtgggccatgctcggagccttgggctgcgtcttcccggagttgctgtcncgcaacggggt

SEQ ID NO: 3566 - DNA, 402 bp, Glycine max
  unsure at all n locations
  Clone ID: LIB3028-008-Q1-B1-G1
aagaaagtagcaaagatgacaggtgggatgtttggaaggaaggggcaaaagataaaggggacagtggtgttgatgccaaagaatgtgttggacttcaacgccataacctccgtcggaaaaggcagtgctaaggacaccgccaccgatttcttgggcaaaggcttggacgcattaggtcatgcagttgatgctctcactgccttcgctggccatagcatctccttgcagcttatcagtgctactcagactgatggtagtggaaaaggaaaagttggaaacgaagcctatttggaaaaacatcttccgaccttgccaacgttgggagcaaagcangaagcattcgatnataactttgaatgggatgctagttttggaattccaggagcattttacatcaaaaac

SEQ ID NO: 3567 - DNA, 409 bp, Glycine max
  Clone ID: LIB3028-008-Q1-B1-G10
gaaatttaagtgaggagctagagaatgatgatgaagtctgctatgtgtgcagtggtggttgtagcacttcttcttctggcggaggtggggcccatggctgaggctgtgacatgcaccccaacagagttgagtccgtgtcttccagcaatcacttccggtgctaaaccttccaatgcttgttgcacgaagctgaagcagcaaaaaccatgcttatgtggctacctcaaaaacgctagcttgaagcagtatgttaactctcctaatgcccgaaaaaccgttgcttcttgtgggattccctttccaacttgttaattaattaagccttcttataattaaagtgtgggatatatatatatatatagataaacagtttaatttatacacactttgatcctacaaagcatcttga

SEQ ID NO: 3568 - DNA, 331 bp, Glycine max
  Clone ID: LIB3028-008-Q1-B1-G2
gggaaagggtgatcagttgcgaagtttgatggaattggaagatcagtgttgttgtctcaatctctatctctctctattttacgtgtaaaattagtaaaacgtgcgaaaaggggcagagacggtgtagatatcgttgcctagttatttctatctctacagttattttaacttattttggttcactgtttatctaatttctgttttgtttacccacactaattaattgtgcccctaaatatagggaatttcatggaaagagaatcctatatggtgatatattactattattataacatgaattttagttgtaaaagtttaattattccagaag

SEQ ID NO: 3569 - DNA, 412 bp, Glycine max
  Clone ID: LIB3028-008-Q1-B1-G3
gtgcaaaaatattaagatgataaacattggagcacttgttgtactctttgcatttctcttcctcagttgtgcctatgcacaagacacaacaacccttgtgcctgcaatcataacttttggtgactcagccgtggatgtagggaataatgactatcttcccacccttttcaaggctgattaccctccttatgggagggactttgctaaccaccaacctactgggaggttttgcaatggcaaattagctactgattttactgctgacactttgggttttaagacctatgctccagcatatcttagcccacaggcatcagggaaaaacctccttattggagcaaactttgcttctgctgcatctggttatgatgaaaatgctgctactttgaatcatgcgattccgttgtcccaa

SEQ ID NO: 3570 - DNA, 394 bp, Glycine max
  Clone ID: LIB3028-008-Q1-B1-G4
aattcctgtaatgtgcaccagtaaagaccaaagtatgattattgtcacattatgccacatgattgtacttgtatatacatattttgtcccgcctttgtaaatacaattgggacactactaggattgggaataaaggtctttacatttttagtttggcaaatagatattgcaactacctttgtataaatctatttctgaagaagcaattacaactttcaagggatgatagcattttgtggcataaggattaaggaggcataaaggaccaattgctttggaatattcactcatgacaaggcacaaggtcatgcgtgtatgccaacacatagtaatgatgtgtgtttttattcactaggcaactggcagatctggttttcccttgtcacttttgtat

SEQ ID NO: 3571 - DNA, 276 bp, Glycine max
  Clone ID: LIB3028-008-Q1-B1-G5
ctcttttccattcttgcttcctttgtgggttgtttgagttttctttccttcaatttaattgaaagatggcttgcttggtatctcgctcgggaagggaattgcagaggtacaacaacatgggtggccggcaagttgttgggtgcataccttatagatataaacaagacatagagggtaaaatgagcaacgaattggaagtactagtggttagttcacagaaaggtcaaggattgatgttccctaagggaggatgggaacttgatgaatccgtagaag

SEQ ID NO: 3572 - DNA, 398 bp, Glycine max
  Clone ID: LIB3028-008-Q1-B1-G6
cacaaattctcaaatccaaatccaattccaattccaattcccaatcttctcaaaccctaattcctcatcttgaaaatgagagaaatcttgcacatccagggagggcaatgcgggaaccagatcggagcgaagttctgggaggtgatatgcgacgagcacggcatcgaccacaccggaaagtacagtggcgactctgaactccaattggaacgcatcaatgtttagtacaacgaagcgagtggcggaaggtacgttccacgcgccgtcctcatggatctagagcccggcaccatggactccgtcagatccggcccctacggccagatcttccgccccgacaacttcgtcttcggccagtccggcgccggaaacaactgggccaaaagtcactacaccga

SEQ ID NO: 3573 - DNA, 335 bp, Glycine max
  Clone ID: LIB3028-008-Q1-B1-G7
atagattctcaactaatgagaacactctcacccttggttcccactcttctcaaaccctaattcctcatcttgagcatgatagaaatcttgcacatcgaaggagggcagtgcgggaaccagattggagcgaagttctgggaggtgatatgctacgagcactgcatcgaccataccggaaagtatagtggcgactctgaactccatttgggacgcatcaatgtttagtacaaggatgcgattggcggaaggataattccacgctccgtcctcattgatctagaccccggaaccatggactccgtcagatccggcccctacggccatatcttccgctc

SEQ ID NO: 3574 - DNA, 410 bp, Glycine max
  unsure at all n locations
  Clone ID: LIB3028-008-Q1-B1-G8
ggtcattgcaggatagcttttttgccagctttgcccttggatggctcatcaccaatggtgcaggtcttgcatcatacccaatagacactgttagaagaagaatgatgatgacctctggtgaagctgtcaagtacaagagctccttggatgcattcacacagatcctcaagaatgagggtgccaagtccttgttcaagggtgccggtgccaacatcctccgtgccgttgccggtgctggtgtgtttgctggttatgacaagttgcaggttcttgtgttcggcaagaagtacggctctggtggggcttaagttctaatgctgagtcagtactattatttgtttttagatggcgatgaannaaaacattgaagttccaagagtcctagactaattgctgccgcaaattttgtt

SEQ ID NO: 3575 - DNA, 304 bp, Glycine max
  unsure at all n locations
  Clone ID: LIB3028-008-Q1-B1-G9
caggatgccactgctgatgaggatgagtatgaggaggaagaggaggaggaggagtatggccaacatgatatgtgattttgaacttggtaatgtattgcggtggcttgaagatgtataacatgccgcaacttcctgttgccggttgattgtctcttttgaggggatggttctgttccggctagatctagtttccattactgttctataaaactggttctgtttgtttccgtttttatgtaacctgttgtttgtanggaagacaatatgaaactgctattattttaaagctctaaatgttcaatcc

SEQ ID NO: 3576 - DNA, 389 bp, Glycine max
  unsure at all n locations
  Clone ID: LIB3028-008-Q1-B1-H1
ctggtcacccctttcttcatatcagtgaagaggatcaggagttctctggtctttgctccttggctccttcactatctgagagcattttgtgcactactgggttgaaaatgtatatgctggagagcaaaggaggtgccatagcatgcatgttcttgtctcttttcttcttggggacatggcctgctcttttgactatgttagagaggcgtggtcgtcttcctcagcatacctaccttgattactcaatcaccaatttcttggctgctttactcattgcttttacacttggtgggatangcaagggcacacatgatcagccaaatttcttagttcaacttgctcaggataactggccctccgttcttttcgcaatggggggtggtttgttc

SEQ ID NO: 3577 - DNA, 400 bp, Glycine max
  Clone ID: LIB3028-008-Q1-B1-H10
gaaacaattgctggtttgaatccaaatgtcatcaagattattgaggagttcccactaagtagcaagctagatactcaagcctatggtgatcatacctgtataataacaaaagagcatttggagcctaacttaggtggtctcactgttgagcaggctatccaaaacaagaagttgttcatcttagatcaccatgactatctcattccatatttgaggaaaataaatgcaaataccacaaagacttatgctacaagaaccatatttttcttgaaaaatgatggaactttgacgccattggccattgagttaagtaagccacatcctcagggtgaagcatatggtcctgttagtgaagtctacgtgccttcgagtgaaggagttgaagcttacatttggttac

SEQ ID NO: 3578 - DNA, 400 bp, Glycine max
  Clone ID: LIB3028-008-Q1-B1-H11
ctaagatggcttcctttgtatccttcctagtgctgcttcttgcagcccttatcctcatgcctcaagggcttgctacttactacaaaccaattaagaagccaccagtgtacaagcctccagtgtacaagccaccagtgtacaaaccaccggtttataagccaaaaccaccggtttacaagccgaaaccaccggtttacaagccaccatataagaagccaccatacaagaaaccaccttatggaaagtaccctccagtagaggacaacacccatgcctaaagcaagcaatgaggtctattatctacttaataaataagaggaactgctttgtgttttctagcattgtgatttacaacttcgtagcaatgcatattcttgactcttgcatgcacttcaatcct

SEQ ID NO: 3579 - DNA, 407 bp, Glycine max
  Clone ID: LIB3028-008-Q1-B1-F5
caataataataactccattttccctctgtcttccccccctcctctacacaaaaatatattattagcatggagaaggtgaattttgtgaagaatggagagcttagattgcctccggggttccgtttccacccgactgatgaggagctggttctgcaatacttgaagcgcaaggtcttctcctgccctttgccagcctctatcattcctgagcttcatgtttgcaagtctgatccttgggatttgccaggttcctttctattttccattcacacccatcatcccctttctctttctctaatttcaattccatgcccccatttttaggtgatttggagcaagagagatacttctttagcaccaaagtggccaaatatcccaacggaaatcgctccaacagagccacaaat

SEQ ID NO: 3580 - DNA, 408 bp, Glycine max
  Clone ID: LIB3028-008-Q1-B1-D9
gatctcatccttgctttctgctgctcctttggagggtgctgctgatcaggttcagaagaccaacaactcgcaggatgtggtggctgcacaagatgattctgcaaaaaccctttccgaagagcttgcagacattgaatcccagctcaagttctttgagaccccttcttttcttgatgaagcctgggctgatgctacattggcgtctttgctcggcggagacgcaactcatgacgccgccggaaaccctatgaacctttggagcttcgacgacctgccttccatggcaggagtcttctgaacaccctttatctccccttttatgtaaataaagctacaagaattgtgatcgtgatgttggtgatggagtccacagcaagaaacctgcttaaagcttatgtggagtttatt

SEQ ID NO: 3581 - DNA, 67 bp, Glycine max
  Clone ID: LIB3028-008-Q1-B1-E1
ctttctttccgctatcagacggatgattactatgattatttatttgtttatttaaacaagtggccat

SEQ ID NO: 3582 - DNA, 364 bp, Glycine max
  Clone ID: LIB3028-008-Q1-B1-E10
gtcggcggcgtaaccctccaacaacaacacttcctcgtcagaaaatgtctctggtggcgaacgaggatttccagcacattctgcgtgtgctgaacaccaacgtggatgggaagcagaagataatgttcgcaatgacctccatcaagggtattggaaggagattcgccaacatcgcttgcaagaaggctgatgttgacatgaacaaaagggctggtgagttgactgctgctgagttggacagtgtgatgactgtggtggcgaaccctaggcagttcaagatcccaaactggtttttgaacagaaagaaggattacaacgatggcaaatactctcaagttgtgtctaatgctcttgatatgaagct

SEQ ID NO: 3583 - DNA, 393 bp, Glycine max
  Clone ID: LIB3028-008-Q1-B1-E12
gaccaaggtaggtcaattgccatggacattggtggtgaagtggaagagaccgtgagagagttgaggcaatacttcaaaactggaaaaaccaagagtgtgacatggaggaaaaaccagctcacagctctcttagaccttgttcatgagaatgaagatgctatatttaaggccctccatcaagatcttgggaagcaccctgttgaggcttaccgtgatgaggttggaggggtagaaaaatccgccagcaatgctttgagctgcgttgagaaatggatggcccctaaaaagagtgatatcccttttcttttcttcccagctaaaggagaagtgttgtcagaaccacttggtgtggttctcatattttcttcttggaacttcccaatcatactgaca

SEQ ID NO: 3584 - DNA, 392 bp, Glycine max
  Clone ID: LIB3028-008-Q1-B1-E2
agaaaaaggaggtttgagagactagaagaggattgggatttggcaagagatttagattagcatggaatcaagaatggagtgtagtagtcatcaacaacctcagtcactgtaaatttttttggttattatttatctctctcaaatgcatatgcaatcgcaatcaattgcaaagcatttcggatccagagggagagaccctttgtgacagcctgtatcgtctcaatcgtctgatagattcctcattttttttccatttctcgcggcaagatctcacactctgcacctaaggttagggttttggttcttgcggcatggcgacttcttcgagttcttcgagctggccccagggcatttcctccgacagcataaagggactgtgcctcgctctctct

SEQ ID NO: 3585 - DNA, 413 bp, Glycine max
  Clone ID: LIB3028-008-Q1-B1-E3
attaacatatacaaattctctgtgttgtgttgtgtacttgtgttaattgtgttgttgttgtaggaaatttaagtgaagagagaatgatgatgaagtctgctatgtgtgcattggtgcttgtggcactggttgtggttgaagtggggcccatggctgaggctgcggtgacttgcaacccaacacagttgactccttgtcttccggcaattaattcaggttctgcaccttcgagtgcttgttgccagaagctgaaggagcaaaagccatgcttctgtggctacctcaaaaaccctagcttgaagcagtatgttaactctcctaatgccaaaaaaaccgttagttcttgtggtattgcctatccaacttgttaagcacctcttatatatatatataaaatgtgtgaacaatatata

SEQ ID NO: 3586 - DNA, 330 bp, Glycine max
  Clone ID: LIB3028-008-Q1-B1-E4
cttgttatggattcaataatatgggcgtttcggcatacagaaaggaatattgctgaaactgggctgaacctgttgttggagatgttgaaaaagtttcaggcatcagagttctgtaatcagttttatcgaacatactttttgacaattgaacaagagatatttgctgttctgacagacacttttcataaacccgggttcaaatttcatgtcttggagcatcaacatttgtactgtcttgcacaaactggtgccctaaccgagcctctttgggatgctgctacaaatccgtatctatacccaagtaatacatcttttgtacgcgagttgact

SEQ ID NO: 3587 - DNA, 387 bp, Glycine max
  Clone ID: LIB3028-008-Q1-B1-E5
tgccggtgtacctttcttgtgttggccatgcgccactgatcaatatcttgacaagtcatatatatgtgatgtgtggaagattgggcttggactagacaaggatgaaaatggaataatttctagggaagagataaggaagaaggtggatcaactgcttgttgatgaagacatcaaagctaggtcattgaaattgaaagacatgaccataaataacatactagaaggtggtcagtcatcaaagaatctcaacttctttatggattgggcgaagtaattatgcttaatttggttctatattgaaaagtcatgtgtaatttctacatgtaagaatttaatttctatgtaaatcttaatgtaatctatttaaaaattaataagctttattat

SEQ ID NO: 3588 - DNA, 387 bp, Glycine max
  Clone ID: LIB3028-008-Q1-B1-E7
atgcacacgaaatcagactcggaggtgacgagcaacagcatggagcagtcgtcgccggcgcgttctcctccgcggcggccactctactacgtccagagtccttcaaaccacgacgtggagaaaatgtcctacggctcaagccccatgggttccccacaccaccatttccactactacctctcttcccccatccatcactctcgcgaatcctccacctctcgcttctccgcttccctcaaaaaccctcgcaacttctcctcctcctcctcctggaagaagctccaccctcaccccaaccgcgacgttgaccccgacgaccatgacgacgccgaccaccacctcaagcagtcctcccgcaacctccgcttgtacttgtggttcttcctc

SEQ ID NO: 3589 - DNA, 366 bp, Glycine max
  Clone ID: LIB3028-008-Q1-B1-E8
ggccttcaatttcacccttcacacgtggtggtggtgttgttcttcttctcttcccctttctttttcttcttctgagcttgtttaagctctttctatttgattccattaacatatattatcacaatgtgtggtattcttgctgttcttggttgttctgatgactctcgagccaaaagggtccgcgtgcttgagctctctcgcagattgaagcaccgtggccctgactggagtgggctccatcaacatggtgactgctttttagcacatcaacggttagccatagttgatcctgcttctggggatcaacctctctttaacgaggacaaatccgtcattgtcacggtgaatggagagatttaaaccatg

SEQ ID NO: 3590 - DNA, 410 bp, Glycine max
  Clone ID: LIB3028-008-Q1-B1-E9
cttcaaaaaccaaagccagaccgaccctaagaagaaaccaacaaacatgggaagcaagaaaacctacgaggaagaagaaagcacggctctattttcccattcccaaacacaaacagacttgctgttacccttcaacgagaacgacccacaggacatggtcatataccaagtcctccacgaagccaatgctctcaccaacacattcctccctcagcccaccagaaacataacaaagaagcactacagaggagtccgccgccgtccttggggaaaatacgccgctgagattcgcgactcggcgcgccacggcgccaggatatggctcggcaccttccaaaccgctgaagaggctgccatggcttatgaccgagccgcgttcaagatgaagggctccaaggccttgctcaatt

SEQ ID NO: 3591 - DNA, 415 bp, Glycine max
  Clone ID: LIB3028-008-Q1-B1-F1
catttttctttcattttccgttagtgttgtggctatggagtcggcattgatatttctgggaacgggagtttcgggaacggttccctccatgaggtgcctcatcgacccttcagatcctccatgtctcgtctgcactcaatctctctccctcccacctcacctaaaccctaactacaggtgcaatacctctctgttaatcgattattactctcaaagcgacgccactcacaaatatatattgatcgacgctggcaagaccttcagggagactgtacttaggtggtttgttttccatcacattccaagaatagattctattcttttgactcatgaacatgctgatgcagtccttggattggatgatatacgagctgtgcagccgtttagtcccactaatgatattgatcccaccccc

SEQ ID NO: 3592 - DNA, 407 bp, Glycine max
  unsure at all n locations
  Clone ID: LIB3028-008-Q1-B1-F12
cttacttactttttcaatggttcaattcctgaaagccttggacaattgacatcgttgcaaagactgaaccttaatgggaacttcctgtctggaagggtcccagcaactcttggaggaagacttctgcatggggctagcttcaatttcactgataatgcaggcctatgtggcatacctggattacctacttgtggacctcacctttctgctggtgctaaagttggcattgggctaggtgtttcttttactcttctacttcttattaccggttcagtttgctggtggaaaaggcggcagaatatcctccgggttcagcaaattacagcaagggcagctccatatgcgaaagcaaggacccaattttcacgtgacatcnagatgcacaggcataataatcataataatgc

SEQ ID NO: 3593 - DNA, 416 bp, Glycine max
  Clone ID: LIB3028-008-Q1-B1-F2
gccgacgtggtatcgacaaagcaaggttccgccggagacgccgcaacgccatgaaccactccccgttcaggctctgaggatcgggggaggactaagagagtagcttcgagctatactatgatggcttcgacaataattaaggggctccgcccgctgtcgtcgaggatgtcggagtttctgctcggatcgggattcgacggactgctacagtatgtttcgtagattgagatcaacaacttgggtaaggtggagaatctgccggtgttgaatgtggcgctagagtcaatgccaacggtggaaattactgagtctctggttgcgacggagacgcacagcgccgtgtgcaaggaacattggcgcgcgagatgtcgtgcaagcacctcttacactctaattgcttgtgtccagtgtgctgc

SEQ ID NO: 3594 - DNA, 397 bp, Glycine max
  Clone ID: LIB3028-008-Q1-B1-D8
cccgctgaaacctttcttcacaaaatggcctcaactacactaacaaccctctccctccgcaacctctcttatcctacaccctcctcctcttcttaccctacgcacctctccgccaacccctcctccctccaattccccaacttctcccaccgcgccaccaccacgcgccgcgcccgcgtcgtcgtcgtctccgccgtcgaggcaccggagaaaatcaccaagctcggcgacgaaatcgcgggactcacgctcgaggaagccaagaacctcgtcgacttcctccaggacaagctcggcgtctccgcggcagcgttcgcccccgtagccgtcgccgcgggtgccgtcggcgccgtggcggacgctccggcggcggtggacgagaagacggagttcgacg

SEQ ID NO: 3595 - DNA, 371 bp, Glycine max
  Clone ID: LIB3028-008-Q1-B1-C2
cttctctgtctttcttttccacccggttccgtttcagctacccaattcaattccatcactgcattgatccgtttccttcaaattcatcaatggacgagttcggcgttttgaccgaaaggttcggtctcaaaccacaaggaaaatccgctccaatggctagggcaaagcgacctccgaatgtcgctgattcccaaacacgccccaattccaaatccccccttaacggatccccgtctcaccaaaactccaccttcgatttcgattacggctttttcagcagcagcaacaacagcaacaccgacaacaaaacgcagcgtttcgacgacatccttggcgtaaacgccaaatccaatggcgcttcgttcgactac

SEQ ID NO: 3596 - DNA, 387 bp, Glycine max
  Clone ID: LIB3028-008-Q1-B1-C3
gttggtaaagaggctggtgaaaagtggaggtctatgactgatgaagagaagaagccatatcttgacaaagttgctgagcttaaggaagagtacgagaaggctatggaaagctatgaagctggtcaagatgaagaagatcaaactgtgtctgataaggaaacttctgataaggaagctgctgcaaaagaagttgcaatagaagttgaagaggagctaactgacgaggactaatggttgcattatggcactccttgaacttgatagctagtattctaagggccacataattacttaacgactaaggttgtaaattttggaacatgttttagttggagttaaaaactgttgaaatccatgcgcaatatcttttcattttttgtaatgctc

SEQ ID NO: 3597 - DNA, 282 bp, Glycine max
  Clone ID: LIB3028-008-Q1-B1-C5
gttgtaacattattctttacgagcgttatgtactgtacctggacatgatttcttataccaaccctgttaataagcatgggacgctggggaaacctatttacattgtaatttcgtgcaaaatagatgctgtaacaaaggcattttacttttacttggggagaggcagtggaaccataaggaccttggaaattctgattaatatgacagggcacaatatcgtgtttgtaagccaacgctttatttttattttatggtaacccctttctgtggataattcttaat

SEQ ID NO: 3598 - DNA, 392 bp, Glycine max
  Clone ID: LIB3028-008-Q1-B1-C6
gacctcgcccaggccttccgcctcatcgaccgcgacaacgacggcgtcgtcacgcgccaggacctcgaggccctcctcacgtgcctcggcgcgtcgccgtgccccgacgacgtggcggtcatgctcggcgaggtcgacggcgacggcatcaccgtagaaaggctcatgagctacgtcgggtcgggtctgaaacccgggtcggatccggacgagctcaaggaggcgttcgaggtgttcgacacggatcgcgacgggaggatctcggcggaggagctgcttagggttttcaaggccatcggcgacgagcggtgcacgttagaggagtgccggcgcatgatagagggtgtggacagaaatggggacgggttcgtctgcttccaggacttttctcg

SEQ ID NO: 3599 - DNA, 381 bp, Glycine max
  Clone ID: LIB3028-008-Q1-B1-C7
cccggatttgagtggaaatgatcctgagaccacaaatttctgcatgttcatcaatgaagtctacacggtgctcagcgatcccgtccaacgcatgatttatgatgaaattcatggctactctttaacttcaatcaatcctttcttggatgattcaagcccaagggatcatgcctttgttgatgaattcagctgcataggctgcaaaaattgtgccaatgtagcccctggtgtgtttgcaattgaggaagactttggaagagccagagcatacaaccaatgtggggaccctgaattagttcaacaggcgattgacagttgccctgttagctgcattcattggacatcttctgcacagctatcattactggaagatgagatgcg

SEQ ID NO: 3600 - DNA, 408 bp, Glycine max
  unsure at all n locations
  Clone ID: LIB3028-008-Q1-B1-C8
tgtgcttttacgagatttagtctaggagaataagaaacccggattgttcacgtgccaaccaagaatctcgaagctcccaaaatccaacagctaaaaaattcacagctgtgtcatccatgaccatgattcaatcccatccaaatccctctctataatgccttcatcaagatccagtagtaggaacgaaacaacgattgagtaatcctcacttgatgatactactagtcctgagatgataacatcaaacttcgcaataacaacgaaacttccttacaatttatctttctctctttcgttctttcttccttccctctcttctattctcttcttgtctttacatcacaccctctttccccctttgccaaagctctgatcntttccctctccaatccccgtttctccactttt

SEQ ID NO: 3601 - DNA, 406 bp, Glycine max
  unsure at all n locations
  Clone ID: LIB3028-008-Q1-B1-C9
taataacgaaccttggggattaattgataatattagtttattatttgggaaagattcctgtgaaatgaaagatttcattaactcctaagtcatgtcgagtagaccttgttgtttcgagaattcttaattcatgagttgtagggagggatttatgtcaccacaaacagagactaaagcaagtgttgggttcaaagctggtgttaaagattataaattgacttattatactcctgactatgaaaccaaagatactgatatcttggcagcattccgagtaactcctcaaccaggagttccgcctgaagaagcaggtgccgcggtagccgccgaatcttctactggtacatggacaactgtgtggaccgatgggcttaccagtcntgatcgttacaaagggcgatgctac

SEQ ID NO: 3602 - DNA, 393 bp, Glycine max
  Clone ID: LIB3028-008-Q1-B1-D1
ggcacccagagacgaggaagggcgtagtaagcaaagctcaacgtcgattactacaaaaacacatgcccagacttcgaaaaaatcgttagggaaaacgtcttcaccaaacaaagcgctagcgtggccacagcaccgggtctccttcgcctcttcttccacgattgcatcaccgatggctgcgacgcttccctcctcataacttccaatgcatacaaccctcatgcagaacgtgatgcggacctcaacctttctctctccggtgatgccttcgacatcatagttaaaatcaaaaacgcattagaacttgcatgccctggtgttgtgtcgtgttccgacatcgtggcacaggccacaagagaccttgttaagatggtcggtggtcctttttacccg

SEQ ID NO: 3603 - DNA, 375 bp, Glycine max
  Clone ID: LIB3028-008-Q1-B1-D10
gggagagcgaagctgaagagaatatttttgtttctcaagccttcgaaatccagcgatctctcattcttcaatggccaccctctccgcatgcgcttctcctccatggccaaaccctgattctcccaattcaaatccaaaccctaatttcctccccgaccaatctcaaaccctcgacttcgactccctcatgcctccgcaacccgaatccccaccgcccaaccatcaccactcccccgacgcctctccaccggaatcctccccgtcgccgccgcctccgtcgatcctctacctctccttcaaccaggaccaggcctgcttcgccgccgccgccgacaacggcttccgcatctacaactgcgaccccttccgccagct

SEQ ID NO: 3604 - DNA, 381 bp, Glycine max
  Clone ID: LIB3028-008-Q1-B1-D12
cttcatataaattttctattccccaaatctcctccttagactgccaacccaatatagccattggatcgaattcagtctgaattcggtctaatggtttgggagttctaattaagtctaagaattctgtacatatatatatttagaagatcacagggtgcttgatcagtggtgtatcaggatggacaaggtgacgaggttggcttctgaaaagggtgtggtgattttcacaaagagctcttgttgcctctgctatgcagtcaacattctgtttcaagaacttggtgtgaatcctgtggttcatgagattgatcatgaccctgaaggcagagaaatggagaaagctctattgaggcacggctgcactgctccagttccagctgt

SEQ ID NO: 3605 - DNA, 410 bp, Glycine max
  Clone ID: LIB3028-008-Q1-B1-D3
gaaactgtttggtgttgctacagttgacaaagtccctaccctgtttgtattgcagcagtacgacaatccactatcaaagaagttaaatgaagtggtaaatgagatacggcggcaaagatgttcctacttccggttcaagctctgcaggaaaggagatccatcaggaatgctattcttctcgtatatgatagaagacaagagcgcaggtggcttctcctatgtagagtttcttatccatgttcataggcaaattcaaaataaaatgtcatcataacgagtatatggcagcttcatttttgcaagcttttagacctaaatgatagagcaagccccaagtataggtgagattctgcatatttatgtgcattcaattgccttgagtttgacagacgaataccagaagacacaag

SEQ ID NO: 3606 - DNA, 415 bp, Glycine max
  Clone ID: LIB3028-008-Q1-B1-D4
cattccaatcgctcccaaaatcttttctaatttgttcataactcaataattctcatcatgggctccttgattgttccaggtgaacatgatcacaaactaaagcttgtttctcttccctttgtatcaaccagtcacctcattcccgtagtagacatagctaggctctttgccattcatggtgttgatgtcaccataatcaccaccacagccactgccgccattttccaaagctctatcgatcgcgaccgtgaccgcggccacgctattagaacccacgttgtcaagttcccatgtgaacaagttgggttgccagaacgagtagagagcttcaactccaacactcctcgggatttggtccacaaaatctaccagggactcaccattctccaagaccaataccaacaactcttccatg

SEQ ID NO: 3607 - DNA, 410 bp, Glycine max
  Clone ID: LIB3028-008-Q1-B1-D5
caattaccattccataacctaaatctcctctttgtttccgagtcagagagcaatggcacgtaccaagcaaaccgctcgcaagtccaccggcggaaaggcgccgaggaagcaattggcgactaaagccgctcgcaagtcagctccggccaccggcggagtgaagaagccccaccgcttcaggcccggaacggtggctctgagggagatcagaaagtaccagaagagcactgaacttctgatccgaaaactcccattccagaggctcgtcagagaaatcgctcaggatttcaaaacagatcttcgtttccagagcagcgctgtttctgcgcttcaggaagccgcagaagcttatctcgttggactcttcgaggacaccaacctctgcgctattcacgccaagagagtcacca

SEQ ID NO: 3608 - DNA, 332 bp, Glycine max
  Clone ID: LIB3028-008-Q1-B1-D7
gttgtctaaaaacactgatgacaaagctggcaaggaggctgtggaaaatgtgtttctcgcagccgaggctattgaggagtttggtgggattctagtctccttgaaattggaatttgatgacagcattggattaagtggcgaggatgtaaagccattgcctgatcatataaaaaatgctctgtgtaccacttttgatcgctactccacctatttgaattcctttggacctgatgagaactacctgcggaagaaggtggagacggaattgggtgcaaagatgattcacctaaaaatgagatgcagtggccttggtgctgaatggggaaaggtta

SEQ ID NO: 3609 - DNA, 395 bp, Glycine max
  Clone ID: LIB3028-008-Q1-B1-C12
actatcttctctgctctctttctactttgtgccttcaccacctcatacctaccttcaaccaccgcggtggtcgataccgacggtgatattcttcagaatcctggcacatactttatcttgtccgtttttcgacccggcggcggagtagaattcgccgccactggaaacgaaacttgccctctcactgtcgtgcagactctcttcgggaggggctttccagcaatattatcgtcccggttacgaatccctttcatcggcgaaggacaactcttcagcatcctgttccgtattgtgccatggtgcgccaccactccttctaagtggaccattgtggagggtttaccagaatcacccgcggttaaactcactgggtacgacaacacagtgcctggtga

SEQ ID NO: 3610 - DNA, 401 bp, Glycine max
  Clone ID: LIB3028-008-Q1-B1-A9
atttgaaaatgccatgtgaatcgctagaaacatgtaaagtgtgtggctaacccaataacgaaagtttcgtaagggaactggagcaggctaccatgagacaaaagattttctttctaaagaaattcgattcggaactacgatatgtccaaggtccaatatggaaagaatttcagaggttttccttgactttgtccgtgtcaacaaacaattcgaaatgcctcgacttttttagaataggtccgagtcaaatagcaatgattcgaagcactttacactattttggaaacctaaggactcaatcgtatggatatgtaaaatacaggatttccaatcctagcaggaaaagggggggaacggatactcaatttcaagtgagtaaacagaattccatactagatatc

SEQ ID NO: 3611 - DNA, 317 bp, Glycine max
  Clone ID: LIB3028-008-Q1-B1-B1
ctagctgttcgtctcctaagtatacaagggatcagatcagtatttcatttggggatgcttatggcaaccagatatatgcgccaagactggatgatccagcttcaggtacattcgagagctgttcttcagatacatttcatataactggtccgtgtgcatatcagatatgttatgtgtacctatatagatctggattatatggctggaagcctgacagtgtgaacataaatggttataacggcaagcctgttactttctattacaacacatatatcaccagagatacgtggtatggatttaagttgtgcaacggtgct

SEQ ID NO: 3612 - DNA, 371 bp, Glycine max
  Clone ID: LIB3028-008-Q1-B1-B10
gagaaaatgaaacaggtctagttagtaatgtggcattcccacaggagcttcatgggaaattgtctattactggcagttctagccatgccatcgggcttggtgatcgagtaactactccagcaggggcacaccaaggaagcgtttttgcaaaagatacaagaactttggtccaaccaccagatcccagttctgaagacaaaagaccacagtgatagtagtttgaggctgaaagatttttgtcttcctatttattggaaggctcatcctgattcctgttggggtatcatccactttgacaaattttctttcaactccacccctcccaattcggtcttttcttccccttttttcaatgtatgcggggagcaaga

SEQ ID NO: 3613 - DNA, 329 bp, Glycine max
  Clone ID: LIB3028-008-Q1-B1-B11
gaaaaaacgaaacacgtctagttattactgttgcattcccacaggagcttcatgggaaattgtcaattactggcagttctatccatgccatcgggcttggtgatcgagtaactactctagcatgggcacaccacggaagcgtttttgcatctgatacaagaagtttggtccagttaccagatcccagttctgaagacacatgactcacagtgatactactttgatgccgagacatttttgtcttcctatttactggaaggctcatcattaatcctgttggcgtattatctcttttgacaatttctcattcaactccacccttcccactt

SEQ ID NO: 3614 - DNA, 406 bp, Glycine max
  Clone ID: LIB3028-008-Q1-B1-B12
accaacacaaaaaactccgcagactgctttatgcagtctaatggatattccctagcgcaagataatcatggatgcttcggttgcatttcaggaactgggggtaccatggagctaaagtgcccaccaaatggtcagatgcagatgcataatgagtttgatggggctctccctttggtgacagttcctgctgctgctgaatttagcaaggaaaatggtgtctgggcatgctctcctgatcgtcttgaactgccttcaaagccattccaccattcaaactgctcagattcaccatgtgtatcagaatctggttctgatatttttagtaagcgggaagtcatacagaaactgcggcaacagttgaagagaagagatgatatgatactagaaatgcaagatcaaatggctg

SEQ ID NO: 3615 - DNA, 360 bp, Glycine max
  unsure at all n locations
  Clone ID: LIB3028-008-Q1-B1-B3
gtcttttatagcagcagttgagaaaggaaacatgagaagcatgccaaacagaagcatgcctgcatctccttatcctacacctggcgcccttctcatgggagatgccttcaacatgcgtcaccctttaaccggagggggaatgactgtggctttgtctgacattgttttgctaaggaaccttcttagacccctgcatgatctgcatgatgctaatgctctttgcaaatatcttgaatcattctccaccctgcgcaagccagtggcatctacaataaacacactagctggggcactgtacaaggtgttttgtgcattccctgacccagctagtaaggaaatgcgccangcatgttttgatta

SEQ ID NO: 3616 - DNA, 401 bp, Glycine max
  Clone ID: LIB3028-008-Q1-B1-B4
tgcaaagggattgctctatcttcatgaatttagtcccaacaaatatgtccatggagacctcaagccaagtaacatacttcttggacacaatatggaagcccacatttctgactttggagttgggcgccttgcaaacattgccggagggtctccgaccttgcaatcgaaccgagtggccgcggagcaactacagggaaggcagaatagcatatccactgaagtcacaaccaatgtgttgggaaatggttatatggcaccagaagcactgaaagtggtgaagccatcacagaactgggatgtgtattcatattgtgtgatattgttggaaatgatcacaggaagatcatccattgtcttagtggggaactcataaatacaccttgttcagtggattcagttgt

SEQ ID NO: 3617 - DNA, 407 bp, Glycine max
  Clone ID: LIB3028-008-Q1-B1-B5
tcctcctcagctcctctgataatataaccatgtaacgttcaaattctacgccaatctctgtcgcattctctttcctctttcttttttccttttccttagaagaatcgaaaacatcttcgaaaagcaagccattattaatggctgtcgactcctccttccagaaagaacatcaaattcgggagtttgtggacgggagtggaaacgtagctgtcggtttgaagttgcataataaaccaagtagtgatgaccttaaccgacagtttcctttaggctcaagatgtttatagtatttcagtgttgcctgaggaaaatgaaaatgcaaattgtgcttcaccactagctttcttgagcatcttagaggttcctaatcaagttaaaaacacaatgtgcttagatgctcacataaa

SEQ ID NO: 3618 - DNA, 366 bp, Glycine max
  Clone ID: LIB3028-008-Q1-B1-B6
cagcctttgattcccaaatccctcgtcccattgaacagtgatcagttatattcgcgttgcgatctattccaattccatgacgacaccaccgtcttcctcctcagcttcgcactcgcaattcgcctattcaaacccttcctcctcctcctacttccccgttccctttcaccttcagcaagccgcaaccactcactacgctgcgccctacgtcgccgccccctccgtgcaaatccccgctcctcccgtcgtcggccccattgctcccgcgccggttcccggcgtgtactccgccgtgccgcaatatcaggcacagcagttatttgagagggatgcgcagataataacgccggacgctcttgagaatgt

SEQ ID NO: 3619 - DNA, 405 bp, Glycine max
  Clone ID: LIB3028-008-Q1-B1-B7
ctcgagccgattcggctcgagtgcctattgttttctgtatttagattttttcgtcaacttttccgattttttcctcacttgttgtgaataatctggcagaggcggcagcaaataagaatggcttcaaatcccaaacctttgacttttgaggaggtggctaatcacaacaacaaaaaggattgctggattattatcaatggaaaggtgtatgatatcacgccatttctggatgagcatcctggaggagatgaagttttggtaacgtcaacagggaaggatgccaccattgattttgaagatgtgggccacagtgattctgccatagaaatgatggaaaaatacttcgtcgggaaggttgacacttccactcttccagcgaaagttaaccataatctgccacaacct

SEQ ID NO: 3620 - DNA, 395 bp, Glycine max
  Clone ID: LIB3028-008-Q1-B1-B8
accaacacaaaaaactccgcagactgctttatgcagtctaatggatattccctagcgcaagataatcatggatgcttcggttgcatttcaggaactgggggtaccatggagctaaagtgcccaccaaatggtcagatgcagatgcataatgagtttgatggggctctccctttggtgacagttcctgctgctgctgaatttagcagggaaaatggtgtctgggcatgctctcctgatcgtcttgaactgccttcaaagccattccaccattcaaactgctcagattcaccatgtgtatcagaatctggttctgatatttttagtaagcgggaagtcatacagaaactgccggaacagttgaagataagagatgatatgatactagaaatgcaaga

SEQ ID NO: 3621 - DNA, 406 bp, Glycine max
  Clone ID: LIB3028-008-Q1-B1-B9
caataataataactccattttccctctgtcttccccccctcctctacacaaaaatatattattagcatggagaaggtgaattttgtgaagaatggagagcttagattgcctccggggttccgtttccacccgactgatgaggagctggttctgcaatacttgaagcgcaaggtcttctcctgccctttgccagcctctatcattcctgagcttcatgtttgcaagtctgatccttgggatttgccaggttcctttctattttccattcacacccatcatcccctttctctttctctaatttcaattccatgcccccatttttaggtgatttggagcaagagagatacttctttagcaccaaagtggccaaatatcccaacggaaatcgctccaacagagccacaaa

SEQ ID NO: 3622 - DNA, 353 bp, Glycine max
  Clone ID: LIB3028-008-Q1-B1-C1
ggcaaacgcagcatctggtatggcagtccatgatgactgcaagttgaggtttttggagctgaaggcaaaaaggacacaccgtttcatagtttttaagattgaggagcagcagaagcaggtcattgtggagaagcttggtgagcctgcccagggctatgaagatttcactgccagccttcctgctgacgagtgccgttatgctgtttatgattttgagtatctgactgaagggaatgtccctaaaagcagaatttttttcattgcgtggtcccctgacacatcaagggtgaggagcaagatgatttatgcaagctccaaagacagattcaagaaggagctggatggaattcaag

SEQ ID NO: 3623 - DNA, 409 bp, Glycine max
  Clone ID: LIB3028-008-Q1-B1-C10
caaatcccttttctcgttcttcccaattccaatttccaattctccggccatgtcaaccgcggcagcggcggggggcgacatggaggcgggtttcgcgaagctccagggcgaggactttgagtattacatgcagacctactccatcgtcctcggccgcaactccaagaagtccaccgtggacgtcgacctatccagcctcggtggtggcatgaacatctcccgccaccacgctcgcatcttctatgactttgcccgacgccgcttcgccctcgaggtcctcggcaagaatggctgcctcgtcgagggcgtcctccacctccccggcaacccccctgtcaagctcgattcccaagatctcctccagattggggacaaggagttctattttctcctgcccgttcgcagcatc

SEQ ID NO: 3624 - DNA, 406 bp, Glycine max
  Clone ID: LIB3028-008-Q1-B1-C11
gaaacataccgaatgagagcatcaaactcttcttcttcgatttccattgcgaagcgttactttttcttcttctttctcttcattttcttcgctcttcgatcttcgtccggggactgctccgaataccaccaccaccactcgccgatggccacgatcggaggcttacacgactcccaaggctctcaaaacagcgtcgaaaccgaagccctcgctcgattcgccgtagacgaacacaacaagaagcagaattcgcttctggagtttgctagggtggttagggcacaggaacaggttgttgctggtaccctgcatcaccttactcttgaggctattgaggctggtgagaagaagctctatgaagccaaggtgtgggtgaaaccatggctgaatttcaaagaactccaag

SEQ ID NO: 3625 - DNA, 377 bp, Glycine max
  Clone ID: LIB3028-008-Q1-B1-A8
gtggaatggttggcttgttggtagaagaaattgggcgtgtgggagttgttgaatcgggaagcaaaagcaatgagaatccatcacatagcatgccgccaggacgattagtcctatctgatcgtagacgagagcacgaaggaagccgcggcggtggacccggtcgaaccggagaaggttcttgaagttgccagctcgcacggactcactctcagattcgtcctcaggacccaccatcactgggattatgctggtggaaacgacaagataaagcagctggtgccaggaatcaaagtctatggtggttccattgataacgtcaagggttgcactgacaaagttgcaaacggtgataaggtctctcttggagctgaaatcac

SEQ ID NO: 3626 - DNA, 407 bp, Glycine max
  Clone ID: LIB3028-007-Q1-B1-H12
ttactcagattgctccttctaggacttacgattcactaactgaagatttcagctatgctttgcttcttctaacaattgttgcacttgtagctgcaatatttgtcacttgggtattatcccagaggaaagatctacaagagaaatggagatgatctgtcctccatttttgccttataatttctaattttgaagttttaagtagttttatctctgttttctttgttagttattagttcggattttgaaatcttttgtagcttgaattgcaaaagtaatgcagaattccattaggttgaatggaggatgttttcattttaatgatgtaaattgaggagtacgaaagataatcatgaaattccgatgtttgacatgaatgttttatcattgttgtcaaggttaaatattca

SEQ ID NO: 3627 - DNA, 395 bp, Glycine max
  Clone ID: LIB3028-007-Q1-B1-H2
gccgcaccttgattcagagcagagcgaccttgaagagctatggctgtcggaaagaataagaggatttccaagggaaagaagggtggcaagaagaaagccgctgatccctttgccaagaaggactggtacgatatcaaggccccttccgtctttcaggtcaagaatgttggcaaaaccctcgtctctcgtacccagggaaccaagattgcttctgaaggactcaaacatagagtgtttgaggtctcattggctgatctccaaggagatgaagaccatgccttcaagaagattcgtttgagagctgaggatgttcaagggaaaaatgttctgacaaacttttggggaatggatttcacaactgataagttgaggtccttggtgcggaaatggcaaac

SEQ ID NO: 3628 - DNA, 245 bp, Glycine max
  Clone ID: LIB3028-007-Q1-B1-H5
gaatgagtaactgtcatttgttgtgtatcaagtcaggcatatagaatcttctgctccttttcgcctttgacttttttggcagggctcgtccttcatgactagatcaatgcattattcgagcaacacgagatataatgatgaaggacgaacacttatatcaatagctgtcgatggatagagtcaattggtaaaaaagcgtgactgtactaaaagtgaagcataacataacattcgtcgacacgtaa

SEQ ID NO: 3629 - DNA, 411 bp, Glycine max
  unsure at all n locations
  Clone ID: LIB3028-007-Q1-B1-H6
cctggccaaaaagtactggatgttggttgtggtacaggaggaggtgacatttacatggctgaaaattttgatgttgaggttgttggcattgacctctccataaacgtgatttctcttgctattgaacgtgctattggactcaaatgctcggtagaatttgaatgtgccgattgcactaaaaaaacataccctgagaatacatttgatgtaatctattcccgtgacacattgttacacatcaaagataaaccaccactattcagatcattttacaaatggttgaagcgtggaggtacacttattattactgattactgcaaaagtgaaggaagtccatcattangatatgctgagtacataaaaaaaggaggatatcatatccatgacatgaaaacatattgtcagatgttt

SEQ ID NO: 3630 - DNA, 369 bp, Glycine max
  unsure at all n locations
  Clone ID: LIB3028-007-Q1-B1-H7
tgaaaatgttgctattgtgaaaccaactgatgaggagccttatgcaccaaacaatcctaaaggttttgttggcaaagctcttggacaaccaggactgaaacgttcagtgagggttggggagacaggtttcagagaagttgcagcctaccttcttgaccatgatcattttgccaatgtaccctttactgcccttgtaaaggtcacacattctatttttaatgttaatgacagggtcaatggtagtatgcatcataacaaaaagcaaataagcaagattgcatctctgcagcagtttattcctcatgattttgatgcaagtgatcatggaacttctagtttccctgttgctgctgttcatangattgggat

SEQ ID NO: 3631 - DNA, 400 bp, Glycine max
  unsure at all n locations
  Clone ID: LIB3028-007-Q1-B1-H8
cagaattctctaaaagagatctttttctgctctttgaagaaagaagggtctttgcttgattttggagatgtctctgctctcagatctcatcaaccttaacctctccgataccaccgagaaggtgatcgcagagtacatatggatcggtggatcaggaatggacctgaggagcaaagcaaggactctcccaggaccagttagcgacccttcagagcttcccaagtggaactatgatggttccagcacaggtcaagctcctggtgaagacagtgaagtgattttatacccacaagccattttcagggattcattcanaaggggtaacaatatcttggttatctgtgatgcctacactcctgctggagaacctattcccactaacaagaggcacgctgctgcc

SEQ ID NO: 3632 - DNA, 399 bp, Glycine max
  Clone ID: LIB3028-007-Q1-B1-H9
agagaaacaacaacagaggagcaagcaggcacatgctgtcaccaccccacgatctaaaagaagaaagaaccagcttaagaaagtttgtcaagtgccagttgagaatctctcctcagacatatgggcatggaggaaatatggccagaaacccataaaggggtctccatatccaagggggtactatagatgtagcagctcaaaggggtgtttggcaaggaaacaggttgaaagaaacagatcagacccaacaatgtttatagtgacttacactgctgagcacaaccaccctgctcctactcacagaaactctcttgctggctccacacgtcagaagccattggtacctcaaacagccaccaccactgaagaagactctgacaagagcaagagccctcacaa

SEQ ID NO: 3633 - DNA, 281 bp, Glycine max
  Clone ID: LIB3028-008-Q1-B1-A10
gtgaggtagaacccttccactgtcgtgaatctgctatgggtgcctacaactatgtttcagagcgatggcgcaagaaacagtctgatgtcatgcgcatcttgcagcgggtgaggtgctgggagtataggcagcaatattccaatgttcgtgtgacagggtctacccgctctgaaagtgctcgtcgcttgggcttcaatgcgaagcaaggctatgtgagtaccgtgttcgtgttatgaggggtggtcgaatgagactaattcgcaacagtattgtctatggga

SEQ ID NO: 3634 - DNA, 382 bp, Glycine max
  Clone ID: LIB3028-008-Q1-B1-A12
tgaactttgtacttattattctttataaatcttttacgttttcttaacatttttcgggaatgcgagctgaaatgtcaatcatcatgacatgagattggtcctctctatattgatcgcacaatgtatcacagggttgcatccaaaaagaaaaatgtggcagatgaagctggtgttattttgcaggcaaaattgaagcaactagagtcttcatcctaaaagtagttggtatagaatttaataatgtttttcttccaatgcattgtaccatagaaaattataaccaatggtgttaaggtcagtgatgttatatgctatttaaactttttatttgtaaactccccttttgttggcaccttcaaaatttgctttcgaactaaagaat

SEQ ID NO: 3635 - DNA, 364 bp, Glycine max
  Clone ID: LIB3028-008-Q1-B1-A2
tccattttccctctgtcttccccccctcctctacacaaaaatatattattagcatggagaaggtgaattttgtgaagaatggagagcttagattgcctccggggttccgtttccacccgactgatgaggagctggttctgcaatacttgaagcgcaaggtcttctcctgccctttgccagcctctatcattcctgagcttcatgtttgcaagtctgatccttgggatttgccaggtgatttggagcaagagagatacttctttagcaccaaagtggccaaatatcccaacggaaatcgctccaacagagccacaaattcgggttattggaaggcaactggcttggacaaacaaattgttacttc

SEQ ID NO: 3636 - DNA, 335 bp, Glycine max
  Clone ID: LIB3028-008-Q1-B1-A3
ctagtcgtagtattatttcatcgattctctcccttctctttctctctgcgacaccagatgatggagacgacggcgaagcgaaacgctgtcgttgcgccaatcgcggcgttgttgttggtggtgctactcgcggcgagtgtggtggtggaggctcaggagaactcggacgtgaagacgctggtgaagcacatgcacgggaagaagtactgcgacaaaggatgggaatgtaagggctggtcaatttactgttgttacctcactattactgattattttccagactaccagttcgagaatctcctctccaagcggaactcgccgggtggcgcacgccg

SEQ ID NO: 3637 - DNA, 374 bp, Glycine max
  Clone ID: LIB3028-008-Q1-B1-A5
acgtcgacagctacataagtaccattggagttgatttcaaaatcagaaccgtggagctggaaggaaaaaccgtcaagctgcagatttgggatacagctggacaggagcgattcaggactataacaagcagttactatagaggagcacatggaattattattgtctatgatgttactgagatggaaagctttaacaatgtcaagcagtggttgaatgagattgatagatatgcaaatgacactgtatgcaagcttcttgtggggaataaatccgatctagttgataacaatgttgttgactcgctaacagccaatgcatttgcagatgagcttggtatccctttccttgagacaagtgcaaagactcaatcaatg

SEQ ID NO: 3638 - DNA, 405 bp, Glycine max
  Clone ID: LIB3028-008-Q1-B1-A6
gtgaatgatctgacatttggagtggatataaaacagataagatggatgggaatactacagagaattgcagtagcatatttggttgtcgcactgtgtgaaatttggctcaagagtgatgatactgttaattcaggaccatccctattaaggaagtatcgataccagtgggctgtggctttgattctttctttcctttatctttgcttgctatatggattgtacgttccagattgggtgtatcaaattcaaacagaaccttctgcagagccaaagacattttcagttaaatgtggagtaaggggtaacactggtccagcctgcaatgtggttggaatgattgatcgaatgatattgggtatacaacacctgtacaagagaccaatatatgcgcggatgcctgaatgc

SEQ ID NO: 3639 - DNA, 391 bp, Glycine max
  Clone ID: LIB3028-008-Q1-B1-A7
tttatcatctccgttaactcatcatatgtcaaagcatttggatgtgtatgtgcatgcttgttaaaggcaaatagagagcctaaagatttctcaggaaggtaggttttgtcaaatctttgacatgaaatcacatttttttcattgtatgttaactaaaatttaatatatattttttactaattgataatattttgtaacgatgatgcacaggattggtagtgtggttgaatggaaaattctttacaaacttgctaaagataagagtggattactgcagaaagaaacaatccgaggtgtttacgatggaagtttatttgaacaactgaaaaaacaacactcttcaggcaaagagaagtagtaatatttttcagacacgtatgtgaaaagaaga

SEQ ID NO: 3640 - DNA, 393 bp, Glycine max
  Clone ID: LIB3028-007-Q1-B1-H11
aactgaacctctctccgttgcgtacgacgcatcataggcatagcaatagcattgaagcaacggcggcggcaaccaccgttcaacgccggagataccatctatttctactgtattcttctcactctgatttattctcttcagtgaacactgtagctatgggaatcagtaaaacagaagtgaacttaaggaggttgcttggagctgctcctcagcagcaaaaccaggcaaaacttgtgcattatgttgcgtgaacaattggaacaattggctgaagaaaggacactggaaggcttaccaaggatttcaaaggctatgttgaatgattattcagagaagattgaagccattgcttccaaattggttaatcatgtgattgacgcacgagtacctgag

SEQ ID NO: 3641 - DNA, 393 bp, Glycine max
  Clone ID: LIB3028-007-Q1-B1-F5
tgtttataaaggagttccaaaggattacaccggcgaagatgttactgttgataacttttttgctgctttacttggaaataagtcagcactgactggtggcagtgggaaggttgtggacagtggtcctgatgatcatatatttgtatactatactgaccatggaggtcctggggtgctcgggatgcctgctggtccttacttatacgcggatgatctgattgaagtcttgaagaaaaagcatgcttctggaacatataaaaacctagtattttatctggaggcatgtgaatctgggagtatctttgaaggtcttcttcctgaagatatcaatatttatgcaaccactgcttccaatgcagaagacagtacttggggaacatattgccccgggga

SEQ ID NO: 3642 - DNA, 399 bp, Glycine max
  Clone ID: LIB3028-007-Q1-B1-F6
gaccttagaaagagaaggaaaaaaaaaacttgtgtttcttgggaagccatgagcaccaccgagagtcaaagatataagggcacagtgaaatggttcaacgaggagaagggtttcggtttcataactcccgaagatggtggctctgatctcttcgttcactacagtgcgatccaaaccgacggcggcttccgcaccttgtcggagggtcagtcagtagagttcctcgtcactcaggacgacagcgggcgagccgcggccgtcaacgtgacgaccaccacggttaaatctagtgacagcggtaacggggaaaactctggtggtgatgctgccaatgttgagaaataagtgagaatgaattattggagtttcctgaattgcgagtatgatatttatattgat

SEQ ID NO: 3643 - DNA, 421 bp, Glycine max
  Clone ID: LIB3028-007-Q1-B1-F8
aagagacttattgtcaaccagattcttccaccatctacatctgattgcaagttttgtgctatgaaaagaaaggatcaaatgcgtgctcttgatatagttcagaacgatccagaactctccagcttattgatgatccaggcaccactcatagatgttgagataagaggtgttccagctctcaaatttctgggtgacattatttggaaatgatttacacacagttactcaagcaatgattaggttaaatttagtaatttgctgaagttggtagttgaaaccatagacacatggcatgacatcaaggctcatcagattttatatgatgaatttgtggagcacttgagatgttcagattccggtactggcagttcttaaagagatactggcttccaatattcacacgccagagtttcaaaacacc

SEQ ID NO: 3644 - DNA, 399 bp, Glycine max
  Clone ID: LIB3028-007-Q1-B1-F9
cgcaagcaaaaagaaagaatcccaggcgaggagaaagatggaggggaaggagcaggatgtgtcgttgggagcgaacaagttccccgagagacagccgattgggacggcggcgcagagccaagacgacggcaaggactaccaggagccggcgccggcgccgctggttgacccgacggagtttacgtcatggtcgttttacagagcagggatagcagagtttgtggccacttttctgtttctctacatcaccgtcttaaccgttatgggagtcgccggggctaagtctaagtgtagtaccgttgggattcaaggaatcgcttgggccttcggtggcatgatcttcgccctcgtttactgcaccgctggcatctcagggggacacataaacccggcggtgac

SEQ ID NO: 3645 - DNA, 360 bp, Glycine max
  Clone ID: LIB3028-007-Q1-B1-G10
agcaaggagtaaccaccaaattcattccaaacaggagagaaaaagcaaagctcctcctgttatttcttggtggttggaggaggttcagaggaagaagaagatgagttaggagaaattaatattaactcttcaattttgtagtccaattgatccatccatggtgggggaatcaagaaagtgggtgatacttttggcatcaatatgggtgcaggcattcacagggacaaactttgacttctcatcatactcatctgagctcaaatctgtgcttgacataactcagcttcagctcaattacctctctgtggcctcagacatgggaaaggcctttgggtggtgctctggggtctcactcatgta

SEQ ID NO: 3646 - DNA, 380 bp, Glycine max
  Clone ID: LIB3028-007-Q1-B1-G2
gtcaaataccaatgaaagcaactactggcgcattttcttcttcgtcttcgtctcctctttctcaatttcgatttctcaattctcaattctcaatctcaaggtgaaatgatgcactcagtggcaataattacttttggatgctggagataaggcgtgatgggcggttgctgttgttgttgttcttctaaggagactgtgttgagcgctccacctgcgtactactattatccaagagcatcagaagagcatgttcctctatcttctcacccgggtgctgcttctgctttctctgggcggctattggttgatactaatctagatacttcatctcctgatacttatagacctcctcctgctcctatccctttcaatgttacctt

SEQ ID NO: 3647 - DNA, 368 bp, Glycine max
  unsure at all n locations
  Clone ID: LIB3028-007-Q1-B1-G3
gtcacaagcgacaaccatggaccgtcacatangaaaaacatttcaaatgcccgcggcatcaatgaccgttttcttaattggaacaattctcctaactgtccccttctacgaccgtttcattgttcccgtggcaaagaaagtgctcaagaatccacatggtttcacccctttgcaacgcattggagtcggtttagtactctcagtggtttccatggtggtaggagcactgatagaaataaagagactaagatatgcccaatcacatggtttggtagataagccagaagcaaagatccctatgaccgtgttttggttgataccacagaacttgtttgtgggggcaggggacgcatttatgtacatggggc

SEQ ID NO: 3648 - DNA, 416 bp, Glycine max
  Clone ID: LIB3028-007-Q1-B1-G6
ttccatcagatatattttcttcaaaaacaatggcaggcgaggtggtgaagaaggaagactctctcaacctgaaagtcactaacaggagtcatgttcaacctgaggagaaaattggaaggaaagagtaccagctggtcacttttgatcttccctacttggccttcgactacaaccagaagctgctgttttacaagggtgaagattttgagggtatggtccaaaaactcaaagttggacttggtgtggtgctgaaggagtttcaccaacttgctggtaagttagggaaagatgaagagggggtgttcagagtggagtatgatgatgacatgcttggtgtggaggttgttgaagctgttgttgttgatgataatgagattggtgtggatgatctaactgtggctgaaattagtaacact

SEQ ID NO: 3649 - DNA, 380 bp, Glycine max
  Clone ID: LIB3028-007-Q1-B1-G7
ggagtgcgtaagtgcttgcgttcgtgtgtgtgctgtctgttgtgtttctttttgtcattcttcaatttctctgtgaggatgaacaaattaacttgccttccatgacgtatatgaggtggaagagaaaccggtgtagactagagaggaaaaattctagggtttgagtttcacagtgagagaagctcgtggtgtcgtggataccatttcgagctagaacttagaatggggagtgaccataagacaggggtaggaagagcgtcggtgaagcagcacaatcttcagaacacggaaaatgggcgtgtacagaataagattgtacgcgaatcgtccacagatatgggcgatatcgatcccataatcgaacaagctgaacaacctca

SEQ ID NO: 3650 - DNA, 385 bp, Glycine max
  Clone ID: LIB3028-007-Q1-B1-G9
gtcaccgttgcttactagatgtcaaaatccagttacaaagtttcaacaatgtccacttttgaacataagttactgtcctgcatcagaagttgatctggttcaaggaaagaatttggttattgtagtttacaactctctaggttggaggaggaatgaagtgattcggattccggttattgaggccaatgttagagttcatgactctaatggtatagaaatagaatctcaacttcttcctcaggctgagaaatatgtagacttaagaaattactacgtgaaggcatatctaggacaaactccacccaaggcacctaagtactggcttgcatttacagtttctgtaccgccacttggttttagcacatacactgtctcaactgccaaa

SEQ ID NO: 3651 - DNA, 377 bp, Glycine max
  Clone ID: LIB3028-007-Q1-B1-F2
gaaggaagcgaacgaaatggtgggcattgtcactgccactttgatttgattcgtgtgcacatataaggtggggcatggcctacaccctttccaacactctcccactctcactcgccttcttcccagaccgcaccctccttcatccaccctccacacacctcttcctctctcgccccctcagattcaaaagtctttgcgtcgtcaatctcaagagacctgttcccccgctaaaagcatcgatggcggagaccaacaacaacgttgccgtcgaggtcttcgaaaaagaggatcttgccgtgtccctggccaaatacgtcgccgatctctccaacaaattcacttccgaaagaggggctttcactgtctgcctgtctggc

SEQ ID NO: 3652 - DNA, 278 bp, Glycine max
  Clone ID: LIB3028-007-Q1-B1-H10
gttcttttgccctattggggttcttagtcatgccatcaccaaagaaatgactaaaagtgccagaaaaaacaagcacagcttatagagggcacctacttgctttcccacataaccaaaaaagaaatttaattgaagtttaagagtttcagaaattcatgttcaagtttttaaattaagttacttgtaattttgtttggaattgttttcccctcaatcaaaatactattagtattttgttccatctcaagtgtataaattattttgacttgatgttcatt

SEQ ID NO: 3653 - DNA, 390 bp, Glycine max
  Clone ID: LIB3028-007-Q1-B1-D5
ctcacttctcagcactcagcagcgatatcagttgaagaaacagaaacaaacaaaagaggcagaagatgttgtgggtggacaaatatcgtcccaaaaccctcgaccaggttatggtccacaccgacatcgctcgcaatctcaagaaattggtaacggaacaggattgcccccatttactcttctatggcccatctggctccggcaagaaaaccctaatcatggctcttctccgccaaatgttcggacctggtgccgaaaaggtgaaggtggataataggacctggaaagtggatgctgggagtagatctcttgatttagagctgacaacattatcaagtgccaatcacattgaaatgagtccgagtgatgcaggctttcaggacagataca

SEQ ID NO: 3654 - DNA, 409 bp, Glycine max
  unsure at all n locations
  Clone ID: LIB3028-007-Q1-B1-D8
ggtgagaatcggaggggccgttttttgaaggtgtctgaagcttctgtcagcagaaaccgtagcactataattgttcctgctggaagctccagggatgaaggatgggcagcattcaggaacgttttggcagagatcaatgaagcctcaaggcttttcattctgcccaatcagcaaaattctgaatcctcagagcgtcttgttggactttcggatgatgttggtgctggcttcatatctggtcatagtactcaacctgccacttcttctgagttgaatgtggacaggtctgttgatttgccgcctcaggatgaaattgggaacttgggggtctcaaaagtaatcagggctgatcagaaaagattcttctttgatcttgggagcantaataggggtcatttcttaagaatat

SEQ ID NO: 3655 - DNA, 345 bp, Glycine max
  Clone ID: LIB3028-007-Q1-B1-E1
cattgcaaaaatggcatcattcaccatgacagcttccatccttggcagcccagccgtcaccaaccggtcggcagtagcaacgcagaggagatcactcgtagtgaatgctgccaaagctgttgaagcagaaaaggtcagttatgacaatgacatggatggtagcaatggaaggaggaacttgatgttcgccgcggcggcggctgctgtttgctctgttgctgggatggcagtggcagatgagcctaaaccaggaaccccagaagccaagaaaaagtatgctccgatttgtgtcaccatgccaactgccaagaattgtcccaattgaaggaacttgggttttaattt

SEQ ID NO: 3656 - DNA, 410 bp, Glycine max
  unsure at all n locations
  Clone ID: LIB3028-007-Q1-B1-E10
aaacaatgaatcttggtgccaagggttagatggattggcttctaagtctgccgaatactacaagcaaagtgctcgatttgccaagtggacgaccgttgttagcattccatgtggtccttctgcattagctgtcaaagaagcagcatggggacttgcacgttatgctgctatctctcatgacaatggtcttgtgccaatcgttgagcctgaaattcttcttgatggagaccacccaattgagaggacgctggaagtggctgagaaggtctggtcagaagtctttttctatttggctgaaaacaatgtcctttttgagggaattttgctcaaacctagcatggttacacctgnggctgaacacaaggacaaagcttctccagaaaccattgccaaatatactctaaccatgc

SEQ ID NO: 3657 - DNA, 312 bp, Glycine max
  Clone ID: LIB3028-007-Q1-B1-E12
atacgccgccgtttcgctctccggtgaccctctccaccctcagggcgccaccacccacgtccacaaagacgccggcagcaaccccacgtggaactaccccgtgaaattctctgtcaacgaatcgctggcgaaggaaaatcgtttatctcttgagatcaagctcatctccgaccgcaccctcggcgacaccgtcatcggcaccgtccatgttcctctcagggaactcctggataaccccggcgatgacagctccttccgccaagtcagttatcaggtgatgaagcaatcaagaaaatccaagggaatcttgaa

SEQ ID NO: 3658 - DNA, 397 bp, Glycine max
  Clone ID: LIB3028-007-Q1-B1-E2
gattagtccctttgtgattcctgggaaactcatttcattagagtgagagagagagagagagagagagagaggtatcacagtgaaacgaagaagccctaactacgcacgcactcattcttgagaaagctcaatattcattcgtccatggcactctcttctcgtctcttttccaaatccaaattgatctatggctgtcaaatacttctgcaaaaggagcatgctattccagttcgtcactttgctaaagagtctgcccctcctgcccttaagggagatcagatgctgaagaacatttttgtggatgtgaagaacagatttgagactgccatatgaatattaaagaacgagaagatcaccattgacccagaagatcgagctgctgtttctcattatgcaa

SEQ ID NO: 3659 - DNA, 378 bp, Glycine max
  Clone ID: LIB3028-007-Q1-B1-E3
cttgtcttcatgatgaagttcttgcagctgcagtagatgctacagcaagtctatctccaaagcaaaatgaaagaaagggagcatcttctatctttgttaatatagctaagaactttaaagcggggaatgcggatcagaatgcaaatcaatcagttcatactaatagactggaaaatttaaaacaattattctccagtcctcctttcttaaagtcttcctcgagcacagtagataagcaagatccttttgcgattgacatagatgacattcaaattgatgaacctgtagtcttctcatctcctcagaaaatcgatattgacaagagagataaagggaaaggaacagacagacagaaattacttgaagaagcaagcacag

SEQ ID NO: 3660 - DNA, 389 bp, Glycine max
  Clone ID: LIB3028-007-Q1-B1-E5
ctttgattagtgtggcctagttgttgttttctcgatgagaaaggcttcttccactatgcattgcgcacttctgcgcttttgggttcccttgttgctgcttgctagcttcagctatgctccttctgtttcggccacaactgaaatttcagggaatgaagtgaacacagatgggaaggtgataaatgaagagttagcaaaaccaagtctaaaaggacatgatgaagaagcaaagttcaaaggattttttccaaaaccaattcctatagttaaaccaattccaaagctaattcctattattaaacctattccaattccagtttataagcctatttcaaaatcaattcctactgttaagcctattccaaagtcaattccagttgctaagccaa

SEQ ID NO: 3661 - DNA, 377 bp, Glycine max
  Clone ID: LIB3028-007-Q1-B1-E6
attggatgagctgtcacctgaaagagagaggcttgtggatgattgtgctcaaacagaccctatgcctatggacagttccgagtctgatgcagatgtccaggagcatttaggaaaggattttagtgcgctggcagatatgtattggcctgagtccttgggacctttggatttggaaataccatcatcaactatataccatagcgaagatctaatttttagtgatagtcttagtggactgaatcgcttgatagccagcagcctggatgcattccagaattgctccttttttgggtttgacaagaatgaagcaccatcaacagttgaggctcgagaatctgccactctttcagattttaaaattgggagtggcatctgag

SEQ ID NO: 3662 - DNA, 397 bp, Glycine max
  Clone ID: LIB3028-007-Q1-B1-E7
gtggaacagctcgttgataatgcagatgaacgcagggttttggagaacgaagcgctcgatgaggtctgcttccgcacgcttaagctcagtagaccaagctttggggatcggaaacgacgactttcagctaccatgagtggtgtgacatgttgtcttcgtttcgctgggcaagtcaactcagatcttcgcagacttgctgtgactctcattcacttctggcgtctgcactttttcacggtgggtcttgccccactcatatctcgtggttcccaacactacagagctctgacagtacccgaactgagataccagttgtgggatgataggaccatgatgtgtgcagctgatgtacgccatggtcgacacttgacagcatctgcgatgttccgtggtaaca

SEQ ID NO: 3663 - DNA, 388 bp, Glycine max
  Clone ID: LIB3028-007-Q1-B1-E8
ggaaacttagaggaggaggcaaatgtcaagcctccaaccccattgacgcttgctggagatgcaataaagactgggccaatgaccggttcaggctagccaagtgcggcaaagggttcggaagacgggccaccggcgggctcggtggtcccatctatgtcgtcaccgataattccgatgacgacatggtgaaccctaagccgggaactatccgtcacgctgtcacccaaaaaggccccttgtggatcatcttcggacacagcatgatcatcagtttgaggcaagagctgatgatttcctccgacaagaccatcgatggtcgtggcgcaaacgtgcaatttaggggcggtgctggcctcaccattcagttcgtgaacaacgttattatcca

SEQ ID NO: 3664 - DNA, 387 bp, Glycine max
  Clone ID: LIB3028-007-Q1-B1-F10
aacacatatttctttttcttttccctttttcctaggcacagcacacgccctctcaaatagaaactgagagatgaattctgatcagtttcagaagaacagcatgttcgtagaaacccctgaagatggtggcaaaaacttcgacgatgatggacgagtcagaagaacgggtacatggataactgcgagtgcccatatcataacggcagtgatagggtcaggagtgttgtcacttgcatgggcaattgcacaaatgggttgggtggctggccctgccgttctctttgccttctctttcatcacttacttcacttccactcttcttgccgactgttatcgttcacctgatcctgttcatggcaagcgaaactacacctattccgatgttgt

SEQ ID NO: 3665 - DNA, 384 bp, Glycine max
  Clone ID: LIB3028-007-Q1-B1-F12
aaaacactcataacacaaagcacaaagcaaagctcatccttgagttaaaaaatggcaacagcttcttccatggctctctcatccccatccttggctggcaaggccgtgaagctgggcccatcagccccagaagtgggaagggtgagcatgaggaagaccgtcaccaagcaggtctcctcaggaagcccatggtacggcccagaccgagtcaagtacttgggcccattctctggcgagcccccgtcctacctaaccggtgagttcccaggcgactacggctgggacactgctgggctttccgcagacccagaaaactttcgccaagaaaccgtgaactcgaagtgattcactccaggtgggccatgctcggagccttgggctgcg

SEQ ID NO: 3666 - DNA, 394 bp, Glycine max
  Clone ID: LIB3028-007-Q1-B1-D4
gtaactgatgatttgcctgagtttagaataggccatagagttgttaaagtgcacaatattgagagactttttctttttttctttctagaagtgttaatatgaagttgcattatatatttgtgggaaaaactattgactttcagaaaacagaagaaggttgtttagaaatggcattgctgttttgacagtaactttttaggtaagggaatggaatattttgaagatgttgattaatcactagaaaatgcaaagaaattgtgtttttgcttttgccatttcaactgatgcctggtgaaaatttgctcacatttgctagctaccttaaaaattttgtgttgctgttctatagcatgccgtgaaagtttaaatggaatcttcattttatatgcttttt

SEQ ID NO: 3667 - DNA, 399 bp, Glycine max
  unsure at all n locations
  Clone ID: LIB3028-007-Q1-B1-C10
agtagagtannacaaaagagagtgcaataactcgttgtacattcctagtgtgtgggagagacatggctaagatgtgtgttttggtgttggttcttgctctggctgtggccacaagtgccagaaacgttcccaaccccaaggatgctggtcttaaggaccagaagaacttcatcagctatggtggagttggtggttattccgggattgggaacaatggactgccttttggaggagctggtgccggaataagtggtggttttggcggacgtggtggacttggtggtggcctcggcggtcctaccggtgggatcggagggtttggcggtaccggtagcggtgtcggtggcggtattggtggtggcgttggaactggcgttggtggtggcagcggtgttcttc

SEQ ID NO: 3668 - DNA, 396 bp, Glycine max
  unsure at all n locations
  Clone ID: LIB3028-007-Q1-B1-C12
gatagctccaataatctcaaggctcccaaaggcattggcaccttcactgagcaatcgaactgttatgatgtccaaacaggcagtaatggggattggggccattacttttactatggaggccccggtaaaaatcctaattgtcaatgagtaatgatgagaggaaagtaaaaaagaaaaaagaaaaaaattgcagcctctcttgtatcattgaatgcaagtgttaaagcccttccttctcttccatcttgtatacccttttttctgtagtggaaagttttgactctttttttttttttttttccttctaatattgaaagattctccatgtaagctangggagaagtgtggccaagtttctcaaaagcctaaagaaacaggcctgccttttataacatc

SEQ ID NO: 3669 - DNA, 368 bp, Glycine max
  Clone ID: LIB3028-007-Q1-B1-C2
gtcgcaattaaaagttaaggtgtacgcgcatatatgtatgtgaaattcgttgattctcttctgccttacttacggctgtctgtgctcatttgaggaagcctacgatcgaggttcgataattaatcatgtgtgacactatgtctatgtcgtccgcacctattacagatcatcgacctgttaaaggtcttgagatggaatatgtagacgatgataagataaaaaagcttggctctttaaagaaggtagcaatcagtgcatcttcaaagttcaggcattccttgcaaatgaaggggagaaggcataccatggttgtgtctgttgctattgacgataacgttgatgcccaagagttgcaagtagttgatgct

SEQ ID NO: 3670 - DNA, 327 bp, Glycine max
  Clone ID: LIB3028-007-Q1-B1-C3
cgaaatctcacaaataatgggcaactaagtctgataataacatcccgtctggaaagtcaaatgccagcaccagagtagcaagtgtagtgactggcaataaaggtggtagttatgggagtccttcacatgatcgattagtatatttaaaaacatgccttattgggcagcatgtgtaagtccaggtgaaaaatggatctatatactctggaatatttcatgcaacaaattccggcaaagattttggaagcattttgaaaatggctcacttaacatacgatgctgctttgcgaggaaaagaatctggtgttcaatttgtcagtaaagctc

SEQ ID NO: 3671 - DNA, 375 bp, Glycine max
  Clone ID: LIB3028-007-Q1-B1-C4
ttgttgttcctttttcatctattatagtttccagtactctttcctttattgctccagtcttccttactcttaacagtagtactttcctagtctaatatcatgcaccaggcaatatagatatcttttgcattttcctggtctgggttgccacatttatagtcgtgtctgatctctaagttctgtcttctgattgcagttggaaaggatgaaaaacgagaatatgcttccttcagtagacggtcaaagccacgagtcaagttttccaggtctacaaagagaactgatgcaattacacgaggccaatcaagagttaggaaacatattccctgttttcgataaattctctatcagcggtaatgcattagaaagggtgct

SEQ ID NO: 3672 - DNA, 414 bp, Glycine max
  Clone ID: LIB3028-007-Q1-B1-C5
gcgaagttgcgttaatgctactactctccttcagcttcttaatcactctcacccaaccctttcttcttcttcttcttaccagcgtcaacaatgtcagatccgtaccagatttcgttcgctcaagccttcttgtgcagcgctttcgccgcgtgtttcgccgagttttgtactattcctctggacacagctaaggtcaggcttcaactccaaaagaaggtagggattgatgatggagtgggtttacctaaatacaagggtttgctgggcacagttaagaccattgctagagaagagggtatatcagctctgtggaaaggcattgttcctggtttacaccgccaatgtttatatggacgcctaagaattgggttacatgatcctgtgagtataaatatctgactttcattgaataag

SEQ ID NO: 3673 - DNA, 369 bp, Glycine max
  Clone ID: LIB3028-007-Q1-B1-C6
ccctaacctctcctcaatgggtagaaacgaagccgccatttccttcctcaccaacgtcgcccgcactgccttcggcctgggcgcagcggccaccgccgtctcctcttccctctacaccgtcgacggcggccagcgcgccgtcctcttcgaccgcttccgcggcatcctggactccaccgtcggcgaagggacccacttcctcatcccctgggtccagaaaccctacatcttcgacatccgcactcgtccccacaccttctcctccgtctccggtaccaaggacctccagatggttaacctaaccctccgcgtcctctcgcgctccgacaccgagacagctccccaccatcgtccagaacctcggcctcg

SEQ ID NO: 3674 - DNA, 389 bp, Glycine max
  Clone ID: LIB3028-007-Q1-B1-C7
caagtgataaaattggaatgtctgattcaaaaaataaaatcgatgaagatgagactaatcctatcagtgcaggtagattttgtgaaaccatgcagggtgagacatctgtggaaaatatagttcttcgaaggcatactaatcctgatgctgcagctagaaatgggaaatcactaccaccagtgtatttttatgccctagaaagtgatcagcctatactggatatattaaagccgtctatagtcattgtttaccatccagatatgacctttgttagggaaattgaagtctacaaagctgagaatccctcaaaaaggttgaaagtatattttattttctatgaagattcaagtgaggttcagaagtttgaagcaagtatacgtagagagaat

SEQ ID NO: 3675 - DNA, 386 bp, Glycine max
  Clone ID: LIB3028-007-Q1-B1-C8
gcggaatctgctagaattttctaataatggcgaaagacgttgagcaggtcacagagcaaggtgaatactccgcgaaggactaccatgaccctcctccggcaccgttgatcgacccagatgagctcacaaagtggtccttgtacagagccgccatagctgagttcatagcaacactcctttttctttacatcaccgtgttgaccattattggctacaagagacagagtgacaccaaaatccccggtaacaccgaatgtgacggcgttggcattttgggcatcgcttgggccttcggtggcatgatcttcatccttgtttactgcactgccggaatctctgggggacacatcaaccctgcggtgacattcgggttgttccttggacgc

SEQ ID NO: 3676 - DNA, 390 bp, Glycine max
  Clone ID: LIB3028-007-Q1-B1-C9
acaaaatgaacaacctcttctttctcttcttcttcctcttcttagcctccgccgccgccagcgtccccgcccacaacatcacccgcatgcttgccaaacaccccggcttctccaccttcaaccactatctctccctcacccacctcgccgaagagatcaaccgccgccagaccatcaccgtcctggccctcgacaatgccgccatgtcctccctcctcgacaagcacctctccctccccaccatcaaaaacgtcctctccctccacgtcctcgtcgactacttcggcgccaaaaagctccaccagatcaacaacagcaccaccctcgtctcctccatgttccaggccaccggctcagcctccggcaccgccggctacgtcaacatcacca

SEQ ID NO: 3677 - DNA, 282 bp, Glycine max
  Clone ID: LIB3028-007-Q1-B1-D1
cacgctcacctaagtttcaatttcaatcccttttctttttccgttacaaaataattcaaaattccctccctcatttacccttgtttgtgtaaagtagtagcagagtgagactaggtatcatcgatggcagggtacaagggcgatgacgaatacgattacctcttcaagctggttctcatcggcgattccggtgtcggcaagtccaacctgctttcgcgcttcacgaggaacgagttcaatttggagtccaagtccaccataagggttgagttcgccaacaag

SEQ ID NO: 3678 - DNA, 406 bp, Glycine max
  Clone ID: LIB3028-007-Q1-B1-D10
tggggttcttgcacttgctgtgtcctcttcaagcttttgaactggggtgttaggggttcgaccattcctcgagcctagtacaagttgtggttgggatttcaatgcattgtcaaggtcttgtaatgcttcattgaggttgtttgagagtgtttgaggggagaattgacgtttgttccttatgctgttggccagttcccttaatacttttgacacttcctctccaagtctgatgcaagaatctttgtacaccgcacgaattgactttggtgtcttaagaatcaaatgttaataaattaataaatcagtcaatggaatatataataaaatcatgataataagcatcaaataagaagctgcacttataggcttaactaatcctcctattattgttgttgaaattcgattt

SEQ ID NO: 3679 - DNA, 410 bp, Glycine max
  Clone ID: LIB3028-007-Q1-B1-D11
aaaaaaataccctcgattcatgcctcaaaagggttgataataagtaaaaaaaatcaatgaattcatgataaaacccttctgcgtttttttattataaatttttttgtcaataaagggatcaaggggttgggggatcaaatggtaaagttcttttgttggtaaattggaggattagaaacatgactattgctttccaattagctgtttttgcattaattgctatttcatttattttattgattagtgtacctgttgtatttgcttctcctgaaggttggtcgaataacaaaaatgttgtattttccggtacatcattatggattggattagtgtttctcgtgggtattcttaattctctcatttcttgaagctctatttattctagatcaaaaacgaaatgacccctcccc

SEQ ID NO: 3680 - DNA, 394 bp, Glycine max
  Clone ID: LIB3028-007-Q1-B1-D12
gtggaatctcaatggccacgcttagcttcggcatcgccacgacatgtctgagtgctgccgctgattatcgtagaagaagcaactggaaatggagcagacccagaattgtgtgtgttggatgggacccggaaggcgtgcttggtccaccccaaactgggcacctcgccaggttcgagtttaagaggcgcctcgagagagacgcagatgcccgcgaagccttccaacgtcaagtccgtgaagagaaagaacgccgtcaatcccttcgacaatctcgtcctcttcgcgatactccgcaagacctcattgaatacttccttgacactgaagctcaagagattgagtttgagattgcaagaatgagaccaagattgaatgacgaattctttgcgcaact

SEQ ID NO: 3681 - DNA, 388 bp, Glycine max
  Clone ID: LIB3028-007-Q1-B1-D2
ctctctttcgtcagtttcgggggaagagatccagcagcaatggtgtacgtcaaggctcagaaatcaaaagcctacttcaagagatatcaagtcaagttcaagagaagaagagagggaaaaaccgattaccgtgccaggattcggttgattaatcaggacaagaacaaatataacactccgaaataccgatttgtggttcgctttagcaacaaggacattgttgcacaaataatatctgctagcattgccggcgatttagttcttgctacagcatattcacatgagctgccacgatatggtcttgaagtacgacttacaaattatgcagcagcttattgcactggtctcctgttggcccgaagagtcctcaaaacacttgaaatggatg

SEQ ID NO: 3682 - DNA, 372 bp, Glycine max
  Clone ID: LIB3028-007-Q1-B1-C1
gttggaaatctgaaaaagaaggggcaactaagtctgataataagatcccgtctggaaagtcaaatgccagcagcagattagcaagtgtagtgactggcaataaaggtggtagttatgggagtccttcacatgatcgattagtatatttaaaaacatgccttattgggcagcatgtggaagtccaggtgaaaaatggatctatatactctggaatatttcatgcaacaaattctggcaaagattttggaatcattttgaaaatggctcacttaacaaaggatgctgctttgcaaggaaaagaatctggtgtagaatttgtcagtaaagctccttttaagactttaattatacctgccaacgaccttgtacaag

SEQ ID NO: 3683 - DNA, 337 bp, Glycine max
  Clone ID: LIB3028-007-Q1-B1-A3
aaacactgctggatggtgtgtagcgaaagctggagtttctgatgctcagttgcaggccaacattgactacgcctgtagccaaggtatagattgcgggccaattcagccaggaggctcttgttttgagcctaacacaatagcatcccatgctgcatttgccatgaatctctactatcaaacttctggcaaaaatcaatggaactgtgatttctctcaatcagcaacactcacatcccaaaatccaagttacaatgcttgcatttacactggtgggagcacctgagaacagaggcttcggcttgatgttaactaataagttttgtggatagaggtgtat

SEQ ID NO: 3684 - DNA, 402 bp, Glycine max
  Clone ID: LIB3028-007-Q1-B1-A4
ggccttttagaaataaatttttcttatatttctttcattagtagtacctataatggatacagtaagagagttggcatcaaagagtgcagcagttagattcaccaagagttcatgttacatgtgccacagcatcacgcaactgttctatgagcttggtgcaagccctgcagtgcatgagctatacaaagatggctatgggaaggaaatggagtgggctttgaggagcatggggtgcaacccttcagtgccagcagtgttcattggtggaaaatttgtggggtcttcaaaggatgtcatatccctccatgttgatggctctctcaaacaaatgctcatggctgcaaaggccatatggttctagctagtactcatccacactccaataatataatataagaagct

SEQ ID NO: 3685 - DNA, 392 bp, Glycine max
  unsure at all n locations
  Clone ID: LIB3028-007-Q1-B1-A5
ggaatgatttttaaaactttgatctgtaccaaaatccctatactaataaagcaaaaggcaggttcatacatgtatttgttagtttgttgactcctttcaacctaacccatcatcgttcacacccgtggttctggctctgccctattttcggttcctctcgttatcgaaacagaaaccatttgtggtgaacatggatttggaccagtggatctcgaaggtcaaagatggccagcatcttctcgaagacgagcttcaacttctctgcgaatatgtaaaagagatccttattgaggagtccaatgtgcagcctgtcaatagtccagtgactgtntgtggtgatattcatggtcaattccatgatctaatgaaacttttccagactgggggtcatg

SEQ ID NO: 3686 - DNA, 376 bp, Glycine max
  Clone ID: LIB3028-007-Q1-B1-A6
cgagttcagccgaaccaaactccgaagctatggcagagctccaaaccaaggttgaacctgttacggtcccggctccggtggatcccgagccaccgctagctgaggctccgccgctcgaaaagaaagcggtggcggtgccaccaactgttccggctgcggcagaggaaaccaaagctcttgttattgtggagaaggagaaggagaatgagatgataccagaacctgtaagaaagaacgcctcacgtggatcccttgatagatacattgctcttgcagaaatagataaagagaaacgattgtctaatgtgaacgcttgggaagaaagtgaaagatccaaagcagagaataaagcccaatagcagctctctgctgttgc

SEQ ID NO: 3687 - DNA, 333 bp, Glycine max
  Clone ID: LIB3028-007-Q1-B1-A9
ccaaattccattttccaattcaaaaccctaactccgttcgaagcaccaaatcgtgatggcaccaaaggcagagaagaagccagcagagaagaagcctgtggaggagaagaaatcgacggtgggagacaaggctccggcggagaagaagccaaaggccggaaagaagcttccgaaggagggaagcgccggcggagaaggtaagaagaagaagagaaacaagaagagcgtggagacatacaagatctacatcttcaaggttctgaagcaggttcaccctgacattggtatctcaagcaaggccatgggaatcatgaacagcttcatcaacgacat

SEQ ID NO: 3688 - DNA, 364 bp, Glycine max
  Clone ID: LIB3028-007-Q1-B1-B10
gctagattcacttgtgtttatgtttttccgtcctttatctctttttataatataagccctcatactcccttgtgtacagtgatcgatctcaagaagaaagactcaaaatatggaggggaatctagagaagaagttgctgagcaaagaggaagtgtcagaagaagataatttatcattggtgaagagggtgtgggaagagagcaaagagatgtggatagtggcagcaccagccatattcacaaggtttacgacctttggcatcaatgttataagccaagcttttattggtcatattggttcaagagaactcgctgcctatgctcttgtattcactgtcatcatacgtttcgccaatggtattctg

SEQ ID NO: 3689 - DNA, 405 bp, Glycine max
  Clone ID: LIB3028-007-Q1-B1-B11
ctcccagaaagaaagaaagcactctcgctcgcggccattgtgaaaattccgtacaattcgctctccaccccactgaagcaccaaacgacgccgttttcagcaagcacagtttccaaaccctagctcgttcttcctccaatgtcctccgaagacatcactctcgtccccgaccagaggatcgagaacggtctcaattcccctctcgtcttccaagacgaccctctccgcttcaattgccccaccccgcaccaccgccgggtcggagacccgcctccgaaaacccgcgaacttggctccttcatcgacgacaacaagatgttcatcgaccgcgaccgcttcttcgccgccgcccacaaccccgaattccgccgctacgctgactgctccgcccgccgcgaaccgcgc

SEQ ID NO: 3690 - DNA, 371 bp, Glycine max
  Clone ID: LIB3028-007-Q1-B1-B12
caaagctacgatgattccaaattcctgattccagtcacatttcacatttcatagttcatattccatattcatataccgtttctttgttctcgctgcctagcatggcatcaacctcactcttcaacttcagactccctctgttcaacttcaatccactgcaccatcgactgataaagatgccaaaatctctgcgctcctctcttcgcaacagtccacacctcgtttcttccattaacgaccatttggcgctcagacgtgtcagatatccgcttctcgaatctcactctgctccgaagcgcagattccacgttggtgtacagacagagtattctgatgtggaaagctctgagtcaattgtttctgacgctaca

SEQ ID NO: 3691 - DNA, 353 bp, Glycine max
  Clone ID: LIB3028-007-Q1-B1-B2
ggagccactcaaggctgagttccctattttgagctacgccgatttctaccagttggctggcgttgttgccgttgaggtcacgggtggacctgaagttccattccaccctgcacgagaggacaagcctgagccaccaccagagggtcgcttgcccgatgccactaaaggttctgaccatttgagagatgtgtttggcaaagctatgcggcttactgaccaagatatcgttgctctatctgggggtcacactattggagctgcacacaacgagcgttctggatttgagggtccctggacctctaatcctcttattttcgacaactcatacttcacggagttgttgagtggtgaga

SEQ ID NO: 3692 - DNA, 373 bp, Glycine max
  Clone ID: LIB3028-007-Q1-B1-B4
ctcagagtcacacacacgcacatatattttcttcatcttcgtacaccactgtctcatcatctccttttccttgttctggtggcgctcttgattttcagatgacaacagcaattgggtgaaacgtgaacgccaccaccgatcggggtttgccaaaaccttacaatggaggtcgaaaggatgagacagttgatgctgatgtggtgtagaatacgaagcaaccgtgtcgctcttgtgggtggaaaccataccgctgccaggttttgcagtcgctgaaattctctccttcctatatcgctggctttgtttgttttttctcttccaactttactcaataggatctcatctcgctcggttaatttaatcatcgatgggg

SEQ ID NO: 3693 - DNA, 372 bp, Glycine max
  Clone ID: LIB3028-007-Q1-B1-B5
ggagagagcagagacagctaaaatgcaaggaggaatgagatcatttttgtcacatgggaatgtcattagaaatgctgttctacaacgcgtgcgcatggtgaaccccctgctacagacaattgcctcttcgcggtttgaatctgttacgcctgctcgcattgaggagcatggttttgagagcaccacaatttcagacatcttgaatgataaaggcaagggtgctgatggctcctggctttggtgcaccacagatgatactgtttacgatgctgttaaatcaatgacccaaaacaatgttggagctttggttgttgtgaaatctgacgcgaataacgcaattgcacgaattattactgaaagagattacttaag

SEQ ID NO: 3694 - DNA, 391 bp, Glycine max
  Clone ID: LIB3028-007-Q1-B1-B6
caaccttccaatccttccaaccaccactagtggatccttcccacagacggtagaactgaggagggtacgccgtgagttcaaggctaacatgatctccgaggaagagtaggttaagtcaattaaggaggaaattcgcaaagttgttgaacttcaacaagagcttgatattgatgttcttgttcatggagaaccagagagaaatgatatggttgagtacgtcggtgagcaattgtcaggctttgccttcactgttaatgggtgggtgcaatcctatggttcccgttgtgtgaagccaccaatcatctatggtgatgtgagccgcccaaagccaatgactgtcttctggtcatctctggctcagagctttaccaagcgcctaatgaagggaatg

SEQ ID NO: 3695 - DNA, 405 bp, Glycine max
  Clone ID: LIB3028-007-Q1-B1-B7
gacgccataagaaagagcaagtcgaaaagttcatccctccctctctctcacacatcccagccatgagcctcttcggtataggcagaaaccagagaacattccgcccgaaaaaaagtactccttctggaagtaagggagctcaacttagaaaacatattgatgccacgttgggtagtggaaatctgagggaagcagtaaagctacctcctggggaggatttaaatgagtggctagctgtcaacactgttgatttcttcaaccaggtgaatctgctttatggtacccttacagagttctgtactcctgagaattgtcggacgatgtctgcaggacccaagtatgaatatagatgggcagatggtgtacaaattaagaaacctattgaggtttctgctccaaaatatg

SEQ ID NO: 3696 - DNA, 388 bp, Glycine max
  Clone ID: LIB3028-007-Q1-B1-B8
gtcatgcagaaattgcatggattctttattgtgtctgttcaaccaggtggcagagccaagctttagtgataacaaagaacctgtagtaaaacatatagctcttgaagctgataacttgtcatggttgcttgagattttagttgacaaacaagctgctgaagattttgcgctgatgtgggcaaaccagcaggaattggcagccctccatggaaagcttccgattgcatttcgttatcatgtcagttgcatttcaggaagactatatgttggcattggaagaggggaggttttgccatcaaagaacacgcgccagttgttgttgcagacatggctacagcctctaatcaatgactataactggttgcagcacgggtgcaggtcatttgat

SEQ ID NO: 3697 - DNA, 392 bp, Glycine max
  Clone ID: LIB3028-007-Q1-B1-A12
caaaaagcggggaaagggagattgaattcgatcctgggacgttaacgttgtttcaattcaattgtggtcctgtcggtgccctatctcagacgacgatgtcatctttatatagaggggaatccaggaggtacaacaataaaccaagaggacgtcataatttgacaacgcagaagaagcaagagattaaggaagcctttgagttatttgatactgatggctcaggtactattgatgccaaggagctgaatgttgctatgagggcccttggatttgagaagacagaagaacaaatcaatcaaatgatagcagatgtggacaaggatggaagtggagcaattgattatgaagaatttgagtacatgatgacagccagaatacgagacatggacact

SEQ ID NO: 3698 - DNA, 378 bp, Glycine max
  Clone ID: LIB3028-006-Q1-B1-G7
ctcgagccgaatcggctcgaggacagatgaactggtttttgttttggcggcaacgaatcttccctgggaattggatgcagccatgctccgacgtcgtgagaagcgtagccttgtaccacttccagaaccagtagcaagaagagcaatgttcgaggaactccttccgcaacagcctgatgaggaaccgatcccctatgatatactggtggacaagacagaaggatattccggatcagatatccgattactctgtaaagagacagcagtgcaacccttaagacgcctaatgtcgcaacttgagcagagccaggatgtggtgcctgaagaagagttgccaaaagttgggccaatcaaatctgaagatatagagacagcttt

SEQ ID NO: 3699 - DNA, 259 bp, Glycine max
  Clone ID: LIB3028-006-Q1-B1-G9
cttctccaaagagaaagaacagcaagcaatcgttacccattacctatttcactttccacaccactctcatcctatatctctttcttccttattcctctgtcaagccactcgataatatgcagagtctttcaccacctacttccaacgcgctcaattttgaagcatgtttttcgccggcaacttgggccttcaggcgaatccctgttaaatgcccttttgggtttgagccggttaactacggagtccggtccagcccaag

SEQ ID NO: 3700 - DNA, 327 bp, Glycine max
  Clone ID: LIB3028-006-Q1-B1-H1
gacttcaactccactgttactccgtgcaaaagtcacgaactgaacatggatctcttgatgaactgtatggagccagtggataaatgtttgaaggatgctagcatggacccaagacgtgttgacgagcttgtacctgtaggtggttcaacaaggaatcggagcgttcaggaactgctgcaggacttcgttaattgacaggagctgtgcagcatcaacaatcctcatcaacctgttgcatactgtgctgcagttcacgcttccattgtaagtggatacggcactcacagtgttcaagatcgtcacatccgtgatgtaacgccaccatct

SEQ ID NO: 3701 - DNA, 425 bp, Glycine max
  Clone ID: LIB3028-006-Q1-B1-H10
cggctcgagcggctcgagtataccttccttgctatgacatactccgcaattggttggaggaattcacagctaaaaaggcaccaaccacaactacttatgtacctctagtagctggttcattggcacgctctctagcttgcactacttgctaccctattgaacttgctaaaactcgtatgcaggcatttaaagagactcaaattggtaaaaagcctcctggagtgatccagactctgctaggtgttgtttcaaatgtcaagagcacaaacactccacagaacagcttgcaaggttatcgtgttttgtggactggcatgggagctcaacttgcccgtgatgtacccttctctgctatttgttggtcgacacttgaaccgactagaagaaaacttcttggtttgattggaggtgatgatgccaatgca

SEQ ID NO: 3702 - DNA, 411 bp, Glycine max
  Clone ID: LIB3028-006-Q1-B1-H11
attgatgccaatggtatcttgaatgtctctgccgaagataaaaccactggccagaaaaataagatcactatcaccaatgacaagggtagattgtcaaaggaagatattgagaagatggttcaagaggctgacaagtacaagtctgatgatgaagagcacaagaagaaggttgaggccaaacacgctttggaaaactatgcatacaacatgaggaacaccgtgaaggatgacaagattggtgataaacttgacccggctgacaagaagaagattgaggatgcaattgagcaagcaatccagtggttagacagcaaccatcttacataagcatatgagtttgatgacaatctgaacgaattggaaagcatctgcaatccaatcattgccaagatgtaccaaggtggtgctggt

SEQ ID NO: 3703 - DNA, 413 bp, Glycine max
  Clone ID: LIB3028-006-Q1-B1-H12
atttgaggccaggcaagccccactcaaccaccacacctctcctcgttcacgctacccctttctgctcttcttctacctttcaagttttaaaagtataaagatggcagagacattcctatttacctcagagtcggtgaacgagggacaccctgacaagctctgcgaccaaatctccgatgctgtcctcgacgcttgcctcgagcaggacccagacagcaaagttgcctgcgaaacatgcaccaaaaccaacttggtcatggtcttcggagaaatcacgaccaaggccaacgttgactacgagaagatagtgcgtgacacctgcaagaacatcggcttcctctcaaatgatgtgggactggatgccgacaactgcaaggtcctcgtcaacattgaacagcagagccctgaaattg

SEQ ID NO: 3704 - DNA, 405 bp, Glycine max
  Clone ID: LIB3028-006-Q1-B1-H2
tattagctaatgttttgggaatttcagttataagactctcaggtggtggtgcatcgctgagttgtgtgagagtgagaaagagagagtgtgtgtgtgtgcagaagatgtggccattcagcagaaaaggggcttctggtttttcatcatcatccacggcagagcaagtcactgaaggaattgatggaactggtctcactgccattgtcacaggagcatccagtggtattggcactgagactacacgtgtcctttcattgcgtggtgtccatgtgattatgggtgtgagaaatatgcttgctgctaaagatgtcaaagaaacattacttaaggagattccctccgctaaagttgatgccatggagttagatctcagttcattggagtctgtcaagaaatttgcatcag

SEQ ID NO: 3705 - DNA, 373 bp, Glycine max
  Clone ID: LIB3028-006-Q1-B1-H3
ggctttatggtgagggtgaagatgaaactaaaggtgtatatactgccaagcttgaggaactcaaaaagcatggtgatccaattgatgagcgttacaaagaattcatggagaggggtactataatcgaacagtttgtctattgtataaatagttacagacaagttgcaatgtcgaatgatcccagatttgagcacattgacattaacgagaaacagaaggtcataaatgaatgtgttgaagctgaaaagtggtttaatgagaagcagcagcagcagaactcacttccaaaatatgccaaccctgtactcttgtcagctgaaataagaaagagagctgaagctgtcgataggttctgcaagccgattatggcaac

SEQ ID NO: 3706 - DNA, 216 bp, Glycine max
  Clone ID: LIB3028-006-Q1-B1-H4
caaaacccctttttggatttggaaaaaaataaccattgtgttgacaaaaacatacaatttgggccgacaaagagttggttgagcaatatggtaattacttcccatgtataactttatagtttaactacataggtccctcattttttgtcccttcagcgggatcttgttttatgtactagtataatcaagcaaaattataagaaacttatttatgat

SEQ ID NO: 3707 - DNA, 401 bp, Glycine max
  Clone ID: LIB3028-006-Q1-B1-H5
ctcatgggatcccaactcaacatatatccatgaacccccatacttcaagaacatgacgatggatcctcctggacctcatggtgtaaaagatgcttattgcctgctgaattttggtgacagtataaccactgatcatatttctccagccggaagcattcacaaggatagtcctgctgccaaataccttgttgagcgtggggtggaacgcaaggacttcaattcttatggaagtcgtcgtggcaatgatgaggtgatggcaaggggaacttttgccaacattcgccttgttaacaagctcttgaaaggggaagttggtccaaagacagttcacattccaacaggggaaaagctttacgtgtttgatgcagcaacgagatacatggcttctgggcaagacacca

SEQ ID NO: 3708 - DNA, 361 bp, Glycine max
  Clone ID: LIB3028-006-Q1-B1-H6
ggaggagacgacgacgcggggaatctccggtctccaccgacatcccttctcttccaaatcctgtgatcccattccaatccgttccgttcagctcaatctcaaaatctcaatggccgataatgagcaaccgaataacgatgaggcaagtcctcttctccaccagccccatccccaacccaaatccgaatcaccaacgccacctgagactcccgagtttctcctcggctggaccgctgatgggctccctctggcccacgccagcgtcgtgggccagcccatgggccgcgccccttggaactcctccatctgcgcctgtctcggccaaaacgatcacttctgcagcagcgatctcgaagtttgt

SEQ ID NO: 3709 - DNA, 406 bp, Glycine max
  Clone ID: LIB3028-006-Q1-B1-H7
caatgatggagttctactaagaaaccatattccacgtatccttaaaaagcacttcaggggaaagccatattacgttgatcttcttgatttgtttaatgaggttgagttccagactgcttcaggacagatgatagatctgatcaccacactggaaggagaaaaagacctgtctaaatacacattaacactgcatcgacgtattgttcagtacaagactgcatattattccttttaccttccggttgcatgtgcattgctcatggcgggtgaggatcttgacaaccatgttgatgtaaagaacattcttgttgagatgggaacatactttcaagtacaggatgattatttggattgttttggtgattctcaaacaattggaaagataggtacagatattgaagatttc

SEQ ID NO: 3710 - DNA, 379 bp, Glycine max
  Clone ID: LIB3028-006-Q1-B1-H8
gggttatttttgatccctcaaagctaatttctctctctctttttttatttccgggactgaagaggttgtctatttgaaatctccttcatcctttcctttcttgtataaaactttttaaatttttttgtcagtgggtgttttaattaaccacctgttcttcaagttttagaaagacgcaggttgaattaattagtatcatggcagctttgatggatttttacagcagcagcccagagtttcaacttcactcagatccattcaggggagaactaatggaagttcttgaaccttttatgaaaagtccttctcccaactatttcccttcctccccctccctccctaatctttactcaaacgggttatccagcaacacccaaag

SEQ ID NO: 3711 - DNA, 414 bp, Glycine max
  Clone ID: LIB3028-006-Q1-B1-H9
acgatcaaagcaataatcaggagaaagaatacatgggaaaatggaggctcacgtgtacaatgatgatattgaaattactgccacgcttttggatgcaatgaatatcaaggtgatagcattggctggggcactccaaactgtcaatgatcaccaaagcacatcaaaatgaagcatgccacttacatgtgttgaaactttatgcatatacaatgaacaacagtataaacaacaaccccaaatcacaatcacaatatggataagtcaagaaattattctgatgtgtacatggctttctcgatactaaatctgacaagtgttgccttcaaacttaattgatctgtcaacttgcattacacttcatgatcatctgtaattacaaccattgtaacatgcatatattattcactccttgga

SEQ ID NO: 3712 - DNA, 406 bp, Glycine max
  unsure at all n locations
  Clone ID: LIB3028-007-Q1-B1-A10
tacgtctccaactaatcatacaaattgaaaaacataaacatatccaaaaccaaataacttaaataatttcaaccctccaatcctcctcccccctccaaactcccctttccaatcctggctcccttgggggttgtttgagttttctttccctcaatttaattgaaagatggcttgcttggtatctcgctcgggaagggaattgcagaggtacaacaacatgggtggccggcaagttgttgggtgcataccttatagatataaacaagacatagagggtaaaattgagcaacgaattggaagtactagtggttagttcacagaaaggtcaaggattgatgttccctaagggaagatgggaacttgatgaatccgtanaagaagcagcttatagggaatcccttgaaga

SEQ ID NO: 3713 - DNA, 361 bp, Glycine max
  Clone ID: LIB3028-007-Q1-B1-A11
actacatcatcacctaatacccagaccatctcgccgcacacagcgcactgcagcgttgtgtcttcgcacgccgccgtcgacgtcgtccgccatcgtcacatctcgccggagcgtcgcgtcgctggctaagtgccaagtgctgctgctgattttgtggcttgttgataaaaatgagacttataacacataacatgctgtcatcgaacatgaagggtgttgtaaatggatttcctttgcggattgaagcagagaaagttgtagaaaagactgtggaaatgaacggtgagtttctgaaaaagatgtttgagaagattgattggaaggcttttgttgatgcatcacgagcagtgggatacaccga

SEQ ID NO: 3714 - DNA, 409 bp, Glycine max
  Clone ID: LIB3028-006-Q1-B1-G6
gtgttaaacttcagcgcttatggataatggattgcattggagacaaaggactaggtgttgtagctacgacatgtaaagatttgcaagaattgagggtttttccatctgttccctttggggatccagcagctgtcacagaaaaagggctggttgcaatatcaatgggctgccctaagcttcactcgttactctacttctgccaccagatgacaaatgctgcactcataacagtggctaagaactgcccaaattttattcgattcaggttgtgtatccttgatgcaacaaaacctgaccctgatacaatgcagccactggacgaaggttttggcgcaattgtgcagtcttgcaggcgactcaggcgcctatctctctcggggaaattgactgaccaggttttcctttacat

SEQ ID NO: 3715 - DNA, 360 bp, Glycine max
  Clone ID: LIB3028-006-Q1-B1-F10
gcgccaagtactatgaagccggtgcacgttttgccaagtggcgtgctgtgctgaagattggtcccaacgagccatctgagctggctatccatgagaatgcctatggcttggccagatacgctgtcatatgccaggagaatggcctggttcccattgttgagcctgagatccttgttgatggatctcatgacattcacaagtgtgctgccgtcaccgagcgtgtccttgcagcatgctacaaggctttgaatgatcaccacgtccttcttgagggtaccctattgaagccaaacatggtcacccccggatccaattctgctaaggtttcccctcaggtggttgcggagcacactgttagag

SEQ ID NO: 3716 - DNA, 286 bp, Glycine max
  Clone ID: LIB3028-006-Q1-B1-F11
gtggtgttgccgttgcaaattgcacaactcattccacatggcgtgacggcatgacaattcgcagcttagatacaactaagctcgcacgtcacgttcatgcatccacgagtacctgcatacgatgatcattccccaatacgcatggtctgcaacccatagtcgcacataatctgatagagagagactcacaagtgagtgaagaatctgcagccatcatcgcaggagttctaagcagcaggctcaactgctatgagtcgtcaccagctccggtgccaggggtcccccc

SEQ ID NO: 3717 - DNA, 425 bp, Glycine max
  unsure at all n locations
  Clone ID: LIB3028-006-Q1-B1-F12
caatttcttatctttaccctttcccttccccttcttcaacacacacacaatatctcttccaattttctcctccaatttcaatttctcgtcgtccctcattatggctcgtctctcgatcgtcgccatcgtcgccgccgtgctcctcctggccctctccgccacccccgcgacggcgcgtccctgcaggagcttcataatctcctcctactccttccgcaaccctaactccaacacgttcgccaccatcaccgagatccgatccttcacccctctctacatcaccgacaaacccccctcctatgcccttttcttcccccacgcgactcagctccctcagcatgagagcgtgcgcccacgcgcccctctagggttcgcctccgcctacgatttctcttcnctccgcgaccgcaccaaggacatcctca

SEQ ID NO: 3718 - DNA, 394 bp, Glycine max
  Clone ID: LIB3028-006-Q1-B1-F2
ccatgattactgccattttgtgggttggttatcacgggcaagctgggggaactgccattgctgatgtaatccttggtacaactaacccaggatgaaggttacccatgacatggtacccacaaggttacttggccaaagtgcccatgacaaacatggacatgcgtccaaacccaacaacacggtacccaagaagaacctatagattctacaaaggtcctgtagtgttcccattcggacatggcctaagttactcaagattcagccacagcttatcacttgcccccaaacaggtctcagtgcccataatgagcctccaagccttgacaaactcaaccctctcaagcaaagcagttaacgtgagccatgccaattgtgatgactcattggagatgga

SEQ ID NO: 3719 - DNA, 400 bp, Glycine max
  Clone ID: LIB3028-006-Q1-B1-F3
tggctaacccacccccagttcgtccatggtttcgcttagcctcaattcgctctagcccacccgcacttcaccttgggcaactgcccctgcccagaagttaccctgccaacatttacaactggttagctagatcatctgcacagattcagccaagtcaagcatctccccagcctcacaaggaaccttcttctcaacataacagattctcctcgtcttcactcgctacttctccagagaatcacaacattacccgtattcccttgccaagtacctctcactcgccaaaaagttcaactcccccgtctcagcttgtcctcatagctccacgatagcaaaatccctcgccaggctggtctttcgggttctagcgggatcctgtgtgctgcgttgaactgtttgt

SEQ ID NO: 3720 - DNA, 418 bp, Glycine max
  Clone ID: LIB3028-006-Q1-B1-F4
ctcatgctgtgattgaaccatttgtcatagcaacaaacaggcatcttagtgtgctccaccctatttataaacttttgttgcctcactatcgtgacaccatgaacatcaatggactcgcaagacaatcactcatcaatgcaggtggcattattgagcaatcatttctgcctgggccatttgctgtggagatgtcttcggcagtttacaaggggtgggttttcactgatcaagcccttcctgcggatcttatcaagagaggaatggcagtggaggatccatcctctccctatggccttcgccttgtgatagatgactacccttatgctgttgatggactagagatatggagtgctatccagacatgggttaaggactacgtctccttgtactatgccacggatgatgcagttaagaaaga

SEQ ID NO: 3721 - DNA, 379 bp, Glycine max
  Clone ID: LIB3028-006-Q1-B1-F5
tgaatacgtgatatctcacaaggcctatgcgagggtgggattgcttgggaacccgagcgatgtctactacggcaaaacgatagcgttaagcgtcgccaacttcttcgccaccgtcacgctgcgtccctccgaccagttaatcctccaaccccaccccctccacgatctccttcatttctcatcgctccctcaattggtcaacaggttgagctcccaaggttactatggaggcgtgcgattgcttatggctatttgcaatgtcatctacgcgtattgcagagagaacgccatcgatcttggcgacgacaatttcactctctcctacgacaccaatatccctcgccaggctggtctttcgggttctagcgggatcgtgtgt

SEQ ID NO: 3722 - DNA, 396 bp, Glycine max
  unsure at all n locations
  Clone ID: LIB3028-006-Q1-B1-F7
caaattcattttaatcctaattctgcacttcttgatcattcgatttttctcctcaagatgcagatattcgtaaaaactttgaccggcaagaccatcacccttgaggtggaatcctccgacaccattgacaacgtaaaagctaagattcaagacaaggaagggatcccacctgaccagcagagacttatctttgcgggtaaacaacttgaggatggtcgcacccttgccgattacaacatccaaaaggaatcaaccctccatctcgtgcttcgcctcaggggtggcatgcaaatctttgtcaagactttgaccgggaagaccatcacccttgaggtggaatcctcggacaccattgataatgttaaggccaanatccaggacaaagagggcatcccc

SEQ ID NO: 3723 - DNA, 402 bp, Glycine max
  Clone ID: LIB3028-006-Q1-B1-F8
gcgaagaaagattcgaaacgaagaaagaaagcgttgtgaagaatggcggaagagggacaagtgatcggtgtccacagcgtagaggagtggaaggaacatctcaagaagggagaagagtccaagaaattgattgtggtggattttactgcttcttggtgcggtccatgccgtttcattgccccaattcttgcagagtttgctaaaaagttgccgaatgtcaccttcctcaacgtggatgtggatgaattggagactgtttccaacgagtggggaattgaggctatgccaaccttcctgttcttgaaagaaggcaagctggtggacaaggttgtgggtgccaacaaagacgagctgcaattgaccctacgcagacatgccgcaactgccgggtgcttgaagtgc

SEQ ID NO: 3724 - DNA, 375 bp, Glycine max
  unsure at all n locations
  Clone ID: LIB3028-006-Q1-B1-G1
atttgcgtgagaacgannaaagaaannaaaaaaccctaacgcactcgagaccctgagatttttcatcttcgtttcccattctccttttgattatggacgtcgaagtgcggcagatcttcaacaagttcgacaagaacggcgacggaaaaatctcggtaacggagctgaaggacatgctcgcggccctcggatccaaaacgacggacgaggagttgaaacgcatgatggaggagctcgaccagaacggcgacggtttcatcgacctcaaggagttcgcggattttcactgcaatggcggtgccggaaaggacgactcgaaagagctccgcgacgcgttcgatctctacgacgtcgacaagaacggcctcatctccg

SEQ ID NO: 3725 - DNA, 395 bp, Glycine max
  Clone ID: LIB3028-006-Q1-B1-G10
ggattgggtagttttgcagcagctattcattcttcaaagttatgggtcatgaatgttgtgcctactatagctgaggcgaatacactgggtgtgatatacgagcgaggacttattggcatctatcatgattggtgtgaagccttttcaacatatccaaggacatatgaccttattcacacccatggtgtctttagtctgtacaaggataaatgcaaggccgaagatatacttctggagatggaccggattttgcgaccagaaggtgctgtcatattccgcgacgaagtagatgtgcgaattaacgtaaagaaaatacttggaggaatgagatgggacactcaaatggttgaccatgacgatggtcctcttgttcctgacaatgtgcttgttgctgt

SEQ ID NO: 3726 - DNA, 397 bp, Glycine max
  Clone ID: LIB3028-006-Q1-B1-G11
ctcgagcctaatcggctcgagcttcacaacattctcacataacagctttcaaactctgagaaagaatggctgcgaagacattgatgagtactgctatctcaaccttcgaatctctcctttcttcctcaaaatccatatttgccaccgcagttcctctttctaactttggtgtcaccaatgcctcttcgtctcgcttttctatgagtgctgactggatgccaggccagcctatacctccatagcttgatggttcagcacctggtgactttggattcgaccctcttcgtcttggtgaagtaccagagaatcttgagaggttcaaggagtcagaagtcattcactgcagatgggccatgcttgctgttccagggattttggtttcagaggcattgggctt

SEQ ID NO: 3727 - DNA, 416 bp, Glycine max
  Clone ID: LIB3028-006-Q1-B1-G12
ctccatgctaccttgtgacagagggaagatgctgctcaactgcatcaatttatccttcatgctgctcttgatattgttcaggaccttgcatggactactagtgccatgtacttgaaatcagtagacaggtttaatgaacttgtggtgtcagtgtatgttacagctggtcatatcctttatacttgggattcttttatagtttagataaaaagaattgcattactcttgtttgttcacttttttttaatctttttttttccaaataaatgaagtactgagtacccaactttgaggaccaatcaatttagttagcttctttaattgtataattatgccattgtcactggcaggggagcaaaatataagtgcctagagtggagaagtcttaaactaaaagcttacagcaagcacatatc

SEQ ID NO: 3728 - DNA, 398 bp, Glycine max
  Clone ID: LIB3028-006-Q1-B1-G2
gtgagctataagctagtttatcgtgaggagaatatgaagttgtttgttttctttgttgctgcagtagttttggtagcatggccatgccatggcgcaggctaccaaaggttccctctccgaatgaaaactggctatggtgagcgttcttcggaggtaaaatgcgcaagttttaggcttgctgtggaagcacacaacatccgagcctttaaaaccattcctgaagagtgcgttgaaccaacaaaggactacattaatggcgaacaatttagatcagactctaaaacagttaaccaacaagctttcttttatgctagtgaacgcgaagtccatcacaacgacatatttatattcggcatagataacaccgtactctctaatatcccatactatgaaaaaca

SEQ ID NO: 3729 - DNA, 117 bp, Glycine max
  Clone ID: LIB3028-006-Q1-B1-G3
ttttttttttttttttttttttttgttatgagtggcagaaatattattattaacatggtatattcgggtaagattttattatgttttgatgcagtcatgattcatgtgtttggtaat

SEQ ID NO: 3730 - DNA, 381 bp, Glycine max
  unsure at all n locations
  Clone ID: LIB3028-006-Q1-B1-G4
actcaccctcattaccancacgaaagcatagccaaaaccttttttcgaagtccccgattttccctaatggctccggcaaaggcaaagaagaagcggcggagaagaagccagcggcggagaaagcaccggcgaagaagaagccgaaggccgagaagaagatctcgaaggaaggatggagcgagaagaagaagaagcgcacgaagaagagcgtggagacctacaagatctacatcttcaaggtcctcaagcaggttcaccccgacattggtatttccagcaaggccatgggcatcatgaacagcttcatcaacgacatcttcgagaagctcgcccaggaagcgtcgcgtttggctcgctacaacaagaagcccaacatcacct

SEQ ID NO: 3731 - DNA, 393 bp, Glycine max
  Clone ID: LIB3028-006-Q1-B1-F1
atttgaggccaggcaagccccactcaatcagcacacctctcctcgttcacgctacccctttctgctcgtcttccacctttcaagttttaaaagtataaagatggcagagacattcctaattacctcagagtcggtgaacgagggacaccctgacaagctctgcgaccaaatctccgatgctgtcctcgacgcttgcctcgagcaggacccagacagcaaagttgcctgcgaaacatgcaccaaaaccaacttggtcatggtcttcggagaaatcacgaccaaggccaacgttgactacgagaagatagtgcgtgacacctgcaggaacatcggcttcgtctcacatgatgtgggactggatgccgacaactgcaaggtcctcgtcaacattga

SEQ ID NO: 3732 - DNA, 402 bp, Glycine max
  Clone ID: LIB3028-006-Q1-B1-G5
caaagtcccaccacttggttttcataacccattctccatctcagaatggagaatgcgagaataagccagtggttgatccttctggtgtgtgcgctgctgttgctgatatcagaagcttcttatgtgccaatcactattgttcagaacgcggtagcaaaaggagctgtttgtttggatgggagtccaccagcttatcattttgataggggatttggatcagggattaacaattggttggttgcatttgagggaggaggatggtgcaacaatgtcactacttgccttgctcgcaagaccaatcgtttaggttcatctaagcaaatggccaagctaattgccttttcaggaattttgaataacagggaaatgtttaatccagatttctacaactggaacagaatc

SEQ ID NO: 3733 - DNA, 418 bp, Glycine max
  Clone ID: LIB3028-006-Q1-B1-D12
gtcatcatcttcagacctggacaggcaaatagagcagttgaagaggtgtgagcctcttaaggagtctgaagtgaaggtgctctgcctcaaagccatggaaatcctcgtcgaagagagcaacgttcaaagggtcgacgctcctgtcaccatatgtggtgatattcacggtcagttttatgacatgaaggagcttttcaaagtaggaggggattgccccaaaactaactatttattcctgggggattttgttgatagagggttttactcggttgaaacgtttctgcttctgctcgctcttaaggtgaggtatccagatcggataacacttattaggggaaaccatgaaagccgtcagatcactcaggtatatggattctatgatgagtgccttcgaaaatatggttcagtcaatgtctgg

SEQ ID NO: 3734 - DNA, 367 bp, Glycine max
  Clone ID: LIB3028-006-Q1-B1-D2
tgaaatttacaaggcaactaacactatcaaggcttataatcagataggttttctaaagctcgagaagtcaattccagatgccattctaagacaagcaaaaggccttgcaattatcactgtggtcaaagtacgagtgggggttacttacaatattggaacaggacttgtggttgcccgtacggaagacggttcatggtctcctccatctgctgtttccacctttggtgtacggtggggggctcaggctggaggcgagttgacagacttcatcattgttttgagaacaaatgatcctgtcaagacatttggtggcaatatgcatctttcacttggagcaggtttgagtgctgcagtaagctttgttggt

SEQ ID NO: 3735 - DNA, 357 bp, Glycine max
  Clone ID: LIB3028-006-Q1-B1-D3
cttctctctgagaacaacaccccacactcctctctctctctccgcttccttctcttctcacacctccatggcccaaacttcccttccctccgccgatgccggcattgacgctgtccagcgccgtctcatgttcgaagacgaatgcattttggtggatgagaatgaccgtgtggttggtcatgattcaaaatacaattgtcacttgatggaaaagattgaagctgagaatttgctgcatacagctttcagtgtattcctgttcaactcaaagtatgagttgcttcttcagcaacgatctgcaacaaaggtaactttccctcttgtgtggacaaacacctgttgtagccatcctctgta

SEQ ID NO: 3736 - DNA, 421 bp, Glycine max
  Clone ID: LIB3028-006-Q1-B1-D4
atcagctcaagatggagctcacagagggacatgtattccaaggttggcatgaaggagctatagagtttccacctacatacaaataccgtctgaattctgtagactacctaggctgtgatcagcagcatgtgagcagaaagcggcgctccccagcatggtgcgatagaataatatggtttgggaagggaatgaagcaaatccaatacaacaggagcgagtcaaaactttctgatcataggcctgtacgagcaatgttcacagctgatatcagggttgcagggacttgtaaatgattaaaaaagttacaaaggcaatttgtccaagaaattttggttttaatggactaaatttagtcatggaccaaaaccagacacagacaccggacacctaaccaaacttagtcctgggctaaaacaagcat

SEQ ID NO: 3737 - DNA, 382 bp, Glycine max
  Clone ID: LIB3028-006-Q1-B1-D6
cacacaacacaccacaaccttcttcttcttcttcttcaacttctggttcaaaacctcaacagtttgttgaattgcgcgttgaaatacgactcaatattctttcgcgagctctgttctcacttcaaaggttaggttcttcgacagtttctttgtttccactccgtcgcttgctgagaaggcgtgagcgagagttgtagaattacgcaacgagtgtcgcggatgagagatctgtggtgaggtctctggaaatgacatcattggaggtgacgatgaagggaaattgcttgaaccacaacgacggcggagccacggagcctcattccccgtccacggccaaagacgcagaagctgcacttttcaggcagctatggcatgcttgtgc

SEQ ID NO: 3738 - DNA, 364 bp, Glycine max
  Clone ID: LIB3028-006-Q1-B1-D8
ctctttgttatatttgttacttatattttcttcgttcagcatggactcgccgaagcggcaggggcagaagtttctggtggcggtgacggcggtggcggcggtggtggtaaagcgggtgagccggctgcagcggaggctggcggtgagggagcagtggaggatggagctgcggtcgccgaagaagcttctgagcaacataagcagcaaaacgctgccgtttaggaagaagaagaggggtgaggaggattgggggaaggtggggtgtggcagacggcgatcctgatgggggacacgtgtgaaccgttggatttcccaggcgtcatttattaccatagtaacgggaagcacgtgaactagatgcccc

SEQ ID NO: 3739 - DNA, 412 bp, Glycine max
  Clone ID: LIB3028-006-Q1-B1-E1
caacaacactctctcttctcgctcttggcttttcgctcttcactcactctcattcattcatttccaccgttcatggatccagtaagcgtgtggggtaacacgcccttggcgacggtggatcccgagatccatgacctcatcgagaaggagaagcgccgtcaatgccgcggaatcgagctcatcgcctccgagaacttcacctccttcgccgtcatcgaggccctcggcagcgctctcacgaacaaatactccgagggcatgccgggcaaccgctactacggcggcaatgaatacatcgaccagatcgaaaacctctgccgctcacgcgccctccaagccttccacctcgacgcccaatcctggggcgtccacgtccagccctactccggctccccggccaacgtcgccgcct

SEQ ID NO: 3740 - DNA, 389 bp, Glycine max
  Clone ID: LIB3028-006-Q1-B1-E11
caacaaggtaaggtcagggttctggtttgtgagcaccagtggtgaccctaatgatatcactagcaagttcaagattgagaggcttgaaggggatcatgcttatgagatctacagcttcaagttctgccccagtgtgcctggtgcgctgtgtgctcctgtggggacttttgaagatgctgatggaaccaaagtcatggctgtgggggatgatattgagccttactatgtgaggtttcaaaaagtctccatctttggtcaagacaagaaacaaccttttagcattttgtacgttggtttgtgcctgtaataggtagatgcgggtcatgactcggaataatgagctactagaatgcaatgcaactgtttccttggtgtgcctgtgtgaaaga

SEQ ID NO: 3741 - DNA, 425 bp, Glycine max
  Clone ID: LIB3028-006-Q1-B1-E12
cggatttcacacaattgaggatcagagaaacaaagacaaccacaacaataacaataacaacggtgatgactgctcaagtgcatcttcaattactgtttccaatgaggaaagtgggaaaagcacgtctcaagaatcgattatggtgcccaacagcaacggtttcatccaccatgttccatgcatttccactctcccttggccttatccttttccctcagcagcacctgctatgtgccctccagggtttcccatgtcattctaccctgcagcattttggaacattccatggtttccctcacaacactcacaccattctgctcctactccaaggtctcccagttccggtcctaattctccaacactagggaaacactcccgcgacgacgacgcggaaaaacaagaccatttgcaagaagaatcaccct

SEQ ID NO: 3742 - DNA, 404 bp, Glycine max
  Clone ID: LIB3028-006-Q1-B1-E2
attcattcagaggcaataaaggagttgtaaattaagagcatggctgcacaagctcttgtatcatcatcatctcttaccttctcagccgaggctacaagacaaagtcttggaccaagatcattccaatctccatttggcttctcaagaagagcctcctttcttgttaaggcagctgctactccccctgtcaagcaaggatcagacagacctttgtggtttgcatcaaagcaaagtctttcctacttggatagcaaccttccgggtgactatggatttgaccctctgggactttcggaccctgaaggaacaggacggttcattgagccgaaatggctagcatatggtgagataatcaatggtcgttatgcaatgttgggtgcagttggtgcaatagcacctgaaat

SEQ ID NO: 3743 - DNA, 422 bp, Glycine max
  Clone ID: LIB3028-006-Q1-B1-E3
gttgggtttgttagtagtgtatgtatggcgtgtgtattgctttgcttctctttctctaagtctttgttcacgctctcttcttttctttgtcttggtctaacatccaacaacacccatacccaacaacaacattgaagggtgtcggcttcattttaagtaatttttgtggcaacaatcaaaccccatctgacgatttcgccccccaaacccagtgagttgaattccctccccagatccacatcggtacgtagaatcctgctgtggtgaggtgcggtgtattcattggacaagattggaatgcaaaggttgattgattaatactaacaaataatcatcttagccacaagagatggtgtcaagccagctggtgaaagtgaagagagatacgctacgaccatgcatgacatgccctctctgccata

SEQ ID NO: 3744 - DNA, 355 bp, Glycine max
  Clone ID: LIB3028-006-Q1-B1-E5
gaataaacatcttcagaccttcgaaactcggctgcagacagcagagccgaagtgcctataaatgtaaccacacaacaaaatgcaagagagacagtgaatcaaggggtgttactgaatacaaatagaaacactcgagtacagaataatcctacaacgtggctgagaaatgcagctgaagattccacagcagagtcttcaagtagtactaggagagaaagggatgggggtgtagttccagtatggtcccccccagcttctaatttctcagaacaatttgtagatgatgaaccggttcctataccattttcatcatccactaattgtatacgaaccggttcatcttacttgcaaaggc

SEQ ID NO: 3745 - DNA, 358 bp, Glycine max
  Clone ID: LIB3028-006-Q1-B1-E7
aagcactatagtacaaaaaggacattcattcatctatggctacccttattgctcccagcaaccactctccccaagaagatgctgaagctctcagaaaggcttttgatggatggggaactgatgagaacactgtcattgtaattttgggtcatacaactgtgtatcagacgcagcaaatcataacagtttatgaggaaatttaccaggaggatcttgtgaatcgccgagagtctgaaatcacaggacactttgagaaagccgtgtaacgatggatactggaacctgcagattctgatgctgtcttggccaatgttgccatcaatactggcaccctctcctatgtcattgaggaaattgc

SEQ ID NO: 3746 - DNA, 78 bp, Glycine max
  Clone ID: LIB3028-006-Q1-B1-E8
ttgggaagctgtttggccaggcactcccattctcactggattgcgagagcgtctacagcctctccctgcaggtgttga

SEQ ID NO: 3747 - DNA, 398 bp, Glycine max
  Clone ID: LIB3028-006-Q1-B1-E9
atctgcgtgtaaatactccaacttgtcccaattcacacctttgcctcgcgattctccgatgcgttacacctttgtccaccgattcctctttaattttcttccctttttcccccaattcaactaaattttctgctatctatattcccaggtaagtaaagtcagatttttcttggtggacggacatgcagaagaaggctgcactcaacttccaagctttcctctagaacaaaagcaaagattatactgtcataaaaaggttttgtacttattttaatgggtgctcctaagcagaaatggaccgcagaggaagaagcagcattgaaagctggagtagtcaaacacggggctggaaaatggcgcaccatacttacagacccagagttcagttccattttgcg

SEQ ID NO: 3748 - DNA, 415 bp, Glycine max
  Clone ID: LIB3028-006-Q1-B1-D11
cagttcaacaactctcagcaacatgcacaatcctcccccgccaggcggtccaggccctcaccaccaccccggcccaccggctccgccaccacatgctcatccatctcctccgcctcctgggcctccacaccaccaccacggcccacccggcccaccgcatgcttatccaactcctccgcctcctgggcctccacaccaccatcccggcccaccctaaccaggctttcatcaacaccatggcccacccgggccaccgtatgctcatccaactcctccgcctcctgggccatcgggacctccccctccaaggcctccacaccaccaacaccaccgttgctgatgttatgcatatggaagcttatcaataacgatcctacatatatatgatgttatcttgaatgctttttaatttctg

SEQ ID NO: 3749 - DNA, 383 bp, Glycine max
  Clone ID: LIB3028-006-Q1-B1-B10
aaaccttttgtcctcacaccatagcagtatattctaagaactggagaaggcattacagaagtctgccttagtgggtttattgcttttgatgttcctcctccaaagggtccattgtggattcttggcgatgttttcatgagggcatatcacaccgtctttgactatggaaatctccaagttggctttgccgaagcagtctaattacgctttctggaggattttctttgtaaatttgttaagcgtgttgtaaataagctgttataattgtagctctggttactttttgaaaccacgaatgtatttatccatttaagacgtagaagtatcccacttgcaagtgttgtgtgctttttatatgaaaaaaccatcctcatttcattccg

SEQ ID NO: 3750 - DNA, 413 bp, Glycine max
  Clone ID: LIB3028-006-Q1-B1-B2
attccattctctctgtgtatttccctacctctcccttcaagatgcagatcttcgtcaagaccctcaccggcaagaccatcacccttgaggtggaaagctctgacaccatcgacaacgtcaaggccaagatccaggacaaggaaggaatccccccggaccagcaacgtctcattttcgccggaaagcaacttgaggacggccgtacccttgctgactacaacattcagaacgagagtactcttcacctcgtcctccgtctccgtggtggcatgcagatcttcgttaagacactcaccggcaagaccataaccctagaggttgaaagctccgacaccatcgataacgtcaaggccaagatccaggacaaggagggtatccccccggaccagcaacgtctcatcttcgccggaaag

SEQ ID NO: 3751 - DNA, 343 bp, Glycine max
  Clone ID: LIB3028-006-Q1-B1-B3
aacaaactgcagcagccactggaatagagggcatgatcataaatctgtcatcaattgcccataactacacttacataaaggggattagatttaataagatcaatgaaccgaaaggttacggtaacaacaaggcgtatggacagtccaagttaacagacatagtacatacgcatgacctttcacatcccctgcgagaagatggtgtgaacattacagcaaactcattccatccaggagtcataattactcctcttatgagacactcttctttccatatgcacttcctcaacgtctttaccttttacatatgcaagaacgtcacccagggagcatccaggacatg

SEQ ID NO: 3752 - DNA, 380 bp, Glycine max
  Clone ID: LIB3028-006-Q1-B1-B5
gtttttaataggtagtacgtaggtgtaatcgttgtcttcctgcagatatggaagaagcgggtttaggagattgttgttcctctaatacgactattacgaggaaaagcgagaagcgaaagcagcagcaccaacaacaagagaagccatacagaggaataaggatgaggaagtggggcaagtgggtggcggagattagagaacccaacaagaggtcgaggatctggttgggttcttacgccaaccccgtcgccgccgcacgcgcctacgacaccgccgtcttccacctccgaggcccttccgctcgccttaacttccccgaattgctgtcccaggacgacgacgtttcgacccaacaacagggcaagatgtccgccgattca

SEQ ID NO: 3753 - DNA, 399 bp, Glycine max
  Clone ID: LIB3028-006-Q1-B1-B6
catagctgaaagctgactctagctagaggataataataagattaagatcatccatccaacaagaaagaggaagtgtgtttttgattggatccacaaaattcaagatgactccagttaatttggctggccagtttggtgacacaacatacactaaggtgtttgttggaggcttggcctgggagactcaaaaggagacaatgaagaagtattttgagcaatttggtgagatcttggaggctgttgtcatcactgacaaagccactggaagatctaaaggctatggatttgttacttttcgtgaaccagaagctgccatgagagcttgtgtggatcctgctcctgtaatcgacggtacgagagctaactgcaaccttgcttctttgggtgtccagagatcta

SEQ ID NO: 3754 - DNA, 373 bp, Glycine max
  Clone ID: LIB3028-006-Q1-B1-B7
atgtatttcacccaaatataaatagcaatggaagcatttgccttgacatattgaaggagcagtggagccctgcgctaactatttcaaaggtgttgctctcgatttgttccctgttgacggaccctaatcctgatgatcctttggtccccgaaatagcccacatgtacaagacagacagaaacaagtacgagtcaactgccagaagctggacccagaaatatgccatgggttaagtgacctgtggtatgtgtgaggaagagcctttctactcacagtgtttatgcctctcagcccttgtatgaatatttgtcgtttttaataaggcccctccagttgaagattaatggagcaggacgtttctcctgttgtttgt

SEQ ID NO: 3755 - DNA, 423 bp, Glycine max
  Clone ID: LIB3028-006-Q1-B1-B8
caagagacagcagagcagagatctagcgtattctctcgctctttctttcactgtcacagagccacatccatgggcttcccagccaacggcgcctctgcggcccagcccctaaacttcctcatctacggccgcacgggctggattggcggcctcctcggctccctctgccgggcccagggcatctccttccattacggctcgggccgcctcgagaaccgggcctccctcgaaaccgacatagccctcctcaagccctcccacgtcttcaacgccgccggcgtcacgggccgccccaacgtcgactggtgcgagtcccacaaagtcgagaccatccgaaccaacgtcgttcggaacctcactctcgccgacgtctgccgcgaccacggcctcattctcatcaactacgccaccggttgcattttc

SEQ ID NO: 3756 - DNA, 319 bp, Glycine max
  Clone ID: LIB3028-006-Q1-B1-C1
ctccagaaaaaatggcggtgcctcttctctcgaagaagatcgtgaagaagaggctgaagaagttcaagaggcctcaaagtgacaggaagatttctgtgaagacaaactggcgcagaccaaagggtatcgattcccgtgttaggagaaagttcaagggatgcactttgatgccgaacattggttatgcttcagacaagaagacccgccactatctcccgaatggtttcaagaaatttgttgttcacaatgtgaaggatttggaactgctcatgatgcacaacaggacttactgtgctgagattgcccacaatatatccac

SEQ ID NO: 3757 - DNA, 86 bp, Glycine max
  Clone ID: LIB3028-006-Q1-B1-C10
ggtccatacaaagtcattgcgttggtatgggatggatgcttcgctcacgacatatttgttcgtgctagggcatgtcctgtcacctt

SEQ ID NO: 3758 - DNA, 417 bp, Glycine max
  Clone ID: LIB3028-006-Q1-B1-C2
gcattggattacttgaaggagaaacaactgagaatagaagcaccattgttaggacagaatcaattaaaccagctgtggctgagaaagtttctcaagattatggattgccatctaactactttgctgcttcaaaactggaccaaaccactgaagataataaagacactaaaactagttgcaaacaactggacttgaatggattcagttggaactgatgagaagagaaagcacaatggaagcacacagaaagcaaagttactccaatttctggcaggaaacaatgtatttactgtaaacaatgtatcagcttctgtttctttcagctcatggtggtcatgactagccaaatatgagttacttttagtagaatgcaaagttgcaactaacaaatttgtaagcagtaattataatggatat

SEQ ID NO: 3759 - DNA, 402 bp, Glycine max
  Clone ID: LIB3028-006-Q1-B1-C3
aaaaaatgggttcctcctcctccaagttgaccgtgtgtgttaacttgggcacactgtacatcctgatctttgtgctccaacctaccaaggcaacttgatgtaaatcttggtagtgagtttttgtctgcaggggcttttgttcacacgaaatatttcaaaggtgggttgtgacaatcccccatcattctgacaagttaaccgggactggattccattccataggggcctaattgtttggtcacttcagcatgttcatgaagacggttcctggagattccgctggcacagtcaacggctttctatttatcctcccaaaacgcggaaccttatgagatagactttgagttcttggggaacagaacaggacaaccttacattctgcaaacaaatgtgttcaccgga

SEQ ID NO: 3760 - DNA, 308 bp, Glycine max
  Clone ID: LIB3028-006-Q1-B1-C4
caccgaacaaagcagcagctcacaatccaccactggatccaccggatcgccgccttccgccgccttccacggcggaggagatgaactcgacctgaaacaacttgaacggtttctagggttggacaacatgggtgctgagtgggacaacatggatgacctgtggatgctggacgacgtcgttgtgcccaaccgtcacttaatttactagaagggagataattaattaattaataaatggcgttttcctaagttacagttttataaaactatgttggtgtatgtgttcttagttttccgttttgtcctgt

SEQ ID NO: 3761 - DNA, 293 bp, Glycine max
  Clone ID: LIB3028-006-Q1-B1-C5
ctccagaaaaaatggccgtgcctcttctctcgaagaagattgtcaacaagacgctgaacaacttccacccgcctcaaagtgacaggaagatttccgtgaacacaaactggccacaaaccaccgggtatcgattcccgtgttatgagaaagttcaagggatgcactttcatgccaaacactcgttacgcttcacaccacaagacccgccactatctccccaatggcttcacgacatttgtcgttcacaatcgtaacgatctggaactgcccatcatccacaacccgacttactg

SEQ ID NO: 3762 - DNA, 233 bp, Glycine max
  Clone ID: LIB3028-006-Q1-B1-C6
ctaaaaccctaatctcccaaaaccctacgcatggcgtcgtcgttaattcacctccgccgcaccgtcagagcactctccggcgtcgcccagtcgttctctgtgcatgcggcatcgtattccgtcgccattcggtgcggtgtgtcatggagtttgcagtcacggaagggtgtggtccagccgcgttcattcaggtcaagcgcactttcacgtctcgcgcttcgatcctcccagcg

SEQ ID NO: 3763 - DNA, 357 bp, Glycine max
  Clone ID: LIB3028-006-Q1-B1-B1
gcactccgtcttcatcaatcagcatcaccaccgctccaacacaggggaaaatgagggagatccttcacgttcagggagggcaatgcgggaaccagatcggttcgaagttctgggaagtggtgtgcgacgagcacggcatagatccgacggggaagtacgtcggaaactcagatctacaactcgagcgcgtgaacgtgtactacaacgaagcttcctgcgggcggtttgtcccacgcgcagtgctgatggacctggagcccggaaccatggacagcgtgcggactgggccgtacgggcagatattccggcccgacaacttcgtgttcgggcagtccggcgcgggcaacaactgggcca

SEQ ID NO: 3764 - DNA, 366 bp, Glycine max
  Clone ID: LIB3028-006-Q1-B1-C8
tcttcatccatagacatggccaccgtcacttctgcagccgttgctattccctcattcactggcctcaaggcaagcgcaggcaaagtgagtgccgcagttaaagtctcagctccccaagccacaaggttgggcatcaaggcttcgctgaaagacgttggagtcgctgttgtggccactgccgcgagtgcagtgctggctagcaacgccatggccattgaagtgttgctgggtggtgatgacgggtctctggctttcgttcccaacaatttctccgtggcctctggggagaagatcgtgttcaagaacaacgcaggtttcccccacaacgttgtgttcgaccaggacgacattcctagcggcgtggat

SEQ ID NO: 3765 - DNA, 313 bp, Glycine max
  Clone ID: LIB3028-006-Q1-B1-C9
ggtcaaactgacgttaatgctgtgacatggggtgtcttcccagctaaggagataattcaaccaaccattgtagatcctgtcagcttcaatgtatggaaggatgacgcatttgaaatttggtcaagatgatcggcaagcttgtaccctgaggattaggcatccaggaaattggttgaagaggttgggggcagccacttcttggttactttggtcgacaattattacatcaatggtgatccttttgccgtctttgcatatctctgacatgagcttattactcagtagaacttatcctatgtcacatctgttggtg

SEQ ID NO: 3766 - DNA, 149 bp, Glycine max
  Clone ID: LIB3028-005-Q1-B1-H2
ccctaattgcgttcttgattatactctgcaaattaatttttgggttccagagtcttatattataaatggcctttgccgcattcatagtgttcaggaaattggggctattagccagaggttgtggagaaaaatcgcttgtacctgtagat

SEQ ID NO: 3767 - DNA, 384 bp, Glycine max
  unsure at all n locations
  Clone ID: LIB3028-005-Q1-B1-H4
tcaaggccttaataaaggctttcctccccgtttccgtttcccccgtccaaatccccttttggtttgccaaaattagaaaatggaacctgattcaaattgggccaggtggttaccaagtccggaaatccttgcgggaagcccaacggcttcaaccacggcatcgggcccgatgggcaaatgccaattgacangacaattggcggtggtgatgatgctttcaatactttcttcagcgagactggtgctggaaagcacgtgccacgtgcagtgtttgtagatcttgagcccactgttattgatgaggtgagaaccggaacttaccgccagcttttccacccagagcagctcatcagcggcaaagaagatgccgccaacaactttgcc

SEQ ID NO: 3768 - DNA, 384 bp, Glycine max
  Clone ID: LIB3028-005-Q1-B1-H5
ccagaatcggttgataatgacatcccggttattgataagtcatttggttttgacactgctgttgaagaggcacaacgagccataaatgctgctcatgtggaagcagaaagcactgagaatggtattggtgttgtcaagttaatgggtcgtcacagtgggtttatatctatgtatgcaactctcgccagccgagatgtggattgttgcttaattccagagtcacctttttacctcgagggtccaggtggactctttgagttcattaggaaaagactcgcataaaacgggcacatggttatagtaatttctgaaggtgcaggtcatgagcttatttcagaaagcctatctgctacaaataagcaggaagcttctggcaacaagtta

SEQ ID NO: 3769 - DNA, 396 bp, Glycine max
  Clone ID: LIB3028-005-Q1-B1-H6
gagggttctctccaaaactattgccaagatagttaataaacaccacttctctagattgaagaatcttcttgctgataaaaaggtcaaagaatctgtgatttatggtggttcaatggacgaacaaaacttatttattgagccaacgatcttggtggatcccccactggaagcagcacttatgtcggaagagatttttggcccattacttccaattattaccgtggataagattgaggacagtattaagttcataaattctagacctaaacctcttgccctttatgttttcaccaagaaccaaacactgcagagaagaatgatatctgaaacatcatctggcagtgtgactatcaacgacgcaattctacaatatgcagtctatactgttccatttgg

SEQ ID NO: 3770 - DNA, 422 bp, Glycine max
  Clone ID: LIB3028-005-Q1-B1-H7
ccaccctacagatgaagagctcattcttcactacctaaggaagaaggttgcctctattcctttgccagtttccatcatagctgaggttgatatctacaagtttgatccatgggagctaccagctaaggccgagtttggggagaaagagtggtacttcttcagtcctagagaccggaagtacccaaatggagcaaggccaaacagggcagcagcttcagggtattggaaggccacaggcactgataagaacatattggcatcactggcaagaggaggggttagagagcactttggtgtgaaaaaggctttggggttcaacaaaggaagacccccaaagggtgtcaagaccaattgaataatgcatgaatatcgctttgttgacaccaatagacccattaggatcaaagacacctccatgaggt

SEQ ID NO: 3771 - DNA, 426 bp, Glycine max
  Clone ID: LIB3028-005-Q1-B1-H9
ttagcaccggaatccggcccaagcttaaggcattccgggcaaattttttcccactttaatttaaactttaaaacggcacagaaagaagcatataattccggagtcaatataaaatttgtgaagtcagtcaaagcttcagtttcacagatgcctcgtggaacgcttgaagttgttctgatcagcgccaaaggaagcgatgacaatgatgttctctccagcattgatccttatgtgattctcacatacagggcacaggagaaaaagagcactgtgcaagaagatgctggatccaagccacaatggaatgagagctttcttttcactgtcactgacagtgcatctgaacttaatctaaagataatggataaagacaactttagtcaagatgattgtcttggcgtggcaaccattcatctggattcagtg

SEQ ID NO: 3772 - DNA, 379 bp, Glycine max
  Clone ID: LIB3028-006-Q1-B1-A1
aataaaccgaatgagagcattaacctcttcttcttccactttcattccaaagcgttattccttcttcttcttcctctccattctcttcgctcttcgatcctcgtccgggggctgctccgaataccaccaccaccacgcgccgatggccacgataggaggcttacgcgactcccaaggctctcagaacagcgtccaaaccgaggccctcgctcggttcgccgtcgatgaacacaacaagaagcagaattcacttctggagttttctagggtggtgaggacacaggaacaggttgttgcgggaaccctgcatcaccttactctcgaggctattgaggcaggtgagaagaagctctatgaagccaaggtgtgggtgaaacca

SEQ ID NO: 3773 - DNA, 324 bp, Glycine max
  Clone ID: LIB3028-006-Q1-B1-A10
acttcatccaaaaacatggcacccttaaccatcagaaccatcatggacacctccgctattcagcattcaggattcactgggcaaactgctctgaaccatctcagtcacttcgtccgcaacaccggtggcgcccgcaaaggtctcactaacatacgtcgcactctcaatagtgctcatcacagcaattggtatggccctgaccgtcccaattacttgggtccagtcgctgagcagattccatcggtcctgagcggacaattccctggtgaccaccgttgggacactgcagaatatccagctgacccggaaaccttgtctaggaac

SEQ ID NO: 3774 - DNA, 319 bp, Glycine max
  Clone ID: LIB3028-006-Q1-B1-A11
cgagagtgcttactacgagcattacaagagcatcatgggaactaagagttggggaattggaccggtttcgttgtgggcgaaccaggatgctcaagataaagctgcacgagggtatgctaaagaagaagaagagaaagaagggtggcttaagtggctcaactccaaagcagagagctctgttttgtatgtgagttttgggagcatgaacaagttcccttactctcagctcgttgagataacacgtgcgcttgaagattcggggcatgattttatctgggtggttaggaaaaaccatgggggttaaggggaaaactttttg

SEQ ID NO: 3775 - DNA, 313 bp, Glycine max
  Clone ID: LIB3028-006-Q1-B1-A12
ggaataatcaattagaaaaaataaaagttcattcaaattatgctgggatttatgcaattaggttaatttaattccctgcaagaggaaaaatgtggaggaaaagaaggtgatttggtatctagtaagaaggtcttgcattcaatccgttgagcatgttgatcaaatttggttcctaactttgtgtatgaaaaatgcactgttaggagatctattcacttgctagacaaaacatcatcctaaaatagtacgaggtgttttactccatgtaatctttgaaattgaagagaaaggaaattgtcatgttataaggctt

SEQ ID NO: 3776 - DNA, 399 bp, Glycine max
  Clone ID: LIB3028-006-Q1-B1-A3
atttctccatttccattttctctctcacttttcaagaatcgtaagctatgggaaagtcttacccaactgtgagtgctgattaccagaaggccgttgagaaggcgaagaagaagctcagaggcttcatcgctgagaagagatgcgctcctctaatgctccgtttggcatggcactctgctggaacctttgacaagggcacgaagaccggtggacccttcggaaccatcaagcaccctgccgaactggctcacagcgctaacaacggtcttgacatcgctgttaggcttttggagccactcaaggcggagttccctattttgagctacgccgatttctaccagttggctggcgttgttgccgttgaggtcacgggtggacctgaagttccattccaccctg

SEQ ID NO: 3777 - DNA, 425 bp, Glycine max
  Clone ID: LIB3028-006-Q1-B1-A4
ctaaaaccaattgtcaaatgtcaatattgaaaaacaagttgtgcagattcaaaaacctataaaggaaatgtttcattcagttgctatattcggtttgatgttcagttattggagcaaatgttctgtgacaccattttatttgtctagcagccaatcaagtaatcttttattaccctcaatggtcatctttgcctaaattggtttttcaggaaaagagaacagagcatgtatggttaagatcagaagttaaagtcatgcgacgttttctagtgatcatttgtcctttaagttctaattttaagcattcatataatctccaacggtcaatatttgatcctttcacttatcatgaaaacgcattgctataacttgctatattcgccacatgtttgtgtatgtgatattatgctattatgactgcttca

SEQ ID NO: 3778 - DNA, 425 bp, Glycine max
  unsure at all n locations
  Clone ID: LIB3028-006-Q1-B1-A5
gacgtcggattcactcgtacctagaacttcggctcgagaataaaccgaatgagagcattaacctcatcttcttccactttcattccaaagcgttattccttcttcttcttcctctccattctcttcgctcttcgatcctcgtccgggggctgctccgaataccaccaccaccacgcgccgatggccacgataggaggcttacgcgactcccaaggctctcagaacagcgtccaaaccgaggccctcgctcggttcgccgtcgatgaacacaacaagaagcagaattcacttctggagttttctagggtggtgaggacacaggaacaggttgttgcgggaaccctgcatcaccttactctcgaggctattgaggcangtgagaagaagctctatgaagccaacgtgtgggtgaaaccatggttgaa

SEQ ID NO: 3779 - DNA, 396 bp, Glycine max
  Clone ID: LIB3028-006-Q1-B1-A6
cttcttcccaaccactactactcactcactgcagatctcaattgcatcgctgtccatggctaccatcgttagcatcaaggcccgccagatcttcgacagtcgtggcaatccaactgtcgaggtggatttgacttgctccgatggtacttttgccagagctgctgttccaagtggtgcatccactgggatttatgaggcccttgaattgagagatggaggatctgactaccttggaaagggtgttacaaaggctgttgacaatgtgaacaccgtcattggccctgctttgattggcaaggacccaactgagcagactgctattgacaacttaatggttcaacagcttgatggaactgttaacgaatggggttggtgcaagcaaaacctatgagcaaa

SEQ ID NO: 3780 - DNA, 392 bp, Glycine max
  Clone ID: LIB3028-006-Q1-B1-A7
ctcgagccgctccgtctctgcaattacgatggcgcccagggacaagactagtgccgttaagcctagcggtaacgccggggtgaaggacctgcattttcgtggagtcaggaagagaccgtgggggaggttcgccgccgagatcagagatcccgccaagaagacccgcgtctggctcggaaccttcgacaccgcggaggaggcggcccgtgcctacgacgccgccgcgcgggagtttcgcggccctaaggcgaagacaaacttccctctcccttcggaaaattttaagaacgcgagccctagccaaagcagcacggtggagtcctccagccgcgaccgcgacgtcgccgccgattcctctccgctcgacctcaacctcgcccccgttcccgtct

SEQ ID NO: 3781 - DNA, 251 bp, Glycine max
  Clone ID: LIB3028-005-Q1-B1-H12
cttggcatgcacacgcacatcccacattacatcaaacacatttcatttttttttttctttctcctttgtcatcctcaaaatccccgaccttaattgctccgaccccaacaaataacaaaacaagcaagccatggattcctcccagattcatggcttgtcctcgtaaattcaacacctttacaagtcaaacttaagccaccattaactgaaaaaccgcaggaagaagaataagatcaaatctcataagggtt

SEQ ID NO: 3782 - DNA, 342 bp, Glycine max
  Clone ID: LIB3028-006-Q1-B1-A9
caaagtcacaatggaccccctctctctcttctgcaccggagccctcctcgccggcggcctctactggttcgtgtgcgttctgggcgccgccgagcataacggcaaacgcgccaccgatctttccggcagctccatctccgccgagaaagtccaagacaactacaaacagtactggtccttcttccgccgcccaaaggagatcgagaccgccgacaaagtccccgacttcgtcgacaccttctagaatctagtcacagacatctacgactgggggtagggccagtccttccacatctccccctccatccccggcaagtcccaccgagacgccaatcgcctcca

SEQ ID NO: 3783 - DNA, 359 bp, Glycine max
  Clone ID: LIB3028-005-Q1-B1-F7
ctcgagccgaatcggctcgagcaatgaccaatcacaattctctgtgaactttctagaatctcgttcttcctttgccttctccttcttcttcaaccctttttctttctctttctttcgcactttcattctctaaaaaaatctaagtccctttggtcttcatcttctgttctgatccaggtatggcttctaaacgcatcttgaaggagctcaaggatttgcagaaggatcctcctacctcatgcagtgcaggccctgtggctgaggacatgtttcactggcaagccacaatcatgggacctgctgatagcccatatgcaggtggtgttttccaagtttcaattcatgttcgtcctgactat

SEQ ID NO: 3784 - DNA, 394 bp, Glycine max
  Clone ID: LIB3028-005-Q1-B1-F8
ttcatataatattgcttcttggttcattctagctaattttgatggctcttccaatttgtctcaccgttattgcaattttcaccctttgttgtgtcattaattgtaacaatggcgttgaagcgtttcatgacatatacccggatcttcaatccatttcagcacgttcggtgagcaaacttcagagaactggataccattttcaacctcgtaagaattggatcaatgatccaaatgggcccatgtactacaatggaatctaccatctattttaccaatacaacccaaaaggagcagtttggggcaacatagtgtggggacacgcagtatcaaaggacctcatcaattggaaagaacttgaacctgccctatacccatcaaaaccctttgacaaata

SEQ ID NO: 3785 - DNA, 282 bp, Glycine max
  Clone ID: LIB3028-005-Q1-B1-F9
caaattccccccccgggaactctcgttttcgtttttcggccaagtacttgtactgctaccaccgcactctccacaaaaacgcacccagcaccatcttcaacaaccacggaaccaggaagaacgcatggccaacctctctgcttcctttggcgctccctgttcccgcgggttcacccgcccttcaaccaaatttcaacccttccttctgcgacaccgacgacagaggtgtgggttttgggggcacaggcagcacccaatactttgtaaggggatcacagaaag

SEQ ID NO: 3786 - DNA, 383 bp, Glycine max
  Clone ID: LIB3028-005-Q1-B1-G1
ggttcacgtttcacaatcactttttgcgcttctctcactcactcactcttcttcttcctcttcgtgtggttttctttctcgaactcgaacgaagatgcgtgagattcttcacatccagggagggcaatgcgggaaccagatcggagccaagttctgggaggtggtgtgcgcggagcacgggatcgattcaacggggaggttacaaggggacaacgagttgcaactcgagcgagtcaacgtctactacaatgaagcgagttgcggaacgttcgtgcctatggcggtgctcatggatttggagccagggaccatggacagcgtcagatctggtccctacggtcagatcttccggccagataacttcgtccttggacagtccggcg

SEQ ID NO: 3787 - DNA, 409 bp, Glycine max
  Clone ID: LIB3028-005-Q1-B1-G11
ctttcccctaattccgaccatggaagccacggcctccgcaatgagcttcgcccttccctcaacaaaagcccaagcccaagcccaactcctgacccggcccaccaatccattcaccattccctcccgcagcccagcccaccgccccccgccgcgcctccccaccatccgcgccgcaattccccgcacaaagaaagaggcaacggtggagactgtgcgggagcagctcgagaactgttacctcctcgccggcatcaactacaagggcttcacggtgaagcagttccaggagcttcgaaagacgctcccagaaacaacgaaactgatcgtggcgaaaaacacgctcgtttacaaggccgtggaaggcacgccctgggagacgctgaagccctgcatgaagggcatgaacgtg

SEQ ID NO: 3788 - DNA, 416 bp, Glycine max
  unsure at all n locations
  Clone ID: LIB3028-005-Q1-B1-G12
caaaagggagaagaaaangaaagaaaactctcaaaaaactattatagcaatggcagaacaaaaccaaaaccaaacaactgaagctggaaggcaccaagaggttggtcacaagagccttctccagagtgatgctctttaccagtatattctggagacaagtgtctacccaagagaacctgaatccatgaaagaactgagagagttgacagcaaaacacccatggaacatcatgacaacctctgcagacgaagggcagttcttgaacatgctccttaagctcatcaatgccaagaacaccatggaaattggtgtctacactgggtattcacttcttgccaccgctctcgctcttcctgaagatggaaagatcttggccatggacattaacagggagaattatgaattgggtttgcctg

SEQ ID NO: 3789 - DNA, 403 bp, Glycine max
  Clone ID: LIB3028-005-Q1-B1-G3
catttgtgacggccaatggccgtgttttctgcaacagaccacgcctacacaatccccggtgataacttctattcagacaagtttgagcaattgagatttttatgtgaagtgttcagcttccgcagcaggagtcactggcagaggtcttagttctacatccagatcactttaacgatcaatatttacatgaggctccttcttgaatcttattataggtagtctttcttactaatttgtaatcaatgtagcttccagatatacattcgtaccatagccctatcgaacccaatttgagtgattgctactttaccggtgtttcttacacaccgtatcctcccggtatacctgagtttctatttgtgtcgtctttaaaagattatggaaacatttgaaagttctttgg

SEQ ID NO: 3790 - DNA, 414 bp, Glycine max
  Clone ID: LIB3028-005-Q1-B1-G4
ttcggttcaaggttctaaaaggaaaaattataaccctggttaccctgcaaaggaacgttattaaggttggtaataaaacccctaaagctattggaaataccggaaccccaacccggacccttaggaataataacaggacccccattaataaagatgatgacaacaaccttcgctcaaattcaccttaaaaacagcacttcctgataaaataaggtaaggatgtgacccaatttgtaaccggctttgtttaaaaaattgcactccagcttaattatgtgacaattgtctctgaaaacagttttaagtatcctaatttttcagattcttgctggtcaagcagcatgtatggcttacctataatatggagtgcatgaatttgtttcaaatgttggcataatttaaatcaatataaac

SEQ ID NO: 3791 - DNA, 404 bp, Glycine max
  Clone ID: LIB3028-005-Q1-B1-G5
ggcaaagattatgttcatcagctgagacttatcacagagctgataggttcacccaatgatgccagccttggatttctacgaagtgataatgctcgtagatatgtaaaacagcttccccaatatccaaagcaaaacttttctgctagatttcccgacatgtctcctggtgcggttgatttgttagagaagatgctcatctttgatccaaacaggcgaattacagttgatgaggcgttgagccacccatacatggcacctctccatgacatcaatgaggaacctgtttgcaccagacctttcagttttgactttgagcaaccatcattcactgaagaagacatcaaggaactcatctggagagaatctgtgaagttcaatcctgttccaccagtctactgaaattt

SEQ ID NO: 3792 - DNA, 390 bp, Glycine max
  Clone ID: LIB3028-005-Q1-B1-G6
gattcctcctaattggttgtttttggacacccttcctttagcgcgggaactaatgaagtccggaggaacaacactttcttcatcatccctagctgcccttcgtgacctctacggaattaaggtggatggatcagctcacagggctatggtagatgtgaacacattgtccttgattctttccaggttgacctctgatctgaaattgaccctatctgaccttgtcgacaaatcattcacagaatcagatattatcaactctaagaagaagaagaagaattagactagttttctgactgtattttgcattgatgttgtgacaaatgaattattttgtaaccaacaatcgaactctaaatttggagtttaagtagaaaagaaacgttgtttggt

SEQ ID NO: 3793 - DNA, 376 bp, Glycine max
  Clone ID: LIB3028-005-Q1-B1-G7
ggagaagggggttcaagagtaaagaaagcactcagctatttcatgtgagagtttttctattgctgacatgtcccccctcccctgcagcctccatctcctgaagcctgcacatttgtagttttgctaatgtttatcgcttccaagggtttgctgttgagccatttcgtttctaaaatgaaatataggtttttatttatagttacttttattacatttgggatgatgggttttgaacggagttaaggagtggagccttcaaaaattttggtccgttctgctgcttttgttttgttcatcatcccacaaggacgcccttttatttctatttcaagttatacaagttctactagatgaaaagataaagtagtcaggtgat

SEQ ID NO: 3794 - DNA, 386 bp, Glycine max
  Clone ID: LIB3028-005-Q1-B1-G8
ggcgtcatttcatttccaccaaacaccaaagaaagaggtgaagtcaaatggtccttagttctgggagtgttgatgcttgagtcttgacggaacgaacggaaaaggggatctcaatggacaacaccaagccccttatcgaactggaactcgacgatgatggcagaatcagaagaaccgggaatgtgtggactgctaacatacacattataacagtggttgtaggggcaggggtgctgtctttggcatgggttatggcacaactaggatggttagctggcatagccagtatcattaccttttcagctgtcgccattttcacttacaatcttgtagctgattgttacagatatccagaccctgtcactggcaagagaaattatacttat

SEQ ID NO: 3795 - DNA, 430 bp, Glycine max
  unsure at all n locations
  Clone ID: LIB3028-005-Q1-B1-G9
ggaattcggcccaagccggtgccctgcaaactacgtccccctcactcaaatcagcttcttggaccgcgccgccgtcgtttaccgcgacagactttctcttgtctccggtgacgttacctacacgtggacccagacacaccaacgctgcatcaaacttgcttcttccatttctcaacttggtgtcggtctttctcccctcgatgtggttgctgtattggcccctaatgttccagctatgtatgagctgcattttgctgttcccatgtcaggggctgttctctgcacgctaaatacacgtcatgattctgcaatggtttccttgttgctaaaacattctgaggccaaacttgtttttgttgattatcaattacttgatattgctaaaggagcacttcanatcctgtcaaaaattcacaccaagcttcccaat

SEQ ID NO: 3796 - DNA, 426 bp, Glycine max
  Clone ID: LIB3028-005-Q1-B1-H1
gcttcatcccaaaaagctcttttccttctaaatttgattccttagttcagcattctattattatatatggcttcttcaccttcctcagaaaacaaaaacctagagggagtagctggtggtgccggagagaaacccattccacttggtgagaacgttctgcagaagcatgctgcattctttgacttgaataaagatggtgtcatctacccatgggagacttttaaagggttgcgtgaaatcgggactggggttttgctgtccgttggaggtgctattttcatcaatgtgtttctcagtcagagtactcgtcccggaaagtttccatctatactttttccaattgaaattaaaaatatccaacgcggcaaacacggcagtgacactggagtctacgatactgaaggaaggtttgtaccttcaaaattt

SEQ ID NO: 3797 - DNA, 153 bp, Glycine max
  Clone ID: LIB3028-005-Q1-B1-H10
atcgatgccctggtagttcccctgaaccttttttaatttgtgcgaaatttggaaggggtaaatttccccctaacttgagtacccaattactttgtgtggtcagtccaagctggggtttcgttgggaccacgttgttcgcttgaactaatggtg

SEQ ID NO: 3798 - DNA, 448 bp, Glycine max
  Clone ID: LIB3028-005-Q1-B1-H11
tacttaacaccggaatccggcccaagaaaattgataccatcacacagcattagtatgtaccaccaacaagggtcagatccaacaaagcaatcaccggcaaccggttttccggtgagctatagcaattcaacaacgtattcgaccaacgaggcttcctacgctccagtcccacctccccagcccaaacctcttgtcgattggtccaccggcctctgtgactgcttctccgaatgtggaaactgttgcatgacgtgttggtgtccatgtgttacctttggccgagttgcagaaattgttgacaagggatccacatcatgtggtgctagtggggctctgtatacgctgatttgctgtgtcattggctgtggctgcctatactcttgcttctaacgccccaagatgagacgacagtatggtctaaagggaaatggttgttcggattgcttga

SEQ ID NO: 3799 - DNA, 405 bp, Glycine max
  Clone ID: LIB3028-005-Q1-B1-F6
gcatttcctcgtttttttcttcccttttctctttctccggcgacgatctcagattccggccactcctctcgccggcgagcccttactcttccctcctccgtcgagccctctccgattcgaatcgttcccagcctcgcaccaccatgaatcccgaatacgattatttgttcaagcttttgctgattggagattctggtgtatgcaagtcatgtcttctcctgaggtttgctgatgattcataccttgacagctatatcagtaccattggagtggactttaaaatccgcactgtggagcaggatgggaagactattagacttcaaatttgggacactgctggtcaggaacgtttccgaacaatcactagcagctattatcgtggggctcatggcattattgttgttt

SEQ ID NO: 3800 - DNA, 371 bp, Glycine max
  Clone ID: LIB3028-005-Q1-B1-D8
cctctctctctttctctttctctctcatccagatcttgcagaaaaaaaaaaacacaatggcagcgagcgctcccactccacgcgaagagttcgtgtacatggcgaagctggcggagcaggccgagcgctacgaggagatggtggagttcatggagaaggtctccgcctccgccgagagcgaggagctgaccgtggaggagcgcaacctcctctccgtcgcctacaagaacgtaatcggcgctcgccgcgcctcctggcgcatcatctcctccattgagcagaaggaggagagccgcggcaacgaggaccacgtcgccgtcatccgtgactaccgctccaagatcgaggccgagctctccaacatctgcgac

SEQ ID NO: 3801 - DNA, 305 bp, Glycine max
  Clone ID: LIB3028-005-Q1-B1-D9
gacctttttacattgcaaatggctgctgcaactgctggagttgttggtggaaatggttcgtctgcttcttggatgcgattcaaaggcaacgaaatgaagcaaaccaagatgaacaagtcaaggattagttgctcttattcttcttctgtgatggatccttacaagaccttaagaatacaacgcggtgcctctgaatctgaggtcaggaaggctttcatgcagcttgctctgcagtaccatccatacgtgtgcagagggagcaattgtggggtgcagtttcacgaaatcaacgaagcttatgatac

SEQ ID NO: 3802 - DNA, 422 bp, Glycine max
  Clone ID: LIB3028-005-Q1-B1-E11
aaaatctaaatgcctctttcttatttcccgtaatttgtgtccttctctctaatcccccttcaacattttcgcgtcttctctttctcaaatccctatcttcaaaatttcaagattatcactttaaagacagattttttttttttgacaaaaaaaatgactctggctatggctgtttggagtgctggtcttcacttcagtgctgctcgtagtagcttgagacctttggagaaaaccatttgcactgcccctttcttgaaggcgtcatctgggtttgctgctactaagccattctgcatccttaacacaacaagattgtcatattctggaactacaattatccctcgagcagcacctgttactgatgtgaaggatgggaatcaaggtgagactgataccattccaactcccgtagttataattga

SEQ ID NO: 3803 - DNA, 423 bp, Glycine max
  Clone ID: LIB3028-005-Q1-B1-E12
gtttggcaataaaaggaggagacgacgacgcggggaatctccggtctccaccgacatcccttctcttccaaatcctgtgatcccattccaatccgttccgttcagctcaatctcaaaatctcaatggccgataatgagcaaccgaataacgaggaggcaagtcctcttctccaccagccccatccccaacccaaatccgaaccaccaacgccacctgagactcccgagtttctcctcggctggaccgctgatgggctccctctggcccacgccagcgtcgtgggccagcccatgggccgcgccccttggaactcctccatctgcgcctgtctcggccaaaacgatcacttctgcagcagcgatctcgaagtttgtcttcttgggagtgtggctccttgtgtgctgtatggaagcaatgttgag

SEQ ID NO: 3804 - DNA, 427 bp, Glycine max
  Clone ID: LIB3028-005-Q1-B1-E3
ggtccaaggccaatcaattgagggtaattcgggggcccaattctcacgggaaaacattaataacactggtggagtatgattgtgttgcgaagtggtctctcacttaggtcattccccgcagtttttaggaagccctcaatacattggatatgttttgtgttacgccaaagtatatcatatcatgcacctgcagtgggcaagcaggaatgccattaccagactatgaccagtaaaatacaggactgcatgggtttctatatcaatgaattttacaattccttgaccttggtaaaccttaattggccaaggagagactccactaaagaggaacaatgtcctgccattttgtatttgacaaaatggcttatttgggattgagttttgaatgctgatctaatgagaagttttcgtaacctcccaaggattg

SEQ ID NO: 3805 - DNA, 424 bp, Glycine max
  Clone ID: LIB3028-005-Q1-B1-E4
cacattcaaatccaaatggccctttacattacactaataattggcctcctagtaaacaccctagtactctataaatagcatttgcatgcaccttagtcttcaccaaaatactcctcttggcatcttgtgttgtgtccctcttttaagctatttccttctcttaacacaattggttgtgccaattgccatagtcaccaaccaattaacaaaggtatatatatcatcatatcatcaccaaatgaaaaatattgggttgttttttcttgtggtggtggctacttttgtggtggcaaccacaactgggaaccttttacacgaactttgacataacgtggggtggtgagcgtgccacaatctatgagaatggaaaccttctcacactctcccttgacagagcctctggctctggctttccttccaaaaa

SEQ ID NO: 3806 - DNA, 377 bp, Glycine max
  Clone ID: LIB3028-005-Q1-B1-E5
cccaaaccagcaaaaacctttcttcacaaaatggcctcaacagctctaacaagcctcaccctccgcacgctatcttatcctacaccctcctcttcttaccctacgcacctctccgccaaagcctcctctctcgaattccccaatctctcccaccgcgccgctaccacacgccgcctccgtgtcgtcgtctccgccgttgaggcgcctgagaaagtcatcaaactcggcgacgaaatcgccggactcacgctcgaggaggccaagaacctcgtcgacgtcctccaggataagctcggcgtctccgcggcggcgttcgcccctgtggcagttgccgtcggttccggcggctctgtggcggacgcaccagcggtggttga

SEQ ID NO: 3807 - DNA, 178 bp, Glycine max
  Clone ID: LIB3028-005-Q1-B1-E6
gacagtaccaatatctatgcctacatttccatcattgctctaattgtgtgtataccacctgccgtaattttggaagggcccacactgttgaagcacggcttcaatgatgctattgctaaagtaagtttggtcaagttcgtctcaaattccctccgggttggtatgttttaccaacccc

SEQ ID NO: 3808 - DNA, 348 bp, Glycine max
  Clone ID: LIB3028-005-Q1-B1-E7
tattgaagaaggtcccaactttgaattggcatttacgcatttccactggactgatgagtgtactacccttatcagacagatcatttcggccttcagagaacatagtataagcagaagcccccatagcccatttcaatccttcagctgtagcagcagcgactaatagtctgtcaacatatggaattggttcggcatccggttactgatcatattctgagaagtggaacaacgagaaaagaacttccacatcatcgattgggaatccttcatcccaagattgttcatagcatcatgcatgcattgattagctgcataacagtaactgccacatcgccaattcataccagg

SEQ ID NO: 3809 - DNA, 413 bp, Glycine max
  Clone ID: LIB3028-005-Q1-B1-E8
cagtgctaaagacctagtcaggaagatgctgacacaggatccaaacaagcggattacttcttctcaagtccttgaacacccatggatgagagaaggtggagatgcatctgataaaccaatcgatagtgcagttctatccagaatgaaacaattcagggcaatgaataagctcaagaagctagcattgaaggttatcgctgaaaatctatcagaagaggagattaaaggtctcaaagcaatgtttgccaacatggacactgacaatagtggcactatcacctatgaagaattaaagactggcttggctcgaatcggatcaaaactgtctgaggctgaagtgaagcaactcatggatgcggctgatgttgacggaaatgggtcgattgactatcttgaattcatttcgggtacaa

SEQ ID NO: 3810 - DNA, 428 bp, Glycine max
  Clone ID: LIB3028-005-Q1-B1-F10
ctcaaacactagcaaagggaaggaaaagtaccttccccaataacccttctctccgatttggcttctctcatcggagggaaacaatcaataaaagaaaaaaaaaatccacataaagattataacaaaaaaagtatgaaaggaaaagtactaggttccgcagtttctctcatcctagtggtgggtgtggtaattggcgtggttgctgtagttcaaagcccaaagggcgtgaacaacaacaacaatggatgataattgaaaaccagcaacagggccgtgacagcgttgtgccaaggctcagactaccagaaactgtgccacgaggttctgtcatcttcgaacagcacagacccaaacgagtacatcgcaaccgtggtgagaacctcgatggacagcgtgattaaagcgttgaacatgagcgacaggctgac

SEQ ID NO: 3811 - DNA, 189 bp, Glycine max
  Clone ID: LIB3028-005-Q1-B1-F12
tagaaagcaatttcttgattgctcattttggggggctgctttatgatggctaatataagttcggtgagcatcctagcagcccaaatcaaatttgagtttttacaatgttgatggttaattcaaaactttagtagatttctcatttgtgaaaatacggttggttcatttttaaatatgaactttttcatg

SEQ ID NO: 3812 - DNA, 413 bp, Glycine max
  Clone ID: LIB3028-005-Q1-B1-F3
ccagatttcaccctttctcagtttctctctctagaaaaaccaaaacctggctcctttttttagctctttccttatttagccttcacacactccaaactgtgaaatccatttttagcaaagtaaaaaaaagtgagccagtgtgagagagagtggtcatcagtcatcaccgttgattgattaagatgcagcaatcaaacggctctgattcgacgactacgatggagcagagcgcgccgccgcctccgaggcaatcaccggcggtggccatgccgcagcagtgggtgccgatgcagtaccctgcggcggcggcgatggtaatgccgcaccacatgttgccgcctcagcattatgcgccgccgccgtacgtgccttaccaccaccagtacgcggcgcagccccagcaccagcaccag

SEQ ID NO: 3813 - DNA, 390 bp, Glycine max
  Clone ID: LIB3028-005-Q1-B1-F4
gattacccaatgttgtttgaactccgtaatgatgctgccgagcgggtttctcattgtggggttctggagttcattgctgatgaaggcatgatatacatgccatactggatgatggagaacatgcttttacaagacggggacattgtcaaagtgaaaaatgtgacacttccaaaggggacatatgttaagtttccagccccacacaaaagaccttttgggatatttccaatccaaaagctatcttagaaacaacattgaggaatttttcctgccttgacaactggagatagcattatggtggcttacaacaacaagaaatattacatagatattatagaaactaagcctgacactgccataagcataattgagactgactgtgacgtggac

SEQ ID NO: 3814 - DNA, 390 bp, Glycine max
  Clone ID: LIB3028-005-Q1-B1-F5
ctcgagccgagaagtgcaagaagtgcggacaaccaaaggaggtagcagccatgccagcaattgcgatgaccggagcatctttccccacttattcacactatttttccagggccccaggagtaccagaacaaaagatgaatattggattgcttggcaatggtgcaccatcacagtcactgcatttaaactccaattggcctgttcctggagcagataagtacggtgtccagccactttccatatggctacctggtggaaattatggcactgtgcatcatcatgaaaattctaccaaccagaacctatctgttccaaagggatggcgcaatggggactggatctgtaactgtggcttccacaattactcatcccgctcccagtgtaaaaagt

SEQ ID NO: 3815 - DNA, 419 bp, Glycine max
  Clone ID: LIB3028-005-Q1-B1-D7
tcgaggaagttcccaacataaacaactttagcgaaatgctctcagggaagaccaggttatttgttgtcgatacaagtttcaggacgtgcttgcttctgtccttcctattcaagatattgcacaatgggcacatgatgtcggatcacaagttgcttgtagatgcatgccacagtgttccacacatgatgattgatgtccagagccttaatgttgactttcttgtggcttcttctcacaagatgtgtggccctacaggcattggattcctatacggtaaaatatacctcttgtcttccatgcctccatttttgggttgtggtgaaatgatttccgatgtatatcttgatcattcaacttattccgaacctccaaccatatttgaacctggaacaccagctagtggggaagcaattggttta

SEQ ID NO: 3816 - DNA, 422 bp, Glycine max
  Clone ID: LIB3028-005-Q1-B1-C10
gtgggattttaacaatggaggatttacacaattacaagttggaagtaacagatgcaacgactgtgaatgtgatgggatacaccatatatggaatgccacctccttcatctggaacacttgctctttctctggttctgaacatcttgggcagttatggaggttctaatgctgcaaggggaaatcttggtctacatcgactaatagaagctctgaaacacatgtgggctgttcgaatgaacttgggtgaccccaactttgtaaacattgatgatactatatccaaaatgctttccccatcttttgcaaaagatattcagcacatgatacttgataacactactttccctccagagtactatatgaacaggtggagtcaacttagcgattcacggacaagccatatgtgcattgtcgatgctgat

SEQ ID NO: 3817 - DNA, 343 bp, Glycine max
  Clone ID: LIB3028-005-Q1-B1-C11
gtctcaagcaaccatggcaatggcaacccaagcctctctcttaaccccacccctctccggtctcaaagccagcgaccgcgcctccgtgccatggaagcaaaactccagcctctccttctccagcccgaagcccctcaagttctccagaacaatcagagcagcagccgccgacgagaccacagaggcaccagcaaaagtagaggctgcaccggtcgggttcaccccaccagaacttgacccaaacaccccttccccgatcttcgggggcagcaccggcgggctcctgcgcaaggcacacgtggaggagttttatgtcaataccttggactcacccaaagaacag

SEQ ID NO: 3818 - DNA, 416 bp, Glycine max
  Clone ID: LIB3028-005-Q1-B1-C2
gcaagaacatcacagatagagcaatgtattccttggcacacagcaaggtgaacaacaggatgtggggaactgtgaaaggaggaggaaatgatgaagatggtttaaggactttgaacattagccaatgcactgcactcaccccatctgctgttcaagctgtttgtgactcattcccttctctccacacatgctcagggaggcactcactcatcatgagtggctgcctcaacttgacatcagtgcattgtgcctgtgctgtccatgcgcaccgtgcattcaccactttcccttatcctgcccattaagaagcccatccttttgatgttgaacacacttcgaggatgtgccccttgaaagggctcagagaaatgaaagaagtgaaatccaccccccttgtagatgtatgcctgcataag

SEQ ID NO: 3819 - DNA, 208 bp, Glycine max
  Clone ID: LIB3028-005-Q1-B1-C3
accacaagaatgagggagatattgcacgtgcaaggtgggcaatgcgggaaccaaatcggttccaagttctgggaagtgatatgcgacgaacacggcatcgaccccaccggaaagtacaccggcgacgaggcctccgatctccaactggagaggattaacgtctactacaatgaggcctccggcggaaggtatgttccccgggccgtcc

SEQ ID NO: 3820 - DNA, 403 bp, Glycine max
  Clone ID: LIB3028-005-Q1-B1-C6
caatttcacttcccacagcatcaaaaacaagaaaaaaaaatggccgcaaaagagaacgaggtaacccacaagtttcgctttttccgcgtttacaaagacgggacagtggagctttacaaacccaccatccaaaaggttgcccctttcgatgacccaatcaccggcgttcgctccaaagacgcggtcgtttcagacgacccacccgtttccgttcggatctttttacctccaatatccgacccgacccgaaaattcccgatctttttctataaccacggaggcgggtactgcatgcaatccgctttctccccagactaccacagtctcgtcgccaccactgccgccgaagcaaacgtcattgcaatctccgtggaatacgggttgttcccgatccgaaccatac

SEQ ID NO: 3821 - DNA, 417 bp, Glycine max
  Clone ID: LIB3028-005-Q1-B1-C7
aaggactaacccttccttggatctctttctacctcttttctccgcgactggtttcagtttgaacctaaggcagagaagccagagagtctcctctgccttagagaaactctcacaatggcgtttcaggactttgatctcatctcagagaggagaaggaacgagaagaggcaaaaggcgaggaagaggatcatgattggcgtggtctcttccgttgtcctcgttgccatgataggtgcagtactcttcgttgtggttagaaacgacaacgaagcaggcaacaaaaaaagcaatgaaaataagtcacatggccattcacaacaatctaccacccccggcaaggatcacgttgtggcgcattcgaagatggtgaaattggtgtgcagctccgcggactacaaggaaaaatgtgaagacccc

SEQ ID NO: 3822 - DNA, 379 bp, Glycine max
  Clone ID: LIB3028-005-Q1-B1-C8
attgagtttaagatctgattgggcggcgacgatggagaacaacgacagtatcatatcgcgggagaagatcgaccaggcggccgtgtggctcggctccgccgtctcttccgctttcttttcctctttggaacgcttttcctgcgtcaacgtcgccacctctgaccccgacaacgacgaagacgacgacgattattactccaccaccaaccgccactcccaccgccgcatccaccaccaccactagccctccctccattcagatcgacgggaaaaaaacaaacgacgtctccaacctccccgtttgagacaatataacgacgacgtcgttgctgcgctgtgtatagacctttttccctttccttcgttcgtgtgtgttatg

SEQ ID NO: 3823 - DNA, 405 bp, Glycine max
  Clone ID: LIB3028-005-Q1-B1-C9
gaaagtgaaggtgaagaaatgcttcttcaaacgaggcaatttggcacagcgtgtccatgggtcagactcacacccgcaagcaaaagaaatagctcagtctcattgagaaggagcaattgtggcccaaaatgttcggtgtcccaattggaattgaagagtgagagtgagagcaaaacgaagccgtatccagcagaggcatcgaggaccataatggagttggctaaggtgggcacgctgtgtacgttgacccaagagggtttgccccttggtactggggttcgattcgcggttgaccctgaacatggcactcccttgttctgcttcaattccactgacaacactaacaatccctcttcccttcatgttcaatttgaacaatttggattgcccactcctcagtgcact

SEQ ID NO: 3824 - DNA, 177 bp, Glycine max
  Clone ID: LIB3028-005-Q1-B1-D1
tggcaggaaaggaaagggaaagggtgtttaccagtttgtagacaaatacggtgctaatgtcgatggttacagtcctatctacgacaccaaggactggtctccaaccggtgatgtctacgctggcggtacgactggcttggctatctgggctgtgactctacttggtcttttagctgg

SEQ ID NO: 3825 - DNA, 329 bp, Glycine max
  Clone ID: LIB3028-005-Q1-B1-D10
gtcagctgatggaagtgccttgtgtacaggaagttgggacacaaacttaaagatatgggcatttggacggcatatgaggacaacttaagccattgcgggaaggtcaaattggagacgaattgcgtgctaatttatataacccttcattttagccttgcaactcatgtccgtttgtccatgtgtgtgatctcagtaccttttccattgtacgacccactccgccaactgtaccattcccttataactatgatcattataatacttaaaggtgtgaacagctacagatcttcctgaaagtggccccaactatataaaatgaaaatttgcat

SEQ ID NO: 3826 - DNA, 172 bp, Glycine max
  Clone ID: LIB3028-005-Q1-B1-D11
ctcagctcccaactgccagggtactcccgcaagcaataccaactgcatctgcattgagtggtggctcaggttctgctggaactggaggcagggtttctgtcaataatttggtcaacaaattttctacaatgggattccctaaagaccatttaagggccacggttcgaaacct

SEQ ID NO: 3827 - DNA, 431 bp, Glycine max
  Clone ID: LIB3028-005-Q1-B1-D12
ccctctctctctttctctttctctctcatccagatcttgcaaaaaaaaaaaaacacaatggcagcgagcgctcccactccacgcgaagagttcgtgtacatggcgaagctggcggagcaggccgagcgctacgaggagatggtggagttcatggagaaggtctccgcctccgccgagagcgaggagctgaccgtggaggagcgcaacctcctctccgtcgcctacaagaacgtaatcggcgctcgccgcgcctcctggcgcatcatctcctccattgagcagaaggaggagagccgcggcaacgaggaccacgtcgccgtcatccgtgactaccgctccaagatcgaggccgagctctccaacatctgcgacggaatcctcaagctcctcgacacgcgcctcgtcccctccgccgcctccggcgactccaa

SEQ ID NO: 3828 - DNA, 197 bp, Glycine max
  Clone ID: LIB3028-005-Q1-B1-D3
tctcagatcgaggaggttctcaacatcaagaactatggctattggctcatggggaaccacaggttttgaccaacgagaccatgcactggccgttctgcatacagcatgtccaccacctctttgcgcaagaaatctaaccgaactcgtgtcccaaatgttccatgtgccactctcagagactttcattcaaatttgca

SEQ ID NO: 3829 - DNA, 339 bp, Glycine max
  Clone ID: LIB3028-005-Q1-B1-D5
actgattcaacgatggacgccaatggcaattgggaagaggatgatgacgaagagttcgagttatcacggaattattttcaggccaatgaactcgcctcctcatccgccaagacatcgaggcatcagctcatctagttctatgtcattgataaacatgaactgagggatgctgcgtctaaaattgaacccaatcatgaatacgagatccctctcttgttggatacgtacaacatcatgtaacctgaatggatttgtgctctaatgttctgttttgggcttctgatgtagtgatttggattactgatagctctgattgataattttgcttcacctgagctg

SEQ ID NO: 3830 - DNA, 98 bp, Glycine max
  Clone ID: LIB3028-005-Q1-B1-D6
gtgggagtacatcttacttctactgtcattaattataagacttaatttattaatttaacatttattaaaaaaaattgattaatttagttattactatt

SEQ ID NO: 3831 - DNA, 338 bp, Glycine max
  Clone ID: LIB3028-005-Q1-B1-C1
gttgggtcttagcattgatgaggatgacaatggtggagacgatgttgatatgcccccattggaagaggacggtgctgaggagagcaagatggaggaagtggactaaatgccaaaggtctcgtgttaaatgaattgtggttcgtgtctgttaaatggtggtggatgcagaagtcttttagttttatctttctttttgttttggttttttgagaaatatagggtttttactttttaagtttttgtgatgttaaaaaaatgtgtctgtcaatctgtgtgttgcatctacctacttttgtcagttattgttccggataaaacatcctttgtcagtaactgtt

SEQ ID NO: 3832 - DNA, 429 bp, Glycine max
  unsure at all n locations
  Clone ID: LIB3028-005-Q1-B1-A2
taattgcaaacaatccaacagggctatgtgagggtggctgtgctgctattattgactcagggacctctttgattgccggtccaacaaaaattgtgactcaaattaaccgtgccattggagcagaaggatatgtgagttatgaatgtaaaaacatcatccataactacggtgattcaatatgggaatatataatttctgggttaaagcctgaaattatttgtgttgacattggactctgctcgcgtaatagaacatttataacaaatgatgttattgaaacagctacacataatgaaagttggggcgagtcacgaacaaaggagagccccttgtgtactttttgtgacatgattgtcttttggatgcaagttcagcttaagcaaaagaatacaaaggaaaaaatattanaatatgtggatgagctgtgtt

SEQ ID NO: 3833 - DNA, 148 bp, Glycine max
  Clone ID: LIB3028-005-Q1-B1-A3
gtaaataagctgttataattgtagctctggttactttttgaaaccacgaatgtaattatccaattaagacgtagaagtatcccacttgcaagtgttgtgtgctttttatatgaaaaaaccatcctcaattcattccgtgtttgaccaa

SEQ ID NO: 3834 - DNA, 402 bp, Glycine max
  Clone ID: LIB3028-005-Q1-B1-A4
ccattttaaaaaaagtatggatggtttcagcgagctaaataagggacccagagctgccaagagttctgataataaaaacatcaaaagtcttggacctgtcacattattacacaagggacagaacctttcagtgaagagtgacaacacagaagttcctttggttcccgacaaggaacagtacaatgggaaagatttggctgagaattattctgatgccaagttttttgtcatcaaatcctatagtgaaggatgatattcataaaagcataaaatacagcgcttgggcaagcacccctaacggcaacagaaagctggattcggcatatcatgaagccaaggagaagcccggtggctgtcccatatttttgttattttcggtcaacactagtgggcaatttgttg

SEQ ID NO: 3835 - DNA, 386 bp, Glycine max
  unsure at all n locations
  Clone ID: LIB3028-005-Q1-B1-A5
accgaagaaactgccaagaggttgaagaccgaagagactgccaagaggtttgaagactnganggggactggcaanaaggaaaatccaaattcttaaaaaaaatgaaaagaaacctgttgataaaccagcattacttaagaggccagagaagaaaaggacagcatcaagaaaatcgttgtcaagcaaggacagtaagggtgatgagggggattcagataacagtgacacatcattgaatccaagaataagaaatactgaagctcgtaagtctgtgaaaaaaataatctctgaggatgaccaaactcctgtgcgcaaaaaaaccccaaccacaagaacgaaagaaggaaaaatcaaccgtggtattggtacagaaaaccagaacctgc

SEQ ID NO: 3836 - DNA, 309 bp, Glycine max
  Clone ID: LIB3028-005-Q1-B1-A6
aaataaagggcaaattactgaaaatcccttaccactctgctgtgactttcagtactgtgctactaataaataaagggcaaattacagtttttctaagtgctaaacttctagtaacattattgtgttgttcttactgtccatgtctaagtactgaactgttgtatttgatttttcgttgggaattgaagcaactaattacattacttaactgtttgcttattttagaattaatcaaacacgctccatcaagtgtgcatgaaaataatataaaataataaataagcacatgacatggctaaggtcttggtc

SEQ ID NO: 3837 - DNA, 302 bp, Glycine max
  Clone ID: LIB3028-005-Q1-B1-A8
ataagcatcaagcggtggcattgagagtccaagcagacgggtccatctttgtacaattgctcaatggatgggtatcaggacacactttatgcacacaccatgcgtcaattcgaaagagattgcaccatttcaggtaccatcgactttgtgttcggtaatgcagtatctgtttttcaaaattgcacttacgtggtccgaaagccattggagaaccatcattgcattgtgactgcacaaggtagagaagacagacagcaacgacctggaatagtaatcaagggggatccattgtgtctgaccct

SEQ ID NO: 3838 - DNA, 373 bp, Glycine max
  Clone ID: LIB3028-005-Q1-B1-B1
tggcaggaaaggaaagggaaagggtgtttaccagtttgtagacaaatacggtgctaatgtcgatggttacagtcctatctacgacaccaaggactggtctccaaccggtgatgtctacgctggcggtacgactggcttggctatctgggctgtgactctacttggtcttttagctggtggtgcacttcttgtctacaacacaagtgctttggttcaatagactttgcaaatcgatgtttaagttataacatagtccatgtaactatctaaaaatgaagaactattcgtgaagtactttgtggatatgttccttctgttctataaatgagtggatgtgaaaaaacttttttgttagtaatcatgcttcttcatc

SEQ ID NO: 3839 - DNA, 279 bp, Glycine max
  Clone ID: LIB3028-005-Q1-B1-B11
gttggcggtgtcataactcgtaagacaacaaagctcatcgaatcgaagtccttcattttcattctcttccttgtcactgatcgtcatgtacagagttgcagcatcatcattcagaacgcatctcaagggccatggaggtaacttgggatccactaagttttcaacttcagccgcggtagctgcaaggacttcatcaggtggtttgtttagctgggttaccggaaagcgttctagtgctcttcgtcctctggacatgccccttggtggtgttgctctccc

SEQ ID NO: 3840 - DNA, 367 bp, Glycine max
  Clone ID: LIB3028-005-Q1-B1-B2
ggagttccctattttgagctacgccgatttctaccagttggctggcgttgttgccgttgaggtcacgggtggacctgaagttccattccaccctggaagagaggacaagcctgagccaccaccagagggtcgcttgcccgatgccactaagggttctgaccatttgagagatgtgtttggcaaagctatggggcttactgaccaagatatcgttgctctatctgggggtcacactattggagctgcacacaaggagcgttctggatttgagggtccctggacctctaatcctcttattttcgacaactcatacttcacggatttgttgattggtgagaaggaaggtctccttcagcaaccttctgac

SEQ ID NO: 3841 - DNA, 297 bp, Glycine max
  Clone ID: LIB3028-005-Q1-B1-B3
ctcaactcttctactcaaattcaatttctctgagacagtgaaaatatccccgttaagataggatgatgatgaaatcatcatattcttcatacctttctatattagtcctatttttccttctccttgtggataaatccctctccaaatccggtgcacgtttttctctaagcagagcagtgttcatgccgcaccattcagtgattggtggttcccaatgggatctaaacgtggaaatcgtggaacagcaagagtctgcttcacaaccattgaagcatatcaaaaggctcttcaaaatca

SEQ ID NO: 3842 - DNA, 348 bp, Glycine max
  Clone ID: LIB3028-005-Q1-B1-B5
gttcctcaatttctccgccaatactcccaagttggttcctctcgcgctagggttttagtctacagctcattctcacacacaaccctaacaacacaaatttcccactttctagggtttcctttcgtcatccaccatggccgagtggcagtccctcctccaatccattctcgtcggcctcattttctcttaccttctaaccaagctcatctccatcgtcgtttccttcaaagacgacaatctcaacgtcacgcacgcctccgccgccgaaaccaccgccacgcgcgcggaacaattcgaggatgctctgaagcgcgacgacgccgtttcctccgatgcacgccccttcga

SEQ ID NO: 3843 - DNA, 380 bp, Glycine max
  Clone ID: LIB3028-005-Q1-B1-B6
aggaggagaagtgatggagaggttgacaacactaggcatcgcggtgaatttggtaacatatttgactgggaccatgcatttgggtaatgctgcctctgccaacgttgtaaccaacttcttgggaacctccttcatgctctgtctgctcggtggcttcctcgccgatactttcctcggaagataccgcaccatcgccatcttcgctgccgttcaagcaactggtgtgacaatcttgacaatatcaaccataattccgagccttcaccctccaaagtgcaacggagacaccgtgccaccttgcgtgagagcaaatgagaaacaattaacggtgctttatttggcgctttatgtaacggcgctcggcaccggacgtttgaaat

SEQ ID NO: 3844 - DNA, 343 bp, Glycine max
  Clone ID: LIB3028-005-Q1-B1-B7
cagctattgataaagctgtggctgatggagtgaatgttctttccatctctttgggtggtggagtctcctcttattacagagatagtttatcagtggcagcatttggagcaatggagaggggtgtttttgtttcatgttctgctggaaatgcaggacctgaccctgccagcctcaccaatgtgtcaccatggatcaccacagttggagccagcacaatggatagggattttccagcggatgttaggcttgggaatggcaaaaaagtgactggagtttcactctataaagggaaaaatgtgctatcaattgagaaacaataccctttggtgtacatggggagcaa

SEQ ID NO: 3845 - DNA, 441 bp, Glycine max
  Clone ID: LIB3028-005-Q1-B1-A12
ggaattgaagttaaccaataataaggtttgcacttaaaattacgggtggtgctggtggtggtgctggtggtggtgcaggatatgttcccagaaatagtaactcttccggactttcttcttcaactcaagacatgagtgaagtgtctggcttctctggatatgaaagccgctcaagcacatcatcgctggggagaatatgatggaagtgtagagttattgttttacctttcctttcgagtaatttctttgggaggcagaaggggtatcaattaaactttggttggtttggatatcatccacaacactcgatcgcccacatgcatctttgatgaataattgtaatcctttaatgtatttcacaacttcaataggaatctatgatgagttttgtcattaaatccaacacaatttgatgtgcagaacaatcacaatcttccacac

SEQ ID NO: 3846 - DNA, 364 bp, Glycine max
  Clone ID: LIB3028-005-Q1-B1-B9
tggcaggaaaggaaagggaaagggtgtttaccagtttgtagacaaatacggtgctaatgtcgatggttacagtcctatctacgacaccaaggactggtctccaaccggtgatgtctacgctggcggtacgactggcttggctatctgggctgtgactctacttggtcttttagctggtggtgcacttcttgtctacaacacaagtgctttggttcaatagactttgcaaatcgatgtttaagttataacatagtccatgtaactatctaaaaatgaagaactattcgtgaagtactttgtggatatgttccttctgttccataaatgactggatgtgaaaaaacttttttgttagtaatcatgc

SEQ ID NO: 3847 - DNA, 410 bp, Glycine max
  Clone ID: LIB3028-004-Q1-B1-G4
ataacattaacatctccaaccttggcagcacaaagcaagccgcaggatctggtccggtcctcgtgcgtgcacgcgcggtacccgcgtctgtgcctgcacaccctctccaactatccgggctccgccaacacgccattagacgtggcccggacagcgctgaaggtgagcctagcgcacacacgccgggcctccaagttcctgcacgcgctttctcatgacgattcaatcatcatgagaaagcgtgagcgctccgcgctgcgagactgcacggagcagatctcggactctattgatcagcttcggcggagtctcgacgagctgcagcatctccgctcggagacattccggtggcagatgagcaacgccctgacgtgggtcagcgccgccctcaccgatggcgacacctgcct

SEQ ID NO: 3848 - DNA, 406 bp, Glycine max
  Clone ID: LIB3028-004-Q1-B1-G5
ctataaatcactccccttgtcccctcgaactttctctcttcgggttctcgtcaaaacgcaaagatgcaagttccattgatcgacatcgacagaatcaacgatctccaagtgggtctgaactctctgcagaacccatccttcccaatcccttctcagatcacaacctccctcgcttacaatttctgcaaatggggcgcagtcattctcgcccttgtcgccaccttcggcagcatcatcaacagagtcactatcttcatcatccgcttccgcgccaaagccccttctctcccatccctaaccctaaacgacgacaatttttacacctcctcctcctctgacgacgacgacgacgacgataacgacgacgacctaacctactcctcttccgagcccgaagacgagccct

SEQ ID NO: 3849 - DNA, 410 bp, Glycine max
  Clone ID: LIB3028-004-Q1-B1-G6
ctagcagcactggagctgccaaggctgttgggaaagtccttcctgctttgaatggaaaattgactggtatggcattccgtgttcccaccgtggatgtctctgttgttgacctcacggtgaggctggagaaggaagcctcatatgatgaaattaaaaatgctatcaaggaggaatcagagggcaagttgaagggaattcttggttacactgaagatgatgtggtctccaccgactttgttggtgataacagatcaagtatttttgatgcaaaggctggaattgcattgaataagaattttgtgaagcttgtctcttggtatgacaacgagtggggatacagttcacgtgtcattgacctgcttgtaatcgttgccaagaagtctttttaattaaggtggttctaacattat

SEQ ID NO: 3850 - DNA, 385 bp, Glycine max
  Clone ID: LIB3028-004-Q1-B1-G7
ggaaagttagaaatggctgaagagtgtttaaaacacgcaacagatttgagtgggttattgctgctatattcttctttaggagatgctgaaggaatatcaaaacttgcaactcttgctaaagagcaagggaagaataatgttgcattcctttgcttattcatgttgggtaaacttgaggactgccttcaacttttggtagaaagcaatcggattccagaggctgctttaatggctcgatcctatctcccaagcaaggtctcagagatagtggcaatttggatacaagatctcagtaaggtgaatccaaaagctgctgaatcattggctgatcctgaggaatatcataatttgtttgatgactggcaagttgcactagctgttcatt

SEQ ID NO: 3851 - DNA, 378 bp, Glycine max
  Clone ID: LIB3028-004-Q1-B1-G9
gctaagcgtgcctcagcatctgctggtggacagactacaactggagagaaagctgccactgcttgattacttccatttctagaacgatgatgaaaacaaccaatagtatggttttctgacaggactcaatgaacactgtatgaacatcttgaggtcagacttctcttggttggagctagtcattgtgattggattgtattaatgtgaagtaaatacttgtgtcgctagctgtagtttgttatctgcatggtttatagaagtcaaaccatgtttttattaaaatatgtacacaatagaataaagctatgatatttacatggggaacttggaaccatgtaaatacctttcctaaagcaaatagcgactcatatttaccct

SEQ ID NO: 3852 - DNA, 411 bp, Glycine max
  Clone ID: LIB3028-004-Q1-B1-H10
atgacacaaaaactgattatcagaccagagtttctttcaagtacgctgcttcgagaggggtgtatggaacgccttctttctatgtcaatggattcttgttgcctgatactggagctaccgctgactacaagacttggaggaaggtcattgatccattggttggtgtgaagaagagtatccagaatgaagagtcccttcgtttcttcttgtaaaaattgtgggaatgtaaagcccagttgcattagcactttatcattgaaggaatccaaataaagagtgtctcgtagctgctagtgtcgagaatgcaataatggaatcaactgttataaaacattccttagtccttgcatatacatatgtggcatgggttggaaattcgtatatatgatccacggggtgatgatgctaaaa

SEQ ID NO: 3853 - DNA, 405 bp, Glycine max
  Clone ID: LIB3028-004-Q1-B1-H11
ggaaacatgataaaataatcaaagctttgtgtgatatggctaaagataatgcacatgttcctatgctttcccgcactcatggacagccagcttcaccaactactttgggaaaggaaatggcgatctttgctgcaagattaagcagagaaaggaaggatctgtctcaggttgagatagtggggaaatttgctggtgcggttggaaattacaatgcacatattgttgcatatcctgatgttaactggcctcacattgcagaacagtttgtacactctcttggattaagttttaatccttatgttgctcagattgaaactcatgactacatggcaaagctttttcatttgctcatccagttcaataatatattaatcgattttgatagagatgtatggggctatatat

SEQ ID NO: 3854 - DNA, 402 bp, Glycine max
  Clone ID: LIB3028-004-Q1-B1-H12
cctaattgtttaaacctaattctcatttcttcatcgttcgattcttctcctcctaaagatgcagatcttcgtgaaaactttgaccggtaagaccatcacccttgaggtggagtcctccgacaccatcgataacgtgaaagctaagattcaagacaaggaagggatcccacctgaccagcagagacttatctttgcgggtaaacagcttgaggatggtcgaacccttgccgactacaacatccaaaaggaatccactctccacctcgtgcttcgcctcaggggtggcatgcaaatctttgtcaagactttgactggcaagaccatcaccctcgaggtcgaatcctcggacaccattgataatgtcaaggccaagattcaggacaaggagggtatccctccaga

SEQ ID NO: 3855 - DNA, 417 bp, Glycine max
  Clone ID: LIB3028-004-Q1-B1-H2
gttattagggtttttgagtgcggcggtccaaacactcttctctgcagcttttgcctacaactcccttcaccatggctgaacaaaccgagaaagcttttctgaagcaaccaaaagtgtttctcagcacaaagaagactgggaagggaaagagacctggaaaaggtgggaaccgcttttggaagtccattgggcttggatttaagactcccagggaagccatcgaaggaacctatattgacaagaagtgccccttcactggcaatgtttccatccgtggccgtatcttggctggaacatgtcacagtgctaagatgaacaggactattattgttagaaggaattatctccattttatcaagaagtaccagaggtacgagaagaggcactcaaatattcctgctcatatatcacctgcct

SEQ ID NO: 3856 - DNA, 409 bp, Glycine max
  unsure at all n locations
  Clone ID: LIB3028-004-Q1-B1-H4
cttctccttctcttctctgcttctcttttcatctccgaaaacaatgaagctcattagcagcattaaccccaaaaatctcaaactcagtcccaaacgcttctttcgcaaaaaggaacgatctttagtctcacgctccgacccaccttcattcggatccggatcttcctccgacgactccaccacaaatcacaagccttccgccggtaaccaaactccgaccagcgtcctcccgggcgtctccggagactggtccgacgtcgccgccgtcgacgtgcggtgggacctcgcccaggccttccgcctcatcgaccgcgacaacgacggcgtcgtcacgcgccaggacctcgaggccctcctcacgtgcctcggcgcgtcgccgtgccncgacgacgtggcggtcatgctcggc

SEQ ID NO: 3857 - DNA, 400 bp, Glycine max
  Clone ID: LIB3028-004-Q1-B1-H5
gccattcgtattgtcgcagagaaagaaaaccctagctcaccgtttcaagatgcaaatcttcgttaagaccctcactggtaagaccatcactctcgaagtcgagagttcagataccatagacaatgtaaaggccaaaattcaagacaaggaagggatcccaccagatcagcaacggctcatttttgctggcaagcagcttgaggatggacgtacccttgctgattataacatccaaaaggagtccactctccacttggttcttcgtctccgtggtgggatgcaaatctttgttaagaccttgacgggaaagacaatcacccttgaggtcgagagctccgacaccattgacaacgttaaggctaagattcaggacaaagagggtatccctccagattaacag

SEQ ID NO: 3858 - DNA, 405 bp, Glycine max
  Clone ID: LIB3028-004-Q1-B1-H7
atttcaaccaacagttctcaagggccataattttgttatcggagacaaatcctttaacaggagatgaaggagaaatcagaaaggattgtcgctacctcaatgccaattagatatataatataagcttgcatttgtgcatgataatatgtataattagcataagattataatgcacgagtgtgtcaaaataaagagggtgtggaacgtactgggcctgggttaccatacatattcagtgcaaaaagctattgggcctagccttatatatacccttgtgtttgctttgttcatagatgtgaatgttacttgacttcagctgacaaagcctcaaacatcttaaaggtttatgaagtactttgttcttcgctgtcgatctataatggaaaatgtttgatcaacatttca

SEQ ID NO: 3859 - DNA, 405 bp, Glycine max
  Clone ID: LIB3028-004-Q1-B1-H9
cgaaaatgtggaagagaacgggttttgaagaagaagcagttcaattgatcaactcagatttcagggacctaagtctagctgctaatagactcgcccatcatgccatcaaacttggtggcattggctttggagcctcttttttcggattgtttgctgccattgctgctatttatctgttgattttggatcgtacaaactggaaaacaaatattctcacagcactactcattccatacattttcttcagcttgccttcattaattttcgacgtcttcaggggagagcttggaaaatggattgctgcagttgctgttgtattacgccttttccttccaagacacttccctgattggctggaattgcctggtgctctgattcttcttatcgttgtagctccttctctaa

SEQ ID NO: 3860 - DNA, 408 bp, Glycine max
  Clone ID: LIB3028-004-Q1-B1-G3
ttggcatcttgtgttgtgtccctcttttaagctatttccttctcttaacacaattggttgtgccaattgccatagtcaccaaccaattaacaaaggtatatatatcatcatatcatcaccaaatgaaaaatattgggttgttttttcttgtggtggtggctacttttgtggtggcagccacagctggtagcttttaccaagactttgaaataacgtggggtggtgagcgtgccaaaatctatgagaatggaaaccttctcacactctcccttgacagagcctctggctctggctttcgttccaaaaaagagtacttgttcggaaaaattgacatgcagctcaagcttgtgcctggtaactctgctggaacagtaactgcctattatttatcttctctggggcctactc

SEQ ID NO: 3861 - DNA, 426 bp, Glycine max
  Clone ID: LIB3028-005-Q1-B1-A10
cccctccacccacccagcatatctctctattcctatttattagcacccctcacattaccttgtgtcaccaactactttgactcctttaccataccattacaataattatcaaacctaaccagtaaaaatggtgaccgtggaggaaatccgcaacgctcagcgttcccatggacccgccaccatcttggccttcggcaccgccacgccgtccaactgcgtctcccaagccgattaccctgactactacttccgcattaccaacagcgaacacatgactgatctcaaagaaaagttcaagcgcatgtgtgaaaagtccatgataaagaagcgatacatgcacctgacggaggagtttctgaaagagaacccgaacatgtgcgagtacatggcgccatcgctggacgtgagacaagacgtagtggtgat

SEQ ID NO: 3862 - DNA, 297 bp, Glycine max
  Clone ID: LIB3028-004-Q1-B1-E6
ggatcacattgttaagacttagtggcttaattacaggatcatggatctcatttactgaaggaattctattaatatagcttattctttcattcacactcattttttttaacaagttctgtaaatccatgttcatttgccccattactgtaaaatagttacctcagttgtattgaaactggaagagtgccgcctatttctggtacactctcagattgtgcttcaattttctagtttcattactgatattatgtacttcttctacaatcaatgacaaaaattatgcttctgtttgttcct

SEQ ID NO: 3863 - DNA, 403 bp, Glycine max
  Clone ID: LIB3028-004-Q1-B1-E7
ctttttgttgcttcggagccaactcaacaacaacgccgtgcctaatccttaagaataacgaattacaacaaccaaccatgttgcattgtctcaacacttcctgttcggacatcacagtcttggaaagacaacgggaagcaaccatcaagtgccagaaccaccaaccaccctacttaacggactttaacgccgtcttcccttcttcttcttcttcttcttcttcttcctcttcttcttctcatagtcagggcttgctcatgatgtgctcggattcctcgctcggccaggtcctaactcactccgtcaaacccgatccgggcgtctggcccgaattcggttttctacccgccatttcgagaacttgtagcagagacggagacttggtttcgctcaaggaaaacat

SEQ ID NO: 3864 - DNA, 410 bp, Glycine max
  Clone ID: LIB3028-004-Q1-B1-E8
gatgaagaagtgtttcgcgcgcatggacgaagaggttctcaggtggagccagaacaacgagactccaaattgcaggtgcgagcttcaaaccccgcactgcgacgccgtaggctccaccgctgtcgtcgccgtcgtcacgccagagaaaatcatcgtcgccaactgcggcgattcacgcgccgtgctttgtcgcaacaaggtagccgtcccactctccgacgatcacaagccggaccggcccgacgagttgcttcggatccaagccgcgggagggcgcgtgatatattgggaccggcctagagtgcttggagtgttggctatgtccagagccataggggacaattatctgaaaccgtatgtaatttcggaaccggaggtaacggtaacggagcggagtgacaaggatgagt

SEQ ID NO: 3865 - DNA, 405 bp, Glycine max
  Clone ID: LIB3028-004-Q1-B1-E9
ctcctctcaccctcctctctccccgtctctctctccttctccctgcctcctacctgctccgctgccgtcccccgccgtgctccgtccctccgccgccgcctccgacgacctcagcttccgcgacgtcgaaaagctcttctcctctgtctccaccaccagcctcctccgctcctccgccgtgctgcacgccaccgccgtcgagcccatggttgacttcggcacatggctcttgcgatcaaatctcatgcacgtgcatggcatccgcgacctcatcctcgccaccgtccgcaacaccttcttcgaccacttttgcgccggcgaggacgccatcaccaccgctgccagcatccgccacctaaaccgtgccggcctccgcggcatgctcgtctacggcgtcgaagacgc

SEQ ID NO: 3866 - DNA, 408 bp, Glycine max
  Clone ID: LIB3028-004-Q1-B1-F1
gacaaagtaaattcagcacttctgctgccattgaggaagaacccattaaaccatcaatacaagtagaacacacccaactcttaattgatggaaaatttgtagatgctgcttctggtaaaacttttcaaactttagatcctaggacaggtgaagtgattgctcatgttgctgagggtcactctgaagatgttgatcgagcagtttcagctgcacgaaaagcatttgatcatggaccatggcctaagatgacagcttatgaacggcaaaggatcttgttgcgtgtggccgatctgatcgagaagcataatgatgagcttgcagcacttgagacttgggataatggaaagccttatgaacaagctgctaagattgaagttccaatgcttgttcgcctgattcgatactatg

SEQ ID NO: 3867 - DNA, 409 bp, Glycine max
  Clone ID: LIB3028-004-Q1-B1-F10
cttttacctttccttccttccacttccaattttcaataattcacgactccttccgagatctctctctctcgcccacaatccaaccatggcgaatacggggaatttagacgcggcgatagagcaattgctgaacgtggagaagcagatgaggctcgccggtgacgtggcgggtaccagaaaagcagccaccgatattttgcagctctgcttcgatgcacgagcctggaaaacactcaatgaccagattgtcgttttgtcaaaacgacgtggccagctcaagcaggctgtaacagctatggtgcaacaggctatgcaatatattgacgagacaccagatatcgaaactcgcatagaactcatcaaaacgttgaacagtgtgtctgcagggaagatatacgtggaaattgag

SEQ ID NO: 3868 - DNA, 405 bp, Glycine max
  Clone ID: LIB3028-004-Q1-B1-F12
atagcccaagccctatacaaccaaaccctaacacacacccatttgattcagtttccatggctagcctcaaggttgcatttttggctgcagtgctctgcatggttgtggtgagtgcacccatggcacatgcagctatcacgtgcgggcaggtgacgaatagcctgatcaattgcatcggttacctccagaacggaggaacgccgccgtcgggatgctgcaacggagtgaagagcctcaatgccgccgccaagaccaccgccgaccgccagacggcgtgcaactgcctcaagtcggccgccagccaaatctccggcttcaaagccaacaacgccgcctcgctccccggcaaatgcggagttcccatcccctacaagatcagcacctccaccaactgcgctaccatca

SEQ ID NO: 3869 - DNA, 212 bp, Glycine max
  Clone ID: LIB3028-004-Q1-B1-F2
cattttccctcttctttctctctcacgttttccgcttcagttttctcgggaaaatcacggtgaaaggtccaggcctctagtctgacattggcaagagagctcgcgatcttcggttcaacgattaccagaatgaccacaagttcaccatcaccacttacacttccaccggagtggaaatcactgccactggagtcaggaaaggtgagatacat

SEQ ID NO: 3870 - DNA, 412 bp, Glycine max
  Clone ID: LIB3028-004-Q1-B1-F4
caagcattggcagagagggaaggtctctcgtttcttgagacatctgcactggaagcaaccaacattgagaaggcattccaaaccattttgacagagatttatcatattgttagcaaaaaggcgctcgctgctcaggaagcagctgttggtaccatacttcctggtcaaggtaccaccatcaatgttggggatgcatctgggaatacaaagagaggctgctgctccgcttaatgtgacatgtgaggaaaaagcgatggtagcagatagtattttttccccccaattctgttttgcccctttctcttttcatcttttttttttcctcctttctttatgggtgagagacacatgtagagtacatttacttcatctagttgcaaaaacaaagtctgtgaaattttataaaacaata

SEQ ID NO: 3871 - DNA, 406 bp, Glycine max
  Clone ID: LIB3028-004-Q1-B1-F5
aaattaaaaccgagcctcttccccaaaggagacacagagcgagagagaatcgtaacaaaagcggtaaccggaataagttgtctctacgatttgagccatggcaacaacaacaccctcaaaccgatcatcagaggcgtttgctctcatggcaatcctcagcactctgctttgcacggcggtggcggcgaaggagagcgtgtacgagatactccccaagtacggcctcccgagcggtctgttaccggacaccgtcaccgactacacgctcgacgaggacgggcaattcgtcgtcgttttggcgaagccctgctacatacagttcgattacttagtttactacgagaccaagatctccggcaagctcagctatggctccatcaccaacctcaagggcattcaggtccag

SEQ ID NO: 3872 - DNA, 402 bp, Glycine max
  Clone ID: LIB3028-004-Q1-B1-F7
tcgtgttgctgttcaatgtaaggttgcatcagatcttcccaagcttgttgaaggtcttaagcggttggccaagtcagatcctatggttgtttgtaccattgaggagtctggtgaacacattgttgctggtgcaggagagcttcatcttgagatctgtttgaaggacttgcaggatgatttcatgggtggagctgagatcattaaatctgaccctgttgtgtcattcagggagactgtcctggagagatcatgccgcactgtgatgagcaaatcacccaacaagcacaatcgtctgtacatggaagcaagaccattggaggaaggtcttgccgaggccattgacgatggcaagattggaccaagggatgaccccaagattcgctccaagatcttgtcagaaga

SEQ ID NO: 3873 - DNA, 398 bp, Glycine max
  Clone ID: LIB3028-004-Q1-B1-F8
gaactcatgaccaagattgacaggcgatccggcaaagagcttgagaaggagcccaagtttttgaagaacggtgatgctggttttgttaagatgattccaaccaaacccatggttgttgaaactttctccgagtatcctccacttggtaggtttgctgttagggacatgcgtcaaactgttgctgtgggagtcatcaagaacgttgagaagaaggatcctaccggagccaaggtcaccaaggctgcccagaagaagaagtgaatcgtgcgggctggttcatcaggggatgttggttacaataaatgttggtttcttttctgtactcttgtgtcttcttttctaggtagcttgtttttcggacaaagtttgaagtctccaccatcatctcgcaactgttg

SEQ ID NO: 3874 - DNA, 404 bp, Glycine max
  Clone ID: LIB3028-004-Q1-B1-F9
ccacaagcaagtttgcaaaggcaataatctctattaccctcattatccaaaatcagaaaaaatggccactagaggcctcaaaatttgcttggccgtgtcctctcttttcttgatcattcttgccatcgttattgtgaccttaattttgaccatctttaaacccaagaacccagatatatttctccacccagttgacctagaaaactttcaattgctttcacctaatacaactagtgcacccttaggcatagtgatcacaattgtgaaccctaattatggaaacttcaagtacgtgaattccagtggctatcttaaatatcgtgacaccattatagccgaagttccattggggataagatcattccctgctcgtagcactaccaatgtgagcactactgtgggta

SEQ ID NO: 3875 - DNA, 406 bp, Glycine max
  Clone ID: LIB3028-004-Q1-B1-G1
gaacgcagatccagccgcttccgcttgttcgatcgctacagacgcttgtatcggattattcatgattgattcataagcagcatgtcttcctccggctatagttgttgcagatctcggatgttgtaaaattagtgtatgatgtgaagctatgggctggaaaatgtggatgtaggagatttcgggacgaaaggcctcaaaacgcttcgtcgtttgtggttactgagtcctgagtgatcttgtcatccgacctttgccatgacaggtgcgcttgcttggcaggtcaaaatatgttaataaaaaaagttttattggtttagggagagatcgcacgggagttgcccggggtctctctctcgtgtggtgtgtggtgtttgctgtgctctccttttcgttatgccttttatta

SEQ ID NO: 3876 - DNA, 403 bp, Glycine max
  Clone ID: LIB3028-004-Q1-B1-E5
cataccaatatcttaaaatatctcttccatagaagtttgttttcaaagtgtgtttgtctcacagatcctactcttgtgaccacggatcttcacttcactctctcactctctctctctctctctctctctctctctctctctcttttttgggacgcttttttctcttctcaaagtaaaccagggcaagcaattatattacactactcactcactgagaccatggctcataatatcaccaccgtcaccgacgctcaagccaaggccgcaggctggcgtggccgtgcctaggtcaccttcatcgctggaaacggtgactatgtgaaaggtgtcgttggcttggccaaaggtctgaagaaagtgaactgcatgtaacctctggtggttgcagtgttacccgatgttc

SEQ ID NO: 3877 - DNA, 409 bp, Glycine max
  Clone ID: LIB3028-004-Q1-B1-G11
atgaacacggtgctagatgaggaaagcgcggttggtggcggggacaagaagaaaaagaagatgcaaaagaaagaaaaggaagtcaggactttttactctattccagcagcacccgcgatggaaacgacccaaaggagggttgattttgcaaaagctgggccacccaatgtaatgttaatgcagcagatcccaaagcaaaaccctgagtattcattggtggagacaagtccaccactggcggctcgtttgcgctatagaggaggccgggacaagatatccaccacctacgacttagtggaacagatgaattacttgtacgtcaatgttgtcaaggctagggatctccctgttaaggatatcactggtagccttgacccttatgtggaagtcaagcttggtaactacaagg

SEQ ID NO: 3878 - DNA, 221 bp, Glycine max
  Clone ID: LIB3028-004-Q1-B1-G2
ctcaactctgaactcggcactaggaacaagataactgtaagtgcacagcagaagatttgtggacaatctctgaagaacgtgtacagaggaatcatgcaaaggccgtggggcaacgtgagcctcggaaactactggacccacatacaggcttccgcttctggctcagcaccctcaccatcacctaagaaaccccaccaacgtagaatcacacggcaaatcgc

SEQ ID NO: 3879 - DNA, 396 bp, Glycine max
  Clone ID: LIB3028-004-Q1-B1-D1
catttttctagttcctgcgcatccaaacgagtccttaatatcgaactttcctgaagatggtgttgatagagcatgaagagagcaagcagagaaacgcgaacccctccaacgccgccaacgacgattccgacggcttcgaaaccgccagcgacaccgatctggccggtgaaggcgacgacagtggggccggcatcccggaagaacagaatcgcaccgaacagagtcataccgagaagcagacggagcaagagccggaacacgatgctcctcggagcagcgaatcatccgagaacaatgccctgatcagtgaagaagaatcgagacagaaagcattgaatcaagcaaatgaagcaaaggtagaagggaataagctttttgtagaagggaagtatgaag

SEQ ID NO: 3880 - DNA, 188 bp, Glycine max
  Clone ID: LIB3028-004-Q1-B1-D10
tttatattcttttcgacacgtcaaccaatctacttggagagtacttgtgaatgaagtgattgtaaggcccccaattcataggatcatggatccccctccccccttgtgcaatataaaaaaaaaatctttggatgataactgcaccaaatattttcatgtaatatataataatcatcgtactgcactcc

SEQ ID NO: 3881 - DNA, 392 bp, Glycine max
  Clone ID: LIB3028-004-Q1-B1-D11
atccacaccatccatccacaatctcctccagcctactactttactctgtttccttttgtttcttattgatctctgacaaccccaacacttccgaatcttgcattgtatctacccacttctcaaccaacaatggcaatggcaacccaagcctctctcttcaacccacccctctccggtctcaaacccagcgaccgagccaccgcgccatggaaacaatcctccaacctctccttctccacctcgaagcccctcaagttctcgcgaacaatcagagcagcagccaccgaccagacgacagaggcaccggttgggttcaccctatcggaactggacccaaacagcccttcaccgatcttcggaggcagcaccggcaggctcctgcgcaaggccca

SEQ ID NO: 3882 - DNA, 394 bp, Glycine max
  Clone ID: LIB3028-004-Q1-B1-D12
cggatgttcccgcggcggtgcgggagttttcccggacgctgttcaacatgaggccggacatctcgctgttcgtgtcgcggacggtgttccacagcgacctgagggggattctgggtctggttaacgtcccctgttgtattatgcagacggcacgtgacatgtccgtgcctgccagcgtggcgacctacatgaaggaccacatcggcggaaagagcagcatccagtggctggacacggagggccacctcccgcacttgagtgctccttcatacctggctcgccagcttgagattgcgctttcccagtagcgcgtggggaggcgcgtgctagtcctggcgcgtgggtctgcttgttaatttaagtaatttaactctactagtactagtactaccag

SEQ ID NO: 3883 - DNA, 412 bp, Glycine max
  Clone ID: LIB3028-004-Q1-B1-D2
cggaagtttgaaacatacatattcttcttaattttgggtcagtagtatgtggaagttgaagatagcagaaggaggagatgggttaatctctgtgaacaatttcattggacgtcaacactgggagtttgatcctaatgctggaactccacaagaacgtgctcaagttgaaagggtacgagaggaatacaaaaagaaccggttttgcattaagcaaagcggtgacctactcatgagaatgcagctcacaaaggagaacacgtgtgggcccattctagcaagagtgaacgtgaaagacacggaaaacgtaacggaggaagcattgatcactacaatgagaaaggctatcaatttctattcctctattcaagcccatgatggccactggccagcagaatctgctggccctttgttt

SEQ ID NO: 3884 - DNA, 409 bp, Glycine max
  Clone ID: LIB3028-004-Q1-B1-D3
gaaaggaaggaaaaatggagttgttcttctacgcggtgttcggcggtttgggagcggttgttgcagtgacggagctgagcaagagcaacaaggaccgaatcaacacctcttccgcattcaattccttcaagaacaactacctcatcgtctattccctcatgatggctggagattggctacaaggtccatatgtctactacctttacagtacatatggatatgggaagggagacataggacaactcttcattgctggttttgggtcttccatgctctttggaacaattgtcggatctctagctgacaaacaaggccggaagagggcttgtgtgacttactgcataacctacattttgagttgcatcaccaagcattctcctcattacaaagtcctgatgttgggccgtat

SEQ ID NO: 3885 - DNA, 407 bp, Glycine max
  Clone ID: LIB3028-004-Q1-B1-D4
gtataggcgtgccaaggtcttgttaattttgagcgttaagtgctgcaactaatcagatcccaagaccttggcctaccttgccatacagaaaaaaaaaaagcaaaaaaaaagccaaggtttggagccaacaaaaataaacacaaagcacaagtcatggaaagaataatggttggaagtgcaacaaaggttgctttcaccctcttggccactttcgccattgtcattccatgccttgaggctggcattgctgagtttgacgattttctcaaagcccaagctgatgaagcccataaaattgctcttgattcctatgtcccagagccccacgatgtcgcccatgaactcaatttccatgttcatatggcactggaaaactccacaaggagggaactaaggcagaggaaact

SEQ ID NO: 3886 - DNA, 403 bp, Glycine max
  Clone ID: LIB3028-004-Q1-B1-D5
catcgaacccgtcgtagcagaaaaacttgtcaccatggtttcttccgacaaggatccacgagaggatgtccttcaagcctggtacatggatgatagtgatgaagatcaaagactcccccaccacaaagaacccaaggagtttgtctcgttggaccaacttgctgaacttggagtccttagctggaaactagatgctgataaccatgaaaatgatccagagctgaagaagattcgtgaagagcgtggttacacctacatggatgtttgtgaggtctgcccagaaaagttgccaaattatgaacagaaaatcaaaagcttctttgaagagcatcttcacactgatgaggagatccgcttttgtgctgctggaagtggctattttgatgttagggatcgcaatgaa

SEQ ID NO: 3887 - DNA, 401 bp, Glycine max
  Clone ID: LIB3028-004-Q1-B1-D6
gaatagtgagcaactaataatgacatatgttacattaatcatcctattgaggaaacttcataatggaattcaaggtcacatgattgttacatggatagccgtgagttgcaagggaaagcgtctgtacacacatgatagatatcgacgtctaatcgtctgagacaatctaaggatgcacacagtgatcatttgaacgtgtcagaagcagtgacagtagagaaatgtgtaacatacaggatactaccctcacaatcatagaggatcctatggtgagcgatagcccacttcaagctccaacttttgattgtcaccatctaatttagtgactcaggctaatgagagactcacatacggataaaattgatgtagagtctaagcagtatctggatgccatgatatct

SEQ ID NO: 3888 - DNA, 403 bp, Glycine max
  Clone ID: LIB3028-004-Q1-B1-D7
aacttaagttcattccttgtgttttgctttcttcctcaaaaccaaacatgtcgaacacatgcggcaactgcgactgcgctgacaagactagctgcaccaagggaaacagctatggtgttattgtagagactgagaagagttacatcgagactgttgtcatggatgttccagcagctgagcatgatgggaagtgcaagtgtggcactaactgcacttgcacggactgcacctgtggccattaaggaatatgtatgaaaatgtaattgccatgtgtttggcaatacaaatatccaaataatgtaatcttcgtatgaataaatgtgtgtgctgttatcctacttcaggtctgtgtagtcatgcagtctgaatcatttcaagttcctgtcttagttaatataacagc

SEQ ID NO: 3889 - DNA, 80 bp, Glycine max
  Clone ID: LIB3028-004-Q1-B1-E1
ggttgtgaagtctgagtctgaatgccaatgttccagtactcgacgagttcatactttgcttctgtcagaagtcatatcct

SEQ ID NO: 3890 - DNA, 334 bp, Glycine max
  Clone ID: LIB3028-004-Q1-B1-E10
caccaccatcttcttcctcttcacagtgctcaaggtttcagcatcatcgtcagtgatattctacaacaagtgcccccacccagtgtggcccgggatccagcccagcgcaggaaagcccgttctggcccgcggaggcttcaagctcgccccaaaccgggcctactccctccagctacccgccctctggtccgggcgcttctggggccgccacggctgcgccttcgacgtcggcgggcgcgggcgctgcgccaccggtgactgcggcgggtccctcttctgcaacggcatcgggggaagcccaccggcgaccctggcggagttgacgctgggcaac

SEQ ID NO: 3891 - DNA, 405 bp, Glycine max
  Clone ID: LIB3028-004-Q1-B1-E11
caccaattcacacacataataaactcactgctcttctctctacccctccctccctcctcgcctccgcctcaagcttccctccttcaccctcccctccccgaacgccgtcttcgccctcctcctcctcacctacttcatggtcgtctccggcattgtttacgacatcatcgtcgagccccccggcatcggctccactcaggacccctacaccggcgccgtccgccccgtcgtcttcatgtccggccgcgtcaacggccagtacatcatcgagggcctctcctccggattcatgttcgtccttggtggcatcggcatcattctcctcgacctcgccctcgatcgcaaccgcgcgaaatccgtcaaggtttcctacgcctccgccggcgtttcctccgtcgtgctagc

SEQ ID NO: 3892 - DNA, 404 bp, Glycine max
  Clone ID: LIB3028-004-Q1-B1-E12
tccatagcttctttagccttggataagggagaacttgtttctgatgacttggttgttggcattatagatgaagcaatgaagaaaccatcatgtcagaaaggtttcattcttgatggttttccaagaactgtggtccaagcacagaagcttgatgagatgctgcaaaaacaaggagttaaagttgataaggtgctcaattttgcaattgatgatgcaatccttgaggagcgaattactggtcgctggatacacccatccagtggcagaacttaccatacaaaattttcccctccaaaggttcttggtgttgatgatgttactggtgaaccacttatccagcgcaaggatgacactgcggctgttcttaagtcaagactggaggcatttcacaagcaaaccgaacc

SEQ ID NO: 3893 - DNA, 411 bp, Glycine max
  Clone ID: LIB3028-004-Q1-B1-E2
accaaattgcttctgtccatccctgtcattctcaagttggctgatgctcttgacatagctgtgaaatctgtgaggtacactcgtggaagcttcattttccctggggcacagtcttttcctcaccgcagtttttccgaggaggtttctgttcttgacagctatttcagcaaccttggttctggtagcaaagcatatgttatgggtgacccttcaaagtcacagatttggcacatctactctgcaagtgcacagaccaaaggatcatctgaagctgtctatggcctagagatgtgcatgaccggtttagacaaggaaagtgcttctgtgtttttcaaggagaatacatcttcagcagcttcaatgaccgaaaattctggaattaggaagatccttccacagtctgatatatct

SEQ ID NO: 3894 - DNA, 401 bp, Glycine max
  Clone ID: LIB3028-004-Q1-B1-C9
ctcaatcgatgtcgcacaagcctttggactcgcgccacaccacagactcctgcttgttgcagctccgcacctggaaacccttcaagctccagcaagacgggccccaccccaaaccctactaccacaaacgcccctgcctctccgatcgcacaaccacctcgttttccctcgacatgtccaaactcaccctcgccgacgacgacaatcacaatcccaacaaccgcgccaccaattaccgcctcgtcgctcgcaagaggcgccgccgcggctcgcgatccgtgtccggccgcagcagcgaccggagcgggacgcgccggtgctgctccgtgggggcctccgccgcgtacggcacctgctccgatttcccggtggccatgggcaccgactccagcggggagctc

SEQ ID NO: 3895 - DNA, 406 bp, Glycine max
  Clone ID: LIB3028-004-Q1-B1-E3
gcagaaagcatgtctcaaggatgaagcattgtcgagttgatacttctaatgcattgaaatcatccccgtggtttagatttccttatccattacaatggggtactcctatctttcactggaaaatggctcttgtgatgtgcgtggtttccttgatctcatctgtagattcggttggttcgtatcatgcttcttcattattggtagcatccagacctccaactcctggagttcttagtcgaggaattggtttggaaggtctttctagtgtcttggctggtctctggggaactggaacaggttctactaccttaactgaaaatgttcatacaattgctgtcactaaaatgggaagccgcagagcagttcaattgggtgcatgctttctgattgtgttgtctctcgtggg

SEQ ID NO: 3896 - DNA, 412 bp, Glycine max
  Clone ID: LIB3028-004-Q1-B1-E4
gttgacttctgaaggatttgagtttgtccacaactacaagataactaagcacttggttgcatcgtttccaaggctaattaaccttgtcaatggctgcaagaagaaagcaacggtggtgaatgtggcaactaatggcaggataataagaaagcttgatgatagtgatgggaaggtgattaattttgtgacttcagctgtggagtttgaggaccacctttaccttggtagtcttaattccaactttgttggaaaattaccattgtatagtgcatagaatagtcaagtttagccctccttgaataaaggtgtgcctcagcttggattaagcgaaagaagcatcccatgatggatatgtatgatttagaccaagcacatgtaggagaatattgttccataatgcatattctctgtt

SEQ ID NO: 3897 - DNA, 407 bp, Glycine max
  Clone ID: LIB3028-004-Q1-B1-B2
cgaagagtgaaggttcgttgaatcccatggcgagagtgaagcacacgccagcttctcgcaaatccgctaaaaagcaagcgccacgcgcatccacttccacgcagccgccaccacaatcccaatcgcctgcaactagagagaggaggagagctcaacaagtggagccgcagcaggagcctgaggctcagggaaggaagaagaggcgcaataggtcgggaactgtggcgcttcgtgagattcggcattttcagaggagttgtgagcttctcatcccggctgctccctttatcagatgtgtcaaacagattacaaatcaattctctacggaggtgtctcgttggacacctgaagctgtggtagcacttcaggaggcagctgaggaatatctggttcacttatttgaagat

SEQ ID NO: 3898 - DNA, 408 bp, Glycine max
  Clone ID: LIB3028-004-Q1-B1-B4
ggaagcacttcttcagaggagtcacgagcctctcgtgctacagaaaaccatagcatagagattgctatgggttatgcaaaatcacttgggagggaaaaatattcagtgatatgtcattattttaagcagttccgtgaacttagaaattggtgttgcccatctgagcttgattttattgcttctttaagccgctgtaggaattgggatgccaaaggtggaaaaagcaagtcctattttgcaaaaacacttgatgacagattcatcataaaagagattaagaagacagaacttgattcatttttggggttttcttctctgtatttcaaacacatgagagaatcatttgaatttggcagccaaacttgtcttgcaaaagtcttggggatatatcaggttactaaaagacac

SEQ ID NO: 3899 - DNA, 399 bp, Glycine max
  Clone ID: LIB3028-004-Q1-B1-B5
aatatattccattctctctgtgtatttccctacctctcccttcaagatgcagatcttcgtcaagaccctcaccggcaagaccatcacccttgaggtggaaagctctgacaccatcgacaacgtcaaggccaagatccaggacaaggaaggaatccccccggaccagcaacgtctcattttcgccggaaagcaacttgaggacggccgtacccttgctgactacaacattcagaaggagagtactcttcacctcgtcctccgtctccgtggtggcatgcagatcttcgttaagacactcaccggcaagaccataaccctagaggttgaaagctccgacaccatcgataacgtcaaggccaagatccaggacaaggagggtatccccccggaccagcaacg

SEQ ID NO: 3900 - DNA, 401 bp, Glycine max
  Clone ID: LIB3028-004-Q1-B1-B8
cctgatcatggtggcggttaccctgtccgtagtggtggacactgtatgcatggatgttgcggtggccggacatataacggacgttgcaggacgtgctgctataaagctggcaaagctgttgctgcaaaaactcaatataagactcatgattaacacgatgcaatgctacgtaattagtacttttgataatttattttcagtgaaatagaatagcttgtgactggacaagcatggattctcatcaagcaagaatcaatgatatttcacacgactatacatatttcacaattacagattaatagtgttgttgaatgtataataatacacatcatcgtgactgtgatgatcagtttaagagaaaattgacatacattggtgatcaaaaaaaatgtgttcaccgg

SEQ ID NO: 3901 - DNA, 378 bp, Glycine max
  Clone ID: LIB3028-004-Q1-B1-B9
catttttctagttcctgcgcatccaaacgagtccttaatatcgaactttcctgaagatggtgttgatagagcatgaagagagcaagcagagagacgcgaacccctccaacgccgccaacgacgattccgacggcttcgaaaccgccagcgacaccgatctggccggtgaaggcgacgacagtggggccggcatcccggaagaacagaatcgcaccgaacagagtcataccgagaagcagacggagcaagagccggaacacgatgctcctcggagcagcgaatcatccgagaacaatgccctgatcagtgaagaagaatcgagacagaaagcattgaatcaagcatatgaagcataggtagaatggaataagctttttg

SEQ ID NO: 3902 - DNA, 406 bp, Glycine max
  Clone ID: LIB3028-004-Q1-B1-C1
gataatgtattatcacattattcctgagtatcaaaccgaagagagtatgtacaatacggttagaaggttcggtaaggttagctacgatacactgcggttaccgcacaaggttctggctcaagagtctgacggctccgttaaattcggtcacggcgattcctccgcctacctgtttgatcctgatatttacactgatggtaggatctccgttcagggaattgacggcgttcttatccctcctgaagaagaagaagaacgcactcgccgcaccactccacttgttaaggttgctgctcctaaaccaagaagagggaagttgatggaaatcgcttgtagcatgtttggatcttttggacaagtctgccaatgaaatcgcattctcaactaatcacaaaaataataaaga

SEQ ID NO: 3903 - DNA, 408 bp, Glycine max
  unsure at all n locations
  Clone ID: LIB3028-004-Q1-B1-C10
gtccacgataatgctctccggaaacgaagacagctccgccgcgggctccgaccaaacccaccgtcaaatcttcgaccactatgcgtcccacacactcatccccgaccacttcctacacgcgccaacgcactccaccgccaccaccgccgccgcagccaccgtggatttcacccatcaccaccacttcaccccgcaaccccaccaccacaaccaaaaccacatgaaccaccaccaccaccatgccttcttcgacccacgcgcttttcatggcgcgtcgaacacctcttaccccccaccccattccatgctctcccttgacccgctacctcacgtcaacgcagttgggcctgggcacgggcccggttccgggccangcggacttctccttgtcccanagtctgaagacgt

SEQ ID NO: 3904 - DNA, 405 bp, Glycine max
  unsure at all n locations
  Clone ID: LIB3028-004-Q1-B1-C11
gtaaattaagaagatcattaatggcttctcttgcaaccttagctgctgttcaaccagctgcgctcaatggccttgctggaagttccctctctggaactaagctctctttcaagccctctcgccacactgtcaaatccaagaacttcaggagtggtgccgtggtagcaaagtatggtgacaagagtgtgtactttgatttggaggatctgggcaacactacggggcagtgggacttgtatggctcagatgcaccttcaccctacaaccctcttcagagcaagttcttcgagacatttgctgctccattcacaaagaggggattgttactcaagtttctgatattgggaggttggttcacccttgcatacttcagtgcaacagcctcaggtgacattctnacaatca

SEQ ID NO: 3905 - DNA, 409 bp, Glycine max
  unsure at all n locations
  Clone ID: LIB3028-004-Q1-B1-C12
cactcataacacaaagcacaaagcaaagctcatccttgagttaaaaaaatggcagcagcttcttccatggctctctcatccccatccttggctggcaaggccgtgaagctgggcccatcagccccagaagtgggaagggtgagcatgaggaagaccgtcaccaagcaggtctcctcaggaagcccatggtacggcccagaccgagtcaagtacttgggcccattctctggcgagcccccgtcctacctaaccggtgagttcccaggcgactacggctgggacactgctgggctttccgcagacccagaaaccttcgccaagaaccgtgaactcgaagtgatccactccaggtgggccatgctcggagccttgggctgcgtcttcncggagttgctgtcncgcaacgggg

SEQ ID NO: 3906 - DNA, 398 bp, Glycine max
  Clone ID: LIB3028-004-Q1-B1-C4
aaaagcactggcgcagctaccctgaggcttctcttctcttctcttctctgtcgtgagtcaccatggtgagggttagtgtgctgaacgatgctctgaagagcatgtacaatgctgagaaaaggggaaagcgccaagtcatgattaggccatcctccaaagtcattatcaaattccttttggtgatgcaaaaagcacggatacatcggagagtttgagtatgttgatgaccacagggctggtaaaatcgtggttgaattgaacggtagactgaacaagtgtggggttattagtccccgttttgatgtgggcgtcaaagagattgaaggttggactgctaggcttctcccctcaagacagtttgggtatattgtattgactacctctgctggcatcatgga

SEQ ID NO: 3907 - DNA, 404 bp, Glycine max
  Clone ID: LIB3028-004-Q1-B1-C5
aaagaaaagaaaatcctcaattttctgagcagccaaacactctctctctgtctctcgaaaattctcagtttgcagagaaaatctgaatcatgtcgtggcaagcgtatgtcgacgatcaccttctgtgtgacatcgaaggtaaccacctcactcacgctgctatcatcggccaagacggcagcgtttgggctcagagtaccgacttccctcagttcaaacctgaggagataactgccatcatgaatgactttaatgagcctggatcacttgctccaactggattgtatctcggtggcaccaaatatatggtcatccagggtgaacccggtgctgtcattcgagggaagaagggtcctggtggtgttactgtgaagaagaccggtgcggccttgatcattggcatg

SEQ ID NO: 3908 - DNA, 404 bp, Glycine max
  Clone ID: LIB3028-004-Q1-B1-C6
atcctgacccccaatcaggttatggtcacgggggttacgcgtatgagccacaacagccttcttatcctacacagcagccgtattatgcccaaccgccgccgccgccgccaaactatggcaatgaacctcagcctcatgctagcggcagagtggccggccacagaaatgagaagcggttagacaggaaatactcgagaatcacagataactacaactccatagatgaggtgactgaggctcttgcacgtgcaggccttgagtcttcaaatcttattcttggtattgatttcactaagagcaatgagtggacaggaaagcattcatttaacagaaaaagtttgcatcacattgggaatggtccaaacccctatgaacaagcaatatcaattattgggaagaccttg

SEQ ID NO: 3909 - DNA, 402 bp, Glycine max
  Clone ID: LIB3028-004-Q1-B1-C7
tttattacgagattagatgatctttcgatggactactgtccgcactacagccccaaatatgattcatcgccggagaagttcttagagagcatagagagatttctatatattcacaagggtttcaggagagccaatgccaatgtattggagccacgagcactttatctccactcggttttgacccatcgttcaggatcagctgcaatgctatcacttatatactcagaagttctgaaaatgcttcggttgtggagccttttgcattttgatgctgaaattttcttccctcgtgatgctcttacccttcccacaggctatcataagcagaaaagcaaggagtcagaccaagctcacataatgacttcaggaaacctattagttgagatcttaaatgatctgaag

SEQ ID NO: 3910 - DNA, 405 bp, Glycine max
  Clone ID: LIB3028-004-Q1-B1-B12
ctacaactagtaacaaagatccaacaagcagatcaatctctctctctgtctcccaatcaaaacagacatgggtttgaaggaggattttgagcagtatgctgagaaagcaaagactttgccaccgactcaatcaaacgaagacttgcttatcctttatggattgtacaagcaggccaccgttggacctgtcaacaccagccgtccgggaatgttcaacatgagggacagagctaaatgggatgcatggaaggctgttgaagggaaatccaaggacgaagcaatgagtgattacatcactaaggtgaaacagctgctggaagcagccggcatgcctgcttgataacattgtcatgccttgctttcttattctgtgctagaagttccaacagtttggaaataaacaat

SEQ ID NO: 3911 - DNA, 178 bp, Glycine max
  Clone ID: LIB3028-004-Q1-B1-C8
tgcggcggatgatcaattgtgctaccacaacaagattgacagccacaaaggacccttactgaatccttcctcaagttattcctatagatcagctcaactatttctatctattcatacgggtttcaggatacctattgccactgtgctggcgtcacgatcaccttatttccattcgttt

SEQ ID NO: 3912 - DNA, 405 bp, Glycine max
  unsure at all n locations
  Clone ID: LIB3028-003-Q1-B1-H6
gtgccttggacgaagatcttcaaggatgtgctgctatggtcgctaacattctcagagaaaaagggcagattgttgagttggttttggaaagcaaaccacttaaatgggtttttaaacgtgcagcccgattaaatgctgagcggcttgtgttagtggggaattctgaatggcaaaggggtgtggttggtgtcaaaattctctctactgctgaacagtatgaggttaaactggatgatctgaagtaaatcagaatttgaattttttgtggttatgtattctgtctttactattggtattaatttcaccttgattttttttacatagtcctttgagactcaagtacttgttttgtatgtgtacatactcacctgtgtatgcatatgtgattatccatataccanaact

SEQ ID NO: 3913 - DNA, 410 bp, Glycine max
  Clone ID: LIB3028-003-Q1-B1-H9
ctcgagccgaatcggctcgagcagcgaacacatgactgatctcaaagaaaagttcaagcgcatgtgtgaaaagtccatgataaagaagcgatacatgcacctgacggaggagtttctgaaagagaacccgaacatgtgcgagtacatggcgccatcgctggacgtgagacaagacgtagtggtgatggaggtgccgaagctgggaaaacaagccgcaacgaaagcgattaaggagtggggtcaaccaaagtcaaagatcacacaccttgtgttctgcaccacttcaggcgtggacatgcccggagcagattaccagctcacgaagcttctcggcctgaggccctccgtgaagcgcctcatgatgtatcagcagggctgcttcgccggcggcaccgtactccgcctcgcga

SEQ ID NO: 3914 - DNA, 412 bp, Glycine max
  Clone ID: LIB3028-004-Q1-B1-A1
atgccatccattttgtcatgaaagaataccactgccagcattggaacaataggcactcccaaagcgcttatggcattagagaagagggaagaaacctcacgaataagccccaaacaaccaatggtgaagacttgccaaagtatggctgtgaaagtgaggttcagcaaatatgaagccttccccaactcatactccttcatttcattcttcaaaccactccactctccactagcaaaaagtcccactaaggtagcaagggtagccacaagggaagtgtataatatcatatccaagaccactttgaatgtttctctttttatgaccttcttgaacacaagctgtgtgagggaaagccatagtccataccctgcagatgcaccaactgtgcatatgaatccaatcacatactttt

SEQ ID NO: 3915 - DNA, 408 bp, Glycine max
  Clone ID: LIB3028-004-Q1-B1-A11
atatccttagacctgctgtctccactcctgggaagcattaagaaagacaatgaggaagtttttccaatagcccagaaattgggggagagggtccttgaaagctgtgcaaccaagctgaaaccctacttggttcaagcagtgaaatccttgggtatatctgtggatgattatagtgcagtacttgcttcaatatgccaagatgtatctgatgacctggagaaaaatgatacatgtgttactagtgagcatgtggaagataagagtgagtcagcgaaacaatcactggaggagtcaacacattttgatcaggtggttaaaaaggattcaagggaagttacatcctctcagcaagaaaatcctgatgatgtgaataaatctccaaagtcagtcatgagcaatgttgttgca

SEQ ID NO: 3916 - DNA, 391 bp, Glycine max
  Clone ID: LIB3028-004-Q1-B1-A12
ccgccacttctgaatctattgaatcaacaatcatgtcggacgaagagcaccatttcgagtccaaggccgacgccggagcctccaaaacctaccctcagcaagccggtaccatccgcaagaacggctacatcgtcatcaaaggccgcccctgcaaggttgtggaagtttcgacttccaaaactggaaagcacggtcacgctaagtgtcactttgttggaattgatattttcactgccaagaaacttgaggatattgtgccctcttctcacaactgtgatgttcctcatgtgaatcgtactgattaccagctcattgatattgctgaggatggatttttgagtccgcctactgaaaatggtaacactaacgatgacctcaagcttcccactga

SEQ ID NO: 3917 - DNA, 407 bp, Glycine max
  Clone ID: LIB3028-004-Q1-B1-A3
aattcatccctcatttctcttttcgttctctccaatttcccgaaaccctaatttcctcaatcctggttttggaattcgacaatggagcagaagaggagcagcaagatgtacaacctgttcgtgaagcacttggacgggaaaaccctaaccctcctattcccctctccgatcctctacgcgagttccatcaaggatcgcctcttccaactcactggaatccccgcccaccaccagcgcctcgtcaccggctgtcgccacctcaacgatgacaaatccgctatccagtgctccccgggggacggcaacatgtttccctccgtgcgcctcctcctgcgcctcaagggcggcaagggaagctttggctcgcttctccgtggcgccgccaccaaggccggccagaagaagac

SEQ ID NO: 3918 - DNA, 410 bp, Glycine max
  Clone ID: LIB3028-004-Q1-B1-A4
agaacatgagaggatgcaattggactggcccagaagaatgcaaatttgtctgggtatagcaaagggcttagcttatcttcatgaggaatcaaggttgaaaatagtgcacagggatattaaggcaaccaatgtcttacttgataaacatctgcatgccaagatctctgactttggtttagccaaacttgatgaagaagagaatactcatatcagcacaagaatagctgggacaattggttacatggctcctgagtatgctatgaggggttacttgactgacaaagcagatgtctatagctttggaattgtagctttagagattgttagtggaaagagcaacacaaattataggccaaaggaggagtttgtatatcttttagattgggcctatgttctccaagagcaaggaa

SEQ ID NO: 3919 - DNA, 137 bp, Glycine max
  Clone ID: LIB3028-004-Q1-B1-A5
gaaagaaacagtgttaatttgctagcctcattttcatgatgaatgactatattaaaaatatttgcaacacaaaaccccatgtaacagtgaaatttcactttttttccaacgattctttatacacctgaactttgctt

SEQ ID NO: 3920 - DNA, 406 bp, Glycine max
  Clone ID: LIB3028-004-Q1-B1-A6
tctctctctctcgtgttctgagctgctagaagcaatggagaggaaaagaagccatgcttctttcaccatgtttgcaatgcttgttggattgctctctcagagccttgtcattcctgtaatatccaccactgttgcagatcagaagaactactacaccccagatccacatgctggaagtccccccacaggtttctccgattctctgtgctcacacaatagtagtcctccatctcatggccatgggagctctccaccctcacatcacaatagtccaagtactccatcaacaccctcaggtggaaactgtggatcatcacccccacaacatcatgatccaacaccctcaactccatcaacaccatcaaaccctccctcaggtggatactatggaggtagccctccaaca

SEQ ID NO: 3921 - DNA, 404 bp, Glycine max
  Clone ID: LIB3028-004-Q1-B1-A7
gcgaaaacccccaactccaacctctgttcatcgtctaccgcgctttcttttcaaccagaactatgattaagctttttaaagtaaaggaaaagcagagagaacttgcagaaaatgcaagtggcggaccacctgttaagaagcaaagtgctggagagttgcgtcttcacaaagatataagtgagctgaatctaccaaaatcatgtaccatgcaattccccaatggcaaagatgatctgatgaactttgaagtttcaattcgacctgatgatggatattacttaggtggcacatttttgttttcctttcaagtgtctcccatctatccacacgaagcaccaaaggttaagtgtaagacaaaggtctatcatccaaatattgacttggaaggaaatgtttgtctcaac

SEQ ID NO: 3922 - DNA, 404 bp, Glycine max
  Clone ID: LIB3028-004-Q1-B1-A8
tacacaccacacaacacagatcatgggagtggatttaaggcaagtggtggcgggtgtgctcaccctcacaatgttcgtcatgcttattcacatgatcaaaagggaccattttgatgctgttcatgataaacttcctggaacagaggatgtcggctttgaaagtacaaactttgatactactcatgttagaaagaacatcgggatttggaagggagatgctgatgagttaaacccatgttgggctaagccatctgaagacaatgcggagactgaggggtttgttaccttttcactaaccaatggcccagagtaccatatatctcagatagcagatgcagtgcttgttgctcgcagtcttggggcgacacttgtcatccctgacattagaggaagccaacctggtg

SEQ ID NO: 3923 - DNA, 383 bp, Glycine max
  Clone ID: LIB3028-004-Q1-B1-A9
cagaaagaaccccaaaagacttttctggctatatttaaggcaagtggtggcgggtgtgctcaccctcacaatgttcgtcatgcttattcacatgatcaaaagggaccattttgatgctgttcatgataaacttcctggaacagaggatgtcggctttgaaagtatatactttgatactactcatgttagaaagaacatcgggatttggaagggagatgctgatgagttaaacccatgttgggctaatccatctgaagacaatgcggagactgatgggtttgttaccttttcactaaccaatggcccatagtaccatatatctcagatatcagatgcagtgcctgttgctcgcagtcttggggctacacttgtcatccctgaca

SEQ ID NO: 3924 - DNA, 401 bp, Glycine max
  Clone ID: LIB3028-004-Q1-B1-B10
caagattactgttactgctgcactggggtttgatagtttcttggttatgcgccatggagctggtcctttatctgcggatatgccagtaaataatgcaaatggaaaacatagattgggctgttatttctgcaatgatgtcgtggcaccaaccgattcaacatccaactgcactttggaccagcaatgtactgtgacccgaccagggctagctcctattgcttcagcccttgcagttgaacttttagtagggattttgcatcatcctcaagggatatttgccgaaggtgatattaacaacagtgtcactggagctactgagcaacctcttggtattttgcctcatcagattcgtggttccctttctcaattttctcaaatgaaccttataggttactcctcct

SEQ ID NO: 3925 - DNA, 394 bp, Glycine max
  Clone ID: LIB3028-004-Q1-B1-B11
ctgccatctgtatctgcatagcataaataccgcacgcacgcgattcctatgatttgttttttcactctgggcgattttccctattctttttgagtgccgagcaaaaccctaatcgagttcgattgcaacacacctccgttgctgtattccaccttctccgacgaatggcaaccaaacctcttacaaccgaagctattgcgcttacagaaaagaagatggacatgacattagatgacataatcaaaatgtctaaaaatacgaagaataagaagccaagaagggttctgaacaaaagtcaaaagttttcaaataattttactcaagataagtctgcaaaggtccaacgttatatggaatcaagatcttctcttagacagggggctcttgcaaaaag

SEQ ID NO: 3926 - DNA, 403 bp, Glycine max
  unsure at all n locations
  Clone ID: LIB3028-003-Q1-B1-H5
ctaatccctatttttcttcctcagtagtgtcatttacgcttctcttctctgcagcaactatgcctaaccctaaggtcttcttcgacatgaccatcggcggtcaatctgctggccgcatcgtgatggagctctacgccgacgtcactccccgcaccgccgagaacttccgcgcgctttgcaccggcgagaagggcgtagggcggagcggcaagcccctccactacaagggctcgtccttccaccgcgtgatcccgagtttcatgtgtcagggtggcgacttcaccgccggaaacggaaccggcggcgagtcgatttatggcgccaagttcgccgacgagaactttcctgaagagcacacgggtccggcatcntctccatggcgaacgccggtcccggaaccaac

SEQ ID NO: 3927 - DNA, 412 bp, Glycine max
  Clone ID: LIB3028-003-Q1-B1-G1
taatcactcactcacacattcgccacttccacacagcatagatcacctttccttttttcccacagaaaaaaacaccacctttctttttccgactaaaggttcgccggaaaatgcctctatcctcctcttcctcctccgccgtagactccgccgtctccggcgagatcatgctctttggcgttagagtcgtggtggactccatgcggaagagtgtgagtatgaacaacctctcgcagtacgagcttcctcgcgacgctgccaacgccaaagacgacgccgcaggatacgcctccgccgatgatgcagctccgattaactccgacaagaaccgcgaacgcaagccaaggaatctcatggactgaaggaaaacacaagctattcttggtggggttgcagaaagtggggaaaggtg

SEQ ID NO: 3928 - DNA, 411 bp, Glycine max
  Clone ID: LIB3028-003-Q1-B1-G11
aacagcacaaagcgggttactgtctgttcaagctaccatctctctctctctttcttagtgcctccttgccagaagttaaaatggcccaagaaactttcctattcacatctgaatcagtgaacgaggggcaccctgacaagctctgtgaccagatctccgatgctgtgctcgatgcatgcttggagcaggaccctgacagcaaggttgcctgtgaaacctgcaccaagaccaacatggtgatggttttcggagagatcacaaccaaggccaacgtggactatgagaagattgtgcgtgacacatgcaggaacattggttttgtctctgatgatgttggtcttgatgctgacaactgcaaggtcctcgtcaacattgagcaacagagtcctgatattgctcaaggtgtgcacg

SEQ ID NO: 3929 - DNA, 334 bp, Glycine max
  Clone ID: LIB3028-003-Q1-B1-G2
caaagctacattaataacgtcgtttaatgttccaatattgtagtgtttttgtcctgttggggttggactgctgtgctgtattttggttttgtattctgccccttgatttgttctgttacttttagccgtgttcatgtctccaggaaatgtttatattttctttcaaaaatgtttttccattgtgtttatttgtcttttttgggcatggttcaggctccagtaggtcgcattttctttactggagaacacacgagtgaaagatttagtggctatgtgcatggtgcatacctcgcaggtatcaattctagcacagaactacttgaagaaatgagaa

SEQ ID NO: 3930 - DNA, 407 bp, Glycine max
  Clone ID: LIB3028-003-Q1-B1-G3
cttgacacaactaataaagatctccatgtcaagggaatggaattattactggctgcatcttactctttacatgcttctcacgctgtgtattggtactgtattttctggtctggggcattctctgtcttctgttgtgacaagagttgctgcaatttttgtatttgtatcattctgttcccttctaagcattgctagggtgcctgcacttttgaaagaaatcaagatatatgcctgtgaagaatcaaaccagcactccagcacattagttttcttacttgcacagctcttgtccagcatcccatttctttttctcatctccatttcatcaagtctaatcctccacttcctcctttggttgggaagatcaattcagcctgttaatgtactttgtgctgaattttttcatg

SEQ ID NO: 3931 - DNA, 410 bp, Glycine max
  Clone ID: LIB3028-003-Q1-B1-G4
ggttcatcatcataaccttcaatgaaaagaaatggctgaggcaagcattggcagcaaaagcagcagatggtctttacagggaatgacagctctcgtcaccggtggatccaaaggaatcggatatgctatcgtggaggagttggcacagcttggagccactgtgcacacttgcgctcggaacgaagctgaactcaatgaatccttaaatgaatggaacacaaaaggatacagagtaactggttccgtctgtgacgtggcgtctcgtgcagaaagacaagacctcatagctagagtctccaatgagtttaatggcaaactcaatatccttgtaaacaacgtgggaacaaacgtaccgaaacatacccttgatgttacggaggaagacttctcatttctgataaatacaaatc

SEQ ID NO: 3932 - DNA, 398 bp, Glycine max
  Clone ID: LIB3028-003-Q1-B1-G5
tggaattccaaggtggccatcccgcaagattaataaagtcaatcgatcattgaagaagatacagactgtgcttgactctgtccagggcatggaaggagggttgaagtttgatccttctatgggggcgtttgtggcaggagggtcaatcatccaggaaattgatgcacctaaaagtactataaaagaccccgtgcctgttactcaagatgcattctcagtaccacccgcaccttgtagtgaaggtgagaatttttcaattaagttggagggaaaattgaagaaaaccaatgtttcttcagttgattacagtgaagattcaaaatctatggcaatcaatgatgggttcgtgccaaaatgcaagccctttgcaccaaggttcaggattgtcctgaacaagc

SEQ ID NO: 3933 - DNA, 404 bp, Glycine max
  Clone ID: LIB3028-003-Q1-B1-G6
tttgcagccagagaatcttcttctggactcaaatgctattctgaaagttacagattttggattgagtacgtatgcgcaacaggaggatgaacttctccgcactgcttgtggaactccaaattatgttgctcctgaggtgcttaatgatagaggttatgttggttctacatctgatatctggtcctgtggagtcattctctttgtgcttatggctgggtacttgccctttgatgagccaaatcatgcgacactgtaccaaaaaattggcagggcccaattcacatgtccatcatggttttctcccgaggcaaagaaactattgaagcgtattcttgatccaaaccctctaacaaggataaaaattcctgaactcttagaagatgaatggttcaaaaaaggataca

SEQ ID NO: 3934 - DNA, 403 bp, Glycine max
  Clone ID: LIB3028-003-Q1-B1-G7
ttcattaacttcacacacagacacggtgtttccaccacaccatagcatatagtactagtagattaaacgccaaagaaataaattactcactttcacgtaaaccataacgtgcttccaccgcaaccaaccacaatgggtgccgttaggtccataacggtgttgctactagtgttatttatggccatgagctccggcgtgcgctcgtgtccgccgtcggacagggcggcgctgctggcattcaaggcggcgctccacgaaccctacctgggaatcttcaactcgtggaccggcgccgactgctgccacaagtggtacggcgtgagctgcgaccaggagaaccgccgcgttgccgaaataaacctcggcggcaagtcggaggagccgatcttcgagcgcgcccacc

SEQ ID NO: 3935 - DNA, 404 bp, Glycine max
  unsure at all n locations
  Clone ID: LIB3028-003-Q1-B1-G9
ggtttctcttcctcccttggagaaaaagaagagccaccgctgcgacgccgttcgtgcatttttgaggtgccgctgtcatgtttgggcgtggtggaccaaggaggagtgataactccaaatattatgatattctcgggatttccaaaaatgccagtgaagatgaaatcaagaaggcctatagaaaggcggctatgaagaaccatccagataagggaggagatcctgaaaagtttaaggagttaggtcaagcatatgaagttttaagtgatcctgagaagaaagaactgtatgaccagtatggtgaagatgcccttaaagaagggatggggggaggaggctcgtttcataatccatttgatatatttgaatcattttttggangagcaagctttggtggtggtggt

SEQ ID NO: 3936 - DNA, 411 bp, Glycine max
  Clone ID: LIB3028-003-Q1-B1-H1
gaaacaaacccacccgggacaacctcctcctatcattacactaccgccatggtcgaaccaaagtcccgaaccgtgggcaacaccgagcgaagctggtgccaagccgtccgcggtggcaccggcatcgccgtcctcgccctcctaacctcaaaaccccccgatatccccaagctccaaacctccctccgcaccctccaaacctcccacccaatcctcagttcccgactccaaaccaacgcaaccacattctccttcctcacctccccaaccccctccatcaaaatcttaacactcacgctccctactaacctcaccgaccccctggaccagattctcgaactcgaactcaaccgtaacccgtggcaggattctaccaccgaagaaaacgtgttcttcaccaccatctacgca

SEQ ID NO: 3937 - DNA, 261 bp, Glycine max
  Clone ID: LIB3028-003-Q1-B1-H10
agccaacaatacagatcatgcagaatcccaatgcaactcctttacaagaagttcaagtcatataaaattgaagaatctgtaggttcaagtgtggaggagaaaaaccattttcatcttcatatagactttttaatatctcttgatctctcacaaatctatatgaagatgaaaagatattaaaaagtctatcgtactccatcaaaacgaaagtagagaatatctagatttgtatcttcgtttatataaatgactagtgttctt

SEQ ID NO: 3938 - DNA, 405 bp, Glycine max
  Clone ID: LIB3028-003-Q1-B1-H11
tttatagtttactattgaaagatgggtttgaaaatggcaatactgatcctaggcctgctggccatgttccttttggtctcctcagaggtggcatccacgaattcaaaagaggtgacaaatggagttgaagatgccaaatatcctggtggaggctatggtgggggttacccaggcaatggcggtggtggctatcctggccgtggtggtggctaccctggtcgtggtggtggctatccaggtcgcggtggtggttaccctggtcgtggtggcggctatccaggccgtggaggagggtattgtcgctatggctgttgcggtggccggacatacaatggaggttgtagaaggtgctgctactacgccggtgaagctgttgctgcacaaactcaggataagactcacaat

SEQ ID NO: 3939 - DNA, 315 bp, Glycine max
  Clone ID: LIB3028-003-Q1-B1-H12
agagataccacttcgcttgccaactcacagctgatctatttgccacgaaccatacagatttcactatcaccagtatcttccaggagattgctggaagcaaggacactgttggacagtatgagtctgagacagcctttaaccttcgtggacacaatcgtgttgtgcacggcaatgatgtctttgatccagaattcaacattgtcgcccctggagctgattaaaccatttacttccccgccatcgaaactagccatatgttgacctccgtccacctcgacatcgaaaaacttctttatagctctgtggagaatgatg

SEQ ID NO: 3940 - DNA, 408 bp, Glycine max
  Clone ID: LIB3028-003-Q1-B1-H2
gccaagtgaaagtgagaaaaaataaaaatcaaagagcataatgtcagggatcattcacaagattggggagacccttcatgtgggagggcacaagaaggaggaggagcataagggtgagcaccatgctggagaatacaaaggggagcaccatggtgaacacagtagtgagtacaaaggagagcatcatggtgaacacaaagctggagagtaccatggtgagcacaagccagagcacaaagaggggttcctagacaaagtcaaggacaagatccatggtgagggcggcgccgccgagggcgagaagaagaagaaggagaagaagaagaaggagcatggccatgagcatggccatgacagcagcagcagcagtgacagtgattaaactgctgcatcacctatatatttaaa

SEQ ID NO: 3941 - DNA, 409 bp, Glycine max
  Clone ID: LIB3028-003-Q1-B1-H3
atctatggcaatgttttaccaatttaggaatgctggtgtcttttttttcctttgtgttcttctcttatctggtgtgtgtgttttgggtcgaccagccacttttctacaagactttcatgtcacgtggtctgactcccacatcaggcaatttgatcaaggcagggcaatccaactcagacttgaccaaagctctggatgtgggtttgcttccaaggtgaagtacatgtttgggcgtgttagcatgaagatcaaactcgtccctggagactctgctggcacagtcactgcattttatttgaactctgacacgaattatgttcgtgacgagcttgatttcgagttcttggggaaccgtactggggcaactttacacagttcaaaacaaacatctacgctcatggaaagggtg

SEQ ID NO: 3942 - DNA, 398 bp, Glycine max
  Clone ID: LIB3028-003-Q1-B1-H4
cagctctcctctcactttcatttctacatccctggctctgttccgtcgatgacgatggcgtttagggtgcgaaaccctgacctccgctttctcattcttctctctctcttgtccatcacttccgccaaggtcttcttcgaggagcgtttcgatgacggatggggaaatcgttgggttaaatcagattggaaaaaagatgagaacctggctggggagtggaaccacacctctggccaatggaatggagacgctaacgacaaaggtattcaaaccagtgaggattacagattctacgctatttcagctcagtaccctgaattcagcaacaaggataagacactagtcttccaattttctgtcaagcatgaacagaagcttgactgcggtggtggctacat

SEQ ID NO: 3943 - DNA, 401 bp, Glycine max
  Clone ID: LIB3028-003-Q1-B1-F9
agcaggtgttatccctgtggtcaagacatccattggcggtactcgtattattggtcgtctttgtgctggtaacaagaatgggcttctcttgccccataccaccacagaccaagaacttcaacatttgagaaacagtctacctgatcaagttgttgttcagcgaatagacgaaaggttatctgctctgggaaattgtatagcatgtaatgaccatgtggccctcacacacactgatcttgacagggagactgaagagatgattgcagatgttcttggagtagaagttttcaggcagaccattgctggcaatattcttgttggtagttactgtgccttctccaatagaggtggcttggttcaccctcatacttccatagaagacttggatgaactttctacac

SEQ ID NO: 3944 - DNA, 330 bp, Glycine max
  Clone ID: LIB3028-003-Q1-B1-E3
acgtaaagcaacttctcatgctgttctgtccaaggacccaaattcaatggattcggtttcctccgaagcctccgttaatgataagattcctgccagtccacttcgggtgccgcctagtccgtcaagattctcaatgtctccaaaactcactagacttcaatcattgcatctcaatctgaaccaagttacaagagctacccaaaacttctcagaaacattacaaataggagaaggaggttttggaactgtctacaaggccaagttggaagatggcctggttgtggctgtaaaacgtgcaaagaaggaacattttgatagtttgagaacaga

SEQ ID NO: 3945 - DNA, 402 bp, Glycine max
  unsure at all n locations
  Clone ID: LIB3028-003-Q1-B1-E4
tccttttgttcctatctctggttttgagggagacaacatgattgagaggtccacaaaccttgactggtacaagggtccaactctgcttgatgcacttgaccagattagtgagcccaagaggccctctgacaagcccctcaggcttccccttcaggatgtgtacaagattggaggtattggaactgtgccagtgggacgtgttgagaccggtgtcttgaagcctggaatggtggtgacttttgcaccaactggactgacaactgaagtcaagtctgtggagatgcaccatgaatctcttacagaggcacatcctggtgacaatgtgggattcaatgttaagaatgttgctgttaaggatttgaagcgtggttatgttgcctcanactcaaaggatgaccctgc

SEQ ID NO: 3946 - DNA, 332 bp, Glycine max
  Clone ID: LIB3028-003-Q1-B1-E5
gtgaaagccctctatagaagggcccaagcacatatgcagttgactaacttggatttggctgaacttgacattaagaaagctcttgacattgaccctaacaacagggatgtcaaattggagtacaggactttgaaggaaaaggtgaaagagaataatagaaaggaggcgcaattttatggaaatatgatcaacaagatgacaaagattggttcctgatagcaataaaccagctacgaagtaccaacggtattgaatccggggttgacaactaaatctagatgtcatccaatatggaacacgaatctgtttagtccccgtttttctggggtttg

SEQ ID NO: 3947 - DNA, 163 bp, Glycine max
  Clone ID: LIB3028-003-Q1-B1-E6
caaagagcataaaagcaatattttagaaacagtgcatgtaattgtttgtctctgttttatatcatgcttttgaggatgcctgtagactctttgatttgtttttgcctgacctttttgttcccaagcgtttgatagcatggaaataagagcgcttgactttgtt

SEQ ID NO: 3948 - DNA, 405 bp, Glycine max
  Clone ID: LIB3028-003-Q1-B1-E7
cttagctgaaccctcacctcaatcttgcgtgctagctagctttattccaattcctacagaaccaaattattctgctagctagctagtacgtcaaataaaataaaataatcaaatatggcattcagcgggacccaacagaaatgcaaggcttgcgacaaaactgttcactttgtcgaaggtttatctgccgatggagctgcttatcacaagaactgcttcagatgcagccattgcaatggccttcttgcgataagcaattactcatccaccgaaggagttttgtactgcaaggtgcactttgagcagcttttcaaggaaactggaacctaacccaagaaatcccagttctcctggaaagcctcaactcgagctgaatagagcaccaagcaagctttctgccttctt

SEQ ID NO: 3949 - DNA, 404 bp, Glycine max
  Clone ID: LIB3028-003-Q1-B1-E8
cttcacttttaagttaaatagtttttcattgtttcatttaatctacaatggctgcttcaacaatggctctctcttcatcatcattggctggccaagctatcaagcttgccccctccacccctcagcttggtgttggaagggttagcatgaggaaaacagcctccaagactgtttcttctggaagcccatggtacggcccagaccgtgtcaagtacttgggcccattctctggtgagcccccatcctacctcactggtgaattcccaggtgactatggttgggacactgctgggctttctgctgacccagagacctttgccaagaaccgtgaacttgaagttatccactccagatgggccatgttgggagccctgggctgtgttttccctgaactcttggcccgc

SEQ ID NO: 3950 - DNA, 392 bp, Glycine max
  Clone ID: LIB3028-003-Q1-B1-E9
cctttctatgttgcttaagaagttacctacttatagcaagagaatctagctctattggttgtgtaaggtaaaaaaaaaaaacgcataaccatgtcaaccaaattgattgaaacaagccttagccttatggtatggcttgtaattgcaacatcagcaatagcacaatctgataaccccccagttcttgacacagaaggccaccctcttgagcctggcagagattactacatcacaccagcggtaacagacattggaggccgtgccactatagtagacaacggcacatgccctttatttgtaggtcaagagaacacttttgtagaagagagctttgccgttttcttcaccccttttgcaaaggaagatgatgttgtgaaggtgaatagggactt

SEQ ID NO: 3951 - DNA, 402 bp, Glycine max
  Clone ID: LIB3028-003-Q1-B1-F1
aatttacattactcattacactaactcaatcctcagtctatccaaattctccagccatggcagtttcttctgcatctgcttcctccaaacttatactattcccccatgcttcatcttcttcccttatctccacacccttccgttcctccaccaacacccacaaactatcccctctctcctcctccttcctccaccccaccaccgtcctccgccgcaccccctcctccaccactaccaccacctccccgcgccgccccctcaccgtccgcgccgcccgcggcaagttcgagcgcaagaagccccacgtgaacatcggcaccatcgggcacgttggacacggcaaagaccaccctggacgcggccctcaccatggcccttgccgccctcggcaacagcgccccg

SEQ ID NO: 3952 - DNA, 410 bp, Glycine max
  Clone ID: LIB3028-003-Q1-B1-F10
caaaaacaaagaaaaaaaaaaacccttagccaacacaaccatcatggccacctctgctattcagcaatcagcattcactggtcaaactgctctgaagcagctcaatgagttcgtccgcaagaccggtggcgccggcaaaggtcgcactaacatgcgccgcaccgtcaagagtgctcctcagagcatttggtatggccctgaccgtcccaagtacttgggtccattctcggagcagattccatcatacctgaccggagaattccctggtgactacggatgggacactgctggattatcagctgacccggaaaccttcgccaggaaccgggagctggaggtgattcacagcagatgggcaatgcttggtgcccttggctgcaccttcccagagatccttgagaagaatggtg

SEQ ID NO: 3953 - DNA, 405 bp, Glycine max
  Clone ID: LIB3028-003-Q1-B1-F12
gacctttggaaccgctgctattcttgttacgaacgtgatgcgcacaagaataagggaaatggaaacactcatgaacgccgaacaacaacagcaacaacaacagcacgatgtcgcaaccactgactcgtcttttatttcagacaataaagattgatttgcatttagtttttttttttatttccgtttcggtcctggagtttgtgatgctttgtaaactcgtggaatgcaaagggcacgcaacgtgtttgttgaatgtcctgactgaaaaataaggctgggacaaccagcggaatatggaaacccatttgcgattatgagatttttaatattttatctcatcattttggtgtgttaaaaaaaaaaaacaaaacaaaacccaaaaaaaccaaaaaaccaaccacacac

SEQ ID NO: 3954 - DNA, 376 bp, Glycine max
  Clone ID: LIB3028-003-Q1-B1-F2
ctcttggattctgggctggtcatcggaactctaaaatcagagttattcttgcacgtgtgtgggaaaatgacacagaacttgatatttcaaacaatagaattagtagggctactgggcatctagtgtaccagaaaagattttacaggagtaagttttgtatatgtcctggtggatcacaggttaatagtgctcggatagcagactctatccattatgggtgtattcctgtgatattgtcaaattactatgaccttcctttcaatgatattcttgactggaacaaatttgccgttgtactcaaggagagtgatgtttaccagcttaaacaaatcctcaaaaatatatcagatgctgagtttgttacacttcataataa

SEQ ID NO: 3955 - DNA, 328 bp, Glycine max
  Clone ID: LIB3028-003-Q1-B1-F3
ggtttgggattggagggattgacgctgcgtctcttcctcttctctttcgatccatccctcattcctaatcctccaatccaaccacctcagcctcacactcacatatacacatatctgaacgcgtatcgtccctcctatggcttcaaagcgcatcctcaaggagctcaaggacttgcagaaagacccaccaacttcttgcagcgctggtccagtagctgaggacatgttccattggcaagcaacaataatgggtcctgctgatagtccttatgctggaggtgtattcctagtcactattcacttccctccggattatcctttcaagcct

SEQ ID NO: 3956 - DNA, 409 bp, Glycine max
  Clone ID: LIB3028-003-Q1-B1-F4
ggaagtcagtgatgaactgaaaaatcttgtcaaggtaactgaagaatgcctggagaagggaatagctgcgtgcaaggacggtgctctctttaggaaaattggaaagagaatcagtgagcatgctgaaaagtatggctatggtgtagtggagcgttttgttgggcatggtgtgggaacagtgtttcattctgaaccaattattatacacaatcgcaatgagaaggcaggccgcatggttgaaggtcaaacatttacaattgagccgattctttcaatgggaagcattgattccattacatggccagacaactggacaacactaacagctgatggtagtccggctgcacagtttgagcataccattttgataactaagactggagccgaaattttgactacatgttgacat

SEQ ID NO: 3957 - DNA, 323 bp, Glycine max
  unsure at all n locations
  Clone ID: LIB3028-003-Q1-B1-F5
ccataatgctgggcttcttggtcatggcagtgatgtcagtcattggataccaaagagaattgctggtccattagagggacttcaaattgcatttgttgcttgtggtccatggcacacagccttggtaacttcaacagggcagctgtttacatttggtgatggaacattcggtgtcttgggccatggagataggcaaaatgtttcatatcctagagaagtagaatccttattggggttgagaacaatagctgttgcttgtggagtgtggcatactgcagctgttgtanaggttatcgcaacacactccagtacaagcatatcat

SEQ ID NO: 3958 - DNA, 406 bp, Glycine max
  Clone ID: LIB3028-003-Q1-B1-F6
ctaaaaattgccagttacattcccttcacaagattctcacaaacaactcttgagaaagaaagaatggctgccaacacattgatgagttctgccatctcagccttcccatctctcctttcctcctcaaaatccagatttgccgcagcagttcctctttccagctttgttgtcaccaatgcctcttcttctcgcttttccatgagtgctgactggatgcctggccagcctagacccccctaccttgatggttcagcacctggtgactttggattcgaccctcttcgtcttggtgaagtaccagagaatcttgagaggttcaaagagtcagaactcattcactgcagatgggccatgcttgctgttccagggattttggttccagaggcattgggcttaagcaactggg

SEQ ID NO: 3959 - DNA, 373 bp, Glycine max
  Clone ID: LIB3028-003-Q1-B1-F7
gccgatgattcccagtaatggatccttcaaggatgtgataacggagggagacggtagaacgaggtactgattgcctagatcaaatgttccgtgatgcttggtttgtacaatatatatataagataatgctttcatagttgcaggatttggcctgtggtgagcatcatagtttgcagtagttttggtagcaagactttgtattttccttttatttagcttactatatgcagtagcagctatctctgtaatcttatatccatctcctgttgtttgtattgtgccgttgggttttttgatgtagtgagattgaaaatgatgtgctagtaatattattgctgttagaaattcaaaaaatactaaacccaaggattat

SEQ ID NO: 3960 - DNA, 403 bp, Glycine max
  Clone ID: LIB3028-003-Q1-B1-F8
gcgagaacgacccaaagagaaataaaccacttatatatatatatatataaaaataaaaaaattagcatcatacaccatatctagttaccttcaacataaaatggaagaatccaagggttttgttagtggtgagactcaaaaacctcacccaaaaatgccttctagttccttcccaattcctttgccagggaggaatcgccatggccagcagtgtccatcaagatatgccccacaatggaggcaaagggcaatactagggcacaccgtgggaaaccctagcggggcaagtgagaatacaactttgaaggtgtaagtcactcgaggagtaataatacttagtatgaagatcttaaacgtttgaataaccgttgtcgttgttatgttgtcttttctatatcgtata

SEQ ID NO: 3961 - DNA, 335 bp, Glycine max
  Clone ID: LIB3028-003-Q1-B1-E2
cctgctcaaaatgctcaagacaggcgaatgaggagaatattaaagagtccagatccattagctgagcagcattggaaggagatgcagcagggtgaatcagggactggtggtatttttggttaagaatggtgcaatttaattttttgttcacaataatcattctaacatgctctgctgaatggttgcacacttgaggtgagagtaagcgctggatggatgctgctaattttgattgttagacaatcacttttgtggtttttttatcaggcgcttcttgttggtttgtgtcgagatatgtattctttacttccttggagccagatctatttcaggtt

SEQ ID NO: 3962 - DNA, 404 bp, Glycine max
  unsure at all n locations
  Clone ID: LIB3028-003-Q1-B1-C8
ctggcattggtcttgatgaactcagctgtcaagttttctccatgatgcccctagatgaactgataggtaaaactgctgaacagattgcctttgaaggcattgcttctgccatcatacaaggaagaaacaaagaaggagccagttctagtgctgcacgtatagtttctgccctcaaaggaatggcaaatgcaatgagttcaggaagacaagaacggatttcaacaggactttggaatgtggacgaaaccccatttacagcagagaatattctggccttcacaatgcagaagattgagttcatggcagtggaagggttgaaaatccaagctgacatgacagaggaagaagctccctttgatgtttctccacttagcactgaggaagggaacanagagaatgaacta

SEQ ID NO: 3963 - DNA, 385 bp, Glycine max
  Clone ID: LIB3028-003-Q1-B1-C9
ggagtatgtgtgtgtgttaattatgtgtatgcatggtggaagctagagtaatagaggcgcaacaagatcactgttgttgtgggggctatagccagctcctcatcataagtggatcaatacataaaaaaggttaattagtaaagtcacacgtgctttctaacggtggcgcaccagaggggtttaggttcaggttcggggaagttcttggcggcggaacaaggcggcgatgaggaaacggaagagagtactgtaggttcggttccgagccatgtggtctctgcagcttcggcccaaaccaataatcagtgggtcacggcaagtggttctccaaggatgtcacgttttatgaatgctccttcctccccaggattgtctcctctgtttg

SEQ ID NO: 3964 - DNA, 410 bp, Glycine max
  Clone ID: LIB3028-003-Q1-B1-D10
gcgactgggaaatggctagggaatgcttcacaacgaacgacgttgcagtttccgctcgccccaagcttctcgtcgctgagctcatgtgctacaacaacgccatgttgctcgtggcgccctacggtccctattggcgcgaactaaggaagatcattgtgacggagatcctctcctcgagccgtgtagagcaactacaagatgttcgtgtgtccgaagttcaaaattcgatcgtagaactctacgacgtttggcgtagccaaaagaacgagtctgactatgcatccgtggagttgaagcaatggtttgctcagcccatattcaacatggttctacgaatggtcgtcgggaagcggtttctgagtgccacggcgaccgacgagaaggcagaaaagtgtgtaaaggctgtggat

SEQ ID NO: 3965 - DNA, 396 bp, Glycine max
  Clone ID: LIB3028-003-Q1-B1-D11
atcttatcttagcaatagctacccctatcacaacaatactctattaggcaaaaacaccaaatgggagaggaaaaagagcagcctaagaatgaaaccgagaagaagcccgaggaggccgccgcagcccccaagaaagacgacggacccatccctgtcgtttacaaactcgacttgcattgcgagggatgcgtcaagaagatcaaacgcacatgtcgccacttccaaggtgtggaaaccgttaaggcagatctatcgtcgaacaaagtgactgttaccggcaaattggatgccgagaagctgcgagataagatcgccgagagaaccaagaagaaggttgacatcatctcagctccgcccaaaaaagaagccgccgccacggaaaatccaccggagaag

SEQ ID NO: 3966 - DNA, 381 bp, Glycine max
  Clone ID: LIB3028-003-Q1-B1-D2
cttctccaacatgccaaacgacagcgttctgagtcttttcttcttcgttaccctcttcacatgccttctctctgctaattcccacgatgaccatattttcctaccgagtcaactccatgacgatgactcagtgagttgcactgctaccgacccaaaccttaactacaagccggtgatcggaatcctgacccaccccggcgacggtgcctctggccggctcagcaacgccaccggggtttcttacatcgccgcctcctacgttaaattcgtggagtccggtggtgctagagttattccccttatctacaatgagtcacctgagaaccttaacaagaagctcgatttggtcaatggagtgctcttcactggtgggtgggctgt

SEQ ID NO: 3967 - DNA, 331 bp, Glycine max
  Clone ID: LIB3028-003-Q1-B1-D3
tctgcaccgtagtttttggggatattaaataaaaagagcttctataaaagttgattttaactcatgtgagaaactaaattcattttaccttttttttccttctcttatagaagcctacggagaagtttattcaaatggggctatagtgtggaaatttatgaactgtggaatctttgcagctagtgctttgaaatgcctctttgttcataataacattacattccagctgcacaaaagtattttttttttaccatgattcttctgtatgctatgttgtgtagttgtttcttatatgaaccataatatgtattcatgctgtcctgaattgaag

SEQ ID NO: 3968 - DNA, 410 bp, Glycine max
  Clone ID: LIB3028-003-Q1-B1-D4
ggtttctaccagagtattcggcctacacagatggggctatcactgaacattgatatgtcttccactgcatttattgagccattgccagtaattgatttcgtaactcaactgctgaacagagatgtatccgcccggccactttctgatgctgatcgtgtgaagatcaagaaagctctccggggtatcaaagttgaagtgacacatcgtggaaacatgagaagaaaatatcgtatctctggtctgacttcacaggcaaccagagaattgacattcccggtagatgaaaggggaaccatgaaatctgttgtggagtacttctatgagacatatgggtttgtcattcaacatactcagttgccttgtctgcaagttggcaatgcacagagaccaaactatttgccaatggaggt

SEQ ID NO: 3969 - DNA, 403 bp, Glycine max
  Clone ID: LIB3028-003-Q1-B1-D5
gaaaaagttagggtttgtaactttgtcttttgcttgcgaatctgaatcgaataataatcaatcaatcatcatgtcgtcggcgaagaagatcacactgaagagttcggacggcgaggctttcgaggtggacgaggcggtggcgctggagtctcagacgataaagcacatgatcgaggacgactgcgccgacagcggcatccctctgccgaacgtgacgagcaagatcctggcgaaggtgatcgagtactgcaagaagcacgtcgaggccgcgaatcccgaagacaaaccctccgaggacgatctcaaagcctgggacgccgatttcgtcaaagtcgaacaagccacgcccttcgatctaacccgggctgcgaactacttgaccatcaagagcctgctggacctt

SEQ ID NO: 3970 - DNA, 401 bp, Glycine max
  unsure at all n locations
  Clone ID: LIB3028-003-Q1-B1-D6
ggcttcaattccagaagagccattgttggcaccgaacccggaccggttctgcatgttcccaatccaatatcctcaaatctgggaaatgtacaagaaagccgaagcctcgttctggacggcggaggaggtggacctctcgcaggacctccgccactgggactccctgaccgacggcgagcgccacttcgtcagtcacgtcctcgccttcttcgccgcctccgacggcatcgtacttgagaacctcgctgggcgcttcacgaaggaaatccaaatccccgaggcccgcgccttctacggcttccagatcgccatcgagaacattcactccgagatgtacagcctcctcctcgaaacctacatcaaggactcctcncagaagagccacctcttccgcgccatcg

SEQ ID NO: 3971 - DNA, 403 bp, Glycine max
  Clone ID: LIB3028-003-Q1-B1-D7
ctcaaacgaatacgttttctctttctcttcaatttcacccttattagcatagcatattcattccccatcttgaatcgttcttaactgcgagaggggatatcagagaagttgattggcctcccattaataacagatctgaatgatctgatggagtctaaaggtgggaagaagaagtcgtctagtagtaagtcctttttgtacgaagctcctctcgattacatcattgaagacgttcgaccacacggtggaatcaagaagttcagatctgctgcttactccaactgcatccgcaagccatcctgagattccctaggtcgtgtgaggacgtagcccccttagtcctgcatccgccaaaattttctcagtctcttcccttctcctttttcttgttttcttccttgcc

SEQ ID NO: 3972 - DNA, 395 bp, Glycine max
  Clone ID: LIB3028-003-Q1-B1-D8
ccaaacaaaaccggaatcatatcccaaactccttcctccctctgggtcttgaggtacacaaccctaatcaccgcttcgagctctgtcattgtcgcaggttccaggtttcagcgatttcgatctcgcatagcattctacgatggatacgattccagttaaccgcaagcctttcttgaacaatttgactgggaagcccgtaattgtgaaactcaagtggggaacggagtacaagggctatctcgtttccgttgattcatacatgaatttgcagctggccaacactgaacagtacattgagggacagtttactggaaacttgggagagattttaatcagatgtcacaatgttctctaccttcgatgaataccggacgataaggaattcgaagatgttg

SEQ ID NO: 3973 - DNA, 410 bp, Glycine max
  Clone ID: LIB3028-003-Q1-B1-D9
ggctaacaacaatggtggctggtgcaaccctcctttgcaacactttgatcttgctgagcctgctttcttgcaaattgctcaatacaaagctggaattgttccagtttccttcagaagagtctcctgtgtgaagaaaggagggatcaggttcaccatcaatggtcactcttacttcaacttggttctcatcacaaatgttggtggagctggagatgttcattctgtgtccatcaaagggtctagaactgggtggcaaaccatgtctagaaactgggggcagaattggtaaagcaactcctacctgaatggccaaagcctctcttttcaggtcactacaagtgatggcaggactctcactagcaacaacattgtgcctgctaactggcaatttggacaaacatttgaagggg

SEQ ID NO: 3974 - DNA, 313 bp, Glycine max
  Clone ID: LIB3028-003-Q1-B1-E1
ccttcttacatttacttgattacatcccctccgttcatggaccaatatgctcaagcttcttcttccatcctcattctctaaactcatctccagacacattttctcacaactatcacgccccaccaccaccatgtccataaatctacgcacccacgccttcgcgggtaacccgctccgatcccccaaccgggtcgacccgttttcgcccgcctccgcgctcgagaccctcacgacccgaatcctcgacgccgcgcacgtgtcctcaccgtccgtggattttaaggtcttgccttttagaaatgggagggtgctg

SEQ ID NO: 3975 - DNA, 411 bp, Glycine max
  Clone ID: LIB3028-003-Q1-B1-E10
caagctgtcgcctttgaacttgaggctacaaaacttgtaaatgatgcagagattgccctacagcgagcagataagtctaattctaattcaaatgctgataccatagaatctacacaagcacaagatgttgttgtggctgttcctgaagaggagaaagtggttcaaggtttttctggtgatgttgaaagagacagagatttggcaattgacgacgaatctgtgcttgccaatttatcacctgaaacactatctgataaaaccagccaagttttggaagacaaaacacagtctgattatttaagtgataatgagaatgctgtgcaaacaaaaaagcaggaaatacagaaagatttgaccagagatagttcactagctcccaaggcattattgaaaaagtcttctcgattcttt

SEQ ID NO: 3976 - DNA, 406 bp, Glycine max
  Clone ID: LIB3028-003-Q1-B1-E11
tggttctggagtgctatctcttgcatgggcaattgcacagatgggttgggtagctggtcctgcagtgctctttgtcttctctttgataacatacttcacctccactcttctcgctgactgttaccgttcacctgaccctgtacatggcaagcgaaactacacatattctgaggttgtcaaagccaacctaggaggaagaaaatttcagctgtgtggattggctcagtatataaatcttgttggtgtaacaatcggctacactataactgcatcacttagtatgggggcggtgaagaagtcgaactgtttacacaaacatggccatcaagacgagtgcaaagttaaggacaacgcttttatgattgcttttgcctgcatccaaattcttccaaaccaaataccaaac

SEQ ID NO: 3977 - DNA, 384 bp, Glycine max
  Clone ID: LIB3028-003-Q1-B1-C5
atttggggattgccaaacgtggaaataatcgatattgagatgaatcagttatcaggttcgattagttcggatatcaaaaccgcgaaagcactcggttcaatattcgccaggcagaaccggttgtccggtgaaataccagaagaaatctcaatggcgacgtcgttagtgattgtggacctgagcgagaatcaaatctttgggaacattccagagggaatcggcgagcttaaacaactaggtagccttcatttacagagcaacaagttatcaggttcgataccggaatctctaggttcctgtaattccctcaacgacgttgacctatctcgaaattcattctccggagaaatccccttctccgtggggtcctttcccggctttaaa

SEQ ID NO: 3978 - DNA, 409 bp, Glycine max
  unsure at all n locations
  Clone ID: LIB3028-003-Q1-B1-A6
ctttgttattacctctttccaaagtccaaattttctagttccaccaaaccaaaccaaaccaaaatggcagcagcctcagcctcatccatgatatcaacaccagccttatctccaaccatccaaaagcaccatcatttgaagccatccaacgtgtgcttccaaggtcttagacccctcgcaaggttcaccaaagcctcatcaaccaaagtgagcaccaccaccaaaagggttattccaaagggtggtgttagagctgaactcaactcagcccttgtgataagcctcagcactggcctctccctcttcttgggaaggtttgtgttcttcaacttccaaagggagaacgtggcanagcaagtgcctgagcagaacggcctcacacactttgaggctggtgatacacgtgcca

SEQ ID NO: 3979 - DNA, 327 bp, Glycine max
  Clone ID: LIB3028-003-Q1-B1-A7
cttcctcctcttgcattcggcaaccaaaccatgcagcgcacggcgttggcgacagatgaaccacggcggcgctccggcgacgcggagggggagaaggtgttcaaggggagcgaggtgttcggtgacacgtcaccaaattacttgaagaccattttggccctggcgttgtggctcggaaccattcatttcaacgtcgcgttggtgctcttcgcaatcttcttcctctctctccacaaagcacttttgcttttcggtttgcttttcgtgctcatggtaattcctgttgatgaaaagagcaaattcggtcgaaaattatccaggtacata

SEQ ID NO: 3980 - DNA, 292 bp, Glycine max
  Clone ID: LIB3028-003-Q1-B1-B1
ataataaccccctttttccctctccatacccttttgctttctttatccaataataagaacttcccacgagtggctttaactggtctggtctggtctggtcggacacacaaaaatattagtatggagaaggtgagttttgtgaagaatggagagcttagattgcctccggggtttcgtttccacccgactgatgaggagctggttttgcagtacttgaagcgcaaggtcttctcctgccctctgccagcctctatcattcctgaggttgatgtttgcaagtctgatccttggg

SEQ ID NO: 3981 - DNA, 398 bp, Glycine max
  Clone ID: LIB3028-003-Q1-B1-B10
cggctcgagtaagattcatgctgctggaattgccaagcatggtgaaatagactatgaagctgttgtgaagcttgcagagggatttaatggggctgatcttcgaaatgtctgcacagaagctggaatggcagcaattcgggcagagcgtgattatgtgatccatgaagattttatgaaggctgttaggaaactgaacgaggcaaagaaacttgaatccagtgcacactacagtgctgattttggtaaagactagaatctattgcaaaattcttgcagagccatggatatctaggcagtgcatcttgagttggaaatacctcacgcaagttactcaattcgtacggctaagcgtgatgttccctttgggttgttctggcttgtgttttccgaattctaaa

SEQ ID NO: 3982 - DNA, 402 bp, Glycine max
  Clone ID: LIB3028-003-Q1-B1-B12
gattatgcgcagtgcgatgtgttcacgggaacgtgggtggtggacgaatcgtacccgccctatgatcccgccacgtgtcccttcatcgagcgcgagttcaggtgcaaagggaatggacggcccgatctcctttacacccgctataggtggcacccacttgcctgtaatttactcagatttaacgggctagattttctggagaagatgagggggaagagcatcatgttcgtgggagattcactgagcaggaatcaatggcagtccttgacttgcttgcttcattcagcagtgcccaattcaccttatactttggatagagttggagatgtttctattttcacacttacggagtatagggttaaagtgatgcttgataggaacgtgtatctagttgacgttgtc

SEQ ID NO: 3983 - DNA, 236 bp, Glycine max
  Clone ID: LIB3028-003-Q1-B1-B2
ctgtggttatccatgtcccctacagactaaggaaaggattccggaagattcatgtcaggcttgtgagagaacttgagaaaaagtttagtggaaaagatgtaatcttgattgccaccaggaggatagtaaggccaccaaagaaaggttctgctgttcagcgcccccgcaccagaacactcactgctgtacatgaggcaatgctggaagatattgtattgcctgctgagattgttgga

SEQ ID NO: 3984 - DNA, 402 bp, Glycine max
  Clone ID: LIB3028-003-Q1-B1-B3
gaagaaagctttcaaattcctctttttgcatcaaagaataaaactagtaggtttaaatatgaagcatatatactcaatgaagcgactgtctcatttgcatggctgttctctatgctatagaaacgcaaggcctttagcatgtggtgcctcgtatgggaggagcttcaaaagcaaagcacaaacaaggttcacttctggatgatattcttattctttacttttcttttttcaatcttgtttcggcaaagtgatgatattagtcacttgtgggttatataatattttatagaggacatttagcttgcactgtgttgaatgggttaaaacacttttggagaaatttgtataataaccattccctgaaggaggagcacctattgtaagttatcagaatgtgaaata

SEQ ID NO: 3985 - DNA, 406 bp, Glycine max
  Clone ID: LIB3028-003-Q1-B1-B4
gggtttttattctgttgcagagacagtggttgagaatcactgctcaaaagaataataataccaaattccaaccagataaggagtgtggaatttggaagcttcacttctttcttgtattacttgatgcccttttcccttctctccctccctcttctcttattctcattgtttagttacctaccgtggatcaaagtcaattccctatctcgcttctttttgtagttgatttcttttgggtttcgcagtctccccaaaagggttgtttttattttgttctaaaattttgtaatttttgcttggacttgtgataaaaaaaatttgattttttagatcgattcgttgatgggtcatgccggggttgttgttaattgttgtattggctaattgaagttcggttggtgatttg

SEQ ID NO: 3986 - DNA, 399 bp, Glycine max
  Clone ID: LIB3028-003-Q1-B1-B6
caaggaccagagggtccttctggtatggatacttgcttctatgccgagtaccacaacattggccccggttcagacaaatccaagcgtgtgaaatgggctgggatttggaacctcaattcaaaagctgcacgttggttctcaccatctaagttttttcatggaactgattggattgaggttactggaattccttgctttcctggcgtgcccaaacaccataggcacaaaaagacaatacttaattggcaataaaagtaatgagttgcaaaatcaagcaatataaattaattaaaaagtaatgattgtgcttctttattctttaattattttcatttcattaattaactctagtgttaactacattttttttatctcaagcaattaaaatcaatgtaacac

SEQ ID NO: 3987 - DNA, 380 bp, Glycine max
  Clone ID: LIB3028-003-Q1-B1-B9
gaataatagagatgagattccggatactatatcagtttctggtcaaataaattgtcgagctgacttggaagggttgccagatgtgtcatttcacttggctggattgaacacagcaaaccttgaagttttatcgtatcatccttgtgctcaagtttcagatcaaggtttggataagcaaggagtgatgttttctccgccattaggtaattttgtgttgatgcgttatcaggcagcttatgcccttggaccccccataaagggattctatcagttgtcaatggtttctgaggataaaggtgcatttctattcaagttgcatttaatggaaggatataaggctcctttgacaatggaattctgtactgtgactatgccctttc

SEQ ID NO: 3988 - DNA, 402 bp, Glycine max
  Clone ID: LIB3028-003-Q1-B1-C1
ctcaagcaaccatggcaatggcaacccaagcctctctcttaaccccacccctctccggtctcaaagccagcgaccgcgcctccgtgccatggaagcaaaactccagcctctccttctccagcccgaagcccctcaagttctccagaacaatcagagcagcagccgccgacgagaccacagaggcaccagcaaaagtagaggctgcaccggtcgggttcaccccaccagaacttgacccaaacaccccttccccgatcttcgggggcagcaccggcgggctcctgcgcaaggcacaggtggaggagttttatgtcattaagtgggactcacccaaaggaaaagatctttgaaatgcccactggcggcgccgctatcatgagggagggtcctaaccttctcaag

SEQ ID NO: 3989 - DNA, 411 bp, Glycine max
  unsure at all n locations
  Clone ID: LIB3028-003-Q1-B1-C10
cgcagatctctcagggcttgcatcttctcaggtaagttgtgaagatgtacacatcaaggaagaaaatccacaaggataaggatgctgaaccaactgagtttgaagagtcagttggacaggcattgtttgatctggaaaataccaaccaggagcttaaaagtgatctgaaggatttatacataaactcagctgtgcaagttgatgtttctgggaaccgcaaggctgttgttattcatgtcccttacagattaaggaaaggtttccgtaagattcatgtcaggcttgtcanggagcttgagaaaaagtttagtggcaaggatgtaatcttggttgccacccgaaggattttgaggccaccaaagaagggttctgctgctcaacgtcctcgtagtcgcactcttactgctgttc

SEQ ID NO: 3990 - DNA, 397 bp, Glycine max
  unsure at all n locations
  Clone ID: LIB3028-003-Q1-B1-C11
ggagagggagagggagagagaaagaaaggtgaattggattgcatctctctctgtgtgttggaagaggggaatcgtagatctgatttctttctttctttttaataattttgtgatcagaattattgagctgaacaaaagacaatgggattgtgggaagcttttctcaattggcttcgcagccttttttttcaagcaggaaatggagttatctctaataggacttcagaatgctgggaagacttcccttgtaaatgtagttgctaccggtggatatagtgaggacatgattccaactgtgggattcaatatgaggaaagtgacaaaagggaatgttacaataaagttatgggatcttggagggcaacctatgttccgcancatgtgggaacgttactgt

SEQ ID NO: 3991 - DNA, 324 bp, Glycine max
  Clone ID: LIB3028-003-Q1-B1-C2
ggctcacacacgcacagatctgatctatctgaagctgaaaacgccgacgcccgacggtgatgatgaagatggggtcctcaccttcacgttgctccttcttcctattcctcctcctcctagtggcgctcttcccctcgtcgctctccgagatccggttctccgagatccgaaacgacgatcgctccatcgttcccttcgatcagtttggattcacccacaagggtcgccttgagctcagcgtttccaaaatatcactctccaattccaatttggacctctccaaggtgggattcttcctctgcaccctggattcctggcttcatg

SEQ ID NO: 3992 - DNA, 400 bp, Glycine max
  unsure at all n locations
  Clone ID: LIB3028-003-Q1-B1-C3
caaaatcctcttttatttatttatttttttctctgcttcgcgtcgttttgtcctcgataatgtcgtcgtcgacgccggattcagacaaaacgacgacgtcgtcgaagaagagcgcgttcgacgcgttagcggcgtcgcggctcgtgacggagctcaggggaaacttcgcttcgggcaaaacgcgtagttatgagtggagattgttgcagctcaacgcgattgcgaaactcgtcgtcgatcacgagcaggagatcgtcgacgcgctccgaaacgacctcggcaagccgccactcgaaaccgtcgcatacgaggtctcgtcgtttacactgttactcgtttgcgttttggtttnaataaatatatagttggtttgactatggtantggaaaaggaatattcc

SEQ ID NO: 3993 - DNA, 371 bp, Glycine max
  Clone ID: LIB3028-003-Q1-B1-A5
ctttgacaagtaccaccctgggttcttcggcaaggtcggaatgcgctattttcacaagctccgcaacaaattctactctccgatcctcaacatcgacaagctctggtccctggttccgcaagaagtgaaggacaaggcctccaaggagaacaaggcgccgctgatcgacgtcacgcagttcgggtactttaaggttctcggaaagggtgttttgccgcagaaccagcccgttgttgtcaaagctaagcttatttccaagatcgctgagaagaagatcaaggaggctggcggtgctgttgttctcaccgcctgattttattgaccggatcgcctttttcaacgatttagggtttttttttggtttggttttg

SEQ ID NO: 3994 - DNA, 408 bp, Glycine max
  Clone ID: LIB3028-002-Q1-B1-H1
cttgcattgggtggagcatacttagaaacagcaactatgtctctcatgcagcttactagctcccctgttggctcactggtccgtttcattgtaatatttgctttatggtacagaaccatggctttggccaagttgccaccaaacgcttcatcagttccagcagttttagcgtttggagattccatcgtggacccaggcaacaacaacaacataaaaacattgatcaagtgcaacttcccaccttatggaaaggattttcagggaggaaacccaacgggtcgattttgcaatggaaaaattccttctgacttaatagttgaacaattgggtattaaggagtatttgcctgcatatttggattcgaatctcaaatctagtgatcttgttaccggcgtctgctttgcctcc

SEQ ID NO: 3995 - DNA, 309 bp, Glycine max
  Clone ID: LIB3028-002-Q1-B1-H10
aaaaaatctttatgcattcggcacaatcgattatgcttaatgttgtggtcaccgattcatcacatcgagttacgcatatctcacacgcacgaaatctagtactaacatcaacaaatccgtcttgctatacaaattgctgcgaaactgtggtggcatggatctcatctatgattgtgctgatccttatcctgattgtcgagtcttgtatgcatttgcatctatcagcatttaagactcattcatgtttgagtgtaaggaaacaactgctcatctgagctacgctctatcttttgtagggatatatgtatc

SEQ ID NO: 3996 - DNA, 406 bp, Glycine max
  Clone ID: LIB3028-002-Q1-B1-H11
gaagaagagagggaaaaaccgattaccgtgccaggattcggttgattaatcaggacaagaacaaatataacactccgaaataccgatttgttgttcgctttagcaacaaggacattgttgcacaaataatatctgctagcattgctggcgatattgttcttgctgcagcatatgcacatgagctgccacgatatggtcttgaagtagggcttacaaattatgctgcagcttattgcactggtctcctgttggcccgaagagtcctcaaaacacttgaaatggatgaggagtatgaaggaaatgttgaggctactggagaggattattccgtggaacctgctgagagcaggaggccattccgtgctctccttgatgttggtcttattaggactacaaccggtaaccg

SEQ ID NO: 3997 - DNA, 287 bp, Glycine max
  Clone ID: LIB3028-002-Q1-B1-H12
aaagagagcaagagcagtacgtgaactggttgaagaaaggtgaagcagcatttgtggcaaaagaaaagtcattgacggaatcatcagagacacattcttgatcaatgtttactcatattttagtcaatgtttttgagagttcggaaaatgattaggttctccgataagtaaactgattagtacaatgtagaataatgtttcttactttcttttgtaaatgatatgcacctcaaattttgtagaagctatataagagaacttctataaaagttaagtgcataagttga

SEQ ID NO: 3998 - DNA, 383 bp, Glycine max
  Clone ID: LIB3028-002-Q1-B1-H3
agtaactccacacaacacaacacaagctaagagaattaaattccaaaccccaaagaaagagaatatccgaaaaatcctaaccagccaaaggagaaaaaagaatcaagttggtgctggcaagagaagggaggcaaaaagaaagaaaaaaagaaagagctacaaagagagggtaccctcgtcgtaaattgcactgtttttgtgtccgttacagcacttttaggagttcctctattctagtaacctctgccaaccaacaaaacaagcctgaaaataaaatagagatgctgcctccttgctggcgatcgttcgggaagatacagtaatgctactgacatgggaaagaacgggagttggttttctgcaatcaaaagagttttcacaca

SEQ ID NO: 3999 - DNA, 407 bp, Glycine max
  Clone ID: LIB3028-002-Q1-B1-H5
attctttcatgtacaagcaagaacagatcatagaagcagatgataatactttgagcatcatgcttgcagaacaacaattggtgcagcttcctcatctagaaagtcattctttgccagaagcaaagaagcaaagctcagtagtgtccccagatatcagacgagattaataacaacgaagatgatgatagtcctcaggagggtttatccaacactacagagaaggtgagcactgattggagagctcttgacaagttcagtggcttctcagttgagccatgaatagaggcatgaaatagaatgggtgtcaagccttgcaactcatcagactactactagctcggacatggcattgctgctactgcagaataatagtacggaaaatgacaggaacaacaagttcaacccgt

SEQ ID NO: 4000 - DNA, 381 bp, Glycine max
  Clone ID: LIB3028-002-Q1-B1-H6
attctgatcgctccctgagagaacacgtcgtggccgttgcagaagaaaattgcaagatgaagttcaagatcgcgaagcccaccactggatggcagaggaaactcgagatagacgacgatctgagcctgcgagcattatgggacaagaggatcgcacaggacgtcatcggagatgcactcggtgaggaatttaagggctatgtcctcaaaattaccggatgttgtgacgtacacggatttccaatgaagcagggagtgctgactcctgatcgtgttacacttttgcttcagaggggaacgccttgcttccgtggatatggaacgcgtaatggagagcgtacgagatagtctgtacgtgggtgcaatgtcagcccagacctct

SEQ ID NO: 4001 - DNA, 404 bp, Glycine max
  Clone ID: LIB3028-002-Q1-B1-H7
atcttcttccaaataaaaaaaaaaaaaagaaaaaggaaggagataggaaagggttaattgaatccaaaaaaaaagaagagaaaaacaaaatgggcagggtttggacttcgatgatagcattgttgctttgcctgatgacatcatcggttcggggcgaggacccttacatttactacacatggaacgtgacctacggcaccattgccccattgggtgtcccccaacagggtatcctcatcaatggtcagtttcccggccccgaaatcaactccaccagcaacaacaacgtggtcatcaatgtcttcaacaacctcgatgagcctctcttgttcacatggcatggtgtccaacagaggaagaactcttggcaagatggcacattgggtgcccagtgccctatcgcc

SEQ ID NO: 4002 - DNA, 282 bp, Glycine max
  Clone ID: LIB3028-002-Q1-B1-H8
catcaattgaattgtgcatacagaaacagttctgcagattatggtggtggtcccaatttccatgctactgaggataagccagtcatattcccccagtcctttgttcaacccaacactacaacacagtcggcaagtttggttgcaccttcatgtgatctaactggtcttggagttccggaggatggacagaaaatgattagtgaccttatgacaatctatgatacgaatgttgtaggaaacaagaacttaagttcctccaactgtgtagctgtaaaaaatcat

SEQ ID NO: 4003 - DNA, 395 bp, Glycine max
  Clone ID: LIB3028-002-Q1-B1-H9
aaagaatctttataaataggggactatattttttgtttaaagtaaattcatcgatctttcacttccactttcgtttttctccctctcaggacatcctgtattaacagtgaaaagtgcatctgaagagacagaatgcaaggacccgggggtggcagggatcgtttctttgattttggcgatccttttggtggttttggaggctttggttcctttggacctcccaggagtttaatctcaagcttttttgggggtagggacccatttaatgatcctttcttcgcccgaccttttggagggatgtttgagtctagtcgctttggtggtcctactggatttcctttcccccctgatatgaatccatctgggttccttgagcatccagcctcgggtttgga

SEQ ID NO: 4004 - DNA, 407 bp, Glycine max
  Clone ID: LIB3028-003-Q1-B1-A1
agcagcctgagctaggtggagggaccgtagagcttggtcctcatactgctgtccaccgttggaccggtgatccaagacaacctaacaaagaggacatggggaggttctattctgctggaagagaccccgctttctattctcaccatgccaacgtggatcgtatgtggaatatatggaaaacaataccaagtggaaaaagaagggatttcaaaaaccgtgattggttggaaacctcctttttcttctacgatgagaacaagacccttgtccgtgtgaaggtgaaagacagccttgacacgaataagatgggttatgtttaccacagatgtcgcaattccaatggctccaaaaaaagcctaaacccaaaagaactagaaaggctaaaaaggtggcgttcgcacaacaat

SEQ ID NO: 4005 - DNA, 354 bp, Glycine max
  Clone ID: LIB3028-003-Q1-B1-A10
gaacaactgatggaaagaaatggaagtgtggtaagaatgtggtgcctaaccagaagtactgtgaaaggcacatgcacagaggtcgaaatcgttcaagaaagcctgtggaaacatctcaagttaactctcctttggcaacaaagccttgtagcaagtcacacaccaaaccatcctcaaagacacaatttgaaatttcaagtccaaaccttatcgccattccacatattgacacatcaagtaccccatcaaggagcctcagtgtcaccaattgctcttctgctaataataggtccaaaaatacggcacgttatgctgactacctcatgtcgttttcttccgcgtccacagtgtccc

SEQ ID NO: 4006 - DNA, 410 bp, Glycine max
  unsure at all n locations
  Clone ID: LIB3028-003-Q1-B1-A11
gtatttgagaaaaccactgtgaagacagctgggaatttgtcacagttgccaccattggaggtgcctcggattcccgatgcattgaggcctccatctaatacgggaagcggtgaatttgaagttacatatcttgactcggatactcgcatcacaagaggagacagaggcgagctaagggtctttgtgattgcttgagttcctggtgaatgcaactatgcactatgcattttctctgttggacttaaaaaaaaaaggtttcaacaccttgtgccatcattttgtttagttttttcctcctgatggtatttgttctaagttcttcaatattgtaaacatgatggaattaaactctactatatagttccaaggaagcanggtactttttgtttaagtgtaacatatttcttttt

SEQ ID NO: 4007 - DNA, 409 bp, Glycine max
  Clone ID: LIB3028-003-Q1-B1-A12
ctcttcccccattttttcctctttcttcctcgcctagctagctccagaaaattaggatctgcttcagatctagtgtttccctgtcccaaatcacgagtccattgagtttgattttgtggatgaaaagcatagatagggcttttgcaaaactctccaatgtttcttgaaattatatgaccatgcgtcgaattcgtatgctgcactccttctccgtcgtgttcctctactggttctacgttttctcatgaactccctcttaaatccgtgattaattagatctatctccttagttaatccttgtcttttccaataattaattagatctgcgtctcctttttggattagtttcttttttggttctgttatcaaatcaaataacaaatctccttctcggaaatggcatcaccga

SEQ ID NO: 4008 - DNA, 355 bp, Glycine max
  Clone ID: LIB3028-003-Q1-B1-A2
caaaagaagggaactgttgaaggagtctcgccaatggtatcagaatgggatgagtatcgatatattattttcttggcatatagttagtgtccagcaaatatcatattcgttatttttgcactttagaaactcgtttcctccaagttgtggtctagatgcttcttgttcgaaggcctgtgagactgtagtcaatttcttagtgtttcggttttgattgaacctgtacatgaactgtcaatttttctcgtgtaaggtttctcatgaaataaccctgttgacacaataacgcagttatttgcatcgatctttccaatcattgtatggcaagaagaagctcaagggacacgagatctaa

SEQ ID NO: 4009 - DNA, 325 bp, Glycine max
  Clone ID: LIB3028-003-Q1-B1-A3
attggttcattctcaagttttgttaaggacttgtatggattgggaggcaggagacttggactgacttcactcccaccattgggttgcctacctgctgcaaggactatatttggtttccatgagaatggttgtgtctcaagaatcaacactgatgctcaaggatttaacaagaagctcaactcagctgcaacgagtcttcaaaagcaacttcctggtcttaagattgcggttttcgacatttacaagcctctctatgaccttgttcaatccccttcaaaatctggttttgtggaggcaaacagaggatgctgtggtacccggactg

SEQ ID NO: 4010 - DNA, 352 bp, Glycine max
  Clone ID: LIB3028-002-Q1-B1-G9
ggcagtgctggtcaccggagttccatagccggttcattaaagctttagatgtccctcgatgttctcaaacatctactcagaacgaaattaaggaactcatgacggtggattagctgacaacttcagaagtccagactcatttacaaaacaagcgacttcatacatagcgagttccagttgctacaactccaagttttagtcagtcagctgtatatctagcatgcttgtgcacgcacactgaatccattaagggtggcagttctgatactcctcacagtccactccatcaatccacacactcgggggaatcaccatcgaccacataaggtgaccacatgatggatcatgatga

SEQ ID NO: 4011 - DNA, 354 bp, Glycine max
  Clone ID: LIB3028-003-Q1-B1-A4
cttcgatcatacacttagttgcttccaattaagatggttctgctagagaagctctgggatgatgttgtggctggccctcaacctgagcgtggccttggcaagctcagaaaactcaccaccctcaaaactattgatgaaggagaaagtagcaagctgcagaagacgttgtcgatgccgtcgacaccaacaaccccgatgactccgacgactccaacgacaccgggatcggcccgtaaagctgacaacgtttggaggagcgtcttccatcctgggagcaactccgccacaaagaccatcggtgctcagatgtttgacaaaccacttcccaacactcccactgtctatgactggctg

SEQ ID NO: 4012 - DNA, 358 bp, Glycine max
  Clone ID: LIB3028-002-Q1-B1-F5
acccacattattagcactaacgataagaagaagaaaaagtcgtctctattgagccgcctcagggtggccgtgcagaatgtgaagttgctactaaacgccaccgtactcagccacgcgtggcatgctgcaatcattcgccgcggcgtttctctgagcaaacgccagatcagtttcaacgatcgaccagggttgatgatgtgcactgcttccgatgaaactgattcagaggatttggtttctcgagcgcataaccttcataggatcataagttgtccctccgatgatgatatcgattagagagcagagatgtctataaataatttcagacgccagcttaagatggagaggcaaatctcgc

SEQ ID NO: 4013 - DNA, 349 bp, Glycine max
  Clone ID: LIB3028-002-Q1-B1-F6
gttttcgcctctctctctctctctctctcttgcaaccttttctctgtttcttctaaaagtcgcagcacagcataagataagccttcgtcatcttcgtcttatgtgattgacgtgtgtctacgacggtgatccatttctgtagcgtctggtgaaaagctaacttgttcactctaatacgtgtacagtgctaaagggtaaactttgaaacctagcttcctagttgaatcatcagaagcttagaagtcgaatccatatttttctggacgtatagactttcgttgatttccctgagaaatgatgatgatgcttgaagatatgggattttgtggggatttggatatgttttctg

SEQ ID NO: 4014 - DNA, 396 bp, Glycine max
  Clone ID: LIB3028-002-Q1-B1-F7
gtcgagccgaatcggctcgaggttttttttgccccttcttagttcgcgctccctctgccaaattttccacctaagagcgagaaggcaaaaatctgtgatgaaagacgaagcaagagagaagttcaataagttgcagcttgcctagaccatatttttttttgttcacaatttaatatatggtaacaagcctgtggtgtggccatagcaagaagggagagaaatcaaaataatttaaggttgagatgaggaagtgtgagctctgtaacagtcacgcgaagttgttctgcgaatcagatcaagccagcctcctgttggaaatgcgatgctaaggttcacagtgcaaacttcctcgtcaccagtcatccgacgattcatcgctgccatgtttgtcaatca

SEQ ID NO: 4015 - DNA, 405 bp, Glycine max
  Clone ID: LIB3028-002-Q1-B1-F8
gtcaataatgagtaatatgaagttattaaattctgtgctgcaagtgaatcaatttgcaatagatgttgaagttgtaggacaaggcaagccacaaaatggtcttaagggaggaaatgaagctctggattttctggatgttgaaaagctccattccctgtctcagaatgaactgttggaatgttttcattcattgggagatcaattgatctatttatggaaaatatttctaaagttccatagggataacaaatcaaggattttaggatttttacgtgatgcatgggtgaaggaccggaaagctgaatggtcaatatggatgctatattctaaggtagagatgcctcatcattacataaacagtaagagtgaagagtcttcccatcgtggtgtacacagacgagtttc

SEQ ID NO: 4016 - DNA, 404 bp, Glycine max
  Clone ID: LIB3028-002-Q1-B1-F9
ggaagaagaacttacctacaagctaatgaaggatcagctagaattgctcaagcattggcatcaatgactagcttacgtggttcctctcaggctgtgttggaaggtagccatggctccacacgctctgaatgtggggagtggaagcacggtggcctcagtcacacgtgcagggttcacagttagagcacagcaacaacaagtgaatggtggtgaggtacaaacttgccgtaaggcagtgctttcacttgttgctgctggatttaccaatggctcttttgttcatgctgtgcttgctgatgcccaacctatcaaagttggaccatctcctccaccttctggctgattacctgtaacattgaactcagatgaaccaagagaccttatgctgccattgacagataagt

SEQ ID NO: 4017 - DNA, 403 bp, Glycine max
  Clone ID: LIB3028-002-Q1-B1-G1
gttccacggtggcgggtgggtgagcgggagcaacgattcggttgcgaacgacgtgttctgccggcgggtcgcgaggctctgcgaggcggtggtggtggcggtggggtaccggctggcgccggagaatcggtatccggccgcgttcgaggacgggctgaaggtgctgaattggctggcgaagcaggcaaatttggcggagtgcactaagtcaatgggggggaggaggaggttggagggtcagcacaagcatattgtggaaacctttggggcatcagtggttgagccttggttggctgctcatggaaatccatcaaggtgtgttcttcttggcgtgagttgcggtgcaaatattgcagactatgtggctcgaaaagctgtagaaacaggcacacttttggaccct

SEQ ID NO: 4018 - DNA, 410 bp, Glycine max
  Clone ID: LIB3028-002-Q1-B1-G10
attccattcttttgaatccaaagccacagtcaccagatcaaaatccccaaaacacatcatcgactgaatcgaacaaatgagagagaaagagaaccatccttcgacaaactccgaggacgaccaccgatcctccttactggatctggcgcgtgccgaaatcacggaatcctctaactccaagacccgaacctgcggttcgggtcttggttcgggttccggcacctctgagcctcaggctcccttcccggaccaggtcctcgagaacgtgctcgagaacgttctccacttcctctcgtcgcggcgcgaccgcaacgccgcctcattggtgtgccgctcctggtaccgcgccgaggccctcacccgattcgagctcttcatcggcaactgctacgcgctctcccacactcgcg

SEQ ID NO: 4019 - DNA, 393 bp, Glycine max
  Clone ID: LIB3028-002-Q1-B1-G11
cggatatccacttcctcttcttctcttcccatttcccttccaatctcctaatttctcttcagcttctgggttctccattttccttcgtcttctgcatctgcattccgtagattcagttctcgtcggaaaatggacgttcgccgaagacccattcctccctccggcgatcgccgacaaacccagaagctgaagaacaccgccaccaccgattcgcagactcttctgcctctctacctcaccaacgccctcttcttcgcggtgttcttctccgtggcctacttcctcctccaccgctggcgcgagaagatccgcaccgccactcccctccacgccgtcacccccgccgagaccgccgccatcgtctccctcgtcgcctccgccgtctatctcctc

SEQ ID NO: 4020 - DNA, 374 bp, Glycine max
  Clone ID: LIB3028-002-Q1-B1-G12
caatcatatagaaaccctaatttgttacacctagcttcttccttcattttctcatcatcaatattcaacaacatggctaatttgcaaggagggcctgactttgacaaaatctttcacttcctctccatttgcatccttgctttcatcaatgaaggctcttcctccctctcaagtgcattcatgaatgaaccatggtcatggggcctaagcattcccataagtttgtacgtgaaattcgcacttgagattcacactcaccttggaatctgcgttggggttggagtaccctctttggtctattggggtgccacacgtggtgccattgattggtactgggaagcagcattgaagttcaaccacgagatcttcaagac

SEQ ID NO: 4021 - DNA, 408 bp, Glycine max
  Clone ID: LIB3028-002-Q1-B1-G2
aaaagaccaggaaagatcccaacagtgagaaaccaggcgagatatatgttccaagagatgaaaacttcggtcacttgaagtcatctgatttccttacatatggaatcaaatccttatctcagaacgtgatacctttgttcaaatctataatatttgacttaagggtcacatcgagtgagttcgatagcttcgacgaagtgcgtggtctctttgaaggtggaatcaagctgccaacaaatatactgagccaaattagccccttatcagtcctcaaggaaatcttccgcactgatggtgaaaatacccttcaatttccagcacctcatgtaatcagagttagtaaatctggatggatgactgatgatgagtttgcaagagagatgattgctggtggtaatccaaatgtaa

SEQ ID NO: 4022 - DNA, 342 bp, Glycine max
  Clone ID: LIB3028-002-Q1-B1-G4
ccctgttggatagaatggaggttgttgctattgccgggtatattactgatgagaagatgcatattgccagagaataactggaaaaaaacaactcgtgaagcttgtggaataaagcctaaacaagtggaagtgactgatgctgctattcttgccctaatagaaaactactgccgataagcacgggtcaggaatcttcaaaagcacatagaaaaaatttaccgaaagatagcgctacaactcgtgaggcaaggggaaatgattgatgcaaccgtggaaccaataaaagaatatatagactctgatgaatttggtcaaaatacagttcaaaataagaactccgag

SEQ ID NO: 4023 - DNA, 399 bp, Glycine max
  Clone ID: LIB3028-002-Q1-B1-G5
tttcgttaacgcatccttcgacctcgctactatacccttcaacgacggctattctccgctcttcggagctagcaacgttgttcgctccgaggatggatacggcgtacaactccgcctcgatcgctacacaggttcgggtttcatttcctccagtatgtaccagtatggattcttcagcgcgagaatcaagttaccatcgaattatagtgctggtatttgcgtggccttttatacatcaaacggtgatgtgttcgagagtcccatgatgagttggactttgaattcctaggtaacgttgccggaaaaccatggcggtttcagacgaacttgtacggcaacggcagcacaaatcgtggccgtgaggagcggtaccgtctgtggttcgatccaaccaaagaa

SEQ ID NO: 4024 - DNA, 400 bp, Glycine max
  Clone ID: LIB3028-002-Q1-B1-G6
gttaagtcagagatactgaggattatgaaggaagcttctcacagtctgaagcagagtttgccactgttagcacggagaagaacgagaaacatttttccttctatgtaattttaactctaatttctttcttttttttagttttatcacttgagagttcttttaatgtatattttttgtatgtatttttaggccgttctacctccagggattgacccttttgtgtatgctagggaatacaacgttcatcctgacataataagcgtacatcctgacataataagcattgggtttgcattcctctattcctcagttgtttttgcaattttatcatagataaggaactggttagaggaaattatcatatggtgaattatcgtgtgtattttctagcaaggttata

SEQ ID NO: 4025 - DNA, 409 bp, Glycine max
  Clone ID: LIB3028-002-Q1-B1-G8
cgttaaattcactgccatctgcatttacctccaatacgacgccctttccttcctctccgttaagtggaaaaccaagtctgctcaccagttaacggaatccgaccaattcttctcagatatcgttacaggtccattcgagaaatttatgcaggtgacaatgatcaaacccttgacggggcagcaatactcagagaaagtggcagaaaattgtgtggccatctggaggtctctcgggatttatacagattcagaagccgaagcaatagacaagtttctttctgttttcaaagacctaacattcccaccaggctcctctatccttttcactgtctcacccaatggatcattaacgataagtttctctagtgatgaaaccattccagaagttacgagtgctgttatagagaat

SEQ ID NO: 4026 - DNA, 406 bp, Glycine max
  unsure at all n locations
  Clone ID: LIB3028-002-Q1-B1-F4
cggttaaagtaattcgaaacaagcaaactagtcaatctgaaggttatgggtttattgagtttaatagtcgtgctggagctgagagaattcttcaaacatataatggggcaataatgccaaatggggggcagagtttcaggttgaattgggcaacttttagtgctggtgagaggtcgcgccacgacgattctccagattacaccatatttgttggtgacttggctgcagatgttactgattatcttcttcaggagacatttanggctcgttataactcggtgaagggtgcaaaagttgtcattgatangctaactggccggaccaagggatatggctttgtaaggttttcagatgagagtgagcaagtgagggctatgactgagatgcaaggggttctttgctcaac

SEQ ID NO: 4027 - DNA, 408 bp, Glycine max
  Clone ID: LIB3028-002-Q1-B1-D6
cgaaccgtgcacccctttgtattttgaagcgatcaacacgcgcaaccactgccatgatgatgcaaatcaacatcacctccaccacctcaatcgtcacggcgttctcttcggatcattcgacgaatgttctaccttgagccatgtccaacctcgttcagattcgcgtcaccgccgacgctagcgatggcttcgactctccggcgatgcataaagcagccaacagcagctcctacagcaatcgcacctttctctcgctcagccgcgccaaacagttccccggcgccgccaagttcaagcgcttcatacttcgttttgctctctccaacgtcgttattgtcgcctccagactcagttcgtgtatgggatggacacctcaccacccttcttcggtttcctccacgtcaaggg

SEQ ID NO: 4028 - DNA, 390 bp, Glycine max
  Clone ID: LIB3028-002-Q1-B1-D7
aaatggtgctgttgaaacttgtggtcaaagctttcaccgatttgacaagtaccttaacttttcaaatcctcacatcgcaagaaattttgatccaaatgcttgtggttgggcatacgggatgaacatgtttgatctgaaggtgtggaaaaagaaggatatcaccggcatatatcacaagtggcagaatatgaatgaagacagggtgctgtggaagctggggacgttacctccggggctaataacgttctatgggttgacacatccactagataaatcatggcatgtacttggtttgggttataatccaagtttggatcgatcagagattgagaatgcagcagttgtacactacaatggtaatatgaagccatggttagaaattgccatgac

SEQ ID NO: 4029 - DNA, 406 bp, Glycine max
  Clone ID: LIB3028-002-Q1-B1-D8
tgcaattcccccttttggaagatggttccacagtcagtgataacgcaagtctccgattcaagtggcgtgaatgcgatatcaaacgtttcttctggccacggattctacgattggttgttcgaatgtcacgggttctggcacaatgccactctcaacatcccctcgttcctcttcgtcttctacttggcacttcaagccaggcacagcttactcaaactctcccttgcgcgctcctatataatcatttcatataacctttgcctctggctcattactctgctcaatctcgcttggtgctttctccaggcatgggagtgcacgtctgggagaaagttgacatggaacctgttatccttgttcactacttccggaatgctgtttttggaagtgagcttgctggcttttt

SEQ ID NO: 4030 - DNA, 395 bp, Glycine max
  Clone ID: LIB3028-002-Q1-B1-D9
agcatctttacctcttccattttatacaccagtatcgctctgtatttgtttcatcctcctaactgaaccctaatttcttctgggaaactctattttctctaatatggagcaatactggtctgggagtgccatcaatgaaaacaaaggaatggtagataatttgcatcgttatggagtaatcacatctagaaaggtagctgaagtaatggaaaccattgatagagctttgtttgtacccagcggcggcggactccaaccttatgtggacagtcctatgccgattggctacaatgccaccatctctgcgccgcatatgcatgccacctgccttcagttgcttgagaagaatttgcaacctggaatgcgtgttcttgacgttggctccggaacgggat

SEQ ID NO: 4031 - DNA, 398 bp, Glycine max
  unsure at all n locations
  Clone ID: LIB3028-002-Q1-B1-E1
gtgttcatggacactggaagcatcacgatgtcaccgttaaggacgagaagacccttctcttcggtgacaagccagtcactatttttggacacagaaaccctgaagagatcccatgggggtcaactggagctgacatcattgttgagtccaccggagttttcaccgataaggacaaggccgccgcacatttgaagggtggtgcaaagaaggttattatttctgcccccagtaaggatgcccccatgtttgttgttggtgtcaacgagcacgagtacaagccagagcttgatattatttccaatgctagctgcacaaccaactgccttgccccacttgccaaggttatcaatgacaggtttggcattgttgangggtttgatgacactgttcattccatc

SEQ ID NO: 4032 - DNA, 415 bp, Glycine max
  Clone ID: LIB3028-002-Q1-B1-E10
agagagaaagaactgacctcagcggcggcggcggcggcaacagaagaacaaccaccaccacacacaatgggtcgcgtgagaacaaaaacggtgaagaaatcctcccgccaggtgattgagcgttactactcgcgcatgaccctcgacttccacacaaacaaaaagcttctcgaagaagtggccatcatcccttccaagaggctgcggaacaagatcgcgggtttctccacgcatctcatgaagcgcatccagaagggtcccgttcgcggcatctccctcaagctccaggaggaggagcgcgagcgccgcatggacttcgtccccgacgtctccgccatcaacaccgaccacatcgaagtcgacaaagaaacccttgacatgcttcattccctcggaatcaacgacatccccggca

SEQ ID NO: 4033 - DNA, 318 bp, Glycine max
  Clone ID: LIB3028-002-Q1-B1-E2
ctctacccgttcgtctccgtggtggcatgcatatcgtcgtcaataatcacactggtatcttcggtaccctacaggtctagagctctgaaaccattgacaacgtcgaggccacgatgcaggacaaggatggaatcccccctgagcagtaacgtcgcatcttccccggaaaggaacttgaggactgacgcacccatcggagactacaaaatgcgtaatgaatcaagccttcacctcgtcctccgtcacctttgtggcaggcagatccgcgttcgaatcctcaccggcaagacaaataccctacaagtccagagctccgac

SEQ ID NO: 4034 - DNA, 124 bp, Glycine max
  Clone ID: LIB3028-002-Q1-B1-E3
agaatcacgaaaaaggaataatccacaaccatggcatggaaaatgacgaacgcagcatcgaagattttaagccgaaaccgcgtcctttaccgattcgttgcctccacacgtcccctccgcaccg

SEQ ID NO: 4035 - DNA, 388 bp, Glycine max
  Clone ID: LIB3028-002-Q1-B1-E5
ggattcaaagccattgcccttactgttgataccccaagactaggacgcagagaagctgatatcaagaacagattcacactgccaccatttttgacattgaagaactttgaaggattggaccttggaaagatggacaaagctgatgactctggacttgcttcatatgttgccggtcaaattgatcgtactcttagctggaaggatgtgaagtggcttcaaacaatcaccaaactgccaattctggtgaagggtgtgctgactgctgaggacacaaggatagctgtacaaagtggtgcagctggaattatagtgtccaatcacggagctagacaacttgattatgttccagccactatatcagccttagatgatgttgtcaaagctgctg

SEQ ID NO: 4036 - DNA, 399 bp, Glycine max
  Clone ID: LIB3028-002-Q1-B1-E6
gggtgggcttgtgaaaacggattggagcaaggtcccattcacagcctcatacaaaaacttcacttcacaagattcttcctccaatggccaatcactggacgccacggggcaggcaaagatcagttgggtgcaaaagaattagatgaattagaattaatgcactgataacagacgtttccttcaaggccttcctccagaatgcgctattgcatgagaatatgaaattcaatgttgcatatcactagtaaatgatcctcatgaacgtgacacatatgtgttgcctattacgttaagtgactttcctagtgtaattagctcaattaaacctgttactattgttggtttgtgctttgttgatcactactccattgtttgttgcgatagatacttagaccgtgc

SEQ ID NO: 4037 - DNA, 398 bp, Glycine max
  Clone ID: LIB3028-002-Q1-B1-E7
catttggaaagtgttgtttttctttttttcatttgcattgcaaagcaaaaaccttgcaaattgcaatggcttccaacaaggttattgccaccatcttggttctttctctccttgcctactcaacatcattcaccaatgcatgtggcacatgccacccaaaacctactccttctccccctcctccatcagggaagtgccccaaggacacattgaagctaggggtgtgtgctgatgttctaggacttgttaatgttgttgttggttcccctgtctctagcaagtgttgtgcattgcttgaaggtttggctgattcggaggctgcactttgcctttgcactgctattaaggccaatgttcttggaatcaacttgaatgtgcctatcacactcagtgtgcta

SEQ ID NO: 4038 - DNA, 399 bp, Glycine max
  Clone ID: LIB3028-002-Q1-B1-E8
gagaaagggaaaggttttctatctgatctagctgtggataatcatgaggtgaaggaaacagattttcccttttcagagaacaataatgagcttttttcagtttcaggaaatgagggactaagagaaactgaagtggttgtggttgaaacattttttaagtccatgatgtttggtggagaggagaaggatgttttgtcttcagttgtgacagataagttacttagagagagtgaggaaccaaatgaagtctatggtgattcatctttgcctctaactgatgtggcttcagaggaaacaagtgttccaaaatcagatgacagtgaccaggttgctccaaccataattgagaaatcattggatttggagccaactttggacgagacagttgaggaaccatca

SEQ ID NO: 4039 - DNA, 400 bp, Glycine max
  Clone ID: LIB3028-002-Q1-B1-F11
cgcaattcaaaactctcactccgttataagcaccaaatcctgatggcaccagcggcagagaagaagccagcggagaagaagcccgcagaggagaagaagtccacggtgggagacaaggctccggcggagaacaagccataggccggaaagaagcttccgaaggagggaggcgccggcggctaaaggaagaagaagaagagaaacatgaagagcgtggagacatacaagatctacatcttcaaggttctgaagcaggttcaccctgacattggtatctcaagcaatgccatgggaatcatgaacagcttcatcaacgatatcttctataagcttgcccaggaatcttctatacttgcccgctacaacaagaatcgcaacatcacttcaagggaaattcaga

SEQ ID NO: 4040 - DNA, 408 bp, Glycine max
  unsure at all n locations
  Clone ID: LIB3028-002-Q1-B1-F12
caattgatgagggtttatggagccttaatgtggtcacttgggaaggtgctgaagacacctgaagtaatgcgagtgtatattggctccttcaatgacaagcctgtaaatgatgctgccactggtccacttgggaaggaactctttgaaaaggaacaggatgatctactctcggatctgaaagatgtaccaaaagcagcttgtgatcgaagaatcaatgagtttgtaaaacgggcccgagcagccaagatacatgcttacattatcagccatcttaaaaaggagatgcctgctatgataggcaaagctaaagctcaacaaaagctcatcgataatttggcagctgaatttggaaaggtacaaagggagttccatttacctcctgncgattttccaaatgtagagtttttc

SEQ ID NO: 4041 - DNA, 389 bp, Glycine max
  Clone ID: LIB3028-002-Q1-B1-C1
ctacgttctaggagaccaatatagatcagattccaaaacagttaaccaacaagcttatttctatgctaaatccctcaaactcaccaacaaagatgtctttgtcttggacgttgacgacactactctctctaatctccagtattttgctaaccatggatttggtgtggaaccacacaatacgacggcgtttaagaactgggttcttgatggcgaggcattcgcactgccagagactcttaaaatgtacaacaaactgttggctctcggcatcaagattgtattcttatcagaaagaccactgagtctaagggatgtaacagccaagaacttaaaggaggttggattcaacacatgggagaagttaattctcaaggattcatctgagtact

SEQ ID NO: 4042 - DNA, 409 bp, Glycine max
  Clone ID: LIB3028-002-Q1-B1-C10
tagacacgtaatcaaaaccatgcagatacgaacctgccactccatcaccacccaaacccttccacaacttccgtgttcttctagaaaagcccaccaccgccaccttcttccgccgttaaacgctgcggtttccgcggcgccgttcaaagcccggaaggcccactcaatgcctccagaaaagaaagaaattttcaagtccttggagggatgggcctcggagtgggtcctaccgctgctgaagcccgtggagcaatgctggcagccacaaaacttcctccctgacccctcccttccgcatgaagagttcagccatcaggtgaaggagcttcgcgaacgcactaaagagttacctgatgagtactttgtggtgctggtgggtgatatggtcaccgaggacgcgcttcccact

SEQ ID NO: 4043 - DNA, 404 bp, Glycine max
  Clone ID: LIB3028-002-Q1-B1-C11
ggagaggaagattctgaagatggtggaccatccgttcctccctacgctctacgcggagttcgaggcttcgaatttctcatgcattgtgatggagtattgctccggtggggacttgcactcccttcaacacaaccaccccaataaccgattctctctctcctctgccaggttttacgcggctgaagtactggttgcgttggagtatctccacatgctgggaatcatctacagggatctgaagcccgaaaacgtgttggtcagatcagacggtcacatcatgctttccgacttcgatctctctctatgctccgatgctatcccagccgttgaatcccctgactgttcactggaccccgcattcgcacccgcgttacgctacactcgccagtactccacccccttct

SEQ ID NO: 4044 - DNA, 398 bp, Glycine max
  Clone ID: LIB3028-002-Q1-B1-C12
ttcttctctttctcaaatccctatcttcaaaatttcaagattatcactttaaagacagatttttttttttttgacaaaaaaatgactctggctatggctgtttggagtgctggtcttcacttcagtgctgctcgtagtagcttgagacctttggagaaaaccatttgcactgcccctttcttgaaggcgtcatctgggtttgctgctactaagccattctgcatccttaacacaacaagattgtcatattctggaactacaattatccctcgagcagcacctgttactgatgtgaaggatgggaatcaaggtgagactgataccattccaactcccgtagttataattgaccaagactctgatcccgatgctaccgtggtggagataacttttggtga

SEQ ID NO: 4045 - DNA, 391 bp, Glycine max
  Clone ID: LIB3028-002-Q1-B1-C5
cattttggccgttcaattctgagtcttcgtcaagaacaggttcactccatttccatggaagggtcaagcttggaggctgagttggaatcctttcagcaacacgtcactgaccggttccttgaactcacttcggttgttcatgatgatttgctttcgctctcgtgggttgggaagctccttcattgcttcctgtgttgccaagaggaattcaaggccattctccacagccacagggctcaggtgttgagacccccattggatcgcatggtgtctgaatactttgagcgcagtgtgaaggctttagatgtttgcaatgccattcgtgacggtattgagcagattcgccaatggcagaagctgttggagattgtgctctatgcattggggcatc

SEQ ID NO: 4046 - DNA, 293 bp, Glycine max
  Clone ID: LIB3028-002-Q1-B1-C6
atctctttatgtacggtccggtcgttgaagggtcagagatagagcggggttcccatcaatataccaaacttcatcgtcatcgttaaatacttcaacaactacagcgacgtcgtcagtatgtatcgagtgaaagatcacaacgtcttctcgagaatggtactgtactacagcggccatgtggcaaagtcgacgttgcaggcgcatgaaaatacgtggtttcaacgatgggatgcgcccacggatgattccgacaacttccgatggttcgggtctagcacgaattgcgatccata

SEQ ID NO: 4047 - DNA, 393 bp, Glycine max
  Clone ID: LIB3028-002-Q1-B1-C7
aaatcttcatttgcatacttctacgtttatgttattttccacttaaaaggttagatctatgttctatagtttacatgggtctgtatattttctttcacttacaggttctggtaggttttatttctgttaatgttcattaagtctttttatcgatgtgaagatctttcatatttatgttttgtaattgtaatatactttgagtttgaaaacgtgggtatttggttgataagcttgagcagattagtcatgcaatgtggttggatttgttttttgacttttcaagtttttactcatttctgatctttttccatatatgagtcagtttctgccatagcatttgtggcctaacatgctctttataaatatgttagctataatgacatttaattacta

SEQ ID NO: 4048 - DNA, 407 bp, Glycine max
  unsure at all n locations
  Clone ID: LIB3028-002-Q1-B1-C8
ccatccgtcacgccgtgacccaacggggccccttgtggatcatcttccaacgcagcatgatgatcaaattgaatcaagagctgatgatttcctccgacaagaccatcgacggtcgcggcgccaacgtggtgtgtagggacggcgctggcctcaccattcagttcgtgaacaacgttatcatccacggagttcgcatcaagaacatcgtacctaaggagggtggcatgattagagactcttacaaccatgttggcctgagaacagagagtgatggtgatgccatctccattttcggagccagcaacgtttggatcgatcatgtttccctctctaactgtgctgatggtcttatcgacgtcatccatggctcnactgccatcaccatctcaaattgccacatgaccaaa

SEQ ID NO: 4049 - DNA, 405 bp, Glycine max
  unsure at all n locations
  Clone ID: LIB3028-002-Q1-B1-C9
cgaagatgttactgttggtaacttttttgctgctttacttggaaacaagtcggcacttactggtggcagtgggaaggttgtggacagtggacctgatgatcatatatttgtatactatactgaccatggaggtccaggggtgctcgggatgcctgctggtccttacttatatgcggatgatctgattgaagtcttgaagaaaaaacatgcttctggaacgtataaaaacctagtattttatctggaggcatgtgaatctgggagtatctttgaaggtcttcttcccgaagatatcaatatttatgcaaccacagcttccaatgcagaagaaagtagttggggaacatattgccctgnggagtatcctagtcctcccccagaatattcaacctgcttgggtgatct

SEQ ID NO: 4050 - DNA, 400 bp, Glycine max
  Clone ID: LIB3028-002-Q1-B1-D1
gcatgaatcttgccattggtgacattcgcgccgagcatgaggcgcattcgagggagcttgttgagaaaggcatgaagatggaggctgaccttagggcaaatgagcctttgaagaatgaggtcatgcaactgcgatctgaagttaagaaacttaacaatctcaaacaagaactgacagggaaggttcagacactcactcaagatgttgcaaggttacaagcagacaatcaacaaattcctatgatgagggctaagattgatggcctgcaccaagagctaatgcatgccagaaccatggtggattacgaaaagaaggcaaacatggagttcatggaacagaggcagtcaatggagaaaaatttggtttccatggcccgggaagttgagaaattacgtgctga

SEQ ID NO: 4051 - DNA, 409 bp, Glycine max
  Clone ID: LIB3028-002-Q1-B1-D10
cgagaacaccgcaacgatgaaagagggtcgggccgaggcctccatggtaatgttcggagccctcgacgagctcttcgagaaaacccgcgtccgaccaaaggacgtgggtgtcctagtagtaaactgcagcatcttcaaccctacaccatcgctctcagcaatgatcataaaccactacaagatgagagggaacattctgagctacaacctcggaggaatgggttgcagcgccgggatcattggtgtggacctggccaaggacattcttcaggcgaacccaaataactacgcggtggtggtgagcacggagatggtggggtacaactggtaccaggggaaggataggtctatgcttatcccgaatagcttcttccgcatggggtgttccgcggttctgctttccaaccgt

SEQ ID NO: 4052 - DNA, 402 bp, Glycine max
  Clone ID: LIB3028-002-Q1-B1-D11
caaattgtgattttccctgaatcttatacaatctttggaaataaagtgacttggatgtaatcacatgtaaacattagaatgaagataaaatattgttctctccaactaaaaagctctactgttactattgtctgaatttatacatgagtgatgtaacatataaacattaaagatgaaaacaaaaatgttctcttcaaaccaaagtgctctaatccttgccagtattgtcagaagttattcgagaatgatgtgttaaatcttagcttgcttactgaaaatgggaacaccaaggatgacctgaagttacctacagatgagagtctgcttactcaggtttgtacaaaccaactgtttttgtgtgtcgcaattgcagcctggaagtttatgatcttggatacattg

SEQ ID NO: 4053 - DNA, 406 bp, Glycine max
  Clone ID: LIB3028-002-Q1-B1-D12
gcatgtcttcctccggctatagttgttgcagatctcggatgttgtaaaattagtgtatgatgtgaagctatgggctggaaaatgtggatgtaggagatttcgggacgaaaggcctcaaaacgcttcgtcgtttgtggttactgagtcctgagtgatcttgtcatccgacctttgccatgacaggtgcgcttgcttggcaggtcaaaatatgttaataaaaaaagttttattggtttagggagagatcgcacgggagttgcccggggtctctctctcgtgtggtgtgtggtgtttgctgtgctctccttttcgttatgccttttattattacctatctgtcgctccactccgtattacgactctggatcagagggatacatcagaggattcgctccaactcctatcg

SEQ ID NO: 4054 - DNA, 358 bp, Glycine max
  Clone ID: LIB3028-002-Q1-B1-D2
atttttcaagtgacttaaggtttcaaacctaggaagttggaagtcatggcagcaacattgatggcagcaacaagttctggcactcttaaagcaactcctttcctaggccaaggcaagggtgccaatgccaatgctcttagggatgttgtttccatgggaactgggaagtacaccatgggcaatgatttgtggtatcgaccagacagagtgaaatacttgggaaccttttcagctcagaccccttcatacttgaaaggagaattcccacgggattatggattggacactgctggcttatctgctgaaccggaagcaattccaagaacagggctcttgaggttatccatgggagatgggc

SEQ ID NO: 4055 - DNA, 403 bp, Glycine max
  Clone ID: LIB3028-002-Q1-B1-B7
tagagaatgatgatgaagtctgctatgtgtgcagtggtggttgtagcacttcttcttctggcggaggtggggcccatggctgaggctgtgacatgcaccccaacagagttgagtccgtgtcttccagcaatcacttccggtgctaaaccttccaatgcttgttgcacgaagctgaagcagcaaaaaccatgcttatgtggctacctcaaaaacgctagcttgaagcagtatgttaactctcctaatgcccgaaaaaccgttgcttcttgtgggattccctttccaacttgttaattaattaagccttcttataattaaagtgtgggatatatatatatatatagataaacagtttaatttatacacactttgatcctacaaagcatcttgacacaagcattca

SEQ ID NO: 4056 - DNA, 405 bp, Glycine max
  Clone ID: LIB3028-002-Q1-B1-A1
gcattgttcatttctgtctcactgagagaaactctctctctctctctctctctctctctagaaaccctattgcacgttttgcaatcgaactcgacaatggccaacagcaacctccctcgaagaatcatcaaggaaacgcagcgtttgctcagtgagccagcacctggtattagtgcctccccctctgaagagaatatgcgatatttcaatgtgatgatccttgggcctacccagtcgccttatgaaggaggcgttttcaagttagaactatttttgccagaagaatatccaatggctgctccaaaggttaggtttctaacataaatatatcatccgaacattgataagcttggcaggatatgtcttgatattctgaaagataagtggagtcctgcacttcagata

SEQ ID NO: 4057 - DNA, 406 bp, Glycine max
  Clone ID: LIB3028-002-Q1-B1-A11
ttgatgagtctttttaaagacctattttatattaaagttttatataaatttagcttctctttatattggacattattgacttataaattttttagaaaaattttatataaattatagttttatttatataaaatcaaaattatgattattcaaagcatgaaataaagatgaaaataggtgaactaaattctataaaagtcaagtttagaggactccatcatctgccactatgatggcgttgattggctcagtgtgtgccttgatggtctctatgcacttcaggtctgagattctccacactttcaccgttttgtccagggaagctgtgtatagaatgtcctctgctgtgtttattgccattgccgtgattagccccttgtgcatctgttaagtcatcatgtcaaac

SEQ ID NO: 4058 - DNA, 399 bp, Glycine max
  Clone ID: LIB3028-002-Q1-B1-A12
ttcagcgatttcgatctcgcatagcattctacaatggccactattccagttaaccccaagcctttcttgaacaatttgactgggaagcccgtaattgtgaaactcaagtggggaatggagtacaagggctatctcgtttccgttgattcctacatgaacttgcagctggccaacactgaagagtacattgagggacagtttactggaaatttgggagagattttaatcagatgtaacaatgttctctaccttcgaggagtaccggaggatgaggaaatcgaagatgttgcagaagactagatagtgataaaagctgctaatggctatgacataaaatgaactcgaattttctactgtttttgtatcttaacttaaatgtaggtttttttgtagttgtgt

SEQ ID NO: 4059 - DNA, 406 bp, Glycine max
  Clone ID: LIB3028-002-Q1-B1-A2
attcaacttaagaagatcaatatggccaccaccactacccagcctccctctaatatctgttttttccttctgttgttgcttctagcacactttcatttgggcataagccaacttgagctgaattactactctaaaagctgcccaaaagctgaagagatcatcaaggaacaagtcacacaactatataacaagcatggaaacactgccgtttcgtgggtcagaaatctcttccacgattgcgtggttaagtcatgcgatgcatcattactgttagcgacggtgagcgatgtagtgtcggagcagacatcggatagaagttttgggatgagaaacttcaagtacgtaaacactatcaaagcagcggttgagaaagaatgccccttcacagtgtcatgcgctgacattg

SEQ ID NO: 4060 - DNA, 338 bp, Glycine max
  Clone ID: LIB3028-002-Q1-B1-A3
ctcgagcgaacattattagtactagcactgtactttgccgaaactttcttgactctcctgtttcgccaattcacctcccaaattggaaagtgtgattcaaaagcttaaacgttgcttttgataaaggcgaacagcatcttttccccctcagccatttacaggtctagttgaagctagcagtctaaaaatggagatgtaaaccagataatccattattacaatatgttggattaggtcactcggaatgcctttgtcaagatttttttctattacagtacatcgcatatattggttgtatactgctccgtagaataaataagatcatattaataccacac

SEQ ID NO: 4061 - DNA, 226 bp, Glycine max
  Clone ID: LIB3028-002-Q1-B1-A4
caacaacaacaacttccatttgatgtttggttccccttgtgatttggcatcctttgatttcaaggaggatatgcaacgaggagtagtatggatggatgctcttcagaaacagcctgatatccctacttggtaccagtgaaaatgacagcttaaagcttgaaacctcctcatcatcttcatctatcatggactcttttattttccctctaaaatggttggcaccccc

SEQ ID NO: 4062 - DNA, 383 bp, Glycine max
  unsure at all n locations
  Clone ID: LIB3028-002-Q1-B1-A5
tttctacacatccctagctctgtcgttccgtcgttgacgatggcgtttcgggtgcgaagccctgacctccgctctctctttcttctctctctcttgtccatcgcttccgccaatgtcttcttcgaagagcgtttcgatgacgggtgggaaaatcgatgggttaaatcagattggaaaaaagatgagaacgtggctggggagtggaaccacacctctggtcaatggaatggagacgctaatgacaaaggtattcaaaccagtgaggattacagattctatgctatttcagctgagtaccctgaattcagcancaagggtaagacactagtctttcaattttctgttaagcacgaacagaagcttgactgttgtggtggctacat

SEQ ID NO: 4063 - DNA, 397 bp, Glycine max
  Clone ID: LIB3028-002-Q1-B1-A6
agccattcaggttggatacaggcatattgactgtgctagtgcgtataagaatcaagcagagattggttctgctcttaagaagctttttgatgatggtgtggtgaagcgtgaggacttatggatcacttccaaactctggtgttcagatcatgcaccagaagatgtgccaaaagcattggataaaacattacaggaattgcaacttgactatcttgacctctatctgatgcactggccagtccgcatgaaaagtggaacatttggactcaataaagaatatcttgagcaaccagacattcccaatacatggagagcaatggaggcactctatgactcagacaaggctagagccataggagtgagcaatttctcttcaaagaagcttcaagatttgtta

SEQ ID NO: 4064 - DNA, 402 bp, Glycine max
  Clone ID: LIB3028-002-Q1-B1-A8
gtaaatctttcagacagagtagttttgtccatggtcaactcacatggatggactctcgaggtgctaagccttgatggttgtaaaagagttggtgatgctagcttgatggcaattgcaggcagttgcccattgcttgctgatctcgatgtttccaggtgtgcaatcactgatacaggtatcgcagcccttgcacgcggaaagcagattaaccttgaggtactttctttggcaggttgtgcattggtttcagacaagagcgtgcctgccttgaaaaaaatgggctgttcccttgctggattaaatatcaagcgttgcaaaggaatcagcagccgctctgtcaacaagcttcaggaacatctctgcatgtgtgacatcctctactgaacaggaaatgcctcagca

SEQ ID NO: 4065 - DNA, 404 bp, Glycine max
  Clone ID: LIB3028-002-Q1-B1-B1
gtcgtctcaagggccaactcatgatgagattgattttgaattcttgggaaacgtgagcggtgacccttacattctccacacaaacgtgtttaccaaaggccaagggaacagagagcaacagttctatctctggttcgaccccaccagaaacttccacacttactccatcatctggaagcctcaacacatcatattcttggtcgataacattcccataagggtgttcaagaatgctgagactattggcgttcctttcccgaagaaccaacccatgagaatctattctagcttgtggaacgctgatgactggccaccagaggtggtttggtgaaaactgattggtcaaaagcaacctttacagcatactaccgcaatttcaaagccacagagttctccacctcttc

SEQ ID NO: 4066 - DNA, 398 bp, Glycine max
  Clone ID: LIB3028-002-Q1-B1-B10
ttcatatcccacggaaacacagccaggcttgccatggagcacggcgatatatagttggcccatatctgcggcatgattgcctcagatgagaaacgccatgagactgcatacacgaagatactggaaaagctatttgaggtcgatcctgacggtacagttatggcgtttgccgacatgatgaggaataagattgccatgccagcacacctcatgtatgacggccgtgatgacaacctgtttgatagctactcttctgtcgcgcatcgcattggggtctacaccgccaaggactatgctgacatacttgagtttctggtggggaggtggaaggtggagcagctaactggactttcaggcgagggaagaaaggctcacgaatacatttgcgggctgccgcc

SEQ ID NO: 4067 - DNA, 403 bp, Glycine max
  Clone ID: LIB3028-002-Q1-B1-B11
gggcggtcaagaaatctcaaaaacaccgtcctcttctaagagaacactaagtcagggttcagttgatatatatgctgctcagtgcaaaaattgcttgaaatggagagagattgatacacaggaagagtttgaagagattagaagtaaagttgctgaggaaccttttctttgcagcagaaaggctaatagttcctgtgatgaacctggtgatattaaatatgattcctctcggacatgggtgattgacaagcctaacctcccaaagactccacaaggttttaagaggagcttggtgcttagaaaagattactccaaattggacgcttactacatcacacctgcaggcaaaaaactgagaacccgcaatgagattgctgcgtttctaaaagataatccagaattc

SEQ ID NO: 4068 - DNA, 408 bp, Glycine max
  Clone ID: LIB3028-002-Q1-B1-B12
ctgccatggaagcacattttcacctgcggagtttgtgcagcatgcagggggcactgacaccacgcaccctctaaggcacatcactgttattccttctgcatttgggtgatcttaattccctttttttgtgtgtaattaggcctattctcggttctgcgtcgtatagcgtgtttggaaatacgttgagatgtaagaaatcacgttgagacgtaaaaaatcatcaattctgggatgtggaagttataactattaggtgaaacctagcactctataagatagagcagcggaagaatttgattcaggtgtctacgttatgtgatatctttaatttaggcagggtatatattttacaggagttttttgttaactacgctaactgcattaacaaacaatctccaattgagattg

SEQ ID NO: 4069 - DNA, 381 bp, Glycine max
  Clone ID: LIB3028-002-Q1-B1-B3
gagaaaagcaaaaacaacaatgaaaaggatatagaagctactgtagtgagtggtaatggaacagatacaggacaaataattacaactgccattggtggtcgagatggacaaccatatcagacaatctcttacatggctgaacatgtggttgggactggttcttttggtgttgtttttcacgccaagtgccttgaacctggtgaatctgttgccattcataatgtgttgcaatacaggagatataagaatagggaactccaagttatactcacagttgactatcctaatgttgtcaaactaatgcactacttcttttcaactaccgatcacgatgacttgtaccttaacctggttttggagtaagtacctgacactgtctac

SEQ ID NO: 4070 - DNA, 346 bp, Glycine max
  Clone ID: LIB3028-002-Q1-B1-B5
tttcatttcagagccattaggtatatggaatctaccagatctatactcactcctctagtgctcctcgtcctcttctctctagccaaagggcttcacaatcccgcatgtgatgctgcctatctacatgaccatgatggcgcaaccctccaagtgttccatgtgattcagccattgttccccattcatgccctctaaaccaatgtcatgggaagagattgtcctatagctacaagccaaggaccaagccatgatgcagtaactttctaaattagttgctacaagatcgcctgtctaactgcctcagggagacatatcagtcagattcctacatatatagtgagggcca

SEQ ID NO: 4071 - DNA, 407 bp, Glycine max
  Clone ID: LIB3028-002-Q1-B1-B6
ccctgttggatagaatggaggttgttgctattgctgggtatattactgatgagaagatgcatattgctagagattatctggagaagaccactcgtgaagcttgtggaataaagcctaaacaagtggaagtgactgatgctgctattcttgccctaatagaaaactactgccgagaagcaggggtcaggaatcttcaaaagcacatagaaaaaatttaccgaaagatagcgctacaactcgtgaggcaaggggaaatgattgatgcaaccgtggaaccaataaaagaaaatatagactctgatgaatttggtcaaaatacagttcaaaataagaactccgagttggtggagggtagtgatcctgaaaaagagggtgaaacctctgataaagttgacaaggtgcaaaca

SEQ ID NO: 4072 - DNA, 407 bp, Glycine max
  Clone ID: LIB3028-001-Q1-B1-H9
aaatctgcttcttatttgattctctctcataaacaaattaaaacccttgtataaagactcttaggaaatatctctcttctttctaagcatatataggaggaggagagaaaatattttgctagcaagacttgatttgagatttgatcaacatcaattgttgtttgttgtcgtcgtcaaaatatgccaatggctaagggaatcagaaagctaagttcctggatcgaggttgccccagcacctatcatttacccaaagaaaccttctaacacacccactttggaaacaatcaccgaagaagaagaagctgccgccgagggattcgaaaatggcgatggtcaactataataaacgaccttctccaatttgatgtaacttattgttataagttgtttatgcatggtttgtga

SEQ ID NO: 4073 - DNA, 361 bp, Glycine max
  Clone ID: LIB3028-001-Q1-B1-G2
gtaactgcctagattcttcagccaaagtagaagctgctcacagttccagaaccccttctggaatttcaaaaactagtccttcatctgttccttccaacttatctattctgtcatatagtgaagcaagtgatttctcaaatcttccaacaccaaggtctgagggcgaaatcttgtcttccccaaatcttaaggcctttaccttcaatgagctaaagaatgccaccaggaactttcgcccggacagtcttcttggtgaagggggatttggttatgtttacaaggggtggattgatgaacacacatttacagcttcaaaacctggatcaggaatggttgttgctgttaagaaactcaaacctga

SEQ ID NO: 4074 - DNA, 387 bp, Glycine max
  Clone ID: LIB3028-001-Q1-B1-G4
ccttgcccttggggcaccaccaccatcaccaaccggcggcggcgactatacacccgtcgcaaccgccgcagtgtcagccgcaacccgaagttcctcgccggagctccgatatggagaccgataaggatatgtcagctactgtcattgaggggaatgatgccgttactggccacataatctccaccacaattggaggcaaaaatggggaacctaaacagaccatcagttacatggcagaacgtgttgttggcactggatcatttggagttgttttccaggcaaagtgcttggagactggagaggcagtggctattaaaaaggtcttgcaagacaggcggtacaaaaatcgtgaattgcagttaatgcgcttaatggatcacccaaatg

SEQ ID NO: 4075 - DNA, 424 bp, Glycine max
  Clone ID: LIB3028-001-Q1-B1-G5
cagaattctcaacctcaaggttcacagaatgagaatgatccaaataatacaactatttttgttggtaatttggatcctaatgtcactgatgatcatctgaggcaagttttcagccagtatggagaattagtgcatgtgaagattccagcaggcaagcgatgtgggtttgtccaattcgcagacaggagctgtgccgaagaggcacttcgggtgttgaatgggaccctgttgggtggtcaaaatgttcgtctttcatggggccgcagtccttcaaacaaacaggctcaggcagatccaaaccagtggaatggtggtgctggttctggtggtggatactatgggtatgctgcacaaggttatgaaaattatgggtatgctcctgctgctggacaggatccaacatgtatggcagttatccggggta

SEQ ID NO: 4076 - DNA, 84 bp, Glycine max
  Clone ID: LIB3028-001-Q1-B1-G6
ctctagatctccttgaagcataaggtggttgttgctttgcttttttggagttattgtgaattctaattgtcaaatttgtttttc

SEQ ID NO: 4077 - DNA, 378 bp, Glycine max
  Clone ID: LIB3028-001-Q1-B1-G8
gtttagctttgatgatgatgttatggcaattggagatgtgttctatgctgaagtggaacgggaatgggtgatgcaaccgggtgggccaattgctcacaaatgcacgactctcattgaacctaatcggcttattttactcactgctcagcggtttattcagacattcctgggaaggaacttcgttgcattgcactttcggagacatgggtttttgaaattctgtaatgctaagaagccaagttgcttttactccattactcaagctgcagattgcatcttgagggtcgttgagagggccgatgcacctatcatctatctttctacggatgcagcagaaagtgaaaccggtctgcttcagtcactagttgtgttgaatgg

SEQ ID NO: 4078 - DNA, 402 bp, Glycine max
  Clone ID: LIB3028-001-Q1-B1-G9
cacaccatgaggatgaggaagacgacagtgatgaagaagactctgtagcagaggaatttcggaagtttggagcagctgatacatttagaatcccagatgaggttgatgtttctcatcttagttaggtccttcattattaagccattctagtgttatgcagctgagatttcctatactaattagtagttaaccccttcaaatatttgtggcttctatcaatgtgacaaccaatttgttcatttctagcagcattatggccgcaaacgtgataattgatacaataattgcagttgaaatacatagatttcaagtagactcgatgtatgaggactagtttggcgtgagattgtgaaagacttgagtagaaagattgttgattagaagtaaattcaatctcttctc

SEQ ID NO: 4079 - DNA, 400 bp, Glycine max
  Clone ID: LIB3028-001-Q1-B1-H1
cttctttctcacactcacagtgctcaaggtttcagcatcatcctcagtgattttctacaacaagtgccagcacccagtgtggcccgggatccagcccagcgcaggaaagcccgttctggcccgcggaggcttcaagctcgccccaaaccgggcctactccctccagctccccgctctatggtccgggcgcttctggggccgccacggctgttccttcgacgccggcggccgggggcgctgcgccaccggggactgcggcgggtccctgttctgcaacggcatcggcggaagcccaccggcgaccctggcggagttcaccctgggcaacgagcaggacttctacgacgtgagcctggtggacgggtacaacctacccatctccatcacccccttcaaggga

SEQ ID NO: 4080 - DNA, 379 bp, Glycine max
  Clone ID: LIB3028-001-Q1-B1-H2
ctgcgatctgtttcgtgttgtagctagctcctcgaaaatgctggcacgcctcgccgcgagtcgcttcaacgagatccgtcagattttccgtcagccttctagggctttctcaaccgctctgaactaccaccttgacacaccggacaacaaccctaaacttccatgggaattcaccgaggccaatcaagcaaaggttaaggagattttgtctcactatccatccaactataagcaatctgctacaattcctcttttagatcttgcccagcagcagcatggaggttggctacctgtttctgcaatggatgcggtagctaagattgtagaggttcctcccatacgggtgtatgaggttgccacattttactccatgttcaat

SEQ ID NO: 4081 - DNA, 353 bp, Glycine max
  Clone ID: LIB3028-001-Q1-B1-H3
gccttattatttacacactttttttaatatgcctggatatatatgaggccatatagcaaaaagttggtaccaaaaccaacatattagaagagagagcacttcattttagctagctagagaaaaaaaacaaagtgatagtgagaagatgttagctatggagggtaataagaagactaagcaatatggtcttgactctgccacttcttggtttggaagttgcatttcttcatgttcatcatcagaaaaagtgtcaactcacagaaagcttcctagaactgcttccgaatcatcagttaccaaccccatgaagaagcgtggaggatggaaagccataatctttattttaaggaatg

SEQ ID NO: 4082 - DNA, 417 bp, Glycine max
  Clone ID: LIB3028-001-Q1-B1-H5
aaaaacatgaacgtaggatgagaaagatggtcggaaattgaggaagtagtaaaatgattcccaagatttctccgatgaacgaggatgggaagaacagaggaatcggaatagccaccgaaaacccttattatggaacctttcaaggcgtcgctaaccactatcctcctcaacaccaacaaccacccgttccctacgctaattattaccaacgacaaggataccacgtcgttccagtttatgccgttgctgaaggaaggcctgtgagagaacgtcgtcttccttgctgtggacttagtctgggttggttcttgtttataatgggttggtttcttggtggtgttccctggtacgttggcactttcattctaatgtttgtacatatggattgccgagaaaagcctggattgattgcatgcg

SEQ ID NO: 4083 - DNA, 405 bp, Glycine max
  Clone ID: LIB3028-001-Q1-B1-H6
gttttctctctagattctgctcttaaacgccgtcgttttcaaactctttttttccccttcgcttctctgtctttgtaaccgaaaggggggaaaatataattaacaccgatttcgcgaccaattcttcttctgcgttgaattgggacaacgagaaattggatctcagtttttggcaggaaataaaaattgcatttgagtgtaaaataacagagtatagtgtagggccttgttcttgatactgtgctaaatttgttggatggcggagaaatcatgcatcaagcgccttcagaaggaatatagagccctttgtaaagagccagtttctcatgttgtggctcgtccttctccaagtgatattcttgagtggcattatgtgttggagggaagtgaaggaacaccttttgc

SEQ ID NO: 4084 - DNA, 428 bp, Glycine max
  unsure at all n locations
  Clone ID: LIB3028-001-Q1-B1-H7
attaaaaataaaacattgtaaaaaatattatcaataccctttgagtgaccctgacctcggatccaagattcccagttaaatttcatagatgaaaataaaagatattttattaaagatgatctgacaaaaattaatcatctatatggggatgatgaaaaaatatcattaatacattttgtgataattttttattaatttcttttatttattagtttattaatttcgtgttgttaatacctaaaggacaaattaacttttcttagagaaataatttgaaaaaatgaggtttaatgtggagtatggaatatggatgttggtgcgagcagttgggaggaccaagcattgaaaatgaagacagggagaaaggacagcanagaaagctatgcaatggaaggtggaagacttgattccaaaccacaatgattcca

SEQ ID NO: 4085 - DNA, 384 bp, Glycine max
  Clone ID: LIB3028-001-Q1-B1-H8
gaaaattattttgaacacccttcatcgatctaaatgggtttggcaggatttctcagaaaactccaagatatctattctaaacataagctcatatccactgttttcttctgtctcttggtctcacctccgtccttcttctataccttctatgccacaagtcatttatccagtgtttttctcaccagtgaaggtgccgacaactctgtaggcgcaacctttcactatatcatagttattgcacaagttgaatgttttgccgttcttggcatatccatgttttccttgctaaagccactgctccatatcttagcctcagagcagaagatagacccagaagcggagttgagcatcaaaaacctcattttatcattgaccaaacccgcg

SEQ ID NO: 4086 - DNA, 407 bp, Glycine max
  Clone ID: LIB3028-001-Q1-B1-E6
aagaaatttaagtgaggagctagagaatgatgatgaagtctgctatgtgtgcagtggtggttgtagcacttcttcttctggcggaggtggggcccatggctgaggctgtgacatgcaccccaacagagttgagtccgtgtcttccagcaatcacttccggtgctaaaccttccaatgcttgttgcacgaagctgaagcagcaaaaaccatgcttatgtggctacctcaaaaacgctagcttgaagcagtatgttaactctcctaatgcccgaaaaaccgttgcttcttgtgggattccctttccaacttgttaattaattaagccttcttataattaaagtgtgggatatatatatatatatagataaacagtttaatttatacacactttgatcctacaaagcatc

SEQ ID NO: 4087 - DNA, 409 bp, Glycine max
  Clone ID: LIB3028-001-Q1-B1-E7
cagtggctcactgagacttgggcctgtggcccagcccatgaggatcaagtttacccctcgtcgaaaaaatcctacaagatcatcactgtattatgtgaacttggtggctattagagttggccggagaattgtggatatcccaccggaggctctagcgttcaatgctaacaccggcgccggcaccgtttttgattcgggtacggtattcacccgactggttgaaccggcctacaacgccgtccgaaatgagttccggcgacgaattgccgttcacaagaaacgcactgtgacaagcctaggagggtttgacacatgctacacagccccaatagttgcaccatcaataacattcatgttctccggcatgaatgtgacactcccaccggacaacatcttcatacacagcacg

SEQ ID NO: 4088 - DNA, 412 bp, Glycine max
  Clone ID: LIB3028-001-Q1-B1-E8
ctcgagccgtgagaaaggaagagggtttgtttccgttttgtttgtgaattgtaaagaaggaaataaaacattttgggaaggatttgaagtgggttattgttgtttgtggatttcttcattgttttgctctaaaaatggagagagattttctgggtctgagctcaaaagaaccattggctatgatgaaggaagagatgaatattgatattggaagcaaagacacaggtttcacaaatggagcagtggtaaaatggcccttcatgaacaaagtatatgtccatcctcttttgatgtcattcaatcctcctcaggtgaattctgtgaaccatcctcatggtatgaagatgttttcagttcccaatcaagcaatttcagtttccatgggacatccatccctaaagaatcaatttgc

SEQ ID NO: 4089 - DNA, 408 bp, Glycine max
  Clone ID: LIB3028-001-Q1-B1-E9
aaaatattaaataaaaccgccacaaatttctccatagttatgggcacttccattctcgacgccctgaacgttcgcgtggaaggttccggcgacaagtaccttgtcctggcccacggcttcggcacggaccaatccgcgtggcagcgcgtgctcccttacttcacccgcaactacagcgtcattctctacgacctcgtctgcgccggcagcgtcaaccccgaccacttcgactaccgccgttataccaccctcgacgcctacgtcgacgacctcctcaacatcctcgacgccctccgcgtcccccgctgcgcctacgtcggccactccatctccgccatgatcggcatgctcgcctccatccgccgcccggacctcttctccaaactcatcctcatcggcgcctcccct

SEQ ID NO: 4090 - DNA, 141 bp, Glycine max
  unsure at all n locations
  Clone ID: LIB3028-001-Q1-B1-F1
catcaacaaaaaacaagctgtgattgatgatttaaaaggttccaaagtgtaagggtangcaacctgataaaggatgataattgtctaccatgtaaacataacatttttattatcaataaagggtatatctgtaattctaat

SEQ ID NO: 4091 - DNA, 284 bp, Glycine max
  Clone ID: LIB3028-001-Q1-B1-F11
aaaagagaaagataagcgaaacaaacaatctctgaatcgatgggctaaaagggaataaaaaagaaagagcttcaaatctggcaaatctcgtgggattgagggctcggtctgcgtcgaagcaagcttctccccatttgcacgacgacgaggaggagtgtaggccttggcgtcgaaggttaaccatgtctttgtcttgggcctccgccctcaggatcaccattctccttctcctcctcgccgcggtcatcgtcgcatgcttcactctcccaatcgaaaagatgatg

SEQ ID NO: 4092 - DNA, 407 bp, Glycine max
  Clone ID: LIB3028-001-Q1-B1-F2
gtctctcacacactcctttcaatctccaattaattacttttcttcaatttgaagcgtgtctgaagttggttgaagcattgtgttattgttctggttttggtctccgaggtttgtgtcggattccgatgtattatgtaaaagaagctgcgcatgtcgaccccatgttcgtagctgataacaccaaccccaaggattattacaaagtgctggaggttgaatatgatgcaaccgatgaaaatatcaaattaaattaccgaagactcgcgctgaaatggcatcctgacaagcacggaggagatagtgctgttactgcaaaatttcaagagataaatgaagcttacaatgtattaagtgattctaccaagcgtttggactatgatttaactgggataagcaagattaaaaat

SEQ ID NO: 4093 - DNA, 397 bp, Glycine max
  Clone ID: LIB3028-001-Q1-B1-F3
gtttgataattttgctgaagtgcacaaactctatgaaggtggagttacactacctacaaactttcttagcaagatcgcccctataccagtgatcaaggaaatttttcgaactgatggcgaacagttcctcaagtatccaccacctaaagtgatgcaggtggataagtctgcatggatgactgatgaagaatttgcaagagaaacgattgctggtttaaatccagatgtcattaagattatagaggagttcccactaagtagcaagctagatactcaagcctatggtgatcatacctgtataatagcaaaagaacatttggagcctaacttatgtgggctcactgttgagcaggctatccaaaacaagaagttgttcatcttagatcaccatgactat

SEQ ID NO: 4094 - DNA, 390 bp, Glycine max
  unsure at all n locations
  Clone ID: LIB3028-001-Q1-B1-F5
cataacacaaagcacaaagcaaagctcatccttgagttaaaaaatggcagcagcttcttccatggctctctcatccccatccttggctggcaaggccgtgaagctgggcccatcagccccagaagtgggaagggtgagcatgaggaagaccgtcaccaagcaggtctcctcaggaagcccatggtacggcccagaccgagtcaagtacttgggcccattctctggcgagcccccgtcctacctaaccggtgagttcccaggcgactacggctgggacactgctgggctttccgcagacccagaaaccttcgccaagaaccgtgaactcgaagtgatccactccaggtgggccatgctcggagccttgggctgcgtcttcncggagttgct

SEQ ID NO: 4095 - DNA, 403 bp, Glycine max
  Clone ID: LIB3028-001-Q1-B1-F6
ctctgcacaacaattcgagattccaaccatcgatctcaattttcaaccttaacctctaagaatgtcttacgcttatctcttcaaatacatcatcatcggtgacaccggagttggaaagtcttgtcttctacttcaattcacggacaagcgctttcagcccgtccatgacttgaccatcggtgttgaatttggtgccaggatgatcacaattgataacaagccaatcaagttgcaaatatgggatacggctggtcaagaatcattcagatctattacaaggtcttattacagaggggctgcaggtgcattgcttgtttatgatataaccaggagggagacatttaatcatttggctagctggttggaagatgcaagacagcatgcaaatgcaaatatgactaat

SEQ ID NO: 4096 - DNA, 416 bp, Glycine max
  Clone ID: LIB3028-001-Q1-B1-F7
atctggtgcttcatggttaccctgatttgttgtttgagcagaaatcttggattgcggtgaatactgggagttttctgtttaggaactgtcagtggtctttggatttgcttgatgcttgggctcccatgggccccaaggggccggttcgcgaggaggccgggaagatcttgacggccaatctcaaggggaggccggcgtttgaggccgacgatcagtccgccttgatatacttgctgctgtccaagaaggagaagtggatggacaggacgtttcttgagaattcgttctacttgcacggttattgggccgggttggttgatcggtatgaggagatgattgagaagtatcacccagggttgggggatgagaggtggccgtttgtgacacattttgtccggtgttaaacgttttggaat

SEQ ID NO: 4097 - DNA, 391 bp, Glycine max
  Clone ID: LIB3028-001-Q1-B1-G1
gcaaaatttcccaatttcgcgaaaccctaactagccctatggaactctctcgtctcttcgtttccgacacgtgcttcttctcccctccgattcgctgctccccttcgccggcgctgtccacgtttttcgccgtcaagaaccgccggagcaggaggaggagcagcttctgttccgcctccaatcccgacaccttggtcgccggcggtgccgccgtcgtcgctggggccggcgagaagcacgaggaggacttgaagtcttggatgcacaaacacggcctccctccctgcaaggttgtgctgaaggataaaccttgccccaatgattctcataaacctatacattacgtcgcagcaagtcaagatcttcaggttggcgatgttgcattctccgt

SEQ ID NO: 4098 - DNA, 386 bp, Glycine max
  Clone ID: LIB3028-001-Q1-B1-E4
accaccaccaacccttaacattatattgctcatctgcgtctctcactgtctatctcacatagacaactcgatctaaccatggacctgggtcagatgcagagacagtggatcgactacaccaaatccctcttccatgagggcatcatggatggtcagtttctgcaacttcagcagcatcaagatgagaacaaccctgacattgtggtcgatattgtctctcacttccttgcagattccgatcggcttctcaaagatctcacctttgccataaatgataatagagttgacttcatacaagttgatgatcatgttcaccagttaacgggtaacacttcatgcacaagcgcacatagggtaaacactgcccgtattgctttccgcaacct

SEQ ID NO: 4099 - DNA, 411 bp, Glycine max
  Clone ID: LIB3028-001-Q1-B1-D1
ctcgagccgattcggctcgagtgctattgggtgtcaaagctgtgatagctaaaagttttgagagaattcatcgtagcaatttggtaggaatgggtattgttcctctttgctttaaatctggtgaggatgctgacacattgggattgactggtcacgaacgttatactattgacctcccaagtaacatcagcgagataaggcctggccaagatgtcaccgtaacaactactaccggaaaatctttcacctgcacagttcgcttcgacaccgaggtggaacttgcttactttaaccatgggggcattcttccatatgtcatcaggaacctcattaagcagtgaagtcatggctgatgggaaatgttaaacaatgttgccactgcgtgtacacgttttgagtggtaatataatg

SEQ ID NO: 4100 - DNA, 358 bp, Glycine max
  Clone ID: LIB3028-001-Q1-B1-D11
ccaggaagggggcacactgtgcgagaccatttaatgaggaagagtgggacgatgaggaaattggaataccttgtgctgctttgactgcaccagttcccatcttgcctatgacatctgatggttctgttccaaatgacaatctccctgctagtggatgtactgtgtcagcatccatatcatgtctatcacgatcactgccttctcctggaggtctataatcctggtcaggaaaacattgttgaaggtgcatcaccttcagatgatttttttgagggcttggaagactacttggctggtttctcctctggccagaatactgaattcaacacaaacggaatgccgctactacaagtgatgt

SEQ ID NO: 4101 - DNA, 403 bp, Glycine max
  Clone ID: LIB3028-001-Q1-B1-D2
gtttttctctattataatatagagaataactgcaattactctaagaatcctagcctcttgtgcaagaacaaacaacctagaaaacacaaaaaaaaaacaaaaaaaaaaccctaaaaatggcacgtcaacttgtgcttgcactgatttctgttgccataattggcatggccatggctaatgaggccccatctgcatccccaaaatcatctccatcaccaaaggcttcatcttcaccaaaatcagccgagtctcctctatcgtctcctcctgcccctaccccatcagatgagagtgatatctcagccgcacctgccccggcaagcgaccccatcgagctctatgctccggaacctgaacctttcgaggaccccttcaccaccccggaggagactgacccgggcga

SEQ ID NO: 4102 - DNA, 390 bp, Glycine max
  Clone ID: LIB3028-001-Q1-B1-D3
tgattacacaaggtcaattcatttgggcactgtctctgttccaaaaccctaatccttcgtcttccagaaaatggctgattctccccttgcaaggaattcaaggtccccttccccgtggaaagctcagtcgagatctaggtctaggtcaagatctaggtcgaggtctaggcctagacaaaggccaagatcccgttctagaagtcatggcaggtcaagatcaccaattcatggaaggtcaaggtcacccattcatggaaggtccgagccttcaaatcctggtgacacactttatgtaaccggtctatcttcaagggtcactgaaagagacctagaggagcatttctccaaggaaggaaaggtttcttcatgttttcttgtggtggagccccg

SEQ ID NO: 4103 - DNA, 379 bp, Glycine max
  Clone ID: LIB3028-001-Q1-B1-D4
atcagacggaggcgatcgattgggaattggtagtaatagtttagcgttgaagaatgatgtctgctgctgtgtgcggaagcaagagatctttcgtcgaagagcgtcctccttctccgccagtctctaagaggctccgttgttcctcttcgccgagtcgattacctcctccttcttccatagatcaacatcggtctcactttccacacatggatgagttggttcttgacatagctctccacgaatgtggcaatgatatagatgctgccatcaagatgttgaatgagctttgcttgggaattgccgatggaaatggaattgctgacaaatcggacgttgtcattaatctgggtgcaggtaaattggaaggtgattgaaatgc

SEQ ID NO: 4104 - DNA, 417 bp, Glycine max
  Clone ID: LIB3028-001-Q1-B1-D6
ggctgtagcttgttcgttaatgcagtctcattaaattgtgggatgtatattctatatatgcagagacaacgaggaggaggactgcagtatagggaagcacaaaactagtgaaagaatacaagtctcgttctatttttaatttttttcgtttctgatcagttaaaatgaaacgaggaaaaataattgtgcagctattccttgggggtttttggacctaaacatacacaatggtatgctccaattggttggttaatcatcaccccactttccttcaacttttttttcatatgtatatgtttttcgtatgtggaaatgtctctccgaggtctattcttgtagacaaattttagccacaggtacataccacagcatatacggatttgtcttactttgcattgaatcaaataaaatgttctt

SEQ ID NO: 4105 - DNA, 421 bp, Glycine max
  Clone ID: LIB3028-001-Q1-B1-D7
gattgttgtgactcgttcttcttcgtcgttatcttcttcttttgttgtttgtgtgtttgttttttctctcacctgaaaatgtcttgctgcggtggtaactgtggttgcggaagcgcctgcaagtgcggcaacggctgcggaggctgcaagatgtacccagacttgagctacaccgagtcaaccaccaccgagaccttggtcatgggagtggcaccagttaaggctcaattcgagagtgctgaaatgggtgttcccgctgagaacgatggctgcaaatgtggagctaactgcacctgcaacccctgcacttgcaagtgaggtgttggagagctaaagcttcaagcagaaatggcccttagaaataatgataaaaactatatgtagtttcaaaacttcaaaattatgtagtatgtattatgtt

SEQ ID NO: 4106 - DNA, 385 bp, Glycine max
  Clone ID: LIB3028-001-Q1-B1-D8
ggacttagagaagatgttaacaaatacttttttttaattatcgctgtatgtgtcacagcttgacatatgcatatgttgaaactgaagtgtctatctgtccaacataactaaaagcctaaaaccgcacaaaaagatcttagattgcttgtagaacgttgctgatctggctgcaagctcagcttcaccttgctacgtaatcttgcaggttcgaatttgattgattggttataggaatcaatgcatgccacgtgttttgctgaaggtggaggaagaaaccatgttttgtgaatgcggggatttcggctttcatataccagagtcaatgagtgtgcgctgtgggaaattttgagaacataaacgagccaacaaatgcaactgactactc

SEQ ID NO: 4107 - DNA, 419 bp, Glycine max
  Clone ID: LIB3028-001-Q1-B1-E1
ccttcttcttcttcttctctcgcgccgcaataataatactaaaacatgtccaactctgatggagccattaacgccgtccctcccaacgacgccaacaacaacacaatcgttgagtaccagcagcgaaccaccaccaccaccaccgccgccgccgccgccctcgccgtcaagaaaccgccttccaaggaccgccacagcaaggtcgacggccgcgggcgccgcattcgcatgccgatcatctgcgccgcccgcgtcttccagctcacgcgcgagctcggccacaagtccgacggccagaccatcgagtggctcctccgccaggcggaaccctccatcatcgccgctaccggctccggcaccactccggcgagcttctccactgtctccgaccacaagcccctcctccctccccctaaccc

SEQ ID NO: 4108 - DNA, 424 bp, Glycine max
  Clone ID: LIB3028-001-Q1-B1-E11
atccgctccaaggttaaaacttaatgttaaaattaacctttaaaattcaaaacacaacacataaaatttggtggcaaaaaaataattccggcaaaccaactaatacccaaactcaaagccatagccatggccaccctaatttcagtttaggaacgtttcatatccaactttcactttcactttcactttcacttccacatctaattcctgttcaattttctatccctactcgtttattctattggcaacgggaagaagatggggttgtgatttgtaattggagaactgtgtgaagtggaggagggaggacactttccacggccacaatgcggtggtttccgttgagtactacctcaaactcggaaagagaacggaatagagagaacactagtcgtacttcggtgtatctcaatgtatatgatct

SEQ ID NO: 4109 - DNA, 378 bp, Glycine max
  Clone ID: LIB3028-001-Q1-B1-E3
cactcataacacaaagcacaaagcaaagctcatccttgagttaaaaaatggcagcagcttcttccatggctctctcatccccatccttggctggcaaggccgtgaagctgggcccatcagccccagaagtgggaagggtgagcatgaggaagaccgtcaccaagcaggtctcctcaggaagcccatggtacggcccagaccgagtcaagtacttgggcccattctctggcgagcccccgtcctacctaaccggtgagttcccaggcgactacggctgggacactgctgggctttccgcagacccagaaaccttcgccaagaaccgtgaactcgaagtgatccactccaggtgggccatgctcggagccttgggctgcg

SEQ ID NO: 4110 - DNA, 310 bp, Glycine max
  Clone ID: LIB3028-001-Q1-B1-B4
cgcaaaaccaaatttgattctcctgccaacttaaacctaaaaatggaaaatcctttctgatttccggccgaatcctagactctcggcctcatcggcgccggaaaaatggccgagtccattgcccgatgcgccgtccgcgccggcgtcctgccgccttctcgcattcggaccgccgtccacttcaacctcgcccgccgtggcgccatcgagtccttccgcgtcaccgttctcccttcaaacgatgacgtcgttcacgaaagcgacatcgtcgttttgtcggtcacacctcaattagtgaaagacgtgctgt

SEQ ID NO: 4111 - DNA, 400 bp, Glycine max
  Clone ID: LIB3028-001-Q1-B1-B5
gattgttgtgactcgttcttcttcgtcgttatcttcttcttttgttgtttgtgtgtttgttttttctctcacctgaaaatgtcttgctgcggtggtaactgtggttgcggaagcgcctgcaagtgcggcaacggctgcggaggctgcaagatgtacccagacttgagctacaccgagtcaaccaccaccgagaccttggtcatgggagtggcaccagttaaggctcaattcgagagtgctgaaatgggtgttcccgctgagaacgatggctgcaaatgtggagctaactgcacctgcaacccctgcacttgcaagtgaggtgttggagagctaaagcttcaagcagaaatggcccttagaaataatgataaaaactatatgtagtttcaaaacttcaaaa

SEQ ID NO: 4112 - DNA, 409 bp, Glycine max
  Clone ID: LIB3028-001-Q1-B1-B6
gatttacacgttccctaaaatctgttatcataatatgtcactgctttttcacgtcacttgtgtgactcttcaattcccacaagaatcaccttccctgtcttttagccactgctaaaactggtacttttccctttcgccccctcagaaaacaacacatttaacagatttcacgccaccaaccgtgtctttgtacagcataccttttgatcattcggtatgcaattccaatctccaaactcggatccatcttttacattcttcagatcatagaatctaatattgtatgcagttttgaaaaagaaaaaaaaaggagaaaaatttgatctttgtgtgattgtgttagattagattttattagattcattgtgtagcctagaaccctcatgaattagaatgcaatccaagaatt

SEQ ID NO: 4113 - DNA, 386 bp, Glycine max
  Clone ID: LIB3028-001-Q1-B1-B7
agaatgagtacggtgggagaagggaaggtgagtagtaatggtcatggatgttgcaaatcagggccaggctatgcttccccactggaagccatttctggtcccagacagtcgctcatttatgtaacctctgtctacacagggaccggaatagagaagccagactatttggcgacagtggatgtggatccaaactctccaacttattccaaagtcatccataagcttcctgttccttatttaggtgacgaattgcatcacacaggctggaattcatgcagctcttgccatggagacccctcagcagaccgacgatttctcatcgtacctgcactcgtatcaggtcgagtatatgtggttgatgtgaaaagaaatccaaaggctccatc

SEQ ID NO: 4114 - DNA, 395 bp, Glycine max
  Clone ID: LIB3028-001-Q1-B1-B8
agaaagcacatagaagagaaagaaagagaacaaagaggagaaagaaagtagttgaggaagatacaaacaatttttgcagattgttgagaatgcctttcaagaagcctcatcacacctcagacaagaactacataacaggggacgacggaggcaagttcgagatacaacctagaggactcaacattgtgtggggaaatgattctcgatactggaaaattccagaacaaggtcctgcggagctgatccaagtttcatggttggaggtatccggcgtggtaaacttaccaggtgtcaagaaatatacggttgaattcgaagtgagagttaaagacgatgggttcggttggagtggcacggacgtgctagtgatggctaagattgggaaaaccggaaaa

SEQ ID NO: 4115 - DNA, 388 bp, Glycine max
  Clone ID: LIB3028-001-Q1-B1-C1
ctctcccatcacttctgtgtttctctcttcacctacactttcctctttcaattcaattcaattcttctttttggttcagaaactctgtacagttaatcaaaccctacctcacctcaccggttttagctgttaatttaatatatagatagaaatccaaggaagaagatgaagcagtttgccgtccaaaacgtcgtcgttccatcccacgatgagattagcgttgtttgccccaagccccgccgcctcggcctcttcaacttccccgtcaacgatcccactgttagacccttccgctggcatctcagttaccatgttgagccatgtgattcaaactcatctggttcaaatcctctggacaacttactcaccaaggatggtgattttgatg

SEQ ID NO: 4116 - DNA, 396 bp, Glycine max
  Clone ID: LIB3028-001-Q1-B1-C12
caagtgatgttttcgactatcttgcaaggtaattttatgagaccaagaattaatgaggttgatgaactgctgacaaaaggggtcaatgtgactgtatacaatggacaagttgatctgatttgttcaaccaagggggctgaagcttgggttcataaactaaagtgggaagggcttaaaaatttcttggcgaaagatagaacaccactctactgcggaagtgacaaatctacaacaaaaggctttgctaagtcctataaaaacctatacttctattggatcctcaaagctggccattttgtacccactgatcaaccctgcgtggcactagacatgttgggtgcaattacacagtcaccagctacttgacatttgcatagaaaaggaaataatgttact

SEQ ID NO: 4117 - DNA, 393 bp, Glycine max
  Clone ID: LIB3028-001-Q1-B1-C2
aaaaaaggcaaagcttattcccccaagacttagctagcactagcaaacacctctatatctaaaatggtttcaatttctgatcatgaactggttttgatctttggtctcctaggtaacattgtgtcattcatggtgttcttagcacccttgccaaccttctatacaatttacaagaagaaatcatcagaaggatttcaatcaattccatatgcggttgcacttcttagcgcactgttgcttctatattatggcttcataaagaccaatgctactttgattatcaccatcaactgtattggatgtgttatagaagtttcatacctaacaatgtacattatatatgctcccacgaaacagaagatatccacttttggtaatgatactcattgccga

SEQ ID NO: 4118 - DNA, 378 bp, Glycine max
  Clone ID: LIB3028-001-Q1-B1-C4
cttcagtgatttttgcttaattactaaaccaaaccatttcttattccctcatcgaaaccttttctttctatatatttcccttttcaatatcatggcacctaacatcaccaccgttgttgccaatgccaccactgagcaattacccaaagctcatggaggaagtagtgggcgtgcctttgtgacttttcttgctggaaacggtgattatgtaaagggtgttgtgggtttggccaaaggactgagaaaggccaaaagcatgtaccctttggtggttgctgtgttaccagatgttcctgaagaacatcgtgcgattctcaaatcccaaggttgcattgtcagggagaatgaacctgtgtaccctcctaagaaccagaccca

SEQ ID NO: 4119 - DNA, 407 bp, Glycine max
  Clone ID: LIB3028-001-Q1-B1-C5
cacacactctcatagctgtagcggcgacactaagatcggagaaagaatggcgaaaacgacgtcgttgctgctctttacactgctcctcttcggaaccctagctctcatccaggcgaagaaatcgaaggaggatttgaaggaggtgacccacaaggtttactttgatgttgagattaatggaaaagaagcaggtcgtattgtaatgggtctttatgggaaggctgttccaaacactgcagaagacttccgagcactttgcacaggggaaaagggaactggtaaaagtggaaagcctctccattacaaaggtagctcattccatagaattattcctagctttatgcttcaaggaggtgattttacacaaggaaatggaatgggtggagaatcaatttacggagagaagt

SEQ ID NO: 4120 - DNA, 162 bp, Glycine max
  Clone ID: LIB3028-001-Q1-B1-C6
gagagagttacgcgttatcttgtgtgcggtggtgctacttttcttcaattcaagttaattaataattatattcatgagagagatctttttgcttgaaatatttgcttcatatatctcataaattatgagttgttaaatgattaaatcaatttgattagtatt

SEQ ID NO: 4121 - DNA, 418 bp, Glycine max
  Clone ID: LIB3028-001-Q1-B1-C7
ctctctctctttctctttctcactctcctctgatatttctatattttggtgctctgtgtctctacgatctggatccaacggtccaaaatgttcggggcttgtgctgcttgttttcccaggttttagagctccaaaccttcagatccacctcattcgtctccagatcttccttccttgataacgttttcgggttcgagaaggcacttgtttgtttgtcgtacgaaatggagactaaaccgagttcggtgatggttacgctcagttacggcgcgttgacgtgcgccgcggaagttctcgcgactttgctagcttctgctgtcgtcaaagccacgcttttggccccggatctctaccggctgctattgaccaacacgcctacaaccaaaggagagagaaaaactcagagtcaagacaagca

SEQ ID NO: 4122 - DNA, 384 bp, Glycine max
  unsure at all n locations
  Clone ID: LIB3028-001-Q1-B1-B3
tgggataaggactagtagtggtcccgtggatgatgactgttacctttaagtgccactgccactcctccttttctgttacacttaactttataaatacccaccccacccgcggtgtttctacgcagtgaatacaagccaaaagaacaacatggacattgatctttctcctcagttgcccaagaaagtttacggtgccaatggtggctcctactacgcatggtccccctccgaccttcccatgctccaccaaggcaacattggtgccgctaagcttgctctcaacaaaaacgcctttgctcttcctcgttactctgactcttccaaagtcgcttatgttcttcaaggtantggagtggctggaatagtgttgcctgaatcagaaga

SEQ ID NO: 4123 - DNA, 385 bp, Glycine max
  Clone ID: LIB3028-001-Q1-B1-A1
gtgactacggctgggacactgctgggctttcggccgacccagaaaccttcgccagaaaccgtgagctcgaagtgatccactccaggtgggccatgctcggggccttgggctgcgtcttccccgaactgttgtcccgcaacggggtcaagtttggagaagctgtgtggttcaaggccgggtcccagatcttcagcgagggtgggctggactacttgggcaacccaagccttgtccacgcccagagcatcctcgccatctgggctacccaagttatcctaatgggtgctgttgagggttatcgtattgctggtgggcccctcggtgaggtcactgacccaatctaccctggtggcagctttgacccattgggcctttgctgatgacc

SEQ ID NO: 4124 - DNA, 394 bp, Glycine max
  Clone ID: LIB3028-001-Q1-B1-A10
aaaaaaggcaaagcttattcccccaagacttagctagcactagcaaacacctctatatctaaaatggtttcaatttctgatcatgaactggttttgatctttggtctcctaggtaacattgtgtcattcatggtgttcttagcacccttgccaaccttctatacaatttacaagaagaaatcatcagaaggatttcaatcaattccatatgcggttgcacttcttagcgcactgttgcttctatattatggcttcataaagaccaatgctactttgattatcaccatcaactgtattggatgtgttatagaagtttcatacctaacaatgtacattatatatgctcccaggaaacagaagatatccactttggtaatgatactcattgccgaca

SEQ ID NO: 4125 - DNA, 386 bp, Glycine max
  Clone ID: LIB3028-001-Q1-B1-A2
gattgatggccttaaagctcatgctgagaaacatgtgactgatagaatgatgctcaatgctgctaacattttccccttcaacacaccaaccaccaaagaagcatactactatagaatgatatttgagaggttcttccctcagaactcagccaggctgagtgttcctggaggaccaagtgttgcatgtagcacagccaaagctgttgagtgggatgctgcttggtctaacaaccttgatccatctggtagagcagcacttggagtgcatgcatcagcttatggaaatcaggtcaaagctgtagaaccagagaagatcataccaaagatggaagtttctccactaggagttgccatatagagctagtatgagccatagcaaaaactag

SEQ ID NO: 4126 - DNA, 410 bp, Glycine max
  Clone ID: LIB3028-001-Q1-B1-A3
atttttctcttcaccttttccttctttccacaaaaatggttccatctcagttatccaagtatggtctcctcttcatttcttgcacctttttccttatcaacttcttaaccattcccatttcttccctcaacataggagttgaaaccaccggaatcactgtctctgtgagcaaagagtgcagcagaacatgtgagtcaagcttctgttcagtgcctcctttattgagatatggcaagtactgtggacttctgtatagtgggtgccctggggaaaaaccttgtgatggccttgatgcttgttgtatgtatcatgataaatgtgtccaagccaaaaacaacgactacctaagccaagagtgcagccaaacattcatcaactgcatgcaaaagtttaagaactcaagagctcct

SEQ ID NO: 4127 - DNA, 415 bp, Glycine max
  Clone ID: LIB3028-001-Q1-B1-A6
cttcagtgatttttgcttaattactaaaccaaaccatttcttattccctcatcgaaaccttttctttctatatatttcccttttcaatatcatggcacctaacatcaccaccgttgttgccaatgccaccactgagcaattacccaaagctcatggaggaagtagtgggcgtgcctttgtgacttttcttgctggaaacggtgattatgtaaagggtgttgtgggtttggccaaaggactgagaaaggccaaaagcatgtaccctttggtggttgctgtgttaccagatgttcctgaagaacatcgtgcgattctcaaatcccaaggttgcattgtcagggagattgaacctgtgtaccctcctaagaaccagacccagttcgccatggcctattatgtcatcaattactccaag

SEQ ID NO: 4128 - DNA, 347 bp, Glycine max
  Clone ID: LIB3028-001-Q1-B1-A7
ggccaatgcaagcgtggttgatgtgggggccatagccacagtttgagtctcaggctctcagcatgtggaagcaacatgggaacggttatgtgtgttttctgttaataataaacaaaggctactcagaacatattagtgtttggtgtccttggataattggcatggaagcttgagcttgtgcagtatattaaaaccttaaagtttaaaataaaagtattaattaggttgatcttaatttgtgcgtatgatccgtgatatatatgatatgttgtcgcctgtgatatgatgattaagttagtgtgatatgtagtgatacactgtttaagaaagtaacttgtccattttac

SEQ ID NO: 4129 - DNA, 413 bp, Glycine max
  Clone ID: LIB3028-001-Q1-B1-A8
gtttgtagagaatctctcgatgatggcaaacagttgtgtttcaatggacaataataatatcctgggtcttctcaagcttcgaattaaaagaggcgttaatcttgcaattcgcgatgctcgtaccagcgatccgtatgtcgtcgtcaacatgggtgatcagaagctgaagactcgtgtcgtaaaaaacaactgcaaccctgactggaatgaagaattgaccctttctgtaaaggacgttaaaaccccaatacatctgacggtttatgacaaagacactttctctgttgatgacaaaatgggtgaggcagagatagacttaaaaccatatgttcagtgtaagcagatgggattgggcaagctcccaaatggttgttcactcaagagaattcaaccagatagaactaattaccttg

SEQ ID NO: 4130 - DNA, 402 bp, Glycine max
  Clone ID: LIB3028-001-Q1-B1-A9
cttctccttattcctcttctccttcttcttcttcctctccttcttcttcttcttcttcttcttcttcttcttcttcttgttgtaattcttcaacttcaatcctgtcttgtctctttctctctcgctcttttttttttttttgcttacctgcaaccggcttaagctgtggtaactccttcttttaattaatcactcttttgtttcggttattactcttattcttaatggccttaccagtgtgttgctcactgagaaaccaccaattttcagcatgacaaagataagtcctgaagttgaaatcaggatgccaatggaggcatttccaccaatttcagctgatgtgagctttatttctaatagttttccgaaatacaaactggatgttgataatcaagttctgga

SEQ ID NO: 4131 - DNA, 384 bp, Glycine max
  Clone ID: LIB3028-001-Q1-B1-B1
gctagaagcaataagatgaaaatgaaagtgcttgttttgtttgttgctacagttttggtagcatatgaatgccatggctcagactaccagaagttccctctccaaatgaaaactgggtttggtgggcaatacagcaatgaggtggcatgtgccagttggaggcttggcgtggaagcaaacaacgtagtcaagtggcaaactgttcctgcagcttgcggagagtacatagctgactacgttctaggagaccaatatagatcagattccaaaacagttaaccaacaagcttatttctatgctaaatccctcaaactcaccaacaaagatgtctttgtcttggacgttgacgacactactctctctaatctccagtattttgctaac

SEQ ID NO: 4132 - DNA, 409 bp, Glycine max
  Clone ID: LIB3028-001-Q1-B1-B2
agcattagtactactgttaatgcaactagggttagtgatcttgagtccccaacatctaccttgtctgagaataatgcaccaccaattaatattactagtgttattgagtttgtgggttcttcagagagagggacggtgaaggaagagggagagcaagagtggaacaaattaggttatcatgaaagcttcacccatttgggagaatacaaagatggcaaggagaattcaatgcctttcacgtctagtctgcatgagttgacaatgaccatggcaaccacgtggggttctagcactagtggtgcacatgcacatgcacatgttgctgaggagggttgtttcaccaatcttttgctgaatgctaactccggtgcccggagtttgtcgccacaagacggtggagaatccaata

SEQ ID NO: 4133 - DNA, 497 bp, Glycine max
  unsure at all n locations
  Clone ID: LIB3028-001-Q1-B1-A4
ttctgtctcgcctgcaatgacatancaacgcagggctgggcacgtaagcaaggcattcggctcgacgtttgtctcctcaccttatcattctttccagaatgttggtgccatcacagttctccaagtatgggcgtatctccagttcatgccagctttgtccctaagcggctcttaactattgccatttacttgcggggctatcgcgtagaaaccaccgggagcaatgtgttccgcgagcaccgagtgtagcatattatgtaactcatgctgctgatcagtgcgccccttagtctgacatcgtaggtccagcggacctaggaccacttggtgtccaggggacagctcatgcgatcgccgtcacacttgttcgaccagagaagatcatactatccatggcactttctccgcttaggctttgccagacatggaccccatcatcatcgcacgcacgcgaccgttgcgaagtccagattcgcctagttcaggggaaagcctgg

SEQ ID NO: 4134 - DNA, 498 bp, Glycine max
  unsure at all n locations
  Clone ID: LIB3028-001-Q1-B1-C8
atctattgcaagccaggagaaccgattgcatgcctgccggtctactctagaagatcccctcggggaattccaattccacattttcaagaaataaggaggcaaaaatgttcatatatgaattggaattatttgttttcttattaggcctatcctgaagccaaaggaaatgagatcggaattcctcggggaattccaattccacattttcaagaaataaggaggcaaaaatgttcatatatgaattggaattatttgttttcttattaggcctatcctgaagccaaaggaaatgagatcggaattcctcggggaattccaattccacattttcaagaaataaggaggcaaaaatgttcatatatgaattggaattatttgttttcttattaggcctatcctgaagccaaaggaaatgagatcggaattcctcgggggtaccgagctcgaattccctatagtgagtcgtattaaattcctaatcaagtcacaactggttcn

SEQ ID NO: 4135 - DNA, 466 bp, Glycine max
  Clone ID: LIB3028-001-Q1-B1-D10
tccgagcacatatgcccatgacacctagactaccgtctgtacaccggcaagcgccgagggtcactctactgtcagaaactcggtcgcgagatccggcttacagtgccctgccatatcctcaatctgggatcagacacacggtgtggatcatacgacatactcatgtcatggcgacatgtctatccatgtctacggttgccaacgcacatggcaccattttgccatccgcacgactgttcagtatcacatatcattccttccatccattacacactgaccgtgcacacactcacttcatgaatgctcaacacgttgagcatttgctctggctcaaaattttcaacactcacgatcttctacaccaagagcacagttctacttcactgtggacaccgtttagccccagcacgtgtcactcactgcgaactacttccctcgcaacgttttcttggttacacctctcatc

SEQ ID NO: 4136 - DNA, 495 bp, Glycine max
  unsure at all n locations
  Clone ID: LIB3028-001-Q1-B1-D12
cggcttcgaatgaatcaggtagtctataggctactatgacgtagcatgcacgcgtacgtaaactcggaaatcggctcgagtanaggtataaagaatctcttccaaggttaatatacttctctaaccaaagtataatatatagcacattaaagttcataatactttataataaaaagtggacgcttgcatgagtacataaaatatttatacattatatttccactagccatcaatcatgtcgtaatacctgttgaggtgattcagtagactcgaagccgtgtcttattctttatggtttttataagcatatgacatttttctttttggaattatttattagtccaaattcttgcttgcataagattaactcactgcagcttgtgaagaattaaatttagttaccataaatgattttgcattaatattttttttcctttttgatatataaagatgttcttaaaatgattttttttctcgttttccaaagatgggcaa

SEQ ID NO: 4137 - DNA, 495 bp, Glycine max
  Clone ID: LIB3028-001-Q1-B1-D5
aattaattagctagctatagaaacgctatgacgtcgcaggcacgcgtacgtaagcacgggcttccgatcgagctcgtctacccgggaattaattccggaccggtacctgcaggcgtaccagctttccctatagtgagtcctattagagcttggcgtaatcatggtcatagctgtttcctgtgtgaaattgttatccgcgcacaattccacagaagatacgagccggaagcataaagtgtagagcctggggtgcctaatgagtgagctaactcacattaattgcgttgcgctcactgcccgctttccagtcgggaaacctgtcgtgccagctgcattaatgaagcagccaactgcgcggggagaggcggtttgcgtattgggcgccacggtggtttttcttttcaccagtgagacaggcaacagctgattgcccttcaacgactggcactgagatagttacagcaatcggtccaagcaggtttgccacaacaagtg

SEQ ID NO: 4138 - DNA, 493 bp, Glycine max
  unsure at all n locations
  Clone ID: LIB3028-001-Q1-B1-D9
ggccaccgaatgaatcangtggtctataggcctacactgacgttaggtccacgcgtccgtaaactcggaaatcggctcgagggtttatttgacagaggggagattttaggaggctgagaagcacgcatagagatgactgaagcttctgctggaatggggatgtccgtgggacaggaggacttcttgggaaggctgggtggcctggacaagggtcttgctcatgagggcaaatgacaaatcttggcctcagacttcatggggcatcctcaatttgggtcttgtaaactaataatgccttatcatctacttaatgccatccatcccccgatcatataatattctactagataagccataagtacaaggttagtgcatcaaaaaaaataataacaaggcggccgccgactagtgagctcgtctacacgggatttaattccggaccggttcctgcatgcgtaccatctttccctacagtgagtcctattaaagcctt

SEQ ID NO: 4139 - DNA, 516 bp, Glycine max
  Clone ID: LIB3028-001-Q1-B1-E2
ggcgctgtgcaactattcgctagccccgacagaacgattgcatgcctgccggtcgactctagagagatcacctcggggaattccaattccacattttcaagaaataaggaggcaaaaatgttcatatatgaattggaattatttgttttcttattaggcctatcctgaagccaaaggaaatgagatcggaattcctcggggaattccaattccacattttcaagaaataaggaggcaaaaatgttcatatatgaattggaattatttgttttcttattaggcctatcctgaagccaaaggaaatgagatcggaattcctcggggaattccaattccacattttcaagaaataaggaggcaaaaatgttcatatatgaattggaattatttgttttcttattaggcctatcctgaagccaaaggaaatgagatcggaattcctcgggggtaccgagctcgaattccctatagtgagtcgtaataaattccgtatcaaggtaaaaccggtttccggtg

SEQ ID NO: 4140 - DNA, 506 bp, Glycine max
  Clone ID: LIB3028-001-Q1-B1-F4
tgaatgaattagccaggcaagactaagacatcgcatgcacgcgtacgtaagcacgggataagagacaccggcatactctgcgacatcgtataacgttactggtttcacattcaccaccctgaattgactctcttccgggcgctatcatgccataccgcgaaaggttttgcgccattcgatggtgtcaacgtaaatgccgcttcgccttcgcgcgcgaattgcaagctctgcattaatgaatcggccaacgcgcggggagaggcggtttgcgtattgggcgctcttccgcttcctcgctcactgactcgctgcgctcggtcgttcggctgccgcgagcggtatcagctcactcaaaggcggtaatacggttatccacagaatcaggggataacgcacgaaagaacatgtgagcaaaaagccagcaaaaggccacgaaccgtaaaaaggccgcgttgctggcgtttttccaaaaggtccagcccccctgacaagcatcacaaaaattg

SEQ ID NO: 4141 - DNA, 526 bp, Glycine max
  unsure at all n locations
  Clone ID: LIB3028-001-Q1-B1-F8
tgacgttgtgaatgaaattgaatttgccgagactatanaaatactatgacgtcgcaggcacgcgtacgtaagcacggaattgactctcttccgggcgctatcatgccataccgcgaaaggttttgcgccattcgatggtgtcaacgtaaatgccgcttcgccttcgcgcgcgaattgcaagctctgcattaatgaatcggccaacgcgcggggagaggcggtttgcgtattgggcgctcttccgcttcctcgctcactgactcgctgcgctcggtcgttcggctgcggcgagcggtatcagctcactcaaaggcggtaatacggttatccacagaatcaggggataacgcaggaaagaacatgtgagcaaaaggccagcaaaaggccaggaaccgtaaaaaggccgcgttgctggcgtttttccataggctccgcccccctgacgagcatcacaaaaatcgacgctcaagtcagaggtgtgcaaaaccgcacaaggactataaggatacaaggcgtttccccctga

SEQ ID NO: 4142 - DNA, 501 bp, Glycine max
  Clone ID: LIB3028-001-Q1-B1-G7
tgaatgaaatcaggccagctatagaaaagctatgacgtcgcaggcacgcgtacgtaagcacgggccgactagtgagctcgtcgacccgggaattaattccggaccggtacctgcaggcgtaccagctttccctatagtgagtcgtattagagcttggcgtaatcatggtcatagctgtttcctgtgtgaaattgttatccgctcacaattccacacaacatacgagccggaagcataaagtgtaaagcctggggtgcctaatgagtgagctaactcacattaattgcgttgcgctcactgcccgctttccagtcgggaaacctgtcgtgccagctgcattaatgaatcggccaacgcgcggggagaggcggtttgcgtattgggcgccagggtggtttttcttttcaccagtgagacgggcaacagctgattgcccttcaccgcctggccctgagagagttgcagcaagcggtccacgctggtttgccccaacaaggcaca

SEQ ID NO: 4143 - DNA, 484 bp, Glycine max
  unsure at all n locations
  Clone ID: LIB3028-001-Q1-B1-H10
ntgaattggttatgtgtctctataagatagggccatccgtccgtaaactcggaaataattccggaccggtacctgcaggcgtaccagctttccctatagtgagtcgtattagagcttggcgtaatcatggtcatagctgtttcctgtgtgaaattgttatccgctcacaattccacacaacatacgagccggaagcataaagtgtaaagcctggggtgcctaatgagtgagctaactcacattaattgcgttgcgctcactgcccgctttccagtcgggaaacctgtcgtgccagctgcattaatgaatcggccaacgcgcggggagaggcggtttgcgtattgggcgccagggtggtttttcttttcaccagtgagacgggcaacagctgattgcccttcaccgcctggccctgagagagttgcagcaagcggtccacgctggtttgccccagcaggcgaaaatcctgtntgatggtgggtaa

SEQ ID NO: 4144 - DNA, 507 bp, Glycine max
  unsure at all n locations
  Clone ID: LIB3028-001-Q1-B1-H11
gtntgtnccnctggtgtggaatgaattangtggtctatagacgactatgacgtaacgtccacgcgtacgtaagatcggcttcatgggagaaaataatactgttgatgggtgtctggtcagagacatcaagaaataaacccggaacaatagtgcagggagcttccacagcaatggcatcctggtcatccagcggatagttaatgatcagcccactgacccgttgcgcgagaagattgtgcaccgccgctttacaggcttcgacgccgcttcgttctaccatcgacaccaccacgctggcacccagttgatcggcgcgagatttaatcgccgcgacaatttgcgacggcgcgtgcagggccagactggaggtggcaacgccaatcagcaacgactgtttgcccgccagttgttgtgccacgcggttgggaatgtaattcagctccgccatcgccgcttccactttttcccgcgttttcgcagaaacgtggctggcctggttcaacacgc

SEQ ID NO: 4145 - DNA, 499 bp, Glycine max
  Clone ID: LIB3028-002-Q1-B1-A10
gggccgcgctgccttaatgagtcaggttgcgtatagtagactcctgacgtcgcgaccacgcgtacgtaaactcggaattcggctcgagctcgagccgcactgttgtgccatgtacatggtcagcatcagaaactttgaagatgaagccagacggggttcttttcagcaatggccctggagatccgtctgctgttccttatgccgttgaaacagtgaagaatattatcggaaaggtgcctgtttttggaatttgcatgggccatcaattgctaggccaggctttaggaggtaaaaccttcaagatgaaatttggtcaccatggaggaaatcaccctgttcgtaaccttcgaagtggccatgttgaaattagtgcccagaagcacaactatgctgttgaccctgccacactgccggaaggagtggaggttacgcatatcaatctaagtgatggaagtcgtgccggtcttgccttcaccgctcaaccatcttagctctcttc

SEQ ID NO: 4146 - DNA, 492 bp, Glycine max
  Clone ID: LIB3028-002-Q1-B1-A7
tgcggtgtcgaatgatactaaacgacgtgctctactcgacgcccaccgggcctcgacgcacgcgtacgtaagctcgggctcgagccgtagaaaggccgcgttgctggcgtttttccataggctccgcccccctgacgagcatcacacaaatcgacgctcaagtcagaggtggcgaaacccgacaggactatatagatactaggcgtttcccgctggaagctccctcgtgcgctctcctgttccgaccctgccgcttaccggatacctgtccgcctttctcccttcgggaagcgtggcgctttctcatagctcatgctgtaggtatcccagttcggtgtaggtcgttcgctccaagctgggctgtgtgcacgaatcccccgttcagcccgaccgctgcgccttaccgggtcactatcgtcttgagtccaaccggttagacacacttaccgccactggcagcagcacttggtacaggattacagacgccaggtc

SEQ ID NO: 4147 - DNA, 478 bp, Glycine max
  unsure at all n locations
  Clone ID: LIB3028-002-Q1-B1-A9
ttaggagccttatgctctaatnncaacgccnnncgtccntcgcatacgtatactcgggcttcggatcgagctcgtcgatccgggaattaattccggaccggtacctgcaggcgtaccagctttccctatagtgagtcgtattagagcttggcgtaatcatggtcatagctgtttcctgtgtgaaattgttatccgctcacaattcgacacaacatacgagccggaagcataaagtgtaaagcctggggtgcctaatgagtgagctaactcacattaattgcgttgcgctcattgcccgctttccagtcgggaaacctgtcgtgccagctgcattaatgaatcggccaacgcgcggggagaggcggtttgcgtattgggcgccagggtggtttttcttttcaccagtgagacgggcaacagctgattgcccttcatcgcctggccctgatagagttgcagcaagccgtccacgctggtt

SEQ ID NO: 4148 - DNA, 494 bp, Glycine max
  unsure at all n locations
  Clone ID: LIB3028-002-Q1-B1-B4
acggtgtcgaatgatccacgtgctacagcttaccacacgtagtcggaccgcccgtacgtacactcggaattcggctcgagaaactgggttgttgaggccagttctcacattttgcttgtcctgagtgtaaaagtattgttatattacaagaacagtttttaatgccaaaatataaaacgtacagggcggccgcctactagtgagcttgtcgacccgggaattaattccggacttgtacctgcaggcgtgcaatctttccctacactgagtcgtatcagagcttggcggtaacatggccatatgtgtatcctgcgtgaaattgttagccgcgcatacttccacacaacatacgaatcggatcccataaatgtgattcccgaggtgcccaatcaattagctatatcacacccattgctttgcggtcactgctctgctttccactctggaaaaccgcagtgcaatctgctcttcctacttccgcgcttgcgcggcgn

SEQ ID NO: 4149 - DNA, 492 bp, Glycine max
  Clone ID: LIB3028-002-Q1-B1-B8
cgccctcttctcgaatgaatcgactgtcgtatagaccatactgacgtcggacgcacgcgtacgtaagctcggaattcagcgccacgacaatttgcgacggcgcgtgcagggccagactggaggtggcaacgccaatcagcaacgactgtttgcccgccagttgttgtgccacgcggttgggaatgtaattcagctccgccatcgccgcttccactttgtcccgcgttttcgcagaaacgtggctggcctgattcaccacgcgggaaacggtctgataagagacagcggcatactctgcgacatcgtataacgttactggtttcacattcaccaccctgaattgactctcttccgggcgctatcatgccataccgcgaaaggttttgcgccattcgatggtgtcaacgtaaatgccgcttcgccttcgcgcgcgaattgcaagctctacattaatgaatcggccaacgcacggggacacgccgtttgcgtatg

SEQ ID NO: 4150 - DNA, 485 bp, Glycine max
  unsure at all n locations
  Clone ID: LIB3028-002-Q1-B1-B9
atcaatcgccattaaggctttaantagactactgacgtcggacgcacgcgtacgtaaactcggaattcggctcgagcaacgccgcttccactttttcccgcgttttcgcataagcgtggctggcctggttcaccacgcgggacacggtctgatgagatacaccggcgtactcagcgacatcgtacaacgttatatggtttcacattcaccaccctgaattgactctcttccgggcgctatcatgccataccgcgaaaggttttgcgccattctatggtgtcaacgtaaatgccgcttcgccttcacgcgcgaattgcaagctctgccttaatgaatcggccaacgcgctgagagatgcggtttgcgtattgggcgctcttccgcttcctcgctcactgactcgctgcgctcgtgtcgttcggctgcagcgagcggtatcagcacaatcaaaggccgtaatacagttatccacagaatcacgtgat

SEQ ID NO: 4151 - DNA, 499 bp, Glycine max
  unsure at all n locations
  Clone ID: LIB3028-002-Q1-B1-C4
agtgtcgctcgaattgaatctaggtcgcactgcagaagagcactgtagtcgcgaccgcgcgtacgtaaactcggaattcggctcgagatgggaagcagtggggttcagtatcttcaccgctgtcacgttgactcaaagccttcgcaacgtctaatcatgtggtaccctctggaagaaaactttataagtatggtgagaactgcaggaaatacagcatctacgatcgtccatgcagatcgcctgcgccaccgtgagattgaccacgatcctgttacacacattgacgacgcacttcacttgtatccagcaccagagactcttggtgggtacggattaacactcactttgatggcggtgtttctgaacgcctcaaaacctgtgtaaagagttacacttcctaaaattactcttcttccaccttaatggtcttggctacaaaggcagggtacgatcaagttgcagcagcctgtgaacttccctcttgagttggtttagggtn

SEQ ID NO: 4152 - DNA, 473 bp, Glycine max
  Clone ID: LIB3028-002-Q1-B1-D5
ctcaatcgctggtctatagtagactactgacgtcggacgcacgcgtacgtaagctcggaattcggctcgagcgttactggtttcacattcacgactctgaagtgactctcgtccgggcgctatcatgccatagcgcgaacggttttgcgccattcgatggtgtcaacgtaaatgccgctgcgccttcgcgcgcgaatttcaaactctgcattaatgaatcggcaatagcgcggtgagatgccgtttgcgtactgggcgctcttccgcgtcctcgttcactgactcgctgcgctcggtcgttcggctgcggtgagctgtatcagctcactcaaaggcggtgattaagtcatcctcacaatcaggggataacgcaagatagaatatgtgagcatttggccagcaaaaggccaggaaccgtaaagatgctgccttgctgacattgttccataggctccgcccccctgactagcatc

SEQ ID NO: 4153 - DNA, 483 bp, Glycine max
  unsure at all n locations
  Clone ID: LIB3028-002-Q1-B1-E11
cttaatgagtaaggtggcttatagaagacactgacgtcggacgcacgcgtacgtaaactcggaattcggctcgagtgaaccttgatactctattaattagatgttgacgccgatatggtttggattgtaattaggaatagtacactaggaggatttcagtctctatccatgctggatgagaatggatttgctactcatcctactatgcctttaatttgactactatgcttgcttctattcaacctatgtcaagataagcaagtcaagttaatgcttctagtaatgttcaacttttttgttatacttcagttaatgatactttatcaggttgatcttaaaatgggtgtccgccgactagtgagctcgtcgacccgggaattacttccggagcggtatctgcacgcgtacctgctttcactatagtgagtcgtatcataccttgtcgtattcatggtcataactgtttcctgtgtgaaattgttn

SEQ ID NO: 4154 - DNA, 501 bp, Glycine max
  Clone ID: LIB3028-002-Q1-B1-E12
tcttgtatgctttgatcacttaaatgcacatacgccatctgactacgcatacgtcaatcggaattcggctcgagtgaaatttgattcgctattaagctgatgtagatgccgttatggattagattgtctttctgataggtggtttgtgatgatacgagtttctgtggttgcatgacgaggatggagttgcttcggggggaagtacgcagttatgtttaaattatgcttgcgattatgtagcgcttggtaaggacgagcatgtcgtattacaggctgtagtataggatacattgtttgttctacctcactgatcaggatatttttatgtgtattcttggtttcctctttttgttacggtgttcgtaatggatgttgtagctcttgtgttctggtatctgcgtctgttcggtgtccgtgctctggtgtctcagctgtcttgttggtatggtatttgccttgttatgcgttgttctttgttggccgttgtcgttttgtctgttg

SEQ ID NO: 4155 - DNA, 494 bp, Glycine max
  Clone ID: LIB3028-002-Q1-B1-E4
tgggcggtgaatgaatgaatcgcctgtcgaagagcactgtagtcggatccgcgcgtacgtaaactcgagaattcggctcgagcaatacccgagtgagtgatagatatgtgacgtgccgttgataggaatcaatataatctgtaaggtatatgtcagatattgtgtagataaccatttttcatcatggaggggtagctgaacgacgaggatgatcttcacggggactcgttagaaccttattctaaagctaatatctctgcctactacgatacgatagcagcgcaacattgcgttgtccaaactaactggatatcctaaggtcaagacgttattggagtcgaatccggtgccgaatccaagtctgaaactgaatcttatttcaagtcctattctgagaagccctttaatatcacccagcactttatcaagcttttggagacatcccatttggtcgatgacgttgcgcttttcggggcttgggcgccgttataaag

SEQ ID NO: 4156 - DNA, 485 bp, Glycine max
  unsure at all n locations
  Clone ID: LIB3028-002-Q1-B1-E9
ttaatgagtgaggtgcactatagaagagactgacgtcggacgcacgcgtacgtaaactcgggtcaccgtacatgccgcttcgccttcgcgcgcgaattgcaagctctgcattaatgaatcggccaacgcgcggggagaggcggtttgcgtattgggcgctcttccgcttcctcgctcactgactcgctgcgctcggtcgttcggctgcggcgagcggtatcagctcactcaaaggcggtaatacggttatccacagaatcaggggataacgcaggaaagaacatgtgagcaaaaggccagcaaaaggccaggaaccgtaaaaaggccgcgttgctggcgtttttccataggctccgcccccctgacgagcatcacaaaaatcgacgctcaagtcagaggtggcgaaacccgacaggactataaagataccaggcgtttccccctggaagcctcctcgtgcgctctcctgttccgaccctgccgcn

SEQ ID NO: 4157 - DNA, 482 bp, Glycine max
  Clone ID: LIB3028-002-Q1-B1-F1
gggtgtcgaataatcactagcctgtcgaagactacgaagtcggaccgcccgtacgtaaactcggaattaggggataacgcaggaaagaacatgtgagcaaaaggccagcataaggccaagaaccgtaaaaaggccgcgttgctggcgtttttccataggctccgcccccctgacgagcatcacaaaaatcgacgctcaagtcagaggtggcgaaacccgacaggactataaagataccaggcgtttccccctggaagctccctcgtgcgctctcctgttccgaccctgccgcttaccggatacctgtccgcctttctcccttcgggaagcgtggcgctttctcatagctcacgctgtaggtatctcagttcggtgtaggtcgttcgctccaagctgggctgtgtgcaccaaccccccgttcagcccgaccgctgcgccttatccggtaactatcgtcttgagtctaacccggtaagacacca

SEQ ID NO: 4158 - DNA, 513 bp, Glycine max
  unsure at all n locations
  Clone ID: LIB3028-002-Q1-B1-F10
aggtgtncaccgtggctcggaatgaatcangtggctangtggcttaannaagaccacggccgtcggacgcacgcatacgtaaactcggaattcggctcgagtgaaatgcccgacaatcaaatcatgaatccaaaaacttcacaaatgtatcactgatgctgttgctgagtaattagtttggtttctgatatatgtccctcctcagcagtcttatcatactcaatcagaaaacaatggataaatgtacaaaatctgtttcgaatgatggagttggctataacgattatggatttaacattaatgtttaccaattaccataaatgttgataacttcctttttagaacgtttttttgaacaaacaaaaattagggcggccgccgacgagtgagctcgtcgacccgggaattaattcaggaccggtacatgcatgcgtaccaactttccatatagtgagtcgtattagagcttggcataatcatggtcagaactgtttcctgtgtgacattgttatn

SEQ ID NO: 4159 - DNA, 486 bp, Glycine max
  Clone ID: LIB3028-002-Q1-B1-F3
tgggtgtcgaatgaatcacgtcgcttgccgaagagcactgatgtcgcgaccacccgtacgtaaactcagatctcggctctcactttttcccgcgttttcacaaaaacgttgcttggctgggtcagcaaccgggaaaacgtctgaaataaaacacccggatactctgcgaaatccttaaacgttactgggttcacattcaccaacctggattgactctcttcggggcgctatcatgccataccgcgaaatgttttgcgccattcgatggtgtcaacgtaaatgccgcttcgccttcgcgcgctaattgcaaactctgcattaatgaatcggccaacgcacggggagacgcggtttgcgtattgggcgctcttccgcttcctcgctcactgactcgctgcgctcggtcattcagctgcggctagccgtatcatctcactcagatgcggtaatacggttatccacagaatcaggggataacccatgata

SEQ ID NO: 4160 - DNA, 550 bp, Glycine max
  unsure at all n locations
  Clone ID: LIB3028-002-Q1-B1-H2
cgagtgtttggaatgcattcacgagtcagtgcactatcgacgagcactggcctctgacgcacgcgtacgtcaanncttnngttttgtttttgtgtttttttgtgtatggtgttacttagagttggtatttaagaagggagtcttcacctttgctgttctgcacaccggcactcaagggaaggccattgttaccgtccggctatatctgggggggggcgctctttcccaccttcgatactcacgggcaagcctcgtgtatgactgttactcgctgttgagtccctctggctggaagtggaatttgcttttctacttacgtgtttctccacggtttcctctgttccaaggtgataactgggttgttcacatagccgcttgtagggtcctatgttggttatgtgtccagcatggcctttgatcgtctgtgcttccgggaaactgagtgtctggtgccaggctacctgagtttaccttcatacaataggttcgagcaaagactccgagatactgctctgggaatttcggacctgtttgcatcgaacttcttttt

SEQ ID NO: 4161 - DNA, 485 bp, Glycine max
  Clone ID: LIB3028-002-Q1-B1-H4
ttcctcgtctggtctaagaacactaccggactcggtcgtacgtaaactcgacattgcaagctctgcattaatgaatcggccaacgcgcggggagaggcggtttgcgtattgggcgctcttccgcttcctcgctcactgactcgctgcgctcggtcgttcggctgcggcgagcggtatcagctcactcaaaggcggtaatacggttatccacagaatcaggggataacgcaggaaagaatatgtgagcaaaaggccagcaaaaggccaggaaccgtaaaaaggccgcgttgctggcgtttttccatacgctccgcccccctgacgagcatcacaaaaatcgacgctcaagtcagatgtggcgaaacccgacaggactataaagataccaggcgtttccccctggaagctccctcgtgcgctctcctgttccgacccttcccgcttaccggatacctgtccgccgttctcccttgggaaagctgccg

SEQ ID NO: 4162 - DNA, 691 bp, Glycine max
  unsure at all n locations
  Clone ID: LIB3028-003-Q1-B1-A8
tgtggcgcgtcgggtgtggcagataattcatgcangatggacccacaaaggntcctacctcgaccnttggnccgtngcnttgatacgctcagtctcgcgtacttcgtgcgtcgtattttgtctccttcgtcggctttctttctctgcgccatcttcgctcttctgtgcttgttgttgtggcctggtgtctccttgtctttccctgtgtttcgctgccttcgctttctggctcccgtttcttgtcgcgcggttggtctttctggctgggggttcttctgttgtctccgtccctctctcgctctccttcctcccgttgtcggcgggtccgtgttttgctgtctgttctctgctctgtttgctctccttcgtttcctcgtctccttgtcttcgtctgcttctttgtctgctcttctctctctcttgctctgcttctctgtgtttggtcgtgtcttctgcttttcgtgcctgcttgctgtcctggtctttctgtcgttcctcctgtttctgcgttgctctcctgtggtgcgctttcctctgctcttcttcgcgctcttctcgtctttctctcgttctcgcgctctgcgtctgctcttctttctgcctgctcgtcgcctggtttcctctgctgcttctggctgtgcttcgctctctgtgtgtgtcctcggtcttgctcgtgctgtctggtctcttg

SEQ ID NO: 4163 - DNA, 489 bp, Glycine max
  unsure at all n locations
  Clone ID: LIB3028-003-Q1-B1-A9
aatgaatcangtggcgtatagatgagtactgacgtcggatccacgcgtacgtaaactcggatgtgagcaaaaggccagcaaaaggccaggaaccgtaaaaaggccgcgttgctggcgtttttccataggctccgcccccctgacgagcatcacaaaaatcgacgctcaagtcagaggtggcgaaacccgacaggactataaagataccaggcgtttccccctggaagctccctcgtgcgctctcctgttccgaccctgccgcttaccggatacctgtccgcctttctcccttcgggaagcgtggcgctttctcatagctcacgctgtaggtatctcagttcggtgtaggtcgttcgctccaagctgggctgtgtgcacgaaccccccgttcagcccgaccgctgcgccttatccggtaactatcgtcttgagtccaacccggtaagacacgacttatcgccactggcagcagccactggtaacaagatt

SEQ ID NO: 4164 - DNA, 476 bp, Glycine max
  unsure at all n locations
  Clone ID: LIB3028-003-Q1-B1-B5
tgagatgcantggcctataaaagaagatgacgtcgcacgcacgcgtacgtaagctcggaattaattccggaccggtacctgcaggcgtaccagctttccctatagtgagtcgtattagagcttggcgtaatcatggtcatagctgtttcctgtgtgaaattgttatccgctcacaattccacacaacatacgagccggaagcataaagtgtaaagcctggggtgcctaatgagtgagctaactcacattaattgcgttgcgctcactgcccgctttccagtcgggaaacctgtcgtgccagctgcattaatgaatcggccaacgcgcggggagaggcggtttgcgtattgggcgccagggtggtttttcttttcaccagtgagacgggcaacaactgattgcccttcaacggcctggccctgagagaattgcaccaagccggtcaacgccgggtttgccccagcaggcgaaaatcg

SEQ ID NO: 4165 - DNA, 480 bp, Glycine max
  Clone ID: LIB3028-003-Q1-B1-B8
tatgatttcggtgctctataaaagacacatgacctcgcacgcacgcgtacgtaagctcggaattcagctccaccatcgccgcttccactttttcccgcgttttcgcagaaccgtggctggcctggttcaccacgcgggagacggtctgataagagacaccggcatactctgcgacatcgtataacgttactggtttcacattcaccaccctgaattgactctcttccgggcgctatcatgccataccgcgaaaggttttgcgccattcgatggtgtcaacgtaaatgccgcttcgccttcgcgcgcgaattgcaagctctgcattaatgaatcggccaacgcccggggagaggcggtttgcgtattgggcgctcttccgcttcctcgctcactgactcgctgcgctcggtcgttcggctgcggcgatcggtattagctcactcaacggcggtaatagggttatccacagaatcaggggag

SEQ ID NO: 4166 - DNA, 486 bp, Glycine max
  unsure at all n locations
  Clone ID: LIB3028-003-Q1-B1-C4
ngaatgaatcaggttgcataggcaagattatgaagtcggacgcaggcgtacgtaagctcggaatttgattgcgagtgagatatttatgccagccagccagacgcagacgcgccgagacagaacttaatgggcccgctaacagcgcgatttgctggtgacccaatgcgaccagatgctccacgcccagtcgcgtaccgtcttcatgggagaaaataatactgttgatgggtgtctggtcagagacatcaagaaataacgccggaacattagtgcaggcagcttccacagcaatggcatcctggtcatccagcggatagttaatgatcagcccactgacccgttgcgcgagaagattgtgcaccgccgctttacaggcttcgacgccgcttcgttctaccatcgacaccaccacgctggcacccagttgatcggcgcgagatttaatcgccgcgacaatttgcgacggcgcgtgcagggccagactgg

SEQ ID NO: 4167 - DNA, 475 bp, Glycine max
  Clone ID: LIB3028-003-Q1-B1-C7
tatgaatgccgtggcacataaaagaagatgacgtcgcacgcacgcgtacgtaagctcggctcactcaaaggcggtaatacggttatccacagaatcaggggataacgcaggaaagaacatgtgagcaaaaggccagcaaaaggccaggaaccgtaaaaaggccgcgttgctggcgtttttccataggctccgcccccctgacgagcatcacaaaaatcgacgctcaagtcagaggtggcgaaacccgacaggactataaagataccaggcgtttccccctggaagctccctcgtgcgctctcctgttccgaccctgccgcttaccggatacctgtccgcctttctcccttcgggaagcgtggcgctttctcatagctcacgctgtaagtatctcagttcggtgtaggtcgttcgctccaacctgggccgttttcacgaaccccccgttcagcccgaccgctgcgccttatccgga

SEQ ID NO: 4168 - DNA, 492 bp, Glycine max
  Clone ID: LIB3028-003-Q1-B1-D1
cggcacctcgggaatgaattaggttgcacaggcaagactatgacgtcgcatgcacgcgtacgtaagctcggaatttgattgcgagtgagatatttatgccagccagccagacgcagacgcgccgagacagaacttaatgggcccgctaacagcgcgatttgctggtgacccaatgcgaccagatgctccacgcccagtcgcgtaccgtcttcatgggagaaaataatactgttgatgggtgtctggtcagagacatcaagaaataacgccggaacattagtgcaggcagcttccacagcaatggcatcctggtcatccagcggatagttaatgatcagcccactgacccgttgcgcgagaagattgtgcaccgccgctttacaggcttcgacgccgcttcgttctaccatcgacaccaacacgctgggaaccactttaatcggcgccagatttaatcgccgcgacaatttgcgacggcgcgtgcagggccaa

SEQ ID NO: 4169 - DNA, 505 bp, Glycine max
  unsure at all n locations
  Clone ID: LIB3028-003-Q1-B1-E12
gtctggtggcgggtctttgaatgaatcaggtggcctatggcagattctgacgacngacgcacgcctacgtaaactcggaatacggttatccacagaatcaggggataacgcaggaaagaacatgtgagcaaaaggccagcaaaaggccaggaaccgtaaaaaggccgcgttgctggcgtttttccataggctccgcccccctgacgagcatcacaaaaatcgacgctcaagtcagaggtggcgaaacccgacaggactataaagataccaggcgtttccccctggaagctccctcgtgcgctctcctgttccgaccctgccgcttaccggatacctgtccgcctttctcccttcgggaagcgtggcgctttctcatagctcacgctgtaggtatctcagttcggtgtaggtcgttcgctccaagctgggctgtgtgcacgaaccccccgttcagcccgaccgctgcgccttatccggtaactatcgtcctgagtccaacccggta

SEQ ID NO: 4170 - DNA, 501 bp, Glycine max
  Clone ID: LIB3028-003-Q1-B1-F11
ggctgcctggctggtcccgaatgaatcaggtggcttatggcagacaatgacgaccgaccacgcgcacgtaaactcggggccgcgttgctggcgtttttccataggctccgcccccctgacgagcatcacaaaaatcgacgctcaagtcagaggtggcgaaacccgacaggactataaagataccaggcgtttccccctggaagctccctcgtgcgctctcctgttccgaccctgccgcttaccggatacctgtccgcctttctcccttcgggaagcgtggcgctttctcatagctcacgctgtaggtatctcagttcggtgtaagtcgttcgctccaagctgggctgtgtgcacgaaccccccgttcagcccgaccgctgcgccttatccggtaactatcgtcttgagtccaacccggtaagacacgacttatcgccactggcagcagccactggtaacaggattagcagaacgaggtatgtaggcggtgctacagagttc

SEQ ID NO: 4171 - DNA, 485 bp, Glycine max
  Clone ID: LIB3028-003-Q1-B1-G12
actaatgtgtcttatggcagataatgacgtaggacgcacgcgtacgtaaactcggaattgcaagctctgcattaatgaatcggccaacgcgcggggagaggcggtttgcgtattgggcgctcttccgcttcctcgctcactgactcgctgcgctcggtcgttcggctgcggcgagcggtatcagctcactcaaaggcggtaatacggttatccacagaatcaggggataacgcaggaaagaacatgtgagcaaaaggccagcaaaaggccaggaaccgtaaaaaggccgcgttgctggcgtttttccataggctccgcccccctgacgagcatcacaaaaatcgacgctcaagtcagaggtggcgaaacccgacaggactataaagataccaggcgtttccccctggaagctccctcgtgcgctctcctgttccgaccctgccgcttaccggatacctgtccgcctttctcccttcgggaagcgt

SEQ ID NO: 4172 - DNA, 478 bp, Glycine max
  Clone ID: LIB3028-003-Q1-B1-G8
tatgattcagtggcacatataagaatatgacgtcgcatgcacgcgtacgtaagctcggattcagctccgccatcgccgcttccactttttcccgcgttttcgcagaaacgtggctggcctggttcaccacgcgggaaacggtctgataagagacaccggcatactctgcgacatcgtataacgttactggtttcacattcaccaccctgaattgactctcttccgggcgctatcatgccataccgcgaaaggttttgcgccattcgatggtgtcaacgtaaatgccgcttcgccttcgcgcgcgaattgcaagctctgcattaatgaatcggccaacgcgcggggagaggcggtttgcgtattgggcgctcttccgcttcctcgctcactgactcgctgcgctcggtcgttcggctgcggcgagcggtatcagctcactcaaaggcggtaatacggttatccacagaatcaggggatg

SEQ ID NO: 4173 - DNA, 493 bp, Glycine max
  Clone ID: LIB3028-003-Q1-B1-H8
tatcgagcttaggcggcctacgcatatgacctggacgcgcgcatcctaaaatcgcgttcggaccgagatgcacaggtcgccagttcctatcactgaccaagcatactggctgaccctacgctacgcatgggtccaactcgccgtccctcggtggcggcatctcttggctcttatgctcccctgaccgcgcggtccgcggcgaccgtgcagctcggggggatggcttccatgaccgaatgtgcatcggcccagtcttaccgtgattgtccataggcggtgcggactcccgccgctgcgctctggtcttcccaatcctgtactgtcctgcacttctgcgtctggcccatgcccatgtcgtgaacgcgaggacttctccggacacggatcattgttctgacctcatgcggaatgtgtcacgccgccactaccctcctctgggcctcctgatggcgcgccagcgaagttgctggcctctcaaacaccgggatttagg

SEQ ID NO: 4174 - DNA, 493 bp, Glycine max
  Clone ID: LIB3028-004-Q1-B1-B3
cgtgggtgctcgaatgaatcatgtggcctatggcagatactgacgacggacgcacgcctacgtaaactcggaattcggctcgagggggaagagaagaaaataatgaacatatacactatattgcctaagataactaacgggttgttgggttttaaagtccttggtgatttggatgtggcccatacttggcaattgatggccacacttgccttccaaaagccgtgctactttgctaacaacctctaacttgtgtaagctccaaatatctgttgtatggctagttagagaatatcaagtagaaatgggttgttgtattgtaagtatgtacatctacaaaacaaatccttacatttgaaccactagttcaatgaaatatatgtagttctaacttaatgctattttgaaatacatttccccctggaaactccctcataaaaaacggcggccgccgactagtgagctcgtcgacccgggaattaattccggaccggta

SEQ ID NO: 4175 - DNA, 483 bp, Glycine max
  Clone ID: LIB3028-004-Q1-B1-B6
agtaatgaatccaggtggcatataaaagatactgacgtcggacgcacgcgtacgtaaactcggaattctccaaagtttgtatagtgtaggatttgttggtattcgtgataaaaacacctcatcctattcattttgccatgacgggcgaactccagataaaggttttgaaagtaatgagaaattattaattcatccatgttactggcttggtttgaatctaaatcgtaatgcacttgctccagaggaagcagaggagataaatgacgaatatgatattaatattatttcagataattcagccattagaaataaaacaataggtcaaataactactcatctagatcagataccgataggaaatgaaggtgccactgaatttgaacaatggtgtttagacgcactaagaatagtatttgcatcccacctaacagacatcaagtcccatccaaatggtaacgcagttcagagacgagatattatagg

SEQ ID NO: 4176 - DNA, 487 bp, Glycine max
  Clone ID: LIB3028-004-Q1-B1-D8
cttatgaatcaggtggcatatagaagacactgacgtcggacgcacgcgtacgtaaactcggaattcggctcgaggccgggagaggctgtttgcgtattgggcgctcttccgcttccgcgctcactgaatcgctgcgctcggtcgttcggctgcggcgagcggtatcagcacactcagaggcggtaatacggttatcgacagaatcaggggatcttgcatgaaatgatgatgtcagcaaaatgccagcaaaaggccatgaaccgtacaaaggcctgctgttgctggcgtttttccataggctccgcccccgtgacgagcatcgaataaatcgacgctcaagtcagacgtggccaagcccgacaggactatcaagatatgatgcctttccccctggaagcttcctcgtgcgctctccagttccgagtctgtctcgtaacggagtcctgtccgccttgctcccttctggaagcgtggcactttctcatag

SEQ ID NO: 4177 - DNA, 481 bp, Glycine max
  unsure at all n locations
  Clone ID: LIB3028-004-Q1-B1-D9
ctaatgaatcaggtgacatatagaagataatgacgtcggacgcacgcgtacgtaagctcggaattcggctcgagctcgagccgattcggctcgagaaaaaaaaaaaaagaaaaaaagaaaaaaaaaaaaagggcggccgccgactagtgagctcgtcgacccgggaattaattccggaccggtacctgcaggcgtaccagctttccctatagtgagtcatattatagcttggcgtaatcatggtcatagctgtttcctgtgtgaaattgttatccgctcacaattccacacaacatacgagccggaagcataaagtgtaaatcctggggtgcctaatgagtgagctaactcacattaattgcgtagcgctcaatgcccgctttccagtcgggaaacctgtcatgccaactgcattaatgaatcggccaactcgcggggagaggcggtttgcgtattgggcgccagggtggtttttcttttn

SEQ ID NO: 4178 - DNA, 497 bp, Glycine max
  Clone ID: LIB3028-004-Q1-B1-F11
ctaatgatgcaggtgcactatagaagagtactgacgtcggacgcacgcgtacgtaagctcggacatcggctcgagagcaaagaagggggtggagggatacccttcctaatgacccttattccaccaagcttgtagttgtaccaagcaagtctttctggcagagggatgttgagatacatccttaggatgggtatccctccacccccagcatagaaaggccaaagtggattcctatttgtatgccacgacaggacagttttagaccctgtggttacaactgtggcattacgacggacaatgagctgtgtccaatatggcataaggcccattcagtgatatcaacttccgcacgcatacgctgtgcgcgttcccgccggcagagggatcgctatcgcgccctgcccaacgaagtctcctgacggaaggggcattgggtcaacctgccctcgatcggcctcacctgtgcaccactgcgtccctcttcgcggtcgcctttg

SEQ ID NO: 4179 - DNA, 495 bp, Glycine max
  Clone ID: LIB3028-004-Q1-B1-F3
ggtggctgccgaatgaatcaggtggcgtatggcagattatgacgacggacgcacgcgtacgtaaactcggaattgactctcttccgggcgctatcatgccataccgcgaaaggttttgcgccattcgatggtgtcaacgtaaatgccgcttcgccttcgcgcgcgaattgcaagctctgcattaatgaatcggccaacgcgcggggagaggcggtttgcgtattgggcgctcttccgcttcctcgctcactgactcgctgcgctcggtcgttcggctgcggcgagcggtatcagctcactcaaaggcggtaatacggttatccacagaatcaggggataacgcaggaaagaacatgtgagcaaaaggccagcaaaaggccaggaaccgtaaaaaggccgcgttgctggcgtttttccataggctccgcccccctgacgagcatcacaaaaatcgacgctcaagtcagaggtggcgaaacccgacaggactataag

SEQ ID NO: 4180 - DNA, 502 bp, Glycine max
  Clone ID: LIB3028-004-Q1-B1-F6
tgcgttgttcgaatgaatcatgtctcatatggcatatactgacgaacgacgtcgggcaagtcatcactgaactcggcatcagccattgcgctcggagatgccgtttgcgtattgggcgctcttccgcttcctcactcactgactcactggtctcggtcgttcggctgaggttagcggtatcagctcacttaaatgctgtaatgatgttatccacagaatcaggggataacgcaggaaataacatgtgagcagaaggccagcaaaaggccacgaaacttaagaaggctgcgttgctggcgtttttccataggctccgcgtccctgacgagcatcacaaaaatcgacgctcaattcagaggtggcgaaacccgactggactataaagataccatgcgtttccccctggaagctccctcgtgcgctctcctgttccgaccctgccgcttaccggatacctgtccgcctttctcccttcgggaagcgtggcactttctcatagctc

SEQ ID NO: 4181 - DNA, 489 bp, Glycine max
  unsure at all n locations
  Clone ID: LIB3028-004-Q1-B1-G10
aatgactcatgatgcangtggcatatagaagacactgacgtcggacgcacgcatacgtaagctcggaaggccagcaaaaggccaggaaccgtaaaaaggccgcgttgctggcgtttttccataggctccgcccccctgacgagcatcacaaaaatcgacgctcaagtcagaggtggcgaaacccgacaggactataaagataccaggcgtttccccctggaagctccctcgtgcgctctcctgttccgaccctgccgcttaccggatacctgtccgcctttctcccttcgggaagcgtggcgctttctcatagctcacgctgtaggtatctcagttcggtgtaggtcgttcgctccaagctgggctgtgtgcacgaaccccccgttcagcccgaccgctgcgccttatccggtaactatcgtcttgagtccaacccggtaagacacgacttatcgccactggcagcagccactgggaacaggattagca

SEQ ID NO: 4182 - DNA, 508 bp, Glycine max
  unsure at all n locations
  Clone ID: LIB3028-004-Q1-B1-G12
cggggcgttcgctgaattgaatgangtagtcaagtggcctataaaagagtaaggacgtcggacgcacgcgtacgtaaactcggaattgcaagctctgcattaatgaatcggccaacgcgcggggagaggcggtttgcgtattgggcgctcttccgcttcctcgctcactgactcgctgcgctcggtcgttcggctgcggcgagcggtatcagctcactcaaaggcggtaatacggttatccacagaatcaggggataacgcaggaaagaacatgtgagcaaaaggccagcaaaaggccaggaaccgtaaaaaggccgcgttgctggcgtttttccataggctccgcccccctgacgagcatcacaaaaatcgacgctcaagtcagaggtggcgaaacccgacaggactataaagataccaagcgtttccccctggaagctccctcgtgcgctctcctgttccgaccctgccgcttaacggatacctgtcngcctttctcccttcggga

SEQ ID NO: 4183 - DNA, 501 bp, Glycine max
  Clone ID: LIB3028-004-Q1-B1-H1
ggctgctgcgggttcggaatgaatcaggtggcctatggcagagtatgacgacggatgcacgcgtacgtaaactcgggaaaggttttgcgccattcgatggtgtcaacgtaaatgccgcttcgccttcgcgcgcgaattgcaagctctgcattaatgaatcggccaacgcgcggggagaggcggtttgcgtattgggcgctcttccgcttcctcgctcactgactcgctgcgctcggtcgttcggctgcggcgagcggtatcagctcactcaaaggcggtaatacggttatccacagaatcaggggataacgcaggaaagaacatgtgagcaaaaggccagcaaaaggccaggaaccgtaaaaaggccgcgttgctggcgtttttccataggctccgcccccctgacgagcatcacaaaaatcgacgctcaagtcagaggtggcgaaacccgacaggactataaagataccaggcgtttccccctggaagctccctcgtgcg

SEQ ID NO: 4184 - DNA, 504 bp, Glycine max
  unsure at all n locations
  Clone ID: LIB3028-004-Q1-B1-H3
gtctgctcgagggtgttgaatgaatcaggtcgtcagatggcagagtactgacaacngacccacgcctacgtaaactcggaattgcaagctctgcattaatgaatcggccaacgcgcggggagaggcggtttgcgtattgggcgctcttccgcttcctcgctcactgactcgctgcgctcggtcgttcggctgcggcgagcggtatcagctcactcaaaggcggtaatacggttatccacagaatcaggggataacgcaggaaagaacatgtgagcaaaaggccagcaaaaggccaggaaccgtaaaaaggccgcgttgctggcgtttttccataggctccgcccccctgacgagcatcacaaaaatcgacgctcaagtcagaggtggcgaaacccgacaggactataaagataccaggcgtttccccctggaagctccctcgtgcgctctcctgttccgaccctgccgcttaccggatacctgtccgcctttctcccttcggga

SEQ ID NO: 4185 - DNA, 508 bp, Glycine max
  unsure at all n locations
  Clone ID: LIB3028-004-Q1-B1-H6
cgacgctgttggaatgaatcaagaatctannaggccgantagtanactactgacgtcggacgcacgcgtacgtaagctcggaatttgattgcgagtgagatatttatgccagccagccagacgcagacgcgccgagacagaacttaatgggcccgctaacagcgcgatttgctggtgacccaatgcgaccagatgctccacgcccagtcgcgtaccgtcttcatgggagaaaataatactgttgatgggtgtctggtcagagacatcaagaaataacgccggaacattagtgcaggcagcttccacagcaatggcatcctggtcatccagcggatagttaatgatcagcccactgacccgttgcgcgagaagattgtgcaccgccgctttacaggcttcgacgccgcttcgttctaccatcgacaccaccacgctggcacccagttgatcggcgcgagatttaatcgccgcgacaatttgcgacggcgcgtgcaaggccagactggag

SEQ ID NO: 4186 - DNA, 491 bp, Glycine max
  unsure at all n locations
  Clone ID: LIB3028-004-Q1-B1-H8
ntccgcaatctnaatgtcgtaaagaagactactgacgtcggacgcacgcgtacgtaaactcggaattcggctcgagagcaatatggggggagttcccatcaggcaacaacggttctgcctgaccctacttaagcatgcatattatgtcagtgaagacttggtgtgaagccttggagcttacgttagaagagcaaaaggcccggggctagggtgagctgaggggggacagcgtaagtgagcgaatgtgtgtaagcccagtcaaacatgactgttctaggcggggcgggccacccaccttcgaatggtgttggtcctacggaccgtgaatggattcgcctctggcctctgggcacgtcggaaccgcatgagttcaccggggtggagcacagtccgccaaaatcggcataggttaggtgctattgatggaacatggtaagcctatctttctccatatggaagtgctgcgggcacatagagatgtgggtaganga

SEQ ID NO: 4187 - DNA, 501 bp, Glycine max
  unsure at all n locations
  Clone ID: LIB3028-005-Q1-B1-A7
aatgagtatgaatgccgggcacnancatnacctaccaggccnggtctacgcgtacgtaaactcggcttccactttttcccgcgttttcgcagaaacgtggctggcctggttcaccacgcgggaaacggtctgataagagacaccggcatactctgcgacatcgtataacgttactggtttcacattcaccaccctgaattgactctcttccgggcgctatcatgccataccgcgaaaggttttgcgccattcgatggtgtcaacgtaaatgccgcttcgccttcgcgcgcgaattgcaagctctgcattaatgaatcggccaacgcgcggggagaggcggtttgcgtattgggcgctcttccgcttcctcgctcactgactcgctgcgctcggtcgttcggctgcggcaagcggtatcagctcactcaaaggcggtaatacggttatccacagaatcaggggataccccaggaaagaacatgtgaccaaaaggcccccaag

SEQ ID NO: 4188 - DNA, 501 bp, Glycine max
  Clone ID: LIB3028-005-Q1-B1-A9
aatcaggttgcatatagaagactatgacgtcgcgcccacgcgtacgtaaactcggaattcggctcgagattccatcaccgctacccagaagactgttgatggaccatcagccaaggactggagaggtggaagagctgcttcatttaacatcattcctagcagcactggagctgccaaggctgttgggaaagtcctccctgctttgaatggaaaattgactggtatggcattccgtgttcccaccgtggatgtctctgttgttgacctcacagtgaggctggagaaagaagcttcctacgatgaaattaaaaatgctatcaaggaggaatcagagggcaagttgaagggaattcttggttacactgaagatgatgtggtctccactgactttatccgcgatagcagatcaagtatttttgatgcaaacgctggaattgcattgaataagaactttgtgaaacttgtttcctggtacgacaacgagtggggatacagctcacg

SEQ ID NO: 4189 - DNA, 520 bp, Glycine max
  Clone ID: LIB3028-005-Q1-B1-C4
gccaggttgccgaatgaattacgttgcctatgcaagagctatgacatcgcgtgcacgcctacgtaagatcggaattcggctcgaggtgattacctgagttgaggctcattctattgtagtacagtgaggaacaaggaagacataatagtactttacttgggaccaaaatgtatggttctctgaacacatatatgtatctgagtttgttttaggcaacatttgatccatgtcaaggaaggtacaactagtagtttttattattttttttttccaagatggatgtgaaaaaaaaaaaaaaaaaaaaagccataaaaaaaaaaaaaaaacaaaaaaaaaaaaaacagaaaaactaactacgcacacaaaaaacataaaataaaaaggggggcccccaacaattgaccccttcaacccggaaattaattccggaccggtacctgcagggttatcaactttcccaaaaataagtcctactaaaaccttggcctaacccggcccaaaacctgttccccgtttaaaa

SEQ ID NO: 4190 - DNA, 498 bp, Glycine max
  unsure at all n locations
  Clone ID: LIB3028-005-Q1-B1-C5
aatcacgatgcccagggccancaccgactatggcctcncatccacgcgtacgtaagatcggaattaattccggaccggtacctgcaggcgtaccagctttccctatagtgagtcgtattagagcttggcgtaatcatggtcatagctgtttcctgtgtgaaattgttatccgctcacaattccacacaacatacgagccggaagcataaagtgtaaagcctggggtgcctaatgagtgagctaactcacattaattgcgttgcgctcactgcccgctttccagtcgggaaacctgtcgtgccagctgcattaatgaatcggccaacgcgcggggagaggcggtttgcgtattgggcgccagggtggtttttcttttcaccagtgagacgggcaacagctgattgcccttcgacgcctggccctgagagagttgcagcaagcggtccacgctggtttgccccagcaggcgaaaatcctgtttgatggtggttaaccgcg

SEQ ID NO: 4191 - DNA, 515 bp, Glycine max
  unsure at all n locations
  Clone ID: LIB3028-005-Q1-B1-E1
ggcagccgcgaatgatttacgttgactatgcaagactatgactacgcgtccacgcctacgtaagatcggaattcggctcgagacagattcaagggataacgcatgacagaacatgtgagcaaaaggccatcaatcggccattgatacctcataaggccgcgttgctggcgtgtttccataagctccgcccccctgatgagcatcaaaaaaatcgacgctcacgtcacaagtggctaacccccacaggactatattgatatcatgagtatccccctggaagcacgctcgtgcgctctcatgttcagacatctgccgcttatcggatacttgtcagcctttctcccttctggaatcgtggtgctttctcatatctctacctgtacgtatctcacttcggtgtaagtccttcgctccaatatgggctgttttgcataacccccccttcagcacgtagcgctgtaccatatccggtacataccgtccttagtccaactcccgtaacacactacttattn

SEQ ID NO: 4192 - DNA, 517 bp, Glycine max
  Clone ID: LIB3028-005-Q1-B1-E2
cgggggccgggaatgaatcaggtcgcctagccaagagcactgacatcgcatgcacgcgtacgtaaactcggatgtctgctcgccagttgttgtgccacgcggttgggaatgtaattcagctccgccatcgccgcttccactttttcccgcgttttcgcagaaacgtggctggcctggttcaccacgcgggaaacggtctgataagagacaccggcatactctgcgacatcgtataacgttactggtttcacattcaccaccctgaattgactctcttccgggcgctatcatgccataccgcgaaaggttttgcgccattcgatggtgtcaacgttaaatgccgcttcgccttcgcgcgcgaattgcaagctctgcattaatgaatcggccaacgcgcgggggagaggcggtttgcgtattgggcgctcttccgcttcctcgctcaatgaactcgctgcgcccgggtcttcggctgcggcaaccggtttcaactcactcaaagggcgtaatagggttg

SEQ ID NO: 4193 - DNA, 515 bp, Glycine max
  Clone ID: LIB3028-005-Q1-B1-E9
cgtgtgggttagggaattgaagtcaggtgtgcttatggctgagctatgacgacgcgtccacgcgtacgtaagatcggaattccgagcttggatcctctagagcggccgccgactagtgagctcgtcgacccgggaattaattccggaccggtacctgcaggcgtaccagctttccctatagtgagtcgtattagagcttggcgtaatcatggtcatagctgtttcctgtgtgaaattgttatccgctcacaattccacacaacatacgagccggaagcataaagtgtaaagcctggggtgcctaatgagtgagctaactcacattaattgcgttgcgctcactgcccgcttctcagtcggaaaaacctgtcgtgcagctgcattaatgaatcggcaacgcgcggggagaagcggtttgcgtattgggcgccaaggtggtttttcttttcaacagtgagacgggcaacagctgattgcccttcaccgcctggccctgaaagagttgcagcaagcgg

SEQ ID NO: 4194 - DNA, 553 bp, Glycine max
  unsure at all n locations
  Clone ID: LIB3028-005-Q1-B1-F11
gagcgcatcgggaaatgaattaggtttgcttantgcctcagctagcgacttacccgtcccacgcccttacttaagaacccggaattccggcctccaaggaaaaaaggaattaacccggaacacaggccccgaaaaaaggtgtctctaaaccagaattaggaaaaggtttcacatttttgagggttccaaaaacaaccaaataacacttttgctgaaaattggctgaatannagagcaaagggaagagcagattcactggaaaaacagtggtcttgcttaaggactttattcacagtggcaagagaagtatcaaaaagcgcaacaaggggttctgtggatgctcaaggccttcaactaatgaggactaagtgagaaaatttagaatcattttgttgtaagtaccttctttaattggtatgtgtctaatcttagcataataattttaattttaaaaaacaaaaccaaaaaaaaaacggcggccgccgactagtgagctcgtcgacccgggaattaattccggaccggtacctgcaagcgtaccacctttccctat

SEQ ID NO: 4195 - DNA, 503 bp, Glycine max
  Clone ID: LIB3028-005-Q1-B1-F2
aagcatccgcttgcaaaggcgagaccacttgtactcgtgcaggtctactctagaggataaccccggggaattcaaattccacattttcacaaaataatgaggcaaaaatgttcatatataaattggaattatttgttttcttattacgcctatcctgaagccaaaggaaatgagatcggaattcctcggggaattccaattccacattttcaagaaataacgaggcaaaaatgttcatatatgaattggaattatttgttttcttattatgcctatcctgaagccaaaggaaatgagatcggaattcctcgggggtaccgagctcgaattccctatagtgagtcgtcataaattcgtaatcatgtcataactgtttcctggtgtaaatttgtaatcggctcacaattccacacaacatacgagccggaagcataaagtgtaaagcctggggtgcctaatgagtgagctaactcacattaatttcgttgcgctcactgcccgcg

SEQ ID NO: 4196 - DNA, 510 bp, Glycine max
  unsure at all n locations
  Clone ID: LIB3028-005-Q1-B1-G2
cggggttgtgaatgaaatcaagtcgtctagtcatctactcacccatcncgtccagncctacgtaagatcngaattcngctcaaggggtcaattcacgataactttttttccaacttttgcccttgaaggttcaacaacaatggttcaaggcctgcctcaaacccaaaagaacctggttggaaaagaatgatcatgacccctgttaaggcggtaagtggaagagctccttggttcatgcacacggattccaaaaattgagggtgccaagtcctggtcaagggtccggtgcaaacagcctccgtccatttgcgatgccggtgatccttgcagttaatacaaattggaagttcctgggttccgccataaattaggctctggtggggcttaacttcgaatgctgaatcacttatactatttgtgtttaaaatgcgatgaacaaaaccatttgagttccaaaagtcttacactaattgctgtcgcaaaatttggttaacaaatttattaatcggt

SEQ ID NO: 4197 - DNA, 513 bp, Glycine max
  Clone ID: LIB3028-006-Q1-B1-A2
cggccccctcgaatgagtcatggttgccgatgccagactatgacgacgcgtccacgcgcacgtaagatcggaacacagcgccagcaaaaggccaggaaccgtataaaggccgcgttgctggcgtttttccataagctccgcccccctgacgagcatcacaaaaatcgatgctcaagtcatatgtggcgaagcccgacaggactataaagataccaagcgtttcccctctggaaactccctcgtgcggactcctgttccgatcctgccgcttaccggatacctgtccgcctttctcgcttcgggaaacgttgggcattctcatagctcatgcggtacgtatctcacttccgtgtacgtcgttcgatccaagcttggctgtgtgcacgaagacccctttacgccaaccggagcgccttatccggtaactatcatcttgagtccaacccggttaaacccgacttaaaccgcactggcagcacccactggtaacaggataaacagagccaagttttg

SEQ ID NO: 4198 - DNA, 516 bp, Glycine max
  unsure at all n locations
  Clone ID: LIB3028-006-Q1-B1-B11
agacgcgttagggaatgaatcatgaatgctgttgcttattatacacactgacctcggatccacgcgtacgtaaactcgggtaataccgttatccacagaatcaggggataacgcaggaaagaacatgtgaacaaaaagccagcaaaacgccaggaaccgtaaaaagggcccgttgctggcgtttttccataagctcctgcccccttaacaacaacacaaaaatcgaacctcaagtcatatgtggccataccccgacaggactataacataccagccgttttcccctnaaagctccctcgtgcgctctcctgttccgaccctgccgcttaccggatacctgtccgcctttctcccttcgggaagcgtggcgctttctcatagctcacgctgtangtatctcagttcggtgtatgtcgttcgctccaagctgggctgtgtgcacgaaccccccgttcagcccgaccgctgcgccttatccggtaactatcgtcttgagtcaacccggtaagacacgac

SEQ ID NO: 4199 - DNA, 518 bp, Glycine max
  unsure at all n locations
  Clone ID: LIB3028-006-Q1-B1-B12
tgagtcgcccggcaatncgatatgaatcgcgtggactatagaagagcactgacgtcgcatccacgcgtacgtaagatcggaattcggctcgagctctctcaaggattggatgatggggatgatgtggagctggaaaagagtaatgttctcttgatgggtccaaccggttcagggaagacgttacttgcgaaaacactggctcgttttgtgaatgttccctttgtcattgctgatgctactaccctaacacaggctggttatgttggggaagatgtcgaatcaatattgtataaactacttgcggcagcagagttcaatgtccaagctgctcaacaagggattgtttacattgatgaagtggacaagataactaagaaggctgaaaacttgaatattagcccggatgtttctcgtgaaggtgtttaccacgcactttttaaaatgctcgaaagaaatatggtgaacctttcccagagacgaggaccggggaatcctccggggtgataaaaaaaaaattg

SEQ ID NO: 4200 - DNA, 493 bp, Glycine max
  Clone ID: LIB3028-006-Q1-B1-B4
ttagttagctatgccagactacgactaccgaccacgcctacgtaagatcggaatacggttatacacagaatcaggggataacgcatgacagaacatgtgagcataaggcatcacaaggcaggaacgtaaaaatgcgcgttgctggcgtttttccattaagctccgcccccctgacgagcatcacaaaaatcgacgctcaagtcacacgtggcgaaacccgacaggactataaagataccaggcgtttccccctggaagctccctcgtgcgctctcctgttccgaccctgccgcttaccggaaatctgtccccctttctcccctcgggaaacatggtgcttttccacagctcatgctgtatgtatcccaattcggtgtacgtcgtacgctccaagcttggctgctatgcaacaaaccccccgtgacaccctaccgcggcgccgtatcccggaatcttcagaccttcgaccactccaggcccaaaaacatctatg

SEQ ID NO: 4201 - DNA, 498 bp, Glycine max
  Clone ID: LIB3028-006-Q1-B1-C11
gtctgatgctgttgcctatctaagactatggcctcgcgtccacgcgtaagtaagctcggaattgactctcttccgggcgctatcatgccataccgcgaaaggttttgcgccattcgatggtgtcaacgtaaatgccgcttcgccttcgcgcgcgaattgcaagctctgcattaatgaatcggccaacgcgcggggagaggcggtttgcgtattgggcgctcttccgcttcctcgctcactgactcgctgcgctcggtcgttcggctgcggcgagcggtatcagctcactcaaaggcggtaatacggttatccacagaatcaggggataacgcatgaaagaacatgtgagcaaaacgccagcacaaggccaggaaccgtaaaaaggccgcgttgctggcgtttttccatacgctccgcccccctgaccagcatcacaggaatcgaagctcaagtcagaggtggcgaaaccctgacagactatcaagattacaggcgttt

SEQ ID NO: 4202 - DNA, 504 bp, Glycine max
  Clone ID: LIB3028-006-Q1-B1-D1
actctgactgctgatagccagagcactgacgacgcgtccacgcctacgtaagatcggaattcggctcgagttttgttatcaacacagtcctttacataacatcaaatttacccttgaaggacacaggtatcatgtgatgagatcaatcaagcacaacaaacttcaccaagcctgaagtttgaactgtagggcggcctcctcccaatgagcccgtcaaaccgggaattaattccggaccggtatctgcacgcgtacaaactttccctatcatgagtcgaatacaacttggcataatcatggccataactgtttcctgtgtaaaattgttatccgctcacagttcaacacaccatacgatccggaatcatatagtgtaaagcctggggtgccaaatgagtgagccaattcacattaattgcgttccgctcacagcccgcttcccagtcgtgaaacctttcctcccatccgcactaaaaaaattcgccaaaccccgcgaacaggaag

SEQ ID NO: 4203 - DNA, 502 bp, Glycine max
  unsure at all n locations
  Clone ID: LIB3028-006-Q1-B1-D7
ctatcgatgcangtgcgtccattatgacagtgacctcgcgtctacgcgtacgtaagctcggaattggccaacacgcggggagaggcggtttgcgtattgggcgctcttccgcttcctcgctcactgactcgctgcgctcggtcgttcggctgcggcgagcggtatcagctcactcaaacgcggtaatacggttatccacagaatcaggggataacgcatgacagaatatctgagcaataggccagcaaaagggcagtaaccgtaaataggccacgttgctggcgtttgtccataagctccgctcccctgaccagcatcacaaaaatcgacgctcaactcagacgtggcgaagccccatacgactatcaagatatcaggcgtttccccctgcaagcttcctcgtgcgctctccgggttcgtacctcccgcctaccggagcacccctaccgtctcgaagaccgccctcgtttcgaaactctccctaacaggaagcttttggatg

SEQ ID NO: 4204 - DNA, 516 bp, Glycine max
  Clone ID: LIB3028-006-Q1-B1-E10
gggtgcgtcgggaatgagtcttgatggctgttgcacactacgactatgaggccgggtccacgcgtaagtaagctcggctatcatgccataccgcgaaaggttttgcgccattcgatggtgtcaacgtaaatgccgcttcgccttcgcgcgcgaattgcaagctctgcattaatgaatcggccaacgcgcggggagaggcggtttgcgtagtgggcgctcttccgcttcctcgctcactgactcgctgcgctcggtcgttcggctgcggcgagcggtatcagctcactcaaaggcggtaatacggttatccacagaatcaggggataacgcaggaaagaacatgtgagcaaaaggccagcataaggccaggaaccgtaataaggccgcgttgctggcgtttttccatacgctccgccccgctgacgagcatcacaaaaatcgacgctcacgtcagaggtggcgatacccgacaggaatattaggattccaggcgtttcccactggaagctccctcgg

SEQ ID NO: 4205 - DNA, 494 bp, Glycine max
  Clone ID: LIB3028-006-Q1-B1-E4
attacgtgctaggcagactatgactacgcgtctacgcctacgtaagatcggcatcgcgcgcgaagtgcaatctctgcattaatgaatcggccaatgcgcggggagatgcggtttgcgtattgggctctcttccgcttcctcgctcactgactcgtcgtgctcggtcattcggctgcagcgagcggtatcaagctcactcaaacgctgtaatactgttatccactgaatcacgggataacgcacgaaagaacatgtgagctataggccagcaaaatgcctggaaccgtataaatgccgcgttgctcgcgtttttccataggctccgccgccctgacgagcatcatacaaatcgacgctcaagtcagaggtggcgaaacccgatacgactatacagataccaagcctttccccctggaagctctctcgtgcactctcctgttccgaccctgccgcttacccgatactggtccgcctttccccccttgggaagcgtt

SEQ ID NO: 4206 - DNA, 500 bp, Glycine max
  Clone ID: LIB3028-006-Q1-B1-E6
gctatgactgcggtggcatatataagacactgacgtcggacccacgcgtacgtaaactcgggtcaacgtaaatgccgcttcgccttcgcgcgcgaattgcaagctctgcattaatgaatcggccaacgcgcggggagaggcggtttgcgtattgggcgctcttccgcttcctcgctcactgactcgctgcgctcggtcgttcggctgcggcgagcggtatcagctcactcaaaggcggtaatacggttatccacagaatcaggggataacgcaggaaagaacatgtgagcaaaaggccagcaaaaggccaggaaccgtaaaaaggccgcgttgctggcgtttttccataggctccgcccccctgacgagcatcacaaaaatcgacgctcaagtcagaggtggcgaaacccgacaggactataaagataccaggcgtttccccctggaagctccctcgtgcgctctcctgttccgaccctgccgcttatcggataactgtt

SEQ ID NO: 4207 - DNA, 502 bp, Glycine max
  Clone ID: LIB3028-006-Q1-B1-F6
gctatgaatgcggtggcatatataaagagcactgacgctcgcgtccacgcgtacgtaaactcggaattccgagcttggatcctctagagcggccgccgactagtgagctcgtcgacccgggaattaattccggaccggtacctgcaggcgtaccagctttccctatagtgagtcgtattagagcttggcgtaatcatggtcatagctgtttcctgtgtgaaattgttatccgctcacaattccacacaacatacgagccggaagcataaagtgtaaagcctggggtgcctaatgagtgagctaactcacattaattgcgttgcgctcactgcccgctttccagtcgggaaacctgtcgtgccagctgcattaatgaatcggccaacgcgcggggagaggcggtttgcgtattgggcgccagggtggtttttcttttcaccagtgagacgggcaacagctgattgcccttcaacgcctggccctgagaaaagttcaacaagcg

SEQ ID NO: 4208 - DNA, 495 bp, Glycine max
  Clone ID: LIB3028-006-Q1-B1-F9
agtatgaatgcggtggcgtataaaagagagtgacgtcgcgtccacgcgtacgtaaactcgggccgactagtgagctcgtcgacccgggaattaattccggaccggtacctgcaggcgtaccagctttccctatagtgagtcgtattagagcttggcgtaatcatggtcatagctgtttcctgtgtgaaattgttatccgctcacaattccacacaacatacgagccggaagcataaagtgtaaagcctggggtgcctaatgagtgagctaactcacattaattgcgttgcgctcactgcccgctttcaagtcgggaaacctgtcgtgccagctgcattaatgaatcggccaatccccgggaaaaggcggtttgcgtattgggcgccagggtggtttttcttttcaccattgagacgggcaacagctgattgcccttcaccgcctggccctgagagagttgcagcaagcggtccacgctggtttgcccagcaggcg

SEQ ID NO: 4209 - DNA, 514 bp, Glycine max
  Clone ID: LIB3028-006-Q1-B1-G8
gggctggcgattgagttctgacgtccgtggcttactttggagcctggcctccgacgccgcgtacgtaaactcggcgcttcgccttcgcgcgcgaattgcaagctctgcattaatgaatcggccaacgcgcggggagaggcggtttgcgtattgggcgctcttccgcttcctcgctcactgactcgctgcgctcggtcgttcggctgcggcgagcggtatcagctcactcaaaggcggtaatacggttatccacagaatcaggggataacgcaggaaagaacatgtgagcaaaaggccagcaaaaggccaggaaccgtaaaaaggccgcgttgctggcgtttttccataggctccgcccccctgacgagcatcacaaaaatcgacgctcaagtcagaggtggcgaaacccgacaggactataaagataccaggcgtttccccctggaagctccctcgtgcgctctcctgttcccaccctgccgcttatcggatacctgtccgccttttctccctg

SEQ ID NO: 4210 - DNA, 517 bp, Glycine max
  unsure at all n locations
  Clone ID: LIB3028-007-Q1-B1-A1
agtctcgctgctgaatgaatcaggttgcatatacaagactatgacgtcggatgcacgcgtacgtaaactcagaatttgcgacggcgcgtgcagggccagactggaggtggcaacgccaatcagcaacgactgtttgcccgccagttgttgtgccacgcggttgggaatgtaattcagctccgccatcgccgcttccactttttcccgcgttttcgcagaaacgtggctggcctggttcaccacgcgggaaacggtctgataagagacaccggcatactctgcgacatcgtataacgttactggtttcacattcaccaccctgaattgactctcttccgggcgctatcatgccataccgcgaaaggttttgcgccattcgatggtgtcaacgtaaatgccgcttcgccttcgcgcgcgaattgcaagctctgcattaatgaatccgccaacgccgcggggagaagcngtttgcctaatgggcgctcctccggctccttggccacggaatccgcgcgcc

SEQ ID NO: 4211 - DNA, 515 bp, Glycine max
  unsure at all n locations
  Clone ID: LIB3028-007-Q1-B1-A2
aggaggctgatgaatgaatcangttgccctagccaagagcaatgacatcgcgtgcacgcctacgtaagatcggaattgactctcttccgggcgctatcatgccataccgcgaaaaggttttgcgccattcgatggtgtcaacgtanatgccgcttcgccttcgcgcgcgaattgcaagctctgcattaatgaatcggccaacgcgcggggagaggcggtttgcgtattgggcgctcttccgcttcctcgctcactgactcgctgcgctcggtcgttcggctgcggcgagcggtatcagctcactcaaaggcggtaatacggttatccacagaatcaggggataacgcacgaaagaacatgtgagcagaaggccagcaaaaggccatgaaccgtaaaaaggccgcgttgctggcgtttttccataggctccgcccccctgacgagcatcacaaaaatcgacgctcaagtcagaggtggcgaaacccgacaggactataaagataccaggcgtttcc

SEQ ID NO: 4212 - DNA, 483 bp, Glycine max
  unsure at all n locations
  Clone ID: LIB3028-007-Q1-B1-B9
aatgagtcaggatgccgtggcataactatgacacccgaccacgcctacgtaaactcggaatttgcgacggcgcgtgcagggccagactggaggtggcaacgccaatcagcaacgactgtttgcccgccagttgttgtgccacgcggttgggaatgtaattcagctccgccatcgccgcttccactttttcccgcgttttcgcagaaacgtggctggcctggttcaccacgcgggaaacggtctgataagagacaccggcatactctgcgacatcgtataacgttactggtttcacattcaccaccctgaattgactctcttccgggcgctatcatgccataccgcgaaaggttttgcgccattcgatggtgtcaacgtaaatgccgcttcgccttcgcgcgcgaattgcaagctctgcattaatgaatcggccaacgcgcggggagaggcggtttgcgtantgggcgctnctccgcctcctcg

SEQ ID NO: 4213 - DNA, 528 bp, Glycine max
  unsure at all n locations
  Clone ID: LIB3028-007-Q1-B1-D6
tttgattgacagcgcacctagccatacagccncgtcnactcgtcagtcggacgtcggctctcggctcgatgtctcaccatctcatccacgcgaacgagataccagcatcttgtggtagtctgtcaccggctcacagagtcacgatgcctatcttcgaggaggatctcaacgtcggcgttcagggccatcgaacatgagggcaggtaccggagggccgttgccacgactccgttgatctagtcccggacacgactcacatataacacactgtacacaccgatttggtggttcgctttagcaacagagacatttttgcacagcctactacctgctaccattgccggctagttcgttcttgctccaggctgctcgcactacctgcttttttattcctcctcacttccgacttacaccttctcctgccctttattgcacctcttcccccgttgtcctgcggactcctcacacgccgcctgccctgcatcaggcttcgtcatgccccgtgtgcggctatcgggcgagcttttg

SEQ ID NO: 4214 - DNA, 498 bp, Glycine max
  Clone ID: LIB3028-007-Q1-B1-D9
cgcgcggctgcgaatgaatcacgtttgcctatgcaagagcaatgacatcgcgtccacgcctacgtaaactcggaattcagctccgccatcgccgcttccactttttcccgcgttttcgcagaaacgtggctggcctggttcaccacgcgggaaacggtctgataagagacaccggcatactctgcgacatcgtataacgttactggtttcacattcaccaccctgaattgactctcttccgggcgctatcatgccataccgcgaaaggttttgcgccattcgatggtgtcaacgtaaatgccgcttcgccttcgcgcgcgaattgcaagctctgcattaatgaatcggccaacgcgcggggagaggcggtttgcgtattgggcgctcttccgcttcctcgctcactgactcgctgcgctcggtcgttcggctgcggcgagcggtatcagctcactcaaaggcggtaataccgttatccacagaatcaggggataacgc

SEQ ID NO: 4215 - DNA, 482 bp, Glycine max
  unsure at all n locations
  Clone ID: LIB3028-007-Q1-B1-E11
catgagagttgcctatgccaagagcactgacatcncgaccacgcctacgtaagaccggaatttgcgacggcgcgtgcagggccagactggaggtggcaacgccaatcagcatcgactgtttgcccgccagttgttgtgccacgcggttgggaatgtaattcagctccgccatcgccgcttccactttttcccgcgttttcgcagaaacgtggctggcctggttcaccacgcgggaaacggtctgataagagacaccggcatactctgcgacatcgtataacgttactggtttcacattcaccaccctgaattgactctcttccgggcgctatcatgcgataccgcgaaaggttttgcgccattcgatggtgtcaacgtaaatgccgcttcaccttcgcgcgcgaattgcaagctctgcattaatgaatcggccaacgcgcggggagaggccgtttgcgtactgggcggctctccgcttcttc

SEQ ID NO: 4216 - DNA, 501 bp, Glycine max
  Clone ID: LIB3028-007-Q1-B1-E4
aatgaatcacggtgcctatgccaagagcactgacatcgcgtcaacgcctacttaaaatcggaattcggtccaaggaaacccaaaggaaaaaattggttgaactgaaattcttggaaaattcctattttgattactataaaatgaaaaagagaatgcaagatgagattgatggtttattgcggagaatggaggcaacaaagcagcaatgggtttaattttatttttgttgcttttccttatgttttcttattcaggatactgctaaatgtgtaatttattgatatgtgatgtgttggtattgaggtggttcccagaatggatggttttcaatttgataaaaacaagttttttggtgtctaaaaaaacaaatcaaaacaaagggcggccgccgactagtgagctcgtcgacccgggaattaattccggaccggtacctgcaggcgtaccagctttccctatagtgagtcgtattagagcttggcgtaatcatgggcataactg

SEQ ID NO: 4217 - DNA, 500 bp, Glycine max
  unsure at all n locations
  Clone ID: LIB3028-007-Q1-B1-F1
tgaatcangttgcctatgcatgactatgacatcgcgtccacgcctacgtaaactcgggtttttccataggctccgcccccctgacgagcatcacaaaaatcgacgctcaagtcagaggtggcgaaacccgacaggactataaagataccaggcgtttccccctggaagctccctcgtgcgctctcctgttccgaccctgccgcttaccggatacctgtccgcctttctcccttcgggaagcgtggcgctttctcatagctcacgctgtaggtatctcagttcggtgtaggtcgttcgctccaagctgggctgtgtgcacgaaccccccgttcagcccgaccgctgcgccttatccggtaactatcgtcttgagtccaacccggtaagacacgacttatcgccactggcagcagccactggtaacaggattagcanagcgaggtatgtaggcggtgctacagagttcttgaaatggtggcctaaatatgggtacaacaaaa

SEQ ID NO: 4218 - DNA, 500 bp, Glycine max
  Clone ID: LIB3028-007-Q1-B1-F7
atccgatctgcgttgcctataaaggagtactgacgccgcgtccacgcgtacgtaaactcgggttgctggcgtttttccataggctccgcccccctgacgagcatcacaaaaatcgacgctcaagtcagaggtggcgaaacccgacaggactataaagataccaggcgtttccccctggaagctccctcgtgcgctctcctgttccgaccctgccgcttaccggatacctgtccgcctttctcccttcgggaagcgtggcgctttctcatagctcacgctgtaggtatctcagttcggtgtaggtcgttcgctccaagctgggctgtgtgcacgaaccccccgttcagcccgaccgctgcgccttatccggtaactatcgtcttgagtccaacccggtaagacacgacttatcgccactggcagcagccactggtaacaggattagcagagcgacgtatgtatgcggtgctacataattcctgaacttgtggccctacctg

SEQ ID NO: 4219 - DNA, 515 bp, Glycine max
  unsure at all n locations
  Clone ID: LIB3028-007-Q1-B1-G1
gtgtggttgcgaatgaatcangttgcctatacaagagtatgacgtcgcgtccacgcgtacgtaaactcggaatcggccaacgcgcggggagaggcggtttgcgtattgggcgctcttccgcttcctcgctcactgactcgctgcgctcggtcgttcggctgcggcgagcggtatcagctcactcaaaggcggtaatacggttatccacagaatcaggggataacgcaggaaagaacatgtgagcaaaaggccagcaaaaggccaggaaccgtaaaaaggccgcgttgctggcgtttttccataggctccgcccccctgacgagcatcacaaaaatcgacgctcaagtcagaggtggcgaaacccgacaggactataaagataccaagcgtttcccccctggaagctccctcgtgcgctctcctgtttcgaccctgccgcttaccggatacctgtccgcctttctcccttcgggaaccttgggccttcccacaactcaccctgttaggtaccacat

SEQ ID NO: 4220 - DNA, 500 bp, Glycine max
  unsure at all n locations
  Clone ID: LIB3028-007-Q1-B1-G8
gtcggaatgccctggcctatnatagactatgacctcgcgtccacgcgtacgtaaactcggaatgccgcttcgccttcgcgcgcgaattgcaagctctgcattaatgaatcggccaacgcgcggggagaggcggtttgcgtattgggcgctcttccgcttcctcgctcactgactcgctgcgctcggtcgttcggctgcggcgagcggtatcagctcactcaaaggcggtaatacggttatccacagaatcaggggataacgcaggaaagaacatgtgagcaaaaggccagcaaaaggccaggaaccgtaaaaaggccgcgttgctggcgtttttccataggctccgcccccctgacgagcatcacaaaaatcgacgctcaagtcagaggtggcgaaacccgacaggactataaagataccaggcgtttccccctggaagctccctcgtgcgctctcccgttccgaccctgccgcttaacggatacctgtccgctttctcc

SEQ ID NO: 4221 - DNA, 515 bp, Glycine max
  Clone ID: LIB3028-007-Q1-B1-H1
cggggggtcgagaatgaatcaggttgtcctagacaagaccatgacatcgcgtccacgcgtacgtaaactcgggttatccacagaatcaggggataacgcaggaaagaacatgtgagcaaaaggccagcaaaaggccaggaaccgtaaaaaggccgcgttgctggcgtttttccataggctccgcccccctgacgagcatcacaaaaatcgacgctcaagtcagaggtggcgaaacccgacaggactataaagataccaggcgtttccccctggaagctccctcgtgcgctctcctgttccgaccctgccgcttaccggatacctgtccgcctttctcccttcgggaagcgtggcgctttctcatagctcacgctgtaggtatctcagttcggtgtaggtcgttcgctccaagctgggctgtgtgcacgaaccccccgttcaagcccgacgctgcgccttatccggtaactatcgtcttgagtccaacccggtaagacacgacttatcgccaacgg

SEQ ID NO: 4222 - DNA, 501 bp, Glycine max
  unsure at all n locations
  Clone ID: LIB3028-008-Q1-B1-A11
agagcggttgcgaatgaatcatgaggctggtggcgncntatnnantaatgacctcggatccacgcgtacgtaaactcggcgtaaaaaggccgcgttgctggcgtttttccataggctccgcccccctgacgagcatcacaaaaatcgacgctcaagtcagaggtggcgaaacccgacaggactataaagataccaggcgtttccccctggaagctccctcgtgcgctctcctgttccgaccctgccgcttaccggatacctgtccgcctttctcccttcgggaagcgtggcgctttctcatagctcacgctgtaggtatctcagttcggtgtaggtcgttcgctccaagctgggctgtgtgcacgaaccccccgttcagcccgaccgctgcgccttatccggtaactatcgtcttgagtccaacccggtaagacacgacttatcgccactggcagcagccactggtaacaggattagcagagcgaggtatgtaggccgtgc

SEQ ID NO: 4223 - DNA, 506 bp, Glycine max
  unsure at all n locations
  Clone ID: LIB3028-008-Q1-B1-C4
gcagtgctttcgcgaatgatctangtttgcctatgcaagactatgactaccgtccacgcctacgtaaactcggaattcagctccaccatcgccgcttcgactttttcccgcgttttcgcataaacgtggctggcctgtttcaccatgctggaaactgtctgatacgagacgacggcttagatctgcgacatcgtataacgttaccggtttcacattcaccaccctgaattgactctcttccgggcgctatcatgccatgacgcgaaatgttttgcgccattcgatggtgtcaacgtaaatgccgcttcgccgtctcgcgctaattgcaagctctgcattaatgattcggccaacgcctcgggagacgcagtttgtctatttcgcgctcttctgcgtcctcgctcactaattctcctctctctgtcattctgctgcggataatccgtatctgccccttccattgtggtaataccggtttccacaagtttcaggggagcactcacgaa

SEQ ID NO: 4224 - DNA, 504 bp, Glycine max
  unsure at all n locations
  Clone ID: LIB3028-008-Q1-B1-D6
ggtggcggtggttctagtatgaatcctgtggcatataaaagagactgacgtcggacccacgcgtacgtaaactcggctggcgtttttccataggctccgcccccctgacgagcatcacaaaaatcgacgctcaagtcagaggtggcgaaacccgacaggactataaagataccaggcgtttccccctggaagctccctcgtgcgctctcctgttccgaccctgccgcttaccggatacctgtccgcctttctcccttcgggaagcgtggcgctttctcatagctcacgctgtaggtatctcagttcggtgtaggtcgttcgctccaagctgggctgtgtgcacgaaccccccgttcagcccgaccgctgcgccttatccggtaactatcgtcttgagtccaacccggtaagacacgacttatcgccactggcagcagccactggtaacaggattagcagagcgaggtatgtaggcggtgctacagagttcttgaagtgggggcn

SEQ ID NO: 4225 - DNA, 483 bp, Glycine max
  Clone ID: LIB3028-008-Q1-B1-E11
tttgaatgctgtggcatatataagactatgacgtcggatgcacgcgtacgtaaactcggaatcggccaacacgcggggagaggcggtttgcgtattgggcgctcttccgcttcctcgctcactgactcgctgcgctcggtcgttcggctgcggcgagcggtatcagctcactcaaaggcggtaatacggttatccacagaatcaggggataacgcaggaaagaacatgtgagcaaaaggccagcaaaaggccaggaagcgtaaaaaggccgcgttgctggcgtttttccataggctccgcccccctgacgagcatcacaaaaatcgacgctcaagtcagaggtggcgaaacccgacaggactataaagataccaggcgtttccccctggaagctccctcgtgcgctctcctgttccgaccctgccgcttaccggacacctgtccgcctttctcccttccggaagcgtggcgctttctcatatg

SEQ ID NO: 4226 - DNA, 499 bp, Glycine max
  unsure at all n locations
  Clone ID: LIB3028-008-Q1-B1-F10
ggggtgctggaatgagttatgaatcangtggcgtattatagagactgacctcggacgcacgcgtacgtaaactcgggccgactagtgagctcgtcgacccgggaattaattccggaccggtacctgcaggcgtaccagctttccctatagtgagtcgtattagagcttggcgtaatcatggtcatagctgtttcctgtgtgaaattgttatccgctcacaattccacacaacatacgagccggaagcataaagtgtaaagcctggggtgcctaatgagtgagctaactcacattaattgcgttgcgctcactgcccgctttccagtcgggaaacctgtcgtgccagctgcattaatgaatcggccaacgcgcggggagaggcggtttgcgtattgggcgccacggtggtttttcctttcaacagtgagacgggcaacagctgattgcccttcacgcctggccctgacagagttgcagaangcggtccacgctgggttgc

SEQ ID NO: 4227 - DNA, 509 bp, Glycine max
  unsure at all n locations
  Clone ID: LIB3028-008-Q1-B1-F11
cgggtggtggttatcgtctgattcgcggcgctatcaagacactggtccngtctactcntacgttaatcgggcttgtgtcgaggtcgtcagcaggggtttgtctcttgtgtatcgtcttgctggacttgtgggctttccctctcttcttgccgtcttgtgtttggcgtcggggtggtcctgtctttctcctcggtctccttggtgtcggctgatgtttcgccagtgcgtcctttccgtagtcatatgtgtgtgatggcttcatggtgccgattgcgtgactttgcctgatgttaactgtcttgcgctgagtggctgcctttcatgcaggagtattggtcttgctcaccggcttagtgatgtccggcagcgtcttttttgagatgctgtatgctgtattgggcgccatgggagttcactcccttttagcatgtcagtcctccctcgttctgtctgcccgttcagcatcctttgcgctgatgcgattgcggtctagcgtttcactcttcttt

SEQ ID NO: 4228 - DNA, 485 bp, Glycine max
  Clone ID: LIB3028-008-Q1-B1-F9
agtttgaatgccgtggcgtatataagagtatgacctcggatgcacgcgtacgtaaactcggaattgcaagctctgcattaatgaatcggccaacgcgcggggagaggcggtttgcgtattgggcgctcttccgcttcctcgctcactgactcgctgcgctcggtcgttcggctgcggcgagcggtatcagctcactcaaaggcggtaatacggttatccacagaatcaggggataacgcaggaaagaacatgtgagcaaaaggccagcaaaaggccaggaaccgtaaaaaggccgcgttgctggcgtttttccataggctccgcccccctgacgagcatcacaaaaatcgacgctcaagtcagaggtggcgaaacccgacaggactataaagataccaggcgtttccccctggaagctccctcgtgcgctctcctgttccgaccctgccgcttaccggatacctgtccgcctttctccctttcgg

SEQ ID NO: 4229 - DNA, 486 bp, Glycine max
  Clone ID: LIB3028-008-Q1-B1-G12
ttacgaatcaagtggcctatagaagagcactgacgtccgaccacgcgtacgtaaactcggaattgagtctcttccgggcgctatcatgccataccgcgaaaggttttgcgccattcgatggtgtcaacgtaaatgccgcttcgccttcgcgcgcgaattgcaagctctgcattaatgaatcggccaacgcgcggggagaggcggtttgcgtattgggcgctcttccgcttcctcgctcactgactcgctgcgctcggtcgttcggctgcggcgagcggtatcagctcactcaaaggcggtaatacggttatccacagaatcaggggataacgcaggaaagaacatgtgagcaaaatgccagcaaaaggccaggaaccgtaaaaaggccgcgttgctggcgtttttccataggctccgcccccctgacgagcatcacaaaaatcgacgctcaagtcagaggtggcgagacccgacaggaatataaag

SEQ ID NO: 4230 - DNA, 494 bp, Glycine max
  unsure at all n locations
  Clone ID: LIB3028-008-Q1-B1-H8
ctgcgcaattaccttaggcgcgccagtnccccatngncnnngncnccncntanntnnaatcggttcctcgctcactgactcgctgcgctcggtcgttcggctgcggcgagcggtatcagctcactcaaaggcggtaatacggttatccacagaatcaggggataacgcaggaaagaacatgtgagcaaaaggccagcaaaaggccaggaaccgtaaaaaggccgcgttgctggcgtttttccataggctccgcccccctgacgagcatcacaaaaatcgacgctcaagtcagaggtggcgaaacccgacaggactataaagataccaggcgtttccccctggaagctccctcgtgcgctctcctgttccgaccctgccgcttaccggatacctgtccgcctttctcccttcgggaagcgtggcgctttctcatagctcacgctgtaggtatctcagttcggtgtaggtcgttcgctccaagctgggctgtgttc

SEQ ID NO: 4231 - DNA, 542 bp, Glycine max
  Clone ID: LIB3028-009-Q1-B1-B3
gttagccctcgttggctctgaatgaaatcagttgagcctatgtaagtcctaagacgtcgcatgcacgcgtaggtcagctaggaattcgactcgagcagaaaacggtggaatttcagacaggccagatgatgccgtggatgtctttcatacattcttcggggtggctggactttcacttcttgaatatccagggctgaaaccggtagatccagcgtatgctttacctgttgatgttgtaaatagaattttctttactaaagaaggacttaagtagttaagttcgatgataattttccagtaatgacaaaatcttgggtttgtaagactcactcttgggagttggaccccctcctcccatctccagtccaaaaacagttgatttcttaaaaacagtgtgaacattttgagcatcttttagttaaattgcagtgatacgacatgttaagattgatcagtattgtagtcaaccatcaaatttatcctactagttaaaaaaaaaaaaacaagggcggcgccgactatttacctcgtccaaccgggaa

SEQ ID NO: 4232 - DNA, 527 bp, Glycine max
  Clone ID: LIB3028-009-Q1-B1-B7
ggtctgaatgaaatcaatgagctatgttggctatagaagagctatgacgtcgcaggcccgcgtacgtaagcacggaattcggctcgagtagttctagatcgcgagcggccgccgactagtgagctcgtcgacccgggaattaattccggaccggtacctgcaggcgtaccagctttccctatagtgagtcgtattagagcttggcgtaatcatggtcatagctgtttcctgtgtgaaattgttatccgctcacaattccacacaacatacgagccggaagcataaagtgtaaagcctggggtgcctaatgagtgagctaactcacattaattgcgttgcgctcactgcccgctttccagtcgggaaacctgtcgtgccagctgcattaatgaatcggccaacgcgcggggagaggcggtttgcgtattgggcgccagggtggtttttcttttcaccagtgagacgggcaacagctgattgcccttcaacgcctggccctgaaaaattgcagcagccggtcaacggtg

SEQ ID NO: 4233 - DNA, 481 bp, Glycine max
  Clone ID: LIB3028-009-Q1-B1-C11
cgggtgtgaatgaatcagtcgcgaggcgtcagtatgatatcggagctcagacgtacgtaaaatcggattccgggcgctatcatgccataccgcgaaaggttttgcgccaatcgatggtgtcaacgtaaatgccgcttcgccttcgcgcgcgaattgcaagctctgcattaatgaatccggcaacacgcggggagaagcggtttgcctattgggcactcgtccgcgtcctcgcgcaatgaatcccatcactcgggcgtttgggagctgtcaactgtagcagcccaactcaaaggagctaaaatggtcatcacttgatgcagggaatcctgcagcaacgaaaatggtggcatccggccagtacatggcaataatgttaacatggcgcgttgctggtcattttccataaggtccgtccccgtgaacaccaatagaaaaatcgaggctcaagttcacaggtggggaaaacccgtccagaaaataa

SEQ ID NO: 4234 - DNA, 526 bp, Glycine max
  Clone ID: LIB3028-009-Q1-B1-C5
ggggtcgtcgcattaatgagctacgtaggctatataagactatgactcgcagcccgcgtacgtaagctcggatccagcggatagttaatgatcagcccactgacccgttgcgcgagaagattgtgcaccgccgctttacaggcttcgacgccgcttcgttctaccatcgacaccaccacgctggcacccagttgatcggcgcgagatttaatcgccgcgacaatttgcgacggcgcgtgcagggccagactggaggtggcaacgccaatcagcaacgactgtttgcccgccagttgttgtgccacgcggttgggaatgtaattcagctccgccatcgccgcttccactttttcccgcgttttcgcagaaacgtggctggcctggttcaccacgcgggaaacggtctgataagagacaccggcatactctgcgacatcgtataacgttactggtttcacaatcaccaacctgaattgactctcctcccggcgctatcatgccattccgcaaaagggtttccccacac

SEQ ID NO: 4235 - DNA, 521 bp, Glycine max
  unsure at all n locations
  Clone ID: LIB3028-009-Q1-B1-D5
gggctgcttctttaatggctagttggctcagnnagnacaacgacgtcgcaggcccgcgaacgtaagcacggaattccggaccggtaactgcaagggttacaacctttcccaaaattgattcgtattaaaccttggcttatccatggcaaaaccggttcccggtttaaaatgttaaccgcgcacaattccacacaacatacgagccggaagcataaagtgtaaagcctggggtgcctaatgagtgagctaactcacattaattgcgttgcgctcactgcccgctttccagtcgggaaacctgtcgtgccaactgcaataatgaatccgccaacgcgcggggaaaggcggtttgcgtattgggcgccaaggtggtttttcttttcaccagtgagacgggcaacagctgattgcccttcaacggctggccctgaaaaaattgcagcaagcgggccaaacctgggtttgcccaacaagcgaaaaatccgttttactgtggcttaccggcggaaatacacaccccc

SEQ ID NO: 4236 - DNA, 520 bp, Glycine max
  unsure at all n locations
  Clone ID: LIB3028-009-Q1-B1-E1
aggtggaatgaattcagtagccatanaggcctaacacgtcgcatgcacgcgtaggccagctaggaattcaactccgccatcgccgcttccactttttcccgcgttttcgcagaaacgtggctggcctggttcaccacgcgggaaacggtctgataagagacaccggcatactctgcgacatcgtataacgttactggtttcacattcaccaccctgaattgactctcttccgggcgctatcatgccataccgcgaaaggttttgcgccattcgatggtgtcaacgtaaatgccgcttcgccttcgcgcgcgaattgcaagctctgcattaatgaatcggccaacgcgcggggagaggcggtttgcgtattgggcgctcttccgcttcctcgctcactgactcgctgcgctcggtcgttcggctgcggcgagcggtatcagctcactcaaaggcggtaataccgttatccacagaatcaggggataaaccaagaaagaacatgtgacaaaatggcccccaa

SEQ ID NO: 4237 - DNA, 522 bp, Glycine max
  unsure at all n locations
  Clone ID: LIB3028-009-Q1-B1-E2
cggctatggaatgaactcatgtgaggctatataagcgtntacacgtcgcatgcccgcgtaggcaagctaggaattcagctcgagatttaataagaatggtatcaccattactttgtttttaaaaaaaaaaaaaaagggcggccgccgactagtgagctcgtcgacccgggaattaattccggaccggtacctgcaggcgtaccagctttccctatagtgagtcgtattagagcttggcgtaatcatggtcatagctgtttcctgtgtgaaattgttatccgctcacaattccacacaacatacgagccggaagcataaagtgtaaagcctggggtgcctaatgagtgagctaactcacattaattgcgttgcgctcactgcccgctttccagtcgggaaacctgtcgtgccagctgcattaatgaatcggccaacgcgcggggagaggccgtttgcgtattgggccccaaggtgggttttcctttcaacagtgagacgggcaacagctgattgcccttcacc

SEQ ID NO: 4238 - DNA, 516 bp, Glycine max
  Clone ID: LIB3028-009-Q1-B1-E5
ggcacgcctgttaataggctagtagcataaatagcctagctccagcccgcgtacgtaagcacggaattaattccggaccggtacctgcaggcgtaccagctttccctatagtgagtcgtattagagcttggcgtaatcatggtcatagctgtttcctgtgtgaaattgttatccgctcacaattccacacaacatacgagccggaagcataaagtgtaaagcctggggtgcctaatgagtgagctaactcacattaattgcgttgcgctcactgcccgctttccagtcgggaaacctgtcgtgccagctgcattaatgaatcggccaacgcgcggggagaggcggtttgcgtattgggcgccagggtggtttttcttttcaccagtgagacgggcaacagctgattgcccttcaccgcctggccctgagagagttgcagcaagcggtccacgctggtttgccccagcaggcgaaaatcctgtttgatggtggttaacggcgggatataacatgacg

SEQ ID NO: 4239 - DNA, 538 bp, Glycine max
  Clone ID: LIB3028-009-Q1-B1-E6
ggtgcttggggtgggtgcgaatgaactcaatgagccatgtgggctatagaagagctatgacgtcgcatgcccgcgtacgtaagctacggaattcggctcgaggtttttactcctgacttcgttcctgcgccttgatagcttctacattgatggcttcaggagacattagtatatacgactatactttgaaactcaatgtaattatgtcatttaaataattggttccgaatgttatttgaataattatttggaaggaaacccttcccttcctgatgtataaaaaaaaaaaaaaaaaaagaaaaaaaaaaaaaaaaaaaaaaaaaaaaaaaaaaaaaaaaaaaaaaaaaaaaaaaaaaaaaaaaaaaaaaaaaggggcggcccccgacaattgaccccgttaacccggaaattaattccggaccggtacctgcaggcttacaagctttccctaaagtgggtcgtatataaacttggggtaaccagggccaaagctgttcccggtgggaaaatgttaaccgctcaaaattcccaaaaacat

SEQ ID NO: 4240 - DNA, 521 bp, Glycine max
  Clone ID: LIB3028-009-Q1-B1-F4
cggtgtgaatgaaatccgtgagcctatagaggcgcaaggacgtcgcaggcacgcgtacgtaagctacggaattcagctcgagtttttctctcacctgaaaatgtcttgctgcggtggtaactgtggttgcggaagctcctgcaagtgcggcaacggctgcggaggctgcaagatgtacccagacttgagctacactgagtcaaccaccaccgagaccttggtcatgggagtggcacctgttaaggctcaatttgagggtgctgaaatgggtgtgcccgctgagaacgatggctgcaaatgtggaccaaactgctcctgcaacccctgcacttgcaagtgaggtgttgggagagcaagcttcaagcagagatagccctttattaaggataaatgataactattaatgtgttaccaaaaacctaagttataagtccggtatggttttccgtcaacctggtggtttggtggtaacaaaacatccttaaaataagatggccaagttcttgcctttaaacaatttg

SEQ ID NO: 4241 - DNA, 489 bp, Glycine max
  Clone ID: LIB3028-009-Q1-B1-G11
cgttgttgctgggtgggaatgaatcaagatgcgtagtcgtgagtatgatatcggacccaggcgtacgtaaactcgaaatgaatcggccaacgcgcggggagaggcggtttgcgtattgggcgctcttccgcttcctcgctcactgactcgctgcgctcggtcgttcggctgcggcgagcggtatcagctcactcaaaggcggtaatacggttatccacagaatcaggggataacgcatgaaagatcatgtgagcatatggccagcaaaaggccatgaaccgtaaaaaggccgcgttgctggcgtttttccataggctccgcccccctgacgagcatcacaaacatcgacgctcaagtcagaggtggcgaaacccgacaggactattaagatacacgcgtatcccgctgcatagctcctcgtgagctctcctgtatcggacctgccgttttaccggatacctgtcctcctttcccccctccggaaagatg

SEQ ID NO: 4242 - DNA, 486 bp, Glycine max
  unsure at all n locations
  Clone ID: LIB3028-009-Q1-B1-H11
cgctggtctgcgagtgggaatgaatcangttgcgtagccaagagcatgatatccgaccaggcgtacgtaaactcggaattcggctcgaggttctagatcgcgagcggccgccgactagtgagctcgtcgacccgggaattaattccggaccggtacctgcaggcgtaccagctttccctatagtgagtcgtattagagcttggcgtaatcatggtcatagctgtttcctgtgtgaaattgttatccgctcacaattccacacaacatacgagccggaagcataaagtgtaaagcctggggtgcctaatgagtgagctaactcacattaattgcgttgcgctcactgcccgctttccagtcgggaaacctgtcgtgccagctgcattaatgaatcggccaacgcgcggggagaggcggtttgcgtattgggcgccacggtggtttttcctttcaccagtgagacgggcaaaaactgattcccctccc

SEQ ID NO: 4243 - DNA, 523 bp, Glycine max
  Clone ID: LIB3028-010-Q1-B1-A6
tatacgacgcgcagtgagctacggtagtgaccgctacggcagcaggtccgcgtcagtaagcaaggcagtcggatgccaataaccgtctaaaggccgcgttgctggagtttttccatatgctcggccctcctgacgagcatcacaaagatcgacgctcacgtcagaggtggcgaaacccgacaggactataaagataccatgcgtttccccctgtaagctccctcgtgcgctctcctgttccgaccctgccgcttaccggatacctgtccgcctttctcccttcgggaagcgtggcgctttctcatagctcacgctgtacgtatcgcagttcggtgtaggtcgttcgctcgaagctgggctgtgtgcacgaaccccccgttcagcccgaccgctgcgccttatctggtaactatcgtcttgagtccaacccggtaagacacgacctaacgccaatgggaacagccactggtaacacgattactagagcgaaggatgtaggccgtgcacaataattccttgagtg

SEQ ID NO: 4244 - DNA, 530 bp, Glycine max
  Clone ID: LIB3028-010-Q1-B1-C6
ggccccggcccccctactgaagtctgtgagtcaggtaggacgtagggccgcagcctgcgtaagtaagctcgggtaaaaaggccgcgttgctggcgtttttccataggctccgcccccctgacgagcatcacaaaaatcgacgctcaagtcagaggtggcgaaacccgacaggactataaagataccaggcgtttccccctggaagctccctcgtgcgctctcctgttccgaccctgccgcttaccggatacctgtccgcctttctcccttcgggaagcgtggcgctttctcatagctcacgctgtaggtatctcagttcggtgtaggtcgttcgctccaagctgggctgtgtgcacgaaccccccgttcagcccgaccgctgcgccttatccggtaactatcgtcttgagtccaacccggtaagacacgacttatcgccactggcagcagccactggtaacaggattagcagagcgaggtaggtacgccgtgctacacagttcttgaattgggggccaaataaggctaaa

SEQ ID NO: 4245 - DNA, 515 bp, Glycine max
  unsure at all n locations
  Clone ID: LIB3028-010-Q1-B1-D5
ttctgaagtcagtgagtcgcgcagatagcgcagacctcgcagtccngcgtaagtaagctcgggccagcaaaaggccaggaaccgtaaaaaggccgcgttgctggcgtttttccataggctccgcccccctgacgagcatcacaaaaatcgacgctcaagtcagaggtggcgaaacccgacaggactataaagataccaggcgtttccccctggaagctccctcgtgcgctctcctgttccgagcctgccgcttaccggatacctgtccgcctttctcccttcgggaagcgtggcgctttctcatagctcacgctgtaggtatctcagttcggtgtaagtcgttcgctccaagctgggctgtgtgcacgaaccccccgttcagcccgaccgctgcgccttatccggtaactatcgtcttgagtccaacccggtaagacacgacttatcgccactggcagcaagcactggtaacaggattatcacagcaaggtatgtaggcggtgcaacagattttt

SEQ ID NO: 4246 - DNA, 519 bp, Glycine max
  Clone ID: LIB3028-010-Q1-B1-D6
ttctgacggctgtgagctcatgagggagcgacaggccgcatggccgcgtaagtaagctagggctggcgtttttccataggctccgcccccctgacgagcatcacaaaaatcgacgctcaagtcagaggtggcgaaacccgacaggactataaagataccaggcgtttccccctggaagctccctcgtgcgctctcctgttccgaccctgccgcttaccggatacctgtccgcctttctcccttcgggaagcgtggcgctttctcatagctcacgctgtaggtatctcagttcggtgtaggtcgttcgctccaagctgggctgtgtgcacgaaccccccgttcagcccgaccgctgcgccttatccggtaactatcgtcttgagtccaacccggtaagacacgacttatcgccactggcagcagccactggtaacaggattagcacaccgaggtatgtaggcggtgctacagagttcctgaagtggtggccctaacaacggtacactagaagaacagttg

SEQ ID NO: 4247 - DNA, 463 bp, Glycine max
  unsure at all n locations
  Clone ID: LIB3028-010-Q1-B1-E11
gggnttacagattattcattagctgtcctatagtaggatatgaggtcgcctgcacgcgtacgtaagctcggaattgcaagctctgcattaatgaatcggccaacgcgcggggagaggcggtttgcgtattgggcgctcttccgcttcctcgctcactgactcgctgcgctcggtcgttcggctgcggcgagcggtatcagctcactcaaaggcggtaatacggttatccacagaatcaggggataacgcaggaaagaacatgtgagcaaaaggccagcaaaaggccaggaaccgtaaaaaggccgcgttgctggcgtttttccataggctccgcccccctgacgagcatcacaaaaatcgacgctcaagtcagaggtggcgaaacccgacaggactataaagataccaggcgtttccccctggaagctccctcgtgcgctctcctgttccgaacctggcgcct

SEQ ID NO: 4248 - DNA, 531 bp, Glycine max
  Clone ID: LIB3028-010-Q1-B1-F5
ggccccggcccccttctgaagtctgtaggctatgaaagagctaagaggtcgcatgcccgcgtaagtaagctcggaattggccaacgcgcggggagaggcggtttgcgtattgggcgctcttccgcttcctcgctcactgactcgctgcgctcggtcgttcggctgcggcgagcggtatcagctcactcaaaggcggtaatacggttatccacagaatcaggggataacgcaggaaagaacatgtgagcaaaaggccagcaaaaggccaggaaccgtaaaaaggccgcgttgctggcgtttttccataggctccgcccccctgacgagcatcacaaaaatcgacgctcaagtcagaggtggcgaaacccgacaggactataaagataccaggcgtttccccctggaagctccctcgtgcgctctcctgttccgaccctgccgcttaccggatacctgtccgccttttctccttcgggaagcgttgggccttcgcatagctcacgcggttggtaactcaatttcggttaaggg

SEQ ID NO: 4249 - DNA, 523 bp, Glycine max
  unsure at all n locations
  Clone ID: LIB3028-010-Q1-B1-F6
tacgngaagtcangtnagtcagntagggagcgaagaggccgcaggcccgcgtaagtaagcacgggccgactagtgagctcgtcgacccgggaattaattccggaccggtacctgcaggcgtaccagctttccctatagtgagtcgtattagagcttggcgtaatcatggtcatagctgtttcctgtgtgaaattgttatccgctcacaattccacacaacatacgagccggaagcataaagtgtaaagcctggggtgcctaatgagtgagctaactcacattaattgcgttgcgctcactgcccgctttccagtcgggaaacctgtcgtgccagctgcattaatgaatcggccaacgcgcggggagaggcggtttgcgtattgggcgccagggtggtttttcttttcaccagtgagacgggcaacagctgattgcccttcagcgcctggccctgagagagttgcagcaagcggtccacgcgggtttgccccagcaaggcaaaatcctgtttgatggggggtaa

SEQ ID NO: 4250 - DNA, 531 bp, Glycine max
  unsure at all n locations
  Clone ID: LIB3028-010-Q1-B1-G2
gcgctctgaatgacctacgtaagtcaganagtcactgagnagtctatgcacgcgtacctaagctaggaattcagctccgccatcgccgcttccactttttcccgcgttttcgcagaaacgtggctggcctggttcaccacgcgggaaacggtctgataagagacaccggcatactctgcgacatcgtataacgttactggtttcacattcaccaccctgaattgactctcttccgggcgctatcatgccataccgcgaaaggttttgcgccattcgatggtgtcaacgtaaatgccgcttcgccttcgcgcgcgaattgcaagctctgcattaatgaatcggccaacgcgcggggagaggccgtttgcgtattgggcgctcttccgcttcctcgctcactgactcgctgcgctcggtcgttcggctgccgcgagcggtatcagctcactcaaaggctgtaatacggttatccacagaatcacgggataacgcaggaaagaacatgtgagcaanaaggccacaaaacggccg

SEQ ID NO: 4251 - DNA, 514 bp, Glycine max
  Clone ID: LIB3028-010-Q1-B1-G7
attctgaatgctgtagtcatgaaagagcgtagggccgcagcccgcgtaagtaagcacggctggcgtttttccataggctccgcccccctgacgagcatcacaaaaatcgacgctcaagtcagaggtggcgaaacccgacaggactataaagataccaggcgtttccccctggaagctccctcgtgcgctctcctgttccgaccctgccgcttaccggatacctgtccgcctttctcccttcgggaagcgtggcgctttctcatagctcacgctgtaggtatctcagttcggtgtaggtcgttcgctccaagctgggctgtgtgcacgaaccccccgttcagcccgaccgctgcgccttatccggtaactatcgtcttgagtccaacccggtaagacacgacttatcgccactggcagcagccactggtaacacgagtagcagacccatgtatgtacgcggtgctacagacttccttaaattggggctaactaccggtacactaaagaacagttg

SEQ ID NO: 4252 - DNA, 522 bp, Glycine max
  unsure at all n locations
  Clone ID: LIB3028-010-Q1-B1-H7
nttctgaagtccgtgagtctacgtagagagctatggggccgcaggcccgcgtaagtaagcacggaattgggcgctcttccgcttcctcgctcactgactcgctgcgctcggtcgttcggctgcggcgagcggtatcagctcactcaaaggcggtaatacggttatccacagaatcaggggataacgcaggaaagaacatgtgagcaaaaggccagcaaaaggccaggaaccgtaaaaaggccgcgttgctggcgtttttccataggctccgcccccctgacgagcatcacaaaaatcgacgctcaagtcagaggtggcgaaacccgacaggactataaagataccaggcgtttccccctggaagctccctcgtgcgctctcctgttccgaccctgccgcttaccggatacctgtccgcctttctcccttcgggaagcgtggcgctttctcataactcacgctgtaggtatctcagttcggtgtacgtccttcgctcaaagctgggctgtgtgcaccaaaccc

SEQ ID NO: 4253 - DNA, 492 bp, Glycine max
  Clone ID: LIB3028-011-Q1-B1-B8
gactcgaatcgccgtgtcgctatgagagctatctgacctcgcctgcacgcgtacgtaagctcggaattcagctccgccatcgccgcttccacatttttcccgcgttttcgcagaaacgtcgctggcctgattcaccacgctggagacgtgtctgagaatagacaccggcatagtctgcgacatcgtataacgttactggattcacattcaccagcctgaattgactctcttccgggcgctatcatgcgagaccgcgacaggttttgcgccattcgatggtgtcaacgtccatgccgcgtcgccgtcgcgcgcgacatgcacgctctgcattaatgaatcggccaacgcgcggggagaggcagtttgcgtattgggcgctcttccgcttcctcgctcactgactcgctgcgctcggtcgttcggcagcagcgagcggtatcagctcactctaatgcggtaatacggttatgcatagcatcaggggataacgca

SEQ ID NO: 4254 - DNA, 491 bp, Glycine max
  Clone ID: LIB3028-011-Q1-B1-C3
cggtctgtgaatgattcattgcgtgtctaaagcaattagtcgactcgcccgtacgtaagctcagggaaaggttttgcgccattcgatggggtcaacgttaatgccgcctccccctcccgcgccaatttccagctccggcataatgaatccggcaacgccccgggaaaaggcggtttgccttatggggcgctcttccgcctcctcgctcactgactcgctgcgctccgtccttcggctgcggcgagcggtatcagctcactcaaaggcggtaatacggttatccacagaatcaggggataacgcaggaaagaacatgtgagcaaaaggccagcaaaaggccacgaaccgtaaaaaggccgcgttgctggcgtttttccataggctccgcccccctgacgagcatcacaaaaatcgacgctcaagtcagaggtggcgaaacccgacaggactataaagataccagcgttttccccctggaagctccctcgtgg

SEQ ID NO: 4255 - DNA, 483 bp, Glycine max
  Clone ID: LIB3028-011-Q1-B1-C7
gcctccactggcatagtcacatgtagggatgatgggctcgcctgcacgcgaacgtaagctcggaatacggttatccacagaatcaggggataacgcaggaaagaacatgtgagcaaaaggccagcaaaaggccaggaaccgtaaaaaggccgcgttgctggcgtttttccataggctccgcccccctgacgagcatcacaaaaatcgacgctcaagtcagaggtggcgaaacccgacaggactataaagataccaggcgtttccccctggaagctccctcgtgcgctctcctgttccgaccctgccgcttaccggatacctgtccgcctttctcccttcgggaagcgtggcgctttctcatagctcacgctgtaagtatctcagttcggtgtacgtcgttcgctccaagctgggctgtgtgcacgaaccccccgttcagcccgaccgctgcgccctagccggtaactatcgtcttgagtcgag

SEQ ID NO: 4256 - DNA, 485 bp, Glycine max
  Clone ID: LIB3028-011-Q1-B1-C8
gctcgatcgcgtgtcacatataagcatatgacctcgcctgcacgcgtacgtacgctcggaatgccgcttcgccttcgcgcgcgaattgcaagctctgcattaatgaatcggccaacgcgcggggagaggcggtttgcgtattgggcgctcttccgcttcctcgctcactgactcgctgcgctcggtcgttcggctgcggcgagcggtatcagctcactcaaaggcggtaatacggttatccacagaatcaggggataacgcaggaaagaacatgtgagcaaaaggccagcaaaaggccaggaaccgtaaaaaggccgcgttgctggcgtttttccataggctccgcccccctgacgagcatcacaaaaatcgacgctcaagtcagaggtggcgaaacccgacaggactataaagattacaagcgtttccccctggaagctccctcgtgcgctctcctgttccgaccctgccgcttaccggatatg

SEQ ID NO: 4257 - DNA, 464 bp, Glycine max
  Clone ID: LIB3028-011-Q1-B1-D12
tgattgattgacgtgtcactatataagaagatgacgtcggacgcacgcgtacgtaagctcggaattcggctcgagagaagatgctgcttcccatgtttctggtactgaacccatcccggcatcaccctaataacgagatcttcattttcaaccctataatttcatctttgtagcattgtcaaattacgagttactgctttacgaattataatatgggagtgacaagtaattagagagatactgttctgagctgtgtatgttcaatttgccatttggaggttttctgaatacatatgccctataatatgaggaaaagaaatgaaattcaggaattcaaatgggcggccgccgactagtgagctcgtcgacccgggaattaattccggaccggtacctgcaggcgtaccagctttccctatagtgagtcgtattagagcttggcgtaatcatggtcatagctgttt

SEQ ID NO: 4258 - DNA, 501 bp, Glycine max
  Clone ID: LIB3028-011-Q1-B1-D2
gggcccgcgaatgaattcacttcgcatggcgcaagagatatgtagtcgcacggacccgtacgtaaagctaaagaattcggctccaagatttaagaacttccccgaagaagttggtcaaaaaataaatagtcaaattttgtggaaaaggtgtgttgtaatcccctcaagtagttgaatttgggtagaagaagtagatcccaccggcgccgactattgacctcgtcgaccggggaataattccggagcggtacctgcaggcgtagcaactttcctcacaatggagtcgtattatagcttggcgtaatcatggtcatagctgtttcccgtgtgaaattgttatccgctcacagatctacacaccatacgagccggaagcatatagtgtaaagcctggggtgcccaatgagtgagcccactcacattaactgcgtatcgcgcacagggcccctttcaaatctggaaaactgtgccttcaccctgtggtaaagaggacggggaaag

SEQ ID NO: 4259 - DNA, 500 bp, Glycine max
  unsure at all n locations
  Clone ID: LIB3028-011-Q1-B1-D3
gagggtgcgaatgatttactcgtccgacagaagatacagacgtcgcacggaccgcgtacgtaaagctcaggaattccngctccaagaacctggggctaaccttccgaaaaattccccttaaaaacaatatgcctataaccccgggttacaaaaatttggcttttcccggttcccggcctttcaaggtcataaaggggggttacatgctggaaacacacttgccactcacgagtttatggttcttcctgtgggagcttcctcgttcatggaagccatgaagatgggtgtacaagtgtatcacaatttgaagtctgtgattaagaagaaatatggtcaagatgcaataaatgttggtgacgaaagtggctttgcccctaacatccaggaaaacaaggaaggcttggaattgctgaaaactgccatcgccaaagctggttacacaggcaaagttgtcatttggatggatgttgcagcttctgaattctacaaggaagacaaac

SEQ ID NO: 4260 - DNA, 484 bp, Glycine max
  Clone ID: LIB3028-011-Q1-B1-D8
ttcgctcgccgtgtcatatgtaaggatatggcctcgcctgcacgcgtacgtaagctcgggccgactagtgagctcgtcgacccgggaattaattccggaccggtacctgcaggcgtaccagctttccctatagtgagtcgtattagagcttggcgtaatcatggtcatagctgtttcctgtgtgaaattgttatccgctcacaattccacacaacatacgagccggaagcataaagtgtaaagcctggggtgcctaatgagtgagctaactcacattaattgcgttgcgctcactgcccgctttccagtcgggaaacctgtcgtgccagctgcattaatgaatcggccaacgcgcggggagaggcggtttgcgtattgggcgccagggtggtttttcttttcaccagtgagacgggcaacagctgattgcccttcaccgcctggccctgagagagttgcagcaagccgtccaagctggtttgcc

SEQ ID NO: 4261 - DNA, 466 bp, Glycine max
  Clone ID: LIB3028-011-Q1-B1-D9
gatgtgattgcggtggcactatataagagatctgacgtcgcacgcacgcgtacgtaagctcggaattcggctcgatcttccaattttctcctccaatttcaatttctcgtcgtccctcattatggctcgtctctcgatcgtcgccatcgtcgccgccgtgctcctcctggccctctccgccacccccgcgacggcgcgtccctgcaggagcttcataatctcctcctactccttccgcaaccctaactccaacacgttcgccaccatcaccgagatccgatccttcacccctctctacatcaccgacaaacccccctcctatgcccttttcttcccccacgcgactcagctccctcagcatgagagcgtgcgcccacgcgcccctctagggttcgcctccgcctacgatttctcttcactccgcgaccgcaccaaggacatcctcagcgtcgccctaaccctcctt

SEQ ID NO: 4262 - DNA, 463 bp, Glycine max
  unsure at all n locations
  Clone ID: LIB3028-011-Q1-B1-E10
ctcgattgcgtgtcatatataagaagatgacgctcggacgcacgcgtacgtaagctcgggcaggaaagaacatgtgagcaaaaggccagcaaaaggccaggaaccgtaaaaaggccgcgttgctggcgtttttccataggctccgcccccctgacgagcatcacaaaaatcgacgctcaagtcagaggtggcgaaacccgacaggactataaagataccaggcgtttccccctggaagctccctcgtgcgctctcctgttccgaccctgccgcttaccggatacctgtccgcctttctcccttcgggaagcgtggcgctttctcatagctcacgctgtaggtatctcagttcggtgtaggtcgttcgctccaagctgggctgtgtgcacgaaccccccgttcagcccgaccgctgcgccttatccggtaactatcgtcttgagtccaanccgggtaagacacg

SEQ ID NO: 4263 - DNA, 495 bp, Glycine max
  Clone ID: LIB3028-011-Q1-B1-E2
cgggttgccgaatggatcaatcgcgtgtcaaaagcactgtagtcgactggaccgtacgtaagctcagaggacagaacatgtgagcaaaaggccagcaaaaggccagggaacgtaaaaaggcgcgttgccggcgtttttccataggctccgcccccctgacgagcatcacaaaaatcgacgctcaagtcagaggtggcgaaacccgacaggactataaagataccaggcgtttccccctggaagctccctcgtgcgctctcctgttccgaccctgccgcttaccggatacctgtccgcctttctcccttcgggaagcgtggcgctttctcatagctcacgctgtaagtatctcagttcggtgtaggtcgttcgctccaagctgggctgtgtgcacgaagcccccgttcagcccgaccgctgcgccttatccggtaactatcgtcttgaagtcaacccggtaagacacgacttatcgccactggcagcaagcactgg

SEQ ID NO: 4264 - DNA, 506 bp, Glycine max
  Clone ID: LIB3028-011-Q1-B1-E4
tgccgccccccgaatggctccactggcatgccgaagacgatatgacgtcgacgcacccgtacgtaagctcgggattcggctcgaatatagccagaacgagcatttaaggagatgtttggtctcaacgttaccccacaagctacgattaggaaatcttttacctggacaaccagtgtgaggcacattttgtgactttggagtttacattttaggtaggtagattgggatggcacatgtcaaaatttcccggctctatcgataacgtacataattagttttctccccttatcggataaacaaattgctttctgtcgtctgcatccaactctgattgccattgattgaacagtgggttgtacaattcagtgtaagtcgttcgctccaagcctgggctgtgtgcacgaaccccccgttcaacccgaaagacaaacgggaggccgccaactaatgtccttagtccaccgggaattaaattccggtcagtaccaatgagggtatacaacttt

SEQ ID NO: 4265 - DNA, 466 bp, Glycine max
  Clone ID: LIB3028-011-Q1-B1-F11
tgatcgaatcgccgtgtcctataaaagagcactgacgtcgcacgcacgcgtacgtaagctcggtttgcgtattgggcgctcttccgcttcctcgctcactgactcgctgcgctcggtcgttcggctgcggcgagcggtatcagctcactcaaaggcggtaatacggttatccacagaatcaggggataacgcaggaaagaacatgtgagcaaaaggccagcaaaaggccaggaaccgtaaaaaggccgcgttgctggcgtttttccataggctccgcccccctgacgagcatcacaaaaatcgacgctcaagtcagaggtggcgaaacccgacaggactataaagataccaggcgtttccccctggaagctccctcgtgcgctctcctgttccgaccctgccgcttaccggatacctgtccgcctttctcccctcggggaagcgtggcgctttcccaaacctcacg

SEQ ID NO: 4266 - DNA, 491 bp, Glycine max
  Clone ID: LIB3028-011-Q1-B1-H3
tgccgtcgaataatactagtctgacaaagatactgacgtcgacggacgcgtacgtaagctcagcgttgctggcgtttttccataggctccgcccccctgacgagcatcacacaaatcgacgctcaagtcagacgtggcgaaacccgacaggactatatagataccaggcgtttccccctggaagctccctcgtgcgctctcctgttccgaccctgccgcttaccggatacctgtccgcctttctcccttcgggaagcgtggcgctttctcatagctcacgctgtaggtatctcagttcggtgtaggtcgttcgctccaagctgggctgtgtgcacgaaccccccgttcagcctgaccgctgcgccttatccggtaactatcgtcttgagtccaacccggtaagacacgacttatcgccactggcagcagccactggtaacaggattagcacatcgaggtatgtaggcggtgctacagagttcttgaagtgg

SEQ ID NO: 4267 - DNA, 507 bp, Glycine max
  Clone ID: LIB3028-011-Q1-B1-H4
cgctctcctgaatgattacgatgccgtgtccgatgagcgccatcgcccgcgcccgtacgtaagctcagaatcggccaacgcgcggggagaggcggtttgcgtattgggcgctcttccgcttcctcgctcactgactcgctgcgctcggtcgttcggctgcggcgagcggtatcagctcactcaaaggcggtaatacggttatccacagaatcaggggataacgcaggaaagaacatgtgagcaaaaggccagcaaaaggccaggaaccgtaaaaaggccgcgttgctggcgtttttccataagctccgcccccctgacgagcatcacaaaaatcgacgctcaagtcagaggtggcgaaacccgacatgactattaagataccacgcgtttctccctggaagctccctcgtgcgctctcctgttccgaccctgccgcttaccggatacctgtccgcctttctcccttcgggaagcgtggcgctttctcatagctcacgctgtaggtat

SEQ ID NO: 4268 - DNA, 472 bp, Glycine max
  unsure at all n locations
  Clone ID: LIB3028-012-Q1-B1-A12
cgggttgagaatgttctatcgcgtagcgaagaccactgtactcngacgcgcccgtacgtaaactcagaattgactctcttccgggcgctatcatgccataccgcgaaaggttttgcgccattcgatggtgtcaacgtaaatgccgcttcgccttcgcgcgcgaattgcaagctctgcattaatgaatcggccaacgcgcggggagaggcggtttgcgtattgggcgctcttccgcttcctcgctcactgactcgctgcgctcggtcgttcggctgcggcgagcggtatcagctcactcaaaggcggtaatacggttatccacagaatcaggggataatgcatgaaagaacatgtgagcaaaaggctagcaataggccaggaaccgtaaaaaagccgcgttgctggcgtttttccataagctccgccaccctgacgagcatcaccaaattcgacgcccatgttcacagggggg

SEQ ID NO: 4269 - DNA, 486 bp, Glycine max
  unsure at all n locations
  Clone ID: LIB3028-012-Q1-B1-A9
cgtataagaatgactcaagtggcgtatantnaaccactgacgtcggacgcacgcgtacgtaaactcggaattgactcccctccgggcgctatcatgccataccgcgaaagggtttgccccaatcgatggggtcaacgttaatgccgcctcgccctcgcgcgcgaattgcaagctccgcaataatgaatccggcaacgccccgggaaaaggcggttgcctaatgggcgcccctccggcttctcgcccactgactccctgcgctccgtccgttcggctgcggcgaacgggatcagctcaatcaaaaggcggttatacggtttatccacagaatcaagggataacccaaggaaagacatgtgaacaaaagggcancaaaagggcangaaacgttaaaaaggcgcctttgctgggcgttttttcataggctcggcccccctgacgagcatcacaanaatcgacgctcaattcagaaggtggcaaaacccn

SEQ ID NO: 4270 - DNA, 487 bp, Glycine max
  Clone ID: LIB3028-012-Q1-B1-B4
agccgctctcgaatgaattatttgtccgacataagacaattacgtcgcctggacgcgtacgtaagctaggaagacagatcatgtgagcaaaatgccagcacaatgccacgaatcgtacaaatgccgcgttgctggcgtttttccatatgctcagcccccctgacgagcatcacaacaatagacgctcaagtcagaagtggcgaaaccctagcggactataaagataccaggcgtttccccctggaagctcactcgtgcgctctcctgttctgacactgccgcttaacggataactgtcggcctttctcccttcgggaagcgtggcgctttctcatagctcacgctgtatgtaactcattttggtgtaggtcgttcgctccaagctgggcagtgtgcacgagacccacgttcaggccgaatgaatgcaccttactcggttacaaatcttcctagagatgaaccccggtaagacataagttatcgccac

SEQ ID NO: 4271 - DNA, 486 bp, Glycine max
  unsure at all n locations
  Clone ID: LIB3028-012-Q1-B1-B6
agctgtgnttgcntgaatgatttagctgtcactatagtagaagatgacgtcgcactgcacgcgtacgtaagctcggaattcggctcgaggccaaacttcaaaatgcaacatcagtggaggaggccctagagattgctcgggaatccttgcaaggcgaagctgctgtctagtaccgatcttggtaacatcattctgtaatttatcttctcttacggccagattatcagtgactatctgtcatcatctgagtagggattgctccttaagagaataattttcattacattctcagtcacctgacattagtaatggtttttaactggaatgtctaatttggatttgatctggtgccataaggtatccttgaattttctcaatataaaagaatggcaaaacaaagggcggccgccgactattgagctcgtcgacccgggaattaatttccggaccggtacctgcaggcgttacagctttccctataatgag

SEQ ID NO: 4272 - DNA, 485 bp, Glycine max
  unsure at all n locations
  Clone ID: LIB3028-012-Q1-B1-B9
cgggttngcgaatgaatcaagtgcggtgacctatgacagctaacgacctcgacgtacgtnaactcgagcttcggctccagcacaacatgtaggccatgttcccacctttaaggtgctaaaaatgaaagggcaccgttaccgccaacatttatgggaataccttttaataacggcgcagagctgatattagcaccagtatctaccactttgctgcattagtagtcaacacatcaggggcactacattttcatgggagtttctcccgtcaagtttcctccacaaacctaatcttaacttatagtacttactaactccacaattctccccatggggcgtttatagaacctgatttcagacacaatcctctacaattcctccaccatacggttaggttccctggtggacactctcctctcccaaattgaccaaaacatttccttatcccccacactaccaactctcaaaaaaaccttccccgatttccc

SEQ ID NO: 4273 - DNA, 991 bp, Glycine max
  unsure at all n locations
  Clone ID: LIB3028-012-Q1-B1-C2
ttcgtcttttctagacctnattgcangctncacgccncttatttgcnctaagntacagtacngcgctcgtnatcgttcacgtgtgncagctagagcactgctatncacgctgcgtctcgatcgcgtgatggcgcgntncntgctgcncctctgcgcgtgagtcgcgtngctacgctcgtgtcgtgtgctctcgctgttgctcttgcttgcatcgcgcactccacgctgataccgatgncctctgcacgcgtcgtgttggctttgctgtcttcagtcagcgacgctgtgcatgtctctctccttgctcgtactgctcgcctgcgcgctgtgggtncgtgtgtctgcttcgctgtnctcatatatgtcgtgtgatcgctctggtctgcatgtgacgtgtgctgatgacgtactgtgcctgtgcgtgtttcgtctactgtcgctctcgacgcttctgtcttcgctgtatccgcttgtgtcgtctgtctgcgtcgtctcgtctctgctcgcatctcgtcgtcctcatcgcgcgtgatcgtgtctgcctgcatcttcgtgctggcgcgtcgtgactgacntgtcgctgtcgcgtgtgtcgtgtatgcttctacttctcgctgcatgctgtgncgctgcctgtcgtgtgcttcatctgcgtgctctctgtcgacgcctagctcgtcgctacctctcggcttcgcgtgtagctctgctgtgcgctttgtgtcgtctctgctgcgtgctgaccgtgctcgcactggtgtgtgtcttgcctgtcgcgcccgtacgttacgtgctccgctactttctacgtcgtgtcctcgactgctctgctctgcgagtgtcgctatgcgcatctgtgacgcgtgtcggtcagtgcacgctctcggctgtgcgtcagattncgcgtctctcacatctctgagtgtcactcgctctgtacagctcagcgccggctgattctgtctcgcactgnccgtagtcgcttttgtgg

SEQ ID NO: 4274 - DNA, 659 bp, Glycine max
  Clone ID: LIB3028-012-Q1-B1-C3
gggtgtcgaatgatttatctgactgcctatcatacatactcgactggcccttatgtaagtaggtcttctgctctatataacttgtgttgccgctgaaatgctttcatagttgttcttttctttcgattctgatgatttagttttctcgcctctcctcatgcggattgtttagctgtacacgtattaggtgttgtctagcttagctggagtctagctgcatcgtgttgtatcgtgagggggagctctcggctcgttatccgtctcgcatggctgcattgctgtttctctacattgtcactgtctgtagttcctctcgtcgtgttcttcttgggtggcgtttcgtgttcttgctggatcctgctgtcttgtctagccttgtgtttttttagttgcgtcttgtgatgctacttcttctgcgcctgtggttctctattcttcttttgcttgggcgtcgggtctcctgctgtattttttcttatctctggttctggcggttgtcgtttgatcgctacgctctcgtgttctctgtgttctgtcttgccgtggtacttatgtgttatctgctgctttgcttgttgattgattatggatgtcagttgttcatagttcatgtcgtgtcctttcctctctgactgtctcttactctgccgttatggttg

SEQ ID NO: 4275 - DNA, 468 bp, Glycine max
  Clone ID: LIB3028-012-Q1-B1-C5
tggattcgcgtgtcatatataagatatatgacctcgcctgcacgcgtacgtaagctcggcttccgcttcctcgctcactgactcgctgcgctcggtcgttcggctgcggcgagcggtatcagctcactcaaaggcggtaatacggttatccacagaatcaggggataacgcaggaaagaacatgtgagcaaaaggccagcaaaaggccaggaaccgtaaaaaggccgcgttgctggcgtttttccataggctccgcccccctgacgagcatcacaaaaatcgacgctcaagtcagaggtggcgaaacccgacaggactataaagataccaggcgtttccccctggaagctccctcgtgcgctctcctgttccgaccctgccgcttaccggatacctgtccgcctttctcccttcgggaagcgtggcgctttctcatagctcacgctgtaggtatcccaattcggtgga

SEQ ID NO: 4276 - DNA, 469 bp, Glycine max
  Clone ID: LIB3028-012-Q1-B1-C7
attgaattgacgtgccactatataagatatatgacgtcgcctgcacgcgtacgtaagctcggggccgcgttgctggcgtttttccataggctccgcccccctgacgagcatcacaaaaatcgacgctcaagtcagaggtggcgaaacccgacaggactataaagataccaggcgtttccccctggaagctccctcgtgcgctctcctgttccgaccctgccgcttaccggatacctgtccgcctttctcccttcgggaagcgtggcgctttctcatagctcacgctgtaggtatctcagttcggtgtaggtcgttcgctccaagctgggctgtgtgcacgaaccccccgttcagcccgaccgctgcgccttatccggtaactatcgtcttgagtccaacccggtaagacacgacttatcgccactggcagcagccactggtaacaggaataacagaccaaggtatgtag

SEQ ID NO: 4277 - DNA, 480 bp, Glycine max
  Clone ID: LIB3028-012-Q1-B1-D12
cgcgctcgcgaattgactctacgtggcactagccgaagagatatgtagtcggacgcacgcgtacgtaaactcagaatttgattgcgagtgagatatttatgccagccagccagacgcagacgcgccgagacagaacttaatgggcccgctaacagcgcgatttgctggtgacccaatgcgaccagatgctccacgcccagtcgcgtaccgtcttcatgggagaaaataatactgttgatgggtgtctggtcagagacatcaagaaataacgccggaacattagtgcaggcagcttccacagcaatggcatcctggtcatccagcggatagttaatgatcagcccactgacccgttgcgcgagaagattgtgcaccgccgctttacaggcttcgacgccgcttcgttctaccatcgacaccaccacgctggcacccagttgatcggcgcgagatttaaccgccgcgacaatttgcgaccgg

SEQ ID NO: 4278 - DNA, 485 bp, Glycine max
  unsure at all n locations
  Clone ID: LIB3028-012-Q1-B1-D2
cggcgactcagaatgaattatttgcacgacataagagatattacgtcgcacggacccgtacgtaagctcagaatcaggggataacgcaggaaagaacatgtgagcaaaaggccagcaaaaggccaggaaccgtaaaaaggccgcgttgctggcgtttttccataggctccgcccccctgacgagcatcacaaaaatcgacgctcaagtcagaggtggcgaaacccgacaggactataaagataccaggcgtttccccctggaagctccctcgtgcgctctcctgttccgaccctgccgcttaccggatacctgtccgcctttctcccttcgggaagcgtggcgctttctcatagctcacgctgtaggtatctcagttcggtgtaggtcgttcgctccaagctgggctgtgtgcacgaaccccccgttcagcncgaccgctgcgccttatcgggtaactatcgtcttgagtcaaacccggttagag

SEQ ID NO: 4279 - DNA, 476 bp, Glycine max
  Clone ID: LIB3028-012-Q1-B1-D9
cgggtctcgagaaatgaatgacgttgtcctagcgaagagactgaagtcggacgcgcccgtacgtaagctcagaattcagctccgccatcgccgcttcaactttttcccgcgttttcgcagaaacgtggctggcctggttcaccacgcgggaaacggtctgataagagacaccggcatactctgcgacatcgtataacgttactggtttcacattcaccaccctgaattgactctcttccgggcgctatcatgccataccgcgaaaggttttgcgccattcgatggtgtcaacgtaaatgccgcttcgccttcgcgcgcgaattgcaagctctgcattaatgaatcggccaacgcgcggggagaggcggtttgcgtattgggcgctcttccgcttcctcgctcactgactcgctgcgctccgtcgttcggctgcggcgagcggtatcagctcactcaaaggcggtaatacggttatc

SEQ ID NO: 4280 - DNA, 486 bp, Glycine max
  unsure at all n locations
  Clone ID: LIB3028-012-Q1-B1-E4
gagggtggcngaatgattgatttgcctgccataagataatagcgtcgcacgcacgcgtacgtaagctcggaaaacttaacgggcccgctaacagcgcgatttgctggtgacccaatgcgaccagatgctccatgcccagtcgcgtagcgtcttcatgggagaaaataatactgttgatgggtgtctggtcacagacatcaagatataacgccggaacattaatgcaagtagcttccacagcaatggcatcctggtcatccagcggatagttaatgatcagcccactgacccgttgcgcgagaagattgtgcacctgccgctttacaggcttcgacaccgcttcgttctaccatcgagaccaccatgctggcacccagttgatcggcgcgagatttaatcgccgcgacaatttgcgactgcgcatgcaaggccagactggacgtggcaacaccaatcatgaacgactgtatgcacgccaatttgtgt

SEQ ID NO: 4281 - DNA, 482 bp, Glycine max
  Clone ID: LIB3028-012-Q1-B1-E5
aggggtcgctgattgaatgattcgcgtgtcactatataaaagatgacgtcgcctgcacgcgtacgtaagctcggaattcggctcgagcacctggtcgcgaagcttatccaggggatgttttttatttacattcacgtcttttggaaagagccgctaaattaagttctcagttaggcgaaggaagtatgactgctttaccaatagttgaaactcaatcgggagatgtttcagcttatattcctactaatgtaatttccattacagatggccaaatattcttatctgccgatctattcaatgctggaatcagacccgctattaatgtaggtatttccgtttccagagttggatcggcggctcaaattaaagccatgaaacaagtagctggtaaattaaaattggaattagcacaattcgcagaattagaagcttttgcccaattcgcttctgatctcgataaagctactcaaaatcaattagca

SEQ ID NO: 4282 - DNA, 483 bp, Glycine max
  Clone ID: LIB3028-012-Q1-B1-F3
ggcgcctctgaatgatctatgtgcactacagaaggtcctgacgtcgcatgcacgcgtacgtcagctcggactcccgggtcgaaagacttgggtcatagtgtaaattcttgttttctacatagtcaatgttttagcatattgatatcaataaattgtggaaatagaatagtattacttttagttataacttttgagaacgagaatgtttgacctgtacatgtatcagtatttttgactaagagttgttcgttttgagggtttacaagacgaacgtgtaccaacaatcggaagccagagggccgccgccgactaaatagctcgtcgacccgggaattaactccggaccggtacctccaggcgtaccagctttttcgtataatgagtcgtactacagccttgcgtgatcacgggcacaaccgcttcctggcgtaacattgtgactcccgacactctcaagaccgattcgacccggaatctataacg

SEQ ID NO: 4283 - DNA, 505 bp, Glycine max
  Clone ID: LIB3028-012-Q1-B1-F5
ctactagcccgacgtacgctagctacgtcggacgtacgctcaagtcagctcggcactcgcctctcgtctctcccctgaatctcagtagcctccgatagctcagtcacggctcctttctatctccccttgagtctgcagcccctctcgacccgctggcgcgttccaagagtcgagcttttttccaggcgtctgcactcctcgtcgtcttcaccaagtgctcagtcccgcgcgcttttcgctttcgcacttatggcggcttcccttgctcctgacatatgcgtcccctcggcactgaattagccccttcgccggggggcctgccctctcgctgcagatccgctctgcacaacgggcaggtgttttcagcgccgccggtttcactgctcgtctgccctctggtcttctctcaacttaaggtcttcggtgccctcggggcctgtccgtactggtgcaatggctgcttggtctgtcctcgtcaccgccatcgatgagcactgctcccatg

SEQ ID NO: 4284 - DNA, 468 bp, Glycine max
  unsure at all n locations
  Clone ID: LIB3028-012-Q1-B1-H4
ttagttgctaggccananannntaaatagccggacccgtacgtaagctaggaattgcaagctctgcattaatgaatcggccaacgcgcggggagaggcggtttgcgtattgggcgctcttccgcttcctcgctcactgactcgctgcgctcggtcgttcggctgcggcgagcggtatcagctcactcaaaggcggtaatacggttatccacagaatcaggggataacgcaggaaagaacatgtgagcaaaaggccagcaaaaggccatgaaccgtaaaaaggccgcgttgctggcgtttttccataggctccgcccccctgacgagcatcacaaaaatcgacgctcaagtcagaggtggcgaaacccgacaggactataaagatagcaggcgtttccccctggaagctccctcgtgcgctctcctgttccgacactgccgcttaccggatacctgtccgcctttctcc

SEQ ID NO: 4285 - DNA, 474 bp, Glycine max
  Clone ID: LIB3028-013-Q1-B1-B11
gggctgtgagcaatgttagaatcgcgtggcgctatataaagcactgacctcgcacgcacgcgtacgtaagctcggaattccgagcttggatcctctagagcggccgccgactagtgagctcgtcgacccgggaattaattccggaccggtacctgcaggcgtaccagctttccctatagtgagtcgtattagagcttggcgtaatcatggtcatagctgtttcctgtgtgaaattgttatccgctcacaattccacacaacatacgagccggaagcataaagtgtaaagcctggggtgcctaatgagtgagctaactcacattaattgcgttgcgctcactgcccgctttccagtcgggaaacctgtcgtgccagctgcattaatgaatcggccaacgcgcggggagaggcggtttgcgtattgggcgccagggtggtttttcttttcaccagtgagacgggcaacagctgatg

SEQ ID NO: 4286 - DNA, 516 bp, Glycine max
  unsure at all n locations
  Clone ID: LIB3028-013-Q1-B1-B2
tgcacatacctggtggcgttgggatgaatatgtcgtctgcagatgacaatgacgtcngaccgcccgtacgtaaactcaggccagcaaaaggccaggaaccgtaaaaaggccgcgttgctggcgtttttccataggctccgcccccctgacgagcatcacaaaaatcgacgctcaagtcagaggtggcgaaacccgacaggactataaagataccaggcgtttccccctggaagctccctcgtgcgctctcctgttccgaccctgccgcttaccggatacctgtccgcctttctcccttcgggaagcgtggcgctttctcatagctcacgctgtaggtatctcagttcggtgtaggtcgttcgctccaagctgggctgtgtgcacgaaccccccgttcagcccgaccgctgcgccttatccggtaactatcgtcttgagttcaacccggtaagacacgacttatcgccactggcagcaaccacgggtaacaggattagcagaccgaggtatgtaggc

SEQ ID NO: 4287 - DNA, 518 bp, Glycine max
  unsure at all n locations
  Clone ID: LIB3028-013-Q1-B1-B4
tgggcccttggtggtggtgggaagctcctttgcactgcgctgaccacctactccgtctgnctctacgttaaaccatccttccgctcgatggggagtcgtgtgttcggttgtcttctgacgtttggggatgggttcggttgtcatcattacgattgcgacctccagcgctatgctcattggcggcgcaacgaggatgggttgtatccttggaaaggcattcgacatgtctgttctatgttaggcgcacctttcccttctcatcctctggtgtctctgcgacgctgccttagttcatccgcggctccactccgtttagcttcgtcctggacggaggtctccgagcccccgggacgaccctgtggcgctccccgcctctgacccctagccacgcgacttcgccgtttcccgactccagtctggcctcaccggcattctgctttcgctccttgctggatcgggcttcctgtcctctgtattccctggctgcgacgtcgccttacgaatccccgttcgccttg

SEQ ID NO: 4288 - DNA, 545 bp, Glycine max
  unsure at all n locations
  Clone ID: LIB3028-013-Q1-B1-C1
gtgagtatgagaagaacattcgaacttgcgctgcctgcatcactaagtcctgccgnttgtncactcagnttcggctcttgggttttttttttttctttgtggttcttctctccttccttttctctggtctttctgtctgtgcttcttcttcttcttgtcttttgcttcttttggggggtttcctgtgtttttgttttctccgggctttttctctgtctgtggggctcctttcgtttggtggtcctgttttctggcctctttgttcttctcttctcttctgtctgtgtctcttgtgttgtcttcggttttcttctccccttttcctttcttccttccttcgccgtctctcccgtttttcttctcttcccttcttttctttggcttttctctgtttctttcttcttctctcttcgctcttttgtttcttgtctcctcttctgttcctttccttgcccttctgttttttgcttttcttctttttgtttttcccttttcttttgttgtctctctccccttctctgtctcgtgttggtctctccgttctt

SEQ ID NO: 4289 - DNA, 491 bp, Glycine max
  unsure at all n locations
  Clone ID: LIB3028-013-Q1-B1-C11
ggtcatcttttggtgtggnnttggatgaatgatcaaatcgcgtgtcgcatagaagcaaaatgaggctcgacgcacgcgtaagtaagctcggcttcctcgctcactgactcgctgcgctcggtcgttcggctgcggcgagcggtatcagctcactcaaaggcggtaatacggttatccacagaatcaggggataacgcaggaaagaacatgtgagcaaaaggccagcaaaaggccaggaaccgtaaaaaggccgcgttgctggcgtttttccataggctccgcccccctgacgagcatcacaaaaatcgacgctcaagtcagaggtggcgaaacccgacaggactataaagataccaggcgtttccccctggaagctccctcgtgcgctctcctgttccgaccctgccgcttaccggatacctgtccgcctttctcccttcgggaagcgtggcgctttctcatacctcacgctgtaggtatctcagttcggg

SEQ ID NO: 4290 - DNA, 512 bp, Glycine max
  unsure at all n locations
  Clone ID: LIB3028-013-Q1-B1-C5
tggggntantgcaggatgaatcgtctgtacgatagtagagactgacgtcggacgcacgcgtaagtaagctcggaattgactctcttccgggcgctatcatgccataccgcgaaaggttttgcgccattcgatggtgtcaacgtaaatgccgcttcgccttcgcgcgcgaattgcaagctctgcattaatgaatcggccaacgcgcggggagaggcggtttgcgtattgggcgctcttccgcttcctcgctcactgactcgctgcgctcggtcgttcggctgcggcgagcggtatcagctcactcaaaggcggtaatacggttatccacagaatcaggggataacgcaggaaagaacatgtgagcaaaaggccagcaaaaggccaggaaccgtaaaaaggccgcgttgctggcgtttttccaaaagctccggccccnctgacgagcaatcacaaaatcgaagctcaagtctaaagttggcaaaacccaacgggattataaggatacaaggctg

SEQ ID NO: 4291 - DNA, 500 bp, Glycine max
  unsure at all n locations
  Clone ID: LIB3028-013-Q1-B1-C9
agcctccttgcgtgcgttgtgaatgaatcacgtcgcccgtcgccgccancccactgggccngccgcacgcgtaagtaagctcgggaattgcaagctctgcattaatgaatcggccaacgcgcggggagaggcggtttgcctattgggcgctcttccgcttcctcgctcactgactcgctgcgctcggtcgttcggctgcggcgagcggtatcggctcactctccggcggtgctaccgtcatccctgtgctcatgggatgacgcaggagagaacatttgcgcattcggcccgatcgcgcgggctgctgtcgttgtgggctcgttgctggtcgttttgcggcctgtcccgccccccttgctctggcgtcgcgtgggttccctcttgctcttccgctggttgctatggcctccccctgtctctgtggtctgcggctcgctgccccttgtctttggtgtcttcgtgcctcctccttcgcgcctgtccggttcgtgtcggcggtg

SEQ ID NO: 4292 - DNA, 519 bp, Glycine max
  unsure at all n locations
  Clone ID: LIB3028-013-Q1-B1-D1
aaaaataaagaaagaacaatcatcttgacctgctcatccaatatgcctgtctgtactntactcagaattctgctctatataatatctttagtcatcttatctttattatatttctgatcacatatttttatctcatttttcttatatacttataattgttattattttatgagggttgtttttctttttatttttaatttgggcttttttatttttctttaaatctttatattaatattttcttttcaatatttatccattataatttttattcttaatatatatatttattattattattttttattttatatatatatttttcttaaattcattttatcattttttttattcaaatttatttttttttatattatattttttaacttttttattttatctttacttgttttttttttaattgattatacttttttatttgttttctcttttttcttatcttatttttttatttacatattttttatattttatttttactttaaattttcttttttt

SEQ ID NO: 4293 - DNA, 929 bp, Glycine max
  unsure at all n locations
  Clone ID: LIB3028-013-Q1-B1-E2
tgccacctctctctcagtagggtcggtggtntngggggaattagacatttagagttagaactngntctgntangncctaaacccacgatcncgncctggccccggntacgttaaaagctcagtgatttccggctccaaggctgtcagttgttcctccttcccttggtttctctcgccttttccgggttttgttcaactctgccgactagcttttcggtctcaattattaaggtgaccgactgttacttgtgtgaaagtgtgcacacgctacgaggtagggagtcttnatcctagctgacttagtgctgcgctagcactagactgtcgcgaccaggttcgagtcgaactccactgtgatgctcctgtctcgtgntcacggatatgcatctgttcacatgtgtactgtgngctacctaattgctgcaccgcgtgttaagcgttgttctcgagactcagctactgcggcacgtctaccgtgctagcgctcgcgattcatggtatgncgaggcttgctatgatccgtacagttgcggtcttgcggtactctatctggccacatcggcctgctctatggtctgtgtcagcacgtgatcgatacgcgctgtttcgctctcgacctctgcctgtgatctactctaacccgntccagtacgcgatcctgcatcgctgtcgcagacgcgtacctcgtgggtctctcaccttgccggtctgtacttcggctgtgtcgtctgctctcacatatggcgtgagtgtgttcgcgctcgactctacttagaactctctagtcgactgtactcgcgttgctcaatcacttacgctgtcacgcnctgtgtctactccgtctcggcgttggatcgtatcgtgttgacggaatgtcatgcaccgtctagtctgcgtacagtgtcgccatacgacgttgtccctgtgtt

SEQ ID NO: 4294 - DNA, 497 bp, Glycine max
  Clone ID: LIB3028-013-Q1-B1-F6
tgaatccaatcagctgtacgatagtagaaactgacgtcggacgcacgcgtaagtaagctcggaatgaatcggccaacgcgcggggagaggcggtttgcgtattgggcgctcttccgcttcctcgctcactgactcgctgcgctcggtcgttcggctgcggcgagcggtatcagctcactcaaaggcggtaatacggttatccacagaatcaggggataacgcaggaaagaacatgtgagcaaaaggccagcaaaaggacaggaaccgtaaaaaggccgcgttgctggcgtttttccataggctccgcccccctgacgagcatcacaaaaatcgacgctcaagtcagaggtggcgaaacccgacaggactataaagataccaggcgtgtccccctggaagctccctcgtgcgctctcctgttccgaccctgccgcttaccggatacctgtccgcctttctcccttcgggaagcctggcgcttttccatagctcacgcg

SEQ ID NO: 4295 - DNA, 491 bp, Glycine max
  Clone ID: LIB3028-013-Q1-B1-F9
tgctctttcgctcctgctgagcagcctgcccatcgttgcctggtccgcgcgttagtcagctcgggcttcggctcctgttccgtctcgccggtctctgtttctcttcgcccgtcttctcgccgtccttcctcctcggtcccgtcttgtccctgcttccttttcgggggggggctgcgtctctgtccttgttccttgccgggccctttcctccttcttttccttgcctcctgtctcctcttttgcgctccgggcttctggctcccggtcctgctctcgcctcccttgcggctcttctgctctcccttcccgccctcctttgttgtcctctctcggcctgtcgtttctcttcggctctcccgtttcctccttctcgtcgtccctctgcgctgccttgtctctcttgtgctccgttcgctctgtccgggctcctgccgccgccgttcctctcctcttcggtctctccctgcgccctcgtctcctcctgtgggttg

SEQ ID NO: 4296 - DNA, 576 bp, Glycine max
  unsure at all n locations
  Clone ID: LIB3028-013-Q1-B1-G1
tgtctcttctgttgtgatgagaaaaacattcagcttgcggtgctcaccaacaangtctgncngttngttnaatnagnntttgggttgtgttttgtttttggttttggttttgtggtgttttttttttttttgttttgttgtgttttgtgtttgttttggtttgttgtggttggggtgtttgtttttgggtgggtggtgtgttgtgttgtttggtttgggtggggtgggttttggtttgtgtgttgggtgttttttgttgtggtggggtttggtttttttggtgttgttttgtggtgggttggttttgttgttgtgtttttttttttgtttttggtgtttgtgggtttggttgtttttttgtgtgtgtgtggttgtttgttggtgttgggtgttttggttgtttggttttggtgtttgtggtttgttggtgttttgggttttgttgtttgggtggtttgttttggtgtgtttgtgggtgtgttgggtggttgtttgtttttgttttgtggttttttgtgtttgtgtgtgtgtttttgtggtggtgttggtttttgtgtttgttgttgtgtgtttttt

SEQ ID NO: 4297 - DNA, 505 bp, Glycine max
  unsure at all n locations
  Clone ID: LIB3028-013-Q1-B1-G8
ggtnnttntgaatgaatgaatcgcgtgtcgtnnntancaaacangnccgacgcacgcgtaagtaagctcggattcgatggtgtcaacgtaaatgccgcttcgccttcgcgcgcgaattgcaagctctgcattaatgaatcggccaacgcgcggggagaggcggtttgcgtattgggcgctcttccgcttcctcgctcactgactcgctgcgctcggtcgttcggctgcggcgagcggtatcagctcactcaaaggcggtaatacggttatccacagaatcaggggataacgcaggaaagaacatgtgagcaaaaggccagcaaaaggccaggaaccgtaaaaaggccgcgttgctggcgtttttccataggctccgcccccctgacgagcatcacaaaaatcgacgctcaagtcagaggtggcgaaacccgacaggactataaagataccaggcgtttccccctggaagctccctcgtgcgctctcctgttccgaccctgccgcg

SEQ ID NO: 4298 - DNA, 489 bp, Glycine max
  unsure at all n locations
  Clone ID: LIB3028-013-Q1-B1-G9
agaaagaaatagaagtactatacagtctgagctgcggctatgtgatctagacctgacgcacgcgtaagntaactcggaattcggctcgagggattcactgccatggcacattcgtccgttaagtgtgttctttctatttattccaaagacatggaatcattttacgccgattaatcggggcgtcttcattttaatgctccaatatttttggggctcctttctcttctttatttagtactgaactggtatagattgctctgatttcagtttttctgttgtcattatcttctatctcattactcttcggccctacaatgtcacctttctgctattaggtgttatcaatttgtatattttggttcttttcatcgtttctttttttattccatgtttatatatatcaatttatctctttttttctgtttagattctctgtttatttgatctttgttaatatatgatgttcattgtataattttcttgcaattg

SEQ ID NO: 4299 - DNA, 545 bp, Glycine max
  unsure at all n locations
  Clone ID: LIB3028-013-Q1-B1-H1
agtgttgaatnattgcagtgaaatcaacatcagacatgttactcacctattaacgtctgactcactcgttaatcaactctgtgttcgtttctttttttttttgttgtttgtttcttttttttttttttttnttttgtttgttttttttttgtttttttggttttgttttttttttttggtgggttttttgttttttttttttttttttggtggggtttttttttttgtttttttttttgtttttggtgttgttttttttttttttttttgttttttttttttttttttttttttttttttgtgttttttttggtttcttcctcttccttttttgttctcttccttcagttgtctttctcttcgcctttctctctctctcatttccttctttctcttttttttcttattcttctttttttccttttctttcctctttctctttcttttttgtttcttctttccttgttctcttcgttttttttctttttgcttcctctttttgttcttttttcttctttctcttttttttttctcttgtccttctt

SEQ ID NO: 4300 - DNA, 505 bp, Glycine max
  unsure at all n locations
  Clone ID: LIB3028-013-Q1-B1-H4
ggccccaccgaatgaattaagtggtcgagtccacantaatgtaatggctcggacgcacgcttacctcagctcttatttccggaccggtacctgcaggcgtaccagctttccctatagtgagtcgtattaaagcttggcgtaatcatggtcatagctgtttcctgtgtgaaattgttatccgctcacaattccacacaacatacgagccggaagcataaagtgtaaagcctggggtgcctaatgagtgagctaactcacattaattgcgttgcgctcactgcccgctttccagtcgggaaacctgtcgtgccagctgcattaatgaatcggccaacgcgcggggagaggcggtttgcgtattgggcgccacggtggtttttcttttcaccagtgagacgggcaacagctgattgcccttcaccgcctggccctgagagagttgcagcaagcggtccacgctggtttgccccagcaggcgaaaatcctgtttgatggtggtaacggc

SEQ ID NO: 4301 - DNA, 491 bp, Glycine max
  unsure at all n locations
  Clone ID: LIB3028-014-Q1-B1-A11
tggttgttggaggcttttccgtatgtcagtgcgtggttattgatntncgtctggtcgtttgttaactgagtttcggntctttgcgttttgtttttgtgtggttttcttttttttgttttcttgtttgtttttgtgttgttttttgcttttttgttctttttttttttttttgggggggtttttgttttttggttttttttttggtgttttttgttgtggttcttttttttgtttttttttttggttttggttttgtttttgtttttggtttttgtttgtttttttgtttgttttttttttgtgtttttttttttttcttttttctgtttgtgttgttttgttttttttttggttttgtggtttgtttgttttttgctttttttgtgtttgttttcttgtttgttttttttttttgtcttgtttgttttttttgttttttttttgtgtgtttttttttttttttttttttttttttgtgttgtttttttttt

SEQ ID NO: 4302 - DNA, 529 bp, Glycine max
  Clone ID: LIB3028-014-Q1-B1-B12
gggttgcgaatgatactatcccactgccgtcccatcacatagtagggcctgtccggtttgttaactcaagtgttctgctccttgctcttggtgttcttgttgttgtgtccctcttttctcctctttccttctcttttcaccctctggttgtgctcatttgccatccgtcctcattcccggttggctttcggttctctctctccctcatatcatcgaccacgcttctcacatattcgcgtcgttttttcttgtggcttgctgcctacttttgtggctgtgcttccacatgctggctcccttttaccatgcacttctgccttcacagttgccttcgtccttcgtccctctcctcgattaccactcctcgccctctctcacacctctccccgttgcttttcttcttttcgactccgtgctttcccttgccaatactttcctactctgcttccagtccctcttcttcattttcttctcctccccctgtttcctctctctcttctctctcttatcctcttctctcctctctttt

SEQ ID NO: 4303 - DNA, 919 bp, Glycine max
  unsure at all n locations
  Clone ID: LIB3028-014-Q1-B1-C10
taggaantatcagagatagatnatacgacatgggcaaagtncttcatcgatncntnacgaaatgcccgctntgtaccgcatcngtcgctngaatgcgcgcgntaacnntannncgtntctnntnngtnntcgngnctntncngnntnntntaaacnntcngaagnntnnntntnctgtngnctntncntgttngncgttngtgntncntngttcgtctcntcttcgtccgggtcngctgcttgccctcgtctctcgcctctctgcgcgtctgcgtctccctntnctctncgtgtgctctgtgctcgcttgnctctttctgtctngtcttctgctnctgtcctcctctnttgtcgtgctctcgtctgctgctctcggtctctgtctgtgtggtgggtgtgtcctccgctcgctctctccttctgcttcgngtcttctctctctttcgcgttctgcttctgcgtgtctcttgtttctcgttctctcgtcccgccttctgctttgccttctttgtcgttgttctgttctcttgttcttcgtcttcttgttctggctcttccttctcttgttgtttctggtgcgtcgttctctctctttcttccgttcctttttgtgtctcctcttctctttgctctccctctcttctctctctctcttctgttgctctctcttgcgtgctctttcgtcgctgttgctctgtgctgtgtcgctgcttctcgttgtctttttctctcctgcgtttcgctttgccgtccttgttgctctgctctctcctctgcttgctcctgctctcttgctgtntctctctgttctctgctctgcttgccttgtgtgcttcgtcttgttctcttctttttgctttctgtgtctcctcttctctcctgttcgttgttccttcgcttgctttctgttgccttcttt

SEQ ID NO: 4304 - DNA, 793 bp, Glycine max
  unsure at all n locations
  Clone ID: LIB3028-014-Q1-B1-C11
tgagtgatatagaatgcatatttacgtcgtcgttcgttgtcgatgtcgtaacgtttctantgtcanggtcngnttntgtnttagtnttagttntttntggtttgttgtgtgtttgtgttttgttggtggtgtttgtgtggtctgtttgcgtggtttggtgtgttgnttgttggtgttgtgtgtgttttgtttgtgttgttgtttgttgtgtttgtgttggtgtttgtgtgtgtgtttgttttttttgggtggggggtgtttgttgttttgtgtttgttttgtttttgttttggtgtgggggtgtttttgtgtttttttgttttgtttgtgtttgttggttgtttgtgtgttgtgtgtgtgttggtgtttgttttggtgtgtgtgtttttgttgttgttgtgttttgtgttgttgtttgtgtgtgtggtnttgtttttttgttgtgttgtgtgtgttgtgtgntgtttgttgtttgtgtgtntgttgtttgttnttgttggttgtgtgttgttggtttgtgtgtgtgtgtttgttngtggttgtgtggtggtttgtttgttgtggtgtgtgtggtggtgtttggtttgtgttttgtgttgtgttttgttgtggtggtgtnggtttgtgttgtgtgtgtgtttgtgtgggtgtgttgtggtgtttgttgttgtgtttgtgtttgtgttggtgtntttgtgtgtgttggtgtgtttgttgtgttgtgtgtgttgtggtgtgtgtttgttgtgttgtgttgtgtttttgtgtgtgnttgtgtttgtntggttttgtt

SEQ ID NO: 4305 - DNA, 528 bp, Glycine max
  unsure at all n locations
  Clone ID: LIB3028-014-Q1-B1-D10
tggtctctgggctttggtggtgctgcttgtctttgtactgccgtgcgacgggagtagacgngccgtgngttactcaaaattcggctcgtgtgggtgtgtgggttgttgtggntgtggtgttgcttggtgtgcgtggtgtgtgtttttgtggtgtgggtggtgtgtgtgtctttggtttgggggggggttggttgtgggttgtgttgggttgtggtggttggttttgttttgttgttgggtttgtttgttttgtgtgttggttgttttttgtggtggtgttcttggtgtgttgttgcggctctttgtcgtgcgtttttggtgtgggttcgtgttttgctggtggttggggttggtgtgtcgttgggtgtgttttcttgtgtgttgtttttttggttgggtttgtgttctgttggttttgtgtgtcgttgtttgttgtgttgttgtgttgtgggtcgttgggcgtgtggttggtctgcgttgtgtgtctctggtcgttctctgtgtgttgcgtcgctgtgtctgggtttg

SEQ ID NO: 4306 - DNA, 1030 bp, Glycine max
  unsure at all n locations
  Clone ID: LIB3028-014-Q1-B1-D11
nagcagctgcatactaagggatggggnaagattatgacatcgatacngatcgatnaacctgtataggtcttgctcgcgtcgctggaagtcgtcgncttaagnntanntggtnntctntnggtnntcnnngnnntnnntngntnntnntagtgntntntnangnnnnnnntntntnntgtgngtntntggtgntntgtngtntngtgtnttttgtttnngtgntgtgtngttgtgttgtngngngntgtngctttgngtngtgtngttgttttntgtgnttggttnttgttgggtttggggtngnttgttngtntgtttntgttgtgtngtggtgtngtgttttgtgngtgttgntngtgggnggttgntgtgtttgtgtttngttttngtgttgttgtgngttgtgttttttgtgggtgtngntgtggtggtgttgtgtngtngtgnngngtgtgtgtttttgtgttggttgngtgttgttgtgttgtgtgtggggggggtgtgtggtgttngtggtttgttgtggtnngtgtgtttttgtgtgttgntntngngntgtgntnggtggtntgtgtgntgttntgttgtgttggtggtgtgntgttgtgtgttntntgttgtgtgttgtgttttggttgttgtgttgtgtggtgtgttgtgtttgtttgtntntgtgtggtttgttgtgttgtgtgtgtgttgtgtgttgtgtgtgtggtgtgtgttgttggtttgtgtgttngtggttttgtgtttgtgttgtgtggttgtgttgtgtgtgtgtttgtgttgttngtgttgtgtttgtngtgtgttgtgtttgttngtgtttgttntgtgtgtgtgtgttgttgtgttgtgtggtgtttntgtggtgtgtgttgtntntgtgttgtgttgttgtgtgtggtttgttgtgcgtgtgtgtgttgttgtgttggtgttgttgggtgtgttctgtggtgtgttgttgtgtgtgtggtgtgtgttttgtgtgtngtgttgtgttgtggttgtgttggttgttgtt

SEQ ID NO: 4307 - DNA, 479 bp, Glycine max
  unsure at all n locations
  Clone ID: LIB3028-014-Q1-B1-E10
agatgagtatgagatattacactcatcgtgtcgtcccgagcggaatcngtctngcctgtacgtgaaaccagaattcggctcgagctggttctgtgtgtttggcttcccttcttctcttccttcttctccgtgcttttcctccgtccttttcttttttgctgttccctctccgggttgggctggtttgctcgcccttctcttcggggcttctctcccgctccttcttcctcttctcttttggtccttgcctctgctcttccctttccctccttctcctttctggttcctgtctctgtttggtccctctgcttcgtttcttgtcgcccctggcgtttttgctccttttgttctctggcctctcctcttcgtgtttctcctctttgtcgtcgtcttccttctgtttctgtctccgttgtgttgtctttcttttccccttcttcctgtggctcctttctcttcccgcccttcttccccctttt

SEQ ID NO: 4308 - DNA, 448 bp, Glycine max
  Clone ID: LIB3028-014-Q1-B1-E11
gtgtgttgagctttcttttacttgcgtgcgctgatgtagtgggcttgcgttgttactcagttttggctctgctgtttgttgtgtttgggtcgggtggtttttgttatttgtgttttttgtttttttgtgggttgttcgtgtgttttgggggggggttgttttgggttttttcggggtggggtgggggttttgttttgttttggtttgtgttggtttttgggttgtttttcttgttttttgtttttttttttggttttgtttttgtggtgttttgtttttgtttttggtctgtttgtgttggtgctgttggttttggtgtttgtgttgtttttttttggtctgggttggtttgttttgtttgttttttgtgtggtgtttttggtttttgtgtttttgtttttgtttggtgttgtgtttttgtttgttctttgtgtttttggttgttttt

SEQ ID NO: 4309 - DNA, 475 bp, Glycine max
  Clone ID: LIB3028-014-Q1-B1-E8
gaatgaatcagcggactatagtagagtactgacgtctgacgcacgcgtacgtaagctcggaattcggctcgaggttacgagtgatgattattaatttattattattatgattattatgagtttatctatgtataatagagagagagagagagagatcttacagcatttatataatgaaccatttattgtaggtgttagtgagaaataagaggaattttgatatcctcttttattatattgttatgatttcagtgtgtaatatacatattcattcaatgaatttaaaatacagggaaacaaggcaatgcaaaaagggcggccgccgactagtgagctcgtcgacccgggaattaattccggaccggtacctgcaggcgtaccagctttccctatagtgagtcgtaataaagcttggcgtaatcctgggcctaaccgtttcccggtgtgaaattggtaccccgctaccaattccgag

SEQ ID NO: 4310 - DNA, 584 bp, Glycine max
  unsure at all n locations
  Clone ID: LIB3028-014-Q1-B1-F10
cgtactatactgacggggactctctgatgggtagttggtctggtcgctntgtgtaggtggaggttttggttttttgtttttggtgttttgttttttgtgttttcttctgtttgtcttgttgtttgtggtttgtttgtcttgtttggtttttgttttttgttgttttttttgtgtgtttttttttggggtgtgtttttttttttgtgtgttttgctgtgttttgttggtttcgttttttggcgtttgtgtgttttttgtttttgttctttcgggtttttgttgttgtggttcttttctttttttttgggtttgttctcgtttgttgtcttttggggtttttctgttttggtggtctttccttttctctgttgttgttgttttttgtttttcgtgttgttgtgtgttgtttttttgttgtgttgttttttttttgttggttttttttttttgtttgttttttttgtttttttttgtttttttgttttttgttctgtttgtttttgtttttttttttggttgtgtgtgtttctgcgtttttttgttgtttgtgtgttttggtttttgtgtgtcttgtttgttttttt

SEQ ID NO: 4311 - DNA, 472 bp, Glycine max
  unsure at all n locations
  Clone ID: LIB3028-014-Q1-B1-F9
aggtgttgagaatgaatcacgtgtcgagtcgtagagactgnagtcngacgcgcccgtacgtaaactcaggtattgggcgctcttccgcttcctcgctcactgactcgctgcgctcggtcgttcggctgcggcgagcggtatcagctcactcaaaggcggtaatacggttatccacagaatcaggggataacgcaggaaagaacatgtgagcaaaaggccagcaaaaggccaggaaccgtaaaaaggccgcgttgctggcgtttttccataggctccgcccccctgacgagcatcacaaaaatcgacgctcaagtcagaggtggcgaaacccgacaggactataaagataccaggcgtttccccctggaagctccctcgtgcgctctcctgttccgaccctaccgcttaccggatacctgtccgcctttctcccttcgggaagcgtggcgctttctcatagctcacgctgttg

SEQ ID NO: 4312 - DNA, 577 bp, Glycine max
  unsure at all n locations
  Clone ID: LIB3028-014-Q1-B1-G11
gataaattaaagaagtacatacaccggacccgcccacacacangcctgtcgntnntntaanttaanttttntgtntttttgtttttnttttttggttttggtgtgtgtgtttgttggttgttttgtttggggttgttggtttttttgtgttgttgtttttggttttgggggtgttggttgtttgggttgggtggtgtgttttgtttgtgtgtttgtttttgtgggggtttnttttgttgttttttgtgtttgttggtgtgttgtgtttgtgtgtggtgtgttttttttgttggttgttttttgtttgttgttttgttgtttgttttgtttggttgtttgttgtgggttttttgtggttgtgtgttgttgtggtgttttggttgttgtggtgttgtgtttngttttgtgttgtgtggtgttggtgtgtgttgttggtgttggtttgggttttttggtgtgtgtgttgttgtgtttttttgtttgtttgtgttgttttttttgttttgttgttggttgttgttttgtgtgtgttttgttttgtttgttgttgttgtttttgttttttggttggtggtgt

SEQ ID NO: 4313 - DNA, 473 bp, Glycine max
  Clone ID: LIB3028-014-Q1-B1-G5
gaattattagctgtctatagaagagactgacgtcggacgcacgcgtacgtaagctcggaattcggctcgagactagttctagatcgcgagcggccgccgactagtgagctcgtcgacccgggaattaattccggaccggtacctgcaggcgtaccagctttccctatagtgagtcgtattagagcttggcgtaatcatggtcatagctgtttcctgtgtgaaattgttatccgctcacaattccacacaacatacgagccggaagcataaagtgtaaagcctggggtgcctaatgagtgagctaactcacattaattgcgttgcgctcactgcccgctttccagtcgggaaacctgtcgtgccagctgcattaatgaatcggccaacgcgcggggagaggcggtttgcgtattgggcgccagggtggtttttcgtttcaacaattaaaacgggcaacagctgattgcccttca

SEQ ID NO: 4314 - DNA, 795 bp, Glycine max
  unsure at all n locations
  Clone ID: LIB3028-014-Q1-B1-G8
aggtacgtctaggtgtgacntggaatcccgagagacgacganctgaggaacgaacgagaataacgacggcacanggtccttaggaccgtnatnntnntgagnntctaagnctcgcgtnatttcngtgctgcgtagtgtggaggttttgttgtttggtgtagtggtgtcctgtgtggttggttgtgtgtggatgtgtggtgtggtggaggntgtgttgtnttgtgtggtggggttgtgtggtgtngtgtgtggngtgtggtgggggtgtgtggtgtgtgntgtagggttggttgtgtttgtgttgtgagtgtgtgtgggtgtgtgggttgttgtgtgttgtgtgtgttgttgtgtgtgctggtcgtgtgtcgcttctctgctgtgctcgtgtcgtgtgcgcggcttgctggtgcgcttgctgttggtcggcggtctgctcgacctaaggattgagtgcgtctgtttatcacagagagtgagcganattgagtagattgtggagctcggactctttcggtatacacactcacgatacatagatgctgaatgtgttgagctatgctgtgcctatgttacgcactaggacggccttagcggcggccacgatgatcagatgcacaggagcggcatgcggctatcngagctacagatatgcgatgcatgattagagagtcttgacgttgacgtgtggatatgtgcttacgcgtgtgctcgctatctactctgactatgccgctactgacgacgtcgcgcacgatggtangcngtctatcacgctgggacgcagagggttgg

SEQ ID NO: 4315 - DNA, 491 bp, Glycine max
  unsure at all n locations
  Clone ID: LIB3028-014-Q1-B1-H1
ggcttggtnttcncgaatgaatcaggtggcctgccgaagacattgaagtcggacggcccgtacgtaagctcggatcagcaacgactgtttgcccgccagttgttgtgccacgcggttgggaatgtaattcagctccgccatcgccgcttccactttttcccgcgttttcgcagaaacgtggctggcctggttcaccacgcgggaaacggtctgataagagacaccggcatactctgcgacatcgtataacgttactggtttcacattcaccaccctgaattgactctcttccgggcgctatcatgccataccgcgaaaggttttgcgccattcgatggtgtcaacgtaaatgccgcttcgccttcgcgcgcgaattgcaagctctgcattaatgaatcggccaacgcgcggggagaggcggtttgcgtattgggcgctcttccgcttcctcgctcactgactcgctgcgctcggtcgttcggctgcggcga

SEQ ID NO: 4316 - DNA, 639 bp, Glycine max
  unsure at all n locations
  Clone ID: LIB3028-014-Q1-B1-H11
agatgtgtttttgattttctctgtactgtcgtctgtgatcgnantatgccttgncgcttcgtntactcaattattngtgntctttntttttnttgttttgtttgtgtggtttctttttgtttgttttgtgttgtttttttttgtttgtgtttgtgttgttttttttggttgtttttgttgtttttgtgtttgtgggggggtgggtgtttgtttgtttttttggtgtttgttgttttttgtggggtggttttttgttgtttgttttgtgttgttttgtgtttttttttgtttttttgtttgtgttttgttgttttgttttgttgttggttttttttttgttttgttgttgtggttttttgtgtgttgttgttgtttgttgttgtgttgtttggtgtttttgttgtgtgttgttgttgttttgtgtgttttgtgttgtttgttgttgtttgtttttttgttgtgtttgtgttgtgttgtgttttttgttgttgtgtttgtttgtttgttgttggtttgttgtgttgttgttgtttgtgttttttgttttttgtgttttgttgttgtttgtgtgttttgttttgtttttgttttngtttggtgtgttgtgtgttgttttgtttgttgtttttgttgtttttg

SEQ ID NO: 4317 - DNA, 478 bp, Glycine max
  unsure at all n locations
  Clone ID: LIB3028-014-Q1-B1-H4
ctaggttgccagtcgtatacacgacactgacgtcgcacgcacgcttaactcagcactccgctccaagaaagactttaatcaccaaaataatgccttcaaaacaaacccattggggtaccaccttccggtgttaaggccaaccttccccaatgaacggacaaggttaacacaattaattggtcctgttggggcanaaattgccttgcacgccctgctattaaaataaaaacctgttgtcccaagttgagacttctgaaacaaanagaaagattcttgagaaatggtggcgtcaatctggacaaacagggactcctgttcaaatttaagaaaatcttaaaccggggacttttaaaacttttgggggtcaaacgctaaatttggggggttttaaccctgtcaatttttaagaacccagggccctaaccaaatttcaagggtttaaacccgggttaagtttcctccccccctaaattttaat

SEQ ID NO: 4318 - DNA, 493 bp, Glycine max
  unsure at all n locations
  Clone ID: LIB3028-014-Q1-B1-H6
cgccctttcgggatgattgaatcgcctggcgcccnnaancctactgacctcgacgcacgcgtacgtaagctcggaattgcaagctctgcattaatgaatcggccaacgcgcggggagaggcggtttgcgtattgggcgctcttccgcttcctcgctcactgactcgctgcgctcggtcgttcggctgcggcgagcggtatcagctcactcaaaggcggtaatacggttatccacagaatcaggggataacgcaggaaagaacatgtgagcaaaaggccagcaaaaggccaggaaccgtaaaaaggccgcgttgctggcgtttttccataggctccgcccccctgacgagcatcacaaaaatcgacgctcaagtcagaggtggcgaaacccgacaggactataaagataccaggcgtttccccctggaagctccctcgtgcgctctcctgttccgaacctggcggcttacgggatacctgtccgcctttctccc

SEQ ID NO: 4319 - DNA, 488 bp, Glycine max
  Clone ID: LIB3028-015-Q1-B1-A8
agaatgaatcacgtggcgtatagaagagactgacgtcggacgcacgcgtacgtaaactcggcctgaagtgacacgcttccgggcgctatcatgccataccgcgaaaggttttgcgccattcgatggtgtcaacgtaaatgccgcttcgccttcgcgcgcgaattgcaagctctgcattaatgaatcggccaacgcgcggggagaggcggtttgcgtattgggcgctcttccgcttcctcgctcactgactcgctgcgctcggtcgttcggctgcggcgagcggtatcagctcactcaaaggcggtaatacggttatccacagaatcatgggataacgcaggaaagaacatgtgagcaaaaggccagcataaggccaggaaccgtaaaaaggccgcgttgctggcgtttttccataggctccgccaccctgacgagcatcacataaatcgacgctcaagtcagaggtggcgaaacccgacaggactata

SEQ ID NO: 4320 - DNA, 559 bp, Glycine max
  unsure at all n locations
  Clone ID: LIB3028-015-Q1-B1-B4
gaacacttctgaatgaatcaggtagcctagcgaagagcactgaagtcgcacgcacgcgtacgtaagaccggaaatccgctcgaaggccaaacggccgctcacccattataaagactcctcactgaaatcaaatctgagtctccatcaataacatctcctcaggcctctaccaaccgtctaaatgaaaccattgtgaccggttgaaaccatgaacagacgtagcatcaagcaactggtggcagcaangggtttgacaaccgataccacgcgttgatgccgagaaactagcccaacagctgcacatgacaaattgttgatggcgatgagagtccatagaatgtggtacacatcatgaacttgggaaagaagcccatcagggtctgaatgtcatgagggtgatattctttacaagtattcgcatcaacaattgctcaaaacttgacttgctgcctgttgtggctacctcgccatgaccagatcagctacattcctcactcatgcagaacgattcactctcaggaaatgcgaatcgcaatgacgcaaccatttcactgcccan

SEQ ID NO: 4321 - DNA, 491 bp, Glycine max
  Clone ID: LIB3028-015-Q1-B1-B5
ggtcaattgcgtggcgtatataagagactgacgtcggacgcacgcgtacgtaagctcggaattcccggctagataatctgcaaatcaatgaaagtggttttcttttctttgtaacatcaatttaatcgttgtttgttttgttaattaaagccttaatgctgctgagaaacagatcaagagctgtgacgaagccaagtttgatgggtgatcacagctcctcccatccatgtcgaaatcagagttacaaatgaaccatcattccttctctattttcaccaaaattccaagaccttacggccaagtgtccctcacctggagctaagggctttagaaatccaacatcaattcttgacacaagaaccttaccatcccaatttggaagtcctttgtcaaataaaccagtaggcttcaaaaaaaacaaccctttggaacccaaaatgcattggccttccccttgttggtgcactcaggtttaaaacttttcccaaaaa

SEQ ID NO: 4322 - DNA, 502 bp, Glycine max
  Clone ID: LIB3028-015-Q1-B1-C2
ggggactgatgaatgaatcacgttgcatagcgaagactatgaagtcggatccacgcgtacgtaagctcggaatcgggcaacacgccgtgagatgcggtttgcgtattgggcgctcttccgcattctcgcgcactgaatcgctgcgcccggtcgttcagctgcagcaagcggtatcagctcaatcaaaggcggtaatatcgttatccacagaatcaggggataacgcaagaaagaacatgtgagcaaaatgctagcacaaggccatgaaccgtaaaaacgacgcgttgctggcgtttttccatacgctccgcctccctgacgagcatcacaaaaatcgacgctcaaatcacgacgtggagaaatccgagaggactattcagataccaggcgtatcgccctaggaagctctctcgctgcgctctcctgttccgaccctgacgcttaccggatatcagtcagcctttctcgcttcgggaagcgtagcgctttttcagacctcaca

SEQ ID NO: 4323 - DNA, 487 bp, Glycine max
  Clone ID: LIB3028-015-Q1-B1-D8
agattgaatcgcgtggcgtatagtagagactgacgtcggacgcacgcgtacgtaaactcggaattgactctcttccgggcgctatcatgccataccgcgaaaggttttgcgccattcgatggtgtcaacgtaaatgccgcttcgccttcgcgcgcgaattgcaagctctgcattaatgaatcggccaacgcgcggggagaggcggtttgcgtattgggcgctcttccgcttcctcgctcactgactcgctgcgctcggtcgttcggctgcggcgagcggtatcagctcactcaaaggcggtaatacggttatccacagaatcaggggataacgcaggaaagaacatgtgagcaaaaggccagcaaaaggccaggaaccgtaaaaaggccgcgttgctggcgtttttccataggctccgcccccctgacgagcatcacaaaaatcgacgctcaagtcagaagtggcgaaacccgacaggactataaag

SEQ ID NO: 4324 - DNA, 468 bp, Glycine max
  Clone ID: LIB3028-015-Q1-B1-D9
gtctcctcagtctgctactatggacgagacatgagccccgaccacgcgtaagtaaactcggaattgagtctcttccgggcgctatcatgccataccgcgaaaggttttgcgccattcgatggtgtcaacgtaaatgccgcttcgccttcgcgcgcgaattgcaagctctgcattaatgaatcggccaacgcgcggggagaggcggtttgcgtattgggcgctcttccgcttcctcgctcactgactcgctgcgctcggtcgttcggctgcggcgagcggtatcagctcactcaaaggcggtaatacggttatccacagaatcaggggataacgcatgaaagaacatgtgagcaaaaggccagcagaaggcgaggacccgtagaaacgccgcgttgctggcgtttttccataggctccgccctcctgatgagcatcacaaagatcgaagcttaagttgagggtgggaag

SEQ ID NO: 4325 - DNA, 493 bp, Glycine max
  Clone ID: LIB3028-015-Q1-B1-F5
cgaatgaatcacgtggcgtatagaagacactgacgtcgcgcgcacgcgtacgtaaactcggaattcggctcgaggaataatggtattattccttctccatttgtttgatctatgatgcggcttttaactggaaatcactacattgtatctttatgtcattatgcatggattgtcatgctgcacgaataacatcaatattcatgttcttcttcttagatggaaccctcataggcggccgccgactagtgagctcgtcgatccgggagaaaattcaggaccggtatcggcaggcgtctgagcttgccataaattcagtcgtagtatatcttggcgtattcagcgtcatagccgcttcctgtgtaaaagatgtaatctgcttaaaattccacttttcatacgagccggaagcataaagtgtcaagccttgtgtgcctaattattaagcgtcatcacattacctgcgtagctcacactgcgcacgttcaattctgga

SEQ ID NO: 4326 - DNA, 467 bp, Glycine max
  Clone ID: LIB3028-015-Q1-B1-F9
agattgaatcgcgtggcgtatagacgacactgacgtcggacgcacgcgtacgtaaactcggaattcggctcgagcaaggtttggttgttcgttgaggacaattgagtgaagcaattatctgagtatctagattttattcaggtggaattttttgatcttaaacagaggataagagtgtaagttgttttgttacgatttatttttccacttattttagttggctggtgactctaattatactactcaactttggcatagccattattgaagttttccatttttattttacaaaccaaagaaaaaacaaacaagggcggccgccgactagtgagctcttcgacccgggaattaattccggaccggtacctgcaggcgtaccagctttccctagagtgagtcgtattagagcttggcgtaatcatggtcatagctgtttcctgtgtgaaattgttatccgctcacaattc

SEQ ID NO: 4327 - DNA, 491 bp, Glycine max
  Clone ID: LIB3028-015-Q1-B1-G4
ggccgtgggatggtcggatgctggctaactatgtatccgtccggcctacttaaactcaaaattcggctcgaggttgtttgacatcggtttttcaccaaacccgtgtaccgggtttttacggcggttgtccaggtacctttcgagcgagtgccgcgctgccgggttacgttcaccacctttgaaacgttccccgaattccagtttcccctggtcccttctgattcacgtcctcaaatttgtgtccaactatctcttgaggcaccccggttgcccgcacacttaaagttttccacaagtgtcttttctacaagtttcttgccttaacatgtgcccaccccgggtccaaatgtgggacaactgtccgcctcgaatctccaaaccgttttccaaccggttttccacacaggttttaaacggggtttaccaaggggtttccccccatcgcttctaagtgggctacaacctctggcaagtttacactccggcccttt

SEQ ID NO: 4328 - DNA, 249 bp, Glycine max
  Clone ID: LIB3028-015-Q1-B1-H5
gtatcctacccaactaagcgccctatacgttcgcattatttatacgtctcttcctcctttctcatctctaattcttagggggattacctttcatttgctgttggtcggcttcttcctcttctttcctcctcttttttctaccatcccttcttttttcgttttgctccccccccttttcatctttggctcctcttcttctttttttctcgctcttgcctattctttctgccttctttcttctcttccttt

SEQ ID NO: 4329 - DNA, 1082 bp, Glycine max
  unsure at all n locations
  Clone ID: LIB3028-016-Q1-B1-A1
ttacattcgtnaccattgcttntccntcgtagccatcgcgcgcaactaacctnncccatgtcnnctggtntcgtnttngnnncctnctntnnctgtcgtctatcncttncntcgtcggctgcgcgcncgcnctggcnctgttcgtgcgtgcgtgcntcctncgtcgcgtgctttcgttgtctgcgtctgtgctgctnctcgtgcgttgtgccggtctctctgccttggtcggcgctcncgcgctcgctctgttgtcgtgtgtcgtgntncgtcgtcgtgcgcttcgtcgcgtccgtctgtcgtcgtcgcgggctctgctgtctctgtctctcgctctcgctcgtctctgcgctctncgtctgcttctcctcggttctctgtctgtcncgcttcgcgtcgtntgctcgcgttgtcgtcgtgcctctntcttctgttcgtggtgcggtcgtgtgctcgctctctcgtcgctctcttcgcgccttcgtgtcttcttctgtctgttcttgcgtctctctctgtctgcgtctctgcgctagtctgtgatctgtcgctgtcncttccgtgtcgtctcgctgctatctgtctgtcctctctctctcactctctcttcgctctccttctcgcttctccgctcggtcttctctctcgtccgtctttctttgcgtccgtcgtccctgtctctgctcgtgtctctcttcgtgcttccttgcgcgtgtctccgttctcgtgcntgtgcccgtcgctgtcncttctcgtgcctctcgtgcgtgccttgtggtctctcttctctgctgtctcttgcgcgctcgtcgtgngcttcgtcgctctcttcgtatctctcgtactgctctcgtctgcgtgtgctcatgctctcgctgcgcttctcntgctacacgctgtcttcgtttggtgctgtcgncgctgccgtcgtctcgacgctgtcctgcgntcgtctgtctctctgcttctctgcncgtgtctgcgctctcgtgtgtcgtgctcactgtgatgcgtctcgtgcgncgtcgtcgctctgtgctcntcgctgctctgcgttgctgttcgtgcctcttcgcatctgn

SEQ ID NO: 4330 - DNA, 504 bp, Glycine max
  unsure at all n locations
  Clone ID: LIB3028-016-Q1-B1-A5
gccacgccctaaagcaaacacaaccacacccgcctcccaccaccaaatgtcttggcccttgtcaccnctaaaccccccccccccccgccccccccacctcctccctaccctccccatcaaacccccccccccacccaacccccacccccaccatcccaccccccacccccaacatcccaccaaacccccccccccaaccccacccccccccacaccccccccaccccccccacccccccccccacccccccccaaacaacaccccccccccccacaacccacccaccccacaccccacccacccccccccaccaccaccccacccaccacccccccccaccacccacaccacaccccccccacccaaccccccccacccccacaacccacccaccccaccacccacaccccccccacaccacaaaccacaacccccacacccccacacaccccccacccccccacacacccccacaacctcacccccaacccccccccacaacc

SEQ ID NO: 4331 - DNA, 577 bp, Glycine max
  unsure at all n locations
  Clone ID: LIB3028-016-Q1-B1-B10
gtgggtggtatagcgggaatgagtacgagcgacgatactgagtccgatcgagctagccgctaatcngggntctagcgccgnntacgtataaactcggaaaattcgngnnctcgaggttcataaagccctccttgtccaatttacggaaggagaactggagttatcgtgagagcgatattacgtcaatggcttttcgcttttactgtcacaaagactctaattcgctgtggtggccctcgcctccctcctcatctagacgcatgctgcccgcggggcccgcaccgtccaggctcgcctctacagcctctgcaagcctagcaccagatggttgggcgtgtgcctacgaggacccatccgtgctgggagtgttgctgggtcctgcgatcgcgttgaacctagttacaaagggccatcgagagtgggagattgctcggtgactctataatacagggtggagcgaagaacgtccgaaggtttatgaagcggtggtcccggtgctaagtgcgggggaaacttcgtaaggatgttcggggatgtgactcgtaaattttgtgggggagcgagttaccggggcaag

SEQ ID NO: 4332 - DNA, 505 bp, Glycine max
  unsure at all n locations
  Clone ID: LIB3028-016-Q1-B1-B7
ggttgccggcgaatgatctaatttgcctagctctccgcacggcgactgggccngaccacgcgtacgtaagctcgggtttgcgtactgggcgctcttccgcttcctcgctcactgactcgctgcgctcggtcgtgcggctgcggcgagcggtatcggctcactcaaaggcggtagtacggttatccacagagtcaggggataaggcaggagggagcggatgagcaaaacgcgaccaaaaggccaggaaccgtaagggggcgacgtttctggcgtggttccagaggttccaccctccgtcgtgagggtggcggtgaagcggatggcgaagtgacgagttgcagagcgagggggggacgtatgggtgcggcgcggcgggtgcgcccggggaacatccggagttgccgtggccgggtggcgagcctgcccgcttaacggaaagatgggtgggaccatcgcgacgtgcggggactcggtggggtggtgggaaggagggggagcgcctctt

SEQ ID NO: 4333 - DNA, 468 bp, Glycine max
  Clone ID: LIB3028-016-Q1-B1-C1
gttctatcgaccagccctccataggcaacaagtctctgccgctccacacctgaagccgccgctctagaactagtgggtcccccgggctgcaagactccgcgactaatttttttctcctccgtctcttcctcttttggtttccaacataccttacgtccttactaacacattactcttccaatttgagatcccacagagccgactcacccaattattccaacatacgtgacagatcgagcagcgccactagttttcacagctttccacaataccatcgtttacccacaccgctatcggtattgaacgcgaggtcctgtgaccattttctctcactccttgagtccaagcgttacttcccaccttacaaccgctcatccacgtatgctgcctctctacggttttcgcaccagtcgctctttcaacaaccttttgccgtaagaacctcccccgcttttcgaatcaccgctt

SEQ ID NO: 4334 - DNA, 473 bp, Glycine max
  Clone ID: LIB3028-016-Q1-B1-C2
gtggggtggggggaatagttcagtgcgaggcaagagactgaatcggaccaggcgtacgtaaactcagaattcggctcgagtagagttcaaccaactagtgatgcctcaactaactaatcaggtccaactgggtataacggcggtggtgtcttcgtatgctagtcgatttgatgattctttgatatagtcagcttctcgtgttatctctaatggtcattgtgtggcaatttactatagttctaatttgtcaaaagtatattactttctttttttcgcgggggcactgctaagtcgcattttgtcctcgtcttctttaatgttgacactttctgtagtacctttttatttaaagattaagtaattagtagtttcaaaaaaaaaaagagagagaaaaaaaacggcggccgccgactaatgagctcgtcgacccgggaattaattccgggacggtacctgcaagggttacaactttt

SEQ ID NO: 4335 - DNA, 467 bp, Glycine max
  Clone ID: LIB3028-016-Q1-B1-C5
gtcgattgcgtggtctatctaagagactgagctcgcacgcacgcgtacgtaagctcggaattgcaagctctgcattaatgaatcggccaacgcgcggggagaggcggtttgcgtattgggcgctcttccgcttcctcgctcactgactcgctgcgctcggtcgttcggctgcggcgagcggtatgagctcactcaagggcggtaatacggttatccacagaatcaggggataacgcaggaaagaacatgtgagcaaaaggccagcaaaaggccaggaaccgtaaaaaggccgcgttgctggcgtttttccataggctccgcccccctgacgagcatcacaaagatcgacgctcaagtcagaggtggcgaaacccgacatgactaggaagaatacaggcgtttcccgctggaaggctcctcgtgcgctctcctggttctaagggcggggtaacggggaggcggtcctg

SEQ ID NO: 4336 - DNA, 518 bp, Glycine max
  Clone ID: LIB3028-016-Q1-B1-C7
cgcgcgttggcccgctgccgtgatatgaatcgccgtgctactatgcatcgcgcactgagccccgacgcacgcgtacgtaaactcggaattcggctcgagacattactaaagagttagagaggatgggatcggtcgacggagcatcctcgtccgtcaagtaagtgagtgcactttccctatcatcggagaaacgctcttagcactcaccgccgggcggttcgggtgcgggagcaagccgacgtccagttgccggcctgtacaccgggtagctccggacttggcgcgacccgcgctcccttcccccatcgtcagcgtccggggtacctggcggccagggggctcgggggccggcgcggcggggcgtacggggctgctcggggcgacctcccgtcgcggcggcccgaccgtcccgtggttgcgggactggcgtgccgtcctggcgtgtctcgtcgcgcggggcgtcccgggggtacccggccgccgcggtggggtggagcgtagccgccggagcctccgcc

SEQ ID NO: 4337 - DNA, 467 bp, Glycine max
  Clone ID: LIB3028-016-Q1-B1-C9
aattgatcgaatgtcgttgcgtagactatgatatcgcgtccaggcgtacgtaaactcgggttgtgccacgcggttgggaatgtaattcagctccgccatcgccgcttccactttctcccgcgttttcgcagaaacatggctggcttggttcaccacgcgggaaacggtctgataagagataccggcatactctgcgacatcgtatcacgttactggtttcacattcaccaccctgaattgactctcttccgggcgctatcatgccataccgcgaaaggttttgcgccattcgatggtgtcaacgtaaatgccgcttcgccttcgcgcgcgaattgcaagctctgcattaatgaatctgccaacgcgcagggagaggcggtttgcgtattgggcgcacttccgcttcctcgctcagtgattccctgcgctcggtcgttcggctgcggctatcggtacagcgcactcag

SEQ ID NO: 4338 - DNA, 918 bp, Glycine max
  unsure at all n locations
  Clone ID: LIB3028-016-Q1-B1-D1
gtggatcggatgtcggctgacttattgtcctctctgcctaccaggctcctcgcgcgcaacctgcgaactctngntctntgggnccgncttgtntntctaantcncgtgaagactgtggnntgcgtgcttttcggctgcttcncttgtctgtttccgcctctgncgggtgttgcttcgtgtcgctctgcgcgtctccggtgtgcgctgcgtcgcgcctcgttcgtgcgtgcgtgtgctgcctgtgcgtttgctcggcgcgtgtgtggtgtgtctcggcgttgtccctgctggtgctgcgctgcgtngccgctcttgttgtgtgtcgtgtctctgttggcttgcgtgtggtgcgtgtgggtgttttggtgcttgctctccggcgtgtctggtggtgtctcgcttcggctttgcctcctgttcttcggtgttctcgcgtgtctgcgtggtggcggctgtgtgtgtccgtttctgccttcgtccgtcctgtcctgcgtgtccttctctgtgtctcgcttcgttggtgcttgttgtncgtcttctgtgcctgcggctctncgtgctggctgcttctctcggtncttctgtgctgttgcgtcgcctcttggtgttgctgtgtntcctctnctctgtgcggcgtgtgttgctgctctcggctcctgtgtgtgctgtccggtgtcgccgtgctgcttctgctcgtgtgctgttgttgccttgtttcgttgtgtcgctcntgctcttgtctctctctgtgtctcgtgctccntcttgtctgtgncgcgcctgtgtgnttgntctcnctcttgtggctctctttgctgtctgnctgtctgttgtgcgntcntgtcgntggttgctggtgntgtgtgngctgtgtgntgnctctgtnctcgcgcgtgntcgtcgcnnctctcnttctgn

SEQ ID NO: 4339 - DNA, 480 bp, Glycine max
  Clone ID: LIB3028-016-Q1-B1-D2
gggctgtggtgcggatgaatcaggttgtctaggccaagagcactgaattcggacgcgcgcgtacgtaagctcagcgcttcgccttcgcgcgcgaattgcaagctctgcattaatgaatcggccaacgcgcggggagaggcggtttgcgtattgggcgctcttccgcttcctcgctcactgactcgctgcgctcggtcgttcggctgcggcgagcggtatcagctcactcaaaggcggtaatacggttatccacagaatcaggggataacgcaggaaagaacatgtgagcaaaaggccagcaaaaggccaggaaccgtaaaaaggccgcgttgctggcgtttttccatagggtccgcccccctgacgagcatcacaaaaatcgacgctcaagtcagaggtggcgaaacccgacaggactataaagataccacgcgtttccccctggaagctcgctctgggctctcctgttcggagcctgcg

SEQ ID NO: 4340 - DNA, 480 bp, Glycine max
  Clone ID: LIB3028-016-Q1-B1-D3
gggtgctgtccgaatgaatcacgtcgtctaggcgaagagtactgcactcggacgcgcccgtacgtaagctcagaatcaggggataacgcaggaaagaacatgtgagcaaaaagccagcaaaaagccaggaaccgtaaaaacgccgcgttgctggcgtttttccataggctccgcccacctgaagagcatcacaaaaatcgacgctcaagtcagaagtggcgaaacccgataggactatcaagataccaggcgtttccccctggaaactccctcgtgcgctctcctgttccgaccctgccgcttaccggatacctgtccgcctttcgcccttcaggaagcgtggcgcgttctcatagctcacgctgtacgtatcccagttcggtgtaagtcgttcgctccaagctgggctgtgttcacaaaccccccggttcacccgagcgctgcggcgtaccagggaagcaacgtcttgaggtcaaacct

SEQ ID NO: 4341 - DNA, 1022 bp, Glycine max
  unsure at all n locations
  Clone ID: LIB3028-016-Q1-B1-E1
gtcggctcgtcggtcaggcgtacggnntgtnacttatcgttaccgtcgacgtncntgctaccccatggctagcagtctgcgngcgaacgcgcgcgaagcgcacncgggtcctnnngnntctnnccgtnnncngctagtcngttgaagagngtgtggccgngctgtgcgtggnggcggtntgtggtgcgtgcgttgctcctctcgtcgtcgcgttgcgtgtggtgcgcgggtccgtgcctcgctgtgcgctgctgtcgcttgctgggcgcntncgcgcctgcgtcctctcgtctcgcttgctctgtcgcgcgtgcgtcgtgntcgcgtctccgcgctgttctcgggtgtcgctggtggtctgcgctggcgtctcgtgcgtgctcgcgttgcgtgncgcggcgctgcggcggtngntncgtggtgtcggtgtggcgcgcgcgtcgtctttcgcgtcgtgcggtgncgcccgtctctcttgctccgtctctcgcctctctgttcggtggtcgcgtctgcgcgcncgtcttggncgtcgctcgcggtcgcgcgcgcgcttcgccgtgttttccctgtgtgtgtgctctctctgtcgtccgcgcgctctgtgtcgctgcgtgcgcgtcgtgtcgcncgtctctcgtgtgtctnctcgcgncgcggngtgcgcgtggccgtctntgggtgtgcctgctcttncgctcgttcggctcgtgtgcgctgccggcgntnntctctcgtctcgccgttcgcgcggtgctcgcgctgtgtgntgctggtcgtgngcgcgcgcgggggcctgcgttcncgtcctcgntgctntgcgcgcgtgtgtcgcgctggtgtgcgtctggtgcgcgttcgcgctgnctgcgtgcgtgctcggttgcctgctctctcgcgttgtgctgctcgtggctcggtctcttggtgctgcctctctcgctgtgtcggcgttgtcgtcgtcggctgtcgcggcgtgtgccgcgtcggcgcgttgcggctggcgtcgtcctcctctttcc

SEQ ID NO: 4342 - DNA, 590 bp, Glycine max
  unsure at all n locations
  Clone ID: LIB3028-016-Q1-B1-F1
cgcgtgtggtcgtgctatgtcctcctcgcacctgccatgcccaaccgcatgcntgccttngcccctgtntgcaacntgaaactcggccgttctttgtcgcttgttcccttgccctttcgtgtccgcctggcttccctccctctgcctctgcctcgtgctcctcttcgccctccgtttctcctgcggccttcccgctcctcccttgggcgttgccgctccctctctccccttctccgctcccctgttccttcggtcgcgttcgcccccctcctcgcccctcctctcctctcccttcctcctgccgccgtctgcctccctcgcctccctgtctcctccttctcttccttttttcccgtgctgtcccccctctccttggtccgctccccccgtcgccgccgtctcccccccgcccgtccggcgcgtccgtccctccccgccctccctttcccgttcctcgccctntctccttctccttcttcgtcctcccgcccctctttccttctcgcctcctctttcccgtctcccctcgtgccttcccttcttcccgcgtctcgccgccccgcgcgccttcctccgctcctttcctcctc

SEQ ID NO: 4343 - DNA, 483 bp, Glycine max
  Clone ID: LIB3028-016-Q1-B1-F11
aggtcgttgcgaatgaatcacgtcgcgtagcgaagagcactgatatcgcgtccacgcgtacgtaaactcggaaaacgccacgaaccgtaaaaaggccgcgttgctggcgtttttccataggctccgcccccctgacgagcatcacaaaaatcgacgctcaagtcagaggtggcgaaacccgacaggactataaagataccaggcgtttccccctggaagctccctcgtgcgctctcctgttccgaccctgccgcttaccggatacctgtccgcctttctcccttcgggaagcgtggcgctttctcatagctcacgctgtaggtatctcagttcggtgtaggtcgttcgctccaagctgggctgtgtgcacgaaccccccgttcagcccgaccgctgcgccttatccggtaactatcgtcttgagtccaacccggtaagacacgacttatcgccactggcagcagccactggtaacaggattag

SEQ ID NO: 4344 - DNA, 766 bp, Glycine max
  unsure at all n locations
  Clone ID: LIB3028-016-Q1-B1-G1
cggtgtcgtcgttggtgtgtcggctggtatcttttatctctcttctgttcgttngntcggtccngccgtgncgcggcaaatcctntggntctntngnncctntntntntgtncgaacgtgtcgatnggtgttgntgttngttggttgtgttgtnttgtgtgttgttgttgttttntnttgtgtgnntctgtttgtggtcgtttgntnntggttgtntttggttgtgtgtgtgtntgttgtgtgtgttgttgtgttggttgtgtgtttgggtttttggtgttggttgtggtgtgtgttggtgntttgttgtgtggttttttgtgtggcggtggtgggttgtgttgttggtgtgtgttgttttgcttgtcttttggtgtgtgtgttgcctccttgggttctgttggtggtggtcggcgtttgttttttggttttgtgtgtctgtgtttttgtcttgcttcttgttctgcgtttggttgttgtgtttctttggttgcttggttgggtttgttggttgtgttgttntgtgtggtttggtgcggnttgctgctgctctggttgtgtttggtggtttcgtggtggttcttgtgttcttctgtttgcttttgcctgttttttgcgtttgtgtgggtgtgctgtgtgtcgttttggctgtgtgggtttgtcttgtgtgtttctcgttctttttgcttcttctgttttggttggtgtgtctgttgtggtgcgttgtgcntgttcgttgtcttggctttgtcgttcgctnttgttg

SEQ ID NO: 4345 - DNA, 486 bp, Glycine max
  Clone ID: LIB3028-016-Q1-B1-G11
agtgggcgttggcgaatgaatcacgtggcgtagcgatgaggagtgatatcgcgtccaggcgtacgtaaactcggaatgccgcttcaccttcgcgcgcgaattgcaagctctgcattaatgaatcggccaacgcgcggggagaggcggtttgcgtattgggcgctcttccgcttcctcgctcactgactcgctgcgctcggtcgttcggctgcggcgagcggtatcagctcactcaaaggcggtaatacggttatccacagaatcaggggataacgcatgaaagaacatgtgagcaaaaggccagcataaggccaggaaccgtaaaaaggccgcgttgctggcgtttttccataggctccgcccccctgacgagcatcagaaaaatcgacgctcaagtcagaggtggcgaaacccgacaggactataaagataccatgcgtttccccctggaagctccctcgtgcgctctcctgttccgaccctgcc

SEQ ID NO: 4346 - DNA, 525 bp, Glycine max
  unsure at all n locations
  Clone ID: LIB3028-016-Q1-B1-G2
ggataggtgcgaatgatctgatcgtacagtcagagactgaaaccagacgcagtcgtacgtaagctcgaaattcggctcgaggttcggacaagaagacaggggaacgatgtaanaagagaaaaaaagaggggggtatcagtcgattgagatcgtcagcctttgcatgaagtcgttcggatggtgtcgttgttagagaagtagtggaagaggtagcggggatgaggtagggggatggaggattacggaagacgtcgtggcggaaagaggggagcggtgtgcgcggggaagggaggggttttgcgctaacaagctttagaagcattggaagtatagggacgtagcaacgggaagtgggaactgagtgggggggggtgagtaacgttaagtggggggaggcagcaaatgtagtgaggtgactttagtgaggtatagagggggaccgttctacagggctaggttgttgttgcgatctgtctattatgtgctgaggcggaggagggaaaggagagggaggaaggatagttn

SEQ ID NO: 4347 - DNA, 480 bp, Glycine max
  unsure at all n locations
  Clone ID: LIB3028-016-Q1-B1-H6
ggcggttgcgaatgattctaatcagagtcggccaacngcgacctgacctcgcacgcacgcgtacgtaagctcggatttaatcgccgcgacaatttgcgacggcgcgtgcagggccagactggaggtggcaacgccaatcagcaacgactgtttgcccgccagttgttgtgccacgcggttgggaatgtaattcaactccgccaaccgcgctttcaacttttcccgccttttccccaaaaccttgctgggctgggttaacaagccggaaaccggccgagtaaagaaacccggatactccgggaaatcccataaacgttccgggtttacaattcacaaccctgaattgactcccttccgggcgctatcatgccataccgcgaaaggttttgcgccattcgatggggtcaacgtaaatgccgcttcgcctttgctcccgaaatgtaagcccctgcgtaagagatggggcaagacgcggggaaa

SEQ ID NO: 4348 - DNA, 472 bp, Glycine max
  unsure at all n locations
  Clone ID: LIB3028-016-Q1-B1-H8
ttggagatgcttttggggcgncaannngctactgggctnggacgcacgcgaacgtaagctcggaattaggggataacgcaggaaagaacatgtgagcaaaaggccagcaaaaggccaggaaccgtaaaaaggccgcgttgctggcgtttttccataggctccgcccccctgacgagcatcacaaaaatcgacgctcaagtcagaggtggcgaaacccgacaggactataaagataccaggcgtttccccctggaagctccctcgtgcgctctcctgttccgaccctgccgcttaccggatacctgtccgcctttctcccttcgggaagcgtggcgctttctcatagctcacgctgtaggtatctcagttcggtgtaagtcgttcgctccaagctgggctgtgtgcacgaaccccccgttcaacccgaccggtgcgccttaaccgggaaacgatcggcctggggtcaaccggg

SEQ ID NO: 4349 - DNA, 484 bp, Glycine max
  unsure at all n locations
  Clone ID: LIB3028-016-Q1-B1-H9
ggganttggagaatgaattaccttggcgtagcgtagactactgcagtcacgtccagacccacgcttaaatcaacncanaaggccaggaaccgtaaaaaggccgcgttgctggcgtttttccataggctccgcccccctgacgagcatcacaaaaatcgacgctcaagtcagaggtggcgaaaaccgacaggactataaagataccaggcgtttccccctggaagctccctcgtgcgctctcctgttccgaccctgccgcttaccggatacctgtccgcctttctcccttcgggaagcgtggcgctttctcatagctcacgctgtaggtatctcagttcggtgtaggtcgttcgctccaagctgggctgtgtgcacgaaccccccgttcagcccgaccgctgcgccttatccggtaactatcgtcttgagtccaacccggtaagacacgacttatcgccactggcaacagccactggtaacagga

SEQ ID NO: 4350 - DNA, 454 bp, Glycine max
  unsure at all n locations
  Clone ID: LIB3028-017-Q1-B1-A5
taacgattcangtgccatataaaagagatatgacgtcgcatgcacgcgtacgtaagctcggaattcggctcgaggattcatactatggctctcacgtgatgcagtatggtgatgtagggcttagcagagatgttctcttccattatttgggtacagatcctgctaatgataatttcacttttgtggatgaaaactccttatggtcaccttcaaaaccagtcaaccaacgtgatgctgatctcatccatttttgggataagttccgcaaagctcctgagggttctctcaggaaaaatacagctcagaaacaagttttggaagcactcggtcgttcggctgcggcgagcggtatcagctcactcaaaggcggtaatacggttatccacagaatcaggggataacgcaggaaagaacatgtgagcgaaaaggcaacanaaagcaagaaaccttaaaa

SEQ ID NO: 4351 - DNA, 449 bp, Glycine max
  unsure at all n locations
  Clone ID: LIB3028-017-Q1-B1-B7
ttacgattcangtggcctataaaagattatgacgtcgcatgcacgcgtacgtaagctcggtgataagagacaccggcatactctgcgacatcgtataacgttactggtttcacattcaccaccctgaattgactctcttccgggcgctatcatgccataccgcgaaaggttttgcgccattcgatggtgtcaacgtaaatgccgcttcgccttcgcgcgcgaattgcaagctctgcattaatgaatcggccaacgcgcggggagaggcggtttgcgtattgggcgctcttccgcttcctcgctcactgactcgctgcgctcggtcgttcggctgcggcgagcggtatcagctcactcaaaggcggtaatacggttatccacagaatcaggggataacgcaggaaagaacatgtgaacaaaaagccaacaaaaaggcaggaaaccttaaa

SEQ ID NO: 4352 - DNA, 453 bp, Glycine max
  Clone ID: LIB3028-017-Q1-B1-C1
catgagtcaggttgcataggcaagagagatgatatcggacgcaggcgtacgtaagctcggaactcagtgcgacgttgcgcgagaagactgtgcaccgccgctttacaggcttcgacgccgcatcgttcgagcatcgacaccaccacgctggcacccagttgatcggcgcgagatttaatcgccgcgacaatttgcgacggcgcgtgcatggccagactggaggtggcagcgccaatcaacaacgactgtttgcccgccagttgttgtgccacgcggttgggaatgtaattcagctccgccatcgccgcttccactttttcgcgcgttttcgcagaaacgtggctggcctggttcaccacgcgggaaacggtctgataagagacaccggcatactctgcgacatcgtataacgttactggtttcaaagtcagcaacccggaagtgaatccgttg

SEQ ID NO: 4353 - DNA, 448 bp, Glycine max
  Clone ID: LIB3028-017-Q1-B1-C8
cgtatgaatgcggtgacctatagaagactatgacgtcgcatgcacgcgtacgtaagctcggcccgcgttttcgcagaaacgtggctggcctggttcaccacgcgggaaacggtctgataagagacaccggcatactctgcgacatcgtataacgttactggtttcacattcaccaccctgaattgactctcttccgggcgctatcatgccataccgcgaaaggttttgcgccattcgatggtgtcaacgtaaatgccgcttcgccttcgcgcgcgaattgcaagctctgcattaatgaatcggccaacgcgcggggagaggcggtttgcgtattgggcgctcttccgcttcctcgctcactgactcgctgcgctcggtcgttcggctgcggcgagcggtatcagctcactcaaaggcggttatacgggtaatcacagaatccagggaa

SEQ ID NO: 4354 - DNA, 478 bp, Glycine max
  unsure at all n locations
  Clone ID: LIB3028-017-Q1-B1-D12
tgaatgacttaggtgccccatanaanacaatgacgtcggacgcacgcgtacgtaaactcggaattgcaagctctgcattaatgaatcggccaacgcgcggggagaggcggtttgcgtattgggcgctcttccgcttcctcgctcactgactcgctgcgctcggtcgttcggctgcggcgagcggtatcagctcactcaaaggcggtaatacggttatccacagaatcaggggataacgcaggaaagaacatgtgagcaaaaggccagcaaaaggccaggaaccgtaaaaaggccgcgttgctggcgtttttccataggctccgcccccctgacgagcatcacaaaaatcgacgctcaagtcagaggtggcgaaacccgacaggactataaagataccaggcgtttccccctggaagctccctcgtgcgctctcctgttccgaccctgccgcttaccggatacctgtccgcctttctcc

SEQ ID NO: 4355 - DNA, 477 bp, Glycine max
  Clone ID: LIB3028-017-Q1-B1-D9
tgaatgactctaggtgacacatagaagacaatgacgtcgcatgcacgcgtacgtaagctcggaattaattccggaccggtacctgcaggcgtaccagctttccctatagtgagtcgtattagagcttggcgtaatcatggtcatagctgtttcctgtgtgaaattgttatccgctcacaattccacacaacatacgagccggaagcataaagtgtaaagcctggggtgcctaatgagtgagctaactcacattaattgcgttgcgctcactgcccgctttccagtcgggaaacctgtcgtgccagctgcattaatgaatcggccaacgcgcggggagaggcggtttgcgtattgggcgccagggtggtttttcttttcaccagtgagacgggcaacagctgattgcccttcaccgcctggccctgagagagttgcagcaagcggtccacgctggtttgccccaacaagcgaaaatcc

SEQ ID NO: 4356 - DNA, 458 bp, Glycine max
  unsure at all n locations
  Clone ID: LIB3028-017-Q1-B1-E3
ctcgatgctcagctgngcagtgaaatcgtcgaggcgtacgttagctccagtattccgctctaggtatgattggttctcctggggccctggctcatgctgtaagcgttttggcggcgcttccgcttcctggcgttcttagtccctgcgctcggtcgttcggctgctgcttgcggatccaggtcacactctagtggtctatggcagtctccagacacgcccgggtgaatgcttgtctcaacaagggagcagattgccctcgctgcggtagtgaccctcatgatgtcccgtttctcaatttcttccgtatgcttggctctcgcatcgctctgtgggttctttttatcttgttgtcgaaggcgttcgggtgtcggagccgtactcagggtgcttcgctgtggtgtttcctggcgtgattcttgcacctgcccgggtttccggaggtcggtcccgtggccctg

SEQ ID NO: 4357 - DNA, 446 bp, Glycine max
  Clone ID: LIB3028-017-Q1-B1-E7
ctatgatgccgtggcctattaaagataatggcctcgcacgcacgcgtacgtaagctcggaaaaggccaggaaccgtaaaaaggccgcgttgctggcgtttttccataggctccgcccccctgacgagcatcacaaaaatcgacgctcaagtcagaggtggcgaaacccgacaggactataaagataccaggcgtttccccctggaagctccctcgtgcgctctcctgttccgaccctgccgcttaccggatacctgtccgcctttctcccttcgggaagcgtggcgctttctcatagctcacgctgtaggtatctcagttcggtgtaggtcgttcgctccaagctgggctgtgtgcacgaaccccccgttcagcccgaccgctgcgccttatccggtaactatcgtcttgagtccaacccggtaagacacgacttaacggcactgg

SEQ ID NO: 4358 - DNA, 485 bp, Glycine max
  unsure at all n locations
  Clone ID: LIB3028-017-Q1-B1-G12
ntgaatgactcaggtgacatatagaagagaagtgacgtcgcatgcacgcgtacgtaagctcggaattcggctcgagatgacattagccaaagttgatatgttaagttaatattggtgaagtgaagctcttcttcttacgatagggtgctcgtgaaagagaaagagggaaccattcgagattcgtgtggacatattagctaaacgtcgtgacttttggattccaagaaaaggcaattaaggaatggaatggttggcctttaatggcaaggacgacctttaataatccgggtgggaacttgaggaaagggacaggaatgaacccagtaggagaattttcctttccaaaataggatcgaataaacctatgttaccggaacagttctagcagttacgagacatgcattataagtagcacaaaattccaaacaaaatggcagccgccgactaatgagctcgtcgacgcgggaattaattccggaccggan

SEQ ID NO: 4359 - DNA, 452 bp, Glycine max
  Clone ID: LIB3028-017-Q1-B1-G5
cgtatgaatgcggtgacactataaaagagatatgacgtcgcatgcacgcgtacgtaagctcggaattgcaagctctgcattaatgaatcggccaacgcgcggggagaggcggtttgcgtattgggcgctcttccgcttcctcgctcactgactcgctgcgctcggtcgttcggctgcggcgagcggtatcagctcactcaaaggcggtaatacggttatccacagaatcaggggataacgcaggaaagaacatgtgagcaaaaggccagcaaaaggccaggaaccgtaaaaaggccgcgttgctggcgtttttccataggctccgcccccctgacgagcatcacagaaatcgacgctcaagtcagaggtggcgaaacccgacaggactataaagataccaggcgtttccgcctggaagctccctcgtgcgctctcctgttccgaccctgccg

SEQ ID NO: 4360 - DNA, 453 bp, Glycine max
  unsure at all n locations
  Clone ID: LIB3028-017-Q1-B1-H3
nggatgactcacgttgcgtagacaagataatgatatcggacgcacgcgtacgtaagctcggtttccataggctccgcccccctgacgagcatcacaaaaatcgacgctcaagtcagaggtggcgaaacccgacaggactataaagataccaggcgtttccccctggaagctccctcgtgcgctctcctgttccgaccctgccgcttaccggatacctgtccgcctttctcccttcgggaagcgtggcgctttctcatagctcacgctgtaggtatctcagttcggtgtaggtcgttcgctccaagctgggctgtgtgcacgaaccccccgttcagcccgaccgctgcgccttatccggtaactatcgtcttgagtccaacccggtaagacacgacttatcgccactggcagcagccactggtaacaagattagcagaacgaggtatgttagcg

SEQ ID NO: 4361 - DNA, 451 bp, Glycine max
  Clone ID: LIB3028-017-Q1-B1-H5
agtatgaatgcggtggcactataaaagagatatgacgtcgcatgcacgcgtacgtaagctcggaattcggctcgagcggctcgagcagtgggaggaggctcgggactctgaccgcgtgcctgttgaagaatgagccggcgactcataggcagtggcttggttaagggaaaccaccggagccgtagcgaaagcgagtcttcacagggcaattgtcactgcttatggacccgaacctgggtgatctatccatgaccaggatgaagcttgggtgaaactaagtggaggtccgaaccgactgatgttgaagaatcagcggatgagttgtggttaggggtgaaatgccactcgaacccagagctagctggttctccccgaaatgcgttgaggcgcagcagttgactagacatctaagggtaaagcaatgtttccgttgcgggccgcaaaaccggta

SEQ ID NO: 4362 - DNA, 466 bp, Glycine max
  unsure at all n locations
  Clone ID: LIB3028-017-Q1-B1-H8
ctccgattgctattgngcaataaaannnctattgacctcgcacgcacgcatacgtaaactcggaattcggctccaaggccaaatcgctaacgccttgcactaacagcttttaaacccggttcaaccgaagccctttaccgaaccaaatccaagaaaaaaggtacagaaccaaaggggggaaatgttaacccggtccaactgttaaagatagggaacacctttttggcgttgctcccaactttgcctcctttaaagacaccttcaaccaagtcacacgaattgtctggcaaggaaaacccttttccaatcaccggggggtataaagttaaagctgacagaagatgaaacatctccctataactgccaaacccttcaaactcacggaagttgcggccaaaattccaaggaaactggggcaaaaaaggggccttaaaaatcaaactccccgtctaaaggggggaaaaaa

SEQ ID NO: 4363 - DNA, 480 bp, Glycine max
  unsure at all n locations
  Clone ID: LIB3028-018-Q1-B1-A3
ntgagtaagaatcgccgagtcgctgagatatggagtcgcatgcaggcgtacgtaagctcgagaattcggctcgaggagaaactttgtaatgtaccagctaacatttcatctactagtatgtccgaagtgaatgtacttatgtcaaaactattaaaaagtggcctgctggataacttgaagtgcttcatataactgttccaaaatgacaatcagacacttaacagaaagcacaagaaagggcggccgccgactagtgagctcgtcaacccgggaaataattccgggccggtacctgcaagcgtacgagctttccctatagcgagtcgtattaaagcttggcgtaatcatggtcagatctgtttccagtgtgaaaatgttacccgctcacaattccacacatcatactatccggaaacatagagtgttaaacctgggggtgctattgagtgagctaactcacattaaattcgttgcgctcaa

SEQ ID NO: 4364 - DNA, 451 bp, Glycine max
  unsure at all n locations
  Clone ID: LIB3028-018-Q1-B1-A9
ttcagttgcgtatanaagagactgacgtcggacgcacgcgtacgtaaactcggaattgcaagctctgcattaatgaatcggccaacgcgcggggagaggcggtttgcgtattgggcgctcttccgcttcctcgctcactgactcgctgcgctcggtcgttcggctgcggcgagcggtatcagctcactcaaaggcggtaatacggttatccacagaatcaggggataacgcangaaagaacatgtgagcaaaaggccagcanaaggccaggaaccgtaaaaaggcgcgttgctggcgtttttcataggctccgccccctgacgagcatcacaaaatcgacgctcaagtcagaggtggcgaaaaccgacaggactataaagataccaggcgtttccccctggaagctccctcgtgggctctcctgttccgaacctgccgcttaacgggatan

SEQ ID NO: 4365 - DNA, 476 bp, Glycine max
  Clone ID: LIB3028-018-Q1-B1-B4
aggggtgtcgtgaatgaatcacgtgcatagacaagacatatgaagtcgcatgcacgcgtacgtaagctcggcgaattgcacgctctgcattaatgaatcggacaacgcgcggggagaggcggtttgcgtattgggcgctcttccgcttcctcgctcactgactcgctgcgctcggtcgttcggctgcggcgagcggtatcagctcactcaaaggcggtaatacggttatccacagaatcaggggataacgcatgaaagaacatgtgagcaaaagggcaacaaaagggcaagaaccgtaaaaaggccgcgttgctggcgtttttccacatgctccgcccccctgacgagcatcacaaaaatcgacgctcaagtcagaggtggcgaaacccgacaggactataaagataccacgcgtttccccctggaaactccctcgtgcgctctcctgttccgaacctgccgcttaccggaaaccg

SEQ ID NO: 4366 - DNA, 461 bp, Glycine max
  Clone ID: LIB3028-018-Q1-B1-B8
gaatgattacgtgtcactatagaagagatatgacgtcgcatgcacgcgtacgtaagctcggaattcagctccaccatcgccgcttccactttttcccgcgttttcgcacatacgtggctggcctggttcaccacgcgggaaacggtctgttaagagacaccggtatactctgcgacatcgtataacgttactggtttcacattcaccaccctgaattgactctcttccgggcgctagcatgccataccgcgaaaggttttgcgccattcgatggtgtcaacgtcactgccgcttcgccttcgcgcgcgaattgcaagctctgcattaatgaatcggccaacgcgcggggagaggcggtttgcgtaatgggcgctcttccgcttcctcgctcactgactcgctgcgctcggtcgttcggctgctgcgagcggtatcagctcactcaaatgctgtaatacggt

SEQ ID NO: 4367 - DNA, 451 bp, Glycine max
  unsure at all n locations
  Clone ID: LIB3028-018-Q1-B1-C11
aattacgttggcctagcgaagacattgacgtcggacgcacccgtacgtaaactcgggccgactagtgagctcgtcgacccgggaattaattccggaccggtacctgcaggcgtaccagctttccctatagtgagtcgtattagagcttggcgtaatcatggtcatagctgtttcctgtgtgaaattgttatccgctcacaattccacacaacatacgagccggaagcataaagtgtaaagcctggggtgcctaatgagtgagctaactcacattaattgcgttgcgctcactgcccgctttccagtcgggaaacctgtcgtgccagctgcattaatgaatcggccaacgcgcggggagaggcggtttgcgtattgggcgccacggtggtttttcttttcaccagtgagacgggcaacagctgattgcccttcaccgcctggccctgagaan

SEQ ID NO: 4368 - DNA, 452 bp, Glycine max
  Clone ID: LIB3028-018-Q1-B1-D10
tttcgtagctagccaagactatgaagtcggacgcacgcgtacgtaaactcggataacgcatgaaagaacatgtgagcaaaacgccagcaaaaggccacgaaccgtaaaaaggccgcgttgctggcgtttttccataagctccgcccccctgacgagcatcacaaaaatcgacgctcaagtcaacaggtggcgaaaccccacaagaacgataaaattacaggcgtttccccctggaaacatcccccggcgccctcctggttcgaacctggcggctaacggataactggccggccttttccccttcggaaaccttgggccttttcaaaactcaagccggtagtaacacaattctgtgtaagtccttcgctccaaactgggctgtgtgcaagaaacccccgttcaacccgaacgctgtgccctaaccggtaactaacgtcctgagtccaaccccg

SEQ ID NO: 4369 - DNA, 460 bp, Glycine max
  Clone ID: LIB3028-018-Q1-B1-D8
gatttgaatgacgtgccactatataagaatatgacgtcgcacgcacgcgtacgtaagctcggttcacagtcacgaactgaattgactctcttccgggcgcgagcatgccataccgcgaaaggttgtgcgccattcgatggtgtcaacgtagatgccgcttcgacttcgcgcatgaattgcaagctctgcatcaatgaatcggccaacgcgcggggagaggcggtttgcgtattgggcgctcttcagcttcgtcgctcactgactcgctgcgctcggtcgttcggctgcggcgagcggtatcagcgcactcaaaggcggtaatacggttatccacacaatcaggggataacgcaggaaagaagatgtgagcaaaaggccagcagtaggccatgaatcgtaaaaatgccgcgttgctggagtttttccataggctccggccccctgaacagcaacaaaagag

SEQ ID NO: 4370 - DNA, 489 bp, Glycine max
  Clone ID: LIB3028-018-Q1-B1-G3
atgcagttgcgtagcctagaccaccctatacggacccaggcctactctaaatgataactccgggcaattccagttccatactttccagatacaacgatgcttataaatcataacatattatttaagaatcgtggtacatatgagtcgaatgccgatgaattggggatgttgcatcggtagtttcatttgtagaacgaacatcatgatgttcaaggctgatatgaagcacatacattggacacataacagcattcattgtggatcctatcatcccactacaataatccggttggacataacatctgacaccacacgggcatgttcaacaagtatgaatcttttacaaacggtagacgggattgacattgacgaaggggagcggagattgtttctaactccagtttgatgcccactgcgcatgtcaactcagcctcacagattctgtgtccccaaaatgtgtatcggagcttgccaagttccctatttttg

SEQ ID NO: 4371 - DNA, 573 bp, Glycine max
  Clone ID: LIB3028-018-Q1-B1-G4
atacatgtacgtgcccgctacgctatagaccaggcgtacgtaagctcaaaactcggctcacagcaccaatccctactgatcaatactccatatgagtggtgagaataacacacaacaagagatattttcaattaacatactcctcctctacttacgatctcgactccccatgacaacgtgtgagatgggtgactactccgtacatcccgactttacaaaaactatactgacatacctaatcaaggatcgtgccacaaactcaccaccactgtagtagtcttaacgactcaatctatacgttttcagcccctcacactcaccattctcttacatcggcgggcgatacacccacactcgcacataatcacatcccattaatccatcacgtaccaacttctccagcgacctaatgtccacgattacatacacttactcgaccatcaggtgcgcgataactcattacccaccatcatttaaagattacaacctactattatcttctctacacaggtaacaatgccactatctacaccctcatgtcacaatccactgatagcatttgcaccaaatcag

SEQ ID NO: 4372 - DNA, 462 bp, Glycine max
  Clone ID: LIB3028-018-Q1-B1-G8
tatgaatgctgtggcatattagagagaaatgacctcggacgcacgcgtacgtaagctcggaattccgctctatgcattagagggacagacatggcgctgagaaaggcggtttgcgtaatgggcgcttctccgcttctccgctcactgattcgctgcgcacggtcgttcggctgctgcgatcggtattaactcattcaacagcggtaatacagttatccacagaatcaggggataacgcaggaaagaacatgtgagcaaaatgccagcaaaaggccaggaaccgtaaaaaggccgcgttgctggcgtttttccataggctccgcccccctgacgagcatcacaaaaatcgactctcaagtcagaggtggcgaaacccgacaggactattgagataacaggcgtttccccctggaagctccctcgtgccctctcctgttccaaccctgccgctttaccgaaaat

SEQ ID NO: 4373 - DNA, 564 bp, Glycine max
  unsure at all n locations
  Clone ID: LIB3028-018-Q1-B1-G9
ctttagctgatgcgccctncnggccnagatagacggcagncngtaatcatcncggatcgncacggctccgtaactgctataagaacgtcnantgcncactcttccgtgccgtgcagtatgntgctaaactntttcacacaagtctattacacatgacatgtcatagagtcggcctgatatatgtgcttgcattcatacttcatatctgtgcgagtctatctctgattattcgtgtagtataacgtctgtagtcgctcaagagccacaaagtgcatcacatcggcacatcctccgaggacattctcctgtccacaggtttctacccgatcaagatgttcgcgtgtacataccattgattgccattacctgtgttcatagcataccgatcatgcggtcatcagggctgacatctcaaatctcctatgcactggaagtggagattttcaccaacgggtctggcattgttgtccctatataacatgagaatagatgtgttcataaactgactatccggattccaggagttatgttatctgtgtttcactgtggtaacgacatctggtg

SEQ ID NO: 4374 - DNA, 462 bp, Glycine max
  Clone ID: LIB3028-018-Q1-B1-H3
gaatcaggtgccctggcgaagatatatgacgtcgcatgcgcccgtacgtaagctcggtgtcaacgtaaatgccgcttcgccttcgcgcgcgaattgcaagctctgcattaatgaatcggccaacgcgcggggagaggcggtttgcgtattgggcgctcttccgcttcctcgctcactgactcgctgcgctcggtcgttcggctgcggcgagcggtatcagctcactcaaaggcggtaatacggttatccacagaatcaggggataacgcaggaaagaacatgtgagcaaaaggccagcaaaaggccaggaaccgtaaaaaggccgcgttgctggcgtttttccataggctccgcccccctgacgagcatcacaaaaatcgacgctcaagtcagaggtggcgaaacccgacaggactattaagataccaggcgtttccccctggaaactccctcgtgggctct

SEQ ID NO: 4375 - DNA, 779 bp, Glycine max
  unsure at all n locations
  Clone ID: LIB3028-018-Q1-B1-H4
tgggcgcgtatagacntcgcggggcgcttgcagcatcactgcacttcgtccgtgatgggcaccgngccgcaaagctcggncaagntctngtncccctcntgcngctgctagcgntccgatnactcccgtatgccgctcgcgccggctgtctctgggctctctaccgtgtctgcgtcagtgggctagtcgcgtgcgacctancctatggccacggcggagctcgctctttcatcgtcgtagtcgccctcgctctactttgtttcggccgcgcggcggtctccgctcctgtctttgtgtgcgatcggcgagtctccgtggggtcacgcggcgcggatgtatccgtctctagtctctttcctcgcgtgtcgtgtgaccctggctgcgttgcccggctgatctcgtgcctccctggctgccccctccctgggctgggttctttctgtgacgttgcctctccccactcgttgcggttgcgggccggtctcccgaacgttgcctaggtggccggccccattgctccgtcgctcctcgccgcatcgcgttggtcgccctgggtcggccacgcttcctgtcgtcggtggtttctctcccctagcggctgctctcctttcccgcggtgctagcgcgcgggggcgccgagcccgtcgccttgcggcgcgctgttcgcggcggctggtgtgtggctgccgccgcccgacgcgctccggtcctgcgtcttgcgccggcgggcgcgtgccgtcctccgcctcttgctcgcgttgtcgcggcggtggcgagtt

SEQ ID NO: 4376 - DNA, 466 bp, Glycine max
  Clone ID: LIB3028-018-Q1-B1-H7
aattgattgaattacgtgacactatagaagactatgacgtcgcatgcacgcgtacgtaagctcggaattctcgtctctgcctgctcgacaacttcgttcgtatatgttctttttattcaagttatttattgttgtgaatgtctgggagtgaacagattcttgagtgagtatttaaactgtaagatatgggaagataaaattcaaataaagccatttatggcctatggggcgtgtaaataataccctaggaagtttgtaattatagttcatggatatttctttgcaattcttaaaaaaaaaaaaaaaaaaagggcggccgccgactagtgagctcgtcgacccgggaattaattccggaccggtacctgcaggcgtaccagctttccctatagtgagtcgtattagagcttggcgtaatcatggtcatagctgtttcctgtgtgaaattgttatccgctcaaaattc

SEQ ID NO: 4377 - DNA, 459 bp, Glycine max
  Clone ID: LIB3028-019-Q1-B1-B10
cgacttgaattgacgtgacctatagaagagatatgacgtcgcatgcacgcgtacgtaagctcggaattcggctcgagaaaaaaaaaaaaaaaaaaaaaaaaaaaaaaaaaaaaaaaaagggcggccgccgactagtgagctcgtcgacccgggaattaattccggaccggtacctgcaggcgtaccagctttccctatagtgagtcgtattagagcttggcgtaatcatggtcatagctgtttcctgtgtgaaattgttatccgctcacaattccacacaacatacgagccggaagcataaagtgtaaagcctggggtgcctaatgagtgagctaactcacattaattgcgttgcgctcactgcccgctttccagtcgggaaacctgtcgtgccagctgcattaatgaatcggccaacgcgcggggagaggcggtttgcgtattgggcgccagggtggt

SEQ ID NO: 4378 - DNA, 454 bp, Glycine max
  Clone ID: LIB3028-019-Q1-B1-C11
attgaattgccgtgccatataaaagacaatgacgtcggatgcacgcgtacgtaagctcggaatcggccaacgcgcggggagaggcggtttgcgtattgggcgctcttccgcttcctcgctcactgactcgctgcgctcggtcgttcggctgcggcgagcggtatcagctcactcaaaggcggtaatacggttatccacagaatcaggggataacgcaggaaagaacatgtgagcaaaaggccagcaaaaggccaggaaccgtaaaaaggccgcgttgctggcgtttttccataggctccgcccccctgacgagcatcacaaaaatcgacgctcaagtcagaggtggcgaaacccgacaggactataaagataccaggcgtttccccctggaagctccctcgtgcgctctcctgttccgaccctgccgcttaccggatacctgtccgcctttctg

SEQ ID NO: 4379 - DNA, 487 bp, Glycine max
  Clone ID: LIB3028-019-Q1-B1-C7
tatgctatcagtagtctatcaggagtagtgacgctcgacgcacgcgtacgtaagctcggaattcggctcgagggagcctcggttgagacaggagagtgaacagctcaccctggagttacgaaatggcagtgagcttcttcgaagtgtctctcatcgctaacggtgggtgggtgggtcatcattgtgggctcatcgggcgatgcatcgggtagttctcacctgctggaccggcgtcggtgatgtggtgtacgtccagctgcgtagcgtcttcgctgcgtgcgcgtctcacggctggcggtggtcggggccccgccggagacggctgcgtcgcgggtcggcatggttccccggtttttgtttgccgcggctcgtgggagtgtgtacggcgctccgacgcggcccgtgccctgcgggttgggcatccgtggcggccgcagtgccgggtggcccaggctcgagcggtgggactgcgatcgctgacggcgtg

SEQ ID NO: 4380 - DNA, 455 bp, Glycine max
  Clone ID: LIB3028-019-Q1-B1-D10
ttcacttgcgtggcactatagaagagtagtgaggccggacgcacgcgtaagtaaactcggataacgcaggaaagaacatgtgagcaaaaggccagcaaaaggccaggaaccgtaaaaaggccgcgttgctggcgtttttccataggctccgcccccctgacgagcatcacaaaaatcgacgctcaagtcagaggtggcgaaacccgacaggactataaagataccaggcgtttccccctggaagctccctcgtgcgctctcctgttccgaccctgccgcttaccggatacctgtccgcctttctcccttcgggaagcgtggcgctttctcatagctcacgctgtaggtatctcagttcggtgtatgtcgttcgctccaagctgggctgtgtgcacgaaccccccgttcagcccgatcgctgcgccttaaccggtaacgatcgtctttaagtcaag

SEQ ID NO: 4381 - DNA, 468 bp, Glycine max
  Clone ID: LIB3028-019-Q1-B1-D7
cacactgcatagtctatgtaggagtgtgacctcggacgcacgcgtacgtaagctcggaattcggctcgagaaacataattatcacccccacaaggtcatatttatgtatgggtcccagtaatctcatgctttggtttttctttttttcattcttttagatgtcaatatgtgggatatgatgtttgtagcttgagttcaaagtgctctatttccaatggggtatcaattattatatttaatcacatgccaatggtgcaaaaaaagaacaggatcgaccaataacaacaaataaagtacgaatcggttacaagagagtaatacagaaaaagggtgacagccgactattgaactcgtcgacccgggaattaattccggaccggtcactgcaggtgtactagctttccctaaagggggttctattagaacattgcggtacatagggtcataactggttccggtgtaaaattg

SEQ ID NO: 4382 - DNA, 471 bp, Glycine max
  Clone ID: LIB3028-019-Q1-B1-E7
cacgcctgcctgtcactatgtaggagagtggcctcggacgcacgcgtacgtaagctcggaattcggcgctagatccggaagaaacatctaagcacactgccaacaaaatgctaagaaccgtctactcgccgtgttgctagcatttttctatacgctccgcgcccctgatgagcaacactaaagtcgacgctcaactcagaggtggcgatccccgttacgactagtatgagctcacgtgtttcccccggtaatctccatcgtgcgctctcctgtcctcaccctgttgcatagtggcacccgtctccaccttgccacgtctgagcgctcgaccgtttcgccggcctcttttgtttgtcaccacagtcgggtatcgaccggagacgcctccctctgccgttttccctcggccttgcttcggcgtgcatgccaccccatatctccggagcaccgacccgggccatcccctcccgg

SEQ ID NO: 4383 - DNA, 473 bp, Glycine max
  Clone ID: LIB3028-019-Q1-B1-E8
ccccactcagctgcagagtcatatgagggaatatgacctcgcatgcacgcgtacgtaagctcggaattgactctcttccgggcgctatcatgccataccgcgaaaggttttgcgccattcgatggtgtcaacgtaaatgccgcttcgccttcgcgcgcgaattgcaagctctgcattaatgaatcggccaacgcgcggggagaggcggtttgcgtattgggcgctcttccgcttcctcgctcactgactcgctgcgctcggtcgttcggctgcggcgagcggtatcagctcactcaaaggcggtaatacggttatccagagaatcaggggataacgcaggaaagaacatgtgagcaaaaggccagcaaaaggccaggaaccgtaaaaaggccgcgttgctggcgtttttccataggctccgcccccctgacgagcatcacaaaaatcgacgctcaagtcagacgtggcgaaac

SEQ ID NO: 4384 - DNA, 452 bp, Glycine max
  Clone ID: LIB3028-019-Q1-B1-F9
atcactagccctgcatatagaagagaaatgacgtcggacgcacgcgtaagtaaactcggaattgagtctcatccgggcgctatcatgccataccgcgaaaggttttgcgccattcgatggtgtcaacgtaaatgccgcttcgccttcgcgcgcgaattgcaagctctgcattaatgaatcggccaacgcgcggggagaggcggtttgcgtattgggcgctcttccgcttcctcgctcactgactcgctgcgctcggtcgttcggctgcggcgagcggtatcagctcactcaaaggcggtaatacggttatccacagaatcaggggataacgcaggaaagaacatgtgagcaaaaggccagcacaaggccaggaaccgtaaaaaggccgcgttgctggcgtttttccataggctccgcccccctgacgagcatcacaaaaatcgacgctcagg

SEQ ID NO: 4385 - DNA, 453 bp, Glycine max
  Clone ID: LIB3028-019-Q1-B1-G9
ttccggtagcgtggccatatagttgagatatgaggtcgcatgcacgcgtaaataagctcgggattcgggtcgagccgaatgagattatcaaacacatcatctgtcgattgtgaatgcgaaggattgcgttgtcttccttcctcttctcattcgcttcattcttcgatcttcgtccggggactgctcagaatagcatcaccatcactcgcagatggatacgatcggatgcttacactactctggatgctctcagcatagtgtcggagctgaaggacttgcacgattagccatcaacttcttgaagagcatggagaattcgctgtcggattttgcaatggtagttaaggcataggggtccggtgttagaggcatatgcaggacgtgtactcctaaggcaaatgcagctgcctccaggatactctttcaaaccatcgaatgtgtgctttagggctg

SEQ ID NO: 4386 - DNA, 470 bp, Glycine max
  Clone ID: LIB3028-019-Q1-B1-H1
cctgactacgctgcactagcgaagagatgtggagtcggacgcacgcgtacgtaagctcggaattcggatcgaggttttgtgtgtcaccttggtgtgcatacgagatggaggagcaaaatggtagtggtaagttgagccaagggcttcgcaaagtgaagccttaccttgctatattgtcccttcactttggctactcacggatgtatatcatcactatggtttccttcaagcatggaatgagtcattggatactctcagtgtatcgtcatgtagttgccgctattataatagtcccttttgcacttgtccttgaaagaaaaataagaccaaagatgactcttcccatcttcctgaggatagtggcacttggtttccttgagccagtgctagatcagaacttgtacaacatggggatgaaaatgacctcaacaacgtgtgcatccgccactgttaatgtcctcccggccatt

SEQ ID NO: 4387 - DNA, 476 bp, Glycine max
  unsure at all n locations
  Clone ID: LIB3028-019-Q1-B1-H4
ttccgcctgcatagtcgtattagggagtatatgacctcgcatgcacgcgaaacgtaagtaccgtcttcatgggagaaactattactgttgatgggtgtctggtcagagatatcagtcgataacgccggatgattattgcaggcagctgcttcagcggagtcatcctggccagccacctgacagttaatgcatgagctacctgaacgcttgccccagaagattgtttactgccgcctttacacgcttctacgccgcttcgttcgtacatcgagaccaccaagctggcacccagttgctccgcgcgagatttaatcgccgcgacaatttgcgacggcgcatgcagggttaaatttcatgtggttacacctgtcttcaatcacagattttatgtcactcattgtactgccttttgatgctgtcttttcagcctcgccattctccgcatccactatattcccgcgttttcgccgcaaatn

SEQ ID NO: 4388 - DNA, 491 bp, Glycine max
  Clone ID: LIB3028-020-Q1-B1-A3
aattaagttgccctgcatatacacgacattgaggtcacaccacgcttaactcgaaactaattccggaccggtacctgcaggcgtaccagctttccctatagtgagtcgtattagagcttggcgtaatcatggtcatagctgtttcctgtgtgaaattgttatccgctcacaattcgacacaacatatgagccggaagcataaactgtaaagcctggggtgcctaatgagtgagctaactcacattaaatgcgttgcgctcactggtcgctttccactcgggaaacctgtcgtgccagctgcattaatgaattcgcaacgcgcggggagaagcggtttgcgtattgggcgccacagtggtttttcctttcaccagtgtaaacggcaacaactgagttgccctcaacgccctgtccctgagaagagttgcagcaaacggtccacgccgggttgccccagcatgggaaaaatcctgttttatagtggttaaagg

SEQ ID NO: 4389 - DNA, 474 bp, Glycine max
  unsure at all n locations
  Clone ID: LIB3028-020-Q1-B1-D10
agtaaggatgccgaggcaagactatgatatcgcgaccacgcctacgtaaactcggaattcggctcgaggttcctagatcgcgagcggccgccgactagtgagctcgtcgacccgggaattaattccggaccggtacctgcaggcgtaccagctttccctatagtgagtcgtattagagcttggcgtaatcatggtcatagctgtttcctgtgtgaaattgttatccgctcacaattccacacaacatacgagccggaagcataaagtgtaaagcctggggtgcctaatgagtgagctaactcacattaattgcgttgcgctcactgcccgctttccagtcgggaaacctgtcgtgccagctgcattaatgaatcggccaacgcgcggggagaggcggtttgcgtattgggcgccagggtggtttttcttttcaccagtgagacaggcaacagctgattgcccttcatcggctgn

SEQ ID NO: 4390 - DNA, 496 bp, Glycine max
  unsure at all n locations
  Clone ID: LIB3028-020-Q1-B1-D5
ngattgaatcacgtggcatatagaagacaatgacgtcggatgcacgcgtacgtaaactcgggccgactagtgagctcgtcgacccgggaattaattccggaccggtacctgcaggcgtaccagctttccctatagtgagtcgtattagagcttggcgtaatcatggtcatagctgtttcctgtgtgaaattgttatccgctcacaattccacacaacatacgagccggaagcataaagtgtaaagcctggggtgcctaatgagtgagctaactcacattaattgcgttgcgctcactgcccgctttccagtcgggaaacctgtcgtgccagctgcattaatgaatcggccaacgcgcggggagaggcggtttgcgtattgggcgccagggtggtttttcttttcaccagtgagacgggcaacagctgattgcccttcaacgcctggccctgagagagttgcagcaagcggtccacgctgggttgccccaacaaggn

SEQ ID NO: 4391 - DNA, 479 bp, Glycine max
  Clone ID: LIB3028-020-Q1-B1-D9
aattaggttgcctagccagactagtacatcgcgtccacgcctacgtaaactcggaattgcaagctctgcattaatgaatcggccaacgcgcggggagaggcggtttgcgtattgggcgctcttccgcttcctcgctcactgactcgctgcgctcggtcgttcggctgcggcgagcggtatcagctcactcaaaggcggtaatacggttatccacagaatcaggggataacgcaggaaagaacatgtgagcaaaaggccagcaaaagggcaggaaccgtaaaaaggccgcgttgctggcgtttttccataagctccgcccccctgacgagcatcacaaaaatcgacgctcaaatcatatgtggggaaacccgacaggactataaagataccacgcgtttccccctggaaaactccctcctgcgccctcctgtttcgaacctggcgcataacggatacgttgtccgcctttttcccttttg

SEQ ID NO: 4392 - DNA, 580 bp, Glycine max
  unsure at all n locations
  Clone ID: LIB3028-020-Q1-B1-E9
attctgttgactacgccacanctaatncaacacgagcaggcctacgtaagctcggaaatcggctcgagtatttttcagttccgcataaggttcccgtgttccaacaaaattaagttttgagctaatgaagccttgtggccggttaacttataagtcctcaaattctcaaacgcacaaaccgtaagcggcatactcaccaagaaggtgtttcacatggacccaaatttgtaccccccggtaatgcaccaaacaatttaaaattttcaccgggaggagaatttttgcccgtactctcgcggtggggcgtcaaacctagttctctgaatcaacggaattgtccccttggcaagcgcaatatatgtgttcgcgatcaagaaacggcacccaaaaaagactgttcgttacccgcgaaaaaattttcttccggtccaaaaatttgaagatttaaatgggcagcataacaacttggaaaccaacaacgggggggtaatcaacacatgggcacacctatggttgccaccacgttggcgaaaaacaatcctcagagttggtgcgctctcagatttatcccacagggcgg

SEQ ID NO: 4393 - DNA, 509 bp, Glycine max
  unsure at all n locations
  Clone ID: LIB3028-020-Q1-B1-F3
tgaatgtggttgcgaggcaagagcaagnaatcgcggcaggcctacgtaagatcggaattcggctcgagaccctcttcctctttcgccaacacacacgattgcgatgcatctctacggtgtcttcctcgcccttgggttgaaaatttgaatctcgtagaagccaaccatgggggtcggcagaggcagacaggttatgcaattttttgggggcaagccaaaagttgtttgtaacaaggcgtcttaggagaaaaagagggagaatatggccaaaacgttccctcactaaaaaaatagccttgggggattgttatgaagcatatctaatgttggaaaaaacccttgatttatggggccctttatcactaaaattcacggggttatgcgcctcgggctcaaggaattctgggcttttccacaaaattggggggcccggtccaaaattctaaaaggggaaacactgcgttgcgttaaagggcaaaagacaaaagccgaagggggggggaaaaagg

SEQ ID NO: 4394 - DNA, 492 bp, Glycine max
  unsure at all n locations
  Clone ID: LIB3028-020-Q1-B1-G4
cgattgaattgccgtgacctaaagcaatgcagtcgcgtccacgcgtacgttaaactcggaatacggttatccacagaatcaggggataacgcaggaaagaacatgtgagcaaaaggccagcaaaaggccaggaaccgtaaaaaggccgcgttgctggcgtttttccataggctccgcccccctgacgagcatcacaaaaatcgacgctcaagtcagaggtggcgaaacccgacaggactataaagataccaggcgtttccccctggaagctccctcgtgcgctctcctgttccgaccctgccgcttaccggatacctgtccgcctttctcccttcgggaagcgtggcgctttctcatagctcacgctgtaggtatctcagttcggtgtaggtcgttcgctccaagctgggctgtgtgcacgaaccccccgttcagcccgaccgctgcgccttatccggtaactatcgtcttgagttcaacccggtaagaaan

SEQ ID NO: 4395 - DNA, 493 bp, Glycine max
  Clone ID: LIB3028-020-Q1-B1-G5
cgaatgaatcacgtggcatatagaagacaatgacgtcgcatgcacgcgtacgtaagctcggaattcggctcgagagctggtgctagcgtcctgaaaattcctctttacaagcatattgctaatatcgcgggtaacaaaaagttggttttgcctgttcctgctttcaatgtcattaatggtggatcacatgctggaaacaaacttgctatgcaggagtttatggttcttcctgtgggagcttcctcgttcaaggaagccatgaagatgggtgtagaagtgtatcacaatttgaagtctgtgattaagaagaaatatggtcaagatgcaataaatgttggtgacgaaggtggctttgcccctaacatccaggaaaacaaggaaggcttggaattgctgaaaactgccatcgccaaagctggttacacaggcaaagttgtcattggaatggatgttgcaacttccgaatttcacaagggagaccaaacattccaat

SEQ ID NO: 4396 - DNA, 511 bp, Glycine max
  unsure at all n locations
  Clone ID: LIB3028-020-Q1-B1-G6
cgctcacttacggatgaaatacgattgcctgggcctatagaagagctatgacgtcgcatgcacgcgtacgtaagctcggaattcggctcgagcgttaacacactctccgtcgtttcaccctaatcaacccttcaaggcgccccaaggaaccagcctcgttccttccgggctggctccggcggtaacaacaaccaaaacattcctacctaatatatcaatcaataatcaacctcaacaaaaaaaggtttaatttatttcccagccatttttacaaccctagatacatacatacatacatacattgatattatatgtgtatatattgagtgatcacgtgtgtgtatatatatatatatatatatatatatatatatatatatatatatatatatatatatgtatatatatgggggaagtagagcaacatgtacggttccagcagcaggtagaaacggagtttcagcatttgtcactgaagaaaaggaagcgctgtttgtcgaaacaacaatcn

SEQ ID NO: 4397 - DNA, 492 bp, Glycine max
  Clone ID: LIB3028-020-Q1-B1-G7
agaattaatcacctggcgtatagaagacactgacgtcggatccacgcgtacgtaaactcggaatacggttatccacagaatcaggggataacgcaggaaagaacatgtgagcaaaaggccagcaaaaggccaggaaccgtaaaaaggccgcgttgctggcgtttttccataggctccgcccccctgacgagcatcacaaaaatcgacgctcaagtcagaggtggcgaaacccgacaggactataaagataccaggcgtttccccctggaagctccctcgtgcgctctcctgttccgaccctgccgcttaccggatacctgtccgcctttctcccttcgggaagcgtggcgctttctcatagctcacgctgtaggtatctcagttcggtgtaggtcgttcgctccaagctgggctgtgtgcacgaaccccccgttcagcccgaacgctgggcctttaccggtaactatcctcctgagttcaaccgggtagaaa

SEQ ID NO: 4398 - DNA, 552 bp, Glycine max
  unsure at all n locations
  Clone ID: LIB3028-020-Q1-B1-H11
agggtgtgatgttgggaattgaacacatggtgtgtcgtaatacnaagnagctaaatgacagtcgcgatcgcacgccgttacgttaagacttcggaaatttccggcttccaagcctttacattctctcctacatttcctcggtcctctaactgtgaaaaacaaattccttctttcgctgcaatgcttcccccgtatttccaatcctataaagggggccaaatagaattaaaattattaggggggttaggtgtcaaaagagagttaatacaacattaaaacatgactatggaagaagggatggtcgagaacgaggactacacacaagatggtactgtcaacattatacggaaacctattcttagattcaaaagtggtggttgcgaagcttgctcctttgatgttgtatatgaggtattcgaaagaatggcttattatgggatatcatcaaatttgatcctttatcttacaacanagcttcaccaaggcacagtatcctctgcanacaatgttcacaattgggttggcaccatttggatgacacccatattaggc

SEQ ID NO: 4399 - DNA, 504 bp, Glycine max
  unsure at all n locations
  Clone ID: LIB3028-020-Q1-B1-H2
aggccnttcctgaattgaatgaattcgctagtcaanactatgcaatcgcatccaggcctacgtaaactcgaaattcggctcaagaaaagtttgatcctggctcagaaggaacgctagctatatgcttaacacatgcaagtcgaacgttgttttcggggagctgggcagaatgaaaagatgctcctagcgtgaaagttgcttgtctcgcccaggaggtgggaacagttgaaaacaaagtggcgaacgggtgcgtaatgcgtgggaatctgccgaacagttcgggccaaatcctgaagaaagctaaaaagcgctgtttgatgagcctgcgtagtattaggtagttggtcaggtaaaggctgaccaagccaatgatgcttagctggtcttttcggatgatcagccacactgggactgagacacggcccggactcccacggggggcagcagtggggaatcttggacaatgggcgaaaacccgattcagcaataacgcgttagtgaaaa

SEQ ID NO: 4400 - DNA, 502 bp, Glycine max
  Clone ID: LIB3028-020-Q1-B1-H7
gggtgttggtgaatgaattaatcagctgtctatagaagagactgacgtcggatccacgcgtacgtaaactcggaattcggctcgagggtttctagggtaaggtccgtttttatggaatgacgactcgcgcttttttcattctcttttttttttcggtatgccgctccgccagcaaggagtgccgcgcacgagcggagcgaaagaaccaagtggtttgtggtaatgttagaatttgcacctatttgtctctcattcgtgatcagtctgctagtttctttgatcttcctcggtcttctttttgttaatccatcacaaactacacgaaagttgtccccttattttctctttgtttttcttatggctctcgcctgtagcattccgattgccttttgtgccaagggcgacgacggtgccgtaccttccccttcgggattattaacgtatacatccgacatgcccgaagactcggcaggttccgggcgtagtaataatacctcaacgg

SEQ ID NO: 4401 - DNA, 468 bp, Glycine max
  Clone ID: LIB3028-021-Q1-B1-A1
gtacgttgcgtggcatatagaagagaactgacgtcggacgcacgcgtacgtaagctcggaattcggctcgagatgcgatgtggtgagtgaattgcagagtccgcaatgggaagtgtatgaagcgtaatcaaacttgaattgaattgaagctctgttccttcaagtgacgacaatctcgagggtcaccgaagatctcgggtcgtcacccccgggaagtaattccggaccggtacctggaggcgtaacagctttccctatagtgagtcgtattagagcttggcgtaatcatggtcatagctgtttcctgtgtgaaattgttatccgctcacaattccacacagcaaaagaaccggaagcataaagtgtaaaaccccggggtgcccaaggagtgagctaactcacattaaattgcgttcgcctaatggcccgctttccaatcggggaaaccggtcgtggcaacgtggataa

SEQ ID NO: 4402 - DNA, 479 bp, Glycine max
  unsure at all n locations
  Clone ID: LIB3028-021-Q1-B1-A10
cgggggctncgaatgaatcatgtggccgacagaagagcaatgacgtcgcatccacgcgtacgtaaactcggaattcggctcgagagtcggtcggtcagcctactaatctctccttttcttcttcttctctacagtaatttagtttgtggagaatacataattagctgtttagatgatgttggtcccttgtgtagttagttagctatgtgtttgctgtaatggtaaatgtcaggatttcttttaaacatcttcatatgtatttgccaatatcataatgtgtcgtataacatcataccttggtttaagcagcatgttgacgaaaccttcactaaattttaattttgggtttagtttattttatacattaagtggacaatgcagccgaaaaaaaaacatcgttcaaccaacaaaaaaaagggcgggcgccgactaatgagctcgtcgacccgggaaataatttcggaccggtacctgcaggc

SEQ ID NO: 4403 - DNA, 489 bp, Glycine max
  Clone ID: LIB3028-021-Q1-B1-A11
ggcctggctcccttcgaatgattacttgcctgcgtatagataagcactgcacgtccgcccgtacgtaaactcagatatcgcatgaaagatcatgtggtcagcctgccagcctcacgcctattcttccgtcatcaacgccgcgttgctggcgtttttccataagctccgcacccctgacgagcatcatagtcatcgtgcgctcatgtcataggtggctatatgcggtagggctatatgtctagcatgcgtttcccccatgcttaactccctcgttggctctcctgttctgtgtctgccgcttaccggatatgtgtcagcctttctctcttcgggaagcgtggtgctttctcatagcgcacgctgtatgtatcacacttcggtgtaagtcgttcgctccaagctgggctgtgtgcacgaaccccccgttcaggccgaccgctgcgccttatcccgttaacatcggcttgagtccaaccggttagtaacggc

SEQ ID NO: 4404 - DNA, 482 bp, Glycine max
  unsure at all n locations
  Clone ID: LIB3028-021-Q1-B1-A12
cggtntnttcgaatgaatcatgtggccgacagaagagctatgacgtcgcacgcacgcgtacgtaaactcgggtcttcatgggagaaaataatactgttgatgggtgtctggtcagagacatcaagaaataacgccggaacattagtgcaggcagcttccacagcaatggcatcctggtcatccagcggatagttaatgatcagcccactgacccgttgcgcgagaagattgtgcaccgccgctttacaggcttcgacgccgcttcgttctaccatcgacaccaccacgctggcacccagttgatcggcgcgagatttaatcgccgcgacaatttgcgacggcgcgtgcagggccagactggaggtggcaacgccaatcagcaacgactgtttgcccgccagttgttgtgccacgcggttgggaatgtaattcagctccgccatcgccgcttccactttttcccgcgttttcgcaganacgtn

SEQ ID NO: 4405 - DNA, 466 bp, Glycine max
  Clone ID: LIB3028-021-Q1-B1-A7
attgaatcacgtggcatatagaagacaatgacgtcgcacgcacgcgtacgtaagctcggaattcagctccgccatcgccgcttccactttttcccgcgttttcgcagaaacgtggctggcctggttcaccacgcgggaaacggtctgataagagacaccggcatactctgcgacatcgtataacgttactggtttcacattcaccaccctgaattgactctcttccgggcgctatcatgccataccgcgaaaggttttgcgccattcgatggtgtcaacgtaaatgccgcttcgccttcgcgcgcgaattgcaagctctgcattaatgaatcggccaacgcgcggggagaggcggtttgcgtattgggcgctcttccgcttcctcgctcactgactcgctgcgctcggtcgttcggctgcggcgagcggtatcagctcactcaaaggcggtaatacggttatccac

SEQ ID NO: 4406 - DNA, 464 bp, Glycine max
  unsure at all n locations
  Clone ID: LIB3028-021-Q1-B1-A9
ctacgtcagcctacanaagactatgacgtcggacgcacgcgtacgtaaactcggaatttgattgcgagtgagatatttatgccagccagccagacgcagacgcgccgagacagaacttaatgggcccgctaacagcgcgatttgctggtgacccaatgcgaccagatgctccacgcccagtcgcgtaccgtcttcatgggagaaaataatactgttgatgggtgtctggtcagagacatcaagaaataacgccggaacattagtgcaggcagcttccacagcaatggcatcctggtcatccagcggatagttaatgatcagcccactgacccgttgcgcgagaagattgtgcaccgccgctttacaggcttcgacgccgcttcgttctaccatcgacaccaccacgctggcacccagttgatctgcgcgagatttaatcgccgcgacaatttgcgacggcgcgt

SEQ ID NO: 4407 - DNA, 469 bp, Glycine max
  unsure at all n locations
  Clone ID: LIB3028-021-Q1-B1-B11
ngaatttaatcgggccgacagaagagcactgacgtcgcatccacgcgtacgtaaactcggaattcggctcgaggcccaattgtaaatgactatgtaccatatcaaccaacacaagctgcaattttaagggaaaatgcagcgacctgtggttactgcagctgaagctgctatagttgattgtgtcgtttggatgatgattgctccctacaaatattctaatattttttactttctaaaacaaaatggattgaacaaaagggcggccgccgactagtgagctcgtcgacccgggaattaattccggaccggtacctgcaggcgtaccagctttccctatagtgagtcgtattagagcttggcgtaatcatggtcatagctgtttcctgtgtgaaattgttatccgctcacaattccacacaacatacgagccggaagcataaagtgtaaagccttgggtgcctaaagaatt

SEQ ID NO: 4408 - DNA, 484 bp, Glycine max
  Clone ID: LIB3028-021-Q1-B1-C4
ggggggctccgaatgaattacgtggcctagcgaagagcactgaagtcggacgcacgcgtacgtaaactcggctctcttccgggcgctatcatgccataccgcgaaaggttttgcgccattcgatggtgtcaacgtaaatgccgcttcgccttcgcgcgcgaattgcaagctctgcattaatgaatcggccaacgcgcggggagaggcggtttgcgtattgggcgctcttccgcttcctcgctcactgactcgctgcgctcggtcgttcggctgcggcgagcggtatcagctcactcaaaggcggtaatacggttatccacagaatcaggggataacgcaggaaagaacatgtgagcaaaaggccagcaaaaggccaggaaccgtaaaaaggccgcgttgctggcgtttttccataggctccgcccccctgacgagcatcacaaaaatcgacgctcaagtccgaaggtggcaaaacccgacagga

SEQ ID NO: 4409 - DNA, 484 bp, Glycine max
  Clone ID: LIB3028-021-Q1-B1-C8
cgggggcccttcccgaatgaatcacgtggcatatagaagacagtgacgtcggacgcacgcgtacgtaaactcggaatgatcagcccactgacccgttgcgcgagaagattgtgcaccgccgctttacaggcttcgacgccgcttcgttctaccatcgacaccaccacgctggcacccagttgatcggcgcgagatttaatcgccgcgacaatttgcgacggcgcgtgcagggccagactggaggtggcaacgccaatcagcaacgactgtttgcccgccagttgttgtgccacgcggttgggaatgtaattcagctccgccatcgccgcttccactttttcccgcgttttcgcagaaacgtggctggcctggttcaccacgcgggaaacggtctgataagagacaccggcatactctgcgacatcgtataacgttactggtttcacattcaacaacctgaaatgactctcctccgggcgccatg

SEQ ID NO: 4410 - DNA, 488 bp, Glycine max
  unsure at all n locations
  Clone ID: LIB3028-021-Q1-B1-D2
gtgcgcggcgcncccgaatgaatcagttgccagcgaagagctagtgagtcgcgcgcacgcgtacgtaaactcggaattgactctcttccgggcgctatcatgccataccgcgaaaggttttgcgccattcgatggtgtcaacgtaaatgccgcttcgccttcgcgcgcgaattgcaagctctgcattaatgaatcggccaacgcgcggggagaggcggtttgcgtattgggcgctcttccgcttcctcgctcactgactcgctgcgctcggtcgttcggctgcggcgagcggtatcagctcactcaaaggcggtaatacggttatccacagaatcaggggataacgcacgaaagaacatgtgagcaagaggccattataaggccaggaaccgtaaaaaggccgcgttgctggcggttttccataggctccgcgcccctggagagcatcatagaaatcgaaggtgcaagttagaggtggggaaacgccg

SEQ ID NO: 4411 - DNA, 472 bp, Glycine max
  unsure at all n locations
  Clone ID: LIB3028-021-Q1-B1-D5
tgaatgaatcacgtgacatatagaagagcaatgacgtcggacgcacgcgtacgtaagctcggtgactctcttccgggcgctatcatgccataccgcgaaaggttttgcgccattcgatggtgtcaacgtaaatgccgcttcgccttcgcgcgcgaattgcaagctctgcattaatgaatcggccaacgcgcggggagaggcggtttgcgtattgggcgctcttccgcttcctcgctcactgactcgctgcgctcggtcgttcggctgcggcgagcggtatcagctcactcaaaggcggtaatacggttatccacagaatcaggggataacgcaggaaagaacatgtgagcaaaaggccagcaaaaggccaagaaccgtaaaaaggccgcgttgctggcgtttttccataggctccgcncccctgacgagcatcacaanaatcgacgctcaagtcanaaggttgcaaacccaa

SEQ ID NO: 4412 - DNA, 486 bp, Glycine max
  Clone ID: LIB3028-021-Q1-B1-G1
gggggcgtgcgaatgaatcaggtagcatagcgaagacaatgaagtcggacgcacgcgtacgtaaactcggaatgggcccgctaacagcgcgatttgctggtgacccaatgcgaccagatgctccacgcccagtcgcgtaccgtcttcatgggagaaaataatactgttgatgggtgtctggtcagagacatcaagaaataacgccggaacattagtgcaggcagcttccacagcaatggcatcctggtcatccagcggatagttaatgatcagcccactgacccgttgcgcgagaagattgtgcaccgccgctttacaggcttcgacgccgcttcgttctaccatcgacaccaccacgctggcacccagttgatcggcgcgagatttaatcgccgcgacaatttgcgacggcgcgtgcagggccagactggaggtggcaacgccaatcagcaacgaatgttttgccggcaattggtggtccactcg

SEQ ID NO: 4413 - DNA, 470 bp, Glycine max
  Clone ID: LIB3028-021-Q1-B1-H2
tgaattgaatcgcgtagcgaagacagtgaattcggatccaggcgtacgtaaactcgaaatgccgcttcgccttcgcgcgcgaattgcaagctctgcattaatgaatcggtcaacgcgcggggagaggcggtttgcgtattgggcgctcttccgcttcctcgctcactgactcgctgcgctcggtcgttcggctgcggcgagcggtatcagctcactcaaaggcggtaatacggttatccacagaatcaggggataacgcaggaaagaacatgtgagcaataggccagcaaaaggccaggaaccgtaaaaaggccgcgttgctggcgtttttccataggctccgcccccctgacgagcatcacaaaaatcgacgctcaagtcataggtggcgaaacccgacaggactataaagataccaggcgtttccccctggaagctccctcgttcgctctcctggttcgaaccctgcg

SEQ ID NO: 4414 - DNA, 656 bp, Glycine max
  unsure at all n locations
  Clone ID: LIB3028-022-Q1-B1-A1
tatgtttggtgctttctttttctttacagtttgtgttgttggttactatggtggatgtgttttctgtggttgttgttttttttttcgaatcagtttgtagccgatanaagaaaaatnngtgnggtccnngtgtangtgaactcggnnttcgggtcgagttgttttgttggtttttttgtttttttttcttgagtttttgtttctatttctcgtggtagtggntttgtttttgaatntgaatatatgagatggtcnncttnncnnttgcttgcnantctttntatctctttattttcaatgttaaatatgttaaatttgctggtggtgagtctagtttcancttctgtttgtgaagcnnttaggttgtgtgtgtttgtggatgtgttgtgtggtgtgaatgtgtgtgtnnctttttgtgtttttgattggttgggttagcgngattgatttagtaggggctcntaattgggtgtagtgtggtggtacgatgttggagtgttgtgatgtttgtgagtggngtgaggatgtgtatggagggtttgtgtgtgattaatgaaaaaggttgtgatngctnctgtagtttgggtgtatggttgatttggnntctnntntgnntntggtgntgtnttgggnntnggagggggtgggtgtgattc

SEQ ID NO: 4415 - DNA, 484 bp, Glycine max
  Clone ID: LIB3028-022-Q1-B1-A10
cgggactgtgaatgaatcagtcggatgcacaagactatgaagtcgcatccgcccgtacgtaaactcagaatcaggggataacgcaggaaagaacatgtgagcaaaaggccagcaaaaggccaggaaccgtaaaaaggccgcgttgctggcgtttttccataggctccgcccccctgacgagcatcacaaaaatcgacgctcaagtcagaggtggcgaaacccgacaggactataaagataccaggcgtttccccctggaagctccctcgtgcgctctcctgttccgaccctgccgcttaccggatacctgtccgcctttctcccttcgggaagcgtggcgctttctcatagctcacgctgtaggtatctcagttcggtgtaggtcgttcgctccaagctgggctgtgtgcacgaaccccccgttcagcccgaccgctgcgccttatccggtaactatcgtcttgagtccaacccggtaagacag

SEQ ID NO: 4416 - DNA, 484 bp, Glycine max
  unsure at all n locations
  Clone ID: LIB3028-022-Q1-B1-A12
gggctatcagaatgaatcactgtgcctgccgaagacagtgaagtcgcatgcacgcgtacgtaagcttggatcctctagagcggacgccgactagtgagctcgtcgacccgggaattccggaccggtacctgcaggcgtaccagctttccctatagtgagtcgtattagagcttggcgtaatcatggtcatagctgtttcctgtgtgaaattgttatccgctcacaattccacacaacatacgagccggaagcataaagtgtaaagcctggggtgcctaatgagtgagctaactcacattaattgcgttgcgctcactgcccgctttccagtcgggaaacctgtcgtgccagctgcattaatgaatcggccaacgcgcggggagaggcggtttgcgtattgggcgccagggtggtttttcttttcaccagtgagacgggcaacagctgattgcccttcaccgcctggccctgagagagttgcacn

SEQ ID NO: 4417 - DNA, 506 bp, Glycine max
  unsure at all n locations
  Clone ID: LIB3028-022-Q1-B1-A3
ttgaattgcgtggcatatagaagagaatcacatgcaaacgtacgtagactcggaatttgattgcgagtgagatatttatgccagccagccagacggggacgggcgagacagaactggatgggcccggtaacagcgcgggttgctggggtggcagtgcgaccagaggctgcacgcccagtcgcgtaccgtcttcatgggagagaataatgcggtgggtgggtgtctggtcagggagggggtgagggaacagcgtggggggtggtgggggcgggggtggaggcggatggcatgggggggagcgggggggtggttgaggatgagggcgactggtggcggggggccgagaagattggtggggggccgcgtttaggtggcggngaggcggnggtcggggggagggggcggggggcgaggagaggtgggagccgactgtggtcgggggcnaggaggttagggctgcntnatganntcgtgnagcntgggcttngaggggggagggggggggg

SEQ ID NO: 4418 - DNA, 366 bp, Glycine max
  unsure at all n locations
  Clone ID: LIB3028-022-Q1-B1-A4
tagtgcagcaaacatgattggtcgagtatagatcgattggtcaggttggtaataagagaattgaaggggagggtagattgcggggggaaaggtagggggaattgggggtgggaataggatgtaattcgtctggacaattgaggaaattgaagggggggtctggatattggtgggagtgaggggatggggtaggggggggggggggggactgagggaggggggaggggaagtggggggggcatgggggggggggggagaggggggtgggggagggggtggagggggggggggggggggaggggggggggggttcaggggggggcggggtgggngntcngtagggtgnngggtngggggggggggggg

SEQ ID NO: 4419 - DNA, 486 bp, Glycine max
  unsure at all n locations
  Clone ID: LIB3028-022-Q1-B1-B12
ggtcttcagaatgaatcangtggcttgccgaagacactgaagtcggacgcacgcgtacgtaaactcggaatcaggggataacgcaggaaagaacatgtgagcaaaaggccagcaaaaggccaggaaccgtaaaaaggccgcgttgctggcgtttttccataggctccgcccccctgacgagcatcacaaaaatcgacgctcaagtcagaggtggcgaaacccgacaggactataaagataccaggcgtttccccctggaagctccctcgtgcgctctcctgttccgaccctgccgcttaccggatacctgtccgcctttctcccttcgggaagcgtggcgctttctcatagctcacgctgtaggtatctcagttcggtgtaggtcgttcgctccaagctgggctgtgtgcacgaaccccccgttcagcccgaccgctgcgccttatccggtaactatcgtcttgagtccaaaccggtaagaaaaca

SEQ ID NO: 4420 - DNA, 484 bp, Glycine max
  unsure at all n locations
  Clone ID: LIB3028-022-Q1-B1-B8
gattgaattgcctggcatatataagacactgacgtcggacgcacgcgtacgtaaactcggatcatgccatacggcgaaaggttttgcgccattcgatggtgtcaacgtaaatgccgcttcgccttcgcgcgcgaattgcaagctctgcagtgagggaatcggccaacgcgcggggagaggcggtttgcgtattgggcgctcttccgcttcctcgcgcagggactcgctgcgctcggtcggtcggctgcggcgagcgggaggagctgactggaggggggtggtacggttatccagagaatcaggggaggacgcaggagagaagatggtgagcgaggggccagcaaaaggccaggaagcgtaaaaaggccgcgtggctggggtgtttcgataggggccgcccccctgacgagcaggacaaaaatggacggggatggtcgaggggggnaaaagcggaggcgagtggggagagggaagggggttgccc

SEQ ID NO: 4421 - DNA, 501 bp, Glycine max
  unsure at all n locations
  Clone ID: LIB3028-022-Q1-B1-C2
ttaggtggcnagcnaaaaaaccaaatgggtccgtgcntnntaaactcaaactcctctctccctttgggtcaccagttttggtcaattgttttggtgtagaggtaaataatgggtggaggagtatagtnaagtatatgggcttatgggaggatgcntactaatagtcggggacatttcatatgcatattaaatggagttcagattgttgaggagggatttgggagttaaggagaggggtnaggtaangggtggggggcggagnggggagggggggtggtgtttatcagggaggggggggagaggagggtatgatgggaagaggggnnttgaggggagggggggggtgggaggggagggggaggtgaaggggtggggggagggggagaggggggggtaggagggggggttgggggggagggaggntntnctgtggaagggggnagggggnnggggnagccnnnaggagtgggatgtttgggtncnagggggggggaggagggg

SEQ ID NO: 4422 - DNA, 478 bp, Glycine max
  unsure at all n locations
  Clone ID: LIB3028-022-Q1-B1-D2
gaattaagtagcctagccaanacaatgaagtcggatcaaagcttacttaaactcagaattcggctcaagcaagtggtttgtataggaactctaccttcgctgatgcattcgagcgaaaggccgagattggtgctatacatgtgaaacttgggtccgaaaaccccaagaaaggttcgaactgtatatggggttttaaggatcaaagtttggagaggtgctaaagaaagaancaggaaggaggctttgtcgagaaagggggatgagtgaggggaaaggagcagtatttttgaggagaagagagagggagaagaagtacgcggaggtttagagcggcaaaatgatcaattttaggagattgaatcgaaagggagaggaaagggagcaggtcaggaggagagtagtgggaagggtagtggtggaagcggtaggagtagagaacggttcgaatgggacgaggggactgggggggggaaggggg

SEQ ID NO: 4423 - DNA, 502 bp, Glycine max
  unsure at all n locations
  Clone ID: LIB3028-022-Q1-B1-E1
aatgaattacgtagcctagccaagacaatgaagtcgcatccacgcgtacgtaaactcggaattcggctcgaggatcgacataagcacatttatcaaagaccaatgctagcttgtcgagcaattgaaagttataaaaggaacccaacttgtcaggtgagccgtgnaaggttccctgggaattgttaaacctgaactttaactacagggtgggatccgaagagggatttcaaacatctaaggaaggtggtactggaaccaagaagggggaagaggggaggggggaaaagtagacaaattaaaaaaggttttggggggagcacgaaaaagggcaacatatgtgtggcaaaagttcttagaaatcggaagattattgggagagaggggagaggaggggccgaggaagagaaagttggtgtgtagggaaaaggagcgagagaagggagataggggtcgaggcagcnngggaaaaagagcaantgggnttaggaaaggaacgagaagg

SEQ ID NO: 4424 - DNA, 486 bp, Glycine max
  unsure at all n locations
  Clone ID: LIB3028-022-Q1-B1-E2
ttacgctgcctagccaanacactgacatcgcgtccactcctacgttcactcggaattcggctcgagctctacggaatccacatttttattatatcctttatccgtcatccctatcttcgtccggtatcgctattactccttatccttccgtcgcctttcatttctgcccgtgcttttttttctttcagtattcgtctagtcattgctccgcggcctcgctgtgcatccagttcgccgctgtgtctcttgccaccgctgagctcgctgccccccggcancgtttntcgcgtcccctgttgtcgcctctccgcccccgcgcctcctcgcccctaccctcttctgcctctcgttcatcagtgtgtcgcgtgtcctctctgccgccccgtnccctcctcctgcccctcctttccctatttttccggccggcctcgcctgtcgccntcntttccggcgctcgtcttcctttcncggccctgcccgcccttg

SEQ ID NO: 4425 - DNA, 578 bp, Glycine max
  unsure at all n locations
  Clone ID: LIB3028-022-Q1-B1-G2
ggaattgaatcgccgtggccaatactactgaacctgggtcngaccctcntttaactccagatttcggctcgaaatattgtccttcaactttccgttcatcttttccaagtctttagttcttctcacatcacggccgtgtntctcttcttcgactctcccttccaangatatgcaattcatatcatcagcatgcctttatcttctaaatctcatcccgtttcgattatagccattcgaggtgcgtctgtgtaatatctcaatgtatggttgcgacagcttaaaatcgtgatggtgatggaaagagtccgcgcggatgtacagtatccactgagcctggataaagtgacgntgggatgcattgctgatagttggagaatcatctagtgttcccgggagcttctttcatagcatgagagtctcggcgagaatgcgagggaggcgcgagctgctgatggagtggtgcttatgcgaagggctttgcctgtcggctgtttaacagactgttcagnncgtcggcttgaggccacnttcacgcctgagggtccgnnccgagggtnacggggggaaggtcgtggttg

SEQ ID NO: 4426 - DNA, 479 bp, Glycine max
  unsure at all n locations
  Clone ID: LIB3028-022-Q1-B1-G3
aatgactgagttgccagcnaanacactgtagtcngatccacgcgtacgtaaactcaggtttcacattcaccaccctgaattgactctcttccgggcgctatcatgccataccgcgaaaggttttgcgccagtcgatggtgtcaacgtaaaggccgcttcgccttcgcgggccaattgcaagctctgcattaatgaatcggccaacgcgcggcgagaggcggtttgcgtattgggggctggtcggcttcgtcgctcagtggagcagtgcggtggggcggtcggctgcggcgagcggtatcagcgcagtcagaggctgtgagagagttatcgtgaggatcaggggataacgcaggaaagaacatgtgagcaaggggccggcggaatgcgggtgggcgtaaaaagggcgggtggcggngcttgggggagaggcggcggtgggctgacnagatgtaggagtcgggancggagggtggaggtgg

SEQ ID NO: 4427 - DNA, 491 bp, Glycine max
  unsure at all n locations
  Clone ID: LIB3028-022-Q1-B1-G4
ggcacgcggaatgatgaatgcgtgcctatataatgaagtcgcatgcaggcgttacttaaactcagaattcggctcaagatttttgcaccttgagattttaaaaaacttgttaagatgttacagtcccagtcttacatgtataaaaggatctacttgtccacagtatccttcaattttgggtttgggcagtgtgtttctagtgaataaaaagagagaatgagagttatgatagttatgatatgaagaggagaaaagaaagggcggccgccgagtaatgagctcgtcgacccgggaattaattccggaccggtacctggaggcgtaccagctttccctatagtgagtcgtattagagcttggggtaatcatgggcataactgtttcctgtgtgaaaatggtatccgctcacaattccagacaacataaagagcggggacgatagagtggtaaagcttggggtggccaaatgagtgagccaaacccacagtaan

SEQ ID NO: 4428 - DNA, 485 bp, Glycine max
  unsure at all n locations
  Clone ID: LIB3028-022-Q1-B1-G7
tgaatgaatcgactggcatatagaagacactgacgtcggacgcacgcgtacgtaagctcgggaaaggttttgcgccattcgatggtgtcaacgtaaatgccgcttcgccttcgcgcgcgaattgcaagctctgcattaatgaatcggccaacgcgcggggagaggcggtttgcgtattgggcgctcttccgcttcctcgctcactgactcgctgcgctcggtcgttcggctgcggggagcggtgtcagctcactcaaaggcggtagtacggtgagccacagaatcaggggataacgcaggaaagagcatgtgagcagaaggccagcanaacgccaggaaccgtaaaaaggccgcgttgctggcgtttttcgagaggctgcgggcccctggatagcatcacaaaaatcgacgctcaagtcacgaggtgggggngcgcgaagggactgatatgatgcgaggcgttgtgcccgtggaagctccggggg

SEQ ID NO: 4429 - DNA, 505 bp, Glycine max
  unsure at all n locations
  Clone ID: LIB3028-022-Q1-B1-H2
cggccctccccgagatgaacttgagctgacgtcgccctcagcaatnctataagatccncgccttccttaaattcacactctgttccagcgcaagcgtttctaaaaaactcacctgtaaaatttggttcccctttcgttggacactttgagggcacaatggcgagggaagtagaagaagttcatcgacaggaagaactctgccacttttcaactcatcgctcccgacaactccgaagcgtctttctcccaatccgagcgtggtctgcgntccgcgtccacgagaaaccccttttccttcccgttgccgatgactccgcgtttgatgacagcccccacgactaggactacgaccacgagcgccgagttaaccgtggtccctttcccgaagaccttaggagggagattctggagctagggtttccggaatatggcgaggactacttgaagcaccttgggggagtcaagaacatggcgcccgtgccgggtttcgaacaaaaccccaaan

SEQ ID NO: 4430 - DNA, 482 bp, Glycine max
  unsure at all n locations
  Clone ID: LIB3028-023-Q1-B1-A12
gggncacctgcgaatgtatcaggccgcctatagaaaacaatgacgtcgcatgcacgcgtacgtaaactcggaattcggctcgagaaaaaaaaaaaaaaaacaaaaagaaaaaaaaaaaaaaaaaacaaaagataaataaaaaacaaagatagggcggccgccgactactcaactcgtcgacccgggaattaattccggaccggtacctgcaggcagtacaaactttccctataatgaatcttattaatccttggcgtaatcaggggcaaatctgtttccagtgtgaaattgttatccgctcacaattccacataacataccagccggaagcataaagtgtaaagcctggggtgcctaatgattgatctaactcacattaattgcgttgcgcgcactgcacgctttccagtcgggaaacctgtcgtgccaattgcattaatgaatccgccaaggcgcaggtataagcggtttgcatattggac

SEQ ID NO: 4431 - DNA, 437 bp, Glycine max
  unsure at all n locations
  Clone ID: LIB3028-023-Q1-B1-B8
tgtatcangcggcgtataganaatagtgacgtcggacgcacgcgtacgtaaactcggaattaattccggaccggtacctgcaggcgtaccagctttccctatagtgagtcgtattagagcttggcgtaatcatggtcatagctgtttcctgtgtgaaattgttatccgctcacaattccacacaacatacgagccggaagcataaagtgtaaagcctggggtgcctaatgagtgagctaactcacattaattgcgttgcgctcactgcccgctttccagtcgggaaacctgtcgtgccagctgcattaatgaatcggccaacgcgcggggagaggcggtttgcgtattgggcgccagggtggtttttcttttcaccagtgagacgggcaacagctgattgcccttcaccgcctggccctgagagagttgcagcaagc

SEQ ID NO: 4432 - DNA, 467 bp, Glycine max
  unsure at all n locations
  Clone ID: LIB3028-023-Q1-B1-C10
nttatttagcagcatatagattncaatgacgtcccatgcacgcgtacgaaaactcggaattgcaagctctgcattaatgaatcggccaacgcgcggggagaggcggtttgcgtattgggcgctcttccgcttcctcgctcactgactcgctgcgctcggtcgttcggctgcggcgagcggtatcagctcactcaaaggcggtaatacggttatccacagaatcaggggataacgcaggaaagaacatgtgagcaaaaggccagcaaaaggccaggaaccgtaaaaaggccgcgttgctggcgtttttccataggctccgcccccctgacgagcatcacaaaaatcgacgctcatgtcagaggtggcgaaacccgacaggactataaagataccaggcgtttccccctggaagctcactcgtgcgctctcctgttccgaccctgccgcttaccggataactgtccgcg

SEQ ID NO: 4433 - DNA, 440 bp, Glycine max
  Clone ID: LIB3028-023-Q1-B1-C7
ttatcatgcggcatatagactagcactgacgtccgacgcacgcgtacgtaaactcggaatacggttatccacagaatcaggggataacgcaggaaagaacatgtgagcaaaaggccagcaaaaggccaggaaccgtaaaaaggccgcgttgctggcgtttttccataggctccgcccccctgacgagcatcacaaaaatcgacgctcaagtcagaggtggcgaaacccgacaggactataaagataccaggcgtttccccctggaagctccctcgtgcgctctcctgttccgaccctgccgcttaccggatacctgtccgcctttctcccttcgggaagcgtggcgctttctcatatctcacgctgtaagtatctcagttcggtgtaggtcgttcgctccaagctgggctgtgtgcacgaaccccccgttcagcccgacc

SEQ ID NO: 4434 - DNA, 466 bp, Glycine max
  Clone ID: LIB3028-023-Q1-B1-E9
gattattagcggcatatagataacactgacggcggacgcacgcgtacgataaactcggaattccgagcttggaattgcaagctctgcattaatgaatcggccaacgcgcggggagaggcggtttgcgtattgggcgctcttccgcttcctcgctcactgactcgctgcgctcggtcgttcggctgcggcgagcggtatcagctcactcaaaggcggtaatacggttatccacagaatcaggggataacgcaggaaagaacatgtgagcaaaaggccagcaaaaggccaggaaccgtaaaaaggccgcgttgctggcgtttttccataggctccgcccccctgacgagcattatttttatcgacgctcaagtcagaggtggcgaaacccgacaggactataaagataccaggcgtttccccctggaagctccctcgtgcgctctcctgttccgaccctggcgcttaa

SEQ ID NO: 4435 - DNA, 465 bp, Glycine max
  Clone ID: LIB3028-023-Q1-B1-F11
aattattagcggcctatagaaaccactgacggtccacgcacgcgtacataaactcggaattccgagcttgggttatccacagaatcaggggataacgcaggaaagaacatgtgagcaaaaggccagcaaaaggccaggaaccgtaaaaaggccgcgttgctggcgtttttccataggctccgcccccctgacgagcatcacaaaaatcgacgctcaagtcagaggtggcgaaacccgacaggactataaagataccaggcgtttccccctggaagctccctcgtgcgctctcctgttccgaccctggcgcttaacggataactgtccgcctttctcccttcgggaagcgtggcgctttctcatagctcacgctgtaagtatctcagttcggtgtaggtcgttcgctccaagctgggctgtgtgcaccaaacccccgttcagcccgaacgctgcgccctatccgtg

SEQ ID NO: 4436 - DNA, 454 bp, Glycine max
  Clone ID: LIB3028-023-Q1-B1-F5
ggggtgttgagaatttatcatgcggcatatagaaagctatgacgtccgacgcacgcgtacgtaaactcggaattgcaagctctgcattaatgaatcggccaacgcgcggggagaggcggtttgcgtattgggcgctcttccgcttcctcgctcactgactcgctgcgctcggtcgttcggctgcggcgagcggtatcagctcactcaaaggcggtaatacggttatccacagaatcaggggataacgcaggaaagaacatgtgagcaaaaggccagcaaaaggccaggaaccgtaaaaaggccgcgttgctggcgtttttccataggctccgcccccctgacgagcatcacaaaaatcgacgctcaagtcagaggtggcgaaacccgacaggactataaagataccaggcgtttccccctggaagctccctcgtgcgctctcctgttccgaccc

SEQ ID NO: 4437 - DNA, 443 bp, Glycine max
  Clone ID: LIB3028-023-Q1-B1-G2
agaaatcattttgcagacagaagagcacttacgtcgcgaccacgcgtacgtaaactcggcaggaaccgtaaaaaggccgcgttgctggcgtttttccataggctccgcccccctgacgagcatcacaaaaatcgacgctcaagtcagaggtggcgaaacccgacaggactataaagataccaggcgtttccccctggaagctccctcgtgcgctctcctgttccgaccctgccgcttaccggatacctgtccgcctttctcccttcgggaagcgtggcgctttctcatagctcacgctgtaggtatctcagttcggtgtaggtcgttcgctccaagctgggctgtgtgcacgaaccccccgttcagcccgaccgctgcgccttatccggtaactatcgtcttgagtccaacccggtaagacacgacttatcgccactgggagc

SEQ ID NO: 4438 - DNA, 486 bp, Glycine max
  unsure at all n locations
  Clone ID: LIB3028-024-Q1-B1-A2
cgggntgtgagaatgaatcattggtccgacagaagagcactgacgtcggatccacgcgtacgtaaactcggaattcagctccgccatcgccgcttccactttttcccgcgttttcgcagaaacgtggctggcctggttcaccacgcgggaaacggtctgataagagacaccggcatactctgcgacatcgtataacgttactggtttcacattcaccaccctgaattgactctcttccgggcgctatcatgccataccgcgaaaggttttgcgccattcgatggtgtcaacgtaaatgccgcttcgccttcgcgcgcgaattgcaagctctgcattaatgaatcggccaacgcgcggggagaggcggtttgcgtattgggcgctcttccgcttcctcgctcactgactcgctgcgctcggtcgttcggctgcggcgagcggtatcagctcactcaaaggcggtaataccggtatccacagaatcag

SEQ ID NO: 4439 - DNA, 475 bp, Glycine max
  Clone ID: LIB3028-024-Q1-B1-C12
tatgaatgccgtggcatataaaagatagtgacgtcggatgcacgcgtacgtaaactcggcgcttcgccttcgcgcgcgaattgcaagctctgcattaatgaatcggccaacgcgcggggagaggcggtttgcgtattgggcgctcttccgcttcctcgctcactgactcgctgcgctcggtcgttcggctgcggcgagcggtatcagctcactcaaaggcggtaatacggttatccacagaatcaggggataacgcaggaaagaacatgtgagcaaaaggccagcaaaaggccaggaaccgtaaaaaggccgcgttgctggcgtttttccataggctccgcccccctgacgagcatcacaaaaatcgacgctcaagtcagaggtggcgaaacccgacaggactataaagataccaggcgtttccccctggaagcctcctcgtgcgctctcctgttccgaccctgccgcttaccgg

SEQ ID NO: 4440 - DNA, 473 bp, Glycine max
  Clone ID: LIB3028-024-Q1-B1-C2
aatcagtatgactagcgatgacagtgaagtcgcgtccacgcgtacgtaaactcggaattcggctcgaggcaagtttctagggttcataactgcacaaagcagaaactgtccacatgaaacaactggttatgtattcctatggtgtgtgaccatgtctagtatttacaacctcatcttcccacttatcattgtaatttagtcattgtaagctcttcaactcctaagcatcacgttttccatacacaatgaggtttgagttttaacttctagacattaattaaggaggggggagtgactctttgtttttgcgattttcaaggcagaatttgaacaaataatactatttttgccttattttttttcacaaaaaaacggcggccgccgactagttagctcgtcgacccgggaattaattccggaccggtacctgcaggcgttccagccttccccataatgattccgtatagagcctg

SEQ ID NO: 4441 - DNA, 480 bp, Glycine max
  Clone ID: LIB3028-024-Q1-B1-C9
tttgatttgcgtggcgtataatagagcactgacctcggatgcacgcgtacgtaaactcggaattgcaagctctgcattaatgaatcggccaacgcgcggggagaggcggtttgcgtattgggcgctcttccgcttcctcgctcactgactcgctgcgctcggtcgttcggctgcggcgagcggtatcagctcactcaaaggcggtaatacggttatccacagaatcaggggataacgcaggaaagaacatgtgagcaaaatgccagcaaaaggccaggaaccgtaaaaaggccgcgttgctggcgtttttccataggctccgcccccctgacgagcatcacaaaaatcgacgctcaagtcagaggtggcgaaacccgacaggactatatagataccaggcgtttccccctggaagctccctcgttcgctctcctgttccgaacctgccgcttagcggatagctgttccgctttctccctg

SEQ ID NO: 4442 - DNA, 485 bp, Glycine max
  unsure at all n locations
  Clone ID: LIB3028-024-Q1-B1-E3
cgacactcagaatgaatcagtaggcgtagcgaagactatgnagtcgcgtccacgcgtacgtaaactcggaattcagctccgccatcgccgcttccactttttcccgcgttttcgcagaaacgtggctggcctggttcaccacgcgggaaacggtctgataagagacaccggcatactctgcgacatcgtataacgttactggtttcacattcaccaccctgaattgactctcttccgggcgctatcatgccataccgcgaaaggttttgcgccattcgatggtgtcaacgtatatgccgcttcgccttcgcgcgcgaattgcaagctctgcattaatgaatctgccaacgctcggggagatgcggtttgcgtattgggcgctcttccgcttccccgctcactgactcgctgcgctcggtcgttcagctgcggcgagccgtatcacctcactcacaggcggtaaaactgttatccacagaaacacg

SEQ ID NO: 4443 - DNA, 499 bp, Glycine max
  Clone ID: LIB3028-024-Q1-B1-E8
gaggggttgagaatgaatcaggttgcgtggcatatagtagagcactgacgtcggatgcacgcgtaagtaaactcggaattcccgggtcgggttgatataactatactgtctgtaattggcacgagctcattttcttattctgcatcacactgcatgactgcatccccttcccatatagtgtaacgaagtctaagttaattcctgttaagtctggatagtgaatagctagctattggcgttgctgcaccctattgtgcttattgatgccaatagtgttagtgttcgaggcattagttggtgacactttaacaaagctaaatgacgttgtaccgtaaaaaacaagtccagataggaagaatcaaaaaaagggctgttttttactactgagctcgtcgacccggggaattaattccgggaacggtacctgcaggcgttaccagctttccctatagtgagtcgtaataagagccttggggttaaccaggggccatacgggttt

SEQ ID NO: 4444 - DNA, 482 bp, Glycine max
  Clone ID: LIB3028-024-Q1-B1-E9
tatgaattgccgtggccctatagtaagagcaatgacgtcggatccacgcgtacgtaaactcggaattgactctcttccgggcgctatcatgccataccgcgaaaggttttgcgccattcgatggtgtcaacgtaaatgccgcttcgccttcgcgcgcgaattgcaagctctgcattaatgaatcggccaacgcgcggggagaggcggtttgcgtattgggcgctcttccgcttcctcgctcactgactcgctgcgctcggtcgttcggctgcggcgagcggtatcagctcactcaaaggcggtaatacggttatccacagaatcaggggataacgcaggaaagaacatgtgagcaaaaggccagcaaaaggccaagaaccgtaaaaaggccgcgttgctggcgtttttccataggctccgcccccctgacgagcatcacaaaaatcgacgctcaagtcagaggtggcgaaaaccgacaggac

SEQ ID NO: 4445 - DNA, 476 bp, Glycine max
  unsure at all n locations
  Clone ID: LIB3028-024-Q1-B1-F12
tttgaatgccgtggcatattanagatattgacctcggatgcacgcgtacgtaaactcggcgccattcgatggtgtcaacgtaaatgccgcttcgccttcgcgcgcgaattgcaagctctgcattaatgaatcggccaacgcgcggggagaggcggtttgcgtattgggcgctcttccgcttcctcgctcactgactcgctgcgctcggtcgttcggctgcggcgagcggtatcagctcactcaaaggcggtaatacggttatccacagaatcaggggataacgcaggaaagaacatgtgagcaaaaggccagcaaaaggccaggaaccgtaaaaaggccgcgttgctggcgtttttccataggctccgcccccctgacgagcatcacaaaaatcgacgctcaagtcagaggtggcgaaacccgacaggactataaagataccaggcgtttccccctggaagctccctcgtgcgctc

SEQ ID NO: 4446 - DNA, 539 bp, Glycine max
  unsure at all n locations
  Clone ID: LIB3028-024-Q1-B1-G2
cggagattggcgaatgatacgaatctgactgcactatactatgctatcacgtnaggcgtacgtacaatcgaaattcggctcgaggttacttttcacccctgatacggttctcgccgttcaaggtgacttctgctagtgtttacgatgcatcagaatcggcttgatgttgcagttccttgtgttcgggggggagtcttggcctgttgctgtggttgagccgcctggtccagtcccagcaattaccattgtacacggctgcgtttgcacgctccccgtggggatcctcccccctcagggctttcctgttcgtggcggtggggtggtccccgctgggactcttctgtgtgcgtcatgatccctggagtctatgggcgccgtttccatcagtttttttttttctcctctatccatgggggctgcccgctgggcccttaggactcccgttcctctctcgctggagctccttcaatgcgggttgaggccacacggagtgtttcacccggggaaattgacttcctccgacgttcggctccccattg

SEQ ID NO: 4447 - DNA, 483 bp, Glycine max
  unsure at all n locations
  Clone ID: LIB3028-024-Q1-B1-G3
tgatttggctgaccgacagtagnnctagttaggccngacccacgcgtaaatcaactcggcattcggctcaaggatgcaatcaatgtattcctgcggcattttcacccaaaccagggtaaagcctgacctagggaaattgggtacactttacctcaaagaggcaggagaacaggggcatgcaaatgctaggccattttacaaaagatccttctcaggtggaaacattcttaaggaaagttctacaccgatgtcagcccccaaggccaagcaggcagaattccccagccaaagggggtttcacagctacataataacagggcagcagggcactccgggacttcaccacccgagacgaccaactattgattagggcatcccattttcgaggggacacccccacaacgcccccgggaacacccccttgggaaatacccaaaggagaacccgcccctgaaaggcgacattaagtaaccggcccaaggg

SEQ ID NO: 4448 - DNA, 484 bp, Glycine max
  unsure at all n locations
  Clone ID: LIB3028-024-Q1-B1-G5
ggccacctttcatgaatgaatcagctggccctatagaagagcagtgacgtcgcatgcacgcgtacgtaaactcggaattcggctcgagatggcactttctcctattcgttcttcttctttctcttcatcagctattgttgcattggctggtgttactgcttcttaaagggacctcttaagctaacttctcaaggaacttcaattcaaggacatgtccaaacgttttcacaacggtaaaatcggtatttaaccggcggttgtcagagaacctcacattggggaaccaagtgtccgtctcttcttcaagagaggctttgtacagggctgtaatggctcaacaaaatttgaggacactacacctttccagggagagaaatgtgcatgtgctaacaacatttcagtgagaggttttgatgtatttgatgctatcatgtctgacgtcaagataatatgccctgttgtggcctcatgtgctgatatcttn

SEQ ID NO: 4449 - DNA, 497 bp, Glycine max
  unsure at all n locations
  Clone ID: LIB3028-024-Q1-B1-G7
tgggttgtgaagaattaattagctagactatagtagnacagtgacgtcncgtccacgtttaattgaattcggatccagcccaaggttcaaagaatggtgaacctggggatattcatttcaagtaagggaattctactctaatggaattggggtcacattaaatccaagatgcaagaaaaggatgggatcaccaagctaggtcacttttccaaagatttttttcagatggggacattcctaaggaaaattcttaaccgaagtcagtcccaaatggcaatcatgtaaaacacccaaaaccaatggggcctttcagatatttttataacgatgaaacattggaatctgttagtcatccccagaaatatctgctaatgcgagtgatgacccaattttaaggtagaacccctcaaatgcccctgggaaaactccttgtggataattccaggaaaacgctgcccttaaaattagcaaaagtttccagttcgggttagggggaa

SEQ ID NO: 4450 - DNA, 488 bp, Glycine max
  unsure at all n locations
  Clone ID: LIB3028-024-Q1-B1-H1
ggggtttgagaatgaatcagttgtctgacagaagacagtgacgtcgcatgcacgcgtacgtaaactcggaattcggctcgagaaaaatgaaaacccaaagtgcttctctcctctgtctttttctctctctttgcatcctttttggcaatgggaacggcggaaagtgaaattccaggaagcgcagtgccaagcnacaatgtttcaacattcaacagaaagccttttccnttcacatttctctttgggaatgggtcctctgcgtatcacacacaaagggcaacaaatgttaaatggaaaagggccaccatatgggagacctatactatacagcatactgaaaaaaattggggtattataaccagggggataggggcacctgttttttaaccaccaaacagggggtgaaaaaaaattgcgaaagaaattgggctggactcctttaaaatccccaacccaagggcaagaataatcccaaaaggggaggggaa

SEQ ID NO: 4451 - DNA, 488 bp, Glycine max
  Clone ID: LIB3028-024-Q1-B1-H7
gggtatcttgagaatgaattgcctgacctatagaagagctatgacgtcgcatgcacgcgtacgtaagctcggaattccggaccggtacctgcaggcgtaccagctttccctatagtgagtcgtattaaagcttggcgtaatcatggtcatagctgtttcctgtgtgaaattgttatccgctcacaattccacacaacatacgagccggaagcataaagtgttaagcctggggtggctaatgagtgagctaactcacattaattgcgttgcgctcactggccgctttccagtcgggaaacctgtcgtgccagctgcattaatgaatcggccaacgcgcggggaaaggcggtttgcgtattgggcgccagggtggtttttcttttcaccagtgagacgggcaacagctgattgcccttcaccgcctggccctgagagagttgcaacaagcggtccacgcttgttttgcccagcaagggaaaattcctgtt

SEQ ID NO: 4452 - DNA, 488 bp, Glycine max
  Clone ID: LIB3028-025-Q1-B1-A1
gtgtccctgcgaatgaattaatgagactatcaagactatgacgtcggatccacgcgtacgtaaactcggatcaggggataacgcaggaaagaacatgtgagcaaaaggccagcaaaaggccaggaaccgtaaaaaggccgcgttgctggcgtttttccataggctccgcccccctgacgagcatcacaaaaatcgacgctcaagtcagaggtggcgaaacccgacaggactataaagataccaggcgtttccccctggaagctccctcgtgcgctctcctgttccgaccctgccgcttaccggatacctgtccgcctttctcccttcgggaagcgtggcggctttctcatagctcacgctgtaggtatctcagttcggtgtaggtcgttcgctccaagctgggctgtgtgcacgaaccccccgttcagcccgaccgctgcgccttatccggtaactatccgccttagtcaaacccggtaagacacgag

SEQ ID NO: 4453 - DNA, 494 bp, Glycine max
  unsure at all n locations
  Clone ID: LIB3028-025-Q1-B1-B1
agggcngttgtgagatgaaatanagtcgtcgtagtccaagagcaatgaaatcgcatccacgcgtacgtaaactcggaattaattccggaccggtacctgcaggcgtaccagctttccctatagtgagtcgtattagagcttggcgtaatcatggtcatagctgtttcctgtgtgaaattgttatccgctcacaattccacacaacatacgagccggaagcataaagtgtaaagcctggggtgcctaatgagtgagctaactcacattaattgcgttgcgctcactgcccgctttccagtcgggaaaacctgtcgtgccagctgcattaatgaatcggccaacgcgcggggagaggcggtttgcgtattgggcgccaaggtgggtttttcttttcaccagtgagacgggcaacagctgattgcccttcaccgcctggccctgagagagttgcagcaagcggtccacgctggtttgccccagcaggcgaaaatccn

SEQ ID NO: 4454 - DNA, 493 bp, Glycine max
  unsure at all n locations
  Clone ID: LIB3028-025-Q1-B1-B4
tgcntctctgaatgaattangtagtctagcgaagactatgaagtcgcatccacgcgtacgtaagctcggaatccggcaccacgctgggataggctgtttgcgtattgagcgctcttccgcttcctcactcactgactcgctgcgctcagtcgttcagctgcagggagcggtatcagctcactcaaatgcggtaatacggttatccacagaatcaggggataacgcaggatagaacatgtgagcaaaaagccaggatttggccagtaaccgtttcaaggccgcgttgctggcgtttttccataagctccgcccccctgacgagtatcataattctcgacgctcaagtcagaggtggtgatacccgacaggactataaagataccaggcgtttctccctggaagctccctcgtgcgctctcctgttccgaacttgccgcttatcggatacctgtcagcctttctcccttcgggaagcgtggcactttctcatacc

SEQ ID NO: 4455 - DNA, 485 bp, Glycine max
  unsure at all n locations
  Clone ID: LIB3028-025-Q1-B1-C1
ggagctgggaatgaatcangtagactagcgaagactatgaaatcggatccacgcgtacgtaaactcggaatgcgaccagatgctccacgcccagtcgcgtaccgtcttcatgggagaaaataatactgttgatgggtgtctggtcagagacatcaagaaataacgccggaacattagtgcatgcagcttccacagcaatggcatcctggtcatccagcggatagttaatgatcagcccactgacccgttgcgcgagaagattgtgcaccgccgctttacaggcttcgacgccgcttcgttctaccatcgacaccaccacgctggcacccagttgatcggcgcgagatttaatcgccgcgacaatttgcgacggcgcgtgcagggccagactggaggtggcaacgccaatcagcaacgactgtttgcccgccagttgttgtgccacgcggttgggaatgtaattcagctccgccatcgccgcttca

SEQ ID NO: 4456 - DNA, 453 bp, Glycine max
  Clone ID: LIB3028-025-Q1-B1-C11
tggtttaagtgtcactagcgaagagatatgaagtcggacgcacgcgtacgtaagctcggaatggcatcctggtcatccagcggatagttaatgatcagcccactgacccgttgcgcgagaagattgtgcaccgccgctttacaggcttcgacgccgcttcgttctaccatcgacaccaccacgctgggacccagttgatcggtgcgagatttaatcgccgcgacaatttgcgacggcgcgtgcagggccagactggaggtggcaacgccaatcagcaacgactgtttgcccgcgagttgttgtgccacgcggttgggaatgtaattcagctccgccatcgccgcttccactttttcccgcgttttcgcagaaacgtggctggcctggttcaccacgcgggaaacggtctgataagtcacaccgggaatactcggccacatcgtataacgtgac

SEQ ID NO: 4457 - DNA, 446 bp, Glycine max
  Clone ID: LIB3028-025-Q1-B1-C12
ttcagtgtctagcgaagatactgacgtcgcacgcacgcgtacgtaagctcggaatcggacaacgcgcggggagaggcggtttgcgtattgggcgctcttccgcttcctcgctcactgactcgctgcgctcggtcgttcggctgcggcgagcggtatcagctcactcaaaggcggtaatacggttatccacataatcaggggatatcgcaggaaagaacatgtgagcaaaaggccagcagaaggccatgaaccgtaaaaaggccgcgttgctggcgtttttccataggctccgcccccctgacgagcatcacaaatatcgacgctcaagtcagaggtggcgaaacccgacaggactataaagataccaggcgtttccccctggaaactccctcgtgcgctctcctggtccgaaccctgcggcttaccggatacctgtccgcctttcg

SEQ ID NO: 4458 - DNA, 489 bp, Glycine max
  unsure at all n locations
  Clone ID: LIB3028-025-Q1-B1-C3
ggtgntgggaatgaattaggttgtctagccaagnacagtgaagtcgcgtccacgcgtacgtaagatcggaattcggctcgaggtatctacagtttctggtatttagtaattaaacaaagtggaagcacaacttgaatgataagcaagaaacaattttcggtacaaatcatggcaaaaatggctgccgccatacaagtgagctcgtcgacccgggaattaattccagacaggtacctgcaagcgtgacagctttccctaatatgagtcatattaaagcttggcgtaatcatggtcatagctgtatcctgtgtgaaattgttatccgctcacaattccacataacatacgaaccggaagcataaagtgtaaagcctgaggtgcctaatgactaagctaactcacattaattgcgttgcgctcacttgcccgctttcaagtcgggaaacctgtcatgccagctgcattaatgaatcggccaacgcacgggga

SEQ ID NO: 4459 - DNA, 495 bp, Glycine max
  unsure at all n locations
  Clone ID: LIB3028-025-Q1-B1-D4
cgggnctcagaatgaattaggtagtctagcgaagactatgaagtcgcatgcacgcgtacgtaagctcggaattcagctccgccatcgccgcttccactttttcccgcgttttcgcagaaacgtggctggcctggttcaccacgcgggaaacggtctgataagagacaccggcatactctgcgacatcgtataacgttactggtttcacattcaccaccctgaattgactctcttccgggcgctatcatgccataccgcgaaaggttttgcgccattcgatggtgtcaacgtaaatgccgcttcgccttcgcgcgcgaattgcaagctctgcattaatgaatcggccaacgcgcggggagaggcggtttgcgtattgggcgctcttccgcttcctcgctcactgactcgctgcgctcggtcgttcggctgcggcgagcggtatcagctcactcaaaggcggttaataccgttatccacagaatcaagggaaatacc

SEQ ID NO: 4460 - DNA, 445 bp, Glycine max
  Clone ID: LIB3028-025-Q1-B1-D9
gttaactgcatagccagatagtgtagtcgacgcgcccgtacgtaagctcagaattaggggataacgcaggaaagaacatgtgagcaaaaggccagcaaaaggccaggaaccgtaaaaaggccgcgttgctggcgtttttccataggctccgcccccctgacgagcatcacaaaaatcgacgctcaagtcagaggtggcgaaacccgacaggactataaagataccaggcgtttccccctggaagctccctcgtgcgctctcctgttccgaccctgccgcttaccggatacctgtccgcctttctcccttcgggaagcgtggcgctttctcatagctcacgctgtaggtatctcagttcggtgtaagtcgttcgctccaagctgggctgtgtgcacgaaacccccgtttaagccggaccgctgcgccttatccggtaactatcgtc

SEQ ID NO: 4461 - DNA, 468 bp, Glycine max
  unsure at all n locations
  Clone ID: LIB3028-025-Q1-B1-F11
gtggggnnttnnagaatgaatcaggtgtcgtagcgaagagatatgaagtcggacgcacgcgtacgtaagctcggaattccggaccggtacctgcaggcgtaccagctttccctatagtgagtcgtattagagcttggcgtaatcatggtcatagctgtttcctgtgtgaaattgttatccgctcacaattccacacaacatacgagccggaagcataaagtgtaaagcctggggtgcctaatgagtgagctaactcacattaattgcgttgcgctcactgcccgctttccagtcgggaaacctgtcgtgccagctgcattaatgaatcggccaacgcgcggggagaggcggtttgcgtattgggcgccagggtggtttttcttttcaccagtgagacgggcaacagctgattgcccttcaacggctggccctgaanaaagttgcagcaagcggtcaacgctggtttgc

SEQ ID NO: 4462 - DNA, 447 bp, Glycine max
  Clone ID: LIB3028-025-Q1-B1-G12
aatgtttagtgcatgcgaagacaatgacgtcggacgcacgcgtacgtaagctcggaattcgctcgagttgtaactttgtcttttgcttgcgaatctgaatcgaataataatcaatcaatcatcatgtcgtcggcgaagaagatcacactgaagagttcggacggcgaggctttcgaggtggacgaggcggtggcgctggagtctcagacgataaagcacatgatcgaggacgactgcgccgacagcggcatccctctgccgaacgtgacgagcaagatcctggcgaaggtgatcgagtactgcaagaagcacgtcgaggccgcgaatcccgaagacaaaccctccgaggacgatctcaaagcctgggacgccgatttcgtcaaggtcgaccaggccacgctcttcgatcttaacctggctggcaacctacttgaccatcaagagctg

SEQ ID NO: 4463 - DNA, 492 bp, Glycine max
  unsure at all n locations
  Clone ID: LIB3028-025-Q1-B1-G2
gggcgtcgagaatgaattaggtcgtctagccaagagcactgaaatcggatgcacgcgtacgtaaactcggaattcggctcgagaacagatcctcagaggcaccactgagtacatgcaccccatgaatcttagcaccattatggccatcgattccaggacttgatcaatgcctccttccttccttcgttttttcaatttctctcgcaagtcttcacaagacataattaagttgtagttggtcatattctatctatttgtgccccttaattaagtttatttcatcttctcatgatgatcccctagctagtgcatgtggtttgtgctgcaaagttatcatgtactggtttgcccctccaattgttattgctctcttggaagtaattttggtctgtcaccagcaataaaatgttttctggtccttaaacaangnaaaaaataaaaaggcggccggcgactaatgagctcgtcgacccgggaattaattcgggacgg

SEQ ID NO: 4464 - DNA, 326 bp, Glycine max
  unsure at all n locations
  Clone ID: LIB3028-025-Q1-B1-G9
ggggcttcgaatgaatcagtgcgagcgaagaaaagaagtcggacgcacgcgtacgtaagctcggaattaattcccggggtcgannnnnnnnnnnnnnnnnnnnnnnnnnnnnnnnnnnnnnnnnnnnnnnnnnnnnnnnnnnnnnnnnnnnnnnnnnnnnnnnnnnnnnnnngnnnnnnnnnnnnnnnnnnnnnnnnnnnnnnnnnnnnnnnnnnnnnnnnnnnnnnnnnnnnnnnnnnnnnnnnnnnnnnnnnnnnnnnnnnnnnnnnnnnnnnnnnnnnnnnnnnnnnnnnnnnnnnnnnnnnnnnnnnnnnnnnnnnnnnnng

SEQ ID NO: 4465 - DNA, 491 bp, Glycine max
  unsure at all n locations
  Clone ID: LIB3028-025-Q1-B1-H3
tggctctntgaatgaatcaagtagtctagcgaagagcactgaagtcgcgtccacgcgtacgtaagatcggaaaaaggccagcaaaaggccaggaaccgtaaaaaggccgcgttgctggcgtttttccataggctccgcccccctgacgagcatcacaaaaatcgacgctcaagtcagaggtggcgaaacccgacaggactataaagataccaggcgtttccccctggaagctccctcgtgcgctctcctgttccgaccctgccgcttaccggatacctgtccgcctttctcccttcgggaagcgtggcgctttctcatagctcacgctgtaggtatctcagttcggtgtaggtcgttcgctccaagctgggctgtgtgcacgaaccccccgttcagcccgaccgctgcgccttatccggtaactatcgtcttgagtccaacccggtaagacacgacttatcgccactggcagcagccactggtaacaggag

SEQ ID NO: 4466 - DNA, 475 bp, Glycine max
  Clone ID: LIB3028-025-Q1-B1-H7
atgaatcgcttgtctatagaagagaactgacgtcggatccacgcgtacgtaaactcgggccgactagtgagctcgtcgacccgggaattaattccggaccggtacctgcaggcgtaccagctttccctatagtgagtcgtattagagcttggcgtaatcatggtcatagctgtttcctgtgtgaaattgttatccgctcacaattccacacaacatacgagccggaagcataaagtgtaaagcctggggtgcctaatgagtgagctaactcacattaattgcgttgcgctcactgcccgctttccagtcgggaaacctgtcgtgccagctgcattaatgaatcggccaacgcgcggggagaggcggtttgcgtattgggcgccagggtggtttttcttttcaccagtgagacgggcaacagctgattgcccttcaccgcctggccctgagagagttgcagcaggcggtccacgcg

SEQ ID NO: 4467 - DNA, 484 bp, Glycine max
  Clone ID: LIB3028-026-Q1-B1-A1
tggaatgccgtggcacatataagactatgacgtcgcatgcacgcgtacgtaagctcggaattcggctcgagatatacacttgcaaatttgtgtggcttcataatcatcaggatagatctgaaccttcacttcaaatctatttccaagatcattatattacctgttttgcctaagttactggtgtaattactcctccttatataaactttatcatgtttgaattttaactccataaagaaaaggtcggccgccgactattgagctcgtcgacccgggaattaattccggatcggtacttgcatgcttaccagtcttctctataatgagtcctatcaaatgcctgtcgtattcatggtcaaagctgtgtcctgttgtgaaattgttatccgctcacaattccacacaacatacgagccggaaacaataaagtggtaaaacctggggtgcctaaatgaattgactaaacccaaattaattgcggttg

SEQ ID NO: 4468 - DNA, 478 bp, Glycine max
  Clone ID: LIB3028-026-Q1-B1-B4
ggattgaatgacgtggcactatagaagataatgacgtcggacgcacgcgtacgtaagctcggatttaatcgccgcgacaatttgcgacggcgcgtgcagggccagactggaggtggcaacgccaatcagcaacgactgtttgcccgccagttgttgtgccacgcggttgggaatgtaattcagctccgccatcgccgcttccactttttcccgcgttttcgcagaaacgtggctggcctggttcaccacgcgggaaacggtctgataagagacaccggcatactctgcgacatcgtataacgttactggtttcacattcaccaccctgaattgactctcttccgggcgctatcatgccataccgcgaaaggttttgcgccattcgatggtgtcaacgtaaatgccgcttcgccttcgcgcgcgaattgcaagctctgcattaatgaatcggccaacgcgccggggagaggcggtttgc

SEQ ID NO: 4469 - DNA, 469 bp, Glycine max
  unsure at all n locations
  Clone ID: LIB3028-026-Q1-B1-C10
gagcgcccgcgaatgaattactgtgccgacagaagacaataacgtcggatgcacgcgtacgtaaactcggaattcggctcgagagaaaatgcctcgagccaaagttcgagtaccaggcgctacagcgctgaagtaatccatgccatactcccaggaaaagctcgaacgaccttcaacaaatgggtacctgtacccgaaaccgacacaggtgggtaggtagagaatacctagaggcgcgagacaactctctctaaggaactcggcaaaatagccccgtaacttcgggagaaggggtgcctcctcaaaaaaaaaaaaaaaagggcggccgccgactagtgagctcgtcgacccgggaattaattccggaccggtacctgcaggcgtaccagctttccctatagtgagtcgtattagagcttggcgtaatcatggtcatagctgtttcctgtgtgaaattgttaaccgcccn

SEQ ID NO: 4470 - DNA, 491 bp, Glycine max
  Clone ID: LIB3028-026-Q1-B1-F7
cggatccatatgaatgaatcaggtggcatagcgaagagaaatgacgtcggatgcacgcgtacgtaagctcggaattgcaagctctgcattaatgaatcggccaacgcgcggggagaggcggtttgcgtattgggcgctcttccgcttcctcgctcactgactcgctgcgctcggtcgttcggctgcggcgagcggtatcagctcactcaaaggcggtaatacggttatccacagaatcaggggataacgcaggaaagaacatgtgagcaaaaggccagcaaaaggccaagaaccgtaaaaaggccgcgttgctggcgtttttccataggctccgcccccctgacgagcatcacaaaaatcgacgctcaagtcagaggtggcgaaacccgacaggactataaagataccaggcgtttccccctggaagctccctcgtgcgctctcctgttccgaccctgccgcttaaacggatactgtccgcctttctccct

SEQ ID NO: 4471 - DNA, 483 bp, Glycine max
  Clone ID: LIB3028-026-Q1-B1-H6
tcgattgagtgacgtgtcgaagacatatgaagtcgcatgcacgcgtacgtaagctcgaggccgactagtgagctcgtcgacccgggaattaattccggaccggtacctgcaggcgtaccagctttccctatagtgagtcgtattagagcttggcgtaatcatggtcatagctgtttcctgtgtgaaattgttatccgctcacaattccacacaacatacgagccggaagcataaagtgtaaagcctggggtgcctaatgagtgagctaactcacattaattgcgttgcgctcactgcccgctttccagtcgggaaacctgtcgtgccagctgcattaatgaatcggccaacgcgcggggagaggcggtttgcgtattgggcgccagggtggtttttcttttcaccagtgagacgggcaacagctgattgcccttcaacggcctggccctgaaaaaatttgcagcaagcggtccacgctggttt

SEQ ID NO: 4472 - DNA, 455 bp, Glycine max
  unsure at all n locations
  Clone ID: LIB3028-027-Q1-B1-A9
ttcgcgctgcaaaggcgcnanaaaanataatggcctcggacgcacgcgtacgtaagctcggaatgccgcttcgccttcgcgcgcgaattgcaagctctgcattaatgaatcggccaacgcgcggggagaggcggtttgcgtattgggcgctcttccgcttcctcgctcactgactcgctgcgctcggtcgttcggctgcggcgagcggtatcagctcactcaaaggcggtaatacggttatccacagaatcaggggataacgcatgaaagaacatgtgagcaaaaggccagcatcaggccaggaaccgtactcaagccgcgttgctggcgtttttccataggctccgcccccctgatcagcatcacaaaaatcgacgctcaagtcagaggtggcgatacccgacaggactatatcgattccagcggttttccccctggaagctccttcgtgggct

SEQ ID NO: 4473 - DNA, 452 bp, Glycine max
  Clone ID: LIB3028-027-Q1-B1-C10
cgatagaatggcgtgacactatataggagatatgagctcgcactgcacgcgtacgtaagctcggaattcggctcgagatcttcactcagaccaaccttctctgagaaggtggacaccaccccattcgggactgtagttgagaatttctatatgactgatgccattacaagggcatcaaagataatggcacaatgcactgccatgctgttgaagaagtgaaacatggattttttattttttggtttcaataaagaagattcacgtttttcccttcctggccatgcaagattgcttgccaaaaacttattggatgttggaagtatccaatacattaaaactaggatttatctgttccatttgtacaaaatcaataaaagggcggccgccgactaatgagctcgtcgacccgggaattaactcccgaacgggttcctcaggcgtacaacctttcc

SEQ ID NO: 4474 - DNA, 461 bp, Glycine max
  Clone ID: LIB3028-027-Q1-B1-C12
gatgctctgactgacgtggcactatagtacggatatatgacctcgcactgcacgcgtacgtaagctcggaattcagctcgagctccaccgcatccagctcttcgcgagttttcgcagaggcatggctggcctggtacactacaccggataccgtctgactagagacattagtcttctctgctagttcactagagcttaatggtttcatatgcagtagactcagttgactctcttccggttcctatcattgcatactcccaaaggttctgtctccatttagtcctctcaacgtacctgcagcgtcatcatcccgcgtcgaattgcaagcactgcataactgaagccgccaactctcgtcgataggcggtccacgtaaaaggtgcacggttgcactgacgctctttaactcggctctcacgtctctttctggctctgagaaccggtatatgggccactcacag

SEQ ID NO: 4475 - DNA, 454 bp, Glycine max
  Clone ID: LIB3028-027-Q1-B1-F11
tgatttgattgccgtgccactatataagataatgacctcgcatgcacgcgtacgtaagctcgggtaaaaaggccgcgttgctggcgtttttccataggctccgcccccctgacgagcatcacaaaaatcgacgctcaagtcagaggtggcgaaacccgacaggactataaagataccaggcgtttccccctggaagctccctcgtgcgctctcctgttccgaccctgccgcttaccggatacctgtccgcctttctcccttcgggaagcgtggcgctttctcatagctcacgctgtaggtatctcagttcggtgtaggtcgttcgctccaagctgggctgtgtgcacgaaccccccgttcagcccgaccgctgcgccttatccggtaactatcgtcttgagtccaacccggtaagacacgacttaaccgcaactggcagcagccactggtaaaa

SEQ ID NO: 4476 - DNA, 454 bp, Glycine max
  Clone ID: LIB3028-027-Q1-B1-F9
ggatcgaattgacgtggcactatataagagatatgacctcgcacgcacgcgtacgtaagctcggaaatcggctcgaggccgcgttgcaggcgtttttccataggctccgcccacctgacgagcatcacaaatatcgacgctcaagtcagaggtggcgaaacccgacaggactataaagataccaggcgtttccccctggaagctccctcgtgcgctctcctgttccgaccctgccgcttaccggatacctgtccgcctttctcccttcgggaagcgtggcgctttctcatatctcacgctgtaggtatctcagttcggtgtatgtccttcgctccaagctgggctgtgtgcacgaaccccccgttcagcccgaccgcagcgccttattcggtaactagcgtcttgagtccaccccgttggacccgaactaaccgcaactggcaacacccacggg

SEQ ID NO: 4477 - DNA, 467 bp, Glycine max
  Clone ID: LIB3028-027-Q1-B2-A2
gaatgaattaggtagctagcgaagacatatgagtcgcatgcacgcgtacgtaagctcgggaattgcaagctctgcattaatgaatcggccaacgcgcggggagaggcggtttgcgtattgggcgctcttccgcttcctcgctcactgactcgctgcgctcggtcgttcggctgcggcgagcggtatcagctcactcaaaggcggtaatacggttatccacagaatcaggggataacgcaggaaagaacatgtgagcaaaaggccagcaaaaggccaggaaccgtaaaaaggccgcgttgctggcgtttttccataggctccgcccccctgacgagcatcacaaaaatcgacgctcaagtcagaggtggcgaaacccgacaggactataaagataccaggcgtttccccctggaagctccctcgtgcgctctcctgttccgaccctccgcttaacggatacttgtcgg

SEQ ID NO: 4478 - DNA, 467 bp, Glycine max
  unsure at all n locations
  Clone ID: LIB3028-027-Q1-B2-A9
ttgagttgcctgccttatanctagagatatgacgtcgcatgcacgcgtaaataagctcggaatgccgcttcgccttcgcgcgcgaatttcaagctctgcattaatgatccggcaaacccccggggaaaagcggtttccgtattgggcgctcttcggcttctccgctcactaattcgctgtgctcggtcgttcggctccggcgagcggtatcagctcactcaaaggcggtaatacggttatccacagaatcaggggataacgcacgaaagaacatgtgagcatagggccaccaaaaggccaggaaccgttacaaggccgcgttgctggcgtttttccatacgctcggcccccctgacgagcatcaccaaaatcgaacgctcaagtcagaagtggccaaaccccacaggactataaagatacaaggcgttttcccctggaatctccctcgttggctctccctgttccac

SEQ ID NO: 4479 - DNA, 476 bp, Glycine max
  unsure at all n locations
  Clone ID: LIB3028-027-Q1-B2-B1
gagttgaatcangttgccatagcgaagagatatgacgtcgcatgcacgcgtacgttagctccgaattcggctcgaaggaagttgagtagttcttcatcatagtcttaaacattaaaccttagcaaaactcaacaatgctagacatcaaaggctacctcgtactcttcttcctatggttcatatcaaccattctgatacgttccatcttcaagaaaccacagcgtctaagactcccaccgggtcctccaatttcaatacccttgctgggacacgcgccatatctccgttcactgctccaccaagcattgtacaagctatcactgcgctatggacccttgatccacgtcatgatcggttcgaagcacgtggtggtggcgtcgtcggcggagacggccaagcagatcctcaaaacctcggaggaggcattctgcaaccgtcccttaatgataaccaacgaaaagcctaacttacggcgc

SEQ ID NO: 4480 - DNA, 469 bp, Glycine max
  Clone ID: LIB3028-027-Q1-B2-B3
gctaggttgccatggcgaagacaatgaagtcgcatgcaggcgtacgtaagctcggaattcggctcgagcacaaattcataatatatatatatatatatatatatatatatatatatatatatatgtatgtagtgctccttctccattttctatctatcgtcaacgttagtgctttgtttaggtgaactaattcggagaccttgcaagacttcatcaatggctgtcaaagtttatattgtgtactactccatgtatgggcatgttgagaaactagcagaataaataaagaaaggggcttcctctgtggaaggtgttgaggccaagttatggcaggtacctgacacactgctggatgaggtgcttggtaagataagtgcaccacccaagagtgacgtatcagtcattacccccaatgaactatccgaggctgaagggtttggtaatcgggcttctcaaacaaggtttgggg

SEQ ID NO: 4481 - DNA, 460 bp, Glycine max
  Clone ID: LIB3028-027-Q1-B2-C10
acaatcatgctgccatatagcacaatatgacgtcgcatgcacgcgtaagtaagctcggaattcggctcgagatcttcactcagaccaaccttctctgagaaggtggacaccaccccattcgggactgtagttgagaatttctatatgactgatgccattacaagggcatcaaagataatggcacaatgcagtgccatgctgttgaagaagtgaaacatggattttttatttttcggtttcaatcaagaacattcacgtttttcccttcctggccatgcaagattgcttgccaacagcttattggatgttggaagtatccaatagattaaaactatgatttatctgttctatttgtaaaaaactgatacaagggctgcaaccgaccaatgagctcgtcgacccgggaactagttccggaccggttcccgcatgtcttgcagctttccctctcttaagtcgt

SEQ ID NO: 4482 - DNA, 480 bp, Glycine max
  Clone ID: LIB3028-027-Q1-B2-C9
actatttgtcctgcctatactaggatatgacgtcggatgcacgcgtaagtaagctcggaattcggctcgagatcgtctccaatttacttcgcagtggaacggcaagacctgttgactacaaacgttctatttaccgttttcttcgacgcgactatgggccaggagtcagatccgtcgttgctgcgggtactcactactatcggtttcacttgagcacactcctacatctgcattaacaactcttgtctctccggctctcgctttcacctctgaattctatcaagagttactcaacagagcatgctctctacttgataggagtttcttctctctacgttctcgtggctctttctgtcagtagtcacttacggacaagcgttcctcactaggcttctctcctgatgctgcatctgcatcctctatatatcactacgttcctactatctcctttaagccggctctacggatgacctagtgttg

SEQ ID NO: 4483 - DNA, 460 bp, Glycine max
  unsure at all n locations
  Clone ID: LIB3028-027-Q1-B2-F11
ttaattagctgacctatanaagaatatgacgtcgcatgcacgcgtacgtaagctcgggtaaaaaggccgcgttgctggcgtttttccataggctccgcccccctgacgagcatcacaaaaatcgacgctcaagtcagaggtggcgaaacccgacaggactataaagataccaggcgtttccccctggaagctccctcgtgcgctctcctgttccgaccctgccgcttaccggatacctgtccgcctttctcccttcgggaagcgtggcgctttctcatagctcacgctgtaggtatctcagttcggtgtaggtcgttcgctccaagctgggctgtgtgcacgaaccccccgttcagcccgaccgctgcgccttatccggtaactatcgtcttgagtccaacccggtaagacacgacttatcgccactggcagcagccactggtaacaggattagcagagc

SEQ ID NO: 4484 - DNA, 473 bp, Glycine max
  Clone ID: LIB3028-027-Q1-B2-F4
gaatttaggtggacctagcgaagacaatgacgtcgcatgcacgcgtacgtaagctcggaaaacggcacgaaccgtaaaaaggccgcgttgctggcgtttttccataggctccgcccccctgacgagcatcacaaaaatcgacgctcaagtcagaggtggcgaaacccgacaggactataaagataccaggcgtttccccctggaagctccctcgtgcgctctcctgttccgaccctgccgcttaccggatacctgtccgcctttctcccttcgggaagcgtggcgctttctcatagctcacgctgtaggtatctcagttcggtgtaggtcgttcgctccaagctgggctgtgtgcacgaaccccccgttcagcccgaccgctgcgccttatccggtaactatcgtcttgagtccaacccggtaagacacgacttatcgccaacggcaacgcagcaccgggtaccaggattacg

SEQ ID NO: 4485 - DNA, 469 bp, Glycine max
  Clone ID: LIB3028-027-Q1-B2-F6
ttgaattgacgtggcctatagaagagcaatgacgtcgcatgcacgcgtacgtaagctcggaattcagctccgccatcgccgcttccactttttcccgcgttttcgcagaaacgtggctggcctggttcaccacgcgggaaacggtctgataagagacaccggcatactctgcgacatcgtataacgttactggtttcacattcaccaccctgaattgactctcttccgggcgctatcatgccataccgcgaaaggttttgcgccattcgatggtgtcaacgtaaatgccgcttcgccttcgcgcgcgaattgcaagctctgcattaatgaatcggccaacgcgcggggagaggcggtttgcgtattgggcgctcttccgcttcctcgctcactgactcgctgcgctcggtcgttcggctgcggcgagcggtatcagctcattccaaaggcggtatacggttttccacag

SEQ ID NO: 4486 - DNA, 473 bp, Glycine max
  Clone ID: LIB3028-027-Q1-B2-F8
ttgaatgacgtgacactatagaagagatatgacgtcgcatgcacgcgtacgtaagctcggtttgcgtattgggcgctcttccgcttcctcgctcactgacgcgctgcgctcggtcgttcggctgcggcgagcggtatcagctcactcaaaggcggtaatacggttatccacagaatcaggggataacgcacgaaataacatgttagcaaaaggccagcaaaaggccaggaaccgtaaaaaggccgcgttgctggcgtttttccataggctccgcccccctgacgagcatcacaaaaatcgacgctcaagtcagaggtggcgaaacccgacatgactataaagataccaggcgtttccccctggaagctccctcgtgcgctctcctgttccgaccctgccgcttaccggatacctgtccgccgttctcccttcgggaagccttgcgctttcctcatagcgtcacccggtaggtt

SEQ ID NO: 4487 - DNA, 467 bp, Glycine max
  unsure at all n locations
  Clone ID: LIB3028-027-Q1-B2-F9
aattgaatctagctgacactnatagaagagatatgacgtcgcatgcacgcgtacgtaagctcgggaatcggctcgaggccgcgttgctggcgtttttccataggctccgcccccctgacgagcatcacaaatatcgacgctcaagtcagaggtggcgaaacccgacaggactataaggataccaggcgtttccccctggaagctccctcgtgcgctctcctgttccgaccctgccgcttaccggatacctgtccgccttgctcccttcgggaagcgtggcgctttctcatatctcacgctgtacgtatctcagttcggtgtaagtcgttcgctccaaactgggctgtgtgcacgaacccctcgttcagcccgaccgctgcgccttatccggtaactatcgtctggagtccaaccccggtaggacacgacttatcgccactggcagcacgcactggtaacaagactag

SEQ ID NO: 4488 - DNA, 476 bp, Glycine max
  Clone ID: LIB3028-027-Q1-B2-G4
ggaatgaattaggtggcatagtcgaagagatatgacgtcggacgcacgcgtacgtaagctcggcacacgagccaaaacaacccattcggagtgaaggcattgaggcgtactccggctaaaccccattggacctttgggcgtaagaacaaggtcagcagtgcttaagcagataaaggaaatgtgaacgtgcaggaaggagccaatgatgaagtacatgaaagacgaagaattaaaacaccagctgatacacttcccctttaccttcacataaatttctctgtgccattttattatgatacaaattgatactattctgtatcaaatttcagtcagatattggctgtgtacatagggttatattattgatgcactgtatttgtattcaaattccaattccaaatggcgaacatatttgattgctgttagtttcccaggttatgtagactatgttacaatgcacaatatgtggaattgcc

SEQ ID NO: 4489 - DNA, 470 bp, Glycine max
  unsure at all n locations
  Clone ID: LIB3028-027-Q1-B2-H3
cgaatgaattaggtgacatagcgaagacaatgacgtcgcatgcacgcgtacgtaagctcgggccgactagtgagctcgtcgacccgggaattaattccggaccggtacctgcaggcgtaccagctttccctatagtgagtcgtattagagcttggcgtaatcatggtcatagctgtttcctgtgtgaaattgttatccgctcacaattccacacaacatacgagccggaagcataaagtgtaaagcctggggtgcctaatgagtgagctaactcacattaattgcgttgcgctcactgcccgctttccagtcgggaaacctgtcgtgccagctgcattaatgaatcggccaacgcgcggggagaggcggtttgcgtattgggcgccagggtggtttttcttttcaccagtgagacgggcaacagctgattgcccttcaacgcctggccctgagagaatttccagcaagcn

SEQ ID NO: 4490 - DNA, 494 bp, Glycine max
  unsure at all n locations
  Clone ID: LIB3028-028-Q1-B1-A12
agtgtttttgggaatgaattaagtagactagcgaagactatgacatcgcatgcacgcgtacgtaagctccngaaattcngctccaaggccttgtcgatggcccccgtggaattgtggcaacgggtaatatttgggccccaaatttaccccaaacaaggtggcccaaatgggggccaacaacttggccttggtccaacaatgatggttggaaacgcaatccagcaacattagggttggaaccattaataaaccttaataagtttcattataacaacaacattttggcaatacaataaccctgaataaatttgaaaaggataaacctaatttagggatcagtttactgagaaagaaaatacgaaatgtgacctctaatggtttttatgctactgagatatttagtctcattacttgaagtttcttggaacctttgtgatgcatgcatgcacctangtaatgttcggtgctccttatcacngnggtcacacaaaaga

SEQ ID NO: 4491 - DNA, 494 bp, Glycine max
  Clone ID: LIB3028-028-Q1-B1-A6
tgaatgaattaggtggactatagaagagctatgacgtcgcatgcacgcgtacgtaagctcgggtaaaaaggccgcgttgctggcgtttttccataggctccgcccccctgacgagcatcacaaaaatcgacgctcaagtcagaggtggcgaaacccgacaggactataaagataccaggcgtttccccctggaagctccctcgtgcgctctcctgttccgaccctgccgcttaccggatacctgtccgcctttctcccttcgggaagcgtggcgctttctcatagctcacgctgtaggtatctcagttcggtgtaggtcgttcgctccaagctgggctgtgtgcacgaaccccccgttcagcccgaccgctgcgccttatccggtaactatcgtcttgagtccaacccggtaagacacgacttatcgccactggcagcagccactggtacaagattagcaaaacaagtatgttagcggtgaacagattcttgag

SEQ ID NO: 4492 - DNA, 468 bp, Glycine max
  Clone ID: LIB3028-028-Q1-B1-A9
tctgccggactaacctcaccaccaggaacagtcctggagctccaccacggtgacggccgctctagaactagtggatcccccgggctgcaggaattcggcacgagagaagtacttgtcgactccagacggcgataaagtcaccgtggcctgcggcattccatacacattcccttgttaatcttgtctacatatgatccactgcaatgctatcatataaaagaagcattatgtagcgaacttaccgcatatatcaaatcacatgaataagtttatcgtaagggggcttcgactatatatgctcaatcaattacacgctctccatggcatgagcagaatttgaacatcccgaagccggcgatgcatattacataaatatcttatgctcgacgccattttgcattccaaagagccctgggttattatgctcaaggcggggcccggttaccaattcgccctattgggagtccg

SEQ ID NO: 4493 - DNA, 545 bp, Glycine max
  unsure at all n locations
  Clone ID: LIB3028-028-Q1-B1-C11
gggtcgatctgagatattcactcacacagcacaagacatagncagcacgaccagtcgtacgtaaaatcgaaattcggctcgagaacgacgatgttggtcataaatctcgtcttgtatttggcaacgtaccaacttctccacctatcatccacaaataaagaattcatctctatctcgggcaggggctgttgctaaccgtgattcaagttaatccaactcaccatataccctcgtccacagttatcctggtactctgatcttctcaagctgtggagcgacctcaatgttcacattacactcacgactctgttgcgttccctctcaggtttcctctttttcatttcacacactccccgtctatgcccaccgtgcatttatacctcctctcgataactgtgctacggctcacacttgctacaggaattggctcgaccaacagtttgagtccatcgataataacatctgacaccagtcctcctagattaaattggcttgcacacatttgacccccgcatccgattcgcctaccacgtccagtccctgtg

SEQ ID NO: 4494 - DNA, 492 bp, Glycine max
  unsure at all n locations
  Clone ID: LIB3028-028-Q1-B1-C9
ggggcntnttacgaattgaattcangtagtcgtagcgaagagctatgacatcgcatccacgcgtacgtaagatcgggccgactagtgagctcgtcgacccgggaattaattccggaccggtacctgcaggcgtaccagctttccctatagtgagtcgtattagagcttggcgtaatcatggtcatagctgtttcctgtgtgaaattgttatccgctcacaattccacacaacatacgagccggaagcataaagtgtaaagcctggggtgcctaatgagtgagctaactcacattaattgcgttgcgctcactgcccgctttccagtcgggaaacctgtcgtgccagctgcattaatgaatcggccaacgcgcggggagaggcggtttgcgtattgggcgccagggtggtttttcttttcaccagtgagacgggcaacagctgattgcccttcaccgcctggccctgagagagttgcagcaagcggtccaccn

SEQ ID NO: 4495 - DNA, 487 bp, Glycine max
  unsure at all n locations
  Clone ID: LIB3028-028-Q1-B1-D9
gggganttaggaatgaatcacgttgcctagccaagagctatgatatcgcatgcacgcgtacgtaaactcggaattccggaccggtacctgcaggcgtaccagctttccctatagtgagtcgtattagagcttggcgtaatcatggtcatagctgtttcctgtgtgaaattgttatccgctcacaattccacacaacatacgagccggaagcataaagtgtaaagcctggggtgcctaatgagtgagctaactcacattaattgcgttgcgctcactgcccgctttccagtcgggaaacctgtcgtgccagctgcattaatgaatcggccaacgcgcggggagaggcggtttgcgtattgggcgccagggtggtttttcttttcaccagtgagacgggcaacagctgattgcccttcaccgcctggccctgagagagttgcagcaagcggtccacgctggttttgcccaacaggcgaaaatcctgttt

SEQ ID NO: 4496 - DNA, 487 bp, Glycine max
  unsure at all n locations
  Clone ID: LIB3028-028-Q1-B1-E12
gggcggttgcgaatgaattangtagtctagcgaagagctatgatatcgcgtgcacgcgtacgtaagctcagaattcagctccgccatcgccgcttcaactttttcccgcgttttcgcagaaacgtggctggcctggttcaccacgcgggaaacggtctgataagagacaccggcatactctgcgacatcgtataacgttactggtttcacattcaccaccctgaattgactctcttccgggcgctatcatgccataccgcgaaaggttttgcgccattcgatggtgtcaacgtaaatgccgcttcgccttcgcgcgcgaattgcaagctctgcattaatgaatcggccaacgcgcggggagaggcggtttgcgtattgggcgctcttccgcttcctcgctcactgactcgctgcgctcggtcgttcggctgcggcgagcggtatcagctcactcaaaggcggtaatacggttatccacagaatcang

SEQ ID NO: 4497 - DNA, 514 bp, Glycine max
  Clone ID: LIB3028-028-Q1-B1-F8
cgggatgctctggatgaattaatcaggccgcctatagaaaccagtgacgtcccatgcacgcgtacgataaactcggaatccggcaccacgcggggagaggcggtttgcgtattgggcgctcttccgcttcctcgctcactgactcgctgcgctcggtcgttcggctgcggcgagcggtatcagctcactcaaaggcggtaatacggttatccacagaatcaggggataacgcaggagagaacatgtgagcaaaaggccagcacaaggccaggaaccgtaaaaaggccgcgttgctggcgtttttccataggctccgcccccctgacgagcatcacaaaaatcgacgctcaagtcagaggtggcgaaacccgacaggactatatagataccaggcgtttccccctgcaagctccctcgtgcgctctcctgttccgaccctgccgcttatcggatacctgtccgcctttctcccttcgggaagcgttgccccttcccaaagctcaaggcggaaggt

SEQ ID NO: 4498 - DNA, 511 bp, Glycine max
  unsure at all n locations
  Clone ID: LIB3028-028-Q1-B1-G3
agggngattgggaatgaattatgtgagccgacagaagagctatgacgtcgcgtgcacgcgtacgtaagatcggaattcggctcgaagggaaataaaacctccgaaggctccgttcaatcaagtcctggagattacaatagtaataacaaggacaactctaagcaaccaaatttgaatctatatagcttctctccacaagcattattttgcttcttaacaagcatgtaatttcacacattttttttataaaaaaatcaaagatatgcgatgaaaatatggaagattaaagggaacatgcctatatatatgtggttttgcccaataactgcgtactcccccatgcccctgcacaaatcacagttgcatatcatgtaaatcgacggatgatatgtcatccccattttgtactgtagttaatagaagagaccaataaatgaagcaaacgttggtccttttttttaaaaaaagaaaannnngnannnnnnnnnnnnnnnanangnaaaaaaaaaaa

SEQ ID NO: 4499 - DNA, 499 bp, Glycine max
  unsure at all n locations
  Clone ID: LIB3028-028-Q1-B1-H10
ggtgggcgtgcnatggaattgagttgaagtttgcgtatgacaagagctatgacatcgcatgcacgcgtacgtaagctcggaattcggctcgaggcatttggagaatgtgtactactctgaaatgaaagatgccggtttctttgaagcagattggaactgatgtggtatcgactgctagattagattaataaggcctcaatgtactaattgctgggcattcgttcacgaaatttgtaaataaagtaaatattttagtagatacattttttaaatgaaaaaatattgaaaagggcggccgccgactagtgagctcgtcgacccgggaattaattccggaccggtacctgcaggcgtaccagctttccctatagtgagtcgtattagagcttggcgtaatcatggtcatagctgtttcctgtgtgaaattgttatccgctcacaattccacacaacatacgagccggaagcataaagtgtaaagcctgaggtgcctaatgag

SEQ ID NO: 4500 - DNA, 504 bp, Glycine max
  Clone ID: LIB3028-028-Q1-B1-H2
cgaatgaattaagtgagactagcgaagagctatgaagtcgcatgcacgcgtacgtaagctcggaattgcaagctctgcattaatgaatcggtcaacgcgcggggagaggcggtttgcgtattgggcgctcttccgcttcctcgctcactgactcgctgcgctcggtcgttcggctgcggcgaacggtatcagctcactcaaaggcggtaataccgttatccacagaatcaagggataacgcaggaaagaacatgtgagcaaaaggccagcaaaatgccaggaaccgtaaaaaggccgcgttgctggcgtttttccataggctccgcccccctgacgagcatcacaaaaatcgacgctcaagtcagaggtggcgaaacccgacaggactataaagataccatgcgtttccccctggaagctccctcgtgcgctctcctgttccgagcctgccgcttatcggatacctggtccgctttctacctttcggaaagcgtgggcctttcc

SEQ ID NO: 4501 - DNA, 482 bp, Glycine max
  Clone ID: LIB3028-029-Q1-B1-C11
tgaatgaattgcccgccagaagagatataacgtcgcatgcacgcgtacgtaagctcggattgtgcaccgccgctttacaggcttcgacgccgcttcgttctaccatcgacaccaccacgctggcacccagttgatcggcgcgagatttaatcgccgcgacaatttgcgacggcgcgtgcagggccagactggaggtggcaacgccaatcagcaacgactgtttgcccgccagttgttgtgccacgcggttgggaatgtaattcagctccgccatcgccgcttccactttttcccgcgttttcgcagaaacgtggctggcctggttcaccacgcgggaaacggtctgataagagacaccggcatactctgcgacatcgtataacgttactggtttcacattcaccaccctgaattgactctcttccgggcgctatcatgccataccgcgaaaggttttgcgccattcgatggtgtcaacgtaa

SEQ ID NO: 4502 - DNA, 486 bp, Glycine max
  unsure at all n locations
  Clone ID: LIB3028-029-Q1-B1-C9
ggaatgaatcgacacggcacaagacaatgacgtcgcatgcacgcgtacgtaagctcggaattgactctcttccgggcgctatcatgccataccgcgaaaggttttgcgccattcgatggtgtcaacgtaaatgccgcttcgccttcgcgcgcgaattgcaagctctgcattaatgaatcggccaacgcgcggggagaggcggtttgcgtattgggcgctcttccgcttcctcgctcactgactcgctgcgctcggtcgttcggctgcggcgagcggtatcagctcactcaaaggcggtaatacggttatccacagaatcaggggataacgcaggaaagaacatgtgagcaaaaggccagcaaaaggccaggaaccgtaaaaaggccgcgttgctggcgtttttccataggctccgcccccctgacgagcatcacaaaaatcgacgctcaagtcagaggtggcgaaacccgacaggactataaagan

SEQ ID NO: 4503 - DNA, 444 bp, Glycine max
  Clone ID: LIB3028-029-Q1-B1-E1
aatgaattaggtgcctagacaagacaatgacatcgcatgcacgcgtacgtaagctcggggaaagaacatgtgagcaaaaggccagcaaaaggccaggaaccgtaaaaaggccgcgttgctggcgtttttccataggctccgcccccctgacgagcatcacaaaaatcgacgctcaagtcagaggtggcgaaacccgacaggactataaagataccaggcgtttccccctggaagctccctcgtgcgctctcctgttccgaccctgccgcttaccggatacctgtccgcctttctcccttcgggaagcgtggcgctttctcatagctcacgctgtaggtatctcagttcggtgtaggtcgttcgctccaagctgggctgtgtgcacgaaaccccccgttcagccccgacggctgcgccctaaccgggtaactatcgtcctgagtg

SEQ ID NO: 4504 - DNA, 476 bp, Glycine max
  unsure at all n locations
  Clone ID: LIB3028-029-Q1-B1-E12
cgaatgaatcacgtggccgacagaagatatagacgtcgcatgcacgcgtacgtaagctccgaattcggctcgaagtcccatcatcaattgccatcgtccattggaattaattcactttccaaaagcaacaaataagaaacaaacttccttttcaagtcagtcccgtcaatgtcgccatcntcttcatcttcttcatcttcgtcagacaagcatttgcttttgggtggtaataactcgtaccacttttcatccggaatcgggcactggtagcttagctcgtgtaaaatgtgtctctggcgctggaaattcatgagtnaaaattaatttgtgagaatcaagagctttgagttgcaaagatggtggctaattaaatgactttgacgtcaactttgcaagtcaatacggtggaactgccctgagccacatgtatcaacaagatgattgagcaattcatcaatttccgtaatcgggctccc

SEQ ID NO: 4505 - DNA, 431 bp, Glycine max
  Clone ID: LIB3028-029-Q1-B1-E6
cgattgaatgacgtgacactatataagagcaatgacgtcgcatgcacgcgtacgtaagctcggaattcgctcgagaagtagttgagaactaagaaggagaagcaaatggcttcctcaatgatctcttccccagctgttaccactgtcaaccgtgccggtgccggcatggttgctccattcactggcctcaagtccatggctggcttccccaccagaaagaccaacaatgacattacctccattgctagcaacggtggaagagtgcaatgcatgcaggtgtggccaccagttggcaagaagaagtttgagactctttcctacctgccagaccttgatgatgcacaattggcaaaggaagtagaataccttcttaggaagggatggattccttgcttggaattcgagttggagcacggtttcgtgtaccgtga

SEQ ID NO: 4506 - DNA, 440 bp, Glycine max
  Clone ID: LIB3028-029-Q1-B1-E7
agctagctttcctcagtcaagggagagacaagcttgcatgcctgcaggtcgactctagaggatcccctcggggaattccaattccacattttcaagaaataaggaggcaaaaatgttcatatatgaattggaattatttgttttcttattaggcctatcctgaagccaaaggaaatgagatcggaattcctcggggaattccaattccacattttcaagaaataaggaggcaaaaatgttcatatatgaattggaattatttgttttcttattaggcctatcctgaagccaaaggaaatgagatcggaattcctcgggggtaccgagctcgaattccctatagtgagtcgtattaaattcgtaatcatgtcatagctgtttcctgtgtgaaattgttatccgctcacaattccacacaacataccaaccggaagcataaa

SEQ ID NO: 4507 - DNA, 439 bp, Glycine max
  unsure at all n locations
  Clone ID: LIB3028-029-Q1-B1-G3
aatgaattaggttgcactatgcaagacaatgacgtcgcatgcacgcgtacgtaagctcggaattcagctccgccatcgccgcttccactttttcccgcgttttcgcagaaacgtggctggcctggttcaccacgcgggaaacggtctgataagagacaccggcatactctgcgacatcgtataacgttactggtttcacattcaccaccctgaattgactctcttccgggcgctatcatgccataccgcgaaaggttttgcgccattcgatggtgtcaacgtaaatgccgcttcgccttcgcgcgcgaattgcaagctctgcattaatgaatccggcaacgcgccgggaaaagcggtttgcgtattgggcgctcttccgcttcctcgctcactgactcgctgcgctccgtccttcngcttcggcgagcggtttccaccg

SEQ ID NO: 4508 - DNA, 481 bp, Glycine max
  Clone ID: LIB3028-029-Q1-B1-G9
cgaatgaattacgtggccgacagaagacatagacgtcgcatgcacgcgtacgtaagctcgggattcggctcgagccctcttcagcccgaacgccgaacctccccgttcggttcccgctcgtggattggtggttcgcgcagcgaaaggatccacgaaccaccgcgccctgaccggagtgatttttgaaccgttcgaagaggtgaagaaggagctcgatctcgttcccaccgttccgcaagcttctctcgcgcgccaaaaatacgttgacgaatctgagtccgccgttaacgaacaaatcaatgtggagtataacgtttcgtacgtttaccatgccatgtttgcgtacttcgatagggacaacgttgcgctgagaggacttgccaagttttttaaggaatcgagtgaagaagaaagagagcatgctgagaaattgatggagtatcagaacaaacgtggtggaaaagtgaagttgcagtcaatt

SEQ ID NO: 4509 - DNA, 438 bp, Glycine max
  unsure at all n locations
  Clone ID: LIB3028-029-Q1-B1-H1
ngaatgaatcaggttgcatatgcaagactatgacatcgcatgcacgcgtacgtaagctcggaattcggctccaactgaaatgtatgtggtggagagcaaggtgggcgccatagggtggattttcttttcaccagtgagacgggcaacagctgattgcccttcaccgcctggccctgagagagttgcagcaagcggtccacgctggtttgccccagcaggcgaaaatcctgtttgatggtggttaacggcgggatataacatgagctgtcttcggtatcgtcgtatcccactaccgagatatccgcaccaacgcgcagcccggactcggtaatggcgcgcattgcgcccagcgccatctgatcgttgggaaccagcatcgcagtgggaacgatgccctcattcaacacttgcatgggttgttgaaaaccggcattggac

SEQ ID NO: 4510 - DNA, 438 bp, Glycine max
  Clone ID: LIB3028-029-Q1-B1-H7
cgatttgaatgacgtggccctatagaagagcaatgacgtcgcatgcacgcgtacgtaagctcggagcccactgacccgttgcgcgagaagattgtgcaccgccgctttacaggcttcgacgccgcttcgttctaccatcgacaccaccacgctggcacccagttgatcggcgcgagatttaatcgccgcgacaatttgcgacggcgcgtgcagggccagactggaggtggcaacgccaatcagcaacgactgtttgcccgccagttgttgtgccacgcggttgggaatgtaattcagctccgccatcgccgcttccactttttcccgcgttttcgcagaaacgtggctggcctggttcaccacgcgggaaacggtctgataagagacaccggcatactctgcgacatcgtataacgttaccggtttcacattcccccg

SEQ ID NO: 4511 - DNA, 431 bp, Glycine max
  Clone ID: LIB3028-029-Q1-B1-H8
ttaggatgccgtggcactataaaagacaatgacgtcgcatgcacgcgtacgtaagctcgggattcagctcgagagaaagtgctagagatgtgcattggtatgcaaattccttaattttcacaaaccttttttggttattcttggttgcaggtgttggaaagagttgccttcttctacgattctctgatggttctttcacaactagtttcatcacaaccataggcattgattttaagataagaaccattgagcaggatggaaaacggatcaagctccaaatttgggatactgcaggtcaggagcggttccgaacaattacaactgcttactatcgtggtgctatgggcatattgctagtctatgacgttacagacgaatcttcatttaacaatatcaggaattggattcgtaacattgagcagcatgcttca

SEQ ID NO: 4512 - DNA, 517 bp, Glycine max
  Clone ID: LIB3028-030-Q1-B1-A2
agttctcttcagaatgaattaagtgagcctagcgaagagctatgaagtcgcgtccacgcgtacgtaagatcggaattcggctcgaggtttaatcgcagatcatgtttagctagctagctagcatataatcacgtacgtgacgtcagtacaaattaaatgttacctatagaggtaaccactgcatattgttctttgtgcatccgtgctccaactcatattatttccaccatttctgatgacaggcggccgccgacaagcgagctcgtcgacccgggaactacttccagaccggtaccggaaggcttatcatctttccctatctcgagtctgattaaaacttggcctacccagggacagaactgtttccagtgtgaaattgtaatcagcacaaaattccacacatgataacattccgtacacaatggttgtcagcctgaggtgcctatagactaaactatatcacattaattgcatggcgcaaactgtccgctttacagttgggaaacctgccatgcag

SEQ ID NO: 4513 - DNA, 503 bp, Glycine max
  Clone ID: LIB3028-030-Q1-B1-B8
tgaatgaatcaggctgcatatagaagagctatgacgtcggatccacgcgtacgtaagctcggaattcggctcgaggacagctacaattatgacagctgatttacaacacgaatgtatttatccatttaagacgtagacgtatcgcacctgcaagtgttgcgtgctttttatatgaacaaacgatcctcatttcattccgtgtttgaccaaaaaaggaaaataagggcggccgccgactagtgagctcgtcgacccgggaattaattccggaccggtacctgcaggcgtaccagctttccctatagagagtcggattagagcttggcgtaatcatggtcatagctgtgtcatgtgtgaaattgttatccgctcacaattccacacaacatacgagccggaagcataaagtgtacagcctgaggtggccaatgagtgagctaactcacattaattgcgttgcgctcactgcccgcatttcagtcgggaaacctgtcgtgccagct

SEQ ID NO: 4514 - DNA, 499 bp, Glycine max
  unsure at all n locations
  Clone ID: LIB3028-030-Q1-B1-C5
ggaatgaaatcaggcgagcctatagaaaactatgacgtcgcatccacgcgtacgtaagctcgggactacgatcgagctcgtccacgcgggaattaattccggaacggtacatgaaggcgtactagctttccataaagtgagtcgtattaaagcttggcgtaagcatggtcatagcagtgtcctgtgtgaaattgttagccgatcacaattccacacatgtatatgagccggtagcataaagtgtagagcctggggtgcctaatgagtgagctaactcagattaagtgcgtggcgctcagtgtccagcatccagtcgggaagactgtcgtgcgagctgcattaatgtatcgggaaacgcactgcgacaaggggtatgagtaatgggcgcaaggtggtttttcttttcagcagtgagaccggcatcagctgattgcccatcatcgactaggcctgagagagttgcagcangccgtccacgctggtttgccacagcaagcag

SEQ ID NO: 4515 - DNA, 510 bp, Glycine max
  unsure at all n locations
  Clone ID: LIB3028-030-Q1-B1-E1
agccatatggaatgaattaggtggactagcgaagagctatgaagtcgcgtgcacgcgtacgtaagatcgggccgactagtgagctcgtcgacccgggaattaattccggaccggtacctgcaggcgtaccagctttccctatagtgagtcgtattagagcttggcgtaatcatggtcatagctgtttcctgtgtgaaattgttatccgctcacaattccacacaacatacgagccggaagcataaagtgtaaagcctggggtgcctaatgagtgagctaactcacattaattgcgttgcgctcactgcccgctttccagtcgggaaacctgtcgtgccagctgcattaatgaatcggccaacgcgcggggagaagcggtttgcgtattgggccgcaaggtggtttttcctttcaacagtgagaacggcaacagctgattgcctttcacgcctgggcctgagagaatttcancaagcggtcaacgctggtttgccccagcangggaaaatn

SEQ ID NO: 4516 - DNA, 497 bp, Glycine max
  Clone ID: LIB3028-030-Q1-B1-F7
aattaaattgcctggacatcccaacgctaaagacacgcgcacgcgttacttaatccggattcagctcgaaggaagtttcttttccctcacatttccgagacaaacattacacctttcaaattcctcaacaaggttccaacttgttatggggccataaggacaaaccgcctcacagtacaaccggtggcaaaggcccaacgtaagcattccgccaacaagggcaccccggactctcgccccggttaactgagcggattcaatcccccaacggttcaggccgggaacccttgggcttaggggaaatccaaatttccaaggcagaaccttgcctccaaccagaaagctccaattaaaaagcccctgaaaaaaatccccacgattttcaaaaccgtattggttttccaaaaaaagtgggtttcccgcctttaaaaaggtgccgaagattacccccctggggttgtctcaagagataagcgcctcgccaatttacaaccaag

SEQ ID NO: 4517 - DNA, 515 bp, Glycine max
  unsure at all n locations
  Clone ID: LIB3028-030-Q1-B1-G1
cggcccttgagaatgaatcaggtgagcctatccaagagctatgacgtcgcatccacgcgtacgtaagatcggaatgtaattcagctccgccatcgccgcttccactttttcccgcgttttcgcagaaacgtggctggcctggttcaccacgcgggaaacggtctgataagagacaccggcatactctgcgacatcgtataacgttactggtttcacattcaccaccctgaattgactctcttccgggcgctatcatgccataccgcgaaaggttttgcgccattcgatggtgtcaacgtaaatgccgcttcgccttcgcgcgcgaattgcaagctctgcattaatgaatcggccaacgcgcggggagaggcggtttgcgtattgggcgctcttccgcttcctcgctcactgactcgctgcgctcggtcgttccgctgcngcgagcggtatcagctcactcaaaggcggtaatacggtttaccacagaatcacgggattacgcanggaaagacatg

SEQ ID NO: 4518 - DNA, 517 bp, Glycine max
  Clone ID: LIB3028-030-Q1-B1-G6
ggtggctctgaatgaattaattagcttgtctatagaagagcactgacgtcgcgtgcacgcgtacgtaagatcggaattaagtcccgggactccattccagaatgcttcgttacctgttggtgttcttcttattgggcttgggaacccgggtggagtcacacgaggaatcgggtcattggagctgcgagtccgagtcggagatccgagtcgagactgagttcaaacccggtgtaatcacactggatggtcacgctgatgattggaaggacattgatgggtcctactttcccctccttcccgcccttgacccagatgctgaaaatgaattcaaagggggaaagatgagcgttaaaagtgtccatgatggccgcgatatcttctttctgctgcaagtagatggtgactatgcccaatccaaaagtgaaagcaataaatgtccaaccgttgctctcaaggttccaaattgagaaaaagcgccctaaaaagaaataggggttgggttttagagaatcccccc

SEQ ID NO: 4519 - DNA, 497 bp, Glycine max
  unsure at all n locations
  Clone ID: LIB3028-030-Q1-B1-G9
aggcttgtggaatgaattaagttgactagccaagacttctgaagtcgcgtccacgcgtacgtaagctcggaatcaggggataacgcacgaaagaacatgtgagcaaaaggccagcaaaaggccaggaaccgtaaaaaggccgcgttgctggcgtttttccataggctccgcccccctgacgagcatcacaaaaatcgacgctcaagtcagaggtggcgaaacccgacaggactataaagataccaggcgtttccccctggaagctccctcgtgcgctctcctgttccgaccctgccgcttaccggatacctgtccgcctttctcccttcgggaagcgtggcgctttctcatagctcacgctgtaggtatctcagttcggtgtaggtcgttcgctccaagctgggctgtgtgcacgaaccccccgttcagcccgacggctggccctaacccggaactatcgtcctgagtccaacccggtaagacacgacttaaccccn

SEQ ID NO: 4520 - DNA, 485 bp, Glycine max
  Clone ID: LIB3028-030-Q1-B1-H10
attgaatgccgtggcaagactatgacatcgcatgcacgcgtacgtaaactcggaattgcaagctctgcattaatgaatcggccaacgcgcggggagaggcggtttgcgtattgggcgctcttccgcttcctcgctcactgactcgctgcgctcggtcgttcggctgcggcgagcggtatcagctcactcaaaggcggtaatacggttatccacagaatcatgggataacgcaggaaagaacatgtgagcaaaaggccagcagaaggccatgaaccgtaaaaaggccgcgttgctggcgtttttccatatgctccgcccccctgacgagcatcacaaaaatcgacgctcaagtcagaggtggcgaaacccgacaggactaattagataccaggcgtttccccctggaagctccctcgtgcgctctcctgttccgaccctgccgctttacgggatactgtccggctttcaccctttcggaagcgtgg

SEQ ID NO: 4521 - DNA, 498 bp, Glycine max
  Clone ID: LIB3028-030-Q1-B1-H11
cgggagatcccgaatgaattaagtggactagcgaagagcagtgacatcgcatgcacgcgtacgtaagatcggaattcggctcgagccattcttgaggagacacttttcacttggatcaaagtggacccgatgcctgtccgacaatgactctgccaagaagaaaggcttttgggcaagatatcgttaagatttagttccaattgcagtcagagtcaatcattctctaattaaaattgtcataacaccatcaatttagaatgaatattttctatgtaacctaacttgtactgataactttgaatgctttaaaacaagtaatttttacttttgaccagaccactgacgaacatcggcggccgccgactaatgatctcgtcgacccgggaattaattccggaccggtacctgcacgcgtaccagcgttccctatagcgagtcgtctcatagcctgacgtatcaatgacataacaggtttctggggtaaactgtaaccagtca

SEQ ID NO: 4522 - DNA, 487 bp, Glycine max
  unsure at all n locations
  Clone ID: LIB3028-031-Q1-B1-A12
gaatgaatcgcgtggcctatagaagactatgacgtcgcatgcacgcgtacataagctcggctggtcatccagcggatagttaatgatcagcccactgacccgttgcgcgagaagattgtgcaccgccgctttacaggcttcgacgccgcttcgttctaccatcgacaccaccacgctggcacccagttgatcggcgcgagatttaatcgccgcgacaatttgcgacggcgcgtgcagggccagactggaggtggcaacgccaatcagcaacgactgtttgcccgccagttgttgtgccacgcggttgggaatgtaattcagctccgccatcgccgcttccactttttcccgcgttttcgcagaaacgtggctggcctggttcaacacgcgggaaacggtctgatangagacaccggcatactctgcgacatcgtataacgttactggtttcacattgcacaccctgaattgactctcctccggggcg

SEQ ID NO: 4523 - DNA, 495 bp, Glycine max
  Clone ID: LIB3028-031-Q1-B1-B10
tgaatcgaatcacttgactatagaagagcagtgacgtcgcatcaacgcgtacgtaagctcggaagtaattccggggtcgaataacgcttcgctcgttacatcatcagcaagatcaaggctcttcaatcatctcatcatagaccttggaaatacatttgaagggaggattagcactcacaacgacagtgaaaatcgagacggcggaagcacaattgagcatggatgtacaaagtaacaggtttctcacgttataacaacaccacgatcaacgctcgactgtcaacaatagtgcaataatacacagtcccttaggaatccattagacttcatatacgcaagctatatgttgcatatatgagaactattattaacagctatctaaccctcctgtgaagatgcactcaagactaagagttataaaatacaataccatacaaatgctaagaagggctcgaccaataggttcatattggttacaatacgtgtgttaaactg

SEQ ID NO: 4524 - DNA, 509 bp, Glycine max
  Clone ID: LIB3028-031-Q1-B1-B3
aggtaggtggggaatgaattacgctcgcgtaggtcaagagctatgacatcgcgtgcacgcctacgtaagatcggaaatctgctccatcgccttcgcgcgcgagttgcaagctctgcattaatgaatcggtcaatgcgcgatgagaggcagtttgcgtattgggcgctcttccgcttcctcgctcactgactcgctgcgctcggtcgttcggctgctgcgaacggtatcagctcactcatgggcggtaataccgttatccacagaatcaggggataacgcatgacataacatgtgagcaacacgccagcaaatggtcagtaaccgtacaaacgccgcgttgctggcgtttttccatacgctctgcccccctgatgagcatcacatacatcgacgctcaagtcagacgtcggcatatccgacatgactatacagataccaggcgtttcccctggaagctccctcgtgcgcttgtctggttcgatccatgcccgtgacggatttctgtcctg

SEQ ID NO: 4525 - DNA, 510 bp, Glycine max
  Clone ID: LIB3028-031-Q1-B1-C4
gggcgcccggaatgaattacgttgcctagccaagagctatgaaatcgcgtccacgcgtacgtaagatcggaattcagctccgccatcgtcgcttccactttttcccgcgttttcgcagaaacgtggctggcctggttcagcacgcgggaaacggtctgattagagataccggcatactctgcgacatcgtataacgttactggtttcacattcaccaccctgaattgactctcttccgggcgctatcatgccataccgcgaaaggttttgcgctattcgatggtgtcaacgtatatgccgcttcgccttcgcgcgcgaattgcaagctctgcattaatgaatctgccaacgcgcggggagaggcggtttgcgtattgggcgctcttccgcttcctcgctcactgactcgctgcgctcggtcgttcggctgctgcgagcggtatcagctcactcaaacgtggtaatacggttatccaaagaattaagggagaaacgcaaggaaggagtatg

SEQ ID NO: 4526 - DNA, 500 bp, Glycine max
  Clone ID: LIB3028-031-Q1-B1-C8
cgaatgaattgactgagccctataaatgagcactgacgtcgcatgcacgcgtacgtaaactcggctatcatgccataccgcgaaaggttttgcgccattcgatggtgtcaacgtaaatgccgcttcgccttcgcgcgcgaattgcaagctctgcattaatgaatcggccaacgcgcggggagaggcggtttgcgtattgggcgctcttccgcttcctcgctcactgactcgctgcgctcggtcgttcggctgcggcgagcggtatcagctcactcaaaggcggtaatacggttatccacagaatcaggggataacgcaggaaagaacatgtgagcagaaggccagcaaaaggccaggaaccgtaaaaaggccgcgttgctggcgtttttccataaggtccgcccccctgacgagcatcacaaaaatcgacgctcaagtcagaggtggctaaacgcgacaggactatgaagattacaggcggttccccctggaggcgcctc

SEQ ID NO: 4527 - DNA, 494 bp, Glycine max
  Clone ID: LIB3028-031-Q1-B1-D5
tggatgaatcgcgtggctatagaagagcactgacgtcgcgtgcacgcgtacataagctcggaattgcgctctctgcattagtgaagctgcgatcgctcgtggagaggctgtttgcatcatgggcgttcttctgattcttcgcgcaatgacaccctggtcgcggtcgttcggctgctgagagcggtatcagctcactcattggtggtcataaggttagcgagaggttcaggggataacgcaggagagaacatgtgaacagtgggtcatcaaagtgccagggatcgtatgaacgccgcgttgcatgggtttttccataggctctggggtcggtggcgagcatcagagaagtcgacgctgaggtcatgggtggcggggccgagtggactagtgagatggcaggtgtttcccctggaatctccctcggtggatcacctgtgccgaaccttggcgcttgagggatgagtgttcgcctttgggcattcgggaaggatggg

SEQ ID NO: 4528 - DNA, 485 bp, Glycine max
  unsure at all n locations
  Clone ID: LIB3028-031-Q1-B1-D9
ngattgaatcacgtgtgcatatagaagactatgacgtcgcatgcacgcgtacgtaagctcggaatttgattgcgagtgagatatttatgccagccagccagacgcagacgcgccgagacagaacttaatgggcccgctaacagcgcgatttgctggtgacccaatgcgaccagatgctccacgcccagtcgcgtaccgtcttcatgggagaaaataatactgttgatgggtgtctggtcagagacatcatgaaataacgccggaacattagtgcaggcagcttccacagcaatggcatcctggtcatccagcggatagttaatgatcagcccactgacccgttgcgcgagaagattgtgcaccgccgctttacaggcttcgatgccgcttcgttctaccatcgacactaccacgctggcacccagttgatcggcgcgagatttaatcgccgcgacaatttgcgacggcgcgtgcaaggccagtcc

SEQ ID NO: 4529 - DNA, 514 bp, Glycine max
  Clone ID: LIB3028-031-Q1-B1-E4
aggcggttgtgggatgaaatcaagtcagcgtagcccaagagcagtgatatcgcgtccaggcctacgtaagatcggaatacggttatccatagaaccaggggacaacgcaggaaagaacatgtgagcagaaagacagcacaatgccaggaaccgtaaaaaggccgcgttgctggcgtatttccataggcgccgaccccctgatgagcatcagacaaatcgacgctcaaatcagaggtggcgaaacccgacaggacgataaacatatcaggcgtttcctcctggaatctcacacgtgcgctcacctgttccgaccctgccgcttacgggatacctgaccgccttactctcttcgagaagcgtggcgcattcacaaagctcacgctgtaagtaactcaatacggtgtaaggcattcagctctaacctgggctatgtgaatgaaccccccgttcaacccgaccgactcgccttaaccggaaagtatcgtcatgaatctagccccgtaagaaaaggatt

SEQ ID NO: 4530 - DNA, 513 bp, Glycine max
  Clone ID: LIB3028-031-Q1-B1-F6
tgcctccacgaatgaattaggttgcctagcctatagaagactatgacgtcgcatccacgcgtacataagctcggacttcagcgcgataatacggctacccatagaatcatgggataacccaagaaagaatatgtgagcactaggccagcaaaacgccacgaatcgtaaaaacgccgcgttgctggcgattttccagtaagctccgcccccctgacgagcatcacagaaatcgatgctcaagtcagaggtggccaaagtccacaggactatagagataggaagcgttttcgccctggaaactccctcttacgcactccggttccgaccctgccgcgtaccggatacctgtgggcgtttgccccttcagaaagggtagggctttctcataggtcacccggtaggtatcgcagttcgctgtaggtcttccactccaagctgggctgattcgaaaaccccccggttaagccgagcgcccggccttaaccgagaaactggagtcttagatccagaagc

SEQ ID NO: 4531 - DNA, 500 bp, Glycine max
  unsure at all n locations
  Clone ID: LIB3028-031-Q1-B1-H5
cgaattgaactgacgtggccctgatagatgagcactgacgtcgcatgcacgcgtacataaactcggctggcgtttttccataggctccgcccccctgacgagcatcacaaaaatcgacgctcaagtcagaggtggcgaaacccgacaggactatgaagataccaggcgtttccccctggaagctcgctcgtgcgctctcctgttccgaccctgccgcttaccggatacctgtccgcctttctcgcgtcgcgaagcgtggcgctttctcatagctcacgctgtaggtatctcagttcggtgtaggtcgttcgctccaagctgggcggtgtgcacgaaggccccgtgcagcccgagcgctgcgcggtatccggtaactatcgtcttgagtccagagcggtgagacacgacttatcgccactggcaccagccactggtaacaggattagcagagcgaggtaggggggggggtggtagagagttggggaantggggggcggaga

SEQ ID NO: 4532 - DNA, 492 bp, Glycine max
  Clone ID: LIB3028-031-Q1-B1-H8
ttccgctgccatgccatggctatgacatcgagtgcacgcgttacgtaaaagtaaactcgggtgccagttttccataggctccgcccccctgacgagcatcacaaaaatcgacgctcaagtcagaggtggcgaaacccgacaggactatagagataccaggcgtttccccctggaagctcgctcgtgcgctctcctgttccgaccctgccgcttaccggatacctgtccgcctttctcgcttcgggaagcgtggcgctttctcatagctcacgctgtatgtatctcagttcggtgtaggtcgttcgctccaagctgggctgtgtgcacgaagcccccgttcagcccgaccgctgcgccttatccggtaactatcgtcttgagtctaagccggtaagacacgacttatcgccactggcagcagccactggtaacaggattagcatagccaagtaagtagggggtgctagaggattcctaaagtggaggccaaaa

SEQ ID NO: 4533 - DNA, 462 bp, Glycine max
  Clone ID: LIB3028-032-Q1-B1-A10
aatgaatcatgtgtgcctatagaagaccaatgacgtcggatccacgcgtacgtaaactcggaattcagctccgccatcgccgcttccactttttcccgcgttttcgcagaaacgtggctggcctggttcaccacgcgggaaacggtctgataagagacaccggcatactctgcgacatcgtataacgttactggtttcacattcaccaccctgaattgactctcttccgggcgctatcatgccataccgcgaaaggttttgcgccattcgatggtgtcaacgtaaatgccgcttcgccttcgcgcgcgaattgcaagctctgcattaatgaatcggccaacgcgcggggagaggcggtttgcgtattgggcgctcttccgcttcctcgctcactgactcgctgcgctcggtcgttccgctgcggccagccgtatcagctcactcaaaggcggtaatacggtt

SEQ ID NO: 4534 - DNA, 464 bp, Glycine max
  unsure at all n locations
  Clone ID: LIB3028-032-Q1-B1-A3
atgacgagggcttatanggccttactgacggaagacacatcggacgcatcgagtacgtaagtgcggctcttcggggcgctatcaagccatagcgcgaaaggttttgcgccattcgatggtgtcaacgtaaatgccgcttcgccttcgcgcgcgaattgcaagctctgcattaatgaatcggccaacgcgcggggagaggcggtttgcgtattgggcgctcttccgcttcctcgctcactgactcgctgcgctcggtcgttcggctgcggcgagcggtatcagctcactcaaaggcggtaatacggttatccacagaatcaggggataacgcacgaaagaacatgtgagcaaaaggccagcaaaaggccaggaaccgtaaaaaggccgcgttgctggcgtttttccataggctccgcccccctgacgagcatcacaaaaatccacgctcaagtcagaggtggcga

SEQ ID NO: 4535 - DNA, 463 bp, Glycine max
  Clone ID: LIB3028-032-Q1-B1-B12
aatgaattaggctgcttatagaagaccaatgacgtcggacgcacgcgtacgtaaactcggaattgtgctcaaggcgcgttgctggcgtttttccatatgctccgcccccctgacgagcatcacaaaaatcgacgctcaagtcagaggtggcgaaacccgacaggacgataaagataccaagcgtttccccctggaagctccctcatgcgcactcctgttccgaccctgccgcttaccggatacctgtccgcctttctcccttcaggaaacgtggagctttctcataactcaagctgtaagtatctcaattcggtgtaagtcgttcgctccaagcatgggctgtgtgcacgaagaccccgttcagcccgaccgatgcgccttatccggtaactatcgtcttgagtccaacccggtaagacacgacttaatcccactggcaacaaccactggttaaaagaataaa

SEQ ID NO: 4536 - DNA, 470 bp, Glycine max
  Clone ID: LIB3028-032-Q1-B1-B4
cggctgcgaatgaatgaggtggcctataggccacactgacgtaggacgcacgcgtccgtaaactcggaatacggttatccacagaatcatgggataacgcacgaaagaacatgtgagcaaaaagccagcacaaggccacgaaccgtataaaagccgcgttgctggcgtttttccataagctccgcccccctgacgagcatcacaaaaatcgacgctcaagtcagatgtggcgaaacccgacaggactattaagataccaagcgtttccccctggaagctccctcgtgcgctctcctgttccgaccctgccgcttaacggataactgtccgcctttctcccttcgggaagcgtagcgctttctcatagctcacgctgtaggtatctcagttctgtgtaagtcgttcgctccaagctgagctgtgtgcacgaaccccccgttcagcccgaccgctgcgccttatccggtaaa

SEQ ID NO: 4537 - DNA, 460 bp, Glycine max
  Clone ID: LIB3028-032-Q1-B1-B8
tgaatggctttgtggcacttaataagagtagtcacgtcgcacgcacgaatacgtaagctcggaattgactctcttccgggcgctatcatgccataccgcgaaaggttttgcgccattcgatggtgtcaacgtaaatgccgcttcgccttcgcgcgcgaattgcaagctctgcattaatgaatcggccaacgcgcggggagaggcggtttgcgtattgggcgctcttccgcttcctcgctcactgactcgctgcgctcggtcgttcggctgcggcgagcggtatcagctcactcaaaggcggtaatacggttatccacagaatcaggggataacgcaggaaagaacatgtgagcaaaaggccagcaaaaggccaggaaccgtaaaaaggccgcgttgctggcgtttttccataggctccgcccccctgacgagcatcacaaaaatcgacgctcaagtcaga

SEQ ID NO: 4538 - DNA, 471 bp, Glycine max
  Clone ID: LIB3028-032-Q1-B1-C3
gacttgtgaatgaatcaggtggcctatatgccacaatgacgtaagacgcacgcgtccgtaagctcggcacttccgcttcctcgctcactgactccctgcgctcggtcgttcggctgcggcgagcggtatcagctcactcaaaggcggtaatacggttatccacagaatcaggggataacgcaggaaagaacatgtgagcaaaaggccagcaaaaggccaggaaccgtaaaaaggccgcgttgctggcgtttttccataggctccgcccccctgacgagcatcacaaaaatcgacgctcaagtcagaggtggcgaaacccgacaggactataaagataccaggcgtttccccctggaagctccctcgtgcgctctcctgttccgaccctgccgcttaccggatacctgtccgcctttctcccttcgggaagcgtggcgctttctcatagctcacgctgtaggtatctcagtt

SEQ ID NO: 4539 - DNA, 465 bp, Glycine max
  Clone ID: LIB3028-032-Q1-B1-D12
gaatgaatcaggatgcttatagaagaccactgacgtcggatgcacgcgtacgtaaactcggaatacggttatccacagaatcaggggataacgcaggaaagaacatgtgagcaaaaggccagcaaaaggccaggaaccgtaaaaaggccgcgttgctggcgtttttccataggctccgcccccctgacgagcatcacaaaaatcgacgctcaagtcagaggtggcgaaacccgacaggactataaagataccaggcgtttccccctggaagctccctcgtgcgctctcctgttccgaccctgccgcttaccggatacctgtccgcctttctcccttcgggaagcgtggcgctttctcatagctcacgctgtaggtatctcagttcggtgtaagtcgttcgctccaagctgggctgtgtgcattaaacccccgtttaactacacagctgcgccttaacccggaaaa

SEQ ID NO: 4540 - DNA, 470 bp, Glycine max
  unsure at all n locations
  Clone ID: LIB3028-032-Q1-B1-D8
ttgtcttgtcttttgttgctnctgntccctatggccntcggccgcccgantgcgtcacccccgccttccgccctcctccgctccctccgtctcggtctctcggccttttctcgcatttcctcctcgtcctcccgcggctctctcctttcgtctgcgccccttgttcctcgggccctgctgtctgtggttgtctgcggcgcctgggtccctgcgggcgtctcttcttcctcctctgtctcctgcctcgcgcttgtcttgtcgcccgtccttttccctgtcgggtgttgccgtcgttcttcctcctctgcctcgccgttgccgccttctttgccccctccctgcccgtccctcctctttttttctcctctcgggcggctcccggtggttttctttctgtccctgtccgcggctctcgttctcgttccttgcctgcgctgtctccgctttttcggtgtttcgtggctgctgtg

SEQ ID NO: 4541 - DNA, 468 bp, Glycine max
  unsure at all n locations
  Clone ID: LIB3028-032-Q1-B1-E10
ggatgaatcatgtttgcctatagaagaccactgacgtcggatccacgcgtacgtaaactcgggtttcacattcaccaccctgaattgactctcttccgggcgctatcatgccataccgcgaaaggttttgcgccattcgatggtgtcaacgtaaatgccgcttcgccttcgcgcgcgaattgcaagctctgcattaatgaatcggccaacgcgcggggagaggcggtttgcgtattgggcgctcttccgcttcctcgctcactgactcgctgcgctcggtcgttcggctgcggcgagcggtatcagctcactcaaaggcggtaatacggttatccacagaatcaggggataacgcatgaaagaacatgtgagcaaaaaggcagcaaaaaggcaagaatcgtaaaaaggccgcgttgctggcgtttttccatatgctccgcccccctgacgagcatcacaaaaatctan

SEQ ID NO: 4542 - DNA, 474 bp, Glycine max
  Clone ID: LIB3028-032-Q1-B1-F3
agggatgcgaatgaatcaggtggccctatagcgagtactgacgtaagacgcacgcgtacgtaagctcggaatcggccaacgcgcggggagaggcggtttgcgtattgggcgctcttccgcttcctcgctcactgactcgctgcgctcggtcgttcggctgcggcgagcggtatcagctcactcaaaggcggtaatacggttatccacagaatcaggggataacgcaggaaagaacatgtgagcaaaaggccagcaaaaggccaggaaccgtaaaaaggccgcgttgctggcgtttttccataggctccgcccccctgacgagcatcacaaaaatcgacgctcaagtcagaggtggcgaaacccgacaggactataaagataccaggcgtgtccccctggaagctccctcgtgcgctctcctgttccgaacctgccgcttaccggatacctgtccgcctttctcccttcgggaag

SEQ ID NO: 4543 - DNA, 477 bp, Glycine max
  Clone ID: LIB3028-032-Q1-B1-H1
gggcgaatgggatccgaatgaatcaggtggcctatagacacactgacgtaggacgcacgcgtacgtaaactcggaattcggctcgagtttatgtttacggtactgttatataaaaaaaaaaaaaaagggcggccgccgactagtgagctcgtcgacccgggaattaattccggaccggtacctgcaggcgtaccagctttccctatagtgagtcgtattagagcttggcgtaatcatggtcatagctgtttcctgtgtgaaattgttatccgctcacaattccacacaacatacgagccggaagcataaagtgtaaagcctggggtgcctaatgagtgagctaactcacattaattgcgttgcgctcactgcccgctttccagtcgggaaacctgtcgtgccagctgcattaatgaatcggccaacgcgcggggagaggcggtttgcgtatttggcgccagggtggtttttcctttc

SEQ ID NO: 4544 - DNA, 461 bp, Glycine max
  Clone ID: LIB3028-032-Q1-B1-H5
ttgaatggcttaggtgacactaaagaagaatatgacgtcgcatgcacgcgtacgtaagctcgggccgactagtgagctcgtcgacccgggaattaattccggaccggtacctgcaggcgtaccagctttccctatagtgagtcgtattagagcttggcgtaatcatggtcatagctgtttcctgtgtgaaattgttatccgctcacaattccacacaacatacgagccggaagcataaagtgtaaagcctggggtgcctaatgagtgagctaactcacattaattgcgttgcgctcactgcccgctttccagtcgggaaacctgtcgtgccagctgcattaatgaatcggccaacgcgcggggagaggcggtttgcgtattgggcgccagggtggtttttcttttcaccagtgagacgggcaacagctgattgcccttcaccgcctggccctgagagagtg

SEQ ID NO: 4545 - DNA, 463 bp, Glycine max
  Clone ID: LIB3028-032-Q1-B1-H9
tgaatgaatcaggttgcttatagaagaccaatgacgtcggaccacgcgtacgtaaactcggaatcaggggataacgcaggaaagaacatgtgagcaaaaggccagcaaaaggccaggaaccgtaaaaaggccgcgttgctggcgtttttccataggctccgcccccctgacgagcatcacaaaaatcgacgctcaagtcagaggtggcgaaacccgacaggactataaagataccaggcgtttccccctggaagctccctcgtgcgctctcctgttccgaccctgccgcttaccggatacctgtccgcctttctcccttcgggaagcgtggcgctttctcatagctcacgctgtaagtatctcagttcggtgtaggtcgttcgctccaagctgggctgtgtgcacgaaccccccgttcagcccgaccgctgcgccttatccggtaactatcgtcctgagtcca

SEQ ID NO: 4546 - DNA, 610 bp, Glycine max
  unsure at all n locations
  Clone ID: LIB3028-033-Q1-B1-A1
gagcgggcagggggcgtnctcgggagcgggccggggcgcgcgggcgggcgagagnagggggcgggcggggcgnagtgcggggacggacggggtgaatcaggtggcctatagaagagatatgacgtgggatgcacgcgtaggtgagctcggaattcggctcgagctcgagccgattcgggtccatcacatccctagcgctgtcgttccgtcgttgacgagggcgttgcggggtgcggggccgtgacctccgctgtctcgtgggtggctcgcgcgggtcgggggcttccgccgaatgtcgtcggcggagagcggggtcggtnaggggtggnggaaatcgaatgggtgaaatgcacatgggcggtggggggggggggggcgtagggtgngantgtgaggggggggaggggnagcagggggagtggagaagggctaatggactgaggtggtgggtnggggcgggtngatgtgcagagggggaggggggggtgagggcggggggggcgggggttcgggggtgagggggtgggggggctantgccgtgggaattttgtgtgtttgaggcgcgaatgggaagcggggggggcgtggggggtgggttacatgaaagtg

SEQ ID NO: 4547 - DNA, 459 bp, Glycine max
  Clone ID: LIB3028-033-Q1-B1-A12
ttagaatgcattaggtggctaatagaagagaacgacgtcgcatgcaagcgtacgtaagctcggggcgtttttccataggctccgcccccctgacgagcatcacaaaaatcgacgctcaagtcagaggtggcgaaacccgacaggactataaagataccaggcgtttccccctggaagctccctcgtgcgctctcctgttccgaccctgccgcttaccggatacctgtccgcctttctcccttcgggaagcgtggcgctttctcatagctcacgctgtaggtatctcagttcggtgtaggtcgttcgctccaagctgggctgtgtgcacgaaccccccgttcagcccgaccgctgcgccttatccggtaactatcgtcttgagtccaacccggtaagacacgacttatcgccactggcagcagccactggtaacaggattaacagagcgaggtatgtagg

SEQ ID NO: 4548 - DNA, 587 bp, Glycine max
  unsure at all n locations
  Clone ID: LIB3028-033-Q1-B1-A2
gaggaggagaggggagtncnagggagaggggaggggggagggagggaggaggaggggtagggggaggggcgcggagggggggcccagnaggatgaatttagtagctatagaagacatagggtgggaatcacgcgtaggtaaactcggaattcggctcgaggtggccagagggggacttctgtcagttaagggtgacttctttaaggagtagcgggggggagggaagcgggcggatccgatgtgatgttcgagggcgagggaagggtggagggggatcttgtgggcatttgcgcgagggcaagtgggatcgagtgggggctgtggctnagcattgcagcagtgaagtggngggtggggggggggtgggagtggaataggaagtatgagggggagggtggtgaggtgagggagatgggcatcgtcgtgaaggacgggagagggagggatgaaggctgagggggcgggagggtgagggggggcggggagggctgggaggtggggggttggaggggttccgntgaaatttaggtgggtgcgggatgcagtggtggaaggggagcaggggggtggcggttcaagtgtgcccg

SEQ ID NO: 4549 - DNA, 458 bp, Glycine max
  Clone ID: LIB3028-033-Q1-B1-B10
ttagaatgcattaggtggctaatagaagacaacgacgtcgcacgcacgcgtacgtaaactcggaattcggctcgagaacaggagtagcttttagagattattttactcccttcataaaaaaaaaaaaaaaaaagggcggccgccgactagtgagctcgtcgacccgggaattaattccggaccggtacctgcaggcgtaccagctttccctatagtgagtcgtattagagcttggcgtaatcatggtcatagctgtttcctgtgtgaaattgttatccgctcacaattccacacaacatacgagccggaagcataaagtgtaaagcctggggtgcctaatgagtgagctaactcacattaattgcgttgcgctcactgcccgctttccagtcgggaaacctgtcgtgcaagctgcattaatgaatcggccaacgcgcggggagaagccgttttcgtat

SEQ ID NO: 4550 - DNA, 457 bp, Glycine max
  Clone ID: LIB3028-033-Q1-B1-B12
tcagattgcatcaggtggctagtagaagagactgacgtcgcacgcaaacgtacgtaagctcggaattcagctccgccatcgccgcttccactttttcccgcgttttcgcagaaacgtggctggcctggttcaccacgcgggaaacggtctgataagagacaccggcatactctgcgacatcgtataacgttactggtttcacattcaccaccctgaattgactctcttccgggcgctatcatgccataccgcgaaaggttttgcgccattcgatggtgtcaacgtaaatgccgcttcgccttcgcgcgcgaattgcaagctctgcattaatgaatcggccaacgcgcggggagaggcggtttgcgtattgggcgctcttccgcttcctcgctcactgactcgctgcgctcggtcgttcggctgcggcgagcggtatcagctcactcaaaagcggtaa

SEQ ID NO: 4551 - DNA, 603 bp, Glycine max
  unsure at all n locations
  Clone ID: LIB3028-033-Q1-B1-B2
gtgaggagtagggaagagcncntgaggagagagggaggaggaggcgagatagggtgaggaggagagagggagaagggaggaggagnacgggaaggctggcancagnagaattgaattcaggtgagcctatagaacgacaatgacgtcgcatccacgcgtacgtaaactcggaattcggctcgagcatacttctttttgatgatgatgttgcgaaggttgctgattttgatttgtcagatcaagcgcgtgatggaagaacaacgtcttcagtcaactcagagtcttgagaagttgggggatcaagctccaaaatatggaagtactggaaaactgcaggtgaanagagttatgtttaaaagctttagagttgtaaggggtgggaaggcaggaatggccagaaaacaattggatgaagagcggtggacgaaggacagcaaagcccgtggtgctttgngcaagaaacaaagtcttaatggaatgagaaagtgaaacaataggttagangtgagactagaaggaagcagtagcggtggaanatcagtttcgaaagaatggctgcggtttccggcattggtgtagtgcaatatgagaactgagttttca

SEQ ID NO: 4552 - DNA, 584 bp, Glycine max
  unsure at all n locations
  Clone ID: LIB3028-033-Q1-B1-B6
gaggggcagaggggtgctnnagggagcgggcaggaggggcgaggagggagagaggatgagggagggaggaggggngnaggcgggggaggaccgccggacgagtagcgaagcaattaggtgacctagagaggaggaatgacatcggacgcaggcgtacgtaaactcggcccgcgttttcgcagaaacgtggctggcctgggtcaccacgcgggaaacggtcggagggggggcgggctgggggggcggcgacatcgtagagcggggcggggtgcagatgcacgaggcggaattgactctctgcgggagggtatcaggggacggcgggggtaaggtgttgcnccatgcggtggtgtcgaggtgaggggggggggctggagtggncaggaagtgcaggctggagggtggagcggtgtgggagnggggcngagagaggcgggttggacggggggggcgctcggccgggggggggggtcaggggagggggcggggggcggggggggcggggggnnggagggngtagcaggggactcaaggggcagtgggaggggttagcgggggacgggggggggataacgcgagcgaaa

SEQ ID NO: 4553 - DNA, 626 bp, Glycine max
  unsure at all n locations
  Clone ID: LIB3028-033-Q1-B1-B7
gcgagggaggcaggagtnaagaagagggggaggggagagaggaggaggagaggagnagcaagggggaggagggnacggggcgcgaggcacgggcgacattagggagcgaatgaagtggcacgagcgaagagagatgacntcgcacgcacgcgtacgtaagctcggaattcggctcgagcagggacctgccaccgaagaacgaagtagcccatgtgtcaacacaggaggaggggaaggagggcaacagcattagtagtcaggcagagaggncgtggagaagcgggggcacaaagtccaaacttgcacggaagataaagggtgcgggggggtgaggtggcatgaacgtttcgagatttggaagaaggaagagcggcgcgagaggagnaggtggagccccantgggtggtggggaggcgatagggatgttcggcgtcgggtntctgccagtgtcggggtgagagggggagggncacaaagggagtgagggaggggtcaaggagcggacggggggggtgaggtggggagggacgggaggatggggaaggtggntaggagagggatngtgtggggaagccagcgcagaagggttttggggcgggcagaggtggtgaacggttccttgaata

SEQ ID NO: 4554 - DNA, 596 bp, Glycine max
  unsure at all n locations
  Clone ID: LIB3028-033-Q1-B1-B8
gggggaggggaggcatgggaggaggaggggagagggaggggagaggagggggaggggagggagggnaggcggagaaggggagaaggacgacatccagaatcaatcaggtggcatagggaggagaaggacgtcggacgcacgcgtacgtaaactcggaattcggctcgagggaaaactgtcatcacagagaaaaagaatgtgatagatgggagggggaggggcatggcgggagggttcgctgctagtggcgcggcgaggcgtggggggagagaggacgtggcgagaactatgcgggggaggcgaggcggcgggagaggggcagcggcgtgtcagancggaccaggcgggtggtgtggggggggggagggtagggcgatatgaanacaggaggggggggggaaggggcgaccgggcagggttttgcagtagatggaggagaggggggggactgtgtgagttggggaggggggcaagggcgggggggggggaggcggaaagggggtgggagggttggagaggcntaaggccggggggtctgagggagggacgagcagcggtcaactgggggaggggggtaggagggacccagagtcaga

SEQ ID NO: 4555 - DNA, 565 bp, Glycine max
  unsure at all n locations
  Clone ID: LIB3028-033-Q1-B1-C2
gagggcgagaggggcgctnnagggagaggggcgggggcagggaggggagaggaggggtaggggagggggcgacggggggcgggctcggcgaatgaattaggtggcatatagaacggcaatgacgtcggagtgagcgtaggtaaactcggaattcggctcgagatcatttctccatttccattttctctcgcacttttcaagaatcgtaagcggaggggggagtggacggggctgggactgctgattgcgaggagggcgtcgagagggggagggaggagcgcagaggcttgatcggggggaagagaggcggtgggggaatgggccgtttggcatggcactgctgctggaagcgtgggggggagggcgaagagggggggaggcttgggaggcggcgggcaggtgtgcaggactggctgagangggcgggacggggggggtgataggagcggtgaggcttttggagcgggggcgggggggagttggggtggggggagcggggccnaattccaacgagttgggtggcgtttggttgccttggaagcggagggtgagcctgaaatttcaa

SEQ ID NO: 4556 - DNA, 578 bp, Glycine max
  unsure at all n locations
  Clone ID: LIB3028-033-Q1-B1-C4
gcggggaggggcgggcngagtgcgggagggggccgggcgggaggaggaggggcggggaggggggnaggggagccgaccggacggattaatcacgtggcctatagagcggcaatgacgtcgcagtgacncgtacgtaaactcggaattcggctcgagcgaatgggaaacctatggagaggtatttgctcgtgtgtccaattttgcagcggggggtgggggggtgggccgggctggagagaagcgtgttgcgagtgtggcgggtcgcggggctgagtggctcagtgcccggggtggttgcggcagtggggagggggganttgttacgatgtatcgttcagtgagtggggggggggacgggtggacagactgcatccggagggacgggagcgagggcggagggtagggtccagntgagtcaggtgggcgggggggggaatatgagtcaacgaggggggatcggttgcggaggggtgggcgggacgtgggggtagggggagggagagggacatgccgtggcgccgggaaggttcgagcgncgtgggtcaggggggacggggggcagtgaaagttgagaaaac

SEQ ID NO: 4557 - DNA, 595 bp, Glycine max
  unsure at all n locations
  Clone ID: LIB3028-033-Q1-B1-C5
gggggtggggaggannagggaggggaaggggagagaggggaggagagggagggcggagggaggggagtggggagatagggctagccaggacgcttaaaggagacgaatgtaagtggcccgagagaagggatatgacgtgggacgcacgcgtacgtaaactcggaattcggctcgagggggtgtgtaggtgcctcaagagcactgttttgagcttggggtgggggggggcgggcgggggtttgaagcctccctagcgtggtggaggtggagtggggctagggggtcnagcccaccagtgagtgggagacgggggagtggtgggggtggtgcgcnatggttttacgcttgttgaggtgggagggggggggggcggaggaggatcgagcacaacaggggaggagggtgttggtgagtgggcgtcgggtgttgtngatgccgggtgggagggggcggataatggtggggtgggggaggggggagagaggaggggggggagcggtgagggggtgggagggagggggggntncagttggggggtgggggagggagggggngggggagcgggggggagggggggggggcgcaataggtagtg

SEQ ID NO: 4558 - DNA, 574 bp, Glycine max
  unsure at all n locations
  Clone ID: LIB3028-033-Q1-B1-D3
gaggggcgggggagacnagggagggggcgggggtaggtgggaggaggaggggcggggagggggagagggggggcgggagtgagtaattagtggcatattaagggcaacgcgtgggagcgcgaggggcaagctcggaattcagctcgagcaacagtgtctggtcgaggaagactcagggctgtgttcaagaaagacggaagcaggagggggggggggggcgagcgaggtgagcgagtgggggtgagggggtgtgcggatggggggaagtgttgcattggaaaaggggctactgggagcggtgggggaggaggacttttgcacgggttggtgtgtggcgagggggaggggggggagtaggccgagcgagctggaggggggggggctggtggncggggtgcgggtatagctgtgtggggagggatgggggggtcacatgtgaggtggggggggggcggcgcgggtagggtggggagggcggggggggcggcgggggggggagggcanagnaggggtaagggggagatggggcggtggatgtgggggggggtgggagggcggaggggtgcaacagggt

SEQ ID NO: 4559 - DNA, 586 bp, Glycine max
  unsure at all n locations
  Clone ID: LIB3028-033-Q1-B1-D4
gggggaggggggacnagcggagggagggggtggccgggaggaggaggggagggggaggggagcggggcggcgggggggaggatgaattaggtggcctatagagggcatagggtcggagtgagcgggggtaagctcgggattcagctcgagctcactcactcaggcactcactcagtcgcagggaaaaagaaagaatcccaggcgggggggagggtgggggggagtgagcagggtagtgcgttgcgagggaggaggggcgggggagggacggccgattgggaggggggcncatagggagggtgggggcaggggctaccaggagccgngcccgggctggggagggagggggggggagggaaggtagcgtcagtgtgaggggaggggaggaggggatgcgagggttgggttngggagtgttcgggtgggcggggaggggaaccggtgtgaacgggtgaggggggaggtcggggaggacggggaggtcgagggggggagggcggttcggagagggcancggaaggcgggttggggcgttcgggtggcggtggatcgtgggggaggggggtaagtggaaccggctgggaat

SEQ ID NO: 4560 - DNA, 626 bp, Glycine max
  unsure at all n locations
  Clone ID: LIB3028-033-Q1-B1-D6
gaggggagggggagcctgggaggggcgggggcggcaggggagggaggggggggggggcgagagggagggggctagcgagcgcctcagaatcaatgaggtggcacagggaggagaatgacgtcggacgcacgcgtacgtaaactcggaattcggctcgagcaggaaccctaggtagagagctcttcctccctttctcacaggagggggcggcgggagggggccgaggtcgtcagcggtgcgggggggtgaggaggagggaggggaaggggagtgccgtgcgccacgcgtggcgggcgcctgacgggggggggaggggagctggggcnccccngacagtcgtcacggttccccgctgagggggggggggggtgggggnaggttgtgcctgtccaggggggcggggggantgtggggcngcgttgtcgacgggnaccngccagccgtagggccgggggtgggggggggtnctgagcgccgtctggggggtgagcggcccggtggggggaagggggtaggggaggggggggcgggtgggnnggtgtgggattccgtttggggagccaggtgggccgcgggaggaggaggcatgggggggcgacggggggtaggatgtgggcgggcggctt

SEQ ID NO: 4561 - DNA, 628 bp, Glycine max
  unsure at all n locations
  Clone ID: LIB3028-033-Q1-B1-D7
gagagggaggggaggacnacggggaggggaggggagagaggaggggagagggaggggagggggaggggcgtcggggcgtggaggggccgggcggttccagagccanattaggtcgcatagaggggggataggacggcggacgcacgcgtacgtaagctcggaattcggctcgagtaggtacacgcacattcggggcaaagacaacaatggcaccaggagggggggcgcggaggggcgtgggcgagggagatgagccgaggtgaggagcagtcgggggtggaggaggagggagcgtcccagaggtgggcgacaacgggagggagcggggagaggtggcanctgatttcgacgtgccggtgatggacggggggggggggggtggggataggtagagatcgtgtaaggagggtggggnnatgagagtgcgaagagttgggagtaagaagcgacggtgtgggagggggcgggtnntctgtggggtggggtggtgggggggggggggagcggggggggggggagaaggggggggggtggggtggtgggggtccnnagcnaggggaggcgtgggggtttaggagagngtggtgggaggtggggagacgggggggggggcaatgatcgccaatcg

SEQ ID NO: 4562 - DNA, 459 bp, Glycine max
  Clone ID: LIB3028-033-Q1-B1-E11
actgaaggcatcaggtgctagtagaagagatcgacgtcgcatcgcaagcgtacgtaagctcggaattcagctccgccatcgccgcttccactttttcccgcgttttcgcagaaacgtggctggcctggttcaccacgcgggaaacggtctgataagagacaccggcatactctgcgacatcgtataacgttactggtttcacattcaccaccctgaattgactctcttccgggcgctatcatgccataccgcgaaaggttttgcgccattcgatggtgtcaacgtaaatgccgcttcgccttcgcgcgcgaattgcaagctctgcattaatgaatcggccaacgcgcggggagaggcggtttgcgtattgggcgctcttccgcttcctcgctcactgactcgctgcgctcggtcgttcggctgcggcgagcggtatcagctcactcaaacgcggtaatg

SEQ ID NO: 4563 - DNA, 599 bp, Glycine max
  unsure at all n locations
  Clone ID: LIB3028-033-Q1-B1-E4
gcggggaggggaggntngaaggagggcgggggaggacgggganggagggggggggggatgggnaggagggcgcgtctctngaatgaatgaggtggccctataggagagcaatggcgtcggaggcacgcgtaggtaagctcggaattcggctcgagaagatcacgaacactttgctggtgccactcgttctgacttctcttccaaagggaggtgggggggcagagggtaggggcgcagaggagagccgtgcgtggcacgaggggaggggggggaagggcttgacgtgagaggggagcctgtgggcgaggagggggtgaggggacacgtggagtgaccgagacggagtgggggagggggggggcaggagnagcaccgcgctganctgagggcgagggggtggnggggctgagacgagnagggacacngagttgctgggagggcggggggaggcccaagtgccattgggtgggggtggggttgggggggacggggagggaggtgggggtgggcgggncggagagggatngtccgagagttgccccggaatgcgtgatggcagcgtttgggcggggagagggggcggcgaaggaaaccacaaa

SEQ ID NO: 4564 - DNA, 635 bp, Glycine max
  unsure at all n locations
  Clone ID: LIB3028-033-Q1-B1-E5
gagggagagaggggagcnttggggagaggggaggggagagcggggggagagggaagggggggagggggagtagggggctgggctgacggaacgtacagagctaattaggtggcctagagaagagataggacgtcggacgcacgcgtacgtaaactcggaattcggctcgagaacggtattaccttctttgagagagaaacacgatgaatttatggtggggagggggtaggggggagatcgggaagccatgagaggtggtgggtcggtgtggttgctggggggcgttgattatgttggatcgagggcgttattggggcggggagggaggtggcggcnccttgaatgagagtttgggttgaaagtgagtgggggggggggcggagttggaatgagactganatggtgaggaggtgggatgaggagangngatgtagagagaatatagatgaagtagggtgggagggggagaagggnnattagagtagaggggcggatgtagggggggtggtgcggtgggtgggagggtgtggggggaggggggggttggtgggggacatggaattggggganggaggagtgaagtgtgnaaggtgggccatgggcagaggaggggagggtccgttcttaggtaattg

SEQ ID NO: 4565 - DNA, 664 bp, Glycine max
  unsure at all n locations
  Clone ID: LIB3028-033-Q1-B1-E6
gggggagagggggtgcnttgggtgcggggaggggagagaggagggaggaggaggggggagggggctgggnaggggaggcagggggnaggaagcatancgaactaattaggtgacagagagaggagatatgacggcggatgcacgcgtacgtaaactcggaattcggctcgagcgtctccttcctttgtcgggcgaagatcctcttttagggttggaggtcggggggtaggggggagcggcagacagagcagcgtccgggtgcagctgcatcggcagcagtgtggcggtcgtgagaggtgtgtgttgtgggggatcgttgaggggaggagtgggagtgagagagtgntccaagcaagtcagggtttgcaggaggccgagtggcgagggtggtgcggagttcggctcgagntttggannccggggggaggggagcggaagggggtgtgttggtgaggtgagannacagntgttgnatgggtgagggggtgcgggggggtcctcggtgatccatgtgggtgagcggtggggagggggtggccgagggnagagcgtcggagggnagggagtggttggtgtagagattgaggagcggggtgccgtgggggagggcgtgatggtctagcagggggtgagagcggggtgttggggccaatgcacaagttaa

SEQ ID NO: 4566 - DNA, 616 bp, Glycine max
  unsure at all n locations
  Clone ID: LIB3028-033-Q1-B1-E7
ggcgaggtagggaggagcgncagcggagtgagggaggcggggagagctgaggagagaggagagagggagggagagcggaggtgnaggagcggtgaggcatagatgagacctactccacgagtccaatttaggtcgcacgagagaagagagaggacgtggggcgcacgcgtacgtaagctcggaattcggctcgagccgagggcaagccaactcgggtcgaccttcactaaaactcttggagggcgggggggcgggggctggggcatcagcacagcagcgggtgcgtgctgagaggcagggggaagttgactgttagggcgagggcgtcanagggagaggacggaggtggnggattcagccaatcaacggtgatcagtgcgggtggggggggtcgggacggcagcttagatcgaggggggagtggttgcgaggngacttgagcagggcctcgccgcagtagggggggcaggggtgggcccacggccgagggggggatcggggggggggggggggggaggggggagggggtgggagggtgggagggcnttgaacggggggaccggtgaacggagggcggtagatgggggggagaagggggggtgctctcggcggctga

SEQ ID NO: 4567 - DNA, 616 bp, Glycine max
  unsure at all n locations
  Clone ID: LIB3028-033-Q1-B1-F1
gggggagggtggggncggggcgggagggggtaggtgggaggcggagggggggggagggggcgaggggtgccggcggagatgaatgaatcacgtggcctatatgaggccaatgaggtcggaggcgagcgtggctaaactcgggctcatccgcttcctcgctcagtgaggcgctgcgctcggtgggtcggctgctgcgagcggtaggagggggggggggcggggggtgggggcgatgcgatgagagcgggtgaggagcagcagggggccgggggggtggcgaaaggggacaggaggagggcaanaggggggggngggagggngcggttnccagggctttttagtccaaaggtcgcngagggggggggggggtgggggtaggnagagtcaggtntggtggggcgggggctggggggangcgccgtggaggggcctcgaaatagtcgggatgggtgaggggggcggtccaagtgcgccgggggggagtggggcggggggagcggggggggggcgcgtggggggggggagggggggggggggcctttgcccggggggngggagtggagggggggnggtgggattgtgggggtgggaggagaggggttttccagactcccga

SEQ ID NO: 4568 - DNA, 613 bp, Glycine max
  unsure at all n locations
  Clone ID: LIB3028-033-Q1-B1-F3
gggggagggggcgattgggcggggtggggagagggagggcggaggaggggggggaggggggcgaggggcggggggaagccgattgaatcaggtggcatataggagagcaatgacgtcggagggacgcgtgaggtgaactcggaattcggctcgagctcttttaggctagttccttctcttagcagaattggttgtgccaattgccatagggcggggggggatgggggaagggtacgatgtgtcgtgagggggagcggcgggatgagggggtggggggttggttgtttcttgggggggtgngctacggggggtggaggggagaggaggnnctgcgtancgttgtaccaaagatgttgagaggggggggggtggtggtggancgtgccaggaagcgggggaggagggggagggcttcgggaagcggcgcccngtgagngnacgggtggggggggcgggggtttctgcgccgagggaggggagtactgtgtgggagagggggggcggagatgagggggtgggaggggtggtgcggggnnntacctcgggcgtgggagcggttgggtggcggaggtagggtgggcagcggcgggggggcgtagctcaatggacgaag

SEQ ID NO: 4569 - DNA, 582 bp, Glycine max
  unsure at all n locations
  Clone ID: LIB3028-033-Q1-B1-F4
gcggggaggggagggttcgcgaggggagggggtggaagggaggaggagggcaggggggatgggngaccggaggttcggcagtaattagtgcctatgagggcaaggcgtcggaacgcgagtagtaaactcggaattcggctcgagcaaaattagtcaacttacttatttagtcgcggaaaatggttgatttacattggggaggaggggtggggggttgggaggtgccgtcgagggggagggatgtggctctggccgggggacaagtccttacccgcgagggaactacggatccggtggggagnagggctctcactccgcagtcgtgtagtaagcagagagagaggagtagtgatgtccaggttcgtcaaggcaaggggagcggtggggagtgcagagnagggttcctaaagtgctgggagggaaggggagggtaaatgcgtagacggggggaagcgggggggggggaggcagggagagggttgcgggggagggagggcagggcgggnttnaagaggcgggagggcgagcgaacagaggaatggaaggcggaggggaggagggtgggcgttatccagagaacaa

SEQ ID NO: 4570 - DNA, 636 bp, Glycine max
  unsure at all n locations
  Clone ID: LIB3028-033-Q1-B1-F6
gaggggagggggagannagagagaggggagggggtaggggggaggtggaggggggagggggatgggnaggggggcgggggagacggtcgctaccgagataattaggtgacgtagggaggagataggacggcgcacgcacgcgtacgtaagctcggaattcggctcgagctctaagatccaacaaggtcggcatatgctaatttgggcaggcgggtgcgggggggagggagggtggtggggaagtgcgtgcgcgggagagatgcagggaggggggagggaaacgggggcggccgcggagagggtgagcgcgggggagcaggggagattgagagtccggaccgggtaggctgcgccgcgagatgaggggggggggggatggnggaagtcnagagtaagancgaggggaggaggggagggggggatgncgtgtagtgtgaggtnttgagatgtntgggtcgagcgaggggagagtccnacgcgacagatgggggggcggggggggcagggagggtcgaggggggcactggggggggnagggagggatggcgagggaaactgcagagggaattggcagtgtgcgcgtgaaggtctgcgagcgggcgagaggcggggaaggtggtggtccgtggccaagtg

SEQ ID NO: 4571 - DNA, 599 bp, Glycine max
  unsure at all n locations
  Clone ID: LIB3028-033-Q1-B1-G3
gtgggagagaggggagnnncagggagagaggtaggggagagaggagggagggagggtgaggcagggaggaggggngnaggcgggggcgggtccgacgaatgaatcaggtggcctataggaggcaatgggtgggagcgagcgtgggtaagctcggaattcggctcgagcttccttaggacgccgcaaagaaaagccggcttaacatctcgtctctgaaaattctgggggggggagggggagagaggaagagagagtggcaggtgagacgggggaggcaagggggtctctgagcacaaagtgggcggtctcagggccagggggggangcgaggtcagttttttccgccaaaaggaggtaggggtgggggggggagggcggagagggggagcgagggggaggggaggtgaggtaggtgtgaagggtnttcgagaagggggcgggcgggggagggngtgagtgggcctgggggtgcagactcagggaggggggggagaggagcgggggtggggggagggaggggaantggtgtttgggaaggagcgagcagggggcgagcaacgagggggggagagggcgggaggtccagtcacgcctcaata

SEQ ID NO: 4572 - DNA, 618 bp, Glycine max
  unsure at all n locations
  Clone ID: LIB3028-033-Q1-B1-G5
gcgggagagggaggagnnanagggagaggggaggggagcgaggagggaganagggtgagggagggaggggaggagaggaggggtggagcggaagaggnactacagaatcaattaggtgacctagagaagagatatgacgtcggatgcacgcgtacgtaaactcggaattcggctcgaggcaagtggaaacttatcagagtacgaacggggtaggaccaagggatggaggagagaggggggcgggacagaaccggtgggaagcagcgtgaagaggaacagaggaggggataagcctgctcagcagaggggagtgacagggggaggcagggggngtgtgagnaagatgatcttggaaaggggaggtgtagggcggagggggagacgaaggacgngagttacagggggggagggggcaccgcgagtatgtagcagcggggatcaagaagtttaagggaaggaggaggtggctaccngagcgtcgggtgggaatcgtctgggacggtgtggagagggtgggaggagggtagggagagaggggtgggccnaagttagagagtccgtcagagttgtggggcaagggccttcggggagcgggggctcgaactcaaacccaccctg

SEQ ID NO: 4573 - DNA, 629 bp, Glycine max
  unsure at all n locations
  Clone ID: LIB3028-033-Q1-B1-G7
gggggagggggcctgggggggtgggggcggtgggggagggggggggggggggggcggggggagggcgcggccagtcagagcaattagtgcagagagaggaaaaggacggcgcatgcacgcgtacgtaagctcggaattcggctcgagctctctgctcaactcaaggtgttcagtaccgattcctaatgccgagggtcggggcaggggtgccgggcattcagagcagagagagggtgcggaggcgagggtggtggggaggccaaggcctaaccgtgagcgatggcgcngcgaggagaggggcgagggcgaagcagagatgggtcctcgtccagatgcaccgtctggcggcgggggggggggggatgggcggcaggacggcagaaagtcccgagaggtcggacgggtagatcgcgatgtgttgccgnaggagcctttcgttctgctcgggacgggcgagggctgcggtccnnagagccgtcgggcgaggcgtcggccgaggggcgggaggggggaggggaagagggggagggtgggttagggtgggccaanacgtcggggcgtgaagcgcgccaaggggggcaggcgcgcgtcgtggggcgaggagggggtgccgtcgatttggggagctg

SEQ ID NO: 4574 - DNA, 637 bp, Glycine max
  unsure at all n locations
  Clone ID: LIB3028-033-Q1-B1-G8
ggggagggtgggccncgcgggggtgggggtaggtggggagagagggcggggggggagtgtagggggagggctgttggttaatgccggagtccaatgaagtggcaggacggaggggagatgacntcggatgcacgcgtacgtaagctcggaattcggctcgagcttcagcccaatcacagggtcgggtagttgttgcgattagtgtgggggagggagtgtgggggatgggacggccggcggcgagtgggggcgtgcacgtgagagaggagggggcggggcgtgagggcaagggggacgaggaggtacagaggggaggacggggggntgtggcaatatgttttcggcgaatgcagtagatggttgcggggggggggggggtcggggtgactaagagangccangagtgggagggggnnggnggggcncgtttgcagnagggctttctgngaagcagggtaggagggggggggggaanatccggagganagggggggggagggggcggggggtggaagagggnggtgggggggggggacgggagaggtggagtgggntnntagccggagggttgcggtggggtcgctgtgttgctaggtcttggggggcgaggggacggaggcgggggaccgacgcaata

SEQ ID NO: 4575 - DNA, 600 bp, Glycine max
  unsure at all n locations
  Clone ID: LIB3028-033-Q1-B1-H1
gggggaggggaggactgggcggggtgggggcggggggaggagggggggggggggggggnggggggagggtgcgagtacttagtgcctatggaagcaaggcgtcggaagacgcgtgggtaaactcggaattcggctcgagcgggacaattttcatgtaagcactcatcggcagccaaacatgccccaccggaagcgggggagggctgggggcagggtcagtcgagatgagcaggggtgaggcgggggcgtgcggcggggtgctcgggcaacaagagatcagggagccaancatgagggtgtggggagttgngggctcgagactgtcagtactaacgtgagtcaaggggggggggggcaggcgaaggacaggcangacacgagggcgcgggggtggaggtgcagatggaagaggggaanggtgtgcgatcgggtgggtagagggggggnancgggcggcgacagcggaggaagcctggggtgcgcgggggggagggcgggagggggtaggggggtagggagggttcaaggtgtggggangggtgagttcggggggccgtgagagatggggggtgagggagggggggaacttttcggtgccca

SEQ ID NO: 4576 - DNA, 575 bp, Glycine max
  unsure at all n locations
  Clone ID: LIB3028-033-Q1-B1-H2
gaggggatgtagggacncgggggggagagggggaggaaggggagagtagggggggaagggatggagagaggaagacgtcagcgaatgaatgaggtggcgtatatagtagaatgaggtcgcaagcacgcataggtaaactcggaattcggctcgaggcaatgtcgtgagtgagttggttttttcggtgggtctcctgagctgtgtttaggcgcggtgggtgcgggagcatcttcgagctccgatngcgagccggtgtctcgcgggagggggcatgacggacaacgccagcgggtacgagggggtggcagttgtggtgagaacccgatggagccgagtggaggaggaggcgggggggggagtgcaagagctgtcgcgggacagggggtcggcgggaaggagggcagagctcttgcgggttcaaggaaggggggggggacncagtcggtcgcggtcgacgggggggtgggggagggtggggacgtgggggaggcagggagngtgggccaaggaaaatcgtcaagaaggccgaggggctttggaagcggtggagggcgcgtccgacaacaaggtacttt

SEQ ID NO: 4577 - DNA, 570 bp, Glycine max
  unsure at all n locations
  Clone ID: LIB3028-033-Q1-B1-H3
gggggaggagggantagggggggagggggtggcaggggagaggaggggagggggggaggagagcgagggggggcggacgaatgaattaggtgacctatacgagggcaatgaggtcgcagtacagcgtaggtaaactcggatgccataccgcgaaaggttttgcggcattcgatggtgtcagggtaaatgccgcttcgccgtcgcgggggagggggatggggggcggtagggaatcgagcgtcgggtgaggcagagaggggtnagggggttgggcgctcttccgcgtgggaggctcagggaggggcgggggctggggcgttcggctgcagcaggcggtagcgagtgagggggggtggggtaggtacggttatccacggggggcggggggagaggngagggtgngaggatgtgacgcaaagggggagcgagggacgggatcagtgccgtgggagagggcgcttgcaggagggggagtgcagaaggggggggggggctggggggnaatcanaggggatcgatgcgcagggtcggaagagtgcggggggcgggagggggcgataaagattacaa

SEQ ID NO: 4578 - DNA, 612 bp, Glycine max
  unsure at all n locations
  Clone ID: LIB3028-033-Q1-B1-H4
gagagggagaggggaggcgaggagggggggagggggtagggaggggagagtagggggggcaggagnagtgnaggagacggcgaggcggagggacttaagggccaatgaggtggcgagggtgggagtgacgtcggtgcacgcggaagtcagctcgaatcaggctgcaggacatttgcgaccgtggggagggataggaacctaggaggcgggggagggaggggcggggggggagacgacgtgttgcgtcggggtggaaccggggtgagagggggggagaggacaaaggaatgaagagggactaagcggggaggaagggtgacgngggnaagcatttaggcgcatctggggacggcagaggggggggggggaggggtgacttgagtgtgctccgcggggaggggtgnggtggggctgngnagccgnagggcccacccagaggtaggcaggggggaggtcgggntaacgggcagtaggggggagggagnggggggggaggtagagggcgggggggggggggagggagggttggagaagcttangcccggggagcatgaggggcagggggggggtcgatagggggaggggggcgcggggggattccaagcgggttaa

SEQ ID NO: 4579 - DNA, 557 bp, Glycine max
  unsure at all n locations
  Clone ID: LIB3028-033-Q1-B1-H5
aggggcggggaggangagggaggggtgggggtggaagggaggaggggggggggggaggggagaggggaggagggggcaagcccgatgacgaatcaattaggtgacctagagaagagatagacggcgcatgcacgcgtacgtaaactcggaattcggctcgagggttgttgctcaagaagtcagaggggaatgaatgctttttcgcagaggcgtgagcaggggatgagtggttcccctgaggggcagagggagagggagggnagggaggaagaatttcgtttcggggaggcaatgggggggcgcggaggcagaggnggacccttgaggaggaacaacggtaggagggggggtggggaaggaagggtcctaaagggagggggaggtggggtggtgggtgggtgcggctgcgctggcggggggggcaggggctgcgtggggggcagactctgcgggggggaggcgagcagcggggggcggggggnaggggggacccangggggttcaagtggggtgtggaggcgagggggggggagggaggaggtgggaaatcaaggtta

SEQ ID NO: 4580 - DNA, 594 bp, Glycine max
  unsure at all n locations
  Clone ID: LIB3028-033-Q1-B1-H6
gaggggtgaggcgggantagggggggggaggggggcgggcgggaggaggcgggggggtgggccgcgtggggtaggacggagtggcccttccgggccaatgatgtggcagatggagggagtcgagtcgaggcacgcgtacgtaagctcgggttgtgccacgcggttgggaatgtaattcgggtcggccatcgccgcttccaggtgggggggcgggggggcggggggcgtggctggcgtgncgtgagggcgcgaggagtcggtcggggggggggacacggggcatagtcgggggcgggcntataggggtcggttgggtgcacgggcaccaccctgaagttgacgctcaggctgagggggggggggcggggagcgtcgagatgttttgggccggcggcgaggtggggagcgtgggaagggnncttcntgctgtcgggcgggggggggcgggtctctgcgatgatggggggggggggggggggcgggcggggtggcggggcgggggtgggcgggcagggtggccnccgtccggcggggcagggggctcgggtggggcacggttcgggcggaggggcggggaggcggttagcagctcag

SEQ ID NO: 4581 - DNA, 655 bp, Glycine max
  unsure at all n locations
  Clone ID: LIB3028-033-Q1-B1-H7
gggggaggggagggtcggggagggtgggggtagggaggggagaggagggggagggggaggggtgnagggcggggacggggggcagggcgcgttccgaatcaataaggtggccgagaggagggagatggacaggggatgcacgcgtacgtaaactcggaattcggctcgagcgcgggccgattcggctgggagaagaatcacagtcagtgtcagggaggggggggtgctgggggcagggaggggcgcatagtcgtcgggagcgtcagggcagggggntgggggggagcggcagagctcggtgagcggagggcgcgcctggagggagggaggggtggntgtggcgcngtgcgcatgctagcgtgngtgaggtgggagggggggggggggggccggtggtaggnttgcagccaggtctgggggggaggggggtaggtggagtngcgatgtagcgggggngaccgggagaggcggggcngggtgtggggaggggntcatngaagtgatccggaggagggggagggggcgggagagggggngggggtggggtggggggggggtgggttaggagagggtccaaaggncggtggggctggaagggggtggggggtggggcggatggggggagtaggggggaggggttccagcgctgaaacct

SEQ ID NO: 4582 - DNA, 632 bp, Glycine max
  unsure at all n locations
  Clone ID: LIB3028-033-Q1-B1-H8
gcaaggagtgaggaggagaggnagtcgagggaggtaggaggggcagaggagggagagtggagagagggggaaggagnagtgnaggagagcaggaactggagggnactgaagtggcgaataaggtggcagaaggaggagatcagacgtcagatgcacgcgtaagtaagctcggaattcggctcgagtatttctatatatcagttgtagtccgaggatcaatatacgaacgtggtaggggggggtggggggcgagtttgaaagtgagtcgatgtgcgaggagtgaagcggataggggggagagtttataaaagagagcgagggtataaggcgtggtgaggagaagnggtacacagaatgttttcaaaactancagatggagaggtgaggggagagtcaggtgaggatcagcctgagtggaggagagnggagaaggtagttagtgaaggagtattacacgagccggaatgggggagggagggacaatagatgacaagagggaggagngggtgggggggaaggggtggagtagggggggnaggcagggnagggtgagcnattaantgaggtcgtttttgtgggaggcgacaaggggatagtggcatggggggggttaaggccgataagtacccctc

SEQ ID NO: 4583 - DNA, 488 bp, Glycine max
  Clone ID: LIB3028-034-Q1-B1-A8
tatgatttcaggacactatagaagagctatgacgtcgcatgcacgcgtacgtaagctcggaattgagtctcatccgggcgctatcatgccataccgcgaaaggttttgcgccattcgatggtgtcaacgtaaatgccgcttcgccttcgcgcgcgaattgcaagctctgcattactgaatcggccaacgcgcggggagaggcggtttgcgtattgggcgctcttccgcttcctcgctcactgactcgctgcgctcggtcgttcggctgcggcgagcggtatcagctcactcaaaggcggtaatacggttatccacagaatcaggggataacgcaggaaagaacatgtgagcaaaaggccagcacaaggccaggaaccgtaaaaagggcgcgttgctggcgtttttcgatatgctccgcccccctgacgagcatcacaaaaatcgacgctcaagtcagaaggggcgaagaccgacaaggacaaaaagat

SEQ ID NO: 4584 - DNA, 486 bp, Glycine max
  Clone ID: LIB3028-034-Q1-B1-B5
ttccgctgccgaagtcatataaaagagatatgacgtcgcatgcacgcgtacgtaagctcggaatacggttatccacagaatcaggggataacgcaggaaagaacatgtgagcaaaaggccagcaaaaggccaggaaccgtaaaaaggccgcgttgctggcgtttttccataggctccgcccccctgacgagcatcacaaaaatcgacgctcaagtcagaggtggcgaaacccgacaggactataaagataccaggcgtttccccctggaagctccctcgtgcgctctcctgttccgaccctgccgcttaccggatacctgtccgcctttctcccttcgggaagcgtggcgctttctcatagctcacgctgtaggtatctcagttcggtgtaggtcgttcgctccaagctgggctgtgtgcacgaactccccgttcagcccgaacgctgcgccttatccgggtactatcgtcttgaattcacccggg

SEQ ID NO: 4585 - DNA, 489 bp, Glycine max
  Clone ID: LIB3028-034-Q1-B1-B6
tatgacttcggtggcacatagaagagatatgacgtcgcatgcacgcgtacgtaagctcggaatgaatcggccaacgcgcggggagaggcggtttgcgtattgggcgctcttccgcttcctcgctcactgactcgctgcgctcggtcgttcggctgcggcgagcggtatcagctcactcaaaggcggtaatacggttatccacagaatcaggggataacgcaggaaagaacatgtgagcaaaaggccagcaaaaggccaggaaccgtaaaaaggccgcgttgctggcgtttttccataggctccgcccccctgacgagcatcacaaaaatcgacgctcaagtcagaggtggcgaaacccgacaggactataaagataccaggcgtttccccctgcaagctccctcgtgcgctctcctgttccgaccctgccgcttaccggatacctgtccgcctttctcccttcgggaagcgtggcgccttcccaaaact

SEQ ID NO: 4586 - DNA, 479 bp, Glycine max
  Clone ID: LIB3028-034-Q1-B1-C1
ttaggctgcatagacaagacaatgacatcgcatgcacgcgtacgtaagctccggaattggctcgagaaacacttaggctctcttaaaacaaaggtccctcaaaccactttccccacactctttagtgtgtcatttttttttttgctctttccccacaaagaagtcttggacccttcttctgtgtagtgcaatggccatggctaaggttttctgtgttctgcttctggcactccttggcatttccatgatcacaactcaggttatggcaacagattctgcttatcacttggatggaaggaattatggacctgggagtctcaagagctcacagtgcccttctgaatgcacaagaagatgtagccagacacagtaccacaagccctgcatggtcttctgcaaacaatgctgcaaaaggtgcctttgtgttcctcttggctactatgggaacaggttcgtgtgccccgtgctacattaactgg

SEQ ID NO: 4587 - DNA, 455 bp, Glycine max
  Clone ID: LIB3028-034-Q1-B1-C12
cgaattgaatttaggtgacactatagaagagctatgacgtcgcatgcacgcgtacgtaagctcggaattgagtcccatccgggcgctatcatgccataccgctaaaggttttgcgccatgcgatggtgtcaacgtaaatgccgcttcgccttcgcgcacgaactgcaagctctgcattaatgaagcggacaacgcgcggagagaggcggtttgcgtattgggcgctcttccgcttcctcacgcagtgactcgctgcgctcggtcggacggctgcggcgaacggtatcagctcactcaaaggcggtaatacggttatccacagaatcaggggataacgcaggaaagaacatgtgagcaataggccagcataaggccagtaaccgtagaaaggccgcgttgctggcgtttttccataagctccgcccacctgacgagcatcacaagaattgacgctg

SEQ ID NO: 4588 - DNA, 481 bp, Glycine max
  Clone ID: LIB3028-034-Q1-B1-C3
tatgactgcggagtcaagacatagacatcgcatgcacgcgtacgtaagctcggaacttcggctcgaaggggagtatcaggaccactgattaatggcacgtatgctgagaagacactagaatcacaagagacgatcaaggcagatatcacttgaagaccttgcagaattgttcatttgggtgaactgcctatagaaggtaccgctttacgggcaacaacagcagttttcatcagatttacagttcacaatccaatgttcagagtacgacggattaaccatgtgtgcagtactcgtagaatcagtagtgcgtcgactactgggtgatcatcggatatacaatggagatcagacatgcatagctgagtaagactagactcatggggacatcttacctaatgagttaacttttattcaaagatggaataacagctaatcccagtgagctgcatcctaccttggccgtcaaaccgggagctaaatc

SEQ ID NO: 4589 - DNA, 484 bp, Glycine max
  Clone ID: LIB3028-034-Q1-B1-D1
tgactgacgttgcctagacaagacatagacatcgcatgcacgcgtacgtaaactcggaatttcgctcgagggaatggatagtggctttccaaagaaatctgggccaagctcctccaaagtgcaaattcaggaaactgatgaagcaagaaggaagttctcaaatgctaaatctatttcttcatcccaatattttggcgatcagaacaaggctgcagatgtggattctcaagctacattgtctaagttttcgggttcaagtgccatctccagtgctgatctttttggtgactcaagagacaacaacattgatcttactgctggtgacctcatcaatcgattatctttccaggcacaacaggatctctcttcccttaagaacattgcaggagagactggaaagaagctgagctcattggcctccacattgatgacagatcttcaagaccgaatcctctaaaatgtggtagctccggaattacgaaaa

SEQ ID NO: 4590 - DNA, 491 bp, Glycine max
  Clone ID: LIB3028-034-Q1-B1-D4
cctgacttaggtgacacagacaagagctatgacgtcgcatgcacgcgtacgtaagctcggggtactacggttagccagagaatcaggggataacgcacgaaagaacatgtgagcaaaaggccagcaaaaggccaggaaccgtaaaaaggccgcgttgctggcgtttttccaaaggctccgcccccctgacgaacatcacaaaaatcgacgctcaagtcagaagtggcgaaacccgacaggactataaagataccaagcgtttccccctggaagctccctcgtgcgctctcctgttccgaccctgccgcataccggatacctgtccgcctttctcccttcgggaaacgtggcgctttctcatagctcacgctgtaggtatctcagttcggtgtaggtcgttcgctccaagctgggctgtgtgcacgaaccccccgttcagcccgaacgctgcgtcttaaccagtacctaacgtcctgagttccaaccggtaa

SEQ ID NO: 4591 - DNA, 488 bp, Glycine max
  Clone ID: LIB3028-034-Q1-B1-E1
cctgactaacgttgcacagacaagagatatgacgtcgcatgcaggcgtaccagctttccctatagtgagtcgtattagagcttggcgtaatcatggtcatagctgtttcctgtgtgaaattgttatccgctcacaattccacacaacatacgagccggaagcataaagtgtaaagcctggggtgcctaatgagtgagctaactcacattaattgcgttgcgctcactgcccgctttccagtcgggaaacctgtcgtgccagctgcattaatgaatcggccaacgcgcggggagaggcggtttgcgtattgggcgccagggtggtttttcttttcaccagtgagacgggcaacagctgattgcccttcaccgcctggccctgagagagttgcagcaagcggtccacgctggtttgccccagcaggcgaaaatcctgtttgatggtggttaacggcgggatataacatgagctgttctcggtaacgtcct

SEQ ID NO: 4592 - DNA, 485 bp, Glycine max
  unsure at all n locations
  Clone ID: LIB3028-034-Q1-B1-E2
ctcggctgccatagcaagagaatgacatcgcatgcacgcgtacgtaagctcggagtcgccttcccgttccgcgcttggcggaatttgagtgcgagtgagatccttaggccagctagccagaggcagacgcgccgagacagaacttaatgggcccgctaacatcgcgatttgctggtgacccaatgcgaccagatgctccacgcccagtctcgtaccgtcttcatgggagacactccgactgttgatcggtgtctggtcagagacatctcgaactaacgccggaacattagctgcatgcatcttcgagcgcaatggtatcttggccattcagcggagagttaatgatcagccgactgacccgttgcgcgagacgattgtacagtgccgccttacaggcttcgacggcgtttcgttctacgagcgacaccagtatgctggcaccaatttgctcgatccgaacatttaatgccggcatcatttgcttn

SEQ ID NO: 4593 - DNA, 493 bp, Glycine max
  Clone ID: LIB3028-034-Q1-B1-F2
gcctgactttaggtgtacctagacaagagctatgacgtcgcatgcacgcgtacgtaagctcggaattcggctcgagaagtgatcgagcgatgacaaccaggaggtgggcttggaagcagccatcctttgaagaaagcgtaatagctcactggtctagctccatggcaccgaaaatgtatcagggctcaagtgattcaccgaagcgacgagaccttgaaagttgctttttcaagtgtcagtagcgggacgttctgtcaatcggggaaggtttttggtgacaacacctggagatatcagaagtgagaatgctgacatgagtaacgataaatcctgtgaaaaacacgatcgcctgccagtggaaggctttctgcgttcagtcaatctacgcagagtgaatcggtccctaaggaagccccgaccccgaaagggctgccgtccgatgggtacacgaaagtgacgaagttgccttgactacagaatcatgcctgtctgt

SEQ ID NO: 4594 - DNA, 495 bp, Glycine max
  unsure at all n locations
  Clone ID: LIB3028-034-Q1-B1-G1
cactgcacttcnagtggccctagacgaagagatatgaagtcgcatgcacgcgtacgtaagctcggaattcggctcgaaaaaaaagaagtatcactcatataatactctgtatcacttcacttcgataatcatccatagctactgaagaaaatggcaaccatctctgctgctatcacaaccccatcgatctcccgcgcaactcttgtgcaaaagcgggtctcatctcccgttcttggtttgccagcaatgggtaaggtgggaagagtgagttgctccatggaggaaaaaccttattctgtgaaggaaagcagctctagcatgttggggatgggggcatctctgatggcagctgccagcgctgcagccatgtcaggcccagccatggccttggtagatgagagactgagcactgaaggaaccggacttccctttggcctcagcaacaatcttcctggttggattcctttccgcgttcttggtcctaactggaacccc

SEQ ID NO: 4595 - DNA, 486 bp, Glycine max
  Clone ID: LIB3028-034-Q1-B1-G8
ttcgactgcggtgtcatataaaagagatatgacgtcgcatgcacgcgtacgtaagctcgggtgaagataatttcggctctttacaagtaaagaatgaaattttcatatggtagatttagttgatcaatataattattgttttaatttaattccttgaattaatttaattattgttcttcgacactttattcagtatattattaatttttttagaaccaaaaataaaaaaaaaaaagggcggccgccgactaatgagctcgtcgacccgggaattaattccggaccggtacctgcaggcgtaccagctttccctatagtgagtcgtattagagcttggcgtaatcatggtcatagctgtttcctgtgtgaaattgttatccgctcagaattccacacaacatatgagccggaagcataaagtgtaaagcctggggtgcctaatgagtgagctaactcacattaattgccttgccctcactggccgtg

SEQ ID NO: 4596 - DNA, 477 bp, Glycine max
  Clone ID: LIB3028-035-Q1-B1-B5
ggaatgaatcgaattgcgtggcctatagaagaatatgacgtcgcatgcacgcgtacgtaagctcggctatgccaacatggatgatatggctgtgcaaattgcattgcaaagaattcgaaccttcgtgcttcaaaacaaggaggtcatggttcctaacaagaaacattgctggcacagtaacttgaggttgagcctcaaaaccagaaggtttgatgatatcatgatgtcacctcactcccctatacctcagtcccctttggttaaagccacaatttgagttgccatatttctctgcaccatctcagaagaagtaactgatatacgatgattatttggttctttgatttgttattttggcaaggtacataagtgctggattttgttctttctaacaacaataacagacaactcctgatattgtttttgttaccaacaacatcaaagtctctttgccttgcgtcataaaactgtggcggg

SEQ ID NO: 4597 - DNA, 481 bp, Glycine max
  Clone ID: LIB3028-035-Q1-B1-D11
gaatgatttacgtgcactatagaagaatatgacgtcgcatgcacgcgtacgtaagctcgggaatcggccaacgcgcggggagaggcggtttgcgtattgggcgctcttccgcttcctcgctcactgactcgctgcgctcggtcgttcggctgcggcgagcggtatcagctcactcaaaggcggtaatacggttatccacagaatcaggggataacgcaggaaagaacatgtgagcaaaaggccagcaaaaggccaggaaccgtaaaaaggccgcgttgctggcgtttttccataggctccgcccccctgacgagcatcacaaaaatcgacgctcaagtcagaggtggcgaaacccgacaggactataaagataccaggcgtttccccctggaagctccctcgtgcgctctcctgttccgaccctgccgcttaccggatacctgtccgcctttctcccttcgggaagcgtggcgctttctca

SEQ ID NO: 4598 - DNA, 472 bp, Glycine max
  unsure at all n locations
  Clone ID: LIB3028-035-Q1-B1-D12
gaatgaattacgtgcctatagaagagatatgacgtcgcatgcacgcgtacgtaagctcggaattcagcaacaaggataagacactagtcttccaattttctgtcaagcatgaacagaagcttgactgcggtggtggctacatgaagttgctcagtggtgatgttgatcagaagaaatttggtggggatactccttacagtattatgtttggcccagatatctgtggttacagtacaaagaaagttcacgccaatcctaaccaacaatgacacaaacaacttgataaagaaggatgttccttgtgagactgaccaacttactcatgtttacacatttatcctccgtccggatgcaacctacagcatcctgattgataatgtggagaagcaaactggtagtctctactctgattgngatcntctcccttcaaagacaatcaaagatcccgaggctaaaaaaaccagaagattgg

SEQ ID NO: 4599 - DNA, 473 bp, Glycine max
  Clone ID: LIB3028-035-Q1-B1-E12
gccatgcatacgccagccaagggagagacatgcttgcatgcatgcaggtctactctagatgatcacctcggggaattccaattccacattttcaagaaataaggaggcaaaaatgttcatatatgaattggaattatttgttttcttattaggcctatcctgaagccaaaggaaatgagatcggaattcctcggggaattccaattccacattttcaggacataaggaggcaaaaatgttcatatatgaattggaattatttgttttcttattacgcctatcctgaagccaaaggaaatgagatcggaattcctcggggaattccaattccacattttcatgaaataaggaggcaaaaatgttcatatatgaattggaattatttgttttcttattaggcctatcctgaagccaaaggaaatgagatcggaattcctcgggggtaccgagctcgaattccctatagtgagtcg

SEQ ID NO: 4600 - DNA, 472 bp, Glycine max
  Clone ID: LIB3028-035-Q1-B1-F5
agaatgaattagcgtgcctatagaagagatatgacgtcgcatgcacgcgtacgtaagctcgggccgactagtgagctcgtcgacccgggaattaattccggaccggtacctgcaggcgtaccagctttccctatagtgagtcgtattagagcttggcgtaatcatggtcatagctgtttcctgtgtgaaattgttatccgctcacaattccacacaacatacgagccggaagcataaagtgtaaagcctggggtgcctaatgagtgagctaactcacattaattgcgttgcgctcactgcccgctttccagtcgggaaacctgtcgtgccagctgcattaatgaatcggccaacgcgcggggagaggcggtttgcgtattgggcgccagggtggtttttcttttcaccagtgagacgggcaacagctgattgcccttcaccgcctggccctgagagagtgcagcaagcggtc

SEQ ID NO: 4601 - DNA, 484 bp, Glycine max
  unsure at all n locations
  Clone ID: LIB3028-035-Q1-B1-G11
tgaattgaatttacgtggcactatagaagagatatgacgtcgcatgcacgcgtacgtaagctcggaatcgggcaacgcgcggggagaggcggtttgcgtattgggcgctcttccgcttcctcgctcactgactcgctgcgctcggtcgttcggctgcggcgagcggtatcagctcactcaaaggcggtaatacggttatccacagaatcaggggataacgcaggaaagaacatgtgagcaaaaggccagcaaaaggccaggaaccgtaaaaaggccgcgttgctggcgtttttccataggctccgcccccctgacgagcatcacaaaaatcgacgctcaagtcagaggtggcgaaacccgacaggactataaagataccaggcgtttccccctggaagctccctcgtgcgctctcctgttccgaccctgccgcttaccggatacctgtccgcctttctcccttcgggaagcgtggcgctttctn

SEQ ID NO: 4602 - DNA, 472 bp, Glycine max
  Clone ID: LIB3028-035-Q1-B1-H12
atgaattgacgtggcactatagaagagatatgacgtcgcatgcacgcgtacgtaagctcggaattcgctcgaaggcaaatcttaaacccatccccgaacacattgatttgagcctcattgttgttgccaagtcatatgccttaagttacataaagttgtttcagttcctaatggcaaaacgtatcaacaccttggaaaaaagaaaaaaggggtttaacattcctgacctataatacaatgccattatacaattccttgcctgcctgaattgaaaaggtggagattgttagattataacatttgttattcttttttttttttcactattggcatactgtacagtcacatagtttcattgtgtcgttgctcaatttttatttgttatcaggcagtgaggttttgggcacacctgtcagcaaacatgtgttcatcttttaccattaactttattggttgtatttatcatagttag

SEQ ID NO: 4603 - DNA, 478 bp, Glycine max
  Clone ID: LIB3028-036-Q1-B1-A3
aatgagttaggttgccgagacaagacaatgacatcgcatgcacgcgtacgtaagctcggaattcggctcgaggtaatagaagagacatttggtcgcgaagcttatccactggatgtattttatgtacattcacatcttttggtaagatccgctaaattaagttcacaattaggcgaaggaagtatgactgctttaccaatagttgaaactcaatcggaagatgtttcatcgtataatcctactaatgtcatttccattacagatggacaaatattcttatctgccgatctattcaatgctggtatcagacccgctattactgtatgtagttccctttccatagttggatctgtggcccataataataccataagacaatttgctggtacattcagattggtattagcataattcccagaattagatgcttttgcccaattcgcgactgatctcgatatagctactcaacatcaaatag

SEQ ID NO: 4604 - DNA, 481 bp, Glycine max
  Clone ID: LIB3028-036-Q1-B1-A7
tgattatgttgctatgccatagatatgacatctgatgtacgattcactcatatctgaactcggaatcaggaacgcgcggggataggcgcgtttgcattatgggcactcttccgcatcctcgctcactgatccactgcactcgatccttcggctgcggtaaacagtatcatgctcatccaatcgcggtaatactgttatccacagactcaagggatatcgcaagagacatcatgtcagcagaatgacatcagcagggcataaaccgtgaagtcgccaccttgcaggcgtttttccatatgctccacccccctgacgagcatcacatggatcgactctcaactcaaatgtggtaacctcctccaggtacatacatataccacatgtatcaccctgaaagctccatcgtacgcactcttgttccgacactggcccttactggatacatgtcggcttttcgcccttcgggacccattgagctgtt

SEQ ID NO: 4605 - DNA, 452 bp, Glycine max
  Clone ID: LIB3028-036-Q1-B1-A9
ctgaggtggccctatagaagagatatgacgtcgcatgcacgcgtacgtaagctcggaagctctgcattaatgaatcggccaacgcgcggggagaggcggtttgcgtattgggcgctcttccgcttcctcgctcactgactcgctgcgctcggtcgttcggctgcggcgagcggtatcagctcactcaaaggcggtaatacggttatccacagaatcaggggataacgcaggaaagaacatgtgagcaaaaggccagcaaaaggccaggaaccgtaaaaaggccgcgttgctggcgtttttccataggctccgcccccctgacgagcatcacaaaaatcgacgctcaagtcagaggtggcgaaacccgacaggactataaagataccaggcgtttccccctggaagctccctcgtgcgctctcctgttccgaacctgccgcttacgggatacg

SEQ ID NO: 4606 - DNA, 486 bp, Glycine max
  Clone ID: LIB3028-036-Q1-B1-B5
attggttttggtgccgtggcacataaaagagatatgacgtcgcatgcacgcgtacgtaagctcggcattctggtccacgaagtgcgggctctgctctaatgaatctctcatcacctcgcgagaggaggtttgcatattggcggtcccacagctttcacgatcaatgacgtgtctgcactctggtcatacagatgcttttatcggttacaccgcacacatattgcggttgctgctgcatccacagcgtctggggataatgcaagagagctgttgtaagcactacgtttacatggtgttgagattcgtattttgggtgcgttgcaggtgtattcctataggctccgagattgatgagacatcagctccctttgaatccggaagtcttgggtagccatcctcgcgttgcctccaatgctttcaatagtgacgacgtgggaatcactggaattgcacactcctttttggacaaaacttctttgggaaatg

SEQ ID NO: 4607 - DNA, 455 bp, Glycine max
  Clone ID: LIB3028-036-Q1-B1-C11
aattgaatttatgtggccccatagaagagatatgacgtcgcatgcacgcgtacgtaagctcggcagcaaaaggccaggaaccgtaaaaaggccgcgttgctggcgtttttccataggctccgcccccctgacgagcatcacaaaaatcgacgctcaagtcagaggtggcgaaacccgacaggactataaagataccaggcgtttccccctggaagctccctcgtgcgctctcctgttccgaccctgccgcttaccggatacctgtccgcctttctcccttcgggaagcgtggcgctttctcatagctcacgctgtaggtatctcagttcggtgtaggtcgttcgctccaagctgggctgtgtgcacgaaccccccgttcagcccgaccgctgcgccttatccggtaactatcgtcttgagtccaacccgggtagacaacgactatcccaactgca

SEQ ID NO: 4608 - DNA, 458 bp, Glycine max
  Clone ID: LIB3028-036-Q1-B1-C12
cgaattgaatttatgtggcaccatagaagagcatatgacgtcgcatgcacgcgtacgtaagctcggttcctcgctcactgactcgctgcgctcggtcgttcggctgctgcgagcggtatcagctcactcaaaggcggtaatacggttatccacagaatcatgggataacgcaagaaagaacatgtgagcaaaaggccaacaaaaggccaggaaccgtaaaaaggccgcgttgctggcgtttttccataggctccgcccccctgacgagcatcacaaaaatcgacgctcaagtcagaggtggcgaaacccgacaggactataaagataccaggcgtttccccctggaagctccctcgtgcgctctcctgttccgaccctgccgcataccggatacctgtccgcctttctcccttcgggaagcgtggcgctttctcatagctcacgctgtaggtacctag

SEQ ID NO: 4609 - DNA, 471 bp, Glycine max
  Clone ID: LIB3028-036-Q1-B1-C3
aattgaatttaggttgccacagacaagagatatgacgtcgcatgcacgcgtacgtaaactcggaattcggctcgaggtcttctgacccattggagactggatcacaagctgcacagcttgtcatcgacatccgcaagaggaaaggctttaacgaagcagatgactcctctctccgagtttgaagacaagctttagattgtttgaactatttaacttacttttgaacttagccgaatttatttctcatatgaacaatgttacttaagatttaagttttgtccacttttgtttgtggttttgtcccttaatgtagtacttctgttaagactgctgaaatacagaaagggctgccgccgactagtgagctcgtcgaaccgggaattaattccggaccggtacctgcaagtggtccaaccttccctaataggaatcgttattaaacttggcgtttccaagggcatagcctttttc

SEQ ID NO: 4610 - DNA, 482 bp, Glycine max
  unsure at all n locations
  Clone ID: LIB3028-036-Q1-B1-C5
tatgaatgcggtgacacataaaagacaatgacgtcgcatgcacgcgtacgtaagctcggtacttcgctcaatgactctctgcgctaggtcgtactgcagcggctaacggtatcagctcacccaagagcagtattacggttatccagacaatcatggaacaacgcaggactaaccatgtgaacacagtgccatcagaaggccaggaaccatcataaggccacgttgctcccgttttgccatagaatcttccaccttgacaaccatcaaataaatctacgctaaatttaaagttgtcaaaactaataaggacaataaccattacaagtgattacccccgtgcaatctccctaataaagataaccttttcaaataaccgatggtttcccagttattccacccacaattgggccaattcgacaaggcctttggctttcgttttcccccaaaccgttatttcctccaaagggggtcaaatttttgan

SEQ ID NO: 4611 - DNA, 483 bp, Glycine max
  Clone ID: LIB3028-036-Q1-B1-D8
attgaatgacgtggcactatagaagagatatgacgtcgcatgcacgcgtacgtaagctcggaattgagtcccatccgggcgctatcatgccataccgcgaaaggttttgcgccattcgatggtgtcaacgtaaatgccgcttcgccttcgcgcgcgaattgcaagctctgcattaatgaatcggccaacgcgcggggagaggcggtttgcgtattgggcgctcttccgcttcctcgctcactgactcgctgcgctcggtcgttcggctgcggcgagcggtatcagctcactcaaaggcggtaatacggttatccacagaatcaggggataacgcacgaaagaacatgtgagcaaaaggccagcaaaaggccaggaaccgtaaaaaggccgcgttgctggcgtttttccataggctccgcccccctgacgagcatcacaaaaatcgacgctcaagtcagaggtggcgaaacccgacaggactag

SEQ ID NO: 4612 - DNA, 441 bp, Glycine max
  Clone ID: LIB3028-036-Q1-B1-D9
aatatgtgccgctagaagacataaacgtcgcatgcacgcgtacgtaagctcggagttctgctcgaagccatacattcaggggaagacgcacgatagaacatgtgttcagaaggctagcatacgcgtacgaaccgtaaaaccgcagcgttgctgtcgtttttccataggcaccgcccctctgactagcatcacacacagcgacgcacaagtcaaaggtggcaagtcccgacatgactatgggcatagtacgcatttcccccgtgcaagctctctcatgagctcacctgttccgaccctgccgcttattcgatacctgtccgccattctcccttcctgaagcgaagcgtctttcaacagctcaagcgttacgttctcatgtggtgtacgaccttcgctcaatctgagcagtgctcacgaacacccgtacatccaaccgctcgt

SEQ ID NO: 4613 - DNA, 480 bp, Glycine max
  Clone ID: LIB3028-036-Q1-B1-E1
aattgaatttaggttagcacagacaagacaatgacatcgcatgcacgcgtacgtaagctcggaattcggctcgagaggtcattgactgaaagagttatacattggtcctttgtataaaaaaaaaaaaaaaaaaaaaagggcggccgccgactagtgagctcgtcgacccgggaattaattccggaccggtacctgcaggcgtaccagctttccctatagtgagtcgtattaaagcttggcgtaatcatggtcatagctgtttcctgtgtgaaattgttatccgctcacaattccacacaacatacgagccggaagcataaagtgtaaagcctggggtgcctaatgagtgagctaactcacattaattgcgttgcgctcactgcccgctttccagtcgggaaacctgtcgtgccagctggattaataaatccggcaacgccccggggagaagccgtttgcctaatgggcgccacggtggtg

SEQ ID NO: 4614 - DNA, 483 bp, Glycine max
  Clone ID: LIB3028-036-Q1-B1-E8
tatgaatgcggtggccctatagaagagaatgacgtcgcatgcacgcgtacgtaagctcggaaaagggcacgaaccgtaaaaaggccgcgttgctggcgtttttccataggctccgcccccctgacgagcatcacaaaaatcgacgctcaagtcagaggtggcgaaacccgacaggactataaagataccaggcgtttccccctggaagctccctcgtgcgctctcctgttccgaccctgccgcttaccggatacctgtccgcctttctcccttcgggaagcgtggcgctttctcatagctcacgctgtaggtatctcagttcggtgtaggtcgttcgctccaagctgggctgtgtgcacgaaccccccgttcagcccgaccgctgcgccttatccggtaactatcgtcttgagtccaacccggtaagacacgacttatcgccactggaagcagccactggtaacaggattagcacaacgaggg

SEQ ID NO: 4615 - DNA, 445 bp, Glycine max
  Clone ID: LIB3028-036-Q1-B1-G10
tgatgtggcgtctagaagagaataacgtcgcatgcacgcgtacgtgagctcggaattcgggtcgagccaatatcttcacaccacgaaatgagctgggattgttgcaaagtaagtctaggcattgtggagtcattggaagactgttctagatcaaggttttctgggaaaattctccagtcagcaaagagcaagagagttagtctcagtcaccaagtgatgatgatgaaagccccaaattgccagatccacagggattcttctcttgagggatctaagtctttgaccaatgatttttgtaaggctcctccttactatgctcagcaaaagggatctgttgttatcgagaagggtgaatgtgaatctgagtccactgttctttttgagattggagaaagtggccttgaccttcagccgtttgggagaatcacgtcgtggacattggaag

SEQ ID NO: 4616 - DNA, 458 bp, Glycine max
  Clone ID: LIB3028-036-Q1-B1-G9
cgaattgaatttatgtggccctatagaagacaatgacgtcgcatgcacgcgtacgtaagctcggagaggcggtttgcgtattgggcgctcttccgcttcctcgctcactgactcgctgcgctcggtcgttcggctgcggcgagcggtatcagctcactcaaaggcggtaatacggttatccacagaatcaggggataacgcaggaaagaacatgtgagcaaaaggccagcaaaaggccaggaaccgtaaaaaggccgcgttgctggcgtttttccataggctccgcccccctgacgagcatcacaaaaatcgacgctcaagtcagaggtggcgaaacccgacaggactataaagataccaggcgtttccccctggaagctccctcgtgcgctctcctgttccgaccctgccgcttaccggatacctgttcgcctttctccctttcgggaagcgtggcg

SEQ ID NO: 4617 - DNA, 473 bp, Glycine max
  unsure at all n locations
  Clone ID: LIB3028-037-Q1-B1-A1
ngaatgaattaggtgacactatagaagacaatgacgtcgcatgcacgcgtacgtaagctcggaattcngctcaagtcaaataagtcaatctctttgcgcagttccctaactctcctttcaagatgcagatcttcgtcaagaccctcaacggaaagaccatcacccttgaggtgggaaactccgagaacaatcgaaaacttcaaggccaagatccaggacaaggaaggaattcccccggatcagcaacgtctcatcttcgccggaaagcagctcgaggacggccgtaccctcgccgactacaacatccagaaggagtcaacccttcaccttgtccttcgtctccgtggtggcatgcagatcttcgtcaagactctcactggcaaaaccataaccctagaggtcgaaagctctgacaccattgacaacgtcaaggccaagatccaggacaaggagggaatccccccagaccagca

SEQ ID NO: 4618 - DNA, 467 bp, Glycine max
  Clone ID: LIB3028-037-Q1-B1-A11
tgaattaggtggcctatagaagagctatgacgtcgcatgcacgcgtacgtaagctcggaattgcaagctctgcattaatgaatcggccaacgcgcggggagaagcggtttgcgtattgggcgctcttccgcttcctcgctcactgactcgctgcgctcggtccttcggctgcggcgaacggtatcagctcactcaaaggcggtaatacggttatccacagaatcaagggataacgcaggaaagaacatgtgagcaaaaggccagcaaaaggccaggaaccgttaaaaggccgcgttgctggcgtttttccataggctccgcccccctgacgagcatcacaaaaatcgacgctcaagtcagaggtggcgaaacccgacaggactataaagataccaggcgttttccccctgaaatcccccgctcgctctcctgttttcaactgtcgcttatagggtaacttttcccct

SEQ ID NO: 4619 - DNA, 514 bp, Glycine max
  Clone ID: LIB3028-037-Q1-B1-A9
aattaggtgactatagaagacaatgacgtcgcatgcacgcgtacgtaagctcggatactctgccacatcgtataacgtgactggtttcacattcaccatcctgaattgactctcttccgggcgctaccatgccataccgcgaaaggttttgcgccattcgatggtgtcaacgtaaatgccgcttcaccttctcgcgcgaattgtaagctctgcattaatgaatcggcaatagcgcggggacaggcggtttgcgtattcggggctcttccgcttcctcgctcagtgaccagctgctctcggtcgtacgggggcggtggatcggtatcagcgtggcacagggggggggacatggcggtgagcttagagtacccagtggggatgtccccactggaagggaagcaggtggtggccctattggcgcgagccgagatggggacgcggaagacgcgccgaaaaagtgacgccggttctcgtgggagcgtgggcggtcaaaactggtgtcctgtgccatggt

SEQ ID NO: 4620 - DNA, 471 bp, Glycine max
  Clone ID: LIB3028-037-Q1-B1-B4
cgaattgaatttaggtggctctatagacgacatatgacgtagcatgcacgcgtacgtaagctcggtcaaaggcggtaatacggttatccacagaatcaggggataacgcaggaaagaacatgtgagcaaaaggccagcaaaaggccaggaaccgtaaaaaggccgcgttgctggcgtttttccataggctccgcccccctgacgagcatcacaaaaatcgacgctcaagtcagaggtggcgaaacccgacaggactataaagataccaggcgtttccccctggaagctccctcgtgcgctctcctgttccgaccctgccgcttaccggatacctgtccgcctttctcccttcgggaagcgtggcgctttctcatagctcacgctgtaggtatctcagttcggtgtaggtcgttcgctccaagctgggctgtgtgcacgaaccccccgttcagcccgaccgctgcgccttaa

SEQ ID NO: 4621 - DNA, 464 bp, Glycine max
  unsure at all n locations
  Clone ID: LIB3028-037-Q1-B1-C5
tgaattgaatctaggtggcactatagaagagatatgacgtcgcatgcacgcgtacgtaagctcggaattcggctcgagccgctttgggtgctgagatcattggtacctttgttcttgtctacaccgttttctccgccactgatcctaagaggaacgctagggactctcatgttcctgtgttagcaccacttcccattgggtttgccgtcttcatggttcacttggctacaatccctgtcactggaaccggcattaaccctgcaaggagtttcggaccagctgtgatcttcaacaacgacaaagcctgggacgaccaatggatttactgggttggaccgtttgttggagctgcggtggctgcaatctaccatcaatacattcttagaggttctgcaatcaaagctcttggatccttcaggagcaacgcttaattaananaaaaaaaaatcaagtttctccactac

SEQ ID NO: 4622 - DNA, 467 bp, Glycine max
  Clone ID: LIB3028-037-Q1-B1-C8
tgaatgagctaggtgacactatagaagacaatgacgtcgcatgcacgcgtacgtaagctcggaattgcaagctctgcattaatgaatcggccaacgcgcggggagaagcggtttgcgtattgggcgctcttccgcttcctcgctcactgactcgctgcgctcggtcgttcggctgcggcgagcggtatcagctcactcaaaggcggtaatacggttatccacagaatcaggggataacgcaggaaagaacatgtgagcaaaaggccagcaaaaggccaagaaccgtaaaaaggccgcgttgctggcgtttttccataggctccgcccccctgacgagcatcacaaaaatcgacgctcaagtcagaggtggcgaaacccgacaggactataaagataccaggcgttttccccctggaagctccctcgtgcgctctcctgttccgaccctgccgcttaccggatacctg

SEQ ID NO: 4623 - DNA, 480 bp, Glycine max
  unsure at all n locations
  Clone ID: LIB3028-037-Q1-B1-H12
ctgaatttaggtggacactatagaacagcaatgacgtcgcatgcacgcgtacgtaagctcggaattgactctcttccgggcgctatcatgccataccgcgaaaggttttgcgccattcgatggtgtcaacgtaaatgccgcttcgccttcgcgcgcgaattgcaagctctgcattaatgaatcggccaacgcgcggggagaggcggtttgcgtattgggcgctcttccgcttcctcgctcactgactcgctgcgctcggtcgttcggctgcggcgagcggtatcagctcactcaaaggcggtaatacggttatccacagaatcaggggataacgcaggaaagaacatgtgagcaaaaggccagcataaggccaggaaccgtaaaaaggccgcgttgctggcgtttttccataggctccgcccccctgacgagcatcacaaaaatcgacgctcaagtcagaggtggcgaaacccgaaaagn

SEQ ID NO: 4624 - DNA, 818 bp, Glycine max
  unsure at all n locations
  Clone ID: LIB3028-038-Q1-B1-A11
tccgaggctaangggcaaatagaagagatatgacgtcgcatgcacgcgtacgtaagctcggaattcggctcgagctcgagccctcaagacctgctgcatattcccatggtgtctccgattcaacaactttctgaggtcatgtttaaatgggaatttaccgaaccgaatgccttggatgattccagttggtcaatggacaaagtccagggacaagttggtgggtccctgccttgggaatgtgtntggngaaaacacagggcgagnagngaccactctttagangaaaaagttatcggccacggaaaatgggggtancncacncntctananangagggggggtnttttnctaaatgngtctcgntttaaacccctnttntatacaantnnttntctccacaaaatgtgnggcggcggaaaaagaaaactccncngtgaaaagtnttataanctccaangccccgcgggggngtttttggngnaannanaananggccccncganaaggcgccgaangagaannagttggtgttctgacaaaagtnttttgtggcccgttngttggggtccccggaaatttttcaaacccnnttttgggggcgccgttgggaaaattttggggggnntcttaaacgnagaaaagnggggggggggaacaaaaaggttttttgaaactttaaaaagggaaaaaaaatccccttttggggggtccccctttttttccaaaaataaaacccccgtttcttctaaaaaaggccaaaaaacccaaacagcggtggggaaaaaatcgggggggtttttatacaagaacacaatgtt

SEQ ID NO: 4625 - DNA, 473 bp, Glycine max
  Clone ID: LIB3028-038-Q1-B1-A3
ttgcagtgactttaggtgacactatagaagagctatgacatccgaaggtaagctcggtattcggctcgaggagccatatatcatggggtactatttggtattcgttggtgtgttcttgtggtgtgccatggctagtcacattaatggactagccatgatggatggaaagttaatgagttcctcggcaaataattatgactatggagatgctcttggcaaagccatcttgttttttgaaggagaacgctcggggaacttgcccgccacccaaagagtgaagtggaggggagactccgctctctctgatggcaaacttcaaaacgtggatttgattggaggatattacgatgctggagataacgtcaagtttggatggtcaatggcatttacaactagcttattgagttgggctgctgtagagtacgagagtgagatatcttcggtgaaacaacttggttacctccacagtgctg

SEQ ID NO: 4626 - DNA, 475 bp, Glycine max
  Clone ID: LIB3028-038-Q1-B1-A7
tcgcctgactttaggtgacactatagaagagctatgacgtcgcatgcacgcgtacgtaagctcggaattcggctcgaggttgtatagtgcacgagtcaaaattcaactttattgtggctgtgttatattcatggcgtaatctttctattctcttggtcgtcatacaaaatcactgaatgaatttcacgatagcaaaatgccgcagctgtagtaagatggtattgcttgcaattgaagagactatggatgtttatttgaaacagaaaaaatcaagggcggccgccgactagtgagctcgtcgacccgggaattaattccggaccggtacctgcaggcgtaccagctttccctatagtgagtcgtattagagcttggcgtaatcatggtcatagctgtttcctgtgtgaaattgttatccgctcacaattccatacaacatacgagccggaagcataaagtgtaaagcctgaggtgg

SEQ ID NO: 4627 - DNA, 462 bp, Glycine max
  Clone ID: LIB3028-038-Q1-B1-D10
ttgaatgacttaggtgacactatagaagagctatgacgtcgcatgcacgcgtacgtaagctcggaattaattccggaccggtacctgcaggcgtaccagctttccctatagtgagtcgtattagagcttggcgtaatcatggtcatagctgtttcctgtgtgaaattgttatccgctcacaattccacacaacatacgagccggaagcataaagtgtaaagcctggggtgcctaatgagtgagctaactcacattaattgcgttgcgctcactgcccgctttccagtcgggaaacctgtcgtgccagctgcattaatgaatcggccaacgcgcggggagaggcggtttgcgtattgggcgccagggtggtttttcttttcaccagtgagacgggcaacagctgattgcccttcaccgcctggccctgagagagttgcagcaagcggtccacgctggtttgcc

SEQ ID NO: 4628 - DNA, 473 bp, Glycine max
  Clone ID: LIB3028-038-Q1-B1-D5
cgaattgactttaggtgacactatagaagagctatgacgtcgcatgcacgcgtacgtaagctcgggaaaggttttgcgccattcgatggtgtcaacgtaaatgccgcttcgccttcgcgcgcgaattgcaagctctgcattaatgaatcggccaacgcgcggggagaggcggtttgcgtattgggcgctcttccgcttcctcgctcactgactcgctgcgctcggtcgttcggctgcggcgagcggtatcagctcactcaaaggcggtaatacggttatccagagaatcaggggataacgcaggaaagaacatgtgagcaaaaggccagcaaaaggccaggaaccgtaaaaaggccgcgttgctggcgtttttccataggctccgcccccctgacgagcatcacaaaaatcgacgctcaagtcagaggtggcgaaacccgacaggactataaagataccaggcgtttccccct

SEQ ID NO: 4629 - DNA, 465 bp, Glycine max
  Clone ID: LIB3028-038-Q1-B1-E1
ttcagggcattatagccagatatgacgtagcatgcacgcgtacgtaagctcggaattcagctccgccatcgccgcttccactttttcccgcgttttcgcagaaacgtggctggcctggttcaccacgcgggaaacggtctgataagagacaccggcatactctgcgacatcgtataacgttactggtttcacattcaccaccctgaattgactctcttccgggcgctatcatgccataccgcgaaaggttttgcgccattcgatggtgtcaacgtaaatgccgcttcgccttcgcgcgcgaattgcaagctctgcattaatgaatcggccaacgcgcggggagaggcggtttgcgtattgggcgctcttccgcttcctcgctcactgactcgctgcgctcggtcgttcggctgcggcgagcggtatcagctcactcaaaggcggtaatacggttatccacagaat

SEQ ID NO: 4630 - DNA, 463 bp, Glycine max
  Clone ID: LIB3028-038-Q1-B1-E12
ttgaatgcttaggtggcctatagaagagatatgacgtcgcatgcacgcgtacgtaagctcggaatgtaattcagctccgccatcgccgcttccactttttcccgcgttttcgcagaaacgtggctggcctggttcaccacgcgggaaacggtctgataagagacaccggcatactctgcgacatcgtataacgttactggtttcacattcaccaccctgaattgactctcttccgggcgctatcatgccataccgcgaaaggttttgcgccattcgatggtgtcaacgtaaatgccgcttcgccttcgcgcgcgaattgcaagctctgcattaatgaatcggccaacgcgcggggagaggcggtttgcgtattgggcgctcttccgcttcctcgctcactgactcgctgcgctcggtcgttcggctgcggcgagcggtatcagctcactcaaaggcggtaata

SEQ ID NO: 4631 - DNA, 467 bp, Glycine max
  Clone ID: LIB3028-038-Q1-B1-E2
tccgcagctacggagacgaaagcttgcatacctgcaggtcgactctagaggatcccctcggggaattccaattccacattttcaagaaataaggaggcaaaaatgttcatatatgaattggaattatttgttttcttattaggcctatcctgaagccaaaggaaatgagatcggaattcctcggggaattccaattccacattttcaagaaataaggaggcaaaaatgttcatatatgaattggaattatttgttttcttagtaggcctatcctgaagccaaaggaaatgagatcggaattcctcggggaattccaattccacattttcaagaaataaggaggcagaaatgttcatatatgaattggcattatttgttttcatagtaagcctatcctgaagccaaaggaaatgagatcgggattcctcgggggtaccgagctcgaattccctatagtgagtcgtatc

SEQ ID NO: 4632 - DNA, 462 bp, Glycine max
  Clone ID: LIB3028-038-Q1-B1-F6
tcaggtgtcacatagaagagatatgacgtcgcatgcacgcgtacgtaagctcggaattcggctcgagctcgagccgaattcggctcgagaaaagatataataataacttggtccagagcatctaccattatacctacaatgattggccataccattgctatccacaacggaaaagagcatttacctatttatataacagatcgtatggtaggccataaattaggagaattttcacctactctaaatttccgaggacatgcgaaaaatgataatagatctcgtcgttaacgttaattttaacataaatttttaaatcgtaatttataactaactattacaaaatggaattcttattaaaatgaaattcaaatcatttcttttataaaaaaacaaaaaattctttaattaaatatttaatgaaattaaatatttaaattaataaaattactcgtgttttattcg

SEQ ID NO: 4633 - DNA, 468 bp, Glycine max
  Clone ID: LIB3028-038-Q1-B1-G1
actcagtggcacatagaagagatatgacgtcacatgcacgcgtacgtaagctcggaattcggctcgagtgatgacagtgtcgcaatagtaattcaacctagtacgagaggaaccgttgattcgcacaattggtcatcgcgcttggttgaaaagccagtggcgcgaagctaccgtgcgttggattatgactgaacgcctctaagtcagaatccgggctagaagcgacgcgtgcgcccgccgctcgatgggaattgcgcttcaaggcgtcgctccacgttttcccagaaagtttgaaccaacacaaaacgaggttgctcaggagaggctttggctcatgcccttcacctgcggtgcttggttttggccataaaaattatgatcagttctctgtgaaagtgtgcacggcttttacgactgaggatggtggggatgtgaaggagaaaaagtttcgaaatttgaagaaaaatg

SEQ ID NO: 4634 - DNA, 469 bp, Glycine max
  Clone ID: LIB3028-038-Q1-B1-H1
actcaggggcttatagaacagatatgacgtcacatgcacgcgtacgtaagctcggaattgactctcttccgggcgctatcatgccataccgcgaaaggttttgcgccattcgatggtgtcaacgtaaatgccgcttcgccttcgcgcgcgaattgcaagctctgcattaatgaatcggccaacgcgcggggagaggcggtttgcgtattgggcgctcttccgcttcctcgctcactgactcgctgcgctcggtcgttcggctgcggcgagcggtatcagctcactcaaaggcggtaatacggttatccacagaatcaggggataacgcaggaaagaacatgtgagcaaaaggccagcaaaaggccaggaaccgtaaaaaggccgcgttgctggcgtttttccataggctccgcccccctgacgagcatcacaaaaatcgacgctcaagtcagaagtggcgaaacccgag

SEQ ID NO: 4635 - DNA, 463 bp, Glycine max
  unsure at all n locations
  Clone ID: LIB3028-038-Q1-B1-H11
ctcggaatgactatangtggccctatagaagacaatgacgtcgcatgcacgcgtacgtaagctcggggccagactggaggtggcaacgccaatcagcaacgactgtttgcccgccagttgttgtgccacgcggttgggaatgtaattcagctccgccatcgccgcttccactttttcccgcgttttcgcagaaacgtggctggcctggttcaccacgcgggaaacggtctgataagagacaccggcatactctgcgacatcgtataacgttactggtttcacattcaccaccctgaattgactctcttccgggcgctatcatgccataccgcgaaaggttttgcgccattcgatggtgtcaacgtaaatgccgcttcgccttcgcgcgcgaattgcaagctctgcattaatgaatcggccaacgcgcggggagaggcggtttgcgtattgggcgctcttccgg

SEQ ID NO: 4636 - DNA, 471 bp, Glycine max
  unsure at all n locations
  Clone ID: LIB3028-038-Q1-B1-H4
ttcaagtggctttatgtgacacgatagacgatatatgacatcgcatgctcacctccgtatgctctcggtaccgcgcggggagaggcggtttgcgtattgggcgctcttccgcttcctcgctcactgactcgctgcgctcggtcgttcggctgcggcgagcggtatcagctcactcaaaggcggtaatacggttatccacagaatcaggggataacgcaggaaagaacatgtgagcaaaaggccagcaaaaggccaggaaccgtaaaaaggccgcgttgctggcgtttttccatangctccgcccccctgacgagcatcacaaaaatcgacgctcacgtcagaggtggcgaaacccgacaggactataaagataccaggcgtttccccctggaagctccctcgtgcgctctcctgttcgaccctgccgcgtaacggatacctgtccgcctttctcccttcgggaaacgtggg

SEQ ID NO: 4637 - DNA, 793 bp, Glycine max
  unsure at all n locations
  Clone ID: LIB3028-039-Q1-B1-A4
tacggtggctganaagtcgagaagagtcggaagcggcggaaggccggggggggcngnagagggggcggcggagaggggngttgagggcgtcacagcggacgcagacgcgccgagacaggacttaatgggcccgctaacagcgcgatttgctggtgacgcaatgcgagcagatgctccacgcccagtcgcgtaccgtcttcatgggagaaaatagtactgttgatgggtgtctggtcagagacatcaggggataacgccggaacattagtgcaggcagcttccacaggaatggcatcctggtgagccagcgggtgggtaggggtgaaggcgagggagggggtgcgcgaggaggagtggggaccgggggggggacaggggagcgacgggggggtcggggctaccatcaagggaggggtgggggagggaggggggttggtgggaggtccgagcgtgtgagcgcccgcgagcaatttgccgacgggcgcgtgcaggggcgaaaactggaaggggggaaacggggaatcgaggaacggaccggtttggcccggccagtctgggtgtgccaggccgggtttggggaatggagggtcgagggtgccgcgcaaggactcgcttccaacgtttttgccccagtttttttcgcaagagaccgttggcggggccttgcgttcacggagaggggggagggggggggctaagagcgcgcgacgaggaatcggggtgccaggggggatagtagcggggggcgagggggnggaggtcagggggcgaggggctaggggggcgggggggc

SEQ ID NO: 4638 - DNA, 726 bp, Glycine max
  unsure at all n locations
  Clone ID: LIB3028-039-Q1-B1-A5
ttacgtggcttangtggccctaaanaacgactactgacatcngacccacgcgtacgtaaactcggaattcagctcgagggtgacatgacttccttttaaatatcaggtgcagtccatttatatttcaatggcttattgtggtgacatgacttccttttaatttaaaatcggtagggggcgaatgtgaagtgcggtttagtttttaaggttaataactctaaatcctcgtatcctatactttataatgtttctatctacttattaatcttcttttgtatgataaataataatcttcttttgtatgagtaaggagggaaggaaaagggcggccgccgactagtgagctcgtcgacccgggaattaattccggaccggtacctgcaggcgtacaagctttcccgagagtgagtcggagtagagcttggcgtaatcatggtcatagctgtttcctggtgtaaattgttaaccgctcacaattccacacaacatacgagccggaaagctaaagtgttaaacctggggtgcctaataagtgaaccaactcacaataaattgctttgcgctcaatggcccgctttcaatcgggaaaccttgtctctgcaactgcattaatgaatccgccaaggcggggggaaagggcggttgcctaattggccccagggggggtttgcgggttaccagttgagacgggaagaagggagtgggcagagacnagggggccggaga

SEQ ID NO: 4639 - DNA, 710 bp, Glycine max
  Clone ID: LIB3028-039-Q1-B1-A9
ggaatgaatcacgttgcatatagaagagctgtgacgtcgcatgcacgcgtacgtaagctcggaattaattccggaccggtacctgcaggcgtaccagctttccctatagtgagtcgtattagagcttggcgtaatcatggtcatagctgtttcctgtgtgaaattgttatccgctcacaattccacacaacatacgagccggaagcataaagtgtaaagcctggggtgcctaatgagtgagctaactcacattaattgcgttgcgctcactgcccgctttccagtcgggaaacctgtcgtgccagctgcattaatgaatcggccaacgcgcggggagaggcggtttgcgtattgggcgccagggtggtttttcttttcaccagtgagacgggcaacagctgattgcccttcaccgcctggccctgagagagttgcagcaagcggtccacgctggtttgccccagcaggcgaaaatcctgtttgatggtgggtaaaggggggaattaacatgagctgtcttcggtatcgtcgttatcccagcaccgagatatcccgcaccacacctaacccggactccgtaatgggcctcattgcgcccaaggccaacctgatcgttggtcagcaagcacgcatatgggaaccaggccttcaattgcagctttgcactggttttgttgaaacccggtcatgggattccaagtgccgttccc

SEQ ID NO: 4640 - DNA, 1228 bp, Glycine max
  unsure at all n locations
  Clone ID: LIB3028-039-Q1-B1-B11
atctaagtatggatcgtggacaantgcctagctgaccatcnngtacgcancgctgtatcgcctaaaacacgcggtagttcatagtctcgcaagtagctagtttctgattgacggtcttagctgagctcacccactacagctgtctacagcctgtttatcctcactggcactgactctatcacactgcaggttttcttgcagtaccctgatgtatatctcacatgtcggagcgagcgtgtcacatgcctactactatgcatcgagtcaatgattgttacacatctgcggtgttacgtactcttaagtctcgcaatcctcgatactacttactcctatcgcatgactgctatgncagacttactcggctgagacagagcgatctgcacccagtgcaacatgctgtctgcatactggctcgtacactcgctcctccggagtgcgaattatatgcataggaggtaatgctctacgctacgagcttcatgtgggcgacctacacgctgcactatgcgtccagatcatcgctatccttcgaacgttagcagacttgtctcgagacacgcgattgtaatctgtgtgaaccctcctcttaatcggaacactttctgaataacgacttgtgacatccactttatacccgaacgacacgtacgctgtctactcgttcaccactctgccctttcctactgatgacagccatagatccacgcacgtctgctacatcgtcatggtaacactactgcggatctaaccgttgccctattcccgtaaatcgagagctgccatgtgtccgacgcaattctccaaccccataacgccgactattgaatgccattctatcactccactatcatcctcacatcgcgtgcttctgattcgcggctactccacagcaaggcctcacgaatctgcgagtgcacaccaccatatcattagctagtcatctgtactagcgctcagaatgacgttaattttgtcgatccgtaagcattatgtcaccttgacactatcaagagtccagctctgcctgcttgcggctatctcatcacactcggctctccaaagcgtcactcacgagtgatctcttttcctttgacacactgctgaactctgcactcttactagtcctcctatgtctcatcggctacaaatcgttcttctttgtatgactctctacctgctgcttagccgcttctagcttacatactgattatgcactacgtgagtt

SEQ ID NO: 4641 - DNA, 726 bp, Glycine max
  unsure at all n locations
  Clone ID: LIB3028-039-Q1-B1-B6
tttaggtggccgntagtagatagggaagaggaggagagtagggggggtagataaggcgaggaagagcagagcgggagtgtgggtgntaatctcatctgtagctataatcatgtgtttcagtcatcctcagtttgtttattgagaataagaaacgagacttgctctttcaatatgtatttaggagaataaaattatcttaggacatgaagtgcctacagcaagcggattctggattcatataggtggaatttttggtggaagtggattatcttgaatcctgtatttcatagatggacttcgtgtagcaatgagtatttaattatttagtcgaaagatgttgcatgtctaaaaggggaaaagaaagggcggccggcgagtagtggagctcgtgcgacccgggaattaattcggggcgggtagctgcaagggtggcagctttccctatagtgagtcgtattagagcttggcgtaatcagggtcatagctgtttcctgtgttaaattgttaaccgctcacaattccacacaacatacgagccggaagcataaagttgaaaagcctgggtggccaaatgagtgagctaacttcacataaattgcgtttcgctcactgccccgctttccagtggggaaaacgggtgttgccaagtgcgataatgaagcgaggaggggggggggaaaaggggagttgggtaattgngcgcaaggggggtggtgcttttaacag

SEQ ID NO: 4642 - DNA, 727 bp, Glycine max
  unsure at all n locations
  Clone ID: LIB3028-039-Q1-B1-B8
ttaggtggcctggtatgtaggagtggggaggatggggggtcacttgaggcgggctggagagaggggnaggggcgctccttnggcgagctttccctatagtgagtcgtattagagcttggcgtaatcatggtcatagctgtttcctgtgtgaaattggtatccgcgcacaattccacacaacatacgagccggaagcataaagtgtaaagcctggggtggctaatgagtgagctaactcacattaattgcgttgcgctcactgcccgctttccagtcgggaaacctgtcgtgccagctgcgggatggatcgggcaaggcgcggtgagaggcgggttgcggtggggggggcaggggtgggtgttggttgcaggagtgggacgggcaagaggtggagtgcccgtgggcgggcgggggggggggagagttgggagaagcggtccacgcctggtttgcccccagcaaggggagaatcctggttgggtgggggtgagacggggggatataacatgagctgtcgtcgggaatcgtcgtatcccactaccggggaggatccggaccaaggggcagcccgggacgccgttaatggggccaaattgcggcccaccgccaatctgattcttgggggggcgggaacgggggttggaaaagaaggccctcattcgagcggtgggggggtttggttgaaggcgggggaggggggagcggggaggggttgggggcgggggtg

SEQ ID NO: 4643 - DNA, 767 bp, Glycine max
  unsure at all n locations
  Clone ID: LIB3028-039-Q1-B1-C1
ctcacaaagcagaaanacggtaaacggagagganccattaantcgtagttgagctttaaccggcacatcagcatcatttctctcccactccaacacgctgtcatgcaggaacagcaagcgaaggagctcactcttaccgaagaaatacggctttgggaataagcaggccagcaacgcagtaaccaacattttacctaaagacttttcctaggttagacccttataaacgtcacatttctatttctcttccaaaagctcaacccccctgacgagcatcacaacaatcgaggctcaagttaagggtagcgaagacccaaaaggaagataagcatagcaggagtagtcaccatgaggaggatcgctcgcncggctcaacagttccggaccctgccgcagtgccggataccccgccggccgttcacaccttcgttgaatncgttggcgctttcctccataactcaacgctgttaggtaatctcagtttcggttctaggtcgtttccgctccaaggctgggcctcttttcaaacaaccccccccgttcagccctaaccggaagcctccttaatcaaataaccagtccatcttgagttccaaacccgggtaacaacaaaaccttatttccacttgggacccatccaacttggtatctagggattaagcagaaacaaaattatttaaccctttactttacctcgcaacttaaagagcatgcccaaaactcgggggaatacaggcagggacaaagagtttacgggccgggcccta

SEQ ID NO: 4644 - DNA, 690 bp, Glycine max
  unsure at all n locations
  Clone ID: LIB3028-039-Q1-B1-C10
tgaattagtggcacatagaagagcaatgacgtcgcatgcacgcgtacgtaagctcggaattccgagcttggatcctctagagcggccgccgactagtgagctcgtcgacccgggaattaattccggaccggtacctgcaggcgtaccagctttccctatagtgagtcgtattagagcttggcgtaatcatggtcatagctgtttcctgtgtgaaattgttatccgctcacaattccacacaacatacgagccggaagcataaagtgtaaagcctggggtgcctaatgagtgagctaactcacattaattgcgttgcgctcactgcccgctttccagtcgggaaacctgtcgtgccagctgcattaatgaatcggccaacgcgcggggagaggcggtttgcgtattgggcgccagggtggtttttcttttcaccagtgagacgggcaacagctgattgcccttcaccgcctggccctgagagagttgcagcaagcggtccacgctggtttgccccancaagcgaaaatcctgtttgatggtggttaacggggggatataacatgagctgtcctcggtatcgtcgtatcccactaccgagatatccgcaccaacgcgcagcccgggctcggtaatggcgcgcattgcgcccagcgccatctgattcttgggagcagaatcccattgggaaca

SEQ ID NO: 4645 - DNA, 690 bp, Glycine max
  Clone ID: LIB3028-039-Q1-B1-C2
ccggagtgtgggagtggggaagtagggggctcgcgaggcgggcagtgggaggggcagggggttttcggggtgcatttcttaggaagatatgcagggaaaattgtgtaatcttcaatgtccctcatgagagtctcttaaatgttgggcagattttctatgtatagcatagccccatatccttgtgattgccattttttttgcaaaatgagctgagtgtagcatatgaacaacactttgcttatggtaatcaagatacaattcgggattgacttaggagagaaaaagaagggcggccgccgactagtgagctcgtcgagccgggaagtaattccgggccggtacctggaggcgtaccagctttccctatagtgagtcgtagtagagcttggcgtaatcaggggcatagctgtttcctgtgtgaaattgttatccgctcacaattccacacaacatacgagccggaagcataaagtgtaaagcctggggtgcctaatgagtgagctaactcacattaattgctttgcgctcactgcccgctttccagtcgggaaacctgtcgtgccagctgcattaatgaatcgggcaacgcgcggggaaaggggggtttgcgttattggccgcaagggggagttttcgtttgagcagttgaaaggggaacaagggagtgccgtgtgacggggggccctggaa

SEQ ID NO: 4646 - DNA, 654 bp, Glycine max
  Clone ID: LIB3028-039-Q1-B1-C6
ggcgaagcgggaggggtgaggggtctgagcgggcgtcaagtcaatgcctacatccttttaagtcaatatatcaaaattacagcgtttatttaagagaaaggaggggaaaagggcggccgccgacgagtgagctcgtcgacccgggaattaattccggaccggtacctgcaggcgtaccagctttccctatagtgagtcgtattagagcttggcgtaatcatgggcatagctgtttcctgtgtgaaagtgtgagcgggtcagagttcgagacaggagaggagccaggggcagagggtggggggcggggggtgcgggaggagtgggcgtagctcacattaggtgggggagcgcggagggggcgcgtgggggggctggaagcctgtcgtgccaactgcattaaggaatcggccaaggcgcggggagaggcggtttacggtagtgggcgccagggtggttttcctttcacaattgggaggggcaacaactgatgaggccgcacggctgggccctgataaagttccgcaagcggtccacccgggtttggcccaacaagggaaggggcgggtgggggggcttaacgggcgggatgaacggtgagcagggggcgtaacggggggcggggagggggagggaggagggatagggggaggcggg

SEQ ID NO: 4647 - DNA, 749 bp, Glycine max
  unsure at all n locations
  Clone ID: LIB3028-039-Q1-B1-D1
tcggataagctcanagcgtcaanaaanaaagagtaatggcagngagcccgggagcnttcctgatagcgcactgggaagagggtcagggttaattcctctttgccttacgagcgacgaattggatagtcgagattaatgaatcgagcaacgcgcagggagagggcgtttgcggagtgagcgcacgtccgctgcctcgctcactgactcgctgcgctcggtcgttcggctgaggcgaagggtaagagctcactcaaaggcggtaatacggttatccacagaatcaagggatcacgcaggaaagaacaggtgaagaagaagcgacgaagaagccgtgaaaacgtgtagagggcagcgttcctaggagttttgcgagggggctccggtgccgntgaggagcatcggataaaatcgagggcgcaattcaggaggtggaggaaaacgggagaggattaaaggaagataccaagctctttccccctggaaagtcccctccttgcgctctccctgttgccgaaccgtgcgggctgtagcggataacctggtccgcctttctccccttcgggaaagcgtggggcttttctaaggcgtcaggctataggtatctcacttcagttgtaggtccttccctccaaactgggctgtgtgcacaaaccgccgttgagcccgaacacttcaccctatccggtaaggagtctcgtggagtcagccggtagagaggacgtatggcgagagagactggcaattgttat

SEQ ID NO: 4648 - DNA, 811 bp, Glycine max
  unsure at all n locations
  Clone ID: LIB3028-039-Q1-B1-D5
atcaagcagccaaanaaaggaacgggtagaggcccggagntgtctgaatggactggaggaaagaaaagtaactctctcccaagcacgctcttcctccttcttagatcccgtctttctcgaacccacacgccaaaaacatggacacaaaaagagaggtcccgacgaccngaaccaatttcggaaacacctactcttgcctcggtgtganagagctgaaaaagaagagacaaaactcccaagacaatgggttactagaccacatctatcttctaataaacaggaaaggtagaaaaaataaatagaggtaaaacgagagtaggagagagataaagtagagagagaaaggaaagaaaggaaagaaagaagcgaagaaaggagaagaaggagtgagaacttccctccaagagaagagagcatgagaggagaagaaagaaaaagaagactttttcggggacgactttactgactgaatttccaacaaagcaacaacaactaacggttctaaatagtacgacccggccgaaagagagagtatgtttcgaaatacaaaagacattcatcaagactgccacgtactggactggtacacgaactagaccgagactcaacgcaaaatttagttatatcttagacagttgcaattgcttgctcactaaatcaaactcgatttgtcaaccaactgagagagatgacaaaccagacagcttaccgtaattggatcaatcctgaaagatagctccaaaaggaactgtcatggagctgagtaagagtacggagtacgaacaagagaaaantaaaaatgacctcaata

SEQ ID NO: 4649 - DNA, 714 bp, Glycine max
  unsure at all n locations
  Clone ID: LIB3028-039-Q1-B1-D7
tgatttagtggcctatanaagagatgtgacgtcggatgggcaggtacgtaagcgcggaagtcggggcggggttggcttctgttttctcctggtttgggtcaagattaacccttttatcagcagacctgacagtgcaagcatttcccagacctgcatttctatagattgctaagtcatctgcctatataaaaagttttgaccatatgttaaaaatatggatgatgatgatgattgattgtgatttgagccgcagttgaaatgtgtaagcactttaaatgtaaggttgcaaacatggttgttacgtcgtttccatgcattggatgaaatttcctgtgtaaagatcaggcgttgactcagggggagggnggggngagaaagggcggccgccgactagtgaggcgcntcgaggcgggaattaggtccggaccggtacctgcaggcgtaccagctttccctatagtgagtcgtattagagcttggcgtaatcatggtcatagctgtttcctgtgtgaaattggtatccgctcacagttccacacaacataagaaccggaagcataaagtgtaaagcctggggtgcctaatgagtgagctaactcaaattaattgcgtttccgccaatgggcggctttcaagttcggaaacctgtcttagggctggaagagtgaaatcggcaagcggcgtggaaaagcggttgcggatgggggcaagggt

SEQ ID NO: 4650 - DNA, 957 bp, Glycine max
  unsure at all n locations
  Clone ID: LIB3028-039-Q1-B1-E11
actacgatgcacatcatgtggctacgacctcnggactgtgcttggccttgactctgcgttcagccccagttcaaccagctggaggcagggtaatttagcgttcattgcatcggcgctgcaggcaagtcgatatccacaatggggtctcaagcagagacaggggggaccttgcaagcccgacaacctaccatctgttggatcctgccctccatacttgattcgaacttgatgaggcgtacgacgcttaagattccattgagtacgcagagattctccgcgatgactcaggtattgtcgcaaggtcagagatgaagagcaaggataatttctggcttaagatctgtatggagtcgctgcccacgagacagcctttgagaagatgcagtggtctctttggctacaacgggcgtgaagccactagccagcaagatcgactaatgggtgtacaagcaccttctacccagactcagcgatcgtctacgggcacattcgccgctatcgtcgattagaatagggttgcgactgcgaagttccgtattggggctcagcacgttgactcttgctgagtccaacccgactgccttcgtactgggagacatcgactgtgtcgtaccctcctaacctcagtactgtttgtcatcggctagctcggtcctcgttatagcggcttccactacgactctgtttcgtcaccactcgcttatactatcatctcgtccaatcgcggtgaagcagattgcgcccactcgcccacgcgttagcacgtcggtgactctacggcatagacttagttgccagcgctgacgggggcaggcgtgtcatgatgcgaggtcaacacagtgtgggtgtcaacggagggcggtgtagtgagcggacgcgagaaggtctatccgcactcgtcgctcactgaagagcgcggctcacgcgagaacagacggcggactgtagtagtcgttg

SEQ ID NO: 4651 - DNA, 1042 bp, Glycine max
  unsure at all n locations
  Clone ID: LIB3028-039-Q1-B1-E6
ntggagctctcctgcgaggatagtctcgcgtcgcgtacgcgggacgtntcttcattctgctcccgatgatccggtagtagcggcgtcactgncgcctcgtntctgtctacgctactattagccgaggcacgctaggcacgacacgcgcatgttggaatgtcaggttgtcgcaatagcgatatgtccctcagaagggctacgcattagtgtgagngtgcggcgtgtcgtcggcgcagaccgcttcgtgcgaggnaggtcgcatctccgatgatgcatcattgcaagcctgagtcacggtagcacgagcganacgtgacgcgtcgtacgcactggactcannatttgcaagtcccgtatagccttcctatcacacgcgtaccgtaacctctcgtccngatcggagcactgcgttagagaccgggagtcgcagtgggcggtcgaagtgggaagcctagcgagagcgcgcgatcgggacggaancnagccagagcgcgacgcgtacagggcagggcctgcaaaggtcctaggcgtcgcagggcgagtgagccagcccctgcgtttcaagcggagcgagggntancaacncggcgactccgcggtgccccgagggcgtaggattgctctcaacggtcctcgtcagttcgccacctatcctatgtatttcagacaccgcttcgcacccagacatggtgtcttacccatctacgatgtgtttgtaatagaagacancgtccgatggcctccgtcctgcgatataacctgtgaacaacttactctcccctatcgtatcactgttcgtgacccatcgacggtggacnagtgtcgcgacacgaatcattcccatcggtcgtattcatcaggctcccaccttcttcttctccccgtcccccgcctttttcttcttagtgacgttgagcatagcagggacttcttatcccgcttatgcttctccttcaggcgggttcgcgagggcttctnacatctcgcacgtccgagccagcgcgatcgttgccagtgcgtgtcacgggacgcctgaagcttg

SEQ ID NO: 4652 - DNA, 697 bp, Glycine max
  Clone ID: LIB3028-039-Q1-B1-E9
gagatgaattaggtggcctatagaagagctatgacgtcgcatgcacgcgtacgtaagctcggaattcggctcgagggctgctgctgcattgaagggttcagatcatcgccgtgcaacaaatgtcagtgccagactggattctcaacaaaagaagctcaaccttccaatcctgccaaccaccactattggatccttccctcagactgtagaactgaggagggtacgccgtgaattcaaggctaacaagatctccgaggaagagtatgtaaagtcaattaaggaggaaattcgcaaagttgttgagcttcaagaagagcttgatattgatgttcttgttcatggagaaccagagagaaatgatatggttgagtacttcggtgaacaattgtcaggctttgccttcaccgttaatgggtgggtgcaatcctatggttcccgttgcgtgaagccaccgatcatctatggtgatgtgagccgcccaaagccaatgaccgtcttctggtcatctctggctcagagctttaccaagcgcccaatgaagggaatgcttaccggtcctgttaccattctcaactggtcctttgttagaaatgaccaacctagattctgagacacccagattcacactcacatgtgctactcgaacttcaacgacatcaaccactccatcaatcacatggacgccgatgttatcacc

SEQ ID NO: 4653 - DNA, 821 bp, Glycine max
  unsure at all n locations
  Clone ID: LIB3028-039-Q1-B1-F4
taattagtagatgtactctgctcatctatatatagttttctattattatctgttcattggtatactaaaccttagttgatatttctcttctatttctctacatatccccactcatagctctaatctaatttctatatttttcaattttatgtcctaactctctacttatagattacaactacttactcattaaaatatatttattttttaatttctcaattttatttttctattatctttattttcttnttaaaactccaaactttctatctcattttttttttctttcacttattatcttttctattcttctacattttatttcaaattttttagaaatctaattttcatatctttttaaaatctaaatctatataaatctacaatacacaataaactaaatctaacctacgaaattatctcgaataatttcttctttttgccacgaaatatntacaataactctttttattaaaaaaanttctctttttaatctttactttttcttcctttatttattttactttcttttatattttttatctcttactaatttttttgtattcaagaccactttctttatttttctttttttattttatctttcttttttgttcttattgttatatcatttacctttctaaactcttttttattttcttttattttatttacttttatttttctttctttattcttttttattctacattttaatttcacaatttnttttatttaattttctctttatatatttnaactcactatttctcttctttaccaaaatctactaaacttatatactctttcctgctcttata

SEQ ID NO: 4654 - DNA, 724 bp, Glycine max
  unsure at all n locations
  Clone ID: LIB3028-039-Q1-B1-F5
ggctttaggtgagcctgatanagtgagctagcgaccgcggatggggaggtacgtaagctcgggatgcagcgcggccatgggcgcttccacttattcgcgcgttttcgcagaaacgtggctggcctggttcaccacgcgggaaacggtctgataggagacaccggcatactctgcgacatcgtataacgttactggtttcacattcaccaccctgaattgactctcttccgggcgctatcatgccataccgcgaaaggttttgcgccattcgatggtgtcaacgtaaatgccgcttcgccgtcgcgcgcgagttgcaagctctgcattggtggagcgggcaacgcgcggggagaggcgggttggggtattggggngcgctgcgggggtcctcgctcactgacgcgcggggtgtcggagcgttcggctgcgggggagcggtatcagctcactcaaaggcggtaatacggttatccacaggatcaggggataacgcaggagaggccatgtgggcaaaaggccagcaaaaaggcagggaccgtagaaagggcccgttgctagggttttccagagggtccgcccccctgaccagcatcacaaaaatccgagctcaggtcaaagtggcaaagggggagaggagggggcagggtcgatgcggttccgcggtggctggggggcgtgggggctggtgtggnggcggcggggggcggggtncggggggggggta

SEQ ID NO: 4655 - DNA, 694 bp, Glycine max
  Clone ID: LIB3028-039-Q1-B1-F9
ggaatgaatcaggttgcttatagaagggcaatgacgtcggaagcacgcgtacgtaaactcggaatcggccaacgcgcggggagaggcggtttgcgtattgggcgctcttccgcttcctcgctcactgactcgctgcgctcggtcgttcggctgcggcgagcggtatcagctcactcaaaggcggtaatacggttatccacagaatcaggggataacgcaggaaagaacatgtgagcaaaaggccagcaaaaggccaggaaccgtaaaaaggccgcgttgctggcgtttttccataggctccgcccccctgacgagcatcacaaaaatcgacgctcaagtcagaggtggcgaaacccgacaggactataaagataccaggcgtttccccctggaagctccctcgtgcgctctcctgttccgaccctgccgcttaccggatacctgtccgcctttctcccttcgggaagcgtggcgctttctcatagctcacgctgttcgtatctcagttcggtgtatgtcgttcgtctcaaactgggccgtgttcacaaacccccgtttagcccgaacggtgggcctttatcggtaacaaccggtcttgattcaaacccggtttgacacgacttaacccactggaagcagccactgggtacatggttaccacaccaaggtttttggcggggctacaggtttcttt

SEQ ID NO: 4656 - DNA, 738 bp, Glycine max
  Clone ID: LIB3028-039-Q1-B1-G10
agtctcaccgaatgaatcaggttgcttatagaagagcaatgacgtcggacgcacgcgtacgtaaactcggaatacggttatccacagaatcaggggataacgcaggaaagaacatgtgagcaaaaggccagcaaaaggccaggaaccgtaaaaaggccgcgttgctggcgtttttccataggctccgcccccctgacgagcatcacaaaaatcgacgctcaagtcagaggtggcgaaacccgacaggactataaagataccaggcgtttccccctggaagctccctcgtgcgctctcctgttccgaccctgccgcttaccggatacctgtccgcctttctcccttcgggaagcgtggcgctttctcatagctcacgccgtaggtatctcagttcggtgtacgtcgttcgctccaagctgggctgtgtgcacgaaccccccgttcagcccgaccggtgcgccttatccggtaactaagcgtcctgagtccaagcccggtaggaccacaacattatcgcaactgggtaccatgcagttggttacacgctctgttgacaactctaggggctatacgctgcctttggcgaacgtctcgagatacgggtacgctaccctctagttctccggactcgagacgcgccacgtgcgagttggtacgcgtcaatctgggtgactgcacgttcgagtcgatgcaagatgtgacggcgcgcgtgtcgagcagatacgcgctctgcggttt

SEQ ID NO: 4657 - DNA, 677 bp, Glycine max
  Clone ID: LIB3028-039-Q1-B1-G2
tgggggagcgggcagtggggaggtactggagggaggaagaggggcagggcaccatttgtgacatgtgagcaaaaggccagcaaaaggccaggaaccgtaaaaaggccgcgttgctggcgtttttccataggctccgcccccctgacgagcatcacaaaaatcgacgctcaagtcagaggtggcgaaacccgacaggactataaagataccaggcgtttccccctggaagctccctcgtgcgctctcctgttccgaccctgccgcttaccggatacctgtccgcctttctcccttcaggaagcgtggcgctttctcatagctcacgctgtaggtatctcagttcggtgtaagtcgttcgctccaagctgagctgtgtgcaggaaccccccgttcagcccgaccgctgcgccttatccggtaactatcgtcttgagtccaacccggtaagacacgacttatcgccactggcagcagccactggtaacaggattagcaaagcgaggtatgtaggcggtgctacagaggtcttgaaatggtgggctaactacgggtacactagaagaacagtatttggaatcggggccctgctaaagcgaattaccttccgaaaaagaagttgtagccctgtatccggaaaggaaacaacggcgggaaccgagaggttgtttgttgcaaca

SEQ ID NO: 4658 - DNA, 702 bp, Glycine max
  unsure at all n locations
  Clone ID: LIB3028-039-Q1-B1-G4
agcggtagacgcggaagagggagaagtcggggggctatanagggagaggggaggagagggggnagaggggtcctacttttttgcgccattcgatggtgtcaacgtaaatgccgcttcgccttcgcgcgcgaattgcaagctctgcattaatgaatcggccaacgcgcggggagaggcggtttgcgtattgggcgctcttccgcttcctcgctcactgactcgctgcgctcggtcgttcggctgcggcgagcggtatcagctcactcaaaggcggtaatacgggtatccacagaagcaggggataacgcaggaaagagcatgtgagcaggaggccaggaaaagggcaggaaccgtgaaaagggcgcgttgctggcgtttttccataggcgcggcccgcctgacgagcatgacagaaatcaacgctcaagtcagaggtggcgaaacccgacaggactataaagataccaggcgtttccccctggaggctccctcgtgcgctctcctgttccgaccctgccgcttaccggatacctgtccgcgtttctcccttctggaaacctggcgctttctcagaactcaagctgttggtaacccaatttcgtggggggcggttcgggggaagctggggtgtttcacgtggcgcgcgggggggtgcgggggggggtggggcgcgggagggaggaggcgttggggaagcgggca

SEQ ID NO: 4659 - DNA, 712 bp, Glycine max
  unsure at all n locations
  Clone ID: LIB3028-039-Q1-B1-H11
gatgatcctangatcgcacttagaagactgagacgtcgggtctacgcgtacgtaaactcggaattcggctcgagagaaacaaccgcaagatggataacgatgagccctatggtgaagcaaggatgacaaaggcacaacctagtgcttttcatctttagtggcactatttggatgccaaaacgttaatttcagctacttgtcttatgattttggacctttttctcccttgtaactaggttgctctcatggttttgtatcaaacacccgtgacgtgttttaatcttgaaaggctgaatgtatttaattattattattaacagaatagagaaaagggcggccgccgactagtgagctcgtcgacccggggaattaattccggaccggtacctgcaaggcgtaccaggtttccccaaaagtgagtcgtattaaagcttggggtaatcatgggcaaaggcgtttcccgtgataaaattgtaatccggctcacaattccaaacaacatacgagccgtgagccataaagtttaaatccctggggtgcccaaatgcgtgagccgactgcgaattaattgcgtggcgcgcactgccccgcgtttccagtccgtgatagccgtcgtgccaggcgtcatttatggtgtcgtgcacagtgcggggatatggcgttttagtgtctggcgccgcggacggttgtcctttcgccagttaggctggtt

SEQ ID NO: 4660 - DNA, 1648 bp, Glycine max
  unsure at all n locations
  Clone ID: LIB3028-039-Q1-B1-H12
attcgtatgtagtccgaccatcncgatctnggactgaagcacgtacttgggtacgntcatccgtctncaggtctctatgtcgtgtatcagtacagagactctgatactgtcttagtctgcgcaggtccttgatncgcagatcgtcactgctgtctgatatcacggctgcatctagccgctgtatatgacgtgcagccatcacagatgtctacgtcagtactgcctaactttccgtgtcgcattcatctangcctgtcatacagcgatgagagtggtcgtccaggttggacatgcatgcttcgactctttgacgttgtgacagactggctgctgatcggatcgccctactcgactagcatgaaccatgtcagtgcagacctcgaactgctggctatctgcgtcgtacgacgtctcgacgacacgactgctcgtacctatacgacgctctgttcactcagacggctgctagcttgatcgactgtcctgaacgacgtgcgtgtcgagctctcctgccatatcaatggctgattgctatgctgttgtagtctcggtacaactcatggtcatgatctatgtactgagtacactcaatgatggactgacacgatgtctggatcgtactgtctcggatgatgcagcactactctactgcttgtgattccgctcactcgatatcacgtgtacgtgtcttcacgtgcacactactgagcgctatcggantagtcacactgtgactcgactgatcggcgtctgatctacactcgacgtgatcatgacacgttccgagtaccagcgcagctcgtgtcgcgatactgacttcactcgactacgactgcgatccncactcactctactctcgatacgtcacgcatctcacctctgatctgcgctgtacggcgactgagctatctgctgcacatgcactctacactagcttctgactctnctgtctatagcactgctactgactcctgcatntgcatctgcatctcgtcatctagtactaaactgcgtatgcgcatcgaatcctcgatgtgctaccgctngcgtgcactgctnantgactctcgacactcgatacgtctacgcgcactgcactatcgtatcgcactagtcactgctactgtacctacccnctgtactcgacatatcancatatntgctgatgagatactgactcagccttcgtgtcgacctagccatgacgactgactagctttatactctactngttgtctgtactctctatgtcgtcatacatagcgatcgtgtcatgacaagtactgctctactgcaccgatctccgtcactcactcttcgatctcactcactatgctactcgtcgatctgactcgtcacgctgtacctgactgctacctacggactgcatcatgacgactgtgactagtgacttgtactctgatgcntngactggcatacagtatcgtgtgatgtgatactcgatcacggctcgtgcactgtcatagctgcatcatactactgacatagatgatgcagctancatngtccatctcgtntgagactcgatgtgccncttgattcttaatggactntatcacttctatcgaactgatgcgcgccctgatgctgacactcgacacgatcacgactgtgtcgtagctgtgtg

SEQ ID NO: 4661 - DNA, 715 bp, Glycine max
  unsure at all n locations
  Clone ID: LIB3028-039-Q1-B1-H7
tcgatggctaaggagcggaaanagaggaagggggagggtggggggccacctagacgagggaggcagagggaagaagggatgataccgtatttccataggggccggcgccctgacgagcatcacaaaaatcgacgctcaagtcagaggtggcgaaacccgagaggactgatgagagaccaagcgtttccccctggaagctccctcgtgcgctctcctgtgccgagcctgccgcgtaccggatacctgtccgcctttctcccttcgggaagcgtggcgctttctcataggtcaggctgtgggtatctcagttgggtgtaggtcgtgcggccgaaagctggctgtgtgcaggaggcccgcgtgcagcccgaggggagcgcgggtgtccggtaactatcggcaggagtgcaggggggtgggacaggaggggtcgccactgggagcagccactggtaacaggattagcagagcgaggtatgtatgcagggctagagagttcgtgaagtgggggcctaactacggggaagctagaaggaaagtatttggaagggacgccctgcggaaggcagttaccttcggaaaaagagttggtagctccttgattcggaaaacaaacaagcggggggaacggggggttttttggtttgcaggaacgaggaggtggggggtgcaggggggggggagggggggtaggggggaggggtggggggcaggggta

SEQ ID NO: 4662 - DNA, 785 bp, Glycine max
  unsure at all n locations
  Clone ID: LIB3028-039-Q1-B1-H8
cgcgtcgaggaggatgaggggtgagcaggggggctatcgcagctgcggaggagacgagagagagnagaggagacttcgactgtgagcagcacaaaaatcgacgcgcaagtcagaggtggcgaagcccgagaggactataaagatgccacgcgtgtccccctggaagggccctcgagcgctctcctgttccgaccctgccgcttaccggatagctgtccggctttctcccttcgggaagcgtggcgctttctcatagctcacgctgtangtatctcagttcggtgtaggtggggcgctcgaagcggagcgtgtgtgcaggaagggggcgtgcagcgggagggcggaggcatgggggggtgggcgagcgggtagagggcgaggggaggtacgacacgggtggggcgccgggtggggaggagggcgggggcggacaggcggtggcgaaagcgaaggtatgtaatgcaggtggcgacaagaggttccttgaaagtgttggggctgaagtgaagacggaggcgaggggaggaacacgtactattgttttgccgcggcggcgcactgaattccaaggtgaggtggtgtgaggaaaggggttgacgccggcctttgaggcacgagaagctgaaccaaccgactgtggtggagggggattctttctgtgtgcgcggggagagagggggggggtatgactaggccgagggctttgcaggtgggctggggggctttcagnagggaaggtgggaggcggggggngaggggggaggagcttggggagcgggcgggta

SEQ ID NO: 4663 - DNA, 708 bp, Glycine max
  Clone ID: LIB3028-039-Q1-B2-A1
ttaattctaggccgccttaatagagcaatcaacgtcgtacgcacgcactccttcatctccgcagtcttctccacgcagaaccgcttagaatagccggacagatacgaccacaactctagaccttcaagtttgtgatgcacgagcaaatggagacaatgggccgtctatggaggagcaaagctgaggctaagtgacatcgcgcattaagaggtgctcacccctcttggcgtcaggacacacatgtctccgtcgatcagtttcacgttctttgatcaggacatgctctcggagatcacgggatcctccacaagaataatgatcagctaccagtgaacgaaaagacagaagatgccacagatactactcctcgtccagcaccacctgttgcgtcactgggacaccgggaatcgtgctcaacaggaatgacaggccaacgagacgcaatgtacattaggcatcactcatgagaggcttcccgattagcaccccacgacatacgaggaaaacgaaaaggaattagacattggtgctcagttatatttaagacttggataacgcttttttgttgggtgagaaatcttaattctggcgtgcctaatttcacttcaccatatgacatccttgtggggttccttggagttcctgatgcatacctaagttactttactaagggtatttaactcgtccaattccaatagaaaaatttgt

SEQ ID NO: 4664 - DNA, 726 bp, Glycine max
  Clone ID: LIB3028-039-Q1-B2-A3
tgaataatgtggcggccttgaagagctatgacgtcgcatgcacgcgtacgtaagctcggcattcggctcgagcttcttccacaggagactatgttgcagacactcccttttgagagactaccccatcctcgggatgctgccacaattacgcttcaacctgtggagtgcccatgattttttcactgagatattgaaacgggatggaccaagaggtgagttcactggaccttggattaccagcatggactaattggtcacttgttagcccagcaaggtccaccagatgctgtccaggaatttccacaactacgtcaagggacccgagtttcgtcacatttttcatgccttcggagacgggattttcaccggctgactttgaagcatggcagtacaacagggaatatcttccattctctctttaaccagcatggctttcaagtgtctttagttgtcaccattcaaaccaatgtgcagaattgtcaccttcgaaccatggggtcagctagagcaccatggaagcattgtggctttgctagtaggtctgcaatcagcgtcacgttcggggattggaggtcgaaaagtatcgtggaactgacctcttgtgcacattcgacggccctttccctgagccgcaagatggaaccccatgggattccaaggtttcctgttatagggtcccattcccaatggcattgccgtatttatggtccaattgggtaaagtctg

SEQ ID NO: 4665 - DNA, 753 bp, Glycine max
  Clone ID: LIB3028-039-Q1-B2-A4
tgaatcatgtggcagctagaagagctatgacgtcgcatgcacgcgtacgtaagctcggaatttggttgcgactgagatatttatgccagccagccagacgcagacgcgccgagacagaacttaatgggcccgctaacagcgcgatttgccggtgacccaatgcgaccagatgctccacgcccagtcgcgtaccgtcttcatgggagaaaataatactgttgatgggtgtctggtcagagacatcaagaaataacgccggtacattagtgcaggcagcttccacagcagtgggatcctggtcatccagcgggtaggtaaatgatcagtccaatgaaccgttgcgcgagacgattgtgcaccgccgccttacagggttcgacgccggttggttccatgaatcgggacgacgacttccgggagccacttggctgggctccgacatgctacttgcccgcatatctggtgtccacggtcgagttagtcggtgaagaacagtcggttccagcaagcttgcactttagaccctcccgaatgaccccgccatccaactccgggagacctggattgttcctaagtttccgtacccaccctggcgatcctgaacctttccagcctgccctgggtacgtacctacgcgttcaagttaatggtccgacccaagcgtcccaagtggcagggcctgcggaggccaatagttagccggcaacgggggcgctgtgtgcccgcgatgttccctcggggacagttctctgt

SEQ ID NO: 4666 - DNA, 728 bp, Glycine max
  Clone ID: LIB3028-039-Q1-B2-A7
ttaataggcggcatatagaaaagcaatgacgtcgcatgcacgcgtacgtaagctcgggaatcgtaacaaggccgcgttgctggcgtttttccataggctccgcccacctgacgagcatcacaaaaatcgacgctcaagtcagaggtggcgaaacccgagaggactataacgataccaggcgtttccccctggaagctccctcgtgcgctctcctgttccgaacctgccgcttaccggatacctgtccgcctttctcccttcgggaagcgtggcgctttctcataactcacgctgtacgtatctcaattcggtgtaggtcgttcggtccaagctgggctgtgtgcacgaaccccccgttcaggccgaccgctgcgccttatccggtaactatcctcatgagtccaaaccggtaagacacgacttaatcgccactggcagcaaccactggtaacaagattagcacagcgagggatgtacgcaggggctacaaggttcctgaagttggaggcctaaatgaggggtagactagaacggacaattatttggtaactgcgcgcgggtgaagccggttaccttacggaaaaaagagttgggaatctcgtggatcaggaatcaaactcacaggtcgggactgcggggattgtttgggtagtccccaagtacactacggggaagcagagatggaattcaagatagaatcgttggccggtttccaaaggcggtcagat

SEQ ID NO: 4667 - DNA, 696 bp, Glycine max
  Clone ID: LIB3028-039-Q1-B2-A8
ttaattaggtcgcatatagaagagcaatgacgtcgcatgcacgcgtacgtaagctcggggcgtttttccataggctccgcccccctgacgagcatcacataaatcgacgctcaagtcagaggtggcgacacccgacaggactataaagataccacgcgtttccccctggaagctccctcgtgcgctctcctgttccgaccctgccgcttaccggatacctgtccgcctttctcccttcgggaagcgtggcgctttctcatagctcacgctgtatgtatctcagttcggtgtaggtcgttcgctccaatctgggctgtgtgcacgaaccccccgttcagcccgaccgctgcgccttagccggtaactatcgtcttgagtccaatccggtatgacactacttatcgccactggcagcagccactggtaacaggattagcatagcgaggtatgtaagcggtgctacagaattcttgaagtggagggctaactactgctacactagaagaacaatatttgggattccgactctgctggaatgcagttaccctcggaaaaaggcttggtagctcttgattagggatacatccaatcgtggctaagggggtttttttgttgggatccataagagttactctcaggaagaaccgggtttccagtaagtcctttgattcctatctaggtggctgaggccaagtg

SEQ ID NO: 4668 - DNA, 704 bp, Glycine max
  unsure at all n locations
  Clone ID: LIB3028-039-Q1-B2-A9
gtcangaagcctattttgtggctatntagaagagcactgacgtcgcatgcacgcgtacgtaagctcggaattaattccggaccggtacctgcaggcgtaccagctttccctatagtgagtcgtattagagcttggcgtaatcatggtcatagctgtttcctgtgtgaaattgttatccgctcacaattccacacaacatacgagccggaagcataaagtgtaaagcctggggtgcctaatgagtgagctaactcacattaattgcgttgcgctcactgcccgctttccagtcgggaaacctgtcgtgccagctgcattaatgaatcggccaacgcgcggggagaggcggtttgcgtattgggcgccagggtggtttttcttttcaccagtgagacgggcaacagctgattgcccttcaccgcctggccctgagagagttgcagcaagcggtccacgctgggttggcccagcaggcgaaaatccggtttgatggtggttaacggcgggatataacatgagctgtcttcggtatcgtcgtatcccactaccgagatattccgcacaacgcgcagcccggactcggttaatggccccattgcgcccaacgccacctgattcttggaaacaatcatcgcagtggggaacgatgcccctcatttatgcatttgcaagcgttggtggaagaacggacatggaattcacct

SEQ ID NO: 4669 - DNA, 750 bp, Glycine max
  Clone ID: LIB3028-039-Q1-B2-B3
aatattgtggcagcttgaagagctatagcgtcgcatgcacgcgtacgtaagctcggcattcggctcgagcaccttctctctctgcgatactgtatcctgttgtagctagctcctcgaaaatgctgggacgcctcggcgggagtcgcatcaaagagatcggtcagagtctccgttaaacttcgaggggtttcgcacacgcacttgaacgcccagcttgacaaaccggtgaataaaccgaatgtttcactgggaattcatcgatgtctatctagcataggttaccgagatcttgtcccactatacagccaggtaactgccgtctgggacaaagtgtcttacaaagttttaggataagtaacagggaggttaggttcttgtgtccggtttgaaatacagtatgcaagccaggccaaggtttgatcaaagctgtacccgagccttttagaaaaggcttatgagtaggatcccaattaatctctagcgttatcacagtcagacgaaatccaaggcgcaattctaagggaaacaatgggctgtgctagaacgccagtttcaaaaagctagtcgtaaacgacaagttcccaggtgttcaaggcgcaaacgaacatctgaagatctgggtcctcaaaatttggccacaaaactcagcgggaggagatgcacactattcacttcagcattggtcacgtgtaatgggatgtgagtaaatgcagcgaagtggatgtaaccgccaagtgaagtctagccatg

SEQ ID NO: 4670 - DNA, 713 bp, Glycine max
  Clone ID: LIB3028-039-Q1-B2-B8
tgaattaggcgacatatagaagagctatgacgtcgcatgcacgcgtacgtaagctcggaattcggctcgaggtgcaactgatactgatggtgattttcctgttaagttttgattcaagagtaataaagactcttctctatggtactataaaaagatatataaaaatggcggccgccgactagtgagctcgtcgacccgggaattaattccggaccagtacctgcaggcgtaccagctttccctagactgagtcgtattacagcttggagtaatcataggcataactgtttcctgtgtgaaattgttatccgctcacaattccacacaacatactagccggaatcataaagtgtaaagtctggggtgacgaatgagtgtgctaattcacattaattgcgttgccctcacagaccggtttctactcggaaaaactgtcgttacaggtgcacttaatgaaacggccagctcatccgcaagaggtgggatgcggtaatggtccccaaggtagcattaggaattagcaactaggaaggatcacagctgatatggcaacaaaggtatggaccacagatgaattgaagcaagctggtccgaacatattaggcaaaaataatggggaagaaccagtggaggtaagatttaagcttggtttccgagacaggaagaaggccacgtgtgtgggtgaaatgccagtccgggtcagactggcgctg

SEQ ID NO: 4671 - DNA, 698 bp, Glycine max
  unsure at all n locations
  Clone ID: LIB3028-039-Q1-B2-C10
ttcgagaaggcaatttangtggccatatagatgagctatgacgtcgcatgcacacgtacgtaagctcggaattccgagcttggatcctctagagcggccgccgactagtgagctcgtcgacccgggaattaattccggaccggtacctgcaggcgtaccagctttccctatagtgagtcgtattagagcttggcgtaatcatggtcatagctgtttcctgtgtgaaattgttatccgctcacaattccacacaacatacgagccggaagcataaagtgtaaagcctggggtgcctaatgagtgagctaactcacattaattgcgttgcgctcactgcccgctttccagtcgggaaacctgtcgtgccaactgcattaatgaatcggccaacgcgcggggagaggcggtttgcgtattgggcgccagggtggtttttcatttcaccagtgagacgggcaacagctgattgcccttcaccgcctgggcctgagaaagttgcagcaagcggtccacgctggtttgccccagcaggcgaaaatcctgtttgatggtggttaacgggggggatataacatgaactgtcctcggtatcgtcgtatcccaataccgagatatcggcaccaacgcgcaacccgggctcggtaatggcgcccaatgccccagcgccatctgatcgttggaaaccagcatcgcagtgg

SEQ ID NO: 4672 - DNA, 756 bp, Glycine max
  Clone ID: LIB3028-039-Q1-B2-D1
attattggcacgacagaagagctataacgtcgcatgcacgcgtacgtaagctcggaattccgctcgaggatggcgcaaaattcaatgacgctttggctgtgtgcttcaatcgcattcactggcatacggaatcacgaaattagccgggaccatgcgatcacatgtttgggccctctactggcatcccgctcatcttacacgctgagccacgtctttccgttatcgccaacggtcatcacaccactcaaaggccgtaatactgatatccacagctgcacctggataagcaagaaagaacatgtttgtctacagacaacgatacggcaagtcacgttcatatggcacgttgcatgggttttactatttgatccgccaccctgacgagcatcaaaattatcgatcctcaagtcagaagatgtttaaaccccaacaagatctagtacgataccaggttgtttctccactggaaatctcccgttgttcgacactcactgtttccaacccttgcaggttttaccgggtatacctgtccgtccttttctcccattcgggaaagcgttgccgcctttctgaataactccactcctgtatggctacctcagtttaaggttgttcggtcgatatccatccaaacctggagctgttgtgcaagaaaacccccggttaagctcctaccgtggtcgcccttattccggtaactatcatccatgaagtctcaacccgggtaggaacacaactttatcgccaagggtattg

SEQ ID NO: 4673 - DNA, 1442 bp, Glycine max
  unsure at all n locations
  Clone ID: LIB3028-039-Q1-B2-E11
atacttagaatattggatcanagtcactacatntgccttatctcgaccgtactgctgtacctcgtatcaatcangtggcctcntaatacatcactcctcgcgcacagtctgtgtgtcatgcttgtactgccnatacgatcatatcgtcttacctgattgtagacattactgacttatcgctcgcactacctatcgcatcgaatgtatgctttactgactgactgatagactgcacgatgtctctatttgacctactgcactactgaatgtgctagcgggctcnaccaactacctgtatcttgcctgtactgcctattgaatggacgactctctacagtctcgacctgctatctctatgatggatcgtttgactgatcgtctgtcctatgtctgatgttactatcgcacctacgtaatactctctcaacatctgcagacagaatcctcagtggacttgatgcaatactgacttcttacactggctccctatcgcctgatcactatactcatgacatgcgtctcgccgtatgatctgcttatgaacttctctactcaccgatctgtctctccacaatatctctgatccgacgatcgatcaacttaacttgactacaaatctgacatgatctcacgtactgatctatgcactgcaccatctcgatcgacgtactggactgaactgtctgccatgaactcacctgtctgactctcattgacacgactcacatgatctntaacgtactctactctcagaactatatagacctatctgattactctgacataactgacgagttcgactgtcatgatatatctaacttgaatacaccttatgcgcctgactggtcgactctcgtcatctgtacttactcactcacttacatactctgactcgatgtctccattcactgtgaatgacgtgacttgatgacatgtcatgtctgttctgcctcatacagtctgactcactgtgtctccacggactccatctgatcgaatatactgtactgtctgctacgtactgactgtactatcatncgatgtacacgatctgaccgactgtacttgcccatactcatctcgcttaacttgactgaactcgtacgtcagcgagctgcctagtctgcatcgcactatcctctacgacattgctctctactggacctgcctcactctgacgcgatctgcatctatcatatactcacctacattcacacgtcatcgnatatatatgatatagtcatcgaccgcctctgatcacactactgactgtctgtacctgtacgttgatgaacgtngacgatactccactcgtctcacctcgtacgcgtactgaactcgccgacactcactaacttcaactgtactcaactgacctatatcacactcacgctcctctatgtgctcttatcgatacttgtctgatctactctgactcttga

SEQ ID NO: 4674 - DNA, 940 bp, Glycine max
  unsure at all n locations
  Clone ID: LIB3028-039-Q1-B2-E12
tctacgatgatcatttagtagctaacgccctcatggacaagncgtacgtgcaatcgtgattcgactccgagatcgtctcgtggaaagtagcaggattacttgtcagttccatgttggcaacagcagttccgatgagttgctggctgaagacccttcgactggtaaagcggctgccattgtttgagttgcatgtgtcaagattcgataatcttgagtatccgttcatgatgaatcgtaatttacttggctgacgagtgactactttaatggcagacgcctcgacgcgatattacagatggtgcagctaataggtcctatgtacgctacgagcattcgttgaccaggattatcactttatgtagagctatggatctgacgcatcctctgatttcagtgcggcgctgcatctggtgttctatggtgggttgacttgccgagtagattggagtcggcagccaatcgcttcaactccactcgtgttcttgttaccgccctgtgggacactgatacgtaaatattactgtggagatcttagcggtctacagggtagtgacctacgtttcgcgcccttatggttcttcgctataattacgcggcctcacctacacctgactctactatagcgggctgacattctcttgccagtagcattgcctcgatgagtcctcactggtctatctgaatgttgcttcattataggattcattctattcacgctccgtattcactgcattacctcctacattacagagagtgacatctacgcacgacatgctgttcgcagctcacaggctaatgtcgcacatcctatgagtgagtcgctacggattgagcgaatatgcttatactggactgcagcacgatctctctatgccgctaggagagcgtgtcacgcgtgtcgaggattacgatgatagacgtcctatgagggtgcctgatt

SEQ ID NO: 4675 - DNA, 703 bp, Glycine max
  Clone ID: LIB3028-039-Q1-B2-F2
ttaatgtaggcggccctatagaagagcaatgacgtcgcatcgcatcgttcgtctcggaattcggctcgaggtaaacaacatagaggaagaatgacaggaatatcctatcgagggaatcatatttgcttcggaagatatgctcttcaagcacttgagccagcttggataggatctagacaaatagtaacggcatcgaggccagtgtcaattcctgttcggtaacgggaggcgtatcaggtttccctatagtgagtcgtattagagcttggcgtaatcatggacatacctgtgtcttgaggaaaatggtcacccgctcacagttccacagaacatacgagccggaagcataaattgtgaaatgtgtggtgtaccaatgagatgatccaactcacagctatttgcgttaacatcatccaaaatgcctatacgaactcaattcattatttcagggtaataaattagaaccacaagaaagaggtctttaagattagaacaaaaaatgcaaatgtaggttcccttttttggacacaaaatatttttacttccaattttttgacggaaagaataacaagatgatatgattcaacctcaaactcattttaatgtaaccgagtatagcggagcatgcaaactgatgtgtattcgaatcctaagagctagtaatccacgatagcttaactggtgccattgttgttccgtaatg

SEQ ID NO: 4676 - DNA, 706 bp, Glycine max
  unsure at all n locations
  Clone ID: LIB3028-039-Q1-B2-F4
tttatgtggcctgctagaagagcaataacgtcgcatgcacgcgtacgtaagctcggaattcggctcgagctttgctcagtgaagatgcatctcaggatgctgctggaaaccctatgaacctttggagcttcgacgacctgccttccatggcaggagtcttctgaacaccttcatatccctttttatgtaaataaagctacaagaattgtgatcgtgatgttggtgatggaatccacagcaagaaaaccaacctgcttaaagcatatgtggagtttacttatcttgtagctaatgcagtataggactatatataggtttttatagggtatcctttgtgtgaaactcatcagacctcgttttcaggggattttctgtttgatgtccataaggattatcaattatgttatatatggtctgggatacagccaaaaacgccgcaacaatagggcggcagccgactagtgagctcgacaccccgggaattaattccggaccggtacctgcaggcgtaccagctttccccatagtgagtcgtattagagcttggcgtaaacaagggccaaaccggtttcccggtgtaaaattggtacccgctcaaaattcaaacaaacatacgaacccggaagcataaagtgtaaagcctggggtgccaaaagaattggccaaaatcaaattaattgcgttgcgctaatggcccgcttttcan

SEQ ID NO: 4677 - DNA, 705 bp, Glycine max
  Clone ID: LIB3028-039-Q1-B2-F5
aattgaatttaggtgagcctatagaagagctatgacgtcgcatgcacgcgtacgtaagctcggaattcggctcgagatgaattttaaggttgctaagtccaatgattatcaccaacacaacattacctcaaagaatgttgcatgttaacagtagtcgtatctttgtaaatgtgtgtttcaaattcaatgtagcaatcatgggacttatgtacgtttctaatcgtagtgtgtgatagtagaaagatttgaatttctcttcaagaaaaatagaaacagggtggccgacgactattgagctcgtcaagccgggaattaattccggaccgatacgtgcaggcatacgaactttccctataataagtcgtagtacagcttggagtaatcatggtcataactgtttcctgtgtgaaattgctatccactcacaattctacacaacatacgaaccggaagcagaaagtgtaaagcctagggtgcataatgattgagctaactcacattaagtgcgttacgatcactgcacgctttcaagtcgggaaacctgtagtggcaactgcattaatgaatcggacaacacgccgggaaaagcggtttgcgtaattagcgtcaaggaggatttcttataccagtgagaagggcaagagctggaatgccttcaacgacgtggcctgagagatttgcaacaagcggtcaagctggttttct

SEQ ID NO: 4678 - DNA, 689 bp, Glycine max
  unsure at all n locations
  Clone ID: LIB3028-039-Q1-B2-F9
atcacgttgctatttaggtggctatntagaagagcactgacgtcgcatgcacgcgtacgtaagctcggaatcgggcaacgcgcggggagaggcggtttgcgtattgggcgctcttccgcttcctcgctcactgactcgctgcgctcggtcgttcggctgcggcgagcggtatcagctcactcaaaggcggtaatacggttatccacagaatcaggggataacgcacgaaagaacatgtgagcaaaaggccagcaaaaggccaggaaccgtaaaaaggccgcgttgctggcgtttttccataggctccgcccccctgacgagcatcacaaaaatcgacgctcaagtcagaggtggcgaaacccgacaggactataaagataccaggcgtttccccctggaagctccctcgtgcgctctcctgttccgaccctgccgcttaccggatacctgtccgcctttctcccttcgggaagctttgggctttctcatagctcaagctggtagtatctcaattccgtgtatggtgtcgctcaaactgggctgtgtgcacgaaccccccgttcagcccgaccgctgggccttatccggtaaatacctcctgagtcaaaccggttagaacaccacttatcgccacgggatgagccactgggtaaggattccagatccaaggatttatgcggtgctacgat

SEQ ID NO: 4679 - DNA, 708 bp, Glycine max
  Clone ID: LIB3028-039-Q1-B2-G1
aattatgtggcctgctagaagagcaatgacgtcgcatgcacgcgtacgtaagctcggcattcggctcgaggtagtctccaccaccctaacgggcaccaaattaatccagacacatctccgacggcaccaaaaccgactccaccaccgcaaatgccacaatgtccaaagctaaacaccagccggaactcacgcgtcttgggaacctaggcatacagccaagggtccgccgcaatgaactcgtcggaccttccggaataggatgtataaggccccagctatgacaccggggaccacgagtggcattcacacttcgccgccagtgagcaaacgcagcagcaaccggcgccggattcccccttacaggggtcttcacccagcacgtgcgtgcgctgtccctggctttaaaagctccggccaactgcacctctccaaggatcttgcaccagtttcccgcgcgtcaaaacattgcgtccgacccgctagttcagaaaatgccgacgtccgggccgaataatccttcccgactgggaccagagtcacagaatcgactcggcccattcgccgaacgactattacaacaaccaagaacaatccgttaaggtgccaccgcaatagtatttggcacgtatccagaacatggtggccaaactcgttgttttaaagaatcggccgcacctttaagggccactacttaacccgggttcgtaa

SEQ ID NO: 4680 - DNA, 758 bp, Glycine max
  Clone ID: LIB3028-039-Q1-B2-G10
accacgatgacaatcacgtggcatatagaagagccctgacgtcgcatgcaagcgtacgtaagctcggaatacggttatccacagaatcaggggataacgcaggaaacaacatgtgagcaaaaggccagcaaaaggccaggaaccgtaaaaacgccgcgttgctggcgtgtttccataagctccgcccccctgacgagcatcacaaaaatcgacgctcaagtcaaaagtgggcaagcccgacaggacgacaaagataccagacgtttcgccctgtcaagtccctcgtgcgcccgcctgtgccgacgctgccgcttaccggatacctgcccgcctttcgcacttcgggaagcgttgcgctttcacatgggtcaccccgttaggtccggcaagagcggcgtaagcgcctgtgaggcccggacgtgtctgtgcgcgcgagccccccgagcaatcggtgcgcgagagccgctagccgcgtcacgagactcccgggacttcaagcctggagggcggagccccccttcgttgagcagccggcataccgagagggtccacgcgccgcgcagaaagcacatgcgcgtcaggagagcgtggctaagggtgtacgcaccggtgcgagcagctctgcaccgtcggaggcccgcatcgtcagcctgcgacgttgcagtgtgcagacaaaccacagcgcacccccggaaggcccgcgtcccaggtactcagctgcgatacgaacaacccgccctgcgtaatggttcgccttt

SEQ ID NO: 4681 - DNA, 1976 bp, Glycine max
  unsure at all n locations
  Clone ID: LIB3028-039-Q1-B2-G12
tgctaaatttgcagtattcgtantagtagtcnaaaagcatgcangnctatnangaacttgaacnagncgntgcnnctagtaactntctgcnngtntggtgctcgtccgaaagtcgngttcagtgtctgaagcatgctngcagactgttcctaggctcctgtacttacgctacgcactctcattgcgttacctgctatacatactgctgtnctatgntcatncaancnagatcacgataggacacactgtcgagatctcattcactagtgacagctagttcgnctcacgntcatgtattactacacgctagatacacggttctctagcacatgagcggtggtaggtctgcatactgactacacacgtgatacangatacgatactatgtttctgcacacagtgtgttgtaagcgnacggatagactacatacacactacatacatgtctctagatgctctatatgctaatatgactatcgcaatgtctacacgcatacttatacgctgcaatatcgtatnacagttgcgattctatgtacatggatcgacgataatatcttctacactctactagtgcagacagcgctatgtgctatactctgantactgttgcatnctgccatctgctctatatatgacccttgcttacgctgtggcgtatacatacgacacatgctactncatatgcgtatctgcacatcgtgactgactctcactactcactacgaatacgtactagcactgctgatacgatcgactatctatctctcattagtcatctgctatgtngatgacgatgacattacatctgactagctactagnactcgtcgacgcanctgtctgtcatgcatgcatgatcatgctactcttgactactngacgagtacgtgactacgcactgctgctncgatgcgatnattgctactacgcgctagtgctnatacngnctgtcattgatcgacncgcacgatctctgatgatctgcgagctaacatagaactacacatctcttctcgatgtcgaaaacgcgcatgattncgncaatatgctatgcatcactcgtacacctctgcgttgcgagtgatcgactacaaatngctgcgagcattcttagatgagtatgaattcatgacacgtcacgatgcaatgacacatagctaactgacaactgctgatcgacaancgatcaactganctatcgatctgctgtaccgtgnctactanctacgtactactgcaacgtcgatcactaatgtctgatgctgcanctatgacacatgactatgacatcgtcattcgatcatcgacgacgtactgacgtactactatgacgangtacctnctnatgcngacaacgatcattgtgctacgtagcatcgcgatactgctancttgattatcgagtcacgcatcagtagcactatgagtancgacgatcgacgcanctntacactgtgctacacgatnagcgacatacanatctgtgatcacttaccantactanacngacgagcgtantctctgacnatgctagcatagnagtgactaacatctngaacgatgatcatgcatnctncgcgacgancgtaccctagtcgcctacatcagtgcctaacngataatcgcgatttgtcgtgctcgtacatctgacgacgatgcaacgatctgctcgtactncgntgctacntggtctnntcacgctgcagcgactgantgtcngtactantcgtgatgctagatacgcnagctcgntgatagatgcaactatgactacgtnagncatacatnctaaccgttctcnatctacatcgantatcgatcgatgcatgactaacnagcatgatcgatgnacnagctncactactagcgatcganngcagtnancatcgatgcagtcgtangtntncangtntgatcntgtncatanctnctgatgtaacgtacgtactactanctntgaacangngctgtagn

SEQ ID NO: 4682 - DNA, 1818 bp, Glycine max
  unsure at all n locations
  Clone ID: LIB3028-039-Q1-B2-H12
atacgatancatatttcggacttcggtcgctcgtgtagcggacttggacctcactctatatntcgtgacctntgtgactcgtcatggtgctcgacgacagncatgcttcgcattgctcggcatctgttngctgtagtctctgccctgtccgtgcaggtattagtgttcgtctgtgcacgcgcatgctcgctctcgacgtgtctgcggacgtcgtacgtgagctcgtgtcgctcgtgaatcgcatgcccttgagtgtcatgagacgcgcatcttctcgctcgatcacgcgtacgtacgctcgctagtcgacatcactttgtgcgtgcgcggcgtgctgtgccatactatgctctcgcttcgacgtcgcctcacgtgcttcatgtgcatgcgctgccgatgcgcagactgtgctgtctcgcatcgctgcagtgcactgctcctgtctgctcgagctcgctctgctcgtatcgtcccttgctgtgctgtactactgctgctctgctcgtactctcacgcgctgtcgtccgccctatgatgcgagctcactgcgtgtgtctcgtcactcgctcgacgtatagtgtcttcgctcgctgctactcacactatctgtctctctgctctctgactggctgtgcntcgcacctngtactgctcgncgtgctcctcgctgtcgtgcatgctgactcgactagctctactgtcactctgctcacgtctgactactgctgcgcgatgcaccgtcatcgtatggtcgcngtgtcatctatgtcgctctgncgcctatctngtctgctgatgcatgcgtgcgtctgtgctcgtcgcgagcatctgatcgtgcgtgcgncgctctcgtcctgngnctgtcactgctctcntcgtcantngtgctacgtcatcgctgtantctctctacacgtgcgcgcacactcgcgatgctgtcctacctcgactcgctcgctcgtctacctctacgactacgccgtctgcacgtgtgcacgagcganacgaccctcgtctgctcgtctcgatcgctacgatattacgtgcgtctctgcatgagcactgtcgtctcactgagcgctctcgactctgctaactacggtcgctgctctcgtctgctcacngtcgtngtcgacctctcgatgcgctcatgatctgtcngcactagtccatatgctgctactgcgcatgatgctgactgacatcgtgtcatctgcatgcgtgtcgtgctgcnantcatcgtcagctgtgctctgcgctacgaactgacgtctcatcgagtagcgtcttgctactcctgtcgacatgcgtnctnctgagctctactatatgcngacttgcacagcgactgtgcatacgtcgtcgtctcatcttcagtgatcggctctctgctctctcgtatcgcacgtgtcgatgcggtgcgtgccgtctctatctctgtctgacgctctccgtgctgctacgagctacgtacacgtctgcgcgacgctnctgcatccgcgtcttgtcgtctctgctcgctatcctctcgtcgtgccgtgctcttgtgtctctctctatgatatcgccgagcgtgtcctctgatagctcgtcgcctgtgtcctactcngcgctcgtcatctcgtacgcgccatgtctcgtctctcgctgtgaactgtgcgtgcgtctgctctgccgcgtcgactgcctgcgtgctcgtgcccgtgctgatgatctctgacgcggactgcgtcacgtgagctcncttgcggctcgntngtgtacatgtcgcgngctctggctcgtgcgttgtgtctgacagtcgctatagcgctgtgg

SEQ ID NO: 4683 - DNA, 732 bp, Glycine max
  Clone ID: LIB3028-039-Q1-B2-H5
gaaatgtaatcaggcgacatatagaagagcaatgacgtcgcatgcacgcgtacgtaagctcggaattcagctcgagggtgacatgacgtcattataaagcaaacgtgcagctccatttagatatcaagggcctattgtggtgacatgacatccgctccacttaactgacgatcatcagaaatgtcgactgcaggtcagatgttacggtgcccaacacgacaacatcgataccaatcatttccacctgtacgctccatcgtgcgctcacccgttcgtaccctgccgcttactcgacatctgtacgccattctcacatcgagaaacgtgggccgttctcaaatctcatcctgtatgtatgacagttctgtgtaagacgtacgtcagacgcttggctgtgtgcaataaagcatcgttcaacccccaacgcattcaccattatccggtgcctattcctcgtgagtccaacctggtagtacacgagttaactcaacagacatcaggcaatggtcacaggaataacaagaccgaagtaagtaagcagtcctacaaaattcttttaatggaggccaaagtaccgccttcacaattacaaaaagtatcctggtcacactgcgcatctgctgaaacccagttaagccttccgtgaaaaggagttcgtaagcacgggaattcaatcaaatataaccatccactagggatcccttgggctcttttttgatttcaaccaagatg

SEQ ID NO: 4684 - DNA, 719 bp, Glycine max
  Clone ID: LIB3028-039-Q1-B2-H6
ataattagcggcactatagaaaactatgacgtcgcatgcacgcgtacgtaagctcggaattcggcgcgagcaaacattgattgcacccacggtagtaagtgagtttcccttataaaattcaatccccaaaacaagtctcacaaaattgagaaaaatttaaagaaatcaacacacacaaacacaacaacatatggaggtgctaagggtgcaaaccatagcttccaaatccaaagatgctgccatcccagccatgtttgttagggcagagacagagcaaccaggcatcacaaccgttcaaggggtgaaccttgaggtgccaattattgattttagtgacccagatgaaaggaaagtggtgcatgagattttggaggcaaatacggactggggcatgttccaaattgtgaaccatggccatacctaatgatgttattagaaaatttcacaactgttgggaaaaaggttccttgagttgccacaagaaggaagaagagttgattgctaagcctgcagggtccggattcattggaaggtagggcacaaagtttcacagacaaggaacatgggaaaaaaggtggagggattaattgttccagaatggtgtggagccccgtcgtccgaaaacagcgatattgtgaggccattaagcccccatcttacaggggaagtaaggcatggaaggtgcgagaacctcctgagcttggggggaccatgtgttt

SEQ ID NO: 4685 - DNA, 419 bp, Glycine max
  Clone ID: LIB3028-040-Q1-B1-A12
ggaataaggtgcctagcaagactagacatccagcagcctagtaacccgaattggccacttatttgctgaccgagggaaagggtaacagtctattcttggcggaaaatcgattcatggattgtgtggcaggaatatgtgggcaaggggaacattgtgtgaaatgatcggaaacgaggtactgcgatacagagagaaaaggaagaaccaaaattcgacaaaacaattcgatacgcaaccccaaaagcataagccggaaacccggccacgattaaaggccgccttcccaaacgaacagaaattgactcggatgtggaacgtctctatagccctggccctgcagtgctcatgctggacactccatacggcgtcgtaacatcgttttagttaatttcaaaattgaaaaaacaatggtttgatta

SEQ ID NO: 4686 - DNA, 474 bp, Glycine max
  Clone ID: LIB3028-040-Q1-B1-A4
tgaatcaggtggccctacagaagagcaatgacgtcgcatgcacgcgtacgtaagctcggaattcagctccgccatcgccgcttccactttttcccgcgttttcgcagaaacgtggctggcctggttcaccacgcgggaaacggtctgataagagacaccggcatactctgcgacatcgtataacgttactggtttcacattcaccaccctgaattgactctcttccgggcgctatcatgccataccgcgaaaggttttgcgccattcgatggtgtcaacgtaaatgccgcttcgccttcgcgcgcgaattgcaagctctgcattaatgaatcggccaacgcgcggggagaggcggtttgcgtattgggcgctcttccgcttcctcgctcactgactcgctgcgctcggtcgttcggctgcggcgagcggtatcagctcactcaaaggcggtaatacggttatccacagaatcag

SEQ ID NO: 4687 - DNA, 474 bp, Glycine max
  Clone ID: LIB3028-040-Q1-B1-A6
atgaatttagctggccacatagaagacaatgacgtcgcatgcacgcgtacgtaagctcggaattcagtcccatctgggtgccatcacgccatagcgcgaaacgttttgccccattcgatggtgtcaacgtaaatgccgcgtcgccttcgcgcacgaattgcaaggtctgcattaatgaatcggccaacgcgcggggagaggcggtttgcgtattgggcgctcttccgcttcctcgctcactgactcgctgcgctcggtcgttcggctgcggtgagcggtatcatctcactcaaaggcggtaatacggttatccacagaatcaggggataacgcaagaaagaacatgtgagcacaaggccagcacaaggccaggaaccgtaaaaaagccgcgttgctggtgtttttccataaggtccgcccccctggacaacatcacagacatcgaaggtcacgtcacaggtggcgaaaccctag

SEQ ID NO: 4688 - DNA, 480 bp, Glycine max
  Clone ID: LIB3028-040-Q1-B1-B12
ggaattgaatttaggtggccctatgcaagagcaatgacgtcgcatgcacgcgtacttaagctcggaattcggctcaagttctcctaaaacatctcaatgggttcttcttctattacaacatcgcccgcaaccatgaccatggctgcgatcgtgctcctgttcacggtctttgccgtttcctccgccctagacatgtcgataatctcgtacgacagcgcccacgcggacaaggccgccacgttgcgcaccgaggaggagctgatgtccatgtacgagcagtggctcgtgaagcacgggaaggtgtacaacgcgctcggcgagaaggagaagcgcttccagatcttcaaggacaacctgcgattcatcgacgaccacaactccgcggaggaccgaacctacaagctcggactgaaccggttcgctgatctcaccaacgaggaatacagggccaagtacttgggaaacaagatcgatcccaac

SEQ ID NO: 4689 - DNA, 470 bp, Glycine max
  Clone ID: LIB3028-040-Q1-B1-B3
tgaatgagtggcatagcgaagagcaatgacgtcgcatgcacgcgtacgtaagctcggaaaaggcacgaaccgtataaaagccgcgttgctggcgtttttccataggctccgaccccctgacgagcatcacaaaaatcgacgctcaagtcagaagtggcgaaacccgacaggactataaagataccaggcgtttccccctggaagctccctcgtgcgctctcctgttccgaccctgccgcttaccggatacctgtccgcctttctcccttcgggaaacgtggcgctttctcatagctcacgctgtatgtatctcagttcggtgtatgtcgttcgctccaagctgggctgtgtgcacgaaacccccgttcagaccgaccgctgcgccttatccggtaactatcgtcttgagtccaaacccggtagacacgatttatccccactgggaatttccactgggaacaggattattt

SEQ ID NO: 4690 - DNA, 477 bp, Glycine max
  Clone ID: LIB3028-040-Q1-B1-C10
aattgaatttaggttgccctatgacaagagcaatgacatcgcatgcacgcgtacgtaagctcggttaatgatcagcccactgacccgttgcgcgagaagattgtgcaccgccgctttacaggcttcgacgccgcttcgttctaccatcgacaccaccacgctggcacccagttgatcggcgcgagatttaatcgccgcgacaatttgcgacggcgcgtgcagggccagactggaggtggcaacgccaatcagcaacgactgtttgcccgccagttgttgtgccacgcggttgggaatgtaattcagctccgccatcgccgcttccactttttcccgcgttttcgcagaaacgtggctggcctggttcaccacgcgggaaacggtctgataagagacaccggcatactctgcgacatcgtataacgttactggtttcacattcaccaccctgaattgactctcttcgggcgctatcat

SEQ ID NO: 4691 - DNA, 474 bp, Glycine max
  unsure at all n locations
  Clone ID: LIB3028-040-Q1-B1-C12
tgaatttaggttgccctatacaagagctatgacgtcgcatgcacgcgtacgtaagctcggaaatcggctcgagcttccanaaccctccattatgaagaacgctaacagcaacacaaaactaatccttctccacccttatatccaaaaacaaggaagctccaatcgcctatggcttttagccttcatatccttctttacattagccttccttgccacccttatttacacaagagacacaacctcatcttcctctaccactacctcttccaccccattatctagtttcgctaacacccctttaccatccactgtaatcaacaccctcctccactatgcctccaaatccaacgacaccttccacatgccccactcagacctaaaaaccatctctgacgtgctccgaaagtgtcnctcaccatgcaacttcctcatcttcggcctcaaccatgagaacctccttttggaaggcctcag

SEQ ID NO: 4692 - DNA, 468 bp, Glycine max
  unsure at all n locations
  Clone ID: LIB3028-040-Q1-B1-D4
tgatttagtgcagacaaagagcatgacgtccatggaccgtacgtaagctcagggcgactagtgagctcgtcgacncgggaattaattccggaccggtacctgcaggcgtaccagctttccctatagtgagtcgtattagagcttggcgtaatcatggtcatagctgtttcctgtgtgaaattgttatccgctcacaattccacacaacatacgagccggaagcataaagtgtaaagcctggggtgcctaatgagtgagctaactcacattaattgcgttgcgctcactgcccgctttccagtcgggaaacctgtcgtgccaactgcattaatgaatcggccaacgcgcggggagaggcggtttgcgtaatgggcgccaaggtggtttttcntttcaacagtgagacgggcaacagctganttgcctttcacgcctggccctgaaagagttgcagcaagcggtccaccg

SEQ ID NO: 4693 - DNA, 545 bp, Glycine max
  Clone ID: LIB3028-040-Q1-B1-D8
tactcttgcagcgcccccctccccttctcgcgtcgggccgtctcgttcgctcaactcgtcggttcggcgcgttgcgtcgctcgcccgtgtctcggtcctctgcgcgctgtgtggtatacgttgtgtctctgcgggtcgcctgcctgtgctcttcgtttgccgctggggggggtgctggcttccctggcccccgtttggtgcttcgtcggcgtctcgtgctttgctgccgggccgccgtcccctgccttgggctcgccccctccgtggtcgttggttccgccgccccgtgcctcgctcggccgttcggggctcttcccggtggcccccttcctgtttgcgcgctgcgtcctcgtgcctgcggccgtgcctgtgttccggctcgtcggtttcgtttgtcgctcctgcgtttccggggctggggcttggtggccgcgtgcgcgtgcctgctttgggtgccctcgggggttcctctgcgcggtggcggccctcgctccgcgttcgctcttgctgtgccgcgtcggtggcgccgccgttcccgcgtcgtg

SEQ ID NO: 4694 - DNA, 471 bp, Glycine max
  unsure at all n locations
  Clone ID: LIB3028-040-Q1-B1-D9
atatggtggcacagcccanaagatatgtattcccatgcacccgtacgtaagctcggataacgccggaacattagtgcaggcagcttccacagcaatggcatcctggtcatccagcggatagttaatgatcagcccactgacccgttgcgcgagaaaattgtgcaacgccgcctttacaggcttcgacgccgcttcgttctaccatcgacaccaccacgctgggacccagttgatctgcgcgagatttaatccccgcgacaatttgcgacagggcctgcaagggcaaactgggggtgggaacccccatcagcaacgactgtttggccgccaattgttgtgccacgcgggtgggaatgttaatcaactccgccatcggcgcttccaatttttcccgcgttttcgcagaaacgttgctgggctggttcacccacgcggaaaccgtctgataagagacacgggatactctgcaag

SEQ ID NO: 4695 - DNA, 478 bp, Glycine max
  Clone ID: LIB3028-040-Q1-B1-E3
ttaattagtggcatacagaagacagtgatctcgcatccacgcgttagttaaacccggaattcgctccaaagtaagtttctatcaaaaatatttttttcttaaaataatatatagttaaattaaatatttaaaagtgaattaaatattcacaaaatttgaagtaaaaaagggcggccgccgactattgagctcttcaacccgggaattaattccggaccggtacctgaaggcgtacaagttttccctatagtgagtcgtattaaaccttggcgtaatcatggtcatacctgtttcctgtgtaaaattgttatccgctcaaaattccaaacaacatacaagccggaaccataaagtgtaaaccctggggtgcctaatgattgagctaactcacattaattgcgtttcgctaaatgcccgtttttcaatctgaaaacctttccttccaacttcatttattaattcggcaaccctccgggaa

SEQ ID NO: 4696 - DNA, 479 bp, Glycine max
  Clone ID: LIB3028-040-Q1-B1-E8
cgaattgaatttaggtgacactatagaagagatatgacgtcgcatgcacgcgtacgtaagctcggaattgactctcttccgggcgctatcatgccataccgcgaaaggttttgcgccattcgatggtgtcaacgtaaatgccgcttcgccttcgcgcgcgaattgcaagctctgcattaatgaatcggccaacgcgcggggagaggcggtttgcgtattgggcgctcttccgcttcctcgctcactgactcgctgcgctcggtcgttcggctgcggcgagcggtatcagctcactcaaaggcggtaatacggttatccacagaatcaggggataacgcaggaaagaacatgtgagcaaaaggccagcaaaaggccaggaaccgtaaaaaggccgcgttgctggcgtttttccataggctccgcccccctgacgagcatcacaaaaatcgacgctcaagtcagaggtggcgaacccgaca

SEQ ID NO: 4697 - DNA, 478 bp, Glycine max
  unsure at all n locations
  Clone ID: LIB3028-040-Q1-B1-F2
cgaatgaatcacgtggcatgcagaagagctatgacgtcgcatgcacgcgtacgtaagctcggaattcagctccgccatcgccgcttccactttttcccgcgttttcgcagaaacgtggctggcctggttcaccacgcgggaaacggtctgataagagacaccggcatactctgcgacatcgtataacgttactggtttcacattcaccaccctgaattgactctcttccgggcgctatcatgccataccgcgaaaggttttgcgccattcgatggtgtcaacgtaaatgccgcttcgccttcgcgcgcgaattgcaagctctgcattaatgaatcggccaacgcgcggggagaggcggtttgcgtattgggcgctcttccgcttcctcgctcactgactcgctgcgctcggtcgttcggctgcggcgagcggtatcagctcactcaaaggcggtaatacggtttatccacagatcang

SEQ ID NO: 4698 - DNA, 478 bp, Glycine max
  unsure at all n locations
  Clone ID: LIB3028-040-Q1-B1-G8
attgaatttacgtggcactatagaagagatatgacgtcgcatgcacgcgtacgtaagctcggaatggcatcctggtcatccagcggatagttaatgatcagcccactgacccgttgcgcgagaagattgtgcaccgccgctttacaggcttcgacgccgcttcgttctaccatcgacaccaccacgctggcacccagttgatcggcgcgagatttaatcgccgcgacaatttgcgacggcgcgtgcagggccagactggaggtggcaacgccaatcagcaacgactgtttgcccgccagttgttgtgccacgcggttgggaatgtaattcagctccgccatcgccgcttccactttnttcccgcgttttcgcagaaacgtggctggcctggttcaacacgcgggaaacggtctgataagagacaccggcatactctgcgacatcgtataacgttactggtttcacattcaccancctn

SEQ ID NO: 4699 - DNA, 472 bp, Glycine max
  Clone ID: LIB3028-040-Q1-B1-H10
ttgaattagtggcactatagaagagatatgacgtcgcatgcacgcgtacgtaacctcggaattcggtccaactccaagcgattcggctcgagtattttttgatataccttaccaaaacatagcttgctattagtatataaccattttctaaaaaaaaactgctagaaaaatattatatccctagaagtcgtttcttgttaaaaatggttatatactaatagcaagctatgttttggtaaggtattttttgatatacaaacttattttagaaacttattttctacaaattacttcaagtaatttattttcaaaagctacttgaagtaacttatagaaaataagctactttataaattattagcttttttttcttcatcacaattttatttttattattttatttgaaattttgtttaccattttattcaataaaattctcttatcttttttttgcttgaaaaaactcttatat

SEQ ID NO: 4700 - DNA, 480 bp, Glycine max
  Clone ID: LIB3028-040-Q1-B1-H6
tgacttgaattgacgtggcactatagaagagatatgacgtcgcatgcacgcgtacgtaagctcggcgcttcgccttcgcgcgcgaattgcaagctctgcattaatgaatcggccaacgcgcggggagaggcggtttgcgtattgggcgctcttccgcttcctcgctcactgactcgctgcgctcggtcgttcggctgcggcgagcggtatcagctcactcaaaggcggtaatacggttatccacagaatcaggggataacgcaggaaagaacatgtgagcaaaaggccagcaaaaggccaggaaccgtaaaaaggccgcgttgctggcgtttttccataggctccgcccccctgacgagcatcacaaaaatcgacgctcaagtcagaggtggcgaaacccgacaggactataaagataccaggcgtttccccctggaagcctcctcgtgcgctctcctgttccgaccctgccgcttacgg

SEQ ID NO: 4701 - DNA, 490 bp, Glycine max
  unsure at all n locations
  Clone ID: LIB3028-041-Q1-B1-A3
ggtctgtgcctcccgaatgaattaagtcgcgtgtctatacaatgtagtcgcatgcacgcgtacgtaagctcagaatcgggcaacgcgcggggagaggcggtttgcgtattgggcgctcttccgcttcctcgctcactgactcgctgcgctcggtcgttcggctgcggcgagcggtatcagctcactcaaaggcggtaatacggttatccacagaatcaggggataacgcaggaaagaacatgtgagcaaaaggccagcaaaaggccaggaaccgtaaaaaggccgcgttgctggcgtttttccataggctccgcccccctgacgagcatcacaaaaatcgacgctcaagtcagaggtggcgaaacccgacaagactataaagataccaggcgtttccccctggaagctcnctcgtgcgctctcctgttctcgacctgccgcttaccggattactgtccgctttctccccttcggaaacttggcgctttct

SEQ ID NO: 4702 - DNA, 468 bp, Glycine max
  unsure at all n locations
  Clone ID: LIB3028-041-Q1-B1-A9
cgatgaattacgctagctaataaaagactatgacgtcgcatgcacgcgtacgtaagctcggaattcggctccgagtccatgcatcccctcctcctcaataccactacaaggttatttctgaagaatataagccaataaaaaacgttgttgatagcaggaagatgcacttcgcaattgcacaaggaaaacaacggaagccaagtttccgcgcattttgtcacataagaaaaacgaagtgtcaatccctttcntcctcgtttgtattgtttatgaattaataantacgttggatttagacagttgtatggcactgcctttgtcactgtcgttgaatgatatcacatgaatgcattttggtttgcaacctgctgcgctttcaaggggttgtgaaaccaattttataatgaataaaatcaaatatatgcgttgtatatttaattganaaaaaaaaaaaaaagggcgggcccn

SEQ ID NO: 4703 - DNA, 472 bp, Glycine max
  Clone ID: LIB3028-041-Q1-B1-B10
ggcgcgtctgggaatgaattacgtagtctagcgaagactatgaagtcgcatccacgcgtacgtaagatcggaatttggagctctgcattcacgaatcggacaaggcgcggggaaaaggcggtttgcgtatggggcgtccatccgcttcatcgctcactgactcgctgcgctcggtcattcggatgcggcgagcggtatcatctcattcaaaagcggtaatacggttattcacagaatcacgggatagcgcacgacagaacatgtgagcactatgtgagcacatggccaggaagtgtatcacagccacgttgctggcgtctttccataggctcagcgcctctgacgagcatcatacatatcgacgctcaaatcagatgtggcgagaaccgacaagactataaagataccaagcgtttccccctggaagctcactcgtgcgctctcctgtttcgaacctgtcgcttaacaggag

SEQ ID NO: 4704 - DNA, 487 bp, Glycine max
  unsure at all n locations
  Clone ID: LIB3028-041-Q1-B1-C1
aggccgagagaatgaattaggttgcatagcgaagacatatgaagtcgcatgcacgcgtacgtaagctcggaaaaggccgcgttgctggcgtttttccataggctccgcccccctgacgagcatcacaaaaatcgacgctcaagtcagaggtggcgaaacccgacaggactataaagataccaggcgtttccccctggaagctccctcgtgcgctctcctgttccgaccctgccgcttaccggatacctgtccgcctttctcccttcgggaagcgtggcgctttctcatagctcacgctgtaggtatctcagttcggtgtaggtcgttcgctccaagctgggctgtgtgcacgaaccccccgttcagcccgaccgctgcgccttatccggtaactatcgtcttgagtccaacccggtaagacacgacttatcgccactgggagcagccactggtaacaggattagcanagcgaagtatgtangcggtg

SEQ ID NO: 4705 - DNA, 481 bp, Glycine max
  Clone ID: LIB3028-041-Q1-B1-C11
agaggcggggtatcagaatgaattgaggtgagcctagccgaagagcactgacagtcgcatgcacgcgtacgtaaactcggaattcggctcgagtacatttataagtttttcaatatatccttacaaagctttttttttaaaaagctttgtaaggataaatttataactttttcaatatatccttacaaatttatatttgttaaaataaacacaacaaaaagggcggccgccgactaatgagctcgtcgacccgggaattaattccggaccggtacctgcatgcgtaccagctttccctagactgagtcgtattagaacttggcgtaatcatggtcatagctgtttcctgtgtgaaattgttatccgctcacaattccacacaacatacgatccggaagcataaagtgtaaagcctgaggtgcctaaatgagtgagctaactcacattaaatgcgtttcgctcactgcccgctttccagttg

SEQ ID NO: 4706 - DNA, 473 bp, Glycine max
  unsure at all n locations
  Clone ID: LIB3028-041-Q1-B1-C12
aggccctcccgcgaatgaatcacgtgagcctagcgaagagcaatgaagtcgcatgcacgcgtacgtaagctcggaattcggctccaaggctggttgtcctacaacatcgggtaggtaatcccggcataattcatgggccaggaatttgaattggtaaaaagggaatctcttttcacctgattcattgacagaagctctgaatggggccactgctgtgatctcatttatgggtggttttggctccaacatcaatgctattagagcagcatcagatcacggtgtaacaacatctgtctagatccctactgctgactttggtgtactagatgacatacggcacggctataatataggaaagagagctgctganacagagcttctgaacagatttccatttggttgagtaattctgaggccaagatttgtttatgggactcgaaaagttggatctccaatggaaatggtttccccag

SEQ ID NO: 4707 - DNA, 477 bp, Glycine max
  unsure at all n locations
  Clone ID: LIB3028-041-Q1-B1-D10
gggccgttcgcgaatgaattacgtcgcctagcgaagactatgaagtcgcatgcacgcgtacgttaagactcggaattcggtccaaaatttcaaaaccccgtgctccgttccgttcaataacaatggctttaagggtgcaaaaccttgacttcggctttccaatcctccccccccccttgtcaaccatttcggcaaaggtcttcttcaaggaccttttcaataacggatggggaaatccgttgggttaaatcagatttggaaaaagatgagaacctggctggggagtggaaccacacctctggccaatggaatggagacgctaacgacaaaggtattcanaccagtgaggattacagattctacgctatttcagctcagtaccctgaattcagcaacaaggataagacactagtcttccaattttctgtcaagcaagaacaaaaacctgactgcngttggtggctacaataagtttcg

SEQ ID NO: 4708 - DNA, 473 bp, Glycine max
  Clone ID: LIB3028-041-Q1-B1-D11
ggggcacttccagaatgaatcaggtggccctatcagaagagcaatgacgtcgcatgcacgcgtacgtaagctcggaatttgcgacggcgcgtgcagggccagactggaggtggcaacgccaatcagcaacgactgtttgcccgccagttgttgtgccacgcggttgggaatgtaattcagctccgccatcgccgcttccactttttcccgcgttttcgcagaaacgtggctggcctggttcaccacgcgggaaacggtctgataagagacaccggcatactctgcgacatcgtataacgttactggtttcacattcaccaccctgaattgactctcttccgggcgctatcatgccataccgcgaaaggttttgcgccattcgatggtgtcaacgtaaatgccgcttcgccttcgcgcgcgaattgcaagctctgcattaatgaatcggccaacgcgcggggagaagcggtttg

SEQ ID NO: 4709 - DNA, 473 bp, Glycine max
  unsure at all n locations
  Clone ID: LIB3028-041-Q1-B1-D12
cgcccccccccgaatgaatgaagtgagcctgcagaagagctatgaagtcgcatgcacgcgtacgtaaactcggaattcggctcaagtcttgaagggcaattttggaaagttaaacttggaaaaagggattccagaactgccaactttacggctgctaacactggtgttattccacctcccacatctaacctcaccaaccttatcacaaggtttcgagatcaaggactctctgctanggacatggttgctttatctggagctcacacatttggcaaagcaaggtgtactagtttcagagatcgcatatacaatcaaaccaacattgatagaacatttgcattggccaggcagaggaagtgtcctangactaatggcacacgtgacaacaatctagcaaatctagacttcagaactccaaatcattttgacaacaactacttcaaaaaccttctcatcaaaaggggactcctgaa

SEQ ID NO: 4710 - DNA, 473 bp, Glycine max
  Clone ID: LIB3028-041-Q1-B1-D8
tgattgaatcacgtgtcctatagaagagatatgacgtcgcatgcacgcgtacgtaagctcggcctgcttcaccacgcgggaaacggtctgataagagacaccggcatactctgcgacatcgtataacgttactggtttcacattcaccaccctgaattgactctcttccgggcgctatcatgccataccgcgaaaggttttgcgccattcgatggtgtcaacgtaaatgccgcttcgccttcgcgcgcgaattgcaagctctgcattaatgaatcggccaacgcgcggggagaggcggtttgcgtattgggcgctcttccgcttcctcgctcactgactcgctgcgctcggtcgttcggctgcggcgagcggtatcagctcactcaaaggccgtaatacggttatccacagaatcatgggataacgcaggatagaacatgtgagcaaaaggccagcaaaatgccatgaaccgt

SEQ ID NO: 4711 - DNA, 496 bp, Glycine max
  unsure at all n locations
  Clone ID: LIB3028-041-Q1-B1-E5
ggcnctcctntggccgtgctgcttgattgaatcacgtggcgtatagaagagcaatgacgtcggacgcacgcgtacgtaaactcgggccgactagtgagctcgtcgacccgggaattaattccggaccggtacctgcaggcgtaccagctttccctatagtgagtcgtattagagcttggcgtaatcatggtcatagctgtttcctgtgtgaaattgttatccgctcacaattccacacaacatacgagccggaagcataaagtgtaaagcctggggtgcctaatgagtgagctaactcacattaattgcgttgcgctcactgcccgctttccagtcgggaaacctgtcgtgccagctgcattaatgaatcggccaacgcgcggggagaggcggtttgcgtattgggcgccagggtggtttttcttttcaccagtgagacgggcaacagctgattgcccttcaccgcctggccctgagagagttgcagcaagcggtc

SEQ ID NO: 4712 - DNA, 472 bp, Glycine max
  Clone ID: LIB3028-041-Q1-B1-E6
gaatgaatcacgtggcactatagaagagatatgacgtcgcatgcacgcgtacgtaagctcggaatgatcagcccactgacccgttgcgcgagaagattgtgcaccgccgctttacaggcttcgacgccgcttcgttctaccatcgacaccaccacgctggcacccagttgatcggcgcgagatttaatcgccgcgacaatttgcgacggcgcgtgcagggccagactggaggtggcaacgccaatcagcaacgactgtttgcccgccagttgttgtgccacgcggttgggaatgtaattcagctccgccatcgccgcttccactttttcccgcgttttcgcagaaacgtggctggcctggttcaccacgcgggaaacggtctgataagagacaccggcatactctgcgacatcgtataacgttactggtttcacattcaccaacctgaattgactctcctcgggcgctatca

SEQ ID NO: 4713 - DNA, 485 bp, Glycine max
  unsure at all n locations
  Clone ID: LIB3028-041-Q1-B1-F4
ggatgtggtgaatgaatcacgttgcctggcanaagagcaatgacgtcgcatgcacgcgtacgtaagctcggaattgcaagctctgcattaatgaatcggccaacgcgcggggagaggcggtttgcgtattgggcgctcttccgcttcctcgctcactgactcgctgcgctcggtcgttcggctgcggcgagcggtatcagctcactcaaaggcggtaatacggttatccacagaatcaggggataacgcaggaaagaacatgtgagcaaaaggccagcaaaaggccaggaaccgtaaaaaggccgcgttgctggcgtttttccataggctccgcccccctgacgagcatcacaaaaatcgacgctcaagtcagaggtggcgaaacccgacaggactataaagataccaggcgtttccccctggaagctccctcgtgcgctctcctgttccgaccctgccgcttaccggatacctgtccgcctttt

SEQ ID NO: 4714 - DNA, 502 bp, Glycine max
  unsure at all n locations
  Clone ID: LIB3028-041-Q1-B1-G1
gtgtggtgcgtgtaggggggnagggaggggagtgnaggaggaattaatcgcttgcgcagcgagggaaaggggcgaggcgganctgaagtgaagaggatgtgagtaaagggccagcaaaagggcagagaacgtataaaggccgcgttgctggcgtttttcaataagctccccccccctgaacaacaacacaaaaatccaagcccaaatcaaaagttgcgaaaccccacaagaccattaagataccaagcgtttccccctggaaactccctcctgcgctcccctgttccgaacctggcgcttaacggataactgtccgcctttccccctccgaaacgtgcgcctttcacaactcacactgtatgtatctcaattccgtgtaagtccttctctccaaactgggctgtgtgcacaaaacccccgtttaacccgaacgctgcgccctatcccgtaactatcgtcttgagtccaaacccgtaatacaccacttatcgccactgggaaa

SEQ ID NO: 4715 - DNA, 495 bp, Glycine max
  unsure at all n locations
  Clone ID: LIB3028-041-Q1-B1-G6
tgccccgcntggggcactggttgaatgaatcgactgtcgaagagcaatgaagtcgcatgcgccgcacgcgtacgtaagctcggtgagatatttatgccagccagccagacgcagacgcgccgagacagaacttaatgggcccgctaacagcgcgatttgctggtgacccaatgcgaccagatgctccacgcccagtcgcgtaccgtcttcatgggagaaaataatactgttgatgggtgtctggtcagagacatcaagaaataacgccggaacattagtgcaggcagcttccacagcaatggcatcctggtcatccagcggatagttaatgatcagcccactgacccgttgcgcgagaagattgtgcaccgccgctttacaggcttcgacgccgcttcgttctaccatcgacaccaccacgctggcacccagttgatcggcgcgagatttaatcgccgcgacaatttgcgaacgccccttcaagggcaaaatggg

SEQ ID NO: 4716 - DNA, 518 bp, Glycine max
  unsure at all n locations
  Clone ID: LIB3028-041-Q1-B1-H12
gaactgaggtggtctctatgacagccgagcaaatggcgataancaggccgggatcgctacgctgtacactcgagacacttcggggctccgaagaaggcccaataactatggtgtgggaagaataagattgggaacgccttgtgcaactggctcacatttccgcggttcctggcgccggttccccggttccccggttccccggttccccgggctccctcccttccaaggaaggcaaacccaaccgtttaacgtccggacttgggtcccaagggccgggccttattcggcaaacccgcaagctcctccccttccccgcctcgctcggcggcacgggcaagcgctaccgtcccgtccacgagatcgcaacgcttcgggatcntctctgataatcttaaactcatcagattccacaacaggaggtctctcacctacacgctcggcgtcaatcattttgctgactggacttgggaggagttcaccagacacaagctcggcgctcctcagaattgctctgccac

SEQ ID NO: 4717 - DNA, 496 bp, Glycine max
  unsure at all n locations
  Clone ID: LIB3028-041-Q1-B1-H5
gactccggggtggggacgtgttgaatgattcacgtgcgtatagaagagcaatgacgtcggacgcacgcgtacgtaaactcgggaaaggttttgcgccattcgatggtgtcaacgtaaatgccgcttcgccttcgcgcgcgaattgcaagctctgcattaatgaatcggccaacgcgcggggagaggcggtttgcgtattgggcgctcttccgcttcctcgctcactgactcgctgcgctcggtcgttcggctgcggcgagcggtatcagctcactcaaaggcggtaatacggttatccacagaatcaggggataacgcaggaaagaacatgtgagcaaaaggccagcaaaaggccaggaaccgtaaaaaggccgcgttgctggcgtttttccataggctccgcccccctgacgagcatcacaaaaatcgacgctcaagtcagaggtggcgaaacccgacaggactataaagattacaggcgtttccccctggaagn

SEQ ID NO: 4718 - DNA, 464 bp, Glycine max
  Clone ID: LIB3028-042-Q1-B1-B9
gaatggatgactcgactggcatatagtagacaatgacgtcgcatgcacgcgtacataaactcggcattcggttccacgcgctctgactccctgtgctccgtcatacggtcgtcgctagcggtatcaactcacacatctgccgtcatatcgtaatccataaaatcaggggacaccgcaggaacaattatgtgatcacacagccagcaaaaggccaagaaccgtgaaaacgtcgcgttgctggcgtctttctataggctccgcacacctgatgaacatcacaaaaatcgacgctcaatgtcagaggtggcgatgcccgacaggactatacagataccaggcgtttccctctgtaagcgtccacgtgcgctcacctgttccgaccctggagcttatcggatacctgtccgcctttctccctttcggaaaccttgcgccttcccataactccacctgtaagtatctag

SEQ ID NO: 4719 - DNA, 458 bp, Glycine max
  Clone ID: LIB3028-042-Q1-B1-C4
tgaattaggtgcatagacaagacaatgaagtcgcatgcacgcgtacgtaagctcggaattcggctcgaggggcaatgccgcttgtaaagctctttcgtcgagtgcgcgatcatgacaggactcgaggaagaagccccggctaactccgtgccagcagccgcggtaagacggggggggcaagtgttcttcggaatgactgggcgtaaagggcacgtaggcggtgaatcgggttgaaagtgaaagtcgccaaaaactggtggaatgctctcgaaaccaattcacttgagtgagacagaggagagtggaatttcgtgtgtaggggtgaaatccgcagatctacgaaggaacgccaaaagcgaatgcagctctctgggtccctaccgacgctggagtgcgaaagcatggggagcgaacgggattagataccctggtagtcgatgccgtaaacgatgagtgtt

SEQ ID NO: 4720 - DNA, 461 bp, Glycine max
  Clone ID: LIB3028-042-Q1-B1-C6
tgattgaatgacgtgacactatataagacaatgacgtcgcatgcacgcgtacgtaagctcgggaatcgtaacaaggcagcgttgctggcgtttttccataggctccgcccccctgacgatcatcacaaaaatcgacgctcaagtcagaagtggcgaaacccgacaggagtataaagataccatgcgtttccccctggaagctccctcgtgcgctctcctgttccgaacctgccgcttaccggatacctgtccgcctttctcccttcgggaagcgtggcgctttctcagagctcacgctgtaggtatctcagttcggtgtaggtcgttcgctccaagctgggctgtgtgcacgaaccccccgttcagcccgaccgctgcgccttatccggtaactatcgtcatgagtccaaaccggtaagacacgacttatcgccactggcagcagccactggtaacaagaa

SEQ ID NO: 4721 - DNA, 476 bp, Glycine max
  Clone ID: LIB3028-042-Q1-B1-D3
gtgcatgcctgaatggattaagtggcatagcgaagagaaatgaagtcgcatgcaggcgtacgtaagctcagaatgccgcttcaccttcgcgctcgaagtgcaagctctgcaatcatgaatcggcaaaatccctgtgagatgcagtttgcgtagttggcgctcttccgcttcctcgctcactgactcactgcgcgcggtcgttcggctgctgcgagcggtatcagctcactcaaaagcggtaataccgttatctacacaatcaggggataacgcatgaaggaacatgtgagttatgatgccagtaaaatgccaagaaccgtaaaaaggacgcgttgctggcgtttttccataggctccgcccccctgacgagcatcacagcaatcgacgctcaagtcacacgtggagacacccgacaggactataaggataccaggcgtttccccctgtaagctcactcgtgcgctctcctgttcaa

SEQ ID NO: 4722 - DNA, 457 bp, Glycine max
  Clone ID: LIB3028-042-Q1-B1-D4
aattacgtgcctagccaagataatgaagtcggacgcacgcgtacgtaagctcagaattcggctccgagttcgagaccaaaagcactacctcaactggctgaagaaaggtgaagcaccatttgtggcagtttacatgtcattcacgcaatcatcacagacataatcttgatcaatgtctactcacattcttactcaatgtttttgtgacttccgaacatgagtaggttttccgataactacactgactagtgaaatgtcaagtaatgtttcgtactttcatttgtagctgatatgcacctcacattttgtagaagctagataagataacttctatagcacttaactgcatacgttgattttaaaaatcgacgctcaggtcagacgtcgacaaatgagctcgtccaaccgggaattaattccggaccggctacttgcagcgtcatagccttccctatac

SEQ ID NO: 4723 - DNA, 464 bp, Glycine max
  unsure at all n locations
  Clone ID: LIB3028-042-Q1-B1-F11
gggtcattccggatgaatcaataagtctgcctatagcagacantgacgtccgatccacgcgtacataaactcgggaaacgttttgcgccattcgatggtgtcaacgtaaatgccgcttcgccttcgcgcgcgaattgcaagctctgcattaatgaatcggccaacgcgcggggagaggcggtttgcgtattgggcgctcttccgcttcctcgctcactgactcgctgcgctcggtcgttcggctgcggcgagcggtatcagctcactcaaaggcggtaatacggttatccacagaatcaggggataacgcaggaaagaacatgtgagcaaaaggccagcataaggccaggaaccgtacaaaggccgcgttgctggcgtttttccataggctctgcccccctgacgagcatcacagaaatcgacgctcaggtcagagggtgcaaaacccaacatgactattatgn

SEQ ID NO: 4724 - DNA, 458 bp, Glycine max
  Clone ID: LIB3028-042-Q1-B1-F4
aatgatttagtgcatagccaagacatagaagtcgcatgcacgcgtacgtaagctcagaattcggctgagctatgttcttcacatgatgtttgggtatcagttttactcacaaggcaagttagaagttgcagtgtcatgtgctgttattagcgtggttgcagttgtcaagttcggtgttatgaagccttgtttttatggactggctgtggcagcaagttatacaggtctgccataaccacgaccttttttcccctttgggaagggttgtgtttttttaccaagtcctagtttttttaaagcttcattttttttgaacttggcactgcacctccttattgtcgaatgatattcatacctgcccttgtgctgtatgttatgaaatgtaatgaaataaataaaattcagtctcagtcctagttgcgtgaacagatgtgatgaatatatatttctctatactg

SEQ ID NO: 4725 - DNA, 463 bp, Glycine max
  Clone ID: LIB3028-042-Q1-B1-F5
ggtttgaatgcggtggcactataaaagataatgacgtcggatgcacgcgtacgtaagctcggcgcttcgccttcgcgcgcgaattgcaagctctgcattaatgaatcggccaacgcgcggggagaggcggtttgcgtattgggcgctcttccgcttcctcgctcactgactcgctgcgctcggtcgttcggctgcggcgagcggtatcagctcactcaaaggcggtaatacggttatccacagaatcaggggataacgcaggaaagaacatgtgagcaaaaggccagcaaaaggccaggaaccgtaaaaaggccgcgttgctggcgtttttccataggctccgcccccctgacgagcatcacaaaaatcgacgctcaagtcagaggtggcgaaacccgacaggactataaagataccaggcgtttccccctggaagctccctcgtgcgctctcctgttccgag

SEQ ID NO: 4726 - DNA, 486 bp, Glycine max
  Clone ID: LIB3028-042-Q1-B1-F8
gaactgatgtgggctcccgaatgaataaggttgccgtgccccatcaaagataatgacctcgcacgcacgcgtacgtaagctcggaatacggttatacagtagaatcatgggataacgcaggaaacaacatgtgagcaaaatgccagcaaaaggccaggaaccgtaaaaaagccgcgttgctggcgtttttccatatgctccgcccccctgacgagcatcacataacatcgacgctcaagtcagaggtggcgacacccgacaggactatcacgataccaggcgtttccccctggaagctccctcgtgcgctctcctgttccgaccctgccgcttaccggatacctgtccgcctttctcccttcgggaagcgtggcgctttctcatagctcacgctgtaggtatctcagttcggtgtaggtcgttcgctccaagctgggctgtgtgcacgaaacccccggttcagcccgaacgctgcgccttatccgg

SEQ ID NO: 4727 - DNA, 454 bp, Glycine max
  Clone ID: LIB3028-042-Q1-B1-G11
tgaatgaatcagcttgcgtatagcagagagtgacgtcccgtccacgcgtacgtaaactcggcgcacaaacctggctggcctggttcaccacgcgggaaacggtctgatcagagacaccggcatactctgcgacatcgtagcacgttactggtttcatattcatcaccctgaattgactctcttccgggcgctatcatgccatagtgcgagatgttttgcgccactcgatggtgtcaacgtacatggcgcgtcgcattcacgcgcgaactgccagctctgcatttgtgaatctgcgaacgctctgggagaggcggtgtgcatactgtgcgcacttactcttcgacgctcacgcactctctacgctctgtcgttttggtgcagtgagctgtgggagctcaggtatccgacgtttaactgttatccacaggtctcacgggatcacgcacggaaagtt

SEQ ID NO: 4728 - DNA, 457 bp, Glycine max
  unsure at all n locations
  Clone ID: LIB3028-042-Q1-B1-G2
agtttgagtgcataggcaagataatgaagtcggacgcagcgcgtacgtaagctcggaataatactgttgatgggtgtctggtcagagacatcaagaaataacgccggaacattagtgcaggcagcttccacagcaatggcatcctggtcatccagcggatagttaatgatcagcccactgacccgttgcgcgagaagattgtgcaccgccgctttacaggcttcgacgccgcttcgttctaccatcgacaccaccacgctggcacccagttgatcggcgcgagatttaatcgccgcgacaatttgcgacggcgcgtgcaaggccagactggaggtggcaacgccaatcagcaacgactgtttgcccgccagttgttgtgccacgcggttgggacatgtattcagctccgccatcgccgcttccactttttcccgcgttttcgcangaacgtggctgg

SEQ ID NO: 4729 - DNA, 464 bp, Glycine max
  unsure at all n locations
  Clone ID: LIB3028-042-Q1-B1-G9
ggggnttgncggatgaatcaatcagctagcgtatagatagacagtgacgtcggatccacgcgtacgtaaactcggaattaattccggagcggtacctgcaggcgtaccagctttccctacagtgagtcgtattagagcttggcgtaatcatggtcatagctgtttcctgtgtgaaattgttatccgctcacaattccacacaacatacgagccggaagcatacagtgtaaagcctggggtgcctaatgagtgagctaactcacattaattgcgttgcgctcactgcccgctttccagtcgggaaacctgtcgtgccagctgcattaatgaatcggccaacgcgcggtgagatgcggtttgcgtattgggcgccagtgtggtttttcttttcaccagtgagacgggcaacagctgatttgccttcaccgcctggccctgagagagttgcagcaagcggtccacgc

SEQ ID NO: 4730 - DNA, 478 bp, Glycine max
  unsure at all n locations
  Clone ID: LIB3028-042-Q1-B1-H6
agttatctcagaatgagtatgaatgctgtggcgncataaaagagtactgacgtcggacgcacgcgtacgtaagctcggaattcagctccgccatcgccgcttccactttttcccgcgttttcgcagaaacgtggctggcctggttcaccacgcgggaaacggtctgataagagacaccggcatactctgcgacatcgtataacgttactggtttcacattcagcaccctgacttgactctcttccgggcgctatcatgccataccgcgaaaggttttgcgccattcgatggtgtcaacgtaaatgccgcttcgccttcgcgcgcgaattgcaagctctgcattaatgaatcgggcaacgcgcggggagaggcggtttgcgtattgggcgctcttccgcttcctcgctcactgactcgctgcgctcggtcgttcggctgccgctagcggtaacagctcactcaaaggcggtaatacggt

SEQ ID NO: 4731 - DNA, 463 bp, Glycine max
  unsure at all n locations
  Clone ID: LIB3028-042-Q1-B1-H8
ttcgcgtgcttagggcgcanaatnnncacatngccnngccccacgcgtacgtaagctcggaattgactctcttccgggcgctatcatgccataccgcgaaaggttttgcgccattcgatggtgtcaacgtaaatgccgcttcgccttcgcgcgcgaattgcaagctctgcattaatgaatcggccaacgcgcggggagaggcggtttgcgtattgggcgctcttccgcttcctcgctcactgactcgctgcgctcggtcgttcggctgcggcgagcggtatcagctcactcaaaggcggtaatacggttatccacagaatcaggggataacgcaggaaagaacatgtgagcaaaaggccagcaaaaggccaggaaccgtaaaaaggccgcgttgctggcgtttttccataggctccgcccccctgacgagcatcacaaaaatcgacgctcaagtcagaggtgg

SEQ ID NO: 4732 - DNA, 500 bp, Glycine max
  Clone ID: LIB3028-043-Q1-B1-A4
cgggtgtccgaatgaatcaggttgcctatgcaagagcactgacatcgcgtccacgcctacgtaagctcggaatcaggggataacgcaggaaagaacatgtgagcaaaaggccagcaaaaggccaggaaccgtaaaaaggccgcgttgctggcgtttttccataggctccgcccccctgacgagcatcacaaaaatcgacgctcaagtcagaggtggcgaaacccgacaggactataaagataccaggcgtttccccctggaagctccctcgtgcgctctcctgttccgaccctgccgcttaccggatacctgtccgcctttctcccttcgggaagcgtggcgctttctcatagctcacgctgtaggtatctcagttcggtgtaggtcgttcgctccaagctgggctgtgtgcacgaaccccccgttcagcccgaccgctgcgccttatccggtaactatcgtcttgagtccaacccggtaagacacgacttatcgccacg

SEQ ID NO: 4733 - DNA, 486 bp, Glycine max
  Clone ID: LIB3028-043-Q1-B1-B1
cgttctgatttcatgttgtcttatcactgaacgcactcgacccacgggcacgtaagctcgggcaccgccatcgccgcttccactttttcccgcgttttcgcagaaacgtggctggcctggttcaccacgcgggaaacggtctgataagagacaccggcatactctgcgacatcgtataacgttactggtttcacattcaccaccctgaattgactctcttccgggcgctatcatgccataccgcgaaaggttttgcgccattcgatggtgtcaacgtaaatgccgcttcgccttcgcgcgcgaattgcaagctctgcattaatgaatcggccaacgcgcggggagaagcggtttgcgtattgggcgctcttccgcttcctcgctcactgactcgctgcgctcggtcgttccgctgccgccaacggtatcaactcactcaaagggcgttaatacggttatccacagaatcaagggataacgcaagaa

SEQ ID NO: 4734 - DNA, 473 bp, Glycine max
  unsure at all n locations
  Clone ID: LIB3028-043-Q1-B1-B10
tgatcgaatgacgtggcgtatataagagactgacctcggacgcacgcgtacgtaaactcgggaaaggttttgcgccattcgatggtgtcaacgtaaatgccgcttcgccttcgcgcgcgaattgcaagctctgcattaatgaatcggccaacgcgcggggagaggcggtttgcgtattgggcgctcttccgcttcctcgctcactgactcgctgcgctcggtcgttcggctgcggcgagcggtatcagctcactcaaaggcggtaatacggttatccacagaatcaggggataacgcaggaaagaacatgtgagcaaaaggccagcaaaaggccaggaaccgtaaaaaggccgcgttgctggcgtatttccatangctccgcccccctgacgagcatcacaaaaatcgacgctcaagtcagaggtggcgaaacccgacaggactataaagataccaggcgtttccccttgaaa

SEQ ID NO: 4735 - DNA, 476 bp, Glycine max
  unsure at all n locations
  Clone ID: LIB3028-043-Q1-B1-C12
gatttgaatgacgtggcatatataagagatatgacgtcgcatgcacgcgtacgtaagctcggaatttgattgcaagtgagatatttatgccagccagccagacgcagacgcgccgagacagaacttaatgggcccgctaacagcgcgatttgctggtgacccaatgcgaccagatgctccacgcccagtcgcgtaccgtcttcatgggagaaaataatactgttgatgggtgtctggtcagagacatcaggaaataacgccggaacattagtgcatgcagcttccacagcaatggcatcctggtcatccagcggatagttaatgatcagcccactgactcgttgcgcgagaagattgtgcancgccgcgttacatgcttcgaagccgcttcgttctagcatcgacaccagcatgctgggcaccagttgatcggcgcgagaattaatccccgcgaacattttgcgaacgcgcgtgcn

SEQ ID NO: 4736 - DNA, 517 bp, Glycine max
  Clone ID: LIB3028-043-Q1-B1-C5
tcttgatgtcgatgccaccaccccaatacgtctctggtctacgcgtacgtacactcggaattcggctcgagggatgactgactcatgtctcatgagacggggtgatagaatgtgcatttaacggcagttcagtcttgttatgctgaacagctagtctagcttgggggtctggtggactttctgtatggggagggggtgtatctgccgcacgtggtagcacgttgtagagcgtgtatcgcgcagggtattgggttcagtggagtattggactgctgtcagttgcagcgtcttggcaggtgagggtcggagagcgcgtcgttgcgatcgcggcgcagtgctgagtcggttggcgggcggatccgtcgcgcgttgtttttgtttttcgaggcagatcggtgcgcggcgctcgagcagtgggttagtttttcacgacatctccgttgtggtctgcacggttcgagtctcgggtggtagtgcgactgtctcggtgtttcttcattcggagccggcggctggg

SEQ ID NO: 4737 - DNA, 501 bp, Glycine max
  Clone ID: LIB3028-043-Q1-B1-D2
cgcggctccgcgagatgaatctaggttgcactatgccagagcactgacatcgcgtcgacgcctacgtaaactcggaatttgattgcgactgagatatttatgccagccagccagacgcagacgcgccgagacaaaacttaatgggcccgctaacagcacgatttgctggtgacccaatgcgaccagatgctccacgcccagtcgcgtaccgtcttcatgggagaaaataatactgtcgatgggtgtctggtcagagacatcaagatataacgccggaacattactgcatgcagcttccacagcaatgggatcctggtcaaccatccgatagataatgatcagcccactgaccggttgcgcgagaacattgtgcaacgccgctttacaggcttccacgccgcttcgttctaacaaccacactaacaagctgggcaccacgttaatgcgcccaacaattaatccccgcgacaatttgcaacggggcttcagggccaaactggg

SEQ ID NO: 4738 - DNA, 571 bp, Glycine max
  Clone ID: LIB3028-043-Q1-B1-E5
agtttgattgctgtgagacatcatagaatgagacctcggatcgacgcgtaagtaaactcggaattcggctcgaggttggagtgaactaaaacagtgaattctagagactcaggggaaggagagaggtctacgattagatcttcggcaatacaaccgtccatgagacgggtcatatctgcatatccattcctacgtccagtggagcagcctcgctccggtgcagcaccgagaacgtgcggacgctgtggctcacaatctaacaagcgtgtgctacgtcgtcaccatatcggacctacgtttccttgtgcagtgttctggcttcggaccctggggtatggctcgtgggctcagttcaggcctcatgcgttacctggaggtaccactagcagagctcttctgttaggcgccgttaccgtcattaacttcgctggtgtcagtccccgtgagttccagacgtttacagcacttcgggtgcaagatccgctcgtccggtcatctgctgcgttagactagcctgggagtcggatcacctcgatgtcgactctagaagtccttctcgcgagtgctactg

SEQ ID NO: 4739 - DNA, 495 bp, Glycine max
  Clone ID: LIB3028-043-Q1-B1-F3
gcgctggcgaatgaattaagctgcctatgcataactatgacatccagtcacagcctacttaaacccggagggggtttttcaaaaggttcggcccccctgacaacaatcacaaaaatcaaggccaaattcaaaggtggcaaaacccgaaaggacaataagaaaacaagccgtttccccctgaaacttcctcctggggccccccggttccaacctggcggcttacgggtaaccggtcggcctttctcccttcggaaaccttggggctttcccaaagtccaggcggtaggaacccaatttcggggtaggccgttcgcccaaacctgggcggtgtgaagaaacccccggtttagcccaacggctgcgccttatcccggtaactatcgtcctgagtccaaaccggtaagacacgacataacgccactggcaacaaccactggtaacaaggataacagtaccgaggtatgtaggcggtgctacagagttcttgaagtggtg

SEQ ID NO: 4740 - DNA, 494 bp, Glycine max
  Clone ID: LIB3028-043-Q1-B1-F6
gttgaggttagaattcccgtggcactataatagagcactgacgctcgcgaccacgcgtacgtaaactcggaattcggctcgaggttctagatcgcgagcggccgcccttttttttttttttttgggttgttttatcactgtagtatttgattaattaatagtaactatgttagttcatcagttcactttgcatggatagatgctactagggaaattaaagttatcctcctttcgccttgggacctttcttgctccgttgagtatgtagaagtattgcagatttaaaatagaaacttgcgatgcaaaaaagggcggacgccgagtattgagctcgtcgacccgggaactaagtccggaccggtttctgcaggcgtaacagctttccctatagtcagtcctattaaagcctggcgtaatcatgggcagagctgcttcacgggctgaaattgctatcggctcaaaattccacacatcagacgagtccggaaccaaag

SEQ ID NO: 4741 - DNA, 475 bp, Glycine max
  unsure at all n locations
  Clone ID: LIB3028-043-Q1-B1-H4
tttagcttgcaagtctatacacgagcactgacgtcggatccacgcgtacctcgaatctggattcaggttaatgtaacaagaagaggggacccaaagattttgaagggtttcggacccaaatttttccgtacagtgggggaacaggnaaaggctaaatattttaaggggtacggacctccgaattcaaccaaggcacacgtgaatcacaaggaaattggtcccaatggagcaatacagctctcggctcacagtgtccaaaaaaggacatctattcccatcccaaccaccaaaaacttaacccccttaaaagggtcctaaaaaaaacccatccataaagggaatttggtttcttcaaaattttcctccccaaatttccaaaccttttcccttttcccgggttaaggttggcttcccaaaaaaaaatgaaatttgggttaaagggaattaataatgtggcccctctcagttttctttc

SEQ ID NO: 4742 - DNA, 500 bp, Glycine max
  Clone ID: LIB3028-043-Q1-B1-H7
ggggctagcgaatggattcgaatcgcgtggtcgctatcatcgagcactgacgtcggatccacgcgtacgtaaactcggaattcggctcgaggcagatggcaaagaataaagctgctactgcaagggatgttcggcagttgcagcagatggcatagaataagagtgaacaatgcatttccaagtgactggcaagcatttaagttgctagtttgtatcgatctatggttacagattagctgttgaagttaggtttgggacttgttcatgtatttgttacggatagtgttatgttcatgttatgtgtgacgtaataatatcaactgctgcctaaggagcattgtcgtgggcagccgcagactagtgagctcgtcgagccgggaattaattcgggaccgatagcaggaagcgtaacaactttcacaacagggagtcatagtatagcttggggttatcatggtcatatctgctccccgtgtgaaattgtaatccgggcacaaatc

SEQ ID NO: 4743 - DNA, 469 bp, Glycine max
  Clone ID: LIB3028-044-Q1-B1-A1
gggaggatgaatgaggtggcctatagaagacactgacgtcggatgcacgcgtacgtaagctcggcgcgcgaattgcaagctctgcattaatgaatcggccaacgcgcggggagacgcggtttgcgtattgggcgctcttccgcttcctcgctcactgactcgctgcgctcggtcgttcggctgcggcgagcggtatcagctcactcaaaggcggtaatacggttatccacagaatcaggggataacgcaggaaagaacatgtgagcaaaaggccagcaaaaggccaggaaccgtaaaaaggccgcgttgctggcgtttttccataggctccgcccccctgacgagcatcacaaaaatcgacgctcaagtcagaggtggcgaaacccgacaggactataaagataccaggcgtttccccctggaagctccctcgtgcgctctcctgtttcgaccctgccgcgtaacggat

SEQ ID NO: 4744 - DNA, 463 bp, Glycine max
  unsure at all n locations
  Clone ID: LIB3028-044-Q1-B1-A11
ggcgaagcatcaattcagctagccctatacaacggatccccgtcngacncacgcgtaagtaagctcggaattcggctcgagtaaccacatattaagtggaaaaaaaacaaaaaaaaaaaaagggcggccgccgactagtgagctcgtcgacccgggaattaattccggaccggtacctgcaggcgtaccagctttccctatagtgagtcgtattagagcttggcgtaatcatggtcatagctgtttcctgtgtgaaattgttatccgctcacaattccacacaacatacgagccggaagcataaagtgtaaagcctggggtgcctaatgagtgagctaactcacattaattgcgttgcgctcactgcccgctttccagtcgggaaacctgtcgtgccagctgcattaatgaatcggccaacgcgcggggagaggcggtttgcgtattgggcgccagggtggtg

SEQ ID NO: 4745 - DNA, 530 bp, Glycine max
  Clone ID: LIB3028-044-Q1-B1-A4
gcgggggcggcggcgagcgtggcggagggggggggcgggggcgccgcccaccgcgggccgtcccgaatgaattaggtggtctatagacgagcaatgacgtacgcatgcacgcgtacgtaagctcggaattcggctcgagaattgatcaatcatatgttctatgttcgtgaatatgcgtggaagtggagacaacctgttgataaatttgtagctgaccctgtatgtgtctgaactttaacactgattgatgaaatttgcagctcacttggtatttattcaaggagattggatcagatcaagctacttcaatggaggttctgagattcaaagggcggccgccgactagtgagctcgtcgacccgggaagtaattccggaccggtacctggaggcgtaagagctttccctaaggtgggtccgagggaagcatggggtaaacatgggcgcagctgatttcccgtgtgaaattgctagccgcgaagaagtcggaacaggagttgagcgggaaagatgcagtgtaaggccagagtg

SEQ ID NO: 4746 - DNA, 592 bp, Glycine max
  unsure at all n locations
  Clone ID: LIB3028-044-Q1-B1-B2
cgcgttggcgctccccggccggcgccgggcgcattcccccgcggccacgcggactgccccggatgacttacgtggcctatagacgnacactgacgtaggatccacgcgtacgtacactcggaaatcgccacgacgcgtaaagaggccgccttgctcacatcttatcgggcggacgccgacgtgttggcgcttggttgccgctggtttgggactgcggcccgtcaggcaggggtttcgtgcgcccacacatggctggacgtaccacgcggacgaaggcgcctcccgcatggtccccactctccaagttgcttaggccctccacgctcgggatacgcttatgcgagagtcactgcttacggacactacccgagaaacattcgggccgtgcggccgcctggcgttgcttgagcgcagcgcgccgtgtgtgcgccctgtgggcttcgcggcgcgggctcgcgcggccatcccgcttaagcggcccgggcgcgagcgcaggccctccgaaggttcctcctcgcgcgccctttggcgtcgcgatgtcttggcctgaacgccttcgtcgcgtggcacacggggccgcgtggcggacgcc

SEQ ID NO: 4747 - DNA, 457 bp, Glycine max
  Clone ID: LIB3028-044-Q1-B1-B3
ctgacgtggcgtataggccacactgacgtatcatgcacgcgtacgtaagctcggaattcggctcgagcccaaagggacaaaaaggttgtggttatggcatacctagagagcttgctgccacagccaagcccctaaaaacaggacttcatttttttgaacttggcaactgctcctcctatattgtctaatgatgttcatacctgcgctttgttctgtgcgttatgaaatgtaatgaaggggggacaattttcagtctcaatggaggcaacacagggcggccggccactagtgagctcgtcgacccgggaaggaatggctgaggggtagctgcgggcgtaggaggtgcggggagcctgagtcctagtagagcttggggtaatcacggggagagctgtttcctgcggtaaagggtgctcgggtcgcaattccacgatggcttacgaggcgggggcgcttg

SEQ ID NO: 4748 - DNA, 626 bp, Glycine max
  Clone ID: LIB3028-044-Q1-B1-B4
cgggggtgtgtgcgtgtggggggtgtgggcgggttggctgttgggaggtctggtgcccccggatgaattaggtggtgtatagccgagtactgacgtaggatccacgcgctagtaagctcggaattcggctcgagggatggtgtacggagtgtttctttggtgggagtgtgggcggcgtgggtggtgggagtcggagggtgctgcgttggggggagagattgtggtggttcggggttcgtgtttgatcctctagtgatgttgggatttgtgccatggtggccgagacgtgtggtgggtggctgagccagttatgcggggtgggcggctgggcttgtctggtgtctctggcgacgtctgcgtgtgtgtcgtccggagtgctgtttgctccgtgcggctgcgcagcggggggtcggattatggcgcgcgggggttggggggtcgggttggtggcgggggggtgtgggggggagttgcggggtcgcttcggggtaagtttgcgtggcgtgggtgtgcggtgggttgggaggttttgcggtgttggcggccgttgggggtgcgtggcaggtgtcgggtgcgtttgtctcgtgggttgggctgtactggtggtgtgggggggcgtgtggctg

SEQ ID NO: 4749 - DNA, 478 bp, Glycine max
  Clone ID: LIB3028-044-Q1-B1-B8
ctaatgagtcaggtgacatatagaagagcactgacgtcgcatgcacgcgtacgtaagctcggaattaattcccgggtcagtttctttgtaatagtgatatggtgggggcgtcggtgtgtaggtttttatctatggtgtgaaagggtatcatgtctgtgtctcgctgtcgccgtgactcccgacggccggtcggccttacgcctgtgccgtgacgcctgggagcgggggaagcggtcatcagggggggggttcgcgttccgggtcgacggcgtgcgctcgagttcggcgattcttgcctccaaggtgtgcgcgcgcgctctgtagcgttcggagtgcgaggcgttcgggtggggcgcgggtgcatgcgatccggctctcatgcaggcgggtcagctggagaggctcgttcctggcgggcccgcgtgtatggtttcgttgggggtaacgtctaccggaccaacgtcggacggggatcctt

SEQ ID NO: 4750 - DNA, 478 bp, Glycine max
  Clone ID: LIB3028-044-Q1-B1-C8
ttaatgagctaggtgctctatagaagaatatgacgtcggacgcacgcgtacgtaagctcggaattcggctcgagattattctttcacgatgaatcatcattgtcactggtgtctctgatcagatcccattggatctatcgagggcgaagtcaactaacctgtgtatcaccgtcctatcagcaacagacacgtcccggtgtcatgcgcatcgaacgtaacacgcgcactctcattcacggcggggagcatccctcctatctctgatgtccgttccacgctcttcccatgttccccactagcgacgactttcgtcgagcgtgacgcgacgaccctacgcgtccctcgcgcagccagggatacggctctcaccttctcccccgccacgcaggcgctagacggacgacacacgctcgctctgtccgttccggccgccgccccgcgcgctcgctgccaccgtcctcgcagcgccgcgtggctt

SEQ ID NO: 4751 - DNA, 450 bp, Glycine max
  Clone ID: LIB3028-044-Q1-B1-D10
gaattaatcagctgtcatatagataacagtgacgtcggacgcacgcgtaaataaactcggaattaggggataacgcaggaaataacatgtgagcatcacgccagcaaaaggccaggaaccgtagaaaggccgcgttgctggcgtttttccataggctccgctcccctgacgagcatcacaaaaatcgacgctcatgtcagaggtggcgaaacccgacaggactataaagatattaggcgtttccccctggaatctccctcgtgcgctcacctgttccgaccgtgcctcttaatggataactgtccgcctttctcccttcgggaagcgtggcgctttctcatagctcacgctgtaggtatcccagttcggtgtaggtcgtacgctccaagctgggctgtgtccacgaaacctccgttcagcccggacgcttcgccttaatcggtaactatg

SEQ ID NO: 4752 - DNA, 457 bp, Glycine max
  Clone ID: LIB3028-044-Q1-B1-D4
taatcagtcagtagacgacactgacgtagcatgcacgcgtacgtaaactcggaattcggctcgagttttaagagcattaaattgtggagtttcttttacatttgtcagttatgctttatctctatataaaaagcatcttgtatttaaaaaaaaagaaaaaagaaaaaaaaaaaaataaaaaaaaaaagaaaagaaaaaaagggaggccgccgacaaatgagctcatcaacccgggaagtaattccggaccggtaccttcaggcgtataagctttcccaaaagtgagtcgtattatagcttgaggtaaacatggtcatagctgtttcctggatgaaattgttatagaggcagatttccagacataatatgatacggagagaaaaattgtaaaacctggggatcctaaaacattaagttgtaacccatgggtttcctaatgaataagcaaaggcatact

SEQ ID NO: 4753 - DNA, 504 bp, Glycine max
  Clone ID: LIB3028-044-Q1-B1-D6
cgaatcagttacgtggcctctagaagaaactgccgtctgacgcatgaatacgtaaactcggaattctgctcgaggttccattaacatcaagactcctgatatgaggatggagatgccacgcgtggttcgactttgacatcgatggcaccaatttaaccgcgccaagcctcaccaattgtcccatccaggccttgacgatctcacttcatcgatcacacctcagcattcactgctgacctctgtcatggacggctcgtccttttccttccaggccaccattccgatcccactcctgacggctcccacacgtccgcatctgtggtccaaactttcggtcatggcaaccgccatcccgccaatccgggcagtgttcgcatttctacccacttacccagcttcgccggggcctctgcgctcgtatactccaccggggcagccctcgccacgtgtaggtataactcaccccacgtcttcctgttggcccgcaactccgcagcctttctg

SEQ ID NO: 4754 - DNA, 520 bp, Glycine max
  Clone ID: LIB3028-044-Q1-B1-E1
cgggcccgcgggtgcgcgcggaggcggggggcgcaggacggcgggccgggatcggagcccagaatgaattaggtggcctataggcgacattgacgaaggacgcacgcgtacgtaagctcggaattcggctcgaggactagttctagatcgcgagcggccgccgactagtgagctcgtcgacccgggaattaattccggaccggtacctgcaggcgtaccagctttccctatagtgagtcgtattagagcttggcgtaatcatggtcatagctgtttcctgtgtgaaattgttatccgctcacaattccacacaacatacgagccggaagcataaagtgtaaagcctggggtgcctaatgagtgagctaactcacattaattgcgttgcgctcactgcgcgctttccagtcgggaaacctgtcgtgccagctgcattaatgaatccgccaacgccccgggagaggcggtttgcgtattgggcgccagggtggtttttccgtttcccagttagaggggcagc

SEQ ID NO: 4755 - DNA, 455 bp, Glycine max
  Clone ID: LIB3028-044-Q1-B1-E11
ggattactcagctggcatatagaagagtactgacgtcggacgcacgcgtacataaactcggaattgcaagctctgcattaatgaatcggccaacgcgcggggagaggcggtttgcgtattgggcgctcttccgcttcctcgctcactgactcgctgcgctcggtcgttcggctgcggcgagcggtatcagctcactcaaaggcggtaatacggttatccacagaatcaggggataacgcaggaaagaacatgtgagcaaaaggccagcaaaaggccaggaaccgtaaaaaggccgcgttgctggcgtttttccataggctccgcccccctgacgagcatcacaaaaatcgacgctcaagtcagaggtggcgaaacccgacaggactataaagatacaaggcgtgtccccctggaagctccctcgtgcgctctcctgttccgaccctgccgcttat

SEQ ID NO: 4756 - DNA, 467 bp, Glycine max
  unsure at all n locations
  Clone ID: LIB3028-044-Q1-B1-E6
ttaatgagttaggtggcatatatgaagagatatgacgtcggatgcacgcgtacgtaagctcggtgcagggccagactggaggtggcaacgccaatcagcaacgactgtttgcccgccagttgttgtgccacgcggttgggaatgtgattcagctccgccatcgccgcttccactttttcccgcgttttcgcagaaacgtggctggcctggttcaccacgcgggaaacggtctgataagagacaccggcatactctgcgacatcgtgtaacgttactggtttcacattcaccaccctgagattgactctcttccgggcgctatcatgccatagcgcgagaggttttgcgcggtgcgggggtgtcaacctagatgccgcttcggcgtcgcgcggcgaagtggcaggcctggctgtgccgaagcgggcaaggagccgggaaaagggggttttcggcacgggggccgtctn

SEQ ID NO: 4757 - DNA, 515 bp, Glycine max
  unsure at all n locations
  Clone ID: LIB3028-044-Q1-B1-E7
gggccgagggaggtggggaggggggggggggtggtttgggcgatgtggggcggaggaggccttaatgggtangtggcataaagaagagatatgacgtcgcatgcacgcgtacgtaagctcggaattcggctcgagaaatgcttctagagctatcataacatcatcatcttcaaagagatgtgtagaagagtatggaaatggagagtgcaatttccatgctttcctttgttggttccaataaaagtaatgtgtggttttgtaacttttcttttgagggattttctatttcatgttgagttgggtgcctcattacatgtgtttcaggttcagggtgtcttgtgtcctggactacatgataggtgttgagggttgttctgttatcggaatacagaacacttgtactgtggttttctcatgttttggtgctatagtctcgagcatttcttgcgtttaaaaaagagggaaaagggcgggcgccgactagtgagctcgtcgacccgggaattaagtccgga

SEQ ID NO: 4758 - DNA, 534 bp, Glycine max
  Clone ID: LIB3028-044-Q1-B1-G5
gagggagccgcggcggtagagccgggcggaggcgggagcgccgaacgcggggctctgcgcggcgcgccgcgcgccgcctaatgagttaggtggcataaagaagagaaatgacgtcgcatgcacgcgtacgtaagctcggaatcaggggataacgcaggacagaacatgtgagcaaacagccagcaaacggccaggaaccgtataaaggccgcgttgctggcgtatttccacatgctccgctcccctgacaagcatcacaaaaatcgacgcgcagctcagacgtggcgaaactcgacgggaccatacatataccacgcgtatccccctgcaagctcgctcgtgcgctcacatgtgcagaccctgcagcttaacggatacctgtccgcctttctcccttcgggaagcgtggcactttcacagatgcgaggcggtaagtagctcacttcggtgtaagtcgtacgacctatgctgggcagtttgcacaaatggcccgttcaaccacaacgttgcgccgtagccgggtacaagactctg

SEQ ID NO: 4759 - DNA, 328 bp, Glycine max
  Clone ID: LIB3028-044-Q1-B1-H10
tgccaagcttgtcagttggccaggcactttgggagtgatatgagctcggactcacgcgtaaataagctcggaattcggctcgagggttaatgtttcggttatcactgtggtattctccatggccttgatttcatccttgcttgcattgggagcaaggtagccggtggtctttgtactcacgtggagtttggtcggcgttcgggttggttgtgatttcggttttacttctctgttgtctttttattgatttgtcggatatagctctggttaatttagttttcttttggcctattcgcttcggatttggattttgttttttgtggagggg

SEQ ID NO: 4760 - DNA, 723 bp, Glycine max
  unsure at all n locations
  Clone ID: LIB3028-044-Q1-B1-H12
cttcctcgccctgagtctacgggagatcgggacccctaaatatcgatctaactgggggcctctctgggcccccttngggcccctttaacgttaaaagccttccgggagaaatatttcggggccttccgaaaggggaaatatatagttctcgcaaagaactcgttttgagttatacggagagtctccacctctgatttttcagctttattaaggtgcgcaatctccgtttctgcgatcggttctcctatttggatttgctttcgggccaaactatcgcgccaatcctatccgacagggtgggctgttgccctggtcgtttggtctttccacccccttggttttctgaaagccttttttcccaatgcgacctttgtggaacttacggtttcatggggcttcttctgccccaaactggcttgtcttgcaaggtgtaagtcgaattgacgtgccttctttcaaagctcatctgcgattggtgttttacccgagaacttccctttcccatcaagttcgagcattggcttctggacacccggggggaaaggtcgcaaataaatttgcttgcaatttaatatgcttttggacggaatgcatggacaattttcagcttggcttcattgggtccctggcaattctatgatgtatgcgcttttgtggaatttgcgaatatccgtgcccgtccaaattgttgtcacggcttccaattgattcgaccttaccttt

SEQ ID NO: 4761 - DNA, 540 bp, Glycine max
  Clone ID: LIB3028-044-Q1-B1-H7
gagcggaacggtagagccggtgccggcgccgcgcgcggcgcgcgaccgtactgccgcgcactcggtgtggtgcccgggggctcccttaatagtcatgtggcctatagaagagaactgacgtcggacgcacgcgtacgtaaactcggcttccactttttcccgcgttttcgcagaaacgtggctggcctggttcaccacgcgggaaacggtctgataagagacaccggcatactctgcgacatcgtataacgttactggtttcacattcaccaccctgaattgactctcttccgggcgctatcatgccataccgcgaaaggttttgcgccattcgatggtgtcaacgtaaatgccgcttcgccgtcgcgcgcgaattgcaagctctgcattaatgaatcggccaacgcgcggggagaggcggtttgcgtaggcggcgctcttccgcttcctcgctcactgactcgctgcgctcggtcgttcggctgcggcgagcggtatcagctcagtcaaaggcggtaggaccgtgatccagaggatcag

SEQ ID NO: 4762 - DNA, 483 bp, Glycine max
  unsure at all n locations
  Clone ID: LIB3028-045-Q1-B1-B6
ngattgaatcgacgtggcactatagaagataatgacgtcggacgcacgcgtacgtaaactcggaatacggttatccacagaatcaggggataacgcaggaaagaacatgtgagcaaaaggccagcaaaaggccaggaaccgtaaaaaggccgcgttgctggcgtttttccataggctccgcccccctgacgagcatcacaaaaatcgacgctcaagtcagaggtggcgaaacccgacaggactataaagataccaggcgtttccccctggaagctccctcgtgcgctctcctgttccgaccctgccgcttaccggatacctgtccgcctttctcccttcgggaagcgtggcgctttctcatagctcacgctgtaggtatctcagttcggtgtaggtcgttcgctccaagctgggctgtgtgcacgaaccccccgttcagcccgaccgctgccccttatccggtaactatcgtcttgagtccaa

SEQ ID NO: 4763 - DNA, 493 bp, Glycine max
  Clone ID: LIB3028-045-Q1-B1-C2
cgggcctctgaatgaatcaggtggcatagcgaagagaaatgaagtcggacgcacgcgtacgtaaactcggaataacgccggaacattagtgcaggcagcttccacagcaatggcatcctggtcatccagcggatagttaatgatcagcccactgacccgttgcgcgagaagattgtgcaccgccgctttacaggcttcgacgccgcttcgttctaccatcgacaccaccacgctggcacccagttgatcggcgcgagatttaatcgccgcgacaatttgcgacggcgcgtgcagggccagactggaggtggcaacgccaatcagcaacgactgtttgcccgccagttgttgtgccacgcggttgggaatgtaattcagctccgccatcgccgcttccacattttcccgcgttttcgcagaaacgtggctggcctggttcaacacgcgggaaacggtctgataagagacaccggcatactctgcgacatcgtat

SEQ ID NO: 4764 - DNA, 487 bp, Glycine max
  Clone ID: LIB3028-045-Q1-B1-D1
gctattaagaatgaatcaggtggcatagcgaagacactgaagtcggacgcacgcgtacgtaaactcggaattgactctcttccgggcgctatcatgccataccgcgaaaggttttgcgccattcgatggtgtcaacgtaaatgccgcttcgccttcgcgcgcgaattgcaagctctgcattaatgaatcggccaacgcgcggggagaggcggtttgcgtattgggcgctcttccgcttcctcgctcactgactcgctgcgctcggtcgttcggctgcggcgagcggtatcagctcactcaaaggcggtaatacggttatccacagaatcaggggataacgcaggaaagaacatgtgagcaaaatgccagcaaaaggccacgaaccgtaaaaaagccgcgttgctggcgtttttccataggctccggccccctgacgagcatcacaaaaatccacgctcaagttagaagtggggaaacccgaccagaa

SEQ ID NO: 4765 - DNA, 495 bp, Glycine max
  unsure at all n locations
  Clone ID: LIB3028-045-Q1-B1-D5
agacttnagaatgaataaatcgcgtgtactatagaagagatatgacgtcgcacgcacgcgtacgtaaactcggaattcggctcgaggaagtttgtacttgtttttaggctgactgaattaatgcaaaaaaaaaaaaaaaaaaaaaaaaaaaaaaaaaaaaaaaaaaaaaaaaaaaaaaaaaaaaaaaaaaaaaaaaaaaaaaaaaaaaaaaaaaaaaaaaaaaaaaaaaaaaaaaaaaaaaaaggggggcccccaaaaattaacctcttcaacccggaaattaattccggaccgtaacctgaagggttaaaaattttcccaaaagtaattcgtataaaaccttggctaaacaagggcaaaaactttttcctgtttaaaattgttacccgccaaaaattcaaaaaaaaatacaacccggaacaaaaaattttaaaccctggggtgccaaataattgaccaaacccaaataaattgctttgcccaaaatgcccgctt

SEQ ID NO: 4766 - DNA, 462 bp, Glycine max
  unsure at all n locations
  Clone ID: LIB3028-045-Q1-B1-E10
ngaattgaatctaggtggtcctatgacagataatgacatcgcatgcacgcgtacgtaagctcggaattcagctccgccatcgccgcttccactttttcccgcgttttcgcagaaacgtggctggcctggttcaccacgcgggaaacggtctgataagagacaccggcatactctgcgacatcgtataacgttactggtttcacattcaccaccctgaattgactctcttccgggcgctatcatgccataccgcgaaaggttttgcgccattcgatggtgtcaacgtaaatgccgcttcgccttcgcgcgcgaattgcaagctctgcattaatgaatcggncaacgcgcggggagaggcggtttgcgtattgggcgctcttccgcttcctcgctcactgactcgctgcgctcggtcgttcggctgcggcgagcggtatcagctcactcaaaggcggtaatacg

SEQ ID NO: 4767 - DNA, 478 bp, Glycine max
  unsure at all n locations
  Clone ID: LIB3028-045-Q1-B1-E4
tgattaagttgcatagcgaagactagtgaagtcggacgcacgcgtacgtaaactcagctctctcgttcagctgcagcgaacggtatcagctcactcaaacgcggtaatacagttatccacagaatcacgggatattccaagacaggacatgtgaacaaaatgccatcaaaaggccaccaaccgtacaatcgccgcgttgctgtcgattttccatacgctccgcccccctgacgatcatcagaaaattcgatgctcaattcaaaagtggcgaaatccgacatgactataacgataccatgcgtatcaccctgtgaacaccctcgtgcgctcacctgttacgatcctgccgcttaccggataactgtccgaccttctcccttcaggaatcatcgagctttctcatagctcacgctgtangtatctcagttcagtgtatgtcattcactccaggctggggtttgtgcatcaactccccttt

SEQ ID NO: 4768 - DNA, 472 bp, Glycine max
  Clone ID: LIB3028-045-Q1-B1-E9
agggggctgccgaatgaatcaggtgtcatatgccagacactgacaacggacgcacgcctacgtaaactcggaattcggctcgaggatagaaatggatgacctaaaatttctgctttaaaaaaaagaaaaaaaaaaaaagggcggccgccgactagtgagctcgtcgacccgggaattaattccggaccggtacctgcaggcgtaccaactttccctataatgagtcgtattagagcttggcgtaatcatggtcataactgtttcctgtgtgaaattgttatccgctcacaattccacacaacatacgagccggaagcataaagtgtaaagcctggggtgcctaatgagtgagctaactcacattaattgcgttgcgctcactgcccgctttccagtccggaaacctgtcctgccagctgcattaatgaatcgggcaacgcgcggggagaggcggtttgcgtaatgggcgcca

SEQ ID NO: 4769 - DNA, 494 bp, Glycine max
  Clone ID: LIB3028-045-Q1-B1-F4
aggggggggctggattgatttgaatcgccgtggcactgagatatgtattcggacgcacgcgtacgtaagctcgacttccgcttcctcgctcactgactcgctgcgctcggtcgttcggctgcggcgagcggtatcagctcactcaaaggcggtaatacggttatccacagaatcaggggataacgcaggaaagaacatgtgagcaaaaggccagcaaaaggccaggaaccgtaaaaaggccgcgttgctggcgtttttccataggctccgcccccctgacgagcatcacaaaaatcgacgctcaagtcagaggtggcgaaacccgacaggactataaagataccaagcgtttccccctggaagctccctcgtgcgctctcctgttccgaccctgccgcttaccggatacctgtccgcctttctcccttcgggaagcgtggcgctttctcatagctcacgctgtaggtatctcagttcggtgtaggtcgttcgcc

SEQ ID NO: 4770 - DNA, 479 bp, Glycine max
  Clone ID: LIB3028-045-Q1-B1-F5
ggattgaatgacgtgtcactatagaagagatatgacgtcgcatgcacgcgtacgtaagctcggaattcagctccgcgatcgccgcttccactttttcccgcgttttcgcagaaacgtggctggcctggttcaccacgcgggaaacggtctgataagagacaccggcatactctgcgacatcgtataacgttactggtttcacattcaccaccctgaattgactctcttccgggcgctatcatgccataccgcgaaaggttttgcgccattcgatggtgtcaacgtaaatgccgcttcgccttcgcgcgcgaattgcaagctctgcattaatgaatcggccaacgcgcggggagaggcggtttgcgtattgggcgctcttccgcttcctcgctcactgactcgctgcgctcggtcgttcggctgcggcgagcggtatcagctcactcaaaggcggtaatacggttatccacagaatcagg

SEQ ID NO: 4771 - DNA, 491 bp, Glycine max
  unsure at all n locations
  Clone ID: LIB3028-045-Q1-B1-F6
cgggggtatgaatgaatcaagtcgcgtgtccatataaagactatgacgtcgcatgcacgcgtacgtaagctcggaattgactctcttccgggcgctatcatgccataccgcgaaaggttttgcgccattcgatggtgtcaacgtaaatgccgcttcgccttcgcgcgcgaattgcaagctctgcattaatgaatcggccaacgcgcggggagaggcggtttgcgtattgggcgctcttccgcttcctcgctcactgactcgctgcgctcggtcgttcggctgcggcgagcggtatcagctcactcaaaggcggtaatacggttatccacagaatcaggggataacgcaggaaagaacatgtgagcaaaaggccagcaaaaggccaggaaccgtaaaaaggccgcgttgctggcgtntttccataggctccgcncccctgacgagcatcacanaaatcgacgctcaagtcagaggtggcgaaacccgacagg

SEQ ID NO: 4772 - DNA, 473 bp, Glycine max
  unsure at all n locations
  Clone ID: LIB3028-045-Q1-B1-G9
aggcngtttgggaatgaatcaggtggtcctatacaagagctatgacgtcgcatgcacgcgtacgtaaactcggaattcagctccgccatcgccgcttccactttttcccgcgttttcccaaaaaccttgcttggctggttcaccacgcgggaaacggtctgataagagacaccggcatactctgcgacatcgtataacgttactggtttcacattcaccaccctgaattgactctcttccgggcgctatcatgccataccgcgaaaggttttgcgccattcgatggtgtcaacgtaaatgccgcttcgccttcgcgcgcgaattgcaagctctgcattaatgaatcggccaacgcgcggggagaggcggtttgcgtattgggcgctcttccgcttcctcgctcactgactcgctgcgctcggtcgttcggctgcggcgagcggtatcagctcactcaaaggcggtaataccgt

SEQ ID NO: 4773 - DNA, 469 bp, Glycine max
  Clone ID: LIB3028-045-Q1-B1-H11
gggctctccgaatgaatcaggtggcgtatacaagagactgacatcggacgcacgcgtacgtaaactcggtttcgcagaaacgtggctggcctggttcaccacgcgggaaacggtctgataagagacaccggcatactctgcgacatcgtataacgttactggtttcacattcaccaccctgaattgactctcttccgggcgctatcatgccataccgcgaaaggttttgcgccattcgatggtgtcaacgtaaatgccgcttcgccttcgcgcgcgaattgcaagctctgcattaatgaatcggccaacgcgcggggagaggcggtttgcgtattgggcgctcttccgcttcctcgctcactgactcgctgcgctcggtcgttcggctgcggcgagcggtatcagctcactcaaaggcggtaatacggttatccacagaatcaggggataacgcaggaaagaacatgtg

SEQ ID NO: 4774 - DNA, 479 bp, Glycine max
  unsure at all n locations
  Clone ID: LIB3028-046-Q1-B1-A1
agggnttcgcgaatgaatcangtggcgtatacaacacactgacgacggacgcacgcgtacgtaagctcggaattgagtctcatccgggcgctatcatgccatagcgcgaaacgttttgcgccatacgatggtgtcaacgtaaatgccgcttcgccttcgcgcgcgaattgcaagcactgcattaatgaagcggccatcgcgcggggatatgcagtttgcgtaatgggcgctcttccgcttcttcgctcaatgactcgctgcgctcagtcgttcagctgcagtgaacggtatcagctcactcaattgcggtaatacggttatccacagaatcacgggataacacatgagagaacatgtaagtaaatcgcgagcagtaggtgaaggactgtcaaaatgccgcattgctggtgatattacaaaggctccgaaccacggactatcctcggataagtcgagcctaaattccgggggagcaaacc

SEQ ID NO: 4775 - DNA, 478 bp, Glycine max
  unsure at all n locations
  Clone ID: LIB3028-046-Q1-B1-B3
cggctatcgggatgagtcatgacgcggaggcaagaaactgacatcggacgcacgcctacgtaaactcggaaccgtanaaaggcgcgttggctgggtttttccatagggtccggccccccggacgagcatcacanaaatcgacgctcaagtcagaggtggcgaaacccgacaggactataaagataccaggcgtttccccctggaagctccctcgtgcgctctcctgttccgaccctgccgcttaccggatacctgtccgcctttctcccttcgggaagcgtggcgctttctcatagctcacgctgtaggtatctcagttcggtgtaggtcgttcgctccaagctgggctgtgtgcacgaaccccccgttcagcccgaccgctgcgccttatccggtaactatcgtcttgagtccaacccggtaagacacgacttatcgccactggcagcagccactggtaacaggattagcagagcca

SEQ ID NO: 4776 - DNA, 472 bp, Glycine max
  Clone ID: LIB3028-046-Q1-B1-B6
agattgaatcgcgtggcgtatagatgagactgacgtcggacgcacgcgtacgtaaactcggagctctgcactaatgaatcggccaacgcgcggggagaggcggtttgcgtattgggcgctcttccgcttcctcgctcactgactcgctgcgctcggtcgttcggctgcggcgagcggtatcagctcactcaaaggcggtaatactgttatccacataatcaggggataacgcaggacagaacatgtgagcaaatggccagcaaaaggccatgaatcgtaaaaatgccgcgttgctggcgtttttccataggctccgccaccctgacgagcatcataaagatcgacgctcaagtcagatgtggcgaaacccgacaggactataaagataccaggcgtttccccctggaagctccctcgtgcgctctcctgttccgaccctgccgcttaccggataactttccgccttttccca

SEQ ID NO: 4777 - DNA, 466 bp, Glycine max
  Clone ID: LIB3028-046-Q1-B1-B7
agtatgaatgcggtgtcgtataaaagataatgacgtcggacgcacgcgtacgtaagctcggaattcgctcgagaacgcagagataataagctccatactgcaaaaggcgactctgaaggaaacaaccttgtagaagatatgtcaactgaattgcacatttatactgacttcttgaggcttgtactagaaataataaatgcaatcctgacttatgcactacctcggaatcccgaggtagtgtatgcaataatgcacaggcaggaagtctttcagccattcaagaatcatccacgcttcaatgaactgattgataacatttatactgtattagattttttcaatagtcgtatggatgctcaaagagaggatggtgactggtcagtccacgaagtgctacaagtcataattgtcaattgtcgttcttggaggggtgatggaatgaagatgtttactcaactgcgcttca

SEQ ID NO: 4778 - DNA, 468 bp, Glycine max
  Clone ID: LIB3028-046-Q1-B1-C5
ggtatgaatgcggtggcatataatagacactgacgtcggacgcacgcgtacgtaagctcggagaacatgtgagcaaaaggccagcaaaaggccaggaaccgtaaaaaggccgcgttgctggcgtttttccataggctccgcccccctgacgagcatcacaaaaatcgacgctcaagtcagaggtggcgaaacccgacaggactataaagataccaggcgtttccccctggaagctccctcgtgcgctctcctgttccgaccctgccgcttaccggatacctgtccgcctttctcccttcgggaagcgtggcgctttctcatagctcacgctgtaggtatctcagttcggtgtaggtcgttcgctccaagctgggctgtgtgcacgaaacccccgttcagcccgaccgctgcgccttatcccgtaactatcgtcctgagttcaacccggttagacacaaattatcgcca

SEQ ID NO: 4779 - DNA, 456 bp, Glycine max
  unsure at all n locations
  Clone ID: LIB3028-046-Q1-B1-D12
ctcatgagtcangtgccccatagaagataatgacgtcggacgcacgcatacgtaagctcggccacagaatcaggggataacgcaggaaagaacatgtgagcaaaaggccagcaaaaggccaggaaccgtaaaaaggccgcgttgctggcgtttttccataggctccgcccccctgacgagcatcacaaaaatcgacgctcaagtcagaggtggcgaaacccgacaggactataaagataccaggcgtttccccctggaagctccctcgtgcgctctcctgttccgaccctgccgcttaccggatacctgtccgcctttctcccttcgggaagcgtggcgctttctcatagctcacgctgtaggtatctcagttcggtgtaggtcgttcgctccaagctgggctgtgtgcacgaaccccccgttcagcccgaccgctgcgccttatccggtaactat

SEQ ID NO: 4780 - DNA, 741 bp, Glycine max
  unsure at all n locations
  Clone ID: LIB3028-046-Q1-B1-D2
cgcggacngtgctgtacgtgacattgcagtatctatgcgaatcgctacggatntgccttgctgccaatgactgcncngagncttggatccntcacggtcccctgagctgntngtagncntctgtgatgatntcgcgtgcttgcgtatgccgtgtcgcgtncgctgtctctcgtgtgtcgtgtcgtcgtccgttcgctcgcatgccgttctctacgtgtcgtgtgtagcagcatgantacgatgcatgtcttcgtcgcgacgtttggcggctggtgctctcgcttgctcttgttgttgcctgcctcgggcggtgcgtcgtggtgtggtctctggtttgctcgtgctctctctttcatggtgtctggattcgctgctgttgctcgctgcctgtgtgcttgtctcgtgttcggttccggtctggctcgtgctgggtctctgctccttcgttctgttgtggcgtcatgctttgattctcgctcgtttggcaaggtgtgtctgtgttttgcggtcgtgaggttttggtcctctgccagtctgtgcgctcggttcgctcctgtgtttggcgccttgcgttcctcgttctcttttttttgcgtggcgtgccggtgtgctctggttcgctctcgtgcctgtgtcgtcggtgtacggtttggggtgtgcttggctctgttcctcttcttcttctggtgtccctcttcctcgtcgttcgtctttctgtctcgcgtctagtgctttcttgtg

SEQ ID NO: 4781 - DNA, 476 bp, Glycine max
  Clone ID: LIB3028-046-Q1-B1-E2
cgtgcgttgaggaatgaatcaggttgcatatgcaagataatgacatcggacgcacgcgtacgtaaactcggaattaattccggaccggtacctgcaggcgtaccagctttccctatagtgagtcgtattagagcttggcgtaatcatggtcatagctgtttcctgtgtgaaattgttatccgctcacaattccacacaacatacgagccggaagcataaagtgtaaagcctggggtgcctaatgagtgagctaactcacattaattgcgttgcgctcactgcccgctttccagtcgggaaacctgtcgtgccagctgcattaatgaatcggccaacgcgcggggagaggcggtttgcgtattgggcgccagggtggtttttcttttcaccagtgagacgggcaacagctgattgcccttcaccgcctggccctgagagagttgcagcaagcggtccacgctggtttgccccaacag

SEQ ID NO: 4782 - DNA, 459 bp, Glycine max
  Clone ID: LIB3028-046-Q1-B1-F12
tgactaatgagtcacgtggcctatagaagaatatgacgtcgcatgcacgcgtacgtaagctcggaattaattccggaccggtacctgcaggcgtaccagctttccctatagtgagtcgtattagagcttggcgtaatcatggtcatagctgtttcctgtgtgaaattgttatccgctcacaattccacacaacatacgagccggaagcataaagtgtaaagcctggggtgcctaatgagtgagctaactcacattaattgcgttgcgctcactgcccgctttccagtcgggaaacctgtcgtgccagctgcattaatgaatcggccaacgcgcggggagaggcggtttgcgtattgggcgccagggtggtttttcttttcaccagtgagacgggcaacagctgattgcccttcaccgcctggccctgagagagttgcagcaagcggtccacgctggttg

SEQ ID NO: 4783 - DNA, 485 bp, Glycine max
  unsure at all n locations
  Clone ID: LIB3028-046-Q1-B1-F2
aggtgagcgattcncgaatgaatcatgttgcatatgcaagacaatgacatcggacgcacgcgtacgtaaactcggctcactcaaaggcggtaatacggttatccacagaatcaggggataacgcaggaaagaacatgtgagcaaaaggccagcaaaaggccaggaaccgtaaaaaggccgcgttgctggcgtttttccataggctccgcccccctgacgagcatcacaaaaatcgacgctcaagtcagaggtggcgaaacccgacaggactataaagataccaggcgtttccccctggaagctccctcgtgcgctctcctgttccgaccctgccgcttaccggatacctgtccgcctttctcccttcgggaagcgtggcgctttctcatagctcacgctgtaggtatctcagttccgtgtaggtcgttcgctccaagctgggctgtgtgcacgaaccccccgttcagcccgaccgctgcgccttn

SEQ ID NO: 4784 - DNA, 457 bp, Glycine max
  Clone ID: LIB3028-046-Q1-B1-H9
gttatgaatgcggtgacactattaaagacaatgacgtcgcatgcacgcgtacgtaagctcggaattcggctcgagattgaatccaacatagtgattgttctttttgatcaattgacggaattgtaacttttttaatccatttactgtcttaccgctcttggattcgtttttccttctttttagactggaaatagcttacgagaccttgtatgtgtatccgaaagctgtctacatatgcctcacttgtactactgttagatctagttgcttgatgtaagagattcacacatgataattttcataatatatatcctattatctcatcacacatgtcgaagtagggcggccgccgactagtgagctcgacgacacgggaagtatttcaggaccggtacctgcaggcgtaccagctttccctatagtgagtcatattagagcttggcgtaatcatggtcat

SEQ ID NO: 4785 - DNA, 452 bp, Glycine max
  Clone ID: LIB3028-047-Q1-B1-A1
ttatgaggcctatagcagacactgacgtcggacgcacgcgtacgtaaactcggaaatctgcacgatctgtattaacgaatcggataacgcacggggaaaggcagtttgcatattgggcgctcttccgcttcctcgctcactgactcgctgcgcacggtcattcggctgctgtgagcggtatcatctcaatcaaacggggtaatacggttatccggaggatcaggggataacgcaggaaagaacatgtgagcatgttgtcaacgcttcgccaggaactgtaacaacggcacgttgctggggtttttccataggctcagctcccctgacgagcatcacaacaatcgatgctcaaatcagaagtggttaagcccgacatgactataaagataccaagcgttttcccctgcaaaggtccatcgtgcgctctcctgttacgaacccatgcgcttatg

SEQ ID NO: 4786 - DNA, 472 bp, Glycine max
  unsure at all n locations
  Clone ID: LIB3028-047-Q1-B1-B3
ggtcgcgcggtattnggatgagtcatgtatccgatgtcagagagtgaccacgcgcgcacgcctacgtaaactcggacagttgttgtgccacgcggttgggaatgtaattcagctccgccatcgccgcttccactttttcccgcgttttcgcagaaacgtggctggcctggttcaccacgcgggaaacggtctgataagagacaccggcatactctgcgacatcgtataacgttactggtttcacattcaccaccctgaattgactctcttccgggcgctatcatgccataccgcgaaaggttttgcgccattcgatggtgtcaacgtaaatgccgcttcgccttcgcgcgcgaattgcaagctctgcattaatgaatcggccaacgcgcggggagaggcggtttgcgtattgggcgctcttccgcttcctcgctcactgactcgctgcgctcggtcgttccgctggcggcaa

SEQ ID NO: 4787 - DNA, 476 bp, Glycine max
  unsure at all n locations
  Clone ID: LIB3028-047-Q1-B1-B7
ngatgagaggggtgagaatgaatcaggtatcggaggcgtattatagagactgacctcggacgcacgcgtacgtaaactcggaattcggctcgagcaagcctctcaccttctcaagtacgattcgatcctcggaaccttcgatgctgatgtcaagcctgttggcagcgacatcatctctgtcgatggaaaggaaatcaaagttgtctctgaccgcaaccctgccaaccttccttggaaggatttggggatagacttggtgattgaaggaactggggtgtttgtagacagagaaggtgcagggaaacacattcaagcaggagctaagaaggtgctcattactgctcctggtaaaggagacatccccacatatgtggttggtgtcaatgagtatgattacagccctgatgaacccatcatcagcaatgcatcttgcaccactaactgcctttgcacctttgtcaaggtccttgattaaa

SEQ ID NO: 4788 - DNA, 489 bp, Glycine max
  unsure at all n locations
  Clone ID: LIB3028-047-Q1-B1-B9
cgagtgttcttccgaatgagtcagaatgcggatgcaagagaatgacatcngaccacgcgtacgtaaactcggaatttgattgcgagtgagatatttatgccaagccagccagacgcagacgcgccgagacagaacttaatgggcccgctaacagcgcgatttgctggtgacccaatgcgaccagatgctccacgcccagtcgcgtaccgtcttcatgggagaaaataatactgttgatgggtgtctggtcagagacatcaagaaataacgccggaacattagtgcaggcagcttccacagcaatggcatcctggtcatccagcggatagttaatgatcagcccactgacccgttgcgcgagaagattgtgcaccgccgctttacaggcttcgacgccgcttcgttctaccatcgacaccaccacgctggcacccagttgatcngcgcgagatttaatcgcgcgacaatttgcgacggcgcgtgcagggc

SEQ ID NO: 4789 - DNA, 478 bp, Glycine max
  unsure at all n locations
  Clone ID: LIB3028-047-Q1-B1-D1
gggttacgaatgaatcaggttcgcctaggcaagacaatgacatcgcatccacgcctacgtaaactcggaattcggctcgagaactccccccgagtttcaaaggataanatgcaanataanattcaagacactataaacgatatggacctacaagggggctaaaaatgaaattggatcagggttttcacacctttaatcaatagtctgggagtatgtcactggtaataacgttgatcaaccccgtcggtgtatcccaactattgctgcgataaggccttcattttacagctatggctttccactacgtggtacatgtctggagattggtgccgtgcagatattagtgggtattggtttttcccattatcttcctaaagtaactggtcctggacaccccataattctaatagaggcaagtccattgggtcatgcaaatacctaggcgagttgcgatcctgttaactgaatccggactcaa

SEQ ID NO: 4790 - DNA, 490 bp, Glycine max
  unsure at all n locations
  Clone ID: LIB3028-047-Q1-B1-E10
aggtcctggggctttccgaatgaatttagtgcatagacaagacaatgacatcgcatgcacgcgtacgtaaactcggaattcggctcganggcattgattgggaccagaaagatggccttctcctgattgaagccgatagactcttaaaaccgggtggatactttgtttggacatcaccactcacaaatgctcgtaacaaagagaatcagaaaaggtggaagtttatacaggattttacattaacactttgctgggagcttctgtcacagcaagatgaaactgtcgtatggaagaaaactagtaaaaaaagttgctatgcatcaagaaagtctggttctggcccttccttgtgtggtagaggtaatgatgtggagactccctattatcgagaattgctaaactgcataagtggaacacagagcagccgtgggtttcaattgaaaaaanggaaanatggcctctccgggctaacttgacaacaacgagttgg

SEQ ID NO: 4791 - DNA, 485 bp, Glycine max
  Clone ID: LIB3028-047-Q1-B1-E12
ggggtctgtgaatgattttagtgcctagacaagacagtgacatcggatccacgcgtacgtaaactcggagaacatgtgagcaaaaggccagcagaaggccaggaaccgtataaaggccgcgttgctggcgtttttccataggctccgcccccctgacgagcatcacaaaaatcgacgctcaagtcagaggtggcgaaacccgacaggactataaagataccaggcgtttccccctggaagctccctcgtgcgctctcctgttccgaccctgccgcttaacggatacctgtccgcctttctcccttcgggaagcgtggcgctttctcatagctcacgctgtatgtatctcagttcggtgtaagtcgttcgctccaagctgggctgtgtgcacgaaccccccgttcagcccgaccgctgcgccttatccggtacctatcgtcttgagtccaacccggtaagacacgacttatcgccactggcagcag

SEQ ID NO: 4792 - DNA, 466 bp, Glycine max
  Clone ID: LIB3028-047-Q1-B1-E3
ggtgctgagaatgaatcaggttgcctatgcaagacaatgacatcggatcgcacgcgtacgtaaactcggggccgcgttgctggcgtttttccatacgctccgcccccctgacgagcatcacaaaaatcgacgctcaagtcagaggtggcgaaacccgacaggactataaagataccaggcgtttccccctggaagctccctcgtgcgctctcctgttccgaccctgccgcttaccggatacctgtccgcctttctcccttcgggaagcgtggcgctttctcatagctcacgctgtaggtatctcagttcggtgtacgtcgttcgctccaagctgggctgtgtgcacgaaccccccgttcagcccgaccgctgcgccttatccggtaactatcgtcgtgagtccaacccggtaagacacgacttatcgccactggcagcagccactggtaacacgattagcatagcg

SEQ ID NO: 4793 - DNA, 495 bp, Glycine max
  unsure at all n locations
  Clone ID: LIB3028-047-Q1-B1-F10
cgggcgtctcgcgagatgaattcangttgccctaggccaagagaaatgacatcgcgaccacgcgtacgtaaactcggaatttgattgcgagtgagatatttatgccagccagccagacgcagacgcgccgagacagaacttaatgggcccgctaacagcgcgatttgctggtgacccaatgcgaccagatgctccacgcccagtcgcgtaccgtcttcatgggagaaaataatactgttgatgggtgtctggtcagagacatcaagacataacgccggaacattagtgcaggcagcttccacagcaatggcatcctggtcatccagcggatagttaatgatcagcccactgacccgttgcgcgagaagattgtgcaccgccgctttacaggcttcgacgccgcttcgttctaccatcgacaccaccacgctggcacccagttgatcggcgcgagatttaatcgccgcgacaatttgcgacggcgcgtgcagggcc

SEQ ID NO: 4794 - DNA, 467 bp, Glycine max
  unsure at all n locations
  Clone ID: LIB3028-047-Q1-B1-G2
cggcctttncgaatgaatcatgttgcctatgccagacaatgacgacggatgcacgcgtacgtaaactcggcgccttcgcgcgcgaattgcaagctctgcattaatgaatcggccaacgcgcggggagaggcggtttgcgtattgggcgctcttccgcttcctcgctcactgactcgctgcgctcggtcgttcggctgcggcgagcggtatcagctcactcaaaggcggtaatacggttatccacagaatcaggggataacgcaggaaagaacatgtgagcaaaaggccagcaaaaggccangaaccgtaaaaaggccgcgttgctggcgtttttccataggctccgcccccctgacgagcatcacaaaaatcgacgctcaagtcanaggtggcgaaacccgacaggactataaagataccaagcgttttccccctggaagctcnctcgtgcgctctcctgttccgan

SEQ ID NO: 4795 - DNA, 834 bp, Glycine max
  unsure at all n locations
  Clone ID: LIB3028-047-Q1-B1-H9
tttttctgtgtcgtcnaggctnctcgctnatgactggactantacggtcctntgggtccgtntnctgttgtaactgtcggagtcttgcgcttggtctctgtgttgctatgtcncgcctcngctgtgttgtgcggttgtgcgcgtgagtgcgtctactggtacttctctctgcggtcgtgtcatgctctgttgtctgttggtggtgtgcgtggctgttcatcgatgtcgcttcttgtgtttgtgtgacgcgggtggttcttcgtcttgttgtgtgtgggtgttccacctacgttgttgtcggtgttctctgtctgtgctagtttctgtcgttcttctctgtgtctcgtgtcgagtcgtggagcgctgtcttgagattcttgcgctgatatcgcctggcgcgacgtcaggtgtcgtctgcttggattagttgttcgagtcgttgtctgctgtctagtgtgtgtcttgtcgttcgtcctgtgcgtcttgtcgtgtgcgctgttgtgcgtgtgcagtgtcgcgtgttgtgttggtgctgctgcgcgttgtcgccttgcttaattgtgcggtgggcttctctcgtctgctcgctgtggcgtggtgtttgtgtctctggcgcctggctcttgctgcgtctgatactcgttgcgtgtgcgtgctgttgtgtctatatgtctgtcgtacgcgtctttgcgttgttctctgtgtgcgtgttgctgtgtggctctgtgctgcgtgctctgttgtatcgctggtcctgtctgcttgcgcgtggttgtcgcgtgtcgtgtcggctgacgtatgtgttgcgcctggctctgttgtgcgcgtctggtt

SEQ ID NO: 4796 - DNA, 480 bp, Glycine max
  unsure at all n locations
  Clone ID: LIB3028-048-Q1-B1-A2
gggcggggaatgaatcaggttgcctagacaagactatgatatcgcatgcacgcgtacgtaagctcggaattgactctcttccgggcgctatcatgccataccgcgaagagttttgcgccattcgatggtgtcaacgtaaatgccgcttcgccttcgcgcgcgaattgcaagctctgcattaatgaatcggccaacgcgcggggagatgcggtttgcgtaatgggcgctcttccgcgtcctcgctcaatgactcgctgcgctcggtcgttcngctgccgcgagcggtatcagctcactcaaaggcggttataccggtatccacagaatcaggggaatacgcaggaaagaacatgttagcaaaaagggcgaacaaaaggcaagaaacggtaaaaaggcgcgttgctggcgtttttccataggctcccgccccctgacgagcaatcacaaaatcaacgctcaagtcagagggtgcgaaacccc

SEQ ID NO: 4797 - DNA, 481 bp, Glycine max
  Clone ID: LIB3028-048-Q1-B1-A6
gggagcgagggggcgattgagtgacgtggccctatagaagagatatgacgtcgcatgcacgcgtacgtaagctcgggccgactagtgagctcgtcgacccgggaattaattccggaccggtacctgcaggcgtaccagctttccctatagtgagtcgtattagagcttggcgtaatcatggtcatagctgtttcctgtgtgaaattgttatccgctcacaattccacacaacatacgagccggaagcataaagtgtaaagcctggggtgcctaatgagtgagctaactcacattaattgcgttgcgctcactgcccgctttccagtcgggaaacctgtcgtgccagctgcattaatgaatcggccaacgcgcggggagaggcggtttgcgtattgggcgccagggtggtttttcctttcagcagtgagacgggcaacagctgattgcccttaacggcctggccttgaaagagtgcaccaac

SEQ ID NO: 4798 - DNA, 484 bp, Glycine max
  unsure at all n locations
  Clone ID: LIB3028-048-Q1-B1-B1
cggggagcgaatggtttgttgcagagacaaacaatgacatcgcatgcacgcgtacgtaagctcggaatcaggggataacgcaggaaagaacatgtgagcaaaaggccagcaaaaggccaggaaccgtaaaaaggccgcgttgctggcgtttttccataggctccgcccccctgacgagcatcacaaaaatcgacgctcaagtcagaggtggcgaaacccgacaggactataaagataccaggcgtttccccctggaagctccctcgtgcgctctcctgttccgaccctgccgcttaccggatacctgtccgcctttctcccttccggaaagcgtggcgctttctcatagctcacgctgtangtatctcaattcggtgtangtcgttcgctccaagctgggctgtgtgcacgaaccccccgttaagcccgaacgctgcggccttatccggtaactaacctcctgagtcaaacccggtaagaaaag

SEQ ID NO: 4799 - DNA, 476 bp, Glycine max
  unsure at all n locations
  Clone ID: LIB3028-048-Q1-B1-B9
cggggtnttggaggaatgaatcagcgtggccctatagaagacaatgacgtcgcatgcacgcgtacgtaagctcggaattgactctcttccgggcgctatcatgccataccgcgaaaggttttgcgccattcgatggtgtcaacgtaaatgccgcttcgccttcgcgcgcgaattgcaagctctgcattaatgaatcggccaacgcgcggggagaggcggtttgcgtattgggcgctcttccgcttcctcgctcactgactcgctgcgctcggtcgttcggctgcggcgagcggtatcagctcactcaaaggcggtaatacggttatccacagaatcaggggataacgcaggaaagaacatgtgagcaaaaggccagcaaaaggccaggaaccgtaaaaaggccgcgttgctggcgtttttccataggctccgcccccctgacgagcatcacanaaatcgacgctcaagtcagaggg

SEQ ID NO: 4800 - DNA, 477 bp, Glycine max
  unsure at all n locations
  Clone ID: LIB3028-048-Q1-B1-C12
cggcggcgtttggagaactaattcagctgcatatagaatagcagtgacgtcgcatgcacgcgtacgtaagctcggaattcagctccgccatcgccgcttccactttttcccgcgttttcgcagaaacgtggctggcctggttcaccacgcgggaaacggtctgataagagacaccggcatactctgcgacatcgtataacgttactggtttcacattcaccaccctgaattgactctcttccgggcgctatcatgccataccgcgaaaggttttgcgccattcgatggtgtcaacgtaaatgccgcttcgccttcgcgcgcgaattgcaagctctgcattaatgaatcggncaacgcgccgggagaaggcgttttgcttattggccctccttcgcttcctcgctcactgactcgctgcgctcggtcgttcggctgcggcgagcggtatcagctcactcaaaagcggtaatacggttg

SEQ ID NO: 4801 - DNA, 482 bp, Glycine max
  Clone ID: LIB3028-048-Q1-B1-E1
cgggtgagcgaatgaattaggtgccatagcaagagcaatgacatcgcatgcacgcgtacgtaagctcggaattcggctcgaggaaatttatatattttgtaatggcccaatcgcgtataacatagcagagaattgttgtatctttagtattattatccccacccatcctattacaagttccttgggggtgggggatgtggcagttaatgtatacagcttagctttatatgttactctaatatgtattatatgtaggttttatcaaattttttgtcggattttcaagattgtctccgtgacttgtctaataaaaacattttatggatagctttccttgtgaaaaaaaaagagaaaaaaagggcggccgccgactagtgagctcgtcgacccgggaattaattccggaccggtacctgcaggcgtaccagcttttcctaaagtgagtcctattaaagctggcgtaatcatgggcatagctgttt

SEQ ID NO: 4802 - DNA, 478 bp, Glycine max
  unsure at all n locations
  Clone ID: LIB3028-048-Q1-B1-E12
gtgggtgancggagaattaatcagcggcatatagaaaagcattgacgtcccatgcacgcgtacgtaagctcggaatgccgcttcgccttcgcgcgcgaattgcaagctctgcattaatgaatcggccaacgcgcggggagaggcggtttgcgtattgggcgctcttccgcttcctcgctcactgactcgctgcgctcggtcgttcggctgcggcgagcggtatcagctcactcaaaggcggtaatacggttatccacagaatcaggggataacgcaggaaagaacatgtgagcaaaaggccagcaaaaggccaggaaccgttaaaaggccgcgttgctggcgtttttccataggctccgcccccctgacgagcatcacaaaaatcgacgctcaagtcagaggtggcgaaacccgacaagactattaagattacaggcgtttccccctggaagctccctcgtgcgctcttctgttccgn

SEQ ID NO: 4803 - DNA, 491 bp, Glycine max
  unsure at all n locations
  Clone ID: LIB3028-048-Q1-B1-E4
cggggcgcggaattcagtgaagttgcgtagacaagagaaatgacatcgcatgcacgcgtacgtaagctcggaattgcaagctctgcattaatgaatcggccaacgcgcggggataggcggtttgcgtattgggcgctcttccgcttcctcgctcactgactcgctgcgctcggtcgttcggctgcggcgagcggtatcagctcactcaaaggcggtaatacggttatccacagaatcaggggataacgcaggaaacaacatgtgagcacaaggccagcanaaggccaggaaccgtaaaaaagccgcgttgctggcgttttttcataggctccgcccccctgacgaacaatcacaaaatccacgctcaagtcagaggtggcaaacccgacaggactataaagataccaggcgttttccccctgaaagctccctccttcgctctctggttccgaccctggngcgtaacgggatacctggtccgccttcctccc

SEQ ID NO: 4804 - DNA, 473 bp, Glycine max
  unsure at all n locations
  Clone ID: LIB3028-048-Q1-B1-F10
ggtgctntgcgagaattaatcagctagcatatagaaaacagtgacgtcgcatgcacgcgtacgtaaactcggccagcaaccgtaaaaaggccgcgttgctggcgtttttccataggctccgcccccctgacgagcatcacaaaaatcgacgctcaagtcagaggtggcgaaacccgacaggactataaagataccaggcgtttccccctggaagctccctcgtgcgctctcctgttccgaccctgccgcttaccggatacctgtccgcctttctcccttcgggaagcgtggcgctttctcatagctcacgctgtaggtatctcagttcggtgtacgtcgttcgctccaagctgggctgtgtgcacgaaccccccgttcagcccgaccgctgcgccttatccggtaactatcgtcttgagtccaacccggtaagacacgacttatcgccactggcagcagccactggtaacagg

SEQ ID NO: 4805 - DNA, 474 bp, Glycine max
  unsure at all n locations
  Clone ID: LIB3028-048-Q1-B1-F11
cgggnncttcgagaattaatcaggctgcatatagaagagcactgacgtcgcatgcacgcgtacgtaaactcggaattgcaagctctgcattaatgaatcggccaacgcgcggggagaggcggtttgcgtattgggcgctcttccgcttcctcgctcactgactcgctgcgctcggtcgttcggttgcgcgagcggtatcagctcactcaaaggcggtaatacggttatccacagaatcaggggataacgcaagaaagaacatgtgagcaaaaggccagcaaaaggccaagaaccgtaaaaaggccgcgttgctggcgtttttccataggctccgcccccctgacgagcatcacaaaaatcgacgctctcaagtcagaggtggcgaaacccgacaggactataaagataccaggcgtttccccctggaagctccctcgtgcgctctcctgttccgaccctgccgcttaccggata

SEQ ID NO: 4806 - DNA, 481 bp, Glycine max
  Clone ID: LIB3028-048-Q1-B1-H5
ggcgggggagggattgaatcacgtgcctatataagagactgacgtcggatgcacgcgtacgtaaactcggaattgcaagctctgcattaatgaatcggccaacgcgcggggagaggcggtttgcgtattgggcgctcttccgcttcctcgctcactgactcgctgcgctcggtcgttcggctgcggcgagcggtatcagctcactcaaaggcggtaatacggttatccacagaatcaggggataacgcaggagagaacatgtgagcaaaaggccagcaaaaggccaggaaccgtaaaaaggccgcgttgctggcgtttttccataggctccgcccccctgacgagcatcacaaaaatcgacgctcaagtcagaggtggcgaaacccgacaggactataaagataccaggcgtttccgcctggaagctccctcgtgcgctctcctgttccggacctgccgcttaccgggataactgttcgcc

SEQ ID NO: 4807 - DNA, 504 bp, Glycine max
  unsure at all n locations
  Clone ID: LIB3028-048-Q1-B1-H9
ggggcgggggcggcggagaattgaatctagctgcactatagatacgcactgacgtcgcatccacgcgtacgtaagctcggaattaattcccgggtcgacgagctcangagtcggtggagtagaggaaggttagagtgatttgtctatggaaagttgttagtgtatggatcgattcacaacgtgagggagtcgatgtttaaggttggtcctacacgtccgcagcacctcagggaggcaggttatgccaccaccacctgttggatgacgtggatcacggggaggtagaggtgcttgtcgtcaagtggcagctgtccctgcggttggcacgacgttcagctctcggggttcggggatccagggtggaaggtcctgtctggtctaggcctcatttttgaggtcacggactgcgctcggctcgcggcacggcgtcagggctgacgtggtcgatgcggtgcgcggcatggctcgggagtggtcgtcgcccgtcgcacccgtcccctggtt

SEQ ID NO: 4808 - DNA, 699 bp, Glycine max
  unsure at all n locations
  Clone ID: LIB3028-049-Q1-B1-A1
cgaatgaattangtgacctatagaagactatgacgtcgcatgcacgcgttacttagctccgaaatcggctcgagcacaaatctcggcagtataccgacactgaaaaccagagaaaagaaaagcaccttttttccgccattaatggcccttcttgaaacttggtcatcaattgcgatgaaggactcaacatcttgacaccaccccatttcctaattgatttggattagtcgtgttggacctggatgctgctgctaatacagttgatccacaaatgagattccgcattgcattgtttctctttttggcttctcttcaagccactttaagtcaagatattgaacatggttcacttctagtagatggagctcagactaaggctgaaacaggtgataactttatttgtgccactattgattggtggcctcatgataagtgtgactataaccattgcccttggggatattcctctgttgtaaatttggacttgtctcatcctttcctagccaaagcaatccaagccctcaagccattgtaggatagacttggaggttctttgcaagaacgggtgctgtaagatgtaggaagtttgaagtctcctttgcatccccttcaaagtgttaaaggtgaaattgtttggatttcaaaaagatgtttacacatgaaaaagtgggaataactgaaacagtttttcacgagacg

SEQ ID NO: 4809 - DNA, 501 bp, Glycine max
  unsure at all n locations
  Clone ID: LIB3028-049-Q1-B1-A11
cacgaatgctatcagtagtcaggggggngagtggggggatcgaaacctacgttaacgcgcgagtaagctttcgcatgtggctatacaatatttgggcatagagtttcatctgctcaaaggcaacgctagcgctggaaactacgacgtctctttcagcaacggcgatggggccctttaagtttagcatacagtttctgtccattcggcacgagctttccaggactgcggtgacgacttctatggagttgccgaaccacgttcggcaaatgctttcaagctgcggtccagtgacgggtttaagaacggtgtcatgaaggcgtagaggaagtcgcagggctcatgtcctgggatcttatagagcgggcagcagcgctttcacttagcgcccctcaacgggtgctacagtaagaaggactccggttcatttccccagtgcagttttgaggtgaggcccacagaggtggtcggcagttcatgagggtgcagcgtggactcacaagg

SEQ ID NO: 4810 - DNA, 701 bp, Glycine max
  unsure at all n locations
  Clone ID: LIB3028-049-Q1-B1-A3
cgaaatgaattaggtgagctatagaagagctatgacgtcgcatgcacgcgtacgtaagctcggaattgacataccttctccagccatgtcttggtggggattccaaaactttgatgtttgtgaacatctcacctgatccatcttcaactggagagtcactttgctctcttcggtttgctgctggagtgaatgcctgcgagattggtatcccgcggcgtcagacatccacacggtcccttgattctcgtttgagcagcggctaaaagagaggccacactcattatccataataaccaaagtaactgtcatttgtaatgctttggatgggataaaagttgtctttgacccatgtaactgtgttaacttttagagaaatgagcttgtataaaattgattgtagaggctaagctttagcctcaggggtgcaacaactgattatcatttagttgtgacattattatattcaatttattgaaacananngaaaaaaaaagggcggccgccgactagtgagctcgtcgacccgggaattaattccggaccggtacctgcaggcgtaccagctttccctatagtgagtcgtaataaagcttggcgtaatcatggtcatagctgtttcctggtgtgaaatgttatccggtcacaattccacacaacatacgagccgggaagcataaagtgtaagcctggggttcctaata

SEQ ID NO: 4811 - DNA, 497 bp, Glycine max
  Clone ID: LIB3028-049-Q1-B1-B12
cggcccgaatcactcggtggtcttcagaagtcgactgacgtcgtatgcacgcgtgcctaaactcggaattcagctccgccatcgccgcttccactttttcccgcgttttcgcagaaacgtggctggcctggttcaccacgcgggaaacggtctgataagagacaccggcatactctgcgacatcgtataacgttactggtttcacattcaccaccctgaattgactctcttccgggcgctatcatgccataccgcgaaaggttttgcgccattcgatggtgtcaacgtaaatgccgcttcgccttcgcgcgcgaattgcaagctctgcattaatgaatcgggcaacgcgccgggagaggcggtttgcgtattgggcgctcttccgcttcctcgctcactgactcgctgcgctccgtctttccgctgccgcgaaccggaacaactcactcaaaggcggtaatacggttatccacagaattcagggataacgcggaaag

SEQ ID NO: 4812 - DNA, 502 bp, Glycine max
  Clone ID: LIB3028-049-Q1-B1-B9
cgccgccccgaatgacttcggtggcactacgaaggcgaatgacgtcggatgcacgcgtacgtaagctcggaattgactctcttccgggcgctatcatgccataccgcgaaaggttttgcgccattcgatggtgtcaacgtaaatgccgcttcgccttcgcgcgcgaattgcaagctctgcattaatgaatcggccaacgcgcggggagaggcggtttgcgtattgggcgctcttccgcttcctcgctcactgactcgctgcgctcggtcgttcggctgcggcgagcggtatcagctcactcaaaggcggtaatacggttatccacagaatcaggggataacgcaggaaagaacatgtgagcaaaaggccagcaaaaggccaggaaccgtaaaaaggccgcgttgctggcgtttttccataggctccgcccccctgacgagcatcacaaaaattgacgctcaagtcagaggtggcgaaacccgacaggacttataagatacca

SEQ ID NO: 4813 - DNA, 699 bp, Glycine max
  unsure at all n locations
  Clone ID: LIB3028-049-Q1-B1-C3
cgaattgaatcaggtgacatatagaagagatatgacgtcgcatgcacgcgtacgtaagctcggaatcaggggataacgcaggaaagaacatgtgagcaaaaggccagcaaaaggccaggaaccgtaaaaaggccgcgttgctggcgtttttccataggctccgcccccctgacgagcatcacaaaaatcgacgctcaagtcagaggtggcgaaacccgacaggactataaagataccaggcgtttccccctggaagctccctcgtgcgctctcctgttccgaccctgccgcttaccggatacctgtccgcctttctcccttcgggaagcgtggcgctttctcatagctcacgctgtaggtatctcagttcggtgtaggtcgttcgctccaagctgggctgtgtgcacgaaccccccgttcagcccgaccgctgcgccttatccggtaactatcgtcttgagtccaacccggtaagacacgacttatcgccactggcagcagccactggtaacaggattagcagagcgaggtatgtangcggtgctacagagttcttgaagtggtggcctaactacggctacactagaagaacagtatttggtatctgcgctctgctgaagccagttacctttcggaaaaagagttggtagctcttgattcggcaaacaanacaacgctggtagcggtggtttttttgtn

SEQ ID NO: 4814 - DNA, 694 bp, Glycine max
  unsure at all n locations
  Clone ID: LIB3028-049-Q1-B1-C4
cgaattgaatcangtggcatatanaagacaatgacgtcgcatgcacgcgtacgtaagctcggaattcggctcgaggtttgttattgttaaaaaaaaaaaaagaagggcggccgccgactagtgagctcgtcgacccgggaattaattccggaccggtacctgcaggcgtaccagctttccctatagtgagtcgtattagagcttggcgtaatcatggtcatagctgtttcctgtgtgaaattgttatccgctcacaattccacacaacatacgagccggaagcataaagtgtaaagcctggggtgcctaatgagtgagctaactcacattaattgcgttgcgctcactgcccgctttccagtcgggaaacctgtcgtgccagctgcattaatgaatcggccaacgcgcggggagaggcggtttgcgtattgggcgccagggtggtttttcttttcaccagtgagacgggcaacagctgattgcccttcaccgcctggccctgagagagttgcagcaagcggtccacgctggtttgccccagcaggcgaaaatccggtttgatggtggttaacggcgggatataacatgagctgtcttcggtatcgtcgtatcccactaccgagatatccgcaccaacgcgcagcccggactcggtaatggcgcgcattgcgcccagcgccatctgatcgttggg

SEQ ID NO: 4815 - DNA, 694 bp, Glycine max
  Clone ID: LIB3028-049-Q1-B1-C6
cgaaatgatttaggtgccactatagaagactatgacgtcgcatgcacgcgtacgtaagctcggaattcggctcgaggaagaggtcactgccggaagaagggagcaacaccatctttcattttccggcgatctcttgtttcttccatcatcaccgttttccggcgatccctaatcctcgcaaacagaaatgacgacatcaaggcgccttgcggacaggaaggtggagaagtttgagaagaacatcacaaaaagaggatttgtgccagacactaccactaagaagggaaaagactaccctgttggcccagtgctgctcggtttcttcgtctttgttgtcattggatcatctctcttccagataatcaggacagcaacgagtggaggcatggcttaaatggagctttgttttggattttgtgtcatcttctctttcttagcctcctcgtataaaatgctaatacttctctacatgtactgtacttgtactagaccctgttcctgttcatgttttaatgaactttataagaattttgaattaaaacaagtgaaaaagggcggccgccgactagtgagctcgtcgacccgggaattaattccggaccggtacctgcaggcgtaccagctttccctatagtgagtcgtattagaacttggcgtaatcatggtcatagcggtttcccgtgtgaaattgtaa

SEQ ID NO: 4816 - DNA, 695 bp, Glycine max
  unsure at all n locations
  Clone ID: LIB3028-049-Q1-B1-E1
cggaatgaattangtgacctatagaagagatatgacgtcgcatgcacgcgtacgtaagctcggaatttgattgcgagtgagatatttatgccagccagccagacgcagacgcgccgagacagaacttaatgggcccgctaacagcgcgatttgctggtgacccaatgcgaccagatgctccacgcccagtcgcgtaccgtcttcatgggagaaaataatactgttgatgggtgtctggtcagagacatcaagaaataacgccggaacattagtgcaggcagcttccacagcaatggcatcctggtcatccagcggatagttaatgatcagcccactgacccgttgcgcgagaagattgtgcaccgccgctttacaggcttcgacgccgcttcgttctaccatcgacaccaccacgctggcacccagttgatcggcgcgagatttaatcgccgcgacaatttgcgacggcgcgtgcagggccagactggaggtggcaacgccaatcagcaacgactgtttgcccgccagttgttgtgccacgcggttgggaatgtaattcagctccgccatcgccgctttcactttttcccgcgttttcgcaaaaacgtggctggcctggttcaccacgccggaaacggtctgataggagacaccggcatactctgcgacatcgtataacgttacgggttcacatt

SEQ ID NO: 4817 - DNA, 695 bp, Glycine max
  Clone ID: LIB3028-049-Q1-B1-E4
ggaatgaatcacggtgcatatagaagacaatgacgtcgcatgcacgcgtacgtaagctcggaaatcggcgcgatcctcaacttgtactcaagggacagagaccattacaagcacaacaaatggcgaagaagaaagtggagatcctaagaggtggtgttaccggtgccaaccttgcaataactatacaaagtcaagccaacgtcacccttagtgatccgaaggaatattttgagattccatgggcaagtttgaggggattggttgagccaacttttgctgaaaggatagtgatcaaccatagagagtacttcaaaaagggtaaccttgttgtatccagtgctgtcaacataactgaaactgcagtggtgactgaagatggccagcagattgcctatgactatcttgttattgccactggacacacagaaccaatccccaaaaccaggagtgaaagacttgaccaatacaaaggagaaaatgcaaagatcaaatctgcaagttcagttttgattgttgggggaggtccaactggtgttgagcttgcagcagagattgctgttgattttcctgataagaaggtcaccatagtgcataaaagaacgaagttgcttgaatacaatgggacaaaaacttcaagcaagactttaaagtggctcaaatcaaagaaaattgatgtgaaacaagaacaatcgggc

SEQ ID NO: 4818 - DNA, 697 bp, Glycine max
  Clone ID: LIB3028-049-Q1-B1-E6
cgaattgaactaggtgcactatagaagaatatgacgtcgcatgcacgcgtacgtaagctcggaattcggctcgagtgacgatgagtggagccagcacaatgcaaagaaacttattgatacacgtcaaaacggattgcgcaattcaattcctaagcactttccatattttcacgttgaatttggtcgaaacaagggttttgtccatgttattgatgatgaagagcagtttaacatcagccttggcttgaatgtcataagaggcatgctacatttggcatatgaggacatgtataggcgacgacgctacgaggctgtggaggtacaagagcaagcagttgaaagcttttccaaagagtggaaacattttgactggacaaaacagcttcatgaaacttcgtaacaaacattttacagataagttaatgtacattaatattgctcatgtgccacggtacactgtaactttactgatagaaatgaattttgtactgaacacccccctttagaagaacaaagtgaaataatgctcattcgttgttcaaaaaatcgtaaaagaatctatcatatactatgcaccacaaaagggcggccgccaactactgagctcgtcgacccgggaattaattccggaccggtacctgcaggcgttacaactttccctatagtgagtcgtattacagcttggagtaatcagggg

SEQ ID NO: 4819 - DNA, 694 bp, Glycine max
  unsure at all n locations
  Clone ID: LIB3028-049-Q1-B1-F7
cgaattgatctaggtgcactatagaagagatatgacgtcgcatgcacgcgtacgtaagctcggaatttaattcagctccgccatcgccgcttccactttttcccgcgttttcgcagaaacgtggctggcctggttcaccacgcgggaaacggtctgataagagacaccggcatactctgcgacatcgtataacgttactggtttcacattcaccaccctgaattgactctcttccgggcgctatcatgccataccgcgaaaggttttgcgccattcgatggtgtcaacgtaaatgccgcttcgccttcgcgcgcgaattgcaagctctgcattaatgaatcggccaacgcgcggggagaggcggtttgcgtattgggcgctcttccgcttcctcgctcactgactcgctgcgctcggtcgttcggctgcggcgagcggtatcagctcactcaaaggcggtaatacggttatccacagaatcatgggataacgcaggaaagaacatgtgagcaaaaggccagcaaaaggccaggaaccgtaaaaaggccgcgttgccggcgttttttcataggctccgcccccctgacgagcatcacaaaaatcgacgctcaggtcagaggtggccaaacccgacaggacctatangataccaggcgtttccccctggaagctccctcgttcgctctcctgttta

SEQ ID NO: 4820 - DNA, 507 bp, Glycine max
  Clone ID: LIB3028-049-Q1-B1-G12
cgcctgacttcggtcgtcctacagaagtcgatggacgtcggatgcacgcgtacgtaagctcggaattccgagcttggctcctcgagagcggccgccgactagtgagctcgtcgacccgggaattacttccggaccggtacctgcaggcgtacgagctttccctatagtgagtcgtattagagcttggcgtaatcatggtcatagctgtttcctgtgtgaaattgttatccgctcacaattctagacaacatacgagccggaagcataaagtgtaaagcctggggtgcctaatgagtgagctaactcacattaattgcgttgcgctcacagcccgctttcgactcaggaaacctgtcatgccagctgcattaatgaatcggccaacgcgcggggagaggcggtttgcgtattgggcaccacagtggtttttcgtttcaccagtgagaacggcaacagctgactgctcccttaacggccgggccttgaaaaaagtgccaccaagcggtt

SEQ ID NO: 4821 - DNA, 696 bp, Glycine max
  unsure at all n locations
  Clone ID: LIB3028-049-Q1-B1-G4
ccgattgattaagtggcctatagaagagcaatgacgtcgcatgcacgcgtacgtaagctcggctggcgtttttccataggctccgcccccctgacgagcatcacaaaaatcgacgctcaagtcagaggtggcgaaacccgacaggactataaagataccaggcgtttccccctggaagctccctcgtgcgctctcctgttccgaccctgccgcttaccggatacctgtccgcctttctcccttcgggaagcgtggcgctttctcatagctcacgctgtaggtatctcagttcggtgtaagtcgttcgctccaagctgggctgtgtgcacgaaccccccgttcagcccgaccgctgcgccttatccggtaactatcgtcttgagtccaacccggtaagacacgacttatcgccactggcagcagccactggtaacaggattagcagagcgaggtatgtangcggtgctacagagttcttgaagtggtggcctaactacggctacactagaagaacagtatttggtatctgcgctctgctgaagccagttaccttcggaaaaagagttggtagctcttgaatcggcaaacaaaccacgctggtancggtggtttttttgtttgcaagcagcagattacgcgcagaanaaaaggatctcaagaagattctttgatcntttccacggggtctgacgctcn

SEQ ID NO: 4822 - DNA, 692 bp, Glycine max
  unsure at all n locations
  Clone ID: LIB3028-049-Q1-B1-G7
ggaatgatctaggggcactatagaagaatatgacgtcgcatgcacgcgtacgtaagctcggaattgactctcttccgggcgctatcatgccataccgcgaaaggttttgcgccattcgatggtgtcaacgtaaatgccgcttcgccttcgcgcgcgaattgcaagctctgcattaatgaatcggccaacgcgcggggagaggcggtttgcgtattgggcgctcttccgcttcctcgctcactgactcgctgcgctcggtcgttcggctgcggcgagcggtatcagctcactcaaaggcggtaatacggttatccacagaatcaggggataacgcaggaaagaacatgtgagcaaaaggccagcaaaaggccaggaaccgtaaaaaggccgcgttgctggcgtttttccataggctccgcccccctgacgagcatcacaaaaatcgacgctcaagtcagaggtggcgaaacccgacaggactataaagataccaggcgtttccccctggaagctccctcgtgcgctctcctgttccgaccctgccgcttaccggatacctgtccgcctttctcncttcgggaagcgtggcgctttctcatagctcacgctgtaggtatctcagttcggtgtaggtcgttcgctccaggctgggctgtgtgcacgaaacccccgttcagccccgacgctgcgct

SEQ ID NO: 4823 - DNA, 711 bp, Glycine max
  Clone ID: LIB3028-049-Q1-B1-H1
cgaatgtagtaggtcgactatagaaggtagtgacgtcggctgcacgcgtacgtaagctcggaattgagtcccatccgggctctatcatacgataccgacactggttttgcggcacttccaatgtcagtcacctgctcttcagagactctcttccacactcgtcaacttgcgcaggctgcattacagactctccgaagccaccttcacaggcagtctgctcactatgcgctcttaagagtctccgctcactgactcgctgcgcacggtacttacgctgcagcaaactctctggatccaatcttcggctctggaatcgcattgcacaccgtcaagggacacacgaggttctcacactgtatcaccctcgttacagaacgggcagaaccattcttgaggttcctccccaaagtgtatccagttatcccacacttgctactacaaaagatggctccaaactgaaggacactagtcagtggaacccgtaaggctactaagacaacaaggagtttccctcctgaaagcttcctgcagttgtctcacggttttcaaacatgcccgtacacttaaacatgtccgcctctgcacacttcgttgagctttgggcccttttaatcagggattccgatagcatttttgcaatcaatgttagccaatcaatgccaatggggtttttcataagatccccccgtttattctgtactaatgggattt

SEQ ID NO: 4824 - DNA, 498 bp, Glycine max
  Clone ID: LIB3028-049-Q1-B1-H10
cgcatgactttaggtgagcctatagaagccctatgacgtcgcatgcacgcgtacgtaagctcggattagtgcaggcagcttccacagcaatggcatcctggtcatccagcggatagttaatgatcagcccactgacccgttgcgcgagaagattgtgcaccgccgctttacaggcttcgacgccgcttcgttctaccatcgacaccaccacgctggcacccagttgatcggcgcgagatttaatcgccgcgacaatttgcgacggcgcgtgcagggccagactggaggtggcaacgccaatcagcaacgactgtttgcccgccagttgttgtgccacgcggttgggaatgtaattcagctccgccatcgccgcttccactttttcccgcgttttcgcagaaacgtggctggcctggttcaccacgcgggaaacggtcctgatagagacaccgggatactccggcaacatcgtataccgtaactggttgcacattcacc

SEQ ID NO: 4825 - DNA, 694 bp, Glycine max
  unsure at all n locations
  Clone ID: LIB3028-049-Q1-B1-H5
cgaattgatataggtgcactatagaagaatatgacgtcgcatgcacgcgtacgtaagctcggaattcggctcgagcaaaaatgcaatctatgtccctgacgctgagcaagaggctctccaattcaaagcctctcttcagaatctcttccaacctcgtcgctcacgcatcctccgccacaacctctccgccgccaccttcgccgccagtcccctctccatccgccctcaacagcctcctcaccgctccgtggtccgccactcagtcacgcggaatcacgctctctggatctgatgttcgagtcgggaatctcattggaaaccgaggacgcgctcacgaggttctcaaactgtatcgccctcttgaaggaacgggcaaagccactcttgaggttccgcctcaaagtgtagctggttatgccacagttgctactacagaggatggcgccgaaaggaaggaacgaaacagtggattgagtaaggcaacgaagacaaagagagagcagctcctaaaagctactgcagttgcctctcttcttcgaatatacccgaacacttattcattgctcttcgcaaatttctttgtgttctggcacttatatgcagggatcggagagattttggcagactatgttcaccatganatgagcagagaatttgtcatgatttctctcaggttgttcttgataatggcatt

SEQ ID NO: 4826 - DNA, 690 bp, Glycine max
  unsure at all n locations
  Clone ID: LIB3028-049-Q1-B1-H8
ctttaagtgcaatatanaagaaaatgacgtcgcatgcacgcgtacgtaagctcggaagggataacgcaggaaagaacatgtgagcaacatgccagcaaaaggccacgaaccgtaaaaaggccgcgttgctggcgtttttccataagctccgcccccctgacgagcatcagaagaatcgacgctcaagtcagaggtggcgaaacccgacaggactataaagataccaggcgtttccccctggaagctccctcgtgcgctcacctgttccgaccctgccgcttaccggatacctgtccgcctttctcacttcgggaagcgtggcgctttctcatagctcacgctgtatgtatctcagttcggtgtaagtcgttcgctccaagctgggctgtgtgcacgaaccccccgttcagcccgaccgctgcgccttatccggtaactatcgtcttgagtccaaaccggtaagacacgacttatcgccactggcatcagccactggtaacaggattagcagagcgaggtatgtaggcggtgctacagagttcttgaagtggtggcctaactacggctacactagaagaacagtacttggtatctgcgctctgctgaagccagttaccttcggaaaaagattggtagctcgtgattcggcaaacagaccaccgctggtagcggtggtttttttgtttgcan

SEQ ID NO: 4827 - DNA, 482 bp, Glycine max
  unsure at all n locations
  Clone ID: LIB3028-050-Q1-B1-A1
aggagttgaatttaggtggccctatagaagagatatgacgtcgcatgcacgcgtacgtaagctcggaagtcggctcgaggtcaattaattgataaaacatgggagagcttccatgatgtccaggtgaaggaccgcagtttaatctggaactccgacttgattgagactattgaattggaaaatcttttgataaatgcatgcatcacagtgtacgctgctgaagctaggagggagagtagaggagctcatgcccgtgaagacttcaggggtagagatgatgggaactggatgaaacacactgtgggattctggcagaacgagaaggtccaggtggactacaggccgggggagttggatggagtgggtgatgagggtgaatcaattcggtccaaggcgcggagggggggagagacgagggggagcggtgggttaagacttgtggcgtcagagttgagggggagggaggagatgggggaggggtn

SEQ ID NO: 4828 - DNA, 474 bp, Glycine max
  Clone ID: LIB3028-050-Q1-B1-B3
cgtgaattgaatttaggtgtgcctatgcaagacaatgacatcgcatgcacgcgtacgtaagctcggaattcggctcgagtatttttgtgccatgaaaatagcataaatttgtgtgtaaattatgtccatataaagtgttatacacttggaaattgacataatttacacacaaatttatgctatttttgtgccatgaaaaaagaagagaagaagggcggccgccgactagtgagctcgtcgacccgggaattaattccgggccggtacctgcaggcgtaccagctttccctatagtgagtcgtattagagcgtggggtaatcatgggcagagctgtgtgccgggtgagagtggtagccgctcagaattccacacaacaaagggagccggaggcataagtgggaaacccggggtgcgcagagagttagcgaagtcaagagaaagtcgaggggaggcagggggggcgttcgagcggg

SEQ ID NO: 4829 - DNA, 468 bp, Glycine max
  unsure at all n locations
  Clone ID: LIB3028-050-Q1-B1-B4
ggggaatgaattagttgcatatacaagacaatgacatcgcatgcacgcgtacgtaagctcggaattcggctcgaagttttgaattgcaacattgatgccagtttgaatattcttgagttttttcaagatcttttttgtatttcagattccatgttaaactggaagttgaggctgtcaaattttctaaatttttcttgtcaaaaaaaaaagaaagaagagaagagaaaaaaagggcggccgccgactaatgagctcgtcgacccgggaattaattccggaccggtacctgcaggcgtaccagctttccctatagtgagtcatattagagcttggcgtaatcatgggcatagctgtttcctgtgtgaaattgttatccgctcacaattccacagagcatacgagccggaagcataaagtgtaaaagctggggtgcctaatgagtgagctaactcacatttagttgcgttn

SEQ ID NO: 4830 - DNA, 476 bp, Glycine max
  Clone ID: LIB3028-050-Q1-B1-B6
tgggcggtgagattgaatgcgtggcactataaaagagatatgacgtcgcatgcacgcgtacgtaagctcgggcttcgccttcgcgcgcgaattgcaagctctgcattaatgaatcggccaacgcgcggggagaggcggtttgcgtattgggcgctcttccgcgtcctcgctcagtgactcgctgcgctcggtcgttcggctgcggggagcggtgtgagctcagtcagaggcggtaggacggttatccacaggatcgggggataacgcaggggggaacatgtgagcaggacgccaggagggggccaggaggcgtaggggggccgcgttgctggggtttgttcgagagggtgggcgcggctgacgagcgtcacgagcagcgaggctcatggtggtggtggggggaggcgagagggggataaggataccagggggtgtgcgcttggaaggtcccgggtgggcgggccgggggggggggg

SEQ ID NO: 4831 - DNA, 464 bp, Glycine max
  Clone ID: LIB3028-050-Q1-B1-B9
tgaatgaataggcctgacagaagagatataacgtcgcacgcacgcgtacgtaagctcgggtgtcaacgtaaatgccgcttcgccttcgcgcgcgaattgcaagctctgcattaatgaatcggccaacgcgcggggagaggcggtttgcgtattgggcgctcttccgcttcctcgctcactgactcgctgcgctcggtcgttcggctgcggcgagcggtatcagctcactcaaaggcggtaatacggttatccacagaatcaggggataacgcaggaaagaacatgtgagcaaaaggccagcaaaaggccatgaaccgtaaaaaggccgcgttgctggcgtttttccataggctccgcccccctgacgagcatcacacaaatcgacgctcaagtcagaggtggcgaaacccgacaggactataaagataccaggcgtttccccctggaagctctctcgtgcgctc

SEQ ID NO: 4832 - DNA, 475 bp, Glycine max
  Clone ID: LIB3028-050-Q1-B1-C1
cgggagttgaatttaggtgtgcactagacaagacaatgacatcgcatgcacgcgtacgtaagctcggaattccggaccggtacctgcaggcgtaccagctttccctatagtgagtcgtattagagcttggcgtaatcatggtcatagctgtttcctgtgtgaaattgttatccgctcacaattccacacaacatacgagccggaagcataaagtgtaaagcctggggtgcctaatgagtgagctaactcacattaagtgcgttgcgctcactgcgcgctttccagtcgggaaacctgtcgtgccagctgcattaatgagtcagccagcgcgcggggagaggcggtttgcgtagtgggcgccagggtgggttttcttttcagcagtgagacgggcaacaggggattggccttgcacgccgtggcctgaaaaaagtgcgagcagcgggttcaagccaggttggcccaaggaggggaa

SEQ ID NO: 4833 - DNA, 473 bp, Glycine max
  Clone ID: LIB3028-050-Q1-B1-C5
gggagggagtatgaatcaggtgacatataaaagagatatgacgtcgcatgcacgcgtacgtaagctcggcaattaatgatcaattggtcataataaaaataatgtatggcttctagctaagttattttttgagtggaaggcttctgcacttcattatatctattgttattgtgtaattcaactcggtaatgtgcacttcatatgtgcaaagtcccagacctctcgcttgtttggtttgggcaaaatgtcgtcaattctcattagatgttcggttttgagtctgttagagcatgttccatggaaattagttatgaaattcttaagttcaggagagggcgaggggggggaagaggggcggcggccgacgagtgagctcgtcgacccaggaatgagttcgggagcggtacggtgcagcgtaccagctttgcctagagtgagtgcgtgggagagcctgggggtatgcaggggcggag

SEQ ID NO: 4834 - DNA, 464 bp, Glycine max
  unsure at all n locations
  Clone ID: LIB3028-050-Q1-B1-C9
ngaatgaatcatgtggcagacagaagaaaatgacgtcgcacgcacgcgtacgtaagctcggaattcggctcgagttttagtttcactccgtaaaaaaaaaaaaaaagggcggccgccgactagtgagctcgtcgacccgggaattaattccggaccggtacctgcaggcgtaccagctttccctatagtgagtcgtattagagcttggcgtaatcatggtcatagctgtttcctgtgtgaaattgttatccgctcacaattccacacaacatacgagccggaagcataaagtgtaaagcctggggtgcctaatgagtgagctaactcacattaattgcgttgcgctcactgcccgctttccagtcgggaaacctgtcgtgccagctgcattaatgaatcggccaacgcgcggggagaggcggtttgcgtattgggcgccagggtggtttttcttttcaccagtg

SEQ ID NO: 4835 - DNA, 471 bp, Glycine max
  unsure at all n locations
  Clone ID: LIB3028-050-Q1-B1-D6
gggagagtagtatgaatgcgngtgcacataaaagagatatgacgtcgcatgcaggcgtacgtgagctcggaattcgggtcgagggcatttttaatacagggaaacacacgtgaagagctccctgaatttcttcttggaacttgccgccttaaagatcgggatgcctctaaagcagtttgtctgacgctgtgactttcaatgaagctgctgagaagtaggttgtggggaggacaagttcgaagttgcaaatgtggagaagtgagattttaggggtcttgggtcgacaaacgcactttcagatggcagagagtagggtggagggagggtgagggcgggaacggtggaggggggtgggagcgttgtgagagtggagggtgtggggggaggacggttggggaggagggaggggtggattggtttcattaggaggggagtgtggtggagggcgggggagtgggagaggggaggggg

SEQ ID NO: 4836 - DNA, 475 bp, Glycine max
  Clone ID: LIB3028-050-Q1-B1-D7
gggagggaagtatgaatcacgtggcatagaaaagagataggacgtcgcatgcacgcgtacgtaagctcgggccgactagtgagctcgtctacccgggaattaattccggaccggtacctgcaggcgtaccagctttccctatagtgagtcgtgggagagcttggggtaatcatggtcatagctgtttcctgtgtgggattgtgagccgctcacgattgcagagaggaggagagcgcggagcatagggtgtgagggggagggtgggtaaggagggagcggagtcggattaggtgggttgcgcgtagtgcgcgggggtcagtcggagggcggggcgggcgagggggtggagggaggcgggcgacgcggggggagagcggggttgcgtggtggaggcggggggggggtttggcggggaacggtgagaggcggaaggggcgatgggggtgggaggggggggggggtggcgggagggggg

SEQ ID NO: 4837 - DNA, 470 bp, Glycine max
  Clone ID: LIB3028-050-Q1-B1-D8
agggaggatgagttttgaattcggtgacctataaaagagatatgacgtcgcatgcacgcgtacgtgagctcggaattccggaccggtacctgcaggcgtaccagctttccctatagtgagtcgtattagagcttggcgtaatcatggtcatagctgtttcctgtgtgaaattgttatccgctcacaattccacacagcatacgagccggaagcataaagtgtaaagcctgaggtgccgaatgagtgagctaactcacattaattgcgttgcgctcactgcgcgctttccagtcgggaaacctgtcgtgccagaggcatgaatgaggcggggagcgcgcggggagaggcggggtgggtatggggcgccagagtgggttgtcttttcacgagtgggacgggcaagaggtggttgcccgtcagcgccgtggccggagaaaagtgcaggaagcgaggcagggggtgtgggcgag

SEQ ID NO: 4838 - DNA, 592 bp, Glycine max
  unsure at all n locations
  Clone ID: LIB3028-050-Q1-B1-F7
ggccgatacgtatgaatcccgtggcctagaatgacatagtcgtngaccgcgcatagctagactctgaattcggtgatccacatgaatcatgggatttctcaggacagaacatgtcagcatattgctaccaaacatgccacttacaccgctccaccaacgcctgccgtanagctggccgctttattccaatagagcatcacgcaccccgctgtctcaagcatgcagattgagctcgacggcagcaatgtctactaggtgggccgagagccctgctcgaggacctagcgatgcgaggccagcagcgcttgtcccnccgtgagacggcgccccgccggtaccgctcngcatggtatcccgataccgtgcccgcggtggcacgtgacgaccgcgctggagcccgatgccccggcgagcgcggcaatccgatgcgccgcacgttctgaacgngtctcaatgcatggtccngctatgccgcaactgtggggtggtgaggtcgagttcagccgcgcaatgcgtgaggcctgctggttgcgcgcagagantgcggctgtgcaggccgcgcaacgaggcgagcgtccgcgagtcggagtaa

SEQ ID NO: 4839 - DNA, 497 bp, Glycine max
  unsure at all n locations
  Clone ID: LIB3028-050-Q1-B1-G4
gcaggctgtggaaggggggtggtgcgcntggcggcttgagtcatgtgtcatatgcaagagatatgacatcgcatgcacgcgtacgtaagctcggaattcggctcgaagtgtttttcatttcatcgtgcattcaatggccaccacagcagctctatccggaaccatggtgagcacctccttcatgaggaggcaacctatgaccaccacaagcctaaagacattccccaacgttggtgaagctctttttggtctgaaaagtggacgaggtgctcgtgtcacttgcatggcctcgtacaaggtgaagctcataaccccaggaggagaagtggagtttgaatgcccagatgatgttttcagtgttgacaagggagaggacgaaggcattggacttccctactcgtgcagggccggttcctgcgtttccggtggtggaaagattgtcgaaggtaacgtggacaggtcagatgggagcttccttggtgaggagcaaggaggga

SEQ ID NO: 4840 - DNA, 493 bp, Glycine max
  unsure at all n locations
  Clone ID: LIB3028-050-Q1-B1-G7
gtgggggtnagagccttgaaagggcagtatgaatcacgtgacactataaaagagatatgacgtcgcacgcacgcgtacgtaagctcggaattcggctcgaggttgttttgggttaaaaaaaaaaaaaaaaaaaaaaaaaaaaaaaaaaaaaaaaaaaaaaagggcggccgccgactagtgagctcgtcgacccgggaattaattccggaccggtacctggaggcgtagcagctttccctagagggaatcagattagagcttggcgtaatcatgggcatagctgtttcctgtgtgaaattggttatccgctcacaattccacacaacatacgagccggaagcataaagtgtaaagcctggggtgcctaatgagtaagctaagtcacattaattgcgttgcgctcactgcccgcgttcaagtcgggaaaggtggcgtgccagctgcattagtgaaagggcaaagagagcgggaataagggggttgcgttatgggg

SEQ ID NO: 4841 - DNA, 470 bp, Glycine max
  Clone ID: LIB3028-050-Q1-B1-H12
aatgaattagcgtgacatataatatagtagatcggacggacgcgtacgtaagctcggaaaaaggccgcgttgctggcgtttttccataggctccgcccccctgacgagcatcacaaaaatcgacgctcaagtcagaggtggcgaaacccgacaggactataaagataccaggcgtttccccctggaagctccctcgtgcgctctcctgttccgaccctgccgcttaccggatacctgtccgcctttctcccttcgggaagcgtggcgctttctcatagctcacgctgtaggtatctcagttcggtgtaggtcgttcgctccaagctgggctgtgtgcacgaaccccccgttcagcccgaccgctgcgccttatccggtaactatcgtcttgagtccaacccggtaagacacgacttatcgccactggcagcagccactggtaacaggattagcagagcgaggtatgtatg

SEQ ID NO: 4842 - DNA, 505 bp, Glycine max
  unsure at all n locations
  Clone ID: LIB3028-050-Q1-B1-H2
gcggagaggggttgcgggtgntgctntncggggggttgagtttatgttgccctaggcaagagatatgacatcggatgcaggcgtaggtaagctcggaattgcaagctctgcattaatgaatcggccaacgcgcggggagaggcggtttgcgtattgggcgctcttccgcttcctcgctcactgactcgctgcgctcggtcgttcggctgcggcgagcggtatcagctcactgagaggcggtgatacggttatccacagagtcaggggatgaggcaggaaggaagatgtgagcgagggggcgggatgagggcaggaagcgtagagggggcgcgttgctggggtttttccagagggtccgcgggcctggggggcggggaggagggtgagcggtcaagtgagaggtggcgagggccgagagggcggtgggggtaggaggcgttgtggccctggaaagtcgcgggggggggtctcgtggtgcctaggtgggggggtgggggggaggggg

SEQ ID NO: 4843 - DNA, 504 bp, Glycine max
  unsure at all n locations
  Clone ID: LIB3028-050-Q1-B1-H6
ggcgagggtagcnctntnntggcaggattgagtttaggctgtccgtgacactagaaaanagatatgacgtcgcacgcaggcgtacgtgagctcggaattggccaacgcgcggggagaggcggtttgcgtattgggcgctcttccgcttcctcgctcactgactcgctgcgctcggtcgttcggctgcggcgagcggtatcagctcactcaaaggcggtgatacggttagccgcagagtcaggggagaacgcaggaaagaagatgtgagcaaaaggccaggagaaggccaggagccgtaaaaagggcgcgttgctggcgtttttccataagctcggccgccctgacgaggagcagaggagtcggggggtcaggtcagaggttgcgagacgcgagagggctatggggataccaggcgtttcgcccttggaagctcgctcgtgcgctgctcctgttccgaggcagggcgcttacggggtagctgggcgggcgtttgtgagggggggg

SEQ ID NO: 4844 - DNA, 475 bp, Glycine max
  Clone ID: LIB3028-050-Q1-B1-H8
agggagggcagtatgaatgccgtggcacataaaagaatatgacgtcgcactgcacgcgtacgtaagctcggaattgactctcttccgggcgctatcatgccataccgcgaaaggttttgcgccattcgatggtgtcaacgtaaatgccgcttcgccttcgcgcgcgaattgcaagctctgcattaatgaatcgggcaacgcgcggggagaggcggtttgcgtattgggcgctcttccgcttcctcgctcactgactcgctgcgctcggtcgttcggctgcggcgagcggtatcagctcactcaaagggggtaatacggttatccacagaatcaggggataacgcaggaaagaacatgtgagcaagaggccagcagaaggccaggaaccgtaaaaaggccgcgttgctggcgtttttccataagctccgcccccccggacgagcagcacagaaatcgagggtcaaagtgagggggg

SEQ ID NO: 4845 - DNA, 472 bp, Glycine max
  unsure at all n locations
  Clone ID: LIB3028-051-Q1-B1-A1
ngaatgaatcatgtggcgtatagaagagcactgacgtcggacgcacgcgtacgtaagctcggagaggcggtttgcgtattgggcgctcttccgcttcctcgctcactgactcgctgcgctcggtcgttcggctgcggcgagcggtatcagctcactcaaaggcggtaatacggttatccacagaatcaggggataacgcaggaaagaacatgtgagcaaaaggccagcaaaaggccaggaaccgtaaaaaggccgcgttgctggcgtttttccataggctccgcccccctgacgagcatcacaaaaatcgacgctcaagtcagaggtggcgaaacccgacaggactataaagataccaggcgtttccccctggaagctccctcgtgcgctctcctgttccgaccctgccgcttaccggatacctgtccgcctttctcccttcgggaagcgtggcgctttctcaaaactcaac

SEQ ID NO: 4846 - DNA, 490 bp, Glycine max
  unsure at all n locations
  Clone ID: LIB3028-051-Q1-B1-B11
gcctgcctctgtgtccaatgtcagagatagacgatggatgcacgcgtacgtaaactcggaattgactctcttccgggcgctatcatgccataccgcgaaaggttttgcgccattcgatggtgtcaacgtaaatgccgcttcgccttcgcgcgcgaattgcaagctctgcattaatgaatcggccaacgcgcggggagaggcggtttgcgtattgggcgctcttccgcttcctcgctcactgactcgctgcgctcggtcgttcggctgcggcgagcggtatcagctcactcaaaggcggtaatacggttatccacagaatcaggggataacgcaggaaagaacatgtgagcaaaaggccagcaaaaggccaggaaccgtaaaaaggccgcgttgctggcgtttttccataggctccgcccccctgacgagcatcacanaaatcgacgctcacgtcagaggtggcgannaccgacaggactataaagatacg

SEQ ID NO: 4847 - DNA, 490 bp, Glycine max
  Clone ID: LIB3028-051-Q1-B1-B12
gcctgcctccgtagtcgaatgtcagagacggacgacggacgcacgcgtacgtaaactcggaattgagtctcatctgggcgctatcatgccataccgcgaaaggttttgcgccattcgatggtgtcaacgtaaatgccgcttcgccttcgcgcgcgaattgcaagctctgcattaatgaatcggccaacgcgcggggagaggcggtttgcgtattgggcgctcttccgcttcctcgctcactgactcgctgcgctcggtcgttcggctgcggcgagcggtatcagctcactcaaaggcggtaatacggttatccacagaatcaggggataacgcaggaaagaacatgtgagcaaaaggccagcaaaaggccaggaaccgtaaaaaggccgcgttgctggcgtttttccataggctccgcccccctgacgagcatcacaaaaatcgacgctcaagtcagaggtggcgaaacccgacaggactataaagatac

SEQ ID NO: 4848 - DNA, 493 bp, Glycine max
  Clone ID: LIB3028-051-Q1-B1-C10
cgaatgacttcggtggtcatatggcagacaatgacgtcgcatgcacgcgtacgtaagctcggaattatgccagccagccagacgcagacgcgccgagacagaacttaatgggcccgctaacagcgcgatttgctggtgacccaatgcgaccagatgctccacgcccagtcgcgtaccgtcttcatgggagaaaataatactgttgatgggtgtctggtcagagacatcaagaaataacgccggaacattagtgcaggcagcttccagagcaatggcatcctggtcatccagcggatagttaatgatcagcccactgacccgttgcgcgagaagattgtgcaccgccgctttacaggcttcgacgccgcttcgttctaccatcgacaccagcacgctggcacccagttgatcggcgcgagatttaatcgccgcgacaatttgcgacggcgcgtgcacggccagactggaggtggcaacggcaatcagcaacgac

SEQ ID NO: 4849 - DNA, 488 bp, Glycine max
  Clone ID: LIB3028-051-Q1-B1-C9
cctgactaatgtctcctatagcagacaatgacgacgcatgcacgcgtacgtaagctcggaattccgctcgaaggcggctctcagaaaagccgtgttctttgtaatcgctcaatgcttcaccttttccgcatatgctgcaaggtttgaaatcacaaaccgatgcacatacactgtctgggctgcgtctgtgcctgttggcggtggcgtgcaattaaacccgggccagtcatggtccgtggacgtgcctgcaggaacgaaaggggcccgcgtttgggcccgaaccggctgcaacttcgacggttcgggccgcggtggatgccagaccggtgactgccggggtgtcctcgactgcaaagcttacggtgcgcctcccaacaccctggctgaatacggcctgaacgggttcaacaatttggacttcttcgacatctccctcgtcgacggttttaacgtgcccatggactttagtccaacctccaatggatgca

SEQ ID NO: 4850 - DNA, 492 bp, Glycine max
  Clone ID: LIB3028-051-Q1-B1-D12
cgcctgcacttcggtggcatatagcagagatgtgacgacggatgcacgcgtacgtaaactcggaattcggctcgaggtttttgtttctgtcaaaaaaataatagaaaaagaaaaagggcggccgccgactagtgagctcgtcgacccgggaattaattccggaccggtacctgcaggcgtaccagctttccctatagtgagtcgtattagagcttggcgtaatcatgggcatagctgtttccagtgtgaaattgttatccgctcacaattccacacaacatacgagccggaagcataaagtgtaaagcctggggtgcctaatgagtgagctaactcacattaattgcgttgcgctcactgcccgctttccagtcgggaaacctgtcgtgccagctgcattaatgaatcggtcaacgcgcggggagatgcggtttgcgtattgggcgccagcgtgcgttttcctttcaccagtgacacgggcaacagttgatt

SEQ ID NO: 4851 - DNA, 461 bp, Glycine max
  Clone ID: LIB3028-051-Q1-B1-D4
cgaatgaattacgtgcactatagacgacaatgacgtcgcatgcacgcgtacgtaagctcgggccgactagtgagctcgtcgacccgggaattaattccggaccggtacctgcaggcgtaccagctttccctatagtgagtcgtattagagcttggcgtaatcatggtcatagctgtttcctgtgtgaaattgttatccgctcacaattccacacaacatacgagccggaagcataaagtgtaaagcctggggtgcctaatgagtgagctaactcacattaattgcgttgcgctcactgcccgctttccagtcgggaaacctgtcgtgccagctgcattaatgaatcggccaacgcgcggggagaggcggtttgcgtattgggcgccagggtggtttttcttttcaccagtgagacgggcaacagctgattgcccttcaacgcctggccctgaaagaattgc

SEQ ID NO: 4852 - DNA, 490 bp, Glycine max
  unsure at all n locations
  Clone ID: LIB3028-051-Q1-B1-D9
cctgcctacngtctcttatgtcagagaatgacgacgcatgcacgcgtacgtaagctcggcattcgatggtgtcaacgtaaatgccgcttcgccttcgcgcgcgaattgcaagctctgcattaatgaatcggccaacgcgcggggagaggcggtttgcgtattgggcgctcttccgcttcctcgctcactgactcgctgcgctcggtcgttcggctgcggcgagcggtatcagctcactcaaaggcggtaatacggttatccacagaatcaggggataacgcaggaaagaacatgtgagcaaaaggccagcaaaaggccaggaaccgtaaaaaggccgcgttgctggcgtttttccataggctccgcccccctgacgagcatcacaaaaatcgacgctcaagtcagaggtggcgaaacccgacaggactataaagataccaggcgttttccccctggaagctctctcgtgggctctcctggttcgaacctg

SEQ ID NO: 4853 - DNA, 463 bp, Glycine max
  unsure at all n locations
  Clone ID: LIB3028-051-Q1-B1-F1
tgaatgaatcaggtggcttatagacgataatgacgtaggatgcacgcgtacgtaaactcggcgcagaaacgtggctggcctggttcaccacgcgggaaacggtctgataagagacaccggcatactctgcgacatcgtataacgttactggtttcacattcaccaccctgaattgactctcttccgggcgctatcatgccataccgcgaaaggttttgcgccattcgatggtgtcaacgtaaatgccgcttcgccttcgcgcgcgaattgcaagctctgcattaatgaatcgaccaacgcgcggggagaggcggtttgcgtattgggcgctcttccgcttcctcgctcactgactcgctgcgctcggtcgttcggctgcggcgagcggtatcagctcactcaaaggcggtaatacggttatccacagaatcangggataacgcaggaaagaacatgtgagcan

SEQ ID NO: 4854 - DNA, 486 bp, Glycine max
  Clone ID: LIB3028-051-Q1-B1-F10
gcctgcctcggtcgtctatagcggagaaggacgtaggatgcacgcgtacgtaaactcggaaccgtaaaaaagccgcgttgctggcgtttttccataggctccgcccccctgacgagcatcacaaaaatcgacgctcaagtcagaggtggcgaaacccgacaggactactaagataccaggcgtttccccctggaaactccctcgtgcgctctcctgttccgaccctgccgcttaccggatacctgtccgcctttctcccttcgggaagcgtggcgctttctcatagctcacgctgtatgtatctcagttcggtgtacgtcgttcgctccaaactgggctgtgtgcacgaaacccccgttcagcccgaccgctgcgccctatccgggtaacatcgtcctgagtccaaccgggtaagaaggacctatcccaatgggaacagccccgggtacacgagtttccaaacccagttgttgggggggcacaaag

SEQ ID NO: 4855 - DNA, 467 bp, Glycine max
  Clone ID: LIB3028-051-Q1-B1-F3
cgaaatgaatgtacgtgacactatagacgacaatgacgtcgcatgcacgcgtacgttagctcggaattcggctcgaagaaaaacaaaagagtagtggcctttaagtggtgaagaacaagagctcaaatcaaatcgaatcgaaaaaagaaagaaagatcatattcatggcgatggcaagcctggctcgacggaagggttacgccgtcgttttgtcgtcgaggtcgtcgttttgtctgacaagctggaggggattcgcgtccggatctgacgaaaacgacgtcgtcgtcatcggcggcggtcccggcggctacgtggccgccatcaaagccgcgcagctcggtctgaaaaccacttgcatcgaaaagcgtggcactctcggcggtacctgcctcaacgtcggatgcatcccttccaaggcacttctgcattcttcccacatgtatcatgaggctaaacatgcatttgcc

SEQ ID NO: 4856 - DNA, 478 bp, Glycine max
  unsure at all n locations
  Clone ID: LIB3028-051-Q1-B1-G3
aggttggatggggctcgcgaatgaattagtggcctatagccgacaatgacgtagcatgcacgcgtacgttaactcgggattcggctcgagccgagttcaaccattaacaagagctaattatcttgcttctcctcctcttgttgttgcctatgcccttgctggcacagtggacattgactttgacactgaacccattgggatagggaaggatggcacaaagatcttcttcagggatatttggccatccagtgaagaaatagcaaatgttgtacaatcaagtgtgctgcctgctatgtttagggacacatataatgcgatcacccaagggaatcccatgtggaataatttatctgttccaactggcactctttatgcttgggaccctacatcaacttatattcatgagccaccttattttagagatatgagcatgtctcccccaggctctcatggagtgaaagatgcttactgtttgctn

SEQ ID NO: 4857 - DNA, 496 bp, Glycine max
  Clone ID: LIB3028-051-Q1-B1-H11
gcccccccccgaccgcctaacgcgtcaacagcagagatggagctaggtcgacgcctacgtaaactcggaattcggctcgaggaacacctactaataagtaacaatccaataattgtctttctcatgcctaaaaataccctttggatacgcattgtgtatatttttcgttgctacatttgcaacattactaggagagttaactagggcctttacatattgtcggcaaggtgattagcttgcacagagaaataagttttgttttgtttgaatacgaattcacacaattcttgtattttatgaattatcataattccaattctttaacttttttttaagagacaactaccacaaaagggcggccgccgactagtgagctcgtcgacccgggaattaattccggaccggtacctgcaggcgtaccagctttccctatagtgagtcgtattagagcttggcgtaatcatggtcataactgtttccggtgtgaaattgttat

SEQ ID NO: 4858 - DNA, 458 bp, Glycine max
  Clone ID: LIB3028-051-Q1-B1-H5
ttaatgagtaaggtggcatatagaagatagtgacgtcggacgcacgcgtacgtaagctcggaatcaggggataacgcaggaaagaacatgtgagcaaaaggccagcaaaaggccaggaaccgtaaaaaggccgcgttgctggcgtttttccataggctccgcccccctgacgagcatcacaaaaatcgacgctcaagtcagaggtggcgaaacccgacaggactataaagataccaggcgtttccccctggaagctccctcgtgcgctctcctgttccgaccctgccgcttaccggatacctgtccgcctttctcccttcgggaagcgtggcgctttctcatagctcacgctgtaggtatctcagttcggtgtaggtcgttcgctccaagctgggctgtgtgcacgaaccccccgttcagcccgaccgctgcgccttatccggttactaacctcctgg

SEQ ID NO: 4859 - DNA, 524 bp, Glycine max
  Clone ID: LIB3028-052-Q1-B1-A12
ttcagacgcctatttctgagccactagtacgctaacgacatcggacgcaaacgtaggtgaagtcggcattcggctcgagcacacatcttatgaccactactgtcttctctactctatccatatcgttgtgatcttctctatggtctttcacattaattgcgtggtgcgcgggctagtctcacgcttatcatttatcctactgtattcgtcggtgctctgacagttcttttctactctgttgcggaggagctcttgctagcagacttcatgtcttccttcgttttcactcgcatatgtatttgcgtctctcttcctcttgcttccgtgtcgcgtgatcttgcgcacttatccttcttgttgtacgttgtatttcgtttctcattcttgccttttctccccatctatccctcggttgatccgtgtgtcgttgccttgtagttctctgaattgtctgcgagacgtttgttcgatgtcgtccatctacttacgcgccatcttcggttcgatttctcgactctcgtctg

SEQ ID NO: 4860 - DNA, 501 bp, Glycine max
  Clone ID: LIB3028-052-Q1-B1-B10
gcgccggcccctcgacggcctaccgtggtcaatagaagagagtgacgtcggatgcacgcgtacgtaaactcggcagcaaaaggccaggaaccgtaaaaaggccgcgttgctggcgtttttccataggctccgcccccctgacgagcatcacaaaaatcgacgctcaagtcagaggtggcgaaacccgacaggactataaagataccaggcgtttccccctggaagctccctcgtgcgctctcctgttccgaccctgccgcttaccggatacctgtccgcctttctcccttcgggaagcgtggcgctttctcatagctcacgctgtaggtatctcagttcggtgtaggtcgttcgctccaagctgggctgtgtgcacgaaccccccgttcagcccgaccgctgcgccttatccggtaactatcgtcttgagtccaacccggtaagacacgacttatcgccaatgggcaccagccactggtaccaggattagcagagcgaggg

SEQ ID NO: 4861 - DNA, 486 bp, Glycine max
  unsure at all n locations
  Clone ID: LIB3028-052-Q1-B1-B11
ttcgaatccctccgtggtcaatagaagagaatgacgtcggatgcacgcgtacgtaagctcggaattgactctcttccgggcgctatcatgccataccgcgaaaggttttgcgccattcgatggtgtcaacgtaaatgccgcttcgccttcgcgcgcgaattgcaagctctgcattaatgaatcggccaacgcgcggggagaggcggtttgcgtattgggcgctcttccgcttcctcgctcactgactcgctgcgctcggtcgttcggctgcggcgagcggtatcagctcactcaaaggcggtaatacggttatccacagaatcaggggataacgcaggaaagaacatgtgagcaaaaggccagcaaaaggccaggaaccgtaaaaaggccgcgttgctggcgtttttccataggctccgcccccctgacgagcatcacaaaaatcgacgctcaagtcaaaggtggcgaaaccgacaggactataan

SEQ ID NO: 4862 - DNA, 496 bp, Glycine max
  unsure at all n locations
  Clone ID: LIB3028-052-Q1-B1-E12
cctacgaaggcttcangtgtcaatagaagagaatgacgtcggatgcacgcgtacgtaaactcggaattgcaagctctgcattaatgaatcggccaacgcgcggggagaggcggtttgcgtattgggcgctcttccgcttcctcgctcactgactcgctgcgctcggtcgttcggctgcggcgagcggtatcagctcactcaaaggcggtaatacggttatccacagaatcaggggataacgcaggaaagaacatgtgagcaaaaggccagcaaaaggccaggaaccgtaaaaaggccgcgttgctggcgtttttccataggctccgcccccctgacgagcatcacaaaaatcgacgctcaagtcagaggtggcgaaacccgacaggactataaagataccaggcgtttccccctggaagctccctcgtgcgctctcctgttccgaacctgccgcctaacgggatactggtccccctttctcccttcgggaagcttg

SEQ ID NO: 4863 - DNA, 487 bp, Glycine max
  Clone ID: LIB3028-052-Q1-B1-F11
ttcgaaggcctcacgtgccaatagaagacaatgacgtcgcatgcacgcgtacgtaagctcggctcggtaatggcgcgcattgcgcccagcgccatctgatcgttggcaaccagcatcgcagtgggaacgatgccctcattcagcatttgcatggtttgttgaaaaccggacatggcactccagtcgccttcccgttccgctatcggctgaatttgattgcgagtgagatatttatgccagccagccagacgcagacgcgccgagacagaacttaatgggcccgctaacagcgcgatttgctggtgacccaatgcgaccagatgctccacgcccagtcgcgtaccgtcttcatgggagaaaataatactgttgatgggtgtctggtcagagacatcaagaaataacgccggaacattagtgcaggcagcttccacagcaatggcatcctggtccaccaaccgaaaagttacggatcagcgcactgacc

SEQ ID NO: 4864 - DNA, 490 bp, Glycine max
  Clone ID: LIB3028-052-Q1-B1-G11
ttcgaatgcctcaggtgatcaatagaagagaatgacgtcggatgcacgcgtacgtaagctcggaatcggccaacgcgcggggagaggcggtttgcgtattgggcgctcttccgcttcctcgctcactgactcgctgcgctcggtcgttcggctgcggcgagcggtatcagctcactcaaaggcggtaatacggttatccacagaatcaggggataacgcaggaaagaacatgtgagcaaaaggccagcaaaaggccaggaaccgtaaaaaggccgcgttgctggcgtttttccataggctccgcccccctgacgagcatcacaaaaatcgacgctcaagtcagaggtggcgaaacccgacaggactataaagataccaggcgtttccccctggaagctccctcgtgcgctctcctgttccgaccctgccgcttaccggatacctgtccgcctttccccctttcggaaaccttggcgctttctcatagctc

SEQ ID NO: 4865 - DNA, 495 bp, Glycine max
  Clone ID: LIB3028-052-Q1-B1-H11
acctgcggaatgcactcaggtggtcatatagaagagaatgacgtcgcatgcacgcgtacgtaagctcggaatttgcgacggcgcgtgcagggccagactggaggtggcaacgccaatcagcaacgactgtttgcccgccagttgttgtgccacgcggttgggaatgtaattcagctccgccatcgccgcttccactttttcccgcgttttcgcagaaacgtggctggcctggttcaccacgcgggaaacggtctgataagagacaccggcatactctgcgacatcgtataacgttactggtttcacattcaccaccctgaattgactctcttccgggcgctatcatgccataccgcgaaaggttttgcgccattcgatggtgtcaacgtaaatgccgcttcgccttcgcgcgcgaattgcaagctccgcattaatgaatcggccaacgcgcggggagaggcggtttgcctaattggccgcccttccgcttcctcg

SEQ ID NO: 4866 - DNA, 476 bp, Glycine max
  Clone ID: LIB3028-052-Q1-B2-A7
ttccactgccgtggcactataaaagagagtgacgtcggacccacgcgtacgtaaactcggaatttgattgcgagtgagatatttatgccagccagccagacgcagacgcgccgagacagaacttaatgggcccgctaacagcgcgatttgctggtgacccaatgcgaccagatgctccacgcccagtcgcgtaccgtcttcatgggagaaaataatactgttgatgggtgtctggtcagagacatcaagaaataacgccggaacattagtgcaggcagcttccagagcaatggcatcctggtcatccagcggatagttaatgatcagcccactgacccgttgcgcgagaagattgtgcaccgccgctttacaggcttcgacgccgcttcgttctaccatcgacaccaccacgctgggcaccagttgatcggcgcgagatttaatcgccgcgaccatttgcgacagcgcgtgcaagg

SEQ ID NO: 4867 - DNA, 493 bp, Glycine max
  Clone ID: LIB3028-052-Q1-B2-B11
ttgactgccgtggcactatataagataatgacgtcggacgcacgcgtacgtaaactcggaattgactctcttccgggcgctatcatgccataccgcgaaaggttttgcgccattcgatggtgtcaacgtaaatgccgcttcgccttcgcgcgcgaattgcaagctctgcattaatgaatcggccaacgcccggggagaggcggtttgcgtagtgggcgctcttccgcttcctcgctcactgactcgctgcgctcggtcgttcggctgcggcgagcggtatcagctcactcaaaagcggtaatacggttatccacagaatcaggggataacgcagggaaagaacatgtgagccaaaaggccagcaaaagggccacggagcctgtaaaaaagggccccgtttctgggcggtttttccaaaaggcgcccggcccccccgggacgggccattcgcacaagaatgtcgacggctccaacgatcacgaagggtgggggc

SEQ ID NO: 4868 - DNA, 471 bp, Glycine max
  Clone ID: LIB3028-052-Q1-B2-C7
ttgactgccgtggcctataaaagagatatgacgtcggatgcacgcgtacgtaaactcgggagatcgtataacgttactggtttcacattcaccaccctgaattgactctcttccgggcgctatcatgccataccgcgaaaggttttgcgccattcgatggtgtcaacgtaaatgccgcttcgccttcgcgcgcgaattgcaagctctgcattaatgaatcggccaacgcgcggggagaggcggtttgcgtattgggcgctcttccgcttcctcgctcactgactcgctgcgctcggtcgttcggctgcggcgagcggtatcagctcactcaaaggcggtaatacggttatccacagaatcaggggataacgcaggaaagaacatgtgagcaaaaggccagcaaaaggccaggaaccgtaaaaaggccgcgttgctggcgtttttcatagggtccgcccccctgacgagcag

SEQ ID NO: 4869 - DNA, 479 bp, Glycine max
  unsure at all n locations
  Clone ID: LIB3028-052-Q1-B2-C8
ttcactcgcgtgcctatagaagagcaatgacgtcggatgcacgcgtacgtaaactcgggattgactctcttccgggcgctatcatgccataccgcgaaaggttttgcgccattcgatggtgtcaacgtaaatgccgcttcgccttcgcgcgcgaattgcaagctctgcattaatgaatcggccaacgcgcggggagaggcggtttgcgtattgggcgctcttccgcttcctcgctcactgactcgctgcgctcggtcgttcggctgcggcgagcggtatcagctcactcaaaggcggtaatacggttatccacagaatcaggggataacgcaggaaagaacatgtgagccaaaggccagcaaaagggcaggaagcgtaaaaaaggcgcgttgctgggctttttccataagcgccgccccccctgacgagcattacaaaaaatcgaagctcaagttcaaaggtggcgaaaacccgataan

SEQ ID NO: 4870 - DNA, 469 bp, Glycine max
  Clone ID: LIB3028-052-Q1-B2-D1
catcggctgcatagccaagagagtgacatcggatgcacgcgtacgtaaactcgggtaaaaaggccgcgttgctggcgtttttccataggctccgcccccctgacgagcatcacaaaaatcgacgctcaagtcagaggtggcgaaacccgacaggactataaagataccaggcgtttccccctggaagctccctcgtgcgctctcctgttccgaccctgccgcttaccggatacctgtccgcctttctcccttcgggaagcgtggcgctttctcataactcacgctgtaggtatctcagttcggtgtaggtcgttcgctccaagctgggctgtgtgcacgaaccccccgttcagcccgaccgctgcgccttatccggtaactatcgtcttgagtcaacccggtaagacacgacttatcgccactgggagcatccacgggtaacacgattagcacagcgaggtattttggg

SEQ ID NO: 4871 - DNA, 473 bp, Glycine max
  Clone ID: LIB3028-052-Q1-B2-D7
ttgactaccgtgtcctatagaagagaatgacgtcggatgcacgcgtacgtaagctcggaattcggctcgagtgaagatagagaatgtcaattgttccctgtaacagtaaacctgtatgccatgtaagctagatgaagatagagaatgtcaattgttccctgtagtagcaaactagcaatcttttgcattcttttaagaaaactattatcaggatgagttgggacattgtttaggatgtaattgatttgatgcatttggattatatagatattgtttggatccttgtcaaagaagaaaaagaagaagagaacaaaaagcaaagggcggccgccgactagtgagctcgtcgacccgggaattaattccggaccggtacctgcaggcgtaccagctttccctatattgagtcgtagtagagcttggcgtaatcatggtcataactggttcctggtgtgaaattgttatccgctcag

SEQ ID NO: 4872 - DNA, 463 bp, Glycine max
  Clone ID: LIB3028-052-Q1-B2-E11
ttgaattgacgtggacactatagaagataatgacgtcgcacgcacgcgtacgtaaactcggaattcggctcgaggttcccagcttcctccttctgttatcaattaatttaattaactttattcgcaccttgctaaattcttaagcttaggctggtgaatttccttttgttcagttatagaaagagaagggaaatatgatttgactcctgagaaacaggggttgtaccggatcaagaaaaatgttttgaaatcgggtgggtgttgtgtctaaatggctatagcagctgatattatttattaacataccatttctgctgttgagggtagttgatgaatgaaaaagaagaaaaaagggcgggcgccgactagttagctcgtcgacccgggaattaattccgggccggtgactggaagggttacaactttccctaaagtgagtcatagtaaaacatggggtaatcag

SEQ ID NO: 4873 - DNA, 456 bp, Glycine max
  Clone ID: LIB3028-052-Q1-B2-E12
ttgcattgcgtggcatatataagataatgacgtcggatgcacgcgtacgtaagctcggaattgcaagctctgcattaatgaatcggccaacgcgcggggagaggcggtttgcgtattgggcgctcttccgcttcctcgctcactgactcgctgcgctcggtcgttcggctgcggcgagcggtatcagctcactcaaaggcggtaatacggttatccacagaatcaggggataacgcaggaaagaacatgtgagcaaaaggccagcaaaaggccaggaaccgtaaaaaggccgcgttgctggcgtttttccataggctccgcccccctgacgagcatcacaaaaatcgacgctcaagtcagaggtggcgaaacccgacaggactataaagataccaggcgtttccccctggaagctccctcgtgcgctctcctgtttcgaccctgccgcctacggag

SEQ ID NO: 4874 - DNA, 474 bp, Glycine max
  Clone ID: LIB3028-052-Q1-B2-F1
aatacggttgcctagcgaagagagtgacatcggatgcacgcgtacgtaaactcggcttcatgggagaaaataatactgttgatgggtgtctggtcagagacatcaagaaataacgccggaacattagtgcaggcagcttccacagcaatggcatcctggtcatccagcggatagttaatgatcagcccactgacccgttgcgcgagaagattgtgcaccgccgctttacaggcttcgacgccgcttcgttctaccatcgacaccaccacgctggcacccagttgatcggcgcgagatttaatcgccgcgacaatttgcgacggcgcgtgcagggccagactggaggtggcaacgccaatcagcaacgactgtttgcccgccagttgttgtgccacgcggttgggaatgtaattcagctccgccatcgccgcttccactttttcgcgcgttttcgcagaaacgtggctggcctgg

SEQ ID NO: 4875 - DNA, 459 bp, Glycine max
  Clone ID: LIB3028-052-Q1-B2-F11
ttgaattgacgtggcactatataagagttatgacgtcggacgcacgcgtacgtaaactcggctcggtaatggcgcgcattgcgcccagcgccatctgatcgttggcaaccagcatcgcagtgggaacgatgccctcattcagcatttgcatggtttgttgaaaaccggacatggcactccagtcgccttcccgttccgctatcggctgaatttgattgcgagtgagatatttatgccagccagccagacgcagacgcgccgagacagaacttaatgggcccgctaacagcgcgatttgctggtgacccagtgcgaccagatgctccacgcccagtcgcgtaccgtcttcatgggagaaaataatactgttgatgggtgtctggtcagagacatcaggaaataacgccggaacattactgcatgcagcttccacatcaatggcatctggtcatccaccgg

SEQ ID NO: 4876 - DNA, 477 bp, Glycine max
  Clone ID: LIB3028-052-Q1-B2-F3
cactacagttgcctagcgaagagcaatgacatcggatgcacgcgtacgtaaactcggctctgcattaatgaatcggccaacgcgcggggagaggcggtttgcgtattgggcgctcttccgcttcctcgctcactgactcgctgcgctcggtcgttcggctgcggcgagcggtatcagctcactcaaaggcggtaatacggttatccacagaatcaggggataacgcaggaaagaacatgtgagcaaaaggccagcaaaaggccaggaaccgtaaaaaggccgcgttgctggcgtttttccataggctccgcccccctgacgagcatcacaaaaatcgacgctcaagtcagaggtggcgaaacccgacaggactataacgataccaggcgtttccccctggaagctccctcgtgcgctctcctgttccgaccctgccgctttacggatacctgtccgcctttctcccttcgggaaacg

SEQ ID NO: 4877 - DNA, 460 bp, Glycine max
  Clone ID: LIB3028-052-Q1-B2-G11
atcaattgcgtggccctatataagataatgacgtcgcatgcacgcgtacgtaaactcggaatcggccaacgcgcggggagaggcggtttgcgtattgggcgctcttccgcttcctcgctcactgactcgctgcgctcggtcgttcggctgcggcgagcggtatcagctcactcaaaggcggtaatacggttatccacagaatcaggggataacgcaggaaagaacatgtgagcaaaaggccagcaaaaggccaggaaccgtaaaaaggccgcgttgctggcgtttttccataggctccgcccccctgacgagcatcacaaaaatcgacgctcaagtcagaggtggcgaaacccgacaggactataaagataccaggcgtttccccctggaagctccctcgtgcgctctcctgttccgaccctgccgcttaccggatacctgtccgcctttcttccttcgg

SEQ ID NO: 4878 - DNA, 475 bp, Glycine max
  Clone ID: LIB3028-052-Q1-B2-G5
ttgcactgccgtgcctatagaagagatatgacgtcggatgcacgcgtacgtaaactcggtattcggctcgagacctcatgttcttagagcatcacatatagaccaccaagtgggatcagcaccagttgttacagcctcaccctgggatagacaacattctttcttgggagagtcacctgatgcttctggttttagattgggttctgttggaagtccaggctttaatggtagctggcagttgcatcctcctgcttctcacaatatgtttcctcatgttggtgggaatggtacagaattgacgtcaaatgctgggcagggctctcctaagcagttgtcacatgttttccctgggaaacttcccatgactttggtttctaaatttgatacgaccaatgaacgactgagaaacctctattcccgtagaagtgaaccaaacactaagaagaatgctgataacacatactatgaacgtgag

SEQ ID NO: 4879 - DNA, 498 bp, Glycine max
  Clone ID: LIB3028-052-Q1-B2-G8
tactgacgtcggtggtcacagagaagagaatagacgtcgcatgcacgcgtacgtaaactcggaattcggctcgagaaaaaaaaaaaaaaaaaaaacaaaaaaaaaaaagggcggccgccgactagtgagctcgtcgacccgggaattaattccggaccggtacctgcaggcgtaccaactttccctaaaaggagtcgtattaaaacttggcgtaatcatgggcaaaactgtttcccgggtgaaattggtatccgctcacaatttcaacacaaatacaaaccgggaacataaagttgtaagcctgggggtgccaaatgaattgaccaactccacataaattgccgttgcgcctaaaggcccgctttttcaagtcgggaaaaactggtcgtggcaagcgggcactaaataaatctggcaaagcccccgggaggaaagggggtttatcgctaatggggcccccacggggggggtttttccgttttcaccaaagtaaagatg

SEQ ID NO: 4880 - DNA, 460 bp, Glycine max
  unsure at all n locations
  Clone ID: LIB3028-052-Q1-B2-H11
ctccaattgtcgngcatatagaagacatatgaggccgcatgcacgcgtaagtaagctcggaatttgcgacggcgcgtgcagggccagactggaggtggcaacgccaatcagcaacgactgtttgcccgccagttgttgtgccacgcggttgggaatgtaattcagctccgccatcgccgcttccactttttcccgcgttttcgcagaaacgtggctggcctggttcaccacgcgggaaacggtctgataagagacaccggcatactctgcgacatcgtataacgttactggtttcacattcaccaccctgaattgactctcttccgggcgctatcatgccataccgcgaaaggttttgcgccattcgatggtgtcaacgtaaatgccgcttcgccttcgcgcgcgaattgcaagctccgcattaatgaatcggccaacgcgcggggagaggcggtttgcg

SEQ ID NO: 4881 - DNA, 471 bp, Glycine max
  Clone ID: LIB3028-052-Q1-B2-H2
actcggttgcagagtcagagactgacatcggatgcacgcgtacgtaaactcggctcttccgggcgctatcatgccataccgcgaaaggttttgcgccattcgatggtgtcaacgtaaatgccgcttcgccttcgcgcgcgaattgcaagctctgcattaatgaatcggccaacgcgcggggagaggcggtttgcgtattgggcgctcttccgcttcctcgctcactgactcgctgcgctcggtcgttcggctgcggcgagcggtatcagctcactcaaaggcggtaatacggttatccacagaatcaggggataacgcaagaaagaacatgtgagccaaacggcagcaaaagggcaagaaaccggaaaagggcccctttccggcctttttccacaagggccggcccccctaaacaacactccccttttctgacctccaattttgaagtggggaaaacccagtgggtttttt

SEQ ID NO: 4882 - DNA, 1118 bp, Glycine max
  unsure at all n locations
  Clone ID: LIB3028-053-Q1-B1-A1
attttgctttaagcngcnctcggtaccggcatntccgtnganctgtatnngtantcancgtnngaaaattggaacngtcngctganncgtgctntaacttnggtnataccagntncanatgnccnntgacgacctcgactgncgnatttgntaagcnngcatanctngcncgaccgnagtatngtagctgnctagtacgctaccgtgctagtcgtnctgacnatactaactnattgncatgctgacgtngcngatngcgactgngcnatgatgangtngtgggtcgtagctgcgactcanctangctagcagcgacactactgcttanctcgtatggtactgcagtagcaactgatcgacgacgagctatccancgactacagcttgctgactagctgctacatgtngcacgaagctagnatctgtcgctacgagctatcacgtgcgtacgctgcngactgagcgacgctacgactacgctactagctcgtactgctgcctctgcacagctgacgcagtgcacgtagactgagtcgctatcgactacgtntgactgcgcatgcagctctacgagtcgcncgagatatcgctgcgcgcgacattacctacgtcgtagtatggatacacgatgctgacgcgatgtgctggttacacatcgagagatgtgcgtccgaggcncgctgagtgtacatcatctactcgggatgtctcatctgcgctacgagctgtctaatatcggtgtacgatctctcgcgatgctagcgtacgtcgtgcacgctactggatgcggctactgcctctctagaagctcgctgtagcgcgctgtagagcactgtcgaggctgcgatgtcgcacacgctgtggtgccagctgagtcgtactcgcgcgcaagtagacactgcgtgcatgatatgatgccagtcgtgcgcggcatgctgtctgcgcgctgcgtcgatcagatngcatctgacgacacagcagatcgagactaagctcacactctacacatcgcgatatcgtagatcgagctgcgtggctgcacgctagatgtcgctatcgtatcgcgcagtgacacgactgtgcagcggtatgatacataccggtggagatgtgttgtt

SEQ ID NO: 4883 - DNA, 477 bp, Glycine max
  unsure at all n locations
  Clone ID: LIB3028-053-Q1-B1-A3
ntgaattcacgtagtcaaagtggccactatagaagagttatgacgtcgcatgcacgcatccctgagctaggccagccagccagacgcagacgcgccgagacagaacttaatgggcccgctaacagcgcgatttgctggtgacccaatgcgaccagatgctccacgcccagtcgcgtaccgtcttcatgggagaaaataatactgttgatgggtgtctggtcagagacatcaagaaataacgccggaacattagtgcaggcagcttccacagcaatggcatcctggtcatccagcggatagttaatgatcagcccactgacccgttgcgcgagaagattgtgcaccgccgctttacaggcttcgacgccgcttcgttctaccatcgacaccaccacgctggcacccagttgatcggcgcgagatttaatcgccgcgacaatttgcgacggcgcgtgcagggccagactggatgtggca

SEQ ID NO: 4884 - DNA, 489 bp, Glycine max
  Clone ID: LIB3028-053-Q1-B1-B10
ccttcccgtcacgagtcatagatgcgggacggtacgtggaggcgtaccaactttccctatagtgagtcgtattagagcttggcgtaatcatggtcatagctgtttcctgtgtgaaattgttatccgctcacaattccacacaagatacgagccggaagcataaagtgtaaagcctggggtgcctaatgagtgagctaactcacattaattgcgttgcgctcactgcccgctttccagtcgggaaacctgtcgtgccagctgcattaatgaatcggccaacgcgcggggagaggcggtttgcgtattgggcgccagggtggtttttcttttcaccactgagaccgggaacagctcactgcgcttcgcgcctggccctgcgagacttgcagcaagcggtccacgccggctgtgcccccgcatggcacacgtcgggttgcatggctgttccaggccgccgctgccacgcccccgtcgggcgtatccgcgggg

SEQ ID NO: 4885 - DNA, 483 bp, Glycine max
  Clone ID: LIB3028-053-Q1-B1-B4
gatgatctaggcgcactatgccagagcactgacatcggacgcacgcgtacgtaagctcggaattcggctcgagctcgagccgtgcgttttgttaaaaaaaacactaaaaagaaaaagggcggccgccgactagtgagctcgtctacccgggaattaattccggaccggtacctgcaggcgtaccagctttccctatagtgacgtcgtactaaaccttggcgtaatcatggtcatagctgtttccctgtgtgaaagtgttatccgctcacaggtccacacatcttaggatccggacgcgtgacgtgtaaagcccggcggtgcctacgcattgcgctcgcgcgccgcacgtgcgcttgctctgatcgccactcctcccaagcccggatgaccccctcgtgccgccctctccgtcttaggccgggtcgcctctggtggctccgcgggcgtgtgcgttgtctcgacctcggcacggggagtgctcgt

SEQ ID NO: 4886 - DNA, 494 bp, Glycine max
  Clone ID: LIB3028-053-Q1-B1-C11
ctactgactcacgtgtcatatagaagagctgtgacgtcgcatgcacgcgtacgtaagctcggtcttccgcttcctcgctcactgactcgctgcgctcggtcgttcggctgcggcgagcggtatcagctcactcaaaggcggtaatacggttatccacagaatcaggggataacgcaggaaagaacatgtgagcaaaaggccagcaaaaggccaggaaccgtaaaaaggccgcgttgctggcgtttttccataggctccgcccccctgacgagcatcacaaaaatcgacgctcacgtcagaggtggcgaaacccgacaggactataacgataccaggcgtctccccctggaagctccctcgtgcgctctcgtgttccgagcctgccgcctaccggatacctgtccgcccctgtcccctccggacctcctcgcgcctttctgatccctcacgcgttcaggtctacccactggcgaggctcggcctcagccccaatg

SEQ ID NO: 4887 - DNA, 489 bp, Glycine max
  Clone ID: LIB3028-053-Q1-B1-C9
ctactgagtcaggtgtcttatagaagagatatgacgtcgcatgcacgcgtacgtaagctcggaattgactctcttccgggcgctatcatgccataccgcgaaaggttttgcgccattcgatggtgtcaacgtaaatgccgcttcgccttcgcgcgcgaattgcaagctctgcattaatgaatcggccaacgcgcggggagaggcggtttgcgtattgggcgctcttccgcttcctcgctcactgactcgctgcgctcggtcgttcggctgcggcgagcggtatcagctcactcaaaggcggtaatacggttatccacagaatcaggggataacgcaggaaagaacatgtgagcaaaaggccagcaaaaggctaggaaccgtagaaaggccgcgttgctggcgtttttccataggctccgctcccctgacgagcatcccatggatcgaggcttaggtcacatggggcgaaaacggacagggaggtagcag

SEQ ID NO: 4888 - DNA, 501 bp, Glycine max
  Clone ID: LIB3028-053-Q1-B1-D10
gtcatgaagtcagtgtctagagggcgtaggagcgtggacgcactcaaatgtaaactcggaattcggctcgatgttgagcttcggctttttcatgccactgtctctccatacgtatgactgttcttgctcagtggtatcgtgtttcttacacacagacgctgtttgactctattcggagtagacgcggtcgggtactgaacggtccgagtagtattcttgggttgctagtttcggagatctacttcctcgtttacgtatagggaccatccgaattcttaccgtttcgtgactgatttgagttccctttttctgggaggtgtgtctgcctagtctccgggctctattgcgacgagtttgtattgcgaggattcgtcgtggcatgagtctggaccgtcatgtggttctcggtctaactgctacgcgctcagggttctcgccccttccctttggggcttcggcatatggaattgtcggtgcagttttctctaggtctctgtagtg

SEQ ID NO: 4889 - DNA, 477 bp, Glycine max
  Clone ID: LIB3028-053-Q1-B1-D2
tttatgtgtgcacatgcccacatatcatatcgaccaggctaagtaaaccggaagtcgctcgagatcgcagatcctaagcagaacaacattctgattccgcagatagattacccagggcccgaccacctcgactagtatcccgtccccgcgtaggttgagtctttttcttcgtgaaccacggatccgccctgctgtgagttagatatctacctgcccccagcattagctcttatttcagcacctcgtgtcctgcgctcgcactctagcttacaacttcacgtacgttaagtgcatccatttaagttcgaccagagttctacgagttggaccacgcggagctaatgttcgccccgcctgggttgtggggttctcggtggtcgataaggagcttctcgagtccaatcagggcaccggcggtgctcaggccggagacatccctctggatcttatccgccatcgtagactgttatgtctacg

SEQ ID NO: 4890 - DNA, 471 bp, Glycine max
  Clone ID: LIB3028-053-Q1-B1-D3
aatgatttagtggcgtatggcagagcagtgacgtccgacgcaacgccgtaacgtaagcccggaaattcgctccgagtttatttcgtactaaaaaaaaaaaaaaaaaaaagggcggccgccgactagtgagctcgtcgacccgggaattaattccggaccggtacctgcaggcgtaccagctttccctatagtgagtcgtattagagcttggcgtaatcatggtcatagctgtttcctgtgtgaaattgttatccgctcacaattccacacaacatacgagccggaagcataaagtgtaaagcctggggtgcctaatgagtgagctaactcacattaattgcgttgcgctcactgcccgctttccagtcgggaaacctgtcgtgccagctgcattaatgaatcggccaacgcccggggagaggccgtttgcgtattgggcgccagggttgtttttcttttcaccactgaaag

SEQ ID NO: 4891 - DNA, 507 bp, Glycine max
  Clone ID: LIB3028-053-Q1-B1-E10
gtactgagacaggtagtcgtatagaagagcagtgacgtcggatgcacgcatacgtaagctcggaattcggctcgagttaactactggattaacgagtaatcgatagtagtgtgtcattgaggacgcagttgaggtcgatgtacaccgccagttcgtgagcgcttcgtcatcattgcggttttgggagtactcgggttcaagcttgcctggcgcagcctcgggttgacagatcctggcgggggttctggggtctcgtgctacacgtgtgtgattttagcgagacgggacccgggttggtccgacagagctcggtttcgacgactcaattgacactcttcgaccccagtgcgaagcatcgacgttcgagcactcctcaagctccctgtgacctcgagaagttcgcgtcagcgtaggtactctccagtgcggatagcctccccaacccgaatggtcgacaagggccagtaaacgtgtcgtactgcctcaacacgcggacagagtaccgtg

SEQ ID NO: 4892 - DNA, 474 bp, Glycine max
  Clone ID: LIB3028-053-Q1-B1-E4
ttagagcagtgctattatctacgaccagctacttaacccgaatccgctcggagctctcttgtggataatgaactgtctcacatgaaattcaacgatcagagacgttgaagcaagttgaggaacaaggcactaatctctggaagaagatccatgttgacacgaaagggtcgcaaacagacgtgccgggtgtcgcctagtggaagcattcactcccgaatggtaacagcgggctaagaagccgacatagccccacctaatcctggcgtgcccaggaggaacacgatggagacttcaaggagtaggatcaagcgttcgatcctctggcgccttgttctatcatcccctgcagccctctccgcttcgactctctccacccactcttcgagggtgtggtattcgacggcgtgctactccctctgctctgttgcgaggtcctgcggcctgcggcccattgtctggcgtcgcgcgagtgcg

SEQ ID NO: 4893 - DNA, 513 bp, Glycine max
  Clone ID: LIB3028-053-Q1-B1-F10
gtctcagcagtagtctgacgagggacgaccgtcgcacgcacgcatacgtaagctcggaattcggctcgagggggtgcccatggcaacagggtcatctttgatgcttaccctgaatcttagctatggtgcagcccgaccacgctttggcctgggaccgctgcgtcgcggcgtccatctccccgactcactcctcgttcctcgccttcgtctcgctgtcaccgttcccaccgctcggtcgactgcggccctttaggccgccgctccggcggtcgcggactcctgccctcccgagtccttgacggtagccgtggcgctggtcgcgccgctgtggcgttcggccgcgcggcggtgtcgtctgcgcgggttctgcctggccacaggcttgccggtgtcggtggcccttctcgactgccgtgtcagcgcgcccggatgcggccccgccggcttggcgcggcgcgtgcgggcacgcttgtcgcgtgtcgtcctctggtcgcctccgcgctgggtggtgtg

SEQ ID NO: 4894 - DNA, 592 bp, Glycine max
  unsure at all n locations
  Clone ID: LIB3028-053-Q1-B1-F2
tctatgcgtactcactggctagccatactgacgaatcgggcctanggcgcttcgttctagctcgggaatttcgggctccttgggtcttgcttcgaacgttcgttcgttctccccttcgcgttgtgcttgagactggcgcccggtggcggcgtcttgcttcctgctctctcggctgtcgtgtgctcgccttctcgggggctgcgtccctcgccgcgtcgcgctccctctcgtgctcgcgtctggtgtgctcggcttggcgctgcccgcctcttcttccccgctctggctgtcgcgcgtcgctctgcgcgccgcggtcttgtcgtctgtgcttccgcgtggttgcggccggtgctcggcggctcggctcccggttgggctctggtcgcgccggtgtggcgcgcgtcgcgcggtgcctgcgcggttgtttttttttgtcggccgcggctcttgggctggccgcgctcgcgtgcggctcgctgggctgtgcgtgcgctgcgtgcgcgtcgcgggcggccgctgctggggggctggggcgggtggcggcgctctgccggggtccgcgctgtgtcgtcggcgcccccctggtgcttgg

SEQ ID NO: 4895 - DNA, 463 bp, Glycine max
  Clone ID: LIB3028-053-Q1-B1-F7
ttaataatcaggtgacatatagaagagcaatgacgtcgcatgcacgcgtacgtaagctcggaattcggctcgagggcaataacaggtctgtgatgcccttagatgttctgggccgcacgcgcgctacactgatgtattcaacgagtccatacccttggccgacaggtccggttaatctttaaaattcaaccttaatggggaaagatcattgcaatggttggccttcaccaaggaatcccaattaagcccaattcataagcccccgtttactagttccctgccctttgtacaaaccgcccgtcgctctaaccgaatgaatggtccggtaaattttccggattgcggcaactttaccggttcgctgcccgcgactttgtgagaattccactgaaccttaccatttacaggaaggaaaattcttaacaaggtttccgtaggacctgcggaaggatcattgtcgatg

SEQ ID NO: 4896 - DNA, 473 bp, Glycine max
  Clone ID: LIB3028-053-Q1-B1-G1
gatgaatctggtggtacataggcgagtatgacgtacgtgcacgcgtacgtaaactcggaattcggctcgagcagaatttgtgtttaagttggaatcaggagaagatactgcagtcattcagagggcactaggtgagcttatggagcaggttgttttactcttgcaacttgtagatgcaagaaaaaaacaactgaatttccctgtaattctgatgagagagttgaaggaaactatgccagcagttgtaaggccgactagtgagctcgtccacccgggaattaattccggaccggtacctgcaggcgtaacaactttccctatagtgagtcgtattagagcttggcgtaatcatggtcataactgtttcctgtgtgaaattgttatctgctcacaattccccacatgatactagcccgaagccataagtgtaaagcccgggggtgctcaaggagtgagccaatctcacatggatg

SEQ ID NO: 4897 - DNA, 484 bp, Glycine max
  Clone ID: LIB3028-053-Q1-B1-H2
ctcatgaagtacatgcactaaacctgacgtcgcacgtaggcctacgtaagccccgaaatccggcccagaatgacaatgtgaccaaaccttatctgaaattcgccaatgaacaattttgaattgaacaattcaaggccttccttaactggcacactttggatcacaacatgaacaaggaaaccttcccgaattgcaaatttcggatgggggaagccctccttttttgggccggtaactttcccagggaaggaatccatttggtccttgtcccagatcaacaacattaaaaccataaacttccccccaaggtttcccgcctcccgccatgacaaagtttcaaaagcctaagggacaccagaatgcctgcgtaccacattccacacccacacccccttcataaacactgccctaccttaaggcccgcgtttggcctccccatgccccaaccccccccgaaacacggccccctctcacaggccacttg

SEQ ID NO: 4898 - DNA, 482 bp, Glycine max
  unsure at all n locations
  Clone ID: LIB3028-053-Q1-B1-H8
gtctttaggacggcaaaancctataaccnttgacgcacgcgtacgtaagctcggaattgcaagctctgcattaatgaatcggccaacgcgcggggagaggcggtttgcgtattgggcgctcttccgcttcctcgctcactgactcgctgcgctcggtcgttcggctgcggcgagcggtatcagctcactcaaaggcggtaatacggttatccacagaatcaggggataacgcaggaaagaacatgtgagcaaaaggccagcataaggccaggaaccgtaaaaaggccccgttgctggcgtttttccaaaggctccgcccccctgacaagcatcacatgaatcgaggctcaagtcagaggtggcgaaggccgacagggactctaacgattccacgcggtttcccccgggaagcgccctccgttcgcgctccggttcggacgccgggcggcttacgggagtacctggtcaggcccttgctccgg

SEQ ID NO: 4899 - DNA, 441 bp, Glycine max
  unsure at all n locations
  Clone ID: LIB3028-054-Q1-B1-A5
tttcagtgcaaagccccataaaagaatatgacgtcgcactgcacgcgtacgtaagctcggaattcagctcgaactccaacnnnnagnagngctctcaaaaacaatgaagctcattagcaccatcaaccccaaaaacctcaaactaagccccaaacgcttctttcgtaaaaaggaaccatctttagtctcacgctccgaaccgccttctttcggatccggatcctcttccgttgactcttccaacgcaaatcacaaaccttccggcggtaaccaaactccgaccaacgttctcccggaagtctccggcgagtggtccgaagtcgccaacgccgccgttgacgtgcggtgggaactcgcgcaagccttacgcctcatcgatcgcgacaacgaccgcgtcgtcacgcgccaggacctccagtcgcttctaaagcgcttggcgag

SEQ ID NO: 4900 - DNA, 439 bp, Glycine max
  Clone ID: LIB3028-054-Q1-B1-A6
cgaatgaatcaggtgacactatagaagaatatgacgtcgcatgcacgcgtacgtaagctcggcatcgacaccaccacgctggcacccagttgatcggcgcgagatttaatcgccgcgacaatttgcgacggcgcgtgcagggccagactggaggtggcaacgccaatcagcaacgactgtttgcccgccagttgttgtgccacgcggttgggaatgtaattcagctccgccatcgccgcttccactttttcccgcgttttcgcagaaacgtggctggcctggttcaccacgcgggaaacggtctgataagagacaccggcatactctgcgacatcgtataacgttactggtttcacattcaccaccctgaattgactctcttccgggcgctatcatgccataccgcgaaaggttttgcgccattcgatggtgtcaacgt

SEQ ID NO: 4901 - DNA, 436 bp, Glycine max
  Clone ID: LIB3028-054-Q1-B1-B3
cgttctgaatgcccgagacaagagattgacatcccaagcacgcctacctaaaccccgaaatccgctccagaacagaaagaaagaaatcctaaaccccaagttccgaaaaatttggccatcaactggctccaactgatcgccagaactcatcaaaatctccaaatccccaagccgcccaaccgttacaactacatcgtgcaatccatcaacaacattgcgaatcgcgacgttcacctgaccgtcgacgagccgaactcgccttccgttcgctacatcactatgatcagttctcacagagcctcctgcaggatcctgtcatccactgaccacaaggaccaaacctgagcgaactacttcaatgcgaaccggattaaggagtacacacataacgttaaaatcgagacatccaacatctgtaatgatgtcaagagatcta

SEQ ID NO: 4902 - DNA, 453 bp, Glycine max
  Clone ID: LIB3028-054-Q1-B1-C11
cgaatgaattaggtgacacatagaagacaatgacgtcgcatgcacgcgtacgtaagctcggaattcggctcgagcggctcgagcaagctcactacttggactgggctgtccatgccttcagaatcaccaatgttggtgtccaggataccacccagatccacactcacatgtgctactcgaacttcaacgacatcatccactccatcatcgacatggacgccgatgttatcacccatgagaactctcgctccgacgagaagcttctgtcagtcttccgcgaaggtgtgaagtatggtgctggaattggccctggtgtctatgacatccactccccaagaataccaccaactgaagaaattgctgacagaatcaacaagatgctggcagtgctcgagaagaacatcttgtgggtgaaccctgactgtgggctcaagacccgtaagtacactgagg

SEQ ID NO: 4903 - DNA, 453 bp, Glycine max
  unsure at all n locations
  Clone ID: LIB3028-054-Q1-B1-C12
aatgaatcaggtggcctatanaagagaaatgacgtcggacgcacgcgtacgtaaactcggngtatcagctcactcaaaggcggtaatacggttatccacagaatcaggggataacgcaggaaagaacatgtgagcaaaaggccagcaaaaggccaggaaccgtaaaaaggccgcgttgctggcgtttttccataagctccgcccccctgacgagcatcacaaaaatcgacgctcaagtcagaggtggcgaaacccgacaggactataaagataccaggcgtttccccctggaagctccctcgtgcgctctcctgttccgaccctgccgcttaccggatacctgtccgcctttctcccttcgggaagcgtggcgctttctcatagctcacgctgtaggtatctcagttcggtgtaggtcgttcgctccaagctgggctgtgtgcacgaaacccc

SEQ ID NO: 4904 - DNA, 449 bp, Glycine max
  Clone ID: LIB3028-054-Q1-B1-C8
cgatatgactcaggtgacatatatgagcactatgacgtcgcatgcacgcgtacgtatgctcggaattaattcccgggtcgattacgatatgggtagtaaccttaaaccgcttcgaatcgtggcttcctcatgctcgtagaacctctctcgaatactaccttcgtcttcttcgtcttcgtcttctcaacaaacagccgggtcgattcggatcgtttaccgagaatctccgatgtcatcggaagttgagttcccgatatggtatcagaactgtttcatcgtattgctctccgatcatggttctcggagttatcgcgcttgccattttcgtcttcggtcagtcgcgagtcatgagatttctcgttctttcgttgtgctcgacattatgctttcgtcgcaatcttctcttgcagttatagtactggttgaatatcgtcacgattcttggtctt

SEQ ID NO: 4905 - DNA, 442 bp, Glycine max
  Clone ID: LIB3028-054-Q1-B1-D4
gaatgatttagtggcatagacaagaatatgacatcgcatgcacgcgtacgtaagctcggaaaaggccgcgttgctggcgtttttccataggctccgcccccctgacgagcatcacaaaaatcgacgctcaagtcagaggtggcgaaacccgacaggactataaagataccaggcgtttccccctggaagctccctcgtgcgctctcctgttccgaccctgccgcttaccggatacctgtccgcctttctcccttcgggaagcgtggcgctttctcatagctcacgctgtaggtatctcagttcggtgtaggtcgttcgctccaagctgggctgtgtgcacgaaccccccgttcagcccgaccgctgcgccttatccggtaactatcgtcttgagtccaacccggtaagacacgacttatcgccactggcagcagccactggg

SEQ ID NO: 4906 - DNA, 449 bp, Glycine max
  unsure at all n locations
  Clone ID: LIB3028-054-Q1-B1-F10
aatgatacgtagcctatanaagagaantgacgtcggacgcacgcgtacgttagctccgctggcgtttttccaaaagctccgcccccctgacgagcatcacaaaaatcgacgctcaagtcagaggtggcgaaacccgacaggactataaagataccaggcgtttccccctggaagctccctcgtgcgctctcctgttccgaccctgccgcttaccggatacctgtccgcctttctcccttcgggaagcgtggcgctttctcatagctcacgctgtaggtatctcagttcggtgtacgtcgttcgctccaagctgggctgtgtgcacgaacccccgttcagcccgaccgctgcgccttatccggtaactatcgtcttgagtccaacccggtaagacacgacttatcgccactggcagcagccactggtaacaggattagcaaaaccaggtt

SEQ ID NO: 4907 - DNA, 455 bp, Glycine max
  Clone ID: LIB3028-054-Q1-B1-G11
ggaatgatctaggtggactatagaagactagtgacgtcggacgcacgcgtacgtaagctcggaatttgattgcgagtgagatatttatgccagccagccagacgcagacgcaccgagacagaacttaatgggcccgctaacagcgcgatttgctggtgacccaatgcgaccagatgctccacgcccagtcgcgtaccgtcttcatgggagaaaataatactgttgatgggtgtctggtcagagacatcaagaaataacgccggaacattagtgcaggcagcttccacagcaatggcatcctggtcatccagcggatagttaatgatcagcccactgacccgttgcgcgagaagattgtgcaccgccgctttacaggcttcgaccccgcttcgttccaacatcgacaccaccacgcctggcaccaattgattgggcccaagattaatcccccccac

SEQ ID NO: 4908 - DNA, 454 bp, Glycine max
  Clone ID: LIB3028-054-Q1-B1-G9
cgaatgatataggtgacctatagaagatactgacgtcggacgcacgcgtacgtaagctcggaatcggccaacgcgcggggagaggcggtttgcgtattgggcgctcttccgcttcctcgctcactgactcgctgcgctcggtcgttcggctgcggcgagcggtatcagctcactcaaaggcggtaatacggttatccacagaatcaggggataacgcaggaaagaacatgtgagcaaaaggccagcaaaaggccaggaaccgtaaaaaggccgcgttgctggcgtttttccataggctccgcccccctgacgagcatcacaaaaatcgacgctcaagtcagaggtggcgaaacccgacaggactataaagataccaggcgtttccccctggaaagctcctcgtgcgctctcctggtccgatcctggcgcttaacggatacctgtccgccctttg

SEQ ID NO: 4909 - DNA, 445 bp, Glycine max
  Clone ID: LIB3028-054-Q1-B1-H1
aggaatgaatctaggttgcagtatgccaagagtaatgacatcggacgcacgcgtacgtaagctcggaattgactctcttccgggcgctatcatgccataccgcgaaaggttttgcgccattcgatggtgtcaacgtaaatgccgcttcgccttcgcgcgcgaattgcaagctctgcattaatgaatcggccaacgcgcggggagaggcggtttgcgtattgggcgctcttccgcttcctcgctcactgactcgctgcgctcggtcgttcggctgcggcgagcggtatcagctcactcaaaggcggtaatacggttatccacagaatcaggggataacgcaggaaagaacatgtgagcaaaaggccagcaaaaggccaggaaccgtaaaaaggccgcgttgctggcgtttttccataggctccgcccccctgacgagcatcacaaa

SEQ ID NO: 4910 - DNA, 282 bp, Glycine max
  unsure at all n locations
  Clone ID: LIB3028-056-Q1-B1-F2
ggttatctcaagtggattggccaagagcggacctttttggatatataatcaaaagagtggagttacgggaacagccgtctgatggaaaactactttcacgttcggttcagagagcactttatttttcgtcgagaattcttcgttccctttcgtgtgaattccccagcggcgaattcaaaacttttttggccctatctattccatctctcgagccccgaagaaaacccccctccccttcggactccatatctctctctataaaaaaaaaanannnanannnnn

SEQ ID NO: 4911 - DNA, 70 bp, Glycine max
  unsure at all n locations
  Clone ID: LIB3028-056-Q1-B1-F4
gngnnnnngaatgaatntagttnnctatgcccagaganatgacaaccatccacgcctanttaaacccgga

SEQ ID NO: 4912 - DNA, 64 bp, Glycine max
  unsure at all n locations
  Clone ID: LIB3028-056-Q1-B1-G2
gtgnnnnngaatgantctaggttnntctatggncagagacatgacanagcntccacgcctacgt

SEQ ID NO: 4913 - DNA, 70 bp, Glycine max
  unsure at all n locations
  Clone ID: LIB3028-056-Q1-B1-C2
gntgnnnnnnnnatgagttntgatgnctgtggnccnanaaatgacanaagacncacgggnaagtaaantc

SEQ ID NO: 4914 - DNA, 380 bp, Glycine max
  Clone ID: LIB3028-019-Q1-B1-A10
caaaaaatggcagatattcctcgggtgaagcttggaagccaaggcctggaggtttccaagttaggatttggttgtatgggcctaagtggagtgtacaacgatcctgttcccgaagaggttggcatctctttgatcaaacacgcattcaccaaaggggtcactttctttgattctgcagatttttatggagcacgtgccaatgaagttttggtcggaaaggctctcagggactttcctcgagatcaatttcagattgccacaaagtttgggattgtcaaaatggaaaatggtaatgtgatagtgaacggttcccctgaatatgttcggtcctgttgcgagggtagcctccaacgccttggtgtcagctacattgatctcta

SEQ ID NO: 4915 - DNA, 407 bp, Glycine max
  Clone ID: LIB3028-001-Q1-B1-A11
gcgtacgtatactcgggctacagaacgagcactctgatcctgaccctaatcctcccctttccttccttccttcggcaacaaaaatcatgtcggggtccttgggattcttctttgtgggtcttacgttgttgttgttggtctgggtggctaatgctgtggccaacacttccaacaaatttgatcaactcttccaaccaagctgggcttttgagcacttcattcatgaaggggatctcctcaaactcaaactagacaatttttccggcgctggttttacttccaagagcaagtatatgtttgggaaagtcaccatccagcttaagcttgtggaacgtgactctgctggaacagtcactgctttctatatgtcatcggacggtccaaaccacaacgagtttgattttgag

SEQ ID NO: 4916 - DNA, 116 bp, Glycine max
  Clone ID: LIB3028-001-Q1-B1-A5
ttccgctcgaggactgacgtgactcgttcttcttcgtagctatcttcgtcctttgtcgttcgtgtgtttgctttttctctcacctcaaactgtcctgccgcggtgggacatgtagt

SEQ ID NO: 4917 - DNA, 427 bp, Glycine max
  unsure at all n locations
  Clone ID: LIB3028-001-Q1-B1-B10
gacgtatcgtccacgcgtacgtaagatcggaaatcggctcgagctggaaatgccatttatgatcncataggttctattgtagttggcaacttacttggaatggtagccatatttcttatccagagaaaccggcatgctttgattggtagagccatggatgaccatgatatggagaaagtacttcagtttttgaaaaaagacccggttgtagattccctctatgattgcaaaagtgaagttattgggcctggattcttcagatttaaggcagaaatagattttaatggagaaatggtggtgcaaaattatcttaaaaggactggtcgtgaagagtgggcaagacagtttcgtgaagctgctaagcagaaggatgatactgccatgatgaagattatgtcaaattacggtgaggaagtagttacagctt

SEQ ID NO: 4918 - DNA, 440 bp, Glycine max
  Clone ID: LIB3028-001-Q1-B1-B11
cacgcgtacgtaaactcggaaatcggctcgagggaacaagaagatatctgctggtgtacttggtgtagccacggctatttggatcttttttgagttgcttgaatatcacctgcttactctagtctgtcacatttccattctgttgcttgcggttttatttttgtggtccaatgcccatacctttattcacaaggcaccacctcgcatcccggttgttcatatccccgaagaaccaattctccaatttgcatctgcattgacaattgaaatcaaccgtggatttgctgccttgcatgctattggttctggaagagatttgaagacatttctcattgttattgttgggacgtggattatatcaattgtggggagctggtgcaatttcttgaccttgttctacattgcttttgttttgttgcatacggttcctgtcctgtatg

SEQ ID NO: 4919 - DNA, 454 bp, Glycine max
  unsure at all n locations
  Clone ID: LIB3028-001-Q1-B1-B12
gacgtagcatgcacgcgtccgtaagctcggaaatcggctcgagttcagtgaatangaggctctctgatgtcatgagcatgttgtcatcaagacaacctagctgtccacagttatacatgtatagctctgctgacagggttattcctgctgattcagtggaatcgtttgtagaggctcagcgtagggctggacatgatgtgagggcatgcaattttgtctcctcaccccatgttgaccactttaggaatgacccaaaattgtatacatctcagctcagtcagtttttggaggagtgtgttgttagtcgttgtaaatcttactaattctttacattccttggcttactcatacaccatatagttcatccattttgatttttgaaagcagccattccattaatggatggtgcgatggtgctatggtggttaggactatatcaaaagtcaaccacctc

SEQ ID NO: 4920 - DNA, 396 bp, Glycine max
  unsure at all n locations
  Clone ID: LIB3028-001-Q1-B1-B9
gctcgagctcaccctcctcttcacacattttctgtgcgctctaacanacattctcgttcacactttcagattgtgtgaagatgggggcgggtggccgaactgatgttcctcctgccaacaggaagtcagaggttgaccctttgaagcgggtgccatttgaaaaacctccatttagtctcagccaaatcaagaaggtcattccacctcactgtttccagcgttctgttttccgctcattctcctatgttgtttacgacctcaccatagccttctgcctctattatgttgccacccattacttccacctccttcccagccctctctctttcttggcatggccaatctactgggctgtccaaggttgcatccttactggagtttgggtcattgcccatg

SEQ ID NO: 4921 - DNA, 429 bp, Glycine max
  Clone ID: LIB3028-001-Q1-B1-C10
gacgtagcatccacgggtccgtaaactcggaaatcggctcgagatcgttttctacataatacaaacctctctaatttttgaagcttattatacccaatctcgatatgcagatcttcgtgaaaaccctaactggcaagacgatcaccttggaggtggagtcctctgacaccatcgacaacgtgaaggccaaaatccaagacaaggagggcattcctccggatcaacagcgtttaatcttcgccggaaaacagctcgaagacggcagaaccctcgccgactacaacatccaaaaggagtccacgctccacctcgtcctccgcctccgcggcggcatgcaaatcttcgtcaaaacccttactggcaaaacaatcacgctagaggtggagtcctccgacacaatcgataacgtgaaagccaagattcaagata

SEQ ID NO: 4922 - DNA, 130 bp, Glycine max
  Clone ID: LIB3028-001-Q1-B1-C11
caaatgtaatcttgggcgggccggttgaaaaaacgtattgtgtttcgaattttttttcccctgccctgcaaatgcttctgtttgtatactagtaaataacaacttgttatactattttttcaattaagct

SEQ ID NO: 4923 - DNA, 460 bp, Glycine max
  unsure at all n locations
  Clone ID: LIB3028-001-Q1-B1-C3
gcaggcccgcctacgtaagcacngaattcggctcaagctcaaagggcaaaggactccaaaacgggaattcaaatggggttgcctcacaaggactacacgaaccaacccccaaccccattctacgaccccgccgagctccgaaagtggtccttcttccgagccctcatcgccgagttcgtcgccaccctcctcttcctctacgtcaccatcctcaccgtcatcggctacaaccaccagacagccaccgccgccgagccctgcagcggcgtcggcgtcctcggcatcgcttgggcctttggaggcatgatttttgtcctcgtctattgcaccgccggcatatcagggggacacataaacccggcggtgacgttcgggttgtttttggcgaggaaggtgtcgctgacaagagctgttgggtacatggtggctcaggtgttggggggcataagtggggtggggc

SEQ ID NO: 4924 - DNA, 421 bp, Glycine max
  Clone ID: LIB3028-001-Q1-B1-C9
acgcgtccgtaagctcggaaatcggctcgagtggcatcttcttctggtagtttagacacctctgcaagtgcaaactccttcaccaacttcaccttctccacacaccctttcatgaccacttctttctctgaccttcttgcttctcccacagacaacaacaaaccaccacatggtggtggtggtggtttgtctgagagaactggctctggtgtccccaaattcaagtccacaccaccaccttctctgcctctctctccccctcccatttctccttcttcctacttttctattcctcctggtttgagccctgctgagcttcttgactcacctgttctccttaactcttccaacattctgccatctccaacaactggagcatttgttgctcggagcttcaattggaagagcagttccgggggga

SEQ ID NO: 4925 - DNA, 420 bp, Glycine max
  Clone ID: LIB3028-001-Q1-B1-E10
gacgtagcatccacgcgtacgtaaactcggaaatcggctcgagtgatgagtcaaatgttcatcataagtatttcaaggacaacccggattacaaatgccctgcttatagcactaaaaatgggatctacacagaagggtgtggattagacaacatagtgatgtcatggggacatgatgattacatgtatatggttgccaaggcaaatggcaccactttgccatctgcaggattgttcattatcagatatcattctttctatccattacacaaggaaggtgcatatactcacttcatgaatgaagaagacgttgagaatttgaagtggctcaaaatttttaacaaatatgatctctacagcaagagcaaagttctagttgatgtggagaaagttaagccatactatgtgtcactcattgaga

SEQ ID NO: 4926 - DNA, 442 bp, Glycine max
  Clone ID: LIB3028-001-Q1-B1-E12
gacgtagcatgcacgcgtccgtaagatcggaaatcggctcgaggcaaccggaatttcatgcaaggatggaccacttttcgaactgccacacttgctgtatccggaaagggtttcattgcaaaggacatgtcattccggaacacggcagggccagtgaaccatcaagccgtggcactgcgtgtggattcagaccaatcagccttctacaggtgcagtgtggaagggcaccaagacaccctctacgcccactccctgcgacagttctaccgagaatgcgaaatctacggcaccatagacttcatctttggcaacggtgccgcagtgttgcaaaattgcaaaatatacaccagggtcccacttcccttacagaaggttaccatcacggcccaaggaagaaaaagcccacaccagagcactggcttttacatccaagatagctata

SEQ ID NO: 4927 - DNA, 125 bp, Glycine max
  Clone ID: LIB3028-001-Q1-B1-E5
attaaacatgaatgttagttttacgcatgaaatctcagctagctaatcaaaacaaacaaaatgtcacatttattggtgattagtattaaacctcttttgtggtaacttgtgaaagtaaattaaaa

SEQ ID NO: 4928 - DNA, 433 bp, Glycine max
  Clone ID: LIB3028-001-Q1-B1-F10
gacgtcaggaccacgcgtccgtaaactcggaaatcggctcgagcggctcgagcgtgcctctagggttatcatatctccatttccatttcctctctctcagtttccaagaatcttaagctatgggaaagtcttacccaaccgtgagcgctgattaccagaaggccgttgagaaggcgaagaagaagctcagaggcttcatcgctgagaagagatgcgctcctctaatgctccgtttggcatggcactctgctggaacttacgacgtgagctcgaagaccggtggtcccttcggaaccataaagcacccctccgaactcgctcacggcgctaacaacggtcttgacatcgctgttaggcttttggagccactcaaagcggagtttcctattttgagctacgccgatttctaccagttggctggcgttgttgccgt

SEQ ID NO: 4929 - DNA, 417 bp, Glycine max
  unsure at all n locations
  Clone ID: LIB3028-001-Q1-B1-F12
gacgttacgaccacgcgtccgtaaaatcggaaatcggctcgaggcggtggctgcaaaatcccagaacgataactttgagtatgtgtcattcaagacaatgatagaccctcgatcggaaaccttgcangggcaaactcattgttgaacgcattgccagaggaagtgattcagcacacttttaacctaaagagccagcaggccaggcaggtgaagaacaacaaccctttcagcttcctggttccacctcaggagtctcagaggagagctgtggcttagagagccctttttgcatgtgctaccacacttttgtccttttgggctctagctagtgctggtagcagtaaataagaatgaataaaagaaacaaaggcttagatgccctttgttaagtgtagaataacgggtatagtaactatg

SEQ ID NO: 4930 - DNA, 223 bp, Glycine max
  Clone ID: LIB3028-001-Q1-B1-F9
gctcagaaatattaatggatacgattttttgaattatggaaataatcatctgtcaaatcaaatgtctctagttttataagttattgcatcaaagttgatcagtttctgagtgtatgtttattttctccaatgtcatactccgtgatgagtccaagattgtcaactaatttgtgatgtcttagatatcctgcacactagtaagatgaaattccaattactttca

SEQ ID NO: 4931 - DNA, 428 bp, Glycine max
  Clone ID: LIB3028-001-Q1-B1-G10
gacgtttgatgcacgcgtacgtaaactcggaaatcggctcgaggtgaggggtagtgatagaaggataaggtgaggtgacgataaaccgtggaaagtggaaacggtggtgtagtctgtgagtgtcattgtgaagttggagacaatgttagcttcttctctctccttcctccattcttgttcatcttcctctttcttattgtcaatttcacttcctaatcccaaaccctctcattccctacctttcgtgctcgaagccaaagacaggacccgtagggaagacaggtccgcgcgccacactcgcatcagaaagaatgtcgaatggacacccgagaggccgatgctgtccgtgttccggtcgaacaagcatctctctgtgcaggtgatagatgacaccaagatgcacacgctcgcttcgatttcgacaatgc

SEQ ID NO: 4932 - DNA, 453 bp, Glycine max
  unsure at all n locations
  Clone ID: LIB3028-001-Q1-B1-G11
acgtaacgtccacgcgtccgtaagatcggaaatcggctcgaagtcatcatccacaaacaatggcctcacatggttatgaatcatgcccgggatacgttgcaatgccgccacctatttcagctccctcactccaaggcagaccacagtttgcaccttacaatgctgtccctactgctccgcagtatggttataatcaaccataccctgcgccaccggtggggtacaatcatcctcgccagcaatcaaatcctgtcgaaagaaatgactatcaacaccctagatcacataattatgaaagaaatcaccatcaaggtantgggggtagttcaaggcatggatatcaatcatcaggaaataatcacaatgctaggtttaataattcacatggtagtcaccacagccaaagcttccaacctagagctcatcagaattggactccacganacaacccga

SEQ ID NO: 4933 - DNA, 420 bp, Glycine max
  Clone ID: LIB3028-001-Q1-B1-G12
aacattacatccacgcgtccgtaaactcggaaatcggctcgagcgcgtcgctgctccgtaccagtttcactgcataaatttgagagaaaactctgcaaacatgttggtttatcaggacctccttacaggtgatgagcttctctcggactccttccgttacaatgaaattgagaatggaatgctgtgggaagttgaggggaagtgggttgttaagggagcagttgatgttgacattggtgcaaacccttctgctgagggtggagaagatgagggagtcgatgacgcagctgttaaggttgttgacattgttgatacattcagacttcaggagcaacccgcttttgataagaaacagtttgttaccttcatgaagaggtttatcaagaatttgactcccaagctcgatgcagagaaacaaga

SEQ ID NO: 4934 - DNA, 217 bp, Glycine max
  Clone ID: LIB3028-001-Q1-B1-G3
cggaagcaaagtttccgcgcattttgtcacataagaagaaagaagtgtccatccttttcttcttcgtttgtattgtttatgaatttttattattgtgtttttagacagttgtatggcactatatcacatgaatgcattttggtttgtaacctgctacgtttgcaaggggttgtgaagccaatttaataataaataaaaacaaatgctttctctcaaa

SEQ ID NO: 4935 - DNA, 394 bp, Glycine max
  Clone ID: LIB3028-001-Q1-B1-H12
cgcatacgtaaactcggacttccgctcgagttagatagaaaaaatttcccccggcttccccccctaaaacccaaaaccctattgcgtgctttgcaatcgaccccgattatggccaacagtaacctccctcgaagaatcatcaaggaaacgcagcgtttgctcagtgagccagcacctggaattagtgcgtccccttcggaagacaatatgcggtatttcaatgtgatgatccttggcccaactcagtcgccttatgaagggggagttttcaagttggaattatttttgccagaagaatatccaatggctgctccaaaggttaggtttctgacaaaaatatatcatccaaacattgataagcttggcaggatatgtcctgacattctgaaagata

SEQ ID NO: 4936 - DNA, 389 bp, Glycine max
  Clone ID: LIB3028-001-Q1-B1-H4
tcggctcgagatcaatctcccagcaaattcctgttggggctttagcaacagctctggctaatgcttctccagagcagcagaggacgatgctgggtgagaatctctacccccttgtggaacagttagagcctgacaatgctgccaaagtgacaggcatgcttcttgagatggaccagactgaagttctgcatttgctcgagtcgccagaagccctgaaagcaaaggtggcggaggcaatggacgtcctaagaaatgttgctcagcaacaggctggcggtactgcggatcagctggcttcattatctcttaatgacaaccttgtttcttaaggtttatattttggatttatttagtgacgatgggttgttattttcggcactggctctgat

SEQ ID NO: 4937 - DNA, 402 bp, Glycine max
  Clone ID: LIB3028-002-Q1-B1-C2
caaatgaaaactgggtttggtgggcaatacagcaatgaggtggcatgtgccagttggaggcttggcgtggaagcaaacaacgtagtcaagtggcaaactgttcctgcagcttgccgagagtacatagctgactacgttctaggagaccaatatagatcagattccaaaacagttaaccaacaagcttatttctatgctaaatccctcaaactcaccaacaaagatgtctttgtcctggacgttgacgacactactctctctaatctccagtattttgctaaccatggatttggtgtggaaccacacaatacgacggcgtttaagaactgggttcttgatggcgaagcattcgcactgccagagactcttaaaatgtacaacaaactgttggctctcggcatc

SEQ ID NO: 4938 - DNA, 66 bp, Glycine max
  Clone ID: LIB3028-002-Q1-B1-C3
cataggaattgttaattcagaacattgctgcacaatctcgtggaaccaaaacatttcttaactttc

SEQ ID NO: 4939 - DNA, 147 bp, Glycine max
  Clone ID: LIB3028-002-Q1-B1-D3
cccggattaagggtttcgctgctcccaaaaaggcaggcctgaaactttccaaaccaaatggaagttgcaacccaaagaatgccacctgcccaaaattgaatccaaggagaattttgaaaaactgccggaaaagccactagtttttgt

SEQ ID NO: 4940 - DNA, 403 bp, Glycine max
  Clone ID: LIB3028-002-Q1-B1-D4
caaaaatattattaagatgatcaacattattggagcacttgttccactctttggaatttcccttccacagttgtgtgtaagcacaagacacataaacccttgtgcctgcaatcacaacttttggtgagtctgctgtggatgtatggaacaatgacaatcttcccacccttttcaaggctgattaacctccttatgggaaggacttttgtaaacaccaacccactgggacgttttgcaatggccaattagctactgatttcactgctgacacattgggtgtcaagacctatgctccagcatatcttatcccacatgcatcatggaaaaacctccttattggagcaaactttgcttcagctgcaactggttatgatgaaaatgctgctactttgaatcacgcgat

SEQ ID NO: 4941 - DNA, 359 bp, Glycine max
  Clone ID: LIB3028-002-Q1-B1-F2
ccctaacccgcttcgaaacgtggcttcctcatgctcgcaaaagctctctcgaagaaaaccttcgtcttcttcgtctacgtcgtctcaacacacacccgggtctacacggatcgtttaccgagaatctcggatcccatcggaatccgatttcccgatctggcagcagaactggttcaacgcattgctcttcgtcatgggtctcggattcttcgccctcaccattttcctcttcctcactctcgactctgacatcgctccttcttccaccgtctccgcctctgccactgacgctttctccgaacgcgtcgatgtgcaggttacttaaggcacggttctgaagcttatgcacgagaagacca

SEQ ID NO: 4942 - DNA, 394 bp, Glycine max
  Clone ID: LIB3028-002-Q1-B1-G3
cagaaatattattacgatgatcaacattattggagcacttgtgctactcgttgcatttctcttcctcagttgtgtgtacgcacaagacacaacaacccttgtgcctggaaacataacttttggtgagtcagctgtggatgtagggaacaatgactatcttcccacccgtttcaaggctgattaccctctctatgggatggacattgttatatagcaacctactgggaggttttgcaatggcaaattagctactgatttcactgctgacacattgggtttcacgagctatgctccagcatatcctagcccacatgcatcagggaaaaacatccttattggagcagactttgcatcagctgcatctggttatggataaaatgctgctactttgaat

SEQ ID NO: 4943 - DNA, 135 bp, Glycine max
  Clone ID: LIB3028-002-Q1-B1-G7
gatgtatttgcgttttttagttctaattggcaactcttggtgtttattatggtgttggtttcctgtgttgattgtttgcaatgctgaaaccttggatatggaattgatcgtgatatatatagtatcatttatttt

SEQ ID NO: 4944 - DNA, 323 bp, Glycine max
  Clone ID: LIB3028-003-Q1-B1-B7
tcggggaattccaattccacattttcaagaaataaggaggcaaaaatgttcatatatgaattggaattatttgttttcttattaggcctatcctgaagccaaaggaaatgagatcggaattcctcggggaattccaattccacattttcaagaaataaggaggcaaaaatgttcatatatgaattggaattatttgttttcttattaggcctatcctgaagccaaaggaaatgagatcggaattcctcggggaattccaattccacattttcaagaaataaggaggcaaaaatgttcatatatgaattggaattatttgtttt

SEQ ID NO: 4945 - DNA, 395 bp, Glycine max
  Clone ID: LIB3028-003-Q1-B1-C12
tgacaaaccaggtgctcgatgaaattggtgtagatgttgcctcacagttatcagcagctcccaaagggagagtcgcaacaaagaatgctgaaaatgttagcagctcgggcattgacgaacttgagaagcgtttggcagctcttagaaacccataaattttgcatgggattgtgattctggaactcaaaagttttaaactgaaattctttcctgaagtatgttttcttgggatttcacaagttgagtgtgtatatacaatcttgaaattattatgtatgaataatgatatattaaaatttctgagatggctatttacttgtaaaacaagaaaggcgtgactgggactggagggcctcgtggaaaaaaaaacggcggcccccgactattgagctcgt

SEQ ID NO: 4946 - DNA, 174 bp, Glycine max
  Clone ID: LIB3028-003-Q1-B1-C6
ttctatgtcatatatatgagcatatgctctttgttcatttgcaaatgcaaaataaacactggagcggctttaggtaatttgactttgagtaagttttgtctaattttatacttggtggggaatagaagtatttattggtgtatgttgttcatctttcttcagtattgcctctaa

SEQ ID NO: 4947 - DNA, 352 bp, Glycine max
  Clone ID: LIB3028-003-Q1-B1-H7
ctgcggaattcaaggccgcagctaagcgagcgtgtcaagtcaaatttgaggatgctcaatccacttatccacttatgatggaggatgcacttccatacatttgcatggatattacgtatcagtatacgttgctcgtcgatggatttggcctggatccttggaaagagattatagtagcaaatgaaattgaataccaaggtgctcttgtggaaggagcatggcctctaggcagtgccatagaagccatatcttcattgcccaaatttaataaattgatgtattttatataacacttaaagagaagtgggcttcctttaattactaaataaaatgaagctcgatgtatatccaa

SEQ ID NO: 4948 - DNA, 265 bp, Glycine max
  Clone ID: LIB3028-004-Q1-B1-A2
gtaagatcaagtcattgggagtcaaaatggttatctctggagaaggatctgatgaaatctttggagggtatctatatttccacaaggcacccaacaaagaagagtttcaccaagaaacatgccgcaagattaaagcactccacaaatatgattgcttgcgagccaataaatcgacctttgcctggggtctagaagccagagtaccatttttggacaaagagtttatcagagttgcaatgaacattgatcctgagtgtaaaatgat

SEQ ID NO: 4949 - DNA, 248 bp, Glycine max
  Clone ID: LIB3028-004-Q1-B1-B7
gttgaagaatgagtttcctcaacttttgtccatcaaagactccctcgttaagtatgtattccagccaaatcagaaaaaggcataacataacttggacatgttatgttagtttaccgttttaatttacatcttcttctgctgaccatttcagattttccttcgtgtgttttgttgcatttaattttaatgttatatttgtattttttattatgatatgaataaactagttgttacctacttaattttaa

SEQ ID NO: 4950 - DNA, 78 bp, Glycine max
  Clone ID: LIB3028-004-Q1-B1-C3
gacgacgcgaccacgcctacgtaaagctcggattcggctcgagcagaaagaaccccaaaagacctttctggcgatgcc

SEQ ID NO: 4951 - DNA, 178 bp, Glycine max
  Clone ID: LIB3028-004-Q1-B1-G8
acgcttccgcgtcctcgctcattgatgcgctgcgcacggtcattcggctgcagtcagctgtaggagctcatccacaggcggtaataaggttatgtagaggtccaggggataacgcaagtggcaatatcgtaagacatggccatcgaagcgttattagtcgtaaattcgacgcgttgct

SEQ ID NO: 4952 - DNA, 205 bp, Glycine max
  Clone ID: LIB3028-005-Q1-B1-A1
ttacaagtagataattgtaagaagtccaatttcgggcaacaacgtttgtaatgcagaaataggtcattagcattgtaaatctccaggcgataaatggaatatcaaatggaagacgccgcatagcttctggtgtgacaaaaaaaaacaaaaaaataaaaccaaaaaaaaaaacaaaaaaactaaaaaaaagcacaaaaagaggcaa

SEQ ID NO: 4953 - DNA, 300 bp, Glycine max
  Clone ID: LIB3028-005-Q1-B1-B10
gcccacccttacttaaactcggaattcggctcaagcttctccctcttactcttacactctcatccaaatcttgcaaaaaaaaaaaatcacaatggcagcgagcgctcacactccatccaaagagttcgtgtacatggccatcctggcggatcatgcccatcgctactaggagatggtagagttcatgagaaaggtctccgcctccgccgacaaccatgagcttagcgttgaggaacgcaacctcctctccgttggcgaacataactttatctgagcttgccgctccacctggcgcatcat

SEQ ID NO: 4954 - DNA, 387 bp, Glycine max
  Clone ID: LIB3028-005-Q1-B1-B12
gaattcggctcaaccaaaaaggcacttgtttgtttgtcgtacaaaatggaaactaaaccgagttcggtgatggttacgctcagttacggcgcgttgacgtgcgccgcggaagttctcgcgactttgctagcttctgctgtcgtcaaagccacgcttttggccccggatctctaccggctgctattgaccaacacgcctacaaccaaaggagagagaaaaactcagagtcaagacaagcaacgtgatgcagagggcgaagacggtaacgatgatgaaggggacgatgatgacgatggagatggtggatttggggagggtgaagaggagttgtcatctgaagatggaggtggatatggcaacaattccaacaacaagagcaactcaaag

SEQ ID NO: 4955 - DNA, 323 bp, Glycine max
  Clone ID: LIB3028-005-Q1-B1-B4
ctcgagccgcaaaaattcgggaagactagtgactgtggttcacctagatcaactctaaagtgctggaatgaggaagatgaggaagagtagtttccttaagtgtctttattattctgtccttgtgaaaataagtctggttttccagatacgttattgtttttctttgttgtcttttttagcttctgttagagaccatttgggcatttagacctttattgtttctattaccatttgaacatcgaatggattaataaatcactttgtttgcgtgcaaaaaaaaaaacatatctcttctacaaacaaaaaaaacaaaaaagaaccga

SEQ ID NO: 4956 - DNA, 257 bp, Glycine max
  Clone ID: LIB3028-005-Q1-B1-B8
ggaattcagctcgagcagctattgataaagctgtggctgctggagtgaatgtcctttccatctctttgggtggtggaatctccacatattgcagagataattcagcagtggcagcgttttgaccaatggacaggggtgtttttgcttcatgttctgctgtcaaatgcatgacctgaccctgccattctcaccaatgtgtcaccaggaatcaccccacgttggacgactcacaccggatacggattttccactggctc

SEQ ID NO: 4957 - DNA, 452 bp, Glycine max
  Clone ID: LIB3028-005-Q1-B1-C12
aggcctacttaagatcggaattcggctcaagttttttttttctcttcctctgaagccattttttcttccttcctttttggtttcctattccttcttcaattatctctcttcatttagttgtgaacattttttcggtctcgtcgaagcaatggtggcgggtggcaattccaaatccgacatctcctttgctggcacttacgctagcagtgctttcgctgcatgtttcgccgaggtgtgtactcttcctttggacaccgccaaagttaggcttcagcttcaaaaacaagctgtagttggtgatgtggtgaccttacctaaatataggggtttgctgggaacgattggaaccattgccagggaagaaggtctttcagcactctggaaggggattgtgccagggctacatcgtcaatgtttgaatggtggtttaagaattgcgttatatgagcctg

SEQ ID NO: 4958 - DNA, 325 bp, Glycine max
  Clone ID: LIB3028-005-Q1-B1-D2
ggcctacgtaagatcggacttcggctcgagcagcacgaattgcatcactctcgtccgttaccactgcggccctagaccacgtcaagcgatctctcacaacgccctcatccgttagggcaaagatgagtcgaggaactggaagttgaaaccatcgtgacagcactactttctcacctgaacgacgtctctatcaagtggagtaagctttcaatgctgtgaacgtcgcaggaatcacctcgattggtgtccgaagaacggattcaaattgtgtcgttactcagaagaacgtttcggatacgcttttggaccacacaactgttaaaca

SEQ ID NO: 4959 - DNA, 425 bp, Glycine max
  Clone ID: LIB3028-005-Q1-B1-D4
gcgtacgtaagatcggaattcggctccgagcaatcttctcttctcaaaaaatctctgttcaacaacgctaaagaatactatctcaagtatcaggtgatgagatgaaccaagcacaacaacttcaagaagcttgaagtttgaactgtctcaaacatgttctcaaagcttcagccacaacaccagcaacagcatcaaccttttcaattccctcgtgaatgtcaaacgtccgaggacgatgacagccgaagcagcggtggccctaacaccgccgtcgctcaaaaatcagttttaggcggcggatgatgcaccgatggggccacaattgaagtggttccgggcccaagggccgcccgcccgggtccaagaacaggcccaagccgcctctcataataacgcgcgaacccgagcccgccatgaagccgttc

SEQ ID NO: 4960 - DNA, 114 bp, Glycine max
  Clone ID: LIB3028-005-Q1-B1-E10
catttttcattacctttgtaaccttcgagaaatgtcacttgcatcatgaaaaaaacacaagattggaaaaaggaatgtaatatgtttgaagtttttctttctagatcttaaaat

SEQ ID NO: 4961 - DNA, 130 bp, Glycine max
  Clone ID: LIB3028-005-Q1-B1-F1
attcgttttaattattttctattttttcacctttgtaaaatattacgtgtaaacatgtatcatacatctaattcaagttcttatgatgttaataatacgtggctgggccacagatttccttttagataaa

SEQ ID NO: 4962 - DNA, 117 bp, Glycine max
  Clone ID: LIB3028-005-Q1-B1-G10
atgatacagtctatcaaatggacaataaaaggttcagaattagatagttatcctacgtttttattggggatgtagcaaatagtatacttaatttaggccagacttttttaagttaaa

SEQ ID NO: 4963 - DNA, 235 bp, Glycine max
  unsure at all n locations
  Clone ID: LIB3028-005-Q1-B1-H3
tacgtaagatcggaaattcggtccaaccaaggaacccatgggaaaccccttcaagaaaatcaccaaccgggttaaggcaccaaaaattaaaaccagcccggaaccaaaaaattacaaggcggcaacggtaccttcccggaacaaggttccttgccaaaacttggtaaaggtgattaattccttgctttccntgtgtaaaaaaaaaaaannnaaaaccacaaaaacaaaaaaggac

SEQ ID NO: 4964 - DNA, 208 bp, Glycine max
  Clone ID: LIB3028-005-Q1-B1-H8
tattccttcaacggcacagctgatatctagcttattctgttcaacagtcaatttactgtcatagatgtcatcgatgtgtgtctaaaactaaggcgccactgcagggcagccgcagactactgaactcgtcgacccaggaaataaatccgggagcggtatctgcacgcctatgcagcgttcactagaatcagtcctattacagcttgcg

SEQ ID NO: 4965 - DNA, 103 bp, Glycine max
  Clone ID: LIB3028-006-Q1-B1-B9
ttttgttatcaaaacggtcctttaaataacatcaaatttacccttgaacgacaaaaaaaaaaaaaaaaaataaacaacaaaaaaaaaagaaacaacaacagaa

SEQ ID NO: 4966 - DNA, 233 bp, Glycine max
  Clone ID: LIB3028-006-Q1-B1-C7
ctcgagccgattatgacagaaaggctctagacaatacgcttcgtgcattctgtaaatcctgatctttgtgctccatgtttctattgcagctttatccaattccttttagtgagtttttgtatgttgttatataacctcacttgtttttttcttatgtactttggatggcaaccatggttcccattatatacgcaagagtatattatttgaaattgaggcatgatcaataatta

SEQ ID NO: 4967 - DNA, 282 bp, Glycine max
  Clone ID: LIB3028-006-Q1-B1-D10
cgcgtaaatacggtcggaattcggctcgatctctttgttatatttgttacttatattttcttcgttcagcatggactctccgaagcggcaggggcagaagtttctggtggcggtgacggcggtggctgcggtggtggtaaagctgcttaggcggctgcatcggacgctggtggtgagggagcactggaggatgtatctgcagtcgccgaataatcttctgagcatcataggcagcatccagctgccgtttaggaagaataacatgggtgaggaggattgcgg

SEQ ID NO: 4968 - DNA, 288 bp, Glycine max
  Clone ID: LIB3028-006-Q1-B1-D5
ggaatacattgataaagttgttcttgttttttcttcagcttgcaataaggctaagcttcttaaagtgaaagtgttaattgctgataaagagtatgagagtgctattgctgagtctggttttcttcttaaggaagatgaaaataatttagaggcattgttgttacgtggtcgtgcatattactatttagctgatcatgatgttgccacgaggcattttcagaaaggtctccgcctagatccagagcatagtgaactgaaaaaggcatattttggattgaaaaatctact

SEQ ID NO: 4969 - DNA, 303 bp, Glycine max
  Clone ID: LIB3028-006-Q1-B1-D9
acgcgtacgtaagctcggaattcagccccatctcggcgctatcattctaacctacaaaatgttctgccaccatcgacgctctcaacctgcatgcggcatactttccggtcgcagtgacagccgtggcagcagtggtggcaacaccgctcagccagatgcagcttacgtagtcggtcacggaccacttcctgacgcagctactctctgcgcacagtcttctcagcagcagtaacagcaaaccgctgccgtttaggaagaagaacaggggtcaggacgatcgggggaatggtcaggaaagaacac

SEQ ID NO: 4970 - DNA, 428 bp, Glycine max
  Clone ID: LIB3028-007-Q1-B1-A7
acgcgtacgtaaactcggcaaaggatttcaactttaggctccatctaaaaaaaatggctggtttggctagcaatcttcctcgaattgttatgataggtctgcaaattcattatgcagcacttgccatattcacaagagccgctctcttagatgggttgagtacaacggtgtttgtagtatacaggcaaggcatagccactttggctttggcgcctatatttttctctcctaagaggagacaatcagtgaaagattctttgggattcaggagcttctttttgatgtttgtgaccgctcttgttggagtcacggcaaatcagaatgcatacttcaaaggattattttatgcatcttctactgcagctaccgctatgagtaatctgataccggcattaacgtgtgtaattgcagcaattgccggatttgag

SEQ ID NO: 4971 - DNA, 354 bp, Glycine max
  unsure at all n locations
  Clone ID: LIB3028-007-Q1-B1-B3
attcggctcaaggggtgataaaactcatgtgtctactcgagtgatgggaacctatggttatgcagcaccagaatatgtcatgacgggacatcttacatcaagaagtgatgtgtatagtttcggagtggtactacttgagatgttgactggcagaagatctatggacaaaaaccgacccaacggtgaacacaaccttgtggaatgggctagaccacatctgggagagagaagaaggttctacagattgatagacccccgcttggaaggccacttttccataaaaggggctcanaaagccgcgcatctggctgctcactgccttagcatagatccaaaagcacgacccttgatgag

SEQ ID NO: 4972 - DNA, 362 bp, Glycine max
  Clone ID: LIB3028-007-Q1-B1-D3
ctcgagccgtttcgattagagggttgggctggtctgtacaaggggataattccatcaactgtcaaagctgcacctgctggtgctgtgacatttgttgcttatgaattgacatcagattggttagagtccactttcaattgattttttcccattttttcttcatgattagtgatcatattcttttttgaaatacaagttgattccctcgtagtataggaagaaagtgtgagggatatgctaattttttgtaatgatagtggtagttgataagattgaacttcctttaagatggaagatttgtccttgatgcttgcgtctgatttggaattcaaaatgtaaatttcaaaaatggtgcaaaagcc

SEQ ID NO: 4973 - DNA, 446 bp, Glycine max
  Clone ID: LIB3028-007-Q1-B1-E9
acgcctacgtaaactcggaattcggctccgaggaagttttcaatgctttttataagttgtggcctgagaagttccaaaacaaaacaaatggtgtgacaccaaggagatggatcaggttctgcaatccagatctgagtaaaataataaccgagtggataggcactgaggattgggtcctaaatactgaaaaattggcggagctacggaagtttgtagacaatgaggatctacaagtgcagtggagggaagcaaagaggagtaacaaagttaaagttgcagcattcatcagagaaaaagcagggtattctgtcagtcctgatgcaatgtttgacatccaggtgaagagaatccatgaatataagcgacaattattgaacatatttggaattgtttaccgatacaagaagatgaaagaaatgagtgctgcagaaaggaaagcaaatttt

SEQ ID NO: 4974 - DNA, 436 bp, Glycine max
  unsure at all n locations
  Clone ID: LIB3028-007-Q1-B1-F11
cctacgtaagatcngaaattcgctccgagtcatactatgctgtttattaaatctctcttcccctcctgatcttagatctcgtcgtctgacactactcttaagatcttctgccataaacctccaaacccttctcttatccattgctctctttggccactgagatcatagaccaactctgccatatacaatctttatgtgcttttacagctatatctgtttctgaatcatgccacacttttgaagtccaaacgcattcaactaggaatcaaggtacaaagtacctacacgcctccatattttttgtacttgcatgaaaaactatttgttttcaccttccaaggctgtatatacataaattcagcaactgttgtcctgtgctagaagcaaagtcaagaacaacttgatctttgttcaactggtggatcatttgggctgt

SEQ ID NO: 4975 - DNA, 376 bp, Glycine max
  Clone ID: LIB3028-007-Q1-B1-F3
attcggctcaaggccagaaagatttggattcaaggaattgcaaattgggtcaattctgaaaaatgtgtcatacacaacaaggataatctttttggttcaaagtttaagtttttgggagatatgtatgataagaagattccttccatttttctcctttgccatggaagtccggaacaagccctccattgatgattatgtcaatctttggaatgattgggagagttcagtggaacaattgtcatatgacaagtgctataagttctggatgtttatgttgaaacatttcagcacagaaactaagaaactttccaattgcttggtgaagctaccggcaacatcaggcaacaatgaaatagttttgttagataaaaacgat

SEQ ID NO: 4976 - DNA, 392 bp, Glycine max
  Clone ID: LIB3028-007-Q1-B1-F4
agcctacgtaacctcggaattcggctcaagggccaaagggcaaaaattttgagcacaatggcctcaacacaatgctttttgcacaaccacgccctcacaactccagctagagcttcaacacagcgcctatttgtgagcaccaaaccaaaccacattgtttgcaaggcagcacagaagcaggttactgtccaagagggtgaggacactactactggccttgtctctcgcaggttggccctcactgtgctcattggtgctgctgctgttggctctaaggtggcacctgctgatgcagcctatggagaagctgccaatgtgtttggaaaaccaaagacaaacacagacttcctttcatacaatgggaatggattcaaactctcaattccctcaaa

SEQ ID NO: 4977 - DNA, 387 bp, Glycine max
  Clone ID: LIB3028-007-Q1-B1-G11
tacgtaagactcgaaatccggtccaaggtgttggttgtgtgttgagatccatcaatgcaaggaagcgcggccgacggacaacccttggattcctagcctgaggacgatgacttgatggacgaggacagcgcccccgacaccgacgccgacgcttctccacctcaacctaagctcaattcagccatcagccccggagccacttcctcgcgcgccgcctcgaagaagaccatgggccgcggattccgccaggacactgatgccaatcgcaacactcgcatctccggcaccgacttcgactctctcaccgccgacggcagccctggccctcacagatcactgagggatggaatatgctggtcaccggcgtgcacgaggaagcgccagatg

SEQ ID NO: 4978 - DNA, 428 bp, Glycine max
  Clone ID: LIB3028-007-Q1-B1-G12
acgggtacgtaaactcggaaatcggctcgagacgagagaatgcaattgcaactcttcagtatcgtgaaacctccttaagtagtggcagtatgccatcatgccctccaggatgccaaatttcacgtggtgtcaagcatgtagatcatccccaacaacaggtgcaccatatacctaacatgggtgatgcctcttacaagacatcggaaatgcacacaacggatgtcatcccagcagcgcccatcccttctgagacgggaaagtcaaggctggccaggcgaccaaaggaaccaaagtcagctccacctaataaaacgacttcagaaccctcaaaaaaagtctcgaatgagagtgaagacttgaataatatgtttggcaaggcagatgagtggaagagtggtcaggaaatggtcaatggaggtgatgatctt

SEQ ID NO: 4979 - DNA, 382 bp, Glycine max
  Clone ID: LIB3028-007-Q1-B1-G4
cggaattcggctcaaggcaagtacccggagaataacgtttggcaacatgaggtcattcgtaagcaattcgatgggaggtctcatgggcggaagcaaccttgcttcttgggtcgtcgccggaaccctagcctactttctctggattaaaccctcccaagacttcaagcgtcaacaacaggagaaggccactcttgccgccgctgagtctgattcttatcgtaaacccattcccgaccctcacgttacgggtttgatatatggaaacatgaacacggacaaagcaaccagtccagaggattgattgattagcattcatgtgagtgtgttgccttacatctactcagttctacacaaatacaccatccccagagttaatgaagat

SEQ ID NO: 4980 - DNA, 362 bp, Glycine max
  Clone ID: LIB3028-007-Q1-B1-G5
ctcacaacagcagctgcagcagcaatggctcccaaacgaggtggaaaggctccggctcttgccgctaagaagaagcctgagaaggtcacgaatccgttgttcgagaagcgtccgaagcagttcggaatcggaggggcgttgcctccgaagagagacttgactaggttcgtgaagtggccaaagaatgttcaaattcagaggaagaagaggattctgaagcagaggttgaaggttcccccagctttgaaccagtttaccaaaactcttgacaaaaacctagcagcaagtctgttcaagttgcttctgaagtacaggcccgaggacaaagctgaaaagaatgagagggtcttgaaaatggctca

SEQ ID NO: 4981 - DNA, 166 bp, Glycine max
  Clone ID: LIB3028-007-Q1-B1-H3
ctcgagccggctcgagctacttcagcttcaactaacgtattgctttttatagataaatgtctgtgactttgtgtaaagtgttgtgccagtggatatagatttggcttaggctttaggaacacatggatggatcgtgcaaatgcgatgaagtgatttgttttaagaa

SEQ ID NO: 4982 - DNA, 378 bp, Glycine max
  unsure at all n locations
  Clone ID: LIB3028-007-Q1-B1-H4
gaattcggctcaagaaacactcataacacaaaccacaaaccaaagctcacccttgatttaaaaaatggaaccagcttcttcaatggttctctcatcccaatccttggctggaaaggccttaaacctgggccaatcaccccaaaaagtgggaagggtgagcatgaggaagaccgtcaccaagcaagtctcctcangaagcccatggtacggcccagaccgagtcaagtacttgggcccattctctggcgagcccccgtcctacctaaccggtgagttcccaggcgactacggctgggacactgctgggctttccgcagacccagaaaccttcgccaagaaccgtgaactcgaagtgatccactccaggtgggccatgct

SEQ ID NO: 4983 - DNA, 202 bp, Glycine max
  Clone ID: LIB3028-008-Q1-B1-A1
tatagaagactatgacgtcggatccacgcgtacgttaaacccgaattccggtccaacccaatttttccaccttcctccccgcctagccagccccaagaaaattaggatctgcttcagatttaatgtttcccctgtcccaaatcacgagtcaattgagtttgattttgtggatgaaaagcatagatagggcttttgcaaaact

SEQ ID NO: 4984 - DNA, 303 bp, Glycine max
  Clone ID: LIB3028-008-Q1-B1-A4
accggattgtgggtgctgcgttggtggagatggacggtgccgtcgttaaacaagagcacacggcgaggctgttgattcactccatttcccccaattgccaattcgacacattcctttgccacaacaacaacaataatgaatattgaatcccttgttacgtctttggaagtggttcgaataattaattcaataatgaagtactagtgcattttaatcaaatcctttacatatttaattggactgcaccagcttcaagtaattaatatatctggaaggctgaggatatgcttcaatttggctttg

SEQ ID NO: 4985 - DNA, 292 bp, Glycine max
  Clone ID: LIB3028-008-Q1-B1-B2
cccgggattcatatgggtctaactactgttaagcttgttctagctcaattggtgcattgttttaattgggtgcttccattggacatgtctcctgatgagttagacatgaatgagatatttggactcacaacgccaagaagtaagcatttgctagctacaccagtttatcgactagttgattaagttaagagatcgaggttaataatgcgcagtaaggtttatttacatatatttgtagtttgtttaaatttcaatgagtcatgtgaaattaaaattaacaatttttctaaaa

SEQ ID NO: 4986 - DNA, 359 bp, Glycine max
  Clone ID: LIB3028-008-Q1-B1-D11
gctggcccaaggttcgtggtgttgctatgaaccctgttgagcatccccacggaggaggtaaccaccagcatatcggtcatgctagtactgtcaggcgtgatgctcctcctggacagaaggttggtctcattgccgcaaggaggactggtcgtcttaggggacaagctgctgcaactgctgctaaggctgataaggcttaaatagaacgttgttagggttattttatttgattgcatgtttttcagttttgtttttattttttctgatagtttgtttgttaaactatttgggcacccttttgagaaccattttcttcccaacatatggagttttcaatagacggtcttctattatttgtt

SEQ ID NO: 4987 - DNA, 436 bp, Glycine max
  Clone ID: LIB3028-008-Q1-B1-D2
cacgcgtacgtaaactcggaattcactggtcgatccgctccaacagtcattacatgaacacatacaggtggaaggtggttagatcctgaagtttctcccagtcatttcttctttgttcagtttcttacggatggccgaacactagtgttggttgtttgcagcctttgctatgggcacttgagtggaatttgatcagttactttatcaaaattttgatgtgctgaataagttgcaactgccgagtgctaattctattatatagtcttaatatgatggctcctcttgtattggcgttttattaggagcattctttccttccttttttttttggtccctgcggtgagatttgacttctctcctaaactaactttggaagaagatagatggccaccaccagctgaacaaaggctagccgtttcgttgcaaatatattttt

SEQ ID NO: 4988 - DNA, 261 bp, Glycine max
  Clone ID: LIB3028-008-Q1-B1-E6
gaaatttatatattttgtaatggcccaatcgcgtataacatagcagagaattgttgtatctttagtattattatccccacccatcctattacaagttccttgggggtgggggatgtggcagttaatgtatacagcttagctttatatgttactctaatatgtattatatgtaggttttatcaaattttttgtcggattttcaagattgtctccgtgacttgtcgaataaaaacattttatggatagctttccttgtgaaaa

SEQ ID NO: 4989 - DNA, 429 bp, Glycine max
  unsure at all n locations
  Clone ID: LIB3028-008-Q1-B1-F3
acgcgtacgtaagaccggaaattcgctcgagatttcnggagctcgttggtgcaacgctgaatgcttttttttctttttgtgtgatagattttgcaagttgcgtgtgtgtgagagtgagtgagtgcagaagatgtggccattcagcagaaaagggtcttctgggttttcatcatcatccactgcagagcaagtcactgaaggaattgatggaactggtctcactgccattgtcacaggggcatccagtggtattggaactgagacttcacgtgttcttgctttgcgcggtgtccatgtgattatgggtgtgagaaatatgcttgctgctaaagatgtcaaagaaaaaatacttaaggagatttcctccgctaaagttgatgccatggagttagatctcggttcgatggagtctgtcaagaaatttgcatc

SEQ ID NO: 4990 - DNA, 95 bp, Glycine max
  Clone ID: LIB3028-008-Q1-B1-F4
cactgatagctggcatggcaaagtgcaaactataataaatcatcatcttatgtaaacgatttccattacagcaagggttgtccttaaaatttcac

SEQ ID NO: 4991 - DNA, 256 bp, Glycine max
  Clone ID: LIB3028-008-Q1-B1-G11
ctcaagattcgaggatcgagatttgccagctccccgtgggtgatgggattaccctgtgccgccgcatcatctgatcattttctcttcatctagatttttcatgacagatattcctttcattaaaacaggttgcgtgaatggtggagttctcaaatgttctactgtcttttctagatctttgtgtgtttcttgtcacgctagaaatttagctgaaaggatacaaatcaacatttatcttatttatctacttgctaaa

SEQ ID NO: 4992 - DNA, 408 bp, Glycine max
  Clone ID: LIB3028-008-Q1-B1-H3
acgcctacgtaagatcggaattcggctcaaggctttggggagatgatgatcaatttggtccctacagtagcaagagtgtcccttgcagatgcaactgcctataagaaattcccttctggagccactgccaatgttgctgttggaatttgtagactaagaggctcagcagctttcattggcaaggtgggaaatgatgaatttggacatctgttatctgatattctgaaacaaaatggtgttgacaattctggcctgctctttgatgatcatgcaaggacagcgttgggaatttatgctcttaagagtaatggagaacctgaattcatgttttaccgaaatccaagttctgatgtgctccttcgtcctgatgaaattgatatggacctcataaagaaagcacaatatttc

SEQ ID NO: 4993 - DNA, 417 bp, Glycine max
  Clone ID: LIB3028-008-Q1-B1-H6
caaaaagaaaaagaaaaaaaatatgaagttcgctataaacaacatattgtcccctttatttcttcttgactttggttttgcacaacagggggatcttgacatatcaagatttggaggaaaaccaaatacaaatataggccaggctttcttaagtgcctggactcaagcatgtgcatcaccaactgctgtcaaaattgtgattccagctggcacataccaaatgggtgcagttgatgtcaaaggtccttgcaaggctcctattgaggttcaagttgatggaacaattcaagcacctgcaaacccaactgaccttaaggcggctcatcaatggtttgttgttcaatatgttaactctttcaacctgtcgggtaaaggtgtttttgatggtcaaggggcaactgcttggaaacaaaatga

SEQ ID NO: 4994 - DNA, 393 bp, Glycine max
  Clone ID: LIB3028-009-Q1-B1-A11
acgcacgcgtacgtaaactcgggatcaaggccaaaacaataagtagtgagaagaagggagagaatggaggaaaaggcaaaagctgagcagaagaagataggtatgaccgagacttggttgaagaagcaccgtcttctttacaatggagccactagacaccctcttattattagcattcgcgatggcaccatcaacactgcttccttcaaaacatggctcgcacaggattacttgttcgttcgggcgtttgtcccatttgtggctagtgtgctgataaaagcgtggaaggaatcagattgcagtggtgacatggaagtcatattggggggcatggcttctctggaggatgagatttcatggttcaagacagaagccaacaagtggggtaattca

SEQ ID NO: 4995 - DNA, 397 bp, Glycine max
  Clone ID: LIB3028-009-Q1-B1-A2
aattcagctcgagggaactttgtaaaagcataaaccctgatgatgccgtggcgtatggtgcggaggttcatgccgccattttgagtggcgaatgagacaataaggtggacgagttgttgctgctggctgtgatgccgcttattcctgggattgagaccgatgctggtgaaatgtcagtgttgattcccaagaacaccatgatccccaccaagagggagagcgtcttctccactttttctgataatcaaacaagtgttttgatcaaagtgttcgagggggaccatgcaaagacagaggataacttccttcttgggaagtttgagctttccggtttcactccatcgccaacgtgagttccacaaatcaatgtggggtttgatcttggtgtttatggcat

SEQ ID NO: 4996 - DNA, 188 bp, Glycine max
  Clone ID: LIB3028-009-Q1-B1-A4
cgtcgaatgcccgcgtaggcaagctaggaattcagctcgaggtgacaattgtttctgaaaacagttttatgtatcctatttttcagattcttgctggtcaagcagcatgtatggcttacctagaatatggagtgcatgaatttgtttcaaatgttggcataatttaaatcaatatgaactattgtgag

SEQ ID NO: 4997 - DNA, 474 bp, Glycine max
  Clone ID: LIB3028-009-Q1-B1-A6
agagctaagacgtcgcaggcccgcgtacgtaagctacggaattcggctcggaaagaatggcacgcatcaaagaggatccatctctgaaacatattttggaggagatagagactggcggtcctgctgctatgatgaggtactggaataatgaggaggttttgcagaagttgggacaagccatgggtcttgccaattcgggagatgcaggtgcctctgctgaaaattctggggcagatgagaccgaagatttgggaaatgaagatgaatcaattgttcatcatactgctagtgttggtgatgtggagggcttgaaaaatgcactagcctctggtgctgacaaggatgaagaagattcagagggaagaactgctttgcattttgcctgtggatatggcgaggtaaaatgtgctcaagttctcctcgaggctggagcaaaagtggatgctttggataagaataagaacactgctctcc

SEQ ID NO: 4998 - DNA, 372 bp, Glycine max
  Clone ID: LIB3028-009-Q1-B1-B2
cgtcgcatgcccgcgtaggcaagctaggaattcagctcgagtaaatataaccagctcttgagaattgaggaggagcttggtgctgaagcagtgtacgccggagctaacttccgtacccccgttgaaccctactaaagttttcaagtggaaaaaacctggagatccacacgagtttgagcattgagatttgggtgcgcggtttttggtgtgatatataagttgatagttggaacattagtcttggtatgataaagaccttgccaataatttgagttctgattcacagagctaggacagttatgtcttaagactttgaaaggtgtttaatgatatttagctttaatacttgaagcctacttacagtttatttcc

SEQ ID NO: 4999 - DNA, 439 bp, Glycine max
  Clone ID: LIB3028-009-Q1-B1-B4
acgtcgcttgcccgcgtgcctaagctaggaattcagctcgaggtggagaaaagcagtcacctcccgccacgaaaatttctttggctctgtgctttgagtccgagtctctcccacagcgacaccatccatcttctttcacattttccactacgttagggttcgtcttcatttcgaattgaaggattcaacaacttagcaaaccacgccatggcaactctgcaatctctgccaccttctttccgtccatcaatcccacccccaaattcccactctttcccagccactccctttaactattcccccaaattgattgcctcaaagggtgtcagcgttaccctcaggaactctatcacttctcccagggtttcggtttccaattcggagtatagtccccaatttgcggaaaatctcggtgacgttacaattttccacgctgccg

SEQ ID NO: 5000 - DNA, 388 bp, Glycine max
  Clone ID: LIB3028-009-Q1-B1-C1
cgtaggtaagctaggaattcgactcgagctgaactctttctctctctctcagtctcaccactgaaattctgaacttggatgcttccattccctctctctttccgttcccaaaattattattccatattcccgatttgcccttgatggggaaaggaggcggctgcgttcccagcaagaagaagcccccgccggtcgccgacgatgctcccgctcccacgccgccgccgatctcgcctccggataacgcccacgcccgcaaacccgacgctccagcgcaagtagcgcgtgaagcagcgtcgtcgtcgtcgtcgcttccgggcggtgcgagattgaaggtcttcgtcgtgttctattcgatgtacggacacgtggaggggctggcaaaaag

SEQ ID NO: 5001 - DNA, 301 bp, Glycine max
  Clone ID: LIB3028-009-Q1-B1-D10
gttaaataattgaagtctcaacactaatgtaggttattggtgttgtttattttaagtttttctttttttcaagaacacacaactagatatttgattttcatgatcataaattttcttagcttgaaggatgggaataatttccgatagttgtttattaattttggattatttagcaatccaattttcatttcaattcaattcatggactatgtattttgagcgttcccgatcatggagaaagtaggatatagcctgataaacattccatttaacaaaacatgcatgggacattcaaacatgt

SEQ ID NO: 5002 - DNA, 413 bp, Glycine max
  Clone ID: LIB3028-009-Q1-B1-D2
gtgaggctatagaggcgctctgacgtcgcatgcccgcgtgcgcaagctaggaattcagctcgagaagaggtgccggagcaagtttcgtcacgccggaacgatgaccggcggcggatccacggggaggttgccgacgtggaaggagagagagaacaacaagaggagagagagaagacgaagagcgattgcagctaagatctacactggccttcgagcccaggggaactacaagcgtccagagcactgcgacaacaacgaggtcctgaaagctctctgcgccgaagctggctggatcgtggaagaagatggcacaacttatcgaaagggatgtcagagacccacgagtgagattggaggaacaccactgaacttaagcgcgtgttcttccattcaggcaagtccacaatcctcgt

SEQ ID NO: 5003 - DNA, 388 bp, Glycine max
  Clone ID: LIB3028-009-Q1-B1-D3
aattcagctcgagtgggaatcacggttgttacttcctcacaacgtcctgctttaataccatttcattccatggaactgcggctgattgatggtgaaggtaattggaagcttcgattgatcaagcagtgagttcactaaaacagtgttgctgcatggacttggtataccatttgagatgttgtcgagtctatcacaagctggctgtttgcgagcataaattaggtttgccaacaaaggtcaatcctatatgcttttattttaagttttccatattctccaagattcaatgtttactaagggactaacaaacagctgaaacagccaaaattgttgataataagttcgagcacacaaccattgcataaactctgcagtgtatacgtgggga

SEQ ID NO: 5004 - DNA, 320 bp, Glycine max
  unsure at all n locations
  Clone ID: LIB3028-009-Q1-B1-D4
gcgtgcgcaagctaggaattcagctcganngtattgagaactaagaaggacaagcaaatggcttcctcaatgatctcttccccacctgttaccactgtcaaccgtgccggtgccggcatggttgctccattcactggcctcaagtccatggctggcttccccaccaggaagaccatcaatgacattacctccattgctagcaacggtggaagagtgcaatgcatgcaggtgtggccaccagttggcaagaagaagtttgagactctttcctacctgccagaccttgatgatgcacaattggcacaggaagtanaatacct

SEQ ID NO: 5005 - DNA, 267 bp, Glycine max
  Clone ID: LIB3028-009-Q1-B1-E11
cattgattggtgatgatttgtaagctccaatatagatgcaaacttagacaagtggggtggatttgttaattcatgtttcttgttgcttacatttttaattttcctcttttgttttttgagctgcttgtagagttggctttagagatttgttacatatcgggaagccatggtgtactttgaagcaagattgtatgtatgggtagagaacctctactgatatatataaatcgcttcttttgcatacagaaaggatttccaacttgtgta

SEQ ID NO: 5006 - DNA, 461 bp, Glycine max
  Clone ID: LIB3028-009-Q1-B1-E3
gcgtaggcaagctaggaattcagctcgaggcatattccaattcgcaattcccaattcgaaacccttattcctttcaaagaagcaaattgagtgatcgtgatggcaccaaaggcagagaagaagccagcggagaagaagcccgcggaggagaagaagtcgacggtgggagacaaggctccggcggagaagaagccaaaggccggaaagaagcttccgaaggagggaggcgccggcggcgaagggaagaagaagaagagaaacaagaagagcgtggagacatacaagatctacatcttcaaggttctgaagcatgtccaccctgacattggtatctcaagcaaggccatgggaatcatgaacagcttcatcaacgacatcttcgagaagcttgcccaggaatcttctagacttgcccgttacaacaagaagcccagcatcacttcaaaggaaattcagaccgc

SEQ ID NO: 5007 - DNA, 473 bp, Glycine max
  Clone ID: LIB3028-009-Q1-B1-E4
tagaagaccttgacgtcgaatgcccgcgtacgtaagctaggaattcagctcgagctcgagccgatttccctcatggagtttcaaaaacctctatggctattcttgcttctcctcactctcctctcaagctcccaagccaacaaattcaacgttggtggaagcaaagggtgggttccaaacccttccgagagttacaacaattgggctggaagaaaccgattccaaatcaatgacacaatagttttcaagtacaataagggttcggattcggtgttggaagtgaagaaggaagattacgacaagtgcaacaagaccaacccaatcaaaaagtttgaaaacggtgacactgaattcaagtttgatcgatcaggaccattctacttcattagtggaaaagatgggaactgtgaaaagggtcaaaaattaatcgttgttgttttgaccccaagaacacaacaacaccattaacacca

SEQ ID NO: 5008 - DNA, 379 bp, Glycine max
  Clone ID: LIB3028-009-Q1-B1-F1
aattcaactcgaggacctgtatgaccagtatggtgaagatgcccttaaagaaggaatggagggaggaggctcgtttcataatccatttgatatatttgaatcattttttggtggagcaagctttggtggtggtggtagttcccgacgtagaatacagaagcatggtgaagatgtggtgcattctttaaaggtttccttggaggacgtctataacggcacaacaaagaaactatctctttctagaaacgtattctgctcaaaatgtaaagggaaaggttcaaaaagtggaacagctggtacgtgttttggatgccaaggcactggtatgaaaattacaagaaggcacattggactacgcatgattcaacaaatgcaacat

SEQ ID NO: 5009 - DNA, 433 bp, Glycine max
  Clone ID: LIB3028-009-Q1-B1-F2
agctaggtattcagctcgagctcgtgcatcttctggtgttaccctacaatttggtgatactgaaacgcagacaatagcagcaggaacttcatccccatctaatcttgaatctgatgatccttttgctgattggcctccacgtcctaatggctcagtatcaggtggatctggaatatccaacaatggtactttaggaatgccactgaacaaagttgggtttaattcaatgagaagcacttcaagcaatatgggtccccaaactagcaacagttggcctgttaattcccaaagttctgcagagtccattagtttgaactcaaggaatcctatttcaacaatgggtagcctgaatagtggtggccttggacaacagaaatctcttgggtttgtaaaacaaggccaagctttcccagcatcaattgtttcatataat

SEQ ID NO: 5010 - DNA, 195 bp, Glycine max
  Clone ID: LIB3028-009-Q1-B1-G2
gctaggaattcagctcgaggtttgattgatatgtcgcatagctacttcatatgtgactacttgttgtactcgtatttaggatgatatgaaactgaattttatcttgtgccttatcattaaggaatatcattgtgttccaattaaattgaatgtcaaatcaatgaaatgagggggaaaaacattggcttctgaaaa

SEQ ID NO: 5011 - DNA, 385 bp, Glycine max
  Clone ID: LIB3028-009-Q1-B1-G3
gcgtaggtcagctaggaattcaactcgaggcttaagaagttacctacttatagcaagagaatctagctctattggttgtgtaaggtaaaaaaaaaaaacgcataaccatgtcaaccaaattgattgaaacaagccttagccttatggtatggcttgtaattgcaacatcagcaatagcacaatctgataacccccaatttcttgacacagaaggccaccctcttgaccctggcagagattactacatcacaccaccggtaacagacattggaggccgtgccactatattagacaacggcacatgccctttatttgtaggtcaagagaacacttttgtaaaaaagacctttgccgttttcttcaccccttttgcaaaggaaaatga

SEQ ID NO: 5012 - DNA, 353 bp, Glycine max
  Clone ID: LIB3028-009-Q1-B1-G4
cgtcctagcccgcgtaggcaagctaggaattcagctcgagctcgagccgaatcggctcgaggttccttctccttgtgatcttcttcaaccttcagagtgagaaaacacattcagaaaccacgtttctctcttcttcttcttcttcttctttttcttctctcgaggtcattattaagtattcaccatggaggcaccatctcccaccaaacccaacgacccaacagaaccttccaacacttccaccacccttagtctggaggccggcccggcccaagcgagcccactccgaaaaatgtttgccgtggcgtccatcgccgccggcatacagttcgggtgggctctccagctctctc

SEQ ID NO: 5013 - DNA, 198 bp, Glycine max
  Clone ID: LIB3028-009-Q1-B1-G5
gtatcaaatttcagtcacatattggctgtgtacatagggttatattattgatgcactgtatttgtattcaaattccaattccaaatggtgaacatatttgattgctgttagtttcccaggttatgtagactatgtgacaatgcagcattatttggatttgcccgaaagaaaaaaaaaagaaggaaaaaaaaaagtaat

SEQ ID NO: 5014 - DNA, 461 bp, Glycine max
  Clone ID: LIB3028-009-Q1-B1-H1
cgtcgcatgcccgcgtaggtaagctaggaattcgactcgagtttgacatttctattgaaggcacgcaaatatattctctgaaaccgggttggaacaagcagaatgatcaagtatttgttgaggcgctagtgtttcttacaaatgattcagtatcaatctgtttccacagcactggtcatggggatccagcaatcctttctattgagattcagcaaattgatgacaaggcttattattttggcccctggtggagtcaagggataatacttagaacagttaaaagactgagttgtggttttgggcagtcaaagtttgatgtagattatggaggggattccaggggaggggaccgattttggcaacggattaaaacttttggcgatgaatctgatcaacctagatcagttgaaacaagaatcaaacaagcttcacatccaccaaacttctatccagaaaccctt

SEQ ID NO: 5015 - DNA, 406 bp, Glycine max
  Clone ID: LIB3028-009-Q1-B1-H2
tcgtaggccagctaggaattcgactcgagaaaggaaccaaccactcttttctttcaccgatcatacatacaatgtcgacttacagagacgaggatccccgtcttcatgacatcaaaactaagattcgtgttgtccctaatttccccaaacctggaattgaagctcggggtttcatttttggttctcccattgctctggcaataggagcaaagtttgtaccattgaggaaaccaaaaaaaattgcctggcaaagttatttctcaagagtatattctggaatatggaagagactgtcttgagatgcatgttggggccgttgaacctggtgagcgtgctttagtggttgatgatttgattgccactggtggaactctcggtgcagccatggacttactaaagcaattgg

SEQ ID NO: 5016 - DNA, 108 bp, Glycine max
  Clone ID: LIB3028-009-Q1-B1-H8
taagcaagggcctccgatcgaggttatcaagatgtgaattaattccggtccggtaccagcatgcatacaatctttcgctaaactgagtcattatagaacgtggattgt

SEQ ID NO: 5017 - DNA, 135 bp, Glycine max
  Clone ID: LIB3028-010-Q1-B1-A1
gtccgtctcaatgagagaaactctctctccaaaaaccccaatgcacgttttgcaatccaactcgacaatgggcaacagcaacctccctcgaagaatcatcaagggaacgcaacgtttgctcaatgagccaacacc

SEQ ID NO: 5018 - DNA, 407 bp, Glycine max
  Clone ID: LIB3028-010-Q1-B1-A2
cgtacctaagctaggaattcagctcgagctatcttgcctctcttcttctgctactgctgctcaacccacacaccaccctgggagcgcagaacctcatgctaccctaccataacggcgccctcctcaaaggaaccattaccgttaacctcttatggtacggcagcttcaccccaatccaacgctccataatcctcgacttcattaactcgttaagttccaccgcgggggccccacttccctccgtagcatcgtggtggaagaccacggacaagtacagggggggatccactacaatcgtcctaaggaaacaaatcctagaacaaacttattccctcggaaactacctcaacggaacacaactagtctctctctcctcacgcttcgaccacctcaacgccatcaacgtc

SEQ ID NO: 5019 - DNA, 404 bp, Glycine max
  unsure at all n locations
  Clone ID: LIB3028-010-Q1-B1-A4
ttcagctcgagctttcaagcgcaggaatggaggtcgcaacaaacacggccgcggccacgtcaagttcattcgatgctccaactgcggcaaatgctgccctaaggacaaggctatcaagaggtttctggtgaggaacattgttgaacaggctgcagtcagagatgtgcaggaggcttgtgtctacgaacaatacacgcttccgaagctgtatgtgaagatgcagtattgtgtttcctgtgctatccactctcatgttgtgagggttcgatcccgcactgataggagaaagcgtgagcctccacagcgattcatcaagcgcanggatgatgcaccaaggcctggtcagcctggtcaagccccacgtcctgctggagtaagagctcctgcccgagcttaaaagaaaa

SEQ ID NO: 5020 - DNA, 414 bp, Glycine max
  Clone ID: LIB3028-010-Q1-B1-A7
gcgtaagtaagcacggcattcggctcgaggcagaaagcaggctcatcctagagttttaaaaatggcagcagcctcctccatggctctctcttccccatccttggctggcaaggccgtgaagctgggcccatcagcccccgaagtcgggagggtcagcatgaggaagaccgtcaccaagcaggcctcctccggaagcccatggtacggcccagaccgcgtcaagtacttgggcccattctctggcgagcccccgtcctacctcactggcgagttcccaggtgactacggctgggacactgctgggctttcggccgacccagaaaccttcgccagaaaccgtgagctcgaagtgatccactccaggtgggccatgctcggggccctgggctgcgtcttccccgaactggtgtcccg

SEQ ID NO: 5021 - DNA, 438 bp, Glycine max
  Clone ID: LIB3028-010-Q1-B1-B1
aattcagctcgagcatgcacacaatgtaatggacaaaaaaccatgcaactcatcatcccaagattcctaaattaaaaaaggaacaatggacaagggaaaaagacttgatcttgataaactatattgcaaatcacggtgaacgtgtttggaactccttagccaaagcttctggtctcaaacgaacgggaaagagttgtcgactccgttggctaaactaccttcgtcctgatgttagaagaggaaacattacacccgaggaacagcttttgatcatagaacttcatgcaaagtggggcaatacgtggtccaaaattgcaaagcatcttccaggaagaactgacaatgagattaagaacttctggagaacaaggattcaaaagcacattaagcaagctgagacttcacaacaacatggtaattcagagaataatgatcatc

SEQ ID NO: 5022 - DNA, 293 bp, Glycine max
  Clone ID: LIB3028-010-Q1-B1-B2
gcgtacctaagctaggaattcagctcgagcttttggcatccaaatagttgattaatttcagcgacttgtcttaggattttggacccctttttcgcttgtaactaggttgctctcatctcatggctttgtatcaaactatcctagttgtaacaaggatttggttttaatcttgaagggctgaatgtatttaattattactattatatttgcttactttgcaacttctgtttttgctttgaagattctcattttgtaatgttggaattagtattgatagatttataaattcggag

SEQ ID NO: 5023 - DNA, 321 bp, Glycine max
  Clone ID: LIB3028-010-Q1-B1-B3
agctaggaattcagctcgagccaacacatcatattcttggtggataacattcccataagggtgttcaagaatggtgagactattggcgttcctttcgcagagaagcaacccatgagaatttattctagcctgtggaacgctgatgactgggccaccagaggtggtttggtgaaaactgattggtccaaagcaccctttacagcctactagcgcaatttcaaagccacagagttcaccatcaattccttctctgatgctgcatggcagagcaacgagcttgatgcctatgggagaagaaaactgagatgggttcagaagtac

SEQ ID NO: 5024 - DNA, 403 bp, Glycine max
  Clone ID: LIB3028-010-Q1-B1-B4
aattcagctcgagcaatgcaatgctcgtgtcgttttggtgtcactgagtcagtctgagtaggaagaggaagccatgggcaacacatcctccatgctcacccaatacgacatcgaagaggttcagcaacattgcaaaaacgcttttacgcaacaggagatagtttctctgtaccaacgcttctgtcagctggatcgcaacaactgcggtttcatcccttccgatgaattcctctccattcccgaattcgccgtcaatcctctctctcagagtttgttgaggatgctggatgggttgaacttcaatgaatttgtggccttcttgtccgccttcagtccccgtgccactctccaccacaaaattgaattcattttcaaggtctatgacaccgattgcaatggaaaa

SEQ ID NO: 5025 - DNA, 420 bp, Glycine max
  Clone ID: LIB3028-010-Q1-B1-C1
gcgtgcctaagctaggaattcagctcgagcaattactactttctctctctttgtaacttgtaagcatggagtcctcaaagatctatgcttacctcttcctttgcatgctcttcctctcctccgccactcccattctcggttgtggctactgtggcaaaccccccaaaaagcacaagcctggtaaaacaccaaagacacccacagtacccgttgttaagccaccagtcacaatccctcccattgttaagccaccagtcacaatccctcccattgttaatccaccagtcacaatccctcccattgttaatccaccagtcacaatccctcccattgttaatccaccagtgacagttccacccgttgtgcttccaccaatagtgaagcccccgggttttctccctccaattcttaacccaccaa

SEQ ID NO: 5026 - DNA, 425 bp, Glycine max
  Clone ID: LIB3028-010-Q1-B1-C2
aagctaggaattcaggctcgagagcaacctcaccccatgcatttcttatgtgctcaatggtggcaaaaccgtgcctggcccttgctgcaatgggatcaagaccctctttaacctcgctcactccacaccagaccgccaaaccgtttgcaagtgcataaagaacgctgttagtgcgttccattatggcaagtccaatgtggaccgtgctgctgctcttcctaagcagtgtggggttaacattccttaccagatcagcccttccaccgactgtaccagagtgcagtgaggttaatgatatatggagcggtaactcgagaagagaaggatatacaatatatagctagtgtgtgaataagtggctggctatacgtacgccacacattacattaatgactggtggctgcttattattacatccatcaact

SEQ ID NO: 5027 - DNA, 398 bp, Glycine max
  Clone ID: LIB3028-010-Q1-B1-C3
cgtgcctaagctaggaattcagctcgagaaaatgaattattggagagagatagaaagaggctcaagagggagcttccaggaaggatacacagcgaatgactggcattcaagttagcttagctatgatgaatgaagaggagtatagatggtcaacgtttttggtaagcaagcaagaatcacaaattggaaccatgtttctcaaatgttttggcttcggcgctcggggacagtatccaacggtgatagaagacggcgctcggagacagtatccaacggtgatagaagagttgtgccatcgattttctctcgcagatctaaggaaatcaaccaacaatttcgatcaaaacacagcaattgatcgtggtacagtatataaaggttgtctccaacacaatgaa

SEQ ID NO: 5028 - DNA, 97 bp, Glycine max
  Clone ID: LIB3028-010-Q1-B1-C4
attagtcatttcaaaattttcctatttcgtgtatcaaatttgttcatatgggagaaaacaatggaaagtgtggcactttaactttcaccttatttca

SEQ ID NO: 5029 - DNA, 213 bp, Glycine max
  unsure at all n locations
  Clone ID: LIB3028-010-Q1-B1-D1
taagctaggaattcagctcgagtttctcactccctgtgtatgcngctgaggattccgaacgagtcgaccttcttcgtttcccgcaaagtttaagttaacacgggtaaggaaaaggtcacaacaacattgccgtcattggccatgtcgacccgggaaagtcaactagcactggtcacctgatctacaaactttggggtattgacaagcgtgtga

SEQ ID NO: 5030 - DNA, 402 bp, Glycine max
  unsure at all n locations
  Clone ID: LIB3028-010-Q1-B1-D2
cgtcgatgcacgcgtgcctaagctaggaattcagctcgagaacccttcttcctcagaacaacanagacggatacccctttccccaaaacccaaaaaccgcaaaaacagttctcaaccgtcccaaagcaaatgccaaaaaattcctttcatccgaaacaccgttgaccagaaacacccgagtttttatccataaaagtaccgtcttttgattcctgggcccctttttttctccttctcttttattgggcagaggaatgttgggtactggggtgaacttcgggcgcgctcgcggcgaagattgaatcgattctccggcgaaggctcgccggtcgcttcacaccatggagaatgacaagcctcgtaaggtccacagcgatgtcgccgcgtctcgctccgtcagag

SEQ ID NO: 5031 - DNA, 380 bp, Glycine max
  Clone ID: LIB3028-010-Q1-B1-D3
gcgtgcctaagctaggaattaagctcgagctcgagccgctattatcgttcttcttcttcactaagaatccaaaaaaaatgaacgatcttatgacgaaatccttcaccagctacgtggagctgaagaaggtcgcaatgaaagaagacgttgatttggaagccggtggtcctggtgattgcaaagtggaactgagctcttccacgacccacttggacacagacatgggcctcttcctagaagagggcgagaaagtgaaaggcgacatggggtccctccgagacatcctgggccggctccaacaaggcaacgaagagagcaagtccctccacaagcctgaaacccacaaaggcctcacaagcccgatcaaagctgaaatccct

SEQ ID NO: 5032 - DNA, 443 bp, Glycine max
  Clone ID: LIB3028-010-Q1-B1-E1
cgtcgaatgcccgcgtacctaagctaggaattcagctcgaggaatatctctccgcaatggaaactgtgtgtgaaaggattggtgtaacagaaaactgtacacaagagggattccaaaaccaagtgctgagaaaagggtgtcaaaatcttggcctcaaagttgactatgtgccaagaaactcctcagggaatcactactgtggctcatgtggttatggctgtccgaaaggagagaaacaagggactcaagctacatggcttgtagatgcagttgaaagagatgcagtaataataacaggatgcaaagctgagaggttcttgttggaaagcaacaggagtggaaatggcagaaagaagaaatgtttgggagtgatggcaaaagcattaaacagcatagtcacaatgaaattacaaattgacggccaagggacaatttctgcaagt

SEQ ID NO: 5033 - DNA, 112 bp, Glycine max
  Clone ID: LIB3028-010-Q1-B1-E12
ttttacgtgatcaactaaaaacatgtactctctgtttgtatgtatgccctaccaatgtgtctcttaatatcaatatcaaaaagagagtgttcaagttaatgtttggattcca

SEQ ID NO: 5034 - DNA, 387 bp, Glycine max
  Clone ID: LIB3028-010-Q1-B1-E2
gcgtgcctaagctaggaattcagctcgaggaagagtgttgaagaaactgttataagacttgaaaagttgcttcaagagttgcatgtatcaagctctaattctggaaaagagcatttgaaagcagcctgttctgacttggagaaaatacggaaactttggaaagaagctgaattcctgaaggcatcgtttagagcaaaagctgattctctgcaagagggggttgacagtggtcggacctacacaccagttggtgaagaggacgagtatataaaagggaaaagcagagaagaatgctaatgtaagggtggacaggagcacaagaaatgttggaaaatcacgtggattctggagcatcattggacgtcctgtcaccaaaaagcctggctt

SEQ ID NO: 5035 - DNA, 372 bp, Glycine max
  Clone ID: LIB3028-010-Q1-B1-E3
gcgtgcctaagctaggaattcagctcgagattcactttgcgcagttccctacctctcctttcaagatgcagatcttcgtcaagagtctcaccggaaagatcatcacccttgaggtggaaagctctgagaccatcgataacgtcaaggccaagatttaggacaaggaacgaattcccccggatcagcaacgtctcatcttcgccggcaatcagctcgaggactgccgtagcctcgccgattaaaacatccagaaggagtcaacccttcaccttgtccttcgtctccgtggtggcatgcagatcttcgtcaagactctcactgggagtaccataaccctataggtccaaagctctgacaccattgacaacgtcc

SEQ ID NO: 5036 - DNA, 374 bp, Glycine max
  Clone ID: LIB3028-010-Q1-B1-E4
cgtgcctaagctaggaattcagctcgagagcccatttatgtcttcaatgtagaaacttgatttggacaagctcaagagcattccatcagtgtcttgagctccaaatggagaagacctggatcctgacttttcaccttctcctcctcctgctctatccaaatgcagcagaaggggccattggtgttggtgttggtgttggtggcagaggtggcataggtgttggcattggcattgggggcagtgttaacaccccagggccctctggatcaaacctcaagagtgccttcacagcactccatgcatggcaatctgccatgaccgatgacccattgaagattctggatacctgggttggtcccaatgtgtgttcctac

SEQ ID NO: 5037 - DNA, 453 bp, Glycine max
  Clone ID: LIB3028-010-Q1-B1-E5
acgtcgcatgcccgcgtacgtaagcacggaattcggctggagtggaggtggcataatcgcttgtcatggatttgcaaagatctctcagatttggatcctccgaatctatcgcctttattattttctttaaccctttacttttcatctcaccatttattatttattacgcgtccttccttctctctccctttcccatctaaataaaacccaccattttccacttccatctacttgtgttctgttgtgtactttctattctcataagataactaactcactttgtgtgatagagttctcattctcatggctattaccggcgatattttccggcagagcataacggaaatgcttgcggagtccccttccggtgcgccagaacttcacgttctcgccgtcgatgacagcctcgttgatcgcaaggtgatcgaacggttgctgaaaatttcttcctgc

SEQ ID NO: 5038 - DNA, 399 bp, Glycine max
  unsure at all n locations
  Clone ID: LIB3028-010-Q1-B1-F1
acctaagctaggaattcagctcgaggtttgtaacccctctgctttggttatgctggattgtatacaaaggagagcatcatgttggtgagcacaagccggagcaccatggaggagaagagcacanagaggggttcctagacaagatcaaggacaagatccacggcgaagagggtggcgccaccgccgagggcgagaagaagaagaagaagaaggagaagaagaagcatgaacatggccatgacagcagcagcagcagtgacagtgattagattatctcccactgctgcatcacctatatatcttataaggtgtatgggaccatagtagtgagggctgtgtccttctctttttttcctacttgtcatttatatttatgagcgagagaaatagtgcgtgtat

SEQ ID NO: 5039 - DNA, 445 bp, Glycine max
  Clone ID: LIB3028-010-Q1-B1-F2
aagctaggaattcagctcgaggctttctcccctgaatctcaccactctccgatctttcattctcccctcttttctagctcccgtggagtctggaagcgttctcgagccttctcgctttccacgtgttttgcttttttccatttctctctctcccgtggagtttagaagtgtgcgttccggagccttttcgctttccatttctctctctcccgtgctttctagagttggtgctctgggaggagtaacgattcagcggttgaattgcgagaatggaaagcgttttagagagtgtcatgggggcacaaaaaaagttttatttttgttgataaagggttttactcagttgaaatgttgctgcttctgctcgctcttaaggattaaggtcctaatggtaattaaagagaccatgagttgatttcagatggggaacaactgaagatgggga

SEQ ID NO: 5040 - DNA, 417 bp, Glycine max
  Clone ID: LIB3028-010-Q1-B1-F3
cgtgcctaagctaggaattcagctcgagggctataatcacttttgttggagggaacgatcaagaagaaacagaacgatcaatggacatgatgtggcgagtgattaatcccaaattaggttccaatgtagttgctgtcaaaccttctgcttcattaattgccaatgtggtgtctgcgtggtccttcctcctctctactgtgagcaatttgaagctaaatacaaaaaattggcaaaattcaatatcctatttatctagtcttctagacaaggaagataggtctgtacgaattgctgctggtgaagcactggctctaatttttgaaattggagttatagataaattttctgccaagtcagacagtgcaagtgatacaacgcaagaagggagtacaccacttgaaagctacatatttttac

SEQ ID NO: 5041 - DNA, 164 bp, Glycine max
  Clone ID: LIB3028-010-Q1-B1-F4
gcgtgcctaagctaggaattcaggctcgagatttcaacgataaaaggtaggttttagctctaccaggtttcatgccatcaaccccctttccattttttttttctgtttttcttttcggcctgtctgtgcatatttgttaatttggtcggacaaaaatttttatc

SEQ ID NO: 5042 - DNA, 391 bp, Glycine max
  unsure at all n locations
  Clone ID: LIB3028-010-Q1-B1-G1
aagctaggaattcagctcgagaaatanacanagaaagagagaaagaaactcaaactcgttcgtttccttcctccaagaaataatgggttccgtttccaatttctgtttcgttcccctcctcctcctcctcctcacaaaatgctggttcctaacttcagcanaganaactacatagttcacatganacaccacganaagccttcggtttaccccacacacactgactggtacagcgccagtcttcaacaatctctcactctcaccactgccgattcagattccgattccaatccgttactctattcctacaccaccgcctacaacggtttcgccgcgtcnctcaacgacgaacaggcggaacagcttctcagatccgaggatgttctcggag

SEQ ID NO: 5043 - DNA, 424 bp, Glycine max
  Clone ID: LIB3028-010-Q1-B1-G3
cgtcgactgcccgcgtacctaagctaggaattcagctcgagcgaagatatgtttttctctttttttcctacggtgtggccaggctgttcactttagcgaaggatcaaaaaccctgtgaaagtgtgtttgtttggtcgagttgattgaattcgctggcagcttacagctatgatcatcaacaacgccccttttcctctatgattgattcgattcgattgaagtcgattccgtagagagtgagaaatcagatcacaataatcatcgatgggtaatttgttcgtgaagaagcccaaggtaacagacgttgataaagcaatcctcgcactcaagacccagagacgcaaactcgcccaatatcaacaaaagctagatgctgttattgaagcagaaaagcaagctgcacgagacttgattcgtgaaaaga

SEQ ID NO: 5044 - DNA, 440 bp, Glycine max
  unsure at all n locations
  Clone ID: LIB3028-010-Q1-B1-G4
cgtacctaagctaggaattcagctcgagccgcctcagagggctcttctcgttctcttttacattccaaagccaacaaaacaaaaaactcactaaccctaaccctacccccacccttttgaaatgaacttcaaaccctggctctctttcctcctcttggccctggccctggccatggtggctgaggcttctagtgttcatcatgaatatggcttccatgttaatgctgtggtccatgatctcattggagatgacaatgagatgttgctagattccgaatccaatcgccgaaccctcaccgggcgacaacggtacattagctatggtgccctaaatgccaacaatgtgccatgtggtaaccgtggaagattctactacaattgccagcagangggtcgtgccaacccttacaatcgtggttgcaccaaaatcacacattgtg

SEQ ID NO: 5045 - DNA, 426 bp, Glycine max
  Clone ID: LIB3028-010-Q1-B1-H1
cgtcaaagcccgcgtacctaagctaggaattcagctcgaggaagaaagaatacgcgcagagtggactttgacctcagcgccgtttgggtccgaaccaagacgcacacaggacggtgcgttcaacaaacctaccttggtgggccccacttttcccccgaaccgtagcttcagagtgatccctttcgcaccctctatataatagcgccctcgccactcgcctcgacgcgtgactctcgcgggtggacaacgaaatttctcagccaaagaacaaggatcagaatcgtttaatcaagttgaggaagatggcactagtctccggaggaagatcaacactgaaccctaacgcccctctttacattcccgccgcgttccgccaagtggaggatttttctccagaatggtggcagctggtgacgacactgacat

SEQ ID NO: 5046 - DNA, 415 bp, Glycine max
  Clone ID: LIB3028-010-Q1-B1-H2
agctaggaattcagctcgaggagacattacagtttgtattattgtagaagagagagggagagagatggagttgagcatgaaagtgttggtgaaagttgcttcgttgcttttcctattggaattcactgcaacagttgttgatgctcgcttcgatccaagttcattcatcactcagtttctccccaatgctgaagccaacaattactatgttaaatccacacaaaagcgtgctgtaacagctgtccttgcacaaaatcaatccctccacagtgtcgttgttcagatattggagaaacatgtcactctgcatgcaaaacttgtatttgcactcgctcaattcctccacagtgtcattgcagtgacataaccaacttctgttatgaaccttgcaactcctctgaaaacgaagctcact

SEQ ID NO: 5047 - DNA, 175 bp, Glycine max
  Clone ID: LIB3028-010-Q1-B1-H3
cgtcgactgcccgcgtgcctaagctaggaattcagctcgagaaatgctactagtcccttttggtggcattctatgatattatgtttttatgtattttggtgtatcactccttgggccttgtttgcctttaatgagagtggcttattaatatcaatatatcacctaccaaactaaa

SEQ ID NO: 5048 - DNA, 435 bp, Glycine max
  Clone ID: LIB3028-010-Q1-B1-H4
catgcacgcgctaggaattcagctcgagctctttttctctctctacactcaccaatggacgactctcacaacaggaagcgacttcgccaccactccccaaagcacccccgactttgttctaactcctccgacactcacccacttgactcgccccagtttcaactctcccgcgtcgacccggaccttctcaacatgctcaatgatgccgagaacgtcacggagcgtgaccctaccatgcagggtcttgactctgttattaagagtttcgaggaagaaatactttctccgcttccgaacccgaatctagcgtccgaagcagaggtgtttaatccgaacctagggtacttgttggaagcatccgacgacgagctagggttgccgccggcggtagcgcccggcgaggatgcgacaaatccccaaacacttgattcgggc

SEQ ID NO: 5049 - DNA, 433 bp, Glycine max
  unsure at all n locations
  Clone ID: LIB3028-011-Q1-B1-A1
cacgcgtacgtaagnccagaaatccgctccaaaaaatgggagacaaaaacaagtcaaatttttggtaaaggaaaggccaaaactaaaaattcaaaaaaatgagggattaaaaggagacaattttgtagggattaaaagtgaacatttccctatttataagaactaaaaacatatgtaactcaactttttatcaaaatgagaggggatgttatttctatggcaaaagtttatttttatagaaatttttaccattttaattgaattaatgtagaaaagtttgttgcatgcaaaaatatcatggggaaagaaacattcttttccactatgtttttttccttcccttccttctcattcgtataaaacttattcagaacaaaagcttattaagtgagacttcatganatactaatagtctagatcttacatcaaattt

SEQ ID NO: 5050 - DNA, 412 bp, Glycine max
  Clone ID: LIB3028-011-Q1-B1-A2
ctcgagccgaatcggctcgagcgaaccaatttggttcttctcttctctctatcgtcttcttcctctgttccattagggtttccttttctccctcggagcttccaattgaaatccaattcctcaatacctccacactttctcgttcggaaagctcgcgaattcgaaagacatcgacggctccacgtgatacgttttcttcctctctggttatcaatgttggctactagtgcagttgcatctttgcccgtattaccaccagtgagaagaggtggccaccacattgaacagaatgttgtttccacattgagctttccaagacgattactgacaactaataattcaatacctctgagtggtacacacttttcatttggcagaggagctcattctactcacacagcaactataatat

SEQ ID NO: 5051 - DNA, 415 bp, Glycine max
  Clone ID: LIB3028-011-Q1-B1-A4
ccaccaccacgccctctgcataaattctctttattccttcgttgctgccgccgccgccactagctaggtttcccctctcacctttctcagcttctcctcaccaccccaacatagtttcttatttttaagtgaaaaaaaccatcatcacgtcacccttggtaagacctatatatccttcactattcttccgacaaatgtttcagtgattcacactaatccacccctgcaactaaacaaaaaacatcctaaatatctgtcttattgttctttatatttttagtaaagaaaaaaaaagaagagaaaaccctattcactctgaaagtggcgaagatgagtttgggaaccgcggaggaggaatcgggttccgaaatcaacatcccggcggaaatccactggcacatgctggacaagtcaa

SEQ ID NO: 5052 - DNA, 395 bp, Glycine max
  Clone ID: LIB3028-011-Q1-B1-B1
ccagctccaaccgaatccggtccagcgttgcaattcgccttttccaaaagcaatcacattaacatcacgctgtccccgccgtcgttcaaccacggcaagaagcattcgaactccgccgtcatccgtttacggcaagactgagttcatgacatggatgtggatacgatcgtcacatcacgattttctcccctgaaggacgtctcttccaagtcgagtatgctttcaaggctgttaaggccgcaggaatcacctcacttggtgtccgctgaaaggattcgatttgtgttgttactcagaagaaggttccggataagcttttggacaacacaagtgttacacacctctttcccatcaccaagtaccttgggttattggccactggcatgacaactgaa

SEQ ID NO: 5053 - DNA, 383 bp, Glycine max
  Clone ID: LIB3028-011-Q1-B1-D1
tccaagggttgccttgtccggaaaacaacctcaactgattaacgttggaatctccaagggattggcgggttaaaaacttttaagggaataggaaaaaccaatggtgttggatgctgcccaacggaaccccgggattcaacttcctccaattggaattgttgcggctgtaaaatttgcaaatctttgtcactgttttcctgaatgggcagatgtaatagcagtttccacaagtgcatctttgcatttcattgatagagcagcaatgcccaaggatgtaattctatacacggatgacaatgaatggtctacttggaagaaattaagtgatagcgtgcttcacattgagcttcgcacatgggctgatatcatggtcatcgctccat

SEQ ID NO: 5054 - DNA, 249 bp, Glycine max
  Clone ID: LIB3028-011-Q1-B1-D4
caaaaagcaaagtagcagacctgcgtttactctgtttctcaatctgcacttaatgacagattcaccgcttgaggccatgcacgagccctaactcttgtcagccgtcgcagttcgcagttcgcacttctcacgcccggtcgcgctgttcatccacggggctactccgattattcacacagacgttctgaagtcgttcgttatggctggcaccacgttttctgctgcacgctagattgctgtgacgacttc

SEQ ID NO: 5055 - DNA, 441 bp, Glycine max
  Clone ID: LIB3028-011-Q1-B1-E1
gacgcgtacgtaagctaggaattcgggtcgagctcccaatttttcccaatcaaaacgacacacgcattccccccaaacgccgtcgttttccaaagcttcgcgcctttaaatccaatccaaattcccaacaatcaacaacggggtccctccaagtggtggagcctccctccccctccgccgccggccagattcgctttcggctcccttcctccgccgaactcctcgccaccgccgagctggatctcgaaaccaccaaaatgctgaaacgctccggccggcccccgccgccgacgccggagtcgctcaccgacaagatctaccacctccggggtgcgtttctgatggtggcggtgccgctcctcctcgtcacgctcgtgctctacgccatgccttccgcctcctccagcgagtccgtggaggactacgccctcacgcaaacgc

SEQ ID NO: 5056 - DNA, 430 bp, Glycine max
  Clone ID: LIB3028-011-Q1-B1-E3
ccgtacgtaagctcagaattcggctcgaagcgccgtctccgatttccgacaatgggcgaaccaaaataagcaaaaaaaaaaatttcgtacctgatggattgttcttccctgaactgaacgaggttctgacaagagagttggccgaggacggttactccggcgtggaagttaaggttacgccgatgcgcaccgaaatcataattagagccaccagaacccaagctgttctcggtgagaagggaaggagaataagggaacttacctctgtggttcagaagaggttcaagtttcccgagaacagtgtcgaactttatgctgaaaaggtcaacaataggggtctttgcgctattgctcaagctgagtctcttcgatacaagctccttggtggactcgctgtgcgcagggcctgctatggtgtttttgaggtttg

SEQ ID NO: 5057 - DNA, 397 bp, Glycine max
  unsure at all n locations
  Clone ID: LIB3028-011-Q1-B1-F1
gtacgtaagctcagaattcggctccaaggtggcaaattttggtcctgcaaaacctgttggaaaggaatttaacaaggtcctcaacaacaataaaaggaaaagaaggcatcctgctccctgagtggatttcaggtgtggctatcactgccaaagctgatgtctacagctatggaatgatgctttttgagtttgtgtcgggtaggaggaactccgaggcatcggaagatggccaagtgagattctttcctaccattgctgcaaacatgatgcaccaaggagggaatgtgctaagccttttggaccctaagttggaggaaaatgctgacattgaagaggtcactagagtcatcaaagtagcttcatggtgtgtccaagatgatgaatctcatangccttc

SEQ ID NO: 5058 - DNA, 405 bp, Glycine max
  Clone ID: LIB3028-011-Q1-B1-G4
ctcgagccgtccaaataaaaaaaaaaaaagaaaaaggaaggagataggaaagggttaattgaatccaaaaaaaagaagagaaaaacaaaatgggcagggtttggacttcgatgatagcattgttgctttgcctgatgacatcatcggttcggggcgaggacccttacatttactacacatggaacgtgacctacggcaccattgccccattgggtgtcccccaacagggtatcctcatcaatggtcagtttcccggccccgaaatcaactccaccagcaacaacaacgtggtcatcaatgtcttcaacaacctcgatgagcctctcttgttcacagggatggtgtccaacagaggaaaaactcttggcaagatggcacattgggtgcccagtgccctacccccca

SEQ ID NO: 5059 - DNA, 137 bp, Glycine max
  Clone ID: LIB3028-011-Q1-B1-H10
tgcattctaacaactatgaaagagtttacaaacctacacgatagccacactggtcaatttgtatcatgcaatgaattgtcgatgactttgatctgtacaatacttgcattaattgatgatatcaatgcaatttcata

SEQ ID NO: 5060 - DNA, 295 bp, Glycine max
  Clone ID: LIB3028-011-Q1-B1-H9
aaatataatgaagaccgaagttaatccgtctataaattaggatgaaggtccttttgtcaaaatctgaatggtttactcttctattccatctatgccagtagctggaggagatgctatgctctttaggtaccaaataacgtggttgataggatttacttgcatcttattttgggaatgttaatgataccaatgtcactagagctctatatatttttttgtctgatgaacaatactcaatatattttcaatcttgattaatgttgctcaataaatcaaggaaaatgaacagattcag

SEQ ID NO: 5061 - DNA, 333 bp, Glycine max
  unsure at all n locations
  Clone ID: LIB3028-012-Q1-B1-A1
cttctttctttgtgccattgatgtacccccaggtgcaggtgcaggagcaacaggttttctctcctccgcatcaatcgaaacgccctctctttgacacgattggtcacaattttcaggctccaaggttgccccttttggattcagggcaagaggtgtttggtangaggcagcaaacacagctgccattgtttcctcaccatatgcaacaacaacaacaacaacaacaatcaatgggtttgccatctgctaaacagcagaaggtgagttccaccggagacgatgcaagccaccagtttcaacaggctatatttgatcagttgtacaaaactgctg

SEQ ID NO: 5062 - DNA, 292 bp, Glycine max
  Clone ID: LIB3028-012-Q1-B1-B3
gtcgcactggacgcgtacgtaagctaggtattccgctcaatggcacatgggaatcggtcattcagcaacttgaagctatatgagaccactggaaagacgatcacttggaatgctgacgtgttagatagtcctgaagagccctttgttgtggaaaacgttcttgttcagcctccatcatagtaatgagaggtgtcgatagcatggatctctttacacattgcacgttgtcacatgaatattatcgcatggtcaagcctcaactaagctcaacgtgcatatcctcggatttttg

SEQ ID NO: 5063 - DNA, 356 bp, Glycine max
  unsure at all n locations
  Clone ID: LIB3028-012-Q1-B1-C11
cttgttttggggtttcgccacgccaaaggtgttgtttctgtggggatgttttccctttcaattanggctgaatgctatcccaacattgacccatttggctcctttgagcatttttgctgattttgttgacattgtagccaagagtgtggtgatggtggatgatgtctttgtgttcatgaagaataggcctcctttgaaagcctttgggggctggtccgtgtttctctatggtttaggtgtggctgtgtatgcatttgaggggattggattggttttgcccttggaagcagaggccaaggataaggagaagtttggtggggttttgggtgtaaggatgttccttaattctttgttgt

SEQ ID NO: 5064 - DNA, 347 bp, Glycine max
  Clone ID: LIB3028-012-Q1-B1-C12
caccacgatggcgaccaaagcgatggaggtggtgaagggtctggacgtgaaacggtacatgggtcggtggtacgagattgcgtgtttcccgtcgaggtttcagcccagtgacggcgtcaacaccagagccacctacgctctcagagatgacggcaccgtcaacgttctcaatgagacttggagtggcggcaaaagaagcttcattgagggcactgcttataaggccgatcccaacagtgacgaggccaagttgaaggtcaggttctgggtgcctccgttcttacccctttttcccgttactggggattactgggttttgtacattgaccaagattatcagtttgctc

SEQ ID NO: 5065 - DNA, 283 bp, Glycine max
  Clone ID: LIB3028-012-Q1-B1-C9
tacgtaagctcgaaattcggctcgaagacagaaagaaagacactgttcacggttaaggtttgagtctcaaacactctttctttaaagcacagtctcgcattcctccttgcctctttgttctctctttttctctctccttctttctttgtttctgtgtgttcgagattgaagaagatgatgcaggctggacccggcggcatgggccaacaagcgaaccaacaatacgcacagcaacagcaacaaccctacatgatgatgccgccgcagcctcagccccctcaga

SEQ ID NO: 5066 - DNA, 343 bp, Glycine max
  Clone ID: LIB3028-012-Q1-B1-D10
ctgagaaaaggtcacctgactctgatccgtcacctaagaaccctgagaatgagtttttgaccacgactcctgggaacaaacagaccctcaatgaccttacaattcataaaattttatcacagcacgcatcagatgaattctaccttgggcaaacagacggcggcgactactggacttctgatgccgggccactacaggcctttaagacgttagcaagaatcttgatgagattgaaaagaaccttatagagaacaacaataatgagacattgataaaccgctatgggccggctaaaatgccttacaccttgcactatccttctagtgacgacggattgactttc

SEQ ID NO: 5067 - DNA, 289 bp, Glycine max
  Clone ID: LIB3028-012-Q1-B1-E9
aagagagattgtgaccgttgtttgttggttcgttttgggagtagaggcggaccacctgctccaggatttgtggtgtgacatagatatagttgtacaaattatttcgggaaccgaagaaaacaatttgtaggccagaaagtagtggacttaaatgttgtgaaaattctaagatagaatcgttaaagattaggaatagaaccgggagaattagtgttttttgagtttaccttgtacacattactacagtaaatagatggaacggcctccttcgaaaaaaaaaaataaagac

SEQ ID NO: 5068 - DNA, 69 bp, Glycine max
  Clone ID: LIB3028-012-Q1-B1-G9
ataatgcatgatgtaaaatcattttgtattctaatggtgtgaggttgtagagtttcttattataactaa

SEQ ID NO: 5069 - DNA, 224 bp, Glycine max
  Clone ID: LIB3028-013-Q1-B1-A2
tggaattttggtgatctctttttatttgatatgaatttgtcttgcaatgcttttgactatgaagttgattgctaaattattgaatcagtgttttgcagaatatctgtaatcatttcaagattgtagttctaaggattcttgtttcttcaaaatctttaatgttgctgtttaatttttgttggctacttcctttactgtctccaatgtctcattaatcattttaa

SEQ ID NO: 5070 - DNA, 385 bp, Glycine max
  Clone ID: LIB3028-013-Q1-B1-B7
acgcgtaagtaagctcggaattcggctcgggtctcaacagggggacactagatcttactcgcaatgggtggggtcatcgggttggtctgaaaggtgagggcaagaaagttttcagcgaggaaggatcaacaagtgtaaagtggaaaccacttggtgcagttccgagggctctgagctggtacaggacaagatttggcaccccagagggaacaggccctgttgccataaggatgagtggtatggcgaagggaatggtgtgggtcaacggtaacaacattggtcgctactggatgagttacctctctccacttggaaagcctactcaatcagagtaccacatcccaagattcttcctgaacccacaagaaaatttgcctgtgaattt

SEQ ID NO: 5071 - DNA, 206 bp, Glycine max
  Clone ID: LIB3028-013-Q1-B1-C6
gcttaacggttttgaggaatatgtatgggatgaaaatggtgatcaagtttcctaacagagtttaggcttaagatttcctgtcccctaaagttgttagtggaaattgtacagagtacatgatcatatgaatgtaacttgtaaattgctttactcaatataatttcgttgccatgtcatgtatggtatttaaaaaacaagaaaacagt

SEQ ID NO: 5072 - DNA, 320 bp, Glycine max
  Clone ID: LIB3028-013-Q1-B1-E12
cagaagcagctgctgcaggagattggggtgaggctgttccagctcctgctccagctccagttccacaagctggtgcgcctccagctcaagcttttcctcctgctactggctgggactagcttttgacaagagattttattccatggtgtcaaaaccatagtttttcttcccctcggctcagaaacttcccttccaagattttatttgttagaaaagaaacatcatttacttgatattgaatctcagtaaaattttgtttgttgacatattgaaggaaacttcatcgtttaaaatttaaatgtagtaatttaattgtttca

SEQ ID NO: 5073 - DNA, 398 bp, Glycine max
  Clone ID: LIB3028-013-Q1-B1-E3
acgtaaactcggaattcggctcaagcaaagtttcttcctttctctgccctttgtcttctctgacacatttggggccttgttgattgtgtttttgcaaaagggtatggcgaaggacgttgaggttgctgagcgtggctccttctctgggaaggactaccaggaccctccaccagcaccactcattgatgctgaggagctcacaaagtggtccttttacagggctcttattgctgagttcattgccactttgctcttcctctacattactgtgctcacagttatagggtacaagcaccagacggatcatgctgatgcgtgtggtggggttggcattcttggcattgcatgggcctttggtggcatgatcttcatccttgtctactgcactgctgggattt

SEQ ID NO: 5074 - DNA, 224 bp, Glycine max
  Clone ID: LIB3028-013-Q1-B1-E4
ctgagagtgtgtgtgtgacttatggagtccaattcagagttcgacgtgattatcatcggagctggcgtcatgggcagctccaccgcctaccacgccagcaaacgcggccttaaaacccttctcctggaacagttcgacttcctccaccactgtggctcctcccacggcgaatcccgcaccatccgcctcacctatccccaacactactactaacctttagtcat

SEQ ID NO: 5075 - DNA, 353 bp, Glycine max
  Clone ID: LIB3028-013-Q1-B1-F3
catcgatcgtgtttctcgctaatttgcgtcttccttcgtttccaagtcagcgttaagggtttagtttggtgcgtgccatgaagatcgaggaattggacgatggagagtgtagtagggacgaggaagagaagtgtgagaggcagattgtgagcgttgatgcgaagagagcgttggttggagctggtgctcggatcctgttctaccccacactcttgtataatgtgcttcgtaacaagattgaagctgagttcaggtggtgggatcaaattgacgagtttttgttactgggcgctgttccgttccccaaagaagttcctcacttgaagaagcttggtgtgggtggtgtgattact

SEQ ID NO: 5076 - DNA, 220 bp, Glycine max
  Clone ID: LIB3028-013-Q1-B1-F8
acgcgtaaataactcggaattcggctctaggttaacaccaatgacactgataccgttctgacccggatacccatctacgctccgccattgccttcttcttccagttccagggctgtgggggcatcggacggtcagtccttcccgatatgcgggaatttggcactttggagcactctcttgggtttcgtgttcagcatagtagtcgtcgttcgttaattct

SEQ ID NO: 5077 - DNA, 71 bp, Glycine max
  Clone ID: LIB3028-013-Q1-B1-G10
caacaatttcagatttgccctaacaatgttgctaacaaggaaaaatgcaatataatcagagtaaagatcat

SEQ ID NO: 5078 - DNA, 158 bp, Glycine max
  Clone ID: LIB3028-013-Q1-B1-G5
acatccccccctcttgcttaatgcaaaaatgagcctatctttatgattattgtaataatctacgatgtgtttataattttggacttgagatgtgtcaagggagatttcgagtttacattaataactaacattttccgatctaaacgatattagttatt

SEQ ID NO: 5079 - DNA, 418 bp, Glycine max
  Clone ID: LIB3028-013-Q1-B1-H2
ctcgagccggatcctgcacgttcagggaggccaatgcggtaaccaaatcggttccaagttctgggaggtgatatgcgacgagcacggcatcgatcctaccggaaagtacaacgacgaaggcaacagcggcatccaactcgagaggatcaatgtctattacaatgaggcctctggcggaaggtacgttccgagagccgtgcttatggatctcgaacctggaaccatggacagcatcagatctggcccctacggcaagatcttccgccctgacaacttcgtcttcggccagtccggcgccggtaacaattgggccaaaggtcattacaccgaaggcgccgagctgatcgactccgttctcgatgtcgttcgcaaagaggctgaaaactgcgattgcctgcaaggttttcaagtttgccac

SEQ ID NO: 5080 - DNA, 412 bp, Glycine max
  unsure at all n locations
  Clone ID: LIB3028-013-Q1-B1-H3
ctttgttctttttgtttttttttttttaatttaaatgcacatgcagtctcttacttatatttatgtttacaaggtctaaacctcatagatgtaataattctggtgaaaattgcagataattagggaaatagcgaccttaaagctcctacggcatcccaacgttgttagattatatgaggtcttggctagcaaaacaaaaatttatatggtacttgagtacgtgaatggaggggagttatttgacataattgcatccaaaggtaaacacatcgaaggtgaaggtagaaagctgttccaacagttaattgatggggtgagctactgccacactaaaggtgtcttccacagggatctcaagcttgagaatgtactagtggataacaaagggaacatcanaataactgattttggt

SEQ ID NO: 5081 - DNA, 239 bp, Glycine max
  Clone ID: LIB3028-013-Q1-B1-H7
tttggtttcattcaaccaattttatttccaatacgtactgtgtattaattcagttcttttttattgatgtaaataagatttagcttctatttggccaaaggattttccacacctgagaatgaggatcatggtatggtatagttcgtgttactgttcccaccatttttgccgatgattgtattcaaagtgagatacattattgaataaattattgtttttttttttaaaagaaagaatgc

SEQ ID NO: 5082 - DNA, 85 bp, Glycine max
  Clone ID: LIB3028-014-Q1-B1-A12
aaatattgtaccattggtttggttgggctcaaaatgtcatttctagtcttcctccaaaaatgaagtttattttctagtctttaaa

SEQ ID NO: 5083 - DNA, 424 bp, Glycine max
  unsure at all n locations
  Clone ID: LIB3028-014-Q1-B1-A4
acgcgtacgtaaactccgngaattcggctccaagcaaacaacgcaatgggtattccgtcggaactgagggacatgttgttgcccaacaaaaagggcgtcctcgttgcctctcccgcagaggacaggaagactttgaggtccaagcaatgcactatggaaagtgtgcgagctggattcaaggctgcttccattgctggtgttgccagtgctgtgcctacattggctgcagttcgtatgattccatgggcaaaggcaaacctcaattatactgctcaggcacttatcatatctgctgcatccatcgcctcatacttcatcactgctgataaaactatcttggagtgtgcaaggaaaaatgccaagcttgaagatgctttgagacacaatcaacaatagttgtcttagaaactgaaagaagtaccat

SEQ ID NO: 5084 - DNA, 443 bp, Glycine max
  unsure at all n locations
  Clone ID: LIB3028-014-Q1-B1-A9
atagaagagtactgacgtcggacgcacgcgtacgtaaactcgaaanttngggctnnngggnaggatttgtgtttagggggggtgtttggggggttctcttcagcttcggttaagcgagtacttttcgttcttgatctgttggttacgatgtcgtattcaaggagatctaggtattctccttctccttctccttctccatacaagcgatacggtaggtctgtgtccaggtctctctcaatatcaagatccagaagccgttcaaggagtttatcaagagatgcagaaaatccaggaaacaatttgtatgtgacaggattgtctcctaggattaccaagagagaactggagaaacattttgctgctgaaggaaaagtgatagatgtccatctgatagttgatccttggacaagggaatcncgtgggtttggctttgtgacaatgga

SEQ ID NO: 5085 - DNA, 385 bp, Glycine max
  Clone ID: LIB3028-014-Q1-B1-B9
ctcttggcatcttgtgttgtgtccctcttttaagctaattccttctcttaacacaattggttgtgccaattgccatagtcaccaaccaattaacaaaggtatatatatcatcatatcatcaccaaatgaaaaatattgggttgttttttcttgtggtggtggctacttttgtggtggcagccacagctggtagcttttaccaagactttgaaataacgtggggtggtgagcgtgccaaaatctatgagaatggaaaccttctcacactctcccttgacagagcctctggctctggctttcgttccaaaaaagagtacttgttcggaaaaattgacatgcagctcaagcttgtgcctggtaactctgctggaacagtaactgccta

SEQ ID NO: 5086 - DNA, 391 bp, Glycine max
  Clone ID: LIB3028-014-Q1-B1-C3
cgtacgtaaactcagaattcggctccgagaaaaaaaatcttaatttgtttcttgttcttcttcttctctctgtcgtttgttctcttgatctttgatctctgtgttatatgttgtagcaaaagaagtaaacaacacacacatatataaatatttgtaagatatatatatatatatatatgatcatgggttttcttcacaagctttgggacgaaacgctggcgggtccggcaccggaaacgggtctggggaagctccgaaagtacaattcgttctccggcggaatctccgtccggtcaacggttgcggaggcagttccgataagtcgcagcatcaccattgttcggtcccagtctggtttcggaagcaccaccacctcggcttcttcttctcc

SEQ ID NO: 5087 - DNA, 424 bp, Glycine max
  Clone ID: LIB3028-014-Q1-B1-C4
cgcgtacgtaaactaggaattcgggtcaaggaacgatcatggcttatatctcctctctatcatctttctccctctccaatttctctgcacctcttcccatttccatttgttcctcatcttccgcattcctaacttcccaaataccatgcaaaccctccaaacgtagcagaccaaaatgccatcatgtttccaaagtgtcatgcaacagtaaccaaaacaccccaacaccaaacccagaagaagaaaaacgatcgtcatacaacattctaggaaaacataggagggatattctccttggcattgggggcctttacggtgcttctgctcttagcaacaccaaccctttagccatggctgcagctcctattctagagcctgacctagaacattgttgtataactgatgatgtacctaaaagggaaat

SEQ ID NO: 5088 - DNA, 325 bp, Glycine max
  Clone ID: LIB3028-014-Q1-B1-D12
acataaaagtttcttatggcatagaaaacatgtagtcctcctattcgtacacagtcaagtttaactcaacaaacaaagaaactcaaagatgagagtataggaaatacaaatacaatactagagtcattctgtacaaaggtttgggttcatcatgtaataagacaatacacatcaaaacacttcctcgcccgtctgagtattactttccaagttaataaaactattttgtataggtttccacattgggatatatacagcaaaataattgtataaatattatgtatcccatcttgtatattacgtatttacgccagcaatgtcattg

SEQ ID NO: 5089 - DNA, 280 bp, Glycine max
  Clone ID: LIB3028-014-Q1-B1-E2
cccccaactccaagctctgttcatcgtctaccgcgctttcttttcaaccagaactatgattaagctttttaaagtaaaggaaaagcagagagaacttgcagaaaatgcaagtggcggaccaactgttaagaatcaaagtgctggagagttgcatcgtcacaaagatataagtgagctgaatctacgagaatcatgtagcatgcgattccccaatggcaaagatgatctgatgagatttgacgttacaggtcgacgtgatgatggatatgacgtaggtggc

SEQ ID NO: 5090 - DNA, 328 bp, Glycine max
  Clone ID: LIB3028-014-Q1-B1-E4
acggacgcttacttaaacccggaattcggtccaagctgctttgtgcacttcctgtcagatgcttgtggtttggattcagaatcaactaaaacaaaagaagaccaaggagatagtattcaactatgtaaatcagctgtgcgagagcttgccaagtccaaatggagagtcagtagtagactgtaatagcatttatggattgccaaacatcacgtttactgttggagacaaacctttcaccctcacccctgagcagtatattctgaaaactggagaaggcattgcagaagtttgccttagtgggtttattgcttttgacattcctcctcct

SEQ ID NO: 5091 - DNA, 369 bp, Glycine max
  Clone ID: LIB3028-014-Q1-B1-E9
tacgtaaagctcaagattcggctcgagctaatactatatgtctagctgatggagtccaattcagagttcgacgtgattatcatcggagctggcgtcatgggcagcaccaccgcctagcaggccaccaaacgcggccttaaaacacttctcctggaacagttcgacttcctccaccactgtggctcctcccacggcgaatcccgcaccatccgcctcacctatcgccaacagtagtactaccctttagtcatggactcttaccgcctctggcaagatgcgcatgcccaagtcggctaccagatctacttcaaggctcatcacatggacatggcccatcactaggagcccgccatgcgcgccgtcatcgac

SEQ ID NO: 5092 - DNA, 404 bp, Glycine max
  Clone ID: LIB3028-014-Q1-B1-F12
gtacgtaaactcagaattcgcccaaattcttgtaggaggcttaaagttaacgaaaaatttttttggggttaaacacctgaacacacctttaacctgcctttcaaatccgtgcattgcttgaacgattgaaccctaatggctgctctcttgaggaggtttgcgagcgccactccgatcccatccaattcctctcacaccaatctccgccttcccttcaccgccatcgccgccatttccggcggagtctccttccttttctaccattcctctcccaacttcgctcattcacaagaagcagaacaagtggaaagtaaaaacatcgcactcgttccggataaatgggtcgagtttaagttgcaggatactgctagggttagtcacaatacccagctattcaggttttc

SEQ ID NO: 5093 - DNA, 339 bp, Glycine max
  Clone ID: LIB3028-014-Q1-B1-G1
ttagatttaacttttttcattaataaaaattaacaaataatatttgtgaataaaaaagtaaaagactatgcaaagcacgttgtaactgtacgtcatcgccaactttgaacaacagcaaacactcttgccccaactagcaagcacaatcaaatcaaaataattcccttacaaaactacccacatgcacaacattcctttagccaactactttgttgctgactaaattaattaatttaactcctaattaaaagacacctgtacacacccaaccactaatcacaaattaacatgaacatactttcatcacgcactctctacatatctatctacctttccatg

SEQ ID NO: 5094 - DNA, 264 bp, Glycine max
  Clone ID: LIB3028-014-Q1-B1-G4
attctgatcgagatttctacattcttccgtttccccaaaacacttaagatccgtgacaatctttaatgcgccagcgaacacagcaatttgctggtgacttattgctacgagatgctccattcctagtcgtctggtttctctgtgtgagacaataattatgttcacgggtgccaggtggtacaccacaatgtatcaaactggaacattttttgtttggacttccacagtcttagtctcattcattgccagcatgtagttactcat

SEQ ID NO: 5095 - DNA, 297 bp, Glycine max
  Clone ID: LIB3028-015-Q1-B1-A3
cggatcggctctaattaatgatatgcggctacactagccacatggcagctgtctatacagggttgattcatggcccgtctgtagattacctagatgtattaacacgctctgtgagcaattgactcttcattatcccctctcacattattatgactaattcctgtgttccctaatgaaggttgtagctttgcagctttgccgcagacgatatgtgataaactacaagggcagtgggacatgtggcggtcacatacaactgagctcgtcgaccccggaattaaatctggaccggatact

SEQ ID NO: 5096 - DNA, 255 bp, Glycine max
  Clone ID: LIB3028-015-Q1-B1-C12
ggcaaaagaagcatgtcaagattcttaccttggcagggcacattgcataaatgagaaaaagggctgtccttgagttttgttatgaattcaaatgtcacatctaccatttttatatttggatattttgatgtgatgtgcaagtttgagttctttatcaatttatgaggagtaaaacaggtgtagaaggcttctacttaaataactagtatatgatttggtttcttgcctaaaaaaaaaaaaaaaaaaaataataag

SEQ ID NO: 5097 - DNA, 332 bp, Glycine max
  Clone ID: LIB3028-015-Q1-B1-E3
gtacgtaaactcgagaatcggctccaagctttccaatcccaacaaaaaattttccctcggcaggaggcgtcacgtgcaacctcccgctgcacggaaaagcaacttgccaattgcaaacaagtttgcatggcttttgccgcaaatggtgacgatagtgaagtcagcaactaagggaacgttcaacataaaacactagaaggtgtttacaacattggtcgttgaacaaatggggttggtgcggtggccgcactgagtaagaataatcataggctttgggctaatttcataaaaggcaatctaaattggccctaggctttcaaaactattgttgt

SEQ ID NO: 5098 - DNA, 235 bp, Glycine max
  Clone ID: LIB3028-015-Q1-B1-E8
gaaagttaataagggttcttgaaattattggtatgcaataattttgaactgcgtggtagtgtgggaattcattatatagcttttgttcgttgttatctagaagttttagtcatttgtaatatcatatgtcgtgaaaaatttgtatctggtatatatgtacgttatgggcgattttgttatttttatatatacattccttggttgcaatgtaaatttgaatatggtcatgtcaaac

SEQ ID NO: 5099 - DNA, 88 bp, Glycine max
  Clone ID: LIB3028-016-Q1-B1-B1
gcaatagtgtagtacctacccttttaagttgtaaggcacagatttgcattttccatgttttatatcattgcattagctttccacttca

SEQ ID NO: 5100 - DNA, 210 bp, Glycine max
  Clone ID: LIB3028-016-Q1-B1-D10
ctcgaaggttggcgtttaacatgggtcgtttagtttcggagggtgacttgttcaccgttttggccccaatgaactaagcgatggcgaagttgacaacggagcaattaagcgaaccgggggcgccggagcagagaaggtactatcacattataccggagtactagaccgacgagagcaagtacaatgcggttagaaggttcgggaaggttc

SEQ ID NO: 5101 - DNA, 232 bp, Glycine max
  Clone ID: LIB3028-016-Q1-B1-D4
ctttctttccttacccacctacgtttccttcagatgcgaccaattccatcgtcagcaggaacacaccccttttgcctactgagctttacctctcactcgtcaactgtgtctctgagagggttcaagcctggtttttgctctctatgccattccaacaggatgggcaagtgggagggttgtggaaagttaggaagaatgaggccaagtcatatgagtgcttatgaattttctc

SEQ ID NO: 5102 - DNA, 245 bp, Glycine max
  Clone ID: LIB3028-016-Q1-B1-G10
gaaatccgctccaaaatagaaatttccggaaatcctccccagaaaaggaaattccacaaaacaaaaacgcaccgatcatgtggcatcgatcctactacggggagcaaacattagatggattgtttatatgatattgtacggttttttttgttttaacttttgcttctctttacattgtatttgtttgaagaaaaaaataagcagcttcaagaaatgggataagatacacaaacttccattttgca

SEQ ID NO: 5103 - DNA, 219 bp, Glycine max
  Clone ID: LIB3028-016-Q1-B1-H1
ggatgccccgggctacacgaagtcggcacgagcgatcctccgggcagcagttttcggtgtgctccttgtggttgccagcgcccacaggaccatcgtcacggtcgtggaagagggggagagggagggaggatgcaaacagcaaatccggagtgccgagaacttaaaagactgccactccttcctcggtgacgcatccgagcccaaagaatctcagcacta

SEQ ID NO: 5104 - DNA, 359 bp, Glycine max
  Clone ID: LIB3028-016-Q1-B1-H3
cggctcgagcttctgctaaagtcaacaacaccgcgttttggctcgcactaacacaactgttcctttcttcctttcctcaacttgtttcctacttaacgcgtttacgtgagccaatcgctgatatcgcgctttctataaggcgcgagtcacaaccagtggaactcaccgaactgaactcgtaagtttagtcttctctcggcgtcgccatggacgaagaagacgtgcgcaggatcttcagcaagttcgacaagaacggcgacggcaagatctcgtgcgcggagctgaaggagatgatggcggcgctgggatccaaaacgacgtcggacgaggtgaatcgcatgatggcggagctggaccgg

SEQ ID NO: 5105 - DNA, 346 bp, Glycine max
  Clone ID: LIB3028-016-Q1-B1-H4
ttcggctcgagctacaacgcctcgaatccacacagttctacgctacgctctaaaccctcgctctctctctctctcgatctatcatggctttgcccaatcagcaaaccgtggattaccctagtttcaaactcgtcatcgtcggtgacggcggtacaggaaagacaacgttcgtgaaaaggcatcttaccggtgaattcgagaaaaaatacgaaccgaccattggagtggaggttcacccattggatttcttcacaaactgcggaaagattcgcttctactgttgggatactgctggacaagagaagtttggtggcctcagagatggatattatatccatgggcaatg

SEQ ID NO: 5106 - DNA, 342 bp, Glycine max
  Clone ID: LIB3028-017-Q1-B1-A1
acttaacctcggaattcggctcaagcttttcccttaattctctctctaaacatcacaatggattatggaaggttgggaccctctgatcctggtggctcctcgcgcctcaacaacgttcctccgacatcttccgggaggaagaagattgtcttgctttcactctttagcgtcttgttaatagccgcgtctgctgtaactgcagttgtcgtccgctctcgtattcaacaaaatacgagagcccatgagactaggctcggaaagcccactcaagcgatttcacgcacgtgcagcaagacacgctttaagaccttgtgtgtcaaatcgcttttagactttccggga

SEQ ID NO: 5107 - DNA, 303 bp, Glycine max
  Clone ID: LIB3028-017-Q1-B1-A10
actggctacaagttcaagccagaggctcacaatccgtattttgtcatcgatgacgaagaggaagaggctgccgcagaggccttgaagcttgaagatgaatttgaattgtaatttctttcaaaatacaaaattagttgttgaacaagttggtaccatgctcagcaatgctctcaggtttcatctcaacagccagtagaaatttgcatgttacattttatgggtatagtcattattcataaatcattgtgctatattttgtgttctggactcatgccagtttttgcattagtgttataatatcct

SEQ ID NO: 5108 - DNA, 368 bp, Glycine max
  Clone ID: LIB3028-017-Q1-B1-A9
gtacgtaagctcggaaatcggttcgaagataaaaaccatggcaataacactcaacaatggcttcaggatgcctatcattggattgggcgtgtggcgcatggaaggaaacgaaatcagggacctaattctcaattccatcaaaattggttatcgccattttgattgtgctgctgactacaaaaacgaagcagaagttggagatgcgcttaaggaggcttttgatagtggccttgtgaagagagaggatctcttcattaccaccaagctttggaattctgatcaaggccacgttcttgaggcgtgtaaagacagtctcaagaagcttcagttaacgtatctagatttatatcttgttcactttcctgttg

SEQ ID NO: 5109 - DNA, 355 bp, Glycine max
  Clone ID: LIB3028-017-Q1-B1-B1
aagcccggaattcggctcaaggtaggcccttccgagacccgaagcagccagggggatcgatttcaaggccggaggtaagagcaaaaagaccaaaagaacagcacccaagtccaatgatatctatctcaagctcttggtcaagctttatcgcttccttgttcggagaactggcagcaacttcaatgctgttatacttaagagattgttcatgagcaaggttaacaaacccccattgtccttgtcaaggttgattaagtatacgaaggggaaggaagataagattgcagtggtggtggggtctataagcgatgatattcgtgtttatgaagttccaccattgaaaattacagcactc

SEQ ID NO: 5110 - DNA, 245 bp, Glycine max
  Clone ID: LIB3028-017-Q1-B1-B3
ggagcaggatatggaagaaaaattgcattaagttgctggggttgagattctgtcttcgtgactagttagagatgaaaaaaactggtcacacttctctttccaaacacaatcagagccttttcgatcttcctactcccaagagcatttcttcatgtggcaagtaatattcttttttttttttgtggttatatatttaacaattgtaagattttattgagaaagaaaagatttattatacttttaaa

SEQ ID NO: 5111 - DNA, 376 bp, Glycine max
  Clone ID: LIB3028-017-Q1-B1-B5
tcggggaattccaattccacattttcaagaaataaggaggcaaaaatgttcatatatgaattggaattatttgttttcttattaggcctatcctgaagccaaaggaaatgagatcggaattcctcggggaattccaattccacattttcaagaaataaggaggcaaaaatgttcatatatgaattggaattatttgttttcttattaggcctatcctgaagccaaaggaaatgagatcggaattcctcggggaattccaattccacattttcaagaaataaggaggcaaaaatgttcatatatgaattggaattatttgttttcttattaggcctatcctgaagccaaagggaatgagattgggaattcttcgggg

SEQ ID NO: 5112 - DNA, 350 bp, Glycine max
  Clone ID: LIB3028-017-Q1-B1-F4
cacgtttgaagtccagcatgaagagcaagaacgggttgccactcaaagtgaatttggaaaccaaagtgaaggccaagatgggaaatttgaaaaccccaaaagtgggaatcagagtctcctgcgacggaatcagagtcactcttccctccggcaagaaaccggcaacggcgtccacttccaacgctaagtgcgacgtcgatgttcggttcaagatctggaagtggaccatttgatccacgtaataatgtacaccatacaacacagaggtgtgtaatgtgttaattgcttgtttgttttcgttttcctgcctttcctttcagcttcttttactttggtataattttcgagaa

SEQ ID NO: 5113 - DNA, 424 bp, Glycine max
  Clone ID: LIB3028-018-Q1-B1-A11
tcagacccacccgtacgtaaactccagaattcggtccaaaatttccggccaacaaaaacaagcaacccaaaacgctctaacatcgtaaaaaagtgatttttcattagtcatagatcattttctgcacatttctgcaggatgaagttgatcctgcaagcttattagacatacctaggctttgctaagttaatgctgttatggcttttgaaaatggttccaaaaaggagcttcagaaagttggtctaaaaatctccaagagctttcctcttactaggactactctggcatctatggagtctttgtccctgccagtggttcaggaaattgttctttctgctgatatgcaatgtgagaagtgccagaagagggttgctgatattattactaaaatgaatgcagagaccgagtcagtggtggtgaatgt

SEQ ID NO: 5114 - DNA, 324 bp, Glycine max
  Clone ID: LIB3028-018-Q1-B1-C10
tcggggaattccaattccacattttcaagaaataaggaggcaaaaatgttcatatatgaattgggattatttgttttcttaataaggctatcctgaaaccaaaggaaatgagattgggaatcctccgggaaatccaattccacattttcaagaaataaggaggcaaaaatgttcatatatgaattgggattaattggtttcctaataagcctatcctgaagccaaaggaaatgagatctggattcctcggggaattccaattccacattttcaagaaataaggaggcaaaaatgttcatatatgaattgggattatttggtttc

SEQ ID NO: 5115 - DNA, 273 bp, Glycine max
  Clone ID: LIB3028-018-Q1-B1-C7
gcctttttgaacatacaaggatgtatttaatcaatcaagttggttggttggttttgagcaaattgtaacatgagtttctcatttgttgctagatatagatgttttctggaatgggaggtgcgccttgtaaaatcgagacaacgcacgcggtgtattgatcattttatgatatacataatggtgggatagctttctttgaacatttcccaactcttttaagtaattggaacacttttacacatgttcatatatatcatgtattcagtattcaaa

SEQ ID NO: 5116 - DNA, 205 bp, Glycine max
  Clone ID: LIB3028-018-Q1-B1-D2
ggacaagtgaagaatgagcaaaccttgtgaatggtttttctaattacctctggcttaagtagctctagtatacaaacaaaatatagccttttttaggtcctaatttatataacacagtgcccagtgtacaattacacagttgctccactgcctttatattgaattatgcatcatcagtaatatactttggacttctcgttgaaaa

SEQ ID NO: 5117 - DNA, 337 bp, Glycine max
  Clone ID: LIB3028-018-Q1-B1-D3
ctgaacaagggtttctctttctctttctctgtctgcttcttcactttctctcgtttcaatcgaaaaaaatcatgggcagaaaattcttcgtcggtggcaactggaaatgcaatgggaccactgaggaggtgaagaagattgttactactttaaatgaagctaaagtccctggagaagatgttgtagaagttgttgtgagccctccttttgtgttccttccttttgtaaaaagtttgctgcgccctgatttccatgtctcggcccaaaattgttgggttcgcaaaggtggtgcttatactggagaggttagtgctgaaatgcttgttaattttggaat

SEQ ID NO: 5118 - DNA, 151 bp, Glycine max
  Clone ID: LIB3028-018-Q1-B1-E1
acattttgttgccttttctacccttctcaataataaatatttatctatgctttcgcgaatcagcttgtagtttgtggatgaagctcagctgctttctgtttcttgcttcctttcttttgttttaaaaaagaattcgctttctgtttggcaa

SEQ ID NO: 5119 - DNA, 370 bp, Glycine max
  Clone ID: LIB3028-018-Q1-B1-E9
ctcaaaggagggtcacaataaggtggccttctttagctacttctacctagcttttaacattggccaactcttctcgaacaccattctggtctattttgaggacgaaggaatgtgggctcttggtttctggctgtctgcaggctccgcctttgctgcattggtcttgtttcttgtatgcaccccaaggtatagacacttcaagcctagtggcaaccctctctccaggttcagccaagtccttgtggctgcatcaaggaaatccaaagttcaaatgtcatcaaacggagaggacttattcaacatggatgcaaaggaggcttccaacaatgccaatagaaagattctccacactcacgggttcaagttcttg

SEQ ID NO: 5120 - DNA, 406 bp, Glycine max
  Clone ID: LIB3028-018-Q1-B1-G11
gcttacttaaactcggaattcggtccaagggaaccaaccaacaattttcaaaaaaaggatttggaattggaaaggcgagggattgcgctgcgtctcttcctcttctctttcgattcatccctcattcataatcttccaatccaacaacctcagcctcacactcacacatacacacatctgaacgcgtatcgtccctcccatggcttcaaagcgcatcctcaaggagctcaaggacttgcagaaagacccaccaacttcttgcagcgctggtccagtagctgaggacatgttccattggcaagcaacgattatgggtcctgctgatagtccttatgctggaggtgtattcctagtcactattcactttcctccggattatcctttcaaacctcccaaggttgccttt

SEQ ID NO: 5121 - DNA, 342 bp, Glycine max
  Clone ID: LIB3028-018-Q1-B1-H2
ctcgtggagtgatccggtggacgcaataactgcaggcagctctgacttcagtgcaagcaagcatcaaaacattgctttaaaagcatcaattcagcgtttctgcaagttccaattttccaactatccacagaaacggtcgtttgaaaaaaagctgttaattcgggagcgatatggaggtcgaactcaaagagctgcacgccgatcttcaatctctgagccaatcgcttcccgatccatctcaccatgatttgctccgcaagattcaattgcgtgttggggaacttgcgaagattgcaaaggcagcacctgttcgacgctctaaagttgaggatatgagtgctg

SEQ ID NO: 5122 - DNA, 398 bp, Glycine max
  Clone ID: LIB3028-019-Q1-B1-A4
cggctcgagggaaaagaaaaaccagctttcttcaagcacctagatttcctctctctctaaatggcgttctcttcttttctcggcagagtcctcttcgcctccgttttcatcctctccgcttaccaagaatttaattcttatggagttgatgggggacccgcagcaaaagcactcagaccgaagtttgatgcctttgcacatcaagtacattctaaagttggctttcaacttccagatattgatatgaaatttttagtggctggggctattgctctcaagggccttggagggattcttttcatactcagcagctcttttggagctttccttttgcttttgcatcaagtgatcactactccaatactgtatgatttctacaattatcacagtgaggacaa

SEQ ID NO: 5123 - DNA, 244 bp, Glycine max
  Clone ID: LIB3028-019-Q1-B1-A6
tcaacaaagaactatgctttggatgagattgtggaagtggaatgagtctaaattatttgtaattttgaatctggacatgctatcgcagttactagcctaaggtttttttaagtcaaaaacatgaaagaatttgtatcatattctctctgttatctacccccttgacttcgattttctatgaactacattctgtgtccagttgctcatatctttaccccgcttcttatttaatcagtaaaaacag

SEQ ID NO: 5124 - DNA, 254 bp, Glycine max
  Clone ID: LIB3028-019-Q1-B1-A7
attttgtttcttgtcacattgtcagcactgtgtatgatacaaacttcataagtaaatcgaaagcataaatggtttctgacaaccattagttactctgtgagggattgcctcagattaaagtactagtatgttggcattcacttcacccgtgaaataaagcttctgtctacaaattcctaccaaagggcagccgcgttgcaggcgtttatccataggctccgcctcccagacgagcatcacaaacatcgaggctc

SEQ ID NO: 5125 - DNA, 164 bp, Glycine max
  Clone ID: LIB3028-019-Q1-B1-C3
gtcaactgctaacaagagaactgttgggctgaagtaagaagagttctttaagttctttctagtcatgagagatcatgtgatgtgatactctagtgttatctatacctgatcatctaattgcaaaagtgagtaataatacgtgtaaaattttcgtaaagatgaag

SEQ ID NO: 5126 - DNA, 324 bp, Glycine max
  Clone ID: LIB3028-019-Q1-B1-C4
gtacgtaagctcagaattcggctcaagggcaagctggtggacaaggttgtgggtgccaagaaagaggagctgcatttgacaatagccaaacatgccgcaattgctgctgcgtgaagtgccagatgaatatgtttagactaatagacgattgtcttcgagtcagtttgcgtttaatactagtaatctgttattgggtctgtgtgcatgatttcagaacggatttagagttagtacaacatggatgggttatgtgtaaatgacattgttgcactatcgtgattgaaacatttctgctgatgaaattatccaaaagattagccgggt

SEQ ID NO: 5127 - DNA, 105 bp, Glycine max
  Clone ID: LIB3028-019-Q1-B1-D3
cacaacgcaactaccaacgttgtccccttctacgttcccttcctagtcggcacatgacgatgccttctacagatgcttcctctcagcacaaaggcgtccacgggg

SEQ ID NO: 5128 - DNA, 174 bp, Glycine max
  Clone ID: LIB3028-019-Q1-B1-D4
tgaaggcttaattgaaattacacacacacctatccatgcatcatcaattgagtactgttagagagtgtgatgatgagggtcatagtccgtagacaatttgttactccttgtacttatccttggaggtctaccggaaatatttttaatgaagatttttaacattgctttgagtca

SEQ ID NO: 5129 - DNA, 362 bp, Glycine max
  Clone ID: LIB3028-019-Q1-B1-E12
ggaaagtatagtcaaagcttgtgcttgttttggtcaaaaaaaaaaaaaaaaaaaaaaaaaaaaaaaaaaaaaaaaaaaaaaaaaaaaaaaaaaaaaaaaaaaaaaaaaaaaaaaacaaaaaaaaaaaaaaaaaaaaaaaaaaaaaaaaaaaaaaaaaaagggggggccccccataaataaccccgccaacccggaaattaattccggcccggtacttgcaggggtacaagttttcccaaaaggaatcctaataaaaccttggggcaaacagggcaaaaccggttccctgtggaaaattgttacccgcacaaatttcaacacaacataagacccggaaccaaaaattttaaaccctgggggcc

SEQ ID NO: 5130 - DNA, 90 bp, Glycine max
  Clone ID: LIB3028-019-Q1-B1-E2
cacgcgtacgtcagctcgagaattcccggctaggtttcacattgttactacatgccaactcatacctctctacttatccattagtctggt

SEQ ID NO: 5131 - DNA, 385 bp, Glycine max
  Clone ID: LIB3028-019-Q1-B1-F11
tcggggaattccaattccacattttcaagaaataaggaggcaaaaatgttcatatatgaattggaattatttgttttcttattaggcctatcctgaagccaaaggaaatgagatcggaattcctcggggaattccaattccacattttcaagaaataaggaggcaaaaatgttcatatatgaattggaattatttgttttcttattaggcctatcctgaagccaaaggaaatgagatcggaattcctcggggaattccaattccacattttcaagaaataaggaggcaaaaatgttcatatatgaattggaattatttgttttcttattaggcctatcctgaagccaaaggaaatgagatcggaattcctcgggggtaccgagct

SEQ ID NO: 5132 - DNA, 102 bp, Glycine max
  Clone ID: LIB3028-019-Q1-B1-F3
atttataatgtaaaagaaagagagatataaaaaaaaaaatgagagatgtttgtgaaatgttttcaatgaaaagtgatttatggattattactctttagtaaa

SEQ ID NO: 5133 - DNA, 395 bp, Glycine max
  Clone ID: LIB3028-019-Q1-B1-H3
caagatatgagttggacggtttgggatagatggattctcggagacaatcctaccctcagggaacttctagagtggctgaaggcaaagggcttgaatgcttacagtatttcttgtgggagttgcctgctctataatagcatgttccctcggcataaagatcgaatggacaaaaaggttgcagatctggcaagggaagtagccaagtttgaaattcttgcgtaccgtcgccatttggacgttgttgtggcatgcgaggatgatgaggataatgacatcgacatccctcagatatccatttatttccgttagtaggttgctttcatcttgatagaggtgtgtttgagacttaggtgaaaaacgacagcatgtttgactctcatgcttcatattcataa

SEQ ID NO: 5134 - DNA, 57 bp, Glycine max
  Clone ID: LIB3028-019-Q1-B1-H7
cacgcgtacgtaaactcggaattcggctctaggactgctgcgaggtctactcgcctt

SEQ ID NO: 5135 - DNA, 366 bp, Glycine max
  Clone ID: LIB3028-020-Q1-B1-A11
gacgtcggacgcacgcgtacgtaaacactcgggttcgacggaagcttggcgtggaagcaaacgtagtcaagtggcaaactgttcctgcagcttgcggagagtacatagctgactacgttctaggagaccaatatagatcagattccaaaacagttaaccaacaagcttatttctatgctaaatccctcaaactcaccaacaaagatgtctttgtcttggacgttgacgacactactctctctaatctccagtattttgctaaccatggatttggtgtggaaccacacaatacgacggcgtttaagaactgggttcttgatggcgaggcattcgcactgccagagactcctaaaatgtacaacaaac

SEQ ID NO: 5136 - DNA, 285 bp, Glycine max
  Clone ID: LIB3028-020-Q1-B1-B10
attcggctcaaggagtcattgaactttgactatatttttcagagttcagattattcttctcttttgaattttgattttgggggtttaagtttctgagagaaaaaaaaaaatgataaaggtcgttctttttttgttctgcattgcctctgcactgaccctttcagtatcggagtccaaatctgcttctgtgcaacctcatgcagctgaatctttctctgttggatataatcagatgaagactgcagcgaactgttcttacctggtagttaaatctacgaattgttc

SEQ ID NO: 5137 - DNA, 348 bp, Glycine max
  Clone ID: LIB3028-020-Q1-B1-B3
cgaaattcggctcaagacttcatcttcggcgacgcctccgcggtgttccagaactgcaccatggtggtaaaaaagccactggagaaccaccagaacatcgtgacagcacaagggaggctcgacaagcaggagaacaccggcttcgtcctccagaaatgcgtgatcaaggccgacaccgacttggtacccctcaaagacacaatcaagaactacctcggaaggccgtggaatgagtattcacgaaccatcatcatggagactcacattgatgacctaattcaccctgatgggtttcttccttgggaaaggaactttgccccaatcacactttactatggtgagttcaac

SEQ ID NO: 5138 - DNA, 323 bp, Glycine max
  Clone ID: LIB3028-020-Q1-B1-B4
cttccatggctatgctgcagcaccaacaattgcagcacttttctgctttctatacttcttccacaggagactatgttgcagacacccccttttgacagactaccccatcctcggcatgctgccacaattactcttcaacctgtggcgtgcccatgattttttcactgagatattgaaacggcatggaccaacaggtgagttcactggaccttggtttaccagcatggactatttggtcacttgtgaccccatcaacgtccaccacatgctgagcaagaatttccacaactacgtcaagggacccgagtttcgtcacatttttc

SEQ ID NO: 5139 - DNA, 309 bp, Glycine max
  Clone ID: LIB3028-020-Q1-B1-B8
aaatggttaaagatgaatgcaacttgtcctctttgcaagtataatattctcaagggaaatgaacaggtgtgacaatactaaaggcgatcaaagatatattatatcaagctgagttttattatataacagctcagggttttcaaccgctgatgcgtatatgtagataatatcaagacatgacaaaatagaacgtctcccaatttgctcggtttagctgtcattgttttgttgcttaattgcttcagtacagaaaaaggtagatgtaagaacgaaaggtgccgtatagagatcttttacataagtcgactg

SEQ ID NO: 5140 - DNA, 354 bp, Glycine max
  unsure at all n locations
  Clone ID: LIB3028-020-Q1-B1-D3
acgtaagatcgaaattcggctcnaggagaaaaaangaagaaacagaacaacacagaaactcaaaaccaaaataaaattattatggatcacattcataggttacgttgttttgggacaatacccaaaattccttttctaatgctactttccctgcttctcttcagtttcgttaacgcatccttcgacctcgctactatacccttcaacgacggctaatctccgctcttcggagctagcaaagttgttcgctccgaagatggataccgcgtacaactccgcctcgatcgctaaacaagttcgggtttcaattcctccagtatgtaccagtatggattcttcaccgcgagaatcaag

SEQ ID NO: 5141 - DNA, 274 bp, Glycine max
  Clone ID: LIB3028-020-Q1-B1-E2
cgcgtacgtaaaatcggaattcggctcaagcatcatcaaaacttaaactcaaagaatcagaaaaagaaagagagagaaatgagtgaagaagccaaaaagaacttcgccggagctctaacggcgatgcccaactccgatgagccgaaaccggcaccggtgccagctgttcccccgaagaaggtcatcatcaagagcgctgatatgatccccgacatgcagaaggaggccgttgatatcgccgtcgccgcgtttgagaagtacaatgtggagaaag

SEQ ID NO: 5142 - DNA, 434 bp, Glycine max
  Clone ID: LIB3028-020-Q1-B1-F4
aggcgtacgtaaactcggaattcggctcaagtggtcacatgaaacttcagacacaggtcttctttgcttcaattgatcagcgcagtgaacgtgcagcgggtgagagtgcgtgtaccgctcttgttgcggtaatggctgattggttccaaaacaatcgtgatctcatgccaataaagtcccagtttgatagtcttattcgggaaggctcgttagaatggaggaacttgtgtgaaaatcagacctatagggagcgattccctgacaaacattttgatcttgaaacagtcatccaagccaaaatacgccccctttctgtggttcctggcaagtccttcattggatttttccacccagaaggaatggatgaagggagattcgattttctgcatggggccatgtctttcgataacatctgggatgagattagtcatgct

SEQ ID NO: 5143 - DNA, 277 bp, Glycine max
  Clone ID: LIB3028-020-Q1-B1-F6
ggatagccatggctgttggaattgtgaaattttagctagagaagcaagtctctaaaggggtccattgtggtcctcatggaacaggcttatgttaaatcatacatttcacgatcagcatgtctactttgtacattttgcgtgtagtttttcttttcttcttcttagaatagtagtagctagtcttcgcatttataaattctcgttgaaaaatgaaaaatagagtttatttatcccaaataatatatacaaatgtacatttaagaaagataaagaaagt

SEQ ID NO: 5144 - DNA, 446 bp, Glycine max
  unsure at all n locations
  Clone ID: LIB3028-020-Q1-B1-F9
tgacaactcatgtacgacctacgtaatctcggaattcggctctcagaacgatgtgcatcgatggcaatgggaaagacagtgcgatactttagcaacttcttcgataacgactatgcaacatcaatttactgtcagctgaggaccttggtgtatccaaggaagagaggcaacttgtggactccctgtaggaaacttgcttcaacgatccgtcatcgcgtcgagagaaacgtcttctaatgcttccgggggatgacgtgcgccctccagatgttgctatcacatactttgagactcctcgtacatcttcaaatgcanatctatcatccaagaacgaacgagacaagaatgagatccctttgcgttaatggtcaggaccttctcctacatacactatcaaccacagttcacatatcggagatgctacttcatatacagatgctaatata

SEQ ID NO: 5145 - DNA, 353 bp, Glycine max
  Clone ID: LIB3028-020-Q1-B1-G11
cgcgtacgtaaactcggaaatcggctcgaaggaccaatgggaaaaggagaaagaagaaaaaaaaagggaatgggatggttgcaattgcagagaatcgtgaccaagggaagtgctaatttgatctcaccactcccactttcacgattcttctcgaaatcttcttccccctatgttgtgaaagttgggattccagagtttctaaacgggattgggaaaggggttgagtcccacgttcctaagcttgaatccgaaatccgggaattccaaaaaccttccctcactcgcaaccctcaacctcaagaagcttggcattccttgcaaacacaggaagttaatattgaaatacacacaca

SEQ ID NO: 5146 - DNA, 390 bp, Glycine max
  Clone ID: LIB3028-020-Q1-B1-G3
tacttaagctcggaattcggctcaaggtgggttttcactgatcaagcccttcctgcggatcttatcaagagaggaatggcagtggaggatccatcctctccctatggccttcgccttgtgatagatgactacccttatgctgttgatggactagagatatggagtgctatccagacatgggttaaggactacgtctccttgtactatgccacggatgatgcagttaagaaagactcagaactccaagcttggtggaaggaagctgttgagaagggtcacggtgacttgaaagacaagccatggtggcctaagttgaacactcttcaagatctgattcacatttgctgcattattatatggactgcttcagcactccatgcagctgtgaat

SEQ ID NO: 5147 - DNA, 342 bp, Glycine max
  Clone ID: LIB3028-020-Q1-B1-H10
cgtacgtaaactcggaattcggctcaaggacaaacctcgtgtttacatgggatgcatgaaatcaggggaagttttctctgagctgaaccataaatggtatgaaccagagtggtggaaatttggtgacaaaaaatcatactttcgtcatgcatcaggagagatgtatgtgatatcacaagctttggctaaatttatatcaataaacagatctattctccgtacctatgcccacgatgatgtgagtgctgggatctggtttatcgggcttgatgtgaagcatgttgattagggcaagttttgttgctcatcttggtcgacaggagcaatctgtgctggtgtttg

SEQ ID NO: 5148 - DNA, 370 bp, Glycine max
  Clone ID: LIB3028-021-Q1-B1-A3
caagatggacttactggagttatgggcaattttcggccccggcgtctccagcgccgtcttcggcgccggatggtggatctggcttgacgccgtcgtctgcaataccgtcaacgttcccttccttcaataccttcccggaattttcgcatctcttgcgggtttgatgttcaactgcgttagaaaagaagacatcgattattctccctacgacgaaagcgagtggggactgaaactgtggctcttcattgcaaatgttgtatcctttggttcataacctggattagcaggcctgctgattcaagattcacttggataaatccgccccttcagtttggactggagttgcaagtgttttgcactgtgtttttgt

SEQ ID NO: 5149 - DNA, 389 bp, Glycine max
  Clone ID: LIB3028-021-Q1-B1-A4
cacttgcgtgctgtctccacagacgatgccaaggcatttgccgagagagaaaatacgtttttcatggaaacatctgctcttgagtccttgaatgtcgataatgccttcaccgaagtgctcactcagatataccgcgttgttagtaggaagactcttgagattggggatgaccctgcagccttgcccaaggggcagaccatcaatgttggcagtagggatgatgtctcagctgttaaaaagtctggatgctgctctgcttagtttcacaagccttttgcagcagaatagaataatatctacatgtgcatgattcaaccaattctcaacattttggagtccaagtgaaatcttttaaaaactacactttcctttttaggtagtttttccca

SEQ ID NO: 5150 - DNA, 222 bp, Glycine max
  Clone ID: LIB3028-021-Q1-B1-B10
aattatggatgagaaatattggtattgatattttcccaaatttaggaccttgatacttagaacccatagtcttgcgatcaagaattttcatttttgttgtttcatgccatcagcttataatcctggagtttgagccccccccttttggttgaaataattaagactcgtttggattgctcatgcgtggttgaaatttgattgtctagtgaaagttttgttaaa

SEQ ID NO: 5151 - DNA, 221 bp, Glycine max
  Clone ID: LIB3028-021-Q1-B1-B3
gtacgtaaactcagagttccgctccaggcatacttcaatatggtctgaaaccatgaagatcaatagattcctagatgatcttctcgaacgtagggaccaatgagccgaggacatagataacgagcatttatccatcgaagtccgaaaaaaccctcttctgtgctcactctgtcgccaaacgaataacgaacccacattataacatcgggaagcgtatcact

SEQ ID NO: 5152 - DNA, 286 bp, Glycine max
  Clone ID: LIB3028-021-Q1-B1-B8
ggtgcatactacagctactgcaaggacattagaatttctctaaacaaaggcatacactactttgtagtatttgtaagtacttctgtaagtgatcattgagccttgaggcttgccctgaccctggtgagcccttgggacccaatcacataaacttttcattatcaaaaaaaaaaaaatgatggatggtctgattgttctacacataacacattgatagttttcatcaaaaaaaaaaaaaaaaaaaaaaaaaaaaaaaaaaaaaaaaaaaaatacaaaaaaaaataaa

SEQ ID NO: 5153 - DNA, 107 bp, Glycine max
  Clone ID: LIB3028-021-Q1-B1-C6
atggggggccaaggattcttctatttgtagggtagtggcactttcaaagaaggccaaggattctattcgtagggtagtggcactttcaaagagtttctttctctttt

SEQ ID NO: 5154 - DNA, 85 bp, Glycine max
  Clone ID: LIB3028-021-Q1-B1-E8
ttcaatgccagtgtatccatcaatatatttatgcttattacatcccaaagaaataaatattttatatgatttgagtgctagcaaa

SEQ ID NO: 5155 - DNA, 346 bp, Glycine max
  Clone ID: LIB3028-021-Q1-B1-F1
atcataaaattgccatccaaaagctcaataatactgaataattataattataatatgtattatacaagcgaaatagatgacatgctccctacagtagaagcctcaatatctccacaaattatcgtgttcaaggtttaaatagttttaaaataaccattaaaagtcaaacaaatggggaaggatgtacagtaaccacaagttatatgctgcaccaagaataagtgagaaatctggatgcaagtggattctcatgaaaatgccatatatatatctcataataaatccgtgttccattaatgtcaaactgcgatgggagaccttgtcctggtttaaaaaaaaagaaaaa

SEQ ID NO: 5156 - DNA, 247 bp, Glycine max
  Clone ID: LIB3028-021-Q1-B1-F4
caaagatctttcgttcagcttcatgttctacaatgaaaagcctctgccttgggccgtttcttgctgctaatgccccagttggtataagagccgatggaggccacttaagcagaaagtgctttcaaaagcaacttcacttccactcacgttgtgtctgcattctcttcatgcatatgttctgcaactatatcagtgatgccagaactagaagagaagcaagtgtctgatggagagaaagctaatttgc

SEQ ID NO: 5157 - DNA, 408 bp, Glycine max
  Clone ID: LIB3028-021-Q1-B1-G2
tacgtaaactcagacttcggcccgagagagctgttcgtgcgcatgcacttcactcaagtttgcctgagtcatggttaaggcataccaatgttatcccaaacggacacttcgatgagcactggcagaactatgtgaagacgtggttcaatcagccagcacggaagacaaggagacgattggctcgtcagaagaaagctgtgaagatattccccagacctacggctggacctctcaggcccattgtacatggtcaaactttgaaatacaacatgaaagtgagaggtggaaggggattttctcttgaagaactcaaggcagcagggattcccaaaaagcttgcaccaaccataggtattgctgttgatcatcgtcgcatgaaccgttctttggaaagtccgcaagctaatg

SEQ ID NO: 5158 - DNA, 404 bp, Glycine max
  unsure at all n locations
  Clone ID: LIB3028-021-Q1-B1-H4
cgtcacacgcacgcgtacgtcaacactcagctcaagtagaaacccaaattgcccttgataattcaggttaatcaaacaaagctgaaaaaaaaaaacaacaaaaaaaggtgttatttttatctagtgtagttattttagtaactttgtggtaccacttaactttgtggtgtataatgaagctcctagtctctttgaagtctccaaaaaattgttggagaaaaagggtggtgggtttctttcttagatttacaagaaacaagtttcttaattggttttccctgtttatattatatatatttgttgtttttgtttgctcctctctctggagctgtgaaggttgangtgtgactgtgaacagaatattctattatggaacaaggagactgtattttttatattttgct

SEQ ID NO: 5159 - DNA, 162 bp, Glycine max
  unsure at all n locations
  Clone ID: LIB3028-022-Q1-B1-B4
cccacctggtttttatcacgacattccttaaaatcattgcaatttaatttgtggcatatcatatatcgaaggcctcaaagaatagacagcacagaaatatcagcaaaacccgtttcttttgacaacacagtctaanaaaagacagcacaccaaagatataat

SEQ ID NO: 5160 - DNA, 53 bp, Glycine max
  Clone ID: LIB3028-022-Q1-B1-C8
acgcgtacgtaaactcggaattcggctcgcgtcttcaaccccttttctttctc

SEQ ID NO: 5161 - DNA, 424 bp, Glycine max
  Clone ID: LIB3028-022-Q1-B1-D11
agagaaatgacgtcgcacgcacgcgtacgtaaactcggaattcggctcggttttagtagctctcacagttcaaattttctacatttcacccatagatccagttttgctggatataaaacctgctccttcaaccaaagacaatcaattacagaatatcattaagcttggagaaggacttttgaaggaaccagaagatgttgttgtagataaagaagggactctctatacagctactcgagatggttggattaaaagattgcgcaggaataatggaaaatgggagaattggaagcatatagatagtcatactttgctaggaatcgcaacagcaaaagaaggtggtctcattgtttgtgatacttccaagggtttgctcaaggttacagaagaagatggttttagtgttcttgtttcacacgtaaat

SEQ ID NO: 5162 - DNA, 67 bp, Glycine max
  Clone ID: LIB3028-022-Q1-B1-D9
ctttcgggacacccaaataagtgaactttttttgtgcaaaaaaaaaaaataaaaaaaaaaacaaaaa

SEQ ID NO: 5163 - DNA, 354 bp, Glycine max
  Clone ID: LIB3028-022-Q1-B1-E12
agtcggacgcacgcgtacgtaaactcgggattcggatcgagatcaaccatgctggatccgcatcttcactcatagacagtggctgtggatctgcccctacagtgcgcactaacactaattggtgcagatcacgtgatgcactgtgacctgagtacataccatctctcacacacaaaagttttcatcatacgaatttgtagcagagatgtacaagactgggcgtcaagagtagtgatgtttacagattaaatgagatgtgctgagtgtacgcttcacatcacgtaaatatgtccatcaatgtgcattggatctgccgacgtctcttcgtgacatgctgtgtgcgtatccacctcc

SEQ ID NO: 5164 - DNA, 52 bp, Glycine max
  Clone ID: LIB3028-022-Q1-B1-E8
aatgaatgtgttcctcaaatgtcgtctttgcagaatggcaagctctggagtg

SEQ ID NO: 5165 - DNA, 375 bp, Glycine max
  Clone ID: LIB3028-022-Q1-B1-F12
cgtgcctctagggttatcatatctccatttccatttcctctctctcagtttccaagaatcttaagctatgggaaagtcttacccaaccgtgagcgctgattaccagaaggccgttgagaaggcgaagaagaagctcagaggcttcatcgctgagaagagatgcgctcctctaatgctccgtttggcatggcactctgctggaacttacgacgtgagctcgaagaccggtggtcccttcggaaccataaagcacccctccgaactcgctcacggcgctaacaacggtcttgacatcgctgttaggcttttggagccactcaaagcggagtttcctaatttgagctacgccgatttctaccaatttgctggcgttgt

SEQ ID NO: 5166 - DNA, 188 bp, Glycine max
  Clone ID: LIB3028-022-Q1-B1-F3
acttaaactcagaattcggctcaaggtcagtgaaaatggcggtacccttgctctccaataggatcgtgaattaacgcctcaagatgtttatacgcccccacagtgatcgcaagatctccgtcaaaccaatctggcgcagacccaagggtattgattctcatgtcatgacaaagtgcacatgatgcact

SEQ ID NO: 5167 - DNA, 141 bp, Glycine max
  Clone ID: LIB3028-022-Q1-B1-F4
ctttgcacttgtctccgaattagttatctgggagaagcattattcccattcgcgagagattagggctagcatgaaggttacaggcgggggtgtgatcatcggcatggccgtggtgggtgcaccgatgatggcgcaagccat

SEQ ID NO: 5168 - DNA, 420 bp, Glycine max
  unsure at all n locations
  Clone ID: LIB3028-022-Q1-B1-G11
gtacgtaaaatcggaatttcgtccaaggccggttgcaaaagttatgagttgcatggtttaacccccaaacggggaactttttgaatgttaaatggagcacctgtggggactgcgggctgggaattgggccgtaacccggtgttaaacccgtttctttataaacccaacaagcgggtcgggatgagatttgaggtccagaacccgtctcatattccgaggatgtaccactccggtgccgttttgcttcgcgatgggcgagttcttctcgctgggagcaaccctcacacgtattacaatttcaccaaagtgttgtttccaacggaactgcggttagaagcgttttctccttggtatcttgagcccggattctctaacgtgcgtcccgcaatagtatctcctgcgtcncaaacaaaactcaag

SEQ ID NO: 5169 - DNA, 432 bp, Glycine max
  Clone ID: LIB3028-022-Q1-B1-G9
gtcgcacgcacgcgtacgtaaactcagaattcggctcgaagctactttggcttggctttctgaattttgggttttcagtgctgagagctgaacaagaagatggggggtggaaatcaagaggcagtcaagcagctgcagaccctgatggaaaatgtggatgatgagcagctgaagaatacattccagattatgcaccagggttatcaaacggaaacgttaatacggtttctcaaagctagggactggagtgttgccaaagcccataaaatgttaattgattgtttgaactggagggtggaaaatgagattgacaatgttttaaggaagcctatccctacggatttgtacaaagccatacgggattctcaacttataggaatgtctggttactcaaaggaggatctacctgtcattgctgttggtgttgggctc

SEQ ID NO: 5170 - DNA, 115 bp, Glycine max
  Clone ID: LIB3028-023-Q1-B1-A8
gcagatacacgagttagacaaccggtggatattagacatttaatgctttcagaacttcattttgtaattattgttatattgtggaatatatcacttcatagattttttttcaaaa

SEQ ID NO: 5171 - DNA, 133 bp, Glycine max
  Clone ID: LIB3028-023-Q1-B1-B11
taagtctaaaagacttattgctgaagatgattcctcattagccaagtaaaatggtattctggtagtaaaccagtaaaaaaaatttcaaacaaaatagtgtaattttactttataaaagaggaaagtctcactt

SEQ ID NO: 5172 - DNA, 191 bp, Glycine max
  Clone ID: LIB3028-023-Q1-B1-C1
agaagacagtaacgtcggacgcacgcgtacgtaaactcggaattcggctcgtgatgacactgatgatgatactgttatctcatagtcatacaggtgatagttttgaactatgttatagtaaatggaggtggcatactgccatgatgaatgctaattttttagtcattaaattctctttatttttctttgat

SEQ ID NO: 5173 - DNA, 363 bp, Glycine max
  Clone ID: LIB3028-023-Q1-B1-D1
ctcgcgttcaaagccggcacctccatctacacgcgcttcatcggcctctgcggcggcgaaaacggcgtcgttcccgaaacagttctcgcccttactccccaacagcttcggcagattggggtttcggggcggaaggccagttaccttcacgatttggccaggaagtaccagaacgggatactctccgattccgccattgtgaacatggatgacaagtcgctcttcaccatgcttaccatggtcaatggcattggctcttggtctgttcacatgttcatgattttctcactccacagacccgatgttctccccatcaatgaccttggggtcacgaaaggggttcagcgtctctacaacctcgag

SEQ ID NO: 5174 - DNA, 358 bp, Glycine max
  Clone ID: LIB3028-023-Q1-B1-D8
tcggggaattccaattccacattttcaagaaataaggaggcaaaaatgttcatatatgaattggaattatttgttttcttattaggcctatcctgaagccaaaggaaatgagatcggaattcctcggggaattccaattccacattttcaagaaataaggaggcaaaaatgttcatatatgaattggaattatttgttttcttattaggcctatcctgaagccaaaggaaatgagatcggaattcctcggggaattccaattccacattttcaagaaataaagaggcaaaaatgttcatatatgaattgggattatttgttttcttattatgcctatcctgaagccaaaggaaatgag

SEQ ID NO: 5175 - DNA, 233 bp, Glycine max
  Clone ID: LIB3028-023-Q1-B1-E10
acgcgtacataaactcggaattcggcgctaggtttgattgggattcgcactttgaggaggggaaatcgcaagggaatctagattccagaatggacgctcaaccacagcttagcggtgatgattctcagtgagtgggtgagacatgtgcgacactaaggtggaggtgattcactcgtggtctgatccatcatccctcactccgagtctcatgtattcattttcttattcggatg

SEQ ID NO: 5176 - DNA, 407 bp, Glycine max
  Clone ID: LIB3028-023-Q1-B1-E8
gacgtcggacgcacgcgtacgtaaactcggctttttatattctgttttattgggattctcactttgaaaagtggcaatcccaatcgattccatattctagaaatcaaactgaatcagagcttagcgtggtgaactcagtgagtgagtgagagatggcggagagtgaagtggaggtgattcattcttggtctgctccaagatccctcagtactagtctcatgtattctttttctcagagggatgacatagaagtgcttgatgagcccctctatgcaaatttccttagagtaactggtcttgatagaccctacagggaggagctactctccaaaatggaagctgatggagataaggtcactaatgacataatttttgctccaggaaagaagaaatatagattctgtaag

SEQ ID NO: 5177 - DNA, 339 bp, Glycine max
  Clone ID: LIB3028-023-Q1-B1-F4
cttgctcaccatacaatcaacggttgcaaccttaggccaggcgatctccttggaactgggacagttagtggtcctgagccagagtcccgtgcatgcttgctagaattaacatggaatggacaaaacacagtgtcagtgaatgagttaaatcggaaatttcttgaagatggagacgaagtcatcttaactggatattgcgcaggaaatggttactctgttgggtttggtacttgctcaggcaagattgtacccgcagctccatgaggctagtatcattccatagtcttttccacttgtggtgggaggagttgtatcaagagcctgcttgtttaatttacg

SEQ ID NO: 5178 - DNA, 158 bp, Glycine max
  Clone ID: LIB3028-023-Q1-B1-F6
cgagtagttaaagaatacaacatcagaaatccttttgattgcagaataatttactttgactagagaagggtaaacttcgtgtataaattgcatgaaaatggttgtacatggagcttgggcgcatgcaattcaaagaggcataaaaaatggattatcaa

SEQ ID NO: 5179 - DNA, 148 bp, Glycine max
  Clone ID: LIB3028-023-Q1-B1-H1
ctcagctgtcagaatccattcaggagtcatgaaagaaaccgctaactgaacaaccaaggtaagaaaaaaaggtgttaatttgagcaatcgtcctcgtgccagtttcagatctcgctgagaaatcattgtataataatgggggtgtcaa

SEQ ID NO: 5180 - DNA, 147 bp, Glycine max
  Clone ID: LIB3028-023-Q1-B1-H11
ctgctcccttttgcagttcccttgtgtttaactccattttcactaatgtaactacacctgtgtagcataaaaatctgtatgagaaccattatatttttatatattagaaatttgggtccccagaaaaaaaaaagaaaaatataaatg

SEQ ID NO: 5181 - DNA, 361 bp, Glycine max
  Clone ID: LIB3028-023-Q1-B1-H4
caagaagcaatcttctgtctggaaacttcaagcacaaccaaaagaggctgttaccgttgaaaattctgcacctgtacaggtcaatggtcctaaaattgctccaccagaagagaaggatgaccataatggaaaaccctctggtcctagcacttctgctgatgcatcttcaatttctgcatttatgaaccaagtttcagatcttgttaaacttgtggactctaaagatattatggagctgcaactcaagcaagcaaactgtgaactcgtgataagaaagaatgaagctttgctgcctccaccagctacatttgtagctccagtgtcacaaccatttccatatcccacaaattctcttccagca

SEQ ID NO: 5182 - DNA, 127 bp, Glycine max
  Clone ID: LIB3028-024-Q1-B1-A5
ttcggctcgagcgaagcttcaacgtctcttcactctcatccgtttttcactagttgtagcctctttgggtcaacaggccttcagatccagagccctcggggtttcggtgcgtacagaggcttccaca

SEQ ID NO: 5183 - DNA, 244 bp, Glycine max
  Clone ID: LIB3028-024-Q1-B1-B6
gttgtttactcactccagttgagttcaatgtcctctcaccgttttgagcacttaaaaggggagtgctttgtaaggtcgatgttactatagctgtcactttttttctctacagttccataatgcaacaacggggagagccgttcatcttctatgcttctaaacgcatttttccttgtacttcactctcaatcccttcagagttcaaactttcaagttatgaatataagaaaaacacgttatttta

SEQ ID NO: 5184 - DNA, 179 bp, Glycine max
  Clone ID: LIB3028-024-Q1-B1-C11
tttaatcttacatgtttcaagagacaatgtaagattaaattactcctcgttgtatatgtcgcacatgagcaatgaataaggcctcaaaatcaataagtcctatatattgctccaaaattcgatatgaactacaaagtactaatccttaaacctgagattttagtcttgcatagagtaaa

SEQ ID NO: 5185 - DNA, 395 bp, Glycine max
  Clone ID: LIB3028-024-Q1-B1-D9
aggggatccaccaagacccttggcaacttcgttaaggctacttttgattgcttgatgaaaacctatggattcctgacaccagaattctggaaggagactcgcttctccaaatctccattccaagagtacacagatctattggcaaaaccaacagggaagactctaatcttggaggaggaaagggtggatgcttgatttgctagttttggttttatggatgttttagagacattgttatttacctttgttggttctgtgctttacttttggttttgatagacggtggtatgtctctgtatggattttgattgtttcaagttttaatttaattgactgtagttttgaataaaaagactaaaagaaaagggcggccgccgactagtgagctcgtcgac

SEQ ID NO: 5186 - DNA, 313 bp, Glycine max
  Clone ID: LIB3028-025-Q1-B1-A11
caaagattttccttcacctggacttggctcaagatattgagttgggtttgcttgatcatttctattatctcacttgtgggttccatccaaggcctttcggttagtatcaagaaatacaagcccttccaagcagaacaatagaactttcatacttagtattccaacttgagccaagagtttctattgagggcgacaaaatttgtattactatgttttgaaatagttgttatattttcaattctcgaaatcgagacaacttgttatactaaagtaatataataaaatgtttactttgctaaaaaagtcaaattta

SEQ ID NO: 5187 - DNA, 341 bp, Glycine max
  Clone ID: LIB3028-025-Q1-B1-B11
aaaatggtatagtggtgtggaccctagtggcatcttggaccagtcatgtagcagttctcaatggctagatttctggacttgaaaaaaacaagcgagccacactttgtgctgcatctgcatgtgtgatgttttgtttcctccgagagaaggaacaaaagattggttgattggttggctcttgtgctgccagcaggtccaaaacattccagcctagccaagaaactcgaaggaagttttgtaggcttgatttgataggcgagagaattaagatagcctcactcaattcaattgtgtagagatttggcaaaaaacaaataatgtgcaatgtctctgtctgttca

SEQ ID NO: 5188 - DNA, 409 bp, Glycine max
  Clone ID: LIB3028-025-Q1-B1-B9
gacgtaggcgtacgtaagctcagaattcggatccagagaatatgtaaaaatttggatgggtaagactaacttttaaatctacaagtgaattattaagctggtgtcttaagacacatgcaatatgattctatcggtgggtgaaattgcaggatatgggcagacaggtatagggttgagccaaaagccaggaattgtcgatctgtatggagtcttagcttgtgagaaagccaatttgccacagccgctgctaaaatcccaaaggtattgatttcattccttacctcttatctcctagaatttaagtttctttcggtgtagatattctttgctcttaattttctcggctaaatttaagcgaaaataatttcttttttgctgaaaaaggtaaccacaaccacttttaggatat

SEQ ID NO: 5189 - DNA, 196 bp, Glycine max
  Clone ID: LIB3028-025-Q1-B1-E11
gcagatttacactagagcgacaaacacctagatgtactggttataatttatgtagtattgatgcaccgctgaagtgaaattttgtttttttctgtttgagacatacctcatgctagattgcatcagtttgacggttgctaaattcatgggttatttccttttgcatccttggtaatatatttgacacaaggctttc

SEQ ID NO: 5190 - DNA, 241 bp, Glycine max
  Clone ID: LIB3028-025-Q1-B1-F8
ctcgagccgaatcggctcgagatcatgttatccgtagcttcaactttctgtaacttcttgtataggcaaaggtttcaaaccttcaatctagccttctcttgcgtttgccaaaatgttatggtgaatagggaaggaaaaagatggaaaaaaatgtgactgtttcatgtactgatattgtaaaagctgctaaaagtattcaaattacaaaatgtaaaaaaaatgtaaaatgacttctctgttg

SEQ ID NO: 5191 - DNA, 233 bp, Glycine max
  Clone ID: LIB3028-025-Q1-B1-G10
cttgtggtgaaccttgcaaggtacaaggctgcaatatttcaagtcaagtttgcaataatcataagtgacttgtctattctacaccaacttcttttttcccttgtatttctcaaatcttttcatagttatctctggttgtagtattgagttacagcataatattcttactggcctcagtagatctgcgcgacaatatccagtttttaatattacaagcaaaatcttgtctataa

SEQ ID NO: 5192 - DNA, 224 bp, Glycine max
  Clone ID: LIB3028-025-Q1-B1-H10
tggaattttggtgatctctttttatttgatatgaatttgtcttgcaatgcttttgacaatgaagttgattgctaaattattgaatcagtgttttgcagaatatctgtaatcatttcaagattgtagttctaaggattcatgtttcttcaaaatctttaatgttgctgtttaatttttgttggctacttcctttactgtctccaatgtctcattaatcattttaa

SEQ ID NO: 5193 - DNA, 324 bp, Glycine max
  Clone ID: LIB3028-026-Q1-B1-B6
ctggatctgtagcgggtttgaagagggtaaaatctttttgtgaaagacatgcaagaaagtggtcaatgactacagaataaaatccacaaattaaggcggctactattttgtattgaatacctagcttctcaaatatccaatttttacaaaattggatcgttttacgaataattgggttctcaaatatccatttttttgtgccagctctagtttatcactagcttttaaggaaggattctccaagtatctaggtgtttatcaattggtatttgtgtttattgttgtatctaaaaaattatatattttaaataattttgtgacgct

SEQ ID NO: 5194 - DNA, 239 bp, Glycine max
  Clone ID: LIB3028-026-Q1-B1-D1
acggctgtgattgtgtaattttacatctttacatacaaaatttaaagtctttgtattttgtatgtaaagatgtaaaattatgattattaggtggtgcatgtgtcgcgtcatgggccaatgttatcctctgcttttaagttggaagaggcccaactcatgtgtgatgtacggctgtgattgtgtaatttaatttgcaaaatcaaaaataacaccagagtcatatatatgcatctcttaaa

SEQ ID NO: 5195 - DNA, 273 bp, Glycine max
  Clone ID: LIB3028-026-Q1-B1-E1
gtttaccttcacttcagatgttcggcacaaaatgctcactgttctatctagcaaatattaggtagatggtgttattagttcatgtatatgcaaagataatagggtaagcttgccggcatttaggagggtactttgtatcaatcaatgattatataacatttactacaggtgactatactttgaacttatcttaatttattgatgttattatgaaaattatataagcaactagatgtagttgactagtaaaaaaaaaaaagaaaaaaaaacaaa

SEQ ID NO: 5196 - DNA, 69 bp, Glycine max
  Clone ID: LIB3028-027-Q1-B1-H9
caacgaccaaaaaaaatgaggggggaaacaaaaataaaggttatgtaattaatggttataaatgctaaa

SEQ ID NO: 5197 - DNA, 371 bp, Glycine max
  Clone ID: LIB3028-027-Q1-B2-B4
gcaaaattcatatcagattcagaggctattctggtgggttcagcaagaaatgtagtacttggaggagcgcaactcggatgacttgttttggggtactaattgctttgcttattttatgtttttatgattttgtatttgtattcttttatggtgaattttttatgatattgttgtaaacccaacatatgtagaagaatcttttcatttaggtgtgcaacttcgtgctgagtagtttactacgaagttgggtgcacccgtggttgcttccacgtgaaaatttcgtacataataatacttccaaattcgtgttcaaaaattcataacccagtaaaagggcggccgccgatcagtgagctcgtccacccgggaat

SEQ ID NO: 5198 - DNA, 279 bp, Glycine max
  Clone ID: LIB3028-027-Q1-B2-C12
tgacgtcgcacgcacgcgtaaataagctcggaattcagctccagcatcagcccatccacctctactcgcgttttcgcataaacattgctggcctgtgtcatcacacgggataacgtctgatatcatgtgacgggagactcttatacaacatgccagtatcacaggcatcacattcagcacgctggaatctacactctgcaggactctattcttccagactccaatcggttcactcccattctattcttctcaacgtacactcatcatcgacatcccgct

SEQ ID NO: 5199 - DNA, 265 bp, Glycine max
  Clone ID: LIB3028-027-Q1-B2-G6
cgcgtacgtaagctcggaagtcggctcgagctctctctctctctctctagcgtgcacacaaaataatggacatgaaaaccatgcgactcatctcatgatccagaagtgagaaagggaccatggatcatggaagaagacttgatcttgagaaactatattgcaaatcactgtgaaggtgtttggaattcgttagccaaagcttctggtcttaatcgaacgggaaagagttgtcgactccgttggctaaacgaccttcggcctgatg

SEQ ID NO: 5200 - DNA, 69 bp, Glycine max; identical to SEQ ID NO: 5196
  Clone ID: LIB3028-027-Q1-B2-H9

SEQ ID NO: 5201 - DNA, 353 bp, Glycine max
  unsure at all n locations
  Clone ID: LIB3028-028-Q1-B1-E7
gtaaaaactagtgaaacttctgagtttgatagtgaattattagatgactttgcctccaatggcagtgtgaatggctcattcaacagcttggatagattgcccctgctacccgagtaataactacgttcacttaattgtatactcataatggagattagatataaacacgtgtcgcaagggtgatgtgaaattgtacaagtcatgtaatttttaaacatatagaaaaacattttttaatgctttttgaagcgttaagcaataagatgtacaacataccaaattatgatgtcactaatataatgtgttattatttcatgtacaaaataatagtgttaagttgacttgatcaaaan

SEQ ID NO: 5202 - DNA, 233 bp, Glycine max
  Clone ID: LIB3028-028-Q1-B1-H3
tcttccggctcctcgctcaattaacccctgcgctccgtccttccgcttccgggaaccgtatcaactcaatcaaaaggggttataacggtaaccacaaaatcaagggataacgcacggaagaacatgtgtgcaaaaagcgcaaaaaaagcgaagaaccctgtaaaggccccgtttctggggttttttcacatgcgctccgcccctgagaagcatcacacaaatctacactcaca

SEQ ID NO: 5203 - DNA, 338 bp, Glycine max
  Clone ID: LIB3028-029-Q1-B1-E5
ttagaatatcgtgggcagtgttctgtgaaccccccaaggagaagatcatcctgcagccacttcccgagcttgtcactgagacagagccagcacgctttccacctcgcacttttgctcagcatattcaccacaaactattcagaaaggatcaggaaggtctcccaaattgatcactgcaggcatcacatttgtatttgtttgcttgtcttatgaattacttcttagttcttatgggttgtactaataaactaggccttgcatgtcggtgtggcctcatcaatcatcatgctaagtttgttttatcctttattaaatactattgatattaatcgtgtttg

SEQ ID NO: 5204 - DNA, 161 bp, Glycine max
  Clone ID: LIB3028-029-Q1-B1-G10
tgggaagtaggtctgtttcatatagtatttcatgtgctttgtgcatgtcagctattatatttggtgtgttgttactggtatctaagctacaataacttgtggcctatttttcacatgagatacatttcatgggtgctataatttagaatttggacctgtca

SEQ ID NO: 5205 - DNA, 128 bp, Glycine max
  Clone ID: LIB3028-029-Q1-B1-G11
ctcagttgaaaggggaaaaagaagtacatcgttaacatttttgggtttcctcaaaatatacttgagtttatcattggattgaatctatattaaagtctgatagcaatgtttaaaaaactggatcttaa

SEQ ID NO: 5206 - DNA, 427 bp, Glycine max
  unsure at all n locations
  Clone ID: LIB3028-030-Q1-B1-A3
cgcgtccacgcgtacgtaagatcggaattcggctccgagagaataatccggttgattacttgtcaagggaacattaaaaataggggatttcattgtcagccagccttttgaggatgataaagatgaccttcggcgatcacctggcactcctgttttcactgcaccagaatgtattttaggtgtgaaatatggtggtaaagctgcagacacgtgggcagtaggagttactttatactgtatgatattgggtgaatacccttttcttggagacacccttcaagatacatatgacaaaatagtcaataatcctttagtactccccaacgacatgaatccaccattgaaaaacttaatagaaggacttctttccanagacccaagtttaaggatgactttgggtgctgttgcggaagatagctgggttatt

SEQ ID NO: 5207 - DNA, 377 bp, Glycine max
  Clone ID: LIB3028-030-Q1-B1-D3
cgctcaccttttcttctctctcttctttctctcctctgctgctttctcatggaactactgttctggtgggtctccaacgatgtaaacagccttgtcactcttctgggtcaaaacttccttgtttttctgccttttgttgctgctcattagcttcaccattctatatggttttcactttcatgttaatttttctatttctcatttctgcatcctcttggatttgtctatttgtgtggtgactgtatttcattttttgtgattattttctacccttttgccttgtttgatggatttggtgaagtctatctatttatcacttctgttttactttccgtgttcgtttgtgcatagactgacacatttgatagtcaagacac

SEQ ID NO: 5208 - DNA, 278 bp, Glycine max
  Clone ID: LIB3028-030-Q1-B1-D8
tgctgacaaatattgggatctgtattctaacgagtcacttgagcatgaccttcccggtcaccttctccgctaccccatcggggttgccagtgaaggagatgtcaccgagctgccaggatttgaattctttcccgacaccaaggctcgcattcttggtggcaaagctgactacctcccccctattctcactacttaatttgattttgtactttgttacaaacttgttattgcttacatcctaatctgtgttttcattactacttagtaataaagaagct

SEQ ID NO: 5209 - DNA, 334 bp, Glycine max
  unsure at all n locations
  Clone ID: LIB3028-030-Q1-B1-E11
gctagacagagtttgtattactggatggagaatgaagcaaaatcccgaataagccgcagttcaggctagtcatcctagttttcgtattgtattaaacatgtaatgaaaggttcaggagttactcaatgtgctgtcagtatgattttttgtgtgaaaatctgtttttaatatttttgttccaaaaggccagcttgttattggaacctgaagttgagtgttctcttgtaaactttgtattttgttcttatatctctttttatataaaacatcatttattgtaatgataatatttattgagtgatgattcanaanaaaaaaaaaaaaacaaaanana

SEQ ID NO: 5210 - DNA, 297 bp, Glycine max
  Clone ID: LIB3028-030-Q1-B1-F2
gctgagcttaaggtgaaggaactcaagaacggacgattggccatgttctctatgtttggcttctttgttcaggccattgtcaccggaaagggtccattggagaacctcgccgatcaccttgctgaccctgtcaacaacaacgcctgggcctatgccaccaacttcgtccccggaaagtgagcgtcaaagaacgaaatgacttttgagagtttttagatttgtgtttggtgaagtacttcagataatgtgaattatcttgtgtatccgaatccaacttaatgttacttgctttttaca

SEQ ID NO: 5211 - DNA, 380 bp, Glycine max
  Clone ID: LIB3028-030-Q1-B1-F4
gtacgtaagatcagaattcggttccaacccaaaccagactctgtcttttcttctctgtacggcactctcgcttccggcgttctgggggtcgcatcgccggcgattctccagtctgcttctcgcttcagccttcaattcaaccctctcgtcgtcgcttcactgattctctcttcgaaaatgcttccgatcgcatgctacggttttccttctcccaaatctccgtctccgaaagaagcctgtaccttttcatcctccgatgaatcaccttcctagttatggctattcgtgtaactttttccttttcgggctacgtcgcccagagcctcgcctcctcagtcggcgtgcgcgtcgccaattcgcgatgtgtccaggaatgctgg

SEQ ID NO: 5212 - DNA, 325 bp, Glycine max
  Clone ID: LIB3028-030-Q1-B1-G12
caacagcctccatggaggcttgaacaagctcgctgagttgttggaggtcgagagggttgggattagccatcaggccggctccgatagcttgctcacttcctgtacattcaggaaattgaaggataatttctttagtggctccttggagaagtatgcaggtgtcttgtatgggttaggtgttgagaatggacaaggttctcattgaggacaaaagaagatgataaaacttgttagatctctctttgtttgagctgcttctgtatatctgttgaaataccaatttctattaatgtaaacctttggcattaagtgtctttattaaaaa

SEQ ID NO: 5213 - DNA, 393 bp, Glycine max
  Clone ID: LIB3028-031-Q1-B1-E3
aagagctatgaaatcgcatgcacgcctacgtaagatcggaattcggctcaaagttaatctctctctctctggagcgtcctcgcttcgtcacggcacacaaccccttttcggatcggcggagcaatgcctcaccggcgagattcccgacgctgttcaatcagccatcgaacacctgcgaaaagccgcaaatatgaacgttttcgttaaaactcgcaatggcacgcacttcgaaattgaagtgaaaccctcagacacactttctgaagtgaagaataatatagaaaccgttcagggtgaacatgtctatcctgctgcacaacacatgcttagtcatcaaggaaaagttcaaaaggatggtactactttggcgcaaaatatactagctgaaaatag

SEQ ID NO: 5214 - DNA, 261 bp, Glycine max
  Clone ID: LIB3028-032-Q1-B1-D10
agctggagaaggagggatacagaatcattggaaacgttggagaccaatggagtgacctcctgggaagcaacaaagggactaggacttttaagctgcctaatcccttgtactatgattaagctctcaaatcaagcctctaagttgctccttaatttctatgaaataagatcctgagtattattacttagtcatgtaggggcactgaacaatgttgttttcccttttcgaggctttcatgaattatgagctcttgttccatta

SEQ ID NO: 5215 - DNA, 423 bp, Glycine max
  Clone ID: LIB3028-032-Q1-B1-D2
gacgtaggacgcacgcgtacgtaagctcggaaatcggctcgagtgtggttgttccaattttcctacctgattgtggggagtgtatcgattgcaaatcaagcaagagcaacctttgttcaaagtttccatttgaggtgtctccctggatgcctagatatgccacttctagattcacagatttaaaaggagagatcatacatcatttcttgtctgtttctagttttagcgagtacactgtggtcgacattgcccatctaatcaagattgatccggcaataccacccaacagggcatgcctcatcagctgtggtatatcagcagggataggtgctgcttggagagcagcaagtgtggagccagggtctacagtagctatttttgggctggggagtattggattagcagttgctgagggagctagac

SEQ ID NO: 5216 - DNA, 408 bp, Glycine max
  Clone ID: LIB3028-032-Q1-B1-G5
ctctagaggatcccctcggggaattccaattccacattttcaagaaataaggaggcaaaaatgttcatatatgaattggaattatttgttttcttattaggcctatcctgaagccaaaggaaatgagatcggaattcctcggggaattccaattccacattttcaagaaataaggaggcaaaaatgttcatatatgaattggaattatttgttttcttattaggcctatcctgaagccaaaggaaatgagatcggaattcctcggggaattccaattccacattttcaagaaataaggaggcaaaaatgttcatatatgaattggaattatttgttttcttattaggcctatcctgaagccaaaggaaatgagatcggaattcctcgggggtaccgagctcgaattcc

SEQ ID NO: 5217 - DNA, 73 bp, Glycine max
  Clone ID: LIB3028-032-Q1-B1-H11
gacgtcggatgcacgcgtacgtatagctcgagattagttcggggtcgacgatcagaatattcggtagcagatt

SEQ ID NO: 5218 - DNA, 317 bp, Glycine max
  Clone ID: LIB3028-032-Q1-B1-H2
atcggtccgtaagctcggtaatcggctcgagatcaacatcaacatcatgggtgtcactcctctcctttcgtatctctactatccgaaggcttgtcttctcaaatcaaacaacagcgtgacgaaatagaccaattccttcaagcccaggaggagcaattgcggcgggcattagcggagaagagacagagacattatcggacgctgctaagggcagcggaggaatcggtgttgcggaggctgagggagaaggaagcggagttggagaaagccacgcgccataacgcggagttggaggcacgcgcgacgcaacttaacgt

SEQ ID NO: 5219 - DNA, 209 bp, Glycine max
  Clone ID: LIB3028-033-Q1-B1-A3
aactcggaattcagctcgagatcacgaggaggagatttgcatagttgttgctgactcacccactgagggtcagtgggagggggggagtgggaggcaggtccgataggatcgtccgcgcgagaaacgtgggtgtggcctccatggcacgctatgtgaggcggcttgtgtgtgaggacacgaggcggagggatgcaacacaatgcaatctt

SEQ ID NO: 5220 - DNA, 198 bp, Glycine max
  unsure at all n locations
  Clone ID: LIB3028-033-Q1-B1-B3
ctcggaattcagctcgagaaaaggaaaaaatatatataaatgttattacgatatgtcagtagggtaaagttaggaaaggtggggaggaggatgatatatagcatgtcaggtgtgtgtgtagtgttcctggaggagctagctaggcacaaagggaagtacatgggagtgcaggggtgatggaaancatcattgtaatat

SEQ ID NO: 5221 - DNA, 71 bp, Glycine max
  Clone ID: LIB3028-033-Q1-B1-B4
gtaaactcggaattcagctcgaggattggttctggaggttgacacgtcccgtgtatcttccacactcagtt

SEQ ID NO: 5222 - DNA, 77 bp, Glycine max
  Clone ID: LIB3028-033-Q1-B1-C1
ggtaaactcggaattcagctcgagcttgctcatcaagtccaagaaccaacctagcgtttgcaatctcaattcaatgg

SEQ ID NO: 5223 - DNA, 79 bp, Glycine max
  Clone ID: LIB3028-033-Q1-B1-C3
gtaaactcggaattcagctcgagacaacatttgcgggtctgcctgcaaattttcgtcccctcaatctatattactcagg

SEQ ID NO: 5224 - DNA, 251 bp, Glycine max
  Clone ID: LIB3028-033-Q1-B1-D1
tgaattagtggcatatagaggagcataggcgtcggaagcacgcgtaggtaaactcggaattcagctcgagattcactttctccgagctcgtccttctagccgcaacctcaacctgtttctccgagaggcagggggaagggcggctgtcatggagggagttaagggtgtggagacgaaggatggaggtgtcgcagtagctgctgcgtgtgctggtggggaggagggcggggaggatagagaccacagatttt

SEQ ID NO: 5225 - DNA, 76 bp, Glycine max
  Clone ID: LIB3028-033-Q1-B1-D2
ggtaaactcggaattcagctccagactatctccgtccgtaacatcaagagaggaaattttgcggaggaagaagtgg

SEQ ID NO: 5226 - DNA, 69 bp, Glycine max
  Clone ID: LIB3028-033-Q1-B1-F8
gcacgcgtacgtaagctcggttcagccacagttgggagaaaaaaaaaggttgtgcgagatggcacgtac

SEQ ID NO: 5227 - DNA, 76 bp, Glycine max
  Clone ID: LIB3028-033-Q1-B1-G2
taaactcggaattcagctcgaggtctgtctgtgttacgtttcgagtatctgtggaatccctaaccctaagttagtg

SEQ ID NO: 5228 - DNA, 221 bp, Glycine max
  Clone ID: LIB3028-034-Q1-B1-A1
tatgcatctgtccaagctgcaaagttcatagctcaatagtccttttaattttttgttctctcaagtgaaatttcaatcctttttattgtctttttttgcatgcatgaacaacacaagaggaaggggttgtagctagtcaaatggagggtctaaatattatatcatcacatcactgtcagcaagtttaatttaaactttcaaatcattacattttagcaaaa

SEQ ID NO: 5229 - DNA, 380 bp, Glycine max
  Clone ID: LIB3028-034-Q1-B1-A9
atgcacgtctacgctagctgatccctcggggaattccagctccacaatttcatgacacaaggaggtttgcgtgacacaatggaatctggaattaatgtcgtcttcgtacttcggcctacacttacaccctctgaattgagatctgaattcctccgcgaagacaaagtcgatgcgtacatgggcgctctgccgcttcctcgctcaatgacacactgcactcggtcgttctcctagcagcgactagctatcaactcactcgaaatgagatctgcagtcatcgagaaaatcaggggataactcatgaaagaacatggaagcaaaaggctaacaatatgacatgaaccgtcttgtggtcgcattacgggcattcttccacaagc

SEQ ID NO: 5230 - DNA, 332 bp, Glycine max
  Clone ID: LIB3028-034-Q1-B1-G12
gttcctttcaaccaaagtacaagaagatgaggaacattataggtttggtttctagagctattatacctaagttttgggtggtgggtgtaaatagtggcttggggaagaagacagtgacaatgtactctttacaaataggtggattgtctagatatggaatggtgaaataatatgtagtacaactaggttttcctaaatcttgtgcctacattcattcagtgcaattacaattttaatacgttaatttaatgagttatagatcattgaattgttaatttgacacgcaaataaagggctgacgccgactattgagctcatcgagccgggaatta

SEQ ID NO: 5231 - DNA, 232 bp, Glycine max
  Clone ID: LIB3028-034-Q1-B1-H5
tgcggcggcttccgcgctcactgactcacagtacttggtcattccgcagtggccacctgtaacacggcactcatgtgctgtcagatggttaactacagcagcaagggatcagggaggagcggttatcttagtaaaacgccaggataaggttacgaatcagtaagtaagacgggtatgcaggtgtttgtccatcagctccggccccctgaagagtagcagcaaactggacact

SEQ ID NO: 5232 - DNA, 344 bp, Glycine max
  Clone ID: LIB3028-035-Q1-B1-B10
caatcctgagttctcaaggattggacaaatatggttctgaggctttgcttgtcaacttcactgctattatcacagtcttatttggtgcctttgttgtgttatctgctctagctgatgctcccccagcccctgccgcagatgactatgaagccatatagacacttctgtttgtaagtttgtctcatttttactttatggaataatctcatgtctgctataagtttatattgggagtcggaagaaggaaataatttattgtttgtattcttggacataaagctcgtaattaatcatcaatttcaatatattaaccctaaaatgtgaaattagtcgttgggttaaaa

SEQ ID NO: 5233 - DNA, 159 bp, Glycine max
  Clone ID: LIB3028-035-Q1-B1-C3
gcacttgatatttttaaatacttgtttagatgttacagtcccactcttacatgtataaaaggatctacttgtccacattatccttcaattttgggtttgggcaatgtgtttctagtgaataaaaagagagaatgatagttatgatagttatgatagaaa

SEQ ID NO: 5234 - DNA, 242 bp, Glycine max
  Clone ID: LIB3028-035-Q1-B1-D3
tgcccttgttgagcaccggatttgaattgaggccaactaatttctttgagagaaatccagtccttaagaccctttctcctggcattgttaaatttccaggttgtgagaaaccctagatttgcttttgagctttgtcactttaagtacaatattgttgatcgatagatccggagaaacattatctttttactaatatcggtcatatgtgctaaggtgagaaaaataataattttgaataaaaa

SEQ ID NO: 5235 - DNA, 165 bp, Glycine max
  Clone ID: LIB3028-035-Q1-B1-E7
ctattctgtatcaaatttcagtcagatattggctgtgtacatagggttatattattgatgcactgtatttgtattcaaattccaattccaaatggcgaacatatttgattgctgttagtttcccaggttatgtagactatgtgacaatgcagcattatttggaaa

SEQ ID NO: 5236 - DNA, 291 bp, Glycine max
  Clone ID: LIB3028-035-Q1-B1-F12
cgacgatatgcttatattggtgacattgttgttgctgtaatcaaacaagcagtaccaaatacgaacttagaaagatcagaagtgatcagagctgtaattgtacgtacttgtaaagaactcaaacgtagcaacggtataataattcagtatgatgaataatgctgcagttgtcattgatcaagaaggaaatccaaaaggaactcgaatcttttgtgcaatcgcccgggaattgagacagttaaatttcactaaaataatgtatccatagcacagtttcgtcttataatacct

SEQ ID NO: 5237 - DNA, 376 bp, Glycine max
  Clone ID: LIB3028-035-Q1-B1-F2
tcggggaattccaattccacattttcaagaaataaggaggcaaaaatgttcatatatgaattggaattatttgttttcttattaggcctatcctgaagccaaaggaaatgagatcggaattcctcggggaattccaattccacattttcaagaaataaggaggcaaaaatgttcatatatgaattggaattatttgttttcttattaagcctatcctgaagccaaaggaaatgagatcggaattcctcggggaattccaattccacattttcaagaaataaggaggcaaaaatgttcatatatgaattggaattatttgttttcttattaggcctatcctgaagccaaaggaaatgagatcggaattcctcggggg

SEQ ID NO: 5238 - DNA, 257 bp, Glycine max
  Clone ID: LIB3028-035-Q1-B1-F6
ctcgagccgattatcaagtaaacaaccaacagaattgggactgtgacttctctggtttggctgtcataacacataaggatccatcacaaaatggatgccaattccctgtaatgatttctagtagttcttctttgcttcttcatggagggctttcagaaatccttaagaaagcattgagggtgtatatttttgtcatgtttttgctatagctgaaagatttaggcaatggtggagtattttagaatgtgttctgacaa

SEQ ID NO: 5239 - DNA, 183 bp, Glycine max
  Clone ID: LIB3028-035-Q1-B1-G4
gacttgtatatttacctgtgaagtttcatcattttcttgttttgttcataattggcatgagctgctgcattgaacctagaagtgagtctctggctctctccaacgagaaatcatatgtaatgtaattcttgcacacccattaaatatgagaaagaagtatacatcaaataaattaatttttga

SEQ ID NO: 5240 - DNA, 369 bp, Glycine max
  Clone ID: LIB3028-035-Q1-B1-H8
ggtttgcaaacacctgcaaagatcagcacatatactattggccctttccaatctacaaaaaatgaaaaagcaaaagttaaagtgaaagttcggttgaatgtgcatggaattatatctgtcgaatctgcaactctactggaagaggaagaagaaattgaggttccagtttacaaagaacctgcaggagaaaattccaagatggaaactgatgaagctcctgctgatgctgctgctgctgctgcaactcctagcaccaatgacaatgatgttagcatgcaagatgctaataccaaggcaactgctaatgcccctggagccgaaaatggtacccctgaggcaagagataagcctgtgcagatggatactgat

SEQ ID NO: 5241 - DNA, 377 bp, Glycine max
  Clone ID: LIB3028-036-Q1-B1-B11
tcggggaattccaattccacattttcaagaaataaggaggcaaaaatgttcacatatgaattggaattatttgttttcttaataggcctatcctgaaaccaaaggaaatgagatcggaattcctcggggaattccaattccacattttcaagaaataaggaggcaaaaatgttcatatatgaattggcattatttgttttcatagtacgcctatcctgaagccaaatgaaatgagatcggaattcctcggggaattccaattcgacattttcaagaaataaggaagcaaaaatgttcatatatgaattggaattacttgttttcttattatgcctatcctgaagccaaaggaaatgacattcgtattcctcgggggt

SEQ ID NO: 5242 - DNA, 220 bp, Glycine max
  Clone ID: LIB3028-036-Q1-B1-E6
ctcgagccggaaagattccaccattcaaggatcaagaaactgttaaaacaaaatatccaagtttctatgacaaattagaaacaatttgtgtacaaaaatgttaatttgtacatgttgttggggtttgtttggaggttagttttataatatactttgtagataaggtattgtaaaaaaaaataaaaaaaaaaaaaaaacataaaaactgaaacaaacaaaa

SEQ ID NO: 5243 - DNA, 315 bp, Glycine max
  Clone ID: LIB3028-036-Q1-B1-F8
tatggatctgatgccattcccttctcttttttgtcaataataccaaggatttttaatcttgctagagggatgaacaaggaaacacaaagggatgctgtgaccatcagatgagcaacaatgttgtaaatgtagagtatagctaactttattctgcaactgtatcccaagactcattatcctcaattgtattattacaaattacatactaggtgtcattgcaaagcaccaggcacagtactgacgcctgtgttgttgatattgatactttatttataaaaaaaaagtttcttggatttttttttcaaaaaaaatgag

SEQ ID NO: 5244 - DNA, 288 bp, Glycine max
  Clone ID: LIB3028-036-Q1-B1-H10
gcaagtactgtacggcattgcaatggtcaccagtcaacagccaaggaacgctcactatagctcctacacctcacttcagggtgctgcgtgtccaaagcggcttggggaagaagacagtgacaatgtacactttacaaataggtggattgtctatatatggaatggtgacataataaatagtactactagttttgcttaaatcttgtgcctacattcattcagtgcaattacaattttaatacgttaaattaatgagttatagttcattgaattgttaaaaagaaactc

SEQ ID NO: 5245 - DNA, 118 bp, Glycine max
  Clone ID: LIB3028-037-Q1-B1-B10
agcagattgactgctaatgatgttatacaatctccatgaatatatttgcaagcccttgttaagactccttaattcacggaaatcaagctttagttattttcactagcttaattaatta

SEQ ID NO: 5246 - DNA, 313 bp, Glycine max
  Clone ID: LIB3028-037-Q1-B1-D3
caactattggagcatcgaggatatctggtcgtctatgcaattactcaatggagattaaacctagctatatgcatgcctatataaatcatatatatgatgatatataaacctaagctcttgtagagtgtgttcaggcttaataacatcattaggtctgtttatatgagtagtctaagtttggtgtttgtaatgcatgatgtgagttaagaattaatttagttatggattgaaatatatagtaacttatatactacatgtgcattctcctattatcgtaaataatatggttgttgtaccataaaaaaaaaaaata

SEQ ID NO: 5247 - DNA, 322 bp, Glycine max
  Clone ID: LIB3028-038-Q1-B1-B10
aaaaaacagaaaaatacttttcttccaaaaaccttggttaaatatttacataccattaaaggatttcccaaagcggcaacatttaaaaggaaattcaaaccaaattgccccttaaggtggacaatataggattcaaagaaccgattataaaaagggaaacccaagatttaacaatctcaatgcccaacacacttcccagaaaagaccgttctcttttccatttcatccaaagactcctgccctgattcaagggacacataggatttcatctgttcttcttgcatcacatcatctacacaatatgacattccaacacacacca

SEQ ID NO: 5248 - DNA, 96 bp, Glycine max
  Clone ID: LIB3028-038-Q1-B1-B12
atgactttctcaagccaaagtgcatgcatgcctcagtcatttcagatgtatttcattctgtgtattaagaaacagatatcagagtagaaaaagaaa

SEQ ID NO: 5249 - DNA, 140 bp, Glycine max
  Clone ID: LIB3028-038-Q1-B1-B3
gtttttgatgataaacttgtgctggctaagacacaagaattctttgctggaaaagctttacctgctccttgtaaacccaacagatcaatgctcaacagtagatcaatattatcatttgaatcaggagcattcctcgagcc

SEQ ID NO: 5250 - DNA, 123 bp, Glycine max
  Clone ID: LIB3028-038-Q1-B1-C11
gcaaaattcttaaccttgtaatttacctgtacgcttaaatttaagttatttaaaaacacgtgattattataaaaaaacagttatttttttaatatatcaggtaacttttgtgtgttaaaaata

SEQ ID NO: 5251 - DNA, 193 bp, Glycine max
  Clone ID: LIB3028-038-Q1-B1-C2
ggagctagtaggataagagaaaaatgttatagtgtcgacatcattatttcatattttgggggccaagatggaaaggaatgacagatctttgaaccctcataattttgtaagtagcatgtaaagcaaaattattacatgataccagtagaatgacatcatatgtaacaatattttgtgaaaaaaaaataaaaac

SEQ ID NO: 5252 - DNA, 342 bp, Glycine max
  Clone ID: LIB3028-038-Q1-B1-F5
gggcaatttagcttgcacatactcaagcattccaccattgtggcaaagccaaggtcattttagactccaccacatgatcatgatcatatgatcaatccccttaattttttcttttttcttttcccttttctttactctgtattgtatcaatgcttgaaaatggggttgttccaaaaatgtcatatatatttggcctgctaatgggtattgtaaatctctgaacttgaagtgatgcacggttttgagatggttttctaataaacctacacttttgtctctaaaaaaaaaaaaaaaaacaaaaaaaaaaaaaaaaaaacaaaaaaaaaaaagagaaaacaataa

SEQ ID NO: 5253 - DNA, 224 bp, Glycine max
  Clone ID: LIB3028-039-Q1-B1-A11
agaagagcactgacgtcgcatgcaagcgtacgtatagctcggaattaattccggaacggtatctgtctgagtaataactttcaatctacaatattaaagcataaatgtctctcaatgatatcataaatgtccctcagtgaggaatataagatctttcttaactaggtaatcaagactgagaagattgtgaagtatttttttaatcgaaggacagttagtgattc

SEQ ID NO: 5254 - DNA, 506 bp, Glycine max
  unsure at all n locations
  Clone ID: LIB3028-039-Q1-B1-A7
cgcgcgtacgtaagctcggaattcgggtcggggggganggaagccaaagcgaaaccctaaccctaacggagagatggcggagcacttggcatcgatattcgggacggagaaggacagggtgaactgtccgttctacttcaagatcggcgcgtgcaggcacggcgaccggtgctcccggcttcacacgaagcccacaggtagcccaacgttggttctgtcgaacatgtaccagaggcccgacatgaacatgaacatcatcaccaaccccgatcagccccagccccaatctcgcgacgccgatgaggtccaggatcacgtcgacgacttctacgaggatcgcgttggggagcttagcaggtaggggcccagtcagagcttgaagagttgggacaacctcgccgatcatatggttggaaatgtgtacgttcagtttagggaggaagaccatgcagccaacggcctcatgaatctgactgggaggttttattcaggtcgacccatcattg

SEQ ID NO: 5255 - DNA, 483 bp, Glycine max
  Clone ID: LIB3028-039-Q1-B1-B5
tacgtaaactcggaattcgggtcgggcagcagcgtccaggtgcatccccttcctccgtcaaacccacgcccatttcattcttctcaattcccaattccaaattagggttagggttttcacaatctcaatgaccttctcttcttccttcaccttacaatccctattccactaccgctactactactccctttgtcttcgtcgttgtcgttcgtaaggattaatcaattaacctatcgaatcgtttcagtatcgtcgtcttcgttgtcttccatgggcctcgctcagccgcagtcggaggtgtaggtcggagtttcttcctcgcacgcgtgggggggctcatggctccgacgcggcaggtcggcgtagggctgcatgagaggggaggacggagaatggcaacttagatgttgaatcggacgacgatgaagacaaagaagtcaaggagtttcgcattcaaggccactcaatgtgcctcaagaggcg

SEQ ID NO: 5256 - DNA, 602 bp, Glycine max
  Clone ID: LIB3028-039-Q1-B1-B7
tacgtaagctcggaattcgggtcgaggttctcccacaccacacccatgacactcctcctgctccttattctcctctttcacgcggcggaagccaagggacagtggcagctcctccacaaaaacatcggcattgtcgccatgcacatgcagcttctccacaacgaccgcgtcatcatcttcgaccgcaccgacttcggactctccaacctaaccctccccgacggaagatgccgcaacaacccaaacgagttggtcgtcaaacgcgactgcaccgcgcactccatcgaatacgacgtcgcagccaagacattccgcgctctctttgtccaagccaatgtctggtgctcctccggttcggtctctcgcgacggaacattagtccaaaccggtggcttcaacgacggctaccgtgcggtcagaaccttcaccccgtgccgctcgtgcgactgggcagaagttcagcatggactcgcggggcagagatggtacgccaccaatcacatcttgccagatggacgtcaaataattatcggaggaagaagacaattcaactacgagttttacccaagacacaaggcaagaatacttagagtttacctttt

SEQ ID NO: 5257 - DNA, 210 bp, Glycine max
  Clone ID: LIB3028-039-Q1-B1-C5
tacgtaagctcggaattcgggtcgggaaggattttaagcttgagaggtctagtatgtgttatatacataacaatatataataaaaacttgcatgttaccattatatgtagctttgtgattgtgtgtttctatatcagtgtagccatcttgttacttaaatatttttcttatgttagactgtgatataaataagatttgaatttctcttct

SEQ ID NO: 5258 - DNA, 501 bp, Glycine max
  unsure at all n locations
  Clone ID: LIB3028-039-Q1-B1-C7
tacgtaagctcgggagtcggggcggggagggtggnaccatggctactgctgaacattttatggcaacagatattgaatgggatccaactggaagatatgttgcaactgcggtgacttcagttcatgaaatggagaatggtttcaatatatggtctttcaatggcaagcatctatatcggattctgaaggatcacttctttcagttcttatggagaccaaggccaccatctttcttgactccggagaaagaggaagagattgcaaagaacttgaagaaatacagcaggaaatacgaggcagaagatcaagatgtttccttgctgctgagtgaacaggagcgtgagaagcgcaggatgttgaaagaagagtgggacaagtgggttaatgaatggaagcagatccacgaagaagagagtttacagaggcaaaagctcagggatggagaggctagcgatgaagaggaggaatacgaggcaaaggacatcgaggtggaggaagtga

SEQ ID NO: 5259 - DNA, 238 bp, Glycine max
  Clone ID: LIB3028-039-Q1-B1-F12
cgaggtattcagtctgttgatagtctgtcatgcactcccactggagtggaaacacctgatgttattgacctccggaagcaacagatgaaagagcctgaaaggcctctttatcaagtactcgaagagaatgaagaaaaaattgctcctgaaactttgcttggaaccactcacacttatgttgttggcactggcacacaggacaagtcaagtgctaaaagggttgatctgcttataggtc

SEQ ID NO: 5260 - DNA, 319 bp, Glycine max; identical to SEQ ID NO: 1348
  Clone ID: LIB3028-039-Q1-B2-A10

SEQ ID NO: 5261 - DNA, 325 bp, Glycine max
  Clone ID: LIB3028-039-Q1-B2-B1
gcacgcatacgtaatctcgcgcattctgctcgactaagcatatacaacctcagaatgacgacaccttaagaaacatcactgggccatctaaaatgccttacactctgctctatcctactaatgaggatggattgactttcaaatgaattcccaacagtatcgctaactaaaggctctcgcattgaggttgctgtactacacaaggtgtttttcaataatggtaaatacgaggaatatgattctgtcatctacctacctatggtcaagttacatttggggtggttgaaagttctcgtgtttgctgtactctgtttatataacagat

SEQ ID NO: 5262 - DNA, 458 bp, Glycine max
  Clone ID: LIB3028-039-Q1-B2-C1
acgtcgcacgcacgcgtacgtaaactcggaattcagctcgagcaatgctgattcaatggattacacatttaccatgccacaaagttccgtcgagcattatccggcagaggaggtagttgacaaggtggtgaaagacgcaataagcaaaccatggctacccttgcccttgggtttgaaacctccttccccagatactgtgttggctgagctatccaggcaaggcatttccaacatccctccaaagggttcaaattcatgctgacctggatgcatgcaccaaagagagtggttctgatggtgaccaactacaaaaaggttccacctgatcaaacaccctgttgcaattacttttgttttctctaagtgtatgatgttccaacttgtagtttgagtgggaatacgagttgttggagttgggaccattttgttttgtttatttggtcccatcaaaccaaatt

SEQ ID NO: 5263 - DNA, 452 bp, Glycine max
  Clone ID: LIB3028-039-Q1-B2-C3
aatcaccgcagtctgctccaccccaaacactaattccctatcctaatccgctttctctcaaccatcatccgcagaggtaagtccacgacagaatctctcataaccgacgccaaaattgctgtgaataaaacaggggccgccatgaacacgaggaaaaccccccggtcagggaatgcagtgaaggatcagctcaccacacaaaggagttcaaataccttcccaaatggtacagacgcattcaggcatgtgttcaaccacgaacatcagtggatcagatcgtgatcagctataggacggttccacctgatcaaacaccctgttgcaattatttttgttttctcaaagtgtatgaggttccaacctgtagtttgagtgggaataggacttgttggactagggaccattttgttttgtttatatggtcccaccaaaccaaatttaaggtctctcct

SEQ ID NO: 5264 - DNA, 68 bp, Glycine max
  Clone ID: LIB3028-039-Q1-B2-C5
atagaagacaaatgacgtcgcatgaacccttacttaacctcggaattcggttcaacaatggcggatcc

SEQ ID NO: 5265 - DNA, 80 bp, Glycine max
  Clone ID: LIB3028-039-Q1-B2-F6
gatttttgtaccatcatacttcaattcaatgcctacatccttttaaatcaatatatcaaaattacagcgtttatttaaaa

SEQ ID NO: 5266 - DNA, 224 bp, Glycine max
  Clone ID: LIB3028-039-Q1-B2-G3
cagaaagatccagcactcactcgtccaacttcgtctctctctcgttccgaccaagatgtcgatcaacagcgaatctacgccgccaccggtgatcggaaaaatcgggccttacaccgtcttcatgacgccgccgtccacacccaaacccgccgacgacaaccccgttaccaccaccaagatcgcatctccgccgcctcagattcgcaaagccgttcgttcgccca

SEQ ID NO: 5267 - DNA, 320 bp, Glycine max
  Clone ID: LIB3028-039-Q1-B2-H1
caccatggtaaacggaatccgtacaacacacatgaaactcaacatctcacatgtgtcatttctgtgtcatgacctgaactcttctttcctgggaatctcatgaggctggatctccgttctgtgagtcataatgctcgcagaagtatgccaaagcttgggatcaggacacatgattgaagttttgcgggatatgctgcgacaagtgcaactgtgtcccatctaggacttatcgaatcattgaccacagtccctgctacacggacatgattaataccaatggcaatgacaaatgcacttggacaagatacaagttcatcatc

SEQ ID NO: 5268 - DNA, 415 bp, Glycine max
  Clone ID: LIB3028-040-Q1-B1-A10
atgaacccttacttaacctcggaattcggtccaaggcaaaagaaaattcaccatgcattatttttataaatgaaattgatgcaattggtacaaaccgttttgatagtgaagtaagtggagacagagaggtacaacgaactatgttagaattgcttaatcagcttgatggttttagcagtgatgaccggatcaaggtgatagcagcaactaaccgtgcagatattcttgatcctgccctgatgcgttctggtcgtttggatcgtaaaattgagtttccacacccaagtgaagaagcaagagctcgaattctacagattcattcaaggaagatgaatgttcacccagatgtcaactttgaagaacttgcccggtccacagatgatttcaatggcgcacaactgaaggctgtctgtgt

SEQ ID NO: 5269 - DNA, 381 bp, Glycine max
  Clone ID: LIB3028-040-Q1-B1-A3
cacccttctttgaatgttctcgcacatcacacccatgacactcctcctgctccatattctcctcgttcatgcggaggaatccaatggaccgtggcatctcctccacagaaaccaccgaattgttgccatgcacatgtcacttctccacaaggatcgcattatcatcttcgaacgcaccgacttcggtctctccaatctaagcctccccgacggtagatgccacaacaacccaaacgaattggtcctcaaacgcgaatgtaccgtgcactccatcaaatacgacgtcgcagccaatacattccgcgctctcattgtccaaaacaatgtcatggtgctcctccggttcggtctctcccgacggaatattagtccaaaccggtg

SEQ ID NO: 5270 - DNA, 356 bp, Glycine max
  Clone ID: LIB3028-040-Q1-B1-C4
ttgaaagcggaaaacatattgattaataggcaaaatgaaacgagcagaacatgttatgttatactagaaattgttcttaactcgttgaaatacaggttgtaatgtatctaagagactgagtattcacacttgacagggattaggtaattaaaataagaataaatttggtggcctaaaaaagagacgcccaggtatgtggtgagaagctaaggccaaacatctccttcagccctgtaaagctcaataactttgcaacaaccgcagcactctccacgatgtgattcatatcggtgctgctccatatgcgattcgccagctgcttcctccggcgctttgaatccaattcaatgccccac

SEQ ID NO: 5271 - DNA, 120 bp, Glycine max
  Clone ID: LIB3028-040-Q1-B1-E10
agtattctgcataagacaatggatttggtggtgatggacgattaaacacttacatgtaagcaaagatgaaaacaagataattgcataaatgtttttcttttatgaaaaaaaaaacaaaag

SEQ ID NO: 5272 - DNA, 389 bp, Glycine max
  Clone ID: LIB3028-040-Q1-B1-G7
cgatactaaacataaaatagatatctatatagatagataatttgaaacaaaatcaattaaaatatggaaaaggtactctaggggggattttttgtcttttcctagagtccgattcctattccttcttgtttgtgtcgaaatagaaatattctaaaaatatcaataaaataatcttttttaaccccttcctgaaaaatcctatatcttagtttctattttttccaacttagaatatttctgccatataatattttattgcatataatacgtagtgaacaaataaaaagagagggggttggggaatttgattaaacaaatttaatttcctcaattaacttgtaaaaaaaaaaaaaaaaagaccggcggccgactagtgagctcgtcgaccc

SEQ ID NO: 5273 - DNA, 415 bp, Glycine max
  unsure at all n locations
  Clone ID: LIB3028-040-Q1-B1-H4
atgcacgcgtacgtaaactcgggaatccgctcggagaatttgcaaataagggcatccannaccagaacctaatcatccttttattgcaaacttttgcgcattgggatttggagggcataaaaaagatgcgatgctacacgcaaacaagtagttcaagtccaataagcaaagcaagatagaaagattggctagctcacacacctcaattgatacaacacccagttgctgatagttattatatagagttcaattcatgcttgcaagcttaaccatggaacggtatgagataattaaagatattgggtcagggaactttggtgtggcaaagctggtcaaggaaaaatggagtggtgaattgtatgctatcaagttcattgagagaggcttcaagattgatgaacacgtgcaaagagag

SEQ ID NO: 5274 - DNA, 327 bp, Glycine max
  Clone ID: LIB3028-041-Q1-B1-B12
gaagtcgcatgcacgcgtacgtaagccccgaaatccggtcgaaccgacaattggattgtaatggaaaagatgaaatgagagaattaataagtgtccaaaataataattaatgaaaattgttaagaaagaagaagaatgtgtccccgaagtcaacgggtccggtgaccggaaggggaaggttcaaccgattccaaacggtgcctcaacctccgaaacaaggctttaagggttccaacaaccaaaaaccttaaaaattcctcaacgaaaccgttcaaaaggttcgcccgctggtccggccccaacctttcaacaaacttaaccttcttc

SEQ ID NO: 5275 - DNA, 284 bp, Glycine max
  Clone ID: LIB3028-041-Q1-B1-C3
catcacccttccaattccaaacatccactaggttcaagcatgaccccctgaagctgctatgcttcacttggataaataaaagcaccaatctctactctgaatttggattctggcttcctgtcattaactatacacatattatgctacattatctgttggagatgatgttttcttttcaatgttccaattcttcttcgcctttgaattagtacgtgtatttctgtggcacttttgcgttactcgtgtaccttgagtcccattgctatacaacttattttatgatg

SEQ ID NO: 5276 - DNA, 385 bp, Glycine max
  unsure at all n locations
  Clone ID: LIB3028-041-Q1-B1-D5
tcggggaattccaattccacattttcaagaaataaggaggcaaaaatgttcatatatgaattggaattatttgttttcttattaggcctatcctgaagccaaaggaaatgagatcggaattcctcggggaattccaattccacattttcaagaaataaggaggcaaaaatgttcatatatgaattggaattatttgttttcttattaggcctatcctgaagccaaaggaaatgagatcggaattcctcggggaattccaattccacattttcaagaaataaggaggcaaaaatgttcatatatgaattggaattatttgttttcttattaggcctatcctgaagccanaggaaatgagatcggaattcctcggnggtaccgagct

SEQ ID NO: 5277 - DNA, 417 bp, Glycine max
  Clone ID: LIB3028-041-Q1-B1-D6
acgcgtacgtaaactcataattcggctcaagatcttcctaatccacatggaaatctccaacgtccttttcacgaagatcctcatcaacgaaatagtcatggacgaaacaaggcgtaacacaccccagtacaacaagcttgaccgcatgatctcttctgaattgatcactcttgtgctcttcaaaatcgcatacttcactcttcttctcatattctctctcctttctacctcggcagtagtctacaccatcgcatcaatctacaccgcaaaagaagtgacattcaagagggtcatgagtgttgtccctaaggtgtggaaaaggttaatgttgacctttctatgtgcctttgctgcttttttcatttacaatatcgtgaccatgttggttatgttcttgtcaatagtcacaatatggat

SEQ ID NO: 5278 - DNA, 401 bp, Glycine max
  Clone ID: LIB3028-041-Q1-B1-E1
caagcctccgccgcaattttccggccatgtacctcgaaatcgaggtttttgaccggctcttccggtaaacttaaccgggaagtgactatgcggccaatggggtgccctccttctgcctctttcaaggttgaagccaagaagggagagtggttacctggcttggcctccccaacttacctcaatggcactcttcctggtgacaatggatttgaccctctggggctagctgaggacccagagaacttgaggtggtacgttcaagccgagcttgtgaatggacgttgggccatgttgggtgttgcaggaatgttgcttcctgaggttttcaccaagtttggaatcatcaatgcccctcaatggtatgatgctgggaaatcagagtactttgcatcttcctcaac

SEQ ID NO: 5279 - DNA, 253 bp, Glycine max
  Clone ID: LIB3028-041-Q1-B1-E12
acgcgtacgttagctcggaaatccgctccaagatgcaattgtgaaccggggggggccaagtcacaatgggaaattcaactacgggtaagccaactcccctggcaagagatcctcaatgggagaattttaagaaaccaggatttgaggggttgaaagggaaaatggtgggcctttcgcgatttttgatgggatggttaaaccatcctggcctcctcaactccaggttgggcactgaatgggaaacatgcccaaa

SEQ ID NO: 5280 - DNA, 339 bp, Glycine max
  Clone ID: LIB3028-041-Q1-B1-E8
tttgaaattatctctaaaatggctcattgatcattcaatgtgtatatgtgactttttttattcctgggaacccaaaccatttgcactatctcaatcattattcaatataacctaataatgaatgaacatattaattgaaccatgccagcacacattattgcaatgttttacccttcaaaagtgagtgtcctccaacgctttctccgccttttaacgcacaatgggttctttgcaaaaacaatattgccgtcaaagaacggtgtagaaggaggagaagaaatagcgtatgctcttactcctccttcgaagcttctaataagaaacaagtcaatatgtttg

SEQ ID NO: 5281 - DNA, 292 bp, Glycine max
  Clone ID: LIB3028-041-Q1-B1-F12
tcgcatgccacccgtacgtaaactcggaattcggtccaagaatgacaacggtagctgcttctctggatgccaatcaggtgtcaacctcgaaaactgaccaaaaccagttgtgtgacggtgatccccagactagccatgtcttcaaatcataattaccagatatcccaatctcgaaccagatccctctcaacgcttactgctttcagaaactatcccaattctccgaacgcccatgcctcatcgtctgacccgccgccaagacctacacctagtccgagagatacctcatttc

SEQ ID NO: 5282 - DNA, 361 bp, Glycine max
  Clone ID: LIB3028-041-Q1-B1-G12
atccacgcgtacgtaagctcggaattcggctcgaacaaaaaaataacgacctaaaatgccttcaagtgaatgaacaataagtttaagaccaaattaaagggggtttggtgccaatcccggaacaggggtcattggccaagaaattacggaccaattggggggtaggctttccaataaccaccaatttatgacataaacgcaccaaacctttacattccgtaaatggcatttggtacctatgtcattcttgctggcctctcattgggtcttcacggaaagtttagtcgagaagctttgaacttagtattcatcaagggactgctcagttggtttatgcaagctgcactacttaaggtgacac

SEQ ID NO: 5283 - DNA, 369 bp, Glycine max
  unsure at all n locations
  Clone ID: LIB3028-041-Q1-B1-G3
cggattttgtgattgggagagaaaccgacccagttgtgctactgcgaatgccgctgtcccgtgcaattcgaaggttctgaagaacaagggtttagaattagggtcttaaaccaactcaacctactttgtgggtaaaattagggattcaggtctaagttgaaaaattagggttttggcaagtcccctaaatgtcgacgggcaaacccagagacggtgagtttcagatggtcccggcgccgggaacctcaaagccgccccttccgccggtaacagcaactaatgcgatagtggaatatactccggtctccctcaaagaggatgangangacctagaaatcaagctccgacggattatcgacaatgttcccg

SEQ ID NO: 5284 - DNA, 345 bp, Glycine max
  Clone ID: LIB3028-041-Q1-B1-H11
acccgtacgtaagatcagaattcggtccaaggaaaattatgctggcaaggcaaacaggcttgaccagaaacaaggtggcaaattggttcaccaatgcaagggtgcgtccctggaacccattggttgaggaaatgtacaaagaggagtttggagattccgagatgaactgcaacctttcatctgagaacaacacggtcacaagtaaaagagatgatgttcaagagtctgataacattaacaataataataataaatgggaagagtcacaagacaatttaataactgttgacagtgtgcaagtccaacctcaagcaaaaatggataaaatggtccatgttgaaaatg

SEQ ID NO: 5285 - DNA, 361 bp, Glycine max
  Clone ID: LIB3028-041-Q1-B1-H4
cgtacgtaaactcggaattcggctgggataactacactcacggaccaggtagaagtgtaataatggatggaagcaatggggatatcgcgattgatcattatcatcgctacctggaggatatagatttaatggaaactttgggagtaaacagctaccggctatccctgtcatgggcaagaattctaccaaagggtagattcggagagcccaaccatgctggtatcgagttctataacagactaattgatgttctactactcaaagggatccaaccctttgtaactcttagtcactatgacattccccaagagcttgaagacagatacgggagttggctaagtccccagttacagtaagcaac

SEQ ID NO: 5286 - DNA, 276 bp, Glycine max
  Clone ID: LIB3028-042-Q1-B1-C12
ctcctatgcagatgggactcctcgctacctacgtccactcgcagccgtacgctctgaaagcttccgtcgtcgccgctatctcagcgacgagccgtgcgatgtgtcaaaccaaatggacagcagagttcaaattggtagcagcatttcagccctcattgctaggattgcatacgatgagaatgtagttgggtttgtgttggatggagtgggaaatggtgacatacgtaggaatacaatgtacctcattgtggattcaaacagcactgtcatgcaaat

SEQ ID NO: 5287 - DNA, 275 bp, Glycine max
  Clone ID: LIB3028-042-Q1-B1-E2
caagaacggacgattggccatgttctctatgtttggcttctttgttcaggccattgtcaccggaaagggtccattggagaacctcgccgatcaccttgctgaccctgtcaacaacaacgcctgggcctatgccaccaacttcgtccccggaaagtgagcgtcaaagaacgaaatgacttttgagagtttttagatttgtgtttggtgaagtacttcagataatgtgaattatcttgtgtatccgaatccaacttaatgttacttgctttttacaa

SEQ ID NO: 5288 - DNA, 383 bp, Glycine max
  Clone ID: LIB3028-042-Q1-B1-G3
cctaaattgtggtcagccctagatagagggggggtgttgaaagtcccacatgacggatagctgtgggcaaaaggagacatgctaaagtctcacatcaactaaaaatagtgtcgagataaactatataagtgagaaacaattctcaccttactagccggttttgtaggattgagttatactcataactcgctttctgacacttcatattaaatcacttcatatgttcatgtttcattgtctaaatcctttgtttcccacttttccttgttggaatttatgttttgcagatgggagatgtggcgaaggaccttgcagctgggactgttggaggggcagcacagttgatatgtggacacccattttgacacatcaaggtcaagctc

SEQ ID NO: 5289 - DNA, 415 bp, Glycine max
  Clone ID: LIB3028-042-Q1-B1-H12
tgcacgcctacgtaaacatgaacttcggattcggctcgagctcgagccgaatcggctcgagaagtaagcttgctcatgagaacagcagcattaaaactcgtgtcaggaatgaaggcgggattccaccgcttgttcatttgcttgaatttgcggatacaaaggtgcaaagagcagctgctggtgcattgcgaacccttgcttttaaaaatgatgaaaataaaaatcagattgttgaatgcaatgcccttccaactcttattctaatgcttcgctcagaagatgctgctattcattatgaagcggttggtgtcattgtaaatctggtccactcttcccctgatataaagaaagaagttcatcttgctggagccttgcaacctgttattggactacttagctcctgttgctctgaaag

SEQ ID NO: 5290 - DNA, 375 bp, Glycine max
  Clone ID: LIB3028-042-Q1-B1-H2
ctcgatcactcgcacgcgctcctatattcgctcctccaacgtcgctctctcgagcaaccacaacaccatcttcagcacatggtcagtttttttcattctaagtcgctctcttccttttttcggttatccgatttgttctcacgcagcaaggactaaatgcgcgaatttcgagttttttttttgttggattttgtggcaacggaatttctgagctgggttcgtaattgatgtgatcgtttaagttgaacggtgccttttggaattttctgaaaaagaataaatcgtggcgttttcagatctgatttcggtgtttcgattgagtttttcccgacatggtagcttaatatgataggtacattgcggatttcagtttac

SEQ ID NO: 5291 - DNA, 303 bp, Glycine max
  Clone ID: LIB3028-043-Q1-B1-A3
cactcgtacctaaactcggaatctcagaacaagggttgccatggacacttctcaccttgttttctgagttatgttaatttgaaagaagctacgtggcatcaagaatgggttcaggtgattggtttaagacaataattagctcaagaaaatcaaaagaaggaagatcaaagaaattaaagactaagatttatacaagaaaaaagtccaatggtttagcaaatggaatgaaaagcgaaaatctagagtcagatggggtatcagttgaaactattgctgcaacaaggatccaaacagcattccgag

SEQ ID NO: 5292 - DNA, 437 bp, Glycine max
  Clone ID: LIB3028-043-Q1-B1-C2
cgcctacgtaaactcggaattcggctgaggctgccgattggtcaaaatatataaatccatttgttgaaatttgttactgtattgcattgcgtttgctgcacccatcaatggcaggcgtttctctcaagtgcggtgactgcggtgctctgctgagaaccgtataagaagcgcaagagcacgctgaactcacctcccactccaacttctccggatccaccgaaccggttctcaacctcatctgcatcgcttgcgccaaaccctgccgatccaaaaccgagagtgatttgcacacgaaaagaaccggccataccgagttcgttgacaatacttccgaggccgttaaaccgattagtttggatgctccgaaggtggatgcaactgcttcatcggaaaaaccttccgctgctgcatccacggaccaaagtgcagaaatggtt

SEQ ID NO: 5293 - DNA, 179 bp, Glycine max
  Clone ID: LIB3028-043-Q1-B1-C3
acgcctacgtaagatcggaattcggctccaagcattggcaaattgcggcattaaggtaggcaaatccaaagaacaaattaaaacaaccggttttcaaggcccaattgggccaaggccaatggagttccaataatccccagaattacaaaaggacttttgggaaccagtttccaattggg

SEQ ID NO: 5294 - DNA, 433 bp, Glycine max
  Clone ID: LIB3028-043-Q1-B1-C4
gcctacgtaaactcggaattcggctcaagcatggacattggaaatgatggacatgctacttcagctatattatccaagaacacctcagatggtttcagtgatattggttgtcataattatgatggatttagagtgacagattctcatcactccagtcaaagagaagcagcactagtgaagtttcgactgaagcggaaagagagatgcttcgagaaaaaggttcgatatcaaagccggaaaagactggcagagcagcggcctcgggtgaaggggcagtttgtacgacaacataatcatccattcgctgaggctggtggtgattcatgaacattgttctctttaggtttcctgtagtattaaattacagttgactgtaacaccgattgtgtcaacaaggattagctgtacggtggtatctgtgtgttgttggaat

SEQ ID NO: 5295 - DNA, 240 bp, Glycine max
  Clone ID: LIB3028-043-Q1-B1-D11
gaacttattcgtaataattttatgcttaaagcaaaatgatgcctgttggtgttagaaatgtaagttatgatcctttgaagggagagatgttcatctcccaaaattttgattcccattgtttatcgataatattatatatagtgaacaacagttgagacttgcaaaacggtggctctgttagttttaccataacgaggctacgtaacaagagcaaaagtggctgttaagttagttttaaaa

SEQ ID NO: 5296 - DNA, 264 bp, Glycine max
  Clone ID: LIB3028-043-Q1-B1-D4
cacgcctacgttaaactccggaattcggctcaaggcgaaaaacccccttccatgaacaattttgccagaaggaatgccaaattcaaataaccaaatataaataaaacaaaagcatttgttttgcaataaaaaaggcgcagattaaggtgaaccatgtattaagtgttgtatatttattatatatataatccttaaaacttttatttttacaaaaaaaacatcaaaaataataaaaacaacaacaaactggcaacaaccaaaagt

SEQ ID NO: 5297 - DNA, 197 bp, Glycine max
  Clone ID: LIB3028-043-Q1-B1-G2
cttgtgttactacggtagatgccaaatgagtggaagttgttcttgtttgagtttgctttagtaagaatccctttttcagtttgcagaatctcttgtatttattgtgttactatatattgtactaggtctcgtgggaaataaaatttttataaattttaattttataaagttacaaaaactttaaagaagaaattttc

SEQ ID NO: 5298 - DNA, 320 bp, Glycine max
  Clone ID: LIB3028-043-Q1-B1-H3
cctacgtaagatcggaattcggctccaagcaaataattctttgtttgagcatttaaaatttcaaggttacaaagagggctttgttcttatggaacaatgatcacattgagaacctaatcaagcagaactgcaaaattattcttcctattgtattgcctgctctagagaaaaatgctcgaaaccactggaatcaggcagtccaaagtttgacaataaatgtacgcaagatctttgctgataccgatcctgaactcttggaggagtgcctgcgcaagttcaaggaagatgaagcacaagagaaagctttgaagttgaagcga

SEQ ID NO: 5299 - DNA, 393 bp, Glycine max
  Clone ID: LIB3028-044-Q1-B1-A3
acgtcgcatgcatgcgtacgtaactcggaactaggtcccaagcagcaagaaagaatcccaggcgaggagaaagatggaggggaaggagcaggatgtgtctttggaaccaaaaagttcccccaaaaaaaacccaattggacggcggcgcagagccaagacgacggcaaggactaccaggaaccggcgccggcgccgctggttgacccgacggagtttacgtcatggtcgttttacagagcagggatagcagagtttgtggccacttttctgtgtctctacatcaccgtcttaaccgttatgggagtcgccggggcgaagtctaagtgtagtaccgttgggattcaaggaatcgcttgggccttcggtggcatgatcttgcgcctcctttactgc

SEQ ID NO: 5300 - DNA, 54 bp, Glycine max
  Clone ID: LIB3028-044-Q1-B1-D2
cacgggtacgtaaactcggaaatcggctcgaggacaaatatgaagtcgttccaa

SEQ ID NO: 5301 - DNA, 90 bp, Glycine max
  Clone ID: LIB3028-044-Q1-B1-D5
gacgtcggacccatgcgtacgtaaactcggacgtgagcaaaaggccagtcaatcgcaagcaaccgtaaaagggccgcgttgcgtgcgttt

SEQ ID NO: 5302 - DNA, 208 bp, Glycine max
  Clone ID: LIB3028-044-Q1-B1-E2
gaatccgttgcatcattagaaaaaaaattgtcaagggtggtggtagatttggtaacggatttgaatctcggaatgaaaacataaaaaagcaagtgggttttggtatttaaataagactcatccgcaaatcaactcacaaatggcggccgccaaacaatgagctcgctcagccgggaattaattcccgaacggatagtgcaagcgtatc

SEQ ID NO: 5303 - DNA, 352 bp, Glycine max
  Clone ID: LIB3028-045-Q1-B1-A3
tgacctcgcacgcacgcgtacgtaagctctcggttcgggatttcatcgtgcattcaatggccaccacagcagctctatccggaacaatggtgagcacctccttcatgaggaggcaacctatgaccaccacaggcctaaggacattccccaacgttggggaaactctttttggtctgaaaattggacgaggtggtcgtgtcacttgcatggcctcgtaaaaggtgaagctcataaccccacaaggagaagtggagtttgaatgcccacatgatgttttcaatgttgacaaagcagacgacgaaggcattgaacttccctactcgtgcaaggccggttcttgcgtttcctgtgt

SEQ ID NO: 5304 - DNA, 223 bp, Glycine max
  Clone ID: LIB3028-045-Q1-B1-A4
tgaaagtgaaaccagcgttggcgcatttcgtcgtacaatttatactttttcggtcatcgtcgtaaatgatgatatataattatttcgggcttactcggatgcctttgttaatttgtgaatcaattttgcatcggatgccatgaaactaatgtaaatttgtgctaatcaaatcatcataaggtaatgatttagtgtaatgctactacgctcgcaactattttca

SEQ ID NO: 5305 - DNA, 376 bp, Glycine max
  unsure at all n locations
  Clone ID: LIB3028-045-Q1-B1-C3
gtacgtaaactcagaattcngctccacctttgctattacctctttttcaaaactctaaaaatttttagttccacaaaaccaaaccaaaatggcagcagcctcggcctcatcaacaatgatatcaaaacaagccttatctccaagcacaagcatccaaaagcaccatcatttgaagccatccaacgtgtgctttcaaggccttagacccctcacaaggttcacaaccaaagtgagcagcaccaccaaaagggttattccaaagggtggtgtcngtgttagagctgaactcaactcagcacttgtcataaacctcagcactgggctccccctcttcttggggaaggtttgtgttcttcaacttccaaaggggagaacg

SEQ ID NO: 5306 - DNA, 333 bp, Glycine max
  Clone ID: LIB3028-045-Q1-B1-C4
aaaaaaatctataacaatgacctccaaataataaaatgttaggccgtttatattgttataagtattgtctggatttcaatataggggccaaagctttttttacaataaatttgagtcacaatcaaacgcatatgtaggacctgcacttaatagcaattctttgttgacttccaagtgtagcattggcttcggcacatctttatgtttggatgggtacgtgaatgtatagaaaaaaaaaaaatagagatgagagttagaggagaaatgcaccaagttgttgattcaaatgtttggtttcatgttaagaatcatgagaattgatttttatctcta

SEQ ID NO: 5307 - DNA, 404 bp, Glycine max
  Clone ID: LIB3028-045-Q1-B1-D2
ctcgagccgaaaaaatctcaacaaaatttgagcatgccacatatggagcttaggtctaccttcaccacctgcttctttctcttgattctcatcctggctctccctcgtttctcaagaggggaatctgaagcattgcatacagagatatatgagattgattatagaggtccagagacacactcttcaggtgttcctcctcctcatcacttccatattggtaagcagcattcaacttctcatcctcaaaaaggctcagtcagaggaaccaaagctttgggcttaagggatagcacttacgatgaaaataaggtcaagaaagtacatgaatgatcatcacgaagctttacaaattaaatggagtatgactttgattagtgctctcatacataaatatttttgttaga

SEQ ID NO: 5308 - DNA, 340 bp, Glycine max
  unsure at all n locations
  Clone ID: LIB3028-045-Q1-B1-G1
ggggattgggagctggaaggcttggttcaacanatcnctcaacctcaagatttctacccactgattcgattaatcgaataaaaaaactcttggggaattgaacatgatgccttttgtggtgaatgaatgccactattatcagtaatatgtatttctttgcttgtttctcttctcgctagcccgagaaccctctttaggaatttgttcaactttgagttttaggttttgatttttatggaataataaaattctagttttgattcctcatttccttccttgccttctctattcaattaaacttgaagagaagagaatatacttgcaatattagctcacattc

SEQ ID NO: 5309 - DNA, 321 bp, Glycine max
  Clone ID: LIB3028-045-Q1-B1-H3
tacgtaaactcgagaatcggctccaaccgaaaccgggtccaacttgttccaaaatttaaaaagcaattggtttaatggttcaacccctgcgcaatcaataaccatgattgggaattgccctccctttaacaataaccttggggctggttcaagtcccaagtttaacctgcaagcgtccttttaacaatttcctccttttctgaataaagcctggtgtgctttggtaagtggtcaagtttcacataaattcggttgaccgcgtggataaaatagacgctgaacacactagtattcgtcgtgaatacatggacctaaagaaaa

SEQ ID NO: 5310 - DNA, 137 bp, Glycine max
  Clone ID: LIB3028-046-Q1-B1-D5
agcgggaaatggacgagaattgcattgtctcacagtcggagccgcattagttatcacctttgtataacatgtattccagttttgctgcattattcagataatatataatacataaatatatgaaagattttccaaaa

SEQ ID NO: 5311 - DNA, 361 bp, Glycine max
  Clone ID: LIB3028-046-Q1-B1-E1
gggacaaatccaagctggaatcactcttgatgtccctcccgccccccaactgagttgaacactgataagagacagatcacaagaaacaccagcagctataaaaacctgagacgaatttagatgtgggaagggagacaagtgttgggaaccatttttgtgacgtggagaagaaaacgttttgattgtcgtctatttttgttttcacatcgttattggtttattttccccactgtacctattattgaagctgtatcctatactctgattgagttcaggctgggagcgagaatctcagccagtacttgtttcattccacgggatctttaccgatattcaaaaattggttcgccacttaaaagag

SEQ ID NO: 5312 - DNA, 334 bp, Glycine max
  Clone ID: LIB3028-046-Q1-B1-F11
aagaactctaggatttggaagaatgctcaacctttcattgattggcttcagaatgcagaatcagaaaccgaggaagaataatttgtcctacattctccgttacttatgtttgcttgcttgtgttatgtcctttatttccaattaagggtcttgttggccccatgtgttgttcaactactatacttgctaaaaacttggtgtgaggggtgcatggttgctggactagtatagcatgtacgcgtcagtgagttttgtgttgtgttgttctaatgtattttggtttttggttggtgatgattatgttttctgttttaataaaacgtgtcttgataat

SEQ ID NO: 5313 - DNA, 113 bp, Glycine max
  Clone ID: LIB3028-046-Q1-B1-F3
ctacgtaaactccgaaattcggctcaaggggctccaattatggaattggccccttttgtgggtgcttatggggggtataagggtgatactggtaactggtcacggtctttgta

SEQ ID NO: 5314 - DNA, 372 bp, Glycine max
  Clone ID: LIB3028-046-Q1-B1-H1
acgcgtacgtaaactcggagtttcagcgccacatagtcggcattttctcatcggcgctcttcgacctgactatgcatcacatttcgacttcttctccattgtcattaagtaggatgtttgggaaggcaccgaatgatatcaatcgtttcacgtagtaagatctcttctgcgtctccaagaacgcatcgcacgatgttctggataacgcttagactatagccgctattgaaactcagcgctatatggcggtgatgccgataagtttatagatctggtgcaagcttatcacgttctgagtgactctgagaagcatgagatatatgatcactatggttaagatgcacttagtgaatgaatgcgtgatgtcagtgg

SEQ ID NO: 5315 - DNA, 312 bp, Glycine max
  Clone ID: LIB3028-047-Q1-B1-A10
gacatcggatccacgcgtacgtaaaacccggaatccggtccaaggaaaggttaaacccggagcaaaaaaacttgtaacgatggtttcttccgacaaggatccacgaaaggaagtccttcaagcatggtaaatggatgatagtgatgaagatcaaagactcccccaccacagagaacccaaggagtttgtctcgttggaccaacttgctgaacttggagtccttagctggaaattagatgctgataaccatgaaaatgatccagagctgaaaaagattcgtgaagagcgtggctacacctacatggatgtttg

SEQ ID NO: 5316 - DNA, 297 bp, Glycine max
  Clone ID: LIB3028-047-Q1-B1-A11
gaaacagagctcccctttcttttattcatgtatacatataccactgttgtgtggttttaaatttttttgtacgagggaaagggaaggaaaatgtttcttaatccattatgcctttttatttcaccagtttgcatatctgaacattttccatttctttccctcgtgtaaagtttgttgtacacttatgtaggcaatttcacatattgtcctgtttgtttggggaatagcttctgtatttattatccgtatagctttattcttaatttggagatattgacaatggaagatgttgttttt

SEQ ID NO: 5317 - DNA, 322 bp, Glycine max
  Clone ID: LIB3028-047-Q1-B1-A12
gcaagagagtgacatcgcgaccacgcgtacgtaaactcggaatccggtccaagctttttcctcgcttaagatcaccaaagagagaacctaggacacacagcacagactcacacaaagagttacacgagagatcatcatggcatcagcagcatctgggtttgtgttgtcacttaatgttgcagctgccaccacaaactcaacggtggtcatgttcaacaccaagaacaacacttctacgtttgttgtaaatgcctcagatgagcctgcagccgcggcacccgccatcggcacaaccccagctgaagctgaagcttaaccaaag

SEQ ID NO: 5318 - DNA, 215 bp, Glycine max
  Clone ID: LIB3028-047-Q1-B1-A6
gaaacaaaaaccgttattccccagtcaaaatggtatgatttttgtcgtgtcattttcgtgttgtgtccttggtttctatcctattttctgttatagtgagttcttagctagctgttttgggatcgtagacgctgaaacttaaaaatgcttgattttggtacacattatcttttatgactatagcaagaccagtgtacatatagtaaaaggaactg

SEQ ID NO: 5319 - DNA, 350 bp, Glycine max
  Clone ID: LIB3028-047-Q1-B1-A9
atacaagagactgacgtcggacgcacgcgtacgtaaactccgaattccggtccagataacacaatcaatcggtaaccttccagaactcaaaaccccctttcaaattcatcaggtccggctatcccaaccagcctcccagctacagctacggcgcgccgccgccgccccaaccctacggtgcccatccgccatcgcaatcatacggggctcctccgccatcgcaatcatacggggctcctccgccaccgcaaccctacggcgcgccgccgcccgctcagccctactccgcctccccctacgcccaaccgtccgccccctaagccgccccctacaacaaacccccgaagaac

SEQ ID NO: 5320 - DNA, 318 bp, Glycine max
  Clone ID: LIB3028-047-Q1-B1-B10
cgtacgtaaactcggaattcggttcaagcagttctcttctcactttcatttctacatccctggctcggttccgtcgatgacgatggcgtttagggtgcgaaaccctgacctccgctttctcattcttctctctctcttgtccatcacttctgccaaggtcttcttcgaggagcgtttcgatgacggatggggaaatcgttgggttaaatcacattggaaaaaagatgggaacctggctggggattggaaccagacctctggccaatggaatggagacgctaacaacaaaggtattcaaaccaatgaggattacagatt

SEQ ID NO: 5321 - DNA, 280 bp, Glycine max
  Clone ID: LIB3028-047-Q1-B1-B12
acgcgtacgtaaactcggaattcggctccaagaaaatggtgcaacctccctttcaaccctgacaaccccattattggaaaggaggatgcaccaaacaactttgcccgtggcaacaataccattggaaaggaaattgttgacctttgcttggaccgcatcagaaagcttgctgacaactgcacaggtctccaaggttttctggttttcaatgctgtgggtgggggaactggctctggacttggttcccttttgctggaacgcctttcattggactatggca

SEQ ID NO: 5322 - DNA, 416 bp, Glycine max
  unsure at all n locations
  Clone ID: LIB3028-047-Q1-B1-C10
acgcgtacgtaaactcggaattcggttccagctcaagccgaatcggctcgaggatcttttcataatgactgttttttatttaaggggcttatctttggcattcggtaacttttggatgcctggtatgtggagatgccactgaatcatataatgacaagtacttctttctgggttgttatcacgttattttctcttgggcagctatggccactaagactgagggaaaagtatgtggtggtagggtgcaccttaaagttgtgacctcattgatgtggtgaattgaacaacggaattgagtacagactatcatgttgtttataaaagttcaattcctatttctatcccatttttaaaatgcacaattcccttagtagtgctaatatgttnatgatcatggcttaaacttttagaatatg

SEQ ID NO: 5323 - DNA, 269 bp, Glycine max
  Clone ID: LIB3028-047-Q1-B1-C11
gagtgcaagcacttgcttcgacttgatgatggtgctgagattgtgaggggtaggactcaatggaggcccaaacctttaagcagcaactttggtcatgttttgagtcaggttccagttccagcagaaagcacctgaatcttatcttattgattggcatcactggaggaggagtggcataaattcatagagagctttgcttgtttttatcaaatctacgtatcttaaaatatatataaaagaaagtgtgttaaaaaaaaagtaaactaact

SEQ ID NO: 5324 - DNA, 212 bp, Glycine max
  unsure at all n locations
  Clone ID: LIB3028-047-Q1-B1-C4
atgtgcaccttgctgcggctctctgcanatgtattgagctgtcatgtatgcagaaaataaattactttatttataagtggtatcttctattanggacataacatgatttgcatagcattatttgccataggaattaagaattttttgcaaataaccagctttatgatttggaaatgaagattgaaaagataattgcaattactttaaatttt

SEQ ID NO: 5325 - DNA, 446 bp, Glycine max
  unsure at all n locations
  Clone ID: LIB3028-047-Q1-B1-G10
gacatcgcatccacgcgtacgtaaactcggaattcggctccaaggaaaaagaaaaaaaacatgggaataacactcaacaatgggttcaagaagcctaacattggattgggcctttggcgcatggaaaggaacgaaatcaggggaccaattctcaattccatcaaaattgggtatcgccattttgattgtgctgctgactacaaaaacgaagcagaagttggagatgcgcttaaggaagcttttgatagtggccttgtgaagagagaagatctcttcattaccaccaagctttggaattctgatcaaaggcacgttcttgaggcgtgtaaagacagtctcaagaagcttcagttaacgtatctagaattatatcttgttcactttcctgttgccgtaaggcatactngggttggtaatacttctagtcctttgggtgatgatggggt

SEQ ID NO: 5326 - DNA, 348 bp, Glycine max
  Clone ID: LIB3028-047-Q1-B1-H4
cgtaaactcggaattcggctcaaaatatgctcctatctaccagttttcacaagctttaacagaaccaaaggaggcttgattcaattaaaccatggtatgcctcagcctctccaatatgtggtcaatgcggcctttttggctgcgctatatagtgactatcttgatgctgctgatacacctggatggtattgtggacctaagttcgtttcaaccgacgtgctccgtacctttgctaagtcccagattgattacatccctggaaataatccaatgaaaatgagttatgtcgtacgttgtggtaatcattacccaaaacacgtctaccattgaggaacatctgtttcgaag

SEQ ID NO: 5327 - DNA, 216 bp, Glycine max
  Clone ID: LIB3028-048-Q1-B1-D5
ataactaatacatacatagttaggtgccaactataatccagcggaagatatggtgcaactatagggtgccgtttttgtatcattaattggattgttgataaaacactttttttttggattccagagcccaggtttctacatagccaggggctttagattatttattttttccccattactgttttttttaattattattgcattgcaagcgccaga

SEQ ID NO: 5328 - DNA, 112 bp, Glycine max
  Clone ID: LIB3028-048-Q1-B1-E5
ctgtaattttcttatatgtgtattatacgaatgagaaaatagttggaaattcgttagggacaagaaataatatagaagatgtttatatgatcccgtttttgtttccaggtaa

SEQ ID NO: 5329 - DNA, 260 bp, Glycine max
  Clone ID: LIB3028-048-Q1-B1-F12
gattgttctgaggttgcaatgccagggttgcaagcatgtctcccaacacgctattaagaggtgcaagcactttgagattggtggtgacaagaagggcaagggaacatcactcttctagtttgagaattaggatttagagctttatgtttcagcaatgttggaatgttttgtttctctctggattttttctgctagttatattttattattttgcaacaccttggtaatgagaaattaaaactaatttggcccatttcacc

SEQ ID NO: 5330 - DNA, 334 bp, Glycine max
  Clone ID: LIB3028-048-Q1-B1-F5
acgctttcttctatcttcaggcaaatcaaattaaaatcacaacacccccaattcccgaaaccctaaccctacctcctcgcagccatggctaagaaacgaaagcttcgatcctctgaccccgagcccagcaaacccatcgagccacagcaacaggaccaagagccagttgaactcgaccaacagcaacaacaacccaaccccaaacaaaccctagaagatcctaacacgatggccgtcgacgaatcaaaacaggaagaagaagaagaagaagaagacgaagaaccccaaaacgccgaaagcgaagaagaggaagaggaagctgaggaacaacaag

SEQ ID NO: 5331 - DNA, 91 bp, Glycine max
  Clone ID: LIB3028-048-Q1-B1-F8
aaaaattaaaaaaaaaaaaataaaaaaaaaaatttaaataaatcaacaaaaataaaaataaataacaaaaaaaaaaaaaaaaaacaataac

SEQ ID NO: 5332 - DNA, 141 bp, Glycine max
  Clone ID: LIB3028-048-Q1-B1-G2
atgcacgcctacgtaagctccggattccggttcaagatgaaattacacgtgcctgtttggcttgctgctacagttttggttgcaaacgaatgcaatggctcaaacaacgatatcttcactctcaagggataaactgggttt

SEQ ID NO: 5333 - DNA, 234 bp, Glycine max
  Clone ID: LIB3028-048-Q1-B1-H12
cttcaatgcagtatcaaagtggtaatagactttagtcaatgttgtgtctctgtgtcattaaaattcgttaccccaccccacaccatgcaggcccttgatgctttgtggtgtctttgctcagtcatgctagctgttcatttagacaaatgatttttgatttaatctctcatgtttgaatattttgaaatggattttattaaatcaattgattgatccctatgttttttggtcaaa

SEQ ID NO: 5334 - DNA, 382 bp, Glycine max
  Clone ID: LIB3028-048-Q1-B1-H4
cacgcgtacgtaaactctggattcagtacgggttcggtttgaattgcttgagtaccacctcctcaccttggtttgccacttcctgatccttggtcttgcggtgttgttcttgtggtccaatgcatccactttcatcaacaagagtccaccaaagatcccacaagtgcacattccagagaaacctgttttagaatttgcctctgcccttagagttgagatcaaccgggcttttgcgttgttaacggatattgcatctggaagggatctcaagaagttcttatcactgactgctggattatgggttttccctattttgggtagctgggccaacttcttgaccctgttctacatagcttttgttttgctgcacactgtgcctgtg

SEQ ID NO: 5335 - DNA, 376 bp, Glycine max
  Clone ID: LIB3028-049-Q1-B1-A12
ctcggaattaggctcgagctgctgccatggtacagttacatgcagacccaagtgcagcagcgcattatgagactaccgtgtctcccatggatacattctctgagatgccctctagctctcaaactggtgcagaatatcctgctcatactgctttctctaatggaatgggaattggcctcagtaatctcacaatggatggtatggagactgatgaaaccagacctgctgaaggaagccaacatgggaacttgactaatacctattctcttaatggcatgctacacggactgtcgaggcaaactgcaaaccgtggggttctctcggagtttggtcaatttcatcagttttttccttcaagagacccaagtggatggga

SEQ ID NO: 5336 - DNA, 229 bp, Glycine max
  Clone ID: LIB3028-049-Q1-B1-A2
tatgcatctgtccaagctgcaaagttcataactcaatagtccttttaattttttgttctctcaagtgaaatttcaatcctttttattgtctttttttgcatgcatgaacaacacaagaggaaggggttgtagctagtcaaatggagggtctaaatattatatcatcacatcactgtcagcaagtttaatttaaactttcaaatcattacattttagcacacattgctgg

SEQ ID NO: 5337 - DNA, 399 bp, Glycine max
  Clone ID: LIB3028-049-Q1-B1-A5
cgtctcgcgcacgcgtatgtaaactcggaattctgatatcgtctccagccatgtcttggtggggattccaaaaccttgatgtttgtgagcatctcacctgatgtatcttcaactggagagtcactttgctctcttcggtttgctgctggagtgaatgcctgcgagattggtatcccgcggcgtcatacatccacacggtcccttgattctcgtttgagcagcggctataatagaggccacactcattatccataataaccaaagttactggcaattgtaatgccttggatgggataaaaattgtctttgacccacagttctgtgttaacttttatagaaatgagcttgtataaaattgaatgtataggctaagctttatcctcacgggtgtaacaactg

SEQ ID NO: 5338 - DNA, 463 bp, Glycine max
  Clone ID: LIB3028-049-Q1-B1-B2
aattgctcaccattcattgtgcctattatatctcccttttgggttaggatgctcaagcaggaagatataattgctcaccattcattgtgcctattgaagagattgctgaaattatttcagccaaatacccagaatatcaaataccagcactagaagaggtgaaggaaattaaaggtgccaagttaccacatttaacctcccagaaacttgtggatgctggttttgagttcaagtatagcgttgaggacatatttacggatgcaattgaatgctgcaaggaaaagggttacctttaatcgattttagccacgaagttgaaaaaataaaattgtcgaagatgattgttagttcgtactattttcagattcctggcaatgatgcctcttgacatgtactccatttaatgcatgatgttttcttaataaattgaccagggaaataattcttttggtttgtctgaata

SEQ ID NO: 5339 - DNA, 363 bp, Glycine max
  Clone ID: LIB3028-049-Q1-B1-B7
ggaggaatgaacttgacctgactctggaaccattatattcctgtcaccttggatgcttttgaatactttctttgaggtggatgatattatatagctttggtatggcatttgacaacatatttgagggcttatatatgcctctatgttttgtggttttccctactctgcagacgttaatgtttattgtgtgttgtaagtttataatttggtcacaaggctaggctttcttaagtggaagctttgctatatatagttaagttgctgaaagacaggtctcgtatctgaactaattaagcgttgagtttgtccttgtttgctaattgctaataacagtatatacaatatataattattttaaatcga

SEQ ID NO: 5340 - DNA, 589 bp, Glycine max
  Clone ID: LIB3028-049-Q1-B1-C1
atgcacgcgtacgtaagctccgaatcggctcgagctccgcactccgtcttcatcaatcagcatcaccaccgctccaacacaggggaaaatgagggagatccttcacgttcagggagggcaatgcgggaaccagatcggttcgaagttctgggaagtggtgtgcgacgagcacggcatagatccgacggggaagtacgtcggaaactcagatctacaactcgagcgcgtgaacgtgtactacaacgaagcttcctgcgggcggtttgtcccacgcgcagtgctgatggacctggagcccggaaccatggacagcgtgcggactgggccgtacgggcagatattccggcccgacaacttcgtgttcgggcagtccggcgcgggcaacaactgggccaaggggcactacacggagggcgccgagctcatcgactccgtccttgacgtcgtgcgcaaggaggccgagaactgcgactgcctccaggggttccaggtctgccactcgctcggcggaggaaccggctccgggatggggacgcttttgatttcaaagatcagagaggagtaccctgacagaatgatgctcaccttc

SEQ ID NO: 5341 - DNA, 457 bp, Glycine max
  Clone ID: LIB3028-049-Q1-B1-E2
gctgacagaatcaacaagatgctggcagtgctcgagaagaacatcttgtgggtgaaccctgactgtgggctcaagacccgtaagtacactgaggtgaagccagccctcacaaacatggttgccgcagcaaaactcatccgcaacgaacttgccaagtgaatggtataagaaagtagaatcttccaagtcatttggttctgctttatattataatacaccaaagaaaaattttctctatattgggttgtttcaataactgtgtgtggaatatttaggtgtcttagcatgctctgtgagcaattgattcttcctcaacccctccccccttatttttccccactcctgttttccctaatgaatgttgtatctttgcggcttcgccgcaatccttattgatctggaattttaccagttttgtgcaaataactatgagcatctatatcgagtatttcaaaat

SEQ ID NO: 5342 - DNA, 644 bp, Glycine max
  Clone ID: LIB3028-049-Q1-B1-H2
cgcgtacgtaagctcggaaatcggctcgagaagaatctagatcagggtcactgtggttcttgttgggcatttggtgctgttgaatcattgtcagatcgcttttgcattcattttgatgttaatatctctctctctgttaatgaccttcttgcatgctgtggctttctgtgtggatctggctgtgatggaggatatcccttatatgcatggcgatacttagcccaccatggtgttgtcactgaagagtgtgacccatattttgatcaaattggctgttctcatcctggttgtgagccagcttatcggactcccaagtgtgttaaaaagtgtgtaagtggaaaccaagtttggaagaagtcaaagcactatagtgttagtgcatacagagtcaactctgatccccatgatatcatggcggaagtttacaagaatgggccagttgaagttgcatttaccgtttatgaggattttgcttactacaaatcaggagtttacaaacacatcactggttatgaactaagtggtcatgcagtaaagctaattgggtggggaacaactgatgatggggaagactattggcttctcgcaaatcagtggaacagagaatggggagatgatggttacttcaagattcgaagagggac

SEQ ID NO: 5343 - DNA, 639 bp, Glycine max
  unsure at all n locations
  Clone ID: LIB3028-049-Q1-B1-H4
cccttcttaacctcggaattcggctcaagctccaagccgaatcggctcgagcanaacactcataacacaaagcacaaagcaaagctcatccttgagttaaaaaatggcagcagcttcttccatggctctctcatccccatccttggctggcaaggccgtgaagctgggcccatcagccccagaagtgggaacggtgagcatgaggaagaccgtcaccaagcaggtctcctcaggaagcccatggtacggtccagaccgagtcaagtacttgggcccattctctggcgagcccccgtcctacctaaccggtgagttcccaggcgactacggctgggacactgctgggctttccgcagacccagaaaccttcgccaagaaccgtgaactcgaagtgatccactccaggtgggccatgctcggagccttgggctgcgtcttcccggagttgctgtcncgcaacggggtgaagttcggagaagccgtgtggttcaaggccgggtcccagatcttcancganggtgggctcgactacttgggcaacccaagcctgatccacgcccagagcatcctcgccatctgggccacacaagttatcctaatgggtgccgttgaaggtttacgtattgctggtggccccct

SEQ ID NO: 5344 - DNA, 85 bp, Glycine max
  Clone ID: LIB3028-050-Q1-B1-E11
ctgatatttgggtcctatgaggaagtccaaagtctaatttgacaaaacaataaatatatgcatgacaagttagtattcaacgata

SEQ ID NO: 5345 - DNA, 122 bp, Glycine max
  Clone ID: LIB3028-050-Q1-B1-E6
tcggaattcgggtcgaggcagccacgggagaagatatatattattatcattacatagacacactttattcttcaaagttcagcaagggagtggcggggccagtggttgtcttctcattctca

SEQ ID NO: 5346 - DNA, 224 bp, Glycine max; identical to SEQ ID NO: 5069
  Clone ID: LIB3028-050-Q1-B1-F12

SEQ ID NO: 5347 - DNA, 126 bp, Glycine max
  Clone ID: LIB3028-050-Q1-B1-F2
ttcggctcgaagctgaaaaagctgctgcagatgcaaaggacagggaaacacgggaaagagctacagctgcaacggctgaagcagaagcatgagtgacaggaggacgtgcctccgtacaaagggctg

SEQ ID NO: 5348 - DNA, 118 bp, Glycine max
  Clone ID: LIB3028-050-Q1-B1-H4
cggctcgaacttgggtgctggtggtgcagaaagggccattttctgaatgcgctctatctatctcttccgatctggctactaaccctagcccgcgtcgagccgtggcttcctcggcctc

SEQ ID NO: 5349 - DNA, 416 bp, Glycine max
  Clone ID: LIB3028-051-Q1-B1-A3
atgcacgcgtacgtaagctcggaattggctccagcacagcgatgccaaccccagatggaagggtgttagacatgttctttatcactgatgggatggaattgcttcacaccaaaaagaggcaagattatgtatgtgaatatctgatggatgctttaggagagaggtgtatctccagtgaacttcagttggctgggcctgaatacggacatttgcaggggttttcttctcttccaccagcttttgctgaagagttatttagttctgagctgttagacaagttgtctttgcatcctctcagccaagatatgacaacactgaagacacctactgttactgtggataactcactgagcccagttcataccctgcttcagatacaatgcgttgatcagaagggcttgtgttatgacattatg

SEQ ID NO: 5350 - DNA, 323 bp, Glycine max
  Clone ID: LIB3028-051-Q1-B1-D6
gatacagcacatgatgagactaggataaataaggtggagcctgaccctgagcaagatggaagcattgatcttggggtaaacacgccactgttggggtcgacttcaaggacataagttgaagatgatattcaagttagccaagaaaaaatcctgacaattgatttctgatgagtttctggcaatgttttttcaaccatcagttgccaactttacagcttttagttgctgtttctgattactgttgcaatttttatctttttcagcccaaatcttgattacaaatatttatggagtattaaataataaacaagtttagtgacaaa

SEQ ID NO: 5351 - DNA, 388 bp, Glycine max
  Clone ID: LIB3028-052-Q1-B2-E1
tcgagacactgcaaatcttgatgctgttagacaggaacttaaagaattacacccacatgatccccaaattgttgtcctcaaacacggagtgtggagagtaaaaggcattattcaggtttctagatctataggtgacgtatatttgaaacatgcacagtttaaccgggaaccacttaatgcaaaattcagacttcctgaaccaatgaacatgcccatcttgagtgctaatcccactattctttctcatcctctccaaccaaatgattccttccttataatcgcatctgatggtttatgggagcacttgagtaatgagaaagccgtggatattgtaaacagcaatccacatgcgggtagtgccaagagacttatcaaggctgctctacag

SEQ ID NO: 5352 - DNA, 82 bp, Glycine max
  Clone ID: LIB3028-053-Q1-B1-D6
cttgggagaacaggtctagtttcagagccggcatgtgcatgcttaccgactttctctattgggggtcgtattagatcttggt

SEQ ID NO: 5353 - DNA, 185 bp, Glycine max
  Clone ID: LIB3028-053-Q1-B1-E11
aaaaacaaaacatatcaacccttctacaaattaaaaagaacacaaaaaaataaaaacaacagggcggcctccgataactcagctcgtcaacgcggaaattactcccggaccggtaccttcaggcttaccatttttccgcaaagtcagtcctcttaaagcttggcttcacgatggtcacaacggtt

SEQ ID NO: 5354 - DNA, 361 bp, Glycine max
  Clone ID: LIB3028-053-Q1-B1-G12
tcgacgcatgcatacgtaagctcggacttcggctcgagcgcacgttagcacagcgtatcattgccatggcaacatggaactgcgcatctctctccttgacgggacgcgtctccttgacgtggactcgggatcaagctggagtcatcagccacacaggtgcgacgggtgcgcatgacgaacaccgtcaccaggcacgtctccacaggaagcccatggtacggcccagactgagtcaagtacttgggcccattctctggcgagcccccgtcctacctaaccggtgagttcccaagcgactacggctgggacactgctgggctttccgcagaccagaagacttcgccacgaaccgtgaactcga

SEQ ID NO: 5355 - DNA, 315 bp, Glycine max
  unsure at all n locations
  Clone ID: LIB3028-053-Q1-B1-G3
cgcgtacgtaaactcggaattcngctcgagctcttctttattccttttgtaatttcattcattcttaatctttgtgaaaaataatgttcatcgagaattttaaggttgagtgtcctaatgtgaagtacaccgagactgagattcagtccgtgtacaactacgaaaccaccgaacttgttcacgagaacaggaatggcacctatcagtggattgtcaaacccacatctgtcaaatacgaatttaaaaccaacatccatgttcctaaattacgggtaatgcctgttggttggggtggaaacaacgggcccaaccctc

SEQ ID NO: 5356 - DNA, 383 bp, Glycine max
  Clone ID: LIB3028-054-Q1-B1-D10
tcggggaattccaattccacattttcaagaaataaggaggcaaaaatgttcatatatgaattggaattatttgttttcttattaggcctatcctgaagccaaaggaaatgagatcggaattcctcggggaattccaattccacattttcaagaaataaggaggcaaaaatgttcatatatgaattggaattatttgttttcttattaggcctatcctggaagccaaaggaaatgagatcggaattcctcggggaattccaattccacattttcaagaaataaggaggcaaaaatgttcatatatgaattggaattatttgttttcttattaggcctatcctgaagcaaaggaaatgagatcggattcctcggggtaacgaact

SEQ ID NO: 5357 - DNA, 318 bp, Glycine max
  Clone ID: LIB3028-054-Q1-B1-G4
tgacatcggacgcacgcctacgtaagctcggaattaggggataatttatgagttaacatgtgagcattaagcgagcataaggccaggaatcgtatcaaacgtcacgtttctggcatcattacaaatgctccggtaccatgactatcatgaaatctttcgattctcgatctcacaggttctcaattcccaatagacaagctcccttacagagtcttcaagctccaatctgcttcgcctcctcgtcgctgcgtagctatctgctacttcgatcctcgacctctcctaaatatcttcggaaggtctcttctatcgacatct

SEQ ID NO: 5358 - DNA, 357 bp, Glycine max
  Clone ID: LIB3028-054-Q1-B1-G5
atcgaaaggttgttttcaagtcaactcaatggcacttccctcaggtttagtttccatgttgatagtactttttggtatggttttggtagttggggttgaggcaaaggcaagggctttctttgtatttggagactcactggttgacagtggtaacaacaattacttagcgaccactgcacgggctgattcccctccttatggcattgactatccaactcgtagaccaaccggtcgtttctccaatggcctcaacattcccgatcttatcagtgaacgaataggtggcgagtccgtgttgccttatttgagtccacaactaaaaggtgaaaatcttctgaatggagccaattttgcttc

SEQ ID NO: 5359 - DNA, 247 bp, Glycine max
  Clone ID: LIB3028-054-Q1-B1-G6
caatagtattaaattttgcgaagtatgatgatttatctattgaggcctattctggaacctggggatgtggcatcggcattggcctgcgatgtccatgtccacactttgaataactatggaagcaacaatgttcaaacatgaattggacttacttgttctcctcctaagcctatcgtgaagccaactgatatgacatccggactcctcgcgggtagcgacctcaaactcgctattatgagtcatatta

SEQ ID NO: 5360 - DNA, 75 bp, Glycine max
  Clone ID: LIB3028-055-Q1-B1-A10
acgcgtacgtaagctccgaattctgctcgagaacactttccgccgttccactctctacacattctcccgctctct

SEQ ID NO: 5361 - DNA, 197 bp, Glycine max
  Clone ID: LIB3028-055-Q1-B1-B4
gattaaaatgcagcaatgatgccagtttgaatagtcctgagtcttttcaagatcgtttatggacttcagattccatgttaaagtgagcacgtggtcctgtaaaattttctaacattttcttgtcagagagaaaaaaaaacgaagacacgaacaaacgggcgagcggccgagcattgagctcgtcaacccgggaatta

SEQ ID NO: 5362 - DNA, 207 bp, Glycine max
  Clone ID: LIB3028-055-Q1-B1-E1
cacgaattttcttgcactatggataaacatacatatactggtaatgaggaactttcaagcaacgatctcgaaggactacaaattactaatgggctggagtgtaagataccttgcagttcatcttaggtctcacatgttttagattacctgggactttttgtttccgctaacaaagctaaaaagaattttgtatccaccacagttcag

SEQ ID NO: 5363 - DNA, 275 bp, Glycine max
  Clone ID: LIB3028-055-Q1-B1-G2
attcggctctagggaggagactctttctctcagtctcatccacgtaaacaactcattggttttcaccaatagactacacatcatcctccatttcactgctctatgtttcttggtttactacaggctttgtttcttctttcagaatccacataccatacgaggaactactttgttcccttggcttcttgtttttgcctctgaaatcagtctctccttcatttggattcctggtcaacgtttcccctggcacaccatttccacatctgtgtttcctg

SEQ ID NO: 5364 - DNA, 83 bp, Glycine max
  Clone ID: LIB3028-055-Q1-B1-G6
cacgcgtacgtaagctcggaattcggctccagacctagttagaccgcacaaggacaagcaactggcttagacaatgatctcct

SEQ ID NO: 5365 - DNA, 364 bp, Glycine max
  Clone ID: LIB3028-056-Q1-B1-A5
tttgaaggacttcaaaatttttatggatgctatggaagcagttaaggataaaggggttgtggttgcagtggcatctccagaggatgtagatacggccaacaaggaccgtcccgacttctttcaagtgaagaaagccctttagtttcagtatctattccccgcatggatttgaaattgtatcttttcttaaaatttcatacatcgaaacaaatgtttccttgattatttgtttaaataggttaactggctggagctagatacgagaatttattattactttcgtccctggaatatttttttaactaattcaaatcgtttgagaaagttggttattttagttaataacattaaatgttaacaacag

SEQ ID NO: 5366 - DNA, 368 bp, Glycine max
  Clone ID: LIB3028-056-Q1-B1-A7
ctcgagccgaatcggctcgagctccagccaattaacaaagggttcgaggaggctgaagaggaggagtaagtctggtggaggttcagggctaaggctgaagaaattagcttgtcttgcagcccttgtaccattagctaagatattggcttgtagtctcataagttcagttctgcctagtactaattatctatttaatttgtgtttgtgtttgactccttcatcttgctctcgggacatatcacggtgcctgtgttttccgcacgccacattgatatgttatacgagtgcattattgtattttgagtgattatttcaataatgagtgtactcctttccctgttgacttgttaaaaatacaggtgtaactg

SEQ ID NO: 5367 - DNA, 332 bp, Glycine max
  unsure at all n locations
  Clone ID: LIB3028-056-Q1-B1-A8
tgaactcggaactcggctcgagtgaacggggaaagaagaaactcttggaagggaatagggttgaattcacagatggttcagatccctcactttattctggaaagataattgaatgttcttgggattttgacaaactggaatggaagtttatgcgaatcagaacagacaaatcaactccgaatgagtttaatacttacaggaaggtcatgcgaagcataagagacaacatcaacgagggaagatttgttgaatgaaataagtgagataattcgccttcccatgtatgctgacaggatcagaattgatagcanagcgaatcagcatgctaatgt

SEQ ID NO: 5368 - DNA, 363 bp, Glycine max
  Clone ID: LIB3028-056-Q1-B1-D5
gttacaagttctcaaaaactgctgtgtaaggtatctttctattttggtctttcaaaatatatgcaacaatattatgttgctccataatttacaaatacatgaatttgtaccctaaaatacatgcaatatcaaatcggttctcccacttcccctcaatgttcgtttcagaatcccacaccaaaaaataagataacaatctaagacgaatgcaaggccacatgagtgacgtttttgtattaagcagataccaagtaaaaaaagggcggcctccaacaaattagctcgtgtacccggaaattacttccggacgggcactggaagggttgctacctttccctaaactaattcgtacaagagcttgga

SEQ ID NO: 5369 - DNA, 148 bp, Glycine max
  Clone ID: LIB3028-056-Q1-B1-G6
gatgttatgtttctctttgctgtactcctttgaaaattagtacagaatgattgtacagaaaagaaacagggtaatggtgtacctgaataaaaacaaaaaaaaaaaaaaaaaaaaaaaaaagaaaaaaaaaaaaaaaaaaaaaaagaac

SEQ ID NO: 5370 - DNA, 291 bp, Glycine max
  Clone ID: 701096901H1
ctgaaccggaccggttcggcttggagagatcttgttgggctcggaaacacgcatttgcggcggtgatgagagggagctgctgctgctggaaccgtcggacagagcagcggttccgcctcctcgcgatctcaacggttaaatcactcaagatcaagcttctcctcttttgctgcgtcgccttcacgcttctcgccttttccaccagcgcttcttccttcgtcctatggatcaacaaccaaacgccgccgcctccgccacctcgcttccccgattccgggaaagggtattcta

SEQ ID NO: 5371 - DNA, 289 bp, Glycine max
  Clone ID: 701096902H1
caactccaccctctctccttcttacctccttgaccatgatgagtttcgccatggattcagtttcggtgttaaaccctaaactctcgcactcccattcctctctcccattcagaaggttcccccattccctcaacttccaccccttactcaaaccccgcgcagttaacgccgccgtcccccctaacggcctcgccgcctgcttcctcaccctccaccgacggaaaccgttaaccgtcgctttcacagcttctcaccaagactcggaacacagagagattgaagtggagaa

SEQ ID NO: 5372 - DNA, 286 bp, Glycine max
  Clone ID: 701096903H1
catatttctgtgccaacaaaagaagatggcctcacaggtttgcaaagctgcttccagagccgcgaggtcccttctctccgcttccagagcctcccatggacgtgcggttggggctgctacggctgtttcattgagctgcaaagtgcctcttttctacggaaagaacggttctggaagtggttccgcttcatcatcatcatcatcatggatttcaggagcacttgctcttcctgccgcagcttacatgttccaagatcaggaggtgcgcgcacttgagctggagcgc

SEQ ID NO: 5373 - DNA, 281 bp, Glycine max
  Clone ID: 701096904H1
agtatctgtgccccaaccccacttgcttttctgcatttctttttatccttctgtgtactctgtattctaatcacatgcttcttaatcactttctcaattccattgctccctctctaccctgagttctggaccttgtcatagattctctcagattttcgctcttcctggtatcttcagaatgctttctgtgagggatttttggaggcggcataggtagaaggttctcgtcactcgtcgtgttttaggaagtgggtatcttgtgtataagctctacggtgctc

SEQ ID NO: 5374 - DNA, 283 bp, Glycine max
  Clone ID: 701096905H1
gtttgattatgtctttgactggaccattttgaagtatcagcaatcacagctagccactcctccaacacgggccattggtcctagtgctggaaccagttctggaatgcccccggctgttactaatgctgataggcatacaggaggggaagaagggcgacctcctgctttggtttcagtggattcctcgaggcggagaatgtcagggcccattttaaatactttatcaagtgccaatgtcttgggtcagtcaagtggatcatctaggcgggctgctgtttctagt

SEQ ID NO: 5375 - DNA, 277 bp, Glycine max
  Clone ID: 701096906H1
atctatctttgcttccccttagtcaaacacagtaacacaccatccatcctctatctcttctcttcttctgtgctctagcttcctgctcctgtttctgagaatccgtacgggctaatcaacacaacaaaatggatgcaattagttgcctggatgagagcaccaccaccgagtcactctccataagtcaggcgatacttcttcgacgattatgtcgtccgagaaggcttctccttccccgtcgtcggcgaacaggctgtgcagcgtcggtagcggtgct

SEQ ID NO: 5376 - DNA, 288 bp, Glycine max
  Clone ID: 701096907H1
catcctcccaaaatcatataattctctttcatctgaattctccctttcaaatctcttcctctgacgtgttcgtagttctctgcatcatcgagcatgcaacgcgtcttcgagtttcctcaaactcacatggatcggcgcccgagacagagagcgagattgggctgggaccatccctgaggtccccaaggctcaggtaggattgtcttgtggacaagatgttgggactatttcaagctttgctccttcaaggggtcactcagaaaataccactagttctctatttgttaa

SEQ ID NO: 5377 - DNA, 284 bp, Glycine max
  Clone ID: 701096908H1
tttggccacaaggtggtggatttgctactggaaccatcaacataggagggctagaattgtttcaaatttcaacattcaacaaagtttggacaaccttagaaggtggacaaggtgatgcaggggcagctttctttgagccagcaggaatacctgagggattcttcacactaggccactacagtcaacccaacaacaagcctctttttggatcaattctggtggcaaaagcatgagacatcatcaggtgacaataatggagctttgaagaaaccaattgattacac

SEQ ID NO: 5378 - DNA, 283 bp, Glycine max
  Clone ID: 701096909H1
ctcgagccgtctctatctctcacacacactttctctctctctctctctcacccagatcttgtcagaatggcgagcgctcccactccaggcgaagagttcgtgtacatggcgaactggcggacaggccgagcgctacgaggagatggtggagttcatggagaaggtctccgcctccgccgagagcgaggagctgaccgtggaggagcgtaacctcctctccgtcgcctacaagaacgtgatcggcgctcgccgcgcctcctggcgcatcatctcctcaatcgag

SEQ ID NO: 5379 - DNA, 282 bp, Glycine max
  Clone ID: 701096910H1
attttctattccccaaatctcctccttagactgccaacccaatatagccattggatcgaattcagtttggattcggtctgatggtttgggagttctaataagtctaaggaacagaaattctgtacatatatatttagaagatcacaggtgcttgatcagtggtgtatcaatatggacaaggtgatgaggtttgcctctgaaaagggtgtggtgattttcacaaagagttcttgttgcctctgctatgcagttaacattctgtttcaagaacttggggtgaat

SEQ ID NO: 5380 - DNA, 285 bp, Glycine max
  Clone ID: 701096911H1
atcgatgcaactcaaagccatcctccactacgcgacctctcagattgtccctcaacaatctctttccgagattacaataaccttcgacgtgctccaaagcctccaccgccccgccaacttcctcgtgtttgggctgggccgcgattctcctcatgtgggccagcctcaacccccacggtaccacgctgttcctcgaggaggaccctaaatggttcgggatcgtcaccaaggaggcgccctacctccgggcccacacggtccgttaccggacacagctccgagaag

SEQ ID NO: 5381 - DNA, 284 bp, Glycine max
  Clone ID: 701096912H1
cttcaaccctctagatcgaaaggccaattttctttttcttttagctcttgttatgatttcgcattctttttaccttttcaattcttcaaaaattctcgcgactgaattcacgtcagaacacggaaacataaagttcagttttttgcatcgtttttattaaaatttgttggcgaacaaaacagagaaaaaaaacccaaaaaattgaaatttcttatccgttttggcgaattgaactgcgtgttcaattgggttgttgacttcgaggcagagggaaccgcgggtgt

SEQ ID NO: 5382 - DNA, 281 bp, Glycine max
  Clone ID: 701096913H1
ctcgagccgctcgagccgattcggctcgagccactcctatcgtgctcccatcaatgacgctagctgacaaaccgttaccggtctcatcgaatgcggagatgactgggaattgatcgtccacgatgctcgctttggtaaaacgagactctccgaatcaattgcaaattatgttgctttaacccctaccgaaacaaaggagggagcatcgatatttggatccaaaaaagacactatgtttgaagtggatgctaaaactggagcgcttgttcgaacgcactatg

SEQ ID NO: 5383 - DNA, 285 bp, Glycine max
  Clone ID: 701096914H1
gcaaaagtgctaagtccttgcatcagttctctattgtcttggcttcaaagttcagatcatgctttccttttcatttaagaatatcttagattttgagaacactgctcatgtccagctggaattggagtaaaatgtggacaacgatcacggaccttaaatagaagtacctgttgtttgttgttcaaaaaaagagagaaatcagaaaattcaggagtgtttataccagacaaacattttggtgttatttgcatatattcaaagcaccagttacttttcaaatgcaaa

SEQ ID NO: 5384 - DNA, 286 bp, Glycine max
  Clone ID: 701096915H1
aaccttttcacacctttcttcatttcacatggaaatcagctccctcgaagactattcttccttcttcttccctgatatggatcccaagcgtcgtggaaacgacaccgctttcaacgacctcctcaattccctcatccacttagacaacaaacaaaccctcatggatcctactcaattccaattcgactcctcccccccaaccaagagacctcgtcgtgccattgaagacatccacaatgtcacggtccaacaacaacaacaacaacaacgccgcctgtgggtcaag

SEQ ID NO: 5385 - DNA, 220 bp, Glycine max
  Clone ID: 701096916H1
gaggacactttgaaggcactggagatgggtgctgtggaaacactcattgtatgggaaaatttggatattaataggtatgtgctgaaaaatggtactactagtgagattatcataaaacacttgaacaaggaacaagatgctgatcaaagcaacttccgtgattcagccacctctgcagagttggaagttcaggagaagatgcccttgcttgagtggtttg

SEQ ID NO: 5386 - DNA, 284 bp, Glycine max
  Clone ID: 701096917H1
ggctaatctattaggcgctgttctctcgtcttctacaaaattttctgttcgatctcaaccaaggttgttccttccaccgccatgagtatcatcttcggaagcgaaaacacccgcagagctgcgggaaaataagaggatgctggacaaatcaatcagagaaattgagcgcgagcggcaaggcttgcaaacgcaagagaagaaattgattgcggagataaagaaaagtgccaaacagggccagatgggagctgttagagttatggcaaaagatcttgttagaacaa

SEQ ID NO: 5387 - DNA, 287 bp, Glycine max
  Clone ID: 701096918H1
cgaaatatggcttcaactcatctgcttcccctagcaaccttcttcttacttctctccgcttcttatctccagattgctggggcggaagcacaaccgttgactagtctcaagcttaactctcatattcttcaggagtctactgctaaagagattaatgaaaatcccgaggcaggatgggaggctgctataaatcctcgtttctccaattatacagttgaacaatttaagcgccttcttggagtcaaaccaatgcctaagaaggaacttagaagtacacctgctatatc

SEQ ID NO: 5388 - DNA, 284 bp, Glycine max
  Clone ID: 701096919H1
gatggatcttggtcatcatccagtactcggttctcttttttccagagcatacagttatatttaaacctcttttttgcaggtttcctgtaattggaaacctgttacgagttttttggcactccgttgatgggatgccactttcaaaatggctgtttatctctgccagcatagttaccgagttctggagttaggtatttttctttccagtgttggcacccgatgtttttagcactgttttgtatcggttttgccaccatgtgtgtccttgtccttgtttctttgca

SEQ ID NO: 5389 - DNA, 285 bp, Glycine max
  Clone ID: 701096920H1
ctcgagccggatctggtcatcgttgggatctccatacgccggatctgctaaaatacgcttgatccatatgggcctcctcgaccacttgtgggacgacaccgtcgccggcccaaggccggaaaacggtctcggcaagctccgaaaacaccacaccttcactttccgacctagctccggcaaggaaacggagggcgggagcgtgagatcgtacggagacgaatcgtcggaggaagcgacgagagtgacgcgacatatcatgatcgtgaaaccgcccgggtaccagag

SEQ ID NO: 5390 - DNA, 287 bp, Glycine max
  Clone ID: 701096921H1
aaattccccaaactcgtgggcccaatccagcccgcaatcgccaaactcaccaaactcaagtaccttgatctctccaacaacaatctctctggcccaatacccgattttttcgcgcaactcaagaacctcgacgatatcgacctttcctttaacaacctctccggccccataccaagctcgcttggtaaactgcctaaactcgcgtatctagatttgagccgcaacaagctcacgggctcaattccggcctcatttggatccttccaaaagcccgggccggctattat

SEQ ID NO: 5391 - DNA, 283 bp, Glycine max
  Clone ID: 701096922H1
tttgttttggagggtagacctttaagggcttgtcttggaaccacaaaatattgtcatgcatggatccggaatgtggtatgaggatgactggtctagatagaattttcaaattatgcttaattacctgtgcttgtaattgagggaaagatctctatgaccagccttgcagcaatccggattgtctgtatttgcatgagattggctctcaagaagatagttttaccaaggatgaaataatttcagcatacactagaagtcgagttcaacaaatcactggtgccac

SEQ ID NO: 5392 - DNA, 281 bp, Glycine max
  Clone ID: 701096923H1
gtggaagcagaaggcattgttatggctataccaatgcctggacatccagtacaaagccaggaacaggacagtgtgctttatgattgtacacgtttgtgtgatttaattgatcgtcatgattccgcttttttattgactgatacaagggaaagtcgatggctcccaacacttctctgtgccaatactaacaagattactgttactgctgcactggggtttgatagtttcttggttatgcgccatggagctggtcctttatctgcggatatgccagtaaataa

SEQ ID NO: 5393 - DNA, 284 bp, Glycine max
  Clone ID: 701096926H1
ggcgaaaatggtgatatacaaagaatggattgtagtagtcgtggtggttggcgctttctgatgcacgtgtataaaaggcattgtactttgaaattgcaattggtgtacatttcctctccctctccattttttgttgctccctcaaagtttgagagattcaggttcagatctgatcaacaaaaatggcgactgtgtccctctcgccaaatacaagctcgttttcttaggcgatcaatcggtcggcaaaaccagcatcatcactcgcttcatgtatgacaaattcg

SEQ ID NO: 5394 - DNA, 285 bp, Glycine max
  Clone ID: 701096927H1
ctcgagccgcaatatgcttatggactagctgcacttggatgtcagctacaagctttaggattctgttgaaaccccgtatattgatcttgataaccctttggccaaggaattaatggaaatctatgagtccataggcgacacattagcctttcaatatgggggttctgcagcacacaataagatattttctgagagaagaggtcaatggaaggcagcagctcaatcccaggaatttattcgaacactacagcgttattataacaacacatatttagatggtgataa

SEQ ID NO: 5395 - DNA, 284 bp, Glycine max
  Clone ID: 701096928H1
ctctccgaaatccccaaattgcctgtgaatgctagaaaccctaggcacgttcgatttgatgctctcccatttgcaatcaagggcgagcgcattcggttcttgcacgcaaggctggtactaccgctgcatcggcctcgatccctgaattcatcattctttctcgcaccatctttttctattccgattcgatttgttgttgttgttgttgttgttgtgtttttgtttccttccttgacgaatcatcacgatgttgatgagcaagcagaagaagagccagatccaga

SEQ ID NO: 5396 - DNA, 296 bp, Glycine max
  Clone ID: 701096929H1
ctttggcttccttttcatagtgtttgtgatcctattaatcacctgtgccgagattaccattgtgctttgctacttccaattgtgcagtgaggattacaattggtggtggagatcttatctcactgctgggtcctctgcgttgtacctcttcctctactcaattttctacttctttaccaagttggagatttcaaagctggtatcgggcatcctttacttcgggtacatgataattgtttcatatgccttctttgtgttgacgggaactattggcttctatgcttgcttctggtttg

SEQ ID NO: 5397 - DNA, 285 bp, Glycine max
  Clone ID: 701096930H1
caccggtttatgtcctcctatgaacagagggtgcaacctttgataaaaggtatcagtacctcttgtttgctgctgaaccatatgaaatcgttgctttcaaggtgcccagcacggagattgacaagtccactccaaatttcttctcgcactgggatcctgactccaagatgttcacgctacaattgtattttaaatccaagccgccagaggcgaacaaaccgcagcctgcctctactgccaatggcacagcaccatctggtgtaccaccaaggcctttgcccccac

SEQ ID NO: 5398 - DNA, 288 bp, Glycine max
  Clone ID: 701096931H1
caaagccttcctagaacgaaaaaaaaaagaagagcaattttccctcaccaaagaagaagaagcaaacaatggccgatcaacttaccgatgaacagatctccgagttcaaggaagccttcagcttgttcgacaaggacggcgatggttgcatcacaaccaaggagcttggaactgttatgcgttcattggggcaaaacccaactgaggcagagctccaggacatgatcaatgaagtggatgctgatgggaatggtaccattgacttccctgagttcctaaatctcatgg

SEQ ID NO: 5399 - DNA, 290 bp, Glycine max
  Clone ID: 701096932H1
gcagtgccggcgcgcgctgaagtttgctaggttcatgagcaggttcgggaagagttaccgaagcgaggaagagatgaggggagaggtacgagatattctcgcaaaacctcaggttcatccgctcccacaacaagaaccgcttgccctacactctctctgttaatcattttgctgattggacttgggaggagttcaaaagacacagactaggcgctgcccaaaattgctctgccactcttaacggcaaccacaagctcactgatgctgttcttcctcccacgaaagactgg

SEQ ID NO: 5400 - DNA, 285 bp, Glycine max
  Clone ID: 701096933H1
aggacaactacctcaactaccacaagaggttgatagagcttgtaaaagttgggggcgtgatcgggtacgacaacaccctatggaacggatctgtggtggcacccctgatgttcctcttaggaagtatgttaggtattacagggatttcgtgctggagctcaacaaagccctcgctgtggaccccaggatcgagatttgcatgctcccggttggtgatggaatcactatctgccgtcggatcaagtgatttctgatcatcataatcgtggaccaccgttgcttctt

SEQ ID NO: 5401 - DNA, 289 bp, Glycine max
  Clone ID: 701096934H1
tgcgactcagatcctctctcgcatcttccccaaaaccctagccctcttcctctcccgttctctctccagcgccccctctcctccctctctctccgcgctctccttcttccgccgcatctccgttgccgccaacccctccctccaccgcgccctcctccccaactctccctccctccgggccctctccacacgcgccactacctcctccctcaacgaccccacccctaactggtccaaccgtcccccgaaagaaaccatcttgctcgacggctgcgatttcgaacactgg

SEQ ID NO: 5402 - DNA, 283 bp, Glycine max
  Clone ID: 701096935H1
actcgagcagctcgagccgctttgaccggaaaaacaataactttagacattgaaagttctgataccatcgatacacgtgaaggcaaagatacaggacaaagaggggatttcaccagaccagcagaggcttatctttgctgggaagcagctggaaactggtcgtactcttgctgattataatatccagaaggagtccactctgcatttggtgttgaggcttcgtggaggtatgcagatatttgtgaagactctgacagggaagaccattaccttggaggtggaa

SEQ ID NO: 5403 - DNA, 282 bp, Glycine max
  Clone ID: 701096936H1
ctcgagccgcgctgactctgaccttctctggcgaactttctttccttctgattactctgacattgtctcaagggctctcaaccccctctcccttaattcctcttcttcatacaaacaccttttctatgctctttgtcatccactcctcctagatggaggcaacatgagcttcaaattagacaagtcttcgggtaagaaatcttatatcctatctgcaaggcagctttctataacgtggagcaatgaccctttgtattggagctggagaccagttcctgaatc

SEQ ID NO: 5404 - DNA, 281 bp, Glycine max
  Clone ID: 701096937H1
ggccgaccagctcaccgacgaccagatcgccgagttcaaggaggccttcagcctcttcgacaaggacggcgatggttgtattactactaaggaacttgggactgtgatgcggtcactagggcaaaacccaactgaggcagaactgcaggatatgattaatgaggttgatgctgatggcaatggaaccatcgacttcccagagttcctcaacctgatggctcgcaagatgaaagacaccgactccgaggaggagcttaaggaggctttccgtgtgttcgaca

SEQ ID NO: 5405 - DNA, 282 bp, Glycine max
  Clone ID: 701096938H1
taccattcccatcactccccatgccctctcaattcacttcctatccccttctctgattctctccatatattatctcaaacccctctcacagaatgggaagtgctggaggaactgactatggtgcatacacttatgagaatcttgagagagagccttactggccatcagagaagcttaagatttccatcactggtgctgggggttttatcgcgtcacacatagctcggcgcctcaagacagaggggcattacattattgcttctgattggaagaaaaatgagc

SEQ ID NO: 5406 - DNA, 281 bp, Glycine max
  unsure at all n locations
  Clone ID: 701096939H1
ctcgagccgctcgagccgcgcaggatcgaagtttcacatcagccttatccagtttagggtttcggttcctactnctcgctttgacgtatcgaaaccttaaatttgggattaggtctgagcaatctggttggtagaacctttggtcttagagagtcaagttttatgtctggattagacgatcaaattcctactgccttcgatgcttttgctgatgcaaatgctgatgactcgggtgctgggtcaaaggagtatgtgcatattcgcgttcagcagcgaaatgg

SEQ ID NO: 5407 - DNA, 285 bp, Glycine max
  Clone ID: 701096940H1
cattcacaacacaacacaaccaaatccaacatggtagccattctgaagagacaaagagaaaccgaagccgaggagagcatcataagactggcagaaagtctcatgcaactgtcgcgagtccaacaaaaaagcaagcctcttctcaaaaccttttctccaacggagttcgagtgcaaaacctgtaaccgcaagtttccatcttttcaagcccttggtggtcacagggcgagccacaagaagcccaagttcgaaggtgaagaactcaaagaggaggccaagaagggt

SEQ ID NO: 5408 - DNA, 280 bp, Glycine max
  Clone ID: 701096941H1
ggagagtccagcctgccgcttcatgagatggaaggacgaagaacttactatctgggaatgtttttgggtggggcttacgaggaggcgctcggtggaggtcacaacttgttcggcggccccagcgtggtcagggtgtcgcagagcatggccctcacagctttgcggtcacgcgtgccgtgccggggccatcctgtggagatgttcttcgagtgatgcagcaccagcccgagctcatgttcgagacactcaagcaccgcgcgcaggagtatgtcagccacga

SEQ ID NO: 5409 - DNA, 278 bp, Glycine max
  Clone ID: 701096942H1
ccgactccaaggccgctacttcgctagacctaactcaacccgatctcgataatagcggcggcggtgctaacggaaacgctaacggcggcggcggtggtggaggaggcggaggaggtgatgatagcaagggcgaggaaggatcggacggtgacaagaggaaaatggctctgttgatgtctcagaaattcactctagcttatgctgcactcgtcggagtgggtggtgtaatgggttatctaaagagtggcagcaacaagtcacttttggctgggggtttg

SEQ ID NO: 5410 - DNA, 281 bp, Glycine max
  Clone ID: 701096943H1
gtttgacctggcctcaaagctctccgccgaacgcgccatgaacgcgtcgccgtttatttggacactaaaacgactcctcaacataggatccgagaagaaactgagagaaacaattaacgtcgtaaacgacgtcgcaaaagagatgataaagcagagaagagaaatggggttcaagacgcggaacgaccttctctcgcggttcatgggatcaatagacgacgacgtttatttaagagacattgtggtgagttttctattagcgggtcgtgacaccatcgctg

SEQ ID NO: 5411 - DNA, 272 bp, Glycine max
  Clone ID: 701096944H1
ccgtagcggtggcggtggagcatggcggggcggtggatatggcgtggcgtggcggtggcatggcggtggcagagaccgtggttatggtggtggtggtgaccgtggttactctcgtggtggtgacggtggtgatggaggctggagaaactagggcttgatgtcgttgattagggtttatgattatgctcagtaattttagttgtgtttgagtttgagtatctttatggttttgtgtcaccgtggttcttgtgtttgaccaatatatctggttg

SEQ ID NO: 5412 - DNA, 279 bp, Glycine max
  Clone ID: 701096945H1
aacataattggagcaaaatatttccgcatggatggttcatttggagaagatgacataatatcacccagggattcaaatggccatggaactcactgtgcatccactgctgctggaaactcagttgagtccacaagcttctttggccttgcctcagggacagcaagaggaggagttccatcggcacgaatcgcggtgtacaaaccttgttggtcatctggctgcgatgatgccgacatccttcaagcattcgatgaagccatcgcagatgatgttgacgtc

SEQ ID NO: 5413 - DNA, 279 bp, Glycine max
  Clone ID: 701096946H1
ggctggtatactcgcttttcttcagtttgggaagacggtcacggagagtaagaaggaccctattaagcttttgaagttgttggatattttcgcgtcgttgaataagttgaggctggatttcaaccggctttttggtggtgcgccgtgtgttgagatacagaatttgacaagggatcttattaagagcgtgattgatggggctgcggagattttttgggagcttttggttcaggtggagttgcaaaggccgaatccacccccaatggatgaagttggaag

SEQ ID NO: 5414 - DNA, 275 bp, Glycine max
  Clone ID: 701096947H1
cggaatcggctcgagcggtcgagcgatgcaaaggcagacggagtgggttgaccatctgccggcgacacggtgtgcttggagtgcggcctcgtactggagtccactctatcgacgagacctctgagtggcgtaccttcgccaacgagtccggtgacaacgatcccaatcgtgtcggcgggccctccaaccccctcctcaccgacggcggcctctccaccgtcatcgccaagcccaacggcggcggaggtggcggcgagttcctctcctcctccctc

SEQ ID NO: 5415 - DNA, 292 bp, Glycine max
  Clone ID: 701096948H1
gctcgaggcaaagtgaattagacttagattctgattctgggattggatggagctaggcctcatggataagaatccaacgaagctggaacactttgatgacatgtggaggctcgaatccactgccacactattatctcacttgaagggggatgatggtcgacatgtcttgacattggatcgtacaatattctatccgcaaggtggtggtcaacctgcggatactggctttgtactcattcatggctttgataacaacaaatttctggtttctgatgttcggtccaaagatgga

SEQ ID NO: 5416 - DNA, 204 bp, Glycine max
  Clone ID: 701096950H1
caagaatagttcctgatacctgctggaagaataagctggtttgaattagtagagtagtgagcatagtattgatattctagtgttttatgtctgaagtggctcctagcatttaattagctataatgtaatcacataaatattcttaatgaaagtttaatttatatacttgtactacaaaacaaaaagaagaagaaaaacgaaaaa

SEQ ID NO: 5417 - DNA, 282 bp, Glycine max
  Clone ID: 701096951H1
gcttaatgccccaaagcattggatgcttgacaaactgggtggtgcatttgctcctaagccctcatctggaccacacaaatcgagggaatgcctgccactcatactcattttgcgaaaccggctgaagtatgctctaacataccgtgaagtcattgctaattctgatgcagcgacatgtccttgttgatggcaaagtcaggactgacaaaacataccctgctggttttatggatgttgtatcaatccctaaaacaaatgagaacttccgcctgctgtatgaca

SEQ ID NO: 5418 - DNA, 280 bp, Glycine max
  Clone ID: 701096952H1
gagtcactcttcttgcataacccagatctgcagacaatatgcgaagaactggcttgttacatttgttatgccttgtcattgctttagtaagtgtgaaagcagaagatgcgtataagtattacacatggacggtgacttatggaactatttctccattgggtagtccccagcaggttattcttatcaatggtcagtttcctgggcctagacttgacttggtgactaatgagaatgtaattctcaaccttatcaacaagctggacgagccatttttactcac

SEQ ID NO: 5419 - DNA, 281 bp, Glycine max
  Clone ID: 701096953H1
taacccctcaccttacgcgccggtgcgagacgcgtgagtgtgaagaagagacaaaggtgcagttctggggtttggcggtgaagaacagaacacacacgatggggaagaagagaggtacaagttatcaaaagaaagatgccaaaagctcgaaaagtaaaacaagttctcgccatggtgcttattccagtgatgacatggacgacgatattgatacttttcataagcagagggacattgtcgcccttgacataaatgatgatgctgaagaatcggaagatgag

SEQ ID NO: 5420 - DNA, 277 bp, Glycine max
  Clone ID: 701096954H1
cgagaaacaacgccacgctgaaatcccttttttgtgtccatgggcagcagcatgctgaggctagtgttgggcttgtctgttttgagttgtgtgcttgtgacatcctcagctcaaacgtgcagaaaccaaacattctcaaacagggtgtttgccacatgtcgtgatcttccacagttgacggcttacctgcactggacatacgaccaggctagtgggaggttggagatagcattcaaacacgctggaatcacctcgaccaacaggtgggttgcatggg

SEQ ID NO: 5421 - DNA, 255 bp, Glycine max
  Clone ID: 701096955H1
ctctctctctctcttcttcttcttcttcttcttgcacgtattgttctaatccacaaaaataatggccttaaattacaacattgccctcgccttctctacggttctcacgttgcttctccttcccttaccaacccttggggagctcgtgcaggagcagccattagtgcgtcaaagtacacaacggccaactcttgaaggggcgcctcaccgtcaatctcatttggtaagggaactttaacccggttcaacggtcca

SEQ ID NO: 5422 - DNA, 285 bp, Glycine max
  unsure at all n locations
  Clone ID: 701096956H1
ctctttccattgttctactttttcagtcccaccaccaatggccctccatgatctacccttcacacccatgaccaccacttccctcttcatcattctattttctctattttccaccccttcccattcttcnctcacttgtgcttcccagaagctcaaccgcacctacgccaactgcaccaacctccccaccctcggcgccaccctccacttcaccttcaacgccaccaaccgcaccctctccgtcgccttctccgcctctcctccctccccctccggctgggtcgc

SEQ ID NO: 5423 - DNA, 282 bp, Glycine max
  Clone ID: 701096957H1
gtgggcagctggaggattcgagagttctcaagggagtcatgataaacaaagatgtggttgcccctggcaaaatgaggagaaggattgttaacccacacatcattcttcttgattctccccttgagtataaaaagggtgaaaaccaaacaaatgccgaactgctcaaagaagaagactggagtctcttattgaagatggaagaagaatatattgaggagctatgcatgcagatattgaagtttaaaccggacttggtaatcacagagaagggtctgagtgatt

SEQ ID NO: 5424 - DNA, 283 bp, Glycine max
  Clone ID: 701096958H1
atggagaaggtctccgcctccgccgagagcgaggagctgaccgtggaggagcgtaacctcctctccgtcgcctacaagaacgtgatcggcgctcgccgcgcctcctggcgcatcatctcctcaatcgagcagaaggaggagagccgcggcaacgaggaccacgtcgccgtcatccgcgactaccgctccaagatcgaggccgagctctccaacatctgcgacggaatcctcaaactcctcgacacgcgcctcgtcccctccgccgcctccggcgactccaagg

SEQ ID NO: 5425 - DNA, 277 bp, Glycine max
  Clone ID: 701096959H1
attgatacctatggtgggtggggtgctcatggtggaggtgccttttcagggaaggaccctaccaaggttgacagaagtggtgcctatatcgtgaggcaggctgcaaagagtgttgtggcaaatggccttgccagaaggtgcattgtccaagtttcctatgccattggtgtccctgagcccttgtcagtgtttgtggacacttatggaactgggaagattcctgacaaggagattcttcaaattgtgaaggagaatttcgacttcagacctggaatga

SEQ ID NO: 5426 - DNA, 282 bp, Glycine max
  Clone ID: 701096960H1
atcaaattccaactcttgcaagctagcttctaccaatctttcacaactcttgttcaaagagaaacagcttataggatgaagagcaaaatcttgaaggcactgccaaaagcagtttcagcagtcacggtgacatttcaaaaccatccattcagcccaggcagggaccacaaatcaaagcctatcgtatccatgattccccatgaagctagaagaaaaacccatgatagaggcaataataacgacattgatgaaatttattctcaagaacccacttcaccgaaa

SEQ ID NO: 5427 - DNA, 279 bp, Glycine max
  Clone ID: 701096961H1
aaaagggcaatgcattagaagttgttttcatctcaagtgacagagatcaaacctcctttgatgaattctttgcgggaatgccatggttggcacttccctttggggactcgaggaagaaattcctgagtcgcaaattcagggtatctggcatccccatgcttgtggccattgcatcaagtggtcagacattgacaacaaaagctcgagatctggtttcactctatggagcagatgcatatcctttcaccgaggagagaataaaagaaatagagacagaac

SEQ ID NO: 5428 - DNA, 281 bp, Glycine max
  Clone ID: 701096962H1
agcgcagtgaaaaaagcttacgttgaaacagatgagaaaatattggaacaagaacttgtgttcgggcgaggagggtcaacagctgtgactgcaatacttattgatggtcagaagcttgtagtagcaaatgttggtgactcaagagctattatctgtgagaatggaaaggcaagacaactatcagtggatcatgaaccaagcaaggaaaaaaaatcgattgagaggcgtgggggttttgtatcaaacattccaggagatgtccctcgagtagatggacagct

SEQ ID NO: 5429 - DNA, 283 bp, Glycine max
  Clone ID: 701096963H1
gttgctcaaacattagttgtctatgctaaaacagacataactgctgggtcaaaaggcattactgcattcatcattgagaagggaatgcctggattcaatactgcccagaaattggataaacttgggatgcgaggaagtgatacgtgtgagcttgtctttgagaattgctttgttccagacgaaaatattcttgggaaagaagggaaaggagtctatgtcatgatgtctgggctggatctggagagacttgttttggcagctggtcctcttggtattatgcagg

SEQ ID NO: 5430 - DNA, 289 bp, Glycine max
  Clone ID: 701096964H1
cgagaatttgtgtctgctcactcgctcttctccgccacttctgaatctattgaatcaacaatcatgtcggacgaagagcaccatttcgagtccaaggccgacgccggagcctccaaaacctaccctcagcaagccggtaccatccgcaagaacggctacatcgtcatcaaaggccgcccctgcaaggttgtggaagtttcgacttccaaaactggaaagcacggtcacgctaagtgtcactttgttggaattgatattttcactgccaagaaacttgaggatattgtgc

SEQ ID NO: 5431 - DNA, 278 bp, Glycine max
  Clone ID: 701096965H1
cggcactgagttattagtaattgtgttgtgttgtgttgagcagagagaaggatcaagacaggataagaagaaacatggaatacggttacggttagggttcaggttagggtgatgatgccggagtatcaagggaaagggaggtaagaccaggaagaggggaaagaacgaggcggacgacgacaagcgagagctggtgttcaaggaggacgggcaggagtacgcgcaggtgctccggatgctgggtaacgggcggtgcgacgcgatgtgcatcgacggga

SEQ ID NO: 5432 - DNA, 277 bp, Glycine max
  Clone ID: 701096967H1
tccttatctctctctctctctatctctcccgaattattgttcgttcgacccttttacttagtattccctgtttccggtattcgctcccttgtttctgcagtctggttctacttagatctctgtcgcgcaccagatctggtgcagggtaagagggttgggtccatcaattttgtatcaatccttccttctcagcggtaggcgttgggataccatagtctttccgggaaccaagatagggttctctccgttttcagtagatctctcactgtcttctttt

SEQ ID NO: 5433 - DNA, 281 bp, Glycine max
  Clone ID: 701096968H1
cttgtgctctctcttcagtctctcccacacacccttcttcttcagctgagttgtttgtaatacagcaagatgaatccatggaacatgagaacttccaagttactctctcaacaagtttcttatcctccttatctctttgtagaagagattccaaacatgggaaattccagtgttgtgaccaaggatgctagaggttcacagctgacaatcttctatggtggccaagttcttgtcttcgatgatattcaagctaaaaaagccaaggacatcttgtcttttgc

SEQ ID NO: 5434 - DNA, 184 bp, Glycine max
  Clone ID: 701096969H1
aagagaatggccactttctgattggatttgaatcgtctatgtaaaatatgctatgtttattatgtcttagattctttattgacttctgtcttttgtttctgccttgttttttagtttctattttatagttgctaatgtatatgtatattaaggggtcttaacaataaatcatattctttgtacc

SEQ ID NO: 5435 - DNA, 279 bp, Glycine max
  Clone ID: 701096970H1
cacggagttatatgcttctgaaactcgtaaactggttgaaagtttcattaattatgtcatttacaagctatcaagaagtggacttcaaaatgtggagggaaaacggattcatgatttctttctgacactggcaacctgcaacaccattgtgcctcttgttgttgagtgttgacacacctgaccctgatgtcaagctgatagattaccaaggagaatcaccagatgaacaagcactggcttattctgctgctgcctatggttttatgctcatagaacgaa

SEQ ID NO: 5436 - DNA, 279 bp, Glycine max
  Clone ID: 701096972H1
actcgagccgaatcggctcgagaccatggcctcaaccaacgctctctcttcagcctccattctacgctctcccaaccgccagtactctgaccgaagagcgaaccataatggaagagtaaattaccggaaaccgaataaccgtttctccgtgaaagcctccgccaaagagattgcctttgaccagcattcccgctctgctatgcaggccggcattgacaagctcgccgacgctgttgggctcactcttgggcccagagggaggaatgttgtgttggatga

SEQ ID NO: 5437 - DNA, 281 bp, Glycine max
  Clone ID: 701096973H1
cttgtgttcttgattatactctgcgaaataatttttgcgtttcattctcttataattagcatggcctttgccgcagttaaagtgttcatgatattggggcttttagccaccgcgtgtgtagcacaagcccctggacctgcacccacgcaaccaccatcaacaaccccatcaccgtccacgtcagcacccgccccatcaccaaccgcaaacacccctcctcctgcggctgcacctgcacccgcaacacccacacccacacccgctccttcatctccaactcc

SEQ ID NO: 5438 - DNA, 278 bp, Glycine max
  Clone ID: 701096974H1
gggagttttatgatgaatgttcaggagctggccaccatcaaggtggagaagctccctgttaagatattgttgttgaataatcaacacttgggtatggttgttcagtgggaggatcggttctataagtctaacagggctcacacatatctgggagacccctctaatgagaatgccatataccccaatatgttgaagtttgctgatgcttgtgggataccggcagctcgtgtgaccaagaaagaagaccttagagcggcaattcagaaaatgctggagac

SEQ ID NO: 5439 - DNA, 278 bp, Glycine max
  Clone ID: 701096975H1
tgaatatcgtgataagaccaatagttgcactcaatgtactcaatcagaaacagaagccactagaagtccagaagagctgttattacttgttagattagagcagatgcttctttctgcatcaacaataaagaatgacaacatagaatctggaattcctctcataaaacagaaagctgatgatgactcgtggagccatattatagaggctcttctagttggcagtggaacgtcgactggtactgttgattggcttcttgaagagcttctaaaggataagc

SEQ ID NO: 5440 - DNA, 275 bp, Glycine max
  Clone ID: 701096976H1
agaagctagtgatcaatcatcaacacagagctgagtgtgttgctctgtgaatccaccttcttcttccattggaggaccatttcctcctggaatagaaatactaccacacttttcttctttcacttctctaagttgctaagttaattgctccttcattttttcactcttcgttctcgcgtacccgtgtcacggtaactcgtggtgaagtgttcgaaaatgactgtcacacctaagatctcagttaacgatgggaaacttgttgtccatggtaagac

SEQ ID NO: 5441 - DNA, 276 bp, Glycine max
  Clone ID: 701096977H1
gcaattagttgcatggatgagagcaccaccactgagtcactctctataagtctttctccgacgtcatcgtcggagaaagcgaaccttcttcgatgattacatcgtcggagaaggtttctctgtccccgccgccgtcaaacagactatgccgtgttggaagcggcgcgagcgcagtcgtggatcctgatcacggcggcacggcgctgaggtagagtcgcggaaactcccctcgtcgaagtacaagggcgtggtgcaccgcccaacggccgctggggt

SEQ ID NO: 5442 - DNA, 277 bp, Glycine max
  Clone ID: 701096978H1
atttacaaagcacggttctttcaatgagggattgtgcatatgaggctagtgttgcactgtctgcttttgctcgggtttcaaggatccatactgctctaacttctgaaagtggttctatgcttgaagaggttctagcaataactgaagatatacatgatgtttataatctggggaaagaggcagctgctatccacctgtctcttatggaaggcctttcgaaggcaaatgcaatcctttttccacttgaatcagtgttcactaaggatgtagctgctat

SEQ ID NO: 5443 - DNA, 273 bp, Glycine max
  Clone ID: 701096979H1
cgaaaccctcttcatcttgttctatctgtgacgagcatcatggcctcaagagcagtgttattgttggctatgtgtgtgcttccggcgatggttgtggccattcgcccagcaaagaaccctttttgcgtgaagggtcgtgtctactgtgacccttgccgtgctggttttgagacctcagctaccacctacattgctggtgctgagattatgttgcaatgcaagagcagggttagcaacgaggttgtgtacacgaagaaggggtacaccgactca

SEQ ID NO: 5444 - DNA, 284 bp, Glycine max
  unsure at all n locations
  Clone ID: 701096980H1
ctcgagccgctcgagccgattcggctcgagctcgagccgtttaaaactctctctctctcaaaacattcgaaacccanaaaacaaaaacaagtctcttatgataaaaaatgaaacaaatagaaatggaaagtaacgcatcagcactagcaaagaaagtttggagcatggtacgtgtggtgttgttcatgcttcgaaaaggcataacaaaggggaagctcatgatggacctcaacatgatgctgaaacgccgcggcaagctcgccggcaaagccattgccaactta

SEQ ID NO: 5445 - DNA, 283 bp, Glycine max
  Clone ID: 701096981H1
tgagaagtttcctcaattgggtttgaagcaattcgattgcattgagacaacctggcttcgatcggtgctgttttgggacaacatagacattgcaaccccagttgagattttgcttgaaagacaacctcagtcttttaagtacttgaaaagaaaatctgactatgtgaagaagccaatttccaaggagggttgggaggggatttggaccaagatgattgaattggagaaggcaataatgtacttcaatccttatggtggaagaatggctgagattccatcaaca

SEQ ID NO: 5446 - DNA, 197 bp, Glycine max
  Clone ID: 701096982H1
ctaacttctaagcattcagtaaaagaactaaacatggcagagaccattcgtttggctgttgctgttcttggtacttcttcgttcattaattccttcatcttagaacttaggattataaattatttattactccataatttgagtcttcaaaaaaagtgacttcatagagtcgctgttttttttttttttttttaaag

SEQ ID NO: 5447 - DNA, 267 bp, Glycine max
  Clone ID: 701096983H1
gatggatccagacgcgttggcaaaggcattcgtggagcactactacagcaccttcgacaccaacaggaacggcgtagcgaatctctaccaggagggctccatgctcactttcgaagggcagaagatccaaggggcttccaacatcgttgccaagctcacctccctcccttttcagcagtgccaccactcaatctccaccgtcgactgccagccctccggcgtcaacgccggcatgctcgtcttcgtcagcggaaacttcagctcgcc

SEQ ID NO: 5448 - DNA, 280 bp, Glycine max
  Clone ID: 701096984H1
gtttatcggaacgttgctataaacgttgttgttttcagataaacacgtgactcactatctatctatcaatcgatatctccgagttcagccgaaccaaactccgaagctatggcagagctccaaaccaaggttgaacctgttacggtcccggctccggtggatcccgagccaccgctagctgaggctccgccgctcgagaagaaagcggtggcggtgccaccacctgttccggctgcggcagaggaaaccaaagctcttgttattgtggagaaggagaagg

SEQ ID NO: 5449 - DNA, 279 bp, Glycine max
  Clone ID: 701096985H1
ataacacaaagcacaaagcaaagctcatccttgagttaaaaaatggcagcagcttcttccatggctctctcatccccatccttggctggcaaggccgtgaagctgggcccatcagccccagaagtgggaagggtgagcatgaggaagaccgtcaccaagcaggtctcctcaggaagcccatggtacggcccagaccgagtcaagtacttgggcccattctctggcgagcccccgtcctacctaaccggtgagttcccaggcgactacggctgggacact

SEQ ID NO: 5450 - DNA, 281 bp, Glycine max
  Clone ID: 701096987H1
cttcgaatctggaagccacagtgtggtggaacttaccaaagctaactatgaaaactgtgaagtcgataacaacatcaaagcctttaatagaggaccagctagagtcaccctcaatcgcacaggagaattctacttctcctgtaccttctcaggtcattgcagcagtggccaaaagctaagcattaaggtcactgattcttcatcaccagcacctcagaaagcaccagctgaaggtccttcagcttctgctcctccaccacagaatgctccagctgaaggtc

SEQ ID NO: 5451 - DNA, 281 bp, Glycine max
  Clone ID: 701096988H1
aaaatggaatctgctatttgcctacgctattgccccattccctatggtcccaaaggatttcatggtgcagatcctagcagatttcatctcaagattaaccatgccacccctctttctctccctcaaatttccaccaccagaagccctgttacacgtctcatttgggcatgcaaattgcatgcttgaaagattctcatcagtaccctccgagaatgagggaagtggcaacaaaattttgagaggagtgacactatcttctctggttctgacatgtgttcttg

SEQ ID NO: 5452 - DNA, 275 bp, Glycine max
  Clone ID: 701096990H1
atttttcattcgttgtgatcttcctcttcctcgtacacaggtgagcgactgaaaggtagcaatggcgaccaggaacttggaaaagatggcatccattgatgcacagttaggcaattgctcctgcaaagtgagtgaggatgacaaactgattgagtatgatgctcttctgctggatcggttccttgatatccttcaagatttacatggggaggatctgaaggaaacagttcaagaagtgtatgaactttcagctgagtatgaaggaaagcatgacc

SEQ ID NO: 5453 - DNA, 278 bp, Glycine max
  Clone ID: 701096991H1
gaagagagtgaagtttgtgaaagagatggcactcgtaacaacaaacccaaccatcaatgaggggcctctgttcgccgaagttgacatgggttccgacttcaacgccccaacggttcgagctaccgttgttcaagcctccaccatcttctacgacacaccagccaccttagataaggctgagaggttgttggctgaagctactagctatgggtcccagcttgtggtgtttccagaagcctttgtgggtggctacccgcgtggttcagcttttggtcttt

SEQ ID NO: 5454 - DNA, 276 bp, Glycine max
  Clone ID: 701096992H1
ggaagacaccactttgaggaatgctattcctgtgaggcaaagggtggctgtgtgtttgtggcgattagccacgtggggaccctcttaggattgtttctaagaggtttggtttggggatatcaacttgtcacaagcttgttcttgaggtttgcaccgctattaagtctgtgcttatgccaaagtacttgaattggcctgatgaggttgcattgaggagggtgaagagtgagtttgagggactttctgggatccctaatgttgtaggctctatgtaca

SEQ ID NO: 5455 - DNA, 277 bp, Glycine max
  Clone ID: 701096993H1
gagtacacttgtcatgtgcctatacataatcataatgtttgctcctaaatttttgtttattcttatataattattgttattttaacagtactcgtcctttggtttctcatgtatttgtactacgactactacttatagtgcagttcttaaaggttgtttgttagtctcagttattgagagagttgagagacacgaagaagaatcatggagaggagcaagagggtaaaagggagagtggttttgatgaagaagggtgtgttggacttccatgacatca

SEQ ID NO: 5456 - DNA, 279 bp, Glycine max
  Clone ID: 701096994H1
gtattattttaccccttttatatccctcaattccactggaaactgctcaccattatcgatcttatcacttattaggctttcagggtcaggttgattgccttgacttctgtaagctcaggttctctccagttcctcacatggacaaagttgtgcatgtgaaaactaatttttaattttgctgcctaatttcttgatcttttgcaggctcaagagagatgttcacattttcataatattcatgttttgattatcttatttgttccatgagttaactgatgt

SEQ ID NO: 5457 - DNA, 281 bp, Glycine max
  Clone ID: 701096995H1
caacaactataataacatctttctctctccgaacagatcacactatggccacctcaagcgccaaatcagtccatgatttcaccgttaaagatgccaagggaaatgatattaatcttggtgactacaaaggaaaggtccttatcattgtcaatgttgcctcacaatgtggcttgactaattcaaattacactgagctcagtcagttgtatgagaaatacaaacagaaaggtctggaaattctggcatttccatgcaatcagtttggggcacaggagcctgga

SEQ ID NO: 5458 - DNA, 284 bp, Glycine max
  Clone ID: 701096996H1
caaagcgtctcttacgtacttgccaaagaggaacaaaagtgtttgactgttgatagcatcatcaagaagaagttgtagagatgttagggctatttgacaagagccacaagatcaagggcactgtggtgttgatgcccaaaagtgtcttggacattaacgacttgaattcagtcaaaaatggcggagttggtggcgttgtctctggtatctttggcgccgtcgccgacgtaaccggccaaatagttgatactgcaactgccatcttttcccggaacgtctccttc

SEQ ID NO: 5459 - DNA, 291 bp, Glycine max
  Clone ID: 701097001H1
atgatgtcgaggtttctggatcaccaacagaaaaggcaattttacaatggggaatacagattgggatgaattttacggcagctcgatctgaatcatcaattattcatgttttcccattcaattcagagaaaaaaagaggcggagttgcaattcaaacggctgactctaacatccatatacactggaaaggtgctgctgagatagtcctagcctgctgtacaggctatgttgatgtgaatgccagctggttgggatggatgaggagaagatgacatttttcaaaaaagctat

SEQ ID NO: 5460 - DNA, 282 bp, Glycine max
  Clone ID: 701097002H1
cagaagagaagaagaagaagaagaagaagaagctctggattccacctcttcccgtcgttcgagacggttgttgtgctgcttgctcttcaggttgacctgggattgaatctaaagaatcttgatttacattttgagatatggagggagtttgtttctggacaaattgctaccagtatcggttttttgcattccaagaagtgcttgattggcgagttttcatccttggagattttcttcggtttcctttgtgaattgcacttagggttctgctccgctttaatg

SEQ ID NO: 5461 - DNA, 280 bp, Glycine max
  Clone ID: 701097003H1
cgacaagatctaacgttaacgttatctaaatctcttttgaaagcaatttgtgttatttctcgagttcttgtttttatggtctaaagcaattatgggaagtttttttggtctttgtcaatatgcgcttattctacatgctaatatgcgcgtgttggatgatgaatcacctcaccgagtcttgggattttttttgggggggtaagttatgcgatgtaaccttatccttgcgcatataggccacggcttccgtgcgccggtgatttttaagtaacttcttgag

SEQ ID NO: 5462 - DNA, 284 bp, Glycine max
  Clone ID: 701097004H1
tttgtgttgggtgtttcttcctccgccgcagccgctcctgctgctgccacctcctccactcaccaccttctcagtggaacccttcactctccttcttccctcttaacttcccatctatttcccacaacttcggtgctgtcatcttcactgcacttcaggtgcgttccaatcaaagccatggctgaagttgatactatagcagtgtcaaaaactgcttcttcttctgctccgggagcaagcaagccttgatatcattgtcagacaagaaggatcttgcatttgtt

SEQ ID NO: 5463 - DNA, 277 bp, Glycine max
  Clone ID: 701097005H1
ctcgagccgctcgagccggttattaggaccgccttggttgatgcagccagtgtgtcatctctgatgacaccaactgaagctgttgtgtctgaactcccgaaggacgataaagatgttcctgccatgggtggtggcatgggtggcatggattattaaggggctattttccctgaacaaccttgcttcctttaattggacgtagattggggtggtgtttcaccactattttgctgctttttctttcttatttattgacagaaggcatcactgtaatcat

SEQ ID NO: 5464 - DNA, 280 bp, Glycine max
  Clone ID: 701097006H1
aaagcacttagtgctattcaataattacgaaaaaccaacagcgagtgttgtttttgtttggtccaggctggaccagggaatgaatagagatgagaggctttcggttgaagagaactgagttaagcggcgaagcaaacgcagaatcggcggcagaaattgccaccggaagcacgtcgaagacgggtgaaccaaacacaaaattccatccaccacttctcttttcaatccccactcaaatctgtgaagaaaatctcaatttctaaattgtaattcttagcac

SEQ ID NO: 5465 - DNA, 275 bp, Glycine max
  Clone ID: 701097007H1
cgcgcacatctatttgaagtggcgtcagggcttgactcacttgttcttggggaaggtcaaattcttgctcaggtgaagcaggttgtgaaagctggacagggagtgcctggttttgataagaaaatcagtggtttgttcaagcaggcgatatcggttgggaagcgggttagaaccgagactaacatttcatctggatcagtttctgtaagctcggctgctgtggagctgcactgatgaagctaccggattcctcctttgctgattctggagtgttg

SEQ ID NO: 5466 - DNA, 279 bp, Glycine max
  Clone ID: 701097008H1
tctcgagccgctcgagcggctcgacggctcgagagcagaaattcacacaggcttttaaatacatgttatacgcaaatatgtgtctcctaacaccaactgacttgaagcgtatttttgagaaagtggacgtgaatggcgacggattggtgagccttgaggaactgaatcgattgcttcagatgacgggcaattcccaatatagcatagaagagttggaatcacttgtggaaagaaaagtcttggtttcagtgatttcttgttcttttacaactcaatatc

SEQ ID NO: 5467 - DNA, 281 bp, Glycine max
  Clone ID: 701097010H1
tctcgagccgaatcggctcgagcggctcgagtctgaatccaattcgccttcttcttgttctgcgtttaaggcaatacaacatctactactcatactcaaagtagcttagtgttttgtttagcatatcatggagaataataatcagtcgttttggcaattcagtgaccagctgaggttacaggcatccaatttggcgaacctttctctaaacgattcgatttggagcaacaatacatctccaagaggcgtgatgaaaggattaattttgacatcaaagtggg

SEQ ID NO: 5468 - DNA, 281 bp, Glycine max
  Clone ID: 701097011H1
gttccatttcccgcttcttcttttttccctcacttttccccggcgagaaaatgagagaaatcctccacattcagggcggccagtgcggcaaccagatcggagccaagttctgggaggtgatctgcgatgagcacggcatcgaccacaccggaaagtacagcggcgactccgaactccaattggaacgcatcaatgtctactacaacgaggccagcggtggaaggtacgttccagcgccgttctcatggatctggagcccggcacaatggactcggtcagat

SEQ ID NO: 5469 - DNA, 283 bp, Glycine max
  Clone ID: 701097012H1
ttggatagggaggagaagctgagggatattggatctagaaacttctttatgtgtccgaggaagtgtggcggcggcggcggcgacggtagaggaacgacgccgtttgcttcatgttcaagagaggccgacaaaacgaccaagggtggcgcgtttggttggttaaggttcatggatttctcatgatgaatattattattggaggctaatgttttccctttggcgctgccagccacgttatttggagatattttcattattatttttagaatgaatcagtgaaatg

SEQ ID NO: 5470 - DNA, 219 bp, Glycine max
  Clone ID: 701097013H1
atccaaacgaagtaacgaaccaaccaatcaccctgtctttctgacccaaaaacatagtcccaaatcgaacaaaatcaatcaactaactcctccaacgttgttgttattatgcagacaacaagttccaacactcgggcatcgatccgtcggagatctcacggcaggtcgctcgacacagaatatctgcgagagaagtcgcagaacgacgtctccagcatg

SEQ ID NO: 5471 - DNA, 268 bp, Glycine max
  Clone ID: 701097014H1
ccgaatcgaggcctccgaggacacgtggccgccgcggaagagcgtcgtctcctgcgccggcgtctgccgcagctggagacatatcaccaaagacattgtcaaaacgcccgaactctcctccaagatcaccttccccatttctgttaaacagcgctagctgaagatgggaagttccttcttgctgcacgcaaatgcagacgtccaacctgcacagattatatcatctctcttgacgcaatgatatgtcaaaggggagcaactcctatgt

SEQ ID NO: 5472 - DNA, 288 bp, Glycine max
  Clone ID: 701097015H1
cgccaccttaaatataacaaatacttgtctggtaaatgtaagttttatcctcctatcctcttcacaacacttgacaaagtgatgatgagaacaccaataagcagtgatgaaagtggtttgaagaaggggccatggagcccagaagaggacaaaatattagtggatttcattgagaaacatggtcatggaagttggagagcccttccaaggcttgcaggcttaaacaggtgtggaaaggttgcagactgaggtggactaattacctcaggcctgacatcaaacgcggaa

SEQ ID NO: 5473 - DNA, 278 bp, Glycine max
  Clone ID: 701097016H1
tcggaattgcccgcttcagcgaatcggtcagtcagcgtgaaaggcgaggttatcgcaaacccagacccacatctctcttgcgaaggaaaccgatgggtccgatgctacaaaccattctcactgtgcttcttctccttatgcttcttctcatcgtcatttttgctttctttctcttcaaaccatggcgcttctttttctcttcgcgttttctctccttcatcaagggggagctatcgcggccccttttgggacgtaggtgatgcgtcgtcgtttaatcg

SEQ ID NO: 5474 - DNA, 271 bp, Glycine max
  Clone ID: 701097017H1
atcggctcgagtgaattcatgataaaacccttcaccgttcctttattatacattttcctgtcaataaagggatcaacgggttgggggatcaaatggtaaagttctactgttggtaaattggaggattagaaacatgactattgctttccgattagctgcttatgcaccaattgctatctcatttatgctattgattagcgtacctgttgaatctgcttctcctgaagctggtcgcataacaaaaatgtcgtatcttccggtacatcattat

SEQ ID NO: 5475 - DNA, 292 bp, Glycine max
  Clone ID: 701097018H1
gactcgagcagctcgagcggctcgagcggctcgagctcgagccgattcggctcgagaaacccacaggcacgctgaacatggaacacagaacccatagaactcaacctggcttcagcaaaggatctcaaagacttgagtatattctcaaagatggatgtatatgctgtgctttcactctccggcgatcaaaagatcaagactcccgtccacagaaacggcggcatacaagcaacatggaatttcgggtcaagttcacttttgatgaatcggtggcgcggcagaaccgtttggg

SEQ ID NO: 5476 - DNA, 278 bp, Glycine max
  Clone ID: 701097019H1
ttctgttacagctgaggattggttgaagcctaatgtagtgttggaagcatttgaagctagggcttctaggatgtcagttgcttgtgctcaaaatcttagcaagtttgctaaccctgaagagggttttcaagaactagctgctgatttagttgatgccgcggttgctcattgccagttaattgttgtttccaaatttattgagaagttgcagcaagatatacctggaaagggaggaaaaagcaattagaagttctttgcagcatttatgctttgtttct

SEQ ID NO: 5477 - DNA, 280 bp, Glycine max
  Clone ID: 701097020H1
cacaaagcgggttactgtctgttcaagctaccatctctctctctctttcttagtgcctccttgccagaagttaaaatggcccaagaaactttcctattcacatctgaatcagtgaacgaggggcaccctgacaagctctgtgaccagatctccgatgctgtgctcgatgcatgcttggagcaggaccctgacagcaaggttgcctgtgaaacctgcaccaagaccaacatggtatggttttcggagagatcacaaccaaggccaacgtggactatgagaa

SEQ ID NO: 5478 - DNA, 283 bp, Glycine max
  Clone ID: 701097021H1
ttctagtcccaaagagctaacaagagattcaagaccggcatggctaatgaagaggaacagaaaaaccacctcttcggcatcaaagatctcggtcacaagactctccttcagagtgatgcactctatcagtatatacttgaaaccagtgtctatccaagagagcacgagtgcttgaaagagatacgcaagatgactgcaaaacacccactgaacatcatggcaacaccagcagcgaaggacaacttctgagcatgcttgttaagctcacgaattcaaagaacgc

SEQ ID NO: 5479 - DNA, 266 bp, Glycine max
  Clone ID: 701097022H1
cttaacgcaacaaacacatagccacatcttctctttctcttcccatggcattctgactcatacccaaatcattgattgtttgtctatcgaatcggtgagaaaatggcagtggagctgatggggttcccccaaatgggcgaacagaaggcaattgaagaagcagccgccgaagcgctcaagggcatggaacacctcctctgtctcctctcccatcaacttcccacctccgcactcaccacaccgacgccaccgtttccaacttcaaa

SEQ ID NO: 5480 - DNA, 280 bp, Glycine max
  Clone ID: 701097023H1
cgccaaccaaaaccttctccgttaagaataactctctctctctctctctgaaatgggcgaggaatctcaagggattaagctgtttggtgcgctgattacattgaagggtggggaagtaaagaaaggagaaaaaggaagcgaatatgagagggtggagaagagagcagagaagataataccctgcccgagatgcaagagcatggaaactaaattctgttacttcaacaactaaacgttaatcagccgaggcatttttgcaagagctgccagaggtactgga

SEQ ID NO: 5481 - DNA, 280 bp, Glycine max
  Clone ID: 701097024H1
tggttattgtaatcaattctactatatgttgctctgtttaatttgttttagttggtgtagttgatatatctggtattagtttaactattattattattattataattaggttaagtttataaatggaaacattagtatagtatagttattatgtagctagggtggtttatttgcggcgctaactgtattatgtcgatggctctctaccttgttgaagagattttgtttatgaccattatgactagtgagcttgttgtttattttagatttaaaatttttg

SEQ ID NO: 5482 - DNA, 279 bp, Glycine max
  Clone ID: 701097025H1
aattaataacaagctagctattagttcgattttgtagtaagtgaggtgccaatatggtgaagatagctcttggtactttggatgactcttttagcgctgcctctcttaaggcttatttcgcagagttccacgcaactctgattttccgtgttcgctggtgttggatcagccatcgcttacaacgagcttacaaaagatgcagccttggatccaacggggctggtggcagtactgtggcacatgcatttgcactgtttgtaggtgtctccgtcgccgcca

SEQ ID NO: 5483 - DNA, 282 bp, Glycine max
  Clone ID: 701097026H1
accctacttgtgttcttgattatactctgcgaaataatttttgcgtttcattgtcttataattagcatggcctttgccgcagttaaagtgttcatgatattggggcttttagccaccgcgtgtgtagcacaagcccctggacctgcacccacgcaaccaccatcaacaaccccatcaccgtccacgtcagcacccgccccatcaccaaccgcaaacacccctcctcctgcggtgcacctgcacccgcaacacccacacccacacccgctccttcatctccaa

SEQ ID NO: 5484 - DNA, 90 bp, Glycine max
  Clone ID: 701097027H1
gttaatgacgggctgagttgatttaaaacgccatggaacaatttcagtgttatacatatgcacattattttctcgcattaagatcgtcat

SEQ ID NO: 5485 - DNA, 284 bp, Glycine max
  Clone ID: 701097028H1
gtttttgggttgctgtggagaaggcttctttacgcttcttaccaaccaatgagttggaggctacattaactcacactacaaagtgcccttcaaaatctttagcaggagcttttagaaaaaagatccagaagtggctgtttcaaaattcctgggtaggcagaaccttattttgtttctggatgatgagcagcatctctttttttgttcaatttttccaccttcttccaaccctaatattctttcccctttttctgtatcttcttactagaaagagaggtgcagtc

SEQ ID NO: 5486 - DNA, 226 bp, Glycine max
  Clone ID: 701097029H1
gaagactgaatctatcagaatatccactggattcttcgctctttgcctatgtttctccccagtctattaactccaagcttcttcacacgtctcagttcaggttcctagacaaagctgcaattataaccccacaagacggcataaacccagacgggtctgcatcagatccttggagtctttgcagcatgcaacaagtggaagagctaaaatgcttgctgagagtgat

SEQ ID NO: 5487 - DNA, 284 bp, Glycine max
  Clone ID: 701097030H1
aaggaacatgatttagaaaactgccaagcccacccatattcattctctcaaaacttccaaccatgaactgaagcaccacacatacccacttcctccaaagacatcatttttattaccaatcttccaatttcagagaaaattctttgtgggcatctcttaattaaaaaaatgtcaagcttccccaacacggtggcggaagggcgcaggtccagcaaggcaccggaaaaatccacttttttcagacttgcagcctcttgagccagttcttgaaggagaaacgtgct

SEQ ID NO: 5488 - DNA, 283 bp, Glycine max
  Clone ID: 701097031H1
aaaaccttgatcaagaattgaagcattaatcttcaaccatggccacacccttggcctaccaagagcaccttccggcggcacccagttggctgaacaaaggtgacaacgcatggcagttaacagcagccaccctcgttggtcttcaaagcatgccgggtctcgtgatcctctacgcaagcatagtgaagaagaaatgggcagtgaattaagctttcatgggtctctatgcctttgcagcattctaatatgttgggtgttgtgtgttacgcatggcctttggaga

SEQ ID NO: 5489 - DNA, 265 bp, Glycine max
  Clone ID: 701097032H1
cagatgagttcatgcttgatttcatacagtgggagtgtgggaggactcgaagagcttctgcaataattttgaacacctttgatgccttagagcacgacgttttggaagcgttctcgtccattttgcctccggtttattccattggtcctttgaatttactcgtgaaacatgttgatgacaaagacttaaacgcaattgggtccaatctttggaaagaggagtctgagtgcgtggagtggctgaccacaaagagcccacagtgtcg

SEQ ID NO: 5490 - DNA, 286 bp, Glycine max
  Clone ID: 701097033H1
tatcgagccgattcggctcgagcggctcgagtgaacttggaagatacggtttccattatctactccatcttcacgttccgaacttgtagatagaagatcacacttgctcaattcccttctcaagttattgttggttggcaatgcaagatccaaggattcctttgtcagaggagatcttgaataataaaccaaggaagaagaaaaactcaacccagaaggcatctttatttcttttgcagcgaatggtgtcaaggaagatggacaggcatctctgtctttaaaatca

SEQ ID NO: 5491 - DNA, 283 bp, Glycine max
  Clone ID: 701097034H1
gtgcctttggaagaccgaatactgattcttaagaagggttctaagcctgatgatcggatatggttcctggagattgacacccaatatgttaggcagcagcaaaaaattttggggactgaggtagttgcatggagtaaaggtgtgataggcaatgctgagaagcctgttgttattagtggtccttctggagtaggcaaaggaacactgatatcaatgcttatgaaggaatttcatctatgtttggtttttccgtgagccacaccacccgtgctccaagaggtat

SEQ ID NO: 5492 - DNA, 281 bp, Glycine max
  Clone ID: 701097035H1
gaaaaacaatagcccacaagattggcctgagccaatagtcagagttcagtccttgtccgaaaggtgcacagattcaatccctgagaggtatatcaaacccctcagtgaccgtccatctgatgatgccgttgctgttgatgatgccaacatcccaatcattgaccttgcagggctttatggtggtgacccagatgctcgagcctccacactgaagaaaatatctgaggcttgaatgagtcgggtttcttccagatcgtgaaccatggtgttagccctcagct

SEQ ID NO: 5493 - DNA, 280 bp, Glycine max
  Clone ID: 701097036H1
gtaacggaaactggtgacacagtttagagagagagagaaacaaagcaaaagccatttggatcctctcttctcttctttgatctccgttacccttttcgttttctcaacacagagagagagagagagtctttcggagttcgtttgcgtgtgttgtgtgatcagtcaccgatggcagcaccacctgcgagggcacgtgccgattacgattacctcatcaagcttcttcttatggcgatagcggtgtcggaaagagttgtctgcttttgcgattttctgatgg

SEQ ID NO: 5494 - DNA, 278 bp, Glycine max
  Clone ID: 701097037H1
gaaaaattaagcaacgattcaagaagaaaatgggttctgaacttgaagctcccattcacgtcctcatggtgtcctatccagcacaaggacacataaaccctttgctcagactaggtaagtgccttgctgcaaagggcttatttgtaaccttcaccacctcagagaccgctggtaaaaacatgcgaaccgccaataacatcactgacaaatcagtgattcctgtcggcgaggttttctcaagttcgatttctctgaagatggcatggcagatgatgatg

SEQ ID NO: 5495 - DNA, 275 bp, Glycine max
  Clone ID: 701097038H1
gtaaaatttgaacacgtatctgctcctcagcctgatgatattgccaaagccgttagtggggaagctgctgaaatgattatccaagtgtctgatagtgtggttcctgcattcaagtctgctgctgaagatcttttgaacaattctggtttaccagtcattgaattactggcaaaggctcttgcaaaggctgttggttatactgaagtaaagcaaagatcacttctaattccatggagaactatgttacattacttcttgagactggcaaaccaatc

SEQ ID NO: 5496 - DNA, 277 bp, Glycine max
  Clone ID: 701097039H1
cctgttgcatcattggagcatggtggtggtggaggaggagtagtagctgtggcctcctctaccaccacctgttgcatcattggagcatggtgaaggtgctcatcatgaaggagaggccaaggagaagaaaggtatattagaaaagatacaagagaagcttcctggttatcactccaagacagaggaggaaaaggaaaaggaaaaggagagtggtgctcattgatattaagattgagacaaggcttttttgttggttggagatgcatgattgtggtgt

SEQ ID NO: 5497 - DNA, 277 bp, Glycine max
  Clone ID: 701097040H1
ctcagttctgccacatattaacattccggcgcaaaatgaaggtcatcgccgcctacttgctcgccgttttgggaggcaacgcagccccttccgccgatgacttgagggacatccttggctccgttggagctgacgcgaacgatgacaacatcagcaacttcttgtctgaagttaagggcaaagacattgtggagcttatcgcctccggtagggaaaagctggcctccggccttctggcggtggcgccgcgttgccgttgctgccgctcccggcggtg

SEQ ID NO: 5498 - DNA, 131 bp, Glycine max
  Clone ID: 701097041H1
ctcgagccgattcggctacgaggggatctcaatgacacagcgatgagttttggaggttagtaagtacatccatattgtaacggggaatagttaagtaagttgttagtctcttggatattcatagagtgagt

SEQ ID NO: 5499 - DNA, 278 bp, Glycine max
  Clone ID: 701097042H1
gtcaactctcgttcaatcaccagcgattaagcgtgtctctcctaataccaaaacgctaccgttttgctcttttatttctctatggattgcaagaagcgagttcgggatgactcggacgagtcagttctggaatcgcccgaggcgaagcgactcagggacgatttactcgagttcttcgacgacgccgacgacgcaccttcctctcaggaccttgactccgtcatgaaggcctgcaggaggagatttccggcgtggcctcagattccggcgagtctcag

SEQ ID NO: 5500 - DNA, 277 bp, Glycine max
  Clone ID: 701097043H1
tgcaaattttcttcccctcaatcgtatattgctcaggtggtgttcctgttcccccccaagcacccctgagattcgttcgcaaaaagcttaataagaacaaaaaataaaaataatattcttcgttattatttcatttcaatttcgttttcgttttcgttttctgttttgatttgatcttccaatggcgtccgatggctttaccgacaagaacaccgtgttcagaaagctcaggcgaagtctgaacataagatgtgtttcgattgcaatgcgaagaacc

SEQ ID NO: 5501 - DNA, 270 bp, Glycine max
  Clone ID: 701097044H1
cctcgagccgaatcggctcgaggacatttttcaaacatttgaaggacacaacacagttctgcaccaacaggttgcaggtgatattttgaaacaatacaagggaaagttcaaaggtggaactttcgcagtgacatggaactacttgagagaatccatgaatacttatctgtcacagccaaatccggttactgctcggtgggaaggcgaagaccatttacgagatcctaaatttcattggatgcgttcagataccgaacatctagattactt

SEQ ID NO: 5502 - DNA, 276 bp, Glycine max
  Clone ID: 701097045H1
ccactccatcatcgacatggacgctgatgttatcaccattgagaactctcgctccgatgagaagctcctgtcagtcttccgtgaaggtgtgaagtatggtgctggaattggccctggtgtctatgacatccactccccaagaataccaccaactgaagaaatcgctgacagaatcaataagatgcttgcagtgctcgagaagaacatcttgtgggtcaaccctgactgtggttcaagacccgcaagtacactgaagtgaagccagcctcacaacat

SEQ ID NO: 5503 - DNA, 254 bp, Glycine max
  Clone ID: 701097046H1
ggacaactcagtcgttatgggaacattgaactcagtccatcagctggtgtcctaaattatggtcagggtttattcgaaggcacgaaagcatacagaaaagaaaatgggggcttgctactcttccgtccagaagaaaatgccattcgcatgaagactggtgcccaaagaatgtgcatggcatcgccttccattgatcattttgttgatgctttgaaagcaaatgtcttggctaatagcgttgggtcctccaccgg

SEQ ID NO: 5504 - DNA, 255 bp, Glycine max
  Clone ID: 701097047H1
tggtaactgatttggtaggtagagttttccttgcaagacaaaatttccctgtgttttcctgacaaccttggctaaattattgccttgtgattgtattatcctttcaatcaaaaatgctgttgaagttcaatcaactacttacttttgagttttgattcttttctttctgcaggatgctgagtgccttctcgttttttcttttgggagacactttcccccattttttattaataattcttgtgttatccttagttt

SEQ ID NO: 5505 - DNA, 235 bp, Glycine max
  Clone ID: 701097048H1
gcttgcaacaattgacaatccatcaaatgcttttgaatgggcacttgctgaaatgataaaccaaccggagttactccaccgagccgttgaagaattggatagtgtggtaggaaaagagagactggtccaagaatcagatatacctaaactcaactatgtgaaggcttgtgcaagagaagctcttcgccttcatcccattgcaccttttattcctccccatgtctctatgagtgac

SEQ ID NO: 5506 - DNA, 275 bp, Glycine max
  Clone ID: 701097051H1
gaatgatgcagggtgtatgtttcacagtgaaggaggtctgatgagctttgagcatccaatgaacaagttgaaggcaatgccaagagtggacagtgaaggggccatgtgtggggccaacttcaaagttgataagttcgccagagtcaacagcattcctcgagtgggaagtcaatccaattggatggaatgggaccaacattagcttaaaaataaagccttacgataatgtaaataaaaaaaaaaatgtcatctatgtatgctcctttcctaactta

SEQ ID NO: 5507 - DNA, 273 bp, Glycine max
  Clone ID: 701097053H1
taggctcttccgtcttcaaacattttaaattttaaattaaccatttgggttgtgaatacggttttgctttttgtcttggttgttcatgagtatgaacacccattgtttagggggggtgtaatgtaattaacaactatagaggaacatagtactcttcttctcacattttgcaaccaacccatctaacgtttttttttcgatccttaaacatggttttttggctagcgacatctacttgtgctcatgttagatgctaatccttcacggtggtga

SEQ ID NO: 5508 - DNA, 275 bp, Glycine max
  Clone ID: 701097054H1
cctcgagccgattcggctcgaggcttcggctatcagaaactgtgatcctgagggtcctctgatgctctatgtctcaaagatgcttccagcatctgacaagggcagattttttgcttttggtcgtgtattctctggcagagtttcaactggtttgaaggtgaggattatgggaccaaattatgtccctggggagaagaaggatttgtatgttaaaagtgttcaaagaatgtcatttggatgggaaaaagacaggaaactgtggaagatgtcccctg

SEQ ID NO: 5509 - DNA, 276 bp, Glycine max
  Clone ID: 701097055H1
caaaacccgcggcaccatctcattttcatttcccgcccaacatggcagacaacaaaaagcgccggcgaaaggaccccgccggcgacgagctccccttcaaaaacaagctgaaaccggactccgcaatcatggaaaccctaaagcagttctccgcctcatcctcctcctcctccgcctccgtctcacaaaccctaacccaccaggacctctccctccccttccgctgccgcaggtggcggacctctccctctcctccgtgcagtccaacatcgagtc

SEQ ID NO: 5510 - DNA, 279 bp, Glycine max
  Clone ID: 701097056H1
ggccgaaccgggcggctggcaccggttactggaaggcaaccggggcggataagcccaacggtcagcccaaaccggttgggattaaaaaagctttggtgttttacgcagggaaagctcctaaagcggacaaaagcaattggatcatgcacgagtatcgtctcgcagacgtagatcgctccgttcgcaaaaagaacaccctaaggttggatgattgggtgctttgccgtattacaacaagaagggcacgatcgagaaactgcaaccaagcagcgatgttgc

SEQ ID NO: 5511 - DNA, 269 bp, Glycine max
  Clone ID: 701097057H1
acaaagagaagggaaatatcaggaggtgcgagtaccggagccaaacgcgggtgtgtgtgtgtgtgagggagagagagatgcagttccattcagaaactccaaactaaacatccctggcgacaaccttaggaatctcgatcgctgaaaaaacctatgcagccccgaacacactctctgcattccaacttgtttaagtcatgcctttcgattcacccttctctcaataaattttaatcagattcttggccaccgccacactcataataaag

SEQ ID NO: 5512 - DNA, 273 bp, Glycine max
  Clone ID: 701097059H1
aatagtggtgtatttggttcatcatctgggggtgctcttagacccccaaatcgattgaataatcaaatgggtgttgctgagaaccagaaccagaaaccctatggtatgccaccctcacaccctaataccaatatttcaccttcatcaccttatcctcaatttttgggctcccaatcccaatccaattctgtttcccagcgtttgggttctcccaatttgagtcctgcgtcgcccattccaggtctttgtctcagcctcttttttctctctgga

SEQ ID NO: 5513 - DNA, 271 bp, Glycine max
  Clone ID: 701097060H1
tctcgagccgattcggctcgagcaaaggtgtatttccagtgcttgactatcccttggtaataacattctgccgtctatcggttcgcatggttgggatgcctctctttcagttttgtgtgcttctgtgccaagagattccatgtctggttcacaaatctccataattcaatacgcgatgaccggtatctgattggccggaggttgcataactttggagaacatgctgagaaagcaatgtagcagaaacttctacaggggagcaggaagctat

SEQ ID NO: 5514 - DNA, 279 bp, Glycine max
  Clone ID: 701097061H1
gggagttccattgactgccgaagagttagaagaaaaggagcagttgctagaggagggattttcatcatggagccggaaggattttaatgctttcattagggcctgtgaaaagtatggccgaaatgatataaaaggtattgcttctgagatggaaggaaaaacacaagaggaagttgaaagatatgcaaaagtcttcaaagaaagatacaaggaattaaatgattatgatagaatattaaaaacattgaaagaggggaggcagaatatcccggaagatga

SEQ ID NO: 5515 - DNA, 281 bp, Glycine max
  unsure at all n locations
  Clone ID: 701097062H1
caattatacaaacacatattcattctcctcacataccaaaaataaattatttttcttgttattttccctttgctaacggaaagccatgaaattcgggaagagcctgagcagccagatcgagaaaaccctgccagagtggcgcgacaagttcctctcctacaaggagctcaagaagaagctcaagcagttcgaccctcncgcccccgcctccgccgccgatgaacgcccggcaacgcctcaagaccgacgccggcaacgcgacgccgacgccgtttccgacg

SEQ ID NO: 5516 - DNA, 282 bp, Glycine max
  unsure at all n locations
  Clone ID: 701097063H1
ggcgtcggcctcaacgccaagcccgatctcaccatcgaaacctgggcccacgaaaaagccctcgagcgcctcaagatcgaaaactccctcgccgccgccgcaaccaataacaacagcgagtcgtcgtcctacgacgaatcggactgagtcgactcggatccgtccatgttaggttttgttanaggaaaaacaaaaaagggttcttcgctgtaataagggtatacaactcttggaattgaactccttggttactctaatttttctcctgtgttttgaattttg

SEQ ID NO: 5517 - DNA, 233 bp, Glycine max
  Clone ID: 701097064H1
ggaagaagtctcaggtcttgagcagtttagagctgcaatttctttaccaggtgtatctgttgtccattttgaagttgcatctaacttgcaatgcaaacaaatatggccatttgtcaatacactatgtggtcgatatccatctattaacttcctcaaggtggacattcagcaaagcccaacagttgcaactgcagagaacgttccgattgtaccgaccctccagatataccaaa

SEQ ID NO: 5518 - DNA, 282 bp, Glycine max
  Clone ID: 701097065H1
ttccttctctctcctcatttccaaagttcccaactttactaacccgagctgcaacgaatgccgctgatattagcgaaaagcgattcgatccagattcgcgaggtgtggaacgataacctggaagaggagttcgcgttgattcgcgaaattgtggacaactacccttacatcgccatggacacggagtttccggggatcgttctccgaccagtggggaatttcaaaaacagctagattaccattaccaaaccctataggacaacgtcgacatgctcaaactca

SEQ ID NO: 5519 - DNA, 278 bp, Glycine max
  unsure at all n locations
  Clone ID: 701097066H1
tttcactttccatcactttctctcgtctccccttcgcaattccccctctcgaaagacacacgcatcgcagaccatcacatcacggccatggacgccccccccgccccattcatcgattccttacactttgaatcttacggcgncttctacggcgccgaccacggctggcagaaggtgacctacgctaagaaacagaagaacaagactgttaacgccgctaacggcggccccattcccgcgccaattccagcaagctcgttccgaacggcacgctgtcc

SEQ ID NO: 5520 - DNA, 279 bp, Glycine max
  Clone ID: 701097067H1
ctaggtcaaaagggactacatgtgtctgtactgcaatgatcgatgttatccattcagcagcttggaagcagtcaggaaacatatggaggcaaaaagtcactgtaaagtgcattatggtgatggtgatgatgacgaggaggtagaattagatgagttctatgattatagcagcagttatgtggatgatcaaggcaagcagcttgttgcatcttgtgatgcatctaacaagtagaacttgctggtgggtccgagctcataatcaccacgaaatctggtgat

SEQ ID NO: 5521 - DNA, 265 bp, Glycine max
  Clone ID: 701097068H1
ctttcacaaagaaaaaataaaatagaagaagaaacaccaaacgacgccgtttaaactgcgatctctctacgtccttccttttccttctctcgcgcgattatcgctgtttttcccgaacaagagagcatggccgtagctgatcccaagcctcactccgaacctaaggtctggaacttcttcaagcttccgttccgccattccgccgccaccaatacgacgccgtcttccgtaaccttcaccatcttcatcatcaccataaccacca

SEQ ID NO: 5522 - DNA, 273 bp, Glycine max
  Clone ID: 701097069H1
ctcgagccgtcttactctagactcttccttttctcttctctgtctaaggggtgccctgagatcacattgaacaatggtgaaggctgtggccgttcttggcagcagtgagggtgtcactggaactattcacttcgttcaggagggaagtggtccaaccaccgtaactggatctcttgctggtcttaagcctggtctccatggtttccatgtccatgccttgggggcactaccaatggttgcctctcaactggatcacatttcaatcctaataac

SEQ ID NO: 5523 - DNA, 265 bp, Glycine max
  Clone ID: 701097070H1
cttcattcataccccttatcaaatctccacacatatatattatttccaccgatctctctgtcattctccctcgcgttctcattgtctctagacgaagcgttcgcaaaaacaagttcgttgatttcgttggtgagtatcaccttgatcttatagtagggtatggcgcggtgcccgtgattgttcctcgtgtttccggggtgcacatgttgttggatagctttgagcaatccacggcgtgcttctgtgtgaaggagaagacattgat

SEQ ID NO: 5524 - DNA, 268 bp, Glycine max
  Clone ID: 701097071H1
tgctgattgccttgttgggtggtgcacaagctgttgtgttatgtaacatcgactcaagtcaactaaacttgtgtcgtgctgcagttactggtcaaaaccctccaccaccagatgagaaatgttgtgcagttattcgccaagccaatttaccttgcctctgcagatacaagtctattcttcctttaattggaataaaacccgaaaaggctttggccttgcctggtaatgtggtctccaatcccctcctaattgttgagtgtagtgaagc

SEQ ID NO: 5525 - DNA, 274 bp, Glycine max
  Clone ID: 701097072H1
actacctccaggaccaaggaaactacccttcattggcaacctccaccagcttggtacgttgccacatcaatcccttcaatacctttcaaataagcatggacctctcatgttcttgcagctgggttcaatacccaccttggtagtttcctctgctgagatggccagagagattttcaaaaaccatgactcagttttctctggcaggccttcgctatacgctgcaaacgtttcggatacggttcaaccgtgagttttgcaccgtacggtgagtact

SEQ ID NO: 5526 - DNA, 274 bp, Glycine max
  Clone ID: 701097074H1
tagcagcatccatataccgacctgtgcttcagttcacggataaagttgcttcaatgctgccaacaaagtattcccaactcggcaatgatgggttgctagcttttgtggagaactttgtgaaggaccactttttaccaactatgtttgtagactaccgaaaaggcgtacagcaagccatatcgagtccagctgcatttcgtccaagggcacatgttgctactacttcacttcatcaattgagaagggtcgacctgttttacaaggattattagct

SEQ ID NO: 5527 - DNA, 275 bp, Glycine max
  Clone ID: 701097075H1
ctgttctgcatcatcatcattttcttcaataactatagttagttccctttgatatttgatctgggtcaccttctttttttcttctgggaccagttttcacccatcccattttgcactgcttgctttgtgtctgtgacttggtctcaccaaaacctcagaattcaagagaatttcgaaatttggtggtgcctagtttgttcattttggatgtaagtaaaacaaccactcatcgacactttgcttttggttaattggttttgaggtcatttgtattg

SEQ ID NO: 5528 - DNA, 270 bp, Glycine max
  unsure at all n locations
  Clone ID: 701097076H1
gaacgtacccgccaacttgatggtgctcatgttgaattcttgagaggagttgctaatccacttggcatcaaggtgagtgataagatggttcccgatgaacttgttaagctgatagatattctgaaccctaaaaacaagcctggaagaattacagtcattgttagaatgggagctgagaatatgcgagtgaagcttccacatcttatcagggcagttcgcagagcaggtcaattgtcacttgggttagtgacnccatgcatgggaacacca

SEQ ID NO: 5529 - DNA, 280 bp, Glycine max
  Clone ID: 701097077H1
gctaatgataattttacttttgtgcataaaaactcattggtgccaccttcaaaagcagtcaaccaacgtgatgcagatctcatccatttctgggataagttccgcaaagctcctgtgggttcttctaggaaagctgcagctgagaaagaaattctggaagcaatgtctcacagaatgcatatagatgacaacatgaaacttattggaaagctcttatttggcattgaaaaggtccagaactgcttagcagtgttagacctgctgggcaaccatttgttga

SEQ ID NO: 5530 - DNA, 274 bp, Glycine max
  Clone ID: 701097078H1
gcttatggggccaaatgctttgcttactgcaggcaacacattgatagctagcatagctcattcacggaaaggccggtggaggaaccgtgtaattacttgttaacaccatatcttaaagagacacagttggtgtatcttgtcttgttgaattgaaaactgtgctatagacacccttaaaaaaggaattgcttgaaatgagcatgactttttcttatctgcttctggggtgaaagtctgtatataatatagactttcatagacaattgatttgcgg

SEQ ID NO: 5531 - DNA, 266 bp, Glycine max
  Clone ID: 701097079H1
cagcaatagcttctggtgatctcgttttcttacagtgctctcttccccctttctctctcctctttatctctctcttccattgctcctccacaagcaacgccgcgcgacgtcaattttcgcaatcgccatgactgtgatgactcctgctcccattgaccagcagcaggaggacgaggagatgcttgtcccgcacacggatttggctgaagataatcaccaacctatggaagttgggctcaactgatgctgccacactgtggagagtc

SEQ ID NO: 5532 - DNA, 276 bp, Glycine max
  Clone ID: 701097081H1
tctcgagccgtttttctctcacccccaatcccaaacccaaaccctagctagcttcaccatgcggttccaatcgctctaaccctatctccttttctccaccaacgatcttcgatccgcatcgccgttcattcgaatcgtctcagattctccgctgcttccaccaccaccacaaggaggaggagttcctcgcgattcgcgcttgaagcttttccgtcgccgccgacgatcgaagaattcgctccgattcccaacgcgccgtcgtcgaggttttcaccg

SEQ ID NO: 5533 - DNA, 277 bp, Glycine max
  Clone ID: 701097082H1
aaaggagtgatttggagtttggagcgactgaactaatcattaatttgcactcgctgtttcagcttcatcacccttcttttgcatcatttatatctcttgagaaatggcacaagaaacctttctattcacatctgaatctgtaaacgagggtcaccccgacatgctgtgcgaccagatctctgatgcagtacttgatgcgtgccttgaacaggaccctgacagcaaggttcctgtgagacatgcaccaagactaacatggtcatggtcttcggagaga

SEQ ID NO: 5534 - DNA, 273 bp, Glycine max
  Clone ID: 701097083H1
caccactttcataatggcactgttgaatcccctccagaagaacccttttaccctatggcctcacttgtgtatttccaattcacttttgctgctattacccttattttgttggctggctctgtcctcggccgaatgaacatcaaggcttggatggcttttgtgcctctttggttgatcttttcctacactgttggggcttttagtctttggggtggtggctttctctacaatggggggttattgactattctggcggctatgtcatccaccttt

SEQ ID NO: 5535 - DNA, 275 bp, Glycine max
  Clone ID: 701097084H1
gacctataagaggattttctcacatatcaaattcatattaggctactaggtactagtagctcacaaaaccacgaccaacaaagtcgttataagaattttcagtttactgttataccaaggctagctatcagagccttgttcctttaggccttaggtgcttaatctagccaattttaagcataattagtttaggatcggaaaatgaaaataaatgttattaaatagtatagcattttttttataaagaatatcatatttaatattctcaatatatt

SEQ ID NO: 5536 - DNA, 276 bp, Glycine max
  Clone ID: 701097085H1
cttcagcttatttacttggacatgcaaactaagaaaaaaacctccaggcgaaatgccagtcaagagcgtggcagtcctaaagtttcaagagcacagaggaaggtctctcaaaatggtcaagctgctgaaaagaaagtcacagacttaattacatcatctgctagaaagaataaatctcttagcacccttgagaataaaactagagagcctatccctccaacagattgaataatggatatgagtttatggacagtgggacttctgatgcttgtttgg

SEQ ID NO: 5537 - DNA, 274 bp, Glycine max
  Clone ID: 701097086H1
cttaccagtatggctatccaacaatctctgttagacaggcctagacaatctgtttccaaaactatctgcttaatcttttctatagctgctgtcatgatctcatcagcctttgttggttcttatctcatcaaatccacctccttcttcaaccaatcctctcctcaacatctctgtgatcatgcacttgatagggcaacatgtttaacccatgtctcagaagtggtcaaggtccgatcttgacccccacaaaagaccacaaattcaatttgttaca

SEQ ID NO: 5538 - DNA, 272 bp, Glycine max
  Clone ID: 701097087H1
agggaaaaacacaagacggcgcacatagattttgtcgaagaaacatccgaggaacaaggttctgtgcagagcgggactgtgattcaacgcgtgtcttctgaaactggataattttggaacagggagtagaatgtcttgcgccaccttcaatgttgcagcttctttgaatcttcatggacgtactaagcaagcagtttctaagccatttgggtcaagaaatcactgactttccctaagttttcttttctctattctgagaccttgaatttgag

SEQ ID NO: 5539 - DNA, 270 bp, Glycine max
  Clone ID: 701097088H1
ctcccattttcgaatttaaagcgttcaggtttggttaagaatcggcttattgctcgttgcacttctatgtccgatgaatttggttctgttaatgggttgcaattctcgcccaataagctttttgtggaggaggctattggggctgaatatggggaaggctttgagacttttagggcagatggaccactaaaagttgatgtggactatttgaatgagaaattgcaaatggttttcttcagcgcatacgctatgctatgaaaccagatgaag

SEQ ID NO: 5540 - DNA, 274 bp, Glycine max
  Clone ID: 701097089H1
ctcctgttgtaagcagccacatatctactgctgttgccacttcaacccctgttgggagtgtgcccataactactgttgaaaaatcagttttgtctgtacctccgctatctcttgctgatcacctcaaaagtgagtggaatgttgagaagaggattctgtcagataagtctcttacaaaaattaaggttgcaagggtaaatgcagaggaagcttcagctctttctgtgctgctgtgaatcatagcctggagatttggatacagttggataagcaa

SEQ ID NO: 5541 - DNA, 275 bp, Glycine max
  Clone ID: 701097090H1
agctaccttgctagtttccatcatcgtatctgttagtatttccaaatatacacattttctattttattcatagaaatctttaacttgagaagcattacatggcgctgacgatgatggcggcgatcggcatcggcatgaagcaagagaagaagatgccggcgacgccgggccggagaacgagctgaagaagcggaatgacgagctcgagaaggagctcagagagagaaggagagggaggagcagatgaagcgcgaactccagagcgcgtgggagag

SEQ ID NO: 5542 - DNA, 275 bp, Glycine max
  Clone ID: 701097091H1
gtgaataccctaattcggagggtttcagttttcgccctcttttctcatctccaacatcttcgtcgtcacggaggctagtcttcctgttatcacaaacaatgtctgacggtcaagaatcagacaagaatattgagatatggaagatcaagaaattgataaaggcattggaagctgctcgaggtaatggtaccagcatgatttctctgataatgcctccacgtgatcagattctcgggtcactaagatgttgggagatgaatttggaactgcttcaa

SEQ ID NO: 5543 - DNA, 277 bp, Glycine max
  Clone ID: 701097092H1
aaaagaatcttgggagatcagggaggtcatcgtcgtcatttctgcgctcaagattaacataacgacctcgcgcacccaggaacagggtattgtgttgtgtagctgaaggacatggagagaagcaatccggtgaggaagccacacacttcaactgcagatctgcttacgtggcctgaaactcccatttctgattccccagctcctccttcctccgccgttcgttctcaccaccgtcggatgggatcaggaaggtggtgtttggtggtcaggtcaccga

SEQ ID NO: 5544 - DNA, 277 bp, Glycine max
  Clone ID: 701097093H1
gtttccctttccaccaccccttttcttcccttcactgcaaaaaatgcttctactagaatccctcctcccacatcattctcttacagcaagcaacgtagtaacagggatcccaggaaggttgtctgcgcctgcatcgctcctcctcaaaacttcaagagccaggactcttccgccattcatttcaatggttcgtccaaatcagagcaattgagcactgcgcgggatcatgagatgattctgatgttcttattgagtgtagagacgtgtacaagttttt

SEQ ID NO: 5545 - DNA, 270 bp, Glycine max
  Clone ID: 701097094H1
ctctctctctctcttcttcttcttcttcttcttgcacgtattgttctaatccacaaaaataatggccttaaattacaacattgccctcgccttctctacggttctcacgctgcttctccttcccttaccaacccttggggagctcgtgcaggagcagccactagtcctcaagtaccacaacggccaactcctgaaggggcgcatcaccgtcaatctcatctggtacggcacttcaccccgatccaacggtccataatcgtggacttcata

SEQ ID NO: 5546 - DNA, 239 bp, Glycine max
  Clone ID: 701097095H1
aaagtgtcttctcagaatggaacaagggagaacttctgagtttcctgattgaaatcactgcagatatatttggaattaaggatgataagggagatggatatcttgttgacaagcgtcctagacaagactggcatgaagggcactggtaagtggactgttcagcaagctgctgaattatcaattgctgctcccactattgaagcatcattggatgcaagggtcctgagtggggtgaagga

SEQ ID NO: 5547 - DNA, 268 bp, Glycine max
  Clone ID: 701097096H1
cgataatctcccaactggggatgaggaaggcctctattatgcattggatcttggcggcacaaacttccgtgtccttcgtgtacatttaggggggaaagacaaaggtgttatcggccaggagtttgaagaagtttcaattcctccaaatttgatgactggctcttcagatgcattgttcgattttatagcagcaggtcctgcaaagtttgttgggtcagaaccctgaaggtttcatctccccctgggaagacaagaggactgggtttac

SEQ ID NO: 5548 - DNA, 272 bp, Glycine max
  Clone ID: 701097101H1
cttgtggaagtcaggggaagctcactattactgatgatgatgtgatagagaagagtaacctaagcagacagttccttttccgtgattggaatattggacaggccaagtccacagttgctgcttcagctgctgcagctataaatcctagttttaatattgaagctctacaaaatcgagttggtactgaaactgagaatgtgtttaatgataccttctgggaaaacttgagtgtcgttgtaaatgcactggacaatgttaatgcaagactatat

SEQ ID NO: 5549 - DNA, 267 bp, Glycine max
  Clone ID: 701097102H1
tgctgctctatctatcgggtaatcagtctcttggtcaaaagccggtacctaattcccctgctggtgggccgatcctcgtctagcggtgggaaccggctggtatggatcaattgcttgccctgtctctcttctgttcaaccatcggaactccgcagttctctttttgggtggaataataggcgaaggaatccgcagctattgaatcagctgttagaaatggacgaatggcttagttgaacatagtgggacggaaggttcagaggcttc

SEQ ID NO: 5550 - DNA, 264 bp, Glycine max
  Clone ID: 701097103H1
cacaaatgataatcatctctactgaccaaatctgaagaaaattgctttctctttggttcctagctcgcactctctctacgcacgcctcaacatcccttctctgctccattcattatgtctccgtcgttggatcttccccccaagggtggcttcagttttgatctatgccgaagaaacgcaatgcttcaaaacaagggcctcaaagccccaacctttctcaaaactggcaccactattgtcggtttagttttccaggatggtgtc

SEQ ID NO: 5551 - DNA, 214 bp, Glycine max
  Clone ID: 701097105H1
cagaactcgttccccgcctcatccggttccttcaaaaccgaactcgtcgaaccggttatcaaacccatgctcgacctgctccgccaaaccggttcctacttaatggtgaatgcgtatccgtttttcgcttacgctgcaaactctgataaaatctctttagactacgcgctattcaaggaaaaccccggcgtggttgattccggtaatggtttaa

SEQ ID NO: 5552 - DNA, 261 bp, Glycine max
  Clone ID: 701097106H1
gaaaagtaaagtttctggcagagggaaactggggcattcgcaaggtttatggagcagtgccacatgatttggggacacatgatccatggcatgaaatgaatgcctataacatccatgatactagcaagtggaaggacctgaacccaaaatttgttcttcaggtgtatcgagattttgctaccacaggtgatttggaatttggagtggatgtgtggcctgctgtccgtgctgcaatggagtacatggaacaatttgatagag

SEQ ID NO: 5553 - DNA, 259 bp, Glycine max
  Clone ID: 701097107H1
cagagccagcgagagcaaaaccctagttcatccatcaccagtcgaggaagaagatggtgaagttccttaagcccaacaaggctgtcatcgtcctgcagggccgctacgccgggcgcaaggcggtgatcgtgaggaccttcgacgagggaaccagggagcgcccctacggccactgcctcgtcgccggaatcaagaagtaccccagcaaggtcatcaagaaggactccgccaagaagacggccaagaaatctagggttaa

SEQ ID NO: 5554 - DNA, 250 bp, Glycine max
  Clone ID: 701097108H1
actcgagccgaatcggctcgaggttggtcataggagaacaccttggctggttagattccatcaattgcatccacatatacttactagtgggagcttggatcaagaagttcgtttatgggatgctaacacatcagagtgcataatatctcatcatttctaccgtcccattgcatctattgcttttcatgccaaaggtgaaataattgctgttgcatctggccacaagttgtacatatggttccacaacaag

SEQ ID NO: 5555 - DNA, 259 bp, Glycine max
  Clone ID: 701097109H1
cctcgatccgaatcggcccgatagctacaggtctccttcctccgtccaccatcgcacccagttctagcttcatagcagcaccgcaccgcaccgcaccaggtcttctttttttctttcctggcggaggaaattacttctcaattaaaaaaaaatttgctggatgaagaaaatggaacatcaagtcatgttgtagaaggggctgctgatgctgatgctgatgctgagctttctccaccatcacataaaggcgatgacgcta

SEQ ID NO: 5556 - DNA, 255 bp, Glycine max
  Clone ID: 701097110H1
ggctagggttagtgctttgtttcactctttgctcttgatttcttcccttgtattggcttctcaaatccatgtttcctctgggaaactagtccctggactatcatggaattactatttgttgacatgtcccaagcttgagaggattataaggaagcatcttgaggatgtcttcgagaaggacagtggagtagctcctggcatacttcgactcttcttccatgactgctttcctaatggatgcgatgcgtctatatt

SEQ ID NO: 5557 - DNA, 257 bp, Glycine max
  Clone ID: 701097111H1
acagagcgcagaaaataaaataggtgaaatgaatatcgatttcaattccgccactgaatttcgaaaccaaaaaaccattccaacgaagaagatgaacctcgaagaagagggttagttacttctgagtgagtgagtgagttagtggttcctctgaggaacggtgaggaccttcaatttctcaagttctcaaccgttcgttttctctttcgttccgctaaccgccgtggatgggacaatctgtttcctccgccgccgtc

SEQ ID NO: 5558 - DNA, 257 bp, Glycine max
  Clone ID: 701097112H1
tctgtttctctgtcttcattttagtttttacggctagaagaatgtccagctcatcggaatatttggtattttccggccaccacccggcgaactctccggcggaaaagtccactttctctcagacttgtagtctattgagccaatacatcaaggaaaagggtaccttcggagaccttaccctcgggatgacttgcactgccgaaacaaacggttcccctgagacatcgtgtcactctgcaacaaccatggagttgttt

SEQ ID NO: 5559 - DNA, 260 bp, Glycine max
  Clone ID: 701097113H1
ctcagccacagccacaacacacaaacacaaacccttcgttcctctctcgttcccttcttcaattcgatcaaacacagaatagtacttttttattatgatggccgtggcccgaaaggaaatggaccggatcaagggcccgtggagcccggaggaggacgaggctcttcagaagctcgtggagcggcatgggcccagaaactggtccctcatcagcaggtccattccgggccggtctgggaaatcgtgcaggctccgatggt

SEQ ID NO: 5560 - DNA, 257 bp, Glycine max
  Clone ID: 701097114H1
cctcgagccgaatcggctcgagccggagatatgtacggacggagtgcttcttacgaatccgaactggcgcttctggattcgactcgccgccacttgctgggagagtccgaattgatattcggagccccgaatttcggttcgggtcggagctccagtttcagcagcttggactcgtgtttgagtgatgattggggagagcttccgtttaaggaggacgattcagaagatatggtgttgtacggcgttctccgtgacgc

SEQ ID NO: 5561 - DNA, 266 bp, Glycine max
  Clone ID: 701097115H1
cctcgctctatttctcagtctctgtgtttgcggctgaggattccgaacgagtgaccttcttcgtttctcgcaaagtttaagtaatcatgggtaaggaaaaggttcacatcaacattgtcgtcattggacatgtcgactctgggaagtcaactaccactggtcacttgatctacaagcttggaggtattgacaagcgtgtgattgagaggttcgagaaggaggctgccgagatgaacaagaggtcattcaagtatgcctgggtgctc

SEQ ID NO: 5562 - DNA, 270 bp, Glycine max
  Clone ID: 701097116H1
cagagctttcagtgccagagctcgtctccaaagaaggaggtcctgaaacatttcgtggaatttttattcgtgcccctgcaattcttgaagcagggccagaagttcaagtgctggctgattatcttgtaccttctagcagattgttgagttccgattcctctattgaagacaaaatggagaatgctgaggaagaaagtaaagttatagttgctgtgagacaagggcacatattagcgactgctttccatcctgaattgacagctgatactc

SEQ ID NO: 5563 - DNA, 272 bp, Glycine max
  Clone ID: 701097117H1
tccggccaactggatcaccagctcttcccgcccaaccacaccggtttcctcttttcacggtttgaaactctccaaaagtagcagcaaatcatccaagcaaacctgctcaatatgcttaaccaaaatgaagcaaggatctggccatgctatattcactgcagaatgttcacattcattccatttccagtgcattgcttcaaatgtgaaacattgaaaccaaatatgtccagtgtgcagagcaaagtggaaagaaataccttgtcaggtcccag

SEQ ID NO: 5564 - DNA, 268 bp, Glycine max
  Clone ID: 701097118H1
atctattcttacaagttacatccattgagaaacatgaaggtctcccccttagcattttcaatcctttttttgtccttcaccatagaactcttcattggcattgcttcagcagcacaagaaccagtgcttgacacctcaggccagaagctgagaacaggtgtcaagtactacattctaccagtcttcagaggcagaggtggaggcctaacagtttcaagcagtggcaacaacacatgccccctctttgtggtgcaagagaagcttgaat

SEQ ID NO: 5565 - DNA, 265 bp, Glycine max
  Clone ID: 701097119H1
gctttgaaacccggttcatccgaagcccttcaccgaaccatgtcgaggagaaaggttagagagccaaaggaggaaaatgtgactctgggtccagctgttagagatggtgaacacgtttttggcgttgctcgcatctttgcctccttcaacgacaccttcatccatgtcactgatttgtctggcagggaaacccttgtccgaatcactggtggtatgaaagttaaagctgacagagatgaatcatctccttatgctgctatgcttg

SEQ ID NO: 5566 - DNA, 240 bp, Glycine max
  Clone ID: 701097120H1
gaagagtgagtttgagggtgtttctgggatccctaatgttgtaggctctatgtacacctctcatgtgcctattatagctcctaagattagtgtggctgcttatttcaacaagaggcacactgagaggaaccagaagacttcttatagtattactgttcaaggggtggtggatcatagaggggtgttcactgatgtgtgcattggttggcctggttcaatgcctgatgatcaggtgttgga

SEQ ID NO: 5567 - DNA, 261 bp, Glycine max
  Clone ID: 701097121H1
ctcgtcttcaatcctttcgttattctcttattcatccttctcttctgaataatccagatctctttctgcccttttctccgtcacgcttttcgtgaccggatctgtatggatttgatccagatctacacgccgatggtggttttggccgggtctttcatagatctggtgcgtagaggctcagatctacggtaccgaggtgtgtgattcatgttcgtcttgcttttggaatctgtttcgtagaaagtcgtttggtcttgcata

SEQ ID NO: 5568 - DNA, 258 bp, Glycine max
  Clone ID: 701097122H1
ggaatagttagcgaacaaacccaacaatcttacaatcctaaaagaaaacggaaagcaaaataaacaaacaattcaagaagagaaagattatgggtatcgtggaagaggctcacaacgtgagaatagtagggaaggggaatgaaatcgtgattcttgctcatgggttcggcacggaccaatcggtgtggaagcaccttgtaccgcatctggtcgatgattaccaagtgatcttgtacgacaacagggtgctggtaccac

SEQ ID NO: 5569 - DNA, 257 bp, Glycine max
  Clone ID: 701097123H1
gctatcactaaatctcattcttcatctgcagctatttggattgctgattattgttaactgatattggtgcttttctttgagaaagtgtgtacactttttggataagagaaaacaagagaggtgacattggaagctaactcagagagaggcaaagatgttgggaattttcaagcagaagttggttaatgcacccaaggagctgaacagtccagcttctttgaattcatgcattaagcctaagctaagtcatgaaatcc

SEQ ID NO: 5570 - DNA, 258 bp, Glycine max
  Clone ID: 701097124H1
ctttggaaactgcttaactctctgttatgcaatgcttaagagagaagacctcaagggagagagtggttttgtgaatgcggtcaaggtcattgaaagggcagtggctgatatgaaaagtgaactcttcaaagatgcagaaaattggagggaatcttttacgaagatgtttgtgttgggaagcactttgatagttacagggtcaccaaaattcactgtttatgagactgattttggatttggaaggcctaccaaagtgga

SEQ ID NO: 5571 - DNA, 253 bp, Glycine max
  Clone ID: 701097125H1
ctcgagccgcaaagtttcagtttttggtgttccatttttcttcctccatctttatcttaaacataacttgaactctccattccttaaattttagctacgagctagttccgacacagacaaagcaatggcaaagaccgagttagaggtgactgttgagagcaagaacaaagacctcaagcacctggggtttgtgaggattgctgctattcaaacatttgtgattgtgtcaaatctgtatgagtacgcaaagcag

SEQ ID NO: 5572 - DNA, 254 bp, Glycine max
  Clone ID: 701097126H1
ccaaatgggttgatgaagtggcaccggatctggcctggatgacccagagatcaagctgggtcggatacgtggctgtttacgaggatagaagagaaatagcacggatgggaagaagagacattataatctctcttcgtggaacttccacgtgtatggaatgggcggagaatctcagggcccatatggtggaaatgggagacgaagaagcaaaagccaaagtagagtgcgggttcatgagcttgtacaacacaaaa

SEQ ID NO: 5573 - DNA, 253 bp, Glycine max
  Clone ID: 701097127H1
gagagaagaagaaacttaatcgatcatcacttcacttcactaatacatcatggcagacgagacccagaacaagtatgagagctctgaggttgaggtccaggatcgtggtgtttttgactttctcggtaagaaaaaggatgaagaagacaagcctcatcctcaggaggaggtcatcgccaccgagtttcaaaaagtcactgtctcagaccaaggagagaacaagcacagcctcttagaaaagttcaccgatctg

SEQ ID NO: 5574 - DNA, 257 bp, Glycine max
  Clone ID: 701097128H1
ctcgagccgcagcactactctctgatcagttttttcttggtctccgaatcacaaactcttcgaaaaaactaacattaatggctccgagggatatcaatagatctaacgttgttgttgccggaggatccaacccgacccgtaaagagatccgataccgcggcgtgaggaagcggccgtggggccgtacgccgccgagatccgcgatcccggcaagaagacgcgcgtctggctaggaacgttcgacaccgcggaggagg

SEQ ID NO: 5575 - DNA, 257 bp, Glycine max
  Clone ID: 701097129H1
agagcagagagtagtaagaagacactgcacagatctgagtggtgactgaaggaatctagcttctttcatttctcatcactattcttaggtctgagggctcattgccattatcatgtcaaggaggccagtaaatccttcgcgtcggttaggtgatggtggaagtataccatttgctgcatctatccggtctaaatctcaaaactctcccctactatctattgggcttgtcattgtgggtgcaatccttctgattggtt

SEQ ID NO: 5576 - DNA, 263 bp, Glycine max
  Clone ID: 701097130H1
atcctggaacgcaaaggaggattgctgcgagtggttctgctgcgttaagtgtgacgagaaaacaaaccgcgtcattagcgttgccttatcatccccttttccagacaccaatctctcggcccaaatacctccctctgtgggtgacctcccttacctcgagtccctcgtcttccacaaattccccaaactcgtgggcccaatccagcccgcaatcgccaaactcaccaaactcaagtaccttgatctctccaacaacaatctct

SEQ ID NO: 5577 - DNA, 266 bp, Glycine max
  Clone ID: 701097131H1
gaacttgacagggaccaataatttgagttttgttggtggtgacatgttcaactctatccctcaagctgatgcagtgctactaaagtgggttttacataattggaccgacgaaaattgcataaagatcctgcaaaagtgtagagattctatttcaagcaaaggcaacagtggaaaagtgattatcatagatgccgtaataaatgagaagctagatgacccggatatgacacaaacaaagcttagtttggacattattatgttgacga

SEQ ID NO: 5578 - DNA, 266 bp, Glycine max
  Clone ID: 701097132H1
cggatgggctattaacaggacctaatgagcaaattttggttcttgcagcaaccaacaggccatttgaccttgatgaagctatcataagacggtttgagagaaggatcttggttggtcttccatctgttgagaacagggaaatgatcttgaagactcttttggctaaagaaaaacatgaaaatttagacttcaaagagctggcaaccatgacagaaggatatactggaagtgatctaaagaatttgtgcatcactgcggcttatcga

SEQ ID NO: 5579 - DNA, 268 bp, Glycine max
  Clone ID: 701097133H1
ggaactcagctttacgtgttctctctctagactctgctctcaaacgccgtcgttttggaactctttttcttttccctttgattcttctctgtctttgtaaccgaaagaggggaaaatataattaataccgatttcgcaaccaattcttctcttgcgttgaattgggacaacgagaaattttggatctcagtttttggcaggaaaaaaaaattgcatttgagtaaaaataacagagtgtagtgtagggtcttgttcttgatactgtgct

SEQ ID NO: 5580 - DNA, 264 bp, Glycine max
  Clone ID: 701097134H1
ctcgagccgctttctttcttgtaacttcaacaaacggcagcttcttcaattcaaaacagaactctcttgggtgttggtgttggtgagggatctgaggcaaaggtgttgatgatatgggagcgtgtgtttcaactccacaagggttcgtgggatggaggttgagctcttccaagaagaaaaccagaaagagaaggagagagggactcagaagaagagttacttctcggttgtgtaaggactcatcggagaaagttgatgtggcag

SEQ ID NO: 5581 - DNA, 257 bp, Glycine max
  Clone ID: 701097135H1
ctcgagccggagagagatggaggagaagacggagaaggtgaagtctgaggcagttcagataattgaagcgtttgaggttctgccaaagctcgtggttttcgatctcgattacactctctggcctttctactgtgagtgtcgatcgaagcgcgagattccttctctgtatccccacgccaaaggcatattgttagctctcaaagagaaaggcatcgacattgccatcgcttctcgctcgccaacggcagacatcgcaa

SEQ ID NO: 5582 - DNA, 264 bp, Glycine max
  Clone ID: 701097136H1
gaacgaaacacagagggagagagagtgagagaagcagtaattcatcacaatgggtaaggttcacggatctctcgcacgtgcggggaaagtgagaggacaaactcccaaagtggcgaacaagacaagaagaagaagccacgcggacgtgctcacaagagaatgcaatacaaccgccgattcgtcaccgccgtggtgggattcggaaagaagcgtggaccaaattcgtcggagaagtgagggaggcgtttggaagatgatggtttt

SEQ ID NO: 5583 - DNA, 257 bp, Glycine max
  Clone ID: 701097137H1
aacgatgatgaggtggaactatgggtggttagaggattaactgctaagttaattgactgtaagatggaccaaatgaatcaagttgtagttgtcagtcatcctactgagcgtgtgtttggtcagcaccaatggcaagcactgagaacaaagctagtgacatggaggggaaatattgtaaatgttatcagtaccattcaggccaacaaaataacggaggatgggtcccaggcagcccaaggtttggttgttcgtagagg

SEQ ID NO: 5584 - DNA, 257 bp, Glycine max
  Clone ID: 701097138H1
gaaaatcatggtggacgcagcagaacgtaggtacttggaggatgacgattcatcactcatgaaaactattaagggggcaacaactggtttagttgctggcactatctgggggaccgtagttgccacctggtatgatgtccctcgtgtagagagaaatgttgctcttccagggctgattaggactttcaagatgatgggcaactatggtttgacctttgctgccataggaggagtctacataggtgtggagcagttgg

SEQ ID NO: 5585 - DNA, 259 bp, Glycine max
  Clone ID: 701097139H1
cggctcgagtgaaaatatgagggtgaagcttccacatctcatcagggcagtgcgcagagcaggccaaattgtcacttgggtcagtgatcctatgcatggaaacaccattaaggctccctgtggtcttaaaactcgccccttcgattccatcagggccgaagtgagagcattcttcgacgtacacgatcaagaaggaagccacccaggaggggttcatctagagatgacgggtcagaatgtgacctagtgcattggtggg

SEQ ID NO: 5586 - DNA, 252 bp, Glycine max
  Clone ID: 701097140H1
ctggaaaaccctgtttttcttcaatagaaagaagtgctggttttctcagatagggaacttgctgccagtggctttactagaaagaatgaagaagatattcaaaggttcattgaaggcggggcagaaagtgatacaaattcagatagtgaaggggttgacttagtggaagacctgaatgaagcagacactgtagatggtgattcttcacatttgtcagtggaagagctgaatgaagcagacactgtagatgat

SEQ ID NO: 5587 - DNA, 255 bp, Glycine max
  Clone ID: 701097141H1
caaaaacatcatcacagaaactcacaaaggaaaaacaaacaaacaaacaaaatgtcttctccaagcaagcggcgagaaatggacttgatgaaactgatgatgagtgactacaaggtggagatgattaatgatggaatgcaagagttttatgtgcacttccatggacccaatgagagtaaattctcctttgtttatatctttgttacatgttttgaagctttttgtgaattgttttttgtgaaaaaagttgggttg

SEQ ID NO: 5588 - DNA, 249 bp, Glycine max
  Clone ID: 701097142H1
gggctatcaagagaatggccctgaacgattttttcgcgggggagatcgcgacggagcttctgaaaatgctgatcagcatctcccgcaagtccctcctctgccgcgccacgccgaccagctcatcagctacatccacgacctcctcccctccatcgaggagatcaagtactccggcgtcgagcttcctgcactgcgccaatcgcaactcgaccgtctctcggagattctccgctccggcgtcgagctctc

SEQ ID NO: 5589 - DNA, 256 bp, Glycine max
  Clone ID: 701097143H1
tctcggccgattcggctcgagttcacaaccgaaacagtttccatcactctcacaaaatgacgacaatatcagattgctccctactcttcctcttcgtcttcctctccaccctccacatagcttccaccctctcaacccgcaccaacttcatcaagtcctcctgcagcaccacccagtacccagccctctgcatccagtccctctccgtctacgcgtccaccatccagcaagacccccacgagctcgtccagacagc

SEQ ID NO: 5590 - DNA, 261 bp, Glycine max
  Clone ID: 701097146H1
aaatcagtatattcccttttgttcaattactcttcttccttccttaaacccaatcaaagagaaacaaaatgttcttccacaatccagcacataccacctgacccgaaaacccagtttgtgggtttatactttgattgattgattaattaattattagttagttagttaatcaatggaagagtgtcacacggtgttcggaaagtacgagatggggaggcttctggggaagggcacgtttgccaaagtgtattacgggaagca

SEQ ID NO: 5591 - DNA, 264 bp, Glycine max
  Clone ID: 701097147H1
caaaatggggaaccaatcctcttcaaacaagatagaaactcttcccatcgacacaacatttaagctcccagcaaatataccagtttggccacaaggtggtggatttgctactggaaccatcaacataggagggctaaaattgtttcaaatttcaacattcaacaaagtttggaaaaccttagaaggtggaccaggtgatgcaggggcagctttctttgagccagcaggaatacctgagggcttcttcacactaggccactacag

SEQ ID NO: 5592 - DNA, 269 bp, Glycine max
  Clone ID: 701097148H1
agaaggccgaagaagtatcaaattaacacattctcgatcgagaagaagaagaatgtggacgcggatactcgcacgagcaacacgtgcagttaccgttgccggcaactattcacccattcaccaacgcatctgtgaccctatctttctcaaaatccccaaatcaacttttccccaaattttcaataaccctcgatttttggtcacctccaacctcgacaatgagctctcaccggattcttcagtgaacagcggtgacagacagctcgcag

SEQ ID NO: 5593 - DNA, 261 bp, Glycine max
  Clone ID: 701097150H1
cgaaattcgatttcccccaatttctagggtttcgctgaaaccctaccctgcgattttgcgattcttccttcgaactttacttggttttcagttcccttttaaccatccagatcaccatgtcaagtttggacgagccagttggccttgacaagttgccaagcatgagtaccatagatagactccagaggttctcatccgctgcttgctgtcccagagtagataattttactttgggtctgggaaactgctggattgaaggac

SEQ ID NO: 5594 - DNA, 262 bp, Glycine max
  Clone ID: 701097151H1
tctcaatcgttttctacataatacaaacctctctaatttttgaagcttattatacccaatctcgatatgcagatcttcgtgaaaaccctaactggcaagacgatcaccttggaggtggagtcctctgacaccatcgacaacgtgaaggccaaaatccaagacaaggagggcattcctccggatcaacagcgtttaatcttcgccggaaaacagctcgaagacggcagaaccctcgccgactacaacatccaaaaggagtcca

SEQ ID NO: 5595 - DNA, 255 bp, Glycine max
  Clone ID: 701097152H1
gtctttcttcctttgtaatagaaagcacgcgtttctctctctccctctctcaacgaatatttgtgtacttcctcttttgtgggtagattcaatttaccatgtcgagttcatcggaatactctcaattttccggccagaaaccggcgaggtcgccggagaaatcgagcttctctcagacttgtagcctgttgagtcaatacatcaaggagaagggtacttcggatatcttaccctcggaatgaatcatgtgggcca

SEQ ID NO: 5596 - DNA, 257 bp, Glycine max
  Clone ID: 701097153H1
ctttctggagttctcgccattcatcacccccaccaatctcctcctcctccgtacacatggccacgcttgccgattcttttctcgccgacctcgatgaactctctgataacgaggctgaaattcccgaggataacgatgtggatgccgcagacatggaagaggatgtcgatggcgaccttgccgacctagaaaacctaaactatgatgacttggacagtgtctccaagttgcagaaaacccagaggtacactgatgtt

SEQ ID NO: 5597 - DNA, 226 bp, Glycine max
  Clone ID: 701097154H1
aactttcttaacgcaacaaacacatagccacatcttctctttctcttcccatggcattctgactcatacccaaatcattgattgtttgtctatcgaatcggtgagaaaatggcagtggagctgatggggttcccccaaatgggcgaacagaaggcaattgaagaagcagccgccgaaggcctcaagggcatggaacacctcctctgtctcctctcccatgaacctt

SEQ ID NO: 5598 - DNA, 256 bp, Glycine max
  Clone ID: 701097155H1
gtgcaatctcctttaatacccttttgttctcaaaacttgctggtgaaaatggaggcatacagaaagagccacagagggtccatgagaggaaaatcgttgcctttttatagaaatgcaccaaaaccagcttcctcaaccgccgtgcaatacacagctacagatattaagccaaatcactattcttcttctcctgcctctgtagggttcgtggtccacgaggactatgcaaccacaaagcgaaatctgaaggttcgca

SEQ ID NO: 5599 - DNA, 258 bp, Glycine max
  Clone ID: 701097156H1
tggagccttcagaagaagcttttgacattaactctgtgcctaaggaggtcaagttccagcctcttgcagaaaagaaagcccctggtaaaaagccaactggtttgggtgctcccccaagtggtcccccatcaactgcagatgcatatgagaggatgctttcaaccattccagagtgtgcaaactttgggaagcttttcaagtcctcagcacctgtggagctcactgaagctgagacagaatatgcagttaatgtcatta

SEQ ID NO: 5600 - DNA, 251 bp, Glycine max
  Clone ID: 701097157H1
cgttgcctccctcgttctctcccttttgatatccaatttcatcatcattcgtcggtaagccctaacaatctatctcttcttcttcgcctgatcctaattttctcgggtttcgtttctaatcccctattttattccccttcgtattttctcgattttatcttgttctttcatctccaatctccgtcagatctctcgcgcgttcttcaattttgaattctcggggattcgttttgttttgggtttagggctct

SEQ ID NO: 5601 - DNA, 255 bp, Glycine max
  Clone ID: 701097159H1
gaaccacgcctcagaagaagaagacccagacgataattcccatgccaaaacattctcaacagccaagaagctcacctcccaaacgccgcactgatttctctttcttcacgcgctccccctcctccttctccaaccctacttctggttcctcaccaggttcatcttctggtgaagtgaggttgtccaatgttgcttcaagcagtttgcaggggaggaaaatggtaatgaaacaattttctgaagatataatggttc

SEQ ID NO: 5602 - DNA, 256 bp, Glycine max
  Clone ID: 701097160H1
accccttaagaaagggttctcccatgtaccacatgtaatgataaggcaactgaatcttggcttatagacaaagtaagctcttcagtccttgtattcaagttctcattttccaatgccacagtagtttctgtggatttgctaaaagtatcagaaggaatgttgattccagtgaagccaatcatgacagctatcgctccaaggtaatccataaagcgcggagcattgccagtcaaggtatccacaatggcagccaatg

SEQ ID NO: 5603 - DNA, 258 bp, Glycine max
  Clone ID: 701097161H1
acagaacaagatcttgaaggtcatccgtaagaacttggtcaagaagtgccttgagctcttctttgaaattgcagagaacaaggaggattacaacaagttctatgaggctttctctaagaacttaaagcttggtatccatgaggattcccagaacaagggaaagattgctgaattgctcaggtaccactccaccaagagtggtgatgagctgacaagcctcaaggattatgtgaccaggatgaaggaaggtcagagtga

SEQ ID NO: 5604 - DNA, 261 bp, Glycine max
  Clone ID: 701097162H1
tgcgatttgagtgaaggtaaacctgatgctcacaaagagaagggattgaaggaacaagcagaaaggacgagtggaacaatttttttaaagtgtttttggtataaatattgtagtgcattagatttctattgaggagaaatctccgttttggtagtactgatggtattcttttgggggggcagtatctaagtttgtcccgttagggaatagtatatatgccaccataccatgtctttcgttgtcttttaattttgtaatgaa

SEQ ID NO: 5605 - DNA, 267 bp, Glycine max
  Clone ID: 701097163H1
agatgctgataatccaattccaatagatatgatgattgaggagtatgtagcaacagttgataataatgagatggaacagcaggaagtgaaaagcataattgatatagagaataacctacagttgaggagaatatatggaattgatattgactggcctgaacattcattagatgcagtcccccaaattgttgattccaattcaaagttgcggagagtactaagcagctcagccagaattggatttagcagagctgagagtggtttggt

SEQ ID NO: 5606 - DNA, 268 bp, Glycine max
  Clone ID: 701097164H1
cggtgttgaatcatggatcagaaagtcgatttcagtgctccgcattccatgggaaccactatcatcggcgttacttacaacggcggtgtcgttctcggagccgactctcgaaccagcactggagtgtatgttgccaaccgagcatcggacaaaatcacacagctcactgataatgtttacgtgtgtcgctctggatcggctgctgattctcagattgtctctgactatgtgcgctacttccttcaccaacacacgatacaacttggac

SEQ ID NO: 5607 - DNA, 134 bp, Glycine max
  Clone ID: 701097165H1
cggctctgatgctcggtgtcgccgtcgtttgcctccacggcgcgttccgcgtgccggaggatctgttcctcgaccatcaggagaattctcaggctaccggattcctctgcttcctccgcggccctgcctccgcc

SEQ ID NO: 5608 - DNA, 260 bp, Glycine max
  Clone ID: 701097166H1
tggcaggtttgtcattggagggccgcatggcgatgctggtctcatcggccgcaagatcatcatcgacacctatggaggatggggtgcacatggtggtggtgccttctctgggaaggatcctaccaaggttgataggagtggtgcctacattgtgaggcaagctgcaaagagcattgttgcaaatggacttgctaggagggcaattgtgcaagtttcctatgccattggtgtgcctgagcccttgtctgtgtttgttgaca

SEQ ID NO: 5609 - DNA, 257 bp, Glycine max
  Clone ID: 701097167H1
aaaactttcatctttgtcatccacttaacccaggtgtaaaaatgtcagcagtgaacatgtccactatgagacttccaagagcttccttgtctggaacaacaccagctaggagatcatgtgctcttacaaagagtccatcatctttgaggtctgtgaagaatgtgtctaaagtgtttggattgaaatcatcttcctttagagtgtcagcaatggcggtatataaagtgaagctgattggaccggacggtgaagagaat

SEQ ID NO: 5610 - DNA, 96 bp, Glycine max
  Clone ID: 701097168H1
taccgcctcggctagggttcggaaacgaagaagggttctgttttcttttcgcgatgagggccaagtggaataagaagcgtatgaggagtctgaata

SEQ ID NO: 5611 - DNA, 258 bp, Glycine max
  Clone ID: 701097169H1
cgcgccgattgatatttgggaatcgcagtattcgaaatactactatggatgcaaagagagagggcgacatttccgtcctgctgtacgtgagcggaagtccaaaggctacttgttaattgcaactagtggaggactgaaccaacaaagacatgggataacagatgcagttgttgttgcaagaattcttaatgctacactagttgtacctgagttggatcatcaatctttttggaaagatgacagtgactttgccaatat

SEQ ID NO: 5612 - DNA, 250 bp, Glycine max
  Clone ID: 701097170H1
agagtttctacaaagagttcacatggtgggaatacaagaaggctgcgtacgcgtcaaggctagcggataatagactcggcccttttgagaaatctgctgctgattaaggaggcaaagtgtgtcaaaattctactactcaattttggcacgtgttgttaggccaacttttttatttttgattttttttgggtgtgtgtatctaggttccaaacagttgactttacttgagatatatagaaaatgaataggt

SEQ ID NO: 5613 - DNA, 254 bp, Glycine max
  Clone ID: 701097171H1
gtaggatgttagtggagcaagttgtccgaaatttagtcatcactgagaatggcaattttggatttccggatatctgaggaggacattttcgtaaatgaactttgaaagttaacgtttgtttaacaccatcacacaagggtcaaagtaatgtcttcagacaacgggggtgtatgtgtaattagattaaatctcaataggtgttattataatttgttctttattttataatctatcatcggttctaagtgaaagtc

SEQ ID NO: 5614 - DNA, 255 bp, Glycine max
  Clone ID: 701097172H1
gcaatttagcttgcacatactcaagcattccaccattgtggcaaagccaaggtcattttagactccaccacatgatcatgatcatatgatcaatccccttaattttttcttttttcttttcccttttctttactctgtattgtatcaatgcttgaaaatggggttgttccaaaaatgtcatatatatttggcctgctaatgggtattgtaaatctctgaacttgaagtgatgcacggttttgagatggttttcta

SEQ ID NO: 5615 - DNA, 254 bp, Glycine max
  Clone ID: 701097173H1
cctcgagccgattcggctctagaagccccactcaaccaccacacctcacctcgttcacgctacccctttctgctcttcttctacctttcaagttttaaaagtataaagatggcagagacattcctatttacctcagagtcggtgaacgagggacaccctgacaagctctgcgaccaaatctccgatgctgtcctcgacgcttgcctcgagcaggacccagacagcaaagttgcctgcgaaacatgcaccaaaac

SEQ ID NO: 5616 - DNA, 251 bp, Glycine max
  Clone ID: 701097174H1
ttagattcctctcatctcactctcaacacataccagtagcagaaactagatctagcctaagatggagaagttgcaggaaattgcagcatccttggctgttgattatttgcttccacccttgatgaaagctgtgacctcagtcatggaggttccaaaagatgttgcagagatgaaagacaaacttgatgggattcaagccatcatttctgatgtagataagatggcagcagctgaagaatgcaacttacatg

SEQ ID NO: 5617 - DNA, 251 bp, Glycine max
  Clone ID: 701097175H1
aggaacttgaagacggggagctcggggatgatgctgagaactagttgttctttcctaacctttttgcagttatgagataaagaacttcacctgcatcttttggagaatactgactttatttaagtacatttaattgttaattctctggcctctgggcacatctatgaattttgccctcaaatgtaaagaaatcttttggttctcgttatagttctgacaatttctatgaccgcttaattttataccaagag

SEQ ID NO: 5618 - DNA, 252 bp, Glycine max
  Clone ID: 701097176H1
cggctcgagtgaaggtgtacggtccaacctatggagcccccaagagggtgctggtgtgtctgattgagaaggaaattgagtttgaaacagtacatattgatctcttcaagggagagaataaggaacctgagttcctaaagctgcagccatttggatcacttcctgttattcaagatggtgattatactctctatgaatctcgtgcaataatcagatactttgcagagaagtataaagaccaagggacagact

SEQ ID NO: 5619 - DNA, 255 bp, Glycine max
  Clone ID: 701097177H1
ccggtttttaccggcgcggtgcctgcggaaatcaggttttgtacttcgacgctgtcctacgcgccggcatggccggtccacgtggctttgcgtttggctacaatcatcatcccgttgcggcgagtgagttccacgcgacgacgagcgactcggactcttcctctgttatcgatctaaaccataatgaaggcgaggttaaggggaacggttctagaatcttcgatctggaccttaaccatcctcctccgcatgaga

SEQ ID NO: 5620 - DNA, 258 bp, Glycine max
  Clone ID: 701097178H1
ctttaagaaaattctggaagagacagggaaagtgagggatgagcataccgaggacatttcagtttcccaagctatttcaattgtgctagataagcaccctgatctaaggcaacaaggacttgcccatgaagtgctacaatggtttatatgcagaatggaagcttggtttgctgctgatgcagatatgatttcactgaaaacctgggatcaggaacatgtcctgtctggtggtcatggactcatggtgcaaggatatga

SEQ ID NO: 5621 - DNA, 256 bp, Glycine max
  Clone ID: 701097179H1
cttcaaccctctagatcgaaaggccaattttctttttcttttagttcttgttattatttcgcatcctttttaccttttcaattcttcaaaaattctcgcgactgaattcacgtcagaacacggaaacataaagttcagttttttgcatcgtttttattaaaatttgttggcgaacaaaacagagaaaaaaaaaccaaaaaattgaaatttcttatccgttttggcgaattgaactgcgtgttcaattgggttgttg

SEQ ID NO: 5622 - DNA, 249 bp, Glycine max
  Clone ID: 701097180H1
ctgtgttttcctttcgtttattaaggttgtttctttcgtgcccacatgttctcttctccaaaatcctctcttttatatttcccctttgataatttagggtttggtattgtgatagagacacaataatttttgggaattcttgtgacacgggatagttggagaattttgttttgtattttgcttgtgaattagggttggttgattcttttttacagcattgaagttatctactctctcattaatattttt

SEQ ID NO: 5623 - DNA, 266 bp, Glycine max
  Clone ID: 701097181H1
atataattttatcccaacccaaccacacatacactatattctctctctctctcccccccatttcccgcatacacagagcgatagcaaacctactttagtttctttcgcttttcttccactaacgcaaaaagactcaccagtgctcaccacaccacccctttttcttttgctttgcgtgtttttggattgttgtagatctaaaagataaagatgattcaagaaatgttgggtggtgctagtgctagccacataccaggagaaagaaa

SEQ ID NO: 5624 - DNA, 261 bp, Glycine max
  Clone ID: 701097182H1
tccgctttcacttcttctctctcaccctccaactatgagttactacaaccagcagcagccacccgtcggtgttcctcctccccaaggttacccaccgccggaatcttacggaaaggacgcgtaccctccgccagggtacgctccacatggaggataccctccgcaggcgtatccagcacaggggtaccctccaccctacgcgcctcctcagtacggtcagcctccgccgcaacaacaccagaattcatctggcccgggttg

SEQ ID NO: 5625 - DNA, 255 bp, Glycine max
  Clone ID: 701097183H1
gagaatatgaagaatttaaaattcgcgtcaatggacttgttgcgaaggcacaaaaggttcctgaagaaggatgggtgatgcaagatggtacgccatggcctggaaacaacactagagaccatccaggaatgattcaggttttcttgggccaaagtggaggacttgacaccgaacgtaatgaagttccaggttagtctatgtttctcgtgaaaaacgtccagggttccaacatcacaagaaggctggtgccatgaa

SEQ ID NO: 5626 - DNA, 241 bp, Glycine max
  Clone ID: 701097184H1
tttgggagttaggttctgcacgctctgcttccagcgagtgttctttcttcgtttcaacaccttaatttgcacacgctgcttcttcagcttgagaaatggcacaagaaacctttctattcacatctgaatctgtaaacgagggtcaccccgacaagctgtgcgaccagatctctgatgcagtgctcgatgcgtgccttgaacaggaccctgacagcaaggttgcttgtgggacatgcaccaa

SEQ ID NO: 5627 - DNA, 257 bp, Glycine max
  Clone ID: 701097185H1
cgccattagtgaaccttgaaaccttaacagagtaaacttgcttgcagcgaatccagattcggaggaggagtgagtggtccttgttgctgatttggcaacaacaaataaagatgatagtttgagtttgagtttgtgtgaatccagatctgagtttcatttcgcagttttgcggagaagagaacaatggagtcagcaacggtatcatcatcggagtcggagacggcgcttcctcttcctctggcgtcggagtcacagca

SEQ ID NO: 5628 - DNA, 251 bp, Glycine max
  Clone ID: 701097186H1
attattatagcaggcacctaatagatagatagatagatacgtagggatagggttaaggccatggagcgcatcatctgcgccaagtacaagctaggtcgcaagatcggaagcggatccttcggcgaaatctaccttgcgacgaatattgataccttcgagatcgtcgccgtcaagatctagaacggtaaaacgaagcatccacaattgctttacgaggccaagctctacaatattcttcaaggagggagtgg

SEQ ID NO: 5629 - DNA, 248 bp, Glycine max
  Clone ID: 701097187H1
gattaatgaaaatcccgaggcaggatgggaggctgctataaatcctcgtttctccaattatacagttgaacaatttaagcgccttcttggagtcaaaccaatgcctaagaaggaacttagaagtacacctgctatatctcacccaaagacgttgaaattgccaaagaattttgatgcgaggacagttggtcgcagtgtagcactattggaagaattctagatcagggtcactgtggttcttgttgggc

SEQ ID NO: 5630 - DNA, 241 bp, Glycine max
  Clone ID: 701097188H1
cctcattcttatttctttcctctcttcactttcactctctctctctctctcagccatcatcatgggagcagtgattctcccagatctcggcactgagattttgattccggtctgcggcatcatttgaatagggttcgccctcttccagtgggtcctcgtctccaaggttaatctctcctttggcagagacgcttcccctaacgccgctggcaaaaatggttacaacgattacctcatcgaa

SEQ ID NO: 5631 - DNA, 51 bp, Glycine max
  Clone ID: 701097189H1
atgaggaggaggacaagtccactgtagcattgctcgactgtgttgttgtgc

SEQ ID NO: 5632 - DNA, 251 bp, Glycine max
  Clone ID: 701097190H1
ttgctgttagggacatgcgtcaaactgattatgtgggagtcatcaagaacgttgagaagaaggatcctaccggagtcaaggtcaccaaggctgcccagaagaagaagtgaatcgttcgggctggttcatcaggggatgttggttacaataaatgttggtttcttttctgtactcttgtgtcttcttttctaggtagcttgtctttcggacaaagtttgaagtctccaccatcatctcgcaacttctgttcc

SEQ ID NO: 5633 - DNA, 251 bp, Glycine max
  Clone ID: 701097191H1
atgaggtttgaaggtgaagaggctccagagcagaggtttactggtaccattgttggaatagaagattctgatcccagaaggtggagagattccaaatggagatccctcaaggtgagatgggatgaaacatccaacacccctcggccagagagagtttccccttggaaaatagagcctggtcttgctcccccggctctaaatcctctttcaatgcccaggcctaaaagagctcggtctaatgcagttccttc

SEQ ID NO: 5634 - DNA, 256 bp, Glycine max
  Clone ID: 701097193H1
agcaggtgcgctggccttgatcgttcggcagccaattggggccaaagcagtggtgaatgaggaatcagcagtggctggactaattgggatgatgcgttgtggaacaccgagaggtaaagagaatgtggttgcagcgttgcttgagttgtgccggagtggaggcgcagctgcaacagaaagagttgtgaaggcaccagctttggccggattacttcaaacccttcttttcacagggacaaaacgcgcaagaagaaaa

SEQ ID NO: 5635 - DNA, 257 bp, Glycine max
  Clone ID: 701097194H1
gatttatttaagctccttgattgatcagtcagattctaaaaattaacaccacctccttccaccttaaaagaaatctcatttccatatgagagtgagtttgcatctcatgactctggagaaggtgtatagctctcaggattcgtactaatcaaatatttttaattacatggattcatgcgagaatctcttcagtagccttttgttttcctttgatagacatttgaagtttgaattcacttttgtttagctcatctaaa

SEQ ID NO: 5636 - DNA, 235 bp, Glycine max
  Clone ID: 701097195H1
ctctctctctctctctctctcacattcttgtttcttattatttatatttgtcttttccatgatgggcattgaacagaaactgtagaagcctgtcgaacagtgaattgtaatagtggtaaaatgaaagaatgaatgggtatatatatgtgtgggagtatacatatatagatatagatatggtggtgcagctgtggtgatttggcattttctggtttttgttcggtgcatgtaggta

SEQ ID NO: 5637 - DNA, 268 bp, Glycine max
  Clone ID: 701097196H1
ggtacatgttgttgatggttcatcacagcagccagatctcgagtttgacgcagttcgtctagagctgaagctatttaatcctgaacttgctgagaagccttatgtagttgcttttaacaaaatggatcttccagaagcatatgaaaactgggaatccttcaaagaaaagttgcaatctcgtgggatcacaccattttgtatgagtgctgtcaaaagggaaggtactcatgaagttatctgtgctgcttatgagcttttgcgtaaaaga

SEQ ID NO: 5638 - DNA, 277 bp, Glycine max
  Clone ID: 701097201H1
ctcgagcgctttttctccctgtaattttcctttttaggttttggttatcggtggaggtgatggaggggtcatacgagaagtagcacgccattcttcagttgaaaagatagacatttgtgaaattgacaagatggttgttgatgctccaaacaatacttccctgatgtagctgttgggtatgatgatcctcgtgtgacacttcatattggtgatggagttgcatttttgaaggaagttccagaaggaacttatgatgctgttatagtggattcatccg

SEQ ID NO: 5639 - DNA, 233 bp, Glycine max
  Clone ID: 701097202H1
aaaagcatacatagcgttttttattttgacatacatattatatatagtgcaaatttgaaaggtgaagcctaccaactcatctgtaaaattgtgaaagcaggaaagttgatgttatagtaccttttgtaatcaacttgctcagtattttgaaaatattttcatatgtttggtggagaaatttacggcattttttttgaagataacagaacaatcaaaaaaaaaagggggggccg

SEQ ID NO: 5640 - DNA, 266 bp, Glycine max
  Clone ID: 701097203H1
aaatcatccagagaggatgcaaaaatgtaattagcaagctccaaaggagaatagacaaggaaggccatcaaattgtacctttgctaacagatttgtggaagaggatggagaattctgggcatgcaggtggatctgggacaatctgttggatttacggaagattgaccagcggattgatagaatggattatagcggagtaatggagcttgtgtttgatgtacagttcatgttgaggggtgcaatgcatttctatggatactcatatg

SEQ ID NO: 5641 - DNA, 263 bp, Glycine max
  Clone ID: 701097204H1
cttttcttctttctctttcccctcgaactcaaaaataaggtgcatggacgccggcggcttagattccgatggccgtgaattcaacaccgccgaggacatgtggagggaacaggcgggtgaccctagcaagaagaccagtggtatcgtgacggcgtctcctactgggagggtgttaaggcaaatatggatggggtattgggagggtttgcaaatgtgaacgagcctgacataagttgcagtgaggatttcttgaacattctctt

SEQ ID NO: 5642 - DNA, 116 bp, Glycine max
  Clone ID: 701097205H1
tttcgtttcgttcactgccgtttccctctctctcacactcacactcacactcctcccaaaaacccagaaccctaactctctttcgcacactttctcacgctcgctgcagccatgaa

SEQ ID NO: 5643 - DNA, 257 bp, Glycine max
  Clone ID: 701097206H1
ctttaatgagcctggatcacttgctccaactggattgtatctcggtggcaccaaatatatggtcatccagggtgaacccggtgctgtcattcgagggaagaagggtcctggtggtgttactgtgaagaagacggtgcggccttgatcattggcatttatgatgaaccaatgactccaggtcaatgcaacatggtagttgaaaggcttggtgattatctcattgaacagggtctctaatctttgcttaatgtcttgtt

SEQ ID NO: 5644 - DNA, 229 bp, Glycine max
  Clone ID: 701097207H1
attagaccttgatcggcttcactaacgcagacaatgtcagacaagcctcgtagtggaacccgtttcggtgccgattcggatgccagtgacctgtatgctggtggagacaatgaatatgtgactgagctgaagaagagggcgatgatgatgacaccaagtccaagggcaaagcttcatcatcagaaggcggtgtacgacagaagccgcgtaccttcactgtccaggatgc

SEQ ID NO: 5645 - DNA, 164 bp, Glycine max
  Clone ID: 701097208H1
gagaatgcgggttgtttgttgctccaattcaggcgtgagtgccactcttccatctttcccttgtcccagattccctccactcattgcaatttcttcgatccgctttctaaattccacacccctccgttccttgcttcgccgcgacaagttacaagaatggcttc

SEQ ID NO: 5646 - DNA, 256 bp, Glycine max
  Clone ID: 701097209H1
ctcgagcgcttaaaaatattcagtgaagatcaacctcaatggcatctcttggcgtgcgaccagttcttccccctccattaacttccatctccgacccacctcctcttttcgatggcaccaccaggttgtactcagttattcttgcccctatgcacaacgtgtgtggatcgctaggaactacaaggggctacaagataagatcaatttggtccctattaaccttcaagacaggccagcttggtataaggagaaagtc

SEQ ID NO: 5647 - DNA, 256 bp, Glycine max
  Clone ID: 701097211H1
ccggaaaggcgtgccagcgtcagagagactcatcagttctcactcgtacggcgcttttgctttgctttgcttcatttctttcatcgtcatcataaagttcgttcctttctcagttttcacccatacccagatagtaacagcaccatctcggatctgtgtccctcctttgagtgaaaaaggttcaatctttggtctctggggctgttggggttccgtcattgaagaagaagaagaagaagggtattattgttattat

SEQ ID NO: 5648 - DNA, 257 bp, Glycine max
  Clone ID: 701097212H1
gttggacaagaacaggagaaaggcaagctgcaagaatgagagttaggtaccttaaagcagttctcaggcaagaagtagcatactttgatttgcatgtcacaagcacatcggaggtcatcaccagcgtctctaagatagcctcgtaattcaagattgtcttagtgaaaaggtcccaaactttttgatgaatgcgtccatgtttgttgggagctacatagtggcttttgcattattgtggagattggccattgtggggt

SEQ ID NO: 5649 - DNA, 261 bp, Glycine max
  Clone ID: 701097213H1
tcgacaccgaacaaggctttgttgatgcgcgcagaaacgaacatgatgctgatgagtcccttaaacgacggaaagccccacgcttcgaagcttcaccagctcgacattgaaacggggaagattgttacggagtgaagtttggaaaagacggtgctgacttaacgatgagggatatcaccaatgacaccaaagggtcgcagttggacccttcggagtcaacgtttttggggctggatgataaccggttgtgccagtgggaca

SEQ ID NO: 5650 - DNA, 261 bp, Glycine max
  Clone ID: 701097214H1
ggagcggagaggttttcccacgaccatgctcccttgattctgggtctccagccatccgccctggtcgacaacgttgccaccgtcgattggtccttgctccatcgcattcccggcgagcgcggtggctccatccctgccaaattgaagaactggaatccatactgagagaggttaaatccaaatcccacgatgacatcaaaactctcgctggtggcagcgttgccaacacaattcgcggtctcagtcgcggttttggaattt

SEQ ID NO: 5651 - DNA, 271 bp, Glycine max
  Clone ID: 701097215H1
ggtgaatagccttcatttttatgaactttattctcactctcatcaacaccatcaataaaaatttccttttaagatctgccctttccccttcttcacagtttttatcttattctccaaaatctacaatggtcttacactatcctgattaaagttgattttttttctatctgggtacatgtaaagttgatgtttttattctcaaattgaaccaaacatcaggttttctggaccactttgctgctgaatatagatgtcagctactatactttgc

SEQ ID NO: 5652 - DNA, 289 bp, Glycine max
  Clone ID: 701097216H1
aatcgcatcgcagaagcagtttccggtgcatctcatcgtctccgaaaatgaacgacgcagatgtctcgaagcaaatccagcagatggtgcggttcatccgccaggaagctgaggaaaaggccaacgagatctctgtctccgccgaagaggattcaatatcgagaagctgcagttggtcgaagccgacaagaagaagatcaggcaagaatacgaacgcaaagagcgccaagttgaaattcgcaagaagattgagtactcaatgcagctgaatgcttctcggattaaagtt

SEQ ID NO: 5653 - DNA, 273 bp, Glycine max
  Clone ID: 701097217H1
tctccgtttcgtggtcgtctctcgctagaaatttattacacggtgatgggagattgggaacccatgtcggattgccacggacgaatgcgtgttctgaaggagccgaaggggtattagggtttgttaggggctacgtatctttgccagagctcgcagtaatggcctcgtttccaatttgcctgattttaaatctgttgcagcaaaccctaggattcgccgattgttttgcagcatagctccaaagaagaagaattatgagaacttctatcccaa

SEQ ID NO: 5654 - DNA, 270 bp, Glycine max
  Clone ID: 701097218H1
tgtggaagaggaacgtccaccctcagcctcagcctcaccctctccacctccaccttctgaacctgtgaaagtggacgcaccaccagtacaaccaccacctgatttgttgaatttggaggatcctgttcctgctgctgcgagttggaagagaagaatgcattggctttagccattgtccccgttgctgttgagcaacaaccttctgctgcttcaaatcaagcaaatggaactacaggatgggaattggcacttgttactgctcctagttca

SEQ ID NO: 5655 - DNA, 262 bp, Glycine max
  Clone ID: 701097219H1
cttggcttaaacccctctttgcagacttacactttgcttctcagttgttgtacggaggcacaatcaccgtatgatatgggattttgttgtgagcttatggcagtctctggccatcctgcacatgcatttttacatccatgccagcagcaggacctgatggtcaaaatgtgcgggatcatgtaagcaaattcttagaccttatgcattccgaggatagagagggcaaaagagggcttgtagatgcagtggtggattttcttca

SEQ ID NO: 5656 - DNA, 258 bp, Glycine max
  Clone ID: 701097220H1
ggaacatgatttagaaaactgccaagcccacccatattcattctctcaaaacttccaaccatgaactgaagcaccacacatacccacttcctccaaagacatcatttttattaccaatcttccaatttcagaaaaattctttgtgggcatctcttaattaaaaaaatgtcaagcttccccaacacggtggcggaaggccgcaggtccagcaaggcaccggaaaaatccactttttctcagacttgcagcctcttgagc

SEQ ID NO: 5657 - DNA, 256 bp, Glycine max
  Clone ID: 701097221H1
gatagtgaaagagcttcttcctctaattcgagtgtacaaggatggcagcgtggagcgtcttctaagctctgaaaacgtggcagcctcccctgaagatccccaaactggagtctcatccaaagacatagtctcgcagacaacccctacgtctccgctcgcattttccttcccaaatcccaccacactaacaacaaactccccatcttcctctacttccacggtggcgccttttgcgtcgaatccgccttctcctttt

SEQ ID NO: 5658 - DNA, 254 bp, Glycine max
  Clone ID: 701097222H1
attcgaggcccattacgcgcagtcagaagagttcgaacaaacaataaccaaaaaagctcgtcgcgcggttgctgctgctacaggaactggttcggttatgttatatgaatccggttcggttcaggttcacctcgaaccgattcggaacccggttcgacggttcagaggagactatgggtgaaggaccggtcgaaggactggtgggagaagatcagccggaaggacttcccggaggaggagttccggcggtggtt

SEQ ID NO: 5659 - DNA, 254 bp, Glycine max
  Clone ID: 701097223H1
gagatttcagagcgtgatgaaggtgctctcaagtttcttaaagatatcaagtggagcaggatagaaaatcctaaaggattcaagcttgagttcttctttgataccaatccttacttttcaaataccatctgacaaaaacatatcatatgattgatgaggacgaacctatattggagaaagccattgggacggaaattgaatggtacccgggaaaatgtttgactcagaaggttttgaagaaaaagcctaagaag

SEQ ID NO: 5660 - DNA, 255 bp, Glycine max
  Clone ID: 701097225H1
tctcgagccgaatcggctcgagcggtctcgagcactttccattctcttcaacctaacgcagcatcgctatactcttcattacatggctttgcccaatcagcaaaccgtggattaccctagtttcaaactcgtatcgtcggtgatggtggcacaggaaagacaacctttgtgaaaaggcatctcaccggagaattcgagaagaaatatgagccaaccatcggtgtggaggttcacccattggattttttcacaaac

SEQ ID NO: 5661 - DNA, 171 bp, Glycine max
  Clone ID: 701097226H1
gagagagagacagagacggatttggaactttggatatctatagcgaaagcgtgacaccaccaaaaaccgaactgttcacagatctctctctcactcttccaacaatcgaaatccataaccctaccgacacacactcaatcgaaattcttcattctcttctcatcgatgggg

SEQ ID NO: 5662 - DNA, 256 bp, Glycine max
  Clone ID: 701097227H1
agagaaaccaagtaatactagccaaaatatgtctcccaaatacatgtcccttttcctcctagtaatactagggatggcttttctggccactacttcccttgctgatcgtcgttttctttcggtggaagatgtcatgatcaccatcaccaccacccaccaaaaaaacactggcctccaaccacacaaaatgaaccttcaaacgtagaaaacaaggagaacactgaggtggaggatggtcatgatcatcaccatcact

SEQ ID NO: 5663 - DNA, 258 bp, Glycine max
  Clone ID: 701097228H1
gagaagaagaaacttaatcgatcatcacttcacttcactaatacatcatggcagacgagacccagaacaagtatgagagctctgaggttgaggtccaggatcgtggtgtttttgactttctcggtaagaaaaggatgaagaagacaagcctcatcctcaggaggaggtcatcgccaccgagtttcaaaaagtcactgtctcagaccaaggagagaacaagcacagcctcttagaaaagcttcaccgatctgacagcag

SEQ ID NO: 5664 - DNA, 221 bp, Glycine max
  Clone ID: 701097229H1
gttgaggcagagagagcgtaatcataaagtccgtccgaaacaaaaagtcgctccctccctcccaccatgcttcactcccgaaacggctcataattcataaacaacgtttcatcattaatacggtgccgtttcgagatgttcaataacatagagccacgtggttggcgacaagctaagacatgactacgcggtttcgctgttatctttgttccacacaacat

SEQ ID NO: 5665 - DNA, 264 bp, Glycine max
  Clone ID: 701097230H1
tcctcactcacaatcacaatgatggaggaccaccctctctctgcgcccaaagacgaaatggaaaacctcgtactccacgacggcgcggacgacaacggcaacggcaacgatggcgccggtgcaaaatcaccgttctctccaattaccgcagcgccatgtccacgctctccgaatctcaccaccaccctctctctccaccgatcctcgccactcccgccgactccgatcccctcctctccccaaaccctggctcccccgactcct

SEQ ID NO: 5666 - DNA, 217 bp, Glycine max
  Clone ID: 701097231H1
cttatcttcttatgacactttgagagttcaagttttctttttccccaaacccaaagattttaggttacagaaaatggcattggaactcatggggttcccaaaactagacgaacaaaaggccattcaagaggccgaatcagaaggctcaaaggcatggagcacttgattcgaactctctccaaccaaccctctacattaaaacacgaactcaccgatg

SEQ ID NO: 5667 - DNA, 285 bp, Glycine max
  Clone ID: 701097232H1
cggctcgagataaattccaagaccaagagtggagagaaggtaggaaaagaagccatggaccataaggtgcagaaactgcaaaagaaactatatgaacctgctgggacgagtaattccaaatttctgtgtgaagtctgtaatgtctattcccttgcgagattgctttggcctcacacaaaaatgggaagaagcatttggctaaaattagaacttcaatctgaagtgtatatttgtaacaggtatacgagtttacattgaaatttggtaggaagtttggacatagag

SEQ ID NO: 5668 - DNA, 86 bp, Glycine max
  Clone ID: 701097233H1
ctgatccacaaatgtcaattttgtgcatgctcatcactgtttcacttcttggggtgttctttttcacaattttaaatttgttgggg

SEQ ID NO: 5669 - DNA, 269 bp, Glycine max
  Clone ID: 701097234H1
aaaacatggggtggtttttcctttgaatgtttcacacagtggaagtctcttctcaatttggccattccaagctgtgtttcagtgtgcttggagtggtggtggtatgagatcatgattttgttgtgtggtttgttggtaaccccaaggctactgtggcttcaatggggattttgattcaaaccacttctttgctttacattttcccttcttcattgagcttcagtgtgtcaacaagagttggcaacaagcttggtgcacagaagccctca

SEQ ID NO: 5670 - DNA, 263 bp, Glycine max
  Clone ID: 701097235H1
gcgacgcaccagatcgccgagtcgtggatccacgcgtcgcggaaggttctagagaggatcgcagacgcggtgctctccagaaccttcgagaaggcggctgaggactgctacgccgtggaaaggatctggaagctctcgcggaggtggaggacctccacctgatgatggatccggacgatctcttgagactgaagaatcagctctcggtgaaatcctccggcggcgaaacggcttcgttctgcttcaggtcgaaggagttggtt

SEQ ID NO: 5671 - DNA, 257 bp, Glycine max
  Clone ID: 701097236H1
ctgatacaaagagtagaaaatcatgtctttatgccatcttcccagcagcttctttaatttgtgctgttttatttttcatgacctcgtccttcacacacgagccgaaactaccaggcttgaaaatggatacacagtggacgcagatcagaatgtaatagtggacacagtaattgataaatgcaagaaccagtgcaggcctaatggaagtgaagcattacctgcaggcatagtctccaccacttccagtttggaattgc

SEQ ID NO: 5672 - DNA, 254 bp, Glycine max
  Clone ID: 701097237H1
atcctatcgtagcaaagaaagaaagaaagaaaaccctagcttaccttttcaactttcaagatgcaaatcttcgttaagacactcactggtaagacaatcacccttgaggtggagagttcagataccatagtaatgtaaagtccaagattcaagacaaggaagggatcccaccagaccagcaacgtctcatttttgctggcaagcagcttgaggatggacgtacacttgctgattacaacatccaaaaggagtcc

SEQ ID NO: 5673 - DNA, 253 bp, Glycine max
  Clone ID: 701097238H1
caaaaaactctatttgattccaccgaaaccctaaccccctttcgacgaacgaagggcaatcagttgctcgctccttggatccattcttgaaattctcgttatcgctcttcgaactcaagctctctcgctacgatttctgcttctgcaccaatttctgcggtttctcaagatttagaggttctaagtggttcatttctttgaagcatgccggggttaacgtgcacgcttgcaacaccgaattcaaagatgatac

SEQ ID NO: 5674 - DNA, 252 bp, Glycine max
  Clone ID: 701097239H1
gaaaaacaaaagagtagtggcctttaggtggtgaagaacaagagctcaaatcaaatcgaatcgaaaaaagaaagaaagatcatattcatggcgatggcaagcctggctcgacggaagggttacgccgtgttttgtcgtcgaggtcgtcgttttgtctgacaagctggaggggattcgcgtccggatctgacgaaaacgacgtcgtcgtcatcggcggcggtcccggcggctacgtggccgccatcaaagccg

SEQ ID NO: 5675 - DNA, 252 bp, Glycine max
  Clone ID: 701097241H1
cttgctttagccatcactaacactcagtctctgaattggggctgagggtttcgagtaacgtttatttttcacgagtttaagatatcatgggtaaagagaaggttcacattaacattgtggtcattggcatgttgactctgggaagtcaaccaccactggccacttgatttacaagcttggaggtattgacaagcgtgttattgagaggtttgagaaagaagctgctgagatgaacaagaggtcattcaaata

SEQ ID NO: 5676 - DNA, 176 bp, Glycine max
  Clone ID: 701097242H1
cctcgagccgacttcggctcgaggtcgttttcagcgcgcatcactctttctttcgctttctctctcttcctcgtacgcttcactccccgaaatggagcagtctctgctgagacgcgaaagagtgaccagataaccggtcgcggggaatattccggcgctccgatgctatcacctac

SEQ ID NO: 5677 - DNA, 253 bp, Glycine max
  Clone ID: 701097243H1
taatgagttagttgacatatattcctttgggatgtgcatattagagatggtcacatttgaatatccttatagtgaatgtactcatccggctcaaatctacaagaaagttatttctgggaaaaagccagtgctttgtatagagtgaaggatccagaagtgcgacaatttgttgaaaaatgcttggtcacagtgtctctaaggctttctgcaagagagcttctaaatgatccatttcttcaaattgatgattatg

SEQ ID NO: 5678 - DNA, 245 bp, Glycine max
  Clone ID: 701097244H1
ctcggaaaatttttcagagcttcctaaagcctttagaattctctggaacctttttgttcgtccgccgaggatcgcaattcctccaaatcgtcgtcactcgtcgcttagttcggttctaactgcatgaacggttcgggaagctggattcatcatcgtcgaacttgaacttcaatcacttcgttacttgtctgttgatttttatcctccatttttcgcctcaatcgctctcttccaccttcgatagt

SEQ ID NO: 5679 - DNA, 257 bp, Glycine max
  Clone ID: 701097245H1
caatcttctgagagtgtttggttgaaagtagcaaagatgtttcctttcgggcaaaagggtcaaaagataaaggggactatggtggttatgcagaagaatgtgttggatatcaacagcatcaccagtgttgggggatcgttgaccaaggcttaggcttcataggcagtgcagtcgatgcacttacttttgcagccaccaaaatctccatccagttgattagtgctaccaaggctgatggtgggaaaggaagaattgga

SEQ ID NO: 5680 - DNA, 262 bp, Glycine max
  Clone ID: 701097246H1
ctcttctctctctcgccgtctagcaattttctattttctcctctcatggcttcagattccaaaaaggatttccctgctgatgacaaagctggaacagaagagagtaaaacatccaaagatgagacttcatctaagattctccagcagaacaaagagcgacactacttttggacctagacctggacctgctgggcatccaggcaacccttttgatctctcagcaatgtctggtctgctcaatgatccaagtatcaaggaattg

SEQ ID NO: 5681 - DNA, 129 bp, Glycine max
  Clone ID: 701097247H1
cgactgtgcgtgtttctctgcatgggaggcaacagcaccacttggatgaacactgccgttttggcaacatgcattcggaacttccgttcaaacagaggacccgtttcggggattctgaaaggctttgta

SEQ ID NO: 5682 - DNA, 268 bp, Glycine max
  Clone ID: 701097248H1
agaactcttggattcagcccttactgggaaatctagaaaccttggaagtaatagattgttctagtttaaaagacttggtaccatctacagtgtctttttccaatctgacacatttgcaagtacaagattgcgacagcctgccatattgttcacatcctccacagcaagaagtttgggtcaactcaaaacaatggagataagttactggtattcattgaagaggtagtagtctctaaaggaggggatgatcacatgaggaggagatata

SEQ ID NO: 5683 - DNA, 271 bp, Glycine max
  Clone ID: 701097249H1
taaaccctaattctccttgtttccattgctgcttcattgttttttaagcaattccgagcattgatcaaatgggttttggttcacttccaattttctgaaacagcgtactctcaaaaaaaatatctgatcacattttctcttctgcaaattctgcatttttttccctctctttctttctggggtgtctgcagaacaagggaatctcacagattccttgtgtttctctttggtttccggtctcaaaatatcagcttttggatttttagtgttg

SEQ ID NO: 5684 - DNA, 266 bp, Glycine max
  Clone ID: 701097250H1
tgcctcctttgactttgtggctggtgctgccttttctcgtgttgctagcggcggcaacaacgtctccaacacgcgccacgacggtcgcctcgtcgttccacggtcaacgagagtttgactatttcgctttcgcgtgcaatggcccggtacttactgcaaacgcacccgcagttgctgccccaccaacggttgctgcagaggctccaattttccaacagtgttcaccatacatggactctggcctgactataatgatggaacctggc

SEQ ID NO: 5685 - DNA, 253 bp, Glycine max
  Clone ID: 701097253H1
cttttctttccttccattgaatttggatggctggcggcggaggtggggaccggccgccgtggaaggaggcggcgccgccacgacccaccatcactctgccgccgcggtcgggttccatggagaccctttcaatggagggttcagccctggtcccatgactctgctttctggctttttgggtgatggggatgatggaaagtccttctctcagctcctcgccggagctatggcttctccggtggccggagctgtc

SEQ ID NO: 5686 - DNA, 250 bp, Glycine max
  Clone ID: 701097254H1
ttttaatcctgcaaagatggaatcttgtgcgcaattcgggttgtgggtggtcttgatcttgtgcttggcgtttcaaattcaacccaattatgggttctaccttccgggcagttacccccacaactatatgtcacggatgagttgtgggtgaaggtgaattccctcacttccattgacacagaaatgccctttagctattacagcctgcccttttgcaagcccgacggtggcatcaaggacagtgccgaga

SEQ ID NO: 5687 - DNA, 252 bp, Glycine max
  Clone ID: 701097255H1
caccaaaacaatttgctcacaaaggaggaaaaatggcacctttcgtttccctctctttgttgcttctctttctcaaccaccccctcctttccctctcaaccaaccctgaagggaacgctctgcatgcttgagaagcaggctttctgatcccaacaatatgttgcagagttgggacccaacactggttaatccctgtacttggtttcatgttacctgtgactccaacaatcatgtgattcgcttagacttggg

SEQ ID NO: 5688 - DNA, 250 bp, Glycine max
  Clone ID: 701097256H1
tgatcactggatcttctgggtgggacctttcattggtgctgcacttgcagcactctaccaccaggtcgttttcagggccattcccttcaagtccaagtgattcaatcaaaccgttcatgcttaatcagttgggaacaacaaaaaaaatcaaaacaatgtttctgggtttcggtttcatttcatcaagatgatctgtttatctttttttttttaattttaatttaaagtctttgtattttgtatgtaaaga

SEQ ID NO: 5689 - DNA, 251 bp, Glycine max
  Clone ID: 701097257H1
agatgaccttgttcatggactcaaagccttctccttaaccactgagagccttggttgtgttcaaagctctatatttaggagcatccatggaaatatgatcatatggtatggagcatggcagaggcggcgagtaaggaaaaagaggagctgacctcaacccttaaatcaatgctgaccagcatatcaagcatggcagtgttaattgaacacagtttccttgaagcatacggtggagaatcaagagatggctc

SEQ ID NO: 5690 - DNA, 245 bp, Glycine max
  Clone ID: 701097258H1
cacaagccaagtgaaagtgagaaaaaataagaaccaaagagcataatgtcagggatcattcacaagattggggacacccttcatgtgggagggcacaagaaggaggaggagcataagggtgagcaccagctggagaatacaaaggggagcaccatggtgaacacagtagtgagtacaaaggagagcatcatggtgaacacaaagctggagagtaccatggtgagcacaagccagagcacaaagag

SEQ ID NO: 5691 - DNA, 253 bp, Glycine max
  Clone ID: 701097259H1
gttttacagtttgcctcgctgactttgagggagtttctgccatctttctaggactggaggatttggttttatgatattatcaaaggcacaatgcagaagtgtttgatgtgtgatattgtatttcacttaacactgtctgatataaaaagaaatatcttttgtttgtaatcatcatcctcgaattgcatgaaatcagtaacttagggatagacaactcaatttgaagtagcagaaataagacgattttgtttca

SEQ ID NO: 5692 - DNA, 255 bp, Glycine max
  Clone ID: 701097260H1
atgagttttgcaggttttctttctcttcaatcaatgtctgctacctgcggcttcttcttcttctccttcacccttctcttctccttcttctccttcctcgtcttcatctccaggatgaagccctggtgtactgcgatctttgcaagagctacttgacggtgagttggctgaaaaagttccccaatctctgcgactggtacactcatctcttgcgtaaatccccaaccggcaccatccacgttcacgtgctgggga

SEQ ID NO: 5693 - DNA, 257 bp, Glycine max
  Clone ID: 701097261H1
tttttgaatactttgagcatgagacaccttataatcgtgaaccattggcaaataagatttctgatcttgaacggcaatttccagagttgaaaacatactggagctgtgatctttcccctgcaagttgggttcatttgcttggtacccaatatacagaatacctactggtccaacattacaaagcttgagtgcctgcttcttgacctttcattccctgtcaacaactttgcagagttcaaatactgatgggctacata

SEQ ID NO: 5694 - DNA, 114 bp, Glycine max
  Clone ID: 701097262H1
agatgatccctctagaagagcagtattataataatctatgtctttattctagttacttcgttctctatttctatttaatagaatctttaggaaaagcataaaatttctgtcatg

SEQ ID NO: 5695 - DNA, 278 bp, Glycine max
  Clone ID: 701097263H1
tctcgccgtcgcagatctcgccgcagatctgaacaacaatggacggttacgacggcaccgtcaggctcggtgccatcaacctcaagcacgatcgcgccgccgatttcgactccgccaccggcgcccccgacgtctccgtctccctccggtcacgcgccagatagccgctgccgccaaacaattcatcgagaatcactatagaaactatctccaaggattgcaggatcgcaaagacagacgcagagcacttcagaggaaagtgcaagaatctcaggtat

SEQ ID NO: 5696 - DNA, 283 bp, Glycine max
  Clone ID: 701097264H1
cctcgagccgctcgagccgctcgagcggtcgagtttcttctttcacttctaaaacctcaaaccgcaacactccacaacacaataccagtttcatattcgtaacgtaacttgtctctcccttcttcctctcctctctccgtttcccgattctgccctcacttcacccaattccaattccccacacccccagctaggggaattagggtttcgccgccccattcatcgatgcgccaccaccaccgtcgctagggtttgctgcgatggcggaattggaagaggagcg

SEQ ID NO: 5697 - DNA, 271 bp, Glycine max
  Clone ID: 701097265H1
cctctttctaaagttttgcttctttctttcttactttctctcactcaccaaatagttttctcacaaaggaggaagaatggcatctttcatttcactctctttgttgcttctctttctcaattaccccttcctttcccctcaaccaaccctgaagggaacgctctgcatgctttgagaagcaggatttctgatcccaacaatgtgttgcagagttgggacccaacactggttaatccctgtacttggttccatgttacttgtgactccaaca

SEQ ID NO: 5698 - DNA, 267 bp, Glycine max
  Clone ID: 701097266H1
gttgaacaagacacagcagtgcctggcgaagaagagaaagaaaacaatcatgagcttcattctgtttccgattctctttgcatttacctttctgtcctcgcccgttctctctgcttcggatctggtcctcgccaagttgaccgtcgcattgatctgacttcacagattgtgcgcatcactacttcactaaaggtgcagaatacgggatctgatgttgtgtctgagattttgctgtcctttcctgagaaccaggcttgactatcagac

SEQ ID NO: 5699 - DNA, 260 bp, Glycine max
  Clone ID: 701097267H1
gcagaagcctatttggatgaggaagcctgaggagatcacaaaagaggagtattctgctttctacaagagtcttaccaatgactgggaagagcatttggctgtcaagcacttctctgttgagggtcagttgggtttaaggctatactctttgttcccaagagggcaccttttgacctctttgacacaaggaagaagcctaacaacattaagctctatgtccgccgtgtctttattatggacaactgtgaggagttgattcc

SEQ ID NO: 5700 - DNA, 254 bp, Glycine max
  Clone ID: 701097268H1
tgcttctttacttattctatagacagtgctttgtgttgttagtgagttcagtttccatggatcgtacgcttgttatgtcttcacctaatgtctgttcaaacactaatggtggaaatctcatgcgcaggaacattccaccatggccaacaatatatactatccaacttcttgcgtatcaaaagcttcacaatgccataggacaactcaaatagaatgcaatcttttgaggtcacaacagtcaattttgaatcatc

SEQ ID NO: 5701 - DNA, 251 bp, Glycine max
  Clone ID: 701097269H1
cagaaattgttgtccctgactggcgtgggcgtctgtgtatgaatgtgtttgtgagaaaatggaagctgcgatgggactgatgcggaggattcctccgaaacacacagaaacagctctgtcagcgctctgagccttatgcctgacaactcctccgatctcctctctcaagtcgatcagcccctccaggttctgtgcgatgtggaatgcggcaaggagttcattttgtgcgaatacaatagagatgccgactc

SEQ ID NO: 5702 - DNA, 249 bp, Glycine max
  Clone ID: 701097270H1
gtgcaggcatataggaggactgctcatattcgccgtgttggcggcgatgagcaccacctcggaactcttgaatttgctcagatcgtccacggcgctcgggttgtctacgaccacggcggtggagataacgggtctaacagtgacgccttcccggtaatgtcttattacatttatttttaagttcattgtttcgcataataatagtgagtagtgattattgttgcaaaaaaagaggctatagtagtgcga

SEQ ID NO: 5703 - DNA, 248 bp, Glycine max
  Clone ID: 701097271H1
tttgctgtatactacaaaacatcatctttgttccagcgaaacaaagctcttgtaaaggagttaagcacacccccgcctggagctactgatttgtatttccccactaagtattctcaatccacattgggcaatttaaatcctgtttttggaagcaatggctgacatactggaggagtccagattataatcttgtcagatattttttcacattggcttgtgccctcatgatagggacagtattttggaga

SEQ ID NO: 5704 - DNA, 249 bp, Glycine max
  Clone ID: 701097272H1
actttctccgcgtcgtttcgcaaccgactgcatcttggatacgggaacagtgtgccaatatgagctctccggcaggcaagggacctgctatcagaagttaccggcggagaaagacagctttggacctgaccttaaccgtttaccggctggtgagaatcgtgagcaggagggaccttcaactcaggcggtgcctcaagaaattcaacttgaacagcagccacaggttactcaacctccgatgattgacgt

SEQ ID NO: 5705 - DNA, 255 bp, Glycine max
  Clone ID: 701097273H1
cgagggccatagggatgccagtcatagctccagtattggtagagaatcattgagaagcttggatgatgactgggatgatgaaaaggcaagtcccatgactcccatccacatgggggctgctaacagtaatacagcattgaagaggttgaatctgatgacaatgtcgaagcaatggaatctgatgacaatgttcaagcaatggagtctgatgacaaagtccaagcaatggaatccgatgacaatgtccaagcagca

SEQ ID NO: 5706 - DNA, 250 bp, Glycine max
  Clone ID: 701097275H1
tgaagattccgcaacagagagtagaaaagatggcgcggttgatcacagtggtgtggtgcgcggtggcggtgctactgtgcgccgcggcgggcgcgtcgtgggtggaggaggcggcgaacccgatacaatggtggcgggggtggaggcggaggtggttcgggtgatagggcagtgcttgcgcgcgctgaagtttgctaggttcatgagcaggttcgggaagagttaccgaagcgaggaagagatgagggag

SEQ ID NO: 5707 - DNA, 253 bp, Glycine max
  Clone ID: 701097276H1
gagatcctttggctcctatgctatttaatatagtggcagagggccttaccggcatgatgagagaggctgtcaataaaaacctttacagaagtttcttgagtgggaagcaaaatgagcctataaacatttgcaatatgctgacgacacggtcttcgttggagaggcctcttgggataatattcttgtgttgaaatccatgcttagaggatttgaaatggtctcgggtttgagaatcaactatgcaaaaagccaa

SEQ ID NO: 5708 - DNA, 258 bp, Glycine max
  Clone ID: 701097277H1
gtcccaaagagctaacaagagattcaagaccggcatggctaatgaagaggaacagaaaaaccacctcttcggcatcaaagatctcggtcacaagactctccttcagagtgatgcactctatcagtatatattgaaaccagtgtctatccaagagagcacgagtgcttgaaagagatacgcaagatgactgcaaaacacccactgaacatcatggcaacaccagctgacgaaggacaacttctgagcatgcttgttaag

SEQ ID NO: 5709 - DNA, 260 bp, Glycine max
  Clone ID: 701097278H1
gaacagtgttcaacctgtactctcaggagtggctataggagcagggtggcaaagcattgtagcatatgtgaatatggggtgttattatgccataggtattcctgtaggtattgtacttggtaacgttctggtttgcaagtcaagggaatctggattggaatgttgtttggaacgttgattcaaactatagtgctaattgtaatcacctacaaaactaattgggacgagcaggttaccattgctcagaagcgtattagcag

SEQ ID NO: 5710 - DNA, 199 bp, Glycine max
  Clone ID: 701097279H1
gcctcggctagggttcggaaacgaagaagggttctgttttcttttcgcgatgagggccaagtggaagaagaagcgtatgaggaggctgaagaggaagcgccgaaagatgagacagagatccaagtagtgcgttaaaccagtttgtttccgttgcttttacaattgcttatgttgtaaaataggacacccagttgttagt

SEQ ID NO: 5711 - DNA, 279 bp, Glycine max
  Clone ID: 701097280H1
tgagaaggctcagagatgtgtgaaggctgtgaaggagttcatgcgtctgatgggggtgttcacggtggcagatgctattcctttcttgagatggtttgattttggtggctatgagaaggccatgaaggaaactgccaaggatttgatgagatttttggtgagtggttagaggagcacaaacaaaatagggcttttggtgagaacaacgttgatggaattcaagacttcatggacgtcatgctttccttgtttgatggaaaaacaattgatgggatagat

SEQ ID NO: 5712 - DNA, 267 bp, Glycine max
  Clone ID: 701097281H1
ggaagatacagatagggtcaacaacggactagcttatctcaaactccagattcttctctaaatcttcctatccaattatatatagggataaaattattgcaaagtattttttttcctttttcttttgtgatttgcttaatttaaatcattttcagatttaaaccatcgacttttcagatatatctctatatgtgatcagaattctcagatgcagtattatgagagaataaacttgtaccaattgggtagatttgtgacgatgatgag

SEQ ID NO: 5713 - DNA, 266 bp, Glycine max
  Clone ID: 701097282H1
cgagcgaagcacgtgtacttcccttctaattctcaagaacctggtgtggtcttcaatgctgtgggacaagtgacaggactgctttctgaatgcgagtatgtcacagtagaaaagctgactgaaactgaaaaggcattatccctcatcacctattactttccttactctttccttccttctcttctctttaataattagcaatatgattttccaccatcaggctgatgctcaaaactcagttactgctgcattaagacaaggggaga

SEQ ID NO: 5714 - DNA, 109 bp, Glycine max
  Clone ID: 701097283H1
cagctcgagccgctctattgcttcaatttctaactcaggggcttctagttttacttgcctgaagcgttttacaacttcaattttgctcaagttcatccaaacacgactt

SEQ ID NO: 5715 - DNA, 253 bp, Glycine max
  Clone ID: 701097284H1
atccttgaggaaagtgattgctgaatatggtgaaggagtggttaagctaggaggaaggatactcaagatgatgtcaataaaccttggtttgaaagaagatttccttctcaatgcatttgggggagaagtgaggttggtgcatgcctaagggtgaatttctatccaaagtgccctcaacctgacctcacttttggactctcccctcactcagatcctggtggcatgaccattcttctccctgatgattttgtgt

SEQ ID NO: 5716 - DNA, 252 bp, Glycine max
  Clone ID: 701097285H1
ctagccctcgccctaaaaccaaaatctcgttgcagtgttttcgcctttcctctcacaccaatggccgactctgtaatttcgattcagtacctcaaagatttcgttaattctcaaatctatgacgatagaaatgggccttcaatgcgaaattgctgcgtgctgctggattgttcgcaggatcaatactacttatgcgaaactatggtgaccttatggcaatctgaaagtagaagaactagttgtctgtcatga

SEQ ID NO: 5717 - DNA, 250 bp, Glycine max
  Clone ID: 701097286H1
agtagccctccaccctcccggttgaagaggttcaatgataaagaccaaatggagtacactgaaatattgaagatgcgcggccttcctttccaagtgacaaaatctcaaattgttgaattctttaagatttcaagctgatagaagatagggtacacattgcgtgtcgtcctgatgggaaagctactggagaggcatatgtggagtttgtttctgcggaggaggctaagagggcaatgtccaaggataaaat

SEQ ID NO: 5718 - DNA, 248 bp, Glycine max
  Clone ID: 701097287H1
caacattttcgaagggttcgaaaccatagaaaaatacgtaggggatcgctacaatagctggaagcatgcgtacattggtattattggagcattggctggcattgctgtctttttggaagctttccatggatcatagtcttcaagaggaggaagtcagagaacaagattccacacggagcaaatggtgctaatgggtatggttctaggccacaacaggtgtaggatacgatgtgtagccagataaatat

SEQ ID NO: 5719 - DNA, 247 bp, Glycine max
  Clone ID: 701097288H1
caaccagcctggtgtgcttatccaggtctttgagggtgaaagagcaaggaccagagataacaatttgttgggcaaatttgagctatctggcattcctcctgcacccaggggtgttcctcagattcagtgtgctttgacattgatgccaatggtatcttgaatgtctctgccgaagataaaaccactggccagaaaaataagatcactatcaccaatgacaagggtagattgtcaaagggagatattg

SEQ ID NO: 5720 - DNA, 246 bp, Glycine max
  Clone ID: 701097289H1
gtgtggtccttgtaaggtgattgcaccacattattgcgagttgtccgtgaaatacccgtctatcatgttcttattagtcgatgtggatgaactagctgacttcagcacttcgtgggacatcaagccacaccaactttcttctttcttaaagatggaaaagaagttgacaaacttgtaggagccaacaagccagagctggagaagaagattgttgtggttaatgatgtagtgcctcataagcaatag

SEQ ID NO: 5721 - DNA, 249 bp, Glycine max
  Clone ID: 701097290H1
gtaaagtattgggttacattgaatgagccctggagttacagccaaaatggctatgcaaatgggcgaatggcacctggtcgttgttctgcttggatgaatctgaattgcactggaggtgattcttaacggagccttatttggttacacatcaccaacttcttgctcatgcaacagctgttcgtgtgtacaagaccaagtatcaggcatctcaaagtggtgtgataggcataaccttggtagctaattggt

SEQ ID NO: 5722 - DNA, 251 bp, Glycine max
  Clone ID: 701097291H1
attcccatgacaggtgtctgtttgccttgttcctgatttaagccataatagccacacagagagagagagagagagaaacaaggcatgagaaaatgaatgatctccatcatcattcccttccccatggatgtgccacccctctctctagggttttcaattccaatttcaatccaacccaacacagagctcccacctttcccattcattcgcacaattcccttcgccctgttccttttcaggcaaaagggtct

SEQ ID NO: 5723 - DNA, 254 bp, Glycine max
  Clone ID: 701097292H1
cggcagcgaggttctccactggggcgacaccaacatgatccgcggcctcgtccctgccatgagaacccttcactcagccctcctagccgagggcataaccgacattaaggtaaccactgctcactcttggcgataatgcggtcatcgataccaccaagtatgggcaggttcaggcccgggtacgcaaagcacgtgttgggcccaatgctgaagtttctgagggagacgagaacacccttgatggtgaacccgta

SEQ ID NO: 5724 - DNA, 256 bp, Glycine max
  Clone ID: 701097293H1
tttccattttacacaacacaacccacactcctgtctcttcaatcgtttgagtttgagtttgaatttgatttggacgaggttggaggtttgcaatttccttcggttgtgacctgtgaatccgattgtatctgaattagggtttaagctttacacacagagatgggtagcccctcgaagaagaacgaaagtaaggggtttttcgccgccgtgtcttccatgtttaccagcgctgtcaaccgatcggtcaacgggctta

SEQ ID NO: 5725 - DNA, 264 bp, Glycine max
  Clone ID: 701097294H1
cgcgcgccgcaccccgccgcgctcgaagaaatccgtcgacatcagcgcacgcgcgcgccagctccagacgcggcgcctctggacctacgcgctcaccttcggtggcctcgccggctttgtcgtgatcgttctcacaacttccaagaccagctcgtcttctacgtcaccccaaccgaagccctcgaaaaatacgccaacaatccaacaaaagcgcggtttcggctgggcggtcttgtcctggaaggcagcgtggtgtacccggcg

SEQ ID NO: 5726 - DNA, 274 bp, Glycine max
  Clone ID: 701097295H1
cacttttgctagcattgtccataaacaagctggaccactctctggtcaagatcaaaccatacagcttctctctgaatctaaaccgtctagggaggatggaaacatctttaaccagaaggcctctaacaattcaagccacattagtgatggtggaaggcccagcagtgctagtgtatttgttggtgggtttctcttgggaggattaatagttggcactcttggttgtgtgtatgcacctcaggtagtatttgttactgaaatgtactttttcaag

SEQ ID NO: 5727 - DNA, 280 bp, Glycine max
  Clone ID: 701097296H1
attaatgaatcagttccatttgaatacgtaactagccagatattcccctgtataatcctctaattactaactaccaccaccaccaccactctcccacttcaaaattcatgtctccctcttccctccacgcgctcctcatcattccttcctaggttccgcacacgcgctcaagctccccttccgagtcaacgatgttctccccgttctcccccacggaatctcctggccgctcctcaacaacctccacagcgccgtcgacttgctcccttccttcgtcgcc

SEQ ID NO: 5728 - DNA, 273 bp, Glycine max
  Clone ID: 701097301H1
tgctgcttctggcagaggtggaggccgtgggtttgaccatgactcccagaggaatgataggggtcggagcccagacaagggatctagttggagtgatcgcttcaaaagcgtcaaccgggatcgcagtcgtagtcctaacagggctgcactacctcaactttcccaagtggaagctttcacaaggcaatgatggaacgtggtggtggtggtggtgatcgcaataagagctttaaccgggaccgaagccgcagtcctagccctcatagacagaga

SEQ ID NO: 5729 - DNA, 262 bp, Glycine max
  Clone ID: 701097302H1
caatagcttttgcttctttctgtatatggaaggcacttaaactttctttctatctctctctctgcttcactttctcacttatgcatgttcttgtgaaatcctaattcctcagaaccaaaatcggattcctactgactctgatccctcaaagcttcaaattcaccttgtttggtttgtctgtgtgtttggagtatgatgtcgccgccggcggtggtacacgtgagagaaggggcggagaaacgtgtcgtcgcacgtggcgtcc

SEQ ID NO: 5730 - DNA, 263 bp, Glycine max
  Clone ID: 701097303H1
caacagcacaaagcgggttactgtatgttcaagctaacatctctctctctctatcttagtgcctccttgccagaagttaaaatggcccaagaacactttcctattcacatctgaatcagtgaacgaggggcaccctgacaagctctgtgaccagatctccgatgctgtgctcgatgcatgcttggagcaggaccctgacagcaaggttgcctgtgaaacctgcaccaagaccaacatggtgatcgttttcggagagatcacaa

SEQ ID NO: 5731 - DNA, 268 bp, Glycine max
  Clone ID: 701097304H1
cgaatttcgatactttgatcagatccacaacacttcttcatccatgacgcttggtacttcaggatccagtgtcgtggttccaaggaacttcagattgctggatgagcttgagcagggagaataaggaataggagatggtacagttagttatggaatggatgatggtgatgacatttacatgcgctcttggactggaaccattatcggtccctataatactgtacatgaaggaagacttgatcaattgaagctgttttgtgataagact

SEQ ID NO: 5732 - DNA, 267 bp, Glycine max
  Clone ID: 701097305H1
gggtatgggtctggttggggtgggggaggaaattatgagtccccttaaactaagatatggtttttgtttttaggcatataatagacagcattcaatcttgttgttgtcatattatatatgatttccaaaaataaaattgcagtgtggctttcgtggtcgttctgcttcattcatgcatgcatgggggtgctacactagcctagtgtcactaggtatcatggttatagttgggctgttacatataaatattactgtgtatcatgtaga

SEQ ID NO: 5733 - DNA, 268 bp, Glycine max
  Clone ID: 701097306H1
ctcgcaagcaaaaagaaagaatcccaggcgaggagaaagatggaggggaaggagcaggatgtgtcgttgggagcgaacaagttccccgagagacagccgattgggacggcggcgcagagccaagacgacggcaaggactaccaggagccggcgccggcgccgctggttgacccgacggagtttacgtcatggtcgttttacagagcagggatagcagagtttgtggccacttttctgtttctctacatcaccgtcttaaccgtatggg

SEQ ID NO: 5734 - DNA, 265 bp, Glycine max
  Clone ID: 701097307H1
cgacacaggagtggcggaatctttctgaaaaatcgccgcaaagcgaagcgcaatctcatattaactgcaactgctactacgaactacgaacatcagggtagtcattaagacaaaccctagaaatggggaagaagcagcacagcaaagacagaatgttcatcatccaaacggagtgtgcaacggcgtgaggacgcgctaaatccagagacaatcgcactcccttcaacgtcttccttctattgctgctcgcttacgtttacgccgt

SEQ ID NO: 5735 - DNA, 265 bp, Glycine max
  Clone ID: 701097308H1
gatgacctagccagggcattaaatagcttcagctcacaaaggaaggtgtacttgtctgcagccccacagtgcataatccctgatgctcacttggatagagccatccaaactgggctttttgactatgtgtgggttcaattctacaacaacccttcatgccaatactccagtggaaacaccaacaatttgatcaattcctggaaccaattgatcacagtgccagcttctcaaatcttcatggggcttcctgcatctgaggcagctg

SEQ ID NO: 5736 - DNA, 250 bp, Glycine max
  Clone ID: 701097309H1
cagacactcagtttctgcctcttatttttttttttcctcactttctctctctacttttcctctttatttctagtcttctctgtctatcatagatcttgaactatcctggcaagaactcagagcactaacatcttgcagccacaaaaatgggcttctttctgttaccaaaagcaactccttgcattttgttcttggctctgctgtcttgtacttgctttacttctacagatgcttatgatccaatcgaccc

SEQ ID NO: 5737 - DNA, 229 bp, Glycine max
  Clone ID: 701097310H1
ccgacggtcgcctcgtcgttccacggtcaacgagagtttgactatatcgctttcgcgttgcaatggcccggtacttactcgcaaacgcacccgcagttgctgacccaccaacggttgctgcagaagctccaattttccaacagtgttcaccatacatggactctggcctgactattatgatagaccctggccgtacctgttgctctggatctagtttcgatcctaaaga

SEQ ID NO: 5738 - DNA, 266 bp, Glycine max
  Clone ID: 701097311H1
ctggttatcgaataaactatccctcacactttactccaacttggaattgtttgaattgcagtgaacacttggaagcagatcatgaagcaacgcactccacgccttcaagtcttcaacctccactgtcaagcgagaacactcacctagagacatgacaagagttcagcctcctcttctacctggtcttcctgatgatctcgctgttacttgtttgattcgagtaccccggattcagcacaggaaactacatttagtatgcaagagtg

SEQ ID NO: 5739 - DNA, 248 bp, Glycine max
  Clone ID: 701097312H1
cagaaactttgcctgctcagtcagaatccataaccactcagaaagattccacgaacaaggggatggatatgaaatccatactggagagtaaggatgtagcagccactgatgaatatgaatttgaaagtcccgagtaggaggctcctgccaaagagcctgaaattaatccagcaaagctgaaagcgatgataagagatgaggaaattgtgaaggcgcaagaggccttggagagagagcggacgttagca

SEQ ID NO: 5740 - DNA, 272 bp, Glycine max
  Clone ID: 701097313H1
ctcttctcttaccgagtttataaacttaacctaaacccaacgtcgtcgtttcgtccccctaattatcatcgtctcgcgaaccaccgcgtcaatgtcggccagtggtggcgccgccatcgacggcggacgcgccaaccgccatcggcatctcggtgagaaccgcttctacagcccgccgccgctgaggaaacacaaagagaagcaggagcagcagcggtcgtcgctgtcgacaacttcctccggagaacaggcctcggttctcttccgatgtt

SEQ ID NO: 5741 - DNA, 262 bp, Glycine max
  Clone ID: 701097314H1
ccgtgacactcataccacctgctttcatttgagccactttctcagtgccaaaaacactttcacgttttctcatctgaaaatgaggaccatctttggccttcttcttcttgttctgggtttgtttaaatatgcatttgctcaagaaggattttgctctgctccttcggaatcgaaatcaaagcctctttattggcaagtcgacaatgccactctctctcctatccaccttcaagatttgcctggattcacacgcagtgtctat

SEQ ID NO: 5742 - DNA, 265 bp, Glycine max
  Clone ID: 701097315H1
gcgaagcgaaaagcgctttctaacttaagtgatggcgaacgcagctgaagtttcagccttgaaccgcatcaaactgcatcttttgggtgaactctctccactggccactcccctaaactattttgatgaatcaaaccctagcccctctgaatcttccaattcccaatcttcttctgtaactcttaaccactacttcactgacctcttcgaattcgactccaaaccccaaataatcgacctccatactcccaaaacactaacttca

SEQ ID NO: 5743 - DNA, 281 bp, Glycine max
  Clone ID: 701097316H1
cggctcgaggaagttttgtggtagaaggaagattgatatgctgtgggaaaatgtcgttgaaaagcatagtaagggagctaaaggagatgagggatgggattggtagcatgtcaaggcgaggtgtcgagagcaggcgttggaacggtcggacaaagtcacatgttgctcctgatgtcactctaacttcacttgaacctattcagcaagggcattcggcgaatgtgccgcccgaattgcttctggacataataaggagggtggaagaccagtgcgactcctgg

SEQ ID NO: 5744 - DNA, 202 bp, Glycine max
  Clone ID: 701097317H1
cgacgtcttcgacgagtccaagctctcccgcctccccggcacctcggccattggccacgtccgctactccaccgccggccaatccatgctcaaaaacgtccaaacttcctggccgactacgcttcgtccgcgcgtcgctcaacggacttgcactacgtcctcgacgccgaacacaggtcactcacacactcgcacggtgctc

SEQ ID NO: 5745 - DNA, 271 bp, Glycine max
  Clone ID: 701097318H1
ctcttttgttttctcttctttttccttgaagcaaagtgaacttgtggtgtatctttccaattgaagtgaaagagtaaggatgtcaagtgggacaacatactggtgttacacatgcaggcagccaatctggcttgaagggagggaagccatttgcccctactgtgacggaggctttgtgcaagaacttaatgagctgcgaggagttgcgcgccaacacggcttctcatcgcggatggaagatgctcatcaaatgcctgacattatggtgctg

SEQ ID NO: 5746 - DNA, 269 bp, Glycine max
  Clone ID: 701097319H1
ggaaggcactgcttaagggcctcagcccagctgaaaatcggagtattcctccactgaaatatgagtacttttatggcctcttacgtgactttcccgacttatcatttacaatcaatggtggtattgctagtattgatgaggtcaatggagctctaaaggctggggctcatggtgttatggttggacgtgcagcatacaataacccttggcatattctgggacacgttgatactgcaatttatggtgcatcaagtagtggtcttcacgtc

SEQ ID NO: 5747 - DNA, 270 bp, Glycine max
  Clone ID: 701097320H1
cgtgagaagaaacccaacctcgtagctcgatcttcctttaccaatcattaataaggaatggatctgtggctaaaaaaaacaatcaagggctaattgatgtgttcatcagatcacacacaaaatctagcagaaaagaataagaaggttttactcgtacggatattacgagaaggagaattttgtttgagtggatatggcgacgtactttcatggcagcacttcagaaatcccttcctccgctgaagggttgcagacactttacctttgaat

SEQ ID NO: 5748 - DNA, 265 bp, Glycine max
  Clone ID: 701097321H1
caaaccctagtggccgattccgtgttggacttggatcgtgccctcttggactctatgcgcgctaaaattcacgatgagctcgccaacctcgacgaaaagattgctgatgctgaggcaaacttaggagagagtgaagttcgtgaggctcacttggcaaaatccttgtgtatcatccggattatggacaaggagaaagccttggaacatctcaaggtaacagaaaccaagacagttgctgttggccagaaaatggacttggtgttta

SEQ ID NO: 5749 - DNA, 269 bp, Glycine max
  Clone ID: 701097322H1
ctctgctcgtgcctctagggttatcatatctccatttccatttcctctctctcagtttccaagaatcttaagctatgggaaagtcttacccaaccgtgagcgctgattaccagaaggccgttgagaaggcgcagaagaagctcagaggcttcatcgctgagaagagatgcgctcctctaatgctccgtttggcatggcactctgctggaacttacgacgtgagctccgaagaccggtggtcccttcggaaccataaagcagccctcgaa

SEQ ID NO: 5750 - DNA, 264 bp, Glycine max
  Clone ID: 701097323H1
gggaaagatgcagatattcgtgaaaaccctaaccgggaagaccatcacccttgaggtggagtcaagcgacaccattgacaatgtcaaagccaagattcaggacaaagaagggattcctccggatcagcagaggttgatcttcgccggtaaacagctggaagatggccgtaccctcgctgattataacatccaaaaagagtcaacattgcatcttgttttaaggcttcgtggtggtattattgagccatctttgatggcactggc

SEQ ID NO: 5751 - DNA, 269 bp, Glycine max
  Clone ID: 701097324H1
cggctcgaggacagaacaaagggtgcgaacaggaataagcgaaaaagggcatcacaagttggaattacaccaagaagtggggttacaagagcgaagaacaaaaacatttgtgttgtattggagttatttatatttatacgctcgtaactcgcacatagtatccctcagtcattccgtgtccatagttgcaagttatctaagcccagtttgtgtttcactcacacaccgtttccagtaacaacaaaacatcatgctttctcgcccccaca

SEQ ID NO: 5752 - DNA, 259 bp, Glycine max
  Clone ID: 701097325H1
gcgaagaagaagccacagagaaccagtctcctactctctctcacccacaagaaaaatggcatctcacatcgttggatacccccgcatgggtcccaagagagagctcaagttcgctctcgagtctttctgggatggcaagagcagcgccgaggatttgcagaaggtggctgctgatctcaggtcatccatctggaagcagatcgctggtgctgggatcaagtacatccccagcagcactttctcgttctatgaccagctg

SEQ ID NO: 5753 - DNA, 266 bp, Glycine max
  Clone ID: 701097326H1
acctgacctcacaaggattgagtgttggatctagtcatctagataaaaaaaataaaaatgaagatcattgagaaaattcgcgcacttctgctgatccaaacagggtggtgttctcatttgagttcttcccccccaagactgaggatggtgtggacaatctgtatgagaggatggaccgcatggtggctcacaacccctctttttgcgacatcacttggggcgctggagggacaacggctgatcttacattggaaattgccacaaga

SEQ ID NO: 5754 - DNA, 261 bp, Glycine max
  Clone ID: 701097327H1
cagaaaatggggtctctaatggcctctcttactctcactcttgtattggcaatagtttctctaagcttgtcatctcaagcctcagctgacaagtacgactattcatctccaccaccaccagtttacaagtacaagtccccaccaccaccctacaagtattcatctcctccaccacctcctaagaagccttactaatacccatcaccaccaccaccagtgtacaaatacgagtcaccaccaccatctcaccagtacccttct

SEQ ID NO: 5755 - DNA, 266 bp, Glycine max
  Clone ID: 701097328H1
ctctgcattgatggttggattggcgatcgtgtgctcgcacggcgcgttccgcgttcccgaggatctgtttctcgacgatcaggagccgaacagctccggattcctctcgttcctcggtggcgccgccgcttcagccgccgcgccggccgtcgcgcgcgtgtaaacggcgggatctggacgaacgctgtgtccggtggattcttctcaggttggttcggccttttttgttgtaatatgctacattgaaaattgttgcgatattcttg

SEQ ID NO: 5756 - DNA, 269 bp, Glycine max
  Clone ID: 701097329H1
cggcaagggccaggacatggtcttcaccgtctacggcgagcactggcgcaaaatgcgccgcatcatgaccgtccccttcttcaccaacaaggtggtgcaacaataccgccatggctgggaatccgaggccgccgccgtcgtggaggacgtcaagaacaaccccgacgccgccgtctccggcaccgtcatccgccgccgcctccagctcatgatgtacaacaacatgtaccgcatcatgttcgaccggagttcgagagcgaggaggacga

SEQ ID NO: 5757 - DNA, 274 bp, Glycine max
  Clone ID: 701097330H1
atcagctccttctccgtcaaaagacgcataacctcaaccgtcttgaggctcagagaaacgagctcaattccagggtgaggatgctgcgcgaagaattacagcttttgcaggaaccaggctcttatgttggtgaagttgtcaaagtcatgggcaagaacaaagtccttgtcaaggtccacccagaaggaaaatatgtcgttgatattgaccatagtattgacattacaaagattactccatccactagagttgcacttcgcaacgacagtatgtt

SEQ ID NO: 5758 - DNA, 277 bp, Glycine max
  Clone ID: 701097331H1
ccctcgagccggctcgagcggctcgagctaatcataatcacttccaactgctctcactagtcactactactactggagatggcttcacctgcctcttgcacttctatttccccttctagtgatggttgcctttgctggtgacttaaacaaagactttgacatcacttggggagatggccgcgccaagatactaaacaatggagagttactcactctttcattggacaaagcatctggttcaggttttcaatcaaagaatgagtatctctttggaaga

SEQ ID NO: 5759 - DNA, 233 bp, Glycine max
  Clone ID: 701097332H1
tttctctctcctcgactcgatcccaattccactagggattcaattccgatgcgattccgagcttgttagatccacgacaaggtttcgtttcccagattcttttgtaaaaaaaaattcttcctctgcccaacaggtaagttgtaaaaaaatggaccatgacaagactgggtgccaagctcctcctgaaggtcctatattgtgcatcaacaactgtgggttttttggaagtgcag

SEQ ID NO: 5760 - DNA, 271 bp, Glycine max
  Clone ID: 701097333H1
gaaaacaacgtgacaccaaaggacctgacagctatggatttgttctctccacaagcttcctcctatcgtccttcagaggagattccaaccttgattaattccagtgcaattaaatctgtgagcaagagtgctataactgcacagatgacaatcttttatggtggacaagttgttgtctttgatgattttcctgctgacaaagcaagtgagatcatgtcctatgccaccaaagggatcccccaaagccagaacaattctgttttcactcaca

SEQ ID NO: 5761 - DNA, 271 bp, Glycine max
  Clone ID: 701097334H1
ctcgagccgcaaaatttgtcatcacggataaagtggttactaaggatgtccaaaagaggtatgagcaagaggtcattgaatttggaggctcttcaatcatgttaaccatattagctacagtggcattgctaaatctttttggtctcctttggggaatgaagaggattatgatggatttggaattcagctctagccaattgatgatgcagattacactgagttcattggtggtaatgatcagtttaccagtgtatgaggcacttttcttcgt

SEQ ID NO: 5762 - DNA, 261 bp, Glycine max
  Clone ID: 701097336H1
atgaccacccctcgcatgacgtggcggccgggcagatgttcgtgaaggaggtgtacgaggttttgaggaagagtccgcagtgggaggagatggcggtgctgattacttacgatgagcatggtgggtttgatgatcatgtggcgacgccggtagaaggggtgcctaaccccgatgggatcgttgggccccacccttattactttcggtttgataggttgagggtgagggtgcccacgtttattatctcgccttggatcgaca

SEQ ID NO: 5763 - DNA, 260 bp, Glycine max
  Clone ID: 701097337H1
ccctctttacccacaccctctctctctctctctctgtcacgcacagagaaaaactcagacacccacgttcacacttcgcacacaccatctctcactgttctttcttcttcctctttttcttttttaaattcttttctcttaatggaatgatggaacacaacatcatcgtcaacaacaacgtgatcgcaccgtttgtcataaaaacctacaatatggtgaacgatccccccaccgataaactcatcacgtggggcccagcg

SEQ ID NO: 5764 - DNA, 256 bp, Glycine max
  Clone ID: 701097338H1
cattattgcgctcaacttttaaatttccccaaagccttggcatcatgggtggcaaaccaggtgcttcaacatacattattggtgctcagaatgaaaaagcattctaccttgatccccatgatgttcagcaggttgttaatatcagtggggatactcaagagcctactagtacttcgtcataccattgcaatattatgaggcacatacccctagattcaattgatccatccttagctattggcatttactgccgaga

SEQ ID NO: 5765 - DNA, 257 bp, Glycine max
  Clone ID: 701097339H1
cttcacttttcttcatagcactcaaaaaacaacaactcatctcatcattattccctttctcactcagcacattctaaacagtagcaccatcaccaataataatggcatcatcctcatcaaccgttgctttgagaaccatctcctctttctctctgaaacctgccaccacaacaagatcattactcaacactagtacttcatccagcatatacctcttactctttacatcagcaaactcattgctctccataaccctc

SEQ ID NO: 5766 - DNA, 265 bp, Glycine max
  Clone ID: 701097341H1
ctcggaaatcgaggatgtcgatgatgaggacgatgaagaggaggaggagttgaagaagaagaagccctttgggttctctcgctccaacaacaaggctgcttctaagcctctctctcgtggagcaacaactgtgaaatctgtggaatcaaaggggcaagctgagaagtgtgccaagagaaagaggaagaaccagtatcgcggaatccgccagcgtccatggggaaagtgggctgctgagattcgcgacccaagacagggggtcgtg

SEQ ID NO: 5767 - DNA, 263 bp, Glycine max
  Clone ID: 701097342H1
ggcgagtttggaaatgttggcgtctaattgccagaatctcgagcggttggctttgtgtggaagtgattcggttggtgatcctgagatatcttgcattgctgcaaagtgtgtggctttgaagaaactgtgtattaagagttgtcccgtttccgatcaagggatggaggcattggggaatgggtgtccgaatttggtgacagtgaaggttaagaagtgtaaaggggttacccctgagggtggtgattggttgaggaggacagagg

SEQ ID NO: 5768 - DNA, 266 bp, Glycine max
  Clone ID: 701097343H1
cctcgagccgctcgagcggctcgaccggctcgaggtttctctctcaccggtcagaaacatgactttggaaacgcaaccaggaacggcgtcgtactggtgctacagctgcacccgtttcgtgcacctctctgtccaaagcaccatcgcctgcccccactgtcaaagcggtttcgtcgaagagatccgtgccggcgccggagccgaagcctcgccacgccatcgactaagtcctttccccgatgatcctcttttgctccggcgcaggg

SEQ ID NO: 5769 - DNA, 256 bp, Glycine max
  Clone ID: 701097344H1
cgtcaagtgtcataaattggtcaagactctcaaatccaagggttattccgtgtcacttgattctgatgcagcaaatattaatgatagggtggattcagaccgcagagcagcggtttctttgattgatctggtgcaaatctctactacggatatagggacgtatgatgtggtagtcctacctagttttgtaccctcaattgacacttacgtgcatattttgacaaagatggctcgcacaagtgtcaatggtgtattg

SEQ ID NO: 5770 - DNA, 108 bp, Glycine max
  Clone ID: 701097345H1
ggattttatcctctcctccataattttccaacaaaatctcaaacataataaataaaaattacatttttattcacaaaaatatcgggattcatcttgttctcattttgc

SEQ ID NO: 5771 - DNA, 271 bp, Glycine max
  unsure at all n locations
  Clone ID: 701097346H1
cactagtcttcctccataagggccgattaccatggcaaggttaccagggtgatagcaaatccttccttgtttgcaaaaagaagatggggacatctcctgagacgctatgctgcttgtgtcctcctccttttaggcattttcttgagattgtagtgaatatgaaatttgatgaagaacctaattattccaagctaatatctttgtttgatggtacgattggcaccaatccagcattgcggccaattaatactgaaggtgcccanaagttggg

SEQ ID NO: 5772 - DNA, 270 bp, Glycine max
  Clone ID: 701097347H1
ctttgatgaatacaggctcttcattagattgagaggaccatgcggcaaatctcatgtggaatcgttaaaatctccaagatgatcgatatatcgttatcaacaaggacattgcttgcaatattatataattactagtattgtaaatcctgttcctagatatgtacttgtctgaacaaattgcctaatagttaaaccacaaaagcaattggataatatagatatgaaattgatgtggaccaactgtttatgttaatggatgaatttgggagt

SEQ ID NO: 5773 - DNA, 269 bp, Glycine max
  Clone ID: 701097348H1
gccaagtgaaagtgagaaaaaataaaaatcaaagagcataatgtcagggatcattcacaagattggggagacccttcatgtgggagggcacaagaaggaggaggagcataagggtgagcaccatgctggaggatacaaaggggagcaccatggtgaacacagtagtgagtacaaaggagagcatcatggtgaacacaaagctggagagtaccatggtgagcacaagacagagcacaaagaggggttcctagacaaagtcaaggacaaga

SEQ ID NO: 5774 - DNA, 273 bp, Glycine max
  Clone ID: 701097349H1
gagcctgcacttgttccacccttcaagataccactcctcctcttccccaattctcttatgcgtaatctggcactcttcatagaagactttgtaagatccaaagagaaatggccttagaccagtattttgatgaggctgtgccccagttggattccttggaagataaatcgtctctcgaaacatggaaatgtggcagtgacgatattgcagattcggatagaaatgcctctggtggctttgattgcaacatatgcctggagtgtgtgcagatcc

SEQ ID NO: 5775 - DNA, 191 bp, Glycine max
  Clone ID: 701097350H1
tctggttatatctgagtctcgatctgatgcacttgttcatatagctgcattggcaattcgaagtgagaatggtttactgctctaaaggtggaacataatcccgacgatcatatgcagtcttactcaaggtcattacttcagtgatgccagatactctcggtgacagactgattgggcttgtgatttcaaga

SEQ ID NO: 5776 - DNA, 266 bp, Glycine max
  Clone ID: 701097351H1
gggattgacaaccctatgatcaatccaatggttactggggcgcctagcttggctggacttgggtgttctaagattctggattgcgttgctgaaaaggatctgataaaggatagaggggttgcgtactatgaggctgtgaagaagagtggctggcaatgtgaagcggaactgttcgaagtggagggcgaggatcatgctttccacatccacaatccacaaacccagaatgccatgaaaatgatcaaacgcctctcggatttttcctc

SEQ ID NO: 5777 - DNA, 258 bp, Glycine max
  Clone ID: 701097352H1
ctcgagccggttttccttttaaatgtttctttaaatttctcaattgatcagagatcttcagcaaaccggtcaagtttgtgcagtttggccagatgggaggtgggtttagcgtgctacacttagttagaccttttctctcgttcctacctgaagtgcagactgctgataggaaagtgtcatttagagagtaggtcatatatactgtgatctctctgttcagtatcctgtttgcagtcacttcctctgtatgtatacata

SEQ ID NO: 5778 - DNA, 206 bp, Glycine max
  Clone ID: 701097353H1
ccgatccaattcacctttctcctctctcttctcaattccccatctgggtatacctgtttccctcaaagttctcttcttcgtcgtgcttcagaagtgctcagtgatacccttttcttagttcaatgagagcggggtaagggagtcacgaagaggatgagtacgaggaagcagagtttggttcttccaagacacagggcacttcctct

SEQ ID NO: 5779 - DNA, 260 bp, Glycine max
  Clone ID: 701097354H1
gagcatggaaagtgaccagaaagtccaaatagcttcttggagtgaggtcatgtcaggtgctggggtggagtttcatcaaggggctcctaatttgggacaaggtggtggtggtggccttcagagacaacctagtatgaccaagaacaattgtctttgttctccaaccagacattctggttcgtttcgttgccggcttcaccgctcccctagcctccagaggaccagaagcatggaatcagagtccctcagggatcacgcat

SEQ ID NO: 5780 - DNA, 265 bp, Glycine max
  Clone ID: 701097355H1
gcttgttgtggtacatttatagtgactgaatagcactggcttgtctttgcagggaaaagttagcgtgtctttaggtcacaggattttgagagatttactttttaatctgcctctgaatcaattctgcaagaagatatataatgtttggttcaaagaaatctcctttgaacgttgctaaacctagctccgttgagtcttggacgaatccatttgattctaatgatgagggaatggataccaaaaagtatagttcctctagaaaact

SEQ ID NO: 5781 - DNA, 96 bp, Glycine max
  Clone ID: 701097356H1
cactactgaagtcggggttacaagaatgacctcctccaacatatgtatagtagtcacgatatccatcatcatatgcacgtcattcgcctatagtat

SEQ ID NO: 5782 - DNA, 262 bp, Glycine max
  unsure at all n locations
  Clone ID: 701097357H1
agcttgtctcggacattttggatatcagtgagttttcgcacggtcctttgaggttgaaggagtctgaattctgttctgaggagtttgaacactttgttccttgttacaatatttctgaggatgtggaattgggagtttctgataacaatgaagtggaccggcaatgcagccacgagcttaggcagaatctgttggttctgncaccggtgacttacaaaattctcttaaggtggcctactggaaaagcagtgatctgggtgct

SEQ ID NO: 5783 - DNA, 265 bp, Glycine max
  Clone ID: 701097358H1
ctctttcctatcacactttctagatagctagccaaccagagtaagctctaaagatatttcttatatatcctatggtccgagagtgcccttgttctgcgccaaccctttcttccacatcttgcgtttcaacctcttcctctcttgagtccccttatcatcaaatacccttcttcttcaacctccaccaaattcaacccccacataacaaatctcctcccatcccatttttcagcaccaaagtttgaaacttttctcaattggttgt

SEQ ID NO: 5784 - DNA, 263 bp, Glycine max
  Clone ID: 701097359H1
cctcgagccgattcggctcgagatcactttccatgatgctcaaggacccaaggctgatagactctcgataacaagagagcctacttccgctcaagaataaggcaacaacatgaccaacacttgtctgggccattgcgtataagtgtaaggcgggcttacattttggaggactcttataatcagctaaggatgcgtcctactcaggatctgaaggggcgattacatgtgcaatttcaaggtgaagagggtattgatgctggtgt

SEQ ID NO: 5785 - DNA, 254 bp, Glycine max
  Clone ID: 701097360H1
tcctcgagccgaatcggctcgaggggctcgagactagttctagatcacgatctagaacttagatctagtgatggcaggaagtttgagtaactgcatttaggagactacgaatgggaaacctatggagaggtatttgctccgtgtgtccaatcttgcatctggtcttcttaaattgggccataatggagatagccgtgttgccattttctctgataccagggctgagtggctcattgcccttcagggttgcttca

SEQ ID NO: 5786 - DNA, 268 bp, Glycine max
  Clone ID: 701097361H1
tcattagctcttatttgacggcaatgctcttaatctataaaagatatatggtgtctaaatgttcagcatgaatatatagctaggcaaagaagagcaaaagaaaatcacattacctgtctctgaaatcagattcactttgttcttcatcaatggaaagagaacaactatcccttcacatgaatggtggcaagggacaaaggagttatgcaaacaactcctcactacaaagaacaataatacgtaaaaccagatcatacttgaagactat

SEQ ID NO: 5787 - DNA, 228 bp, Glycine max
  Clone ID: 701097362H1
actaggattcccaaggttcaacagttgttgtaggacttcttcaagggtaaggcgctttgctagagcattaagccacatgtagctgttgcctatggtgcagcagtgcaggctgccagtctcagtggcgagggtaatgagacagtccaggatcttctgttgttggatgttacgcctctctccccttgagttggagaccgcgggatgagtcatgactgtgtcgattcccag

SEQ ID NO: 5788 - DNA, 265 bp, Glycine max
  Clone ID: 701097363H1
atacaaaccacgttcttctctgcggtgccactgcgacactcgctggccccaaaatgaccatcattaacatgaaccccccggtaattacaattctgccctcactctaattcacaaatacctagcaccaccctcactccttttttttttcccttcttccgaaccttttgctttttcggggtttgcatgttgacggttacttggcggtattatgggacatcaataccagcagggaattctctccggttggtcaaagagccctagatct

SEQ ID NO: 5789 - DNA, 284 bp, Glycine max
  Clone ID: 701097364H1
gcttcattaacatgggtgctggtgactactacaaaatactgaaggtgaagcatgatgccactgatgaagaagtgaagaaggcttataagaaattggcaatgaaatggcacccagataagaaccttgaagaccctcttaggaaagaagagtttgaggccaagtttaaacaagtttctgaggcctatgatgtgcttagtgacccaaagaagcgccagatctatgacttgtacggtcactatccccttaactctcaacgcttcaccaaggaatatggctatggaaca

SEQ ID NO: 5790 - DNA, 118 bp, Glycine max
  Clone ID: 701097365H1
ccgacgtcttcgacgagtcgaagctctcccggctccccggcacctcggccattggccacgtccgctcctccatcgtcgagtaatccatgctcaaaaacgttccaccccttgctggccc

SEQ ID NO: 5791 - DNA, 137 bp, Glycine max
  Clone ID: 701097366H1
ttagaacatcgagtctcatgacttccttaagctccgtagtgctggtccttgtagctctaattctattacctcatgttcttgctgactatgagaacgtcccggtgtaccagattcccattgagaatctagcactttac

SEQ ID NO: 5792 - DNA, 260 bp, Glycine max
  Clone ID: 701097367H1
tgacggtctattcaagacacacaaggtaaactatgtcaaaggttatggcaaatttgtgtcaccatctgaagtctctgtggacaccactgaaggtggaaatactgttgtgaaaggctagcatattataattgccactggctcggatgcgaaatccattgcctggcgtcactattgatgaaaagaaagtcgtatcatcaacgggggctcttgctttgactgaaatctccaagagactcgtagtcattggggcaggctacatt

SEQ ID NO: 5793 - DNA, 259 bp, Glycine max
  Clone ID: 701097369H1
tggtagccactgcatttctgcttgttttctctgaacatggtagtcacaaacacaaaccagttacgggataccattgattccacttatgataggaaagctggatagagagcctttgatgagtcagaatctggtgcgagaggtcctgtagagtccgtagtgacgaagcatcctcgcaagtgtcatgctggcaacctggatgtacctgaaagttcacgtagtcacaccaattggagtatgcccatcattggcctcagggtct

SEQ ID NO: 5794 - DNA, 261 bp, Glycine max
  Clone ID: 701097370H1
cggctcgagggagacacagactctatagctaatccttcccgactctctaagacaccaaaaagatgaagcaaatcgacgacggcgatgacgagcagcgatccctctcgcctctggtggaacaggtcctggagaacgtcctggacagcgtgctcgagttcctcaccgcccgtcgcgaccgcaacgccgcctcactggtctgtacatcctagtaccgcgccgaggcgctcacccgccccgacctctccatcggcaactgctagc

SEQ ID NO: 5795 - DNA, 265 bp, Glycine max
  Clone ID: 701097371H1
cgaagggacgtgtctgactccgatggcttcctcataatgtgaccgtacgtaggagttccgattactatcggagactatgaagaagatcggaggtccggttcaacccgaaaatcctccttcgacctctcgcggcggcgagtcgtcgtattcgagatccgaattcaaccgaaaggcctcgcgaatcgggttggggatccacgagacctcgcagaagatcgcgaggctcgcgcagctggcgaggaaatcgtccatgttcaacgtcccg

SEQ ID NO: 5796 - DNA, 259 bp, Glycine max
  Clone ID: 701097372H1
catcgagccgaatcggctcgagcagctgtgcaaatagagtggtctttgtggactcgtgacattgcagaagagatagtccctctctgcagggaacttggtattggaattgtaccatatagtcctcttggtcgtggcttttttggcggcaaaggagttgtggaaaatgtgcctacaaatagctccctgacagcacatccacgctttcaagccgagaacttagacaagaacaagaatatatatgaacgaattgaaggccttg

SEQ ID NO: 5797 - DNA, 177 bp, Glycine max
  Clone ID: 701097373H1
ttcacgatgaaataaatgggcatatcattcaaagattagtcggtgatgatgttaattttgggcatgatgttgctagggataaggtgaaagtagtaaatgcaatattgtcataattgtactggtgctatcacatcaatgtagtgtgggaaataacgttgcttaattattgagatgaac

SEQ ID NO: 5798 - DNA, 217 bp, Glycine max
  Clone ID: 701097374H1
catgtgtttgacttgactcgtccatcttcgtcgttatcgtctgcttttgttgtttgtgtgattgttctttctctcatctgaaaatgtcttgctgcggttgtaaatgtggttgcggaagcgcctgcaagtgcggcaactgctgccgatgctgctagatgtatccagacttgagcgactccgagtcaaccaccagtgagaccttgggcatgggagtggc

SEQ ID NO: 5799 - DNA, 213 bp, Glycine max
  Clone ID: 701097375H1
cttatctctctctctctctatctctgccgaatcactgttcgctcgacccttccacttcgtattccctgtttccggtattcgcgtcctatctggctgcacagctggcatccacttacgatgctctgtcccgtaccagatctggatcaactgtgacaaggttgggtgcagtaatgttgtatcaatctgccttctgaccggtacgcgtggggatac

SEQ ID NO: 5800 - DNA, 184 bp, Glycine max
  Clone ID: 701097377H1
tctcgagccgattcggctcgagtgttgagcaggctatccgaaacaagcagttgttcatcttagatcaccatgactatctcattcctcatttgaggaaaataaatgcaaataccacatagacttatgctaccagaaccatattcttcttgaaagatgatcggaactttgcacaccattgagccat

SEQ ID NO: 5801 - DNA, 103 bp, Glycine max
  Clone ID: 701097379H1
cgaagagaatggctccaagggtttaatcgtttagcttgtaagcttctcagcatgcacgagtcgtgtcttcggagatatgacttgtatgaatctaagaatcatg

SEQ ID NO: 5802 - DNA, 275 bp, Glycine max
  Clone ID: 701097380H1
ctcgagccgctttcttctcggtccagtgtctctttcaaagtgctgctcgtgccagcattgaccttagctagagcagtaaccgtcatcaccactgccagtacggtaccatggctgtgcttcaatctttcgtttcggtccacccagattctcacttccccatacagaacctcccctacggagtgttcaagccccaatccgcttctcctcctcgtcccggcgtacgcatcggagacttcgtcctcgatctctccgaaatctcttccgctggtctctcg

SEQ ID NO: 5803 - DNA, 125 bp, Glycine max
  Clone ID: 701097381H1
gggttgtaacatatactgtgtggcaagactgtgaaggctcgacgaagaagagtatcctgtgtaaactcgagtgattactgtaataaattaatcctactggaaacaaagaatggatagaatcatat

SEQ ID NO: 5804 - DNA, 272 bp, Glycine max
  Clone ID: 701097382H1
acgtaagaattcaattcggctctagctatagagcattgtgaaggtaaaatcttacattatatcagaggcaggtgttcttgcagacaagataagtcctggagtgctcaaatcacttgtatccttaaacgacaagccaaagtaagatgctttgagctgactatttagtgagaaaccttgtggtggcagtatcaactgggtggaaaattgcaagtgatgtctggaagtctttcatgaggcatttaggctgaggtgtatcaattctgttgctgtga

SEQ ID NO: 5805 - DNA, 262 bp, Glycine max
  Clone ID: 701097383H1
gatgagacaggctctcgctaaagatcaaccttggaagttgaaagaatcacgtgtgctggagatattgcaagcgatagacagcaacacagatgggctagtggatttcaccgagtttgtggcagctacattacatgtacatcaattggaggaacatgattctgacaagtggcagcagcggtcacaggctgcttttgagaaatttgacttggataaggatggctttattactccagatgaacttagaatgcatacgggtttagag

SEQ ID NO: 5806 - DNA, 262 bp, Glycine max
  Clone ID: 701097384H1
gccgattgcctgagtatccttcagaacaaatttaacagagatacgcgaacttttgctccagactcagagatattgcaggctttacaacagagttctgtaggtcaatcttctaattataaacaaatccaaaagcgttgtatgcctttcttgaggtttaagaaagaggaagcaattgcacttgggcctcaagccctggatttgagattgccgtttggtgaaattgaggttcttaaggaaaacttggacttgatcaagagcagat

SEQ ID NO: 5807 - DNA, 262 bp, Glycine max
  unsure at all n locations
  Clone ID: 701097385H1
gggctaaggaaaaagctagagagatactcaaattgcatgctcgggcgtggaggaattctccatgcataccgaacaatttgcttaattcatacccgaattatgtgtgaaacaaaacgagaattttgaatggtgcctcttttagaaattttaatgtacagaattatttggacaggatacagttaggtgtaagttataaatatgaggtgcaactaagcattgattgccccacanaacaagtataggtgggtagtgagattaggtt

SEQ ID NO: 5808 - DNA, 171 bp, Glycine max
  Clone ID: 701097386H1
gtgcaaccttgtgctgagagactaatccattctcatgcactgccactatattctattgttggctctcactgcaccactcgttcattaccttaatgtactcagagagagaggatacatgatatagcttcaccatgtatattctgatgatcaatggcaccatgacgattccat

SEQ ID NO: 5809 - DNA, 235 bp, Glycine max
  Clone ID: 701097387H1
ctagttgggtgttcgaagacgaggtggacgatgatctggtttcggagttcaaagatctacccatgaagttccaacaaacactgatgccagacctggaacgaatctccacaacctcaaaagcctccataacaaaagccaccatagagatcacgagagggtttcaaccctacgttggcaccaagtacgcacccaccagaaccactttactctcttgcgcattcgctttgatcctttg

SEQ ID NO: 5810 - DNA, 145 bp, Glycine max
  Clone ID: 701097388H1
ggagtctcttattttcctttgtaatggaaagttagaaaccctcatcgtcaaagcacgcgttttttttaatctctctctctcaacaaatatttgtgggtagattcaattcaccatgtacgagctcatacggagtaactctgaaatt

SEQ ID NO: 5811 - DNA, 258 bp, Glycine max
  Clone ID: 701097389H1
ctctaatccagctctgcatacacaagtaatgggcaaaattcgaagtgcatgccatgagtggggatttttccaggtgattaatcatggaattccaatcagtgtcttggatgagatgattggtggaattcgtagatttcatgaacaagatgctgaggtaaggaaagagttctatactcgagatttgaagaaaaaagttttgtattactccaacattagcttgtacagtgaccaacctgttaattggagagatacattggt

SEQ ID NO: 5812 - DNA, 258 bp, Glycine max
  Clone ID: 701097390H1
aaagataagaccatcaaagtatcacttcagccttatccggattagggtttcggtttttgacccaacctttgacgtatcgaaaccttaagtttcggatcaggtctgagcaatctggttggtagaacctttggtcttagagagtcaagttttatgtctgaattagacgatcacattcctactgccttcgatcctttaactgatgcaaatgctgatgactcgggtgctgggtcaaaggagtatgtgcatattcgcgtcagc

SEQ ID NO: 5813 - DNA, 259 bp, Glycine max
  Clone ID: 701097392H1
aacaaattaagcgtgaagaagccttctgttatctcaggatacaacaaacaagcatgtctgccctgaattccactcatttcacttcattgagggaccaagtgctgaatgtattcaaggaattgcaggagatcctcattaaattcttaacactgtccattgctttgatttcactaacaaacactgagtcagggaagcttttgtctacagaacagcacaagctaatgatgattctgattttaaccattgtcttatacttctt

SEQ ID NO: 5814 - DNA, 265 bp, Glycine max
  Clone ID: 701097393H1
attgattcagctttacataatcatagacaatcttgcagcacaaatctttcatccaaatccaaggagcagtctcttcctaattcagatattgtgcatgttctggagggagcagaggagatagttgaagttgagttgaggaaagaggggaaagttgaacttggagtgtataagagttatgctgtcttcactggttggtttatgacagtcattatatgcctatcagccattctgatgcaagcttctcgtaatgggaatgatttatgct

SEQ ID NO: 5815 - DNA, 271 bp, Glycine max
  Clone ID: 701097394H1
ctctcgtcttctacaagattttctgttcgatctccaccaaggttgttccttccacctccgccatgagtctcatctttggaaagcgataaacccccgcagagcatcttcgggatcataagaggatgctggacaaatcaatcagagaaattcagcgtgagcgtcaaggattgcaaacaccagacaagaaattgattgcgaggatacagaaaagtgccaaacagggccagatgggagctgttagagttatggcaacagatcttgttcagacaag

SEQ ID NO: 5816 - DNA, 261 bp, Glycine max
  Clone ID: 701097395H1
attaccagttactatactctctctttctgaaacaatttgcccaattgtttgagatgttcaatatgagatttgtatctcaagatttgggtggtttcatgtgcactaatacttctggtgtcatgcacaacatactcatcagcttcttcggggaaacctgagaacaacataacaacatctgtttataaatcacccaagattgagctaggtccagggttagtttcacacaaattatattttgatgttgactttcaagaggccata

SEQ ID NO: 5817 - DNA, 280 bp, Glycine max
  Clone ID: 701097396H1
aatttctcccacgacaacgtatcacaagctcccaatatagcaagcagcaaacatgatttcttccgtgtcctttccagcgtctcttcccgccgttaacttctccggcaacgccatggcttcgccgtcgtgccgcgtcaaatcccggccaatagtcgccttcgccaccgtcactgccaccggtgaagctcgctcttcctggacggagcaaccgagaacttcctatctgaattcctcttgctcttcgctttacgatatcctcggcatccccgtgggcgtctaa

SEQ ID NO: 5818 - DNA, 139 bp, Glycine max
  Clone ID: 701097401H1
gttcactcttcttctcttgcggctagggttttagcgcacttcttctagatttaaggaagatgggtaaggaaaaggttcacatcagtattgtggtcattggccatgtcgactctgggaaattcactaccatggtcactga

SEQ ID NO: 5819 - DNA, 146 bp, Glycine max
  Clone ID: 701097402H1
gaaggaatcacacaagagaaattttgaggtggatcttggtaatttaaatttggtccaaaaatagtaaaaaaaaaaaaccatagttccattaattttcatgtccttgctaacggtggggccaccaaggggggcaagggaattttttc

SEQ ID NO: 5820 - DNA, 237 bp, Glycine max
  Clone ID: 701097403H1
ctcgagccgaaagaattgaaaattgagaacgaacctggttctggaaagaattgaaaagtgagacgaagagattgagcatgccggcgtgaaccatgaccggctcctccccttcctttgttcggcgggacggaaaccgagggacaacggcggttgttttcaacgggattcaaacttctccaattggggccgaattggcgggccatttggacgccgaagaaggcgcgttaaacgccgggg

SEQ ID NO: 5821 - DNA, 263 bp, Glycine max
  Clone ID: 701097404H1
cgagtccgttgagtttgattttgtggatgaaagcatagggatagggcttttgcaaacctctccaatgtttctcgaaattatatgaccatgcggcgaattcggatgctggaatccttcttcggcgtggttcttccaatgggtccaaggtttcctaaggaattccttttcaattcggtaataaattagatcgatctccttcggtagtaaatcctggccccttttccattaattatttgaaccggggcttctaattcccttttttg

SEQ ID NO: 5822 - DNA, 252 bp, Glycine max
  Clone ID: 701097405H1
gtccactttgaaggagcttgatggtactaatcctggacagaatccatatgtcctttgtcgtttgtttaagaaacatgatgagagccttgaagtttcacactgtgatgaagcagagccgactggttccactcctgtggcttaatccacagagggaataccatctgatcttgctggtggtgcaggattccccttaaaagttaacggagatggttaacaacaaggaatgattccttgaaaatccgagggaggcat

SEQ ID NO: 5823 - DNA, 230 bp, Glycine max
  Clone ID: 701097407H1
gttactttccaatttgaattgatccattttcatttctttcgcaaaagttgcaactacttcctcagaaaaaaagtttctaagttaaagaaatccagagagacaataatcccaggaaacggtttaggtaaatgcaaagaaattcttcttggtgataattgtccaccttattgaagtttttttaaattatgattacaagttgaattacggaattttttagggattaaccattt

SEQ ID NO: 5824 - DNA, 253 bp, Glycine max
  Clone ID: 701097408H1
ctaaattagagacgacccactttccttgcagatctttttccagggaaaagtttggattttttgatcgttttgtgataagagttagatgttgagtgatagacgggaaagttgaagttggggtggattatatggataagccttgttgcctcaagtccttcaatcaagtgggttgaaggcggtcctccaggaactcctggcaaaggcaggaccatcaattcctcatccaataatggcaaaagctaagtaaaaggga

SEQ ID NO: 5825 - DNA, 258 bp, Glycine max
  Clone ID: 701097409H1
ggaaggaaaaatggagttgttcttctacgcggtgttcggcggtttgggagcggttgttgcagtgacggagctgagcaagagcaacaaggaccgaatcaacacctcttccggattcaattccttcaagaacaactaactcatcggctaatccctcatgatgggtggaaaattggtaacagggccaaaaggccaataactttaccagtccttatggttttgggaggggggccttaggccactcctccatgccgggtttgg

SEQ ID NO: 5826 - DNA, 74 bp, Glycine max
  Clone ID: 701097410H1
ggagtgttgtagtgtgaagaagaggaagaatgagtcaaccgacacagcagcgcctctatgatttcggcacaatg

SEQ ID NO: 5827 - DNA, 257 bp, Glycine max
  Clone ID: 701097411H1
ccgctcgagctcaacttgagaattttccccaaaaatcccaagagctcgcgccatggtttccccggacaacagcaattggctgttcgattacccgttgatcgacgacgacgttattcccgtcggcgactcctccttcagcgtctccggttccaacttcttcttgtccccacctcccggcaatgttagggttgaaattgattgttcggcttggggatcttgacggcttaaaaattcctgtttggacgaaagggcttaat

SEQ ID NO: 5828 - DNA, 265 bp, Glycine max
  Clone ID: 701097412H1
tgggtgttgatctttggttgaagattcaagaggaggcaaggttagatgttgatcaagaaccaattttatccagctactatttcagttccattttgtctcacaaatctttggagagtgccttgggcaaccacctctccacaaatttgagcaagctgagccttccaagcagcaacctttttgaccttttcatggggggtttgggtgatgatggaggtggtggcatcgtaagtggtgtggagggtgaattgataaccggtaagggggg

SEQ ID NO: 5829 - DNA, 259 bp, Glycine max
  Clone ID: 701097413H1
ggccatagtcatagataaaaaggaagtgaagagactagaaccaaacaaaagaaaggtccattatggattactctgatgatctctctacacctttgctttctcgaagtctcagcttgccttgtcggaattccctcctgttccggtcatcacacttctttctctgggcaatccctcagattcaacctctctagctcattcccaacaacaaacttcaagggttcaaaatacataataaatcataacggggaaaccagaaaag

SEQ ID NO: 5830 - DNA, 257 bp, Glycine max
  Clone ID: 701097414H1
tctaagttcggctcgagattgcctggttctcgatttccttcctttctcttagtttgtgttgtcgttgtgaagtcgcacataatcttcttccttctcgaatttcctctccttcgacgatgcttagggattcgcgtcgtgcaccaacgcgcgtggtttctcttctcttcacgaatttggggtcgaaagttcgaggttagcctgccggcatgtccatgagtgagcggaagactttttacctagatcaaggatgggatttt

SEQ ID NO: 5831 - DNA, 262 bp, Glycine max
  Clone ID: 701097415H1
ctcgttcgtttcatttcgtttcgttgaagagcaacttttctctctctgtctctgtacaattctcccttatcttccctcgtagatcgaaagggaatattcttccatggcctccaagcggattctgaacgaggtcaaggacctacagcaagaccctccaacctcttgcagtgccggtcccgtagcagaagatatgtttcattgggcagcaaccataattggtccccctgataacccctatgctgggggtgtttttctagttacc

SEQ ID NO: 5832 - DNA, 241 bp, Glycine max
  Clone ID: 701097416H1
gctgacctgacaatgattataggagccatgtatgctgctgtcattcttgttcgcattaacaattgccaaactgttcaaccaattgtagccgttgaaagtacagtggtctatcgcgaaagagctgccgggatgtatgctcctttggcttatgccctagccccggggagcagattgatttacttcaaagaataattttagtttctagtgttcaatgcttgttatgacgtcaatgccgtgttac

SEQ ID NO: 5833 - DNA, 253 bp, Glycine max
  Clone ID: 701097417H1
ctctcaaatacatagaagatattcttctcaatgtggcagctcaagtacctgacagtggtccttgcgtgacttatcttggtaaaggtgggtctggtaattttgtgagagagattcaacaatggaatgagtaatggtgaattcagctgaattccaaaggcttataaggtccggaattcagttggaaagtggtcaattgaggactaacaaggggcctcctcggattggaccaaggaagacctccgaagttcccgga

SEQ ID NO: 5834 - DNA, 247 bp, Glycine max
  Clone ID: 701097418H1
aaacacaaacacttgaagtactaagttagtgtttttgagcaaactatggcttcgttttgttctagattgaccatttgtttggctctggttgtcctcaatattggggagttgcaatgcccaactttctaccaacttctaataacaatccgggtcaaaacttctcttcaatggggaattccccggtgcatttggcaatttcaagggaaaccggattgggggcttttttcttcggctggtccttcaagga

SEQ ID NO: 5835 - DNA, 249 bp, Glycine max
  Clone ID: 701097419H1
tttgatttcaactttgaagtttagttgttttgtggaatggcagcgaagagcaaaatcctagtccttggaggaacaggatacattggaaaattcatagttaaggcaagcggaagagcagggcaacccaattttggcctaattaagagggacaaccttttctaatctggaaaggcttaacttaatgagaggctcaaagggtcctgagttaatcctccttaaggggaaggtaatggtcaaggaaggcttggt

SEQ ID NO: 5836 - DNA, 146 bp, Glycine max
  Clone ID: 701097420H1
agcattgtttacttttcattgattgagccagagctttgtattttctgcgataattttccattgggtggaagacagtctcaacctttattcgaaagagcaaggatctgagttgagttgagtgatcatgtgtggtggtgcgattatct

SEQ ID NO: 5837 - DNA, 252 bp, Glycine max
  Clone ID: 701097421H1
aatcttcagttagcttcttttgaagtaaactttactttttctttttgaataatgtctttttcttgcacagagttctgatcaaacctcctcagcgtactcgatagttgatactccggactaaggatttacagcacaacaataatgaattatgaaatgcctttacggttccaggaagcctggtttgtggtggggatttgccttgaataaagtttgggccgggaattggtgccttgggtaaaaaattggtaatgg

SEQ ID NO: 5838 - DNA, 221 bp, Glycine max
  Clone ID: 701097422H1
gtgttcaaggaggctcaaaaacagcttggctaccaagctgataaagataatgcgaagtcagtgactgacttgaatgtggaagttcctctgataaactgggaccaaatcagtcatccgaataagtatgcagataacaggtaactctcctgcattgggcatggtaatgggtttgaagattgtgaccttgaggttgaattgggtaatgggttaacaacccaggg

SEQ ID NO: 5839 - DNA, 221 bp, Glycine max
  Clone ID: 701097423H1
cacaattcaattttgagcacttaccaacaccacttccaatggcttcatatcatgaagaagaagtgaggctattgggcaagtgggccagcccatttaacaacagagtagaccttggtctcaagcttaagggggttccctacaaattctccggaggaggtctttgtaaccaagatggcgatcttctcaagtaacaacccggtcaaaaaaagggtccgggtttg

SEQ ID NO: 5840 - DNA, 233 bp, Glycine max
  Clone ID: 701097424H1
agacaattttccaattcaattatcgattcccctactcacaaaaattaacatgcaatccatttctttgttcaattcctcaccaatattattccatccattttcaccatctagggcatgttctaatgggaagaaaaatgattcggttgcttcaactaagggtttcaatgaggggttcacgggtccagacttccgttggaaggttgttggttgaaaccttgttattcctgaggaga

SEQ ID NO: 5841 - DNA, 256 bp, Glycine max
  Clone ID: 701097425H1
ggctcgagaagagttcgactacagtatcttgctccatcggaatctttcctcgtttttcagtcgccaatattactgtcactaaatcaattgacaaagcactatcattcccttttacgagtattacttttgatatatgcatgaaattgaaataaaaatcacctaaatcggatttcaatttagataagaccaaaacggatgtgtatggcggatattaggggtggaatcggaactttccggttgaatcgaattttccccg

SEQ ID NO: 5842 - DNA, 261 bp, Glycine max
  Clone ID: 701097426H1
tgaaggcccttaaactttcgctctctctgcttcactttctcgcttttgcattttcttgtgacaaatcaaaatcctcagaacagaaataggtcttcttcttctctgatctaccaaaggttcaaattcaccttagtttgggttacccgtgagtttggaaggtaatgtctgcggcgaagcctggaacgggggagggacggcggacaccggggtgtccggttcttcggaatccctgggctggttcccccaaaatgggggtggatt

SEQ ID NO: 5843 - DNA, 265 bp, Glycine max
  Clone ID: 701097427H1
tgaaacaaagaagaaaaaaaaaactcaaacaccttcaagaacttgtatctttctttgttagtatttgttactacaattttacattcttttcatctctacatatttcattagtcatggcacctcaagcagtttccttcaagtccttcggcggtgctcttattgtggccgttttcttcttcggctccggtccgggcttaatttcgggggaatcgccggttccggcggcggtggcggcaccagatgccggaacagctggattcgtttt

SEQ ID NO: 5844 - DNA, 245 bp, Glycine max
  Clone ID: 701097428H1
cggctcgaggtcttggtcgtcgacgcaggaggcagtagtagcagattgtgaagaagaacgaaactggctggaccttccgcgagacgtggtgtgcacgattttccagaagctgggcgcaatcgaaatcctgacgcgggcccagcgcgtgtggtccgtgttgcggggcatctcgaaagaggctttccttttgcggaacaacgacatgcggaattccggcgacattgaaaccaacttcgtgttcttgg

SEQ ID NO: 5845 - DNA, 264 bp, Glycine max
  Clone ID: 701097429H1
cggctcgaggcagattgacctccattatagtttgttatcatccttgtcttcagcttcttctattggtgaacctttataacctaattactacatatagcaattgtatagctcaattgctaaccttgtgagttctgagcaattgttacaattagaaaaccccaaaacatgggttccttggtcggagactaaaaaggtttggtgaagtgggaatcctagagggctaataagggccagggaaggctaagggtccaaggggctttatta

SEQ ID NO: 5846 - DNA, 266 bp, Glycine max
  Clone ID: 701097430H1
acaaacctgctattggttctcttgtatgagccagcatttattgagatggatggccacccacctgtatcgatcacagcttttaattctcatttaatccgtcatctgaacatactatgtcatattagtactatgtttcttcttctaatttcccaaaaggctaaaattcgggcaattcaagctgaatctttgttcttaatttcagctaaggaagaacgatgaactcatgatattgattagcctctaaaaatggttattcttcggcaaca

SEQ ID NO: 5847 - DNA, 265 bp, Glycine max
  Clone ID: 701097431H1
ataaaaaaaactcaaacaccttcaagaacttgtatctttctttgttagtatttgttactacaattttacattcttttcatctctacatatttcattagtcatggcacctcaagcagtttccttcaagtccttcgccgttgctcttattgtggcgcttttcttctccgcctccgctctggacttagtttcggggcagtcgccggtgccggcgccggcgccggcaccagatgccggagcagctggatccgtgtcgagctcggtcgcc

SEQ ID NO: 5848 - DNA, 265 bp, Glycine max
  Clone ID: 701097432H1
aacaaaaagaaagaatcccaggcgaggagaaagatggaggggaaggagcaggatgtgtcgttgggagcgaacaagttccccgagagacagccgattgggacggcggcgcagagccaagacgacggcaaggactaccaggagccggcggcggcgccgctggttgacccgacggagtttacgtcatggtcggtttacagagcagggatagcagagtttgtggccacttttctcgttctctacatcaccggcttaaccgttatgggag

SEQ ID NO: 5849 - DNA, 256 bp, Glycine max
  Clone ID: 701097433H1
tgccacaatccctctctctctccgacgtacatttccatctttttagggtttcatttcatggactccgattcctggatttccacgcgcctctcttcctcttcaaggcgccaccattatcgatctgatctgtaagccgaagagaattaaaggaacgatgaattcaaggccgaatttccaaggcccttctgcggcgaaggataagaaggcggttccctccggtggcaaaattgaggacaacaacctaatcaaagcaaaa

SEQ ID NO: 5850 - DNA, 245 bp, Glycine max
  Clone ID: 701097434H1
cattaatttacatccttaaacaaaccttcccctacttctctcaaattctcctctctcttcataaacccttctcattattttcagcttaatttcctcactagtcattaatgggaaaccaacaccttgcagcgatggtggtgctaatggttccggttctgacattaacaactgctaaggccttggatgatgaaaattactatttcagccttgcaggcaatgaggcttctttggacctcggggtttcc

SEQ ID NO: 5851 - DNA, 255 bp, Glycine max
  Clone ID: 701097435H1
agctagcaagggtgttgtagtatagttagagatatcactactacaccaccctgcatagtttgttcagctataatactacttgagcttctttaactacttttccaacctaaattggacaccaaatgggaacctcctgggccaggtaaccaattggcatgcctccttttaaggccaccaatggaaccaaggagtgaattggcagggaaggacttgggcctggacctggttgggttgggggttgaccttgacctgggt

SEQ ID NO: 5852 - DNA, 258 bp, Glycine max
  Clone ID: 701097436H1
ctgaaactgcagaacactttacgaacgttctgccactgggaattgggcattcttcaacaaatgagaatgaacaggtattcctatttgaagaatcctaactacaccactgtacaagggggttcaaccggggttaaattagcccaacttaaccaatgaaaccttaaattggggccacctttattgggtatgacccccgggccaagcttcctaatcctccggatccggtaatggttatcccaggaaccttggataggaggg

SEQ ID NO: 5853 - DNA, 244 bp, Glycine max
  Clone ID: 701097437H1
attttctcctaactttgagagcatgggtaacttctatttttttggcgctgtccccttctccatcatctttacttcaacctttaaacttcctttttcaactattaaaattcctgactatgttgagggaattaagaaaatggggttggtggcggtggcaaccggattggaagtccccaaggtcttaacggtaagcggaaaccgggtgtaaccgggttaggacggcaaggaacaatccccagttttg

SEQ ID NO: 5854 - DNA, 251 bp, Glycine max
  Clone ID: 701097438H1
gttctagatcgcgagccgccgcccttttttttttttttaaaccaaagtttaatctttcaaaggctcaaacctaccatgttataaaaaaatccggggcgaaatcaaaattttttttccttttgggctaaaaacatttcgggttaaaaacctgggggccaaggcttgaataatttcaactgcctaaacccccgaaaaaaatggcttaacctttcaaatcctcgggtttggccccatgaaagcgggctggaatc

SEQ ID NO: 5855 - DNA, 209 bp, Glycine max
  Clone ID: 701097439H1
ttttgtgattgagttagacacaaattcaaatcctaagagtaatgctactacttataatatggtttagtgtgtgaaaatgatgattccaagtggttaaacgtttcaatcaatgcgttatggacgttgatctggggtgtggttgatgatctaagccagagtgattggggttaatttgaaataatgataataattttggaaggaaggtattt

SEQ ID NO: 5856 - DNA, 53 bp, Glycine max
  Clone ID: 701097440H1
caacgatcggataatttctcttgaactacagctgtgtgcgtcagagatgacgt

SEQ ID NO: 5857 - DNA, 239 bp, Glycine max
  Clone ID: 701097441H1
ccgggagctctcagctcactaacaccagctactactccctccccccaccccccactctctcacaaaatgtgccagggcctctccgccccatcgccggcgtgttcggcgcttctctccttcacgctcctccttctccttctctccgtggttgggccgggttcgggaatggcggccttggcccaagagcacaaaatggaccttcacgattaatccttcgggggcttccaggaattccaagg

SEQ ID NO: 5858 - DNA, 247 bp, Glycine max
  Clone ID: 701097443H1
agaacctgagttcccactccgattggagacaaggtctcgaagtcaagccatttggaggcggccatcagagaggcatgttcctaggatagtatcttctcctgttgttgaaacaagagctgatctttctgctattgaaacccagggtcggaatttgggtgaagggttgaagaactccgatggtgatactccaagggaaggaacagcaggacttcggcttcctggtaaggaccatttgggttatccgatt

SEQ ID NO: 5859 - DNA, 105 bp, Glycine max
  Clone ID: 701097444H1
gtcgagcaattcgaagaagagaagagaaaagataaggaaataggttaatggcatcactgggatctccgtcttctttctggtgctaccgctgcaaccgcatagtta

SEQ ID NO: 5860 - DNA, 256 bp, Glycine max
  Clone ID: 701097445H1
gtggccttttccctctctttctctggaaaattcccccgattttctcgagaaagtgaaacggaattatgagctttcaggacatcgaggctgggcggcccttcagttcgaggcgcgggttgatgaacgggaagcacagaccgacgcaagcggtggctgccggaatattccagatcaacaacggcggcttcaacttccagagactcgtcaacaacctcggaaaccccaaagacaaccccgaacttcgggaaaaacttca

SEQ ID NO: 5861 - DNA, 256 bp, Glycine max
  Clone ID: 701097446H1
ctcaaaccgagagaatacgctgccttgaaggactgcgctgaagaaatcagtgacagcgtcgaccggctcagccggtcgctgaaggaactcaaattgtgtaaggtgaagggtgaggacttcacgtggcacatcagcaacgttgagacgtgggtgacttcggctttgaccgatgagagcacttgcggcgatgggttccccgggaaggcgctgaatgggaagattaaggaggcgattagggctaaaatgggccatgttg

SEQ ID NO: 5862 - DNA, 262 bp, Glycine max
  Clone ID: 701097447H1
cggagcaacttttccaaagaagagcaacaagctctgcagacatggaaccaattgaaccacttaattgataatgttcagggtttacccaatgcagcagaagctatcaaggaggctgccagtgcatggaatagctttatttcctcaattgaagagcaaaaacaaggtcatggaaatgatagttcaagagctaaagagaagcagtgtccccattttcttaataaaatgaattccactgacttggtaatagtagttataaactgcc

SEQ ID NO: 5863 - DNA, 263 bp, Glycine max
  Clone ID: 701097448H1
ctcttggtgagatgaatggtaaaatgtttgctggaaaacctctgtatgttgcccttgcacagagaaaagaagagagaagagcaaggttacaggcacaattttcacagatgaggcctgttgcaataacgccttctgttgcgccccgtatgcctctctaccctcctggtgctcctggtcttggacaacaatttttgtatgggcaaggacccccagccatgatgcctccacaagctggatttggttaccagcagcaactagttccg

SEQ ID NO: 5864 - DNA, 87 bp, Glycine max
  Clone ID: 701097450H1
atcgcgtttacgcaaccccgtggacgcgaggcacaccaacagcagcaacccgctactgctgcagtgtggtggcagttgccatgcttg

SEQ ID NO: 5865 - DNA, 233 bp, Glycine max
  Clone ID: 701097451H1
tggcaggcacgggttcaagatatggagacagagtcatttattcgaagcaataacaatacgaacataatgtctagtgttagagagaaataccgggtggatggagcggagttgttgaaggccaatttcgataacgcgttggaaacaacgaccttgaattttgtggtaaagttggggtattcgaaaccggctaaggtcctgaaggtcccaggttaaggaggatcttcccggtccgg

SEQ ID NO: 5866 - DNA, 225 bp, Glycine max
  Clone ID: 701097452H1
cgaaatcttgatctctctgctgttgtgttttgttaatctcattcagacaatcacagttatactctctctctctcaatttgaacactgatctcatctcaattttcagatatgtcgacatcttataagcccggagaagttgaaacggggtacaaaggttaaaaaccccaaggaggttgttcagcaggaggggaaggttggttcaattgagaaggtgaaggtttccat

SEQ ID NO: 5867 - DNA, 219 bp, Glycine max
  Clone ID: 701097453H1
cgttggtgcaaagcatccttcgtttcaatttctctctctcagcgctttctgcaatcgaacctttcatctccaaagggatccacaggccgaaggagatatggggctgaccatcacaaagcttttcagtcggcttttcgcgaagaggaaatgcgattctgatgggtggtcctgatgctgctggtcagacactatcctgtacaagctcagctcggagagatc

SEQ ID NO: 5868 - DNA, 254 bp, Glycine max
  Clone ID: 701097454H1
tcttttctcggaggatgaactcctccgagaaaagatattccgacacgagtgacgaggcgtgtcgggagtgggggttcttccaggtggtgaaacatggtcttaagcatgagttgatgaaaagttctagggaactgtggcgcgaattccttaagcaaccaatttagcttcaagaaggataatccaaattccccaacaactattgggggcaatgcaatcggtttggaattgaaaaatgttgcaactttgaattggat

SEQ ID NO: 5869 - DNA, 225 bp, Glycine max
  Clone ID: 701097455H1
ctgggatctgcttccttctcttctctttctcaattctcattcataattctaattcattcctccgatctgcgactttctatttctccctcaacacaacacgagaccacatgttcctctttgactgggtctaatggcatctcgccttcctccgtctttgggaaaaaggaggccaaattctcctccttgggcccggttattgcgggcaaaccgaccttcttcaacatg

SEQ ID NO: 5870 - DNA, 247 bp, Glycine max
  Clone ID: 701097456H1
aactcggaattgagctcaagagacaattatccagttcaatgatcgattcccctactcacaaaaattaagatgcaatccatttctttgttcaattcctcaccaatatcattccatccattttctacatctaaggcaatgtctaatggcagcaaatgaattcgttgtacaactaggcttcatgagagatcgcgatcgaactcatggaaggtgtgatgaagctgatatctgagagaggtcatagtgacat

SEQ ID NO: 5871 - DNA, 236 bp, Glycine max
  unsure at all n locations
  Clone ID: 701097457H1
taggcactgctaaaacttgtccttttcctttccccccgcaaataataacataaaataaaatccaacacatttaaaatatagcacgncancaanggtgtcnncgnaacggatatagcataaccgtttgaacagtctttangaaaatcaatctgcaaactggatcatcttgtaattctcagatcatagatctatatgtatgagttttgaagagaaaaaaaggagaaatttgatctttg

SEQ ID NO: 5872 - DNA, 251 bp, Glycine max
  Clone ID: 701097458H1
gtgaaaatggcggtacccttgctctccaagaagatcgtgaagaagcgcgtcaagacgtttatacgcccccagagtgatcgcaagatctccgtcaagccaagctggcgcagacccaagggtattgattctcgtgtcaggagaaaagtcaaaagatgcactttgatgcccaacattggttatgggtcagaccagaaaacccggcattatctaacaaatgggttccaggaatttgtcgggcccaatgtggaaga

SEQ ID NO: 5873 - DNA, 255 bp, Glycine max
  Clone ID: 701097459H1
gtcaaaaccgctttgattttattgtcacggtgacaattgccattggagaaactgtaacttttgctgtacctgatgatgatcttcctttcatctcatatggagaatggattcgttaccttcttcttgcaagaatgttgagattaataaggatcctaatgtatgtcaagcgataccgagcctttgtgggaactttaatgactctcataccaagtttgatggcataactaaggatcataatttggaacctgggtaatt

SEQ ID NO: 5874 - DNA, 254 bp, Glycine max
  Clone ID: 701097460H1
gcttgagcaatgctttgagacgatatggtgtatgactactgggaaaagttatgctgtcactaccctgtgccaatttaatttgaacctctgggatacctttggtcaacgactcaatgtttgtatgtggaagcatggtttttcggggacatagatttaaagtctagtttgtggggctaagaatgttgaggatagctaatggtgtgtttctagtaacgaggtggtaaacgctggctgtcggtacatgataatagctg

SEQ ID NO: 5875 - DNA, 235 bp, Glycine max
  Clone ID: 701097461H1
ggagaacaagatggttataccaacaaaaaagatctagtcctagaatccaacaggggcgacctcacctccaagaacacatagccatgtcaagaaacttgcttcatgttctttttgcagtagccaccttcctccatggctcagaagctcaaaccagacacgtggtagggtgatggcaagggctggaataatccttccggcggcggcggcaactaaaacaacttgggttccaacaaaa

SEQ ID NO: 5876 - DNA, 200 bp, Glycine max
  Clone ID: 701097462H1
ccttcgagccgaatcggctcgagcggctcgagctcttcagatctctctcccttccttccatcacaaccacaaggttgctgagcagacataaccatggtgagatttgctgcattgagctgctatgtggtagccaacatggctgattgccttgatgtctgagacgaagtgtcgcgtgacattgctgcacgcgaatcacgcgt

SEQ ID NO: 5877 - DNA, 261 bp, Glycine max
  Clone ID: 701097463H1
gtgggcttcagaggaatttggattcatcacaccaagcgactctgtttcaaccggaagtagtataatgcctcagaaaaagaatccagatccgatggaacttgttcgagggaagtctgccagggtcataggggatcttgttactcttctcacattgtgcaaaggacttcctcatgcttacaaccgtgatttgcaggaagaccaagaaccagtgtttgacagcgttaaaacaattttggggatgcttgaagtatcagcagaatt

SEQ ID NO: 5878 - DNA, 262 bp, Glycine max
  Clone ID: 701097464H1
tcgacaataaaggtattgcatgagcttgtcaaaacacaatatatatctcctctaagcatggagtcaacaaagcagtctataactgagaaacaagctaaggagctgagagacatgaaaggaggtcgtggcattttggacaatctcaacagtagggaaagacaaatcaggggaattgaagcatcatttgaagcagctaagtctgatcctgttcatgcaaccaacaaagatttgtatcctgttgaggttatgccgttgctgcctg

SEQ ID NO: 5879 - DNA, 73 bp, Glycine max
  Clone ID: 701097465H1
ccctcctcctccctacaagtaggcatctcctccacctcccccatagaagtactcatgtccaccatcccagtct

SEQ ID NO: 5880 - DNA, 127 bp, Glycine max
  Clone ID: 701097466H1
gatatcctccatatgatgaaggtgaaagcacggtctggaacatcagacacagggaatggaaaacgcaccatatcacaacacattacacatggctttcacttgatgtagggcacatcagcgcatccta

SEQ ID NO: 5881 - DNA, 223 bp, Glycine max
  Clone ID: 701097467H1
gagaagaaaagtcaaagacaatgtcagggatcattcacaagattgatgagacccttcatgtgggaggccacaagaaggaggatgcacacaaaggtgaacagcaacatggtggaaaactaaaaagggcagaaccatggtgaccccagtattgattccaaaggaggcctccattttggtgaccccaagccggacaaccaggaagaggattaccccaaaaaggggt

SEQ ID NO: 5882 - DNA, 100 bp, Glycine max
  Clone ID: 701097470H1
gaaatagtcagaaagatgacttccattgtttcaggtttgcaaggccagcctccacaaggacatgaacatggatacccttttgtagctggaaggaaaatgt

SEQ ID NO: 5883 - DNA, 77 bp, Glycine max
  Clone ID: 701097471H1
ctcattcgtactcaatagcttccttttcagcactttcactatagtatacttctgactctgagagattctctcttcga

SEQ ID NO: 5884 - DNA, 239 bp, Glycine max
  Clone ID: 701097472H1
cgagcccgtgcccatggaattgacgggggaggagaaggacgcagagcagaagaaggctgaggctctgaaggaaaaggaagcgggcaatgcagcgtataagaagaaggattttgataccgggattccacaatacaccaagggcttggaattggatgaagaagataattcggaacccaataaacggggcggcggccaattgggaattgggaaggtagaaggattcattaaaggatgggaac

SEQ ID NO: 5885 - DNA, 224 bp, Glycine max
  Clone ID: 701097473H1
cccttacagagttctgtactcctgagaattgtcggacgatgtctgcaggacccaagtatggcatatttaactgtctgatttccttgtttacatttcctttggaggggaaaagcatttgtatgcttttagaaattcagtcggatgataatccttcaaatatccttgcagttgaattgaatgaggaaattaatcagcttcttgaaacatgtggggtgtggaatgaa

SEQ ID NO: 5886 - DNA, 227 bp, Glycine max
  Clone ID: 701097474H1
ctcatttcccagatcatttcgtcgctaaccacttccttgaggtttgatggcgctatcaatgtggatatcactgagtttcagaccaaccttgtggcataccccaggatccacttcatggtttcttcttatgctccgggtaactctggcggcaaaggctaccacgagcaattgtccgtggcaaagatcacgaatgccggggttgaacccgcgaacatgatgggcaaatt

SEQ ID NO: 5887 - DNA, 253 bp, Glycine max
  Clone ID: 701097475H1
actggatcaagcatccgtgttcttgagcatatattcagggaagatgcctacttgtctaacctccctgtttccattataaactcttggtatcaacgagaaggttatattaagtcaatggctaacttaattcagaaagagcgccagagtttttcttaaccaaaagaggtaatgatatttttcagtgcccatggtgtacctgtcaagtacgttgagggagctggggatccataccgagaccaaatggaggagtgca

SEQ ID NO: 5888 - DNA, 194 bp, Glycine max
  Clone ID: 701097476H1
gctgaaccatcttctgactcagccaaagtccaagaactgagtgtgtatgagatcaatgagagagatcgtggaagccctgcttatcttagattgagccagaaaactggtcaattcccttggtgacctagtccccttcagcaataaagtgtaatctggatgtttgccaaagaaggtaaggattacagctggaattt

SEQ ID NO: 5889 - DNA, 252 bp, Glycine max
  Clone ID: 701097477H1
cacaaatcattaatcaaccaccaccttaacacaacaacacgatgatgtccatcttcagccacttcgagatcgcgcaggcccagaactggagcttttctttgctcccagtaaaaagcacgaattcgaagcccaacacagaagccacttcctcctccgctgagtccaaaaacggcagaaaagtttccaatctatcacaacccggtggattcaagcaaaacccggcccggttgagggccagatttgcggcggagt

SEQ ID NO: 5890 - DNA, 257 bp, Glycine max
  Clone ID: 701097478H1
atcaggaccctactggtcttgcatgcagccaaggaaggtacttacagttagttttactgaacctaacaaattgctgtatcgtatatatgctaggcacacagattttgaaaccaggttttacaataatagctgatcacgagatgaaatgccttttgttattcaatcgtggcacacatagtatccaggatactctaacagctggtacaggaaatgtgatatcaggctgaagctggtggcaggatctgctgaaggatatt

SEQ ID NO: 5891 - DNA, 256 bp, Glycine max
  Clone ID: 701097480H1
ccgcgctttagaatccccacgcactctccctgaagatagaacaaacaaatcaagcattccatagttcttagatagggcacgcttctctcccttgcgccgcctcacaaaaggttattggcctattattgtctgaagatcgttgatggccatgatactgataagaacattgaggtgtggaaaatcaagatattgatcaaagctcttgaggctgctagaggctatgggacaagtatgatttcccttatcatgcctccac

SEQ ID NO: 5892 - DNA, 244 bp, Glycine max
  Clone ID: 701097482H1
ggaaaagcaagattttcagggaaggacttagtatctcccaattctcaggcaaggacactccggccacttataaatagcaaagcaacctttccaaaaccatggcaaccccacctccaatttctcctccctttgtggtttcaaatcctttccttggtataataatctccttcaattttgtccaaaccctgggatcggacttgccattcttaatgaggcaaccggtcaattttggggttgaggtaaa

SEQ ID NO: 5893 - DNA, 183 bp, Glycine max
  Clone ID: 701097484H1
ttcgaattcagatttcgcattcaatctttgtaactgacagataaaggcgacaatatctcatctttcctctcacaccatcaacaaaaccaaataatgatgatgcagaacgccacactagcaacaacccctttcggcggtttgctccttaatccctcctcaactggcttccaaggaagaccaacc

SEQ ID NO: 5894 - DNA, 93 bp, Glycine max
  Clone ID: 701097485H1
cggctcgagtggtggtgttgtttctattcctggggttttggcttggtatgttgtctggtcgaccatttcatagcaggatatccgtataattgg

SEQ ID NO: 5895 - DNA, 80 bp, Glycine max
  Clone ID: 701097487H1
aaacctttccctcagcaacggaatccaccaaactctcgcatcaatcttcgtatctttagagagagagagagagagagaga

SEQ ID NO: 5896 - DNA, 208 bp, Glycine max
  Clone ID: 701097488H1
gtcagttggcagttttttcttagaatgaaaatgtcgtctaaggtcactagtgccaccctttgcctagcagtcttattcctcttcttaaccttcacatatgcaggcagacttggccccgcaacttcccctatcaattcaatcaaaactccacaagggggtttggaagaagagaaattggaacgtgaagaaacttgtgaatggaatgggg

SEQ ID NO: 5897 - DNA, 249 bp, Glycine max
  Clone ID: 701097490H1
accgaacaatcgcatatttctgttctgccttcttctactcaatacattacatagctctagtctcgtttccaggtttgtaataataataattttagtttcttcgttacgcctgcgttgtgcgtgagaaagtgcgcgtggatgtaaccatggcttctcagctcctgagacgtaccttcgggagtcgcattcttgccaacccttagggcttctacttcttcttcggatgtttcaattcggatcggggcaatc

SEQ ID NO: 5898 - DNA, 255 bp, Glycine max
  Clone ID: 701097491H1
ggaaatcctttgtcttgtgctcgatggtatagagcacaagtattcagcttcttctcctacccagaaaggttgaagttagatgagaaagaaattaacactagtgatttttggaagagacaaatgattattgccagtatgcataagcgacctgccagttttgggaattatgtgcctgccaaggatgaagctggcattgaagggggccatatcagaagggaaaaggtctctcggcttgtcagtattaaaaatggagag

SEQ ID NO: 5899 - DNA, 219 bp, Glycine max
  Clone ID: 701097492H1
cactcgagccgaatcggctcgagttctgattgaccttagtccatgggcacatgcagcggcggcggacgaatcggcagcaccacctactccgacgaccatccccgccgcaacggcatcaccgtcctccctccgaactcgaaactttcaaccccaacagcgacctccttggtgggccggcgcattgaagacatgcgaaccatttacatattcgggcgggaa

SEQ ID NO: 5900 - DNA, 256 bp, Glycine max
  Clone ID: 701097493H1
ccctctcctgagtctcataatattagttgtataagctagcaattcatttgataatttctgtatcgatcaaaatatatatagatatatttcttcgatatatatatatagcaatggttgcgccttgtccaacatccatgatggtaagaaccaagaaaacaaagggcatgggagttccgacaatagacctttcaatggaaaggtccaagttgtcggaactggtggtcaaagcatgtgaggaatatgggttcttcaaggt

SEQ ID NO: 5901 - DNA, 258 bp, Glycine max
  Clone ID: 701097494H1
tgcttcccgaagaaggagtagcgtagaggaagagtgcgaaagaaagatcgttctcgatgacagaggggaacggtgacaaaactctgcgaaagatcgcagacgcattcaatgaccttgcaaacgttttcaccgattctcagagcgcagaagcagaggtcaagggtgctcccttctctcatgcctgctctctcgtctcccctctcttcggttgcttgggcgtcggcctcaagttcggcgaaatggattacgtcgccaaag

SEQ ID NO: 5902 - DNA, 256 bp, Glycine max
  Clone ID: 701097495H1
cttatcttagctaccccatcacaacaaccacgatactatttctcatactctattaggcaaaaacaccaccaaatgggagaggaaaaggagcagcctaagaatgacaccgagaaaaagcccgaggaggtagcccccaagaaagacgacggacccatccctgtcgtttacaaactcgacttgcattgcgagggatgcgtcaagaagatcaaacgcacctgtcgccacttcgaaggtgtggaaaccgttaaggcggatc

SEQ ID NO: 5903 - DNA, 258 bp, Glycine max
  Clone ID: 701097496H1
gttgaatgcacatgctggtctccggtccggttagggcatttctgggaccttaaatcaccaatttctcacccaatcaattccaattaagctgagagtgtttctgatctatatgtgatgggtgctccgaagcagaaatggactgcagaagaggaacaagcacttaaagccggagttgtcaagcatggtgttcgtaaatggcgcaccatactgaaggatccagagtttagtagtgtcttgtacctgcggtcaaatgtggat

SEQ ID NO: 5904 - DNA, 276 bp, Glycine max
  Clone ID: 701097501H1
tctgaaatgcagaatcatgatagacaactatggaagttaggaacactgccaccgggtctcataacattctggaaacgcactttccctctgaaccgatcttggcacatcttaggtcttggctacaaccccaatgtcaaccaaagagatatcgagcagtctgctgttgtacactataatgggaacatgaaaccttggcttgagataagtattcccaagttccgaagttactggacgaagtatgttgactacgatcatgtgtatttgagaggatgcaac

SEQ ID NO: 5905 - DNA, 234 bp, Glycine max
  Clone ID: 701097503H1
cacacgtaaacacattcagacaccaccatgataactctagctccttctcttgatactccaaaaactgatcacaaccaagtttctgatccccaaactagccatgtcttcaaatcaaaattaccagatatcccaatctccaaccacctccctctccactcctactgcttccagaacctctcccaatttgcccaccggccttgcctcatcggcggacccgcgtccaaaccttcacct

SEQ ID NO: 5906 - DNA, 258 bp, Glycine max
  Clone ID: 701097504H1
gtggcgtctcatgcccatacatctgcggcaagcatttggatcatggggttcttttggtgggctatggatctggtgcttatgctccaattcgttttaaggaaaagccttactggatcataaagaattcatggggggagagctggggataagaaggatattacaagatctgcagaggtcgcaatgtatgtggggtggactcgatggtctcaactgtagctggtatacatgtctctaaccattaaatataaggatggatgc

SEQ ID NO: 5907 - DNA, 241 bp, Glycine max
  Clone ID: 701097505H1
cgtttttcgtttattccttctttcatccattctactttcttttcctctcgctagtgtttagtgctaggtgattgattaacttagaaggactttgtgtgttacaagaaaacaagggcaagtttcatgtctgaatttgacacgaacatcccaactggttttgatcccgttgctgaggcaaatgctgaggactcaggtgccgggacaaaagagtatgttcatgttcgtgtacaaaagcgcaacg

SEQ ID NO: 5908 - DNA, 251 bp, Glycine max
  Clone ID: 701097506H1
ttctcactctgtcacttgacaaagcctctggctcgggtttccaatccaagaacgaatacctttttggcaaaattgacatgcaactcaaactagtccctggcaactctgctggcaccgtcactgcctactatttgtcttcaaaaggagcgacatgggatgagattgactttgaattcttgggcaatttgagcggcgacccatacatccttcacaccaacgtgtttagccaaggcaagggaaatagggagcac

SEQ ID NO: 5909 - DNA, 228 bp, Glycine max
  Clone ID: 701097507H1
aatcgagccgattcggctcgagctcagctaacctcaattttatgtataatcgtccctggtaaataggctttttagatattaacatacagcatcgttttctatgatgatcacacagtgccataatttggatttctagcgacagcctatcgtattacgaggttaaagttcatgttttgtttcctcgttttgatgcactgattttataattactttatcaactgttcatgc

SEQ ID NO: 5910 - DNA, 258 bp, Glycine max
  Clone ID: 701097508H1
aaagcattccaggttccattaagaagctgcagcagttggagacattagatcttaaacacactcatgtcactgtattgccagttgaaattgtggagctcccaacgattacgccatctcttggtgtatcgctatgagattgaatcctatgctaatttacattcaaggcatggcttcaaggtggcttgccctataggacttatgcaatctttgcaaaagctatggtttatagaggcagatcaggctttgatgattgagcta

SEQ ID NO: 5911 - DNA, 262 bp, Glycine max
  Clone ID: 701097509H1
ggttataccgattagtgttactaaaacaacgtttttgtgatatcgagaaaaaagaaaaataaaaagtgatgtcgaggagaccggggaatccttatagaaggttcggtgacagtggcggtggactgttctcgaaatctaggtcgccaccggttttgtctattgcgctcgtagttgtgggaggtttgtttctcgttggctatgtgtatagaggctcaggtggaattggaaaccgtatagaatctgttagcagggttgaaggtga

SEQ ID NO: 5912 - DNA, 259 bp, Glycine max
  Clone ID: 701097511H1
gaaagtatccaaatgggcatcgattgaacagagcgacgaataatgggtattggaaggcgacggggaaggatcgtaaaatcaagtctgggacgattttgattggaatgaagaagactttggtgttctacactggtcgagcacccaaggggaataggaccaattgggttatgcatgagtatcgccccactttgaaggagcttgatggtaccaatcctggacagaatccatatgtcctttgtccgttgtttaaagaaacatg

SEQ ID NO: 5913 - DNA, 259 bp, Glycine max
  Clone ID: 701097512H1
gaaaagaccatcaaagtttcacttcagccttatccggtttagggtttcggtttttgacccaacctttgacgtatcgaaaccttaagtttcggatcaggtctgagcaatctggttggtagaacctttggtcttagagagtcaagttttatgtctgaattagacgatcaaattcctactgccttcgatccttttgctgatgcaaatgctgatgactcgggtgctgggtcaaaggagtatgtgcatattcgcgtacagcagc

SEQ ID NO: 5914 - DNA, 261 bp, Glycine max
  Clone ID: 701097513H1
acctcctagttatgtttttttcacagtctttctacgatttgtttgagaaccctgcaatattgggtttgtgctcagttattggaatgttttttagtcctctgtgggtaacatttttcttcggtgtcatcgttggatggttgtggaaaccgaaatgggcgaggttggggaaagaaaaattgacgacttccctcgccaagtccttagattttgcctcaccctcctcggcttcttcaccattaaagtctgctctagtttctccta

SEQ ID NO: 5915 - DNA, 264 bp, Glycine max
  Clone ID: 701097515H1
gtgccgcactctcgctcgcagttacagaaaccatgacgacggtggtgcccacctccgaagaagacgctgctctctctgttgtccgattcgcctctgaactcgcctgggccgatgccggtcccgaggttgctgagcctcaagttagtagactctgcatggaggctgaagagtttatcgttatgggaaaatggttggaactagcatcattgatgattacctctgctgaattggttttctcaaaggtttctgaaacagatatagagt

SEQ ID NO: 5916 - DNA, 264 bp, Glycine max
  Clone ID: 701097516H1
tccttgtgatcttcttcaaccttcagagttgagaaactcattcagaaaccacgtttctctcttcttcttcttcttcttctttttcttctctcgaggtcattattaagtattcaccatggaggcaccatctcccaccaaacccaacgacccaacaaaaccttccaacacttccaccacccttagtctggaggccggcccggcacaagcgagccaatccgaaaaatgtttgcgtggcgtccatcgccgccggcatacagttcgggt

SEQ ID NO: 5917 - DNA, 264 bp, Glycine max
  Clone ID: 701097518H1
atcaatccaaggcttcctatttctccaaagcttctgctctttcatctggggcatgtgggtatggctctttggcactagacataagtggtggacaccttgcagctggtgtggattctctcttcaaaaatggagcaggttgtggtgcctgctttcagataagatgcaagaacccaactctatgtagcaaagaaggtaccatagtggtattgactgatcttaatcacaacaatcaaactgattttgtgctaagcagcagagcctttg

SEQ ID NO: 5918 - DNA, 238 bp, Glycine max
  Clone ID: 701097519H1
caaatcaatagttactataccgggaaaaacacaatagaagagtcttcttccccaatctcgttagccgttacggtttacggacagagacagagggctgcgctgcagctgcagctgcacctgcagaatcttttatcagcgatagacgcaatgtcttcgtcgaaagatgcagacccaagcctgggttacctgactcgcaacgacacggaggtgaagcttccgagtgcaaccagggtcaaga

SEQ ID NO: 5919 - DNA, 233 bp, Glycine max
  Clone ID: 701097520H1
tgacatttaagcgtcacctaaccttcttcgtttgctttttaaataattctgcattttctcgcttctttgatcactgcttcgcaaattgatcttcgtcgacgaattgtgcattcctgtgctggtgatgggtatggtttggatttcaaatgtcttacttctcgggtaatgagatgcatcaaggttttaagcacattgatcacggattgatattgctgctctgtgaacttctgggg

SEQ ID NO: 5920 - DNA, 258 bp, Glycine max
  Clone ID: 701097521H1
aaaacaaactttgtgtagttaaaaattagaatgatgaaaaacaatagcccacaagattggcctgagccaatagtcagagttcagtccttgtccgaaaggtgcacagattcaatccctgagaggtatatcaaacccctcagtgaccgtccatctgatgatgccgttgctgttgatgatgccaacatcccaatcattgaccttgcagggctttatggtggtgacccagatgctcgagcctccacactgaagaaaatatct

SEQ ID NO: 5921 - DNA, 242 bp, Glycine max
  Clone ID: 701097522H1
cgcgcgctccccctttcttcttctcctggatctgctaggagaagtgctgcatgctctgaacttccttccatactcttagagatggcgtcttcgtatcccggttccgttagtgccgcgcaggttggttcctacttcgtacgacagtactaccagattcttcgccagcaaccgaatcttgttcaccagttttactccgattccagcagcatgattcgcgtcgacggacattcacttgaaaccgc

SEQ ID NO: 5922 - DNA, 231 bp, Glycine max
  Clone ID: 701097523H1
cgacaactgcgccgcgctggaggagctctcagtcaagcgcctccgcggaatcaccgacgcggcggcggctgagccatcgagtcccggcgtggctgcggcgtcgctgaaaatcgcttgcctgaacgagcactacaacggacagtgtatcggaacgctgattgccggggctaagaatctgaagaccttgaagctattccggtgctccggggattgggaccgggcctttcagtt

SEQ ID NO: 5923 - DNA, 262 bp, Glycine max
  Clone ID: 701097524H1
gcttaattaccccctttgtctctctctctctctctctctccacaacgacgccgtatagatcttcttcttcttcgacgtagtaacagagcgcgcgcgttgattcaaaccatagcatggatgagacttcagctctcatcgatgccattctcagagagcaagagggagaagtagaaggagctcacagaagatgaaggaagcacaccacgtattacaccacaatcagaagtatgagccattggcagacggtgtcatatcacaagag

SEQ ID NO: 5924 - DNA, 254 bp, Glycine max
  Clone ID: 701097526H1
caatcatcttttgtttgttcttcagtactttagtgtgtgatttaattccaagattttgagaatgtctagctgtgggtgtggaagtagctgcaactgtggcagcaactgcggttgcaacaagtactcttttgacttgagctatgttgagaagacaaccacagagactcttgttttgggtgttgggtctgtgagggcccaattggagggtgctgaaatgggtgttgcagcttagaacggcggctccaactgtggat

SEQ ID NO: 5925 - DNA, 237 bp, Glycine max
  Clone ID: 701097527H1
cttctctctttcaccgataaaacaaactaaattcttcttctttctcactgaaaacgatagtaatggcgacgaatccaatcgaagcggggaacggcgacgcgctcctaaccctaacgcgactaccaaaccctccgtctacctccaagacacggaggagctgaagcgagtcttcagccgcttcgacgctaattgcgacggcaagatctccgtcaccgagttggacaacgtcctccgctc

SEQ ID NO: 5926 - DNA, 259 bp, Glycine max
  Clone ID: 701097528H1
aaatgtcttccccagtgatcagcgagatcctcctctctggcttcaccataaactcttccctaagacgcaggacacacttggtgcaatctttctcagttgttttcctccactggttctacgttttctcatgaactaaattaactgacctcgtacataggagtataaacatagtactcgtgttcttttttcaatactacatcacattcagatcattaaatctagctagcaaattagagttattatttattatcattgcaca

SEQ ID NO: 5927 - DNA, 261 bp, Glycine max
  Clone ID: 701097529H1
caaaaacctcagtaccaagaaccctatgccttgacaaaccctaacgttgatttaaatcgtttgttcgcacttcaatctccaagtcataaatacactcttctctccccattcactcgcattggcttttggtagttgaagtctttcattgttgtcaaattcagatcaggcaagtgatagcagctctggggttcgagggctagaatcctccgaagaattcaagagaagagggaaacaattgagagaaaagcatgatcctaacag

SEQ ID NO: 5928 - DNA, 260 bp, Glycine max
  Clone ID: 701097530H1
cgaaagcgaggaagttcgatattgaaaaggcaaaacatatgtggactgacatgctacaatggaggaaggagtttggtgctgatactattatgcaggattttgagttcaaggagttagatgaagtcgtgaagtattatccacatgggcatcatggcatcgacaaggagggaaggcctgtttatattgaaagacttggaaaggtcgatccaaacaaacttatgcaagttacaactttggataggtatgtgaagtaccatgtg

SEQ ID NO: 5929 - DNA, 247 bp, Glycine max
  Clone ID: 701097531H1
cgttgttcgcacgccttgttcggtgaagtgagtagtgagtgctgaatcgaatcgaatcgattctccgaacatggcggcgagcgatcgcacagtgttgcaattctcttcatcatcttcttcttcttcgcagatcttgtccgcgaaggtccaccctctggtcatcttcaacatctgcgattgctatgttcgacgccctgaccaagccgaccgcgtcatcggaaccctattcgggtccgtcgttcccgac

SEQ ID NO: 5930 - DNA, 215 bp, Glycine max
  Clone ID: 701097532H1
ctttgttcagtcttcttctcttgcggctatggttttagcgcacgttcttcctagatttaaggaagatgggtaaggaaaaggttcacatcagtattgtggtcattggccatttcgactctgggaaatccactaccactggtcacctgatttacaagcttggaggcattgacaacccggttattgagaggtttgagagggaagctgctgagatgaac

SEQ ID NO: 5931 - DNA, 256 bp, Glycine max
  Clone ID: 701097533H1
cggatcgcgcattcacaaataaggttgaagagggccctgccggaagaagataaataccgtctttcattttccggcgatctctttttttcttccatcaccgttttccggctatccctaatccttaacagatatgacgacatcaaggcgccttgcggacaggaaggtggagaagtttgagaataacatcaccacaagaggatttgtgccagacacaaccactaaaaaggggaaagactaccctgttgggccagtgctg

SEQ ID NO: 5932 - DNA, 238 bp, Glycine max
  Clone ID: 701097534H1
gagcccttgtctgtgtttgttgacacttatggcactgggaagatccctgacaaggaaatcctcagcattgtgaaggagagttttgacttcaggcctggcatgatctccatcaaccttgatctcaagaggggtggaaatggcagggtttcttgaagactgctgcatatggacaatttgggcagagtatgaccctgaatttcacatggggaagtggttgaagccactcaaggggggagaa

SEQ ID NO: 5933 - DNA, 251 bp, Glycine max
  Clone ID: 701097535H1
actcgagccgaatcggctcgagaattaacactaataacagcaaactaaaggtgaagtttgccacaaacaagatgggaaggaaccattttcagcagcaacactgtgctgatgggagcatgtggatggagagtcagggtcagcaacagagctatgccttccaagaagagtcttggaggcctgataacaactatggccacaaccacaagcaattcccaggcatgcacatgaacatgaacaacaacgacaacaac

SEQ ID NO: 5934 - DNA, 258 bp, Glycine max
  Clone ID: 701097536H1
cgcctcttcaacaacccttgttttgttctgtgcaagtgatcttgaaaggaacaacaatggtgaagtctataaactttctcctgcttctgtctctactagcctttgttccctcctgtcactgcaaaaagaaaataggaggttacctctaccctcaattttacgacggttcatgccccagagctcaagagattgtccaatccatcgttgccaaggctgtggcaaaagaaccccgaatggctgcttcgttgctcagactac

SEQ ID NO: 5935 - DNA, 258 bp, Glycine max
  Clone ID: 701097537H1
caccagtttcaccgcacgaatatcttgttgtttggagcgatccgagaaaaactctgtaaacatgttggtttaccaggacctccttacaggtgatgagcttctctctgactccttccgttacaaggaaattgagaatggaatgctgtgggaagttgaggggaagtgggttgttaaaggagcagttgatgtagacattggtgcaaacccttctgctgagggtggaggagaagatgagggagttgatgatgcagctgttaa

SEQ ID NO: 5936 - DNA, 245 bp, Glycine max
  Clone ID: 701097538H1
ctcactgttagtagcagcaatggcgaagggtgaagacgctttgattcgaaagaagaataacaagcttcgaaagaagaacagcagcggctcttcctctgtctccgccaaggttgccgacgttatcgccgccaacaagcgccgcaagccggtaaacgccgcatgtgccaggggatgtgctttagtctacctactctggatgatcccttcaatgatccgagtgggaaaaaggaaccaaaacaaagggt

SEQ ID NO: 5937 - DNA, 255 bp, Glycine max
  Clone ID: 701097540H1
gtgaaagagaatccgaggcgaagagaagagaaaaattaagatggaggggaaggagcaggatgtgtcgctgggagcgaacaagttcccggagagacagccgattgggacggcggcgcagagccaagacgacggcaaggactaccaggagccggcgccggcgccactggttgacacgacggagtttacgtcatggtccttttacagagcagggatagcagagtatgtggccacttcacggtttccatacatcactgt

SEQ ID NO: 5938 - DNA, 256 bp, Glycine max
  Clone ID: 701097541H1
gcggcaacagaggagagaagatgaagttcaatccacgagtgtcgagcagccgccgcaagagccgaaaggtcacttcacggcgccgtcgagcgtgcggagggtgctgatgagcgcccctctgtcggcggagtccggtcgaagtacaacgtgcggtcgatcccagtccgcaaggaggacgaggtgcaggtggtgcgcggaacatacaagggtcgcgaggggacagtgacgcaggtgtaccgtcgcaagtgggtcatca

SEQ ID NO: 5939 - DNA, 257 bp, Glycine max
  Clone ID: 701097542H1
gcaaaagttgggtctcaaacctgagaagatgaaggccactagagatgtgcttagtgaatatgggaacatgtcaagtgcttgtgttcttttcatcttggatgagatgaggaggaaatctgctgaaaatggacataaaaccacaggtgaaggacttgaatggggtgtgttgttcggttttggacctggacttaccattgaaactgttgttttgcatagtgtggccatctggagatgcctcatatattatttcattattg

SEQ ID NO: 5940 - DNA, 256 bp, Glycine max
  Clone ID: 701097543H1
gttttcttttcgttcgcatcttctctctctctcagaaagatgaaggtggtcgccgcgtatttgctcgccgtcctcggtggcaacaacagcccctccgccgatgtcatcaaggaaatccttggctccgttggagtagaagcagatgaagataggattgaatcgtttttgtctgaagttaagggtaaggatatagttgagcttattgctgccggtagggaaaagttggccacggttccttctggtggtggtggtgccg

SEQ ID NO: 5941 - DNA, 257 bp, Glycine max
  Clone ID: 701097544H1
cttttggaccagccaccacctcagcgccgcttaaggaccacaaagttcagatcccaagcttccatggcttgacgtcttcctccgcctctgctctcccccgcaatgccctctcccttccttcatccactcgctctctctccctcatacgtgctgtttccacgcctgcgcagtctcaaactgccactgtcaagcgcagaaagtcgaaatattcaaagatcaaagcaatttcataagatgtcctcttaacgaggacattt

SEQ ID NO: 5942 - DNA, 260 bp, Glycine max
  Clone ID: 701097545H1
cctcgagccgattcggctcgaggtttgattccttcaccagagttatataaacatgttgtatgcgttttggagtttcagctagagacttggacaattttggttgctattgtgtgcatcttgctatttcttctgaaggagtttgttatgggagggaagagctcaaaagggagtggtaggaggtatgattttggtgcttcttcatcttcaagggataatagctatggtggataccctccgcaatcaccatacacttcttatca

SEQ ID NO: 5943 - DNA, 264 bp, Glycine max
  Clone ID: 701097546H1
gtttgtatgttcatttcatcaaaatccttcaagattacaggaatagatgatagaagatattggaataatattccaactgaggaatccaggttcaagagtgttgcatatcttcaacaaatgtggtgggttgaagtaataggggagctagagtttgagtttccaaaagggaactatagtgtatttttcaagcttcaattgggcaagccctcaaagagattgggccggcgagtgtgcaaccttgatcaagtgcatggatgggacatc

SEQ ID NO: 5944 - DNA, 276 bp, Glycine max
  Clone ID: 701097548H1
gatcgacgtttgataactttgctgaagtgcgcaaactctatgaaggtggagttacactacctacaaactttcttagcaagatcgcccctataccagtggtcaaggaaatttttcgaactgatggcgaacagttcctcaagtatccaccacctaaagtgatgcaggtggataagtctgcatgaatgactgatgaagaatttgctagagaaacgattgctggtgttaatccaaatgtcattaagattcttgaggagttcccaccacgtagcaagctag

SEQ ID NO: 5945 - DNA, 201 bp, Glycine max
  Clone ID: 701097550H1
cgacagtgagtagagaataagctatgcagttcaatatcacatcatgattccttcatatcttctctcttaccttcttccttatcattagctcttgactttcacaatccaaccagttttgtgatgctgggactgaaattccatcatccaagttgttgatcaagggagggcacggttgtgaatggtcaccaccaacagatgggc

SEQ ID NO: 5946 - DNA, 212 bp, Glycine max
  Clone ID: 701097551H1
attgattcccaaaaccctaattgaagttctctcctccacactatatattgcttggttcgagtgagtctatcccttaaaggctctctctttgagtcgctgaggaaaaccctagctagtagtctcagtgcgtttgatagagaaaatatggcagatggtctcgttctacgtggaatcatgcgcgaccacatatacgtcgtgacggcgattgccag

SEQ ID NO: 5947 - DNA, 242 bp, Glycine max
  Clone ID: 701097552H1
tatacttcacagtctttatgataactgcatgaaataccatattggggtgcttgttgacaagtctctcatacagattagtgacgatagagttacattgcatgacttgattgagaacatgggtaaagaaattgacagacagaaatcacctaaagagacagggaagcggaggagattatggttactagaagatataattcaagtcttaaaagacaactcggggaccagtgaagttaaaatcattt

SEQ ID NO: 5948 - DNA, 254 bp, Glycine max
  Clone ID: 701097553H1
gtcgcgttgtgttgcgtcgtgtcgtgcgctgttcctctgtctgtcgttattgttttcagaccaaaccctagctccgcatcgcaaccatgtcgaccaagcaaggtggaaaagctaagcctttgaagaaacccaagtctgataagaaggattacgacgaggttgacatggctaacattcagaagaaaaaggaagaggagaatgcgctataggagttgaaagccaaggcgcaacagaagggaagctttggaggttct

SEQ ID NO: 5949 - DNA, 257 bp, Glycine max
  Clone ID: 701097554H1
ggagaaaataatttaacttctctgtctcaatcatttcattatagttttctctcccttccaatcccagcgatctccagttagggtttcgtttcgtgatttctgtctcactggaaaaggaatatcaagaagaagaattgtttatctacatctgattcaagtccatgaagccacaatcatcgtctttgaatccatatgcaacgtcatatgttcctctctctagaaggggggtagatggtagaacaccttcgactgaaaaa

SEQ ID NO: 5950 - DNA, 259 bp, Glycine max
  Clone ID: 701097555H1
ggaggaaaagagatgaccctgaagcaatggaagaggatgatgttgaagatgaaatagcagaaatcaaggctgctcattttgaggaatcaatgaaatatcctcgaaggagtcttagcgatgctgacattcgcaagtaccaggcattcgcccaaacattacagcagtctagaggatttggaagtgagttcaggtttgcagattccacctccggcggtggtacagctgctgcatctgagccattttcctctgctggtggagc

SEQ ID NO: 5951 - DNA, 260 bp, Glycine max
  Clone ID: 701097556H1
ggagattattatcgttatcttgccgaatttaaggcaggcaatgagaagaaggaagctgctgatcagtctatgaaagcatatgagtctgctaccactgcagcagaggctgatttacctccaacacatcccatccgattgggtctagctttaaatttctcagttttctattacgagatcttgaactctccagaaagagcctgtcatcttgcaaaacaagcttttgatgaagctattttctgagcttgacaccttgaatgagg

SEQ ID NO: 5952 - DNA, 236 bp, Glycine max
  Clone ID: 701097557H1
gaagggttgaaggaagaaaaaaagaaaaacacagaaatggagggtgggaacaacagcagcagtaacaacaaccctgatgagttggcggtggggtgcttgctttcgatcaggacaacgttgggcgacgaattcgaaggccaggtcgtcaccttcgatcgcccctccaacattctcgtactccaggagccttccaaacctagccctcgtcgaaatcttaggttgctcaaagccaatta

SEQ ID NO: 5953 - DNA, 255 bp, Glycine max
  Clone ID: 701097558H1
gacaaaaaatccaaaatttccactcacatctctctttgtttatgacatctcaaacatttatctactctctacccactttctcagttccagttgaagtgtggaaaaaatcttaagctaaaggcaatttgggaagctggaacaatgggttctgtttgttgttgtttgagttttgatgattttgaagattatgtaaatccaaatagtcctgtatataggaactgtgtgtgtctcagttgcttgatacagaaccttttg

SEQ ID NO: 5954 - DNA, 255 bp, Glycine max
  Clone ID: 701097559H1
ctttcgggtcatcattgagcttgctgtagtgaggtgttcaatctgcaatttccttaaccaaattcatggcggaactgatagggcctcgcttgtacagctgctctaattgtaggaaccatgtctcactccatgatgatatcatttccaaggcttttcataaacggccgagcctttctgttttcccatgcaatgaatattgtcacagggccaaaagaagacagacatctcttgactggcctccacactgttgctgat

SEQ ID NO: 5955 - DNA, 256 bp, Glycine max
  Clone ID: 701097560H1
gaaatccttagcaacatccaataggcagtgattcagaatggtatgacattcctgggattgatgaactttatgctcaagtgatatctcaagatctgtcagcaaggtgacttatcctatcagatagttaaaactcattttttcaataaaggagggccgtttgtcatgtactgtaatttttatttatttattttcatgatgtgtttggaaggatcagtgagaattctttttgttcaatatggagggaagtgcatttagt

SEQ ID NO: 5956 - DNA, 189 bp, Glycine max
  Clone ID: 701097561H1
ctcaattgctcctaacttacctccattcttaattttttggaagcttcaaacttaaaagtcttgtttgttatctttttcttcccttgtctacatctatatttattagaatttattggttgtgcatatcaattccagagtaccctattgttcatttttttttttcccgatttattgctattccaccattcg

SEQ ID NO: 5957 - DNA, 259 bp, Glycine max
  Clone ID: 701097562H1
cctttttctgttttctttccatataatcatgaaaatctctgctgggagttgtgattttcaaccataattttagattattaagttttgggcttggggaaattattttgattatattcttagttctaaggtggggtgttaattaatcatccccaactttttctgatgttcagctcagccccccacttaaattcaatttttttttgctgtctttttaaagatctttccctcatttattttttttgggctcatgaaagtagta

SEQ ID NO: 5958 - DNA, 226 bp, Glycine max
  Clone ID: 701097566H1
attaaatcatctatttcatataacattgcatttcacttcatcacttggctagggtggtgcatttgcagctcttaatttcctcacaaatatggaggcgcgtagtttgtactcactagtgtttcttgtgcttgctttgggctattgtgaacacagtgcatggccaagggacgcgtgtagggttctattcgagtgcatgtcacttgctgagtccatgttaagtcaacag

SEQ ID NO: 5959 - DNA, 195 bp, Glycine max
  Clone ID: 701097567H1
tattcaattcagtctctttcgttatcaaattatttcttcgatcaaggtcgttttcgaaacttcaccaacatgagctactacgatcatcagcaacagcctccaattggtgttcctccccctcaagggtatccaggaaatgacgcttaccctccatcagggtaccctgcacaaggttaccctccaccaggttaccct

SEQ ID NO: 5960 - DNA, 246 bp, Glycine max
  Clone ID: 701097568H1
ctccagttttccacaatggaccttgcaaaagcatatactccatggagggaaatttcatccatgctattgagatgaatgaccaattccgaacaagggatcctgagaaagcacatgtgtttttcttaccttttagtgtagcaatgttggtgcaatttgtctatgtacgtgactctccatgactttggccccataaaaaagactgtcacggactatgtcaacgtcattgcgggaagatatcgctattgg

SEQ ID NO: 5961 - DNA, 252 bp, Glycine max
  Clone ID: 701097569H1
aaaagacaagaactacttccttctctcctttgctgtgttttctttctcaaaaatgggtcgtacctatgttcttatgatggttgctgcattgttgttgagctccaccatggctcaatctccagcttcgtcgccggctttgtcccccacccacacgccggtggccactccacctaggagggcgttgtcgccgtctccgtcgtctgtgtcaccagcggcttcacccggcaccggaaattctcctccgggaccacc

SEQ ID NO: 5962 - DNA, 256 bp, Glycine max
  Clone ID: 701097570H1
aacatgagtaacatgacttccttaagctccttagtgctgctccttgcagctctaattctattccctcaagttcttgctgactatgagaagcccccggtgtacaaggctcccattgagaagccaccactttacaagcccccaattgacaaacctcctgtttataaacctccagttgagaaatcccgcatttatgagcccccagtagagaggccaccattgtacaagcctcctggtagagacacccccagtttacaag

SEQ ID NO: 5963 - DNA, 258 bp, Glycine max
  Clone ID: 701097571H1
attaatagagagacataaaaaataaacatatattgagaatggagggttgtgtgaagaagttgctatgccttgttgggtttgtggtgcttgtgagtactattggtggggtggagagtgctggtgaatgtgggaaatctacaacccctgataatgaggcttataatcttgcaccatgtgcctcagcagcacaagatgagaatgcctatgtttctcagagttgctgtgctcaggtggaagataattgggcagaacctagtt

SEQ ID NO: 5964 - DNA, 256 bp, Glycine max
  Clone ID: 701097572H1
atggggttgaattggcatcctctaattcctcctctgttggagatatttcatcacctgctgcatatgattatattttgacccaaggaagggcatgggcaatttctatcacacagaaaagtacaagaaatgaagagatttctagagcatttataagcaatggaggtggaatggataataaccttctttatcgttcatccactcatggaagaggccttggcagattttggtctcatgttgaaggttacaaaggtccttt

SEQ ID NO: 5965 - DNA, 253 bp, Glycine max
  Clone ID: 701097574H1
ccacaacaaggcagcagtgcgaagagaaagaaagagaagaagcgcttatcgaactcggacggaagcactgagttaactcagagcgagtgaaagtgttgctgcgtgatgtctggtggtatcgcccgtggacgcctcaccgaggagcgcaagtcgtggcggaagaaccatccccatggttttgttgcgaaccggagacgctgcccgatggaaccgtgaacttgatggtgtggcattgcactattcccgggaagac

SEQ ID NO: 5966 - DNA, 252 bp, Glycine max
  Clone ID: 701097575H1
ctttgagtggctttactggcctcaagctcgccagccatactccccagaaactattgactacataaagtcactggatgctgaagaagatattgcccttttaaagtttcatggatgggatctgccagttgaatgtgcccgcactcttaggatctcaaccatgcttttgaagaaaggggtagagagaggattgaccccttttgccattggaaacctgatgtgcagagaatccttgaacaaggaatctgtgattga

SEQ ID NO: 5967 - DNA, 239 bp, Glycine max
  Clone ID: 701097576H1
ccacaattcacaaccgaaacagtttccatctctctcacaaaatgacaacaatatcaaattgctcccttctcttcctcttcctcttcctctccaccctccacatagcttccaccctctcaacccccaccaacttcatcaagtcctcctgcagcaccacccagtacccagccctctgcatccagtccctctccgtctacgcctccaccatccagcaagacccccacgaagtcgtccaggca

SEQ ID NO: 5968 - DNA, 228 bp, Glycine max
  Clone ID: 701097577H1
acttttacctgcaaaagtgccaagtccttgcatcagttctctattgttttggcctcaaagttcagatcatgctttccttttcatttaagaatatctcagaatttgagtacactgctaatgtccagatggaattggagtaaaatgtggataacaaacactttaaatagtagttactgacatttgttgttccataaaagagagacataattttggtgttggttgcatata

SEQ ID NO: 5969 - DNA, 263 bp, Glycine max
  Clone ID: 701097579H1
atttcttctctcttaaccccaattttctcttcctatagttaggaattaatcttttttgttctccttgtttaattaattgataatttttggtgatgggcaattacatttcttgcaccttggctcctcctttgatgaagaacacaagggcagcacgcgtgatcttccccacgggcgaagtgaagcaatacaaggagcaagtgatcaatgtcgccgagctcatgatggagtgccccactcacttcttagccaactccaactcccta

SEQ ID NO: 5970 - DNA, 264 bp, Glycine max
  Clone ID: 701097580H1
ctttttattggcggtaaaatgccagaagatattgtttaccaacaccctttgtttggtggcaagatatctagcacattcgcccacagattccaggatgtcagcagcattcgacaagtccctgatcatcaggaggtgtttgcggacccgagccgtgatgaaagcttgatctgtgagctttgagaattcaagcctgatgttgctgataatgggagtgctggggggtttcttcaagacctggctagtgaacaggatgctgaaggaagt

SEQ ID NO: 5971 - DNA, 254 bp, Glycine max
  Clone ID: 701097584H1
gaacattaccatcataagaaggagtcagaccttgtcgttccaaccgataaactaagtttcctgaatagagcctgtgttatcaaagatcgggaacaagaaatagcctcggatggttcagcatcaaatccatggaaactctgcacagtagatcaagtagaggaactaaaagccattattaaagtgattcccttgtggtctacagggatcatgatgtcagttaacattggaggctcatttggattgctgcaagctaa

SEQ ID NO: 5972 - DNA, 254 bp, Glycine max
  Clone ID: 701097585H1
tctcgagccgattcggctcgagaaacattataatttctattacatacattttgtagctaggatcagcaagttactactcattcgtgttgctgggttcgtggcaacctttgtcaccatggtgatgatgatggtgcccaaaaacgtgagtgcccaaaacataggtgatgacatcgtcacacaagacttcttcaacagcataatcagtcaggctgatgatggttgtgcagggaagaacttctactcacgagatgctt

SEQ ID NO: 5973 - DNA, 233 bp, Glycine max
  Clone ID: 701097587H1
gaaaaatgtgagtgacgctgcaacgtttaactataacactagagacttattgagccatcttgctcagagagcttatgtgaataataaattgtattcaactggagaggcgaagcttgagaattcggagacacgttatggtttgactcagtgcactagagatctttctagcagtgattggaagaagtgtcttgatggtgcactcaatggactgcccaaatggttgtgatggcaaa

SEQ ID NO: 5974 - DNA, 244 bp, Glycine max
  Clone ID: 701097588H1
cttaagcttaagaacaacaagaagcatcatgttcatagaaaaagtgaagttagcgtaacaaagagttggtgtgcaatgattccttggcttttgggagcagcctatataaatcgccaattcttaataaacgttcgaaacatcctacttttctttcttgacgcaattcagacgccgttcctattcttgatcttcatcatgtccaatcccaaatccgagtcagtagtgtctgaaccctctgattcgg

SEQ ID NO: 5975 - DNA, 248 bp, Glycine max
  Clone ID: 701097590H1
cgacgatggtgtgtgtgtgcgtaacgtaacaaactaaactagggttacaaacaaccagatcttcacgcaaacttctgatttgagttttactcctttagatctggaaatcaatttctgattttcatttaaacgcttggccgaattgtggagctgccaaagcaaaacacttattattatgtgagagcaataatgggctctggaaatatactaccttcttctggcagctctggcatgtctatctccgagct

SEQ ID NO: 5976 - DNA, 202 bp, Glycine max
  Clone ID: 701097591H1
ccattcttaggaaaggaagaagattatcaaaggattgaaggggcacatagacaaaacagcttatcatcaatatgggtgcatggtgctggtttgcatcctttcagttgttgacgacaccaaactgataacaaaggttatcattcgtgagcttcagtcaattttaaaggagcttgttctagataaggttcctccttccatactt

SEQ ID NO: 5977 - DNA, 250 bp, Glycine max
  Clone ID: 701097592H1
cggctcgagcaatctcaaagttcctacaaaccccataatgtggatgaaggtgaagatggatggcagactgttggtagaaagccttcaaggcatccacataaggttcaaaaggacaactggaacagctataaacgacctgctgatgagcaagaatactctaatgaggttgaagttggtgctgatgtggagccctcagaagatgaacttgctgatctgtcaagagcttgtgaaaaactctggggtcttgatt

SEQ ID NO: 5978 - DNA, 226 bp, Glycine max
  Clone ID: 701097594H1
ctgctcgaatggtgtctatgtcactaattgtctatatacagtcatacgttagctgggcaatagggttgggaattcctgcggctttgatgctagtctcttgcagcactctactacacgggaagcaattattacgtgaaagttaaagcaactggtcaagctcaactaacaagtttagctcaagttgtagtcgcggctatagagaaaagaagcactgaatctcatcaga

SEQ ID NO: 5979 - DNA, 213 bp, Glycine max
  Clone ID: 701097595H1
gcatgattgtggtgtgctttgttttcatttcatcatatgacagccttgtgggtttctttggtgtttcttgatgcatacttaatttactttattattgtgtatttatctcttccatttacaaaaaaaaaagtttgtgtaggtttccttctttgaagtaaaaagaaatcaactatgtactaaaaatggaataatggtgtgttatattcgtgtttt

SEQ ID NO: 5980 - DNA, 267 bp, Glycine max
  Clone ID: 701097596H1
tggaaatccaattgcgagtttacccacacctggatttctgggcatgactgcacctgagccttggagaccaccagcttcaagtagtcagtcaaacaccacagctccatctccagctcaacccaatatgccttggggcatgggcatgccaggaaatcagaatatgaactggggtggggttgtacctgccaacatgaatgtaaactggatgcctgcgcaggtgccagcacctggaaattcagatccaggatgggctgctcctagtcaggg

SEQ ID NO: 5981 - DNA, 124 bp, Glycine max
  Clone ID: 701097601H1
cttgagaatctcaacggtgtttcgtttgtggttctggttttagaatctcattgcttgaaaataaactattgtactgaaatgtcaagcttgtgtgttgtaataaaacaagattaattgttggttt

SEQ ID NO: 5982 - DNA, 227 bp, Glycine max
  Clone ID: 701097603H1
gatccttactacgatctggatgtgaaggaggcgctgaatcggcttccgaaagaggtggtggacactcgccacgcgcgtcttaaacgcgccatcgatctttccatgaagcacgagtacctccctgacaatctggagtcaatgcaaacaccattcaggggctacctccaggatatgctgattcttgtgaggagagagaccagcagaccgtgaagcattgggaggttgcc

SEQ ID NO: 5983 - DNA, 269 bp, Glycine max
  Clone ID: 701097604H1
aaaacgaaacacaaacagtgttctctctttctttctttctttctgtctgttgtgctctctgaacatgttgatggattccccctctcgctcctccgtcatcatcgtaggtgccgggatttccggtatcgctgcggcgaaaggtgttggccgagaaagggcgtaaacgacctggtgatcctggaagcctcggaccgcatcgggcgcaggatctgcaaagagagcttcggcagcgtgatggtggagctcggtgtcggatggatcgcttgcgt

SEQ ID NO: 5984 - DNA, 267 bp, Glycine max
  Clone ID: 701097605H1
ctgcaatcgaagctcgatacagcagcaactagaattggaataaaccctatgtctcttttcaagggtgtttggtctctgttctgctccaaaaccgtagaacaaaaagcagaggagcatgagattgagcagaccctgagtttgtttttgcatgatataggcaggacaatgtcttcagatctcagtgagtataaaatcatcaaggaaagagtagctgagattcttatggacgcaaaggatgaagtcttctataacaaaactcagggcaat

SEQ ID NO: 5985 - DNA, 96 bp, Glycine max
  Clone ID: 701097606H1
tctctctctgtctctttctctctcatccagatcttgcaaaaaaaggaaaacgcaatggcagggagcgttcccactcaaggggaggagttcgtgtaa

SEQ ID NO: 5986 - DNA, 163 bp, Glycine max
  Clone ID: 701097607H1
tttgggtcttccatgctctttggaacaattgtcggatctctagctgacaaacaaggccggaagagggcttgtgtgacttactgcatgacctacattttgagttgcatccacaagcattctcctcattacaaagtcctggtgtttggccgtaatttgggaagta

SEQ ID NO: 5987 - DNA, 254 bp, Glycine max
  Clone ID: 701097608H1
cttagacgaagtcacaattcgcaatcgtcgtcttcgaattcctctccttcgtcgtcgtcgtcgcaatcgtcgtcgtcgtcgtcttcctcctcttcgtggatccatttgcggtcggttctaatcgttgtcactttctccttcacaagctcttggatggcctctgatcgggggtcgtcttaaatcaccatgtcaacccaggaaaagaaaccattcctttcaactcaagcaagggaaagcgtggtttacccaggttg

SEQ ID NO: 5988 - DNA, 195 bp, Glycine max
  Clone ID: 701097609H1
aggatttcggccgtttgctccccaaggaaagaagcagagtgtttcttttgaaatcagctagaaaagatgtcaggtgaagaggtagctgttgcagctgaggcacctgctgcttcaattccaggtgagccaatggacatcctgactgctctacagcttgtgctgagaaaatctctgggctatggtggtcctgcaaga

SEQ ID NO: 5989 - DNA, 262 bp, Glycine max
  Clone ID: 701097610H1
gtaatggctctatcgccaaggccactctcacattccacaccaaagacgatgtcccactctcagatgcagtgcgtgatgaaacaaaggccaggggtgctggaattttcaaggccattgagggctacgttttggcaaatcctgctcaatgattatccttcaaaccacttgcatgcatgcaataataattatatcagcttatgaactggttgttggagttaatttgtatcatgtggccttggttgggttaattaatttcccttgc

SEQ ID NO: 5990 - DNA, 258 bp, Glycine max
  Clone ID: 701097611H1
catcgagccgattcggctcgagcggctcgagaaaaaacttcgtataccaaatccgacgccgtatttagatggattttgccagacatgatgaaccacctacctcgaatattcggccatagaaagaagcaagcctccgacaacatggacccgacgacaaagcacaagaagaagagtaagaagaagcagcagcccaaactcgagcggcgcaacggcttccatcacttcgaatacgacgccggatcgtcgtgctcctggcgc

SEQ ID NO: 5991 - DNA, 264 bp, Glycine max
  Clone ID: 701097612H1
aggttccctaatagtgattttatgagcagagagtttgaagtaccaatccctggttgcaaaccctacaagctcaacctcttcaggttggtttggaggacactttttgtgattttgtcaactgtgatagccatgctcctaccattcttcaatgacattgtatccgttattggagccattggattttggcccctcactgtgtatttaccagtggagatgtatataactcaaactaagataccaaagtggggcataaaatggataggc

SEQ ID NO: 5992 - DNA, 255 bp, Glycine max
  Clone ID: 701097613H1
agaacagaagaatggcctcaaaatcatccaccattagacttgtttgtttctgctacttcatgctcttcagctctatgcatttcaccagctgcaccgtgctctcattgaaaagtcatgcaagcacatagaatggttccatagctgaatgcaatcaagaagatgagctgttgatggagtctgaaataagccgaaagtttctggagcagaagagatcatacatttccaatggagctttacagagagacaaaccagttt

SEQ ID NO: 5993 - DNA, 269 bp, Glycine max
  Clone ID: 701097614H1
tggaaaatatttttattttaccgtactgaatgttttcattggagttactattggtggaaccttgttcaaagcattcaagagaattcgggagcacccgacgttggatgaaatttcgtccttgctagctgaaagcctcccaggcaatgctacttttttcttgacctacgtggcccttaaatttttcattggctatggtcttgaactgtcccgaatagttccccttattatctaccatttgaagagagaatatctttgcaagactgaagctg

SEQ ID NO: 5994 - DNA, 270 bp, Glycine max
  Clone ID: 701097615H1
ctttggtattcctcactcagagcctctcatcagagagagagaaagtgagagatggagagaatgttccctcccaagaagccctctactatgaattcccatgacagacccatgtgtgttcaaggagactcgggtcttgtcctcaccactgaccctaaacctcgcctccgttggactgttgagctccatgaacgctttgttgatgctgttactcagcttggagggcctgataaggccactcctaaaaccatcatgagggttatgggtgtgaag

SEQ ID NO: 5995 - DNA, 268 bp, Glycine max
  Clone ID: 701097616H1
ttcgaatccaaggaagggaaaggaaagtaagagaagagaagaatggccgaagagggacaagtgattggtgtccacagcgtggaggagtgggaggaacatctcaagaagggacaagagtccaagaaattgattgtggtggattttactgcttcttggtgcggcccatgccgtttcattggcccaattcttgcggatatggctaaaaagttgccgaatgtcaccttcctcaaggtggatgtggatgaattggcgactgtttccagggagt

SEQ ID NO: 5996 - DNA, 265 bp, Glycine max
  Clone ID: 701097617H1
aacgacgtgtcgcttcaatttgaagggaagtgcagtggaacgtgcgaaagaagtgcatcaatctggttcttctgggtagggcttgtgttgtgataaagtcttacagagaagagtgtgtgtgtgtgataattgggataagctctaatcaatcaatttcagtggcatcatccaattcgactcagcaagaagggatcaaacccgcaaggagaaaaccggtgttcaccaaagtggataagctcaaacctggaaccaagggtcacacgtt

SEQ ID NO: 5997 - DNA, 240 bp, Glycine max
  Clone ID: 701097618H1
ctttctctctctaaagctgaaacttggacactgcaacaagacaagcactcaaagtgcttcgaattcgtcactgatcacgtttctgcaatgcaccgcgtgggtaatgcaagtaatggaaacaattcaactcgccctcgtcaggagaagagattaacctacgtgttgaatgattctgaatgacctacagcattgtgcaggcataaattgtctggctctacttacgtttgcggcatctgatgg

SEQ ID NO: 5998 - DNA, 267 bp, Glycine max
  Clone ID: 701097620H1
ttttctttcaacatgtctacaccagcagaatactacaggtctctaccacctgtgagcaagacctatggagtggcctgtttgatgaccacttctgcatattatctgcaactctatgatgcaaggaacatagcacttgattatgggccagtgtttaaaaggcttcaagtttggaggcttatcacaaatttcttctttcttggctcattttcattaccatttgcagtccgtctgataatgatagccaaatatggtgtttcattggaaaga

SEQ ID NO: 5999 - DNA, 155 bp, Glycine max
  Clone ID: 701097621H1
cgcggcttcaaccttgtagttattctctttcttcttttttagctatccctctcttgaaaaatctagatctcgttcttccttgatctacgttacgcttttagtgaccggatctgtatggatctggaccagatctacacgccggtggtgggtttggc

SEQ ID NO: 6000 - DNA, 171 bp, Glycine max
  Clone ID: 701097622H1
cctcgagccgattcggctcgagcaccggcatcacctacgaccgcgacagcatcgagaagtggctcttcgccgaggtgaagcactacacgtgtcccgtcacgaagcagcccctcctcccggacctcactccgaaccacacgctccgcagactcatccaagccctgtgccacg

SEQ ID NO: 6001 - DNA, 229 bp, Glycine max
  Clone ID: 701097623H1
cacacactgtgtttgtgaaactccctctcacacacaagtcacgaaaacaacttgtgttgttccaatggcatcagcaacaccccttttgaaagatgagctcgacatcgtgatccccacgatcaggaatctgggtttcctggagatgtgcggggcaatctttgagccctaacaactcataaatgtgccagatggttgaccttcaaaggccaaccagggtcccgaaaggctt

SEQ ID NO: 6002 - DNA, 229 bp, Glycine max
  Clone ID: 701097624H1
cagaccttattttttctgtcatttgcttcaaatttcaggagattaattatgcgctcaacccacaacaagaataggccttgctggattggctgttaatgggcaaaatctggcactcaatattgcttgaaaagggcttcccaattccggttaacaacggaaccatttccaaggttattgggccataagacgaagcaaaccaggaaggaaaccttcaatttatggggaacaa

SEQ ID NO: 6003 - DNA, 224 bp, Glycine max
  Clone ID: 701097626H1
ggaaaaataagatcatggaagtctgtggcagctcttcagatgttggaaaaacaaatgggtcctgaatcttttcgtagaaatttgcaaactatagtttctcgtgctcaagataatactcgttccataaagactcctagtactaaggacgtttcgacattttgctaacaaagttgggaatcctgaacgcccaattcctaaaaaattccttcctccgtggggtgggt

SEQ ID NO: 6004 - DNA, 264 bp, Glycine max
  Clone ID: 701097627H1
agctacttcaccactccaaacccagcacaccaccattattcatatctcattctctaacctttcactctgccttactcactctctactttgctcatcatcgtagatgaacaacacttctagtctctcttactttataaccatgtaaaaatgagtcacctcatgacaaattagtagcttcttgatgtgctttttattctgtttgtgttgagataaattcggttgtttgtttggtattggcttatcgtttatgaattatttgatggg

SEQ ID NO: 6005 - DNA, 263 bp, Glycine max
  Clone ID: 701097628H1
ctcgagccgtttgaattgtagacgtacgatgagagtcaaaaaaggcaagatgatgattgtattgcggcgtgtagagagaggatttgttcaattccaaatatgatactaactcatagtttcagtaccatagtaggatcaggctagggttttataataagctgctgaaaccaatgttcaaattgcagttgttgttattgttgttgaatctgccgcaccagacaccgattcattcgaccaaaacataagcatgtcgggatctgaca

SEQ ID NO: 6006 - DNA, 182 bp, Glycine max
  Clone ID: 701097629H1
ctcattcgtcatggaacaacacattcactctctctctctttagtgattttctcgatttgattgacaaacacaacgaaccaaagttaactactttagagagagagagagagagagagacagagagagcgagagctggagagtgaacggataagcgtcggacgagagagagacactagagcagc

SEQ ID NO: 6007 - DNA, 261 bp, Glycine max
  Clone ID: 701097631H1
cccttaaggaacccatcgtagcctacactggcttctctccttccaccttcttcacggtgctggcgcttctttttgccgtttactacgtcgtcacgggtctctttggctcctccgacgatcaccatcaccgccaccgccacgtcgaggaggacgaggagatgccgcctctgcgccccccggttcagctcggcgagatcacagcggaggagctcaaggcctacgacggcatcgatcccgagaaagccttgctcatggccatca

SEQ ID NO: 6008 - DNA, 274 bp, Glycine max
  Clone ID: 701097632H1
tcaagcttcagcaagtgcgttttggaagcagagaccgaaatacttcgagatggcccgtacactgcaaactgctcgtaagtcaactggaggaaaagctcccaggaagcagcttgcaaccaaggctgcacgtaagtctgcaccaacaactggtggtgtgaagaagcctcatcgttatcgccctggaactgttgctcttcgtgagattaggaaataccagaagagcactgagctcctaatcaggaagcttccttaccagaggttggttcgtgaaatt

SEQ ID NO: 6009 - DNA, 208 bp, Glycine max
  Clone ID: 701097633H1
cgcagcaaccacccgtcggtgttcctcctccccaaggttacccaccgccggattcttacggaaatgacgcgtatcctccgccagggtatccgccgcaaggaggataccctccgcaggcgtatccagcacaggggtagcctccaccctacgcgcctcctcagtacgctcagcctccgccgcaacaacaccagaattcatctggcccagg

SEQ ID NO: 6010 - DNA, 267 bp, Glycine max
  Clone ID: 701097634H1
ctcggaactttgaaaacgtggaagcacaccccagaccccacaccagtccccgtttgttccgctgcaaaacaaaaacaccgcgtcttccccgtgcggggaaaaagacaagaaaagaaaagaaccctcaattttccgggaaaaccctccccacaatggtttcccgggaaaacaccaattggctcttcgattacggcttgatcgacgatattcccgttccggacgccaccttcggcgtcaattcctccgccttcacatggccccctaacg

SEQ ID NO: 6011 - DNA, 188 bp, Glycine max
  Clone ID: 701097635H1
cgcttcattgtttacacgaagccaagggcaaacccaatccaataaacaacactgttcagagacccgtgagtcttcgtcagttccaattcgttaccgcgaaaatgaacgaacccacgagaaaataccgcaagaagaacgaagaaggatcaagatcaacccaggagagtgacaagaagaaagaactaaag

SEQ ID NO: 6012 - DNA, 217 bp, Glycine max
  Clone ID: 701097636H1
ctggttagcaacccagtgtgtgattcctcagttcaacaactctcagcaacatgcacaatcctcccccgccaggcggtccacgccctcaccagcacaccggcgcaccggctccggcaccacatgctcatccatctcctccgcctcctgggcctccaaaccagcaacacggcccacccggcccaccggatgcttatccaactcctccggctcctggggc

SEQ ID NO: 6013 - DNA, 262 bp, Glycine max
  Clone ID: 701097638H1
gaaattgaatgcttcagggttttcattattgttttttcccatcactatgcaacttcttcatctcgcttggataaacttaccgagatcataaataagtacggtgcgggagaagatcgaagcatttttccatttttcttcgaggtggaaccgaatcatttaaggttttcaaaatgggaagttttgaaataagcttgtgattgctcatgccaaccggtgtggaatccaaatggttaccgaagtggaaaattaatccggaaaaagg

SEQ ID NO: 6014 - DNA, 212 bp, Glycine max
  Clone ID: 701097639H1
attggaactcatgtcattcatcacctatttcctcaaattccacactatcacttagttgaggctactgaggcagctaagccagtgtttggaaaatattatagagaaccacagagatcatctcctcttccctttcaccttattggggaattaattaagaagtttaaagattgccaatttggtaatggcaaaggggatgttgcgtaatatccaac

SEQ ID NO: 6015 - DNA, 263 bp, Glycine max
  Clone ID: 701097640H1
aacctctcaagtccaacctacccctttttcttctcccaccaacttcaccgtcttcttcctcgatcatgtctcacttcaagggcaagtaccatgatgagcttattgccaatgctgcttacattggcactcctggaaaggggtatcttgctgctgatgagtcaaccaggaccattggcaagcgttttgccaacatccgtgtagaagatgttgaattccacaaggcggctcctaaggaactggttttcaacggttcccgtgctcct

SEQ ID NO: 6016 - DNA, 258 bp, Glycine max
  Clone ID: 701097642H1
tctggttcgaggcgcgagctagggtttatcgagggtttcgtttctctctgcaacaacgatggcgaaaaccgggcgaggtcgtcgctctcactccggctccgtttccggctcctcctctcgctcctcttccccctccgactcccgctcctcctctcgctcgcgctccgtttctcgttcccggtctccctcgcgctccagatcctcctctccctcctcctcgtctccctcccgaagttctcgcagccggaacccttcccc

SEQ ID NO: 6017 - DNA, 262 bp, Glycine max
  Clone ID: 701097643H1
gggaagccaacttgtgtgtaatgggtgtaggaacatcttggtttaccctagaggagcaaccaatgtttgctgtgcattgtgcaacaccgttacctctgttcctcctcctggaatggacatgtcacaactttattgtggaggctgtacgacattgctaatgtacacacgtggtgctacaagtgtgagatgttcctgctgtcacactattaaccttgtaccagtactagaatctaatcaagtcattcattgtacgaactgccgg

SEQ ID NO: 6018 - DNA, 262 bp, Glycine max
  unsure at all n locations
  Clone ID: 701097644H1
ttcattcttataataatcattattttcttccacaccttcgtccgcttctgncgccgtcgccgccgtcgcctcttctctcgttcgcttccgaccaattcctccgccgccgcctctctcgacgacccgtgcctcgacccttccgtcatcaagtcccttcccacttttactttctccgccgccacccaccgctctctccaggactgcgccgtttgcctgtcggagttcgccgacggcgacgagggccgcgtgctcccgaattgta

SEQ ID NO: 6019 - DNA, 268 bp, Glycine max
  Clone ID: 701097645H1
aagcaaccccgttgtccggagccaccattttgcgctccggcaatgttcttcccggtggccatcgtcccttaaacccaccacacttcaaagtcatgggtattccatgggacgacgtcgttgtgatccagcaagggaaggatcacaatgagccctgcatcgtcaccgtcaattgccccgacaaggctggtctcggctgtgatctttgcagaatcatcctcgagttcggtctccgcattacccgtgctgatatttccacggatggaagatg

SEQ ID NO: 6020 - DNA, 188 bp, Glycine max
  Clone ID: 701097649H1
ctctgcttccgacacaaatcaatctttctgatcatatattattctcctgtcgttttaatttattctccatacacatgcagacactaagttcgaacaagttcaggagcggcatggatttcttccaccgcgcgaaggcggtgcgcctccgcagccaccaggacaagtaactcctccggggagatgacgag

SEQ ID NO: 6021 - DNA, 79 bp, Glycine max
  Clone ID: 701097650H1
agtggatcgattttagttctgtatggcttgacatgggaatagcatgaggaatgtgagaaagattgtcggttaagatttg

SEQ ID NO: 6022 - DNA, 174 bp, Glycine max
  Clone ID: 701097651H1
ctcgatcgatttcgattgttgaattcatcacatcacggagccttgtacgttgacaacgatggtgctgccgctatttactgctttcattctctttgcttttattccgaatggattgttagcaattccttccaacgtcccgggattcccttgggtcatcacattatgaactgggct

SEQ ID NO: 6023 - DNA, 260 bp, Glycine max
  Clone ID: 701097652H1
gcaaattgagaaaaacttggcaagcttagaaaatgttgtgatcatgctgatatactatcagttggaccagccaaagaggagaagaaagatgaaccaaagaaagatgagaagaagccagaagacaagaaagatccagaggaggaataatgtgaacttctgaaaggcttttcatatcagaccaagcaagcagaataacccccttaattatccaggaccatgggaagagatcccactagctgggttaattgctcagtaatggg

SEQ ID NO: 6024 - DNA, 247 bp, Glycine max
  Clone ID: 701097654H1
ctcgagccgcttttctcttcttattttcaaacatggagtggcatagcaggcacaccataggccaaggctcatcagccaccgtctccaccgccacatgccgtggcggtgtcttcgccgtcaagtcaacggagcttccacaatcaagagctctcaaaaaggagcaaaaaataatgtcctccccaagtagtccctaagggggtgcctaccaagggtgtgacattaacattggggaccacaagcccctggt

SEQ ID NO: 6025 - DNA, 244 bp, Glycine max
  Clone ID: 701097655H1
aaagattggtcaaaatctatcctatctctttgcatattctttcttatcatcatcttcttctctcttgcctccagaattggaaagttcttcctctgcccagagtctttgacacccttttccaatctctaggtgttttaatgtctttcctctataattatcgccttcagaaaacctctatcccgcagaacattgagtaccaaaaacccaaggcttggacctctcaaaggttgaatcctttcctctt

SEQ ID NO: 6026 - DNA, 114 bp, Glycine max
  Clone ID: 701097656H1
aatacaagtagtaatctaaatctctatccttatagttttctgtgagacacttttggaacaaatttctcaatatcatttgtgtctcatcaagagcagtttttcaattgagcaata

SEQ ID NO: 6027 - DNA, 263 bp, Glycine max
  Clone ID: 701097658H1
atcgccgctggctccaaggtgcccacactcgatcagcttctctccttcctccgatccaaatccaccgatcatctcaactccttcgcctctcagctcttcgccgtcgtgctctccgacgcctctcccgccggcgggcctcgcctccttcgccgacggcgtgtggggtgagcaatccctctcgcttctcccttccttcaaacaacttgtcagtggctgttacaaggcccatttgggttcagttgatttccagaacaagggtgttg

SEQ ID NO: 6028 - DNA, 259 bp, Glycine max
  Clone ID: 701097659H1
gttttgcagagtgtcgcgtttgtcgcattccatacgaggccgaagcgaagagtgtttgtagggtttgcgttgcgcatcgtttgagagagagagatgggaagatgaaaagagacaacaaaggtagcttacgcagtggagcagcttgtagccttcaatcgatacaatcccgatattcttccagatctcgaaaactatgtcaacgaccaggtttcgtcgcaaacttaatagctggacgcgaatctctgccttcttcgcctct

SEQ ID NO: 6029 - DNA, 105 bp, Glycine max
  Clone ID: 701097660H1
cgttttcactgatgtgtgcattgggtggcctggttcaatgggtgatgatcaggttttggataagtcagcgctttttcatagggctaataatgcggggcttaatct

SEQ ID NO: 6030 - DNA, 252 bp, Glycine max
  Clone ID: 701097661H1
cgtttgctacctaaaccctagtctccatacatcaacttgggaggttaaagagacggcaacgttgtgctgtccgccttgaccgagccagagcttcgtcttggccctcgattttgccctgtaaaactaatcccagtcacaacagaaataatcaatggcaccgaaacagaccaaggctgagaagaagatcgcttacgatgcgaactgtgcgacctaatggaggagtacggccaaatcctcgttgtaaactccgac

SEQ ID NO: 6031 - DNA, 267 bp, Glycine max
  Clone ID: 701097663H1
tgcaaattcaatggcttcagagaagaaactatcgaacccaatgagggaaataaaggtgcagaaactcgtcctcaatatctccgttggtgagagtggagatcgtctcaccagagccgccaaggtgttggaacagcttagtggccaaaccccagtgttttccaaagcaaggtacactgttcggtcctttgggattagaagacatgagaagattgcatgctatgtcactgttagaggtgataagggtatgcaacttttggagagtggttt

SEQ ID NO: 6032 - DNA, 257 bp, Glycine max
  Clone ID: 701097666H1
gcagtttccaaagaacccaactcaacttcaaaaccccataataatctctctttgacattcatagaaaacacacaccatggactcttgttcatcaccgccagacaacaactccctcgctttctctctttccaatcactttcccaacccttcctcctctcccctctcccttttcaactccttcacctatcaatctctctctctcacaggacgccacagggcggatcaacctctggagccaatggccggcggaggagcga

SEQ ID NO: 6033 - DNA, 259 bp, Glycine max
  Clone ID: 701097667H1
acaaaatccaatattcaccatattcttgaaccaaattaacaagcaaggctagtgtactctacttgcagcctgaagctactagcaagcatcgtataggaagatcgagaagaacaaagttgatgaaaatcctgaaggaattaactatgagatgaaatggggtcgtgattcttcaatggatcacaaagggaagagttctgttcgagctttcactggttcttggaaaagttctctcttcatcattgggagtgaggttagtgag

SEQ ID NO: 6034 - DNA, 153 bp, Glycine max
  Clone ID: 701097668H1
gcatcccacaaattatcttcaatagaggtccgagttgacgatgcgagagacacagtcagggtccaagctaaaaaatcttctgaactaaagaatagtcatttgcttgacggtggtgttcatgttgaacaacctggttattgtgctaatgggtaa

SEQ ID NO: 6035 - DNA, 183 bp, Glycine max
  Clone ID: 701097669H1
tgtgaatcgcttatttggaatcttcaatgcaattgctatcattgccacgacttatggaaatggaatcattccagaaattcaggcaacattagcaccacccgtaaaagggaagatgctcaagggactatgtgtttggtaatcttgtcttataagttacctctttaagtgtatccgtatcccggt

SEQ ID NO: 6036 - DNA, 191 bp, Glycine max
  Clone ID: 701097670H1
ttgaattcttaggattgctctgaatcggtttcgtcttcttcgtttttcttcaaaatccgcgtgacagatctaatctaatcagccttttgggggtgtttcagacattgcatgcatatgggagcagtgggtgtgttggatgccaaaaaaaggcctcactgagttccacagtggattttccaacaaaaagggtg

SEQ ID NO: 6037 - DNA, 239 bp, Glycine max
  Clone ID: 701097671H1
tgcaacttctcactcttgtgatgcaaaccaacctattgcagcttctaactctggcgatccaaaccaaggacgctacgctttagaaattaagtattatgcctttccgaaattccaatatgatagtacacgaaaagctatggagaaatggtggatttttgtcaagtgtgattgggctaatctgttaagcgttgaggtcctccttcaaacaactaatttgaaagtgggaactcctgaagatc

SEQ ID NO: 6038 - DNA, 115 bp, Glycine max
  Clone ID: 701097672H1
cactcgagccgatcggctcgagcggctcgagaattattgttctcaagcctttgcttaacgtttaaagatctccattttatttggcagtgagaagtaatcagctggggattcgtag

SEQ ID NO: 6039 - DNA, 254 bp, Glycine max
  Clone ID: 701097674H1
aaataacaaacgcacgcttctcattctctctctactcgttcagaaggattttctcacaaggactgagtatgaccgaggagtcaacaccttttctcccgaaggccgtttgtttcaggttgagtatgcaatcggagccatcaagctgggatcaactgcgattggggtgaaggccaaagaaagacgtgtcctttcagttgaaaagcgcatcacattggcggtccttgagcctagtaatgtttaagaaattatgggaa

SEQ ID NO: 6040 - DNA, 250 bp, Glycine max
  Clone ID: 701097675H1
agaaaacaaaaaatgaaaaattactcgatttttatttctccaaaatgatcaattttataagattgaatcgactaaaaaatgaaatgaatcatttcatattgatagtattgctatgcttagtgtgcgactcgttagttttttagaacggttccaatttaacaaatttataaaccggttcatcgtataaatgaattaaaaaagaactaataaccaacgcatcgcttcgggatatctagatctaaagaactag

SEQ ID NO: 6041 - DNA, 242 bp, Glycine max
  Clone ID: 701097677H1
acaacctctagataaatggggaacaaaagctcatcaacttcaaaggcacaatatagtagtaatagccagggagaaaaggttgcttcaacacaactacaatatgttgctgctccacacccgaggaaaatctccacaaataatccaaaggatgtgagtcaaacacaacaacatggtaagaagccactaggtaatgatgaagctttcacacttacattaaagatgctagggttaaaatgaagagc

SEQ ID NO: 6042 - DNA, 261 bp, Glycine max
  Clone ID: 701097678H1
ctcgagccgttttcattgttgaagctcacaagcaaaggctaaagtagattctattctcctcaagcaaaacctatagctcccccacactcctccagtacttgaataaaagctagataaatattaaagcctttccttcatcaaggtactgtttgatctttgaatttcagtcctcaaagattggaacaacaggaacatgtgtactctcacaactgttcctgtgctcccttctaagcttaacaatccttcgctttctccgaacca

SEQ ID NO: 6043 - DNA, 243 bp, Glycine max
  Clone ID: 701097679H1
tctcgatccgattcggctcgagatcattgttggctattcattcattcatgttcctcaggagagagaggttgcgtgtgattcggattcgaattcgaattagggttttgcgcatcgtcatcgaatttttctcttatgcaaggaaggttttccttctccgatttgaatttgattgaacgagtagtgttaagattatgatatcttttgagaagcttcgtgtctctcctcacttgagccgcttcattg

SEQ ID NO: 6044 - DNA, 269 bp, Glycine max
  Clone ID: 701097680H1
gaaatggtgattcccgttcgctccctccctcgaccaccaccgccgccgccagatcaacctccccaagccccaccgtgtctccgatttcctccgcaaaacgcccaacctcttcgaactctacaaggaccagaagggggtgctctggtgcggcatgaccccaaaagccgagaacttgatggaacaacaacaaagggtcatcgaagaacacgccgacaaagccaccgaacacgtcacgaggtttctcatgatgtcgctggacaaaaggcttc

SEQ ID NO: 6045 - DNA, 131 bp, Glycine max
  Clone ID: 701097681H1
tctagaatacttctcctcttgtctctgttcaagctttaatattgcatcccatgcattttaagatggagctgtctctaataccagtaactatagctccccgggggcaagtgcaatgcccacttgaggtcatt

SEQ ID NO: 6046 - DNA, 133 bp, Glycine max
  Clone ID: 701097682H1
atgagaaagaaaaaggaggtttgagagactagaagaggattgggatttggcaagagatttagattagcatggactcaagaatggagtgtagtagtcatcaacaacctcagtcactgtaaaatttttttggttg

SEQ ID NO: 6047 - DNA, 258 bp, Glycine max
  Clone ID: 701097683H1
tggttggggtcgcttagctcaccatcctcaacttacgtaaaacatggtaattcaaatattaggctggaacattttaaattgtctttggagaaaatttagttgaacctgggttatttgtaaaagttcattttgactctagggtttttttagtccataaacttttccaattgcttgagatgatataatattataaggggtttctggcatagtaaggttaaaagatgtttgatatgtcaacgtctcaaacaggcaaagtaa

SEQ ID NO: 6048 - DNA, 165 bp, Glycine max
  Clone ID: 701097684H1
cttccccatctttccggagcaaggaattcaataggattgttgatttgcatcctactaaccttgatgacctgttagcatctgctgacccttctgtattttctcaactacatggactttctgtgcaaccttcaacacccacacaaagtggggctcagatgcggcaaa

SEQ ID NO: 6049 - DNA, 257 bp, Glycine max
  Clone ID: 701097685H1
caaccaatcaccctgtctttctgacccaaaaacatagtcccaaatcgaacaaaatcaatcaactaactcctccaacgttgttgttattatgcagacaacaagttccaacacctccggcgccacctcgatcccgtcccgcatggagctcttccaccgcgcgaacggcggtgcgctccggaagcaacacgaccagtacctcctggccgacgaggacgaagagtccgtcacgcaagacccgcacggatcctcccgcaaag

SEQ ID NO: 6050 - DNA, 257 bp, Glycine max
  Clone ID: 701097686H1
tgagatcgcagtcgcagcgtgtggtgcaggaacaagaagaagcagagtgtgtcggcgacagcatgcgacagagttgttgggccaacatgccccaagagcttctccgagaagtcctcttcagaatccaggcctccgaggacgcgttgccgccgcggaagaacgttttcgcctgcggcggcggttggcggaacttgggaccaatcaacataggccttgtcaaaacaaccggaatcttcttcaagatcaactttcccaat

SEQ ID NO: 6051 - DNA, 79 bp, Glycine max
  Clone ID: 701097687H1
gggggaacaagttctttcttttattattgtgaaagagatggtggccccgcaaattgaaaggacaatgactgagcagttg

SEQ ID NO: 6052 - DNA, 177 bp, Glycine max
  Clone ID: 701097688H1
gtttcttttaagatatttttggtcacatagtttatggtctgcctctgcgtagtgcttcaacagccccctgctcgctcgatcatcttgattattttttaagccttttaaatgcccaacatcttgttcttgatgtttgagattgatgtatccaattccttagtgaatcttcctttccgg

SEQ ID NO: 6053 - DNA, 204 bp, Glycine max
  Clone ID: 701097689H1
tataaacctgattataacagattactgcatgccaggaatgactggctatgatctgctgagaaaaatcaaggaatctaaatctcttagaaacataccagttgtgattatgtcctcagagaatgtagcatcaaggatcaacagatgcttggaagagggagcaggagagttctttctgaaaccagttcaacaggcagatgtggacaa

SEQ ID NO: 6054 - DNA, 169 bp, Glycine max
  Clone ID: 701097690H1
tctcagaatccaaaccctaggaaatttccccttcagacgaaaccctagatttcctctcacaaatctctctcagcttccccattctcgggattcggcgtccagatcacagatcccgttcaatttgttttccgcatcccccgatcgggtttggattctgaagaaaagttcc

SEQ ID NO: 6055 - DNA, 256 bp, Glycine max
  Clone ID: 701097693H1
tactagggttcagaaacgaaaaagggttcggtgttctgttcgcgatgagagccaagtggaagaagaagcgtatgaggaggttgaagacgaagcgccgaaagatgagacagagatccaagtagtgcgttaaacctagtttgtttctgttgcttttacaattgcttatgttgtcgaatgggacacccagttgttagtggcactggtttctcctttttgatgtctgatacatttggttggattcaagtagtttatgttc

SEQ ID NO: 6056 - DNA, 243 bp, Glycine max
  Clone ID: 701097694H1
attcaacagacacagactgtatcagcggttccctgcacctcctgagtactcttctcgactcggagctcccgagcgtgagaaacttcaaaggaaaatggtcactccgccgagtcaaactcactcaattcgaaacccacctcaccgatttctccgacgagttcccaaacgcctccacatcgaaccccctctacctacacttcctcgactcaatatcgcaaaccctcaacgacgccgtttcgctct

SEQ ID NO: 6057 - DNA, 265 bp, Glycine max
  Clone ID: 701097695H1
cggctcgatggcaattaacgagtatatatggacatatgctgctcttgagtttgcacttgtggctttaactgtgcatctattttatactatgttgcatttgacagccatatatgccatactactttcatcagttttgggttttggaattgctatgggcatcaactacgcatatattcagtctgtcacttggagacttcaggtttctcatgatgataacccagtatgaatctcctcacaagggaaacaacttcatgaatttgttttc

SEQ ID NO: 6058 - DNA, 268 bp, Glycine max
  Clone ID: 701097696H1
cttttcaaggttgagaacaaccaagaaccagagcgacacaagcacatgactgtctctcttcctaaaccgaatgaactgcgacctttaaaccaatcttcttacataatggtcgtttgaaaatctcgtattttcatctgggtttccttcaaaatcatttttttttgtttccctttcttcacttcctctgcccttcttgtcttggttcttctgttttaagcagctttctcttgttgatcattaatcatgtcaatatttaaggctttgaagc

SEQ ID NO: 6059 - DNA, 143 bp, Glycine max
  Clone ID: 701097703H1
tgtatgcatggtggactctctcctgagttacacaatctgaatcagataaagagtttgccgcgtcctattgaagtgcctgaaactggtctactatgtgcactcctttggtctgatcctagtagtgacattcggggttggggaga

SEQ ID NO: 6060 - DNA, 162 bp, Glycine max
  Clone ID: 701097704H1
ctctgtttctgtctctgtgtttgcggctgaggattccgaacgagcgaccttcttcgtttctcgcaaagtttaagtcatcatgggtaaggaaaagactcacatcaacattgtcgtcattggacatgtcgactctgggaagtcaactacaactggtcatttgat

SEQ ID NO: 6061 - DNA, 150 bp, Glycine max
  unsure at all n locations
  Clone ID: 701097705H1
attttggttctgtctttatttntctttttcatgtaagcaaaagaacgaattagagtgggaagacgatccaactcggacccgttatcttcattctattcaaccgatcctctctttttcttgtccnagcagatagggcatggcaacagatga

SEQ ID NO: 6062 - DNA, 101 bp, Glycine max
  Clone ID: 701097706H1
ataaaccaccaccggagacaaaaccagatcccccttacttccagcgacaagcccgctggctgtcgctcttgattttgtctctctaaaccagatccgaacaa

SEQ ID NO: 6063 - DNA, 157 bp, Glycine max
  Clone ID: 701097707H1
gttttggagtcatcctatgggagcttgccactctaaggttgccgtggagtgaaatgaatactatgcaagttgttggtgccgttggtttccaaaaccgtagacttgatattccgaaggaagtcgatcctatagttgcaagaataatctgggagtgttg

SEQ ID NO: 6064 - DNA, 161 bp, Glycine max
  Clone ID: 701097708H1
ctcattccattcacattctcaacccaacacacaacttccaaccatattctctcgccacttcctcacatggacgcaaagagaaccctagagctcacggttttatcgttggaggagctccacgtggactggaagcacgccgcggagagcctctacgtggtggt

SEQ ID NO: 6065 - DNA, 150 bp, Glycine max
  Clone ID: 701097709H1
gaagaaacaaagagaagggaaatatcaggaggtgcgagtaccggagccaaacgcgggtgtgtgtgtgtgtgagggagagagagatgcagttccattcagaaactccaaactaaacatccctggcgacaaccttaggaatctcgatcgctg

SEQ ID NO: 6066 - DNA, 157 bp, Glycine max
  unsure at all n locations
  Clone ID: 701097711H1
cattggccaattcggccactcgtctctgaaaaagcctccagcctccttcttcatccatcttccctctccaccaaaatcatgagggggncgnnccgntattcatcgaaccggtctctcaagtctcgtacttggcttagttcacaactcgaaacttcac

SEQ ID NO: 6067 - DNA, 155 bp, Glycine max
  Clone ID: 701097712H1
ccacacacaaacagaggctacgtacgatcaaattaattaagatggcggaagtgaggaacaaacaactggttctgagggactatgtgagtggttttcctaaggaatccgacatgaacatagttgaaggaaccacaatattgaagcttccacaaggt

SEQ ID NO: 6068 - DNA, 154 bp, Glycine max
  Clone ID: 701097713H1
cttgaatctcattctctatctgaatctttttggattattactgattttgttagttgctgtattgatacttgttcatttctttgagaaagcctatacaatccttggagaagggaagaaaaggagagtactggtaacattggaggggaacaacaat

SEQ ID NO: 6069 - DNA, 154 bp, Glycine max
  Clone ID: 701097714H1
ccgatggtgctaatcaacgtggtcgtcgtttgcttgggaaataggggtgtatatcatgagatcgatactaatttttaatatgcattagtcaatcaaaggagcttccaatgttccaggatactgatttcaaatatagtaatgtacaatacgcttg

SEQ ID NO: 6070 - DNA, 154 bp, Glycine max
  Clone ID: 701097715H1
atgaagcagtgtcagctataatttttgctagtcgtgataagaggcaaactgcctcattaactttctctgagctatatggagcagtgacaatgaataatgtgctttgcctatcagttttcttggcgcttgtctatgcgaggggattgacatggga

SEQ ID NO: 6071 - DNA, 160 bp, Glycine max
  Clone ID: 701097716H1
agacgagatgtgcaagacatcttcaaattgactccccacgataagcaagtgatgatgttttcagctacactcagtaaagagatccgacctggttggaagacatttatgcaagatcccatgggaatttatgtcgatgatgaggccaaattgactcttcatg

SEQ ID NO: 6072 - DNA, 157 bp, Glycine max
  unsure at all n locations
  Clone ID: 701097717H1
atcgagccgctatatactaatctccatctaatagtgttaatttgtacttctctatctctatcactcatngggtgttttgcttttgatgaggaaaactcctccaccgtggctccggcaacactctacaaagctctgacaaaagatgctgacactatca

SEQ ID NO: 6073 - DNA, 119 bp, Glycine max
  Clone ID: 701097718H1
ctcgagccgtgttgttctaaagcactcatccacacattctccgtcgccacgacaacaatggctccaaagaaaggtgcgaaacgtcgagttgtagcagcagagaagaaggttcaagagaa

SEQ ID NO: 6074 - DNA, 158 bp, Glycine max
  Clone ID: 701097719H1
ggcatgaacagctgcaatgttggtgcctcaactttagaggaagggtcactgttgcctctgtcaagaattttcagctgattgcctcaacaccgccagcagccgttgctcctacaggaacaggacctacaccatctcagccaacacagtcttcttctgac

SEQ ID NO: 6075 - DNA, 144 bp, Glycine max
  Clone ID: 701097722H1
cgaggatttcaactttaggctccatctagaaaaaatggctggtttggctagcaatcttccactaattgttatgataggtctgcaaattcattatgcagcacgggccatattcacaagagtcgctctcttagatggggtgagtac

SEQ ID NO: 6076 - DNA, 156 bp, Glycine max
  Clone ID: 701097723H1
ggactattcaattctctatatttaacctctttccctcattctcttctttcactttcacttcctcatggcatcaacaaagagcatgttcatgtccttcgccatcctcctcctcctcgctctcttctgcgccaccgtgtcagctcagggctctccaac

SEQ ID NO: 6077 - DNA, 145 bp, Glycine max
  Clone ID: 701097724H1
ctgactcgtcaaggaagacatcctaatttcattcgctttaactcagtctgcctcgccggaagttgtataacgcctcagagaccggaaaacttaaaattcgacgcctcgtcggaaaaccggctgctatagcgcgcgaccaccgaat

SEQ ID NO: 6078 - DNA, 151 bp, Glycine max
  Clone ID: 701097727H1
ccagcttcaatctcagatgcagcaacaacaacaaaaccttctgcaaccaaatcagttgcaatcttctcagcaatccattatgcaaacttcatctgttatgcagccatccatgatgcaaacatcttctctatctagcattccacacaacata

SEQ ID NO: 6079 - DNA, 155 bp, Glycine max
  Clone ID: 701097728H1
atccttcttttcttcttatgacatccaagtgcatgattagaaatcaggtgaaaaatcttttttgagacaaaagtacttttataaaagtatcagaaattttatttttgtttttattcgttggattgcattggaatgcgtatcataataatttcaag

SEQ ID NO: 6080 - DNA, 106 bp, Glycine max
  Clone ID: 701097730H1
ctcgagcgggtcctaggttccgctatttcgccctcctgtcgcggacatcaactttgtaggctcgccttagaaacaaatactctcttctttttggcgggggtgagag

SEQ ID NO: 6081 - DNA, 159 bp, Glycine max
  Clone ID: 701097731H1
aatgtttcttatttcttcctttcatatatattcaaaatttcaaatcaaatgaaacagcttttgtgttaaatatagaggaaacatggttataaattgattgtctcctcataagtcttctgaaccctttcagaaatgaatttaaggggaagaaccacacaa

SEQ ID NO: 6082 - DNA, 158 bp, Glycine max
  unsure at all n locations
  Clone ID: 701097732H1
cattctttcagcctcccttcaacaccctttacgatccccanncttccaagtctcnaatcgaatctcgaagacctgcgaagaacttaagggttgtttaaattctgtgtggttgttgttggaggttgaaatacaagttgccgcctcaagtgtgtgttaat

SEQ ID NO: 6083 - DNA, 160 bp, Glycine max
  Clone ID: 701097733H1
actcgagccgattcggctcgagtcacaacctagcttgcccacaccaccatcacaacacaaaccattcctctcttgcatttaaacaaaaataaatatagattctgggggcatttcttggattctggttctcgttggtcacatccatcaaacacccctttga

SEQ ID NO: 6084 - DNA, 161 bp, Glycine max
  Clone ID: 701097734H1
gtagattcaaggaacatgcttagaaaactgccaagcccacccatattctctcaaaactttcaaccatgaactgaacaacaacaacaacaacaacagggccacccgtacagacccacctccaaagagatcattttattaccaattttccgattcacagagaa

SEQ ID NO: 6085 - DNA, 100 bp, Glycine max
  Clone ID: 701097735H1
tgataagatactttgtatgcatggtggactctctcctgagttacacaatcatgaatcagataaagagtttgccgcgtcctattgaagtgcctgaaatggg

SEQ ID NO: 6086 - DNA, 138 bp, Glycine max
  Clone ID: 701097737H1
attttggttctgtctttatttttctttttcatgtaagcaagagaacgaattagtgtggtaagacgatccaactcggacccgttatcttcattctattcaagcgatcctcgctttttcttgtcagagcagatagggcat

SEQ ID NO: 6087 - DNA, 121 bp, Glycine max
  Clone ID: 701097739H1
tctcgagccgaatcggctcgagtcgcctcttcgacttccttgtccaactcgaggctacgacgcaccagcaagttggcgtctcttaccgagaagctggatgtgttggagcggaggttggagc

SEQ ID NO: 6088 - DNA, 155 bp, Glycine max
  Clone ID: 701097740H1
ctaagagattaatctatggaagagaagaaccatggcaccacctaggcctcttcagttgaatcccgtgcttacggccaaatgattcttttactcattcaaatttctagattttccctcttttattcatttcctcgattcgaacaactgcagataat

SEQ ID NO: 6089 - DNA, 154 bp, Glycine max
  Clone ID: 701097741H1
tcgaggattcaatttattggcagttaaaggatggtctctcacctgaggctgaggttgtttatgtgggatctctcaaggctgatgttgatgcaaatgagcaagagaaagtttcccttcagttgctggatggaatcaattgcgtgcctacttttat

SEQ ID NO: 6090 - DNA, 60 bp, Glycine max
  Clone ID: 701097742H1
tatcgagccggaaaaaactgatacaaagatctagtcatatctagtatcgaacaggggcga

SEQ ID NO: 6091 - DNA, 153 bp, Glycine max
  unsure at all n locations
  Clone ID: 701097743H1
ctcattctagctttcctctccgaaccctcgatcactctcacgcgctcctatattcgatcctccaccgtcgctctatcgaaggaaaanaanannatcttcatcacatggcgaaagaagcatctggtgtggcagtccatgatgactgcaagttga

SEQ ID NO: 6092 - DNA, 129 bp, Glycine max
  Clone ID: 701097744H1
ggaacactcattatcctcttctctaacaaagccatagtacgacgcttttagttcattagttcttcttatcctatggataccattcgtaccagcaccatcacccgcgtgcaacagagaagcccaacagag

SEQ ID NO: 6093 - DNA, 149 bp, Glycine max
  Clone ID: 701097748H1
atctctctctctcttaaaccatcatgtcctccaccgcgcctcccgtcctccccatctccaacccccaaaccaccgcgggaaccaccggtgcaggccgcggcgccatcgaggctccggccaacaacccggccttccgcgctttcatcaac

SEQ ID NO: 6094 - DNA, 137 bp, Glycine max
  Clone ID: 701097750H1
tttcaaacagtcggtaactctttcttttcttttctttctttctccgatcgcatcgctcgcaaccacaatcatgccttcccgaagaagaactctcttgaaggtcatgattctcggtgacagcgggggtggggaagacg

SEQ ID NO: 6095 - DNA, 120 bp, Glycine max
  Clone ID: 701097752H1
tcgcttatcatattcttcactctctttgcctctcaatgtggttttttcaacaagggttattattaggtgaagatgatgatggtgcatcctcgtgatcaagtaggtggagagacacacaag

SEQ ID NO: 6096 - DNA, 149 bp, Glycine max
  Clone ID: 701097756H1
caacgacctcgttttgagtcggaggaagagtacttggctctgtgcctcatcatgcttgcacaaagcggtaacaacaacaacacccaattaccgtcttcgtcacagtcacacaaagaagcgtcaccgccgctgaaactatcacacaggtg

SEQ ID NO: 6097 - DNA, 145 bp, Glycine max
  Clone ID: 701097758H1
cctcaggttgattctatttgtctgatggccatcttgcacgtcctgatcttattgtgttcaagtgacggacaaatccagacaggaaagagagatttgaaatgtacatgccaagcaaatgtgcaaagtacagtcaatttttagtgat

SEQ ID NO: 6098 - DNA, 58 bp, Glycine max
  Clone ID: 701097760H1
ctcgagccgctcaagccgaatcggctcgagcaaattttgtcttgcagactggaatcgg

SEQ ID NO: 6099 - DNA, 132 bp, Glycine max
  Clone ID: 701097761H1
aaggaaacgtattaaaccagaccctagaactagcatcagatcaaaaccaacgcgattgcgcgatcaaaaggtctgtgttctctctcgatcctcgcgaaacgcgctttttcgctcaccctttcttcatcttcc

SEQ ID NO: 6100 - DNA, 156 bp, Glycine max
  Clone ID: 701097764H1
tcattttgtacaagcgatgcaggaggggtttaacgaaccacttcatgggaaaatcgaagtcattcacggatctatcacaagtgaacacactcaacacagtgaatgaacttcaaaagcaagagaaacctttcaacaagagaagaagggttcaaatag

SEQ ID NO: 6101 - DNA, 145 bp, Glycine max
  Clone ID: 701097767H1
catcgtttctctctctagatctctgtttcttctttttctccaaccttcgtttcaccaccacacttacattactttgtcgaaatggctccagcaattgagaccccaaacaaggcttccagctatcaacagtccccataccctcgtc

SEQ ID NO: 6102 - DNA, 114 bp, Glycine max
  Clone ID: 701097771H1
cctcgagccgaatcggctcgagcggctcgaggtaccctcctacaatcacaattcataatatgaacaacctatctcacctcttaaatattctgaatcggtttccacataacatac

SEQ ID NO: 6103 - DNA, 168 bp, Glycine max
  Clone ID: 701097773H1
tcggctcgagctgcctatgaatatccttgatcatgaacgaataatttgttttggtgatctgaattatcgtatcaacttatcaaatgtggaaacaaaagctcttatctcaaaaaaacagtggtcaaaattggttgagaaagaccagctcatgctagaactcaagatcgg

SEQ ID NO: 6104 - DNA, 79 bp, Glycine max
  Clone ID: 701097776H1
ctcgttttcaatatgcagatcttcgtcaaaactctaaccggtaaaacgattacgctagaggtcgagtcctccacacaat

SEQ ID NO: 6105 - DNA, 148 bp, Glycine max
  Clone ID: 701097780H1
gttgatgtgagattccccagaccagatagatcaatgagacttgataaccaccacattgaaattgagagacaattgaaggatgtcaaatggaagaaagaaaagattatggaggaattaaaaagggaacaaatattgttggacacgacga

SEQ ID NO: 6106 - DNA, 159 bp, Glycine max
  Clone ID: 701097781H1
cggctcgagagaagaagaagatggagaagtatcagatctggagcaggagaatagcgttggcagcgcttgcctttgctctgctgttccaatcggcctcagcagaccgacgtcgttgtggtctctgaagataacttcgagaaggcagttggtcaggacaga

SEQ ID NO: 6107 - DNA, 136 bp, Glycine max
  Clone ID: 701097782H1
ctcaaatctcaagtaagtatcgctctcgccccatggcagacgcaataggcgcgcaacactgcaacagctgacttcgtttcaatttcaacgacgcccttaaccagtttcagggccaaccagctgcagctccagcatc

SEQ ID NO: 6108 - DNA, 112 bp, Glycine max
  Clone ID: 701097783H1
actcgagccgaatcggctcgagatattagggcacactttgagatggtcaataggatggtgtagactgtatgtggtgtctgcaagctaggcctgagttgaggcccactatggg

SEQ ID NO: 6109 - DNA, 114 bp, Glycine max
  Clone ID: 701097784H1
atgaaaactaaggaaggaaggaagagtgagcgtgacagatgcctttggcgaggctttcaaggtctcgaacgctcgacgttgctattgacaatgggcaaatcatttttcaatctc

SEQ ID NO: 6110 - DNA, 126 bp, Glycine max
  Clone ID: 701097789H1
aaacgaaattctttccctttgacaactgcaatctaaggtagacataacaaacacaacatgggttctatgggcacaatcaacaagccacatgctgtgtgcataccgtacccagcacaaggccacata

SEQ ID NO: 6111 - DNA, 128 bp, Glycine max
  Clone ID: 701097791H1
cccaatttgaattgttccattttcatttctttcgcaaaagtcgcaactacttcctcagaaaacaagtttctaagttaaggaaatccagagagatcacaatcgccggccacggtccagctacatgcata

SEQ ID NO: 6112 - DNA, 144 bp, Glycine max
  Clone ID: 701097792H1
ctccttctgtccgctgcgactctctttccttccctctttttccgaatctgaatcgaaatggcttcggagactgagacgtttgcttttcaggccgagatcaaccagctcctcagtctaatcatcaacaccttccacacaacatac

SEQ ID NO: 6113 - DNA, 145 bp, Glycine max
  Clone ID: 701097793H1
caatattccaatttttgctattgcaattagtatttttgttagtttcacctttgctgccatgtatggtatagctgttgctgcgcttggcatgctgagtaccattgccaccggattggccattgatgcatatggtccaatcagtgac

SEQ ID NO: 6114 - DNA, 140 bp, Glycine max
  Clone ID: 701097794H1
gcagctcccacaagaaccagacagggacgagggggaagtagcaggtcagaggtaccgtgtgggctatgtccgcgaaggcaagacagtcgaaagcttgcattcaaccctcacgccgcgatcacgccaaacaagacaggcat

SEQ ID NO: 6115 - DNA, 146 bp, Glycine max
  Clone ID: 701097795H1
gtttatgtgagattccccagaccagaaagatcaatgagacttgataaccaccatattgaaattgagagacaattgaaggatgtcaaatggaagaaagaatagattatggaggaattaaaaagggaacaaatattgttggacacgac

SEQ ID NO: 6116 - DNA, 199 bp, Glycine max
  Clone ID: 701097813H1
taggaggagaaaggctcaataggcagaagcatcaccataaagcaagacacttttttcctcttcattccttccttcaccttcttcgttgcttgcggtgccctagattttctctatcctttcaatcgttcccgaattccctcccgctaggctttcccatggattccgaggacgatatgcacgacgccaacgctgtggagtc

SEQ ID NO: 6117 - DNA, 187 bp, Glycine max
  Clone ID: 701097815H1
tcgtccttgaaatatgctcacaactgctatacttaacaattcccaacatactagagcatcctggattaataaatactacgattttcttgtgatgcgcaccaattgcaaaacgactaggatgggcccacttctatcatcttgaaaaaagcaccaagatgccctggttgtctaataaccattcagcaga

SEQ ID NO: 6118 - DNA, 196 bp, Glycine max
  Clone ID: 701097816H1
ttcaccgcacgaatatcttgttgtttggagcgatccgagaaaaactctgtaaacatgttggtttaccaggacctccttacaggtgatgagcttctctctgactccttccgttacaaggaaattgagaatggaatgctgtgggaagttgaggggaagtgggttgttaaaggagcagttgatgtagacattggtgcaa

SEQ ID NO: 6119 - DNA, 61 bp, Glycine max
  Clone ID: 701097819H1
ttcggctcgcgctaatcttaagtggaaccttctgcgaaattagccttccttcgtcccttga

SEQ ID NO: 6120 - DNA, 185 bp, Glycine max
  Clone ID: 701097822H1
attgactccaggcatttggctgagaatttgaagaatacggtgaagaacgttgtgagccaagttgctaagcggactctcaccacaggtgtcaatggatagcttcacccttcaaggttttgtgcgaaggacttgctcaaggttgttgatagggagtacacatttgcatagattgatgacccctgcag

SEQ ID NO: 6121 - DNA, 163 bp, Glycine max
  Clone ID: 701097823H1
tagctggttataacccgctaaaatcgccgtcggaacactgttcatcggagagaggatcctctgcgaccacgttttcgctgaggatcggggacaaaaatagcggaatcacatttaccacatacccaattgagcttcagagtcacgtcacacaaggatcctgaaa

SEQ ID NO: 6122 - DNA, 189 bp, Glycine max
  Clone ID: 701097824H1
attgctatctcatggggagcagtgcgggggccacaatcgcctacttcgcgggtctacgcgcgaccgacacggcgagcgatctctcgccgttgaagatcagagggctgtattgcggcaggtgtttttcggtgggacccagaggagcaaatccgaggttaggctggagaacgacgaggttccttcgctgtg

SEQ ID NO: 6123 - DNA, 90 bp, Glycine max
  Clone ID: 701097825H1
acgaggataacaataactgccaactcaaccacgacgacgctatgatgacgcacgacaggcacacggagatcgcgcaagcccagaatagga

SEQ ID NO: 6124 - DNA, 191 bp, Glycine max
  Clone ID: 701097829H1
ggcggactgcagcagcggggaaattctaatgctggaagccccagcgtcttacggtaggtctagcgattccgacgcggaaataatcgacgcattgccttatatcgacgacgctacgcagaccccagagtcaaactggaggttgaccgtctcgtggaggatgagatgcgtcgcagcaccaagaagcccaccga

SEQ ID NO: 6125 - DNA, 200 bp, Glycine max
  unsure at all n locations
  Clone ID: 701097831H1
aagttgacatcacctgcaaatgtatttacctttggcaacaattcaaatcaaaataacggccctgctgcttcaagccctacattttcctctccattcccccctctgacaaacaatctacgggtcagaatatattcagtagctcatcncttgcaggctgcatcagcagctctagtgcaaatgtaacctccactagcactgac

SEQ ID NO: 6126 - DNA, 200 bp, Glycine max
  unsure at all n locations
  Clone ID: 701097832H1
cacaatcgccaagtcatagttcgttcncaaggttgtgacccaaactccatttacaactttcaatctcacgacttcaatgttcctccttttgtttcccctgcccccaacccacatctgaaacaaggttcccctcacatcttttactttccttcgtggtctccacgagtctccgtgagcccgtgtatgcactcttgcaatcc

SEQ ID NO: 6127 - DNA, 195 bp, Glycine max
  Clone ID: 701097833H1
ctcgaggcctgaaagtgaacagagatgtatgttctgtcgaagtactaaaaggagggagaatgcgatcacttctcaatttagaaaagagggaacgctctcttaattatgagggactagacaagggatttctcatggaaggatatcatcagttcatgtgctccctttcagtgggagagcacattctatattcactga

SEQ ID NO: 6128 - DNA, 168 bp, Glycine max
  Clone ID: 701097834H1
gtaatgaagcgtgaaacaaaggctcctacctgcttaaaataatatggcattcattaattgttagacactgctatatatattttgcgcagaactgcaatatcaaaggctccacctgccacatgatcgacgaaatctccaggagatcattgtacgctaaccaccgcgttg

SEQ ID NO: 6129 - DNA, 78 bp, Glycine max
  Clone ID: 701097840H1
ctcgagccgttcggttcagcaacaacgtgatcggactcctgaagttcctgaccttcctcctacccatcccgatcgtgg

SEQ ID NO: 6130 - DNA, 192 bp, Glycine max
  Clone ID: 701097844H1
gtgaaaagcaatagaattcaaagagagagtttcttgttctgtattttttgatttgatcatttcaatcctcaattttattttatatatccaccaatccgcaaagtgcaatttctaatctttcacgtattgggttcttctcttttcgctcttcgtctccgatcgatccaattctcttcccatggctacgatcgg

SEQ ID NO: 6131 - DNA, 190 bp, Glycine max
  Clone ID: 701097845H1
gaaaaaccaagtaatactagccaaaatatgtctcccaaatacatgtcccttttcctcctagtaatactagggatggcttttctggccactacttcccttgctgatcgtcgttttctttcggtggaagatggtcatgatcaccatcaccaccacccaccaaaaaaacactggcctccaaccacacaaaatg

SEQ ID NO: 6132 - DNA, 185 bp, Glycine max
  Clone ID: 701097846H1
cgggcatctgcacactgaagagccacttgaagctgctggtaagaagacagaagagggaaatgtcctcattaaagctagtacatatgcaagagcttccaaaagctatgaaaggccgtgaagtacatagaatatgattcctcctttggtgaggaggagaaaaagcaggcccagaccttgaaggttgc

SEQ ID NO: 6133 - DNA, 77 bp, Glycine max
  Clone ID: 701097847H1
acagctaccttcccaatgctccataggtgcttaagggcatcacttgtacttttaaagacggtagaagagtgggagtc

SEQ ID NO: 6134 - DNA, 200 bp, Glycine max
  Clone ID: 701097848H1
caatttaaaaacccaaaaggattaaaaacacaggggcacatggttctaagggccgccgttgccctaccatcttcaaattatcctattgctctttctttcacgttttcctggttttaagcccttccagtgccctatttaggcttatacccttctggtaatgatagcttccattcggcgtcaccagaaagccgaagctcttg

SEQ ID NO: 6135 - DNA, 182 bp, Glycine max
  Clone ID: 701097849H1
cggattcggctcgcttcgagcgaatcggctcgagcaattatttagatccattgatgattgagctgcttttgggctcccacagactcctgaagacgctgccagagcggagcttgtccatgggaaggataatataatagatcgtagtcttccggatgcttatgttaatgccattcgacgtgcga

SEQ ID NO: 6136 - DNA, 175 bp, Glycine max
  Clone ID: 701097854H1
cttctttttctctaagtctaaggggtgccctgagatcactttgagcccttttgaaggctgtggcagttcttggcagcagcgagggtgtcactggaacattttcttcactcaggagggacatggtccaaccaccgtaactggatctcgtgctggtcttaagcctggtctccatggc

SEQ ID NO: 6137 - DNA, 188 bp, Glycine max
  Clone ID: 701097857H1
ctggagatttgcaaaagcgcattgggataacatctggtatctgtactttgatccaaaacaaagctgaaaagaaaggggacaggtatgaagcaatcttcagcttctactttggagactatggtcacatagcagtgcagggaccttacctgacctatgaggacacatatttggctgtgcctggtgggtct

SEQ ID NO: 6138 - DNA, 180 bp, Glycine max
  Clone ID: 701097859H1
tgaaatccccaaaatagtgtttccaaattcctctgcccatcaaagggtgctcgtgatcggaatgggatctgcccctgacttcacatgcaagacagacataaggaggctatcattgaggccgtgaaacagggttacagacacttcgacaccgtgctgcctatggctctgacaaggtctcgg

SEQ ID NO: 6139 - DNA, 188 bp, Glycine max
  unsure at all n locations
  Clone ID: 701097862H1
cgtttctctctctagatctctgtttcttctttttctccaaccttcgtttcaccaccacacttacattcatctcgtcgaaatggctccaccatttgagaccccaaacaagtttccagctatcaacagtccccaaaccctcgtcttaacgagatgantctttcatccatttccaggagacacgttgctgc

SEQ ID NO: 6140 - DNA, 193 bp, Glycine max
  Clone ID: 701097864H1
tctcgtttcgcaaatccaaggaggagaatggaggtttttttgtgtatgtcacccttgtgctgtgcggttgctctgctggtaaggtgtgcacaaacattcctactcgatcaccatcctaaggtaccagcttttgacatccatgaatgaacggttggaggaagaggccatgtctcaccttcatttgacgccaacg

SEQ ID NO: 6141 - DNA, 187 bp, Glycine max
  Clone ID: 701097870H1
ggcaagaatgagttcggtgagcaattgatatcccatgttgatacattcagcaaagacctgttcgtttcattgaaaggggatgatgtacagcaagccagtcccgctgtcgaatacttggagaatgctcttggtaaatttgatgatgggccattcttgcttggccaattcagtttggtggatattgctt

SEQ ID NO: 6142 - DNA, 178 bp, Glycine max
  Clone ID: 701097872H1
ctgctatctcatggggagcagtgcgggggccacaatcgcctacttcgcgggtctacgcgcgaccgacacggcgagcgatctctcgccgttgaagatcagagggctgtattgcggcaggtgtttttcggtgggacccagaggagcaaatccgaggttaggctggagaacgacgaggttc

SEQ ID NO: 6143 - DNA, 117 bp, Glycine max
  Clone ID: 701097873H1
tgatcgtgatgaaaggaagctagtttctggactgatacagatgcgggtacatcggtgtaatggagagcagactgcaaattctgtcattgatatatgaatcagcaacatatgtgtata

SEQ ID NO: 6144 - DNA, 104 bp, Glycine max
  Clone ID: 701097879H1
aactggcgttgcagcatatatcactcactgcaacctttagacacctcacttgctgctagctttgcagaatgacatgactgtctgcattccggtctctaaccttg

SEQ ID NO: 6145 - DNA, 193 bp, Glycine max
  Clone ID: 701097880H1
gttggcaaaagtggagatgggactctgtctgtttgcaatcttcgaagaaataaagtgcaagctcaatctgaattttctgaagatgagctactgtctgtggttttactgagcgctcgatttactgatctctcttctacttctattgatgctacgttgaagcttgatgaagacaggattattaccggatcagagc

SEQ ID NO: 6146 - DNA, 189 bp, Glycine max
  Clone ID: 701097881H1
cgtgagtgtgacacagataacatagggacatgctattgagactggtcaaaagcttgtcacccaaggttgtgacccttgttgagcaagaatccaacaccaacacttctccctttttccaaaggtttgttgagaccttgagttactactctgctatgtttgagtccatagatgtggccctccccagagatg

SEQ ID NO: 6147 - DNA, 137 bp, Glycine max
  Clone ID: 701097882H1
aaggtttttgcatctcagaccatcttacaggcgatggtcccagtccggttcacccaatcgaagcctcatccatgactgagcatgcatttcagaatagaagcccacattaactctgatggatacgcagggcatgcccg

SEQ ID NO: 6148 - DNA, 169 bp, Glycine max
  Clone ID: 701097885H1
tttgggttgtatgtactacacactttgatgtcactgttatgtggagctccaacaagtggtatgggctgcaatttacaaaacacaacaacttgatggtgcaaaatatatcctttggatgtgtaatttgtcccgtgatttgtttcattgtttgggtatatgaggtgaaaag

SEQ ID NO: 6149 - DNA, 125 bp, Glycine max
  Clone ID: 701097886H1
accgttctataccactcttcaattcactaagtctaaggcgtgcccagagatcactttgagccctcctgcatgctgtggcagttcttggcagcagcgagggtgtcactggaacattgtcttcactc

SEQ ID NO: 6150 - DNA, 154 bp, Glycine max
  Clone ID: 701097887H1
cgggcctcctcgttgctcatcttcaccgaaccaaccacctcaacaattttccaaaccaaaacctcaatagagagccacaaatttttcagaggccatatggacagagaacaagaagagatgcaatttcttcggctctttgcactatacaagtgat

SEQ ID NO: 6151 - DNA, 183 bp, Glycine max
  Clone ID: 701097889H1
ctgctcgagctcgagccgatttgcactgtttgtaggtgtctccgtcgcagccaacatctcgggtggccatttcgtacccagctgttacttttggattggcattggaggcaacatcaccctcattactggtttcttatactggattgcccagttgttgggttccattgtggcatgcctcctcct

SEQ ID NO: 6152 - DNA, 174 bp, Glycine max
  Clone ID: 701097893H1
caaaaacaagacagtgttcgttgaatctcttgaaagtggtgacttgatttgatttattcacataacccatttatcatctctccgatctttctctggattctacttctggacctcgcgtcttgctgccgcttcacgccaatacactgttcagcatcaccatccaaattctcactt

SEQ ID NO: 6153 - DNA, 186 bp, Glycine max
  Clone ID: 701097894H1
cgctcaactctcttcacctgctcctgttcctgtatcctctgagaagccacaacctccagctgcaagattgaatactgatgatctttgccgcagaactgtctctctctagaagaatatttcagtgttcggcttttggaagaggcattacagtgtgtggaggaattaaaatctccttcttaccacctg

SEQ ID NO: 6154 - DNA, 193 bp, Glycine max
  Clone ID: 701097896H1
ctcaaatctgcaaactaggctttttcccaacgggttcagtttattcaagttttacaatttcgtggctctgaaactattagatggggaattgtttgcgcaaggctctgcggatgatgattctgatcatattgtggagcttgcttctgggaatgtgcaacttattactaccacagaatcttgggacccaaagttg

SEQ ID NO: 6155 - DNA, 260 bp, Glycine max
  Clone ID: 701097902H1
cgagggccatccttggcagaagttccccttatggaaatgctggattacaaatacttgataggaactggggagctggttggcaccttttatctttattgcttgctactaaaccttctcaaaggataagttgtttggatgctcttcgacacccattcctttgtgggccaagatggcgagtagtcccatcaatggatattatccgatggggtctgggttctactgcaatgcgtattagggagaagtacatctatcgtcagcct

SEQ ID NO: 6156 - DNA, 222 bp, Glycine max
  Clone ID: 701097903H1
atcaaacaatatgaacaggagagtggagaggtagaacaaggattgaagttgttgctgtgagaacagagaaagagtgaaatcggagtttgcggaggacttgcaatcaatggatgtgataagagacgcagctaatctcatgtcgaccaatcgagacaggtggtggttcaccctctggtgcttctcagcatcgtcgacaactacaacagagtcgccaaagacact

SEQ ID NO: 6157 - DNA, 253 bp, Glycine max
  Clone ID: 701097904H1
gcgattactcagaaagctatctcatcatcgactccttacaatgatcagttcagggaacttctgcaagcagggaaagacattgaaagtgcatattgggaacttgtagtgaaggatatccaagatgcttgcaaattatttgaaccaatctatgatcaaacagatggtggtgatggctatgtttctgttgaagtatctcccaggctcgctgatgaacctgagggaaccatagcagctgcaaaatggcttcataaag

SEQ ID NO: 6158 - DNA, 251 bp, Glycine max
  Clone ID: 701097905H1
agcgagagcaaaaccctagttcatccatcaccagtcgaggaagaagatggtgaagttccttaagcccaacaaggctgtcatcgtcctgcagggccgctacgccgggcgcaaggcggtgatcgtgaggcccttcgacgagggaaccagggagcgccccacgggccactgcctcgtcgccggaatcaagaagtaccccagcaaggtcatcaagaaggactccgccaagaagacggccaagaaatctagggtta

SEQ ID NO: 6159 - DNA, 251 bp, Glycine max
  Clone ID: 701097906H1
cagaatcaattgagaatggggatccgattcgtactgatggtgaacaagcaaggccaaactcgtcttgctcaatactacgaatatctcaccctcgaagagcgacgtgccctcgaaggcgaaatcgttcgcaaatgcctcgcccgcaacgaacagcagtgttccttcgttgagcatcgcaactacaaaattgtatatcgtcgctacgcctctttgttttccctcgttggagttgacgatgatgagaatgagct

SEQ ID NO: 6160 - DNA, 251 bp, Glycine max
  Clone ID: 701097907H1
cggatccgggtatggtgggagacagcaagaatctgaatatggatccgggtatggaggcaggaaggaggaaccagaatatggatccggatatggtggaaggaaggaggaatctgaatatggatcaggatatggaggaaggaagcaagaatcagaatatggatccgggtatggtggaagaaaggaggagagtgaatatggatccgggtatggagggaggagtgagtatgaggagaaacctagctatgggagga

SEQ ID NO: 6161 - DNA, 250 bp, Glycine max
  Clone ID: 701097908H1
cgcggattggatgttcgtcaacacctttgaagcattggaaagcgaggtgttgaaaggcttaacggagctctttccggcaaagatgataggaccaatggtcccttctggttacttggatgggagccttaaaggggacaaagggtatggagcaagtctatggaagccgctaactgaagagtgcagcaattggttggaatcaaagcctcctcagtctgtagtgtacatctcctttggaagcatggtgtcattg

SEQ ID NO: 6162 - DNA, 249 bp, Glycine max
  Clone ID: 701097909H1
cctcttgttgttgcctatgcccttgctggcacagtggacattgactttgacactgaacccattgggatagggaaggatggaacagagatcttcttcaaggatatttggccatccagtgaagaaatagcaaatgttgtacaatcaagtgtgctgcctgatatgtttagggacacatataatgcaatcacccaagggaatcccatgtggaataatttatctgttccaacgggcactctttatgcttgggac

SEQ ID NO: 6163 - DNA, 247 bp, Glycine max
  Clone ID: 701097911H1
ctatttatacgtaataattccaaaaagcctaacgcgagatcttcatcagtttttcaattattcctcgaattttgaaggaatcatacaaacgcttgacatattcgtcatcaacaacaacctcacgctgctatagattttttttttttctcttcttacagatccaaacatggccgaagaacaccgatgccaagctcccgaaggtcacagactctgctccaacaactgcggcttcttcggtagccccgcc

SEQ ID NO: 6164 - DNA, 252 bp, Glycine max
  Clone ID: 701097915H1
actcgagcgaatcggctcagggaacctcctatagagtattacgagattgttgaggacgaggctgagattgaggaagagcggacactgaatgatatcagtagaccactccttgtagaagctgagtggcctgacattgagcagaaagagactgaacattctaagacaccctttattgccaggatctttaaaagcatctcgggtgtttcctcgtctaatattcctgagcttgaaagtggtgggactagtccaaag

SEQ ID NO: 6165 - DNA, 265 bp, Glycine max
  Clone ID: 701097916H1
ccaccatcctcaaaatctccaaactcgcgatcctcctcgttttgttcgcttcagtctgcaacgtcgctatgtcggactccaccgccaaacccctcgaccagcacgccaccacgggctctgaccctactgcgccacggttcacatcgtgtacaccgagagaccacagaacgaggagcctgaggcctaccacatcagaaccctcacttcagtccttggcagtgaggaggctgcaaaggaagctttgttgtatagttacaagtctgca

SEQ ID NO: 6166 - DNA, 91 bp, Glycine max
  Clone ID: 701097920H1
gaaactatgagctgaaaaaagggcttatttcagctcatagtaccaggttacaggcgcatgtataacggctgaaataaagcctgttttccgt

SEQ ID NO: 6167 - DNA, 249 bp, Glycine max
  Clone ID: 701097923H1
cgaattatgagcaaggccaaggctgctgctgctgcttccaaggcggcgaaggctcccaagaagttcaccatcgagtgcactgagcccgtggaggatgacattttcgacattgcttctttcgagaagttccttcacgaccggttcaaggtcggcggcaaggttggcgtgctcggcgatcaagtcaccatcacccgcgagggctccattatcactgttgtctccaaagtcgcgttctcaaaagcttacctg

SEQ ID NO: 6168 - DNA, 250 bp, Glycine max
  Clone ID: 701097924H1
ctctacgccgccaacaaccacattcttcgctacgcctagggatcttccgtttctctcttcaaaactttcttcttcttcttcttcttctactgcgtcgtcctcgccttgttgctcctccatcactcccaaggttaaatccaaagataacaacaattgctacctcgtctccgctaaacattctcccgctaacatgtccgcttcggtttcgtcacgcaccttcctcaacgctcggaacgcacaagagcttcta

SEQ ID NO: 6169 - DNA, 256 bp, Glycine max
  Clone ID: 701097925H1
tcggctcgagagatgatattcttgccaactttcagtattatgccatcttatatcttggttcaatatgaattaagctattttgatgatatgtgcactgccatgtcctttgttgagttattcctgatttagtagaatggaatctgcatacagggcatggttgagagagaagagagaaaggtcaactcctgaggaattaaatgaactatgcagagagctgcaaactgctttaggtaccgcaaaatggcagttggaagaa

SEQ ID NO: 6170 - DNA, 248 bp, Glycine max
  Clone ID: 701097927H1
ctttctttctcccctacacaaaacatggatcatccaatcagcacaccgtcgattaccccaaattcaagcttatcatcgtcagcgacggtggcacaggaaagacaaccttcgtgaagaggcatctcactggtgaattcgagaagaaatatgaaccgaacattggtgtggaggttcatccgttggattttttcacgaactgtggaaagattcgcttctattgttgggatactgctgggcaagagaagttt

SEQ ID NO: 6171 - DNA, 251 bp, Glycine max
  Clone ID: 701097929H1
cccatttctgtgaactgccatggctggaggtgttattcggcagttatttaggaggaaactccaatctcattctcctaattcttgcattaagtcattcattatcacaaagaaagatggtgctgactctattggcaacaactccttaagagtgcttgcactagttggagctggtgtctcagggtttctaggttttgcaacaacagcattcgctgatgaagctgagcatggcctggcatgtcctacctatccat

SEQ ID NO: 6172 - DNA, 263 bp, Glycine max
  Clone ID: 701097930H1
gtcggacttcggtcgggaattttgcgggtatttgtcagtgtgtgagagagagagcgagcagtttcagacacagagagaggggtttgggattggagggattgacgctgcgtctcttcctcttctctttcgatccatccctcattccttatcctccaatccaaccacctcagtctcacactcacatatacacatatctgaacgcgtatcgtccctcctatggcttcaaagcgcatcctcaaggagctcaaggacttgcagaaaga

SEQ ID NO: 6173 - DNA, 129 bp, Glycine max
  Clone ID: 701097934H1
ctcattgtccctgtcttttgtttggaggggaaaaaaagatattctttcttctttttgctgaaacccaataaagcgaaatcgcaaagcgtgtcttggaaaagggtggtttcattaaaaagcagggatctt

SEQ ID NO: 6174 - DNA, 247 bp, Glycine max
  Clone ID: 701097941H1
cctcagcgaatcggctcagatcgaccgccggctcggcctaatctcctcgccagggcaccatgaacgccgccgtgttgccccgccctcgccgctgcctgcgccctcacctaccgcgccgctatttccacggatccgggtcctcttcccgcaacctacatgcccgacgtcgaagacgctcagagccccatccacgagatcaaacgcaagggtggagatttgcgatattgccaaaagtgttctcactata

SEQ ID NO: 6175 - DNA, 126 bp, Glycine max
  unsure at all n locations
  Clone ID: 701097942H1
gttatcaataaattcttgggaagatggacatcgtattaccatgtatctaaaactgtttccttcatacaatgatcccggccagttgntcaatgcaagcgaggtttaccgcatcaaaactatatttac

SEQ ID NO: 6176 - DNA, 245 bp, Glycine max
  Clone ID: 701097943H1
tgctgaggttattgctgatattgctctttgcccatttgaggctgtgaaggtccgtgtccaaactcagcctggttttgcaaggggtttgtctgatgggctcccaaaatttgtcagatctgaaggagccttagggctgtacaaggggttagtgcctctctggggacgacaaattccatacacaatgatgacttctgcttcttttgagaccattgttgagctgatctataagcatgccatcccaacac

SEQ ID NO: 6177 - DNA, 78 bp, Glycine max
  Clone ID: 701097945H1
gggagaaaaaccgatgcctcatcaatctccaaagagggagctatccccagatggcgtcgagtataattcacacaacat

SEQ ID NO: 6178 - DNA, 246 bp, Glycine max
  unsure at all n locations
  Clone ID: 701097947H1
tacgnagtccggagagacagccgatcaggacggcggcgagagacaagacgacggcaaggactaccaggagccggcgccggcgtcactggttgacccgacggagtttacgtcatggtccttttacagagcagggatagcagagtttgtggccacttttctgtttctatacatcactgtctaaaccgtcatgggagtcgccggggctaagtctaagtgcagtaccgttgggattcaaggatcgcttgg

SEQ ID NO: 6179 - DNA, 262 bp, Glycine max
  Clone ID: 701097948H1
aaatcaagccaatcagactgcttgcagcgtcaggaatcatggaatcatcatgaaagttgtgaactgagtccagtagagtctgatgaaagtcattctggtgagcaatttgataaaccagtattagcagaagacaaaggaaaaaaaggcatttgggaaaacaagttcgcacatgatccaggaaatcccccacgaagtttatcaggaaattatttctctgacatccgttttttgtgttgtggccctgagattgaatatgagaaag

SEQ ID NO: 6180 - DNA, 252 bp, Glycine max
  Clone ID: 701097949H1
gttttgcttcctctaatctggcgaatcattcgttctagcaaattttgccgaaaactccaaaacccccccttttagaaaactcgattaacaacaatctcaatcttctacagcttatcctctctctctctcttcttcgcttcccccaacagcaatttcattcaaaactctctctcaggtgattaagagaatcagagtttgcttatccatataacagatcatttgaacagaagagggagggtactggtttgcgga

SEQ ID NO: 6181 - DNA, 247 bp, Glycine max
  Clone ID: 701097950H1
cgcggcgttggcgtacgaccgcgccgcctaccggatgcgagggtcgagggcgctgctgaattttccgttgagggttaactacggagagccagatccggtgagggtgacgtcgaagcggtcgtcgtcgccggaaagtatggcggcggtctcgccgaagagaaagaaagttatggtggtggggacggtgcaagagcaagtggggagtcaagtggtgcagtgtacacgtggcgaacagttattggttagc

SEQ ID NO: 6182 - DNA, 107 bp, Glycine max
  Clone ID: 701097952H1
tacgtgaagtcggaattgggttcggcttgagaacgagtccaatttcgtttccattcgtttctgtcgattggacactgcctcttgtctctctcaattggcttttcttc

SEQ ID NO: 6183 - DNA, 247 bp, Glycine max
  Clone ID: 701097953H1
cgtgacttcacctgggaagttgtgaagccactcaagtcagagaagcctcaagttttggagtgttgttaagttaatcactcccttcagtggatgtcttgctgggtgtggatgaataatttgcgtgtttcatgactactactactactactccattcaatgtctaatgccatctcatcaatacctaaactgttcgtttttttttttctccctatactcacaatttattgtttggctatgcaatgttact

SEQ ID NO: 6184 - DNA, 134 bp, Glycine max
  Clone ID: 701097955H1
cccgctcgagctcgagccggtgagatttcaattgatgattagtatacaagtttctgtggtaactgataaccgtttgcttttgagctccctcaggtttcaattaaggatgtaaaattttcacatttaatctatag

SEQ ID NO: 6185 - DNA, 243 bp, Glycine max
  Clone ID: 701097956H1
aagagaacgggttttgaagaagaagcagttcaattgatcaagtcagatttcagggacctaagtctagctgctaatagactcgcccatcatgccatcaaacttggtggcattggctttggagcctcttttttcggattgtttgctgccattgctgctatttatctgttgattttggatcgtacaaactggaaaacaaatattctcacagcactactcattccatacattttcttcagcttgcct

SEQ ID NO: 6186 - DNA, 123 bp, Glycine max
  Clone ID: 701097958H1
ctttgcttctcaagtctctcgaagcctctttctctctcttctagaagctatctgagtatggtgttactaggagtcgaacaagcaaagtacatggttgatttggaaatccaggtatgcacccca

SEQ ID NO: 6187 - DNA, 185 bp, Glycine max
  Clone ID: 701097961H1
caatcacaagctctcatgatttcggtttagcaatagatggaccggtaaaagaccatacacatatcacgactcatgtgatgggtacacatggttatgctgcccctgagtacatcatgacaggccatttgacaaccatgagtgatgtatatatctttgtagttgttctcctagagctcctcacagga

SEQ ID NO: 6188 - DNA, 258 bp, Glycine max
  Clone ID: 701097963H1
caggacaacgaaggaatccccccggaccagcaacgtctcattttcgccggtaagcaacttgaggacggccgtacccttgctgactacaacattcagaaggagagtactcttcacctcgtcctccgtctccgtggtggcatgcagatcttcgttaagacactcaccggcaagaccataaccctagaggttgaaagctccgacaccatcgataacttcaacgccaagatccaggacaaggagggtatccccccggaccag

SEQ ID NO: 6189 - DNA, 249 bp, Glycine max
  Clone ID: 701097966H1
cctaacctagttcttcttctgtctcggcacctctctcccctacacctgaaccctgttccatcctccaaccatggcgaaccaagacttcgaagagcgccaacagcagcaacaaccgcaggagctagggtacgactccgaattcgtccctcactcggtaaaatccttcgtggtccacctctaccgccacatccgcgagaagaacgtgtacgagatccaccagatgtacgagagctccttccagaccctctc

SEQ ID NO: 6190 - DNA, 242 bp, Glycine max
  Clone ID: 701097969H1
gccatcgctgaacgtgcagaaacgaggatcgcatacacatcatagacttccaaattgctcagggaactcaatggatgactcttcttcaagcgcttgccgcaagacctggcggtgctccccatgtgcggatcacagggattgatgatcctgtttccaaatatgctcgtggcgacggaccagaagttgttggcaaaaggttggccttgatgtctgagaaatttggcatcccagttgagtttcat

SEQ ID NO: 6191 - DNA, 240 bp, Glycine max
  Clone ID: 701097970H1
ataccaacaagtataatgtggaacttaagcctctcttctctgcttttgacattgagggcatttacattgacttcctaaaggtcgttcttgatgttttaattgctccttttggagcctcgtgtggaaatggaagatgatgaggatttcctggaagacgatcagtagcaacatgttgatctggttgtttccttcagaaaatcagtgaagcatatcatgcgtgatacaactgttgtgacacta

SEQ ID NO: 6192 - DNA, 246 bp, Glycine max
  Clone ID: 701097971H1
cgtctccatcctaatagtgttaattcgtctttctctatctctatcactcgatgggtgcttttgcttttgatgaggaaaactcctccaccgacgctccggcaacactctacaaagctctgacaaaagatgctgacactatcatcccaaagattattggggccatccaaactattgaaatcgttgaaggaaatggaggacccggaaccgtcaagaagataacagctagtgaaggtgaccaaaccagtt

SEQ ID NO: 6193 - DNA, 244 bp, Glycine max
  Clone ID: 701097972H1
cggattaaagctgatatatggtcatgtggggtaatcttgtatgttctattggctggtcatcttccattccaggagtacaaatctgatggagatgtacaggaagattggtagaggggaattcaaatttcctaaatggtttgcaccggatgttcgccggtttttgtccagaatattggatccaaacccaaaggccaggatatcaatggccaagattatggaaagttcttggtttaaaaaggggttg

SEQ ID NO: 6194 - DNA, 243 bp, Glycine max
  Clone ID: 701097973H1
caacatgctcgtcttactctagaagggtctaaggattacccctaccctcgtaggggaagaactagtagaccaccggccaaatcagatcctaaatgtgagagtaggctgaatattgcctcgagcttagacatctatcgtccaagggatgaaagattctgtcacttgaaaatggcggattttcttgcctatgcactgaaatccatagttcaagttctcaaaccggagtctgaatctctattcgac

SEQ ID NO: 6195 - DNA, 177 bp, Glycine max
  unsure at all n locations
  Clone ID: 701097975H1
gtttctttaaccagagaaacttcattacagttgaccacaaataatttgtcagctgcacctgtcaagagtggagtcatccccaagaaatcaattacctgtgatccggatccaaggaagcatccatctcagactggggntagcctagtcagtctggtagacctaccacattagatctct

SEQ ID NO: 6196 - DNA, 75 bp, Glycine max
  Clone ID: 701097977H1
atcaatcagtccgattcctgttggttgttctctcaagtctcaactcccagcccccctctttgacttttctatcag

SEQ ID NO: 6197 - DNA, 247 bp, Glycine max
  Clone ID: 701097978H1
atgaaaggcatggccattgacatgggatctgaaattgggagccaaaaccaagccttggatggttttgacaatgatatggagaagttgatcgtccgcgtgaatggtgctaatcaacgtggtcgtcgtttgcttgggaaataggggtgtatatcatgagatcgacgctaatttttaatatgcattagtcaatcaaaggagcttccaatgttccaggatactgatttcaaatatagtaatgtacaatacg

SEQ ID NO: 6198 - DNA, 250 bp, Glycine max
  unsure at all n locations
  Clone ID: 701097980H1
ctccctcctcgctctctctccgtgtcctgagacatatcatgccggagatggcgatcgtantcgctcgtcgttgcggcactcgcggcgttggtgctattcgcggcgagtgtggcggtggatgctcaggagaactcggacgtgaagacgctggtgaagtacaagcacgggaagaagtactgcgacaaaggatgggaatgtaagggctggttcatttactgttgtcacctcaccattaccgattatttccaga

SEQ ID NO: 6199 - DNA, 248 bp, Glycine max
  Clone ID: 701097981H1
ctcgagccgtgaagaactaaaggcaggattgcatagacttggctcaaagcttacagaggctgaagtgaagcagcttatggaagctgctgatgtagatggaaatggctcaattgactacatagaattcatcactgctacaatgcatagacacaaattagaaagagatgaccaacttttcaaggccttccaatattttgataaagacaacagtgggtttattacaagagatgaactagaaacagccatga

SEQ ID NO: 6200 - DNA, 182 bp, Glycine max
  Clone ID: 701097982H1
ggctcgagcggtctcgagcaaaggtttatgagtcaaggcacacctaaccaataacaagctagctattagctcgactttgtagtaagtgaggtgccaatatggtgaagatagctcttggtactttggatgactcttttagcgctgcctctcctaaggcttctttcgcagagttccacacaaca

SEQ ID NO: 6201 - DNA, 141 bp, Glycine max
  Clone ID: 701097984H1
aaccagtccaatttcctttcctttcctttctctccattggacactgcctcttgtctctctcaattggcttttcttcccttttcctttattggggcagcctctctgcaatccacagataacttagattacttccacacaaca

SEQ ID NO: 6202 - DNA, 232 bp, Glycine max
  Clone ID: 701097985H1
attaccaatcttccaatttcagagaaaattctttgtccggcatctcttaattagaaaaatgtcaagcttccccaacacggtggcggcaggccgcacgtccagcaaggcaccggaaaaatccactttttctcagacttgcagcctcttgagccagttcttgaaggagaaacgtgcttctgctgattccacctttcgaattggacggaaaatggaacccatagcgagtaccaag

SEQ ID NO: 6203 - DNA, 242 bp, Glycine max
  Clone ID: 701097986H1
ctctcagaagcccttgttgtcaacattggggacattatagagattatgagcaatggggcatacaaaagtgttgagcacagggcaacagtgaattcagaaaaggaaaggatatccgttgctatgttctttctccccaagtttcaatctgagattggacctgcagttagcctcacaaacccagaacatctcccgttgttcaaaaggattgtagtagaggcgtatatcaaagattacttcactca

SEQ ID NO: 6204 - DNA, 242 bp, Glycine max
  Clone ID: 701097988H1
agaagacaggttcaaaccggcgcaaaaaaacttgttacgatggtttcttccgacaaggatccacgacaggcagtccttcaagcatggtacatggatgatagtgatgaagatcaaagactcccccaccacaaagaacccaaggagtttgtctcgttggaccaacttgctgaacttggagtccttagctggaaattagatgctgataaccatgaaaatgatccagagctgaaaaagattcgtga

SEQ ID NO: 6205 - DNA, 240 bp, Glycine max
  Clone ID: 701097989H1
aaatttttcattagtattcactgtaggccacctagctttcctctcttcttactattcttgtgttcatgtaaaggttaattgacacataaagacacactcacacaccctgggttcataaatttcattttgcagtaacaacaaaaaataagcatgagttgcaacgggtgccgcgttcttcgaaagggatgcagcgagtcctgtatgttgcgcccttgtttgcagtggatcgaaaccgcccaa

SEQ ID NO: 6206 - DNA, 240 bp, Glycine max
  Clone ID: 701097990H1
ggactctaataatgctcagagtgattctttcttgttggatgacagttccagcatccccttctcagtagatgacttctctacatcactgcaagagaaggatttctccgacatgaaaccagcggatgagctgcttgagaatcccgccttccgatttttaaatgagtaggcaagggaagcttagtgtatgtgtttatcatagtcatatagggaagcaacaaaatcagttgttggtccttgtca

SEQ ID NO: 6207 - DNA, 245 bp, Glycine max
  Clone ID: 701097991H1
cctcgagccgattcggctcgagcaaatcaagcaggaacagagaaaccgagaggacaggcaacgtaatcgtgacctctcaagcttctttcaaagacagagaagaaagaagaaaacaatctcaacaaacacaaacaaacaagcaaacatcaatggcaaactcgtatacgtggctcttcctcgcgatttctgccaccctcttgcttcttctgtcttcgtcgccgacagcggacgcgggagcgctgggc

SEQ ID NO: 6208 - DNA, 246 bp, Glycine max
  Clone ID: 701097992H1
ctccggtgtggcgaatgattactatttgagctcttccctctcacaaactcagaaaacaagtccaatgagcaatttccagagaatatcacacgaatcccaccctcccccagggtacggatctccttaccctccaccccaaccgggttacccatccgcaccgcctcatgaagggtaccctccgccgccgccgcctcacggatacggtgggtaccctccgccgcagccgccgcagcgtccgccgtacga

SEQ ID NO: 6209 - DNA, 248 bp, Glycine max
  Clone ID: 701097993H1
cttagaaagacaaaaacttaaatcaaaatacttaatagcatggcgatacatttatacaatccttctaccccaagcacacgctatggagccgtagacagtcaagtaaaatccaatccacgaaatcatttgatctatggacagcatcgttgtggtaaaggccgtaatgccagacgaatcattaccgcagggcatagagggggaggtcataagcgtctataccgtaaaattgattttcgacggaatgaaaa

SEQ ID NO: 6210 - DNA, 57 bp, Glycine max
  Clone ID: 701097994H1
cgaggaaaagagataaccctgaagcaatggaagaggatgatgttgaagatgaaatag

SEQ ID NO: 6211 - DNA, 253 bp, Glycine max
  Clone ID: 701097995H1
ccactggcttcaagtgtggtataaactatcagcctccaaccgttgttcctggaggtgaccttgccagggtgcagagggctgtgtgcatgatttctaactccaccagtgtggctgaagtgttctcaaggattgatcataagtctgatctcatgtatgctaagacggcattcgtgcactggtatgtgggtgaaggtatggaagacggtgagttctcggaggctcgtgaggaacttgctgctcttgagaaggatta

SEQ ID NO: 6212 - DNA, 254 bp, Glycine max
  Clone ID: 701097996H1
gcaacagagagcaacaattctatctctggtttgacccaactgcagatttccacacttattcaattatgtggaatccccaacgcattgttttttctgtggatggcacccccatcagggaattcaagaatttggaatcaataggagttccttttccaaagagccaaccgatgaggatatactcaagcctatggaacgctgatgattgggccacaaggggtggactcatcaagactgactggtccaaagctcctttc

SEQ ID NO: 6213 - DNA, 269 bp, Glycine max
  Clone ID: 701098002H1
ctttctcctaaaacatctcaatgggttcttcttctattacaacatcgccgcgaaccatgaccatggctgcgatcgtgctcctgttcacggtctttgccgtttcctccgccctagacatgtcgataatctcgtacgacagcgcccacgcggacaaggccgccacgttgcgcaccgaggaggagctgatgtccatgtacgagcagtggctcgtgaagcacgggaaggtgtacaacgcgctcggcgagaaggagaagcgcttccagatcttc

SEQ ID NO: 6214 - DNA, 272 bp, Glycine max
  Clone ID: 701098003H1
cttatagcggtctttgacggcaaagagagacacaaacgtaatctgtgagtttggaacattgattcgttgtttcctctgcaaaatcaaatcctcattgtgattgttgatgaacaattgaagtatccctccgatttgaagattccggtgacggcgagccatggccaccggcggcgacggtgacacttccaaacaagagctcttccagctcatcaaacgcttcggagcttacgtcactttcaagatctccaatctcttccctctctctctccaca

SEQ ID NO: 6215 - DNA, 271 bp, Glycine max
  Clone ID: 701098004H1
cacaaaacaaggttcagagacttttccgattcctggaagaagagaagagaaaacctaacctcacagatccatggcggaagaacaccgatgtgaacctcccgaaggtcaccgactctgcgtcaacaactgcggcttcttcggtaccaccgccacgatgaacctctgctccaaatgctacagcgcgatccgtttgaaggatcaagaagaagcgtcgacgaaatccacaatgaaaccgcgctctcttctgcctcctcggcgaaaccgtcgtcgt

SEQ ID NO: 6216 - DNA, 271 bp, Glycine max
  Clone ID: 701098005H1
cagtaaacaacaaaaggactaaaaaaaactcttgatcattattaatggcctctcattccccaaagagagaaggcccttattatcttaatattgtactattccttaccattctcatctccatcatcaacccttcacaccaagacccttcttcccctctccgcccaataaacccaagactcaccaaagcctacacagcactccaagcatggaaacacaagatcacctcagaccccaaaaacttcaccttaaactggtgtggccccaatgtttg

SEQ ID NO: 6217 - DNA, 152 bp, Glycine max
  Clone ID: 701098006H1
ggagaaaatggggtctctaatggcctctcttactctcactcttgtattggcaatagtttctctaagcttgtgctctcaagcctcagctgacaagtacgactattcatctccaccaccaccagtttacaagtacaagtccccaccaccagcct

SEQ ID NO: 6218 - DNA, 268 bp, Glycine max
  Clone ID: 701098007H1
cctaccttcgcttctgtatttacattttctccttaaactcattcttcgcactcttgcattgcctccacctccttttctccatttatagtataatggctgctgaagtatattaccaggctattggtactttgcagtcccattcttatctgaataatttaaatcatcaccaaaagcatcaaaacaatttagtaacattggtgtctagggattttatcagcagtactgcttgtcaacgagaagaagtaactgcactggccagaggaattgt

SEQ ID NO: 6219 - DNA, 175 bp, Glycine max
  Clone ID: 701098009H1
ctcgagccgctcgagccgcttccgcaccaacatgccccctggacccttcctcgcccccgacccaaacactcgtcgttctcctcgatgccaaaagtttccccgtcctcttcgacaactctaaggtcgagaaaaaagacgtcttcactggaaccttcatgccttccaccgaactcac

SEQ ID NO: 6220 - DNA, 259 bp, Glycine max
  Clone ID: 701098011H1
gcttcgtttccaggtttcggcgcaatcggcttctccttcaaggcaggagagcttgttattctctatcaacaagtaaaatgtcaggtgaagagggtgtcattgcagttgagccagctgctgctgctgctgccatcccaggcgagccaatggatatcatgactgccttacaacttgtgctcagaaaatctctggcttatggtggtttgtcgcgtggcctcatgaaggtgcaaaagtgcttgacaagcatgctgcacaactc

SEQ ID NO: 6221 - DNA, 257 bp, Glycine max
  Clone ID: 701098012H1
cttcttctcatcatttcttttcacacaaaaaggtaccatggaccggagcctgggactgttgtttcttgttgtattaggtgctgcttgggcatgtgatgcaagggaactggctaactctgaaacttctgaactaagcataaaaccggatgtgtgtgcactttgtgaggaatatattaccaaggcacttgattatctacatgaaaacaagactgagcagagatcattagtatcctgcacaacacttgccaccagcttcc

SEQ ID NO: 6222 - DNA, 256 bp, Glycine max
  Clone ID: 701098013H1
gattgtagaatactttgaggcaattccaggggttccaaaaattaaagagatgtacaacccagcaacatggatgctagaagtgagttctgtagcagctgaagttcgtcttggaatggactttgctgaatactacaaaacatcatctttgttccagcgaaacaaagctcttgtaaaggagttaagcacacccccgcctggagctactgatttgtattccccactaagtattctcaatccacattggggcaatttaaat

SEQ ID NO: 6223 - DNA, 162 bp, Glycine max
  Clone ID: 701098016H1
cttttcttcatagcactccaaaaacaacaactcatctcatcattattccctttctcactcagcacattctccacagccaaaccatcaccaataataatggcatcatcctcatcaaccgttgctctgagaaccatctcctctttctctctgaaacctgccaca

SEQ ID NO: 6224 - DNA, 69 bp, Glycine max
  Clone ID: 701098017H1
tgagttcttatatgtatatacaaaaaaaaatctggtgttgtgagtcgcggccgtgttccacacaacata

SEQ ID NO: 6225 - DNA, 270 bp, Glycine max
  Clone ID: 701098019H1
tcggactcaaacacacagcacgacgaaacctagcagcctcacgccctcatcgcagcagggacctagccgtcgccggagacgcactgagtctgagagcagcggtgactaaatcaggtttgtacaagaggaaaaggagagtaacgattcaagtttgatgcactaaatcaatcaaaattgttgcaatgggtgatatctagatacgaaagatacacagatacatacgtgtggtaaggtggagcaaccggttcttccttctccttgtgctaagcg

SEQ ID NO: 6226 - DNA, 270 bp, Glycine max
  Clone ID: 701098020H1
aagtttccatttaatactggatcataagctgttaaattttctgcatggctggaggatagaggcaactacctcacagaagtgggcgctaatcttgctgaagatctacaatgtggggacatttttcatttgcttgctttagtctcatcgggtgaactttcaatttctccattcctaccagacaatggccctggagagtctgaggacttgagaagtgcaaagcataaatatcatactaccaagtcttcatatagtgataaagccaaaaagtca

SEQ ID NO: 6227 - DNA, 265 bp, Glycine max
  Clone ID: 701098021H1
caccttcataccttccacacaacatactacacacattgcatccatttgttatgcatcaacaaggagttcccaaactagttgcatcacatgttcctcaatcacatgttgggcattttcacccagtgccgtcaatgtcacctgtgcagcagtggcaaaatcatcagtctgtgtcagagggtccacaggtacctgtacaggaacattcttcaccatctcaaactgacaacatttgatgagatcagatgctaagtttagctctgaaatg

SEQ ID NO: 6228 - DNA, 265 bp, Glycine max
  Clone ID: 701098023H1
gggacgtgttgagaccggtgtcttgaagcctggaatggtggtgacttttgcaccaactggactgacaactgaagtcaagtctgtggagatgcaccatgaatctcttacagaggcacatcctggtgacaatgtgggattcaatgttaagaatgttgctgttaaggatttgaagcgtggttatgttgcctcaaactcaaaggatgaccctgcaaaggaggctgtaacttcacagcccaagtcatcatcatgaaccaccctggtcaga

SEQ ID NO: 6229 - DNA, 260 bp, Glycine max
  Clone ID: 701098025H1
cgctttgtgctgctgctgctgcaaaacctagggttgagccttttgctcaggttttcagcgcttctttcttacaatggttctacagaacgatattgatttgctgaatcctccagctgagttggagaagagaaagcacaagctcaagcgtcttgtgcagtcaccaaactctttcttcatggatgttaagtgccagggctgcttcaacataacaactgtgtttagccactctcagactgttgtggtttgcggaaactgccaga

SEQ ID NO: 6230 - DNA, 258 bp, Glycine max
  Clone ID: 701098026H1
ggtcctcactctttctcatttccacatatcagacaaacacaatggagaactatcagtacccggcgtcgtaccctgactcacgtcgagtccaccccgcgctcggcgagatcgacttcgagaacccgccgccgtgggacgagcagcagaaccaaaactacaaggccaagttcatgtgcagctacggcggcaagatccagccccgcacccacgacaatcagctctcctacgtcggcggcgacaccaagatcctcgccgtcg

SEQ ID NO: 6231 - DNA, 258 bp, Glycine max
  Clone ID: 701098027H1
cgcttttatatctttcaaaaaccttcaagcccttttgattgtaagtatgaggaggaactgcaacttggaacttgccctttttcttccctctgattctggcccccgccaccaccactcaatggttgaagaagctagtgaaataagcccaatccaaaatttcttccatcaccaccaccgccaggaacagcaacagcaacagccgctcaccattttcatgatggaaatatttgtgttgcggatgtcacagagcttcaggta

SEQ ID NO: 6232 - DNA, 256 bp, Glycine max
  Clone ID: 701098028H1
ctcgagccgttctagcccttctccagccggtgctgtcactcctcccccacagaactctggtgctgcatctcttggagttgttggagtatttgccaccctgctttcagttgccgccacttttttctactagatcctccacgagattattctagtcaggagcttgcgagtcatcatcatcgctctttgattgtgtttcatgaattcagtttttttctatttttttgaggatgacaataaagttagctttaatttaatt

SEQ ID NO: 6233 - DNA, 256 bp, Glycine max
  Clone ID: 701098029H1
gtggaggcattttaccgttcaagaggaaaattattggagtttaacctgcctggaggaatcccggagtcttggcctaagttgctacatgctcttaatcttgatgattatgaggacaaacgatctgctgcagcataacgatataataatgtatcataacagtaagtatttcattctttgcgtgcatatattgcatgcttggcaattttgcaggacgagagccaaagaaagggaacttccatgtgagtattattttgga

SEQ ID NO: 6234 - DNA, 256 bp, Glycine max
  Clone ID: 701098030H1
ggacaacctgatcaacaaccaaagaactcagtgttctcaaatgcactctctagtcctattcgacgcagccttcagccatatcatttggcacaggggagctttccttcatgtaatatcatgtcttcaggaaatggaacccggaatagtgacatgacttatcctaatggccagaacagggacacaaattcttccaactccagtgattgcatggatagcattcagatagtcctggtcatgatttttcatactgatgctg

SEQ ID NO: 6235 - DNA, 237 bp, Glycine max
  Clone ID: 701098031H1
gaaaaccctagcttaccttttcaactttcaagatgcaaatctttgttaagacactcactggtaagacaatcacccttgcggtggagagttcagataccatagataatgtaaagtccaagattcaagacaaggaagggatcccaccagaccagcaacgtctgctttttgctggcaagcagcttgaggatggacgtacacttgctgattacaacatcagaaagagtctactctacacct

SEQ ID NO: 6236 - DNA, 277 bp, Glycine max
  unsure at all n locations
  Clone ID: 701098032H1
gctcagcattcaactcgactggagatacagatgcagttccattcagaaactccaccctatacatcncttcacgacaaccttaggaatctcgatcgctgataaaacctatgcagtcccgaacacactctctgcatttcaacttgtttaagtcacgnctttcgattcacccttctctcaataaatttttaatcagattcttggccaccgccacactcataataaagccctgtttttcaaataaagggcatggcgnattctgttgagcctccaaatggga

SEQ ID NO: 6237 - DNA, 268 bp, Glycine max
  Clone ID: 701098034H1
cggctttctgccgcagaagctgaaatagaggacttgagatccaagctggatgcatctgagagggatattttggagctgactgaggctgttaaagttaaagatgctgaggcagaggcatatatatccgaaattgagactattggtcaagcatatgaagatatgcagacacagaaccaaaatctgttggaccaggtgatcgagagggctgactataatattaagctgtatcagatagtgtgaagacaaaacaggcgcacaacactttaat

SEQ ID NO: 6238 - DNA, 118 bp, Glycine max
  Clone ID: 701098035H1
cggctcgagctcgagcgctcgagccgaataagaaaaaaaattgatgatagtagatatcaaagtgagcggtcatcacgtgtgatgatattggctcaaaaacattgattctaatctccaa

SEQ ID NO: 6239 - DNA, 263 bp, Glycine max
  Clone ID: 701098036H1
gtcgatccgggctgaagacattgtcaggtgagggagtacgaggagtgcattgagagggacagtgcggatgttgtggcagtgaacaacaaggctctgtgtttgatgtatctgagggacttgtcggattctattaaggtgttggagagtgcgcttgacagagttcccactgtggctctcaatgagacgcttgttgtcaatttgtgtagtatgtatgagttgggtatgttaatcactctgatgttaagagaacgcttagtagctgg

SEQ ID NO: 6240 - DNA, 264 bp, Glycine max
  Clone ID: 701098037H1
aagcactctctctttcccttaccctttttcaggtttcaacgctccaactatccatggcaaaccgctggctcagacccgaggtgtatccactgttcgctgcggttggtgctgctgttgggatctgtggattccaactggttcgtaatatctgcatcaaccctgaagtcagggtgaacaaggagggaaggaaggcaggagttttggagaactttgctgagggaagaagtatgccgagcacttcctgaggaagtatgtgcgcaacag

SEQ ID NO: 6241 - DNA, 259 bp, Glycine max
  Clone ID: 701098038H1
ggttggacacacagggtctaatgtaaattcttctgccttatcaaagacaagaaaagggggatctcgtgctgcaacagctggttgaagaattgataatttggtggttttcatccttggcatggtaatatctccttccaatatctcgttaccagttgcagcatcagctatccatcaagtcattttttaaaaataattctctctttttgatccactactgcattataatggttcgattggctgctctactatggaagattag

SEQ ID NO: 6242 - DNA, 266 bp, Glycine max
  Clone ID: 701098039H1
tgagaattttgctgagtctcaacttgttcccaagatgccaaaacaagcttctgaagagcctaagaagaaaaagaaagtgaagctgccacttccattagttccagctgataacaatcaaaatgcctcacaacctgttaggcaatgcatgcattgtgagataaccaagacaccacagtggagggcagggccaatgggaccaaaaacactatgcaatgcttgtggtgttcgttacaagtccggccggctcttccccgagtaccggcctg

SEQ ID NO: 6243 - DNA, 257 bp, Glycine max
  Clone ID: 701098041H1
ggggaacacggagaagctgatgaaccagatcatggaattgaagttcacgtcgaaatcgctgcagcggcaatcgcgtaagtgcgagaaggaggagaaatcggagaagctgaaggtgaagaaggcgatcgagaaaggcaacatggacggagcgcggatctacgcggagaacgcgataccgtaagcgcacggagcagatgaactacctccggcttgcctccgcctggacgccgtcgtgacccgcctcgacacgcaggcga

SEQ ID NO: 6244 - DNA, 249 bp, Glycine max
  Clone ID: 701098043H1
cagatttaagtctctctaaacttcttgtttatagtgaaaggggccatgtcactactcaagtgcaatggacaattggttacttggatcctgaatattacatgactcagcagttgactgaactgagggatgtatatagcattggagtgttaatgctataactatcaacagcaagaaggccaatatagcaatgccattatattgtaatagcggcatgagggtaatggacatatcataagatttatacaacct

SEQ ID NO: 6245 - DNA, 255 bp, Glycine max
  Clone ID: 701098044H1
gataactaggaagtttcctaaacatcccttctttcaaaaaaccaatggctttcaagaacttgtccgttcctactctctgtgtttcccttgtgctttccttctttgcaccgaattccatagctgctaacaaccgtgcagtggttcctccagaaaccatttgcaactccaccgtaaacccttccttctgcaaaaccgtgcttgctaatcaaaatgcagcatcgttgactacggtcgaatttctgtccgaaagtcctt

SEQ ID NO: 6246 - DNA, 255 bp, Glycine max
  unsure at all n locations
  Clone ID: 701098045H1
tagcaggtggctgcacttcacctgggcaaacttggacctaagctgacccagcttagcaagtcccaggctgattacatcagtgtgctcgttgagggtccatacaagcctgctcactacatgtactaagtgattgacatgatcaactgaaaagtgagtgagggacagacaaaaatcggttttatcaatcggatttgattgtttaattttccttttttgatttttggtgttcgnattttcagagctgtggtagaagaa

SEQ ID NO: 6247 - DNA, 256 bp, Glycine max
  Clone ID: 701098046H1
acctcgagcgaatcggctcgagcactccatcaccacaaccccaaacgttcttttctctctcactctgccctaactcccattactccaacttcaatttcatactcaaatattcctattccaattccaatcctattcgtttcgattcctcttcccccagtttggaaattttgttgctggaagaattgcttaagggcatataactggctttattcactgggatcagagagtgcggctccaatggttgagacatcaaaaa

SEQ ID NO: 6248 - DNA, 85 bp, Glycine max
  Clone ID: 701098047H1
ccatcccatgcgagtcaaaggttaataaacctaaatggataccacgttgtttagggtagtgagtactttccaacaccaacaccaa

SEQ ID NO: 6249 - DNA, 264 bp, Glycine max
  Clone ID: 701098049H1
ccagaatattgtaattggtaatgtggctctatatggggccacatctggtgaggcatatttcaatgggatgacagctgaaaggttttgtgtgcgtaattctggagccaaggcagtagtggaaggtgttggcgatcatggatgtgagtacatgactggtgggatagtagttgtgcttggaaacacaggcagaaattttgctgcaggtatgagtggtgggattcttacgttcttgatatggatggcaaattcctatctcggtgcaac

SEQ ID NO: 6250 - DNA, 248 bp, Glycine max
  Clone ID: 701098050H1
gcttgtcactgtaactcgttctacttctcctgttgttctgtgtttgtgtgtagtctttcactcacctgaaaatgtcctgctactgtggtaactgtggttgcggaagcccctgcaagtgcggcaacggctgcggacgctgcaagatgttcccagactcgagctacactgagtcaaccaccaccgagaccttggtcatgggagtggcacctgttaaggctcatttgagggtgctgaaatgggtgtgcccg

SEQ ID NO: 6251 - DNA, 254 bp, Glycine max
  Clone ID: 701098052H1
gaataacgaagcctcctcgtccttcttcttccgccctttctctctctagaaccgtacggtcgcttctttctctctcctcaaccgcagacagcgtcgcctgcttttctgaatctcgcggtgttgttagttctgcggcggttgtagttccggcggcgatgggacagcaatcgttgatctacagcttcgtcgctcgcggcaccgtgatcctagcggagtacccgagttcaccggaaacttcaccagcgtggcggcgc

SEQ ID NO: 6252 - DNA, 165 bp, Glycine max
  Clone ID: 701098053H1
cgaacatgctatgagcttgctgttgcgctactgagtcattagcgtaggccatcatggaggacgatgaccctatcgttcgcgagatggacgtctatgtatgcaacgagtttatgggctccagcacgcaactagcactgctacagcaccctctgcggcctccacaca

SEQ ID NO: 6253 - DNA, 260 bp, Glycine max
  Clone ID: 701098055H1
cgattacgatggattcgagttcggagcatcaagaattcgattatttgtttaagttgttgatgattggagactctggggttggcaagagtagtcttcttctcagtttcacctccgatgcttttgaagatctctcccccactattggtgttgattttaaggtcaaatatgtgacgatggggggtaaaaagctgaagcttgcaatttgggatactgctgccaggagaggttcagaacactgacgaattcttattaccgagggg

SEQ ID NO: 6254 - DNA, 261 bp, Glycine max
  Clone ID: 701098056H1
ctccgaactccgaagcccttcagcaaccatgtcgaggagaaaggttagggacccaaaggaggaaaatgtcactcttggtccagccgttagagacggtgaacatgttttcggcgtggctcgcatctttgcctccttcaacgacaccttcatccatgtcactgatttgtctgggagggaaacccttgttcgcatcactggtgggatgaaagttaaagctgacagagatgaatcatctccatatgctgctatgcttgcagcaca

SEQ ID NO: 6255 - DNA, 255 bp, Glycine max
  Clone ID: 701098057H1
ctctgcgagatcttcattcgccgaatttaaaagatgagtaagcatcagagtgatgctttgcgtgaagccatttcaggaatcatggccgattccaaggagaagaatcgcaaatttgtggagaccatcgaactccaaatcgggttgaaaaactacgatccacagaaggacaagcgtttcagtggctctgtcaagctgccccacatccctcgccccagatgaaaatttgcatgcttggtgatgctcagcatgttgaag

SEQ ID NO: 6256 - DNA, 254 bp, Glycine max
  Clone ID: 701098058H1
ccagctgaatgtttttgataaagcacaaagtaactaaatttgctgctttcaaagacatcaagacttaagattttaagtttagggattcaatatttgtgagagcaccaacaacatcctcacatagtgcggcttatgttttatatatgagagacgtacatgacatgacaagggcagactacagctctttgttcagcagacaaaagagtgtaataaagtaaaacataagacaagacaaagcgatacaagcaaagaga

SEQ ID NO: 6257 - DNA, 252 bp, Glycine max
  Clone ID: 701098059H1
ctgtatatggatgttggatcctctcgatgagaatctccggcgccctgtcgtccgctacggcgaattcgtccaagccgcgtatcaagtcatccattcagacgccgccatcgtcaacggaggagccgccacacacccaatacgtcgcacttcccgatagatcctaccgaatgaccaaaagcctctacgccacgtcatccattggtttacccaaagggtagatgacgtggcaccggatctaggatggatgaccca

SEQ ID NO: 6258 - DNA, 253 bp, Glycine max
  unsure at all n locations
  Clone ID: 701098060H1
cagcttttctccaaaaccatccaaccacggatccagaatattattccatttttcaattatggcatcctcaactcaattctccaccactcttgttaccctatgtctcttccaattcctagcaggtttctctccaangacattcacgattgtgaacaagtgcagctacacagtttggcccggaaactgcaccgccacggggtgcgtggtggatttaacacgccgtgcccggcggagctgatggtgatgagcagcg

SEQ ID NO: 6259 - DNA, 255 bp, Glycine max
  Clone ID: 701098061H1
ctcacaaccgaaacactttccatctctctcacaaaatgacaacaatatcaaatctctcccttctcttcctcttcctcttcctctccaccctccacatagctcgcaccccctcaacccccaccaacttcatcaagtcctcctgcagcaccacccagtacccagccctctgcatccagtccctctccgtctacgcctccaccatccagcaagaccccacgagctcgtccagacagccctctccctctccctcaacca

SEQ ID NO: 6260 - DNA, 88 bp, Glycine max
  unsure at all n locations
  Clone ID: 701098063H1
gtttgcagtgcgatcgagtaaacgcaacacacagtagtanactacgagtcagaattggagatcagggtctatcggggctctgtttgga

SEQ ID NO: 6261 - DNA, 252 bp, Glycine max
  Clone ID: 701098064H1
ctccagcaactcactggaatcaatgtcatcatcttttacgcgctactcctgttcagctccatcgggtttaaggatgatgctgctctaatgtcagctgtgatcaccggcgttgttaatgttgtcgcaacttgtgtctcaatttatggtgttgacaagtggggtaggagagcccttttccttgaaggtggagtccaaatgctcatttgccagctgtagttgcagctgcaattggagcaaagtttggaactgatg

SEQ ID NO: 6262 - DNA, 262 bp, Glycine max
  Clone ID: 701098065H1
gttcacttggctacaatccctgtcactggaaccggcattaaccctgcaaggagtttcggaccagctgtgctcttcaacaacgacaaagcctgggacgaccaatggatttactgggttggaccgtttgttggagctgcggtggctgcaatctaccatcaatacattcttagaggttctgcaatcaaagctcttggatccttcaggagcaacgcttaattaaaaaaaaaaaaaatcaagtttctccactacctaaattatgatg

SEQ ID NO: 6263 - DNA, 264 bp, Glycine max
  Clone ID: 701098067H1
caacaagttaatagcattccgcaaaatggctgccaccaccttagtctctgaagtcactctcccctcctcctccggccagcggaagatgccgctgatgggcctcggcaccgcgccggaagcaaccagcgcggttaccacaaaagatgctgttcttgaggccatcaagcagggctacaggcactttgatgctgcttctgcttatggtgtggaacagtctgtggagaagccatagctgaagcacttcagcaaggactaattgcatcc

SEQ ID NO: 6264 - DNA, 202 bp, Glycine max
  Clone ID: 701098069H1
gttcctttttgatcttttatccagtctgcatgctatctgtttgcaagattaggaatacagaatatacccaggcatgcctaattgtaacttttgagcaattgactattcttttttctgtatagaggatctcacgtcttattttaaagataaagtgtcttgatttaatccttgataatctaaagtcaattattttgtcacactc

SEQ ID NO: 6265 - DNA, 260 bp, Glycine max
  Clone ID: 701098071H1
caatttaccagctatacttgttccttttgaaggttagaagtgctacaatacaaacaatggcagctactcaggaagatgtgaagcttttgggtattgtgggaagcccatttgtgtgcagggtccagattgcccttaagttgaagggagttgaatacaaatttttggaagacaatttgggcaacaagagtgatttgcttctcaaatacaaccctgttcacaagaaggttccagtgtttgttcacaatgagcagcccatagca

SEQ ID NO: 6266 - DNA, 257 bp, Glycine max
  unsure at all n locations
  Clone ID: 701098073H1
aagcaacctctaacctacctctttttcttctctctcaacaacttcaccttcttcactctcgatcatgacacacntcaaaggcaagtaccatgatgagcttatcgccaatgctgcgtacattggcactcctggaaagggcattcttgctgctgatgagtcaacagggacaattggcaagcgtttggccagcatcagtgtagagaacattgaatccacaggcgagctcttagggagctgcttttcactgctcctggtgt

SEQ ID NO: 6267 - DNA, 252 bp, Glycine max
  Clone ID: 701098075H1
gtggagagagcacctcactctgcaagtgatggagcaacaggatcaatcttgttttcaacgctggcaacttcggtggatgctcatcccactaaaagagcatcctcatcaagagcaagtaaagggaaacttgcgcctgcccatattcaatcaggtaaaggtgagatggaaaaggctttaaatgacaatcccatgaaatcagcatccgacgtgttgagccccggagatccaatcgcaggatccagccaacatcaa

SEQ ID NO: 6268 - DNA, 232 bp, Glycine max
  Clone ID: 701098077H1
ctctcatcaccaaacaagttaattaactcaagaaagattgtttcagcataatctcatatgttttggattgaaattttaagtacaatttgttaaatatttgaaaggcgacaaagagtttttagaaaaaatttaaaatagtaaaataaaaattggtcttggtctaatcctgagtgtgcaccaggctgcaccagcatatataccccttctctttcactctcttccagacaacata

SEQ ID NO: 6269 - DNA, 249 bp, Glycine max
  Clone ID: 701098079H1
caggatatgaaaattgggcagagtgcattaagatcctaaatgaaaacgaaagtggaacaggctcagctcccttaacacggagcggaattgtataaaataattacatcgagtaatgagattctttttctaagttatttcttctttgagaggtaactatttgctaacttgtatctttactttctttcatttggaagtccatattggctttatttgtagcaaagggaccattaaagctctggtagaaatgca

SEQ ID NO: 6270 - DNA, 262 bp, Glycine max
  Clone ID: 701098082H1
gtttgttgttctctcaagtctcaactcccaccccccctctttgacttttctatcagaagagcttgttggagttgaaaactgagaagaaaacatggcagcacaagggcctgtggtagtagcatcacttctaattttctgtttagctggaagttgctatgggaaggttcacttctcttccttgaaaagaacccttgatgtcactgcttccccgcagcaggaacaagttctggaggctggattagacaaaatcacagtgacatgg

SEQ ID NO: 6271 - DNA, 251 bp, Glycine max
  Clone ID: 701098089H1
tgattggaaaggcaatcattaaaactcacatacagacgatattcatcatctcagtttgcaacaatcaacttcttcattggattgagaatgaatttatttgggttctcagccacatacctggttttgcatctgtcttgcctagagtgacttctagtctccgtgcaatgaaagataagtatctgaaaaaagattcccatccagtttccccaataagcagggggaaaagtgggatttttctttcactttagtct

SEQ ID NO: 6272 - DNA, 245 bp, Glycine max
  Clone ID: 701098092H1
cgctgagttgcgtgcaaagcacgaggcacatggtgtgctcttccctgcacttgcaagtggagaattggaggttgttgaggccatggtggcggaagaccccactgtgttggaacacaacattggctgtgacaggctttctcctctgcatgtcgctgctgccaatggtcggatcgaggttctttccatgttgttggataggtctttaatgttgacgtattgaatcgacataaacagaccccgttgat

SEQ ID NO: 6273 - DNA, 252 bp, Glycine max
  Clone ID: 701098093H1
cgcggagtattcaaaggtctaaaagtcttgatacagaaccatcgtccaaatcagaaaaatactcccttttagacctttgaatactccgctcaaccattttactctgtctagttcttctaatataggaagtttcagaatcatcctcgttactatcgaactaattcgagtttcattgagtgatcctaccaatgcctttctgaatatttttcagagaaagatgaatcacacaaaaacgtagtttggctttgacag

SEQ ID NO: 6274 - DNA, 249 bp, Glycine max
  Clone ID: 701098094H1
cggctcgaggccgaaccaaactccgaagctatggcagagctccaaaccaaggttgaacctgttacggtcccggctccggtggatcccgagccaccgctagctgaggctccgccgctcgagaagaaagccgtggcggtgccaccacctgttccggctgcggcagaggaaaccaaagctcttgttattgtggagaaggagaaggagaagagaagataccagaacctgtaaaaaagaacgcctcaggtggat

SEQ ID NO: 6275 - DNA, 236 bp, Glycine max
  Clone ID: 701098096H1
gcaaaggaataaggggtttgcagtgttccacccacacgcacgcactagcagaagcagaagcgcaacagcgtgtaaccctaattagggtatgcaagccgatttgggattcgcctttcgcgtgatcgcagcgctggatccgtaccgtgttcctccgtctacggtagcgccttttgctcgacccttcgccgatctcggaagcatgtacggtcccgatgggcaatgttgggaagcggggg

SEQ ID NO: 6276 - DNA, 261 bp, Glycine max
  Clone ID: 701098101H1
ccacgattatgtagtgattcacatattcatgctcttcacaaagaattggatgaagtttcatgtcctatctgcatggaccatccacataatgctgttctcctcctttgcagctctcatgagaagggctgcagatcttacatttgtgataccagttatagacattcaaattggctggaccggtttaaaaaaatgaagggcaattccaagggggacccaaaatttaccaagtccttaagtaaccccaacaattctggttcagga

SEQ ID NO: 6277 - DNA, 273 bp, Glycine max
  Clone ID: 701098102H1
catgcctatgcttgtttatcattttcttactttcctctcacgctctgccacaaaactccgtctccgcaataacggaataaaaaaacaagtttaattactattatggccgccgaggatcataagaccagccacgctaaaggtaaccgtaaccgtaacaaccggggcgaagaagtgaatttccttggattaagaaaaaggccttggggaaaatacgccgcggagatcagagatcccggcaagaagagcgcgtctggctcggaacttcgacacggc

SEQ ID NO: 6278 - DNA, 218 bp, Glycine max
  unsure at all n locations
  Clone ID: 701098103H1
attctctctctcattctcttctccatcgcgcgtaagaaacacattttagttgctactaatgggaactgttgaagctgcaaacaaggatgcaaatggaagtctcctagagaacaatccttcagtcgtttttgtgttaggtggcccangaagtggaaagggtacccaatgtgcnaatattgtcnanaatttttgggtatactcatctcagcgctggtgat

SEQ ID NO: 6279 - DNA, 275 bp, Glycine max
  Clone ID: 701098104H1
gctggaagtaacgctagcttcagaagtcgatggtttgctttcttcgcaccgtgtccgcccgcctcttctcctcctcggaatgcagctgatatagtttacagaagttgtgaaggaccaacagagcacttaagagagtttaactgagagctgcaaggatggctcatttggatgtttgtcatcaagtcaggttcattggtcagcttgaggaatatggaagtagactttcttccagtattcctacggtagaaggatcaaaagataaagaagaaatcgtt

SEQ ID NO: 6280 - DNA, 268 bp, Glycine max
  Clone ID: 701098105H1
agccaccaccgccaacaaaacaacgggaaatgataatgaagaggaggaagatgaaacagcaatagatgcaacagcaggcagagaagaagaagatcatcaagaccaagacaagactaagaaacagctcaagccaaaaaagaagaaccaaaaaaagcaaagagagccgagatttgcgttcatgacaaagagtgaagtggatcacctcgacgatggctatagatggcgcaagtacggtcaaaaagccgtcaaaaacagccctcatccaagg

SEQ ID NO: 6281 - DNA, 251 bp, Glycine max
  Clone ID: 701098106H1
cagatattaatgatgttgagtatcaatggtatatacgccgaactagacgatatatatcgcataaggcgacactgtctaccgaggaggccaaggatcccctggagaaggcagtgctagatggtagacagctagccctgaagattagtgccaattctgtgtatgggtttacaggggctaccattggtcagttaccatgtttagagatatcatcgagtgtaacaagctatggtcgacaaatgatcgagcacacg

SEQ ID NO: 6282 - DNA, 257 bp, Glycine max
  Clone ID: 701098107H1
acttcattcgaagcaggcaacaaaattgatgatgacgatgaagacgacaacaacaacgattacagctttgcgttttacgtgaatcgcgatcaatcagacaagtcgtctcgctccgccgaagagctcttcgacggtggcaaagccaagcccttgaacgagtcatcacgtgcgacttctgttgctgaacaaaaaagaggcagagaaagagagagaagttcttcttcaacaacaacaacaagttgtcgtctcgaattcgg

SEQ ID NO: 6283 - DNA, 256 bp, Glycine max
  unsure at all n locations
  Clone ID: 701098108H1
ctcatatccttatcctgtttctttcaatggaagtcatttctgcttctagcttgaatcccaacgctccgatgttcgtcccactcgcctatcggacggtggaggatttctccgaccagtggtgggacctcgttcactcctccccctggttccgcgactactggctccgcgagtgcttccaagatccccagttccanaacgacgacgctttcgacttcgactttgacctagatctccaagatgaagatgaaagggacga

SEQ ID NO: 6284 - DNA, 258 bp, Glycine max
  Clone ID: 701098109H1
ccaaagggaacacctctagaagggatcctctttcttcctcaaaccttagagactctactgtgttgcctggctcttcagttttatctcatgatgataccttggaggatgaaacaacatatgtttccagtgacaagaatcgatttggttggcccaaacagctagaaagggaaccctctcctccgaataatgtggaccgtgttccaagtggtagaatggggggaaatttgataccatctgtgtattctgatccacaaaatg

SEQ ID NO: 6285 - DNA, 253 bp, Glycine max
  Clone ID: 701098112H1
cggctcgagaacgaggagaagcagaaggagcaaaagcaatggcgccgaagaagccgagaaccacgacaaggaaccctgatttggttagggggattggcaagtattcgaggtcgcagatgtaccacaagacgggcatctgggccatcaaggccaaaaaccgtggcgttttgccccgccacgatcccaagcccaagcccgaggccccggcccagaagccgcccaagttctaccccgcggacgatgttaagaagcc

SEQ ID NO: 6286 - DNA, 255 bp, Glycine max
  Clone ID: 701098114H1
ccgtattcgaggcaagacgcgaccttacggtgtgaaggggggccggtagcgaaagcacgccgaacccaaatacgacgaagaagaccacagaaacgcaaccaaaaaaagctgtggtggaggtggagcacaacaaagaagaagaacaacagcaacaaacaccagagggggatgaattgagcggtatcccaattacgcccagtgagaacaacaccaacaaacccaacgtcatcttcattctagaaaagctcctttgga

SEQ ID NO: 6287 - DNA, 252 bp, Glycine max
  unsure at all n locations
  Clone ID: 701098115H1
catttggagtttggagcgactgaactaatcattaatttgcactcgctgtttcagcttcatcacccttcttttgcatcatttatatctcttgagaaatggcacaagaaacctttctattcacatctgaatctgtaaacgagggtcaccccgacaagctgtgcgacnagatctctgatgcagtacttgatgcgtgccttgatcaggaccctgacagctaggttgcctgtgagacatgcaccagaccacatggtc

SEQ ID NO: 6288 - DNA, 254 bp, Glycine max
  Clone ID: 701098116H1
cctgtatcgatacacaaggaaggagaaggcaaaaaaatcaattatgttacagtatttgaacgccctgggttgaaggaatttttaaagcaactcagtgaatttgctgacatggtgctgtttacagctggtcttgaaggctatgctagaccccttgttgacagaatagatgtggaaaatcgattcagtctacgactttatcggccctcaacaattagcacggaatatcgggagcatgtcaaggatcttacctgcat

SEQ ID NO: 6289 - DNA, 156 bp, Glycine max
  unsure at all n locations
  Clone ID: 701098117H1
aaaaaccgacacaaagatctagtcctagctagaatcaaacaggggcgatctcaccttcaagaacacatcgccatggcaaggaacttgcttctcgtngcttntgcagtagcaccctcctccatggctcagcagccaaaccagacacatggtcggtga

SEQ ID NO: 6290 - DNA, 105 bp, Glycine max
  Clone ID: 701098118H1
cacagttggaaaaaaaaaaaaagttgttcgagatggcacgtacgaagcaaactgctcgtaagtccacaggaggaaaggcacctaggaagcagctcgaaaccaagg

SEQ ID NO: 6291 - DNA, 273 bp, Glycine max
  Clone ID: 701098119H1
cccaaatcaatcaaattctttgagttgaacacaggggccaagattccttctcttgggttagggacttggcaagctgaacctggtgttgtagctgaagccctcaccacagccattcaggttggatacaggcatattgactgtgctagtgcgtataagaatcaagcagagattggttctgctcttaagaagctttttgatgatggtgtggtgaagcgtgaggacttatggatcacttccaaactctggtgttcagatcatgcaccagaagatgtg

SEQ ID NO: 6292 - DNA, 254 bp, Glycine max
  Clone ID: 701098123H1
cgaggcccagcaaattgcgttgctagctaatgcctcattactagctgatgaactacttcctcgtgcagctatgaagctttcccccataaatcaggctgcatacaaggatgataatcgaagaagaacctcagaaaggcaaaatcgtcatcctgaacaaagagaatggaggagaagacttgttggttcagttgacagattgaaagatacattttgtcgtcaacatgcattggacctatttttaaagaggaagtgat

SEQ ID NO: 6293 - DNA, 258 bp, Glycine max
  Clone ID: 701098124H1
ctgacaaggagattcttcaaattgtgaaggagaattccgacttcagacctggaatgatcaccattaacttggacctctaagacgggtggccataggttcctcaagacagctgcttatggacactttggaagggatgaccctgacttcacctgggaagttgtgaagccactcaagtctgagaagcctcaagcttaagattgttgtgaagttaatcactcccttcaatggatgtcttgctaggtgtggatgaataatttg

SEQ ID NO: 6294 - DNA, 254 bp, Glycine max
  Clone ID: 701098125H1
ccgagggtttcgctccgtttcaatggggagcgaagagcagaacggcgaattctacctgcgttactacgtcggtcacaagggcaagtttggtcacgagttcctggagttcgagttccgcccagacggcaagctccgctacgccaacaactccaactacaaaaacgacaccatcatccgcaaggaggtttacctaacccccgccgttctccgcgagtgccgtcgcatcatcgccgagagcgagattatgaaggaag

SEQ ID NO: 6295 - DNA, 249 bp, Glycine max
  Clone ID: 701098126H1
cgatgatgtaggacccactatcttttataatttccaagaagagaatgtgttcaaaagagtgtattgttggcatttctgttgtataattgtaagagatttatgagaaattttctgtatcttctaagtgaattgttttgttgaataattgcagaaacaatagtgctttgttgaaaaacatattttcaaaataaactgggacaggtttgtaaaaaaaaaaaaaaaaaaaaaggggcggccgccgattattga

SEQ ID NO: 6296 - DNA, 224 bp, Glycine max
  Clone ID: 701098127H1
ccaatttttgacaaggctcgtggttctgctccatgtgtcctattctttgatgaacttgactctattgcaactcagaggggtagtagtgtcggagatgctggtggtgctgctgacagggttttgaaccaactgcttacagaaatggacggaatgtcggcaaagaaaactgtgttcatcattgggggcactaatcgaccagatattattgacccagctcttctgcg

SEQ ID NO: 6297 - DNA, 252 bp, Glycine max
  Clone ID: 701098128H1
ccgagttcaaggagacggtggtgataaacgggagggtgcagggagtgttttacaggaactggacgattgacaacgcgacgcaattagggttgaaggggtgggtgacgaaccggagggacgggtcggtggaggctctgttctccgggagtgttgacgcggtgcaggaaatggagcagaggtgtccgcgtggccctcccgatgcggttgtcaccggccttcaggttttcccctccgacgatgaacctgccacta

SEQ ID NO: 6298 - DNA, 254 bp, Glycine max
  Clone ID: 701098129H1
cctaatttgtctttctctatctctatcggtcatgggtgcttttgcttttgatgaggaaaactcctccaccgtggctccggcaacactctacaaagctctgacaaaagatgctgacactatcatcccaaagattattggggccatccaaactattgaaatcgttgaaggaaatggaggacccggaaccgtcaagaagataacagctagtgaaggtgaccaaaccagtttcgtgctgcaaaaagtggatgcaattg

SEQ ID NO: 6299 - DNA, 254 bp, Glycine max
  Clone ID: 701098130H1
ccagcttttgatccggaagctccccttccagaggctggttcgtgacattgcccaggacttcaagactgatctgcgtttccagaaccacgccgtgcttgcattgcaagaagctgctgacgcataccttgttgggctctttgaggacactaacctgtgtgccattcacgccaagcgtgtaaccattatgcccaaggatattcagctggcaagaaggattcgtggtgagcgtgcttgagttggtggttggaaagatg

SEQ ID NO: 6300 - DNA, 254 bp, Glycine max
  Clone ID: 701098131H1
ccaaaaccctagtaaaaccctcgcgtgcttggaaatggcgtttaactcaattcttcgcaagtcgggttcttttgcgagggctcttgctgtcgcgggtcaattgacgaagaatagcaacctgggtcatcgctctctacacttcaccgccatcaaccagcaccaccacaaggattcgtttgttccaaggttccacttttcttctgtagcttccaagaagaaaccaacctccgatgagaaccttctccgggtcatcg

SEQ ID NO: 6301 - DNA, 253 bp, Glycine max
  Clone ID: 701098132H1
atttggcctgtaggaaggggaaaccattaggattaatgtgaagcacaaatcaactagtggaactggcatgctctcagctgctggcctaaccagtgggcatgctgcgacaccaaagccaaaaatcgtgagtcttgctcccccaccaagtggagctgggaaaatcaggtctcctcttccacccccaccaaatgatccagttgctgctcggactgcttccaccagtcgtgctactggtcctaaagggacatacgaa

SEQ ID NO: 6302 - DNA, 260 bp, Glycine max
  Clone ID: 701098133H1
ccattacgctagaggtcgagtcctctgacaccatcgataacgtgaaagctaagatccaggacaaggaaggtactccaccagaccagcagcgcttgatcttcgccggaaaacagctcgaagacggcagaaccctcgccgattacaatattcagaaagatcgacgctcaatctgtgctcgactccgcggagggatgagatctcgtgaaacgtcaccgggaaactattactctggaggtgagagtctgatacgatcgatacgt

SEQ ID NO: 6303 - DNA, 256 bp, Glycine max
  Clone ID: 701098138H1
tgaagatgagatctcaatacattcctgaggaggccaggagcaccatcatgaactttttccgcattcctctcaacatttttgtgtgtgttgtgctgtacaatgttgatgcattccctatcactgttatgtttggcatgtgctcaattttccttttggtggcttgtatcttgcaaaggcgactgatggtgatttccgataagccaaaaacagaagattggcaattgaaggatagggacgcagagtcagaaccattgaa

SEQ ID NO: 6304 - DNA, 257 bp, Glycine max
  Clone ID: 701098144H1
agactcgagccgctgtggtggctgctgctgttggagcttttcttcatgttctgtcgaacattgggggttttctcaccacgttggcttccattggaagcatggtttagttgctatctacaccccctgttgaagagcaaaagacgttgtctctgttgatggcttcggccttgtttcagggcgtctccattggacctctgattgatttggctattgccattgatcctagccttattgttagtgcatttgcggcacttctt

SEQ ID NO: 6305 - DNA, 252 bp, Glycine max
  Clone ID: 701098146H1
cttcgaattcgaattgttccatttgcttcgcaaaacttgcaactacttccacagaaagacaaaaattttctaagttaaggcaatccagagtgaaaacaaaaaaatggccggtgacggtgcagctacatgcatggacatccttcttgccattattctccctcctcttggtgtctttctcaaatatggttgccaggtggagttctggatttgtttggtgctgaccctttttggttatatacctggaattatcta

SEQ ID NO: 6306 - DNA, 248 bp, Glycine max
  Clone ID: 701098147H1
ccagcaaacccagttgtcaaggctgaaaagcttgataagatctaagatttgaagttgaagttccatgccctgagatgaagttatgcacaatttcatcatgaaatgatccgagtctccttcacattttattggtgttcttattatattgttatatgtggtgggtgacttgagtcattggacatctctgcaatttgaaggactctttcatgtgattggtgaaaatatatatgttggccactgttgttttt

SEQ ID NO: 6307 - DNA, 252 bp, Glycine max
  Clone ID: 701098148H1
cgaagattgagagttagggtttaagcgaaatcagatcagagaagaaggcatcatcatgtttccaggaatgttcatgcgcaagccagacaaagctgcagcactgaagcagctgaaatctcacgcggccatgttcggggcatgggttgttgttattcgagtcaccccttacgttcttcactttctcagcaccgagaaagaggaacttaagctcgagctttagcttctcactcttcctcggcagagtggattttg

SEQ ID NO: 6308 - DNA, 276 bp, Glycine max
  Clone ID: 701098149H1
gctgcatctgctgcagaggcggcagcagctgctggtgaaagtagtctcagatcttttatgattgctgtacaacgttctggaagcagtgtagctattacccaacaatactttgctaattctatatcccgggctttggttcccgttgaagggtgaaaaggtggtggttggtgaggaatgggcaatagcattgtcaggtgaagaggctgctgcttataaaggactacaacagtgcattgaaactgtcatggctgaggtggagcggttgctttcagctga

SEQ ID NO: 6309 - DNA, 130 bp, Glycine max
  Clone ID: 701098150H1
ccgggggattcggtaccgagggcagtaccggcaagggttacggcacgggttcggggtgtaccggttctacaccggggatgtttttgccggggagtgggtgagtcgacagagtcatgggtgtggggttcac

SEQ ID NO: 6310 - DNA, 255 bp, Glycine max
  Clone ID: 701098152H1
cgatcaaaaggttggaatttgtggggcaatgatgttgtccaatgggagccttttgagaaggaatctgtaccatttgggactaatcaaatcatgttcttgaatcagacggtagagcacatgaatttaggagtgagtttgttctatgcaacatgtgtagtataatattctttgcttcagatttggggtttgtgtacataaaaatttaaaggtggaatttggtgatagttgttgttctagttggttgggttgggtttg

SEQ ID NO: 6311 - DNA, 238 bp, Glycine max
  Clone ID: 701098154H1
cgcaagacgaaagaaagaatcccaggcgaggagaaagatggaggggaaggagcaggatgtgtcgttgggagcgaacaagttccccgagagacagccgattgggacggcggcgcagagccaagacgacggcaaggactaccaggagccggcgccggcgccgctggttgacccgacggagtttacgtcatggtcgttttacagagcagggatagcagagtttgtggccacttttctgttt

SEQ ID NO: 6312 - DNA, 246 bp, Glycine max
  Clone ID: 701098157H1
tcgagcacatgcagaatctacttggctatgcttgttctgtatattgtgtgtataaaatgatcaagtcattgcaaagtgttgttttcaaacaggatggttctgttgatcctgtgacaaggacaataagtatatttcttcagttctttgatataggaataaatgcagccttattatcacagtatatttccttgctattcatcggaatgttggttgtgatatcagtgcgtggattcttaaccacctaat

SEQ ID NO: 6313 - DNA, 252 bp, Glycine max
  Clone ID: 701098163H1
ctactctcacagctgtttattttcttcctctcctcaactgtgttcgtgtgtatgcatttgagttgaaagccagactcaaggagctgaaagacaaaagaagaaacttggatttgaatcagccaaaatttgagttacacgtaattgcaaagataagatgagtgttatgtatagtcctgttctcaattactcagatgtggagcatcagctaaggaaaaaccaagacatggattcaagtattggacatccacacaa

SEQ ID NO: 6314 - DNA, 78 bp, Glycine max
  Clone ID: 701098167H1
tggaattcaaatttcgcattcaatctttgtaactgacagataaaggcgacaatatctcatctttcctctcacaccatc

SEQ ID NO: 6315 - DNA, 269 bp, Glycine max
  Clone ID: 701098168H1
gtctctcgaagcctctttctctctcttgtagaagctatctgtgtttggtgttactaagtctccaacaagcaaagtacatggttgatcttggaatccaggtccctaccccattcgacccgtttgccgaggcgagagaatcggatgcccccggagcaaaggagtatgtgcatattcgaattcagcagaggaatgtgaagaagagtctgaccacagtgcaagggctgaagaaggagttcagctacgagaagatcctcaaggacctcaagaag

SEQ ID NO: 6316 - DNA, 239 bp, Glycine max
  Clone ID: 701098173H1
ctcaaaagggttgtgacggatccttcaagggaagaaagtgggtgctcgagtggtgtggagtgcattcttggcattctaagggcccttaagatggggtcctgcttctctgcggaaagcaggagccctcaccccaattcaccaaattcatcatctttcaggaagagcaagagcaactccaagaagaggcttggatcaagaacctcttcatttgagtattggaggaatgagcctctacatag

SEQ ID NO: 6317 - DNA, 229 bp, Glycine max
  Clone ID: 701098174H1
cgcctcaccggccgtggcttgatcaaccatttgatccccaacgtggagcacctaagacgtgtaggggtgccgcagggccccattgcccacctggtgtgcaaccacctcggtgtggtgtgtgtggagcacacgaaattcgtggaggctgtggagaaggtggtgacattcgggtttgatccgatgaaaaccatgtttgtggaggcgcgtgaagtggtggttgggactagca

SEQ ID NO: 6318 - DNA, 250 bp, Glycine max
  Clone ID: 701098179H1
cccacagaaccattccatagaaatgtcaggcgttggccctctttctcaagattgggaacccgtcgtcctccgcaagacggctcccactgccgccgccaagaaggatgagaaagccgtcaacgccgcccgccgctccggcgccgaaatcgaaaccctaaaaaaatataatgctgggacaaataaagcagcatctagcagcacttcattgaacactaagaggctggatgatgatactgagagtctagctcat

SEQ ID NO: 6319 - DNA, 251 bp, Glycine max
  Clone ID: 701098180H1
cacatggtcatagtctacacctaattagccacacacaccacagcaccaaactagttggctcaattctctttgaatggctttggaggctttgaattcaccaacagcagccaccactcccttccgtggttaccaagaagaggaggaggaggttgaccttcacctacgcgagccttgggccaagagaaaacgctccaaacgacctcgttttgagtcggaggaagagtacttggcctctttgcctcatcatgctt

SEQ ID NO: 6320 - DNA, 271 bp, Glycine max
  Clone ID: 701098181H1
ctggcgtcgtctggttttgctctgtcatagttacaatctgggtgctagttgatagttgcattttgtaggctggaaatgaaagtgagggctgtttgcagggaaaattacgactatatacgctatgatctccaaggaaatggctttccctcctccttggcaagaccctctcaacttcaaaaaccgtcgcaaatggacctgggacaagcgtatctgggttttgaagagagctgcccggctttatgctgcaagctgggttcgtgacattggtcct

SEQ ID NO: 6321 - DNA, 253 bp, Glycine max
  Clone ID: 701098185H1
ccgagcgaagaccaccgcgtaacggaggacgcgaacgtcgtcgttcgggcggagtccttaaactgctgcatcacgagaatcgccaaggacgacggcaccacactcctctcgtggaacgagaagttcctcttggacatgcccatgcatgcaaggtccataaccttcgaagtgcaatgtaacaggttcaagggctttcggcggctcggggtggcccgaatcgccgcctccgatttcctcgcggcgcgtgccggaa

SEQ ID NO: 6322 - DNA, 247 bp, Glycine max
  Clone ID: 701098187H1
ccactctcttgaaaggattggagacaattgctgcaagtgcagatattccaatgttcgtttgtggggactttaattcaattccaggaagtgctcctcatgcacttcttgcaatggggaaggtagatccatcgcatcctgatttagcagttgacccacttaatatattgcgtcctcacagcaagttggttcaccagttgccactggtcagtgcttattcgtcttttgctagaacggttggtcttggatt

SEQ ID NO: 6323 - DNA, 91 bp, Glycine max
  Clone ID: 701098188H1
cgtttattgaatgagtagaactaagatatgacaattggtgtaataaaatttctcccatttctttcaagtaaaagcaaaaaaaaaagaaaag

SEQ ID NO: 6324 - DNA, 251 bp, Glycine max
  Clone ID: 701098189H1
gcaaaaagaaagaatcccaggcgaggagaaagatggaagggaaggagcaggatgtgtcgttgggagcgaacaagttccccgagagacagccgattgggacggcggcgcagagccaagacgacggcaaggactaccaggagccggcgccggcgccgctggttgacccgacggagtttacgtcatggtcgttttacagagcagggatagcagagtttgtggccacttttctgtttctctacatcaccgtctta

SEQ ID NO: 6325 - DNA, 245 bp, Glycine max
  Clone ID: 701098190H1
cgaattttatcacgggattaataattagctcatagtttttttggaagacttgtgaaaatgggacttgtggagctttttggggtggcatctatgcccgtgatcaaagtactactaatcactgctgttggcttgcttcttgcactggacaacgtaaatttgttgggaaaagatgctaggatacaagtgaatcatcttgtgcattatgtgttcaatcctgcactggtgggtggcaatttggccgacac

SEQ ID NO: 6326 - DNA, 249 bp, Glycine max
  Clone ID: 701098191H1
ccggacataagacagcgtcctagtcgcaaccctaataagaagaaccacagcttcaagcgagtcacatccaccagccatgggtcgtatgcacagccgcggtaagggtatatcctcttctgctttgccctacaaaaggacaccccctagctggctcaagatctcttcgcaagacgtggaagacaatatctgcacacctgcgaagaagggcttgatcccgtctcagattggtgtcattcttcgagattctca

SEQ ID NO: 6327 - DNA, 247 bp, Glycine max
  Clone ID: 701098192H1
gttacattccaaacaaaggtggttcctggcactgatggtaatggctctatcgccaaggccactctcacattccacaccaaagacgatgataccactctcagatgcagtgcgtgatgaaacaaaggccaggggtgctggaattttcaaggccattgagggctacgttttggcaaatcctgcccaatgattatccttcaaaccacttgcatgcatgcaataataattatataagcttatgatctggttg

SEQ ID NO: 6328 - DNA, 247 bp, Glycine max
  Clone ID: 701098195H1
cccggtgtgagtctaatatttgcagtgctgaaaatgtcgcagttgttggacaaagccaaaaactatgttgcggagaaagtcacgaacatgcccaagcccgaggcgagtgtcaccgacgtggatttcaagcgcgtgagccgcgacaggtacgagtacttggctaaggcctctgtttccaacccttattccactcccattcccatttgtgagatcaagtactccctcaaaagtgctggcaaggagatag

SEQ ID NO: 6329 - DNA, 250 bp, Glycine max
  Clone ID: 701098196H1
cagtcttcaaccatggccacacccttggcctaccaagagcatcttccggcggcacccagttggctgaacaaaggtgacaacgcatggcagttaacagcagccatcctcgttggtcttcaaagcatgccgggtctcgtgatcctctacgcaagcatagtgaagaagaaatgggcagtgaattcagctttcatggctctctatgcctttgcagcagttctaatatgttgggtgcttgtgtgttaccgcatgg

SEQ ID NO: 6330 - DNA, 253 bp, Glycine max
  Clone ID: 701098201H1
ctcgtatttttcaaggggacgtcgcgacgacgacgacacggtggacgactacgacgagtacgaccccaccccatacggcggcggctacgacattcacctcacctacggccgcaccgtctctccttcagaagaaacctgctacccactcggagtctcttccgatgaaaacttcgattacgatccgccgccagtacacctcttacgctgaacactctgcttatggcgatgaagccctggccactgagtatagcag

SEQ ID NO: 6331 - DNA, 277 bp, Glycine max
  Clone ID: 701098202H1
cgcacctacataactaaataatcttatgcataacaatttcacaagtgttattttgcgttaattttcttcagttatgagggtgaacacagagtttgagcgtgttcttaagtattttgatgaggatggggatggtaagatttccccatctgagctcaggaaccggctaggcatgatgggtggtgtgttattgttcaaagacgctgaaaagttgattgaggaattggattctgacggtgatgggtttttgagtttggaagattttgtgaagataatggag

SEQ ID NO: 6332 - DNA, 275 bp, Glycine max
  Clone ID: 701098203H1
ctcgagccgtgagtttcttctactttgtgagaaacttttagtttctacttcagagaaggtgagaatggtctaagaagaagccttgcatggcgagccaaagcataggagaaacgggtttgtctgagtcaggaccttcaagtcaccatatcccttatggagttcttcatgggattaatacttcatcatcagccctaatcaatcaagggtcagcttttgattttggagagctggaagaggctattgttctgcaaggaattaagataagaaatgatgaa

SEQ ID NO: 6333 - DNA, 270 bp, Glycine max
  Clone ID: 701098204H1
aaatcaatcaaattctttgagttgaacacaggggccaagattccttctcttgggttagggacttggcaagctgaacctggtgttgtagctgaagctctcaccacagccattcaggttggatacaggcatattgactgtgctagtgcgtataagaatcaagcagagattggttctgctcttaagaagctttttgatgatggtgtggtgaagcgtgaggacttatggatcacttccaaactctggtgttcagatcatgcaccagaagatgtg

SEQ ID NO: 6334 - DNA, 268 bp, Glycine max
  Clone ID: 701098205H1
cttggacccagatctcagctccagaaatcaaggattttctttgaatcatggattttagctaaataaatcataaatcttcataaatggatcaagttgctcctcctccgattctcatgcaccgcaagcgcgatctctcctacgccgtcgtttcgcctgctcccaacccgagctggagctgggactgggacagcgtgcgtttcgccggcaaaccaccgccaccactctcctccccaaacgacgacgtcgtttttgaggagagtgttgcgcc

SEQ ID NO: 6335 - DNA, 265 bp, Glycine max
  Clone ID: 701098206H1
agctgaattgctcaggtatcactccactaagagtggtgatgagatgaccagcctcaaggactatgttaccaggatgaaggaaggacagaatgacatctactacattactggtgaaagcaagaaagctgtcgagaattcccccttccttgaaaagcttaagaagaagggatacgaggttctctacatggttgatgctattgatgagtatgctgttggccagcttaaggaatttgagggaaagaagttggtctctgctaccaaggaa

SEQ ID NO: 6336 - DNA, 264 bp, Glycine max
  Clone ID: 701098207H1
tgcatttgcactgtttgtaggtgtctccgtcgcagccaacatctcgggtggccatttgaacccagctgttacttttggattggccattggaggcaacatcaccctcattactggtttcttatactggattgcccagttgttgggttccattgtggcatgcctcctcctcaatttcatcaccgccaagagcattccaagccacgcaccggcaactggtgtgaacgattttcaagctgtagtgtttgagattgtaatcacatttgg

SEQ ID NO: 6337 - DNA, 268 bp, Glycine max
  Clone ID: 701098209H1
aatgaatgctctggtgcgggcatcagcaattatcacaaatgcaccgtatcttctgaatgttgattgtgatcactacattaacaatagcaaggcacttagagaagctatgtgttttatgatggaccctcaacttgggaaaaaggtttgctatgtgcaatttcctcagagatttgatggaattgatagacatgatagatattcaaacagaaatgtggtatttttcgatattaacatgaaaggattggatgggatacaaggtccaatatat

SEQ ID NO: 6338 - DNA, 266 bp, Glycine max
  Clone ID: 701098210H1
accaaaccaaaaccccacttccaatttcctcttctacgtgcctctagcttgttctaatttgaataatttggcatggacaacatgaggctcatgaggaaacacaacactactcacacatgcatggccaataattcacacacaccttcttcttccctagccatgcacaaaggttcccacatgatatccaaaaccaaaccaaagattcgcataatccacatatttgcacccgagatcataaaaacggatgtggagaacttcagggagct

SEQ ID NO: 6339 - DNA, 265 bp, Glycine max
  Clone ID: 701098211H1
gcgagagagagagagaaacaaagcagcacccatttggatcctctcttctcttctttgatctccgttaccctttttgttttctcaacagagagagagagagagaatctttcgaagttcgtttgcgtgtgttgtgtggtcagtcaccgatggcagcaccacctgcgagggcacgtgccgattacgattacctcatcaagcttcttcttattggcgatacggtgtgggaaagagttgtctgcttttgcgattttctgatggttccttc

SEQ ID NO: 6340 - DNA, 265 bp, Glycine max
  Clone ID: 701098212H1
cctttgtatggtttaggagagcttccccaggcatttgcacggcttagtgctgtttatggtgggacatatatgttgaataagcctgagtgcaaggtagaatttgatgaggaaggaaaggttgttggtgtcacatctgaaggggaaactgcaaagtgcaaaacagttgtttgtgatccatcatatttgcccggcaaggtgaggtccgttggtagggttgcaagagcaatagccataatgagtcacccaatccccagcactgatgatt

SEQ ID NO: 6341 - DNA, 123 bp, Glycine max
  Clone ID: 701098213H1
tgtttggccaaacactcccattcccactgcactgcgagacttctaaagcctctcctgcaggtgttgaaatcctgaactcctaagcaattgatataacagacccaaaaatctcataagagactc

SEQ ID NO: 6342 - DNA, 270 bp, Glycine max
  Clone ID: 701098214H1
ctgattcgggtaatggccaccagtggaggcgatgaggggcagaacaaccctgccctcgacccggatttggatgctccggatgacccggatcacgagttcgctgagttcgggtcgggttgcttctggggtgctgagttggcctttcagcgagttgtgggtgtggtgaagactgaggttggttacactcagggtcacactccggatccgaattacaaactggtttgcaccggaaccactaaccacgttgaagtggttcgggtccagttcgac

SEQ ID NO: 6343 - DNA, 273 bp, Glycine max
  Clone ID: 701098215H1
caggtggtgcatgatgtggatttgcagaagctgcctgtaagatttgcaatggacagggctggattagttggagcagatggtcccacacattgtggttcttttgatgtcacatttatggcatgcctgcctaacatggtggtgatggctccttctgatgaagccgaccttttccacatggttgccaccgcagcagccattaatgatcgacctagttgttttcgatacccaaggggaaatggcattggtgttcagctaccaactggaaataaagga

SEQ ID NO: 6344 - DNA, 266 bp, Glycine max
  Clone ID: 701098216H1
actccaccagaggaacattacactgacatgacaagcaagatacactgacatgacaagcttcctgcacatgacactattaccaaatgtattggcagatacattcttgttgagtgaggtggatgctctcattttttaagagttggaaagagggaaagggagtgtgaacgattttgaagatcgaggtatgctggtggatgtccacacgaggctcagggtaattggttggtgggccttaaaatgcgagagtttggcagggttacatttta

SEQ ID NO: 6345 - DNA, 96 bp, Glycine max
  Clone ID: 701098219H1
ttcttctcagcacataatcgatcgagctctgttgattcgattgaaatcgaagaagaaggaggcaagcttcaaccctagcgtttccacacaacatac

SEQ ID NO: 6346 - DNA, 269 bp, Glycine max
  Clone ID: 701098220H1
gattttgtgattgatggaactgaatcgacacccgagcagcaagcagctttagctgagatcaggaaaaagaaaagcttgctcatccagcagcataggatcaccaagagcaatgcagagaatcggccaactgttccaaggaagtttgataacgacaagcagttcacatcagaaagaatgggaaggcaactgtcatctttggggcttgatcccagtttggcaattaagagactgcacagcagatctgtctctagaggtcggaaaagggatag

SEQ ID NO: 6347 - DNA, 266 bp, Glycine max
  Clone ID: 701098224H1
aaaacgttcagggagcatcaaattgtggctcaagactctaatgtttcaactgcagatgataaaataattcatacattctccataagaactgagggaggggaggctgctgctatacagttgaaagaaaagcttgaagcatccctatccaaaagttgattgtcagatcatatttatgtgtagcatctcaatgatattgtaaaccatgttagaaatactctgtcttgtaggttaagtggctaacataatattgttcttagtgcactttg

SEQ ID NO: 6348 - DNA, 265 bp, Glycine max
  Clone ID: 701098225H1
cttctgcgcaaacttaaaaagctgtttctttttctcgatcctaatgcttctctttttagcaactgttgctctgctctacgttaaggacaagcaagttgaagcaattcctctggatgatgccactcaaccctcttgtttctttcagcttttcggtgctctgaaagagctcaagagaccgatgtggatgctgatgctggtcacagctgtgaactgggtggggtggtttccttacttccttttcgacactgactggatgggtcgtgag

SEQ ID NO: 6349 - DNA, 266 bp, Glycine max
  Clone ID: 701098227H1
agctcgagcgctctctctaacccatatataattaatgactctagcaagtttcacagaacagatgtatctttgtcttgcatcttctatactggtgattttgtatgtcctcctactagccttggattccccatggaccaacaaaggagtctctttgatgctgcaagattgcaacttccctattcttacagaaagtatatatgtctacaactcagaacaagaagaggaatgaatccctgaaggaaatagatttgagattcagctacctt

SEQ ID NO: 6350 - DNA, 273 bp, Glycine max
  unsure at all n locations
  Clone ID: 701098233H1
caagcactataacaaggattttggaattgagtgccgcattgggaagttccacaacatatacggtcccgntgggacatggagaggtggaagggagaaggctcctgctgctttttgtcgtaaagttatcacttcctctgatagatttgagatgtggggggatggattgcaaacacgatcatttaccttcattgatgaatgtgttgaaggggtgctcagattgactaaatctggtttccgagagccagtaaatattggaagcgatgacatggtcag

SEQ ID NO: 6351 - DNA, 265 bp, Glycine max
  Clone ID: 701098234H1
ctggagttcggctgttgactgtttgattacagggtattgctttgccttaagcgtgctttaaggattgcaaatgctgctcaacaaatggccaatgcagcaaggggtagcagtggtccagtgacgctctttgttgaaatactgaacaagttggtcaccttttgctataaaactacttgttatactatcttcatgattttcttacttacggatgagagtgagtctcaggcactctactatgttgagacaggatacctcagatcactag

SEQ ID NO: 6352 - DNA, 260 bp, Glycine max
  Clone ID: 701098239H1
gagactacatggcctgctcgtaagcacgtggttgcgtgtgctgctgtgtgcaggtcctggagaggaatcgtgcaaagaaattgttaccagtcctgagttctgtgggaagattactttccctgtctccctgaagcagcctggttcaagggatggaaccatccagtgtttcatcaagagagacaaatctaatctgacgtaccacctattcctttgtcttagtcctgcattgctagttgaaaatggaaagtttcttctttctg

SEQ ID NO: 6353 - DNA, 264 bp, Glycine max
  unsure at all n locations
  Clone ID: 701098240H1
cacaaagcaaacacctccaactacaaacaaacacacttcacaactttcctttttctctctttcaatgtcctcttcttccttctcccccgccactctcaccaccgagcaggagctttccgtcatcgttgccgcccttaccaacgtcgtcgccggctccacctccgcctccagctccttctccctccccgaattccgccttccacagacctctgatcccctcgncgccgcctgcctaatgccgccgccgccgccgccgagcatgga

SEQ ID NO: 6354 - DNA, 261 bp, Glycine max
  Clone ID: 701098241H1
aaagaagaaaaaaaaaactcaaacaccttcaagaacttgtatctttctttgttagtatttgttactacaattttacattcttttcatctctacatatttcattagtcatggcacctcaagcagtttccttcaagtccttcgccgttgctcttattgtggcgcttttcttctccgcctccgctctggacttagtttcggggcagtcgccggtcccggcgccggtgccggactagatgccggagcagctggatccgtgtcgag

SEQ ID NO: 6355 - DNA, 262 bp, Glycine max
  Clone ID: 701098242H1
agaacatatcctgttctctggttttggaatccagacaggttgttctctttgtttgcaattctctcacttctttcttcctcattatctagttaagcatggcaacagttatggacatgtacaatactagtagcatcatgataccagatttcttagaccagtgtagtgatcaagagctgatgaaagcacttgagccttttatgacaagtgattcatctagcattacatacccttcattctcttccttttgcttcttctcccaatt

SEQ ID NO: 6356 - DNA, 268 bp, Glycine max
  Clone ID: 701098245H1
gagaggtgtccctgttgccactgttgcagttaataatgcaactaatgctggattgctggcagtgaggatgttgggtgttgccaatgataatcttctgtcaaggatgagtcaatatcaagaggcccaaaaggaaagcgtattgggcaaaggagataagttagaaaaacatggctggaaatcctacttaaacaatagttaattatccccattaatttggtgattatctcttaggctcatttctcatttttggtcaactacaaaattttga

SEQ ID NO: 6357 - DNA, 270 bp, Glycine max
  Clone ID: 701098248H1
aagaagaagaagaagaagaagaaaaaaagatgaacttgagatggatggcagcggtgttgccgctgggaatcatagctggaatgctctgcgtcatgggaaacgctcagtattacattcacagagctgcacatggcagacctaagcacatcggaaacgatatgtgggatgtggcgatggagcgaagggacaagaagcttatcgagcaagcctctgcctccaattaacatcgttgttttgccgatgtcatcgtgaagaacataaactgctcac

SEQ ID NO: 6358 - DNA, 257 bp, Glycine max
  Clone ID: 701098249H1
ctcgctccagcaacaaggctgcttctaagcctctctctcgtggatcagcaactgtggaatcaaaggggcaagctgagaagtgtgccaagagaaagaggaagaaccagtatcgtggaatccgtcagcgtccatggggaaagtgggctgctgagatccgtgacccaagaaagggggttcgtgtttggcttggaactttcagcactgctgaagaagctgcaagagcttatgatgctgaagcaaggaggatccggggcaag

SEQ ID NO: 6359 - DNA, 275 bp, Glycine max
  Clone ID: 701098250H1
atttccctacctctcccttcaagatgcagatcttcgtcaagacactcaccggcaagaccatcacccttgaggtggaaagctctcacaccatcgacaacgtcaaggccaagatccaggacaaggaaggaatccccccggaccagcaacgtctcattttcgccggaaagcaacttgaggacggccgtacccttgctgactacaacattcagaaggagagtactcttcacctcgtcctccgtctccgtggtggcatgcagatcttcgttaagacactc

SEQ ID NO: 6360 - DNA, 267 bp, Glycine max
  Clone ID: 701098252H1
gaagatggttcaagaggctgagaagtacaagtctgaggatgaagagcacaagaagaaggttgaggccaaaaacgctttggaaaactatgcatacaacatgaggaacaccgtgaaggatgacaagattggtgagaaacttgacccggctgacaagaagaagattgaggatgcaattgagcaagcaatccagtggttagacagcaaccagcttgcagaagcagatgagtttgaggacaaaatgaaggaattggaaagcatctgcaatcc

SEQ ID NO: 6361 - DNA, 262 bp, Glycine max
  Clone ID: 701098256H1
agctaccaaagacgctggtgtcattgctggtctaaatgtgatgcgaattatcaatgagcctactgcagctgccattgcatatggtcttgataagaaggccacgagtgttggtgagaagaatgtgttgatttttgaccttggtggtgggacatttgatgtgtctttactcaccattgaggagggtatctttgaggtgatagccactgctggttgacaccatcttggaggtgaagattttgataacaggatggtgaaccacttt

SEQ ID NO: 6362 - DNA, 263 bp, Glycine max
  Clone ID: 701098257H1
aacagagcaaagagagagtgtgtgaaaagtgaaacaaaaaacagaacaacaatggcgacacttaaggttcctcagcctcttccccccgttgcagatgattgtgagcagctccgaaaagccttctcaggttggggaactaacgaggagctgattgtatcgatcttggctcataggaatgctgctcagaggaagcttatcagagaaacttatgcccagacctatggagaagatctcctcaaggccttggacaaagaactcacgag

SEQ ID NO: 6363 - DNA, 261 bp, Glycine max
  Clone ID: 701098258H1
ctcaaaacaagttatggtagtatttgtcattcatttcacaaaaccggttcacttttggactcatggcttctaaaacccctaccttattccactctcgtttcttcctcttcggcttctattgctgggactgggaatttctcaccgctctcctcctctttagttcttcttcctaattaattaaattacatacaccttttctttctttttatttttaacctaaatttctcattcgtataacatcaacaaaagaggcataggttt

SEQ ID NO: 6364 - DNA, 72 bp, Glycine max
  Clone ID: 701098259H1
gaaggttcgacggaagaatcttctctgactcgcccaaaccaaacgctttttttttctttccacacaacatac

SEQ ID NO: 6365 - DNA, 268 bp, Glycine max
  Clone ID: 701098260H1
gtttgttccatctcttgcttcttgcttctattacttgcttctttcttcaccatgtcacttgctgggaaaatcaccactgaaattggggttcatgcaaccgctgcaaagtggttcaacctctttgcaacacaacttcatcatgttcaaaaccttactgatagagtacatggaaccaagctgcactcaaggtgaagactggcatcacaacgagacagtcaaacactggacttataccatagatggtaaggctacaacatgtctggagagt

SEQ ID NO: 6366 - DNA, 276 bp, Glycine max
  Clone ID: 701098264H1
ctcgagcaagttagagcatgctgaactaagttggtatccattgaatggcttctggactatattattcaagagccggtattaatggatgaaatgcatgttatctggatgtgcaatttgggctgcagcaacatttgcagtattattatgtatggactgtttagaatgtttcttacatgcgctacgattgcattgggttgaattcaggataaattctattatgcagatggaaaagcatttgaaccattcacatttgtgcaagaagaggactaccagtaa

SEQ ID NO: 6367 - DNA, 69 bp, Glycine max
  Clone ID: 701098265H1
tcacttttcttcatagcactcaaaaaacaacaactcatctcatcattattccctttctcactcagcaca

SEQ ID NO: 6368 - DNA, 262 bp, Glycine max
  Clone ID: 701098273H1
ccgattcctgttggttgttctctcaagtctcaactcccaccccccctctttgactacttctatcagaagagcttgttggagttgaaaactgagaagaaaacatggcagcacaagggcctgtggtagtagcatcacttctaattttctgtttagctggaagttgctatgggaaggttcacctctcttccttgaaaagaacccttgatgtcactgcttcccccaagcaggaacaagttctggaggctggattagacaaaatcac

SEQ ID NO: 6369 - DNA, 263 bp, Glycine max
  Clone ID: 701098276H1
aataaaacaaaacacaagccaagtgaaagtcagactaaatcaaaatcaaagagcataatctcagggaccattcacaagattcgggagacccttcatgtgggagggcacaagaaggaggaggagcataagggtgagcaccatgctggagaatacaaaggggagcaccatggtgaacacagtagtgagtacaaaggagagcatcatggtgaacacaaagctggagagtaccatggtgagcataagccagagcacaaagaggggtt

SEQ ID NO: 6370 - DNA, 220 bp, Glycine max
  Clone ID: 701098277H1
ctcgcactcgagaatttttccggaaaatctcaccctcatttctcagccaagagaaagactaacaaaaaaaacactcgaattccttcttaattctttcccgattcgaaggatagagaaagagaaaagaacagaaaaaaagttaatggcatcactgggatctccgtcttcatcattctggtgctaccgctgcaaccgcatcgttagggttccacacaacata

SEQ ID NO: 6371 - DNA, 269 bp, Glycine max
  Clone ID: 701098281H1
ccagattgaacaatgatcacgtgcttgaccaagttgacaaggagagcaaagttgagactggtacaagttatcggttgtttggaattgatcttattgatcattctaggaactctccttcagtagagaaggcatctgcacaagcaggaaatgcacccaaagttactactgaaggctgcaccagtaccttgacccgaactgatgctggccatctgtcggatgtaccaatggcttcttccaaggagaggaaacaagagcagcagcaagtatca

SEQ ID NO: 6372 - DNA, 260 bp, Glycine max
  Clone ID: 701098285H1
ccaaataagatgggccatttgtattgcgggggctttgtataattgtacaattatctacttgtaagaagttcagattcgggcgacaacatttgtaatgcagaattaggtcattaacattgtaaatcttctggcgatgattggaatatcaatgtgaagacgctatatgacttctgctatgacaatatcattgtggttgtcaaggtatttttgaagaaatatcgtggatttacaaagaatctggttaggcttctacaattctt

SEQ ID NO: 6373 - DNA, 251 bp, Glycine max
  Clone ID: 701098286H1
gaagaacctgatcgatatgttctgcttgggaaccatagagatgcatggacgtatggtgctgttgatcccagcagtgggacagctgcactactcgatattgctcgtcgattttctgctctattgggcttgggttggaagccgaggaggacaatcattctctgcagttgggatgcagaggaatttgggatgataggatccactgagtgggttgaacaaaaccttattaatcttggttccaaagctgtagcata

SEQ ID NO: 6374 - DNA, 247 bp, Glycine max
  Clone ID: 701098288H1
ctcatctgattcccctagcaaccttcttcttacttctctccgcttcttatctccagattgctggggcgtaagacaaccgttgactagtctcaagcttaactctcatattcttcaggagtctactgctaaagagattaatgaaaatcccgaggcaggatgggaggctgctataaatcctcgtttctccaattatacagttgaacaatttaagcgccttcttggagtcaaaccaatgcctaagaaggac

SEQ ID NO: 6375 - DNA, 259 bp, Glycine max
  Clone ID: 701098289H1
cttctacacaaccattacccttgcccgttttgaagagctaaacatcgatttattcaggaagtgcatcgagcccgtggagaagtgtttgcgggatgccaagatggataagagtaccgtccatgatgttgttcttgttggtggttctactaggattcccaaggttcaacagttgttgcaggacttcttcaacggaaaggaactttgcaagagtattaacccagatgaagctgttgcttatggtgctgcagtgcaggctgcg

SEQ ID NO: 6376 - DNA, 255 bp, Glycine max
  Clone ID: 701098290H1
cttcttcttcacaggaactctatattgcctagataaactaggctactcttatttcttttttcctttcaatctcattattattctatttgattcatttagattatatggagttaaagaaaattatagttacaggtggctaaggcttggcaagttctatggcctactctgatacttgggcaatgtgtgatggaaaatactactctggaagcttacaatataaattgcagatagcaagtaagagggcttattgtagga

SEQ ID NO: 6377 - DNA, 262 bp, Glycine max
  Clone ID: 701098291H1
gccttcaaggcttcttgaatcaaaacaagtattccctggggagaagtttattttaaatggtgataataggtgcctcgacatggtattggagcaggatgctatcggcaaagatgcattgagagggtggctagttgcttcatatgctgtacaaattggcaagtcctctcacgagctcagtaccagtaccctgctacaggcctatgagaaaatgcatgaggtcttccctgcctttataaaagaattacagtgcaaagggtggcat

SEQ ID NO: 6378 - DNA, 266 bp, Glycine max
  Clone ID: 701098292H1
caactctgcttccaacttcccaagtttcacctataattcctttcaactttcaataacatcacataccacagtctctcatatcgctttctctcatgaatataatgctatcatcatccaagcaagaataagcaacaaaatgagtcaaagtggctacatgaatgagaaaccaggcttgtccttgagacagaattccaataggaaatcaaccagaaatgggcaagtgaagagctgcatgttcagaattccttggcagtctgagacctctc

SEQ ID NO: 6379 - DNA, 267 bp, Glycine max
  Clone ID: 701098293H1
gttgtattttctcaattacaacatcgtattctgcaaattcaaaccgggtcttggttttctgaaagatgggaggtggcaaggacaagcatcatgatgaatctgacaaaggaattttttcacaccttgctcatggggtagctggtgcagcacatggtggacatgggtacccacctggggcttacccaccaccacctggggcataccctccacaacaaggatatcctccagctgggtatcctccacaacaagggtatcctccagctgggt

SEQ ID NO: 6380 - DNA, 268 bp, Glycine max
  Clone ID: 701098294H1
ctcgagccgctcgagccgctaagttctatggattacttgggcttgggtttcaggagatcacagttgaaaactgtgtgccagtatggtacaatatggtgaagcaaaatcttgtaagcgaacaggtgttctctttttggctcaatggtgatccaaaagcgaaagatggtggtgaactaatttttggaggtattgatcctaaacacttcaaaggagatcatatttatgtcccagttactaaaaagggctactggcagattgaaatgggaga

SEQ ID NO: 6381 - DNA, 157 bp, Glycine max
  Clone ID: 701098295H1
cccttgccgactacaacatccaaaaggaatccactctccacctcgtgcttcgcctcaggggtggcatgaatcttgtcaagatttgatggagaatccctgagtgatctgaacatatattagcaacagcagagtccataaagtttttgacatagtgaac

SEQ ID NO: 6382 - DNA, 278 bp, Glycine max
  Clone ID: 701098296H1
gttccttccttgtgatgtgtgtagggaagcgaagatgagaagagtagatggtgggcgaaacggcggcaacggggaagtcggttggtttgggtttgggatgtgacccagtggtgggatccttggcttgttcgaagaagagagaatacagagtcaccaatcgccttcaagagggaaagcgccctctatacgccgtcattttcaacttcatcgactcccgctacttcaacgttttcgccactgttggccgcaatagggttactgtttatcaatgtctcgaa

SEQ ID NO: 6383 - DNA, 267 bp, Glycine max
  Clone ID: 701098301H1
ctcccttagtcaaagggattcatcgttcttcttcccaggttatctagaaaagcaaaatggtgaagatttgctgcattggtgctggatatgtggggggtcctactatggcagtcattgcacttaagtgcccatccattgaagtcgctgttgttgatatctctaaatcccgcattgcagcctggaacagcgaccagcttcctatctatgaacctggccttgatggtgttgtgaagcaatgccgtggcaagaacctcttcttcagcactg

SEQ ID NO: 6384 - DNA, 107 bp, Glycine max
  Clone ID: 701098302H1
ctcacaacagcagctgcagcagcaatggctcccaaacgaggtggaaaggctccggctcttgtcgctaagaagaagcctgagaaggtcacgaatccgttgttcgagaa

SEQ ID NO: 6385 - DNA, 267 bp, Glycine max
  Clone ID: 701098303H1
gatccgagaagaaactgagagaaacaattaacgtcgtaaacgacgtcgcaaaagagatgataaagcagagaagagaaatggggttcaagacgcggaacgaccttctctcgcggttcatgggatcaatagacgacgacgtttatttaagagacattgtggtgagttttctattagcgggtcgtgacaccatcgctgccgggttaacgggcttttttatgttgttatcgaaaagcccggaggtggaggagttgattagggaggaggtgg

SEQ ID NO: 6386 - DNA, 265 bp, Glycine max
  Clone ID: 701098304H1
attatgatgtaatccttctggtggggctaggaattggtgccacccctttgataagcatactcaaagacgtgctaaacaacatcaagcaacataaagatgtagaagaaggagaggtggaaaaggacaagagaaaaccttttgccactaagcgagcttatttctactgggttacccgtgaggaaggttcctttgaatggtttaaaggggtgatgaatgaggtggaagagaatgacaaggaaggagttattgaacttcacaactattg

SEQ ID NO: 6387 - DNA, 263 bp, Glycine max
  Clone ID: 701098305H1
gtagcaccttatgaacgtcctgctctgagcaaggcttacctttttccagagtcccctgctagacctcctgggttccatgtctgtgttggaagtggaggggaaaggttgcttcctgagtggtacacagagcaagggatagagttaatacttagcacagaaatagtaaaggtggaccttgcggcaaaatctctgatcagtgcgggaggagaaacattcagttatcagattttgattgttgcaactggctcaacagttataaggct

SEQ ID NO: 6388 - DNA, 265 bp, Glycine max
  Clone ID: 701098307H1
cgcgaggtcacgaggagcactagctagtttcacaatttccaaatggctaggggattgaagaagcatctcaagaggctcaatgctcctaagcattggatgcttgacaaactgggtggtgcatttgcgcccaaaccctcatctggaccacacaaatctagggactgccttcccctcatactcatcctacgaaaccggctaaagtatgctctgacttaccgtgcagtcatcgctattctgatgcagagacatgttcttgttgatggaa

SEQ ID NO: 6389 - DNA, 148 bp, Glycine max
  Clone ID: 701098308H1
aaaaacatgggcagaaaattcttcgtcggtggcaactggaaatgcaatgggaccactgaggaggtaaagaagattgttactactttgaatgaggctaaagtccctggagaagatgtcgtagaagttgttgtgagccctccttttgtgt

SEQ ID NO: 6390 - DNA, 266 bp, Glycine max
  Clone ID: 701098309H1
gtcaacaacgattcctttcggttttctgtttctctggattcattttcatttttacggctaccagaatgtccagctcatcggaatattcggcattttccggcccccgcccggccaagtcgccggccgagaagtccactttctctcagacttgtagtctattgagccaatacatcaaggaaaaaggtgccttcggagaccttaccctcgggatgactcgcacccccgatacttacggttcccctgagacatcgtgtcactctgcaaca

SEQ ID NO: 6391 - DNA, 267 bp, Glycine max
  Clone ID: 701098310H1
cccctctcttcattccaattttggcaccacaccatgccaaccctcaaccatgtcctcacattcacattcttccttctcctctcttgccattgccacctcctcaatggccaagaggacacctcatttggccgtgccatagacagaaaattgttaggcctaaagagaaaagaaaagctcagccacttcaaattttattggcatgacatagtgagtggccgcaaccccacttcggtggcggttgctccgccaccgccgaaggtgaacacg

SEQ ID NO: 6392 - DNA, 263 bp, Glycine max
  Clone ID: 701098312H1
cctgtgttcactctgcttctcttgcggctagagtttcagcgcagtttcttctagacttaatgaacatgggtaaggctaaggttcacatcagtattgtggtcattggccatgtcgactctgggaaatccactatcactggtgacctgatttacaagcttcgaggcattgacaagcgtgttattgagaggtgtgagaaggaagctgctgagatgaacaagaggtctttcaagcatgcctgggtgctggacaaacttaaggctgag

SEQ ID NO: 6393 - DNA, 267 bp, Glycine max
  Clone ID: 701098314H1
actcgagccgctcgagccgattcggctcgaggagacagaaagcgcagtgaaaaaagcttacgttgaaaaccatgagaaaatattcgcaacaagaactcgtgttggggcgaggagggtcaacagctgtgactgcaatacttattgatggtcagaagcttgtagtagcaaatgttggtgactcaagagctattatctgtgagaatggaaaggcaagacaactatcagtggatcatgaaccaagcaaggaaaaaaaatcgattgagaggc

SEQ ID NO: 6394 - DNA, 266 bp, Glycine max
  Clone ID: 701098315H1
gttcctaacattccagtagtctaattgtaagaatttacggataactttggtcaagactctctgattggagagggatcctatggaagagtatattatggtgttcttaaaagtgggcaggcttgcagtaatcacgaatctggatgccagtaaacagcctcatgaggaatttctagcacaggtttcaatggtatcacggctgaagcatgaaaattttgttcagttgctttgatatggcattgatggaagctcccgtattcttgcttatc

SEQ ID NO: 6395 - DNA, 270 bp, Glycine max
  Clone ID: 701098316H1
gcaatagaccactctaatctcccttgacatctatcaagatgagtcattatagagagaatatgctgctctatcaatatgtttagttgcttttcatgcataggtgtattcaggacttcgaaaatagcctttcagctgtagaaaggagaaaaaatatctaaaagaattgatatcaacgttccctattacaaagttggagtgtcaaagcaattgtcagctggatattgtttgagtgtttagggaatgaaaatgtctcaattgtaaccgaaaaag

SEQ ID NO: 6396 - DNA, 268 bp, Glycine max
  unsure at all n locations
  Clone ID: 701098317H1
tcatcatccatctcttgttgttgttgttgatctccgcctccctcctcaactcactattccacacaaactaatatacaatcattcanattcctctcactcagaatcacatcacaccaccgcacaaccctaaattcaatttttcgatcttgcccctcgcagccgttgtgaaatggggagcaggagggacgagagcgcccgccataaacagcaccaaactcttcgccgccctcggaagcctcaagaagaagaagcagaagcccgagaagga

SEQ ID NO: 6397 - DNA, 267 bp, Glycine max
  Clone ID: 701098318H1
gtggaaaaaccatgggagcgtgtcactgtggatggtcaacctcatgaacatggtttcaaacttgggtctgagaagcatacaacagaggcgatagtacaaaagtctggttcacttcagttgacttctggtattgaaggattgtcagtgttgaagacaacccagtctggttttgtgaatttcataagagacaagtacacagcacttcctgatacccgtgaaaggatggtagcaacagaagtaaccgcactgtggaggtattcgtatgaa

SEQ ID NO: 6398 - DNA, 251 bp, Glycine max
  Clone ID: 701098321H1
cttcgatcccttcactttgcaatttcatgtctaggctcatggaaccacttgttgtgggaagagtgataggagaagtggtcgacattttcagcccaagtggaaaaatgaatgtgacatattccaccaagcaagttgccaatggtcatgaggtaatgccttctactattatgggcaagccacgcggtgagatttgtggtgatgacatgaggactgcttataccttgatcatgactgacccagatgctccaagt

SEQ ID NO: 6399 - DNA, 263 bp, Glycine max
  Clone ID: 701098322H1
ctcgagcgataaacatatattgagaatggagggttgtgtgaagaagttgctatgcctacttgggtttgtggtgcttgtgagtactattggtggggtggagagtgctggtgaatgtgggaaatctacaacccctgataatgaggcttataagcttgcaccatgtgcctcagcagcacaagatgagaatgctagtgtttctcagagttgctgtgctcaggtgaagaaaattgggcagaaccctagttgcctctgtgcagttcttc

SEQ ID NO: 6400 - DNA, 92 bp, Glycine max
  Clone ID: 701098324H1
gcaagatatatcacaagatacggcattcagcggttatgtccgcttgggcctcatagctcttgtcattgttaggtcttccacacaacatacga

SEQ ID NO: 6401 - DNA, 266 bp, Glycine max
  Clone ID: 701098325H1
gtgggaggtttaaattgtattgatcttgtggtagaactggttcgccgctcagcacatgaaatccctctccaaacgcctccgcaaatatgggctccgatacgacgatttgtacgatccttactacgatctggatgtgaaggaggcgctgaatcggcttccgaaagaggtggtggacgctcgccacgcgcgtcttaaacgcgccatcgatctttccatgaagcacgagtacctccctgacaatctgcagtcaatgcaaacaccattca

SEQ ID NO: 6402 - DNA, 265 bp, Glycine max
  Clone ID: 701098326H1
agcaccacttctctctctattattctctcctattcaaatgggaaacgcattgaagactccatgctttcaactcaacaccaattcatcatcatcatcaaaacccgtgaagctcatattttgggaatgaacatcgagatcccttaaaggtcaacacatagctggtgagatcatgtttgagttccctgaaatgatggtttgtcatgcagactctttcttcattggacaaccaatacctgttctctccatagatgataaactcatgccc

SEQ ID NO: 6403 - DNA, 262 bp, Glycine max
  unsure at all n locations
  Clone ID: 701098327H1
cgtttttcttggacaagatgatggcacccgcaaatatctttattatttttttgtagtaacagtcagcatttgtcttgacccgnattgcacctaacattttgtggactaggccaagcttagtaaactattcttattctttgttctagagagatcagggaatgtggaattcggttgaaatgagctagtatttggattggatcttggtgtaaagagaacaaaaaaaaaaaaggggaaaaggatttaggtgttgcagtaagtaaaa

SEQ ID NO: 6404 - DNA, 265 bp, Glycine max
  Clone ID: 701098330H1
aggagaggtgctgctccctggtggtcatggtcttatggtccgtggttacttgcctgttataaataccctagccaagggacttgatattctcttggggcacagggtcacaaaagtagttaggcgatataatggagtaaaggtaacagtggaaagtgggaaaacgttttttgctgatgctgctgttattgctgtcccacttggggtgctcaaggcaaagagaatattgtttaagccagagcttccagactggaaggaagctgccatt

SEQ ID NO: 6405 - DNA, 270 bp, Glycine max
  Clone ID: 701098331H1
tatcggggacagagactgatgatcagatcctgtagcgactacgtattgctgatgctgagattgagcaagggtaatcttcgcaaatatttgatttcatcctatacaatgacaatctttaggagtgtcatgagagacttaaggtaaatgcttctgaagcaaagacctccagagtcttttggatgtcttttgaccattaatcatcctgatgttaagtatcatttggtgcagaaactattgggacttgacggctatgtcactgctccacctata

SEQ ID NO: 6406 - DNA, 142 bp, Glycine max
  Clone ID: 701098332H1
gtaatgtcagaattcggttggatgaagaagaaggactagctagtggaagtggagtctctttagtggtgcggtcgagattctcggcggcgtagtcgtgcggatcgtcgtcgggaatgttatcttcggtaaggatgatccattc

SEQ ID NO: 6407 - DNA, 265 bp, Glycine max
  Clone ID: 701098333H1
cgcaccagtttcaccgcacgaatatcttgttgtttggagcgatccgagaaaaactctgtaaacatgttggtttaccaggacctccttacaggtgatgagcttctctctgactccttccgttacaaggaaattgagaatggaatgctgtgggaagttgaggggaagtgggttgttaaaggagcagttgatgtagacattggtgcaaacccttctgctgagggtggaggagaagatgagggagttgatgatgcagctgttaaggttg

SEQ ID NO: 6408 - DNA, 262 bp, Glycine max
  Clone ID: 701098337H1
cacggtgttcatattcatattggcgcttgttggtgtgttttatccatacaatcgaggggcactgtttactgcacttgttgtcatatatgcacttacttcagggattgctggatacactgcaacttcattctattgtcagttggaaggaacaaactgggttaggaatctgctgttgactggatgccttttctgtggacctctgtttctgactttctgctttctgaacactgttgcaattgcttacaaagctactgctgctctt

SEQ ID NO: 6409 - DNA, 263 bp, Glycine max
  Clone ID: 701098339H1
cctcgagtcgattgcggctcgtatcacaagtgcaaattgaactaatcgacctagcaaacttctcattaatcgctatattgctcgtgatgaattgcaattgtgaataataatgactggctattcactacgttataacgtgttttgcttctctatgttgtcttctctacttattgccatagcctctgctgatctatcttcagatttcgatgcatcaacatgccccaatgccctctctatcataaaatctgcagtgatgagggcag

SEQ ID NO: 6410 - DNA, 265 bp, Glycine max
  Clone ID: 701098340H1
acttaattgccttaaggaacgttcgagaccacagaggtttctctagtcttcttctgtggagagcttgttttctcttgttcattcatctcacttccaattaaggaacaagctttccaccaatttgaatcaccaatggctcgctctttctccaacctcaaggttctctctgctcttgtcgccgacggattctccaacactctcaccaggcgtgggtacgcagtagcgacacaaagcgcaccaagaggaggagcagcctccatcagcg

SEQ ID NO: 6411 - DNA, 265 bp, Glycine max
  Clone ID: 701098341H1
caaatggtttaactttgactcgatctctaccaccacaacatcacgatatgttgttacaatcataatcgcaatttgaaaccttgggctagctaaaactattttaatataaagtattaatggtcactgctacatgagcgtctatgattaaataaaaagtagggagtttgaacccatgtaataccatgttgtgaggttacccctctttgtgtgtgctttaaattttcacatatagtttgatttgtgtccggtgtggtctctgtttctt

SEQ ID NO: 6412 - DNA, 263 bp, Glycine max
  Clone ID: 701098342H1
cgataatataatgaaagttgagcattcgttgagtgaatcagttgttcctggatgcaaggcgtctctgccttggttgcgtttagatgaaggagaacaggatgaacttgctttgtttctttcaggaatgccagcagctaacaacaggaacattgaagatccacggttaagtgaaaacgtttcagccagtgattgtctgaaggattttcatgtttcatctgtgtggggcgactcaaaggaggatatatcacatgggcatcgtcggg

SEQ ID NO: 6413 - DNA, 77 bp, Glycine max
  Clone ID: 701098346H1
ataaatccttgctttctctgttgggtctgtttcatttcatcttctggttttggatcattcagcgccacacaacatac

SEQ ID NO: 6414 - DNA, 266 bp, Glycine max
  Clone ID: 701098347H1
ccgagccagcgagcagtttcaaagaaaggatttgggattgggaaggcgagggattgcgctgcgtctcttcctcttctctttcgattcatccctcattcataatcttccaatccaacaacctcaccctcacactcacacatacacacatctgaacgcgtatcgtccctcccatggcttcaaagcgcatcctcaaggagctcaaggacttgcagaaagacccaccaacttcttgcagcgctggtccagtagctgaggacatgttccat

SEQ ID NO: 6415 - DNA, 268 bp, Glycine max
  Clone ID: 701098348H1
caacatttgaagaattgaacctgccattattgtaagtaagaattgggaaaggaaggaaggagatgaatctccctatcatagatctgtcctcacctgatcctctttccactgccatttccatccgtcaggcgtgcattgagtatggtttcttttaccttgtgaaccatggcgtggagaatgacttggtcaaagcctttgatgagagtaagaggttcttctcacttccaccaggagagaaaatgaagttggcccgcaaggaatttagagg

SEQ ID NO: 6416 - DNA, 265 bp, Glycine max
  Clone ID: 701098350H1
ctagccgcagcacgaggagcagcctcaggaggagaaggatgtctcacaggaagttcgagcacccaaggcacggttcactgggatttcttcccaggaagcgtgctgctcgtcacaggggaaaagtgaaggcattccccaaggatgacccatccaaggcacccaagctcactgcattcttgggttacaaggccggtatgactcacattgttagagaggtcgacaagccaggatcaaagcttcacaagaaggaaacttgtgagcctgt

SEQ ID NO: 6417 - DNA, 262 bp, Glycine max
  Clone ID: 701098355H1
cggctcgaggtcgttctgaacggaaaagcactggcgcactaccctgaggctcatcttctcttctcttctctgtcgtgagtcaccatggtgagggttagtgtgctgaacgatgctctgaagagcatgtacaatgctgagaaaaggggaaagcgccaactcatgattaggccatcctccaaagtcattatcaaattccttttggtgatgcaaaagcacggatacatcggagagtttgagtatgttgatgaccacagggctggta

SEQ ID NO: 6418 - DNA, 262 bp, Glycine max
  Clone ID: 701098357H1
agtggtgacattgatcataattataagaactttaagttcatctttcaagccattgatgataatgatcatggcggtactattatcaaatggaccgttgaatacgagaggcttcgtgaggaggttgatcctccatatggccacattgaatacctgcacaaatgcactaaagatattgatggtcatcttctcaaagcatagctagctctaaaagttatgcactaaaaaataatgggcttgacctttggataagtgcttatatgta

SEQ ID NO: 6419 - DNA, 129 bp, Glycine max
  Clone ID: 701098361H1
ctcttttctccggcagcaccaaaaccagtcaacacttgaaaacaatatccattgttaccagaataagcagagatcagaacaggcttgacgtcattatactcagttccctctttccctatcaaaagcctt

SEQ ID NO: 6420 - DNA, 265 bp, Glycine max
  Clone ID: 701098362H1
cttctccctctctctgtttttgtcatgcctgcaacagcagtgaaaacagcaccagcgaaggcggctgccaagaaggcagaaaccacaaaagctcaaaaaactgagaaaaagcctgcacctgccgccaaacaaccagccaaacctgctgctgtaaaaaaaattcccaccaaggttgcgaaaccttccaaggcaatctcaaaatccaataaacaaaaaggaaaagctggactgaaggccaagaagaaacctttgaaattcaccatcg

SEQ ID NO: 6421 - DNA, 266 bp, Glycine max
  Clone ID: 701098364H1
gctgaggatggaggcttgccttcatcacctgttgcttctcagtctgcccagggggttaatgggcttccagaagtcaagaccaatgaagtgccaaaagaaaacactctggagaagccagaaaagcctgagagcacttcttcacctagagcttcacattcagtaatttcaggtactgttaagaaacctatcggtgctaaaaaagcagtgaagagtggggggcttggtgctcgtaaactcactaaaaagccaagtgagtctctctatga

SEQ ID NO: 6422 - DNA, 262 bp, Glycine max
  Clone ID: 701098365H1
ccaagacactcgccggccccggggtaattcagtgagccaccggcgagtttgggtgaaggagcgttccgtcgcgtggtgggaggagtgtaacacacccgaatttccggaacaagagctcacaaaggcgttcagaatgggaaggctcacttttgaagcgatatgccaggagctgaattcggtgatagcgaaggaagacacgacgctgagaaccgccattccggtgaaacaaagggtggcggtttgtctgtggcggttggccacc

SEQ ID NO: 6423 - DNA, 260 bp, Glycine max
  Clone ID: 701098369H1
ctatattccattctctctgtctatttccctacctctcccttcaagatgcagagcttcgccaataccctcaccggcaagaccatcagcctggaggtggaaagctctgacaccatcgacaacgtcaaggccaagatccaggacaaggaaggaatccccccggaccagcaacgtctcattttcgccggaaagcaactttaggacggccgtacccttgctgactacaacattcagaaggagtgtactcttcacctcgtcctccg

SEQ ID NO: 6424 - DNA, 257 bp, Glycine max
  Clone ID: 701098371H1
tgatcattcaccacatttcatttacacaaatcatcaatggcctctcttgcatcctcaagtgttctattacacctcttactcataatttccgcgctccatttgggcccagagcaagaattctgagtgaaaaggaccaacaacaacaattgcagttccaataccacaaaggccctcttctcagtggcaaaatctccgtcaatctcatctggtacggtaacttcaagccttcccagcgagccatcatctccgatttcatc

SEQ ID NO: 6425 - DNA, 113 bp, Glycine max
  Clone ID: 701098373H1
ttaactttgatatggtggcccactattaatgttgaatgtccagttgcggggacacgcgatactcgtgtgataaactctggatgcagcacaatcaacgcttccaacccgggtag

SEQ ID NO: 6426 - DNA, 240 bp, Glycine max
  Clone ID: 701098374H1
ctagaaagttagaaaacatggcagcggtcgccggagcatcctcgtccgtgattaaggtggctgcactttccggatctttaaggaaaggctcttacaacagagccctcattcgttctgctattgagctaagccaaggtagagttgaaggccttcaaatcgagtacgttgatatttcgcctttgccccttctcaacaccgatcttgaggtgaatgggacctaccccccacaagttgaagcct

SEQ ID NO: 6427 - DNA, 260 bp, Glycine max
  Clone ID: 701098378H1
cccgctcgagcggctcgagcctttttgtagatcacttctacaatgaaaagtggattattgatgacactaaatgcttcacgctacattttaactctaaccctcgtctgcaaactaagtgccaacaatttgttgacagttagccacctcttcatggaatctgttccagtctctctgaagtgttattggttatagtgttgtaattctaataatggaaagatataacattttgagagagcttggggatggttcttgcggtcatg

SEQ ID NO: 6428 - DNA, 266 bp, Glycine max
  Clone ID: 701098380H1
gaagaagaagatgatctatcggaagtggagtctccttaccggcccggtcaccatcctcggcggcgtagtcgtcgccatcgccgccgccaacgttatcttcgtcaagaatgatccattcctcaaaccagaggagaggaactatgaaaatcagcctgctaccaagtaggagaaaagagacaacagaagtttgcgttttgatgtcatttaaaccctgatttatgagctctgtatactgttttgcaagatacgctctcgctagttaataa

SEQ ID NO: 6429 - DNA, 257 bp, Glycine max
  Clone ID: 701098382H1
aagcgtctcaagccatctccagttgaatcagcagactccgcgtctgagcccacgcgcacggtgctgctcgttgaccatcaggaagccggcgtgcgtctggtccacactctcctggcgtccgcggaggccgtccagcaggagaatctgaagctggccgacgcgctcgtcaagcacgtgggcatactcgcggcttctcaagccggcgccatgaggaaggtggcttcctacttcgccacaacactcgcgcgccgtatcta

SEQ ID NO: 6430 - DNA, 255 bp, Glycine max
  Clone ID: 701098383H1
tggctgctgcatcatttggtcaggtttactttgcccgtactactgatggtaataatgttgctgttcaagttcagctgtctaatttgcatcatgtggtggtgcgggatatctacatccttcgttttgggttggggctgctgcataagattgcgaagagaaagagtgtcgctcgcctgtatgctgatgaactagggaaaggttttgttggtgaattggattacactttagaggctgcaaatgcttcaaagtttctgg

SEQ ID NO: 6431 - DNA, 259 bp, Glycine max
  unsure at all n locations
  Clone ID: 701098385H1
ttctcgctttcgttatttccactgtgtatagttgttcacctcttacgttannaactgtcgttcagacgaaggatggaggttcctttggcgtcgtccaccgtcgacggcggaatagggtgctgggaccttcacaccggcgcggagacgctccgctacaaatcttgcacctccccttctcacggactcatctccgtcggtgctcgcttcatcgcttcgtcgcagcttcgtgatgatcccgcagccactggctatgttctct

SEQ ID NO: 6432 - DNA, 257 bp, Glycine max
  Clone ID: 701098386H1
acttgatctccaatttactcgttgtggacccgcaaaagaggtattccattccagacatcatgaaggccccatggtttcaaattggcttcttgaggcccattgcgttttccatgaaggagtctgcgcttgaagataacattgatttcagcggggatgatgttcctagtcctggtagtgatgatggtaatagcagcagcaacaacgaggatggggagttgacgggggctaagcctgctcgtccgtcttacaacgctttt

SEQ ID NO: 6433 - DNA, 95 bp, Glycine max
  Clone ID: 701098387H1
gtcagaaaccaatttcttaggaaggatttctcacccaaacctggtcaagctattgggttactgttgtgacgatatcgagtttctccttgtgtacg

SEQ ID NO: 6434 - DNA, 259 bp, Glycine max
  Clone ID: 701098388H1
ctcgagccgcttgtcggagtcaggcgctctaacccgagcagctcaggttgcttctgatatgcgtactcacagggataggcagtaaacaaagcattgacatgattaaacactatcttttagatatgtctgcttctgctaaatagcttttgaaacttcagttagcaatattattatacttttacaatacataaatcctgtttggataattttttggataaacacttatagaagtaaggtaaaatgaattgagcttctctcg

SEQ ID NO: 6435 - DNA, 257 bp, Glycine max
  Clone ID: 701098389H1
ctgatggacaagttcaatgaggaaattcagctgaggggattgaaggatcagatatctgttttggcctgttctcatatcggtggccataagtatgctgggaatgtaatcatattctctccaggatcagatggaaaaatcatgggtcattggtatggctatgttactccggatgacgtggcagccttgttggaccgacaaattgccaagggagaggtcataaaaaaactttggaggggtcaaatggggccacccggtgc

SEQ ID NO: 6436 - DNA, 258 bp, Glycine max
  unsure at all n locations
  Clone ID: 701098391H1
ctttccttctctctgccctttcattacttctaccaagctactacatctttaacttcctctttctacatttctctcanaacaatcatggcttctcttcattccattacattttcaacaaaaactgtcctttatgtatttgtattggcctcttccatcgcagcctctgctggcaacttctaccaggattttgacgtaacttggggagatggtcgtgccaagatactcaacaacggcgatcttctcactctttcccttgat

SEQ ID NO: 6437 - DNA, 256 bp, Glycine max
  Clone ID: 701098392H1
ccagctagtttccatggaacgtttggtgagttctgggatcaacacggttcgtgtttttggcattacaaaacaccaatctcgttttcttccttcatcaactctgcatctgaggaataatagtgtgtgtggatttggaattggggttgagaagaagaagaagaaacagtgtttcgttgtcgctgcttctgttggtggctccaaagtggtccattttgagaacacactcccttccaaagaggttcttgagctttggaga

SEQ ID NO: 6438 - DNA, 260 bp, Glycine max
  Clone ID: 701098394H1
acgatacgtaataagttctatcattgaggaagtttcctgtgcatcgtctccgaaaatgaacgacgcagatgtctcaaagcaaatccagcagatggtgcagttcatccgccaggaagctgaggaaaaggccaacgagatctctgtctccgccgaagaggaattcaatatcgagaagctgcagttggtcgaagccgacaagaagaagatcaggcaagaatacgaacgcaaagagcgccaagttgaaattcgcaagaagattg

SEQ ID NO: 6439 - DNA, 261 bp, Glycine max
  Clone ID: 701098395H1
ctcgccaccaaacaccctctaaatccattccctacgcaggttcagggcgtgactccttggggagcaaggatgagaatatggggattactgaaagcactagtagtgttaatggaggaagctgtagtagtcatagcagcaagaacattgtgtttcctagcgtggaagtgcggaacctgaaggagttcagttttgcgaatctgaaagcagccaccaagagtttcaaatcggatgcattgcttggagaaggaggtttcggaaaag

SEQ ID NO: 6440 - DNA, 239 bp, Glycine max
  Clone ID: 701098396H1
cacattctcatctctaaccactaccgttactatggaacctcgttgccttccattggtcttctctctcaatctgatcctgatgacagctcatgctgccatacctccagaagtttactgggaaaggatgcttccaaataccccaatgcccaaagcaatcatagactttctaaaccttgatcaacttcctctttggtatggtgctaaggaaacccaatctacagatcatatattcctgtatg

SEQ ID NO: 6441 - DNA, 262 bp, Glycine max
  Clone ID: 701098401H1
ctttcgaatagattatcctaagtctttgggaatagtgctgcaatggcttcaagtcaggaggaggtgacccttttgggagctactggaagcccatttgtgtgcagggttcatattgccctcaagttgaagggagttcaatacaaatatgtcgaagaaaatttgaggaacaagagtgaactgcttctcaaatccaacccagttcacaagaaggttccagtgtttattcacaatgagaagcccatagcagagtctcttgtgattg

SEQ ID NO: 6442 - DNA, 259 bp, Glycine max
  Clone ID: 701098403H1
cccaaatctctcttatctggttaaccccaatgtcatatgtcatgcacatgttttttattgaaattttgatccaaaatatcctcatcttcttccttggaacactttcatgtgttcttgctttcaataataaattgaagaacataaaaaagacctcaagacaacttcaaaaatttcataaaaaaattctttcatgatctcttcaaaacaactaaacaagcacaaattgtagaaacacgaaggaatttgtacattatttcat

SEQ ID NO: 6443 - DNA, 258 bp, Glycine max
  Clone ID: 701098404H1
attcggaagagcttcaaagtcatgatttagctgatgctgtgaagctaatgaaagacaagcgcaggtttaaggatctcctgataatggtggacacctgttaagcctctactctgttctcccagcttcattcaccaggtgttttggcaattggaagtagtaagaaaggagaaaattcatattcacatcatttggactcagatgttggcgtttcagttgttgatcgttttacattttacactcttgctttctttgagaggc

SEQ ID NO: 6444 - DNA, 256 bp, Glycine max
  Clone ID: 701098405H1
cgcttctcaaatccatgtttcctctgggaaactagtccctggactatcatggaattactatttgttgacatgtcccaagcttgagaggattataaggaagcatcttgaggatgtcttcgagaaggacagtggagtagctcctggcatacttcgactcttcttccatgactgctttcctaatggatgcgatgcgtctatattgttgaatggagacggtgacgagaagcaacaccgtgctaactttggtttaaggcaa

SEQ ID NO: 6445 - DNA, 256 bp, Glycine max
  Clone ID: 701098406H1
ctcgagccgcaagtaacaactgcatgcttggactctcttgaagagcttcctgccctgtcaaacttgaatcttagtagatgtaatctttctaacgatggatgtgaaaagttttcacgactggaaaatttgaaagtattaaacttgggatttaatgacataacagatgcatgtttagcacacttgaaaggattgacaaagttgaagagcttgaacctggattcatgtaggattgaagatgaagggttggtccacctgg

SEQ ID NO: 6446 - DNA, 255 bp, Glycine max
  Clone ID: 701098407H1
cagaatttttctcaaaagtcgggagccgggaggtgggaaggttgatcaaacgctacgcagcggacgtgacttggtagggcatggcacccacacactgtcaagagctggtggtaattttgttcctggtgcaaatgttgaaggtaacggcaatggtactgctaagggaggatcccctagggctcgcgttgttgcctacaaagcatgctggaataaactggatgaaggagggtgctatgatgcagatattctagaagc

SEQ ID NO: 6447 - DNA, 257 bp, Glycine max
  Clone ID: 701098408H1
atccctcactcttgttcttcagtctcctcctattatccgccaccgtagccgccgccgaacggatcgacgatgaagacgaccttctgatccgtcaagtggtgccggatgcggaggaccaccacctgctcaacgcggagcaccacttctccgccttcaagacaaagttcggcaagacctacgccacgcaggaggagcacgaccaccgcttccgtatcttcaagaacaacttgctccgcgccaagtcacaccagaaattg

SEQ ID NO: 6448 - DNA, 255 bp, Glycine max
  Clone ID: 701098410H1
ccgtggtgtaactgcgatgtttgcaagagctacttgacggtgagttggctgaacaagtttccaaatctctgcgactggtacactcatcttctgcgcaaatccccaaccggcaccatccacgtgcacgtgctggagaacaccataacctcgaaccccgtcaacgtggagtacattctcaagacgaatttccaaaactaccccaaggggaaaccgttctccgtcatcctcggcgatcttcttggaagaggaatcttc

SEQ ID NO: 6449 - DNA, 258 bp, Glycine max
  Clone ID: 701098414H1
ctgacttcttctgggagtggttgacaccaggtggaggtggaaagccatccggggagcttctagaactgattgacagagactttgcgctcagtggaaaaattccttgatgagtgtaaggctgctgctgcaacacaatttggttcaggatgggctttgcttgcatagagagcaagcaaatttgatggggaaaatgcagcaaatcctcctgtcaccagatgaggacaacaagctagtggtgctcaagagtcccaatgctgt

SEQ ID NO: 6450 - DNA, 258 bp, Glycine max
  Clone ID: 701098415H1
cttgatgacagtggatttgatgaggacatactgtttgatccacagaattctgaaacttttggtgatcgaacttttggtggtgtgtttggttcggtcgttaagaggcctggtgaaataagtggtggaaaaggaaatgatggagctcgaacattggcaaattcttcctccatggatcagacacaatcatgtcaatcaaatacctgtgtggatttaagccgctctggttctgatgatcatgcgaacagtgtagcatcggaa

SEQ ID NO: 6451 - DNA, 279 bp, Glycine max
  Clone ID: 701098416H1
tcggaatgctgctcgaggcccttcactcttcacttctcattctctctctgactagcttcctttctcttccgctttctagtttgtctctggcactctcttctctttcgtttggctctgcctttgaatttgccagcgaccaagcatcgagaacctcggaagagtaaaacgtgtcaaacgtaatcggcagtagcatgtcgcccaacaacgtggaatctgggacaacggatgatacagagtgtagtaggacaacaagaacgtcatagtccactacatgatatt

SEQ ID NO: 6452 - DNA, 260 bp, Glycine max
  Clone ID: 701098417H1
ggagacaggcaaacgggatcgctgaaatcaattagtctggttgtagtgggaaaagagaagagaatgaaaatgggtcgtcggtgcaagtgtttggtatcgttggtgttggctttggttctgatgaggagtttggcggaggcgcaatcgggcagcagcaccacctgcgcccaggagctaattccatgtgtgaactttctgaatgggacaaccagcccaccaagctcttgctgtgaccctctcaaacaaaccgtggaaaacca

SEQ ID NO: 6453 - DNA, 257 bp, Glycine max
  Clone ID: 701098422H1
atcccaataactttgagaaagctagctagagagctatagctaactttgaaaatttgcccaatatacatgttctactttgcctattgcaacatatcctatagttagcttcttagttcttacattagagagatggaagttgacttagttcttgctctccccagtcaaaattccgttgaggaattcaagcttaacaagtcgaaacagagagtgagtttacagttatggagagccagttgcggttcagaaagcgaaaaacg

SEQ ID NO: 6454 - DNA, 255 bp, Glycine max
  Clone ID: 701098423H1
ctttcaagtttcaaacaactgcacccaaaagctgttgcatgcgtcctcctgggggcatccttgcacctggtgagagtatcatagcaacagtgttcaagtttgtagagcaaccagaaaataatgaaaagcctgaaaaaagtggactcaaatttaaaatcatgagcttgaaggtgaaaggatcaattgattacgtccctgaactgtttgatgagcagaaggaccaagtagcagtggagcagattttgcgagttgttt

SEQ ID NO: 6455 - DNA, 258 bp, Glycine max
  Clone ID: 701098424H1
ctcgagccgctggatttaggattgataaattaagccatggtcatggaaacagcacaactgctaggtcttgcaaaaggggaatgagaaggggatcctaaggactgaaatcaattgggcgctcgcttgggttgggagtatctagggctgtgttcccagaagatctgaaagtgtcagaaaagaagatatgtgatcctcaagacaagtttctgctcgtatggaataaactttgtgttatctcatgcattttggccggctcta

SEQ ID NO: 6456 - DNA, 257 bp, Glycine max
  Clone ID: 701098425H1
caaaatttgggcaagaagagtgatttgcttctcaaatagaaccctgttcacaagaaggttccagtgtttgttcacaatgagcagcccatagcagagtctcttacgattgttgaatacattgatgagacatggaagaagaaccccatcttaccttctgatccttaccaaagagccttggctcgtttctggtccaaattcattgatgataagattgtgggtgctgtatcgaaatctgttttcacggttgatgagaaaga

SEQ ID NO: 6457 - DNA, 260 bp, Glycine max
  Clone ID: 701098429H1
cccgatgctgcgaggtccacaactcaatccgcttttctttcaaatcattcggtttctgagatcaaaatgtccccacatccaagcaataatcgcctcaatgagattagtataaatcatagagtttcctttgagttatcagcccaaaaagtgctaaaatctctggaaaacaagccagcagcatcagtgtggactaatgtggtgtcaaaattgcaaaatgatgctccaacaactgacaaagaagaaaaatccgtagaagctgt

SEQ ID NO: 6458 - DNA, 261 bp, Glycine max
  Clone ID: 701098431H1
cacggcacctgatgagtgtaaggcgttttatgcacatcctgttcattgtagtgcctttcgttgtgcatcgccgccgccacgacccccttcacctccacctccccctccgcctcggcgctggagcaccgcgagcgccagcaggaggatcttagcaggactatccctgaggagccatgagacacataagtttgtaatagttaatggagtttttgctgatgagtttgtttctttattttttggggatgtgaagattagcttggt

SEQ ID NO: 6459 - DNA, 265 bp, Glycine max
  Clone ID: 701098432H1
ctcgagatctggtgagatccttggtaggggaacaaagataactttgtttctcaaggaagagcaacttgagtatcttgaggaacgccgtctgaaggatttgataaagaagcattctgaattcattagctatccaatgtctctttggattgagaagaccactgaaaaggagatttctgatgatgaggacgaggaagagaagaaggatgaggagggtaaagttgaagatgtggatgaagataaagagtaggaggagaagaataagttg

SEQ ID NO: 6460 - DNA, 259 bp, Glycine max
  Clone ID: 701098433H1
tgaccaccgacgattccatttctacgaactcagacccttcaatcccaactcagaaaaaaaaatcatgaagctgaagacatatgcgggtcttagtatcattgcaactctggctattatatatcatgcgtttaacagtaggggccagttttatccggcaatggtgtatctgtcaacttccaagatcagtttggtgcttcttctcaacatgggtttcgtctttatgtgtattctatggcaattaaccaagaaggtgttcctg

SEQ ID NO: 6461 - DNA, 257 bp, Glycine max
  Clone ID: 701098434H1
cgttttggagccctacacaaaggaggttgttcgtgttgatgggaagtttttggaatcagctactacatatcatcgccaggtccaagcttctgtccaagagacactgaaaaagcatgagcttactagacctcttgctactaaagagttggaatggtttgcggcctctccccttctggcttgacctattgttttaatggctagagtgttttcagctgttttctgtagcaaaaaagtgagtaaacctgctcgaaatggaa

SEQ ID NO: 6462 - DNA, 249 bp, Glycine max
  Clone ID: 701098438H1
tgcgtctttggaattgaggttctgggattttgctatatatgaattgaagtggagatgatattggtgtagtgggcttttcaactggtttggtgagatgaagggtgttctttccatcagcttcttgttttgttgcttgctgctagttttggattcttcagtgtcacttcctcgatgcgttgattcaagggcaccctttaccttgaagaagacacttgggttttgtcctgagaatggaagcacgtgttgcaa

SEQ ID NO: 6463 - DNA, 254 bp, Glycine max
  Clone ID: 701098440H1
tctcagcccagtttcactggctcagtattgactctcctatggagaaagatacagtgagagagagaaaaaaatccctggcgtaggaggtattagcaacggagggggcaaggagtaccctggaagcctcactccttgtgtgacggtaacatgtatagttgcacccatgggtgggttaatcttcggtgacgatatcggaatttcaggtggggtgacatccatggatccgtttctgctcaagtttttcccgtcggtgt

SEQ ID NO: 6464 - DNA, 255 bp, Glycine max
  Clone ID: 701098442H1
atcgtttcttgcgcagatatcactgttttggcagcacgtgattcagttttcctgacaggaggtcccgattatgcagtgccactaggaagacgagatggcctgagcttcagcacatcaggaagaagtgatctccccaaacccttcaacaccaccggcgtgacccttgacgctttcgccgccaaaaactttgatgtcaccgacgttgtcgccttatccggcgcagacacctgtggtcgtgcccattgcggcacattc

SEQ ID NO: 6465 - DNA, 256 bp, Glycine max
  Clone ID: 701098448H1
ctgcagggaaaccagttcattttcgagcgcgtcgctttcgaatccaagcgccttcaacaacgcactgagatctgccgcgaactcgtcgcttcttccgaatcttccttctctaactcagtgagcagaggttttcattcaactggcatgaagaggatgggaggtggacatggtcatgatgagccctactatcttcaggcaaagcactggtaaaactgggccagatggaggcacaaggggtggaaatggcccctgctgg

SEQ ID NO: 6466 - DNA, 258 bp, Glycine max
  Clone ID: 701098449H1
agagagaagaagaaactgaatcgatcatcacttcacttcactaatacatcatggcagacgagacccagaacaagtatgagagctctgaggttgaggtccaggatcgtggtgtttttgactttctcggtaagaaaaaggatgaagaagacaagcctcatcctcaggaggaggtcatcgccaccgagtttcaaaaagtcactgtctcagaccaaggagagaagaagcacagcctcttagaaaagcttcaccgatctgaca

SEQ ID NO: 6467 - DNA, 259 bp, Glycine max
  Clone ID: 701098450H1
tgcgaggctacaaagaaaaaaaaaaaagatgaatcagtgtggttatcagcagaagaatgctttgacaagctgtgacgagatgaggatggaatcagtggtgtgccctaaaccacgaagattgggcctgttgaaccagtcaacctttgatgaccagatcagacccttgaggccaccctttatcaagtaccaatcagaaattcaagattcaggagttggggctgagcttctggacatcattctccccaagagatctggaggg

SEQ ID NO: 6468 - DNA, 55 bp, Glycine max
  Clone ID: 701098451H1
attggagggattgacgctccgtctcttcctcttctctttcgatccagccctcagg

SEQ ID NO: 6469 - DNA, 253 bp, Glycine max
  Clone ID: 701098455H1
tgtagagaagcactcttcgttcttcgactgtctacgatctgctttctctgaattgtgaaaatgtcgctcggagaaactgcttgttcagacgctggtttcatccttcatgaagatggaattagtgtaactgtatccttttctgtgtcctgaggttttgcgtgaacgaagagtgagtgtatgttcgaaataagttcttttctttgtttcgagttatgttttctagtgttagttgagatttgaatcaattgaagta

SEQ ID NO: 6470 - DNA, 258 bp, Glycine max
  Clone ID: 701098456H1
ctccccagttctcaaacctgacctagtattttcgtttctggcgcccattaattaagcacacaaggaccataagatacctagacctcaatatcacaagtcttatggaggcagagcgagacaagtacaagatgatcaactttgaagaaaccgagttacgactcggcctcccactcagtggaaacgagacgctcaaaaccacttgcagcactgggaagagggttttttcggatactgccgtggatttgaagcttaaccttt

SEQ ID NO: 6471 - DNA, 257 bp, Glycine max
  Clone ID: 701098457H1
ccagaggtcagagattttggagatcacctatttagtgacttaagacgcccctcaaaggcaggctggcgtacagcagcaatcatccatgcacgagagaagaactagagaaatagaaaatgaagatacctaccgctctgagcaggcaaacttgcatagtatacaggaactacttggtaaattgcatgcaactgcatctagtagttcaagaactagagcgttcaattcacttcttgaagaactgcgtgaggagagacaaa

SEQ ID NO: 6472 - DNA, 253 bp, Glycine max
  Clone ID: 701098458H1
tgatgatattgtgaagggttgcgtcgggtcgttggatacttcggctaagagtaccgggtcgggtgggaagaagcgtggacccgctccgtatagaagatttaacctggggaatacttcgccggttactgttcctactcttgtgagtatattggagcggcatttgaaggtgaaggcgaagaggaatattgtggacatgcctggaaacggtgacgttccttttactcacgcgaatattagttcggcccggagagag

SEQ ID NO: 6473 - DNA, 133 bp, Glycine max
  Clone ID: 701098460H1
gccgtggagtaccgcctcagctgccccgccaccgtcaaggagaagcccatcatccccaactccctcccggagaccgtctacgacatcaagtacttcacccgcgacgagcgccggaaccgccctcccatacgac

SEQ ID NO: 6474 - DNA, 257 bp, Glycine max
  Clone ID: 701098462H1
agcgcctcttgatagggtctcccagcctaaccaagccagatcccgttttcaattccttctcagtttccttttctctgaaaaaacatgttgagggttgcagctagaaggctctcttcttctctctcatcttcttctccgttgcggcgcaaactcggcgcttccgcttttctctctcgaaacgacgtcgtcgtcgatgaccgcagatctgctccttcctcccatccccttcttcccttcagaggttatgctactgaatc

SEQ ID NO: 6475 - DNA, 260 bp, Glycine max
  Clone ID: 701098464H1
cgcttttggaaagcttgttgtggatattgactacccaatgagtaaattggagatcttttccagtgaagagtacctcagctagaccttgagtttgctagagcttctgaattccgtttcttctcgtctttctaatcttggccaagctaggctttctctggtccatggtttgaccctggtggagaactcaccttctttggctagaaaacatctgaaagcgagtcaatttcaagaagggtactctttcaccaccaactttggta

SEQ ID NO: 6476 - DNA, 256 bp, Glycine max
  Clone ID: 701098465H1
ctcgagcgcggttgttgcaacctgatgatcgtaaagagcacgtaacagttcgtgacggggttgaacttattcaccgttacggaatccaagcttatccattcaggaacgagagcttggagcagctgcaaaaggaagacaaagtgaagcgtgataatcagactctcactaatttactagcaaaccagcacagagactatggtttgagtcacactcacacgggactcaaaaaggtacctgttgcttggctagtgggtaa

SEQ ID NO: 6477 - DNA, 253 bp, Glycine max
  Clone ID: 701098472H1
ataacaccttacagtgatcatgacaagagagccaagggtagtggatgagctccatggcctgcaagattgactagtcctcctcctagattagctgactttggctattcgagtgacatgtttgaaaaggacatggaactatggcaaaggagagttgagaagtactgggatctcttgagttcaaaaatcacagcaaacacattgaggaatattatggatatgaaagcaaacatgggttcatttgcagctgctctta

SEQ ID NO: 6478 - DNA, 250 bp, Glycine max
  Clone ID: 701098473H1
ctctctgcttgcttcttgttgttgtaactaaggaacaagagattgcttcttcttcccttttgttttcaaatttcaatttttcatcgggttctctgaaatggagagagatttcatgggtctcaactcaaaagaacctcttgctgtggtgaaggaggagatgcacgtttatggcttcgaagactctggcttcacaaagggtcggattgcacagtggccattctcgaacaaagtatctgcccttccacacaac

SEQ ID NO: 6479 - DNA, 252 bp, Glycine max
  Clone ID: 701098474H1
atggtctaaagggaaatggttgttcggattgcttgactcattgcttctgcgagccctgcgccctctgtcaagaagatcgtgagcttcaacaccgtggatttgacatgattattgggtggcatggaaatgtcgagcaacgaagtcggggagtagccatgactgctagaacagctccatcagtcgaaaatggcatgagccgttgaatagtatgcagttctgtaactaagacaatgtgtctacgatgcttgtgtt

SEQ ID NO: 6480 - DNA, 249 bp, Glycine max
  Clone ID: 701098475H1
gttggttgcggttataagtggaagaggagagggaagatgatgatgatgacaatggaggggatgatggacaagggggtgttggatcatgtgataagaacgcttctggaagggaaaggagggaaacaggtgcaactctctgagtcggagatccgtcaactctgcggcaacgccagacaaatcttcctctctcagccaattcttctcgacctccgtgctcccatccgcatctgcggtgatatacatggtcag

SEQ ID NO: 6481 - DNA, 255 bp, Glycine max
  Clone ID: 701098476H1
ccgccagctccaagacctgttgagcattacaattcagcgcgggcaccgtcatttccaccacctagagctggcgatgaagggcctttgccacctgtcatcggagtctcatatgcatctcctcctcgagcagccttttattgattcttttgagaacttttctcctctaacccttcccctctagccgagcaaagacgaaaaaagaaaaacacccattcaagttcagttcatacttggattatgattggtggccatttc

SEQ ID NO: 6482 - DNA, 255 bp, Glycine max
  Clone ID: 701098478H1
cagcatcacatttttccaatatttttagtttttgaagttgataggttgtatcttggttacagagttttgttccagcagagagagagagagagagagaggggggggagggatatgatctgacttttagttttgaggatattgaggtgatatagggtttgtaagctgtaagatgaaaatcgatttcaattgtgttgcctcaggcagcgcatcagttaaattttgattgagacaataaaaaaaaaaaaaagggggggg

SEQ ID NO: 6483 - DNA, 255 bp, Glycine max
  Clone ID: 701098479H1
cgcatcttgttcctccgctcaacaactataataagatctttctctctccgaagagatcacactatggccacctcaagcgccaaatcagtccatgatttcaccgttaaagatgccaagggaaatgatattaatcttggtgactagaaaggaaaggtccttatcattgtcaatgttgcctcacaatgtggcttgactaattcaaattacactgagctcagtcagttgtatgagaaatacaaacagaaaggtctggaa

SEQ ID NO: 6484 - DNA, 254 bp, Glycine max
  Clone ID: 701098481H1
aaacactcttcttcatattcttcttcttcttcttgttcttgttctatctgtgacgagcatcatggcctcgagagcagtgctattgttggctatgtgtgtgcttccggccatggttgtcgccattcgcccagcaaagaaccctttttgcgtgaagggtcgcgtctactgtgacccttgccgtgctggttttgagacctcagcaagcagctagattgccggtgctgagattatgttgcaatgcaagagcagggtta

SEQ ID NO: 6485 - DNA, 218 bp, Glycine max
  Clone ID: 701098482H1
ctgtatggcctggaaaaatattgggcatttcacgactatcgcaaggtccggggccaaaaagaagcattgaataaagaccctgaactggacaggttgcttcgagaagagtatcgtagtttagaggatttccgtgccaaagagaagaatgtggtaaaagagtacttcaattaagttgagtgatatggccaaatggtaaatacatatggcagagttttgat

SEQ ID NO: 6486 - DNA, 89 bp, Glycine max
  Clone ID: 701098483H1
cacaatccctctctctctccgacgtacatttccatctttttagggtttcatttcatggactccgattcccggatttccagacaacatac

SEQ ID NO: 6487 - DNA, 253 bp, Glycine max
  Clone ID: 701098485H1
cccggatagcggtgataaatatgcacgccccgttcttggtggttcagccttaccttaccctcgcagaggaagaaccggaagaggaaaaactagaaaagatcccaacagtgagaagccgagcgattttctttaccttccaagagatgaagcatttggtcacttgaagtcatcagattttctcgcttactggaatcaaagctgtatcccaagatgtcttgcctgtcttgactgatgcattcgatggaaatatttt

SEQ ID NO: 6488 - DNA, 251 bp, Glycine max
  Clone ID: 701098486H1
ccactcaacatttgacactcttttcttcttctcgttgttgcttcggtgttgaatcatggatcagaaactcgatttcagtgctccgcattccatgggaaccactatcatcggcgttacttacaacggcggtgtcgttctcggagccgactctcgaaccagcactggagtgtatgttgccaaccgagcatcggacaaaatcacacagctcactgataatgtttacgtgtgtcgctctggatcggctgctgatt

SEQ ID NO: 6489 - DNA, 251 bp, Glycine max
  Clone ID: 701098487H1
ctagttttcgtagcatggccatgccatggcgcaggctaggaaaggttccctctccgaatgaaaactggctatggtcagcgttcttcggaggtaaaatgcggaagttttaaccttgctgtggaagcagagaagatccgagataggaaaagcattcctgaagagtgcgttgaaccaagaaaggagtacattaatggcgaacaatttagatcagactctaaaacagttaaccaacaaggctttctttgatgcta

SEQ ID NO: 6490 - DNA, 254 bp, Glycine max
  Clone ID: 701098488H1
catggatggaatcttccagttgaatgcgcccgcactcttcaaatctcaaccatgcttctgaagaaaggagtggagacggggatgaccccctttgccattggaagtcttatgtgcagggaatccttgaacaaggagtctgtgattgagggaattgtaaaggcagctctggattctgaccttcctggcacaagtgaagccacgtttctggatgctgtttctgaaatcatggaccagcaccttgattagatcaccgg

SEQ ID NO: 6491 - DNA, 254 bp, Glycine max
  Clone ID: 701098489H1
ctcaacaccacccgcgaaaccgccaagcagatcgccgattccaagcctctcctcgccctcacgatctctgattgactccccaaaatcaccgcagctggtcgctctctaccaatcgttctcatggacaacgacggcgccaataataacaataacaataataatatcgtgcccactcttgatgagatggcgaagaaggaaccggtggctcagcgcgtgacagagcgcgtggagcaggacgacacggccacgctgct

SEQ ID NO: 6492 - DNA, 254 bp, Glycine max
  Clone ID: 701098493H1
caaaggtcgacgcaagacgctacaagaggttggctatgtgactaccatatgcttttcatgcttccttatcagatgtgttatgatgtgctttaatgcatttgataaagccgccgaccttgatgtcttggaccatcccattctgaattttatatattacctgtttgtggaaatattgccttctactttggtccttttcattttgaggaagcttcctcccaagcgtggtatcacacaatatcacccaatacgctgaa

SEQ ID NO: 6493 - DNA, 254 bp, Glycine max
  Clone ID: 701098494H1
tgcaaatcgagatcctgctcggaatcatcaagctcgactcgctcgtaggctcatggctcgccgggagaacctccgactggagaggtcggcgttacacgattgttttcgccggcgccatcttctttgtcggagcacttctcatgggtttctcccccaagtagtcctttctcatgttcggccgtttcgttgccggcatcgggatcggctacgccctcatgatagcccccgtctagagcgccgaggtctccccggcc

SEQ ID NO: 6494 - DNA, 259 bp, Glycine max
  Clone ID: 701098496H1
tgcaaatcgagatcctgctcggaatcatcaacctctactctctgataggctcatgcctcgcccgcagaacctccgactggataggtcggcgttacacgattgttttcgccggcgccatcttctttgtcggagcacttctcatgggtttctcccccaactattcctttctcatgttcggccgtttcgttgccggcatcggcatcggctacgccctcatgatagcccccgtctacaccgccgaggtctccccggcctcctt

SEQ ID NO: 6495 - DNA, 258 bp, Glycine max
  Clone ID: 701098501H1
gagcgattcggtcgagctcgaagtgatgattgggacgagggatgggaaaacctactggaagtagacaatcctgacgaaagagaagatagaagactctgtttttgttcaccctttgcatctttgttgggctgagattttaagaaaattcataagcctgtcaaggtttactgatgtgctgagactgattgatcaatcatcattaaaacctaatgctatgttgcttgatgaagatgatgccagtagcttaacccggatagc

SEQ ID NO: 6496 - DNA, 278 bp, Glycine max
  Clone ID: 701098502H1
gccttttccatggcagcatgatttgtttgaagatagcctaagagctgcagggattcaaggagtagaagttggcaccaagttgtatgtttccaatttggaccatggagtgaccaatgaagacataagggaacttttctctgagcttggagagttgaagcgttttgctgttcattatgacaaaaatggacatccaagtggttcagctgaagtcgtttatactagaagaagtgatgcatttgctgcccttaaacgatataataacgtacttttggatggaa

SEQ ID NO: 6497 - DNA, 278 bp, Glycine max
  Clone ID: 701098504H1
ggcacttctctcattcaagagtaatggcagaagcaacaaaagggtatgctgtggtcactggagcaaataagggaattggatttgcaatatgcaagcaattggcttctaatgggatcactgtggtgttgacagccagagatgagaagaggggtcttcaagctgtcgagaaactccaagagcttggtctttctggccatgtgggttttcatcaacttgatgttacagaccctgcaggaataagatcacttgcagatttcatcaggaacaaatttggaaaa

SEQ ID NO: 6498 - DNA, 278 bp, Glycine max
  Clone ID: 701098505H1
aacaaaggcagaagcgagatctcctagaaagcgagtttctcttttctctctctctttcaattttcacatagtcagcgaaaacaaacaaactattggagatttggagcacgaaacacaacacaagcagcagccacctcgtttcattgttttgaattcaactgagaaaaacgacaacgaggatgtttcaggagagcagcgtgacgcggtggccgactcagtggactcgctaccacgacaagctattcgagcgggcccttctggtcgtgccggaggatctg

SEQ ID NO: 6499 - DNA, 278 bp, Glycine max
  Clone ID: 701098506H1
cagaaagagaaagagaatggacgccattgattctgtgttcgatccgctgagagaattcgcaaaggacagcgtgaggctcgtgaagcgctgccacaaacccgatcgcaaagaattctccaaggttgccgtccgtactgcaattggtttcgtcgtgatgggattcgtcggtttcttcgtgaagctcattttcattccaattaacaacatcattgtcggatctggttaggatgaagggaactacaattgcctcagaattcaggttgtcaagcaaaaggagg

SEQ ID NO: 6500 - DNA, 275 bp, Glycine max
  Clone ID: 701098507H1
gcgcgaagttgccccctcaacgtgggagagtgtcgctgaagaagttgtttcgggtacggctaagagatttctgggaatctcatcctgaggaatgccagcacacaaaccagttgttgggttatcatggcaaccacagttgcctattccatcatcattcaaagccactgatgggtctcataccaaacctcaaactgaggcatcaagcagcactgttaggaaatccagttcagagctggttgatggccttttcgtccctccaaacgatcccagaaaat

SEQ ID NO: 6501 - DNA, 275 bp, Glycine max
  Clone ID: 701098508H1
cctcgagccgaatcggctcgagcttctctctccaccatgcaccaaaccatttcccacagaagcttcatccccataggagcacctggcatgccacacgcaggaggaatcaaagaatccaatggcacctatccatccaaagctgccacaatggtatcggagaacgcggtggtaatcattggaaaacggggatgctgcatgtgccacgtggtaaaaaggttgtcacaaggtctgggagtgaaccctcccgtgtacgaggtggacgatgaccacgaagc

SEQ ID NO: 6502 - DNA, 279 bp, Glycine max
  Clone ID: 701098509H1
gtgcaaaagagcgtcgtagtcgcaaccctaatcagaagaagcgcagcttcaagcgagtgacagccaccagccatgggtcgtatgcacagccgcggtaagggtatatcctcttctgctttgccctacaaaaggacacctcctagctggctcaagatctcttcgcaagatgtcgaagaaaatatctgcaagtttgcgaagaaaggtttgaccccgtctcagattggtgtcattctcagagattctcacggtattgctcaggtcaatagcgtcactggcagc

SEQ ID NO: 6503 - DNA, 277 bp, Glycine max
  Clone ID: 701098510H1
cttaaaatgggtcccatcagccaggtcttttctatgctaccaggatttagtgctgaattaatgccaaaaggccgtgagaaggaaagccaggcaaaaattaaacgttacatgacaatgatggactcgatgacaaatgaagagttggatagttcaaacccaaagctcatgaatgagtcccgaatgatgcgaatagctcgaggttctggtcgtccagttagggaagtaatggaaatgttagaagagtacaaacgtcttgcaaagatatggagcaaaatga

SEQ ID NO: 6504 - DNA, 275 bp, Glycine max
  Clone ID: 701098511H1
gcaggctgctccagagagggtctcattggatacgtctcccgacaagagttcaaggccagttttggaaaagaaattagaatccaatggagaagacatgaaaagagtagatgggttgaaggaagtgaggaagaacagaaaaccattcccaacgtggatgatgttattactcttctccatctttggggttgtaatggcattaccactgcttcagctgtgatgataggcaaagaaatctttataggagggtataagggtcccaaaagttttctcctgga

SEQ ID NO: 6505 - DNA, 276 bp, Glycine max
  Clone ID: 701098513H1
gaaaatgtgtgtgatagattgcttcttcctttccagcatgaggagaagtggtcagaaaatctgagatctaaattacccaagacaaaggaatcacttgagggtgctgatggccccaccttacggtggaggcgtaatgtactacttgttgaagcttcacataatccagattctggaagagtgatccaccatgcccgggaacttgagtcattttgtgctcgtaatggcatacgtttatccctaatgcagggtttgtctgggattgtaaaaacagtgcca

SEQ ID NO: 6506 - DNA, 280 bp, Glycine max
  Clone ID: 701098514H1
gccatggagcagctttacagtcttggagcattggatgaagagggccttttaactaaattagggaggaaaatggcagaatttcctttggatccaccgttgtctaagatgttgcttgccagcgtggaccttggatgcagtgatgagattttgaccataattgccatgatccagaccggaaatatgttttacaggccaagggaaaagcaagcccaagccgatcagaagagggcaaagttttttcagccagagggtgaccatcttaccctacttgcagtttatg

SEQ ID NO: 6507 - DNA, 282 bp, Glycine max
  Clone ID: 701098515H1
cagaagaaaatagtcgttcgagatggctcgtacgaagcaaactgctcgtaagtccacaggaggaaaggctcctaggaagcagcttgcaaccaaggctgcacgtaagtctgcaccaactactggtggtgtgaagaagccacatcgttaccgtcctggtaccgttgctcttcgtgagattaggaaataccagaagagtaccgagcttttgatcaggaagctccccttccagaggctggttcgtgaaattgctcaggacttcaagactgatctgcgtttccagag

SEQ ID NO: 6508 - DNA, 283 bp, Glycine max
  Clone ID: 701098516H1
accctttgagagttagaatggctgctgctattgaaatccccacaatagtgtttccaaactcctctgcccaacagaggatgccagtggttggaatgggatctgcccctgacttcacatgcaagaaagacacaaaggaggctatcattgaggccgtgaaacagggttacagacacttcgacactgctgctgcttatggctctgaacaggctctcggtgaagctctcaaggaagctatccatcttggcctcgtctcccgccaagacctctttgtcacttccaagct

SEQ ID NO: 6509 - DNA, 274 bp, Glycine max
  Clone ID: 701098517H1
gcatcactggcaagcaccccagaagagaaccgttcactgaggatgggtgattctgatgatgaggaaatgaatctatcgttgtttcctaagaagtttggaaactctactttcctcattgactcaattccagtggcagagttccaaggtcgtccgctagctgatcaccctgctgtgaaaaatggacgtccacctggtgctctcaccataccccgcgatcttcttgatgcatcaactgtcgcagaagccatcagtgtcatcgcctgttggtacgagg

SEQ ID NO: 6510 - DNA, 280 bp, Glycine max
  Clone ID: 701098518H1
atcgttttctacataatacaaacctttctaatttttgaagcttattatacccaatctcgatatgcagatcttcgtgaaaaccctaactggcaagacgatcaccttggaggtggagtcctctgacaccatcgacaacgtgaaggccaaaatccaagacaaggagggcattcctccggatcaacagcgtttaatcttcgccggaaaacagctcgaagacggcagaaccctcgccgactacaacatccaaaaggagtccacgctccacctcgtcctccggctc

SEQ ID NO: 6511 - DNA, 274 bp, Glycine max
  Clone ID: 701098519H1
cagacatctgtactagatagtatcttgcagggagaattgccctgtgaactggagaaatctaatcctacatacaatatattggcattattgcgggtgcttgacggtttgaaccaacttgcatctcgtttgagggcccaagtggttactgatagctttgctgagggcaaaattttggatttagatgagctaagtgttaccagcggtgctagggttcctacagaggaatttataagcagcaaacttactccaaaattagctaggcaaatacaagatg

SEQ ID NO: 6512 - DNA, 276 bp, Glycine max
  Clone ID: 701098520H1
cctcgagccgattcggctcaggtgtttctgcttacttcaacaagccacacactgagaggaaccacaagacttcgtattcgactactgttcaaggtgttgttgaccatagaggggttttcactgatgtgtgcattgggtggccaggttcaatgggtgatgatcaggttttggaaaaatcatcgctttttcatagggctaacaatggagggattaatctaagtggggtttgggttgttgggggttgtgggtaccctttgttggattgggttttggtgc

SEQ ID NO: 6513 - DNA, 274 bp, Glycine max
  Clone ID: 701098522H1
tttggagttggggtcccattgttcaatcacaatgttagaagtactcatacgatcaagtggagtttgtggataatacataaattattgcttgctgcagcatatggcttcattttatttgcaaatttctccaaatggagagagaagctgcctccaaggccatctttccacaactatgttgctgtaatgtttgtcttcagtgtgattaccctgtttgcttgtggactagcagcaattgacgctggacttggcaattggttgtatgatctcactgtgc

SEQ ID NO: 6514 - DNA, 284 bp, Glycine max
  Clone ID: 701098523H1
gctcgagggcggtttccgttggagaagggcgtttgtccaccatggtggcctactgggaatgaagagttgtggcgccaaataggtttgccgaaagatcaaggtcctcctccttacaagaaacctcatgacttgaagaaggcatggaaagtgggtgttctgactgcagttatcaaggcacatgtctcctgatatcgccaaaatttgcaagctcgtgaggcagtccaaatgccttcaagataagatgacagccagggaaagtgcaacctggcttgcaatcatcaatc

SEQ ID NO: 6515 - DNA, 273 bp, Glycine max
  Clone ID: 701098525H1
aaaaaataaacatatattgagaatggagggttgtgtgaagaagttgctatgccttgttgggtttgtggtgcttgtgagtactattggtggggtggagagtgctggtgaatgtgggaaatctacaacccctgataatgaggcttataagcttgcaccatgtgcctcagcagcacaagatgagaatgctagtgtttctcagagttgctgtgctcaggtgaagaaaattgggcagaaccctagttgcctctgtgcagttcttctctctaacacagc

SEQ ID NO: 6516 - DNA, 271 bp, Glycine max
  Clone ID: 701098526H1
ctggaaagacccacgtgccggttcttcaatcttctagagagagagagagagagagagacagagatggcgttgaatcctcaactgtttccaaatggaatgcccgttcctttcgtgaacgagatgtttgtgttggccagagacggcgtcgaattcgaggtcgataagattcctgcctctggcaatcatgggggtaatctcaaaacaaagggaatcgtgtatttgtcgaatattcggatggtcttcgttgctaaaagtccagttggacacttca

SEQ ID NO: 6517 - DNA, 281 bp, Glycine max
  Clone ID: 701098531H1
gaacagaagagatttaggcagcccgaaccgacgatgttgtttttaactgacagcagcagtaagcgaacactaacactaacgtgaaacgcgttgcgttgtcggaaaatcaccctcacctgatcactgtggaagtctctaggtgatggccggttcagaacctgttagggcagagggagagactatggctgtggatgctgccccaaggaagccccggattctacttgctgcgagtgggagtgttgctgctgtcaaatttgcaaatctttgtcactgtttctctg

SEQ ID NO: 6518 - DNA, 282 bp, Glycine max
  Clone ID: 701098532H1
cggagcgaaggggtaagagaaattaccaccgcaacagttgaggtgtgttaatttctgacatccaaaacgaaacaaaaccccatcactgaactgagaaagaggctaccaacagacaccacctattttatgcctttcttcttcttctctcgacaatggtggataaaccaatgagcattcatcgaacccggttcccattctcgatcaccaagctcctcttctggtcgcttatcctactcagcttcattgtgctcttcttcttgggatctcccccgtcctccgctt

SEQ ID NO: 6519 - DNA, 94 bp, Glycine max
  Clone ID: 701098533H1
tttgagtattctaaaaatgctcttttattgagaacacaaggcaacgtttaagctacaccagcatccaatactaaaagagcattttgagtattct

SEQ ID NO: 6520 - DNA, 276 bp, Glycine max
  Clone ID: 701098534H1
caggagctcagtgttgggtgagagtgagaagcacaagtctgatgttttcccaggaaactctagtcctttttccaaggacattgaagtgaatgggaaggaagttgtcatgtcaaatgtagaggagtatcttggagtgcttgatgtttacatacatcaggccagggacattcaaaacatttgcatataccacaagcaagatgtttatgctaagatttgtctgaccagtaatcctgagacaactgtgtctaccaaaaccatcaatggaggaggaaggaa

SEQ ID NO: 6521 - DNA, 276 bp, Glycine max
  Clone ID: 701098535H1
ttttcggatgatatcacctaaaggctctcgcatgtctccacaacttcttgcagtgttgcaagcttttgaggcaacattggcagagaggctgaaaaatcttatgcctaaaagcaaggatgaaatcctcaccttgtcttggatgactttagctatgaagtcactttgtgaaagtcacaatgacatacggacccttatgactgcccttgagcttcctgtgagtgattgggaggacaaatggattgatgtgtacttggacataagttcaaagttgctaga

SEQ ID NO: 6522 - DNA, 212 bp, Glycine max
  Clone ID: 701098536H1
caacaatgcagggcaagaaaaagacaacaaattgccttctcttcctgttcctctccctcaccctctctctctctctctccgccgcattacaactccaaacccaaacctctgcccctccactccctcccccacccacccgcaatctcatggcccgaatccgaatccgaacccgacccagaagaagaagctctctcacttcacctccacacaac

SEQ ID NO: 6523 - DNA, 272 bp, Glycine max
  Clone ID: 701098538H1
gaacgaccaatcgcagatgatgatgaatttgaaccagatgatccagcctcagatgatgaatcaggtgcagattataggtcagtcgcagcctcagatgctctcgcacaatcagggaatgaatcagcaagcgcagagcctcagatgaatacatcgcagattatgatgaaccagtctcagcctcagcctccgatgatgaatcgtggatacaacaaggtttggtctcagcaacctcctctggaccctaacatgaagtttcagaaccctatgaaacc

SEQ ID NO: 6524 - DNA, 274 bp, Glycine max
  Clone ID: 701098539H1
ggccaaatcaatcaaattctttgagttgaacacaggggccaagattccttctcttgggttagggacttggcaagctgaacctggtgttgtagctgaagctctcaccacagccattcaggttggatacaggcatattgactgtgctagtgcgtataagaatcaagcagagattggttctgctcttaagaagctttttgatgatggtgtggtgaagcgtgaggacttatggatcacttccaaactctggtgttcagatcatgcaccagaagatgtg

SEQ ID NO: 6525 - DNA, 274 bp, Glycine max
  Clone ID: 701098540H1
gttactcatttcttctcatcttctttttcttccctttaaaattattattccgtgcaaacacaacaacaacttcatcaccaacacgaagaacaagattagcgttatgggtctcttcctttctaggaatttggcttgcaaattcatatacccttttcttttttccaataaggtttcaaaggatttgttccccaagcagttggagaacatgatgtctctggtctctcctcgtactggcaggcatttgcagcgctatgacaaaggctgtcgccaagtt

SEQ ID NO: 6526 - DNA, 273 bp, Glycine max
  Clone ID: 701098541H1
caccactaagtttattagtattattatcactagctacctgctatcaaagcatcacaaatggcttctacagacaagcctggcggcgaccctgaatacagaacatcttcaactccagctcctgctggtgttgattactttaaatttgatgtcatcctaaggtttctattgtttgcagcatcactggtagctgttgtggtgatcgtcactgctaatcaaacagaggttattcgtgttccacagcctgtgccatggccagccaagttcagatactca

SEQ ID NO: 6527 - DNA, 268 bp, Glycine max
  Clone ID: 701098543H1
cgaccagattgtgggtgcggtcttggtggagaaggaggatgccgtcgttaaacaggagagcacggcgaggttgttgatgaactccatttcgcccaattgccaattcgacacatgcctttgcctctgcaaccctaatcacattggttaattctaagttgattcggttaatatgaattgttctcgagtttttcttccctgtcaattaattgaattgggtagatgaatacaagcaccaaccaaacgtctaggggagcgaccattctgtact

SEQ ID NO: 6528 - DNA, 272 bp, Glycine max
  Clone ID: 701098544H1
gccacataaagacacaatacagagtgagttgttgctccttcgccactgctctctgccaacatgggtatctccagagattctatgcacaagaggcgtgaccactggtggcaagaagaaggcctggaggataaagagaaactatgatcttggtcgccagcctgctaacactaagctgtcaagcaacaagacagtcaggaggatccgtgttagaggtggaaatctgaaatggagggcattgagattggatactggaaattactcctggggaagtg

SEQ ID NO: 6529 - DNA, 279 bp, Glycine max
  Clone ID: 701098547H1
ctaggatttcggccgtttgctccccaaggaaagaagcagagtgtttcttttgaaatcagctagaaaagatgtcaggtgaagaggtagctgttgcagctgaggcacctgctgcttcaattccaggtgagccaatggacatcatgactgctctacagcttgtgctgagaaaatctctggcctatggtggtcttgcacgaggtcttcatgaaggtgctaaggtgatcgagaagcatgctgcacagctctgcgttctagcagaagattgtgaccaacctgatt

SEQ ID NO: 6530 - DNA, 279 bp, Glycine max
  Clone ID: 701098548H1
cacagcacaactcccatgctcttctcactaactcaactcacgaccaagatggaccttctctccctccaaaccaatgggatttgctcaacaggcaccggcctgcattctcaaggaaaaagtctggtaagagcaggctacaatttgtgacaactactggtgatgaaattgaagacgaaatttcttctggcaacgtaaaccaccaaagttctctgcataattctggtttcaacagcttttcaccaactgtgtcttgtataggactatttactcattctgtgc

SEQ ID NO: 6531 - DNA, 272 bp, Glycine max
  Clone ID: 701098549H1
ctcgagtctaatttgtgatacttttgtgggtaagggggaaaagcagcagtaaatctcattctcattgtaattagctactgctgtattctctctttctgctgctccatatttcatttcatctctgattgcgctactgctaggctgtcttcaatatttaattgcttgttcaaaatagctaggcatgtatattattattctttttctcttggcccaattaaagatgcaattttccttgtgaacacagcataattcttattcttatttatttttgt

SEQ ID NO: 6532 - DNA, 276 bp, Glycine max
  Clone ID: 701098552H1
ccatcatgtctgtctggaaacttgaaacaggttgattttaacgctgaccatattgccaatcctatattacaagggagaaatataacttctgaaggaagagattctataggtgttgggatcagtgagaactcggcattggtcccagaacatgattcacacgagactgaatttgtggaagtagccttaacaaagcaaaatgaagatgttgggatatctttcaaggatggccactgcaaaacacaggagcctgatgaaagtgacgtgttaactgaagtt

SEQ ID NO: 6533 - DNA, 272 bp, Glycine max
  Clone ID: 701098554H1
ctcgagccgattcggctgagggcagttgcagaagcagttgagaaggtgaaagggggctctacattactattgggcaagttccaggccccatcagagggtaactacagtttgacttgctattgcctgtgtgatgcttggttcggctgttacacaaggacaaatttaaagctcaaagttttgagacggactcgggctggcaccagggctgctgtattcgctgatgaaggacctatcatggaggattgagttgaggaggatgatgacaacgacga

SEQ ID NO: 6534 - DNA, 271 bp, Glycine max
  Clone ID: 701098555H1
ctccaggttaatcctgccgaggaggagacacaggaaagtgatacaattgcagaggaggatttctttcgcaccagccggaaacaagccgaagaacgtgttgagaggtgtgtcatacgtgtgcaggccatgttccgttctaagatatcacaagatcaatatagatggttgattctgatacataatctttctatgctggatgatttagaagatttcctaaattctgaagatgacatgttacccaagacatagcttggtgccttttccaaaacaa

SEQ ID NO: 6535 - DNA, 270 bp, Glycine max
  Clone ID: 701098556H1
gcaccgcagagacagagaggtaaaagaaacgcaaacaacgatggctgtgaaaggatcaccacaacggtgggacatgagattagttttgacaattactcttcttttaatttcggtctctgtttctgctcttcaacacgtaagtcacacccaccttaatcccaccacccttgagacatcccaaactagttttactcgtaaagtcgtgaactttttgtggagctcatctggctctggataccacatacttggccggatatagaatttggatgg

SEQ ID NO: 6536 - DNA, 101 bp, Glycine max
  Clone ID: 701098557H1
cgcgaaagaagaaccctggaagagagcgatccataatccattgttaacaacaaacaaggacacgcaagacaaaagcccgaaactcataggtatacacagct

SEQ ID NO: 6537 - DNA, 272 bp, Glycine max
  Clone ID: 701098559H1
acgtattctgctcaaaatgtaaagagaaaggttcacaaagtggaacagctggtaggtgttttggatgccaaggcactggtatgaaaattacaagaaggcagattggactaggcatgattcaacaaatgcaacatgtctgtcctgactgcagaggatctggtgaggtcattaacgagagagataaatgtcctcagtgcaaaggaaacaaaatttcccaggaaaagaaggtgctggaagtgcatgttgagaagggtatgcagcagggtcagaag

SEQ ID NO: 6538 - DNA, 275 bp, Glycine max
  Clone ID: 701098560H1
ctttgcaatcagcaactggggttgtgcctgtcttttgtgctgaaatacgtttgcatgagacatccgaaggattgccttgggatagctataccgaggaactggtatatatgatttgagttgatggaattttggggcattacgaagatacaagcaggcgcatcccgggctgaaaaatgataagataaccccctttaccttactgaagttttgtattgtttgggattaaggtgaaattgttcgagaaagcattacatggaatggttttgtcgaaaggg

SEQ ID NO: 6539 - DNA, 272 bp, Glycine max
  Clone ID: 701098561H1
tgtagcaggtggtatttgtgattcagtgtgcggtgaagtggtttctaagcaccgggcggcggccagtgccgttggtggtggcggtgttggttttcgtggcagagttgaatggggttggggtggggatggaagaattagctaaggaggttcatgctaaggtttccacatgtagggctatttttaaagagttgcttgagacacttgtgaaggttgcacaggtgttgccttgggggaaggatgttaccgtgaagaacattgttaagaatgaccga

SEQ ID NO: 6540 - DNA, 266 bp, Glycine max
  Clone ID: 701098562H1
agaaaagtcaaagacaatgtcagggatcattcacaagattgacgagacgcttcatgtgggaggccacaagaaggaggaggagcacaagggtgagcagcaccatggtggagaatacaaaggggagcatcatggtgaacacagtactgaatacaaaggagagcatcatgttggtgagcacaagccggagcaccatcgaggagaagagcacaaagaggggttcctagacaagatcaaggacaagatccacggcgaggagggtggcgcac

SEQ ID NO: 6541 - DNA, 260 bp, Glycine max
  Clone ID: 701098565H1
ggctgctggtattagtatgggcttactcatggttggaactggcagtgataaggcaaatgagatgctcacttatgcccatgagactcaacatgaaaagattattagggggttagcattgggaatagctcttacagtttatggaagagaagaagaagctgacactttgattgagcagatgactagggatcaagatccaatattgcgttacggtggcatgtatgctttggccttggcgtataggggaacagcaaacaataagg

SEQ ID NO: 6542 - DNA, 279 bp, Glycine max
  Clone ID: 701098566H1
atcctaaaaacatgcgagctctggtgggaagtagattgcctaagttcaccaaatggcaagccaagctagtgaatgcatcatttgattttattggcttaaactattactcctctgtgttatattaatggtgtccctccaagcaacgacaaacccaattttctaacagattctcgcaccaacacttcatttgaacgcaatggaagacccctaggtctaagggccgcttcagtttggatatacttttatccaaggggacttctagatcttctgttatataca

SEQ ID NO: 6543 - DNA, 276 bp, Glycine max
  Clone ID: 701098569H1
ggctcgagcaaatccacttctccaactactcggcgtgttcagcgaagatccgaatcccaacccgaacccgatcgtgatccgagaggtttgggcctccaatctcgaatccgaattcgaactcatccgcgaactcatcgatcgctacccttttacctcaatggacacagaatttcccggtgttattttccgaccacatgtggaccccaccaaacccttcaaccaccgcaaccgtccctccgaccactaccgcctcctcaagtccaacgttgacgctct

SEQ ID NO: 6544 - DNA, 271 bp, Glycine max
  Clone ID: 701098570H1
aagtacgtcatcttggaaccaggcccagcatgtgttggtcatcgcactcactgttagagttagagttagagttagagttggatggagtcgttaacgttgtgaagcataagcaacaacacaacatgagattgaagaggaacaagttggaggacattccggaggaaacagaacttcctcctattggtattgatactaatccagcagagcttgaagaagcgggccttcacttggaaacagatttggaaatactgaggcgggccatggatatggg

SEQ ID NO: 6545 - DNA, 268 bp, Glycine max
  Clone ID: 701098571H1
cactcgagccgaatcggctcgagtcaccgcgcaagcaaaaagaaacaatcccaggcgaggacaaagatggaggggaaggagccggatgtgtcgttgggagcgaacaagttccccgagagacagccgattgggacggcggcgcagagccaagacgacggcaaggactaccaggagccggcgccggcgccgctggttgacccgacggagtttacgtcatggtcgttttacagagcagggatagcagagtttgtgggcacttttctgtttc

SEQ ID NO: 6546 - DNA, 271 bp, Glycine max
  Clone ID: 701098572H1
aagaattatatagcttcaatcatctgatcgagggcattgctagtatggcttcaggagtcaaattctcattcttcatagctcttttcattgtcttggctgcagttggagctgctcacgaggggcatgatcacatggctccagcagaaccaccttctaatcatgcaagcagcctcaaaaaccatgcagtggttggtggactctttccccttctgcttacacttctcattgccagagagaggctttgaaaactctcagtttgccttaacagttc

SEQ ID NO: 6547 - DNA, 273 bp, Glycine max
  Clone ID: 701098573H1
gcaaagttctaatctttcgcctattgggttctactcctttctctcttcgtttccgatcgatccaattttcttcccatggctacgatcggacacaacaatctcaatgccaaattggttcttctcggggacatgggtgctgggaaatccagcctcgttttgcgctttgtcaagggtcaatttctcgaatttcaggaatcaacaataggcggcagcgttcttttcacagacgctggcagtaaatgacgcgacggtaaagtttgagatatgggacac

SEQ ID NO: 6548 - DNA, 271 bp, Glycine max
  Clone ID: 701098574H1
cgggtctgccacaactagacctcttgcgaactggtttcacatatggcatgcgctcatgatcctaacgtgagagcaacacagttgcatgaggatccatctacacatgcatgagtgtcactatcctttataacgagggctccggaaacgagagctataagctgattatctggcgttgagaatggaatacctcgtgcccgtttgaggttacaatcgaaaacctccaaaatccagtatttgtaacataatactgttatattaataatattatata

SEQ ID NO: 6549 - DNA, 271 bp, Glycine max
  Clone ID: 701098575H1
ctcgagccgctttgcacaagggagaaaaggggtcaagaattttgtacaaaccttgggagttgcgagatcttatctgttatagatgatgtttttgtaccacgagaaggtttcagctgaaggagaaatatgatagtggaatatcacaaggaaagaggaaaatccagaaatagtagtatagtacttcctatgcaataagtaaatggatggactacctggctctgtgggcaccagcgctagcttcagtctgagattgggtcagaccatgttctct

SEQ ID NO: 6550 - DNA, 269 bp, Glycine max
  Clone ID: 701098576H1
cctcgagccgattcggctcgagcgccgtcgtacacggtggcggaggacgtggaggggagggcacggatggcggtggtggctccgagggaaaacgtcgacgttttgaaggtgaaaacggagagagggaacagcgttgtggcgatgtacataaagaacccaacggcgtcgttgactttgctttactcgcacggaaacgccgctgatctgggtcagatgtacgagttgttcagcgaactcagtatccacctccgagttaacctcatgggtta

SEQ ID NO: 6551 - DNA, 88 bp, Glycine max
  Clone ID: 701098577H1
ctttccgattctctttctgagatccaaaagccttactttttctccctctcaattctccttctaatctctagaatccgcttcttcaatt

SEQ ID NO: 6552 - DNA, 269 bp, Glycine max
  Clone ID: 701098578H1
cgcactccgtcttcatcaatcaccatcaccaccgctccaatacaggggaaaactcacggagatccttcacgttcagggagggcaatgcgggaaccagatcagttcgaagttctgggaagtggtgtgcgacgagcacggcatagatccgacggggaagtacgtcggaaactcagatctacaactcgagcgcgtgaacgtgtactacaacgaagcttcctgcgggcggtttgtcccacgcgcagtgctgatcgacctggagcccggagcca

SEQ ID NO: 6553 - DNA, 278 bp, Glycine max
  Clone ID: 701098579H1
ggaatgtttgaggcagagttacatgatattcttagcaaagctgaagaagcaccatttttcacctggtccagaatcatcggcatgccaactttttccacttgatgatatacctttcaattctttatccttttcatcaatggtggttaccttaagtttgtatgttgaggatattaaggctggaaagctcaaattccattatggaaccattaacaaaaggccgggtacaagtccttctgatattcgtgcctatacactggatcaccatatgcattcatgag

SEQ ID NO: 6554 - DNA, 280 bp, Glycine max
  Clone ID: 701098580H1
atggtgaaggagtggttaagctaggaggaaggatactcaagatgatgtcaataaaccttggtttgaaagaagatttccttctcaatgcatttgggggagagagtgaggttggtgcatgcctaagggtgaatttctatccaaagtgccctcaacctgacctcacttttggactctcccctcactcagatcctggtggcatgaccattcttctccctgatgattttgtgtctggccttcaagtaagaagaggagatgaatggattacagttaagcctgtcca

SEQ ID NO: 6555 - DNA, 278 bp, Glycine max
  Clone ID: 701098581H1
gcttgtttgggatgatagaacatcagttggtttgttgaaaaaagatggactaatggctactcacgatgaagaaactgcacagttctttgaaggcactgaggtgcattgtgttttatgcccccgcaatcctgatgatggtggtagcattgttcaggatttacaaatttctaccatgtttactcatcaccagaagatcgtggtggttgacggtgcgatgccaggtgaagggtcagataggcgaagaattgtgagttttgttgggggtattgacctctgcg

SEQ ID NO: 6556 - DNA, 273 bp, Glycine max
  Clone ID: 701098585H1
ttcacatattatatcatcacatatcatagtgatatattatatcatatcacaatgtgtggcatacttgctgtgcttggttgctctgattcatctcaagccaaaagggttcgcgtccttgagctttctcgcagattgaagcaccgtggtcctgactggagtgggctccaccaatatggtgataactatttggctcatcaaaggttagccatagttgatccagcttctggtgatcaacccctcttcaatgaagacaaaactgtcgtggttacggtg

SEQ ID NO: 6557 - DNA, 272 bp, Glycine max
  Clone ID: 701098586H1
gggacccaacactggttaatccctgtacttggtttcatgttacctgtgactccaacaatcatgtgattcgcttagacttgggcaactctaacgtttctggaactctgggcccagaacttggccagctacagcatctgcagtacttggagctctacaggaatgagataacaggaaagattcctaaggaacttggtaacttgaaatcacttattagcatggatttgtatgataacaagttggagggtaaaattccaaaatcatttggaaagttg

SEQ ID NO: 6558 - DNA, 269 bp, Glycine max
  Clone ID: 701098587H1
ctcagaactcagcaaggctcactgttcctggaggaccaagtgttgcatgtagcacagcaaaagctgttgagtgggatgctgcttggtctaacaaccttgatccatcaggtagagcagcacttggagtgcatgcatcagcttatggaaaccaggtcaaagctgtagaaccagagaagatcatacccacgatggaagtttctccactaggagttgccatatagagcctgtatgagccatagcaaggactagtagttgccctagaaccagca

SEQ ID NO: 6559 - DNA, 273 bp, Glycine max
  Clone ID: 701098588H1
gtcctgttccatctcgttggaagggcacctgcatgaaatcacaagacttcaattcctccaattgtaacaggcaattaattggcgcaagattttacaccgaccctactggaaacgatgacgacgaaggggacaacacgccaagggattcggtggggcacgggacccacgtggcatcgacggcggtgggtgccaccgtgactaatgcatcgtactatggtctggcggcggggagcgcaacgggtgggtcctcagaatcaagattggcagtttaca

SEQ ID NO: 6560 - DNA, 273 bp, Glycine max
  Clone ID: 701098589H1
gttctcttcaccattctctttcttctttgtttcaagtttcaacaacccagattcactctctctctcgtaattttctctcttattgaggctagaaaaagagagcaaaaaaactaaaaaatgcctgcggtcggaggtataaacaccggagggggcaaggagtaccctggaagcctcactctatttgtgacggtaacatgtatagttgcagccatgggtggtttaatcttcggttacgatatcggaatttcaggtggagtgacgtccatggatccg

SEQ ID NO: 6561 - DNA, 272 bp, Glycine max
  Clone ID: 701098591H1
cagagatcggaacgtggaactgcggaaaccggaatatctcacttctcagatcagatcaatccgacgtcgttgcagttataatggctccattcagcggcgatgagacggcaccgtttttcggcttccttggagccgcagctgccctcgtcttctcctgtatgggagctgcctatggcacagcgaagagtggcgtgggcgtggcttcgatgggtgtgatgagaccggagctggtgatgaagtctattgtccctgttgttatggctggagttttg

SEQ ID NO: 6562 - DNA, 273 bp, Glycine max
  Clone ID: 701098592H1
ggaggaaataccacatgcattaagagtttctcctaacgccgcctgtttagtcttagattctctgaaggggttttactgtacagaagtgtcaaatcaggacgtaaagaaggatgctaactttctgggtgttcgccgaacatgtatcatgctgatggaatgtctatgtgatttcctgagcaactcaggttgtgtttctaatgtaatttcagaagatatcaaggaccgggctaaggcagttgctgaagaatggaaacccagattggatgctcttga

SEQ ID NO: 6563 - DNA, 274 bp, Glycine max
  Clone ID: 701098593H1
ctcatatccttatcctgtttctttcaatggaagtcatttctgcttctagcttgaatcccaacgctccgatgttcgtgccactcgcctatcggacggtggaggatttctccgaccagtggtgggacctcgttcactcctccccctggttccgcgactactggctccgcaagtgcttccaagatccccagttccaaaacgacgacgctttcgacttcgactttgacctagatctccaagatgaagatgaaagggaacgaaaggaagggaaggaggt

SEQ ID NO: 6564 - DNA, 279 bp, Glycine max
  Clone ID: 701098594H1
attcgtttgtgctgccgctctctgagaaaaacagatagtgtgggagagagaagagcggaagagaaaatgacgaccaggttcaagaagaacaggaagaagagaggtcacgtcagcgccggacacggccgtatcggaaagcaccgcaagcatcccggaggtcgcggtaacgccggtggcatgcatcaccaccgtatcctcttcgacaagtaccatcctggtttcttcgggaaggtaggcatgcgctacttccacaaacttcgcaacacattctacaatccg

SEQ ID NO: 6565 - DNA, 279 bp, Glycine max
  Clone ID: 701098595H1
cagggaatggagaatatttaatggagttagccattggaaccccaccagtgtcttaccctgcggttttggacactggcagtgaccttatttggacacagtgcaagccttgcacgcagtgttataaacaaccaacacccatttttgatcccaagaagtcctcttctttttccaaggtttcatgtggtagcagcttgtgcagtgctgtgccttcttcaacatgcagtgatgggtgtgagtatgtttattcatacggtgactattcaatgacacaaggcgttt

SEQ ID NO: 6566 - DNA, 263 bp, Glycine max
  Clone ID: 701098601H1
gtcatataccgtgattttaaagcttctaacatcctgctggatgctgagtttaattcgaaactctctgactttggtttagctaaggcgggtcctactggtgatagaactcatgtgtctactcaagtcatgggtactcaaggatatgcagcacctgaatatgttgcaactggtcggttgacggccaaaagtgatgtctacagcttcggagttgtgttgcttgaacttctatcaggaagacgcgcagttgataaaaccataaccgg

SEQ ID NO: 6567 - DNA, 246 bp, Glycine max
  Clone ID: 701098602H1
gtctccatcattttctcgagagctttcagtttctgtggttcatctttcttcttcttaatctttcctcccctctctgtaaaatcccgcttctctgaatccctttctgctaatcatctgtctttcaagctaagattttctggtttgccttttaattcaccaaaaagcaaacttagaaggatttttcgaaagccaggtgttttcagaaacgagatccaggttttattgtcgaatttcgctagtcatatt

SEQ ID NO: 6568 - DNA, 257 bp, Glycine max
  Clone ID: 701098603H1
ctctatcctgacagtgtggttggaactctttcacatacaacaatgatagatgggcttggagttgctggatggggtgttggtggtattgaagcagaggcagcaatgcttggtcagcctatgagcatggtgttacctggtgttgttgggttcaagttatctggaaaactgcgcaatggtgttacagcaactgacttggttctaactgtgacacaaatgcttaggaaacatggtgttgtagggaaatttgttgaatttta

SEQ ID NO: 6569 - DNA, 256 bp, Glycine max
  Clone ID: 701098604H1
ccaattctcgccaaaacataaggaagctggttaaggatgggtttatcatcaggaagcccatcaagattcactctcgctcacgtgctcgtcgaatgaaggaagccaagaggaaaggacgtcactctggatacggtaagcgtaagggtacaagggaggcaaggcttcccactaaaattctatggatgaggagaatgcgtgtgctcagacgcttgcttcgcaactacagggaatctaagaagattgacaagcacatgta

SEQ ID NO: 6570 - DNA, 252 bp, Glycine max
  Clone ID: 701098605H1
gaaagtgaacgtcaaatagatgatgctctggatattatgtgcgagcttgcagttgctttagaaaagcattgacttgttcatgccttttctgtttttttgctttgtataccatttttagttttaacctttgttggctttcttagacagaacggagtcatcacattcattgtctttatagtctatacaagtctccaaatacacgtaatataatacacgtaatatgttttatagtcgttcatataaagactttac

SEQ ID NO: 6571 - DNA, 256 bp, Glycine max
  Clone ID: 701098607H1
cagtggcactagcaacggcatccgaaacagtgattgtgctaaaagcaatagcaatgtcaatggccataacaacagcagctgcaagagtgatggtgctaaaagcaataacaattacactcgcaacagttagggtgccagtagcaattacagccaaaccagtgaggacgctaaaagcaatgccaatggcaataacaatagcagctgcaagagtgatggtgctagtggcaatggaaagagcaattacaaccgcaacagt

SEQ ID NO: 6572 - DNA, 252 bp, Glycine max
  Clone ID: 701098608H1
ctgtcatggatcatcaccctgtacactctatggcaaatggttgagatgcatgaaatggtacctggaaaacgttttgataggtatcatgaactggggcagatgctttggggagaagctaggactttatatagtggtgcctcaacaacttgtggtggaaattggggtgaacattgtctatatggttactgggggaaaatccttgcaaaagttccatgacactgtgtgtgccagctgcaaaaagatcaagttgac

SEQ ID NO: 6573 - DNA, 259 bp, Glycine max
  Clone ID: 701098609H1
aacagagcatggctcctctcacattctccttcttcttcatccttatctcttacatttcttcatcatcagaagcgggatcaatcggaataaactatggaagaattgcgaacgacctacctacaccggcgaaagtggtggagcttcttaagagtcaggggctgaaccgtgtgaagctctacgacaccgacgccaccgtcttaaccgcgtttgccaactcaggaatgaaggtggtggttgccatgccaaacgagcttctcgc

SEQ ID NO: 6574 - DNA, 258 bp, Glycine max
  unsure at all n locations
  Clone ID: 701098610H1
cttggctccgctctttggtttgctcaaccgatctccgcagcaacggtgaacgttccgaagacaaagaagacctactgcaagagcacgagtgcaggaagcacacgctccacaaggtcacccaatacaagaagggcaaggacagcatcgccgctcagggaaaacgccgttatgaccgcaaacagtccggttacggtggccagaccaagcccgttttccancaaaaggcgaaaaccaccaagaaaattgtgttgaggctcc

SEQ ID NO: 6575 - DNA, 258 bp, Glycine max
  Clone ID: 701098612H1
tttggatgcccagagaaaaggcgagatcaacgaagacaacgtcctctacattgttgaaaacatcaacgttgctgcaattgaaacaactctatggtcgattgagtggggcattgctgagcttgtgaaccacccagagatccagcaaaagttaagggatgagattgacagagttcttggagcagggcaccaagtgactgagccagacatccaaaagctcccatacctccaagcagtggtcaaggaaactcttcgtcttag

SEQ ID NO: 6576 - DNA, 258 bp, Glycine max
  Clone ID: 701098613H1
cctcgagcgaattcggctcgaggggaaaccataaattgggaacacgtcaccaaatccacctccaccgtccaagccatcggatcctcgccggaaaacatgttcgtgagcttcgaatcttcccgcagaaactcgaattcgataatggtttacgatttgcataccctaacacccgtcacggagatcagtcacaacgagatcttcggcgcgaacatcgattcggcgattccggcgacgaagttgcaatggattgagggatat

SEQ ID NO: 6577 - DNA, 261 bp, Glycine max
  Clone ID: 701098615H1
cttgttcctctcgcccagtatccgagatcaaccctgacccctaaggccaggggtttttctcggcttcttcagattcctgaaatggcgtctgtttcagctttagtcaagtacaagctcgtcttcttgggtgaccaatccgtgggcaaaaccagcatcatcactcgcttcatgtacgataaattcgataacacctatcaggctacaattggtattgattttctatcaaaaactatgtatctcgaagatcgaactgttcgactg

SEQ ID NO: 6578 - DNA, 262 bp, Glycine max
  Clone ID: 701098616H1
cggaggtggtcgcaggggttactcaaatggtcgtggaggtcgaagtggtggcagaggaggctaccaaaacgggcgcaatcaatactacgatcagcctggaaattattatccaaggaacaactattataacaacagaggaaggggcggcagaggtggtggctattacaacaaccatggtgcaggcggtcaagttaatcatgtcgcaggtgatgtgggggtgcaatcatgataagttatgagttgtttatagtggttattactg

SEQ ID NO: 6579 - DNA, 263 bp, Glycine max
  Clone ID: 701098617H1
cgatcgtgagaggggcagtagccgagattccgtgagttgcaaaaatgaagacgattctttccaccgagaccatgaacatcccggacggcgtgagcatcaaagttcatgccaaggtcatcgaagttgagggcccccgcggaaaattggtgcgagacttcaagcatttgaatctcgattttcagctcattactgacgaaaacggtaaaagaaagctgaaaatcgacgcgtggtttggttctcggaaaacatccgccgccattcgc

SEQ ID NO: 6580 - DNA, 255 bp, Glycine max
  Clone ID: 701098619H1
gagttggtcgatggttcatcatcgggcaaagctaatggggatacgatatctgtaaattttgagggaacacaatctgggtcagatttggttggaagcattccagcatcttctgctcttggtttatctccaagttcatcagttggttcactgtcttctgaaaaatcaactctgaatcccaatgcaaaggaattcaagctttaccctaatgcaaagagttttattccatcggctgctcggcctcccactccagtgtct

SEQ ID NO: 6581 - DNA, 251 bp, Glycine max
  Clone ID: 701098623H1
ctcgagcggcaccagctcaccgacgaccagatcgccgagttcaaggaggccttcagcctcttcgacaaggacggcgatggttgcattactaccaaggaacttgggactgttatgaggtcacttggtcaaaacccaactgaggcagaactgcaggatatgataaacgaggttgatgctgatggcaacggaaccatcgatttcccagagttcctcaacctgatggctcgcaagatgaaagacaccgactcaga

SEQ ID NO: 6582 - DNA, 255 bp, Glycine max
  Clone ID: 701098624H1
caaaggttggaaccgatgaggatgcactcactcgcgtggttgtgagccgggccgagaaggacctgaagataatctcagaggtttactacaagagcaacagcgttcttcttcagcatgctattgccaaggaaatctcaggggactacaagaagttccttctcactctgttggggaaagaagactaaatattttttctctgagggcatttgtgattacgagtttaggacaccaagctatacttgtgtgtgtgtgatg

SEQ ID NO: 6583 - DNA, 76 bp, Glycine max
  Clone ID: 701098625H1
caaactttgtggcttcaggacatactcctctggtctctctgtctctcttcaatcttcctgaagaagagaaagacac

SEQ ID NO: 6584 - DNA, 254 bp, Glycine max
  Clone ID: 701098627H1
tttctttattctctccttcctcttccttcttcttgtttcatctgccactgcttgtgatcgctgcttgtatcaatccaaggcttcctatttctccaaagcttctgctctttcatctggggcatgtgggtatggctctttggcactagacataagtggtggacaccttgcagctggtgtggattctctcttcaaaaatggagcaggttgtggtgcctgctttcagataagatgcaagaacccaactctatgtagca

SEQ ID NO: 6585 - DNA, 257 bp, Glycine max
  Clone ID: 701098629H1
gttgttgtaactcgttctccttcttttgttgttctgtgtttgtgtttgttttttctctcacctgaaaatgtcttgctgcggtggtaactgtggttgcggaagctcctgcaagtgcggcaacggctgcggaggctgcaagatgtacccagacttgagctacactgagtcaaccaccaccgagaccttggtcatgggagtggcacctgttaaggctcaatttgagggtgctgaaatgggtgtgcccgctgagaacgatg

SEQ ID NO: 6586 - DNA, 261 bp, Glycine max
  Clone ID: 701098631H1
cctggttcccatcatggacgaattagaagaaaccctactcacccaattcgactgggaatcgttcctcgacgacatacctgtacttaacgtcgatgattttttgcaggacgacaacgccgttcctgttgttaccgacaatcattcctccccgaacgacgaccccgttttgtccgagatcgagaacatgctcatgacgcaggccgaaaacgacgctgtcgttttgcccgagacgccgtcttcggaggccgggtattacaagct

SEQ ID NO: 6587 - DNA, 263 bp, Glycine max
  Clone ID: 701098633H1
tcagcctccaccacgctctcctctcccttccttcgactggaattaccctccagaacaaagaaacgatcttcatcaattattcctgttccctccatccgagcctctgtctccgagaaaccaccgctaccggctgtgtcggttacctcccctgagccaagcaagctccccatccgcaaaatccccggcgactgccggttcccggtgatcggtcccttgaaggaccggcaagactatttctacaagcagggccgctacgagttctt

SEQ ID NO: 6588 - DNA, 255 bp, Glycine max
  Clone ID: 701098635H1
gagaaagctctgaagcacggtctctccatcttgaacgacctcaaacaacgatcctctctcggctccgatgaatggaccttgtatgagctggttgctgttgctgctatggactgccaatgtctcgacgttgccaaggactgtacaaaggttcttcggaagagattcctagagagtaaaagagttggtaggctggaggcaatgttgcttgaagcaaaaggatcctgggaattggcagacaaggcttacacaagcctt

SEQ ID NO: 6589 - DNA, 249 bp, Glycine max
  Clone ID: 701098637H1
ccgcttgttaaaccaaggtgattcctggtgaatatggtttcgttgcccagcttaacgagagtcgtcacctcaagaagaggccaactgaggtccgagttgataaggtccttcaaccctttgatgagaacaaattcaactttaccaaagtcgggcaataagaggtcctcttccaatttgaagctagcgaggatggacatgtccagttctttccaaatgctccagttgatgttgacaattctcccagctttg

SEQ ID NO: 6590 - DNA, 253 bp, Glycine max
  Clone ID: 701098638H1
agaaaatcctcacccattttcttcgtagccaaacactctgaaattctcagttatgtcgtggcaagcgtatgtggatgatcacctactgtgtgaaatcgaaggtaaccacctcactcacgccgctatcatcggccaagacggaagcgtttgggctcagagcaccaacttccctcagttcaaacctgaggaaataactgccatcaataatgactttaatgagcctggatcacttgctccaactggattgtatatc

SEQ ID NO: 6591 - DNA, 253 bp, Glycine max
  Clone ID: 701098639H1
gcgccatggaaaccataagctcatcgtgccattggttatttctttctagcaagtaccccagatgatatgagtgcaccgttaaccttcgttgttttgtatcaacttgaagatcagggtaattttgaagaaaaaaaagcttggagaagtggagcttggccactgaatatagctgcctggggccaatgatcgactcaagattagcattaagaattgataaagtggtacttgagagtgtgtctctttaaatttttgt

SEQ ID NO: 6592 - DNA, 252 bp, Glycine max
  Clone ID: 701098640H1
tctttctccactgcactaacgcattcttttctttcacctcttcttgtgtcttatttctacctattccaatttccagccaccatgtctggcgaaatgcataccgattccgcgtcatcgtcacgagccgccgccgcctctgatcagcgtcatcagcagccggcggcgtcccctctgagccggtacgaatcgcagaaacggcgagactggaacacctttggccagtacttgaagaaccagacacccccagtttcg

SEQ ID NO: 6593 - DNA, 256 bp, Glycine max
  Clone ID: 701098641H1
ggaatacaagacaccaaatctgattctgccaaaaatatgctgcctaacacgactgttgattcaataaccaaggaagaatctcgtcccccatcgccagttcccagattaacaaagacagaactcatctcatctgctttgaaacgccttggtgagcttgaagagaaggttgacatactgcagtcaaaaccaaatgtcatgccatatgaaaaagaggagctgctgaatgctgctgtttatcgcgtggatgcattggaag

SEQ ID NO: 6594 - DNA, 238 bp, Glycine max
  unsure at all n locations
  Clone ID: 701098645H1
gccgagatggcgtgcatcaggttatgatgttgaatccagtgcttcaagtgatgttattcttaaggccagtgctgctagtgtggcganagagaaagtatataagggacagacagttggcccagtcagatttcaaagtaaatttcaaaattatcttgatntgaanattgatgatggaaatattgatatataggactaaactcatgaacagatagattttcgatcaaagcctaggtttgat

SEQ ID NO: 6595 - DNA, 262 bp, Glycine max
  Clone ID: 701098646H1
ggcggtcgcgagagaggagtggcggaatctttctgaaaaatcgccgcaaagcgaagcgcaagtctcatattaactgcaacttgaactacgaactacgaacatcagggtagtgattaagaaaaaccctagcaatggggaagaagcagcacagcacagacagaatgttcatcaccacaacggagtgtgctacggagtgggtgaggcgctaaatccaaagaaaatcgcactcgcttcaaacgtcttcccttctattgctgctcgc

SEQ ID NO: 6596 - DNA, 261 bp, Glycine max
  unsure at all n locations
  Clone ID: 701098647H1
ctttactatagcagattgaaatagacagcaaatttttggaagcacagcacattatggattacagccttcttctaggtgttcactatagagctccccagcatctacgttctcacgtttcatacaactaaagaaatgaagtggatggantagcaatgcttgcagaggaagatcctctagaggatgaagtattctatccgcaaggccttgttctagttcctcgaggagagagtgatgacagtgttgttgttggctcacacatga

SEQ ID NO: 6597 - DNA, 263 bp, Glycine max
  Clone ID: 701098648H1
ctagaaagttagaaaacatggcagcggtggccggagcatcctcgtccgtgattaaggtggctgcactttccggatctttaaggaaaggctcttacaacagagccctcattcgttctgctattgagctaagccaaggtagagttgaaggccttcaaatcgagtacgttgatatttcgcctttgccccttctcaacaccgatcttgaggtgaatgggacctaccccccacaagttgaagcctttcgccagaagattctcgcagct

SEQ ID NO: 6598 - DNA, 260 bp, Glycine max
  Clone ID: 701098649H1
ggcgctgagagaattttttgacctgacgggggcgttcaatgtgtctgatgctcttccttatttgagatcgttggatttggatggtgcagagaagaaaatgaaaaagacggcgaaagagttagatgggtttgttcaagtttggctggaagaacacaaaagtaaaaggaatagtgaagctgaacccaaaagtaaccaggacttgatggacgtgcttcttagccttgttgaggagggtcaagagtttgacggccaggatgctg

SEQ ID NO: 6599 - DNA, 258 bp, Glycine max
  Clone ID: 701098650H1
tgcagaaataactgacaagcttggacttcattcactccgtcaacgccactggtatatccagagcacttgtgcaacttctggagagggtctctatgagggtttggactggctttctaacaacattgccagcaaagcatgagacatttgaaaaattttggtcttgtctggtgatttcatgcgagtctggcggttcttggagaaagatgcttatcttttctagcgaatgttgtaatagcagaatgcttgctagaagtattc

SEQ ID NO: 6600 - DNA, 249 bp, Glycine max
  unsure at all n locations
  Clone ID: 701098653H1
aaatgtccgttcgtttactattacgatatcagaactgngcgcgttgtggaattgcattggttttggggcacaaagcgtgaagagagagagatggagggttcagacgaaggagtagagatggttgtggattcgaaggacttgcagcaacagagcaaagctttcgacaagctcacagaccgcgtcgaggatcgccaactcgattcttcacgagtccaagatgccatggcatcaattgctgcatcttctgaa

SEQ ID NO: 6601 - DNA, 253 bp, Glycine max
  Clone ID: 701098655H1
ggattccttgcagcccttgcttgatttcctccgagctcacaaatacaagggccatgctctgttgttaaatgatagaatacaaaccatttccaaacttcagtctgcattggccaaggctgaggattatctctctaagcttgcacatgatacactctattcagagtttgaatatgtattgcaaggcatgggttttgagagaggttggggtgctactgctgaacgggtattggagatgatgcatctgctattggat

SEQ ID NO: 6602 - DNA, 251 bp, Glycine max
  Clone ID: 701098656H1
ggtcctgctcctggtgtccctcacagccacaccaagccttatgttcgagcaaagggaaggaagtttgaaagggctagaggaaggaggaacagccgaggatttagggtttgatgtgataaatagcgtgttattctctgaaattcaaattttccttatatcttagacagttgaggcagttttcttgttatttgtgttctgataatacgattttctgtatgaagttttcattcttggctcctttattctccaat

SEQ ID NO: 6603 - DNA, 236 bp, Glycine max
  Clone ID: 701098657H1
tctctgccttctctgtgtataaccccgtgacccttctcctcatttctcattctcttttgcttctcacaagacttattatcatcatcgtcataactattgtcactattactaaacttggtgtagaatgacgaaccgtaatgtgaataacacccttgtggagttggcaatgtcgatttcaaacacaagtgctctacctagagctacggtgcctgggctaatggccttgcttggtgggg

SEQ ID NO: 6604 - DNA, 257 bp, Glycine max
  Clone ID: 701098661H1
ctaatatggcagccaatgttcatgatgcaaaacgcaaactcatatctaagactttccgtcgcttgcctgacgtgagtgacagacaaacattcactggtccaccagacaatgtaagagctcatgtcatggctgccacgaggtttctcagcaagggagacttccagaaggcttttgacattattgtgtctcttgatgtgtggcaatttctgagagctcgagacactgtgcttgagatgcttaaggacaaaatcaaggag

SEQ ID NO: 6605 - DNA, 266 bp, Glycine max
  Clone ID: 701098663H1
gctcgacggagacttcagattcggtgccaaggttgcacacggcatagaatgcagcagagcacgtggtttcgcccgacgtgacgtgcgagacgcatgtgcagagcgaccccaagtcgcataacgatgattatcatctgggcctaacgctagacaacgcgtttgactttcagtttaattacttggacgataatcacctttccgtcgacgatgacccctttggcactgttcagtaccaaatgggtcacctctcgcccttgcaggacatg

SEQ ID NO: 6606 - DNA, 273 bp, Glycine max
  Clone ID: 701098664H1
tggaatcggctcgcctcgagcgaatcggctcagtcatatgcacaacaacacacactcaacaaaaatgatgcgtctaagctcgtattttgtcgtagccattgctcttctcttttcatttacaccttcttcgtcagcaaatactcatgaaaactttgttcaatgtctttacaattatccccataataacaatgtcacctcaatctccaacgtcgtttacacccaagccaactcttcatactcctctatacttgacttttccattcaaaaccttag

SEQ ID NO: 6607 - DNA, 190 bp, Glycine max
  Clone ID: 701098680H1
ctagaaagttagaaaacatggcagcggtggccggagcatcctcgtccgtgattaaggtggctgcactttccggatctttaaggaaaggctcttacaagagagccctcattcgttctgctattgagctaagccaaggtagagttgaaggccttcaaatcgagtacgttgatatttcgcctttgccccttct

SEQ ID NO: 6608 - DNA, 277 bp, Glycine max
  Clone ID: 701098701H2
gtcatataccgtgattttaaagcttctaacatcctgctggatgctgagtttaattcgaaactctctgactttggtttagctaaggcgggtcctactggtgatagaactcatgtgtctactcaagtcatgggtactcaaggatatgcagcacctgaatatgctgcaactggtcggttgacggccaaaagtgatgtctacagcttcggagttgtgttgcttgaacttctatcaggaagacgcgcagttgataaaaccataaccggaatggagcagaatc

SEQ ID NO: 6609 - DNA, 273 bp, Glycine max
  Clone ID: 701098704H2
ctcagaatggtttcatctctgcagctgagctccgccatgtcatgacaaatcttggggagaagctgaccgatgaggaggttgatgagatgatccgcgaggccgacgtcgatggtgatggacagatcaactatgaggagttcgtcaaagtcatgatggccaagtgaggaccattcaaccataacctaaatttgaaaagcatataaagagaagagggacagtgcagataagttttgatgagaattctatttccattaggtccatcttgatttgggg

SEQ ID NO: 6610 - DNA, 272 bp, Glycine max
  Clone ID: 701098707H2
ctttatttgagtggcaggggaaagctgtcacttggaattccaattttatgatttcaaaattttatccaatattgttcaagattgtcttatttttagaatgaagtgctgatgaatgttttgctttcttatgattatcgctattggtcaaaagtattttgcccatataacctaaccgaattgatcttttattctttttaggtctacaggtgttatatggattctgaaattttgttttcgcttgtctatatgaagttttgcttgattgagcttta

SEQ ID NO: 6611 - DNA, 269 bp, Glycine max
  Clone ID: 701098708H2
actcgagcgaatcggctcagacaaactcttgttcttactccactctgctctgctttactccaccattgccatggcccgccactcaaaccaaccagcacccggagctgaagggcaaggtgagaaggacccattttgtgagatatcgccgtctccttctccatcgtcggcgacggcgccggcgctggtgctgtcgaactcggggaagcgaatcgaccaggcggggaagaagaagtacgtgaagcaggtgacggggcggcacaacgacactg

SEQ ID NO: 6612 - DNA, 274 bp, Glycine max
  Clone ID: 701098709H2
gcagccgctgtcattgttggatcagaccccttaccagttgaaaagcctttgtttcagcttgtctggactgcccagacaatccttccagacagtgaaggggctattgatggacaccttcgcgaagttggtctcactttccatctcctcacggatgttcctggactcatctccaagaatattgagaaggccttggttgaagccttccaacccttgggaatctccgattacaattctatcttctggattgcacaccctggtggacccgcaattttgg

SEQ ID NO: 6613 - DNA, 134 bp, Glycine max
  Clone ID: 701098710H2
ctaatgcattgcatttatattacatcaaaaaccaatatagaaatacaatgaataagtattatctaatacactatatcttgatgtgttggggagtcgtaatccttaattagtttttcaaggcttccacacaacat

SEQ ID NO: 6614 - DNA, 272 bp, Glycine max
  unsure at all n locations
  Clone ID: 701098711H2
ggcattcggctcacctcngacgattcggctgaggaatcgcactcgtggagggtgctgagtctgttgaggaccagattgaagatgacgtggcggaaagagtggaggatgatcttggttacgatggtgatgacttctagagagtggtgtgatgtttcaggaggaggaggagaaaaaaaaaaaaccaaggaataataatattttaagtttttaaattgattttcctttttttcagtttctttggcgttcgagttatacctttaagggtttcctta

SEQ ID NO: 6615 - DNA, 267 bp, Glycine max
  Clone ID: 701098712H2
gctctttctgtcacacactcacattccggtgcaaaatgaaggtcatcgccgcctacttgctcgccgtattgggaggcaatgcagccccttccgctgatgacttaaggaccatccttggctccgttggagctgacgcgaatgatgacaacatcagccacttcttgtctgaagttaagggcaaagacattgcggagcttatcgccgccggtagggaacagttggcctccgtgccttctgccggtggcgccgcggtttccgtggccgctg

SEQ ID NO: 6616 - DNA, 283 bp, Glycine max
  Clone ID: 701098719H2
cgaattcggctgacgcttggccccggtggagtgcgaattggggcccctgccatgacttctaggggttggttgaaaaggactttgagcagattggtgagttccttcaccgtgctgtgactctcacactggagatccagaaggagcatggcaaacttctcaaggatttcaacaagggcctcgtcaacaacaaggccattgaagatctcaaagctgatgttgagaagttctctgccacatttgacatgcctggcttcctggtatctgaactgaagtacaaggatta

SEQ ID NO: 6617 - DNA, 268 bp, Glycine max
  Clone ID: 701098720H2
ctcgaccgcgggacatgatattctgatggctaccatgctgaatggagcagcaatcatgcatggagctttgctagtcattgctgccaatgaaagctgcccacaagcggaaacctctgagcatttagctgctgtggaaattatgcggctacagcacatgataattcttcagaacaaggtagacttgattcaagaaaatgtggctatcaatcagcatgaggcaatttcgaagtttatacaaggcactgttgctgatggtgcaccagtagta

SEQ ID NO: 6618 - DNA, 266 bp, Glycine max
  Clone ID: 701098721H2
gttaaagcatactggaccaggacttctatcaatggcaaatgctggtcctgacaccaatggctcacaatttttcattacaaccgtgacaactagctggttggacggaaggcatgttgtttttggtagcgttctttctggattggatgttgtttacaatattgaagctgaaggaacacaaagtgccactcccacgagcaaggttgtgattgttgacagtggtgaactccctctataattgtacttccttgattctcaaccaggaatag

SEQ ID NO: 6619 - DNA, 264 bp, Glycine max
  Clone ID: 701098722H2
gaaaggaataccaagattaccaccacaaagcaatgggcggtatactttctgcagttcttggcggcgacgcggcggcggcggcgtcttcgccggagagttctacttctagagtctcctccttccactcgtcgccgcgctggcagctctacttcaacgagatcaaagataccgataagctcgttgtgatagatttctcggcgtcgtggtgcggtccttgcaaattcatagagccagcgattcacgccatggccgacaagttcaacg

SEQ ID NO: 6620 - DNA, 266 bp, Glycine max
  Clone ID: 701098723H2
ggtgtttataatggacaattgtgaggagctcattcctgagtaccttggatttgtcaaaggtgttgttgactccgatgacttgccgctcaacatctctcgtgagatgctgcaacaaaacaagatcctgaaggtgatcaggaagaatctcgtgaagaagtgcattgagatgttcaatgaaattgcggagaacaaggaagattacaacaagttctatgatgctttttcgaagaatttgaagttgggtatccacgaggatagtcagaaca

SEQ ID NO: 6621 - DNA, 268 bp, Glycine max
  Clone ID: 701098725H2
cattcttctaagctctactaaaaaaagctacatagacacaatcgaaattatctattattattaaagcaacatggttttgtcatggacaaaagggagagtgttccggcgtgccagaacggctaaggcgttgaaatattctggtggcgacatggagatcgagattgcgctccccacccacttccggtgcccggtaaccttggacatgatgaaggaccccgtgaccgtttccacgggcataacctatgaccgcgacagatcgagaagtgga

SEQ ID NO: 6622 - DNA, 266 bp, Glycine max
  Clone ID: 701098728H2
cacttgtcccgccacaagcccttctgtaccaatcgatcttgctaactccccaatcgcgcaaaccacgcgtgacgccgatacgccctccgtggacaccgccacgtgctcaaacgcgaaggcgagaactgccacgtcctcgtcctagaccttgtggttggtcggctttccgtggtagaggtcgtcgttgtccatatagggcaggttgtcgtggatgagcgccatggtgccgttgacgagctcgcatgtggtgatgcagagcacggggc

SEQ ID NO: 6623 - DNA, 250 bp, Glycine max
  Clone ID: 701098730H2
gctggttcgtgaaattgctcaggacttcaagactgatctgcgtttccagagccacgccgtgcttgcattgcaagaagctgctgaggcataccttgttgggctctttgaggacactaacctgtgtgccattcacgctaagcgggtaaccattatgcccaaggatatccagctggcaagaaggattcgcggtgaacgtgcttgaggtggtggttgtgaagatgaagatgaagatgggttgctgcgggtggtg

SEQ ID NO: 6624 - DNA, 270 bp, Glycine max
  Clone ID: 701098731H2
ctgaaattagttggtggaaccttagttgaccataccttcttattcctgggtgctggagaggctggaactggtatagctgagctgatagctcttgagatttcaaagcagactaaagctccagtggaagagacccgcaagaagatctggctcgtggactcaaagggacttattgttagctctcgtttggactcacttcagcagttcaaaaagccttgggcccatgagcatgaacctgttaagagtcttctggatgctgtcaaggcaatcaag

SEQ ID NO: 6625 - DNA, 277 bp, Glycine max
  Clone ID: 701098732H2
ccagtctataaaccaccagtgtacaagccaccagttgagaagccaccagtatacaaaccacccgtttataagccaccagtttacaagccaccagtgtacaagccaccagttgagaagccaccagtgtacaagcctccagtgtacaagccaccagtatacaaaccaccagtttataagcctccagttgagaaacctcctatttacaagccaccagtttacaagcctcctatagagaagccaccagtgtacaagccaccagtgtacaaaccaccagtgt

SEQ ID NO: 6626 - DNA, 273 bp, Glycine max
  Clone ID: 701098733H2
gaattctgctctggaataccattgttactaccctcttcctgcttctgctgcaacagctgatcatcccaatcataatgatggtgaaacagaagaaacttgtgcagaggaaggtagctctcaacatcagcctaacacatcacagaattgtgtttcataccaaagcaataagcctcgcctcaacagatatgcacttggtggtgctatcttggcttccacaaactccatcctctcaggctatgatattggggtcatgagtggtgcttctcttctaat

SEQ ID NO: 6627 - DNA, 266 bp, Glycine max
  Clone ID: 701098734H2
ctcagaacaatatctttctctctctgttgtggcttggcctcttgctgtaagaagccagccacagtactgttgcgctcctgtggaaccatcgatgggctctaacaggttccacatcggttgagccctgtgtcagatatgccaatagtgttatccttattcttgtgatatactagtttgtatgatcatattttctcggattgtctagcaagtttagctcaattggacgttgaacgaattattataaatctattaagatgatcttcaat

SEQ ID NO: 6628 - DNA, 265 bp, Glycine max
  Clone ID: 701098735H2
gtttggtgcaaatggattccttagaagacagcggctgttgggattttctcgattactctttcatcgatcaagcgccccctgatttcctttggtccaataacaataatagtgtgagcaccgaaattgacattccaggtgatgctgttgcttgtcaagagaacaccaagaagaggggacgcaccgattcatgcttcaaggcgggatcaaaagcttgccgtgaaaaattgcgaagggagagactcaatgaaaggttctgtgacttgag

SEQ ID NO: 6629 - DNA, 264 bp, Glycine max
  Clone ID: 701098740H2
ctcgagcgctgaaaaaaaatagcttgttcacaccatcctattttttcaactcatatataccaatatatataacatggcttctaccttctctcgaagcctagcacttgtcagcttttacattgtcgtttgtgctgccggtaacttgaaccaagactttcagcttacgtggggagatggtcgtgctaaaatactcaacaacgaaaatcttctcactctctcccttgacaaggcctctggctctggcttccaatccaaaaacgaata

SEQ ID NO: 6630 - DNA, 264 bp, Glycine max
  Clone ID: 701098741H2
catacattgaactttactatatattcgccagtgtttggggccacagaatttacaccatctacagcatcctgttcattgtcttcatcattctcttgattgttactgctttcatcactgtggcattgacatacttccagcttgctgctgaggatcctgagtggtggtggagatcattcctatgtggtggttcaactgggttatttatctatacctactgtctgtattactactatgcacgctccgacatgtctggattcatgcaga

SEQ ID NO: 6631 - DNA, 265 bp, Glycine max
  Clone ID: 701098742H2
atccttgtggcgtgtgtggccactatcacaaatacgaagaaggggaagtgtgttcaatttgcggtcaccggattccggttggatcggagaaaacttcgatacaagtcagtgcttttccttccgttgtcctgccgggatttctttacctaggaagctacgacaatgggtcccgctccgagcttctcaagactcaggggatttctcgtatcctcaatactgttccttcttgtcaaaatctctacaagaactcgtttacctatcactg

SEQ ID NO: 6632 - DNA, 265 bp, Glycine max
  Clone ID: 701098743H2
cctcgagccggctcgagcggctcgaggcaccagtttcaccgcacagctatcttgttgtttacagcgatcccagaaaaactctgtaaacatgttggtttaccaggacctccttacaggtgatgagcttctctctgactccttccgttacaaggaaattgagaatggaatgctgtgggaagttgaggggaagtgggttgttaaaggagcagttgatgtagacattggtgcaaacccttctgctgagggtggaggagaagatgaggga

SEQ ID NO: 6633 - DNA, 256 bp, Glycine max
  Clone ID: 701098746H2
gtgtgcttcaattccatggctaaaccgtatgctccaagacgaaccctagaatcatactcagtcaaacacataagccaaaccagtagagctcgcgattgcatcctcatgcggccctccgatccgtcgaaaccgtcgtacgtagcgaggatcgagcggatcgaagccgacgcgcgcgcgcgatacgtgaagattcacgtgcgctggtactaccggccggacgaatcaatcggcggtcgacgccagtttcactgctcca

SEQ ID NO: 6634 - DNA, 271 bp, Glycine max
  Clone ID: 701098748H2
acccgagcgattcggctgagtttcgctctcacttacggctttcgatttgccaccatagaatccagcctcacacatgttctctgcttctatggaagggcgattatggagcggtatcgtgcttcttccaaaggcaaagaagatatccacacaaaattgatgaccagatacaaagacataccttcttggtggtttcattcattgctgctcgtgacacttctggtttctctcgcactatgtatctttctaaaggaccaggttcagatgccctggt

SEQ ID NO: 6635 - DNA, 265 bp, Glycine max
  Clone ID: 701098750H2
gcttcctcgctctacagcatcggcaagatccggcgtcggaacctcgacgctcccgtcgttaaccccaccgaccaagtactcgtgtccaagcacatgctcgaggcttctcttatggggtttgtgctggttctgtctttgctgatagatagattgcccattacatccgagaacttaggttactaaggaaggccatggaggctgctaagaaacagagtcggaatttcgaagatggtaaaagtgtcagtgcagcagagcacaaggcgtt

SEQ ID NO: 6636 - DNA, 264 bp, Glycine max
  Clone ID: 701098751H2
tggaggatcagaatcaaacaacacccttattaccaaacttcgcttagccaaagacacttccttctcttcatgggttctattggaattgagagctcgggacctgaggttgtcaccgttgatgtacatgcaaccaaggatctgatccagaccagtcatgtttatctggatgtcaggacggtggaagagtttcagacagggcatgtggatgcagagaagatcattaacgttgcatacatgtttaatacaccagaaggcagagtgaag

SEQ ID NO: 6637 - DNA, 265 bp, Glycine max
  Clone ID: 701098754H2
caacaacaagttcacctacaattgcgacgcacacaccttcaattacctcgtcgacaatggctacacatattgtgttgttgcagatgaatcaattggaagacagttacccatggcttttctagagcgtgtcaaagatgaatttgtgtcaaaatatggtggtggaaaggctgccacagctcctgcaaacagccttaacaaggaatttgggccaaagttgagggaacatatgcagtactgtgttgatcatcctgaagagataagcaag

SEQ ID NO: 6638 - DNA, 263 bp, Glycine max
  Clone ID: 701098755H2
cgaggagctcctcgttcagtatctatgccgcaaggtcgctggccaccatttctctcttccaatcattgctgaaatcgatttgtacaagttcgacccatgggttcttccaactaaggcgattttcggtgagaaagagtggtactttttcagccctagagacaggaaataccctaacgggtcccgacccaacagagtagcccggtcgggttattggaaagccaccggaaccgacaagatcatcaccaccgaaggtagaaaagttg

SEQ ID NO: 6639 - DNA, 265 bp, Glycine max
  Clone ID: 701098756H2
ctctacgctaattaaggttcattgggcattggcggattctatttccttttctcaaaacccaatttgcttcttcttcatggaagcactctccttcatcatccccaaagactcttgttctcttctccttcgcactccttcttcatattcctcttcgtctgtcagaactccgccgccgccacttgctttcttcaaaaccacccaacactctcactcgcctcaccttctccgtcttcgcgtttttgccctccctaaccccgacgccgat

SEQ ID NO: 6640 - DNA, 255 bp, Glycine max
  Clone ID: 701098758H2
gtcaaatctggatgttgtcagccatatttcctgtcactgttgaggtccttatagataggtatcttcaaaagccttatggcatcaatcttatggatgagctaactttgaagggtattacacaattttatgcattcgtggaagcgagacagaaagtccactgcctaaatactctatgtgctaagctgcaaataaaccagtctatcagcttctgcaattcagtgaatcgggttgaactacttgccaagaaaatcacag

SEQ ID NO: 6641 - DNA, 269 bp, Glycine max
  Clone ID: 701098763H2
agagtcctgagccctccaagataaggaagcatagcacatcacctgatcaaagcagcccacggaagagaggtgacccggctcctggcaatgataggttggccactctgcaagatgggtctgactacagtgatggtcctagagggaaaagtagaagccctgctagccctgcaagggaccatgatgagggcaactatgatagccctaaagctagtgggcgtaccacagccccagcaggagccctagggaagatgacaggagccccattgatg

SEQ ID NO: 6642 - DNA, 265 bp, Glycine max
  Clone ID: 701098766H2
ctcgagccgctcgagccgctcgagccgattcggctcgaggaagctttttctgttttctttccatataatacatgaaaatctctactgggagttgtgattttcaaccataattttagattattaagttttgggcttggggaaattattttgattatattcttagttctaaggtggggtgttaattaatcatccccaactttttctgatgttcagctcagctccccacttaaattcaattttttttgctgtctttttaaagatcttt

SEQ ID NO: 6643 - DNA, 264 bp, Glycine max
  Clone ID: 701098768H2
ctgctcccaaaggttctctttgcaaccttgatgtagaagttgatcttggcctaccccctgatgcagtatataatatagtgatagatcctgacaataggagagccttcaaaaatatcaaagaagtggtatccagaaaagtgttggttgatgagggtcataggcaagtggttgatcttgaccaagcagccatttggaaatttctctggtggtctgggactatatcaatcaatgttttggtagatcagaacagaaaagaccattctt

SEQ ID NO: 6644 - DNA, 261 bp, Glycine max
  Clone ID: 701098770H2
tcgagccggattcggctcgagctcgagccgttctaatctatcctatggttttatatttaacatcaggcaacaaagttcaacacagcatgaattcttggtttgaaatgatttgtcctgttgagaaatgaaacttctagtggaaatatatttgctctgtggcatgttgttcttgcacttaaagcctcacttttgaattgagtctctttgtagtaattgatgccttcaatgtttgagagatggctttgacattgatccttagtt

SEQ ID NO: 6645 - DNA, 259 bp, Glycine max
  Clone ID: 701098772H2
cagctggctggggagtggaaccacacctctggccaatggaatggagacgctaacgacaaaggtattcaaaccagtgaggattacagattctacgctatttcagctcagtaccctgaattcagcaacaaggataagacactagtcttccaattttctgtcaagcatgaacagaagcttgactgcggtggtggctacatgaagttgctcagtggtgatgttgatcagaagacatttggtggggatactccttacagtatta

SEQ ID NO: 6646 - DNA, 263 bp, Glycine max
  Clone ID: 701098773H2
caagaacataacattggatcttatggagctagaaccaaagataggaccggttcatgatcaatacgatgatcttgttggttctttttcttcttcttcttcttcaacatcatcttctgtttctggaatttcaagtgggtcatcattggaatctgattcttttgaagaagtaacatcctctgcctcctcttcttcatcatcagcagctgatgatcaacttgtagttgtagctgatccattgggtgacatggacttctctctttcaa

SEQ ID NO: 6647 - DNA, 259 bp, Glycine max
  Clone ID: 701098774H2
tgtggatgatcattctgttctgcttgctacttatgaaggggagcacaatcatcctcaggcttcttcccaaatggaagcaacatcaggttctggccgtagtgtgacccttggttcagtgccttgttcagcatctctcagcacttccactccaacacttgtttcggctgacttgacaaaatctaagggaagcaacgattccaagagcacaacacctaaaggagattcacctaaagtacctcaggttttggtggaacagatg

SEQ ID NO: 6648 - DNA, 261 bp, Glycine max
  Clone ID: 701098776H2
cgctctttgcaaacttggtatggtccttctatccatcaatccatccatagagactgatgatggagttcggatttctaatgtggattcttgttactcattgcataagcagcacaaaagatgagcttgtctcaagtgaagaatgacatagagattgctaaagtaaaatacaacagaaaaaaaaaagattgctaaagtgaaaattaaaagaaagacaagaggttttgtatggagaaaaacggtcaataagtggaagaccctaat

SEQ ID NO: 6649 - DNA, 262 bp, Glycine max
  Clone ID: 701098778H2
gaagaagcaagagctcgaattctacagattcattcaaggcagatgaatgttcacccagatgtcaactttgaagaacttgcccggtccacagatgatttcaatggcgcacaactgaaggctgtctgtgttgaggctggcatgttggctctacgccgtgatgcaactgaggtgaaccacgaggattttaatgaaggtattattcaagtccaagcaaagaagaaagcaagtctgaactattatgcataggctggattgtggaaca

SEQ ID NO: 6650 - DNA, 265 bp, Glycine max
  Clone ID: 701098779H2
gtcttcgccaatcgcctgcgtctctctctgaattgactagcttaaatggctggtcctaggattgcccatgctaccttgaaaggtccgagtgtggttaaggagatcataattggaataacacttggcttagctgctggtggtgtgtggaagatgcaccactggaatgaacagaggaaaaccaggaccttctacgatttactggaaaagggtgagattactgttgttgcagaggaacagtgaaaatgttcttgttttgttgcctatg

SEQ ID NO: 6651 - DNA, 265 bp, Glycine max
  Clone ID: 701098780H2
ctttcttctcattcttcatttcccatgttttctcactctgatctgcaaaaatataaatgcattaattgtctctttatataaaaatgttctatttaattacaatgacaaacaacgctctattgaccacgtcgtctttttcttctgctaaattctctttgtttcgaaaacccaatactttcactgtcaattccaatattttatgttcggaatcaaaacttgcccacaagcttaccaacctgacttcagaattcacctctctgacgca

SEQ ID NO: 6652 - DNA, 265 bp, Glycine max
  Clone ID: 701098781H2
cttagtttctctcttcacatatcatcatacttcagatagtcagatacatcacccaataattaaattaaatacatgctagcactttaacagtactcctttctctaatatctctctcatatcctcctttctgcggatattcagctaattaaactaagtccctaagatgactgagggaaagctagttgaagctgcagaagctcataagacacttcaggatttcgatcctccaaagaagcgcaaaaggaacaagtatgcttttgcttgt

(The sequence listing continues in the following parts.)
